United States Patent Application Publication US 2007/0061916 A1 - sequence listing, part 8

SEQ ID NO: 30960 - DNA, 238 bp, Gossypium hirsutum
  Clone ID: LIB3493-026-P1-M1-E12
gtcgaatcctgagtggaatcaggtgttcgcattttcgaaagataggcttcaggcttcattgcttgaggttacagttaaagacaaggattttgtgaaggatgacttcattgggaaggttttctttgatctcaatgagattcccaaaagggttccaccagatagtccactggcaccgcagtggtataggttggaggataggcagggacataaggttaaggggggagttgatgttggctgt

SEQ ID NO: 30961 - DNA, 426 bp, Gossypium hirsutum
  Clone ID: LIB3493-026-P1-M1-D7
cggacgcgtgggcttctcttcccttttctctttcttgcctctctgttcgcactgtcttcttcttcttcacttaacagtgacttgatttgtaatggattgttgtctttgagcttgcttttgttattaaacgaagaaaccctgcaagatttcagcctagggaaagatgagtatctgtcagtttctgttctttttctttcctttgttcacactctacactccaatgtcggttcatgcgaacacagagcttagatctttaatggaactgaaggcttctttagacccaacaaacaagaatcctcaggtcatggaaaagcgatggtgacccttggtagggttcctttgtcggtgtggcttgtaatgagcaccgtaaggtggctaacatttcgttacagggaaagggtctttctggtcaagtctcgcctgctt

SEQ ID NO: 30962 - DNA, 461 bp, Gossypium hirsutum
  Clone ID: LIB3493-026-P1-M1-D12
atgatttacagatttttttaagcacaaggtgggctattttattgaacttgcacgtggagatgttccgtgtgaacaatgtagaggatatccttcaggttcttatagtctttgctgttgagtcattggaactggattttgctcttctgtttcctgagcgacacatgcttctgcgagtgttgcctgttcttggtgtcatggcaacatcatcagagaaagatagtgaatcactgtataagagggtgaaaataaatagactgatcaatatatttaagaatgatccagtaattcctgcattcccagatcttcatctttcgccaactgcaattttgaaagaattgtcaaattacttccaaaaattttccagccaaactcgtcttctcactcttccatcacctcatgaactcccaccccgagaagcacaagattatcagaggcattatctgattgcaatcacattggag

SEQ ID NO: 30963 - DNA, 233 bp, Gossypium hirsutum
  Clone ID: LIB3493-025-P1-M1-H1
tggattgttaacaagctccttgctatgtctgctcttcacttggctcctgcttcaggctttcaactcatttagaaatggacgtaaatcaagccaacgcaagctcccacctggtccatgggctaagccaatcatcggcaatctcttcgatcttggggataaaccccacaggtcttttgctaagtttgctcagattcatggccccgttatgggtctcaaactcggcagcttaatca

SEQ ID NO: 30964 - DNA, 114 bp, Gossypium hirsutum
  Clone ID: LIB3493-025-P1-M1-H3
tggactattgtatgcatgacttacaaataccgtacctgataactgctagataccgaaaggataaactttatgcggagtctctagctcgtttcaaggtggatctgcatacatata

SEQ ID NO: 30965 - DNA, 429 bp, Gossypium hirsutum
  unsure (1)..(429): unsure at all n locations
  Clone ID: LIB3493-025-P1-M1-H8
atttaactctcccatcgcactagtttttctctcgttgacattaccataatcacactcaaaagcttccttgattttttttttttgttttgttttggcgatgcaaaggttaaggagctggtcgagtgacgttgtgcagcttgatctaagtccactgccaccaccacaacctcctccttcttcctcaaacaacacccccatgagcaccacagccatcagcggcgccggcttttccatagacgaggaggagccaacggaggcacgaatcaggaggttgatatcggagcacccagtcatcatcttcagccgctcctcctgttgcatgtgccatgtgatgaaaaaactcttagccaccaatcgggttcacccaactgtcatcgaactcgatgacccatgagatcgcttncctccctccgcctcctgcccacgata

SEQ ID NO: 30966 - DNA, 465 bp, Gossypium hirsutum
  Clone ID: LIB3493-026-P1-M1-A3
gctttgagaactttcttgttacggaagcttgacaatctttcaaaggatgacaaatgccaaataacaatgatttccacatgggccacagaactgtacctggacaagataaatcggcttcttttagaagatgacacagctttggtgaatcgtaattctgaatatcaatcaatcattaaagaattccgtgctttccttagtgactgcaaagatgttttggatgaggtgactacaatgagacttctagagagctatggaagagttgaagaactagtatatttcgctagtctgaaggaacaacatgaaattgttattcattactatattcagcaaggagaagcaaagaaagcattggaagtgcttcggaaacctgctgttccaatagatcttcagtacaagtttgccccagatcttattactcttgatgcttatgagacttgggagttttggatggcgtctaacaacctg

SEQ ID NO: 30967 - DNA, 401 bp, Gossypium hirsutum
  unsure (1)..(401): unsure at all n locations
  Clone ID: LIB3493-026-P1-M1-A5
gcaattcctttagtgaaaaagcaaagggtggtggaaatctgcgactccaggattccatttccgatgtacatggaaagcagaataaggagaatattaagcgtggcatcacgttgttcatctgacaaggaagagcaccgtccttcaatcggagaaatcattgtggcaatggagacttgttccattgaaccggtcagaagtataacagcctggaatagcgtcatacagtacttggttcaactcaagaggcggcgaaagctgagtggggaatattgcagaaggtcagccgtttattcaacccgacaagatgaagatgttaatagccatgtttcgacggggaaagtagtgctgctgaaggagatgttagcagatgttagattgaaatgangtttgttgaagctgag

SEQ ID NO: 30968 - DNA, 499 bp, Gossypium hirsutum
  Clone ID: LIB3493-026-P1-M1-B6
cttgaagtgaacgacgaaacctatgagagtattgccactatagctgaacgtagctgggcactgcaccacaagagagccttatcatcggcctgacatgggccatgttgtgaatgtgctatcacctttggttgagaagtggaaacccgttgatgatgaatcagagtgttactcgggcatagattacactcagccacttccccagatgttgaaggtttggcaggctgctgaaagccaaggcgtgagctatacaagtctggctgatagcaaaagaagcattccagccaaagcctgccggatttgcagactccttcacatcggttgatggtcgatgatggaaggtaaaacctacattctacacaaggaataagttccccatcttggtaccatgatatacatggttcagtgcttgagggctactttttatgtaatttgagttattttacttgtggtttttcaagtcgtggaacatgtctttcatggtagtgtagatagagagata

SEQ ID NO: 30969 - DNA, 403 bp, Gossypium hirsutum
  Clone ID: LIB3493-025-P1-M1-G8
gttccattgagctcgccttgaggtggttaagtttcatgggttcatcggggattagaacaaataatttcatagttaggcagttatttgaatcatgcatgaagaatggtttatatgagtcagcaaagcctctccttgaaaactatgtgaactctgctgcgaaggtggatctgattctttacacatcaattcttgcctatttggtacgatgccaggaggaacacaatgagagacatttgatggcaattcttggtgcaacaaaacacaaagctcatgcctttatgtgtggactacttactggcccagaacagagaaaacagccagttttaatcgttggtggaggagtttttcaaggtattgattacgagttggaagaaggggcttgcaggtactttgtcaatgttct

SEQ ID NO: 30970 - DNA, 217 bp, Gossypium hirsutum
  Clone ID: LIB3493-025-P1-M1-G2
ccctgtcattgtttccacagggcagacttatgaacgttcttgcattgaaaaatggctggagcaaggtcatggaacgtgttccaagacacaacaaacccttaatagccctggttttacgcccaattatttattgggtagtctaataactcaatggtgtgaggccaatggcattgagccggctaaaagaccccggaggtctcgatccaataaaaccaca

SEQ ID NO: 30971 - DNA, 389 bp, Gossypium hirsutum
  unsure (1)..(389): unsure at all n locations
  Clone ID: LIB3493-025-P1-M1-F7
cggacgcgtgggcttcagtcgagaatgaggccaaggttagaacaacatcattgcccgacgagagtcttttaaggatgatctccaccttctctgcctccggtactgcagatccagacgccttgagcaacgcgcaggtattctgtattttagcaacatattatttgacagacattacccctttcttgagcatcgagattcggagttaaaaactccatctgaagaagagacaaatcaaggcaaagcaggtaacgtcccttctaaatatccnagcagttcatatccttcaattattaatcggatatgctgttgccattgcacaaaatttccttcatccaactttaccgtatcatgacgaggaaacgtctgaaccaaacgagagctggagaacg

SEQ ID NO: 30972 - DNA, 167 bp, Gossypium hirsutum
  Clone ID: LIB3493-025-P1-M1-F1
atttttcgatcgatgcccaaatagaaaaacacaagtttgaaagctattactcaaatcttgataatcggaaatgtaagcttgtatctctgatttatctgcccatttactctgtatttttttaataacagatctcgcatcaactttaaccttcactttcctaacctcca

SEQ ID NO: 30973 - DNA, 295 bp, Gossypium hirsutum
  Clone ID: LIB3493-025-P1-M1-E12
gctaactggaactatcccagagcaggttgggaatctcaagtccctcactagcctttcactgagtagcaacaagtttataggtcacattccagcatctatttcaagattgcagaatctctggtcccttaatttatccagaaatggattctcagatcctttaccagatgtttccaacaggggcattccttcacttttgtcaatagacctatctctcaacaacctcagtatgtggacagttcctaagtggatcacatacagacagctttcagatgttaatctagctggctgtaaactg

SEQ ID NO: 30974 - DNA, 354 bp, Gossypium hirsutum
  Clone ID: LIB3493-025-P1-M1-D8
agaagatggaggttgattcagttccagcagcagctttggaagggttttcaccagtctctacaactaggattttctggaattccaggaaaagatctgctagcgggaggaatttagacaaggtaacagaagagactgctaatgtgacacccaccaaacaggaagaacaaactcttgatcaagacaatacaccagattccgctacctcgtctgaactttccgagcgtcggaaggctctctttgagccactggaacctattaaaaacatcaatggccggcgaccgtcagcagagtctttgcttcccccaccagacttcgatgctgcgagctatccaaagggctggctgatcggaaaga

SEQ ID NO: 30975 - DNA, 155 bp, Gossypium hirsutum
  Clone ID: LIB3493-025-P1-M1-D5
agggaataaattcataggccaccatgactcgctcgttcaactttctacccatgctcctgttgcttactttatcaaccctgactggccaaaaaatttcaactggaccttcctggactggaagtggcataaaaatacttccattgctaactttctgt

SEQ ID NO: 30976 - DNA, 353 bp, Gossypium hirsutum
  Clone ID: LIB3493-025-P1-M1-D10
atttgattgcacatacattattgaatcagttcgaaagtaccatgcaacctgattaagctgcaaatgtgaataatcaaccagttttgctcattagatggccaagcacctggaaccggccattatccactaatgcattagaggctcttgaatgtgacatcttaagtaccaagaggaagcgaacggccacgtagacttctcatattaactgacaaagaattctcagcaagccggttgataatgctcacttttaggaagcaaaaggcgcgggcaactccacagtattatttgggaagtgttctcacatcgtctgttatgagtgccattttgagaattggtgcagatgcaaaagaata

SEQ ID NO: 30977 - DNA, 371 bp, Gossypium hirsutum
  Clone ID: LIB3493-025-P1-M1-D11
cggcgagcctctatctcggacctactatattctatcacgtaaccctacttacctaccaaccagccgaccaaccaactaatccgatggccaccaccacccagaaacccgtcgacggcgcaacctccactcacacccccacgactcctgcatgcgtcactctcgccgccattttatctgcagaaccaaaccctacgaagatcgtgtcatccttcacggataagtgtgatcctcctaacgctgagggatctctgaaggagagtgggggttcgaagaccaccgggactactgtgggctcggtcgtcggcgatgaaagcggtcccgttaacgatatgcagaagaagattcggcgagctgagcgggtcggcgaacct

SEQ ID NO: 30978 - DNA, 328 bp, Gossypium hirsutum
  Clone ID: LIB3493-025-P1-M1-B6
ctttcgtgaggttgtttacactaatcctgtgtcattgggtaagaagttttggaagcacttgtctgtggttttcccatcacgatctaagagagagcttgtcagctattatttcaatgtcttcatccttcagaggcgagctgttcagaacagatccagtagtctggacatcgacagtgatgatgatgagttgtgtggaaatcaaccgtcttataaagttcaagctttagaggaagatgaaaactctgcgcatgagtctcttgcttgatatgaagatcaagccaatgatgatgaccaccatgattgtgatgattgatagtgtgactctgat

SEQ ID NO: 30979 - DNA, 351 bp, Gossypium hirsutum
  Clone ID: LIB3493-025-P1-M1-B3
cggacgcgtgggcggacgcgtgggcggacgcgtgggcggacgcgtggggaaatgggtccattaacatcagcaatatattgactgggaaatgccttgctaaaataagggctagtaacggtttcccagtggaaaagcagtgtagctgctgtgatgtcgagtgtggctgcaggtcaaaagtgcacagcagttcatctagaattagaagcacggtggcagaagcattggaagatatcactgctcttttttatgatgaagagcgcaatgagatctatacggcgaataggtatggtctagttcatgtgtggtctaactgatggtatgactttcagtagggaatttatgtagtttgac

SEQ ID NO: 30980 - DNA, 201 bp, Gossypium hirsutum
  Clone ID: LIB3493-025-P1-M1-B4
cggacgcgtgggttcagattcaaaaagcaaaccaaggctgcaattatcgttcaggctgctttgcgttgccatcttgcttactcttattataagagtctccagaaagcagcactaactactcaatgtggttggaggggaaggttgctggagagagctaaaagctgaatgccgccagaacaggcttgaagacaaagcaactga

SEQ ID NO: 30981 - DNA, 110 bp, Gossypium hirsutum
  Clone ID: LIB3493-025-P1-M1-A5
caactgctgagcgggtgaaatcttttcaaacagatgaagatccttcctttgtggagcttgtgtttcagtacggtcggtatttgcttatttcttcttcacgacccggaact

SEQ ID NO: 30982 - DNA, 176 bp, Gossypium hirsutum
  Clone ID: LIB3493-025-P1-M1-A7
actttcctctaattcaatctaagcacgctctcaacatgataccatcaagagcccaacggcctttacctattgatattctatctaacttacgacactctcactgagtctaagaaacatattctgatgcatatcaatgggataccggttctcaataaattacagctgctggaaatgga

SEQ ID NO: 30983 - DNA, 305 bp, Gossypium hirsutum
  Clone ID: LIB3493-025-P1-M1-A11
gcactgcaacaccgaagatgactgcatccaacttacaaggttaattccgtcaacagaagctgccttacttgactgggccatcaacttaatggcagatgttgtgcaacacgaacaatacaacataatggacgcccgatacatcgcaatggttttgcaccaacatgactcagatggctgatccttgcggcatgattatgctgtcaagtatgaattctaaaacatgatctgagacatacgagaagggagagtggctgcaaggcaggtcgtccatcgactcgactcactactgcataactgcatcatac

SEQ ID NO: 30984 - DNA, 509 bp, Gossypium hirsutum
  Clone ID: LIB3493-025-P1-M1-A12
cggacgcgtgggcagaactctcaaagaaaaaaaaaactagagatccctttggatcgtagcaaaatcatgagtgcggattggggacctgtgtttgtggcggtagggttgttcatcctattgtcgccagggctgttgttccagctgccgtcgaggactcgagtgatagagttcgggaacatgtgcacaagtggaatagccatcctcattcatgccataatatacttctgcataatcaccatcttggtcattgcagttggtgttcacatacacatcgaatgatctattaaaccctcaaacacaaggctaagcttttcttattcctttgatgttctttttactctctttggaatgactattgccgacggaagttttcatttctaacaatattatttctgatggaaaatctcggcggtaatagttttttacctacagaaattccataggaaataataatttcgtctggaatatttttatcagattgatcattatgatacttaaggagggaattt

SEQ ID NO: 30985 - DNA, 364 bp, Gossypium hirsutum
  Clone ID: LIB3493-025-P1-M1-A2
gacccacgcgtacccacgccttcgacagagcataatgtctcatgctcgcactttctaacatatgttggtgctatggctggacgtgttattactgtttcaggaatattagactcttttatataccatggtcataaagcagtcgagaagaagagggaaactggcatatacagctgaagatatgaggctgctgctatcatgttccggtgagaggtgcttggggaaaaatcaaactaagcgagaagagcacgcatcagtgtaccgtacagtattcctgttcagacagatttcttggtgatcatgaatatggttgaattgtaatgaggtcatagttcatttacaagtcttagctgtctattacactgac

SEQ ID NO: 30986 - DNA, 198 bp, Gossypium hirsutum
  Clone ID: LIB3493-025-P1-M1-A3
ctttgatcttggttactgtcagggtatgagcgatctgctatccccgattatatttgtaatggaagatgaatcagaatcattttgggggttcctggcattgattgaaccccctggtcccaaatttaatcgtgacccaaattggcttcactcttaactttttgcattatcttaactggtggagttggtagaatccccaat

SEQ ID NO: 30987 - DNA, 300 bp, Gossypium hirsutum
  Clone ID: LIB3493-024-P1-M1-H8
ttaggctccagttagtgatcgagaatacagggcaactcttcctgaaacagctgctatgattgacttggctacaagcatgataaaggaaggtctgggttcagacttaatgcctaaggaagcagatccatcccctataactgcctatagatataactccctttgtgcctacatgggggatgatgacatgttcagttcagaccttaatgagcaccagcttagaatgagacttggacacatgtctagcactccttgccaggttatcttttccatggatgatgaatatgtgccagagtatgttga

SEQ ID NO: 30988 - DNA, 338 bp, Gossypium hirsutum
  Clone ID: LIB3493-024-P1-M1-H2
aagagacccaacccaatggcttcgtctctgccttcatcttccattgctagaggcggcagtggaataatcaccacccttcatccagatataatccgagctctcatcctcacgcggctggatggtcccgacctggcttccaccgcctgtgtttcctcttatttacgttccctatctacagaagaaaatctctggcgtgacatttgttgttccacttggccttctctcgatcacccacgtctgaaacaagttatctccacgttcccttccggttaccgctccttcttctccgaatcatttccgtttcctaatctccaaccaccgaagcctaacgtcaggcg

SEQ ID NO: 30989 - DNA, 415 bp, Gossypium hirsutum
  Clone ID: LIB3493-024-P1-M1-G8
gaagaatctaatgaggaaggagcttcttctatcatgcttgatcaggtacttgatcttttgagccgaaggtgggatagaatcaatggagctcaggcacttagactgttacccagggagactaaactacagaacttgcttccatttcttggacctcttctgaaaaaatccagtgaagcatacaggaacttctctgttatcaagagcttgaggcagagtgaaaacctacagatgaaggatgaactctacaaccaacgaaaagctgtagtgaagatatcgagtgacagtatgtgctctctctgcaacaagaaactgggaacaagtgtatttgccgtttatccaaatgggacaacactggtcccactttgttgttttagagattcacaaagtatgaaagcagtatccaaagtctcacaac

SEQ ID NO: 30990 - DNA, 449 bp, Gossypium hirsutum
  Clone ID: LIB3493-024-P1-M1-G12
ggttcatataggctaaacaagtaaaagaacagatctacagagcacgaagatgaggaacttcaacttcttccggagattatccagggcttttgatgattatccttctctttctaagatcatcgtcgtctcgactatcagtggtgggagccttatagcttatgctgaagcaaacgctttcaatggcagtaagggccatattgctcatgctgatgcggtggcatctaatgatgaccgtcgaattgcttcatctgaacaagttcccaagaaaaagaaggtggtgctgcttggaactggttggggaggaatgagtttcttgaagagcctgaataaccctaattatgaggtgcaagttgtttctcctcgtaatttctttgtgttcaccccattgctaccaagtgttacatgtggcaaagtggaagcccgcagcattgttgagccaattcgcaaca

SEQ ID NO: 30991 - DNA, 503 bp, Gossypium hirsutum
  unsure (1)..(503): unsure at all n locations
  Clone ID: LIB3493-024-P1-M1-F7
caactttccaaaatcaaaccctatcaattgtcattatcccttccagaacattgtcacagcatccacccccagttaggttctctcagtctccttcttcccacagtttcaacaatgaaatctggtactcctccttccagagctttaactgctgtcctaaaagcaatgcttggagacaagcataaacttccaccgtaaaaggcgacgcaaccaccgtgtggagaatcattttagaggcaacaatctcacccaatgcgtttctagcaacaacccccgaacccggtctggcttgtgtttgattgaaggaagcatcaaagttgattttgatcaacaaatttgttgaggggttccattcctcatttccttccaatctacccatatggagcaacagaacgtcctgcattacttggccgtacttcttctaaaaatccagagaaaatgaataactccatggaaatagaagatgagaacattgagaagacanagattagtcttatgagaatctt

SEQ ID NO: 30992 - DNA, 451 bp, Gossypium hirsutum
  unsure (1)..(451): unsure at all n locations
  Clone ID: LIB3493-024-P1-M1-F11
aaagaatccaaagcctataagaaatgggcaaagaaagtagccgagatgaagccacccacgagtcccttgaggaggaaggggaaatcaaataaacagccagaatcagatctatttgcaattatatctcagcgtcgaaatgagaggaaagaccgatttgattccatgttttcatcactggtatccaaatatgggggtaacgcagagtctgaacccactgaagaagaatttgaagctgcgaagaggaaagttgaaagcaaaaaggcctccaacaactcaaaacggaagcggcagtaggtctcacctggattttattgaagttggatgtgatgagaattatgcaaaaatgcatgtctttcaagtatatgaatgcaaattgcgttatatgctctaagaaacgtgagatgatgctnttgttgtagttacttaaaaaatgaaagctcatttgcactta

SEQ ID NO: 30993 - DNA, 341 bp, Gossypium hirsutum
  Clone ID: LIB3493-024-P1-M1-E3
gtctgaagatccccacaaaggtagcatttatgcggccagctggagtcctgatggtgagcaggtgctgacagtatctgctgataagactgcaaaagtatgggatatctctgaggatggtagtgggaagttgaagaaaacattgacatgttctggctcaggtggagttgatgatatgcttgttggatgtctttggcagaacgatcatcttgtcactgtatctctaggtggcacaattaggatattttcttctagtaatcttgaaaaatccccactccagttatctggacacatgaagaatatcacttcattagctgtcctaaaaagtgacccaaaatgtatac

SEQ ID NO: 30994 - DNA, 439 bp, Gossypium hirsutum
  Clone ID: LIB3493-024-P1-M1-E10
cagcctcccaggctgtccattccctactcaccagcattcaagagtggggcgcttccattctttgccataacccaacatttcttctctacattaccctccaagaatcaccagccgctccttaaatctacaccccaaagttcggcacttcctgttgttccccttgatggtaaggaacataatgttgaaacagtgaacaagcagctaccagaaggatcccaacaagaagacaagagcttctggggtgctgttagtttgattattggtacggctgtagggcctggaatgttgggtttacccgctgcaacgataatatcaggtccacttccatcaaccgttgccattattatttcttggggttatgttatttcctccatcattcttattgcagaactaagttttgcagtaatggaagaagaggtgtagccgagtgagcttactg

SEQ ID NO: 30995 - DNA, 505 bp, Gossypium hirsutum
  unsure (1)..(505): unsure at all n locations
  Clone ID: LIB3493-024-P1-M1-D6
atcgcactgtgcaccttccgacccagttcttgacccattgctttatttgtgggctccgcgctgacattaaacactcagttttggtccataaaccagccactttgcctgaggccatgcatctagcctagctccatgaacaacgcattcagctggaacgtaggttgcttaaacccagcctgggtggttccaaaccattattaccaactcccaaacaatctcctggtacttcagtatcttctccttccactccaacaacaaccgcaactttgcccaatggtaaccgcgttccgtttcgtcgccttactcctactgaggctgcccaccgccgttcacagggcctttgttatcattgtgatgagaagtacgagtggggacacaaatgcaaagcaaaatcccacatgttactcttagaggaatagttcgagccacctgatgctctcgcgcctgaatntttatcgccatcttcaccctttgtaccgattcaccacacttgacaccatcttac

SEQ ID NO: 30996 - DNA, 182 bp, Gossypium hirsutum
  Clone ID: LIB3493-024-P1-M1-D10
aagacgcatggtgaaaatatttctcaatgaaccccattctcattggtgtggcaataacttagattttagctctcatcaaaaatttcttttctcactgtgaagtccccttcctaatattacttatgtaactctatcaaaactctttactttttttgcaaatctgaaattcattattttttcac

SEQ ID NO: 30997 - DNA, 452 bp, Gossypium hirsutum
  unsure (1)..(452): unsure at all n locations
  Clone ID: LIB3493-024-P1-M1-C7
ctttccccttttcttatccctctcgtaaaagcacatttttcctgaaccgtgtatatatatgtatgtggctttaaacttcaaaaccagacatccaagaacaactcaacttttttctattttcagacagtgattgttctctaaaagaaatgggtaggtttcgtttgttttggttattgtttgtttgggtgttgggaattgagaggggtgtatcaggtttggcctgttaatggaggttgctgncgattcattggctgacccgtaccatacccgccacgagtgtactctcctcttaaccttccaattctgtgacgtaattttcctattcgcctgctctcttggatctacggatgcagtagaatttacggttgcatggatttacacgtggaagccagtctctttcacttgaacgatctcagccatactcaaggttgttaagcgcctttttataacct

SEQ ID NO: 30998 - DNA, 111 bp, Gossypium hirsutum
  Clone ID: LIB3493-024-P1-M1-C4
gtggtgtagagcaattagtgcttgtaacacgaaacttacctaaaacggagtgcggacagactaccagagcgtcaggctaaacatatatatcacctacttataatgcaacag

SEQ ID NO: 30999 - DNA, 367 bp, Gossypium hirsutum
  Clone ID: LIB3493-024-P1-M1-B11
atcacaaaagcaactttcaccgaacacattacaacagtaaaaaaaagacatggatgatcaagagaaagctgatctagaacgcattttcaagcgattcgatgccaatggggacggcaagatctcatcagcggagcttggggatgccttgaagacgctcggatcggtcacgccggaagaagtttcgaggatgatgagcgagatcgacaccgacggagatggctttatttcctatgacgagtacattgcattcgcatctgccaaccgtggcctaatgaaagatgttgctaaaatattttaatttttttttattataaatcatttgcaaatgattcactaattagtgaaatttcaattttttttactcgag

SEQ ID NO: 31000 - DNA, 364 bp, Gossypium hirsutum
  Clone ID: LIB3493-024-P1-M1-A7
tagctcattactttgttgacgcccttgaagcacgcttagctggcactggaactcaaatttatacctctctggttgctaaaagaatgtcagccgctgatatgttgaaagcttaccaagtttatatttcagtctgcccattcgtgaaggtgcctattatttttgcaaacaactacatttcgaaggcagcagagaaagcaacaaagctccatatcatagactttggtattttttatggttttcattggcctgctttaattcactgcctcgcaaacagaacctgtggtcctccaaagttacgcattacgggaatagagtttccccaccctggcttccggcctgctgaaactgtgcaggagacggggcg

SEQ ID NO: 31001 - DNA, 174 bp, Gossypium hirsutum
  Clone ID: LIB3493-024-P1-M1-B1
ctgacgatttgtgctttttccagattagatccaacatctccttttcatcgtactgtgggattcttcaacttactccagccgactatttcaagcaaaactgtgtcagatctacatgatctataaactgacgtcccattagcagtccgacgatctaatacttcgatcttatcactt

SEQ ID NO: 31002 - DNA, 319 bp, Gossypium hirsutum
  Clone ID: LIB3493-024-P1-M1-A6
gcaaaagctcaatagaagttgtaaaacatctgcaagagctcaaagaattgcatctagttttagcctgaatatgacactggtgtaaggaatgttgccacgcaattgacagccctggtggtttggttttggctatttcagatgtctggcagaagcttttataaaaaaaaaaacacgtgattgaagccatgaacctggtgcatctgcaatttaacatgggacaaaagtgtaagaattttatgttttcaactgtaaagctgtagttaaagaaaatgtggtcattggtagcaggtgagaatatttcttaactggttacaagagt

SEQ ID NO: 31003 - DNA, 232 bp, Gossypium hirsutum
  Clone ID: LIB3493-024-P1-M1-A10
atccggagcttctctaggtgtctaaaagaatggactatattcggggcgggattttatattatatgactgtgtggaccccttcatactttaaaccctatctgaagaaaaaaaccgtaattttcttgcaaaccgaacaccttgtttaatttatcttcagtcaatctccgacataaaaaaattcactaccagatgttgtttccacagcatcaagcctttattcaacaaacttttt

SEQ ID NO: 31004 - DNA, 235 bp, Gossypium hirsutum
  Clone ID: LIB3048-001-Q1-L1-A9
cctttctctggcttctactcattaatcaaatatccgggtcggtccttccttttccaaacaacttcatttctctcttcttttgggggaaacccaaaattattggcatggatttggatctatctttggtataaaattctttcctttatacatatttataacaactttcaatttatttccctttattttccttcttctgggaaataccatgggaaacaatcgaagtagcggttcacat

SEQ ID NO: 31005 - DNA, 332 bp, Gossypium hirsutum
  Clone ID: LIB3048-001-Q1-L1-C1
gttcatggttcatctgcggcccatataaccggcccggcttcttctgacactaatgctgctgcagtaggcacttcctggtctaggagtccaactcctgatccccaactggttgcaaggcctcctagtccttgtttgaccccaattggaggaggcagagtcggtaactcagacaaaagaaacttaaatagtccaagcacgtttggtggtgtctcatctggtgtcagtgagtctgcagatctggtttgtgctttgtcaggcatgaccctgtcatcaaatggtgcaccagatgaagataataggttaccatcccagactgaacaagatgctgaaaa

SEQ ID NO: 31006 - DNA, 136 bp, Gossypium hirsutum
  Clone ID: LIB3048-001-Q1-L1-D4
ctctagtactagtggaaccccccggccggaaggaatccgccccgagcaaaatttcactcccttttcagacctcaaaccgcaggggcctttcgaaaccatctaaggcatgctagaattgcctaccccaaagctcggc

SEQ ID NO: 31007 - DNA, 316 bp, Gossypium hirsutum
  Clone ID: LIB3048-001-Q1-L1-D5
cgggatttctcgggattgtgatggggtactacggcgggccattcggccttggaaatctatacgtgaatctatattagggcgtcacattgaacgccttatccgagttgcctgcgttactcattacattcattcttataggagaaatgataaggaatgactcattgcagggcctcacaatattaagcggagtgtgcagcgtgaactgtgtggttgagcggatagtgtcaccaagcatacatatagccttgaagctgatatacttcttcaatgcctgctcggcctgcaacatgagattgatatgcacgtcacagctgat

SEQ ID NO: 31008 - DNA, 321 bp, Gossypium hirsutum
  Clone ID: LIB3048-001-Q1-L1-E10
ctcaatttcacaaagtgtttcttcgtcgggagtcggagagggagtccctagggaacaattaaagaagaacccgaaaaaaaaacacagattaagacagaagcatgggcaggcaggtcgtaagaacaaagagagcttgggtcgggggtggcaacggattcggtggctcaatgctggtcaagttggtgctcgagaaagggtacgccgttaacactacagtcagggaccctgacaaacagaagaagaactctcaccttgtaacactacaagagttgggagacttgaagatctttcaggcggatttaactgatgaagggagctttg

SEQ ID NO: 31009 - DNA, 412 bp, Gossypium hirsutum
  Clone ID: LIB3048-001-Q1-L1-E9
tggaggattccggaacaacccgaattcgccaccggatttcgaataaagactggcgggtaattacatgagcgttaagtctaaaaactttactaaaataaaaatggattaaagttttgggttactgatgagtattatcctataattgaggcgcaatacttgagatgagaaaactcttaccaacaagaagcaaaactactaaatttaattgagaaagagtagaaaaaatatggaactgaatgattacagcatgccaacgacttcaaacaaacaacctctaatgatttccacttacttcttgacttttctatacaatttgttgacctaaattttcaaccgtcgacgaagaaatcctttcattcattgcctaattccaatgaaattctaaagggtttccaaacacaaagtgcttaat

SEQ ID NO: 31010 - DNA, 275 bp, Gossypium hirsutum
  Clone ID: LIB3048-001-Q1-L1-F11
caacacagttaaacagaccaaaagattttttatggccggtggttcaagggcccattcaactatcttctctaaaaccttcctttttcaccgcataaatgggttcaaacgcttttctttttgcttacccttttcttcctctgccggtgcttctctttcttctaaaaaaaaatgggaaacaccccgtgctttctgcatgttagagcttggtggaaatcaaatttgccaaagatgatgtggtgagggatgacccgacaaacaatgttcccgacacaatt

SEQ ID NO: 31011 - DNA, 347 bp, Gossypium hirsutum
  Clone ID: LIB3048-001-Q1-L1-F9
gaacaactttcagctgaaacagccggtttcttcaacatgggttgagggttgaagaaacacttgaagaggcttaatggccccaagcattggatgcttgacaaggttggtggtgcattcgcgccaaaagcattgtctggaccccacaagtcgagggaatggttggcacttaatctcaatctgggaaacaaactgaagtatgctttgacctacagagaagtgattgctattcttatgcaaaggcatgttatgggtagatgggaaggttaggactgataagaccctaccctgtgggtttatggatgttgtgtcaatttccaagacaaatgaggactttcgtcttctttatg

SEQ ID NO: 31012 - DNA, 166 bp, Gossypium hirsutum
  Clone ID: LIB3048-001-Q1-L1-G1
ctggaaggattccggaccgaggcctttatttccgggccaaaggttgtcaaaactaagggctttcttggaaaaaaggctccaggtaaaaacccacccggcttgggggttcttccccttggccttcattaaacggtggttccttacaaaaagctgttttattaaattc

SEQ ID NO: 31013 - DNA, 321 bp, Gossypium hirsutum
  Clone ID: LIB3048-001-Q1-L1-G11
caggccaaaccgttccctttgacttaaaagttaaaacttggggggttagaaaagaaggtttcttaatcttggcttaatcaaattagggtgttaaaaaaggccattaaacttgaacttggctttggccaaccaattgctggaacctttacaagcgtttgggaaatggactttaataatgccaagcaaaggttgaaatctgcttatgaatggagggaaagaccagggaatttcaagggggcccaggtttcctcatcttttgaagaaaacaaggataattatgtgtcagctcaagtggtgaatgagtctgttgaaactggaagg

SEQ ID NO: 31014 - DNA, 177 bp, Gossypium hirsutum
  Clone ID: LIB3048-001-Q1-L1-G3
cggaccagaattccatttggttggaaaaaaaaaattaaccggttggggtccaaccaatcctgggccttccttggtttggaagggttccaaaggattcctttcttaaattagtgaccttttaagggcaactccttactgttgttaaaattgtgaaccttattcctgtcattaaagcct

SEQ ID NO: 31015 - DNA, 328 bp, Gossypium hirsutum
  Clone ID: LIB3048-001-Q1-L1-H10
gggagctttccctgccaaaatctaaagatttcttggggggtttcccaccaaaaggggggatgggacaatttccttggctgatttgtgggaactggacacaacccaaatattagcaccgcattcttacctagcaattgtagtgggcatgaaagatcccagtttgatgcaccagtggtaaaaaaactttatctattttgggtcatgatacacgcaagctggttcaattagccactctgatatctctcatgagaattggtttagtagatattgacaaaaatgtgagaagctgtaattgcatgtttcatagccaattaatgagtgggagaaa

SEQ ID NO: 31016 - DNA, 380 bp, Gossypium hirsutum
  Clone ID: LIB3048-001-Q1-L1-H11
cggaccaacccccttttcccttggtttcttcgcccccaatggttcgttcctctcttttatattctccttcccactttctctttcttttttaccttccattttctctccctttccctttttccttcccattatgaaaaaaattgctacaggtttctcaactttcaaagtcccttgccaaccctttccttttaacacccctttttaaaaccacccttttaccattcccactattggcttaacctttcttggatccacccccaaacttattcgcctttggtcctctttccaattgaaacttccgccgtcaatctggtacccgtcgtcgccgtcttcgatttcctcaaggaaaacaaattcaagtctacccccaatctgttaat

SEQ ID NO: 31017 - DNA, 273 bp, Gossypium hirsutum
  Clone ID: LIB3048-001-Q1-L1-H12
ccgatcaattcacccccaacaagggtgaaatttttaaaaaatgggagggccaccaaaaaatgagaaggcatgggcataaaacttgccttggcaagagttgaacatctgaagagtagataatatgtcaaaacattgaatcttccctcttaaggcaatttaaagagtcttctgtgttgtgtgaatatcttatcttataattcaatcataacataagtagcctcactattgtgtttcaacagcctacatttacatattggttcatatgaatacaac

SEQ ID NO: 31018 - DNA, 364 bp, Gossypium hirsutum
  Clone ID: LIB3048-002-Q1-L1-B2
atgaatattttctaaattcctcgaagaagaacacgaggactatgtgcatagtagcccaacgagactatcgatgtgatagctcaaagcatatgcctaaacaatttgtcaaatgattctggtttttctcttgctcccgatgtcaagtattgcatgctccagatcatgcaggatgcgattaaatgtatgcaccgatcaaagatgactatattgacaccagatgattgtgaaagtgcacttagcttaagaaatggtgagcctagatatggctttacatctggaggtactatgcaattcaaaagggctattgagcatatggattagatctacgctgatgaaagggatgtgaattagatagatgttattg

SEQ ID NO: 31019 - DNA, 238 bp, Gossypium hirsutum
  Clone ID: LIB3048-002-Q1-L1-D2
caatttgaagattgatggctatgttcaatacgagcatgggacctgctggcaagacatttgctatgctataagtcaagctcgtcgatcgatatacattgcaaggtggtccgagtatcataatgttcgacttggtcgggaaactggttaggcatctaaaaccacattgggagatcttattaaaattaaatcccacgaaggtgtacgggtgatgctccttggatggggtgaatctacttcc

SEQ ID NO: 31020 - DNA, 291 bp, Gossypium hirsutum
  Clone ID: LIB3048-002-Q1-L1-D5
cagattctgacagatataatggatgatgacgcaatggacactcttacagcgcccacgacagctgcttcggtgacgcaagatagtgctcatcatactaacgacactacatgacggggaactaatcacggctaagtcatagatctatagggtcacatcaaatgcatgagcgacgaagctaggtcagatcaacctacgctgatacctacgggaaggatctgctatcggcactacataacgagctctatacacgacttttataggctgtattagctatgtgctcttgatcctgct

SEQ ID NO: 31021 - DNA, 341 bp, Gossypium hirsutum
  Clone ID: LIB3048-002-Q1-L1-D6
gtttatacgatcatggtacctgctgggaatacgtttgttatgctatatgtcaggctcgtcgtttgatatacattgcagggtggtctgtgtatcataatgttagacttgttcgtgaaactgataaggcatcaaaaaccacattgggagatcttctcaaaattaaatcccaggaaggtgtgcgggtgttgctccttgtatgggatgatcctacttccatgagcattttaagatataaaacggattttcataaaggaatcatgaatacaaatgatgaagatactcccacagttattcaagcactcataaatgcaagtgttactctgacctcgaactgctataaa

SEQ ID NO: 31022 - DNA, 384 bp, Gossypium hirsutum
  Clone ID: LIB3048-002-Q1-L1-D9
gaaaccttctgtagaggaatgggactctgatcttgagcccaactcttcactgaagcaaactaacctgggaagtgatcatgctgctactccaacttctggaactggccaaatggcacattcttctcccacagatcctgcagaaaatgcatctggttgggattcaattgttcctgaacctaacgagtattcttttggtgatgagtcagtttctgatctcttggctgaagttgaagcgatggagtctcttaatggattggcgtcacctacatcaagtttacgctatgacagagagttggttcacggtgctgaacctggttgtttttgtcctgtaggaagatttagccctgcacctgatccaggaaaaaatgatggcttgagctcaac

SEQ ID NO: 31023 - DNA, 344 bp, Gossypium hirsutum
  Clone ID: LIB3048-002-Q1-L1-F12
gcaaggtgagagttgtttatagtcggtagttgaagcgtttagctactatgcaccttaagggtgtgcttgatagaatagaaaatgagaaaaaaaagagtgaaaaattagaatgaaaattagttttcatgttgtaaactatttattagtgatttcttcccctcctgttttgcagaatctccaagctggaattgtgtgggtcaattgttcacagccatgcttctgtcaagctccatggggaggcaataaacgcagtggctttgggcgtgaacttggggaatggggtctcgacaattacttgagtgtgaagcaggtcacgcaatatgtctccgatgaaccatgggggt

SEQ ID NO: 31024 - DNA, 222 bp, Gossypium hirsutum
  Clone ID: LIB3048-002-Q1-L1-H6
tgtaaagaaagtaggcaattatattgcaactggttttagaccttattggtgatcttataaaactcgtcaatgaaaatggaatgctactgatgaaaagctgcaacaggtctaaatgctgcatttaagctcaattgataactttaaaaccttttcttgaataaaatcatttctggcacatgagcttatacattatctgtcaaaaatgtgctccaagacttatat

SEQ ID NO: 31025 - DNA, 356 bp, Gossypium hirsutum
  Clone ID: LIB3048-003-Q1-L1-C4
cctagggtcgtcgaatcttagactacttcattaaaatcttcattttgagggcaaaaagagacacacaaatggacgtgctctcatcggcaacttcaatgagaaccaaaaaaaccgatgcagtacggatttccgtagttcatctttccatacataggtccaccgtctcggagctaaccgtcacagcttgtgaagcactatgggttctttaaggtgcatgaactatggcgtacctagtgatacactatcgagactttaacacaaaagcgttatgctgtctgacagggaaccaagggataagctatcgtgcaggacctgcaactgcattgagttattgattaaagagcatcttacttaat

SEQ ID NO: 31026 - DNA, 352 bp, Gossypium hirsutum
  Clone ID: LIB3048-003-Q1-L1-D10
caagcttactattgcgctgtagatctcaaaattcaggaggctcggtatatcatctcatggctgctactatagacttcgtcaaagctaggccgatcttacaccgccgtcgaaattctacccctgaggttgatgtgaaaatatcgaacggtattaaggctaaggccgcaactcctaacgttgcatacactggaatttacgaagctcttgagaatacaaatggacgttccgattacctcggataaggtgtatcgaacgctgtggctaatgctaacacaatcattggccctgcattgattggaaaggacctaaccgaacagactgcaattgacaatttcatgggccaacatctgga

SEQ ID NO: 31027 - DNA, 345 bp, Gossypium hirsutum
  Clone ID: LIB3048-003-Q1-L1-D11
caaacttacaagaagaagcacaaacagcacaagaaggacgacggggatcccaattctactgtaactgcaaatggcaaacaagactcgactcaattcgatgacaaggagaaggtgctagtgaatggcaaaaacgctacagaagcgaaatatgcgccggttaaatcattagctaattctgagttaccacataatgtttaggattgctgccaaggtttttctagcccatctcctatgcaagctcacacctggacctttctattgcatgcacatgattttatcggaattgccaaaactgcatcaggcgagactctggcatttgactgtacctgcaatgatgcatgtatt

SEQ ID NO: 31028 - DNA, 389 bp, Gossypium hirsutum
  Clone ID: LIB3048-003-Q1-L1-E11
gtcaattccaggaaagtttcagcttttttatgaatagattagagctgggtctttgcttaaagattgaaaaaaaagctatgaattcttcttcttcttcatgggttgattcactggatcttaatgcttcttcaacaaagtcccttcaacttgaaactcctgtaagtcatcctaataccagcaacagcttaattgtatttggaaggaaactttcagtcaaagaagagagtggtgctttagtggaagaactgaaccgcgtaaatgcagaaaataagaagctaactgagatgttaaaagcaatgtgtgagagctataatgcattgcaaagccagttagtggacttgatgaacaagaatactgagaaagaacttagtcctacaaagaaaagaaaa

SEQ ID NO: 31029 - DNA, 156 bp, Gossypium hirsutum
  Clone ID: LIB3048-003-Q1-L1-G10
gtgaccctaagttgttcaatatatatactatttccggcatgagcggacttttgtccttacagcatacgaagagaaagtacagtatggggcgtttatatgatggctggctatctagggaacgatgcgtttacaagcacatgccaagataaattattt

SEQ ID NO: 31030 - DNA, 147 bp, Gossypium hirsutum
  Clone ID: LIB3048-003-Q1-L1-G11
agaactagtggattcgcacgacttgcagaatacgacactttagtaacactaatggatgtcatgatatcagcgaaatgagaccaattccaaaagaaggtaagcctggatcatagcccaaaatgaaaaacaaatactgccatcaatggg

SEQ ID NO: 31031 - DNA, 354 bp, Gossypium hirsutum
  Clone ID: LIB3048-003-Q1-L1-G2
ggagaaaatactccaggtcgtcatgcttggatcattgctagttggaacaaccaaacctggggagcatagctaccacattaagtctttgatccagtagaatcttgattggcgtgactagtgtaactaaattccaagagaacttagtcgatagctcttactctattgacatttgccaatattgtatgactttatggcatgactaggataactagatgccgaggaaacttaattgacaggctttactctatgcatatatctaatatagggggccatatctaaaaagggccttctttaaaaaccaattggaatgaaccatttccttggcttcatttggataaggtaaaaatttaaaaa

SEQ ID NO: 31032 - DNA, 410 bp, Gossypium hirsutum
  Clone ID: LIB3048-003-Q1-L1-G7
attattacgagaagggaatgatcatttggttcgaagatgatggaggtcaacgctggatattcccgttcaaatgagaaacaactgccagagtgtcgaaaatctgttgataaagagaaaaagccagtagaaaaagatgcaagcgcttctgcatttgtaaaccatgctgcaaatctcttggcacgagaacagaagaaagtggacaggagataaatctcaaaaagcacgaaagatcagtaaggatcaagttataaggtaaaccagttaccccattcttcttctgtttattcaatgatggtctggtattgctctactggatactattttggtggggaagctaaacaatatatatgtatttggtaatggcctagttggaacctatgttacctggacttggtagtgaatgttggatc

SEQ ID NO: 31033 - DNA, 358 bp, Gossypium hirsutum
  Clone ID: LIB3048-004-Q1-L1-A11
cgctttcaaagtgtgctcctatgtcagtgcggatagtttgaacatcttcgttatccataagctgactgtctactgctttcacttgtcaagaattcgctgaagctcatgaaaagtctacccttcacttggagggacaccgaccgggtccactgcctcttaatccacacctcacatggaagtgtaactatcggttagcctacggtgcttactatccctctgacctatctgacagctatactgatgcttgcactgatgtcttgattgctctcaccatggcctgaaccacaacagtgttagcatagattgagattgattactgcgtctcaacgcataatcagattgcaactgcaaagactgc

SEQ ID NO: 31034 - DNA, 245 bp, Gossypium hirsutum
  Clone ID: LIB3048-004-Q1-L1-B11
gcagcttgaagatggtcgcaccttaactgatgacagtatccaataagagtccagcctgcacctagtacttcgccttcgaagtggcatgcaaatctatgtcaaaactttgactggaaagacatttaccttagatgaggacagttcggataccattgataatgtgaaatccaaaattcatgacaaagaaggaatcccaccataccaacagagattgatcttagctggaaaacaactagaagatggaa

SEQ ID NO: 31035 - DNA, 387 bp, Gossypium hirsutum
  unsure (1)..(387): unsure at all n locations
  Clone ID: LIB3048-004-Q1-L1-H10
tatcaaccttatccataccacgcaacttcttttttgggccggggcccaatttcgccatacaaaccttatttttcaaaaaaaccgaccgtccctgtacaacataatagcttgattatccctgacatttcccaagttatcgaacatcaagaattaattgtgaatgccatctggnatagctgcggaagatcacaatacccatctatgctttctatctcgagaacatgctaaatctctaattccaaaagtttagagagaatcttatacctaccatcacatttaatcttggttcaaataactcaatgcataacccactaggccaaattggcactgatcatattaaaccaagtgtatacaccgtctttaagcttattggtggtgcagcttgga

SEQ ID NO: 31036 - DNA, 377 bp, Gossypium hirsutum
  Clone ID: LIB3048-005-Q1-L1-A2
gggaaaaaataattctggaaacattaataatgtaaagattcaaaaattgcggcaaaacaagttaacattcatgacatgcatatacacatgacgcctaagttgcaaaaaacacagtttcaactctctaaacatagacgtatagaatcaagccagcagctccttcgcttcaaatgtgtcacctgaaaggccccgatatacagaagcagttaaaaatagtctacgacccattcaagctttttgctaaaatattatctttggaaaggaacatctcaaataattatttgtcatcctcccactatctaaactatcttaaaagctttttgacatttcactatcggaacaacatagctggccagctactatgagcatactcgggc

SEQ ID NO: 31037 - DNA, 364 bp, Gossypium hirsutum
  Clone ID: LIB3048-005-Q1-L1-B12
cacaatttgaatatgttgctgattaaagcgtgcattggatatactgggttgtctcaactaccgattctatattgatctacgtaaacaccttttagtcgatccttgttccaatatcataaccccaatacggaatcacttgcaagctacaattcctacaataactaacgttgttacttccactccatctatcaaaaccccttagccaaacaattcatactcgatcagctccccaagactgccatactttataagcttaaaactttttaattcataagcgctgtccatcttttcccaatcccattcctcatgtatctcaaccttctcactctatcttataataagaagaggcctcaacctcttaaat

SEQ ID NO: 31038 - DNA, 201 bp, Gossypium hirsutum
  Clone ID: LIB3048-005-Q1-L1-B2
ttcactttgaacccttgcagagaagaagagaataaaaagggggtattttcttggatacccaacctaccgatttggtttttcttggaaatcgcccaggaaaaatgccacacctgggggttgaacaaccgcaaccaggcctggttccacaagcttttcttcaaacaccagctttttattaaccttgcattttaacttcttcac

SEQ ID NO: 31039 - DNA, 377 bp, Gossypium hirsutum
  unsure (1)..(377): unsure at all n locations
  Clone ID: LIB3048-005-Q1-L1-B4
cagtctttggacaacgccctaaagcttaagggccaagcggcttttggggtgcattcctttactttacccaacaaccaaatcaccctaatggttcgcaacggttcaacttccttaaatgaaactggcctattcctaaataccaacacacccaattccataccctttctttccttggcggttcttaacttgccaaccagccttaacaacgggggctggggtcaaagtaaaagaccaaatggagttgccggaaccgggaaaaaaaattttcgatagctttttgaacactcttcgtcatttcaatctccaaactcagtttcgagttgctggtggatgggttcgcgataagcttcttggcanagaatgttatgacattgata

SEQ ID NO: 31040 - DNA, 405 bp, Gossypium hirsutum
  Clone ID: LIB3048-005-Q1-L1-D2
cagaggggtttaaaattcttttcataagtggtcccgaaaaggtctcacgaaaaccttatctacgactacattttatcggcaccaaaattaaagccttgcagtactagatcttttatttcctcttaattagccactcaaaatagatatataatgaccccttttacaggctaagattaaaggtataatcatactaaaatatccctgaagtaattagagtttaattgggagaaagaactcaatttatgtggggaggacgttgccacgtcgcaatgtccccattcgcatcatcacgatgtcatccgtcattgcaatgtcaggaagcttctcgtcatggtgccgtcatctattcggttaaaaatacgaggcacaccctataaatatccatcttaactcatatttaccata

SEQ ID NO: 31041 - DNA, 415 bp, Gossypium hirsutum
  Clone ID: LIB3048-005-Q1-L1-F3
gcatgcagattgacacaagaaaacttagtccgacaccaaaacttcaactaaactatcccagaagtgcgaccaacaaacccaatcaatctagccattccaacattaggctcgactttaagccggtaaaaatagcggctccaaaaacccaaaaaatttcaactggttcttcaactggaatatggaaggtggaaagccaccaagaatttaccaaacctttttaaaaggaaaaactttcaaaagtctttcacccaaagaaaaatatcgccaagaaaaaaacaagaaactgtcgcacctactaacgcaaatagtatggcaagcttcagtgctcaacccaatactcctgctggtttctttggaaatatccctgtttcttcaaacttcaaaatgatcagcaaaaatgaagacatcactaaac

SEQ ID NO: 31042 - DNA, 376 bp, Gossypium hirsutum
  Clone ID: LIB3048-005-Q1-L1-F8
atttgcatgagaatcaaatacaatttgcactggaaaggggtatcccttcaacacttggtgtgttgggaacaaaaaggcttccttatccaagcagatcatttgagttagctcattgttcacgatgccgaattgactggcttcagagagatgggattctcctattggaactcgatagattactgagacctggagggtactttgcatattcttctcctgaagcctatgaacaagatccagaaaatagaaagatctggaatgctatgtacagccttttgaaaagaatgtgctggaaagttgttgcaaagagaggccaaactgtgatgtggtctaagcctctgagcaatagctgttacttgaagagagatcctgggactct

SEQ ID NO: 31043 - DNA, 220 bp, Gossypium hirsutum
  Clone ID: LIB3048-005-Q1-L1-G5
atcatgcagttcatgagacactatgatcgggatctggtccgcattatatagcttgtgaggaaaactatggatgaaatacgttagctacctcacttaagttgcacataacaaataactgatcctattgatatggaaattcttccccagttgctaactttacgcaacctggacattcattatctaggaccgattatggaattcgctgttaccactttgctga

SEQ ID NO: 31044 - DNA, 411 bp, Gossypium hirsutum
  Clone ID: LIB3048-005-Q1-L1-H3
caggtgtgatccggtatttcatttcttttgctttgaatggggccgctcttgattttatgacttcaattcttttctttcctattactggtgacctttctaggtcgtctcattcgtttcattgtatgactgattactggtagatcttttaagggcaagcgtaacccggctaggtgtcattttatgtggtgatttgctttataatttatggttgagatttggattatgaattactgattttaatttaatttttaattaatcatgattaatatcgcatttcctttggtcgaagttttaatcgattagtgaaagctcccatgggatttggatgacattcccctcgattaaaccagcattcttaacctataatgaaatataggatcattattactgttttttttactggatttgcgt

SEQ ID NO: 31045 - DNA, 234 bp, Gossypium hirsutum
  Clone ID: LIB3048-006-Q1-L1-B12
caggccatggttgcaagggtttgtccggccttaaatcgggaggtgctttactcggggaatatgatggatcaaaacagcgaagccatttcatcgtcctttaagaaaacggtaaagaaaaagaaacgttcatgaaaagttacatgcttcctgtagcatactgcgttctttatatcggttgtagctaaaatgttactatttactatatagacgtgcatccaaagatcaaggagtcta

SEQ ID NO: 31046 - DNA, 214 bp, Gossypium hirsutum
  Clone ID: LIB3048-006-Q1-L1-B2
cgcatacgaaaccaaaggtagctcatgctgtgatagaccgccatttctaatcatacatgacgatcaatgcctaatgtgtaccgacagatggacatagagctggacagatgtatgcgcaggacacgggcggactggccactgctgctaagcactctgatggtgcattcgctaaccatccttagacagaagacagtgatcctcgtctgggcatgct

SEQ ID NO: 31047 - DNA, 250 bp, Gossypium hirsutum
  Clone ID: LIB3048-006-Q1-L1-B3
ccctttactcggctaccgacatgcctcgacttatggagcgcactatctctagatctgaccctttctaagcccgatttcatacttacaagatctgattccagcatctaaacgctaccgatgccggaactcatctcgccgattcaaacttaaagggtgtcgaatttggatcagcttgtcaattatttggtctactggaaatgtcgatgttgcccaaaggtgatgcatttcagatccgataagtttggaacga

SEQ ID NO: 31048 - DNA, 209 bp, Gossypium hirsutum
  Clone ID: LIB3048-006-Q1-L1-B7
ccaactggaagccgatcagctcaatgtgccgactggcacccatggcgtggtgtatgatgtggattactcaataacgcaccagcagttcacgatctttacactggcactaccagttaataaacttactgattatgttgatcagacagtcactgaagctcaggactactactataaatgaggcgatagcggataggcgtacctaacatatg

SEQ ID NO: 31049 - DNA, 203 bp, Gossypium hirsutum
  Clone ID: LIB3048-006-Q1-L1-C2
ctcttacatagccataataaaaagtgcctaaacaggaattgttttaagccaagggacaattttcaaacacactaccatatgacattgcctgaaccaaccgtaatggctaagctaggtttggggtgttacaaaaggcctttgctaaagagtttgacgattgatgcattagattgagacactgattggaattccattgcccgtaa

SEQ ID NO: 31050 - DNA, 170 bp, Gossypium hirsutum
  Clone ID: LIB3048-006-Q1-L1-D10
ttccaaccagagagtttaagatattgaaggttgtggtggaaatgtttatggaactattgctttttatctcggtccaaaagcttatgagtcgcaatcacctaagtggactgtttaccagccttgggcaaccaatgaagaacctggagcccctgtaaaacatggtggatttc

SEQ ID NO: 31051 - DNA, 246 bp, Gossypium hirsutum
  Clone ID: LIB3048-006-Q1-L1-E4
gtagagtggtttcaaaatcaaaggtctgttcccaggctttgcagggaaccaagatgaaatgggttccagatgaagatgtatcatctggtgtctatatggtggacttgcacagtgccggaaccttgaatgctgatattgtactgaaagcctgttatataaacgaggtgacaataatgttagaaaaggctttacctattacaaggttgtaagctagacctaatatagtatcgagattcatgctactaa

SEQ ID NO: 31052 - DNA, 393 bp, Gossypium hirsutum
  Clone ID: LIB3048-006-Q1-L1-E5
ctttattccatcattgcaacatatttacacatactgaaaatatccacaccattttaaaaaagcttaacatcaacctgcattaaatgggctccctccaaccttggccgcttcttctccttccaagatatccttgatccaaccaacaaattagatgagagcctactttttaaacttggtggttaccgaagagtctacaccgacactcttgaacatgagactaaagttgctgtaaaaataggtaatccaaaatccgaacaatgtcttgctgaatttcgcacctaattcaaaatactatctaaacttcaccatctacacattgtctctcttattgtatattgtcatcaaatatccactatgattcatgattacaaatatattgctaatggacccctt

SEQ ID NO: 31053 - DNA, 394 bp, Gossypium hirsutum
  unsure (1)..(394): unsure at all n locations
  Clone ID: LIB3048-006-Q1-L1-F1
caacgctcacctttttctttaatattcctccttcaatggagacacagcaattgcaactcaatctcctcctccgcctccgaattaccggaacctgatatccatatccttacctccggcggcttccgaatccccgctcactccagcatattggtgcaaggaagaggaaatttcgaaatacgggattcatttgctagtattgtcgcacgtttactcggtcccacagctgaaacagagatgcagcaagggagttagtcaacggttgacggtggagaacgcggtggacgtcctncaactcgctaggctctgcgacgctcccgatctttacatcaagtgcatgaaatacatcgccgnccatttcaagtccgtcgagcaaacccgagcttggaatttcatg

SEQ ID NO: 31054 - DNA, 185 bp, Gossypium hirsutum
  Clone ID: LIB3048-006-Q1-L1-F2
gccaaattcgccttgaactggatccttgtaatcagcgagtgctgcactaatccttcgaaaggatccatgagggacgatgagtattcgcaaagcttacatcatagccctacgagattgaaagatcggtatgttgtcaacatgtcactatccattgatgtggctattgatgatgagactcaggatag

SEQ ID NO: 31055 - DNA, 334 bp, Gossypium hirsutum
  Clone ID: LIB3048-006-Q1-L1-F4
gcttacaacagagattgtcatgtcatctgtgctacgaagggctatatgacactgtctgcagacagcttatgcacctccatcataaagcgaccgtagtattgcgacagctgcaatggtcagaattgtgggcggagcaatgcttgctgctgagctgattctaggcatactatggtggaagggctgtataagacagaagagaacttgtgaacaaggtatttacgcatgatatcattgtactctgttgcatacactagtcgcgcaacgtctatattctacgagataccactctttagaatattgatatccgtcacaattgatatgtcatgcgactaaa

SEQ ID NO: 31056 - DNA, 332 bp, Gossypium hirsutum
  Clone ID: LIB3048-006-Q1-L1-F8
gagatctagtctccagtttttttttttttttttggggtctttttattttttttttttttttttttctcttttcatttccatctctgaattttctttctgctctccaggcttttttttttcacttcaaacatgcatttttggttcttctaaaccttctaaagaatttcaagttcaaagggactatacagttaaggacgattaaaattttcatctaatgcatggtattcgaccctttttttttgctctgcatcaacctctgttttggttccggggattcttaattgccggatctttgctggcaatcaaattgcaatttgaaagagcaaatccta

SEQ ID NO: 31057 - DNA, 330 bp, Gossypium hirsutum
  Clone ID: LIB3048-006-Q1-L1-H7
atctatcatgatgctaaagcctggactaaggggggagcacatatgtatggctgactgaatcaacattcatggccttagatgtaccaagagcattatgatccatgtggatctgatcttaaatgtacatatatatgggctgatactgacttcagaactaaatcttcatataagatataatataatttcttctacggaattgactatcgtcaagcgaaaacatgacatgtatattccttagtgaacgtatgtatagacatttcattgtctatatatgaattcttacgcttttacactattccaaatactttagatagctaatttatgttgtac

SEQ ID NO: 31058 - DNA, 344 bp, Gossypium hirsutum
  Clone ID: LIB3048-007-Q1-L1-A9
cccgaacagatcttgactctttgcaatgcagaagaggatgttaagaagaaggttcacgctatcatcgacaagttcgcggatcgtggtctgcggtcattaggtgttgcaagacagcaagtaccagaaaaatcaaaagatggtgctggtactccatggcaattggatggtttattgcctctggttgatcctccaaggcatgacagtgccgaaaccattcgcagagctcttaaccttggtgttaatgtcaagatgataacaggtgatcaacttgccattgcaaaggaaactggtcgacgactaggaatgggaacaaacatgtatccatctgcttctttgttaggtca

SEQ ID NO: 31059 - DNA, 287 bp, Gossypium hirsutum
  Clone ID: LIB3048-007-Q1-L1-B3
tccacgtattcagcacgagactactctcttctttaccgatattctatttatacgagccagattcaaatgtttgctaatactctaaccgacactacaatgactcttaagatctagagcttagatacgaacaccaacgttaaggtcataatacaacataatgcttgtatcactacttaccagcagcatctgatcttcgccagataacatcttgatgacgacctgaccttggccgattacaccatccctgatgcctcaactctccatcttgtacctcgtatacacggtac

SEQ ID NO: 31060 - DNA, 406 bp, Gossypium hirsutum
  unsure (1)..(406): unsure at all n locations
  Clone ID: LIB3048-007-Q1-L1-C2
gtttaacctttttcctcaataactttcaaatggaccgttggaaccacttttaataagtttgcctttaacccttaatagtcggatcctgtacatgtaaatggtgcttgtgtgttgaaaattagtggacaaataagtaatgaaagggagtcccacccctggatatgtgcttgctgcataaagaaactactgcactttggggcactttggagccaggttttttctttttttcatttttgtcatcaagatggcctggtgttgctgtaattggccttttgaaggctgcttttgtgcatgcttgatgggatgagaatttattttttctcaaagctgatcttgggccaattttgaaagaggcatgcacggtttttcaataatattntgggttgtctttctgccatagcatgat

SEQ ID NO: 31061 - DNA, 168 bp, Gossypium hirsutum
  Clone ID: LIB3048-007-Q1-L1-E12
atactttatagacatatcataatatttccccgtcgtattaaaatatttgttctcaactccttaattttctctcattagctaattattctttggaaaaaacatcatccacacctgttcataattcataatcaaatctcccaaatatcattcattatccaccaaatttaa

SEQ ID NO: 31062 - DNA, 320 bp, Gossypium hirsutum
  Clone ID: LIB3048-007-Q1-L1-G12
ccggtagtgaggattgcgactgtagctgccggtgggcgccatactctagcattatcagatactgggcaggtctggggttggggctatggaggtgagggacagcttggtttgggttccaggatacgtatggtatcctcgcctgatcccataccttgtattgagccctcttctttggggaaagatagagcttctgcactatctcgaggtagcttgagttcatataggcagaattttagagttcctggaagttatgtgaaggggattgtctgtggagggcgacacagtgcagtaatcacagatgctggagcattgcttacatt

SEQ ID NO: 31063 - DNA, 316 bp, Gossypium hirsutum
  Clone ID: LIB3048-007-Q1-L1-G6
gaagatagagccccacacattttttaggattgtcaatcatcctccccgattccaagtcttgaaattcacaatgagttgggaagaaattagtaacgcaattcaaatcttgggtgagttttctaatggacatcaagttacaagtcaagttgaaatgaatagcacagaatttaaaatcagtctgtcggtgataattactgatcctatccctgccactttggacagtgttccatcggcaatccataccatgagatttcagagcttggtttgcaggtattaagtaatgtagtcatatgatatgatgcacccaagtctacca

SEQ ID NO: 31064 - DNA, 348 bp, Gossypium hirsutum
  Clone ID: LIB3048-007-Q1-L1-H5
cgagctagttttaaaatctgtcaattctattaaagattgaggcgagcctataaatatggagtggaatcacatacacctgacattctaaactatatgcgttttaagctatgatatctatgtcatacgcttacgaaaacaatgcaaaacaggcttaattgctatacttcaaaaatctaatgtatatctatcacgttccaagaccgaatcaacgaatgatgatcaaaatcttctttgtctgacaggacatactaactctgattctgctccatatcttcaacaccacattctaatgctaaaggactaattttacagactgctacaagacaaatgatcagctgttctcagatc

SEQ ID NO: 31065 - DNA, 398 bp, Gossypium hirsutum
  Clone ID: LIB3048-008-Q1-L1-A11
aaaccacactcatgatgtaccacatatggtgaatgcaggtgatcaaagccaaacgattccaactggaacatggggaactgcacatctagctgttttatccaggtttcggacatggccaaagtaatcgatgctcaagggaagctaaggaaagtgaagctccctgtgaaggcagcagagctcatgctcgacgaacctggtcacgtcatctcttccgtggaagagctgaaactaactcgccgcgtcgtccctatgcgagctgaggatgaactgctggcggctaaagcttacgttttggttcctatacaaagggtgaaccgcaaagttacggatgtggatgtggcgatcatagaagctgcttgtagcggaaagaaaagggcaaaaagtggtgctaaggtttt

SEQ ID NO: 31066 - DNA, 144 bp, Gossypium hirsutum
  Clone ID: LIB3048-008-Q1-L1-A9
actagttgatccaaatgctgaaataattcttcacaagcccttttttaaataccactttaattcttttacatatttgtactctggtaaacttaggcaaacaatttcaactttaacatattaaactacacatttatctattttatc

SEQ ID NO: 31067 - DNA, 245 bp, Gossypium hirsutum
  Clone ID: LIB3048-008-Q1-L1-B5
tatatcaatccaatcgataccctcaacctcacatggcgaccctgcacccaattcttcctatagttagtcctattacaattcactgtccttcgttttacaacgttgcaactgataaacacccttgctatcccatcttaattcacttgcatcacattcgcactcttgaaacttacctaatagcgaataagccctcatccaactgacttaccaacattttctccatccttatcacaaattgcatatcc

SEQ ID NO: 31068 - DNA, 212 bp, Gossypium hirsutum
  Clone ID: LIB3048-008-Q1-L1-C5
ttcactagactgatcattacaaaatccatcctatgggaacccgggtcattttccttacttttcatatatacctcacactctactttccatatctcaacaacaactacacttataataccacaccataacccatccaactcatcatcaatctcattcatctctcaccacctagctaattagctatacatcttacccacatctacactccctac

SEQ ID NO: 31069 - DNA, 362 bp, Gossypium hirsutum
  Clone ID: LIB3048-008-Q1-L1-C7
ttagattatcactacttaaaccatcctattggttatttgttaattttgatgcctggcactacattccttttcttacacaatgccttcctcaatcctacctatccttctagatacattccttaactattacatttcactattcatttacatcttataaaaataactcattattcactaattcatctcatcaataacaaagttccccatttgatcattctagcataaactattcctattctcatttctctcactatatccaacctataaatccttgacgttcactccttcattcacaaatacttaaaaactttactcaacagaaatgttactacatctaaaccccactttacatacccatacct

SEQ ID NO: 31070 - DNA, 382 bp, Gossypium hirsutum
  Clone ID: LIB3048-008-Q1-L1-E6
gcaggattcacttggtggcaacaacagaactgtcatgatagcctgcattagtccggccgatatcaatgccgaggaaactcttaatactttgaagtatgcaaatcgagctcgtaatatccaaaacaagcctgttgttaaccgagatcctatgtccaacaagatgctaaaaatgcgtcaacaattacagtatctgcaagccgaactttgtgctcgtgggggttccgatgaagtgcaggttctcaaggaaagaattgcttggcttgaagctactaatgaggatctttgccaaaaacttcatgagtaccgcaaaaaatgcaacattacggagcaatgtgaaatagattcgagaaactttgatgaagaggcagctaaagaatgggag

SEQ ID NO: 31071 - DNA, 215 bp, Gossypium hirsutum
  Clone ID: LIB3048-008-Q1-L1-G4
actaggaactttctactttatctaattattccagaccttcgcttacaggatcagttacattgacattgacatgattcaatatctgattatccacctataaactcactgttagcatacgcctaccaacacgataactaacatactgcctccacggaaacagccctcaaggttcaccaagatcctgctatatgaagttcgatcacacctctgcatcc

SEQ ID NO: 31072 - DNA, 407 bp, Gossypium hirsutum
  unsure (1)..(407): unsure at all n locations
  Clone ID: LIB3048-008-Q1-L1-G8
tcactgagggaatactatatatgtggaatggatctggtgagtggggtacggatganntgctcctgggctcttaagaaaagtcatgactattgggtcatttagctgtgnnngctgatgctaactcgtacgtcagtctcgtagtgggcttccgatctattgtcttgactcgaatctctggtcttagtgggtcatcanntcagtgctgtacctaatctcagtcgagtccatttattccagnnaggatgaaaaatctacatcatatatatgtcatgtctccaattatcaatnctcgtattggtgctttcggtttcaatgttaaattggcattgatatnnggaagtttggaaatttcccttccatttcaaatggtccttaaattaattggctanntccttaatgggatggca

SEQ ID NO: 31073 - DNA, 336 bp, Gossypium hirsutum
  unsure (1)..(336): unsure at all n locations
  Clone ID: LIB3048-009-Q1-L1-A3
gcggnggcggccgcncaagaacgagnnggacccccgggcggcaggaagacggcacgagcgacggcagagananacaagacaagggcgagnagggaagagcngggacgngccgaggagaaggcggannnaagcggggggcaaaccgnggagnangcaaggcannncngggcgngccgnaggcgaaggcgaggacaaacccangaagccaagagggggnacanaggagaggagnanaaaggaagaaccgnnagnancaaaanncgcccaaaggggaaacacaagggncagcnggagncgggggggagccggccagagaccgaagccaaggggacagag

SEQ ID NO: 31074 - DNA, 353 bp, Gossypium hirsutum
  unsure (1)..(353): unsure at all n locations
  Clone ID: LIB3048-009-Q1-L1-A4
ggaaaccaggaccaccaagccaacggcgggggaagggncagccaacccaagggggaagcaaagggagcaagcccagaagaggcacccgccgacgggaaaaacgncagagaacgnggcacaacgcggaggagagacaaggcaggagcaggagcaggcngcggangaaacncacaggaaagcagcngcngcgacagcnncngggaaaagcaaagangaaacagncccaggggccaccaagaaggnagaaccaaagaccggagacgagaaaccngncacaagcnccgnngacgaagggaaccgagccaacacancaggggcagagcggggaaaaccgaaaccgggaggcaagaaaa

SEQ ID NO: 31075 - DNA, 232 bp, Gossypium hirsutum
  unsure (1)..(232): unsure at all n locations
  Clone ID: LIB3048-009-Q1-L1-A5
gcagctngaagaagggcgcaccggagcngaagacaaganccaaaaagagaccacccnccaccaaggacaacgacgncgaggaggcaggcaaagcnnnggcaaaacncgcacnggaaagacaaggaccnnggagggggagaggacgganaccagggaaaaggggaaagccaagaagcaggacaaagaaggagacccaccagaccaacaaagaaggannnangcnggaaaacaa

SEQ ID NO: 31076 - DNA, 254 bp, Gossypium hirsutum
  unsure (1)..(254): unsure at all n locations
  Clone ID: LIB3048-009-Q1-L1-B4
aaaaaagaaaanccaggaagngagncaaagcnaaaggcagcaagggnnccgnccaaccaccagggagcggggcaaccgagggcgnaagcagaagnngaaaccaccacaacnncgaggcaaggggancngaacgaagccacaggggaagccagggaagaagagcaaaanggaggannngcagaagccaaagccagcaaggagagcnccgagaaacgncaagangancnncgaacgnngggaangaaaancaagca

SEQ ID NO: 31077 - DNA, 243 bp, Gossypium hirsutum
  unsure (1)..(243): unsure at all n locations
  Clone ID: LIB3048-009-Q1-L1-C2
gcacagccgaagggagagggagagagggagagggaggggcagcgaagaagccgcggagaacggcaanncacgngaagggcngccagcggagcccacgaccacgagcggacgcgaagcgaacagacccaagggacncgaacaggcaggggccgaanaagaccagaanaagccgcnncaacagggagggagacaaanangcggccngagaggaaanngcnggnaggnggnnacacgcgggncaac

SEQ ID NO: 31078 - DNA, 270 bp, Gossypium hirsutum
  unsure (1)..(270): unsure at all n locations
  Clone ID: LIB3048-009-Q1-L1-C6
gcggnggcggccgcncaagaacgagggggacccccgagccgcaggaaggcggcacgagcaaagaagcaanggaaacggcggcggggaagcaaaggccngacaggccacccagaggggagagcagagaaggcgcggcagcaaaacaggagcaccagnaacagngangcggccagagacaacggaagagaaggcagaaaaagacagccncaaggcaaaacgccacgggaggaaccgagaaaaaagggaaggaggcanggagggccgagggac

SEQ ID NO: 31079 - DNA, 298 bp, Gossypium hirsutum
  unsure (1)..(298): unsure at all n locations
  Clone ID: LIB3048-009-Q1-L1-D1
ggcgcaacacaaacccggcagggaagggacnanaagccaaggacaagncagcgcagaaggggggcgaacaaacagacagaggcacngagcaanaagcccacagggggcangagggggaagacgagaccggaaggagagganncaccggagagaagggcnacgggcacaagcgaggggggggaagacgaggcaccgcacgggaaagagccaaaanggcaggcaaggaaggaacaacgggaagaaccggccgggagaccaagaccagacagggangcaccaagggagaaagaacccggcg

SEQ ID NO: 31080 - DNA, 264 bp, Gossypium hirsutum
  unsure (1)..(264): unsure at all n locations
  Clone ID: LIB3048-009-Q1-L1-E1
ccaaaggncagngccgaaaagggaggggcaangangggncaagccannggnaagcnagaggaccnngaaaaagagcncaacacagangcaaggagggnacgngaangggaaggnnggcaanngccagagcgaacnaagancanacaagacaanaacagggangccaaggcagnaaaaccaangggngaccgngccaangcngcnaagcncgacnncncagaggnannaccagaagagnnngagacagaangaaaggaggcagca

SEQ ID NO: 31081 - DNA, 195 bp, Gossypium hirsutum
  Clone ID: LIB3048-009-Q1-L1-E11
gcgatttctgttattcgatcatctctctctttctcgggaaaaaataaaaggaaaatttcttagatctagaatctgcgatcatagatattgagatgtttctacatcttagaaatcatgatactggactcaaccgctctgtgctaatactgaactattttaactatccttaccatatgtgtaactcgctattcaagc

SEQ ID NO: 31082 - DNA, 320 bp, Gossypium hirsutum
  Clone ID: LIB3048-009-Q1-L1-F1
gaaagcccgaggacaagattcttcagactattcccgtttttttcttcattattattaattcaatgagaagaacaagtggaatataatttcaaaacgaacgtgaagatgatgaagatccgaatagaaattacgctgtgtttagtcctatttctagtcctcgcgccattttgcatttgctccggcgagcggctccttgttggcatgactcttgttcgaaacgccaccgctcacggcgccgtctggttggatggaagtttgccggcgtatcatctttacagaagattcggcgccggatcaaacaactggattttacagtttga

SEQ ID NO: 31083 - DNA, 340 bp, Gossypium hirsutum
  unsure (1)..(340): unsure at all n locations
  Clone ID: LIB3048-009-Q1-L1-F6
gcggnggcggccgcncgagaaccaggggcacccccgggccgcaagaaagcggcacgagaagcggggaagcacacagagacgacgggcggaggagaagaccgagangcaagagccggcnggggcaacccaggcgagggaaccacgaacaaggcacccaaagagcgcacagaagagcaacacccgcagcnggacaaggacgagaagggcaaggacagacggcgaaaagccccacccgaccgcacaaagaacaacgaacccggccaacaacgccacgccggagccacgaccagaccaccaaccgccgaagaaaaacaagcccgcnnagacaagggaaagcccg

SEQ ID NO: 31084 - DNA, 350 bp, Gossypium hirsutum
  unsure (1)..(350): unsure at all n locations
  Clone ID: LIB3048-009-Q1-L1-F7
ggcaaacgcactgagngcgctgcctgcaatagatagagcaacaatgggaaacgaatcttcgacgagttacatgtctcgtcatatgtacgaaattgctcgcgagattgccagtctaatcggcgactacctatggttgaagcctgggacgactgtttacgaggaatctgatagaattagtgatttagacatagtcactttcaacttgaacagccgtaatccaacgccgaatacaggtgggatcattcaaatggctgcaactttatcattttcgacatccaagccagttcactattatacagagataagcattgccgtaccagtaagaacgattcccatgcagtttcttaaca

SEQ ID NO: 31085 - DNA, 337 bp, Gossypium hirsutum
  unsure (1)..(337): unsure at all n locations
  Clone ID: LIB3048-009-Q1-L1-G2
gacccccgggcggcaggaaagcggcacgagccgcacgaggaggccggaaggagcccagaacgaggaggcgacggagnaccagaccaaccaggncccanagcccaggagccacgggagcgggcngcgaagccccngacagngcagccgagaaggcggaccacgagcagccaacggaggcggagaaaaccaacagngcgnnngaacccncnncaagganggccaaangggacccacgacacgggaaggacanggcnngcagccnaaagcaccgaggagaaagcgggcccaaagangggaaagcggcagnggccaccannaagaccaaacgcacaaacca

SEQ ID NO: 31086 - DNA, 222 bp, Gossypium hirsutum
  unsure (1)..(222): unsure at all n locations
  Clone ID: LIB3048-009-Q1-L1-G7
gncccccagaacagaagccgggcaccacagagnagagcgcagcaggggancangggagcggcggcngcgagcaagcagaacagcgccgcgggaaaccaaaccggcaaggacgaaccgaggaggaacaaccgcagaaacaggcaaagcacggcggcaccccacccgacgacgacgggaaaaaagccagacccgcgcacgcaacccaacgcaaaccacaacaac

SEQ ID NO: 31087 - DNA, 316 bp, Gossypium hirsutum
  Clone ID: LIB3048-010-Q1-L1-A6
tgaagtttacaaatacttatacccaggaatcagaagggcatgttttctgaagagcaaggcttaatatggctaccacgacttttgttcctaaatatgccttgccttatcaacaccttaattcatgaattacaagttccaggcacaagaatgctaatgcactaacctggattcacaaaaaaagcatctgtgcctacaatctcagcttaactggacctgagattaggtctgtgatcacacacatagtttatcccaaaactctcaatcagagaccccatgctgtatccctcaagtcgaagggcttcaaggatacacttga

SEQ ID NO: 31088 - DNA, 406 bp, Gossypium hirsutum
  Clone ID: LIB3048-010-Q1-L1-D7
gaagatgttggaggagggatcatggttgcaaaaataggagaaaaaccaagcattaaaagcttgttaggaagaattttctgtgaacgccgaaaatgttcgtcccttccgtcaacaaaccaagattcggtgaaggatcggtgggacaataatgtggaagagcttggaaactatttccagcaattgttgtccttgaatttggatgaagagattgatatgttacaagctaatcccatggagtcagatacaccagaaagcatcaattctaacatgaatgatgaagaaaaaatggaagctgtgcaatgtaagatagacgaagcacatgaggctattattttgaagaagaaagaaactaaggctgatgttgaaagacatgcaaaagctaaatcggctatagatttatgcaatg

SEQ ID NO: 31089 - DNA, 141 bp, Gossypium hirsutum
  Clone ID: LIB3048-010-Q1-L1-E4
cacgtgggttatttacatttcgattagcagagcagaagactgttaacaaagatgagttgcttcaaatggtgagatttggtgctgaaatggtctttagttccaaggatagcacaattacagatgaagacattgatagaatca

SEQ ID NO: 31090 - DNA, 321 bp, Gossypium hirsutum
  Clone ID: LIB3048-010-Q1-L1-E7
ttctggatataacaattgatggctgcaaatgaggctaggctggttgacatactgtgttatctcttacatttaggccaagcacctgttaatgacactcaaacgtaccaataactttgatcgatcattactgaagcagtgcagatgctcgaagctgatatacgtgcagtaacatggatacctgctatgatatgtatatggatcttgaacaggctagcgtctggacctgaggaacgtaaactatcagatgttgaaatccaaatacaactgaaagtgcttgcagatgtgtattcacgctcatttgcaagtcctacctatccttct

SEQ ID NO: 31091 - DNA, 393 bp, Gossypium hirsutum
  Clone ID: LIB3048-011-Q1-L1-A12
ggcaggtttcattgggacttttgccattgccttctaagcctgaggtcttcatcaggctcagatgcttcttgccaaaaaagaaagaaaggccgtcctcctgggactgggaagaagcagcaattagcaactctaggtgaatggatgaacagttcggcagtgctggcctttgctccccatgttgtcactgctggaattggagaagacattgtagcgaaaatgttgtccttttcacaacacaggccaatagctgtctgcatcttatcaggcagtggtacagtttcctctgtgaccctacgtcaacctgcatcttctactcctactgtgacatatgagaatggcagtttgaaatgtagaacatgaaaccaatgtgcttctttcctacggatgaaaatg

SEQ ID NO: 31092 - DNA, 405 bp, Gossypium hirsutum
  unsure (1)..(405): unsure at all n locations
  Clone ID: LIB3048-011-Q1-L1-A8
cagattcttcaactggaatgttacttatggtgacatttacgcacttggtgttcgccagcagggaattcttattaatgggcaatttccagggcctgatctctattctgttactaatgacaacctcatcatcaatgtttacaacaacttggatgaaccttttcttttatcatggaatgggatgcagcaaaggagaaactcgtacgaggatggagtgtacggcacaacatgcccaatcccaccgggcaagaacttcacttacattttacaagcgaaagaccaaatcggtaccttttactactntccatcccttgtntccacaaggcttgctgtggatttggaggcatcaggatcctcaataggcccaaaatccccgtccctttccccgaccctgccggcgatttcact

SEQ ID NO: 31093 - DNA, 228 bp, Gossypium hirsutum
  Clone ID: LIB3048-011-Q1-L1-B12
ggccgctctagatctagaggatccgatgggctgcacgtagattcagcacgagacaaggtcaaagatgccgcagatgactgggccctcacgccaggctagaatggaacggggcgcgatgcttgttatcaagggaggttcaatagctatcaaagctaaggtgacgatggaaacaacataccggtgtcagaatctgtctaagacggcttcaaatgcagcattcttacgacc

SEQ ID NO: 31094 - DNA, 343 bp, Gossypium hirsutum
  Clone ID: LIB3048-011-Q1-L1-C2
ttcactttcgttaatcactattttctttttactcttctgtgctttgatcgttgccaatgccactgttccaccctcaaggactttcaagtacataaacgagggtgaaacaggagaattgagtgttgagtattttgcagactatcgtgccctacccattttcttattaccattccaattatgcttttataacaccactcctaatgctttcactttaagactaagaatgggcagtcgccggtccgagtccttaatgcggtgggtctgggatgccaaccgaagaaggcctattctggaaaacgccacattaacttttgggtctaatggaaatctagtgctagctgat

SEQ ID NO: 31095 - DNA, 409 bp, Gossypium hirsutum
  Clone ID: LIB3048-011-Q1-L1-D11
gtaacatccagtttaaaactatatggcaggctccgacgagtgagtctaaaatgccacctttggagtcctttaaattaacaaattaacatggttggagaaagggcgaacgacaatgtcattattgtcacctttggcaacttttagttaatggatttcatcttgacttgggctaaacacttgacggatctcgatgtttctaatcttcttgttggtgctatggtcaccaaactgttgtatgctttgtattggaaaggtgcatcagtatttgatatgggtagccatatgagcacattagatgttttatggggctctgctacatttcataaaatggcgagagagaaagtattacttattaatgctatacttacttctggatatgagctatcgatgtgtgatacagacatggtgt

SEQ ID NO: 31096 - DNA, 391 bp, Gossypium hirsutum
  unsure (1)..(391): unsure at all n locations
  Clone ID: LIB3048-011-Q1-L1-D4
cgaggctatcaactcgtnntctctgcaaactatgatctaaagaaggtggagcgatanntggcatccannagtctctggtatttctgattttggtgccctgctttaaatctccttcaaactgcctgagcctagcaatgcctagganntgatgaactaagaacctctagagttgattggggaaaagannaaatgttcgagccactctcaactatatttaccatttcacgttgggcccttctgaaatagtgatnngatgaagaaatggatctctaaccctgaggaannaagattaggaggaagtnntcgagtcttgagaaagtggaagagcccttgaaaagagaggagttngnngaagtagaaatagggtaccagtnnctgatcannaagaagc

SEQ ID NO: 31097 - DNA, 328 bp, Gossypium hirsutum
  Clone ID: LIB3048-011-Q1-L1-D9
aaaagattacgctattcacaagaaaaaagttgaattgggttggttcagctaggagggccctgctgctatgttaatcttgtaagaagggattcaaagaccgacctctcttctgcttccaatagtggagtgattccatctcctaccgataaccttagtcaactcatcaacataattcaagcgctaggtttttctgccaaggacatggacgctgtatctgatataatagaccattcttttctgccctgcactgcactactttattatatctatacatctgtaataagctaaatttctttatggtgcccagccatgggttcacacaattgtg

SEQ ID NO: 31098 - DNA, 303 bp, Gossypium hirsutum
  Clone ID: LIB3048-011-Q1-L1-E1
agtacaccctgcacttggtgctccgtcttcgtgggggtatgcagatttttgtgaagacacttactgagaagaccatcaccctggaagttgagagctctgacacaatcgataatgtcaaggccagaattcaagctaaggaatgtatccctgcagaccatcagatgcttatattcgctgtaaagcacctagaggattggaggacccttgcagattacaacatccagaaggagtccactctatacttggcacttcgtctctcatacgtgatgcaaattgtcttgaagaccctgactggaaagacca

SEQ ID NO: 31099 - DNA, 271 bp, Gossypium hirsutum
  Clone ID: LIB3048-011-Q1-L1-E5
aaaccctcttatttcttaacagccattgcaaaaatctcgcgaatgcgtcttataaactaaatcaccatgcttttcttcaaaaaccccacttcaagattccttcttctcactctcatctctgtcctactattctttttttccgtaaacatcaatgcatctaatcccaccaactcttaagatgattcggataaccatgtacagcttaaatccttctatgaacaagaagaccaactaccataagaccaataccaataatctaccactatatttt

SEQ ID NO: 31100 - DNA, 415 bp, Gossypium hirsutum
  Clone ID: LIB3048-011-Q1-L1-F11
ggtatgttgcattgtgagatcctggatgtcttatgtcgtcaagagctggatatagcccttgaagaaaaacctgacaagatggatgacaaggagtgggccaagatcaatagacaggcgtgtggtacaattcgcctatgtttggccaaagagcaaaagtactccgtcatgagggagacatcagctaaaaagctgtgggatacattggaagaaaaatttctaacgaaaagtcttgaaaataggctttatatgaaaaagaaactttttcggttcacttatgcacccggtatgtcgatgaatgaccatgtgaactcattcaataaaattttagcagacttgctaaatttggatgagaaatttgaagatgaaaacatagcattattgttgttgaattcccttcctgatgaatatgatcatc

SEQ ID NO: 31101 - DNA, 336 bp, Gossypium hirsutum
  Clone ID: LIB3048-011-Q1-L1-F12
tccctcgcactactacaattccacaccagaacccattttcctctttctctgtccatccatagctccgtttctactacttgctcttcttttctatcctctcaaagaccttatctcgtatcataatctacttcttactagtttttcatactatcccaacatctaacatattctctaactaactaatacctatttttgaaacccttaaacttatatcaatactagcacattatatattctctcaagcttcacacatatttgagttcctatcttgatacactaatcatattagcccagatactaatttacagtgatataaatttcttaaactctccactc

SEQ ID NO: 31102 - DNA, 405 bp, Gossypium hirsutum
  unsure (1)..(405): unsure at all n locations
  Clone ID: LIB3048-011-Q1-L1-F7
atttcatgtttgcagcaccccaatcttgtgaaactttatggatgctgtatcgaagggaatcaactgttgctagtgtatgagtacttggaaaataatagcctttctcgggctttgtttggaccggaatactctcgaataaatctagattggcctaccaggcagaagatttgtgtcggaatagctaaaggcatagcgtttctccatgaagagtctagactcaaaattgtccacagagacatcaaaggtaccaacgttctgcttgatagagaccttaatcctaaaatatctgactttgngttggccaagcttagcgacgaggataaaactcacatcagcacacgaattgctgggacaatangatatattgcaccagagtatgcactgtggggttacttgacctacaag

SEQ ID NO: 31103 - DNA, 223 bp, Gossypium hirsutum
  unsure (1)..(223): unsure at all n locations
  Clone ID: LIB3048-011-Q1-L1-H1
cgagcctttactttgtggtgtaactactcatgaactctaatattcccagaatgggaaccctagtnttggtcactttcgatctgtgcttggacctatcatatcnnncttagttcagatcccctctagtagttgtggannattctgaccttcagtatcgggctcacaacatgaactggtgtcactcactatctatttatggaatggcattcatgccctcagaatg

SEQ ID NO: 31104 - DNA, 418 bp, Gossypium hirsutum
  unsure (1)..(418): unsure at all n locations
  Clone ID: LIB3048-011-Q1-L1-H10
attattctccaatcaaactgtggttttgataactgtcgctgggtttatccattcgcctcgtttttagaaaaaatatctcaaaatctttttaattttttcttcggataatagggtttaggaaatttttcatcttccaattttcaattggattttgcctgagaaaaagaatgatgagaagacaagaggaaaatcatcgacatcaggatcagcaatcaagggttttccacgagctgtcggcgctggttctgaatcttatacgatcgccgtcgatacctttcgccgacgaatctccggtgccggggtggaggtctcacccccaatacttgtcgacgacgacgatatctncggcgggatacgcttggctgatgctagggatatcggtttcgttgatgttgtgtggatcggttactttctttat

SEQ ID NO: 31105 - DNA, 205 bp, Gossypium hirsutum
  Clone ID: LIB3048-011-Q1-L1-H8
cactaggcttactgatgttacacttagctgtagagatttcattgatgagagtggtaaagtacttgagctcactatccgggctcataattaaacctgatatcttttgtagtacttgaataacatacgtgagtttaactactacattttttaattgccttgctcttttagttggcattacttgaatgacatacttgagtttaactaa

SEQ ID NO: 31106 - DNA, 133 bp, Gossypium hirsutum
  Clone ID: LIB3048-012-Q1-L1-A3
cttgttttatcttcattatccacacatcaaacaaggtttttcagagttttagcaatctctatctgtttctaatgtcaagtcaatggcccaatcataacaacataatagctcgaaaaaccataacattactcaa

SEQ ID NO: 31107 - DNA, 260 bp, Gossypium hirsutum
  Clone ID: LIB3048-012-Q1-L1-A4
acatgagcattatgctgatactccacaaacggtaatccaggaggaacttgaggaggctcaaggactgcttaagaccaccaacttcacccgtcaatcaaaagaggctagactagctcgggtttgtgctggactttcatcccgtctgcaataataccaatctgagaatgcacatcttgaggagcttctaatcgctgagagggagctcagtaaatcctatgaggctcgtattaaacacctgcagcatgacttatctgcatcta

SEQ ID NO: 31108 - DNA, 255 bp, Gossypium hirsutum
  Clone ID: LIB3048-012-Q1-L1-A6
cttacactatttaccttcggctcacttttaacgaggatctaagatgaccccaaactgagatgtggcactcactatcatcacctagaactatccctagatattgctgaatccactcttcaaaatgctttccgactactattcgcccatcatatctgcacaattcacggagtcaactcatttcaatgatctagtagctaaggacccatggcttttgtcgcataatctgattgtcaagcctgatatgaaggttccaaa

SEQ ID NO: 31109 - DNA, 398 bp, Gossypium hirsutum
  Clone ID: LIB3048-012-Q1-L1-A9
aagtgattaagttttttgaaacatatcacaaggaggagtacaaagtgtataacctttgctctgaaagactatatgatgcttcattacttgaaggaaaggtggccagtttcccgtttgatgatcataattgccccccaattcaattgataatatctttctgtcgaagtgcttactcatggctgaaggaggacattgagaatgttgtagttgtgcattgtaaagctggaatggcaaggacagggttgatgatctctagccttcttctatacttgaagttcttacccactgctgaagagtccattgactactacaaccagaaaagatgtgttgatggaaacgggctcgttatgccaagtcaaattagatatgtcaaatacttcgaacgcacgttaacatac

SEQ ID NO: 31110 - DNA, 264 bp, Gossypium hirsutum
  Clone ID: LIB3048-012-Q1-L1-B4
ttttaaatccataccttttccttcacccttttctttaacaagtaatactaatattgaaaataagaaaaacatatttgttccctctatcaccaatcctagtccttaccatcattatcattatcaccaaccaacctcaacaacaacaacagctgccttttcctatcattttcatttgattctaacaacaatttcgattcatttcgttttgtcttctgtaatattatctctattaatttctgtttcatactactaatctataatatt

SEQ ID NO: 31111 - DNA, 259 bp, Gossypium hirsutum
  Clone ID: LIB3048-012-Q1-L1-C4
cacatttacttctactacttctaactctagctttccatatccgggatcaagagtttcttttaatctactcaagaactacttatccatacttaaactgatcataaatatataccttacctaatttcaaatacagtgctcattactcacatgatcaatacaatttaacctagcatcactaacgatacaattatacccatttgaacaaaatcattaccatcaaagactctaatgtactacttcactataaaattgtcaatac

SEQ ID NO: 31112 - DNA, 390 bp, Gossypium hirsutum
  Clone ID: LIB3048-012-Q1-L1-G1
tcgagctatttttatctttttactttttctacaccttcatctgggtataatgagtcacatatctcaatgcatttttattttcacataaaaatgagctaattaaaggcttagaattactaatgttctaattgctaattcatgtttaaaagaacatccttcttcaactattttcttgaaagtaatgaattttactggttcaactcatattcacttgactgctgtgcttcaattgaaaggttatgctatacgagtgcaagttccaacaaacaagctatataaccccattggaaacttttatactcaaaggatccaccattgatccacaaattttctggaaacatctacaggcttccagaaaagtaatccacagtttctagtgaatgccacttt

SEQ ID NO: 31113 - DNA, 384 bp, Gossypium hirsutum
  Clone ID: LIB3048-013-Q1-L1-A10
ataacaccaaattttcttctttttcccgttaaccccccactaactggagcaatggctaggctagagagatgtcctctactgctacagtgacaagccgatcgactaaacagatggaaaccgttgatgacaaactattagtataaacgtacaatatttataatcccatattaaatttttatcatatagaactcaaataccatctttttcggcatatatgaaactgctggattctgataccaaaaacggttcatacccgggttgtatgggtccttttactggcagaaaccctaacttgaaaaatccggaatgtcttaagcataatgctcctcaagggcatatgttttaccaagttaaacaatctttttcgcgtttgaaacttaatac

SEQ ID NO: 31114 - DNA, 292 bp, Gossypium hirsutum
  Clone ID: LIB3048-013-Q1-L1-A12
atttcaatctttatatgtccaccttgttttcaataggtactttgttgcatctcatgggcttggccacactatcacaccataatgtgcctactgcaacagcagtactcgctgtatacacgctacatccaacaatacttctctccaattacagcactgaatacgataatctccattggcaaaatcgttcatctcaaagctcttgtttcggaatatactgaaagaaagacccttccaacatagatatcttgtgaatatatcttagccaagatcaatatcaataggactatccata

SEQ ID NO: 31115 - DNA, 427 bp, Gossypium hirsutum
  Clone ID: LIB3048-013-Q1-L1-A4
tagatcctttgttttgtttcaccaaggccttgtatcctggtgaaggtgttgaattccaataattgaactataggactttgaggctctttaaggatttaggtttcctatgaaagtgtaaggaactattcccctcactgctgaacatttaaatgacatgttacacgacattaagatattgcgtcatactagattaagcaaacctactttaaaattctgttttctactgctagagtaatgtcacttttagcttaaacaactttgaaatgaaaatatgcttgcagtcttatcttggggaccataccttcctatttctcctttcccatgggtacaggatacaatagcagtttatgtaataatgaattttgtttgcattttgataatcaaggcttgtagattatttcccagagtccgcagtgtggaaacctgt

SEQ ID NO: 31116 - DNA, 317 bp, Gossypium hirsutum
  Clone ID: LIB3048-013-Q1-L1-A5
ggacgcaatggccacgagctatcatgtctaaagcctgcttgcttctgatgggtcgatggagtgttcgacgatatcatcactccatctttagattaccaacatcatgatattgagcttgccaaggggtatcctttcccactagataagcaagcacatcacaagccattccctgaacagcgaccgtcaatacacagctgacctgtcatgtaaggacaggaacctacacatgatgaaaaacctgcttatagaaacttattgagtgcggaaattgagggcacacataaacctacacgacattcacgtgtgaaacctacaga

SEQ ID NO: 31117 - DNA, 424 bp, Gossypium hirsutum
  Clone ID: LIB3048-013-Q1-L1-A8
ctagcatccaacggcgacttctaggcttactgggccatcgataatggccctttcaacaatgatccatacccatctcccaccagccctcagcggtggtgggatgaatcggatttctgctgtttttgttcatcaaggagttgcttccgataccaaactcaataggggtgctcgacgtttagctgaatcgttgactacccttcttaatctcaatatcgaacctctttgttcgaggaaaaatcttcaatattccaattgggattcgtttgatgatgagaaacataacaccccaacgacgtctcccaaggagatgattgccgataagtggcgtgagcttcatggttcttcggattgggagaagcttttagacccacttcatccatggctacggcgagaaatcgttaagtacggcgagtttgctcaagcg

SEQ ID NO: 31118 - DNA, 279 bp, Gossypium hirsutum
  Clone ID: LIB3048-013-Q1-L1-B2
gtaaactgtttttgcttaagctggagctcatcaatgattgggtactggtgaaagaagagtctgtggctaaccataaaaggctcactcctcatgaagagaaagcccctgaggatcgatctaaagttgattattttacagggtcaccgattagtgtcacgtaactcggaggagcttatcactgagaaccattctattgcttcatctacctttgagccggaatattatctggtgactttatcactaacttataacgatcacattatgcactgcatgtgctat

SEQ ID NO: 31119 - DNA, 252 bp, Gossypium hirsutum
  Clone ID: LIB3048-013-Q1-L1-B7
ctttgatgctggtttgaacacattattgcagggactgctggggtctagattgaacgctgatattggatctctttatacctttgctccaacagcaatcacaattattcttgctgatcgggtcaatgacaggtcagatcctattgagagatttaaaaggatattgcaatcgaatcaaggtgccctaattgcaacttacactctcaagattgtcctcgacttaacaagcctttgtcgtaatgtttctaagatttt

SEQ ID NO: 31120 - DNA, 358 bp, Gossypium hirsutum
  Clone ID: LIB3048-013-Q1-L1-C4
gcatcgcgtttttaccttcgatggatctcaactactagtgggtatgaggatatgcttgcaaacagctcacaaacctacctcagagaacgactgtgacattgcgaccactcgccacttcaaacattatattcgcatcaatgttcccttctaagctgatcatatgcctgcttcaactgaattactttttataacagatgaggactcatgaacaatgtatgttaagcctaatatcattgcactctgttgcatacactaagcgcgcaacgactttattttacggctttactgtccattttatatcgatacccgtatcaatcgatatgttctgcgactaaaatcacgtaatgaattgctattt

SEQ ID NO: 31121 - DNA, 333 bp, Gossypium hirsutum
  Clone ID: LIB3048-013-Q1-L1-D9
cactagtgaatgttttcttatgtgtgaacacaacatattagggagtatgttatctcttaagaatgcattgacaaagttttgacactcacgctgaaagagaaaaataccttgaactgcttaattggtatgttgcaatctctctttggtatgacgaacatttgatagccacttagtcaagcacagccttctcaaatcaactgcacacacttctgataataatggtaatagatacaaacttctgaaatcttcactcatggaactgtttaaatatatcctcaaagaaaaactgaaattattgattaaccatatgctggattcattattaaatcattt

SEQ ID NO: 31122 - DNA, 417 bp, Gossypium hirsutum
  unsure (1)..(417): unsure at all n locations
  Clone ID: LIB3048-013-Q1-L1-F1
gaaagcacacatgatgatataattggtaacgtggaggattgttcttcgaaggagcatgccttggaaaatacgcacgagtctgctttaccaacaaccgaggatgtttcttctgttgcaactgaaattgctgatgatgctggaagcaaaatatcacctgatgtagacaagaaagagaatgaagtgttatctgatatttctgagggaatttcgagggaagagttaagtcgcattgttgcttcccgttggactggggaaagtactaagaatcaaggtggtaataaagatcatgctgatgacagccatgaagagacacctaaggacacacatgatgagccatatgatcaccatgctactgatatntgtgtggacactggaaaagatgatnatgaaaaatatgattatgaaatagatgatgaa

SEQ ID NO: 31123 - DNA, 363 bp, Gossypium hirsutum
  Clone ID: LIB3048-013-Q1-L1-F8
ctttaggtcttgccgataccagtcaagcacaagctatatggggttgactattatgatgctaactgcttacaaaaatgtctacttatgatagattagaatgcgagtaatatagagtgtccaggcttgtgtccaaccatcgcatgtactgtctgttctatggctaggattcatgttgaattggagaaaattgcatcttatagacacatccatgttgcctgctctatcaaaagtatggcggtagatatttacagctataacgatgattggattctacgtggtggatactgcgcttgctgcagcagaaccaagttcgagccctaatcaagctacggagaacatctatgttaggaaagcattctgttc

SEQ ID NO: 31124 - DNA, 348 bp, Gossypium hirsutum
  Clone ID: LIB3048-013-Q1-L1-G11
cttaactagtgccactcagttggtggaagaatctatggtgaagggggatagaggttggagacaagaaaatgtgatgttgatttttgctcgctcctacggtctaacatgtttaatccgtatcagtgtgaaagtcacatgttcttgacattgactatcttaccatggtgacatccatatctcactggtaaagcttagtctcaccaagatcaaatcttgaaaatcctttgaacttatataggcctagaggatacggatggttattgaatatattgcaagagtttagtatataggtaacactacacggaaatatctcgtaatgatgatcatgttttgcctgcggcatgaaca

SEQ ID NO: 31125 - DNA, 320 bp, Gossypium hirsutum
  Clone ID: LIB3048-013-Q1-L1-G12
atttgacgagttttttggagctgaatctcccaaaggggattgagcgcaatatgtcaatgttcagtctgggtgttgcagaacctaagcttggatcccacatcttcgatacaacaaaaatttcatgtcagagtgtagagtttgcacttgatcttcttcgtggtgttcagctgcctttcgataagtctatcattgacctaatctctgggcactcaacgaaagctcaaataggcctggcgcacagttacagatcatcacatgctaaactcaatgtcaaccaacttgtcaacttggcaattcaagcaatttttcctacttgacac

SEQ ID NO: 31126 - DNA, 183 bp, Gossypium hirsutum
  Clone ID: LIB3048-013-Q1-L1-H12
gtaaaaccctctgattctactgggactacttattcgagtcagcggagctactgccaaagcgttttaagaacaacattgattacactactggcatccttcagaaagttcaagctagcaatcagacttcttggttggcattctcaagttcattagaacgctctcattccctctagggaaatcaaa

SEQ ID NO: 31127 - DNA, 319 bp, Gossypium hirsutum
  Clone ID: LIB3048-013-Q1-L1-H2
gttaacgattgtatgctttatcaagatgcttatcaatgcggctttgggtaaagtatatagtcttcgccgtcaataatttctagaaaccataagttatttatatattaaggccgctacgactgcatacgtccacaatcaattactcataaccatcttgattgtaacaaatactattgatttcgtcgcttacataaaacattgtgtatcatgctccacttgttgcaaagaacatgcaagacatgtcagaatttacagaacttttggttctacctaatgctaatgatttcttcccggcgtttgcctctcatgatttgcaagg

SEQ ID NO: 31128 - DNA, 431 bp, Gossypium hirsutum
  Clone ID: LIB3048-013-Q1-L1-H3
ggaaaaccctgaagcgcgcccaattagccaacttgatgaagagcaagatagagagcaaaatctttccattagaccctaatggaatttacttggttttgactgctaaagatgttacagtagagcggttctgcatggcatcatgcggtttccatgacagcatattagtaggggggtcaactcgagtggttttcgcacacgtgggagaccctacagtccaatgccctggtctttgtgcttggccttatgctctgccggcttatggtcctccaggcccagccttggtggcacctaatggaattggaaccgatggcatgatcataaacatagccaccctacttgcaggggctaccactaaccccttcaagaccggttattttcaaagggacgcgttggcaccattggaggctgtcacagcttgtcctggaatattt

SEQ ID NO: 31129 - DNA, 149 bp, Gossypium hirsutum
  Clone ID: LIB3048-014-Q1-L1-A5
gagaaattttggcaggaggtcaccttgggtatgaggaagtccgaggtgttctgaaagatgttcttgcattgaaatttgaagatggagaatctactggagtaagtgaatcattgcgttcagctttcttaattggtcagcgtatgaacagg

SEQ ID NO: 31130 - DNA, 445 bp, Gossypium hirsutum
  Clone ID: LIB3048-014-Q1-L1-A9
tctagaggctagacgcatgcgtccggctgctctaatttggcatgagcttactttgctactcactaaatagcacgacaggggacggataaggtaagagtacgagtttttgagcgacatcggaatgacttccggcaatgtgccatgttccgtgaatggtatcttgaaaggaagcgctcctgtgcttcctactgttaattctgcgaataatcagaaaattgccgtagttaatcaggctctcatgcaacagtatgaggaaaggatccaagttagctacgaaacactgaacatctggctgcttgttatacaccctaataaaatggacataaatcgacaaatctgtgatgcattgaaagccaaactacagcaccttgaacccctagccactgtagagacggtacaagatcttcccgaaggaattggtgaagttcaagagatcattgacatg

SEQ ID NO: 31131 - DNA, 291 bp, Gossypium hirsutum
  Clone ID: LIB3048-014-Q1-L1-B1
gtttatgggagtgtgattgtgatgctggtatttttgcctgtcgggcttgctatgaggatggtgccctctattctcccactggatatatcgggatctgatccatataccgagattccagatgacatgcttatctttcaaatatgcatgccttttgctgatgagcattttaaattgagggcaacaatcatgtcatgtctgtgctattggttctctgcagttgagtgggcattaggcttaacagactttttacttcccatactctgtgagaatggtggccatgacaatgttaat

SEQ ID NO: 31132 - DNA, 316 bp, Gossypium hirsutum
  Clone ID: LIB3048-014-Q1-L1-B10
tgaagaaatccggaccaaggccaacatactttgtgcgctttctgcaatagatgaagcggcactggtgaacgaatattctacgacttacaacttttgtcatatttaccacaatgctcgccagaatgacagtctaattaagtgactaactaccgatggaacctgcctcgaacgactactaacgatctgattgaattaatgagttaaacaaaacatactttctctcaaccagaccagatgtaatcccgcgtccaatacagatcattatcaattcatatggctgcaactttatcatcatcgacacccaatcactattatt

SEQ ID NO: 31133 - DNA, 170 bp, Gossypium hirsutum
  Clone ID: LIB3048-014-Q1-L1-B7
tcggacgagcgacgccctgactcgccacctcaccaatacatgtccaggtgtatctctaggcaaaccatcgatctcattgtttataaagagatacgcagagcaaaaccgtcccgtttgttgcttcatcaacagccctttcattacttgtgcatctgatgttgctgtaagtc

SEQ ID NO: 31134 - DNA, 412 bp, Gossypium hirsutum
  Clone ID: LIB3048-014-Q1-L1-C9
caggattcaaccaagccaattttggttgaatgcgcatgtattatactacctacaaaattcatgctttacttttttctttaagaagatcgcagtccgagataagagaaaggttgtgtatgctgagatttaaactctagatttgctggatgtcaatacatcaaatcccaagttccatgctttccatttcaaccctataagaagtgagatgccgttctctgctctacgaacctcgcaatcatcttcgacttagttttggccggtcacaagcaatgcaaattgcgctttgctgttttagaatccgggtaaaggaaattggagcaataaaattgagggaagcagctgcagcatccccacgagagttgggatgaacatttggcagcataacaaagtccacaggcggtggcaaatccat

SEQ ID NO: 31135 - DNA, 411 bp, Gossypium hirsutum
  Clone ID: LIB3048-014-Q1-L1-D10
aaacaatggagttctaagttgttcaaacatgggggttgccttccctggttttccatgggggttttggggtaatagtggaaataaggaaaacacattggttacaaaggaaccttccttaaatcctctgaattggggtatatgtacaagagactgagactgtgaaaattcccacacaaatagcctctactctaggggaacccaatttgcaaagtgatgataaaaagggaaaaggggtgaaaaagaatatgaccttgtgatggcaccatcagatgtggagcattcatcaggatatgaatcagatgctcagaatgctccattgggtggaaagaaccacatggtcctggttttcatggtgaagatgatgatgatgggtttgctgtgttggttccatgttatagacctggttgcaaa

SEQ ID NO: 31136 - DNA, 311 bp, Gossypium hirsutum
  Clone ID: LIB3048-014-Q1-L1-D6
ggaagatgcaagctgcaacacgaaacattcattccaattgtcaaagaatttgtggaagctttaggtggtttcagtattaccgatctgtttccttccatcaaattgcttcccatgatcagtgggatgagagccaaacttgagaggtgtcaccatgatttggacatgatgcttgaaagcatcattgaagaacatagagctagcaatgcaaatctgggaaacagtgatgatgaaacggatgatctacttgatgttcttctgaatcttcaagatcatggaagccttgaaatttcctttaacgactgacaacatca

SEQ ID NO: 31137 - DNA, 170 bp, Gossypium hirsutum
  Clone ID: LIB3048-014-Q1-L1-E8
gtttatgggagtttgattgcgatgctggtatgtctgcctgtcaggctagctatgaggatggtgccctatactctcccactagatatatcggtatctgatccatataccgcgattccagctgacatgcttctagttcaaataagcttaccgtttgcttgtgagcattttaa

SEQ ID NO: 31138 - DNA, 143 bp, Gossypium hirsutum
  Clone ID: LIB3048-014-Q1-L1-F8
gaaattcttgtttaaaacataataaaaaagtcatacgcgatgagcactgtcggtcaggttattcgatgcaaagttgtgatggcatgttaggcctggaagccactatctatagattaagtggaagtggctccaccctaaaaaca

SEQ ID NO: 31139 - DNA, 353 bp, Gossypium hirsutum
  Clone ID: LIB3048-014-Q1-L1-G12
attggagtcctactggaggacctgatctgatgggcggggattgtgtgcatgctactttgctgaaccacgtctgtgttaactctgacgacgttcatgagaaaactgggcaaatgacagatcctgctttgactgattacgctgagtttcagattgttctaaccatcatcagatataccttgagagcatctcccactacatattcaacgatgaaagtgagatcgcaagcgtgctctgcagaaactacaactgatgcaaacaggctctatcccatgcaggcccgtggcacctggtccgtccctgacatcaatgtcaacgactctgttactaacagcaagatcgacaacttgaatgga

SEQ ID NO: 31140 - DNA, 152 bp, Gossypium hirsutum
  Clone ID: LIB3048-014-Q1-L1-H10
ctctcttacactctcctcattgatgatctttgggacagtataaacccttttcactccgttctatacacccactgaacttttatctatattatcgttaatatatccatgccttagctcacttactattactactctactatcattctttctat

SEQ ID NO: 31141 - DNA, 376 bp, Gossypium hirsutum
  Clone ID: LIB3048-014-Q1-L1-H11
ctttcatactactatctgactacctgtctattagactggccaacctctcctcacttctctatattcacctacttaacatctaaattatctgcacgttacctacccacctctttattacaactagtctgcaaacctccttacattcatgtaattactaatactcacctattcattcaccaatcagaaactcttaacaacctacaaacctttcatgtctcacggaatttaattcaatgtctacgtacaataacttcatacttcaatgcagaatactaactacactccttctctaactacattatattcaacatctcactcccctaggaattagattaacattcaacttaacctacatacactcaatctttcttacaac

SEQ ID NO: 31142 - DNA, 389 bp, Gossypium hirsutum
  unsure (1)..(389): unsure at all n locations
  Clone ID: LIB3048-015-Q1-L1-A2
taacagcaaagatgagctcttcttcttcttcagtgatatgttcggtggttattattttagctgtatttttcaattcattgttgttatgtaatggtggaaagactagtatctacgttaggaaagaggagaaaactgtggatatgccccttcacagtgacgttttccaagctcctcttggttacaatgcacctcaacaggttcatataacacanggcgaccatgtggggaaagctgtgattgtttcatgggtgacccaagatgaacccggttcaaatacagtggtttattggactgaaagtagcacagagaagatgaaggcactggggaaaattagcacttataagtactataattatacctttggtttcattcatcactgtactgtcaag

SEQ ID NO: 31143 - DNA, 312 bp, Gossypium hirsutum
  Clone ID: LIB3048-015-Q1-L1-A4
tgctacaatcctaatggcttccccttggttacacgctacaatcgcgggccatcctgctctggctggtggttcatctagcacactaacgatgaacagctttgcattgctatcacgagcttataccaagaacactattgccacgagcgcaggctcatgaaggactcattcaagtggctattaggcataagaaagactgattacaccacgatgtgctatacacaaatgacagtgctactcatagatcatacggtagcattgtgagccttactgcttgccacactagtacaggtacggctagtgatccaatgacta

SEQ ID NO: 31144 - DNA, 341 bp, Gossypium hirsutum
  Clone ID: LIB3048-015-Q1-L1-B10
gcctgctgttgccgttgccattgccattgccattgccattgccggcactctctctttcttgccttttagcagagtctttgctttgcttattaacatatattctctttcttcttcttcttctccggctctcattctttcttcttctgttaaacaaacccatatactaagtcttttttgggatttggtggaaatttctatcatttcttctggtttttcttcaaaactggtaccaacccttttttttcctctttcattctccttggttttggttgggtatttgaaattagaaaagaaccaaaaaaatgaattaagaaaagtttattaagatcccaacttgtgtc

SEQ ID NO: 31145 - DNA, 146 bp, Gossypium hirsutum
  Clone ID: LIB3048-015-Q1-L1-C6
taaccaagacatcgaagttacttgaggttatggcaccagctaggttctcgaaaactgatacgctttcactctgaccctcaactaattctctagctttggcattcaatccttgaacctgtatttgacttggaagatcgctatgaaca

SEQ ID NO: 31146 - DNA, 180 bp, Gossypium hirsutum
  Clone ID: LIB3048-015-Q1-L1-C7
gttcaataaattatgcgttatcaagatgcttagcattgcgacgggggataaactatatagtcttcgccgacaataagtacgataaaccattggctatttatatagttaggccagttcgtctgtaaacgtgccaaagcagatgctcttaactatcttgaatgtggtgaccaatatgatata

SEQ ID NO: 31147 - DNA, 341 bp, Gossypium hirsutum
  Clone ID: LIB3048-015-Q1-L1-D12
tatccattatatttattttaatcatttaaaaaataatacaccttatgatagtctctaaacttagggaagtcgaacttttaaacttttcttataagctataaattatttttatccctaagaacacttcattctactaaaatttgtcaccatcatttactcgatctcctttattcgctattcaaattctctcaaccttcttttacaaatcattatgcttcaagtgattctactttttaagcttcaatcctaagttcaaattttcaaccaattacattatctttctcattcctttaccatcttaaactttccaaattctatccttcaaattcctttaaatccaa

SEQ ID NO: 31148 - DNA, 330 bp, Gossypium hirsutum
  Clone ID: LIB3048-015-Q1-L1-E12
tcttcctaaattctattccttcacagttgccagcttgcgttacgcccactctattgagactgttgcatgagtccaatcctaccctaaatgtaatcgtagctaaagacactttctgccatttcacgtcaattaaccaagctgttcaatttgaatgaactaatacccaaccaggattcacgatccatgtgaaagtaggcaatgatttttaaaacgtgaatcttaataaacacaagccaaatgtcatgatttacgttcctggctaaacttataaccttattctcatcaatctcaactttccttatggaacttccacctttatttcaccaacta

SEQ ID NO: 31149 - DNA, 329 bp, Gossypium hirsutum
  Clone ID: LIB3048-015-Q1-L1-E2
ctagtcgcatccgctgcactaattcaatacgaggacaccgagttgtatcattagacttgaactttaccactttttatgacgcgaacaactgagacaggttcagtttcaccacctacattaactacttctgcaataacttcaggaaaaagcacgaatacattgccaataattattgcaatcattgctccaattgctagctctgctctactctagctatagagttgtagcttactaaaacggatagcacggatgaaatacaaaactttataagaataaaatgcacaagatgatgtatccacaatggaatccttgcaatatgattttagcac

SEQ ID NO: 31150 - DNA, 314 bp, Gossypium hirsutum
  Clone ID: LIB3048-015-Q1-L1-E3
gtcacagggttgtcaacagagcaaagaaaaaggttgacaattgcgggggagcttgttgctaatccctcaataattttcatggatgaaccgacatctggccttgacgcgagagcagcagccattgtcatgaggactgtcagaaacactgtggacactggaagaacagttgtttgcactattcatcagcctagtattgatatctttgaagcctttgatgagttgctactgatgaaaagaggaagtcaggtgatttactctggaccattatgcctgaattctcacaagatcatttgacttttctgagtcaattcctg

SEQ ID NO: 31151 - DNA, 307 bp, Gossypium hirsutum
  Clone ID: LIB3048-015-Q1-L1-E8
gacgggcttgcaagctatgatgactctgaatttatcgaagcagggcctataaaaaaggacatgggatatctgtttgagtttatcgcatgctatgttgcatgtggaagagctaaaatcccaaaaactgttctaaatcagattttggaatacttgacttcaataaatgacaggtcaacaaagggttctaccatgaatactggaagatcccaaagaagagagaagccattactggcacttttggaagtagtgccagaaactgaatgggacccatcctatgtgctacaattatgtgagaatgcatgctttt

SEQ ID NO: 31152 - DNA, 372 bp, Gossypium hirsutum
  unsure (1)..(372): unsure at all n locations
  Clone ID: LIB3048-015-Q1-L1-F1
aagacatgttggcagggtgttctagctctacattgttgtcaccgagggatagattgaggagtgaaacatcagcagtacagttccaagcttgtcatttccagacttcaatgagcacacaaagattggacctgccatgtaatttttctcgtaaggaaacatcgaaatcacagaccattagaccagcagttgaatccaaggccaagaccagcagttgttctatcaagcagaacactaggctgccaccattgacgacgactagtgcgcanaatccattcgaagggaggatagagatcaaaggtaaaaagtttgaagaggtttgctgaacagggtctangtgatgatgagacggtcattaatagggcaaagaggaaa

SEQ ID NO: 31153 - DNA, 389 bp, Gossypium hirsutum
  unsure (1)..(389): unsure at all n locations
  Clone ID: LIB3048-015-Q1-L1-F8
gctttgtaaaggagacgtagagcaatggttttactttataccgagacaagagagggaggctcgtgggggaagagctagccgaactacagcttcgggatattggaaggcgacggngtcttacggctatgtctactcgtcggacgatcgactggatcggatgaaaaaaacaatggtcttttacagggaaaaagcccaaattggaaggaaacccaatgggaaatggatgaattttgaacccttgaagcaattgccgaaccaatttggggttgttcttcaaaggtgaaacctgaattcaagttggggcgagtctaaggtggattgagcaagttttgagcattcgattgacccccactataagcacacaacaatgctgtaacaactttcggggg

SEQ ID NO: 31154 - DNA, 400 bp, Gossypium hirsutum
  unsure (1)..(400): unsure at all n locations
  Clone ID: LIB3048-015-Q1-L1-G1
gttgtccgaaaaagtcagtcatgtttttgctatcagctcagatgctcgttttcaccacgtcgatgacgaccgattggctcgcttcaaagggcatgttcttttgtatcagtggttggaggaaagcttggcagctggtgaaaaggtttctgaggatttctacattctgaaagtggatcctgaagggttcgatatatttgacaagagtttgaaggctaaactagccaacaagaattcttccagctatgatgaacattcacattgcaaaagaatcaaatcctcacatgaggagaaaaaacanactaatgaagaaaagaaaggggatatagaaactaactctgtatcttgggcatcaaatactgagccccactttcccagttccctaactaacagtcctgaaatc

SEQ ID NO: 31155 - DNA, 279 bp, Gossypium hirsutum
  Clone ID: LIB3048-015-Q1-L1-G2
ggaacataatgaagatgagaagaaacacagtctcctggacaaggttgacctatccaatagcagctccagctctgtaattacttttttttacttccttgcttactattcatagttcaaacagtcaaatctttttcatatatattataacatgcgttgtatgaatgttcagtctaagtacgaagaaaaaagtgaaagccgaaagaagaagaagtagaagaaaaaggagaagggtaagaaagaacatgacagtgcattcccattggagaaattccatttggc

SEQ ID NO: 31156 - DNA, 306 bp, Gossypium hirsutum
  unsure (1)..(306): unsure at all n locations
  Clone ID: LIB3048-015-Q1-L1-G3
actccataattttaggagcttaagagattgtttccagatctagggctgcgctatactcattggaaaaaagcacctncaaccttaaaattcataacctgatggtcttagaagaagcaaatctttgtaggcctaccaactgttcgatgatttgccactgaaagcttcttcattcttgccaaattcggtccttttctgccaacagcgacaaaccccatattctaaatggcgttgcatttgcttagaaagaccgttgcatacccatcgattaggaattctgggttccttactaggctgcgtagtttcagc

SEQ ID NO: 31157 - DNA, 439 bp, Gossypium hirsutum
  Clone ID: LIB3048-015-Q1-L1-G6
aaaagagagaaatattctgatctcggcaataactgttctgatggctcgtatatcgaccaaagagtgaatgttagtaattctggtgaccttacaagtgtcaggagaaacgctgacagtgctgcatactattcttgctcttcatcgacttctgttccatgtggtccttgttcctcaaaaagaagggtagactgtaatgggtcagatttcataactgaatgtgattttgatttcccccccttaccaataacagatttgcttgagaagaatgaagatgagaaagaatttgatgcaaatgaggaagtgttttctgctcaatataaattgatgtttgaggacgatcatatgcataggtttcaaatcaataacaatgctgatttaattatggaatccaatgtttcatgctcactatctaaaaatgtctcatgtcgatataactctg

SEQ ID NO: 31158 - DNA, 374 bp, Gossypium hirsutum
  Clone ID: LIB3048-015-Q1-L1-G9
gtctcgagttttttttttctttttatgagcaaatagtagaattggtagtgattattctgtaaattctggcggtgttacaggggatttctccgttaggagtgcttataaactattacaagagactagcttggatcctaatacttttatttcacatgtcaaaattaaaaatttctataggaaactatggaaattatacattcccttaaaaattctaattcaatatggaaaatcttatggaactttatttcgtcccttgttaaactcaaacttaaagaaaatttttgtggaaactcaattccctaagggtcgtcaaaatgtttaagacaacaaccatattttccaacaatgccctgcgtcttcgatcaaaggactta

SEQ ID NO: 31159 - DNA, 234 bp, Gossypium hirsutum
  Clone ID: LIB3048-015-Q1-L1-H1
cgatggtacttatttcacgagttattcattcttcgcacatgtggctggggcctttgaagacctataccccgctctataagtttcgtcaattttattatgttcaaactaattccgttaacgaagatccatatgtagacaaatatgtatccaaacttttctgaacttactcctccactagcatcaatttaacttgttacagattatttgatgatcattggtcttatgtggatgatc

SEQ ID NO: 31160 - DNA, 360 bp, Gossypium hirsutum
  Clone ID: LIB3048-015-Q1-L1-H2
ccggagttccgtcgtcggcggtgacgacgatggtcgagtctcccgtgggctgattaatagaaatcgtatatgttctaaattcgatcgattaatcaatctctttttcttttatccccgaaaggaaatgatagatccctgtgctgtaattaacgttcgatccagaacctggtttcgcaagagaaaaaaatcccggtcataattttcaattggaccgtggtgtttggcttttctctaattggataagttccaaggtaaatccctgaattttttttggatataattcccaacctaccttttttagttgatctattggttcttccttttaaaaatttttgggtatttttaagggtaagggttttt

SEQ ID NO: 31161 - DNA, 340 bp, Gossypium hirsutum
  Clone ID: LIB3048-015-Q1-L1-H4
acgagcagagagcgtactattctcgagtttttttttttattttttggggtgggaatttgtactatattaacaagaaggatagttacattgagttgaaacaaattaagaaaaaaaagtacaaaggaaaagagctacctaaagatcacacaaacctttttgatactacaaactttttcctaatcctatttcttatttgaagtataaaaaaaatctactcaaaagtgaaaaataaaaaagagattaagaaaccacaattttttcaaaatggatgaacctattatcttccaatctggaattattagcaaaatttttgtactcgaaccaagttaattctttatat

SEQ ID NO: 31162 - DNA, 302 bp, Gossypium hirsutum
  Clone ID: LIB3048-015-Q1-L1-H8
ggggccccggctggggaattcgcacgagaccccatttatatcttgctttgattccccttttctctctgtgttataaccctaaccctacctcaccaaccacgtattttccgtcggcttcctccattttttatctcaattttccacgatttctctcgctctttccactgatctgcgattttaatttgcaggatttaacatggaaggacggaaaatctaaccaaaatcctaaaatgcccaactaagttttcgtcccctttttccaattcatttttctcttgccttttaaaaatcgggtttcttag

SEQ ID NO: 31163 - DNA, 380 bp, Gossypium hirsutum
  Clone ID: LIB3048-016-Q1-L1-A10
cggagatgatgtctttgaatcaacagaaaagaattgaggagctcgaagcacaactaggggaagctgaggatatagttagagatcttagagcagagttgagagaagtacaagatgagttggagaagctgactaaaaactcaatgcagtgttcgagcgaacaaaaatcaagacacgatggtgcttgttctgaagaaatgtccaatggaaaaaccatcaacgatttccggtctggtaaatcttctctggtcgatgcacaaactgacattgggacagtttctgacatcaagaattcatgtccgagtggaacaaatgtgggtattaagtgttcttgtaaggataattgctacgtttgtaaccctgattttgcttccatagtgatg

SEQ ID NO: 31164 - DNA, 156 bp, Gossypium hirsutum
  Clone ID: LIB3048-016-Q1-L1-B10
aaactacatcaattctacaccataccaatttcattcactaatccctccatacatttctaattgtatgatatttttaatttattatccccccacaatacttactaccataaccaactatccattcacaatcccacttctcttattcaccacaacttt

SEQ ID NO: 31165 - DNA, 253 bp, Gossypium hirsutum
  Clone ID: LIB3048-016-Q1-L1-B3
gctgcttagcaatgattttctcagggaatgtgtggaggagttctcggttccatcaaggggatttgaagctaattcacgcatcttccctcaaaagcatctaaatatagtagatcctctaagagaaaacaataatcttggtcgcagtgtgagcaaagggaacttttaccgaataagaagcgctttcacttacggggctcggaagctagggcaaattctttaccagtctgaagaaactctatgagatgaacttcat

SEQ ID NO: 31166 - DNA, 113 bp, Gossypium hirsutum
  Clone ID: LIB3048-016-Q1-L1-B7
ttgaaagataagataaatggttcttctagagaaactgtgggatgatgtagtggcctgaccttaacctgaacgtggccttggccggcttaggaagatcacaaccacccaaccct

SEQ ID NO: 31167 - DNA, 368 bp, Gossypium hirsutum
  Clone ID: LIB3048-016-Q1-L1-C4
atcttattctttgcctcacacacatcgcatgtggatggacgggaattgataggcttactatgacaggatttacatggttcctttaaacctttaatatatacctgattgctacatggaaaaagattacccttaatacaatgtgacatgcttggtacataatggcaaagtcattgcagcgagtcttgattagattaactatggagatagcaacttgaaaagtccttatctgctacctgatgatactgacaaagatgtgtactttgatacgacgatgtcacacatagactaatgcttaaacctgacgtatgctacatttaaacgatactcaacaaacggatgctgatgctgctttatatcacttggaaact

SEQ ID NO: 31168 - DNA, 167 bp, Gossypium hirsutum
  Clone ID: LIB3048-016-Q1-L1-C5
ttcccattacgcacatcacgttttgatggtcagtaggccaattgcttatggaaccatcgctaagtatcttcgtcgaaaagctcgagagtcgccatctcgttacatggactaagattaccctgaaaacaacgtgccgaccttgtaacataatggcaaaggcatttggg

SEQ ID NO: 31169 - DNA, 158 bp, Gossypium hirsutum
  Clone ID: LIB3048-016-Q1-L1-D1
gccagttattggtttaggtgtttgtcgtatggatgggaaagaggttagagacctcatcatcaactccatcaagcttgtttatcgtcattttgattgtgctgctgactaccagaattaaacagaaattcgtgaggcattttctgaagcattcaaaacct

SEQ ID NO: 31170 - DNA, 200 bp, Gossypium hirsutum
  Clone ID: LIB3048-016-Q1-L1-D2
atcgtcttatcgttcccgttagccccccacgaactggggcagagcatatgctagagagatgtctgcggcagcagcggcgactagccgcacgaatcgacagatggcagccggggatgataatcttgtggtcaacacaactgacaggaatctaacctgtatatgatcttgatcatactggactaaaagacgatctactacat

SEQ ID NO: 31171 - DNA, 226 bp, Gossypium hirsutum
  Clone ID: LIB3048-016-Q1-L1-D9
tatttttttttattacataaaaaataatacactctagagtgagggcttttctaacggtaacctcactgttaaacttttcttttaagctataaatcattttcaccccaatgaacgctactttctactaaaatttgtatccagcttatacctagctccattattgacgttcaaatacttacacactgctttcaaaattcataatctttcaattaattctccttcttta

SEQ ID NO: 31172 - DNA, 352 bp, Gossypium hirsutum
  Clone ID: LIB3048-016-Q1-L1-E1
gcatgcttcaactttcggatctcagtcaacgatagggagcccagatccccatcttttctagccgacaagcttgccaggttgatgaccgccatactcgaagcatactcatcagatgacaggcatcatgttgactattacaggatcgggaagagtgaagaattccgcaggtacttaaatttgacacgagatctgcaaagggtggatcttcaattactaagtccagacgagagactagccttcttcttgaacttatataatgccatggccatccatgctgtaattaccattggacatcctgaacgaatacttgatagaagagcttttttcggtgaattccaatatgtaattgggg

SEQ ID NO: 31173 - DNA, 383 bp, Gossypium hirsutum
  Clone ID: LIB3048-016-Q1-L1-E12
agagaacaaatatggagaaacaacagaaatccggtcagggggtgcttgttatggcacccttccaaggccacttaactcccatgctccagctggctactatcttgcactcaaagggcttctcaattactatagttcaccctgaattgaactctcttaacccttcaaaccaccccgaattcaccttcgtacccattccagattagatcaagggatctcaactctcaaatgaagaccttgcagattagctcaaggaatctctagtgtcaactgtagatgttgcaagttccgtgcagagtctcaacaaaaactgtgcagcaccatttaaaaaatgcctcgaaaacattttgcactctcatcaccatattgctgcagtcatatataat

SEQ ID NO: 31174 - DNA, 279 bp, Gossypium hirsutum
  Clone ID: LIB3048-016-Q1-L1-E7
ctacaactaatagctactgcatcctgcaggctttaggaattaggcacgagcacaaatgtcgattacgcaagaaactatgtgcaaaggttcatttgttactgtactccctaactggcctgaccatcaagattgaagaagttagttctgacacgatcgtcaacgagtataatattcttcaagacacggaaatcatactacctgaccaactgcttatgataatagaccgtttcagctctatgactatcgtaccttggcctattacatcatacataatgaatc

SEQ ID NO: 31175 - DNA, 378 bp, Gossypium hirsutum
  Clone ID: LIB3048-016-Q1-L1-E8
agagtaaaatttgatccagatcgcattgttatgagcggtggatccaccggagctcatgagatggttgccttttgcttggcagatcctggtgaagcatttctcgtccccactccttattatccagggtttgatcgtgacttgaagtggaaaaccggggttgaacttgtaccagtcaactgtgaaagctgcattaatttcaagatcaccaggaacgccttggaagctgcgtatgtaaaagttcaggaggctaacctaagagtgaaggccttgctcataaccaatccatcgaacccattgggtactgtcttggatcgagacacattgaagagcatggttaggttcataaacgacaagaacatacacctgattggtgatgag

SEQ ID NO: 31176 - DNA, 292 bp, Gossypium hirsutum
  Clone ID: LIB3048-016-Q1-L1-E9
ggaccatgtaacagttggcgatctcgtagttaaacatggggagtgcattgaggctacaaaggagtccagcttaacattcttgattgccaagtatgatggtatactaggacttggatttaaagagatttcaactggaaatgctgagcctgtactggacatcatggtcaatcaagggcttgttaatgaaccaactgtttcattttagcctaaacgcaatcctgaagattacgttggcagacaaatgggttttggcgggatggattcaaaacattacaaaggggaacacacttat

SEQ ID NO: 31177 - DNA, 119 bp, Gossypium hirsutum
  Clone ID: LIB3048-016-Q1-L1-F10
tgaccacattcctttgtatgcccttttattcatccacagagaacttacctattcaactattctcaaccacttaacattttatattgcctaaatcgatacaacacttaaactaatcatta

SEQ ID NO: 31178 - DNA, 375 bp, Gossypium hirsutum
  Clone ID: LIB3048-016-Q1-L1-F11
tttacatccaaacataatgttcatacattagcaaaaagtgacataatgtcattaacttatatgtcataatctatatgttaaatttcacaacaccaaaaagttacactagtatggctttctactaattgcatcttgccatccaaatattacatataaaaaaagttatcaaaacaataccaacacaaccatgatttttaatggtcaaaaaggaatcctcttaattattccaattggacctaaaaagggagaccggaaaaaaaattagcctttgcattggatgggcaagaattttgctcaatgcacgattgcactcattcctaattaaaccttctacctcggattagaaccgatattaattttgagcactttcttgaa

SEQ ID NO: 31179 - DNA, 208 bp, Gossypium hirsutum
  Clone ID: LIB3048-016-Q1-L1-F2
acagattgcaaaaatggaatgaccatgatttacagcggaccggattataaagatcactaaatttaacatacccagtctgattacaatgaacctattgaaagtcattattacaaccacactattcatagtcatacttatactactagtacgggtgaccagcatcgcatccaatatcatttgaatgctattactgctaatatggtgatac

SEQ ID NO: 31180 - DNA, 124 bp, Gossypium hirsutum
  Clone ID: LIB3048-016-Q1-L1-F5
cattctttcaaggttgtaggaaagttaagaagaggtgaagatttgttgtattggagctggatatgttggatgtgcaacagagtcagtgaatgtagtgaagtgagttatatatagaaattaaagt

SEQ ID NO: 31181 - DNA, 234 bp, Gossypium hirsutum
  Clone ID: LIB3048-016-Q1-L1-F6
ctacatttcaaatgatgcatgacattatctacgagagagtctttgaaactggactcgagaatacatatgaccctcaagatctaggaaattacttctgacacgataatcgagaagaacaatattctttggttcttcgagattccactgcctcaaacactcattatgtgaatagaccgtttcagctctctttaatattccagtcttgctcatccatcagaaaatatgaaccaaatg

SEQ ID NO: 31182 - DNA, 362 bp, Gossypium hirsutum
  Clone ID: LIB3048-016-Q1-L1-F8
cgccatcaccagcccctcttcaagtcagcaggccgggggtcgatgccccttttcaactctcctctgttcgacggtcgacgctcgagcttgacgtctcacacacgtgcaccagtcaccatcatcgttggcagattcattcatctcattgcacgatcataaagttagtgtgattccaatttggctggaggaattcctgctcagcttttaaatttggtagctttcatacactaaagcaatacacagaatgcctagataaccagaagctgaaagtgatgggacgcgcagaggtcgaggacatacgctatttaaagatatatacgagttaaatcttgtcgagtgtgtcaaagtatctagaaacaatc

SEQ ID NO: 31183 - DNA, 176 bp, Gossypium hirsutum
  Clone ID: LIB3048-016-Q1-L1-G9
ctctcatctgctcattaaacggcatatctattgaacctgggcagtaaagctggatatcagcatgtatgaagagattccaacagctatccaagatatatagatgacactatgcacactattattcaagagcaggcaaatgtggattcatcaaatgccaaaactatcgagaataaact

SEQ ID NO: 31184 - DNA, 353 bp, Gossypium hirsutum
  Clone ID: LIB3048-016-Q1-L1-H6
gttccttacaaatttcaactctttgggcatgggcaagccaatcctaaatatggtcatctcgtacatacggtatctgatgatgtagtttatacatctggtgtggacattgcaattgtgaacaaccggtctaaagttgaggatttttatcagtcttatattactaccggtcttgccatagtatctccaattcacaatacataatcaagagcttgggtattactaaaaccttatactgcagacatgtgtgactatgactgcacgtagttgattcataattgcttttgttcattagattctccaacattgagtacacgatgctattcttggtcctcctaggaggcaacttgtgacta

SEQ ID NO: 31185 - DNA, 407 bp, Gossypium hirsutum
  unsure (1)..(407): unsure at all n locations
  Clone ID: LIB3048-017-Q1-L1-B12
ccgaggaagnnagttcaaagaagcaccccaaatttaccagcaaggnagtgggcaggcgtatnngttagatgnngtttagatgtaagaagacacgctttagaagaaggggtggtcaagcaaccacgagaagaaaagggcgtttattctatgtcatttcaagttaaggcgtttttggagaagaaatttcngnnatgtgggaaacacagttatgaatccagnnnagagaaaaagtgannagttagcttgannagaatttggggttaccagcccaagggcaaagtgggctatttttggttcccaaaaccccgacgttgctcgtttggaaagaccaaangtgttgtgagaaaagattattgtcaatgcttaaaagctannattatgatgctcttaaagctttgatcattgac

SEQ ID NO: 31186 - DNA, 349 bp, Gossypium hirsutum
  Clone ID: LIB3048-017-Q1-L1-B5
gaactattctcgagttttttttttttttttttttttgttttattttattttttttttatataatattggaacatataattacatttttattgcataacattgtttaaaaaaagtaaatagcttaatgctcccatatcatatcttttaacatttcaatatcaaaagctaaggatgctattaaaccctgcaaattaaattaaaaaagatcacaaagtaaaacaccaatcccatattataaaacctttaatactttactctcattttactaattaattagcatatacctatggtttgatggatcaaactctttatgcaactactcttgatcatgatagtactttcccatatt

SEQ ID NO: 31187 - DNA, 164 bp, Gossypium hirsutum
  Clone ID: LIB3048-017-Q1-L1-D8
cctttttagttccgacaaaagaaaacgaaaaaaatagaagaattacaatcgttttctttttgaagtcatattttaatatttggggataaaataatgctgatagaatacaacattgctatacaagttacattctaatagctactaaatggcttattaaagaattc

SEQ ID NO: 31188 - DNA, 344 bp, Gossypium hirsutum
  unsure (1)..(344): unsure at all n locations
  Clone ID: LIB3048-017-Q1-L1-E3
tgagccatgtctctagaaatttagaatttacctaactagagtggtccgagttnngaggtcccaaatcatgaacccagttggagccttaaacatgtattaactctgcnttttgatatgagcctctncagtaaatnntcagtgaaccagaaattgagaaaaaggtcagcttggacccttcaattaagtgaaaggcccatctaaacataacaataagtactgaaggcctgctttaatcatacctggaacctacannntctaagaactactntngatcttaaagaatnnggaaattgcatgaagaaatgaaggatttcaaaacatggccctttccaaagaagtccctg

SEQ ID NO: 31189 - DNA, 275 bp, Gossypium hirsutum
  Clone ID: LIB3048-017-Q1-L1-E8
tgctccaccctgccctttaacgagtaatcgcgaatacgtaaaatagaaaaaacatctttatcccatgtatcaccaatcctagtccttaccatcatcatcattatcaccaaccaacctcaacaacaacaacagctgcctcttcctatcagttacatttgattataacaacatatttgttccatttgtttttgatttctgtagttgggttcttttagtttctggggcatattattaatttataatattattatgtgaaaaaagaagaataatatttt

SEQ ID NO: 31190 - DNA, 289 bp, Gossypium hirsutum
  Clone ID: LIB3048-017-Q1-L1-G11
actataggacccccacatctgcatgaattctgaactagccacgatttccattttgaacaccatatattccccaacagtctttgacatatttcaagaccactaaaaataactaacattctatattactaccctacaaaattgacaatcaactctaacacccaaaaacactctactctaaattacaataattatgcaaaaactcatttaacaatctccatacattaacttttatttttttattacactcatatcccataaaaacctctaaaaatccttgttacccacatta

SEQ ID NO: 31191 - DNA, 392 bp, Gossypium hirsutum
  Clone ID: LIB3048-018-Q1-L1-A12
cttaaatttgccatctcactatgcagctggggtaatattagttggttgctgtcctggtggtacagcaagtaacattgtcacatatcttgcccgaggaaatgtggcactttccgtgttgatgaccgctgcaagcactctatctgctgtgattatgaccccctctctcacaagcatgctggctgggaaatatgttccagtagatgctgctgcactgctaaactcaacactgcaggttgtgcttcttcctgtattgggtggtgcattcctaaatcagtatttccatggcttcgttaaatttggttctcctttgatgccaagcattggtgtcggaacttgtggtgttctatgtggaaatgcaattgcccaaagttctttcgcaattcttgcatctg

SEQ ID NO: 31192 - DNA, 176 bp, Gossypium hirsutum
  Clone ID: LIB3048-018-Q1-L1-A2
cttaaaccattcaagcttgtatcatgctcaacgaaatgccaaggggcccggtaaatcatattctgggttgtatatcggctcaacaataaacaagataatgctatgaatccacttgactcaatacattcaaagttatagggaaaatgccgagcactaactccgtggtgcgctctaca

SEQ ID NO: 31193 - DNA, 174 bp, Gossypium hirsutum
  Clone ID: LIB3048-018-Q1-L1-A4
gaatcttccttttcccttttatatctcaaaattcaaagcgctcgcttaatcatctcatggctgctactattgtctccgtcaaagctaggcatatcttccacatccgttgaaatcctactgttgaagttgatgtgaaaatatccaaccctataaatgctaaggccgcatttccta

SEQ ID NO: 31194 - DNA, 175 bp, Gossypium hirsutum
  Clone ID: LIB3048-018-Q1-L1-B11
ctaaacttgctgagatggtgactcaaaccggtctagacatcctgtttacacccgtcatgaaatgccttaagcaatactggtcttcagattcatattaaggactcatactcatatctactaaacgtccacaggtttaccttgaggcaccactttgtaagctctgcgttctcgaacc

SEQ ID NO: 31195 - DNA, 371 bp, Gossypium hirsutum
  Clone ID: LIB3048-018-Q1-L1-B2
ccacaagaaaattatccattagctatcatcacagatcacaaaacggattcggttatgcacacatgcttggcactaaaccctgtatacacagcaataattaaattcaaagggcttcaccagtttcattggttaacaagaaagaatcttcccgttcttctaactttataaaaccatcatggcatttgaaattattatcattgcaatcatattacctgagcaaatattttcaatactactaacttaacattcgctttcaaatttcatgcttaaaatccaaacctcatatttttactcaaccatcttcggatatatttaccatatcttttttcaaaccttgacaaaaaagtctttttataccactacattgtaat

SEQ ID NO: 31196 - DNA, 330 bp, Gossypium hirsutum
  Clone ID: LIB3048-018-Q1-L1-B6
catcaatctatgcctaaatctccaacctcctcttctttagcgtactgttcatttccgctcatgcagcgcgctttgaaatcctcaataaatgctcctacacctactggccagcagcctctccacttccagaacgtcgcctaaaccctcgtcacacttgcaccatctatcaacctgctgacactactatttcatccattcgtaatcgaaccaattccatttataatccaattgtatattatatttcccaaccccttaatattttttacctctttcaatcaaaatattggattaaccttcttacaaccttacttaataatcactttaccaatt

SEQ ID NO: 31197 - DNA, 236 bp, Gossypium hirsutum
  Clone ID: LIB3048-018-Q1-L1-B9
ggatgctagacatggtgcaaagactcgagaggaggagggcaggctgaagttccattatcagtcttttgtatctttcaatgtagcttatcgaacaatcatggctctgtggaaagccagagccttgagcccagaacagaaagtgcaaatagttgaagaagagtccgaggcaaaaagcctccaaagtgacgagagtggatctttcttaggccttgaggatgtcagtatggtctgaggtt

SEQ ID NO: 31198 - DNA, 379 bp, Gossypium hirsutum
  Clone ID: LIB3048-018-Q1-L1-C4
gcagatgctattgcttatgcatttcattctgtcgctcattatgtggtcggggaaaatgcatagattaagaagacacatgattaacaactggttggagatgtgcatgctctctatgcaggcctgaagtcttatgtgacatcctttacagaagagtgattgactacctgcagggaagcctgtggaggtcatgggtatgctgttgtcaaccggtttgttacccttgggaatgatcatgacattttctacacatttgaaggcgacgatacagttcttttgcaaaaggtaactgcaaatttaatgaagcaaatcaaggacaagttccaaggtggggctatgtgtgtcacatggaactacttgagagaatctattaacacatact

SEQ ID NO: 31199 - DNA, 378 bp, Gossypium hirsutum
  Clone ID: LIB3048-018-Q1-L1-C5
gttagaggaagaagtgcctctgagaagcttacagaagggggaggtgtcaagttttctgctagagtggcaatccaggtggaagttgtgaaaacttttaatgacgctgatggaccacagtggagacattcactttttggaaatccaaatgatcaagaaacctttaggaggaggtgtgagattgcagaaactcttgttgaaaggaactttgatttggcaatccaagttatttaataatttaatctttcaacttgtgaactataatcttgttgtggttgattgatttcttaaagggaaaagggcatcctggttacggaatttttcagaaacctttaaggaacaattgatgatgattattgggaccaagtattgggggcttgt

SEQ ID NO: 31200 - DNA, 338 bp, Gossypium hirsutum
  Clone ID: LIB3048-018-Q1-L1-D7
tgttgctattctgttttatgagatcagaattcatcagatgttgttctgtcttcttctgtaagtttgtagcagtttgttgaatcatgcttcttccgttgatttaactttgtaaattgcgtgaacaagtctaaacctttactgctttttatacgactgcaagttaactctcgcggaatcgatccataagggaaaagctagttaaatgggaatttgaatgccaccagaacttgatgaattaaattgaaccctgttggttggtcctcctgagcgctgtgttccaagccttaatccgggaatgtaatttgccacaattatttccggtccccttaatttttttt

SEQ ID NO: 31201 - DNA, 240 bp, Gossypium hirsutum
  Clone ID: LIB3048-018-Q1-L1-D9
acatgctgatattgatataactaaaaaggcggtgatgaggtaaccaaatctctaaatcttgaccatctacttgaagtttctagcaaacagtgccctcgctacaatacaatgggagaagctgacattgacaacaataacctaatgaaagcagcttatctacaagatgccactgacgactatttatacttggcagaagctaatgatatatagatccgagatttgaaacatgatcaaaagcac

SEQ ID NO: 31202 - DNA, 447 bp, Gossypium hirsutum
  unsure (1)..(447): unsure at all n locations
  Clone ID: LIB3048-018-Q1-L1-E11
tcgagggtgtacctctagagttgttcaatatttatacctatgttccggcgaggaacttgactgttaagtccttatcagcaataggaagaagaaagtaccatgtttggggccgttatcttctgatgagttggttattcttgggtattgaatggttttacaaagcatcattccatagatataattaatttaaaaggataccgatattggaaataccatcaatcaaatatttctacaacgacatcaatgttccttgtatttctcaagcttgacagtgccttctattacaggggcctttacatttcagcaataagattttggtttattcgccccacagtgattgttttctntgatatntgtnattactttctaactgtatgccactacgtcagtcaaattcttcatattcttacacggatatcgtacaatttgggtgcccattgcattttg

SEQ ID NO: 31203 - DNA, 245 bp, Gossypium hirsutum
  Clone ID: LIB3048-018-Q1-L1-F9
taggagttacgagagttacgtggtggatattagagtgggcgcgccaatcgagactcatcgttcaatgaaactttccagaattgacatttgtacctggtggtatttaagcctgtgtgcgaacagacagcaaatcgtgtaacattcctggctatttataaggttcatgctttgttatgttattaacctaaatttcatttctccattccaaaaatccttggatcaggtaactttttcaataaagatca

SEQ ID NO: 31204 - DNA, 188 bp, Gossypium hirsutum
  Clone ID: LIB3048-018-Q1-L1-G2
tgcatttactggttgcagtcatagtttgacagcagaagaagatgatgaggtacgtaggatgcgtgatgaaatcagccattgtaaggagaaagagattaatgtgacagaaagaatgttgcttggtagatgtccactaacgctgacgtagactttccgcggacttatagcatttggattccctacaagta

SEQ ID NO: 31205 - DNA, 367 bp, Gossypium hirsutum
  Clone ID: LIB3048-018-Q1-L1-G6
aatgagacagatcaaagagtcccacaggcgagatggagttgaggttggaaacgctgataaaatctttgagagcacatccaaagagcagcttacaaggagagcttgatgggggtgcgtagctacatctttaccaagaccatgtcaattcaaggaaaactctaagcagaagttgcttaataagttagtcttcttttcaaacatcttaatggtaatatataacgtcatcattggtggaagtggaaaaataactggattgagtacaattaattaagaggtaatttgaggtggtaaattttaggaattaatatctggtcaactctaattttgccttcggccttaatggtctaatcttaactggttactttat

SEQ ID NO: 31206 - DNA, 306 bp, Gossypium hirsutum
  Clone ID: LIB3048-018-Q1-L1-G7
ctctctctctctctctctctcttatcttgttttcgctgtctccgttttcagttattcccgcgaccaaaccctaagctcacttcccttcttttatatcttctctatatcctttccccatcagccttctcccgagatccacctttctctggtggctaagatctgtagcatggtggcatcttgtgtttgctaacaatgaactttggattccctagctttccctgggttggaagtgatccccaaagggattccgatttggcctttggtttcaccagggccttccttgagccctaaccggaagccaggttt

SEQ ID NO: 31207 - DNA, 408 bp, Gossypium hirsutum
  Clone ID: LIB3048-018-Q1-L1-G9
gaggaatcagaggctagggcaagacaagttggagcaggtgaaatattggcccgtgaactccaagaacaattatatcatgaggtctcaatatatggcaacaatgagattgatgaaaacattgcgagggctcttcagcaggaggaagatacattcccaagtccttctaatcgtagcatctcttcaccgaattaacagtttaccactctccaaagtgcagactgataactttgaggaagtttgtgcgatatgccttgaaacccccgcaaatggagaaaccattcgccatcttccttgtctacataaatttcacaaggattgtatcgatccatggctgagtcggaaaacttcatgcccggtttgcaagtcatctataaattgaatatttgagtgatacaatggttaagcaac

SEQ ID NO: 31208 - DNA, 292 bp, Gossypium hirsutum
  Clone ID: LIB3048-018-Q1-L1-H11
cagcctaagctagcttgtaaaccaagcaacaacagctcagagactagctcccttaacgaaatttcctgctcaacgaccatgcttcaactcagcctgctaaccttgttggtactattgggatccgggctaacccgactagtcacctcgcacgaggaatctggatagtggagttgcgagtcaaactctgagatccaagtcctggccgacttcgcccctggagtcatcaccctcgattgtcacaccgatgactggaaagacattgatggcttcaacttctctctacttcctgctc

SEQ ID NO: 31209 - DNA, 194 bp, Gossypium hirsutum
  Clone ID: LIB3048-018-Q1-L1-H12
tgaatgttaagatattactggggatcagggggccaggtccaaataaactggcgggaggcttggaatgggaacaaacatgtacccttcatcttctttactgagccaagacaaggactcttccatagctgcccttgctatagattaattgattgagaatgctgatggattagcgttagagtttacagaccaaattt

SEQ ID NO: 31210 - DNA, 383 bp, Gossypium hirsutum
  Clone ID: LIB3048-018-Q1-L1-H4
tgaacatgggattgggaaattcaggagaagaagactgccagaggatgagattttcacgtcagatgagttgacaaagaagttccatggccgagttcttgaattcttcaaccatgggtgcgaggttcacttcttcatgacatggattgccaaggtagggtcctttggaagaagggaaatcatggctgtggaaagcgtttttaaggctcatcctaatggttgcttgatgattctatccagaaccatggactcagtacaaggttacaggatccttgaacccgtgcttggatcgggtttcaaagttctagcagtggccccagacttcccatttctggtgaagaacacacccgctgaagcttggcttgatgatatgaagagtgggaaaa

SEQ ID NO: 31211 - DNA, 206 bp, Gossypium hirsutum
  Clone ID: LIB3048-019-Q1-L1-A11
tagcaaagaagcttctgtattgaacaagatgtcattcaagtatgcttggtgtgcttacaagcttaaggctgaacttaagctatatatcaccactgataatgcctactggaaatattataccatcaaatactacttcactgtgattcattcttctctacacttctacttattcatgtacatgattactattacactgcatgcttaca

SEQ ID NO: 31212 - DNA, 223 bp, Gossypium hirsutum
  Clone ID: LIB3048-019-Q1-L1-A4
cacaactcactctcaattccatcgctagggttttctcggtgggggttttaaatacgtttagttgcagacaatatattatcataagcctaaaggctatcaggtttatcttgaagacactcttatatcaacatactataatcatgcttgtgaccatagaaagtactgatgaaaacgtaatattttactttatccatctattacatgtatctttcttattgtttcc

SEQ ID NO: 31213 - DNA, 271 bp, Gossypium hirsutum
  Clone ID: LIB3048-019-Q1-L1-A7
aatgattattagtcaaaaatcaaaaccatacacatttcaggggggttttctttcactgtctgaagttcacctaaaactatcactatattattctaatatctacttttctaagcttggctactcttcctaacgtaaaatctctcaacagcgacgctctagaatagcattgtttagactatggccctagatactgatgctctatttaagaactacttcatatagaatccctaaattacatctcttaaaaatgcttttgataagattttctctc

SEQ ID NO: 31214 - DNA, 329 bp, Gossypium hirsutum
  Clone ID: LIB3048-019-Q1-L1-A8
gctcactatttcccttacaattaatgtattgacatggaccgatggcacactatatggagtggatttacaattgacaaaccatcggtacacaacgtagtatctgatagacccctgacgctacccagcttaagcgcatagcaacacatacggcattacccaatttgctcattatcgtatatgccctctcatattaccatatgctacaggtcctcatacctaatggctaatggctattagcaagcgtatatacaatgttaaaactcacagtaacacttatctaaatagactcattcattaaccaatactcccaaaagattcaaaacgtctta

SEQ ID NO: 31215 - DNA, 441 bp, Gossypium hirsutum
  Clone ID: LIB3048-019-Q1-L1-B1
gatccctagtgggcatacaattaatctattgagatggtgtgatgagacaccacctgtacttcatcttcagttgagaaactatttgtactcttttgagtatctcatagacaacaaaagctggagagcctcggttcatatgtacaagaagggcaggaccagatatgctcattatcgtcaatccgatctcatcttagcagatgctgggtggcattgtagcttttgctttcggtatataagcgactttatattcaagatgaaagcttacagtcacacggatcgagtgagattcgctcatttcttgaactccaagaggattcaggacgtaatatgcagagggtctaacctattcgacatgcttgctgaagaatacacattcaaggagatcatcgtgaagatgggacctatcccttactcgtattcagcagtccatcttcctgcgta

SEQ ID NO: 31216 - DNA, 411 bp, Gossypium hirsutum
  Clone ID: LIB3048-019-Q1-L1-B10
attgaaagctcagtcggtggctgttaagctcctggatttagggggcctgcaaggacatagagagtggttgactgaagtgatctttcttgcacaattgaggcatccacatcttgtgaagttgatcggatattgctgcgaagaagaacatagactgctggtttatgaatatatgccaagaggcagcttggagaaccagctatttcgaaggtactcggtttctcttccatgggcgacgaggatgaaaattgctcttggagctgccaagggtcttgcctatctccatgaagcagaaaaatcagtaatttaccgagatttcaaagcgtcaaatatcttgttagattctgattacacagccaaactttcagattttggtctcgcaaaaagtggtccggaaagggatgacacgcatgt

SEQ ID NO: 31217 - DNA, 394 bp, Gossypium hirsutum
  Clone ID: LIB3048-019-Q1-L1-B2
tcttcccctcccttaaaatcctctcaagccttttctgctctggtgaaatcccggtcactgggccaccgccgttggtcgcgccgccaccgtcgccggccaccgcacatggtggccggaagttcaaaaggtaacttttttattttttttaataatatatatatgtatatgtatatagaaagaagggaaaaaaaacaaagaaaaaaaattcgaaagaagagagaaaaagaaaaaaaaatgcaaacttttttattgattttttcctttgtattcgaagttcggagggatttttgtgtttgtctctttttcaatcttttaaaatccccccctttttacactagtttccatggcttttatagcccctacactttcattttctattagtttctatctcttc

SEQ ID NO: 31218 - DNA, 437 bp, Gossypium hirsutum
  Clone ID: LIB3048-019-Q1-L1-C5
cttgagttgtagcattcaattaggattaatgggagatatcgtgataggtactatatgctttcaacccttgatatggtatatcaagtcctaaatcaaataaacatttagatttgtctacccctagaggtaatgtatactgccagcccttgcgtgatattgtagtaagccttgacagcgtcaaaatatttagatatttggtggttttgagtgcatattcatcttttaccgcttattgtctattcaagtagcatttatgtgttatttcttaaatgagtacataatgattattccttatggttgtctgtaaagtttctgtatgttcttgttttgtctgctaatacacaagcatgcatttatgctgagttatttctgcttaatttgttgctccttctcttgcctgcactcagtataaaacctaccccgcaggttttatgggt

SEQ ID NO: 31219 - DNA, 355 bp, Gossypium hirsutum
  Clone ID: LIB3048-019-Q1-L1-C7
gccatccccttttctctactgaatcctgtaacttatcctgaggcgtgtccacacgaagatcgggaagataaccatgttcagatgattgaatatttcttcgatctgactcctgcttctaaaatttccataaacctcaagccgaaaccgatgtacactgcgatacagatttcacgcatgaactgaatactcttgctgcatcacatacaaccaatgtttttgcacccgaattgtatatcgtggaatcagaagtagcttaaaaagctactgccctatacgatgatttcgctaaaacgcgagaggctattgagtaccatgtattccctcatgactcttttacctctgtgaaataacatga

SEQ ID NO: 31220 - DNA, 280 bp, Gossypium hirsutum
  Clone ID: LIB3048-019-Q1-L1-D4
tagctcaatttatataaaatgtatagatcaccacattcggagcgtcatttttatcaagacagccagtcttctacgatttccctcatctctcaaatcacccatatattgagtcattaacgttacacctacattttttaacgacaccttatgtatcatctataacacatgtacaatttaaatatatcataactcgtactatacttactttacatatccaacaacatatgaccttatttatgctaatcgtgtctttatcttgaatcaatataaattatacttt

SEQ ID NO: 31221 - DNA, 381 bp, Gossypium hirsutum
  Clone ID: LIB3048-019-Q1-L1-D7
catccgctgcactaattcaatacgagccacaccccaagggaatggccaacaccatgacatttacgcggcggggactcttcgacaagcgcaacagcatcggtaccgctgacaattgcgcttcacatatcacattcactgtgaaactgcttttctttgatggcctaacattctcgtatttgataactccactaatcagcagcttcaacacgtcttgagacatctatgcttacttacaggaaattgctagtatgtgtgcacactcatgtcaacatcatagccttttgtttgcaatacaatggctacactactttcactctgtctcagactccaggtaacttgctctaacggttacagatccctgcaatgatatgtactaatctc

SEQ ID NO: 31222 - DNA, 405 bp, Gossypium hirsutum
  Clone ID: LIB3048-019-Q1-L1-E11
gcacagccgaagggagagggagagagggagagggagaggcagcgaagaagctgcggagatcgtcgattctcgtttaggtctttcttcggagcttctttcttctttctttctctttgctttctttcctttttgtctctaacattcaggtgtcgaataataccagattaagccgcttcaacaggtattgagacaaatatgcttccttagaggaaattgctggtaggtggttacacgcgtgtcaacgtatagccttttgtttgcaatacaaggtctggtattctctcaaacggtggttgaattaagggaacttgatataagggttaaagatgccagcagttgtgttttctaagctaaaacctgttgtatatactggttttcaaaggtctcttacaagaaaacaagttc

SEQ ID NO: 31223 - DNA, 437 bp, Gossypium hirsutum
  Clone ID: LIB3048-019-Q1-L1-F11
gaggagcaaggcgaggtattcttcgacgaatccgatataagggacgagattgatgtcgatgaagaagaccttcctgatgctgaagatgatattgttgaggattcagatgattctattcacatattcactggccataccggtgaactttatgcagttgcctgtaacccaacagatccggtgttagtggcaactgggggtggagatgataaggggttcctttggaagataggtcatgctgattgggcttctgagctccaaggccatactgattcggtctctagtttggcctttagtcatgatgggcaattacttgcatctggaggttttgatggacttgttaaagtttgggatacctctggaaatctcaaaagcactcttgaaggccctggaagtggcattgagtggattaagtggcaccctataggacatctgatctt

SEQ ID NO: 31224 - DNA, 408 bp, Gossypium hirsutum
  Clone ID: LIB3048-019-Q1-L1-F2
ttaactacatgactactatcatcatcaaccctgaactcttccgcgcgcgcctattttaactactcaggagccggtccttaatctaatctttaaaaccataacctcttaagatgctaaccctatttttcttctctatcgatccttcattactctggcttcatgtttcaaatcctaaaaacctaatttctaacacatcatctgcatctatcatcaaccattgcggcacccatctgtgtattggctttttacatagccctaactctatttccttccgttttgcgaaactcaaaaagcgatactctttatactttgataaaaagcctatcggatccttataaacagctccatagcttggatcccacccttggtaacccttttactttgattcaaatcactttcaatcctgat

SEQ ID NO: 31225 - DNA, 211 bp, Gossypium hirsutum
  Clone ID: LIB3048-019-Q1-L1-F5
ataaaacccttcattacaaaccatgcatccaactctcccagtccgaactatcaccatacgtaggccaatccatatgatcataactcaaatccactctccaagtacacccatataaccaactgactacgaaactcttacatcttaattacgattttaacacctacatccacattctgaacaacttatctacaaatcacaacattcacactac

SEQ ID NO: 31226 - DNA, 271 bp, Gossypium hirsutum
  Clone ID: LIB3048-019-Q1-L1-G2
actgtaaattatataatatacatatgagtgatctacagttgctttcttcaacacatgagccaggtgtttctgatcacatgcatcagatcatatatatgatccctcacattatatacagcgactactaatagtagattcatgaacatctgtactcatatggtgatctattactaagacatcgcaggtttatgcagctccagaattatatcactatgaggttatgacaacgaaattaaccacttagctgatcttactgtttgccctgtttcat

SEQ ID NO: 31227 - DNA, 397 bp, Gossypium hirsutum
  Clone ID: LIB3048-019-Q1-L1-H5
agcgcgagattagttagaggaagtatgacgagtcattgctgtatgctataaagaattagcaaagtatggcacatatgtgggccagtttagctcatgattcaaatgtcgcaactgcgcttgtattggcgttctttgagatattatataggacagcggtgcttagatacagaaagcagatcaaggattacgaggataggttgaagattgacaaggcataggcagaagatagataaaagatgatggagttggagagggaaatggaacgaattgatggggaggatgatgaggctgagcaaggtgtacgtgagcataatccttatttgaaaatggctatacaatttatgaagtcaggagcacgtcttcagaaggcacaaaataagagactgccacagtattt

SEQ ID NO: 31228 - DNA, 232 bp, Gossypium hirsutum
  Clone ID: LIB3048-020-Q1-L1-D10
gctatttgaatttagctccaaatatctaatattgtttccccaaatattcaaaaaaggaacctggttctttttacagggtgctttaaaaaagattattgcctactaaaactattaaaatgttttattcaaaaccatggtattcatacctttattctttatatatactaatggaaccactttttcttttctaactttcacaatgaaaaaattttattaacactcatccttttat

SEQ ID NO: 31229 - DNA, 375 bp, Gossypium hirsutum
  Clone ID: LIB3048-020-Q1-L1-D3
attccatcaatggatggtatatggaacgtggtctttttggcttggtttctggagttgatattttttctggaggtattataaggttacaagttgcagaagctgaggtcaacaatatatccatacgcttccttgatcgaaagactggtgaaccaactaaagggaagacaaagcctgaaacaatacttaggcaactcactaccaagaagggacaggtgtatagtatgcttcaaggaaaaagagatgtggatacagtgtcaactatgggtcttatggcagatgtcagtatcatacctcaaccggctggaggtgagtgagtatatcttttaaagaagcttgcacaaaattgtatgttgtgttcctgaaaatgtttaatct

SEQ ID NO: 31230 - DNA, 299 bp, Gossypium hirsutum
  Clone ID: LIB3048-020-Q1-L1-E3
cgtgcgctccgctacaggactagccgatgcgctgcactaattcagtacgagccgcggtgtatggataccaatgaaactaccaagatcgtcgccaaggcacatggcttccctgcctgaaccatggatcgtggagaacggtttgaaagggtctagcaaggacattccccatggctggactgcacacaacatgtcgtgttccatgttgcgaccaactatggacctgacacttgataccaacggtcggcatgcaatgcttaagcatttcctctgcaatctctaggaggtcataatatgggacc

SEQ ID NO: 31231 - DNA, 420 bp, Gossypium hirsutum
  Clone ID: LIB3048-020-Q1-L1-E5
agccgaggtgtatggatgccgatgcatctgccttgatcagcggcaaggagcatgccatagaatgcctgtaacaagcgatcgggttcaagaattgcaaacgttatagcttgtacatggcacaaggcttgacggtacacatcatgttctggcccatttggcgaccacctatttggatctgactcgataccaacagtcaacttgcttgataagaacatttcttctgaagaaactggaaattagaatatgggacgaacggattgtgaggatcaatatggtagcagttcatatgcgggtttgtctatgtcccataccattgaagatgcctcttgatgtctcagtactggtggattcacgaaagtctaggccaatcaagtttgggattccaacaactacttgctaaccttgatcgggcacccgaat

SEQ ID NO: 31232 - DNA, 356 bp, Gossypium hirsutum
  Clone ID: LIB3048-020-Q1-L1-E8
ctttgcccttgtatggaaactcactgaccatgaccggaaggtccacaacatcgcagaagagcggaacagcaagctgcatttcattggcttcctccaatcttggccgcttcttctccttccaagagatccttgatgcgaccaacaaatttgatgagagcctacttcttggagttgctggtttcggaagagtctacaccggcactcttgaagatgggactaaagttgctgtcaaacgaggtaatcccagatccgaacaaggtcttgctgaatatcgcaccgaaattgaaatgctatctaaacttcgccatcggcaccttggctctcttattggatatcgtgatgaaagatcggaaatg

SEQ ID NO: 31233 - DNA, 287 bp, Gossypium hirsutum
  Clone ID: LIB3048-020-Q1-L1-F2
gaaggaaggggacaaaatgtcaaaccttgagaaccctagggactggcggttcacatgggaagcgcaatctcattcttcaaatctccgttcgttcctcttccattctcaagcaaagccttccgttcaatgcagaaacctcttagctcaactcaatctctctcaatctcatcttctcgttacgtggctaaaagagggggctaaggaagaagtgtcgattatggttccgattccaagagttctgatagattctgaagctccggtgaattttatagctttcgatgatcaca

SEQ ID NO: 31234 - DNA, 441 bp, Gossypium hirsutum
  Clone ID: LIB3048-020-Q1-L1-G11
ccccccccttttttttttttttttttttttttttgggtttggcttttaaagtctttggtgaattctcattacatgacaatgagcaaagaggggcagctgtaataggcccaatttgcccgggcttataataaatgaaaaaaacaaaaaaaccaaaaaatatatgtatcaaataaaaataagtaaattaaagtgtttatgaggccaatgtccgtttacaaattctgggcctaaattaaacccaaacctatttacaaattacctatggcccagcacttacacccaaaatcctaacccaataaacccacatcccaacccagtttacaaacagcccaaattcgaggcccaacaggacctaaaaagaagctcagcaactgaatagtaccagaagcttctggaatacagtggaatggcatcaaagagtgggctccttacccccgcgtg

SEQ ID NO: 31235 - DNA, 256 bp, Gossypium hirsutum
  unsure (1)..(256): unsure at all n locations
  Clone ID: LIB3048-020-Q1-L1-H1
tagatatacaagcttgaaatagagcagaagagattagaaggggaggccgaggacaaataaagggtgcaaaagcaacttacactatcaccagcatacaagaaggtagagtacaaacctatacactaagagcaaagtaaagcttatagaaaaatanagagaattccggagtcggattagttttcaaggaaggataactgaacataattgcccaaattattgcaaagcaaagcttatatggctaccatcactcttcttt

SEQ ID NO: 31236 - DNA, 148 bp, Gossypium hirsutum
  Clone ID: LIB3048-020-Q1-L1-H10
aacaccttcaatcctatggatcttaatacacctcggcatggtgcttatgtgggtctacataatatctctaatttcataaacagaggcacctacggtatagcaaatgctagatggggccattgctgcctaaagaaactaatgatggatc

SEQ ID NO: 31237 - DNA, 427 bp, Gossypium hirsutum
  Clone ID: LIB3048-020-Q1-L1-H3
cagaaaccttcaaactgttcaatctgccgcatctacagaggaaccttacagaactggctttcattttcaacctcccaagaactggataaatgatcctaatggggttatggtttacaagggactttatcatctattctaccaatacaatccaaaaggtgcagtgtggggcaacattgtctgggctcactctacatcaaaagatcttgtgaattggacccctcatgagccagctatctttccctcccaaccatctgatattaatgggtgttggtccggttcatccacaatcctccccgggggcaaaccagccatgctttacaccggaattgacaccaaaaacagccaagtccagaatcttgccgtccccaaaaatctatccgatccttaccttagagaatgggtgaagtcaccaaagaaccctttgatg

SEQ ID NO: 31238 - DNA, 343 bp, Gossypium hirsutum
  Clone ID: LIB3048-020-Q1-L1-H9
aactttcttaccgacatggtgctgaaactgattcaggtcgggcaaaactgattgtacgcaagattcgttctgctaatttggattgtgcctctgttcaagcgacctctgaatttgctaagcccaaacgtaacctgaagaaagttttcagtacgacaactgatatggccttaccagcaaacccacactatgacctcgaatatgttacacgctactggagaaaggttcataatcctgtagtagaaaattcagagtagtcacacgatgactctgatcagctacagcaaagttagcagaagtttccatgcgctgctaatctcaatattgaggaacagagattgaatag

SEQ ID NO: 31239 - DNA, 207 bp, Gossypium hirsutum
  Clone ID: LIB3048-021-Q1-L1-A1
ctcaacagattagctagaagaaatattacgagtcattgccgctacgtttaaatcattgtgcaaagcttgccaaatatctcacccattttacctcatgattcaaacgttgcaactgcgctttgattcataatctatgtcatattttatatcacattttttcttatccacagaaatcacactaaatattaccatgacatcttcaaaatt

SEQ ID NO: 31240 - DNA, 299 bp, Gossypium hirsutum
  Clone ID: LIB3048-021-Q1-L1-A4
taattcatcactatctcaactattttatatacctatatccctctttctctacagcgcagactctaataacttggttgttacacaaaatcattcctttactctcttataatcaaccatttttaacacccttctctttttacccattcatataccattatcctctaacctcttaacacaaatcttttcataccctttacattctccataataactagaatatacttactaacaaatctgctacttatgctcacactaccaatgcttttcccacatctataaacaacatagcgtctatacaa

SEQ ID NO: 31241 - DNA, 335 bp, Gossypium hirsutum
  Clone ID: LIB3048-021-Q1-L1-A7
ctgactctatcaaataatcacattcgttattacctagccaggctactcttgacggcactggcgctaaccgtactaaatctgagctccaatgacttatcagcccctccaacaaggctaattgactaggcaactgacaaatcatgccttttactaatcgacctctatcacaaccacatatatattcccttaccattatcgatcatcctactgataatctagcaaacattgacactttatcataaaactctcacaggaataaatcaaacatggattctaattacacttaatcttcacacagaccatctcatacatcacatcaatatcactttcaattc

SEQ ID NO: 31242 - DNA, 417 bp, Gossypium hirsutum
  unsure (1)..(417): unsure at all n locations
  Clone ID: LIB3048-021-Q1-L1-B4
aattcttcactattaaacctgttttcttatcttacctttcattaaactccaaagctcgttttataaattactcacacatacctattattacatagtatcaaatctattaaactcttcttctccttcataatcacaatttcatctaaaaaacacagtctatcatattctctactttaactctacatctcttcacattctcctttacctctcctttctccatccaccagtccttccacctcactcaagacctcctctatccaatattaccatatttcataccaacttccttccatttccaccctcaattatagataacacatcaccttaaatacaaatatcttttaatcttatttccttaaccataataatgtcatttcaaacactccctttcctacaacattatnccatcttatatat

SEQ ID NO: 31243 - DNA, 335 bp, Gossypium hirsutum
  Clone ID: LIB3048-021-Q1-L1-B5
atcacttgtttcataatctaatgtgtatccccaaccggttgaaggatccaaatggaacggagttccagaagaagatctaccatctgattcctatatgctccacttacacaatcttcgaacacttaattctgatacgtgcttcagatgccagttatttaaccctgtcacaatatatgttatacacgacttttcctactacaatgttctatactagaccttgtatcaactctacaattatgttacttctcagaactcagccattcgcttatcctatacttaatcgccattacagtcgcgcttttacttcagatcagcctatgcagctctactgctac

SEQ ID NO: 31244 - DNA, 252 bp, Gossypium hirsutum
  Clone ID: LIB3048-021-Q1-L1-B6
atcacttctttcaaaatctactactaattcataaactgactgcataattaaaaaggattgacttccaaaaaaatatctacatcatgaaccttatttctacacacttacacactcatcgaacactataatcttatcctacattcaaatctcattatataacccaatcacaatatctataataaaaccctctacctactactatcttctactctaaacattctatcaactcttcatttatataacatctaataa

SEQ ID NO: 31245 - DNA, 335 bp, Gossypium hirsutum
  Clone ID: LIB3048-021-Q1-L1-B8
taaaattgattatcatcaacagcagctaacgataggagctgagactataaaaaaggattgactccttattcattacattgctctacatgctgaatgtcaatggaattttcttgcaaaacatccatttttaacgataacattcaatattttcaccttcagattgttgaattatttgaaaccagatattaagcataccaaccttactgctcaaaaacactttttcatccttgaactccattctaaattctctaacagctcctccaatattgcacaacatctacctttaagaaccgattatcatattaataattactgtataacccatgtacaaaaac

SEQ ID NO: 31246 - DNA, 433 bp, Gossypium hirsutum
  Clone ID: LIB3048-021-Q1-L1-C12
cttagtactgctgttacctgtcaaagaaatggaaggccagggtctggctatgaaaagtggaaatggaagccaaatggttgttctcttccaagatttgatgcactgaagtttcttgggaagatgagaaggaaaaggataatgctagtgggtgattctataatgagaaaccaatgggagagtctagtttgcctagtgcaaggagttataccaacagggcataaaaaagtgacctacaatggtctttcaatggccttccatgccttggatttcgagacgtcgatcgagttttcttgggctccattgcttgtggaattgaagaaaggacctgaaaacaagagagtcttgcatttggatttgattgaagagaatgctagatattggagaggtgttgatgttcttgtgtttgattcggcacattggtggactcattctg

SEQ ID NO: 31247 - DNA, 385 bp, Gossypium hirsutum
  Clone ID: LIB3048-021-Q1-L1-C2
tctacaactagtccatccccataactacactaattcatcactagccactcaccttttattctgcctccacttttatatctcacttgtcgtttcccaaaattcagaactctatatattacacatttacttctactacaccaccatttcatcatcttattctgctactacacttcacataaaccatcatcatactattaccatcaatgattcttctatcacttatatccttaattaaagctccataacacacttcactcaaaattccaaacatatttatcaataacaacacttctataacctatacatctattatactaatcatcttctcatacatatacctttcactcaactaattacacttcattacatcttatacatcatatct

SEQ ID NO: 31248 - DNA, 308 bp, Gossypium hirsutum
  Clone ID: LIB3048-021-Q1-L1-C3
aattcatcactagatactttcaattcttcttaagaatactttttacatttactggaggtttcataacacatggtgcctcatataacttcaatttcatcatactaccttgtcatttctatatccaactatgttatttatcttaccaatctccatcactctatatcatctcttgacaaaacagcttccaatgataacaataacaactatctcccatacaatctatcaacatatcacaatcttatatttcattaaataaccaaacatgtttatgctcttcatccttattattcacatttcttactttacac

SEQ ID NO: 31249 - DNA, 361 bp, Gossypium hirsutum
  Clone ID: LIB3048-021-Q1-L1-C5
ctgataacttctcatcattagaatcacttcactgcgggacgtgttattgataccatggaacatgctatctatcacatagaaacctatcatattaccacaatcaggtaaaacactccaatatacctaatgtaccagacaatcaagtctttacagcataagatagttatatctgctgaaacctttcataacaccttcaaaagatattcttacttacacaaagcaccaaataaagatcaatctcatcacctaacctacctatagatcaaattcacttacctgcatcattatgagacagctaccacatctacatcttcatgcgaattacagtctacagaaccatctttatacaaccaattcatca

SEQ ID NO: 31250 - DNA, 323 bp, Gossypium hirsutum
  Clone ID: LIB3048-021-Q1-L1-C6
ctaaaaacttttcatcaatactactacttcactacaggacgtgttatttacacaatcggtcatcatatctaccacttacaaaaactacaaattcccacaaatcggtactacattcaaatacaccaaaccaaccaaacaatcaaacttttacaaaaaaatctaattctatctcctaataacatctataacaccttacaaataattcctctcatcataaatataatcactttctgattaccaacatcccaaaatcaacctatagatctactgatctcacacacaacattactaaactgctcacatacattcatattacaaataat

SEQ ID NO: 31251 - DNA, 295 bp, Gossypium hirsutum
  Clone ID: LIB3048-021-Q1-L1-C7
aaagctgcataattctcactagctcaaaccgttattctactgcactacttcactgcagaatgttttatttacatacgtaagaccctacctaaatattctctaaaccaatttttaaacatctattactaccacatttccttaatttattatttcaacatccacactgtttttataccaactaataccactttccacaacattctcttcacttataacatcaacatacatttccctaatcaattaataacttcataatagtacaataacccatacacttattttaataccaatcaat

SEQ ID NO: 31252 - DNA, 369 bp, Gossypium hirsutum
  Clone ID: LIB3048-021-Q1-L1-C8
ttcactagcttcactctttctatcttccatatattttcccttcatgttgtccttattatacactaatctctgccttcttctttatttcttcctacatttccttaatctttgcttttcaaaaaaaaaaaataaaaaaaaccatactactctgtaaattcctctgcttctaattttaaactctctcctcttacattaacattaacaaccaatcacttgttgtatttttatattttcttttaattaccttaatttccaaaaattatcaatttcattgaacaaataccaaacaacatctccgccgttcaaaacattttctatgatccaaaatcatcacataaaccacctgcaccacctgatttcatatccatt

SEQ ID NO: 31253 - DNA, 396 bp, Gossypium hirsutum
  Clone ID: LIB3048-021-Q1-L1-D1
atttacttcttggtaccattgccttaaatagtattaaacaaaaaggctaccaacatgactggggccgccaatattgatcttgccacctcattctcatccgtacatctgatatgaatcgacgaaccaatggccgtcaccaattgatcaataaagttctaaagacttttgagactttcatacgttttgatgagttatataacacgatatcaacctaaattctagaagacatgcttaggccgattaaataactggtcaaggtcccagtggagaaaaaacaaacgaacgttcttaccccgcctagcccacgctagactgtacctaactaacacgtctcttccatgtataaacgctttttacttgcagatgtctccaattatgattctgctaataactttg

SEQ ID NO: 31254 - DNA, 260 bp, Gossypium hirsutum
  Clone ID: LIB3048-021-Q1-L1-D3
tagataaaccttatgtttcatatctctatctcctacattatcagtcggtcttccatcatcccatgctccattcacaaaatctttccactcttcctcaagaatatttcaatgacaatcatattctacgctctcatgatctcaataattcacaccataataattcatctcaaaaccttctaactccacattaatctaataaataaataaataaacttacttctcaactccaaaactacctaatcattataccatcatctctc

SEQ ID NO: 31255 - DNA, 367 bp, Gossypium hirsutum
  Clone ID: LIB3048-021-Q1-L1-D5
ccgcatcctttacattttatggatcccttaatttcgcggtgactaatttccacactaacctaggcccatatcccaatatccactttatactttattcttatccccctatcatttcaactgataatgcttaccatgatcatctatcgttacctgatataaccaacatttcttttgaaccctcttcaatgatggccaaatatgacccactacacgacaagtacatatcttgcttccttatgtaccaacaagatctcctgcccaaacatgtcaattcctctctggacaccattaagaccaaacacacaatccaatctatatattgctaccctacttgattcaagtgcagcatcaactaccatccaccaac

SEQ ID NO: 31256 - DNA, 370 bp, Gossypium hirsutum
  unsure (1)..(370): unsure at all n locations
  Clone ID: LIB3048-021-Q1-L1-D6
ccaaatactttacattaaaagcatccattaatttagggaggactaatttcaacactcacctattacaatatccacatataaacttcatactttaccactatacctactcacattaagatgataactattaccatgaacatcatatcccatcctaatatataccaacatcacttctgaaccctctacaataatggccaacaatntacccaccacactacaaacacatctatagctgcctaatacaccgaaaatattttaatcccatatatcacaatgcatatcaatccaccattaagaccaaactcacaatccaatttttagaatcttaccctacagaattcacatgcggcatcaactaccaatcctcaac

SEQ ID NO: 31257 - DNA, 257 bp, Gossypium hirsutum
  Clone ID: LIB3048-021-Q1-L1-E1
ctgttatgttttcttaaacttcttaattatcatttaccatggatgttttcttatcatgagaaagctgctcatacaaaacaatctatcaacttatactacacatgcttaataaattgtacacactacctttaataatgaaattttactacaatcttctataactattaacaaacccactcaattacttctaatctaccacaccataacattgactatcactatatcaatacatcctatctcaccctataaacatactt

SEQ ID NO: 31258 - DNA, 367 bp, Gossypium hirsutum
  Clone ID: LIB3048-021-Q1-L1-E5
ctattatcttataaattcattgatacctgcaaaattggaagagacatttcacttggaatccaacttttttacaaattgtttacccaatgttcaatttgctttcctacatacatataacacaataatcaatataccactgaacatactagattccttaatttacataaattaaatttttctcataacattcattatatatatatactatcttttttgtctaacatgataaatgcacttgcttctaatatatatacaaaacttgtatatgctctagaatcacttttacatgcacagctgttacataatattataactgatgattacactcattaacaattctcttctaatgatatatcaacatcttcat

SEQ ID NO: 31259 - DNA, 196 bp, Gossypium hirsutum
  Clone ID: LIB3048-021-Q1-L1-E7
acatctttcataattctacactagctaatttcttttaaaaacaatattacctacaaattctgatgattcttattcaaaattaaatcatctcctttaccaatcctctacccacttctctctacacttttcaatatattatatctaacatcctatataccattattcactttaattctcttcattcacatattctaca

SEQ ID NO: 31260 - DNA, 401 bp, Gossypium hirsutum
  Clone ID: LIB3048-021-Q1-L1-F1
gctctcacttttccattatctaaacaacaatatcctctacggtatgatacattcaaacttccgtccttatctcaactattatacaaatcactaaccaaccgaattattctgtaatgcaaaattagcctcaaacttcactgattcttaatcccataaaaccctattcaacaccatcttgaatatgctagctcatttttatattgattcatcttacatattaatttatcttatctacctgagaacattcacttcactgattacccaccatcttatctcagcaaaattgccaaatgaaataacctgtcaatttaaaccaattttgcatcatcttcttctagctattatgagactactgtataattatatcatacactttcattgaataaccaattgtagaacta

SEQ ID NO: 31261 - DNA, 473 bp, Gossypium hirsutum
  Clone ID: LIB3048-021-Q1-L1-F2
ctagaactagtcggtcccccaatctgcactaattcaacactagcatagatattttcatttattgaacaacgactacacccactgttagatgtattccataggtggaagtgcaaaccccaccattaacatccacgtcaaccgataccttgcccctttcaaccgcttttctaaatatgttacaaaaagagtgcatagatcgaagagtaaatggagacattggaattggacttcacaaagagacatgtttttaaatggagcatatttcactccatcacgagcattatcatcagccagctacgctaacgcctctaacttatcaaccaaatcttcttacttagttgtcaccattacttcaaatgcattctccctgtcttgtcaccatggtttcatgtgttagttctttgctactcctccgtacataagatggaaacaaaactcattgtcctttagataatatatataccattttatat

SEQ ID NO: 31262 - DNA, 146 bp, Gossypium hirsutum
  Clone ID: LIB3048-021-Q1-L1-F4
ttctaactttaatatatcatgactagttccaatttttctctacgtatccaataacatatgaccttattcatgctaataatatctttatcttgtatcaagataaatctatcttttaagacatccttctggaaattcatctcatttta

SEQ ID NO: 31263 - DNA, 238 bp, Gossypium hirsutum
  Clone ID: LIB3048-021-Q1-L1-F5
tcactagctacttctattctcatcatcaccttaaactcgtacgggtttttataacgcttggcatgctaactttatatccacaacattattctacatattttctatacacatcatttcaatacattaattcatatctcctattacaacatcactacttatgctcatcaaacattacttcccatcataactactaattcaaatactacttcactatataatacttattcacatttcatta

SEQ ID NO: 31264 - DNA, 162 bp, Gossypium hirsutum
  Clone ID: LIB3048-021-Q1-L1-F6
ctggattttcttcatttaccttcatcttataacacggggcgcgccattcataacgcatggcgtgctgaaacttgcctcgactaatttagttacctcattgtatattaacatcagttcaatctatttacacatatctaaactgacaatctcattcattatctc

SEQ ID NO: 31265 - DNA, 412 bp, Gossypium hirsutum
  Clone ID: LIB3048-021-Q1-L1-F8
ttcactatcacactctttttacaactgcgcctgtaatctcacctgtccgattaaataacaatggctggccgtctatatcatctatgctctactcttttttctattatccccttctctatgttctactactaatgataccactacaactatgtatttttattactattattttttaaagctattaatgcatttctccaatttcccttttatccatttgattttaatttcacgattcttattaaacttataaatatctcttttctattattttcgacaactacaattgtttctactctctttcttgcaattctctatatcttatctcaaaatctttattttactgttagtcacttttcttctctcactactaatttcccaattaatttttacttctctaattatcatcctttta

SEQ ID NO: 31266 - DNA, 363 bp, Gossypium hirsutum
  Clone ID: LIB3048-021-Q1-L1-G4
aagtctggatcaattcgacactaacgaatttattcgtaatcaagatgcttatcaatgctgcttggtataaattatatagtcttcgccgtcaaaaaatactagaaaccataagttatttatatagtaaagcctgttctcctgtaaacgtgagacagcagatgtttttaactatcttgaatgtggtgaccaatatgatatgaagccgttccattgaaagggaagccaattccaacctttgtgcaaaattcaagcaaatcatcttataactaacaaaactttttggtctacctaatttttctgatttcttcccggcgtttgccccacttgatttgcaaagttcaatgaaacatgtccgaaaatcaa

SEQ ID NO: 31267 - DNA, 360 bp, Gossypium hirsutum
  Clone ID: LIB3048-021-Q1-L1-G5
ctctattttcttacacaacgtctcatcattcttctccgtctgcttcatcttctacaccagatctttctcaaaccacatattacaccaaatggtcaaaatctctctattcaatattctcttacatcatcccatcactaaactattctacctctaaattacataatcatctacgtcaactaaatccgattccttctatacctcttaaactcaaaaataaattctatacaccacatgaactcctgtataaccttaaacaatacactactatcccaacttaataattaaaaaagtctactcaagataataatatacatcgcactcatactcacactaaacaaattgcatgaattagacttctta

SEQ ID NO: 31268 - DNA, 374 bp, Gossypium hirsutum
  Clone ID: LIB3048-021-Q1-L1-G7
actgtttattttataatatagatatgaatgatctacggtagctttcttcaacacattagccacgtgtttctgatcacatggaccacatcaaagatatgataactcatattataaacaaatactttggatatgttgttgactactatgtgtttttcgctgatgataaattcccaaattatggcaacttatctgtacagaatctggaaaacaatatagcgtttgaacctgttgctgttgactcaaggaatcgtaatccttccgacttttcattatgtaaagcttcaaatccaggtgagccatcttgttacagctcatgatgacctttacgacctgtgtagcacatagaatgtactgcaatgagtgcgcattattta

SEQ ID NO: 31269 - DNA, 361 bp, Gossypium hirsutum
  Clone ID: LIB3048-021-Q1-L1-G8
attctacactagcaattttattttctgcaattgatcaaagattaacggggctgcatattttaacagaatcacagggccatgcatctaaactatatagttttaagcatgattctatgtcatctcttatcaaaacaattaatacatcagaattctttgattcataaactaatggagatctttcacgttccaagtccaaatcaattaatgatgatcaaaatcttctttgtctgacaagatatgctaaatctgattctgttccacatcttcaacagcattttttatcattaaaggtctaattgtgcattttgctcgaatataaaagatcatcttttctcacatcttattaactgaacacatcatt

SEQ ID NO: 31270 - DNA, 355 bp, Gossypium hirsutum
  Clone ID: LIB3048-021-Q1-L1-H2
cccaacgaaacaattcgttctattttattaatcaccttataatcaactagggtagccacaatcatacatgcgtcagccaccagactaaccacctgcgtatcctccaatccatcaatactccaaatctctaacatacatctaccatactacaatgtcgacatacttacccaaactttatctcaactactcaccatccacataatctaataagacaaccacattaacttaccaatcaatacataccatggtccaacactatcaataatacaatcatcaaataccgatcttttaaagtttcaataagcaccgtgccatttcatccatcattatacgcgaatacaatcatcaattacaa

SEQ ID NO: 31271 - DNA, 333 bp, Gossypium hirsutum
  Clone ID: LIB3048-021-Q1-L1-H3
ccaactaagctaagcgttttattttatcaatccccttatactcaacagcggtgggctcaatcattcatgcggctgccagcaaaccaaccaccttcgtcaccttcaatcctgcaatacaccagagctgactcattcaactaccatactacgaatgatcacaatttctctccaatactctacacacatgtacacaccatccacaaaatctaataagaaaaccacattatccttccaatcaaatctaaaatttttcccacactttttttcatccaataatcgataccgacttcttttatccaataatcatttaccatatcatacatcatcaatgct

SEQ ID NO: 31272 - DNA, 294 bp, Gossypium hirsutum
  Clone ID: LIB3048-021-Q1-L1-H5
gtcgcatcttcttcctcagtccaaatcgaaccatctggagggtccttactaacagacaggcgagatatttttagaatacggcactgaatttacattctctgaattaactgatagggatttggcttctgctttgaccgaatatgactcgccctacttgaagttaaacaactgctactgcgatgatagaaacttattcgatgttgctacttcaactgacttgaactcaaacgcatgctgggtttctaatgttttcgatggaagatggaattattgtattaaacgtattacgccacc

SEQ ID NO: 31273 - DNA, 358 bp, Gossypium hirsutum
  Clone ID: LIB3048-022-Q1-L1-A11
catatccacttttatattgcatccaaataccacaatctggtagattgtttttataatgcttggtctcctctttctgtattgctccttaaaaaatctaaacgcacccaacttgctctatatgttcttccactaaccacacaatcgttgccctctattacattcaatcgtcaccttcttccttatgttaaaaattctgacatgcccttatttcattcatgcattataggaatcatgtactacctacaatataaaccatatagcatatcaccattccttaattctcttatccactcattcctatctaccataataatctacctctgcatctcattcgatctcacatcttcctacacctact

SEQ ID NO: 31274 - DNA, 363 bp, Gossypium hirsutum
  Clone ID: LIB3048-022-Q1-L1-A12
ctcaaatttaaaataccatatccctaaactccctatcatggctgtttccaacattgatatacctctatacaacatatactattccactccatcttcagataatcacctctctatcactaaccacacatctagctatacataatcttttaattactgcatattcctttaccatctatacattattttatttctacactatccatatcatcccaaccaactacgctccatatccaactcacagccaccattcttaatacaaatatcatcattaatacatatataccataccaaaatacatgacaactactataaaactttaacataactacctatcttcaatagcatattacctatttctaccta

SEQ ID NO: 31275 - DNA, 252 bp, Gossypium hirsutum
  Clone ID: LIB3048-022-Q1-L1-A2
ccatgctgttaaatcctgactatctaaagcagtcgctttggtgcgagctctctagctggcacattttctatgttaatattgagcatttggctattgaaaacttgcattacacggagaataaatttgctatccttgctgaatattagcattgcacttttgggagaccgttcaccttttaaaataggcccatgttcaatctcatttgagagcttccagatactgcagctcgaaaactaatgtcctaaatgcgag

SEQ ID NO: 31276 - DNA, 149 bp, Gossypium hirsutum
  Clone ID: LIB3048-022-Q1-L1-A8
ctacatcattctaatcgctttaacgtattaaaagtgggagtgaacaacaatctacgggcgactaacatacatgttgatccacttacctcacatattaaatcttgctactcctactacattaacaatctcacacattataatactactat

SEQ ID NO: 31277 - DNA, 365 bp, Gossypium hirsutum
  Clone ID: LIB3048-022-Q1-L1-B10
tttcattctttctagactgcccaacgcataagtatgcaatattgatgcttattgctatattcgaacgcacaatttcctgttataaatgaaattcaatacaaagctatatttctatcaaatggttactctcataacgaatgaatatactacaatgaagtgttatctccagatctgaaacatccgactattcttatattcctagccttgattacacaatatgatctttaactaactcatctttatgtgaagacctcgtttatacacaatgatttaataaacgatatctatatgactcatccagatttattcaaagtttctataaaatcataattatatttgcatactgacaaattcactttatatat

SEQ ID NO: 31278 - DNA, 368 bp, Gossypium hirsutum
  Clone ID: LIB3048-022-Q1-L1-B11
ttcaacttcaactaatctcacttcaatggcggactctaatcttatagtctatctcaacgttccatttgatgataacttcaacataactcataacacaaagatccgtccactttttcccaccatcaattatttaatatttcatacctctaaattcatcctctctagtcattccaaactcccaataactgtcactcccaattacagtctataaacctcttattccaacgttatctgaactccttgtattccatgttaaaatcacaaatcactatattgtttaagacgcttacaaaatggtgtctacattacccaatacatttatatctctacttaataatcacaagctctacaagcattatcataacaat

SEQ ID NO: 31279 - DNA, 366 bp, Gossypium hirsutum
  Clone ID: LIB3048-022-Q1-L1-B9
tctccactctacacgagttgatccaccatgctgcaataattcaccaccacatctctttttccatttcatctaccatcaattatctcccagaatcattcaaaatattattcacaacacatttgctaatccacctattcagctgaataacccatctcctcataaatctaccaacaatcctaaacactctataaatacactccatgatttcatatcctatcacactcacaacaatttctccattacccttccccacgctactttcattacttatatacaccattatcaacctcctatacatcatctcaaattcattccctaatttgatcacctatactcactcttcacatataccttaaacaatctatc

SEQ ID NO: 31280 - DNA, 326 bp, Gossypium hirsutum
  Clone ID: LIB3048-022-Q1-L1-C10
ggatccccccatctgcaataattcaccacgaacttaccatttctgatacctatctcataaatcctactccagattcttactaaaaaaagccgaactccttaccaacctccatctctcttccactattttattccctcaacttcattggtcagattagaatgcaaaacattattctctactttgattatattatgcataaccaattggaaaatctattttacacacaacataactttataccaacatatcataacacaatatcctacaactctctttcatacactattcatacctcgtatttatatacctctatctacttctttttt

SEQ ID NO: 31281 - DNA, 210 bp, Gossypium hirsutum
  Clone ID: LIB3048-022-Q1-L1-C11
ccactctcttccctttctaacgtacctcactttactactagatctactttccattttatgcaaagcatcactacctcctgacctttatgacacaatctcacaaccctatcttcatacccaatggatcacaaatcattcatgcttaactacacactttctcaacacaccaacaccaaccattagcgaatctacaatctcactctttcaaac

SEQ ID NO: 31282 - DNA, 434 bp, Gossypium hirsutum
  Clone ID: LIB3048-022-Q1-L1-C12
cttattactattgatacctgacataaaaatttatatccaagtaacacttttaaattatggcctaagaatcccaatgatatccatataccaagatttactacacttaaaactcttagaaaaattacataaactatcaagattcttgaccgcaattatatatctgagaaaccaataggataatataatttgactattacaagacacatataccaaccagctataataaattaacctacaatgctacttcaattgactttcattccttctattattacacaaaccattaacaatgacattctccatatctacaaataatgaagaatcgactctgcaactaaagaggcttacctttccatttaatcaacacaaatgctatatgatagaaatgtgaacatcatcttacttttaaaactaatcatacgctacctcatttt

SEQ ID NO: 31283 - DNA, 230 bp, Gossypium hirsutum
  Clone ID: LIB3048-022-Q1-L1-C6
ccatttaccatatctcctgcgtcctattctatagcgtcctgttcatttcctctcatggggcgcgctttgaaatccgcaatgactgctcctacaccgtctgtccagcaacctctcctgatggtgtccttctcctaaaccttcagcaaatttggaccatcaatgtcctctctggacaaagatttgatcaaatttttggccaaccacatttcattcaccaggcaccaaataag

SEQ ID NO: 31284 - DNA, 416 bp, Gossypium hirsutum
  Clone ID: LIB3048-022-Q1-L1-C9
actaccactagatgctcccccctgcttcaataattcaccaccatcccatcttttccatgacttgcctatttcactacacaactgccaatttatctacaatattcacatcataaatatcttttgtcaattatcatataaactacattgacaatctatatcctcactaaatcacacactgcttattatttcctccatactgcctaaacagactaaccttaaattttaccatttaaaccctatctatccttcttcccttacatctctactaactacaaatcttaacttttcgctacatcaaaacaacatattctaatccttaactacaccttttatactcacacttcaataacacatatactttacacaataataccttcctaaatcctatttacaacaccgactctatttaccatact

SEQ ID NO: 31285 - DNA, 453 bp, Gossypium hirsutum
  Clone ID: LIB3048-022-Q1-L1-D10
tcctcttcccttctaccactggatgatccccccttcttcaataattcaccactaacttccacttttacatataagatatacttcacataatctagtacactttttaaacatcttaactctattcgactactactaacttaaactctaaatttccattctaaattacaccaacttaattcataaaactcatttcataattacccactttcataataattctatataccatttccatctaactcaaaatctattaacacatcaacaacacttcatacttaacaactctttataccacttaaaacaatcacccatatctttcttcttccaattcacttaaaccattactcaaaatttatacacacattaccttgcctatcatactcttttcatcaatctaacttctacatataagaaatctatcctaattcttaatctatattacatcattcttac

SEQ ID NO: 31286 - DNA, 379 bp, Gossypium hirsutum
  Clone ID: LIB3048-022-Q1-L1-D11
cctgcttctgatgatatcaagtcttctgaatattccctcgatcgtatttatcaaaagaagataggaattgttccggtgttccccaaattctccagtcaaaaatttgacaactatatatctctttctaaaaaattacatcctcaatatgaattcatacatactttctatgctaaatacctttcccgtggcgagtcatcaatgactgaccctatacacagacttttcaaaccttttgattaactctctgctgacttcaaagattttaatgtatcatctctacagaagtttgttgcacaatctaactttactttatcgactctctataacaatgacccaaactatcacaccttcattatcaaattctattacaatccccttt

SEQ ID NO: 31287 - DNA, 323 bp, Gossypium hirsutum
  Clone ID: LIB3048-022-Q1-L1-D12
ccttcttcttcacatatcaaatctacttcacataccctttgtctcctttatcaaaacaggacactatttttttactccttacccaaactctccattcctaattttaactactccatctctatttctaaaacacatctttcaaattctaactttagtaatacttctatatccaattaccacctccctcaaaatctattaatgacatcaacctatcttccaaccttaccaaccttttaatcaactctaaacaatcttccaaaactttattctagaagctcactaaaatcattcttcaaaatctatcaatcactccctactctatc

SEQ ID NO: 31288 - DNA, 326 bp, Gossypium hirsutum
  Clone ID: LIB3048-022-Q1-L1-D6
cagataccatacctgcccttgctgacaaaacaactcctctgtaaatttaaatggaatcgcagggccaatcatctaagctatatcatagtactcattatactatctcatcctttactaaaactttctttacacttacatttaatgaaacaaaatctaaagaatatccttcacgttccaagaccgaatcaatgaatcttgtatacaatattcttcctatcacatcagatactaaggcgaatctctgttccaaatatttaacaacactttttactgataaaagtcgatttaatcaacttgttataaaaaaaaagattagctcttctcaa

SEQ ID NO: 31289 - DNA, 361 bp, Gossypium hirsutum
  Clone ID: LIB3048-022-Q1-L1-D9
catctttcttcaatttcgattttgtctccatcttcctgctgtagtattttcattataggtcaacctctcccccacacgatccaacaaatctacatttgaactaactacagctaaatataaatcaaaatgatccattcaccttgagataaattcatatatttagtctaaactatcgactattaaatttcaactgaaataatgtcttattctatatatattcgctatttaatcatgactttattcacctacaacattacattcaatcatcaatcatcacaaatgcaacctcaatcacattcctactacacctcatgatcaatttatagaaaagaccatacttgtaccatttcaattattacac

SEQ ID NO: 31290 - DNA, 420 bp, Gossypium hirsutum
  Clone ID: LIB3048-022-Q1-L1-E11
tctacaagtgggggatcccccctgctgcaataattcaccacgacggattatctattctaagcctacttctaaattcctctatcagtatacttaatcacgtgaagaccctcactaccaagaccatcacccttgatgtggaaagttctgataccatctacaatgtacagaccaagatccaatacaagtaaagcatcccaccacaccagcagaggcttatctttgctgataaacagctgtaagataaccgtacccttgctgactacaacatccacaaataatccacactccatttactcctcccactgacgtgtggtatgcaaatcattgtcaagaccctcaccgtatagaccatcacattgtaggtagagagttattatacgattgacaatgtcaaggccaatattcatgacaatgaatgca

SEQ ID NO: 31291 - DNA, 418 bp, Gossypium hirsutum
  Clone ID: LIB3048-022-Q1-L1-F11
cacacttcatctctgtctccagatctctgtctcccccttctgtttctatctgaaaccaagtaggaataaattcgtgaacaccatgtcagtctgctcgtcttcttcttcaacaggtaaagcttgcatagttcacagtattttagctggcacatcaattgccatatccattgatacccattcctatctggatcaatctacgaagtttctcacacatgtcaactgaattatacccatcacatatgcatcttctcggttcgaaagcaagcctttcgatcatatccttgagaaacccatgatccataggacatgatagagctcaaaactggctaccacactcaaccatctagttgaggcaacatatgatgaaaagatagcacaatgctttcaaggatatggcgctgatgccatcattacatca

SEQ ID NO: 31292 - DNA, 302 bp, Gossypium hirsutum
  unsure (1)..(302): unsure at all n locations
  Clone ID: LIB3048-022-Q1-L1-F12
cttccgctctacaactagatgatcccccctgctgcaataattcaccaccacctcaactttatcattctcactcattcactcattcacaggtganacaccctttaattttaaaaactatattatccctctatactgaccaatccaacttctttcacatcttcatccttactatactccaattatctattatactaacaccataccctacatcccttaatatcccatacacttactttaaaaaccatactttatataatactacaaaaatttgcactctttatcatatttcacatctactttac

SEQ ID NO: 31293 - DNA, 432 bp, Gossypium hirsutum
  Clone ID: LIB3048-022-Q1-L1-F3
ggttgagcttgaaaatggtgttgtttgttcatgttcttgttgtggtagggtttggtatcaatggagtttatggattattatcttcttctacattgagaaatattgataatataaacatggaagggccatatttaggtataatagtgccaaattcctttgagatgaatcctttgttgcaaactggtagctttctggaagatcataagatgccttacttggattttgcagggagaaggtttcgaataggtcggttggaaaatgaaagggttattatcgttatgacagggttgagcatgctaaatgcaaggatagctacacaattgctaattactatattcaaggtgaaaggaattttgcactatggaatagccaggaaatgcaaagtcacagcttcaaattggagatgtaacaatccctcagttttgggctcat

SEQ ID NO: 31294 - DNA, 303 bp, Gossypium hirsutum
  Clone ID: LIB3048-022-Q1-L1-F6
gctaacagccgcatcatatcaaactgcatagaccaactccgtgagggaacatcggctggtatggatgaagctcagtgtagaaacatttgcatgtttgacagaattttgatgaatggcaatggttccttcaatcatataccataactacagagtgaatcacctaggcagtccttgcgttcacaatggagtctccattgataccattgctacacaagaattcttctattggatattgaaccaagcggataccactatgctaagaatgagctactactctataggtgtgatccttgatgctcataa

SEQ ID NO: 31295 - DNA, 394 bp, Gossypium hirsutum
  Clone ID: LIB3048-022-Q1-L1-F9
tccccactgctgcaatacttcaccaccaccacactttacatcatactccacatctctcacttccacttcgctctctatccgaacccatgtccacctaacttcgtaaacaccatcttaatctcctacccttcttcttcaacatctaaaactctattataccacatactttaatatcgcacaccaatcgccgcttccattaccacccattcctatctctctcaagctagtaaatttccatcacttctcatctaaattatacccaccagatattcatcatgcatttaccaaagctagcctttctaccatatccttatcaaacccatcatccatagtacatttcacaaatcaaatctatcgaccacactcaaccatctacttacgaccacacataatt

SEQ ID NO: 31296 - DNA, 376 bp, Gossypium hirsutum
  unsure (1)..(376): unsure at all n locations
  Clone ID: LIB3048-022-Q1-L1-G10
cttcccttctacaactggatgatccccactgctgcaataattcaccacaactctctatcccaactctcctattattaaagaacacacaccgacacttcctatncaacattgatgcaatcctaaaccactccactataaatatcctataaacacattcacaaaattcccattcctattataattcctaaaaacatacacataatttaccatacattcgtctacataatatacttaccacctataatgcatattctgacatgatactccatattgtatccatcattatctactaatacatatccttttatcaactaaaaaattaacactaccattttcatcaacatatctaaatgatctaacatattcttaataatat

SEQ ID NO: 31297 - DNA, 414 bp, Gossypium hirsutum
  Clone ID: LIB3048-022-Q1-L1-G11
tcccccctgcgtgcaaaattcaccaccatccatactttcttacttaataacaacaacctccagattatgatcacattataaacacacggctgcttccatataattctacgattgacctgaccttaatcactcaaatattacatcaatcaaatgctatctatcacttaacaaccacatctattgcatacactctcacatgatcttcatttctcacttcaatcgctacaatacttgaaacactatactaaccatcatctactcccaacattacttctaccttataacatcatgctctcaacttattttatcatataataatcacccattctaaaaaatgccctacatccatagaataatactcatatatctatcatacactcaacatactttcaccataagcactcacattctata

SEQ ID NO: 31298 - DNA, 423 bp, Gossypium hirsutum
  Clone ID: LIB3048-022-Q1-L1-G12
tgctgcaataattcaccacaagtctcttttctaattctaggattttcaaagaatatcagctgcagatttcatctaatttgtgcacacttcacaattccactagatatgattaaaaacacttgaaaaaaattaccctttgtcgtataaattggacaaacaaacaaatctcaatccttatatttgagcacataattagtttgatcctctaatgcatatccggaaatgatacttctgcttatatttgctgttattgagacgcactttcactcttataaattaaattaataacactattatgttcatgaaattattgataagatttaatatgacttattgtaacattagacatataattataatgaatattatggcatctgcttatgtacatactacacttctcctatatcttttactaccctttac

SEQ ID NO: 31299 - DNA, 242 bp, Gossypium hirsutum
  Clone ID: LIB3048-022-Q1-L1-G3
atccaatacaagacacggattgcaccaaatcagcacatatggatggttcacgtaaagctgctaggggtatctaagacacttgcggattctatcatccaaaatgagtcaaccctacacttggtgctgcgaatgcgtagctgaatgcagattatagtgaaaacttttactggaaaaactattacattgaatgagcaaagactcacatcatatgataacgtgaatgccattgatcagaacaagga

SEQ ID NO: 31300 - DNA, 199 bp, Gossypium hirsutum
  Clone ID: LIB3048-022-Q1-L1-G7
tagatctattttttaacataattactacttataaatcattgttgcaataacaaaatatattggggatccacattataaccactaactaatactcactttacatcaataatttaccatactaatcttaacttatactatttaaaatttaccctcacctaaagtttcccacctataatatcttataccacactcttcattc

SEQ ID NO: 31301 - DNA, 448 bp, Gossypium hirsutum
  Clone ID: LIB3048-022-Q1-L1-G9
tgctccaaccctcttcaataattcaccaccatccatgttttctcactcaattacaccaacttccaaattctgtctcttattatcaacccctaggttcttcccatttattgtatgcttgatcttccctttcttactcaaatatttcatcaatttaaacgttgatgtttctccgctttacatttatttaatccattcatgcatgcccttcttttttcaacttaattcgataaacccttaaacttatcattaaccaacaacaaattcctcccgttattgtaaccaatttcaaccaactcttcacttaatttacccgatgataattacccattccaaaaagtcccccccacccttaaaattccaccttactatcttccatactcttaccattcttttactgtaagcactcaaattctatatcaaagtgagaaacataataatcttatattat

SEQ ID NO: 31302 - DNA, 333 bp, Gossypium hirsutum
  Clone ID: LIB3048-022-Q1-L1-H1
aacacaccccgtattattatcatggacgttgcttcaattgggggggttcccatactaattgcttgctccatctgcatcattcagagggccataaagaccccacatcaattactcaaaactgatcatgatgaggttattatggctgactgcttgcagctcgactttgacactgatcgtacagcaactaataactttactgatgcacataatgcttgtccaatagtaggatatcgagctgtttacaatgctcaacttccaaatggagaagaggttgctgtgaaacgactagtctgagattctgtacaaggtgacctgtaattgcagaatgaactc

SEQ ID NO: 31303 - DNA, 239 bp, Gossypium hirsutum
  Clone ID: LIB3048-022-Q1-L1-H7
cgaacagaggctggattatgcctgactttggtaaagcagacgaatttagtgcgtgctgtcaatgctcgcacatggtgaatgagtaaaattcagcatagggctatggataacttgaatgacacggagaagaaattggctactcgaagctgaatgttagcagcgcacttataggatcgcgtcgaccctgaaaaatatgcacatgagcatatctcatttgagagcttacagatactgcagct

SEQ ID NO: 31304 - DNA, 355 bp, Gossypium hirsutum
  Clone ID: LIB3048-022-Q1-L1-H9
ctctgcaataattcaccaccagaatactttatacttttcattaaaacgtcctaaagataaagaggatttcaatacatactccgagatcaaaacagtatttaccggaccttacattttcgataaaaatggcttatcatctagctttatctatcgaccctcttataacaccttaaagtttacaatcaatcccagaaacttaagcttctctatcttccctagaaatttcttctcaattctttaacccaaatgcttttactatttgtcttaatcaatttgaagaacatggtttctatcatcaaaaataaccacttataccgacatcttaataccctatctttcaacaagacgacttcat

SEQ ID NO: 31305 - DNA, 331 bp, Gossypium hirsutum
  unsure (1)..(331): unsure at all n locations
  Clone ID: LIB3048-023-Q1-L1-A2
tgagattcgtattatgctgttagcgctgtcagatcggtagcactaacgctctatgatccattaagcaacaacggaaactcactagcactcgtacctgaacacagtattacccgtaatgttcactggacacatacgtctcagatcgttgaactgagcaacgcctagttttcacntaaggaatactaacactaacgagattttcattcgcagcatgccactacaacaatatatccatgatcgtcttctttctcgcattcaatataatcgccagatacttacacaactatacttctagcaattttcttcattcatctctcaatacgatttaccg

SEQ ID NO: 31306 - DNA, 285 bp, Gossypium hirsutum
  Clone ID: LIB3048-023-Q1-L1-A5
cctatatttcaacacataaactaatccatctagggttagccaacttacaatcgggtcaaggctttaatattcaaacactctacatatatatcccaatctaaaactttatgccctaactaatctctaccattacaagcctttttcaataacccctctatccactaactttagatattcaaaaacctcttattcaactcctaaataacattcttcccctaaatataattgcctaccaaacattaatgcatctcactaatcagatcattttgcactttaataatttta

SEQ ID NO: 31307 - DNA, 214 bp, Gossypium hirsutum
  Clone ID: LIB3048-023-Q1-L1-A8
atcatctttcataaattacctatctgcaactcgggtacgtaaactaaccaaagggaaaaagctttattctccataatctaaacatacatatccttatctcaaaaacattactataactcatatctactatttacagcctttaccttactaacattatccccttactttagattttcataaccccttatctaaactccatatcaatctcattcac

SEQ ID NO: 31308 - DNA, 154 bp, Gossypium hirsutum
  Clone ID: LIB3048-023-Q1-L1-C3
ctttagcttttcttttgctatatctcatctctattattggtatgtgcaaaatgacggccatgctcgatatcaatatctaaatacccttctgtgccttacactctgcctacccacatcacctttcactctaaacttcaatctccccatccttctt

SEQ ID NO: 31309 - DNA, 305 bp, Gossypium hirsutum
  Clone ID: LIB3048-023-Q1-L1-C7
ctgcggcgtattgcttctcggcaccaaggccagggtgtagcaacaacacatgtggcgtcacacctgataattccgtcacccacgtcgccacttccggtgaggttgctcaagatgttgtgtctatccaatcgactgacgggaaaaatcctggcagagtagttagtgtacctaggttccttttcgcatgtgcgccgagtttcttgcttcaaggtctggctaccggcgttgtgggcatggctggactcggtcgaactcgaattgcgcttccttcacaattcgctgcagctttcattttccataggaaa

SEQ ID NO: 31310 - DNA, 230 bp, Gossypium hirsutum
  Clone ID: LIB3048-023-Q1-L1-D1
gtgttggatgtggtttatagagattgcttccttaatggggcatgggaacagggattcagcggatacttaccactgaaatagtgaaatcaaatcttcctacccagactgtaataagcacatctcgataaacattcaactatctaataatgatcactgcaacttgttccacagttataatgtagacagattttggctatgaaattgctgcttccaaaaacatcattgaccat

SEQ ID NO: 31311 - DNA, 144 bp, Gossypium hirsutum
  Clone ID: LIB3048-023-Q1-L1-D2
cagttgtataagcttcagctgatgaaagattaacgtgtgttcaagtttataggtcatcacatgtccgggcatctaatctatatagttctaatcatgatactactacatctcttactaatacacgtattacttgtgctattcaaa

SEQ ID NO: 31312 - DNA, 436 bp, Gossypium hirsutum
  Clone ID: LIB3048-023-Q1-L1-D6
gccttaagcatcattcttttaaagacgctgcagagcatgagaaagcttcgaaacctgcatggcttttggctcttgaaattgctacaggaattatggctgggtctctctttcttgtcgcgattcttactgctttccaaagatgcagaagcaagcctgcaattataatcccttggaagaaatcagggagtgaaaaggaacatttgatggtgtacgtagattcggagttgttgaaagacgttacaaaatttggcagacaagagcttgaggtatcttgtgaagacttcagcaacattattggttcctcaccagacagtattgtctacaaagggaccatgagaggtggtcctgaaatcgctgtgatatccctctgtattaaagagcagcactggacaggctatcttgagctctatttccagagagaaggtgcagatttggc

SEQ ID NO: 31313 - DNA, 347 bp, Gossypium hirsutum
  Clone ID: LIB3048-023-Q1-L1-F1
atcaccttttaagatcaacagcaacatacacatatcaacgcatttgtgcactctctacctcaatctaatcacaactctcacaactactagcagcttacaacacatgacaacaataccatctccaacaccacaaatattccaactatacactattatacaaaaattctaagcactgctaagatcatcattatcataaacagacaactcagcacacccaaacattcatcagtcaatacaaactcactatgatatgctcctaaaatatcttaaacaactaaccaatccattacaagaagcttccaattaaatccctaggatctaatcttaaattaacatactctcctatc

SEQ ID NO: 31314 - DNA, 391 bp, Gossypium hirsutum
  Clone ID: LIB3048-023-Q1-L1-F4
gcacaattccacctctgacctcaagtaattgctcaagggcctggggccatttttctaactcaaccacctattcactaacctgctacatacaacgaactgtactctgaaaatttatacggtactactcttcatcgcaatacctctcatgcttcatactacaattctcacaataacatacatgcacttactcatcgtacgaatatacatatgaacttcctctaatctcaaaagcaacatatattcattacatctccaccaccataccttttatataaataaccactcaattaatttaatgacctatacgccataataccattattcctcaatcattaataatattctacctcaataattgctcgaattgatgctgtaagttactttaatcaat

SEQ ID NO: 31315 - DNA, 338 bp, Gossypium hirsutum
  Clone ID: LIB3048-023-Q1-L1-H4
ttgagagtggaaggacatggttgccataaaaattgaaggctgagttcagaagtatcgagaggcagacatgatagagattgagacgttgcatcagcttatacatcatgacaaaggcggcaaccgttgtgtgcaaatactgtactggtatgactatcgtaaccatatttgtattgtgttcgaaaagctcgctccacacttatactatagtctacgcattaacaattatcgatcatttaccatagaatttgtccgcgagattggcagacaactattgaaatgtgtaacattcatgcttgatttgaacctgatacacacagacttgaagccataaaacattc

SEQ ID NO: 31316 - DNA, 379 bp, Gossypium hirsutum
  Clone ID: LIB3048-023-Q1-L1-H5
tttctttctcacgtctggagctttcttctatccgtcatgcttcttctcgattcctttcaacctcttcccaagttccaatgaaggatttttcaattaggattctatctaataacagcttataattggttatctgtctgagttcctgttccttttattctcttttgtctgtgtttattcttttcatcaattaactataaagaatgtgtggatatggatgacacggaaagtctacctccatttctcgacaaagaaaactcataaaccctaaaaatacataaccccgaaacccataataaaagcttaagcttgaagaaatttaggaactttaatggtcgctggatcaagatccggtcatagttaatagcatttcaatggtttt

SEQ ID NO: 31317 - DNA, 438 bp, Gossypium hirsutum
  Clone ID: LIB3048-024-Q1-L1-A4
ctgaatctgtggtaccatcaatttatattggtcagtttgctcggctgcttgagcaaggggatgatccggctatgcagtccattactgatgatgaatacactcgttatgcaattgccgagggaaaaaggtttcaagactcctttgaaattattgctttgctcaaaaagtctaatgaaatatatagtaatcttaaagttcagaggatgggttctctttgtgcctttcagattgctagagaatatttttctttgggtgatttcaacaatgcaaaacagcagtttgatggtgttgcaaatctatataggcaagaaggatgggttactttgttgtgggaggttttgggttacttgagagagtgctcaaggaaacaaggtgctgtaaaagagtttgtagagttatctcttgaaatggctgcattgccagtatctattgtcgatg

SEQ ID NO: 31318 - DNA, 416 bp, Gossypium hirsutum
  Clone ID: LIB3048-024-Q1-L1-A7
catttgacaaatgaattatcttacataattgagaaattaccgtatgatgttcttgatatggatttagtggcagagcagcgtgtacatctattccttgcttggtctttattgttatcccatttgtcatcattaccttcattatcaaatccaaggtagagactggtacaatatattcaaaattctggtaatccactgatactagattgcctgttccagcatctgctttccgacctatcattaatgcacgttctaaagaagaaagatggggagcctcctaatattatatcataaagctgaactgcatccaaatgctccatcacgtcagggtcagtattgatatctgcggaatcactttggcctattgatcctgtgaaaatggctgcatttgctggagcgatatatggccttatgcttcg

SEQ ID NO: 31319 - DNA, 443 bp, Gossypium hirsutum
  Clone ID: LIB3048-024-Q1-L1-B4
gttttgttcaagaaatatgtgcaagctacctagcaagaaactttatgtgggccatgtctaataaaattttcaaagacacgccttatgagttgttgttactttgcataaagcatccccatttgactatagacggtgagaagcacctttctgatgcactattaatttggcttcattctaatacagaacagttggaaagatcaagtaagacagaatgtgaattttttgacattttaaagcagatccgcattagccttttgccattatggtttgctgcgggaaaaagaagttctatcagtttttctgagcttgcaaatgagagtgttgactcaatttttaaactaatgaaagttacaccaaaaggatcaatgaatgttttaagcgatggtgacttgagtcatctcagaattcgattgaccaaatattccaaggtctttccttatcta

SEQ ID NO: 31320 - DNA, 232 bp, Gossypium hirsutum
  Clone ID: LIB3048-024-Q1-L1-C1
tagaacacacccttcaatctcttaccaacaaaacagctcctcgtggtcttcagttccatactcactatcacaatcgaaatcaatctaccatgatctacatcctaatacatcatactactctacctaactctttaaccttacatattatgcaagccaatatatacagtcttttcctctacaacagacgttttcaacactctatctataccaaattcttattactcgttcttac

SEQ ID NO: 31321 - DNA, 169 bp, Gossypium hirsutum
  Clone ID: LIB3048-024-Q1-L1-C4
gttgattggatgaaaaacaggcggaatatcatgctatccatgtacgtgatctatacgaggcaaggatgatcccatgtgccatatgattgtccgtggcatatcaatggctaggcgtgctgaagacctatttaatccgatgaataggagccttcaagaggtacagttgaca

SEQ ID NO: 31322 - DNA, 305 bp, Gossypium hirsutum
  Clone ID: LIB3048-024-Q1-L1-D5
cgatttagcttcaagggatcctgatctcaacaagcttttaagtaatttgctcaccacttcacacaatggctgtactatatttaaccactaaacatacatgctgtgcaaaatctaaaatggtccaatcatatcagattgtctctctttgatgctgtttatatggtgcatgcttctttgctaaaacattacatattgagccatcaagtttactaaatgttcatcattgaatttgttctttgtccggttattcttaaatgctgtttcacgtttacgtaactttatatcaatcttgtagatatcactac

SEQ ID NO: 31323 - DNA, 385 bp, Gossypium hirsutum
  Clone ID: LIB3048-024-Q1-L1-D7
aagaagaaaaggcggaagcaaaatgctgcagctaaggatcatctatcccgactgtaccatacttgcgaaaccatggaccgggataggcagcaccgccaagactatctaaatctaaggtggaacatccccatttaggcattttccagtcgtccatgggacccaaataacgatgatcaattcaacggcccggcttgatacagccagtcccataagctgtggaatatgaacagatttcaatgccacggaaaatgttgccaaacccaaaagggttcaaacggatgcacttttagcactgggagccgtaggtcttgcctactttgaaggtccatggatttgtggggcttctcgattcatccctgttgatgtgaaccccataagatttgaa

SEQ ID NO: 31324 - DNA, 177 bp, Gossypium hirsutum
  Clone ID: LIB3048-024-Q1-L1-E4
ccccaatgctcgcacctgtgcctaatcttaagacgatcacgatccatgcgtagcccagcttttactacacacgctgtgctgcctacagaatggtcattgctgcatccagggctcataagcatgacgcaactgttgacctagcttagaagctgcttaccaagctatcgtctgatccaa

SEQ ID NO: 31325 - DNA, 428 bp, Gossypium hirsutum
  Clone ID: LIB3048-024-Q1-L1-F5
cctcactagcattttctaccacctccgggtatcatgtacacgactctttttctcacatcgatcgctcccttgaagataccattctcgtacatactgcagcatattatatatatcccacaccactggagttgaaaagcttaaacaaatcttcttctgaaagtgtaagttcacctgaaggcaaccatcacgatgctccagctcctgaagaaaaccatgaccatacactgactccagtatcattcttggcggagaaaattactcatgatgaagtataggaacatacccatttagactctaaacttacggtaggatctgatccaatggaacaaatcgacatccaacaactttcacctgatttgtgtcgtgagagaaaaacttctgacaatagtgaggggcatgctcttagtgctagtgacattgtcactgat

SEQ ID NO: 31326 - DNA, 130 bp, Gossypium hirsutum
  Clone ID: LIB3048-024-Q1-L1-G1
tagatatcttgcttaactataccgctaaccactactttcaatccgttcctggaatcctgcaatattaacgtcatcttacaatctacctatccatacaattacaacgtaccgactaacaaaaccaaccctc

SEQ ID NO: 31327 - DNA, 448 bp, Gossypium hirsutum
  Clone ID: LIB3048-025-Q1-L1-B2
aagagacgagaataagaataggaataggaataggaacgatgagaatggatggaaacggcgacgcagtggacgaccaacacccaaatccctctctatttcctctctttcctgctgccgcttctacagttactagtactagcggcatctatcaatggctttccaatcctagcttcaccaccgacctttccctcatcaacgacgccgtttcctctcttccccgctccctcgacgacgtacaagaagaagaagatgcccaagaggaagaagaaaacgaagccaagcaacagcagcaggagaagctgccccattcttacgagctacttgaggaggatgaagaagaacaagaagaagaagaagattctgatggagacaagtacggcaagagaaaaaggaagaaaagaagtatgaggagaaacacgaagaaaaagatttcgaaagaaatcggtga

SEQ ID NO: 31328 - DNA, 407 bp, Gossypium hirsutum
  Clone ID: LIB3048-025-Q1-L1-C10
aggcaatcagaagttcaagtcatcatatattgaaaaattcagcgggatgaaactaggaatgaggaaagaatgggaaaacagaagcagtatgggtatcattgtcacaagagggaaaaggaaaagtgcaaatctcctgagttggaaaagcaaaagagggtggttataaatacacaacccagtgagagagttccttcttctcattcacttcatttttttcaaccttcatcatctgcaaatgtccaaattgaaaacagttgctctcgtgtaaatgacctggggccatttgtgaaaattgcacaaagtagatgtcgagaatcatcatcaacggcaaacacggagggtggatcttgttcaactagtttgtttggttcagtgctaagaggatctatggattttttagatcccaa

SEQ ID NO: 31329 - DNA, 431 bp, Gossypium hirsutum
  Clone ID: LIB3048-025-Q1-L1-C7
agtaaatatccaggtgaaccttttggatctcattggtttcgtttggatctttcttttgattttttacctgtcaattgttacctgcttaaggtgtaggcgataatacaaggttgtcaatgactcaattctgttttaattttactacgctttttaatatgtatttatgatctaaaatttaaataaccatttggatgaacaacttattatagtgcctgaaatgctgtcaagaggcatgcttcttttcttttctttttaatattaaattttgtccatttattctgtcagttagagcatattaaacaatatatatacatgcatatatgtgtgtgtgtcccttctgttaaattcttcgttatgtatttaataaagtcaactttgtgtctggctgcaggcattagtgatcttaggttatattttagctttatatttta

SEQ ID NO: 31330 - DNA, 268 bp, Gossypium hirsutum
  Clone ID: LIB3048-025-Q1-L1-C9
acgaactacttcctattgagactgatgggattttgtcatgtacgagacagccttgcaatattgatagctgagttctataatcacaataagcgtgaggacgattttataacaagagctgtatgggcgacaagcaatcgtagaagaactcaataagctttattaaacaaagtcttttgataaatcaaggctcgtatacttatgacgaacttcacaaaaaaatgtggggtacgttttatcacttgcggctaactacaaatgtaaacgtatg

SEQ ID NO: 31331 - DNA, 288 bp, Gossypium hirsutum
  Clone ID: LIB3048-025-Q1-L1-D9
aagcaaaccatccttagaaccgaatgcatgaagctgtggggatacagaacatgtgcttgtactaaagctcacgtgcaagtgaatggacttataggatcctgtgtacgcaattgcgatgatctagctgaaccgtatgtatgcttgtgaatggcccatgtgctaatggttctttacaagctggataatgccgcaacagcactggaagaagggggattcatcaagatactatcttctaactacatgacattgccttcctgtggatagaaatgtgctcctaaactcagagat

SEQ ID NO: 31332 - DNA, 454 bp, Gossypium hirsutum
  unsure (1)..(454): unsure at all n locations
  Clone ID: LIB3048-025-Q1-L1-E4
gcaaagtgacactatattatatattgtcgttgtttgtaaggggtctagatctttttctcttttcagtgggcaagtcaacgcaatcaagctcacctgtaagatccagagacatgagtcttctattgaacacactttttgatttttcttcttgactatatatataaggtttaggattttcataggaaaaactggtcaagggagtttaataaagcattagatgcctctcttagatttgctttcttaatttaccagaataagagatatggcattaatgagtgaatctaattgaacagctctcagtgtttgaccttctaaatagttgattgattcttccaaaaatgagtctggataatcatatntgaccttttataccagatgcaagagttgacaacactggtgctgtctactgcaatttttaacctgctaacttaaactattttaaaaccggagatta

SEQ ID NO: 31333 - DNA, 131 bp, Gossypium hirsutum
  unsure (1)..(131): unsure at all n locations
  Clone ID: LIB3048-025-Q1-L1-E6
ctgctaggannattcggcatcgagggtagggcttgtaaaagggcaaccagctatgatgttcattgcggtatttgtggtagaanntaatggggtgaagtcgatgggtctctgagtgaacccttgannttcaa

SEQ ID NO: 31334 - DNA, 180 bp, Gossypium hirsutum
  Clone ID: LIB3048-025-Q1-L1-F9
cagggttgctggctatgacagccttgtactctgtgtcgggatattcacgagattattcacgtgggcctccagtttgatgtccatgttgagactgcgtgcaagcttgtccatcgggattgtatcaagcctgcgatcactcgtgacttactgtgtgtgtatgtgatagcagatgttcaaagg

SEQ ID NO: 31335 - DNA, 139 bp, Gossypium hirsutum
  Clone ID: LIB3048-025-Q1-L1-G4
ggaatctgttctacctttcgagcaacttcttcttatataggatcaggcttctaacgaagtgatgccggatcaaccttgattgcagatctgatatacggcaaaaacggcaatcttgcatccatactggaagtgctggatc

SEQ ID NO: 31336 - DNA, 103 bp, Gossypium hirsutum
  Clone ID: LIB3048-025-Q1-L1-G9
cttaccaggacaactcgcttctttatactgtaccctaggggcggcactgtgctgtggctagctctagacgatgcttcagttttcaacggctgcctttgggcca

SEQ ID NO: 31337 - DNA, 430 bp, Gossypium hirsutum
  Clone ID: LIB3048-025-Q1-L1-H2
gttgagttgtattgttttttggtgattgtccagcccatccgctgtggcatctatgggacatcatttaagctgagtgtaagtaaatggattgatagatgaagttcaactcttacactggagttttgctgtaggtctcatagactcgttggttttagatgatacgaactggttgcagcttgtagaagctgcatttgaggatgttgataattttctgggtgatactcaatcattcttataatgagaagtcggttcctgtcaacatcatacatttcatgctacagtttagctgcagtaaacaatgtatgcaagctagtgatcatgcctatgtcgatacagtcgacatctctatatggagggtggtagaagtacattgacaaattggtgattattatctgctacaactgcgataatggaaaggtataaaatttta

SEQ ID NO: 31338 - DNA, 334 bp, Gossypium hirsutum
  Clone ID: LIB3048-025-Q1-L1-H5
ctagcttcatatttcatactctatcataatcttagacttggtttcctaataatcgcttgcacacttctatatcgcctcaaaaatactcttatcatcagcatatctaccataatcttcaaactaatacatcaaaagatttttgaccactatatcacttcaatactaagcacctaccattaacaatcatacaaataatctcacatcctaccataatgaaataacagtaattgatccaaatatcaaattctataattatcccacacctaactacgtcagtaatacttcaaatatctacacagattataacatcccacttctagcaatctcaaccaaa

SEQ ID NO: 31339 - DNA, 410 bp, Gossypium hirsutum
  Clone ID: LIB3048-026-Q1-L1-A4
cctaagcgctttagaatcaagcgagtcttcacaatacattcgagccaccgttactccatgaaatgccgacgatcacttatcatattttccctagattcatacactaccacagtcaatttatccagtacagctttttcggaaacttatttcgagatcacgtatcaatatcgacctaccatcacgccaatcgttcctgaaacctactgcatcgcctgatctatgttgaattcggagactaatgaactggtaacggttaagaaaatacccaacgctttccataatcacatggacgcttagcgtacgcttcgtgaaatcaagcttctccgacatttggataaccagactgttatcgatattaaaaatgtcattcctcctcctttgcggatagattttaatgatgactacatttc

SEQ ID NO: 31340 - DNA, 390 bp, Gossypium hirsutum
  Clone ID: LIB3048-026-Q1-L1-A9
tctatatctagcgggtccatccggctggctgaattaattacgagcatataagctatcaaatactctttcacaaataggaaatactgtcggtatttaattgacacaggggtatgttcttcatgttgaaaaagctcatcttgttttagatagccttagtgaccaatgactaaaaatgtgggaattcttgctatggaaatatacttcccttctacctgtctttatcaagaagcatttgccgctaatgatgtgcctagtaaggtgaaatacaccattggactctgacatgattgcatcgccttctgtacagacacggaagatgttatcatctatgagtctaacagctgttactatactccttgcagaatatgatatagaccccaaacaaatcgg

SEQ ID NO: 31341 - DNA, 349 bp, Gossypium hirsutum
  Clone ID: LIB3048-026-Q1-L1-B9
aattacccttctttgtcatagtacataactatctacatctgaaggtatctcaagtccagcttgtctaacaactacttctctctttcttgtttctcaattgtaccttctctcctgtctaaacacagcataaaacacagagcatcattaatggcaaccaacagacttgctaccatgcaccataaaaacactaataggatcactctaatacctgtctacggattactaaaatcgattctgatcattctactacttcagaatccactgtcatcttacctgaccatgaagactactgactacttagctcttaaaaggccctgcctttggtgctcaatgcttgatcatatctttg

SEQ ID NO: 31342 - DNA, 291 bp, Gossypium hirsutum
  Clone ID: LIB3048-026-Q1-L1-C8
ccccccctttttttttttttttttttttttattgtttttgggtttttttttttttttttatatatatacaaattgccatcttatttcttcattattaatcgaaaaaaaggaaaattgggaggaaaagggttaaaaatgacatatgccggttagtcttttatttcaaaattatgaactcaacttccaatcagacccttgcaaattttgctattattattattggtatttatacatcactgctagtgcctgctggtacatccctccattgttgagaaactgttttaatccggg

SEQ ID NO: 31343 - DNA, 121 bp, Gossypium hirsutum
  Clone ID: LIB3048-026-Q1-L1-D3
gctagatctattgctcatttaattgatatctgatttctgagccatttgcaattttgtcataactgatatctaaaacttatcagattatactacattctttaccttcgagcttgaacttact

SEQ ID NO: 31344 - DNA, 322 bp, Gossypium hirsutum
  Clone ID: LIB3048-026-Q1-L1-F4
tagcacgccctttaactttatatgctttcattccttattgtaagggcttctgtaaatggtactgctaaagctcatactcatggtgacatacttcatagactctgtatacttctgtcagaactcttccactatctttataggaatctacacactaactaattccctgtattcatccattatgattcctgatactgattatactacggtggttaaacccatcaccggtacaccatatgccattattactccactcaaatcactccatgcactatcaacaataggatcgttcactctccatagcattcaacttatgattcttact

SEQ ID NO: 31345 - DNA, 385 bp, Gossypium hirsutum
  Clone ID: LIB3048-026-Q1-L1-F9
ggtctatatctagctagtccatcaccctgcctgaattaattacgaactagcaaggatcatgactatactcattcttcgtactctcaagctggatatcatacaccgtagccgacaccaaacccattacaattctcaggatactacatgccccaatctcgtacatgaagatgttatcaaagcctacatcactatattacttactctgtgtgtatgattgaacactccacccaactctttacctgattcttgctatcataaactttactactccttcacatatatgtccccctcaaatacacacacacttaatcacattcatgctcctactctgcatattcatagaccaaattgctccatattacttaactcgtatctataagcttct

SEQ ID NO: 31346 - DNA, 434 bp, Gossypium hirsutum
  Clone ID: LIB3048-026-Q1-L1-G3
acaacatgtcttattgggcatccggtggaagtccatgtgaggagcggatcaatttacactggaatatttcatgcaactgatgcataaaatgattttggaatcatcttgaaaatggctcgcttgataaaagatggttctttgtgtggttacaagtctactacagagtttgttagcaaggcaccctcaaagattttaattatacctgacaaagaacttgtgcaaattatagcaaaggatgtggctgtaaccagggatggatttgcaagtgatccccaaaatgaaaaatatcacgagattctgatagattctgcaatatcacagtcccgacatgttgaggttgatagggaattggagccctgcgttcctgacgaagatgatctgcagtgtcctgagctagaaaatatttttgatggaccatggaatatgaactggga

SEQ ID NO: 31347 - DNA, 368 bp, Gossypium hirsutum
  Clone ID: LIB3048-026-Q1-L1-G9
ctataactagggggtccatcacgctgcctgaattcattacgagctatcttctccttaactctcaagtccttatactttaacctaaggccgtgtatctatccagaggctaacatctagatcatgactcaaacttcaacatctcctatttgctcatatcttactattacctgcattgtcttactataaggactatttcgtcaaatccagaacaacacactactgcagcgctcactgcttatgacctccaagattatctcgctaataaggagaatctggaacaattgtcaatgatgccaatgaccccattcattacaggctctacaataatggaactgactcacgggcttcatactactttaatgccacta

SEQ ID NO: 31348 - DNA, 218 bp, Gossypium hirsutum
  Clone ID: LIB3048-026-Q1-L1-H12
cataaatttatgaaagatcatcatctttatatgcaagtgatgcattatgatacatgcgtacgtaacacttactgacaagtcgagactctctctacatcacacgcatcaacgcaacagttcatcgtaaacatgctggcagtgcaattcatcatgcttcaactacccttacaattctttactttcacgttatgatcacgtttattaacttactgttacct

SEQ ID NO: 31349 - DNA, 343 bp, Gossypium hirsutum
  Clone ID: LIB3048-026-Q1-L1-H3
ctcgagtgttttttttggagatatgacaatgaagaaaatggggggtgaggaatttttccaaggaatctgcaaaaatgcatagtatacttatcatcaggctaggacgatgattctacatcaggggcatgcttaccttatgtaccactatggaaacggggactaatgacccttcacttacatgtaaaaagatttctatgaaatccctactgcattaaagcacacaaattcacatctctagcggtctttaccatcatcgaaaacctaccggtgacattagtagatgcaatacctactatgactggcttatgcgaaatctcaaaatctggattaaatcgttataatc

SEQ ID NO: 31350 - DNA, 376 bp, Gossypium hirsutum
  Clone ID: LIB3048-026-Q1-L1-H6
cagtcatcttatactcttcttttctctaatctttctcctgtaatcttcttcttcttcttctctctactactctgtttttctactgcctaaggggttgctccgtgacatattttctgctctatttagttatttattgcttcaattgtttccagatagaatgaatcaaatttgacgttaagcgaaatccaatagtggttctgattcaatactctgataaatacttcgataatgcttacaagtacagtttgaatagaaactgaattctggaaattatggtgctgaggtcagttgtcttcatcatatattggcatccttgaattagaattgaggtggatgtgaaagccgctaatattaggtgctcgccaaagtgttgatg

SEQ ID NO: 31351 - DNA, 444 bp, Gossypium hirsutum
  Clone ID: LIB3048-026-Q1-L1-H7
tatttacccgtgtgtttgcttcacttccagatgatgtaaagcttgatgaacaactttctgagaagatggctcttgttcagcaattcgttcggcctgagaacttggatattaagccggcctttcagaatgagacatcatggctgcttgcacagaaagagttgcaaaaaattaatatgtacaaggctccaagagacaagcttgtgtgtatcctcaattgttgcaaggttatcaataatttattgcttaatgcttcaattgcttcaaatgagaatcctcctggagctgatgattttcttcctgtgttgatttatgttaccataaaggcaaatcctccacagctgcactcgaatttattgtatatacaacgttatagacgtcagtctcgattagtttctgaagcagcctacttttttacgaacatgctgtctgctgaggctttcatct

SEQ ID NO: 31352 - DNA, 280 bp, Gossypium hirsutum
  Clone ID: LIB3048-026-Q1-L1-H9
cacagctactctccttgacataaactctacctctacacgcgggccttcaacagatatgtgtgctcaatgtcctccacaagctactacatactatctattactcatatcccataactacaagcatcactacatttcttattacatcatctacttacaacatcgatgacccattacatcatatcttatcaaatcactgcgtctactacatcacattagcatgcctactatactccatcgcactatatctcttctattaatttaacataacatcactccttat

SEQ ID NO: 31353 - DNA, 208 bp, Gossypium hirsutum
  Clone ID: LIB3048-027-Q1-L1-A9
ccaaattcaagaacgcaagccgcaagctaaaggatgtgcagggatcaccttaaagagaggagtaacactagaaccatcatctaataacaaaccttactggcatgataactcactgaacctgacacttacaaaccaatttcatattatgtgttcgctccctccgcatatcgctacacttcatatcatatcatttcctaacgaaaaacct

SEQ ID NO: 31354 - DNA, 236 bp, Gossypium hirsutum
  Clone ID: LIB3048-027-Q1-L1-B10
ccccttccgttttttttatgtgttatttatccctgggttcggttaaacctacccagtataagagcatcgaccaatcttcatgaattccatctttaaaaccaaatttaaccatccaattttaccttacttcaattaaaataatcagctttcactaattaatatccacatctttactcattaaacacctttaaattattcacaaatgtaaaccacgaacctaaaactacatacatttg

SEQ ID NO: 31355 - DNA, 432 bp, Gossypium hirsutum
  Clone ID: LIB3048-027-Q1-L1-B5
tcatcacggtccaaaatggcagcagcggaacacatgggatacaattatgccatgtttgggttctctccttatggacagtattggcgtgaaatgcgtaagataacaatgttagaggtgttatcgaaccataggattgatcagttgaaaaaagtttttgtatccgaaatagaaggttcgataaaagatctatacaagttttgggttaaggaaaaggatggtgaatcgggtttagctgccgttgagatgaagaaacggttcttggacttgacgttgaacgttattcttaagaccgttgctgggaagaggtattcgggtgtcggtaaagaagagcaacaagtggtgtcacgttaccgtaaggccttgagggattttttttacttgtcgggcatatttgtgataagcgatgccattcctttccttcgaaagcttgat

SEQ ID NO: 31356 - DNA, 277 bp, Gossypium hirsutum
  Clone ID: LIB3048-027-Q1-L1-C8
gtacatccgaaggtagagggagagagagagagggagagtcatcgtataagctccggagatcatctattctctattagtactttcttcgcatctataatctcatgcatatctctatgctcacgatccttatcagctctaacattcatgtatcgataaataccaacttaatccgtttcaacatgtattaagacaaatatgcttactcagatgaaattgcttctaggttgttacactcttgtcatcatacacgcattaaatgtccatacaaggtctatta

SEQ ID NO: 31357 - DNA, 333 bp, Gossypium hirsutum
  Clone ID: LIB3048-027-Q1-L1-E3
tctcagatctagtgtattcgatgggctgcacgtaattcagttcgaggcaaggagcgaatcagaagcagatgagagacttcatgtgatggctgagattcttccatttgaacttgatattgattgctgattagataatctgagtattgctaggattagacacctgatgattatatagcagagcaacctaaagtaggaacagatgcactcgacgctgttgctgtcagggaataatagtatactgatatctgcatcaccaccagccaattctcactggaccaaattgtttggagtgaaaacagacgtatctgaaaacgcgaaggccttatacgatga

SEQ ID NO: 31358 - DNA, 311 bp, Gossypium hirsutum
  Clone ID: LIB3048-027-Q1-L1-F2
cccccccttttttttttttttttttttttttttttgtttttggtttttttttttttttatatatatagaaattgcgatcttatttcttcattattaatcgaagaaaaggaaaatagggaggaaaagggttaaaaatgcgatatgctggttagtcttttatatcaaaattatgaactcaactacgaatcagacgcatgccaattttgctattattattattggtatttataccttactgctagtgcctgctgctacatccttccattgttgaaaaactgttttaatctgggtgtaaaattgaattcctgcct

SEQ ID NO: 31359 - DNA, 427 bp, Gossypium hirsutum
  Clone ID: LIB3048-027-Q1-L1-F6
tattggaagaccatagccaactcgaatcaggtccatggagcttatatgaatcggggcctcacgggacatttgttggaatttacgatggtcatggtggtccggctactgctaggtttataaatgaacaccttttcggctatatcaagaagtttacaactgagaatggtggaatgtcagcagatgtaatcaacaaagcatttttggcaactgaggaggattttcttgctcttgtgaggaagcaatggctaaatgacccgcatatggcttctgtcggttcgtgcttgttggtaggaatagtttgtagcggaatgctatatattgcaaatgcaggagattctcgagtggtcttaagaagattggataatacgtataaagaggtcaaggcagttccattatcatcagagcacaatgcaagtgttgaatctgt

SEQ ID NO: 31360 - DNA, 325 bp, Gossypium hirsutum
  Clone ID: LIB3048-027-Q1-L1-F9
ctctaacaactgcgcgggcttcagatgctgcatctggtgctggagaaccaatcctatgggttgatcctatcagctctacagtttcaaatgcacccactcctttctgtcatgcaccttcatatattttcgatcctaccatgttattgtatcaccccttgtaactactgcaccagcacatcactcctaaacatttgcatcgttaacgacgatctcaatcatcctctgaacataaccacactgatgttcaatcagaccaaccatctgatgctgaatcataagcacaataccggatgttctaccagtttactatatacctatcattccc

SEQ ID NO: 31361 - DNA, 218 bp, Gossypium hirsutum
  Clone ID: LIB3048-027-Q1-L1-H4
tccacatctaagagaggccgaagcaccgattaagctagggtgccctaggcctgcatacttaccccattacatatatgacgaatcacccaaggcgaaggtcctaacactcattcggcattcaaagaagggaagctcaaaaccacgatcaatgacaaaagggcccgagaatgacttctttacgctactgcacgagagtctcttttcacctactgatcaga

SEQ ID NO: 31362 - DNA, 204 bp, Gossypium hirsutum
  unsure (1)..(204): unsure at all n locations
  Clone ID: LIB3048-028-Q1-L1-A6
ggaaaaggcaagaggcacgggctacagcaagggggcggggcacggagagncaaggcaagaagaacgacgcggagccccgaaccacancgcaacgggcacgggngagcccacagcgccccagagcaacacggggccagggacacgaagcaacaacaagagacaaagaacacaagaagagaaggagcaccgggaaagcagaaacag

SEQ ID NO: 31363 - DNA, 278 bp, Gossypium hirsutum
  unsure (1)..(278): unsure at all n locations
  Clone ID: LIB3048-028-Q1-L1-A8
cacaaggggaaaagcttattcaattggagcgtgggaaggggatcgtcattcggttcatgatcggccatagtgcaacatctaacagcattttagatcgagctattgattcggaggaagctcagcataaggatttttttagactggagcatgttgaaagatatcacgaattatcagcaaaaacaaaaattttcttttctactgcagntgcaaaatgggatgctgagttctatgtcaaggtggatgatgatgtccatgttaatcttggtatgctagctact

SEQ ID NO: 31364 - DNA, 297 bp, Gossypium hirsutum
  Clone ID: LIB3048-028-Q1-L1-B4
tagtggaattcatcgaactaacctccatatcgccattgagtatctgtaagcggaaagaagtgacctcatctccaataatgtgccagtatttttggtaaaataaagttagaagcccgtcttcctttggcgcttttgttgcccccatctcgaataccactgctcgaatttcttcattggtatacactgctgtaaattttacattatcttccttagacacacaatggtcaatactagataacacatgatcataattaccactatctccagttgtaaataaattattgaaataagatctag

SEQ ID NO: 31365 - DNA, 414 bp, Gossypium hirsutum
  unsure (1)..(414): unsure at all n locations
  Clone ID: LIB3048-028-Q1-L1-B9
cgaggaggaagatgagntcatggtgnnagaaagatgnnatgaaggaggaggggctatgaagggtgagtgcccctgggtgtgcattcaattnngaaattgatggctttttgttcattgagtttgtnngatgggagaaattggcattttcatcccgnnaggcaaagggagattaagactaggctttttgaagggttattgggctgagcgaagttagtgatgcctgggtattgannatctcaggtttcnntgatgtgttacaccaatnngttggtaatgaagaagaaaagggaatttatttgtgtgaagcattagtgaagaggctttnngctattgnncttatggannattttaaaagacctgaaaagcaccagttgccccaattatgaatagtannaagaatctatagaagtttgc

SEQ ID NO: 31366 - DNA, 305 bp, Gossypium hirsutum
  Clone ID: LIB3048-028-Q1-L1-C7
gtgtctgcaaggctttggcaggaaactaatagccggtgatggcggatgcaggacccaggttcacctttgtcttcgagcccgggttctacaattggttcaccagctaactttagtcaaccaaaaagggtctcttgagatggtgcagtggcttctcctattaggggttgaataagacctgcttctcctagtaagctgcggacatctgcggctacatcttcaactccatctaggggactaagtcctggtctgcttagaaatgcagaaggcgcgaaagagacgatcgggaatgctgatagtacgccttc

SEQ ID NO: 31367 - DNA, 241 bp, Gossypium hirsutum
  Clone ID: LIB3048-028-Q1-L1-C8
atgccttcaaggctcaaaccggagactggtaaccgctgctggcgaagacagggcccaagcccaacatagtcatcaagcacctcttctacaaaaggagcacaaccttaccctaaacgcccaaacagcgtaacttgaaacagatcactctcttgatatataagctgtcgagatactacctgcattatcctactacgctgcagacatctgatcataaacttccacctacactagaggaaccaac

SEQ ID NO: 31368 - DNA, 286 bp, Gossypium hirsutum
  Clone ID: LIB3048-028-Q1-L1-E9
caggggaaatgtatacaaagcgatatttttacggttgtgcgctattatagggcgatttacccctaccccgaccgtcaaaatccccaggatagtgcgatgtatgtttacgtcttcattgccttggctacctacggtactgatgctccagcccttttcgagctcacccttgccgaccagagctccaaacggacccataacgttcatagtcactttgacagaccgctggatagtccgccttatacttccaactacagagcaagcatctggcgctacaaaccattcttta

SEQ ID NO: 31369 - DNA, 195 bp, Gossypium hirsutum
  Clone ID: LIB3048-028-Q1-L1-G12
gttgaaagcatgtttcttttttgaggaaatatagggcagatatagaaaggatgggtgtcggtcatcaatctagggaagtagtggaggaaaattcaccacggaagaagaaagatggagggctagacgaaacaggctgctgcgttaattcaaggcttatggtacgcagcatgtctgccatatcaacacttgataact

SEQ ID NO: 31370 - DNA, 320 bp, Gossypium hirsutum
  Clone ID: LIB3048-028-Q1-L1-G5
aatgtatcaagcattatgaaattccgcactctacgtatgcattataatttgcaggttttaccatcgttggatgtatcatttgaacttagtccttgtccatcaagattggaagagttcctcttgcgtatggatgttgtcaacaagaccagttctgaatgtttccagattcatcaattgtcttctgttgggcagcagtgggatgtctcattgctccaacctgttgatagcattttaccgtctcaatccttatttgctggtcaagtattgtcatgcttcttcatgcttaagtatcacaggaagtcatcaacttctgaagacag

SEQ ID NO: 31371 - DNA, 341 bp, Gossypium hirsutum
  Clone ID: LIB3048-028-Q1-L1-H1
ccgttgaatctgctttcaaagctattcatgatttttctaaaccgttgatcaacatgatgaaagctgctggctgggaccttgatgctgccgctgactcgatcgaacccaatgttgtatatgccaagagagctcataaaaaatacgcatttgagtcccatatttgccagagaatgttcagtgggtttcaagaggagaatttctcaattaatttagataatcttacagtcaataaagagagcttcttccaccaatacctggctctgagggagatggatccgttggacatgctaagccagaatcctgattccgtattcgggaaattctgcaggagcaagtaccct

SEQ ID NO: 31372 - DNA, 184 bp, Gossypium hirsutum
  unsure (1)..(184): unsure at all n locations
  Clone ID: LIB3048-028-Q1-L1-H5
gaagggctcaagcagcagccacacaacgcacgggccgggcggaacacagcgcggggcacggcaagccagggaacagcgcagcaagcaaaaanggaaaaggaaaaggaaaagggaaagccaggccgggaccgcgaccccggccaaggagaggaaaccnccacangnnaggcaagcgnccacacca

SEQ ID NO: 31373 - DNA, 300 bp, Gossypium hirsutum
  unsure (1)..(300): unsure at all n locations
  Clone ID: LIB3048-028-Q1-L1-H6
ggaaaaggaaagaggnagcccaagagctccaggagaggagggaacagggccaggcgcggcngaggcgagcncaaacacagcaaaggcccgacagncgcgaaaacancgagactacaagtggctattgctatcgacgaatggatggacatactcccgtaaaacagagaatggctttaatagatgaattcaacaactccgatgatatatttattgtcattttgactacgaaagtaggtggtttaggaacaaatttaactggagctaacagggtgatcatctttgaccctgattggaacccgt

SEQ ID NO: 31374 - DNA, 301 bp, Gossypium hirsutum
  Clone ID: LIB3048-029-Q1-L1-C2
tcgacactcggtttactcttgtctaaatactaaaataggtacggtgcaaatataattgcagttgtcattaacatcactcatactttaaaaacctttatgtctatcctgttatcagcacaatctcatctcattacacatgctattaacaataatactccctataaaatgcatctacctatcttatcattgcgcaatactcttcatgagataaaaattctattcttacattacaaccatgtgaatcttaaaaaaactcttggagcattgcagttatacgaaacagatgagattagtgctacaa

SEQ ID NO: 31375 - DNA, 402 bp, Gossypium hirsutum
  unsure (1)..(402): unsure at all n locations
  Clone ID: LIB3048-029-Q1-L1-C4
atttgaaagaaacgaattcaagcaaatcccagcacatcgacgtttctctctgtttctagcagtctttcggtgtttttgcttttctgcattacagatcttcgggtcaaaacaaattcagtttagtttctgtttcagatgttcagaaaaaggtgaaagaaacgttccaaatcgattaattcaccaggaaaaaagaacaattgaatacttgcatagttgaatttaagttgattgggagtaaaatgaaaaactcagtgtcggatcatagtttttacatcgagagcgatgaagaagatgaagagaaggtttttatcccagatgaaaatggtgaagaagttgatggaaatgaatctgatgattcagattcttncgccgaaaatcaacagcaaaataaaccccgcaatc

SEQ ID NO: 31376 - DNA, 422 bp, Gossypium hirsutum
  unsure (1)..(422): unsure at all n locations
  Clone ID: LIB3048-029-Q1-L1-D12
gaaaaaaaatagacaaattgataaaaaaaagagagagacgaaggtttattcagcttcgttaatggcggttagggttttctattgatttccttctagaaagaaccttaatctctcccgcgtaatttttttcaagagcccgcgctttttctctcttatcgtttacccaaaaaaaccctaattcaaggtttttccccaatctctctcaatttcaacctcgttttttcccccaatttttacgacttctcgtggttattcggggattcgtaaagttctgaaataggagagcgagaagctacgatgggcgctcaagagaaatcgcaagggaactccaattcgatgcagcgagtaaaggtctatcgtttgaatgaggatggtaaatgggatgatcnaaaagngaactgggcatgtcactgttgattatt

SEQ ID NO: 31377 - DNA, 388 bp, Gossypium hirsutum
  Clone ID: LIB3048-029-Q1-L1-D3
acagctctcacttgcctgcaacttgcctttgcagtttatgcaacgatccttttgtattacatgagtccatcggtggagttaagaaccaaaccagagtttacttgggcgacaagaatagcaagaaacatgaaacagttcatcatcccaccacatgttcatggtcgctaccaagaggctgcttctttaatcacagctgaaatcttctctccaattaccccatcacaagtttgtgagcatgagaggatcgatttcgtgcagaagaagtccagcgatgttcaaatgatcaagttgaagagagagttatatgatgagatattggattttcaaagcaagaccatcggtacagagactctgtccgagttaatggcaatgaaatcccaatgggata

SEQ ID NO: 31378 - DNA, 382 bp, Gossypium hirsutum
  Clone ID: LIB3048-029-Q1-L1-D6
ctactatccagcatactcgaaagttaagcagtgggctggccatgtacatgccaccgctcctaaaatgactgtcgaccaccagaatcgtccacgtggacttcatcatcgacgagctgggccacatcgatcgatctaatacgactacgatgacgttcattcctgtatcgtttcctgtgatggtcactgatgtaatctgagcaaccaacttagcgagatagtgtgcaacttatgtcacatgtatagcgtgaaaagcgatgctgggattgatgtactacatcgatctcatgatgctagatattctgtacatttagaccctgatgactgcaatgatattcatatacgacgaagtactattctcggaacatcatcaggaatgcatgat

SEQ ID NO: 31379 - DNA, 284 bp, Gossypium hirsutum
  Clone ID: LIB3048-029-Q1-L1-E12
tctataaccagtggatccccctttctgcacgcatacgccacaatcacacattttaatctccaaacaactatacatcattcatagactcgctttaaattccatcttctccataatctaaacctacacatctatgcaagatccccacaaattctatataactgccacctaaccacactcattactcatctcctacctacctcaaatattctaacactaccaataccttttttctaccaaacaaaataatcttcatacaaaattaaccaaaccttcatacagtatct

SEQ ID NO: 31380 - DNA, 247 bp, Gossypium hirsutum
  Clone ID: LIB3048-029-Q1-L1-F8
ttttctttttagatacaacaccttctccctatgggaggtctatcatctatattagcactaataattattcccactcaaatattcagaaacaccttgtctaacctcatcaatatacaactctattttatcactctttaccatctccatcttctaaaaaactttatcataaaaaccctggccaatattaatcatattatatctctatttcccagaacgaaatacactcgcatttaaaatctatctacaa

SEQ ID NO: 31381 - DNA, 367 bp, Gossypium hirsutum
  Clone ID: LIB3048-029-Q1-L1-G3
acctccatttactgaaggctagaagagtccacaagttggtctgaaaaaagacgcaggagagtctcgttccattgtcctctgcaaacccaccatagccaataggacaatcatattatctttacaaccctaacctcgtacccctctcacaacaatagatggttctcttcgattcttcaatatctcccttaacccactctgccaaactctcttctccactgcttctctcttctctctcccatcgtcctctcagatatgcagttcttggtgctggttttgctggtctcttcgttgcttggcatttactcaaggagagtcctaaggatttgaacctgcacattgacttgtatgatgaaatgggcattggtgg

SEQ ID NO: 31382 - DNA, 432 bp, Gossypium hirsutum
  Clone ID: LIB3048-029-Q1-L1-G7
atcagatgggtgccatgggtcaaactggttggcatcatgatagccatggggaaactaatgggaacttagagataagtccaaacggaatttatgcaaatggttcttggaagggtgctgagccagggtttcatcagaatcatgatggaatgcactggggaaacaaaagaaatgaactgcaggataactcagtttatggaaatggaaactttagaggatacgaggctgatgctcaaagtacttccaatatgcagaatcaagtatggtcatattggcaagggcctaaagaaatcagacagaatcaatatgaccttaatttaccaaggtttacagaatctcaaggaagccatctgaattcgcaaggcccaaatttcagccagtaccggcagaagccgcaagatgtttataattttagttcttttggtcaagtaacaa

SEQ ID NO: 31383 - DNA, 406 bp, Gossypium hirsutum
  Clone ID: LIB3048-030-Q1-L1-A12
tagccatggagcctcaaaacccccaaacatctgaaaacttagacagcaaccccacctctccttcaccggctaacttagttcacaaagtgaaaagcaacttggttttccaatccaaatgggcagaactgaatggtgccatgggagacttaggcacatatattcctattgtattggccttgacacttgccaaggaccttgacttaggcaccacattgattttcactggtgtctacaacatggtcactggcgtcatatatggtgttccaatgcccgtccaacccatgaagtcgatagcagcggtagctatatcggatggtccggattttaatatcccggaaataatggcggccgggatttgtaccggtgcaatctttttggttggtcttgggtgctacagggttgatgc

SEQ ID NO: 31384 - DNA, 322 bp, Gossypium hirsutum
  unsure (1)..(322): unsure at all n locations
  Clone ID: LIB3048-030-Q1-L1-A9
agactttgttggctcaaacggttgtttggagaaagctagggangaagagaacgaagaagccagagatagggataaaacaatcaaaatgcttaaagaggagatcgattccctaaaagcaaaaattgcagagttggaatcaaataactctgaggatatagaaaataaggagatgcttatgcaaaaaccacctatgttgcagaagtttgatcaaaagctgccactgaagctagatgatgcaacaaagagctataccccctatattagatacacaaagcttgaattcaaggtcgacacattctttgcagtgggatcacctttggga

SEQ ID NO: 31385 - DNA, 408 bp, Gossypium hirsutum
  unsure (1)..(408): unsure at all n locations
  Clone ID: LIB3048-030-Q1-L1-D12
actagttcgaccttggcttctctgagtaagggatgtgcagagctttcaactgatgggcagtttctgcaaatgcgctcaaagcaggagaatcactggggtaggtgacggaattattcaaggagcagaagctcttgcccagggtgttgcttttggtgtggttggggttgtgagaaaaccggtggaaaatgccagacagtatggtctcctaggacttgcacagggaataggacgtgctttcctaggaatctttgttcaacctgtcagcggggtattagatttcttctcattgacagttgatggaattggtgctagttgttccaaatgtttggaggttttgaataacaaaagcacctttcagagaattagaaatccccncccggaactattcgtgctgatggtatacttaga

SEQ ID NO: 31386 - DNA, 225 bp, Gossypium hirsutum
  Clone ID: LIB3048-030-Q1-L1-D5
cagcttcacttttacacattcaccatataatcctctgtctgggtacgcctatctcattgctactcatacgatatttctttacaaaatttctttaattctctttcattattaaacgtgcttaactgtctttatacttttaaaaacaatctatcatttatctttcctctttagatctcagcattccaacagatctacatcctaaattcctttcaattcaatgtaata

SEQ ID NO: 31387 - DNA, 247 bp, Gossypium hirsutum
  Clone ID: LIB3048-030-Q1-L1-E10
ctatggctttggcttacagccttcttcccttgagttatggttccctttatataaatgatatgaaacaatctcactgaaccatcgtcggataatcagtccagactgtgattgtggctccgaatgccatctgctagtctatgtgtcctcattctattgttgtagcattcgcatttaattatttccgtgaataacattgaattgatcaccattgtcagcaaatgaatgttaaccactatggatttacatt

SEQ ID NO: 31388 - DNA, 185 bp, Gossypium hirsutum
  Clone ID: LIB3048-030-Q1-L1-F7
atctcaacttacatcccatctgccatcaatacgggctgaggatcattgccactatattttacaactcatttcctaaaaccctaattaaacttaatcctctaacttttaaaaatccctcctatataattaaacacctaaatttttatatacaacacatttcatttaacaacataatcctcatataa

SEQ ID NO: 31389 - DNA, 402 bp, Gossypium hirsutum
  Clone ID: LIB3048-030-Q1-L1-F8
cttcaattccttcacgtccctgaattcggccaaggctgaacagaaggagaaaaggaagaaaatgagtagtgaaaggaagaaaaacccagagcactttcagcttaacccaaactgggctcaactccaacaaaagctgaagtcctctgctaagccttcaagacactcgaaaaatccacaatctgaaaccccaaactctatattaggaaagcgtaaggagaggcctaattcagagactgatgatgctaagcctaatcctttaatgccaacaaatgatgattccagtgtgacagatgtgctagctatggattgtgaaatggttggtgtcggtcaggggaacaagagtgcccttggacgagttacagtggtaaataaatggagaaatgtatatatgatgagtttgtg

SEQ ID NO: 31390 - DNA, 409 bp, Gossypium hirsutum
  Clone ID: LIB3048-030-Q1-L1-H1
gtgggtcgcttttaagagagaaaatggtggaaggagcatgcaagaaatttgtttgtattgttgacgaatccaaattggttaaacatttgggagggagcggtttggctttgcctgttgaaatcgttcccttttgctggaaatttactgcaaataagctccaaaagttgttccaagggtcggattgcgtggccaagctgaggaatgatggtgaagggaagccatttgtgacagataacgggaattacatcgtggatttgtatttgaagaaagaaatgggggatttgcaggttgcaagcgatgctattttgaggattgcgggtgtggttgaacatgggatgtttcttgatatggccaccactgttattgttgcagatttaccttttggcatctatattgattgatgatggga

SEQ ID NO: 31391 - DNA, 276 bp, Gossypium hirsutum
  Clone ID: LIB3048-030-Q1-L1-H3
ctgacacttttttaacatagaacatgcttgaatgagcaggcaaggttatctggtagtattgtggactaatccatattggttaaacatttgtgagggagcaggttggctttgcctgttgaaatcgctcccttttgctggaaatttactgcaaataatctccacaagttgttcccaggatcgcattgcttagccaacctgaggaatgatggttaatggaagccatatgtgacagattacaggaattacatcgtacatttgtatatcaagaatgacatg

SEQ ID NO: 31392 - DNA, 217 bp, Gossypium hirsutum
  Clone ID: LIB3048-031-Q1-L1-A2
catcaattctacaccagatatcctgcttctttacactgtaatccatatattactacagggacgtttaaaagggacgtacttatataccaccatttcaactttcattgaatatacttataattccatatttaatatcaactatatttccaaataatatctaaaacatcttataattgatatccaaattatgcaccatttctactttcataacaatatc

SEQ ID NO: 31393 - DNA, 388 bp, Gossypium hirsutum
  Clone ID: LIB3048-031-Q1-L1-A5
ccacatgggctcatcgccaccagttaatactacatggtgggacaatctggatccgtatatctgagagtctcctgaaacttcatattttccccttgaatctcttacaagcgtatgctttactaattactcgatatcacatccactgaaatattctttccacaacatattatctcatgttggaagaaattgcatactatttgacataaactgatcgggtacgctctactcaacagattcgccaccttttacctcgcatgaaccctattatacccacatatcatgattctcctaatgatcaaatcatacacttttcataccgaagaaattaatcaaactctacttatgctaattgacaacaatatgaactatatatctactccatcataca

SEQ ID NO: 31394 - DNA, 328 bp, Gossypium hirsutum
  unsure (1)..(328): unsure at all n locations
  Clone ID: LIB3048-031-Q1-L1-B4
ttcctactccccattacataatttcacaatcttcttccaccatctaaactcaaccatttcctaaactcaactcttatattcaatttttaaatntttccaatttacatatacttttcttttatttaatctactataaatatctattttncccaaatttaattcatttcatattctanaattttttaactataatctataataacaattttcttttatcccttaaattattgatacctataattacttatctatttatacttaattcccatttatatttctacttccttttcattcttttaaaaatatcattnattataactaccaaact

SEQ ID NO: 31395 - DNA, 240 bp, Gossypium hirsutum
  Clone ID: LIB3048-031-Q1-L1-D3
ctctaaactgtgggtcccgcgtctacatgaattctgcacgatggcatttgcttgaattcaattgttcagtatcatcatccttgtgtcgcatttttccgagcgaagcttccttctcttccttgccatccttaatatcttcttctggtatcataactattatattacaacttctatttaactaaccactatttttcttattataaattctcctattttacattatttctcacaatctatctc

SEQ ID NO: 31396 - DNA, 275 bp, Gossypium hirsutum
  unsure (1)..(275): unsure at all n locations
  Clone ID: LIB3048-031-Q1-L1-D4
gaantctacaagaattctacactatccaacagcttacgatttatttacctgtctcctgcactctcgtaccgctcctttagtcatgatgttaacctctataacaactcatttcccttaactttacctacctanctctattattcatctattcttaaaagcttcctatttccaactttattttttatacttacctttatcttcccaattctattaccttattaacctacaaaccttttatttttcacatatattattcaattccttcttaccttttt

SEQ ID NO: 31397 - DNA, 336 bp, Gossypium hirsutum
  Clone ID: LIB3048-031-Q1-L1-D8
tagcgtctagttcttttagttgcgtctatttcaagtgagtcaggttgttttaggaagggactcacattaacattgttgtcatcggccacgtctattctttgaaatcaaccaccactttccaccttatttacaagcttggtggtatttacaatcttgtgattgaaaggttctataaagaagcttcttatatgaacaatatgtcattcaagtattctttgtttcttgacaagctcaatgcttatctttatctttatatcaccatttattttgccttttggaatatttagaccaccatattatttactttttcaacaatatttattccattacccctaa

SEQ ID NO: 31398 - DNA, 121 bp, Gossypium hirsutum
  unsure (1)..(121): unsure at all n locations
  Clone ID: LIB3048-031-Q1-L1-F9
gtttcgtataacatgaagtcccttcaccgttctatgccgttgcttttcgatggtggatgctcattgncatgggttaatgtttcagctaacaaccatgattatttcctagatcgccttcttc

SEQ ID NO: 31399 - DNA, 267 bp, Gossypium hirsutum
  Clone ID: LIB3048-031-Q1-L1-H4
ccagcactagcgataggttttcttgatctataactcatctctcttgtaatgttgaacaaaatagggggcctgccatttaatctatattgtattcaccattattctatttcatctcttatgaaaacaagtactacatcagaatacattgattcacaaacttatggagaactttcacgttccaaataccaattaatgaatgatgatcaaaatctccttattctcacaagaaatactaactctgattctgttccaaatcttcaacatcat

SEQ ID NO: 31400 - DNA, 183 bp, Gossypium hirsutum
  unsure (1)..(183): unsure at all n locations
  Clone ID: LIB3048-032-Q1-L1-C3
gtgntgccttcttcttttttcctttcttactttcaatttcgtctttggtcccgattgttattgttgattcttaatttttgagctttggttgctgagaaaatgtgaagattgataagtgtgatatagtgtgataaagtgagtgcttatactgaattcagcttaaaacatgggttatggttagct

SEQ ID NO: 31401 - DNA, 201 bp, Gossypium hirsutum
  Clone ID: LIB3048-032-Q1-L1-D11
atttaaaactttaataaacttatttcaaactaaacaaactatttcttatactcaatctaaacgttccattgtatcataacttcaacataacttatcacacaaagatccatcccgcttttcccaccatcaactattttaatcatcattgctttaaactcattctctctaatcattttctactcccaaaacttctcactccca

SEQ ID NO: 31402 - DNA, 189 bp, Gossypium hirsutum
  unsure (1)..(189): unsure at all n locations
  Clone ID: LIB3048-032-Q1-L1-D5
cggngngaaagggagccggccacacgngaaacagggagagggggcaggccaaggaggccaaagcagagcggaccnagaagcccagggaggaccgaaggcaccacccccagaaaatagcatacatggggaatcttctagcacagttttaacttctataggtgcatgtgcctaacgagggtctgcattcaa

SEQ ID NO: 31403 - DNA, 161 bp, Gossypium hirsutum
  Clone ID: LIB3048-032-Q1-L1-E11
ccctgaacattgttcagatccatatacaattccttggaaccaagttaattgaattcctccgtgactctttcgttggcaactcagggcctgttatgatctcgtgtatttttccaaatgcaggttcatgtgagcacactcaaaactctgagatatgctcatat

SEQ ID NO: 31404 - DNA, 317 bp, Gossypium hirsutum
  unsure (1)..(317): unsure at all n locations
  Clone ID: LIB3048-032-Q1-L1-E8
gttctgctgtctctgaggtttatccaacgtatctgcctagggaaccgatcaaataagcatgctgtacgcaatgctgatctgatacctatgattggtgacatgttaaagagcagcagccgtaaagttcggtgcaaagcattggagacactccttgcagtgttcgaggaagatgaatataataaggcaatattggctgagggggacactgttcgcacaagagttaaatacttgtcccatgaacagtccaaggagagggaggaggctgacatcttgctgtatgaactttcaaaaactgaatcctngtgtgagaagattgg

SEQ ID NO: 31405 - DNA, 293 bp, Gossypium hirsutum
  unsure (1)..(293): unsure at all n locations
  Clone ID: LIB3048-032-Q1-L1-H3
cgcccgcaagagggaacgcagctgcgcagggccaanggctggagcggagaagaggggaatagctgtgttcggagtgctggtagctgtatggatgaccagaagcataactgaagacattccgggatggggaactctgttcaatggccgtgcaggcgatggaaccggcagtgttcttgtggcagattttttgttcgtaattcccaacaagtagcgaatgggattgaaattgattgactggaacgaatgcaacaagctgccatggaacattattttgttactaggggctggattcg

SEQ ID NO: 31406 - DNA, 255 bp, Gossypium hirsutum
  Clone ID: LIB3048-033-Q1-L1-B3
gcctagcactttgctcttagtacacactgcaaaaatctcaggttgcgtacatacacactgcagtgtaatccatgcataacaccattcttaataacatcactcatgtctataatatctacaacactagaccattattacgtacaagccacacttacggatactttatccgcacaccccctctaaaactcacctattgacactatggcaatgacattcgaacccggtctgctctagaatcacgtcgatatgatcccc

SEQ ID NO: 31407 - DNA, 203 bp, Gossypium hirsutum
  Clone ID: LIB3048-033-Q1-L1-C3
caaacacttatgactactctattacactccataaccagggtgagggacctgagctcgtggcgttgactatctacttaagtgatctcttacattgccatatctacctaatcttgcaaaatacaacgactatatatctgtcacagccacatcgattcaagacagaacactgaacgattattagcatccatatgatctccctgcct

SEQ ID NO: 31408 - DNA, 425 bp, Gossypium hirsutum
  Clone ID: LIB3048-033-Q1-L1-C7
ccctaaccgagtttcacagaggtcaaaacttcaatctggtgcccttggtcttctccgatccaacgcttccttgacgaaccctgaaacatctctttcatgatatattatggctgcaaacactaatacactcccattgtgatcggtccttgagaatgacaaattgaatggtttaaattttcttgaatggttctttaacttgaggattgtcctcaaacaagaacaaaaattatatgtcattcaacaaccggttcctaacgaaccacccgctaatgcctcgagggctgatagagatgcttacaagaagcatctcgatgacatggtagacgttggatgtcttatgcttgccactatgaatcctgagcttcagaagcaacatgaggacatggttgcttatgaaatgattgagcacctaaaagaactttatc

SEQ ID NO: 31409 - DNA, 298 bp, Gossypium hirsutum
  Clone ID: LIB3048-033-Q1-L1-C8
caggaaaccatggtttttcagccagcatgtcctgtattactattggttctctctttgatgatcattgtgctaagcataagctcaactgcaatattaccatctatgatcatttaataataaaatcttaactctcattcgataccatacttcctttttaacttattgttcatatcgtcattttcttttgcaagtatcttttacccaaatagtctacttttaacaattctagcttcatacgctactctttaataagttactttacaaatcttctattttacctaactgtctactattaaaa

SEQ ID NO: 31410 - DNA, 112 bp, Gossypium hirsutum
  Clone ID: LIB3048-033-Q1-L1-D11
cccaccttttaacctaccagacactatccacaactttaagtccattgtttccattataaaggggacatctcaactatgctaaaacattttaccctctttattgaatctcttt

SEQ ID NO: 31411 - DNA, 233 bp, Gossypium hirsutum
  Clone ID: LIB3048-033-Q1-L1-D3
caacattgtttttaccaatctccagcttccaaatataatgtgccgggcataaacatatcagttggccgtcccgaacaggcgactcaccccgatgctctcaaggcagcttttgcttaattcatctcaaccttgatcatcattttcgctggatcggtctcaggaatggctcttaacaagttgaccgacaactgagcaacaacccctgccggtctcgtagccgtcgctctagctca

SEQ ID NO: 31412 - DNA, 128 bp, Gossypium hirsutum
  Clone ID: LIB3048-033-Q1-L1-D4
cccaattgaatttcaacagttgaatatttcaagttgcaactgtttgagaaacttagtcgatgataattcttccttcaaaaaagtgattgtcttgagggtatgggtttgtgaagggattgagtgagttt

SEQ ID NO: 31413 - DNA, 231 bp, Gossypium hirsutum
  Clone ID: LIB3048-033-Q1-L1-F6
gtataattctttcactactgcattggccttcaccatggcagggcctccaccaccatttgcattgtgccctgtgtacaacatcccattagaaacaggaacctccaatgcattaaccattcattatacctaacacgagactttgtataacaatgattcttgacataatttcgaataatatccgtcactatatcaatctaagatgttaagcacttctatttctacactatatgc

SEQ ID NO: 31414 - DNA, 443 bp, Gossypium hirsutum
  Clone ID: LIB3048-033-Q1-L1-G3
ggtttcacatccacaacatatgacccatgtgtagacatctccctggacttggaaccaaaccaaggaggttctgggaagtcttcatctgcaaaatcccttaattctttcaatgttgaggcagactgcatgcgtccgaatcaaaactgtgggatatctaccttaaagggttgcttagaacgatttacgagagctgaaaagttggggtctgaccagaaacttttctgccaaaagtgtcaggtgaggcaagagtcccttaagcagatgtccataagaaagcttcccctggtttcatgctttcatgttaaaagatttgaacattcatcaatacgaaagatgtcaaggaaagttgacaggtatctgcagttcccattttcattggacatggctccttatctttcttcttccattttgaggagtcgatttggaaacaggatttttccttt

SEQ ID NO: 31415 - DNA, 417 bp, Gossypium hirsutum
  Clone ID: LIB3048-034-Q1-L1-A3
agaaatgtcatttggtggaagcagcatccaaggagcccgatctggggaacaaagaggaagaaaaagtgtttccagggaggaatacatggctttgaagagtttatattcagaacctctgttattatgataatgatgagatggagaacacagattcttctgcaagaggtagtgagaatattctggatagagttgatggtttggaatctattgaggagacagtcactagtttgagtcagccagtagaaaccaagtttaacgaactgagtaatctttccatgaataggtccaattctttacagactaatgaagattacagcaggcctctatgtgggggtgaagaactggctaaccttactgagccaagtcttgttggtaaaccacacaggttttgtgctgaagttagcgatggtataattg

SEQ ID NO: 31416 - DNA, 424 bp, Gossypium hirsutum
  Clone ID: LIB3048-034-Q1-L1-C2
cttagctaagcttatgttttaaagtgatttctaactcagtttgatctaattaaaaggtttttaatcttgatttaacaaatactttagtaatttgaaccaattgaatgttttcccttttaaaagatcacataagcttaatttttctggaaaaattagatctgtgtaattagataaaattgatggcttagatatgtaattatgtgatatttaggaggtatgaagttgaaatctaagcttagaaaagagatttgagtggttaaacatctatttcggtaaaactggctaagtttttagtatagaagttagtaggttgtgatctgtgattttggagggatttgaatgtgtttgatgttgtttataatgcatttgtattatgttttatgtgtatgtgaagtgtcaactcaattaggagccttcacaaaca

SEQ ID NO: 31417 - DNA, 371 bp, Gossypium hirsutum
  Clone ID: LIB3048-034-Q1-L1-D10
ctacaacgtggatattgtgtagaactggaacggaggtggttaatgacaagaaggttctgaagaaaactttgatggagaggaatggatatgagctcacagatcctggcacatgactgacaggtgaaaactgtcgaacaagtaggtgatgggaccatgaaccatactagggagctcctctaactagattgaacgcatgtgtgcaagacagatgattaacatcacattgaaagaatagctagatacgtgttgcatatgacaatggcaatgtagcactagcaactattgcaccagatgatgcatatgtgtcatctgagccaattcatgatgtgtctgagattccgcagaaccttactgtccactatgaacatgat

SEQ ID NO: 31418 - DNA, 419 bp, Gossypium hirsutum
  Clone ID: LIB3048-034-Q1-L1-D5
gaaaataccgttgaaagaacaacgaggcccacaggagaggttacacttaaaaagcttgcatgtcagagttgatggcgaagagggctctcgtgatgtttctttcttacaatcctttttatctcccatccagaaatgggctgataagcaactaggagactaccacttgatctttgctgagggatcaatggtaatggaggatatagtaacagttgcaatgattgttagaagacttcttttggaagaatctgatattcctgtgcaatcttccactgtctcagatagagatcagatagaattatatatatcttcttcagttaagaattcatttgctaggatattgcaagctgtagataaatcagacacaatgggcgaacatcctttggcattgcttgcaaaggaggtcaagaaacttctgaaaa

SEQ ID NO: 31419 - DNA, 397 bp, Gossypium hirsutum
  Clone ID: LIB3048-034-Q1-L1-D7
ataagaaattactattccatggcatatttgggtaaattgccaagtgttaccccaaagtattggcttgcattttcagcttctgcacctcctctcgggttaaacacttacttcatctcaagcggataacatatagccatagcagctccttcaaagaaccaagtagtgtacagttctaaagaaaagcacactgatgtaatctaagtagggccaggcgacctgaaacttgtgttctctgcatagcatcgaaaactcattggctacattaatagcagaactaatgtaaaagaaactgtaaggcaatcatatagcttttataccggagctactgacataaaacaggcactcggagcatacatctttcgaccatatggcacgaattcattgaaacttgatcacc

SEQ ID NO: 31420 - DNA, 393 bp, Gossypium hirsutum
  Clone ID: LIB3048-034-Q1-L1-E10
catagatgctggatttgagctaaagctatgcagatacatttctataatttcaaatttttaagtggggttcgggaaaaaaaataaaattaaattggttagcattttaaagggcattgggaatggtcatttatggttgcatgcctttatatgggccttggcggatctttcttctttatagaatattataaatctattaatatattgaatggtaggtttaatttatagatataggccgactcattatatagaatattagatatataaaaggtttttggatatacatagagcctttatcagttaatccttttcatatttattctatatatatctcatttttctcatttttttaaatggcgccagatgaaaaaaaaaccctcaaatataagtctatgc

SEQ ID NO: 31421 - DNA, 380 bp, Gossypium hirsutum
  unsure (1)..(380): unsure at all n locations
  Clone ID: LIB3048-034-Q1-L1-F2
caaccacaaagatcttaaaaattcacagacatggaggtagaaatagaagcttcagagatggaagtagaagaacaaccacctattcccagttcaaccaagaaatttggtctaaaggattacatacaaaccaattacggcgacgattatgttttccaaatcgtccccagggatgattggacttccatggcggtatctttatcgactaatgcagtgaaactttactcgccaatgacgggtcaatattttggagagtgcaagggacattcctcaactattaatcatatatctttctctggtggttccaatctgcatgttttgcactcttgttcctctgatggaactatcnaggcgtgngataccagaacttttcaacaggtatc

SEQ ID NO: 31422 - DNA, 197 bp, Gossypium hirsutum
  Clone ID: LIB3048-034-Q1-L1-F4
cacccattaacaaatttatatactactaaaacaaatgagaatttttcatattccacaattgatccagaataacaactccatatgaacactataacctaaatacccctcataggattcaccatccccacgaccaaaccctatattacatctcttctattctctataattattaccaataagattcttcaatcatctta

SEQ ID NO: 31423 - DNA, 271 bp, Gossypium hirsutum
  Clone ID: LIB3048-034-Q1-L1-H3
gaccagtgtatgatttcaactcatatagatgaccgtaggggtcggtatcaatcgcatatccgagtaacttagaattcatatatcattgtttcttatagtctacctgttctcttatactggcgacccatccagatcaactgtttaacctgcctacgctaccatgcttttgcaccagacctcctcggttacggcttaacagatacaccagactgagtcgtccattacacttgctgtcacatggtgtgagacctcatcacgcttctagacacaa

SEQ ID NO: 31424 - DNA, 183 bp, Gossypium hirsutum
  Clone ID: LIB3048-034-Q1-L1-H9
cttagctctgttattctcaaacaacgattctccggcaaagaaatgaaattgaaaaaattcctctcgctttcaattttttcaggggttttcgggatgggttttgtatattatatcacaggtttcattttaattgaagattgggttggtttgcagacctcagctgggtctttaaattccatgatc

SEQ ID NO: 31425 - DNA, 355 bp, Gossypium hirsutum
  Clone ID: LIB3048-035-Q1-L1-A5
ttcctttaaaagcttatactgcactctatagggaggcgtatcttccccgtctacataaatccccaaaaaaaatgtctctgttgtccgacgaatatcttcagcacattcctatcttactgaactccaccgttgctggaacgctaacgattatcatggctcctaactccataactggtatcagaatgcatgtggacaacattgattgcatcatagcgcttaagaacatcaacaacatggctcatgaaccgactgctcaggacttggtcaaaccaatgacgattgtggcgaacacgattcagaagcctatacctgctttgtaaacaaacaggcaggttgatatccttgacgaaaggta

SEQ ID NO: 31426 - DNA, 271 bp, Gossypium hirsutum
  Clone ID: LIB3048-035-Q1-L1-C12
acatttaatgacgtacacactaatgatactcatatctttatctaaaactaaaaacatcctaaaaaatcaaattctatacataagaaacttattcactatcttattgaccttcaaaattacttctcttaaaatcaaatgcattcttatcgaaacccatatagactccgaaaattaagactatctctatatcattttcttaaagcacacaagcttcttggacctcatcataaacataacctcaggaacgcattatctgatctttgttacaaat

SEQ ID NO: 31427 - DNA, 296 bp, Gossypium hirsutum
  Clone ID: LIB3048-035-Q1-L1-C4
gctacatacatagacttccatgccaatcacgctacgcattgctgtaagagaatgccatcaaacagattatatacctacattaaatggcgactgaccagttgcgactgatgtagtgacttaacttgaatgctgagcatagtgtgctgctatgctgatctgaggcctataacgtaggaagggctgcttaatacagacgtgtactaccgaactatgccattacgacgcacttcatcgtactcatctatatagactagtctcgcaacgtaatgatgtcacagcttgacgaacattcttat

SEQ ID NO: 31428 - DNA, 398 bp, Gossypium hirsutum
  Clone ID: LIB3048-035-Q1-L1-D1
gtggagagctgttgcgagagcttggcccctgttacgtagttttatgatgtggtccattggtgatggtatgactgttcgttgttgggaggatagttgggttcctaataaagaaccccttaaaaactttgttttggggtactgttcttttcatcctagaaccactttagtgagatggttttgcctaatgggaattggaatctagaccttttcagattgtggcttcctaaagatgtgatggagcgtatcattagcattcctcttcccatgattcaggctgggccggatagtctctcttgatcaagaacaacgtctagagttttttggtgaatagtgctttctatgctttgaaagaggaatcttggcatccgaaaaagttgaaatggagcaagatttggaaa

SEQ ID NO: 31429 - DNA, 144 bp, Gossypium hirsutum
  Clone ID: LIB3048-035-Q1-L1-D11
atcttactaacggtggcatcagcatgagatgcgtaattggaaatggactgcattgacatttggagaaaattcgcggataattggagttaaatcagatcattgcttaaccaataaggcgtaatcggctgaatcgattattaatca

SEQ ID NO: 31430 - DNA, 279 bp, Gossypium hirsutum
  Clone ID: LIB3048-035-Q1-L1-D4
gcgaatagctgtcgcacaagctgctcacctgttaagggaggttatgaagcaacgaagtgctgatcatcggaccgctaatacatgatatgagccgccagtcagaaagacaagcacgctatcatactgatgcatcgctaatactgtaatgatcaccctctagatcacatctatactgatagtcaaatctaatgactctacgattctagaccgactcaatgcattgcaaccgagctatcataggcaactattccttaccagatctatatgcatgaatacagc

SEQ ID NO: 31431 - DNA, 387 bp, Gossypium hirsutum
  Clone ID: LIB3048-035-Q1-L1-G3
gccatttttatcttaacctcacccactacacaacagtaagggatccaccaagaggtgaggtctataatccctactttcatcacagtttccctatctttacctacatcactcattcaaccctcctttctctcacccgctgctgctccttcacctgctacaccaagtcactgtcatgccaaatgcggctacacctattccacagctgccatcaatgattcatgcttgatatataatgacatatcccctcaagacttattccatctcacttcacgaacctatgggaacaagtcacaatgcccttgctctcgatacaattagaactcttaacaccactccaagtgcaactctaactttcctctattctacctagttcaaactctacatatg

SEQ ID NO: 31432 - DNA, 403 bp, Gossypium hirsutum
  Clone ID: LIB3048-035-Q1-L1-H11
gctaaacaaggaatcttagttatgcaaatatttagcgtataatgaatcgatgctctaatgggacgtactaggactttctttcttcctttttaatgagactggataaatagatgctccatttctttatcaaagttattttttttttctgtaggaataaagctacttacttacataccgctgtagcaatcatctttaaacatcaaaaaaaatatatatatgttggctgaatgggatagtgccaaggaatgtaggagtgtaggatcaatgatcatgtgctgtggatgatgtatgttatgatgggtatcgattcctttccttgttgaagcagttgatccaccaaactgacacaaaaagacaaacataaataggttgtttttcaagttacatttctgacaagacagac

SEQ ID NO: 31433 - DNA, 193 bp, Gossypium hirsutum
  Clone ID: LIB3048-035-Q1-L1-H5
tttgtttgtacgacataaacgcttctatagcggtcgttcaaatatgctggaggtctagttgaccatgcatgatatccactatatactgccgtctacctgatattgttgaaaacgtgcatgactgttacaaggcactgcaacgagctcattagcagctgtctcaaacacctgctatgcatttggactttctaac

SEQ ID NO: 31434 - DNA, 316 bp, Gossypium hirsutum
  Clone ID: LIB3048-035-Q1-L1-H8
cgaatccatactatcaacattaatgatactggaactgtgtgatgctcgactgctattgcaagggaaactgatctgcaaaatcagttcacccaccataagcaagaagcataacataccaaccacacacatctatacatgcaaagaaaattaagtgtagatgagactgggtctggtgtcagaattaggctcaatcaaacagaattggtagggcttatttacaccaaactgtgcagacctatgagctgactttttgctaaaggtctcactaatctacttcaatacatctacattacatctgacctgacaccctttgctc

SEQ ID NO: 31435 - DNA, 220 bp, Gossypium hirsutum
  Clone ID: LIB3048-036-Q1-L1-A10
ggaatacccggctggacccactcgtaccggggcttccttgattgtccaatctattttactaactcctgcagtccaaacactgggcgctttttaacataggggacagctcccaatcatatatttacatcatacatgcttactctactatatactccttactcacacaaactcatcaatgatactacattgatacttaaccctcgatcaactccctctcttc

SEQ ID NO: 31436 - DNA, 446 bp, Gossypium hirsutum
  Clone ID: LIB3048-036-Q1-L1-A11
taccggtttcggaattcccggcggcataagttgtggctacgaggacaagactgaatggggaactgagattgggtggatctatggttctgtgacggaagatattctcactgggttcaagatgcacgcacgaggctggcggtcgatctactgcatgcctaagcggccggccttcaagggatcggctcccatcaatctctcagaccgtctgaaccaggtgctccggtgggctctcggttcagtggaaatccttttcagccggcattgccccctatggtacggctacggaggacgcctgaagttcttggagagattcgcctacatcaacaccaccatctacccgctcacgtccctcccgctcctcatttactgtatcctgcctgccatctgcctgctcacggggaagttcatcatcccagagatcagcaacttcgctagtatctggttca

SEQ ID NO: 31437 - DNA, 450 bp, Gossypium hirsutum
  Clone ID: LIB3048-036-Q1-L1-A9
gctctaccggtcctgaattcccggcgaggagcttcagaaaatggtcgaagttgcttcttcattgaatagcactagctccgctggtccaaatctgggagccaatatgccagaaatgtctcctgatatgcttaagatggcatctgacatgattgctagtatgcctcctgatgacgtacagaaaatgatgagttttgcttctcagatgggtgggcctggtggtgcccccaggagttcagagaatattaactttggaccttcagtgagagctacaacgagtaattctgcccgtggatcatcatctcaacctgttttggagaaccctgatgaactatcagatgaccaaaggatgagccagtcatcctctagtcttccgccttctacagctgatatgcaagaaaccatgaggaattctatgaaagaccctgcaatgcggcagatgcttacatccat

SEQ ID NO: 31438 - DNA, 444 bp, Gossypium hirsutum
  Clone ID: LIB3048-036-Q1-L1-B11
gtaccggtccggaattcccggggggacaatgataactaccggaaactctataccaaatgtttattgtcaatgctggtccgggtttccggctactagggaacactgtgaagtcctttcttgatcccaaaactaccgccaagatacatgttcttgggaacaaataccaaagtaagctgcttgaaataattgacgccagtgaattgccggaattccttggtggcacttgtacctgtcctgaatacggaggctgccttaaggctgaaaagggaccatggaaggacccaaacatacttaagatagtccaaagtggtgaggttcattgtgctcgtcaaattgtaactatttccaatggtgaagaaaaatttattacttatgccaaaccgaagcaccattcaatgcgagggagtgacacatcaactgctgagtctggctcagaagctgacg

SEQ ID NO: 31439 - DNA, 280 bp, Gossypium hirsutum
  Clone ID: LIB3048-036-Q1-L1-B12
acccacacaatcccccgaactctatacaccaaattcttttttccctctatactctctctttcctcaggcaggccttttacaaagggggcgatctactccataactccctcgacttcattcatctacttaacatcctcatccatcataccatatttccaataactatccccttttactctcacacctctctctttcccacccctccctgacaataactcgtacacacccttacatctctctatctactacccactcaccatcacttccttactacactctc

SEQ ID NO: 31440 - DNA, 419 bp, Gossypium hirsutum
  Clone ID: LIB3048-036-Q1-L1-B6
gaaatccaaagatatagccaatgctttcgttaacggtgatgtcaccccaagtgactcactttcaatggccttcctttttcactattcaaagtccatcatttcattattcgaattccaaaaacgagtccagaccaagaatcaccaaaaacccaccccaattttcttgtttttcttccaaagattcatgttttctacccgaattcgatgatttaaccagtatttcaacttaccatgaagacccagatgctggttttagggatagaacgccaccgtcggttagtcgaaatgtcggttctgatgagctggcagctttgcttcaatcttgtagcaatggtagacaagttaggagagtccatgcggttgttttgaagcgtttagggaacccagtgacctatgttgagaataatttggtaagttcg

SEQ ID NO: 31441 - DNA, 367 bp, Gossypium hirsutum
  Clone ID: LIB3048-036-Q1-L1-B9
cggtttcggaattcccgggtcgacccactcgtccgtgcgcctgctgtcgcccttgtcaacgcccaacgccccgaaccctcaccttccggggtgcgaacccggttacggtgaagacgttctccgttgaccggatggcctcggtcgggggggacagcggcggtggcggcaagaccccgcctgtcgcggtcgccaccggcaacggccgttcgaacaagtccttatatcggttaacccgtgtgtcgccacaacagccttgggcaccccttgtgtctgatgtcccccaacactctggacacgcacgccattttggaaatgatactctcggaggccctgtatgccagaccgcgcacccaggagctctgcgatc

SEQ ID NO: 31442 - DNA, 374 bp, Gossypium hirsutum
  Clone ID: LIB3048-036-Q1-L1-C11
attcccactcgacccactcatcctcagccatacactacaactaacatacttttaacatactcaccatcaatttactttgagcaatttttctaataccgttcaccatacataacctacttcaccatcaatactctatattcctaacatctataaatactccatgcatccttaaacaatactcaatacaccctaaatcatttcactatctcatcactctcacaacactctttacactaactttcacaaccctacttatctctcttatatcctcccttaactacctacttcatttcatcacatatcatttcatcaattccatgacatatactgtctcttcctaattatctttaacaatctattcattctcaatatac

SEQ ID NO: 31443 - DNA, 441 bp, Gossypium hirsutum
  Clone ID: LIB3048-036-Q1-L1-C12
accggtctcggaattcccgggtggacccacgcgtccgtcgaactctacctgcctttctctcgtccctggcggcggcggcaggatggcggctgggggtgcgaggacggtgaaggatgtgaacccccacgagtttgtcaaggcctactccgcccatctcaaacgctccggcaagatggagcttcctgagtgggttgacattgtgaagactgcgaggttcaaggagctccctccttatgaccctgactggtactacatcagggctgcatctgtagcaaggaagatctacttgagacaaggcattggtgttggtggcttccagaagatttatggtggccgccagaggaatggctcacgcccacctcacttctgcaagagcagtggtgccatttcacgcaacatcctccagcagctgcaggagatgggcatcattgatgtcgatcc

SEQ ID NO: 31444 - DNA, 436 bp, Gossypium hirsutum
  Clone ID: LIB3048-036-Q1-L1-D10
ccggttcggaattcccgggtggacccacgcgtccggagccactggagcaagatctcccagggcgggctccagcgtatcgaggagaagtacagggggaagctctactcggagaggctgatgaccctcaccggcgtgtacgggttctggaagtacgtgtccaacctggagaggcgcgagacccggcggtacctggagatgctgtacgcgctcaagtaccgcaccatggcgagcaccgtgccgttggccgtggagggagagccctccagcaagtgatgcgcgacggcggccacagacctgatcgatcgatgagcgagagggagcactcggagtgtcgtgtcttttcccttgccatttctttctttttttcccttcccggaggcgaaaaaaagagtctgcttttgctaggcggcgggcgttcgttgctgctctttgcttc

SEQ ID NO: 31445 - DNA, 321 bp, Gossypium hirsutum
  Clone ID: LIB3048-036-Q1-L1-D12
tgaattcccggcgggacccactcatcctttgtctctccctccaaacccacctcgtctttctccaccatatccataccattggctggttttttaaaaactcggggactacctataatcaaacctcctcaactactctccactcataacatccttctcccttcatcttaccaatctacgatcccttgtctttaacataccctctcaactatatttccataccatactattatacatcatcatcacatatatcatctcctaactctactcttgactcctttttaacaatctcacacctatactactctatacttcatactctca

SEQ ID NO: 31446 - DNA, 273 bp, Gossypium hirsutum
  Clone ID: LIB3048-036-Q1-L1-D6
tccccaatctgcacgaattctacacgatatccatccattaaagctcacttcctatctagaagcctactagaaatacttggcaaccatgtaacataaatctcttaaccatgcactttcaatcatcaaaatccacaatacattatctacaaccttatatcacacatcacattatgcaccttaacaaaccaataatcctactacataacaatacaattgaagatctaataccatatcatattcaccgtaacctcacattaactactctacacacaa

SEQ ID NO: 31447 - DNA, 430 bp, Gossypium hirsutum
  Clone ID: LIB3048-036-Q1-L1-E10
gaattcccggggggacgcactcgtccgttctagatcgcgagctgccgcccttttttttttttttttgttttgttgtttttggtgcgagcataacaccgcgtggtggaactggaaacatccataatcacctttggtcccataaccacaacgtcaggcatcccgcagtctccacgacgatcgagtcgcagtcgtcgatctgtgctgctgcagcagcaagtccaacatctgctaccaacctgtacctgaaagagagccaggctctgggcggcacgagtggttcggactccgacagcgattcgctgctggacatcgagggtggcccgtgcgagcagagcacgaacccacaggacgtgaagaggatgcgacggatggtgtcgaaccgtgagtctgctcgacggtccaggaagaggaagcaagcccacctagctga

SEQ ID NO: 31448 - DNA, 448 bp, Gossypium hirsutum
  Clone ID: LIB3048-036-Q1-L1-E11
gctgtaccggtctcggaattcccggggggacccacgcgtccggtcaagttcaacggcgtgtaccacgagatctacatcaactcccaggcctccttcggggagctgaagaagatgctgtcggcgcggaccgggctgcaccccgaggaccagaagctggtgtacaaggacaaggagcgggactccaaggcgttcctggacatggccggcgtcaaggaccgctccaagatggtgctgctcgaggaccccgccgcgcaggccaagcgccttctcgagcagcgccgcaccgacaaggcggagcgcgccgccaagtccatctcccgcatcggcctcgacgtcgacaagctcgccaccaaggtgtcggcgctggaggccatcgtcagcaagggcggcaaggtggtggacgctgacgtggtcgccctcaccgaggcgctcatgaacgagctggtca

SEQ ID NO: 31449 - DNA, 441 bp, Gossypium hirsutum
  Clone ID: LIB3048-036-Q1-L1-E12
gctctaccggttcggaattcccgggtggacccactcgtccggagcaagaaggcagtggagaactcccccttccttgagaagctgaagaagaggggctgggaggttctgtacatgggtgatgccattgacgagtatgctgttggtcagctcaaggagtttgagggcaagaagcttgtctctgccaccaaggagggtctgaagcttgatgagactgaggacgagaagaagaggaaggaggagctgaaggagaagtttgaggggctgtgcaaggtcatcaaggaggttctgggtgacaaagttgagaaggtggtggtgtctgatcgcgttgtggactcaccgtgctgccttgtgactggcgagtatggctggaccgtcaacatggagaggatcatgaaggcacaggccctgagggactcgagcatggcgggctacatgtcgagc

SEQ ID NO: 31450 - DNA, 375 bp, Gossypium hirsutum
  Clone ID: LIB3048-036-Q1-L1-E5
ttctaggctctatgaaccctcgaaaagttcaagtaaaatctgagaaattcgaactgaagctattacgtgtagcagcaaggtgatggtcccattacaaccacctgcaactcatcaacatggtcaacatcactgtacaaataataatgaataaatgggtggtgatatttcaacaattgaagctcacaatggaattcaaatgctctagtcattgtacagtgattgcttctcaaatttgttgagcttccagatcaatgaactgtttaaatcacacgatggtggagaatttgagcagaatcctattcatcatcactttccgttgggtgaggcaatgcttaaggattggtctacatgtcattgtcttgattacaatttttc

SEQ ID NO: 31451 - DNA, 382 bp, Gossypium hirsutum
  Clone ID: LIB3048-036-Q1-L1-E9
cagaaggcgaagagggcaccgtcgtttccttgcaacgcggcgcgcacaataagaagctgttcaaccctatgctacataccaaggtgcataaactcagtctaaatatctccgaaactgatagcagataacgtctaactctcgccgtaaaagtactccaacagctcatcgagcactacccgcatcttctgcaaggcgatgtacacggtgccgactgtcatcatcccgcgtaacgagatgatcgactgctacgtcactgtcatggacgataaggccacgcttctgcttgagagccttctccaagtctaggatcacgagcttgtcatgaggaacttcgacgacaccggttgctctggttctcagtatacatgatcacatctacctt

SEQ ID NO: 31452 - DNA, 442 bp, Gossypium hirsutum
  Clone ID: LIB3048-036-Q1-L1-F10
gctctaccggtctcggaattcccgggtggacccactcgtccgttggcattccttgcgcttagttgtgttggatatgccattccttttataatgtgtgcggcaatatgctgctgctgtccatgcttgatttctgttttgcgtcttcaagaagatttgggtcaaaatagaggagctactcaagagctaatagatgcattgccaacctacaaattcaaaccaaaacgtgtcaaaaactgggggattgaccatgcttcaagctcagagcatcttgatgagggtggcattcttggcccaggaactaagaaggaaagagttgtttcagctgaagatgctgtgtgctgcatctgtcttacgaagtatggagatgatgatgagcttcgtgagcttccttgcacacacttctttcatgttcaatgtgtagataaatggcttaagataaatg

SEQ ID NO: 31453 - DNA, 345 bp, Gossypium hirsutum
  Clone ID: LIB3048-036-Q1-L1-F11
accggttcggaattcccggctggacccactcgtccgcagggactcgttcgcactgctcgatcatactctgctgacgacccctctgtcttggaggtgcttttccaaccgcgtcagccagtagatcttgtccatcctctactacaacttcctattcaacacgtcaccgctggaggacagctcgtgctccaagcgccgcgttcacatgctgtccatcgacgagggtgacaacggcggatccctcaccgtcgaagcactagtcctgctaaagcgcctgctgctcgagctctccgaactaagcgccacacacatctcggacttcatcaacctgactgccgaatccgtctc

SEQ ID NO: 31454 - DNA, 254 bp, Gossypium hirsutum
  Clone ID: LIB3048-036-Q1-L1-F6
ttaaatcatttgcgacttatgagaatcttgagggaagatggagaatgtgggaacgtgagttcatctgaacgtaccactgaatgataacttcaacatagctaactacacaaggatccctgccactgatcctaccatcaagtattggatttagaacggctctaatgtcacactatttattaatatctaacacaccacacaacagcactcccaagttcagtacgaaacctcttgttcctagactataacaactgctt

SEQ ID NO: 31455 - DNA, 325 bp, Gossypium hirsutum
  Clone ID: LIB3048-036-Q1-L1-F8
tcaaattctttgtgccctgtactgactaacgtgagagccgggcaatatctacgtcctgcatacatgcagaatgatcgcctgcaaactatacccgaccttcatgcatttcaggctaaagacaaatatcatctctataacctgttacaatatgcaccgtatactgagatggaatgcgacacacactgaatgacatcacttatacatactggagaacctatctcctattgttcttaacacgataccatcctctcctgtcatgatgctggcaccggaacgctctacatccaaatcacccattgtctaaccgccttatgtgtttaatgac

SEQ ID NO: 31456 - DNA, 443 bp, Gossypium hirsutum
  Clone ID: LIB3048-036-Q1-L1-F9
accggtctcggaattcccgggcagtgctcctgctagcgcggctccacttgttccacttgtagccacccgtcgctacgtgcgtggctgccgcggggcggctctagtcgccagtcccgaccacgctccaaaccctcgcctccgattcgcgtctgcggcagaggggatggctgcggaagcgagcacggcgggtgcggcgtcggcagccgaggcgaagcccttcgccgtcctcttcgtgtgcctcgggaatatttgccggagtcctgctgctgaagctgtgtttcggaccctcgtaagcaagcgtgggcttgactccaagtttctcatagactctgctggtaccatcgggtatcatgagggtaataaggcagactcaaggatgagagcagcttcaaagaagcgggggattgaggtcacatcaatatccaggcctatcaaaccctcag

SEQ ID NO: 31457 - DNA, 363 bp, Gossypium hirsutum
  Clone ID: LIB3048-036-Q1-L1-G1
acctctgcgctattactggtgatccaaagtatatcacagaagggatgaaggataaggcgcatttgaaaactcttcccaatacagatggactagttcctatctacatgaggtatttttagcctattcaatcattccatcactcataaattacggatactttaatcagctatatgctttgatatgtctgtctaaggctttctagcctgtcgatttacgtcaacgaagattgccgtacgcttgggtaaagtgacgtcaggcatcaaacagagtatataataatgtcataactaggtgagtcatctactatgattggagtgctatttcatgaagtacctttcttgggatggctaaagcatactggat

SEQ ID NO: 31458 - DNA, 445 bp, Gossypium hirsutum
  Clone ID: LIB3048-036-Q1-L1-G11
gctctaccggtccggaattcccggggtgagttcttccgtgatgcccaagagaaggtcctcccgtatgctgactacatcttcggcaacgaaactgaggcgaagatctttgccaaagtcagaggatgggagactgagaatattgaggagattgctttgaagatctctcaacttcctttggcttcaggcaagcaaaagaggattgctgtgattactcaaggtgctgatccagtggttgttgctgaggatgggaaggtgaaaacgttccctgtgatcctattgcccaaggagaagcttgttgacaccaacggctcatgtgatgctttcgttggaggcttcctctcacagttggttctaggcaagggcattgaagactgcgtgagggcaggttgctatgccgcaaacgttatcatccagcgcccgggctgtacttacccggagaagcctg

SEQ ID NO: 31459 - DNA, 353 bp, Gossypium hirsutum
  Clone ID: LIB3048-036-Q1-L1-G2
ggcacccgctttaattgagccgatcagtctgatcatccttatgtccaatgttgcctgtcaaatcttagcttgtattccttgccatcactgagactcttcttctggcatcagatctatcatatgacgactgctatgcaactagccaggatggttggaattagaaaggctcctattatacatcagctctcataatctatcacaggcgctacaacaattcgtcgctttggccaggaagacatgttcatggagaactacttgcgcttaatcgatgattaccctagagtagccttccataacttcagcacaatggactggttctgtgtacaaatcaaaaggcttttcaacttcgaaat

SEQ ID NO: 31460 - DNA, 239 bp, Gossypium hirsutum
  Clone ID: LIB3048-036-Q1-L1-G4
tccactttcacctcttcttcgaccacgtccaatgatgattcgtaccaaggaagcagtgggaagaagaagaaatggaaggagtttttcaagaggttgaccaaagaggtgattgagaaacaagaggagttgcagaacaagttcttgcaaaccatagagagatgcgaacaacaaaagttggctcgtgaagaagcttggaaggtgcaagaaatggcaaggattaacaaagaacatgagctttt

SEQ ID NO: 31461 - DNA, 440 bp, Gossypium hirsutum
  Clone ID: LIB3048-036-Q1-L1-H11
accggtctcggaattcccgggtggacccacgcgtccgcgtggactacgagaagatcgtgcgcgacacctgccgcgagatcgggttcacctgggaggacgtgggcctcgacgccgaccgctgcaaggtgctggtgaacatcgagcagcagtcccccgacatcgcgcagggcgtgcacgggcacttcacgaagcggcccgaggagatcggcgcgggcgaccagggccacatgttcgggtacgccaccgacgagacccccgagctgatgccgctcagccacgtgctggccaccaagctgggcgcgcgcctcaccgaggtgcgcaagaacggcacctgcgcctggctgaggcccgacggcaagacccaggtgacggtggagtacgtgaacgagggcggcgccatggtgcccgtccgcgtgcacaccgtgctcatctccacccag

SEQ ID NO: 31462 - DNA, 441 bp, Gossypium hirsutum
  Clone ID: LIB3048-036-Q1-L1-H9
accggtctcggaattcccgggtggacccacgcgtccgggagaaatcatcatcttcgacagatgctcaaactcgggctacattcagtttaatcatgggctaccttgctgatcattgcaacttgcccacgagggagctgctgtcacgaaggttttgccagaatattaagaagcataggcttaggcagcttatagatgatactattggttctgttcctgcagattcttctctgataaactctgtccttgaagtgtgctttggcccatccctccttccaaaaagcattagcgatgtgaagtacctggttgattttgttgaaacagtcatggaggctcttcctgcaaactatcgcctgggcttggctgttggtggattcgtagctaagcacttcacaggttatggcgcagcctccactgggaccaggttctgggcaagctctgttc

SEQ ID NO: 31463 - DNA, 363 bp, Gossypium hirsutum
  unsure (1)..(363): unsure at all n locations
  Clone ID: LIB3048-037-Q1-L1-A10
aaaaaaatcgtttaaccattctgattctttatcttatctactgtacaactccaaaggaaattttttaataagaacaattaattcattattgacaaccaacagaaacttcaaactancatccaatcttcttgcttagcattctaagcttgaaaacagtctcctcattcccttcaacaaaatcaatcttgaatccaccatacccaaatataatgccacattggcaacttttaatgactttacgattcaacattacaatcctacacttcctattaaaggagaaatcaaatatcaccctaaccttcacccttatcaaatcaattcattcacgcaactaattacatgcaagacagcatttccaaacat

SEQ ID NO: 31464 - DNA, 250 bp, Gossypium hirsutum
  unsure (1)..(250): unsure at all n locations
  Clone ID: LIB3048-037-Q1-L1-A2
aattctgcactatcctcatcgtgtattttgatggagccctgaatgtggatattgttgnatttcaaacgaacctgggcccatatcccattatccactttattctttcttcttattcccctgtcatttcatcttataagtcttaccatgatcaactatcatttttttacataaccaacattactatataacccttttcaatcatttccaaattttacccactacaccttaatttcatatctttcttccttat

SEQ ID NO: 31465 - DNA, 299 bp, Gossypium hirsutum
  unsure (1)..(299): unsure at all n locations
  Clone ID: LIB3048-037-Q1-L1-A6
attctacactactcaaacccgttatatcaactggctctcactccaaaaaatctcaaaatttaaacccgacaatcgccctacaaactnctatcatatacatttatatatacccacatcttacaaaacatcataaatttcccatcctttcatctcaaatactttttcttatttcactatcataacaatctaattctttaacttaacaatcatctcccaatctcataccattcactacacacccacaattattattcatttcctattaatcatatccaccatatccatatacaactctctta

SEQ ID NO: 31466 - DNA, 337 bp, Gossypium hirsutum
  unsure (1)..(337): unsure at all n locations
  Clone ID: LIB3048-037-Q1-L1-A8
attcttcactatcaaaactcgttcttcaccaaagtataatcacaaaaacttttataaatttataccggacaatctcccataaacaatctttcaccaaacattaactaaccttcttatcccaacatttcatctcatacatctccatccatccattttttcattctatcaantcaacaaaaaacctactttctataccttactctcatacatattcattacaacctcatctccaccaacatatctcccatcccattactttaaaatccaaacctacaattattacctaatataatataacctcattcatattcctttcactacaaataacccaacttta

SEQ ID NO: 31467 - DNA, 222 bp, Gossypium hirsutum
  Clone ID: LIB3048-037-Q1-L1-B12
ccccacacttcacgaattccgcacgaacactcacggttttctcacctgggtttatacaacaactactggtaacatcaataaggacccacgccttcaattccacttactcctactttaaatctcttcacacacatcctctattcatacctaaaaatttaacactcctttccaaccttcatctctatatacaatcaaaccatccctactctatcttataaccac

SEQ ID NO: 31468 - DNA, 388 bp, Gossypium hirsutum
  Clone ID: LIB3048-037-Q1-L1-C12
ggaaacgggattgtacgcttgagtaactcaaacattggtgggaatccaatgccccgaaaaccgtacggttcctccgcaaggttcgtacaccgacggtgattcaaggcctaagatcatacccaaatgcgtagtctatcgacaacaggtgaatattcctgtactacccctagttgataccgacggacggatgacgctttcttacactatagatggctatatgttcaatgactcacggtacttctgctttcacatggtaacaacgggtatagaaaataccctcagccaatgttctagtatcactcgctacatagcttaagtaacctatgctatactcccatgatatgttcgaactaccttcaacaatacgctacctgtactagaaaccgac

SEQ ID NO: 31469 - DNA, 408 bp, Gossypium hirsutum
  Clone ID: LIB3048-037-Q1-L1-D3
actctacaaattttccactaaccaactaggtttttacatcttgttctcaaaacataaaaaatgttatattttcaaagggtacattgcctcacaactaccataactctctttaaatccttatccaaatccattaccctttcattctcattcttactcggtttattcacaattattacacatttaaatttccatattattttccatcataaaattttcctacacaattttacaatatctttatttatactaatattatacattaaacataaacctcattatttatactcaacttttaaataaattctaaggactcagatgacccaccactatcagtttttcacattcaatatcctgagttacctgaccatgtaattcccactgacactctttctgtccgtcaaatcttta

SEQ ID NO: 31470 - DNA, 134 bp, Gossypium hirsutum
  Clone ID: LIB3048-037-Q1-L1-E2
gtttggtatatgcattaagtaccaaattcactcaatttgtagggcccttatttcagaggtgcataaatatcatccaaaactaacaattggctaaaaaacaatcgacatttaaaatcaattggcctaccttaact

SEQ ID NO: 31471 - DNA, 267 bp, Gossypium hirsutum
  Clone ID: LIB3048-037-Q1-L1-E6
cccaaactctacaaaaattccacactaattacatttcatacattctaagacaaactctactaaaaactttaaatttttaaacggaatactccacaacatatctcttctctatataaactccatatattctatataactcaaaatcctactcttattacaaacatcaccactatacatattatacctctctatattaactctccttaattctttatctactttttaccccaccttttaaacatttctctctctcaaacacctcttttc

SEQ ID NO: 31472 - DNA, 279 bp, Gossypium hirsutum
  Clone ID: LIB3048-037-Q1-L1-F12
tctttctctcacaattgatacatacacatcttattaaatttatcagatattgcttccaacaacaacatttactgcttcactattaatatattccaacatgcagactataaaaccagctatttcaaaagtactctgattatcttccattatcgactaagattaaaattgctcttatagcttacaaagctcttacctatatacatgaatcataaaaatcaataatttacccacatttcaaaacctcaaatatcttcttatattcttattacacatccaaac

SEQ ID NO: 31473 - DNA, 287 bp, Gossypium hirsutum
  unsure (1)..(287): unsure at all n locations
  Clone ID: LIB3048-037-Q1-L1-G4
caggctccaagggatcttcaaaagggtaaccttaaatactcaagtgtccttttttacggagaaaaggccttcacaattttccacatccaaaacccttcccaaatcccatttacttaatcttnaccttaatattttggttaatctacttctttttttacttaccaanacaaagaaactcctcactttaactctttccctaataaacttatcatttctgctcccaataatgatcctcccatctttaatgtctatttcaatgacaatcaatataacccttaccttaacat

SEQ ID NO: 31474 - DNA, 194 bp, Gossypium hirsutum
  Clone ID: LIB3048-037-Q1-L1-H3
cctctatctaacacatctaaacatcccttaacatttatcgaacctattttctttgatgtttgccatttaattaatatacccatccttaaaacacccttcataatattaactccaaattgaccaataaatctctatatccctatctagtccctaaatcatatattacctatataaccatacaacatccttatcaa

SEQ ID NO: 31475 - DNA, 431 bp, Gossypium hirsutum
  unsure (1)..(431): unsure at all n locations
  Clone ID: LIB3048-037-Q1-L1-H5
caccaatggtttaaaggatacgcagatggtcgttttgataggaaatcatggcctgggatactgaagctgaaagattggcctccatctaacgaatttaagaatctccttccacgtcatcatgccgagtttctttgttgtttgccatttaaagaatatacccatcctcaaagtgggcttcttaatattgctaccaaattgccaaagaaatctctaaagccagatatggggcctaagtcatatattgcatatggagttgcacaagagcttgggcgaggagactcagtaaccaggcttcattgtgatatgtcagatgcggtgaatgttttaacacacattgctgaggtgaatcttactcgtaaacagcttgatgcaatcagcaagttaaaacgaaagcacaatctgcaagaccagcangaactttttggaagaat

SEQ ID NO: 31476 - DNA, 323 bp, Gossypium hirsutum
  Clone ID: LIB3048-038-Q1-L1-B1
aggcagccaatgacactgctgcatagtatgtacatttggtgagccaatcattggccgtgaggactcaactcgcttcaattgcatcatgttggctagttgctgcaacatcctacgatgttgcgtgtcgagtgcatctacgcgacttgagagcagttgctcgcaatggaattgatgacgatcagaaacacaatgctgtggcgcatacgctatcaaccgatcacactgcttgcgccgaggcattcaggaacgaggaccaggctatacacactgatgactctgaatgcccgcgcacgtacacactcattttgcaatggtcgattaac

SEQ ID NO: 31477 - DNA, 220 bp, Gossypium hirsutum
  Clone ID: LIB3048-038-Q1-L1-B11
gttcattgttagataatcacacggaatatcacggaatccgatggcataatctatacgaagggaggaacatcccaatacatataaaattgacctacgcaaatcaatggacttgcctgctgatgacctattcaatatcattaaatctggtctctaagaaatacacatttacagaccaccaaagcgtacacgcagaattgatgcaaaagcaaaatcaaaatgc

SEQ ID NO: 31478 - DNA, 411 bp, Gossypium hirsutum
  Clone ID: LIB3048-038-Q1-L1-B2
actcaattagtgtctgagatgggaatccatgccttcagtgagccaataagggatctaaaaactcaccagccacttaccggaaatgaaataaatgattgtgggcacaaaattggcctgaatggggtggataatggctcactgacattccagtcagttttaattccccaagataatattcttaatcgatttggggatgtcacccgagattgtaaatacacaagtaggctgcctacaatgaataaacgtactgatgctactcttggcgaacttgtaagttggaagggttggcctatttgcattcttcacttggtatactaacgattgctgccactattgcaatacgatactccttactacgtcagcagtttagtcctacaaaacagactgaagtcagcattcttgattatcaat

SEQ ID NO: 31479 - DNA, 362 bp, Gossypium hirsutum
  Clone ID: LIB3048-038-Q1-L1-B4
aacaggttccagataaccctgctgatgaatgttgtctcatggacttggatcaggagaggacgtcctgagaatcaccttcatgcccagatcggtagcctagtatcctcatgctgaaccgctagtgctgcttccaaaacgtatgttggctacaaggaaaacggagttccatacatggtatggctaggatatttaactactagattaccatactgagaaagctgacaatagatctaaccagctggacctgcagaagcagcgggttcagagatagaaggctcctctttgtgggccagaacgctatcttcttccataatttgggacagtggaaacggctagactcacattacttgtcacgagatact

SEQ ID NO: 31480 - DNA, 290 bp, Gossypium hirsutum
  Clone ID: LIB3048-038-Q1-L1-B5
atctacttgaaccacatcatttttatccctgtttgcggggccaaacactctacatggtaccgtcactcagcctcatattctatgaccatatgacttcttctatgaatctgtctcgattactctggctatgtatcatcttaatgccatcgagcatttatagattatggccaattaccacactatgtgaccctattaataggccaaccctttccatcaactgccgagcatggatcctgcatcaatgtacgcggtggcacacgcataatcatctgctacttatccttcaccac

SEQ ID NO: 31481 - DNA, 260 bp, Gossypium hirsutum
  Clone ID: LIB3048-038-Q1-L1-B9
gtcaaccgagtagactcttgtgaaacccgcaaattacttgtcctggataagcagacataatatatatgcgttcaagccctgtcccttgtagctcggtgactatgatcgggagataaaggcttgtaagacttttacactgggatacaatggaatacttctgtggatgtgggaacgtcataaacttctattttacgcattcgtcacatctctgtcgtacttatgaaatgccttacgcttttcctatcaattcaccaaatagg

SEQ ID NO: 31482 - DNA, 321 bp, Gossypium hirsutum
  Clone ID: LIB3048-038-Q1-L1-C4
cgacgtaagtaacaactccagccacaggaaaaaaataacgagcgtctccaacgattctgaggcaaacagaggacaagcttcatttcactatctcaatgcacgcctcaaacaggccatacctgataccaatgaagcgctacaactcgaaccactacatactcacacatatcatacgctaccgctttcatacaaaacccttgacgataataaaacagcttttcacttctacatcatagctggacttattaagccaaaagatcctgatctgaggcaactgtcacatgacctcgggaaaaaaaaaatgacaatgctattctgacc

SEQ ID NO: 31483 - DNA, 392 bp, Gossypium hirsutum
  Clone ID: LIB3048-038-Q1-L1-C7
cctctcttatcttccgttgtttatacgtttggttgtgggtgaagaagtgctactaccatggctacaaagaagagcgttggggacttgaaggaagctgatttgaagggaaagaaagtgtttggtagagacgatctgaactttacattggatgattacttcatcatatctgatgacacaaggatccgtgccgctgttaccaccatcaagaatttgatgggtcatggctataaagtcattctatctagtcatttaggacgcccaaagggtgacagctaccaagtctcagttctgtaagtagcaagagaaccaggttatctgaactccttggagtctagggtaaaatgtgtaatgactgtattggttaataagatgagaatatgagggttgcttta

SEQ ID NO: 31484 - DNA, 386 bp, Gossypium hirsutum
  Clone ID: LIB3048-038-Q1-L1-D11
ctacagttcagtgctgatcacgatgatacaatgaccgctgaagccattgttttgcttgatgaccttcatcaaaaggtgaacacatatgcaatgatggttcgcgaatggtatcgtaggatttatcatacgttactaagatcatacgggacaatgtcatgtatcccaaggtctctaaactaaatggtgaccgtactaatgctcataaattcgagttctgacaagttttaccattatagcttgccccttcgatacttgagggccacagtaataatcatcaggactgaaactagtgaccttgagtctgactcctattagaaattgatgagatcatgatctcaatctttgtgaacactaagttcaactatatgaatattccatgcgcttga

SEQ ID NO: 31485 - DNA, 295 bp, Gossypium hirsutum
  Clone ID: LIB3048-038-Q1-L1-D7
gaaatttttaatgatgaaccactttttaacccttaggggcctctcaacactagacagatgttctctcttcgactatttacaattacgctgatgatcttacacagaatttatagttagtcttatataactatttccccgaacccgacaatacctaacgtcttcacactacaatgataaatcattcgaactccgactgtactctcacaataatatctaaaaatgagctcataacattacaaatccttcgtaaacttgctccaaactaaatgatacttagatacacagatatattata

SEQ ID NO: 31486 - DNA, 263 bp, Gossypium hirsutum
  Clone ID: LIB3048-038-Q1-L1-E7
gaaatattcaatcccatagtacaacatatcatagggaggtatccattaatgaatgagtggcttatctctattaccagctaggcaactcaaccaactgatactggtctcacaaattccctcctcatcatcaaaccctatcctatatgtggaagccgcacttaatggcttcacataagctcctctgttcactcctacgatcagcttatggcccacctgtgtctacaccttcaaaccctaaccatagtatatgatctcctatcact

SEQ ID NO: 31487 - DNA, 395 bp, Gossypium hirsutum
  unsure (1)..(395): unsure at all n locations
  Clone ID: LIB3048-038-Q1-L1-F1
taccagaaatcaattacccgggaattgtcacgggctaaccagtggcaggatggaaaggtaagaatttacgttgcttaaaacagaatgccaaaagagcgctgggagatcggttcaccacattctcggatttagggctctttgacggacacaatggatctgcagctgatatttacacgaacgagaatgttcttaacaatgctctaagtgccacttccgcagatcttgatagagatgaatgggttgctgaccttacgagagctttggatgcaggtttcgttaaaacgagataatcgattcttcannnatagagcataaacgtcaggaactactgtaacctatgtgatattagaatgatcggttgtaacagtggcatctgttgcagattcctgctggat

SEQ ID NO: 31488 - DNA, 129 bp, Gossypium hirsutum
  Clone ID: LIB3048-038-Q1-L1-F2
ttattttttccgatgcttcaaaattgtttaacaagtgggggcaaaaactctaattggtcggcaaccattcaatcttcactttactcaacgctactacatgtatatatcacattgctaactttcttacca

SEQ ID NO: 31489 - DNA, 281 bp, Gossypium hirsutum
  Clone ID: LIB3048-038-Q1-L1-F6
aaacattttatcaacaacacctatcatcataaacggtgtgcctataacaaatcttggagcacaaccattgaaagttacaaagcacatatttacatatataattactacacttcaccagcattcaatcccatatgaaaatactctcaccttctttaagcatccagactatatagcatatactctaatcctttcaactcaattatatgctctcagatctcactactttattactgcataaccattcatgcttctcccacaatcatattcaacaagtacaacta

SEQ ID NO: 31490 - DNA, 253 bp, Gossypium hirsutum
  Clone ID: LIB3048-038-Q1-L1-G1
gagaagctatttgaatcttgaacaagatccggacaggggggaggtgaagacatcgcgccgaaaactttccatgtgagtgaccatcgacattcgcaaccgattacctgcttagacagacacttaatctaccatacgagatcaaagctggacttgactgtgatggagcactactaacgtcacgtgcctactactgaaaggacatacaacagcttgactccttctcctccatgataccaggtaccaactaagtggc

SEQ ID NO: 31491 - DNA, 339 bp, Gossypium hirsutum
  Clone ID: LIB3048-038-Q1-L1-G10
tggactaattgaattcgaggcgagcttttagtgcttgtcaacattcttcgaaattggggagggataggcaaacatgagggaagaccctctctggcacaaccattgctctcgattcttgaaatcctgataccatcgactatgtaaagaccaagatccaagactaggaatggatcccaccagaccagcataggcttatctttgctaataaacagctggagaatagccatacccttgctgactacatcatccagaaggaatccacactccatttggtcctgcgattgacaggtggcatgcaaattaatgtcaagaccatcacctgaaagaccatcacattgt

SEQ ID NO: 31492 - DNA, 209 bp, Gossypium hirsutum
  Clone ID: LIB3048-038-Q1-L1-G4
aaaagatttgttaaaagaacttcaatagtttgagtttagggggtttagatcgaacattatggggcgttttggctcttcttcctttaactaacttccccttaatttcaagccctttgcttggcccctgataatgatacggtcttttatgactcattcgatgagccttttgacggaccatggatcgtgtccgataaagatgattccaaagg

SEQ ID NO: 31493 - DNA, 213 bp, Gossypium hirsutum
  Clone ID: LIB3048-038-Q1-L1-G5
tgaagaatttcggaccaggacctttttttaataattccttattctaatagctcttggttgggcttaaaacaaaactactggttaaaattactggttgttgtccagaaaattttgaaacatggtagacccggaaactgatccattggctcaattgagctctaccaccgggggttttcggttttattcgaccgatgaagagcttttagtacaata

SEQ ID NO: 31494 - DNA, 324 bp, Gossypium hirsutum
  Clone ID: LIB3048-038-Q1-L1-H11
ggaacatttttaactggagctaacagggtgatcatctgggaccctgaatggaacccgtaacatacatgcaagcaagtgagcgtgcttggcgtattggtcagaataaaatgtaagctgatattgatagattactcgtggaacaatccaatagaatgtgtaccatccgcagatttactaacatttttttaccaatgagatactgaagaacccttaatagagaaagttctttaaagctcgagacatgaaagatctttttggtctgaatgatgaacgacagaatgggtcgaccggaacatctaatattttcagtcagttggcaaaaga

SEQ ID NO: 31495 - DNA, 310 bp, Gossypium hirsutum
  unsure (1)..(310): unsure at all n locations
  Clone ID: LIB3048-038-Q1-L1-H4
ctaaagttgctgagatggtgactcaaacctttggagacatgctgttttcacctggctcggaatgcctgaaggaattcccgtctccagaatcattgaaaggacgcataatcatatctactaaacctccaaaggaataccttgaggccaaagaagttaaggaaaatgagaacgatccagagagggttaaggctagtgatgaagaagcttggggaaaagaagttccggaccttctcanagacgattacaagaatgacttgggtgaagaagatgaggaagatcttcgatttncatggagattagtcacaacatg

SEQ ID NO: 31496 - DNA, 173 bp, Gossypium hirsutum
  Clone ID: LIB3048-038-Q1-L1-H5
ctgttttttagccctcaggcataaccaccaatgggtgtcctactcatgctcagggcatggcatgctgactggcctatctccatgatgttgtgcctacggatgtcaatgctgttgcagctactattccttcctatgatcctatgctctgtagctgactgttgccaatactgcta

SEQ ID NO: 31497 - DNA, 184 bp, Gossypium hirsutum
  Clone ID: LIB3048-038-Q1-L1-H6
ccatttttaacccctcagacgtggcgcttaaaagggagcctacatactcctagctcgaaggtatcttgtcttgcccatagagacaatactgttcctaacaatgccgctaccgtttgcgctactattgcgaatcagccgaacatttcgctccataacctgaacaaagctgcaacgcgctgcctga

SEQ ID NO: 31498 - DNA, 138 bp, Gossypium hirsutum
  Clone ID: LIB3048-039-Q1-L1-A1
cattacccaatatccttccattaccatgaccagatttatctcgagttcattttgcaacggaattcctacatgcaaattctaaaaactctcttgatagtgatcaccaatatggtaactacatatcagctaatgtcaata

SEQ ID NO: 31499 - DNA, 288 bp, Gossypium hirsutum
  Clone ID: LIB3048-039-Q1-L1-B11
tccgccttctgcataattcttcactaccctttatgttttattaaacttttcttatttcaaggttactgtttaacttaaatgggtcatgaaaaaaattacctatctcaaatcactacattaaaacttaaaaaattctttccacccttttatacatcattcttaatccctaaatcctatcttaatattaaactttcaatttttaatctaaacccaataaacaattcctaccctaaatttaataaataatttaacacttaaaaccaattcccataatctaccttttataac

SEQ ID NO: 31500 - DNA, 338 bp, Gossypium hirsutum
  Clone ID: LIB3048-039-Q1-L1-B3
cctttatccttactactcatcgaacccataatgaggacgggtccaattatccaactgacatccatgcctatcttcaataccacctgaatctgtactgtcatgtcccttcattgttacttctgatatcttacataaactctaattaatttgcgaatattacattcacttcattttactccccttcaaagttcgacaattatccccacctatatgtgctgagaccaataaaatatcttattatccaagtctagcatgtacccgctgattcaattcttgacaacatcctaatttgtcatgacccacaatatgcattagaagttgttcaccatatatgaacc

SEQ ID NO: 31501 - DNA, 191 bp, Gossypium hirsutum
  Clone ID: LIB3048-039-Q1-L1-C11
aaatgtttgactctctgaattagacattttcactcggattcggtcaaacttttaagtgaacacagattcccatttcttcccgctgaataaattatgagtgatcacccacttctgtgtgacgaccttctgatgaatcctgatgagtctgatgctgatccctcaacttatgattctagatcatcactcttgtt

SEQ ID NO: 31502 - DNA, 381 bp, Gossypium hirsutum
  Clone ID: LIB3048-039-Q1-L1-D10
ctccaaggcaaccgtggcatgatttacacagcaaagtggaagggcctgctgcatatgatgttcttatcaactttgagcagcggtggaggaaatcaaccaagtggaaagagttcagtctactttttaaaggaaaatctcactggagtgatgatgctatgattaggatagaacgaatctcatggatacaaagtcctcccttagctgtgacagatgatggtactacaatagttccagatgatgatcccaaagtacatgttcttagtaaagataatcgtgaaaactggaatgtccagattttccgctccattgactctggatcactgaaaggatttccaaaatacatcaaaaaagctgaaaatcagaatcttttctgtgcaaaaa

SEQ ID NO: 31503 - DNA, 430 bp, Gossypium hirsutum
  unsure (1)..(430): unsure at all n locations
  Clone ID: LIB3048-039-Q1-L1-D5
catgtcttaaattccgattataaatttcagacagaaattatagagttaattgaagttggtttctgaatggatgaatcatcgtcatcttcatcttcgtcttcggacaagacggccaatctggattctgcgctccatttattgggatttcaattacaagatttgtcccctaccaaagttaacggacacctacacgttacccacaagtgctgccagccgttcaaggtgttgcacggtggagtatcggctctgatagcggaggcgctggctagcatcggggctcacatggccagcggtttccaaagagtggctgggatccaccttagcatcaatcacttaaagcgcgctgaacttggtgactntatcttcgctgaagctacgcccgtcagtcctggcaagaccattcaggtatgggaggttcgactgtggaaaa

SEQ ID NO: 31504 - DNA, 268 bp, Gossypium hirsutum
  Clone ID: LIB3048-039-Q1-L1-D9
atccggcggctgcagaattcgcacgagatttgttttctggttttcccccgtttttgtatggcatgctttggttctgtattttgcctgtgaaagctcaagttcaagaaatggtgacgtgctctactccgtcacagctcgggcgtttggattcaacttaccgccacagacagattttggcttgtctaagatgaagtaagaaaggaatcttttaccatcaaatcattctgagttgaactatcctgagagaaccaagaaatactgatgggca

SEQ ID NO: 31505 - DNA, 413 bp, Gossypium hirsutum
  Clone ID: LIB3048-039-Q1-L1-E12
aagaaatgaaaaagagaaagaaagaaaaaggaaagttcttttcccacctgtggatttctgagtaaggttgggatcttggatttgcctctttactaaattccaattcaggtagactttttcagacagtaaataccagcaggtgcagaagatgggtattcatcattgatgatgagctgtttattttcaagttatgacacatactattgacttgcgtgagatgccataattaactgttttagagatggactagctatgtcaatatatattcattctccttggaagacttgtatgtgcccatcaaatgattaggaaaatgggaaaattagtccttatacgttagataaaagagcaaaatggtcccaaggttaaaatttccaaccatttctactggtaaaaactaatatttatatggt

SEQ ID NO: 31506 - DNA, 279 bp, Gossypium hirsutum
  Clone ID: LIB3048-039-Q1-L1-F4
gaactagaactagcggatccctccagctgtatcaatccagcgcgatgattttgcttctcgaattcactgtgtcaccatttgcgagggaatattgcaaagatatgaaactggccgatcagattacccacgaacagatctctgagtccaatgaggcctttcaccttttcgacaaggatgccaatactcgcattactaccatggagctgggaactcatatgcgatcacttggacaggatccaactgatgcataacttcgagatgtgatacacaaatttgact

SEQ ID NO: 31507 - DNA, 418 bp, Gossypium hirsutum
  unsure (1)..(418): unsure at all n locations
  Clone ID: LIB3048-039-Q1-L1-F8
aaaggttagtgaaaagccaagttcttcaggtaaactctcggaaggtccagcttctagcaaagcaactgatgagatgcattctgcaagttcccatggaccacctgatagttctacatcatcaaattcagattgtgttggtactgtctcagcatctggtggctttggcttatcaccgagttcatcgatgggttcattgtcctctgagaagtcaacactgaatccccacgcaaaggaattcaaactcaaccctaatgcaaagaggttcacaccatctcagacacctgtcaggcctctaatcccaatgtctgatggttctntctactatcagacacagatgtctnctttaccacatatgcacatgccttgtaagttttgggtaaagttgcttaaaagtaaataccatttttatgaacactac

SEQ ID NO: 31508 - DNA, 274 bp, Gossypium hirsutum
  Clone ID: LIB3048-039-Q1-L1-G10
attcttttttctcttacatgagtacaaccatggcgggtcacagaccgttccctaaggtcttagctcttattctgctctctctcgtcgccatcgtctctgctgaagttttcttcgagaacgcttctaagatggatggggaaagccgctggtaaaaatctggctgggaaaaaggatgaaaacatggctggggattggaatccacttctggaaaatggaatggagatcctaatgccaaaggttttcaacctagtgaagactacaggtttaatgctat

SEQ ID NO: 31509 - DNA, 441 bp, Gossypium hirsutum
  Clone ID: LIB3048-039-Q1-L1-G5
ctcaagcggttgttatgcagggctatggaatgactgaaacctgtgcgattatctcgatggagaatctcgcatttggtgtccgacatactggctcagctggactgcttgcttcatgtattgaagctcagatagtcagtacagagaatccagagcctcttcctccaaaacaattaggggaaatatgggttcgagggcataatatgatgcaaggatacttcaacaatcctgaggcaactaaacagacaatagatgaaaagggttgggtacataccggagatcttggatacttcgatgagaacggttatctctatgttgttgacagaattaaggagttgatcaagtacaaaggtttccagattgcaccagcagagcttgaaggtctacttgtatctcaccctgaaatactggatgctgtcactatcccatatcctgatgatgaaa

SEQ ID NO: 31510 - DNA, 304 bp, Gossypium hirsutum
  Clone ID: LIB3048-039-Q1-L1-G7
acctttactttttaaaaagaagatcacgcaaccggggcatgtctatctatagatggctgtgacaccataccctttccataaaataaagccgttataagacaacctagtctttctttagcaagtcctgatataatgactagtaaaatctcagctctaattttcttacactatcaacccaccattctcctcatcagactgcctcgctatcaaattaatctgtcaactttccactcacaatctcacgattctatgacagttattattattgaacatctcaaccttgataactctacgatatctttat

SEQ ID NO: 31511 - DNA, 191 bp, Gossypium hirsutum
  Clone ID: LIB3048-039-Q1-L1-H12
gctacctctaacctttcgacggatgcctatgaaaacgttgatgatgtcaaaaccgggtgggagaacgctagacctactatccactcatgtgccgatgtcatggcacttgctgctcacatatctgcatcttgtggtggcagtcctacatgtcaaactccgttatggagaatggatattttcactgcgcaccg

SEQ ID NO: 31512 - DNA, 250 bp, Gossypium hirsutum
  Clone ID: LIB3048-039-Q1-L1-H5
ggtcattagatttgctattcccaatattttaatggaaattggttttgaaacgataactggaaggccccaaaggttgaattggaaaaggtccttaataggtagcctaaatgcttttaaatatcaatgtttcaagacccccctcaagggttaaaacttccggaacttaagggaatgattaacacaccccaatgaaagctaaacttgaacattttccaaaggagcaaatccaaagcctacctgaaaatgagtc

SEQ ID NO: 31513 - DNA, 330 bp, Gossypium hirsutum
  Clone ID: LIB3048-039-Q1-L1-H7
cactacatcaatacgacacaagaaatttactttcacatcataaaattataccctaaagaacgggcacattcaaacagagacttaggacaaccattcacaaatacacacattttagttaccacatactatgtatcatttacactaataaccaataccgatcaaaagaatactaaacccacaacataaactacgatgtcccaaaccatgactaccactaatgacacaatccctgacaaagtacacaatgatgaactacaattactttaatcccaaacttcactacattatcaagacaacaactcacctcacaaattctaaactctatatgcc

SEQ ID NO: 31514 - DNA, 366 bp, Gossypium hirsutum
  Clone ID: LIB3048-040-Q1-L1-A11
tgtctcgagtttttttttcttttattttctctgttttgttttttttttatggtgttcattttaaaaaaaaatccgccatttcaactcacttccttatctcctgataaaattcccccaaactcaaatatatcattatgaaccccttacggcctacctaataatcaccctcaccatgtctaaactaaaccccttaaacaactcttccccataatatcataaactacatgaccgggctaatccatttcccaaaacttgcttttttaagctctaaaacgtatacttgcacatcccaccaaacttgttacctggatttaacactactatgaaaaacaactctttacactacaccaatttccccatttttct

SEQ ID NO: 31515 - DNA, 160 bp, Gossypium hirsutum
  Clone ID: LIB3048-040-Q1-L1-B11
ctcgaacaataatactatccacagttcaaagttatcgtttgacttaagtgggaaagatgaggctggtatgatcggctttgaccaaccataaacaccaaaccagttaaacttatatggtggcttctatcatttttatttttttattactctacttccaata

SEQ ID NO: 31516 - DNA, 319 bp, Gossypium hirsutum
  Clone ID: LIB3048-040-Q1-L1-C10
tattatacctattattgtgtcgtgaaatattaaggcaaatgtcctatttttgggggcttgggacttttatattctttagcatctactgaatctactaattgcatctatactaatctatgtcatacttttatcaagctattcaatattgttataattctaattgctcttattttacatactttatgataatctatcacatacactgcaactattccttactttggtcctcaatacctgttcatggaaaaatacttgaacttaatctattattactctccagtaccttccataacttacctacaattttaattgttatgtt

SEQ ID NO: 31517 - DNA, 281 bp, Gossypium hirsutum
  Clone ID: LIB3048-040-Q1-L1-D10
cagggaagccagaatgtcagcttgagtaacgcagacattggtcagaatccaatgccccgaaaacccaagggttactacccaaggttcgaccaccgaaggtgagtcaaggcctaagatcaagccaaaaggcctaatccatggaccacaggtgaatattcctggactaacccttggtggtcccgacggaccgaagaagctaggttaacccaaagatgggtatcggttcaaggaccccaggtgccccttcttttttaaggttagaaagggtaaaggaaatgccc

SEQ ID NO: 31518 - DNA, 372 bp, Gossypium hirsutum
  Clone ID: LIB3048-040-Q1-L1-F10
gaaaaaccctaattttccctctcactcatactcacaggaaaagcaaaaaagaaaacataattgaaaagaagaaagatttgtgatcaagatattcagccatggatgaagagtacgatgtgatagtcctagggacaggccttaaggaatgcattctcagtggtcttctctccgttgatggactcaaagttttgcacatggataggaatgactattatggtggagaatcgacttctcttaatcttgtgcaggtcattgttcttcgattagtggaaccttttttttttttcatttattccttggctattttctgaatattgtctttctttttctgctattgcatagctttggaaacatttcaagggagatgaaaag

SEQ ID NO: 31519 - DNA, 268 bp, Gossypium hirsutum
  Clone ID: LIB3048-040-Q1-L1-G10
ccgaagcctaaactgtgatatctacaacactaacttatacatcatatccttcgctattgaagaaaaaaattaatacctattctgaaccttataagtatgactttggaaaaaaactgccatatattcacatgtttacccctcgatgatatgctaaatgtctatcttgataagtattataatgaacttatcactttcgtatctatactacagtgatcctctgacctatagcctttcatcattattcacatgttcacatttcatgagcgag

SEQ ID NO: 31520 - DNA, 374 bp, Gossypium hirsutum
  unsure (1)..(374): unsure at all n locations
  Clone ID: LIB3048-041-Q1-L1-A10
gcttggcatgctggagaaacgtaactcatgtacgcgtggcgctatccaagatctcgtggccatgctntgctgaattcagctgttgaccacggcattgcataggaagagcctaggacgaatgtcgagctacatacattatactatcatcagattcattcgaaactacaacgagtctatctttacaccgcatcttctgggacctgacatgatcacacctctacattgggcatcatgtacatcactgtcggatgagatggtggaagttccaaccgaagacactcacgagatcgcgcttacctggtggagatccactttggatgcaaatggtgacgctccatatgcctatgctatgaccagacacaaccattctcaca

SEQ ID NO: 31521 - DNA, 329 bp, Gossypium hirsutum
  Clone ID: LIB3048-041-Q1-L1-A12
caaggttacgatgcgaagtgctgatatgaaccagagtcattcatggtgctagactgcttgacaagctcgcagctgaccatgatcaggctatcaacattgttattgcccagtggaaatcctacaccgctatacactactgcactgagattgaggcaactggtcacagtgactttctcatgatgatgactactggcacgtcacatgcttactgctctgaaccgacattgattccaaccatactgattgctagcgctactatgtccaggatggtcagactcgtgagcactcaatgcttgcttgaaacatgagtgtctagctaacgattggat

SEQ ID NO: 31522 - DNA, 270 bp, Gossypium hirsutum
  Clone ID: LIB3048-041-Q1-L1-A9
cctttatgtgtcttatactcattaatcaaatatccggggcggtccttcctatcccaaacaacttcatttctctattcttttgagggaaacccaacattattgacatgaatttggatctatctttgttataaaattctttactttatacatatttattacaacttccaacttattttccttcacaatgcttcttctgcgaactaccatgggaaacatcataagttgcggatcacatggctggcgtaagaacagctgtcgcctgaaccaccc

SEQ ID NO: 31523 - DNA, 382 bp, Gossypium hirsutum
  Clone ID: LIB3048-041-Q1-L1-B12
catgcctataaatttagacttacacctagattgctcaggtgaggtcccaatatgaacagcatgagctaaacagattaacctgcttgatatgagcttctacaaattcactgaacagattcagaaaaggcaaccgtacctctatagcgatagcccatcaaacatacaaaagtctgagactgctaatcaaactggaactacatataagactactgatcttaataccgacattgctgagaatgaggactcaaacatgctttgcaagatccctgatgtcaatgataactccatcaatgattctaaagaactaccatacttggaacatgggtccctgatacttataagtgctaaatattctggcacttgatataggcatgatcagaat

SEQ ID NO: 31524 - DNA, 383 bp, Gossypium hirsutum
  Clone ID: LIB3048-041-Q1-L1-B2
ttttaggggccaattgaattgtaattttctgagatgtcaaatatatatttaatcatatattagttaatgattttataatttttgaaaggattaattatactatttttccattttttgagggggccaaagcataattttctttaatattgatttataatttgatcatatgtaaggggttttaatttgaccatataatgggttaatcaactgtccaaaaataattagaatcatgttaatgagttgatatgtagggatttctttgactggttagagcaattcttatgaaatacaaaaattacaaatgattctttttagtaaaaaactaaggaagattagttgatgatgagaagctgtatattataaaactaatggtggaatggatc

SEQ ID NO: 31525 - DNA, 172 bp, Gossypium hirsutum
  Clone ID: LIB3048-041-Q1-L1-D2
tggccaagggctaatccttgcccttatccccacaccggggggatcgcccgaaattttaaggggttgcaaaacaaaattaaattgggtcctttgaaccttcaaaaaaaacccccttggtcccagggaaaaggttaccctgaaaacaagggggcgcccttggaaccaaatggca

SEQ ID NO: 31526 - DNA, 229 bp, Gossypium hirsutum
  Clone ID: LIB3048-041-Q1-L1-D3
gaaggcttctgttaaagatttttttttttcttggggacgatttgtaggaaaaaagggaccatggggttctaactgaaacttcagtattgcctagggtccgttatggcgctaatacctgcagggggttactcttaggactattttgtcaaggccagagcaacttactatggcagacctgactgcttaggccctccaaggggaccttgcgaatttggagaatttggaaaaa

SEQ ID NO: 31527 - DNA, 361 bp, Gossypium hirsutum
  Clone ID: LIB3048-041-Q1-L1-D9
ggaaacttgaaaatagggtggaatagattgacatcctatatcaaaagcactcaaatatgtcctcattttgacaacctatctacgatagatttcacctgaaaagaaaggtgggggatgtagaacaaccatttgaagccatttagcaatggccaatgctagctaactcttaacacaactctcaatgatttttaggccatttaagattaaataaggtttctgataccaaattgttataccccaaaccctgcctagacgtgatggccaaatttgatgatgtcacacgagagtgtttttgaaaacgtgttgaccttaagttgtgtcagttattatctttcgtttaattcagaaaacgcgaattaat

SEQ ID NO: 31528 - DNA, 371 bp, Gossypium hirsutum
  Clone ID: LIB3048-041-Q1-L1-E9
gattttctgcacgaattcagttcgagacaacatgtttttttatcatgcattaggaagcacattatggcgcaggtgggtatcttgagcaaataactttcaaaggctatcaggtgcttcttcacatgaaaggactcgtgctgccttatctgactatgcaatataacgtatgctatttgatgccaacttgtggaagtggaagaactgatgggatgtgacagatcgagctgtgctgactttatgcaattcgaaactgatatatcactcttgcttcgtgactatcatagaccgcttggctacctagcacattgataccttattgtcactgtaggcgttatacaggaagatctactgctgaaagctacttggcagat

SEQ ID NO: 31529 - DNA, 374 bp, Gossypium hirsutum
  Clone ID: LIB3048-041-Q1-L1-F6
tgctccacgcctcatggcttgcacttggtcgcacgggaaggtcacctgcaattctggtctggctggcggatcatccacaagaccaacgatgaaccgcttagcattgctatcactagctaataccaggaacaattctcccactaagcacgctcatgactgactcaggctagtggacatttggaatcacaaagactcattacagcacgatgtgctatacacatatgatagtcctactcagagatcatacggtaccaatgctgagcctacctacgcgtcgtactagtacaagtcgcactagtgatgcaatgactagcatgatcaaaggaagacagatattacgcctagttcatgacaactgccacaagctcttacat

SEQ ID NO: 31530 - DNA, 280 bp, Gossypium hirsutum
  Clone ID: LIB3048-041-Q1-L1-F8
atcttcatatactttactctgaagctccactatctgggagagtccattaagtaacctataaaaacatggggttatcactgaaactacagtattgcctagttctgccataggactattacctgcagagagatactatcacgactatttcgtcatgtccatagcaccttactacggaattcctgactgcttaagcactacaagtggagcttgcggatgtccagaatgtagaataagtgttaacgatgccaatgtagacaggctttacactctctacaagaat

SEQ ID NO: 31531 - DNA, 283 bp, Gossypium hirsutum
  Clone ID: LIB3048-041-Q1-L1-G11
cgaaagtggatactaaaatgacattctaacggttcgacgctgggatagctcgattcaaatgtatccacaaagataagacaatgcaaaacgtgcaacatacatgcccaattcgtcgtcttagactatacagtgctgaaattactaccaccaattccgcccaatgttctatacctgttctcctaaaccaccgctcaggttacatgctacgacgacattgtgcaggatagtgttcactatacgacttacttcatttcatgcacattgtcctacacactactacttc

SEQ ID NO: 31532 - DNA, 371 bp, Gossypium hirsutum
  Clone ID: LIB3048-041-Q1-L1-G3
atagctggtttagatctgcagctgctcggcatcaacactattatagcaaaatattatagaagtggtgtcggcggaaataaaaataataattataattggtgtggcaacattttagagcaccgtgagagtgcatatatgtgtgcatgcgcatatatgtgcctcgccgcatatatcttctctatagagtattatatatctatatatatatagagagtgagagttatattatagatatatgccgcctcactatatatagtattagatatatataaagggtttgtgtatacacatagcgcctatctgagaatactcttcatatatatactctatatatatcacatttctcacatttttaaaagaggccccatgtg

SEQ ID NO: 31533 - DNA, 326 bp, Gossypium hirsutum
  Clone ID: LIB3048-041-Q1-L1-G7
aacccctttccctctttgttttggcatacatttttcggctcgttcttcgttttctcagttttatactctcaaagacctttttgtggtgcagaaattactcctttttagctatgggggctattccaaaaactgggggtctttctgggtaactaagggcctattttgggtgggttgaacttatatcagtactagcagattatagggtctttcaaggttcagacatatttgaggtcctatattggaaccatgatgatgtttgacgagatggggatttgtggggatatggatctcttcagtgctccacttggggaaaaagatgttgcagc

SEQ ID NO: 31534 - DNA, 326 bp, Gossypium hirsutum
  Clone ID: LIB3048-041-Q1-L1-G9
tgaatggtgcaataatcaccctcacgaggcagatgccatatggaaagcaggaagcaaatttatcgaagaggctttgacaatgcgaaacgtgtatgattacatgttccatttgttgaacgaatactttaaactcttgaaggttaaaccaaccatacctccaaatgcccaaaagctctgcttcgaaaccacggagcaaggtttatggaaggaattcatggtgcagtcaattgtgaagtctcctagtgataaacctccatgtgcattgccttccccatttgaacctcatgccattcaagcttctctggacgtaaaagagaataatacta

SEQ ID NO: 31535 - DNA, 401 bp, Gossypium hirsutum
  Clone ID: LIB3048-041-Q1-L1-H10
ggaatttgaacttcttgcttgtcgctaatggatttccagaaacaactatgttgtccccaattgcagatcaccatcctgagaagaagagaagaggaaggtcttctctaagccgcaagtcattgagcctggaccccattgtggggccagatactgtttttgcactttcagatcaacctttttgatccttgcaaggacattcgcatgatgtgcttgacctctcatggtccaaatctcagcacttgctgtcatcttcaatggacaaaacaatgaggcttcgggacttgattagcaagacttgtttgagaatattctcacacagtgattatgtgacttgcatccagtttaatccacttgatgatgaacactttattagtgggtccctagatgctaaagtgcgcata

SEQ ID NO: 31536 - DNA, 230 bp, Gossypium hirsutum
  Clone ID: LIB3048-041-Q1-L1-H11
ggtggtttaacttatgatttgatgatgatgaaccaagggcgacctatctacagacgggttccatgatctcccatctattcatatatgatacagtggcaatagtcgagacacttagctcagtattcatgaaccataggtattatgacaagtttaagcttagctgtgatataattccaacctcaatgaagcatgcaactgatctgactgaaatactaacatatgaaacgtat

SEQ ID NO: 31537 - DNA, 138 bp, Gossypium hirsutum
  Clone ID: LIB3048-041-Q1-L1-H12
cgagatgaacacccattgactggggaatctatctggggaggggttaaagaagaactgaaacaggggttgcatattctgcggtctgagaatcggaagggcttttgtcttgagcaactggacgatgctgttacgactact

SEQ ID NO: 31538 - DNA, 249 bp, Gossypium hirsutum
  Clone ID: LIB3048-041-Q1-L1-H6
tcgagctccattcttctctcaccatgtcattgctgtctttgtcctgggttgttgctaatgacttttagtgccaaacctgaagtgcctccatctgaaacttttacgtatgtcaacgacttataatctatgccagacgctgttgaatatgatgcataagaccgagtcatatgcatatctcatgcccccttacaactcgcgttacataacaccgcccctaatgccttcaacctatcgttacgcatgatctac

SEQ ID NO: 31539 - DNA, 161 bp, Gossypium hirsutum
  Clone ID: LIB3048-042-Q1-L1-A5
attttcacaagccaaagtgtcaagacgaaaggtgccgaagcctctttctttggaacaagcttcatcatcagccctcttcaattcctggttgttacctctgcattcgctttcgtacaaaaccttcttttccgtcggcagcttaacccccccaaaccacccta

SEQ ID NO: 31540 - DNA, 374 bp, Gossypium hirsutum
  Clone ID: LIB3048-042-Q1-L1-A6
tatcctacatacatggctggcaggcatgctccttcagggctggctcgctgcatactaggatcctactgctgctcaacagggtggtggctatggtatgctgggcagtaatcttccaccttcatgggaaggcattcaactttactactcatacaacatccggcgattgatgctgtactatccaactcaacaagcattactagctgttataggctgctacatcgaagtaatgttaggtggtgcaactgatcaacttctaaacctagctgacccttccatagcacgatcatgggtgcaatcaacagatgtagcttactggccgagcgatcggttccgatacatcgctgtccggaatgaaagacctcattcatcttggt

SEQ ID NO: 31541 - DNA, 255 bp, Gossypium hirsutum
  Clone ID: LIB3048-042-Q1-L1-A7
cagaactaaaggatcggatgccccgcacgaatagaatacgagccgagatgaaaacgccgaagcgaggagctaacttcgggacaaactacaatggatatcgagtctttattcaccaaaaggctcgaaggtaaagaggcacttgttactggaatcgccaacggattacaagagagttcaaccagacctatatctcaaacatggcggcaaaggtctgattgcagaaattcaacacgaattggcgcactccctttgcaa

SEQ ID NO: 31542 - DNA, 407 bp, Gossypium hirsutum
  Clone ID: LIB3048-042-Q1-L1-C11
gccccagagagagacagagagagagagagagagagacagggagagagagagagagagagagagagaaacttaagggtcattaaccagttttttaatatgccgctaaattggggaggtttaatcaccaagcctcaaaatcaggtggatccccccaaaatgatcctaccccaggttcaaacactttaaaaacccctaaatctccttggatgcccttaccaatggtgacagatggtatttcaaaccaaatccctcggtcagatatggatcaaggtaccaatcagtatgaacaattcaaggccaaggagataaatcgggatgaatttgacaaaaactgaaactgatagtcggagatagtttgctgagatcaacaataacatctcttcagagcaagttcccatctagacatg

SEQ ID NO: 31543 - DNA, 237 bp, Gossypium hirsutum
  unsure (1)..(237): unsure at all n locations
  Clone ID: LIB3048-042-Q1-L1-C6
agaggtttctatgccgggagaccctttcttgggtttccatctcttatttcagatgctaccctagcgggagcactttccccaaaaaatggtaagccggctggaatctaagcacctgcaatgcgtcgcttggctaaagggtggttctttgcgagccccaactttcttcctagntcattctctatggatgctatgagcctctcatcacgggtatttttacttgagaaacctgcatgggct

SEQ ID NO: 31544 - DNA, 298 bp, Gossypium hirsutum
  Clone ID: LIB3048-042-Q1-L1-C8
atgccccaaacaatgtccggaggcatttatttgcaacatatgctaatgctgaaacccaagatgatattaagctgttacgttctcaaagttgagatgacttgaagcaaggtgttattggcgctgtacctatcccctcagaggatgcggaaaaagaggaagtaattgcagctttagttgctaatgtggaagcaatgataaaagctgatcgaaaaatcacagccttgaagcaattgcaaggtcatatctggcgaactggattcgagaccaatgagctcaaaggaatagttttcgatgatgt

SEQ ID NO: 31545 - DNA, 322 bp, Gossypium hirsutum
  Clone ID: LIB3048-042-Q1-L1-D8
tattgaatctaaggtgggcatctgccaatgcattcacagccaaaatacctgactttgtgggtaactggacaaagcttacacaattgtaattcatcaaaacaatattgggtatattcttcatataagttcaatcagacatcaagaatgatagctttgcctagatttttcatcagtttgactactctctcggatatttatacaggagatttgtagggaagctcattttgaggttcgaattccatctaagtttttcgaattaaacatctttgaattctttgtaagtagagatatctttctttcaagatagtatactgctgaccac

SEQ ID NO: 31546 - DNA, 384 bp, Gossypium hirsutum
  Clone ID: LIB3048-042-Q1-L1-E10
taaatatgttatttgggcttttatggaggatatggaggttctgccaagctatagtcttggtgaattttccatactcgtgattctgcgaaaaatagactaactcgtcaaagtgtgaatatgtaagggctaaaatgtaaagtgccctaaatatgcgtcaacggattattctgcatgagatgaatgattgaacggttcaatctaaattgtattacatcacgaacatataacatcgaacttagatcgaggtaagcacaaaatagtggaatagtccactcgtttccatctgaaattcgtacgaggttagtcttaatacaagtacgtgttacattgaccgaatgaagtatatactagttatcatcagcattggacggctatcatagcctg

SEQ ID NO: 31547 - DNA, 278 bp, Gossypium hirsutum
  Clone ID: LIB3048-042-Q1-L1-F5
gtggcgcgtctagaactaggttttttttctcagaatcgccggccttcttttttcataactcatttggtattgttaaaagggtcgatgtgggtctatctttgtgcttgatgtttggtcttgggtggatttgctgatgatctattctaggaaggttggagatatgcaggtatattggttactattggctttggcacctgttagatttgcccaatgttgatgtctgtatttaggacatttggaagctatttattggaacttgttccatttgacattatcac

SEQ ID NO: 31548 - DNA, 161 bp, Gossypium hirsutum
  Clone ID: LIB3048-042-Q1-L1-F7
tggagttagttctagatcgtatatatagattgaataagatggttggtgatatgggtcaaagatggcgcaattggcaatggtagctcggtaatctccaggttttgctttatgaaccaatcctttgcgagaatatattgctggttataacttttcattatcaa

SEQ ID NO: 31549 - DNA, 343 bp, Gossypium hirsutum
  Clone ID: LIB3048-042-Q1-L1-F9
gcaagtttcaatggcaaaggcaaacattctctaggaggtcttgtgttcactgtgattgctactgcttgtaggtgttggagagtaaggaaatccgaatgacagaaacgcactacaaaaatcctttctcttcttccaaggccatagatcagtcacgctgtctgtcaaccataaagtctgatggaggtccaactaaactctttcttaagactaacttgaccatgttgatcatactgatggctaatactatgctatatactttgtctaaccaaacttagcaatggcttccacccccacaatgctttcatggtgtacacttgaatatggaaagagaactggaccccag

SEQ ID NO: 31550 - DNA, 353 bp, Gossypium hirsutum
  unsure (1)..(353): unsure at all n locations
  Clone ID: LIB3048-042-Q1-L1-G10
agagaatagaggaggagtttggtcctattgtacgtcggattgtagaatgagagactaaagtgtccaaattgggaaagttgaaatataagaatgaaaatgattcagtacaagatgtgaaagctgatgatctgcaacaaatgtttctagccatgacagaagatgttcgcgtcatcattgtcaaattagctgacagattacataatatgcgcactctttcacatatgcctncatgtanacagtccagcattgcaatggagacattgcaagtctttgctcctttggcaaaattgatgcggatgtatcacattaagtctgaacttgaaaattaatccttcatgtacacaaatcctgaa

SEQ ID NO: 31551 - DNA, 232 bp, Gossypium hirsutum
  Clone ID: LIB3048-042-Q1-L1-H11
cggccgttctagaactagggttcccccggcttgtaggatatctggccaggggaaaactgggaaggccgaggaatttgtccagggaagatggagggggatccgtttcatcgggtttaaacttggggcgggggaatgctgtgaataataacggaacttttacccttgggcattgacaatttgtttcccaagaaaaacagggattgacaaggaattgggcccaaaaagatggggg

SEQ ID NO: 31552 - DNA, 262 bp, Gossypium hirsutum
  Clone ID: LIB3048-042-Q1-L1-H3
gtatacagctttggagtggtactattggagcttttgacagggagaagatccgtaaacaagaaccgatttcctaaagaacaaaacttagtggaatgggcaaggcccatgttgaacgattccaggaaactcggcccgataatggaacctagactcgaaagcccatactcgtaaacggctgctagattagcagctgcctttggcttaccaatgcgtcagccctagcccatagcaaagtctcacaatgagtgatgtactgaagaca

SEQ ID NO: 31553 - DNA, 295 bp, Gossypium hirsutum
  unsure (1)..(295): unsure at all n locations
  Clone ID: LIB3048-042-Q1-L1-H4
cctaatgcattgaaacggnacganggacgttgggggttaaacgtatgatcattggcatcggatagccctccactctgcatgattgccgccgcagagatcgccggaattgctttaccgactgagacttcatcctgcggatcactcacctcgcctttatcaaatgggctcgaattgcatggacattacgtaattctccgttacatcgggcgaattgctgacgatcgcaactaggatggtgacgaagctattcatgctgaccgagttgatgagtggctgaagtatgctcagacccttt

SEQ ID NO: 31554 - DNA, 176 bp, Gossypium hirsutum
  Clone ID: LIB3048-043-Q1-L1-A12
ctgcaggaattccacacaagacgatatgtttatataccaaattccaattctatctaacaagttgaatttaaaaaatcctatggacatccttaacgcctaagtatttcatattcacagacgcattcaccatgatcaaacacactgttatataccgtaaggattttcaagtttatcac

SEQ ID NO: 31555 - DNA, 169 bp, Gossypium hirsutum
  Clone ID: LIB3048-043-Q1-L1-A5
tcataattctcactagacactttttttatatcaattccatttctttcggtgcagatattttaaattatcctgctcaccttcttaataactacctatttcaaattcaaccactcattcaccatcatcaaaaacactcttatcttatctaattatttcttatttaacttct

SEQ ID NO: 31556 - DNA, 171 bp, Gossypium hirsutum
  unsure (1)..(171): unsure at all n locations
  Clone ID: LIB3048-043-Q1-L1-B12
tagccaacttggatactacttcttcttctgaaaacatttctatgtttatattcaaacattgttcgtcccctcacacctacnatcacttctttaacattcttatccaataccatttccctatcattctaatacttactcatttccttcacatttataacacactaaaatcta

SEQ ID NO: 31557 - DNA, 330 bp, Gossypium hirsutum
  Clone ID: LIB3048-043-Q1-L1-B4
cttcaagaattctgcactatcccctctgttccttgtcttgctgatttcacttcacagtttgcgaattatctacaatatttagaccattaatatctttttccactctacatattatctccttttacaatctaaatcctcatatgatcacaaattttttattttttccttcaaactctcttaacatactactataaatcttcatctaattaacaatctctatctctcaaactttccatcttaattaacttacatctataaattttctttccattaatacaacatatttattaaccttaactttaatattcttaaacttctactccaatatct

SEQ ID NO: 31558 - DNA, 347 bp, Gossypium hirsutum
  Clone ID: LIB3048-043-Q1-L1-D5
tgcataatcgcacagccaaactttcaaggaaaaacaactctaaaaccgtctttcttaataattgctcattcctttcgtttaccaaaaattaaataaaaaggataaattatataattaaagtgcatactgcgcacttttcctaatttctctgatttcaattgtcttttttcctttattaatattttatgttattttactctatagttcattaattccagattttcttccatatctcttttcctaatcttcttcacttcttttatgatttatttcatcgacattatttatattctattcaatctaaatatacaacacccactactagataacaaaaccaactctttatt

SEQ ID NO: 31559 - DNA, 166 bp, Gossypium hirsutum
  Clone ID: LIB3048-043-Q1-L1-D8
acaactgcacaattcacactaaccaaatcttaccaacccatatatctacttacataccgttcatttttaaaatacattaacccctcacaatacactaaaattctatccacatcattcatacactaatatccctcacttcacccaaccaaccatcatatcttctcat

SEQ ID NO: 31560 - DNA, 242 bp, Gossypium hirsutum
  unsure (1)..(242): unsure at all n locations
  Clone ID: LIB3048-043-Q1-L1-F5
attcaccacaaaaacctgttctctttatcttataatataatccaaaaccagccgantttaaaaaactttagagcgccccactactcacttcatacacatcaaattttactataaccatatctttctcataattcacatcttctcattaataacaacactttttttcatctccaacaccacccacatttataaacttctccaaactttttataatcatcatcattcatatattcaccttcaac

SEQ ID NO: 31561 - DNA, 442 bp, Gossypium hirsutum
  unsure (1)..(442): unsure at all n locations
  Clone ID: LIB3048-043-Q1-L1-F6
gttttctctttgttgtcagcttccttggcctgtttgggcgtactccccttcgtaaggtaatggtactggattataaacttacatatccaagtgggactgccacagcaatgttgataaatagttttcatactcactctggtgctgagcttgcagggaagcaagtcaagtgtcttggaaaatatctaagcataagtttcatttggagctgtttcaagtggtttttcagtggtattggcgattcctgtgggtttgataattttcccagtttcggcttaatgctgttcagaaacacgtaagtcccctcagatttagtttctcatgtaaactcccactttttcctttntccccagttgaaagaatgctcgtataagttaataagaatacttgatctntctttntgaatcactattcaaaggcaatgggacctttattaccattaaac

SEQ ID NO: 31562 - DNA, 298 bp, Gossypium hirsutum
  Clone ID: LIB3048-043-Q1-L1-G5
catggcatctaatccaagattcatgttgatcccaatttcgcaaaattataaattatgttgcgacacataactactcttttactggatcctaaagcattcaaggatacattgtatttgttcgttgagagatacaaacgtgaataacattttatttattacatgtatataatcttatggttttatcttctgtactaccattgtatttgaaattttatcaaactttgtttccttaataaaacctaacaagttgactgttaaagttattttataacaatattaactgtaatatggaaggtat

SEQ ID NO: 31563 - DNA, 357 bp, Gossypium hirsutum
  unsure (1)..(357): unsure at all n locations
  Clone ID: LIB3048-043-Q1-L1-H5
cttcgatcttttttaaaaaggcatattgatgtggaaattgangatatcgaaacaggagtaaagcgagatttacaagtttctatgggtccccttatacacaagataggaatgaatcatgagatgttttgaaaagtctaagtattgctgacgacatctcttggtttgtttgtggtactttaatgaaataatgtatgggtctgaaaagaatgttttgctactcttttgatcaaagatttatgcatctatttcgaagaactttggaggaatgtcaactgattgatataggatattctggcagatggttcacataggaaagaggtaatcttccaaagacgaatatacgtgacaggctatatt

SEQ ID NO: 31564 - DNA, 157 bp, Gossypium hirsutum
  Clone ID: LIB3048-043-Q1-L1-H6
ctatgatcctgactacaaggatacataggaagaagaatgtagcttctacaaaagtgaacgctgctcagacaaacgattataattatgaacagttatacataaaatattacataatcatgaactgtactcttaataacaagtactactaataacatta

SEQ ID NO: 31565 - DNA, 304 bp, Gossypium hirsutum
  Clone ID: LIB3048-043-Q1-L2-A9
gccagcgccctctctcaccagctccgtacatgcaacagctgcggttccaccggcgcaccgtcgattgccacctgagtgcctgcggccatgggtgcgacggactctactctaacgaccaagggttgtatcattgggagtggccccgccgatcacgaccggcgatatctacggtgcccgtggtgcgctacagcctatgctttttgagggatggctgggcaacgatattgaagctggtggtcaaatcaccaccagctgcgcagaccagaactgtccactgtttccggatgaactacatggttcggag

SEQ ID NO: 31566 - DNA, 389 bp, Gossypium hirsutum
  Clone ID: LIB3048-043-Q1-L2-F10
gtgaccgtcaccgactttgagaaagggcttcctacgtggtaatatatttggcaaccctaataccagccctctatttctcaaaccctaaactccagtttttaagatagttgttattgatcaaaataaaattaggagatgccgggtctaacctgcaacgcatgtaacaaagaattcctggacgatgcagaccagaagcttcattacaagtctgattggcatcgctacaatctcaagcgcaaggtagctggagttccgggagtgacggaagctctgtttctggcaagacaattggcacttgctcaagagaaagagaagcagaatgagacccccatgctttacaggtgtggtggttgtggcaagggctatcgaaggttcaaggcttattctca

SEQ ID NO: 31567 - DNA, 338 bp, Gossypium hirsutum
  Clone ID: LIB3048-043-Q1-L2-G9
acgcggccggactctagaactagcggacgcgcccgcccgcacgaacgcgcagacaggggaaccgaacaacactccaacaaccccagaaccacgggcgccccggcacgaccaagcggccagcaagacaaggacagaagaacaacagcaagaagaacaacaccaccaacaacacgcgcgaggacagcaccaaccacaacggccaggccaaagcccacgacgagaacacccgaagggagcaaaaccgccaagagcacggcacacagccggacggacaaaaacccagggacaagaccaacggcggcaggagaacgaagccggcaacaccaacagccccgaaa

SEQ ID NO: 31568 - DNA, 300 bp, Gossypium hirsutum
  Clone ID: LIB3048-043-Q1-L2-H9
gtcaagtgtttcagactcaaacgtttcttcccacgctcttcaaggaaccaaaaggaaatgggtttcagaagacgatgtagcatccgttccctctatggtggacttgcacactggtggaacctttaatgctcatacagggttcaacgccaggtatttaaacgagtccgaacacatgttagcacaggctttacctaacacaacggtgaagggtcgacctaatattgcatcgagaatgatgctcctacaaagggattgctacattcggcatgacatgcttcatggcccaaacaatatcggctt

SEQ ID NO: 31569 - DNA, 224 bp, Gossypium hirsutum
  Clone ID: LIB3048-044-Q1-L1-C11
gaattctgcactagaaaagaacgtcatatagtttgagtttacggtttttagatctggtattatttaacattttgctgtcctccttttactacctttcccttcatttcaagccctttgcttctcctctgatgattatactgtcttttatgactcatttgattagccttttgactgaccattgatcatctcccataaacatgattacaaaggtctatccaaacatt

SEQ ID NO: 31570 - DNA, 216 bp, Gossypium hirsutum
  Clone ID: LIB3048-044-Q1-L1-E12
ctgcaacaattctacactattccaaagttctgtatctattgtcttcacaaactacaatatgttccttattaaaaattaaccaaccccctaaatactaacttatcactcataactcctccttccacctctttactacattcctcatccatactatttctcaaacatttttttcaaattctcattgctaatattcaacaccaattcttccactcccct

SEQ ID NO: 31571 - DNA, 239 bp, Gossypium hirsutum
  Clone ID: LIB3048-044-Q1-L1-F10
gatcccaaaaaactgcaagaattcagcactatttcaccgtctcctactttgagaaaccactacctacgtatgaatatatttaaaaactctaaggccccccctatatttctcaaaccctaaactccattttttaatataattcttattgatcaaaataaaattaccatataccatttttaatcttcaacataatcaacaaaaaatctcttcaatattcataccacaatccttcattacaa

SEQ ID NO: 31572 - DNA, 242 bp, Gossypium hirsutum
  Clone ID: LIB3048-044-Q1-L2-D3
cgccgcccacgagcgaccggacaggacccgacgacagccggagcaggccgagagggccgacgacccacgcgagcgcagggggccagaccccaaagcgagcccgacaggccaccacagagcagaccagcagggcagcgcccaggaccaagagccggcgggagacgggcgagggacaggcaaagacggcggacaagacaccaggcagcacggagacgagaggcgggagacaagagaccgagaag

SEQ ID NO: 31573 - DNA, 252 bp, Gossypium hirsutum
  Clone ID: LIB3048-044-Q1-L2-E3
cacagaagccccgccaacgaagcgacccccaggacccaccgacagccggaccaggccacgagggccgacgacccacgcgaacgcaggaccccggagggagagacaagggcgcgcaacaagaaccacacggagggcggaggagagaccgacaacaacaccgagagcagccgaaggacccaagagcacgaggaacagacacgcacggacaggaagaacgagccggaagccagcaaagggaccaagaaaggcacg

SEQ ID NO: 31574 - DNA, 133 bp, Gossypium hirsutum
  Clone ID: LIB3048-045-Q1-L1-A10
tagatgaaaatgctttcgatgtgaagggatggggtcttcttttgggaccgccattaatgcttgaagggctagttaatcaaacttggttgatgatgctccatattttgcataatcatcgaatgggccacttttt

SEQ ID NO: 31575 - DNA, 184 bp, Gossypium hirsutum
  Clone ID: LIB3048-045-Q1-L1-A11
ccattcttaatctgtactttctctactacctattcaatgtagacatgcactccatctatactgggcttctataattccgtttcacccgagcgaaactgtttggatctacttctaaagcaacgaccaagagcttcttcttgacacgctaacgcaatggctgaactcgctaaagataaggaatccc

SEQ ID NO: 31576 - DNA, 332 bp, Gossypium hirsutum
  Clone ID: LIB3048-045-Q1-L1-A8
gtctctagtttttttttttttatctacttttttttgtaaggtttttttttaattttctctttaaaaacaaaatcctttttcaaataccttcattataacctctaaagattccaccatcattaaacttattattatcataacacttccgacctacttaataataaacctttcatgactaatttaaacccaatactactttattctacccacaatctaataatatcataaactggttaaaacacctcccaaaaactatctatttctaactctaaaacctttttcttaacttccaaccaatttattctgcttaaatttacaacaacctgtaaaaa

SEQ ID NO: 31577 - DNA, 234 bp, Gossypium hirsutum
  Clone ID: LIB3048-045-Q1-L1-B8
acgagctatcatatatcttatcacagacctacactacctcggacgtacatatatacaagtcggatggatttctcataaccactcttcattacctactaaatctctactacattctaaaaaacatactttttttcaataaactccaatatcatctacttaaatcacaacacattctattatatgttactttaacaaattaaatatatatctccctacatcatacattgcactatt

SEQ ID NO: 31578 - DNA, 298 bp, Gossypium hirsutum
  Clone ID: LIB3048-045-Q1-L1-C12
gctaagccttccccacttcacaccagcaaaagaggccaaagctattctttgaatcttgtgattattatgtttcaattttcaatcagttgactgcaataagagattgatattggaatccagaggatcagattttattaaaatgtcgtctgattgcatagtgaaatcatttggaagtttgaaatttgggttaaactagacattgagtaatatttaatgtgtcctttgctttttgcagttcatcgatggatgtggttgtgatggtgtgttcttctaggttaaagacttgttgatgttgccc

SEQ ID NO: 31579 - DNA, 199 bp, Gossypium hirsutum
  Clone ID: LIB3048-045-Q1-L1-C5
gagaatttatctgatctccgtctacctgcctcaacggaagaatgaagtatctgatagagggagatacatcgccatgattctcgcggtgttattcgccaactctgaatgcaacatcttagttgaacgctataatggaattccagctgatgaactgcttcattggaaatctttactagctaaactgtgagcagataatctt

SEQ ID NO: 31580 - DNA, 239 bp, Gossypium hirsutum
  Clone ID: LIB3048-045-Q1-L1-D2
ctcttacattacctacaaaatctttgctttccctttttcgggattgtgccaatggcttgttgaccaacattcatctgttacttcttccttttagccctcttttccattgaaatacatggtccggatttttttagcaaaatccccattgttaacacaactgataaagaagtgaccaacagagaagaacaaaccacttttgggaagaaggagccagacccaatgtttgatcccaaaaccca

SEQ ID NO: 31581 - DNA, 248 bp, Gossypium hirsutum
  Clone ID: LIB3048-045-Q1-L1-E10
atggctattttgaatagctatcgcctgcgcttgaaagagtctacgccccattttacgggtacgaatcttagtgataactacaggagcagatatgtaaaatggagacacccacatgctgccgaaattcctaagttccatctaccaatgcgtcaatgtgaggttaaaaacaggcaggatatctatgacgtattaactgcatgatgacggtgctgcacacattaaacgatgacattaaagctattagattg

SEQ ID NO: 31582 - DNA, 218 bp, Gossypium hirsutum
  Clone ID: LIB3048-045-Q1-L1-E2
acgcactatttttaattcacaattaatatttcttgttacgggctggcttactatataacttgactggacattttcaatctattcatatttatctatttcaactagatcctgttatgcttaacctttcaagatactattttgattttactcaatatctactaatgaatatacatatcgctcatcgcatccaatttttctcttactacttaaacttattt

SEQ ID NO: 31583 - DNA, 272 bp, Gossypium hirsutum
  Clone ID: LIB3048-045-Q1-L1-E4
gagcacattatcctgctcactatctgcactttccgttcatgatggcggctgtaaatgggttgttttacattgaactgtgcgtcatattacaccgtgttcactgagactatcctgagcttccattccatgaaagctttctggctcatgacattatgcacttctttagatttcaaggcttgttcatcatcaaacaagcttcctgacttaacctcagactgtagggggaaaccacttgtggtcccagatcaaaatgggttaagaaactgcaccac

SEQ ID NO: 31584 - DNA, 181 bp, Gossypium hirsutum
  Clone ID: LIB3048-045-Q1-L1-E5
atatccttgatctttacactttaggccgcaaattgggacgcgtacagtttggggttacttacttatgtaccgagattccgactgcgattgaatatgcttgtaagtccatatcgaaaaggacgttgatttgcacggacgatgtgcaggatgttaggatggagattcatattactcatcataa

SEQ ID NO: 31585 - DNA, 213 bp, Gossypium hirsutum
  Clone ID: LIB3048-045-Q1-L1-F1
caagcgaccatataagtaattaactctaagcggtaaggctcctaaacatccttcctgccgaccccaaccgatcacgactcccacaactctaacattaaaccaaacttcaaaagaactatctcctatttctggagaaaacccgaaactagcaattagctcacacaccacatgtcttaataagaatcttgaattgcaaaaaaaaccttctctcac

SEQ ID NO: 31586 - DNA, 296 bp, Gossypium hirsutum
  Clone ID: LIB3048-045-Q1-L1-F7
gaaggacatgaagatagacatggtatcagtgcttggcgagcaatggccagtgcgaccggatctccagggcattaaggaaaagtttcgagcaatagctaaggctaatttagctacaaaagaggcaaagaaaagattgcttgcagcaggacgtgagtttgaaacgctagaaaatcaacgtaaaacgccctcaacaacagctgggaactctgatcttcatatggtatgcgtaatcttttgtttaatttaatgacgatgtgtaatgttatgatttaatggtgatatatgaaatttacata

SEQ ID NO: 31587 - DNA, 297 bp, Gossypium hirsutum
  Clone ID: LIB3048-045-Q1-L1-F8
ctacaatagggaatcgaatccctcttcatcttattgcgcttctgatccgaatgacccttgtgctcctggggaacaatattttgaccggtgtaccatgcaactttcttggaactacaactacggtcagagaggaaggtccataagagtcgactttttaaacaacccagacctgctattatgtgatcccacaattaccttcaagcctacgcttaggttctggatgactgcacaatcacccaatccatcttgacacattgcgatcatcttagcatggatacccttcaatagcgatccgac

SEQ ID NO: 31588 - DNA, 278 bp, Gossypium hirsutum
  Clone ID: LIB3048-045-Q1-L1-G4
ctatcatagtatattgtgattaacgatctaaaataatccgtagcgaccagtataaggctagtggacccctaataagacatctttatgactcaaatctacctcactctgtcatgtaatcaccgacttgaaatacttatagatgctgctaggggacttcataaatatcacactggtccaacccaaaccattattcaccttgatgacaatactacacacattcttttggattacaattccgtatacaaagttacagattttcgactttcaaaaactcatcc

SEQ ID NO: 31589 - DNA, 239 bp, Gossypium hirsutum
  Clone ID: LIB3048-045-Q1-L1-H1
ccctctagaactagaggatgccacaccctcacaattcacactaggcaagattcatttcttagcaacaacataactgtcatcatggcccgggttaatactgccgatgtcaatgccatcaaaactcttaatacttccaaatatgcaaatccatctcgcaatatccaaaacaagcctgttgctaacccatatcctatgtccaacaagatgctataaatgcgtcaacaattacagtatcttca

SEQ ID NO: 31590 - DNA, 305 bp, Gossypium hirsutum
  Clone ID: LIB3048-045-Q1-L1-H10
ctagaactagaggatccgacgcgctgcactaattgagctcgaggcgcaatgatatgcttggacctctcgcagcggcgctatgggagaagagatgatgatggaacagtatgacatgctctaccactgaccgtttgacatgaattgtccacctgataggagctatgtacaagcctgccctaaaagcgaggggcctgtcatatatcctgtgagcgaaggaatacaggctagtgttgatcacatgcttgctgttgattgcaaattctgaaggtcgtatcttctaactgaagaagctggcactattgcca

SEQ ID NO: 31591 - DNA, 257 bp, Gossypium hirsutum
  unsure (1)..(257): unsure at all n locations
  Clone ID: LIB3048-046-Q1-L1-B2
tcgaggcgaagccaacggtgaccgcactatattcgacacaagccggaggggcaccaccaacaggcggtagcgggaatcacacttcttcttaacacagagccgatggttgactaaaaccatgaacgaacagctcactcnctaataaatcagagatgaaacacccaactcacaccggaacgcacgcacactcatgcagacacggaaccaatcgagactgcaacgcaccgacaacagaccgaaccctagacaaggaagaa

SEQ ID NO: 31592 - DNA, 245 bp, Gossypium hirsutum
  Clone ID: LIB3048-046-Q1-L1-B5
gtgtctgcatggttttggcaggaaactaatatccggttagtgcgtttgcaggacccaggttcacctttgtcttctagccccggttctagaattggttcaccagctaagtttagtcaaccaaaaacggtattcttgtgatggtgcatctggcttctcctattaaccgcttgtataactacactgctgtctcctattaagcattaggacatattccccctataatctccaacttcatttgtatcgac

SEQ ID NO: 31593 - DNA, 320 bp, Gossypium hirsutum
  Clone ID: LIB3048-046-Q1-L1-C1
ctgaatatgttgtaccatcaatgtatagtggtcagttggggggggtacatgatcaaggcgatgatccgtctatgcaggacatcactgatgatgaatacactagttatgcaattgccgaaggaaaaagggttatgactcctttgggatcttgattagctataaagcctaatgaactatatagcaatgttaaagttcagaagatgactactctttgcgcctttcagatagctagagaatatctttatgtgagtgatttgaacgatgcacaacaaatgttcgaaggagctgcagatttatatacgcaagaatgatgggacact

SEQ ID NO: 31594 - DNA, 271 bp, Gossypium hirsutum
  unsure (1)..(271): unsure at all n locations
  Clone ID: LIB3048-046-Q1-L1-C4
ctggaatctgtttttagaaataatatatgctggtaatttgacgttatatgtatcaaggaaggatatttaacagncttaccttaaagcagaatctttatgggaatagacattatgtcattggcttaacaaaggctatgtaaatccttactctaggtttttctgatatttctcttggagaagggtggtggatgggggggatcatatagacgtggaaaagctttctgggggggattagacattggtaatacaccatctgatgggaaaagggtta

SEQ ID NO: 31595 - DNA, 171 bp, Gossypium hirsutum
  Clone ID: LIB3048-046-Q1-L1-D11
gtggatccccaaactacatcaattcacactagaacaaatctttttcttaaccccctagaaaacaatagcaaagatgcattttacatcatgtctaatactcaaagcttacaaaacatcgactctatcaccaacacatcctaccatactgtaacatatgataatatcaaaacc

SEQ ID NO: 31596 - DNA, 171 bp, Gossypium hirsutum
  Clone ID: LIB3048-046-Q1-L1-E12
gtatcagcttctcattgaaggtggttccgattgtgcgtcggataattctttatgcgggagcgaattccaataaaccaaacttttcaaccgagctacaatcggtaatcataataatccctcatcatgtcaaatcaattctcataaacgttatatgactaattacacactatc

SEQ ID NO: 31597 - DNA, 304 bp, Gossypium hirsutum
  Clone ID: LIB3048-046-Q1-L1-E2
gaatcttcatatccacacatacttgatgaatgatatctcgagaggcgctcctgatgttaaactttaagtacttgctgcttgtacatagaattacagtggagcaatacttgaaagtgttgtgaaacgtgcagcgtctactggtttgaattgacacgtaaccatggatgatctttccaagctagtggacgaatagaacattaacgttacattggatgattctacaaatgcactgatggaaatctgttactgggttctgagactgaactgatgacctagaacgatgcagactaaatggcacggtaga

SEQ ID NO: 31598 - DNA, 157 bp, Gossypium hirsutum
  Clone ID: LIB3048-046-Q1-L1-E4
cccaaatgatttccttacctccaaattattaaatcacaggggatgctccataggccaactgggccgactgactaatacataacccctatagttgaacgattcaactcaagtatcactgtatagaccatcttccaatactaggtatttcacccaccat

SEQ ID NO: 31599 - DNA, 125 bp, Gossypium hirsutum
  Clone ID: LIB3048-046-Q1-L1-E6
gaaatgtcttatacataaatttcatggctcgtaaagtcttgttcttttgcaactgggagatgcaatgggacaactgatgaggttaaaaagatcgttacaacattgaatgaatctgaagttccttc

SEQ ID NO: 31600 - DNA, 210 bp, Gossypium hirsutum
  Clone ID: LIB3048-046-Q1-L1-E9
ttcgaatcgaattcatatgctttttattgaacttctaatcctaattggcctagatctcctggtaaacaagattgtggcctacataccatacaactttcttagaactacatctacaaccatgatgaaatggccataatcgcctacttgtttaacaacccatacctgatattaaatgatcccacaatttcctttaactctgcctttaaattt

SEQ ID NO: 31601 - DNA, 285 bp, Gossypium hirsutum
  Clone ID: LIB3048-046-Q1-L1-F2
gcggccgatgctgcttatcatgacaatcgaacctgccttgccgcctgtgatgacgtggggggtgtagaatgatgcattgacaaccattgggtccagattggggattcatacgattcctagacagagttaccgatctgctatgggagcatcactgatgatgaccgtgatagaatacgtcaccgtttctgcactgatgacttctccacttcagtacacaatacttgtgcatattgctataagaatactcatgaacttattgtctactaggataaacgccatacaagc

SEQ ID NO: 31602 - DNA, 305 bp, Gossypium hirsutum
  Clone ID: LIB3048-046-Q1-L1-G11
gcaaattcccttcttttcccctccacccaagcctaaaaaagcatgagcacatctcaaatcagcgaaaggacgaaagttcgtcgctaatggaaatttcttcgcgaaactcaactaggtattgaccaatgaactggctgaggattgatactctggagtcgaaatcagagttactactatgcgtacctagatcatcatcatagccacccgtacccaaaactttctcctgtaaaatggtatgatgattaaggagcttacctcaatggttcacaagctattcaagttcccaaaaaacagcgttgaacttt

SEQ ID NO: 31603 - DNA, 144 bp, Gossypium hirsutum
  Clone ID: LIB3048-046-Q1-L1-G4
cccaacaacttgcaaacaccatgcttaccaatcttatcaggctctggtttcaattacgggaggtctacccattatcaggccagtcatactcatcgcataaccatgtcaaaacgctactcatcattatcttcactcacttactcc

SEQ ID NO: 31604 - DNA, 233 bp, Gossypium hirsutum
  Clone ID: LIB3048-046-Q1-L1-H12
agagaactagtctcgagttctttttttttttttttatttggaggcattgttttgtttttaaaataggaagaagatatctataatattgcaacatataattacatctttattgcataacattgtttaagaaaagtacaaagcataaggctaccatatcatatcttttagcatttcaatatgaaaagcgtaggatgctatcaaaccctgcaaattaaataaagaaagatcactaa

SEQ ID NO: 31605 - DNA, 199 bp, Gossypium hirsutum
  Clone ID: LIB3048-046-Q1-L1-H4
gcaatggtttgcatcctgctgagataattggtctttagcaagcgcagttatatccgacgtggtgaatcgattatgaatacgacacagagttgtacgtgcccactaggtgactggtctaatatgatcgctgactgggcctatagccttttcagctacggaccatacatgggcgtgttaatcattgtatgccgcttatgtg

SEQ ID NO: 31606 - DNA, 120 bp, Gossypium hirsutum
  Clone ID: LIB3048-046-Q1-L1-H8
ttttaagttcactttcagtcgttcctctggtatgtctagttggttttgatctttacgaatgcagcttacttgagattagccaaatgagtctagatatgtaccgcactatctatgattcat

SEQ ID NO: 31607 - DNA, 210 bp, Gossypium hirsutum
  Clone ID: LIB3048-047-Q1-L1-A11
gactcatctactacacttaacgcagccatacagagacaggcatgcctataatgacggtggtcaagacggagctgcacactgcaagaatacgatccaattgtggtatgccatcatgatcgcagctgacatgagagtgatcctgactgtgagggcaagtttacagctctctatacactatacctatcgtacagatgtctaacgggcagccca

SEQ ID NO: 31608 - DNA, 401 bp, Gossypium hirsutum
  Clone ID: LIB3048-047-Q1-L1-A4
gttccttcttatttactatgtgtaggatctagaacggagcaagtcctttacagatgatatatattctggttctcaatttaatcgcccatttacttcttcaaggtcatgatcctatggtgcataaccaaatgcctgctggacgtggcgatacacgtggaggggtaggcggaggacgaggagctgtccgaagaacaagaacgacttacactctgacatggctcgatcatcttgcaccagatgtttaagctttgaaccttactccagaacatgattcgatgattcttcaactccattactattcaagatacagcttgtcgcttcttctaccatggaccattctgatctacagtttacattatatgatacatgacctgaatcgtggttaaagactgtaaaatatt

SEQ ID NO: 31609 - DNA, 408 bp, Gossypium hirsutum
  Clone ID: LIB3048-047-Q1-L1-A8
gttcttcagcaaatattatattttgtcagatagagtcgtgttatcctatacaaattctagtaaaggcgatgctgagcagcttagaagaggaacttggtctgctgaagaagactctctcctaattcattatattgctcgccatggcgaaggccactggaatttgctcgcaaaacgagcagggttgaagagaactggaaagagttgcaggctgagatggctaaattatctgaaaccagatgttaagcatggaaaccttactccacaagaagagtgtttgattcttcaactccattccaagtggggtaacaggtaataacttcttttaccatttcccattctgctatttagttgacattatatgatattgatttgtaggtggtcaaagattgcaaaatatttaccaggaag

SEQ ID NO: 31610 - DNA, 248 bp, Gossypium hirsutum
  Clone ID: LIB3048-047-Q1-L1-A9
gtcctctgttacacactaaatgctgacagatagagtcggggagtcctacacgactgctagtcaaggcgctgctaaccatctcaaacaacgaacttagtcttatgaccagcactatggtctacaaaatgatatcgatcctgactgctaaggccagtgtaatgctctcgctctgctataacagttctctagaactataactagctgcccgccgataactgtcgtgaatctgaaagacattgtaaagcaat

SEQ ID NO: 31611 - DNA, 412 bp, Gossypium hirsutum
  Clone ID: LIB3048-047-Q1-L1-B12
ctttacacgctagtttgcctaatctttcttcatatttaacccaatcaacgctgcaatacttttcacacctgaaattttatttgaagcaaaaacaaatcccaaataacacaagctttgtttttgttttgatttctctggtaattagcaatgaataccagcagcaaagaatcgcagcctaattaccccactatctcacctgatgaatataccaaccctttccatcaacagccgcacatggaacctgcagcggccaccgcggcggcacccgcatcaacatcttcgtcggctccttctgcacctactccggaacagtctgagaaatgggggactcatatcatgggaacaccagctgttcccacatgtcatccagacaacaagaaagcagccttgtagggtgctggtgaccaagctc

SEQ ID NO: 31612 - DNA, 406 bp, Gossypium hirsutum
  Clone ID: LIB3048-047-Q1-L1-B8
ggacacccgaatttcatgtacttgaagaaactgtttgggctactattgctaaatgagaaaattagttcattgaactgtgaagtttgccaactgtctaaacacacttgggtcccttatcctttgaaaccttatgttcaatctcaacctttctctttaactcacagcgatctatggggagccagttgagtaaaaaacatcacaggggctaggtggctcataactttcattgatgaccacactagagtacgatgggtctatctgcttaaagaaaaatccgaagtctctagagtcttcagaaattctcattcaatgattcgaactcaggtcaattcaaatattcacacccttagaactgataatgggagagagtactttaattcaatcctaagttcttatctttctgagc

SEQ ID NO: 31613 - DNA, 402 bp, Gossypium hirsutum
  Clone ID: LIB3048-047-Q1-L1-C9
gcggtgcattcattggttaagttgatcaaagaaatggctaaagtgattgagacagaaagaccactagttgggcagtgcctaccactatgggatgatcttagaaccaaagtgaaggattggtgctcaagatttcacattgcagaaggcccagtagagaaagtgattgaaaagcggttcaagaagaactaccacccggcttgggccgctgcatatgtacttgatcctctttatttgatcaaagacatgagtgggaggtaccttcccccattcaaatgcttgacacttgagcaagagaaagatgttgataagctgataactaggcttgtatctagggaagaggctcatattgctcttatggaacttatgaaatggagaacagaaggtcttgatgaagtatatgca

SEQ ID NO: 31614 - DNA, 230 bp, Gossypium hirsutum
  Clone ID: LIB3048-047-Q1-L1-D1
aagactcataaaaatttcactctctccactttaacgcaggttctcagcccctcttctgtctctattctctcctcttttcgtgattttgccccaacgggtcaatttgggggcaaagctaaatctttccttgaaaccctagattaatgtccgcttaaggcatgtccatatcccctctcgcatcttttattgatttattaattggtaaacaagtccagggtattggtcgagag

SEQ ID NO: 31615 - DNA, 339 bp, Gossypium hirsutum
  Clone ID: LIB3048-047-Q1-L1-E8
acatatctttactgtcatccttaaaccatggccccaggcgcaatttctctaattgggaccaatatctcacatcacttttcatcgtctatcatcatcagcacatatataacttttgcgtcacccaatttctcaaattctcattacaatactctaaatcctactggcgtcatagcacccaatctcagtcctgtacaacttctcatcagatgttcgatcttacatggcgaatcgcactctggaagcttgcacatttcctgaaaatgctattcaaacttatcactcacatgctcattaagacacccataatcccttgcttttcaactttgttattgcccagac

SEQ ID NO: 31616 - DNA, 249 bp, Gossypium hirsutum
  Clone ID: LIB3048-047-Q1-L1-F3
gatacactttagagttgtgaggatcttgataataggatgtttaaccacaacgatcgggggtcaagcacaatgaatgggccagatattagcgggaacctcaaagcattgaggaggtcgaggactgcttgagagaccgctcagatgactccttcatgatccgctgaatctatcatcacgatctattcaacgtgctagggtgctgacatactctccactggatctcactctagctatcaggagcccttcatg

SEQ ID NO: 31617 - DNA, 202 bp, Gossypium hirsutum
  Clone ID: LIB3048-047-Q1-L1-F7
gcaaacattaggaaaacgctcagcttaccaaatatagggtaaaaagatgacgctgggattgaaacagcaaatggtaaaataagactatatgtaacttggagaacgaagagaaagcactatatattatagatgcatctaaatacgcgaatgatgcccggttcatctcatatactagctctacgatacttgagaatgatcagga

SEQ ID NO: 31618 - DNA, 307 bp, Gossypium hirsutum
  Clone ID: LIB3048-047-Q1-L1-G3
ctgagttttagccctcaggcatgatggtcaaatgcgaggctacgcatgtgaagtacatgggatgctgcctgatgtatcgaggagatgttgtgcctaatgatgttaatgctgctgatactactattaatacaaagaggactgtgcaggcagctgactggtgcccagctggttccaaatgcaggattaactataattctccaactgtcgctcctacaggagaacacgctaacgagcaatgagcatgttgcatgagtagcaacaagactgcagtggctgatgacgattcacgcaatgaccacaggtttga

SEQ ID NO: 31619 - DNA, 346 bp, Gossypium hirsutum
  Clone ID: LIB3048-047-Q1-L1-G8
gaccaggagagccctaatcatggcttgaggtagctcggctatactgatcgagccgtcatactcgtggatcggaggccagcagacggtacctcaacgctcgggctcatccagtcggttcgccactcgcatagtctgacttacgaggcgtgctggcgctaacactgccgaactcatgacgaaccgccaacgctcttggttcacctgatccgggcatcctggccactgatgaaccgattgctacatgtgggaagagagtatcttctatgggcttagagactactgaacccaagcgtcaggcttacagacggattacgctcacaactcctggcctcttgacaatatatac

SEQ ID NO: 31620 - DNA, 395 bp, Gossypium hirsutum
  Clone ID: LIB3048-047-Q1-L1-H10
ctagactatccgatcccctgcactacttcaattcgacaccacattttcttgttcatgcaatccaagcagatatggcgtgggtcgatcttagatcacgagcttcaaagtttaacaaacagtatcttctgtgcgaaggcactgtgttcaaccatatctgatgattaacatcaatctgtacattgccataccaactacttttatccaagcctctactatattgacagctcacgattaggacggctcgatcgatccatgacttactgaaacctaactcatcatactccgtatgaactgtattaagaactttcacaatattacaaaaactatgatgatggcagctgcctcaaagtttatagcaagtcaaactctagctgagtatcccccaaacctatctc

SEQ ID NO: 31621 - DNA, 306 bp, Gossypium hirsutum
  Clone ID: LIB3048-047-Q1-L1-H2
ttcccaaggtgcaagaaattgtatcagaaatatttggggagtctccaagcaaaggggttaatcctgatgaggcagttgcactttgagcttatatccaatccattatgctataaggtcccctaaatttactgcacctgaactatgtcactaagattaccatgctctactggatctatactactattgaatgacctgattatagaatactacctattgatgacccgattgcgacatgtccaatcctactaaaatctattggattagacattactgaaccctaccagcaggcttacatacagattatga

SEQ ID NO: 31622 - DNA, 352 bp, Gossypium hirsutum
  Clone ID: LIB3048-047-Q1-L1-H9
cttctctcatcttcacttgccttgccttcaaagcttgtgggaatctgggtaaactatactgggtaaataatgacaagctgtatatcgactcactgctgtaattgctcacttggagtgatgaaacacgtttgcatctacaagggcagtatttataaccctgcatgactcatatggtgtggaccatattttcatctcggaggattaagtttctcccagtgtcaagctcaatgctatggtgctacttcctctcagagtctagggagatgtggtcctatctgttccggcgcattcgatgatggagacactgactcgattgatgcttaagcttgggatggacatgacgaagcttcac

SEQ ID NO: 31623 - DNA, 232 bp, Gossypium hirsutum
  Clone ID: LIB3048-048-Q1-L1-A11
attcgacaccatccctatcctataaaacacacctcaactcaccctatagacagattttatcaataagtcgatcacaatcctatataatactaccaaatcaataatacatcatctcatgcaccataaattcacacctaaaattcataataccgctataacattgtacattccagacgtacgctattttaactcaatacacccaatatataccatattttcaaaaattaatctt

SEQ ID NO: 31624 - DNA, 270 bp, Gossypium hirsutum
  Clone ID: LIB3048-048-Q1-L1-A6
ccgcatcttgcaggtttgcgggagccatgattgtggatgggactgagtatcagactaacctgaatccatatacgaagatccacgttatgctgaactgtcatgcccatagtattgtagccgatatggcttaccatgagcacggctcggtggctgatataaccgaccgtgctcttgaaccctctaccatgacggccagatgtgacccaccacacgggaagaacatggcttgctgtcttatgtaccgacgaaatgttgtgcccaaggatgtga

SEQ ID NO: 31625 - DNA, 205 bp, Gossypium hirsutum
  Clone ID: LIB3048-048-Q1-L1-A7
gctgtcgtctctcactgtctcaacaattatcctctttcttgtcactttatccttctcacttgcagcaagcaaataagaaaacaaaatttctgcaaaaacccgaagtttcctctcagaagagaaaaataaaagcgaagctctgcgttttttaatgcatggtctgatttcatcgattaagcaaaaatatatatctgcatctatttcc

SEQ ID NO: 31626 - DNA, 217 bp, Gossypium hirsutum
  Clone ID: LIB3048-048-Q1-L1-A8
gcaagttcaacgaattcaattgtcccgtagagtactaccggtctcctttccttgctgaacagagcaggccgactgccaggtctccgtatatcatcaagacagcccttaagttggatcgaatggattggaatgcatttatgtggaaagatgaccgattgtcggctttaacagcggacattggtggaactacgagaagaccgttcgaggcggatggtac

SEQ ID NO: 31627 - DNA, 138 bp, Gossypium hirsutum
  Clone ID: LIB3048-048-Q1-L1-B5
gggctgcaagctatgcctctggacccgcttaatgaacgtgggagtaacgcataatagatggatggtgtgttatgctcttgtttatggagtaccctatgtgcgagacaacatggtctgcatggatgatatgtacacatg

SEQ ID NO: 31628 - DNA, 257 bp, Gossypium hirsutum
  Clone ID: LIB3048-048-Q1-L1-C10
ccttacgctttcgtcaccccattactgactttaacttatggagagtacttttagtaataatggatgcgaattattaccagtagtagttatactttaccggtaccaatttgtttatgagttttttaccgtctcaagagtgaaatgcatcttttcaccggcggtcgggatgctatccctcaacacgtggcgccatttcctgatttaacgacgattattgcacccgcggaggacttgatgattactgatcatcgacctac

SEQ ID NO: 31629 - DNA, 240 bp, Gossypium hirsutum
  Clone ID: LIB3048-048-Q1-L1-C2
gcctatcgataccggagagcagaaggtgaggccatagaggggagtaagagtctatttagttctgatgaaatgcactggccgtaggacaacatcgtggcgactggtaaaaatcctgctgaacccaactaactcgcgtagaaactcgtcgccctaaagccaaatggaggggtcgaaaccactacaggatggactgatcgcaattacggatgggataattgtacgggaccgactcttcaggac

SEQ ID NO: 31630 - DNA, 339 bp, Gossypium hirsutum
  Clone ID: LIB3048-048-Q1-L1-C4
gaatcacattagccgggtggggcagtccatgacagctaggggactgacatttagattcctgcctcttgtatgagtgataagagtgacgacatgaaaccgaatcctgtactggatgattgacctgaaccgttgggaaagactgacgctgcatccgggttaaacgaagctattggggctatcatagtacgacgtgacacatgttagctattacatgcccttactggtacacttcttcaccacacatgagaagcccactggcggatctcggtaataaggaccgtgggtagggttaaccagaaagacatgactagctacagcctcatgcaaagggcttcaaga

SEQ ID NO: 31631 - DNA, 266 bp, Gossypium hirsutum
  Clone ID: LIB3048-048-Q1-L1-D4
atccgtttcattttccgtcttttacttagttgctcttcggcgattgctaccatgggaacggaaggttacgatgacggaggcgtatattatgtcgactgctgaacttcatctcatcctttaaatcttaggaaggacgatattcaacttcgactggaatgccctgtgagtactactgcccttgcactgtatcgtacaggactggacatatactgtactggcagcgaggatgctaggatctcacgaccttcggaaggaaccatttctat

SEQ ID NO: 31632 - DNA, 304 bp, Gossypium hirsutum
  Clone ID: LIB3048-048-Q1-L1-D7
ctcgaatcttggttctttatattttcctaatgagatgagcggattctatgagacgattttagagttaggttcatgactggcatttgtgattgatgttgtgctttaacgtgactttgatcatgggtggaacggcaaatgggttggatacaatgagcatttttgctatgatgctctgtgaattgttacagtagttagctatgcggcgacatttggctcatcgggacttctcttgcactggctcactccatctggacaggattgtcgactcaataccttacttaacgtgatgaccttgatccttgcc

SEQ ID NO: 31633 - DNA, 277 bp, Gossypium hirsutum
  Clone ID: LIB3048-048-Q1-L1-E1
gtcaagggctaaaacaacggctgccaagttaggaaagggtttgtctaaggatgaaaatgctcaaaaactagcacttcaacattggcttgaagctattgatccacgccatcgttacgtacacaatttgcacttttactatgatgtttggtctgcaagcaagagctcacaacctttcttctactggttatgtacttttgtaaaactaaactccaaagttacataagtgaaagctactctttttcacccttatgttctgatatttgaaattcattttcta

SEQ ID NO: 31634 - DNA, 350 bp, Gossypium hirsutum
  Clone ID: LIB3048-048-Q1-L1-F1
gctgcatctgcttcagtacatggaagaagtgctgctgcaggaaaagctgcatcaagtgataaaactgctgctcgaattgctatgcacatggctggagagagggcacctgtgaatgctaagatggtgaagagccgttttacaactggtgctgcttcacgatcctttacttctacctcctatgatcctgttaccaaaaatgaatttgagtatgttaaagttgagaaaaatcctaaaaagaaaggttacgttcagctgcatacaacacatggtgatttgaacattgagttgcactgtgatattactccaaggacatgtgagaacttcctcactctttgtgatcaaggctatta

SEQ ID NO: 31635 - DNA, 355 bp, Gossypium hirsutum
  Clone ID: LIB3048-048-Q1-L1-F5
gctgtcgtctctcactgtctcaacaattatcctctttcttgtcactttttccttctcacttgcagcaagcaaataagaaaacaaaatttcttcaaaaacccgaagtttcctctcagaagagaaaaataaaagcgaagctttgggttttttaatgcatggtctgttttcattgattaatcaaaaatatatatttggttctatttccgggttttaagggaaattctaccattgttgccaactcaattgacttttaatatcgtcaagagtgaaaggtgtttgtttgttaggtggggagatgacgctagagtctttacctgggagttcaagggatctggaattgttttcagagagacca

SEQ ID NO: 31636 - DNA, 233 bp, Gossypium hirsutum
  Clone ID: LIB3048-048-Q1-L1-F7
gatggccactttcacacgaacgaatataaccacatttttggagggtattccacctggagccttcaaaagctctgatgaaacaaaggcatggatgaataccctgaactcacccacgctagattcgatggggaaagatgggacacacgtgaagcgccatggtgtgcgacttctgatgcttgcagcaacagatctacttctaggtcgatgattaggcagacggtataccgtcaatg

SEQ ID NO: 31637 - DNA, 238 bp, Gossypium hirsutum
  Clone ID: LIB3048-048-Q1-L1-G11
gataacacttgtctcgacatgctcgtctgctgagacagggtttgcaattgggaattagatggggaggcatcacattcataagcttccttatttacaatcatcctacaacaatatcgaccatagtgtctcatattactcagctctttaatttccggatgaaccgcctactctgtcgacgcctatcatgatcaagccaccgtcaccgaatggttctatttcgtttctatgactctatcta

SEQ ID NO: 31638 - DNA, 270 bp, Gossypium hirsutum
  Clone ID: LIB3048-048-Q1-L1-G12
gcataatccagcgatgccttgaatgaatttactgcctagtgtggcaacaaaaaaggatttggagagcaagtaccttctaaaccataagatcttaagattgccgatcgaaatagttctgaataggttaacttaggtctcaagccctcatttgaaatatatcttgcttgtgctgacattgcaaaggatctactgacatttgctcctgaacctaatggttatctccatatacggcactctaaagcagccttattaaatcaatactatgttcaa

SEQ ID NO: 31639 - DNA, 295 bp, Gossypium hirsutum
  Clone ID: LIB3048-048-Q1-L1-G4
actaagtgcaaccaagagagggagtccatcatcggcaccaaatacagtcagatcctccgagtgcctttcaggactgaaaccggtatcctacgccgatgggtttcgcgtttcgacatttatccttatctcgagacgtttgctcaggatgttacatccaagatcttggatgcaatggagggtaaaccagaccttattattggaaactacactgatgggaacttagtatcatctctagtagctagcaaacttgggataacacaggctacgattgcgcatgctttagagaaaaccaaat

SEQ ID NO: 31640 - DNA, 366 bp, Gossypium hirsutum
  Clone ID: LIB3048-048-Q1-L1-G7
gctacaagctaccaagggaagcccaatatcttcggtcttgagtactcccgaatccattgcgcggcttttatgacctacggcaatggctaccaaagctgattcttgcaaacaatcatttatccctagcttgctacactcgcctacgacgaactaattctcactggatcggcatcctgaacgccaacagcactgctttatctgcttcgagcttgactatacccgaagctcctgcggactatttctcgacattgatcaaggccagaactttcatgatcccgttccacaaagagcccgggacgaagatcgagacgtatatcccttaggtctacgctgcttgtaccattggcggtgtccatagatgggggc

SEQ ID NO: 31641 - DNA, 298 bp, Gossypium hirsutum
  Clone ID: LIB3048-048-Q1-L1-G8
actacatgttcctgttcatgcaatggaatcatctatggcgggttcggatctagagcaatcacgccaaagatgaacaggtgtatcttcatgcgaaggcactggtgcaaccatgtctgatgatcataactaagttctagatagtgataccagcttgtcagatggaagtttgcatgggatcgacagcatgaggtttggaccggtcgctccattcaagactgctagatctctaatggagcgtgttacgcaatagctgaagcacaagctgaaacagtgcttcatagagaaaattgaggacatt

SEQ ID NO: 31642 - DNA, 376 bp, Gossypium hirsutum
  Clone ID: LIB3048-048-Q1-L1-H1
gccagttccaagcattcaggagattatgagaagcgattctgaatcagttccccaaagatacattcatgaaaataaggataggccaattatttccgaggatttggctgattctcctgaaattcccgtcatagatttctcatttctagccaaaggtaatgaagatgaagtccagaaactacaccttgcttgcaaggactggggctttttccaggtaataaatcatggggtgaaagaggagatcctggagaagatgaaagcagcggtagcagctttctttgagctgccattccaagagaaaaagaaatatgcaaagggcagaaaatgaaatagaaagatatggtcaaaacttttgtggtctctgagcaccaaaagcttg

SEQ ID NO: 31643 - DNA, 131 bp, Gossypium hirsutum
  Clone ID: LIB3048-048-Q1-L1-H12
aggcgttcaatgctactgaagaaaaagttttacatttggggaagcaatcattgcccgtaagggcttaaattgcttcaattggatcatgttgccttgatggggcgatattcaacgaagtgttgtatgttgcg

SEQ ID NO: 31644 - DNA, 277 bp, Gossypium hirsutum
  Clone ID: LIB3048-048-Q1-L1-H6
tgcggaggaattaaggactgaacttgatgctagtaagttgctggctgacaaaaggaagcaggaactagatatggagaagaaatgtgcagaagaattgaaggaagcaatgcagatggctatggcgggacatgcaagaatgcttgaacagtatgctgatcttgaggaaaaacacatgcaattgcttgcaaggcataggaatattcaagagggaatagatgatgttaaaaaggcagctgctatggcaagggtcaagggtgctgaatccaagttcataaat

SEQ ID NO: 31645 - DNA, 138 bp, Gossypium hirsutum
  Clone ID: LIB3048-049-Q1-L1-A1
acacatttgacactttgactataaacatgtacctgtgacacaattctacctttgattaggcataatccataccaacttccatgccttcacgaatttcataccttatgaacagtacaaacaattatacaccactgacac

SEQ ID NO: 31646 - DNA, 340 bp, Gossypium hirsutum
  Clone ID: LIB3048-049-Q1-L1-A11
atgcaaagaatgttcggatagttaaattccatgggtccgtactttgcttgtgtctccaagctttgtaagaataacatatatttgctaaatcacaatgcatttcttctgtaatccactgctaaattactatgatttgtatcacatggcctgtcttacagcaaatgaactccaaagtatttgaaccattaatggtaaccaaatatgtacatatctagtgatggtatactatgcgactgaacttacaacggcatgtcttttgtcaattcattgacattgcctttacaatcttcccattcaagatgccattctcaagatatatctcttttcttggcttcaacta

SEQ ID NO: 31647 - DNA, 199 bp, Gossypium hirsutum
  Clone ID: LIB3048-049-Q1-L1-A7
aaacgtttcattgcttcctactatatatagatctctgtcacatctctgcccattgatgccacatctcccaataccatgctatgactcctcgtcactctttaccattgatatatcactactgtttacttctaaagaatcatctccactataccatctccaagatcatcaccaatcatatccgagtgattctaatccatta

SEQ ID NO: 31648 - DNA, 307 bp, Gossypium hirsutum
  Clone ID: LIB3048-049-Q1-L1-B3
gacggattgaatccttttaaaatcatgagcacctcggacagtacttggcctgtggttcttgttccttataatcagtctccatggctctgcatgaagcaatcttctttgatattatctatgattatccctggagagaaaggccccgtaaatgatattgacatatatctgcagccacttattgaagagttaaaacaattatgggcgggtattgagacgtatgatgtattgagaaaggataacttttacctacgtgctgctttgctgtggacaattaatgatttcccgacatatgcgaatttatctggtt

SEQ ID NO: 31649 - DNA, 298 bp, Gossypium hirsutum
  Clone ID: LIB3048-049-Q1-L1-B4
ataggattgaaactgctagctaaggcacgatactctgtggcaagattcaaagaggaacagattgtaatcttatcacaggtcttggcaaatgaagtgaacattggatatgaggacatgagcaaccagcaggttttgaagtttaatggaactcgaataaaaaacattcgtcacctggcacaccttgttgcttgttgccaagacaagtatctggttttcgaatttgaagacaattacctagctgttctggaaagggaagcagcaatggccacctcatctagcattctcaaagattacggta

SEQ ID NO: 31650 - DNA, 283 bp, Gossypium hirsutum
  Clone ID: LIB3048-049-Q1-L1-C3
gaaagataaaatcccatagtaaaacataagatggagggagatccacgaatgaatgaatctcttagctctattacaagcaagggaactcaacaaactgatactggtctcacaaattcccttctcatcatcaaaccctaacctctctgtggaaagccgaattaatggcttcacgtcggcttctttgttaccttcttcgttcaacttttggccgatctggggctaaaccttcaaactctaacccttgtctatgatctcctatcactgggccctgtggtaaagctac

SEQ ID NO: 31651 - DNA, 226 bp, Gossypium hirsutum
  Clone ID: LIB3048-049-Q1-L1-C5
ggagtgctttacacatgggtgaattacgggaaaggggggaaaccgagatggttcgttttgcatgactgaattacatcatattatacaatccacagtcctgataaaatcgtcgttagccaagatacggaaagacgatccaatgttatcggcgaaaaatctcttccgcttatctccgacattgcaattccatatctcgtcatttccaaaaccgtctggaaccctttgg

SEQ ID NO: 31652 - DNA, 355 bp, Gossypium hirsutum
  Clone ID: LIB3048-049-Q1-L1-D11
gctgacttgttaggttatagtgattaacagtctacccagggttcactgttgtatggctggtttaccagaaaaatcatatgcggaatactagcgacttctcgtgatgaagttaaatacccaattaaagttccttgtcacaaatttaaggttgataataagttgcccaaaattcttaatggtgggaattcaaactaattaaaaggtgaattttctgcgtgcttaaaaaagaatttgaatgttgaacaaaaccttgggcatgctaatgctaagaaaaagttgcacaatgtgttccattttcctgacgacatatcaatgcacgaagaaacctcattatcttggcctctttggtttcatg

SEQ ID NO: 31653 - DNA, 252 bp, Gossypium hirsutum
  Clone ID: LIB3048-049-Q1-L1-E2
cttcattgtcttaattgagaactaatatctaaactgggctaatgtttaaacctggatttagggaactcaaagttttggtctaaaagtttcttgtttgaatcttctgattcatatcatgagtccttattatatatctacaattacactgttatctaaatggaaaactcaacgaacaggagaagccatgaataatgtattgtagatgcaacctatattacagaaacgaagaaacctttgttaccagctttggca

SEQ ID NO: 31654 - DNA, 206 bp, Gossypium hirsutum
  Clone ID: LIB3048-049-Q1-L1-E4
gccaatttcctcattatcttgctatttataaagtcagttctctaaataatcactgggttatatttcccacgatctgattcgaaaactttctttaaaatccttgccttttttctaaaagctaccaattaattttcctttcatgttaccttattatcttgatcaaacggtcctggcaatacaagctaggtcatctttcaatcccttac

SEQ ID NO: 31655 - DNA, 329 bp, Gossypium hirsutum
  unsure (1)..(329): unsure at all n locations
  Clone ID: LIB3048-049-Q1-L1-F10
cctttaggttggagcacctggtaatggtnngtgaaattcaaagatataggtgagtacctannggattttacgtagnagaatcaatttgtatcggggtgtgttggtcacttannttttgcatgttaggggccagannataaaaaaaaatgaaattatgnnngtgttgaccaatggtcggcaaaggggtgccctgtaacttatcctgaaccatttgaagggtgcaagaatgtaaaaaaaagccactttttntgaagtaaattataggttgaatatgtaaaaatttgtgcccttcttaaatcaaaggggggcctttttcgctttctataccc

SEQ ID NO: 31656 - DNA, 226 bp, Gossypium hirsutum
  Clone ID: LIB3048-049-Q1-L1-F4
cgagcattatgattggctatccgtccacgccacgagttcgagcgtactgtgtgattcagctagaatcatctataagttactgtcatggtcgttatacgtatcacaatgctttctgtctcaatacttcatcaagtgaacctaaaaggacaatagtgttcctagaataagatgcatgcgttggtttactgtatgcgtggaccttgcaccatatgttagaaccctttaa

SEQ ID NO: 31657 - DNA, 188 bp, Gossypium hirsutum
  Clone ID: LIB3048-049-Q1-L1-G1
aaacaccttcttcattagttcattaccattctatgaggaatccatggagttccttataaccctgttatgcttatatgattttaatggttcatgtagactttgtggcatctgatatgattctcgaatatccgccgaaagacttgagctcgtacttgatagcctcttcgactaatagatgggatgcagta

SEQ ID NO: 31658 - DNA, 323 bp, Gossypium hirsutum
  unsure (1)..(323): unsure at all n locations
  Clone ID: LIB3048-049-Q1-L1-G12
gggtggggcggtaggcaccannngtggcaagggcttattggctgttgaggattctcggggccgagggttagagcnnccgatagggccttaaatgctgnnagttttggatggggaaccactatgacttttcggggccannagttttttgggcttggatggcttanntggagaaggggtcaaaatggtggnngtttaaaagaaagtggatnnntcggaagaaatttccgaatgtnnngcttggtcatttaagggttttgnnngaaaaatgngnngggcccnnngatcttcncnnttttcttctttcaaagggtacctttttcagt

SEQ ID NO: 31659 - DNA, 264 bp, Gossypium hirsutum
  Clone ID: LIB3048-049-Q1-L1-G4
gccaaattcttcaccttttaaagccttcaaactttgcgaaagaagccatggaaaggcttctttactcctcttctacaacttcctttgaaaacctctcgaagtccttttcctttactgtctcaactcgccaaattcactcttctaatcttggcctaagtccttcgcttaattactcccaaactaatccaatgaattttaatttcatgcaaggccaaatttaacccatctaacttctcttatcctctatccaatcccagcattgat

SEQ ID NO: 31660 - DNA, 285 bp, Gossypium hirsutum
  Clone ID: LIB3048-049-Q1-L1-G5
aaacatttttgtcattggtccataaccatttcatgagcaaactatgtaaatactgaaaaccttggattgtgaatgggacattaatgggattagaaggcatcttgtcagctccaatgattacagaagcatcgccgatagactagttctccttgtcgatagcctatctggaaaaaatatgcttgttttaaacttcgctaaaagacagactgctaaatccaatgtctctgccatacgtgcaacgttgttgctgacaaacattggctgtgaatgatgactctctaaagt

SEQ ID NO: 31661 - DNA, 223 bp, Gossypium hirsutum
  Clone ID: LIB3048-049-Q1-L1-H11
caaccggtccatcctccttcctgaattaattactaacaaattaccttttttttatttctcatccatacattatctaggcagattacaaaaattattcggatccattacaaaataatccatctcattcaatattccaacaatactttacttattaaaattaaactccctcttacaaaataacttttcacaatcataattccttactcatacattttccactcac

SEQ ID NO: 31662 - DNA, 202 bp, Gossypium hirsutum
  Clone ID: LIB3048-049-Q1-L1-H12
gttcattcctctcctttcttttccagatctctcgtgggcgccaaccatacctgcgctcgcttctgctctcggtaatctttcaacgatttctccgagctttttttattggtgaacaaaaatcacacttggaccggtacaactcaaaccgaggaagaaaggcatctttttttttttaaatttggtttgaaattggtggtatcat

SEQ ID NO: 31663 - DNA, 268 bp, Gossypium hirsutum
  Clone ID: LIB3048-049-Q1-L1-H2
cactgtttttgttgatagcaaaaaagctaaacaaagggatgaatgtcatggatagatactcttcgtctgtaagacgggaatgagctgatcgacaatgacttttttattgcatgtacccttggtagctgcattaaatggtttcaaacatactctctagatcgctatgatatcatggatgactctgacacacgcataggtcatgcatgttaggtcacacttccttactttgggatgattgctattactgatgcattaagactgcgaatcc

SEQ ID NO: 31664 - DNA, 234 bp, Gossypium hirsutum
  Clone ID: LIB3048-049-Q1-L1-H4
cacttctgtggctctctttatctctctcttcccagaggaattatttcaatgtctgcgatctcttatcatctatccgatgaatgcataactcaataaaaatcttcacaagttttctcaaatttcacatctaaaccatatacgtacactctcacttccccggaacttatcctaagagagatcaagagaaaagacttacatcaatcgacaaagacaatgatcacaattccgtatttg

SEQ ID NO: 31665 - DNA, 251 bp, Gossypium hirsutum
  Clone ID: LIB3048-049-Q1-L1-H8
gtcatcttggacaccacttatttatccaaagcagaggggatgagttcatcaattggcaactactagcttgtccagcggataatacatatgcaacaacagtgcttattcctgacagggcaagtgtaaagattcaccatattccaattctgagcgatcatcctgctgtctctgagcgggaacacaggccattcataagtactggataccatgtcactgaagacgcatagcacttcattaatcctgaatgcggt

SEQ ID NO: 31666 - DNA, 271 bp, Gossypium hirsutum
  Clone ID: LIB3048-050-Q1-L1-A3
cttgttttgcgctaccttgctgtatgagagccccctagggcggatagtcatcagataggtgctgaactagcttataatgataaccagtgatctccaaaggacttggcatcgatatcagggccgcttttatacatactacgtatatcatgatgtgtcatacaggacaagacatgatgccattgctacaactgccatccttccatggaagactggatctgctgtaaatcctctgtctccggcaacatacttgtccaaaactgcacaacaaaaa

SEQ ID NO: 31667 - DNA, 407 bp, Gossypium hirsutum
  Clone ID: LIB3048-050-Q1-L1-A8
ctggaatgttgttgaatatgtggatttttcaggaagggatttctcaagtgcaattccggacaaagtttgtgatcggaataatgatttgagatatcttgcctttagtggcaatctactggcagggattctaccacgatctttgattaattgcggtgaactggtagtttttaatgttgtagacaacaagttaagtgatacttttccccattggctaagcatgcttccaaaacttcgagtccttattttgagatccaacagatttcacggttcgattcaaagttcgataccaacatctttcttctccaaattgcaaatcattgatctctctcataatcacttcacttgcctattgccaactcagttcttccaaaatctcaaggcttctgaaaaaagttgaataccgaaat

SEQ ID NO: 31668 - DNA, 379 bp, Gossypium hirsutum
  Clone ID: LIB3048-050-Q1-L1-B10
gacaacccttgctgttcttcccactgtttggctcagagacctcagtgtccttagttatatctctgctggtggagttgttgcatcattcttggtagtgttgtgcttgttttgggttggattggtagatcaagttgggtttcagaacaaagggacagtattgaatctttctacacttccagttgctgttggactttatggtttctgctactcaggccatgctgttttcccgaatatatatacttcaatggcagaaccaagaaaattctcttcagttctcttatcatgtttcggaatctgttctttgttgtatgctggaacagcagttatggggtacaaaatgtttggagaagcaacagaatcacagtttacacttaacatg

SEQ ID NO: 31669 - DNA, 375 bp, Gossypium hirsutum
  Clone ID: LIB3048-050-Q1-L1-B12
gttgtatacaaaggaacgcttgcagatggtactttggtggctgtgaaacagatccttgatttggatttggaaagccacgaagatttctcgaatgaagtccagatcataagcaaaatcagacaccggaaccttctttcgctccgaagttgttgtgttacgagtgacataatgaaaggcagaagaagatatctggtctatgatttcatgtcaaatggcagccttggtgaccatctattcaatgatttcactaggcaaaaactgagctggcctcaacggaagaacataattcttgatgtagcccagggtctagcttacttacactatggaatcaaaccatcgatttatcatcgagacataaaagccaccaacatacta

SEQ ID NO: 31670 - DNA, 366 bp, Gossypium hirsutum
  unsure (1)..(366): unsure at all n locations
  Clone ID: LIB3048-050-Q1-L1-B7
accaagctaggttgaaccacctgtaatgtgtgaaattcaagatgtatgattcctaggattttactaaaaatcaattggtatggtggtggtggtcactattttgcatgttaggccagattaaaaaaaaatgaattatggtgttgacaatgtcggcaagggtgctgtaactacctgaaccatttgaggtgcaagatgtaaaaaaaagcactattttgagtaaattaatgtgaatatgtaaatttgtgcttcttaaatcaaggnggctttttcgcttctatacaaaaaagtgtgcctaagacttggcttgtgcttaatcaattgaaaggatggcataaagaaatgcataacatgtgacaacccaacatg

SEQ ID NO: 31671 - DNA, 215 bp, Gossypium hirsutum
  Clone ID: LIB3048-050-Q1-L1-C5
gaaacgagtagtcggggatcctttcaagaccgggatcggacaaaggcctcaaattggtaatgaaccattcaagaagaaccttaagtacctaaaggctggccttgaaaggggggcctactttggaatctgaagtgaacaatttggctcccaaagctactatattccacccactgttttctccaatggtcaagatgacctgttgatagctaaggatg

SEQ ID NO: 31672 - DNA, 243 bp, Gossypium hirsutum
  Clone ID: LIB3048-050-Q1-L1-E1
gatcgttggttataaatgactgctatgagtactatataggaggggtcgtagatgagcctatcttttatgtgcacaaatgcaaaactgggaatctgaataaggtcatccaacaaccattttttcctggtaaaatggatttcttaccaaagaggaaaccctctgacgatattaacattgaacaccagatctacacttgtgaggtcctccaatggccctataggggactccaaattgggttttatg

SEQ ID NO: 31673 - DNA, 137 bp, Gossypium hirsutum
  Clone ID: LIB3048-050-Q1-L1-E7
ccccagcaaagatcagtacatacacgaatggtccctttggcaccttaaaaaagggaaaacccaaatttgaaggtcaaagtccgtttgaatttccatggaatggggcttggggactaagttcaccttttggaaaagga

SEQ ID NO: 31674 - DNA, 140 bp, Gossypium hirsutum
  Clone ID: LIB3048-050-Q1-L1-E9
ctacatttttcttctttatatcaaaaaatggctattgcgcaagtttttaaattaactgaagatcataagatacactgggcataactatacaactcattgattctactagcttcatcgattgttcaaattacatgcacttt

SEQ ID NO: 31675 - DNA, 403 bp, Gossypium hirsutum
  Clone ID: LIB3048-050-Q1-L1-F3
ctgacagctctctctttattcgacgatcgggagggcaccttgtctatgtactagtctacgttgatgatattatcatcacgggtactgactctgttgctattgataggtttgtcaaagatctagatattcacttctccttgaaagatttgggacggctgaattattttcttggtatcgaagttacgtcaacattacatggtgtctctttgagtcagaagaaatacatcttggagttacttcagaaagcttccatggacaagtccaaggcttctcctactccaatgatgaccacttgtagaatttctgctcatgaagggactccgatggaagatgaacacttgttcaggagcattgtcggtgccttacaatatgtggtcataactagaccagacattgctttttc

SEQ ID NO: 31676 - DNA, 352 bp, Gossypium hirsutum
  unsure (1)..(352): unsure at all n locations
  Clone ID: LIB3048-050-Q1-L1-G7
cagaaatccaaaggccaccttgcttccggaaatgccgggggtactttcgaaatgtcccgcgtttatactccgggggcaattaatcaatccagttttttggaacttatttggatcacgctaatatcggcttccatcagcccatcgtcgggagcctacgcttctctgctcgtgtgaattcgagacaatgaatggatcggtaagaaatagccacgcttcgatatcacatgacgctagcgtacgctcgtgaattagcttctcgactttggacacgagaatgtatcgcattagagatgtcattccttcgctttgcngagagatttaatgatgtctacatgccttggaactcatggat

SEQ ID NO: 31677 - DNA, 193 bp, Gossypium hirsutum
  Clone ID: LIB3048-050-Q1-L1-G8
aaaaaaatgggattcaataaatatgattcaatttttgataaataaaaatattgtttgtatgtttaacaacaaaaagaatgaacaaattataatcatcaaatcaaggaacaatattgggagttttcattttttaatccatgaattgaacgacgttttcgagtttcggaacccgacaaatccatgttctttgctc

SEQ ID NO: 31678 - DNA, 224 bp, Gossypium hirsutum
  Clone ID: LIB3048-050-Q1-L1-H3
cagaatttgttctgcctatatcaaccaacgctttcttggggggactctgtccaccaagcgacttggttacgaccgaaacaggttcgagcatcttgcatgaattaacttcgccctgaaagtggactgcttagcttggtcttacatagcgattaagctttgatccagtataagcattggcggagctcccttgtggacttatcggactgttggaatcacaaatacaa

SEQ ID NO: 31679 - DNA, 107 bp, Gossypium hirsutum
  Clone ID: LIB3048-050-Q1-L1-H6
ccggacggtccatacgcatggggatattgctatggtcaggaacagagcgaccccggtgaaaaatattttgggcgcggtcctatttagaactcatacaactacaacta

SEQ ID NO: 31680 - DNA, 248 bp, Gossypium hirsutum
  Clone ID: LIB3048-050-Q1-L1-H7
gccaaatcatcttatatccttttcagatatattgcgcgggaacaagtaccagttcagtatggttgattgagcagggaccgtattcaagaattatccggctgcgattctgcatcaaaattggcaattataccagctgccattctcaatgacgaatttcttgtaactgaggaaagtacagtgttttttaaagaactatttttgttctggatcacatcacactcaccttaacctttttggcacgatgtcat

SEQ ID NO: 31681 - DNA, 148 bp, Gossypium hirsutum
  Clone ID: LIB3048-051-Q1-L1-A10
tattggatgaccatagccaactcgaatcaggtccggtgagcttatatgaatcggggcctcacggtacatatgttggaatttacgatggtcatggtggtccggctactgttaggtttatttctgaacaccttttctgatttatcatgta

SEQ ID NO: 31682 - DNA, 260 bp, Gossypium hirsutum
  Clone ID: LIB3048-051-Q1-L1-A3
gcgaatccacccggcggccggaatgcagcacgagcgaggcggcagcaacgcgcctggtagaaaaccaaaccaaggagggacccaaagaaccaggccacagaaacatgaccacaaccaggacggatggctaccagctcatgcgagtgcaaacgcaaaccaaaggcaagaggacagaacagccacagagctgcgcagcagatacgcgaactgcaccaacgcaagacaagcgaagcccgaccatacaagcgaaactgaccgac

SEQ ID NO: 31683 - DNA, 140 bp, Gossypium hirsutum
  Clone ID: LIB3048-051-Q1-L1-A7
actgacagaagccaaaggtcaaatactaaagatgcagaggcgacttactctgaaacaagctacatcatcatccttctccagttccggctcttcacttgctcattcccttgcgaacacaacctacatgtaagtcgacagct

SEQ ID NO: 31684 - DNA, 112 bp, Gossypium hirsutum
  Clone ID: LIB3048-051-Q1-L1-A9
gattaaacaatttttcagatagacatcctatggggacagcatctcagacagggatggactacaaggagccaccagcatcactcttctttgagcctggactactcaaatcatg

SEQ ID NO: 31685 - DNA, 252 bp, Gossypium hirsutum
  Clone ID: LIB3048-051-Q1-L1-B1
gcggacacaaacgctaggtcaagacctgaagaagcagaggcaatattctcccgtgaactccaagaacaattatatcacgaggtctcaatatatagcaacactgagactgatgaaaacaatcgccggtctcttcaccaggagagcgacacattccccagtcctagtattcgcatcatcgaaccaccgacataaccaatccacgactcaccgaagagcctactgataactttaaagaatgttgtgcgacatacc

SEQ ID NO: 31686 - DNA, 146 bp, Gossypium hirsutum
  Clone ID: LIB3048-051-Q1-L1-B10
gctttacacataagcatcatgacctatctcatgtggctttaaaccaacaaattggtcttactatctcaatctactactcaattacctactacatatatacccttcaccacacctgacacccttaacttctttactttcaacattaa

SEQ ID NO: 31687 - DNA, 295 bp, Gossypium hirsutum
  Clone ID: LIB3048-051-Q1-L1-B3
accctagtacaggctctctcgcgaatgacacatgggtggtacaagcagatgctgctgcgcgaaaggctcgctcatcatcgcccacaaactcaaacaaggagactgcgtacgtcccgactcaggaataaagtagccacaggctacttaaactccaagtctcgcaagcactctatcatattctcaactccagaacggctgactaccatatgccaacaactgcgaatgccatgcccacactgggcatcacatgggctctgcacagtctatgttataagcccaagtatagtgtcactag

SEQ ID NO: 31688 - DNA, 211 bp, Gossypium hirsutum
  Clone ID: LIB3048-051-Q1-L1-B5
cgaggaatctgatgctagggcaagacaggaggacacagggaagtataggcccatgaactgcaacaacaagtatatcatgagggctcaatatacggcaacaaggagactgatgaaatacatactgaggactcttcaacccgaggaagatacatacccaagtccttatacatctgaatcaaatgctcaacgaatagacaggctgacctctcat

SEQ ID NO: 31689 - DNA, 184 bp, Gossypium hirsutum
  Clone ID: LIB3048-051-Q1-L1-C10
aattaactggcttttgtcagtagaaaaaccttcgggcgggtataattgttgggctgtggttagagaaatatactgtctttttaaggggttcttataatttaataatggtattgcatgaacatttttggtccagttgataactcttgtatttacgcttttgattaggatactggatttcatggtt

SEQ ID NO: 31690 - DNA, 249 bp, Gossypium hirsutum
  Clone ID: LIB3048-051-Q1-L1-D3
acgcgcgagccgcatctttcaggcttgatggatccctgtatgtggaggtgactgagtaccagactaaccagttcccatatcccaagatccacttaatgctcacatcttatgcccatgccattttagctgatatggcttaccacgagcagctatcggtcgctgacataaccaacagtgctttcgaaccctagtcaatgatgtccaaatgtgacccacgacacgtgttgtacatgacttgctgccttatgt

SEQ ID NO: 31691 - DNA, 405 bp, Gossypium hirsutum
  Clone ID: LIB3048-051-Q1-L1-D6
ctttttcgggttaacaaaaatgatggagagatggttacatctgctgaagaggcaatagttttgcagaagaagaagtctgcgcttaatcgcttttattggaatttatcacagccaaccaaaaattcaacttcatctgatgttgataataaagaattgaagagaggtgttcaagaaacaatagtggtttcaaaatctccgtctcaattggaagtagctcttggagttataaagagctattgcaaggctcatttaagaaaagagggtatgttggcagctacaaagcagctacaatttctggagagcatgaggaaggagtatcgacattgcaaggctcttatgcattgctcaagcacaagttttgaatgcacatgacgaaatcaagatggcaacgactcgattgcacat

SEQ ID NO: 31692 - DNA, 230 bp, Gossypium hirsutum
  Clone ID: LIB3048-051-Q1-L1-E11
cgaaaattaaaagtagtcatcatctttagatcagggacgcataaaatgtattggacggttgttgaataagatattaaaaggtttaaataagaaatgagttgctgttttttgactatcattgatatagtcaaatttgatgatatggatctttctgcatttagtgatttatggtataggtctgtatctattgtgttttttatcagtttgttattctgaatgtgtaattgtat

SEQ ID NO: 31693 - DNA, 226 bp, Gossypium hirsutum
  unsure (1)..(226): unsure at all n locations
  Clone ID: LIB3048-051-Q1-L1-F12
tgaggaaaacctacttcagggacgattgctatctagccaagaagntgggttgggtcttcccagtgtgaatctcttgaaatacctttgcttgggactaaaggaagggtcttagcacacttcagactcatggatgcttggattctgatggtggaaaggatgggacttcagcttgttcgcgccagttgtgattcgtgcttacttgtgccttgtgttcaaccttgatcta

SEQ ID NO: 31694 - DNA, 162 bp, Gossypium hirsutum
  unsure (1)..(162): unsure at all n locations
  Clone ID: LIB3048-051-Q1-L1-F7
tgagacgtgaatgnnttctctgcttctgtacattacttggnngaagctgtggtgatgttggcatgaggcgttaattgctaatgatgatgaccgtgttataggcattattgtcaactaccagtcttctcattgaaatatattatgtgcgttatgggaaatagc

SEQ ID NO: 31695 - DNA, 221 bp, Gossypium hirsutum
  Clone ID: LIB3048-051-Q1-L1-G11
ggttcgaactcaagaccataaccgatggtcttccgctggatcatcccagatcagggaattggttccttgagacgtatgaagaagccattaaaatgaaaatcaagcagaggtttagagagatgttgatgaatagcaatccaccggtggattgtgtaattgcagatgggttgtctgggtaatccattgatgttgcgattgtgctttggatgcacatcttagga

SEQ ID NO: 31696 - DNA, 320 bp, Gossypium hirsutum
  Clone ID: LIB3048-051-Q1-L1-G9
atttagcctaataaaacatttccttagaccatatgtcgagttatactaaatgggttgatcatgtttgtctatgctttactcgctgtatcattcattgagtgattgtcctaccttttactgcttgatgctgaaatctggtaccaaaaaggcaagaatgatccagcgtttggttctaccaatgctttcaatttaaaaacattttatcatataacaccgttcactatccattgacaatcgaacaactgttttactcgggatgcacacatttaagctctgtttgaattctgttgtggatacttcatcagcttgcaaactctttt

SEQ ID NO: 31697 - DNA, 370 bp, Gossypium hirsutum
  Clone ID: LIB3048-051-Q1-L1-H4
ggaaagttgttggctgggccctaagccatcagtttatgcattcttctggagtattgttgaaagatgctaaacttgtagtttcaactgaaagcattaagtatggtctggacattttgcaaggcattcaaaatgaaagcaaaactttgaagaaatcacttaaggatgtggtcactgagaatgaatttgaaaagaaacttcttgctgatgttattccaccaagttgatattgaggttagttttgatgatattggagcccttgaaaatgtcaaagacaccttgaaggaattggtgatgcttccccttcaaaggccctgattgttttgcaaggtacagtttgacaatccctttaaaggaatattgctttttgggc

SEQ ID NO: 31698 - DNA, 394 bp, Gossypium hirsutum
  unsure (1)..(394): unsure at all n locations
  Clone ID: LIB3048-051-Q1-L1-H8
ataaacccatccgttctgacaatagctatttgcaatgaaaaaactttacttgctatctagttttgaaatcagattccctcaacttctccttcaatctagacttcttgcccatcttccctccaagccgaaagaatggcagttcaactcttctcccatcaggtaagagatctctcctctatctagagtgttctctgcaattctatgagcttgcgcgttccctgatctatgaatatactgaaagataatctcttgaaagcaagacttcttattctgaatatctctgataatcgcttcgatcattgatgtatttgntgaagacttttgacatttttttattattgtcctagaatccatcataattttaaccaattgtgtactcatttagatccctaac

SEQ ID NO: 31699 - DNA, 418 bp, Gossypium hirsutum
  Clone ID: LIB3048-052-Q1-L1-A10
gtcgtacgtgggatccttccaaggccaatttgttgtacggacctttctacggcggtctgcatgtgtccagcaatttccgcgaaccaaaccacgcgattcgcgacgcattggccgtgaaattggtagactacctccaagctcaacccacgtggcggaagaacaacgggaaggaccacttccttgcactagggagaacctcatgggatttcatgagaaccgacagtggacctgacttcggggcaagctgtcttctcaacctgccatgtgttaaaaacatgtcggtgctgaccgtggagaggaacccctggaaaggttcaaaccaacacggtatcccgtacccttcatactttcatcctttcacgtcagatcaaatgatgacgtggcagaacatgatgcgacagtcaaaccgaccctactt

SEQ ID NO: 31700 - DNA, 265 bp, Gossypium hirsutum
  Clone ID: LIB3048-052-Q1-L1-B6
gtaacatactggttaagagtcacggacattgagcgcaacgagagatgggaggacgatccccattcgtctgcttcaaaactcgaggcaggtcaattgctgttataataaccaaactaataccatttgacatagactatatgatccatatgaaaaacaggtaaagactaggaattgggccaaataagatggaggattccatttttctgcttcaaaccttgatgcatgtgaatgctgttaattataatgaaacttataccgttggatt

SEQ ID NO: 31701 - DNA, 402 bp, Gossypium hirsutum
  Clone ID: LIB3048-052-Q1-L1-B7
ggcaatttgggttgatacttgcttggtttcattgcttttgatcattgttgctgttgaagctagaattcctggtgtttattctgatggtgcttggcaaagtgcccatgccactttctatggtggcagcgatgcttctggcacaatgggtacttttttatttctcaaaacgaagatgattttgacttcacaatctgccctttttttaatgatttttaaggtggagcttgtggctatggaaacttatacagccaaggctatggtgtcaacacagctgctttgagtactgctcttttcaacattgggttcagctgtggtgcctgttttgaaatcaaatgtgtaaatcaaccacaatggtgtcattctggtagtccctcaattttcatcacagcaaccattttttgc

SEQ ID NO: 31702 - DNA, 261 bp, Gossypium hirsutum
  Clone ID: LIB3048-052-Q1-L1-C10
gaaacttctttgcaagttctcaggggttttgatgctgatgtttctattgaagtgaatgaaatcaagagatctgttgcatcaaccactagaagaactaccattcggtttgcagatctcaaagaaaggagatattggtttccactgatggttggaattggattacttatgctgcaacagctttgtggcattaatggtgttctattctattccagtacaatttttgaagctgctggagttaaaataagcaatgcagccaccctt

SEQ ID NO: 31703 - DNA, 241 bp, Gossypium hirsutum
  Clone ID: LIB3048-052-Q1-L1-D5
gccgtatggttacaaggaagttggggattccgttgagatcggagttccatccgctgctgcgaaagcgtatagagcaaatagccagaagagactgtcgactagcgggaactattataaggcgactgatgaaaaagggcccgagatctaataactcagatggaggaaagttccgaagcgagcttgaacaaattttggaggctactgattgtgctgaatttcagagatgcatggtaccctggtt

SEQ ID NO: 31704 - DNA, 165 bp, Gossypium hirsutum
  Clone ID: LIB3048-052-Q1-L1-E7
ctcttaatcttttaaatcttggtaataaaagatatcatacgtttacttaatcaaggatatctcgtaatgaactcaaagccataagccttacagataaacttttgagcaggttccatcaatagacgtatcacttgcttctaataatccacacacagcaatccatac

SEQ ID NO: 31705 - DNA, 204 bp, Gossypium hirsutum
  Clone ID: LIB3048-052-Q1-L1-F5
ccttggaggatctagtggaaggtatcctcaatattgtgccgcatataatgaactacaggctgctggagttgaatttcctcctagagaagagaatcctgaaccataattaactcaacttaaaaccaacccagtaggtaacaaccctgcttttacatataaggatcctgcaatggaggccttttaacagcctaatccttttggcct

SEQ ID NO: 31706 - DNA, 217 bp, Gossypium hirsutum
  Clone ID: LIB3048-052-Q1-L1-F6
cctatttctttatggctaccaatatgcagaatgaaggcagttctttcgatcagaaatcgactctgacaacgtagagcaaaacttctaacccagaaacatccaccgccgagaacaaaacttcttccactcagccgactcaaccagcacaggctggagcttccgttaccactatgcctggctttgtgccacccaatccttatgatttctcagccatgaa

SEQ ID NO: 31707 - DNA, 192 bp, Gossypium hirsutum
  Clone ID: LIB3048-052-Q1-L1-G12
taccatctatgtgccttctgtcacgtctatggttcttatttagattcgaaccaattacaatttctattccactggtagtctatcattgccaaaccgattactgtggtgtactccttcaatgcaaaggttgaagtgtacctccaaacaccctgtctgaatatgcacttaaccaatttacaaacatgtatttct

SEQ ID NO: 31708 - DNA, 182 bp, Gossypium hirsutum
  Clone ID: LIB3048-052-Q1-L1-G8
ccaactcacattccatcctttgtttttgtaataatgggtctgttctcttaaaagacgaccccagccaaaatcacatgaaatacgatcatgtaaacgaacattttgattcataaagacattgcatgcgattcctaaagtttaccctaacatacctttctatgctcactgtcttttttttctac

SEQ ID NO: 31709 - DNA, 210 bp, Gossypium hirsutum
  Clone ID: LIB3048-052-Q1-L1-G9
cgtttccggtttaacctcttacccttggtttcacgcaaaggtgactttccatcctggactggcctgaatatcatctaaaacaaaaacgatacacacgctataccttgctatcaccagctaataccaagaacaattctgccacgaaccacgctcatcaaggactcaaccaaatgtgtatcctaaatacgaaacactcattacagcaaacat

SEQ ID NO: 31710 - DNA, 110 bp, Gossypium hirsutum
  Clone ID: LIB3048-052-Q1-L1-H5
ggactcggtttttgatgtaggaaacaacaataaccgggacgctatcatataagcagacgtgggttcttatgggagggattatgtgaataagaaatgatcctgctgaattt

SEQ ID NO: 31711 - DNA, 360 bp, Gossypium hirsutum
  Clone ID: LIB3048-052-Q1-L1-H8
aagattacttagtggctgctgaattagaagacgtgaagagaggtttcgttgcacgagaagcgtcacgagaaacatgttcaaaggatttcatatctctgcatgctgattgtatacaagatgaaatgtatattttttattttctttatattttttatatatgttattcattatttcctaatatttgtttttatttttttattatttttttatttatttttcttttttccttttttattttttttttttattattttttttatttttttttttttttttatttttttttatttatgtgtttttttaattttttttttatttttttattatatattttttttttgacactatttattttctttc

SEQ ID NO: 31712 - DNA, 256 bp, Gossypium hirsutum
  Clone ID: LIB3048-053-Q1-L1-B12
caaagctattgaaaatctgaatggttctgaattcaaggggaagaagataaaatgttcaacatctcaagcaaagaataagttatttattggtaatgttcccagaaactggggggaggaagatgtgaagaaggttgtaaaagatgttggtcctggagtcaatagtattgaattgttgaaggatccaatgaaccctatccgaaaccgtggatttgttttcatagagtactataatcatgcatgtgctgaatactcaaga

SEQ ID NO: 31713 - DNA, 128 bp, Gossypium hirsutum
  Clone ID: LIB3048-053-Q1-L1-B5
ccttttgtgttaactctagataaaaacataaaacggccggggtactatgcatagatgggtaggaatatcattacttagacctaggacttgacgaacccctggaattagagtattgatatactccattg

SEQ ID NO: 31714 - DNA, 254 bp, Gossypium hirsutum
  Clone ID: LIB3048-053-Q1-L1-B6
ataatcccgatgaccactaaaaacacggtttttaaggcatggggatatttgaagcttaacggtgatagtgaaaatcctgctattcttgctgtcaacaggcatctcgggacgtattatatagaagatgggccgttactagctactgatttcgattcacttcctaagggcgcatttgaattcccgattctcaaggcggtcactgagccagcacatgttggagatcatccccaacagtcccgcgctcctcatatctc

SEQ ID NO: 31715 - DNA, 423 bp, Gossypium hirsutum
  unsure (1)..(423): unsure at all n locations
  Clone ID: LIB3048-053-Q1-L1-C7
gcaaaatcaagctgagttaattgataacttcgtaaagcaagcgtcggctcagaagggaaccgcccttggttctgtaatcctcgaagcgacgtcacatccttccctctttgccttctccgagattcttgccgtgcccaccgtcgctgagcttgaaggaactgaaaactcggtgtacctcaaggtgcttcagttgtttgcccatggcacatggagtgattacaggagcaactgttccagtcttcctcaattggtccctgatcaagttctcaagctaaagcaactcactgtccttacactagctgagacaaacaaggtactaccatatgatgaactaatgatggagttagatgtcatgaatgtccgtgaactggaagatttcttatcaatgagtgcatgtatgccgntatagtaagaggaaagctg

SEQ ID NO: 31716 - DNA, 435 bp, Gossypium hirsutum
  Clone ID: LIB3048-053-Q1-L1-C9
tccgtagtcctcttgctgtttttgttcagatccagggatgtgtaatatgcttgactcttgctattgggtgggcttttgctgcttatgtcaggaacagagagatcaatagaatgaaggatgccatgaaatgtggcaatagctttgcttttttgtgccatgatattaatgaacttgagcactctaatcaggtcaatctaccaagagttacagtcgtgatgcctttaaaaggttttggagaacataatctgcacaactggaagagtcagatcacatctctctatggtggtcctctagaatttctttttgtggtggaaagtactgaagatcccgcttaccatgctgtatctcggttaataagggattttaagggggcatcatttgagtgtcttctctgaggctttacttcttgccttcctgattacattgcatgttttt

SEQ ID NO: 31717 - DNA, 425 bp, Gossypium hirsutum
  Clone ID: LIB3048-053-Q1-L1-D4
attatatagataatttaatttaaaaatgaaattaacaatggctctcctaaatatgcataaggttcaaagatctcaaaatttaattaataagattatttacatttttattactttaccaataacttttttttccaaaagaaattattgcttaaatatttgtacattatatgtcataatcgaattttattgaaatgggtgatttttaaaagaaaatagtgggcaaaatatatagaaatttcttaagtgggtaaatctttttagaggagatggtatttccttttgaagtaacagatgttttttaaaataaatattagaaaatgaattattaataataaggttttttaaattaatatatttaatcctatatttaataatttaatggagtggtatcttaacccaattatttatttgggaaatggcttaaa

SEQ ID NO: 31718 - DNA, 430 bp, Gossypium hirsutum
  Clone ID: LIB3048-053-Q1-L1-F9
gactaaccctaacccaaacccaaaccctgtcaaaggttctggtcactttgaaacagatacttgtataaatccttacaagaatcatatatatagaatctctcactttatacttcgttacttattgcaagaaagagtagtggatgatgatgaagttagtaatgtgacggatggtggtagtatctgcggccctggagatgattgtggtggcggcggctcatggttatttgggactgacagcactgatgtttactaccagaaaatgattgaagcaaatcctgataatccgctttttcttgggaattatgccaagtttttgaaagagattagaggggattttggcagagctgaggagtactgcgagcgaacaattttggcaaatactattgatggaaatgttttgtcactctatgctcatctaatttgggaaaac

SEQ ID NO: 31719 - DNA, 265 bp, Gossypium hirsutum
  Clone ID: LIB3048-053-Q1-L1-G11
caaaccaaaaatcaaaccccagaaactgtttcatttaaagcgaggcttgccaattcttcgccgatgaaattcttgcttataacaacaccagcattatcaccggcacccacattagacactgcgccaatttttattggtttcaggatattaaacatgacatcaaaaggaatgcaaacaacaagtttatggatttacatccttcaatttccctattttatgctaaaatgaatcactaacaacttcattggtttactaatcctgatca

SEQ ID NO: 31720 - DNA, 242 bp, Gossypium hirsutum
  Clone ID: LIB3048-053-Q1-L1-G9
gaccttagtttttcatttgactattcacagaatgctgaaggatattgtcgcgatttatatgatggtgctcgacataggaccatgtacaaggggaaagaatcaccattactagagcgctttaacgataaagatttgcctattgacaagattggctctggatggagacattgccaaactctttctgataaatattaataaagttttaatgtaatcatacttttatttttttttttttttttttt

SEQ ID NO: 31721 - DNA, 399 bp, Gossypium hirsutum
  Clone ID: LIB3048-054-Q1-L1-B12
ctgggatggacctcgtgttcttggcgtgttagccatgtgcatagcgattggggataattatttaaaaccctttgttatatcggaacctgaggtaacaataacgaagagaaaaggggaagaggagtgtttgatattagcgagcgatgggttatgggatgtggtaccaaatgatacagcatgtggagttgcgcgtatgtgtttacgcgctgaaaaaccgctgtcgccaccagtgtcaccgagtagtgaagcggctgtgaagggtggcacagccgagagttccgataaggcctgttgggatgcttcaattttattaacaaaattggccttggccaggcacagtacggataatgttagcgttgttgtggttgatttgaagaaaaatcagccgctgtgatgaaa

SEQ ID NO: 31722 - DNA, 306 bp, Gossypium hirsutum
  Clone ID: LIB3048-054-Q1-L1-B5
atgttgtggatcagtaccggtcgagtgatgtcggagagccttctgaaacgggggggaagccttattcattcttcggttgctttttggggtttggataaagtcattatggtacgtcatcaggtaaaattaattacttttgggagctttaaatttgtaacttgtaggacttggtagggctcactgattagttacatggtaattcttgataaatgctacgatgtgtctgggaaaatctaacgcttgcaaacaagctattatttgtccatttcaatacttggaaatggtaatgttccagtggtatatttg

SEQ ID NO: 31723 - DNA, 398 bp, Gossypium hirsutum
  Clone ID: LIB3048-054-Q1-L1-C9
gaaggattaaattggaaaaaggtgagatatgatgtaatgttcattgggatggaaaacttggaagtactccaatgctgtcattgataaaagataatggtgacttatattacctggattcttcattttctctaaagtcctcatataccattcttgtgtctgatatatgtttggagtacacaattctcgaaatacatggaaaaacttaaaataataaacattcctgtattaaacacatgcctgtatgcaactcaaccttgagtctgggtagcatagacggttgacattctatttcaactacatttttatagcttcacgttcgtggtgtactattgatcccaaggtactcaattaatctggtgtagttctattaactctgcattcagatatgtattctcttc

SEQ ID NO: 31724 - DNA, 341 bp, Gossypium hirsutum
  Clone ID: LIB3048-054-Q1-L1-D11
acctctatgcaatttctggtgatccaaagtttatcagagaaggtttaaaggttttggcgcatttaaaatctttcccaaacgacaaagacgactattctcatatacatcatgaatttttattatcttcaataattacatcactactaagatactgctacttcaaacagctatatcctccgttatgacttcctaaggatttctagcctgccgatttaggtcaatgaaaatatccgtttgcttgggtaaagtaatgtcagccatcaaacagactagaaaataatgtcataactaggtttttcatctatatcattggagtttaatttcatttattacacttcttt

SEQ ID NO: 31725 - DNA, 265 bp, Gossypium hirsutum
  Clone ID: LIB3048-054-Q1-L1-D7
agaaagataaggctttaaaggaaaaggagactggaaaggatgcttataagaagaaagacttagagacggctattcaacattacaccaaagcaatggagattgatgatgaagatatttcatacataaccaatcgggctgctatttatttggaaatggccaagtatggagactgcattaatgattgggagaaggcttgtgaaagaagtatagagctcatagcacacgatgaaacgattgctttaagcatgactagtaatggaactgc

SEQ ID NO: 31726 - DNA, 337 bp, Gossypium hirsutum
  Clone ID: LIB3048-054-Q1-L1-D9
atcaattttaagccttcttcgaaattcctctttcaagagtctaattttcgtcatgtccctcactgtcaagaccatcactcttgatgtttaaaggtctgataccttctacaatgtaaagaccaatatccaagacaagtaagggttaccaccagaccaactgaagcttatctgtgcttttaaactactagaggatggccacacacattctgactacagcatacatacctaattctcacttcatctggacctacacatgtgaagctgtttgcatagttgtgtcaagtcctatagcgattgtaccatctgtcggtattgtgaaagttctgattccatttac

SEQ ID NO: 31727 - DNA, 321 bp, Gossypium hirsutum
  Clone ID: LIB3048-054-Q1-L1-E12
gcccaactttatctatctattagattcatgacatccgtgctagggtgcctaaactggaagacgatagaatcataaactcctaatcttactcttacactgcatctgatattccacaaaacaaatggttagaccaacactaactgcatatcatctatgcttgattggacgcttatacttacacacatatctaaatcgtatatcaatcctaaactcttgaacttcactgagaaactatatgcatcttgtattgcatctgataaatctacaaagactaccaatcatcttgcactaatcacttacaactctaatcatgctatggac

SEQ ID NO: 31728 - DNA, 325 bp, Gossypium hirsutum
  Clone ID: LIB3048-054-Q1-L1-F8
attcttctaaagctcatctgtcacctcatatcggctggggttcgtctaatcgcctgtatccatcgctcaaaatgtctcagtatgccaacgcctatcttcagcacattttgcgtagtcctgtacaccaaccttgatccaaagcagatgattatgtttgctatataccgacagtaacgatatcggaatgcgtttggccaacatcgcatgctcgaatgccgatatatacatgaacctcaaggctcgtgaacagtctgcacctgatttctacaatcctctgacgattgtggcgaacttgaggcagactaaaatcccaaattggtttgtg

SEQ ID NO: 31729 - DNA, 401 bp, Gossypium hirsutum
  unsure (1)..(401): unsure at all n locations
  Clone ID: LIB3048-054-Q1-L1-G6
aaatcattgaagaagttccatgacactgtttgcagtacgctgcaaagatataaaactaacttatttcatcatgatttttgcctctgttcactttgttctctctcaccttcccaacttcaactccatttcgggtgtctccttggctgccgccgtcatgtctttgagttattctaccattgcttggggagcttcagtggataagggagttcaacaagatgtgcaatatggctacaaagctaagactacagcaggaacagttttcaacttcttcagtgccttgggggatgtggcttttgcctatgctggccacaatgtantgttggagatccaagctacaatcccctctacacctgagaagccatcgaaggaaccaatgtggagaggtgttatcgttgcctata

SEQ ID NO: 31730 - DNA, 358 bp, Gossypium hirsutum
  Clone ID: LIB3048-054-Q1-L1-H11
agatgacgcacgagccctgagttctctgagtgtgcgaggtcattgttgcaaaccaacgaattggatgaactaatgctagatggtcttgctattcttactcagcagcaaacagcacaataaactcttgctgcaagctctggtacgtgacggctcaggtgaagagcaactatattcttttgaaagtggcttctcacgagatagtattagctctgagctcgatggatattcaaaaaagttgaaggaacaatatggagtgtctattgacggatcagcaccaagccctcgtatacgtagaaaccaagtccttgatgcataggtcaaactctttagtcgatcagatatatctacagaaaattta

SEQ ID NO: 31731 - DNA, 365 bp, Gossypium hirsutum
  Clone ID: LIB3048-054-Q1-L1-H9
cttcactcttctctcaccatgtcatggctgtctttctaggtcttgttgctgattacttgtagtgccaaagctgacggtccttcatctgacacttttatgactgtcaacgacgtagaatttgcgccgtttgttgtcgaatatgacgcacatctccgggtcatatgcatagctgatgcccgcttccaacttgcgttgcataacaccacccctaatgccttaacccttgctggacgcatggctacaacgctgttccgagtcgctcttccgataagtttgggaggccaacatgatgaaccctgctcgcgagagctccacgtactatctctggtctgtcaggagccttgacttggctgatgccgattgtc

SEQ ID NO: 31732 - DNA, 398 bp, Gossypium hirsutum
  Clone ID: LIB3048-055-Q1-L1-A12
gtttcataaaacatgaagtcccttcaccgttctttgccattgcttttcgttgttgtttgctcattgtcatgggttaatgtttcagctaacagccatgatgattctcttgattgcctttcttcatatcatcccgatgaatcctcttccatttctaaagttacttacactgaaacaaactcatcatattcggcagttttggaatcttccattaggaatcacaggttctcaacgccaaatacccccgaaaccattggttattgcaacaccattgaacatttcccatgttcaagcaacgattcgttgctccaaaaagcatggcctccaaatcagaactcgaagtggtggtcatgactacgaaggtctttcttatgtctcccatgtcccatttgttgttatcg

SEQ ID NO: 31733 - DNA, 127 bp, Gossypium hirsutum
  Clone ID: LIB3048-055-Q1-L1-A4
ctcaaactccattacataaatgactcatatatatctagtccggctactactcatggtggactataactaaacataactcacaatatcttctaataaaatactattcccctaatcttcaaataataat

SEQ ID NO: 31734 - DNA, 109 bp, Gossypium hirsutum
  Clone ID: LIB3048-055-Q1-L1-B2
cacatgtcaaagatgtagccgaccaaccattctgggggattaaaccttggaggggcgaacatgccccatcatataagatataccgcgtcaagcatcattgtatatcata

SEQ ID NO: 31735 - DNA, 401 bp, Gossypium hirsutum
  Clone ID: LIB3048-055-Q1-L1-B7
ctcagcttcaacaaccttgtcatacagtgtattaaagggctttatgatttgatgggtccatactggatgacaacttgacttactatcaactgtactttgctcgtattctgatctgacatacatctcataagttgtgctaataatatgtactacatcaatgacacgcatgataaacagacatggacctacatcttctgagcttgcttcgcatccacactactgataccatactttcacaactatcggattaacgatttcattgtccttggcatgactacctataccgcctggtacatggacatagctgctgtgctttacggtcagaccgtaggcgcaaactcacagtgatccaacacagctagtactctactttaccgatgctaccagcattgtctacacct

SEQ ID NO: 31736 - DNA, 375 bp, Gossypium hirsutum
  Clone ID: LIB3048-055-Q1-L1-C1
ctaaagttcatagctgataaggtcgacacaatgattgctaaagacactggtttggtcgatgaccttgataaagagctcagcacatctgcaacgagggctcatgaacggtgtgcgatggctctgtcatatgtcactaggagcatacaggacaatactatctatgccaagggcttgaaactaatgggtgaccaggctaatgctggcacggatcacttataaaaggtcttactagatgcgacagcgacttaattaaatgccgcagcactgatctgcatgaggactgtaattcgtgaccttgatctcgatcccagtacataattatgagaacacgatcctagtcttattgcatcccaaagctagatatctgaccattta

SEQ ID NO: 31737 - DNA, 350 bp, Gossypium hirsutum
  Clone ID: LIB3048-055-Q1-L1-C10
gttgtattctcacggaacgcttgcagatagtacggtcgtggctctgaaacacacccgggatttggatttggaaggcaaccaagatttctcgaccgaagtctatatcataagcaaaatcagacaccggaaccttctttccctcccaggttgtcagcgttaccaatgacatcctgacacgcagacgacgatctctggcctatgatctcatatcaaatggcagcctcggtcaccatctattcactgatctcactaggcaaaaactgatccggcctcaccggacgaacatacttcttgatgcaccccacagtctagcttacttacactatggaatcaaaccatcgatttatcat

SEQ ID NO: 31738 - DNA, 354 bp, Gossypium hirsutum
  Clone ID: LIB3048-055-Q1-L1-C2
aagagtttatatatggcgaattcctcttcttgctgggtaaagatgctatgttagtctatggaaattctcaacggctagggatatcaaagtcaaggactcattcaccatgatcaaaaacactgttatctggcgtaaggagtttggagtagatggctagctttatgaggatcttgtaaatgaattgtataaagtggctttcatgcacggttctgataaaaaatgtcatactgtatgctacaacttttatgttgaataccatatcaatgatctgcatgataatacttttgcatatcaagttaatctatccaagttcttgaggtggatgattcaattcttgtatataagcatttttat

SEQ ID NO: 31739 - DNA, 404 bp, Gossypium hirsutum
  Clone ID: LIB3048-055-Q1-L1-C7
gaatccttatgtttgccaaaactggaatctcggtacggcaaattatgaggctgatggaacttgagaagtgtgtggagccaggatatctgcctttcactgagaaggatgtgagaaatttgcttcagtcgttcaggaaatcagatcaagaagatgaaagcatagatttattaagaatgtgtagaaacaataaggataaggatcccaacttcaaatttgagtatacgcttgattcaaacaacaggttaggcaactagtactggagttgaagtcgatctacattgtgaggaaacccaaaggcaagctgaaaactcatccgacaactctactgaaaatgcagttgaagctacagagtacagggatgttcttcttttgtttagatttgattggatagaaacctgggagat

SEQ ID NO: 31740 - DNA, 406 bp, Gossypium hirsutum
  Clone ID: LIB3048-055-Q1-L1-C9
aattaaacacaaactttacctttaccaacaaaaaaaaacaaaaggagaatgtgaactttaaaaaaaaggataccaaaaaaactaaccttgaggggacatcctttccaacatttaccttcttgacactacctttccttttaactgctcatctttttaccacttttctaatggaaaaaccttccttttacccactttacattctttccaccaattccctttttccccatttgggcttatacaaaattggcaccttcaaatctcctttaaaaacagttgccattcctgattgacaatgggaaaattttaccctttaatcttttgtcaaattcttccttaaattttcgcaaaattaccccatttttttaaccatagtctaaatactttaaaaccctttataaattaaaaa

SEQ ID NO: 31741 - DNA, 397 bp, Gossypium hirsutum
  Clone ID: LIB3048-055-Q1-L1-D10
tacaggctagtacgaatctagcacgagcgctgactttacttctgtaccctgcaacttctagtgaaacatgcatattatttgacgatctcaattccttcactcagtcctaatacattctgtaccttacctattctaactaccagatctactccttctattctaacaacaagcacaatcccggctgatacaatctctatctgttcttacttccttgattccaatcttctaacatacttcagtgctacaaatagctctcgcttcatctaacataacctcaaactttgcatcttctaatatcactgtaacatgctctaatacacagaaccctttcttgatttgtaactcacagctcacattcagcttacaacaatgcatcacatcatgcatatgattaaaa

SEQ ID NO: 31742 - DNA, 328 bp, Gossypium hirsutum
  Clone ID: LIB3048-055-Q1-L1-D11
atctatacttccattatatataccatcactcagatctggggatcatgttggctctttttcacacggcatccgctactccaccacaagagccgaatagcacaacttatcataaatctaccaagacacctaaacactcttaagaaaccctaactgattacctatctaatcaccctcacaacactctatccatgacctatcccaaccactctgttctggcttatgttccccatgaacgtgctacttcagttcatcaaacgttcacacgtgagtttgatgacatatcctggctcttcattaaaacctcgcccaatttatttatgttaaatcc

SEQ ID NO: 31743 - DNA, 376 bp, Gossypium hirsutum
  Clone ID: LIB3048-055-Q1-L1-D12
aatctctcatgtatcaagacagcaatcacgggggggacaatatcggaactcgtttagtaaagctcatctctctggcaataggtttttgagtggccaaaataggtttaggtcaagctatgcagtcaatttaggtcgcagactccgagatgctgatgaagctagtgaagctgctagtttaagagaaatttaccatagaaatgatcctgaagcagtgataagactatttgaaactcagccatcattacattctaatcgttctgcactttctgagtatgctaaagcattagtcaaagttgacaggcttgatgaaagtgagttacttaagacattgcacagaggtatctccagttcatcagtggatgaagagagtaaaagt

SEQ ID NO: 31744 - DNA, 247 bp, Gossypium hirsutum
  Clone ID: LIB3048-055-Q1-L1-D2
ctctgctatatagtcgcttgattgtctgtatgtaggggcactaggctttattgaagatacagtatattggttcatcatgttgcgttttgctaaggccaaattgtgtaggacattttaagggttctcctttattcatgcaacttatgcccattatactgatataatgaccattactcatcatgtccttaatgtacaaaccaggtgaccctgaatctatatggtgtattgcactatcattgctcaatca

SEQ ID NO: 31745 - DNA, 257 bp, Gossypium hirsutum
  Clone ID: LIB3048-055-Q1-L1-D7
caaacaactagtcttgagttcataccatttggcattggatacataaactgtgggactaatacgagcagtataaccatagtataaagccatcagacacggctacttgccccacatgtccatattgatgccatactaatatgatggcaagtactactaactactatacagaataccataggcaatgactaaacacctgacatgtaactgcccctagaattcgacacctaacacatcttatattaatagacacttttaac

SEQ ID NO: 31746 - DNA, 253 bp, Gossypium hirsutum
  Clone ID: LIB3048-055-Q1-L1-D8
ctttattctatgacagaatttactcattgcgggaagggaaacttacgatcatggcgggtgtcaattctgaaatcgagttctcatccactgagatcctgccattggatattcatcatgtaactgcactatcttaccgaccatgcaacactgttcaagaggctagggagactatatgttgctacgcatcagcttatgacaaggatctgctgcctcaactagatttcgcctacatccagcttaaatatatacttta

SEQ ID NO: 31747 - DNA, 138 bp, Gossypium hirsutum
  Clone ID: LIB3048-055-Q1-L1-D9
ttacttctctatcaaatactattttactagatcctatattcattatgtattttaatactattcattcattctatcactaatattttactgcttccttaatcatctatatccatagttaaatctctataattttatcta

SEQ ID NO: 31748 - DNA, 323 bp, Gossypium hirsutum
  Clone ID: LIB3048-055-Q1-L1-E5
ttaccgtgtatatctatcatgatcacatagagggctggttcaatagttcgggacggagcgatacgtacaataatcattcagaacttgtatgtaccgcacaaggaccatatgctgatgttctacttacatggaacagcatataccatttactggaatattaagctaactagccgattactattcacactttttaaattgtaaccgattaaagtttcattattattactgtgcttatcttactggtgacagcgaaaataatggatcacaatttctatttacaggccaacctatattgatagctccaatggttgatttaatgttaa

SEQ ID NO: 31749 - DNA, 288 bp, Gossypium hirsutum
  Clone ID: LIB3048-055-Q1-L1-F1
caccaataagttttctagacattaaaaacttgtctgggtttccaaattgcagatgagcccttgattgaatcagacacacttgatccattcaatcctataatgaagaacacaagggctagaacgagtgtggccctggctgcggttgatgtatgggaacaggaagttggcgaacgtttcactgcgaatatggcccacccgattgtcgattctgcggatcttgagatccgacttgagctttacacgatactcaaatagaacactgctgtgagaacactgtgaggcttaatg

SEQ ID NO: 31750 - DNA, 171 bp, Gossypium hirsutum
  Clone ID: LIB3048-055-Q1-L1-F2
gttatttttcagatgtggacatagattctgtgtccaagactatgtcttcgggaaggagccatgcatatgacgtctagtcttatgacgagaaatgctatatgcatgaccactatggctagactggacttgacactggtgccatattagcgatcgactctaaaaatatccgat

SEQ ID NO: 31751 - DNA, 229 bp, Gossypium hirsutum
  Clone ID: LIB3048-055-Q1-L1-F5
tagtttaactataagcactcctaacaatatctagacggctgttattcatctcggcttcattaaccaaatctcaaaatatcttatgttaaccctctcatctcatcacctcacttctaatttccaccactatatactagaccttccaaagcctattatttaaaatactacccaaactttacctaccgaaatgacttctaaacccatacctctcctttaacaatttctaccc

SEQ ID NO: 31752 - DNA, 293 bp, Gossypium hirsutum
  Clone ID: LIB3048-055-Q1-L1-F7
gtaattaaaatcttacgctcttgcaaatgatagactagatgattaccgcgtgacggattaccatcttgctattatcaaggactatagtaagcctgtaactaatgttatgctgaatgatctacaaaatcgtaaaccatatcgaattttacatgatggcatatactcaaactatgcaaaccgtcacagtctttcacaaacgatctttgcttgaaggcaattgtacccacatatccaattgactataaataaaacatctcacctgatctacatgtaaattaccatgtcagggaacc

SEQ ID NO: 31753 - DNA, 378 bp, Gossypium hirsutum
  Clone ID: LIB3048-055-Q1-L1-F8
ggcatacgagagcgaaaacaaaagaaacatcggaatggtagtgtcgtcaacaatgcatctattaagcatgtgtgtcctgtctttggttttatcttgctgtcagggaagggtagatccgaatttccggattcgagcagttaatctaggaggttggcttgtgaccgaaggttggattaaaccttccctttttgatggcatcgtcaacaaagattttctggatggaactgcacttcagtttaagtcagtaacaaccgggaaatatctttccgccgagcaaggtggaggaagtatcatagttgccaaccggacaactgcttctggctgggaaacctttatgctgtggaggatcaatgagacagcttttaattttaagggtct

SEQ ID NO: 31754 - DNA, 328 bp, Gossypium hirsutum
  Clone ID: LIB3048-055-Q1-L1-G1
gtcatgttcacaagtgaaccatctatactgccccttgggcttgtactaccctgaggttagctatccaagattcttcaactgctaaccgttgaatctgctacactcgtcataatcaagataaagaactcgttagatggaccattatctactacacttgatcgtaccttcgcagttattcagcctaattcagatgtcacagaatcaatgacaggaaactatgcacgggaggcatgtgattacactagtcccttgaaaggcatttcaagatacattaggactgttcatcaagcatgctcttctaacattgcttcccaagcaaacactctgc

SEQ ID NO: 31755 - DNA, 287 bp, Gossypium hirsutum
  Clone ID: LIB3048-055-Q1-L1-G10
ctgctattatcaattaaacgctaaaccttaaaggggggcgcagcatggacctcacgggatccactactgtccctaaactaaggatggctcccgccaaaactgttcctgatcgacagtcaacccattacactacaagaccctgatgcactacaatcacatatgggaacaacaataggaagaacagcatcgacattagcgatggcgaaagcgaatcaaacgcgagcacttctcctgaatgctctcactaactctacacattggactgcttgaccggcggtaagaccctc

SEQ ID NO: 31756 - DNA, 180 bp, Gossypium hirsutum
  Clone ID: LIB3048-055-Q1-L1-G2
aacaggtgcagcggttagctatcttctcatcctctggggccagtatgaaccacgggtgtgcctacccagattcttcatctactttctcctatcacggataatcaatgcaatatattgattatgcacgctcttactataccgtttgtttccccataaagtcgtaccgtcgcttatagctgg

SEQ ID NO: 31757 - DNA, 131 bp, Gossypium hirsutum
  Clone ID: LIB3048-055-Q1-L1-G4
caccactgagatagttagatattaagaacttgtctggggctacggatagcaaatctagtgcctattgaatcacacactgtatgttctttcaacattgtaatgaagaacagaatgcatagatcgagtgtggg

SEQ ID NO: 31758 - DNA, 352 bp, Gossypium hirsutum
  Clone ID: LIB3048-055-Q1-L1-G5
ttatgaacactccactgtctgccgcacatataagtcatgcatcacttatgggttagctccttttcaacttataaatttttactataaatttctcactacggttcaccatgaaacctactcatcttgtgacagatcattattcaaactactatctcgatctgatcgcttcgcttcctaccatcatggccacgaactacatacttccacatctggacactctcaaagtcaactttatccctactctaatcatccccgctatccccacttccacaactatggacacttgtctcatctctctccatctttacaaaactctatatcgaagacacaaactgtatgactaccttcacac

SEQ ID NO: 31759 - DNA, 295 bp, Gossypium hirsutum
  Clone ID: LIB3048-055-Q1-L1-G7
tgcactttcacctcttcttcgaccacgttcagtgatgattcgtaccaaggaagcagtgggaagaagaggaaatggtaggagtttttaaggaggttgaccaatgaggttattgagaaacaagaggagttgttgaacatgttcttgctaaccatagagagatgccaacaacatgggttggctcgtgaagaagcttgtatggtgcacgaaatggcaaggatatacattgaacatgagcttttagtccaagatagatccatggctgttgttaaatatgatgccgtgcttgcattcttgc

SEQ ID NO: 31760 - DNA, 147 bp, Gossypium hirsutum
  Clone ID: LIB3048-055-Q1-L1-H2
agagagagcatcaatggccaccacgacccaaacccttgcgatgatgactatgtcagtccattttcgacaggcggttctgtatgacctggccgaccactggcatccgaacctttgggacacgggcacaaacacgatggtacatgtgga

SEQ ID NO: 31761 - DNA, 144 bp, Gossypium hirsutum
  Clone ID: LIB3048-055-Q1-L1-H6
ggatcttgcatatatgaatcctgatttgagcgggctggttaatactggggtagctcgatcacacttggctatcactagcataatcccgtcgaggccctcacaacggctgagcttccacagctcattggcttctgatagaagatg

SEQ ID NO: 31762 - DNA, 311 bp, Gossypium hirsutum
  Clone ID: LIB3120-001-Q1-K1-A1
aataaactactgcgttaactttatgcatctaacctcaatttccatggccgatataaccagagcatcaccttaccactctcatatcttacaactacctgatactactttaatcagatctatatggttgaatcttacttgcttctctgcaagctctattattataacagctacctatgcttcttattattgttcctttcaatggccattagttggatcattgctatgggcactgctgctatctgtgtaccgtcttttagcagcagcactgactaccttactgtctcaacactaaaataccatgctttgcctgc

SEQ ID NO: 31763 - DNA, 303 bp, Gossypium hirsutum
  Clone ID: LIB3120-001-Q1-K1-A3
ctcacgcgtccgcccacgcgtccgctcgaaagtgaggccacccaagatagaaattgaaagtgttcaggttgttcaacagtgtgtgatgttgataattccccttcattttctgcagttcaccgcttgtctgaatccctttctgtcatcggctgtctttcaagctgaaatgatctgcgtagcttaaacaaggctaccagggtggttcttaaaagcaaggtgattcagaatcgagatccaaggttcagagttctatcatatttgatcccattaagtaaatcgcttgtaagctctattgttatcagc

SEQ ID NO: 31764 - DNA, 387 bp, Gossypium hirsutum
  Clone ID: LIB3120-001-Q1-K1-A8
ggtgctcttgatcgagatgatgaggatgtatactttgatgatgaatctgctgaggtggtgatatcatccttgaggcttggtgatgaacaaggaagcctgttcacaaattccaactggtctgcattccaagatgacagaaccggtaatgcacctgcagccacatcccccccagaggtgatgactgatatgaacctttatggccactgcaaatggtggtaacagcactagtgatgatgaagtggtagttggagaggatgatgagttgaatgacaacagccagtcagtgaatagcacgtctactttagatgtgatgaacgaatttaacagtgttatgagccgtggagacttgagtccacaaggtgagaaaagcaatgctactcaagatat

SEQ ID NO: 31765 - DNA, 213 bp, Gossypium hirsutum
  Clone ID: LIB3120-001-Q1-K1-A9
atatcctgagagaataaccccattgttccctcatcaagtttcaatatattcactgtgtcaagggcaagttctgacataattctgtaaattattagtctgtcattctgatccgaaggttgttaaaaagaccctctgttttcagatgtacttattttcacttatgtcatacaattttctcaataattcacgctgatctagctcttcatggacacc

SEQ ID NO: 31766 - DNA, 402 bp, Gossypium hirsutum
  Clone ID: LIB3120-001-Q1-K1-B11
gtcgaccacgcgtccgatgagcgctgtgaacaaaatatggacagctaggccactgatcttcgtatccttaaactatgaattctgggcctcttcaccggttgtctagttgcagttaatgcttccgcaacatcatctatgagtgatggagagtataaacccgattggccaactgaatatcgccttcttcaacctgatttaggcaaggatgatggtgcacggcgaaggcttgcccctttccagctgtgcttgctgtgcaagtgttgcagcgccaccgctggctacacctgtacttcaatgccttgctgctttggcatcgattgccagcttcccaacaagccctttggcattagtgcttttgaccccaagacttgcaactgtaattcctcgcttgctaatgcctac

SEQ ID NO: 31767 - DNA, 335 bp, Gossypium hirsutum
  Clone ID: LIB3120-001-Q1-K1-C10
atcgagactagtgtcacgtgctacgctcgtcggattgttctttctggcgtctcttctaagcgctccggggcattattctccggtccatccacatctccttacttcagctctaacagccttaaaacaagttcactatttgaagaatcattaacggttgttccaacgtcattattcaacgtttcaaaggcaaaccacactacttcactactgacaaattgttacaacagatactactttgacgaatttctcacaaaggcatcaacacataaggcattgattagattcatcatctgcatgggtgaagcattaacaacaattgctttttaagttataac

SEQ ID NO: 31768 - DNA, 434 bp, Gossypium hirsutum
  Clone ID: LIB3120-001-Q1-K1-C7
ccaaaaaatcctgttccaaagcctactccatgtgctctcagcgacaagggccggccattgggacccgatcaaaggatctgctgatactatagtcgatactgcatttgcaaatttgggccatcctgtaaatttgaccattcaatacaggcaactcctccaacagtgtccggactagatcagtctataccgttcaggcattccaccgctacagaacaagctggaattgccagaagcaaccgtgctgataccgcagttcagcagtctgtgtcaaacaaggattcttcgatcaaaggtccataccacttatatctctcacattattatcaaggattctgaattttacctttatttcaaccggaaaagtcgatttgacctctatattcctgtttcagtagccataaacttttgaaggaatgtcattatatatgaacact

SEQ ID NO: 31769 - DNA, 257 bp, Gossypium hirsutum
  Clone ID: LIB3120-001-Q1-K1-C8
cccacgcattcgcgtactcatgttcagacttatgctaagtgtattaccttctgggctcagaatcacttccatgcgggcaatggcaattaaaggatggattcgtgcaccgaaaatactctatcctacccacgtactactattgacgctactggaccatgtggaaactgcctatattccggtgcaccgactcggatcacgtattgaatgaacttgaagaatgcaagatggaataccacaatgcatacattagaatcatt

SEQ ID NO: 31770 - DNA, 291 bp, Gossypium hirsutum
  Clone ID: LIB3120-001-Q1-K1-D10
gggggcttgctggaaaggctagctttaacaggtgtggatgtatacagcttatattggacctggtgacagtggcatgaaggctagaaaacgacgttggacactatattgctgagcagggaatcgttgatcctgtagttgtatgcgcatcaaaggacttcatgaccaatcgtattcatgatactgggacaaaagctggtaaagggaaacatatattgaatctcggagatggtattaaagttgcatcacctgaacaaaatgtggaccatctctatgatgttgctccagctgtca

SEQ ID NO: 31771 - DNA, 468 bp, Gossypium hirsutum
  Clone ID: LIB3120-001-Q1-K1-D12
ggaaaaatggcgacctctgctttagccattgcaactgcatagccattgacccatcgtttcggcaactggtgagcacacttcatggccatccttctcctgttcttgctgttcttgcacgccactcgcacctcccaacgaacccaaactctctttcaactcaaaacctgttgcgaaacaatgtgttttcaatgtgggtgttgggcttttagcagcttcacttgttgcttgctcaccattggacgctgatgccaccaggatcgagtattttgcaactggtggggaacctccatgtgagctcaactatgccaaaactggtcttggatactgtgatgttattgcaaggtctagtgtggaagctccaccatgggagcttggcaatattcactacactggaagatttgcctgttgggatagtcctttgaaagtagctataaacggtgctacaacctcttaccatgcgaattggtc

SEQ ID NO: 31772 - DNA, 439 bp, Gossypium hirsutum
  unsure (1)..(439): unsure at all n locations
  Clone ID: LIB3120-001-Q1-K1-D2
cccacgcgtccgcccacgcgtccgcccacgcgtccgggaaaatcggcccaaacatcggaggattttagcaaagcagacaagggaagccgaaaccctaagtacttgccctcattcagccgccgttcgacctttaatccaccacgactattgatggataaaatcctacggtggagccttctttctactcgactccacggtttaatgactttagccacaaagccctctctctgccttcgatattgacgaaggggatggagatctccaaggcgcactcacgaaggtaaagcttctgcctctnttctccttaatatttctttgttcaagaaaatagggggaaacgaaaaaagaaaaaaaggaacccagaatctgaatctcaccttttaatttcttttgtgtttggtatttcaaatgtattgattgtgtgcgtaaccttacaact

SEQ ID NO: 31773 - DNA, 343 bp, Gossypium hirsutum
  Clone ID: LIB3120-001-Q1-K1-D5
gcgagccactcgtccgaaggaattcttgcgcacgtgaacttagacacaggcattacaatatatgatgctgcaccctgtctactctactgcatgcttgacaccctactcggagcaatcggagctttgatcgaccgaagtaagattgccgacaagccttctacaggcattgaaggtgcagtaatacctcctgggaagggcattacgggcgcattgtgtctaaaggatagaggtccattggcaggattcacaaaggcgaacgagctgcttgtcggaagaatggcttacctggggattgccttattattgataggagaaattatcacagggtaaggagctctagctc

SEQ ID NO: 31774 - DNA, 423 bp, Gossypium hirsutum
  Clone ID: LIB3120-001-Q1-K1-D7
aacgatgtgatgtgcctgcaacttttgacgttacctccataattgatgagcctgtccagtggatgtatggacagaatcatgaaccagtgcttctaactatcacattatcattaccgtaccacaggtcacgtatagaccgtgctcctgacatattcaaatgaacgcacactgtgatctgcgaactcaaaaatgcccatatgactacctctcttggcggataagcaattgccgtgtgatccttgtgaatgactagttcgaccgatgtcaaggagtgttccaccgacaagtctgcgattcactagttacccatgctgccatagcatgtgccgcttcaatggctacctgaggctctgatagccaatggcattgaagcggggactatccagtgtgtgcgtgcaaatgagcagaaggtctggatctcga

SEQ ID NO: 31775 - DNA, 432 bp, Gossypium hirsutum
  Clone ID: LIB3120-001-Q1-K1-E2
atccactgacttcaccggtgtcagcctctttaagtccaaaggctccactagactcataacggcaactcggtgctgtgactacaagcaacaactcagcctcagctcagtgaaacgttgctcaagatcaaccgccgcaacaactgacgatgcgactggtcgtctagtcacggtgaactacggtaacgattcgctcgaaatatgtagagtacttaacggcatgtgtcaaaccagtggaagtagacgcagaatctaccgagactcctgcctataagccatgctttgctacgctgacacctgactctgcgactatgacatggacgaccactactggcctgcataagatctttatggcatatgtatgaatagagttcgtgtggagcgtccgacatagtacttgggaatagtcataagtcttactaaatgggtaccttc

SEQ ID NO: 31776 - DNA, 334 bp, Gossypium hirsutum
  Clone ID: LIB3120-001-Q1-K1-E5
gcgacccactcttccggactatctccttagtgccgcatttgtctgggtacttaatcaagctatttaacaggcactgtccatttgatagaatgggcaattggcacaactcgtaataccctgaacttcatggtgaattacactactagatacctgagactctgggagtcccattgcaacgaacatagtggagacaacctgggactgatacatacctagacatgagcttattacagctcttgcaagtttaacgtaggtgaccaggctgaaaacagtagtgccaacaggctttattacttactgaacatacgacgtatctaaatatctccacatgatc

SEQ ID NO: 31777 - DNA, 416 bp, Gossypium hirsutum
  Clone ID: LIB3120-001-Q1-K1-E6
gccacgcgtctgagggttccatcaaccgttggagccttacctgctattttacgtgcaccagcacctgctctgaatgcgctcgtcgaccacctacattgcggccttcggtcatggctagccataactcttgttattctactccgactgttatccatgaccgcccggttttcgctgaccctgttcctgtgctcaacccgagaggagacatgtgaaacaagtcctacgacgaagccattgaagctctcaagaaacttgttactgagaaaggagaactgaaagctgacgcagctgcaagggtagatcacatcacaaccgagttaaacacaacatgagttgacggcaaaccatctgactcttctgatgagagactgaaagaaggcttagtttacttcaagaaagaaaaatctgaaaagaat

SEQ ID NO: 31778 - DNA, 169 bp, Gossypium hirsutum
  Clone ID: LIB3120-001-Q1-K1-E8
cccacgcgtcttaccacgcgttttctctattaacctatccaagatctttttcgggcccttgcaaatcgtaattagctcatatattaccatatacactacctatcttctacacgctcacatatacgccattcgtaactcgccacaaaatcggtactcaacttatctaata

SEQ ID NO: 31779 - DNA, 411 bp, Gossypium hirsutum
  Clone ID: LIB3120-001-Q1-K1-F12
cccacgcgtccgaaaaaatacaaaatctccattaatttcattgcttttccaagttgttaacagtggaggatgattcaaaccatttctcaaaaccagaaactcccaacaccatgaaagctgaagctgaagcagaagaaagagaccctgaaagtaattcttctctaagtgaaccacttttgaagagaaacagaaccctttctagcaatccattagccttggttggagccactgtctcccatattgaaagcttggattatgagataaacgagaatgatcttttcaagcatgattggagaagcagatccaaagttcaagtccttcaatacatattcttgaaatggactctagctttccttgatggattgttaacaggattaattgccactcttatcaatcttgctattgaaaaca

SEQ ID NO: 31780 - DNA, 225 bp, Gossypium hirsutum
  Clone ID: LIB3120-001-Q1-K1-F4
cccacgcgtacggtcactcaaacgatccgttgtacggatgactgtctaacagatggcttgatgatgtacgatggcgccttaagatagagcctagagaccgcatcaaagatggggttactcacgttgtaggttaacggcatgtaccaatgctgaagatgctggtgctgagatgatcatgacggcagagttttacatgatgcatggtgctatgagcatgaaggaaca

SEQ ID NO: 31781 - DNA, 354 bp, Gossypium hirsutum
  Clone ID: LIB3120-001-Q1-K1-G4
aagcaatccatcgaaattttttttccggcgggaaaaccctaagtaatttagcgggaaaatgtcgggaaaaggtgcgaaagggttgacaacagctggcaaatccacaaaggacaaggacaaggacaagaaaaaacccgtctctcgctcttctcgcgctggtctccagttcccggtgggtcgtgtccatcgactgctgaaaacaagggttagtgcaaacggaagggtcggagcaacagctgctgtatacacagctgcaattctcgagtacttgactgcagaagtgcttgaaactgcgggtaacgcaagcaaggatctgaaggttaagcgaatcacaccaagacatttgcaactagc

SEQ ID NO: 31782 - DNA, 446 bp, Gossypium hirsutum
  Clone ID: LIB3120-001-Q1-K1-G8
ttacaaggtgccacttaattccaagcgaaatggcggtctcctcttccacagtgtctgctgcagtccctccatttctttgcagtaacaccaccaaaattcccagctttaaagtcccacaccacacgccactacgtttatacaatgctaaaagaacgcagatttgggtcaagaggagctgtttcaagtcaaccatcacagctaaagtcgctcaacaaagcgatttgcagtataggaagctcggcgactctgatcttcaaatcaatgaaatcacattgggaactatgacgttcggagaacaaaatacagagaaagaagctcatgaaatgctcagctatgcttttgaacatggaatcaatgctctcgatccttctgaagcctacccaattcccatgaggaaagagacgagtggaagaaccgatctctacattgctagctggctgaagtct

SEQ ID NO: 31783 - DNA, 269 bp, Gossypium hirsutum
  Clone ID: LIB3120-001-Q1-K1-G9
gtgaattttctttacagggtttctgtattattattcgttcttcaattctcatataccatagataattgtggatttgttcgcggttctccgatctttgtttttcatcaggaatctgtacaaggaatcatctcgggaaaaatttcattgccttttcttgacagttccttcctttatatacatgtatgtatattgggctctaagaaactgaagatcgttgccattactacgagcgtgcaaatagcagttatacatccctgacagccttaaat

SEQ ID NO: 31784 - DNA, 433 bp, Gossypium hirsutum
  unsure (1)..(433): unsure at all n locations
  Clone ID: LIB3120-001-Q1-K1-H3
cccacccgtccgtgaaaaaattgccagctaattgaacattcaaaattggctaagttggggtgctctcattttcctcatcagccagggccaatcccattcaacgcaaaaacatcctattttagatgacaatctcacaatcgaaagcttcatccacaaaactctccaatggaggaaaaatactcttcaccagttaaagttgcaggggaacagactggagctatcaacctncacagtggtagcagcagtgctgagcttcgtagctgcctccatatccagtgcgggaggcattgttgggggagggttgtttattcccattctcaccctcgtgggttctttagaccttacaactgcctctagcttctcagctttcatggtgacgggagggtcagttgcaaatcttatgtttaacttgagtgcccaaagtgcgatgttt

SEQ ID NO: 31785 - DNA, 367 bp, Gossypium hirsutum
  Clone ID: LIB3120-001-Q1-K1-H7
atcttgtttctctacctattgtcattgatctttgaacccttcaccattgggtggatcttggtcatagagatattgggtgtaatatttggaatcgtcatctattatcatcaacccgggtcggcctccatcgtcattgagacctcattttcaattttgagtaacgaagacaaatgaggaaatccgcgataattgtgtcagctgctgtagtaatccttaatcctagcgtattcattcagaataccttctcttgaggttcttaagtttcgagttcgagtttctttcttttgtacgttggtttgttccgtcacctaatttccatggactagatgttcagtctttgaaaaaaaaacaacgtttctttgtatat

SEQ ID NO: 31786 - DNA, 261 bp, Gossypium hirsutum
  unsure (1)..(261): unsure at all n locations
  Clone ID: LIB3120-002-Q1-K1-A8
ggaaaacccgggccgaccgacgcgtacgnccactcttcctnnnttctctattttacttttcaagggtttctctcttcaaaaaaaccctgcagaaatctatgcgctggacgctcactttttgattcattcnatgatttcttttccttctcttcttcttgttgttttatagatgggtttgatatctgttttttcggatattttaaagaaacccacaattaaagatgtgccaatatacttactggtttttatagctcctttatg

SEQ ID NO: 31787 - DNA, 223 bp, Gossypium hirsutum
  Clone ID: LIB3120-002-Q1-K1-B12
cccactcgtacgcccacgctttcgataaaaatgatctaaaaatgatttattaactaacgtgaacgagcaactattctataaaaaccgtctctgtatacctatacctttgcctcatcacatgatggctcgctaagcatcttctacttaccggactcacattcaaagactctgttcttgacccacatgatccaatgaagacactactcttgctcaaacttgacgg

SEQ ID NO: 31788 - DNA, 441 bp, Gossypium hirsutum
  Clone ID: LIB3120-002-Q1-K1-B3
gttttaaaaaaagaatcaaaacccttcctttttttttcaaaaccattcccctcctccggccattgggtctggccaaaggcagccgtcggcccctctgtgggcggttgtcggcgcccttaaaaaatcagttttttaacccagttttcaaaccccactcaaaggccgagtctttgaaacgggaagccgagagaaaaaagaaaaagaaaaaaatggtctttggcctcctttaagtccgaatctaatgacggcaaggagatcaccgacgccgggctcgcaaggtgaccagttacgctccttctcccttctctttttatttttattttcgcagataaaaaaataaataaacaaaataactaaaaaggatctaaaacaaaaagaacaaaaagtggaatatcacctttgaaaccttgttttttatttatttgaaaagttttgtacgaa

SEQ ID NO: 31789 - DNA, 361 bp, Gossypium hirsutum
  Clone ID: LIB3120-002-Q1-K1-C3
cccacgcgtccgcggacgcgtgggggaaactggagtgtggctaatggaatcaatgaagggttttctgatgattctttcaggactgttgcaaatgagattaaagtgcagaaaaacaaaagaccagctttgagatgttcagaacaaagggatagaatatcttctgcagataagtattctcctgaactgggtagtggtcactgctgtgtagtcccacaatcttctttaaggcccttggttggtaaggtttcacaggttttgcagcaactaaagattaatttacttgatatggatgctgcactctctgaagaagctttgcgaccatctaaggcatgcatggaaaggagatgggccttgcgttcat

SEQ ID NO: 31790 - DNA, 473 bp, Gossypium hirsutum
  unsure (1)..(473): unsure at all n locations
  Clone ID: LIB3120-002-Q1-K1-C7
accggttctcggaattacccgggctcgatccgcacgtcgtccgtcccacgtccgtccgcaagnaaaagttcgaaacgtgtattgtatcattgtgatgttattagcccatgagaaganncctggttttagtgggagcgagatcnntagcaaatctgttaaacccgaagctgctatannttggctgnngtcggcgtggcatagaaaccgcaatttcattctannaagaaatcgatnngattcaattgnnataggatcgtgnngctggaatggaagggaaccagtnntatgactgnnatggaaagaagcaaaagnncttggttgcatacccatcgatggttggccccatgtccatttgcgtgatacttttgacatccgtggtcaacgaatcctnngttcaaataagtnctaccttgatttcccacgtggtccaggccannngtggtcttaacctggggttcaattcnncttcagat

SEQ ID NO: 31791 - DNA, 264 bp, Gossypium hirsutum
  Clone ID: LIB3120-002-Q1-K1-C8
cccacgcgtccgcccacgcgtccgcttacttggtcatgcaaacgacttcccatccgctatcattggggttcttgttaatgaaaataccttctaccccgtcttcaccatttcttgtgaaacacccttgaccttctatggattacaacatgcacactccttggctcctggatataccgaacctgtgaccgttcactacaacccttaggagattgacttcccataaatgaagagcattaccattgcgagatcagcctttctcttctt

SEQ ID NO: 31792 - DNA, 427 bp, Gossypium hirsutum
  unsure (1)..(427): unsure at all n locations
  Clone ID: LIB3120-002-Q1-K1-D5
gttgaaagcggcgtccaagttaattttaatccccgttccccccggtgcaacctaggttaggtaacagagccgtttttcagggcactcccggaacaagtgttccctcgtttccgcctcactttggcacctgcaacaaacccattaatcttcgatagttaagattactgaaagtaggcagaaagtttcgtgaaaaacgccatactgtaatcttaattttagggggaagatctagattccacaattttttgtaaaattgtttgtaatttgcctgtaaatgattctggtcttcatgtagaagaagtttatgtccactacgcanttgctacgctaccactccaccaagagtggtgatgagctgaccaacttgaatgactatgtgaccagaatgaaggaggcgtccaatgatatctactacatcaatggtgag

SEQ ID NO: 31793 - DNA, 172 bp, Gossypium hirsutum
  Clone ID: LIB3120-002-Q1-K1-D6
cttccgtaaaaacctgcttggtcattttcctttattacccattgtaaaaccttttccggggtttgcttttggcttttacctttttggttttgcaaaatagtttgttatattaacacataactgcatgttaaattctctggtccggtatgaataaaaattattttaccttttt

SEQ ID NO: 31794 - DNA, 451 bp, Gossypium hirsutum
  Clone ID: LIB3120-002-Q1-K1-E12
cccacgcgtccgggttttgatcgtgaatttagaggtgggtataattcaagttttaattgtgatcagcaaatggcaggaaaatgggggttttgtggccaaaggaattaaaaaattcaagagtgacggtagaattggcgatgggtatggttctatggttgattttgatcatagttttggtcagcatgttgatggtcttggagagtttcctcttaagaccttatgcgataggagttttttgaacgtgggattcaaatcaaagaattatggttgccctaatctaaattatgattatgataatgattcaaaagagtatagcattgatgaagaaatggggtttcgagctagagattcacgtgcttgggattcagtgccccaaggtattcatcaaaagaaacgtggtagagttgatatgaactttgaaccaggtggtgactgtaggggtttaaatgga

SEQ ID NO: 31795 - DNA, 444 bp, Gossypium hirsutum
  Clone ID: LIB3120-002-Q1-K1-E7
ggcgatgacatccacttttggattggtaaagatactagtcaggatgaagctggaactgctgctgtaaaagcggttgagctagatgcagtactaggagggcgtgctgtgcagcacagggaacttcaaggccatgaatctgacaaatttttgtcatacttcaaaccttgcattatacctctggaaggtggcgttgcttctggatttaaaacagctgaagaagaagagtttgaaacacggttgtatgtctgcagaggaaaacgagttgtcagattgaagcaggttccttttgcccgttcttcactgaatcatgatgatgtgtttatcttggacactcaaaataagatttatcagttcaatggtgcaaattctaatattcaagaaagggcaaaggcattagaagtaattcagtttctaaaggagaagtaccacgagggaacgtgcaat

SEQ ID NO: 31796 - DNA, 437 bp, Gossypium hirsutum
  Clone ID: LIB3120-002-Q1-K1-E8
cggactcgtggttttcaatctcattacagacgtggattttagacaattagttaaccaattaccaagaggagcaagtttcacgatcttgtcggattcatgtcacagtggtggtctcattgataaagaaaaagaacaaattggaccttctacctatagggcagcttcatcactttcttacaaggctaagaacatcccttttgaatccatacttgagcacctaacaacactaacagggatcaacacatcagacattggtactcatttgttagaatcctttggtgccaatgccagcctcaaattcctcacacctcagctcgagtccgagttattcgacttcttgaaggctgatgaggggattttgttaagtgggtgtcaagcagatgagacatcggcggacatgaacccgatggaaagcggtgggaaagcgtacggagcct

SEQ ID NO: 31797 - DNA, 139 bp, Gossypium hirsutum
  Clone ID: LIB3120-002-Q1-K1-E9
tcattcacttccacttccaggactccaccatcctttatgacatcttttgcttcattccactcctaccaactcaatcccgacatgcaacaatccataaaatactatttttttgttgccaatgcaaaattcattcttgatt

SEQ ID NO: 31798 - DNA, 440 bp, Gossypium hirsutum
  Clone ID: LIB3120-002-Q1-K1-F5
caaaaatggtatttttggtcatgtgggatcgttgagggaagagaatgaaggtgtgaggagtgatcaaaaaaatggttttggtgaaaaggggtattttggtggcaatggtttgtggtgtattggtgtttggatgcaaaagagtttttactgtggatggagtggctaatgctggttatggagttattgggtagtgcatattgttgttgaggaatgcttggcctaaggcatctatgattcttaaagtgtttaaggaacaaggtctggttttgacagctctgttgggtcttccagctttcttctcgatggtagagactactataactacattatggccttagaagatgagggatggatttaaggcctgctttacagaggttatacatgacaagggcttctgcatataaagatgctcttaagagtttcataaaaggatatcaaga

SEQ ID NO: 31799 - DNA, 301 bp, Gossypium hirsutum
  Clone ID: LIB3120-002-Q1-K1-G10
cccacgcgtccggggaaagtggactgaaacccactactagcacttataacacgctaatcgaaggggacgggatagccggtaagcccgaagaatctgttaaactggtagacctaatgttgcaggaggggaatgtcaaacccaatctccgaacctataatgtacttgtccgagcatggtgcaaaaagaacaacatgacagaagcttggaatgcggttaataagaagaatggccttcggaatgcaaccagatgctgttacctacaataccatagcgaccgcttattcacagaatcaagagactg

SEQ ID NO: 31800 - DNA, 448 bp, Gossypium hirsutum
  Clone ID: LIB3120-002-Q1-K1-H7
caacccttgatcggcaccaacacaaatctctatcctttgtttccatggaagagcagggttgttggggttgtaaagatgatcacgaagtgttccattagccatgtaatcgtagaccagaatcatctcaccgtcatcgttgcaatatccgatcagtgagaccaaatggaggtggcgtagctgggaaagcatctcaatctcggtcctgaattcgtgagcaccttgttgagactcatggttcaaccgtttgattgcaacttgggtctccccaccatcgatgaatcctttgtaaacgttgccgaaacctccaacaccaataatgaaaacattgtcgaagttgttggttgcttgtttgatctcagacaatgaaaagtatcgacaaagatcataaggctgagatgaaccaccacacttggttgactccttcactggaactcctgtaccggaaaac

SEQ ID NO: 31801 - DNA, 414 bp, Gossypium hirsutum
  Clone ID: LIB3120-003-Q1-K1-A10
cggacgcgtgggcggacgcgtgggcttgaccgcaagcacattctccacctcagaattgacgatcaggtaaagagagagattgggacgctcaaacttctcaaacatcccaatgtggtccggctgcacgaggtatcggcgagcaaaacaaagatttacatggtccttgagtatgtgaatggaggcgaactatttgagcgagttgaatcaaaaggcaggcttttggaatgtgaagggcgaaagttttttcagcagctaattgatgccataagctactgccatgagaaaggtgtctaccatagagacctaaagccagaaaatgttctaattgatgcaaatgggaacttaaagatattaagattttggcctcagtgctttaccttcgcatttcgggaatgatgggctattgcatacaac

SEQ ID NO: 31802 - DNA, 269 bp, Gossypium hirsutum
  Clone ID: LIB3120-003-Q1-K1-A12
acacgcgtccgcggacgcgtgggatccacaccaccaccacagcaatcacgcaatgtcaggacgaggcaagggagggaaggggctgggcaagggcggcgccaagcgccaccgcatggtcctccgggacaacatccatggcatcaccaagccggcgatccgacgtctcgcccgccgcggtggtgtgaataggatcagcggtctaatctatgaggagacccgcggggtgctcaagatctttcttgagaatgtcatccgcgatgctgtgacct

SEQ ID NO: 31803 - DNA, 426 bp, Gossypium hirsutum
  Clone ID: LIB3120-003-Q1-K1-A3
cacaatcaaacttggggttccttaatcacgtgaaccggtccttgccatgtcccaatttgaggctccaacacagagcacgtaaaggtaagaaccatagatggaaaccccatttttgttcttcaaggactcatgttcctggttcagaagggttaagaataagcaaggtgaaggtcactgttgtgtcaaccatggcagccactagctcagcaggtgaaatagctatgtcatcagaggagaacgtttacaatgtggtgttgaaacaggcatctctggttaataagcgattgacatcacctcgtgttgatgacgttgtacctggtgatttgagcttgataaatgaagcatatgatcggtgcagtgaaatttgagccgcttctgcaaaaaccttttatttgggaactttgcttacgaccccagaaagacgta

SEQ ID NO: 31804 - DNA, 392 bp, Gossypium hirsutum
  Clone ID: LIB3120-003-Q1-K1-A7
gtcagtcatttgcatgctttctgactcctggaatgaatattcgacttattggagaagctaacgattatgtgggaaagggtatggctggaggtgagttggtagtaacccctgtagagaatcctgggttttgccctgaggatgcaactattgtacgaaatacatgtttgtatggagcaacaggtggacaaatctttgttagagggatggctggacagcgctttgctgctagaaactcacttgcccaagcagtggttgaaggcactgatgaccattgctgcgagtacatgactgatggctgtgtggttgtacttgtaaaagtggcgataaatgttgctgctggaatgactgtaggtttagcatacatgcttgatgaggatgatactctaatgccc

SEQ ID NO: 31805 - DNA, 370 bp, Gossypium hirsutum
  Clone ID: LIB3120-003-Q1-K1-A9
ccggtccttgcttactatacatataatagagtccgtgttcaatgcaacctataaacagtggcctacgcactcttactcactgcacatatgggggatccataccgatcgatacatggccaggagcttcaaacggcgccgactccggcgatggcggcggatctgggggaggatctgatcttggaggtgttgaagagggcggacgcaagaacgcttcggcgggcggcgtgtgtgaatcgacggtggctagtcgatgtcccatgacaagcgcatctgataggctatatacacgaggcactggtccttaaccagactctgtagcaaccacatcctggcgttagtgctggcactcaaggccttattaccaacaacc

SEQ ID NO: 31806 - DNA, 473 bp, Gossypium hirsutum
  Clone ID: LIB3120-003-Q1-K1-B10
cattagctgaagaaaaaagaaaagtcgccttggaagctgagaaaatggcatcgaaagaagctgctgaaaaagaagctgctcgaattagagaagctgctaatgctgctgcagaagtggcatttaaagaggctcaacagaaaaaaaccgcagggagagaaatgttatcccagaaaatgggcaccagttcggccaaagatggacaattacaagggatccatgtcatggccacggatgctgcattaaaagccgagacaagccgactaaaaacatatgatgaagtcgcgactatgtaccactccgttgctaaggacttgagtagacatgctcgaaagattcaaacgttggtagcacaaataagtgggagccttgagaacgtcagggcaaaagccactgcattgatgaacattttcaaaaatcctgaatgccctcagcctatctctatattgatttttgcaaagaaggtggtgtgtctt

SEQ ID NO: 31807 - DNA, 478 bp, Gossypium hirsutum
  Clone ID: LIB3120-003-Q1-K1-B11
accctagtgcctagaccttgggaatcggcagtctttagtacttttggggaactaagaaatcttccttggcttctgagcacagggatttggtgtcagtgttgactgaaccttttaagtgattcggtttgagctttccaattactaatagttaatcggattatttcctgtgacaatgctagttcgatatctatcattaactgtgaatagctatctttatatatccaagtctttaactaggtatcatggatgatgagtgacacatcctcactaattacaacttatttatcttgctatagattatgtctcttggggatatcttacttagtaatattaagacaataagctggtctagtttgtctcatttattgttttatttatgctcattgtttttcagattgctattacgattcggtttattatggtttcattctttataggttgttttgttagttatttaaatttcgtttgaatgttggtt

SEQ ID NO: 31808 - DNA, 380 bp, Gossypium hirsutum
  Clone ID: LIB3120-003-Q1-K1-B12
cggacgcgtggggaactgtgttggttggtatagcatgatatcaaccaaatttagaattcactgtgtttgtttaccatgctttgtgtctgaataaaactgagacctgtttgtgttgaaaaaaaaaaaaaaaaaaaaaaaaaaaaaaaaaaaaaaaaaaaaaaaaaaaaaaaaaaaaaaaaaaaaaaaaaaaaaaaaaaaaaaaaaaaaaaaaaaaaaaaaaaaaaaaaaaaaaaaaaaaaaaaaaaaaaaaaaaaaaaaaaaaaaaaaaaaaaaaaaaaaaaaaaaaaaaaaattggggggggccttatatataaacaaaattatattaccgggtattgaaaaaaaaaacttttttatttggggtccaaaaatataattaa

SEQ ID NO: 31809 - DNA, 287 bp, Gossypium hirsutum
  Clone ID: LIB3120-003-Q1-K1-B3
gtcagcctatgaaaacaaccattacatgtacaacataagacgctagcttaatctatcagtcaggtcctgagctcaacggctctgtactctacatgtcattgcgcttttggaattttcgaatcctaaaagaggactccactaatactggctatgggagccagagaacacgttgctagacagtcagccaccaagctcacagcgaggcaaccaatagggaccgcggttaatactcaagatgaccggaaagactacactgaaccaccagcgggtacatgattcgagctctg

SEQ ID NO: 31810 - DNA, 162 bp, Gossypium hirsutum
  Clone ID: LIB3120-003-Q1-K1-B7
tcgtgcgatttcaagctctctctgggtgttttatggcagtgacacttgacagccgtacgttcagagctctaatgcgtagcgcctaacgcgctactgatcgttagttcactttcaacttcttcgcacagattgtcaactttggcttacacactgtcatggaag

SEQ ID NO: 31811 - DNA, 289 bp, Gossypium hirsutum
  Clone ID: LIB3120-003-Q1-K1-C11
ctcttttctagattcttggcgatcgatcggagcggcggggttcaagcaatcctaccgcggccccgattgccgagcacgttgaagagccggaggttgtggtgcaagatcgggagtcccttctgggcaagatctcggagaagatccacggccacgattcgtcttcgtcgtcttcctccgattccgaggatgagaagaaacccgaagtgtccgcggcggcgggaatcaagtcgaaaatcttccgcatttttggaagggagaaggcgattcatcacgtgcttggcggggggaa

SEQ ID NO: 31812 - DNA, 386 bp, Gossypium hirsutum
  Clone ID: LIB3120-003-Q1-K1-C12
gatcaaggagaagggcgtcggcggcttcatcaaggagttcaaagatgaaggctacacgaaatgctttttcgatgggaatcttctgcaaaccaaactccataatgtaagtgcaaccgttgtcggagttgataaatatggtaacaagtactatgaaaaactaaaagatactcagtatggaaggcacagatgggtggagtatgccgataagggtagatataatgcatctcaagtaccgccagagtggcatggttggttgcacttcattactgaccacaccggcgatgaacttctgatgctgaggccaaagaggtacgggctcgagcacaagcaaaaacttctctggagagggagatgcatacatataccattccaagggtcacacgctt

SEQ ID NO: 31813 - DNA, 412 bp, Gossypium hirsutum
  Clone ID: LIB3120-003-Q1-K1-C2
catgtacatcggcgatttcccggtgtcagtgcaaacgacagaagacattggtcgtaatgtgtcaaacattatacggagatgctcaagtgacttgttttccgtcaccattttctcaatttttaaatgagcaaatggctaatggcatgaggagctcaaaatctaacatggatgtttacacggtactttaaaggaagtggctgatgaacacatccaatgggacaaccagaaactcaaatgcactatggcctttgttacgttacttttcattattcgtacatcctttgtacattcctggataatcatctgatcaaagtgatgaccctatgatatattggcactatttggaccactgctcgtaacgtaatgatgttgcttgagagatccatgaattactttatacaaaccaaatgaa

SEQ ID NO: 31814 - DNA, 406 bp, Gossypium hirsutum
  Clone ID: LIB3120-003-Q1-K1-C5
tcggcatacactactaggacacactactagctttggcttgctcaatgatctcatcgggtaccattgccactggctgttcggcgcacgctctcatggtcgctcctttcaccggcctaacgtctgcctctgctttgccagtcaccaatacagccaacaacgacattactgtcttggcatgctatggcaggcagagtgcaatgcatgcaggtgtggcctcctactggaaagaagaagctcgagactctgtcatacctgcccgatcttacacccgtgcagttggctaaagaagtggattaccttgtttgctcaaaatgagttccttgcttggaattcgaattataggagggattcgtgcacacgatatactctagcctacccacgtactacgatggacgctactggacca

SEQ ID NO: 31815 - DNA, 316 bp, Gossypium hirsutum
  Clone ID: LIB3120-003-Q1-K1-D1
gcgacggctgctgttggctgtggcgttcgagctagctaggacctactccgtaggaacgcactttctcatcgagatcatagagtacaactgccagctggctcttcggctcgagcgctacctatggccatcctcttacactggggctacagcatgactcagctttcccatgtcactatgaaggcgcagacatactgacattatcttgtatcacaagcaatggcagtgcagtggcaatagcgatagcagtgtgtgcactcctactggaaagactaaggaccagactctatcatacctggctgatcttacacgcgtgcag

SEQ ID NO: 31816 - DNA, 370 bp, Gossypium hirsutum
  Clone ID: LIB3120-003-Q1-K1-D11
gcgccgaggaagcacttgctagggtttgagagtgtgtacttggaggggaagggggaaagggatatggtgtttagagttgatgtctgtaatgatttgagcgtggtggatgaggttggggagaggaagttggggttgggggaacatgttcttcatgtggggagcttgatgcattccttgacaattagggtttgaagggtttgtagggttggatgtgattgaccacaagaaagctgtgatcaattgaagggttgattgatttgcaaccatttagcatttgtttgagggatcaattgtaatttcggataatgcctcatgagttcaatcaagaaattgggatttggtttggtgaaaaaaaaaaaaaaaataatat

SEQ ID NO: 31817 - DNA, 425 bp, Gossypium hirsutum
  Clone ID: LIB3120-003-Q1-K1-D3
gatggagaagatgaaaatcctcctttgattgattctgaaaacaattcaaagccacgtcgtattgcactttttgtcgagccttctcctttctcgtatgtatcagggtataaaaacaggttccagaattttataaaatatttaagggaaatgggagatgaggtaatggttgtaacaacacatgaaggggtcccgacggagttctacggagcaaagttgattggatcaagaagtttcccgtgcccttggtaccagaaagtgcctctttccttggcactcagtccaagaataatttcagaagttgcacggtttaagcctgatataatacacgcatcttcacccgggatcatggttttcggtgctctcattatagcaaaactactatgtgtacccatagtaatgtcttaccacacccatgtttcagtgta

SEQ ID NO: 31818 - DNA, 196 bp, Gossypium hirsutum
  Clone ID: LIB3120-003-Q1-K1-E10
taatttgggaaattgatcatcttttatcatatttatttcatcaggctctggaatgaaaggtattaggtgttatattgagtcaggcggaatttaataaagtgaacaaaatatggcaggccgttttactggttccaccctttcgttcccgtgcttgcgacgtcatacctctattattgcttcaccaacatgcaattat

SEQ ID NO: 31819 - DNA, 481 bp, Gossypium hirsutum
  Clone ID: LIB3120-003-Q1-K1-E11
cgagaacgccgtgctgctgtggacgctggatccggcggagagggatgcccagctggcgagtgaggcggcgaagaagtcgaaccatctggctctgattgagattggctgtgggaggtcggcggcagagttactggctgcgagggctgagtatcatcagcggtttaagaggtctttggaggaggatgtggctgctcatactaagggggattttcgcaagcttcttgtaccacttgtgactgtgtaccgatatgagggggaagaaatcaacacaacattggcaaaatcagaggcaaagctactccatgaaaagatctcgaagaaggcctacaatgacgaagagctcattaggatcctcactaccaggagcaaagcacagctccgtgcaacattcaatgactacaataatgcttttggaaatacaatcagcaaggatttgcacgccgatccgaatgacgagttcctctctgcactgagagcagtc

SEQ ID NO: 31820 - DNA, 276 bp, Gossypium hirsutum
  Clone ID: LIB3120-003-Q1-K1-E12
aaagaacacagtgctgctgaggtccctggtcccaacaataaagggaaaaacaaaataaaaagatagggtgaaaacaaaacgcagggcttagatgcggattccaaatctcggaacggagcggcacactggaggtgcgatattgaggcgacaagctgtaagaaaacagaactattagttcggggggggccttttctgggtgctgttgctcgccgagctgattaggatgatttgtgctctttttttgatggtccgcatttatggcggtgctgcggcttt

SEQ ID NO: 31821 - DNA, 440 bp, Gossypium hirsutum
  Clone ID: LIB3120-003-Q1-K1-E2
cgcttgtatcgcttgctttcactgtgactgtgagttgcagccatgtatggaggagatgaagtatcggctatagtgatagatttagggtctcacacttgcaaagctggttatgccggtgaagatgctcccaaggctgtatttccctctgttgtggggtgcattgatcaaatggatgctgatgatgacaaagaaaacaacgattctgagactaacaacaataatgttgattccaacaaacccaagggaaaacgcaggttgtatgtaggctctcaagccttgggttttcgtcgtgaccatatggaggtggtgtcacccctaaaggatggggttgttgttgattgggatattgttgatagcatatgggatcatgctttaaaggattgtttactcgttgatccgaaagaacatccaatgctacttgctgagccttcttccaacac

SEQ ID NO: 31822 - DNA, 364 bp, Gossypium hirsutum
  Clone ID: LIB3120-003-Q1-K1-F10
atggcggcgagcgtggcggcggtgcagggtcgccacgtcaccaacgaacgggggacaaagctccgcttcaaccgggacgccgagctggctgcggcggccggagctggcacggagcggcagactgggggtggatatggtggcgacaagcggcaggagacgaacgattcgttccggagggccatgtacttgagctgttgggcgccaagctaattaatatgattgagctcagttgagaatgttcgggatttagggcggagctccggctaacctggatggaggatgtttacgatccttgtaaagtaaattactggaattgtaactatcgcttctatgaatatacaataaagatgtactttcactcttt

SEQ ID NO: 31823 - DNA, 354 bp, Gossypium hirsutum
  Clone ID: LIB3120-003-Q1-K1-F11
gggtgcctgcggtgaacattttcgaaagtaggttgagacgtgggaagtttgatgagccacgcgtgtggccaattggatctcgtatggaaatcaccaaggttatccactaagtgcaaagtctgattgacccgatgatgtacctggtgatgtgaaagcattcaaacgcttcacaagctgctcgtgtaggactgttaaggacgttgccgaaactgtctagaatgactttggaagtattgacattctactgcactgtgttgcctatggaccggacgttaccaaacccgcttgttggcacatccataattggattccttgctgcactaaatgcataaagctgtccgtttgtttacatac

SEQ ID NO: 31824 - DNA, 329 bp, Gossypium hirsutum
  Clone ID: LIB3120-003-Q1-K1-F12
gggtgcctgcgtggaacattttcgaaagtagcttgagacgtggaacgtttgatcagccacgctcggggccaaatgggtctcttctggaaatcacacacggacatccactatatgcagggactgattcacccgatgatacacctggcgatgtcataatcctacaaatgctacacaggggcaccttatcggactgttattgaggcagccaaacctgtatagaatgactttgctagaattgacattgtagtgcactctgttggctcttgaccctacactaccaaaccgacagtggagacctccaaaataggacaccttgctgcaatattcgc

SEQ ID NO: 31825 - DNA, 310 bp, Gossypium hirsutum
  Clone ID: LIB3120-003-Q1-K1-F2
tggaatcaacaactgagtcatgattagcagaagacgtatatgagagaccgtgaggaccatgtccctagaggctagccatatccatctgaatgcatagtgagctgcgtttgaacactttcagcgtacactggtatatgagtgtcatctacggagaccctagatacaaaacgaccattcctggtgagctgcgactattgcattaatgtgcaccagtgctcattattgtgctacatgctcctattcaaggatctgatggacatcacatgatacatgttgtacaaatcgaagagatgcatcagacttgaaccac

SEQ ID NO: 31826 - DNA, 249 bp, Gossypium hirsutum
  Clone ID: LIB3120-003-Q1-K1-F3
aggactcctgcgctgagtgatgagatgcagaagacgtatatgatagtacgtgagaatcatgacgctagtgtcaagccatattcatatggatgcattgcgagctgcttcgtagtctatcagcggtcactggtatatgatgtgagtctacggagaccctagagacgaaacggccgatgacggtgagcgttgaactctaggttgcatgagcatcggagagctttattgtactacaagatcccattaaaggat

SEQ ID NO: 31827 - DNA, 448 bp, Gossypium hirsutum
  unsure (1)..(448): unsure at all n locations
  Clone ID: LIB3120-003-Q1-K1-F6
cccacgcgtccgcccacgcgtccggtttcttccatatccaaatcctttcctttacctagatctcttcccttcaatcctctcacaactcaatcatcttctaccctgaaaaaagtgaacttctcttctcttccttccattacctcaatccttaccaaagaagacattgtcaaggaagaagaacaataccctcaaaagtcaagctttgatttcaattcctacatgcttcaaaaagcaagttcagttaaccaagccttggaatctgctgtttcactccgtgaccctgttaaaatccatgaagcaatgcggtactcccttttagcaggtggaaaaagggtacgtccggtgctttgtttagcagcctgtgcacttgttggtggccgggaatccatggctatgcccgcagcttgtgctgntgaaatgatccacaccatgtctttaatccacgatg

SEQ ID NO: 31828 - DNA, 478 bp, Gossypium hirsutum
  Clone ID: LIB3120-003-Q1-K1-F9
ctctttcttgatgagaacgggctggtggcgggatggctggagttcgtggcgcgagctgtcccggttcattgcgaacatgggtgatgaggagggggtcgaggggcattgcgggccgtcccattgccaccagttgttggtttatgaccgccatgtagtggatatattggatctggttgtccaaaatggccacctttgcttgcggggagagatggcggcttgtctcatcggggcgcagcgcatcctcttggtgcgacctgtggtgaggtgcccgagaagtttctccttggtggtatcccgaagccgccctctggtgaggtggatcttcgcttgatggtgtagccgttcgaacagagtgctcttgtcggagaggtggaggaggaagtttgtttatggggtttggatctctttccgagtgaggagattgagcggttgatcttcctccagggttaccccccgtcaccttactaattacgggcct

SEQ ID NO: 31829 - DNA, 467 bp, Gossypium hirsutum
  Clone ID: LIB3120-003-Q1-K1-G10
ggggatatagatccgtatgtgctgattgagtatagggctcaggagcgcaagagcagcgtcatccgagcaggcggaggttcgaacccagtttggaacgagacattcaagtttctggtgaactactccggtggcaatgacagccagcagaagcttgtcctcagaatcatggacagagacacattcacggccgatgatttcatcggccaggcatcgatcaatgtggctgacttgatctcgttaggcagcgaaaacgggaaggtcatcgacctacacacgaagaagtacagtgtcgtactcgcaaatagaacatattgtggagagattcgtgtgggagtcaaatttatccccaaggtagaggagaatgagaccggagaagagctcggaggatggaaacacagctttcaccactgatatattacttgttaggagggtgttgtgtagtcgtgtgtgtaaaattgtgataccaa

SEQ ID NO: 31830 - DNA, 450 bp, Gossypium hirsutum
  Clone ID: LIB3120-003-Q1-K1-H9
attccggtgcctgttgacctgtctcgacagtcatggccggaccaggtgcggcagtgctgtgggtcgacgttgatgtatttgaggactgggacatgtagtgggatcaaggtggggcgggccactcaggcgcgggatgagattgtggacaatgtgttggcagcggtggagggggtggtggggaatgttccgcggaagtgggctaatgtgcggtcgttccatataaaggcggcggagtctctggcgctgcctatatatcaggctttaccggagcaggggttgaagattgagggggtgcagaagaagggagagactggtggtggttccaagaagaggaagagtaaagcatacaaatctgaggacatgggggtaaagggaaccaagcggttttaattggtacatgaaatggagtgatgggtttgatggaagttatttagctagctagaatgtgtc

SEQ ID NO: 31831 - DNA, 426 bp, Gossypium hirsutum
  Clone ID: LIB3120-004-Q1-K1-A3
gcatttctggcctatacacaacgaaaacaaatgcaaacatcttatgcccgcatgcgaatggggcaggcttgacgctcaacagggagaggcgatatggaaagcaggaagcaaatttattgtagaggctttgacaatgcaaaacgtgaatgattacatgttccatttgttgaacaaatactctaaaccttagatgtataaaccgacaatacctccaaatgtcacgaagctctgtttcgaaaccacagagcacggcctattgaaggagtgcatgcaaaacatggtgaagtgtcctagtgataaacttccatgtacattgccttccccatttaaaccttgaaccattactgcttctctcaaggcaaaagtaaaaatagctagacacgctgtgacgtgggagactgaatattgcaaaaaactgaaagcata

SEQ ID NO: 31832 - DNA, 361 bp, Gossypium hirsutum
  Clone ID: LIB3120-004-Q1-K1-A5
cattagctgaggaaaaacgaaaagtagccttggaagctgcgacaatggcatcgaaagaagctgctgcataagatgctgatcgtatacagaatgctgctacactgctgatgcagaaaaggcctcgaaagtggctaaacacaaaacatcaactctgctagatgcgatatgacatacaatggtgaccggtacacacctagtttgacgattataggggatgcaattaatgatctcaaatgctacattaaaagcgcgtcacaagatgactaagatcatctgctgacatcatgaatatgtaccagtccgtttctaatgacacgcttttatatgctctacatatgtgaacgtccactgaacatattgg

SEQ ID NO: 31833 - DNA, 266 bp, Gossypium hirsutum
  Clone ID: LIB3120-004-Q1-K1-A7
catttctttaggaaataagagatgtcgccctgaaagctgagaaaaaggcattgaaagagggtgctgaaaaagaagctgatcggacttgataatctgctaatgctgctgctgaagaggcttttatagaggcttactagaaaaaaaccggatggctagatatgatatcacattaaacggtcacaaggtcggccatagatgtacgaattacaagggaagcatgtgatttacacggttactacattgaaagcggctacacggctactaaa

SEQ ID NO: 31834 - DNA, 392 bp, Gossypium hirsutum
  Clone ID: LIB3120-004-Q1-K1-B5
cttgaaatatgcatatatctaaatgacaagtacgaaattgatgggagggatccaaatgggcacgttggttgcatgtgggcaagatgcggcgtgcacgaccagggatggcgagaaagacccgtttttgggaaaatacgatacatgaactatgctggatgcaaaaggaaattcaatgttgacggatacacagcttatgtcaagagactagtcggtgaaatcaagaagagaaaagcagaaagcccggtgggtcaaaagataaagcagccgcgcaacgaacaacattaacatgtcgcggcctgtctgttgagaaactcttttatctaaactccatggctgtagtaccactaaccatattgtgttagaaatgacaatgacatgctaggttttttggt

SEQ ID NO: 31835 - DNA, 289 bp, Gossypium hirsutum
  Clone ID: LIB3120-004-Q1-K1-B6
cttgaaatatgcatatacctaaacgacttggattaaaacgagcggcggcatcacaatggggggcccgatcatatgcgggggggattcggactgcacgcccacggatgcgaacaaagacccttttattggaaaaatacgatacatgaactatgccgggagcagaaggaaaatcaatgttgacggattcacacgttaatttaagagacttacctgtgaaatctagaagagtaaagcagaaagcccgcgtggtcaaaagatataaaaatcgggccactaaacaacataaact

SEQ ID NO: 31836 - DNA, 359 bp, Gossypium hirsutum
  Clone ID: LIB3120-004-Q1-K1-B7
ctcacaacatccataaatcgaattgacacgtactaaatggactggacgcatcaaactgggtgctgggatgaactgcgcactacacacggaacacacaaacggggatcgccacactgaccagcttttgtgaaaatccgatacatgaactatgctggatgcagacagaaaggaatggagccggctacacaccttcatggaagagactagcgcttgaaatcaactaagacgaaaagcataatgcccgacgggccaaaagataaagtatactggccacgaacaacataaacttggatcggcctgtctacagagatactcttgaatgtcaacttcatgggtgatgacccactaacaatatgtgt

SEQ ID NO: 31837 - DNA, 358 bp, Gossypium hirsutum
  Clone ID: LIB3120-004-Q1-K1-C1
cccacgcgtccgtggcctatgtttcttgatttctgggttttaactcaaagaaagagaaaagtcagggtcactggaacgtaaaaggttagtgcggataacaggacctggaagagcgaacttaaggcctggcgttagaagctcgttgcttgtcggctaaacagctctttgcatgccgacctgaacggcttgcataaaccctgtgttgacgctatgcaaagcagaagacgttgcttgttatacatatgcacgtgtcgacctccgagcaggcgctgatggagttcttaaactgcttacctacagtggaatccatggcttggcatacattgaatttggaggaacaataactgatcacgactgc

SEQ ID NO: 31838 - DNA, 193 bp, Gossypium hirsutum
  Clone ID: LIB3120-004-Q1-K1-C7
cccacgcgtccggatatgctggaatgcttaaccttctaaatgtgtcggactttgaaagggggaacgtgctttagaggagcgggtcggtacccaaacgagaaatggattggggagctcattgttgatgatttccaccttcgttctaatccattctggaaacatacaactatagtgcgtgctcatgtggaataaa

SEQ ID NO: 31839 - DNA, 176 bp, Gossypium hirsutum
  Clone ID: LIB3120-004-Q1-K1-D4
ctgccatggactgtacctgaaagttctctggtcggcgtaactggaaatgtaatgtaacacaagactgcatcacatagctagtgactgacttgaacagcgcaaagatggagactgacgacgatgatgaagtgtgacctccctaacggtatgtcgatcaactaacagctcgattaacc

SEQ ID NO: 31840 - DNA, 503 bp, Gossypium hirsutum
  unsure (1)..(503): unsure at all n locations
  Clone ID: LIB3120-004-Q1-K1-E2
acgcctgcaggtacggnnnaattttctggtcgacgccacgcgtccgcccacgcgtccgataaattaaccgtccaactacaataaaaaggaaaatccggaaaaaaaaatcgtgggaatagggataaggtgaagataggtgggattagcggaggctatgtttttaggagtagcagtgtatttcacgctctgggctattcattactctatctcttatgatgatgccgagttgctaaggagacagtttgatcttgcaaacaaagaggcaatggatgaatctgcagagtggaggctgagatttgatgaagaggcaaacaaggcttgcaagtgtgccaaggaactagacgacgagcaaagagtctattggaaagaatggagattgcactggctgtgacgaaaaactgatgctgactgaaaaggaaaatgctgctttactcaagcaagtggaaacgttaaaaaatgagcttgaggcagagaaacagatgtgtcacacatagtagacaaac

SEQ ID NO: 31841 - DNA, 384 bp, Gossypium hirsutum
  Clone ID: LIB3120-004-Q1-K1-E5
ctcgcgcttagcgtggaggcgctgcagggtcgccacgtcaccaacgaacggcggacagagctccggtacaaccggcacgccgagctggctaccgcggccggagctggcacggaccggcacactggacgtggatatggtcgcgacaaccgccaggggacgaacgactctggccgcacggccatatacttgatctgtcggccgccaagctaatgcataacattgaactcacctgacactgctgactattcatgaccgctctctggctgacccgtatgtagattcttgacgacccttggcaatgacattactggagctggggctatcgctactatgactatacagtctaaaacttcttatactgtttgataccatggagcaaaatgg

SEQ ID NO: 31842 - DNA, 386 bp, Gossypium hirsutum
  Clone ID: LIB3120-004-Q1-K1-E6
gcgtcgtgtgccgcgtggcgggtgccgtcgctcgtaccaacgaacagcggacaggctcggtaaaccgaacgcggggtgggtgggagaccggagctctcacggagcgtcacactgtgaggggaatattggtgcattacaacgcgtaaggacgcacaaacacattcgctcgagaatggcatagtcttactctgatactcgccaagctcatgaatactcattgagctcagctggatatgcttgacattcacgtgagtcgctctggatgacctcaatgcatatcgtgtacgacccttctgacatacattacttgactcataactaacgcgattatgcatctactatagctacatactttgattgtactatcatgacatgatactcatggg

SEQ ID NO: 31843 - DNA, 402 bp, Gossypium hirsutum
  Clone ID: LIB3120-004-Q1-K1-F2
cccacgcgtacgatggcctctactttctgtcaaaatctctgtttgctttctctttttgtgctcttggcagttttctcggctgagcctatttcccattggaagaaccaatctccaagttctagccaggcaaagttacaggctgaaaagctcataagatgacttaatatggtccctaaagatgctattaatgctggtgacaatgcccctgcagttgagacctccaagattgttgaaaagcaattcacgttcctcagtgcttggggaacctgggccttccattcaggagtttgagtcaccatgctgggtactataaacttacacatgctgtatctgcaaggatgttttaccttttcttcgaatgacggaacagcaagaaagaccctgtcgtgatttcggtgactg

SEQ ID NO: 31844 - DNA, 437 bp, Gossypium hirsutum
  Clone ID: LIB3120-004-Q1-K1-F3
gcactttcagtaacagtgcccacattggctctcttctcctttcccagagccttaaaccgtcatttgtactacaacaattgctctctcatcgctcgatgcatacggtctcgactctttcctcaaggccgaggagatactcttcttgcttcccgctcttattcgtctacacttaagagcttgtgcgctgctccagttccccaacgtttacaccgccgtttggagtgcgtcgcgagttccgcagcttattttggggctgctggcggcggcggcgtttatggcggcggcgatggaagtggtagcggtagcggtggcggaagtggagattgtggggaaggaacgggcgacggagacttgaaggcgaaattgggagcgggagccgttgacgagccatctgctgtatctcccgatattattattcttgatgttgggggaatgac

SEQ ID NO: 31845 - DNA, 460 bp, Gossypium hirsutum
  Clone ID: LIB3120-004-Q1-K1-F5
cccacgcttccgcccactgttccgattaaacgttttgcccgggctctctagatcagttgtaagacaagaacaatgtggagataatgtaacacaaaactagaggttgcaaatacgcttaaacacacaaaaggggaaacgttcctgtgagacacctaggggtgaatatctttggtagtgccaaatatagagtctttggattcccttagaccttaatctaccacttagaaagcgtcggtctggatagcatatgcattagcaaggacaagggcagcttgcattaaatatttgacagccaatgcgaaccatgtgcacatgctgtggctctgcaacaagcatgtatacatattccaacaacttctcaatggtcatcttcggtggctcgcaagatggtggccctcacctcgagttcacgagctttctaccgacaccatagactacgacctctccgatccatattctc

SEQ ID NO: 31846 - DNA, 398 bp, Gossypium hirsutum
  Clone ID: LIB3120-004-Q1-K1-F6
gccacgcttccgcccactcttccgattgaacattttgctcagccgcgcaagatcatccggcgtacgagcatcgcgtggggtggtgaactccaacacgcaactagacattcacagtaactgctgaacacactaacggggcaatgaccgccagcggcagctgggcgggataatcattgacagagacacatttacggtcgatgattccattagacaggcatcgatcaattagactgacttgatctcgatagccaccgcatacgttaggatgatggacgttcacatgaaaaagtccacggtcaagctcgccaattgaacatattgtggcgagataccgctctgagacacatatatctacacagttccaaagattgacaccggttgagagcttggaggatgga

SEQ ID NO: 31847 - DNA, 351 bp, Gossypium hirsutum
  Clone ID: LIB3120-004-Q1-K1-F7
gccactctacatacaaatgttctgattgaatattttgctcatgaacgcaagagcaacgggggacggagaaacatgggtgggggccgagctcgcaacgagacattcaactaactggtgaacatactaagggggaaatgtcattgagggatacatggggctgagaatgatgggcagtgacacatttacggtcgttgattgcatttgacaggaatcgatcaatgtgaatgacttgctctcgataggaaacgcatacgctaggataatggaccgacacataaaaaactacaagtgacaagctcgaaaattgaacatattgtggtgagataccaatgggagtcacatatatcaaca

SEQ ID NO: 31848 - DNA, 380 bp, Gossypium hirsutum
  Clone ID: LIB3120-004-Q1-K1-G2
cttacccacaccatttgaattcttcatttcacacaccaactcaacaatcaacctattaatacccatgccatcccatagtaatgaggatctgattgactccccgctcatttaccgccatcaatggctaactctctgatctctctctaacttctcatggactcaacttttacggtctcctccaacaccaaaaactacaggaaaagggcacgttactcaatctatcctcagcaagaaacccaactatagccacactgtttaaacgggccaatctcatgccactttggctggcttactcttctgtgtcgaaaccatacacgcactagccgtgtgacaacgaccgacccactacgtcacctgtaattgaagcccaagctacgaag

SEQ ID NO: 31849 - DNA, 426 bp, Gossypium hirsutum
  Clone ID: LIB3120-004-Q1-K1-G7
tcgaggacgcgtgggtaaaaacattataagtcacttttttaaaattcattatagaagcaacaggaactgggtgatatacacacagagagacagctacagagagagagagattatcaaattaaaaaaatatttatgactatatacatagggccaatacattaacgtaactaagatacatgtcataacaaccatatttaaaataggtgttattgtaattagaaggaatatatgccacaaacgatatataacgatatcggacataacaagttatattatatatagctcatcaaatataagatagttgctttatatggtcacactttaaagaattatgaacaagttggctcaactgatgaatccaaaaataaatatatgagtgcattctatatcaatgatgacctgtcgcctaaataaactgtattatga

SEQ ID NO: 31850 - DNA, 257 bp, Gossypium hirsutum
  Clone ID: LIB3120-004-Q1-K1-G8
tacgcgtgtgtattaatattatacgttactttgttgaaatgcattatagaattaacggggattggttgataagggggggagagagagagagagaaagagagagattataaatctaaaaaactatatataaatatatgcctgggtgaattacagtcatgttcttgggagacatatatgaggaggatatatattataggtgctggtatattaagaaggattatagtgcagacaccattgtaactttaagaaggaagagg

SEQ ID NO: 31851 - DNA, 454 bp, Gossypium hirsutum
  Clone ID: LIB3120-004-Q1-K1-H2
gagaaaggcaagaccttccatggagagaggattcgaatatgtaatagtaggaggaggtgtagcaggtggatatgcagctcttgaatttactaaaagaggggtttctcatgctcagctctgcattatatctgaagaaccagttgccccatatgagagacctactctaagtaaaaaatttctacatcctgaatctccggcacgccttccatcatttcacacttgtgttggtgctaatgaggaattgttaactccgacatggtacgaggaacatggtatcgaattagtccttggaactcgagttgaatctgttgatgtcggacagaaaacgctattgacagcttccggcgagactatgcgttatgaaaccctcatcattgccacaggggctaaggctttaaagctcgaagaattcgagtgaaaagatcggaagcggaaatgtatgtatgtacgagat

SEQ ID NO: 31852 - DNA, 162 bp, Gossypium hirsutum
  Clone ID: LIB3120-004-Q1-K1-H3
gaccttactttaattaaaaaatttttacatcttgaatttttggtacgcctttcatcattttacacttttgttggtgctaatgaggaattgttaactttgatatggtacgaggaacatggtatctatttagttcttggaacttgagttgaatttgttgttgtt

SEQ ID NO: 31853 - DNA, 213 bp, Gossypium hirsutum
  Clone ID: LIB3120-004-Q1-K1-H5
gctacgcgtgggctggcgcgtgtgctggacctctagctcattctacatgtctgacacgtgcatgcggtgatataggtgatcggtactgtcaaacaaatgaaacatactgacgtggtctggacgccggagggattggcgaaccccacatatatctacaatggtaccttgcttgtcgtgaaaggaggcgaactattggtgcgagttgaatcaaaa

SEQ ID NO: 31854 - DNA, 225 bp, Gossypium hirsutum
  Clone ID: LIB3120-004-Q1-K1-H6
ccacgcgtccgtgcacgcgtgggctggcgcgtgtgctggacctctagtgcattctacatctcagacacgggcatgcggtgaaataggggatcggtactgtcaaacatatgcaacatactgacgggggctggatacaggaggaattggcgaaccccacacaaattcgcatggaacttgcttgtgtgaatggacgcgaacgtattggagcgagtggaatcacaaggc

SEQ ID NO: 31855 - DNA, 399 bp, Gossypium hirsutum
  Clone ID: LIB3120-005-Q1-K1-A1
tcgtccacgcgttcggagaaaattccctttcttcttcctcttctttttgtttgtctaaatccttgtctttcttttctcctttctcgcgccttggtttcctctcttcatttgataatcttcttgttttgattcctttttattgaattttttcccccacggaaactgttcacttttttttccagcaatgtggttcattggcccaataatttccgctttttatttctctcatttcgagcagattttgttatgaaagattctaaaaaaattatttcagcttttttattaatattttctgaataatcaagcaaattgataatggatcgtgttgtcggtggaaaattcaaagtgggcaggaagatcggagctgcatctttcggcgagcttttcctcggcgtcaat

SEQ ID NO: 31856 - DNA, 433 bp, Gossypium hirsutum
  Clone ID: LIB3120-005-Q1-K1-A10
accacgcgatccacggtgtgaggcacctggtccatgtcttgaaccaattctgataatctcgggcgtactatcatgtggcagctactgcagtaatcaccactcttgcgtagttcaccgggttaagacccaatgctgctactgctccagctaggagcctgccaacagtgcaaccagtgaagggcacggggaaggctgctcttcatgcacgatgagattccatagaatctaccacagagactacaacggcgactacaacaacccttatgctgtttgctgtgacgccaggattggctacatcagccaacagaaaggccaccgctggattgaagctcgtaggcagggactcaggcttgcatactggtgacacagttggtttcacacttgctgacactttggcttgccatattgttggccatattatcggtgttgggat

SEQ ID NO: 31857 - DNA, 429 bp, Gossypium hirsutum
  Clone ID: LIB3120-005-Q1-K1-B12
tccacgcgtccggcccgtgacaagaactggtctttcagggattaggattctagaggatgaggatgctgccccatcgcgtaggcctttgaagagaatgagttcaccggagaggtgggaagccaaacagttgattgcttctggtgttttgagactagacgagtatccaatgtatgacgaggacggagatggaatgctttatcaagaagagggtgccgaggaagagttggagattgagatgaatgaggatgaacctgcctttttacaagggcagactaggtactctgtcgatatgtcaccagtaaaaatatttaaaaatccagaagggtccttgagtcgagccgctgctctccaatctgcacttattaaagaacggagagaagtacgagagcatcagcagaggacaatgctggattcaaatccaaaagatct

SEQ ID NO: 31858 - DNA, 358 bp, Gossypium hirsutum
  Clone ID: LIB3120-005-Q1-K1-C3
acctccaagaacagcctctaatacctggcctgccggaccacgtggcagagctctgcctctctcgtgttcacccttctttgctttactccgtttgccgttcatggcgtcgcttaatctactgtccctttttccctcctttcccctctctctacgctctattcttttcatcgtcagataatgaaatccagttgttgagcttcgatccgatgtcgtctaggtgggaaacggttccttcgccccctaatcctcttcgtctccttgttcatcacccctctttcttatgccggaacctccctgttcaatacactttctgtatcgggtaaatcttgttcttttagcagcaactgtccccaatttc

SEQ ID NO: 31859 - DNA, 447 bp, Gossypium hirsutum
  Clone ID: LIB3120-005-Q1-K1-D11
taatatcattacatggttaccaaaaattcgactatgtcgaaggtttcgttattgtagacgaagttctcatcaataattggagatcgtcctttttttcacctcgaaaccctgtcaaaatttcatcccttggttccaacaacaatggcggcgttttgtattgcttggaaattaccaaaaactaccacgaatctacggccgagaccatcgatcaggaaattgaggctttgttgaagaaattaaattttatacccacatcagtgttcacaactgatttaccatatgtggatttcttagaccgggttcacaaagccgagttaaagctccggtctaagggtatgtgggaggttccacatccatggttgaaccttttcgtccctaaatcaaagattgccgattttgatcgaggggtcttcaagggcattttgggaaataaaactagtgggccta

SEQ ID NO: 31860 - DNA, 440 bp, Gossypium hirsutum
  Clone ID: LIB3120-005-Q1-K1-D12
ctccaggttgccggagacttagctccatcacggttctttcaacctgcgagagaacacatcacacatttccaccagaacatcattccgacatcgttcaacggtgaggaggccttgtcgccttcccggcaaggttgacaacctcctcgtcttccacgttttcggatgccaacgactgaatatcccaaaggctgacgaacttgctgctgaatgtgaatatatagagcagcttggcgccagtccatgtgattatgccatcagataatacagtgaatgatttaatcaaagctgctatagaaatttacgtcaaggagaatagaatgccattgttagaggaaactgatcccaagttttttcaaattcactattcgcagatctgcctggaaagtttaagaacaggggaggagctgatcaacttgggatcgaggaatttccttttgggt

SEQ ID NO: 31861 - DNA, 410 bp, Gossypium hirsutum
  Clone ID: LIB3120-005-Q1-K1-E10
tacataagttggaaatgcttataattcattgttgattgccattaataacatacataagttggaaatgctattaattcattggtgatcttttgatggtatttggtctaacaggctatcatcatagcggcggaggatacaacgtcagttactctgacatgggctttgtctttttactcaataatcgtgacacattatgtaaggtccaacaagaactagatgttaaggttggtaaggataggttggtagtgacggaatcagacaccaaaagcttagtgtaccttcaatccattattaatgaaacgctacgcttatattctgctttttcactatccctgatccatgaagccattgaagactgcacagataatggatatcatgtttcaacttgcacttggcttattataaaactt

SEQ ID NO: 31862 - DNA, 450 bp, Gossypium hirsutum
  Clone ID: LIB3120-005-Q1-K1-E9
gaacttttggatgaggctagagaagccaccaagtctggtggcagaatgtcaagggaacagtatggggctctgagaaggaaaattggagggacatacaaggatttcttcaaatcctatgttgaggtgaatggcgaatacgtggaagaaggatgggtggacaaaacatgcaaggtgtgcaagaaagatacaagaggtgaagcaaggcaagttgacaattttgggagatatgttcatgttgcgtgcttggaaaagtccaattctgggaatttcttcactaaactcttctctagatgagtgtagtttttagttgtcaatttttgtattttttttttagtaaaaacatccctaatctggagataagcaaatatgtttgtaattactggggcatttaagcctcatatttatttcttgattatattggacactaaatatatatttgtaaagcactgt

SEQ ID NO: 31863 - DNA, 344 bp, Gossypium hirsutum
  Clone ID: LIB3120-005-Q1-K1-G2
cccacgcgtccggtcaaacgttgggtcacgcatacgtccacgctttcgcgttgaatggctcactggtgttacatggcacgatgctggcaaggtggagttagttgaaggttcatctgatctaggcacaacccctgtccttctcgatggcatcattgattggtatagaaatattggtgatcggattcatcgagttccaataggaacgcccatcttgaccctgataagaggctgtaccccggacgaaagttctttgatcctctcgatctagccgacgaccctgagaaggatagcaccctatcaatcggctgatatcaatcatgctcatcctaccatgggtgctttct

SEQ ID NO: 31864 - DNA, 222 bp, Gossypium hirsutum
  Clone ID: LIB3120-005-Q1-K1-G9
ataccgacagcccactcttactttcaacatccaaaataccacaactccaaaagggctggagataatcgagaagtggaacatggatcatccgctaaactgcaaggtcaaaagctaataatccaagctactacccatgaaaaattatgcccgaactatgttggggggcgtccctttcggtgaagaaaaaccaatgtatatagtggataaaacacggacagaccc

SEQ ID NO: 31865 - DNA, 318 bp, Gossypium hirsutum
  unsure (1)..(318): unsure at all n locations
  Clone ID: LIB3120-006-Q1-K1-A1
acgancaanggntccactctctatctgtctatgcctccaaatggcttttgtcaccacttccaccggtttttgccttctaaagatcgccgactacaccacctattcctgggactggcggtgttctgcatacgtaatccgccttgcctgcacttgacggcacctcaaaggctggtctttcatccacagcctacgcttctcctccgctgcttgaggggacactctactttgcctgcatgcctcctccaaagatatatctttcaaaggaaaagggtcaagaggggttgtttcaatggccaaaaagagcgttggggacttgac

SEQ ID NO: 31866 - DNA, 361 bp, Gossypium hirsutum
  Clone ID: LIB3120-006-Q1-K1-A4
agctcgcgtgcagaacaagtgtattcaccgtgggagaaaagcatagttttcttctttctttctttgcgtacgggcaaatcatctttggcagcttacataaccagtgaccaaggactagggggctggcaaatatcatttcagcctaatacttacatgcttgcaattggttctactgagcaagaaaatgatgtacctggacgcactcataaaacaatggctcctaaaaatcttcggctttatatgataaagactacccctcgacgagtggatgaacgtggcatctatgattcctggaaaaacacatggggatgtcatcaagcagtacagagaattcggagaagatgcgagtgatatatatgct

SEQ ID NO: 31867 - DNA, 228 bp, Gossypium hirsutum
  Clone ID: LIB3120-006-Q1-K1-A6
aagaacagcacaggcgttgtttcggaagtgaataacgaacgtcccgctttatagcgtattgcatggaaggaaggaaggaaggtgaagtaaaattatttatgaactttgacctcatgttaaacgaagtggtgtaacatatggtgatagttgcatgaattgataagcgtgcaaacctttttccgagggaattcacgtttacttggatccctaacgtcccttggccttaaa

SEQ ID NO: 31868 - DNA, 274 bp, Gossypium hirsutum
  Clone ID: LIB3120-006-Q1-K1-B12
tcgctttgtttttcaatagatcgtaacaatgtctgtctcacttcaagctgcagctacctggatgcaaccaatcaagggtgctgcaccattaaggaccaatgtgctgctcaggtccttccagagcgtttttatggccttctgtttggagcctgttggtgctaggcttaccggctgttactaccagttctaaaaggcttggctcagacgcttgatgatgctaccaaactcgtccttaaaacaactagtctcatttttttttgttttttattgagca

SEQ ID NO: 31869 - DNA, 312 bp, Gossypium hirsutum
  Clone ID: LIB3120-006-Q1-K1-B4
aggagatttcgtcgttggatgaaaggttcgtgtttggtgctggtttagatttggatttgctgggaattgaagttgatgacaatacattgattccaggacttgcagtggcttcttcacgtgcaaaaccattggcagcttggatgaatggattggaagtgtgttcagtagaggctgataccagtcgcggttgcttgatcctatccgttggaatatctactcgttacgtttatgcaacctataagaaaactccgacaactacaagtgaagctgaagcttgggaagcagcaaagaaggcatgtggaggattacatt

SEQ ID NO: 31870 - DNA, 146 bp, Gossypium hirsutum
  Clone ID: LIB3120-006-Q1-K1-B5
agctctttgtcattcaaggagattgtacctttgacaaaagagatattttatgattattggtgggagtgtgatttaagctggttgggattattttttggatgatgttgggtatgttttagatgggaggcttagaacatgtgttttaa

SEQ ID NO: 31871 - DNA, 156 bp, Gossypium hirsutum
  Clone ID: LIB3120-006-Q1-K1-B9
ttgcttatctgtgtctgagtttttttgacgcgccaccaacattacaatgcggcatgggattactattcctctcatcttctataacccctttcttcccctctcttcatctcaaacctaaacataatctcttttttactttacccaaactccttttct

SEQ ID NO: 31872 - DNA, 359 bp, Gossypium hirsutum
  Clone ID: LIB3120-006-Q1-K1-C11
ttcttcttcaaaaaaaaaagaacccggaccctttttcggcttcgcgtcgtctcttagtaaaaatctgttcttcgccatttctttcttcttttttgattttctggtcagtggacattttcagtataaatgtttgcagatttattatctgaaaggcctttgttcggtggatcaatcttaactacttttccttttaggtttcatgatgtcagtaacatcaggctagtttccgatcatcatgaggtttttgtggaccctgcacgtgatgagagcttaattttttgagttactatattacatgcatgattgttttagatgaagggagtgctgtttgttttatttaagaacttgcctttgaacaa

SEQ ID NO: 31873 - DNA, 339 bp, Gossypium hirsutum
  Clone ID: LIB3120-006-Q1-K1-C12
tcgcccacgcgttcggatgacttaaagagtggtcagaccaagatgaaatctgtcctcgtggattgccttgttggggctgggatcaagccaacatcgatagtgagttacaaccatctgggaaataatgatggcatgaatctatcggcaccccaaaccttccgttccaaggagatctcaaagagcaacgttgttgatgacatggtttcaagcaatggaatcctgtatgagcctggtgaacatactgatcatgttggggtcattaaggatgttccatatgtgggagacagcaagaaaaccatggatgagtatacatcaaagatattcattggagggaagaac

SEQ ID NO: 31874 - DNA, 267 bp, Gossypium hirsutum
  Clone ID: LIB3120-006-Q1-K1-C2
gccaagcgaacattatggcgtaggttcaaacaccatacaactcatccactcatacgaccgcgggttttttttacaagacgatggccggtcctccaaagaccagggctgctgctgttgccccggccgatgaatagctggctaagtggtacggcccggacagaaggagtctcttgcctgaacgcctgttagacagatcggagaggccacactactatgtacggcgactttaccggacactatagatactatgccgatgagctgagcaag

SEQ ID NO: 31875 - DNA, 251 bp, Gossypium hirsutum
  Clone ID: LIB3120-006-Q1-K1-C7
gccacgcttgccacaacacgtccgaccacgcgttcgcccacgcgtacgaagaaactgattggtcctttgactcatgtgcctctaaaagcttgaattctccggtctgggtaagggcggtggctgaaatggacagtgtcgacttcctactgatcatgcgcatccacatggttcaatcgcttcgttactaaccacacaaagactgctgatcgccgacgcacctgatgatcatttaattctgagaccacccatca

SEQ ID NO: 31876 - DNA, 184 bp, Gossypium hirsutum
  Clone ID: LIB3120-006-Q1-K1-C8
gcgttcgtccacgcgttcgatcacacgttcgcccactctttcgtccactcttacgaagaaacggaggtgttcttacactcagttgggaaaagcttgaattttcccttccttagtattgtcgttggtatgaatggacaggtacactatcatctcattattggagtccaagttcttcaatctcttc

SEQ ID NO: 31877 - DNA, 267 bp, Gossypium hirsutum
  Clone ID: LIB3120-006-Q1-K1-D3
taattatatcatatatacatatatcatggacataaccatgccgaaatatgactcatcaacagattctgtgaatgtgagaacacagccaacgtaagttgtttggaccccacatgcctgagcatgccattcttggtggaggaaaagttgctgatgtcattactatcgaggaacccaaaggtatcaaccgccttgataacagcagtgacaaccatttggattctcttcgaggtggtcgagtacaactatcacacccttctctgttacatt

SEQ ID NO: 31878 - DNA, 322 bp, Gossypium hirsutum
  Clone ID: LIB3120-006-Q1-K1-D4
aaaattcttcttcttcttcttcttcaaaaaaaaaagaacccggaccctttttcgggttcgcgtcgtctcttagtaaagatctgttcttcgccatttcttttttcttttttgattttctgttcagtggacattttcagtaaaaatgtctgcagatttattatctgaaaggcctttgttcggtggagcaatctcaactacttttcctcttaggtttcaggatgtcagtaacattaggcaagttcccgatcatcaggaggtttttgtggaccctgcacgtgatgagagcttaatatttgaggtactttatttcaagcatgatgtt

SEQ ID NO: 31879 - DNA, 309 bp, Gossypium hirsutum
  Clone ID: LIB3120-006-Q1-K1-D6
aaagaacctacttttgttgaatagttttgccttgctactccagggttggagcatgggagaatgcatactgcaagccaaccatcaaagcggatgccaagtgggggtatctaatctcttcttgcaatcccaagaatctttgcgtgtgcacagacaagattccatcttcccgtttgggtcttatttggaactgcatttaaacatgtcattcaaaaggacatcaagaatctccctatgctgcaagagatgatcaatgaaagggctttctttaaaatgacaattgattttgggtgaaaatggcatttgtaaaat

SEQ ID NO: 31880 - DNA, 280 bp, Gossypium hirsutum
  Clone ID: LIB3120-006-Q1-K1-D7
acgattgagcttaatatattgtcgtaaaaatactgatgggagacctctaagactactgctgtcggccagatgcaccatcgccctcaaacaacaaagcatagggtagaataaggggacagacgcacaagcttgatctgcttttatactctcaaaggtgactgtcatggagagtcttgtagcttaacaaccaaaaaggcctttaaggtgaggacacatcggtgtatatgtaataaggacagcacccttacaagcaaggtggtgaaatacaactatggtgtag

SEQ ID NO: 31881 - DNA, 364 bp, Gossypium hirsutum
  Clone ID: LIB3120-006-Q1-K1-E4
aaatggcccgccattctgattgttttattgctttaccaggcgggtatggaactttggaggagttattggaagtgataacctgggctcagctgggtatccatgacaaacctgtgggcttgcttaatgttgatggctattataattatctactgactttcatcgacaaagccgtggatgatggctttatcaaaccttcccaacgccacatcattgtctctgcaccaaatgccaaagaactggtccagaagcttgaggagtacgttcctgtgcatgatggaatcatagccaaggcaagttgggaggttgagcagcaacagcagcaagtgccgcaacaggtggggttcaatgccactacttttcagac

SEQ ID NO: 31882 - DNA, 273 bp, Gossypium hirsutum
  Clone ID: LIB3120-006-Q1-K1-E5
tcggctttacgttactatttatttaaaatattctcttaccaataagaaatctgatttttatagtggggcttggtgatgtctgcgataaaacttcattactagcagaatataactatctctgtaacgaaagcttggtttattttcctacagcctgaaccttctcttgtggcgagatatctttgaattacactctttaggtcatgattgttagtacatttatgctaatttttcaaaatgacaatacacatcaacttactgttgttaaatatcttc

SEQ ID NO: 31883 - DNA, 197 bp, Gossypium hirsutum
  Clone ID: LIB3120-006-Q1-K1-E6
cgtagttgtgaatgtgttataaccacctcctcccatattagaaaacaaggattttctatagatgtgtgagagttaactgctttagagactttgacctcatatataacaaaatttgtttgctaaaaataataactgtatccaactgatgctttcaatcattattgcgatgagaatcttgacgatattccccctttact

SEQ ID NO: 31884 - DNA, 361 bp, Gossypium hirsutum
  Clone ID: LIB3120-006-Q1-K1-F11
ctcgaacaacttatcgttttcactctctttctctcttcgcctccaaatggcttctgccagcacttgcaccactttttccctcgcttaaaaccaccgccttcaccacctcttacttcgcctcccgctcttatgcatacctcatacgccttctccttcactcgccgccaccttaaatccttttctctcatccacagtctaggcttcttctccgctgcttctggggactctttgctctcccttcattgcctccttcaaaggtcgatcttttcaagggaaaagggtcaagagtgggttgccttaatggccaaaaagagtgttggggacttgacttgccgcttatttcaaagggaagaaagtgttt

SEQ ID NO: 31885 - DNA, 410 bp, Gossypium hirsutum
  Clone ID: LIB3120-006-Q1-K1-F3
ccacgcgttcgcccacgcgttcgcccacgcgttcgcggacgcgtgggctcaaattcttgatgaaaatggcgcatttagccagcttaaatggaatcaccgagacccttcccgctatcccaaagcttcccaccatccgaagaacccgcaaaacatcgaaaatcatcggatttcttggcaaaaacacctcaaactttcacggacaaccaccactgcaaactaccagaagaatggcattagcctttgcctccattgctcttattggaacttctaccaatggtatctcccttgccgaagataacggctattggattaccgatcttttaccccgtccttccgtcgaaaacaagataacgaatgcggataccggaactcgatctttcgtaaagaaaggactgtatgtggctaatctt

SEQ ID NO: 31886 - DNA, 434 bp, Gossypium hirsutum
  Clone ID: LIB3120-006-Q1-K1-F5
cccacgcgttcgcccacgcgttcgccctctcttttcttcgtctagctttttaacttcattatcatttctctgcaaaatgaccgttctttcttccgatcaatttccttcatgtcatgtctttaagtcatgtctaccctttctttttgtagccttgttgtttcagtttcaaactggtttctctgctttgataatgagcttgaagaaccatcctggccaccctcaacatcgaaggccaatgttccaaacgaaccaaagcacttgtgcattgtttgtaggcacttgggttcgtgatgatagttacccattgtaccaatatttcaactgtccaatcatagatgcagaattcaactgccaactgtatggaagacctgattctgattacctcaaatatcgatggaagcctctcaattgtgtgctttccaggttcgatggac

SEQ ID NO: 31887 - DNA, 205 bp, Gossypium hirsutum
  Clone ID: LIB3120-006-Q1-K1-F7
gttgaactgtttgctttagaatgggctttgtgggctttacggtttctaggattgtgggtctgaaatgggtttaggcttgggctggtttgggttctattgttggggtcattgggattttgagttggtgggcgacacatgttgcaaatggacttaaaatttggactttttatttggcgaattatacggcgaaaaaaaaaaataaaaa

SEQ ID NO: 31888 - DNA, 241 bp, Gossypium hirsutum
  Clone ID: LIB3120-006-Q1-K1-F8
atgctaagaacgccgctaacatcgaaaatcatcggatttcttggcaaaaacacctcaaacttacagggacaaacaacactgctaactaccaaagcaatggcctgagcctgcaacgcaagcgagtgtaggcgaccactggaaaaaagaagttcgagactctctcatacctgcccgaacttacaccccggcatgtggctaaagaagtggattaccttcttcgctcaaaatgggttccttgctt

SEQ ID NO: 31889 - DNA, 278 bp, Gossypium hirsutum
  Clone ID: LIB3120-006-Q1-K1-F9
tcgaacagatgcttgaatctggtggggctaaagtgtgttttatactccaaacaatcatgggttctcctcaagttgaaggtggtctgatgcggctatgccaagtatataattagctcgtagacatgcattcagtgagcatgaacgcctggtttactagggatggattctataagatactggacactgggaggaatggcttctaaaggtataagaagttattaaaatttaagtgattcttatatggcgttctatcttataatcgaatgctaattgacttg

SEQ ID NO: 31890 - DNA, 295 bp, Gossypium hirsutum
  Clone ID: LIB3120-006-Q1-K1-H3
gctctgcctattggagattacacgcaaaaggctaccctggccttgcgtctgtgttatttgtgagatatctctcatactacaagtggcagaatacccttatagaatgcacagagatgagacgttcatacatggcaacgactgagcttgtttaccaccaggagcactacattggcggtcgaaatagtcaccggaaacacatggaagaccggagagtcagcatggaggctgtcagtttttaatatacagatatttctgactttgcttgctaataggcagtcttacatatcttagggta

SEQ ID NO: 31891 - DNA, 336 bp, Gossypium hirsutum
  Clone ID: LIB3120-006-Q1-K1-H6
tcggccttttttatatcagaactagagagattatattctggtttgagggtgatttgccttggattgtacgttgtacaatttattatgaatctcaccctcattcaccctcgaggatgccaaagctctttgtaatcaatcgcaggtgcctcactgcgtgtcactcttttgacgctgctgttgtgttaggttacgtagctatgccagctgaggtgccacaagacttggtaacactatccaacataccccaaacatctttaggagaggggttattcccctaagaatgcgaaaagccttaaatccagcgaccaaagtctaggaaaggtgagacatgcacta

SEQ ID NO: 31892 - DNA, 255 bp, Gossypium hirsutum
  Clone ID: LIB3120-007-Q1-K1-A2
ctctggtcttcattgtaacacaatattacattctgtttcctctgctatcgctctggggggggccattgtataaaactcgttatggatggatccggagcgtttgtcgatagagaaggtgcaggtcagcacattgaatcatgatccagagaaagtgctgattactgccccagggaacggggacatccccacctatgtggttggagtgaatgctgacacctacgacccaagtgaatctatcattacctatgcttattg

SEQ ID NO: 31893 - DNA, 410 bp, Gossypium hirsutum
  Clone ID: LIB3120-007-Q1-K1-A8
gcgtccggtcagctgtctgtgtgagagattatagtgttccggcgtccagatcatggtgggggacgtgggacttatatctctcagcgtttctttactgtctatgccttgtcttcctcgaatcggcttcaccaaacgcagaccatttcccatggcagcattgagtgatgatcctgttcaagaatggattctcaccgaaggaaaagccacccggattacgggtattcgtcccgtaggtggtggttgcatcaatcttgcgaatcgctacgacactgatgctggttccttctttgttaaaacaaacaggagtatcggtccaccaatgttcgaggcagaagctatcggttagacgccctgtttgaactcgaacaattcgtgtgcctaagccctttaaggttggacccttacgaaat

SEQ ID NO: 31894 - DNA, 221 bp, Gossypium hirsutum
  Clone ID: LIB3120-007-Q1-K1-B1
gaatcactagccacagagcttgcacctaggatgagtgccatagcaacgctactgataatgcgcatgaactgaaaaagaccttgtctatcatctacaacctgcagcgtcatgcgaaaatcaccgcagagatattggagattgttgctggtgccaatgctttggcctaatgaacttgaaacctgactcaccatcaattatgtccccttgtaggtatcaaaaag

SEQ ID NO: 31895 - DNA, 438 bp, Gossypium hirsutum
  Clone ID: LIB3120-007-Q1-K1-B11
ctttaaagtgccaaaccctctttttataaaatccaaacagcttcattgctgtttgttgaggtggtggtggtggtgaaaaacgtccaaatgtggaactcagttattattcagtgcttggaatttctgaacaagcttccccttctgaaattcgagaagcttatcgtaaacaggctttgaaatggcatgctgatagatggatgaaaaaccccactgtatcacgtgaagctaagaaacgatttcaacagattcaagaggcttattcagttttatcggataaaggaaagagaaagatttatgacgctgggttgttgggtctacttacagacgatgatgatgaaagctttcttaacttcatgcaagaaatggctatgatgatgcaaaacgtgaactcaaaggaaggaaacagcttggaggatcttcaaggatcgttaatggatg

SEQ ID NO: 31896 - DNA, 146 bp, Gossypium hirsutum
  Clone ID: LIB3120-007-Q1-K1-B2
gcgacaaattaattgcttacaatggcctccactccatttttcattcttccccatcactcggcgattgggcattgaatatcggcctttgcaccctttaaatccagtgaaccctccttttttatataaccaatactcttaagaagctt

SEQ ID NO: 31897 - DNA, 138 bp, Gossypium hirsutum
  Clone ID: LIB3120-007-Q1-K1-B7
tcttatatgggtggtgcttatgttggcaccggatctgaaacatttccttattattggagacacgtacatttcggatggtatctttaaagtcgaaatatatagcgtatttatcagtgtccagatacagtttgtaataaa

SEQ ID NO: 31898 - DNA, 270 bp, Gossypium hirsutum
  Clone ID: LIB3120-007-Q1-K1-C12
ggggcgacggacgcgtacgaacaaacggaaagagaaacacactttatcaccaccaaagccgaacagaccaagggggggtggggcagccaacattagggagaaagggaaaacaccgcgccaaagcatcaaaaagagcgacgacgcaaccgcgctgctggcaagaaccacacaagacacacgcgacaaacaaaggaaaaaggccacactaacgaacaaggcggacaacgaccagcaaagagaaggggccccatgagcacaacaaagtacaga

SEQ ID NO: 31899 - DNA, 428 bp, Gossypium hirsutum
  Clone ID: LIB3120-007-Q1-K1-C3
ctgatgaggaagaagccaagcaaaggcagctgaagtccattttgaacaagctaactcctcaaaattttgagaaactctttgagcaagtaaaagctgttaacattgacaatgcagttacactcactggtgtcatctcacagatctttgacaaagctttgatggagcctactttttgtgaaatgtatgcaaacttctgccagtgtctggctggggagttgcctgattttatcaagaacaatgaaaagataactttcaagagattgctgctgaacaagtgccaggaggaatttgagagaggggagagagagcaagaagaagcaaataaaatagaggaagagggtgaggctaagctgtctgaggaggaaagagaagagaagagaatcaaagctcgaagacgaatgttaagtaacattagacttattggggag

SEQ ID NO: 31900 - DNA, 372 bp, Gossypium hirsutum
  Clone ID: LIB3120-007-Q1-K1-C7
gcggcggcgtaggtagcggcggtgtgcttgtgatctcaatctcaaccccaggcgagctcggctccggtcacccgtcgatccacgcaaccatgtctaggaggaagaccagcgagcccaaggaggagaacgttacccttggacccactgttcgtgaacgagattttgtctttggtgttgctcacatctttgcatccttcaatgacaccttcattcatgtcactgatttgtctgggagggaaactttggtttggatcactggtggcatgaaggttaaggctgatcgtgatgagtcctctccttatgttgatatgcttgcttgccaagatgttgcacatagttgctaggagcctcggtttgacattgctttatatt

SEQ ID NO: 31901 - DNA, 315 bp, Gossypium hirsutum
  Clone ID: LIB3120-007-Q1-K1-D2
cccacgcgtccgcccacgcgtccgcccacgcgtccgggctgctgccaagattgggaagatacttgcggaacgcttgctgctcaaagagatccctgccgtttccgtttccttaaagcgagaacagaagtatcatggtaaagtcaaggctgtcatggattctcttacggaaggcaggtgtcaagttgctttaaatttagaacattttcaaaacattgtttacttttctaaatctgggctttttaacgattcattttttgtcctggaattgataggtgactttagttccaaggaagaatacattgggcatttttatgc

SEQ ID NO: 31902 - DNA, 243 bp, Gossypium hirsutum
  Clone ID: LIB3120-007-Q1-K1-D7
cggacgcgtggggcatagctgctggtgctgtataggctgttctctgcacaccagggtgaacttttcaaacttcgaaaccaacttatttctgtgattccttaaaaagctatgggccctggatatgttgctcaagaatcatatccactgctatccaaactgttgcctggatatgatcctgatattagggtgtggaacaacaccatgagcctgttatgtgagttttcttccaagcatgcttggcat

SEQ ID NO: 31903 - DNA, 257 bp, Gossypium hirsutum
  Clone ID: LIB3120-007-Q1-K1-D8
ccaaagtgcacatcagggcgaaggatatcgatctggaatctacttgcacgccttgggtaggcgagacactaatcacggtgctatgcagagctcctctttgtttaacatccgggctttaccttgataaaatgcccctgcctgaaagggacctttggacaaccatcctttgggagccccatcttataaggtaataacatgccttgggcccgccgcgaaatgcaaagttgtatctttttccccatgcaatgccttttgtt

SEQ ID NO: 31904 - DNA, 395 bp, Gossypium hirsutum
  Clone ID: LIB3120-007-Q1-K1-F2
gggagtggtgctggacatactcgtagcaatgggcttcattaaatcgcatcatcactggttagacgtagagcacattgaagaagctcttcaaaacacattagtttgcatagagatggttgttttcactgtagtacagcgccgtgcatacagtgctgcacgatatagtggagaaagtgaagctaagataaagaaaaatgaatgatatttgggatgccccaataaccatatctatgtatgtatgtttattcatggattgtattagaagataagcttagaaatgcttctactctctattttcaatatattaaatagatttaatgagggtctgaaaatttcctttcttttcgttgtttttgtgtgttttgttgtgtgtttttgtgtttttttgttatatt

SEQ ID NO: 31905 - DNA, 203 bp, Gossypium hirsutum
  Clone ID: LIB3120-007-Q1-K1-F7
agaacgcgtgggattcaagccgactagcgcactggcgcccgtcacgctgctattgattagtggagtccgaggattctcttgatgaggggtggggctctaccggaaaaccaaggggtccgtggacttctacgtcccaataacctgctaaggtagaagctgatgattgctagaacatcaagacggacttgcctgagcggattaat

SEQ ID NO: 31906 - DNA, 365 bp, Gossypium hirsutum
  Clone ID: LIB3120-007-Q1-K1-H1
gaacaacgccggcttcccgcacaacgtcgtcttcgacgaagacgaggtgccgagcggcgtcgacgccaccaagatctcgcaggagtagtacctcaacgcgccaggcgagacctactccgtcaccctcaccgtgccgggaacctacggcttctactgcgagccgcatcaaggagccggaatggtcggcaagatcaccgtcaactaattaagctagctatcgatcgatatccattcatgtattagctgttgcttcctgctttgtactccgccgatctgtccatctctacatgttctcgtcttcacacaacaacctttggtacgactacgtatatatgcatgctactagctgattgatttttattaaa

SEQ ID NO: 31907 - DNA, 423 bp, Gossypium hirsutum
  Clone ID: LIB3120-007-Q1-K1-H2
gtcggccttgtttgctttgctccaaaataatttcttagaaggaaaaaagaaaaacaaaaatgcagaaatcataaaatcaaaggtgattaaaactctttttttcttttaggattttgattttgattctcaaatcttgttttttcacataaaagaacagaaatcaaatcaatcaaatattgatttggattaataacattaatattagaaaaaaagaaaaaggagaaaagagaagacgaagaagattagagagagatggagggttactgtgtggatgaggcggtgatagctttgaagctgaaagatgcatcgaattggtggcatgacattaacgaaattacgctctggcaggatcggatttttcacattctcgccgctctttacggtctcgtagccgccgttgctcttgtccaattgattccgata

SEQ ID NO: 31908 - DNA, 314 bp, Gossypium hirsutum
  Clone ID: LIB3120-008-Q1-K1-A1
ggagtttgagaagccagaaaactgggtggcaccctatccaaaatatgaatttggatggtgggatcccttcttgccaactggagttaaagtttgaagtacagcatttttggctatcgtttttttgtttagttggaaccattactataacagatgaaagattaattaatgtggttgtccattttgcatgagttggtgcttcctagagacaagttgaaaattttaatctcggatgttacaactgctaagctaatatcttaactctagcgtgtagacctttatgtgtagaattcttttgatttgattctacctttttc

SEQ ID NO: 31909 - DNA, 336 bp, Gossypium hirsutum
  Clone ID: LIB3120-008-Q1-K1-A8
ctctcaccatcaccatcctgatccaaaggtaacaaaaaccagcaaacacatgctcgatgcgccacaccgcaaaggcgactcactctctatgcttttatcgaagaaaggggtgaaagcatatgagccatcatgagcgtttatgctgctacgggcattatgatgagaaagtgcagaacaaccggcgacactgcagctatcgcactcgctgtcgtaggcgttcaaactcgagccgtgtcaacaacctgaagagttcacaacaaacgcacaagattaatcgacggccacaaagaccaggaacgtacaaaagggacttcttgtacgacctcacctacatct

SEQ ID NO: 31910 - DNA, 429 bp, Gossypium hirsutum
  unsure (1)..(429): unsure at all n locations
  Clone ID: LIB3120-008-Q1-K1-B4
cggacgcgtgggcttagtttagcgttccaagtaactctccctcccactcttacctttcaagcccgtaaagtcatgagcttggttctggaacctccgcctccacctctatgcaaatccaaaaccggtgctccgctcaaacgctgcttcacctccatccgcaccgcgttatctccgccaaaccatcgattcagagcctctcgttttccacttcatccgacttccagctctagaccaactgttactgtggttctaaagacggagaaagaaaaaaatgcggtgacggagcaaaaagacccgccggtaaggattgtggcagtggtcggccaaggaagcgtcagcccattaaaatgcaccccctgggaggaggttatgatgcacaccgcanaaagattgaaatgggtggatgaaggatatgaaatggttgttttc

SEQ ID NO: 31911 - DNA, 430 bp, Gossypium hirsutum
  unsure (1)..(430): unsure at all n locations
  Clone ID: LIB3120-008-Q1-K1-C2
tttagctatagcatacactactagtacccactactagcaatggctttctcaatgatctgatcggctaccattgccactgcctctgcggcacacgctaacatggacgctcctttcaccggccttaagtctggctctgcttttccagtcaccaggaaggccaacaacgacattacttatctcgcaagcaatggcggcagaatgcaatgcatgcaggtgtggcctcctactggaaagaagaaggtcgagactatgtcataccttctcgatcttacacccgtgcagatggctaaggaagtggattaccttcttcgctcaaaatgggtttcttgcttggaattcggattagaggacggattcgtgcaccgganatactcgagcctacccacgtactacgatggacgctactggaccatgtggaagctgactatgt

SEQ ID NO: 31912 - DNA, 382 bp, Gossypium hirsutum
  Clone ID: LIB3120-008-Q1-K1-D12
gctaaaggttatgtgcgagcacaagaaccggataaagccgaagaacttctaacaatcatgattgaatcagaagcatcccctaatgttgtgatctttactaccgttatcagtggctggtgcagtgccggtagaatggatcaggcaattaagattttctaccaaatgtgtgaatatggagtatctcccaatttgaaaacctttgagaccttaatatgtggatatagggaagccaaacaaccatggaaagcagaagaacttcttcaagtaatgaaagagtttgaggttcggcccaagaaatcaaccatatttcttatcgccgaagcttggcgtgcctctggattgtcaaaagaagcaacagaattctgggttctggtcatagcaa

SEQ ID NO: 31913 - DNA, 383 bp, Gossypium hirsutum
  unsure (1)..(383): unsure at all n locations
  Clone ID: LIB3120-008-Q1-K1-D4
caacttttacccaaatctgtaaaagctgacatctccagcagcaaagagagttcttctctactttctcgacagtatcaatggcagaagtaacaaagcgatatgcagtggttactggtgcaaacaagggaatcggattggaaatatgtaagcagatggcttcaaaaggaaccatggttgttttaacagctagagatgagaagaggggtcttgaagctgttgataagctgaaagatcttggcctgtctgataatgtagtttttcatcagcttgatgttgcagaccctgctagtgttgcttctttggtggatttcatcaaaacacaattcggaaagcttgatatcttggtgaacaatgcanggattggtggcgtcaaaagtgatctt

SEQ ID NO: 31914 - DNA, 322 bp, Gossypium hirsutum
  Clone ID: LIB3120-008-Q1-K1-D7
cggtggggccacgcgtacggtccgtacttcccttccctttctcgttcgtcactcaaaagaaacgtactctcactttggtgtttcaacgatcacacgctcatttctcaccaattttcttctcatccaaaatggagtgccagcactcatttttcgcaaaactagaatatctatcaccatgctgctggggaaaaaggagtacaagcagccgttctagttcacccgacttcaacttttggatggttcgaaacccgccttttcccgaacccgacctcatatttgccgatgaactattcaattctcaactttaatagttgtagaagct

SEQ ID NO: 31915 - DNA, 416 bp, Gossypium hirsutum
  unsure (1)..(416): unsure at all n locations
  Clone ID: LIB3120-008-Q1-K1-E3
tgaattttgtgaaagacgcttgtattagctttgctcgtgaccgtttcgatcttttcaaattgttatctactgatgatattgaaacggttgtggggagtggatgtcctaatgttttacgaaaatccgttaattcagctaaaaggttgagagcctatgttcatctcgacgaangggatgtttgtggtgcttgcaatctgcgtggttcttgcgatagagcttatgtgatactaaaggaatctgaagcagctgctcgtactgtggacatcgngcgtatattattatcttatgcccttgatccccttggtatttcggagagagagaaacctactggtagagagcatattgatgcatctgcaaggaatctactttcagacttgacaaaattgagtgagacgtcatgtgatgctgaaattcct

SEQ ID NO: 31916 - DNA, 391 bp, Gossypium hirsutum
  Clone ID: LIB3120-008-Q1-K1-F5
ggggggtgagaaaatggagacacacatagggtccacgctctctgtgtccactctgagcacactggccaccgaggacgatctgtcgaggtgcatgtaagtaaaccagccccggttgctcctcctctcaaaccgcaggcagcttggggactaatgtgactacaacgacggcactgacaggtagagagcgcgaatcgaacgcccaagatattccgttgttcggttttagaaagaagttgaagagcgcggaggaagaaacggtggagatcgtgaaagaaggattggagacggcggagaaagggctggagacggcggatagagggatctttacagtggagaaagggttgaagacggcggagaagaagatagaaacagctgaaaaggagattgaaag

SEQ ID NO: 31917 - DNA, 434 bp, Gossypium hirsutum
  Clone ID: LIB3120-008-Q1-K1-F6
ggagtgagcgggacggtgaaggaccaagtggcggcgaaactgagcgacttggcggagctcgtgagtaattgcttgtcgattttcgcggcgagcggcggagacgatttcggtggagtgccggtgcagaacaagaggttgctggcgtcgggtgacgatttatcgggagaaaatgtcgacgaggacaaattcccgaagtggctagggaggaaggagagggtactgttgaacactcccgtgtcggcgatccaagctgatataatcgtctcgaaaaacggtaccgttaagacgatcagcgaggcgattaaaaaggcgcaggagaatagtactcggcggatcatcatttatgtgagggcaggaaggtacgaagagaaggatttgaaggtggggagaaaaaaaataaacttgatgttcataggggacgggaagggtaaaac

SEQ ID NO: 31918 - DNA, 214 bp, Gossypium hirsutum
  Clone ID: LIB3120-008-Q1-K1-G1
accacccgtaccgcctggctcaatgagacatattgattttcgacgataggacctgtgtggtactgacatcccattgcttgtgggacaacaatcttcatgttgcacactttacttggaggtggcctataatgaaactggcgcgctaagattgccatggatggatggcatatactaacttgtcacttttgtaaccatatattgcggctcataaata

SEQ ID NO: 31919 - DNA, 304 bp, Gossypium hirsutum
  Clone ID: LIB3120-008-Q1-K1-G7
cccacgcgtccggtttttttgttggctgtagtggttgataggtagtaagaagtgaggagtgaaaatgaatgaagagatgaatggcgttgaggttgagaatcatcaagaacatgcgcctgagaaaatagattacgtgttcaaagtggtggtgatcggtgactcggctgttggcaagactcagattctgtccaggtttaccaagaacgagttttgctttgattccaagtccaccattggggttgagttccagaccaggacggttaccattaagagcaaagtcatcaaagcacagatctgggatacc

SEQ ID NO: 31920 - DNA, 218 bp, Gossypium hirsutum
  Clone ID: LIB3120-008-Q1-K1-G8
gcgaccacgcgtccggtctattagccgtagaaaggacactggttgcacttgtggatatagtggaaaggatgttagggcaacacacatcttcgagaaaagtcagttagtgatgcttaccgccaacgctacttgacgtttgaggcacaaactctaaccatgggggggggtgacaggatcagatgccggaccaacattgtcagcgtgtgtctcggacgtat

SEQ ID NO: 31921 - DNA, 432 bp, Gossypium hirsutum
  Clone ID: LIB3120-008-Q1-K1-H6
cccacgcgtccgcccacgcgtccgcccacgcgtccgcgtgtaaatgcataatgtgtaagtattattagtaattaccttgcctaaaatgaaatttagtagcaagtttgtgttacatgcattttaagtattgtattgaagggtataggactaacgtaatatattactgtcaatgtaaactttgcaaatttgtagatttattaacttattctagtgcccaaaggactaggatgctgaagcatgcatatcttattgactattaagttcaactcatcatatgttatggaaatatattaatgtgtttctactgttaaaatataattcatgggtcatgctcaatatcatttcacgttcaagatattttttaactgttttgatgaatttgattccattacccctaaaagatgacatgacaaacactggagtaattgatca

SEQ ID NO: 31922 - DNA, 405 bp, Gossypium hirsutum
  unsure (1)..(405): unsure at all n locations
  Clone ID: LIB3120-008-Q1-K1-H8
cccacgcgtccgagaataccttaaatgagtttatcatatcaaagaagtttagcttaattgcctactgaatatacagttgaagagttgtatgaaattgaaacagcttgttaaaattgtgtgatggtaattgtgccatccggagaagaagctgtatgatggcaacagctgctattatcggacttactgttggaaagcgattcttgagttcttcgttttcgtattccgatatcattgagaagcactcgtatgccggtgattatggcggagctccacattatcaaactgctcccactaaaagtttaatagttgcaaagaaatcatctaattgtagccaaagtgttccttcatatgatcggcgtagtcggtcgatcaaagctcttaangagcatgtggatgctgctttcc

SEQ ID NO: 31923 - DNA, 333 bp, Gossypium hirsutum
  Clone ID: LIB3120-009-Q1-K1-A1
cttcaactacggttcccctctgttgcttttctgtatatatataagtaattttttcaatttcgatcattcacaaccaaagatccctcttcataggtctctatttccaataatttatcagacacacacacacaaaaagagaactcttcaagttcttaacctacgtcggccgccgtttccaaatgttgagaaaatcgaactcctcccttgaaatacttactttctggatcttcgattctcttttttgtttggcttccttttcagtcgctcagcgacaacaagaacaactcgctgaatcggatcggttcgacgatgacgacgacggatgaaacggta

SEQ ID NO: 31924 - DNA, 220 bp, Gossypium hirsutum
  Clone ID: LIB3120-009-Q1-K1-A6
ctcactcgtacggttttatatggtatcagcgccttaaactggcgggtgctagcatgggacggttttagccaattttcgcatttaaggcctggacgtctgtttacttgctatgcgagatccaaaggccggggcacgacatccatgacttgaatctctacgaacgttggtaactagagatggccatggccacgtctggtaccatacacgagctgcgtaccac

SEQ ID NO: 31925 - DNA, 193 bp, Gossypium hirsutum
  Clone ID: LIB3120-009-Q1-K1-A7
acggaaatgcttggggtttgccattgaacaggccgtggcgaatgggctatgccaaagtggggagtgcatcggcgatcagcgtaccttgggaactgcaacagtgaacatgatgccagagtgtgaactgccttttggggcgcactttcaaagcatatctttgggaagttcagttcttcaagacttaaaaccctga

SEQ ID NO: 31926 - DNA, 140 bp, Gossypium hirsutum
  Clone ID: LIB3120-009-Q1-K1-A8
acggcgattattagcgctttaaacggaaaaagatggtcgcagctattaatcctaagaacgggtccgcttcagacatgtgtgagatatgcaagcgtcacaccctacaacatcctctaacttgttcaaccaggtgccaccct

SEQ ID NO: 31927 - DNA, 404 bp, Gossypium hirsutum
  Clone ID: LIB3120-009-Q1-K1-B2
cttgtcgactttgcttgttacaaaccggaagacgatcgtgaaatgtcggtcgactcgtttttgaagatgacggaagatagcggtgctttcacggaggaaacacttcagtttcaaagaaggatatcgacccggtccgggttaggcgacgaaacatattttccgagagggataacgtcaacaccgacgaatctgtgtatggaagaagctcgagctgaagcggaaactgtcatgttcggagccgacgatgaactttttgcaaaaaccggagttgacccgaaggaaattggtatccttatagcgaattgcagcttcggtaatccaacaccatcgttatcctccatgattggtaaccattacgagctacgtacaaacatcaacagctttaatcttggtggaatggggtg

SEQ ID NO: 31928 - DNA, 273 bp, Gossypium hirsutum
  Clone ID: LIB3120-009-Q1-K1-B4
gtcacacacccaatttatgtagggctttgacttagcaacctgtaatgcctaaggctatgtgagcagcggtgcaccattgaaattggtgaggagtatggaaacagcctttatttgagttgaaatcaacactttagagaccatttggatttgggaatctgcatttgtgtccccgatttcaacagagaagccacgggatctcatcaatgcatctattaaaagtgatctggtcttgtacgctcctatctaaagaactaaagaaaagccaggtatatg

SEQ ID NO: 31929 - DNA, 354 bp, Gossypium hirsutum
  Clone ID: LIB3120-009-Q1-K1-B6
gagactctttcggataactgtggcatatgctactggtaagcagtaataccaaaggccggcgccatgatctgatcggcaaccaatgccaccggcaactgttactacatggttcagggcaacatggtggcaccctgcaacggcctaacggctgcctttggttgatcagtcacttggaaggccaaccacgtcattgactatcgtgcaagcaatggacggagagttcaatgcatgcaagacttgcctactactgggccgaagaatcacgagacacttgtattccgaactcggcgtacacccgtacaaatgaataaggcactatattaccaagttcactctaaatgggttccatgcttg

SEQ ID NO: 31930 - DNA, 327 bp, Gossypium hirsutum
  Clone ID: LIB3120-009-Q1-K1-B7
acggtaagtattggagtttgctattgaacatgcttatgcaaagggattatgccaaaatggggaggcgatcggtgatcggcattggattgggactgcatccgtgatcaaaatcttgactgcaaagtgattttttgttcgcattatcaatggcaacctttgggaagatgcctgatacaaagcttaagacactggtattacttatggatcaactctttgatgttatctttttggatgagaaacaaaactcattcagatcacaagtataacgtgatgactactttttgagatccctggataaattgacaaaggaaccgggaactttggttg

SEQ ID NO: 31931 - DNA, 178 bp, Gossypium hirsutum
  Clone ID: LIB3120-009-Q1-K1-B9
gcgcttgcaaagctgtcagacaggactagtgattgctgttcacagaaccgatcgcgcccaggccatggctgatttggacgcccagatgcctacaactttcgatgcatttatcaagggtgggggatccgatggcactggtaccaatgaggatgccgatatacgggtccaacatacggac

SEQ ID NO: 31932 - DNA, 228 bp, Gossypium hirsutum
  Clone ID: LIB3120-009-Q1-K1-C1
acgcgtacgctcactactatgcatgctccggataatgattctggaatgtgactagacctacatgggcaggcgattgaagatcgtgatgctttcgcagatgaatcacgtctgcataactgaagtacatacccactgtccggctcaatgtacctggcatacttaccgacagtcataacttctacaacgtacgctcttggtagcactataacatcgctctaggacaggaac

SEQ ID NO: 31933 - DNA, 393 bp, Gossypium hirsutum
  unsure (1)..(393): unsure at all n locations
  Clone ID: LIB3120-009-Q1-K1-C11
gccacgcgtacgcaaaccaccaagtctcttctaccatggtctgaaaacctgaagattgttggaaggtgcattgattccattgcatctaaaacctctgtggatcctgcaaacgtcacttggtcctacacgtataaccggaagttattggcccctgaaataatagtcaagggtggtatgaaataccaagagaagattgaatctgttccaaaggattggtgggttgaagacgtatgtgagctagagatttttctgtacaaacgagtcatgactgctgtgaaatcaaagggaagaatggatggtgcaatcaatctgtgaggcactcaaaacttacgctgacagatggctgccagattctgttgatgcctngatttctgatgtacattcctggagaaa

SEQ ID NO: 31934 - DNA, 235 bp, Gossypium hirsutum
  Clone ID: LIB3120-009-Q1-K1-C4
aacaaactacatattctgcactttccttcaaatctttgcaaatcttcacaagcaccgcaaggtcggtcgtacagcgacggtacagtgtttcgaatcgtaatgtgttgaatgtaaatcgatacgtgcatgcatttgtgaataattgagttagggtttcgatttatatggtcgatataaaagtcggataccatgtatggagaagtacgagctggtgaaagacataggatcttggaac

SEQ ID NO: 31935 - DNA, 280 bp, Gossypium hirsutum
  Clone ID: LIB3120-009-Q1-K1-C5
acgctcataccacaaactctgattacccgagactatcatacacctgcagaatggccgctgcaaccatggctctcacttccacatcagtcgccggtaaggccgataagctctgtacttgcgtgcctaaaatccaatgcaatggccgtgtttccatcagggaaaccgctaccaacggttcatcctctggaagtccatggtacaggaccgaccgaatcttgtacttgtatacattatctggtgagacttcatcttacttgtccggagaatttcctggtgacta

SEQ ID NO: 31936 - DNA, 217 bp, Gossypium hirsutum
  Clone ID: LIB3120-009-Q1-K1-C7
gtaatgcttactgtttcacatggaaaatgctgacgctggtcatcttaaccaacatgaggagtgcctctatgatcggcactgcctgcgaagggtgactgtgacctcattgtcccatcctgagtaccgggatatacttgctagtaaaccatagctacatacacctcgcgaacttgtgtacctgacctatcagctgaccatagatcaatgccttggcagc

SEQ ID NO: 31937 - DNA, 303 bp, Gossypium hirsutum
  Clone ID: LIB3120-009-Q1-K1-D12
ctgatttatacatgagtggtgaaattcataaaaattcacaagtggaatctgtcattagtgatccatttgaatcctctgcctcatccaatatcatttcaagcaatgggatctccacgagtttacctgatccagtttcctcacagaattttgccagtgaacatatgttgcaaatctcagggaaatcttctgatactgacaatttaccctgtactgatttatacatgagtgatgaaattcataaaaattcacaagtggaatctgtcagcaatgatccatttgaatccgttgcctcatccaatatca

SEQ ID NO: 31938 - DNA, 312 bp, Gossypium hirsutum
  Clone ID: LIB3120-009-Q1-K1-D2
cattacgacacttgtggcaacttgtggttgacatctgtccaggcctcgggtttacattgaccgcgtgaaatctgacccggttcttgttcactagggcatatgataccatgaacctgtatattgcaaatttactgcggatgtatacaagtatcttcctgatgctgcggagcagatgtatgccagctatatatattgcacatcttacatatccattcacctgcatgtgctgcataagaatgccgactaacaccctttactgagatcattgttaatacagtgcggatgtcatcatataccatgcctacagactct

SEQ ID NO: 31939 - DNA, 318 bp, Gossypium hirsutum
  Clone ID: LIB3120-009-Q1-K1-D3
caaaaagccttttaacaagggttctgtctacatgcagaagtggcgtctacttaaccaactctgcctgggctcacctctctgatctggtctggctagtccagtcattgacccgcttcaagatgactgcattgcggacactatgtgccctagttaccttagtggtgcgcagtgtatgaacccggctgtgactgattggtcctactcgaccatctcggatttagccaaagctggtaactccaaggataaccaatgcagattcagagccatactaaacaaccttgcatattaggcttgaatttagcactcatgcgccttacc

SEQ ID NO: 31940 - DNA, 418 bp, Gossypium hirsutum
  Clone ID: LIB3120-009-Q1-K1-D7
aaaaaactatctttttcatttccttaatactccccctgttactcttcaatcatgtcatcctatggtaaaggacaggcactgccaaaatttggtgaatgggatgtaaatgatccagcctcagctgaaggatatactggcatttttaacatagctagagatgagaagagaactggtgggaatgtcacagttggtgccactgaaggtataaaatcacagcagaaacaaggtacacgcaaggagaaaagtagacataaatattgcattaagagaaaatggttttgcttttgcttgaaatctggaaattagtcaactttatcttaatgctgaagctctcagttgaattgatagtactagacagttgacagtgtcaatgtttgttggcaattttcttggatcttttattctgaatacctttttt

SEQ ID NO: 31941 - DNA, 298 bp, Gossypium hirsutum
  Clone ID: LIB3120-009-Q1-K1-E2
acgatgatgctccttggggtgctggtgctggtagaggaggctcaggttctgcagctactggccagtctgccactggagctgggtatgggggtaaaggttatggatatggcgggtatggcggtgcacaaggccgacaagctcagcaacagcgagtctatcacaagaaagacaacttgatctgaaactcgactgcgcatgaccttatcttcgctcttgtaatcgtgatggtttcatacacgagcagcaacaagagaggttcaagatggatgatgaatcacctggggacccactggagtgc

SEQ ID NO: 31942 - DNA, 369 bp, Gossypium hirsutum
  Clone ID: LIB3120-009-Q1-K1-E4
caagcgcgttattcagtactactgtcgctacattcagccttcactccagattgtgcagaacataataatctcgggggctcgtccttaggttcgacttgcacatatctagccataaatcgaagaacatggccgcatcatcaagtgccatgcatatgcaatccctccgtttagcaaggcccatgactggccttgctagtacgagacaaatggatgagacttataacgtgaaacacatgcatcggtattaacgggaactcagtcttcaagtccgctgtttggcataggactaggatcaaaaggagccagtgcacagaccatgaacgcatgatcctaagcagagccatccactgatatcacccaacgtgagca

SEQ ID NO: 31943 - DNA, 297 bp, Gossypium hirsutum
  Clone ID: LIB3120-009-Q1-K1-E5
gccacgcgtgcgtccacgcgtgcgctcacgcgtgcgagaaacttcgattcatctgctgagggcatgcactatggagacagtccccccagtactggctgagcagaaatggcgctgactctgccaaacgcattaagccgaatcaagccttatgctgcgcgttcactgcgtctcaaaaaggtggtgactgcaaagggagggggctataggccacaagttaactgtcggaagaaggacatccactccgggatccacgaggatgctagaggttactgccgtggagaattggggatgacaaca

SEQ ID NO: 31944 - DNA, 210 bp, Gossypium hirsutum
  Clone ID: LIB3120-009-Q1-K1-E7
ctcctgcacgtgccggtccgaattgcgtttcgggtaggcgtaccgtccggcttgcttggtaacggtcgtgctactgacagtactgaatgctggttaccatgagagtgatatggcaagcatagtggcgttacccgcgtcgtctgatggttgcgtctgcaatggagtgcacaacgtcgtatgtcatggcctacacctaaacaacagcatgga

SEQ ID NO: 31945 - DNA, 394 bp, Gossypium hirsutum
  Clone ID: LIB3120-009-Q1-K1-E8
ggcctgcgttgaagacacaagccatgctctgggcacaacttggccaccaaggtcatatacttgcactttttgccgacgagaattccggtcagctcaagcactcggcggtcacatgaacgttcaccggcgtgacagagctcgtctttaccaaacacaaccactaccccacggtggtgatgctactactgttccattaatcaaccatactctcctctaccaattccctagccctaatggtctgttctttacttcttcacctaccaacaatgcatgttccattgattcaccttaccattcttcgatgccgtcgcaaaattttactgcaacccctacggggttgaatagttcttgttctctatgatcctcatctcaagatctcaaggaaacatcaatg

SEQ ID NO: 31946 - DNA, 394 bp, Gossypium hirsutum
  Clone ID: LIB3120-009-Q1-K1-E9
acgcgacgcgtacgcataaacatacgcatattcaatactaactgagtgtaccatgagaacgggatagagagacggacgaagctctaccttccaatgtctctgaaattgcttcaaaaaatatccccagtgccagtcaatcatgagtaacgaatgtcactactctcgctcaagctttctgctcatcggcgattcctccgtcgcaaaatccggctagcttctcagactagctcatgaatcttacgctgatagctacattaacaccattggtgtagatttcacaaatcagatcggtagagttcgatggcaagacagtcatgctgcaaatttgggatactgttgtacatgagcgctgccggactattactagcagatactaccgcatagctcatgggat

SEQ ID NO: 31947 - DNA, 392 bp, Gossypium hirsutum
  Clone ID: LIB3120-009-Q1-K1-F10
tagatacagcatacactactagcacccactactagcattggcttcctcaatgatctcatcggctaccattgccactgcctctgcggctcaggctaacatggccgctccgttcaccggtctcaagtctgtctctgctttcccagccaccatcaaggccaacatcgacattacttctatcgcacgcaatggccggagagcgcaatgcatgcaggtgtggcctgctactgagcagatgaactctgagactctctcataccttccagatcttacacccgtgcatttggctaaggaagtagattaccttattagctcagaatggagccctcgctcggaattcgaattggacgagggattcttgcaccgtaagtactcgagcttacccacgtactacc

SEQ ID NO: 31948 - DNA, 364 bp, Gossypium hirsutum
  Clone ID: LIB3120-009-Q1-K1-F4
ctaccatgttggatggcaacctggttcacacggcttccatgaaagccttactaaggctatgactgtatggaagtacaagagaaattaaggtctacttgactgcactgattgttctatttgcttacgtgagttcttggaagacgacagttcgcgatcgttgcctacatgtaatcatgctcttcatgtcccttgtatggatgcttggtttagatgtcactcctgatgtccagttcggccatccatttttacatccaccaactaacccgtcaccgctgctgccacagcccaagacagtcaccggtctgtacgcgtatcatgatatcgatgtcaacaaacgaaagaatccatgttactgatccacgat

SEQ ID NO: 31949 - DNA, 376 bp, Gossypium hirsutum
  Clone ID: LIB3120-009-Q1-K1-F5
ggcagccgaagactttcgtgaccgaattggctatcagcaatggagcaagcaaaacctgaagcacctaatgtcctaatcgtgccaatccctgctcaaggccatctcatacccatgtcgaagctagctgagcttctcagcaacgcaagtttccaaatcaccttcctaaacactggatacttccacaatactttgctttcctctatcgacatacacgccagttctcgacaatttgctaaatttcaattcgtaacaattgcagatggactacctcctgattatccacacgacattaaaggtatcgatcattatgtagtctctctgacggatgcatctaagcctgacggtgctgaggagcttgttacgcgtacatctaaat

SEQ ID NO: 31950 - DNA, 243 bp, Gossypium hirsutum
  Clone ID: LIB3120-009-Q1-K1-F8
catacgcgtggggtaacgcatgacgcgcgctatgcctgaaggtctggtctcacactgggaggaagaacatggcggcgagctcagaatgatccaggcggacaaacgtacagacgaccacagacgtagacaacgcttaacgctacaactgagtgtatggcttggaaatggtacaggtagaggcatacatccacggcctatgatacggcctagccacaagatctgctgacctcgtcttagactttt

SEQ ID NO: 31951 - DNA, 365 bp, Gossypium hirsutum
  Clone ID: LIB3120-009-Q1-K1-G1
cggacgcgtgggttagtgtgtaacagttttctgagctaccaaacactgtctcagaataaaaggagaacatagggcagcattaagtagaccacgaagagctgtagacgccattttcttccattcttttctttaattcttctccttctttgcagtttccttaaaaccaaatctcaccataaaaaactcctactttattgacctcactttcaacccagtatgccacttttactaaagtggtcaactatataaaggtttcattcgtaggtgacttgaatgcaagcatatgcaagcaagtaactaactggaaaggaattttggaagaagatagatccacaaaattgaaccctcgggagcctgacagaaca

SEQ ID NO: 31952 - DNA, 428 bp, Gossypium hirsutum
  Clone ID: LIB3120-009-Q1-K1-G10
gaatatttgtagacacaattagaagaaacatggaaagcattgttttcaagccttagatatgcgaaaaactttagtggtccggtctgtttccgccatgctgttttatcaccattaggatacgagactgcattgtttaaagggcttagcgaagacatagattgtcaaggtgcttctgcacatgatctatggcaaagccccgatgacaaaaaaactgctcggttatctgagtttggagaaatgatcagagacgcttttggatttcctgtaaacagacatcattctgataagacagtctcgggtcattataacatcctctttgtccgtcgagaagattatttagcccatccacgccatcgaggtaaagttgaatcaagactaagcaatgaacaagaagtgtttgattcactacagaaatgggcatctgatca

SEQ ID NO: 31953 - DNA, 306 bp, Gossypium hirsutum
  Clone ID: LIB3120-009-Q1-K1-G5
tgctagcgtgcagcaccattcgggctaactgagcctgcaagctcatctgccgaaggggaagagcataatgttaaggtggtaccctcgaacttccgcggatctctgggcagggcaaagctcatctgtactcttgagatgacgactgcctatctaagcctgtgaaacacgtcagactactgcacagcctactgcatgttatactgaatcaattccatacttcgggaatacaagtcaggtgcgcaaatgcatgtggacacccattatcagacctcagacattcgctaaaagatagctttatatcttggt

SEQ ID NO: 31954 - DNA, 314 bp, Gossypium hirsutum
  Clone ID: LIB3120-009-Q1-K1-H11
acgcgacgcgtccgtccacgcgtccgattttcatttaaaagattctctcagaacagtgagggagtagtagttcgagttatcggacgacctctctccttaaacacgaaggaaaatggattacttcaatggaccagggaggaaccatctcttcgttccggatgcggtaacatacctgaacccgcaattcaagccatgaaccggattaacgaggattaccgtaccgcggctattccggccatgacaaaataccctatcgaagatgtaaagaagatattcaagactacgaccgggactactttatgatcccaacaaca

SEQ ID NO: 31955 - DNA, 343 bp, Gossypium hirsutum
  Clone ID: LIB3120-009-Q1-K1-H2
ctgatctggcaagcaaaggcgattgagcgcactgcatgcaggtgtggactgatactggggaggcgaacattgagactgtctcatacttgcgcgatcttacacgcgtgcagttggctgatggagtatataaccttgttcgatcaaaatggagtccttgcttggaatccgaaccggtcgatggatacacgcacctggagtgcttcagcttacccacgtactacaatggacgctactggaccatgtggaatctgcccaagctcaggcgcaccgacactgatgacgtgttagaggagcttgaggaatgcaagattgcatacctcaacgcatccattagagtcattgg

SEQ ID NO: 31956 - DNA, 260 bp, Gossypium hirsutum
  Clone ID: LIB3120-009-Q1-K1-H5
gccacgcgttcgcagggtcgtaaggactatgtggacccttcaacggctcctttgattgacatggcttaactgacgtcatggtcgttttacagagcccgaatagctgagggcatagccactgtcctctttctctgtgtcactggtgctgctgacatcggtcacaaggaacaaccgggtgcatgtgatggcgttggtctcttgggtatcgcatgggctttcggatgcagcatcgctttccttgatgactgcactggctgaat

SEQ ID NO: 31957 - DNA, 319 bp, Gossypium hirsutum
  Clone ID: LIB3120-009-Q1-K1-H6
ctgaactttaagctgatgcctataccttgggttggaaccctagactagacatatgcactagcgatggcccatgttggaagctctggcatgggatatgctgatcgagtcggcaagaacaggggcatatgtacctgagaactgtatagttgacgatcgtgcctaagacataccatgaagagagtcttgactactggggtaacccaagctacatacatgctcaaagcatagtggacatttatgatctacaaagctttcctgatggatccacataacgtctaccggatagacccttgatcgattggttatgagactgacatac

SEQ ID NO: 31958 - DNA, 290 bp, Gossypium hirsutum
  Clone ID: LIB3120-009-Q1-K1-H7
gtcacccttactaagctctcttatgtctatgttgacacttcatccatatttgcacgtccaatggttactcagccagatatcaggtcgactaattgaaggaatctgtcaaggtccatccaatgccagttgctgaactgtaataatggctagaagcactgctcttcatagtatcatacggtgaattatgtagatatctgcgtaagaccatctaaccctggcttcatcagattactcatgcactaatatgctgcaaagtactgcatatcactaacgagcattgactcaaaaag

SEQ ID NO: 31959 - DNA, 453 bp, Gossypium hirsutum
  Clone ID: LIB3120-010-Q1-K1-B1
tcgactacgcgtccgacacgcgtccgcagacaatcgacaccagcaagacatagtttacggttacggtcagacccattttaggccatatgctagtgacgtgaaacgggaaatggcacatattctggcaccttcaactcaatggccgatgagagtaccaaagagctggacctttggaagccccattgcaacaaagatgtggaggtctctgatcttgaaacagaccatgaaaggagcagccaaaagtgctggcaaattcagagtgcttgccttgcactctgagaacagcactgtcaacatgacagacatgctactaaacatggacattactccatacactgacaaaatcattgctgaatatatctctataggaggcactggaatcgacatgcggagcatgtcaaggacaatttcaaagcctgttgaacatccctacgaactttctaagtggaacta

SEQ ID NO: 31960 - DNA, 348 bp, Gossypium hirsutum
  Clone ID: LIB3120-010-Q1-K1-B2
gctacgcgttcgctctcttcatgctgctgatctatacgccgctacgtcatatctctatcatgagatgaaccacatataatctgctctataccattcgagtgtcactcttcccgctcggtcaggctatcgcgatcgctgctgactaggctaggcccaatgctgctccatatgcagtcgatagtgtaagaggaaagtctgcttctgtccattgatgtgtcgtaaagatcaactgaactgaaagcccaacatatcaatagtatgccgcaccagattcgacgacatgactactagagttactcatacagacatagactgatacaaagtagaccttttctggacaagctagac

SEQ ID NO: 31961 - DNA, 332 bp, Gossypium hirsutum
  Clone ID: LIB3120-010-Q1-K1-B3
aaaacgcgagactatcaggaggactaatatgagatactacatctaaactttccacaaaggtcacctaattggtatcccaattaaaactcctttccctccttgaaatctaagctgtaatatagggaccaatacagagaccggagcaaaaaagggggagatggggatggctatgacaaagctttttacacagcttttcagccagatggacatgcatattgtaatgctgagtctagatgcagctggtgaaactactattttatacacgctcatactcaggctaatactcaccaatatactcaccattgtgttcaacgtcgagacaaatgaataca

SEQ ID NO: 31962 - DNA, 255 bp, Gossypium hirsutum
  Clone ID: LIB3120-010-Q1-K1-B5
cgcgtgcgcttacttgaggctttgggatcacgaggaatcctgccttgtgtgggtgcttacggtgcagggcgagtggactaaagcgacccataggacgcaacgaagacatggaaatacttcaattggtactactttcacatgggggtatccatacttagcgctattacaacgcttgtgtacattcaacataacattgagtggggattgatccgaggagtccgcaccatcgggatattcatagccattatcacgtac

SEQ ID NO: 31963 - DNA, 435 bp, Gossypium hirsutum
  unsure (1)..(435): unsure at all n locations
  Clone ID: LIB3120-010-Q1-K1-B7
catttttctcacctcttcattctccaaaactcatggctgccgtaactgctgcagtctcctttccttctaccaactccacctcttttactactcgaacctctatcatctctcctgaaagaatcacattcaagaaggtttctttttactacccagatgtttcaagtggagggagagtggtttcagtgcgagcccaggttacaactgaagctcctgctaaagttgtaaaggaatccaagaaaaatgatgaaggtgttgtggttaacaagttcaagccaaaggaaccttacattggcaggtgccttctaaatactaagatcaccggtgatgatgctcctggagagacatggcacatggtcttcagcactganggagaggttccttacagagaaggacaatccattggagtgattccggatggcgttgaccagaatggga

SEQ ID NO: 31964 - DNA, 367 bp, Gossypium hirsutum
  Clone ID: LIB3120-010-Q1-K1-C3
gctaggtgtaacatccactgctaggctccactggtaactatgacgatcgtagctaccagagaaattacaaagcgcacagaccgaccaggaccgagggaagggccttgcttataatatcttcaatgaccaacaatgacattaccagaatgaaaggtgtcatcaactcattgtcccaagctcgccatcaacgacggtactcactatgctatcatgagctcgtattactacattaaccaaaggcttgagacatacgacattggacaacaacatggctcgattgtacattgccccagctgtcattgacaagcttggttctcacatgaccaataactacatgaccctttctaacattaaagttcctcttatc

SEQ ID NO: 31965 - DNA, 336 bp, Gossypium hirsutum
  Clone ID: LIB3120-010-Q1-K1-C7
tcgctcgtgacctactgactctaccctgcacttccttcttgtgctagccaaaatcccttcttggttttatatatatatatttaaatatctcttctgttcagctcaaattttagtattttcgcaggcatacctttcctctgtctattgacactcttcattcctttttttctccataaagctagggtgcctctgcatatctgggtttttgtgaatttcattttgtttggttggtcaaaaccaatagtatttttaaactaggtatgaaagtagagtgaaagttgttaaatcttactggcgagagatgagttcgtcgtggttaagcaggacgcatgcttt

SEQ ID NO: 31966 - DNA, 278 bp, Gossypium hirsutum
  Clone ID: LIB3120-010-Q1-K1-E4
tttttctctaatgacatctctcatggaatctctactactgaaaaaaaggaaagagagaagcgctgatcacttgagcacatcctacatacgcgtgcgtgcccattcctatctctcctgtacggtccacatagcctaatttagtgcacaactgtgactaccgatgcaactgttaacaccctcgctatgcccaacttgatcatctagctgcacgtctcaatttacataaatggcgttattagcacattcactcgcgttcatccaactccctaactcatgaa

SEQ ID NO: 31967 - DNA, 261 bp, Gossypium hirsutum
  Clone ID: LIB3120-010-Q1-K1-F2
cccacgcgtccgcccacgcgttcgaaaccaacgaaatccttcaagaatttgacaatttgcgcttctcttaaatcatggaaaatctctcattttcatctcagctagccagtgttcttgcaaaaagcccccatggaagacgacttcgatttcccaacagccaacaacgtggaggaagaagagatgggcatcccagaagatgacccagtcaactcacttctcgaagtcggcgaggagaaagagattgggaaaaacgggttgaag

SEQ ID NO: 31968 - DNA, 444 bp, Gossypium hirsutum
  Clone ID: LIB3120-010-Q1-K1-F3
ggaagtttctctttgtatttctccttcacttacacccccagtctcactcccccaatcaaagacccacattcacaaggtattcaaatccaacggtgaaagtcacttccatccaaagatgcaaatctttgatacgaaacagtcaacggcttacaaccaaggttgctgccaatattcatgatgtttccgtcgtagctgatcctgctcgagtcgatatcacttggcaaattgttgttggagctctagctggggttacccctttttttgttgcagggattgaattcagcaaaagaattattgcacaaagaagatgtggtgaatgtaggggctcaagacttgttttcaggggcaatgattattttaaatgccctgaatgtggtggatttcttccatggcaatcatggaaaaagttcttcactggttaaaaaccatttactacttttcaat

SEQ ID NO: 31969 - DNA, 161 bp, Gossypium hirsutum
  Clone ID: LIB3120-010-Q1-K1-F6
cccacgcgtacgtgtgcatatctgctttccactacaacaatatgctagtattcattagatatgacatgaatagctgaagggaattccccgaagagaaaatggattatgggagtgtgtgactcgaactattgattggaccgtgcagaaatatcgccttatct

SEQ ID NO: 31970 - DNA, 421 bp, Gossypium hirsutum
  Clone ID: LIB3120-010-Q1-K1-G6
ctcatttctttaaaaccagttgaattttcactttattggtatcccatgaataatccaaggaatatcaaatcttgaaaatcgccattgaagctcaagagaattttttttccatcggaatatggaaaagaagtagcaagaaaaagagtttacctttccgccgccgttaatctttgctacccattttctttaaaaaccctaaattcaagcttgtaagaaaagaaattatgtctcatctcgacgacattccatcaacgccggggaaattcaagatggaaaaatcacctttcattcagagtagaatgaggtggcactggcaatcttcacttgcgaagctcactttttggtcaattattttcttctgtttgattttgatcttcttttttcgatccccatcttcaaatcccctccttcaagatccata

SEQ ID NO: 31971 - DNA, 256 bp, Gossypium hirsutum
  Clone ID: LIB3120-010-Q1-K1-H2
ggcgaatcagagtatgagccgatcgtccatagattcttctttgcattctcgtcgacaccatagattcttctttgcattctcgtcgacaaacgatggtttgactgcttctatgcgtgattttgaaagcaatgttcaagcctttcaaagttgatcctccatagattcttttatattattatttattctatttcgcaatatatattgtgtttctacttgaaatttactttatattatatgaagcaaaattattatgtgc

SEQ ID NO: 31972 - DNA, 317 bp, Gossypium hirsutum
  unsure (1)..(317): unsure at all n locations
  Clone ID: LIB3120-011-Q1-K1-A10
cctaaatggagaaatccagtaattcaacaactttaggtggaacaaaatcggatcaggtgggggagacgctggcggcggttttcaaatcgcctacgtcgcagagtgatctagcgccgggaacgtcggatagcggtggaactttgtcacggaaatcgagcaggcggtttgtagtgggggcatcgccggcgcggagcagtggcggcggttgtagaaatgcacacattaggaaggcgaggagcgctcanatgaagttggacttggaagaactgagcagtggggcggcgctcatcccggcttctagcgctagcttgggcttt

SEQ ID NO: 31973 - DNA, 361 bp, Gossypium hirsutum
  Clone ID: LIB3120-011-Q1-K1-A2
gacaggcgttcgactgcgcgtgctcaaagacgtactgcttcgcgtgcgttacaatggctctcttcatcactaatgcttatgtcaaagaacatatcaataactcaactaatattatcatcaagatcaaagttcagtgatgcttaatatctttaatctgatgtggatctgaccaaattctgccatcgtgtcaagtagttatttatctggataattgcacgaggcatatgatcttacgaatacaatccaacaccatatgcctgtaatacctactcactatgacctgttaaccttagttagaaccgctactggtacttagagacgagatccttaatacggacctagacaagctcagcgagtgaca

SEQ ID NO: 31974 - DNA, 394 bp, Gossypium hirsutum
  Clone ID: LIB3120-011-Q1-K1-A8
gcggagatgtactggacaggctggatgggctggaagaactatgctagtgagtattcttgaactatacagaatgaagctcgagttcattgtatcataaaagaagttggtgaagcatctcatgaacattttccccaagatggcgagagtgggcaagaatctgcttctcaagttgaacaactgcaggaggatgatcaggaaaatgaagacgcaatgtggcaggaagctagtgttgagtataatgtatcgatggatggtcataatgaagaagcctctggcatgcaccatgaagatggtgggaatgacgatggtagcttgcttgagacaacacggaattggttgcaatggtcttatgatcaagaacccggtgggagagcagacgcattttattttcctg

SEQ ID NO: 31975 - DNA, 353 bp, Gossypium hirsutum
  Clone ID: LIB3120-011-Q1-K1-B1
acgcaaacgcgctcgcaaactcatgtccaacggtttgaaccggccacgtctgcaaccacgaagagagaccacccggtaatccattttgaagctcaggggttcaagcctagaccattgtctcattcattattcaatctacgtctcttacactgttgctgcttcatcatccaaagctttaaccacccctgcactcgtcaaaccatagaccaaagctgctccgagaaaggctgcacctataccatagccaaaggtcgatgatggaatctttggcacctttggtaggacagtgttaaccaacgcaaatgagctctttgttacacgtgtagccatgataggccttgctgcatgcctat

SEQ ID NO: 31976 - DNA, 163 bp, Gossypium hirsutum
  Clone ID: LIB3120-011-Q1-K1-B11
attgctccggatattgacgaataatgctactatagctaaaggaccgtctgctgcataagtggttgagcgcctttttcagatgatgtcaagatcagaagttgggcctgatggacaacatattgctttacaggcccttgtaaatattctggagcatccacagtgc

SEQ ID NO: 31977 - DNA, 355 bp, Gossypium hirsutum
  Clone ID: LIB3120-011-Q1-K1-B6
tcccactcgttcgcccactcgttctaccacacttatcgaatgcttcaaactataaacattttatatggttacactactattcggcgtgctcaaccagattatcatcagcttgcagctaattctcacaaatttgcatctgacaatgatcaccataaagctactatgaactttattcatagacacaaggacattaaactctttcctaagactgacaatactagttaccacgccttgaaacaccctattgctagcaactgtaacactatcataagaaataattacattatccttaaatataacaacttttacccttctcttgaacgataccttacctttatagaagacaatacatcaa

SEQ ID NO: 31978 - DNA, 188 bp, Gossypium hirsutum
  Clone ID: LIB3120-011-Q1-K1-C10
cttcaaatggaattgggaccattcctgccttctttgagatttcaataccattgtctccaccattgaaggttatactcttaactccagggtgcataataaggacttcaccaatttcatagcctttccccgtcacacatattctaatctctatggtaaagccagtctaatcaaatcattcctccttatta

SEQ ID NO: 31979 - DNA, 264 bp, Gossypium hirsutum
  Clone ID: LIB3120-011-Q1-K1-C5
acggactcgatgtgtacggctcttgctcatgggtttgtagatcctaagagacctgttaagcccgtgcgacagcgccttcttcgcgagcttcgaagggtaatcggattaaaactcctgtaccgtaacgcggctgctgtcggccactttagatagtcccgagacctcggtctaagccttcggaacacggatcttttctgcttaacggccttaccaccctggaaacggctcagtcagttgtagtgcccagccggacggaacagcacc

SEQ ID NO: 31980 - DNA, 356 bp, Gossypium hirsutum
  Clone ID: LIB3120-011-Q1-K1-D6
acgtattcgcgtgcaccattactcgcggtagggttttaacatctagtgtacttaatacttcatctggcacgacggctgcttcggtgggcctcacaactgcataatgggggccgacgagtgcatatgcaccatgcggaagaggctctggtgcattaacgtctaaaacatcaagtgcactagtctatgtcttcgctagcggcttatcccctgtacaaactcatgagacgtcctctgcgggttgcagcatcatgaggatacgctctaacttacttcatctggcggtcaaagatcaattgatagcttatgataccacagtgttcttccaggtctaaaagtcgttccaggctctcatggga

SEQ ID NO: 31981 - DNA, 458 bp, Gossypium hirsutum
  Clone ID: LIB3120-011-Q1-K1-E1
acgcagacacgctttgactgaaactagctgatgctgcaaccgatggacgcatgatgtctaaatggcggggcttctgtccaggtcggcatgatacattattgccaaggcaggatctaattatgatttccatccattaactaatgattcctgcataagtgacgctgtttacactgttttgcttgaagcataacaccgaatcgtctatgctattgcaacccaagacatccctagtctgaaagacctgtcaccacgacaaattaaggttatggcagcactcatatcgattaatgatgtactagacgatctaattgagtcatgcagcatgagtggagaagaagaacagctactgctttgtaatgagtatgtgaatgaacaacatcctagccttctggagtttctgctgatgttatgggatgatgcatctagcaagcttctgcgagatgattcaatgacaatgc

SEQ ID NO: 31982 - DNA, 461 bp, Gossypium hirsutum
  Clone ID: LIB3120-011-Q1-K1-E2
tcgtaaacggttcattgtcggataaccttatccttctctcccgttactgaatcaaccgaataaaaaagaagaagcagcacgctcttccatttcttaagatcaatgaaaaaaacaattctttggatgatgaattggagtttaatttcatgttaatttatttattcggagataaaaactttcgttacttaagagattaagaactcctccattattacaatgtggattgcagcatcatcaacgtcgagttcaaccttgtctttctttcaaatacaatgctctgattctaaccgtaaacggggtttcggtcccagaaaatccaatcaaaaggctacatcaaaggaggagaagggttttaacttacaacataggaaattagctagtaagcagtccggtccttacctgctgcggacctgtttaagtgtccatttgatggaaatctaataccgttcttgacattgact

SEQ ID NO: 31983 - DNA, 461 bp, Gossypium hirsutum
  Clone ID: LIB3120-011-Q1-K1-E3
aagaaaatgaagatccaactgttaccaaaatgtttcactacaaaatgttgtccgacttgcttggaagcaaggaagcagcaaaaagttcaatgctttatagctataaacatggcttttccgggtttgcagccaggttgacagattcccaggcaaaggaaattgaagcatttcctggtgttgtccaagtgattcctaatcaagttcacaagtttcatacaactagaagttgggacttcatggggctaaatgatcattctacaacaaatcttttaactaaaagcaacatgggtgaaggaataatcattggagtaatagactcaggagtgtggccagaatctgagagtttcaatgataggggtatgaatccaattccacctcattggaaaggtatatgccaagagggacagttgttcaactcctcaaactgtaacaagaaacttatcggagctcgttggttcgtc

SEQ ID NO: 31984 - DNA, 372 bp, Gossypium hirsutum
  Clone ID: LIB3120-011-Q1-K1-E5
tcgtccacgcgttcgcttgattttgatttaagttcattgcttgatccatttcgattggatcaaaggcctgatacagtagtaatcgtctatataacggaaggactaggtgatgatgttaggctgggatcatataagttcagggaaaggcagcctataggaactgctgctcaaactcaagataccatggactacaaggatccaactgctgatacactgtttgatcctgactagttatgcttatgggactattacagggctggcattgccgctttcgtcgccacttgctagtgtatttacattaccgttataactgcaatagttgtcgctaaatcttcaacctagagtgatactgtaatgaatcaagtcacagct

SEQ ID NO: 31985 - DNA, 175 bp, Gossypium hirsutum
  Clone ID: LIB3120-011-Q1-K1-E6
gaaacggttcattgactgatttgcctaacgctctatcctgttactgcgtcaaccctctgaaagagacgaagcaggtcgctgcgcgatttcttaacatcaacgattaaaacatctctaaggatgatgacttggagtttaatttcatgttaatttactcattcggaggtaaaaactt

SEQ ID NO: 31986 - DNA, 408 bp, Gossypium hirsutum
  Clone ID: LIB3120-011-Q1-K1-F1
ataccacaggctcccatcaaccgacatcatctttccccctcagaatggcggctgcgaccatgggtatctcttccccatctttcgcgcggataggccgccaagctctctccttccgcccctaatatccaaagcccaggccgtgtttacatgaggaaaaccgttaccaatgctgctcactgtggaagtgcatggtacggacctgaccgagtctagcacctgggtccactatctggcgagccttcatctcactcgtccgaagaataccgtggtgactacagttgggacactgctgaactctacacggacccatagacatatgccaaggaccgtgagctctaagttattcactgtacgtggactatgttgggtgctataacgtgtgttttccatgagattttagctaggcat

SEQ ID NO: 31987 - DNA, 446 bp, Gossypium hirsutum
  Clone ID: LIB3120-011-Q1-K1-F5
tcggtcccatcaaatgtgcctgaaaggttcttcttcaagtggaaacgtccttatacaggatgacatgtccggtgaacttgaagaaaacgggataatgtcacgcatccctttgcttttggcttcatctgaaacttcatagatagcacttgaaagaatcatgtcagcattcgcaagaagcatctacaagaacttccggcaggtgatctaagagtattggtccattaacagatagccctactgatacaacttctgagattgatgatgatgatcaagtttacgatagctagtaattccctcaacatgctgtaccgtgcaaacacggggacaggtgctgctactaatgcgacatctaccgtgacgctaggtatgaatacatgaggccgatggttgaaggatacaagagagtatgacatgggagatacgcgttctcacaacgctaatctaca

SEQ ID NO: 31988 - DNA, 153 bp, Gossypium hirsutum
  Clone ID: LIB3120-011-Q1-K1-F7
tcgctgactcgtgggctgttttgcgttaaaacatcattggcctaatattgacattcaggatcaatggtccttacagaggagcatctgacatttaatacatcaatggccatatctcatggtctaacatcacttatatttacacacatcatcaga

SEQ ID NO: 31989 - DNA, 270 bp, Gossypium hirsutum
  Clone ID: LIB3120-011-Q1-K1-G8
ttcacacgtcctcccacgcgtgcgcaattggcgaatggtctacgttcacgtttggattctacaccaatctcatatgtgcacgtggactaactctgcaggcataacctactcgctgatactctagcaatgaggtccccgacgttagcacctaacctaagaccattgctcaaccttgtaagttctaaactactgcttaaaaacactatcacgtatcaagattcgatctgattgtgaattctgggactgccagtctgtgtccagacaaatgct

SEQ ID NO: 31990 - DNA, 276 bp, Gossypium hirsutum
  Clone ID: LIB3120-011-Q1-K1-H3
ggagagaagagaagaatgccgtgaccccattgacggaaatgaagcctgagaggatttttcggaagatgggtctcttgcataggcgagtggatcggatcctgtctagtaagcctacagacttggctaagagtcgtaagatgatctggattgcctgcgatcctgttgagcaacaaagtgttcagctatatgcacttacttataaggtatgggcatggttgcttgacagatttcttgacatagagttcccatattgtgagcaggcattggatgcatatg

SEQ ID NO: 31991 - DNA, 448 bp, Gossypium hirsutum
  Clone ID: LIB3120-011-Q1-K1-H9
cccacgcgttcgcccacgcgttcgcccacgcgtccgggcaaatatctttattggattaacataaaggtaaagagtacaaagacagacggtggggaatttattttggaatacatgagagtattataatcagaacctaataatttccccttaagaacaagcttgtagaggaaaattattgtaattttcaaagagtgaccggtttaatgagcaatatgctgataataaccttagttgctttcccaacatatgtatagccatcaccttcgttgtaaatcacattcatcacccttgcaagatttaatatacgattcataacttctattggcatttcggttggtttcaaaaaccctttattcacattcttacaggcactctcgatatgcttgttaaacacattgtatgcttcttgttccattacaccatattcttacatgtaacactcaattcc

SEQ ID NO: 31992 - DNA, 280 bp, Gossypium hirsutum
  Clone ID: LIB3120-012-P1-K1-A1
gttactcttccaggaaaaatcttcatacagtatttctttcactttctttctttgctagaggaaagataaacaaacctgctactggtcgtcatcacatctgagaaagaaaaaaaaaatgtcaggaggggttggcccaacctgcaatgatataagcctaccaaatgaaggaattcaaggccatgaaaaatcattccaccccaatcctcttaaaaccgactcgatttctcaccctcagggcaactcaattgtcttgccgttatgatcatcgtggcggcgagcg

SEQ ID NO: 31993 - DNA, 374 bp, Gossypium hirsutum
  Clone ID: LIB3120-012-P1-K1-A2
ccagaatcaagttcccagttagctatgggtgcaaccttcggcgttgagccaccaaaagaaaagggtgatgtggacattgcaacccacataagagttgatgatgatggtcctgatcgtagcttgctctatgtggagactgctgaccgtccagggttgctggtggatcttgtcaaaattattactgacatcaacatcaccgttgagtctggggagttcgacactgaggggttgttggcaaaggcaaagtttcacgtcagctccaagggtaaagctatcatcaggcctctgcagcaggtttcttgctaatagtttacgatatttcttgaggcgttctactacggaggaggcgagtttttgagtcaccatgatgatgc

SEQ ID NO: 31994 - DNA, 197 bp, Gossypium hirsutum
  Clone ID: LIB3120-012-P1-K1-A4
ctcactcatccgttcacgcgttcgaccacgcgtacacatacgcgtgcggcttatttaagggaaaggaaccgccaaaccaatccgtgtcctgtgccaagtttaaattgctacaagcattgaccaagtaccagggcacggtgtaaaccatcgacaaaactggaaatcaagcatcaagattttccaaaggggccaaagga

SEQ ID NO: 31995 - DNA, 246 bp, Gossypium hirsutum
  Clone ID: LIB3120-012-P1-K1-A9
gcttggatttgaatggtggaggtgaggctaatgatgataatttaaaatagtcttagcggatcggagtgagatattactgtcaatgatctgattgttacacacactgtggacttccttttagtaaaaccaaaaatccttttggattttgactttttttaaattcaattcagaggaaataaagggggattggatttttggtatgatgaggtgaaaacactctagtgttgatgggcagtggatttggat

SEQ ID NO: 31996 - DNA, 405 bp, Gossypium hirsutum
  Clone ID: LIB3120-012-P1-K1-B11
atcctcattcaagttattcctttactctttgttccttaagaggattgcctcgtgtggggcggtgaatgttcaggtatctactatgtttgtaatggctatcatttattactccaacaaccgacttctttatcatccgagcatgaagttttcaagtaaattgggcaactaggtgtccctcgaaaatcaaaatagctttatggaaatttgttcatggttttgtagccactagatcatgcctatacaatagaagagttgcaaataacccaagttttccgaggtgtaatgttgattacgagacggtgaaccatgtgctaagattttgtgctacagcgagagatgtgtgggtaatgatgggttacctattgctttgggttagtgctcaactggaattccatgattggcttt

SEQ ID NO: 31997 - DNA, 420 bp, Gossypium hirsutum
  Clone ID: LIB3120-012-P1-K1-B6
tcgtccacgcgttcgtccacgcgttcgtccacgcgttcgcccacgcgttcgaaaaaccagggttctgtcttgggattttctcgtttcaaaacatcttcaaagcttttacttacttacagacatggcgagttcacgtcttccgaggtttatcatggaagttgctccaccacagtttgttactgtgatgagacaaagaacaaggacgatgttggataccattaatgaagaggataatcttgatggttcaaagagtttatcatcaactacaattccagcaggtgctactatggtgactgctgctgctgcttcatcttcttcagctactactgtgacggctcactccaagtatttttctcaaaggagtgtccagctctttaactttcagtaactagaacgatcgtatatttgaagatatgtatc

SEQ ID NO: 31998 - DNA, 317 bp, Gossypium hirsutum
  Clone ID: LIB3120-012-P1-K1-B7
cttatttcctttctcccggggttcctccgactctcgacggagggagagaaagaaagagcccacaactttcaaaagtttaatttctagggatttttaaaattttcttttttcttgtgtggtcgattttcagtttagctagttagataggttggattgagagggagggaagagcataagaaaattaattgaatagaaatgtcagcggcattggaccctgtcgattggcttctcttttctcttagtagagctttccgtagtcctcttgctgtttttgttcagatccagggttgtgttatatgcttgtctcttgctattgg

SEQ ID NO: 31999 - DNA, 287 bp, Gossypium hirsutum
  Clone ID: LIB3120-012-P1-K1-B8
ccatttaaaaaccttatcttcttttggctaagcgaaacaaaggctaaaatggtgcgggatctgctttatttgtgattctgccattttctaaacccaaaaccatatcttttccaaacccaacttccattttaatggtccccttttttcttttccaccggcttcatggcaaggccttcctttcttcctttctttaaaggttcacgcctttaacaaaaaaggcttcttcttttccttctaactttggtagaaacgcttccgcttcattttgagtaccggtcaggaagagg

SEQ ID NO: 32000 - DNA, 153 bp, Gossypium hirsutum
  Clone ID: LIB3120-012-P1-K1-C1
cttcccggtcctgcggagccaaagaccgcaaactgccgtgctttaaaacccaatcgtttggggctaaaaaccgctcgggattggccggtcaacgtagaagcgttcacggggtcaccagtaacacccctggggacccaagtatttgtttgcccc

SEQ ID NO: 32001 - DNA, 354 bp, Gossypium hirsutum
  Clone ID: LIB3120-012-P1-K1-C2
ctctactctgagcggacattgctcatctctgttcatcagcctcagcctctcctcctcagctctggtcatgggcctcacctcatcagctgtgcccctcttctctgtcggtcgaccatcggccttactcaagtctgtattttgaaaaaaaccctaaaaacttagcagccacgataatgtataatctcattctactttttatcaagaccttttgaacatgctgggtcacctcttctcgttagcttgctaaaaaattacagcctcctttgtcacctcttctcgcgattcatcgaaaggtgctgctggagttgctgttcagtacttgcgttacacacctggcctctttaatgtaggact

SEQ ID NO: 32002 - DNA, 155 bp, Gossypium hirsutum
  Clone ID: LIB3120-012-P1-K1-C3
cttatctgtagggaaacatcaggtgcaagtttactctcaagttgaaacgggaacacacaaccaggtcgtcggaaaatcccatcgtctaaaaagcaaaaaccaaattctcaaggaattaattacggatctcacaaaacaaaaactgactaaaccaa

SEQ ID NO: 32003 - DNA, 418 bp, Gossypium hirsutum
  Clone ID: LIB3120-012-P1-K1-C4
cccacgcgtccggcagattatctccaaaatcccagccgagaaagcgcaagaaaattaaagaaggaaaatgggagatttatacgctttggatttcgatggagttctctgcgatagttgtggagaaagttccatctctgctgttaaggctgctaaagtgagatggccggctttgtttgacggtgtggattcggtcttggaagactggattgttgatcagatgcatatggtgcgacctgtggtcgaaacggggtatgagaatctgctacttgtgaggttgttggtggagagtagattaccttcgattcggaaaacttcggttgcagaaggactaactgttgaagatattttagagaactggtcaaaaataaagccagtaatcatggaagaatgggttgaaaacagggatgcttaattgatc

SEQ ID NO: 32004 - DNA, 224 bp, Gossypium hirsutum
  Clone ID: LIB3120-012-P1-K1-C7
cccactcatacatcaaaacttgctttttttcatcccaataagatttttatttttcatggcttgaactttcttcaatggactttctaacttatcctaatccacacattttattatcaaatccactctttaatcaactactttttccccacaatacttcactatcaatactctacattccctacccattcatttccaatattatccattctataccactccctaca

SEQ ID NO: 32005 - DNA, 147 bp, Gossypium hirsutum
  unsure (1)..(147): unsure at all n locations
  Clone ID: LIB3120-012-P1-K1-D10
gagagctttgaattatccatgtagctagcgaattattattataattatcggaagtagggtgtggtagtaaaaatatagggagttagttttttaactntaaatctattttactaactatctttttttttattttttattttacttttg

SEQ ID NO: 32006 - DNA, 360 bp, Gossypium hirsutum
  unsure (1)..(360): unsure at all n locations
  Clone ID: LIB3120-012-P1-K1-E9
ggaagacgagaggagaggacagacaattgggttctaccattgatttcttttgccttatttcattgaatttggactcatagaaaaaaaaaatatacttcactcattcacctttctttcttttcttttttcattttgtatttttcttggaatgctactactttacttcttccttacttgttttcccatcatcttcctttttaagttgaagaaatcacttccaccatgggctactgaggtgaaattattgtctctctggtttgggaaagacgtttccttttcttccgttaccaagttgatcaaaactagntctagtcctttgtatttcacctccaaaatgcctctcaaaaagatgtctctcac

SEQ ID NO: 32007 - DNA, 416 bp, Gossypium hirsutum
  Clone ID: LIB3120-012-P1-K1-F12
tccacgcgttcgcccacgcgtgcgattttgttccagagcctactcaagtttcagaggcttctggaccggatccagctactgcccttgtggaagagaatcaaaatgttgctgagaaagtttatgagccttcagaccaggaaaaacagttggtcgatgaagacgaggcggttgtgaaaccccagtctaattcaaacggtgatgatattactgtagttgttgaaccggcttcttcttcagcccaagaggattctgcaaagaaatcctatgcatcaattgtaaaagtaccaaaagaaagtccggggccaacaacagtctatgtaccttctaatactacaaaagtgacacccaagaaaactgagaagcaagctcctatttctgcagcacctgctacaccggaagcttctgcaccttccagc

SEQ ID NO: 32008 - DNA, 280 bp, Gossypium hirsutum
  Clone ID: LIB3120-012-P1-K1-F8
aacaaactttaaactacacttctacttcccactactaacattgtcttcctcaatcaggtcatggggttccattaacactgtctgtgccccacattctttcattgtcttttctttcaccggtctcaagtcctcctctcctttcccagtcaccacgttggtcatcaaccactttacttttttctctagcacatgctctcgagtatcattcattcacgtgttgccccccactgataagaagaactcctatacatcttaataccttaccgatcttactcccgtg

SEQ ID NO: 32009 - DNA, 313 bp, Gossypium hirsutum
  Clone ID: LIB3120-012-P1-K1-H1
ccggccggaattccgggtcgggcacgcgtgcgctcagttctccctcactttcaaaccctcaccgtcaccgctcttttccaacttccctcgaacccggttcgggcctttcacaaccgcgggggcaatcgcttcccgtttcaaagtcctggctagtcagaccgggttcttcactcggctcggccggttgatcaaggaaaaggccaagagtgacgtctaaaagatcttctcaggtttctccaaaaccagagacaacctcgccgtcatcgacgaactcttattatactggaacctcgccgacaccgatcgcgtcctc

SEQ ID NO: 32010 - DNA, 299 bp, Gossypium hirsutum
  Clone ID: LIB3120-012-P1-K1-H5
cccacgcgtccgtccacgcgttcgaaagcttttactataccttttgcttataagctgaaccaagtcgtcttcttcgtcttattattattatcttgcttcactgcttccaccattcccctatagcttctctaatctaatggaaaccaaaggttatacccaagatggcactgttgatcttcgtggtcgtcccgtgcttgcctctaaaactggaaaatggaaagcctgtgctttccttgttggatatgaagcatttgaaaggatggctttctatggaatagcttcaaacttagtgaactact

SEQ ID NO: 32011 - DNA, 230 bp, Gossypium hirsutum
  Clone ID: LIB3120-012-P1-K1-H6
gccacgcgtccgggcactcaatgtgaccgtcgaggaagtcagtgaagcccttttacaaggtaatgctggtgcactcggcactgaacttctgtgaaagtttattgaaaatggctccgaccaaggaagaagaacgcaggttgaaggactccaaaatgattcaccagtcaagcttgggccagctgagaagtttttaaaaaccattctttatataccctttgcgttcaaaaagg

SEQ ID NO: 32012 - DNA, 151 bp, Gossypium hirsutum
  Clone ID: LIB3120-012-P1-K1-H9
atcgctctttcggttaaactggtatgtgctgcatctagaaccgtctaaccttaagaaggaatgggatgagcataacagggtgtgaaccgaacaagcgaccttactacgtattatttccgcatgtatgtcggcctaaaatgtcggcccaagc

SEQ ID NO: 32013 - DNA, 300 bp, Gossypium hirsutum
  unsure (1)..(300): unsure at all n locations
  Clone ID: LIB3120-013-Q1-K1-A2
gaatcgaccgatcgacccacgcgtgcgtccacgcgtccttacggacacttttttngtccgtagcgcacgccatagccgctcagtcgatctcttactggaagccaaacttcttccttcaatccaaactagccgagaaagatcaacaaattgccgatctctatgctcagatcgaagccctcgatgcttctttatctcaaacttcggataaactccctaaggccgatgaggagaaggggagcttgttgaaagataatgcttcgcttactagtactcttaagaaacctcagagagatgtttcca

SEQ ID NO: 32014 - DNA, 299 bp, Gossypium hirsutum
  Clone ID: LIB3120-013-Q1-K1-A8
gacccacgcgtcgcggatatagatatagcatacactactctgtcctatctttagcaatggcttcctcaatggtctcaggggctaccattggcactgcctttccagcacaggctaacatggtacctcctttgaccggactaaagtatgcctctgctttgccagtcaccaggaaggacaacaacgacattacttctctcgcaagcaaaggcggttgagtgcaatgcatgcaggtgtggcctcctactgggaagaagaagattgagactctatcataccatcccgatcttacacacgtgcag

SEQ ID NO: 32015 - DNA, 323 bp, Gossypium hirsutum
  Clone ID: LIB3120-013-Q1-K1-A9
ctcatgcttacatcggaagaaattttaagtctcatatgctaggacagacaatgacgggcgttgggaatataaaggcttactaaaacatcctcgacaagcccgttatcttgggctaacaagacgacaactcgtgtgcgcttacattttggtcctctgagcaggatgagtacaatcaaactcggtttgacaacattgcttaattaaatagaacgctggaagatgcaggatatgctgatcgtactcgagttcttgaactcttatgccatacggataaggggaatagcacggaaacacgatcgactggtacttcatcctttgatcac

SEQ ID NO: 32016 - DNA, 300 bp, Gossypium hirsutum
  Clone ID: LIB3120-013-Q1-K1-B1
ttccagcatgtcgtggtgctggcattgcatgaacaaacccacgtccttgaacatgcttggctatgaaacttccaataaatctaaaaataaagggaatgaattatctgcattgagtctttaggggttccattggagtatatcggattcattcacataattaaagtgatctgaattcgagtttggcatcttagtgaagactagagtctactcttgtatgcattttccagttggaatatatttcttgcctaagaaatcatgtatcttaatttccacattagttataaattatgacccattatg

SEQ ID NO: 32017 - DNA, 319 bp, Gossypium hirsutum
  Clone ID: LIB3120-013-Q1-K1-B12
cgatgttatctctgtgcacatgcgttttatgctgttcctgtgaatcggtggataagtaggctggagaataattgagtatgaatggatgctttaatatcaccaaaaaagacttaaggatatctgatccgttaaattttaaatttagttgcaagaattgaatcatcgagcatcacgaaacattgatgagtcctttgtaaaccctggaattgcggtaaagcagccattgcatgttgtgatggttgatcctaaagttgcaaataaatcacgatttacggaagagcttatttaaactatcttgctcaccgttgctgttggattg

SEQ ID NO: 32018 - DNA, 302 bp, Gossypium hirsutum
  Clone ID: LIB3120-013-Q1-K1-C11
aaaaaacactctggcgcagcagctttttctgtctatagcatcaatggccgcattacgtggctggtcacaggctgagctggacgggacctttcaactcagcggccaaacacgcttcaacattcctagcaacaacagagtgcctgtgcgtaggtctagtatcactgtcacagctcatcagacaccgtccgtgcctgaaactgcacgcatagccctgtaggctcccgttgctgatgtgatggccaatgactcctttgatcatgctgtgcttgccaatgccagacgcattaaagttgtcccaccta

SEQ ID NO: 32019 - DNA, 398 bp, Gossypium hirsutum
  Clone ID: LIB3120-013-Q1-K1-C6
atcacgcgctcctacaagcaatagctctagcttattcttttttaagagagagagaaaagagagatcttgcgtgagttaaaaagacaaacgactacagttgcatggtctgtagggttttgcacgtacaagttcgtgtttaatcatcacaatgactagcatcatggacacggtggttgttaactctagcacgacttacttccttgagacagagttacgtttaaggttgcccagcgcctatggaaactaatgtgaaactaccaaaaacaacggaaaaccagggttctcggcgaccgctaattcgaagcttaacctttcatcaaacgagactgtaacactagattccgttatgatgaaagataacagctcaactgacactgcaaagccacctgtcattgcac

SEQ ID NO: 32020 - DNA, 293 bp, Gossypium hirsutum
  Clone ID: LIB3120-013-Q1-K1-C9
cccacgcttacgcaaacaacaacctttataatggttatacggccgcgacacggaaggaccgagctacatctcagagcgcctcgggacaaatacattctctaaattaacatgagctatctcccaaccctaaccacatgcgctcggacctgcgcctatgaaaccgaaacgcccctgccgttgtgaattcatacacatgataggtcagctcgccctagacgcaaccatcctatacgctgaccgagataaacctcccgcttatgtgatccaatcaacattcgacagacgaagaatgc

SEQ ID NO: 32021 - DNA, 440 bp, Gossypium hirsutum
  Clone ID: LIB3120-013-Q1-K1-D11
cgtcttgagatcatgacaattcctgtttaaccaatgagtgattctttacgggatgtggaagacatatctcttagattctccatagagggagatatcaaactcaatggagagatcgatgcatcagctagacagaagaaaattgttgaagcctttactcgaatggcttctttaaacagcaacaccggcattgtttacagtcctggtagaagacagatgctattcgtaatagcagctgattgctatgatagtaatggagaaactagagacctttcaagcaatgatcatgaatgtgatgaaagatgcaggcttatgtttcggcttacgaaagataggctttgtattgctaaccgggtcaagtttcatagagaccatgcaagcattaagttgttgtccggttaacattgaagattttgatgcactggtctgtaatagtggaagtg

SEQ ID NO: 32022 - DNA, 209 bp, Gossypium hirsutum
  Clone ID: LIB3120-013-Q1-K1-D7
agcacgcgatgctggaggcgaccgttagcctttcttcagcgaaggcgagcgacggcagcaagctgctttagttgtgtccgaacgaataaccacagggagaagatctccggtggcggagttccacgaggatagctttcatactgtcaccgtaccctcactttcaacagatgttcatgtaagctagaacaacatgatacttgaaaatatat

SEQ ID NO: 32023 - DNA, 326 bp, Gossypium hirsutum
  Clone ID: LIB3120-013-Q1-K1-E12
ccgatgcttacgattgacttaagtttttagttgttgaaaaagaatggagacagccggggagggcggtaaccaagatggttgatgcggagaagtaaaatgattcgctgactgaaaagttgtagtaaaatggctggtgaattctggtcttaccattatgcttaggattttcctaaactgagacgaaagtttatcctacctcatagccaaaacaaatcccatatcggttgccacacccaacatcgacccttcgaggccccgttctacagtcgtggaacaagttgctgatgaatgtcgatactttagcaggtttcagattgttaaccatg

SEQ ID NO: 32024 - DNA, 127 bp, Gossypium hirsutum
  Clone ID: LIB3120-013-Q1-K1-E2
gaccacgcgtccgccgacgcttgcgctcaaccatacgccaaaatgtggtattctcttaggcaagcccatcaaccggcggcggcctcggtggcaccgagacctctatatcatccccgtcgacgaaaac

SEQ ID NO: 32025 - DNA, 254 bp, Gossypium hirsutum
  Clone ID: LIB3120-013-Q1-K1-E3
atcaatctcaccaagaagatattttcgttaacatatgatattacatcaagagcagcattcggtaacacatgcaaggaccgagactctttcataatagttatagatgaaataataaagttgtcttctggattcggtctagcagatctgtacccttcttttggattgcttgagctaattagtggagtgagacaaaaagctgaggctctccgtgagaagagtgatgagatacttcaagggcatcgttaatgaaacac

SEQ ID NO: 32026 - DNA, 219 bp, Gossypium hirsutum
  Clone ID: LIB3120-013-Q1-K1-E8
gccagtcgaccaatgcaggttgcattttttttttttaacctgcacgccaacaggctgaaaagggccatatattgaggccgccgagaaacctccgggctggagccagtctaagtgttcatcgaacgaacaacgtcttgtaaatgcaacgcttaaacagctgtcggtatctagccagcagattatatccctcagagatcatcatgcagtagatcctgtaaa

SEQ ID NO: 32027 - DNA, 275 bp, Gossypium hirsutum
  unsure (1)..(275): unsure at all n locations
  Clone ID: LIB3120-013-Q1-K1-F4
gagttgaagattcaacaagaaactgttgtctaatggtaagcatatanaagagctcangaaggaaattgaggtggctaatgaggaacatgttctagtcgaattggctaagatggaggcatcaaaagaagctgcagatatcgaagctcaaaaagagaaagaagtaggtgaactgtcatgtatgatggcaggaacgaagaaaaaaatggaggacatgatcaacgagattgatcagactggagagttggaacaaagattgactgtcactttgtctgaca

SEQ ID NO: 32028 - DNA, 302 bp, Gossypium hirsutum
  unsure (1)..(302): unsure at all n locations
  Clone ID: LIB3120-013-Q1-K1-F6
gacccacgcgnccgctaattgtaccctatactatcaaaggccactttatatgttttcatcggcaaccanagccaccggcgctccggcgcaggctaacatggacgctcctttcacctgcctcaattctgcctctgctttcccagtcaccatgaaggccaacaacgacatttcttctctcgcatgctatgactgcagagtgcaatgcacgcatgtgtggcctcctactgtaaagaagaagttcgagactctgtcatacctccccgatattacaccagtgcagttggcttaagaagaagattacc

SEQ ID NO: 32029 - DNA, 186 bp, Gossypium hirsutum
  unsure (1)..(186): unsure at all n locations
  Clone ID: LIB3120-013-Q1-K1-G1
cccacgcgtacgatggcctctttagccaacactgantggtgtctcccncggcaacgccaaaaggcgcggtgaccctctgtattgcagtcgtggacctaggtcatcggctccaacaccatccaactcatccactgtctagaccagtgctctcttctccaagaagaaagccggtcctacaaagcccaa

SEQ ID NO: 32030 - DNA, 287 bp, Gossypium hirsutum
  unsure (1)..(287): unsure at all n locations
  Clone ID: LIB3120-013-Q1-K1-G11
cgggccgaccgacgcgtccgaccaatcgtccgaccaaccatcattttcagtttttttcataagatanacaccgcggcgcaggggggtaaataaacaggcataggtcacaaccagcaactcttcaatcaataattagcaacacgggtcccctcctcgatcattagttcataatatacgatcacatgaaaaacacaggctcattaatgcggttcagaacgcgtgtaacgatcaaacagttgcatacatacaagaaccaccattgacaaatccagtgacccttcatgacc

SEQ ID NO: 32031 - DNA, 356 bp, Gossypium hirsutum
  Clone ID: LIB3120-013-Q1-K1-G12
aataaacaacattggcaactccattttcagtttttaagctatcccgtaccttctggcacacgcgcgtgactgctctcactttagctcgtacttccacctcaccaacaacaaatatcctcgacgtcttagctgcttggaaacaagctcagcatattctttactttgatcctcaaatctctaatggtcgttacaaaagccatccacttatcgacaactcttcttcttgatcgaactctggttgttcgatccgacttcattcacggagctctctgcgaagaacacatcatgttgattataaaaaccttgtgcgatcctgactcgaccgtgattgagcccgagttaacacgctcaccacc

SEQ ID NO: 32032 - DNA, 312 bp, Gossypium hirsutum
  Clone ID: LIB3120-013-Q1-K1-G6
cccgtccgcgcagatagaccaatgcttgttggcaactctttttttaatttgttcgagaacaggcttaaaaagtccagatgttgttacttcccaaaatcctctttaatggtgccagtcaaagtattcatcgaaagatcaatttcttttaaattcaacgctacaacgggttttggtatctcaccggacagattattcttgaagagataaacatgcgttagattcttcaaagaaaacagcctacttggaattggaccttccaagttgtttctagctaagtccatatgctgcagattggtaaggtcgctgaaagat

SEQ ID NO: 32033 - DNA, 324 bp, Gossypium hirsutum
  Clone ID: LIB3120-013-Q1-K1-G7
atcaaggcctacgccaaacctagattttgttgtcttctgccggggtgttagcgaccagcacggagatcgatgctaagggcaacaatgtactcaaagttgtcgattgggacacgtttgtgattctacctccgtacattgcgttcaaaggaaacaatgacatgttcttgcgtaccgccgagatcgatggttacccgtatttacagctcttaagataggatattgaacacgcagctgtggaaatggacgttttgtatactctcaatggtgacattaggatcataccggtttgttccgataaagattggaagcgtaaaccgaattgga

SEQ ID NO: 32034 - DNA, 135 bp, Gossypium hirsutum
  Clone ID: LIB3120-013-Q1-K1-H1
ccacccctcaaatccagggaactgaccgcgttttcataacgaaaaccaccaacccctgttcctacctgcaacacaaggtacggtcctgaccaaggtatgtacttcggtccacaccccgctgagacaccatcttac

SEQ ID NO: 32035 - DNA, 244 bp, Gossypium hirsutum
  Clone ID: LIB3120-013-Q1-K1-H10
ggcacagaagctgactggcgctatttttgttttgattaaaactatgattgacccaagcttggtggctggttttactatcaggtatgggagttcagggtctaaattgattgatatgagggttaagaagcaattggaagagattgctgctcagcttgatttgggtgatattcaacttgctgtatgagttttgaattctttttttccctttgtgagaattgggtttgaaacatctctggttattatt

SEQ ID NO: 32036 - DNA, 191 bp, Gossypium hirsutum
  unsure (1)..(191): unsure at all n locations
  Clone ID: LIB3120-013-Q1-K1-H12
cgcgtccgancccaacctaggtcctcttatttttggcctctttaaggcggcncttcggccctcttccttgggaacacaacataggtaattcgggttttaagggaaggccccgccgccgccgccggcgccgccgccgttgcctaaattcaaccaatcttggtattccaccttggcacccaaagggtccgttt

SEQ ID NO: 32037 - DNA, 275 bp, Gossypium hirsutum
  unsure (1)..(275): unsure at all n locations
  Clone ID: LIB3120-013-Q1-K1-H4
ggcactgaagctgactggtgcaatttatgttctcttccncgacacacccgcccancgggataatggctgccgtccaggagctcatgcgaatccctactcacgcggatgcagaagaattacacgctgtcggcggtagatttatttttacaagcacttttaaataataaaataatattgtttcatttataattacgaatgccgtcgccgtcattgtgattggatggattgatgtggataaaattattattattaacttttaccaaatattattaaat

SEQ ID NO: 32038 - DNA, 305 bp, Gossypium hirsutum
  unsure (1)..(305): unsure at all n locations
  Clone ID: LIB3120-013-Q1-K1-H5
gcgaacggggannngtncnnnnatnncttttgatgtggtcttgagcaacaaaaccacgactgcggtgggtgctaagagagcaaagcctactattattgccccaactgtcaatcaagatatggctcatcctgaaagatagaatgctacacactatgccgcgtatgcttctagagactatatggctgactcactacataacgacttatttaaaaccaaccgggcaatggtagtatgctcacaccgttacatagccaacgacaaggatggaattaattgttcacttgctcgaggaacatttcagacac

SEQ ID NO: 32039 - DNA, 167 bp, Gossypium hirsutum
  unsure (1)..(167): unsure at all n locations
  Clone ID: LIB3120-013-Q1-K1-H6
nnnnattcnaggnnnnnacaatattgcaggctgatttgccgcccgccaccaaaggcaactaggctgttcaacatgggataacagctatctgagaaattgaacgacctcttttgtagggtattatttgtagtatggcagcaaaagcttgtttgagcaaggaagaagag

SEQ ID NO: 32040 - DNA, 216 bp, Gossypium hirsutum
  Clone ID: LIB3120-013-Q1-K1-H8
cccacgcgtacgattccgacctgtttttcctttcttacagcatcaacatcgacagactgttcaaggaactgacactaattcatactttttgaaattcccagaacagacaaatatattataaaaaggggtaatttctgtagtggagaacccaacacgaaaaaaaaagaagaagaagctctaagcatcacttgaaatggctagaccgatactacccca

SEQ ID NO: 32041 - DNA, 214 bp, Gossypium hirsutum
  Clone ID: LIB3120-014-Q1-K1-A12
cccacacaaactgtgaagcctaatcaaacagggcatctgctatagctaccagattaaatgctggaggcctttcttgcacggttcttgacaaagaaacatctcagaagcaaattttggagaagctcatatggatttgtgcatttatgcttgttggagcttgtcattcctgtggcaattataggcgttgtatagaatgaatacctttttgagagct

SEQ ID NO: 32042 - DNA, 119 bp, Gossypium hirsutum
  Clone ID: LIB3120-014-Q1-K1-A7
gcatacactactagtacccactactagcaatggctttcctcaaagatctcattggctaccataggcactgcctcttcggcacaagctaacatgggcacccctttcaccggcctaagtct

SEQ ID NO: 32043 - DNA, 264 bp, Gossypium hirsutum
  unsure (1)..(264): unsure at all n locations
  Clone ID: LIB3120-014-Q1-K1-B1
gtntaaaaatgtcaaatagagagactttatgcttgagatttgatcttttatttcttgaatattaaaaattggtagcaactcatatataaagactttatgcttgagaaacaaaccaatcaaaaataccaataagacttttagttcaatccaaatttccttagaaaattcaatgttaaaataagtttgactactagaagatctctgccattatgctgattattaaatacctttttatatgactattttaatggaataagctattgt

SEQ ID NO: 32044 - DNA, 292 bp, Gossypium hirsutum
  Clone ID: LIB3120-014-Q1-K1-B8
gatcgagtggtaattagcaactcaaatccctgtgagctgtggatattagtcttaaagagaagacattggcagctgctaagtcatacggcgccagtggcattttctacaccttaccgggtgcgaaacagatcgagatgtacaccaaacactgtgttacggagctaccaatggggatggcgaaaacttattacttattttcacacaatgctgttgagaagggagcaccaagtggatttatgttaccgatcatggatgtgcgagccaacataggagccaggttcatttatgcttt

SEQ ID NO: 32045 - DNA, 271 bp, Gossypium hirsutum
  unsure (1)..(271): unsure at all n locations
  Clone ID: LIB3120-014-Q1-K1-C1
accacgcgtccgccacgcgtncgctcaccatcaccgtttttctctaatcgtatggccactccatcgatcctcagaaactctgtatgccctccgctgcaccattcctttcttgccttccctaaagatttcatttccttcattttcctacttcattaaatcaaggcctcttacttcttccattatgagaggaagtgtcttaacaaaggaagtttttgaaaccaaagaggcagtcattgtggatgcatagaagaaaactttatttgtagcttga

SEQ ID NO: 32046 - DNA, 155 bp, Gossypium hirsutum
  Clone ID: LIB3120-014-Q1-K1-C10
attaagcagtcagcgcaaagtggtgttgtcttgactctgtgtgctaacagcacatggacagaggaagcagcttatctgacgatatgagaagctttaaacttgcattatatttagatgaaaaaaagatgaagctatacttcttacatgtttgttga

SEQ ID NO: 32047 - DNA, 318 bp, Gossypium hirsutum
  Clone ID: LIB3120-014-Q1-K1-C11
gtaatgccagctacaaaatgaattaaacaagaaaaacaggggggctgtagcacaagtccaacagaaagttatggtaacgcgacgtggcgcagacaatactacaaagcatttgagggctggagctattgccgtcatcgttttgacaacatttgttgattcggtagagagatgtaagcttgaaattatacatcgtggggaacaaaggaagatatttttgcttgttaagaaaaattgcttaacacaaagatttcttggattattgaaagggaacttaattaagtgttttttgcaccgctacattcaaagcctaaaattttt

SEQ ID NO: 32048 - DNA, 134 bp, Gossypium hirsutum
  Clone ID: LIB3120-014-Q1-K1-C8
ttttgcctgcagtatacaccaagattgggctgatcaatgctccccaatggtacgatgctgggagattctgatacttcgtatcctgctccaccctatttgtgatcgagtgcatattgttccactacgtggagatc

SEQ ID NO: 32049 - DNA, 238 bp, Gossypium hirsutum
  unsure (1)..(238): unsure at all n locations
  Clone ID: LIB3120-014-Q1-K1-E1
accacgcgtncgtccacgcgttcgtgaaacttcatttctctgccacaaaaagctcctccgccccaactcccctgggatcaacagcacaattcttaacccaaaaacataaaataatggcagccagggtagcaacaatgggttatgctcaattgcaaaattgcgctaagcatctagtcttaactatttatgggcaggcctacaaagtcaacccccaaagccccttctctctttttttcca

SEQ ID NO: 32050 - DNA, 147 bp, Gossypium hirsutum
  Clone ID: LIB3120-014-Q1-K1-E11
ccaattctgactatcacttgcatactatcaattggcagcttctgcagtaataacgactcgtgggcaatttatagcgttaagacccatagtttctactgctccagtttggatcctgtcagcacttcatccaatgatgcgcaaggagaa

SEQ ID NO: 32051 - DNA, 158 bp, Gossypium hirsutum
  Clone ID: LIB3120-014-Q1-K1-F12
gttaaacatctacattgacaccttgttcaaacaagaaactctctctaaatgacgggtttcttgagttcctattgccaaaacctattcacatcaaaataatctgaacttgtctatcatcgagattagcttgatctatgactttatgatataactatctg

SEQ ID NO: 32052 - DNA, 108 bp, Gossypium hirsutum
  Clone ID: LIB3120-014-Q1-K1-G10
gttcgtctggcgatcgagtatatcgacatttccggtggtgaaccaatggagctggtcccgagatgtgccgaaataattgcccgtcaacttgagcttgacaaaattcta

SEQ ID NO: 32053 - DNA, 366 bp, Gossypium hirsutum
  unsure (1)..(366): unsure at all n locations
  Clone ID: LIB3120-014-Q1-K1-G6
ccggngaccacgcgtccgattcctcgctctctcttttatcctcactttctcagccatcaaagacaccctttttttcttaaggtgaaaagatggcagatgggaggatattcagccacttgttgcgacaatggaactggaatggtgaaggccggattgccggtgacgatgctcgaagccgcgtccctacattgtggccggctcgtcacaccgggtgatggtggatggccaaaaagatgcatatgtggtgataggctaatctaaagaggatttgacattgaatacctatgagcacgattgtgaacaatggatgattggaaagattggcatatacatttacaacagcttctgttggcccgaagagcaccc

SEQ ID NO: 32054 - DNA, 300 bp, Gossypium hirsutum
  unsure (1)..(300): unsure at all n locations
  Clone ID: LIB3120-015-Q1-K1-A3
cgcgtccgnccacgcgtacgnccacgcgtacaaccacgcgtccggtcttctgtttatatcaacaggaggtgccttacctgctgttatatcaccactaccacctnctcttttttcgctcgtcgacgacctacattgtggccttcactcgtcgctagacttaactcttctacttctactacgactcttatacaaaacacgcctgcttttgctgcccctattcctttgctaacccccagagaagagatgggaaacatgtcctacgacgaagacattgaagctctctacaaacttctcaatgac

SEQ ID NO: 32055 - DNA, 307 bp, Gossypium hirsutum
  unsure (1)..(307): unsure at all n locations
  Clone ID: LIB3120-015-Q1-K1-A4
cccacgcgtacganaaaacttaaccacatttcaaaagtccatcctacaagtcttaattttgggagcaaccttgtataatacctctatcttcaccctaaactgtaccaataattgacacatagatagtcatcacggcactctccattacacctacgcctaactatcttacgaaatagctcatctaaaacgacactttgtactatgctgactttgctatgccatcctacaataaatacaagtcatgtcttttctatatgaatgagattgatgaattctacaatcattgcaaggactataatatgaatac

SEQ ID NO: 32056 - DNA, 338 bp, Gossypium hirsutum
  Clone ID: LIB3120-015-Q1-K1-A5
cggacgcgtgggcaaaaaaaaagaaaaggggaaccaacttgttcaagaaacaattaaaatggcggattcacagatttttaattgaagaatccaagtttatctcatcttgggttttcatttctttggtttccaggttcttcttcattattcctttcctcctttgagttgctttaattataataattgcatattttttccatttatgtatttttattcgactttttattttttgggtttgttttttcgtttattgctttctataattggtcttccttgttatgcttgagaatttggggtttttggcgtatgcttagcttgacttgaagggtatgtttgga

SEQ ID NO: 32057 - DNA, 203 bp, Gossypium hirsutum
  Clone ID: LIB3120-015-Q1-K1-B11
tcattaacgttgttcatgaaatatgggctttgcatggacgggcacccagggaaacctcaaacctgtcccagaaaagatgcacaaagctgacgaagaagtgtatgtttgaactatattggtgaaaaattttgtgaataggatatggttgatgaagggatgatatatagcatattattataagccatctatagatgtaattttgc

SEQ ID NO: 32058 - DNA, 205 bp, Gossypium hirsutum
  Clone ID: LIB3120-015-Q1-K1-B12
gtatggctttgcattaaatatgcatcattagatatagacgtttgtcgtacataaataatttattctttgcctttttttaatgcaaaaactggtgttatattagaattgatggttgtcacgacatcgttttgatttcgtttaacgcacagtcttcaatacggataacaaccattcagtaatccaaacatacaatttcaccacatac

SEQ ID NO: 32059 - DNA, 373 bp, Gossypium hirsutum
  unsure (1)..(373): unsure at all n locations
  Clone ID: LIB3120-015-Q1-K1-B3
acgcgtncggcgaaattgataccaaggacaaaactgatattgatgcttcttacagaactgttcaacgggctccagcagtgcttgttgagcatgatataaatgatatattgttgttttctcctgatgatgttggtcttaaggcaggcctaccattactgttttcaagcatgcgaactccaaaaaatcagcatcatataagccttggagctatatcaaatcatggtcttgcttctgaatgtttatctggaaatgcatgcataattgttagctctcctactctgaaaataaagaagagtgaagacccctccattgctgatactacagtacaatttttcaagtcatcaacaaccctaaaaaattccgttgataatac

SEQ ID NO: 32060 - DNA, 359 bp, Gossypium hirsutum
  Clone ID: LIB3120-015-Q1-K1-B4
gtttctggaaaaaagagccgcaaaaagtctggttctttaattatcttcagcattaaggaggacaacaccacagtggagttcttttggtcaccatttctggttgaatctaattcagacaatccatggcggcacagtataaaagaccgtataatcaagcctgaatcaatcaagaacaatggagatgattggaaaggcgtagattacttgattttcaacacatatatttggtggatgaacagtggatatatgaaagtcttacgaagatcgcttgatgcagaaccggtcgagtacgatgaaatcgaaaggcctatagcttatgggaaggtagtaaaaagaagggctaaatgggttgatgaaaa

SEQ ID NO: 32061 - DNA, 131 bp, Gossypium hirsutum
  Clone ID: LIB3120-015-Q1-K1-B6
ctcactcgtacgcttacccttaaatatattttaacagtatttacatcaattcttaacttggggactaaccttatattatacctctagatcctcctaaacattaacaataaccctcacatatatattttcca

SEQ ID NO: 32062 - DNA, 259 bp, Gossypium hirsutum
  Clone ID: LIB3120-015-Q1-K1-B8
cggacgcgtgggcggacgcgtgggctctagttcaaattttggaaaacaacgaaatctagggttagtacaattccatcatagtttaagaacattgggaaatggaataaagaggtgtggatttaggagtatcagtttttgtagtactgatagaacgaacctaacaaaaagatcatgtctcttgagctgcaaatgccaaagggctgatagggttagtggattaaccgcagatgatggaagacccgcatcactttctataaat

SEQ ID NO: 32063 - DNA, 255 bp, Gossypium hirsutum
  Clone ID: LIB3120-015-Q1-K1-C2
tcggccgattactaccttatcatctggcccaatatcaacaacggagtctattgagccacctatgcgggaagttgaggctgacgtcggcataaagagattcgatcgttgctcacaggggtatacagggatgcctgtatgtgatttggataagagggtgccacatggcaagaaagtcttaggacttgatctagtggtgcggcgggataagaacgagaattgaatggaagggtttgatgatacttgatctcatagatt

SEQ ID NO: 32064 - DNA, 280 bp, Gossypium hirsutum
  Clone ID: LIB3120-015-Q1-K1-D10
cccacgcgtaccaaacatacactactattactcactactagcaatggcttcctcaatgagcgtatcagcggccattgtcactgcctttaacgctcacgctaaacatggaacggtcctttcaccggtctcaagtatgcctctgatttcccagccaccacgaaagccaacaacaacattacttttttcgcaagcaatgtcggtagattactatgcatgcaggtgtggtctcctactgataagaaaaaggttgagactctctcatacctacccgatcttacac

SEQ ID NO: 32065 - DNA, 312 bp, Gossypium hirsutum
  Clone ID: LIB3120-015-Q1-K1-D3
gcacgaatcgccttttttcgcttccatgattccttcagcttggggtgcgtcaaggcgtaccttgcctcacttatctcaactttggagattgttttcgccagccttggctctgccatttcttacaacacgttgacaactgatgcagacctagatcccgacgggctagtcaccattgctgtttgccacagattttctctctttgttgcacttgatataggtgccaacatatcatgtggccatgtctaccctgcactaactatttgagtagctcttggtggcaaataaccatactcactggcattttttactgga

SEQ ID NO: 32066 - DNA, 264 bp, Gossypium hirsutum
  Clone ID: LIB3120-015-Q1-K1-E2
cccacgcgtccgttgatagacagattatgtaagccaaaacgatgaaagcatatccctcactggggaaaatcgcgcctgcgctctacaatccaatgcatccctatagagctatatatatgcacattatcaccaaccgcaccttattactcataatcgatgacaaagagttgaacgtcctgaatggttctcatagcggtagaattctgactggaactgacggacatgatgtgaccataacaacatataatccctttaaaccgattg

SEQ ID NO: 32067 - DNA, 406 bp, Gossypium hirsutum
  unsure (1)..(406): unsure at all n locations
  Clone ID: LIB3120-015-Q1-K1-E4
cccacgcgtncgatcccttcccaactccatatttggtgtaaaccatccttgcacagcacaggcctctgcaagagcatcacttcaaaacaacaaactccatctttcaggctaatggaattcaaatacagagctgttgatgaacggccgccgaaggatttccctccaccctcctcaactttcaatcctttaccgcctcaaggatttctaccccaccctgtcaacctggaattggggaaggtccaactccgagaagcgatcatcgcctcggatatcgctcgtcggagagccttataagctcaagtcagaagggagctagaaacgggcttacctttagaccaaaggctcacattgcacctncactctcactctaccattcctttcatgcatcaccttaataactataatc

SEQ ID NO: 32068 - DNA, 347 bp, Gossypium hirsutum
  Clone ID: LIB3120-015-Q1-K1-E9
ctctctcatttaactcttattatattgttgtagtgatattagtagccttttttctgttgcggtgtacattttgttactgatttttgcagccaccgcctgaaaaaggaacagcaatggcgtacgacaggctacgaccatctgaacccggcagctctggagttactcagcaacaaaatcatgaagaacccaaagccaaaaacaacaagagaaagatcgttattctttcggttattgcattgacgatgatcgttgcctcggctgtttgtgccggactcgtgattggtctccgtgaagccggtgctgatcccgtcggtacccaagttcgacgtaagccgacacaagctatt

SEQ ID NO: 32069 - DNA, 355 bp, Gossypium hirsutum
  Clone ID: LIB3120-015-Q1-K1-F11
tcgctttgtgatgctgacgttgctctcatcattttctcggcaactgggaaactatttgaattcgctagctggcagtatgaaagatattttgggaagatataatttgcactccaacaatatcaacaaattggaccaaccttctcttgatctccagctggagaacaataacaacatacgattgaacaaggaaatagttgataagacccgccaattaaggcagatgagaggggaagatcttcaaggactgaacgttgaggaattgcagcaactagaggggatgcttgaatctggacttaaatgcgttttggaaaccaagagcaatcggattatgaacgacatctcttcacttgaaaat

SEQ ID NO: 32070 - DNA, 432 bp, Gossypium hirsutum
  unsure (1)..(432): unsure at all n locations
  Clone ID: LIB3120-015-Q1-K1-F12
cgcgtgcgattcagattanggtttttccgcagcacttctatttgatgattaattagggttttagagcgggtgcttagggttttgagattggagaggggagcccaatgctgaatttggggattggttgtgttgtttgtccccattgtggagctcatgatgacacccaaatagggttggatcgattgtgcttccgggcattaacccttattgccattggtgtctaagaattactagtttctttgctgctatgcggcatagcttagcatcaaacactacattacgctggttcttaaggacgtgggttgatctggctctctctttagctgctttcgttgtccatcgggattactgctgtgtgaaagataaccggcttcgtctcctctctgttagacctctgttttggaaaaaaaaattaagtgcattcttagcgat

SEQ ID NO: 32071 - DNA, 327 bp, Gossypium hirsutum
  unsure (1)..(327): unsure at all n locations
  Clone ID: LIB3120-015-Q1-K1-F2
cccacgcgtncggagacacttatcttgcgtggtctcttaaacggagtaaagcagtgaacaggcgtaaaacaggggtgggggtgatcggaaaggggcacatgaatggtgttatatatgcgttagtgtcggaccaagggaacctacggttcatagaccttgcaaggaagactccatctgaagctgaatctaatggctgggttcaacgtcttctcaaaagcttggctagagacactttgattggcatcctattatgggcattatatgaacagattaaatcagctggtatattattatagtataatgtgattaaagaaatcatttgtgaat

SEQ ID NO: 32072 - DNA, 287 bp, Gossypium hirsutum
  Clone ID: LIB3120-015-Q1-K1-F6
cccacgcgtccgatctgatccaaaaatggcttcctttgcttctcaaacgttcctcatcaggttcaccctcttctcacctttcttcattacaatcaatggagaattctcgattcaatccattgtaacatccacaaaacgcatggagaaaatgacccatctccatttctatttccatgacactataagtggcaaacacccaacagccatgcaaatcatcaagccacataacacgtcagcacgtgcgttatttggtatcactttcatggcagatgatccattgactgaaa

SEQ ID NO: 32073 - DNA, 306 bp, Gossypium hirsutum
  Clone ID: LIB3120-015-Q1-K1-G4
agcgagcattcaataatatacagtgtctatgccccattcccaatgcttcatgtaaatatgggatgccttaggtgttatgtcccgctcacaaagaataattgctcaacttgaacatcttcttgtcgaactaacaatactcaaaaacaagaaatttgcgaccactataacccatcaaatctgcaaaccctggaatgtgaatcacttcccatggtccaaaaaggatataaaaattccccaaaaaaaaatttggcgttcctttttaattcccgaaaaataagaaatttcatccgaattttgttccttaaa

SEQ ID NO: 32074 - DNA, 243 bp, Gossypium hirsutum
  Clone ID: LIB3120-015-Q1-K1-G5
ggcgggatcaaatctgtgtgttagagacaatggacatgttttgttgggggcggagctgcggacattaatgctgaccttgtcgatgatgaaataaaacacggacctcgatgatggacatgggacactaccacaccaagaatgctctactttgcttatgcctgctttggcgattgcgtatgtgaggcgactcgcggtgcatttattagtatcatgaatgtaagcagagaggattgggtacttaga

SEQ ID NO: 32075 - DNA, 186 bp, Gossypium hirsutum
  Clone ID: LIB3120-015-Q1-K1-G6
cccacgcgtccggcgagttatccgcatgtccaggggacactttctggacttctgaacgccatcgacggcctattgtcgtgctgcggagacgagaggatcattgttttcaccaccaactacaaggataaaattgatcctgcgctgttgcgagccggtcgcatggacaagcacatatgcttgtcttac

SEQ ID NO: 32076 - DNA, 136 bp, Gossypium hirsutum
  Clone ID: LIB3120-016-Q1-K1-B1
gacacacttacaatatctactgctcgtaccactgagtcctctgtcacctcagcggcggtgggggcgaatctaagcttccctatctgtttatcttacacacttcacgcaaacgttatcgttgaccacttagctccat

SEQ ID NO: 32077 - DNA, 182 bp, Gossypium hirsutum
  Clone ID: LIB3120-016-Q1-K1-B10
cttaaaacaacattagtacccgcctatgtctgtatctcacatttctactatcccacttctggaccgatgattcaatatctacatattcattcactacctatttaaacaaaactaattacatgcatacccactattttaaacattcatttctaaacacaaaaccacactacttaactcttatt

SEQ ID NO: 32078 - DNA, 251 bp, Gossypium hirsutum
  Clone ID: LIB3120-016-Q1-K1-B11
cctcgacttattctaatcctttcttgtaatttatataagaagaaacatggcttgttcaactcggtgaaccctttttatacgtgggtccacttactctaaagctacgcactcttgccatctcaaagtcccgttcatgcaatggcctctgcgaacgataactaacactaagctgactcaccgaagcatcgtgctgctggccacggacacacacctgataatggtgaaactgaggaccctaatgttcaacttaa

SEQ ID NO: 32079 - DNA, 188 bp, Gossypium hirsutum
  Clone ID: LIB3120-016-Q1-K1-B5
cccacgcgtccgggaaattcttgttttttaggaatattggtaacaatatccctgtgtcttgagttgtttggtgttggtgttcatggtcttggtgtgaattggggtaccatggcatacataaactttccccaaaaaccaggggttaaaatgttaaagaacattggattaaaaaaggttaacctttttga

SEQ ID NO: 32080 - DNA, 140 bp, Gossypium hirsutum
  Clone ID: LIB3120-016-Q1-K1-C3
gccacgcgtccgaaatgttatgcttgctttagagaggcatctttttttggtgtatgcattaggaaggtcattgtaccctttacctcttcattgaactcaggaacttaggaataagggagttgctatcggaatgttcgagc

SEQ ID NO: 32081 - DNA, 160 bp, Gossypium hirsutum
  Clone ID: LIB3120-016-Q1-K1-D1
gaaagatctgatgatcttttagaacaaaatattgaatcacttggacacaaccaacctatagagcagtgttttgtttacactcccaaaacccattttcaaataggcttttatggactcctttaccctcacttattattaattcctaatttttttcaacaaa

SEQ ID NO: 32082 - DNA, 185 bp, Gossypium hirsutum
  Clone ID: LIB3120-016-Q1-K1-D11
cccacgcgttcgagaggcatggctatttcagactacatttaccatattacccctatcacatggggttatttactcctactcctactactatgctacaccataaccaccaccaccaccaccaccacctatgctataaacataacctacatgctctccttcttccaaaaccataccttcttatcctc

SEQ ID NO: 32083 - DNA, 238 bp, Gossypium hirsutum
  unsure (1)..(238): unsure at all n locations
  Clone ID: LIB3120-016-Q1-K1-D3
ttgaccggtggacccacgcgtaattanaggatgatattagtgcacctgtatatactctttcctacccacgaactacaatgtacgctgggggaccatgtggaagctgcctatgttctggtgcaccgactcagctcacgttttgaaggagcttgaggaatgcaagaaggaataccccaatgcattcattaaaatcattggcttcgacaacgggcctcaacgtcagtgcattagtttcatt

SEQ ID NO: 32084 - DNA, 339 bp, Gossypium hirsutum
  Clone ID: LIB3120-016-Q1-K1-E10
atttttatatatattattcatagcccctagaaattatataaattgcctttgcctctttgagtaggaaactactaattgccctgattctttattattaacaatttctactttttgagtattgattttctctctttttctttaaaccatctgccaaattttattttcccgaccagggcctaaaagaaatggacaaacgtgaccggaagcaagcgaagactggtagttgctgttctgaaggtatgttatgtcctgaattcctttttgtttcctctttggttgctttggaattttcgtcttgtttttccaacttccatttttggactttctggtttgggttta

SEQ ID NO: 32085 - DNA, 502 bp, Gossypium hirsutum
  unsure (1)..(502): unsure at all n locations
  Clone ID: LIB3120-016-Q1-K1-E5
cgnntccgcccacgccgnntccggctgacgttcnaatatcaacgtnntaatcttcgttctttggctgcgatctggtatcagagcgatggctnnntttaataagactgaccnnngacggcggtgccaacaaccatccggctttggtactcgttgcacgcactcttctagcattcacggattgtgcgcccttttcgtcgcttgtatccccgtcggcgcctaaccatctccggtggccgactgtcaatcccgcccgttaccattcggtgcctttcnngttggcgggaaccattacatcttttaccgtggtatccctttattaggattggctcgaactccttggctcaacccgtcgctttgcgctgttacttaaaggttcgacaactagtgggcctggggagtaccaaggctttcgggactaatcatccggcggggggagcattataacgcgttccttttcgaaatcgtgatgactttcggactggtctacaccgtctacgccaca

SEQ ID NO: 32086 - DNA, 387 bp, Gossypium hirsutum
  Clone ID: LIB3120-016-Q1-K1-E9
ccgagcgacccacaccgtacacccacacgttcacccacacgttctctctttctttctatatttagctataacatacactgctgattcccactactatcaatgactccctcaatcatctcatctgctaccattaccactgcctctccatcacacactaacatttttgctcctttcatccatctcaaatcttccttttctttttcactcaccatgaatgccttcaaccacattacttctttcttaaactatatccgtttatttcaatgcatgcccttatttccctctacttttaagaaaaattttgatactctctcataccttccccatcttacacccatacacttttctatatatatatatacctttttttcttcaaaatttatttct

SEQ ID NO: 32087 - DNA, 232 bp, Gossypium hirsutum
  Clone ID: LIB3120-016-Q1-K1-G10
tccgtgaataaacataacgagcattcgatcatatgagatgaaagatggtcccttcaacaagcatgtgtgataagaggtgagagaagaatgcttagacaacgaagatgaatacttcatatgaagctttagatgagagccttttaatatgaccctttgggatgctttatcctcgtcttcctccatattctttctccttcaacattggagcttttggctgaagtggccgtactcg

SEQ ID NO: 32088 - DNA, 196 bp, Gossypium hirsutum
  Clone ID: LIB3120-016-Q1-K1-G12
atttaacacacatcaatggccgccaacacacttttgttctgtggcataaccaccacatttgggtgggttctttgctcatcaaagtccaagttcagtggcgccgccgcatcattgcctattgctgttggtaccaatgttggccaccgcgttagcatgtcatatgtctggatgcctggtcaacctagaccaccttacc

SEQ ID NO: 32089 - DNA, 409 bp, Gossypium hirsutum
  Clone ID: LIB3120-016-Q1-K1-H9
gcgcccacgcgtacgcccacgcgttcggcgtgtctctttcttcacctttcctctctcaattaagctctgttctctaatcctcgccttcaagctctgacattctttcattcctttgcccttttccccaacttttgtttttcttgctacataaaaggctttggcacatgtattccatgccttttgtacaaagcctacccctatcctccctactgctgcagctgcatttccttatcccatgactacctctattggcatgcccaccacagcgttgactttagtattgcaagcaaaaagaaaaacaaacgttatgttcacacaatggtttgctgcaaaaaaagagcttattgaagacgattatggacgagatgatgttaaaatggaaaaaatggaggagtctagggaaacatta

SEQ ID NO: 32090 - DNA, 433 bp, Gossypium hirsutum
  Clone ID: LIB3120-017-Q1-K1-A3
ccggtgcggaattacggcggtccgtggaaacttgttcaaaattatgtgcctacttttcaaaacttacattataggagattgtcttgtgataactggtgtccgcattgtggccaggggtgtgaatcttctactcatgctgttcgggattgattgtttgatgcacaagcttggtccaagttagacgtccagcggccgaggtcaatgataaattctaatgagtggctgagttggctgttagagaattctgataagaacaggaaagggtaattgttgctactatctgggtgatctggttctctcgaaataaatttatacatgaaagaaacgtgcaaagcttggaggaaattgttaccttcattaagagttttgggttggaatatcgtagcaatgctaagaatttgaagcatccccaactgacatccatggtaaaatg

SEQ ID NO: 32091 - DNA, 228 bp, Gossypium hirsutum
  unsure (1)..(228): unsure at all n locations
  Clone ID: LIB3120-017-Q1-K1-B10
cccacgcgtncggagacattttaatttctcataagctaatcagactatgtcggagctcgagagcatgacatcattgggacgtacaaagcaaacagctaggaagtggaccggtggtaaagctccaaggaagcaattaggcacgaatgccgcccgcatgaatgctcctgtgatcggcggagtgataaaaactcacacgattcacgtcacgaaccttgcatttgagagaga

SEQ ID NO: 32092 - DNA, 392 bp, Gossypium hirsutum
  unsure (1)..(392): unsure at all n locations
  Clone ID: LIB3120-017-Q1-K1-B11
ggaaggttcaaggccactgatgcaagccgacttcgtgctgaatacaaccgacttgtagagggcttggcattgagaggaaacctacctatcactgacaactggctttcaaatcctgcactgcctgatgatattctaaaggaagctgtgcctggaaatatccgtcgagctgagcactttttgcatgtcctacgtagattagttcagtatctaaggggccgactagacaccgagaatgttgagaaagaaagcccagttagctttgttgcatctatcaatagtcatgccggaattgaccagaaaacattgaagntctgntatgaccgtctgcattcactcatgttgactctagaaattactgacacagatgaggtcttacacatncaaacaatatg

SEQ ID NO: 32093 - DNA, 436 bp, Gossypium hirsutum
  Clone ID: LIB3120-017-Q1-K1-B4
cccacgcgtccggtcagcaattaataaccaggttgttcccaaaaaccagttttctggttttggtccccaacggatccaaggagcgcagcatacgggaatgcatccacagcaaatgccagctaaccagatggcttccatgcatcctcaacaaatgtacgggaaccaaatgggagcatatggctatggagagttgcagcatatacatcagaaaatggatgggctatccatcagagatgataatagcctgagaaactcttactaccaggttcccactgtatcttatgttccacctgggaaggcttcgaaagcagaggataagctgcttggggaccttcttgacatggcaagaattaaatcaataaacaccaccccaaaaacctgggtagcttgtggaacctggggttggttttttttttttcctttaagcttttaattt

SEQ ID NO: 32094 - DNA, 269 bp, Gossypium hirsutum
  unsure (1)..(269): unsure at all n locations
  Clone ID: LIB3120-017-Q1-K1-C10
cacactcttacacccacacgtgctatctaattatctatggctctatactcaacggtctaaagccttcattagaagagcttatgcaactgtcggtgntctctgtctattgctcagcacgaaacactaacagacagatcaacgagcaccaacgccttggcatgaccaccacagagacgagacgactctgcgtctctgcctaagcctatcctaacctttagactgtcaaccaacagtgataagactgaaatgtatgattcaaaaactggcgc

SEQ ID NO: 32095 - DNA, 265 bp, Gossypium hirsutum
  unsure (1)..(265): unsure at all n locations
  Clone ID: LIB3120-017-Q1-K1-D11
natatatattactaacaattgagcaaaaatctgttattttctctctcaacaggcaatggaggcgttctttgaatcttcatcgacaaccaactggacataccatacactaaagaattttcgttacacttcttccgtcaatcaatctcatctcaaaagggcacatacgaccttatgttgagccctgggtgcctatgcttttggagcttatcttcatatcttatggaacattggggggtacctcacatcattggcatgcttccgaacc

SEQ ID NO: 32096 - DNA, 336 bp, Gossypium hirsutum
  unsure (1)..(336): unsure at all n locations
  Clone ID: LIB3120-017-Q1-K1-D12
cccacgcgtncggcggctcaggctcagcttaatggaacagtgcattgtgattaccctcggtggattgaggtcctctgccatgatatcaatgtccacattccacatcatgtatcttcaaggataccaagttataatctacgagcagcacataagtctattcaagagaactggggaccgtatctgaacgaggctacatggaattggcgtctgatgaagacgataatgacagtgtgccatgtttacgacagggagcaaaattacatcggctttgatgaacttgcacctaatgaagcttctccaatcacattcctgaaaagagtaatgcctgattatgct

SEQ ID NO: 32097 - DNA, 215 bp, Gossypium hirsutum
  Clone ID: LIB3120-017-Q1-K1-D3
gtaaggtgtagcaatccatttttagtgaactcagaatcggacgtactggaccacagattcgaggtacaaaggcgtattttactattagtatcaattcctatggaatactagtaagtgcatataataatgtcaataagaaattttatcggttgcatgcttaatttagtaaacaggactaaatagtaaagagtgcgaaagttgagttctataagtta

SEQ ID NO: 32098 - DNA, 358 bp, Gossypium hirsutum
  Clone ID: LIB3120-017-Q1-K1-D4
cttcgtttcaatcgctgcgtttacatttcaatttattatcctctttctttccttgtattctagtttaataagaaaatccaaattcaacaacaaaagcaaaactcaaatttgttgagcaaaaaaaaaacagatatcattttgtttgctcttttcctatttttggacttttctgtgtattcacagcttgagaagaaagaattggggcatctctctctctttagttagattttattaatggagaaagaagagaagaagaagaagatggaggtagattcagctccagcagcagctttggaagggttttcaccagtctctacaactaggatcttctgaattccaggaaaagatctgaatgttt

SEQ ID NO: 32099 - DNA, 238 bp, Gossypium hirsutum
  Clone ID: LIB3120-017-Q1-K1-D8
ctaacatataactttcctgtgccgaaaaatttttacactccaaacacatgacacaaccgaggtaaactatgacatttccaacactacattcttcaccttccacttcatacatccatctctcttccactgctttaattaaaacccatgcctaccgactacacaacccacagttgaggaacatatgattaatccaatcatttgcaaggcatggagaatggaacaggagccgttgcttcaa

SEQ ID NO: 32100 - DNA, 152 bp, Gossypium hirsutum
  unsure (1)..(152): unsure at all n locations
  Clone ID: LIB3120-017-Q1-K1-E11
gaaaaccaatcctttgtaagaagagcacttccaagtttctccttngaaagcagggtataatgctacttggatacaacttatccaatggaaaggaaagtatagaactcgtatccatcatcactgaccttatatctcttagaactagaaggaat

SEQ ID NO: 32101 - DNA, 323 bp, Gossypium hirsutum
  unsure (1)..(323): unsure at all n locations
  Clone ID: LIB3120-017-Q1-K1-E4
gttctttttcatcgttatttcaattcagcttccctcttcttctctatcaagtattattcacgtctttctatgtataaaactgcgttagcttttgagtttgtcgaaattgtggggtgctgggaattttgctttcttcttggatgaacagagatggctgtggaattgatgatggggtacgatggtggtaatagctttgtnaggaaaatagatgaaactgccttgcatgaagcttaaactgctgggattcaaggtgctgaagaattgattaggatgatgtgcaatagtcaacagctttaccatcaagatgcctcttctaaaacttc

SEQ ID NO: 32102 - DNA, 290 bp, Gossypium hirsutum
  Clone ID: LIB3120-017-Q1-K1-F7
cccacgcgtccgcccacgcgttcgtttacttgttctagttttgataaggtatactgtatttgcgttgccaagttaataggaatatgaaccagaataagttggtcgattattctgttaccataatttcgtatgttgaactctttgaggctatatataatgcaggaatgaactagaataaattgattgatcagtctgccaagcgtttaaattaccaaataaaagaaaaaaaaaaaaaaaaaaaaaaaaaaataaaacaatattaaaatacaatgtttttttgaagatacaag

SEQ ID NO: 32103 - DNA, 373 bp, Gossypium hirsutum
  Clone ID: LIB3120-017-Q1-K1-H7
atcggtttaaggtttcgctacaaaacaggaatcgtttcatctccgattcaattactttccgtgtacgtaacgtcctcgttttgaggaaccacgagagattcaatctgtatggaggaggtagattaaggttcaaagaaagcaaaattttggctaattgtacagataacaacgattcgaacgatagttccagtgacaaaaatgaaagcgaaggcgggcaaggagtgaagcagaaacaaaacacgacaaattctggcagttctaccaatcagagacgagaaaagagcgggaaaagcgagctttggtggtccaaaggaaagaaatggcagtggcaaccgataattcaagctcaagaaattggcgttttgcttttaca

SEQ ID NO: 32104 - DNA, 432 bp, Gossypium hirsutum
  Clone ID: LIB3120-018-Q1-K1-A10
cccacgcgtccgcccacgcgtccgcttacaaaagtggttgtgaaagactctttgatcctaaaggtaaaaacccttgctccatccctttcccttggtacttatgaactgccccatatgaaactactttttaactttgccttacagggcccttgcccaaactgtggtactgagaacgtctccttctttggcaccatactatcaatttccagtggtggaaccaccaacacccttaaatgttcaaagtaagtccaccattaaccataatctttgtcttttcacccttcacattgctgcaaaatttttaagttcccaactcttcttttcacttcagttgtgaaaccacgttggagtataatgcgaaaacgaggttgattacattgccagaaggaagccaagcttaattgcaggagaaagtacatccagagatcaaca

SEQ ID NO: 32105 - DNA, 162 bp, Gossypium hirsutum
  Clone ID: LIB3120-018-Q1-K1-A4
gaaaaactgcttatttgcattgggtttcgagaagatttaattttaagtcctctaaacactggggcccaaatgagaaaaccccaggggtctcctaccaacagtttttgacaatcaaagctttctttgccaatgccatagccaagaactcaaaaataacattcc

SEQ ID NO: 32106 - DNA, 337 bp, Gossypium hirsutum
  Clone ID: LIB3120-018-Q1-K1-A6
ccctttttcttttttctcctccaataatgatcattcttccaatcatatacgaataaataattattcttttattatttaattgctatatatactacttagaattctatactttctagtttgtagtgccgttatcgaatttgcttcgaagcttgtacattttcgtacaaaagagattggattttttactgttggttgatgtttcttgacccttataggccttagctcagccttttctgatatcaattcaacccccaaatttattttgcttttctgggaacaggttttaagagcttgcaaaagtgaagtaaagatattagagaaatgagtcaacctaaaa

SEQ ID NO: 32107 - DNA, 178 bp, Gossypium hirsutum
  Clone ID: LIB3120-018-Q1-K1-B7
gtcgaacaaagatgtcacaaaggctctccctagagcgggacagataaagaacgcaaagaggcgatatgacgggaacaccttggactactgggagaaaaacaacacactgaacagatcaggatggcacgaaagctggagcacgctaggtgattgatccgaaagattaagaagaagaaac

SEQ ID NO: 32108 - DNA, 436 bp, Gossypium hirsutum
  Clone ID: LIB3120-018-Q1-K1-B9
ctcaagcttgctttccaagttatctgatatcttccttttcttcccttttgaagcataggtgcaccaaaaacaacaatggctatccgcctgcctcgtatggttagttctaagaaggttcccaagggatactttgcagtttatgttggagaaagccagaagaggttcgtgataccggtatcattcttgaaccatccttcatttcaagatttgctagggaagtcagaagaagagtttggatatagtcatcctaccgggggtctcacaattccatgcaacgaagacacctttctcgaagttacctctcgcatgtattgatcgtgagatgattaacacaaaccagtcaatacaattttgtaaagcaaagatcactaatacatgtaaacacttttttctccatccattgtcttggggagctgatatataagtcaccccaagt

SEQ ID NO: 32109 - DNA, 365 bp, Gossypium hirsutum
  Clone ID: LIB3120-018-Q1-K1-C10
cccacgcgtccggtatatttgtgcattgttggagtgtgggtttcttcctctctgtaaggggtgcttgagagaaagaggaagggtaaaaaactcggggttttatgagttttttgagtgatgaaggggagaaagacatagcttcatttaagtgggtttctcttgctaaaagcttttaagcgctgttttgttgttgggggttgggagctaaatggacactaaaggaagactcgttgctggttctcacaaccggaatgagtttgttctcatcaatgccgatgaggttgcaagaatgacatcttgtaaaaaattaaatgggcaaatttgccaaatccggggggatgaaatagagatatcctgtgatgggg

SEQ ID NO: 32110 - DNA, 283 bp, Gossypium hirsutum
  Clone ID: LIB3120-018-Q1-K1-D10
ggaaaagtacacaattcatgtgaactattgcttgatatattttccaatggaactgcgggagtgggtgtctataatatctacttccaatgcttatgtcaagagaataaatcaccagaagcattgtctcacttgaagcgcacgatgaaagtttgctttaagccaaacaatgtgtcgtataatactatcttgagtgatttttgtaaagaaaaaaatattaatgaggccatggagctttcggaccatttttagtatgatgtgaactaaccttatgccgtcactttca

SEQ ID NO: 32111 - DNA, 402 bp, Gossypium hirsutum
  Clone ID: LIB3120-018-Q1-K1-D12
aagaaaacccataaatgaatcttcagattcaaagcataatgaagaagaagaagacgaagatgatgatgatgttgatgcggatggtgatgatgatgttaatggcaaaaacaagaaaaccccatcaaagatcaagaagaaacgtggtgagaaaccaccaaaacaacccaagtggtcatgtatggacacttgctgttggttcattggttgtatatgtataatctggtggctcctcttgttcctttacaatgcaatgccggcttcattcccttaatatgtaacggaagcaataacgggttctttaaccgaaccggcttgtggtaaactcaaaaaagaaagggtggaaactaaacaccccatggtggttgggccttggattgtcacttgtggacttgaactattgga

SEQ ID NO: 32112 - DNA, 308 bp, Gossypium hirsutum
  unsure (1)..(308): unsure at all n locations
  Clone ID: LIB3120-018-Q1-K1-E2
gcgtccgcccacgcgtccgatttttttttaaatgggaaaatccacttcctgtttcaaactcatcacttgcggcagcgattccgctgaaaaagacgacgccattgatgcccctgagaataagagatcaagtgacaaaaagggatggagttttcggaagagatctgaacggcatcgagtgcttagcaactctgtgatacaagtaactaccactacaggacttaaggaaagtcaagactctgttggctttgagtttcaacagcaagatgtctcggttgcttctgagaaaacctncactgttcagtacactg

SEQ ID NO: 32113 - DNA, 186 bp, Gossypium hirsutum
  unsure (1)..(186): unsure at all n locations
  Clone ID: LIB3120-018-Q1-K1-E7
gagagccnnagcannaacacnagcaccagcagcaaccagggcacgcgccccaggaaccggggaccaccacgcacacaccaccaaaggccgaacagcaacaaaaccgccgacgccgcgccaggnaagaaacaggaagccgaaccaacacgcggcgcgcaaggcacacaagcaggaagaagacggaag

SEQ ID NO: 32114 - DNA, 435 bp, Gossypium hirsutum
  Clone ID: LIB3120-018-Q1-K1-F10
ctttcccattattttcttcaaccatgggagcctctaatagcaagaaaaagaggaagccattgcatgggaggaggaatgtgaaggtattgatgacagacaaaatgaggcttctccaagagggaagagtgggaagatattatgagaaagaagtgatggttaatgcatgcaaagaggctgagtggcttaaagagaggaagaagttaaaggaggaagtgaaggtgttgaggaagttagtggatgagaaagaagagaagataaagaaaatggaagaaggtggttcatcaatggtgatggttcagaaatgtgacaaagggtggccattgcttgggacaaggtacttattggagcaaatgaaagatgaaagggcaaggagggatgaagttgtggagaaatggaaacaactctatcttgccatcaagactgagcttgatgatc

SEQ ID NO: 32115 - DNA, 271 bp, Gossypium hirsutum
  Clone ID: LIB3120-018-Q1-K1-F12
cccacgcgtccgaaggaaagtaaagtttctagcagagggtaattacggaattcgtaaggttagaggagctgtccctcatgatctagggacacatgatccttggaatgaaatgaatgcatataatatacatgatacaagcaaatggaaggatctgaattccaagtttgtgcttcaagtgtacagagattttgctgccacaggagatatggcatttggtattgaagtttgccctgctgtacgcactgcaatggaatacatggaacatattgat

SEQ ID NO: 32116 - DNA, 179 bp, Gossypium hirsutum
  Clone ID: LIB3120-018-Q1-K1-F8
cgagagccgaacatcgacgccggaaacgctttctcgacaacgcacgcgcctcggacacgggagggtcatatggataactgttactggtcacccaccactgcaaatgggcacgagtgctgcgcagaggttgtaacgaccgccagcgttgcacctgatgaccacgaacatgttgactacac

SEQ ID NO: 32117 - DNA, 250 bp, Gossypium hirsutum
  Clone ID: LIB3120-018-Q1-K1-G8
aaggtaagaaaaccgcggggctaaaaggctaacccgggaccaatcccccgacccggcgggggcaatggggccaatccatgtcaattccaccatcatgtcgctcgacggtcggcagccgttaaaaaccgaacctgagattaaagacgacggtaagttgcatgttacggttcgaaaatctaatgcttcgaggtctgatattttttcgagaaggccacaaggtttgtcttcaactaccccccggccatcgaat

SEQ ID NO: 32118 - DNA, 421 bp, Gossypium hirsutum
  Clone ID: LIB3120-018-Q1-K2-A3
cacgcgtgcgtgttgacctaatcaattttccctatatgcttctatacattttacttcacatccaccttcagtacctttacgacattgtttactctttctctatccctccccatccttttgatactggcgtacttaaccctcgtatgttttttacctttctcccctctactctgcccacttactttacttccttttacatgcaccatgaatccctctttcatgctctccccgcttacaatacatgattcatcgctaacaacgttgctcgtaacgatctcaaggatgcatacgctacttcaaactcttaatgatgatcctgctaatgaagctgccagccttacctctcatgtcatcatcatcaaccacccttcgcacattgtatacttatattcaccagcccttgattgccatacctcccaca

SEQ ID NO: 32119 - DNA, 316 bp, Gossypium hirsutum
  Clone ID: LIB3120-018-Q1-K2-A6
acctttttctttttatttctacaataacgatcattcttccaatcatatgggaataaataggtatccttttattatttaatcgccatatatactacttacaatactattcttactaatttgcatggcctctataagaatcctcttcgtagcttgtacactttcacacaatagagatcgcatttcctactgttgcatgatgtttcttgacccttatatgccatagctcagccctttctgatataaattcaaccaacatatttactttgctactctggaaacaggttataaaaccttgcaaaagggctgtgaagatata

SEQ ID NO: 32120 - DNA, 252 bp, Gossypium hirsutum
  Clone ID: LIB3120-018-Q1-K2-A8
cgcgtccgaagagacctccattgacgtagtaaacagatttcctaccgtcacagcactggctttcatgggcttcttagtggggcacgcagctatgctatctcaggcactggatcatatgagcttactgccaagctcgcttcaacacaattagctgcttccccacttatgagcagaggtcacaagcatcctgtgatcagaaaacagcaagcttaattttctgattgcgaaggatcaccagccatcgaaggaaga

SEQ ID NO: 32121 - DNA, 280 bp, Gossypium hirsutum
  unsure (1)..(280): unsure at all n locations
  Clone ID: LIB3120-018-Q1-K2-B6
gcgtgcggccagtcttaccataacatttcttgaaacttacaatctctcacttnttgagaaactaaagttcgatttcgatggcatttcctgctattaaacccaccaaccctgacttggaggaataccatgaacaccctcacaaaatctggatctctctctcctccaataatgtgaaaaacctcttgaaaacatgtgctgacttacctcgtaacgccaaggataatagacttaagctttatgtaccactgagaatgcccaccattggtctttacatcaacac

SEQ ID NO: 32122 - DNA, 169 bp, Gossypium hirsutum
  Clone ID: LIB3120-018-Q1-K2-B7
tcgaacaaagattcacaatctctctcctttgacctacagataaaggacgcaatagggtaatgacgggactccttggatactggacaataaaatcacactgaacctatcatgatgtcacgaaggctggagcacgctagttgattgatccgaaagattaagaataataaac

SEQ ID NO: 32123 - DNA, 301 bp, Gossypium hirsutum
  Clone ID: LIB3120-018-Q1-K2-E1
gaaaacgtgctaaaaccaaaaaactaacttataaacggcgtgtgcagctcagcaatccacaggcattagaggaactacactattcttatgtcggctttatgcgaaaccaaatccaacccacacagttggccctcttgcttgttctatatcttcagacctcactgtcttaaatgcacacaccaaacatagtctcgtactcactatgatattcatatattctcactaaagctgttgaactgatcctatggaaggcagagctttcactgttaatgattttaaaactgctcttgctaactatgac

SEQ ID NO: 32124 - DNA, 359 bp, Gossypium hirsutum
  Clone ID: LIB3120-018-Q1-K2-E2
aaaactcttgaccttatctttcctgtaaaatctttcgatctaacgccaacattctattgcgattgaaaggatatattctctacacatccttactaaacttaatcatcacactcttgtaccattcatctgagtccatataactactccaaactccatcatcaatccatttaaaatcataactagtttcccggaaacctagggcttttctctactatggccttttaaccgacctataattcattcatcccttatgtacatcgaaattatccctacaaacatctagattccgcttataattcatactggacagaaaaccgctaatcaacactttatacgaactcatgcctatttattcctac

SEQ ID NO: 32125 - DNA, 378 bp, Gossypium hirsutum
  Clone ID: LIB3120-018-Q1-K2-E7
gagagccttaacattagctctagcactagtttcaaccatggcttcctccgggtgtttctggcaccaccactcactcaccaccaatggcacatcatcatcattaccgccgtcgctacgccagttttgaaacatgaatcctaaccagctcgtggtgtccaaggctcacaatcaggaatatgatggaagccttgtgtccctaaggttgactctcactatactcattgatgctgccgatgttggctctaacgtttctcctgctgatactgcctattgtgaagctacaaatgtatttggaaagccaatatcagacacagatttcttgccatacaatggtaacggattcaagctgtcgataccatcttaatgcaccccaagcaa

SEQ ID NO: 32126 - DNA, 413 bp, Gossypium hirsutum
  Clone ID: LIB3120-018-Q1-K2-F4
cccactcgtacgataaaatttatgaacaacttctgggcaaagcaaaaagcgtggatctggggaggaatgaactgccaactgccaaacttattacaagcgagaacaatgcacgcaatgcagtcaaagaatggtaattgatgctagaagttactattgcagaatagaaacaatgttgtctgcctctttatctgacaataaaaaaaaaagatagctgcttgatgcttacaaaatggtaaagactaaatacaacaacctcttcagaaagaataggacttactaccgagaacaatgctctttcaaataaactggaagatgaaagtaattcagacatgcataataacaaatccaaacattttcttgattctgaaaacatgattcataaaactcctatagatgattttgacacaaaaagc

SEQ ID NO: 32127 - DNA, 341 bp, Gossypium hirsutum
  Clone ID: LIB3120-018-Q1-K2-G6
atcggaatcaatggattctgaaggattggacgttcaggttgcgagagttgggctccaaagggatgatattgagctcgtttcttctaaccatccttttatcaccacttattacatgacctacatgtttaagtacgacagtgttcacggtcaatgttagcaccatgaacttaaagcgaaggactcaaacaccttgctcttttgctaaaggcccgtcactggttttggcatcagaaacccttgagaaataccatggggtgaaaacggcgcttattatattgttgagtctaccgatgtttttactgacaaagacaaagcttttgctcacttgaaaggtggtgcaa

SEQ ID NO: 32128 - DNA, 345 bp, Gossypium hirsutum
  unsure (1)..(345): unsure at all n locations
  Clone ID: LIB3120-018-Q1-K2-G8
natgttttaatatcacctttttaaaatacttatctctgaacaattccccggcactactgggtctattgtgtctatccatgttcattccaacatcatgtttctcgaccgttgtaaacctttataaaccgaagctactattaaatactaccgtttattgcatgttactgttcgaaaatgtaatacttcgacgtcttatattttttttagaacgtcacaaagtttgttttttactaccccccggccatcgaatttaactaatgctaagatttactctttactatcatctacgaatccaacacctagaagctccagtcttatccatactgatttttattttatgatgac

SEQ ID NO: 32129 - DNA, 299 bp, Gossypium hirsutum
  Clone ID: LIB3120-018-Q1-K2-H5
cacaacacacccactggtgttatcgtgtgtcacctacggagtccacactaccctctatatcttacactctaaacaacaaatttgcccttcataaaaaagactctttatttttaatgtaacttctactccacccgttaagcaaggagctgataaacctttatcgcttgcatctaaacaaatcctttcatacttgaatggcatccttccaggtgattatggatttgaccccttgtgactctcaaaccctgaacgtccactaaggttcatcgagcctaaatggctatcctactgtgagatca

SEQ ID NO: 32130 - DNA, 440 bp, Gossypium hirsutum
  unsure (1)..(440): unsure at all n locations
  Clone ID: LIB3120-019-Q1-K1-A11
gatgaagggtttaaggttcgagttgtctccccagacaaggatttctttcagatcctatgtccttcattacgcctactacgaattgcaccacgtggctatgagatggtttcatttggaatggaggatttctcaaaaagatatggagatctgaaaccttctcagtttggtgatgtagtctctcttgtgggtgatagatgtgataatatcccaggagttgatggaattgggaatgtccatgctgttcaacttatcactaagtttggcacattggagaatttactgaagtgtgttgatgaagttgaagtggaccacatcaggaaggcctngatagcanatgctgatcaagccgtcttaanngcaaaacttggcatgctgagatgtgatctttcattctatatggtaccatttttcaaccagagatctcacatttaataaacccg

SEQ ID NO: 32131 - DNA, 365 bp, Gossypium hirsutum
  Clone ID: LIB3120-019-Q1-K1-A12
cctttgtttgctctccaataccctctctaggaagtaggaatgccaaaaatatctctttaactccacaactcgagactcttaaaagagattattattttccatcctttctctctttctctcaattaatcaggccatgagtatttaatcatcgtcgtcttcatcagcttcttcatcgtatctctctttcgaatacgttttatagaaagaaacaagaagaaggtaaagagggttacatggcgtttcaccccaaccatctttctcaagaccttcctcttcatcacttcaccttccaacaacaacaaacgaaccaactacctgaaaccacagctcccaattggttaaacacggctctcctccgttcccag

SEQ ID NO: 32132 - DNA, 344 bp, Gossypium hirsutum
  Clone ID: LIB3120-019-Q1-K1-A3
gctaaacgtccggtctctgtctttgtggacggcagcgttcgccatgaaaccaacttctttagagcttgggccatgtgagacggtggtatatttatcgtgcgaccattggtggttttactggctactaaaagcttagctaacagggggtaagtcctttcgacactcagccaggagtgcaagctaaccatcactatgagcagatggcgttcgattaaagaaatgactcttgaccacattgcgacaaaaatggacagtggatactctcatacggtcccgaccctgaagagccctatatattatgggcctgccactttatcctagcgaatggcaaggagaacttaggt

SEQ ID NO: 32133 - DNA, 352 bp, Gossypium hirsutum
  Clone ID: LIB3120-019-Q1-K1-A4
cccacgcgtccgcacggtgcagtactaagactccagtttctgaaaaaccacttcctcttggcatcaataaacaaatttgggcagcttcattatcaggatgttacaatgggtgagatggtaggcaatttccggactggtttaggccgcactgatgttatgcaggtcaatccatttaacggagttgttgcattgggtcattctagtggtacagtaaccatgtggaagcccaccagttctgtcccacttgtaaagatgctatgccatcctggacctgtctcatcattggcgttccatccaaatgggcatctcatggctacatctggtaaagaaaataaaatcaagatttgggact

SEQ ID NO: 32134 - DNA, 451 bp, Gossypium hirsutum
  Clone ID: LIB3120-019-Q1-K1-A6
tatatttactgcacgcactacttggctaaactgttgtagctagttgtatgtaacatgcattatgcatatgccataatgagatgatactttagcctttctaaagttttgggcgtattagttattatttagtgtgcttatgatcttgatttttgttattgtgctttgatagatgcagtccggtggacatgggacaacttttctatgacaagggtctcaatttggaaagttgttggcattttgtgctattcggaagttaaataaattatattcccctacgtggtggaaaataataaaagcatttatcaagggaaagtgagaactttcatactatgataaacattttctaacaagactactgctatcgtatgaaggttctgaatttgctagcattatgttaacccttagatgtggggcttggagcacagaatgtcttgtgtctggctgaactaaa

SEQ ID NO: 32135 - DNA, 452 bp, Gossypium hirsutum
  unsure (1)..(452): unsure at all n locations
  Clone ID: LIB3120-019-Q1-K1-C3
gtgccacgtncgaatacataaatgctttacctacttacaagttcaaggtgaaaaaaaatagggatggtgatggtagggaaataaacttgggtgccagtgagggtggtgttgtaactgccggaactgaaaaggaacgtgtcatctctggagaagatgcaatctgctgcatttgtttggcgaaatacgcaaacaacgatgagttaagggagttgccatgttctcatttcatgcacaaggaatgtgttgacaaatggcttaagatcaatgcttcctgccctctttgcaagagcgaggttggcgagaacttactggacgcaatctcgggtacaagtgccaccatcttgagttctctctctggaccgaatgacaaccaccgacgaggagaaatgaggactggtaacagttataccaggtgcagcttcagctacatgttttaatattataatgatgat

SEQ ID NO: 32136 - DNA, 441 bp, Gossypium hirsutum
  Clone ID: LIB3120-019-Q1-K1-D1
cggacgcgtgggtatgtatgaaatccttactcaccatccgatctcatcgcatttcaatctttgaactgggtttctttcaacaatcctttaaacctcgtctttctttcccttttttcaaatcacaatctcagcctttttcttgaatcctgtaatccatgcaacaccaacaagaagttccggccatggaagtaaatatgaacttgttggggaaacttgaatcgttggggttcccacgggccagagcagttcgaggacttcatcatacagggaatactacagttgaggatgctgtaaattggctcattgatcatgagaatgatgcagacattgaccaaatgcccttggtggtaataaacttggatctagagacccctcagccaaatgatatcacagaagcaataaaactcaaagaacaggaactaagggatcgagttcgcatga

SEQ ID NO: 32137 - DNA, 268 bp, Gossypium hirsutum
  unsure (1)..(268): unsure at all n locations
  Clone ID: LIB3120-019-Q1-K1-E4
ctaccttgtatcattattctctagcctttgaccacgagccaacggctaccatggatcacgtgagtttctaccccatctatggggaggaccgttcanaagccactatccttcctatgataaagaacaattggatgctcacttgacgattataagaaactataccctcccttgcaccatggaactgtcatgggtccagtctgctctgagcctgatcctgaatgctccttcggaccatcttactcttgacgagaacaaccctcttcctatt

SEQ ID NO: 32138 - DNA, 398 bp, Gossypium hirsutum
  Clone ID: LIB3120-019-Q1-K1-F2
cccacgcgtccgcaaagttccatggacaagatggaattgtggctaattttttcagcctgcgggcttggatgggtttgagctgtgtcagcttgtttggagctcagagggtggtgggctttctaagcttttggcaccgacgtgaagtgcggacgacaagagcatatgtgttgccggggcatatcttccttggtctctacacttatggcttatccaaggcaacagcggaaacagggctggtagagaaattgacattcttgcaaagcacgcggactgcattcaaacactgtccggagaccatgattgttaatagtctatgtctggggttggatctcctctgtggcattgtcatattgacagcagatgcgcctaaatatcatgctctgcaaaccaaacttatg

SEQ ID NO: 32139 - DNA, 265 bp, Gossypium hirsutum
  Clone ID: LIB3120-019-Q1-K1-F7
acactcttgtaggaggttgaacacgaagacgttacggtagtaagctaatccttagcttaagaagcttgaaaggacaaagcggcgttggcttgtcagagcatcaaacgacctctgggggattaaactgagccagaaagacaccatcaatggaatctcgtgattcttctggagaagaagaagttcatctatttaattttttcagaaactgattagggtcatgtttattttctgacaactgttttttcactgcttctcgatgccatgt

SEQ ID NO: 32140 - DNA, 319 bp, Gossypium hirsutum
  Clone ID: LIB3120-019-Q1-K1-G7
ggaactcatttctgcttacaagcagatgaatccgggacactggcgaaactctgggtcttctgcaatgactcgagatgtaaaatgggaaatgatatcttattccaagatgcacctatcatctaagcttataaatggcaaatccatttgccttgatgtaaacttcagcaatgctatcgtcacaaacagttgcaaatgcataagtaaagataacacatgtgaccctgccagccacgtgttcaaactcgcggacagcacacggagcagacatgaggaacaattcttcttacattctgactgcatcttcgacttgcctggaaag

SEQ ID NO: 32141 - DNA, 450 bp, Gossypium hirsutum
  Clone ID: LIB3120-019-Q1-K1-G9
aaatcgcacaaattcttccatttggccaggataagggtcttgagtctttgattcagccagttgaagatgagtgcattttcgatcacgcgcaagaaaactcctttccagaagcacagagaagaggaggaagccaagaagaagagggaggaggatgaaactgctcggttatacgagcagttcgtggcttcttttcaaggagacaatgcacctgggtcgaaggcatttgttcgaggtggaacaatcaatcccaatgagaaattcaagcccgattctgaaggtgaaaaggccaaagatggggtgtctgttccaaagaagggaagtaggtatgttccatctttcataccacctcctttgtctgccaagggaaaggaatctgagaagaagaaggaggaggagaggccaaaaggaaaaagagaaggggaagtctcggaacatatgatcctgatagat

SEQ ID NO: 32142 - DNA, 362 bp, Gossypium hirsutum
  Clone ID: LIB3120-019-Q1-K1-H11
cccacgcgttcgcccacgcgttcggcaggcacttggagtgagcaacagttcagctgccagtgtgccactatcacaacagacgtcaagtgctttgcaatcagcacaatccaaatatgttaaagtctgggagggaaatttatctggccagagataagggcagccagtctttatcaccagattggaaggttatcggagtgcctcagcttctgagacacttgcagcacattggccacaaaccatgcaaatagttcgtcttatatctcaggatcacatgaataacaagcaatatgttgggaaggcagattttttagttttcagggcaatgaatcagcatggatttcttggacagctacaagagaaga

SEQ ID NO: 32143 - DNA, 283 bp, Gossypium hirsutum
  Clone ID: LIB3120-019-Q1-K1-H3
cccacgcgtccgcccacgcgtccgcccacgcgtgcgcccacgcgtccggatttcccttttagcttttaacaaactccgtgcttgctctagatctctccgccttccatgtctggttttgtttttatctcacagtaatataatcaatatctcatatggctcttcttgatgcttctcttatttgcgtgagaatgaatgctcatcaacgtcttgctcctgatggctgaggactcatgtgtaccgtgctcagtggaatactgctttgtgggttgatgatcaactctac

SEQ ID NO: 32144 - DNA, 301 bp, Gossypium hirsutum
  Clone ID: LIB3120-020-Q1-K1-A12
tttaggcatagcatacactactaggacccactactagcaatggctctctcaatgacctcatcggataccattgccactgccaatgccactcaggctaacatggacgctaacatgaacggtcttaagaccggccttgattttgcagttgctaggaaagccaacaacgacattactaacctcgcaagcaatggcgcgagacttcaatgcatacaggtgtggcctcctacttggcagaatacaggtgagactaacttatacattctcgatctcacacccgaacagacatctaaggaattagatt

SEQ ID NO: 32145 - DNA, 433 bp, Gossypium hirsutum
  Clone ID: LIB3120-020-Q1-K1-A7
agaatacatggagaagcatgaatttgtttttgatgcagtgctgaacgaggaggtctcaaatgatgaggtctatcgtgagacagtggagcccatagttcctataatttttcaacgcactaaagccacttgttttgcatacggtcaaacagggagtggaaaaacctatactatgaagcctcttccgcttaaagcttctagggatattttgaggttgatgcaccatacctacaggaaccaagggtttcatttgcttgtaagcttctttgagatatatggaggaaaactgtatgatctcctcagtgataggaagaaactttgcatgcgagaggacggtaagcagcaagtttgcattgttggcctgaaagagttcagagtattggatgtagagactattaaggagcttattgagaaaggaaatgccacaagaagtact

SEQ ID NO: 32146 - DNA, 391 bp, Gossypium hirsutum
  Clone ID: LIB3120-020-Q1-K1-B1
ctcacgcatacactattagatacaattattagccccggtactatcaatgacttcatcaatgaccatagccactgccattgccactgactctaacatgcacgctaacatgaccggtcttaagaccggccttgagtttgcagttgctatgacagtcaacaacaacgtcactatcgacattagttatgtcggaagcaatgactgcatacagcaatggacgcatactggaacgaatactgtaaagactatgttatagattctctaatatacacccgagcttacacctaaggaagtggattacgaagtggattaacaacggggttcaagatgggaatcttgattagaagacggattcgaggaccgattatagtaccgcatatacacgtgcttacat

SEQ ID NO: 32147 - DNA, 342 bp, Gossypium hirsutum
  Clone ID: LIB3120-020-Q1-K1-C3
ggccactcttacttcaacttggtcctcctcacgaacgtcgtaggtgccgcggatgcccatgctgagtcaatcaagggctctaagacaggatggctgtcaacgtcgagaaactggggtcaaaactggcagagcaactcctaccttaatggtcaaagcctgactcttcaagtgacgacaagtgatggcaggactgtgagcacctacaacgtggcacctgcagattgtcagttcggacaaacctttcaaggtggtcaggtttagagtttcagggcaaatgcctgtaattccaaaatgaggctgtaatgtcatgagatagccattgcttgagacacacagagaaac

SEQ ID NO: 32148 - DNA, 329 bp, Gossypium hirsutum
  Clone ID: LIB3120-020-Q1-K1-C5
aacaagctcacgaaaatctttaatctgtatcaatccttgtgaacatcgtagggggattaaacgccgtcttatacggatctccacgagacgattttagtaaccatgggcatgagcgcagcaactgtaaacacaatgacattttcaacatgaccctttcaaagaaagtagatcatcaagtgcagaggaatgtctagcatgaaatgtgcatgaaataatagaacatacatgagtcccacaaacagtatcataagagctgattacaactgtgcatcaatatgaggaatggaagactgctgataacataacagcactgcatgtgcctaattgca

SEQ ID NO: 32149 - DNA, 300 bp, Gossypium hirsutum
  Clone ID: LIB3120-020-Q1-K1-D11
accacctgcaatcgctgcaataccaatgccttaatttgtatgaaaaatgctccaaagatacctgcaaagaatttccatgcactgactaggttggatgaaaatagagcgaaatgccagcttgccctaaaagcaggtgtcttctacgatcaagtgtcaaacatgaccatctggggaaatcactcaacaactcaggttccagacttcctaaatgctagaatcaagggcttacctgtcaaagaggtcatcaaggatcacaaatggttagaagaggagtttactgaaaaggtccaaaagagaggc

SEQ ID NO: 32150 - DNA, 429 bp, Gossypium hirsutum
  Clone ID: LIB3120-020-Q1-K1-E12
gcgactcgttcgtccacgcgtccgcaatgatcggagaccgtgtgttcgatcctttcgggtttgctaaaccgggtggatacttacagtacgatgtggactcgttggaccagaacttggccaagaatgtggccggtgatattataggggtgattagcgagactgcggagctgaaaccgacgccgtttcagccgtacacggaggtttttgggattcaaaggtgtatagagtgtgagttgattcatgggagatgggcaatgttgggtacgcttggtgctattgccgttgaggcactcacctgcgttgcatggcaagactcatggaatgtatatttagtggaatgagcatcatacttagggctaccactttcattctcattgaccacattaatattgattgaggttttggtgattgggtacattgagttccaac

SEQ ID NO: 32151 - DNA, 445 bp, Gossypium hirsutum
  Clone ID: LIB3120-020-Q1-K1-E4
gacagatacagatcaaatgtatacactgatttctgcagttcatgcgctatgcaatgaaacaatacttgccaatgatatgtatgttggcgaatgccaagactcgagtaacttcaatgaggaacttatccaaggaaacctgttaatctgtagctattcaatccgatttgtgcttggactctctacaatcaagcaggccttagaaactgcgaaaaacctcagtgcagctggagttgtgttctacatggatccttacgtaattggttttcagcttaatcccacaccattggaaatacctggcatcataattccatccccagatgattcaaagattttactccaatattacaattcatctttggaaagagatgggctttcaaggaaaattgttagatttggggcacttgcaagcattttacgtggactgaaggcaaactacagcattact

SEQ ID NO: 32152 - DNA, 407 bp, Gossypium hirsutum
  Clone ID: LIB3120-020-Q1-K1-E7
gaccaatacgccttccggaacctcccagccccaccataggagtgccggagatcttcgaaggcggcgcctacagcgttatcagacgcgccgtcatcatcggcaacggctaccctggatccgagaatcagagtatcgggttggtccgagctctcggcttatacgacaagcatgttatttatcgagttacgaggccaagaggagggataaacgagtggcttctttggcttccagttagtcttcaccaaaaattggattatctcatccagttcattcaaatttactcccgagggaggaattatgtgcctttacctctagaacatggtggtggaagtgttggcttggcttctgctttagaagctgatgttaagcagatcgtaaccatggcttgccagacttttgaaaaggat

SEQ ID NO: 32153 - DNA, 114 bp, Gossypium hirsutum
  Clone ID: LIB3120-020-Q1-K1-F12
tcggcaccgtcgcctaacgtgaatgggaaaggcattagattttgaagggtacctttgaaccaaccgttattaaggggaacccgttaactcccgtggtaccgtataatggcttga

SEQ ID NO: 32154 - DNA, 180 bp, Gossypium hirsutum
  Clone ID: LIB3120-020-Q1-K1-F2
cttttagtttaatcgaagagagaagaagcgagaggtaccagcgtacgccatggctggtactgcaaagatcaccggcgctcttttaggaggccagggtcatcatcgcttgtctggcatgacacgttgccgtcggacacgactcaaggcgcaccagaacatcatgagcccgatggacacact

SEQ ID NO: 32155 - DNA, 448 bp, Gossypium hirsutum
  Clone ID: LIB3120-020-Q1-K1-F4
aaacaatagttaaaaagaaaaatgagcttctcttcactaacaagtgcttgcagttccttgggtgttaaatcatcaagcttgatagtgcagttgggttttcagactactgaaaataacaagttccctggagcttttgtttcatcccccaaaagaacaaaaattaagaagttttctatagcttgctcttctactgatccattgttggttaaggctgcgagaggagatcctgtaagtcgacctcctgcatggatgatgcggcaggcaggaaggtatatggctgtttacagaaagcttgccgagaaacacccatccttcagagagaggtccgagacaactgatctcattgtggaaatttctctgcagccttgggaagctttccgtcctgatggagtgataattttctccgatatacttacttcactgcctgcatttggggtcccatttgaca

SEQ ID NO: 32156 - DNA, 408 bp, Gossypium hirsutum
  Clone ID: LIB3120-020-Q1-K1-F5
cccacgcgtccgcccacgcgtccgctagtattaggcttcggacagcttgtgagaagctaaagagagtacttagtgccaatcctgaggcccctttgaatattgagtgcttgatggatgagaaggatgttaggggtttcatcaagagagaggagttcgaacagatcagtgctccaattttgcgacgtgtgaagaggccacttgagaaggctcttgccgatactggacttgcagttgaaaatgttcatatggttgaagttgttggctcaacctcccgggttcctgctatgttgaaaatcctcacagagttctttggtaaagagcctaggcgtacaatgaatgctagtgaatgtgttgcaaggggttgtgctttaaaatgtgcaattcttaagtccacattcaaagttcgag

SEQ ID NO: 32157 - DNA, 439 bp, Gossypium hirsutum
  Clone ID: LIB3120-020-Q1-K1-F7
caatttaatagggtcgattgggtgattgttggtttttgagtgctgtcgctgttttgacggagggtttgcaaatatctgaagtgatgattactccagagtacaatgaggagggaatctacaccgttcgcttctgtattcagggtgagtgggtccctgttgttgttgatgattggattccatgtgaatctcccggcaagccagcatttgctaccagcaggaagggtaatgaactatgggtttctatattggagaaggcatatgcaaaactgcatggttcttatgaggcactagaaggtggtctcgttcaggatgcacttgttgatcttactggaggtgctggggaggagattgacatgagaagtccccaggcccagatagaccttgccagtggtagactatggtctcaattggtgcgggttaaacaagaaggatttcttct

SEQ ID NO: 32158 - DNA, 235 bp, Gossypium hirsutum
  Clone ID: LIB3120-020-Q1-K1-G3
aaataccgtccaacacagtccggatgtccagaaacggcttaatgaactagcgcacatatgcatggggctagtctgcatgctgagctggcccatatacaatggtgagcatctgagagcgattgcagcagctcttacacacagtgtgcacataatacggatgacacttatccgacctggactatcgtacgatgaacccactgcaaaagcaactgactattatgatgcctacaaggaa

SEQ ID NO: 32159 - DNA, 342 bp, Gossypium hirsutum
  Clone ID: LIB3120-020-Q1-K1-G5
gctcaaggtcgggttcctgtctcctaggactgtggtgttccgcgtgtaaccggggtttctaaagcttcgtcagtgggagcctctggtatacttattgtgcgaccagtggtgttctcattgtctgttgaaggagaatcttgcttcaggaaagtgctttccatgctgcgctatgagttcatgctaaccatggcattgcgcctgtgtcgttcgcttcatgaaatgactcgttaccacattcctacagtttgggtcagtcctcatcctcgtcctgcccctatactgtgtatgcctttatcttatgggcctgctactttagcctatccatattctataataacttat

SEQ ID NO: 32160 - DNA, 306 bp, Gossypium hirsutum
  Clone ID: LIB3120-020-Q1-K1-G6
cgcctgcatgtactcggtccgagactacgcgtgcggtccgaagcctacgcacatatcaatagtgagcttacattggcatgaaacacggccagcgcattcgccgatacttcgtcgggattacttctacattcacgtcgactatactttacagacctgttgacgaacagcatgtatgacacgtcgaaactaatactagcctaaacaacctcaaaccatcgggaaccataataactgacggtacactatgaggctaatccgtcgaaactcacgctaacgctgacatagaaacgttcctaactcaacgaa

SEQ ID NO: 32161 - DNA, 430 bp, Gossypium hirsutum
  Clone ID: LIB3120-021-Q1-K1-A12
attagaaagtcaaaatctagaagcagacttggtgttatggacggttgggtccaaaccacttcgtcctgcacttgaaccctgtgacaaaccccatgaacttccactgaatgcaagaggacaagcagaaacagatgaaactcttcgtgttaagggccatccccgcatttttgcacttggtgactcggcttctctaagggactcaactggaaagcttctgccagccacagctcaggttgcttttcagcaagcggactttgctggctggaatctatgggcagccattaatcaccgtccattgttgccatttagattccagaatcttggagagatgatgaccctgcgtagaaacgatgcagctatttcaccaagtttcgctgatggtctcaccttagagggtcctattggtcatgctgcaaggaaattagcatac

SEQ ID NO: 32162 - DNA, 173 bp, Gossypium hirsutum
  Clone ID: LIB3120-021-Q1-K1-A5
atgggcccattctagatgcctcccacatatatgcccattatgctaagggacccatgcccgtcttttacgagttataacaaggcatttttatcagcaacggttgcttacttgcacaagacaacatctgggaccgcttaaccgggcttaaaaatgtctttggtactcgagtcacc

SEQ ID NO: 32163 - DNA, 402 bp, Gossypium hirsutum
  Clone ID: LIB3120-021-Q1-K1-B4
ctttccttgacctgcttcaaagtagaaaatcaacattgccaacatagcaattctagcatgtgtaatctccgctggctgaagggtctccagtttggcataatcggggatgtagacaccatttcggatggtacccgcaaggcctaatgggtcgaagaacttgcctcccgggtaaccctgctggccggtggcgttggcgaagttctcggctgttttcgaccatggagttgcccattctacggattgagattttgggttgaaaaagtctacccatcgcttgctctccacccaacccatgaggaggagttgggtgccaaggagtgagccgaaggagaatggggctattgcaccggggtcggctccggcctcgaaccatggtacaccactccaggcttggcctatgaa

SEQ ID NO: 32164 - DNA, 447 bp, Gossypium hirsutum
  Clone ID: LIB3120-021-Q1-K1-B6
gaatggcataccatggaccgcaatgagggtcaagggaatgtcaaggtgggtacacttgctgtgccttcacgcaggatgacatgtattcaaccactttgggaccacgattcataccattatacttggggtccacatgatgtgcataaccagtttggaattgaatgggatatcattaatgatttgaggattgacatggctagactggagcaaaggatgaatggtttgcagaagatgcttggggcctgcatggaaatgcaactcgacttacagtgatcaattcaacaagagaggtctggtggcctcaaccgttcagctggttcacgagggatgattgatgacagctcgttcaaggatgcccacaattgggataatgtcaagaaagggctctgatgtatatgctccaaaggcaatatcgcttcactactatacacatgtgggcacatgtgc

SEQ ID NO: 32165 - DNA, 369 bp, Gossypium hirsutum
  Clone ID: LIB3120-021-Q1-K1-B7
gcgggaaacgacgaaaaatggcaagataccacagaacgattaccgtgttctcaccggacggccgtttattccaaggggaatacgcgcctccaagccgctcctaaaggtaacgccgccgatagcgtacactgcaccgacatcaaccaattaggcgtcgagataaaatccgaacgcaaactccaggactcactatcggtttacaagatggcgaatttggaacatcatagtgcattggcatgtgctggactcaaagacgattctcttgttctcataaacagggctcaaatcgaatgtcttagccattcgctgactgctgaagattcctcttcgggcgactgtattactaagtacagttccggtcttcaatac

SEQ ID NO: 32166 - DNA, 326 bp, Gossypium hirsutum
  Clone ID: LIB3120-021-Q1-K1-B9
accacgcgtgcgcttagctatagcctacacttctagtacccactactagcaatggggtactcggtgatctcatcggcgaccattggcactgcctatccggcacatgctaacatggtcgatcctatcaccggcctcaagtctgcctctgctttcccagtcaccaggaaggccaacaacgacattacttctctcgcaagcaatggccgtagattgcaatgcttgctggtgtggtcttctactggatagaataagttctagactctctcataccttcccgatcttacacccgtgcatttgtctaaagaagtggattacctttttcgctc

SEQ ID NO: 32167 - DNA, 254 bp, Gossypium hirsutum
  Clone ID: LIB3120-021-Q1-K1-C4
ttgtacaggctaaaagggatctgataaacggggtgaatgatcaaagaaaaaaccaagtcttgtattgttattttacaccatactggagaggataacacaacctccaaattgggcagaatgtctgggtgatgtacataatgatttaacatttcaccacactttttgaacctaaacaccataaagaagctcattccattgatactaatacagggttatgcttgaggagcaaaaacttttctattggacctcttaac

SEQ ID NO: 32168 - DNA, 325 bp, Gossypium hirsutum
  Clone ID: LIB3120-021-Q1-K1-C5
tcgaatcaaacgcacaactttctgtacgaatgagtagacacttccacgcatcttgatccaatcatcatgatatgcagcctgccgcttgcattatcagggctccataccacccaccgcgtggtttcagacaaccatattgacgcagctacctgctccgaaactcaaatgcatatgggacacaacttgtataaagtgcgcgctaagcaaacaacaagctggaggtgtaagaaagacgccgcatgagagtcactacataacaaattcaggaatactcgcgaacggactgattacagatgaagattctagctaatcatatcatcgctga

SEQ ID NO: 32169 - DNA, 345 bp, Gossypium hirsutum
  Clone ID: LIB3120-021-Q1-K1-C6
attaatatgtgttattttgggaattttacagttattttttgggatctaaataatggggtagctcttttaatcagattatggcacttggattggtatttaacactctacaggaattgattcagcttcattttattgcattgttcaagaagggtgatgtatctaaggatttaacatctggaactgttggaggagcaattcaatttattgttgggcatccatgtgatactattaaggttaagcttcataagtaaccttgttcgcttactggtcaaccacctaaatatgctggtgctatggatgctgttaagcacactttaactgctgaaggaccaatgcggttgtata

SEQ ID NO: 32170 - DNA, 435 bp, Gossypium hirsutum
  Clone ID: LIB3120-021-Q1-K1-D1
tcgacttgagtcgaacaaatatttcacatcaggattttaatgcgaataaagatcgcggctgtcggggttctaaacggggacgggggggcttttgactcactcgggtattctttgccgacgaccattgctatataacttagactgaatatatggcaactcgatggtatcgttcacataaactgcgcggctcattttacttcaactacacccctgcggtcgatatttggagtactagatacatatacgcttacactatcactggaaaaccattgtttccagtgaagaatgtggaggagcaattggaacatgggaaccatatagttggttactcctttggtggaaccattgcgcgggattataatgaaaaaccttaaaattattttgataacttgagaaaaaagaaaccaattccttttctcaaaaaattcccaaata

SEQ ID NO: 32171 - DNA, 169 bp, Gossypium hirsutum
  Clone ID: LIB3120-021-Q1-K1-D10
gattaacataaccaaatagaaagctggcttctgtttccggtactaatatgacatgtggacctctggtccacaagtccgagtggattaagggccaaaaccttcgacacccttaggcttggtttgtacggtcacaccctacattggtcgactttaccattcgagctaattc

SEQ ID NO: 32172 - DNA, 191 bp, Gossypium hirsutum
  unsure (1)..(191): unsure at all n locations
  Clone ID: LIB3120-021-Q1-K1-E1
ctcacgcgtntcttcacgccttcttaagatgctctttaatatcgttcgcccactcttacggccactcgtacgaatgaaatctgctcccttcagggcatttgtgggaatacgaatatagtatcgtcaaccacattttcaatgcgggactggaaatattagaagccctatctatctcatagctatcattttaa

SEQ ID NO: 32173 - DNA, 423 bp, Gossypium hirsutum
  Clone ID: LIB3120-021-Q1-K1-E12
tccacgcgtccggctggtttagctgttgctcaacaagtttcacaagcaggactttgagtgtggtcaattgatccatcaccaaaattgatttggcctaataattatggtgtttgggttgatgaatttgaagctatggatttgcttgattgtcttgatacaacctggtctggtgctgttgtgtatattgatgatggaaaaaagaaagatcttgatagaccttatggaagggttaataggaaacagcttaagtcgaaaatgttgctaaagtgtatatctaatggtgtgaaattccatcaagcaaaggttattaaggttattcatgaggaatcaaagtctttattggtttgtaatgatggtgttactgttcaagctactgttgttcttgatgctactggatttttgaggtgtcttgctcaatatgat

SEQ ID NO: 32174 - DNA, 359 bp, Gossypium hirsutum
  unsure (1)..(359): unsure at all n locations
  Clone ID: LIB3120-021-Q1-K1-E2
tcggccacgcgttcgcccaaacntccggtggtacaaattggtaacagcggatccgaacctggtgggaccttcgaggaccatacgggtcaccgtctggcctaccaatcttgaagctccagcgtggagcagcatctcgtgacttactgtgtaaccaagaggttcttttctccttgaagactatcatttagtggagaatctggccattatcacctgactgcgcataccttaactactctttcatacaaaatgagacaaggcgagagggttttttacggtgactcatgatatatctcaactcacaagttctgcgatgagtcgtgccactggaaaacataccccgctcattgttagattttcca

SEQ ID NO: 32175 - DNA, 434 bp, Gossypium hirsutum
  Clone ID: LIB3120-021-Q1-K1-E3
gctcttcttctatcacaggcctttatatcaggagtgcatggaacaggctgtaccatcgaagacagaagccatgacgtcttatgggctgtggttgtatacaacgctggtgttttcacacacatcaccacacgcttgactctgcgaagaggtgaatccatctccattatcgcaccgtcatcatggggaggacgattttggggaaggacccattgctcccaagagtccgccggtaaattctcatgttagaccgtcgattgttgttccaggaagctagaatgtacagggaacagcgctgcttcgcctgccactttggctgaatttaccttggacggagccgggggtcttgattttttcgatgagagtttggttgacggatacaacgatcctattttggtggtttcccacggcgggacagggcaaaactgtacctacac

SEQ ID NO: 32176 - DNA, 405 bp, Gossypium hirsutum
  Clone ID: LIB3120-021-Q1-K1-E5
ctattttatctcttcagatcttctcaagatgctcttcaatatggatgtctcctcttgttcgcattgacgatgaatgaaatctgctcccttcagggcattgtttgaaaacatggttgctatctttttccacatttcgacaccgaggacaggaaatatcagaagccactctttttaatctgagattttttaaagtaggaataaagttccaggaaatatgccaaaaagtgatggtaatctttgataggagatgtaaattccatagttttctatagaaattttttgtttcgaactgtattaaataagcactaggatccatattagcatcttgtaatagtttatagacacttctgactgaaaatttgccagaatgttcttctcgccagacttgaaaatcatcatggtttt

SEQ ID NO: 32177 - DNA, 407 bp, Gossypium hirsutum
  Clone ID: LIB3120-021-Q1-K1-F2
tcattcgctagccatagacgtattataaacatggctctttcgttctcattctggaggagatattgtggtgtttttttgaagcacatgaataatgcctgagaaaataacaacagaggacttatttaacaatctagtagagaccattgcagatggtgtctttaagcagaaatccgcgtccttttttgaggaagagaaatcaaactcagttgtctttttgttttaatcggcttttttgtatggtaaatgcgcgtttaacatattttgtcttttatatgatctctttacttttctttggaacgtacaaattaattttatccttcttttagcgagagcaactttaatatgggttctatttgaatggcttatttaccatttactgactcttttatgctttgcttttggttctt

SEQ ID NO: 32178 - DNA, 244 bp, Gossypium hirsutum
  Clone ID: LIB3120-021-Q1-K1-F7
acattactgatgatcatatcttagccactcataaacgcagggccactcgcaaagaagcatggggctattcttatgttaacccagatagaaatgcggcaagcaagcgaacatggtcattacatgccaaaattgcgaggctgtcatgacatcatattttatcttctttgagcagggctgcactatgatcctgcctacgtaatggaactgaagattatggggtaatggagcgttaactctagaagta

SEQ ID NO: 32179 - DNA, 458 bp, Gossypium hirsutum
  Clone ID: LIB3120-021-Q1-K1-G12
tcggttaatttcaatttctggatctttgcttctttttgtccttatttttgtggaaaagcgtgcgtgtatttttatttgtttagttgtgtcaatttattttatgattaattcttatttaattttgaatttcttgataatttactttttttcttttctattattagctttctacagttagttctttgctcagtttttacataccaaagatcaaaaatctttaaatagaaatcgccttatatatgtgttaaaattttgattattttccctttaacacatagattaaacaagaaattttactctttctttcttcctttggttgaaaatcctgagtagtattatgatttaaattctttttgtccccataagctgatctgtacatagatcaattaagaaattctttggtttcactttctcttttgggctttgttaatgggatcacattcccagtggtcttattt

SEQ ID NO: 32180 - DNA, 197 bp, Gossypium hirsutum
  Clone ID: LIB3120-021-Q1-K1-G3
ggcacgcggacgcttaacctaaacaccgccctagaagattttatattcatcgcctaaattactgatcgacgctcaaaagcttgtcttttttcggggaattttatatgggtagtttgctttagtatcgagggcgaacagaccagacccagatatcgatgatgaatttcaggaaatttacaaggagtacactggcccgc

SEQ ID NO: 32181 - DNA, 324 bp, Gossypium hirsutum
  Clone ID: LIB3120-021-Q1-K1-H12
ctcaagcacacggggcaaatgtgaattttctttctgaacctatcagggacggaacatctggggcagtgataggtctcacaactcgggatgctcatcgcacaatgctcgcttatcagggtacatcatcggctattcattatgattcttgcctgactggcatagtgtccaagactgatatatgtggcgttgacggttattaatttgaacttcctgataccatcaaaactattatacgagcatgtgaacaagcgcgcatgagtgcagccctgatagctgccaccgcataagatgtctactgcatcgttagacactatgaggattact

SEQ ID NO: 32182 - DNA, 402 bp, Gossypium hirsutum
  Clone ID: LIB3120-021-Q1-K1-H3
gccacgcgtccgcccacgcgtccgagaacacacaacaatggccgtcaacacactaatgagctgcggcataggcaccacatttccttcacttcattcctcatcaaagtccaaattgagtggcgccgccgtatcgttacctacagctgtgggtaccaatgtgggccaccgcgctagcatgtaagctgactggatgcctggtcaacctacaccaccttaccttgatgcgtcaccaccagctgactttgggactgacccactaagactaggtgaaggccctgagaaccttgagacgttcaaagaatccgagttgattcactgcatatgggctatgcttgctggttcagggatattggtaccagaggccctagggttaggaaactgggtcaaagctcatgaatgggc

SEQ ID NO: 32183 - DNA, 457 bp, Gossypium hirsutum
  Clone ID: LIB3120-021-Q1-K1-H5
cccacgcgtccggcagaaatgctgaatcagcttcagtgaagctgcctatcaacaagcggagagaacagcggagagaaacggacggtggtaatggagctactagctctgcacatttctccgacgttagccagagagtgtttcttaacggccagcaataataactcttgtgttttccctcgctacgttcgaaatcgtcacggaaaatcgcggtttcgattccaagctcgaaaaggcggttccaggagctggaatccaaacaagatttctaggctagatttaatccaacaagtacttgaaagaaacaatctcattgaagattcacaagaagaagacgaagacgaaataagtggtgacgactcgtcttttttgtctttgagtgaaaaaccagataggaacatggctttgcttgacgagtacgagttggaagagcttgattttacctctcccactaatcatc

SEQ ID NO: 32184 - DNA, 243 bp, Gossypium hirsutum
  Clone ID: LIB3120-022-Q1-K1-A10
gacttggttttttcagctctcttcttctctttttcaacattattataactctattcgttttgcaaactcactctcactgtgtgcccattcttctcttaagaaaaaaaattatggattgctttgatcttgagaacccattcaccagcttggacaatcaagaatctgatataatctcagctctcttctcttcagaatctgatcacatgccgttccacaactactgtctaagttaaaagagcaatg

SEQ ID NO: 32185 - DNA, 149 bp, Gossypium hirsutum
  unsure (1)..(149): unsure at all n locations
  Clone ID: LIB3120-022-Q1-K1-A12
cacacacganctacactatgtcacactctcgcaatcgaaacgagtcatacgctatgcaccatgtcctccctaattcctgcgtgggctctccatatgaatccgaatatccgattacttccttctaaccaacatgagtgtggtggctcact

SEQ ID NO: 32186 - DNA, 388 bp, Gossypium hirsutum
  Clone ID: LIB3120-022-Q1-K1-A2
tcagtttcattgaactgggttcgaccttcctttacaaagaaggcaaattatgtgacacactccactgagctagccccaccttctgctttttcttcgcaaaactcactcacgtacaccaaagaaaccatttccaatgaagaaaacaattgcaagagaagactgttgctgttgggtgttggagctattacagctaatttactccctgcaaattcccttcttgcagaagagataccacaaaactatcgagctttcgttgacattccagatgggtattcttattactacccatcagattggagggaatttgattttaggggacatgattcagcattcaaagacaggtttcttcaactgcaaaatgtaagggtgagattcataccaactgata

SEQ ID NO: 32187 - DNA, 241 bp, Gossypium hirsutum
  Clone ID: LIB3120-022-Q1-K1-A4
gaagccgtgcatgggaatcactcgtgggatcgatctgttgctgctctagcgtcttccagaaactcctagggtttctggtgctttcacattattgggctcctttgggccgtttaggaattgggtcagggattaaattaggggtttgggtgtaatgggattttgggttggtgttttgggcctttattatttttttgggttaattgtaaatggactttttatggacatttattggatttttgtt

SEQ ID NO: 32188 - DNA, 216 bp, Gossypium hirsutum
  Clone ID: LIB3120-022-Q1-K1-A7
tgccatcgacaggataggccgcaacacccgtgtcaaagaaccggactcgacaggctgctctatccgtgaagaggaaacgctaccggcggatgactctgactgagactaggagagaatacgcatactatcaacatgacatatacagctcatgaatagcatacatcgcgacatgggatgcattgactcatacggatcaatgatccgctaggcgatgca

SEQ ID NO: 32189 - DNA, 207 bp, Gossypium hirsutum
  Clone ID: LIB3120-022-Q1-K1-B12
tccaagcgttaccttaaggcctaccctaaagtgtcctctcatctatcattttctttagcagtgtctgttccatctaatggatggggtgaaagaaatgacggctgaatataatgctgaatgtgctacggtttaacctactgttaaaccttgtgccaatggtatggcctctaccatgctcactcactgcatcattctacccatcgatat

SEQ ID NO: 32190 - DNA, 369 bp, Gossypium hirsutum
  Clone ID: LIB3120-022-Q1-K1-B7
atgatacattggatgcattcctcttttactggattgacaaaggggaaactgatcctatcatactgcccaaaatagggggtagtggtgcagcgctttttgattatgctcgagggggtccccagtttggggctgatgggttactcattggacctcccctggcgccggtcatgggcgggtttgcagggcctgacactaattcaggcattggggacttgaggcaagccaagtctagattgggattatcatatgctaagaggaaggatggtaaggagtccctctttggggatgactccaaggttactcttgaggaagtgcaagttttttgcagtcctcacattgctagcttatactaagatgagtaatggagct

SEQ ID NO: 32191 - DNA, 226 bp, Gossypium hirsutum
  Clone ID: LIB3120-022-Q1-K1-C10
cacgcgtaccgagagagggatagaactgccggctggggactggctgccatctcgggccagggatgtgctttccagacgctggacaagaaatggactcatcccattgcccacttatgtgacggctacaagattggtgactatgtggacgtccaggtcaatggcgccgatcacaagggcatgccccacaaattgtaccatggacggactggacgtgcctggaacatca

SEQ ID NO: 32192 - DNA, 387 bp, Gossypium hirsutum
  Clone ID: LIB3120-022-Q1-K1-C4
gtttattgagtgtattttggaattaaatattcagggtttcaactcataacaaaagttccaagttgctaatatggtatctatataccagtgcattatcaatcatctgcaatcactttccagttgtcattaacttatctttctctttaggttgaaacatagaatgaaaatgagcttctatagagggttatagatagtttagaaggaaatgggattttaaagaataataatagagagaggatgctgatagtatttgttatccctgtataattctagcatcaatatgatcccactggttgacatttgtagttttatgcagccttacattgaaatttaatttgcaggacctcttgagacgtgaagccaaaagaggtaatggtggtattccat

SEQ ID NO: 32193 - DNA, 360 bp, Gossypium hirsutum
  Clone ID: LIB3120-022-Q1-K1-C5
gaagcaaagccgattgacgtcaagcccctcccacacaccaaatcctgcaactagttctgaaaaaagaaagtttggttaaaaatgagtcagtgtgttcccagttgggatctggacgataatcatgtcactgcacgccattccttacgctctaactccaactccaccgcccctgatgttcacatgtcggactacgaagtggcagaattaacatgggaaaatggccaactagccatgcatggtttaggtccggcacgtgtgccggctaaacccttagtttccaaccctccctctaagtacacttgggataaaccaagggctaatggcactttggagtccatagtgaaccaggccactcgcgtt

SEQ ID NO: 32194 - DNA, 240 bp, Gossypium hirsutum
  Clone ID: LIB3120-022-Q1-K1-C7
acggtcgtggcaccatcatgggccagggcgctatgcacgttcttccaaagcgtggttaatgccttccgcttgtatcctgatgcttctaggctcagctgcccttagcatactgacttcaaggactcgacttagacctgtgccgatgcatcctaactccctgcttacgctcatgcgacatctgctcttgacgagtcgcgtgcatgcgcctgaggagccgcaaagcggctgacctactacgaa

SEQ ID NO: 32195 - DNA, 376 bp, Gossypium hirsutum
  Clone ID: LIB3120-022-Q1-K1-C8
aaagggcatctgtatatgccaaaagagctgtacaagctgctgtgtcgcagcagaagagagcaacttctagcgtagaagctgatataacaggtgcttcttcactccatgttttgccaaagcaggaagtatctaccgctatatctaaaaactatacatttaagaaaggtgatagggttaagttcgtaggtaccacatcaccttctacactttcctctctacaacctgctttaagggaaccgacaattggtgtacggggaaaagtagtccttgctttcgaagaaaatggttcctcaaaaatcggggtcagatttgacaggtctattcctgaaggcaatgaccttggtggtctttgtgaagaagatcatggtttcttctg

SEQ ID NO: 32196 - DNA, 128 bp, Gossypium hirsutum
  Clone ID: LIB3120-022-Q1-K1-C9
tgtggacatacaattctgagacaccacggaatctaatactcctaaacatggcgataatcatactcggacgtggagggcagacacctattattggctattgaccacacaatgcaatacacacatattat

SEQ ID NO: 32197 - DNA, 359 bp, Gossypium hirsutum
  unsure (1)..(359): unsure at all n locations
  Clone ID: LIB3120-022-Q1-K1-D1
caagtcagttgataaccttgcacctcttgccttttgtttatggttgtgtcttctagttaattagtttcatatggtacattcgtccaaaatgagatcttaaataatgtttagaatgagaatgtcgttgctgaaagaaagagaaaatggaatattagtcacagatttcccaagtcgggtgtttggtgagttttattcatatgtttcatgtatttataaatgtaattgctgaaagggagagaatatagaacagtattttgaagatttctgattctcactgaatattttctctgaacagttngatgttntcagtgtatgtngctagttaaaatatcttctttaacccacatatctttgaagtg

SEQ ID NO: 32198 - DNA, 330 bp, Gossypium hirsutum
  Clone ID: LIB3120-022-Q1-K1-D10
cccacgcgtccgcttcaacagctttttcaacaatccaaggtcgttgatgaagaaacaatgaatgttgggattgatttccctagagatttcgccaattcaaggttgaaagaaaccatgattctcacccataggttctccaaaaacatattcagaaccaaggagttgtttgcttgtaggacaatccaaatgctgatttcagggcttgttttaggctctatctttcacaatgccaaagatgatctcagcggagcagaagaaaaagtgggtctatttgcatttatattaacattcttgctttcatgcaccacagaagcattaccaatcttttta

SEQ ID NO: 32199 - DNA, 274 bp, Gossypium hirsutum
  Clone ID: LIB3120-022-Q1-K1-D11
cagtaattcatatttctctctcttgattatattttaaaaagctagatctgtttttttattggcggtgaatcgcgattgtcggcggtacttaatcgggaaagattttgttctaattagctaggctgattttcataagagatctgaggtttttttgaatttgagatgatttgagtctttagaggctttggtttttatattacagccttcaatttttggggaaattcctgccattttctgatactggtgaattttatgattggtgtttggtttgggt

SEQ ID NO: 32200 - DNA, 264 bp, Gossypium hirsutum
  Clone ID: LIB3120-022-Q1-K1-D2
ttccgaactctgaagctcactactccagagctgtacgccaatcatgctcacgttgctgacatgtcatatctcaactgctgaaggtctgtcgctttcatatgttcatgatgatcgaatgcagtttgagacttgaacgacttgatctgtgccaccatgagtggagcgacatgctgtcttcatggctgtggtgcattaaactcagatacactcatgcttgtcgtcaatgtcatgggattgactctgctgcattgatatatggctggc

SEQ ID NO: 32201 - DNA, 285 bp, Gossypium hirsutum
  unsure (1)..(285): unsure at all n locations
  Clone ID: LIB3120-022-Q1-K1-E1
aaagggctcttggcacgacttacgccagttagaacctccttaaaacacagcggctgcaccagctgatcctccgnctcccgctctgattgatgcctcatacgtcttgacatgactcgtcgacacctcaaagactgctgtgtcaatcgcagcctaggcttctccttcgatgacagtggggactgtgatgggtccctacatgcctgctgcaaagttcgatgtctcatgggaaaagggtcaacatggggtgattcaatgggccagaagagtgatgaggactagactggc

SEQ ID NO: 32202 - DNA, 187 bp, Gossypium hirsutum
  Clone ID: LIB3120-022-Q1-K1-E10
gcgacccaattgtttgcataaaaatgatgcaaaagaggaccctcatatgcatcaactgcgagtgtgacacctctcatcggatgctgtcgagacaagaaccgagaccagataagcaccattgatacacattgcttgaccactcagactacccaactcccgggcttttattaatacacaaccagctttg

SEQ ID NO: 32203 - DNA, 260 bp, Gossypium hirsutum
  Clone ID: LIB3120-022-Q1-K1-E8
ggatccatgtagagaagcaaacaacgtcgtgacgatgtaccatgcttacacaccaggcgtcaaacccattattaccaacaagacatttactgcagtcgagatctttaaccaccctgaacttgatgctgcagagcctagggatggtaatgagcatgattacactcttattcaaaaggatactatgtggcctgacagatggcctgatggaagattacttggaacacatggtgcagactactcgagtgcaggtgctgacaagt

SEQ ID NO: 32204 - DNA, 411 bp, Gossypium hirsutum
  Clone ID: LIB3120-022-Q1-K1-F10
gcgtatttgaagagattagaaagatgaaaatgagttggttttccttaataccgctgctgcttagtgtaccaatcaataatctgtcggaggctatccatggacataagctaccttctgctgttgcttctggaactgtatactgggacatttgtttccaacaagatttctcaaaggcccatcactttatttcaagtgcatcagctgcacgagaatgtgaagatggggattctaggccgagtcttcgacaagatgcgaaaaccaacgcgcagggagagatcatagctcgcctgccattctcagttaccaaacatgtgaagaaagtcaaaggatgttcactgaaacttgtgagaagcagcgagccatactgtgcagtggcctcatcttcaacattatcatcactgcatctgaagt

SEQ ID NO: 32205 - DNA, 388 bp, Gossypium hirsutum
  unsure (1)..(388): unsure at all n locations
  Clone ID: LIB3120-022-Q1-K1-F4
ctgcgtagcgacttcaacgtgataggatttgggctgatcggatggattgctccgtcaagcataccggcaatcaatggcaagagcttgacggggcttttgtttgagagcattggaaccgagcttgctcacttccctactcctcctcctcctacttctcagttttggttgtggttggtattatggcacttgggactgttcatcactcttacatttggacaaattgggttcaagggaaggactgaggactacttttaattattattattttatttatgaaatatgatattattttggtactctctctatcttccatcatttccctataattgctatgcactttgtttcctttatgtccctttcaatgcaaaanagacggattctcttcact

SEQ ID NO: 32206 - DNA, 378 bp, Gossypium hirsutum
  Clone ID: LIB3120-022-Q1-K1-F5
ttttagtagagatccgcgagaggttggaattgcaaacgattggaaatgggagtgccagcgttctacaggtggttagcggagaagtatccgctgattgtggtggacgttatcgaggaagaaccggtggtgatcgaaggtgtctccattccggtggatactagtaaacccaatccaaataaacttgagtacgataatctttatctcgacatgaacgggattattcatccttgtttccaccccgaagacaggccttcaccaacaacttttgatgaagtttttcaatgcatatttgattacattgatagattgtttgttatggtccgtcctcgaaagcttttgtatatggctattgatggcgttgcccctcgggctaaaatg

SEQ ID NO: 32207 - DNA, 347 bp, Gossypium hirsutum
  Clone ID: LIB3120-022-Q1-K1-F6
tgggccctctcggctccactccacccgtctgatatgggctcaccctgaatatatatccacaaaagctatctcttccatatcacaaccttttttttttctcttttaaaactttcctaatcagaaaaagaaatgaaaagaagctttatatagtctcgaaaccaacaatagataagtatagttgcctctaccccccacagcgtccctttccttctccgcctctttcttataatctttgcgtgtgcttgctctccttcctgttgtcttctgctttctcctattaatatctacacacacactcacgtcttattcagtacctcttcaaacttaattctttcttcctagttaac

SEQ ID NO: 32208 - DNA, 436 bp, Gossypium hirsutum
  Clone ID: LIB3120-022-Q1-K1-F9
gaacttttattatgagaaataggaggagtcatactaagtccttgttgccgaccttaaaacggttgcaaactactaacagtgtgtcaacgggtacagggtattttagtactaatgcacaactaaaggtttttgtcaaacccctgtcccaaactgagatgatgacagaaggaaaaaaggtctttgtttttagagtgccaccaaaaacacaataagtcataaggggtttaaagtctaaatgtaccaactggtggtggaaggttacccttgacaagaaaatgaacttgaaagtccaacttttgaggaatttattgggtgccaggagcaattggaagtaatggatcaagatactgggaccaacccatcggtagaatcattgcatgctttgaatgggtcacacggacacaacactgtgaggattttagcatctatcaacaat

SEQ ID NO: 32209 - DNA, 298 bp, Gossypium hirsutum
  Clone ID: LIB3120-022-Q1-K1-G10
tccacacgtgcgatcagataaacataggcaaagagaaaaatggcttctgctaccgctactgggtcagatcggcaggtgttagcgtcaatttcaagacgcttaagggccatatgatacacctccctactgcttgttgcgtgcggtcacacgctacataggtcaggtataccgtgcgtacttgttgatatgccgctgagcttgatacgaccaggaaaactgatgcctagcctaggcgggggctgttcaccatggttggatcacaggctccatggaggatgcagcttgcctgcgattggct

SEQ ID NO: 32210 - DNA, 367 bp, Gossypium hirsutum
  Clone ID: LIB3120-022-Q1-K1-G7
ttttgaaaactgaactcaactgttgatatcttccagaaatcttgagtttttcaccaatggctaccgatacctcattcagattgtccccgctgctgttgtcgctcctatgtatttctctggaaaaattgagtttggtgtcattaatcagtctgtatcagcttttagtcatatccttggggacgtctccttggtcgtatatcaatttcaagcaattagtgccttttcagcgatcattgacagacttggtgaatttgatgatattctggatagcagcagatccaagtctctctctgatcccatggagtatattaatcttacgtattctcatgtcagagggtcccaagttttggattctaatggatccaca

SEQ ID NO: 32211 - DNA, 254 bp, Gossypium hirsutum
  Clone ID: LIB3120-022-Q1-K1-H10
ctccttcgttttccaataattcgtaacaatgtgttgtcttacttcaagctgcagctaccccgttgcatgggatcaaggttgctgtggcatgaaagaccaatgtgccgctcatgtcctcacagagcgtgtcttaggccttccggttggagcctgttggctctcggctttcctgctctttgcttactgacctaaaagacttgactctgaagtgctttgttgcttcttagctggtttgtgtcgctcttgttacatat

SEQ ID NO: 32212 - DNA, 276 bp, Gossypium hirsutum
  Clone ID: LIB3120-022-Q1-K1-H11
tcgaatagccatttcctctaacatatacagctttttcacctgaaacaggttatcacttgattcctgctcaccttacgcagagatgcgtgtattctagtgtaaaaatcaagtccccttaattagcaattttttttctcccttatcttgtaaggaataaacacatcatatgttgataaaacataaatcagatagatacatgtacttttctgaaaacaaacttccaagaatggatgctttttcccattaagaaagcgaggagcgctcaaataaaaattt

SEQ ID NO: 32213 - DNA, 285 bp, Gossypium hirsutum
  unsure (1)..(285): unsure at all n locations
  Clone ID: LIB3120-022-Q1-K1-H4
gctcaacttcctggtgatatggtatatataaaggcaactagtgaaaagagtgcagaaatggtgactgaccaaggggccatatatgttacatcaaacaggggctataactggagagctgctgttcaagagaccgtctcagctactctgaatagaacagtttctagggggattaatgggggcaggtattacaccgggaccttttaacactgtgaaccgctctncggatggacgatatgtggctgtctcaagccgtggtaactnttatcttacatgggagcctggaca

SEQ ID NO: 32214 - DNA, 250 bp, Gossypium hirsutum
  Clone ID: LIB3120-022-Q1-K1-H6
tctcaggccctgcatctagcggcggcggtgctgcctacatcatctgctcaaatctgatggtgatgcctgtctatatttgtgtgcacaatactactgctccagagagactgcacatcacgtcagtacctcataacatacttattaagtcgcttatgcttgctaacaatccagctggttacagctcagacgatgtcaaagctgatgatgaaggtgctagtcgtgggctgctgacaaagacatggataggagc

SEQ ID NO: 32215 - DNA, 260 bp, Gossypium hirsutum
  Clone ID: LIB3120-022-Q1-K1-H7
actattggatgattgagatcattctgacatgaatggtcaccgcctaagaagttcatggggctcttcgtgcactatgacctgcctccgcgttgaccatatgtacattatcaccgcctaattgaggtgatcagagcacataccctgactactatacccagattacaactagcgagcacacttacgagatgatcgataagatgctgcgcatgtatgataaagcgatgatcaatacgcgatccatgcacgtgacagaatatatt

SEQ ID NO: 32216 - DNA, 205 bp, Gossypium hirsutum
  Clone ID: LIB3120-022-Q1-K1-H9
tcgtattacctttgttattggtacccataagccttctgtggaaattctatcttttgcacctgaaggtctaagagttcttggtgctggaacgatttcactaacgactattatggaaactgctattagtgggtgcattcctcaagacgtaaggctagctcttgttgatcactcttatgttctggcacgattgacgaatggaatgctg

SEQ ID NO: 32217 - DNA, 312 bp, Gossypium hirsutum
  Clone ID: LIB3120-023-Q1-K1-A1
cccacgcgtccggggactttcaatgacctagacaaattgtcaatggcgaatattgaagagaggagtccaaggttgtgggcatgtctgatagctgtatactgggtctctcttgtcacctatgtcctttcgtggaaggcttataaacatgtttctgcactaagagctaatgctttaatgtctcctgaagtgaaacctgagcaatttgctgttcttgttagagacttgcctgatgtcactccaggtcaaactagtaaggagcaggttgattcgtattttaaatctatctatcctgatacattctacagatcactg

SEQ ID NO: 32218 - DNA, 238 bp, Gossypium hirsutum
  Clone ID: LIB3120-023-Q1-K1-A3
gcggacccagctagggcaaactggttctgcgaaaatactcatagatataaacctcgatcttcctgcccgaaaaatgggtgaaatttaggagaataccacatgacctgctctctactatcatcactacaacgacgatgacgttcgggactctcaaactattagcacgaggaaacttgcccactttgtaaagagaccacctatggtggtcagaccaccaccaaagacgtccagtggcatt

SEQ ID NO: 32219 - DNA, 210 bp, Gossypium hirsutum
  Clone ID: LIB3120-023-Q1-K1-A4
gaaagaaataagacacccttgttttccattaataccgaaatttgtaaagccgttcttcattgggattaatatgcctctattatcgcaaatttagttttgaacttttgctctacggatctagatctgacagcaagagcggggatcttttttgttgcacgatttcgtgatgtacatccttttatctgggatcatataaggtttgatgtttac

SEQ ID NO: 32220 - DNA, 221 bp, Gossypium hirsutum
  Clone ID: LIB3120-023-Q1-K1-A6
gattcaaccgaatcttgctattggccaaaaataataaatcgtatcttactgtgcagcaaatgggcggaaagaagaggaatggcgtatgacctgaccttagcttgccttccaaccgccatctggacctccaagaagcccgggagcttatgctctgcgacttgatcaaatgctgacgtcctatgtcgatgccattaatgcttagatatggaaaggattaacac

SEQ ID NO: 32221 - DNA, 161 bp, Gossypium hirsutum
  Clone ID: LIB3120-023-Q1-K1-B8
cttccgttcctgctgagaagccaccaggtgagcttccttcaatggcaaagccacccattgcagtccgagcagtgacttggggctcctgtgaatgcaccaattgaccttcttccaattgcaaaaccggccatcacagttcgtccaatgaccctaccagtccc

SEQ ID NO: 32222 - DNA, 256 bp, Gossypium hirsutum
  Clone ID: LIB3120-023-Q1-K1-C12
ataatctctaggaacatttctccgtcaaacaaaattaagatcaattttaatggctgcatcctcatgcgattctctttcgtcatcgtcttcgttgatctgttcggcttcttcttcgcttcggttttgttttgtcgatcgttctttaatttctaagctgtcttctcatcttcagattcttagtcaaccttttacctgttattgacataattaagaagtaaaattcaatccaataggaatcgtctgcaacatgggaaaa

SEQ ID NO: 32223 - DNA, 299 bp, Gossypium hirsutum
  Clone ID: LIB3120-023-Q1-K1-C3
gccacgcatacggaattttagaactactcttctgctcatcaaaaatgcatgtttcaagcatggggacaaagatgcattgagagcttgtgtaaaggctatcaaatactgttccactgagcgtggaggatatcttcaagattttgctcatgacaaactaaatgagcttggggatgagcttcttgataagcttaaatctgctactaaagaagtgatcgatggagaagatgacgattctcttcttgggaatttcaaaagattgtacgaacttccattgtcaaggcctatatcacttgatgaac

SEQ ID NO: 32224 - DNA, 270 bp, Gossypium hirsutum
  Clone ID: LIB3120-023-Q1-K1-C7
atccttttttttttttttttaactaaagaaatcttttaaatatatattttggtgggactcatggcatggcgatggggaattagacaaaacccaaacagatgaaaatatccttgatcatcattcatgcactgaacatatatatatgcgcctaccaggatccaatacatcacctaaccaattgacaaccatatggcgcccgctgagcctatcctttaccctaactctgcttcatataccgttccctatctcaaacaatggctattacatata

SEQ ID NO: 32225 - DNA, 248 bp, Gossypium hirsutum
  Clone ID: LIB3120-023-Q1-K1-C8
cccccgtcgggccacgcgtgacctaatcctaccttctttaaacacttacctcataatatttctatactgtacatcaatacccccgttatttctccccatgttggatgagctactgcaccctcaacttcccttgttaacattacccgcttacttcacaaaactacttgtaagacatttcctaatatacttaccagaagtggtgtgttaaagacttatgaagcaacgcttcttaaaagattgactatttt

SEQ ID NO: 32226 - DNA, 399 bp, Gossypium hirsutum
  Clone ID: LIB3120-023-Q1-K1-C9
gcgcccacgcgtccgagaaactagtcactgagaccactgtataaagagggtgtttcaaggtccaccttggggcaggcatttcaaacactggctgccttgccaagcttctaggtggaccataccagctattcatcaagaagaaaaacctggtgttcaaggttgacaaggtgggacatcaacccttacacttacaccctttccactagactggctatctccacttcatgcccttcaacattcattgatgctaaaaaatgtttagctcaaaaggggatcggtgtatccaagaccgtagctctgttaatacccccggagtggggacttgcgccattcaactattgtgtagccttacttactcatcatcgtgattccttgtttactattttaatggattaaaga

SEQ ID NO: 32227 - DNA, 189 bp, Gossypium hirsutum
  Clone ID: LIB3120-023-Q1-K1-D11
ttctccttttggctgctcgaagaatgatactgatatatactccaacggttaagtcggctggtgcgagtgcttgctggtatactactcaaatctcaatgcgcttgagtacggattacttatctgcaggattccttagcgaaaggagctcctaggttcaattcgagttcaccaacttaccactttgacaag

SEQ ID NO: 32228 - DNA, 193 bp, Gossypium hirsutum
  Clone ID: LIB3120-023-Q1-K1-D3
gccattcattctccaaagccgtggctcaatcctttgcgcttttacattggaacaacctactgggacaatagggaatctgttagagtcttccaacatgctcaacactaatcctgaatatttataaagaaaaaacatctttaacataacatagagtaaacctgaaaccggtgaagctattggagattctaataac

SEQ ID NO: 32229 - DNA, 222 bp, Gossypium hirsutum
  unsure (1)..(222): unsure at all n locations
  Clone ID: LIB3120-023-Q1-K1-D5
aaggcccaggccggccgacgcatccaatccaatcactcccaatactttcataacatttcaccaacttcactctccangcggcnaacgcgtttaaccggtccaccatccttgctctcaaccaaacaccttttaattttaatggatcaaccacccgcacttctgctacaagctcagctttcatcgggaacaacttgaacaaactgaacactttctttaacaaca

SEQ ID NO: 32230 - DNA, 259 bp, Gossypium hirsutum
  Clone ID: LIB3120-023-Q1-K1-D7
ccaacaaccccaaattactcaaactcaaatgttcgattaaattgttaaggaagtctctgcgtatctttcgaaacttgggtgcgaccctcaaaacatcccatttaccccaatctctggttttgagggttacaacattatcgacagatctacaaacctcgattggtacaatggtcctactctccttgaggctctttaccacatcaccgatcccaaaatgccctctgataaaccactccttcttccacttcaagatttctac

SEQ ID NO: 32231 - DNA, 206 bp, Gossypium hirsutum
  Clone ID: LIB3120-023-Q1-K1-D8
cccacgcattcaaattttcagcccataatcaaataaatcaaaatataaaatatccaataacaatgtgccttaaggtgttcacttcttgcactgccaatccactcaaaaactcttgtctctcctaacctaatgctttcctttctttctcactctatacatgcttttccactaatatcaataccctcaagtcttctaattcacatgaa

SEQ ID NO: 32232 - DNA, 288 bp, Gossypium hirsutum
  Clone ID: LIB3120-023-Q1-K1-D9
ttctgacaagatctacaatcacttgcctctaatactacttcactttaggtcattcacttgttcgctggcgtaggctactgtatgttgagcatcgctgtatgcctaccttatcggactgctattgattcaaacctactcgtagatttgatatactgctcctcaatgtcatgtacttgctcatgcaactagcactgtcttccatgcacttattgctattcttaaacccacactattaaatctactgagcctttcttcaacacatctgatatccaacatatactttgacaa

SEQ ID NO: 32233 - DNA, 315 bp, Gossypium hirsutum
  Clone ID: LIB3120-023-Q1-K1-E2
gcgattttgcaagacgtgttcgtgctgcatctgttataaggtcgatgacaataaggatcctagtcgatggttaatttgtagttcggagcctactttcctgggaaactcttgtggcatgtcgcgtcatctcgagtgtgctttaaaacatgaaaagtccggtattggttaagataaacaacatgctgttcttgatgggagcttttattgagtggcatgtgggaaagcaaatgatttgcttgggtgctggagaaaacaacttatggctgcataagatacaaggaggggcgacattctctgttatcgcgtttctttagg

SEQ ID NO: 32234 - DNA, 212 bp, Gossypium hirsutum
  Clone ID: LIB3120-023-Q1-K1-E7
cgtacgcacacgcgtgcggatttgaaagaaagaatttttaagttattgggaattcaaaccaatcatgtgtgactatcaaaaataggggcgggggaataactttttggtcattcacaagcatatgaattcaacccttaaatcgacagaaaggtgaaacctgttaaacctttgaaagaaatgaaatgatgggagtacctggatttgacattatt

SEQ ID NO: 32235 - DNA, 324 bp, Gossypium hirsutum
  Clone ID: LIB3120-023-Q1-K1-E8
ttttgtttttgaaggacaaaggttgttgggatctttaaacacaaacaataacttcgtcgaatagcaagaggagtggcggtaaccaatcatctttttcttcgcactatgtggaaaataatgacaaacaatggactttattgctcattccgatgtttgctggggctaatatagctgtgtatgttgaaataatgtatgttaataacctgcctaataacactcatagatttgaatgtttgttgagtggctcagaacctctcatactttctttttatcatgagaaagaaaatcctcttttttgaccttctcctaatacatggtaaaaat

SEQ ID NO: 32236 - DNA, 429 bp, Gossypium hirsutum
  Clone ID: LIB3120-023-Q1-K1-F2
gactttttggtttttgaaggagaaatggcaagtggggatcttgaaagaggaggaggaagtagtgtgaagaacagggggaatagctataaccaatcatcttcttcttcgtactatgtggaaaataatgaaaaacaatggacttcatggcttgttccgatgtttgtagtggctaatattgctgtttttgttgtggtgatgtatgttaataactgtcctaagaacaatcagggatttgaaggtggttgtgtggctaggttccttggcaggctttcttttgaacctttgaaagaaaatcctctctttggtccttcttctaatccattggaaaaatggggagccttaaactgggaaaaggtagtgcttggcaatcaaccgtggaggctaataactggaattggcttgaacgctggggtaattaatttacttgca

SEQ ID NO: 32237 - DNA, 282 bp, Gossypium hirsutum
  Clone ID: LIB3120-023-Q1-K1-F3
gcggggaaaactattagctgctctgttttactaactttaatatcttgcttttccttgcagttttgtgctgctttagacaccataacgccatcaaaacccatcaaagaccctgaatctataatctcccatagtggagttttccgattgggattcttcacctttgctaattccagcaatcgttatgtagggatattgtaccatcaaatccccctacaaacagtcgtatgggtagcgaacagaaacaagcctctgaaggactcttctgggattctcaacatatca

SEQ ID NO: 32238 - DNA, 262 bp, Gossypium hirsutum
  Clone ID: LIB3120-023-Q1-K1-F5
cccacgcgtccggtcagacaaagcctcaatgctggatgaagcaattgagtattggaagtcacttcacttgcaagttcaggtatgtctttgcttgtacttaatgagatacatgtgaaattttgtttgatgttagctcttacaagttacaactctgtaacaaagagtggtttgactgggttactgtcctttatagcaattttgttttgttaaaacgtggagaataaaagaaacttatgtctctgttccatctagaaacatgttt

SEQ ID NO: 32239 - DNA, 148 bp, Gossypium hirsutum
  Clone ID: LIB3120-023-Q1-K1-F7
cccggaaggcccaggccgacccacgcctacagattgatatgacatacactgctacatacccacgttcagcaaagccttacaaacagggataaatggataacaaaggcggggcctggcctggacatgcaaacatagtcgattctatcac

SEQ ID NO: 32240 - DNA, 242 bp, Gossypium hirsutum
  Clone ID: LIB3120-023-Q1-K1-G5
ccggaagagccacgccgacccacgcgtaacgaataaaataacaatcctgtttaaaccctcgtcgggtgtcccccaaaacaggaaatatggaacaaaaacacgggttattactgtgtattaaatgaatacctcacttaatacaaactcctgtttaacccctcataacaatgacgtttcttcataactttactcaaaatccatacaccctttcaaacccatatataattcttctacttaatgcg

SEQ ID NO: 32241 - DNA, 251 bp, Gossypium hirsutum
  Clone ID: LIB3120-023-Q1-K1-G8
tcggtccctccaatacgatacttttctacgggtacctgctggtgggacactcccatggactaagtgatttatccacagtggtacggggctatcaaacaagctcctaaagactatggctcatgctaccatattattttctttggaaaacggcctatgtttccttatataatatatgtataaacacttattcacgcgaacctgaaacgaacttctgcttcttgtgggcgcattgcatgaaaggttgaaagcaa

SEQ ID NO: 32242 - DNA, 297 bp, Gossypium hirsutum
  Clone ID: LIB3120-023-Q1-K1-G9
tgctgaccgcctcaatggacggagcattaagcagtgaataaagagatatgttacagaatcttaaattcttacaacccaccccacagctactttaacctccaacttcagctgcccctctcccacagcttcattccacttgttttcccattctgaaacagttcaaaatcttccggcgagagcttacaatttgtagcaactcctcactgcttctttctcttaggttcttaagcccttgagtctaatgcaaaggctgaagaaagttcacccaacgataatcaacagaaagaagagaatgtt

SEQ ID NO: 32243 - DNA, 290 bp, Gossypium hirsutum
  Clone ID: LIB3120-023-Q1-K1-H12
atttccttggacaagagacacctttgactagcttaaaagcaattgatcagattgatctacttagggagcagcagaagattttgtctggagaggtagcacttcattcaagtgccttaaagcgtttgtctgaggaggctattagaaacccccagaatgagcaacagattcaagttgagatgaataagttgagtgatgaaataagggggaagaatgaacaaattgctttgttagaaaagcaaattgctgaatccatcttggctttacccaacaagatggagaaatcagaaata

SEQ ID NO: 32244 - DNA, 256 bp, Gossypium hirsutum
  unsure (1)..(256): unsure at all n locations
  Clone ID: LIB3120-023-Q1-K1-H8
ctcggcaactttcttttgtggagatgttagtgaggaagctaggaaccttgtgaaggtaacgaaagaaagcctagataaagctatatcaatttgtgcacaaggagtggagttcaagaaaattggcaaaacaattcatgatcatgcagataatttcggttatggtgttgtccggcaatttgttggccatggggttggacgggtttttcatgctgatcctgtcgctctacacttcangaacaacgatggtggacgtatg

SEQ ID NO: 32245 - DNA, 400 bp, Gossypium hirsutum
  Clone ID: LIB3120-024-Q1-K1-A8
aagaaagaggctgcaaatggaaaggaggggtctaaaccaccagcaagtgaagaggcaccatcgaaagtcaccaaacagcgggtagaagctgcaaagcaatatattgaaaaccattacaagaagcagatgaaaagcctccaggaaagaaaggagcgacgtgatattctagaaaagaagttggctgatgctgaagtctctgaagaagaacaaaacaacttactaaagtgttttgagaagaaggaaacagaatacatgcgactccagcggcataaaatgggtgctgatgattttgagccattgaccatgataggcaaggggtgcatttggtgaggttagaatctgcaaggagaaagcaactggtcatgtttatgccatgaagaaggctaagaagtcagaaatg

SEQ ID NO: 32246 - DNA, 420 bp, Gossypium hirsutum
  Clone ID: LIB3120-024-Q1-K1-A9
gcagaaaccacaaaggatggaatcaaagttagggttatagccggtgaagccttgggaacaaagtcaccaatctacacaagaaccccaacaatgtatttggatttcactctggatcccggaactcacctccaacaaccgatacctaaaccgtggaacgcctttatttacatattagaaggagagggtatctttgggcagtcgaaatcatcggcgactgctcaccatttgcttcttctaggacatggggatgggttagaggcatggaacaagtccactaaattgttaaggttcatattagtaggaggtgagccattggatgaaccattggtgcaatttggaccatttgtgatgaacactcaagaagagattgatcaaacaatataggattttgagaactacatccatggatttgagaaagca

SEQ ID NO: 32247 - DNA, 305 bp, Gossypium hirsutum
  Clone ID: LIB3120-024-Q1-K1-B11
ctcttttctcagccctttcatggaggactacaccctttccatacctctcctagctgcccccggcggtgctcttaccaccaccggggccgctaccagctgcgcaaccaaaaaagatgatgaaaatggggttttctcatccggttccagtattatttaccgtcttcttttggtaattctcatcggaacaatctccatatgggcaaaccacgaagcatcaaaaggattcaaggtaaccataattaacgccgccgccaaagaatctccggcagggcgacggtttgatctcttttacgtatcaaacgatg

SEQ ID NO: 32248 - DNA, 258 bp, Gossypium hirsutum
  unsure (1)..(258): unsure at all n locations
  Clone ID: LIB3120-024-Q1-K1-B9
gacacacgtccgaacacgcgtccggaagaagatcaaatcctccatcaagaaaacgtttctgggcacacatgaatggattgtctgtgccnacaacatttccggcaactctaagtttgactgacttatcatgaacagaaaataatcaactcgaggagaatctcatatcaaggccgccgagccccaaagcgaacacatcttcttatgttatctgtccaataccaggtcttaccgctcctccatcatcgaacatggctgatc

SEQ ID NO: 32249 - DNA, 215 bp, Gossypium hirsutum
  Clone ID: LIB3120-024-Q1-K1-C2
ctgtgctccaatatattacccgggtgacgctgatacataatgcaatgaattgaatgaatgttgcatggaggtacagcttcttgcgtggaccgattgcatgacttgactcttttacaagctgtataaacccctcctcttttcttcttcttcgaaacatgtacctttgtactgatactctgtttcatcttcaagtacaaggggatgttcaagcaaca

SEQ ID NO: 32250 - DNA, 366 bp, Gossypium hirsutum
  unsure (1)..(366): unsure at all n locations
  Clone ID: LIB3120-024-Q1-K1-C9
ctgaaaaaccccaaagccatagccacagccacagccaaaggcgatggccatttcttgtctgagactatccttggctggatggctggtgaaaactccaaggccaagacctcctttgaaagtaaaaccttttcgaatcatttgcactgctcagtcctctgtagtagatgaaaaggctcttccatctggacagcgtgaggaggatcatctccgggtttgtggagaacgagaagagcatggctgttttcaatggcggcgattttagggaggtaagttcctccgcgatgcaaagagttgctaagactgtagacgcatacctggcggagatagcaactgtagttgaactctncatctncaagttcaacggca

SEQ ID NO: 32251 - DNA, 272 bp, Gossypium hirsutum
  Clone ID: LIB3120-024-Q1-K1-D6
aaaccttataacaaggtttaagtcaacatgaaaatgtgtcgtttatttcttcaactattcctgggtttggttctcctaccggggcgtgctgaaccagaccctgacccacttcaagattactgcattgcagacactaaatcccctttgtacctcaatggtgcaccctgtctcaacccaactctagctctttcctcccacttcaccacctcggctctagccaaacccggtgacaccaaggctaaccaattcggcttcagtgtcaccctaaccac

SEQ ID NO: 32252 - DNA, 248 bp, Gossypium hirsutum
  Clone ID: LIB3120-024-Q1-K1-D8
gcggttctttgaaggggattgattcaccctttggttttttctactcatttctcaagttactgggactaaatattaccgacttctactactgtcttttcttctgttttgccaatacagctaggttttcctttaccaatgaccgtctagtattgggcagtagccaaataatcaagtatagagaaggcttaatgggacacacaccccacacaacattctttacaaaaggatgaaaggagtctatcatgcct

SEQ ID NO: 32253 - DNA, 321 bp, Gossypium hirsutum
  unsure (1)..(321): unsure at all n locations
  Clone ID: LIB3120-024-Q1-K1-E4
cccacgcgtncgcaaaaatttctccaatttcctcacaaattttcatttctattttgagagatttaatttgacatcatgaaacatggagtaaatcggcctccaacccctgatggtgcagaagatcaagggaatgaacccatccttcaagaaattattaatatcaagttaattgaaagcggggaaaaagagagattaatggaaatgttaagagaaagacttatagaatgtggatggaaggatgagatgaaagctctttgcagagcatatgttaagaagaaaggaagaaataatgtcactgtggatgacctttgtcatttgatc

SEQ ID NO: 32254 - DNA, 323 bp, Gossypium hirsutum
  Clone ID: LIB3120-024-Q1-K1-E5
agatcatgaagaatttgttttcattgaagaagattatgatgttgatgataatctttcccatggggaattcattgattcctccgtgaccgattctgatgatgccgatgatgatgtatcgtttcatcgtggtgaattatccagaagaaacgtagagtcggttatccctttcactttcccttttccccctataacggaggtgaaaaagtccatcccaattcctgctccgattcaagatactgatgatcatgatccatcacatgatggatctgatgatcaagatgatgatgttgatgcatcatttcatcgtgatgaattatcgagaa

SEQ ID NO: 32255 - DNA, 348 bp, Gossypium hirsutum
  unsure (1)..(348): unsure at all n locations
  Clone ID: LIB3120-024-Q1-K1-F1
cggacgcgtgggcggacacgtgggcggacgcttgggcggacgcgtgggcggactcttntgcggacgcgtgggcgacattacttgtgtcgcgagcaatggcngtagaatgcaatgcatgcaggtgtggcctcctactgggaagaagaagtttgagactctctcatacctccccgatcttacacccgtgcagttggctaaggaagtagattaccttcttcgctcaaaatgggttccttgcttggaattcgaattggaggagggattcgtgcaccgtaagtactctagcttacccacgtactacgatggacgctactggaccatgtggaaggctgcccatgttcgggtgca

SEQ ID NO: 32256 - DNA, 344 bp, Gossypium hirsutum
  unsure (1)..(344): unsure at all n locations
  Clone ID: LIB3120-024-Q1-K1-F2
gctntaacaaaagagaagaaaaagcaaatggaacacaagcagttcaaagggcacgtgatacttgtgccatgcccaagccaaggccacatcgaccctcttctccaatttgctaaacgtttagcctctaaaggtgtcaaggcaacactagccaccacccactacacattcaattccatatgtgcagctcacattggggtcgaacctatatctgatggattcgatgaaggtggcttttctcaagctggaaatgtagacttttaccttaagtcattcaaggaagaagggtcccgatcgctgtcgcaaactaatccaaaatttaaaagactctagcacctctgttacct

SEQ ID NO: 32257 - DNA, 334 bp, Gossypium hirsutum
  unsure (1)..(334): unsure at all n locations
  Clone ID: LIB3120-024-Q1-K1-F9
cccacgcgtccgcccacgcgtccgagcagaaccagatttccgttgcggcgttgcttttagccgttttaaggaaatccatggtgggctgtcntgttgatggagaagatgaagcgatgcattccgccgttaataacatggaaatcgggtggccaaccaacgtacgacacgtaagccatgttacctttgatcgcttcaatgggttcttgggtcttccccttgaattccaagttgaggtaccgggtcgggttccatctgctagtgcgagtgtgtttggcgtctcagcggaatcaatgcaatgctcattggatccaaaaggaacagcgtcccactatac

SEQ ID NO: 32258 - DNA, 320 bp, Gossypium hirsutum
  unsure (1)..(320): unsure at all n locations
  Clone ID: LIB3120-024-Q1-K1-G2
cccacgcgtncgctgtaaatcaattcattgattagcaatcattcaacatttctctctcaaacgccattcgtttacgttcttaaattcattggtcctgcttctgtataaacccaaagaaaaagttcaaagcttttaccggaaaagaataaaaaagctaaaaaaatgggttctcttcagctttttcacagcttttcgcattcagtttctgcggcgaccaatctccaccgcccgttaaacaaagggagagtgaatgcatctctaaacatggacgtggaagcaccgaatccattgaaattgaagtcgaatggaagcaatgaagt

SEQ ID NO: 32259 - DNA, 311 bp, Gossypium hirsutum
  Clone ID: LIB3120-024-Q1-K1-H8
cttacgcgtgggctaatacccactactagcaatggcttcctcaatgatctcatcggctaccggtgccactgccggtggggcacaggctaacattgtctctcctttcaccggcctcaaatctgcctctgctttcccagtcaccaggaaagccaacaactacattacttctctctcaagcaattgcttcatagtgcaattcatgcatgtgtggccttctacttgaaataataagtttgatacttctttatacctccctcatcttacacccgttcatttggctaaagaaagtgattaccctttttttcttaaaa

SEQ ID NO: 32260 - DNA, 157 bp, Gossypium hirsutum
  Clone ID: LIB3120-025-Q1-K1-A1
aaaagatgggagacgtaggaacttcccatttgtgacaatggcttgtgtacaaaaatgggggctttgacgatccatgaatggcacgtggtctgcacaggtcttactacagacgcatatgaacctccctatgataaccagttgaagttttgtgccacta

SEQ ID NO: 32261 - DNA, 297 bp, Gossypium hirsutum
  Clone ID: LIB3120-025-Q1-K1-A4
atgagcctttcttaactaacacgtgcttgccgtttcttcggtgagaaagcattaaccttggtggggcagtttggttttcaggctactcaaaataacacgatgcctggagctactgcttcatacctcgagcgaacagaccattggacattgtctgtaaattgatcttctactagacacaatgctggttaacgctgggatatgagatgctgtaacaagatctacttgatcgctgatgcggtaggcatgaagatatataggtgtatacagaatgctcgccctgacacacccatacttgat

SEQ ID NO: 32262 - DNA, 423 bp, Gossypium hirsutum
  Clone ID: LIB3120-025-Q1-K1-A5
gtttttcttcaccttcagggaagggtccttctcaacctgcccctaggtttattgggaatgtgatagcttttgtgcttaacttggtaaggactcttccgtatatacaatgcctttgttatggaaagggcaactatgcaaattattcttatagtcttcattttcttaagattggaccaaagggtccggaatttgctcgatattcacttgactaccatactataaggaactatttatatgtgaatcgcacctggggaaaacaaaggtaaattctactgaccaactaatttataatacactcaggagcagagttgtttttaattatgaaaacatcaaatgtgtgcagagttgatagacatattccttcatacgcaaagaaactcgtggatgcttacaaccagaatggtgttattgatcaaatgctta

SEQ ID NO: 32263 - DNA, 321 bp, Gossypium hirsutum
  Clone ID: LIB3120-025-Q1-K1-A9
cccgaattgccgcgcatccatccacacctaacgaccacgcgttcgaacactcgtacggcctctcttactaactggtcctacatggggcaaggtgccacactatggggcgctgcatatcacactgtaccacatgcaataagctgtcttcttcactgcgacataaagaggaaccatacacttttccgctcttgcattggtacccaatgataaccctatcatggcgctgacactagatagattcactatatggcagccgccccatcacgtaagtcttgccacacatgtgatgaacgatgttgctactaacttgacccatactga

SEQ ID NO: 32264 - DNA, 433 bp, Gossypium hirsutum
  Clone ID: LIB3120-025-Q1-K1-B9
gaaagtttgtgtgctcttttggaatcttctggaaccaccatctcattggcgaagcgggcggcggtgctgcttgcgggccttctttctgaatttgaaggtgtagtgtcttcggcttcgttgtcctcaactcgtttgccgattcagcgtttggtggaagccttaatcgagtgtgagaatcggcatgttcaaacgaatcaagaagtggtgtacactgctaacctggtggaagatgcgccgctatcacccacggatggttcgacacgaggaggtcgttcggagctgcgtggccgtgggaggaacttccggcagcgtctccagtgtcagatctgcttccgttttggtcacgttgctcagagatgctattaccggtaccaccgtgacgattcttctccgatgcagattcaattgccaaaccctcgtgattatggggatg

SEQ ID NO: 32265 - DNA, 427 bp, Gossypium hirsutum
  Clone ID: LIB3120-025-Q1-K1-C1
cccacgcgtccgatctggagcacggaatatatgaaatggatcacaaagtatttgaactgtgattgatacttaatattcaaacctcgcggccggactcaaaaaaaaaaaattcaaagaaagagttatattatttataaatcgaaagattttttattctttcaaactctcatttagtttatgcttattttgatcaaaggacaaacctttcttttctttgcatttttatttattatatctattctattgattgaataagtgatgatccaatggttcttactcaaagaatctttggacttagtttgaaggttttattgaatcatcgcggttctggtatgaatctgaagtttcaattgattcatagggtcttaacaagagaattcctattcaaacgaaagaaaacaagaatgaagccacatttcatacaaag

SEQ ID NO: 32266 - DNA, 338 bp, Gossypium hirsutum
  Clone ID: LIB3120-025-Q1-K1-C12
ctggagtacaggctgctaatgcagcaaaaatgagatgcatagctgtgacaacgacattgacagaagagactctaaaacctgctggtccatcaattatcagaaatgatattggaagtgtttcacttgatgatattctcagtggtggctcaggtggttatagtctgttgtcctgagaatatggtgcaaatgtcattttgtaccattaacattgtaaaatgatgatgctttttagcattctttttgttttttttatggaagcacatgatacattcgctcgtgtaatttgtctcctatgtagtggaaaattttcaattctattgataaagtccatccttgtg

SEQ ID NO: 32267 - DNA, 332 bp, Gossypium hirsutum
  Clone ID: LIB3120-025-Q1-K1-C7
gtcaaaccttcgctgctggaattcccttttagcaaaagctgtctcaatgatgggcacggtttccaataacactggctatcaatcacaaaatctcatctgcgctcgttacaccgaccacaattatttctatgacctcacatgcgtcaagaatggcaacacctacatttcatatatacaaagctatgataagacactacatagcatgcgggggaggtctcactactgcaaagaagaagttcgagactatatcatacataaccgatcttacacaacgacagtactttaagtgacgatataaatgtgtttgctcaaaatgacctccttgcttgcaa

SEQ ID NO: 32268 - DNA, 274 bp, Gossypium hirsutum
  Clone ID: LIB3120-025-Q1-K1-C9
gccacaccatcgctaatagcatcgactgctatccaaggctaccttaatgatcggaacggatactatttgcaatggctgtttataacacacactcatgtgagctaatatcaccgcccactattatgtctgtgacctcactggcattcacaatagcaactactacctaacttttgttccatgctacgacatgacagttcaaagcatgctcttgaagtctcctacttaaaagaatatatgcagaattctatcatacataccagatcttacataaata

SEQ ID NO: 32269 - DNA, 436 bp, Gossypium hirsutum
  Clone ID: LIB3120-025-Q1-K1-D2
gaaaaaaaaaaagaaaaagaaaaattaaatgaaaggaccatggtctaagcatggaaaagatgagattcttctctccctccattttcagacccccttcggtctcttaacaaccaaagcccattttcctctcagttttttttctttttccttttatttgtgatttaaattcaacacattttaatactactagcaacaggaaaacagggtgagaaaaaaaaaggggggagagtgaggaaaggaaagaaatggaagaagagggagtagggttagcattagcaagagctacagagctgagattgaaaatcagcaactgcatcacaaaagccacctccggaaatcctgtttctccctacaaacaaagccaagaaggaaaacaaactgataaaaatgctagcttgaatggagacaaaccccatcaaactctcggtggagctga

SEQ ID NO: 32270 - DNA, 440 bp, Gossypium hirsutum
  unsure (1)..(440): unsure at all n locations
  Clone ID: LIB3120-025-Q1-K1-E10
atgagatctaagatgatgggttgtagagaggaacatcagagtactcatggttcggtggggggtgggaagcctaacgcattgtgttatttatccaccaaagtctagcattgttgctgaggaattggaaagaagaaacaatgactggtttgttaggaccaaagttgcaagtgatttaatggtgcaggttggagattttagcttttacttacacaagcttgctatggtttcgaaaagtggatatttgaatagacttgtatttgcaaaaagaagtgagggacatggacaaaatggaggcaacctcaagattgttttggatgaccttcctggtggaaccaacacctttgaatcaattgtcaacttctgctatggatttaacgtggatgtaacaactaccaccattgctccactctattgtgctgcanatttcttggaaatgagtg

SEQ ID NO: 32271 - DNA, 213 bp, Gossypium hirsutum
  Clone ID: LIB3120-025-Q1-K1-E11
tatcacacctacgaccattctttttatttttaaacatcatattactcattaacgcgccctttttacaaaaacctcgccatcgtattatttatccaccatattctaccattttttcttccccatttcaaataacaaactatctctccttttttaccaccaaatttccacctcatctaatacctcaccttctatattttaccttttacttacaca

SEQ ID NO: 32272 - DNA, 174 bp, Gossypium hirsutum
  Clone ID: LIB3120-025-Q1-K1-E2
ggtatatcgctgaacctatcgctgcctatcagacttcgttcaaagaatagcatcactcgggcaagggaaaaaaaattcaaggtcgcaacattctatgagactcttttgctgacacatttttcttgccaaatacgttctctctcaccatatcatcttgaataatcccattgctat

SEQ ID NO: 32273 - DNA, 430 bp, Gossypium hirsutum
  unsure (1)..(430): unsure at all n locations
  Clone ID: LIB3120-025-Q1-K1-E6
ggtttttaaagcccggttccaggtgggctgtggggtcgggctttcgagccccacaaggaccgaaacagaggcccagaccctacctctcggaattcggtctcgacgacggagatccgccctccgaaggcggtcacggggcgtccggtaattgatgggtggtggcagtgagtaggtggagcagagggcagacgatgggacgtgacatgcggcgcacatggtcctggcgtgcggcgttggaggagggactagggttaggatttcagttgtgttttactgaaacttagttaatgttttgggtcgtcgggctttgggcttgtaacttgggttttttaatttgggctagtattgtaatgtgaactggactattatttgggntttattattattatttgctttgattctttggccccgggcaaaaatgggtctttcc

SEQ ID NO: 32274 - DNA, 314 bp, Gossypium hirsutum
  Clone ID: LIB3120-025-Q1-K1-E7
cccacgcgtacgaccatttgttgaaagaaaagaaataactttacttacaaaagggccgggggccaaacatttggcatttgaattaattataccaatgaagttaccgtttttttatgggggtaacggataataaatgggcgaccccttgaactggcccgagtccgcttaatcaaagaaaggtagccatttggatgaagtgaaacgtatggatgatgagtacaagaagccagtggttcttcttggtggagacacgttaacgatagctgaagtgacggccatttgcaacagcgacgttacctttaaagttgaactct

SEQ ID NO: 32275 - DNA, 174 bp, Gossypium hirsutum
  Clone ID: LIB3120-025-Q1-K1-F7
cccacgcgttcggacagccataggatattgctgactaactagacataaaaacgcgctgggacctcattgctgggttgaaggactgaacactcccataaaggcaagcttgaaactaataaagattagtgcaattaccgggctgctttacaattgatgtaatctaccttgatctaa

SEQ ID NO: 32276 - DNA, 338 bp, Gossypium hirsutum
  unsure (1)..(338): unsure at all n locations
  Clone ID: LIB3120-025-Q1-K1-F9
cccacgcgtgcggagatccattggtttttgcagatcaaagagatacaaatgggggtggggattccattgcgcagaggatggagagagatcaccctaaaagaaaagcttcaaaataatactattatttcaattactgggttcctttacaatgaatccatgttaccttgatctaagaagctcaaatcttaatcttatctctcaccccatagaagaaaaacagaataagaataagtaggattgacttctgagataataaagcctaacactgtgtacaaagtcgccttatttatattcctttcgttngctgacgaaggagacaacaggacggtacaaatgtc

SEQ ID NO: 32277 - DNA, 395 bp, Gossypium hirsutum
  Clone ID: LIB3120-025-Q1-K1-G10
cccacgcgtccgggtcttggtgtgaattggggtaccatggcatcacataaacgtcccgcgaaaacagtggttgagatgggaaaagacaatggaataaagaaagttaacctttttgacgcagattcaactactatgaatgctcttgccggaagtgatatcgaagtcatggttgctattcctaatgatcaacttcttgccatgaacagctataaacgtgctaaaactgggttaggaggaatgtcacaagatataatttcgatggaggtgttaacattaagtatgtagctgttggcaacgagccgtttctcacaacttacaacggctcgttcattaacatcacgttccctgcgcttgaaaatattcaaaatgcacttaacgaagctggggttggggac

SEQ ID NO: 32278 - DNA, 270 bp, Gossypium hirsutum
  Clone ID: LIB3120-025-Q1-K1-G9
atttacacttcatttctagggccttcttgaaaggctttgctaagctgactttcgaaggggtgttctttatatgcggctgagtaaacaaacgaaagaaaagtgattgaatttgaatccttttgttttttttctcggcgaccaaacagaagtttctttttttttcgtatcattttctattaaaggatctggcggctactggttccatttggggagaattttcttttaagatctttggaagaagccgcctcttttgtttgtcacagcggacac

SEQ ID NO: 32279 - DNA, 384 bp, Gossypium hirsutum
  unsure (1)..(384): unsure at all n locations
  Clone ID: LIB3120-025-Q1-K1-H6
ggcgagcggccgacacattaattgttgttagtcagggactgattgtcactttggttggggctccaactgttgccatgacgacaaagaaggctactgagggtgttcctggtgttgggaaagtggtgcagaagttacccaattcgatttatgcatcccttgtgacccttgccattgttttgtttcagacttcgcgtgaagaggtttagttgagcactctatcttttctgtcaaattaccgnctccgtatatgagattatatctcagtttgtataagatgtctttcgagttggcttaactatccgaagaccaacatttcttgaacttcgttatagaaatattaatttcggggaatgtctataatgaaaatgtaaatgaacgttgggg

SEQ ID NO: 32280 - DNA, 403 bp, Gossypium hirsutum
  Clone ID: LIB3120-025-Q1-K1-H7
gtctccctacctacaattcattttcatttgctacacttatctttttatcacctggtggggtaaccacaatcgatggtgggtcaacgaccatcgctgttctcaggtgcctcatcttgagttctactattttatgggtgagctgaaaccgacacagcttcaaactactaaaccatatacgatgcaacatcatcttcaacattatcatattacgactacattattatcgggaggggcaccgccgcgatatccattaactgccacattatttgaaaacacgcacctctagctcattaaacactgtagatcatgttatggtaaacctaacctaactcatatacgcaagctttggttgctgcttatcttacctttcttaggcagccgcatcacaggggttcatctccga

SEQ ID NO: 32281 - DNA, 216 bp, Gossypium hirsutum
  Clone ID: LIB3120-025-Q1-K1-H9
gtcacgctacctacaattcattttcatttgctccacttatctttgcatcagcttgtcgggtaaccacaatcgatgttgaagcaacgaccaatgctgttctcaggtgcctcatcttcagttgaaccatactatgggtgaactgaaatcgccacagcttcaaactaataaactatatacgatgcgacatgatctccaacattatcgttttacgactac

SEQ ID NO: 32282 - DNA, 365 bp, Gossypium hirsutum
  Clone ID: LIB3120-026-Q1-K1-A12
ttttcatctatcctattctgttattgatttttttcattatttttatgttcttttagataagcggttgttttcattatttaattcgttgggcatttgttgattatagtttcattgttataatcggcgttttgcatttttttgggtgcatatggcatttgaacaatttgttggataatttttattttttgcaattttctttggcttgttactgcaaatcaaatagattctttttataggcaggcagtggtagaaattcaagtgttgtgcattggtattaagtactatgtttggtgttttaattttctatatttttggattgcttgacaccaatcacttggatacatgcaggcttctttggcgtttac

SEQ ID NO: 32283 - DNA, 190 bp, Gossypium hirsutum
  Clone ID: LIB3120-026-Q1-K1-A2
acgggtaaaccaaaatacgataatggcgaccactgctgcttctatggcgactcaaatcctgaacgggtatacgtcgggtgttgcaggaggactaggtctccccaacggcatttggcgatcctcggttaaagtatcttccggtaacaccaaaaccccttgctttactgagactgctggttaatgcaacaag

SEQ ID NO: 32284 - DNA, 327 bp, Gossypium hirsutum
  unsure (1)..(327): unsure at all n locations
  Clone ID: LIB3120-026-Q1-K1-A4
ctcacatctggagatgaggaagaagtgcttcaatgtctangacagctaaaggatctttgggggcggagagacatgcaccgggagggggtgatcttggagaactatatatcagttcttattcaacttcttggtggaaaaaatcgtgatataaggaatcgtgttcttgtcatacttcacattttgacaaaagatagtgatgatgcaaaggatagagtggcaaaagttgatggtgcaattgaacttgtagttcgttccttggggcgtcgcacagatgaaaggaggttagcagtggcattacttttggatttatcaaaatataacgtctta

SEQ ID NO: 32285 - DNA, 153 bp, Gossypium hirsutum
  Clone ID: LIB3120-026-Q1-K1-A7
cttcctttccagcacaaactaacattgtcgctcctttcaccagtctcaaatctgcctcttctttcccactcaccatgaaagccaacaacgacattacttctctcgcaagcaattgccgtaaagtgcaattcatgcaagtcctcttcttctact

SEQ ID NO: 32286 - DNA, 314 bp, Gossypium hirsutum
  Clone ID: LIB3120-026-Q1-K1-A8
agaaacttacgcgggggggcgggagcggacaattataacatcatccttgtctaaaacttttagtgttacaggatggagaattggatgggctattgctccagcttctgctgcttctgcaatccaaaacattcatatccgaattactgattcagctccagcacctttccaagaagctgccttaactgctttgagaagccccattgaatacttcgaaacgctgggaggagaatacgagttaaaaagagatttctgtatgaagttgctcggttcaatcggttttcggattcaagttaagccccaaggttccttatttc

SEQ ID NO: 32287 - DNA, 367 bp, Gossypium hirsutum
  Clone ID: LIB3120-026-Q1-K1-B1
gagaaagacgagcacgagcctttgtatttggcatgcgagtatcgattgaaagtaaggaggttgggggaagatcaacccgcggttgataacgctcactaaatttaggcataagcattccaccaaccaatggccttctttgatgcattattctctccgctcttgcatgctgaactactggcaagtcttatgtataaacttaggaactaacctactaacacgtatgcatatttagtggctgacacttccttctatgctacattataatcgacaacaaaaactactagcgtcgtagatgtgacagctttgatacacgatgatgttcttcaacaccttcatgatgctgactaataccttgatgtttaaagac

SEQ ID NO: 32288 - DNA, 246 bp, Gossypium hirsutum
  unsure (1)..(246): unsure at all n locations
  Clone ID: LIB3120-026-Q1-K1-B3
aaccanccaaaaatttgtcaacctacaccttaacaattgcaccagcatcttcaacatctgtttggaaattaaatggttacagggtctgaaacttcctcacatgaatgacatgaaaatatgtcctaatcccaaccaactccaaaacaacaaagctgtcaattttgctgaacaggaaaattttcaagataatgattattacgatgattactttgatgatcattgccatcttcatcattatgattattt

SEQ ID NO: 32289 - DNA, 391 bp, Gossypium hirsutum
  unsure (1)..(391): unsure at all n locations
  Clone ID: LIB3120-026-Q1-K1-B6
aaaacgtctgtaacaagatgtgttactattttgttttatgtgtacgttttgaaatattcgatgcctctactttttaatgccgacgtctctctacttcttctgtattagcaagtatctctaactaaaagattgcgagcctttcatgtcgnaggaaaaaaaaaaaaaaaaaaaaaaaaaaaaaaaaaaaaaaaaaaaaaaaaaaaaaaaaaaaaaaagggaaaaaaattaaaaaagaaataaaaacaaaaggaaaaaggatacataaaaaaaaataatataaaaataagtggtaaaaaaattaaaaataannnggggggggggccttttaaaggaacaaattttattgggggttggagcggaagtaaatttttttttatggggcaaacaaaaa

SEQ ID NO: 32290 - DNA, 314 bp, Gossypium hirsutum
  Clone ID: LIB3120-026-Q1-K1-C1
cttataccggcggttttaaacctggctacaatcctagctacaacccttactcatatctgggtggaaccttaactactacatgagcactttcatcacaactttatttgaatttgcattctaggtgccattctagcttacatctcatcttaatgcacttttagattcatctatagaatctaacattacatgcaacagtacatacaaaatctataattatttttacaaaattttgaacagaatatggaagacaccatgaaagacgccaaaatagattgagatctgatatagaatcagattccaatgaggaatccatt

SEQ ID NO: 32291 - DNA, 448 bp, Gossypium hirsutum
  Clone ID: LIB3120-026-Q1-K1-C7
cccacgcgtccggaggaattaaggtttgcataagtcagagactttaagtaggtttttaagtttctcggggcgaattggaaacaacaatgggtctaatgattcagtggttagatgttcaaattattccaagtctagttcaagttttaatgtgagcaaaggggaaactttgttttagtttttggtttcaactttttctcttataaaaaaaaaaaagattgatagggttatgtctaaataggattgtttttatttattttattttaattagatttttaaagaaaaaaaaggggaaaaataatcccaaaaacttctttcacgttcttcctcttttattttcttttggtttccccaatttccaaatttttttatttattttctacttatttcttccggttctcaattctcctcttcttctttttacgttctacatttttggtattttttggtt

SEQ ID NO: 32292 - DNA, 366 bp, Gossypium hirsutum
  Clone ID: LIB3120-026-Q1-K1-C8
ctgaatctctatcataatcctttctaaaacgagactcgagaattggaacgcatcatccacttggactgtagcgattcacctgactgagtgaactaaaagttattgcgctaccgactcatcacttacagaaagtccttgcaatcgcatacaattgcatttcctattcctaaatcgcgtacaggaaccaactaacgcgaccaacggcgataagatgtaattcaacaaacccctggcgttactccgtgattgcaataaacactccttcttcgctaacggatgttttcgggatccgcttgcggtcgacgagcgtgcatggctggccccaaaaaatagaggatgatttctttttactatcggctggtcttg

SEQ ID NO: 32293 - DNA, 267 bp, Gossypium hirsutum
  Clone ID: LIB3120-026-Q1-K1-D10
tggcgaaacctctgaaccggtcactttggtgtcttcccgatgcctttcttgtctttggtgttgcgggtggagctctgatattagtggcgttattgtggtcttttttcactccaacaccaaactttggacccactgttacccacccaccatccaagttgagcatgaatacagtcaatagctcggaaagagggttcggtgttaacttaaaatgctatcccaaagactccaccttttacgactacgcatgaatgggtgacataacttgaa

SEQ ID NO: 32294 - DNA, 203 bp, Gossypium hirsutum
  Clone ID: LIB3120-026-Q1-K1-D12
gccacacgtgcgcaacaacatggacagctacatacattggtttttacatcattgacaagtgtgtggataacatcagtgagcacatcatgaagatctttatcatcaaggctaatataatcgtgcgtataatacgaggtataagtgaaggcaaatgtcaacgaaaatcgcttcaatgtgcccagatgcgtatcaacatcagtatg

SEQ ID NO: 32295 - DNA, 459 bp, Gossypium hirsutum
  Clone ID: LIB3120-026-Q1-K1-D2
gcgcccacgcgtccgaaaacatttcttgtgaagttctttcagttggtattattcttattctgggggggtcaaggtatatctgaacgcttcaccaattctctcgcataagagacattcagttgttattattattctgtgccgagctttgtttatgaattgacattcatgttaaagacttactcccaaacgacatgtcttagtcttgaaacaaaacacatgtgcttcctattaattttttgttatttttagggaacttgtaatgtgctgctattcataagcaattagctccctcagcatggaggcacttggcttttacactctttatctagatcaaatgattatacactatgtttctagacttgaagaatattaacgatgtttcatatacgaaattgtgttggttcagatataaaacccgtgtatgcttctttcataacgtgggtttttattctctttttt

SEQ ID NO: 32296 - DNA, 399 bp, Gossypium hirsutum
  Clone ID: LIB3120-026-Q1-K1-D6
ggaaaattaaaaacccatgggtgcaacacaacttaaaccatgtttggtactgatgatgaccttgtcggtacttgcttttgcttcagccgtatccagaaatagaatcaaatccttgaaccaaatcagagaggggaaccgaaaagggccatacattggccgtattacagggattgccactgaagaaggagcgtttttcgcttcatggtcttacaaacctgatcccaagttacctttcatccatctgttacgaagaagatttcggtttggaacgggtcatgggacaaaacgcttgtacgttcgatgtggggagggaatgactcatgcacaatgaggcacacaacaaatggttgacctatttgatatagacaggattatacatttcggcattggtggcaatac

SEQ ID NO: 32297 - DNA, 312 bp, Gossypium hirsutum
  Clone ID: LIB3120-026-Q1-K1-D9
gacaccccctcggtaaccaactaacatttttggaccaagagggagagcaagaagctgcaaaatcggctgcgaaattgactcattgagtgatacattcacatatacattgacatttgaatggctctgttaagtgctcttttaagttattgcagaccctatttgagactcattttgtgcataatgatttgaagctgaaattacatctatgattccaaacatgctttaaaacttggggtaacacttggcgaaacactagactaacattaatggtaccattaatcgtttgacaaagcttgcgacaaagcttgtgac

SEQ ID NO: 32298 - DNA, 465 bp, Gossypium hirsutum
  Clone ID: LIB3120-026-Q1-K1-E10
cccacgcgtccgcccacgcgtccgcccacgcgtccgcacttctgtttgttttttgaatgggaggtcatgtccaaggcttaggttgtctacgttcaggattttaagttcatcagaaattggagtgtcgagaagacaagtattggaacaagttgataaggagctgagcaagggagatgagagggctgctctctctcttgtcaaggacttgcaaggaaagcctggtggccttcgatgttttgctgctgctcgccaggttccccaaagactctacaccttggacgaattgagattgaatggaatagaaactgcatctcttctatcaccagttgattcaactctgggttcaatagaaaggaacctgcaacttgctgctatcttaagaggggttgcaacttggaatgcttttacttttaacccacaacaaatcctgtttatttccttgggattcttggttctttggacact

SEQ ID NO: 32299 - DNA, 386 bp, Gossypium hirsutum
  Clone ID: LIB3120-026-Q1-K1-E3
cttgagccttatccatggcggcaacaacaacagcaatagccttaaccctttcttccttgagcggtaggtctaccattccttgcaaaaccttcttcttccccaaaccctcaaaaccaatttctctccgccgcacattccgccctctttccctcacaccacaagctaaatccttcgacatcgacacttactttttcgacgatgtcaaccccgaaaaaaacatcgttttcgacccaccaacaccaccagaaagtttcaccccaccgcagtctttcgacgagggtccagaagaaacggaagacgaaatagccgcagcttacgaagaactatacgtccggcttacactggagtctctgattgggaaacgatgtgtacttcatggattcgaa

SEQ ID NO: 32300 - DNA, 450 bp, Gossypium hirsutum
  Clone ID: LIB3120-026-Q1-K1-E6
gtttgagttcttatccaaaggaggtgctggacatacccaaatcttcagacataaaatttcaaggtggttcaaagaagttggggaatcaaaatgatttaattgacattgactcaataaacacttccttaaagttttctgctggctgtgagctttttgaagcacttggaccagcctttttgaggaatggtttctatgctgatagccaggtagataatgcagaagctggagctaatattgaaatgcaagaggggatgagctgcagccagttgacttttgaatctggctcagaaaatctccttgaagctgtagtggcaaatgtttgccataatggcagtgatatgagaagttattcaattaataagtcctctctcgtggaagatagcaaacagcactgtctgaattcatcggagttatgcggatcaatgtcttcaaaagcctattcttcaacat

SEQ ID NO: 32301 - DNA, 275 bp, Gossypium hirsutum
  unsure (1)..(275): unsure at all n locations
  Clone ID: LIB3120-026-Q1-K1-E7
cccacgcgtncgattgagctacattttcctattatacagaccacttcttttcacagcaatggcggcgatgaactccagtgccatggcctgcaactattctatataaggcactagatcatctgatcttaatggccagcttgctgcatcaccattaccagcttccacaaatatgaacagcgaccacacttttcttgtgatcaaaggccaccaagctcaatgctttgatgtcaaaggatctagtggcaagaaaagaagaaaaactgttatactctact

SEQ ID NO: 32302 - DNA, 230 bp, Gossypium hirsutum
  Clone ID: LIB3120-026-Q1-K1-F3
cccacgcgttcggacaattacctaactgttctttatagggaaccaacactttccacctctgtcgtgcattctcaaagatgacggcgttccatctcaaacatctcatgaccttttacaaccgcatgttgaatcacttgaagacaaccaaacaatagaccaggacttttggtagagttccctttctaatttcgagataagctttgatcgacttcttttggcttaattattaa

SEQ ID NO: 32303 - DNA, 453 bp, Gossypium hirsutum
  Clone ID: LIB3120-026-Q1-K1-F5
gcgacaaccaaccaagctcagaggatcagtttcagtgctgaagagctgagccaccgatctgattgagttgtctcgacccaccccaggcgctgggctagcgagtcgcacttaccgaagaaggtcatctctccgtcaaatgtttgtattccctcttcaacccaaagattctccccaaattctctcctccgtttgcattgcccgaccctccctctaattttccgattccccctttctaacttctacctaacctcttatcttcaccctctctgtctactaacgcctcgtttcttcttcttcttcttcttcttctctggtcggatagcttcaacggtttcttttggcaaatccatggcattatcttaattatggtggcgagttccagaggattcacgactcagcttgagttgaagctctccacgctcttcatctcctatggattggcgccgagtaaaa

SEQ ID NO: 32304 - DNA, 321 bp, Gossypium hirsutum
  Clone ID: LIB3120-026-Q1-K1-F9
gcgggaacaatataggagattaactcttgcatctttaaagagtgggacctggacacaacattatacacacgcgttcgatgttgtgtcctaacatagcttgcagaagcgtatgagataacattgtcgctcactttgaaatgcctcccacatatgggcgatgctctccgaatgctccatgttttgggattcaagcattatcaacaagaagcatccttttgtccgagttttggtgacttttttagaatgcgaaacatggaagatggggtagtctttggttaacaacggttgttatatggaacaatccaacatttgaggattagt

SEQ ID NO: 32305 - DNA, 408 bp, Gossypium hirsutum
  Clone ID: LIB3120-026-Q1-K1-G1
gaaaaagcttaaaagaggcctttaaactcgctactctatcactgtcccaaatcacccaagaagggaaaaagaaacccaacaaaattgaaagaaacattacctaatggttgagaatcacggcataaccaggccactcaagaggggtcgtaggtctaacaagatcaccgcgggtgccgacctctccgatttcctcgcttttccttcaccttctatcgccgcctccgcttccgggaagcctttccgtgacgctgttcggagcttcctctctgctaacgctcgactcacgacggcctttgctccgcctgtccttccttgccttatgacgtggcaaaatcctgtttagatttggcgactttgatccggacgccaacgatccttcgccgatcgtcgtgtcgctttatgtcatcg

SEQ ID NO: 32306 - DNA, 389 bp, Gossypium hirsutum
  unsure (1)..(389): unsure at all n locations
  Clone ID: LIB3120-026-Q1-K1-G10
gtgggttgagaaatgatccgccaaccggaaatgttgtgatggaacctgaggacacacttgtatgaggggagcatatccaggggccaagttncanacgttgcagtggagtcattggttcatcctgaatcatgtttcaaagcgtggagattgtttctcgtactgatgctcccaaacgttcttacaaggatctttttggttccataaaactaacatgacgttgtttccttcaattttgtgagaacatactttttgccaaaccagacaatatcttgtgacttctcacaattgctattgaagtaatcacgagttaaattgtgagaaccaaagtttaaaaaaaaaaaaaaaaaatgaattaaatttgattacttgtttgtcttttttttttcttt

SEQ ID NO: 32307 - DNA, 153 bp, Gossypium hirsutum
  Clone ID: LIB3120-026-Q1-K1-H1
gtaccgcgctcaccgacttttgttcttcattccacttatcggcgaaccaccatcaactgggcggtgaactgctgggaggggcacagacactgctggactctaagataatcccaatacctgctgtccgtaccgcgagcttcacttcatttactg

SEQ ID NO: 32308 - DNA, 127 bp, Gossypium hirsutum
  Clone ID: LIB3120-026-Q1-K1-H3
gacagactctattgaataactgtaccatatactactagtaagcagcaatagcaattgccggctgcatgatctcataggccggcattggcacccttaactgctccttcgcggtacatgccaacatggt

SEQ ID NO: 32309 - DNA, 406 bp, Gossypium hirsutum
  unsure (1)..(406): unsure at all n locations
  Clone ID: LIB3120-026-Q1-K1-H7
gccgcagaccggccggaattccggtcgagcacgcgtncggcctccaccacgaacggggatgatatatcggagtggatcaccgtctttgataccaagatccctggcggcttatctcgtacaggcggaccagaagcagatctgaaagatctcttgtcaaaggccgcatcaaaaaagacagtcacccttgtgcttcttgcagtttgtttgtgacctttgttaacatttaaggggagttttttttgttccactccattcaactccgatatataattgataacttgtttcgaaatatctctgcctgtagaactcttcctttcataaattagttgatttctatgtttctagaatgaccataatccacaacaaaagagatgacattattctatatttcctcgactgaatgctc

SEQ ID NO: 32310 - DNA, 434 bp, Gossypium hirsutum
  Clone ID: LIB3120-027-Q1-K1-A3
gcaacttcatggttttcagtgttgcttttggtttcaattgtttttagttgtttcttggctgcatcaggtggtgatttttaccaagagtttgatctgacatggggtgacaaacgtgctgagatactcaatagtgggaggcttcttacacttagtctcgataaggcctctggttcaggtttcaggtctaaaagagagtacgtgtttggaagaatcgacatgcacatcaagcttgtctctggcaactctgccggcactgttactgctttctatctgtcttcagaagggccaaaccacgatgagatagactttgtgttcttaggtaacttaagtggagatccatacattgtgcacactaatgtctactgccaaagtcaaagggacaggggacaacaattctacctatgggtcgacccaactaagaattttcacaccta

SEQ ID NO: 32311 - DNA, 447 bp, Gossypium hirsutum
  Clone ID: LIB3120-027-Q1-K1-A5
gtattcatatacatacacacacatatgttatctttgtcggactttgcataagcagaagcgaaatccaaacaatgacgtgtttcatggaccaccgtgacttatccagagccactgcaactgggtatttgtttctcctattactcttctcttccttcatcaacatttggtcttcttgctctaatggaagttgccaggtagtggattcatgttcccactctacagattgtggtccaggtcttttttgtgggaactgccctgctttgggcaagactcaacctttttgtataagaggccaagccaccatacccacttctgttattggtggattacctttcaacaagtattcatggttggtgactcacaattcctttagcatagtgggtgctccagctttaccaggagttcaaagattcacattttacaatcaagaagacactgttactaatc

SEQ ID NO: 32312 - DNA, 397 bp, Gossypium hirsutum
  Clone ID: LIB3120-027-Q1-K1-A6
gccacgcgtcctgaacttttgcatatggctgccacagctgatggcatagatgaccgggctagctgattacgatacccaagaggaaatgagatccgacctcagataccacctgtgaaaataggggttccactggacgttggcctaagcaggggactgatagaagggctaagagtgtctctattaggctatggaagctcatttcaaagctgcttagcatctgcctctttattgtaatcgcatggcttaacgcttaccgtagcatatgcaccgttttatcagccattacatcacgcactgatacagaaactctgtagtctacacgcagtactgatcacagccgtagaaggatcaatcgctgactttggatatcatgtggcacatgatctagcacttgatg

SEQ ID NO: 32313 - DNA, 426 bp, Gossypium hirsutum
  Clone ID: LIB3120-027-Q1-K1-A7
atgaagagtacactctcactagaaacccagcacttttatcttccaaagctttcttcatgggaggcaatatcgccaacaatcctggctacaatcatcaaaacccagaaacaaaaccaacccttgtcaacatggaaacttcaagccaatgccaaaggattttccagcacgccacaggctaccgtgaaagaaaacactgccaaaaaaagctcaaataacaacaacaagaagaacgaggatgagaaaattccccaggtagtgtttgagaggatgatagcaaggattttggtatctgtgggaggtccaatggccgcgggtctggctttactgcacctatttggtgtaacgaaagagcaaaacttatgggatgcgccgttgtggctgccattcttgactacattaattacttttggggcatcaacgcttggg

SEQ ID NO: 32314 - DNA, 270 bp, Gossypium hirsutum
  unsure (1)..(270): unsure at all n locations
  Clone ID: LIB3120-027-Q1-K1-B1
cccacgcgtncggttgatctcaaaccgaatcttcctgctgaagcagagaggattcgaaaatgggaagggggtgtatttgctcttcatgaagaacctgaaggtacccgaatttggctaccaaacaatgattcacctggccttgccatggcttgggctttcggagatttttgcctaaaggattttggcctgatcttggtgcccgaaataacttatcgggacttaacagaaaatgacgaatttgttggcttggctacagatgggatatgggat

SEQ ID NO: 32315 - DNA, 377 bp, Gossypium hirsutum
  Clone ID: LIB3120-027-Q1-K1-B4
gccatctacctcaatagcaatagatgagctctcaattgttgatctgaagaaccttgctgatggggaggcggctgaatttggttgcagggagcctgagtcagagttggagatagaggaagaagagtctcgggcatctacctcaatagcaatagatgatattttctggtaacttcaaaagaattttacattcatatggttcctggtgataaggtttcccagtggacctgatgtgtataacaaaaaaaagaaaaagaaagataaaaaaaaggggaaatgtggtctgcattggactacttttaacatgtcagtgtatgtggtagtagttgtatgatgtatatgctgtacttaactgacttgttgttccatgcttcattgtg

SEQ ID NO: 32316 - DNA, 264 bp, Gossypium hirsutum
  Clone ID: LIB3120-027-Q1-K1-D1
attatgcatagcgagaatgcactggctccgccttaacgtggtcactgattgtttttccgacgcgaggagatctcaagtcggatggtttatggtacaccgttggcgatcttgcgctaatggttggatcggcctgcctggatcaccctgtggactctcttggcctgcaatcttatataccgattagctcggcaagactgctaaacctattgcttcttctgagcgcggaattttagccatagatgactccaactctacctgcgggaa

SEQ ID NO: 32317 - DNA, 159 bp, Gossypium hirsutum
  Clone ID: LIB3120-027-Q1-K1-D12
catgctcgagcggcgcgtcaatgttattgaatatatgcacaaatttcagcacaactggcgggacgttactagtgctttgggacatgcataacgagtgtgcgagcggcgccttgtttctcgggctgtatacgccatgaactccgaacagggttcctgttc

SEQ ID NO: 32318 - DNA, 280 bp, Gossypium hirsutum
  Clone ID: LIB3120-027-Q1-K1-E1
cccacgcgtacattcaacaattgtgcagaataggaagcaacgagccaatataatcgtactatcaatgggacagacacaacaagtatccgagatgcactctaactaatacggcaacaacaatctggattataaaagcaacagaaacggacaaaactatatactctaggcttaatcctatcgcgattatgcaaaccctaatattctatataggactaactcataacggacacaaatcagataggatcatacataaataactacttgaaactaatgaaaatgg

SEQ ID NO: 32319 - DNA, 108 bp, Gossypium hirsutum
  Clone ID: LIB3120-027-Q1-K1-E3
ccttaaatcaaccaccaaaggactactacattggtgcattcacaagatttacaaggactgttgtcactgcaactgcggtgttggagtattcaaactcgcaaaccgcag

SEQ ID NO: 32320 - DNA, 373 bp, Gossypium hirsutum
  Clone ID: LIB3120-027-Q1-K1-F7
ctctcatattccttctttctcctgctgggggcgtccaaactatatgatgttttcccaagaggggcaccatcttctcctccttgtggggtgccgccttgctgctctttttcctcttcttctgttgctgatgattttttgctgctgttacaaccaattcatcattgttagcagcctccaaaataattatttttgttgccaaaaaatcctcctttgttgtgccctaatcatatcatctttgtcatcatctattgtggtgggctgctcttctatcaggactactctggctgccatcattccttcttttactgctgtatcatataccaccttacatcactaattacttgttgataacatcaccaaaatttttcaatag

SEQ ID NO: 32321 - DNA, 470 bp, Gossypium hirsutum
  Clone ID: LIB3120-027-Q1-K1-F8
atcttattgtgtttgatatgcttatgtaccacatatgcatatagcactggtatttcagaatgaatttggcctgcaactgacaaagaactggaaattttacgtctttgggttatagggatggactatttatgagatagtaagatatgcacctcaacacaattggagtgcttatgaagaagctttgaggacaaaccctgttttagcgaaaatggttatcagtggaattgtctattctataggggattggattgcgcaagtaagtttatgtcatcgaagaaatacttttcgatctttagttttcggtcatgagattgtgcgttacactttttcttgtctttattctttcagtgctttgaaggtaaacctctatttgagtttgatcgtattcggatgttcagatctggccttgttggctttactctacacggttccttgtctcattactattaccaattctgtgaggtaaccat

SEQ ID NO: 32322 - DNA, 438 bp, Gossypium hirsutum
  Clone ID: LIB3120-027-Q1-K1-G1
cccacgcgtccgttcaagaattgtgcagaataggaagtgaggagcaaaatgaatggtactttgttagggacaaagacaagaagtatcccacagggactcgaactaatagggcaacaaaagctgggttttggaaagcaacgggaagggacaaacctatatactcgaggcttaatcttattgggatgaggaaaaccctagtgttctataaaggaagagctcctaatggacaaaaatcagattggatcatgcatgagtatcgacttgaaactaatgaaaatggtactcctcaggaagaaggatgggtggtatgtatagtgttcaagaaacgaatgacaacagtaagaaaaatgggtgaatatgaatcttcatgttggtacgatgaccaagtctccttcatacaagaacttgaatccccaaagcgaataactcaaccttatg

SEQ ID NO: 32323 - DNA, 454 bp, Gossypium hirsutum
  Clone ID: LIB3120-027-Q1-K1-G7
cttttgccttcctatgtctaatttgttccctttaagaaaattttttaagttactaatgtcacggatatctggattgctcatgcttgcataaggcctgctcttcatccttttgtggacttggcctgatctttgtgttccttctttcccacttgtgcagaatgtctgataactagtataaactttttaaagcatttgaattctgggatggcaaccggaagtgtttttcaaaggataagattcctatttagttctttgatttttgttatagtgaaatttaatttggcttaactagcaaatggcaatgtttgttaaattgataaggggaatatatccattaaagctaagttatagttggtatttaatcccgaaatttagtgttaatccatctaatggttattatatgtgtttccttgtttagtaacaatgtcatatgtccatatgtcaggtgctctgc

SEQ ID NO: 32324 - DNA, 310 bp, Gossypium hirsutum
  Clone ID: LIB3120-027-Q1-K1-H1
cccacgcgtccgctaatattattcgaggcaacttatctaattgctctaccagtcgctcatacggatgagagcatcgaaagcatggaatctaggttaatgcacctaggaatgaaaattataagcattgaagatgactagcattgcctcattcctaagggcggacctcttaacattttaccccaaagagttgtggcaaatggcggaacagccttaatggtacacccgattacaggttacatggctgccagaacactatccggtgattcgatcaatgcggatgctatcgaccagtgcctagatgcgtgaaaga

SEQ ID NO: 32325 - DNA, 282 bp, Gossypium hirsutum
  Clone ID: LIB3120-027-Q1-K1-H4
cccacgcgtccgctacaacagtcccctaggactccagaggcatgcctttgctgaagcaggcagtggcgtgaaaaaaatagaactagaaggactctctgaacacgaacatgctggtgccaagatagaggctgcaccaatcggctacgaaagttcttcactcgattgcatttgcaatttgaagttgctgatttcaattgtaaactttcttgtatttggttgcttactttaccaaccacttttttctgcctataatttaattatttgaattttgcttcttccaat

SEQ ID NO: 32326 - DNA, 273 bp, Gossypium hirsutum
  Clone ID: LIB3120-028-Q1-K1-A11
ttgaacttgtttgacgagttgaatctgacgccaatgaaatttaaacattaccaatattcggatgagatatagcatttcgaaacacttaatgaatctcaaacacccaagattatggtgattgctagtgcatattccatagtgggtccttatataatccttggcttctgaccagaggaagccttcatgattcgaaatgtatctaatcttgttccttcactagaaaatggacctttataaacttacgctggccttgaattttcagtataaactctt

SEQ ID NO: 32327 - DNA, 357 bp, Gossypium hirsutum
  Clone ID: LIB3120-028-Q1-K1-A8
tgcttacttcatcgactacttgtaggtttcctaatcaggctcaggggaaacgctcctcacatgatacatcaggctaccatattgtaaatgtttttagtccctcacaatctgaagctacaactgatacttcagttgaatacgatatcgttcggtgatctgatgattatcatcctgctacttgggattatgattctcttcagtcacttgggctccatcacgtggaggatgaattatgcaaggatcgagcgagctatctgtaggaagaagtgaagatgatgtttgacaatgtgatgcatcctttgcagaaactcgagcttattgatgccttacatagacttggatcgtcataatactttg

SEQ ID NO: 32328 - DNA, 352 bp, Gossypium hirsutum
  Clone ID: LIB3120-028-Q1-K1-B10
ggtaccgggcacgcgttcgaggacgacggcatggataagcttggggataccaaaggcatgcctaattaatatttcacgaagggtcaggggtctaagcttaaataatccagaaacttcatccacatagatcaagcgttaatcgggatgcaatgttccatctcctgcaaaaggattagctagaagcttctctaccatacccgaaggaatgtcaaagtaaacattttcagtaggttcaggagggtgaggagaaactatttgcgtctactggtcggggtgaagattccccgaacaagcccatcaaaggatcatgtgccatagtaacaagtgacagcaaattttaacacactatata

SEQ ID NO: 32329 - DNA, 196 bp, Gossypium hirsutum
  Clone ID: LIB3120-028-Q1-K1-B12
taagcttggggataccataggcgtgcctaattaatatttcaagaaggcgtaagcatctaagcttaaataatccacaaacttcattcacattgattaagtggaaatcgggatgcaatgttccactctctgcaaaaggattagctagaaggttctctaccacacccgaatgtatttcaaagtatacattttcagtagg

SEQ ID NO: 32330 - DNA, 314 bp, Gossypium hirsutum
  Clone ID: LIB3120-028-Q1-K1-B3
cccacgcgtccgctcattcctttataccttacagacaatctcctcaataccccatgtttctgggtcctttttcaaggcattctacaggcacttccgagctgcgagaaggggaaaatggcacaacttttaacaccgtcaactaaacggcaaatgacactaccaaggacctcatcctatggaagtcccattgcagcaaaaatgtggcgttctttggtactgaaacataacatcattggacctggtaaatgctctggcacaggtaaagcggttgccttgtgtgaaaacagcactgtgaacaggctagagaactcact

SEQ ID NO: 32331 - DNA, 469 bp, Gossypium hirsutum
  Clone ID: LIB3120-028-Q1-K1-B7
tcggaaatagaaaaattaaagaaatcaaaatggctgttagtccacccttttcactagcagctattggcatcttggttctctttacaactaacccaaactactgccaagcatatagaagaattctcagctctgacacaaatacagagttcatcaaaacttcctgtgctgccaccacctaccctgacctctgtttcgccgccttttctagctacgcaaccgaaatccaagccgatcccaaaatattagctaccaagtccctcaatttgacacttaacaccacgttctcggcttccaaaaacctgacggagctctgcaaaacgcagggcataaagcctactgaggctgcgcctcttcacgattgcgtggaagaaataagtgactcggtcgatgaactaacaaagtctattcctgaaatggaagagattgaatgcaaaagccttgcttttaaaatgagggatatcccaaacat

SEQ ID NO: 32332 - DNA, 250 bp, Gossypium hirsutum
  Clone ID: LIB3120-028-Q1-K1-B9
gcgcttttcttgatcttgttcgtcaacgccttcatcacatattacttaatcaatattttcttcgggtgagtttgatcggatcatcattctggttagaatggatctcatggtcactactggtaacatgaacatcaatgctaaattagttctacttgtggatgttggatctggaatgactagatcctggtttgacttctttaaagggcaatttgatgaaattcaggaatcatccatacgtgcagcttttatt

SEQ ID NO: 32333 - DNA, 385 bp, Gossypium hirsutum
  Clone ID: LIB3120-028-Q1-K1-C2
tttcaaagtaaaaacactgctatagaagcaacagatcccggctctaaacgataatgggctccagaagaaaggagccggagagatagttcgaatttggtcttgtttatccttttcgatcgacggagaaagaaatcgatgatacttttacagtcccattcacgattccttctccagactttgctgaatcgaatacagaatcttgaaaagtgtattgaactagaccatcactgggttgagtttgatgatgttcgttaccatgttcaggtgtcaatgaagaatccccatattctactgctttcattatcattacctaccccacctctggaaactgtcttcgttggtggacttccatttggagccatagaagctattaaagcatcttatg

SEQ ID NO: 32334 - DNA, 218 bp, Gossypium hirsutum
  Clone ID: LIB3120-028-Q1-K1-C3
tcgatcactcgttcgttgaactatagcgacgcttcacactagtggacgctgcagaggctgcttcaggatcatctcaactgcagcaatcaagtgtcccgatactgcgtcacacactgcaccacttcagacatgctgagaagattccaagtccctcgaataatgccctaccaatgcgactgccgttaacgccatgatcaaaataatgcatgttatgggcc

SEQ ID NO: 32335 - DNA, 286 bp, Gossypium hirsutum
  Clone ID: LIB3120-028-Q1-K1-C9
ggaaatggcaggcgtctaagcagggaatgattatgaggcgaccgctgttagaatcaccgggggaagccacgtcaagccgggtgaggagatacgaataaaagagtgtcagatggtcacacattgatcttccctacctggctttctattataaccagaagctgatgttttacaagaacgaccgcagtgttgacttcgaagacaaggtttgaaaaactcaagggaaggctgatggtggtgttagaggagctttatcaacttatgatgtaagctttggaaagatgacgat

SEQ ID NO: 32336 - DNA, 272 bp, Gossypium hirsutum
  Clone ID: LIB3120-028-Q1-K1-D3
ttcttgacccatttcttcaatccggatttctttgccaatcttcatccaacgtcgtaatatgacgtcccgggtcttcgcctatcatgtaaatggtttcttctttcgcaagagctttctatgctagaccatgtgcatgtgccgctgctgatctattgatgtgcttaaaagtgatgatcttgaaataaggacttcttgttcgaatatcctgtctaatgactcctattaccgattcgtctgttgaagtctcctcgctctgtctttatgacatcaaa

SEQ ID NO: 32337 - DNA, 173 bp, Gossypium hirsutum
  Clone ID: LIB3120-028-Q1-K1-E1
cccatataccaacccacttgccgtacctggttagaacacctgcgctgtcacccttggtccctcggttaggaccagtgggctcgctcatcatcgtctgtccaccaacaccgctagaggccgacatcgcgcgatactgggcttaacccctgaggaaacacgcgcacaatcctacg

SEQ ID NO: 32338 - DNA, 172 bp, Gossypium hirsutum
  Clone ID: LIB3120-028-Q1-K1-E2
gttcatctatacaccaccacaattccaccagttacaagctctcttttcacacaactaagccccacatgtcttcactagccggtccgtttctatgctccacaacaaactgttcttccgtgcacaacttcatctttcaagcccaattcaccggtcataacacttcctacgactt

SEQ ID NO: 32339 - DNA, 394 bp, Gossypium hirsutum
  Clone ID: LIB3120-028-Q1-K1-F3
accactcgtacgcgctattacatacacttcttggacccactactagcaatggcttcatcaatggccacatccgctaccattgccactgactctaccacacaggctaacatggccggtcctttgaccggcctcaagtctgcctctgctatgacagtcaccagcaacgccaccaacgacattacttatgtcgcaagcaatggcggcagactgcaatgcacgcatacggggactactactgggaagactatgtcagacactctctaacacatacccgatcttacacccgagcaagtggataacgaagtacattaccttcgtggctcataatgggaaccttgcttggaattcgaattggaggaccgattcttccaccgcatgcactcgagcttaccca

SEQ ID NO: 32340 - DNA, 277 bp, Gossypium hirsutum
  Clone ID: LIB3120-028-Q1-K1-F4
ccacacttaaggcacaactctcacactactactatcaaccatgtccatcataaaccccataatacaaatcccactgtacaacatagcggcacaaccacctatatcatcgtccacttacctacctaatcacagactgccaagcataatctaggatctaaacgacaaatctcatcttcaaggaaaggatactctgttgataacgcagcttataatccacccgcttaacaatgaacttatatacccttatagaccgcatctaaacaaatcccatcatact

SEQ ID NO: 32341 - DNA, 282 bp, Gossypium hirsutum
  Clone ID: LIB3120-028-Q1-K1-F7
tacactcgtccgcactcatagactccactgttgaacatagtagaccatgacgtccatttctctggtcctgttggattacatctaagaactcatacttatcatatcataatgctgctactctctgaccacttctcattcaattcatggatactcacaaaccattgcctttacatgccaaaactgctggttctataaagggcttgaacttgatcgctttttcgattggctagccatagccatagaacagtcatattggcgacacaaccagtgaatctactgaca

SEQ ID NO: 32342 - DNA, 283 bp, Gossypium hirsutum
  Clone ID: LIB3120-028-Q1-K1-F9
gcgcccacgcgttcggaagctttgatagaggttcatactgttctaacaatgttattataggatcgggcatcgggaaagattgaggcgatgacaacagatgtatgacttgattgaacatctggttgatgactccttgatgctatgtaagttaaacacatatgcacacgaagaaaataaaatataaaggccaggtcatggatgattgattgctattatagcggatagctcagagctggactacttgattaggttcttggtatttagatggcctagcaaatatcca

SEQ ID NO: 32343 - DNA, 210 bp, Gossypium hirsutum
  Clone ID: LIB3120-028-Q1-K1-G3
tccgtccgaattccggtcagccagcgtcgggaatagctgtggttagaccccttggttgtgtttaaaccccaagattattagctgttaacgagaaagggtatctttggttcggatactttttgcaggaaagcatgttttccttccagaattagatataggattcttaagcgttatggaagggaaagacatgaatatcttcgtgcagcactt

SEQ ID NO: 32344 - DNA, 456 bp, Gossypium hirsutum
  Clone ID: LIB3120-028-Q1-K1-G8
gaggatgaaagtggagcaaagggtttgcaataaggctttagaggaagtgaatggagaaagcttgtacaatagaagctgatggagagctgagcatgagccgagtgtgaaggtggtttggccttgctttgtggatatgttagtttcatctgtccttagttttgttttcattgtttttatttgaaactatggatgagttaagaaaagcagggctcctttttctccggtgtcctgatgatcaaaatgttttacttgacgacattaaaaggggattttggtatgttggttgtttgagctatccatccctcgtgtgtttgtaatgctaattttgactagtaatttataatctctgagaaagggtgttttaagagaatgaatactaatgaagatgagttgttaattggggttctatgctttgaataatttcaggtggattacggttttggttcactatgaacg

SEQ ID NO: 32345 - DNA, 261 bp, Gossypium hirsutum
  Clone ID: LIB3120-029-Q1-K1-C9
gaaaaatggctactgcttacgctactcttcttaagtatgacaccaattatcgacaaggccgagggcaaggatgaccaaaacctggggcacacgttagttagcatcgaacggtcacaccctacataggccgcctaaggcatccgtgcaaaatcatatgccgaagagctcgaaaagaccgcgaaaactggagcatctacaagtcgtggaaactaggccatggatgaatcaaatgctacaagtaggaaacggcttgcctagatt

SEQ ID NO: 32346 - DNA, 319 bp, Gossypium hirsutum
  Clone ID: LIB3120-030-Q1-K1-A10
cccacgcgtccgagaagctgagatttggctgtttgtgttccgaaatcctgtcaaagttaccaagagcaacttcaggtggatgaggacaactccagaattttatatcgagagatactaaacgacaactctgcaacttttttcaagcaaccagtaaatttaggatccaaatctaaaaccagaacaccaactttaagagttgaaactcggaccatgatacaccagtacataccatcacttagttgaggtaagtggaatatgaagaagagtcagcttcagtctcccttacttcctaactctcagcaaaaatcactatcatcta

SEQ ID NO: 32347 - DNA, 343 bp, Gossypium hirsutum
  Clone ID: LIB3120-030-Q1-K1-A11
tctgttatagcctgtcttctgtcttacccaatgtcttctgtttcttccttctaccgggcttcggcactcttctcgccggttcttcttctctttattacctctctttggcgtcacaactagacttcgatcaccgatcagaaagcagcctccatctcacgtttccattcatctccatcagtgaaactatgttctgtccattggaaccgttccctgtgggtcttgtccatcgactgctaaatacaagggttagtgcatacggaagggtctgatcaacagctgttgtatacacagctgcaattctcgaatacttgactgcagaatttctataactgtcatgttaact

SEQ ID NO: 32348 - DNA, 423 bp, Gossypium hirsutum
  Clone ID: LIB3120-030-Q1-K1-B4
ctttaataatcaatagcacaacatacattctcttctacatataagacttaactgcaactattggggattccacaaatctggggaggtactatgatcctattcatcctgtataccattacttcaacattaaccttggacttcccatctgatcaatctatgaaatttacatgattaacaatcaccatgaatcaaatgtatatgatccactgtaacctaggtagcaaatacttgcatgatcctatatcatttaatgaatctcttgctcgctacttctgatcacacccaataggacttacaaattaaccattaatccatatattggacagatcatactaactcatccatatatcatgattcctaagtaatggaatatccatttacttaatgcaagctatgcttagaacttcaatggtccaaccatca

SEQ ID NO: 32349 - DNA, 217 bp, Gossypium hirsutum
  Clone ID: LIB3120-030-Q1-K1-B5
gcatacacctctccaaaattcccgtctggacacacgcgtgcgtacacgcttaatcaccttactaaactttctttttttattcatttatctcacattatactgggggttaatctaaccatgcgtggggtattaaatcacattaacttcaaccttatcaaacgattcattacctgttacacttaccttttcaatttatcccatctatctaaaccccatc

SEQ ID NO: 32350 - DNA, 437 bp, Gossypium hirsutum
  Clone ID: LIB3120-030-Q1-K1-C1
cccacgcgtccgctcctccacccactgccaaaaatatcactaaaccaagtctgacgccaaaacccaaaatgagtaaaaatagaaagagaaatcctccgttgaaatggcatctgcaacagcaagactcatttttcctcttcaccacttaacccaaccttgtcccaagcccaaaaaacctaatctctttcccccccataaactcctctccagaattcctcccaacatcatccaaacccatagaaaccaatcccatttcaccgttcgttccattgatgtctctaaagaagacagtcaagaaaccccaacttctgacccagaaaacaaacaatctccatcagtggaagaaacaagtgggggagaagagacgattgacaaacgcacgttagaagagaagtttgcagtgttgaacacaaggatatatgaatgcaggtcatgtg

SEQ ID NO: 32351 - DNA, 411 bp, Gossypium hirsutum
  Clone ID: LIB3120-030-Q1-K1-C3
cccacgcgtccgctcagaaaccgctgaaaaactcgaaccccacccgaagacactggccatttgggggttaatttgaagctgaagggaggtgggattttttttcttcgagcctttgattcaatggctctttatttattgtacgaatcatcttctgggtatgcgctattccaagctcaagggctcgatgaaatcggtcaaaacacagaggctgttaggaactcggttgctgatctgaaccggttcggtaaggtggttcaactcactgcttttcagccttttgaatccgccattgatggtctcaaccaatgcaactctgtttctgaagggctaatgaccgatgagttaaggagttttcttgagcttaatctccctaaagttaaggaaggcaataaatccaagtttagtcttgga

SEQ ID NO: 32352 - DNA, 145 bp, Gossypium hirsutum
  Clone ID: LIB3120-030-Q1-K1-C5
cacacaatcacatacacagacatatttgacattaccactaatccatcatccgtccctaagtgggagctgaatacaatttcgtaggtgcttccttacttcaatatgcagtctttacaccaagtctcataaatccatttcaccactt

SEQ ID NO: 32353 - DNA, 424 bp, Gossypium hirsutum
  Clone ID: LIB3120-030-Q1-K1-C6
gtttctttttcctccttcgacgagcgatggacacgttctattcgttctttgattctcaatcgagaatccagcgtaattacaacagtctcaagaatttccgtcacatctctccaatcgttcaaacgcatcttaaaaaggtttatatgaccctatcacgtgcgcttgatgcctctgcgattggtgcttatcttcatataatttggaacattgtgggttacctcactacatttgcatgccttggatccataatttgtatccattatacccattcttgtcaagagcaaaatagggattctcttctaatggcatcacgcgtctctgaaagagcttcaattcgtcctctaaatgacttgggcattcaaattgacccaactgttctggtaactgcattccttggaacagcatttgcctttgcatgcttttc

SEQ ID NO: 32354 - DNA, 231 bp, Gossypium hirsutum
  Clone ID: LIB3120-030-Q1-K1-E5
cccacgcgttcggtccgtctcacttcaagctgcagctaccctgatgcaaccaatcaagacgggggcaccatcaacgaccaatgtgctgctcaggtcctcccagagcgcatataacgcctctcacttgcatcctgtactggctaggcgcacctgctgtatgcatactgacctgaaggactctactcagacgcacgtttatgctaccaagctctatggcctcgctcttgctac

SEQ ID NO: 32355 - DNA, 255 bp, Gossypium hirsutum
  Clone ID: LIB3120-030-Q1-K1-F10
agataagaaagcaaaatggcttacacaattttgtcacctgtactccactctctttcggtccggggtgttcgcgacgcgctccccggacgatccatcaaggcgcatgtcagtaaacctgcgccgacggtttctctccctaaccggatgcagcttctgttctttctgacggcaactacggcattgacagttaaagacccttcttctaaagcggaggacaattcattgttcggtttgaggaataagttgaagaaagct

SEQ ID NO: 32356 - DNA, 299 bp, Gossypium hirsutum
  Clone ID: LIB3120-030-Q1-K1-F12
cccacgcgtccgggttcttctgacttcattatcatagatacaagaagattattgtcatacatgcgaaagaatgtgcataagaaagaaacttcgctcgatgtaccaattgtcgtctacactacacctgcttttgataatggatgggacaggctgggaagaatgcaatatatgtcaaagtctgcaattgagcatagctaccggtaaagtgtcaaacattgacaataaatgcaaaccagttctttcaggcaatatatgctaaagtctgtgaaatgatcatagctaccgggaaagtgctaaca

SEQ ID NO: 32357 - DNA, 322 bp, Gossypium hirsutum
  Clone ID: LIB3120-030-Q1-K1-G12
gtcgaccgactcgttcgccctctcttccgaccacgcgtccttactgtttatatgtggatgaagcgagtccgatggttagggaaccctctccccctcgctatggctcattccttctctgctactacacttttcttgttttcccccttactctctcttttccttcacttgttttaaaccgccttacctcatttccttaccttcttcctatggtcctcgctccatttcaatttccaccccctcttgctgctcttctgcttcctcactacttttcctcccagaaaaccatgattttcctgatggtgaacgttgccaatcctataca

SEQ ID NO: 32358 - DNA, 140 bp, Gossypium hirsutum
  Clone ID: LIB3120-030-Q1-K1-G6
gcgcccacacgtacgaccacgcgtacgatcacgctttctgtcaaaattaggtgcttcacagtggcgggtacaaccatggctctttcttggccatcattctatagtctggcagtgaatttctcccctttcacccatgaaat

SEQ ID NO: 32359 - DNA, 258 bp, Gossypium hirsutum
  Clone ID: LIB3120-030-Q1-K1-H5
cttacacacgtgcatctcattaacgcagcacattaccttcgaacgctaaaaagggttcctcgcttgcatgaccaatagaagcatgaattcgtgcaccctacttactatagctaccgcgctactactatagacgctactgtaccatgtgcaaactatccaagctcgagtgcgccacctatgctcatcagtagtaggagcttgagaaatccaataatgcataccccaatgcattcattagaatcatttgctttgacaacg

SEQ ID NO: 32360 - DNA, 259 bp, Gossypium hirsutum
  Clone ID: LIB3120-031-Q1-K1-A12
gcctgctttgaccgacatctttggagatgattccgtactacaattcggtggaagaactttaggggactcttggggaaatgcaccgggtgccgtaactaatcgagtagctttagaagcatgtgtacaagctcgtaatgagggacgtgaccttgtccgcgagggtaatgaaattattcgcgaggctagcaaatggagtcctgaactagctgctgcttgtgaagtatggaaagggatcaaacttgaattctacgcagtggat

SEQ ID NO: 32361 - DNA, 266 bp, Gossypium hirsutum
  Clone ID: LIB3120-031-Q1-K1-A3
ctataacatacactactagtacccactactagcactggcttcctcaccgatctcatcggctaccagtgccactgactggccggcagaggctaacatggccgctcctttcaccggacaaaactgggtctttgctttcatagtcaccaggaaggccagcaacgacattacttcgttggcatgcaatggctggcgagtgcaatgcatgcaggtgtgggcttgtactagaaacatgaacctcgagacgctattatacctcctcgatggta

SEQ ID NO: 32362 - DNA, 446 bp, Gossypium hirsutum
  unsure (1)..(446): unsure at all n locations
  Clone ID: LIB3120-031-Q1-K1-A7
tttatttctaaaaaaaataaaaaaaatgctctgtcctatatcaaaccaaaccctagacaaccgggtttttgaggcagtgtttactaactggtcagtttaaggtaagggctcacttcttttactctttgtttctgttactttttttttcaaagttttaattgtgtattttttaggttataatagttgaaacaagagaagaaaaaaaaaggttgaattttaaggatttgcagtagaaaagaaaaaaaaatgagggattttccatcttgttttggtgaaatggagtgcaagtggctgattcgtcatcatcatcatcaaatagtagcaaaaatgcacagaatttggttacttgtgtttatcaatgtcgaattcggcgtaggcctcgtttaataactgttacttggaccaagaacttgatggggcaaggcttaagtgtanggattgatgat

SEQ ID NO: 32363 - DNA, 421 bp, Gossypium hirsutum
  Clone ID: LIB3120-031-Q1-K1-B11
tgaaaattcacctcttttttaaaggaaaaaaaaccagaaaaacaatgaagtgagctcctctctttttttttaataataaaagtcccttcaaccccccgcagtcccaattgaaaatggatcctaacctaatgcaaaagtttcaagccatcaagcaatccaagaagtgtaagaagcagcagcttctggacaagcttttactctatacatgcatagcagtgacttgttgtgtcttctgttccacccctttttggctcccttacttgaagaattttctcttcatttcattaccaaaaatgggttcaatcatgtacaaccctaaactactgttctttgtaaggaacctcatcggtgtggttctcattggaagattcaagatttttgcttatttttcaagttcttggggagtgtactatgttgatca

SEQ ID NO: 32364 - DNA, 381 bp, Gossypium hirsutum
  Clone ID: LIB3120-031-Q1-K1-B3
tttatgcgtgtggatacccgtgcgtgcaatctaaccaccactacactgcgcgaggggagcttaggaggtacgagcggttgtccatactggatactagtaacatctttggggtttttgcacaacagtgtgaccaaatgaggggcgtgcatcttatcctggagacaggcacgaaaacgagaggtgctattttatctctggatgcatacattgaacatgatatacagcgcgggtaggttaatggattcgagacaaaacctacgagagttgaagcacatgcaccgatagaacataccgggtgataaaaccatccagagtgcggatcgggatattatagacagtgtttacaaccttcgggagccgactattgatcttgctcttctt

SEQ ID NO: 32365 - DNA, 342 bp, Gossypium hirsutum
  Clone ID: LIB3120-031-Q1-K1-B4
catcaacttatgtttaacataaaaaaaagacctcacctttagcctcgccatgatatgctttaacggcccaagggagtatttttatgggttgcattttcattactaaaccttgtagaagaacaaagcaataaaactctttgatggagcgcgcaaggaaggtggttaacagggcaatcctgaaacgtttggttaatgaattcatgcaagcacgcattggagaaatgagtgttagatcacctgtttcctacactttcatcaaagtatgtgtcttcattgttacctttcggtgtcaagaatcatagcacatcagattcatttggtgcttggaatgtgtcgaacaat

SEQ ID NO: 32366 - DNA, 290 bp, Gossypium hirsutum
  Clone ID: LIB3120-031-Q1-K1-B5
agcggatcgagcgaaggaaaattatggtaattggagcggttggattagtctcctgctctctatgattcttgcaacggagaaattgagatggcaatggctgcctcttctggatttactgatatgccagcacttaggggaaaggattatgggaagaccaaaatgcggtatccagattacactgaaacagtatcaggtcttcagtacaaggacttgcgggtgggggatggccctacaccgaagatgggagatacagttgtggttgattgggatggctacactatttggtatta

SEQ ID NO: 32367 - DNA, 334 bp, Gossypium hirsutum
  Clone ID: LIB3120-031-Q1-K1-C11
ctcaaaagaaccccaaaaacattttcctctatttgttcaaaggcagatgatgatagtgacaaaagtccaaacgggtcttcgagggggaaaccaaagctcgttactaaggaaaagtcctctgcaccgactacatctgcgttcaaggagaaaaccagccagagggcttgtaaggggtatgacaaagctaaaaaacaaaaactgaattcgagggatcatgaactaaaggatacactttggaaaagccttaacgaagtggacttcaatacgggtacattcactgacatagtgaagcttcttgcgcaacatttgaatactgacctctcccccagggagt

SEQ ID NO: 32368 - DNA, 385 bp, Gossypium hirsutum
  Clone ID: LIB3120-031-Q1-K1-C8
ctcaaacctgcctctgctcttccagtcaccatgaaggccaacaacgacatcacttggcttgcaggcaacggtgggagagggcaatgcatgcacatattgccaactcttgggaagaagaagtgcgagactctcttatacctggccgatcttactcccgtacaggcggcataaagaagtatattaccttcatcgatctaaatggattacttgctaggaattcgaattagaggaggagatcgtgcaccgaaaatattcgagcttacccacgtactactgaggacgctactggaccatgtatgaactgcccatgttcgagtgcaccgactcggctcacgtgtttaaagatctcgaggaatgcaggaaggaataccgcattgcattcatt

SEQ ID NO: 32369 - DNA, 390 bp, Gossypium hirsutum
  Clone ID: LIB3120-031-Q1-K1-D10
attctctcatttgggttggggtttctggtttacattgagggatcttaaacttgctacgaaccggttttcaaaggaaaatgttcttggagagggtggatatggcgttgtttatcggggtcatttgatcaacggaacgccagtggctgttaagaaaatactcaacaacttaggccaagcggagaaagaatttcgagtcgaagtggaagccattgggcatgttcgtcacaagaatttggtccgccttttaggttactgtattgaaggaacacacaagatgttggtttacgagtatgtcaacaatggaaacttagaacaatggcttcacggagctatgcgtcaacatggatatcttacctgggaagctcgcataaaggttctactttgaacagc

SEQ ID NO: 32370 - DNA, 273 bp, Gossypium hirsutum
  Clone ID: LIB3120-031-Q1-K1-D6
gcggtacgctctcccaacttggggagaccatatgtaagcaccttttccaagtgcaatggaagtcacgaccctaggccatggaacttagggggcagggattgaccccatccacgtaagtatgctgtaaggcagcaccttgccttatatttatatatttagcgtcttgctccactgccatcacccggcggtgtggcatttatcatctcaacagacactaaccctcttccctcttttgtaggcatactctaaatgcattccgtctttctttctatt

SEQ ID NO: 32371 - DNA, 321 bp, Gossypium hirsutum
  Clone ID: LIB3120-031-Q1-K1-E12
tcgcacaatcgtacgcgcacacgttctttcacgcgttcggacagaagacttattggcgtgcacttgaggagggatgtggtgagccaggggccaaactaacgaatacatggactatacacatagggtagccgaacgtatctgtccaaatcaaagatcagaccttggacattgagcatgctctatcgagcctagtacttttatgttaggtggagcgctatagagaaaaggagttgactgaactcataatacttgcaaatgatatactgcaattcaaacttcgtgaccggttgcattctatgctcgtttgattttctggaatta

SEQ ID NO: 32372 - DNA, 270 bp, Gossypium hirsutum
  Clone ID: LIB3120-031-Q1-K1-E6
gttaaaatgcctgaaccgggacgcggtggctgacggcgacgcatagggaggaccggaaactgtctgcggcggctctcgggaagagagatgttttctgtttaacaggcactgcccaccctggaaacgtgctcaaccggagtgtacggtgcagcggctggatgagcaccgcacgtcatgtggtgttccgtgcgcctccggcggaccttgataattctgacgaccgagtgccgtacgcgctcggacgtactcataaccgcatcatgtcttcaa

SEQ ID NO: 32373 - DNA, 333 bp, Gossypium hirsutum
  Clone ID: LIB3120-031-Q1-K1-F6
cggacgcgtgggcttttattgatgaagcaccttcaccggctccagcactagttccttcaacatgggctgacccgacatccattcgggcggacccgtacccgaccgatcccggcgatacatcggactgcattttcgatgtaaccgcatatggtgcggtcggcgacggttctttatacgatacggcggcgtttagggaaacatggaaagctgtttgtactggtgaatcagccaccattttggtaccatctgataacattttcaccatcacttctactatcttttcagggccatgcaaacctggacttgtgctacaagttaatgggggtcttaatg

SEQ ID NO: 32374 - DNA, 208 bp, Gossypium hirsutum
  Clone ID: LIB3120-031-Q1-K1-F7
ttagaaatttatcttaaatggctactgcatctattatcttcaaatatctcctagcgggtatagggctatctctagcagccatctcgacttactcctttatgaaacgataatgtgattccattcacaaaacgaccaacgtttccgtaccgaagaaggctgcctacccttttactatcgaatcggcgcacaaaaaaggaactctgtatac

SEQ ID NO: 32375 - DNA, 221 bp, Gossypium hirsutum
  unsure (1)..(221): unsure at all n locations
  Clone ID: LIB3120-031-Q1-K1-F9
tctcctacgctttcgatgcgcaagacatactgtttttgaatgactcaantactgctggagggaatgcgacacatgctgctcgtcgaatacatcaaatgttcaagatgcaatcctttcattgtaaacagttgaaagagttcattgtttctttgtctgatgaacattttatttcacttctaacttcttagacacgcaagccatttttaagtgatgtggtatct

SEQ ID NO: 32376 - DNA, 219 bp, Gossypium hirsutum
  Clone ID: LIB3120-031-Q1-K1-G4
gttctacatcgcgagcggctgcccttcattttttttttttttatggctggagcagccggtatcatcggcgtcaaccacggagctcggcggctcgattatgttcctgccactatcatggccttggaagaggatgtcaaagctgctcaaggacgggtgcttgactactaggacgggggtgttcggcgtgaaaccgacgttttaaagctttagcatttggag

SEQ ID NO: 32377 - DNA, 185 bp, Gossypium hirsutum
  Clone ID: LIB3120-031-Q1-K1-G9
cccacgcgtccggtggatttagtttctcacgccttctgtctgggatctctttctgcgcatctgggatagatcggggggggaccttttctctacctcactacaaattcagctcttactcgtttgctcgggacgggtatgttggtacccttgtgtaacctgtcgtagttgacttgttttgagctttt

SEQ ID NO: 32378 - DNA, 148 bp, Gossypium hirsutum
  Clone ID: LIB3120-031-Q1-K1-H12
taagaatggagtcaaattcggtgtggctgtgttgttcaaggccggatctcacatcgttatctgaggtgggcttgaccacttgggaaacccaagcttgatccactctcaaagcattatggccatctgggctttccaagttatcttgatg

SEQ ID NO: 32379 - DNA, 246 bp, Gossypium hirsutum
  Clone ID: LIB3120-031-Q1-K1-H6
ctggggttaatggattattgatgttgattctttctgaagtgccaaagggtaattaggttggtcagagcggggagctttgaattgatctgttgatgggtattttttagattctgatttggaatcaggaacttgaaggtgaactttttgtttgtggatttccttttgtggtttcagctggattttggggataaaatctggggtcttgggcaaattctttaatggcttctttggattttggttctcaaa

SEQ ID NO: 32380 - DNA, 458 bp, Gossypium hirsutum
  Clone ID: LIB3120-032-Q1-K1-A4
cttcaaatgggaatctaaatttccagatttaaagtgatttttcaagtagtcgtcgccaaaaatttgacaattatagacaacgaaattaaggcattgatctcaacaaacaatgatacaaacaaaacgagtgttttttttttttttttaaattaactaacatactgtttctcaagaaggcttccacagaatgccaaatcgaaccgttcctctggtggatctccaatgcaatcgaacactgcatcggcattcaagaagtcttcatcggctgtataaccgctcttatagtttttgtgtacaggcaaaaacacttcttttttcttttttatctaccaatgatagctctgagtccgaccagacagtttggaaaattttggccttaaaacttagaagccaatgttgttaatctcttgtccagctgcaaacatcttaatattatagtaactgatgttttaatgaaa

SEQ ID NO: 32381 - DNA, 478 bp, Gossypium hirsutum
  Clone ID: LIB3120-032-Q1-K1-A7
ccagcatttttcttttcacagatggatgagcttcaccacttctgatgcttcaataatgaggtggataagatgattgcaagtgggaaaaacaccaattttctgacaagacaagacgaagacgacgacaaaagaaacgaaaccaacaaaggtctatcgagttcttcttcttcttcacaatggttaaggttaaaagatccgagaatcgtacgtgtttcaagggccttcgggggtaaagacaggcacagcaaagtttacacgatacgaggattaagagactgaagggtaaggctgtcggttcctactgccattcaattatatgatctttaagacaggcttggtcttaatcaacctataaaagacgctgactgggtgcttaatgctgctaaacatgaaatcgatgaactccaacctctgccgatgccctcaccgccggcgaactttccgattttcgatgcattttggagaactaaatcgaaag

SEQ ID NO: 32382 - DNA, 315 bp, Gossypium hirsutum
  Clone ID: LIB3120-032-Q1-K1-B3
ggatggtgccttacactaccgtgcttcctacatctttacctcctctttgtacgctcgacaacgggggggatttcggacttggggcggggctaaccttaactctaatccttatcctacgactctaaaccaagaccggccggatttagctgcccctgtgcctttgctcacccagagagaagagatgggaaacaagtcctactactaatcccttgaagctctcaagaaacttcttaatgagaaaggagaactgaaaactgtagcatctgcgagggtagatcaaataacagacgaatttaacacaacatcaggttgacg

SEQ ID NO: 32383 - DNA, 203 bp, Gossypium hirsutum
  Clone ID: LIB3120-032-Q1-K1-B4
accataatcaatggctgccgatttacaaacattttcttgctttcatggcacgttccaactcttgggtgtgccacgactttacggggtcttccctttcttggcccgggcgcttccatctaacagacgcttcctgttcgcgcatgttaagggggcggggttatctttgttcaccaccacctttcaagaagggatagtggagtttt

SEQ ID NO: 32384 - DNA, 393 bp, Gossypium hirsutum
  Clone ID: LIB3120-032-Q1-K1-C3
gacgaaagacggataaacaaacaagaaaatatgttaagacccttcgatataagaatctgtatgggatctactaaattcaacggggtggcataaaaagaaagcgaataaataaacgaaagaaaataaacaaatgaaagaagggggaaaggagggagaaagggggaaggaggggcatcctaatgagatcctaatctcaagacacaaaaggggatatggcgaaattggtagacgctacggacttaattggattgagccttggtatggaaacctactaagtgataactgtcaaattcagagaaaccctggaatgaaaaaagggcaattctgagccaaatactattattgtattatttgacgaaaataaacatgaacaaaggttcagcaagcgagaat

SEQ ID NO: 32385 - DNA, 401 bp, Gossypium hirsutum
  Clone ID: LIB3120-032-Q1-K1-D3
tgcactggtgggaaaatgaatcatgccacctgtttttatgagaaaatgtgtgaaatcggcattgcgcctattttgactacttatgagacactgatatggggatatggtgaagcaaaacactcatgggaagctgaaaaactcctgctgattatggaagagaagggaatctctgctgagaggagcaccatacagctcgttgcggatgcttgacgtgccatcgggttactacatgaagcacggaaaacaataaaaaatgtggatctgggaattggattgactactaataatgacataccggcggatggcatggtgaagacgtacaagacacaaagcctaagtgcttcttattgtaatgatctgcatatgcctgtggtatccatgaaagaacaaaacggatcatc

SEQ ID NO: 32386 - DNA, 480 bp, Gossypium hirsutum
  Clone ID: LIB3120-032-Q1-K1-D8
aataaattattgagttttaacagattatttgttatccgcccttcaccatttcaaaccctcgcgggctgtaacttatctggggcggaagttctactgtacctggtgatcatgcaattccccatgggaatgcagtgatttcttcgaaaaaggaacaaatatttcaccaagaggcagctctagggagagccaaccttcaagaaactgtggtgaatgctaaatcctcaaatggtagagtaatgcttattgatggctcatcagtcatttatagggcctactacatacttctagcaaaactgcaccatgggtacctatcacatgctgatggcaactgtgactgggctgtaactatatttacagcttgatcacttataattgatgttctggaatttgttcctttacatgtaggggtcggtgtttgaccatgattgaattccatgtggtcatacatctatttgttcaatagaaaatgtgttgggaaat

SEQ ID NO: 32387 - DNA, 461 bp, Gossypium hirsutum
  Clone ID: LIB3120-032-Q1-K1-E3
ggtggatctgctgagttaactcggtctgccttgtttaatctcccccacccccaatcaaatccgcggaacaagaaagtcaaaaaagagggcagtgaaaaaatatggattttgatgaacatgatgaccaagaagaagaaatgggtatggctgttccaccaggctacgattcactgggtaccttatcggaaacttggtcgaaaccgggacctaccaccaccggcggtggtgatggcttggcgagaaaagtggggttcaccactgtaaggtatcgagagtgtctgaagaaccacgccgtgagtatcgtctgccacacggtggatggttgctgcgagttcataacggccggtgatgaagggaccgtcgaggcctttgaaatgcgccgcctttaactgccataggaattttcatcggaaggaaacccagggggaaaagaatgtttatatgctataacccttactacc

SEQ ID NO: 32388 - DNA, 450 bp, Gossypium hirsutum
  Clone ID: LIB3120-032-Q1-K1-E4
cggacgcgtgggtttgctttggggtctgacttttgattttagtgaatggatttctggcatggggagcatgtaaataatggggtttttctgtgatctaacacttccaattcgaacttagttttttttcttcttcttctgataacactagcagttgaaacttgaaactcaaccttaaaaaactgtcttgttcccttggtttcttgttttctctctggtgaagttcaaaataataatgggaatgagaagaagagaaatgggtttttattttttggctttcttatggttttgggttcctataaacggattgctttctcctaaaggggtaaactatgaagtgcaagctttaatggctataaaggatgctttgcatgatcctcatggcgttcttgataattgggatgccgatgctggtgatccatgtacgtgggcaatgggtacttggtcacctga

SEQ ID NO: 32389 - DNA, 240 bp, Gossypium hirsutum
  Clone ID: LIB3120-032-Q1-K1-F8
gcgggcgggcgtccgaatcccagctcttacagatggagaaaagtgcttacttgcgcggttgtgccgatatactaggggggatcgacagaagacttgcggggggcaatcaaataagatcatgaactataccaatgctatgactcaaaacggctgtaacaagatgtgtgactatagacgggtatgggtacgatgggaaatagacaagtcctctactttgtaatgccaaaaacaaaaaacaaa

SEQ ID NO: 32390 - DNA, 396 bp, Gossypium hirsutum
  Clone ID: LIB3120-032-Q1-K1-H3
cccacgcagtcgcttttctttcctaattcccttttttttctcagcctgtctcaacctgatctgggatgctatacccgaaaaactcgactagtctctcattctttttaatacgaatgaggtaagcctaagctctcatctgttagacttagggctgattgataatcctcctcttatcaagtgctttgattccatcctaaaatatcatcactctcactctttttagtggtgcatttctcaaatgcttatgcacccttatgacctctttggattccccctgatcgtatggcgaatctatctactgctgctctgtattcgatgatgaatttaaaccgtaagaaatagtttggcttcgctgtaaaaacattgcatttggagatctcaattcttcaatccccg

SEQ ID NO: 32391 - DNA, 137 bp, Gossypium hirsutum
  Clone ID: LIB3120-033-P1-K1-A7
gttccttgtactctgtactaattacactaatttttacagcactttcattactcgtcctaacggcaccactaaaaggcacactggttcaccatataaaaactaatcatatatttctccacccacttttattactattt

SEQ ID NO: 32392 - DNA, 230 bp, Gossypium hirsutum
  Clone ID: LIB3120-033-P1-K1-A8
accgatccttcctggcacaggccatcatggtgggcctcaaaaccggccttaaataagccaatgcctatccattcaccaatgaggccaacaacgacatcacttcttctttcaagcaacactaagagagtgcaatgcatgcacgagatgcctactattgtgaaaaacaagtacgagactctttaatacatcccatatcttactctcgaacaactgtctaaagaagtatatta

SEQ ID NO: 32393 - DNA, 255 bp, Gossypium hirsutum
  unsure (1)..(255): unsure at all n locations
  Clone ID: LIB3120-033-P1-K1-B12
ttcatcacactttctgtcgctactaatttataccgggccacgtcgaaatacaggggacgactcacaaaataaaccanaactaccancacgacatgatagccaacattctcaatcaggcccatcacattcataccaccattacaagcatgtataagangaacttcatcaccttgcagatggcacagaccactgttnctatggtagccaagatgaagaacatgttgctcgacattccctaattgctggacaacatct

SEQ ID NO: 32394 - DNA, 277 bp, Gossypium hirsutum
  Clone ID: LIB3120-033-P1-K1-B3
atcagtcagactcttatgcatacctgtaccctttcgtaatatttatcaggaatagccatgggcttcttcatgagcttattggcggccattgcctccgtgaaccgttcctacccggcacatgcctacatggtggccccctttaccggtctcaaatcagcctgtgcttttccaggcaccactatggccaacaaagacatcactttttttgcaagcaaccgtgtgagagtgcagagcatgcatgtgtggccgactcttgtgaagaagaagttccagacat

SEQ ID NO: 32395 - DNA, 469 bp, Gossypium hirsutum
  unsure (1)..(469): unsure at all n locations
  Clone ID: LIB3120-033-P1-K1-B4
gcggacgcccacgcgaacggcgaacaagaacgacacagacggnggnncccccggagggggggaagccggggaaaaggcggaggncaaaaaccagaaaagggctgacaccaagaacgagagcaagggagagcgccacacccccaaaacggaaaacaaccaggcaggaaggcaaacaaacaggggcaccacaaacaagggccgcgaaaacaacaacgcgcggcaaaacaacacgaaagaacgggcggcgacggagcacaacgaaacagagccggagcaaacacagaagcagctcccccaccgaaagaagggatgaaaaacaaacacagccagagggaaacaaagggggggcaagccaacaaagggcagcaaaaaaagaaaaaacggcaccacacattcaaaggcctccctaaaagccttagaaaccaggggaaggagggggccgggaaccacaacaatccccgattaacag

SEQ ID NO: 32396 - DNA, 304 bp, Gossypium hirsutum
  Clone ID: LIB3120-033-P1-K1-B6
tcgatcagagagactcttttgtatacctgtagcatatattaatagttagcagcaatagcaatggggtccttcatgagctcatcggcggccattgtcaccccgaaccgctcctccccggcacaggccaacatgggggccccctttaccggccccaaatcttcctctgctttcccagtcaccaggaaggcctacaactacatcacttttcttgcaagcaacagtgggagagtgcactgcacgcacgtgtggcctcctctcgtgaataataaatactagactctctcatacctcccccatcttactc

SEQ ID NO: 32397 - DNA, 207 bp, Gossypium hirsutum
  Clone ID: LIB3120-033-P1-K1-B7
ctcaggccgtaatgcacttttgtgctctttgatttgattatctccgagaagaaccctcgggaggaagccgtaaatttcaacggatcaaagactgagcttgtgctttggtaagcctctcagttcaaactacgtctcatgtcagagcttgacatgcaaactgctactcgctttgacccctctgcagatgcaaatgctgaggactcaggt

SEQ ID NO: 32398 - DNA, 320 bp, Gossypium hirsutum
  Clone ID: LIB3120-033-P1-K1-B8
ccgggtcgagcgacgcgtccggtgagactctttagtatacctgtagcatatatttatagtaattagtaatagcaaatggcctagtgcatcatctgattggcaaccgggggtcaccgtgaaccgctccttccctgcacaggccaacatggaggaccccttcaccggcctcaaatctgactctgcttttccagtcaccaggaaggccaacaacgacatcacttcttttgcaagcaacggtgggagagtgcaatgcatgcatgtgtgggcgtctcttgtgaagaagaagatcgagacttttttatacctgtccgatcttactt

SEQ ID NO: 32399 - DNA, 304 bp, Gossypium hirsutum
  unsure (1)..(304): unsure at all n locations
  Clone ID: LIB3120-033-P1-K1-C6
aaccgggncgagcgacacgtccggagagactcttttttatacctgtagcatattttaatagtaagcagtaatagcaaaggcctccgccatcatctgataggcaaccggggccaccaagaacctctcctctcacacacagaacaacaaagtgggccccttcaccggcctcaaataagtctttgctttcccagtcaccaggaaggccaacaacaacatcacttttcttttaagcaacagtgggagaaagcaaagcatgtcaatgtggtcgcctctttggaagaagaaaaaagagacattcttatac

SEQ ID NO: 32400 - DNA, 147 bp, Gossypium hirsutum
  unsure (1)..(147): unsure at all n locations
  Clone ID: LIB3120-033-P1-K1-D10
ctgnnnctccttttttttctctcttttaacaattttggctttaggccataaaatcaggagcgggtgttctaagctgatctttctttctagactttctcgtcagtctcatgatgctaagactctttcatcattgccctgccaaatcat

SEQ ID NO: 32401 - DNA, 311 bp, Gossypium hirsutum
  Clone ID: LIB3120-033-P1-K1-D4
gagaagccgaagctatttctgtaagattccaagtccaatgctatgcgaagcatgtggaaaaggatttgatggcggtaaaaaaccgacggcaaattatatgcaaaatttgaggtgaaagtggttttggatgggatgatatcatgaaaatgatcacatgtgatagagcgacatatgttgcatcagtgatggcacacaatatgtttgaaccatttctgaataaaatcatcgatcattatgatgaaatggcttttgttgttggcaaagatattgtgtaacagggagttttgccagaacattttctgacatatatt

SEQ ID NO: 32402 - DNA, 282 bp, Gossypium hirsutum
  Clone ID: LIB3120-033-P1-K1-D5
gcttacgtccacgcgtacgggatctgttgttagagttgtcaatgtggcgtttcaaaggtgatcttgcggtgcgtgcagagcgaacttatacatctttaatgagagatgctaaacactacatagaggtctggaaaaaagatccttcaaatgaaccctaccgtgttattcttgtgataggtagggacaagcagtattatacacgtgaaaggttttgccaaatgtatgactcaaggtaactttgacattccagaggaggaaacttttaccaacatataacatttt

SEQ ID NO: 32403 - DNA, 334 bp, Gossypium hirsutum
  Clone ID: LIB3120-033-P1-K1-E1
acaacaccaactgcagaacactggcctgtacaaccatggcttttctttccccatcattcgccagggcggcagggaagttctgccctgtccaccccggaaatccacggaactggccgggtttacatgaggcaaaccaccaaacctgatcctcttgctagaccatgcaacggaactgaccgcaatacaaccattgggcctcttactcagaagacaccatcttactttgacgcgggagcatcttgttgctcatggctggccaagcccttatctttgatgtcagcccatgctctttctttggaacggcttgctacccttactgttctagggcttgggc

SEQ ID NO: 32404 - DNA, 218 bp, Gossypium hirsutum
  unsure (1)..(218): unsure at all n locations
  Clone ID: LIB3120-033-P1-K1-F10
ttccatcacactgccggccgttactagtggatatcgggagccgggctaacgcaggaccaacaagcagcttaccttcttctggatggaaggcaggaaaaggtcgatggagtcctgcatagactcctgctagacgtcgagcacattataggagctgttcnacgctagaatccatgctacggcggtcttgcaaatatantatgccgttccggtgccggact

SEQ ID NO: 32405 - DNA, 257 bp, Gossypium hirsutum
  unsure (1)..(257): unsure at all n locations
  Clone ID: LIB3120-033-P1-K1-G3
agctaatcctncactttgtaggttactatttatatacttttttttgcttatcgtgataaacgggaattaccgatattttgtttgtagcttatttgcaacatctgcagttgaattcgttcatctgaactttgggattttagtcttgaaataaaatgagtctatgtgagagtgattttgtcctgttcttaaacatacaaagcagctagatattcatgggaaacgtcttatcctttagaagaggagaattcatgtgaaaa

SEQ ID NO: 32406 - DNA, 284 bp, Gossypium hirsutum
  unsure (1)..(284): unsure at all n locations
  Clone ID: LIB3120-033-P1-K1-H9
ctctagatcgcatcgctccagcggcccncanactcatggatatatccagacttccatcacactgtcgctcgttactaatggatcgggcaatatcacatcaccactttgaaatctaactcctactcaatcaaccaagtctccattaactaatgcactcactaatctcccatctgctcgcttcagtacattagtcaatgccttgngccctttctacttcaccaacaccaccgatgtattctacatcgtctcctctttcatcccagacattgttgttcacatcacca

SEQ ID NO: 32407 - DNA, 377 bp, Gossypium hirsutum
  Clone ID: LIB3120-034-Q1-K1-A10
aacttccttctcaaagttctcttctctcagagtcaggttgccactttccaccttttctgtttatcattttatgtttctggactttgtttttattcttttatgttttgctttgacattcaagacttttttttttggactgtgaatcgggaattttacaggaattgaagggttgaataacaatgggattttgctctttttgttgtttagcatcttaggcattcaggacactgaggccaggtttagaatttagaaattcaataacactcgccaataagcttgttatagacattgaatactactggaaatgaacaaggaaagtattttcttattaagataatttcttgtaaaacttgaaaagttattaatttcatttcaaa

SEQ ID NO: 32408 - DNA, 232 bp, Gossypium hirsutum
  Clone ID: LIB3120-034-Q1-K1-A2
tgcttttgcagcgcttgatggaagcagctcaagttgtgaacagtaatggcaatgccgatggtgactaccagtacgaaattatcagttggttcgatagtgtatcgaagaacgccgccatggtccagacggagacacttggccagattcttcatctcaactatggtgtggagtacctgaaaaaatggtttggggacatgaagatccaagacatggatgcttgtgcattggaatc

SEQ ID NO: 32409 - DNA, 381 bp, Gossypium hirsutum
  unsure (1)..(381): unsure at all n locations
  Clone ID: LIB3120-034-Q1-K1-B11
cccacgcgtccgcccacgcgtccgcccacgcgtccgtaaattcatgacaatcctcggagcctttcacgattccactttgttctaaagatggaaaatatgaaggttttttcagttaaggtggaggatggaagggaaggacgagatgggaagccatcagttggtcccgtgtaccgtaacctactcgccaagcaaggataccctccacctgatcctgagatgtctaccacatggactcttttcagggatgtcgggttgggatttatggagcaaactgcccgcagtggattatggcaatggaggcctgcggtgcccacagtttggtttgtgtgcctctctatgatacactagggtctggagctgtaaattntatcatagaccatg

SEQ ID NO: 32410 - DNA, 381 bp, Gossypium hirsutum
  Clone ID: LIB3120-034-Q1-K1-B4
atttgatttggttagttgcttaactacgttcttttgttttagttgttaaattttctcgtattatctgttgttctcaaaaaaatgaaaaaaaaagtggaaaaaaatgcatttatgttgattattactagttctatatttttgagcttaagtagttaattttatattctaagaagaagctcgtgttattctttaataatttggattgatgtaatttttcagtattagtttatttttctagttaggtaatttatcaattcgatctcgattctaaccttcttttttagcctttatctacacctttaacccaagccctgttacaacccttttaaagacctttttattttgtgtatcatatcattttgtagtggtggatatttgatt

SEQ ID NO: 32411 - DNA, 387 bp, Gossypium hirsutum
  unsure (1)..(387): unsure at all n locations
  Clone ID: LIB3120-034-Q1-K1-C12
cccacgcgtccggccaatctttcatactctcgatctgtggctcaacttgcgcggagcgagaaaattagctagtttcttttagacagtagcgattagcgaatcctagctttcccctgccttcctctgctttgcttattgacctctttaatcaaacgagttcttgccactgacttcttgcattcaaaagaagggggaagttaacaagtgtggtttcagtcagtgatacacactaagctgagagcagatgtatttctttctttaggcagngttgatgatgttcttgggtctgagtacactcagacatgccaatttcatgtttaatgactaacagtcttgtgactgatgcttaacgaatgatctttgggaagcaaatgagaaagggcatga

SEQ ID NO: 32412 - DNA, 353 bp, Gossypium hirsutum
  Clone ID: LIB3120-034-Q1-K1-C3
cccacgcgtccgaattttttttcactctctaaaccctagtttcatccctaattttcatgtccaaatctttccttaaatgcgttaaatctcaatatttgctcgaatttcaagcagaatttgaattttcgaatcggagtttcgcccttgaccgaacgtgttcggtttcgaattgactttttctttcgcgagcttattttgcttgggattcgaagaacttttatccgagtaagtttcgtattttttggtggtgttggagcttctcggagtttagctattggaagagattcgttgaattttattggtctcgcagcttgtttgaagtgaattttggttgaaaattgagaaatgtttgt

SEQ ID NO: 32413 - DNA, 399 bp, Gossypium hirsutum
  Clone ID: LIB3120-034-Q1-K1-C8
cccacgcgtccggaaaaatcatttcatttttttagttagaattttaggcgggtctcgaaaaaagatagcgaagaaaattatccctagagtagatactaagaggaatgtataaaccaatgcttccataaattcgatcgtggtttacaattatagcttccgtacctgtttatttggaatcatctcccgaataaagaaagaacaagaatcaaagaaaaggcagcgattaaaatcaagatttttccagcagcctatggcaaatcacaaatagaagtagaagcaaaaaataacaaagcaatcttgcatcagactacttgtcttcttgtagttggatctccaagttttttgaatgctccaaattccacttgagcatccaaatctggatcaatactcggcaaaaca

SEQ ID NO: 32414 - DNA, 127 bp, Gossypium hirsutum
  Clone ID: LIB3120-034-Q1-K1-D1
tccaggcttctaagctttttataaactttgtctctccatcgtttttctgaggacaaaggcaaacggatggagagacagagggtataaaaagcttataagcctggaggcccgcgtgcctcgactcttg

SEQ ID NO: 32415 - DNA, 444 bp, Gossypium hirsutum
  Clone ID: LIB3120-034-Q1-K1-D10
gtagaagtcctgcacaaagtgccagtggaggatctcttgaagatcatccaggcatgaatagcagagcttcttgtcctgtgctttcagagaaacatgagcaattacatcgtaacatgaaggagaaaagtgagagttatagggcaaatgttgccactgatgtgaataccgaatcttggcagagcaatgacttcaaagatgtgctgactgggtctgatgagggagatggttcacctgcagctgttcatgatgaggaaaactgtaggactggagaagatgctaggaaaacaactgaagttacaaaaactgcttcctcatcttctggaaatgaacttaaatcagggaaactgcaagatgcttcttttagttccataaatgctctaattgatagttgtgctaagtacgccgaagcaaatgagtgcttgccagttggggatgatgctggaa

SEQ ID NO: 32416 - DNA, 332 bp, Gossypium hirsutum
  Clone ID: LIB3120-034-Q1-K1-D4
catacacctatggaactttattggaactacatagatctatggaatcggttaatatatgctgaatcgcacaagagaaatgaaaaaactgcgaatattgtgggattagcttcgtcggagacaaaaatatagaatgtgagtaggcaagacaagattgagtcaaaagaattccttttttttaagtaaagatctatatgtgtcatagggcgatatgaatggtatatcacacgcactagaccggttatacgagatctatggtgagggaggaggccaacacttctattggcatatagcaggtttacaagtccatgcccaagtgcttattacctcttggg

SEQ ID NO: 32417 - DNA, 372 bp, Gossypium hirsutum
  Clone ID: LIB3120-034-Q1-K1-D6
cccacgcgtccgggaagggcttcttcaagctggttcttcatatttttattacaagtaagttcaattcttgactatttcttgaaatttttgtatttttatgacttttacaactaggcccacttgttaaatccattagtttttgattttatgaaagaagttgaaagttgatatgaatatgtgctggaagtatatgatgatttagcatgaaattagagctttaaattgttcatatgctgattttattgaaagaattgaatagaaagtgaatgtttgggacctaatagtaaaagagtttgaagatagagttatatgtggaaattctgaatttcaatagttgtgtaacaacttataatgtctagtaaagtactaatt

SEQ ID NO: 32418 - DNA, 378 bp, Gossypium hirsutum
  unsure (1)..(378): unsure at all n locations
  Clone ID: LIB3120-034-Q1-K1-E4
cccacgcgtccgagaactttccactatgtcgacgaaatccttccgttcagttttggtggggctgatctgcctattgacgatattgctgcagttttccttctggtatactttggagtttcaacgttgcttgatgctgcttcaagtgataatcaaaaagcagaagatgaacaaaaggaggcagaattagcagtttcagaattttcaggaaatggagctggaatcttagctgctgccaacactgttattagcactttcttcttggttttcgttgctgagtggggtgataaatcattcttttccacaattgcactagcggcagcatcttctcctctcggagtcattgcangtgcactggctggtcatgggtgtgctactctg

SEQ ID NO: 32419 - DNA, 243 bp, Gossypium hirsutum
  Clone ID: LIB3120-034-Q1-K1-F1
ggaatgcagcaagatgtgtttgcacgctttgaattcttcatctgaaccccataagggggtctgggtttctgaatcggggatggggattctccttgatcttggatactctacaacagagaagcacttcatgtcccatctcgaaatgcatgaccttgttgaagacggttgatttccgttgtatataagataatagtacatctcagcgtgataaggttgttcaaagaatggaaactaatgggaaaa

SEQ ID NO: 32420 - DNA, 396 bp, Gossypium hirsutum
  unsure (1)..(396): unsure at all n locations
  Clone ID: LIB3120-034-Q1-K1-F2
agtataaagatgatgaaggtgacaaggttctactcaccaatgatactgatcttgttgctgcggttaacagtgctagatccataggaaagaaggtgttaagattgcatctggatttttccgagtcagctgagcaattacaatcagaaccaattgcaagtgccaagagaagcagcgcaggggtacctttgcacttgggtttattggcaggtactgttgtcctgaccagcatcggcgtacttgtctacttaaagcgttcagaattgtgaggttatgctaatttatctaccaaaaacaacantatatgaatcgtagcattgattaattagggcaggcaatgaaagttaatctggggtagaaagtacgaacttaagttctttatacagtccacagaaatca

SEQ ID NO: 32421 - DNA, 362 bp, Gossypium hirsutum
  Clone ID: LIB3120-034-Q1-K1-F6
cccacgcgtccggttctcaagcactttgattggcctgaaggaaaggctgatgcattaagagaggcagcttttgaataccaggacctaatgaagttggagaagctggtctcttcctttgttgatgatccaaaccttccatgtgaagctgctctgaagaagatgtacaagttgcttgagaaagtggaacaaagtgtatatgccctcttgcgtacaagagatatggctatttcacgatacagggagtttggaattccagtgaattggttattagattctgggattgttggcaagatcaagctttcatctgtacaattggcaaggaaatatatgaaacgtgtagcatcagaacttgatgcactgag

SEQ ID NO: 32422 - DNA, 440 bp, Gossypium hirsutum
  unsure (1)..(440): unsure at all n locations
  Clone ID: LIB3120-034-Q1-K1-G10
ggaattggcagcttggtccttgacacaattggtcacactatcagtcaaaagtaccacagcagggttattcaagtagtacctctcttctgttttcatgtatttgacttcagttcatgatgaccatgtctaaatcacttcatagatatgtgttaactattattagtctttcatactgcggaaagactgaaactgatatccacagaaaccaattacttattgtataccgacttcggtgcagcatgaagctggtcatttcttgatcgcgtacctggtgggcatccttcctagaggatatacattaactagtttggaagctntaaagaaagaaggatcactcaatattcaagcaggaacagcctttgtggattttgagtttctcgaagaagtcaatgcagggaaagtatcagctacgacactgaacagattcttatgcatagccc

SEQ ID NO: 32423 - DNA, 268 bp, Gossypium hirsutum
  Clone ID: LIB3120-034-Q1-K1-H3
atctcttttacaagttcattattttttctgcatcttttatatagcgtattacgtgaatgtttatgggttctctttcctttaagaactgcatcactatcttcttttaaaaacttttcctttcttctaggtctttatttcttttttgatttccttctttttttcccacttattatgtcccttgaaaaggtttgaaattcaagcaagtttgtatctttatactttcattataatttcttttccgcattgattttaataaaattaacttttt

SEQ ID NO: 32424 - DNA, 420 bp, Gossypium hirsutum
  unsure (1)..(420): unsure at all n locations
  Clone ID: LIB3120-034-Q1-K1-H5
aaaggcctatcaacgaagagttctaccagaaatgggctcaggtgcaagatcaggtaagcggggccattctagtgatcttgcattacctctcaatcgaactcataacggatttgcgtctggccttatggtcctgttcgagcaacttcatcatgcttctcgtagtcaagatgctcctcttctctccctccgtattgtaggcccgacctctcttactgttccatcatcggcaactccaaataacaaagttgaagctaaaaagacttgcacctggctttgtggaactatcctncatgtctaaaactaaggccatgaatggtctttccactattattccacaagaagaaactgcaacagtattaaccccaaagcactttgctacaatgtggcctcttgcttcaatcaatggttccaatgctaatt

SEQ ID NO: 32425 - DNA, 421 bp, Gossypium hirsutum
  Clone ID: LIB3120-034-Q1-K1-H7
attttaatatataaaatataaattttaaatatttttaaacaataaatattagttatttataaaatttaattagaatatataaactatattttaaatatttaaatataactattaaatatttgtaattagtattttaaaaaatattttttatttttaattaatgattttaatacatttataattaagtaccaagaaaaaaaaaaggaagcattatgttattggaggggtgaaaaagtaattaagcactaaaaatgctttttgtagagaaaaagttaaaaaatttagcttttctttttcaaaagtgcttgaaaaactaaaaatttcagccaaaagcaacttgttgttctgcatagcttttttttccaaaaatgcttttgaaagcatagtttttttttttccaaaaatgtttttgaaaagcaat

SEQ ID NO: 32426 - DNA, 317 bp, Gossypium hirsutum
  Clone ID: LIB3120-034-Q1-K1-H8
cccacgcgtccgtcatttttctttctgttcatggcgttttcgagtccttctgctgttcattcggctacaccagatatggtttccaatgtcgctgatggtttcgacactcagttcttttctattaaaaagattagtgtgcttcttgacgatgataattatcttctatggcgacaaccagtactgcttgtgatcaagacttataaactgagcgctttctggacacccgcactgttcctcctcctcaaatgcttccagaagctgatggggttcctcaagaaaatcttgagttcactcgctttgagcaacaagatagtgcg

SEQ ID NO: 32427 - DNA, 414 bp, Gossypium hirsutum
  Clone ID: LIB3120-036-Q1-K1-A1
gacacattctcttttagagcttactcatcacttaatcaaattcatccatggcttcttttgctactttcaatattgtcggtctgagatttggtgagccagtctattggattcattccaatgcagaaaccaggcggcttggtgggtctgtccctgagtcggatcatacccaccagccattgctgttctaataccacaatggccctgttctaactagcaacatatttgttgacttcatttggtatggaaatttcaagccttctcaacgagccatttgttcccattgtatcaattccctcgcctcttctaagcttgtttcaacttaaccatctgttgctacatagaggaaagccatggatacatactataaccctaccaacaaatcttctttccttgtcaatagcttgggatcacaaa

SEQ ID NO: 32428 - DNA, 449 bp, Gossypium hirsutum
  Clone ID: LIB3120-036-Q1-K1-B4
cgaagggactcgccttccttcacagtgcggaaacaagagttatatatcgagacttcaagacttccaacatcttgctcgatacgaactacaatgcaaagctctctgattttgggttggccaaagatgggccaacaggtgataagagccatgtttctacccgagttatggggacttacggatatgctgccccggagtatcttgccacaggtcatttgtctgcaaggagtgatgtgtatagttttggagttgtgctgctggagatgttatctggccggagagtagttgacaagaatcgaccatctggagaacataaactggtggaatgggccaaaccttaccttgccaacaaacgcaaaatatttcgtgtcctaaataatcgccttgaaggccagtatacaatcgaaggagcctttaaggctgctacccttgctttgcgatgcctgtcgatc

SEQ ID NO: 32429 - DNA, 411 bp, Gossypium hirsutum
  Clone ID: LIB3120-036-Q1-K1-C1
cccacgcgtccgcccacgcgtccgctctttctcccaattgaaaggaaaatggcaaccatatctactaccaccttcacctcatcaatcacccctgcactcaagccatcagcaagggttgcatccccagtcgctattgggtttcctgcaattgcaaagaaggggaaagtgatgtgctccatggagaagaagggttcaggagaggagaatgggttaaccatgggcatgagagcatcactattggcagcagcagcagcctgtgcagcaacggtgtcaagcccctcatccatgggtctggtggacgagagaatgtccacagaagggaccggacttccctttggtttgagcaacaaccttcttgtgtggatactattaggcgtattcggcttgatttgggcactttattttgttaca

SEQ ID NO: 32430 - DNA, 372 bp, Gossypium hirsutum
  Clone ID: LIB3120-036-Q1-K1-C10
aaaaaagggaataattttcgtcttcattcaatctttctgctgctgaccattctttcctaaggggttcatcatgtgcaatttgaagacccaaatcagaatatgctattgttataagattaattattaagaattggtgttggatattatctgtttttgaatagtttggttagtttaatctttgttgatataaaatttaagttatggaagcggaaggtggttcacacggtggtgtctagaaccgaaatagagttgataggttttggatgcttgagtcatgctatatatatatatctcttccttgaccggtccaacgttatataggtgttgaaccgatgggaagttattatcagagtcatggagggtcttaacctt

SEQ ID NO: 32431 - DNA, 425 bp, Gossypium hirsutum
  Clone ID: LIB3120-036-Q1-K1-C12
cccacgcgtccgcccacgcgtccgcatagtactactacttacaaagtctcaaacaacaagcagaaaaaagaaaagaaaatggtgtgtttgtggtactaataaaaaaaaaatggagtctttgaggtacaagatgaagaagaggctaagtctttcatggtaggagtgttgttttttttttatttagaaagtttatcaataggaaagttttgggttttgggtgtgttttattttttggttgttttagatgaaggccatgcccgtatcctttgaggaatttcaagggaagggggctttagatttttcttctataacatcatcgtgttcagattcatcactgttattacaacaccagcgattactctcccaaaaaaaagggaagtgggagaacaagggaggagattgttgctatgtgggcagtgagccca

SEQ ID NO: 32432 - DNA, 303 bp, Gossypium hirsutum
  Clone ID: LIB3120-036-Q1-K1-C5
cacgaacaaagtgcgactcgtccaaccggttacaccataaccctcaaaaaacgaagcaaatgaaaaaatagggctgcacatgcacttgaattatcctctcaaacatacttatttacaactgaatggtagatctttgcttgtaaactacaaagctaacccttgatgaaatgattctactttgaccatgaacatataattacggaatgatacctatgatcttttagaccataactggtaataattaaacacagacattgatacatatattggaggcatccacgtgaacatagatgtgaccccttg

SEQ ID NO: 32433 - DNA, 435 bp, Gossypium hirsutum
  Clone ID: LIB3120-036-Q1-K1-D1
cccacgcgtccgctgacttcagcctctaataaaaggagtgagtcagaactcagctctgccttttgatttcctttccctttcaagctcttaactttccactcatttcccattttcttctgattggcttttgattgtatgagctcgaacggatagatcacttttgaacttcagctagttcgtattagtcataatgaaaggaaggaggaaagccagtatagctaatcttatccagaatttgcaagatccgagaatgatggttgaagtccaatgctgtgagatttagaggatctggggactgaattttccagtttataaaatgatgattgtgtgaagtgttctatgagttttatctctctgatggagtggaacgaacagaccccgttgcaatgggactgggaaaacctaatgttaaacgcaacaccaactgaaatcccg

SEQ ID NO: 32434 - DNA, 303 bp, Gossypium hirsutum
  Clone ID: LIB3120-036-Q1-K1-D10
cggcacgcgcccgcttttacttttttaatcaaactaaataatagtgggtgaattgtatcaattaatacaaattccggagcaatggcttgccgtggacgagcttatgaggaggttgagctcaaaggtcttggagagaaacgtctgggaaaccatttgggactctaccaaaatatttccttaagctttgtaccatgataacaagaacattggtgtgctcgagggcgaaggcaaagccccttgattcatacgcctgatcaattacgctctatgatctccaatcggttagggtttaaaggagagaat

SEQ ID NO: 32435 - DNA, 390 bp, Gossypium hirsutum
  Clone ID: LIB3120-036-Q1-K1-D11
aagatcccccctaaggagaacagtaatacattttcacaggtagggctgaattctcttaactgcggagatagttgctatattacgacaccttatccgtttcctgtgcactctgaggtgtaatgaaaaagacaaagaagacgggattgattttataaaatgtcaagcttgcacctggctcaacgcggggcccatacgttggggagactgttgaactctattctgaagacccatacattttctttttatccagaccaaaaagacatggtgaaattttcacaacccatataccgggttgagcacgcgtgacgaccgacaacccttttgcgggtatgttcgagttggggacacatgctcatttttttattccgacctaccttaagagcaaatatt

SEQ ID NO: 32436 - DNA, 408 bp, Gossypium hirsutum
  Clone ID: LIB3120-036-Q1-K1-D9
gaacaagcaagggcagagaggtttggtgaaatgactgaaagagagaaacctgtaaatctacccccaaaacttgctcaaataaaggagaagacaggtgtttctggtaactcaaatgagcaatccaatgacgataaggctgtagactctcaaactatcagcaagatgaaacttgcccacattgaaaagagaccacctatggtggccagaccaccaccaaagccatccagtggcatttctgctgatgcaaataccactgttgtaggacaacctccatcacctggtgcgccaccaccgtcaccgtcaccttctggtggacgaccaccttcgccttcttcttcaggcaagctacctagaggggcaggcagtggcaataaagttcaccgagcttctgaacttgttgaattctat

SEQ ID NO: 32437 - DNA, 268 bp, Gossypium hirsutum
  Clone ID: LIB3120-036-Q1-K1-E2
cccacgcgtccgcccactcgtacgtccgaaccatgatctggaatggaccaatgagagggttaaacttccacaaattagcggctggaactactgctattgtataaaagctacctaaacccactggctatggatagacacccaccttagtgggtgaacactattgcgattgtgcctaaaaagtatgcaggtgctgacaccatcaaccacacatcatctggtgaatgagcgaggaaagaataccctgaagagcatgaccttacaccgacta

SEQ ID NO: 32438 - DNA, 276 bp, Gossypium hirsutum
  unsure (1)..(276): unsure at all n locations
  Clone ID: LIB3120-036-Q1-K1-E7
cttgttttgttctcattttctgaacatggagtgtaattaataatcaatctgggggatgtaaggttgagaaagcaggggcaactgttttgtttgaggaggcaaacttgggtaagtaacaatgttggggtngttgtgagcctatgtcgnttaaacatccttggagaagttggtactccccaatttgnatgtgataagcttatacaggcggaaaaacgcaaggtacntagacttagtttcaaggtncgtttacatatgggactactacatttgtggaac

SEQ ID NO: 32439 - DNA, 367 bp, Gossypium hirsutum
  Clone ID: LIB3120-036-Q1-K1-E9
tggacgcgtgggcggacgcgtgggttcgaatgggttaagggacctgtgagtaaggttatctgtcactacagctgtgcagttttatgacctacaagatcggttggggtatgatcagcctagtaaagctgttgagtggctaattaaagcagcttttgatgctattgctgaactttcttcacttaacacttcattccctgatacaccaaagcaactgattgatgagaaaagagggagtgggggaatagaacaagggtttgactcagctgaagttgtgttagatggagatccaagcaattaccaacaacaccttttcttgtccaaattagctttcagtaacacgtctgagactcgaaagaactcgagttta

SEQ ID NO: 32440 - DNA, 420 bp, Gossypium hirsutum
  unsure (1)..(420): unsure at all n locations
  Clone ID: LIB3120-036-Q1-K1-F3
aaaaagaaaagaaaataaaagaaaatggttaagtccgacatggcatctcantggagggtgctgagtggcgagaacgactgggatgggttactccaaccactgaatctncatctccgccactacattattcactacgnacaaagggctgggtctgntggtgatcgctacaatcataacaaacatggtggatgcctgaaagataagtttcttgcagaagccggccttgataaatgaaatgagtgcaagttcagcgtcacccactacatgcatgcagagtcagatatttgtgagccctcatgggtnggatttgtggcagtaacaacagatgaaggaaaggctgttcttnnaaggaaggacattgtgattgcttggagaggaaccatacattacactgagtggattaatgatttatacgctaat

SEQ ID NO: 32441 - DNA, 400 bp, Gossypium hirsutum
  Clone ID: LIB3120-036-Q1-K1-G10
ggatgttgcacatgaatcattgagggaatctgttattaaaggagatttcggtcctgcttctgactctcttaatagggtgatgtacatggatccttgtacacctaaaggttacttgtttccatcatcaaatctttcactgggttatatggctgaaaaaagtaaatatagttccgaacttcaagctactggtaacttctcagagtgcacatctgctgcactaatgttattacaaaacggaaaagaaaaatgttccaactaccgctgttatttggggtctgttttcatgcccaagctttaaggaaaatttttggctacagaaaatttctttcatacctcaaagttctttaggttgcatcaaagggcctctctttctgatgtcatgatggcggggcaacatttt

SEQ ID NO: 32442 - DNA, 183 bp, Gossypium hirsutum
  unsure (1)..(183): unsure at all n locations
  Clone ID: LIB3120-036-Q1-K1-G2
gccagccccttcccttctcgatgacaacattgccagcatcttgccatgtaacaccagtgagccatggaacggtaagtgcgccaagcgtanccaacatggcccaccgnccatggatcaattcacactccctaaaccnctgcantcacaaacgccgatgctacatgcttctttatggggacacgc

SEQ ID NO: 32443 - DNA, 129 bp, Gossypium hirsutum
  unsure (1)..(129): unsure at all n locations
  Clone ID: LIB3120-036-Q1-K1-G3
cgggcatcaaaaagctttcaatcctttaatggactacacagaacaaatctagtcttcgctaatgggtacgcatccggttgagcctgtgtgcgtttcagtggtaaannntcgttcgttattaaaagtgtt

SEQ ID NO: 32444 - DNA, 172 bp, Gossypium hirsutum
  unsure (1)..(172): unsure at all n locations
  Clone ID: LIB3120-036-Q1-K1-G5
gtaaaatgatcctgcattcgtaaagaatctagctaatctcgctaacctccatgtcaatgatgcattaggcactgcgcacggatcccatgctttcacaganngagtggctaattacttaaagccttctngcgctggtttttgtatgcaaaaggaaatcgattatgttgatgga

SEQ ID NO: 32445 - DNA, 437 bp, Gossypium hirsutum
  unsure (1)..(437): unsure at all n locations
  Clone ID: LIB3120-036-Q1-K1-G8
gccacgctctcgttctttgaaattcccttgctatcgccctttgtaacaaactttgttgagatggcccgtgcgaagcacactgctcatcaatccaccggcanctacgctccaaggaagcatcttgccactcaggctgctagtaaggcggcaccgacgaccggaggcgctaaaaagcgtgaccgatatcgtcctggatctgtacctgtagctgaaattctgaagtacctgataagttctgaactccttattaggaaactgactttgcaaatgctctttcaagaaattgtccaagactttaacaccgatctgaagatccagatccatgctgagatggcttctcaatgaggcgtagaggcataccttgatgcatagttcgaagataccaacctatacgccattcatgctacgcttgttacaatcattcccacagtcattca

SEQ ID NO: 32446 - DNA, 413 bp, Gossypium hirsutum
  Clone ID: LIB3120-036-Q1-K1-G9
atcaatcccacagacaaccatatatacattcattgctccgacatgtgccacgacatgcaacaacttgtaccgatgcttatcgcgtacatgaccggggtcgttacagaaggtggtattcaagggggtcttctggttcttcacgatccctatggctacatggttgacatcatgcatctgtaataacctttcgcgaattccacttaccttttgaactatctagcggactatttacgtggctacttctttattcgcttatctatacaaggagacaccttggtctgcacctgggactgctatgacggaagacatgcttgtgaacatgctggacatattctttggcatgtgcctatgatggtttcaaaaaaaaattgatatatacaaattgttttccaagtttgttgacaagttttttt

SEQ ID NO: 32447 - DNA, 455 bp, Gossypium hirsutum
  Clone ID: LIB3120-036-Q1-K1-H2
actattacatcatcttttaatatgtccactatcatctttttcaattgttgctcttctttgactgcctccaaattgattaatccaagaatacccactaaaggttcaagctttctaaggactcacaagagtttttcatggtggaataggcacttcttgcccaaatgtacttcccagaagcatgttcaatgtcagcttcaaaatgggcagaaaatgaggtcattttcactgaaggaatgtgcaatctcagttgctttggctgctggattgataattggaatgccatcattggattcatctcctatggcttatgcagctaatccttcattgcccgatttatcggttttaatctcggggcctcctataaaggaccctggagcattgttgagatatgcactgccaattgataataaagctataagagaagtacaaaagccacttgaagatataacagagag

SEQ ID NO: 32448 - DNA, 180 bp, Gossypium hirsutum
  unsure (1)..(180): unsure at all n locations
  Clone ID: LIB3120-036-Q1-K1-H3
cggacgcgtgggaaaaaaaacaataaacttcattttcctttgaatagcaggaggnacaataattaattaatcaatggtgacttttggattaacttctattgggtcctantgggactccttattgtttggataaggncgaatgaaattatagttcatttgccagatcctaagtgaggcact

SEQ ID NO: 32449 - DNA, 263 bp, Gossypium hirsutum
  Clone ID: LIB3120-037-P1-K1-A6
cccatcgtacatccacgccactgttcacacgtgcgatctattacacccggcgggaagggataccttagaggtgaaaaagccaaaaatcactggttacaatcatctactagggatgtgttgtccttacccttcataaagaatggttacattcgattaagcacttacctgaggacctacaacattggttactatgttgacaccaagggctatggtgcctttcacaagggtatgccccactagttctaccatggccgcactggtct

SEQ ID NO: 32450 - DNA, 195 bp, Gossypium hirsutum
  Clone ID: LIB3120-037-P1-K1-A7
gactgtgttacgcgatacgatcgttgaaattttcattctattacaattcggagagaataggggaacttaggatggtgaaaatccacatattttaccttcataaattatatgcttaaaacaatgttactattatgtataaaaatgaagggttacatcaacattaatcactgaacgttgaaaggtaaaatacattac

SEQ ID NO: 32451 - DNA, 309 bp, Gossypium hirsutum
  Clone ID: LIB3120-037-P1-K1-B6
gcgcgcgtgcgacacattgactcttccttgaccattgtcatttgagaagacatggtcaaagtgggggcctggtatgacaatgaatggggctacagacaaatgcttgttgatcttgcacacttggtggcaagcaagtggcacggcatgcctgtaaatggaagcggtgaccccttgaaggattactgcatggcaaacccagcatatgaggaatgcaaagtgtacgaggcttaaatagatgcaactttatgattatttttaatggtatttatacccgcagatggtataaatactggccaagggcttttcaat

SEQ ID NO: 32452 - DNA, 404 bp, Gossypium hirsutum
  Clone ID: LIB3120-037-P1-K1-C3
cccacgcgtccggataagcaagacatccatgagttggggccaatagaagaggttgtttacaatttggtgaatcatgtttatgctgctccaaatcaaatggtcaatatacttgatatgcaagagagaacaagtgaagggaaaaactattatacctttgaatatgaactcacctctccaaactatgctagtgctttctttgcaacaatagctattggaaatgggagatattacacactggttgttggagcccttgaaagacggtggagaaggcttcgaaacaagctgaaaggggtggccgactccttcaaggtgcttgacatctgaagaccccccaacttattctttcattgtatataaaccccgaaacataccaattggttttgtgtttagttgagcatcatcat

SEQ ID NO: 32453 - DNA, 455 bp, Gossypium hirsutum
  Clone ID: LIB3120-037-P1-K1-D1
cccacgcgtccggaaaataggagtgaaattaaatggaaattgtatcgagaaattctggtggtgaagactaagagagtcttagtggttataagaaggtggggaactgaaagtacatcaatgctgaggaaaaccttaaaacttgatatgcaagtattgataggtctaggccataaatctatgagataaattgagcttctaaatatatccatacaatgaaaaaccctaataaaagcttaaagcaatatccattattcatccttgttggaagaaattgtctttagagttaaattgcatatacccctccttcggtgtgtcaaaatagatgacctttcccaatgaacagaaagtatgtcaccgagtctagaattaaaaacctcatcaccaagttatttgcatccatcaactgattgcaatcactaaaaaaacttgaaggtgtgtaatggaacaaacataag

SEQ ID NO: 32454 - DNA, 257 bp, Gossypium hirsutum
  Clone ID: LIB3120-037-P1-K1-D6
caaaacctcctttcctcccctttttcctcctttacaaggaaaacacaattaggggcgaaggagcaatcactgtcggtctttttaatcttatatacccactccccttctctctcctaactaactctttaaccaccaccttattctttttctcctcaattccctctaaactaacctctacccaccactcctctttctttctaccttcttttcttactaccttggccaccacttacatatttcctttcctgctccattct

SEQ ID NO: 32455 - DNA, 321 bp, Gossypium hirsutum
  Clone ID: LIB3120-037-P1-K1-E5
ctcaacggcgcctcgttattaaattaacaaccaagattgtgtcaaagcgggatggcgttcctgcatgaaccatggttagggaaaaacgggactaaggggactatcaaggctaacatacatgtcatgactgaacacaacatgtcgtcttcgacatagcggaaaaaatcagacctgacacatgtttgcaaagcgcggtgtgcaaagcttaggcagttccattaccaaacttaaagagggcaaattatggaccaagctatgcaacctcgttccagatattccataaacatttgggctgaatgatatggatttgaaagaccctgg

SEQ ID NO: 32456 - DNA, 314 bp, Gossypium hirsutum
  Clone ID: LIB3120-037-P1-K1-F3
gaaaaaagagttaaatcattttgaatttgttttgagatttaaaaaaagggtgatgaacatggggtatgggtggatttctggccacctccttttgggatgagagtgaggattgttctggtggagatagagataaaatacgcgttcaaggaagaagattttaggaacaagagtgatgtgcttctgaagatgaaccctgttcataagaaaattcttgttcttatctataatggaaaaactgtgtgtgagttcctcaatcacgttcaatacattgatgagattttgacggataaaacttccctacttcctactcatcc

SEQ ID NO: 32457 - DNA, 382 bp, Gossypium hirsutum
  Clone ID: LIB3120-037-P1-K1-H12
actgcgcgtctaggatcgtgccacgggtcaacgccaagggcaagctgaatacaccccgctggccacgacgttctgtccgggcgaattcaccggggccgaactgcgtcgcgggtatgagatcgtttgggggacaaccttggacaggcgcaactttcattgcaaggtgaccggggccgactgattcctggtgcccacgggtcgcaccaccggacgcgatggcggcaggcctgcccagctgtaccggcggggagacctgcagctgttgcacccgccgatgatgctcgcccggtgagatcgcggaagtgctggcggtcgcactataacacgttcttatttgaccgggctgggattgtctgaagcagaacacttcggtgatcgactt

SEQ ID NO: 32458 - DNA, 150 bp, Gossypium hirsutum
  unsure (1)..(150): unsure at all n locations
  Clone ID: LIB3120-037-P1-K1-H4
cataatcagcngcttccactggcctgtacattacatggttctttgttccccatcattcctgggccagggcgtgaagttcttcagtcccacccctgaaatacctggaactggccgggtttccattacgaaaaccaccaagactgttccttc

SEQ ID NO: 32459 - DNA, 288 bp, Gossypium hirsutum
  Clone ID: LIB3120-037-P1-K1-H7
cccttaagaactgcaagtggacctcaatcttctgctaggaaagagccaaacgggggatatggggggagctatacaaagaaaaagattccttctatggaggattttccaggatatcatgaacctgtgtttgacatgcccagtatgtcaactaattttcatagctttgttggtcgagctactagccctcctgcttactcgaatgttggttctaatgatactagttgccaggtgaattcaacttctagatctgagaaacttgactcatttgatgatgtgtggctcactgga

SEQ ID NO: 32460 - DNA, 213 bp, Gossypium hirsutum
  Clone ID: LIB3120-038-P1-K1-B5
ttcagctataacttactctactaggacatactactatgcttggctatgtcaatcatataaggggataccattatcactgactgttcatctcacactaacatggtcgttgcttctagcggcatcaagtttgtatgtgcttttccagtcaacaggaaggccaacatcgtcattacttctgtcgcaagcaaagtctgcagtatgcaatgcatgcat

SEQ ID NO: 32461 - DNA, 261 bp, Gossypium hirsutum
  Clone ID: LIB3120-038-P1-K1-E5
gctgtttacaagataccatgtcctacctcattttcagtctataaatctcctccagtttcggggccacattcttcgtcagttcgagtctattagaaaccacatacaccttcagttccagtattcatgaaaccatgttcttcctcagtttcagtctataaatctccttcagttccgtaaccacattcttcttcagattcagtccataatcctccttcaattccgagatacaagttaagagtcccttctttggttccaatctac

SEQ ID NO: 32462 - DNA, 286 bp, Gossypium hirsutum
  Clone ID: LIB3120-038-P1-K1-E6
agcggccataaatcctgctccgacttacccatagtagcttgaccttatttgataggtggtgaccgccgcatcattcggcatggcggccaccgtcattttggttccacgtgtccacactgccgttaggatctccctctgctccttcttgccgtctctcccttcttgcgttttcagctctgctttatcctctatcgttaagcttagtccagattcccgtaggatttctcagctgctgacaatagccttatatgagtccgctgtttatgctgtggagtttcttactgac

SEQ ID NO: 32463 - DNA, 157 bp, Gossypium hirsutum
  Clone ID: LIB3120-039-P1-K1-A1
cggaactcacgttaaatctacacatactatatgcactggctacccttatgacactcttacccaagggcccagaaacgaaaacgagcactttaccttctcgactgggatgcaactcggtttagcacgcgaacctgcaactcttagaaatggtcagagc

SEQ ID NO: 32464 - DNA, 264 bp, Gossypium hirsutum
  Clone ID: LIB3120-039-P1-K1-A2
gacaggcgttcgatcataaacctaagagggcttccagtttctaagtcattcacatctttcttagtggggttgttaattccttgcattaatgctgcacccttgggtccagaatccgatagagtaatcaagctgccgaaccagccggcgacgccatcgatatcacagttttcggggtatgtcacagtgaatgaagaacatggaagggcacttttctactggttctttgaagcacagtctgaggcatctaaaaaacctctcctgctt

SEQ ID NO: 32465 - DNA, 335 bp, Gossypium hirsutum
  Clone ID: LIB3120-039-P1-K1-A3
gggagctcaacctacattacaacactgttctaagaggggaagggactacgatagggcaccagcggtaggcaaatggaagttgcgcgtattcttaaatcgcctatgatgaaactcggtttagcaggcgtactgaaaaatcttttaactttcgagatgagcaaacttacaaatgacagaatacctgaaaggtaccctgttcttgatgttattcttcgtgcactagaagccctctgggtgatagatgtatgttctcaggaaatctgctcaaataaagaaattttccaactagtctgtgacttgatcaaatttcctgataaagttgagggctctacctc

SEQ ID NO: 32466 - DNA, 192 bp, Gossypium hirsutum
  Clone ID: LIB3120-039-P1-K1-A5
tggaaaacacgttaaatccacagcttattgaaaagagtgttggacttctattgtccatgatagaaagtcagaaggaagttgagcatattcttctctcgcctttgatgaaacttggctaagcaagcgtactgggtaatcttttaactttggagatgagcaaacttacaaatgacagattacctgacaggtacc

SEQ ID NO: 32467 - DNA, 317 bp, Gossypium hirsutum
  Clone ID: LIB3120-039-P1-K1-B1
cgcgtccgcggcgttcttaattaagacattgtcaagctcgtcgacaccttccccggccaatccatccttgggttcgatgccttgagggctaaggcataactagtactcatgagatcgattctgatactattttggaccacaaaggcttggttagatttaatatcacttttaggctatataggtggcataattattggcaaatgaaaactttcgacatacatttacaagaaagatactgatatacgcgtttttctccttaatttaaagtttcagggttatgcactttgccttttcaggttgaggattttttttaattt

SEQ ID NO: 32468 - DNA, 148 bp, Gossypium hirsutum
  Clone ID: LIB3120-039-P1-K1-B6
gtcggattcccggtcgccgacgcgtccgaaaacctacctatatgtaggtggaggtgtcgcttccatccactcttctcttcaatacaaaaaccgtcccaaacttgaatatgagccactaccctctattacatgtcgtcccaccccaatg

SEQ ID NO: 32469 - DNA, 167 bp, Gossypium hirsutum
  Clone ID: LIB3120-039-P1-K1-C2
cccacgcacccgcagatgcttcacacgcaacacctaatcatctgcatggaaaacacgataacggcggttcccagagagaactgcactattggcatgcagataccccaccacccattgaacctgcgcttggaacctcaatgatgacagaactgtactagagggaatcc

SEQ ID NO: 32470 - DNA, 123 bp, Gossypium hirsutum
  Clone ID: LIB3120-039-P1-K1-C5
gcgtccgaagtttgattgagctctctcatggcgttttttacccgtctcctctacaaaatctccccccgtcgatgtccttaaacctgttgtgcggcacctcgaagccattcctgctcgcattca

SEQ ID NO: 32471 - DNA, 257 bp, Gossypium hirsutum
  Clone ID: LIB3120-039-P1-K1-C8
gccgcctaccacaggcttcgaggcgttttttttgatgatcttgattcaatttgccgcctatgcgtcagtgccgctaccgatctgtagctttaaaatgaattgtacaatatagtttgtgttgagaacgcgcacactaaagcttgcacgcgcagtgttgaccatgtttcttcatggacgtcaaatgccatggctgactcaacataacagcagggcttagccactctcaaacagtgatggtatgtgtgaattgtcagact

SEQ ID NO: 32472 - DNA, 281 bp, Gossypium hirsutum
  Clone ID: LIB3120-039-P1-K1-D1
acccgtactgtgcccggtggtgaagacaattagttggtcaactgttaacgcttgtaaaatggtgggggtcaggactagagaagcagttgcagcacatcctttcatttacgacacatatgccgtgcttcacggcaattcacctaaacatcctaaccgacctcctcttcttctgttgctggccgccgatcgcgcgatccttgccggataattggggatctatccggttaccttccgacggatttacaaacgccgttgagaacgaaggcgtctccgctcgattc

SEQ ID NO: 32473 - DNA, 295 bp, Gossypium hirsutum
  Clone ID: LIB3120-039-P1-K1-D5
accagtcgtgcgcgcacgcgtacgattagctttagcaaacactactagaacccaatactagcggtggctagaccaatgagggatcgctaccatcgccactgcctatccgcacaggctaacatgggcggctccttacaccgacctaaagtctgcctctgctttcccagtcaccaggaaggccaacaacgacattacttctcttgaatgcaatggctgaagagtgcaatgcatgcaggtgtagcctcctactggaaagaagaagttcgagactctcttatacctacccgatcttaca

SEQ ID NO: 32474 - DNA, 131 bp, Gossypium hirsutum
  Clone ID: LIB3120-039-P1-K1-D7
cccacgcgtccgcccacgcgtccgtttagctataacatacactactagtacccaatactaggggtggctaccataaacatgagaactgttacaatgaccactacactatacaaacattctaacaatgctac

SEQ ID NO: 32475 - DNA, 203 bp, Gossypium hirsutum
  Clone ID: LIB3120-039-P1-K1-D8
cccacgcgtccgtccacactctcaaattcagttaacaatttcacagtagatttcttcagtgtgtctttcagccatggctgcagccatctccaccgtcgttgccgttgccgcctccaaccgatctctgggagtgtcagtcccaacctcacttttaatggggaagaaagtgagctcaggattcaacagcaccaggcaggttcctt

SEQ ID NO: 32476 - DNA, 251 bp, Gossypium hirsutum
  Clone ID: LIB3120-039-P1-K1-E3
cgtccgaattcccggtcggcgacgcgtccgccatatcgtaggtttcctcgtttgatccaaatcttatccgtcgtgaatggcatccttatcgtgcggattagcggactgggacacaggtagagtcaaaccagcaacatcaagtgtatctcttgtcgtaacgattataccctctagcttaaccacatccttcaccggatgaaaccattaccgcgctgtttctaataggtctgagattgccacgctcaggcggc

SEQ ID NO: 32477 - DNA, 385 bp, Gossypium hirsutum
  Clone ID: LIB3120-039-P1-K1-E4
actaggcgtacccatacgcttccgctagtgttttacagaacaaatgttgacttataattataagcctaatagagctactttgagtattttgctgaatggtctgtgtaaaaatgggaaaactgaggatgcgcttaagatgtttgatgaaatgactctgaggggtatagagccaaataggtgtatatataccataatcatttcgggtttgtgtcgagcagatagggctgatgatgcttgtaggctgttaggtaggatgaaagatagtgggtgctcccctgattttggtgcttataaagctttgcttaatggggttttgtgagtggggtttggcttgaattaaactttttgcccttttggcagttttttttaaaatgggaccggtttt

SEQ ID NO: 32478 - DNA, 123 bp, Gossypium hirsutum
  Clone ID: LIB3120-039-P1-K1-E5
gcgtccgccacacggagtactcctcgttcgatccacattttagccgttgagaatggcccaattatctcggtggacaacggtatggcgcaaaggcagactaaaaccattctcatggcgggattc

SEQ ID NO: 32479 - DNA, 206 bp, Gossypium hirsutum
  Clone ID: LIB3120-039-P1-K1-E6
cgcgtccgcccacgcgtccgtccacacgatcgctacctgtgtactcccacattctgaattctatttctaagccgatttgaagcacttggatgagctcgcttacaagatcggtaccaaatgtggtggtcgcgtttccattcaaaaaaccgataaaagtgctctgccaggatatggcctaactggcctgtcacgacatgtttcatgtt

SEQ ID NO: 32480 - DNA, 270 bp, Gossypium hirsutum
  Clone ID: LIB3120-039-P1-K1-F2
ggagttcactcatcatacggtcgatgatgtacttgtaaaacactaatacgcactcacaatcaaatgcttatcataattactggggccgtcgatcctcaagttcaggatattcaaatcccgcctatggatactcgggttcggattctatctccgatccggacggaaccggtaaaacattgttgacagatgggtcatggttagctggcttggccatgggagattcaccgagaacaacttcctaggattcttacaatatgcaccaactttttc

SEQ ID NO: 32481 - DNA, 226 bp, Gossypium hirsutum
  Clone ID: LIB3120-039-P1-K1-F4
cccacgcgtccgaccactcgtacgtcatacataataaagaagcctaccttgcttatccatttgccatcattcatgctcacgtggattccacaagcccttttacaattgcagcctatattggccaccttaatcgccacataaccttctacataacatactgcattcgagaaccaggcgttggacctgtcgtggtacctaatcatgttactccgcatttgcctccact

SEQ ID NO: 32482 - DNA, 240 bp, Gossypium hirsutum
  Clone ID: LIB3120-039-P1-K1-F5
ataaatattgtcaatatcaaatggtgtgattttactcatatagcacacaaactctctcatagatagattttaaagcaccgaacataatttatagaggtaaggaataaattctatgctctcatccaccatgatatataaccacacgatcacaaataaacacatgggaggagcgatgatatcgactagaacacctatgatgatgatgtgaaaagccctaacgagtttgatagaatgaaagaa

SEQ ID NO: 32483 - DNA, 169 bp, Gossypium hirsutum
  Clone ID: LIB3120-039-P1-K1-G3
cccacgcgtccgcttgaaaactccaaccaaaattccctatcactttgcgtattttttgatccggacaattttccttcttggaggggctttttactattaacactcaccccttctttaactgtcttcaacatttcaagtttagggctttataccttgggcctttaaacat

SEQ ID NO: 32484 - DNA, 175 bp, Gossypium hirsutum
  Clone ID: LIB3120-039-P1-K1-G4
ctaacacaaaaaacactactaagacccaagcctgcgccgcagtctttacggccatgtacatgagaaacacagttccttactggttcttaccataagataaaccgaaacatttcattataaaccagatacattctacatgtgactagctcattcaaagttgaagcaaagaaaggag

SEQ ID NO: 32485 - DNA, 368 bp, Gossypium hirsutum
  Clone ID: LIB3120-039-P1-K1-G5
cccacgcgtccgcttgaaaactccaaccaaaattccctttcactttgcgtattttttggtctgatctattttcttctttcgacttgtttttagtagtaacattttctctttgttttagtttctgcaaatttcaagtttagggcttcaactttgagcttaaacacactcagcaaagctggataggtacagagccgatcgctatggcgatggcaacaacaccaccaccaacaacaaccaagactcttactataataacaatattcacgaccgttactatagaggacccttgcgttttttcgacgctttttctatgagccggttttacagcattaacacccgccccaatactaattttaaccgttaagttt

SEQ ID NO: 32486 - DNA, 461 bp, Gossypium hirsutum
  Clone ID: LIB3120-039-P1-K1-G7
gcgtccgcccacgcttcctcttgaaaactccaaccaaatttccctttcactttgcgtatattttgtactggaggtattttattcattagacttgcttctagaaataacattaaactttttgttttaatttttgcaaacttaaaaaataaggctaaaatctagagcttaaacacaattaacaaagttttaaagaaacaaaacccatagatatggctaaggcaacaactttatcaccaacaaaaaactaataatttttactataataatctaataatcacctaccctcatctaataaatagaactttttgaattttttaaagataacttatatctaattaagcattttttaaacaagtaattaaaaactcgactaacccaaaaacttaatatttaaaacgatttataatcattaatttccctaataaatttccatacttaaaaaatcatatattatattatta

SEQ ID NO: 32487 - DNA, 115 bp, Gossypium hirsutum
  Clone ID: LIB3120-039-P1-K1-H6
atatatcgcggctccttctcgctgcgatttcgtcttcaagatctcagttctaaaatcgtaccgcggggaacctacaagcacatgggtccgatctgcatgcaggataaacaaacaa

SEQ ID NO: 32488 - DNA, 174 bp, Gossypium hirsutum
  Clone ID: LIB3120-039-P1-K1-H7
gatggcccctagatctccacctaaaagagttttcatttctcactcattcacatctttcttcgtgggttataaattgcttgcattgatgctgcacactacggtgcttgtttcaattcctggacttggttagccatctaagggccatcccttttgaggaaaccctttatcaaacca

SEQ ID NO: 32489 - DNA, 148 bp, Gossypium hirsutum
  Clone ID: LIB3120-039-P1-K1-H8
aaaatcatatcattgcaacattgaatagatgatgtctctgtcatgcttaactctagtccgactgtgtgacaaagacttgagaggtgtaggatacgtgggagctctcggtcgaaattgaaataccactactgttaacgttattgtactt

SEQ ID NO: 32490 - DNA, 157 bp, Gossypium hirsutum
  Clone ID: LIB3120-043-P1-K1-A5
agcatacactacacctcccggaagatttagcatcaattgtgacttcatgttggcaagaggatccaaatgctcggcccaatttcagccaaatcatacagatgctattacactatctctcgaccatttcaccacccgagcctgtgatgcctcctaagag

SEQ ID NO: 32491 - DNA, 172 bp, Gossypium hirsutum
  Clone ID: LIB3120-043-P1-K1-A8
ctcactcgttctctccgtcctagctactctccagccaattaacggaattcatattccaaagcgaacccgactgaaggctagcttttgcgagtccaaaaaatcaaggtgggaggaagcattggcgagggcgaagagcaagtcaatcggctagatagctcaactgggagaaatt

SEQ ID NO: 32492 - DNA, 360 bp, Gossypium hirsutum
  Clone ID: LIB3120-043-P1-K1-B10
cccacgcgtccgcaacattcatggctttcatctctcaaaaccactgctcttttctcttccacaaaccaacacaagagttctcttttcaaggttccattttctcagaattggagccgatctagtgatgaagcttcaaaccctgagtcacctaactcggaagaagctgctcctgttgaccctgtgaagcttgcttttgaaaaggctaaatcttataagaaaaccaaagtgaacccggacggggattcgagtccagcttcagttaaggttgcaaaggagaagacaagcgagaacaaggagaatggaagtgagagcataattgcttctgtgaagaaaactgggagtgagggtacctcacagcaa

SEQ ID NO: 32493 - DNA, 150 bp, Gossypium hirsutum
  Clone ID: LIB3120-043-P1-K1-B2
tcgcttctctttcggttctaccgcctgcacaacgattaagggatttcattttccaaatgggaccccactcaaggctatcttttgccaccacaaaaaatctaagtggtaggtaccctcaacccacgcgcatgtgcccgacgaaatattata

SEQ ID NO: 32494 - DNA, 304 bp, Gossypium hirsutum
  Clone ID: LIB3120-043-P1-K1-C1
tccctgggtaccgtccgaattcccggtcgccacgcgtcgtcatcactgcgaccacgcgcccgaaaaagttcttgtaagcaaagaagctcctcaccgtccaattttactcgattttggtcttacaaaaaaactatcaagctctctgaagcatgcactagcaaagatgtttttggcttctgccgagggtgaccatgtggctcttttgtctgccttctcagaaatgggcctcaggctgcgcctagatatgcctgagcaggttatggagataacaagtgtattcttccgtagttctacaccagcaact

SEQ ID NO: 32495 - DNA, 232 bp, Gossypium hirsutum
  Clone ID: LIB3120-043-P1-K1-C5
acttcatcgcgtgctgatcccaattcatggtctttttacagagctggtattgccgactttggagcggatatcatggagtaaaatctctcaaagtctaacacgattttaatcagcaaccttgttccgccgtgtcaaaaccacctcaactgggcccattggaagataacatgttatacttgaagcaacaattcttcgaatcagcttgcaaagggagcccatttgttgccaaacg

SEQ ID NO: 32496 - DNA, 182 bp, Gossypium hirsutum
  Clone ID: LIB3120-043-P1-K1-C6
cccacgcgtccgaaaagatgcttcttctttgcatttattacagtactctctctactactatggtaatttgaagagttatattactccaaaaaacaatatttctatttatcaaccaacattattcctctctctatataaaacacctacaatttaattccaaaaacattttcattcttttcata

SEQ ID NO: 32497 - DNA, 199 bp, Gossypium hirsutum
  unsure (1)..(199): unsure at all n locations
  Clone ID: LIB3120-043-P1-K1-C7
cccacgcgtccggaaactacaaatcatggtctttttacagagctggaattgccgngttggaggggaacccccctttttctgttcctccctgaggacacttattaggcttgcggtctctctatgtttagaccttggatttccaatggaacggatgagacctaaggaataaaaaggccgttcttcgccatatctcatgaaa

SEQ ID NO: 32498 - DNA, 123 bp, Gossypium hirsutum
  Clone ID: LIB3120-043-P1-K1-D2
atcacaatcacattatgtgtactcactattggcctgtacaaccatggatatttgttcaccagggttctacggagagggggtggacttcttccattttatatttgaatttcggtgaaatggtcg

SEQ ID NO: 32499 - DNA, 199 bp, Gossypium hirsutum
  Clone ID: LIB3120-043-P1-K1-D4
cccacgcgtccgattcggtttatcaactgaaacagaacgctatcaagaaaattgagagccaaagtttctgaaccctgaaaagaactgaggaaaattaaattaaaagatggcttttagtgtaggctttcgtttcaatcttttgggaaaggcttaatctttggttattccttcaagttcattaatttcttttgggggtttt

SEQ ID NO: 32500 - DNA, 152 bp, Gossypium hirsutum
  Clone ID: LIB3120-043-P1-K1-E1
gaaactgtttggaacttagacacagggccgtctcatattccaccagccgtgcatagataaggggctgctttgacatggttcttgtccattgtgtaaacgggatatgtactgttattattgcaaactaaactaaacaatacacgttgagaaga

SEQ ID NO: 32501 - DNA, 163 bp, Gossypium hirsutum
  Clone ID: LIB3120-043-P1-K1-E3
attgaaagcaatggcagtagataccacagttctaggactttcaaaagaagaggccgaaaagaaaccatatattgcctctatgggagtatatgttttcaagaaggagatccttttaaaccttttgagatggcgttttccaacttcaaatgactttggatcaaaa

SEQ ID NO: 32502 - DNA, 211 bp, Gossypium hirsutum
  Clone ID: LIB3120-043-P1-K1-E8
caacgggacacattaactgatggaggagcaatgagaagaagctgcaaaatgttcagcaaagactttaatatggaacctgtcggttggcagtcgaatcccatagtagtacttcggaattgttcaagccaatggcaatatgccgaccatcaggagcccaattcacacttgtaactggtccgttttcgtaatcaacagtgacaagttttgaagt

SEQ ID NO: 32503 - DNA, 163 bp, Gossypium hirsutum
  Clone ID: LIB3120-043-P1-K1-F1
aaaacggatcccggagctaaaacatcacggcgaagcaagcttaaaccaggaacaatagtgggaattatagtcggtgatatagctggagttggattagtaattatggtattccttttcgtctataaaataaagagaaaaaacagagtactggagaccacactga

SEQ ID NO: 32504 - DNA, 200 bp, Gossypium hirsutum
  Clone ID: LIB3120-043-P1-K1-F3
ctcacacttggactgacatttgtgtagctgacgaaactctttaatggctgaaaaaagcatggcttagatcatcggaggaactgtatacctgtgaaagttcattgcggaagccaacgcaaaagagggtcattccactcttgccgttgtaagggagtccaccgaatccaacactgttaaggaaaaacttgtcgacactttca

SEQ ID NO: 32505 - DNA, 140 bp, Gossypium hirsutum
  Clone ID: LIB3120-043-P1-K1-F7
cgttctcatagtagctggcagccccgtggcgtctctcgcaccacagccaagttcattcactaggtgatatccgcctaaagtcggccgatcaagtgccgctgtcatacatatgtggataacggccggggaactggatgcaa

SEQ ID NO: 32506 - DNA, 312 bp, Gossypium hirsutum
  Clone ID: LIB3120-043-P1-K1-F9
cccacgcgtccgcggacgcgtgggcggacgcgtgggctggatcacgggacaatgtccagtggcagctttggttacaggatgaaagatagcttaaaagacagagaaggaagcaatcaaacagagagtctgctcggcgatcaaggttgcgtaagcaggcggaatgtgatgagctggctcaacgtgctgaagccttaaaggaagaaaatgctaaccttatatcagaagttagtcgcctcatgagcgagtatgagcagcttcatgctgagaatgcctctcttaaagagaggctaggggaaatccctgggcacgagg

SEQ ID NO: 32507 - DNA, 362 bp, Gossypium hirsutum
  Clone ID: LIB3120-043-P1-K1-G10
ttcacctcgccttctttcaactcaccttccttactctttgttcccaacacgcatgaccgatgatacctcggtttgccgtttcgtttacatctgccgggaccccaaagatgtttttgtctcaaagtggcatttcgccaacaagttgagacccaaggaactgccaccactatcactagaggaagcctttgacttgttctgcaaaggggtatcggaatatggaccgttttgggatcacgttttggggtactgggaagctagtgtggagtcaccgaagaaagtgttgttcttgaaatacgaagatgtgaaaaaggagcctttgtggtgtgtgaggaaacttgcagagttcttgggggtacccttta

SEQ ID NO: 32508 - DNA, 302 bp, Gossypium hirsutum
  Clone ID: LIB3120-043-P1-K1-G5
ggctaacaaaccaagtcaacctgatgcataggacaggctcaggctgtggatttggatgaggttgatgctaaggttagtaagttgatgccagagcttgggttttcccccgaggattccgataggttggtcgcaagttttagtagcggatggcagatgaggatgtcacttgggaagattttgttgcaggagcctgatttattacttttggacgagcctacaaatcacctcgaccttgatacaatcgagtggcttgaaggatatctcaacaagcatgatgtgccaatggtcatcatatctcatga

SEQ ID NO: 32509 - DNA, 232 bp, Gossypium hirsutum
  Clone ID: LIB3120-043-P1-K1-H10
gttcatcggtaaccttcctcaagtattatggtcaattcctgggttgaacctgcttgatatctctgacaataatttcactggggagctgcctactgctttggacaataatgccattgctgcggttcttgacatgtctcggaacaagttttatggaggtctaacaactgttctcagaaggttcagttctattaatttgtctggaaactattttgaaggcagggttccagattac

SEQ ID NO: 32510 - DNA, 221 bp, Gossypium hirsutum
  Clone ID: LIB3120-043-P1-K1-H2
ctcacgcgtgcgtgcaaagccattgatgaatctcgggatatctaaagctgttttcttcaatcgttggcaggtagtactgactgctggtgcaacccctgcgatcgagattcttagtttctgcttagcagatgttggaaatgcatttcttgttccaacaccttgttatcctggttatgacagggatgtaaaatggcgaaccgcggtggaaaaaatacatgttc

SEQ ID NO: 32511 - DNA, 191 bp, Gossypium hirsutum
  Clone ID: LIB3120-043-P1-K1-H5
ctttgacgcaaaattaaaatgaaataacgctgttgctagacttgacagcttgatactgactgggatcgatatataaatgaaaaactcagcttatggctttgtatttcatgggtacttcacttactccaaaatcctgttcaaattctaatgtcattgcagatgacgcattgttttactcaaaatctaaacac

SEQ ID NO: 32512 - DNA, 144 bp, Gossypium hirsutum
  Clone ID: LIB3120-043-P1-K1-H6
ctcacgcgtacgatcacacattggcacacgcgtacgcccagggaaagctgttttcttcatgcgaaggcgaaaagttttcttggcggtgtttctttttctttttggtatgagatgatcgttgaataacgatgaggaagaaaacag

SEQ ID NO: 32513 - DNA, 200 bp, Gossypium hirsutum
  Clone ID: LIB3120-043-P1-K1-H9
attctatcgggctatatgaattgctctctcttgagttttgaagaataataacgcaaagaatggtcctttaacatgaggggaagacttagacatcttgctcaatcgattacacgccgtgtatctcatgctgacaagaaggctgtaatacgtaaattctttgcttcagatgctgatctgaaaaagactgcccttaatgacta

SEQ ID NO: 32514 - DNA, 208 bp, Gossypium hirsutum
  Clone ID: LIB3120-044-P1-K1-A2
cccacgcgtccgttgcgatctcaaagaaggcaggaatgatccctctgcagatggaattggggggaaaagatgcatgtatcgtactcgaggatgccgacttggatttagttgctgcaaacataataaaaggaggattttcttacagtggtcaaagatgcacggctgtcaaggttgtgttagtgatggaatctgttgctgatgttctggt

SEQ ID NO: 32515 - DNA, 193 bp, Gossypium hirsutum
  Clone ID: LIB3120-044-P1-K1-A5
ggtaccgtccgtattcccgttcgtcgacgcgtccgacctttctttctttcttattttatttatttctcttttgcctcttctaccattgctatttcgtgcgcatgattccacggtatggcagtgaatctctccccttcaacccctgaattccagggaactggccgtgtttccttgagtaaaaccaccaagcctg

SEQ ID NO: 32516 - DNA, 181 bp, Gossypium hirsutum
  Clone ID: LIB3120-044-P1-K1-A7
aacagatttcgatcatctcggtctaggtatacataggagcgagtatccacatctgactggggggagacaagctgggctcaatcatcactatttcgatccatcattccagtagaaacggacattggagtgtggctggatctatctcacccaacatgggttaatctgacggggaaatcaactt

SEQ ID NO: 32517 - DNA, 233 bp, Gossypium hirsutum
  Clone ID: LIB3120-044-P1-K1-B2
gcgtccgctgttctgcatctctgtgtttgaagatgagaattatcaacatgaagtagttaaagaagtgtgcggagatcagaaatttgttgatagcggagggtattccaagtccccagctgaagaagcagctaagggagttgttactagtgaagcagaggcctcgctttatcagagcaggcctagtgtaggggtggaaaatgatagggtgggaatatgaggtccatgtgggggat

SEQ ID NO: 32518 - DNA, 259 bp, Gossypium hirsutum
  Clone ID: LIB3120-044-P1-K1-B3
ccgtccggaatcccggtcgccgacgcgtccggtttaatttaaaaatggctacggaatcttcagaatcggaagaagacaggaagacccgtgagggccccagccactgcctgtgcggcacatactaacatggcctgctccttttaccggcctcaagtctggctctgctttcacagtgatcaggacggccaacaccgactttgctattctcccaggcaatgccgacaaatgcattgcttggcagccgtggcctcctactgca

SEQ ID NO: 32519 - DNA, 264 bp, Gossypium hirsutum
  Clone ID: LIB3120-044-P1-K1-B4
ctgcatatcgatctcgactgtggttatatttctacatacggatctcgtgaccttcattccgggcatcgttccacatgttgaaggtttgcctcttggtgccgaaacaacaaatgacgttcctttccctttgcatcctctcattatgactgccatggattgcacagaaccagatattgaagcttaccttcgtgaactcaaaccccattttgttttctttgatttcgcgtgttggttgccaactttgactaacgagctaggcataaa

SEQ ID NO: 32520 - DNA, 188 bp, Gossypium hirsutum
  Clone ID: LIB3120-044-P1-K1-B5
ccctgcgtccgtccgattccggtcgccgcgctccggttttaatttaaaaatggctacggaatcttcagaatcggaagaagaagggaagatcacaggaggaaaccaacacctaatcgttgaagatgacctgagagaaatgggcaaaaaagcagcttggagtgtcagctcttgtaaaactggcaatggcg

SEQ ID NO: 32521 - DNA, 247 bp, Gossypium hirsutum
  Clone ID: LIB3120-044-P1-K1-B6
cgggaggaatccctctatctcctttttttccccctaaaattgtattataataaatcctctagaattatctggacctcacattgataatcatctcctccagatctatccgcttcggctttgagagagaagggataaagaatatagcgaaaaagagggtaaaacggcgcatacagtagaccacgagcccgataaccttgaaaagagcgcgttgaccggctatacgggagtgggaaaaacaaatattctt

SEQ ID NO: 32522 - DNA, 443 bp, Gossypium hirsutum
  Clone ID: LIB3120-044-P1-K1-C10
cccacgcgtccggcaaagaacgtagagaataagaaaaacatggaagcttgctttctctcatggaaattccttcactaaaagtcatgagattgtgccctcaatcaaggctagatcacttacttttactaagaaaaaccccaacctttttcactctaggaaagtttctttcccatctttcatcacatgctgccatctggattcatcttcaccgtcggatgatgacaagaagccaacacttgattctgattggcgttcatttagagcaaggctagtagcattagagaaagtatcaaagcctgagaactcttcatcgtccaccaatcctgatacagtagtggatcacccttcatccgttgcaattaacgacaaatgggtccacaccatccatgagcccgaaaagggttgtctccttatcgcgactgagaagctcgatggcgtacata

SEQ ID NO: 32523 - DNA, 196 bp, Gossypium hirsutum
  Clone ID: LIB3120-044-P1-K1-C11
cttatgtggcaagcagtgacggaacagggtaatgcatgcaggtgtgttctattacgggaaagtagaagaaagagactctcttatacctgctctatctaacaccctatcagttggtttaggaagtatactacctttactgatgaaatagactaccttgctgggaatggaaataataggaggaatcattgcccggtaa

SEQ ID NO: 32524 - DNA, 165 bp, Gossypium hirsutum
  Clone ID: LIB3120-044-P1-K1-C12
tcttcactcaccactgttccaagattgttgtaaaccaagctagaaccagcagccaggatgggctcattagcagcctccgccgttgccttctcccttggcgtctctgaaatgctcggtaaccctctgaatttcattggtggagctaggccattggctccaacacca

SEQ ID NO: 32525 - DNA, 165 bp, Gossypium hirsutum
  Clone ID: LIB3120-044-P1-K1-C5
gaaaatctttccagtatcaattttctcacaacataactgaaaatgtcttgctctttatctagatgagtctacacatcatggtaacagcaacacctaaagcaagacctgtctcacaaactacatcgaatcgatcctttactcaaactgatgccaaagaagctccca

SEQ ID NO: 32526 - DNA, 175 bp, Gossypium hirsutum
  Clone ID: LIB3120-044-P1-K1-C7
gcgtccggaaaatctttccgatccaatcctgtaacatcataactatacatgtcttactgagcatgaagacgttgccaacacgctgagtgcacgtccttcaatggatgtaacggattcaacatgttacctgtcattgtggattgtgccactccaaataccgttgttcttggtgcgg

SEQ ID NO: 32527 - DNA, 161 bp, Gossypium hirsutum
  Clone ID: LIB3120-044-P1-K1-C9
ccacgcgtccgaaagattgtaggggggttttcgttttcatctacaaggaattggcatctaggtaaagcataatgttgtcccgctcttattcctgctctatcgtccacccgatcagttagtctaggctgtaaacatccttattgatgaaagggacttccgtg

SEQ ID NO: 32528 - DNA, 235 bp, Gossypium hirsutum
  Clone ID: LIB3120-044-P1-K1-D1
ctccacgcgtccgccagcccttccaggagaaaacttcttatgcgttccttagggaggttaagtgcactgactacctatattatgatctgccataaatcgatgcgcatgatttgacatgcgttatccttaaagaggattgaggcactctaaatgcactttttcatgttccgataaataatcaaacctatttaaatgttcccgccattctctatttccctggaaaagggacctaaac

SEQ ID NO: 32529 - DNA, 236 bp, Gossypium hirsutum
  Clone ID: LIB3120-044-P1-K1-D10
acgcgtctcatgacatcttgtcccacataccaactacatatctttcactacctacctggtaagctggttcggtacgcataggacaaaaacccacccacacaacttccacattgttcttcagttaaagtctaaccaaaacttctcttcttcttctgtctcttcttcttcctcagtaatggaagagcaaagagagcttgttgttttaccagctcaagcacaagaagcatatgccaggg

SEQ ID NO: 32530 - DNA, 264 bp, Gossypium hirsutum
  Clone ID: LIB3120-044-P1-K1-D2
ctgatcttcaagtacttcaaagtgccacctatgtatcagaatcgggttctttcatacggtggggctggtgcagtcttctttcggttgtcattgatactacttggaacagccaccctccagaggtttgaagcggtcaacctactactggctgccgtattgttattctcatctttcaagctattttccaatgatgaggatgacactgatttgtctgacaacttcatagtgaagacttgccagagatttatccccgtcacatctaat

SEQ ID NO: 32531 - DNA, 181 bp, Gossypium hirsutum
  Clone ID: LIB3120-044-P1-K1-D3
gtccgccacgcgtacataaccatgatcagtagatgattatttgaggaccttatcagggacgttcaggggggcggcaactagtgatgactgagcttcctgagtgagtgtttagtattgattccgggatgaagggtggcatgtctgtgaaagctgccatgattttgttgcatgaagggcataa

SEQ ID NO: 32532 - DNA, 137 bp, Gossypium hirsutum
  Clone ID: LIB3120-044-P1-K1-D6
atgcatggtatgtatatctatttgccacctatgttgacttgattggtggttacatccacattcgagatatcattctcaagggcggcttctcatcctacgttcatacaacacaagaaagaagcgttttggttcgacag

SEQ ID NO: 32533 - DNA, 250 bp, Gossypium hirsutum
  Clone ID: LIB3120-044-P1-K1-E1
gtcgaccacgcgtccgcagactcttacaatatggtgccaaaacggcgttaaagggtggctagggtttctgaatttaagtgcttaaaaatcatttgggaaaaagatccaaaattgtcgcaacgcaattcgggagattaatgcctaatcttgatcaacaaagcacgaaactgctaattttaacggctgtccgtcgtatggaccctttctgaaaaaaaattcttatcaccgctgctcatgtcgccttctatga

SEQ ID NO: 32534 - DNA, 284 bp, Gossypium hirsutum
  Clone ID: LIB3120-044-P1-K1-E10
gcgaatagctgagttagagccactagcactagtaccaaccctggcttacgccgcatgtttggggcagcaccacgcactcaccaccaatggcagatcatcatcattaccgccgtcgctgcgccaggcttcaaacatgaagcctaaccagcgggcggtgtgcaaggctcataagctggaagatgatggaagccttgtgacccgaaggtcggctctcactgtactaattggtgctgacgctgcaggctctaaggtttgtaccgctgatgctgcctatggtgaagctg

SEQ ID NO: 32535 - DNA, 147 bp, Gossypium hirsutum
  Clone ID: LIB3120-044-P1-K1-E5
cacactcttacagtacggtccagaacggggataaatggtggctaggtttttaatcagaatggggcacttggattggtactaaacactctactggatttgattcagcttcattttattgcattgttcaagatgggtgatgtagctaag

SEQ ID NO: 32536 - DNA, 216 bp, Gossypium hirsutum
  Clone ID: LIB3120-044-P1-K1-E7
ccaccccctctctctctctctctctctcatcaacattcaaaaacattcttaatattatcgagccccctttgaaacactggcaggcatatttaaattaaaaatccttaacgttatgtttaaaatcaaacccttatgcatgggtactcctttaattaataccttcgtttcttttgggacagaaaataggttttcaacctttaatatttccacactttt

SEQ ID NO: 32537 - DNA, 241 bp, Gossypium hirsutum
  unsure (1)..(241): unsure at all n locations
  Clone ID: LIB3120-044-P1-K1-F1
cttccccccctctctctctctctctctcataaacattcaaaaacattcttaagaatattgaagccccaaagaaacacagaaaggaaaaataaaaataaaaatacataatgttatgtttcagatcaaacccttatgcatcggcttttcttttatttttttcttggtntctttttggacgggaaataggttctaaagctttaaatgtccaaacttggattatttaagggtttgggaaaagttt

SEQ ID NO: 32538 - DNA, 181 bp, Gossypium hirsutum
  Clone ID: LIB3120-044-P1-K1-F3
cccacgcgtgcgggaacctgaaagcgtgtcactcacagactgttattagccctactgcacgggagacgacaggcacgagggccggtccaagaggtaatcatagcgaacaccatcgcagtggctgagcaaaactattttcatcagctgactgtcctggctgcggcaaaccctgtgggagaga

SEQ ID NO: 32539 - DNA, 237 bp, Gossypium hirsutum
  Clone ID: LIB3120-044-P1-K1-F7
cccacgcgttcgtggacctgaaattcgtgttatttcacattactgttttttatccctcacccattcgatcccagagtcgtacctggatgaccactgcctactgtcgcaagattgctcgaaatgtgatggctatggccactggtgagactttggccacgcgtgaagctccaacctaagttaccccaactgagctgacaaagtttatcaccaaattacatgaaacctgggttaaagttg

SEQ ID NO: 32540 - DNA, 284 bp, Gossypium hirsutum
  Clone ID: LIB3120-044-P1-K1-G3
gctactctttctcagattaggtgctgcttgagttttacaccctgtttataccctccctgcttgcgcgctttccgtcttctgtttcttccttctgtctttcttttgctgaagattacaatagaatcgacgcttggccttctcaaccttttattttcggagtttactgcaactggaaaggtatcattgcatttcattgcgattcctaaccaaaccaattaaaatttgcccaaaataaaaccctttggccgtttccttttttttttgggttcgacggaagggggaaa

SEQ ID NO: 32541 - DNA, 286 bp, Gossypium hirsutum
  Clone ID: LIB3120-044-P1-K1-G4
cagctgaaacatatagcgctagtaagcaatactagcaatggcctcctccatggggcgatcggcaaccattggcagcgttaactgctccttcccgtgacatgccaacatggtggcccccttcaccggcctcaagtctgactgtgctttcccagtcactaggaaggccaacaacgacatcgctattcttgcatgcaatggtgggagagtgcgatgcatgcaggttgggcctcctcttggtgagaagatgtttgtgacacgcttagacctgccgcggtcttacacccgg

SEQ ID NO: 32542 - DNA, 156 bp, Gossypium hirsutum
  Clone ID: LIB3120-044-P1-K1-G7
cttccctcagtaccttcctaattccctttcgacccactcgttcggttcctctttctcacacacgtcctgcttgatttttacaccctgatttacactccttcttaggggaaaattaaaaagaaatctaatattgaagatttattaaaattgcaatca

SEQ ID NO: 32543 - DNA, 103 bp, Gossypium hirsutum
  unsure (1)..(103): unsure at all n locations
  Clone ID: LIB3120-044-P1-K1-H5
gcgactctcnnttcttccacactatcatgcactttctaaactaatgtattgaaagagcttgagcggtgccagacggaataccccactgcattcattaaaatca

SEQ ID NO: 32544 - DNA, 135 bp, Gossypium hirsutum
  Clone ID: LIB3120-045-P1-K1-A3
cccacgcgtccgattctctctctgtattatctttgcctctttaatggctactatcgggttgtttctcatatcctttcttatttgctttcactcttaaagggctgagccttttatcggagtgaactacggtcaatt

SEQ ID NO: 32545 - DNA, 229 bp, Gossypium hirsutum
  Clone ID: LIB3120-045-P1-K1-B11
cccggtcgccgacgcgtacgcccacgcgtccaaattcaaccaccagaacatgcctacttcttagccatggcaaccaccacagggtggagcgtgacacattgttttcggtacccgtatatctacctgtgacaccaatattgggaagaatccaagctaggataggctttggaaggaaacaagagcaccacccttctttgaaagtggtgaacttaaatgatggtctttttac

SEQ ID NO: 32546 - DNA, 254 bp, Gossypium hirsutum
  Clone ID: LIB3120-045-P1-K1-B9
cttgagggaaagaaataaaaagaagaagaagtttgaatctatttttttgaagatcgacggtggggaataaagatgttaagcgtgggacaaacaacttctcaaagtggacatcctatggggacttcatgcccaaacgaccaaggactacaacgtgccaccatgagaacccttgtttgaccctggtgaactcaaatcatggaccttatacagagctggttttgccgcgtatgaagccaccttcttgttcctttaca

SEQ ID NO: 32547 - DNA, 261 bp, Gossypium hirsutum
  Clone ID: LIB3120-045-P1-K1-C5
attttctcacctgaaacaccaattacgctcccataaacaccacttcgcaacccaaaatttacacttcttctgctactgctaccgccatttctgcttttattttcaaccttacctctctttgcttactttcaagatatggatatgcttccttcttttattctttatccacttattaatggtggaagccatctttctaatttccactctctttcttcttcttctaacaccattgcttcccatatggaagcctaaagttacaaa

SEQ ID NO: 32548 - DNA, 154 bp, Gossypium hirsutum
  unsure (1)..(154): unsure at all n locations
  Clone ID: LIB3120-045-P1-K1-D10
taccgtcccaattcccgntggacgacgcgtccggctgagcaccgtgccggcatagtccccgttttctaccgccgggtgccatgccttcaaaagaggagggataatgggcacactcaatggatttctatattataacctattgttgatttcttac

SEQ ID NO: 32549 - DNA, 233 bp, Gossypium hirsutum
  Clone ID: LIB3120-045-P1-K1-D8
atcgctgctccacatttcggtataaaggctaatggggaacacatgaacctatatatcgagggcgacatgctaatttttctatggcgagtaatgaggaggcttacgaacaatttttttcgggaaatgcaagaacaaataattgatggaggtctgcctaaagttatcgcttgtgtggagaatctcattaacgaaagtcaaaaggaacccgttttcccacaaaccctgcccaaact

SEQ ID NO: 32550 - DNA, 257 bp, Gossypium hirsutum
  Clone ID: LIB3120-045-P1-K1-D9
gaacagcaaacagaggccctccggataatattctttgatcctatggaacgttgttgaccagggcacgaatacattgtggctggacatagtgattcaagctcggatgtaaagagaacaggtcgagccatgaatgaggtacccacctttaccgcggcgaatatgcgcaaaaacatgagagctgtatattacaggcgcacgtgtatgcttatcatgggaggagctattgatgggatcttagggttcacaggcgatatggg

SEQ ID NO: 32551 - DNA, 197 bp, Gossypium hirsutum
  Clone ID: LIB3120-045-P1-K1-E5
gcagatggcctcactcgccaacacaactcgtttttttccgttgtctgcatccttggaaaatttgcgacgggaaaacgtattcccagcgtttctttcaaatccttctcctttccctctttcaggccttccatttcctcactgaaacccttattccccaccaaatgctcttttctttttccctttccaatgcttcccta

SEQ ID NO: 32552 - DNA, 228 bp, Gossypium hirsutum
  Clone ID: LIB3120-045-P1-K1-E9
cttgcgcaaataatacctcattaagcccttaactggcatatccacttattccgcgcccaggcgacacacatggggatcgtgctgccttggacccaacctttaatgttccccttgttattgaaatacttcaaaccaggcaggaatggctgctccggaaatttggccaacccttggaagagcagagaaaacatcgctgactaataacacggggcaaagatactctttctt

SEQ ID NO: 32553 - DNA, 340 bp, Gossypium hirsutum
  Clone ID: LIB3120-045-P1-K1-F5
aaagaaaacgagcaaaagataaacacatgatatcatcatcacaaaactcctttgctaaaatgggggttctttcatttaaagctttcttcttcgacaaatcccccacaacccaactggttttttttttccctttaaaagcttgggtttttttttttttgaaagagaaagagagagggattgagaattaaggcttaagcattaaaccaccaaaaaaaagaagggtttttttgggctggcttggtttctttttctttctttccaggaaaaaatactttgatttttgttcaaaattatggggtttttctttttaaatggtatatggttaggtttggaaaatttt

SEQ ID NO: 32554 - DNA, 262 bp, Gossypium hirsutum
  Clone ID: LIB3120-045-P1-K1-G2
gttccgccgtagatggaggccgccgccgccaccgccactttggttggatcttctttacatgtacatccaccaccttcaagctctgttaccagatcgactgtttacgctgccagacctcgcctctccttcccgattaagcattattcttctctagcttgttcaggatcatggaataaaagaatggttttggagagtaggagaggcatatttgaaagggcttcgtcttttcccaactcgactgacccatttgatccaattgctc

SEQ ID NO: 32555 - DNA, 194 bp, Gossypium hirsutum
  Clone ID: LIB3120-045-P1-K1-G9
ctctagagtaaacttccttttgcaatcctttgtagagcttcgggatccattgtcaccatgtggtgctcaaatctgacaatgtgggtgtcctcaaaaccctctctttttgacacttcttcactccttttccgttctttcataaaacccttttcaactcccatattaaaggttaacccccgggaacccttttcagg

SEQ ID NO: 32556 - DNA, 281 bp, Gossypium hirsutum
  Clone ID: LIB3120-045-P1-K1-H5
tccatgcttcacagtcacagcaacaaggaaatgcttactctatgacatccaagaaacaatgggtgactccctctccatcgcctggtattgatgggagcagtcccattgtacgtgagaaagcctcagaggatgggtataactggcgtaaatacgggcagaaacttgttaaaggaaatgaatttgttcgaagttattacagatgtacacattcaaactgccaagttaaaaaagcaattggatttttcacaatgatggtaaaatgggctgacactgtttatttt

SEQ ID NO: 32557 - DNA, 167 bp, Gossypium hirsutum
  Clone ID: LIB3120-045-P1-K1-H7
ctcactcaacattcccactttccaatctccatctttcaaggtcaatatgccgatcagaaacggggcagttggccggcccgtagaggcgactcacctcgatgctctcaaggcagctatggctgagttcattttaaccttgatcttcgttttttgctggatcggttctc

SEQ ID NO: 32558 - DNA, 204 bp, Gossypium hirsutum
  Clone ID: LIB3120-046-P1-K1-A1
gcgcacccatgcggcaaatgagcacggatcggtcttggcggtgaaggaaaaggctgcttgtgaggctaacgggcagtcctatgcgaagacgaacctttggaatgttgatattgtacctagtaaatcacttacctaattatagcccgatatggagcctgtagtgtcgcattagccaaatcccaaaaccttatcacaaaaaataac

SEQ ID NO: 32559 - DNA, 195 bp, Gossypium hirsutum
  Clone ID: LIB3120-046-P1-K1-A12
gccatgcgcaccgtgacaacctgtgctatacagcaatctgctttcgttggccagaccgctgggatgcggggcattgagcttttacgcaaattctgagcttctcatggccggtcgttgcccatgcgcagacctgtgaaaagggccccaaccagcgcttgttccggtcaggaccgcccaaaggacttgggtcccttt

SEQ ID NO: 32560 - DNA, 149 bp, Gossypium hirsutum
  Clone ID: LIB3120-046-P1-K1-A2
cagactctcccgctcattctcgctgcgatttcggctggaagatcacacaactcaaaggggggcgctcttttctatcaagccatggctctcaacttccgtgcgggatagacccacatagaagcctggaaggcactcatagctgaatacta

SEQ ID NO: 32561 - DNA, 245 bp, Gossypium hirsutum
  unsure (1)..(245): unsure at all n locations
  Clone ID: LIB3120-046-P1-K1-A3
cgcgaagcgaaactttgtagtttgaaagcgtaggatcattaagacactgtttgtgaggctgagaaccagtcctttgcgtttttgcacctttgtaatgtttgtattgtaccttgtagatcacttacctaattatagccccatattgatgctgtagtgatgcanaaaaaaaaaaaaaaaaaaaaaaataaaattaaataaataataaaaattaaaaaaaaaaataaaataaaatgggggcggccgtt

SEQ ID NO: 32562 - DNA, 197 bp, Gossypium hirsutum
  Clone ID: LIB3120-046-P1-K1-A4
ccgacgactcttccgctcacgcgtgcggttatctctgagggtggcttaataaacgcctggggggtactttcggtctccattgacttctttatttctacgcttgcgaatttttcgtacgcgaaaatgagagagtgcctttcagttcacatcggtcaggctggcatccaagtcggaaatgcctgctggaagctgtactg

SEQ ID NO: 32563 - DNA, 301 bp, Gossypium hirsutum
  Clone ID: LIB3120-046-P1-K1-A5
ctcgcggagcgaaccttgttgtttgaaagctaggattttagctttcgggttttctataggggttgagagttgtgaggttctcgggttatgtcttgagtgtaaaacacttgtaatcttcatcttgttatagtgaaatttcttttcgcctctgcccgtggacgtaggcattaaagccgaaccacgtaaatccttgtgttcactttatttttcgttccggtcaattaacttgtagtcatatcggagttctcgaatcgatcctttccgcaccagcaacctatcttattagtgaagcaaatttcca

SEQ ID NO: 32564 - DNA, 248 bp, Gossypium hirsutum
  Clone ID: LIB3120-046-P1-K1-A6
tcctgcagacatcttcgggccgtcaacacaaggtttgatggtggtattataatgacccatggaaatgaggctggcttgatgctatctacgaggatttcaccacttcagttggtaattgtacctatttgaaagatggttggtgataatacatgagtactatatggtggatcttctgaaaaagaaactcaaataagagatggacttgacgataaacttgatggcgcacataagaggaaacccttagggaa

SEQ ID NO: 32565 - DNA, 234 bp, Gossypium hirsutum
  Clone ID: LIB3120-046-P1-K1-A7
cgcgttcggcattcgtccgaacacgcgtccgtgagaacgaaggtaaagggaggcaatgctaagaacgggggtggtccaacggtcaaatatgtggaaaagtgcatgatttcccaaagttggttcttttccaaagtgtctgacatacattgtaagcatggctgctgatgtccatcgtacattactatacgggggtatctttctgtacctttcagataagaaaagcccaactgaaaa

SEQ ID NO: 32566 - DNA, 243 bp, Gossypium hirsutum
  unsure (1)..(243): unsure at all n locations
  Clone ID: LIB3120-046-P1-K1-B1
gacccttgttccagtttgttnnnnnngaactaaggataaaggaaccacaccagccatgggtgcaacatctgcctcatgtcttattctcccatcgctcaaacccaaagttctatctttatccgactaaactcccatttcactttttctctgctccctttctccaacccccaatgcaaagcctttcttctgttctgctcttccaggtttcaggcttttaaaccaaaaagggctctttttctttcg

SEQ ID NO: 32567 - DNA, 304 bp, Gossypium hirsutum
  Clone ID: LIB3120-046-P1-K1-B10
cccaggcgtacgcgcacgcgtccgaaaaaaaaaaaaaaccaatgtgcgctgactcctcctagcccgccataccgggacatggggtcagtcaaatcttcatcatctccttgcctatcaccggccgtacattacctcctattcggttctccatgctccattgctaacccgtttctgcttcaaaagagcgggcttccgctgctttccggggcggtggaaccttatttctttggagcggaagaccaagcgcttcattacaggatcgtacacgaaaagacgaccgcttggtcgagccggaaacattttt

SEQ ID NO: 32568 - DNA, 222 bp, Gossypium hirsutum
  Clone ID: LIB3120-046-P1-K1-B12
cccacgcgtccgatcagcatgtcataaaacataagaaaataggctgaagtttaatttacgagctttggggcaaaagtgtaaatatgtgaaagtttacgatcaaaactataatttttccaaaatatggatttggggtcaatttgaatactgtgagtcctaattagactattttttaaatgatggagcaaggaaaactaaattccgggcttaaatgggaaaaat

SEQ ID NO: 32569 - DNA, 283 bp, Gossypium hirsutum
  Clone ID: LIB3120-046-P1-K1-B5
gcccatatgcaccaagcttgcatttcattcaaattgtacaggcttcttcgtgttccttgacgacatcaaccatggtgctatccaagacagcttctcaatctgatgtctcagttcactccacttttgcctctcgttatgtccgagaccaacttcctaggttaaggatgccagagaactcaataccaaaggacgctgcatatcaaatcatcaacgatgaactgatgcttgatgggaacccgaggtggaacctggcctcttttgtaactacctggatggagcctga

SEQ ID NO: 32570 - DNA, 304 bp, Gossypium hirsutum
  Clone ID: LIB3120-046-P1-K1-B8
gtaccgtcctgattcccggtcgaccacacccgtccgcgactactcctcgtgctgatctacttttgcaagccgctataattctcgttacgatctttatgttccttgctatgcacgatattcccaaaaagatcttcaccaaaatccgttaccggaatcgagccgacttccaggcgaagcgtcacttcgtcctcggagcccagctcttggctcaagccagatcctccaagtctcgttcatccaccggctctttagccaaacaagccgaagccgaagccgacaaagccatttctctagaccggaaaga

SEQ ID NO: 32571 - DNA, 228 bp, Gossypium hirsutum
  Clone ID: LIB3120-046-P1-K1-C5
cccacgcgtccggggacaactgctagaacatgccttcccttcctacttgcttccactgtgctaggctacatggttggttcggggttgccatctgctgtgaaaaaagttcttcatccgattatttgctgtgcactctcagcagatcttgcagcagtggcatttgggtacatttcacagtcgggagttgatgcggtattaggagattaccttacaaaggtgtcatctaat

SEQ ID NO: 32572 - DNA, 202 bp, Gossypium hirsutum
  Clone ID: LIB3120-046-P1-K1-C6
cccacgcgtccgatcacccgtcctgactcgcgtctgtccacccttctaactatacttgcgatgagctaacttgcaatctggcatagaaaaaaaggagctggaactgaaaacacaggtagatataggctacgacgcgccgttcattgtctttactaccattgacttaatctctttgacaggtgaaagcggaacctgttatttt

SEQ ID NO: 32573 - DNA, 108 bp, Gossypium hirsutum
  Clone ID: LIB3120-046-P1-K1-C7
gccacacccttccggaatatggaagtaatatgaatgatcaagggaacctatgatacttgttattatggggctaggctacatggatggtcagatgttgccatctgcttt

SEQ ID NO: 32574 - DNA, 281 bp, Gossypium hirsutum
  Clone ID: LIB3120-046-P1-K1-C8
cgcgtccgcccacccgtccgttatcccaaacttattacccatttttcccattcaaattttctccatcatcctccaaccatgtgcaaaggcttacaacaaggaagcacatcaagttcttgtctgaaacagggtgtctcactctcacctaatgcaaatcctagggtttcaacaaggttggtgaagtgtgagctctgcaactccagggcaaccttatattgtcaagcagatgatgcatacctgtgcaggaaatgcgacaaatgggttcatgaagctaatttctt

SEQ ID NO: 32575 - DNA, 191 bp, Gossypium hirsutum
  Clone ID: LIB3120-046-P1-K1-D10
ggctcgcccacatttcacattggcaacatatgccacttcctgagatatggagggagaaagaggagtgtgatggatatctcgaactatactagaatcttatttcccggaaaattgctttgatattttaaaggaagctcttattgccaacacggccgtttataacggaaagaggattccattaccttttaatt

SEQ ID NO: 32576 - DNA, 200 bp, Gossypium hirsutum
  Clone ID: LIB3120-046-P1-K1-D11
taccgtccgcatcccggtcgagcccacgcgtccggccacgcgtacaaggatagcgccagcataactctcttcgggagagacagtaatgctaagcgggtggggagggataagtgcaacgatacttgtctctcataaaaaaaatgctagccttcatagtgacggggtcgcggtcactgctaaaaccacggtggctaacgacc

SEQ ID NO: 32577 - DNA, 335 bp, Gossypium hirsutum
  Clone ID: LIB3120-046-P1-K1-D12
acgaaggaaacccaccaagatctgcaggttctttacttttctttgcttcctcataaaggagagaggctaatgaagtggtatacaatatgtatatgcattctcgaactccttctaacaacctatgcattttgttatcatttccgattggacgatccattaatccagctggcggaagatgataaatggatgaatttttttgattgttactggggattgggaatagatggactttgtatagggcccattttactgacaggatttataaccactctagcgactttggcggctgggccggttactcgagattcgcgattatttattttcctgatgctagc

SEQ ID NO: 32578 - DNA, 152 bp, Gossypium hirsutum
  Clone ID: LIB3120-046-P1-K1-D3
ttcagctataccatacactattaagtgtcaataacagaagaggtttccttcaactattccgtggggggaggatgccacggcctttatagcaccagaaaacctggtaccttccaaaaacatgaagaagagggtgtaaggttgagaccccattc

SEQ ID NO: 32579 - DNA, 284 bp, Gossypium hirsutum
  Clone ID: LIB3120-046-P1-K1-D8
cccacgcgtccgatcactcgcaataggggacattctccgcatcggtctaggtatggcctacggggcttaacctaaaacatggcctatcacatggctcattcttggaagagggggacatgcttatacaagcttcatcattctttgcaaatgccacggtaaacttgaaactctcttcctgattcccacaggtgtcggtatttctgacgtgtttttccttgacccgaacaggcagactgaggcggggtaagctataccatacgggtgcatgggattggatataagaa

SEQ ID NO: 32580 - DNA, 219 bp, Gossypium hirsutum
  Clone ID: LIB3120-046-P1-K1-E11
tctcatgattcactggtctctctgtctctcttcttttctttcctctactttaaattttttgtggaaatcagtccaaaaagcttgccatatttttcagaaaaaccaagcttcattccattacgtcttgaatgcaatctcttcctgtttcacaatttgccctgtgcctttttatctttcttttgctgggtttgtacacattctttcaattccttcttgggt

SEQ ID NO: 32581 - DNA, 190 bp, Gossypium hirsutum
  Clone ID: LIB3120-046-P1-K1-E3
cccacgcgtccgataaaaagcaatctcttggttttcttgtttgtataaagggttagtagagttgggtctctaggtttctttcaaaacaaggtttttctttgacgtatttcctcgcttttcttttaaggggaaaccacaaagaaagggaaccgggtttggaagaaggagatggttttaatggtggagattt

SEQ ID NO: 32582 - DNA, 198 bp, Gossypium hirsutum
  Clone ID: LIB3120-046-P1-K1-F10
gtcgaattctttcgcccggcgacgcgtgacgttacagcgaccttaacaaacactctttacacctcttgtacgaatatcacataattcgtttagcggatgttgcacgggcaggtttatacgaacatatttgattatggtcgtgattactccagacatggcaagacatgtactgaactaagaacctatgtttcatttact

SEQ ID NO: 32583 - DNA, 327 bp, Gossypium hirsutum
  Clone ID: LIB3120-046-P1-K1-F12
acgcgcatgtcacagattcaagagctcctacacagcatccgtgtactaacctatacattttcggggatgcgactctgatgactgtgcatgcacttcttctctaaaaagacatatgctacaaggaggaggaaaggaatgtacctgaaagggcatagaaactcgcttcgaaagctgatcttttaggcactggtgcatatgggactgaacatctagcgcatgcatcatcagagggtggacaaaaactttgtagccatcacatgctggactcttttgacagaaagaactattctaccttgttgaagcttgtttaagccctaaaaggctttt

SEQ ID NO: 32584 - DNA, 237 bp, Gossypium hirsutum
  Clone ID: LIB3120-046-P1-K1-F5
gttggaaatttagaaacaaaaactaatgtaggcgaagataaaagtgttttgcctctcgggtccaggacgcttgaaagtgatgataaagctagtggcgtgccagagtctctcattgatatgcctattgcagatttatggacagatccatgcattgcatttgccattcaaactctcactggaattccctgcgatactccaacgatatcaaagtcaaataggggaaaaaatccagggatt

SEQ ID NO: 32585 - DNA, 330 bp, Gossypium hirsutum
  Clone ID: LIB3120-046-P1-K1-H10
cccacgcttccgtacaaagtattctccccaaagcaatcctttcacttgcaaaaagggagagcggcaggcctagatatattatgcggaacattcaatacatcgtcgggaagattttatcctatatagcatgataatcacaggacctgtgaggcagatggtgtaccgaaaaaatgctccttgcaggttaaggcaaataatgcggattaattggaaatatttcggaaggagagcttcatcataggcccagatgaccggagtgctggttagcactatgcagaggcggtcattacagtaaggaagaaggctaactcgttgaaaaagaataacggc

SEQ ID NO: 32586 - DNA, 249 bp, Gossypium hirsutum
  unsure (1)..(249): unsure at all n locations
  Clone ID: LIB3120-046-P1-K1-H2
ctgccgcgaacncatacgcccacgcgtccgctcctccacaaattaactcccttttttcctcttcaagttttctctctataccgcttctattctcctttattttcttctctatatcaccacaaacgaagttatgggagtgggaggattataagagagttggggtttctgggtgatttcagaggtaaagggagggtgacttctggttcaatggggaaacagaaaggggggttcttttggcgttcttttcct

SEQ ID NO: 32587 - DNA, 220 bp, Gossypium hirsutum
  unsure (1)..(220): unsure at all n locations
  Clone ID: LIB3120-046-P1-K1-H4
taancttncnttttcagaatcctacatcgctgccgcttccctcgacgaccctgaaatggtgggctaccattttgcatattcattgagcctatctaggccatcaggaaccaaacaccaatccaactttattctagtttcaagacgcgggccatacatctccatggggatggccaatagtaaaaagacgacggctccttctgcatccctgtccaggaaagag

SEQ ID NO: 32588 - DNA, 306 bp, Gossypium hirsutum
  Clone ID: LIB3120-046-P1-K1-H9
agcactcaaaatactttcaacaataccagaccaggctcggctgatcttgtcggatcacacgtaaggacagggggttgtaaacgatgcacttgtgctcattactgctgatggaaacgcttgcttgaacacctcctattagggtccattattgcttagagctcgccagtttagcataccagatgatggtcaattgctcaggtgtgcagacaggaaactcctactgaggttgatggatcaaggacctcggacggttcggttgactgggaccgacccaatgggttgggttccagcagaattagccatgag

SEQ ID NO: 32589 - DNA, 221 bp, Gossypium hirsutum
  Clone ID: LIB3120-048-P1-K1-A2
gcgtacgtgcacgcgtgcgacgagagctggcattacagaggggtgcggagaaggccatggggcaagtgggctgcagagatccgagacccgaccaggaagggacgtcgtgtttggctaggtactttcgatactgatgtcgatgctgtcaaggcttatgattgtgcagcattttaaaatgagggggcagaaagcattactgaatttcccattggaagctggac

SEQ ID NO: 32590 - DNA, 241 bp, Gossypium hirsutum
  Clone ID: LIB3120-048-P1-K1-A4
cccacgcgtccgctttgatatggttgtttccatggcggtgagatcaattttcactatcttagcaaggatcaaacttatttttgggattggtccttcgatattaccacgaagcctatcagcttctgcaactgttcatccaactgaaaaccctaacggattcatgtcaggttccataaaaaaatcccttccgaagaggaaaacaaagattcgaggttcgggtttttcgagtcgaacacaaagc

SEQ ID NO: 32591 - DNA, 253 bp, Gossypium hirsutum
  Clone ID: LIB3120-048-P1-K1-A7
acgcgtccgccactatcactaccattatggctacgtctactgtgcctgtagccaaacccaacctggaaaggcaggcaaaaggaaagggtgatgactttgcagatttatcaagcctacacaactcctttactagccttccctttgccaggattaacgctctgatgacggccattcactcgttgctctacagacatatgctctacgaagcagtcatggctcatagcaggaaagggatggctcatgcacagctaaa

SEQ ID NO: 32592 - DNA, 241 bp, Gossypium hirsutum
  Clone ID: LIB3120-048-P1-K1-A8
gacgcgtgcgtccacgcgatgcgattacttatgtggcaagccatgcacgtagagtccattgcatgcatcagcatcgcgattactggaaagaagaagcttgacactatctcatacctacccgatcttacacccgtgcagtatgctaacgtagtagcttaccttctattttcaaaatgggtagcttgcttggaatacaaattggaggacgtattcgtgcaccgtaagtactctagcttaccca

SEQ ID NO: 32593 - DNA, 244 bp, Gossypium hirsutum
  Clone ID: LIB3120-048-P1-K1-B2
cccacgcgttcgcccacgcgtccggccacccacatagctacattaggatggttcaacatcggatcgatagatgtatgctgctttacatgaaccgacaacaatgtgtcaaggcactggcacagtatgcaagcgttgggccgtgcattacaattacagtgtggagagagctataaaaggagaacatggacttctttgaagcatattttaaagcttttttttcatacaggccttttatgggtacatt

SEQ ID NO: 32594 - DNA, 154 bp, Gossypium hirsutum
  Clone ID: LIB3120-048-P1-K1-B4
ctgggtctattcaggacgcctagcgcattggcgaccatcacggttgacgctgccgatatggcatctctgaccggacataatgacggtgcaaccggctatgaaggtagcgccacaggcaatgtggcagtcctatcattgccaaggggcagcttaa

SEQ ID NO: 32595 - DNA, 185 bp, Gossypium hirsutum
  Clone ID: LIB3120-048-P1-K1-B5
atgcgtgcggtacatggacaagattacacgctccctaaagggccgataggatcagaagtagcgcagggattagaaacgcccgacaggaggaaaaagacgaccacctgcgctaagatcgctgacacctaacaaacccaatgcagtgactatgcttgcactagaaggcccagccgtcgctgacacga

SEQ ID NO: 32596 - DNA, 220 bp, Gossypium hirsutum
  Clone ID: LIB3120-048-P1-K1-B7
tacactctatctgagatttagcgctttacttaacggtcctgatagttgatagatagtgcagcgttaagtaacctgaggggagacatagaccaccggtgtcaagaaatagcttgcggttagtaaaccctatgccatcaagactctttcaaatgaatgatctgcgcgcgctgacacgtactggatgaaagcccttaggtgtgtggagacttacaagatctac

SEQ ID NO: 32597 - DNA, 133 bp, Gossypium hirsutum
  Clone ID: LIB3120-048-P1-K1-C4
ttcccggtcgcgcacgcgtccggctatagcatacactactagacccactacttctttggcttcctcaatgatcattatctggggcgggtgtcactgtctgtgcggcacaggctaacatggacgatcctttcac

SEQ ID NO: 32598 - DNA, 192 bp, Gossypium hirsutum
  Clone ID: LIB3120-048-P1-K1-C7
ctgaagcaatcaatggtttattctgaatttaccgatcactgaacagagggggcgcatcatgagacgggagataacaaagaccttgctctcatggagcatattctacatggaagctttcatgtgaacgcacctatgaaagtgcttgaaacgcgcccgccgcaaaaaccgaaacatgaccgcctcccattgagg

SEQ ID NO: 32599 - DNA, 277 bp, Gossypium hirsutum
  Clone ID: LIB3120-048-P1-K1-C8
ctcgaagcccacacccttgctaatgggcgattgcagcggatggcttttctgtttttgttggggggttattttttatttatttgataactatacaagtgtcaaaatcccattggggactgcagagagatgagacgtacatcgttggcaaggcctgacctatcttcccaccgtaagcgctaaattggcggtcgaaattgttaccgcacacacgtggaagacggctgattcagtttggaggggtttcagttttaaatatacatactatttctcacttcta

SEQ ID NO: 32600 - DNA, 200 bp, Gossypium hirsutum
  Clone ID: LIB3120-048-P1-K1-D3
aaaatttcttggttttcctcccaaagcatcatagatgttcgcagaacagctcgcatctcgagggcaccgctgctgaaggtaggcaggcaaacccatatcctgttccaagcatgcttactatggcattgtgtgatgctatgacttatgacatggctcccatatctgatggctaggatgcatcaatttactttagcacatag

SEQ ID NO: 32601 - DNA, 189 bp, Gossypium hirsutum
  Clone ID: LIB3120-048-P1-K1-D4
ctcgaagcccacaccctttctagtggacgccggtcagtatcctctggcgcatcaaagctgcaggggccatgtatcagcatgcggatactaaccctcagactgaggatgagctccatcgagagaaaaagaatgaagatacgtcctaagatagggaactgaagaaacagatggccttagaataagctgctt

SEQ ID NO: 32602 - DNA, 333 bp, Gossypium hirsutum
  Clone ID: LIB3120-048-P1-K1-D8
ccggtccgaattcccggtcggccccacgtccgcccacgcgcccgacccactctatggtgcgcctttacttgtactatgcgcttccgtcctcagggaagaccctaaccctttgcgcgggcccttctccttttggggataccacttcttggctaatcgctctcgccttcttcttcgctcggggtttcatcaagactggacttggtaatcgaatcgcttaccaattcgtttccttattcggatcttcctcattaggtttaggctacagcttagtcttcagcgaagctttattagcgcccgcaatttcaatccgattccgacgcgctggaggaattt

SEQ ID NO: 32603 - DNA, 104 bp, Gossypium hirsutum
  Clone ID: LIB3120-048-P1-K1-E1
ccacgcgtccgccaaagggtgaaatctgtgatgtaaatcgtcgtttgtgttgatgctgctgaggatgagttcttcagattgacaaccagggaagggaaactgac

SEQ ID NO: 32604 - DNA, 289 bp, Gossypium hirsutum
  Clone ID: LIB3120-048-P1-K1-E5
gtccggaaaaagaattatgaattcgccgacgacggttagggattcatcgtcgccgacacggatcggggctcgttcttcgatgatggactggataagagcttgtggcttgtcgggattagccggtatgaagatcgataaagaagaactcagacgaaggctttcgatgcctcagtatctacgccttgctatgttagattccattaaaaaaaaagacgtcgacggcggcgatgaacattttcgttcgcgttctttcgactacgatggtacttgttctcaatctcctatcggt

SEQ ID NO: 32605 - DNA, 350 bp, Gossypium hirsutum
  Clone ID: LIB3120-048-P1-K1-F6
acgacaggtacaaatggattggtctggttcggatctctattgctaaaaatggatgctcacctctgtggaggggcattagtcgggtaagggacgaagttaaacaagggttgtgttggaatttgggcaaggcaaaacggtggatttttagtttgataggtggcttccgaatggctatcctctcattgatgatgttcggtcaagggaggtggccccggctggctttacatccgtcttatccatgacgagtgttattggaacttgtgcttgggagagatttaatcagctattgtctcaacgtgggatcttaagagtggttgcggttgatgtttaggatttctttgggttggaga

SEQ ID NO: 32606 - DNA, 276 bp, Gossypium hirsutum
  Clone ID: LIB3120-048-P1-K1-F7
cgcccgacgcgcgcggcagagaccactctcggctcaattcttacattacgcttgcatttgcatatctaatacgagcgggagacttttcaaactagggttcaaaaacagaggaaactcatgagcatgcttagtgactgagtttgaatagagcaacctactctctgaagctcgcaggtgcaacctaccacgagagtagctcagagtctcctttgattgtgaacggagggaaaatgtggggacacgcagtggtggatgtatcaaccattcgaggatgct

SEQ ID NO: 32607 - DNA, 279 bp, Gossypium hirsutum
  unsure (1)..(279): unsure at all n locations
  Clone ID: LIB3120-048-P1-K1-G1
atccctttaaccatattgctctcaattcttacatgacgcttgcttctgcatatagaatacggtcaagtgacttcttatccttccattcaaaaacagatgaatctcaattgaaagcttttgaaatgagtaggatcagtgcaggttactctctgttgctggcaggtgcaactcaccatttgttttgctcagaatcttctttgattgtgtctgctgtgaatttctggaaacaggcgngggaatatttattaaccattgctggatgctctgtctggaacttat

SEQ ID NO: 32608 - DNA, 155 bp, Gossypium hirsutum
  Clone ID: LIB3120-048-P1-K1-G5
ccacacctcatggctgtaagttactctcatgtgctttctaaacttcctctaaatgttacatctcaaacattccccttctataacatagttgcactgtaagaaaacagcgcacgagacgtctaaaaagctcatggccttacatctctctctcgctt

SEQ ID NO: 32609 - DNA, 275 bp, Gossypium hirsutum
  Clone ID: LIB3120-048-P1-K1-G7
cccacgcgtgcgcgtcgctagccttaactcttttctgtctcctccgactcttatccaagacgggccggattttgctgccgctattccttcgctcaccccaacagagggggtgacaaacatgttgtaccactaagccgctgatgctctcatcaagactgatcgagagaaccgagaactggaagcttaaagccctgcaagggtagatcaaataacagcagagttaaacacagcatcagctgatggcataccatctgactcttctgtgagagacttgt

SEQ ID NO: 32610 - DNA, 185 bp, Gossypium hirsutum
  Clone ID: LIB3120-048-P1-K1-H1
gcgtgacaatcatgacgggccttaactttacataggctgcttgtgtttgatcgctgttaactgtgacgcagagggtatccatgcgagatcatcaacaacatatctgctgatggggttggaactgaatactgtgatacatgtttgcaggctgacctcttcaggccgacctattttatttcaggtgc

SEQ ID NO: 32611 - DNA, 231 bp, Gossypium hirsutum
  Clone ID: LIB3120-048-P1-K1-H8
tgtccctgggaccggccggattcctgttcgggcgaggcgacgcgcacgcccacgcgttcgcttcgaaattattattatcttggacttcgcatctctttcaggcacgtgagggaggacttgactgtgaagaattgaacttcaagctatctaggactctctacattttctaggttgagtcatagtgcttggtaaaatgtcgaatgctatatcgatatcgccatagtttagacc

SEQ ID NO: 32612 - DNA, 200 bp, Gossypium hirsutum
  Clone ID: LIB3120-053-P1-K1-A1
gtccgaaaggactttgctttgcctaatttgcaagctttgaggtcgactgaaagaactatggctgaagagggacacgtaatcgcctgccacactgttgattcatggaaccagcagctcgagatgagaaaccagtccaagaaactggcggggacggatttcacagcatcattgtggggtccatgccggtgattttcaaccaa

SEQ ID NO: 32613 - DNA, 246 bp, Gossypium hirsutum
  Clone ID: LIB3120-053-P1-K1-A8
actctcacccgtgcgacccacacgtccgcccacgccaacgtatgaatactgatcgggtggcctaccaaaaaatatgtggggcttccagctttatatcccttatggactacgtcgtattatcagaccccaccctgtcatactttccttcctcctgacactttgcttcaccatgggacgatctgattcggcggtcatctaaaacacatcctgtcactgcactaagctgacactttactttcttcaaac

SEQ ID NO: 32614 - DNA, 239 bp, Gossypium hirsutum
  Clone ID: LIB3120-053-P1-K1-A9
tactttcataacacttccacgaacttcgctgtacatactgcaatggcggctggcgtctgcaccgttggtgttatcaaccgcgcacggtgaagctagaatggaccaggagccggagcttgtgttgcaagctcaatttacatggccaacatttagaagaacgtgagcgctaggttcaacaacaacggtaggggtccattgggacccttcatgatggcggttgccaaaaagccccacaaata

SEQ ID NO: 32615 - DNA, 189 bp, Gossypium hirsutum
  Clone ID: LIB3120-053-P1-K1-B12
gcgcgagcctgtcgcgcgcactcctataataactcgtccgctttttattccatgaccgtttttgttgacaagggtgcggaggatatgatcaagagcgcccatttcttaactaccaatggtggtgcttcagtttggaacaataactcatcacttactgtgggagcaggaggtccatttttccttgaagac

SEQ ID NO: 32616 - DNA, 221 bp, Gossypium hirsutum
  Clone ID: LIB3120-053-P1-K1-B6
attgattctacatttctatgacacaaaaagctcccccgccccgactccgctgtcatcaacagcacatttctaaacccatatacataaaaaaatggcagcaagtgttgcatcattggcgatgctcaatgcaaactgcctaagcttcagctcagctaagatgagcagcccaacaaagccaaccctaaggccttttttccttgtctccatgcataacctcccca

SEQ ID NO: 32617 - DNA, 302 bp, Gossypium hirsutum
  Clone ID: LIB3120-053-P1-K1-B8
tcgaccaccctgtccgggacattcgaaaagacggacaatttcaagagaaaaaagatgtttggttgaggcatgaatttgatcacaacagtgatcggttttggaatgagtgccacttttattgtgtttgtttgtacgaaaatgatctgtcggagaattagagggtcccaaacccgacttttgtttcagaccgaatccaggattgatctcgaacaggcagaggcagaatttagaggggttgaaccagtagtggtagctgcaatacccaccatcaagttcaatcgtgaagccttcaagtccatgga

SEQ ID NO: 32618 - DNA, 228 bp, Gossypium hirsutum
  Clone ID: LIB3120-053-P1-K1-B9
cgcttcttctaaagtccaaaaattccttacggataaaagacggaattataagatcatatatgcttgagatatatggtatatggtatatggtactaaccccctcacgatgaactcgtgttaggcatgacttcatataacaaacctgcctaaacttgtttatgctactacaagctttcggtgctgggtttggaaaggtgccctttgcttagctttagatagacttaattt

SEQ ID NO: 32619 - DNA, 140 bp, Gossypium hirsutum
  Clone ID: LIB3120-053-P1-K1-C2
cccacgcgttcgaccaccctttccggtacactggcataaacacttatcgggagatcaaggacagaatctggggtcgctttggtaacgctggaacaatggatatcccctttgggaccgatgagcgattattggatgtacta

SEQ ID NO: 32620 - DNA, 337 bp, Gossypium hirsutum
  Clone ID: LIB3120-053-P1-K1-D12
gcgtccgctcgctttttcgataaaagaactttttttgattctacgatctgcactgcttggaggcgtggggtaaaatacatggcttagatggatgaagatccaccttgtacaaactggctgcggcggtgccctacacctgctttgtcttgtaaaaacagaaaaccagggcggcgtgctaatagactcacatctgcttatatcattgtgctatcgagctactcttcatttgtgaaacacacacccaaatatttgggcgctcgtgaaaaactaaagaacggtgacaacccagaagactccctagcttattgtccttacgcacatgcccctttacaatagc

SEQ ID NO: 32621 - DNA, 272 bp, Gossypium hirsutum
  Clone ID: LIB3120-053-P1-K1-D5
gtcttgtcatccgcatcgctctttttcccttacacatttttccttcgtctatctaccaggtaaataggtcaggactggatgagaagtccgaacccatcataaaagacgagtaccgacggaaatgcatcatgggggggaacctgactttttctttcgcttctactgcttaagcttttttgtacttttgggggtaataaacttttcttttgcaaattggttggttctttcttcaaactgtccttaaaaaaaacacacttttattaaactcggaa

SEQ ID NO: 32622 - DNA, 224 bp, Gossypium hirsutum
  Clone ID: LIB3120-053-P1-K1-D8
ctccaccatttctatcttacccactaacaagaactcctcgcttctcggcttcctcgcagacacctcctcctaactcacaaccacccaatccaccaccatctcctaaattaaccacaacttcatctgagcagcaaccaccggtaactgtgcgagaaccaaagccccccaaacctaccaccactgttgaaaccactgattggatagcttcctccttgaccaggcgc

SEQ ID NO: 32623 - DNA, 175 bp, Gossypium hirsutum
  Clone ID: LIB3120-053-P1-K1-E11
gccaggcccaaagttccactttccgttgctttaccatcttactagacccataaaaaacgtggttgactatgtttgggcggcttggtcaaattcctaaaccctttgattcttctttctcaacgacgatatatagttcttgcttggttatgggagatacatgcaccgcaagaaaggg

SEQ ID NO: 32624 - DNA, 170 bp, Gossypium hirsutum
  Clone ID: LIB3120-053-P1-K1-E3
acattagaagttccttgttttacgtggaatatgcggtgggagaaggattcactcaaagctttacaaaatttaggaacattaagctacatctcctccaaacttcaaacccatttattagtaacctctgattgtgttgatgatggggtggtgccatggatctgatagatgct

SEQ ID NO: 32625 - DNA, 102 bp, Gossypium hirsutum
  Clone ID: LIB3120-053-P1-K1-E4
cttaaggctatttcgcaggaagtttctatccgtgaactcgctgatgttgatgctgttaatgctgcgacctatgaaattggaaacttgacagttgacgccata

SEQ ID NO: 32626 - DNA, 330 bp, Gossypium hirsutum
  unsure (1)..(330): unsure at all n locations
  Clone ID: LIB3120-053-P1-K1-E7
tccggtcctgaattccccgttgtacgctctcgtccgcccgcgcttccgtggatttccaatggttctgctganaactaatgaatggaaaggtagttgcttgccatatttcttgataaggattattataaaattaaatacaaaaaaatactaatctttacaaactgcgtcctctttaaagaactctttcttttctttccctctttttcctttttacttaacccttatcacctttccttttctttctttctttctttcctcttttacctatttccctggttttttaaattctcctttcgaattcatggcattctttttccccttttaatcctt

SEQ ID NO: 32627 - DNA, 298 bp, Gossypium hirsutum
  Clone ID: LIB3120-053-P1-K1-E9
cccaggcgtccggctggttggggagagaggacttcaactctcaggtgggcataagcagatgattgctatagccagggcaatgttgaaaaacccggcaatcctactcttggatgaagcaactagtgctctagattccgagtcagaaaagttggttcaagaggctcttgatcgtttcattattgggaggacaactcttgtaattgcccatcgcctttccactattcgcagggttgatcttgtaccttgcctccaccagggaagtgtttttgaatttggaccacatgatgacctctttgcc

SEQ ID NO: 32628 - DNA, 280 bp, Gossypium hirsutum
  Clone ID: LIB3120-053-P1-K1-F2
tttttcgacccactcgtccgctctccggtttacgagttctagtggaaattcaaagtctgcagatgtcaaggagcacataccagtgttataccctgaaactattctatgtgttgaggtctaccataacatacgaaaatggtcaaaggtccaagagttcttggttcttggccgtcaaaccttaaccgaaattaaggacaagatatgttgcttgactgaccaggtgatgcataaggctggccgttatgatccttctggatatttcctatagaaaacatatttt

SEQ ID NO: 32629 - DNA, 108 bp, Gossypium hirsutum
  Clone ID: LIB3120-053-P1-K1-F4
ggcaagactttgaacagtgcccaccatcatttctgccactgtcgataaagaaactttcaggggccttaaagccggtgcaaccgcacctaaagttagcgccacaaccaa

SEQ ID NO: 32630 - DNA, 190 bp, Gossypium hirsutum
  Clone ID: LIB3120-053-P1-K1-F5
ccacacccttaatcaccagccgtaaaaaatggacacacttcgctcaagttcatcgtctgagggtggtccggtcacccctccctccggttcgcacaatcgcttccccatccaaggtctattccgccgccgcaagattcccttgcactccttcgggcagcggtttccgactgaaccacgtccagttcctacg

SEQ ID NO: 32631 - DNA, 213 bp, Gossypium hirsutum
  Clone ID: LIB3120-053-P1-K1-F7
tcgagcaacacaccaagtcaacactacatgccttatgcaccaaggcttcctatggtgtacagcgatctgcttgctgtggccagtcgcggggtaaatcaaataacagcgcagttaaacacagcatcagctgatggcaaaccatctgactcttctgttgagagactgaaagaaggcttcgtttacttcaggaaagaaaactatgaaaggaatcct

SEQ ID NO: 32632 - DNA, 229 bp, Gossypium hirsutum
  Clone ID: LIB3120-053-P1-K1-G1
ccattacccatccgtttccatcactcattttcccgagaaacaaacactcttctcttattggcttgtatcacttccccatttttgaataaaccccaacacagtctctttttagccttctctatcttttctttaatcaaatcttgatctccgttcctctcttttatttcttttaaatattaaggttacttatattttccgattcgacggtttttattattatttttttgga

SEQ ID NO: 32633 - DNA, 266 bp, Gossypium hirsutum
  Clone ID: LIB3120-053-P1-K1-G11
ctcttaaaccttaccttagtggataacatctgttatgtaagtcggcgaaacgtatccttagcgtagggaaatggattggctttgagggctgggcacggtggtcccagacccgaacccgacggctgtcggcgcactgctcgagctgttcccgcggccagagcggaactccgcgtgcctgccgggggacgtactgggaacggatccctcgggggcattccccgggcaactaacagttgattaagaactggtacggacaaggggaattc

SEQ ID NO: 32634 - DNA, 258 bp, Gossypium hirsutum
  Clone ID: LIB3120-053-P1-K1-G8
gccctaaatacccttttcttgttgtttcattttgcgcttctaaaatccattaccagtgaaccatatagagcgacattggcggtcgtgtgcagtgttgcttgcgcatgtcttatcgtgacttttcaacggtgcgagtctataatgctctcgaattctacatcctgaaaaccgagaacggtcaacatctttgcaacgacgccgtcgacctcatctaatccccgttggccgggcagtctccaatcattggatccataacca

SEQ ID NO: 32635 - DNA, 177 bp, Gossypium hirsutum
  Clone ID: LIB3120-053-P1-K1-G9
attatgattctttatttatgttaataataaagttactattactgaatgaatcaaatcatgtgtatcttggatcggttctatggcatccttgcttcccttggataatggcaaaaagaggccaacaacttgtttttagggcttgataatgcctgcaaaaccacactgttttatatgctc

SEQ ID NO: 32636 - DNA, 292 bp, Gossypium hirsutum
  Clone ID: LIB3120-053-P1-K1-H1
gcgcataaataatcccccgtttctttctctttaatcaaatcccttcactttttttaaaaaaatcttcataagaaaaaaatgactccatttactgttatgttaatggttcttttccttgtgttcaccttgtctcaggcccgctttttgacagttgaaccggagttacgccgatccgttcgccaggtccaggcccgttttttgacagttgaaccggaacttggcgccaccgcccaagatactatctcgaatgtacccgattccgacccgagaaccacaacaatcactatccttc

SEQ ID NO: 32637 - DNA, 308 bp, Gossypium hirsutum
  unsure (1)..(308): unsure at all n locations
  Clone ID: LIB3120-053-P1-K1-H11
ccggcgcgttcgtccacgctntcttcattctataccaaattatttttattatacttttttcttacatggggcgggggcttatacgccggggtacgcctaagcctatatacccaaacgcctccgtgcatcgggttcttccacactcccgaacactccattcctacgggtgccctgaactgaaaatcctccccacgcaccattgaaagctcacgctcccgagtagaagcctatacatctgcccatagggaagcaccagtcggtggaaccccaccctggcgggacccaaacccccaataaccaaactttgg

SEQ ID NO: 32638 - DNA, 175 bp, Gossypium hirsutum
  Clone ID: LIB3120-053-P1-K1-H2
acgcggacgctgttgaagctcttttgcttgcgcagcttccactgctgtgactgagcaccggcactgtctctgctcccatttggcctcaggcttctcctcctcattaccatgctgcttcacctgtagtcccgcctagtcacccaccaacccaccaccattaaccaccaacgctcac

SEQ ID NO: 32639 - DNA, 361 bp, Gossypium hirsutum
  Clone ID: LIB3120-053-P1-K1-H9
tcgggatttgcacgttgtacagcagtttgggatccctcatctttttgatcttcccattagagcaaccgtatgtccgatgatttatgtttgtgcttatatagtaaagtgtatttttccattgcgttattgcaaactcaagagtactccattagaatgtttgtatgtgctgaaaatcctacccaagtttatgttttattacatttaatttttgcagctttctgcttttggtgatagtggaacacctgaagtggtggctgatcctcaaggtgaagttgcccagacgtttcataaccttggagtatgtgttgtgcaacagcgtgccaagattcgccagcaagtatcaacagcagttacatatgac

SEQ ID NO: 32640 - DNA, 223 bp, Gossypium hirsutum
  Clone ID: LIB3120-054-P1-K1-A11
cgtccgctttcttctaaagtaccaaaaactccttacgggtagaatatggcatatctatatcatcgattcgctcggggtatttcccagccagactttaagaacaggattgaaaacgctgggaatgacatgcaggacccggttgctgttctcactgcgggagaggaagggacacttttggagatgggctttgagcctacctgcggccttgcatgcttggggaaag

SEQ ID NO: 32641 - DNA, 262 bp, Gossypium hirsutum
  Clone ID: LIB3120-054-P1-K1-A5
cccacgcgtccgagcaaactgaacggccggcgagtattgagccagactgactgatatgaatgagggggacatcgggtggggctaaattggtttccaaagggacggaaatcaatgaggttccgtagtcggaactacatcaattcctggggcaaatttttctggttcgttgctttcatcgtctccactttcgttcttttcaatggcttctcctactctaactttcgctttctttttggagaaagatttgagcctgtgttgaagt

SEQ ID NO: 32642 - DNA, 186 bp, Gossypium hirsutum
  Clone ID: LIB3120-054-P1-K1-B11
ggaaagtagcctgggaacaccttctgctgcagcatctaatgcagatgatctaggtttaacccaattccaaggcttttggatcccttctcggagtgttcccacttcatccataatcgcatttcagaaaaatttccaggctcttgatgatgatatcattgttgtatctaagcccaaatctggcaccac

SEQ ID NO: 32643 - DNA, 387 bp, Gossypium hirsutum
  Clone ID: LIB3120-054-P1-K1-B4
gccggatgagattactcttaacacgcttttatatgagttttttaagaatggacggtttgatgatggggagaagatatggggtaaaacggtggagaaaaacgtggagcctgatattaggagttataatgctaagttgcttggattttcaactgaaaagaaactgaaagaggcagttaactgggttgaaaaaatgaggtgtaaaggacttaagcttgatgtgtttaccttcaattatatgatacgagcttgtgtaaatgaggaaaaattggagcatcctaaagagtggtttaatcaattggggaaaaatgattgtgcaccagaataacttgacttttacgacgttagttccattccttttgtgagaagggggatttagagttttgccct

SEQ ID NO: 32644 - DNA, 234 bp, Gossypium hirsutum
  Clone ID: LIB3120-054-P1-K1-B6
catgggcgctcctttcaacggccctaaagctggctttgcttttccaagcaccaggaaaggccacgaccacctttctttttttgcaaggcatggcgggagaatgcaatgcatgcaggtgtggcctcctactggaaagaagaagtttgagacttctttataccttcccgatcttacacccctgcagttggcgaaaaaagggaaccactttcttttagcttgtctttgccaaaaagg

SEQ ID NO: 32645 - DNA, 174 bp, Gossypium hirsutum
  Clone ID: LIB3120-054-P1-K1-B8
cccacgcgtccggtcagctcaaggatggaagaattgttgcagtaaaacgacttaaagttcaaggaggtcctgatgcagattctatcatttcgacagaggttgagctgttgtcaagggtacatcattgtcatgttgtaccttagcttggctactgtttggaattcaggggtaaac

SEQ ID NO: 32646 - DNA, 304 bp, Gossypium hirsutum
  Clone ID: LIB3120-054-P1-K1-C10
taccggctggaataccggccgacgacgcgtccggccacgcgttcattctttacaagatcatcttttatctctactctaaccatggatccttacggcgatggttctagaagatcctgggaataaaaaccctgaaccacaaataaatgggcaacaagattgctagacaattgcacatatactgacggcgagggcatgagggtcactcacgcatggagaaaaacaccggggggggaaaaggccaaatttactgtgaaaattgacacgtagcgtggaaacaacctaaaataaaaacatggaaggggcc

SEQ ID NO: 32647 - DNA, 241 bp, Gossypium hirsutum
  Clone ID: LIB3120-054-P1-K1-C11
ttcccggtcgacgacgcgtccgcatatacttccatatttttttatcaatcaacattctcagattttcgtatgtccttcatggcggcgtgattctttaggttctttgttcctctcaataattcacggttttattgcatcgaggaaaaaaagtgaatctgaaatacgcttggattggattgcgatttgaaagattgggcacgggaaggaaaaaacggttttttgatgaacaattctccaaaaa

SEQ ID NO: 32648 - DNA, 221 bp, Gossypium hirsutum
  Clone ID: LIB3120-054-P1-K1-C6
cccacgcgtacgcccacgcgtccgcatgagtggtgttacatgctgcctgcgtttcccgggtcaggtaaactcggacctacccaagcttgctgaaaacctaatcccgttcctcaaactacatttattgagggccgggttctctcctttaacgtttcgaggttcccagctgtacatagttctaactttcccacacttaacacaccaaatgtgggatctcaata

SEQ ID NO: 32649 - DNA, 206 bp, Gossypium hirsutum
  Clone ID: LIB3120-054-P1-K1-C7
atctcacgtcccctaaattccgcctttattcttcaaattccccacaaatggccgtaactttgtgagatcttcacaccgaatttggccttaaatcccttaacgacttccttaccggcaaatctaacatcaatgggtacaagcttactaatgatgacattaaggttgattctgctgtttttaaaaatcctggtgattcattttccaat

SEQ ID NO: 32650 - DNA, 148 bp, Gossypium hirsutum
  Clone ID: LIB3120-054-P1-K1-C8
tcgaccgacgcgtacgtctataccaatcacaagacatgaacaacgaattgaaacctccattccgggagtgatcagactcaggagagaagcttttaaatatgtcgtcaattgatgctaatacttttttttgagaggctggttttgggga

SEQ ID NO: 32651 - DNA, 271 bp, Gossypium hirsutum
  Clone ID: LIB3120-054-P1-K1-D11
ctaaactcctctcttcccctttctctcctccattatcttctctttcaaggcttccttcgggtaccactattacttttcctactcgttgcttagactagtatttttttccatttatatattcatttttctcatagacgctcgcttataacacgagattatataacactgcgcgagagacacacacagagagagagagagagagagaagaaaaacccctttgggggggggaacccttttttattaaattaaacttcccagagacaaagggggg

SEQ ID NO: 32652 - DNA, 405 bp, Gossypium hirsutum
  Clone ID: LIB3120-054-P1-K1-D4
atcacacagaacacgagttgcttccatacatccacaggttacagtcaaaggatctctccttgtgtcatagtatgattccgttgggatcttgtacgatgaaactaattgcaacggttaaacggatcccggtacaagggctgtggttacgggcaatcaaccctttggcccttaagggcccgctcaggggtattaagaaacgttccattatttaagggaacagtattgtgccttacaggggtgagtcattctcttttaacctaatgccggggctgctgtcgagaatgctcgactaatggcttttcgtgcgtattatatgtcaagaggggaccatcatcgcaacgtgtgcatcataccatccttctgcacatggtacaaattctgcaagagctgctatttttggaatga

SEQ ID NO: 32653 - DNA, 459 bp, Gossypium hirsutum
  Clone ID: LIB3120-054-P1-K1-D6
cccacgcgttcgcccacgcgtgcgcatgagtggtgttacatgctgcctccgtttcccgggtcagctaaactcggacctccgcaagcttgcggtaaacctcatcccgttcccccgactacatttcttcatggtcgggttctcgcctctcacgtctcgtggttcccagcaatacagagcactaacagtcccagaactaacacaacaaatgtgggatgccaagaacatgatgtgcgctgctgatcctcgacacggtcgatacctcacggcatcagccgtattccgtggcaagatgagcacgaaagaagtcgacgaacaaatgatcaacgtccaaaacaagaactcatcctactttgtcgaatggattccaaacaacgtgaaatccaccgtttgtgacattcctccgagcggattgaaaatggcatcgacgtttatagggaactcgacttcgatccaagaaat

SEQ ID NO: 32654 - DNA, 286 bp, Gossypium hirsutum
  Clone ID: LIB3120-054-P1-K1-D8
cccacgcgtccggatcaatgttgatgagctggtgggcatgtcaaagttgagtttgggagaaagtattggtgatggcggctcatcatctctttcattaaaacttgatggctcatctaggcagtctgcttttcatgccaatcctgcttcatctggtaattctaacatggattcaagtgggaacccaatccatgcggtttaagataaaaacttgatctgaaattaatgtcgaaggttaccttagggtttgtgagcagtacaggttaatattggtggtagtagtacacta

SEQ ID NO: 32655 - DNA, 196 bp, Gossypium hirsutum
  Clone ID: LIB3120-054-P1-K1-E1
cggacgcgtgggtgaaaaaatggttggggcttggaatggaagtgaagctgagccgaagcctcgaccacatggataaattctgatccgaaaccattaatacacgcaggcttgattggttgagtcggattcaaggggggatccaacacaacaccttcctgtccgtttcatgaaaaaaaaggaatcctactaaaatgaa

SEQ ID NO: 32656 - DNA, 224 bp, Gossypium hirsutum
  Clone ID: LIB3120-054-P1-K1-E2
cccacgcgtccgagttcgttaaaagcagtggcaaagaaggcgaaggttaatagcaaaaaaaaaagatggcgacgaatcgggtgctcactcctcagccgcttgctttttcaaaattctctgtttcaaccaaaaaagtagcgattaatagccaaagagcgacgagattcgtcgtcaaagccagtggtggagaagagaagaacgaccagaaaggcttcactccgttt

SEQ ID NO: 32657 - DNA, 243 bp, Gossypium hirsutum
  Clone ID: LIB3120-054-P1-K1-E6
aacatgctaaatgtaaaagataaatagactaaaattttaaaaataaaaggtaaaaaatttaaaggtaaatatataacaggaaaaaaacgatcactctagaactgagtgcttcacatgggcattataaatatataggaacattttaggttttgatgagttatttatgaaattcgaaagcccacaaaaattcatggatgggaggactaaatcatattttaagactaacttctgatgggtttttaa

SEQ ID NO: 32658 - DNA, 328 bp, Gossypium hirsutum
  Clone ID: LIB3120-054-P1-K1-E7
cattttcagagggcagctggtggttttggtagctttattatcaacaagggacctataattccgattccttttgacactcctgatggggacattgccattttgatgggtgattggtacacgcgaaatcacacggctttgagaaaggcacttgttgccggaaaaggtctagggatgccatatggagttcttattattggcaaaggtactcaccgatataaggatactcttgtcgcttgggtgttctattattaaacaataaacgttcattcaggtaaaacttatggtctttaagttcacaacgtgggaatatcgatctccttgaatttca

SEQ ID NO: 32659 - DNA, 380 bp, Gossypium hirsutum
  Clone ID: LIB3120-054-P1-K1-F10
ctcactcttacttactcccctcttttatccatacacagaagccgcctcctcttagtgtaccggtgacatctatgcagatgccatttcatcaccagcctcaggtttccattcaatatggcgggcctaatccacaaattcagtctcaaagtgttactgctagttcaatgcaaatgcctatccatatccccttacctatgggaaatggacctcaggtgcagcagcaagtctttgttgaaggatttaaggctcttccattgccacctcatggaatgacccataagggggggggcttaattttacccccacctattggtggccagtttacgccaaatttggccacttgggggatgggcattgcccctcaatttttttaaacataa

SEQ ID NO: 32660 - DNA, 226 bp, Gossypium hirsutum
  Clone ID: LIB3120-054-P1-K1-F12
cccacgcgtccgcattcagcaacttctcttttaagggagtgtgttatcaacaaggggcaatgggtgtggatgaacagttcaatgaaataaacgttttgaagacggatgcggttttttcaattgatgatgatgttattttcccttgcacttctgtagaatttgctttcactgtttggcaaatggcctaaaatccaatggggggatatgttcttcgtttgcattgggt

SEQ ID NO: 32661 - DNA, 160 bp, Gossypium hirsutum
  unsure (1)..(160): unsure at all n locations
  Clone ID: LIB3120-054-P1-K1-F2
ccccgggacggcgggggcctnacctcnccttcttccaccactaccacctcctctttttccgctcgagggggacctacattgcggccttcaggcgtcgctagccttaactcttctccttctcctccgactcttatccaagaccgcccggtgtttgcggccc

SEQ ID NO: 32662 - DNA, 212 bp, Gossypium hirsutum
  Clone ID: LIB3120-054-P1-K1-F8
aaagaaaatggctatcctttgagctccaaccccaaccagaatgatatataatgtgagcctcaacgagcggaaccaatggggggacgattagcatacaccacacagtccctcattggaacttgtccagtcacaacaccagccaaaccctgtttttgttttgacaaaaaggaagtctttttttatacgagaatttccaggttagtggccagacc

SEQ ID NO: 32663 - DNA, 248 bp, Gossypium hirsutum
  unsure (1)..(248): unsure at all n locations
  Clone ID: LIB3120-054-P1-K1-G1
ctcgtgtcgtgtctgacgggtttcacttgcatagctagcanagctaaagagttcgcaaaatgggggccttgaatggctgtgggcagttggggaatattcttcaaggccattaaaaggcttcaaaggttacccatgggtggttggtggcttttaaatggctgtgccgaccaagaccaaaggtggaccccttaaccaacttggtttttttaaaggttccacccaaataaaggccaggggtaaaatttgtt

SEQ ID NO: 32664 - DNA, 202 bp, Gossypium hirsutum
  Clone ID: LIB3120-054-P1-K1-G8
gtcttgcttatgatatctccgatgaccaacatgacattaccatagggaaaggtatggtcgagtgattgttccaagctcccatgaacgatggtcctcactatgctgtcatgagctcctatgattacattacccaaggccttctcacatacgactggaacagcaccttggacggatttttctttgccccagcttttcatggaca

SEQ ID NO: 32665 - DNA, 154 bp, Gossypium hirsutum
  Clone ID: LIB3120-054-P1-K1-H4
accggaccgagaacttccgcatcacccaacaaaatcaactgctttacaatggcctctacaaccatggctctttcttccccatcagtcgccggtaaggcagggaagttcttccctttcacccctgaaatccaaggaactggccgtgtttccatga

SEQ ID NO: 32666 - DNA, 236 bp, Gossypium hirsutum
  Clone ID: LIB3120-054-P1-K1-H6
gtactatcaccttgtgcgtttaggaatatcagtttgacgaaaatcgagtcccggccacacggcgagaggccgatccgtttgatagatgacaccaacggaggaaccggcgatcatatgaagtatatgttctacgtggattctctaagtgtacatgacggaactgatagcccaaaacgctgtacttgaggcccattagctcacttccttcttgatactatagcgcagagacccaatgg

SEQ ID NO: 32667 - DNA, 276 bp, Gossypium hirsutum
  Clone ID: LIB3120-054-P1-K1-H8
cccacgcgtccgcttccagtggatcgatttgaggaaaaaaaagcagcaatgatcgctgcagctgcgacagtattaagcccttcaaccagtttaaggaacagccttaacagctaccctaactggatgaaatggcaatcctctctttggtagagcactaccttcgttatccctcacgctggtgcctgtgcccacactggcgaaggccaccataatacttgacccgagggttaaaaagcttcttttgcaactccagttactacaacaacaaactgaatc

SEQ ID NO: 32668 - DNA, 283 bp, Gossypium hirsutum
  Clone ID: LIB3120-055-Q1-K1-A3
ggcccgaaggtgaagtacaggttggggtaaccggacaccgtcacgctgcggtaggcgtacgcccccgaactccattccgcggccagttcacgcccgcccgatccgatgaccggaaacggcgtcccggctttcgacacgtcgaaaccggtggcgaagacgatggcgtcgaactggtgctcgataccttccacggtacgaatcccgcgcggtgacagccgcgcgatcggccaggtcaccagtttgcagttgtcggcctgcaacgccgggtagtagtcactggaca

SEQ ID NO: 32669 - DNA, 150 bp, Gossypium hirsutum
  Clone ID: LIB3120-055-Q1-K1-G3
tccacaccactgccggccgttactattggatcggaaccgtctccgcggtcgtcgagggggacaccgactgcggcaacgaactgcacggcttcgggatctacggccagcgagactttaacgcctggatggccaacatcacctgttagcgaa

SEQ ID NO: 32670 - DNA, 366 bp, Gossypium hirsutum
  unsure (1)..(366): unsure at all n locations
  Clone ID: LIB3120-056-Q1-K1-C4
acccgggcgccaactgctggaccgagctcaccagcaggtcccgatgctcgggcacccactgcaaggcggcgttggagatgacgacatccgtctcgggttcgggtgaccagtcngcgatgctgcccaatcggacatcgagtccgcgttcaccggcggcggccaccatttccggtgacgagtccacacccgacaccgatgccgccggccagcgccgactcagcgtctcggtcaggttttccggcccgcacccgaggtcgaccacccgacgcggtgcgtccgcggccacgcggttcaccacgtcgaagaatgggcggccgccgtgatcggcgaacgccagataggtatcgggattccacataccccgag

SEQ ID NO: 32671 - DNA, 464 bp, Gossypium hirsutum
  Clone ID: LIB3120-057-Q1-K1-A12
tccccgacgtacgtctgagtgggtggttaagcgacaggagacacgcggaaccctagtatatcggcggttgccttcagtcaacgcaccgtcctccggaatgtcccgggttgatcgaggaccggtttggttgtgacctagcgtggacgtgctggataccgcgttcggccgtgaatcgcctaattggggtgtgaatagtcggggagctgactgtgctgagccctgtggttagttagaacctgaagtgtgttaggagcctactgtgccgcgggagtagtttgcgacgccgtaggaggtcgtgtaggcgactgacgcggtggttggacttcgttgtcgcgaggttgctgcgggctagtggcgccgcgttcgaggtgaccttgttgagtagccttagtattcggacgccgtgcccttaggctaggacgtctctgggttgacttatggtgtagagcatgctgacgagcgtc

SEQ ID NO: 32672 - DNA, 244 bp, Gossypium hirsutum
  Clone ID: LIB3120-057-Q1-K1-B12
gtttctcagacgtacgtctgagtggttgttagcgagacggacacgcagaagaatcgtagaacatcggttggtatgccatcaactaagcgggccttgctgcgagttagtctggagcgacagagggcgtagatgcctctgtggatttggaatggtctattgtttactccaaggataaatgatcggcttacggtgcagtttagtctacggcgtgtagctatatttaaatacgtggtggataattggg

SEQ ID NO: 32673 - DNA, 249 bp, Gossypium hirsutum
  Clone ID: LIB3120-057-Q1-K1-B9
gacggacgctcgtcgaaccttagtatatcggtggctgccatcagcggactcggcgtgtgttacgcgtgaggttaatgttgattatccggtgattggttcggactgggttactgaaccgtctattgatgtctgtgattattcgtctatttatattccggcggttgtgtcggctgagcttcgatatgttgcttgggcctgccatgaaagtccctgcaggtttgatacgtcgaaggctcttacgactctggt

SEQ ID NO: 32674 - DNA, 376 bp, Gossypium hirsutum
  Clone ID: LIB3120-057-Q1-K1-D12
tttctcagagtacgtctgagtggttgttagcgcgacggacactcgtagaaccttagtatatcggtgggtggcatcacaggactacggagcctgtggctatcgcgttggttattacgtcgccgtgggattgggcgtggccggctgaatctattggtgctgaaacggtttaatctgatgatcgtgacgtttcgtcggcgtttattactattggttatgtgatgactgttgacgcgattgttgacttggcggtgtctaacctatagacgggcgctcatattaatccccgtaattccgacgattcgcgtgttgcgtcggcgtttgttggaaatgacctggtgggagtataatctggggcgagctctcgcgtccgtgtagg

SEQ ID NO: 32675 - DNA, 371 bp, Gossypium hirsutum
  Clone ID: LIB3120-057-Q1-K1-E12
tatatcgcgtggtgccatcagcggactactgttcctccttgcggtgaaatagggaatgtggctcggcctgctactgtagtggcgcgtattcacgctactggccattgtcctcatgtttgctctactgagacgaagactgctacattgtgtgatgactatgttatttttgttgaggcgcctgagaatggtattgatcatacgtttattgattggtgggcgtcgcctggttattatcctgttggtactgttggtgttggcttgacggctggcttggcgtcggttacgtagacgggccactcgttgggtattactcggactactactggtgtgccggctgttgggcgtgcgtacgatcattcggcgtcgctgac

SEQ ID NO: 32676 - DNA, 398 bp, Gossypium hirsutum
  unsure (1)..(398): unsure at all n locations
  Clone ID: LIB3120-057-Q1-K1-G11
gtttctcgncgtacgtctgagtggttgttagcgcgacggacactcgtagaaccttagtatatcggtggttgtcatcagcggactgtatattgatactttgtttgttgatcttttggtgacggctattccgcttgggctattattgaatgtcgcgacgcctctgcgtatttactgtagtgttgttcgtcggctggttaggttgcatccgttgatgttgattggatcgtttaatgttggaccggtgagaaactttaaggtacatagttggctacacggggcgattattatgacgctattatgggtcatgagttagtgggtgcagcatacggtgttgccgttggcgacgacagagttattgcggacctatattactattggttgaagggcgcctctgggcg

SEQ ID NO: 32677 - DNA, 217 bp, Gossypium hirsutum
  Clone ID: LIB3120-057-Q1-K1-H9
tacgtctgagtggttgttagcgcgacggacactcgtagaaccttagtatatcgctgggtgtcatcagcaggatactgatcatagtcattattcctggagtaagatctcgggtgctacggctatgcatgagtgataggtgtcgacgcttacgttagattctcaagtacatgtatgttatgatgaattaagttaatgatttactgtgtgatggtgctac

SEQ ID NO: 32678 - DNA, 407 bp, Gossypium hirsutum
  Clone ID: LIB3120-058-Q1-K1-E5
ctgcagcacggtcccgcggtcgccagggcgaccgatacattcagactcccagcccaccggccgtccttactatttgagcctgagcgagcaactgtgaggcgggcggaccacgcgggcgacgagggtggctgccaacacgctgatcgcactggggttgctggccgggtgcgggcgctccaccgaaggcaccgtgtcgatcaccaccatgccgcggcctccgtttaccatcacgaccaggaccgatcctccggtgatcgccgttctgaccacatccactgcctgccccatatcattatccaggtatttcccactcggggctcgaacgttctggatgtctggctgacacccgatgcgctgacgattacgtgcgcttactacaaccaactcgacgaggtcacccaaaaggt

SEQ ID NO: 32679 - DNA, 362 bp, Gossypium hirsutum
  Clone ID: LIB3120-058-Q1-K1-G2
gcaaggtcgcgatgaatccggggcgggcgtcggcacacgaatgaatcattgcgcgcaccgccccgtcagtcgatcgacggatagttggccaaaacgaacactactgagtgaatggacttctaccatccgccgtatgcggaacccgacctacatcgcaatcgcatcagtggcagtgctcacagccgcctgcggtgccacaccggaagctgccaaaaccagcacctctacggtcaccaacaccgtcaccgtagctgcgcctcaagcaacgagcggtccggcgcctgaggtcgtcagcgcgacgtggacaatgcccaatctgattggcaccaatcttcatcacgcacagaatgagattcaacgca

SEQ ID NO: 32680 - DNA, 450 bp, Gossypium hirsutum
  Clone ID: LIB3120-060-Q1-K1-A2
cccacgcgtccgaggaaatcggaccatttcggattaataaaactggctcatccctttatcttaacaaatattcatggaatatggaagcaaacattctattcctggaatcacctgctggagttggattctcctacacaaatacgagctccgatcttaaagactctggtgacgaccggacagctcaggatgctcttatatttctcaccagatggatgtcaaggtttccggcctacaagcaccgagaattttacattgccggagaaagttatgcagggcattatgttccccagttggccaaaaaaatccatgattacaataaagctcactcaaatccaatcatcaatcttaaaggatttatggtaggaaatgctgtgacagacaattactatgacagtattggaacttgtacgttttggtggagccattccatgatatcagatagaacatata

SEQ ID NO: 32681 - DNA, 444 bp, Gossypium hirsutum
  Clone ID: LIB3120-060-Q1-K1-A6
cccacgcgtccgtttagctgcggcttatataggcgaatccatggagggtcatcattgactagtttttgtttttgaaatagtctagcccttttttagcttagcttggtccaatccaatgtatgcgcaactcaagataatctacttacttagggaccataaatatacaaatacgacgatctagagtaataacaaaaaagattacgatattagagaattgtaataaaaaaaggaaagagatctaattgaaaagatctttttcctaaaattcagggttggtccattttttttattacttatatttatatcatatttaccttcgatcaatattatccgatcaatattatctttatcttgatattgttttgtttattcaatttcaatattatgagtcctaaatagaataggaattcttatggtatcaatttagggtctattattttaaaa

SEQ ID NO: 32682 - DNA, 378 bp, Gossypium hirsutum
  Clone ID: LIB3120-060-Q1-K1-B1
cccacgcgtccggtcccctttgtcgttcagggcagaccacacaggctttaccttttgccacatatatctcttgtttttgtgaaagctccatcaatgagccccatacccccaaattttctctccatttctcaacttcatttccatgtcttggtgagtttcttctcttttagtcttcactattttttcaatgcttacaagtgttaatggcttgttatgtttcaaatccttggatgcaattgattttctgagttggggattattaaaaggctaaactttttatggtaaagctttttttttttgaagatccacgtttggttttggagtaggtattaaaagaccctttattgaaatttccatggatactttacttagaacaca

SEQ ID NO: 32683 - DNA, 449 bp, Gossypium hirsutum
  Clone ID: LIB3120-060-Q1-K1-B9
ctactccatgtatactcccaaaatctctaaaaagggaaatactagtcctttcgagggcaactgaaagaggagaaaaaaaaatctattggttttgatttgtgaggatggtaatcgatacaaccaacgtcaagggacttacgggacgctggggcatggcagcaaagacatgcgacacatgttaatcagcggcagcggctattttctgtcgttctgattccgcttttatgtgcctcagctgcgattccaggatccactctgctaatgacaggcttgtttcttgtcgtcacaagagggtgtggatgtgtgaggtgtgcgagcaggccccagctgccgtcacttgcaaggccgacgccgctgccctttgcgtcgcctgcgattccgacatccactctgctaatcctttggctcgtcgccacgagcgtgtccctgtccagcctttctttgactct

SEQ ID NO: 32684 - DNA, 434 bp, Gossypium hirsutum
  Clone ID: LIB3120-060-Q1-K1-C10
cccacgcgtccgcgaaaaggttatagagaaattgcttagaaaccacctgtgttcttccctggagattttgatctgtttttctccttcattctcatattcttattgcttctagtttctttgagacgtatcgaacgatcggttttctgattttaaacactacatcgagatatattcttcttctcaaacatcgtcatgttgtcattaccttcaacttcctcatacatttctagaaagaaatatgatgttttcttgagttttataggtgaagatactcgcaaaaacttcaccgatcatctctatgctgctctaaagaggaatgggatcgtcactttcagggatgacccaaacctggaggccggagaagagatctcattaaaactccttaaagcaattcaacaatcatggtgctcggaatctgttttttaaaaacttat

SEQ ID NO: 32685 - DNA, 380 bp, Gossypium hirsutum
  Clone ID: LIB3120-060-Q1-K1-C11
ggcacactttcggtgatttatgcacaaatactgaaggtgcttgataaagggaacctactggatattgttgaagcaggatgggacattattgacatgaagctatctgaaacgggggctaaggccaaggtttaatacattgatctggagaagcaaccgagaccctaacagaaatgcatggtcacactctatgcaatatacgattctgactctaatgcatggtaaccactgtgcaactgccagcattggtgaacaagagaccaccttagaacaacggcaggcggtgatcatagacatctaagagtggaaagacaaaaacaacgcgtacaactgggttgtagctgtatacgtgcaaacactgataagtatcagcatatatatca

SEQ ID NO: 32686 - DNA, 432 bp, Gossypium hirsutum
  Clone ID: LIB3120-060-Q1-K1-C9
cctggatcgaatcgctgttgtcggcgacctccactatgattggaaccttgaacaagatgcaggcgcccttcaatcccttaagccggatttggtgctctctcacaggcaggttcctctttcctctttatacaaccaatgggtgctatgatttttaacttttggagtctttcgtctaatatttttgcagatccaattggggattttggtaaagaaaatatcaaactagttcaagatgacgctgctataaactgtcccaaagcacttatttaggggaatcatgattcttggagcactcagacagatttcttatcagaagaaagatctacatcaacttcagctagaatgtctagctcaggaacatgtaagttacaaactactggactctcctttactaaagatgagccttgatggtggactgtcattttcatgtgg

SEQ ID NO: 32687 - DNA, 426 bp, Gossypium hirsutum
  Clone ID: LIB3120-060-Q1-K1-D11
atcatttctctttgcagcaatgtgtgaaaccaaaagcttctacttgtggcttctccaagtcattggcttgttaggcattcttgctctttgtctatggctagccatgcgtcctaaaagccccaactacaccatcgtcaacttttcaatcccgggggcaaatacaagcaacgaatccgatcacggttccatacaatacgaactcgatatccaaaacccaaaccaagattccggtatatactacgaagatatcttccttatgttctatcatggggaagataaagttgggagaaaaactataccttcgttttatcaagggaaggataaaactcgtcaagtgattgatcaagtggatgttgagacccgcttttggactgttcttcgtaaagcaataatgaatgcaacggctgaattaaaggtcgatttgtc

SEQ ID NO: 32688 - DNA, 445 bp, Gossypium hirsutum
  unsure (1)..(445): unsure at all n locations
  Clone ID: LIB3120-060-Q1-K1-D12
cccacgcgtccggtacagaaagctacatgttcttcaactttaaaggattcgaagtttccagggtatcttatgcttaatcctggtggaaccgagtatgaaggaacttcgattgtgaaggtttgttcatatacttattgttcactcaatggtcatcatcatgctcctttgcctccattgaaatgtttcttgaaagcaagaagacgttcaatgaaagtacaaagaagcatgaaggtggaagctttgagcccaagaaaggcttgtggtgatggaacagaggaattgaactcctccatggacttttttgttgaaatatatggcaaaaacaaaggtgaggatagttctgaatgtggcaatgaaacagctccagagcctgaaactgagtcacgaggttcactaaacgctgagattgattntggtgaaaatgttgaacatggcagtgaagttg

SEQ ID NO: 32689 - DNA, 453 bp, Gossypium hirsutum
  Clone ID: LIB3120-060-Q1-K1-D8
aagaaatatttatacaagctaatcaagagcaaaagtcacgcagatcggaagattgagtaagggtgcaacatttcttactgactgtcatggggggaaaaggcgacagcactttgagctggtattttctatccgggtttcttagtttggacatggcatggaagtttatggtgggttttctatgttggcatataaagcaaagtgcttttgctatccaaagactcgtccaattttttcaccgccatcatcgtcatgtccgttccaagttttcctcctttttggcccctcgtgttgaaggcacctaaaaagaaaaaaaaggaagattgaaagtggctaagaagtccccattttatcgaggttcatacagatatagcaattacagggaaatctctcccaggtttggccagcatgatctgttggcttctttttaccattatagagtttacataccttttt

SEQ ID NO: 32690 - DNA, 298 bp, Gossypium hirsutum
  Clone ID: LIB3120-060-Q1-K1-E5
cccacacgtgctgaaatatgcacaacctactgcttatagcatgtgtttaggatatatgggggttctagaccagatgtgggacgacaccgaatacacacctggacccgatatatgggcttactgagctcctgaagcactacacttttactgtacagtctaacttctccaaggaaagtgatggcggccgtgtgagatcaaacattgatgagacgccggctgaaacaacgaaagagacacgtaccattatcatcgacaaaaccgcatgttaccagagccgaacgactcctgattcatcgga

SEQ ID NO: 32691 - DNA, 454 bp, Gossypium hirsutum
  Clone ID: LIB3120-060-Q1-K1-E6
cccacgcgtccgcaaaagattatccgtgacaattctcgagtgaaaataggtaagtttcaggctgtagctttattacggctggcgcgtccctcccttactcacctgtttttagggtttcattgatttgggtttgctgagcatcgtcgccccccagaattttctttacttccactttttgccagaacattctgcatctcgatatttggagtcttttgtttcttttaaggtttcatctcaaggcaagcagaaagaagaaccggtttctggtggttctttctaaaccgatcgattcatttctaggtccccagaactttgagggggttagggtttttgctttgatggctctgtaaatgtttctaaattcctgctgttttttgaagggagagcaggaattatctatgtttttagtactctaaggtttagatgtgttagaaagttatgagatattcttctg

SEQ ID NO: 32692 - DNA, 338 bp, Gossypium hirsutum
  Clone ID: LIB3120-060-Q1-K1-F1
gccgaagcttagtcatcatgatggggtgagaggatttggcttcgatcccaccacaaagaaatataaggttgtcgagatatcatataaaagaacaactcctttcacttttagtcaccgtgttgttagatttggcatgcgtcgatctcatcagacggaaacatcttcttcttctttaattgaatctgaggttcatatattgactgttggtagccccacttggagaaatttgggatgttttcctttccgttttatgtggcaaaaatctcaggttttggtcaataagaaacttcattggagaactactactaaccttattatgtcctttgacttggcaactg

SEQ ID NO: 32693 - DNA, 251 bp, Gossypium hirsutum
  Clone ID: LIB3120-060-Q1-K1-F5
cccacgcgtccggagagaccgaggaaaacctttaccttaaactgattttacatgaaaagatggaaggatggattctgtatatgtgcaaaaactgaatagtaaaaacagtattagattgaggattgggtgtttacaacaaatagggctgaatgctaaacattatcaaaggtaggagaagtatacgaatcagcctaggatagatgtaaatacagctagtgattggtgccttactaagtttaagaacatttata

SEQ ID NO: 32694 - DNA, 189 bp, Gossypium hirsutum
  Clone ID: LIB3120-060-Q1-K1-F8
tcgccccaaaccaaaacccatttttctcccattgtcttcaccaacacattgattaactttggcggggccaccccttttccttcaggggtttcctcttcaaagtccaaggtcttcaccgctaccccgttgcctaactttggcgccaatttttgtcaccctgttaacatgtctgctgacttgatgccttgt

SEQ ID NO: 32695 - DNA, 404 bp, Gossypium hirsutum
  Clone ID: LIB3120-060-Q1-K1-G12
acgcccactcgttcgcccacgcgttcgaaaaaaaagcgcgagttcctcaaatggggcgatccgaggggactcagcaactcgcttttgctttgttcaaccagtttttttgcttaaattttgcaaaaagacaatttgagatgggagttgtcagagtttctagttcagctgtccgaactccagtaggattaggcacatagttttctactcaaagatgtacatttagaagaccttgtattatggcatttaaagcagacaaatttaataatacggctctagttacgcttcgagaccataatcttttgccggtggaaacggctaaagagcacccgaagagacgcgggaaagcgaaaaaggcttccaagacttgtaaccgtgactttactgatgaaaagtctccgttcacc

SEQ ID NO: 32696 - DNA, 202 bp, Gossypium hirsutum
  Clone ID: LIB3120-060-Q1-K1-G4
gtcagtctttggtgaggttgcatatctgattggttctctttggcacaatcattagatttgaagtatacacttggcttttattttttaaaaacagagaaaaataacgtcagaagttagacattgaaaaatcattttgagctttggcacattttttcctatacaaagaaaaagcttaaacgatgagcaaaatctcatctggaat

SEQ ID NO: 32697 - DNA, 328 bp, Gossypium hirsutum
  Clone ID: LIB3120-060-Q1-K1-G8
tccacgcgtacggtgaacgagctaagacgactttttcttcagctgcccagactgcaattgtgattgactctctctactaggggatcgattcatacacgacagttactctagctcgccttgcggagttgaatatggatctgcccaggaaacgtatggggccgcgacagaaatgcttgtgtgatgcgtatagggacaaaagcgcagtgcatgatgtggttctctgtctactggtaagactaagatcccaaacgttctaatacttgctgcgagactcattcaaccgtaaagagttctgtgagagcatccaccctgattaaactggggctta

SEQ ID NO: 32698 - DNA, 329 bp, Gossypium hirsutum
  Clone ID: LIB3120-060-Q1-K1-H12
cccacccgtccgagaaaactgtggaagacaggtttcaactccgacaacctgacgctttgctgagtattctggtttccacataggaacactcgtctctttctttctttatttttttccttataatccttattgggtgtaacatacgcttcctcttttatcttatatctacccttcttttgagggacacactattataaacgcgtatattatttcaccgacgtctttcttaatagcctattgaatatacacttgaagaggggtatgacattgaaacagcttgcctaacttgtatgatggcatttgtgctctccagagaagcatctttatga

SEQ ID NO: 32699 - DNA, 276 bp, Gossypium hirsutum
  Clone ID: LIB3120-060-Q1-K1-H3
ggcaaggtcaagttcggggacagagcatcatacttatggcaaccacttccattatcattgaccacattaatatggaccgaggcattggtgagtggatacacatgagctctcaacggaatgctgagctcgaccctgaaaaaaggctataccctgcaggctataatgacccactaggcttagcttacagacccatgaaaaaactgatcacctcaagttggctgaaatcaagcattcataagcttgccaagactgctatcctcaactttggcattcaag

SEQ ID NO: 32700 - DNA, 214 bp, Gossypium hirsutum
  Clone ID: LIB3120-060-Q1-K1-H5
cccacgcgtcctaaattggttggtcaagaaatgaggagctttcactggtgaagttagtgcggggatgcttgtcaatttgagcgggctttgtattattattggtctttctgagaggatacttattttgattgagtcaaatgagttctttgtggataagggtgcttatgcactttctcaaggcttgaaagtgatatcttggatttgtggaaacact

SEQ ID NO: 32701 - DNA, 244 bp, Gossypium hirsutum
  Clone ID: LIB3135-002-Q1-K1-A3
cccacgcgtccgggactgatcactgggattcccattaaagagaggggggagccaaattaaacatgagaaagatgccatgggtattttggtcccaagcttttgaccaacccttagggttcttccggttttcatcctagttggtggttttcctttgggtacttttctatggtatatgttggtggtgttggtttaatttctttgggattgtaaataatgagcaaattacatacttaaacttattatt

SEQ ID NO: 32702 - DNA, 318 bp, Gossypium hirsutum
  Clone ID: LIB3135-002-Q1-K1-A5
caccaccgaagacttgaaggaaaaaaataatgatgttgtggaataccacaaagtatatcaattgcgacatcaaaaagtgacatcaatctattttatagatgtaatcaataataaagtctttaaaaagtagttttttttactgaaaaacaaataaaactcaaaaaataataagattattacttaatatcataaagtaaatatacgatagatttacattgaatttcattacacataattcatcgctctagatatgacttggatcaaagtcacgctaatcacgttaccgttaaagttttactctttaattataatttatca

SEQ ID NO: 32703 - DNA, 296 bp, Gossypium hirsutum
  Clone ID: LIB3135-002-Q1-K1-A8
gaagatggttaagatagaagttaaccatttcttcagcacgtcaaggatgacagtaactcgttgttattgtaaaattctttcttcttcctttttatttagttttttttctctctctggctcttatttgtaatttatccgcttgttctcaacaagagcacttgtaagattcccccattgatcaacactgtggacttatcagggtacaggacgaggaggtagaatacactccctgcccaaacccgacctattgacatccctcaccagtactaaattttctctcaacttccgagatgatt

SEQ ID NO: 32704 - DNA, 387 bp, Gossypium hirsutum
  unsure (1)..(387): unsure at all n locations
  Clone ID: LIB3135-002-Q1-K1-B1
cccacgcgtccgcccacgcgtccgcacctgttcaaaggccaaggaatagttggtagagcattgacaacagacaaacaatgttttgcaactgatataactgccttcagtaagacaaattatcctctctctcaccatgctaggatgttcaaactgcgtggcgcattagctattccactacaaagcatttttactggattggttgaattcgttttggagttattcttcccaaaagattgccatgaaagcgaagcacagcagcagatgctgaactcattgtccagttttatgcaacaggcatgccagagctttgcatgtngtatggacaangagcttgaagaagaagtgatacttgcccgtaaagaaagcggtaagtgccttctgatggga

SEQ ID NO: 32705 - DNA, 376 bp, Gossypium hirsutum
  Clone ID: LIB3135-002-Q1-K1-B2
cccacgcgtccgttctttagaagttgttttaacaatcttttgattgtgggagccatcttcaacgttcttcttgccatcgatattctttggaggggagattagagccgtttgaagagatttgtgaaatcttttaggatttcaaggatctttaggacttatcctttatttcttgctgttttcgatttctttctttacttttctttgcttatacttgtgccgatttctcatctaatattttgctgttcttgtttggttttcagcattgattaaacttaagatctcatcatttaaagttgttcctctattggcaggacccattccaaatccaaaaatcccaatttctaagggttggcccaatggatttcttcaatttggg

SEQ ID NO: 32706 - DNA, 390 bp, Gossypium hirsutum
  Clone ID: LIB3135-002-Q1-K1-B3
tgatgagcaaccttccaacttctttaacagactcttcttttacccttttcaagcttgccattgcttcttctgatccttggcctttctctctccttctcttataaccccctttatctatatattactgtttgtttcatctttggccttcttgctttttggggctttgcttgctgaagatcaaaattcaaaaatggggattggaggagacaagcagcagcacgtgagcttccaccttcatatgccgaaccttcatcttcatgggttccatcatcatgagaacaaggacctcaaagatatcccaaaggggtgcctggcggtcctggtgggtcaaggccaagagcagcaaaggtttgtgatcccgctcatctatatcacccaccccttgttcat

SEQ ID NO: 32707 - DNA, 483 bp, Gossypium hirsutum
  Clone ID: LIB3135-002-Q1-K1-B6
ggatgcatgagtgtagatatgatataggatgggagaatcaattatgaggaatttgtagccatgatgaaaaggggaactcaagatggggatgggatgtgaaagacagatgagaaagaaacactgctgctgccactgcatgttccatgaaaagctaaaaaggaacttcaccaaatttagatcatcttgttggctacttctgggctctttctctttccatctttaaacaccaattatgacatgatgatcatcattccgaatccatgtagtttttagcttttgttttgtatgtagatagaaatggcatctcaaatttctcaacaaaagtgggaggaaaggtaaataaaagaaaaagagtgtgtttctctctcccccaaatcatgtactctgtaatattattatttttcatatggagaaccgtgggtttctgagttcaaagatcatttttttttttatttggaaactttcgtacttcagaagagacag

SEQ ID NO: 32708 - DNA, 304 bp, Gossypium hirsutum
  unsure (1)..(304): unsure at all n locations
  Clone ID: LIB3135-002-Q1-K1-C10
gaagggaaacaagggagcgcaaaacgggnggnacgaaggngaaagcggacagggaagagcgcccgcccgaagccgacatgcnagcagcacaagaaggaacacaacgccgcaaggagngggggagaacagccccccaaacaaagcnncgagccacgggagggaacaaaaccaagacaccagggccaggggcccaggcagcacggagagcccacgcacgggccggcacgaaaaagggacgcanagaggangncacccccaaacccaccgaaagcacacggagaaagggcggcagacgcggaagaag

SEQ ID NO: 32709 - DNA, 406 bp, Gossypium hirsutum
  Clone ID: LIB3135-002-Q1-K1-C11
cttagtggaaggccaaggcactcgagttgggttctactcgacctcatgccctaaagtcgagtcaatcgtaagctcaacgggccaatctcatttcaagtcggatccaactattgctccggcgttgcttcacatgcactttcatgactgctttgtacaagattatggaccgacaattcgaccaagacgtttgtgcaacgtttcttgggcgttagagggttgcttggattgaccttcaacgttgaatttggtaaatccatggtgaagatgagcaacattggagtgaaaacgggaactgctggtgaaatccgcaaagtatgttctaaagttaattaaaatgaacattgaagattaagaataatgctatatacacaagtggctgatcaaagggaagtgcttgagtgtatac

SEQ ID NO: 32710 - DNA, 295 bp, Gossypium hirsutum
  Clone ID: LIB3135-002-Q1-K1-C12
accacgcgtccgctcacacgtgcgaaccagcttgcgcgcgtttaagaccagtgaaaatatctacgctagagatgccatcgagccgaggcgataatgtggccatgaatgtaagaagaacaggagcagaaggtatagatgtgaaacgggccggagagctgtggaaggcgtccgggactgtaccgaatgatgatccacgtcgtgcaactatgcatagcatgtatgactgcggatatcagcttaaacaatggaccaacatgagttgatccgatactgaaactggctacttaaaactaga

SEQ ID NO: 32711 - DNA, 186 bp, Gossypium hirsutum
  Clone ID: LIB3135-002-Q1-K1-C2
attaactcatccacccactcatccatccaagcgcaccaatttttttctccacaaacatactctctctctctatcaaaaaaacctctgggaagggctatcatctaacccagtaatagcatattctacccataaataaatctttttaaatcccctcatttcataatcaactttctattaaaataaaca

SEQ ID NO: 32712 - DNA, 212 bp, Gossypium hirsutum
  Clone ID: LIB3135-002-Q1-K1-C5
cccacgcgtccgcccacgcgtccgcaaaatgctagtcccctaagtggatatgcattagtgtcatttgtatcttcactaacagtcgccatgactcgtctctaacaagtatattgaaaatgtctcaaaatgaggttctctgcaaaaaaaaaaaaaaaaaaaaaaaaaaaaaaaaaaaaaaaaaaaaaaaaaaaaaaaaaaaaaaaaaaggaaaa

SEQ ID NO: 32713 - DNA, 390 bp, Gossypium hirsutum
  Clone ID: LIB3135-002-Q1-K1-C7
atttaatctcaatatttacacatctacaaacataatatgggtgaaatctattaaattaggatcaaattgataggatgcctaaattattaagagctaaatgtatattatatcaagctaatttatgttaatttgatgaaaaacattaacctgtaactgtccttaattgttcattattgcaattgatgggaattaattgctgtaactaagaccaatatgctcaatgttaaaattgaaagagatggaaaaaatgtatataccacatcatataagaatgtagctgataacagtatcatatgcaacctctcaaggaatataaagtttgtttagctcggaagaaatctgatttgggaaggtaaaaaatgaatattgatggtgcatataagttttcta

SEQ ID NO: 32714 - DNA, 391 bp, Gossypium hirsutum
  unsure (1)..(391): unsure at all n locations
  Clone ID: LIB3135-002-Q1-K1-D1
atctgagtcaagaagcttgggtaagctggaagaagtgacccgagagatggctgaaagaaaggaagcactaaaaattgctatggagaaggctgagaaggccaaggaagggaagttaggtattgagcaggaattgagaaggtggagggctgaacatgagcagcggcgtaaggctactgaattgaatcatggagaaaaccctccaagggcaatctctgagggaaagaaagaaacaaagaactttgaacctgtacctgctgctcctactctggccgataccctagcaagcccaaaggcatatgatcacgggagcaccacagaaactgaatcatncccggaaccgaaggtttgtaaagaaaaagaaaagtcattggtcccgaagatttaaatgttt

SEQ ID NO: 32715 - DNA, 457 bp, Gossypium hirsutum
  Clone ID: LIB3135-002-Q1-K1-D11
cttgttccttgctttgagttgaccctggaagccttaaatctttaccatgaagaacttggtgttatccgggataatatgattgatttgattgacaggctttgcaaattgttgatgcttaccaaggataggatccttcctttacagactattgaccagctgaaatgggacttggggttgccttacttttacatcgataacttgattccaaattatgctgatttattttctttgtttcgccttcctgatgatcggattggtttgaaacttttatcatgggatgatacacttgctgtctcccagttggagaagaatgttgcccggcaaacagaagaagatttgaaaaataactgtttagcctttcctatagggtttacaaggggttttggactgaagagaaagtgcatgggatggttagaagaatggcagaaattaccatatacttcaccttatgccgatg

SEQ ID NO: 32716 - DNA, 411 bp, Gossypium hirsutum
  Clone ID: LIB3135-002-Q1-K1-D2
cttgtatacaaggtctatacagatgggagatctaatatatctagacgtggaaggaaggcaacaattagagagttttacggtgttatattaccatctcttcaaaggctccatggtaacttgggggagttggatgatgataaggaggctggtgggagttctgccaagaaaagagtcgacttagataatagacatgggaatattgattttgagagggaagatgaatgtgggatttgcttggagccttgcacgaaaatggtcttgcctaattgttgtcatgcaatgtgcataaaatgctattggaaatgggaccccaaattctgagtcttgtccgtcctgccgggtaagttggaaaggggccaatcttgaaaattaatggttcctaacttgcaccgttaatggggttgccattaa

SEQ ID NO: 32717 - DNA, 206 bp, Gossypium hirsutum
  Clone ID: LIB3135-002-Q1-K1-D8
acctagagcttcaaaaatctctcccaagactttttttttcaacatacacacgatttgtatctgggaggcgttatctcatgtacgagacctcctcctatcatcagaaatttatctgcagtctacatttaccgcgacaaacccgcatcttatatatagcgctttccaaggtctactcactcatcattgtcgaagacacaatcccctag

SEQ ID NO: 32718 - DNA, 114 bp, Gossypium hirsutum
  Clone ID: LIB3135-002-Q1-K1-E9
cggacgcgtggggtttcaacataatcagcgaaccataatttgagataaagatagcagggactctgaattctataagattcgctcgatcaaccaaatggccaaatttttcatttc

SEQ ID NO: 32719 - DNA, 376 bp, Gossypium hirsutum
  Clone ID: LIB3135-002-Q1-K1-F1
ggaatggttacgcagctgccttcaagtgatgaaacttcaactagtaagaagcaattattagctcgtcttgatgtttgtatgggaggaagagttgcagaagagctcatctttggccaagaccatatcacaactggggcaagtagtgatctgcacacagctacagagcttgctcaatatatggtatcaaattgtgggatgagtgatacaattggaccagttcatattaaagagcgaccaagttcagaaatgcaatctcgcattgatgctgaagtggtgaagcttctaagagaagcatatgatcgcgtgaaagccctgttaaagaagcaagagaaggcattgcatgcattagcaaatgcacttttggagtatgaaacac

SEQ ID NO: 32720 - DNA, 296 bp, Gossypium hirsutum
  Clone ID: LIB3135-002-Q1-K1-F2
gcatgttcttggtttacatgcatatatctatttttcgttcttttcaagcaaataactagacttgttaataccattgtcaaaattcttacaggatcgaatgatgaaagaacttcattcccaaggtataagaattgaggatattgcgactgttctgaaaagatcaccaatacatccccgaatcatcgaagctattaaatcggctcatgctttaggatgtgatttgaagattgtgagcgacgcatacactttcttcattgagacaatctttggagcattcacggcctgaaggaatcctt

SEQ ID NO: 32721 - DNA, 431 bp, Gossypium hirsutum
  Clone ID: LIB3135-002-Q1-K1-F5
ggagaacatccccgtggaactccaaacaatctcatgccttacatgcagcaagttgcggttgggaaacgacctgccttgactatcttcgggaacgattattccaccaaagatggcacttgcgtacgtgattatatccatgttgttgacttagcacaaggtcatatcgccgcactgcgaaaactatctgatccgaaactagcctgtgaagtctacaacttgggaagtgggaaaggaacgtcagttttggagatggttgctgcatttgaaaaggcatgtgggaagaaaattcctctgggtatggctgccaggcgacccggtgatgctgaaatactttatgcttctactgaaaaggcaaagcgtgagttgaattggaaagcaaatatagcattgaggacatgtgcagggatcaatggaactgggccaacaacaac

SEQ ID NO: 32722 - DNA, 164 bp, Gossypium hirsutum
  Clone ID: LIB3135-002-Q1-K1-G10
atcaatttggactgaaatttaaatttttaggggtaatttcaggtaatgctccaaatattgtgaggttggattattttgaatttgtgtcaattggtttggggtcaaccaatttgaggttaagtcaattaaattttccggtccaaaaaaaaaaattgttggaaata

SEQ ID NO: 32723 - DNA, 184 bp, Gossypium hirsutum
  Clone ID: LIB3135-002-Q1-K1-G6
gatcgacaatagctaagcattgcggccattacatgttcaagctacgtatggctggcgtacaagctacgggcttcttagccaaagaaaacaacaaaaaaaaaaggatgcctggtttggtacctttagtccaatcttagacaaagagaaaggtggatatgaagcactgctgggtagaccatggtcc

SEQ ID NO: 32724 - DNA, 376 bp, Gossypium hirsutum
  Clone ID: LIB3135-002-Q1-K1-G9
cacactcgtcagaactggtatatgcagagtacgagagcaacatcaggtgaggggctttatgaggacctagaaaggctgtccaacgacatagctgacaaggcctgaaactatgaagaagatctttgcaatgagggaagtcctggaagcaggggggagcatgataccgtctgattagtattataatgtcattcgccgaatccctattgaccaagatcggaggcagagccgattggaagagatgccacatatatgcatcttagtgatgatcattagagctaggatgtgaacttatcggctatatgcggaactaagtaaactgtcgctggctggatatataatacgcttttggataaattattcctttgcgactggatct

SEQ ID NO: 32725 - DNA, 344 bp, Gossypium hirsutum
  Clone ID: LIB3135-002-Q1-K1-H2
gttttgtaataatagataaggttttgggggaccttttgtttgtatatgaactagatttcgggggtttctttgtcattggagagatctatcaaacaaataaggaaaggtaacaaagcaaatcccatatcggttttgaattttattgctttttttgaatcttctttgttgtttttggcttgtaaaaaaacatggcttggtgggctggtaatgtagcaatgagaggtggtattggtccaataccttcttcaaccccatctcttcatcttagaaacccatctgaagatcatcaaatggctgtttttagagctaatattcgtccttcaaatgaagatcatcatcatcaa

SEQ ID NO: 32726 - DNA, 360 bp, Gossypium hirsutum
  unsure (1)..(360): unsure at all n locations
  Clone ID: LIB3135-002-Q1-K1-H8
cccacgcgtccgcccacgcgtccgatcctccagcataaaaaaaccccctttcatctctcattatgcatgtcccattgatttcactctacctttgcctccacttcgatcggggcttcctctatccaaaacctgggtgaagcgtgcctcctcctttcctcgactagaatgtgtgctgtttcatttgccttcctaggtacgtatctaaaatcaatcaaagcaaaccccctaactcgttctttgatttctttaattaaaatactaatggttgatttgtcttcctcaggagattttagcttattgataatcgttagggcatccccctncaccaaaatatttcaaaaccctagctcctcaataaaa

SEQ ID NO: 32727 - DNA, 272 bp, Gossypium hirsutum
  Clone ID: LIB3135-003-Q1-K1-A12
tttaaaaaagactctttttatattaaatttttttttttataaaaagaaaaattattttacttttgaaacatacaaaactctaattatggaaaaatgtatcattacttattgtttttattttatattttaaaacccaaaatctaaatcttttcaagaccattttctttaaatacaagttcctcttttcttcaattttgtacaaaaaaaacatttttatctatcatctatatacttttttaaccacttttaaatatcttgactctttttttttt

SEQ ID NO: 32728 - DNA, 360 bp, Gossypium hirsutum
  unsure (1)..(360): unsure at all n locations
  Clone ID: LIB3135-003-Q1-K1-A2
cccacgcgtccggccacgcgnacgctgacttggttttccaaggcgagctcttgctggctactgggcgcacttgattgagcccatgttttatactgcctgtgtgcactaattttgggcgacattactagccgcgttgtgccctgatgatttatatgcatatgcatccctcattaaagagaatatcattgggtttatttttcagttacagattgattttaagtctcgtgccactttgctaccaaaaaaagatgttattgaaaatgcttctatcagtcgatgcttacatactttagggttcacttacgaagagaaggggtttctctgataattgggatgttaaaaaaataaaaatacttggaa

SEQ ID NO: 32729 - DNA, 306 bp, Gossypium hirsutum
  unsure (1)..(306): unsure at all n locations
  Clone ID: LIB3135-003-Q1-K1-A6
gtcagactcgcttttatggatctgaatctgannncactcttctatacttttcaaaaagggaggaataaaaaaaacaaaaactaaaccacaaacataaacaaaaccaccaataaaccccaaaatatattatctaatccccattatatttcttcatcctaaaaaacacccacaaataaaatcaaattacagtctaacaccctaaaatggtccccccttacttatatttccaaacaaacctccccccccaataaacaaaacactccttttctatattccccccaaaaataatacaccccccctccttta

SEQ ID NO: 32730 - DNA, 194 bp, Gossypium hirsutum
  Clone ID: LIB3135-003-Q1-K1-A8
tatcaacaaacaccacccatgcctctttttatatgatcacgaccatctcttatcggggaggggaaatcttggaagcacaacatgcacaacctaaagcaccaccaaaaacaaaccccgacctaatgtgcatcttatttttattcttatgacatattaaactgacaaaaaacaataatgggacctccctacaaacc

SEQ ID NO: 32731 - DNA, 128 bp, Gossypium hirsutum
  Clone ID: LIB3135-003-Q1-K1-B2
cttcatttacgcaactgaagttgtatctttggtgtttggtgttatacatggttattggtcagggttggttattatatcaatcctgtggtattaatctatttaataatacgtactcatatatttataat

SEQ ID NO: 32732 - DNA, 384 bp, Gossypium hirsutum
  Clone ID: LIB3135-003-Q1-K1-B7
gacacacgttcgcccacacatacccttaggctgaagaaaatacccgtaccctcgcgagaggggttggctcttagagctggccacacgatccccaagcccatactccatgacttgtacatcactgctagagcttactcccttaagaacactcgtctcctcatgcacaagctttgcacatacctatgaacggctaacctggagagcctaccctatgcgaccaacatcgagactcagcactcttacaaccaaggctaatccgaatgaataattaacacaaaacatgaacaccgtccctacggacgctttcacaatatcattcctgccgatggctctcaacttctaagtgatgatattacagcgagcgcgaataaatcggcgaagtaa

SEQ ID NO: 32733 - DNA, 175 bp, Gossypium hirsutum
  Clone ID: LIB3135-003-Q1-K1-C11
cccacgcgtccgaagattactaatgctattataacaaagattattgggaccacaatggggtggtatgacctccacatacatatggagaacgagacagatctcataccacttactggagctgttgcggaaaataatgctgcgggagctcttgaatgatgactgactaagaatcgga

SEQ ID NO: 32734 - DNA, 455 bp, Gossypium hirsutum
  Clone ID: LIB3135-003-Q1-K1-D12
gtaagacacatatcgcaatattacatctacctttgccttacctacagaaagccttcgcacagatttccttccaacgtttttagcaaaggcccggagagaaagcatagtctagttagtagtcctacagaagccagaatcaatcctatagattataaactgtaacctataatcttgatgcactataatacctaaaatattatatgcatatcctcaccagggaatatgcgcagaaaaaagcaccttttttcactttatcactggattgcgaacttacttatccttttgatgagaatgcaactactcttacttactatcttcaaacccgcctattggcgtgtctggatcaggtgaatcgcttggctagatatctccttaagcgagatatcgttaactccttagttccttagaaaaggataataagggagaagcacgaaaaaccctagctttctgtcgat

SEQ ID NO: 32735 - DNA, 337 bp, Gossypium hirsutum
  Clone ID: LIB3135-003-Q1-K1-D3
cccacgcgtacgattcaacctttattaaattctatataaattacattgaaaaaaaaaataagaaggggctaaaaaaaaaataaaaaagcaaaaaaaaaaaataaacttatatacacacccttctgaaaaatctatactacctctaccatcttaacaaattggcccccccttttaaaatatcaaatctttctttcccttacttgcccactttaaactctcctcttttgaccccaaactcacattctatgcccttccttttacaacctcttgccttgaaaacccctgcactatccccccttattcctcttccataactttcctttttcctccattgcgt

SEQ ID NO: 32736 - DNA, 282 bp, Gossypium hirsutum
  Clone ID: LIB3135-003-Q1-K1-D5
acaatttatccaaccattctgtcttttatttatgaggaatcccttcaaaaccttgcgaacggtgaccttcctttccgtaacccactgcaacttaacccatgcatacacatttgatataataaacaactgccctatacaccgaatgggctgccgccatctctactagtggcaatgagacttgaccaaggtcaagcaaggcaaattactttgacctttgtaaccacacaagcccgaatcttggtctcaaccaaatgcaattctaatgcctacgtcaaagtctca

SEQ ID NO: 32737 - DNA, 312 bp, Gossypium hirsutum
  Clone ID: LIB3135-003-Q1-K1-D9
cggagatcattgtattatcaaacaatacaccgttcttgaagcttgttattatggggatggctcgccttcaacgtacactagcttcttcggtgtcctacacggctgccttaaccgtgcctgaatatatggtgtcaaacgaatacagcatgacggaaactcataaacgtagctacagcaaacactgacccgttcgcccaacactccagggtcttattgtccgacaccttctctaagcttctctcatgatggacacaatattcctaaactaatgatagagtcaatgcatcactatatcagataacttccggaaag

SEQ ID NO: 32738 - DNA, 390 bp, Gossypium hirsutum
  Clone ID: LIB3135-003-Q1-K1-E1
gaaaaggaaaggaaagatgggaagctatataaggagctacgagacgggcttcgacttagttggatcgttgtatacctcgaagttaaacaagctgctaaccttgctagctgcagccctctttgcagacatagacattggccaacacacaaagatttcgtgataaggttcgggattgggcttcctgccaaggacattcttccatgtctagtagtgtaatgcattctgataatgaatttcatagtcgagaacacagaaggggacgccgtagagacgacactcaaatcgacagtgctaatcatgcagctggaagatctggaaggtgcacatgttaacgcaagaaacagcttgcttattactgaagatactctgaactgcacgataagctaaaac

SEQ ID NO: 32739 - DNA, 449 bp, Gossypium hirsutum
  Clone ID: LIB3135-003-Q1-K1-E10
aggaaaaccagcatcctccccacggtggtgttgaagcagaagcagtcggcggcggcgccgggaacctcatcggcctccgccaccacaatttcttcaactccgtcttcatgttcgttagaccatcaaaattaattcactttcacatcccaatttttacaacgccattattaatttgtttcaggctaatgctgccgctcgggatataattaattaatactagtaatataatattaagcggtgtccgagccgagctgagctgtaaagtgtaaactgtacttaactatttctattgttttgttcttatatgggttggggtgggggtggttggagttgagacaatagagaagactgaagaagcttctgctctattattattattggtattattgtatagtcagacataatatagtccattggtgatggaatggactacatttatttttctctcc

SEQ ID NO: 32740 - DNA, 249 bp, Gossypium hirsutum
  Clone ID: LIB3135-003-Q1-K1-E9
tcgctttcatccgaaggagaaaagctgaattccatgaaccttcttctttacatggcggggagaggtggcgtatttctacttccagcaacactcattatggaagaaaaagtggtgggtataacccttgcccttgcccgcgaagatgtcaaaaacctattggaactactattcaattaaccacttccatcctttggaaatttaccaactttttggtcacgaaacacaccaacgccctaactttgcaggttc

SEQ ID NO: 32741 - DNA, 436 bp, Gossypium hirsutum
  Clone ID: LIB3135-003-Q1-K1-F1
tcgcacccctctcttctctttctctcatatcatctctttgtccctctggaacaactttcttgagaagaggttttccttctttttctaggcaaccaaacaaataagaatgggtgatatactgagtgaagaacagattgttgagttcaaagaagccttttgtctgtttgacaaagatggagatggttgcattactgtggaagaactggcaactgtgattagatccttagatcaaaatcccactgaagaagagcttcaagatatgataactgaagttgatgctgatggcaatggaaccattgaatttgcagagttcttgaacttgatggccaagaaaatgaaggaaactgatgcagaggaggaacttaaagaggctttcaaagtttttgacaaggatcaaaatgggtatatatcaactaatgagctgaagcatgtgatg

SEQ ID NO: 32742 - DNA, 424 bp, Gossypium hirsutum
  Clone ID: LIB3135-003-Q1-K1-G1
tttagatcttcatgacattgccttatacttttttccagtagacatggaaagatctcaaaggaattacaacaaactacttcagctcatggggatggaaaattcagtgatgataagttacattgatgatttggagttgttgatatttacatctgaacagttacatgcagattcgtggggtgtgtttaccgggtcaaataaggagttttttggtggagtcttccgccgagtgaaggaacatcagaagcttccttcattggtttcttgtacacaagatgcaggtgaagctgatgacatggtaagtggaaaaatggtagggatttcgaacatggctctttcgaaatgaagagaaggcagatagatttgtgtgttggtgaagtaaaaaacaatttagtgtaacacactttgtaagactgtacacatattt

SEQ ID NO: 32743 - DNA, 345 bp, Gossypium hirsutum
  Clone ID: LIB3135-003-Q1-K1-G4
ggtgaacagacattgctcaatggaacaaggtaagcgggggaaggacgccaaagggatccagtcccactctaaaaggaatgaactctatggctgtacaacgagggtgccagaaaccaacccgctaactgtcgattcactgatagagctggtcccgacaccagagcggatctacctgtgcctgccggcggacggactgctaacatttacctcggtggccttaccaagactacgaacaattatctctgaacttgtgccgacgaagctaatccgcctgtttacataaaacacagcattgctatggtccctgctgatgctcacgctatgtgaattgtggacagagctcta

SEQ ID NO: 32744 - DNA, 258 bp, Gossypium hirsutum
  Clone ID: LIB3135-003-Q1-K1-G5
accaagcgttcaattgtttaaattattattttttaaagcacacaaattcaacccaccgagtggcgccttaaccctacaattgatgtttcctataaaaatgttattctttattaaataaaatattttcaaataaagacatttaaagctattcaaattcattcatatttatgatgagagtttaacaaagaacaattactagacccttagatttcttcactcttcctgataggatccaactaccatttacttattacttac

SEQ ID NO: 32745 - DNA, 415 bp, Gossypium hirsutum
  Clone ID: LIB3135-003-Q1-K1-G8
gaaactttataaaaaaaaaaacagttatattaaatggttgatatatcccatttcaattaaagaaaaaaaaaaaaaaaaaaaaaatataaaaaaaaaaaaaaaaaaaaaaaaaaaaaaaaacaaaaataaaaaaaaaaaaaaaaaaaaaaatagtggcgtaacaactaaacatttaatactttacgccaaaaaacatttaaaacttttgattttttttaaatacaaaaaaaataaaatcactgtctgtacattttaaacaacattttatcaaaaaatctcaattaatctatcatatatgactgaaaacatatacactcttactcatttttaaaagaaatataaatttagaattgatttctacatccaaataaataaccactcaaaacttgcacttttattcccaccttatttacac

SEQ ID NO: 32746 - DNA, 255 bp, Gossypium hirsutum
  Clone ID: LIB3135-003-Q1-K1-H10
accaaacgtactgactgttgtgacaagcctgtggatccgaagacgattcatggactgaaggacctgtcgctggatccatcggagatgactaaacttgacttttccgagactgatacacgggaggatttgagaggagatttgtgatcttcttgaatcttacaaaaagaatggaccaacggcccagcagggtctgcaccacccatagctgaacctgaggagctcagatggtcaatctaacactggaatgagcatcac

SEQ ID NO: 32747 - DNA, 409 bp, Gossypium hirsutum
  unsure (1)..(409): unsure at all n locations
  Clone ID: LIB3135-004-Q1-K1-A6
gtcccacattaaagaagaggtccttgtgcctggacctctgtgttctgcagggactacattggagaatggaacagatcatgttgtcaagactgaagaggctcctataggagcatttcattttgttggtgcattgccagaagagaacaaagaatcaaaaaattatacgagtaagaaagtactggatgcagtggctgctgctgaggcaagaaagcggaggaaagaacttacaaaactaaaaaaccttcatggccgacatcgttcaccattgagtttgtcggcaaaaatctagacatttgtgactatggctgcaagcatatctctcagtcaattttcaaggctagaggtattttttctcaggctntcctttttcctttttttaagacagatttacattccccgttttttgttt

SEQ ID NO: 32748 - DNA, 361 bp, Gossypium hirsutum
  Clone ID: LIB3135-004-Q1-K1-B1
ttttatttgtattcagtatgcaaaaatgtgcttgtgttcgtaaaaacgaagccccacaaaggaaaaaagatacaatgctttatagtcgagagaagaaaataataaaaatatacaatttttctgctattttcttgggtctgttgtctctttgtgtttggtgtgcaggtacggaatgcgttggcatcgtacggaggtgcggccatagcgtacgagggctgcgcactggccgtacggtgctgaaggcttggcgtggttactggaggttggagtgtacggaagcgcttgggggctcggctgcggcgcaaagtggaagagagccctagggtttctgaaatgttgacatttgggcttttgggcctat

SEQ ID NO: 32749 - DNA, 433 bp, Gossypium hirsutum
  Clone ID: LIB3135-004-Q1-K1-B10
gcagttgcggccaagacctagagctactaatgtcgcttttgagtgtggctgattgatgggtgaagcaacttagggtcgaacaccatgacttcaattatttcaccggaattcgacgtggctaaaacataaatttactttacaagtaaattttcttcgtgaaaccaatcccatggattaaagcgactgatcactaattaccaaaaaaaaatacaaaaacaaaaaaaaagagagaaaaaaccaaaaaaaaaaaagaaagaagagaaacctaagtacgggttttattctggttttgtgctttgtgaagtaatagggggacctttaaaccttatgagcatttgtggtttgcacttaatatcgaaaaccctttcaaagtgtccaatctgaggccacccatacaagatacagcaagtggagctgttttagccctgtttcg

SEQ ID NO: 32750 - DNA, 294 bp, Gossypium hirsutum
  Clone ID: LIB3135-004-Q1-K1-B5
ggcatggttgcacttagaggcaacgactgatcagctgaagcttgctgagccagaacgctcgggtgcgcgtagcagatatgacaggtcgatagaactccctggcctttacccatatatgctgctgacctacatggacacataacgtacgacttgtgaatgccatgctacatccgcagcagaccgatcagcatctgctacacattcttggaagttcatagaacctaacgtaaatgcatacaagcgatgtgctaccatggacccccagaggcctctcaagctctgaagtcaagacac

SEQ ID NO: 32751 - DNA, 355 bp, Gossypium hirsutum
  Clone ID: LIB3135-004-Q1-K1-C10
ctttcacgcttcctctacctcactcgctgtgccaacaaaaccaggcatgtccatggattctgttctacatgtaaaaggtaagaagcctaaaaaaaattttatatgggttcaaattctttgcaccatcaatttttatttttatttttacgatttggctttaaaattaagatataataataataataataataataataataaagaaacacggaattttgatttaggctattcttgcttatctttgatgggcaagaatagtgagagagtgcccttgataaaacacacaatggttgataagcgagacttttcatttcaatgtaattcgctatacatttcctctgaggaaaagaaatat

SEQ ID NO: 32752 - DNA, 287 bp, Gossypium hirsutum
  Clone ID: LIB3135-004-Q1-K1-C11
ttcacactttcttaatgattgtaggtttggtcaacaatcaatgataaacgatggggtatggtgcaaaaaagggattctgtaaactgaaaaaataatgaccttttgtatatgaattatgtggcttaagtggaaatgggggagagagggttgataaagagaattgaaggaggtggggagagattgtttgttaacaaaaaaaaatgtggaaggggttggggccttttagaggttccaatcattactgctatcatttttgtaccttattaaattacagtttgatcctttaa

SEQ ID NO: 32753 - DNA, 417 bp, Gossypium hirsutum
  unsure (1)..(417): unsure at all n locations
  Clone ID: LIB3135-004-Q1-K1-C2
gaaagaacaggaggatggggttcgatcagctggaggatattccagaggagagagaaggaggaggtgagagggacggtggattctgttgcacttgtggagaaacggatagtgggggagaagaggtggatatagaagcggcgggtgtaagctgggcctttgatgtgggcatttggatcatttgcttcggggttggatattttgtttctaaagccactgccaaaagcttgaggcgcatgcgattactttgacagtgttaaaaaaaaaatttaccttggggaatttatattctaaggttgtgttaatcttttatttgttacccaaatttagaaattttgtgaaactccaattcgagtgatttattgtaacaaacgaattattggggaaaaagtactttgcaaaaaaaaaaatntaatttaa

SEQ ID NO: 32754 - DNA, 320 bp, Gossypium hirsutum
  Clone ID: LIB3135-004-Q1-K1-C6
gcgggccgtactttgaacctagtcaatggatactacataacaccccaccccctacagcacacgggtgctcgacgcaatagcatccgcaaatattacacacctactcttccaacaaactacaaaaaccgcaactactcactaccataaacaatgtaccttctatattaacactcgtttcactgaaataccttatcaactaccatactgtcattttcattgtacttgcatatagcatgcttacacatcttgttgtaaaaattatgtaacagcactcacttctgcaccctattcccaataagctggcatttacacccacttct

SEQ ID NO: 32755 - DNA, 425 bp, Gossypium hirsutum
  Clone ID: LIB3135-004-Q1-K1-D1
cccacgcgtccgacgtgcagcatgttaatggcctctgtttcttccttctcttgtgttctcggcgtttggcatctcatgtttaatggaagaacttgataatgcaacacgtggaccattcagctggggacctgattcatctattgcaaggattgcttagatatgaccctattgacaggctgacagctcgggaagccttaaggcaccctttcttcagtagggaccaatttaggcgattgagcttggctggcattggttggcctggaatgaatgaatatctaagaaagtagacaaggattcatatatgtaaatattactaacctgtaatacttgttaacactagcaccttctgtgtgcgttaaaggactgaattgtggtgcaaacaacagaataaaacaccatttagttagattgtgactaaacccttt

SEQ ID NO: 32756 - DNA, 406 bp, Gossypium hirsutum
  Clone ID: LIB3135-004-Q1-K1-D10
tactttctaatattgctactttcattggggtttttcaccactccctctttaggttgctatttttctacttactatgggaagccccctactcctatttataaacctcctaacgttaaacccccaccttattaacatcctttttataaacctcctaatattaaaccccctacttattaacataatccccctttctattaaccaccaaataattaaaatccttaactctaatccatcagtttatacaccttcaataaaatatattcctttacctcaaccactattatttgaacctccaaaaaattaaaagctcttacctaatccaccattttatacacctaccatttaaatataatctcttacttcataccatctctatattaaaccccctaaaaattaaattccctta

SEQ ID NO: 32757 - DNA, 339 bp, Gossypium hirsutum
  Clone ID: LIB3135-004-Q1-K1-D4
gcaaatgttgggagctttagtttcggcgtgaatgcataagtagatttccttaactaacttggatgacgtggtggacagaattacatttgaagctatataaggaatgaccttttttatccatcaaggcgaattccccgtatttacataagtattccaaacattgattctgtaggttcaagtttgaccctttttaatttactcccatttgtttttctgttgtctatttctgcccttttttttatttttattttaaaataattaatatgtttgagagttgtcatttagttagtcacctactttttctttattaatgataattattacacggcttctattttt

SEQ ID NO: 32758 - DNA, 398 bp, Gossypium hirsutum
  Clone ID: LIB3135-004-Q1-K1-D5
tgattcatggctcccccactgctcaacctgcctccgctgaaaaacaaatcgatcatgaagagaacggtgctgtttcagataacaacaggtaactttgtgaatttaataaaataacagagtgcagcactttgtaaattgttatcttatttatgatcatgtgaaatgattgtgggtgaggcctcagaaaatacaaagatgatgcaaagggttgattctgcatattttttaggctttgattttttagataatgttttgttataactacttataagctatttgtcactaatacttcaaaaaaatttctatttgtttttaacaaactatatggccttttgtgcgaccatataagaccaattttttctttgaagagtacttatattaaagagctaattttgggg

SEQ ID NO: 32759 - DNA, 432 bp, Gossypium hirsutum
  Clone ID: LIB3135-004-Q1-K1-E1
ccttcagccaattccatggctcttcaactggtttcatctgaccctgatttatctcaaagggggttcttgcacacttcagatataatggatattacaaatgatttgaaggactatgatgttgtgttcttggcggctcttgtggggatggacaaggaaacaaaagttcgtgtcatcgatcatgtggctgagtacatgacccctggggctcttttgatgctgaggagtgctcatggagctagggctttcctttatccagttgttgatccatgtgatctacgcggatttgaggtcctctccatattccatcccactgatgaagtcattaactctgtggtcattgcacgtaaaattccaatcactaaacaatgctccgttgagtaccctcttgccccaacaaaagcttccaacacgtgttttgacaatgaaatgttc

SEQ ID NO: 32760 - DNA, 376 bp, Gossypium hirsutum
  unsure (1)..(376): unsure at all n locations
  Clone ID: LIB3135-004-Q1-K1-E11
cccacgcttccgcccactcatactcccacgcttacgtaaacaccccacctacgcgcgggagggttattgtctacatggatcacatttcntatacatattacaacacaacaaccaccatattgtctaaagaatccttcccaagacatgtccaaaaagctcataatttacaacaaccaactttgcaacatattcatctatatgacagccattctccatccccttattaaatgttaactcatacctaagagtttcaacttctaaaactatctataataagcaccatcccattttttaaaaaaatattacaccacccctttttatccatgacaagttgatactcttcttaatatatagaacatggatgagctttttcttt

SEQ ID NO: 32761 - DNA, 363 bp, Gossypium hirsutum
  Clone ID: LIB3135-004-Q1-K1-E12
aaaaaactaattcttccatttcctttttttattgaatacttaaaccctaacatagacaaaggtttaattcaatccagacaaattcttatcactactataaatactgccaacaacattccatctcacaatacaacaaaaagccccaccttttgcctaactctaaacatagatggaatatatggtaaaacctcttaacatgtaatccataatatcccaaattttcatgaatatatctaggactaaacaagaaataacataattgctattctaaatacatttaaccaacgtttaacccgataaaactatcctgtatcctctatattaactactcaacaactaatatttcttattacataacttcta

SEQ ID NO: 32762 - DNA, 145 bp, Gossypium hirsutum
  Clone ID: LIB3135-004-Q1-K1-E4
ggaatataatggaacttttcctcttaagtcttatctgtaaaatctaccaagctcgacaaatgtggtcgtttcattgggttttggcttttattttcctatatgtatgtgccttaaataacagaaaatcccatggtgttaatttgct

SEQ ID NO: 32763 - DNA, 333 bp, Gossypium hirsutum
  Clone ID: LIB3135-004-Q1-K1-F11
accacacctacatacataccagattaatcagaaatatactcaaagaaaaacctggcgtctgtggaataaataacaactctacactttaaaactgaactttgaatcactgaagctttccaaattctcatcacattccagaatcaataacatcaacactttctaattcatactaattttattatcgatattaataacatgcaagaatcctccaaaatatttttgataatcaaaattcaactttagataactttaaggtatcattttataaccctcctaattcatcaactactttaaatgctaccaaagatgctccaacaaaaaattaactttaat

SEQ ID NO: 32764 - DNA, 394 bp, Gossypium hirsutum
  Clone ID: LIB3135-004-Q1-K1-F4
cgagtcggcaattcagccgagccagtagcggcgtcaacgatgatgaacttgctggaatttcaatgagggaaatgtttgctgaaatggtgatacacgaaagacctgtaagaaacatctgaattcaatatttatgtgaaatcgaagctcaactcagcttatttatatcattctataaatctttatatcgaactgtacgcaaaagatttgatatttgtatagaatagttatttagtttattcatgtttaatttttctgcttaaaaaaaaaaaaataaaatattaaatattttataatatttttaatatttatgggttgtttgttttatatttttttgatttttttttttattatttttttgggtggtcgtcttttaaatatatatgttattttattc

SEQ ID NO: 32765 - DNA, 455 bp, Gossypium hirsutum
  unsure (1)..(455): unsure at all n locations
  Clone ID: LIB3135-004-Q1-K1-F6
ggaannnnccgggnccgacccacgcgtcgcgcccacgcgntccgggcatagctaaaacctaagatttactatggtctctagcagtaccgcaaccctggagnggggaattggggttgtcatgatattgcagtcctacaagggaagccctatcatnatagctacgaaggaagaaaacgttctttccagcacattacatttgatggctgttaggttatttgtcacacacacaaggttgtttttcacaggcgatctttatagctggagaaactgttctgatttgattgataaagggaacactaaagatatcntgatttttggccttagtcattgncctcaacatattatnggaaggatggccttactgcatactaacatgtggaagtctcaaactactgtcgcgcccagagaattttggcataatagaggggtatgattggtgcccacttcagacatat

SEQ ID NO: 32766 - DNA, 441 bp, Gossypium hirsutum
  Clone ID: LIB3135-004-Q1-K1-F7
attgaattatattgatatgaattaaaaatgagatagtgatttgaagtatgaaaaaaaaagtgtgttgtgattaaataagaaagttatatactcatgaattgaatgttgaatggataatgccatggtataaaaaattgtggcttgatgtgtgaaaagctatttatatagtaagtgtgtgaattgggatatttgttaaataaattgaatatgataacatgtataaattgaatatagtaagaaatgatatgctattatgtatgaattcaaaagggtggcatatgttagttgtgatattagacattaatacttgtttataattcaattgtgcattttgtattctcttatctttaaatgttcaaattatagaaatattattgagttttacttagcgtacggttttggttttcgtgcacaaattagatatttttcttctgatagtcg

SEQ ID NO: 32767 - DNA, 381 bp, Gossypium hirsutum
  unsure (1)..(381): unsure at all n locations
  Clone ID: LIB3135-004-Q1-K1-F8
cgggcgaccgacgcgtccgcccacgcgtccggcanagtcatctatagaaactgcatccactggaacattttctgcggatggaattctacatctcagacgtcttctatccnaacttgactcttcctcgaatccaatatccaattttgtaaaagtcaggtaatgcctttaatgctcacaataatactgactcatggatgattgattttggtgtgaatagacataccacaggttcctctaatttttttaattactccccaaattaaacaaaatatagtgccaagatagccaatttgtcttttattcttgtaataagataaagttttgtaaattttacacctaatatcaaactatcctttgttcttttaaaaaaatttattattt

SEQ ID NO: 32768 - DNA, 382 bp, Gossypium hirsutum
  unsure (1)..(382): unsure at all n locations
  Clone ID: LIB3135-004-Q1-K1-G11
acggtgggctttcagagtttctcggttggacggatcagcagagagctcaagctgccggagaatgctggggttaccgattactctactcnattcgcctggttggagtttttgtggttgccgatgccttgttcattggtgcacagcaagtgggtcgttatcttcaggatatacggtctcactaaagttatattgatcttcttgaaggcattcgattaaaagttaaaccatctgaaagatggcagttgaatttgtgatcatctataagagactgaagatgttttgaggatcccaattttgaaagccacagtagttagcagagtttcatggtgttgcctgtttcttacgtgcaaatccttgtgattacatatgtacttcaatcaca

SEQ ID NO: 32769 - DNA, 233 bp, Gossypium hirsutum
  Clone ID: LIB3135-004-Q1-K1-G6
gcgaagttttgaaacccagcaagaaaggacaagaaaaatttctatgccttgcacgaggagctttgaatgtggagcactttacatgtccgagtcaattcccctagaggaaacccaataagaacaagaataacaaaggctgcttctttgattgcagtagcaaatgtgaagtcacttgcatatggaggaaaccgaactgtaatggatattggtctctcttctactatccaaggttt

SEQ ID NO: 32770 - DNA, 235 bp, Gossypium hirsutum
  unsure (1)..(235): unsure at all n locations
  Clone ID: LIB3135-004-Q1-K1-H11
acaaaacccattttattaaaatttttcnttttaggaaccatanaaaatcacccgttagttgtgttatatattaaaagtccttcttatantcatcaacaacatttaccttctcataaacagtattcacaacctttaaaagaacatgtcatgaatcctatcccttagtactacatcttcaactaccatcctttcaacaagcttcaaagtaatgtttcattaattacttgatgttatt

SEQ ID NO: 32771 - DNA, 259 bp, Gossypium hirsutum
  Clone ID: LIB3135-004-Q1-K1-H3
gtgcgttctgttatccatgctaaaaatctctcatctgcttcctcatcaccgaactcttcaggcttcctgatatctacattcatagtggttccatcaatgctcctgtcacccctccattgagctcaccaactgcgctaactccacgaaccaatactgattgggaggacctgactgcccctccaggttggagtgcacaacaacactctttcctgccctcttcaactccacctatccctggtcgtcacatcgttcctgaccc

SEQ ID NO: 32772 - DNA, 488 bp, Gossypium hirsutum
  unsure (1)..(488): unsure at all n locations
  Clone ID: LIB3135-004-Q1-K1-H5
cgcgtgcgggaaattacgcgcacatcattaacctattctgcatgggatctttcggcctctaaagatcgggaacgcggtgnatggcatcctgtgacttataagttttctgatgccactcctgtgctaatcaaatccataaaggatattgacaatatcaattatgaaactgaaaacagaagagaatggtgcagtagcaaagggaagccagccccttgcttcctttttgcgagaaaattcaccaggcctgcggctctccaccttcttaatttgtcagttctgggagctcgccgaggagcanaaagtgagacataacaatacagagggtaattttctgtactttggctaatgttaggtaggatttgttaggcttaacctattgtattttttgcagtaaaaaataatagagggagctgtaaatttagagagagggggaaaatgaaatccaatgcttgttgttgtataataaaaatatcattttctaaataaaa

SEQ ID NO: 32773 - DNA, 367 bp, Gossypium hirsutum
  unsure (1)..(367): unsure at all n locations
  Clone ID: LIB3135-004-Q1-K1-H8
cttcgttctcccactctttctatctctgttctgtctgtgtgcgcagaagtgttcgcgcaaggcggcatccagaatttataatgaggggataaattttagaaggtgatgataatttgtttattcagagtgccgtatgcatctattatatactcgtattcgatttgttcataacgtgaggtgttcttttaattattattgttattattattatttaggttcttgcatatatatgttgatggtcttcttgtatctttttttgtctaaatttaatcataaccttatcttccttccttttnaaaaaaaaaggagggaagaaaaaaaaaaaaaaaaaaaaaaaaaaaataaaaaaaaaaaaaaaaaggggggc

SEQ ID NO: 32774 - DNA, 371 bp, Gossypium hirsutum
  Clone ID: LIB3135-005-Q1-K1-A10
cccacgcgttcgggcggcctcaaagaggatgtggaagatgatgttcctgtgtttccttcatgagataggaaaaagaagtcgaagtctgctaggaaggttggtaatccattcagtgccgccgcacttgatgaagttgaaagcgattcggagttgaaagaggatgaggaagatgatgttgcttctttttctttctcagataagaaaaagaagtcgaaatcaatgtcttctaagaagagtggtaattctttcagtgcagcattgcttgatgacgaagatgaaagagatgcttcggtatctgaatccactggtgctgctgctattgatgattatgatgacgatacttccatgggtgcattttcacggtagaaaaa

SEQ ID NO: 32775 - DNA, 383 bp, Gossypium hirsutum
  Clone ID: LIB3135-005-Q1-K1-A2
cccacgcgtccgccttgcaccatatccagttatacgcgatttcacccaatgcttacaggatgtcggggcggatgttgagattgtaaagtggaatggctctcctcatctagaacactacaagcattatcctatccaatacaaggctgccgtggccagtttccttgagaagacaactttggtctattcccgcaggatccgaaatctcagggaaatgaatggtatgcatgatgagatctccgagttaatctatggcctgcagaaagcagcagtcgactcgaaccaaagctttaggagagttgctcttggtcctagtgaccactttttcttgccaagttcagccaaatatcataatagtagagagtctggatctcttcaagatgaac

SEQ ID NO: 32776 - DNA, 251 bp, Gossypium hirsutum
  Clone ID: LIB3135-005-Q1-K1-A3
gcgattacttgtacccctgatctcataactgttctctttcaatcaacaccctgtctgaccacatgtgagtgtttacaataatcctttacagaactcaaatcacttcctcaatagaagactccattctactccataaatcaaagacacattacgtggagctcttgatgtctatgttggcgatatcatacataccacctctctggttcctaacatacataaaattgatgcactcatacatcttactaatgcta

SEQ ID NO: 32777 - DNA, 389 bp, Gossypium hirsutum
  Clone ID: LIB3135-005-Q1-K1-A4
cttgagcaacagcatcccaaagcaaagtcagatcttggaagctgtgactgttgaatatgctgctggtccgaatatagcatcttttaggcttgttgcatcaaagacaacaaccgatgcattagaggaacttcggggttacaaagtgatgaaaaacttgttgcttagtgaagggggtaaggcttacacatctaatgttgcctctgcagctgaacattccagtaccagcaaaggtacatgagaattatcgattctgaactactatattggtatatattgctcaaatgtacagctttaggtttcagagattactacatgttatacagctgaagccattatccccttttctgtagatagaagtatactataaagttttggataagaatcatgct

SEQ ID NO: 32778 - DNA, 192 bp, Gossypium hirsutum
  Clone ID: LIB3135-005-Q1-K1-A5
ctcacactgcgcttgtatatacacctattgtacagctttccaaaaccatattaaaagtgtggcgtttaaaccttcaaaatagaccctctttatacactgaaaaagattaccctaaaaacaatgtgcccccactcagaacataatttctaaatcattcacaagagtcttcactctattaatactattcatatc

SEQ ID NO: 32779 - DNA, 154 bp, Gossypium hirsutum
  Clone ID: LIB3135-005-Q1-K1-A6
cccacacttccttcaaatatccacatcttgcccaactaagcaccacattataaactgtcgggcttaaaacctacattctacaccctcttacttcaccgaataaaataacatactaaagcatcctcccatacttacaacattttggcccactcat

SEQ ID NO: 32780 - DNA, 271 bp, Gossypium hirsutum
  Clone ID: LIB3135-005-Q1-K1-A8
gagcaacaacatcccaaaacaaaatcatatcttttaatctcagactgttcaatatgctgctagtcctaatataacatcttttagactcctttcatcaaaaacaacaaccgatccattagatgaacttctgggtcacaaagtgattaaaaacttcttgcttatcgaaaggcgtaaggcttacacacctaaagttgcctcttcatcttaacattccaatcccaccaaagacacttgagataattcctctcttctattatatataggtatatat

SEQ ID NO: 32781 - DNA, 425 bp, Gossypium hirsutum
  unsure (1)..(425): unsure at all n locations
  Clone ID: LIB3135-005-Q1-K1-B10
ggaaaaaccggaacgacccacgcgtgcgcccacgcctncnncaaaaatgaaatttctcattttaatcaggaggagcgggctggcaaggtgtaggaaagcccagaatctgatggctggggtcctaacaaagcccaaaagctgaatcccgcaaagccaattgaacaatctacagaggccaccatgaggaaagctcgtgtttctgttcgagctcgatcggaagctcccatgatcagtgatgggtgtcaatggagaaaatatggacaaaagatggcgaaaggaaacccctgtcctcgagcttattaccgatgcaccatggcacgttggtgtcctgtccgaaaacaagttcaacgctgcgcttaaaatagaacaatattggtaacaacatacgagggcaaccacaatcacccacaattgcagcaacctta

SEQ ID NO: 32782 - DNA, 377 bp, Gossypium hirsutum
  Clone ID: LIB3135-005-Q1-K1-B11
gcgcctttgattttttttgaaaagaacttaagaattttttgaaatgttctctcaactcatgcacgcattgtgttctcttcatcagacaccacctccgacaaaggtcccatgtgcaatggccaccgacgacatgagcacaactccggtataatggacgttgagcgtgggtcatgcttcacgctagttgtccacacatgccacgtggagtgcatggtggtggacaacgttggtagcggaagcatggaagcacttggaggctaaggtcttggctgaaaatgttttatgcgttgctgtgttaaggttaactatttgagctggaaaatttaatctgcttttggtctatggggatagcatttagtttaaaaatttgtggcttt

SEQ ID NO: 32783 - DNA, 386 bp, Gossypium hirsutum
  Clone ID: LIB3135-005-Q1-K1-B3
gtggattccaccccaggtgcgactcctacatcttgcaatggcagcacttcgtccgtaaccggcagcgcgacaccctcttctgctttgtcggagcgccgagcgtcgccatgaagaacgatttccgaggcttgctgttgaaccaatgtatgaacgcttccggcttatgccggtcctgtgattgcgccagtacccgatgctccaacgggacatcgtgcatcctcgaaacattcttgaattccgacttttgcttgcaacccagaggcgacagtttcacccgcaggtcaattttctactgcatggtcgccggttccatactcgtcttattgtggcaccgaacgggttatctgcagtaccaatggtttttaccgaatgatcccaaaagttac

SEQ ID NO: 32784 - DNA, 388 bp, Gossypium hirsutum
  unsure (1)..(388): unsure at all n locations
  Clone ID: LIB3135-005-Q1-K1-B9
gcgatcatgtanaagtcattaagagcaagtgtttggcatctcttcaagaccttgagtctttaccgctgaatggctgccaaaagatatctgacaaangaattgaagctataaccacttgttgtcttaaattgaaggttttttctatttattggaatgtaagggccactgatgaaggtgtgaagcatctggtgaagaactgcaaatgtatagttgatttgaactttagtggctgtaagcatttatcagacaaaagtttgcaattagtagctgacaattatcccgagctggagtctttgaatctgacgaggtgtgtcaagatgacagatagtggcttgcaacaagtattttgtaaagtgctcctttttccaaagtttaaatctttacgcac

SEQ ID NO: 32785 - DNA, 357 bp, Gossypium hirsutum
  Clone ID: LIB3135-005-Q1-K1-C1
ccgttgaataggctcatgttcttaccgagtggcatcctcaacctggtgataagaagccgagagttggacttctcacggatgccgttgcttctgaaagaacaacagctgaactgcttaactttgccattgcatatggaaaaactcctgtggggcctgccaacgattgcaacgttgctgtacaatatgcaaggctcacaagtgttctatggtccatagaaggacaagacgagctttatggcagaaacagcgcttattggaacctcagaaactcgaacgggctaagacattgcttggaagggctctgcgctcaccatccattgctcattgtacacgtgctcagaaaggacatattgaacg

SEQ ID NO: 32786 - DNA, 350 bp, Gossypium hirsutum
  Clone ID: LIB3135-005-Q1-K1-C12
cccacgcgtccgcccacgcgttcgcacactgtaacatttaaagattaatagaaggagaaggggcttgtgaaaacacagagagacatggatagaagatactctttctttttggtggcccttgccctacttttcatttccatggaagctagcaatgtgcaaggtagcaacagcaagaaggcaccctatgatgctgcttcaactcattatactgttttggcaccccagtactggacaggaaagagtttactgcctatcaagaggagcttgtaatggaaaggtactcacatgtccgagtcaatgcgctcaaaggaagcccaaaaaagaataagaaaggtcaaaaggatgctttc

SEQ ID NO: 32787 - DNA, 362 bp, Gossypium hirsutum
  Clone ID: LIB3135-005-Q1-K1-C5
taaaaaaaacatattaaaaaacaccattaaaatatcaccaaactatcttaaaaatacaagaaagacttactcatacatgccacctcttaacctccttttcatactacatatccccactactctacccacacatttacatcttcttcacttgaatatccttccctttccccaacttcatcctttttatcaaaatacacccttctccctacttaataataatgaataaaacctctcacttcgcccttatcctcttttatacaaaatcacctcctaattccactcaccctttatattcacattaaaacccaaaggtgccaagaatactctcagaaccacctacacacttatcctcttacttacac

SEQ ID NO: 32788 - DNA, 215 bp, Gossypium hirsutum
  Clone ID: LIB3135-005-Q1-K1-C7
aaccatcttaatcctaaagtgtgtattacttgaaagtagagccacaccatatccggagtagttttcaattgataaaaagaaaacgctcttactgacatacactttggtgcaaaccactacgctttgatatatgttctgcttatacataattttacttaaacttccctgatgtataatcaatctaaacttgctctaatatatcatttgttttatag

SEQ ID NO: 32789 - DNA, 141 bp, Gossypium hirsutum
  Clone ID: LIB3135-005-Q1-K1-C9
ctgcttttaccgtcgcctaccctttttttacagcttcttaaatatcaaaaaaggagtataactaaaaacactaccctacgtttccttactaaaaagcctctatttacccaagactataaagaaacgattaatacaatgaca

SEQ ID NO: 32790 - DNA, 389 bp, Gossypium hirsutum
  unsure (1)..(389): unsure at all n locations
  Clone ID: LIB3135-005-Q1-K1-D1
atcaatctgaccccatcccaaacccgcttttcatgcaaaacctaaaccaggcccagcagtagattggtcttcaccaaactatgcaaataccccatccacagggtcaagcaatggcccagccaagtagcagaaggggagttgagaaagttgagaatcacccaacaggttgaaaattctgcgtggctcactccagagtccagaaaggattcctctttctttcttaaagttctgtagtttgtctgagataaactattttgggtttcaactaggcattattattacaacgcactaacatgaatatatgtgtatgaatagtccctagtttccaattctcttaagttgttctattgtgaggtttnacattttaaaagaaataaatatgtataggt

SEQ ID NO: 32791 - DNA, 447 bp, Gossypium hirsutum
  Clone ID: LIB3135-005-Q1-K1-D2
cccactcgtcctcccacgcgtccgtatgcctcttcctcgagccaaaagcagttttcagaaagccctggactaaaactttgctaactaacaaatgtgctgtcttattcccctcacgaatttgcaggatctaaacgtcccaaagttggcccatcgtcgataattgtttctagagagctactctcggttcatggctaggaggctttgctggtgttagcgatttgcattccgtcagatttcaattaggtctcatggattcaagaaggttggcagcatccaggtttcaaatctcagctcagtaatgtttgaatcgtaagttgaatgctaaaatagagtcggcttgtacctagtgttgtaatttagtctttggagtcaattatgatgccctcgtatcttctatgccttaaaatattcaagttaaacatgttcaataatctaaatggtcgatga

SEQ ID NO: 32792 - DNA, 333 bp, Gossypium hirsutum
  Clone ID: LIB3135-005-Q1-K1-D3
ataagacctgctccatatcatacccaacactatttcaaatgctaaaaccatccctaaagcagctcggtgatttactaactacgcatattccccatccacagtatctagcaatgacccaaccaattagcagaatcgctgttcagaaagttaacaatcacacaacatgttgaaaatcatgcgcggatcactacataatccagaatggattcctctttctttcttaaaactctataatttggctgagatatactattttcgtttataactatgcaattcattattacaacgcaactaacatgtaattattatgctgctatggaaatagttacccct

SEQ ID NO: 32793 - DNA, 382 bp, Gossypium hirsutum
  Clone ID: LIB3135-005-Q1-K1-D5
aataaatcagctcttccatctcctatgaatgattctcatgatctcatcgctccatgagtatgtactaccataaatgtggccaagactctctttacccttactctgcacaccaacattgcttcataactactcaaactccgcgtatttcaggtctcactatctgatcttacccaaagtgatgatcatcactcctacacaatgatatcccttccaactcttacatcattaaggcaaaaatgctcaaaccaacttggcttgaatgaataatacataccacatactgatttcatcatttcgtctatcgcacactgtgatacatgctcacctgcacttactgacaacttacatcaaccctctgataatgcactgcatgaagttctct

SEQ ID NO: 32794 - DNA, 406 bp, Gossypium hirsutum
  unsure (1)..(406): unsure at all n locations
  Clone ID: LIB3135-005-Q1-K1-D8
gactttcanaaagcaatgtctgttatcaggcccagtttaaacaaaagcaagtgggaggaagttgaactatggaatcaggagtttgcctccaactaaaatcttgcttgcctctatttagcattattaccgttgtctgtttgaagaacagcttaagcaagggacaaaaagcaacccgtatcatcgttggcgccagactagttgtgtaattataagaagtcaaaactcgaagccgaaagccaaagctcaaacgttggtcaagaatgtattttgttttggataacaattctttgacaatgtgtcatagaaagtattgcttgatattttgtattttacaacaaaatgcatgattttgatgggtaatcaacagccttcttgcctatgattagagggttataaggaataaata

SEQ ID NO: 32795 - DNA, 443 bp, Gossypium hirsutum
  Clone ID: LIB3135-005-Q1-K1-E11
gattaattgcattgaatacttcatggccggtgataaaccgtttctgatcagtggttctgggggttacactgctaagttatgggactatgaaaccaaatgttgtgtccaaaaactagaaggccatacacgtaatgttactgcaacaagcgtccacccacagcttcccattataattacttgttcggaagatggaactgttcgtgtctgggacaaaacaagttacaggcttgacaacacattggcatatggtcttgaaagagtctggactgttgcttacatgaaagactccagcaaggacgattgtggtcaaaattagtggctctaatggctcggattctgctgatgtttgacggcaaggaggcgtactggattgcattgtttatcatcagcttgaagatgcaaatttattacacggactggtttctatgtttagtgtgtggggc

SEQ ID NO: 32796 - DNA, 160 bp, Gossypium hirsutum
  Clone ID: LIB3135-005-Q1-K1-E2
atttttttttctgtgttaccatattgtatattgcaatcattgtataaatgcatcaattctggggggtccacaaatagattcaagaacaatgccaaataaaatcagagcttagtttgcatgtaggcattcgaataaagttttataaattttcccttctgcc

SEQ ID NO: 32797 - DNA, 317 bp, Gossypium hirsutum
  Clone ID: LIB3135-005-Q1-K1-E3
gaagaactgggtgtatgattttatttgtagatgctccaactgtataaagcgtgtgtaattgggcagaatcagtctttgctcatggttagacatgaagggggaagatgctttgattatggcgctggtgaagccaaagtttttgtggcaattcttcgtgataaaaaagggcgagaaaagaaagggcagggagagaggaagctacatgtccaatttgtatttgcacattttgaacgctgttttaagcagtcatcatcattgctcattcacagcttctatatctatctgaacgaggaagatgctcttacggctgtaaatag

SEQ ID NO: 32798 - DNA, 326 bp, Gossypium hirsutum
  Clone ID: LIB3135-005-Q1-K1-E6
caccatttcaagtgatagcagccttatcagggttctatgcgatgagacacccaaggtgccggtaccgcttgccagcagtgccgattaacttcttccgccggctgcctgccaggacggatagcatgttgtaacccttcacgggatgttttaaagactatcaagtgtttatccaagtcctaagtttctcctggtgtattatggttattatcagtaagtgttttgaagagattttgatccataaataatttgtgtttgcttttataagctgactcagaattagaataaagtgaagagtagtgtcaacataaaaaaaaaaaatacataat

SEQ ID NO: 32799 - DNA, 339 bp, Gossypium hirsutum
  Clone ID: LIB3135-005-Q1-K1-F10
cccacgcgtcccataagttttaacctctttacaaattatatgtgaccgtcttcaatgtggtgttcatttgatctgaaggcagaagaagttataaccaatgtcggtgaggtatgtccacaaaattttgctttcagtgttgggtaggttcactgaaaatgcacgagctttcttcatgtggcttctttggttaccagaggcgggaacagaagactgatgcttgagattggagggtttaattagtgagatattgtgagtagcgcttcctcttattattgttctcatgtttgcaaatgtttggcacattgtggaggattatgcaagaaaagatgcagttaacac

SEQ ID NO: 32800 - DNA, 307 bp, Gossypium hirsutum
  Clone ID: LIB3135-005-Q1-K1-F3
gccacacatccaatgaatacaacaattattgttctatgcttatttattggctatattctggggtcgcatgcataattgaacaagtacctaacacgatactgtacttaacacgctcgggtacagtataaagcttaaggacagatggttactgtcgcttaaatactgatatgccacaatagagtcacctatggatcactaacttctatatgatctcgggctaattgaattatccactattatgctcattgcgcaaggatataaagtttgacttcgagcacatgaactgtatattatcaatgacaacgca

SEQ ID NO: 32801 - DNA, 315 bp, Gossypium hirsutum
  Clone ID: LIB3135-005-Q1-K1-F7
accacactcattttgcaaaccgcatctttatatgtttcatgtccaatactttaactggcgtgctaaatttatcctgatgatctcctactaaattcttaaataataacatcttcatatccacatgaaaccaccacagagatcctttttgcagccccgactaacattgctcactagactatgctaattcttaaacgcagacgttatattaactaaacacacctctagactcaaaaatatcatacattgacaactgaatcatcttgagacatgtcccgactggcacacgtgtctcgtcagctcatatcattatcggaa

SEQ ID NO: 32802 - DNA, 288 bp, Gossypium hirsutum
  unsure (1)..(288): unsure at all n locations
  Clone ID: LIB3135-005-Q1-K1-F8
acccacgcgtgcaaacactcttacanccactctttctttttacttccaaccgacaaaaccaactccaaagcccagtttttctcaacccttaatccatcccatcaacttactttttacatcccaaataacaaattctcatattactcttgatattattcatccctctacttccacgcataatcactctcaccatatactctacaattctcttacaaaatctacccccctttaccccactatattacatccttcgcaccccatacttaattttctccaaaaaatctactc

SEQ ID NO: 32803 - DNA, 445 bp, Gossypium hirsutum
  Clone ID: LIB3135-005-Q1-K1-G10
ctgtttcaatgaggtacagagagtcaatttcaaagagtacaaggggttggaaggagagattgttctcgcgcaacacttccatggcaggtctgggttttgaaattaggagagaggttaatgatggcagcaatgcaacagtcttgcgcacgatagagcctgcagaaaccagagataatattgccagtcctactgtatcaagcagtttggaagatgggtctaatccagaatcaaataaccaccagattgtagatgccggtgtagaaactcctttgactgagaccagtgcccaagcttcatgtgctgcaagttctgcttccaaataagtaccggcaatgcatcaagcgaaagtggttttgtgtcgaacgtaaaccaagacgttgagaatttcttgcatgattccattatctacatttgtgttggagatatgtttacttcgatgttggat

SEQ ID NO: 32804 - DNA, 411 bp, Gossypium hirsutum
  Clone ID: LIB3135-005-Q1-K1-G12
gaaaaaaaaaacacccacgcgtccaaacccatcttaaagctacccaaaaccataacgtataatattcgtggaaaaaaactcgcttggtttcaactaaaaaaagtgggctccaaatatcaataaccagcaagatgatcaaacaaaggctaaagctttaacgtcatcgaattcatgaccatatttacatcatcgataccattaataatgcttcaaccactccttatctaacaaaatgcctaccatcttaaagccctttcactccaatttctactccttatattaaaacttattaacttaacatcaatcaacaacaacaatatgcttctacttcttttttacacatatattctggcacttaacccatcaaatttttttttgttaaactaaacccaatatctttatattttaatc

SEQ ID NO: 32805 - DNA, 245 bp, Gossypium hirsutum
  Clone ID: LIB3135-005-Q1-K1-G3
cctgcaacccagttatctcactataaacactcgtcttattcaaaaccaaataccatactgggcggcgacattcttagatcaattctcataatacccatccatataatacaaaactcatttctataactcaacaattcacccattctacttatcttctccctatataatatactatcacaaccttcatagagattactcttcttcaatttgagccaaactatcaaacatatttctccctcattaat

SEQ ID NO: 32806 - DNA, 166 bp, Gossypium hirsutum
  Clone ID: LIB3135-005-Q1-K1-G6
agaggattcaatctcttcaaactggtaaagccaacgcttagcacttcttcaagtgcgctggtatttaatgttgcattccatggtcctttatcttaatcggaacttgaatttttgtagctaccttagatactagcttctttaaccatgattgataattattatgtgt

SEQ ID NO: 32807 - DNA, 275 bp, Gossypium hirsutum
  unsure (1)..(275): unsure at all n locations
  Clone ID: LIB3135-005-Q1-K1-H12
gcacacatnctaaatttaaacattaacttttaatactcaaacactgcgataacaaacctcgcctgctttataaaaagtatgaaaatgcaacaacttcctgttaacttcaagccgatactatcaatctcttactttaacaaaactcctcatcatgttcttaacaactcccatgcttagatcatcaagactgacactatccatccttactaccaagtcaaactactgccgatcatcctttcttaccttaatcctctttcaaacaagcttctccacct

SEQ ID NO: 32808 - DNA, 172 bp, Gossypium hirsutum
  Clone ID: LIB3135-005-Q1-K1-H3
cgcatgcagatctaactttacttaccaactttcaatctaaattgcatctcgaatattccaggacggattaactataaagttcttccataataactaataatattcccttatacacaccaaaaaaattgccaaactaatcagcttatcacataaccatgcatacctatatatc

SEQ ID NO: 32809 - DNA, 325 bp, Gossypium hirsutum
  unsure (1)..(325): unsure at all n locations
  Clone ID: LIB3135-005-Q1-K1-H5
tccactcgtttcttatatctctttctttattttataangtggtggtgcattgncccttagtaagacgttatttccatttgtctccttaactcccttaactaactatacctcatccttctaactatctacacagtaatcatcctcctttactaccttcttaaatatactatttccttttacgccaatgaatttttatacaataacacctctactcttacatatcttcttaatataatcctccccaatggaacttattctacctataatcccaccaaccaaatatcttcatcaccaccgtatttctatacatcaccgccgatcattt

SEQ ID NO: 32810 - DNA, 416 bp, Gossypium hirsutum
  unsure (1)..(416): unsure at all n locations
  Clone ID: LIB3135-006-Q1-K1-A3
tcgnccacgcgttcgnccacgcttccgtcactttatccatattgattttgggttcatgctctgcgagtcaccttgtggggtaaattgtgagaattcaccattcaaattaacccctgagcctcttgaagtcattgattctgatgcttagggattgccaagtgaaattttttacctcctttaaggattttgccatccaaggtttctctacctgccgaaaccttccaaaggccttaattttttttttgaaatgttgcaggatttctgtttccctttcttaaaaggcggccctcgtccttttcaaattttaaaaaaacgattcctcttaaatttcacaaaaaaacaatgtgtgccattgttgctttcccttatcagcaacttttttaaatgccatggcgaaccacgccgttttatttttt

SEQ ID NO: 32811 - DNA, 127 bp, Gossypium hirsutum
  Clone ID: LIB3135-006-Q1-K1-A4
gacccacgcgtacggcctgtattaaatcctgattttaaaaaaattttcttgtaccaacttcaatgcatactttccgatattttttaatgttggtgtgaatggaccaaatacattttccccttttacc

SEQ ID NO: 32812 - DNA, 395 bp, Gossypium hirsutum
  Clone ID: LIB3135-006-Q1-K1-B1
agaagcagctgtacattgactggaaggcaagaaccgggttgggttctgttttggagaaccgggttcaaatggtcaggctatttggggtcaacatatttaaaatgcctggcagtgaaaatgttggtctagctggaggatgtaatgggaaaaggactagagaaatggagcttttagaattagagtgcagcaagaaacaaagggttattgatgctttgtaacatcacctaattaatttccctttttttttcttttttttttcccccttcttttgttgcttttggggcctttgggaatgttaaaagacggtgttggaagataaaaaaaatgggagggggggacatggatgtgctgtattagcaagttttaaaaggtgaattggatatttacaagaaaaa

SEQ ID NO: 32813 - DNA, 163 bp, Gossypium hirsutum
  Clone ID: LIB3135-006-Q1-K1-B4
ttttaaatctacacccgaatccaaaagatgtttttaaaaaggaagattgtttgttttgggatggcatacattgcggtgacgatcaggacaatgaagttcatgaccaacaagctcctttccagtaaacaattcgtcattgatgttttgcctccagggaggccca

SEQ ID NO: 32814 - DNA, 433 bp, Gossypium hirsutum
  Clone ID: LIB3135-006-Q1-K1-B8
gtacggtccgaaaacagttcccctaattatgttaaagtagatcgggaaactgacaatgacgggaaaatgaaagttgtcggagcatgttcgacccatttggacgggattcaaatgagcgaggatgattcagacaacatagaagaagccggtccatcggagttgaaggagatacagtcacccacaattaaaccccgaaaaagagtacggtttatcgtgccggagagcccgaagatagagtccgaatcaatggaagagttgcgggaacttacggaagctagggaagccggggtagcttacatattatgacacacttgtcttagagctaaacaaggatctagcttgataaaaaaactcgtaatcgatttcggatatgaatttttgcggaaaaacaggcggacgtctacactcgcattaaccgtacctcatgtctcga

SEQ ID NO: 32815 - DNA, 220 bp, Gossypium hirsutum
  Clone ID: LIB3135-006-Q1-K1-B9
aatcaacatttcaacaattttcaactacatttacttaacccaacataccttatgttgcttttcttccaactaaaaaatgtcaccgaaacaacctaaaccaatcaccatgcatccacttttaaaacacgattttattaaaaatttccatttcattactgcaaataaaatttaaatacatcccctaatttataaaaccatattcaatgaaaaacccctttct

SEQ ID NO: 32816 - DNA, 228 bp, Gossypium hirsutum
  unsure (1)..(228): unsure at all n locations
  Clone ID: LIB3135-006-Q1-K1-C12
aaaacngggacgaccgacgcgtcacgcatgcataactctgcctcaaactttattattttctttataccaaaactatacttgtccgtgtttaatttaaacgaagtgaaccaaaaagactacttcttttctacgttcttacacctacctgtaactatagacgctggcgcacactcgcataggcacaacactcctaaagaacccctggtttcagccgcaatgtatattatt

SEQ ID NO: 32817 - DNA, 297 bp, Gossypium hirsutum
  Clone ID: LIB3135-006-Q1-K1-C5
tcgcgtctctctttaaaacaatcccttcatctataaacccaatacaactgttaacatacccggagattgattaatattaagtatcttccaactattaaagagagaaaatatatgggaattccacacacatgcacctagttgagtcaacttccatcatctaggaaatacagactatttttatttctagaaactatcatcgatgcgtcttttatttttctgttccttacatgcatattatatttaccaatctcattgaaatttagcacttttatatcccccaatgatcatacttattga

SEQ ID NO: 32818 - DNA, 346 bp, Gossypium hirsutum
  Clone ID: LIB3135-006-Q1-K1-C9
acccacctcccaactaaaaaaacaaacaaatcttccttacaaattataacgaaaacgccgtcccgtcttcttaagaccttctttcccccctcaaacaccactaaaatcattgcaaaaaatttcaatcaaattccttttaacaatatttctatccttctaaactctattaaaatatcttcactcttcctcatttcttacaaactaattcttatttatttaaaaaataatcttaattcattttttctacatctcttctcaataattctcaaaatttttatttccaatcttaattttctctacttattcatatcattatcaattctctttatatcaacaactatatttt

SEQ ID NO: 32819 - DNA, 332 bp, Gossypium hirsutum
  Clone ID: LIB3135-006-Q1-K1-D11
aaaaaaccgccccgacccacgcgaccgataaaatttaacaactttttacaactatttatttctaaacaaactagatatctcgctcgtaatcttaatattcttgaacaccaaatttcagcgtatatatataccagtttaacctaagaaccatttcaaataacacccttgaatcattagtttatacaattcacaaattaactatttacttaaaagcactataacaacttaatactcgtaaaatcagctcaatgacatcgattaatattaaaaaaaaaactccacgatcaccattgcaaagtataaatgaaatgtagaatattctaaccccctca

SEQ ID NO: 32820 - DNA, 247 bp, Gossypium hirsutum
  Clone ID: LIB3135-006-Q1-K1-D2
aaattctaacgtttaacattatacgattatttcagcaggaactaaatctcattatggagtggagtctcttggcgaggtgaaggcatggcttaaactcctaaagaaaggcggcagtctgagaaaatgatatcagatgtgtttcgcttattcaatgagatataatgatattttaatcacccatcgaaacgcacaaaacaattacaacatcattacttgccttttccatagaaacttcttcttattaatc

SEQ ID NO: 32821 - DNA, 396 bp, Gossypium hirsutum
  Clone ID: LIB3135-006-Q1-K1-D5
taggactcgtttttttcaatctacccgtactcttattattttgcttcacgcatctacaaggcagattaatctatcctaaatatcattcctctatcatcaattgatgattatgttgatttataataaacctatacatattcttagacaaaagacagtgcatttaaagattacttttatatatcctgaaacctttttgacattccttctaatttaaattttactcttaattactatttctaatgaacttttacattcttttttataaattaatacttgattaaatttatctttattatctataatattttttttatactttattcctctttttattttcattctaatttcaattttttcatctatttatttataactccttttgtcttttatatattt

SEQ ID NO: 32822 - DNA, 391 bp, Gossypium hirsutum
  Clone ID: LIB3135-006-Q1-K1-D6
tctagatcgcgagcggcttccctttttttttttttttatcatttgcaatttcccattttttgggaaattgcatatatggtctaaaaacatgtattaaagtcaaaagatagaatacaagtgattaattggagaatatattttctcgagatttcttgggtagcaatatcaatttaaatctccttccggtaggtgtacattaaagccttcatccatgcatcataacacatatggaattacagctttgacttctttgggaaaatcttcaaactcaacaaattgcagcagctgcatttggatggtatccgcaatctgtgcttagattatattataaagagccgacgacgagatgataatatcagttgaaatattttggttatatgttccaaaagta

SEQ ID NO: 32823 - DNA, 340 bp, Gossypium hirsutum
  Clone ID: LIB3135-006-Q1-K1-D9
gactttcaaaattcaatctcttttattaagtccaattaaaacaaaatccaatagctgtagcgttaactatggaatcaggcctttatctacaactaaaatcttgcttgcctctatttatcattattaccgttatctgttttaagaacactttattctcgggacaaaacgcaacccttatcatccttgtcaccaaactacttgtcttattataagacattaaacctcgaatcccatagcttaatctcaaacgttagtcaagaatgtattttcattaagataacaattctttcacaatatgtcatagaaagtattctttgatattttatattttacaacaaaa

SEQ ID NO: 32824 - DNA, 132 bp, Gossypium hirsutum
  Clone ID: LIB3135-006-Q1-K1-E12
tatctaaaaaataaacttttccctgtcttctttgagatgcaacataatccttcgctgcgcgggtacttcttttacatgaaccctcaaaataaatcttgaatcatttttaatcccacagaaaaaatgatatgt

SEQ ID NO: 32825 - DNA, 256 bp, Gossypium hirsutum
  Clone ID: LIB3135-006-Q1-K1-E3
tccggtccctgttttggtcttattgtttaaaaaacctttgccttagccaggggaccaaatggaagggtggttgtttttctgccaggcctcataaaatgttttcctgccttaaatacacatttggcgctcttaaaaaattaaaacacaatttttttgattgggaaatgttttcccggtggggtgttttccttcacataaaatgccccaattttttttcccataatatccctgattgggcaatattttaattgattgg

SEQ ID NO: 32826 - DNA, 368 bp, Gossypium hirsutum
  unsure (1)..(368): unsure at all n locations
  Clone ID: LIB3135-006-Q1-K1-E9
ntcaatcatacaacttatctaaaaatttaattacaaaactcatgagatacctcggtgcgaggtcaatattctttaactccaacttctaacatatatatatacccatttagcattacaaccatgtaaataaacatttttacatcattaacttatataatttgctgtataacctcttattcaaaaacaatatgacaacgtgagactcgttaaatcaactcattgtctgtgtttaatatcacataaatgctttccactatcaccattgcatattataactgaaatgtaaaatttctttacctactcattgtattcaactttaagtggcattaccatatttcttctacatacaaatttggaatataatattt

SEQ ID NO: 32827 - DNA, 370 bp, Gossypium hirsutum
  unsure (1)..(370): unsure at all n locations
  Clone ID: LIB3135-006-Q1-K1-F1
tcgcccacgcgtncgtgcgtgaactagagtcccaagagacaagcaggacagatggccctcgaggggcatgcagaattgtcaattgtggggagctgcctatagaaggctaatatctgatccgtttaaccactaccacaaatctcccattttatcatttactttctctgcttcaagatgattttacctggtaatacggacaacagtcggcgtttattatagaagagagaattttggatgatactttgtaagctcttggcaggggtgtgctattatccttatcattttttacggtgtaagtttgcagattccatcaaaactcttctcttaatggaacatctgatttttctttataaaaaatattatattttaa

SEQ ID NO: 32828 - DNA, 134 bp, Gossypium hirsutum
  unsure (1)..(134): unsure at all n locations
  Clone ID: LIB3135-006-Q1-K1-F3
cgacgccacgtcgtctcgtcccacgtcgtcncnngggaatttcaaatcaaannatctcgaccaggctacccaatagnnctatgatgtcgcccatcacgcgactatatccttatatctaactnnntctttatccc

SEQ ID NO: 32829 - DNA, 242 bp, Gossypium hirsutum
  unsure (1)..(242): unsure at all n locations
  Clone ID: LIB3135-006-Q1-K1-F8
ttcccggtcgccacgcgttcgccacgcgttcgccacgcgtncggtgattttccaaaatcaggcaacttggtatgatgattggggggctcaagattctagtgagggcagcaagaaatcactttcagcattcgccaagggttaaaagggctgttacaaaagaaagagatttgctcaaacaaacacacaggtgtctgataaaatataaaatgggccttcattggggaaatattggcaaaaaaata

SEQ ID NO: 32830 - DNA, 274 bp, Gossypium hirsutum
  Clone ID: LIB3135-006-Q1-K1-G1
ggaaatttatggttgctttacttagaattaaccaattgatagtcttttaaagtaaccgagggccttcttcttcaacccaagattgaaacttgaaaggtctgctttatctaattcagttgtcattgttggtaccatgggtgtctcaggaaaatggatcaaagcattggttggcttgaaaagaacagacaagtcacaatcctcggagaagaaagaaaatagggcagctactagcaaatttcgtcaccgaaggaagcattccattgagttttacaca

SEQ ID NO: 32831 - DNA, 366 bp, Gossypium hirsutum
  Clone ID: LIB3135-006-Q1-K1-G10
aaaaaaaaccggctccacccacacgttcgtacacacgtacaaataccttcttctttctgattacaccctattcaaacaatatattgtccttttttaaaacttttatgcctcgttatacaacattcaaaaatatttaccatcattttttttcttttaccataccctttctcacaatatatccttcaaacaccttagattatatttctagcactaccataatcactacctcttacaatatttctattattcatccaaaatctcacataaaccccaaccactagtcctaaactacattatataacacccaatccccatatctaacttcatcatattacctcttacaatacattcaccccatatattcaa

SEQ ID NO: 32832 - DNA, 172 bp, Gossypium hirsutum
  Clone ID: LIB3135-006-Q1-K1-G9
gagaaatcaaaacttccctcaaaccttaactctaaaaccatcactgctaaaccctcgtctcgttttcaactggtcaaaaccccccccaaccagcataaaaaccactgaacatcaaacaaaagcttaaactttccctccatccctgttaagcccaaaaaacattaaccacacc

SEQ ID NO: 32833 - DNA, 444 bp, Gossypium hirsutum
  Clone ID: LIB3135-006-Q1-K1-H1
ttcattttaaaaaaaatttaatgggtaattgtttacggcatcaatcatcaacacaatgggccggcgacgactggggaacaacggtggctgactacggcgaagacgacgggttttccgacattaaaacgaaagaaaagggtattgtaggagatcatcatcaaaaagatggttttattacaacatcttcgactccaactgttcatgaagttaaagtgaagataacgaagaagcagttggaggaattattaggtagggttgatgtaaaggagttatcagtacaacaggttttagcacagttgattaatgttagtaatcaatttgatgaaacaaatcaacggtcatggaggcctgcactacaaagcattcctgaggtgaattgagctggtcatgaagaaaaaaaaatgaaacccagaatttttgttctttctattgggcgtggggggg

SEQ ID NO: 32834 - DNA, 222 bp, Gossypium hirsutum
  Clone ID: LIB3135-006-Q1-K1-H4
cccatcgttcgatccaaaccttgtttagcgagagtatgccgtggctctacctcttaggggggatggtattgaccttgatgatcgcattaccgacctacatactagcccttttgacttcaattaggggggtgttcttggcaattaaatcccaacgaatgtcagtactgaacttgtatgattacatccacattgtttgcttattaaccccctctttgcccccag

SEQ ID NO: 32835 - DNA, 269 bp, Gossypium hirsutum
  Clone ID: LIB3135-006-Q1-K1-H9
aaaaaaccgacccgacccacccgtccggaaaaagaccaagctacttctaaatatttttctccaccataactataatcaaccctgtccgtttaaaaaagtgctcgctcccaacacaccccatgttacctcacacaataactcactctcttttacagaaaccaaattcctcttaacaaaatataaaattcccattcttccaacaccaagactactactatcaatcctaactatacccagaaaaccttatctacaaaacaatctcacctttt

SEQ ID NO: 32836 - DNA, 232 bp, Gossypium hirsutum
  unsure (1)..(232): unsure at all n locations
  Clone ID: LIB3135-007-Q1-K1-A10
gcgtacgctcctncatcttatgctgacatgtcaaatcttttattatcatgccccatacttgangcactgcatggtttccatacacctggggcccctcttcataaaaaaaacagcattctattttcaaaaccacccctcattgtattaccaacactagccaaatttacaaaaccatgtgcatcccaaagaccctcaatacacgtgcacatatatatgcaagaaactcctcaac

SEQ ID NO: 32837 - DNA, 308 bp, Gossypium hirsutum
  Clone ID: LIB3135-007-Q1-K1-A11
cgcgtccggctatcttacttttattcaatatcttgttattcagatactaacaaaaattttacacgaaatgacacggcctaattcgctaaataaccaaaacccaattgcatcattacctatcacacctaaatgtggtgaccgcacaccatcatgatgatgacaacacttttgacaatgatgaggtatccatctactatgactaccctatccactatataacctacaaattattcatactatcggatcacaaactatatccagcaccccttgattcactgaccctttatactatattatcatacacaatg

SEQ ID NO: 32838 - DNA, 349 bp, Gossypium hirsutum
  Clone ID: LIB3135-007-Q1-K1-A2
cccacgcgttcggctaaaatcaggtggccacaatgttaccgccttagacctgagtggatcgggggttgatccacagcaagtcaacactctgagatcgatctctgattacataaagcccttgagagaattcatggcatcgttacccgatgaataaaaagtggtgcttgttgttcacagtttatgcggtttggccatctctcaagcaatggaaatgtttgcggaaaaaatctctgtagcagtttttgtgacagccctcatgcctgttccaacactcaacgcttccattctcactcagaaggtattacgtgatctacatccacacatggagaaccattatacatatgatgat

SEQ ID NO: 32839 - DNA, 324 bp, Gossypium hirsutum
  unsure (1)..(324): unsure at all n locations
  Clone ID: LIB3135-007-Q1-K1-A3
ttatcnataatgtatgggcttaacattgatacatttttttcaaacaccagtacctgtttaatttggctaaattgcgaactctctcaccaccacccttttgtaactaagattcaaaacacctataacctttaactcgcccaccaaaaacctttattgctactcgcattcaaattctatattaatctgatacttcctacaacaattgctgttttgtagatgcgtacacacaagatctatcccatataaaaaattaagtctatcacaagcctaccaaccactaatttagatttcatctctttgacataaggttacttaatcacttat

SEQ ID NO: 32840 - DNA, 130 bp, Gossypium hirsutum
  Clone ID: LIB3135-007-Q1-K1-A7
gccgacccacgcgtactcccacacgtccgcccaattaattttaaagtttttagcaaacacaagtacttagtccattgtgagagattggaaactgtttaagcaactcccttttgaaattaagaatccaaac

SEQ ID NO: 32841 - DNA, 410 bp, Gossypium hirsutum
  unsure (1)..(410): unsure at all n locations
  Clone ID: LIB3135-007-Q1-K1-B1
cacgcgtgcggttttgttatcnataatgtatgggcttaacattgatttattattttcatttctctgtatttgtttaatggggctgagggcgtctccttccaccaccaccctttggtaactcacatccaagcccattcttaccgcttgtacgcacgccaaatcctttgctgcaaacgtcgtatggattcgattattgacttccaatctaaaacaaagtatctttccttctgagtccctacaaacaatgcctattccatatttaaatatttgcttgtcaaaggccccatcaaagtacattatgatctcatctggttcaagtgggctccaccgttctactatcctttgacctggtaatatgaggtttacctcttaccattccctcatatatttgtaaataagaaaaactgtgt

SEQ ID NO: 32842 - DNA, 258 bp, Gossypium hirsutum
  Clone ID: LIB3135-007-Q1-K1-B10
ttttattatctttgtactagcttttatttcttatatcccgaataatccaaatgctgagttatattgattattatacatcccacttcttattacttaagttattttggaacaactctaataccacactgctaaattcatcttaatatgctctatgatgtgttctatctcagacaaccattttagtatataaattatctatgattaaactatcataaatgaaaagaaactttctttatactcatcataaaaatattattt

SEQ ID NO: 32843 - DNA, 210 bp, Gossypium hirsutum
  unsure (1)..(210): unsure at all n locations
  Clone ID: LIB3135-007-Q1-K1-B12
taaaatttttcaaactatatcaaaataaatacttattagagatagtttaatatttgataaactccacccacatnntaaaatttttatttaagttaccctccttcaatcacacatccacaactatcatattttcattcacctcgttctaaatacacagatatatcttaatcatataccttataaattcacaatatccctacctcacacctt

SEQ ID NO: 32844 - DNA, 223 bp, Gossypium hirsutum
  unsure (1)..(223): unsure at all n locations
  Clone ID: LIB3135-007-Q1-K1-C10
aaatctcaacatctacctaatttccaatttaaacttaccaatcnanaaataagcgtggtatacattcatgatccacaactccccccacacatttcttcttatttgattctccactaaaatcccaaaattccaacaacaattacctaatttcatcaattccttcgatctattcaaaaacattaacccttactaagcctgctcatacaattacaaataacaatct

SEQ ID NO: 32845 - DNA, 376 bp, Gossypium hirsutum
  Clone ID: LIB3135-007-Q1-K1-C12
gcgtacgaaacctgaaaatgttcttgttatacaaaatattcatattatgctttctcacacccatccttgccttggttgtactgttagcccgactcttctcaaaacgacttctctcgaatctcaccctctaaaaaagaaccctgttcattctctacaccctgctcgcatacaaccttcgtgcattcaaccatcttgccttgtcccaacaacatgcttttctcccccactcttttctaacctgtccagcaaagacctcatgctgcaaaacgaacttgtaaccaactgagtcctttacctgaactaataccacagccaaccaatgcacgttcaatgacattcatccggacacatcattactccgctccagacatcatca

SEQ ID NO: 32846 - DNA, 338 bp, Gossypium hirsutum
  unsure (1)..(338): unsure at all n locations
  Clone ID: LIB3135-007-Q1-K1-C3
cggtggatgaaaacattattcctgatccctatcagttgtgcgatgattttgaagaagctctgaaactcatgaagaaaactatcgttgctgaaggtctgataaagaagtgatttagaagggtcgtttcgagtttcagtacgtagtgggctgtgtggccataataaagttgcttaaatatctctaggattggcgtgtatgctttggttagttttcataccatgccatcatgttttgtgaactatacttactataataagcaaataaagtttggacttggacaacaccatgnaaatcctacttcacatcaagcgatgattactttcatgccttaaagcaag

SEQ ID NO: 32847 - DNA, 399 bp, Gossypium hirsutum
  unsure (1)..(399): unsure at all n locations
  Clone ID: LIB3135-007-Q1-K1-C6
aactaaccttaaccttaatttangaccttaactcatcgacattatcaggggtcaattgggtatgttttcacactattcaaactcaataaatatgaattctacgtactgactgaacacaaagcaaaaacctacataaatcttaaaaaaagcaccacaccgaaatatatcctgcaaccacttttccatctaaattattaaacactaccattgaccaaaacatacatagaatattaatcaaactgatacctccaatcactacactcaaggtggtaggctacaaatctctctatattatttacaaatagaattcaaccattttaaaatctacagcgaactaatacttttaactacttatacacatattacaacgcctttacccaacacaatacgacctattta

SEQ ID NO: 32848 - DNA, 311 bp, Gossypium hirsutum
  Clone ID: LIB3135-007-Q1-K1-D10
cgtacgggcagtgaatgtatacagcgtatccaatctgtagcttatcattttatagatgtctcttgcagttcagtttatatgatcgctgaaatgattaacaaggatggaatacacatccttatcaacctgaatgggtatactaagggtgcaaggaatgaaatttttgccatgcaaccagcacctatacaggtttcatatatgggattccctgggactactggagcagattacattgattacttggtcactgatgagtttgtttccgtaaacctttagttactcataaatctctttaacacttggcctttaaa

SEQ ID NO: 32849 - DNA, 412 bp, Gossypium hirsutum
  unsure (1)..(412): unsure at all n locations
  Clone ID: LIB3135-007-Q1-K1-D11
tccaccactttcacaaatcttcctttactctccgaatccaccactccctagctatgtacactttccactctagaaacctcccccaactttctcctttttctcaatcttcttcctattacctctttttcaaccaatcttataataacacctcttataatttactaaacaactcctcttctatataatattttcttctccacataattnttctcaccataatatatttttttttacaaccattacaattacaaccaccaccaccaccaccaccaccacaacaatattttttcatctttcttatatgacccattacaacattaaaattattcctaatttttcatcaaaactatataatcattcttccacaccatccttttttaccactcaaaaattttattattccctttaatct

SEQ ID NO: 32850 - DNA, 186 bp, Gossypium hirsutum
  Clone ID: LIB3135-007-Q1-K1-D4
agaccagtctgtgctactagctaccaccaagactaacaagcataacaaaccgtctaccttgcgtcacaagtgtgccatgaaaaaagactttcccaatatggccaacgctgtcaaaaaccacttgacacacaactactacaggccatacttaaccaaagcaacccttgcaaagctgagtgctttgca

SEQ ID NO: 32851 - DNA, 294 bp, Gossypium hirsutum
  unsure (1)..(294): unsure at all n locations
  Clone ID: LIB3135-007-Q1-K1-D5
cccacgcgtacggnaccctctcattctcctaccatattcgacttaaccatcaacaaccaaatccgcaatattgtgatatattaaaataataactccataccttaaaaacacataactccccactctccaacacccattaaaattattccaaaatcaaatgatggccttacaaacttgtctaaccctgaccaaaccacaattaaatccttttctaccttctttatactacaaagcttgttgcaaaacataaatctctgaaaaattgattcagcattctcatcaataattccccta

SEQ ID NO: 32852 - DNA, 270 bp, Gossypium hirsutum
  Clone ID: LIB3135-007-Q1-K1-D9
ataggaactctctgttcgcacactactattgctttgcctgcgacaaccgtacactgaagctctggtttaattccatcatgcaatcaagactattctttccctgcacctacttgtcaccaaacaattatacttggcgaattgctcatgcaagagctaacagaacctaatcaaaccatagctcctcgctcaacatactcttacactatcaaaattcaatccccagaaacctactgcttcatcaacaattcaacctattagatgcaagtatat

SEQ ID NO: 32853 - DNA, 236 bp, Gossypium hirsutum
  unsure (1)..(236): unsure at all n locations
  Clone ID: LIB3135-007-Q1-K1-E10
cccccaaacccatcntttcaaaaaattaatatttctctattttccccnaaaagactaaccttcctccatggatgtcccaaacctgttattcacaacgattttaaaacatccaatgttcttctttatttttactacaactcaaaactatcttatttctgtttaacaaaaactgttcctcaacgtgataaaactcatgtatctactctccccatattcacctattgttatgcttcacc

SEQ ID NO: 32854 - DNA, 201 bp, Gossypium hirsutum
  Clone ID: LIB3135-007-Q1-K1-E12
tattcatccccccactcatccaatactctttctttttagacattacgaaaaccaacccatgaccagtcttaatattaccataccccaccccccaaaccaaatatcacatttacaaccctcagtaaaacaaaaaatactcacccacatatttaccatccaaataccaatccaatcttactatacacattctcttcactctca

SEQ ID NO: 32855 - DNA, 313 bp, Gossypium hirsutum
  Clone ID: LIB3135-007-Q1-K1-E3
ctctcacatatagagtttaacgcctgtagaattcatttcccaccttatatcacatgatatcgtgtatatcgcctgtataaaaaactcaattttaaatacatacaattacaaatcaatatatatatattaattactccacattactatttcttattcttccatctaaatatcttattttaaattattcattattataaacattatatataacgtttattcttaaacatcctttttatatgccttatttataattaaaattctatctattgcctatcaaaaactctttatacattatttattttataccataaat

SEQ ID NO: 32856 - DNA, 106 bp, Gossypium hirsutum
  unsure (1)..(106): unsure at all n locations
  Clone ID: LIB3135-007-Q1-K1-E5
cccacgcgtccggngaaaggaacgcanganacctngaacaacatacaaaatgggttatatggccattactgcacattaacgaaacttcaatgataaaaccctaaaa

SEQ ID NO: 32857 - DNA, 387 bp, Gossypium hirsutum
  unsure (1)..(387): unsure at all n locations
  Clone ID: LIB3135-007-Q1-K1-E7
gacccacgcgttcgnnaactcttctggctcaaaagtatgatgcgctttgaatataattcctgaaatggccaacatgttaatgtatacaatcacaactttcctcccttataacaagcaccacaagttactgagtttctccgtcaaaatattgaattattgctttcccgtacaatcaaagagatgcaagaatgacctacacctaacgatttcagatcgcatcaattgaaaacaatcaatgcctcgctcaacttgagtaaaacaattcatcttgaatttaaacctgctccttataacttgcagaatatttctcttgactgttttgcttactcaatcatttttgcagagggctgaccaaaataaaagaaatttgaaaaatccaagtttctc

SEQ ID NO: 32858 - DNA, 355 bp, Gossypium hirsutum
  unsure (1)..(355): unsure at all n locations
  Clone ID: LIB3135-007-Q1-K1-F10
cctctacatcgctggtcttcagcatatagtattctcagagtggtggantccgccccgtcggggtttccaccctcattgtcggcttcgacccctacaccgacaagccagcgctgtaccagaccgatccatccggtaccttctctgcttggaaggccaatgccacgggaaggaactccaactctatgcgtgagttcctggagaagaactacaaggagacctccggcaaggagaccatcaaacttgctatccgtgcacttctataggttgttgaaagcggtgggaagaacatctaagttgcagtgatgacaaaaaaagactgtctccgttaactcgaagagtctgagattgatgagta

SEQ ID NO: 32859 - DNA, 219 bp, Gossypium hirsutum
  Clone ID: LIB3135-007-Q1-K1-F12
tcctcaatttccccttccacccctacacctacaatccacccctttaccatacccatccatcccctacccttttttcttgaaaagccaattccactataaaaaactccaactctatacgtcaactccttcaaaataactacaattatacctccctcaaatataccataaaactttctatccttccacttctaaaatttcttaaaaaacttgctaaaaaca

SEQ ID NO: 32860 - DNA, 328 bp, Gossypium hirsutum
  Clone ID: LIB3135-007-Q1-K1-F3
cccacgcttccgcccactcttccgcccacgctttcggaattataccctctgccaactgctaggccaatatgtagcttgattctgtattatgaatatacttctgtatggcagtcgaatcaatatttctcctgcatttcttatatgcttctatggaagaataattgttcataattttggctttttcttctcttgggttactgtaaaatccatttggagattcaattattgtcttactgttatgcttctttaatttgtctgtcgtcggctgctttagattttctgaaagatatgttcgactcatttctgttatcatttgagcatttaaagt

SEQ ID NO: 32861 - DNA, 377 bp, Gossypium hirsutum
  unsure (1)..(377): unsure at all n locations
  Clone ID: LIB3135-007-Q1-K1-F4
cttttggctacgattgccgggttgcggatattcccctaacagctgattcactagcgagtgggccaacaggtcttactggaacagaaaagactattctccagagggggcccctcttccttttaggagtcacaatgtaaattcccttgatcaacggccatatttttagcacactggacttaccggccttatgcctccgaaaaggtactattctctagtatactctttctttatagttcgccagcaaggcattttccgaagcaggcagggctagagcgggggaattggccaatgctaagtgatctcctcgcccaaagaaaaaaaaataataaaaaatagcanaaataacanggagggctgttgacagggacttttggcta

SEQ ID NO: 32862 - DNA, 299 bp, Gossypium hirsutum
  unsure (1)..(299): unsure at all n locations
  Clone ID: LIB3135-007-Q1-K1-F6
aactttgcctactttaacaccaaacacgcctccccacacnnatcccctcttccttttaatagtcacaatctaaaatccctacatcaacccccataaccataacacactctacttacccaccatacacctcccaaaaagcactatcttctacaatacactatccttatacttcaccaacaacacatcttcctaaacacacacatctataaccaaataattggccacaactaaatcatctcctctcccctcgacaacatcaaaacataatacacaatccacaacctttaggcctttttaca

SEQ ID NO: 32863 - DNA, 286 bp, Gossypium hirsutum
  unsure (1)..(286): unsure at all n locations
  Clone ID: LIB3135-007-Q1-K1-F8
caactcttttcngactcatttcggacttattgatcacatctgatcaggggctctttgtctcattcattcaactttccgagtttcaacttccaattctcatccatccgttctactgccactaaaagaaatgttcgtactaaacaactaccttcgctctatcatctatcacctattataaaatcagaagaacattcacatttaaacctctccacttctactgcagcgaaagccttccatgtatatgtgtaaccttatcttgcatcgaactaaaacccaacccttaacc

SEQ ID NO: 32864 - DNA, 232 bp, Gossypium hirsutum
  unsure (1)..(232): unsure at all n locations
  Clone ID: LIB3135-007-Q1-K1-F9
ggggcgacccacacctgcgaccgttttcctacaactacatctttctattttcccccatttactttcttnactgcaatgtgttcaatcttctttctcaacacctncnccaacatcccctccttttacctccacacctttcattcttacccactattcattttcaaccctttctacacatccatcaatacttcttacccacatatctattattccacattttacttcaactaaa

SEQ ID NO: 32865 - DNA, 307 bp, Gossypium hirsutum
  Clone ID: LIB3135-007-Q1-K1-G10
cgcgtccggatttctacaatattggttgtattgaaactttcccattctcgtcgctttaaactcccatccgtattgcttgtatggcagataccccctatccttcagaattaaccactgcactctaactacgataaattcaccatcaggctctttcccacgctcttcctggtcacaatttctaattcaactttaacaatgtccccttctacgatctcaaactacgattcctttcttctaactcatattattacccatcgaatgaagcagccaactttacctaccaagtcatcatcattaactatccttt

SEQ ID NO: 32866 - DNA, 378 bp, Gossypium hirsutum
  Clone ID: LIB3135-007-Q1-K1-G2
gaccgacgcgtacgcggacgcatgggctacattcctgccattgcttctcacagatcaagacccataacacgttcaggtgcccttagattttacattagatcctcttctttttttctcttcttttattttttccagagtgggagagtttggaaactaaaataaaaggaataataaaatgacgttactgtttctgtggtggtttcaattaccatttgtagccaatttattgactcactcggtgttggaacttgtatttttttttttctaattatattttgaatattcaatattaattacgtacaagtattgaattcacaatacaacaatcttagtactgaaatttatattataaagaggcttaatgctgatttctcactt

SEQ ID NO: 32867 - DNA, 374 bp, Gossypium hirsutum
  unsure (1)..(374): unsure at all n locations
  Clone ID: LIB3135-007-Q1-K1-G4
ggctaatangattgcgtatgcaattatttgtttgtttctgcattccatgttcagtctctgggggttagtgatccagacagtgatttactttgtctgcaaatcttaccaccatgaaaacatcgataaatcagccttgtcggatcacctggaagtatatctgggagagtatgttcctttgacggtaaaggatgttcagctagagcaatatcatgtttgattgatttgagttgaaagtacatcaattaaaataatgggtcaatgcttgtaaattgcaatagtatatcttcgaagtcatagttgtgattttgatcaacggtgttatttgtacctaatccacatatattgttgtagtatgaaagtattatttaatctct

SEQ ID NO: 32868 - DNA, 366 bp, Gossypium hirsutum
  unsure (1)..(366): unsure at all n locations
  Clone ID: LIB3135-007-Q1-K1-H1
caccatatgtacaaaatgtgatggaaagggaaagataccttgtgcaacttgtggatctcggggcttacttaaatgcaagacatgcaatggaagcggttctcttttgactcgcaaaattgccgttgttaaatggaagacactttcaactcgaaaagtgagtgcgacgagtggagcagcatcggttccggatgagattttccatagggccaaaggggttcagttatgcaacactcaggcataccagtgcacccctgcctattttgccgactctttcttcctcaacacattntcttcggatgttattgcagacagggcatctgtacctccaactgcccaggtcatatgtgagagacatacaatctcagt

SEQ ID NO: 32869 - DNA, 390 bp, Gossypium hirsutum
  Clone ID: LIB3135-007-Q1-K1-H11
gcgtcacgcccgatgtcgctgcaccacttttaccgaataacagaaccttcaaaaagttcacattcagaggagtcgatctctatgctctcttccatatctccactgatgaactcttcaatctctttaccgcccgtccacgcccaatgttttagacaagtttaaagatgaaaccaatggctctgataaaaaaattacacaaggctaaacttgatgctccacctgattagaaacccgagccaattaggacacaccttcgcaacatgattataattcctgaaatgattgatagtattatctgtgcttacaacacaaagaccttcaatcaagtggcaatcaacccacaaatgattaaccacttttttgctgaattctcaatttcctacattcctt

SEQ ID NO: 32870 - DNA, 235 bp, Gossypium hirsutum
  Clone ID: LIB3135-007-Q1-K1-H3
aaccatcaaccataataacaacactagaaggattacacgttttacaacactatttgcacatgtgattccagagaaccttaaacatcaacttacccctcttctttagccttaccaaaataccacttaagtaaccaaccctatccatcttaacaccattaaggaccctatcagtgttaactcttgtcacaacaatatcatctacactaacgttacagctctctttaaacttaactat

SEQ ID NO: 32871 - DNA, 304 bp, Gossypium hirsutum
  Clone ID: LIB3135-007-Q1-K1-H9
gaccgacgcgtccgcccacgcgttctaaaaaaaacagtattaggttataagactataagactaaaatctaactctgcggttgtcatttttctgcttgtcgtaagtcaaaaggacaagaatggtggctgacaaatgaaagaacgcgcaactagaatataagcgagtccaagagaactctgaacaaatttacaaagcactcgtctttttcatcaagaaactgctatagatccaagactggcttgagaagatcaatgaacaatctagtcaaaaagttctggcagtgaagcataaatacaaccactta

SEQ ID NO: 32872 - DNA, 331 bp, Gossypium hirsutum
  Clone ID: LIB3135-008-Q1-K1-A1
gggaagaaccacgcgtgacggacaactgtgaagctagaaaatctctcattttatttgactatactcgaacgcggacacactctttacctcgtttttggggatcgcttacacaactacttatatatgagatgtatatgcttacaatactagcgggcataaacttaacgatgataaaagataggggatccacctaaccgaaactgtttgcatacctgtaccatattccaccgccaaaatctgtcgcgtccagttacaaccataaaaagcgacgcttatatagtgcactgcttatattacatattacgggaacaaacaccgtatctgttaccat

SEQ ID NO: 32873 - DNA, 419 bp, Gossypium hirsutum
  Clone ID: LIB3135-008-Q1-K1-A11
ggtaattttaagtcttacctaggtgtgccgctcgcccgcaggcgcgtattaatacaagaagagaggctttcttatcttttttttttcattttttaaggaaagtactttgaacctagctaggagtccttctatctggaggtggcttccggcgccctatgcacgtatcaataaagcagactaggccgacttttcgcgcaggtgaaaaagaaaatccaccactcgggtctttagacactcgccctaatcaataagcgggagaggggagggaagacgaggaataaaataggacttcgattcaggatagaagatcagtggagcatgttgggtcaactagaagcatctctttgaaaaccatgggtttcatgcaatcgaatgctatgttggcctctttttgtccttagtagtggccgttgatagtt

SEQ ID NO: 32874 - DNA, 407 bp, Gossypium hirsutum
  Clone ID: LIB3135-008-Q1-K1-A12
cccacgcgtccggattctttgatgcccatgctatatggcatgccacaactattgcggttacgtgcctgtggtggagcttcattacgaaccacgcaaactttcagacttctatcctccttaagaaggctaagtagtcgcatgtaaaactaacatcatcttgtagcaccttcaccattcaaaagccttttgtcgtatcctttggcacaatgcttttacatataatatattttccgcttatttatgatgcagaaatggacatctcatctgctcactgctctgttggttgaaacttaaaaaagaccattctttgtggaagctcaacttcaacattaattctctagtacatttaaaacattatattttttttgaattgttacttgaccctcgtacgtttatcttttatttcg

SEQ ID NO: 32875 - DNA, 393 bp, Gossypium hirsutum
  Clone ID: LIB3135-008-Q1-K1-A4
aaaaccggggcgacccacgcgtgcgccagcgtccgaaacacttatccagacaccaaaaaagcttcaagactctctatcgaaaaccccatgggggctcttaaactagatcgtgctctacggaagcgcacgttgatattcgatgtcaaaggctgcgtcaacatatatagatgctgacgtacatgatgtggactgtatctgacgtatgctatcaccaaaaatgtgttctggagctccatatcatttatacagcacaacaaaaaagctgacaagtgactgtttcctatggtaaaaacccaaggcactgtctaaacacatggatgctatcttcttttacactttgacaccggggacatgaactatctaaagccactcttcctaagcttaaattctttt

SEQ ID NO: 32876 - DNA, 417 bp, Gossypium hirsutum
  Clone ID: LIB3135-008-Q1-K1-B1
acgggaaaagtgctgctgcagttggctcatctgtttgagacctgggaggaaaaggagtattcagtgatggcgggtgtagaactgaaaaagctgtttccaaacaagaagataaagaaagtaacagagatgagtttgtctgcaaatcaagaaagaggtgaaatggaaaagagaacgttagcttggaaagtagaatgcgggggcggaggatcaaagatggtaaggggaggagcagttgatcctgctaagctgctcgttgaacttgcttcaatggagatacgaactttcctgattgatgtagattacatccaactggtgggtggttgaaagacacaccaacatgtggtttttgtctgtgctaaataaatcttcatctactcaaacttaatgtaatggggttcaagctgtgtttgtatgtgc

SEQ ID NO: 32877 - DNA, 382 bp, Gossypium hirsutum
  Clone ID: LIB3135-008-Q1-K1-B3
accacgctatctaacaaattgtctcttttgtaaaatatataccatcttacattaagacaaggtttacgtgtgctgaatataaacacccataattttcttaatatctaaaaggaaatctcattgaacaacatatctttctgattaacatgaacctcagcctacaacaaacacgtatggagaatactctaactatacaccatcatgctctcataacaagattttgtaccattagaaattatttttttggataaggaccatctcatcattttaataaactcttaacaactataacttgaatacataaaacaatggggttgattaaaaaaacatcaaaaaatttttttttttaaaaactaaaaaaaatttgatttaattaaacttt

SEQ ID NO: 32878 - DNA, 397 bp, Gossypium hirsutum
  Clone ID: LIB3135-008-Q1-K1-C1
cccacgcgtccgtgaagagtgaaatatgcacacactttgttaattgtgagcttcgatccggggttattggggatagaagtatgatgggatcagatcctgcaacaacaaactatcctggaaaaatccctagtgggcttgatcttcccagtgatgttgctgatgagaagctctcgaatgatggagaaggcaagtagttattaatccgccggaatctgagtttgatatccatagcaactataacaaaataatttggtcttatgacccttaaaacatttcaaaaagagttagatcttttatattttttttatagttgctatggtcaacatatcgatacatctattgtaacaatttagctactaatttggttgcattgatacctttaaaaactactaaacta

SEQ ID NO: 32879 - DNA, 382 bp, Gossypium hirsutum
  Clone ID: LIB3135-008-Q1-K1-C12
cttactccttgtccgcacgaaaggtttaactttctgcgcactgtctcagaaagaggctctggcaaatagacatgtgtgttaagattcttactacccgcacctggacagaaagaccctatgaagcttcactgttccctgggattggctttgggcttttcctgcccagcttacatggaatgcaaacaaagcctgcttccaccggtgcccgaaccatcaatgagataccactctggaagagctagaattctaaccttgtgtcatgacctactgtccaatgtacaatctcaggtagacagtttctatggtgcgtacgcctaccaaaaggtaacggagacgttcaaaggtttcctcgtgccggacagagattggccctcgagtgcaa

SEQ ID NO: 32880 - DNA, 327 bp, Gossypium hirsutum
  Clone ID: LIB3135-008-Q1-K1-C2
ctgacatttgttacaaagggtgcattgtaatcagctgacattacaaatgaactgcagaagactgtcatagggtcggccttaacatctaatcctgccctccccctccaggattctctggttcccccaccccaggccgatacccctgtcatcttacttttactttccttaatgttgtcaccttttcatgtatataattttatgcttttttattagttaatcaatgaaatcttcataagcttgcgctgctataaaaacttatgacccttaaaacatttgaaaaagaattacatcttttatattttgtttataattgctatggtcaacata

SEQ ID NO: 32881 - DNA, 338 bp, Gossypium hirsutum
  Clone ID: LIB3135-008-Q1-K1-C5
aaaaaaaaaaaaaaaaaaaaaaaaacaaaaatttataaaaaaaaaaaaaactgggaaacacgcggaaaaaaaactgccactcaaaaatcttcccccctcactaacacattcatgcaaaatgatactcttgcgaccacatacccccaacttgaataccctggccgacctttaacacccttaacgctgcaaaaccactgcttattcctaaccaaaatgacatgccccaactaccccttctccaaacctttctatcttaaaccggacctcactaaaatacatgctcatccccttataaccccaactaacgaatgcaactcaacctgacaccgcgcatatac

SEQ ID NO: 32882 - DNA, 305 bp, Gossypium hirsutum
  Clone ID: LIB3135-008-Q1-K1-C6
aaatcttgagcccaataccatgaatagtgttagaaccgaaccttatggacaggggctatgggcccgataactatcaacttagccaatctgcagcttgtaataatttagctaacgggcattatactgaaagagccgagcttattgattctgaccttgatgttggcagaaaggaagctcagaattgaacattgactccaaggtattaaagaatgccactctcttggagggggaactgcttcgagtataaaaaactatggtgctttctaaaatcagaaaagtaaatactgatacaatcatgctcacat

SEQ ID NO: 32883 - DNA, 243 bp, Gossypium hirsutum
  Clone ID: LIB3135-008-Q1-K1-C7
tacattatacactttctatattctcacctaaatttacattaatggccggcgttctacaacgatcacatcccataaatcttaatgtcactcaccttattggcattacagaacatgctagcttcactggcttcttttatcacgaagaagatcgtacaactaccgctactgaacaccttcgtagtcttaatcccgaactccatgcgttccatgttcatgcacttagcgccacaactaaggtgtgca

SEQ ID NO: 32884 - DNA, 166 bp, Gossypium hirsutum
  Clone ID: LIB3135-008-Q1-K1-D3
gttactgagcaagagttagaagataacgacatcgcttcatcagaaaccggctctgagtctggtacttcgaccactttcaacagcatcaaactctctactaaaaaaggtaggagatccatacagaaaagagttgcgtcagcgcctatcatggatgtagaaagttctc

SEQ ID NO: 32885 - DNA, 299 bp, Gossypium hirsutum
  Clone ID: LIB3135-008-Q1-K1-D4
gcaagggcggcaagcagaaaataaaaatttctttctcttaaggaagactccgggtttgcagggcctctatcatattctttattctctttctctataccatatgctttttttccgggcaagcaagtagtgattttaggcacgtaagcccctaaaatatatataagtgctagtttacagcctttactttctcccttactagcttagatttggagtttctttcgatcgacatcactcgtgactcacgaagggacgaaacttcacttgctcaaccaacaaagagaaaaggaggactttctgca

SEQ ID NO: 32886 - DNA, 414 bp, Gossypium hirsutum
  Clone ID: LIB3135-008-Q1-K1-D5
cttcaaactaatgcagcagttggagaagacaaaacctcactttatttgctgcataaaaccgaatcgcaagcagctccctggcatgtatgaagaggatcttgtctcacagcagcttagatgtagtggagttttggaggctggtagaatgtctagatctggatatcctactcgaatgacacatcaggaatttgcagacaggtatggtttcctgctgttagaaaccaatgaatctccggatcctttaagtatttcagttgctgttctaaaacaatctaatatactccctgtaatgtatcaaattggctacaccaaactgtatcttcgaatcgggctgattggggtattggaagataggagaaaacaggtgttgcaaacagggtgtaccaaaaccattgcttgtgttctaacatttat

SEQ ID NO: 32887 - DNA, 384 bp, Gossypium hirsutum
  Clone ID: LIB3135-008-Q1-K1-D6
cctttggctgctcatgggtatcatcggcgttcacgcctctacctctgtcgtggctcatgaggcaagtcgcgtaaaaacaagattagacccatttacttcctttggtccgatatccaagccgaagaatagcctccgacgattgaaaccgcaggtaaaccaccgtacagagaagcggacgtggcaatggtgctggagacccttgctgaggatgttgtggcgctggccctagggtttcagtctctgaaaccgaaagttgggccatctggtcattttcaattgggttttgggttaagtttatttaattgggttaaagatttgtatttgggctaggattaggccttggtcttatttgggcttcaattaatgtttgggtctttgtgtttc

SEQ ID NO: 32888 - DNA, 288 bp, Gossypium hirsutum
  unsure (1)..(288): unsure at all n locations
  Clone ID: LIB3135-008-Q1-K1-E11
tcaatcatncacttctttttttcttttaactcaaaancccaacttatatgataatgattaattttaacacttattactattanaataccttcccattctccccatccattcttttcaaatcccttactttttaatctcctaaaatttttcccacattttcaccaaattcattcaatagcattttaatttaaactaatcctatctctttaaatatattaaaaatcaactttttttatatccttccatttcaaaatattaatcacctcatcttattacatcattaaaata

SEQ ID NO: 32889 - DNA, 297 bp, Gossypium hirsutum
  unsure (1)..(297): unsure at all n locations
  Clone ID: LIB3135-008-Q1-K1-E4
acccacgcgntgcgaggaagccctaccagaaatacatatcaaatggtctcttatccgctttcaggacatacacaccagctcgtggatattcgcagggctacaccaacaacaacctccttacaacaagagatcaactgacccaataaatctgcatttcgtgtattggtgtttatcccaccaaacaagcccaatgccatacattaaattttgtttaacaattggagcaaactctagcttattatcatgctacttacaacgaaaatcctactattacatttatgcccgaatttaataaaa

SEQ ID NO: 32890 - DNA, 278 bp, Gossypium hirsutum
  Clone ID: LIB3135-008-Q1-K1-E5
aataagtaaaataaatcattttataatgagtttttttttgttagtaaaaagaggtctatgggtaggttaattacgcaacataaaaatgttatcaaacctatacattaataggtataaaatcgaaagataaaaacccattgataattatcataatcaaacttccataccattaaatgtataccgtaaacaaattgttagggtatagtcacacaatatgataatctggttactatgtctaattatagattgcaacgcaactatatataaaagagttgtta

SEQ ID NO: 32891 - DNA, 397 bp, Gossypium hirsutum
  Clone ID: LIB3135-008-Q1-K1-E6
ggaactcactaaagggaccagttttgtcagcttgcattgaggcaggcactcagtgcatactggacaagtggggactcttttttgaaacataatgccccgaacgacgtaaggagaaagtctagcttaaaaagcgatctgccactttaaatatcttacatatctgtaaactttaatgaaagaaaaagaatctatttattagattgaacactgggaatgaggatcctaactccaagcgcgttactgtgagccctgcacaagctggaaaagccaacgctcttgctaatgctgaagatctaacacaccacgtttggtttgaaggtacagataccttgaaccaaccattccctgatgaccaatttgatcttgtttgggctattgaaagcggataacacatgcc

SEQ ID NO: 32892 - DNA, 339 bp, Gossypium hirsutum
  Clone ID: LIB3135-008-Q1-K1-E9
gttcaatcatacacttgttcttttcttttaactcaaaatcccatctcatatgataatgtattattttttcacttattactataacaatacctccccaatcaccccttccaaacttttcaaaacctttactctttaaactcctaaaatttttcccacttcttcaccaaattcattcaagatcattaatatttaacctaatcctatcttcttaaatatattaaaaatcaactttttttaaaaacctttcatttcaatatattaaacaccacatcctaatacattataaaatttattttttatacacttactatttaaattataatgtttccctttttttta

SEQ ID NO: 32893 - DNA, 381 bp, Gossypium hirsutum
  Clone ID: LIB3135-008-Q1-K1-F1
ctgagggtggcatttagctttcaacaactgctcaatcaaacactcaaagaagtgaagtgggggctgatggggaagggaatacaattctgaataccaaatcggaaagttctgtgaagactggcgctcatgtcatatattccaaatatacctgcattgaggtcaaattcaatggtgcaaatcatattctgctaaaacaagatgacattgtatgacttcttgaaaccgatgacataaaagatcttaaacctctgaacgacagatatttaattaaagtgttggaagctgacgagaaaaccactcgatgattcttgctggccgaggcaagctaacaaaaaccttccattggaaccgtgatagctgttggacctgtgtctttacatg

SEQ ID NO: 32894 - DNA, 332 bp, Gossypium hirsutum
  unsure (1)..(332): unsure at all n locations
  Clone ID: LIB3135-008-Q1-K1-F10
ccgggccgaccgcacgcgtacgcnaacaatatcccttccagaaagaatgaatttgatcacatcgcaaaggtggaatcgctcttgtcatcatagaccttaagttatgctattaactggccatttgatttaatcatcaaatggcaagtctgaaaccatttcccgtaccccaattttttgtttcttttttaaagttatgttgtatcctggtgcaagattagtttgttcatctgtttatgattgcaactcttttggtagtagtggaatgataagttttgaacacaagaaaaactttttttaaacttataaacaaaaatataaataaaataatatat

SEQ ID NO: 32895 - DNA, 440 bp, Gossypium hirsutum
  Clone ID: LIB3135-008-Q1-K1-F7
gaaaaaaaaaccgaccggcgcgtacgcactatatggataatatcttttttgactcctttcttaattctcccgctgacgcgtatattgtcctaattaatccgatctgtcctataaatataaattaaaacattttattggccaataccgcaaagattgtggaaaaaaacaacatctgtaatagtaaagatcatctttgcacgaaaatggacactaaccgattactgaccctttgatatgatgcttctatctgcaaatcttgatgagaaaaatcttcctcttgcccctccgcatttgagtactaatacatatacttgatacttgagggagaacgattgttgatcgacaccgatttcacatcacagttcgaactcttccgatcaactaatacttacaaatcaatcctccaaatgcttcccttcatctttcatggcaaatctcat

SEQ ID NO: 32896 - DNA, 439 bp, Gossypium hirsutum
  Clone ID: LIB3135-008-Q1-K1-G10
cgggccgaccgacgcgtgcgtccatatcttcactgtctcactctctccattcttcactccagtttctcctttccgggttcggtgaaatcattcttgaaatccttcatattcaacgtagccaatgcggcaaccaaatcagaaccacgttctgtgaacttgttttttctgaacatagcataaatgcaacttggcgttaccaaagagacttgaatcttcaacttgcgcgaatcaatgtctactacaatgaagccacgtttggcagattccttcctcgtgctaatctcatgcatcttgaacctcgaaccatggacagcatcacatctttccctgtcggtcagatttttagaccagataacttccttttttgtcaatctggtgcttgaaacaactgtactaatggccattacacataactgtctgactttatagatttcgtact

SEQ ID NO: 32897 - DNA, 442 bp, Gossypium hirsutum
  Clone ID: LIB3135-008-Q1-K1-G11
cccacgcgtccggtgatattcaagacaaattgggtcactccctttgccaagagcttggaagagagaacatcagctatgtccacttatgtaacatgcgaatctgatgtcgaaaatgctgtaaaattagcagtttctaagcatgggaagctggatatcatgttcaataatgcagcgattatgggtgagaatgaggtaaaagtcagcgagaccagtctcaaggacttcaaaacggtgcttgatgtgaatgtgttgggtgcattcctgggtgccaagcatgccgccagggtcatggttccagccaagaaagggtgcattctcttcacagcaagtcttgcttcaaaaatttgctatggaaaattcccattcatacaaatcatcgaaggttgctgtggtagggttggcaagagcttgagcgtggagttaggtgagcatggaattaggg

SEQ ID NO: 32898 - DNA, 372 bp, Gossypium hirsutum
  Clone ID: LIB3135-008-Q1-K1-G2
cccacgcgtccgcccacgcgttcgacctcttgaaaccctagatctctaccaagattcacctcgtgtaatggagcaatagcctccgtagcgaaactagtacgtatgttgttgtttattactgtattcgaagccaccactctactttcccaattttttgacaactatttcggtgcaagaatgcttaccactcccatcaaacactgtgctaaagttaagcttatggaaaggaaattcaggaggcctccatcgctcactccctacttattttgcaggtacatttctaaattttgatgctgggttcggcacgccggaggtctcgaaagtacccattttaaataattggtctaagcattgctttgaaaattgaaaatt

SEQ ID NO: 32899 - DNA, 304 bp, Gossypium hirsutum
  Clone ID: LIB3135-008-Q1-K1-G5
cccacgcgtccgcccacgcgtccggccaaacttctagttctaaacgttcttcggaaagctcgtctggttcacgataatcacctgccaacaatgaagaaaggtcttaactattcttgttctcgcaaatttcaataaattgagtgctaaactcatttttggatatgacagctctgctattatagacaacatagtgtctactgcttaaaacttatgtggtactggatcattctgggttgaacctttctttttatcctagtattaccaccaacggactatatacattccacaatcatcatctagaaac

SEQ ID NO: 32900 - DNA, 439 bp, Gossypium hirsutum
  Clone ID: LIB3135-008-Q1-K1-G6
ccaaatctttctacttcctttatgtttacccttatttcacttggatcatggggcccaaattgattaacctccattacacactctccaagtcccaaactatcaaatacaccgacccgctttccaatttaacctacactaatttgttcgaccaaatagttgactcgcatgttttctcacaaaaaagactcaactacccgcatattataatcttaatggcggaaacagcatgaccaaatccctgctaaatcaatacaaaactagccaacctttacaaaactcgttactcacaacctacactctctaaaatatttaacatttcacctttcaattatttctcctaaacaactcttataatatttacctactatcatataagctttatataaaataaactatatactattttctgacatctaatttttaactactatatcttttt

SEQ ID NO: 32901 - DNA, 361 bp, Gossypium hirsutum
  Clone ID: LIB3135-008-Q1-K1-G9
atgccaaacaaatttctagggctgttatattctacatttaaaagatactcaacaaatgatgctcatgctgctttttatcactctttaacttctcttgcaaaatataacattccatccctcctatgcaactcatttactctatcggacattgccttcataccattcttcttatatttccacaccttcttatcatatacgatcaatcattacacaactacttccaaacctaaattttcctttttgattgatgcttctgacaacatcaattcctataaactgtcttcgaaaagttatccaaaacaattacctgcaaatttcattaaattatattctcaatcttataattctaatttttattttt

SEQ ID NO: 32902 - DNA, 273 bp, Gossypium hirsutum
  unsure (1)..(273): unsure at all n locations
  Clone ID: LIB3135-008-Q1-K1-H3
cggacgcgtncagccacgcggncacctgaaacacctaataatgttattaccattcctctgagcctattttgatctatgttttgactagtccttaaaacttaactggaacatgggacgccctaatcttatccattatggcctgaatagtgacatatctgggacataaaacataccattaatggtcacacacctctaaaaggaaccaaatgttgcctgttactactgagcgaggtactaagccattgatggcttgcttgagactggcaaaacccc

SEQ ID NO: 32903 - DNA, 398 bp, Gossypium hirsutum
  unsure (1)..(398): unsure at all n locations
  Clone ID: LIB3135-008-Q1-K1-H6
gacagccctcccaactcacccaacactagtttaacaaatactacacctcctcgtggtccttgtgaagcacttcttgatccattaaacaacctaactgctataacacagaccttaggctgatcttaaacactttacagtaccaaatccaatgccgcgtggtgacaattgatcggtcaacataaactggcatctttattcacacttctatccaggattgagaactaagatcacaatattaaactgggatgaaaccgtcttccatgattgacttgatgctgtacagntcaataacgctacccccaggtttcaaaacatatacttcttacactgaacatgcttggacttgaatggcgttcacaatactatattcatgccaggtctttcccaatcaactatat

SEQ ID NO: 32904 - DNA, 294 bp, Gossypium hirsutum
  Clone ID: LIB3135-008-Q1-K1-H7
gctacctctttttccttgatcatttaaacttttatctacacaagctcgccgtcgatctcttgccagtctctaaccgacacttcttcataccaaacttctctccacttacttaaccaggatctcagtaatacactactattacaatttctgagctctctcaataaatattgtataccattaacataatatatgcttctgaacatcgacatcgacgatacttcactgaatcaaccatattacgattcaataacaacaccacagaagtctattaactaataactaatgtacaaaatt

SEQ ID NO: 32905 - DNA, 317 bp, Gossypium hirsutum
  Clone ID: LIB3135-009-Q1-K1-A11
ccaccaatttatacaccacctaataattataatcctgaccccaaaccaccagtgtaataacccccaaataaagaaaatcctcaacctaaaccaccatttttttctccaccaaagaaagaaaaaccccaaccccaaccaccattctattgtccacctaataaatttaaaccaccctcttattatccatctaaaaaaccacccagtttttaaccctatccacccaaaccaacctcttacaacccaacaaaaaaaaaaaaaacccaacctaaaccaccatttcattaatctcccaaaaaaacacctcattttcactattc

SEQ ID NO: 32906 - DNA, 358 bp, Gossypium hirsutum
  Clone ID: LIB3135-009-Q1-K1-A5
acgcctggtatatactgaaccataaactccagatactacaacatatcagtcgaaaataagcatgctttcctatacctaacacccccacttaatcaaaagatctacccactattttcttcataccattcttataaaaaccacttataattcctaacaaccctttatattttgactttaataatagcttcaatatcgtttcaagacatcctccatactgacatttgaattctatacctaatatgaaacttccataatttagtatagaaattgtctcctcggtctgtaacattaatccattaggaacaatgttaaactgctatcatacattataatcactccttacagagaactcccctgt

SEQ ID NO: 32907 - DNA, 162 bp, Gossypium hirsutum
  Clone ID: LIB3135-009-Q1-K1-A6
cgcgtccggcttgttactactcaaccatatgatctcagatgctacaacagaataccctcacttaggcatgggtttctctagcagagacccatacattctttaaaaatttgcctgctatactcttcatcacatccgcatctaggacactcacaatttctaaca

SEQ ID NO: 32908 - DNA, 384 bp, Gossypium hirsutum
  Clone ID: LIB3135-009-Q1-K1-B10
cgcatacgtacgcgtaaagcttcacatgacctatgacattttattgtatctccatgtatatggacctcgtattaagcctcccattatatgttcaatctgtcttgaatcttggggccttgcaagatcacgagcgtacagtatttttacttctttgcaaccaaaacatgccttttatcctaatacttttaaatttatcgattgcaatactctttattctttttatttttcctcttgactatatccatttaacaaatctcccataatcaatccaaagttcccttatattgttcaccttataattcacatctatgattaaaaaaatcttcgaaaatttaaaaacctttagcctacaccactgtaactagatgaagatcttgaaccttt

SEQ ID NO: 32909 - DNA, 351 bp, Gossypium hirsutum
  Clone ID: LIB3135-009-Q1-K1-B11
gtaaaataggaatataaaaactgctcttcaatcataaatagaaaacatctaaccttcgtaacagggtcacttattaccttctattcttatcattctttaacatcacattaacatcttatttgtacatacacaaagatcattctaccccaatcctacaaccctcttctatctattatataccacgttaacccaccattatctggtgctttatcatcctgacttttttcaccacacttattaacctttaactcttttaccaacatcctaccttttttctttatccttccttatttaaataaatcatacccccttttttacctaaccacccttccttttttgcctctttccttg

SEQ ID NO: 32910 - DNA, 384 bp, Gossypium hirsutum
  Clone ID: LIB3135-009-Q1-K1-B5
acaaaacactccaaaatcctaacccttttatctaaggttgcaatcaacaaacctgcgaccggcgtaactccaccagatccggcgtctgacagtgcagaccatagcctatgcctaccaacgatggagaacttacagcctagacaactctgcaagataaagctctactctctctatctcattaaacaaatgtgaattgtttccttttactcgttttattttgtgcatgatataaatgacatagaacagaagcttaatcgaaagaaaaacgggattaaaatcaccttgaggagactttatcttttcaatgcttattttgaattgattctttttatttgtgtgaggatgttttcgtgttccacgattaccaataacatagggctttta

SEQ ID NO: 32911 - DNA, 308 bp, Gossypium hirsutum
  unsure (1)..(308): unsure at all n locations
  Clone ID: LIB3135-009-Q1-K1-B7
cgcgtccaaaaaagtanctttctcactgatgttctttcttgttatgggcatacatcaaacgcaaggattgtatagctttgacagacttatccttcttttaccattacaacaaccacttttaataacttaatttgcaaaaccttctaaatgaccctttattctcctcatattatccattgcatgctttgacatatccttttccaaaaactattattaaatcacaaccattctttgtcataataccctcttctaaccgatagacccaacattgcctatctcatatttatgtataataaaccaactcgaat

SEQ ID NO: 32912 - DNA, 198 bp, Gossypium hirsutum
  Clone ID: LIB3135-009-Q1-K1-C1
ctcactcgacctgttcctaactttaaagccttcaaagtgagcctctaacgcttttacaaaagatcgaattctcttttaaaagatcaacttccatttttctccttttttcactcaacattctctttcttttcttcaataattctcttgaatcttgctcttcacccatccataaaccaatatcaaacccaaaccccaaca

SEQ ID NO: 32913 - DNA, 425 bp, Gossypium hirsutum
  Clone ID: LIB3135-009-Q1-K1-C11
gcggcttcgcgctcctgataaaatcctctgacgttccattcgtcgcataaatcccaacaaaaccgtgcgtggttcaatttatcttgctctattcactccttatgaaaacacttcatctccatatgataatacaaacatgaaggttattgcattaacgatcaagattttgatgcttctttaaagacacaattccttctctgtggggaattctttcctaccacttctttttaaaaaatctctaaacattaaagtggcccaaaagtataaggatgaaaccagctaaaagcctttatggaaaaaaaaaaaacccaattaacctttgccccaacccctaaaagatgcttaagaaaaaattgccgcccaaattccacttttaaatcctattgaaaatttattgaaagatttttaaaaccttctcgttaccc

SEQ ID NO: 32914 - DNA, 435 bp, Gossypium hirsutum
  Clone ID: LIB3135-009-Q1-K1-C12
tgaataacccacccgtcgcgcgcatactttcatacaataataaacatcatactatcttctttttaactactattgttatgcgtggagatgattacttacttgaccagtgacctactgctttttattacacaatcccatgttcaagttcgctaaaatcgtttactgacataccctcattcagcaaattaaatcttactaattccccctaataatatataataaacaaaactttaacctttaattccatacttaattttaatctcaaaatccattactaaacaaatttataaaaactttcttaaaatttttagcatcaaaaaaaaaaaaaaagaccgtcccttttaatgatccaaacttaaataccccttcattccacatcataactcttttataatttcacctaaattcaattctccgtcctataatttacaacct

SEQ ID NO: 32915 - DNA, 201 bp, Gossypium hirsutum
  unsure (1)..(201): unsure at all n locations
  Clone ID: LIB3135-009-Q1-K1-C2
naaaaaaaaaaaaaaaaaaaaaacaaaaaattaaaaaaaaaaaaaaaacaattaaaacaaaagaaaggaaaaaagggcaccctatctaaaaaacccaancttactttatctgacataacaatttttacctctcttataacgtcatctactttcattacactgacctatcttttacaacatctccaccgataaaacccttcc

SEQ ID NO: 32916 - DNA, 232 bp, Gossypium hirsutum
  Clone ID: LIB3135-009-Q1-K1-C4
cccacgcatacctgttcagtgatctctactctatattgattgtgtctactcacactctttgcgctgataacacattaccttgacttcactgattgtttacctactttaaacacgaatattttcaccacaaaatctttctacatacctccctttgcacaaatatcttactttctatcacacatcatatacggccttataccaaagtgccctattacgactgcaatataatcta

SEQ ID NO: 32917 - DNA, 159 bp, Gossypium hirsutum
  Clone ID: LIB3135-009-Q1-K1-C5
catttatctattaaacactactgcttgctcatactgctatgacagtcttttcacaggtgggggtggatctcacttctggcccggcaattgacatcaacgacattcctttcttcaccatgacttttctttctgcctcttcttatgtttacgaaatcctac

SEQ ID NO: 32918 - DNA, 323 bp, Gossypium hirsutum
  Clone ID: LIB3135-009-Q1-K1-C8
attaatattattgcactgatcttacccagcagcacaaatctaatgggagagcaccacatttgccacaggctagcgaaaatgaatcccatcctctcattagcgtggataatgcaagtggtatgtttattgattgtgtatgtcctaaagaccctctctggaatactaacaaagacctgcatgcataaaatcttcaagatgttatattcatttgtcggacatgaaaaattacaaatgaaaagtgttccacccatggaaaatggtggttgtaaaggtgactcatatgttgcacatgcagcacagcaacaatagtcttgttatgtagg

SEQ ID NO: 32919 - DNA, 216 bp, Gossypium hirsutum
  Clone ID: LIB3135-009-Q1-K1-C9
aattttgaatcgacccacgcgtgcgtcgtccttcttcatctaacatcctttcacctaccattcttagcactaatccacacaataccgagcgtgctgcacactctcttgctcaattcaaagcttataagttgattccaactccatatcatattacaaagaacatggtaattccttatgctctcacagctctgaggctacagaaatgacacaaatact

SEQ ID NO: 32920 - DNA, 406 bp, Gossypium hirsutum
  Clone ID: LIB3135-009-Q1-K1-D1
cgaattctcaagcattggttgaaggcaggcaatccacatcctttctacaaccctataaatggttacgtaatattaccaacggcatttgaaatggaaagcctccatgagaaaggcatgcaagttacatcgctcaaagaggaatgggaaatcattacagaagatcaaggcaatcaagacgctaataaaaactcacttgttagctccatatctgtttctcaagggccaagtaagcaatcctcaaggtctgaagctcatgcaactgtcattgttcatccacaaaacgagggtaaacaacatgtcgagctaaatgccataagtgtatccattgatacttagagttgaattgtttataaactcaatgaaacctagcaaagcactcgtgtgtataaagctatctgtatattaa

SEQ ID NO: 32921 - DNA, 405 bp, Gossypium hirsutum
  Clone ID: LIB3135-009-Q1-K1-D10
tggatctacccacgcgtccgaacataccgcctattaattgaccttttttcttttcattttattaataagtctcattattttgtctcaagaacttattaaaaaaaagaatggccttcttctctttctattacattttttcaatccatttcccttctaattttctctctttcttctacatattaattcccatttccttaaactttctttaccttttttctttttcttagacctcaattgtggattacattttacctttccaactcccctccctttcacttcatcaagctacaattattcttatgcttcttctttctgcatccattttatattcgaaagtttccccacaacccaaagcgaaataccttctttaaccttatcataaaccggcacttttgttaattaacc

SEQ ID NO: 32922 - DNA, 166 bp, Gossypium hirsutum
  Clone ID: LIB3135-009-Q1-K1-D11
tacctaaccaaccaatttatactccatcatacaaataaaatccacagcccataccaccggtgtagggcccacccaagatcgtcaatccaccgacttataaccctcatatcaatccacccacctatcatcctattccaccatacacagctttttacactccaccata

SEQ ID NO: 32923 - DNA, 341 bp, Gossypium hirsutum
  Clone ID: LIB3135-009-Q1-K1-D12
gcgaaaaaatcccctatgaatgcatctttcttatattcattctattaatacgtttcattattttgtatcgtgaaataaataaaaaaaagaattgcattcttttgttgctaatccattttttttattgatttagcctttatcttaccctctttcctatccaaaataatttcacttttgttagaacttccttggtttttttcttttctttcgacttcaattggggttgacatttttctttttccaattccggccctttcgcttcaacaaactccaattattcttatgcttattctttccgcattaattttatattggaaaattggccaacaacccaaagccaa

SEQ ID NO: 32924 - DNA, 351 bp, Gossypium hirsutum
  Clone ID: LIB3135-009-Q1-K1-D2
cggacgcgtgggtttattcatattattgcactgttgagagccagcagcagaaggctagtggagtagcaccacacttgccacaggttaaggaaagtgaatcccatcctctgattagcgtggataatggaagtgggatgttgagtgatggtgtaggtcctaaagcccctgtatggaatacgaacaaggacctgcatgcataaaatcttcaagatgttatattcatttgtcggagatgaaaaattagaaatgaaaagtgttccagcgatggaaaatggtggtgggtaaggtgactcatatgttgcacaggcagcacagcaacaatagtcgtgttatgtggatgttcataactgt

SEQ ID NO: 32925 - DNA, 299 bp, Gossypium hirsutum
  Clone ID: LIB3135-009-Q1-K1-D6
aaagaagtgaaagggagttgccttcccaaagctaaacaaggtcctcaatgcagcagggcaggcaaattttcaccggatatagctataaacatcgactcgaacccctttttcatgaccagagtgaagaaggtggagctggctgacaatagaatcaccaatgatacgaacttgctgcagccaagaggtcattatagtggaataggtgttggtgcaagtgctgcggcaacaggccctgctcaacggaaggcgggaacggttcaatatggcatgacaaggatgtattaatgaaagattaaggg

SEQ ID NO: 32926 - DNA, 236 bp, Gossypium hirsutum
  Clone ID: LIB3135-009-Q1-K1-D7
acgtccacacattcgatcgtgcattgtttccatacgctgactattctatataaccaacggtccgtttctttataaaccacaacaaggactatctcttaacaatagcttatcctataccacatctcaacaattctttcaaatacctcaagttaatagatacattgatattaatctcacacctatatcaatttgggaggatcatttacagatcactattcaaatgatgtttatgacag

SEQ ID NO: 32927 - DNA, 327 bp, Gossypium hirsutum
  Clone ID: LIB3135-009-Q1-K1-D9
ctaaaaactattaatgcctgcaatattgcaaccaaagaatcggtaaattaaagacgagcaagcctgacttctatgacttcctgaccaaatacagggcttacttaatcctatccccttcttcctcttcatccgtcttcagcgtaatcacccaagttataaataatgacacggataaccacaatgaaagcatttgatgcaatagttctccttatttcagaagaaaaccctaactagtcacatttcacacccttccttttttttttctctcttcctgcccggaccattagctaggattctgactagccaatcagtgcaacatctccctag

SEQ ID NO: 32928 - DNA, 126 bp, Gossypium hirsutum
  Clone ID: LIB3135-009-Q1-K1-E10
acccatacgcttattttaactgatagcttcactctacttaccttgtcatcattcttcttcaatggcccattgtccatttatcttatagactcaatgagtctaagcaatcataataaaaaccatcta

SEQ ID NO: 32929 - DNA, 436 bp, Gossypium hirsutum
  Clone ID: LIB3135-009-Q1-K1-E11
gcgccaaaccccattttatgacatatacaaagctatgaaatcttgcatcaccataacgatactgctggatgagcgtttatgattgccgatatatgctccttgacactatatattaccttttgactttttcacgagtcgacaaatactgactcctatatactgcactctattcttactataaccaccctaataactactctgtccaaccaatctaagttgatattatccttataaatcctttaaacattatggtccaattgattcaattccttttccttccaaacccttttttaacccaggtaatcatttcaaggtttttttgatccttataaaataaaaaaccttacaaacacagtctttactcccaaaaaatgtttaaaaaacttaagatccttgaacctgaacaaataacacccccttttataataattcaccc

SEQ ID NO: 32930 - DNA, 374 bp, Gossypium hirsutum
  Clone ID: LIB3135-009-Q1-K1-E5
aaatgtaacgtcctggtcttgaatacaaagatgctagttatacataggagcaagatgattatgaagatgaagaccacgaccatgcatatcatcattattctcatggacgctatgatgattcttcaggtgaacaacgtgaagaacgagatccttaggatgaccctgaagccaatggagatggtgggagtgaccaacaagatgacgatgacgatgatgatgatggggacgaagatgatgatgaccaccatgattgtcgatgatgaagaagaggacgacgaataagattaggatgatgaggttcctcatccaccttctaacaagaggaaaataatctagtcatacgtcttaagatattctactattttcctgctttt

SEQ ID NO: 32931 - DNA, 261 bp, Gossypium hirsutum
  unsure (1)..(261): unsure at all n locations
  Clone ID: LIB3135-009-Q1-K1-E6
cgcgtacgttactttcgaaaggttaatcacgctttttttattagagnatcctttgaaatattgggggggttcataatagatggagtcgaaagttaaaactaaagaacattttaatttttcatcacttttaaaaaaattgatgtatattcgattgtctatatgtatatatttctattctcaatcgccctcttttacaagtaaaaatcaaagtctttatagccaaaataatagcagtttcctgctgtttctcttgcttatact

SEQ ID NO: 32932 - DNA, 437 bp, Gossypium hirsutum
  Clone ID: LIB3135-009-Q1-K1-E9
tcatgtggaggttaatttctatattcgtggaccccatgcagccgccaaagcatgtgcagaggggctcaaagacaaagcatacaacacatgtaattatacgtacttgatacttcacatcaattacccttcacgggcagaactaatgctttagtcttatttaccggcagctgagatgaggtcttacacaaactaacatgtgattgaacaatttcctggatgttgtactttgtttgagtcccctcatttatcataagcaccattaattgcccctctactttaagatgccaaaaaacaagcctttggtgactttatagatttaggaagtaaattgcctgcccattcaactaattaataatggatttaagttttcgttattcattttaacttaacccctcatttactagcgatacatcttattgattgattctatacaattt

SEQ ID NO: 32933 - DNA, 408 bp, Gossypium hirsutum
  unsure (1)..(408): unsure at all n locations
  Clone ID: LIB3135-009-Q1-K1-F12
gcgcgcacgcgtncgagaagatgacctgacattctcaagccatggctgtcatacaccgaccccggtgtcccgaataacatgctcaccgccactgatgttgtatacccacgtagcctgtggtttgaccctttttggtggagaaattgttcagccgaaaaaaacaaaggacctaattcccaaaaaatccacaattgcccgtttgctatttttgcaattaatggtgcattgttccaacataattacaaccttacctggcccattgacaacctattttcccaccttacccattcttgtcattccaacattttttcttctttcaaccccaattgagcattttgagggggaaccctaacacccaataaaaagtttgagaaacacttattgtcatcatacatacacctttttacc

SEQ ID NO: 32934 - DNA, 344 bp, Gossypium hirsutum
  unsure (1)..(344): unsure at all n locations
  Clone ID: LIB3135-009-Q1-K1-F5
acgcctcaaaatataatcttccaaggcctttgatctgcaccaaacagtaaatcctgttggggagattgtgatagaacattacttggcctgtacgcacagctcattttattggtctactcaaaatatgttcaacatctaagnggactgaaattcgcttatctgtttctctcggacttttttacatcatgctctgtactacttttattactatagcactcattctgtttaaagactttatcttaacctccaaataaaatgcaatacaccctaaactgttcacaaatcctaaaaggaatgctagaaactcccattttcctctataaactcccctacccattaaaatt

SEQ ID NO: 32935 - DNA, 368 bp, Gossypium hirsutum
  unsure (1)..(368): unsure at all n locations
  Clone ID: LIB3135-009-Q1-K1-F8
ntttttacaatttatccanctctcatcaattaacatcccaatttaaaccaatctgggtgagacttgtctatatatatccacatacccttcccctaattacatacctatcacataccaaacacttgacaatccacctcaatgcaaaccttatcacaatccaaactacaattctacacacaaacatcatatataactatgaacaatacctctatcctactatcaacttatcacacatctaactatcttatgtccataaaatcctgtcctttatgctttaacaacacaacactaattcatattgattaatcattattaattacacacgtacttacaacatccccactttttacaccatctcttaaacaatt

SEQ ID NO: 32936 - DNA, 216 bp, Gossypium hirsutum
  Clone ID: LIB3135-009-Q1-K1-G2
gcgacgcacgcgtccgtcttacttaagcatatcaataagcggtttaaaatatacttaccaagataaccctattggcggcaaactaacctagtaaaacccagcttaataatcgatcgccacacccttaccatttgaatctttatgaatcgtgcacagcgacaaaccaatcccaactactctataaattctcgccaaacaacatgttatctccttccc

SEQ ID NO: 32937 - DNA, 295 bp, Gossypium hirsutum
  Clone ID: LIB3135-009-Q1-K1-G3
ctcacgctttcgaagaaaactaacaccatttattatatacactccttttctttttcaagtcgtgtggtattttttggggagaaaaaaactttattattatttaacattgcgatattgtctccacccgacaatctgttggcagccgcttaccgaactccatcacctaatataacggcggatcctatggtgaaacagttactcgatactaactcctacgacatgtccatacccttcgaagaccatgttcaattcgcttattctcaccataacgataaaaagcttactccctacatca

SEQ ID NO: 32938 - DNA, 195 bp, Gossypium hirsutum
  Clone ID: LIB3135-009-Q1-K1-G5
gtgaaagggaaaggatggcagcacaggttttccaacctgcttatctgatgccaactgtaaggatctatgaagctggactgaggtacattgtaattatcaacacctctacatgagaggaacgcaaaaatgtttgaagaagctagctcaccattgtacatagtctatccatacttgggacccagcggagatgatcaa

SEQ ID NO: 32939 - DNA, 277 bp, Gossypium hirsutum
  Clone ID: LIB3135-009-Q1-K1-G6
gacgcacgcgtccggtggacctcattcaacctccgagcccactgtccaccaaggccctcctacctctgcggcctgcaccaacggtgtttgcattagtgcaatctctcttgcccacactttcttcgctggcgtttcggcttaagaaagtgaagcgaagtccagcttcttcgggttctggatcatgattcttccgaatctatactttcatgctctcttttcttctttcgagtagcgacgacttctcttactctatattgatcactgcaccctacttttt

SEQ ID NO: 32940 - DNA, 265 bp, Gossypium hirsutum
  Clone ID: LIB3135-009-Q1-K1-G7
gcgtacgcccacccaatactaccactcatacgcttcgaattcttccaatccaaaaccagtaatcgtggagattacatactaacaacattctcaattctactatctaaccctgctatcttgtctccatcgctccacttccacgaaaacacattaaagaaatatgacaccttatatcacttcattactctatgctataccagccattgatacaaacaactcaaatcattccaaacactttgcagaccactctcacttttcttatact

SEQ ID NO: 32941 - DNA, 206 bp, Gossypium hirsutum
  unsure (1)..(206): unsure at all n locations
  Clone ID: LIB3135-009-Q1-K1-G8
gcgtacgattactatntctaccacacacttcttaatattactactttcaatactcactctcggcacgccttctttttttacctcttactcacccctctcttctaacccccctactctcttttataaacctcctaataccaaacccccaccttattaacatacaccccctgtctataaaccaccaaataaacacaaacctcttccta

SEQ ID NO: 32942 - DNA, 309 bp, Gossypium hirsutum
  Clone ID: LIB3135-009-Q1-K1-G9
actccaaccgctatcctcattccacctaaaaagtacttactgtacaaaaactttctgatttcgaccgaataacgcatcgatggactgaatggtttacaataacacccggatgcgccgttttatctgccaacaattctatctaatttcttgctacgaaaaaattacctttccgaccattttcagtgactattgccctttcttttccttgacaaccctttctaccttccttgtccattccaaggttccaaccctttcttaatcttcatttttttttttccaacccttactaaaacattgtccacgcccttc

SEQ ID NO: 32943 - DNA, 391 bp, Gossypium hirsutum
  Clone ID: LIB3135-009-Q1-K1-H11
ggatcgcccatcctttgcttctacaaatctagttattgcatttcttattgataaggctatttaggcctatgctgtctctattgatttgcttaaactatatcacaaagacccttaatttctcattctccatacctatgtaaacatttacctacactcaaattaaaaataatgttttatataattcccgtccattattattatcctttccgttttattccacataaaacgtacttgttttcttttaataaccattaaagaaaaggatccacctgaaaattagcttaaaatttaaacccacaattttaacccatcaatttaaccctttaaccttcatttaataatttcttccaatattaggtttcctacatattaaaatttgatcaaagaaaac

SEQ ID NO: 32944 - DNA, 319 bp, Gossypium hirsutum
  Clone ID: LIB3135-009-Q1-K1-H5
cccaaaccatctacaaaggagggcgcattgtcatctttggtatcgtgcaccctgaggggtggaataattcctacatttcggacccattctccttcttggaactcgatatatagagcttcttataggacatgtcccattgacagctgaaagtatgtacgttacatcaatatacctatgtactctacatgcctattactattaaatatgtctagattaagatttgctgtctgactgaacacttgctgatattatattattcacgcctcattatattgcaaagagcactgctggtcggccttctcttaagattctagcttac

SEQ ID NO: 32945 - DNA, 148 bp, Gossypium hirsutum
  Clone ID: LIB3135-009-Q1-K1-H7
atcaacttctaactttcaactgctcagacattccttttcgcttcgactattacctagtccatttcctttcacctacaatccttttcctatcaatttatcaaatctaaaccatctccatcttcatctacaaccacttctaaaaaacaaa

SEQ ID NO: 32946 - DNA, 391 bp, Gossypium hirsutum
  Clone ID: LIB3135-009-Q1-K1-H9
cccacccgtccgcgaataatatctaatgccctaacttatccattctagcctatggtcataatgcctacactttctgcttaagaactcttacaactcaccatctttctattaaatccaaaaaaaaaacaattactcatatatacatacttaaccttaacccacaaatttcttccaatacctttaaaactatttccgcttcctttcatttatacacagcatttggtttcctccaagaccacctttttatcctttctttaactttaacaatcccaaaacccccaaaaatccaattcataatttatatgacaaaaatgaattaaaaattaacctttctcataatccttaagtaaaaacttaactttaatacttcaaaaattccatttatattttt

SEQ ID NO: 32947 - DNA, 315 bp, Gossypium hirsutum
  Clone ID: LIB3135-010-Q1-K1-A1
gtcgacgacgcgtgcgcccacgcgttcgcggacgcgtgggacgaaacatttgctcgattgattaaggagaaagaacagagtggttctttacttaggagtgcactgtccaggaagatggtatctgaaaataagtccaaaactaacgagttgtttcaaactgctgagaatggtttgagagaggctggaattgacttcaaatttagtaatcttattggcgatggaaataaagctgaagatccgggctcataccaggatgaaatatacactcttgctggtgctttggagaatattgacaaaacatctcaacttgaaata

SEQ ID NO: 32948 - DNA, 361 bp, Gossypium hirsutum
  unsure (1)..(361): unsure at all n locations
  Clone ID: LIB3135-010-Q1-K1-A11
attccaagacattttccattttttttttttgatcttaaaagggagannaacnagcgatagagttgtatataaatggctagaatcattctctaaaccataaccactaacatcattttcaaaatctcttaataaattataggcacttcttactgttaattctccttaatactctccccttcataccatgatgtcatccttaggctcttttgcaattaatatacataaaattttctcatatatcttctcagtaaaagtagctttcattaattcttttttccattctatgtttctttcttcaattacatctgcaactttatattcctgcaaatgcgataacctgatatacttcttaaaataaaat

SEQ ID NO: 32949 - DNA, 125 bp, Gossypium hirsutum
  Clone ID: LIB3135-010-Q1-K1-A5
cccacgcgttcgctgacgcgtgggacgaaacagttgctcgattgattaatgagaaagaacagagtggttgtgtacttaagagtgcactgtccaggaggatggtatctggaaataggtccaaaact

SEQ ID NO: 32950 - DNA, 317 bp, Gossypium hirsutum
  unsure (1)..(317): unsure at all n locations
  Clone ID: LIB3135-010-Q1-K1-A8
ccacaaatatttnaactaccaacatttgcagattcctttaccatcaatcttcccggaactcattatccatttaaaccatcttctcctntccctccccttatccatgactatacaccaccaaaaacatattccccttaacttgatactatcactaaccaaccacaactaattcacaatacttgctatctcaccccctctaaaaaagcaatgaccttaccatctctaattcatccactactaacaactaatgtatataccttgcatgaacccatctatacactgtcccttttcatcaggcatcatcatctttaacctac

SEQ ID NO: 32951 - DNA, 387 bp, Gossypium hirsutum
  Clone ID: LIB3135-010-Q1-K1-B1
gcggcacagaaattccttgcactacactcgacttttcgtttcttataatacatcatctgcttcagaggtaagcgacgaattcaaccatgtttctttgattcaacaatggaaagacctggttaactatgcattgattaatgccatggctattcgccaaatactgaaaaaataccataaggttcatttcttcaaacaagggcatgctttcaagtcacaagcacaaagtctgcacattgaaatccttcaatctccgtggctatccgagcttatggctttccatattaatttgacggaaaccaaagagaaatcaacgttgacccttgcatcctttgaaggatgttacctcacatttaatgatgggaaaccattccttttttgagaactctt

SEQ ID NO: 32952 - DNA, 388 bp, Gossypium hirsutum
  unsure (1)..(388): unsure at all n locations
  Clone ID: LIB3135-010-Q1-K1-B12
accaacannaaattaaacatcattctgagtttatccttaggaaaaataacaggggcatgagcttttactttgaaaactctaccttcacacctaccatttcatcaactacgtcttttatttcttcctttagcatagatggtaatgtagctaacttacatagtggtgttgcttccttccatttcactttaaggtctccttcttttcatcaaagtccccgacacaagaataagttctctcataagcgttaaaattggaatgtcaaatatggaaatactcgtaaattccatttctccaaaaagaggaaacatatagtgaatacatcaatcaacgttcctccaattaataacaagctatctcatattcctccttattattattcattgatgaa

SEQ ID NO: 32953 - DNA, 315 bp, Gossypium hirsutum
  unsure (1)..(315): unsure at all n locations
  Clone ID: LIB3135-010-Q1-K1-B4
gcgtccgaccacgcctacnaccacacatnctaattcattttgagactctctaactaagtcatatacgcgtatcattgatttcaaaaaacaccaaaatttataatttccatattcttaaaacccctaattgttccaattatggacatctcttcttagctcacaatcataagccactgaagaaacttcatatacatggatggagaactaacacgaatgatgattatgcatatgattgctgtacccaagcattaatctaatttacaagaacttgttttgattgatgcaaatgctacccatatgaccttatcacccatt

SEQ ID NO: 32954 - DNA, 189 bp, Gossypium hirsutum
  Clone ID: LIB3135-010-Q1-K1-B5
ccaagccggcggaatgggaaacccattcaccactttcttagcacctcttcttttaatcaatacacttgttggcgatgtcggcgcacttgccaagatcaatcctgaggctccatttgataaagtttgtgttctaatctgcggaatgcccacaggttttggcgcctctgtgaatgtatctaaacccaaaag

SEQ ID NO: 32955 - DNA, 384 bp, Gossypium hirsutum
  Clone ID: LIB3135-010-Q1-K1-B7
gcggagaattacatactaaaaaaagaggcatacatgtacaccatatttgatactactaatgcagggggtgcacgctctcattagggagggtaagaatgggctctaagcacggctgatgctgtacactaagaaaggaaaacgaaagcttaatcgttactgtttttacaggcctgtttatacatacctatcacagtggaagatcatgttgttgagccgatagatgacaaaccttacctcacggtgtctaagagcaccataaattgtatatacagttaaataatctacctaaacagtgagggctctctctcgcttgttagtggtgtgaatgactgtgacattgtcaataaaaatctcccgtgtatgtgacacaattattgtgctata

SEQ ID NO: 32956 - DNA, 371 bp, Gossypium hirsutum
  Clone ID: LIB3135-010-Q1-K1-C10
cttccggcaatattgcttgatattgatatctttccttctaacctcttgagtcttgtttcattctttcactgcaacttaatactttacttatatcttctgtcattgtcctgtattacatatatatatggctagaattcatcaacttaataaccaagtattaattttatcatgccttctacgttcaaattaaacttcatttcttccaaaaaaaataatcataaaataactattttaaaatgaaatctataaaacaaaacctatatattatttttaaaaaatttaaaattaaaaattttctcttataaaaaaagggcctccccttttataaaatccaaatttactaacccttccatgctaatttataatttttt

SEQ ID NO: 32957 - DNA, 293 bp, Gossypium hirsutum
  Clone ID: LIB3135-010-Q1-K1-C4
atcacttatagcatacaatgtgtactttcagcaatatgccttcactcaaaacaaccactgggagtcttgatgctgcctgtagcgtgaacccatccttttggcactcatttcatgtaatgcaaacacctcatgacacctgtaatggttaaacctcaacaaaaaggagttactataataccttgcttgtcgtatgatataaacttattactctataccagaattaatatcatctaacgtacttgccacaatcaaagtatgattacacaagtcaatgtatataactcaatactatt

SEQ ID NO: 32958 - DNA, 350 bp, Gossypium hirsutum
  Clone ID: LIB3135-010-Q1-K1-D12
gtccggctttaccatatatattataaaactttatttattaatgcctcatctagggacaggtttttatcaacaaaaccaacaatcctcctttatctctttctccacaatccaattcattaatgacaaccaccataaaacctctattttcatcctttctatcacccaccacataaacatttctctaattaaaacactaaatgtttcttcattaaccttcactaaaacaaccacctcaaaccattgataaaactaacgtttaatccttaactttataccaaacttctcttcaatcaacctcttaacacaacacatttcttctacaaatttcaaaaaattctctttacacattt

SEQ ID NO: 32959 - DNA, 321 bp, Gossypium hirsutum
  unsure (1)..(321): unsure at all n locations
  Clone ID: LIB3135-010-Q1-K1-D4
attgtctccaatagtgtattctcttactacacgttgttaaagaattttgcaanactattgtcaaacttgaatactgtgtggaggatatagattgatagctgataatctaagacccacatgaggaaaaagtattgataaaagttaccccacattgtaaacactgcagccacgaactgcctatatgcttcatgcactcttcatgaaaatacacagatatatcctatgcatgtcggccataaattcacaatggcattagctcacacatttaatttggatgggacacctgatactggctatattaatacgacgaggaagtctata

SEQ ID NO: 32960 - DNA, 301 bp, Gossypium hirsutum
  unsure (1)..(301): unsure at all n locations
  Clone ID: LIB3135-010-Q1-K1-D5
gattcgacaaaccgcacgcctgcttgaaaggcctacactttttgcagcattggttcaagaggcgccagggctctttggactataaccaaatcttgtggagaatttttcactcatagattacaggtgcttaaactcccatagctgactataatttttacgtaccaaaggtaccatgtaagtgctgtagtttctccgatcttactgctaattaacctaagcatactttcagctatggagaatgttctatttacaattatttagcangacattatgggtatcattatataaatttattgcttta

SEQ ID NO: 32961 - DNA, 299 bp, Gossypium hirsutum
  Clone ID: LIB3135-010-Q1-K1-D7
agaacaggccgacggacgcgtccttccggataattatactacatattcactgtttatcccccacgacgatatttcgggaacctttgcctactttaaaggacaggcttactcaaattcctcccgaccaagccaagatcattagaaaagcacccatacacctcattccaaggttaatatatgctcatcctcgctctaaattcgagactcttagacatactttcaatattcctgtatatgcccagatcaataaattctcataaatcaggacgaacattatacaaactcctacccaatataat

SEQ ID NO: 32962 - DNA, 354 bp, Gossypium hirsutum
  Clone ID: LIB3135-010-Q1-K1-E10
cattactaataaaaaataacatttttaatctttattcaaccaagccacccacagaaaaagttcatttatactatgaccccccatctctcacctaatctttttcaaaaccactttttccatccttcaatacccacaaaacaccaccttcaatatacatccatacatagttccaaaacacaaaaattcactttttaatattatccaccactcaaaacacgtacttcaataataaccaacatgttaagaaatcctttaacactcacctaatcctaacttactacataaacaacaattattctctacaacacgcgcacatcaacaatttacctctagatttattaggttaatttaccc

SEQ ID NO: 32963 - DNA, 316 bp, Gossypium hirsutum
  Clone ID: LIB3135-010-Q1-K1-E2
aaaggtgcagctggaatccttgtgacatttgttagctgtttaggctcttggactatttcctgggcattgagcttgctcatgagatggagctcaacatgaacattcttcatatttgctaccatatgtggcttaactgtatctatctgtagctaagctgctaccggagaccataggactgacgctagaataaatacaagcatccatgaatccagcttccttggaaccatgattaccatgtgctccttaacaatcaatatatctgacattgatcaattcatgtacaatatttctagtcctaacttcagtgccatgttag

SEQ ID NO: 32964 - DNA, 287 bp, Gossypium hirsutum
  Clone ID: LIB3135-010-Q1-K1-E3
cttggtccctttcgaagaattataccacattttcactgcttatgcccgaggatgatattcgggaacggtagcttactcttaaggacaggcttaaccaaatttctcctgagcaagtgaagatcatgagacaggcactcataaatctcatttcaaggttaatatatgctcattctcgctctcaataggagactcttcctcatgctttccatattgctggcgatgccgacatcaatcatgtcactaacctcacgacgaacatcattcatcgtcgaaccgaatataataac

SEQ ID NO: 32965 - DNA, 231 bp, Gossypium hirsutum
  unsure (1)..(231): unsure at all n locations
  Clone ID: LIB3135-010-Q1-K1-E5
ccgacccacgcatccttncacctatctattccgaaattttcctcatatatgaacaatatctgttcagaggatccattgacagtacttatgtacctcatcgcactatttcacctcctctctttccctctgccttgaacagtacctatacactctgttcccgttcacttataaccaaaatatactctcagataatttacaactatcaatacttaggattaacccgtcgagact

SEQ ID NO: 32966 - DNA, 373 bp, Gossypium hirsutum
  unsure (1)..(373): unsure at all n locations
  Clone ID: LIB3135-010-Q1-K1-E6
cattaattttcttgacatcttatatatagnttttacactctcattaccattagatcctttctcttttttttaaagttctcttaaacattaatcctttttcacattacctaccatactttctcttaacatcattatatgaaatcattattgtcctatactccaatttctagcctctaataaaaaatctatccttattattatcatctttcttataacaattaatcctaattcattcaaatctactaattatttcgtccttttataacccacattcacaatttctaggccttcattaattcatactttttgactcattaatttcaaaactcttaattcttttctttaactcccttatttttactctttcttttcc

SEQ ID NO: 32967 - DNA, 406 bp, Gossypium hirsutum
  unsure (1)..(406): unsure at all n locations
  Clone ID: LIB3135-010-Q1-K1-E7
cgaacacaagccaaanggggacaagtgctatgtttaaaagaccancatccaataatanantacgcaacaaaaaagctaccatatgcatatttaacccatatacaaccaactataagagacgctcaaaagcgtaaacatccaaaaactcctaaaaacacttacccaaagcttgctcaaccacttctcacatacatacaataaaatccgaccctaatacctgatttttcagaaataatatacaatcttcgacaaagaccaaaaaaggagggagaccatatcaaacaaccacaaaaatatctaccaccactaacaaaaaataaaaattttttcctcaaaaacaaaagttcacctaaaaagatccactccacccaaaggcatatattataaataatctataacctaccac

SEQ ID NO: 32968 - DNA, 231 bp, Gossypium hirsutum
  Clone ID: LIB3135-010-Q1-K1-F1
gtttaagagatgatgctaaatgtgtaataagttatgcgtcaatgttaatggtagtataggggggtattggtttcccaatattaatccatcttcagttattaggttatccatgaaaataacgggaaggtggtcatggaaactatatagagcttaaaattttcagtatccgtgtcattaagcatgtccaaaacagtctatgcagcttactgaaactgttccttctcttcctcc

SEQ ID NO: 32969 - DNA, 302 bp, Gossypium hirsutum
  Clone ID: LIB3135-010-Q1-K1-F5
caaagcaaatcacatccatattttccataattttctaaacaataacttttttgagcactgagtcgggatcttcaggcacatttatacaattacgcttctcctcaacgagtccatgaaatactttcccaacaacctcaacatattctccatacttgcgttgactgaatccaaagataccatttacattaatgtacgagatgctacttccgtcccatccctcaacataggttatagacttaaccaaacgcttagaatatcttccaaattgaagaaactacatgaccacttaaaacactttcact

SEQ ID NO: 32970 - DNA, 304 bp, Gossypium hirsutum
  unsure (1)..(304): unsure at all n locations
  Clone ID: LIB3135-010-Q1-K1-F7
aacaaatcactcccatatttaacattctttataaaacaacnacctctgcagctcattcgtgtattcttaacacacatntacacatcaacgcttctcctcatcaagtccatgaaatgtttacccacaaaccacaccatgtgcaccatactttctattacaagattcaatgattccatttacattaaactaaattgtagaaagatctgtccattctctattgcatgtatatgcatcattgaaacgctaaaaattcatttcacgttattaaagcaataaaccctaattataattttttcactttcat

SEQ ID NO: 32971 - DNA, 375 bp, Gossypium hirsutum
  Clone ID: LIB3135-010-Q1-K1-F8
tatccaaccatcttggccgctcggagcatataatcaaatttttgcattttactctccttgtcatctattgtaaattctcaaattaacttctgtatattgcaacttgtgcatgtaattcaaagtgataaaactatgctttactgtaaaaataaaaatcaaggcaaattttgttaattttacttaaacttccactatcaaaccacctatgttaggcattaatcttagatatggtaggtaacaattgtgctttcttatgataattttactttaaaatgtcttcatttaaaaaattaccaacacacttttttttttaaagcatttttcttaatgtcaaactcatcctctttatgttaagagcatttttattatttaaaa

SEQ ID NO: 32972 - DNA, 273 bp, Gossypium hirsutum
  Clone ID: LIB3135-010-Q1-K1-F9
tctctttattactccaactatacgtacttccttctataaactcacaaaattctataccattattctctccatcttctttatctattatctcaactctctattacatttccttaatcatttcgcttcattcttaagaaatatataaccattctattaaaattttcacttaatacactcttttctctttaaattatttaataaacctctacctcatttaatttatacaatattcccttacattttaattacttttaaatatttattatattattt

SEQ ID NO: 32973 - DNA, 381 bp, Gossypium hirsutum
  Clone ID: LIB3135-010-Q1-K1-G12
cgatgtttttgtgttcgtctttttacttctttggcttatattttctcgacattttccggcttcgttgttttctaaaactatggcttcaaccttgctactgtctctgctttttatgattcatctgattgctttctcccttgctgttgctgctgatcaaaggagaagtactgcctcttttggcaataatgtgaaataaagttattgcgtttatgatgaagatattgcaactggtttggacgctaattcatatcctattccttctgcttaatcatatactaataatggtgacaagtcggtgcttatgcttttgaaaggccatgataccaatttcatctagagcattgtcacttgttctgttcatcacttgttagttgttctttt

SEQ ID NO: 32974 - DNA, 199 bp, Gossypium hirsutum
  Clone ID: LIB3135-010-Q1-K1-G6
ggccgacccacacgtgcaaacctacccctaacccaattctatccatcttctcctacacatcaacaaacttgtcctcgtggaaaccctaattaaccttaccaattccatattccttgaaatctactatacaatctacaacgacaatgccatctattcaaaacttgttcgtcactttaaacatccaacaactccttatctt

SEQ ID NO: 32975 - DNA, 246 bp, Gossypium hirsutum
  unsure (1)..(246): unsure at all n locations
  Clone ID: LIB3135-010-Q1-K1-G8
gacccacacgcntncncagaggttaaacaaagaattaaaacatttttcttgtcacataacaaataagagcgattgcatcatatatttaccatccacaatatatattccaatagaaatccaagttttttttggacgaagtaggcatgccaacggggcttttgccacttatagacatctaataatgtgtttacgttaacgacacatgttttctgtggctcaaacaaaaaaagagcatcacccacaact

SEQ ID NO: 32976 - DNA, 313 bp, Gossypium hirsutum
  Clone ID: LIB3135-010-Q1-K1-H1
gcgggacgcaatcgatataatccatattagtttggttctcgattccatttcttctgtaacctgagcttagaaggcagtagaaaagaatctgctttgagttggcttttgttcgaggctaaggatcagccagtagttttgttaaaacagaaattatgggaagtgttgtaaactgtcaaaaaacttactgacagatatgggctctaattccaacgactaacatatattggccattgcatttagattaaaaaaaaaaaaaaaaaaaaaaaaaaataaaaaaattaaaaaaattaaataagattacaataaaaataac

SEQ ID NO: 32977 - DNA, 320 bp, Gossypium hirsutum
  unsure (1)..(320): unsure at all n locations
  Clone ID: LIB3135-010-Q1-K1-H12
atttttaattaagggtcaccctcctattatttattttnatcttttccaaactttcaaaccttattacttttacttcatcatatatgataataaaacaatttttatcctttttaccaaacacaaccaaatttattcatttaaattatttataaaaaaatatcctcaaatttacactcaaaaattcttaccatataacaacaaactatatatcttacatccttaaacacttcaaactttttataatattattttttaccacatacataaatccattggcctttcaaccatttattatctttttattcaaaaaattctaaaaa

SEQ ID NO: 32978 - DNA, 222 bp, Gossypium hirsutum
  Clone ID: LIB3135-010-Q1-K1-H3
gcgtccgcttgaacttcttacatgagattctgtgttactttatggtaattggtacaggaggtggtacggccttatagatagacaagttcgcaatatgataatttggactgctattgcatccaaaaaaaaaaaaaaaaaaaaaaaaaaaaaaaaaaaaaatataaaaaaaaataaataaacctaaaaaaaaaaaacaaataaattctataatgtccctgcttt

SEQ ID NO: 32979 - DNA, 160 bp, Gossypium hirsutum
  Clone ID: LIB3135-010-Q1-K1-H4
ttacaaaaaattccttttctttagtcaacacctattcttcaatacatatttatctatttaatcaactttacaatgaaatttacacattatttaccctatcaatttcatctatagatttttagaaactacttctacattcctgataaatataaaatatata

SEQ ID NO: 32980 - DNA, 385 bp, Gossypium hirsutum
  Clone ID: LIB3135-010-Q1-K1-H5
cgggccgaccgcacgcgtccggccaagcgtacgtccacacgttcctgactttttttcatgtaaaaccaacaacgggcctgtcgagacttttaccagatacatgcttataacaaacactccttacacaagtcataacactcattatctcaacacccatgcttcatttcacacatatctatctaatcaactgcacatctaaatctacagacttttcaacgtaactataactttaactgatccttagatacaacttgcatttttctgccaaatttaaaatatatatcctcacaacagaacggaatacgactaatctgactctacaacgtcatctccaacaattaatgacacattatcctattctaatataatatatgcccaagtaata

SEQ ID NO: 32981 - DNA, 399 bp, Gossypium hirsutum
  Clone ID: LIB3135-011-Q1-K1-A4
cattctcataataacggttacagtgttttactacttaaaagctggatggattgggaatgatgccatctcccctatcattggtgatcatgatccatacatgcatgtttttggacgggaactaaaccatctacgtgctgctgcgattcttatgacattcgttatggttctttccatcctaacatcaatagcaattgttcgccgtatcctaatgggaacatcagtgctaaaggttgctgcaaaggtcataggtgaagtccaagcactgataatttttccagtcataccatattcaattctagcaattttttacatggtctggatatcagctgccctccatctgttcagttcgggtcaggtcgtccagaataattgtaataccaactgctgtgcttacgatct

SEQ ID NO: 32982 - DNA, 364 bp, Gossypium hirsutum
  Clone ID: LIB3135-011-Q1-K1-A5
cccacgcgtccgttttttactttatttcagtcaatttcgaggcagaacgtgctcctgccgtgtcagaaggactttccccgctacaagaatggttgaagatagggtcccggttcaaagctttctttgtggaagggctccctagattagcgagaacacgaaaaattagagtctttcagagtcttctccatccgcgtttctacttataatagaagtggcaatctttctagcgcctgaggcaaaagtcaagagaaaaaaaaagaagcaagactggtctttgccagaaagtcgggcatcctggatctatggggacatcaagatcaagtcgtccagtaagcgcttagtttagtggccaaaaaacctcttc

SEQ ID NO: 32983 - DNA, 273 bp, Gossypium hirsutum
  Clone ID: LIB3135-011-Q1-K1-A7
cccacgcgtgcgtacatgtttactgaacacacagctaatatatacgctctgaggcatgaacgcatggaattacactcgactgatcagaaaattgtcaagctcaagcatcgactatggagagaaacgggccttatttatgtttctagatcaaaacgtgatgactatatgacacacacacagagtcccatctaacttactactgctagttcaagactctatgtaactacgattttgcgcatactatgtgctaacacatctattacatgctctgct

SEQ ID NO: 32984 - DNA, 266 bp, Gossypium hirsutum
  Clone ID: LIB3135-011-Q1-K1-A8
gattgggaatgatgcacatatgcactatcattggcgctcatgatccatacatgcatgtttttaggcggggactaaagcatgtaacgggctcgtgcgatgcttataacattaaagatggtgcttttcatactcacatacatagcaacagttcgccgaatactactagaaacatgcgtgctcaacgttgctgcaaaggccataggtgaagtccaagcactgataattcttatagtcttaccacattctattctagcaatattttacat

SEQ ID NO: 32985 - DNA, 199 bp, Gossypium hirsutum
  Clone ID: LIB3135-011-Q1-K1-B12
gccccataacgagaatgacacgttatcggagcgggaattacttgaagactaccctcttttgaggccctcctttaaaattttaccacctccttaggtcctaattagtggtttgtaaataatattagggtttgggaattttaccttagaagggtcctttataaattgactttggttccctttaataaaaaataaagtgggc

SEQ ID NO: 32986 - DNA, 266 bp, Gossypium hirsutum
  Clone ID: LIB3135-011-Q1-K1-B5
gccacacatcctgggacgcgttgtgggggctttgaggcaagccaaagagaggtggaaaagggggcgactgattggtaaaaaggacgctaacgaattcggataagggtgggtaggcctctgataggtagccctgtaatgtcgagtgaaagatcgtgaggataataggtggcggatgggggaagatgggatttaggaaatgtaatccccttggaaccaatcccacaatgggtgattgggatgatagcggtgaggccgatttcgataga

SEQ ID NO: 32987 - DNA, 277 bp, Gossypium hirsutum
  Clone ID: LIB3135-011-Q1-K1-B6
acgaatgtatagcaatgtatacaaaatctttaatagaacagcccatgttccccttttcttgtaaatagaattataattatccgtattctctgtaattatcgcatcttggaagcatgaccgggtacccgggaccgtgcaacgggcgtcttggaaccagatggccgacctagaaggttgctgatgaattcacccgccaacatgagctgtgccagatccacattcgtcttgacaccaaggccgtacagcatttacaccacatctttcgtgacaacatttc

SEQ ID NO: 32988 - DNA, 304 bp, Gossypium hirsutum
  Clone ID: LIB3135-011-Q1-K1-B9
accacgcgttcgtccacacgtccgctatcttttccattttctctttgcaagccatgaatggtcatatgttccacatatgatcaccttttttcgttgactctgtttataacttgcttggtactgataaaacagagtgtgaacatggtgaattacctacctgcattataaccggactacttcacataaaatgctgtgtttgggcttgcacttacgcacaagataaagaagaggttcttagacaaatcccacatctcatgttcatatatctgtgcctaacgtgctttttaggctttggttggcggcg

SEQ ID NO: 32989 - DNA, 433 bp, Gossypium hirsutum
  Clone ID: LIB3135-011-Q1-K1-C1
tgccacgcgttctgccacgcgtgcgcccacgcgtgcgaccacgcgtacgggtgggtggcatcacattcttccttttgtgcatccttggattaactttagctctttatcgagtgaagaagaaccagcttaaggaggaaatgagagagaaatatgttgaaagcctaccaacttcaggcagcagtttctggaaactctctagtgtccctgagcctttgagcatcaacattgccacttttgagaagcctctacgaaagctgaccttcggccatctgcttgaagcaactaatggtttcagtgcggaaagtttgatagggtctggagggtttggcgaggtctacaaagcacagctgagagatggctgcgtagttgcaatcaagaagctgatacatatcacagggcagggagacagaaagtttatggcagaaatggaaac

SEQ ID NO: 32990 - DNA, 396 bp, Gossypium hirsutum
  Clone ID: LIB3135-011-Q1-K1-C10
gttcgctggcatgtggccaagatgacgaagaagaagcatgagccggggaatcagatggacgccaccaatgaccaccgcttcaacattaagaacattatgaaagatatccagtttcttggatcctcccacatgacatggaaggagaggaaagagatggagaataggaaggtggtttctttgggtggaaagccccctaagaggcagagattacctctgagtgttgctaaggcggtcatgaagaatcaaaagaaaagagaagagaaaatgcttcaagagaatatgattcttggtcgatttagaagaaagcttggtggtggtagtggcacttaaggatccacaaacaagcggatgcctgaggacagggttttgaagtcaagtgaacgtcattttaaaaat

SEQ ID NO: 32991 - DNA, 350 bp, Gossypium hirsutum
  Clone ID: LIB3135-011-Q1-K1-C11
aggcgtacgcagacagcggccaagatgacgaacaagaagcatgagccgagcaacaacaaggacgccagcaacgaggaccgcttcaacatcaacaacaatatgaaagatagacaagttcttggatcctgacacaagacatggaaagagaggaaagagatggagaatacgaaggtgggagaaaagaacggaaagccccctaagaggcagagattacctctaaatggggcgaaggcggagatgaagaacaaaaagaaaagagaagagaaaatgctagaagagaaaaagatgctggggcgagacaaaggaaagcaaaagggtggtagaggcactcaaggaaagacagacaagcg

SEQ ID NO: 32992 - DNA, 218 bp, Gossypium hirsutum
  Clone ID: LIB3135-011-Q1-K1-C3
tgactacgtactggaaagcttattgaagatgtgatcaccgatcatgccctgtgtacatgttcatgactgtctttgctagcattgctgtgactagcatgctcgaaatgcacaggggaggcgttggaatacatgtttggtggagaaacaagcaactctgggtgattggtggtgtctcgtcacacctcgtggctctacttgcatggtctgctgaatgtttt

SEQ ID NO: 32993 - DNA, 351 bp, Gossypium hirsutum
  Clone ID: LIB3135-011-Q1-K1-C6
ctttcaattacgtgtgcctttggggggtcaatgaaacaatacacaggatgatggtgtcagcgactattgatctgttgaagaaagagcttcctgtggaataatgctctttggttctttcgaaagatgttaagactggtctagttcttgctgatgttgttaatgtcttccgcagcggtggagcatggaaatctggtaattctaacccataaaatgcactcaatttattatattttggatgaacagtgaatctgggatgcgcctaacgtttgttttgaaacttcgtgttcatacaggctccagcgaaacctgttaaacatatatctgatatcggtaaagaattttcgagacttg

SEQ ID NO: 32994 - DNA, 343 bp, Gossypium hirsutum
  Clone ID: LIB3135-011-Q1-K1-C7
ctttcaattcggtgggcctttgtttggtcaaagaaacaatacagaggaagatggggtcagggacgattgatctggtgaagaaagagcttactgttgaagaaagctctttggatctttcgtaagatgttaagacaggtcttggtcttgttgatgttgtgaatggcttgtgcagcgttggagctagaaatttggtgatttatacgcctagaaggcactcgagttatcatatgttggaggaacaggaatctgggctttgcctgttgtttgttatgaatcttggtgtgtatacagggtgcatgggaaccgcgttaaaaaggttcttataactataaagaatctttgt

SEQ ID NO: 32995 - DNA, 209 bp, Gossypium hirsutum
  Clone ID: LIB3135-011-Q1-K1-D10
gtccaaccaagtcccacaactccactacggatcgggttggagatggccccacctgatcctcggctcaggaagtacgtcaggtattatagagactttgctatggaactcaacatggctcttggtgtcgaccctagtgtggtcatctgcatgctccctgttggtgacggaactaccctgtgtcggctgactcaataaaacacaccgcacgc

SEQ ID NO: 32996 - DNA, 321 bp, Gossypium hirsutum
  Clone ID: LIB3135-011-Q1-K1-D3
ctcaaacctatgatcagaagaggatgcagttgatgatgtaatccctgctgaaacatgtatgctgacacatatacttgctgaacatgctgatgaacctacacatggtacatcacaccacatataaattactatggccattatagagaacaacggtgactctttcggagcctatgtgctaccgcaaatgttacgggtggatggatgccgcgatggactacgctagatacatcgcatgagatactgaataggaagctaaggctctgctgatagctgccttgggaaagagcgggggatagagatggccgtacgcatggatactgc

SEQ ID NO: 32997 - DNA, 199 bp, Gossypium hirsutum
  Clone ID: LIB3135-011-Q1-K1-D6
cccacacgtacggcaatacaatggttggatgtcaaccagctagccccggccgatgaattacaggatcatattaaagagctcgagagcatctacgatcgtattattgccccaatgtaccaatgtgcaggggctgatatcaatcacagcctggatgaatatacaccaccaaccggttgacaagacccccgacctaaaatca

SEQ ID NO: 32998 - DNA, 175 bp, Gossypium hirsutum
  Clone ID: LIB3135-011-Q1-K1-E11
cccacgcgtccgcaaaaccccatgattacagactatttaaacatgaagctcgtaccccgtggaaggtgatcgtatgatcgatggcggctctgagcgtgactagagcaccccgagacgggagaaagaaatgtctggactgcgtctgctacactttgggtttgttgttttaggaggt

SEQ ID NO: 32999 - DNA, 200 bp, Gossypium hirsutum
  Clone ID: LIB3135-011-Q1-K1-E12
cccacgcgtccgcaaaacctgataattacaatatatagattgatgaagctcgaatcccatgggacatgaccgagagaaacaggcactctcggatacatggctccggggggccgttgtgggagtccatatcttcggacacgcgactgctacagcttaagtatatgcttatgggaaatatactgatgtgacaggccgtatgc

SEQ ID NO: 33000 - DNA, 264 bp, Gossypium hirsutum
  Clone ID: LIB3135-011-Q1-K1-E3
gaatggacatgaccattgcagctggtgccattacctgcgctgtgttcctacatgaaaatggcactgtgggaactaatcatacctttattacatatcgatcactgattcttttctggtttgctttacattttttacatttgataatttcttggtggtgtgtcctgcctatgtgtatacatatacatacatacatacgtacatggctagggtgtagactttgtgtgatttgatttactggtgctatatgtttggacatattataca

SEQ ID NO: 33001 - DNA, 342 bp, Gossypium hirsutum
  Clone ID: LIB3135-011-Q1-K1-E7
gaaaccggggtacggagaccaactgcgcgctaacctaaaacccacaaaggggggggggcgcggaaaacaccaagacggggggcatgggaaaagaaaaccgcgcacgagcgggggacaacagagcggccgaagcaaccagcgaagaaaatggagggcgctcaagcgcgcgacccagacccggacgtcggggcaagggccaggccacgaagacaaggagggcgcgacggaacccaaaaaccaggggagcgagccaaggcggagcggaccctggggcaaatgaaggggggagagggaaagacacggaggggaacgtcgaaagccaaaaaggggaaagggcaaaag

SEQ ID NO: 33002 - DNA, 220 bp, Gossypium hirsutum
  Clone ID: LIB3135-011-Q1-K1-F11
cggacgaagcccacaccgcccccgcatcggctgcgtgacgtatgacaaaaaacagccaacgcccgctacggggggcgaccccccccggatggcgggcgatccacccgacatcagaagcagggaccaccaacgaggggggtaccgcagaaacccgattcgtccaagcaccctatgaggcagacagctatagaagagggaaacacgcgaaaggcccattttc

SEQ ID NO: 33003 - DNA, 310 bp, Gossypium hirsutum
  Clone ID: LIB3135-011-Q1-K1-F3
cggagacgtccgggggggccaagggaagagttgtccgttatcgataacgggctgcccacggtgggaacggattaggccaaggtcatggttcaaccgggcagacagagcacccgatacttgggactgggacagtgcgcccccaagggtcgccggaaattcggaagaccgatcggcgtacacgcacctgcggacgcataaccgtatgaggtggccaaggagaacagcctctggtcaatggaacaatggaggcaacggaagacagttaaagggattcagcacctggggaaaaggattgcctatgatggctggg

SEQ ID NO: 33004 - DNA, 169 bp, Gossypium hirsutum
  Clone ID: LIB3135-011-Q1-K1-F4
acgacacctctgcggctgcaaagggaagttttgttctgttaccacaacaagctgcccacggttggatggtaatatctcatggtcatgtccaagcatgatccaagcttccatacttgggactgggagagttcgcccatatgtatcctccgaaattctgcataccgatcgg

SEQ ID NO: 33005 - DNA, 325 bp, Gossypium hirsutum
  Clone ID: LIB3135-011-Q1-K1-G2
cggacgcgtgggcggacgcgtttgcaagattatcaaagcgaccgacaaattaaccctatgaaggttgggtatgtaaccattcgcaccgctaacgttaacgaaggcaattgatcaaattatgaccggcaagtctttaattataaataagaatcatgtatacaattgatgtgcattctgggcgaactcatgtatatgttaatgtgttgtatttaaaggaccttgtgtaaaactggatctaatagatatactagctttgcttcattagatgcgatatactcgctatatattaaagggtgttgttcggcactatttcaataaaaaaata

SEQ ID NO: 33006 - DNA, 260 bp, Gossypium hirsutum
  Clone ID: LIB3135-011-Q1-K1-G4
gttgactcatttcgtgctctgaattatgactatcttaactaccgagcacttaccgcctaaaaaggttgggagagataccattctcaccgcttacgtcgatgtggggaagatcacaatcggaatcaacggatttggaatgatcgggcgtaaggatgcctgaattgctctgcatagggacgaacttaagctcgttgctatgaacgatacttacatcaccaccgattacatgacctacatgtgataagtatgacatgtgctca

SEQ ID NO: 33007 - DNA, 293 bp, Gossypium hirsutum
  Clone ID: LIB3135-011-Q1-K1-G7
tctgtgaacaactagaaaatggccggaccctggctgattacaacatccaaaaggagtacaccctccatttggtgctgcgacttcgaggaggaatgcaaatctttgttaagaccttgaccggaaagacaattactttggaggttgagagttcacataccattgacaatggcaaggctgatatccaggacaaggagggtattgcgacagaccaccagagggtgatccttgctggtaaggaattaaaagatggccgtaccctggctgactacaacatccaaaaggaatggaccctt

SEQ ID NO: 33008 - DNA, 233 bp, Gossypium hirsutum
  Clone ID: LIB3135-011-Q1-K1-H10
cccacgcgtacggtgcccacaaagcgttcgatgcggtaccaccttgggtggtaaaccaaatgtgtgcgggatatcatgcactagcgtgctgccacatttgtcccgaacacatgtgtgcaatggcagtcctaggatgatggccaatatagtatcatagctgctcgctgatcaatatcgatagagaggatcagatgccgcatactgatcatgaagccttcgataagaaaattgac

SEQ ID NO: 33009 - DNA, 249 bp, Gossypium hirsutum
  Clone ID: LIB3135-011-Q1-K1-H5
ccggaatgacggagcgacccacgcgtacggaaagaatccccccggaccaacaacgcctcataatagccgggaagcaacacagggatggccggaccctagccgaatacaacaaccaaaaggaatggactcgccacctggacagacgcctcaagggcggcaccaagaagaggaagaagaagaccgacaccaagccaaagaagatcaagcacaagaaaaagaaagacaagctggccgggctgcaaaaataca

SEQ ID NO: 33010 - DNA, 289 bp, Gossypium hirsutum
  Clone ID: LIB3135-011-Q1-K1-H9
cccacgcgtccggtggtcacaagcgttggatggggtgccaccttgggtggtgaccaactatgtgcagtttatcatgcctggcgtgctgccactgtgggaacaatgactgtgagccatgcgttccaagagcatggccagattccggtcatagatgtcagcatatgaatacccatagagaggatcagagcccgcagaatgatcatgacacatctcattagaaaattgaccagagatgtggagatggtagcaaatctatcagtagctggaaatgtagtgactctactgagac

SEQ ID NO: 33011 - DNA, 328 bp, Gossypium hirsutum
  Clone ID: LIB3135-012-Q1-K1-A11
acctgtaaatatactccaattttacgataatcagtttcttgagactccgaagaagcctttctcccaggattgtttctataatttacaaaagaaaaaataataataactggttaatttcgtcaggggctaagcttgtttgctttcataaatagttctatttacattttttaatttattggttctgggtatactaggttctcggtcgatcgtccattttcaatatgtttgaggatgggttgcatggttttttccactggaagggacttgcagcgatacgataacctatgcctgcgccaaagttgtcgggtgcatttcctatagatacaaa

SEQ ID NO: 33012 - DNA, 215 bp, Gossypium hirsutum
  Clone ID: LIB3135-012-Q1-K1-A2
gatatgttatattcaatgctaacgaggggaactagcttggtggccctggacgtgtactgactaattggtgagctggccacgccccgcatgttgaacatgaaccacagcatattgtgtcccgaggctcgtgctttgaaccatatgacacttacagtcagccacagtgcgccgcttagagctgggtctatcaggagttctatgataagcgctgcaaa

SEQ ID NO: 33013 - DNA, 235 bp, Gossypium hirsutum
  Clone ID: LIB3135-012-Q1-K1-A3
gaaaaacgggacgacccacgcgtacgggcagaaaatatggagcaaaaaggaaacaagcagaaagggggaacacagaggaagacgaaacgggaaaagaagaccacaagaacaaaaaagcgacaaagggggaaggaaactgatagacaggaatcgaacagggaagagacaaacagtgacagtgagagagacagcgacgagaacaaaggagttgaacggagagcccaacaccaacgaa

SEQ ID NO: 33014 - DNA, 413 bp, Gossypium hirsutum
  Clone ID: LIB3135-012-Q1-K1-B12
cgcgtccgagcagatgctgctgaattctgcaagtctctctcggcattaactgctcatgaaggagctactgttgtttcaacaattaatcgctctatgagatcatatgcaactgccattgttgcagcagagtacctgctacaatggctacctaaaggtactcatcaatggtcgagtttcctgaccccagaagaactcaccaagattttaaaatgtgcaggggttgatgtaagcaaaccaagcaatcccgttgatatctgaaactgaactaaccactgtgcgttatgactaacctctgcgctgctgaattgttgggtgaataggtgaaagagatggcgggatttgtgtacaaccctttaacagggagttggtcactattggatgatattagtgtaaattttattgcttatggtact

SEQ ID NO: 33015 - DNA, 129 bp, Gossypium hirsutum
  Clone ID: LIB3135-012-Q1-K1-B2
cccacgcgtacggtaaaacccttttaaaaaacactcattttcttgaaagatacgaaagaggtggatttatttgcttgaagcgtggaaggaaagacgatgtaaaagcggcaagtgatagctcagatacct

SEQ ID NO: 33016 - DNA, 341 bp, Gossypium hirsutum
  Clone ID: LIB3135-012-Q1-K1-B3
cccacgcgtccgcttatggtggattcatttgcaatgagtgtatacaagaaacgttgcggtaaagctttaatggcggatgctaacaatggtggtggattggaaaatacgaacgttgtaccaatcgataattttgaacacggccatagccattcacttgagatgaatgacgacgtatcatcacaattgttaaggcatcgagttatagctcaggaatatatacatgtttgaatcctcaaattcgatgattttgcttttcaagtctttacattatatatttcctaaatgtaggtattagagttgggaattgtagttcattcagtggtgattggtcttgcaatggg

SEQ ID NO: 33017 - DNA, 233 bp, Gossypium hirsutum
  Clone ID: LIB3135-012-Q1-K1-B6
acggggcaggcggacgcgtacgggtacataatatcggtgcagaataaacatgatttcatgagagagaacgtataaccgggggtggctattcagtactcaagaggagatcaagctgataaagcttgagagaaaactatcagatcgccaactgcggatagtgtatcggactatcttcatagtgttcaagaagagggggatggaggcatcattgccaagaggactctgctacaagc

SEQ ID NO: 33018 - DNA, 270 bp, Gossypium hirsutum
  Clone ID: LIB3135-012-Q1-K1-B9
acccacgcgtccgaaaagttattgtaatttgcatgcaagttgtctttcgttctatgatttgagtcttgccttgcatcaagttgaattgtaagttttggtcaaaatttgtaattctttagcattgtactgcttacatacataaattcttatatatgaatactgtaaatttgtccggaagctttgcattattggatgaaaattccaaaatttcttgaaaaaaataaattaattaattatttttttaatattttgttatattaattatatact

SEQ ID NO: 33019 - DNA, 134 bp, Gossypium hirsutum
  Clone ID: LIB3135-012-Q1-K1-C1
gccgaatatactaaatcatcggttgtttgcctattagctctggtacctaagctcagtttacacctccgttagacaacgtagttttactctagcgttgtctccgggcgcctacagattgttgcttgtgcgacagg

SEQ ID NO: 33020 - DNA, 385 bp, Gossypium hirsutum
  Clone ID: LIB3135-012-Q1-K1-C10
aagcaccttccgttcgtgaaagggacggagcatacggagtgactgcaagcgtgggggttcatcaacagcatagccctatcggcttaatcacgagaactactctttgctttaaggcttgtaccacctcaagaaccagggcattagctttcccggagcaaagactgattacgctttcttgcttgaccgagctgatgcatgtgcatcggataataaagggccagtgagtgtcttaccttcatgctgatgaagaatatgaccctgatgcgaatcgtgagtaaaagaaaaaagcaaggctatatggatggaggatctggtgcataggtgtgaaatcttttttttctcatgcctaaagctatttttgatagcgggcattttacaaggggtg

SEQ ID NO: 33021 - DNA, 279 bp, Gossypium hirsutum
  Clone ID: LIB3135-012-Q1-K1-C12
gtgctaccttccttctgtaatggccactgctacaatgttgcacgttgtggattgcgtagaacctaatcttagagttgaatacgaaaaccagctattaggcatcctgggaattgataaggagaaggtagatgaatgctgtaagctgataacagatctggtaacaacaatagttcaagggaacctatcaaagaaacgtaggtttagtagctccattccacgcagcccgaatggcgtaatggatgtgtggtttagttccgacagctcgaacgattcgtgggc

SEQ ID NO: 33022 - DNA, 324 bp, Gossypium hirsutum
  Clone ID: LIB3135-012-Q1-K1-C4
aggctttagctcagtggaatcacatcttaccatccatccaaatggtgcattgagcaaatttactagttcgatatgttgaccaaaggaccttatttacccagcttctaaccatgcttcagcttgttattagatatactcttgcatcctacatatatatgctacatttatctagacaaaatgctctggcattattagcaaaccacctcctgaagcttcattgaaaacaccgtgtggacgtgcttttaggcccatcaggcatttgcttgagttgacacatgaaaacaaacaaggagcacatattttgtagtttggaaactttttaaa

SEQ ID NO: 33023 - DNA, 196 bp, Gossypium hirsutum
  Clone ID: LIB3135-012-Q1-K1-C7
ttcactcgatcaatcacatgacggatatcgtacatttgctaataatgcaaattggcggggaggatctggccaatccgtccttagggacctatgagtctcccacatatgggaagcccatggcgtgccgtattaaacaacctaaggggaagcccgcaccttatcaacatcctggttataaaccatgctgaggtgaaac

SEQ ID NO: 33024 - DNA, 163 bp, Gossypium hirsutum
  Clone ID: LIB3135-012-Q1-K1-C8
cggctaatgctgttttagcagactacatgtcatgcgacaaatggcaggaagaaggggatggcgatgaccaccttgacgacattaagaaggactggctaaacccggaactcttcaaaaaagatcctatgattggtagcttgaagcagacaatgcatacgacaaa

SEQ ID NO: 33025 - DNA, 229 bp, Gossypium hirsutum
  Clone ID: LIB3135-012-Q1-K1-D10
ggtgttccagttggtgctgtggttgttagatgttaaagtctgtggtttctttggggacaacagggtggttgttgctcgtcctgtttgtcgtagaaacttaatgtcgcttgagcaaagcatggtattgtatctctttctggatgtgttgatccattttcttgtattgagcaattctttggcttctttaaccatcgatttgttttgccatcgtcaataaaaaaaaaaatta

SEQ ID NO: 33026 - DNA, 298 bp, Gossypium hirsutum
  Clone ID: LIB3135-012-Q1-K1-D6
ggaacagatttcaagtatcaatatgcacacacatggttccggcaaatggacaagttcattcattatgttaatcaagatggacgtgtgaatgccctatattctaccccatcgatatatactgatgcaaaatatgctacaaatgaagcttggccactgaagactgatgactactttccatatgcagaccgtataaatgcctactggactggatattttacaagccggcctgcactcaaaggttatgttaggacaatgagtggctactatttggtaagatgtatattgtacaagcccaatc

SEQ ID NO: 33027 - DNA, 251 bp, Gossypium hirsutum
  Clone ID: LIB3135-012-Q1-K1-E10
gttcgatgcacgcgtccgaaaaaaaaaaaaatattattttgtaaatattcataataaattaaaaaatataaaggaaaatggggaaaaaatatgatgtaatgttattacttaaaaaatattaaaaaataaatggggggacacttaaaaggacccatctttacttcggcgtgaagggaaagacttattacatttattagggaccaaaattcaatcaaattggtcttttttttacaaggccaaaatcgggaaaa

SEQ ID NO: 33028 - DNA, 274 bp, Gossypium hirsutum
  unsure (1)..(274): unsure at all n locations
  Clone ID: LIB3135-012-Q1-K1-E3
taagcaaaacgggaaggaaaggagtggccttgggcacagaaaatatccagcangaggaggaggaggaggaggttagttgacctttgtaaagcgttttagtattgtcagaataaagcttaaatatcaaataaggtattcgattaatagttaaagcatgtcaatcagttttcatgtagatatcctttagttttccaaatatatttggcctgtctatgtacgttgtttgaaatgtttttgcatatagttgaggaatgaagatgcttgtcgttttggt

SEQ ID NO: 33029 - DNA, 221 bp, Gossypium hirsutum
  Clone ID: LIB3135-012-Q1-K1-E9
gggcaaagaaagtcacaaacatacccgatatttagagcgccggagatagaagcggcggcaggcataaagtggagaatttccatccacttgctgtttccttcgataccgcttactcaggattagaatctaatagaaaggggtcaacattacgaaattagccaggttcagttctgactataactgcaacctatctcaattggggagaaatgtaccgccctcga

SEQ ID NO: 33030 - DNA, 193 bp, Gossypium hirsutum
  Clone ID: LIB3135-012-Q1-K1-F11
ccggaggcaaactatagtgtaataatgtgtggggaagactatatcgatgcattttgagaagctttgacggatggatatgcctggaaagcatgaccgagatattatgcgggttctcgtggaatgttgcttgcaagagaaggtctataacaagttcttcacttgttcttgccgctaagttgtgtgagcatgaaaa

SEQ ID NO: 33031 - DNA, 398 bp, Gossypium hirsutum
  Clone ID: LIB3135-012-Q1-K1-G10
cccacgcgtccgcccacgcgttcgcccacgcgtccgttttgcttttattttcttttctaggaagaagctgtaatttaaattttttccccctatacatgagtgttgtattaagacatcatctagagccgtaagagagaatctctacagctcttaggtaatacataaaaaaggtggtttttttggggggacatttcaaagaagaaaggcttcgtcaatagtatactggaatttgaaatcaaatgataaaatttcttttcaaaaaataaaatttttcatataaaatcatttttttttttttttttatcctttttttatttttttttttatttttttatatctaatctttttactctcttctttttttttttttaatcttttatacatttcttttttttttt

SEQ ID NO: 33032 - DNA, 374 bp, Gossypium hirsutum
  Clone ID: LIB3135-012-Q1-K1-G2
gcggcgatgagatgcagatcttggtccaaaccctcacggggaaaaccattaccctcgaggtcgagtattgcgacaccatggactatgtgaaagccacgatgcaagacaaggaaggcattcctacaaatcaacaacgccttatcttcgcccggaagcatgattgaagacggccgcaccttatccgactactatatccagaaggaatgcactcttcacctggtgcttcggctacacagcggtgccaagaagaggaagaagaagacctacacgaagcccaagaagatcaagcacattaagaagaaggtcaagctcgccgctctgcaattgtacaaggtggacgagtctggtaaggttcataggctgagaaaagagtg

SEQ ID NO: 33033 - DNA, 312 bp, Gossypium hirsutum
  Clone ID: LIB3135-012-Q1-K1-G5
tcgcccacacgtgcggatcattgcaattgttggtcttcaacgaggaattcctagtaagcgcgagtcatcagctcgcgttgactacgttcctgccctttgttcacaccgcccgccgcttctaccgattgaatggtccggcgaagtgttcggatcgcggcgacgtggtcagatcgctgcccgcgacataactagaagttcactgaaccttatcatttagaggaaggagaagtctttacaaagcttccgtaggaaacctggggaggatcattgtcgaaaccttcaaaaataaaaaaaaaaaaggggggccggttt

SEQ ID NO: 33034 - DNA, 336 bp, Gossypium hirsutum
  Clone ID: LIB3135-012-Q1-K1-G9
aaaccgcttcagctgtgtagtggtatgaagaccaaagttgataacatgcatatcgagaatgataacatcatcgcgaacatcattaaggaacatagagagagaagggcccgagaaaagagcggtcacgccgaagctgaacaagaagatctcggtgcagtgctcttaaagattcatgaggagaatgagctctacttggctgacaagaacatgaaatcaatcatcgtggacgcttttggtgcaggaagcgaaacatcatacacaaccgaagagcgggcactcttcgaaatgataaataattcatgggtgatgaacgacgcccaagctgaacttaggcga

SEQ ID NO: 33035 - DNA, 381 bp, Gossypium hirsutum
  Clone ID: LIB3135-012-Q1-K1-H2
cccacgcgtccgactggacatactcttcggctttacagtttccttctacattagagaaggggctcgcaaaaatgatgtcattaaaaagcaaatttggtggcttattgagtcagatgacccgtctttttgggatggatgatgaattcggggaggatgcaattttggggaggcttgaaggcatgaaagatgtgatcgaacaagttaataagcagtttaaagacccggacatgacaaccttcatctgcgtttgcattccggagttcctctctctatacgaaacagagagactggtgcaggaactcgccaagtttgagatagatacacacaatatcatcatcaaccaagtaattttcgatgatgaagatgtcgagtccaagttat

SEQ ID NO: 33036 - DNA, 204 bp, Gossypium hirsutum
  Clone ID: LIB3135-012-Q1-K1-H3
acagggaaggaagtgcctggctaccacaagccgaagctatctatgggtgacaacgaagaaatcggttccgagggggatggacaattaccacgctaagtacaatgagactgatcctatcgaaccgctctaccaggtccgaatcggtgggaagatctctacgtaccatggtgctctagccaacgagcgacaccaccatgagcacaa

SEQ ID NO: 33037 - DNA, 273 bp, Gossypium hirsutum
  Clone ID: LIB3135-012-Q1-K1-H5
aggatatgaactgtccggaactcatgttcatctattgggactaacatcaaatgctcccatggatgtcatttgggacatcatgcgctgctgggttaaaaatcatccagtgtaagctcaaccgtatgaacagtctggaagagtgatacttgccaaagaaccagttcttcaagcaaattttgctcgagctgatgcattccttatcacggcacaagctaagaaggatgctcgctttctaccgaatcctgaaaggcactgggggccaaagcttatggc

SEQ ID NO: 33038 - DNA, 369 bp, Gossypium hirsutum
  Clone ID: LIB3135-012-Q1-K1-H6
gggatacgcaagagtctgaatcctggaaagtccttcataaccaacaaataattggtccacgggagagggttgtcggtgcgaagcttcgagggaagaagtgcgtgagttggagtctcgaccaaagaacaaacgggacttgaatatcgtccagaatcttcggtcctaaaactcgacgatgtgaatgaatgatttatgccgtaatcggacgcacgcaagaacagtggctttgactttgtgtgatgacttaagtctgcgactgctctatcaaatgaactttgtgtgtgttcttcactgtttgcatatggggtactggataaacatatttacttttcaggttaaagccgtttatgtttgtatcacatctgtgct

SEQ ID NO: 33039 - DNA, 217 bp, Gossypium hirsutum
  Clone ID: LIB3135-012-Q1-K1-H7
gggagatctaaaagtaagaaacgaggatggttttgtggcgccaaccgataatcctaggctggggcaggttgatacccaccagacttcataggaaaaacacccagagtagctgaatgctgagagccaaggggagatctgaattgtctcgctaagcacagagacacagaattaggtgctagaacggaaggatccattgctttaagggccataaacgcaa

SEQ ID NO: 33040 - DNA, 429 bp, Gossypium hirsutum
  Clone ID: LIB3135-012-Q1-K1-H9
aatttttgacaaaagacaaaaagtaatcaccacatggcttgaccctcttatcggtgtccccagtggagtcgccaagctgttgacaccattttttttatggaaaacggggtcgacttgggttttgaaaatgaaaaagggagtcgccaccaattctttttgaggtgtgattgggtcaccttggaaaaggttgcttttaataaataatttaattttattaaaacaacggttttggtctacgaaatttagaaaatgggttcgggagtcggttacgtacgaggaaggattagcatcctcgttacgcccagaaattggtacctacttgattatttaatgtctcaatgtcaaaaattgagaacttgaaagaattaaaaatacgatccttgtattaaaatgaaaatttttggaaaaagaaaatatttcacgttaatc

SEQ ID NO: 33041 - DNA, 425 bp, Gossypium hirsutum
  unsure (1)..(425): unsure at all n locations
  Clone ID: LIB3135-013-Q1-K1-A10
gtgaacatcatgtttggtggatgaccggatgcagagacaaccttatacacttgtgagggagcaatctcatttctcattttggaatgtcattaaccaaaaacaaagagaaaaaatggaggaagaaatacagacaacaaatttatgacgttgtatgcacttagtttaaacgttgaataagtatcgagttgattgcatttagaatcttttccattgttgtgtagaagcctcattgttgtgtagaagcctctcttatcctgccagaatgatgctgttgggatagtttttgttcagactgaatcttgaaatgttaacataactttaggtatatcttaatcaatgttatcttcagaatantcnnntnnnaaaaattaatattaaaatatttatttttttttttttttttttttttttttattttttttttt

SEQ ID NO: 33042 - DNA, 265 bp, Gossypium hirsutum
  Clone ID: LIB3135-013-Q1-K1-A12
tctgaattagactactttattgttggccacatgatcgagttcctttgcaagaaaggaaagcagattggcatgctggcttaaacaacagagttggattcaaggatctgatagccaatggcattgaagcggggactatccagtgtgggcgtccaaaggaatagaagttctggatatcgcttgcgtatcgagatacttcttttcttctcaaatctgatgctcattgctttgagttcattacaaatctggggcttgcaggttcacactc

SEQ ID NO: 33043 - DNA, 250 bp, Gossypium hirsutum
  Clone ID: LIB3135-013-Q1-K1-A8
cttgtatgtgtttgaaaagtgtttctcgatcaatcaaggtttgtaatgtgatcatgtgataacaattttgcagtattttgtttaagttttatttgcaagtatagctgatggaatgcaatacagaatttgagtgcttgttatttcatggctgaaaatgcttattcggttattacagtagacacgagaagatttagcacaaaacgaataattttattaaaaaaataataaatactttacttatttgccttag

SEQ ID NO: 33044 - DNA, 292 bp, Gossypium hirsutum
  Clone ID: LIB3135-013-Q1-K1-B12
cgcccacgcgcacgaagctacatttcgggacatcacctagtgttagcaaggtcactgtggaaggatcaccaatgactgttctggaaacatccccgatgggaaaaaagaagaagctcctagaactgtttcgagagagcgttagagaagacctaaaccttacttcaaaatcgtgaaaacggaccacctatcatatctctggagctacctctctatgcagtagtgaaaggtactgctaatggacatcatgaataccctaagtttcaaggacaagccattaatagttatgcaaagt

SEQ ID NO: 33045 - DNA, 408 bp, Gossypium hirsutum
  Clone ID: LIB3135-013-Q1-K1-B2
gggcggttcaatcttatgaccgagttcccgtattacagagaagtttattacaaaccggattttcgaaacaaaaaggggaaaccagttgttttcgatatggatatgagtgccggagatttcctggctctattttatctcctcaaagtacctgttgaagtgctcgacctcaaggcaatattggtaactccgaccggttgggctaatgctgcaactatcgatatcgtctatgatttactacacatgatgggtcgggatgatattccggttggtttaggagacgtatttgcaatgaatcaatccgatatagttttccctcctgttggagactgtaagtatgctaaggctatcccgcatggaagcggcggattcttggattcagatactctttacgggctagctcgggaatta

SEQ ID NO: 33046 - DNA, 292 bp, Gossypium hirsutum
  Clone ID: LIB3135-013-Q1-K1-B3
gtgcggatcaaccttacacccgagagagcgtctgaccctgatgcacacaacataccgcatttggttaccaaactcggaacacgagctgaggcagctcaggatgctgctgccgatgctctgctggtactcaggcaagctcggacagctcgcccagatgagctttatcgagctgaaacattggctgctgcaaacgcaatgcctaaggtggaatacatgaaccaatctgatccacctctacacaaggagaaggcggaatatctgttgcaatgcttgacagacacattggcggtga

SEQ ID NO: 33047 - DNA, 288 bp, Gossypium hirsutum
  unsure (1)..(288): unsure at all n locations
  Clone ID: LIB3135-013-Q1-K1-B4
ccgccaaccacaaaaaaaaccgccgcggagcttngaaagagaacagccaacaaaccncacaggangggaaagagcaagaacggaaccaagggcaacggaaggatcgggcgcaaggacgcgagagacgcacgccaaagcgaagagaacgagcccgacgccgagaacgaaccaagcaacaccacagaagacaggaccaacacgaagacagacgacagggagcacggccaagggaagcaacaagagctgaaggtgaaggacacaaaagacacccgcacgagaggaaaagcc

SEQ ID NO: 33048 - DNA, 381 bp, Gossypium hirsutum
  Clone ID: LIB3135-013-Q1-K1-B6
cccacgcgttcgctgatggatctcactgaataaaggtagagaggaatggtcaaggtacttagtggtggctataagattaaatatcactcatgatggccgtgaaagtgatccaatagagatcgatagtagtccgtctagtccgtggcttgacatggtctgggaataacaaaagattggttacctcagcatacacaaggacttttgctgagatgaaactagccaatatttgatggatgcatgaccaaagtttgggatcaaatgcactcttcctgatacaacagcacgtttattagaaaaacttggtggatattttctagaagaggactctgtggactctactctcatcatgaacccattctgtaataaagagggctttttgct

SEQ ID NO: 33049 - DNA, 285 bp, Gossypium hirsutum
  Clone ID: LIB3135-013-Q1-K1-C11
ctacaacctaaagcgaaggacttttttgagcctcaccataaacggacacgttgctgaatatgccatactcaggacgtgtgccacctgctcatcaactacctccccgggggaacgaacctggcccatcacatcagcctgcacaaggggtcctatattcgtatcacgaaaatcaaattataaggggggattcgatcctatcgatcgaacggcaccttgtggcgcacaaacacacaccttaggaccacgagctatacacggctcgtactcaatccgactatctttttc

SEQ ID NO: 33050 - DNA, 227 bp, Gossypium hirsutum
  Clone ID: LIB3135-013-Q1-K1-C12
aaaagaaggaagacagcgagcaagatatccaggaagggggacataaggatgggaagccacggaagaaaaacaaggacagaggaacaaactagtggagggtttgactcaaggacgcagaacaaaatgaactacgggctgaaaacaggaactgaaacttcctggggagtgtatcaaaacaagaaaagcgaagaagggaggattcagagcaaaaccagacaaaaagagac

SEQ ID NO: 33051 - DNA, 320 bp, Gossypium hirsutum
  Clone ID: LIB3135-013-Q1-K1-C3
acaaagttgaatctgatgatttatttccggcataagagggaatctaaacctatccttcttatctccttcttgacgctggaaagagagagttgagcttctattataggccttctggccttcgtgccggcatcaatcatcttactcgccgttaaggccctgctttctctttatgatttggtggacacaatcttccgtgggagctcatgcaaataatgtggagatattgcttctgctatcatacattaagcttcggcacgattggaacggacgactgagaactcacttgtaatatagacaacaccactgatgttaggatccac

SEQ ID NO: 33052 - DNA, 265 bp, Gossypium hirsutum
  Clone ID: LIB3135-013-Q1-K1-C9
ggcgcggacacgaggaaacagcaacattctgcggacaagaagcactcgcccgcgccggggatcggggcacagggagaagcaaaccgcctttcgaaggccacgtgaagccgcgacgtggagccagccaaccacccaacggccaacacaaaaccacaggaggcgaagatagcacaaggcggacccgggattagaggaacaaaaagaccaagaatattagaccagcccacgcaaaacacatatcacaagcgaaggccgagccgcaaag

SEQ ID NO: 33053 - DNA, 339 bp, Gossypium hirsutum
  Clone ID: LIB3135-013-Q1-K1-D12
gacttcacccgaatcctactgcttttataggttctttaagcgcaacataaaaatgcaacaccgcgatactttgtgggtaacacaactaataacatgggtggtgaacctgacatgacggacgagttgtggttcaatttggaccacctcgaagaaggttcccagtgtgtcatatatcaccatctaaagctgttgttagatgcgtctatgtgccttgtatacggatgctgaacgggggtctgcagttcagggagtcacctaacatgtcttgttcttgaacaaaaaatattctatcttgtattgggctgcacttgcacatacttagattaaatttgttacttt

SEQ ID NO: 33054 - DNA, 448 bp, Gossypium hirsutum
  Clone ID: LIB3135-013-Q1-K1-D3
ggcagaaatccgaggacgtagcgcagaaaatcctctactccatcgagtgcgaaatgaggcggtgcccttacacgttaggcttgggagagccaaacctctccggcaaaccaaacctcgactacgacgccgtttgcaagccgaacgaactccacgcgctcaagtccagcccgtacgatcacatcgaaaaccacgagaactctacgctttacaccaccaatcacatcctcgaatcatggatccagacggcgaaacagctgttgaaacgcatcgcttcggggatcgacgccggtagtttcgaagccgccgccggcgactgttacatattggaaaagatctggaagcttctggaagaaatcgaagatctccatctcctaatggatcccaacgatttccttcacctcaaaagccagttgcagataaaatccggtaacgaaaacggagcgttttg

SEQ ID NO: 33055 - DNA, 302 bp, Gossypium hirsutum
  Clone ID: LIB3135-013-Q1-K1-D5
cacagacgtgcgacaatagtggcaggtggtttatctattccaaaaaaagccctcggtcgcagaacacgataaatatgccagggggcaaaacagcatgtacgaggggaatcacacgagcggaacattgattcagtaagggtggtcggttcaaatcaatcctacaaagatgatagcggatacacgaagcacatataaaactaggccccatacaaggatcagcctgcggaagctgaacatggaacattgttaggaacagaagacgacttgaatgataacgattttgaacaagagctgaaagtttt

SEQ ID NO: 33056 - DNA, 409 bp, Gossypium hirsutum
  Clone ID: LIB3135-013-Q1-K1-D6
cacggacgggaaacattagaagcatgctgtttatctgacgcagaacaagccagcgtacccaggactgggcacgaggaccatgggacctcaaagcatgaacaattggaatcgcttgagctgggctacgcagcagtaaaggaggaaggtacacatcgttccctgtaaagaatataacaacacacacgaaggacatataagactagggccactagaagcatacgcaagaggaggcagaacccggaagactgtcagggaacggaagaagcagggactgttaaagagaatgaagcaaaactgactgagatgaatgaagcccgaaaaatcatagtagagactggcatagatgcctcgacaaaacgccatgtgaaaggacatggaaaataccgaggaagggggccaaaatttaaac

SEQ ID NO: 33057 - DNA, 151 bp, Gossypium hirsutum
  Clone ID: LIB3135-013-Q1-K1-E5
gtaactcgaaaaatgttagaccacacgcaattgcatggttagcttctacagaagaaagaaaagggaaggagcagaaacacactacaaaggagaatgtgctctcaggacaaaactagaaatggtcaatcaaacatgcatgctgataaagcaa

SEQ ID NO: 33058 - DNA, 263 bp, Gossypium hirsutum
  Clone ID: LIB3135-013-Q1-K1-F2
gactagctgcgcatatggagacgctgcgggttctttaccgccgagccctgaacgacacaatcaactgggtcggccattagcacctcttatatcaagatgcttctgaccttcttgagagacgcgtagccgacctgcatgggcaagatcgtggtacacacgacaaaatgcttgatgcacgtgctgcaacttatactaagtggccgcatccccatccttatatcgttccttgcgctcctgctggatccaaggttactccaaaccct

SEQ ID NO: 33059 - DNA, 206 bp, Gossypium hirsutum
  Clone ID: LIB3135-013-Q1-K1-F3
cgaggattgaacaggttctgtggcatcgatttgtatcattcgtcgcgtactctaaaggatgggcatacacccgatgcagacaacgcttatatcttgactctggacccatttcggagaatcaggtcggcgcgacgcatgctggatacaggatgctcctggctgcactgagaatacctcttgaggatggttccgctcgatcacccttc

SEQ ID NO: 33060 - DNA, 298 bp, Gossypium hirsutum
  Clone ID: LIB3135-013-Q1-K1-F5
aacgagctaaatggcaatacttggaggagtctaataattttgtatgtatcagaatttattccagtactgaaaagatctcacgaccatataaaaaagaaccgttatggccatatatgaactgtaaaagaaatatatcgggaacaataaatacgttaaacgtggttaccattatcatataactcaccttttaaagcttagaagagccctcgtaatggccgctaccagcgataattgggagcgcaagttcttatataaaatctaaaaatgatggctttaccttgaacataaacttgtctat

SEQ ID NO: 33061 - DNA, 275 bp, Gossypium hirsutum
  Clone ID: LIB3135-013-Q1-K1-F8
gaaaagtgctgagtccggtcccttaagtcgttggcctaaacgaaccgccggtcggtccgaatttcctcgacgatttgaagagcggtgggtggtttccggttcggatcgacgcgtatgagacgagatggttaggacccgattgtgcaatggcggtggtgaagaaaggggaggagaaaggaggtgaagtgtacgccgccattgtttttacgagtagtggggaagtggaagggtttttgaagggcttgaaggaatttgggtgggattgggggacggtc

SEQ ID NO: 33062 - DNA, 405 bp, Gossypium hirsutum
  Clone ID: LIB3135-013-Q1-K1-F9
tttccacgactcttctgtcacccgttcaagctgcgtcactgtcttgttcaacacagttaaatagaaggggaaaatatttatagaaaattccacctctgaacagatcttctccctctcgtcaaacaacggacagtcatttaaggctttaaattggagctaatattgaatggagggaattagaggcgatggtgcatcatcagcttcgcctttgtctcaatgggggcacgacggttggaggatttatcagtattatctcgataagactactcctcatacagcttataggtggattggaacccttgttataacggctatctattgtttgcgggtttatcatgttcaaggcttttacgtaattgcatatggccctgggatctacctgttgaatttgctaataggattttt

SEQ ID NO: 33063 - DNA, 436 bp, Gossypium hirsutum
  unsure (1)..(436): unsure at all n locations
  Clone ID: LIB3135-013-Q1-K1-G1
gtaaacaatgtgtcttcttgggagacgggaagatagcttagtgccgcttgaatgaaagatgaagctgaaatgactggcatggagctcgatccaattgcctcaggaatgtcttcttttggtccatttggtcttccctctgttctaggagtcaaatccatgtatgccaagaaattctgagtttcagatgaaattaaccccatgaagattgtagattatgtctgaaatgatgcatgaatattggtgctgaaagacgagggttttcgaggctttcggtgttgttcagaagctgtccacattttcatgctccaagcaactgcaatcggaaaactggctctgcgcttgaaagctacgaaggtaactactaaacagaggtaacaaagtcaattttttgctaaagnttgttggtgaaaaaaaaaagtattttcactatgaaaaa

SEQ ID NO: 33064 - DNA, 235 bp, Gossypium hirsutum
  Clone ID: LIB3135-013-Q1-K1-G11
gccacacgttcgcacagatagatttatgactaatattgaagcaactcctgaggggggtaacatgcttaggcgcatgtactaaaatgtacaagagccgtctttgaatgctacgactatgggtggaaataatggaaaaagttcagatacaaacccatgagctgcttcattgggcaatcaaggagcctccgaagctagaaggacaccaattaacactactacgactgaatgtgaaacc

SEQ ID NO: 33065 - DNA, 440 bp, Gossypium hirsutum
  unsure (1)..(440): unsure at all n locations
  Clone ID: LIB3135-013-Q1-K1-G3
cccacgcgtccgattcactaaaaattttataggagaagagacaaacatagaagtcttttctgattaggcagatattctctaactgattgtatatgtacttgcggatgcttatgtttaattcatgattttaattcattgatttcattgttgtgcttaactgccaaactatctccttgtattatctttctaaagtgcatccttttggaattgatgacatatttaagaagtgattgaggtatttcacgtaagctggtgatattgccctagggccttgggggtaaactatgttgtttccgggaaagatttagatttaatgatacttatgattcgagaatatagtgattatgttaaacaattagtttaatttactcagttgctacacctggacatttgccataaaaaagaggtccaggttggcgtgtttactangatcttgacac

SEQ ID NO: 33066 - DNA, 285 bp, Gossypium hirsutum
  Clone ID: LIB3135-013-Q1-K1-G9
ctttcatgcagaaccaagtaccattactctattgtcaaacaaaaaaactgcatcggatgtcttgttcaacacagttaaaaaaaaggggaaaagctacatcgaaaaaaccaacagtgaacacaacatggtcctttcgtcaaacaacggacagtcagttaacgctataaagtgaagctaatattgaaaggagggaattagaggcgatggggcatcaataacagcgccaatcatcttaatggaggcacaacggttggaggaaataatagcattaacttcgaaaagaca

SEQ ID NO: 33067 - DNA, 434 bp, Gossypium hirsutum
  Clone ID: LIB3135-013-Q1-K1-H1
cccacgcgtccgctttgatcaaattggtccagccctgttattttctgacagtcaagcaacacttcagatcgcggcgaatccagtattccatgagcgaactaaacacattgagatagattgccattttgttagagaaaaaaatacgagaaaggctaattcgaacgcaacatgtgcaaacgacgagtagctcgcagatgtgatgacaaaggcacttggagtccaacaacatgcgtatttggtgaccaagttggaggataaagatctttaccaccctccaacttgagggggagtgttgaaaggctgattgggggttattggttagtttgtaattctaactaaatatcaatacttagttaagtatttagggactaaagtgttgatgtataaatagttgagggtgtaacttaaggattgatccttttttatctcttaat

SEQ ID NO: 33068 - DNA, 440 bp, Gossypium hirsutum
  unsure (1)..(440): unsure at all n locations
  Clone ID: LIB3135-013-Q1-K1-H11
cagagctgacttctgggttttacaatcctgcacatcgtgatggctatgctccgattgcagcaattgcattaaacttcacatgtgttgaattgcgcaccttaaatcagcacgagggcttcccagaggcaatggcagacccagagggcttagtttggcaggtgctgaatgccgcgtgggatgtttccataccggttgctagtgagaatgctcttccatgctatgacagagaaggctacaataagatactagaaaatgccaagccccggaacgacccagatggccgccatttatcggcttttacctacctcaggctcaacccagcactgatagagagacgcaactttgtagagtttgaaagatttgtcaaggggatgcatggggaagcaatatcagatctcccattgaactgaaagacctgctaccacccaangggaaggatg

SEQ ID NO: 33069 - DNA, 320 bp, Gossypium hirsutum
  unsure (1)..(320): unsure at all n locations
  Clone ID: LIB3135-013-Q1-K1-H2
ggcccggaaannccgggacgacggacgcgaccgcccacgcgnacgcagagaacaaaaggggccagccccggtacgnccagacagacaagcaacaggggacagcgcggcgaaaccaggacaccacgaacgaactaaacacagcgagagagagagccaccccgggagagaaaaaaagacgagaaaggcgaaagcgaacgcaacacgagcaaacgacgaggagcgcgcagaagggaagacaaaggcactgggaggccaacaacaagcgaacgtggtgaccaaggcggaggaaaaagagcatgaccacccgccaacgagagggg

SEQ ID NO: 33070 - DNA, 336 bp, Gossypium hirsutum
  Clone ID: LIB3135-013-Q1-K1-H3
tggaccggttaccaacgtctgcgacttgtattataccttttaaagcttccaccatacggaagcaaagagcaactggaaaccaaattgctatatgctataaatgcagatgctggttttgatttgagttgagttgtactctacatatgcaactcgacacgtagacaaagaccggctccggtgtcaggtttgaatgaagtatatgtgcacatcggtaatttatattcttatatatcggaattggaatgtcagaaattttctaactgataccatgagagctggaagggggggatgaatggttgtttgagaccaaaaggccaagaaccataacagggagta

SEQ ID NO: 33071 - DNA, 342 bp, Gossypium hirsutum
  Clone ID: LIB3135-013-Q1-K1-H5
ggtgaatctgctgctgttccaaaaggtgaatttcaagtgaagctggaggaaaaaggcaggggtgataacccaccctcttcatcatcttctgttaatacaagtgaaattgttttggggacaaacgaaagcctcagctcaaccccccctgagtcatctgcaagtccacttgttaccaaggatgatgatacaacttcaggaacagagtctgcccctgagattaccgaagatgttggagatccaaccaaggaaacaaagaactaatgtactttctgaagaaatggtgtgggtcagctattattactcattccgtggcatgacattgatctgatgggggggtgggca

SEQ ID NO: 33072 - DNA, 263 bp, Gossypium hirsutum
  Clone ID: LIB3135-013-Q1-K1-H7
ggagaaaaaataatacatgtgtttatttcgctaaaaacagcttcaaatggttactttcagaccccacatattaaaggggggacttctctcaaaccatgaattaaaaaaaatctttcaacattttatggaaccgtggggtggcaagcaaaacaaaaattgctgtttggcgaataatacacagttatatttctactttaagcaatctccaatttataaagctgccagtggtggacatttgcccatttttcaaatttgaaaaggaa

SEQ ID NO: 33073 - DNA, 229 bp, Gossypium hirsutum
  Clone ID: LIB3135-013-Q1-K1-H9
cccacgcgtccggtaatattttgtttttccttttgaagcaaaaactgcttctttgtgggtttccttaaccctttggccgccgttcagcccacgcctcgattccgacggaggggacaccagctcgaagacttcggcgaaaggtaagtctcccttttccccttttattctattattttcacaaaacaaatatattatgaataaaaaattaatttatttgtctttttatcat

SEQ ID NO: 33074 - DNA, 415 bp, Gossypium hirsutum
  Clone ID: LIB3135-014-Q1-K1-A11
cgttcgcccacgcgtccgcccacgcgtctggaaagatgtgatgaaaaggtgtgttgctgcagaaccgaagcatggtgagaaatggcaagctatttcaaaggctgtagagaactctcaccagcctactgaagccattttaaagaaagtagtggttgtgttgggcaaggaagagagtgctgcggaaaataacagtaaacactaattacttttaactaatagttactcgtgtacttgggggtagtgccagctgaatcaattctgaagcatgttttctttggtttttggacaattatggtgagactttatcttcaactatgatgtttttagcatatagcgtctacttgttttgttgcctcgttttgcttaccattgtttccagagaaataacaataagacaagctttggagtttggttt

SEQ ID NO: 33075 - DNA, 220 bp, Gossypium hirsutum
  Clone ID: LIB3135-014-Q1-K1-A6
tgggcaaaatcttgattaccaactctgtacgatggcggaggctgcatagtttgcggactaattcggaactggcggtcgatcattatatcagtgaacagaggcatagttgctacataggggctgcatggagagacctgcacaggggaagacaccatgcaatcaggcagcacaacaggcacgagatttacgagacgtatcaactgaatgacactgatggctc

SEQ ID NO: 33076 - DNA, 161 bp, Gossypium hirsutum
  Clone ID: LIB3135-014-Q1-K1-B1
cccacgcgtccgatcgtgttaacccctattacagaaatgaacttgctttttatagccaaaccattttacaagacggtataggtgctggcacacacactgattgcggctcatagcaagtggaagataatgggggaaccggcattgtgagggctgctgaacgt

SEQ ID NO: 33077 - DNA, 261 bp, Gossypium hirsutum
  Clone ID: LIB3135-014-Q1-K1-B11
gtgaatgtttaagtccggtaacacctcgaaccctgtcccggctttggatacgggtgaggggagttacaaaaatccatagtgatttatttctacttccattcaggaatcatcataagttgtaataatcctgaagggacttgatgttccaccttaaattgttgacacaccaaatacttggctttgtattcggttatctcctttctaatgcttgactatcaatataataattttaaattattattcatcttaaaaatacatatc

SEQ ID NO: 33078 - DNA, 274 bp, Gossypium hirsutum
  Clone ID: LIB3135-014-Q1-K1-B3
gctggacataaaactacgaaactgatgtaagactgtgtatctcctagtgaacacaggacacagaggacagtgctatcgctggataaccaccaccggtctgagcctgtctcatgggcgatgttattctgaagccagcctacgttggtcctttataatatgaatattagctctttgtgcaaatgcggttgatatatgtacatgttaccatgtattgtcgttaaagattaagacttttaagtgtaaaagaccatataacgttgcttatggggggaaa

SEQ ID NO: 33079 - DNA, 281 bp, Gossypium hirsutum
  Clone ID: LIB3135-014-Q1-K1-B5
gcggtagggggtgatgaaattgaaaagcagaaaaagaagaagaagaagaagaagaagaggaacaaagagaatgaggaggctatagaggctattgctgaagccggtgtagatagtgcaatagatgcagggagcgatgaaattgagaagaagaagaagaagaagaagaagaacaaaaaaaatgaggaggctattgaagctattgctggtggtgacggtgcaaatgatgcaggggcagaggatgaaacccaaaagaagaaaaagatgaagagaaaaaggaaaag

SEQ ID NO: 33080 - DNA, 281 bp, Gossypium hirsutum
  Clone ID: LIB3135-014-Q1-K1-B9
aggagatcgagaatgggatgctgtgggaagtcgagggaaagtgggtcgtgcatggtgctcttgacgtggacattggagccaatccttcagccggagatgctgatgaggatgaatgagtggatgaccaatctgagagggttgatgacattgttgacacttttaggctcgaagagctaccgtctttggacaagacgctataagtcgtgttgatgaagaagctcatcaagaacttgacaacgaaactggatgctgtatagcaagagttcttgactaaaaacatt

SEQ ID NO: 33081 - DNA, 247 bp, Gossypium hirsutum
  Clone ID: LIB3135-014-Q1-K1-C1
gtattgcccaaggtaaagttggccgtggctttgatgtcagttctgctgtctatgggagtcagcgctatgttcgtttttcaccagaagtgctttctgctgctcaggctgcagtgaaagggatgccattagaggaagtaattgggaacattctaaatggaaaatggaaccatgagaggactgaattctctttgccaccattaatgacacttttactgtgagaaccgggaaccgggtgggatcattaaac

SEQ ID NO: 33082 - DNA, 205 bp, Gossypium hirsutum
  Clone ID: LIB3135-014-Q1-K1-C3
ggcaaacttaatatagtttgttttacttgtgaaggtcttgttttatattttgttgaggtttttggaccataaattagcttatctatggattttgaagctctaagaacctcctactaaatattgcttcatgaacttgttcctggaattgagtttgaattgtttcagttttcctttagtttttattgatgaatgagccactattgtc

SEQ ID NO: 33083 - DNA, 198 bp, Gossypium hirsutum
  Clone ID: LIB3135-014-Q1-K1-D1
accggatgatcaatcctgtaggatcaatccttggaatgccggacgaaaacatttttgacaagcaggtgctctttggaagaagcggggaggtttcgggatttgattctaatgaccccgcttcgaggagtggaggaaaagctgttgctgttcaacaaataacaaacgttcaggggctcgcgggattcgtcatgattggtg

SEQ ID NO: 33084 - DNA, 159 bp, Gossypium hirsutum
  Clone ID: LIB3135-014-Q1-K1-D7
cccacgcgtccgcccacgcgtccgggaacgcgtacgtgaaaaggctcaagctcaggctaaagggcaggtccctggggctaataaaccaatcgacgagaaacactgccctaagcatgtgtccttccttaatggacaggcgacgtcgcaactgggagccaa

SEQ ID NO: 33085 - DNA, 272 bp, Gossypium hirsutum
  Clone ID: LIB3135-014-Q1-K1-E5
gacccacgcgtccgcccacgcgtccggggacgtgtactgaaaaaggctcaggctgaggcttaaggccaagcccctggagtctagacaaaccagattggttcgtagaatactgacttaaccatgttacctaccttgttgaacagaacagggcgcacttggatgtcatcgaccaccacgtggaccccatagagcttgcatgctgactgactgcttcttgcaagagatgtgaggttccctactgaattgtcaaaggaaagcactattgggatcgt

SEQ ID NO: 33086 - DNA, 406 bp, Gossypium hirsutum
  Clone ID: LIB3135-014-Q1-K1-F3
acccacgcgtccgcccacgcgtccgctataatgtggcagatggaaggcttgcacagcatattgaaaaaggaaatgaggatggcttatttatcagcagtgtagcttcctgtcaaaatctatgggcccttataatggatgctgggactgggttctctgcacaagtgtatgaactctcaccatatttccttcataaggaatggataatggagcagtgggagaagaactattatatcagtgcaatatcaggggctacaaatgggggctccttatttgtaatgtaaaaaggtacttcgtttttgcagcagtcatataaagggagggagtcctttcctttaaagtgaattaccaaaaaatgggagaaggttttcattttaacttaaagggcaacttttggaacaaaatgggg

SEQ ID NO: 33087 - DNA, 162 bp, Gossypium hirsutum
  Clone ID: LIB3135-014-Q1-K1-F5
cccacgcgtacagacacacgtgcgaccatgcgtgcgttgtggacatcaacagtagagcacggggctaaaggttataatgggcagacctgacatcaacactcagctgaatactgcgtactaagacaggaacctgcacggggttcagaacacgaggttacaggt

SEQ ID NO: 33088 - DNA, 162 bp, Gossypium hirsutum
  Clone ID: LIB3135-014-Q1-K1-F7
ccttaagctcactcaaaaacgcgtaagggggcgatattggcactgaaaggcatagaatcatgtgaatgcatgagtctcaataaagaaacagaacgtggttgcatcacccgaagagaccacagctctgacgagaacctggattacgacaggccgacgaccccg

SEQ ID NO: 33089 - DNA, 233 bp, Gossypium hirsutum
  Clone ID: LIB3135-014-Q1-K1-F8
ccgaattcaccgatggatccacgcgtaccgcccgcaacatatgttacatcccaggtgatggcctcatcaacttaaatcgctgagacctttgccgcttgataacgcaagctcgcactctacccctgcttatcgtacaggctcaaattaaaacgtctggacaaacagacccatgcaaggttacaagaagaaagttaaagaacccatattggatagtgactcaacaagtagcacac

SEQ ID NO: 33090 - DNA, 378 bp, Gossypium hirsutum
  Clone ID: LIB3135-014-Q1-K1-G1
gttttcttattttttaactatattctgattctattaattagacttttttctatactgaatagggacgtgatgttccgattgatcatcgggtgattgaggttcatgagcagcgagatagcaaagaagctgatatactcactaaaggagacgctaatcctcacgatgacagaatgttgtacacatctagtaatcgttggatgcaacgaaaatacatcatgggcagagctgttgggtaaataaaacacctatttatttctaaaagggttaacaggtttaagaagggaaaacatttgtaaaacactttaattagaaatttctggcttaaccattggggctggatgctttaagttttaaagttaataaacctcatttggggtt

SEQ ID NO: 33091 - DNA, 244 bp, Gossypium hirsutum
  Clone ID: LIB3135-014-Q1-K1-G12
accacgcgtccgcctaacgggccaaacttatggttggtcagaccctgggccatacctacggcgactacgggatctgcccttacggtccatacttccatgaaatacacaaaataacagcctctgaacatatgtcaaaccagacgcttgagcttttgaaacacatcagatcctttgacatggaaagctcggtgaatgagctgtacgagctatgggcgaagaataaagtttcgacaaccccagtttt

SEQ ID NO: 33092 - DNA, 421 bp, Gossypium hirsutum
  Clone ID: LIB3135-014-Q1-K1-G4
tccacgcgtccgaacaaaacaagctgctgggtaccattccggatattttcaaatcgttcaccgaccttagaattcttagactttcccataatgaattttcggggaaaatcccagaatcaatattgtctttggcaccgaaaatggcgtaccttgagttgggccataatcttctggtcagggcaaataccgagttttctcggaaagtcaaaagcattggacactttaaatctttcatggaattcattcacaggggtagtacctaaaacattttcaaacttaaccaaaattttaaacttgaacctttctaacaattttttaaacaacccattctcccaattgaatttgaaaggctttgaacaactgatttaatctattaacaattttcaatttaaatgaaatcccaaatggggtcactttattt

SEQ ID NO: 33093 - DNA, 114 bp, Gossypium hirsutum
  Clone ID: LIB3135-014-Q1-K1-G5
gcgtccgaacatgttaactagatcattgtaattcgagctcaacgtcatgtttttgctagtagatggtgttcacgtagatgaatttgatcatccgttgtatgcggtataagagaa

SEQ ID NO: 33094 - DNA, 187 bp, Gossypium hirsutum
  Clone ID: LIB3135-014-Q1-K1-G8
cccacgcgtccgtataatgtacaatagttagtttaagttgaatttccatcttgcaaaagtgttctggttttttttcccctgtattcttgtagatccttgccccttgaacaattcttttacgaaatcctgaattatgccatatgatgtaattttgtttctataaatttgagtgatcctatttgtgttt

SEQ ID NO: 33095 - DNA, 278 bp, Gossypium hirsutum
  Clone ID: LIB3135-014-Q1-K1-G9
acatcatacctgttcaagaggtcatagccgagatgaccggtggtggacatcaccgccatgtttgatgttccgtgagcacacaccccacgacttctgcattccaatgtatacactatggttgggagacgtatcactgcttgtgggggtgaccaacaaagacgatgcattcaaatctcatccagtgtatctactgtatgaaacgactctcactggttctttctttggacactacgaacctccaactgatattcctgatgcccttgatagaaacatgaaca

SEQ ID NO: 33096 - DNA, 372 bp, Gossypium hirsutum
  Clone ID: LIB3135-014-Q1-K1-H11
tcggtacttcaagagagcgcacgatatcaaagcggtgggaggtttcttgggggccaagcatgctgccagggtcatggttccggccaagaaaggttgcataccattcacttcatgtctggctacaaaaatcagcttctgtggcccccatgcatacaaggcatctgagcatgcgcgtgcagggatgacgaaaagcacagccgtcgaaataggctgtgcatcgcaatttagagaacaacatactattattcactcttcattgcaaatttctgacctccaatgtttacagagaatcaaattgggatacctcgataagaagaatgtgagaggagatgaatgctgcttctgcagtgttgaaaggcacttgattggagc

SEQ ID NO: 33097 - DNA, 290 bp, Gossypium hirsutum
  Clone ID: LIB3135-014-Q1-K1-H5
gtcattctcaccctgagcttatggttggcagtggctcagatagagttcaagtaaagactctgcgcagacatcttgaggaagcatctcagatggttcagatgctgaaggcagaaaaagctaagattgaatcagaggcattaatgtaccaacaattggcaaggcagctggatgctgatctcaagagtctctcagatgcctacaatactcttgaacagaccaatatgcagctagaaaaagaggcgaaaactttgaagagcggtgggacatcaacatctcctgttatcgaggca

SEQ ID NO: 33098 - DNA, 263 bp, Gossypium hirsutum
  Clone ID: LIB3135-014-Q1-K1-H6
attgatggatgggtccacgcatccgaacttaacacgctattggctgccgacaaagagctgagtgatcgcctagtacaacggggggtggactctataaaggtgctccatgacaggatgctggctccagaggcggagggtgtgtgtctgaagcgttaaggctctctttttagcacgcgatgcgatgtcataatatataagaagagttgatgtaccgaagcccgcgtaagtcctttccaaaatgaacttgtaccgtttcacatata

SEQ ID NO: 33099 - DNA, 235 bp, Gossypium hirsutum
  Clone ID: LIB3135-014-Q1-K1-H8
tcgctctgttcaatcttatacgggtacctgatatatccggcatcatgacaacattaaggcgacgtgcagaaagaaaggtggggaagttccgaatgaacataacaaagagaggtgctgtgcctgagacaaccacaaagaaggggacggattatcccgagggtcctgtgcttcttgggttcttcatatacgacgtgattggagcatattctctttcagaatatcaaggacagcgacc

SEQ ID NO: 33100 - DNA, 251 bp, Gossypium hirsutum
  Clone ID: LIB3135-017-Q1-K1-E12
ttcatataatggacaacttcacaaccgccgctttatattgatatacggtccaacctttctttaattttattgcatacccatctcctttattgcatgcctatccatattttatctcgctcgatttcattcacctttttgttgttcaaaaatttttgaaccattcgttccctctaaaatatgctacttatatattttatttcaaaatattaatcatctactctctacaaaattatattttaaaacaatatttt

SEQ ID NO: 33101 - DNA, 239 bp, Gossypium hirsutum
  Clone ID: LIB3135-018-Q1-K1-A4
tcccacgcgttcgcggaggccgttttgatgttttacggtcactctaggctcgtggggaccgggtctagtggcctatcctcttatttgcaacaaaaaccgaatgaaagaggactatttggtccttttacttatccgacgcaatcgtcaaagccaaacacaaacctgaaacggtcttgtggcccgtggctcttgtgaattgccctcttccactgataaacgtgtggctacttaaggtctat

SEQ ID NO: 33102 - DNA, 430 bp, Gossypium hirsutum
  Clone ID: LIB3135-018-Q1-K1-A6
ttctgattgcttataaaatagtttgctcattagaaccttcattttctcgtcttttatttatttgtgtaaatcatttttctttgtttagtgacacaacgaatctttgaaaaatgatttacacaaataaataaaagacgagaaaatcggacgcgtgggcggacgcgtgggctcgaagaagatgatgccatcaccaaaagctcccaccgtggtgctatggtggctggcacacaacaatgccttgttctgcagtaacaatctggaatataactagagctccagcttatcggatctggggctcggtttctattatatcggcttggtgtctaggattaggattatgtttagaagcaatcttattcagatttgagtgttagatatgagtatgtattctaaggatgttactctttatgtgcaacttttatgtttattt

SEQ ID NO: 33103 - DNA, 194 bp, Gossypium hirsutum
  Clone ID: LIB3135-018-Q1-K1-B10
tcgcccacgcgtccgtccacgcgttctgaatccgccctgccctgtatggatagtatgggatggcggacttggtcaaggttaacttgatagccagaggaatgcgatcctggtattcagtttgttcaaccattaactcatttttgcttccccccctataaatctgcagatcttacctagaaagctatctaggtttt

SEQ ID NO: 33104 - DNA, 288 bp, Gossypium hirsutum
  Clone ID: LIB3135-018-Q1-K1-C3
gacctggctttcacgtaggagggtaggagatcgtgggttggactgccatgctgttttcatgaagacaggttgtgtacatcgtgctgacaacatctggtgggataatggtccatgaataagcctgaagaaagaaagactgtggaaaagtacttgcgttcttctattgaagggatttgtttagaattaaaacttaacgaattatgttctatcactttaaacatctgacgtaacctatgcctattttgttaattgcggcagttatcctatatgtaagtcgcttatagatgt

SEQ ID NO: 33105 - DNA, 338 bp, Gossypium hirsutum
  Clone ID: LIB3135-018-Q1-K1-C7
gctaaaaatcctggtttgtgctgttctggttgctttgggagatgttcggagccggctcttggcaaaatgacccccctccccctggcgcacacgcgcaaagggaggatatgttattcactgtgtgagatcggagtaatagttcttttaccatgccctgtaagttcatcttatttcaatgattgatgctagcactgccttaattcattcacgaagcatctgcaataagtttactaaaacaaccccctcaccattttccaaatgaagagaggctttagacatttcactagtgcatgcaatctgtccagcggttcaagattgtaattctgtttttatgaatt

SEQ ID NO: 33106 - DNA, 147 bp, Gossypium hirsutum
  Clone ID: LIB3135-018-Q1-K1-D2
ttctcgtcttttcacgcgtccgggatacttcggtgctgatcgatcaattttacagtgacaaaggccactgctcgaatcaatctctggatggagaagtatcggagataaactacgtagacttacgaggaacctattctagtaaaccgg

SEQ ID NO: 33107 - DNA, 255 bp, Gossypium hirsutum
  Clone ID: LIB3135-018-Q1-K1-D7
aaggttcatcaggaggatctgttgttttttttgcacgaaccacctctaggggttgggggtaagctcttaggccctttcactcccaatttacagcagttcaccttcttcactgataccgccttctctttagaccataagagctgtcatcgacccttaagtgaccctagaaagcttgtcccctccgtccagtagcttgatttttctaatgtggaaacgcaccctgttggttctcgaaggaatccttcttcaagaaca

SEQ ID NO: 33108 - DNA, 129 bp, Gossypium hirsutum
  Clone ID: LIB3135-018-Q1-K1-D8
gcgtgtagatagacatacccatttatcacgttatatttgcctcataatgactgaggatcattatataactggacaatgcctatgggaactggaaacagtgtgtgagggactccatgatcatagtgcacg

SEQ ID NO: 33109 - DNA, 251 bp, Gossypium hirsutum
  Clone ID: LIB3135-018-Q1-K1-E10
caaggcagcgacaaagaggacaaggaagtgcaagacaaacaggcgacccgggaggaaacaaaacaacactgaggccccgcaacccgggaggcccaacgctacaaaggcggagaagaaggagaagcgagcgagaaagaaagaggagaaggacccaaataagaacctcgtgagcaaggccaggacacaaatcggaggggggaaaacgacaggaaaccgggcagaaaaaagaaaaacgacgagaacacaaaaga

SEQ ID NO: 33110 - DNA, 362 bp, Gossypium hirsutum
  Clone ID: LIB3135-018-Q1-K1-E3
catcgatggagaggttaaagtcgacaaaatttattttaagaagacacctgctacaactcactctgctcattgaaacgttggggtttgttctctgttgctgttcacattttctatggattcgctcaaaagtttgtcttgctaatctaatgttatgtcctgttttggaagccattggtttggattaaattaaagaaaatgaaagtaaaagctaaggcaagctttgaaatggatttttttttttttgagatgttagtgtgcctttacatgaataatagttttgaaaaattattggttttgttatttttttttcatgcagattatcaaaactagataaccccttttttttttctttttataaaaat

SEQ ID NO: 33111 - DNA, 431 bp, Gossypium hirsutum
  Clone ID: LIB3135-018-Q1-K1-E5
gggaagacaatttggtggacagaaacttccttacaataagaacaagtccatagctggtagtgttgcaatggcaatagctggtttttttgacctctgttgggtatatgtattatttttcctactttggatatatcaaagagagtacggagattgttttcggtttcttgattgtgtctctcgcatcagcacttgtggagtcacttccagttagtaccgagctcgatgacaacctcacggttacattaacctcaatattggtcggcagccttgtcttctgatttaagaatcagtcttagaatgcagaggctagttgtaggagcagtgtttatttggggactgagaaatgttgtaatttagtgtaacatataaaatgttgaaatgtggccaatgacgatattccactgatgacattgaagttcaagtcccgagct

SEQ ID NO: 33112 - DNA, 308 bp, Gossypium hirsutum
  Clone ID: LIB3135-018-Q1-K1-E7
cattccttctatctgattattcttttcctttttcctctttgtttcacgtgtgaaaatggggaattgctgcacaagtaacaaaattctatcagaaaacgacgacctacaaggctgcagctgcaaccaacctaatcaactcatcaaggatatgggagatgttacagtttccaaatcggaaggggctgctgatggagttaagaccaacaacaacaacatggagaagaaaacgattaagaagaagaagaagaaggtggtgagattcaacttaaatgaagaaaacagtggtgatgatagatcagggaaacaag

SEQ ID NO: 33113 - DNA, 445 bp, Gossypium hirsutum
  Clone ID: LIB3135-018-Q1-K1-F2
aaaatcagtgcgccgatcatcgtccttcttctcatccagtgtttcagggaataaaagaaatccataacagaagcggcactgcagaaaagtgtttcataaaaaaaccctatcaaaagcttcgatgcaggcgtaaaacccttgttcccaccccctgttttcattgataaagaaaatggaggaaccaaagattggggattgcgaagagtgcaaaaagaaggcgtcaaaatacaagtgcccaggatgctgactccgcacctgcagactcccttgcgttaatgctcacaagcaacgcactggctgcactggcaaacgcaacatcacttcctttgttcccctctctcggttcgatgataatcttctctgcggcttcacttccacttccttttactatttatttacttaatgtttgtgtacgagcccattcatctttactgaacctaaattg

SEQ ID NO: 33114 - DNA, 386 bp, Gossypium hirsutum
  Clone ID: LIB3135-018-Q1-K1-F4
gttctttgattgctgattacgttctcaaatatccctcttttttcccattctttatatcctgtggctccaaaggttgctgagtagaaacccgttccataaaaaccacctgaaaaagtcttctctgcagtaaatgccacaggcggtgtaaaaaacctctaaatatggctgggcacatttgatgacaagaatgttaacatgagcgtcgtgacttacaagatctacatcttcaacgtattgaaacaggttcattctgatatggggatctccatcaaagcgatgtggatattgaacagattcatgaactatatctttcagaaattggctcatgaagcatcgatattggctttgtataataagaagccgacgattacatctagggtgatcca

SEQ ID NO: 33115 - DNA, 266 bp, Gossypium hirsutum
  Clone ID: LIB3135-018-Q1-K1-G11
tccacgcgttcggtcagctattttactcattttgtcctaaatgtgagcactgggggcttggtggggatgcatgaaaaaccgtcacatccctgttaggtactatcatactgtaattacataatggtttttgtggtgagcaaccaaactgaatcatgcgagacatttgaggattgggaagttcaatacctaattaaagctattaactgtgtaggatcttggtttatctttttatcagtgatataaaacaggtcaccatctatattctt

SEQ ID NO: 33116 - DNA, 379 bp, Gossypium hirsutum
  Clone ID: LIB3135-018-Q1-K1-G6
cccacgcgttcgcaccattccgcaaagagctgctaactccgtggatgacagctacactgattgatttctatataaatgttgttgctctgtcggtttgggttgcctacaaagaatcaaattggactacggcatttttctggattgtcctacttataagttttggcagcatttccacatgtgcctacattgtcaaagaactctttaagctcgcttggcaagatcctctctaccttattttgataagaaaaggcaacagggcagaacatatgtatgagaacatataatgttgaatagtggtacaaagaaagtgatattgagaaaaattcgtgctgggttagtatgatttttaagcaacccacaaaggatgggaacttgtttt

SEQ ID NO: 33117 - DNA, 275 bp, Gossypium hirsutum
  Clone ID: LIB3135-018-Q1-K1-G7
tcgacaaatcgttgcttacgccgccatttttcccatacaaaacctcctgcaatctcagggcatcgggattcccagtgcttacatattacttgcgacactcgtgcttgtcctactgctttgttgggtcgccccttacaagaaagggtagggctcgataggtgcatctcttggtgctcaccccgtcaaaccgcatcatagtgggggcccaaaaggagtatatctctgtaagtgacaaatgatcccttacatggaccggactgatttcgcatgcctat

SEQ ID NO: 33118 - DNA, 187 bp, Gossypium hirsutum
  unsure (1)..(187): unsure at all n locations
  Clone ID: LIB3135-018-Q1-K1-H12
ttatatacgattatgacggtttgttgttattttcagtttgagaatcgacgaccatctcttattggttctggtcacggatcgttggcacgtgccgggaaagtgagagggcaaactccaaaagtagccttttntgtaaagggagaaagagagaaaccttgttacttttatgaagaagaagttgtttgat

SEQ ID NO: 33119 - DNA, 282 bp, Gossypium hirsutum
  unsure (1)..(282): unsure at all n locations
  Clone ID: LIB3135-018-Q1-K1-H4
cccacgcgtacgtccacgcgtccgaccacgctttcgaaatttaaaaaaaaaaattataaaaagggtgatatcataaaatagaaggggctaaagatagtaaaaatggaaggagagtcattttatttggaatgaatatggggttcgtggtgatgtattagttgntttttttgggggggggctttttattagattaaatttttcttccggtgttgcaaggaacggtaatagggttttttttgtgggggccccttaatttttattcctgtgggggggggttttaaa

SEQ ID NO: 33120 - DNA, 251 bp, Gossypium hirsutum
  Clone ID: LIB3135-018-Q1-K1-H5
tccacgcgtccggatggcatcaacaagaaaatagaggaggccattctaaaggctgataggatgggggtcaaggtcattagccttgcagcattaaataagaatgaagctctaaatggaggaggaacattgtttgttaacaagcacccacaacttaaagttagagtttgccatggcaacacattgagtgctgcagttattgtaaaagaaattcccaaagatgtcaaaaaaagtgttcttaacaaggcttcact

SEQ ID NO: 33121 - DNA, 196 bp, Gossypium hirsutum
  Clone ID: LIB3135-018-Q1-K1-H7
cacttctgcatggaccaaaaaaagcccatggttctgttctatacgcatccccatcattgctaggaagctaggttgcgctctagtggagtgcactggggaggttgagcctagaactgcagtcacaatgagacgcttttatttgacaagtgacgcatcaaaattgcaacatcgttcttgccatactgtgggggcctgc

SEQ ID NO: 33122 - DNA, 212 bp, Gossypium hirsutum
  Clone ID: LIB3135-019-Q1-K1-A10
cccacgcgtgcttacatggcaaccgggaatgatgttcttccggaccacattctatcgtagcggcgcttggaatctatatggtgctggcggtattcatcgcggtcatcatcaggattggatacctcctgatatgagccatcttgtcagaaattgacagcggttgaatacacggtgcatgtaaagatgcaaaggacttgttgttagaccaagag

SEQ ID NO: 33123 - DNA, 291 bp, Gossypium hirsutum
  Clone ID: LIB3135-019-Q1-K1-A2
gttaggctttgggccaattggagttaaaatatgccttaattcttgcttacctaaatcatgggtgattgggtaagttgtatttattagttatacgaacttactaagcttaattgcttactccattttattttccgagttttatattgattcgtgagctcacttggttgggagttgtcagaaactgcctcacactatcaaacacttattttggtacttgggattataatattttggtaaaatgacaatgtataggttgttttggctaatgtacccaaatggttttgttggtgt

SEQ ID NO: 33124 - DNA, 171 bp, Gossypium hirsutum
  Clone ID: LIB3135-019-Q1-K1-A4
cgggcgcgtgggctttacgccggatgaaaaacctatggtggtaagaaggacacgagaacatccacaaggttcctgtctatgtagtatgacgctaaccccttgggatacggtggagacctttggggtttacggcgcttgataaaaaaaaaaacgggaagtcgctctacagga

SEQ ID NO: 33125 - DNA, 348 bp, Gossypium hirsutum
  Clone ID: LIB3135-019-Q1-K1-A7
cccacgcgtccgatttgttaaagcacttgaagatctctttgagagacacaaagctcgggtcggatatgctgatcttccattaaagatcctttgagcgaatcatgctttgtttatttgccaatcccctatatttgtgcgattcaagtgcaatgtgttagccaagtaacatagctgtatattcatgcatctcaataggccttttttttgtattgtatggttatgatctgcaggttactcttaaaaactaattatcatgtaggcattaaaaagcttttagaagctgtttttattgttaattggggtcaaaaaggatttgggcaactttcaatccaataaaaatttaccatt

SEQ ID NO: 33126 - DNA, 391 bp, Gossypium hirsutum
  Clone ID: LIB3135-019-Q1-K1-B10
acgcgaactgaaacacgaaccagtgaagactatctactgtgagcagcgatatcataatcgagccgagaccgatccagaagtgaagaaacagaccggagctgattaccaagaggagcaggatgcaaggcttccaaaatgagacagtatcggcataaatatgcctctaactgagaagacaagaaggatgaatgacaaagatgagagcgcgaagatgaaaaacggagtccgtattggaaacaaagctcgaggagcaactatggatactcaagcagccgctgatgcttgctcaaatgaacacattgcaagttacacaagacatattgggtatacgcaaccagatacgaaagaccatggatggcagaacatgaaaaatcaagctatgactggtcat

SEQ ID NO: 33127 - DNA, 294 bp, Gossypium hirsutum
  Clone ID: LIB3135-019-Q1-K1-B12
gcgagcggacagctggaatggggtacttttcttaccctcgcatgggaaaaatgggcggtctggcctagaccttattccgcgcaagctctcatagcattcaactatcttggttctgtggggaacacctctattgtagacgttgtctcgctctatcaagatctgggctagctgggaagccgcaaggacagcgggcgcaggggccaaattggagaagcaaccaagcatgggatgagcgggaactaatacacatgcaaagactggtacacgaggtcgggcaaatattcacctgtcgga

SEQ ID NO: 33128 - DNA, 266 bp, Gossypium hirsutum
  Clone ID: LIB3135-019-Q1-K1-B2
tcgctcgaaattaaacaagaatgcagaaaatgacacaacttggggagcagctggtatttctagacgctagcaaccctgccttctttggatggcaaagatggcagcctgataagctgaggaggaatgtttattagatacttgaggggtgtctttcgaggaaagataccatcattctcgaaaaagaaaagccagggaagatcaaggcaagaaacatctggatagcggtttatctccagtgccaggtaatcaacctaactatttggagg

SEQ ID NO: 33129 - DNA, 256 bp, Gossypium hirsutum
  Clone ID: LIB3135-019-Q1-K1-B6
gcggcttatgattcgtgtaacataaaattcttcttgaaaatgactactcacctgggaagactcacgagcataggttcctgggttgaaactaatgtaattcgtcttcagtagcattttggagtgagtcctgcattaatgtgatttcagttcaactaagggataaccgaaatcgctattggtttcaaggttgaagaaagaaaaacgtagtcaagaataacccatgtattgtgtttaaaatggggtatgttaaaaattt

SEQ ID NO: 33130 - DNA, 208 bp, Gossypium hirsutum
  Clone ID: LIB3135-019-Q1-K1-C12
acggcttcattgacatactgagggatgttcatgcttcctacgaacagaggaagccatatgttgtgtgctttgttggcaggagtggagttgtgaaatcaacgaatctcggcaagggggttctctcgcgtactgcagaacacaccaaacgttatgatggctgctggtgatacaataccttcagggactggtgagcagtggacaacacatg

SEQ ID NO: 33131 - DNA, 306 bp, Gossypium hirsutum
  Clone ID: LIB3135-019-Q1-K1-D12
cccacgcgtgcgaaaaccttaaaagaaaaatatctatattctagccccaactgccatggcgactcctggataccaaattgctgaaatttatgtcatgcggaagcttcataaagagaaaatgaagaacgaagaagaagaaagagcaaagagtgaggatgttggatttgcagggaagaaatccaagggttggtgtttctcatcgatgttcaaaaaagttcattcgggtcatgcatctacgataggtcatgtaagaaatgaattaaaagatgatgacaagaacaaagcttgttaagaggatatgacaac

SEQ ID NO: 33132 - DNA, 376 bp, Gossypium hirsutum
  Clone ID: LIB3135-019-Q1-K1-E6
gtccgaatcaagacatggcagggaggttctggttcagtgaaacaagtgacattctcagacatacaattatcagaagttgaaactccaataatgatcgatcaattttattgtgacaaaagccactgctcgaatcaatcttcggctgtagaagtatcggagataaactacgtaaacatacgaggaacctatacagttcaaccggtccacttcgcgtgcagcgatagcttgccgtgcagtggggtttcgttaagtaccatcgagctgcaatcagtttaagaaaaccatcctctcagtggacctttctgttgggaaacatatggtgagcttaaaacatcaactgaaccaccaattagtttgttggagagtggaaaaccat

SEQ ID NO: 33133 - DNA, 381 bp, Gossypium hirsutum
  Clone ID: LIB3135-019-Q1-K1-E8
gggatagaagcacatactgcacccgatatgtcaaagcagcttgaagccctgcaactcgcgcatactgatgaaagggaaaaggccaattcacgcatttttcgcagagtacctgaaaagccctatgagctaactttccatttgacggaaaagagcaagcggacctgtgaaagtcacatcttttactaatataacaggcttctgagaggattctttaatcaaccaaaacctgcagtccttaatttctaccacttacaagttgagatttgttccattcccaatggcagaagaaggatgcaagctggaaggacttggacaagatattattcacttggacaggagctgcagcgcgctttagcgtcggaaaaatccctctacatgggt

SEQ ID NO: 33134 - DNA, 242 bp, Gossypium hirsutum
  unsure (1)..(242): unsure at all n locations
  Clone ID: LIB3135-019-Q1-K1-F2
gcttcagaagcaaatcgtggtgaagatcggtgaagatttggagcgaggcttggcttgcggcgctgaagtttacccttgaaccctagggtttccgaaattattcttgggcttgggggttaatttttgggccatttgttattgtattttggtttgggttttgggtctgggccatatatgccacttgnaatttgagcccctttaggccctggcaaaatctgttattacaattatatttacctcaa

SEQ ID NO: 33135 - DNA, 254 bp, Gossypium hirsutum
  Clone ID: LIB3135-019-Q1-K1-F4
tgctttctcagcccgaaaacccgagacaaaaggcttctcctccgtggacggtctcaacgacggggagggagggctctgatgacgcaagccaaggttcgggtaagcccttttttccccctctcctttattctatccttttttgaaatagattcgaaataaataaaaaaatacaagaatagaaaatcgaaaaagaaaaaaaaattacaatcaaccttttttagctttctttttcggttttttgaattgcttaaatc

SEQ ID NO: 33136 - DNA, 142 bp, Gossypium hirsutum
  Clone ID: LIB3135-019-Q1-K1-G1
tcgcccacgcgttcgacagaattagcttgaattttacaaaatagcaccattgtgttccaatagaccgaaggaacacaatggtgctattttgtgaacagaattagcttgaatttcaaatgcaatcaaaggtgatatgttttgt

SEQ ID NO: 33137 - DNA, 361 bp, Gossypium hirsutum
  Clone ID: LIB3135-019-Q1-K1-G10
gatgtgcgtgcgggaacggcctggccggcccaatcactacgagctgccgaatggcggacggctgatcctatgcaacctacgtgcatcgcgtgcacggcagaaccgagaacaaacaatgctcatccgggcttgaaaccggtgctgatgtaaccgcaacgataaaagcagagcatcatgaaagcgacattggagctgggttggaatgtatgaccactaatccaatggcatgggaaggttcagttaacccatgggtgaagccaatggaacaagctcctaagggtctccttgctatagggattacaacacataacgttgctcatcgatttggtgggacaaggcaggatccggatcttgctgcgga

SEQ ID NO: 33138 - DNA, 261 bp, Gossypium hirsutum
  Clone ID: LIB3135-019-Q1-K1-G11
ccacgcgtccgcccacgcgttcgcccacgcgtccttatctggtggcgcatttgccagatacgtacctgtagggcgtcgtttatctgacgatggcaacttggaaaaatttggtatgaccaaaaatgagttgtgtggagctcatatacttgcaagactgccggtggcggccctacatgctctaacgcaacgctgtatgaaaggaagacatgcaaaaggggggggagacacaggcaacaaaagcggaagcaacttaggaggagg

SEQ ID NO: 33139 - DNA, 332 bp, Gossypium hirsutum
  Clone ID: LIB3135-019-Q1-K1-G9
cccacgcgtgcgcccaatcgtgcgtttttggctgagcatataccacatacctaccggcggggtctcattgcctgcggaagtccactggccataacccggcctgacccaagatgaccttgcaggccgagatactgagcggtacatcatagaatgactgctctctgcttttatgcatctccgcgtgggcattggacatgccctctatcatctagccctggtaatatcagggcaaggggtgtcaagggcgactccgccatcgcaatattttcaaaagcggcggttgcctataaatagactaccctacttactcgtatatacatccgcagacatct

SEQ ID NO: 33140 - DNA, 233 bp, Gossypium hirsutum
  Clone ID: LIB3135-019-Q1-K1-H2
ctacgcgttcgggtggggctgatgcaaccgaaagagtgcttggtgccccagcattggctggcttacttcagacactggtgtttacaggtacgaaacgggcaaaaaaaaaggccgcatcacttgctagagtgtttcagaggtgcgagaaagcatacttgcattttggtggattgggtgtttgatattcatttaacaggcaactcaactcttcctaaaagggatccacgattcac

SEQ ID NO: 33141 - DNA, 239 bp, Gossypium hirsutum
  Clone ID: LIB3135-019-Q1-K1-H4
gcttatacaccggctaagagagaggagcctgtacccgtgcgaccaggctctgaacactcggagaaggaagaggccgctccaaatgcaccagtttatacaactcctaagaaagagatggctgagcccgaaccacctgtttttgaacccgcaaagaaagaaaagccatgtcctaagccaccagctggtacaccaccaaagaaagagaagcctgagcccaaaccaccagtgtatggaccacc

SEQ ID NO: 33142 - DNA, 110 bp, Gossypium hirsutum
  Clone ID: LIB3135-019-Q1-K1-H6
aaaccttaggaactaagctcaaagagaaggcaggtgaaaagacggaaataagtcctcaataagctgatgacttttcaaaccgacccgggatggaagtggggctcaaagca

SEQ ID NO: 33143 - DNA, 178 bp, Gossypium hirsutum
  Clone ID: LIB3135-019-Q1-K1-H7
acgaccacgcgtacggctctgtatattgaaatttatttactcgaatctctctttagccaaaaaagatgcagatcttcgtaaagactttaaccggctagacgatcactcttgaggtcgagagctccgacacgatcgacaacgtgaagaccaaaaaccaagagaaggttggcataccttc

SEQ ID NO: 33144 - DNA, 369 bp, Gossypium hirsutum
  Clone ID: LIB3135-019-Q1-K1-H9
cagtctatggtttcagtgacaagggtggtcttctttctttccctcaaagggacgatgcattcgagatgaccaagccttatagcagcaagaccggtgcaatcatcgattccgaagttagagagtgggtaggcaaggcatacaaccgaacagtgcagctgatagaggagcacaaggaacacgtagctcagattgcagaattgcttctagagaaagaggtccttcaccaaaaagacttggtccgagtacttggtgaacgcccatttaagtcgagtgaacccactaattatgacaggcttaagaaagggttgcaagaagaagataaatcatgcaaggacacatcaacagagagcaagactgtggatgataatg

SEQ ID NO: 33145 - DNA, 214 bp, Gossypium hirsutum
  Clone ID: LIB3135-020-Q1-K1-A1
atactgcgttctcctgaaagcctgacagggaggtgcgagggtctgaggatcagaaagagcctggccttcacccagagggatatgggacatcctaactataactcctccacttatatatcgaacttaagaggacatgtccgaggaggtaccccactgtggccaggactagccatagagacatattgtggtgcgctatatgtgatgaaaactctaa

SEQ ID NO: 33146 - DNA, 192 bp, Gossypium hirsutum
  Clone ID: LIB3135-020-Q1-K1-A11
gttaaaaaaaataaaaagaaacaaaaaaaaaaaaaaacaaactgggcagccacctcaaaagctggcgacttagaaaccctgggatgccacaaacatacatctattattgcttcaccttaattcatttcaccaaccttccaattacaccgacccaacttggaaaaccctaacgacaccaaactcattcgcctt

SEQ ID NO: 33147 - DNA, 167 bp, Gossypium hirsutum
  Clone ID: LIB3135-020-Q1-K1-A3
tgggctgtgcaacttaatttgtggactttggtctacgtactgataccattggctgcattagacttacaggatgcttatgtggtattcttggctaacgatcaactcactaagctggatctactaatgggcttatttcaaattcccaaagttttgatactatctgatgg

SEQ ID NO: 33148 - DNA, 283 bp, Gossypium hirsutum
  Clone ID: LIB3135-020-Q1-K1-A7
agcctgcgttctactgaaagccggacaggtgggcctggcatgcaagagaatctcgctgtatgtggccttggcatgagcaggaactgcatactgccataactccgctcatctgttgataagacctatgagtagactgacggacaagtacttactattggagctgacagactccgatgaccggaaggcctgctacatgcagctatcattgggatggaagctgttggtatccatgacactacctacagctttatcatgacgtgcgatgtggatatcaggaaggatc

SEQ ID NO: 33149 - DNA, 314 bp, Gossypium hirsutum
  unsure (1)..(314): unsure at all n locations
  Clone ID: LIB3135-020-Q1-K1-B11
cacgcgtacgcccacgcgtncgacgtaaggctacaactgataatccatggaagaatgggcagcttggtcctctctatttacggaacaatcaccaaacagcccaaccggcatcatcaggaccctaccatatgcttcaacaacagcaacagtttaaacaaagattacagctccaccaacagcaaatgaaacatcacgctgagatgacgtttaggaagagtaacagtgggattagcttgaactttgaaaactctagctgcacacctaccatgtcatcaactaagtcttttatttcttccttgagcatagatggtagt

SEQ ID NO: 33150 - DNA, 440 bp, Gossypium hirsutum
  Clone ID: LIB3135-020-Q1-K1-B8
cggaacgaccgaggcgaccgatcaaattgttggctcaacttaacttgttcctttcagttcccaacgtagatcatttctctggctcaagtgggcctttgagctccccaagcaaccataagagctttcacacaagttggacgaattaggccaatctaaacaattctatttagccattttagctcaaccatcacctcattaattcaaggctattagaagacatcaaatggctgtccattgacgtctccaaagctaggaatcttcaaggaagcttcaagggacgttctaggaagctacatgaaattttcaattcatttgttttgaaaataagctgactttttagctgctcaagtgtccattcggctagcctaagaatttaactataaatagtttgctttgtaaattgttttggcgttagacaatatacttttaaactttatatg

SEQ ID NO: 33151 - DNA, 206 bp, Gossypium hirsutum
  Clone ID: LIB3135-020-Q1-K1-D11
tacacaccaccgcccactcctgcgcccgctcttgcacctacctaccatgacaactgtgctttgggcaacataagcatgtgggacgcgacaactactaacactcttttgattagaggttgatctaacatgggatcaaactactagagatcctcaacactttcatctgcatcaccgacggcatcatactactaccactcaccttctcc

SEQ ID NO: 33152 - DNA, 291 bp, Gossypium hirsutum
  unsure (1)..(291): unsure at all n locations
  Clone ID: LIB3135-020-Q1-K1-D2
actttcttgtttatggtactctatttgcaagncaagtgggtatttgcgtatgttggtgttgtagttgaatcagagctggtnncttgaaccattaaaacgaagtaaaaatttagttcacggactgaaaagaattgctttctctatgcttctgttttacgggttcttcagtgggattttaatctgggtctcagctgcagactggggttatgcagctgctgataaatggaaaagctgggcatttgttatacatattgggagcacttccactttgttcatgtagattatgctttc

SEQ ID NO: 33153 - DNA, 195 bp, Gossypium hirsutum
  Clone ID: LIB3135-020-Q1-K1-D4
atgacagaacttattatgaacctcaaagtactctaagcagctcaggccgaaatgcggaaagttgtagggtatagaatagtgttcttagaaactgatctgcctcaccttgattacatgaaagctgtcattatagagacctggcgattacatcctcctgcaccggtcttacttggtaggggatctatggaagacctt

SEQ ID NO: 33154 - DNA, 306 bp, Gossypium hirsutum
  Clone ID: LIB3135-020-Q1-K1-D9
cccacgcgtccgcccacgcgtccgtgttgctgccacaaatgaggctaaagatgatgctaacgtggatgaatctgatgttgtagtcgtccagactgctattagagggttcttggcacgcaaagagctaggaaagcttaagaacttagtaaagttgcaagctgccttacgggggcacttggttcgaaggcatgctgtggggacattacggtgcattcaagccattgttaaaatgcaaatgctagtccgtgcccatcatgctcgtttgtctcaagaattgtcctattccgaaaaagatgctgcttctac

SEQ ID NO: 33155 - DNA, 204 bp, Gossypium hirsutum
  Clone ID: LIB3135-020-Q1-K1-E2
ccgccgcgttataactagaaatacttgtcttcaatggaacagctctgaccgagatcaataaatttaataggcttctcgttcagtttggaaaaggaggcgaacaactctgaccactccttacgtgacaacaaatacatacacggcgtgtcaagacaccttctcttttccgtgatgaaccactaaaaattaacggagattcagggc

SEQ ID NO: 33156 - DNA, 194 bp, Gossypium hirsutum
  Clone ID: LIB3135-020-Q1-K1-E3
cccggtcgaccacgcgtccgatctcttcttgctgtgtactaggaaaggcgcttatgctctaatcaagtaagcactctaaaagggagctttgaaagcggtcaggagtgctccatatccaactataccttcgactctcaactcatacttaaaaaaaaaatgccatctctgaggtgtagatgtctgaccgcctattt

SEQ ID NO: 33157 - DNA, 337 bp, Gossypium hirsutum
  unsure (1)..(337): unsure at all n locations
  Clone ID: LIB3135-020-Q1-K1-E7
atactgtnacttgcaagagaaagcacaatgttggatatgattcgttatgtggccttaaagtgatgatgatgatgactgtaacttgttttataatatggtttttaagattgttgctggtagaattctgatattcctctttctggcaatttgttgttggatgaaagtgaagggtaacacttgtctcccattgcggtgtatatatatttttttttttttggacccgcctgacaaataaattatttttggtttggggtagaatttaaataaagttttgttgtcttgtaacatttataatcttttcttcttttatttattttaatttttttttttttttatt

SEQ ID NO: 33158 - DNA, 196 bp, Gossypium hirsutum
  unsure (1)..(196): unsure at all n locations
  Clone ID: LIB3135-020-Q1-K1-E8
accgaccggatcaccggtcgaccacgcgtatcgaccacgcaaccccccacacctcatttcagactaccgcanacctccattcacctcagtggatttcgttccctttaagccgctttctacaccatctccatcaatcccttccttcacttttcacataaaggcacactattcttatatttaaatcatttcaccatat

SEQ ID NO: 33159 - DNA, 300 bp, Gossypium hirsutum
  Clone ID: LIB3135-020-Q1-K1-F11
atcagttgcagtgccattagtagagccctgaccaaagaatccaggtttacttttggcatagcgtaaatgttaacaaacggcccttgtatgctaaattttgtggtgcttcagagaggtgctggagagtgtctactagtgttgcttttatcgttcccatttttgttttccttcttttaaaaagggtcatagtctgatagatagaagtccatataaatacctcatagtttttgctttcccgcttttaatattttgttgcgttatattaatagttcttttcccctttaaaaaaaaaaaaacaat

SEQ ID NO: 33160 - DNA, 311 bp, Gossypium hirsutum
  unsure (1)..(311): unsure at all n locations
  Clone ID: LIB3135-020-Q1-K1-F7
agagctccatgctgtgagagaatgngagtgaagaaaggtccttggactccggangaagatcagattctcatcaattacattaatctctacggccatggcaactggcgagcactcccaaaacaagctggtttactgaggtgtggaaagagttgtaggctacgctggactaactatttgaggccagacatcaaaagggggaatttcagcagggaagaagaggataccataatcaacttacatgaaatgctcggtaatagatggtcggctattgcggcgagattaccgggacgaacagaacaacaaattaaaaa

SEQ ID NO: 33161 - DNA, 110 bp, Gossypium hirsutum
  Clone ID: LIB3135-020-Q1-K1-F9
cccacgcgtccgaaggcatcctgcactctactactcgccaaaggtattgaaagaagacacttgatttgatcctctccaaataacactcgaataatatcatgttttcaggt

SEQ ID NO: 33162 - DNA, 419 bp, Gossypium hirsutum
  unsure (1)..(419): unsure at all n locations
  Clone ID: LIB3135-020-Q1-K1-H5
gcgaccacgcgtncggcctttggtctcaacactcaagaccttgttgctctcgttggaggacacaccgtanggagttcagcttgccagctttttagctacagattatacaacttcaccaacggtggtccagaccccacagtcaactcagcattcgtgcctcaactgcaagcactttgcccacaaaacggtgacggctcaaggctcattgatttggacactggtagtggaaacaggttcgacacctccttcttcgccaacttgaggaatgttcggggaatactagagtccgatcaaaaattgtggactgatccctccaccaggacttttgtgcagcgcttcttgggtgagagaggctcgcggcctttgaactttaacgtggaatttgcaaggtccatggtgaagatgagcaacattggtgt

SEQ ID NO: 33163 - DNA, 401 bp, Gossypium hirsutum
  Clone ID: LIB3135-020-Q1-K1-H6
atctgctgggatagattgggtgcaagccacaaaaccagcagcgttttctgcttttccgatgatgggggctatgctcggtgacctgccgtcatttgacccccacaacttcagccaacttcgtccctccgatccttctaatccttctaaagtggtacctaccacctaccgccccacacatagacggacttcttcacctcctgatcaagttataactaccgcagccaagaatatacttattagaaatttttaccagcgtgccgaggagaagttgagaccgaagagagctgctactgaacacccaacaccggaacatggatgcaagcaacctatggcatccaccacatggtcataatgagattttcttttggcttttcaatgctcatctaaatgtatcttctcat

SEQ ID NO: 33164 - DNA, 449 bp, Gossypium hirsutum
  Clone ID: LIB3135-021-Q1-K1-A12
gaaatgcaattataaggttcttaactgaacagaacataaagattggcaaaccgagtgactggtgtccttggtaattgctgtctatggcttattcttgtaactatacattattggaagtgtggcgactacatccaggtaatctcctatggaggttttaactaatttcaggtgacttacttgagttcataattgctgaacccacaagttctgaaaaccccaaataaagggtgaccccaatttggcaactaaaattgactcaacgattgcgtaaattaaaatcagtgctacaaatttaaggttcaatgaccaacggccagaaagcaaaggagcgagtcaaggacccaccaccatgtggccaacattcgaggtgctaactttcagtcgcgatccatgccactgggcatgctaaggcaatcttgggcccatcgtcaatgaatctttaaaatgat

SEQ ID NO: 33165 - DNA, 303 bp, Gossypium hirsutum
  Clone ID: LIB3135-021-Q1-K1-A6
gcctcccgtccatttacacgtacgtgcacacaattcttgtgttagcaaagcgagtgctttcactggtggaggtattgcctagacgctcgccacattgagcattccttgggttattattggtcatcctgggaggagacttatgttgaaggcgtcaaatttgtgcgttaccgctcaagatgcttatacacttccttaacgcttgaaggtgatcgccttgattacggaaacacttggtcacgagaagcatgattactgggcagtcgagtgcaaaactctcattgagtaaaaataaactggctgatg

SEQ ID NO: 33166 - DNA, 386 bp, Gossypium hirsutum
  Clone ID: LIB3135-021-Q1-K1-A7
gttgaggtccagccgaaatttctgtattgatatcgtattgctgtgcatagttctgggaatagctgcctatttgtacaagtaagattctatctcatgccttcatttaaaaaagcttccctttaatactaaccacaaactgtgtcctgtattctcgatattcatacagtttactgtagtggaacttgctatactgcgtgcttcagttatatttggttggtgatagatgttggatttttcttagtaatgattttatgtggaaatgctgttaatggattaactgacttgttctcctatttcgttgtttttatcattgagaagtctcccctaattgttcttcatttgcagtgttctgaagaagtgaagtgataaaaggataaatctatgag

SEQ ID NO: 33167 - DNA, 378 bp, Gossypium hirsutum
  Clone ID: LIB3135-021-Q1-K1-A8
gccacgcgtccgcccacgcgtccgttttgagtaaacaacactctcaaagcaatggcaaacaatcgctcacagcttctttcatcagagttgatagataggtgcatagggtccaaaatttgggtgataatgaaaggtgacaaggagctcgcgggtactctcagaggcttcgatgtctacgttaacatggtccttgaagatgtcaccgaatacgacatcactactgagggaagacggatcacgaagcttgatcaaatcttgcttaatggaaataacattgtcattctggttccaggaggctcacctgatccagaatgaggctgccacctctattcggttttatgttcatccctttcaacggtatcaaaatctcagtttcag

SEQ ID NO: 33168 - DNA, 329 bp, Gossypium hirsutum
  Clone ID: LIB3135-021-Q1-K1-B4
ggtcacatcctgacacgcgtccgggcgaggagtggaatgcccttgagcgttaaatcaccagcgaagtaagccgcgtccagggagaggaagagacgagagaagagaggcgcggtcgacggaggggtaggtctctaaattcgagtgaagcatacatggggtatttgcgtccgtacccaggaaaataggacatcggatctgatctgtacttggaactttgattaagatgggtgattacgtttatatctctgaagccgattgacgctaaagaatgataattactaagtgaaggcgaattgtatatgttgattttaggaattattgattctgat

SEQ ID NO: 33169 - DNA, 130 bp, Gossypium hirsutum
  Clone ID: LIB3135-021-Q1-K1-B5
aaaaaacccaacgttgttggattctaaaatcatggtggaaagtctacttattcttgtatgtatgggactgtattttacgctgtctgacatattaacactttctattctatatcggtgtgcggatagctct

SEQ ID NO: 33170 - DNA, 409 bp, Gossypium hirsutum
  Clone ID: LIB3135-021-Q1-K1-B7
ccgaattcgagggacgcgccaggcgtccgggtacacttgcactactaggttttaatccaaactcaaaagtcatttgattaatctgaattgaaacctcaagtcaataactcaaatctacctgtgctccttctattgatgatggtataatgatttgactgacattttatatggaagcaaatgcaggactggtacggtgatgaattgaaggcaaagttggaagaagtggagcctaacaaagatgcctggaagaacctctgcacgagcttcctcaaggatagattatgaaggtttttattttaaccaagaataaaagaaatgtaaataggaaccctttttcaagaatcaagtcgttctatagagaggtttgtgatagaatagcacagatgcattattcatttaaacatgtagt

SEQ ID NO: 33171 - DNA, 396 bp, Gossypium hirsutum
  Clone ID: LIB3135-021-Q1-K1-B8
tccgagaaaggcgcctgtagcgatccaggctgccgctttgaatggactggattagttgatgggaggggaactgtccgtgaaaaaggggatggagcgtggataacaggctgacttggagagtgagagttccgactctgatgtggattctgacctcgagaggatgattgctgacagatctgggatgaatgcctcttggaaagggcagaaatcattgataacaataagagagcggtgaagatgatagctcttgatccgcattatggggagagaaagattaagagagggaggccaaagcaaaggagtagttcgaagagaggaattagtgattctgatgatgaagatgaaggttgggggggagcggagggaaagaaaaagagaaagatgaggggttgattc

SEQ ID NO: 33172 - DNA, 311 bp, Gossypium hirsutum
  Clone ID: LIB3135-021-Q1-K1-C1
ctcacgcgttcgattttagtttcgatcgtagttttgagcgccagttgtggttgctggggggctagcgaggaggataatgacaatgatgatcctggcatggatactaacattgaaacgaacaaggaaacgatcgacatcattatcggcggaggtcgtggtgaagctcctgataattgtcctgatgagtgacctgatccgtgacgtgcacctgaatggtctgcaccaacatctccaccaccaccaccaccaccaccaccaccacgactaccattaccaataccaaaaccaaaaccaaaaccaaaaccaaaacc

SEQ ID NO: 33173 - DNA, 316 bp, Gossypium hirsutum
  Clone ID: LIB3135-021-Q1-K1-C2
cggttctgaattcgagggacgcgccaggcgtcccgaacaatctatttatgctgaatagacaatctggactttgcgacgggagcaatgagggggaggtggagattgaagcatataggacactgagggataagggtacataccctgctcatcaggttgttaaggatctggaatgaagcttagccttggtgatctatgacatcaagactgggaccgtgttttctgcactgcgggctgatcgtatggtgaagctgcataggagaattgcacctgatcgctgtgtggtcatatctgatgattcacacgtcattaaagaagg

SEQ ID NO: 33174 - DNA, 378 bp, Gossypium hirsutum
  unsure (1)..(378): unsure at all n locations
  Clone ID: LIB3135-021-Q1-K1-C4
cataagagaacgaggaatatcggtgtcaagtaaggctgttatcggagcgttttcggaacttggaagatcgacaacgacgagtgatggtctcattggctaggattatagacaaaccccatgttctgtcccaatttcatggcaaaaagagaaagctattgaacagtaaccacttcaatgatgaatgcaacattcaagatcttcacaggttggcttctctgaatcaaacatgggattggatttgaaacacattgaagaattggaatcatctataaaatgctgggaaacattgcttctcgaaatcggagaaactatacgtgaagaagtgcgcgatttcaggacatgcttacggncttcttcggttgtgttactgaaatacag

SEQ ID NO: 33175 - DNA, 291 bp, Gossypium hirsutum
  Clone ID: LIB3135-021-Q1-K1-C8
gcgtcacgcgtcgcgtccgacacatgagtggccgtgcatttcaggtttcacctcgaggacagttgggagtctagctaaaaacgcagcttccagtgaccttcgttacgcttgtgaacatctacacccccaatattgcgatgataggcaatgctgacaatatatgggtgagcggatccatcaaagccctgtggcagctgtcacattaactaccaccacgtatggtttgggtacacagcacatatcatcctaaccgaagcatatggagtatatggcaaccacccatttatgtta

SEQ ID NO: 33176 - DNA, 395 bp, Gossypium hirsutum
  Clone ID: LIB3135-021-Q1-K1-D10
acaccgacgcttacacctccttatatcacagtgtccaaacagcagatttgtcatgggtaggcagaacatgggggtgtcaaatgtggcactagcggtttatgccactgctcataaaagacgaatcatacaatgaagaggtcaatcaaggtgcctgctctcagtatcaagcttgctgacattcctacagaagattattcatggaggaaataccggcagaagcccatcaagggttctcctcaccctatgggatattataaaagtagccatatgagacagttgccctgcttggaagcatgcttagaggcgcttataaaaaccatccatgcttattgttacctatgaaggtgatcattaccacccaagactaccattagcagtatacaacgtatggaaaa

SEQ ID NO: 33177 - DNA, 218 bp, Gossypium hirsutum
  Clone ID: LIB3135-021-Q1-K1-D3
cgcgtccgaaaaaccctcaagatcccctaagaccacctctgtctatacattagagtctaccttctgggggggggcgatggaaaagtacgcggaggaaccagggccccttccggaattaacggagctctaaccggtcagcatacttgtgggaactgccgtcattgttacttaggggtaaccggtataacaccctctttaaaagacttaaacgtatggat

SEQ ID NO: 33178 - DNA, 200 bp, Gossypium hirsutum
  Clone ID: LIB3135-021-Q1-K1-D5
gcctttctgggctaagggcgttcatatgtacactctcattagtaatgccctgagcggacgcgtatgcagttcttaaactactattaatactccaagcagacaataggccacgacaagaggagctctcagggtttaggtgatggctttcaagcgcagctcgaacgagctcaaggatcttcacaaagatggggcggccgctt

SEQ ID NO: 33179 - DNA, 325 bp, Gossypium hirsutum
  Clone ID: LIB3135-021-Q1-K1-D7
gcggaaaaccctaaactcccctaaaccacccgggcatacttcggagtctctttctagggcgttctcactgtcaaagcaagcggaggtaccggcaccggggcctcattcaccttaactctcaccggtcagattacttgtagaacacccgttcattctcatttggggctcaccgtgctgacgttctctttcacattcactaagatagtgactgtgacctttctatatacagtctaagcgaatacagaaaagaaacaagatgaaatcgcgttgtgggcattgctgtgtcaaataagaggccgacaatgactggtagtaacggtggaca

SEQ ID NO: 33180 - DNA, 187 bp, Gossypium hirsutum
  Clone ID: LIB3135-021-Q1-K1-D8
ctggcatgcattaaagccggtccatgtcttgagcatcatcttccttacaatccgtggtttatgtatcgttccattctcgcataccataggagtggttcatatccatggcgcgcgcctttggacttgcataaagacgacttctccaacatttgtcacgtcttgggaacaatttgactgccttctgatg

SEQ ID NO: 33181 - DNA, 303 bp, Gossypium hirsutum
  Clone ID: LIB3135-021-Q1-K1-E2
acgcgcacgcgctaaaaacgaagatccgacttgtggaggcacatatactaagcgataaatgcggctgaatggtgtatcaacaatctaataggcgcaaataagtggtccttcctgcagtaaagaactgttctgaataaaagaataaagatcaaatattagataaaagtaaagtaatcttatacttatgatggaagaaacgataaacaagattggcttacagattctccaataaaaaaaaggtagcaaaaaaaagcaaaattcgtgaaactgctcaaaacaactaaaaaactttaaaagggcggc

SEQ ID NO: 33182 - DNA, 447 bp, Gossypium hirsutum
  Clone ID: LIB3135-021-Q1-K1-F11
cccacgcgtccgaaacggctgtaagacgttttacaaagaactgccaaccatgaagataatggtagccgtaaagagggtcgtggattatgccgttaagatcagaatcaaacccgataagagtggggttgaaacccagaatgtgaatatgtcgatgaatccgttttgcgagatagctttagaagaggctttgaaaattaaggaatctgggttggctaaggaggtcgttgcggtcaccatgggaccttcgaactgcgtcgatacgcttcgaacgggtctggctatgggtgccgatagagggatccatgtcgaagctgctcgtgatttggttcctctcagtgttgctaaggttttgaagaagcttgttgaggttgagaatcctgggttgctcattcttggaaagcaggcaatcgatgacgactgtaatcaaacatggcaaatgatagctgc

SEQ ID NO: 33183 - DNA, 360 bp, Gossypium hirsutum
  Clone ID: LIB3135-021-Q1-K1-F4
ccacgcgtccgcagaagcatacacctgattccatcgagacaattatatctgatgtttcattagcgatttcactgctgacaaataggaaaacacgggatttaatcatgattctcaactctaaaagattcctagacagactggttagttcattggaggaaaagaaatatcacgaagcaaagttaaaagaaggattgaaggatgtggctgccaaacgtatggagcttcagaattctctatcttcttcatggccaaagcaagaagctgcacttgcaaaaaccagggaactgaagaaactatgtgaaagtaccctttcatcggtatttgatggaagacccgctcatataattggagagatcaatg

SEQ ID NO: 33184 - DNA, 277 bp, Gossypium hirsutum
  Clone ID: LIB3135-021-Q1-K1-F5
caagaacctattttcattggcttacaagactcaccatctgtataataatcccttaaccaatccttctgcagcatgttgaagagaccccaacaagggctttgtagtgaattaattaattagtcaattattttaatttgttgaaatagaaaaaaaaagtataattataacacgtttgtaaataatataagatacagtcgttgtatgtaataaatactaaaaagctttacgtacactctaaatgagacatatcatatcaccatagcgctacctccttact

SEQ ID NO: 33185 - DNA, 321 bp, Gossypium hirsutum
  Clone ID: LIB3135-021-Q1-K1-F8
gcgtgcgccacgcgtcagctactccgcatcttaataacttcttccgttgatcttcgatagacgagtggcgtcgttaatcgattcattatgggaaagatcaagatcggaacccttggatttggaaagatcgaccggttcggttcgctagagtggctctccaaagcgatgatcttgagctcgttgctggtaacgagtcctttgcatgaccactgaatacatgacgaacatgctctatctcctacatgggtcacggccaatggaggcctcgtgagctcaaggtgaaggactcaaagacccttctctttggtgaaaagcctgtca

SEQ ID NO: 33186 - DNA, 308 bp, Gossypium hirsutum
  Clone ID: LIB3135-021-Q1-K1-F9
gggcaagggagggggtaaacagaacaacggacacccaaggggctggggcccgcgcaacaggaaggcccaccaaggacctaaagaagaagcacaacccccggacgaaccgagccccacaccacaaacggcaagaggaggaaacccccagcccaagcaagataccaaagagggattctcaagaacaggcaatttagaggcgaatcaaggcgcaacgcgcccaacagggaaaaggacacactgagggtcaatactaacggactctgccaaggggggcacccaaaagaaagcacggaaggtggagaagcaaa

SEQ ID NO: 33187 - DNA, 370 bp, Gossypium hirsutum
  Clone ID: LIB3135-021-Q1-K1-G10
ttaatttcgggggagacgcacgcgtgcgtccacgcgtccgcacacgacgtctcgttcacagcggacgtccacgcatgcggcaatcggggacaaccagacaacccgcggagatgaattgaacacaacactgacttcggcgcaggacttttatcaatatagaggccctcgcttaacaaaacattgcgtaaacagaacgctggatgatctgatcggaccgcggacacgcgagagcccatcacaagaggaatgcgtggttgccatccactaaatggtacaggcgctcacagtccccctccctctaaactaaccaataccatagctagccaaacctggcggcacaataagagaaagaaggagctaatctgcttgc

SEQ ID NO: 33188 - DNA, 249 bp, Gossypium hirsutum
  Clone ID: LIB3135-021-Q1-K1-G3
acggacgccctagctgctatagctgttgtgacaaaggtggaggttctcgcaatatggtcggatcatttattccacatggctctgctcggaacacacgttaggtgaaactgggatgatgctacgaatagtccatgccgggagaagaccatgcctcgcccagttccccagaataaatggaactgtcaccctgtgcgggctccttggtttgaggacacttctcgactgtcatcccaacgcgtgatatgtatt

SEQ ID NO: 33189 - DNA, 414 bp, Gossypium hirsutum
  Clone ID: LIB3135-021-Q1-K1-G7
acgctaatgcattggggttcgggttgccgaaggaggaagctcaagattaaatgttggatcgggtcatcgatcatctattggggggtcatccacatgggctaaggcgtccattaacctacgagttgttcatatgcaaaatactattttgcttcgcagagttggacgagttctgaggaacttttactgtgacgtgctgggttggattgggtagtgtactgcactaacattcataagcatgctattagttatcgtgtttctatgaatattgtgatactaatatgtattgtatattgcaaccttgtgctatgtttatttactgctgtatatactcaccgcttaaggctttctttggtgcaccgcttaaagtcaatgagttgcagttggattcccaaccttactgggaagctgtttggt

SEQ ID NO: 33190 - DNA, 408 bp, Gossypium hirsutum
  Clone ID: LIB3135-021-Q1-K1-H10
gaataattgaggaattaaggatttacgcttggtatgtagccaagcccaagaaagagggaacgaggggaagaatcgacatggaatccataacaaaaaaaaaaaattgtgaatgaaaaaaaaagcgcgacgagaataattttctcaacccggaggtgaaggttacaaaatgaacaacttatcaatcctcgtagtcgaaccttgtttttgtggaatatgtaccccggccatgtatcatgaacacatgaagggtacggcatcgggtcaaataggaagaattctccaaacactaaaatcctccgtggacggaaaaaggaaggcgaaagcctatctataactaaggaccgccaacccaaactttgatcaacattaagccaactgctgattctggtagtgaaaagaaagcccata

SEQ ID NO: 33191 - DNA, 285 bp, Gossypium hirsutum
  Clone ID: LIB3135-021-Q1-K1-H11
tcgcccacgcgttcggccatgtcttgcggcattcgagtctgacatttctccgcctgcattcaaaggggggtggcttggaacgagagagaatgaagctaccgagctgcttgtgaaggggccgagtgggcccttgctgcggcacgcgagagaaggagggaggccgtcatacgtgcagaaaataacgtcaacatgtgaagtgcgggactttgggcgtcagacccgcatcatagaaaggaactgggatgagcatcaggccggcatgatcctacttgagcaaggaagcag

SEQ ID NO: 33192 - DNA, 400 bp, Gossypium hirsutum
  Clone ID: LIB3135-021-Q1-K1-H3
accccccattcccatttgccgaaattgaaaagaaaataaatgagctttcacccttcttccatttgctagggccggtgaccacgcccatcattgcaactcctccacatgcgcgccgcgacggcggccggagagagagccaggtaaggtctctccaatcctttctaaaatcccttttaaaaactctgttgtatttcaaaaaggaaggaaaaaagatccgcgataaaataaaaaaaaaacttgaaataggaggactataatcaccttattcaaatgtatggaagttccgtctcaaaaaaacatgctatctgtctttcttttatgtatttctctcctgatttcgtaaagaaaaaaattccccttttacatttgtgttctcggttttaaagcctttttacaaccg

SEQ ID NO: 33193 - DNA, 198 bp, Gossypium hirsutum
  Clone ID: LIB3135-021-Q1-K1-H4
acgctaaagcctccttttgactttcagagctttgatcgatcatgggtcactcatacgcgtggaattctcacactaagacccacgggcctggctcttgcgcctgtcgcgtgtgtggtaacccccatgccatgataaggaagtataggatcatgagctacagacagtgcatccgtagcaatgacaaggagattgtattca

SEQ ID NO: 33194 - DNA, 342 bp, Gossypium hirsutum
  Clone ID: LIB3135-021-Q1-K1-H6
gtaaggcctccctctgaccaacaacgcctcgttcgatccgggatgcatcacgcatatggacgtaccatactcgaatacaacatccaagaggattgcgctctccacctgggtgtacacctcaagggcgtcgccaagaagaggaagatgaagacctacacccagcctaagaagatcaaggacaagaagaagaaggtcatgctcgcccggctacaaatctacatggtggaggaatccagcatggttcagaggctgatgaaagagtgccccaatgctgtgtgaggggcaggcactactatggctaaccattttgataggcactattgctgtgagagtggactcact

SEQ ID NO: 33195 - DNA, 430 bp, Gossypium hirsutum
  unsure (1)..(430): unsure at all n locations
  Clone ID: LIB3135-022-Q1-K1-A1
cggtaatcgtcgacctgctgatggcgccttgcccggcgcaagggctgcggatcaaatgggtgaccgagcctacgagctggggagcagcggcaagaagcggaaagcaaccgcagacgcctctcaccatctgggcagagcagcagcagcagcacattcccggaatgtcgccgcagcctccaacccgaacggcggcagctacccgcacagctcttcacaggccatagaagacgccgaatgctcggttgccagctgcagcgtggacgacctttaccgcctcggcaatggcggcaacgccaagcgttgcccccgcccttcagggtgccttcctgacgacgccatgtccgcgtgcccgtgcacgcccggngcgagggacggggaggacgaggacgcggcgggcgtgcacgggctggagctagaggcgtacgggtcg

SEQ ID NO: 33196 - DNA, 352 bp, Gossypium hirsutum
  unsure (1)..(352): unsure at all n locations
  Clone ID: LIB3135-022-Q1-K1-A10
tttagccattcatgcgccccgaaaaggaattattgaggtgtggcagatgagaaccggaccgggtgtcttagctatccagtgtgctaaaggatgcagattgttacagccaacatacaggtttggatcattatcagactctccttatgttcctctcgaagtgtttttgttgaatggagactcaggtcagttgtcagtgctgaatcgttttcttaattgaaaattttacatagaaagttcanatgttcagtctctgttctcaatttgatttctttacctacaactgagtttgcttctcttagaaccacaaattaacgttctatgaaatgtatgtatgttgtagacagaattcatg

SEQ ID NO: 33197 - DNA, 292 bp, Gossypium hirsutum
  Clone ID: LIB3135-022-Q1-K1-A6
aggaatttcattctattaaaaaagggggtggggaattaaccaaaggcgacgacaacccagcctgatagtttcagggattatccgaatccttttattcgaaatacaatcacctacaaaagattttataagaagattcatcaagtgatacttcttctctttttggcaacaattctgaatatacttctttctgtactgaaagcacacaaaattacttactggattctgtatttggcgattccgattcttcaatcttcccttcctctttttctctttactcaaagcattcaccctt

SEQ ID NO: 33198 - DNA, 435 bp, Gossypium hirsutum
  Clone ID: LIB3135-022-Q1-K1-A7
cgaaaatagaagaaaacccaaagtctcatttcgtgtttgtggattgtaatagcagcccgggagccaaatttatacatgcagctgttgatttatctgtgtccgacattgtttcacctacatatgttccgttggttgttcaatcgttcttcgatcatgatcgagcaatcaactatgatggtcacaccaggcctttgttatcgattcaggtcaccgaactggtagatggagtgttcataggttgttcaatgaaccatgttcttggtgatggagctaccttttggcatttcttcaatgcattatccgaaatatttcaagctcaaggagatactaaaatgaaaatctcacgtccgccagtgctagagaaatggtttccaagaggtcatggtccattacttaaccttcctttcaccaaccaagatgagttcatcactagat

SEQ ID NO: 33199 - DNA, 384 bp, Gossypium hirsutum
  Clone ID: LIB3135-022-Q1-K1-A8
cccacgcgtccgcccacgcgtccggttacactgctgtcggtgtttttgttcttgggccgaggtttcatgaggcttggggaagtaaagctggagagaagcacgtgcaattcaatgatttcattgagtggaatcgtatttgcatatcaatggagttggtaactgcagttcttggagaccatggacagcgctctcgagaagactatggaaatggaatttaattggcaacctgtgctgggaacttctattggattttgtggggcagcgtttgggcatctttgaaggcttaggtggaaggggccttgctgatcccattcttacccttattgttgggattgatccaaagtctgcaacagctatttcaaaatgtatgatcatgggtgcaac

SEQ ID NO: 33200 - DNA, 321 bp, Gossypium hirsutum
  Clone ID: LIB3135-022-Q1-K1-B1
ccaccgacataatttacaacgttatgagggataagcattgcttgggctttgagcatgatcttctgtctgctatgcctgctgcatttcagacactactcgcgtaaacttgacatactccacatggatatgactaatgtgtatgtatgtcgcaggggtatattaacccacgggactttcgggctgttctagcgagcaagttggcctgataaacagtcttttacatgataatgcaataccttggagctatatgtggcgctccgacgaaagagcttcaaagaccaatacgaaggcttgcggcgggcaacacggtaactcggatat

SEQ ID NO: 33201 - DNA, 269 bp, Gossypium hirsutum
  Clone ID: LIB3135-022-Q1-K1-B2
aaaacacatacgatcaatacttagacaaaaacaaacactataaataagcaaatactactgggggggtgtctaatgcatcacgacttacctacgcatcatgcactgtctttaatgtaaacaagaacaactacatttatttcttttagaacgggatctaccacatcattgctgatataatccatgattttatcaaattaattacaactgatatgcatacctactttcgcacaccagatccatcaacaaacgctgtctttatcagcactctc

SEQ ID NO: 33202 - DNA, 279 bp, Gossypium hirsutum
  Clone ID: LIB3135-022-Q1-K1-B3
gctacacgttcggtcttactgtgactaattcgggcactgtgcattatcaaagcatgtgaaggggaatgcaatgcaccgcctggtaacgattggactaggacatgctaaactgaaagccagaccaactgcatttataccttacaaaaggtgaactgtggaaacccatgaaaatggaatgctgaacactggcgaattaatgaaacagagagggcctaagaactttcgcttacaagaggcagctgcaaatgctcttttacgctattctatgcaatttacaaa

SEQ ID NO: 33203 - DNA, 188 bp, Gossypium hirsutum
  Clone ID: LIB3135-022-Q1-K1-B5
cccacgcgtacgtattaatcggctgtagtttatagcctctagccatgactttcaagccgaggaatgtaggccgaaacaagcatgccctttgccatgtcaaatacatccgctgatctaactgtggcacatgctgccctaaggataagtcaatataatatgccaactgtgaggtatattgtaaaacaaac

SEQ ID NO: 33204 - DNA, 280 bp, Gossypium hirsutum
  Clone ID: LIB3135-022-Q1-K1-C10
ggcaaaactgccaaattccttgagcaatgtttcctgatgctcctgaaatactttacgggggagactgactattcttgcctagcctacaaattttcattgactatgtgaggaaccctaaactttatcctcttgacatcatcaacccttataagattgtcgatacttaaccttataccaacttgatatctcaaatcattaccgtcaattcccgctgcaattcacctgatgccaacttgcctaggaaatggattgtctgtgtctaggtgtctcatgatcttta

SEQ ID NO: 33205 - DNA, 135 bp, Gossypium hirsutum
  Clone ID: LIB3135-022-Q1-K1-C11
cgagaaagaaaatgatgggaaggaaattcttcgtcggcgggaaattgggaaatgcaatggaagcgcactgaaggaaagtgaataaggattgtgaagtactttgaatgctggaaaggtgccttctccggatgttgt

SEQ ID NO: 33206 - DNA, 428 bp, Gossypium hirsutum
  unsure (1)..(428): unsure at all n locations
  Clone ID: LIB3135-022-Q1-K1-C12
cccacgcgtccgcggacgcgtgggctttactctgatgaagaggaggatgattttggtgtgggtgaggatgattgtgacgatgatgaagtaatgagcacagctcactctccaattggaattaagcgaagctttcagaatcaagaccatgataatgatgtaattgagcaagttgctagttctgatggtccaaacaaaaggcaaaaactactgaatggtgggcataagcaatcgataatggtggatgccgcttgttcagtgaaattggaaggctctcacgagtatgatagcgatgcagaatcaagctaccgaggggagattttacatactgaacagtcaatgaaggataagattcgcttgacactaaaaatccttgagagcantatacctggtacaaaaggaaaggacccattactggtccttgatgaatc

SEQ ID NO: 33207 - DNA, 195 bp, Gossypium hirsutum
  Clone ID: LIB3135-022-Q1-K1-C3
tcagactttagatactactgtataaaaaactttttcttggcacttatcatcaataacggggggtactttgaaagggacctgataaaccttggcctgcgacgaaatctacaaaacgcctgcttcaccttattaaaaccttaaaaaacgggggaattggaacccaacgaaggaaaagtgttaacaccactttttact

SEQ ID NO: 33208 - DNA, 305 bp, Gossypium hirsutum
  Clone ID: LIB3135-022-Q1-K1-C5
gacaatattaatggcatacaatacaaagctgtgcaagtttagcaccttaaaattgactgtgaaaaagtggcatgtgataatttttttggtccttgagataatgggctatttattgtttggaccttaaacctcaactataaataggccttctcatttcttatttcaaaaaaaaaaaaaaaaaaaaaaaaaaaaaaaaaaaaaaaaaaaaaaaaaaaaaaaaaaaaaaaaaaagggcggccattttgggggtcgaaagcttacatccgcgttcatgaaacctggttggttgttttttgggtgaccta

SEQ ID NO: 33209 - DNA, 148 bp, Gossypium hirsutum
  Clone ID: LIB3135-022-Q1-K1-C9
gaccacgcgttcgcggctctttggtgataatctattacatcttttgttttactgcaagaaaacatttcctacgtcattgattttttgaagctcgtttcaagcttttatacaaattctgctggggacgttgtgcaattcataagtttta

SEQ ID NO: 33210 - DNA, 390 bp, Gossypium hirsutum
  Clone ID: LIB3135-022-Q1-K1-D3
cccacgccttcgaggtaatcgaggatgctatggacgatacggatgccgcggatactacgggggatacggatgtcgtggtgggtatggtggacgataccgtggacgaggacgtggacgttatcgaggaggttatggataaggatgctcctattgatactattattcaaaatattaccgaagatgctgccctaactgctgcgattatgttaatgatgatacaaatgctgaaacacattattaaactatatactaaaataaaatcatgtctatatgcatgtatataaaaatatgaaatggtataacatattttacactatgctacgatgttaacttagaatattggtttattttctggaattatatatctatttgaattacttttttaatttt

SEQ ID NO: 33211 - DNA, 374 bp, Gossypium hirsutum
  Clone ID: LIB3135-022-Q1-K1-D5
tatctatctaacttaataagacatgttctttgaggtaccccaaagaggccagggggatgcatatatacatatttgtttgctttatttgatcaaaactcgaaaccaggtcctgaattatacagacactttgggttgttttcaccaaacacgcaaccaaaatatcagcttcatttttgaggacgaaggcattgggatattgcttcttaggaatataatggaactctttctcttaagcttcatatgttatatataccattctcgttaacttaaaactttttattgctttttagactttataagcctatctaaaaatactttaaatattataaaaaaacacgggactaacttgttagatgtggatcatataagacatt

SEQ ID NO: 33212 - DNA, 205 bp, Gossypium hirsutum
  Clone ID: LIB3135-022-Q1-K1-E10
gtcatatctttaaaattaaagtatttaattttatacttccacccattacaacagcatcagaatatgaacatctccaacaaattaactccttactaaaccagaaaacctttatttaactttaactccatcatatactaattctctccatatttcaacttatgataaaattccaacctaagctaaactctaataattcttttctcct

SEQ ID NO: 33213 - DNA, 280 bp, Gossypium hirsutum
  Clone ID: LIB3135-022-Q1-K1-E12
acccagcgtcccttatcatccataaaagattatccttcttatcaatattacccatttatcatgcttttggcttgcgcttctttcaaacactttccattccaactcctctttctaatcatcaattctttttactaaaaaaaataatgttgtataaggccattgctaatcttatctttttctgtgtttccatgcttaatttactatatatacttcgattaaaaatgttcttctttaatgatttttaagaatcttataatcaataaaaaacctttttcgtttt

SEQ ID NO: 33214 - DNA, 345 bp, Gossypium hirsutum
  Clone ID: LIB3135-022-Q1-K1-E5
cccacgcgtccgaccacgcgtccgtgcatgcgttcgcaacgatgaggatcgctgtgcggggtgcacaggtgatatggatgagcaagataataaagtcttggatgttattgttagagaaaggtatgcagaatggacaaaggattactttcccataaaaaactgatgaaacgcccgatacggctactgaggacattggattacggctgcagcagaaagatcatgctacatttaaacgaatgggtgatgacttatttgtggagcatacattggcacttactgaggccctctgtggctatcatttcatactgactctcttacaaggcacttgcatatatagcatactcg

SEQ ID NO: 33215 - DNA, 354 bp, Gossypium hirsutum
  Clone ID: LIB3135-022-Q1-K1-F6
aatatctttaaaaaaagaatatgaagaaaatgctaaagtgtgagatcaaagaaaagggggggggtataccagaccactatatattcacaactgatgaacgagccaatcgtaatgttatatatctacacggagttatttttctaccaaaatataaacaacttttatgatattaaaagatcttactaatactaaacttaatcctgactacaaaagtgtatgccatatagcactcgctaaagaaaataattcagacctgaagagattttgataaggacagattcttacacctgtactgctacaccatttggtaactttcatacaggcattgggaatacagaagctcgctcagtatta

SEQ ID NO: 33216 - DNA, 312 bp, Gossypium hirsutum
  Clone ID: LIB3135-022-Q1-K1-F7
aaacccggatcgacgcatgcgtacggcggatataacgtatgctgtggcttttatttcaaacgcggcggatgttgatatggtctgtgactctgaaatggtgggcctcgttactcgaggaggcggagcgtctgatgggatctgaaagacttatggtcgtagggatagcatttaagtgggctttggactttgctttctcagtgggatgatgacgtgtttcatatattggtactttattgttgatatgtagcatttagaaatctcttatttttgacccatgtttatgtgataaaaaactatggatggaagtatact

SEQ ID NO: 33217 - DNA, 375 bp, Gossypium hirsutum
  unsure (1)..(375): unsure at all n locations
  Clone ID: LIB3135-022-Q1-K1-G1
ggaaanaaccgggtccgacccacgccgtccgcatgacattgctaccagattantgattgtcgatctttatacggtacgttgtacgtttccatagtatgtgcggaaaaattccttggtgttcggtcttgtaacaacataatgactatggattctagattagcacatttgtaatatgtttataaggcgctacgaacatgagtattccccgtgttggttcgcaccctccagaccttggaagtcactcgtgcacctgatatcctgatagtgggatctattaggatatgtgcgagcaactcttcgggtgaaaggtatctgttgatcagctcttccttccatttcctagtcgtactatcaataagatccaaaacaaattct

SEQ ID NO: 33218 - DNA, 161 bp, Gossypium hirsutum
  Clone ID: LIB3135-022-Q1-K1-G12
gtggagattacatgtttatatctttttgtactttgttatgggagagggttagtaaacgtgcacaagcttcattattttttcttattgctgtttcatttcaataatccaattcagaatttccaagtaaaaatacacagaaaaacatgaccataatttccttt

SEQ ID NO: 33219 - DNA, 438 bp, Gossypium hirsutum
  Clone ID: LIB3135-022-Q1-K1-G4
cccacgcgtccgcccacgcgtccgtagggtggttgtggtgggattgttacggcaatctgtagatctcaaaaatgaagcttatgcatcacaaattagcttatctgatggtgctgttgaaagtgtattgccaacatatagttcaggcgatgagaatcaggatgatgattcggaggtgcttctcaaccaactgcagggcagtgcgtgataacctattatttaaaatctataagtgcagggaaagttttgtatctatcttatcatggaagtcatgagttagcatatgctctgatgttggcaaagaaagtgaacttatagccatttctcccaaccattttgtgcaagggaagatacacttggcaggtaaaaaactcacctacatgaattcttgctggagccctttcctttgcccttgtttcaaatgtatgaattttccaattt

SEQ ID NO: 33220 - DNA, 240 bp, Gossypium hirsutum
  Clone ID: LIB3135-022-Q1-K1-G7
cccatcccttcaatcaaatccataattatttatggaagacaacgacatctacgtgtttcgttttttaaacttgccatatatcaaacattcctcatctataaaaacaatctctcttaatactaaaataattaaaaccaaaatctcaaagcttggttccatctacaaccttttactttaagtaaggatgacaaagataaaaatcccaatcttgtaaacgtgcataaaacctatttttaaaaa

SEQ ID NO: 33221 - DNA, 409 bp, Gossypium hirsutum
  Clone ID: LIB3135-022-Q1-K1-G8
accacacatacactcactttccaattcctttggaatcgactacaccgaccccggggctgtggagttgatagtaatgacacttatacatcttgatgccatggatggtaagatcaacgtatccttgctgcaaaagtgttaaactttccacaatgtcaatacaaaacaagcatttgctaatgcactaacaacggctacatctataaaaacactccgaaacccacccataggcccattacagacactcccatatcaccacaacccggctattcgcagagcaccatactaaagcgacttaccaactaaagaaacaatgggaaatacaaaaaggacataccttgaggtttatcattaatatcaagccatcggaggacatacatcaagatgatgaatataactaattaagaacaaa

SEQ ID NO: 33222 - DNA, 163 bp, Gossypium hirsutum
  Clone ID: LIB3135-022-Q1-K1-H11
ggtcgaccacgcgtccgaaaaatggagacaagcaaataaggaagactgttacatatgcataatatattgtctctgggatcgggtgtatcagagtttcttcgagtgatgttttgaagaaatagcacagcttttaatgaacattggctttctggcgttagcccta

SEQ ID NO: 33223 - DNA, 123 bp, Gossypium hirsutum
  Clone ID: LIB3135-022-Q1-K1-H12
gaacaatggaccctatctaacacggaagtttccctttcgattccgtgtgcgatccaaagagctcggagcggtaaaccctatatacactccttagcttcaatgctactagtgaactcttaaaac

SEQ ID NO: 33224 - DNA, 191 bp, Gossypium hirsutum
  Clone ID: LIB3135-022-Q1-K1-H5
gatgaatacacttcatatcatatattattctgataacctatatgatacaattatggcgggtaattaaaccctgtgcccttggcctataccaattacttttaatttaccgcttatctgagaatctattatatatcactaattcacaggatatcacaatgcaaatgaacaacctactggctttaggcacattt

SEQ ID NO: 33225 - DNA, 439 bp, Gossypium hirsutum
  Clone ID: LIB3135-022-Q1-K1-H8
cccacgcgtccgcgcactttccgaagccgatggaatcgactacaccgaccccgaagaggtcgagttgttagtaatgacacttatagatcttgatgccatggatggtaagagcagtgtatcgttgttgcaagagtgttcgagttcccccgatgtcaatacgagacaagcattggctaatgcactagcagcggctccgtctatgtggacactcggaaacgccggcatgggcgcattacagaggctggcagaagacgacaacccggcgattgcggcggcagcatctaaagcgatttacgaactaaagaaacaatgggaaatagaagaaggggatagctggaggtttatgatgaatatgaagccatcggaggacatagatggagatgatgaagataactaattaagaagaaataattttaaaaagaaagtggaaattcatact

SEQ ID NO: 33226 - DNA, 116 bp, Gossypium hirsutum
  Clone ID: LIB3135-023-Q1-K1-A10
acgctttgagattagccttcgtggccggttatctgtagcgatagcgctccactgtttcgacacatggctaagataaatgacggtgatgacttgcgggtctcgtttatggaacttga

SEQ ID NO: 33227 - DNA, 237 bp, Gossypium hirsutum
  Clone ID: LIB3135-023-Q1-K1-A4
gaaaaccccaaaagaaaaaagaaaacagaagaagcaagagaacgattcaaaaatcaccttttttttgtattgatttcgcgtttttgatacaatatgcgtgggtattccccctttcaatttttcgtaatggctttatatagcccaaaaggaaatacaaaatccctatttttggctttcttttttctctgctattacaaattttgctcaatattgtgtgctattttttttatatgtttc

SEQ ID NO: 33228 - DNA, 176 bp, Gossypium hirsutum
  Clone ID: LIB3135-023-Q1-K1-A6
gtggtgggtactgtatatggagttgttgggttaatcattttttggaggctttgttgcttaaaaatatatgaacctcttctttgatgctcaaaggaagatatagattacttggcttaatcttttttttttctggagtgtggatcagatgttggaaaaaaaaaaaaagagaatttatt

SEQ ID NO: 33229 - DNA, 241 bp, Gossypium hirsutum
  Clone ID: LIB3135-023-Q1-K1-A8
acttgttaaaagtgatcagctactttgcaatgggaggcagggtcacctatataacagaaatgcgagacatggactcgtgaccaatatgttacgtgagcatgaaattatggatggtaatggtactgaaatgaatcctgtggattttttggttgctcagttccctggttttgctaccgaaaaccttgcggaggcttattttgcgaatagttgtgatttaaatcggacaattgaaatgcttact

SEQ ID NO: 33230 - DNA, 446 bp, Gossypium hirsutum
  Clone ID: LIB3135-023-Q1-K1-B11
acccacgcgtccgcttttttaatgtcctcaatgaccatctccttaagcagctgccagtgactccagcagccttccgaaacttaaacggtgagggttgtcataaagggtagggttcacggtgtgttctataagaactggaccatagagaatgccactcaacttggcttgaaaggctgggttaggaacaggagggatggctcagcggaagctcttttctctggaaccccggattctgttgaggagatggagcaaatgtgtcggcatggcccaccagctgccatggttaccgggcttcaagttgtaccttccaatgatgatcctggtaccggatttcagaggaagcaaacaggctgatcagactacacttaaagagattacccccattctgtattaacatgtatagtcgacttctctcacgaataaaatagccgagtcatctatgatta

SEQ ID NO: 33231 - DNA, 391 bp, Gossypium hirsutum
  Clone ID: LIB3135-023-Q1-K1-B12
gtcactcgttcgagtacctgtggatttgttgctcctgagggtttagccacaggtcatttgagtgcttggagggatgtcgatagtttctgagttcttcgtgcggggatggtatggtgccgccgggccctttgacagaatcgaccattcggtgaacacagcctggtgggatgggcgcaaaccatacctggccaacagacgccatatgtgtgcagcgcctatattaccgtgcgtgaacgccaatatgtaatggaaggtgccttcaacggcggaacccttgatgtgggatgcttgactgttgaagcctaattcggaccgaggatgaacgaggacgcaaccgcattggagcgagttcacgatacaagtgaatgccggagctatgcaaacatcatta

SEQ ID NO: 33232 - DNA, 112 bp, Gossypium hirsutum
  unsure (1)..(112): unsure at all n locations
  Clone ID: LIB3135-023-Q1-K1-B2
gctgtatgacagatgagtacgcacggacggctttagactggggagatatttaccaaggttttgcaaatggggagttcttggtgtcntcaatgatgaaactatggtttgatga

SEQ ID NO: 33233 - DNA, 300 bp, Gossypium hirsutum
  unsure (1)..(300): unsure at all n locations
  Clone ID: LIB3135-023-Q1-K1-B3
gttaatgatggcaaggcattggacaaagagttgcggaccgagatcccgattcctcgtggaggaccgcatatttcttgtgctgcgataaacaaacgactgtttgtaatctgccgtaacaagggtgatattatttcaatactttgatactcccccagttcatagacatatatacgtgacattactttctgnggactaaaggattctcatcacttgattgccttgtttggagaagaaaataatgctgtgtgcaatatccccatttggagtcccactttaacgtatactatatgttgttacaat

SEQ ID NO: 33234 - DNA, 250 bp, Gossypium hirsutum
  Clone ID: LIB3135-023-Q1-K1-B8
cccacgcgtccgggagtcattattttatttgtgggtataaaggttattatgaatatgccaagtcaaaaggagtagatgtcggtgtgcctgttggttgatgttcttattgatggaacagttcctactggttctggtctatcaagctctgccgcttttgtttgttcatctacaattgctattatggctgcttttggtgttaactttctaaagaaagaattgccaagttacatgtgattgtgaacagaacatt

SEQ ID NO: 33235 - DNA, 297 bp, Gossypium hirsutum
  unsure (1)..(297): unsure at all n locations
  Clone ID: LIB3135-023-Q1-K1-C1
tacgcatacgcatagggtagacatacgagaagaataaattattttgtaataattggctttagagtaccccgtgttatttattggacaccctctctaacaaatctcccatctttgattgtgtagacacaatccatcggagtggagattatgttaaaatcttttgatacggccccagntcagagacatttatatgggacataactttctggggacgaaagganttttcatacttaggggccttgtttggagaagaaaaaaatgcagggtgcaattaccccatttggaggcccactttta

SEQ ID NO: 33236 - DNA, 407 bp, Gossypium hirsutum
  Clone ID: LIB3135-023-Q1-K1-C11
gccactcgtacaactaggcgttcactttttctacatttggggaactggaaatggggttatggctattactagggagctgtacaattatgatgacctggatcgggggacgaccgatactgacctgaactctgataacacaaagaaccttgtgcagaagtgttttttttggtactagtaggagtggtcttcataggacataaactgtggaagaacccaatctgcttggctcggagatcctacgtatatggtaacgggaaatgctatggtacaactgaggaggctaaaaatatcattacaacattatacgaacatgaaattccttatgatgataacggggaggtcggagagaactctacattagtgcgacttacctttgtgaaaagactgaggcgctctgatttacatgt

SEQ ID NO: 33237 - DNA, 161 bp, Gossypium hirsutum
  Clone ID: LIB3135-023-Q1-K1-C6
cccacgcgttcgctcttatttgaactcaacttcccagctaatattagcatcatggccgttgccacttatgactacgagaatacctccccagtcgcccatgccaggctcttcaaggcctttactgtagaagctcctaaagtttcgcccactgctgcacctaa

SEQ ID NO: 33238 - DNA, 170 bp, Gossypium hirsutum
  Clone ID: LIB3135-023-Q1-K1-C8
cccacgcctccgggaacgcgtacgtccactcgggctaccacgcgtacgaaaaattagcgcagttatactgtgtacgtgttggtgatacccgtgtctaatgcttttatagctagtacagtgtgtactgcttctcacatttgaagctcgtcgtctatttgtatgctcattac

SEQ ID NO: 33239 - DNA, 378 bp, Gossypium hirsutum
  Clone ID: LIB3135-023-Q1-K1-D11
cccacgcgtccgcccacgcgtccgaaaaaaaaaaaatttaaacctccaaagaaaaaatgaaaaaggggggggggggaataacaaaaaagcaaaacaaataaaaaaaaccaagggcgaaaagaacacgggtactgacaaaacaaaagggattacacatatagctggggggccgtgatagacgtacccattctaccaaggcctctcatttataaggagaacacctgtcaaaaaaacaaaccgtccatggtaaagccccggcgtgtcaaaactaactggctaggcaacccaaccccttttgaagataaagcgattattacaacagcgcccttacctaagcggtctcaaaaggaagacggccccaaccgtgagagctctcca

SEQ ID NO: 33240 - DNA, 165 bp, Gossypium hirsutum
  Clone ID: LIB3135-023-Q1-K1-D7
cccacgcgtccgagatggcgtaagtttattctggcaagcatacttagtacctacatgcggagatctatttcgtgcgtaatagtcatactattagaagattgtatgatagccacgacattgtgctagtcaattgatgtctctaggccgtcgtttactgttatctat

SEQ ID NO: 33241 - DNA, 164 bp, Gossypium hirsutum
  Clone ID: LIB3135-023-Q1-K1-D8
ctcacgcgtacgtgatggcgtacgggcagcctggcaaactgcaagatgaacggcatgaggagcactagctcgtgctcactcgtctcagaaattatgtgtggtatgttagcgacgaaatggggctagtctggtcattctacagtgccgtaggtgactgtgatcta

SEQ ID NO: 33242 - DNA, 415 bp, Gossypium hirsutum
  Clone ID: LIB3135-023-Q1-K1-D9
tacactcgttcgctgacgcaaacattcacgcgtgcggccccacgatcaaaaaagcagggcatgattactctgtgcgcggtgaacaaacaaagcctgatctgctgcataacgaggtaaagataaaatgatggggatacataaggcgcgggggcgattagcaactctcttctttgtgatgagatgaatatggatgcatgccactttactgatggtgctttgagactctttcacttggactggaaggcaacaacttcaagcttaaaaaacttgagctggcaactttgaatttctgaactacacaatgataacaagccaatgcagaggaccaaagtatacacctgaaactggaaaactgcatgcaagcgaattgattgtgctatgcagaacacatcaacgactagacgaccgaatgcgc

SEQ ID NO: 33243 - DNA, 138 bp, Gossypium hirsutum
  Clone ID: LIB3135-023-Q1-K1-E7
cacacgcgtgcgtgcaagcgtaggtgtcgtctggaaagcaaccggagtacctacgtgataagatcttacttgcgcgaacaaagcaaactagtaacaattttgatgttaaccacgggcttgtcctaggcaaaaaaaata

SEQ ID NO: 33244 - DNA, 269 bp, Gossypium hirsutum
  Clone ID: LIB3135-023-Q1-K1-F11
cccacgcgtgcgttttatggtgggttccctcttcaactaagacgacatccgcgggcgcggtggcttatgtctgtacccaaaacccgggcacttgcccctgcctatctgacggattccttgcaggctgaaattattggccgttcctcataaaatgacgcttgtctgtatgtatacaagaacgttgtggcattaggcgtgtattataggatcctggcctggcttttaacagggcgagggggttctaaaactcctcccccaatgcatgtata

SEQ ID NO: 33245 - DNA, 427 bp, Gossypium hirsutum
  Clone ID: LIB3135-023-Q1-K1-F12
gggggggtgcaccaatggccacgacagatcaatgtaagggcgggcgttgtggtcaaggcatgaccacttactatcaaatgcaaacaaggagtgcagatgaacctatgacaacctaggtaacatgcgtaaactgcaacaaccattggaaatcctgttaggcggatcctgagatctgtcagtcaatgcggtgaaggtgtaaggttgatcatcttggaagctacattctgttcatctttgtttgtggattgaattttaaataatagtgtaatgacatatttatatgctatatagggactttcttagggataactaggtgtttgggggatgattgtgccaaaatcataactgagttgatacacatcttacgtgattgccacatcctgccattgttgcggaaaacaggagatgtgtctcctttgtatgattc

SEQ ID NO: 33246 - DNA, 421 bp, Gossypium hirsutum
  Clone ID: LIB3135-023-Q1-K1-F2
gccacgcgtccggcacctttaaaggctcgagccttggaaagggaaatcgaggagaaaacaagatctttggccccctctcaagcccgaatccgatgacggcaaaggaccaatcgccggccgatctaagggccgattcaggtgcactccctcttcctttttttatatttattttccttattaaaatgaagttgcaaaaagaaaaagcataaaaaaaataaaatggaaatgaaaatggatagagaccgggtgaggcttaacccttttgaacctctatttttttttttggttttgaattctaaagggcggtttttacaaaggaaatttccccccttacaaaagataaaattcggcttttaaaggcaatatattttttttcggtccctttggttattacttcccccatcattcgcaagccttcttt

SEQ ID NO: 33247 - DNA, 117 bp, Gossypium hirsutum
  Clone ID: LIB3135-023-Q1-K1-F7
cccacgcgtccgcccaagcgtccggttggtctgagaagcaaccgtcgtaccttcgtgatttgaactctctatcgcatgcccgacgctaacgtcgagggtccgatcttaaccttgagg

SEQ ID NO: 33248 - DNA, 424 bp, Gossypium hirsutum
  Clone ID: LIB3135-023-Q1-K1-F8
cccacgcgtccgcccacgcgtccgtcttgattggtgatggggctacatttgatgaaaagagaacttcacgttcatacacgtgggcccagcatttggcaggaattgattacttacctgaggtttcaccattgcttaatatccaggaagcttcaaacaatgaaaccaaaagcgaagctgctatctctggtcttgcattgtatcggcagcagaacagaatgcaaacagttgtgcaaaggatcccgtcacggataaaaactgagcttgctcttgcgtgaagtaacggcccgtatgtttggaggttggatcttggaccaaacaattataaaaccaataggagtggatttcacaatggggtcaaaactgaatattttggctataaaaaataatttcctgtgctaaggtctttgttggcatctttatgata

SEQ ID NO: 33249 - DNA, 359 bp, Gossypium hirsutum
  Clone ID: LIB3135-023-Q1-K1-F9
gccacgacatggtctagggcaccaggtttgctgaaggggtgacatcaatgcaccctgagatcatgttggcttagaacctctcaccctcatttaatggggatgcactgggcatgaccgtggaacaaataagagacttcattccacggatagccaagcttggtttgtgttgacagtgcactacgcgaactggatgacatgctgatgcattggtgaccgacgcattaccgagagatttcgccaggagggggatgctactgtatgtagagaagatcgaaaaagaagatggggacaacggtgcggacacatgggctgaccgctaatggtaagataccaactcttatgatagatatgtcatgaca

SEQ ID NO: 33250 - DNA, 152 bp, Gossypium hirsutum
  Clone ID: LIB3135-023-Q1-K1-G12
accgaattacagatccaattgtatttgagggtgggaatgttgggttcaagaagccagcgcgcgaggatcctgagaagactaacaaaatcccatggcgtaaccctatgcaagcttgctatatgaaccccactttttatatgctgaccggagga

SEQ ID NO: 33251 - DNA, 319 bp, Gossypium hirsutum
  Clone ID: LIB3135-023-Q1-K1-G9
cccacgcgtgcgcccacgcgtccgaactaggaggcgcattttccagatacatacctgaaggatgacattggctgatgatgtcaacttggaagaatttggtatgaccaaagatgagttctctggagctgatatatatgcaatatgtactgaagctggtctacttgctttaagggagcgccgcatgaacgtgacacatgccgattttcaaaaggccaaggagaaggtgatgttcaagaagaaagaatgggttccggacggtctctatatgtacaaaaactcggtatatgtatatatattccagcgatattcatggtatgta

SEQ ID NO: 33252 - DNA, 219 bp, Gossypium hirsutum
  Clone ID: LIB3135-023-Q1-K1-H1
cttcctctatattttcctctcttgaataaaccaaaatctaaattgttgatttcaaaattcatcctaagcttgggctatgcaacaactcttgattattcttgatatttttaaaattcttcttgattttcatcgacttgattgctcaaggacgatcaatagtttaagtatgggggagtttgttaagttcaattttgagcttaacttattcaattaaattat

SEQ ID NO: 33253 - DNA, 387 bp, Gossypium hirsutum
  unsure (1)..(387): unsure at all n locations
  Clone ID: LIB3145-001-P1-K1-A1
aacaccttttaaatttcagtctttctttttgtttaatctctgcgtcgtgtagaacattacagggacggatatggcttttatagccatttcaatacaatatttctatgtttttttgctactgctctctgtgttgtctactgctatttctgcattttttactcttttttgccttcttttgtaggttttgacgagagcgatgggacgaggccagaggttgctgtgctgaggccacttttgttggtttnaaaaaaaaaaaaataaaaaataattttaataaaaataataatatattaatattatttctttatttcggtcgtttttttttttatatacttttatttctctttttattttttttattttattattttatatttttttgggggg

SEQ ID NO: 33254 - DNA, 138 bp, Gossypium hirsutum
  Clone ID: LIB3145-001-P1-K1-B5
accacgcgtacgcccacacttccggatgctgtaaattatcgggcttcttcttttgggaatggctacgacagtatttttgaagctaaaggaattgcttgtaatatagtgcatgccgttgcctacaacaaatgctatcat

SEQ ID NO: 33255 - DNA, 203 bp, Gossypium hirsutum
  Clone ID: LIB3145-001-P1-K1-D4
cccacgcgtccgcaatcgggaatggtctaatagatcctgaaatccagtatcaagcggaccgagattatgctttgaacacaagtataattacacaatctgattatgtcgatatcaaaaagttggtcccttcatgcgtgcaagcaatcaaaagatgtggctctaaaggtggagatgcttgtgtggatttttttgatacttgtaac

SEQ ID NO: 33256 - DNA, 446 bp, Gossypium hirsutum
  Clone ID: LIB3145-001-P1-K1-H8
cccacgcgtccggtttataaattcaatgttttatataaaattatcacttactctattggcatggtcatgcaccccacacctatcaggaacttggttgggacttgggagtgggaccacgttaggcacaatcatcatttttataagtgttcacgtataatattaccaaattttgtaatatctgaatctgctaaaattctttatatatatatattctcaaaatacaagcattacgcaagtaataggtttagatatctaagtcggagtcctattcaaataaataatataaatttagataataaatatttgaatatttatttgcatctgttgtaaatttgtaatgaattaaaattcataatatttgaaacaataatattcgaatccataaaatatatatatgaattgaatattcgaatctataatccaaattattatcctttaacttcaca

SEQ ID NO: 33257 - DNA, 421 bp, Gossypium hirsutum
  Clone ID: LIB3145-002-P1-K1-A1
aaacttgccacttgtgccagtgagaacaattttcgaaaattggcgtacctgcatgatgctgtgacatactatattatgattcgacggagggatatataatgatcttagtgatggacttcttgaaactgttgagacggaacttacaagtgtacaacgtctatcatactggctgtattctgcctatagtgatacagctgaggctaattacccgcatccttcaaactactgaatgcctttgcacagacatgccataacagaggtctgctaaaagaatgatgggtctgctgccggggctagcattgtggagcatatatataatgcatacagcgtatattacaattgtactggagatgctgactggatccaactcgatgacgatcctcatggcactgatgggtagaactggcacgcatgcactgaa

SEQ ID NO: 33258 - DNA, 131 bp, Gossypium hirsutum
  Clone ID: LIB3145-002-P1-K1-A2
aaacttgtcacttgtgccaatgataacaatctttgaatttttgcgtacctgcattatgctgggacatgctatattatgatttgacggatggatatacaatcattttaatgaaggaatttttgaaactgttg

SEQ ID NO: 33259 - DNA, 353 bp, Gossypium hirsutum
  Clone ID: LIB3145-002-P1-K1-A3
cgacccacacactcgccacttgtgccaatgataacaatttacgattttatccatacctgcatgattctgtgacagactatattataatttgacggagcgatatataattattttaacgatgtacttcttgaaactcttgacactgaacttacaacagtccaacgtctatcacactgtttatattctgcatatagttattcagcagaggctaattacccacatcctttaaactacttaatgcctttacaatgacatcccataacagaagtctgtatatataatgatgggtctcctaccagatctagcattcttgaacatactaatattcctaaaagcgtatatcacaattatac

SEQ ID NO: 33260 - DNA, 336 bp, Gossypium hirsutum
  Clone ID: LIB3145-002-P1-K1-A8
cttttacatattatcgatcatctattcaattatgccaactacatcgaggcaatgggcttggccagaccatctggccttacagagagatctcctcctgtttctctactcacatcctatcatcataattccaaaaataatgccaccatcaatattgaacaatggaaattattccgcaactgcaatggatcagtcaaaaaatgtggatcttaattcaattaaagctatcatcaaattcgtttaaaaccatatactcgaatcatagtattctactgacttgttaataaagctatccactcagctataaaaagtcaagtctcataggaataatagattcat

SEQ ID NO: 33261 - DNA, 236 bp, Gossypium hirsutum
  Clone ID: LIB3145-002-P1-K1-B2
cgaacgcgtgtgccgacgcgtgggcaaacgcttgggttaaaaatagcctgcttattaatgggcgatgagaatgacgttacttctgtgaaagactccaactgttgctgaaaactgtgaagcattatacggacctttcatatagaatcaaactccgaaagtccaaccaattttagattcctacaaagtagagctggttaaattgatttcatgcgaaacctaagtacctttaaataatg

SEQ ID NO: 33262 - DNA, 358 bp, Gossypium hirsutum
  Clone ID: LIB3145-002-P1-K1-B6
gtcgaacgccattggaagaaacatgtcaaatctcagggcatgctgccgaaagattgatggtgtagtgatgattgtcacactgctttacatggtgtcatattcgaatccagatgaaggcaaggaacggacctatgtagtactagtctagtatgctgactctagctctataatgcatcgctatatgtacgaaattatagcgactagaacatgctgaaagtgattgtaatgctgtactgcatgctgcgataaatgtatgatcatagactaacttttgttacgtgcattgatacatatgatttagtaagtgaaagatgcatggaaaccttaaccgagcatttgaatccaatattgacttgac

SEQ ID NO: 33263 - DNA, 192 bp, Gossypium hirsutum
  Clone ID: LIB3145-002-P1-K1-B8
gagaactctcaacaagctggaactaatcaatatcaataggaagagaagctactggaattagataacaaaaggtgtcaatctggtttatgcgatgtcttattcgaatacagatgaattcaaagaaagtactcttatagtactagtctactatgatgactctagctctatgatggatcgctatatgtacgaaat

SEQ ID NO: 33264 - DNA, 314 bp, Gossypium hirsutum
  Clone ID: LIB3145-002-P1-K1-C2
gtgatatgaacaccccagtaaagattgaagtttcaggttaaaagaaggaagaaggaaatgtggtggtggagtcttgaaaatatgctagagcttctaagagattttaaaaggcactaaagtatatctattatgattctcacttcaacgaataggataaaactcaatgccaaggcattgaaagttgcttgcaatctgaacattgctgcttgcaagctgaaactgaacgattttaagcaagcttagaaactgtgcatcaaggctttagacatagaaagttcgaatgtgaaatcgttcgatataatggctcaagcata

SEQ ID NO: 33265 - DNA, 204 bp, Gossypium hirsutum
  Clone ID: LIB3145-002-P1-K1-C5
ctaaagcttacgcgtcagcaattccatcgtactaaccctcgtatacttcaccatttcgagggacgccacactaggacgctaaactacacgtcaactcgctaaaggccagccataaagccggatacattgtctgcaagttagcctacagacagatacagactgacgaacacggctccggaagactctcagcacctactaccatac

SEQ ID NO: 33266 - DNA, 327 bp, Gossypium hirsutum
  Clone ID: LIB3145-002-P1-K1-C9
atttaattctgtttaattttgctacaaactcttctagttttcttctaataaaaaattattgtgggaaaaaaaaaaaaaaaaaaaaaaaaaaaaaaaaaaaaaaaaaaaaaaaaaaaaaaaaaaaaaaaaaaaaaaaaaaaaaaaaaaaaaaaaaaaaaaaaaaaaaaaaaaaaaaaaaaaaaaaaaaaaaaaaaaaaaaaaaaaaaaaaaaaaagggccccccctttaaaagacccaaatttacctcccccggccttccaactaaaaacctttttaaaggggcccccaaattcaaatcaatggcccccctttaaaaaccgctagccc

SEQ ID NO: 33267 - DNA, 214 bp, Gossypium hirsutum
  Clone ID: LIB3145-002-P1-K1-D4
caaaatctgagtaaaattatttctacgtttaaaaattttgtataactatctttgatagtggactagtatacctaaagatcgcttctctaaagacattatgatcatgatagtgtctcttgtactatacgtatactccattgtatcagctcacgacagagcaaagattccctcaccttcaatggacactgttatctgccatctcaacttctattac

SEQ ID NO: 33268 - DNA, 419 bp, Gossypium hirsutum
  Clone ID: LIB3145-002-P1-K1-D5
cggaaccacttagatccacagtgtcttatattatcagcggcgatgaaacggcaccggtcggggtatatatgtgctccaattgtgcactagactactgctgcatgggatctgcatatactacgagtaacagtggagctgtatgtgcttgaataagagggacgagactatgcataggcacagtaatgtatagtaccaagttgttatatatggaagacagggactatacagcttgaaggtatatgacattatgacactagagatcaatgataccgtcaaatcatattacctatacgaatgcttgtatcagtacatgggaggaaatggaaagggcgatgcaggtgaagtctgtaaaatggacatcaggaattgtaagcaggtgctgcgttatagatgacgcaaacttacgtacgcttgcatgc

SEQ ID NO: 33269 - DNA, 326 bp, Gossypium hirsutum
  Clone ID: LIB3145-002-P1-K1-D6
ctgaaccacttacatccacagcgttttatattatcagcggcaatgaaacagcacgggtcggtatatatatgtgctcacattgtgcactagactactgctgtatggaatctacatatactaccactaacagtgcaacgtgtatgtgcttgaataagagggactagactatgcataaccacagtaatctatagtaccaagttggtatatattgaatccatggactttacagctttaaggtatatgactttatgacaatacagatcaatgaaaacgtcaaatcatattaaccatagtaatttttctatcagtacatggtaggaaatgga

SEQ ID NO: 33270 - DNA, 149 bp, Gossypium hirsutum
  Clone ID: LIB3145-002-P1-K1-E2
accacacgtgcgcattcttcattcctagattttggttatacccgatgggcttagcgtcaagatagggtccaaggttatcgaatttgacgatcccaggggtaagcttatcccctacttcaagcacttaaacctggacttccatctattta

SEQ ID NO: 33271 - DNA, 295 bp, Gossypium hirsutum
  Clone ID: LIB3145-002-P1-K1-E7
ctcattcactgccttactccctgtttagattttagcatgtagatacattttcatggttcaggtatgcttgaataagactatcttgcatgacattgggctcttatcatactatcgccaagccatttttcattgataacaacgtcaatattatcactatgtctttagataaacacctcgccagtatagtatcagttaatcttatcagtctacttaattaactgatgaaatctcattgatttatcaagaacttatttgaatgacatctttctctaaacgatcacatattcgtaacact

SEQ ID NO: 33272 - DNA, 198 bp, Gossypium hirsutum
  Clone ID: LIB3145-002-P1-K1-F1
ccagaacatgctgcaattgatgctgcggagtaccacgtttgtatgcatgactacccggcgtggcaagggaaagtagcatcatgcagatccaggtgctgcgtaaaaatgatatcagagttagtagctgtgcgctgatagctgaacgaaggatcagtcaattactaggtgtctagtgacgaacactatggaacgccctag

SEQ ID NO: 33273 - DNA, 313 bp, Gossypium hirsutum
  unsure (1)..(313): unsure at all n locations
  Clone ID: LIB3145-002-P1-K1-F10
tcgtcccacgtcgtctcgtaaattttgtcaatgggattattccatctgtgtggatctgnnaaaaggaagtctaataggggagtattgctttggagtatcctaaacagttgatcgatgatggacatggaggaacattgaagggtcggtgccttagaaatccatccattgggtacatatgttagcttgggaaatctcaattccattaaatcggcgctcgttggatatattgataccaaagcttgttggttaatcaagtttgtactggtacttgcattggtatgtatgagtaggtttaggttatagcttaaggact

SEQ ID NO: 33274 - DNA, 140 bp, Gossypium hirsutum
  Clone ID: LIB3145-002-P1-K1-F6
cctagaaccaactgctacatgctttccttttttaggagtacatattatataaagagctaagggaaagttatgaaaggccttataaagagcgtcataaaggacaaagaataacatctcatgaattgaaatttaaataataa

SEQ ID NO: 33275 - DNA, 204 bp, Gossypium hirsutum
  Clone ID: LIB3145-002-P1-K1-F7
ccttgaaccaactgctacatgctatttctttttatgagtacatattataaaaagaagtaagggttggattagaaaggccttataaagagcttctaaaatgacaaagataaacagctcatgaattgaaatttatataataatttaattcttctattgttttcaattcagtattttcatctaattcgattattatgaatttctaaa

SEQ ID NO: 33276 - DNA, 201 bp, Gossypium hirsutum
  Clone ID: LIB3145-002-P1-K1-F8
cctagaaccaactgctacatgctttccattttaggagtacatcttataaaaagagctaatgaacggaaaagaaaggccttataaagagcgtcaaaaaggacaaagaaaaacagctcatgaattgaaatttatataataattaaattatactattgctttcaattcagtactttcttctaattcgattagttgaatacctaa

SEQ ID NO: 33277 - DNA, 199 bp, Gossypium hirsutum
  Clone ID: LIB3145-002-P1-K1-G3
ggccgatcaacttacggacgatcagatctcttagttttaggaggcttacagactttctgagaaacagggcgatggcagcattactaccaaggagctggacactgcgatgcgatcactcggtcagaaccctactgaggcagaactacaacatatgatcaatgaatgtgatgctaatcgaaatgggaccattgattttcct

SEQ ID NO: 33278 - DNA, 191 bp, Gossypium hirsutum
  Clone ID: LIB3145-002-P1-K1-G5
gttaggaccgcatcctacgacagctttagtttttaaggtccttgaccactatcagggctagggtgctataaatcagcatctacctacactaaatatgcatcagctcacataaattgcataaaacttataccgatctcctcgtctctaaattctgaaacgactatactttctaaatatgatacactcatata

SEQ ID NO: 33279 - DNA, 418 bp, Gossypium hirsutum
  Clone ID: LIB3145-002-P1-K1-G6
gtgaggcctgcatcctacgacattccgagttatcaaggtccttgacgaatatcatactgagggagctaacaaagcaacgtcacaatagatattatatgcaccagttcacttcttatacatagaatgtatacctgtctccatgtctatagatcctgaaacgacgataatatataaagatgatcgactcatctagaagtgggctataagactgaccttcgatgacgaacaacatccgtatctgccatagcatatgctatacagacatatagaacagttcagtgatggagtcggatatagttggatcgatggtctcaaggtctatgctagcagacatgtgactcttaatatgatgttcaatgctactctcatatttacttacacacactatctacttaagaagcatattactacatgatga

SEQ ID NO: 33280 - DNA, 261 bp, Gossypium hirsutum
  Clone ID: LIB3145-002-P1-K1-G7
gtaagaccttcatcctactacagattgagtttccaaggcccttcaccaatatcatgggctagggtgctaacaaagcaacatcagcactagactataatatgcattagctcacttataatacaaacaatttataccttcctccatgtctattaatcctgaaactactataatatataaagattatacactcatataaaatagaactataaaactgaccttctattactaataacatctctaactgccatagcatattctata

SEQ ID NO: 33281 - DNA, 320 bp, Gossypium hirsutum
  Clone ID: LIB3145-002-P1-K1-G9
tggaatcgtggtagcactggtactgatcaaaattcgcaaagaaataacagctgcaagttgaactactcagcttcttcatcggttttcagcatgataaggaattggaaaacgtttcacttagagctgaaggtacggttgattcatggaattgtcatgcagaccagtagaataattacttacatgaaatttgtaatgcagagaactagaattttaatgtgaataggcttttcaagcagtaatcatgttctcttctctcttttctttttcttctcattttagaaataaataagaaatttaaactgcaatttgttcggtgagaa

SEQ ID NO: 33282 - DNA, 272 bp, Gossypium hirsutum
  Clone ID: LIB3145-002-P1-K1-H1
ctgatttgttcttcatttctttcagctaaatttattattaaccttccattaaggctttaccgaaaggtgatactaaatgtgtgtttcttgacactcagtgcacactaagcgttccattgatagccaataaagagcttgaacgacgaaaatatagtgttagcttgataggtaatctggtcacacagaaatgtcatgcaacatgacagcaacaaagattagcattcgctgtgaaactttaaactcgattactgtgacgctagactccggattct

SEQ ID NO: 33283 - DNA, 152 bp, Gossypium hirsutum
  Clone ID: LIB3145-002-P1-K1-H3
ctcatgcgtacaacatttctaacagctacatttacttttaaccttccattaatactttccagaaaggtcatacttaacatttgtatctacacacgcaatatatactaaataatccttaaatagccaataaagaactacaacaaataaaatat

SEQ ID NO: 33284 - DNA, 222 bp, Gossypium hirsutum
  Clone ID: LIB3145-002-P1-K1-H5
ggacgcataccacggatcgttgtttcgagttcggcgacagttatgtaccttctaaagaatgagtgaatggtcaaggtagcatcactgaaccgctgtgaggttctattgaaacctgggctggataactgccgttgcttctaggaggaaggctttgaccatgtatatgtcggttacagtatccgtcatgcatctgatcccggctccagagctacacagattcta

SEQ ID NO: 33285 - DNA, 367 bp, Gossypium hirsutum
  Clone ID: LIB3145-004-P1-K1-A11
gatggacactgccaaggcgctcaagggccccttctccatccgcctcaccagcgagtccggcaagaaggtcatcgccaaagacgtcatcccgccgaactggagacccgatgccgtctacacttccaacgtccaattctactagactttgaattcccttcgattcatccggcgcggtgggctatggacctgcagcagcaagctaattaagtttatatatattgcatgagagagcatgcaccgctaaccatatatactactgagacttctgaattctagtatatgtaatccttttgtttgggtttaggaggcaattctaatcatgtatgccgaattccaaagagtggaaaacaagcaaaatgttaaatat

SEQ ID NO: 33286 - DNA, 457 bp, Gossypium hirsutum
  unsure (1)..(457): unsure at all n locations
  Clone ID: LIB3145-004-P1-K1-A9
gttatttgggtgaaacctctggacaatgattgttacaagaggcgagcacatggtacagagccacctctatgcaaaagtggcaatgatccagattcagtatggggagttccaatggaagcttgcattactccgtatcctgaacaaatgcacagagatgggggaactgggctagctccctggcctgcccgattgacagccccgcctccccgtcttgctgatttgtacattactgctgacacatttgaaaaggacacggaaatgtggcagcaaagagtagaaaactattggagtttgctgggcccaaaggtaaaaccagacactattagaaacatcatggacatgaaggcaaactntgngtcatttgctgctgcactcaaggagaaagacgtatgggtgatgaaatgtgtgccacatgatggaccaagcaccctcaagataatctatgatagagggctga

SEQ ID NO: 33287 - DNA, 351 bp, Gossypium hirsutum
  Clone ID: LIB3145-004-P1-K1-B11
caccgagagaggaacgcgaacaaccaacgatcgcctcatcgccatggctcgctctgtccccatcggcgtcgccgtcgcgcctctgctcctgctcctcctcgtctccactgcgtccgctgcacggaccgtgggcgacaccgtgcaggacgcgtgcagcaagacacaattccccaagatctgcgtggacagcctcgccgcaaagccagagagccagaaggcgaccccgcgccggctggcggagctgttcgtgaacatcgcggccgagaagggatccgggatggccacgttcgtgcacgggaagtacaacaacgccaaagacaagaccgtggtcaagtgctaccacagctgctc

SEQ ID NO: 33288 - DNA, 456 bp, Gossypium hirsutum
  unsure (1)..(456): unsure at all n locations
  Clone ID: LIB3145-004-P1-K1-C11
atgacgctgtgcgggtgcgggctgcagagaggagaggagtagagcggcgtacgtagtacgtaccgtcttggcgtggtcctggatgcggagcggcggcgcggaggcgcaccgaaccttccaggcggcgagcgcgggcgcgaggcggcgctgcatgtcggcggtgacctgcgccttgagctgcggcgacttgaagaaggcgccgacgaggccgtgcacgcgccgctgcaggctgccgttgatgagcaggatggaggactcgcccatgagctccgtcagcgaccgcgggtaccagggcacgaaggcgcgcgcgtcgctgtgcagcacgaaccggctcaccttcgcgtccgacgtcaccaccgtcgccgagccgatcaggtgcgaccggaacaccgngctcccgtgcctgcgcgccaaacccaccgtcatgccgcgccatgccacaacgcacgtgcgtac

SEQ ID NO: 33289 - DNA, 497 bp, Gossypium hirsutum
  Clone ID: LIB3145-004-P1-K1-C9
cacgacaagatggcatgcacagacaatgcgatgagagccttgttcctcctggtcctctgctgcatggtgcatggtgagaaggaagagtcaaagggcatcgatgcgaaagcgtccgggcctggtgggtccttcgacatcaccaagttgggcgccttcggcaatggcaagacagacagcacgaaggctgtgcaggaggcatgggcatcggcgtgcggcggcactgggaagcagacaatcctcatacccaagggcgacttccttgtcggacaactcaacttcacaggcccttgcaagggcgacgtgaccatccaggtggatggcaatctgctggcgaccacggacctaagccagtacaaggaccatggtaattggatcgagattctacgcgtggataacctggtcatcaccggcaagggaaaccttgacgggcagggcccatccgtgtggagcaagaactcctgcaccaagaagtacgactgcaagatccttcccaactc

SEQ ID NO: 33290 - DNA, 484 bp, Gossypium hirsutum
  unsure (1)..(484): unsure at all n locations
  Clone ID: LIB3145-004-P1-K1-D11
tcgcctcctaatcgcgaacgagcgtctttctcctccgtccgcgcccgtttgctcatcggttttgcctgccggtgggggaccgcctgcacgagcagcggctagccagacgtacggccttcgtttgaggctggagtcctgattggcaggtgcaagcacagagctcgatcgccatgtctttcaccggcacgcaggacaagtgcaaagcctgcgacaagacggtccacatcatcgacctcctcaccgccgacggcgtctcgtaccacaagacatgcttcaagtgcagccactgcaagggcgtcctctcgattagcagctactcttccatggacggcgtcctgtactgcaagacgcactttgaacagctcttcaaggagacagggaccttctcaaagaactttcaaggtggagcatcttcaaacatgaacgacncgtcatatgtctcaagcatgctatcatctgcattctctggaactcaagataaatg

SEQ ID NO: 33291 - DNA, 270 bp, Gossypium hirsutum
  Clone ID: LIB3145-004-P1-K1-D12
ttaatccgctggtccacccactcttccgcttactcttttcctaacgcgtaggcttcaccctttcatcaccctacctctccactcaagacttgagtacatcctccactcggctcccgtccattccctaacattctatctttgcatcccacaaccaactctctccaaaggactgacaatccctagaagcttcatcaaccacttcctctccagcaaagcctcctctccgaatattccccttcacacctctgctcccaacacgaaccttcaaaa

SEQ ID NO: 33292 - DNA, 478 bp, Gossypium hirsutum
  Clone ID: LIB3145-004-P1-K1-D9
ctgacgcgtggtgcaaggtgggcctcataaccataccattactggctaggctgttgcgctcaaacaggcaactactccagaatacagagcttaccaagagcaagttatcagtaattgtgctaaatttgcgcagagcctgatttcaaaaggatatgaactcgtctctggtgggactgacaaccatttagttctggtgaatctcaagaataaggggatagatggttcaagggtggagaaggttttagaaagtgtgcatattgcagcaaacaagaacacagttcctggtgatgtttcagctatggtgccaggaggcatcaggatgggaaccccagcccttacgtcgagaggatttgttgaagaagatttcgctaaagttgctgacttcttcgatgcatcagtgaatctggccttgaagattaaggctgcaacgacaggtggaacaaagctgaaagactttgtgccactttgcaatctgata

SEQ ID NO: 33293 - DNA, 392 bp, Gossypium hirsutum
  Clone ID: LIB3145-004-P1-K1-E11
tcgatcaccggacgtcgagcgagcagtctcccaattgtacccaataactaataacatctacgggaacgggactttccttggaccactatatccaggagcgacgaagtgatacaccctgcagccattgagatgaagaaggcactttgcgccgtactcgtcgccgccgcctcctccaccgccgtgctggcctcattcgcatcctaagctcattctgaggcgcccgccgtagcggccgttggtgcggctgatcctagcgcaagccgtgccgacgccgtacgcgtgccctgcggatgtgcgctcgtcgccttcttactagcatactacctctactgatcgacgacacgctgagcggcaacgttgagatgcatcgtgcttgcttgatccgattaata

SEQ ID NO: 33294 - DNA, 280 bp, Gossypium hirsutum
  unsure (1)..(280): unsure at all n locations
  Clone ID: LIB3145-004-P1-K1-E12
ttcattgaatcaccaagtcgaaaaactcacagttaggtacctgttacatgttctggggtgtctagtctncagcgaacattcaatactgagagggagattctgagcctacattaacctatgatacaacttaacgctaatcagctaatatcattgatcggtccagagctgctccaaaatcgcttgaaggattatgtgaagggcgtagtgagtgaagatttgcttatacatgctaaaatcttgcgtttcgttaagatgtttgaagatcaactaccattgaaat

SEQ ID NO: 33295 - DNA, 497 bp, Gossypium hirsutum
  Clone ID: LIB3145-004-P1-K1-E9
acaccctcggtgagtgcaagtacaccatcggaggtgacctcggtggcggcgagggccacaacgggtgggtctcctgcgtcaggttctccccaaacacatttcagcccaccattgtctccggttcctgggaccgcaccgtcaaggtctggaaccttacgaactgcaagctgcgctgcactctcgatggtcatggcggatatgttaacgccgtcgccgtgagccccgatggatcgctctgcgcctccggcgggaaggacggtgttactctgctgtgggatttggctgaggggaagaggctgtactcgctggatgcgggctccatcatccactccctctgcttctcgcccaaccgctactggctctgcgctgcgacccaggactctgttaagatctgggaccttgagtcgaagcacgtcgtgcaggacctcaagcctgacatccagatctccaagaaccagatcctgtactgcacaagcttgagctggaccgccgatgga

SEQ ID NO: 33296 - DNA, 357 bp, Gossypium hirsutum
  Clone ID: LIB3145-004-P1-K1-F11
ccccgatcagacaaccaggacctgtcatttcctacaaaatattcacagaatttctacggtcaatgtgccgcaaacttttggaagcaataccgttcctactggaagaatccgccctacaatgctatgcgctatctgatgacatgtctctttggccttgtatttggtacagtattttggcaaaaaggaaagaacatagattcacaacaagatttatataatctgcttggagccacttacgctgctacattctttcttggggcttcaaattgcatcacggttcagcctgttgtatcgattgagcgagcagttttctaccgtgagaaggcaagcgggatgtactctccgttatcctatgca

SEQ ID NO: 33297 - DNA, 328 bp, Gossypium hirsutum
  Clone ID: LIB3145-004-P1-K1-G11
attcccgtttcgacccactcttcctatccttcgaaatcgtatcttttgaagcatggacttcatagcttctatcctgtttctagctcttgtgatcttctgtgacatatctttagacccttgcagctctcatccatattactcttacctttatttcatccctatctattacaaatgttcactattcattccacttaaacctttcttaagttctatcttaatcattatcattttatcctttttccttttatttttctagattttccattattctattttttttattacttctttttcctatcctttctttcatctcatttttttttctcac

SEQ ID NO: 33298 - DNA, 496 bp, Gossypium hirsutum
  Clone ID: LIB3145-004-P1-K1-G9
tccacccatgctttcgagctgaactttccgaacataatcttctgtatcttatctttgacgccagacttccagacggtatcagcgtacttgatgccccctgctagagccctatatctactaacactaacacaagacaacacctgctgacacttttactataaactcctattccgctaaactaaaatctgacgatcactatttcaagtgctcttagtagatgatctactactttgagaccaggaatgactggtcaataagccaatgatgcaaccggaccagcaaggcagatctcacatcgtcggactactctgcttgcagagctcataactcaaagccatgcataaaacatgtgctatcacttcaagaatgttacactactttcttcatcattatcgacagtgattcgatttgtttcgagctgtcattcattgtatgttgattgccgcataaggctgttaattcgcatatataattcctgtttccagatattcataca

SEQ ID NO: 33299 - DNA, 247 bp, Gossypium hirsutum
  unsure (1)..(247): unsure at all n locations
  Clone ID: LIB3145-005-Q1-K1-A11
aaaaaatagagatgtcntctgnaatatattctgcaatcttaattctgtcngtgttccggccttttttctaaagttcgggtgtttntttactccangaacagcccaatgatgaccccaaaaacatgcactctattcctcccatttatgcactcaaccctacccaatttaatggacccagtgttgacattcacgaatatcattttatcccaaaaagtgcttaaattggtactcttcttttttgttttta

SEQ ID NO: 33300 - DNA, 330 bp, Gossypium hirsutum
  Clone ID: LIB3145-005-Q1-K1-A2
caccccttcattttggtttttggtagagtattgggcatagtacagaggtgggcccgaacatgatggagtagttatgtgtatcgcagaagacttgactccgaaaacaaacatttactatatagtgctctttgtttaacgagacataggaactctaattaagagtgaagttgcgtctggaatgtccgtaaaagaattcacagatgccactgtctactgctgatatcttcctgagaagaagaagaagaagatggtacctgaagacttgaaagaaatggggctcgctgattctaagaggaaaacaattgtcattcgatctcgcctggtaaatac

SEQ ID NO: 33301 - DNA, 376 bp, Gossypium hirsutum
  Clone ID: LIB3145-005-Q1-K1-A3
gggaaacaatgccttaatttgacatgaattcactgatggaaccgaggaggaggagtctgattctgactatgaggaggatggtgacgatgagtatgcataaatctattagaaaatgcttggcttttttcaaatcagacgatccaaatttagaaaggtaaacttttctgttaagttgaaacgcattgatgaaccatctttgcaattcttaaagaacatcacagaccgtcttaatcaagttgcctcatattttacgtagccatacataacatgtgtcatggtttcggtaggtcccagtatttgtattaggagaatgtgacaatttccattccatttatttaatcacataaacatttgtgtacattctgctagtctaaga

SEQ ID NO: 33302 - DNA, 247 bp, Gossypium hirsutum
  Clone ID: LIB3145-005-Q1-K1-A4
ttttcttactacgtggtcataaagatagcacccggctgtcaagagtgtgtgttatgtgaccggaattctgttgcttgatatgttctggtggagaaagttgaaaagcacaaagtggtgaaaattaaacggttgtgggccatccggaggatgacttgcgatatcacttcctgtggttgtcggaagtcgtcggcttaatttcaatcgaagggactggtgaaaagatgccaatagagaaaaggagctacat

SEQ ID NO: 33303 - DNA, 328 bp, Gossypium hirsutum
  Clone ID: LIB3145-005-Q1-K1-A5
ctttaaaaatttattatttttaaataaattttttaataaaccaagtccttaattcgaccgaatattttaatgagctggagtcattcttatactaattaaaattaaataattttttaaattattaaataataatttaagtcaagctgatttaatccgaatttataaaaacattattcaaaactttacccaaccagacaaatatcttaacccttgaaagcttgaacatgtctttaaaaagtttggaagtcatgtgaccaaaacattggttttggattgtaagcatattttgaaatacaaatttaaataattttttattgaaagaatgatg

SEQ ID NO: 33304 - DNA, 290 bp, Gossypium hirsutum
  unsure (1)..(290): unsure at all n locations
  Clone ID: LIB3145-005-Q1-K1-B11
cttcaacgcatttnaaaacgttttacatnaagagnncnaagccatcactgccgcatttttttaaagggatacagccccaccacttcatttgcttgccangcacctacatgtcgatccctccaagtcaatgaactcaagcctatggaaggaagatacaatctgcattgaatggcttaacaaacaggaacccaattcaattgtgtatgtgaactatggaagcattactgtcatgttcgaaaaacatctcaaaaaaattgcatgggggttggctaactctaagcacccatttt

SEQ ID NO: 33305 - DNA, 392 bp, Gossypium hirsutum
  unsure (1)..(392): unsure at all n locations
  Clone ID: LIB3145-005-Q1-K1-B2
tcggccacgccttccggattcttgtcgaacccgagggaaaaatttaaaatcccatctttagggtgtaccattttctcaggagaaacacanaggtcatataaaggaaggcattgcaagaagttctattcggaggaagggtgtccttacggtgataattgcacctttttgcacgacgagcagtccaagaatagagagagtgtagctataagtttgggccccggagggtacggtggtggtggcgccggcggaagaggaagtggcggtggtggtgggaatggatcaaatgcaaagccgtctaattggaagacaaggatttgtaataagtgggaacttactggttattgccctttcggaaataaatgccattttgctcatggagctgcagaactaca

SEQ ID NO: 33306 - DNA, 230 bp, Gossypium hirsutum
  unsure (1)..(230): unsure at all n locations
  Clone ID: LIB3145-005-Q1-K1-B6
gtcctaagtctcaataccataaacgatnngccgaccagggattcaggcggatnggttgctttcagagaccctccgccggcacccttatgaagannaatcaaagtnnctttgggttccgggggagagtatgagtcgcaaaggctgaaaccttaaaagggaattgaaagaataagggcnnccatcaatttcaatgaatattatatanntagttgtatacccgtttgaatttg

SEQ ID NO: 33307 - DNA, 313 bp, Gossypium hirsutum
  unsure (1)..(313): unsure at all n locations
  Clone ID: LIB3145-005-Q1-K1-B9
gatcaataccaaaatatcttnccgatctttttctancacacccactatganaaaacgcgcgagcttttaaagcgagctgacgccacgttaacatgaacctgcncaaatagattattataacgatggccgactgttttaatgatttgagcattgaaaatcttgcttctttttaacaagagatggataactctttcactcttattcgttatataaagtatctttttcttttcaaccagatctatactttcatcaaaaatgtgaataatgttgaagatatacacaaaaatctcttacattaacttcaattccttaa

SEQ ID NO: 33308 - DNA, 295 bp, Gossypium hirsutum
  Clone ID: LIB3145-005-Q1-K1-C12
cttttatccaagctctaccataggaacattataaagtttgtagcagcatgcagaaaagcgccgttttattgtgttataacggaatatttatcggagggttcgttaagggcatatttacacaagcttgatcacaagtcccttcctttgcaaaagataattgctattgctctcgaagttgctcgtggaatggaatacattcattctcaaagagtcattcatcgggatcttaagcctgaaaacattcttatcgacgaagaaattcaattgaaaattgctgatttccgtataacttggg

SEQ ID NO: 33309 - DNA, 355 bp, Gossypium hirsutum
  Clone ID: LIB3145-005-Q1-K1-C3
gccacccttccgccaatccgtccggctgttttgatccataagcataggcagactactgagggtatgcaatggatggttaggtgattccacaaacaataatggcaactacatttcataacgagcactttcctagtgctaactttaacttgaccagaaatagatgagggaaccaatcagtcattgccggtttgattgatatgggtcaagaaaattaggagtaagagaaggatgtcttggtgggtttttgtttcttttattcttttaaagttttttttgatattacgtagatgggggtggtgaattaaattggtgtataattagcaatatttttgtacgggatacataataatcaaca

SEQ ID NO: 33310 - DNA, 297 bp, Gossypium hirsutum
  unsure (1)..(297): unsure at all n locations
  Clone ID: LIB3145-005-Q1-K1-D12
ggaaaaacccgggcgcgacgccagcgcagtccgttctttagctgttgatagtanntaatatgctatagncatacccagagatggagaggccaaagaacgcaagcattgtttaggtgtgttgagtgtcggnttttaggtttgctgcccttttttcttcccaccaatagaggtcaattagcagtgaccctccaactggcnccttggtgagcccagaaaaacctactatctctagctccttgaccctcatagctggaaccctcccccttcaaggttcacaatggcacaaaccaccatctt

SEQ ID NO: 33311 - DNA, 387 bp, Gossypium hirsutum
  Clone ID: LIB3145-005-Q1-K1-D3
gcgattaaaatgttaaacatgtaaaccaatcttggcttttcttaagccttttaaaaattttggggggcccccatgtgatgtttggattaggaatgtatatttatccgctgatatttgtcccaggaagggattcttgaaccaataattgattgtttttgcatttaatttgcatgccctatttgtatttcaaacaataggaccgatgcgtagatatctaactcttggttacctatttgtctagtcttctacttattggtgcttaccttgttaatgtggttgcacataaagtgtttgtcattcacaagcctcatggtaaactaatcagtaattaaatcatccttgaagtaaaagtttgaactatcagggtatactttttgcaaaagattt

SEQ ID NO: 33312 - DNA, 145 bp, Gossypium hirsutum
  unsure (1)..(145): unsure at all n locations
  Clone ID: LIB3145-005-Q1-K1-D5
attggcaagttctcagactcacatggaagagaagtcagcaccagcaatgcgatattcgtgacaacttcgacattaactaaagaaactcaagttgtttgtcataaacagcacacatctgangataaaatattgggaaccaagggat

SEQ ID NO: 33313 - DNA, 448 bp, Gossypium hirsutum
  unsure (1)..(448): unsure at all n locations
  Clone ID: LIB3145-005-Q1-K1-D8
cggaaaacccggcgggacgcacgcgtccgcccacccctcctgcctttgtaagcctgacactgactctattcttaattcgggtcggcgcccaatttgggaagctgtacgagaggaagccaagctggaggcagaaaaggaacctattttaagtagcttcttgtatgcaagtatcttagcgcatgattgtttagaacaagcattggcttttgttcttgccaatcgtctacagaatcctacactcttggcaactcaacttatggatatattttctaatgttatgatgcatgatagagatattcaacgatcaatacgcctggatgtgcangcattcatagatagagatcctgcttgtttatcgtatagttcagcgttactataccttaacggataccattctcttgcatcatatcgagtagctcatgcctttatggaagcagggcgaaatgtg

SEQ ID NO: 33314 - DNA, 403 bp, Gossypium hirsutum
  unsure (1)..(403): unsure at all n locations
  Clone ID: LIB3145-005-Q1-K1-E9
ggaaaaccggcgcgcgcacgcgtccggtgcccttgaacttcaaactcttctgtattttttaaccttcatatatatatagataccgccgcttttacgagggagctagtgtancctccaactcttcatcgtcttaggcttcttcttattataattctcttgccattacactatcgaaaaaaaaaaaaatattttataaaaaaaaaaataaaaaaaaaaaaaaaaaaaaaaaacaaaaaaaaaaaatatataataaaaaataataaaaaaaaaaaataatactattcataataaaaaaaaaaaaaaggccgccccttttaaagaaccaaatttttcgacccgctcattcacaaatataattttttttattgtccacccaaatttaattttcttggccgctttttta

SEQ ID NO: 33315 - DNA, 197 bp, Gossypium hirsutum
  Clone ID: LIB3145-005-Q1-K1-F4
tgtatagaggtgaaacaacaacaacgacgacaacaacagaggcaggtttttttttgagaggacaagatcaacaagacaacagttcaccaccaactgatcaaactgaaaactggttttggtatagaaatgaagatattccttacaagggttttgaactatggcaacaacaacaacaacaacaacaacatatttacatg

SEQ ID NO: 33316 - DNA, 308 bp, Gossypium hirsutum
  unsure (1)..(308): unsure at all n locations
  Clone ID: LIB3145-005-Q1-K1-F8
tgcacagccaantgatcttaattggtatgtgtgagactgtgatgaatgagttagggccatattgtttgatagggtaatgggagctaatcagttgacagtgaacaaatttttttgtctataaaaaaaaaaaaacaaaaaaaaaaaaaaaaaaaaacaaaaagaatttattaaacaaaaaaatcaaaaaaacgaaaaaaacatcaactctttaagctctgtcatcaaacccaaaaatctcctcggcgtcaattttaacggaaaaaccaccgagaaatacaagtaacaggttcttcactgtcgtctttttc

SEQ ID NO: 33317 - DNA, 375 bp, Gossypium hirsutum
  unsure (1)..(375): unsure at all n locations
  Clone ID: LIB3145-005-Q1-K1-G1
ggaaaaaccggccgagcgcgcgtgcgnccacgccttccgaaatgttggtgggcctttttgaattcctaccggggggattccatatcgaggtgttcttggtaaaaacggtggtaaaaatggcggtggtttacctcangagctacacaagaatggtggtaacaacggtggtgggaacggtggcaaaaagggtgctcccaacggtgtttccgatgggtttcctaccatgggtggcggcgctaatggtgggaacatgagtcaacaacaaagggctgctgccatgaacatggcaatgggccaaatggggagcttaccccaaatgggtaacatcccagcagtgcaagggttaccggcagcagccattaacggcggcggcgg

SEQ ID NO: 33318 - DNA, 278 bp, Gossypium hirsutum
  unsure (1)..(278): unsure at all n locations
  Clone ID: LIB3145-005-Q1-K1-G3
aatttcaattacantttaatatctgcgtttatgggctcttagcctaccccattcagagttgtcaagtgtattttatgacaacgttttacttttggcctgaggattcaacaatatcttcattcttatcatcggtatatttgaatttatatgcgcaacagttggtgtgttactagtgatggaaaccctcagcgcattcttacacgncttgaagcttcattaggttgaattttcaaagtaagttctactaaggagaccgttataaatntcaaccattttca

SEQ ID NO: 33319 - DNA, 219 bp, Gossypium hirsutum
  unsure (1)..(219): unsure at all n locations
  Clone ID: LIB3145-005-Q1-K1-H6
cttcctgtgttgtggacctttttattttcagttaatatggatgaggaaaattatgaaaacccatgtctttttgaaccatggagatgggagaaaattggagctgctgctaataacaatagttntacaccatttggaggtggccaaaggctttgccctggtttagaactatcaaggcttgaaatttcaattttccttcaccatcttgtcaccacttacaga

SEQ ID NO: 33320 - DNA, 124 bp, Gossypium hirsutum
  Clone ID: LIB3145-006-Q1-K1-A1
gatttcccgtgcgattgcgaaccgcgaaaacgtggctggttaaaccattgggcctacggaggcatagagctactgtgcggctgctgtttcggcacctcacaaagaaggtgactttggggacgcc

SEQ ID NO: 33321 - DNA, 416 bp, Gossypium hirsutum
  Clone ID: LIB3145-006-Q1-K1-A10
gtcttcttgggactagggttgagtggctttaccatatcctccaggccttcaactcaggtgatctagctcgctatcaagaattgtgtcatgtgcacaatgctgcattgagggctcaaccagccttggttgagaatgagaagaagctgtctgaaaaaatcaatattctatgcttaatggagattatcttcagccgcccatccgaagaccgaaccatacctttaaaagttattgctgagcgaacaaaactgtccattgaggatgttgagcatcttcttatgaagagcttgtctgttcatctgattgagggcacaattgatcaagttgagggtacagttcatgtctcctgggtgcagccgagagttctgggaattccacagatcaaatccttacgtgacaggttggataattgggtaggc

SEQ ID NO: 33322 - DNA, 422 bp, Gossypium hirsutum
  Clone ID: LIB3145-006-Q1-K1-A12
gatgagaaaaaatcttgatttcttcaatcctgaggtttcggccaaagattctccagcgcgtgacggaccatttctggtaccccctttccaggtaaaagctttctcttctcttaagagcctccgtagcaatagtatgggtgtagatgttttttttttttgaataaaagtaaacttaactcttggaaactatatttcctttcttgaatatatctgataattgctccgataaccgatctgtcaataatggagctttgacacttcttgataacagttttcgagtttcctataatgtcgattttgttgattcccaaactaatacctagttttattgcctgtaaacctgcatatgcctctgctgtgaatggattttcaatgttggagtgttgaactgcctgtgttgcaaggatttccccttccccgtt

SEQ ID NO: 33323 - DNA, 124 bp, Gossypium hirsutum
  Clone ID: LIB3145-006-Q1-K1-A7
tcgtccacgcgtgcgctcaaattggacaaactagtttcatgatgaaatacattggcgacgagaacgatgatgaacacgacgacagtgcagagaaagggttgaatttgatggataaaaccttttt

SEQ ID NO: 33324 - DNA, 133 bp, Gossypium hirsutum
  Clone ID: LIB3145-006-Q1-K1-A9
atgcgtccacgcatacgtacggccacacctgcggctatcatatactcttcaactgccactgtctctgggtctctctgaaccaaaatatttcaagcttttcacttaacgagataccatgttggttaaccaggat

SEQ ID NO: 33325 - DNA, 414 bp, Gossypium hirsutum
  Clone ID: LIB3145-006-Q1-K1-B10
aagaaggcacgggataaacttccgagctctaggaagaagaaaagcaaattggctagtgctgaaaaatatccggtttctggagatgatggaattgatgttcgtccaaagaaaagcaaaagctctcataaaaaaaaggtttccaccaatgacaaggttgttggtaaggacaagccagctgacattcagggagaaccagagaattcaagcacccctgaaattgatgaaactggtgatgacaaaaccaatctggggaggtcctcccagcttcaaaacactggtaaagggagtgctgatgaacttattacaactactgaagttaaaaagctccctagcagaagtgcacgacgtaaaaaggctaaaaggcgatggttgagggagcaagccaaacttgtaaaggaaaagccgcagtcaaaa

SEQ ID NO: 33326 - DNA, 412 bp, Gossypium hirsutum
  Clone ID: LIB3145-006-Q1-K1-B4
cccacgcgtccgtgaatctgcaaagagcaaagaattgggctctcaatcttcttgcaccactcccgtacatgcggtcacttccagtacagtacaaagaggaagtcctgtgccacattgggagcctctgaagggtgataattactttcctggccagcctcgagtgagtagtttacttccctcatctacattatctgcaaaactttgtgaaacgcagtcttttcaagttatcagaagtcatggggttgaaaattgggaccgtggttccattaacattaacgaaaatttgaacgagacctctgaaggtcaaattattgctggaaatgtgaaacaagaaaatagtgagggaaaatctggcaaatcttgtgggcaaagctggaaatcacctttaaatgatgcttcaaatggatgggat

SEQ ID NO: 33327 - DNA, 160 bp, Gossypium hirsutum
  Clone ID: LIB3145-006-Q1-K1-B7
gccaccatctgcacctgcgatctgttggtatggtcggtcgattcaatgatctttgttagcccacccggttgcgattcaacgtccaaaatacatgaccgggggaccacgcttagtttagttagaggataaagatcaattggctgaatgcatgctaccacag

SEQ ID NO: 33328 - DNA, 372 bp, Gossypium hirsutum
  Clone ID: LIB3145-006-Q1-K1-B9
aactatatggccgctgacggggactatatggtcaatcaaaagtgggaaagacatattataaaggggccaatgaactatcaagggcatctagtgctaatatgggggagaccatctgatgaaagaacatggagaaaaagaaaactaaaaagtcaaaggcatgtttgcctttgacagaatgaacaaacacgaggagatggaaaatgtgacactatatccatacagctaacatgcttaactagccagtgctactgggtagcaccttccacggatgggacagttgagaagcaataaatgtactgaacatcgaaatttatgactgtttgttgagggaatgtctactgaaatgttatcaatgatgccatactgtaactg

SEQ ID NO: 33329 - DNA, 380 bp, Gossypium hirsutum
  Clone ID: LIB3145-006-Q1-K1-C10
gacatttgaggaagggggatctgtttgtgttaagaaaaacgcaagacatcatccatgaaacactcaagcttcaaatcatgcgaaaggggaacagtcccatggcacaaaatcagttcacttgtttcaacagcacagtgcagtcaccaatgcagctccagaatcaaaccaaccatgataaccaactcaaggcatctcgagacgttgcaatggccacagatgctaaagcaaaacttcttcttctggagctgaaaactgttaaagcagatttggcttttgtaaaggaacgatgtgctcaactggaggatgagaataaacttcttcgggagagttgagagaaaggggataatcctgcagacgatgacttgattccactgcaactg

SEQ ID NO: 33330 - DNA, 385 bp, Gossypium hirsutum
  Clone ID: LIB3145-006-Q1-K1-C2
cttttatttttgatgaaaagaacaaaacaccctctacccctttgtttctcaactctctgcattggctatgaaccctaacctttgcgccgccagcccgtccatcgaaaggaaaaaaggctctactctcctccttttgggtctgacttcaccaaccgagagagtctgcggcgacacaatcacagggattgcatggaagccctctccttctcttattatttccgtttagaagagatttaaaaatcaaagatgaaaaatgtatcaaaaatatcgatgagataagaaaacacatatgcggaatggaaccaaaatcaactttgtgttgcttctatatttgcttttcgaaagactaatgcttcattcaaaaaaaatacaaaagggatccttt

SEQ ID NO: 33331 - DNA, 318 bp, Gossypium hirsutum
  Clone ID: LIB3145-006-Q1-K1-C3
aatacaaaactgtttacttttgtctatcgacattccccaaagggtgggtgcgttactatgtagaacagatgcgtaaacaacgctagagggatatataatgcattatctctatttgctctctcaaaacacgtaccaatagtaagttcttatgaatcgttggtttcaaatataaaaaacaacatgtctgggcttcttccaaaataggaactcttgaatttggttttaaaagaactatcttagggctgtcgctctataggatccaacccttacttacacttgcttgcaacatcatacttcttttttttcgacacctaaatt

SEQ ID NO: 33332 - DNA, 422 bp, Gossypium hirsutum
  Clone ID: LIB3145-006-Q1-K1-C4
tgctcacatccatggatgcagcaaaaactagatttgagtttacctgtaaatgattataatctggggtacgaacatatgctggccaatgggttgcagaacttgggaagtggggatctgataagacagcagttgcagcattctttttaatatgttcaacagtcagtcagccattatttactgttgcagtagcagcaccagcaatctgtttcacagtttgttgcacacaacattgtgcaggcatcagaatcccaaattctaaacgagggttttttcccagtccctggacgggaacaagtaggcaatcaatcggatgaactggctcatcaacagcataacacgactcaaagtgatcagcaccagcagaggcggccggtgaatgtgccttcatcatttctgaaaccagatttttttgactcacgatc

SEQ ID NO: 33333 - DNA, 421 bp, Gossypium hirsutum
  Clone ID: LIB3145-006-Q1-K1-C7
atcggaaccatttatcattgctgcaactggaactgggacgattcccgcttcagctctggcggctgctggagcctctgtttgtgcgcaggggaactctgtctctgctggtttgcataccaaaatgggactgggggcatgtactgggtccaaagataggaataattgggcaatgttgggtggtaatttaggaagatcccaaatcccaagtggggcatggtcttctagtaatggaattggatcagggcttgttcaagcttcagagcaatccacatcagcttcaaattttgggaatgaaaactcaaatcatatccaccaaaactatgggttccaggggcttgaatttccaaatattaatatgggttttgtgagtttttcgtcgctgctcaacggtagtaacccccaggttccaggtttggagctt

SEQ ID NO: 33334 - DNA, 428 bp, Gossypium hirsutum
  Clone ID: LIB3145-006-Q1-K1-C9
acgaaaaaaagtaatttttttagaaaattatacaatttgattataaaatataaaaatacaggggatgggccgtttattacaaaacataaaaatacaaaattagttaaaattacaaaaagaaactaaaaaaatgttcacaaaatattttgaaaaattcaaaaaagtaatgttaaaattttaaaaaataaaaaaatttacaaaaatataaattaaaaaaattgaccgatcaattactgtaaattgtttcaatctttttctatttaaatttattacaaaaaataaactatattatattttattaattgttataaatttcatatatgtattatattctcaaaaaaattatctacatactttgaatttatatattttttaatttaaaagtcttgaataatgaaagacgaatgcacatttcacttctctatttt

SEQ ID NO: 33335 - DNA, 425 bp, Gossypium hirsutum
  Clone ID: LIB3145-006-Q1-K1-D2
agatagttctagtacgatcgaacatagccctcaaagaccagaacctgtaaaacaccacatcgcaaaaactgacaatgtcaaccaagagagaatcctgttggaagagcggatcaaagctgaaaaggtcaaggcagtcaacttaaaaaggtcagggaaacaaactgaggctttagatgcacttagaaaggccaaaatgctagagaaagctaaattccttgtcttaataaaatactaaaatcatataaatttccattttcagctaggaaaatgatttgaggtacataatatttgtggctaccatgtgaaaaatgatttatttccatcttaagcataagtatactaaattttgtatcatcgattcttaggtggaaaatgctcttcatttcgataccatttgcatttgcaataaaaagattgaacatgat

SEQ ID NO: 33336 - DNA, 423 bp, Gossypium hirsutum
  Clone ID: LIB3145-006-Q1-K1-D5
cccacgcgtccgaaaaaggcggccggcgggagtcagtggttcgtcggaggaagtttccggacaggccatggcggaggataaaaagggtaattagattcttcaaaagaatcaactgttaatggaagactaagctaaacaaagccgtaattcggcgaaggaaaatacaatgaaactgcagcaacgtcctttgtactgtatataacatatgtctccaggctcttgtatcctgtatcatgtatcctgtatcctgtatcctgtaaggattacttcctcctttaattaatgcctatattttaaattagttcttgagcttaaaatatataatataagtccgtccaattttattatcacaaaaaaaaaaaaaaaaaacaaaaatataaataaaaaaaaaaaaaaaaaaaatgattgaattattttaattat

SEQ ID NO: 33337 - DNA, 427 bp, Gossypium hirsutum
  Clone ID: LIB3145-006-Q1-K1-D6
cccacgctttctctctgagagtatctggacctgcaaggctcctttgtgcaagatcattggacagaatgggtctggccactaatgcgctcaaatctctgtctttgtctgctgctggatcacgacctcacacaccaaataggacctctgtttctaggggtgccagtccttctacggcaagacctttcactacacctacaagaggggtcattgcaactacaaggagagacattacatctctgatgaggacatccaccttatctaatcaattccacagctcaactctaggtcttagttttattgcagatattaataagggaagaaaaggtgcaaactacatacaagatgctcattaactgcctcttctttataatcgatatttgcagtggcgatttgctaatgcccgatcatacactgtgctgtacattca

SEQ ID NO: 33338 - DNA, 213 bp, Gossypium hirsutum
  Clone ID: LIB3145-006-Q1-K1-D7
ctttttgattgatgtaatttgatgttgatggagctgttaaccagctttgtgttaatgtacaaggtaagtttttgttatttggaaagcttagtggaagtaggtgtatgtttaggtagaaatttgacttgtaagttttttttttatttttgatatatgtaatggcaatctgtctatgatgtaggtatgaaaaaaaatacaattcattttttcatc

SEQ ID NO: 33339 - DNA, 362 bp, Gossypium hirsutum
  Clone ID: LIB3145-006-Q1-K1-E1
gtttaagcttggcaaaatcctggaggaagggagcgaaccaaatgggaatttgaagcgttagctactaaggccggattcagtggcataacatatgagtgtttcgcttgaaactactcggatcatggagttcttcaaataattggatttcatatcattgctgagctaccaatgcaaccgaaaagaataaaagggatgcttggatttactttaccttgaataattatgatgagatgtgatgaccattctaataattacattttcatctagctgttctatgccggctgaatataaaactgggaccagtggaatgttctacgtgatcatgcagaggcaatcgataaagcacttgctgagaactcgta

SEQ ID NO: 33340 - DNA, 417 bp, Gossypium hirsutum
  Clone ID: LIB3145-006-Q1-K1-E2
caaatgaaagacgtcgaagatgcctgatcgaagaaaataccatagaaaaaaaaaaaaaaaaaaaaaaaaagaaaaaataaaaaaaaaaaaaaaaaaaaaaaaaaaaaaaaaaaaaaaaaaaaaaaaaaaaaaaaaaaaaaaaaaaaaaaaaaataaaaataaataaaaataaaaaaaaaaaactaaaaaaataaaaaaaaaaaacggggggggcctttttaaagaaacaaattttatttcccggggtttgcaaatataatattttttttttgggcccccaaatataataaatttgcccgcgtttttaaaccggggggatgggaaaaaccttggtgttcccaaatttattaccttggaaaaaaaacccttttttccaagttgggatatttacaaaaaggcccaaccatatactttttt

SEQ ID NO: 33341 - DNA, 333 bp, Gossypium hirsutum
  Clone ID: LIB3145-006-Q1-K1-E4
cggacgcgtgggcggacgcgtgggccataatcgagccaaaatcggtgaaacccccccccccaaagaaaaaaaaaaaaaaccagtgcagaccagtttgctaaaatttatatttccttggtaggacataaatgtttttattgtacttaaaaaaaaaaaaaaaaaaaaaaaaaaaaaaaaaaaaaaaaaaaaaaaaaaaaaaaaaataaaaaaaaaaaaaaaaaaaaaaaaaaaaaaaaaaaaaaaaaggggggggccgttttaaaggatccaagtttacttccccgtgcttgcaacgtaatagtttttttttagggccacctaaattaaattcct

SEQ ID NO: 33342 - DNA, 336 bp, Gossypium hirsutum
  Clone ID: LIB3145-006-Q1-K1-E8
aaaattctttttcaaaaaaaaaaaaaaaaaaaaaaaaaaaaaaaaaaaaaaaaaaaaaaaaaaaggggaaaataaaaaaaaaagaaaaaaaaaaaaaaaaaaaaaaaaaaaaaaaaaaaaaaaataaaaaaaaaaaaaaaggggggtcctttttaaagaatcaaattttatttccccttgttttcaacgtattattttttttttagtgtaacttaaattaaattaattggctggggttttaaaacgttttaattggaaaaacctttggttaaccaaatttaatggttttgaaaaaattaaattttttacaaattggagtaataaaaaaaagtccct

SEQ ID NO: 33343 - DNA, 378 bp, Gossypium hirsutum
  Clone ID: LIB3145-006-Q1-K1-E9
acgaataagtttttttatatgaatttaattacatacatatcatttcctaacttttaaccattcgcttgtttgctttctaatctatgattttctacatctatgcattttaatctttataaattaacttttttaaaactatatttttttaaaaacattataccaattattatactccaccacctattgaaactcctaccaattactttttactcttaccacacataacatccttcttttaataaaacgatattttcatatattatcaaaaattctatttttatttacccatcacatgatctttaaattgtaccttaaactacaatcatattcaacttcattattaaaataccaaaatttttcaacgcaaaatattaactt

SEQ ID NO: 33344 - DNA, 404 bp, Gossypium hirsutum
  unsure (1)..(404): unsure at all n locations
  Clone ID: LIB3145-006-Q1-K1-F1
cttgtttgtttgcatttgcaaaaattgtgaaatccggtattcttcatatcagcttctggaatttttgagctttgacccttttctcgacttttcgtctcgatgatgatgttattcgattgtgccatcgagttctttttcccatttgcttgcacacgcaccttcattgaagacaaattacttggatgctcatattcatgatgtttatagctcatgcttctgttgtgtttaccaattacacagctcgggcgttctaagtggaacggaaatgttgggaactcggngatagtagtaagagttgacacgccgctgtccagtgtgggacgtccatccttttctgttctgataaaccacgtaattgaattttgatagtttgacacccaaagcatggggtagagtgttatata

SEQ ID NO: 33345 - DNA, 420 bp, Gossypium hirsutum
  unsure (1)..(420): unsure at all n locations
  Clone ID: LIB3145-006-Q1-K1-F2
acagttctgaagactataccaatagtattaagtgcgatatctatggcaatagtagatgttggatttagatcataattattaacttagaagccagactgatggacggtaaagtgcttcatttatgatttacatcagtgtattagccgtaatttatgcagacaggtaccaatcatcccgtctttgggtctactttctctcatttcttttcttcggataaatcattattaattgtctactttgcatatacaggaaaatgtcttttgtgaccacaagaaggcaagaagaaataagcaacgacttatgttaagatctacgacattttgaacttgggaaatccttttcaaggacattgtgcanatagtgaatgaactgttaatactccaaccccaaattttcatttatgggttgtgtctatattta

SEQ ID NO: 33346 - DNA, 339 bp, Gossypium hirsutum
  Clone ID: LIB3145-006-Q1-K1-F9
attccctgaaaacctttttgaagctgttattgctagacttcccattgccacattattcggctggcgctctgtttgtcgtaaatggaattccttcctggaatcacaaaaattctctcatcattgtgctgaaatcccactagccaatccctggttttataccattactcatgaaaatatcaatgttgtagccatgtatgacccttcaaccaataaatggcaccacccgacaatctcttttcttccaccaaagatgattgctctgccagttgcttctgtaagtggactaatttgctttcttgatattggacatagaaacttttatgtctgcaaccctttgac

SEQ ID NO: 33347 - DNA, 420 bp, Gossypium hirsutum
  Clone ID: LIB3145-006-Q1-K1-G11
gcaactaagtaaagtgtaatcaactttttttgttcccctaccttaaacccatcccccggcgccgtgcaagccactattctaaccttacgcgccactgtaatccccacgaataaaccactcacccctcctccaaaccgccgccgatgtcttttcataacggcacaatcccaagcagccgtaacacccgaccctccctctccacccacagtaaaactcaacaaatatagctcaagagtaacggaaccgaagtcacaaggcgggtcccatgcgatgctatacggggtaggattatcagaagacgacatgtcgaaaccccaagtgggaatttcgtccgtgtggtacgaagggaacccgtgcaacatgcatttgttgaagctgtcggacgaggtgaaacggggtgttgaagacgctgggatggtt

SEQ ID NO: 33348 - DNA, 188 bp, Gossypium hirsutum
  Clone ID: LIB3145-006-Q1-K1-G7
gggtctattaattgattcaaatttagggtctgtttaggtttggctgattttgggctaggaatcgcggtttatatttagtatttgggttaaggactgaattaggctttgaatctgtaaatggacatttattttttgaatttttgatttgattttaatatttataaaaactaggctgttaatagtgaatc

SEQ ID NO: 33349 - DNA, 429 bp, Gossypium hirsutum
  Clone ID: LIB3145-006-Q1-K1-H2
cccacgcgtccgcccacgcgtccggaaaaacgtagtgagcaagaatctgcagagaacggtgccataaaaggtggaaatagagcagttggacagaagcaaccttatcctaatggaattgtgaaatctctgaacccggcacctgccgaaataagtcagacactctctgcagccacttctgttttgaatacagatcttcctttaaaacatgaatcgtccatagggaaagaggacacaaaaaacgtaggaattgaaggctcaaattagcttagtaagatagttctctcactatcagtcagcgttctttcttatgtttcattatctcgcagccttttaattcttggatctgatgttggggccaattgtttgaggaattaacaccattatagctagacacagagtcccttatccatctttaaacattaggaacag

SEQ ID NO: 33350 - DNA, 395 bp, Gossypium hirsutum
  unsure (1)..(395): unsure at all n locations
  Clone ID: LIB3145-006-Q1-K1-H3
cggacgcgtgggcggacgcgtgggtgtttacagaccaacctatcctctggccgactttcagatgtggtgatagcaagaattcggtccactgtactctcatcaacaatctttagaagcagcgctctatcccacgtacacgtttctgcatcgattaattgattaaccgtagaccatgaaggcctaatttcctgtgcttgaatatggatgttctctctaccaggaatatttttatacattttcaattcttaaacattgcgaattgagaaagatatcattatcctgaaagcgaatagaaaactcttaaccntgnnacataatctgacagacttttaataaataaatctaaaaatgggggccccctctttaaagtatcaaactttttttacgtggacaca

SEQ ID NO: 33351 - DNA, 417 bp, Gossypium hirsutum
  unsure (1)..(417): unsure at all n locations
  Clone ID: LIB3145-006-Q1-K1-H4
cccacgcgtccggtttcaggggaatgtttaaaggaaatggtactaattgtgctcgcatcattcctaactgagcagtgaagtttttcagctacgaagaagcctctaaggggattttatacctatatcggcagcaatcaggaaatgaggatgcacaattcactccacttctacgccttggagctggtgcatgtgctggaatcattgccatgtcagcaacttatccaatggatatggtacgaggttctaacagttcagactgagaagtcgcctcgccaatatagaggaatctttcatgctctnttaacagtattaagggaagaaggaccccgtgcattgtacaaaggctggttaccatctgtaataggagttgtaccttacgtcggtcttaattnntgctgttatgaatctctgaaagat

SEQ ID NO: 33352 - DNA, 412 bp, Gossypium hirsutum
  unsure (1)..(412): unsure at all n locations
  Clone ID: LIB3145-007-Q1-K1-A8
ccccagtctgccgatcaacaagcggattcgggacctcatgcgacggatgagtctcgatgagaaagattggtcagatggtgcaaattgatcgtaaagtagccactccggaggtcatgagggactacaaaataggcagcattttaagtggaggaggaagcgtaccgcatctgcaagccaccccacaggagtggctcaacatggttaatggtttccaaaatggttcactctcaaccaggcttgggattccaatgatttatggcattgatgctgtccatggacataacaatgtctataaggccaccatatttcctcataacattggccttggtgctacaagggatcctgagcttgtaaaagaggattngtctgcaacagctcgtgaagtagagctactggcataaactacgttttc

SEQ ID NO: 33353 - DNA, 436 bp, Gossypium hirsutum
  unsure (1)..(436): unsure at all n locations
  Clone ID: LIB3145-007-Q1-K1-C10
cccacgcgtccgctcaatttcacccatgtcgatacctccctcttccgctacacctcctgggtcctcatcctcttgtcaattcacctaccaaacgacggcaaatcaatcgtattttcctttgccctttcatctccagcaacagccccagcattatgcctccgcgcccccctccgtttccgtcgccccggctcctgtctaccctgcctctgttgctcccgtacccggcgtctattctctccctcaataccaacaggcccaacagttatttcaaagggatgctcaaatagttaccccagaagcactagagagcgtaaaggctgctcttgcaagcagtgagattgagcacaaagcagaaactaagaagaaagcgatcccacggaaagctgctggtcagtcatgggaggatccaacgctngctgagtggccagaaaatgac

SEQ ID NO: 33354 - DNA, 454 bp, Gossypium hirsutum
  Clone ID: LIB3145-007-Q1-K1-D12
cccacgcgtccgctaatgctcagtatgatgatcctgacatactagatcggttgagagttgagatgatgccacacggcactggtgaccgtggatgggatgtattctcattggaatatgatgctagggttcctttagatacagtgtttactgaatctgtcatgacaaggtatttaagaatttttaattttctgtggaagcttagacaggtagagcatgcactcattggtgcttggaagacaatgaaacccaattgtcttacttcacatgtatacacaaagctgcaacatgctgtaaaattgcaattgctttcaacattgaggcgatgccaggttctttgggatgagatgaatcattttgttaccaacttgcaatactatatcatgtttgaagtctttgaggtgtcatggtccaatttttccaatgaaatggaagtagccaaagatcttgatgatct

SEQ ID NO: 33355 - DNA, 406 bp, Gossypium hirsutum
  unsure (1)..(406): unsure at all n locations
  Clone ID: LIB3145-007-Q1-K1-D8
cacacaattgcatttaacattgtccataggcataaaattaatgtgaagaacctgatttggagcttcttcagagggttttttataatactgcaagaggatccctaaaagagcatgaagggcctgctaggagtagataataactacttattgaccaagtagagcagcaaagttttatgtgatttgtttatatattatatacatatattctgtcataatgaggtcttttttgcaacataaattaaattcccaagtttagttgtctgtttaggaactgattttactttataatctttttttttagttctttaatatcttttgtttacccagtttttttgttgtcagtttcgtaagagtcatcatatatcaattcattaatgcacaactatgtggaattaaagatggnttt

SEQ ID NO: 33356 - DNA, 457 bp, Gossypium hirsutum
  Clone ID: LIB3145-007-Q1-K1-D9
gaagcttcttagagagaataatagcctcccgagctatggtggtccagccgacgtctgcggtgaaacagtttatacattgtccagaagttgcttggattcacttttatctctgttcaagcaagcagttgaactagaaccaagtgataaatccatggaccgcagagaacctgtggtgaaacaaatagctttggaggcagataatctctcatggttgcttgagattttggctgacaggcaatcagcagatgaatttgcactaatgtgggctagccagcaagaattagcaacattacattcgaagcttcccattgtgtctcgacaccatgttagttgcattacagctcggttatttgttggaatcggaaaaggggagttgctaccagcgaaggacactcgtcagttattgttacaaacctggttgcaaccattgatcaatgactacaactggttgcaacat

SEQ ID NO: 33357 - DNA, 449 bp, Gossypium hirsutum
  Clone ID: LIB3145-007-Q1-K1-E10
ctcaaatcaaagcacgagaatacttgaatctttctcatttgatagctctagctcaacatggacctagccaacactcttaaacatacctgagctgacaggcttatcgttgaactcttctgcagcatccataaacaccttggactgctcacatatctttgcatgctcctctttcgcagcactcaactcagccactaacttggatatcctcaaacccgcactatccagcttttgacgttccattaaaccgatgtatgcacaagcaattttcttcaaatgttccatggcgaaatccaccttgaaattaatgcgtaaagcatctttgaatgcatccctccacttcaatatcagatcctcggtgacgtgcttctgtgaaagagatttgcgatctatgcctgaagcaagttaccaagtggagggatgcaataaaggatgctttacacatcaaattc

SEQ ID NO: 33358 - DNA, 443 bp, Gossypium hirsutum
  Clone ID: LIB3145-007-Q1-K1-E12
cccacgcgtccgctttctcaggatgctattggaaccggttttacctgtcacttctccactgggccatggaaatgaagttattttaagagagactttgtatgatgcggttataaagatggaccatgcattccttggtccagagggaggaattctgctaccaggcagacaagtaaaagatctcgcattgacatggtcctttgttgctgacaatgccatacggtcagtgagggagaatggtaaccagaccaaagctatctcttacataaatgctttctccgaatcttggctactctctcagttgataagataagtagcaaatattcagctgagaatcttgcttgcatggttcatgagaggaaagaagacaaaacagctgataatgatctagagatgattgattcaatcgatatggttcccttgtctgctccttgctcgatgaaatc

SEQ ID NO: 33359 - DNA, 417 bp, Gossypium hirsutum
  Clone ID: LIB3145-007-Q1-K1-F1
ttggggcaagttttctctctaaaaacccactctccagtcatgcgtcaccatggatgcggcgaaactgaactagttgaagaagttcatccaactctgcaaatctaatccttgcattctcgatgatccttccctctccttcttccgcgactatcatcaaagtctcggagctaagatcccatcctcggatgacaccgccgacgactccaaatcgaggagttatgtgctggaggaaagcgacgaggagcttgcggatgcaggagtgaaaattaatatagaagaagaggaagacgaagatgacattatcgaatcggatatcgagctcgaaggtgacaccgttgagcctgataatgagcctccacagaagatgggagacccttgtgtggaggttaccgatgataaccgtgatgcttcccattc

SEQ ID NO: 33360 - DNA, 389 bp, Gossypium hirsutum
  unsure (1)..(389): unsure at all n locations
  Clone ID: LIB3145-007-Q1-K1-F3
atgagtttgtatgtatttaaaggtaggagttgtaatacccatctgtaatagtttgtagacgctgtgcatcgagaacactcctgatggctcacccctccaagctagatcatcttcataagaaattactgccagtgtgatttgaaggatcctttccgcatcaaaggtattagaaattnaaaaaaaaaaaaaaaaaaaaaaaaaaaaaaaaaaaaaaaaaaaaaaaaaaggaaaaaaaaaaaaaaaaaaaaaaaaaaaaaaaaagcatgcaacaaaaaaaaaaaaatgtgggggggctctacataaaatccaatctccgtccctcttcaaaaccaaaacttactaaaacaaatggtggaaccaaaataaattatcttggagtacatctacct

SEQ ID NO: 33361 - DNA, 451 bp, Gossypium hirsutum
  Clone ID: LIB3145-007-Q1-K1-F6
cttcggtcatttttttggttaaggaccattccaccattgttcgtggtgtccaaaaggttctccaaaactacaagaacttgcaggatattattgctattttgggaatggacgagcttagtgaagatgataaattaactgttgctcgtgctcgcaagatccaaaggttcttgagccagcctttccacgtggcagaagttttcactggtgcccctggcaagtatgtggagttgaaggagagcatcaccagcttccaggtacaattatatctcttcctagcttgcttctattgcatcatattagtgtgtttatgacatcttaagagcaagtgattaatttcttatgataggtggatccatggattgatatactttattattaaaattagtataacgttgaaaagtatgcatttttagtgtctgtgttaattggtagatggtaatcttttcatata

SEQ ID NO: 33362 - DNA, 450 bp, Gossypium hirsutum
  Clone ID: LIB3145-007-Q1-K1-G1
tcggccaagccgtccgccaacccgtccggcctatgacactgcaccagcaccagagacggtggtggtgcaaaagctttggtgtgtggctaagccgagtgtccctacggagacactgcaagaagcaatggactacgcttgtggtgaaggcggtgctgattgtaaagaacttatgccagatgggagctgtttctatccagacaccattgttgctcatgcttcttatgctttcaacagctactggcaaaagaccaagagaaatggaggaacttgcaattttggaggcactgctatgattatcaatgctgacccaagtttcctcgagtgtcggtttgttctcagtagaatggagaatgttgggattgtttgagtacaatgtaggatgtgtggggtctaattgctaagtggaatgtctggtttttaccctttattcttagtgagtagttgtggtgt

SEQ ID NO: 33363 - DNA, 353 bp, Gossypium hirsutum
  unsure (1)..(353): unsure at all n locations
  Clone ID: LIB3145-007-Q1-K1-G6
gcagttctcggaaccggggcgggggtattggtggtggttggataccggaggtgggcacccccgtgaagggggaagtacggtgacggcgggatcttcgttacctcaagaaagagcggcggtgccatcttgtaaggcannactgtgaggtcttaaatttannggtttcaacagtgggctttgaggcctatannttgttatgggtnnttggtttgggtnnttggtagttggtaaattcttaaagttacttctgtnntactgtttggtnnttgggttctcttcgttatttgaatcgaatgttgttacctgtatctcttaaaaagcatannaaaatggaatgaagtatcnttcttttc

SEQ ID NO: 33364 - DNA, 402 bp, Gossypium hirsutum
  Clone ID: LIB3145-007-Q1-K1-G9
ggagtataagaacaatccttgtaggaagtaggaaaaggaaactcatctcctaactggtgcgtatgtaagttggcctaacctaaaccaaaagtgaattacctcacatcacagagcaacatatttctcaactttctttttaatggaaatttgagaagtaataaattttaaaaatactaacatgaagtgattcacacttattatattaaaaaagaaagcatcaaagaagacagcccaacccgcaatgacctgagcatctctatctgatggccaacacagccaagattaactatgatgaacctgcttaaatagtaaaggggaagaaaagtgtctgcgaacattactaactgtgagactatattataaatcatactgtatgtgtaacttgatctgacaacctcaaca

SEQ ID NO: 33365 - DNA, 286 bp, Gossypium hirsutum
  Clone ID: LIB3145-007-Q1-K1-H4
attctttcatattgaataaaagatcctgcacgtgcatctcaaggagcgcggcatttcacggctattcataaacatgtttgggaatcttaaccaattagtgcaaaacgcactatgatacatgggcaggaaaggacaaaaaatcaatgatgaggacccacacgcatgagtctatgaacgaatccaccctagcctagtcatggagcacttatggaatcaaagtacataaaatgcactgaacaagcattggtataggcgcacctgtccatgctggctctcaaacctatac

SEQ ID NO: 33366 - DNA, 453 bp, Gossypium hirsutum
  Clone ID: LIB3145-007-Q1-K1-H8
cttgaagctcttgatgatactgatcggattcacattgtggactttgatattggttttggggctcaatgggcttcctttatgcaggagcttcccatgaggagtagaggagctccctcattgagaattactgcctttgcctccccttcaacgcaccattctattgagcttgggcttatgcgtgatattcttatgcaatttgctaatgaaattggtctaagttttgagcttgaggtggttaatttcgattctttagatcagaaccctcattctttgccaatgtttcaatcaaatggaaatgaggcaattgctgtgaatttccctgtttggtcttgttcgaatcggccctctgctttgccccatcttatgcgctttgtgaagcagctttcaccaaaaattggggtgtctttagaccaaaggtgtgatagaaatgatctgacattcccacaacatgtg

SEQ ID NO: 33367 - DNA, 443 bp, Gossypium hirsutum
  Clone ID: LIB3145-008-Q1-K1-C12
cccacgcgtccgcccacgcgtccgcgaatgtctctgatgctcacaccatcaatggccgcgctggatctaccccgagctgcccttcaaagggaggatatacattggcagttaaaccaggaaaaacatacatgcttcgtatcatcaatgctgcactgaatgaagaactgttttttatgattgccggccatcaactcactgtcgtcgaagttgatgccacatacgtgaaaccttttaaaacagacaccatcgttatatccccagggcagaccacaaatgtccacgtaacaacccatcgtcgtgccggaaagtacttggtcgccgcctcgcctttcatggacgcacccatcgcagtcgacaacctgaccgccactgctaccttacattacgccggttctcttacgagtgccgccactactctcgtatcaccccctcctaaaaacgct

SEQ ID NO: 33368 - DNA, 377 bp, Gossypium hirsutum
  Clone ID: LIB3145-008-Q1-K1-C2
gcttctctcatttcataacatgtatataggtgtaaatggatgctctctgaagatggctgagaatcttgatgttgtgaggggcatacctgttgaaagaatgatgattgagactgattctccatattgtgaaatcaagagtactcatgctgggattaattttgtgaaatccttatggccttctaagaagaaagagaagtatgacaaagagtgtcttgttaaagggcgtaatgaaccttgtttagtgcttgttaaagcaacaattgagaggtacaaaaaggcttctgattcctccaatactgggtcagttgctgaagttaatgctcagttctatcagcaagaagctgagaaactccgaaatcaaatccggaatttgcaga

SEQ ID NO: 33369 - DNA, 372 bp, Gossypium hirsutum
  Clone ID: LIB3145-008-Q1-K1-C7
gggaaaattaccttccaaattgatccctacttcacggtcgatggatactccagttggcgagttagtccttattctccatggcttgtattctaaattgcgttcgccatagagactaccacatgtgccatcttctctatctttgtgtaaccagatactattcattgccaaagctcttttagattgcgctcgtaaagacaagtcccagcctatcatgccgcttccacccctaacgccattcttgcctcacaaaaagaatcactgtgacccagccgaccataataaaaacagaaaagagtcagctttcatatttgaatctgacatatgaacagttccctgagaacataacctgctttttcttctttaatgtgtgac

SEQ ID NO: 33370 - DNA, 463 bp, Gossypium hirsutum
  unsure (1)..(463): unsure at all n locations
  Clone ID: LIB3145-008-Q1-K1-C9
aaaaacgggccgccgacgcgtacgcccacgcctccgctgaattattagattattccctttgcctccttttgctggcccctctgcctcttttaaagggttgtggagtctcaaaattcnaaatcatcaaanagggagacgcctcgcagttatacactcaattaagcctcgttcatcgacccaatgaccgtgccattacccatagtcgccttgtttcgaagaaaacgttgcctaacaagagggaagagcatgcaaagggagagggtattcataataagaaggtgaatcccaaggaaaaaggaatcaaacaaagggaaaaagaagaggccttcgttgataaacaaggttttgaggatgatgtatgtgatagaaacgatgacatttcatacacacgatcaccaagttttagggtatactgcattccatctcaatctgacgatggtaataatgaatttgatcataatct

SEQ ID NO: 33371 - DNA, 300 bp, Gossypium hirsutum
  Clone ID: LIB3145-008-Q1-K1-D1
tcgacacgctcgttaagactcttaaatctgaactgatttacatgccatcttgtatgtgatggtactaccaccatgttacacataaggaaagcagctaaggagttctatgctgtatctatcttttactgacttaaggggtgtactgatccaaataaaaacaaagcggtgcatggaaaggtaccaaaaataaacaggagttaacgttattgatgtatgtaaagaaaaaaaggaaatcatggagtaatgtaaattggctaccaactgatcatgccattctgaaagtacggaagattttctccc

SEQ ID NO: 33372 - DNA, 426 bp, Gossypium hirsutum
  Clone ID: LIB3145-008-Q1-K1-D10
cctcccctttctattttacatattacaccatgaatttggtagcaggatattaaattgtctgctccccacaaaaaaaaaaaaaaacaacaaataaaccacgaaaaacatacatacaaaaaacacaacaaaaactacactaaataaacaaactgttaacactgattgccagccataacactcactgtcgtcgaaaattaatgccacatacataaaaccttttaaaacacacaccatcgttatatccccacttcaaaccacaaatgtccacataacatcccatcgacccaccaaaaagtacttgatcaccgcctcttcttaacatggacgcacccataaaactcgacaacctcaccttcactgctaccttacattacgccttttttctactagtgcatacactactatggcatcaccctctcctaaaaa

SEQ ID NO: 33373 - DNA, 159 bp, Gossypium hirsutum
  Clone ID: LIB3145-008-Q1-K1-D12
accaacaacttacttacacctccaccgacaaccaccattaaggagaacatctcaacccacatccgcaaggccggcatccacattataaactcgttctgggagcccgactgcctctagcatgactttcacgccgatcgtcagatgccctactacaagacc

SEQ ID NO: 33374 - DNA, 224 bp, Gossypium hirsutum
  Clone ID: LIB3145-008-Q1-K1-D3
gcgcggacgcgtgggttccaaccttctccctccttttcatgctactatcctgaccagccctttagcaaagcctaacattcctaaacacccgtaaaaaaggccttcatttacaattcttttaaggtaccaaattaccaaaaattaccaccattgtttccaaagttcttcttattcctgtcattccaatggtttttgttacttttttaacggaaaatgaacttatc

SEQ ID NO: 33375 - DNA, 365 bp, Gossypium hirsutum
  Clone ID: LIB3145-008-Q1-K1-D8
cggccgacgacgcgtacgcccacgcgtactttggaaacaaattttggattaaaatcgatcttacaaccgcgggggcttggacttttatctgcattgtcggtgctcaattacctggtcaatcaccgagcgccgctcccactaaagcaaccccggctgctactacaccttctactgcacccgctactgatcctgagagtaaatctaacacaccagctcccactgctgttccaactactttaccaccggctgaggctccgtcagattctgccgccgctccatccccatcaaaattttctccagcttcttcccctccagctactactccagtgagtacactacctgctacagctactgtaagcacatct

SEQ ID NO: 33376 - DNA, 345 bp, Gossypium hirsutum
  unsure (1)..(345): unsure at all n locations
  Clone ID: LIB3145-008-Q1-K1-E10
gaanacccggggcgacggaggcgtacggttggataatgtgcaaacacccgctcttttatgaatcataaacctgctggccacactagcttgcttataatcgagacactacatcattctttcaattaaaaaaaaccccccttatttagtttgttcaaaaaaaaaaaaacatacaaaaaaaaataatttaaaaatttataataaaaaaaaaaaatccatataaataaccatatacatttacaaaccaacggtttaacaacaaaaaaaaattggggggcgcccctttaaaaaaaccaaattttattaccccttcttttaaagtaaatattttttatatctgcccccaaa

SEQ ID NO: 33377 - DNA, 170 bp, Gossypium hirsutum
  Clone ID: LIB3145-008-Q1-K1-E3
ataatgcgcctatcactatccaatatgttaaaaatatcattatacatgcccttcaaatccatcacattattcccgccaagggaggcaagatcaacgatgttaaaaaccaccatttgttacagtgtgacatcgacagaaactttgtaaatattttctgatcaaccaatttt

SEQ ID NO: 33378 - DNA, 368 bp, Gossypium hirsutum
  unsure (1)..(368): unsure at all n locations
  Clone ID: LIB3145-008-Q1-K1-E5
gggatcttgtgggaatatggttcaattgcattcaatcgtttggttgcagagattgggaacgaaggagtcaatggactgcaataatanagctggaattctttacaaggaattgcaatagtagagctggattttagtgaagtaaatgctctgggatttgcaagtcaccatcattatttcactgtcaatatcagctccagattttgccaagctaataggacatgctatgtggattacctgggaattgcaataataggggagcttgctcattctctatacgctggtgttgaaatgtgaaaagctattcttttaagaatttcattttgttagactaggtttctttccttaggcaggtttgtgagctggtccta

SEQ ID NO: 33379 - DNA, 401 bp, Gossypium hirsutum
  Clone ID: LIB3145-008-Q1-K1-E7
gaaaacccgggccgaccgacgcgtccgcttacacacagagggggtgcacttgttgccttatgggtgacaaatagagagaaatggcgtggcgtcattgagaaagagctattccctgcatggggagttagatatgtgtctactatttactggttgaaggtgaaaggggacggttcattgatcagtgatcttgacctctttcatcatcggccatatgaatgtcttctcctgggatactgtcaaggaaaagaaatggattcaaattgcccttcagtatttaggtcgataaaagatgaacatattatcataagcattcctggaggttactcgaggaaacccccaattggagaattactattggaccatgttcctggagttaaacctgctcgatgtattgaactctt

SEQ ID NO: 33380 - DNA, 274 bp, Gossypium hirsutum
  Clone ID: LIB3145-008-Q1-K1-F3
atcatgccaacctcgacgcatgcttaacgcctttaacctaccctgatcctacctattactgcgccggggatcactctctcgaacacattgccgcttatgctctagaactccacctctacatctgcataaccgattcacaataaaattacatccatggcgctgaaaacatcaagtcaaacccagatgtgtccttccctgagactgatcttgaaacttctttcattactttgattatcaaacctcctaacaatctcatccaatatctcctacaaac

SEQ ID NO: 33381 - DNA, 437 bp, Gossypium hirsutum
  Clone ID: LIB3145-008-Q1-K1-F9
gaacacccggggcgacgcgggcgtacgcttgggatcacgataatcactactctagttctaaagtcaatctgtaattttattgagcagtcgtggttatatactagttttaacgctttccctaaacgcataattgtgtcaaaggagaagctaatggacgaggcccatagcacggactatagcttggttcttgataatgacggatggacttgcttcttactcagagcaaggaagagggctatgcacaactcaattttcttgcaaccattattccaggttaggcaagattactgatgcctttctctttggacgaggatgatgagtactgtagctctaaagccaatctgtaattttgttgaccttggtgggaatcctgttttaacctttggttaaaggcataatggtgtcaaaggagaaggtaatggatgaggcccatagca

SEQ ID NO: 33382 - DNA, 469 bp, Gossypium hirsutum
  unsure (1)..(469): unsure at all n locations
  Clone ID: LIB3145-008-Q1-K1-G10
gaaaaacngggccgaccgaggcgtacggtcggaattattttaatcacactcctttttatatattttacactagtgtcccaatggacgcactttttaaacgatttgtaaggctaccattcataattcttgcccaacttgccgcaacgagctcggaaatataaggtgtttggctctagaaaaagtaacggagtctttagaacttccttgccgataccagattctgggttgtcatgatatttttccgtactacagtaagctgaagcatgaaaaaaactgtagataccgcccctataattgtccgtacgcaggagctgaatgctccgtcaccggtgatattccatttctcgtcatgcatctaaagaatgatcacaaggtcgatatgcatgatggttgtactttcaaccacacatacgttaaatccaatcctcatgaagtcaaaaatgctacctggatgttaaccgttttcaac

SEQ ID NO: 33383 - DNA, 392 bp, Gossypium hirsutum
  unsure (1)..(392): unsure at all n locations
  Clone ID: LIB3145-008-Q1-K1-G7
cgggccgaccgacgcgtacgcncacgcctnnttaattatttactcttccttttttatcaactaaagcttatagcgggattggtgagtattcaaccataaaggagttaacgctaatgaaacaggaattgcttttgtttgcacaatctgcaaaaagcatgttgcaagaagtggatgaatctgcaaagcaagaaccgagtggttcctcaaaaccttctttagatgctgtagccgaacaaccaaaaaatcctgctcccgaaagggccaaaatagttatttcaatccagaacaaggatgaaatcaagcaatttcgtatatacatggatgacaagtttgagaagcccttcagcttgtatgccaataaagctaagcttgacctgcaaagcttagtattt

SEQ ID NO: 33384 - DNA, 452 bp, Gossypium hirsutum
  unsure (1)..(452): unsure at all n locations
  Clone ID: LIB3145-008-Q1-K1-G9
aaaaccggccgaggaggcgtacggtttgattttttttttgaaagacccgatttttgatcttcaacggtagcaagatcggaagcatgatcttgaacggtaacaagctcgnncatgaaatttgaaatatacgaagcatgatcttcaacggtaacaagatccgaaacatgatcttcagcggtaacaagcttggcggtgatgtttgaaatatccgaagcatgatcttcaacggtaacaagcttggcggtgaagctccaacggctagattttgggatacccactcccatctatctataaataagcatcaccagtaggttcatcatctatctaagcttttcagcatcctctcctctgtccttttgcttttaattttttgtgctttgattcattctttaaaccatggaatcaaattcacgaaagagaaagggatttctcaaccctttgagaaatcccat

SEQ ID NO: 33385 - DNA, 310 bp, Gossypium hirsutum
  unsure (1)..(310): unsure at all n locations
  Clone ID: LIB3145-008-Q1-K1-H1
gcggaagatcttacacgtgattttgacagagattatattgctaaaatggctaaatagagtggagtgtcatgtccttccgcctgctagaatcccgaatggtttcatttgactatcactggctgggataatttgacattgtactaaatgaatttttatttgaaaactattttttttactcataatttcgactataatgtacttgtgttctttttttttttgaaatgatactggtcatttgctattatttaaaaaaaaaaaaaaaaaaaaaaaaaaaataaaaaaaaaaaacatcgnctcttaaaaaaataaa

SEQ ID NO: 33386 - DNA, 369 bp, Gossypium hirsutum
  unsure (1)..(369): unsure at all n locations
  Clone ID: LIB3145-008-Q1-K1-H10
cccactcttcctatttattcatgaccctgtttatgcaacccacaatgaactgttcaattgtatgatttaaaactgcgagccgtttnaagtancacctatctacgatgccaagtgctttaagcgataaaatatcttcttaattttacttttttatatttctggtacctctttgcatgtcaagttttatttatagatcgctgcaaacacactttaattaaggcaacattacaattaagtttttatgttctaagatgtttgatttgaaatgctctatatacataatattacagagatataaaatctattgtacttaataaaactagacaggttcccatttatttaaatttttggtgtaaaaaaaaaacaaaa

SEQ ID NO: 33387 - DNA, 320 bp, Gossypium hirsutum
  Clone ID: LIB3145-008-Q1-K1-H2
cccacgcgtccggttgttaaagccttatttatctttcttaatatcgtaccttctctctatggtcgtggccatgaaaccttatacaatcaggaaagattatatgatttgcttattgttgaatcattttgaccagacaaaaaaatgccgttacccaactcaatttaattgcatcacatcacattctcgtctgctgacctaatatcaaagaggacaggcccgatcggacttccctacagaaccgctgcctaaattgaaaatggaacgcgacctgcagctgcgcatttcattaagcgcatgtgttagttacgctcagcgcaacc

SEQ ID NO: 33388 - DNA, 379 bp, Gossypium hirsutum
  Clone ID: LIB3145-008-Q1-K1-H3
atctgaacttggcgtgcagtttggaaactgtttggaggctcctcatgttattgatatcaaagcccaggtattctgttacaggtatggtctgctgtaatctcccatggcccagacaattaccaattggatgcaagttacaaaacagcggatcaatatgctttccaggactcacttggcaaatccttggaagaaattttcaagattgttccaggtggctgtctgatattcttcccaagttacaagctgatgaagaagcttagtgatcgttggcataacacaggccaatggtctcaacttaaagcacgaaagcccctttttgttgagccaagagggggtgatcaggaagaatttgagactgttctgaaaggttattataatt

SEQ ID NO: 33389 - DNA, 388 bp, Gossypium hirsutum
  unsure (1)..(388): unsure at all n locations
  Clone ID: LIB3145-008-Q1-K1-H4
cgcgtgcgatcatgattcttcgatgacaggtaattggattcatttgttcactgatggagctgttatgtgggatgcgtgttttgcggcttgaggagggatgncntgtaagcaagaagaggagtggatcgttgggttcaattgttatttgggattatgcacagtcttcgatgctgaactatggggtgttctagatggcataacactcgtccatgaaaggggatatcaaaaagttgtgattcatacgaaaaatttggaagtagtcaaagttattcaagatgccaatttgacagattcatgcttagctttattacgtagaatccacgtgagtctacaagctatacaacattggaagataaaacatgttcaaagagagagcaatcaagttgct

SEQ ID NO: 33390 - DNA, 469 bp, Gossypium hirsutum
  Clone ID: LIB3145-008-Q1-K1-H9
gaaaacccgggccggccgacgcgtccgattgttttaactattatttaatgtctcatttaaatatttttgcatatattattttaatcgttaaattattattttaaaaagctttttccttttgtttataaaattattgttcggaaattctttatattatattcttttaatatattagttagtatttcattttaatgtttctttatatatatatatgtacatatatagcaaaatcaatttaatcttgtaggcatctccatgttatttttataaataattatttctaaatttgtatataatttataagataatctaattttatatgtattattgatttcatattttgtttatataaataattattcctatatcatatgtgcatgtctcaaaaaaaaaaatctattatgtgaactatacctcatcatgtattttccttcttttgtatttaatacattatttaaagttatcatgt

SEQ ID NO: 33391 - DNA, 369 bp, Gossypium hirsutum
  unsure (1)..(369): unsure at all n locations
  Clone ID: LIB3145-009-Q1-K1-A10
acgcccacgcgtccncccacgcgttcgcatgagggtgttcttttatctatacgtggatcacccggccctttgtttggtgctgttgccccttcggacaacaagtatgtcaaggctgttgctttagtgagtcagccggctctttattccaaggagcttatgaaggagcatcctgttggaccagctatgatccatccaactgaaactgttcatggtccaagttggagtgatctctttgaacccggagtcaagcatgctttactggtgggggtgggaattcaagtacttcagcagttcttgggtataaaaggtgttctgtactacactccgcaaattctatagcaagccggggtcggatttcttctttccaac

SEQ ID NO: 33392 - DNA, 423 bp, Gossypium hirsutum
  Clone ID: LIB3145-009-Q1-K1-A11
gaaacaccccacttccttgttcttattgcttctctcacctcttatacagaaagtatttaggaggtggttttagatatagaaagtaccttttacgacatggttttggtatctctgttcgtaaaatatctattttgaggaggttagagggttcgggaatcagagtcgtgacatggtaaattaaggtcaatggttttcagtagggttttcttgtttagtttctccttgagataaactattgtacggaatttgacagagataaggcaacatttagtccttaaattgtgcagctttttccaattttggcacatgtggtgatgtgaaacaatatcaaagtgtcacgtcatcacattgaccaaaatcgggaaaatttgtcaagctccaacattaatttggattaaaaaattcacggattaagttggaaaa

SEQ ID NO: 33393 - DNA, 373 bp, Gossypium hirsutum
  unsure (1)..(373): unsure at all n locations
  Clone ID: LIB3145-009-Q1-K1-B7
acgcgccccgatnttgccaacccnngcaaattctgaattccatgtgtattgttgtacccgaagccctccgttcaaagccacatcacttcataatgaaatggacgatcgagcgcccgcctaaaagaaaaacccctagaagaaaaaaaccttnngccagagaggccagaccagagacccgtgctnnagggtagccagacccttttnnttaattattannaactcaattgcaaaannacctagtnnaaatttataatctaaatatatatangnntttcaattaaaaaaattatttaataccccaaccaaatcgtnntgggtattaattgtacctnnttcaaagaaagagaatgccaaanntttaaacccatttaat

SEQ ID NO: 33394 - DNA, 435 bp, Gossypium hirsutum
  Clone ID: LIB3145-009-Q1-K1-B9
ctcggacagagactagaattagtaactattctataatgtatattacatagggtagaacgatcgctttttgagattcgccatattgtaattttcagttagagggtaattttaagcctcacattttttttttgtaaaaatcccctatttctgcctgattgtatacatgtgtagcctctttactctgctgtagtagagctttgtatgcgctttggactgtgaaaaaaaaaaaaaaaaaaaaaaaaaaaaaaaaaaaaattaaaaaactcaaaaataactacattattaatcagattcactactgattataagtcacgcatggagtctcttaattacaatcttttgatcctactaaatataatcgtgttacatgaaaaacacatctgataatcccacttatttatgtttcacaattttgccatttttattttgtttaca

SEQ ID NO: 33395 - DNA, 431 bp, Gossypium hirsutum
  Clone ID: LIB3145-009-Q1-K1-C12
agataagtaagatatttgtctaagaaggtaggggagttagttatgcttattatctgagtgaaagggatgattgtatatcttgttgttcaaactatagtttgagtgtctgatatatatgtttgacacgggtgtgttatgttcatttttttgtccaatttttttaatgtatttggaggatttttagaggattatctccctatattcattctggtcccagacttgcatcaaacatggatgcataaaggaaaagaaagagtcgaactaacatagagttacagatgtttggtctgctgatctgcgttatgcttttttggttcaatgccagattgcttaaaagactgagatgtctgccttcattcatcttcagttgctgaaattcgcatttgagttcggatgaatgtttctcccacagtttaaaacatcaatgacaa

SEQ ID NO: 33396 - DNA, 437 bp, Gossypium hirsutum
  Clone ID: LIB3145-009-Q1-K1-C3
cccacgcgtccgcccacgcgtccggcttattgctattcttgcttttactcagctagcacggatgcgcgcaaggaataaacagttaggatggactcgccaaaaagtgtttcatatactgattggaactactaatactggttacttcatttattttgtcttgagtcttgttgctgcatgccgagggtggctatgctggtcttactcttgtggttttgtagccatggccttccccagaattctattatttgcaacatttcttctacttttgtcattctggcagatgatgaagaggaagaggatgatgaacagggatttctagaagctttaatacaaaattctttaaatagaccaaggtcttcgcctgcagatagtcgcagatcatgttatcctttccgtttaattcatgttggaagccgtcaaaagatagtgattctggt

SEQ ID NO: 33397 - DNA, 283 bp, Gossypium hirsutum
  unsure (1)..(283): unsure at all n locations
  Clone ID: LIB3145-009-Q1-K1-C4
cccacgcgtccgttaaacctgnttcttattatatttgttattttttaagctcacacagagaccgctgtggttcttctcattaaaacggtggagcaggaagacctttcaacttatcattaatgtgaaccttccaaatcaaagagatctagacgggaaggattcttagaagttcttatattaactctattgaaaaataactctctttgtggcattccattataatgcgtaaaagtactacttttgaaagaaaataataaattatatttacgcatagctatatttc

SEQ ID NO: 33398 - DNA, 429 bp, Gossypium hirsutum
  Clone ID: LIB3145-009-Q1-K1-C8
tccccctaaatttaaaaaggaccaacctctttgtttcttcttcttcttcttcgacctaaccgccccgctccttctcttcttcctttacgatttatcaacggtcatcataaaatcttctgatcatcaatcatggacgctagtgacagtaatttcaataaagctggcaacccttttgtctctgaacaacaagtacaaggaaacgacaatgtttcgttagaaaccggcgctgaatctcctcctccttctactactttcaacgacatgaaactcccctcccctagaaaacgaaaacctatacataaaagagtggtgtcagtgccaatcaacgacgttgatagttcgcgcctaaaaggggaaagtgctccaccgtctgattcttgggcttggcgaaagtacggccaaaaacccatcaaaggctctccttacccc

SEQ ID NO: 33399 - DNA, 339 bp, Gossypium hirsutum
  Clone ID: LIB3145-009-Q1-K1-D6
ctaaaacattactcttttacatgatatcctttattcaatttctcaactccttctctcaaccatcgcttccctgttacttaaattcaccactagtcccctcggagtaccacctttcccactatcatccgacgttggatcattaaacgccttccttttctaaatcgtcattactttctcactgttgtacaccgtttactccacagccttcgatcctaaacaatgcaacttcgtaatgatcgcaccgtttgcgatcggtttaatcgtggcaaccaatattttaactgctagggcattctacggaaccttaatgaacccaaccgtttcatttccaccaacctt

SEQ ID NO: 33400 - DNA, 321 bp, Gossypium hirsutum
  Clone ID: LIB3145-009-Q1-K1-E2
gaaatgccgaccgaaatgaacaaagaaaacttaagctttgatggcacgcctggtttagttacgcgcgaaaaagatgctcttatccttgtggctaggaagattaatgattaatcagtgtatcattatagtaacttatttgatgcttattgctctagtttctacttagtacagtttcatattgaacacttatcaaacgttagtaacacctcgcttgtttaattaaccagcagtttctgctatgtttgtcaagctaccatctcatttgaatatatttatatatatatatatatacattgcaaaaagcaatttatatatatctgc

SEQ ID NO: 33401 - DNA, 431 bp, Gossypium hirsutum
  Clone ID: LIB3145-009-Q1-K1-E7
actcgtctgaggatttatatgatgcgaaattatgtgtaatatgctatgatgatcaacgggggtgcttcttcttcccatgtggacactgtgcgacttgctatgattgtgctcaaaggattatggacgaagataacaaggtgtgtccaatatgtcgaacattgattcacaaagtaagaagattgtttagtccatacaaatacgtaatgaaatgagattgtatattcatgccagcatggtggctatctaccgaactgagtgcctcgtttaggtttttgtacaaatctgggttctgaagacgaaacccgtgcaagcaacatgtgggcagtcattgtttgtccccatcgtgaaatcatgtgtagatttgcttacaagatcaccgtgtttatctctaaaccttacttggtggacttcgaagaagttaaaaatgagaa

SEQ ID NO: 33402 - DNA, 413 bp, Gossypium hirsutum
  Clone ID: LIB3145-009-Q1-K1-E8
gcgtacggaattttgttaggtggtgtctaaaatccacatattcactcaagaagaagtggagaagaccagccttttatttgggagcgatgacacgcaaagctgtttggagcaagcagcagtgataatggaagcatcaaagtcatcctcagtggggcagccagattcatcatctccaatgtaataagggtttgaagatttgatgtttgtttgtttgtttgtttgcttgtttgcttgcatgttttttttgttgatgttgtgtttgctatgtgtgcaacaagttgtttaaatgaatccttaaagaattattttatctaccaagtaattgtcaaattggaagctaaaagtggccttctgccattattattattataatggtatgtttgacaattgaaggttttggcgttttgcctatt

SEQ ID NO: 33403 - DNA, 438 bp, Gossypium hirsutum
  Clone ID: LIB3145-009-Q1-K1-F1
cagcagaacccttcaaatcccccaaaatcttttagccttctgctacacgtttccaaaagatcagttcgtttcctcagtctggagcccgtggccttctcctttccagaactcttcgaacatgctccggaattcccccatccaggtaatgaccttcattttctttcaacgcttcttttgcaatcacatgagcaaaggtgttttctgactttggaatatggtgaaagtttattttctggaagaaatgtttcatatcttgaatgtcccttattatagccccaataatcgagttatccctgtctgtactctggcatttttttataacagttcttgaatctccattaatgtcacattcgtgaagacccaatagaatcgctaactttactgcttgtgctcctgcatgtgcttccgccgcgaacggtgaggcgacattctcatgga

SEQ ID NO: 33404 - DNA, 213 bp, Gossypium hirsutum
  Clone ID: LIB3145-009-Q1-K1-F10
aatttaattaaatacctattatcgccctcctcaactactcttttctcatctataccataaagctaacatttcaaatatctaccccaacaaaaatcatccatctctcatttctaacatatctcaacacaacacactttaaatattccaattcccacatattatatatccacactaagattacactcaaactgcctaacaccattcatattccat

SEQ ID NO: 33405 - DNA, 312 bp, Gossypium hirsutum
  unsure (1)..(312): unsure at all n locations
  Clone ID: LIB3145-009-Q1-K1-F11
cccacgcgtacgcgcacgcctccggcttcatgctantgtttagtagtttttatgtttttacagctttgcaccccgccattaattcaattggtatcttctcctctcctgctcataataaatgtgctgatgctgtctttttgaattaaaataaacatctttggtttcaagcctggtttgctgaaactaatggagagttttgggtaagatgagtgatcttacgcctaattgcttggttaagctacttgctataatctttatactggccatgaaataacattattgtttgacttcttaaaaaaaaaaatttatatt

SEQ ID NO: 33406 - DNA, 434 bp, Gossypium hirsutum
  Clone ID: LIB3145-009-Q1-K1-G5
ggaaggatagaaaatggaagaataaaatcgtgaggagcatagagtggagagtacaagctcttgggccggatttgtcaagacccagtgcgattgaaatggaacccatcaacgactctgatcaccttgatcagattctggctcgtgctcgacagctctctcagcctattatcattgattggatggctgcttggtgccggaaatgcatctatttgaagccaaagttggagaaattggcagctgagttcgataccaagtaaagttatctttactcaaaaagtgttgatatttaatacactcactttgctgaattttacacatttactacaaaagcaaaatggttccacaccatctaaaatttttaaaaataaattcttattggtattgtataatttaactgattacttttggagatgggattatatctgtacaccttt

SEQ ID NO: 33407 - DNA, 196 bp, Gossypium hirsutum
  unsure (1)..(196): unsure at all n locations
  Clone ID: LIB3145-009-Q1-K1-G7
gaccgacgcgtacgtacttgtggancttcttgtgttcattgagtgaatctctttatttgaatcagacttcggggccgcattttaaactttgtttatcttcaatttatacttcctcaaatcatgattactaacgaaatgatttcaagtcttactttgattttgaacatctctaacaagccacatctgttttccatca

SEQ ID NO: 33408 - DNA, 441 bp, Gossypium hirsutum
  Clone ID: LIB3145-009-Q1-K1-H1
cccacgcgtccggctgatttcggattagccaaattcttggtggatggaggtgcatcggagtgcgggtgcgccattgcaggatcctatggctacattgctcctgaatatgcatacacgttgagagtagatgaaaaaagtgatgtgtatagtttcggagtagttcttttagagatgatcaccggacgaaaaccagtgggtgaatttggagaaggtgtagatatagtacaatgggctaaacgatcgacaaattgtcgaagagaagaagttagtaacatcgtggaccggaggctaacatcagtgcctaaagacgaggcaatgcacttattgttcattgcaatgttatgcgtacaagaaaatagcatagaacgtcccaccatgagagaggtagttcaaatgctatcggagtttgctcgacattcacttgactcccaatcttcatct

SEQ ID NO: 33409 - DNA, 384 bp, Gossypium hirsutum
  Clone ID: LIB3145-009-Q1-K1-H12
cccacgcgtccgcccacgcgtccggtccgtcagtattgcactgagagaggttttagtgtctaatattgctggtcggacatcatgcaaacatttttttctggatacagcagcagtgatgaatttctgggagcattcagtggatcattcatttatattttagatgtagatatctatataacattccttttagaggatgaaccacagattaatctgcatttggtgactactggttggttggacagaggattttgtttgattagttttatcaagttcagtagccattttcatcagttgcttagatgtaataccttgaatatttgttcccatcgaagataacagtgcggtaatgtcaaaaggtcaattaaaaacctggattttgcattt

SEQ ID NO: 33410 - DNA, 426 bp, Gossypium hirsutum
  unsure (1)..(426): unsure at all n locations
  Clone ID: LIB3145-009-Q1-K1-H3
gacccacgcngccgatcaggcctggataatggaaatggcttctcatgttaaatccatagacagaaaccacttgcccgccgctggtttataaggattttatggacaatcaactcctcanaagaagaggctcaatcctagcttggatattggaacagatttcattgcaaataatcagattcctggcattgattttgccacagtccactcataccctgaccaatggttatccagttcaagtgaacaatatcagctctctttcttgaacaactggctcgatgcacacatccgagacgcgagaatcatcctccgtaagccgatactccttgccgaattcgggaaatcgtggaaagaccctcgtttcaacacttaccagagggaccaactgttcaacatcgtctacaacaaaatatactggtcggctaaaac

SEQ ID NO: 33411 - DNA, 349 bp, Gossypium hirsutum
  unsure (1)..(349): unsure at all n locations
  Clone ID: LIB3145-009-Q1-K1-H6
cggacgcgtccgcccacgcgtgcgcccacgcgtncgaacgtatcgcctgaattggacccggaggtgggcttgagttttttaaacagtatggggaaattgaagaaggtccaatggggcttgataagcagacagggaaacctaaagggtttgctctttttgtatataggtcggtcgagagtgcaaaaaaagcgttagaggagcctcataagaattttcaaggtcatgttcttcattgccaaaaggccattgatgggccaaaacagactaaaggtgtttctggtgggcatcatcagcagtatcagcatcatcaccaagggcaacatcagagccagtctcattaccatcatgc

SEQ ID NO: 33412 - DNA, 294 bp, Gossypium hirsutum
  Clone ID: LIB3145-009-Q1-K1-H8
cttgccttgttttgttattatctatatagggttttattttggttattaagcattttcccggcccattaaatctaatgttcgaattgctaaacaaataattcatagaataacatgtaatgttctgtccttaaaatataaaccttatttatacaaccccaaaaatacaaaacaaaaatttaaatgcttaatcataaacaatattaaatttctttcttatgatatcatctctcatttatgcgttataaacgtatcacttttgcagacgcctttttattatactcaaattacaattcc

SEQ ID NO: 33413 - DNA, 356 bp, Gossypium hirsutum
  unsure (1)..(356): unsure at all n locations
  Clone ID: LIB3145-010-Q1-K1-A1
nnccggcgatgggtttggatctaangcgatatggttatctcttccatacaagcgacacgcttattacttggtgaggtggtatttacagcagcgtggttatggaatcacttggcaaggagtttgacctggatggtaaccgggtaaatcaaggaatatctgtttatgggaataaaggaagcacagatcagcatgcggaacaagatcagctctatatgcaaaataccgagagttccgttcttgtaaccgccaaaaagggacaccttaaattggtggggcctctgtaactttttattaaccaacaagtggactttattccttaattggccacattaatgcttaacattaaactggtgggg

SEQ ID NO: 33414 - DNA, 295 bp, Gossypium hirsutum
  unsure (1)..(295): unsure at all n locations
  Clone ID: LIB3145-010-Q1-K1-A10
cgcgggcgggtgattttcggacaattctcnaacgtatttgcaattcaattnaaaatcattcaccccgcccatttttaaaaaanttctaaccctcatatacannaattcttctcaaaattctctgttgccgaaatccatgattcaactgaagactttgacccttctttcaacattgcataaggagcatatccgaacgtttatagatatacccttcgtcacacttaaattgctataaaaatgctccatcaaaataacttacaaaggcccttgcaatttcaaaaagaaggtgatattt

SEQ ID NO: 33415 - DNA, 345 bp, Gossypium hirsutum
  Clone ID: LIB3145-010-Q1-K1-A2
aaaaaactgatgcctctctttttgctctgctagggtttggaaccctagcgtccttgcgccgcgtctcatgcgatccggcctcgattccgaccccaactcaggtaagttttctttcctttgttacttttttttaaaaaaaaatcaaaacaaatgaaataaaaagaataataaaacgaaaaaatttcaccttgaatcaaaaacaatctgtattcagtgcttttttctatttcttgcgtattttctccgttcatcaatcgtcccttttacagatttaaaaaggccttttataggccgaaaaaaaaaataaatcgaggggaaaaaaaacaatattgcttgctggttttt

SEQ ID NO: 33416 - DNA, 254 bp, Gossypium hirsutum
  unsure (1)..(254): unsure at all n locations
  Clone ID: LIB3145-010-Q1-K1-A3
taaactattttttcattctcaataccaaacccaatccccgcctctgatctaatcaagaggcggctcaaatccaaatccaancatnttatgaaagggatgaagaacatggcggaacgcttcacaagattgaaatctgaaatggaagaaataagcgaggaacataagaatatcagggaagggcaaaggcatgttaaagacaaattcggaatcattgaatcccagcgcgaggaattgaagaggggaactaggctcat

SEQ ID NO: 33417 - DNA, 213 bp, Gossypium hirsutum
  unsure (1)..(213): unsure at all n locations
  Clone ID: LIB3145-010-Q1-K1-A8
gttttaaattggccttgtgagcaaattcttttattttaaatataccanataatccgatggaatggaagttctttgacgatattatcaattagaattcagttgttaaataaaaaatagtaaagggactagatcttttgaattaaaagtagtggtctaaatttcaaatgtgtgaagagtacaaggattgggagcataattggacttacttttttt

SEQ ID NO: 33418 - DNA, 203 bp, Gossypium hirsutum
  Clone ID: LIB3145-010-Q1-K1-B3
cgcgtccggtcaggcgtaattacccgctgagtttaatcatatcaataagcggaggctttatgactgacgctcttgcttttaccggttcctgtacataaataatcccttttttctgccctctcgtatgaatatttgaacagttgcctttaagttgcaatttgctatgctatgatctttttcataaaaaagacaaattaaatact

SEQ ID NO: 33419 - DNA, 422 bp, Gossypium hirsutum
  unsure (1)..(422): unsure at all n locations
  Clone ID: LIB3145-010-Q1-K1-B4
ttaaatttgttatcaacaccctttttggttcccattcaaaccccnncngctccgccaactttcatganatgcaggacacgcaaaagtttgctgcacagttgttgccaaattttgttgcctgactgaaatccaatttcacattgcacattgatgcactcatggcatggggtattatacttttacaatatttacttcatttcctttctaaacggctggggttattgggattactagtttgggaaattacccaataaggttctcattcattaatgatattatattgcccccgacattcaaaagatatatttgatgaacaagtttggttagcaaacggttttttcggctttatagatgggaaatattttgagttttagactgtcagagtttagacggttgacagatatatatatattttaaaataa

SEQ ID NO: 33420 - DNA, 447 bp, Gossypium hirsutum
  unsure (1)..(447): unsure at all n locations
  Clone ID: LIB3145-010-Q1-K1-B6
aaaaaccgggccgacccacgccgtccaaacaaaaaaaaacaaaaaggcctccccttttttctttgctagggtttcaaaaccctagctgttgcgccgccatcgcctttcattcctccaccgaggacggtggttgtgacagcaacaaacaggcttttcagcccttgattgagccacgtttgaaggccaaaccttcaaagtctgaaaaatcgagataggaagacacctccccaccttcctcaggttcgaactcgacagcggagggaggatctccggcgaagcattcacggaaacccccgtaagttccctctttcttctttttattcttttttaaaatcgatgaaaaaatagatcaattaataaaaaatgatcgaaacgaaaaaaacgagaaaacgagattctaaaatcaacctctcttctgnttttgctttttcgattctttaatctgtg

SEQ ID NO: 33421 - DNA, 214 bp, Gossypium hirsutum
  Clone ID: LIB3145-010-Q1-K1-B7
aaaaaccggaccgacgcacgcgtacggtggatttctaacattcaaacttcaacatttctacctatacctcactcttcaaacggccgccctattattacatctggtgcgtccatatatcatcatctgcctttctacacctcttatttggcttcttacaactcccataacaagaactaaattcaaatatctaaacactgccaataaaaaccaaccc

SEQ ID NO: 33422 - DNA, 149 bp, Gossypium hirsutum
  unsure (1)..(149): unsure at all n locations
  Clone ID: LIB3145-010-Q1-K1-C10
cccactctttctttaactcctnncctgtttcatanatctatccctccctttttaccccgccctgttaataaaatcgaccacctctaaaaacattcttnttaccatanaatccttttatatatccacccacacactctttcaatttcttt

SEQ ID NO: 33423 - DNA, 277 bp, Gossypium hirsutum
  unsure (1)..(277): unsure at all n locations
  Clone ID: LIB3145-010-Q1-K1-C5
taaatttccggaatcgtttgcttagcttagcttaccttcaccgccccggcaccgtttcggataatgtaagcctnctttcctctggtttcacatgaacttcactcctccgcctcacctttttgttttccccgtttcttcacgcgatttattattttgtttgattattttcttatcgacaaattgatattttcttttagttcatgaactttgagtaattgattaaattgtaattattgaatcatttgaattagagcggggaacttattattatgtagct

SEQ ID NO: 33424 - DNA, 416 bp, Gossypium hirsutum
  unsure (1)..(416): unsure at all n locations
  Clone ID: LIB3145-010-Q1-K1-C6
cttccgcggccccttggccacttttccattaaccctttcacttgcaaaacccttcctaactttcccgcttgttttccgcgtagtatatcaaatggaaagagtgacaaagttggcatccgagaagccagtggtgatcttcagcaagagttcgtgttgcatgtcccacaccatcaaaacccttttctacgactttggtgtcaaccctgcggttcacgaactcgatgagatttctagagggcgtgaaatcgaacaaactctttcgaggcttcgttgcaacccttctgtcccagccgtcttcattggtggtgaattcgttggtggagctaatgaggtcatgagtcttcatcttaatcgatccttaattccaatgcttagaaagttggggcactntgggttaatccaaaaataatccacta

SEQ ID NO: 33425 - DNA, 442 bp, Gossypium hirsutum
  Clone ID: LIB3145-010-Q1-K1-D2
tccgggaacccttattgttttatggaatgttgcaaagaagtgtttcacggttggggttatctggcgtacagtttcagatctatttgccagtattgtcccagtccggggtgcctcaatgtctcccacatttaatcctaaaaccaattccttgcttgattcattgagtgatgatcgtgttctggtcgagaagttgtgccttagaaagtacaaattttcacacggtgacgtgatagttttctgctctccggataatcacaaggagaaacatataaagagaattgttggcttgccaggtgattgggtcgggactatttacgacgtggtgcatattccagaaggacattgttgggtcgagggagacaactcagcttccagcttagactcgaggtcttttggccctgttcctttgggtttggttaaaggaagggtcacccatattttg

SEQ ID NO: 33426 - DNA, 449 bp, Gossypium hirsutum
  unsure (1)..(449): unsure at all n locations
  Clone ID: LIB3145-010-Q1-K1-E10
gaaaacccggggcgacgcgcacgcgtccgctctnctncaattgaaaaggagaaagatgtacacaagactgtataaatatacaacccgccccgttctgcttgcggtcgtgtaccanatatgattgcaaagaaatatgtgccgacactggatttgcagggaagcttaatttaacgttagatctgaattctgaatagctgatgtgagtgctataagtaatgctgattcatgcaagctaaaatagttttattgttgtccatagatttattacttgtaatgctgggcagtcatttgcatgcttcctgactcctggaatgaatattcagcttattggagacgctaatgattttggaggaaaattattttttactgaaatgctacctttcgttttctgttgggaataaaaaaaaaanaaannttaataaaaataatattaaatttataaataaaat

SEQ ID NO: 33427 - DNA, 223 bp, Gossypium hirsutum
  Clone ID: LIB3145-010-Q1-K1-E12
atatcacgaaaatctaacgaatggaaatcttcaccactatccaaccatcaaccctggcttaagttccgctcgttatcctcgttgcctttctctcttacaccctgattccgacaaagcttaatggacaattacttcaattttggacgatgccactgcaattgctttctcttatatctgcggaaatcttattcaatacatcgctttaatactccgatccctttcc

SEQ ID NO: 33428 - DNA, 428 bp, Gossypium hirsutum
  unsure (1)..(428): unsure at all n locations
  Clone ID: LIB3145-010-Q1-K1-E7
cccacccgtccggttggattgagatcatctaggtccgtgagcgtggtactggcaccacgcctgtttctgaatatctgcgtggcggtaatagggataggggcggtggcgatgacccaaaatgcgttggccacggaacggcaggacagttgcccggacaaagttagtgggagtataagctgcttcttaaattgcgaaattttcagttgtcttgcaggttgcttcacgaatccaagcatgggatgcggcctaatgtgttttgcccgaaacgtcggttgcaccactacctgctccattattgaatttccagacccatgaacatcacctggcaaaagccgtatatggacgctgtttctcactttatgttattaccgtctntgtaattattacaaaagcaaaaatatgatgatagacaattaataaagtaattg

SEQ ID NO: 33429 - DNA, 235 bp, Gossypium hirsutum
  Clone ID: LIB3145-010-Q1-K1-E9
accaactataacttttctcattcaaactaaaatccctgcaccatgtcaccaacaaaacataaaaaataattatattaaatgccggccttactaaaaacccaaccttatcacccatacactccacgtaataacattcatatagactcacccaaattcaaatcactcaccttccttttacaaccttcttaccgttaaaacccacaccttaccactctaactcccctcacaataaatc

SEQ ID NO: 33430 - DNA, 284 bp, Gossypium hirsutum
  Clone ID: LIB3145-010-Q1-K1-F4
attgttgaatgtaataccacatttgctaaaatacttcattttaaatgtcatcccagctcctttaaaaaaaaaacccacccaaaaaaaaaaaaaaaaaaaaaaaaacaaaaaaaaaaaaaattccggccgtcctaacacgtcccaacaaccaaacgcgcccctcctacctccacctaatataaatccccccccatctccaaacaccttccaaccattaacaacctgaacactccaaaaacaccccccctttcccaactaacccccctttcccccccatccccaaa

SEQ ID NO: 33431 - DNA, 427 bp, Gossypium hirsutum
  unsure (1)..(427): unsure at all n locations
  Clone ID: LIB3145-010-Q1-K1-F7
gaaaagctttcacttgtcctccctgaaacacccccttatgttccaaggcagtttggccgctgtgctgttataggcaactctggggatcttctcaaaacgaggttcgggaaagagatagatagctatgatgttgtcatcagagagaatggtgcccctattgagaactatacagaatatgtgggcaagaaaagttcatttcggcttcttaacagaggatctgccaaagctcttgataaagttgtagagttagatgaaacaaggcaggaggtcttgatagtcaaaactacaattcatgacattatgaaccagatgattcgggacattccaataagaaatcctgtatatctcatgctaagtgcatcctttggttcagctgcaaaagggacagggcttaangctcttgaattgctctctctatatgtgattc

SEQ ID NO: 33432 - DNA, 211 bp, Gossypium hirsutum
  unsure (1)..(211): unsure at all n locations
  Clone ID: LIB3145-010-Q1-K1-G11
cgggccgacgcacgcgtgcggtagaatccttaagcccttgccgtcccctttctttttcccaattcnaaaatcaaccgcncgcctccaccaatctacctccacccatccacctccnntcctccacnnctccactcaattcccnaatcanaacttaaaaccntccttctacctcttctacctttaaatttcaaacaaacaacttacatttaaa

SEQ ID NO: 33433 - DNA, 447 bp, Gossypium hirsutum
  Clone ID: LIB3145-010-Q1-K1-G2
ccggccgacccacgcgtccgcccacgcttccttttttttttctggggttaaggcatgggttcatcgactgcaccacttcgggccaacaatggtactaccattgatcaaggaattgcttacattctccttttacttgctctggcgattacctatctcatccattgatgatctttttttatattttatttttattgggatatgagctataaatgatttttttatgtattttctccatatatctaatgagagaaattgcagcaattttgtatttttcttctctcctatctctgtgttgtaaatctatgcagaaaataaatccagttgagaatttgagatcacataatcattttactatatatttttttgctccttgtggaatttgaaatatatttagattcatatgaccaaatcgatagatcaaaacgtttgtatattagcagatgattc

SEQ ID NO: 33434 - DNA, 338 bp, Gossypium hirsutum
  unsure (1)..(338): unsure at all n locations
  Clone ID: LIB3145-010-Q1-K1-G3
tcctttaaactggcttatcttctactatccaaattgtttcacctccgcccgttttaaacaaacatggcacctttatactncttcacgtattccttcaactggctcancttctactatacaaactgtttcacctgctgtagtcaatgcacaaaccttgcagcgttctactgcttcagggatcccttcaactggctcagcttctactatgcaaactgattcacctgctgtagtcaatgcacaaactttgcagcgttctactgcttcaaggatcccttcaagtaactcaacttctactctgcaaactgcttcacttgctgcaatcaatgcacaaaccttgc

SEQ ID NO: 33435 - DNA, 225 bp, Gossypium hirsutum
  unsure (1)..(225): unsure at all n locations
  Clone ID: LIB3145-010-Q1-K1-H10
cctatgcatgcacccttcacaacgggcggcgtcatacaaaactcctccggcctcacaattcctcaactanttcactcatatctaaaacaaaacatcttcctcacataacgactttaacacatataacatctcctactaaccttactcccacaaccaaatcaaagatccaccacataattaaatcacttcacatatcaaaaataatctcaccatttcatattataa

SEQ ID NO: 33436 - DNA, 376 bp, Gossypium hirsutum
  Clone ID: LIB3145-010-Q1-K1-H8
ctgttgaaaaacctgcactgcagccaagcttttgaagtaaaactcattaactgttggcgattcagaatccagattttccttcggcaaacatttttccacattagaagcaacatcagcaactccattaggtagcctagttcgtgccatcaacaaatgctttgcatcatatgagggctgaaggaataaccagcttgaaggatttgatatctccataatttcaaacttgtgtctatgtagcccagtgctttctaacagctttagaagttcagacaacgccctcttcttcccttgacttctgttaacatccatccaaaagtcaccacaatccatagtcgttctacctattttttcaagtgtgtgccacaaatcattccac

SEQ ID NO: 33437 - DNA, 422 bp, Gossypium hirsutum
  Clone ID: LIB3145-011-Q1-K1-A11
ggtggatttgctttaaaaaaagagatgctagacgatagacggttccccaaaatgcggctaaatttgcaacgtctcctgcaggtgattgcccatggggagcaagtatttcctcgagtgaaggaaaaatgttcttctaaacattggtttgcaagtgaagacatcggctcccttgaagagcttattggacgcttgaggaggctgaaagagaatgtagggtttctagcaaatcgtgtgactgcaattcaagccggtttggatagctggcagtctgagcaaattaacagaaaactctattatctctctttcctctctataatattccttcctttatccgtcatcaccggagtgtttggaatgaacgtggggggagttccatggactgtgcaaaaggatcctgcactaaaagatggtttccgcaatgt

SEQ ID NO: 33438 - DNA, 290 bp, Gossypium hirsutum
  Clone ID: LIB3145-011-Q1-K1-A2
ctctggtcgaattatacccccaaaagtggatccaacagcatgcatcaagtccttcttatcacattcgggtggacacgggccaaacgtaagccaaaacagagaataaattagtcgaatcttgtttcgctcaattgacttcaatagccgatcaaaaatagttaattgttttcgaaaaaaccatggatgcccttccataatatgctcaaaatcattctcatcttcgaaagatattatgaacaagttttgccctgcaacaaggatctcaaacttcttttttgttttgcagatgc

SEQ ID NO: 33439 - DNA, 406 bp, Gossypium hirsutum
  Clone ID: LIB3145-011-Q1-K1-A3
ggcttttctggagttatttggctaaaaagaatcaattgatgtagaggtgactggaaatcatccccaatttattctgtttcacatttgctccattctccaatcacagccgatctttatcgcctttgtgtatgggagtcttgataggcaaaaaatgaagattccttcggagggatttgagtttgtctattctgccagggcatttttcatggatggccatcgaggattttaacaccattctctcgccggatgaaaaaaaagtggttggaaatgattgatcacataattatgttcatagttgaattaatagattaagggggaatgaaaaattgttagttatatgaattagatataactcccccttttaatttagtccgtctttggttggccaatgtaacttgtcatattt

SEQ ID NO: 33440 - DNA, 418 bp, Gossypium hirsutum
  Clone ID: LIB3145-011-Q1-K1-A4
gttttcctcttttaacggcaatagcattttctaacatagccttgtcatacatttatttaagaaaaccatttccggaaaaggaatgcaactaataaatactatgctgttgtacttaaccgagatctgcgagtgttgttcatctacaggttgacatccctgttctcatcgattggtctcgacattttttcatgcttggatattatacgtttctctcgacctacatggatcctgttataaggtcatggttaaatggtttgccatctaaagtgaggtatgaatggaagaggcaccttgaggcttggaaatatggatctggtttagactacaggctatgaatttcgagttgaattgatgctctttttcagctttcaaacttaactcgaaagaccacccaaccagcaattgaaattcattgaaa

SEQ ID NO: 33441 - DNA, 278 bp, Gossypium hirsutum
  Clone ID: LIB3145-011-Q1-K1-A8
ccaaaaaaaaggttaaacatttaccttaagttggtttccacggaaaggtataaaaaataaaaaatccttgaagacgtctaaaggaatgctagggtctatctaaaataagggacttgttaaaatagttaaacagttgggtataaaaaaatcttggaacctgaagaagatacagattattgttgataccaacaaaacgagaaagcttattgtcctatcattgaggtacaaaagtttttttcaacgtactatataaagatgttttttaaaattatttcacc

SEQ ID NO: 33442 - DNA, 385 bp, Gossypium hirsutum
  Clone ID: LIB3145-011-Q1-K1-B6
aaataagtgagactggagtactgacagagaacgaaagagaaggccaatattacacttttgaattgcgtatactttttcttttatatacgaatctcctttggtatagatacatctttatgaacttgggggtgttgcacagtgataatgaaatcaaacctcttattctttaaattttatgggaggaattgcatctgtctctctctctctcctctcagccggacgaaatatatgaaatgtacgttggtataaaaatgcatgtgactgatagactgactattgcaattcagagagattggagcggtgtctgcaaccgattctgagctcatagaagtgctcatatgaagcttctaaaagatataagctctttcgaatacgaagatgtgcg

SEQ ID NO: 33443 - DNA, 395 bp, Gossypium hirsutum
  Clone ID: LIB3145-011-Q1-K1-C2
aatgcactaattgttgagggaacctggcgaagaatagctaaaatactaccaggacatgcacaaatggaactatggggcctggtgatatcgaacattgcaatggaaatggtaactagagtagaacctgatcatgatgtgaatagacgaatttttaaggggacctaacttaacctctactgtttatttgaaatgggatagaggtcatacaaggtccctaaagtgattgttaaaccattcctctactttgtcagctgatctaattttgcaggcagttgattttcacgaatgggacaatgaaatgatgcaagaaaattaattccatgatttgttgtgtttggtattggtgaatgaacatggatacactaattgcaagtagggggtgaagctagaatttt

SEQ ID NO: 33444 - DNA, 355 bp, Gossypium hirsutum
  Clone ID: LIB3145-011-Q1-K1-C7
gtcaaactcacatatagaaagaagctgcatctccctgaactaaaaagtaagagctgcaactcgctccaaataatataactataatctattgttctatgtatgtagtaaatattactgattggtattactacatttggacgaacatatactaacggatttcatttatctctggcattccaagtgcaattgtacatgacaaagttagtcagtgccaaagtaacctttacgtcttactgattctctttaagcaatagacttgacgcgtggaggtttgaactacttcgcaccggttggatccttaacttgaatgaatgcataaacctataatatttcatattgccctaacgtttattct

SEQ ID NO: 33445 - DNA, 410 bp, Gossypium hirsutum
  Clone ID: LIB3145-011-Q1-K1-D1
gagatattcaagtgcggtcacaaatgtagtaactcaaactctttctgtcattctatctgttgttgctacactcacagtaacagctctgcttgtgaccactatactgcatgcctttgtccaacgagacctcttccccaatgacattgccattgctattagcgacagaaaaccaaaatctcataggaggtggttcaatcttattagacatggaagctcagagcataatgcagacattgacactttcttgaaatttgcaaatggcgacaccaaagacatagaagctgggctgaaaatttccagtgcagaagctaaatgagtttagaaacttcatgcatgtgccactgtgatcagccttaggttcaactttcatcaggttcttgcctcttaagcagtcagacatgcgaggaacg

SEQ ID NO: 33446 - DNA, 400 bp, Gossypium hirsutum
  Clone ID: LIB3145-011-Q1-K1-D10
gttttaacagaaaggatccgtttactctttagtctaactaatttgtccgcttttttagaagataggggcaagatgcaatctgactattagcactgatactttttcctaaataactactatatgtaatagtcgggattcagatgtctcctcgtatcgccgcacgtatgaatttggtctcaattggtactcgatcattttgcctcaaaccaaatcctggtatgtttggtgatccaggaaagagtcggaatcccatttttgatcaccacactcgagtctcgagtccagttagcatagaactgaactatactacaagagctctgcatagcattgaaagcggagaaaacaagtttggcacaatagtagttgataagtctatatgatttttaatagacaaattttt

SEQ ID NO: 33447 - DNA, 339 bp, Gossypium hirsutum
  Clone ID: LIB3145-011-Q1-K1-D11
gagtgtacaacagagcctcgggttctttttactctaactaatgcgtgccttttgggggaggattctggcactatgccacctgactattatcacggccactttgtggtaaataactactatatgtaattgacggaattcaaacctgttcttatatctgcaaacgtttgaatttgggctgcatagatactcggtcattttgcctcagacctaatcctggaatattatatgatccatgcaggagtcaaggatccatttgtgcatcccacactcgagtctcaaatgcaagtagcattgaactcgactatactacacgagctctgcttaaacatcgatagctga

SEQ ID NO: 33448 - DNA, 371 bp, Gossypium hirsutum
  Clone ID: LIB3145-011-Q1-K1-D12
tcccactcctccttaaaaaaaaaaattttttttataaaaaaaaaaaaacctttttaagaaaaattataaaaaaaatacaaacctactattatcacttacacttttttctatatcactactatatataattattctttattcaaaactcttctcctttattcacacttattaaattagtctcaatacttactctatcattttccctcttaccaaaaacttctatatttaatttatccacgaataaatttaaaatcccttttttcatctccttacttcaaatctttatatcattttttctttttaacttttactttacttcatttatcctttttacatccatctataaaccctattaaaaccaactctatttt

SEQ ID NO: 33449 - DNA, 345 bp, Gossypium hirsutum
  Clone ID: LIB3145-011-Q1-K1-D6
cccacgcgtccggaggttacaccaaaggccatccgattaaggaagagatatctggatgtaaacaagcgcaaagccatgagtaaaaaggccaaaaattgagtcttctcctaacatactataattttgtaactatagttggggttgggttcaatttttgtccccacaatttatttatagaatatcaacgatattatcttttttatgacaataataaggggcaaagaggagttcatgttttgtctgtgtaattgccaaagaaacaacaatggctattattattattattaagaaaaaaaaaggggacacaacaatgctacaactcaaaaaacacaaccagtgaaaagg

SEQ ID NO: 33450 - DNA, 248 bp, Gossypium hirsutum
  Clone ID: LIB3145-011-Q1-K1-D9
cgacccacgctcgataggaaaagagaacaatttgacagaggaacactgcggtgaggccggcgtgatgctcggatgagaagacaacctacctttagcccatgcgctaactgaaggacctttgacctaaaacggtcgttgcacaaacccgccgtgtggggtactgtttgtctgagaggtgatgagcccgaaaagtagtatctatttcttaatataggccgacttgacgcgaagggtactgactgaataca

SEQ ID NO: 33451 - DNA, 356 bp, Gossypium hirsutum
  Clone ID: LIB3145-011-Q1-K1-E10
tagaggtttctttttgcagcgacgcatcattggcgaaggaagctttttattatgaatggaaccgccccccaacacaaagatcctgttcgtgtcaagatgaagactttgcaagctgtgctggaagagcgccacagagctctcgaattgcttatctactgctaagatggaaccgacgatcgacgatgaatacctcaacacgtaatagatcaagtgaaccattcatgagaactcaacgtcctctatcttatatcagatcaagaagcatattatttgtacgatcttctcaaatctagagttcaatgccctgactttcctgataacttgagtgtcttcagttccattccctaaaacattcc

SEQ ID NO: 33452 - DNA, 433 bp, Gossypium hirsutum
  Clone ID: LIB3145-011-Q1-K1-E7
cggacgcgtgggcggacgcgtgggcaaaattctaattaggccaatcaagtatagtctagatgtatttagggatgacaaagaaaaaacccgaatctgacccaattcgttagagttgcattctatttagaaatcgggtttggagcggggtgggctgggtgaaattaaaaaaaatatataatggggttgggctcaggtttgaggtaaatccactcgtcctactttgcagtatttactaaaatacccctgatatatatattaagtttttgcttcaataaaaaattatgtatatattaagttttaggtctaagctcaaaaaatttaatcttagtttcttcaaaatgcacattaaaacaattaaaaaatgtgatcttaattgtttcaaaataaaaataggaaattaaattaaattcaaatatggttggtgtggagtcga

SEQ ID NO: 33453 - DNA, 419 bp, Gossypium hirsutum
  Clone ID: LIB3145-011-Q1-K1-E9
tcgcccacgcgtccgcgaagatagaggtatcaggttggagcgacgcatcattggcgatggaagcagaggagatgaagggaaaggttgtggaagagaaagatccggttcgtgtcaagaggaagactttgcaagctgtgctggaagagtgccagagagctctcgaattgcttagtaactgcgaagatggaaccgacgatgacgatgaagacggcaaaggtaaagatgaagtgaaccatcaaggagaactcaacggcgtcgatcttagaagagatcaagaagcagatgagttgtgtgatcttctcaaatctagagttcaatgccctgcctttcttgataagctagagtgtgctcaggtaccagttccagaaaacattgccgaagatggtagttcttgtgacatggtcaaccccaatgatctt

SEQ ID NO: 33454 - DNA, 400 bp, Gossypium hirsutum
  Clone ID: LIB3145-011-Q1-K1-F11
cccacgcgtccgtggggaaatggtgtggggtgtttggggttgctgcactactgttggtggtgagtgtgtttttaggggttagaggtgctccccaagtcccttgttactttatttttggggattcattggtggataatgggaataataatcaactgtcgtcattggctagagctaattacttgccttacgggattgacttccctaatggaccgacgggtaggttttctaatggtaaaactaccgtcgatgtcatagctgagcttttgggcttcgacaattacatcccgccttactcaaccgcaagcggtcgacagatactcggaggagttaactatgcatccgcggcttgccgaatcagagaagagtacccgacagcactgtgagctcggatcagtttcag

SEQ ID NO: 33455 - DNA, 259 bp, Gossypium hirsutum
  Clone ID: LIB3145-011-Q1-K1-F12
tctatccttatgtacccacttttcttttatttctctgtgactctcataaaaaaaagacttcttcattatttgtctcccctctcccccccacatgtttcattttgtatatatcccacctagatgactacatacttactcgcacatttatctacttatttacacctctaaaccaaaaaacacaagaacaatctacctcatctcctacatgctccaaaaaatatccatccctcaattatacacccaccaacacctctattca

SEQ ID NO: 33456 - DNA, 422 bp, Gossypium hirsutum
  Clone ID: LIB3145-011-Q1-K1-F3
ctggcgttttcgggtgttccctattataatcattgcaagttacaggctctaacggcgagggaagcgcatatgatggctgcacacgctgactaggaatgtgggatgctgctggacgaaagggaatgtgagggaactgacaaaaagagcgatatctcaaaattagatcttgtcggagtataattttaggatatgcaacatggaaggaggtatctgataaaggctaaagggacagtggttggggtgatgatcgtgaatgtttgcatttaatggcttacggaaacgaggggatcggatatcttttgccgcatttgactgcctatgagtttcggtatgtcgtgtttttaggcctccgatccatagacttagctttatggccattacttactaataccagaggattgcgattcacatatgttgcttat

SEQ ID NO: 33457 - DNA, 425 bp, Gossypium hirsutum
  Clone ID: LIB3145-011-Q1-K1-F4
ggtgccaatggccgtaagctaatatggcaaggaattccaaggagcattcgcgacagtcataggaaagttcgtgacagtcaggacggactggtgatccaaaggaacctagctctatacttctcgggtggtgataggcaagagctgaagttgagggtaaccggccgtatatggaaagaagaatgataataaaaaaaggatgttgaatcgagatgattttgtatagtatcagaaacattccgagtctcattggcaaacaaatgaaagcttcggttgtaatcggggctttatgtccactgcattgcaatccctctgctgaccgaccaccagcccggctgccaccttctactgaatgttttagggtaggaaatgatttgtatgagtctgcttggttgctcaaagtttaatgcagcaacatgtatggagcg

SEQ ID NO: 33458 - DNA, 154 bp, Gossypium hirsutum
  Clone ID: LIB3145-011-Q1-K1-G11
cgcccacgtcgtccgggttcagatacggatgtaccggagaaagtagcgagaggtgatgcttcacgagggcgtgaaatccgcatgctcataggtgcgaatgcaccccaagagcaagctgatagcgagtagcatgttctacaatgatccgcagttt

SEQ ID NO: 33459 - DNA, 293 bp, Gossypium hirsutum
  Clone ID: LIB3145-011-Q1-K1-G3
tgaatgcttacatggacacgtttctgcatggtatgcgtgagcttgtcaattgaaagcatggtgggagagaggataccccccccccccaaatgtcttatggcttgaaaaagcttggaatcagttgtgcattcaaatgccatggatataccttattcgaagcttactcagagtgtgttttagttcatgatcagctatatttattcttatgtgagcacaacttatatctttttagttgcagctatatgatttaagaataaaaatcatttcatcactacatgtgctttttatttatt

SEQ ID NO: 33460 - DNA, 302 bp, Gossypium hirsutum
  Clone ID: LIB3145-011-Q1-K1-G8
acgcccactcgtacgggaaactctttttttgtttaaacgacgaaaaccactatgctgggcggttgattaaaaccaaagccatacatactattttaaaacggaagttatatgaagctatatagaatctgacacaggctatttttcttaatccaacatcttaaatcatgtctgtaacccaagctcttttttatatcaagataaaaaaaccatacgctgtcattcaatatgccaatgcagttttggagattaacccatattatgttaaagcctacaattcttattgcattgcactagcaatgctt

SEQ ID NO: 33461 - DNA, 232 bp, Gossypium hirsutum
  Clone ID: LIB3145-011-Q1-K1-H8
gtccgcttcatatgcggagcttgttcatgtatcggcctatgctcaactatcgactgcgcgcggagaacttactgatggcggcatggtagattagactgcacgggacaagggatttatgcgagaacgatgatacgatgtacatcctatgcatccatcaattggggcaggttccatttatatttatgtggaggagggattgtatgaagcacctacgaaacaacagactattctg

SEQ ID NO: 33462 - DNA, 311 bp, Gossypium hirsutum
  Clone ID: LIB3145-012-Q1-K1-A12
cttggaacggttgtactatggctaacaccttgctcctggctcatgaatgggtgagtgagacggaatgctttgagccctcgctgaaggcgctgaccactaggacaaaacctgactatcgaggacatgctggtaaagaaaggtctcgacatgctgactactgtattgccactgaacagcatgcgggctgatatgtatatacatgatggaaaagaacaactaataatcgtggcaagctggtgctgatgctgtggagaggacagcgataccaaatggttctactacatggacacatgtgctggacactactggtg

SEQ ID NO: 33463 - DNA, 390 bp, Gossypium hirsutum
  Clone ID: LIB3145-012-Q1-K1-A2
cccacgcgtccggtcatttcgtcttcccatcatttcatttccattccgacgatttctctggcaaagcttcttttgaaccgtttcactttctttagttttgaagcatttcttcctttcttccctcatcttctgtcattttctagtctggttcacgcaaccagtcatatcttctctgctcctttgcatactcaggaacctctatttcaaggtaaatctcctctttcctctttaaggtttccgttgcaagaatgtgtgcgagattatttgcagatcttggtgtgcgctgaaatctgactttattaaacttactgatttcctactggatatcatgaatataaacccccaccattgatcgatcttgatctgtggaatagcatttttttaattatt

SEQ ID NO: 33464 - DNA, 300 bp, Gossypium hirsutum
  Clone ID: LIB3145-012-Q1-K1-A8
attatatatatattatgctgtgcaagtgacaaaaatccatgtcagattttcgatgttttgaaccgacatttttggctcagaggttgttgcattgtcgcagtatatacattcattacacggttttctagtcaaaatttaacactgtagaaggtacttttgtttagatatgtcgtcgtaattttgctgatatatagtttttagaccatctctgcttaaaaaaaaaaaaataaaaaaaaaaaaaaaaaacaaaaatgaaaataataaaaaaaaggagccacaaaaaataataaaatatgcaag

SEQ ID NO: 33465 - DNA, 368 bp, Gossypium hirsutum
  Clone ID: LIB3145-012-Q1-K1-B1
ctccaactgcaatttttttgcttcacgtcatattgtcttggtttgcttattacttagatatgactcctttgttatcccatggtaaactggttcacaatatagctaccacgaagtcgtccatcattcatcttccacactgttgatttttctacacaatcttcattttgcagatccaccacagctgagtctgtctccgctatcatctgtttgtataaatctaaaataagctgcatgtctgaaaaaacacatactggatgtagtgtatgtattatcactatatacatttcaaattgttcactaagcttgagtgtaagcatatcaaatatcgataatcatatttatctccggttcttaaattgaaaattaaa

SEQ ID NO: 33466 - DNA, 342 bp, Gossypium hirsutum
  unsure (1)..(342): unsure at all n locations
  Clone ID: LIB3145-012-Q1-K1-B2
cgattgtgcagcaatggaagacaacgagtcggtgagggtggattcgggtttgaaggcctccgattggtggtgatgtagcagttgagggccatcataaacttaggccgatcgccggaagtagctgagggtaggtgcgcaaaatgtgcctggcggctgctaggggacaatctaacgtgatgtgctagaaggactagattgtagaagacgcaaaaatctcagggccaaaatgtaattttagaaaaatttgaaggccaaaatgtaaatattaaaaagtaggggccaaaatgtaaatagtatatttttgtatttttcaaacnaaaaaatattntataataatattta

SEQ ID NO: 33467 - DNA, 379 bp, Gossypium hirsutum
  unsure (1)..(379): unsure at all n locations
  Clone ID: LIB3145-012-Q1-K1-B4
ggcgttagagagcttggctgcggcgcaagggagataaccctagggttttagggttttaattttctaggcctatcgggcttgtattttgggtcttgggttaatttggggattgggtattaatttgggcttgtaataattttggactgatggactgtaaagggacatttaatatcatttatttatttttttattatatatttttttatttttatttattttgtatttgctcttctttgggcccgggtaaattggcctgtttacagttgtaatttagccattcgaataattgagttgaattaggtggcgtgtaaacaaaggtgtattctatatgtagagttgtaaggtggaatgacatgtttaatttctttatagntttctt

SEQ ID NO: 33468 - DNA, 301 bp, Gossypium hirsutum
  Clone ID: LIB3145-012-Q1-K1-B5
agggcgtgtcaacgtgaaatatgggaggtttaagcgtgggctgaagcaatgccctccaacgaagcggtacggggagatgtgaagagggcgttcatgggcatgtcaacgtgaaatatgtgaggaggaagcgtgtgctgaagcaatggcgtgcgtattggctgacacaaaagcagcagcaccgcaaggtggaaagggaaagggttctgttaactccaaaaacctgtgcctactgggcttggttcatttcattcagtattatgccatcgtcaaactttgtgggcctgtccaaaatgcaattggc

SEQ ID NO: 33469 - DNA, 334 bp, Gossypium hirsutum
  Clone ID: LIB3145-012-Q1-K1-B6
gaaacggttgatgaaaatgttcgacatttattattatgggatgagaagttggttggagttccacgtgttttggaggaaatgaaaaatgtttgaacagtaatcatccagaatgcttcaaaggaatcaaagactacttatgaatcacttataaatctgtgtctctccaatttcaagtatctacgagcattagatttaaggaattcaccattgacggctttaccgaattccattggtaccttaaagcacttactacaccttgacttgatcggatgttcgagtctacttaaactcactaggtcttttgataagcaacagagcttgtatttgttataat

SEQ ID NO: 33470 - DNA, 291 bp, Gossypium hirsutum
  unsure (1)..(291): unsure at all n locations
  Clone ID: LIB3145-012-Q1-K1-B8
cgacccacgcgtgcgnaaactttatttttaccacaaagtcaattttcctaaggctctatgtgttttattgtctgggctaattcaccccgaattttagcaactcttaataaataaaaacccggtcttagtgttaaccccgaacaatctaggctgttattgatgaaggtaagccccaacatcatagacctctcatgaaaggcaagcttgtcatacatttccatgttattgtttccagatcctggaggagccccacctaatcaacgcgggtacattgagagtgtatcgcccatg

SEQ ID NO: 33471 - DNA, 407 bp, Gossypium hirsutum
  Clone ID: LIB3145-012-Q1-K1-C12
cttgaatgagatcgcgagtgagggaccatatggaccctagcgcatatccgcgaacccgccactggttatcgctgctgttctggaaaacacatgacactctctggacacatgaagacactcttctacttgaaaataacattggggacagcgggcataatgaactaaccctacatacgctgagattaccaattgagggatataatacaatgaaatcctgccattgttatagcaatttgtgaaggcagtatggcgcatgatactctctctgtaacatttcatatttcgcggctgaataagtggttactcgctgcatgaccatttcagttgactgtatactcactacgtactgaaaactcaccagatatgttcttcactccacacctgaatattctcatgttcgagctctg

SEQ ID NO: 33472 - DNA, 382 bp, Gossypium hirsutum
  Clone ID: LIB3145-012-Q1-K1-C4
gggtgttaatggagctttatttgttctaagggagatcctgtttattacaagaccacttatttatgttttgttcattagaagatacggaattaggtcatggattccttggtttctttctctgggtgtggacttcattggatacggctttctatcacatgttacaaaatccaggatggttgaaagagaacaatggttccatctttctgcctctgaaaaggatgaggttaaacgacggaaactgttgtgggcactttacctcatgagagaaccattctttagcaagtataccaggcaaaagcttgccagcactgatagcctattggagcccgctcctttaattgggactctaacatcaaaactggttgagcttataattgagctc

SEQ ID NO: 33473 - DNA, 327 bp, Gossypium hirsutum
  Clone ID: LIB3145-012-Q1-K1-C7
cggacgcgtgggtttggctctcacctccatcatccccaaccgcaggcgtatttgccttttgaagatgattttcggcctcaagacccctccttcactctcgatttcgacggagcaaggaggagtcaacgacaaactctcgaggtaagcctctttcgttttctttttcgaataccagaatcacaaacccacgaaagaaatgaaaaaaaatagaaacggcgggagtaaagtatggagggattttgattcgaaagtcacctttttttgattactttgtatcgagcgtgtgtattatctctgtgaacgtaaccgttacaaagattaaaagct

SEQ ID NO: 33474 - DNA, 398 bp, Gossypium hirsutum
  Clone ID: LIB3145-012-Q1-K1-D1
atttagatttgtatcctagagacaatattattaagagaaacagtcacaaaccttgaaaggattagttttcataaaccataaaaatggagatgaaagatacttttggttataccaaaaataaatatatcaacattgcatcaataaagtcttttcgttcacctactttgtaacttgggaattaaattctaacttgaatatgacatggagcatgtttagaacacctgaatcaaatttatatacctaatatatgaaaactttgtatctaacgtgtttgttaaagaaaaaaataatatcattaaaatttatgaatgccatttattaacgcattagatccaagatgcctatgcaatcatatacgttaaaatttgagccacgagttcaaaatatgctcaacatca

SEQ ID NO: 33475 - DNA, 395 bp, Gossypium hirsutum
  unsure (1)..(395): unsure at all n locations
  Clone ID: LIB3145-012-Q1-K1-E11
aattcccggggtcggacccaaacgcgtccgcgccctttcnntttcaatcnncaaatcctaaatctgttcactctngtcagttannacccctatgngtnctcgtaccgaagcaaaccagcaagtgtataatcaagccgtgtggtaaagtnctccacgtaaggcannactggctacgaaggggcggctcggaaggtcggcttccggcaactcggagtgagtgtatagaagcctcatcgttttagggcccggaacctgttgcttcttagagnnaaatcaggagagtaccagaagagcactcgagcttttgatcaaggaaacttccattccaaagggttggtgacgagaaatcgctcaagactttcaaggactgatttgagtgttccagggagtagcgc

SEQ ID NO: 33476 - DNA, 277 bp, Gossypium hirsutum
  Clone ID: LIB3145-012-Q1-K1-E3
ctgttctgtaaaccaatttggtagtttcgtatctggataatatctattgtaaacttaaaagaacaaagctcattgtttcttatgtcctactgccaaaattttctcctacctgcatttgctttgaatttactcaaataactaaatgataagctaccattctctgttccttgtggttaaaaaaaaaaaaaaaaaaaaaaaaaaaaaaaaaaaaaaaaaaaaaaaaaaaaaaaaaaaaaaaaaaaaaaaaaaaaaaaaaaaaaaagaaaaaaaattttgg

SEQ ID NO: 33477 - DNA, 394 bp, Gossypium hirsutum
  Clone ID: LIB3145-012-Q1-K1-E4
ccatcaccggatcctctcaatggaagagatgttgccaaatctgaaccttctgcgaatggaaaatttaccggtccttcacatggctctgaacaggacagttacaatctaccctcccccaaatctcccgaagatgatgattttgatgacaataaatctggggaattggatcgtagcaatcgacggaggcagagacctcaacgatattcagcgaaggaattcgttgaagctgtttcggataacgaggctgactttgacagtgatgatgatatagttggagaagcagtatatgatgaggaatacctaagataaagaaaacagagaaggcaatccagcagctcagaaagagatgaggaataccgttgggacgaagaaatgctgaagatgaggaggagga

SEQ ID NO: 33478 - DNA, 394 bp, Gossypium hirsutum
  Clone ID: LIB3145-012-Q1-K1-E5
tcttgagtaacacactcatgaacagaatctcttatgacctccgtgtacccattgattcctattcgcccagatagcccaaatggcgcagacaaagatgcagcattccttctctttactgtgcaacaatacccagggtagggaggtagttgagaatggtattccaagctgtaatacgtacctttgaggggagattacaattccacagtttcttgtaacattttgtaattacaggcaaactgtaaccattactgttgtaatcattgccttttaataatagtttgtaaccactgcgcacagtatattggcctgatgcttctcccctccatatcaaaagatcattatgtgaacgctgggccaaagggatttgcaaaaacttttgaacatcaactttcgc

SEQ ID NO: 33479 - DNA, 133 bp, Gossypium hirsutum
  Clone ID: LIB3145-012-Q1-K1-E7
agaagatcaaaggagccacgcatcagcagcaatttaaatattctagcccgttcccaccctccaacaaatcccagtctttagcaatcctttagctgcccatacactcttccagatatatgaaggtagttgtcct

SEQ ID NO: 33480 - DNA, 335 bp, Gossypium hirsutum
  Clone ID: LIB3145-012-Q1-K1-E8
gttgatccgaaagaacatccaatgctacttgctgagccttcttccaacactcaacaacagagggagaggacagcagaactcatgttcgaaaagtacaaagttcctgctttgtttttggccaagaatgcggttcttacatcttttgcttcaggacgtgctacctctgttgttgttgacagtggtggaggatcaactactgttgccccagtacatgatggttatgttcttcaaaaggcagtgtcttcttctcctattggaggagaatttcttaccgattgcttgatgaatagcttgaatagcaaaaggcatcggataaaacccgaggtactcttttt

SEQ ID NO: 33481 - DNA, 317 bp, Gossypium hirsutum
  Clone ID: LIB3145-012-Q1-K1-F12
cccacgcgtccgattgattaatctgaacaactttttcctattattataatattaataagagtattcaactcttattgaaggcaaaaaaaaaaaaaaaaaaaaaaaaaaaaaaaaaaaaaaaaaaaaaaaaaaaaaaaaaaaaaaaaaaaaaaaaaaaaaaaaaaaaaaaaaaaaaaaaaaaaaaaaaaaaaagggcgggcctttttaaagaataaaatattacgtcccattgcatgcaacgaaaaagttttttaatacgcgaacctaaatcaaattcactggccgagttttaaaaacgtggtgacgggaaaaaccct

SEQ ID NO: 33482 - DNA, 262 bp, Gossypium hirsutum
  Clone ID: LIB3145-012-Q1-K1-F6
aacttagaggcaaagatgctgatatcactcaagaagctgcagaaattcaaatgtacattgaaactcttcaaagcctaccaaaaactagaatgctggatttgtttcaaccaaaatacattcgttcagtgatgattggagttgcattaatggtctttcaacaatttggaggaattaatggaataagtttctatgcaagagaaacctttgcatcagctgggctttcttcaagaaaagctggaaccatagcttatgcttgtgttca

SEQ ID NO: 33483 - DNA, 446 bp, Gossypium hirsutum
  unsure (1)..(446): unsure at all n locations
  Clone ID: LIB3145-012-Q1-K1-F9
aaacttttggggtggagtccaaaagggttgtggatattggtaccattgacggtttccagggacgggaaaaagatgttgtaatattttcttgtgtgagggctagcaaagatagaggcataggctttgtgtctgattttcggcgaatgaatgtcggaatcacccgagcaaagtcttctgtactggtggttggttcagcatcaacgctgaagagggacgagcattggaacaacctagtagaaagtgctgaggagcgaggatgcttatttaaggtagggaagccttatacatcattcttgaatgatgaatatctagaatcgatgaaggttattaacaaggatgcacaaatgatggaagatatggatgaccttgataatgataatgtagcagcctataatatggccggagatgctgatcaagctccngtggaagacaatgattatggagat

SEQ ID NO: 33484 - DNA, 442 bp, Gossypium hirsutum
  Clone ID: LIB3145-012-Q1-K1-G10
cccacgcgtccgtgaatcccaagtccaagcttctgtcatttgtgcaaagaggctcgatattcacctcagattccgtagtggaggccatgattacgaaggtctctcttacgtatcccaaattgaatcacctttcgtcattgttgacctctccaaactgcggtcaatcaaagttgatatccaggacaacagtgcttgggttgaagctggtgccaccattggtgaagtttattatagaattgctgagaagagtaacatccatggcttccctgcaggtctttgtactagcctaggcattggggggcacatcaccggcggtgcatatggttcaatgatgaggaagtttggcctcggtgctgataatgtcatagatgctcgaatcgtggatgttaatggaagagttcttgaccgagcagccatgggagaagatcttttctgggcaatt

SEQ ID NO: 33485 - DNA, 427 bp, Gossypium hirsutum
  unsure (1)..(427): unsure at all n locations
  Clone ID: LIB3145-012-Q1-K1-H10
cccacgcgtccgattcacccatagcaagcaggacttctactgccattgagatacccacacagctggcaggaactcaaggtgacacgaacactgtgcgatatggtgaagagactataaataaacaagttaaatttcttgtccctgtcagcaatagcgagatggattatcctgatgctgagggacagcagattgaaagagaacttccctccaattggcgttcaggaaactcgccttatacacctgcacaggatgatcccagttcctcctatcctccttatctaccatcagtacttgaagagccttcatcttctttttctgaggctgcagaagatgatctgcttncagctatagaaggtctncaaatttcaggggaagcttatccaggaagggagctacaggcgtgtggatattctattaatggaacaac

SEQ ID NO: 33486 - DNA, 325 bp, Gossypium hirsutum
  Clone ID: LIB3145-012-Q1-K1-H4
agatttctcatcagatacctgcttttgcttccttgtttctgctactggcttgcagagagaatggagcttatcattagctatgattgacattaatgctctcataatgatactgtcacttaaaaaatatcgaacttgatacttctctttaccattaggaatgcgatcgcattcactccgacatttaccgcatgtagaacatctgcatgcattaccggacttattgacaaagatcttgatatatggtcacaataccatgatgtgcagtgtgaaactgtgactcgcaataaactgtattaactgttttcctgctttacttaatcagtct

SEQ ID NO: 33487 - DNA, 224 bp, Gossypium hirsutum
  Clone ID: LIB3145-012-Q1-K1-H7
cccacacgcacagccaagcgggcgatggtgaggggcgcttggggtaatctttggcccattggtgccgccgtcgtgcaggagttaaagacctttaacataatcaatggtggaccagacttacgagctaccagtctgtctgcagattacgatgctagccgaacgcttgatatgccctgtagtgcttgtgcaaccatcaccgatatggaaggaagctgcgatgcgat

SEQ ID NO: 33488 - DNA, 335 bp, Gossypium hirsutum
  Clone ID: LIB3145-013-Q1-K1-A2
cgaacaacgtccttagcactgcacaacaagtgtggcttcgcaaattaggtggtgcaaaggctgttgttgatgagagtgcaagtggaattattactgcaggacgtgcaaaacggtcagctgctcagccagcacgggctggggataggttcaggcagttaaaagaagacgagaagaagaagaaagtaagcaaggctctgccagcagaagagtttcagagtctagactcagcatctgattctgatggggaatcagatgaagagacaaagggcaagggtgatgaggctctcgaagaagcatattcttcaagtgcaagcaatcaagtcctaatatttctc

SEQ ID NO: 33489 - DNA, 395 bp, Gossypium hirsutum
  Clone ID: LIB3145-013-Q1-K1-A3
ctggagatagtaacaggtcgccgtgcagttgacaagtccaaacaaagtcttgtaatatgggcaaaaccatttctggaatcaaatcaagtaaaggaattggtcgatcctcggctcaaagatgattataatccgagcgaagtgcaacgaatattgattacagcttcaatgtgcttaagtcacttacccagcaaccgtccaaccatgacaaaggttgtaaggatgcttaagaacgaagatggtccaattgagtttcaccaaatatcttgtggaaggaaagcagtgatttttgacggccatgatttgaaagattctagttgtaaaaactatctatataccatgcgtccaacataattatgtaattggaaaaccatatctatacatttacgttcgaatac

SEQ ID NO: 33490 - DNA, 265 bp, Gossypium hirsutum
  Clone ID: LIB3145-013-Q1-K1-A5
cccactcggcctgagcgtgggactgctacctgtgagactaacctgggtcacagattaagcatcatatatactggaataacttatgctagactgatgacttgcaaacaagccctgagcgacaaacctgctactcggtaggccattgggttgactctgatccatgactggacattatgaaaaggagtacagtatgggcgactgtgattctcacagaggaaacgaatttacaaccatagaagaaacttgtctggcgagcatctaaaca

SEQ ID NO: 33491 - DNA, 301 bp, Gossypium hirsutum
  Clone ID: LIB3145-013-Q1-K1-B1
cccacgcgtccgaaataatttgctcattatataaaaaaaaaaaaaaaaaaaaaaaaaggggaaaataaaaaaaaaaaaaaaaaaaaaaaaaaaaaaaaaaaaaaaaaaaaaaaaaaaaaaaaaaaaaaaaaaaaaaaaaaaaaaaaaaaaaaagggcctccctttaataaaaattcaaagtttatttacccacactttcaacactataaattttttatatgttacccaaatttaatttcattgcccatattttaaaaacgccggaactgaaaaaaccttgaattcaccaaattaactccct

SEQ ID NO: 33492 - DNA, 362 bp, Gossypium hirsutum
  Clone ID: LIB3145-013-Q1-K1-B11
acgcccactcctccttccactcatcccttatttcttattttgctttcatttttttcttttcgcgtcttgttcttctacttattgtatgtgcacccacattaaaccactaaaacttcatctcacttgaaactttttttcttcttttcaaagaacaccgacacctatgttttagttcttgtcacataattattttattccaccttgcaagtttcacaaaacctctcctctttatttactttcttcatcttatgaacagaaaactaatttgttggatctaacaacaccacctcttttattttttgaatggtggcgaatggaatttgaaaaatcaacttctcttttatgttttcccaaaacaattt

SEQ ID NO: 33493 - DNA, 436 bp, Gossypium hirsutum
  unsure (1)..(436): unsure at all n locations
  Clone ID: LIB3145-013-Q1-K1-B12
cccacgcgtccgcctcaacatttcagaggtggtacctggagcaatggacattgtcaccatataaagctgccagactttggtccatttcctgataaaactgaagaacacgtcgacatagtacgagatgtgttatcaaagcatccaggaagggaacaagtgattgaaacaatgaatgtgactcccatgacatatcaaagacaagatggccatacatctttgtatcatttcggacgaggaaatgaaacggaacctccgggcgaagattgtagccactggtgcttgccaggggtacccgatttgtggaatgagcttctctatgcactttttctcaagtgggaatctgatcactcctccactccaactngattttcttctcattcttgtacatagaaattcatatgaagtattgagtgtgttgcatgcagtttgaatcaag

SEQ ID NO: 33494 - DNA, 415 bp, Gossypium hirsutum
  Clone ID: LIB3145-013-Q1-K1-B2
ccggaaaaaccggagggacccacgcgtccgcacatactacctaaagaaccttttttttttatcaattctcaattaaaacatcactttacgctcacggggaaatataatgggtgatgacaacgttcacatcaaccttgatgtcattgtccatgtcaactctgacaagacgaccactaccgatcattttatctacaagctagacagtattgacaagcgtgtgattgaaacgttcgataaagaggctgcttaaatgaacaaaatgtcatttaactatgctttgatgcttcacacgcttaatgctcatcgtgaacaaagtatcaccattgatattgccctgtgaaagtttgacaccactaaatactattgcacctttattgatacaccttgacaccgttactttaataaaaacattatt

SEQ ID NO: 33495 - DNA, 352 bp, Gossypium hirsutum
  Clone ID: LIB3145-013-Q1-K1-B3
cccacgcgtccgcccacgcgtccgcccacgcgtccggccgagcaaggaactggcgtaggcgagcgtcgattcgagagaagtagcgcaaaaccgtaactcgtcttcgaggggttcgagttcgcattgtttgatcgtgtattcgatagctttggcttgatccgagtcttttgagaatcggaaaaaatcaatgatttgtgcgatttttgccgatgaaaaagggattgagttagcttcttctctagaaagtaaatgaggtgaagttgaagggtctttgttggtgagataaatagccattgttttaccaactttaagatcttccatcttgaagaaaattttacccgaaggatctata

SEQ ID NO: 33496 - DNA, 152 bp, Gossypium hirsutum
  Clone ID: LIB3145-013-Q1-K1-B6
acggtaatgttatcctattaacctccaacttatactgtattatcatatatgcccgctactctgaatttattaactgtctcttcaacttttacttcgacttcacaaattctaccaaactcaattcttataacattttattattcaacttcaaa

SEQ ID NO: 33497 - DNA, 289 bp, Gossypium hirsutum
  Clone ID: LIB3145-013-Q1-K1-B7
gcgaccgccggaatcggtcgacccagcccgttgttgttgaaactcactctataatggcggtcccggtattaccccacgctgtgaaagaactgcatggatcaccattgaactgattttggagaggggaccctttaaccttaattatatagtagagcaccttaaaggctaagtctgaggttgatacacttaccagaacgataatagattgggtctactcttgattttaagacttgtgcggttgatacatggttcagagagcatatcatgcacatgttgtgtaagacttgaa

SEQ ID NO: 33498 - DNA, 276 bp, Gossypium hirsutum
  Clone ID: LIB3145-013-Q1-K1-B8
cgtagctgcaacattgcatctaaacaagattgagagggaagataatctcatggcagccgtctcgtatttcgacaaagatggcaatggctacatcactcaagatgagcttcaaaaagcttgtcaagaattcggttttaaggaaatccacttggataaaataaccgggaaagttgttcaggccaatgttggccggttgaataccattgagttgggggcattaatccaaaaaggcacccttatttttgttaaaaaaaccttcggaataaaaaaggcttt

SEQ ID NO: 33499 - DNA, 298 bp, Gossypium hirsutum
  Clone ID: LIB3145-013-Q1-K1-C5
tcgcataggccaatggccatatttaatggggtaccgacagaaggcacaggggcctgtgaaagaactaagctatgccaggtggaaaactgctgagtctaacagtgagactcaagattatggaggtatgatatggcagaaatccagaatgcatatacaaactggtgaacccaagaatccttggatgtcaattactaacctacacaagatatgcgggtttaaaatttacaaacttgatctaagagctgagtaaaccacgtaaaagatataatgcttatgaagttaattttttcccttttag

SEQ ID NO: 33500 - DNA, 192 bp, Gossypium hirsutum
  Clone ID: LIB3145-013-Q1-K1-C8
atcttataagattaataattttagaccttataataacttcaacgagatcctggcgcttgtcaattacttcacgctttacacattcgatgaaccttgattagctctgatatactactccattctttagcttcatacccataagactttacacattcggcgtattttgttgaacaaactcacgcatactaactt

SEQ ID NO: 33501 - DNA, 412 bp, Gossypium hirsutum
  Clone ID: LIB3145-013-Q1-K1-D3
accacacgtaataattttaatatccatacatattttttaacacttaccaaaatttactgcggacgtgctcattctgaaatttgtactctaattattataaaattttgttcctacttagaccaaattatcacctactactatccaaattttaaaaataactatctttttcattcattgttcaactaaacttggactctagatgaaaaagttataaaaactgttgatcttaactacaacgtgttcaccttgttttaacaatttactacctactcagttgattaccttttacataataaattccagactttgatcattggaaattttttaaaaaagtggctcctcatattataacttttttaaccctcaatccattacaactttttgaactaatttttcaccctttttttttttt

SEQ ID NO: 33502 - DNA, 282 bp, Gossypium hirsutum
  Clone ID: LIB3145-013-Q1-K1-D4
ggagtatgctaaaacactacgggattgaattcaatccgtgttcatgttgtcaaatgtcaaccagaaacaatataccgaaaagttggtagtgccttcctaacttaattatggccacaaagacaaattaacattagcagagtgaaggagacaaacaagattgtaatccaatagcatcaaaacccgtttaatgcagagtcctctcttccacccctccccatacaatcacaagtgatacgagaaagcaaagtctaagatatacaaggaaagaacttgatctactta

SEQ ID NO: 33503 - DNA, 272 bp, Gossypium hirsutum
  Clone ID: LIB3145-013-Q1-K1-D5
ataatctatcttgaccaacattaataccatcaacacgatcacgaacggcacgaccgggggaggctttatatcctgtactgcttaacttacggactctctctaaactctcaactatcatgaacgaggaaacgacatcaaaacctcatacttaccatactctcaacaacaacagcaacacagaaaaagacttagtgtaaaggaactaaaagaagccccaaccctgactcacatgatcggtaaattcaataagtgccctaccacactatataaat

SEQ ID NO: 33504 - DNA, 356 bp, Gossypium hirsutum
  Clone ID: LIB3145-013-Q1-K1-E1
gctggctgatccctggtatttgatcacggattaaggagaaactcccacccacggattctaggctgggaccagaccaacggcatttggggaatggaaaatatgatagagcaaatgctgagaaacaacggttggtaaggaggcggagaatgtgaagaaaactacatgaaaatgggtggaagcctagatggctccatcaagatagtgaaaacggatccttacgctacacgggccggtattgggaagcatgaaaacaacgaaaatgggatggatgtccaaatatatatggtgtattcgacgaaaaattagatgattggtgtgaatgatcctgatttcaactttagatcaatattgagatg

SEQ ID NO: 33505 - DNA, 457 bp, Gossypium hirsutum
  Clone ID: LIB3145-013-Q1-K1-E10
cccacgcgtccgcccacgcgtccgaacaacccaaagctgcaattcacgaagaaatactccgggggagaaccgaaatcgccggagaaacggccgccttccacggcacgcaagagaataataagcaacgcccgtttagaggagaagtttaggacgacgatgacgaagtcagaagagatatccaagggcgggcacattactaggcatgtttttagaaacaaggtacggagatataaacttttggatgaggtttcaagttaaacacacacacacacaaacacacatataaacatacaatttcttgtctgaaaatgaaactacaagagactgttttatggtttggtttttctttcattttccctcgatccaaacagataaaaaaaagtgtaatttgggagaaagtattattggaatgatggtaaaagaatcatggatatattaccatcgatgtcatgtcata

SEQ ID NO: 33506 - DNA, 346 bp, Gossypium hirsutum
  Clone ID: LIB3145-013-Q1-K1-E5
aaaaaagggcgacttttctaattaaaatttacctgtctcttaaccttgtttgtagtagagattagtgaaggaagaaaacggaaaaagaagggaaaaaatttcctttagaaaaaaaaaaaaaaaaaaaaaaaaaaaaaaaaaaaaaaaaaaaaaaaaaaaaaaaaaaaaaaaaaaaaaaaaaaaaaaaaaaaaaaaaaaaaaaaaataaaaaaaaataaaaaaaaaaaaactataacgaaaattaaaaacaatagaataaaaaaaaacaaatggcggtacagagaaaaaacctgctggtaacaaattatacttattgacatttgggggttgagtttttaaaatttta

SEQ ID NO: 33507 - DNA, 348 bp, Gossypium hirsutum
  Clone ID: LIB3145-013-Q1-K1-E8
acggtgaaaacactgacttctaaagaatacatgatcgccaggtgggcacctaaggtgaattgttgaataaactggaaacagtaatgtgtttaaagagtcaaaatatgtaataaaatgtaaggaattgtgatgtaataaaatgtttgaatatatgaatgttaatgctacttaataattggtaaacaattaatggaattacaataaaaaaattgaaccatgactaatactttcaatggtgttaaaataaaaacttggacaagtgctgaacctgtgaattgttcgaacattcacttttaagatattaacgagaccaattgttggtctcctattataattgatcagaaatat

SEQ ID NO: 33508 - DNA, 423 bp, Gossypium hirsutum
  Clone ID: LIB3145-013-Q1-K1-F11
gccactcttacaaaaatttttaaaaaaatgtcaattgagaggtttattgagaactgccccggtgtgagccccactgtgaatgacacccagaatgtattccactctgataacacctatcttgctactgagctcgttcatgagacctatcatggagcctatcaacccgttgctgtaccctatgctttcaagactgatttccatactcatatacatgtgcctatactggtggtattgcttggaaacaatggatgaaccattggctgaagcgtcatcgctagcgttgaagctatctattaggctacttatggcgctgctcatgacgctgttcactttgcttcattctctggatcatcgactatcccatcaacgatccacattgggtactacattgatgctccaatttatagtccatttaatatggtg

SEQ ID NO: 33509 - DNA, 395 bp, Gossypium hirsutum
  unsure (1)..(395): unsure at all n locations
  Clone ID: LIB3145-013-Q1-K1-F12
gcttgggggtgataactttgatggtctttgccgggatttgcatcctggcccggttagtgtgttacattggagtggaaaagggaagccatgggcgaggcttgatgctaaaacaccctgccttttggatgctttgtgggcatcttatgatctcatggatacttcatttgcttttgattcttgaatcgaatgccaaaattatgcttcgggtgtaagtgtttgttggctaggaaagtgacggaatcgtcgagaaacggtggagctataaaagctctaagctgcaataatgccagggcggagctttagctatgtgtttacaaacgattgacggattaaattaaatgtgaaccaaattgatttaatcctcaacaggtttcaactntgattataggagtaac

SEQ ID NO: 33510 - DNA, 323 bp, Gossypium hirsutum
  Clone ID: LIB3145-013-Q1-K1-F7
tcgacccacctcaaattatactcatatggagggatgatttgagattaaaacagcactggggtatgcactttcgccaaattacttaacagagcatcaaggtccaaacaatgttgattcatcatacaaacgataatggcacagatagatgactaacaacataatgatctcaaagcaaatgggtgcaagaactctctctcagtcctctgcggaaaagagattcagtcacccaatgatctaagcatgcttaggaattcgattaagccgtattagcctctctaattgctatttatgactaccctattttgaactatctttgtgatgtg

SEQ ID NO: 33511 - DNA, 293 bp, Gossypium hirsutum
  unsure (1)..(293): unsure at all n locations
  Clone ID: LIB3145-013-Q1-K1-F8
gcgaccggccgatcgggggacccacgctcaaacaatgggattggtcaatggattcgaagtagagccgctttggggaacacttactcttgcaatatgtaaaaaatctatcgggagcaaatgtcacctgcaacagcctaccgctggggatatcatggcagtcatgatctaatgaagctttaacangagcatgtccgatcaaatactttatggaattgtgatcagtatatatctgaattactatctttgtttaaggcagatctgtatatacctttgcgggatatgaaccacactac

SEQ ID NO: 33512 - DNA, 374 bp, Gossypium hirsutum
  Clone ID: LIB3145-013-Q1-K1-G1
catgaaatggttccaggtcaaatattaatgtgtcattcttaacaagtcccaaaatattttgcgctgtgtaacatttcagaatgagtttatttttagatttgaatacctgatttttgctattttatatatatcagatcttattttcctgaacaaatttattttatgttttaaggtggaatcctaagtttaaaaataaaatattttatattctaaattttttctaatatattttttttttaaaaattcttcttttttaaaatgataattcttatacaatccattttaatccttatacccaataattctttaatttatattatatattttttaataataaattggtgccgcccccttttatataatttcaaattttt

SEQ ID NO: 33513 - DNA, 249 bp, Gossypium hirsutum
  Clone ID: LIB3145-013-Q1-K1-G4
agtatgtattgtgggtctccaagaatacattgtattagatgatcagacaatcaacttcgtgatcggtagaataaattcaacaagaatcactcacaccactgtatcgaatgacgaatctttaaagtcacatgccattcttcaacttgccatcaagagatcatcttatggcacctaatcaaaacctcctaaacctgtagggaaactttacttcatagatcttgcttgaaaagagcgtggtgctgatacaac

SEQ ID NO: 33514 - DNA, 296 bp, Gossypium hirsutum
  Clone ID: LIB3145-013-Q1-K1-G5
agaactcaaataaaaaaaattaaccctaattaaattgcccccaaatacgcgccccatgttcatagatggtgaccattatcagcattcttgctcatgagcgaacgcttggtgcaacattatgatgctcattgacggggatcgttgtattggatcaacgtaaacgcatatatgattccgttacaaactatcaatctgctatgaaagaacctatatttggaaagaaatctcacttaaagtttgcccttctattgaacaaaaccgaggaccatatatttgtaccagtgattgaagccatt

SEQ ID NO: 33515 - DNA, 220 bp, Gossypium hirsutum
  Clone ID: LIB3145-013-Q1-K1-G6
gcgaccgccggaattcggtcgacccaccctcggacctgcgacctggctgtgatattgtggaggtaggaagggggatattttgcctgggaatgctttttatggacgatctatatttacaggtctaaataaaaagtagatgctgactggatgatacaatactgtcttttattgcttgttggcttcctattcgttacatacttgtgttatgttggtgacaatt

SEQ ID NO: 33516 - DNA, 271 bp, Gossypium hirsutum
  Clone ID: LIB3145-013-Q1-K1-G7
ttagagaaagtcctgttgactgttaaaccacaatatggatttggtgatgatggggggccggctactttcggagaatgctctgttcctccaaatgctaccctccatataactgtcgacttggtttcttgtaagaatgtttcttatatcacaaaatacaaaaaggtctcgaaatagattgtgaaagaagcagacggttaccaacgaccacttgatggaacagtgtttcaagtcaaattaataggaaaactaccgtattgaacgatcttgataa

SEQ ID NO: 33517 - DNA, 245 bp, Gossypium hirsutum
  Clone ID: LIB3145-013-Q1-K1-G8
cacctcgattgttatgaaaacaaactaagttgtttttgtcaagcaagaaacccaaaattatatttgtgaaaagacaaaattattatttctagtgtagtgaattttaataaaaattaaaaagtcaacactttgggattttaaagatcatttggacttgttgcgcgtacccgatattgagaccgcataacttattgacgtgacatgagatttgagtgacgacagtcgaccgattcagcccgattgta

SEQ ID NO: 33518 - DNA, 244 bp, Gossypium hirsutum
  Clone ID: LIB3145-013-Q1-K1-H12
atttccttgaaacatccatgtggccacccttgcgaaagccattccttttttaagactgtgggtaatccactttgaaacgaccttgctgtggtagataaattagacgattgaatctaaataaattaggatgaaactgttttaaattgttaaaaaaaaaaaaaaaaaaaaaaaaaataaaaaaaaaaaaaaaaaaaataagacgtaaattttaaaaagaaataaaaaaattgatatggggcatttt

SEQ ID NO: 33519 - DNA, 224 bp, Gossypium hirsutum
  Clone ID: LIB3145-013-Q1-K1-H3
ctgaaggctgtaatcaagcgcattgaggatcataatattaaagagcaataccctgctcgtccacttgataaacaatttctcctatcacaaaaagttaaagcacacaccaatcggatcaactgaaactgaaaatcctcaacctaagattgcttgtccctatacctcacaatataggacacgaggcacttactcttcccctgacaaatcattccacactctaacca

SEQ ID NO: 33520 - DNA, 424 bp, Gossypium hirsutum
  unsure (1)..(424): unsure at all n locations
  Clone ID: LIB3145-013-Q1-K1-H4
gttcttcggtgcagccattctaataaactccattaaagatatgctgggtaagaaatggggatcctacattccacttccgatggcaatggcaatacctttttacctcggcccgtactttgccattgacatgtgtgtcggaagtttgattttgttcgtttgggaaaagttaaacaaagaaaaggccgctgcgtttgcaccagcagttgcctccggtttgatctgtggtgacggtatatggactttgccaagttcaatacttgctctagccggggttcaaccaccaatttgcatgaaatttctctcgaaggcaacaaacactaaggtcgataatttcttgaactcaaaaagttgaatgcattcgtacaaaatctatagatggttacacttgacacgtaaaacagcatcgncaattatttataatttt

SEQ ID NO: 33521 - DNA, 469 bp, Gossypium hirsutum
  Clone ID: LIB3145-014-Q1-K1-A11
tcgagccacgcgtcacgactgacgatagctggtactgtaaattactatgacattagaaagcagtgtgaaggagacgtgtgtgacgatttctcggacgtcgagacatttctgaacctgaaatcagttagagaagcactcggggtcggagacatcgattttgtctcatgcagcagcgtggtgtacgaagctatgcttatggactggatgagaaacttcgaagttggtatcccttctctccttgaagatggcataaaggtcctcatatatgctggagagtatgaccttatatgtaactggcttgggaattcaaagtgggttcatgcaatgacatggtccgggcagaaaggtttcggttcatcccctattgttccgtttggtgtcgatggtgtagaagccgggaaactgaaaacccatggtcctctcactttcctcaaggtccatgatgctggtcacatggttccaatggatc

SEQ ID NO: 33522 - DNA, 103 bp, Gossypium hirsutum
  Clone ID: LIB3145-014-Q1-K1-A8
cccacgcgtccgattctttgggaatgaaagtaaactcaatttcctggaacctgtgtttgagactttggatatctgtgataattgctccaatgactgatttatc

SEQ ID NO: 33523 - DNA, 439 bp, Gossypium hirsutum
  Clone ID: LIB3145-014-Q1-K1-A9
acgactgacgatagctggtactgtaaattactatgacattacaaagccttgtcaacgagacgggtggggggatttctctgacgtcgaaacatttctgaacctgaaatcagttatagaagcactcggcgtctgatacatccattttgtctcatgcagcagcgtggcgtacgaaactatgcttatggactggatgagaaacttcaaagctggtataccttctctccttgacaattgcatacaggtccttatatatgctggagagtatgaccttatatgtaactggcttgagaattcaaagtgggctcacgcaatgacatggtccgtgcaaaaaggatacggttcatccgctattggtccgattgtgtcgatggtgtagatgccgagatactgaaaacccatggtactatcactgtcctcacggatcatgatgctggtcaca

SEQ ID NO: 33524 - DNA, 273 bp, Gossypium hirsutum
  Clone ID: LIB3145-014-Q1-K1-B12
atgcagtcaacgtcaaccaaatcatcatgcaaaaaaagaggataagccaaagggtactggagctgttgttaaagagtcaggaagcaaggcaaacttacattcatttgagacaacatgcagtactgtagtttactagaaaacgaatggaattgatcctgttgttttactttgatgattgtattccattttctccaaaatccaaataactctacctatttattgaatcgaggaaaaaaaaaaaaaaaaaaaaaaaaaaaaaaaaaaggcgaacta

SEQ ID NO: 33525 - DNA, 235 bp, Gossypium hirsutum
  Clone ID: LIB3145-014-Q1-K1-B7
caaactcgcattctttgctgtagtagtagctatatctatagcattcacaaatggataggcagataaacaagcaaggttgctagcagatgtgggtgttgattgctgcctttgtctcccacaatatgttcatcagtaggaccatcactgtgctctgcgatgagaataactactatacaaattctgatcctcatgctggaactcacgcttgaagttcacattgcagaccaccatgttc

SEQ ID NO: 33526 - DNA, 428 bp, Gossypium hirsutum
  Clone ID: LIB3145-014-Q1-K1-B8
ctcaggggcgacaatggcaaagataaaggggaaactggcattatcaaacgcgttattcgctctcagaatcgtgttattgtcgaagggaaaaattggtaaaaaagcacataaagcacggaccaggtcatgaaggtggtatattcactgttgaagctccctttcatgcttcaaattttcaagttcttgatcctgttactggccttgcaagataggagttaaatatcttgaaaacggaactaaggtgagagtgtctagaggtataggagcatctggttccataattccccgccctgagatcttgaagatgaggactacgcccagaccaactgttgctggtcccaaagatactccgatgaatcttgtactggagaagacatacgagcctaagtctgggagggcatgcctgaactataacatattgacgacgt

SEQ ID NO: 33527 - DNA, 389 bp, Gossypium hirsutum
  Clone ID: LIB3145-014-Q1-K1-C7
ctggattcagctgtacaattcctcacaaggagaccgcattgaagtgctgtgacgaggtagatccggttgcaaagtccattggagctgttaattgcattataaggagacagagtgacgggaagttgtttggttataacacagattatatcggtgctatttcagccattgaggatggattacaagctagatataacatgagcagtgcagccggatcgccattagccggtaagctgttcgtggttattggtgctggtggtgctgggaaggcactagcttacggtgcaaaacaaaaaggagcgagagtcgtaattgccaatcgaacctatggtacgatgcacttgtttttcttgttgtaacattctaacaagagttattttttgttttataca

SEQ ID NO: 33528 - DNA, 310 bp, Gossypium hirsutum
  Clone ID: LIB3145-014-Q1-K1-C8
cccacgcgtgcggcacttgtgctgctatgactcccaaggttattgtttatggtgacttgtcacaggagacaatcatgaatgaagtgccatctctgcacaaccatgtaatggcagaaggttcagtgctcaaggagtcttttttcccccctttcaatgtgccatcaaaagactcatcagaagcatgttcttcaaatctagctcaaggtgaagacttgcaaccatcatgttgatctgtatgtgagaatcttggcagctctacaacagataattcaactgttactacttgtggcaaagatagtgactgcaatga

SEQ ID NO: 33529 - DNA, 414 bp, Gossypium hirsutum
  Clone ID: LIB3145-014-Q1-K1-C9
cttgctttatgaagaacttgccccaatagctatcattaccagcgcatgctgcttattaggggagcgatgaccgtacattgtcttttcacagtctatatgactatactgaaaattcaggaagaggcaagaattaaactgcatgcctatgtcctgtcaaggtctttggcagttgccaatacgatgactatgaagaggaagacatctatagtgaagtgaaagaagaccacgaaaaatatgaatatgatctacggatgaaggcagatcatgcgagtgagaatatgaaatccattaaccaaatgtaatcttcatacaacagttgtgtgataaaagcctctgctgtataggtttgagaacgttatattgccaactactcttggatgattgctacaaatattgatgttctagactataaca

SEQ ID NO: 33530 - DNA, 307 bp, Gossypium hirsutum
  Clone ID: LIB3145-014-Q1-K1-D2
ggagtatgtcaggagagacatcgcagacaaagaggagaccttgcatggaaacagagaatccagcagcagtcgcagaaagcgagaaagggatgaaattttagacccgcgtaagagagttgagcaacaaagaattagagacacttttgatcatcattcagttcggcacaaagacgagatttggttgcatagagagagggttgagaggcagcgggagagggatgactggaataggctaaaacaatcgcatgatgaaagtttatcaaaacgggagagagaagatagacgaggtccagtgaggagtggacgt

SEQ ID NO: 33531 - DNA, 341 bp, Gossypium hirsutum
  unsure (1)..(341): unsure at all n locations
  Clone ID: LIB3145-014-Q1-K1-E3
cccacgcgtccgcccacgcgtccgccgaaaaggtactggtaattaactcttttttccaacttctgttatgactgtcaatcaactcatcaactttagcatcgcgcatagaattaatttctgntgattaatgaaaaaaaaataaaaaaaataaaaaaataaaaaacgtcaaaaatgaaagaaattaaggagcttcttttatggaatagaaaacttggaagtgcatacttatggtctctgaaaactcatttggaaaggagcttttctataaggcaggtgttcatacagcattggctgatatatctcctagaggcactaaattggtttcagaaacaaaacgaatg

SEQ ID NO: 33532 - DNA, 453 bp, Gossypium hirsutum
  Clone ID: LIB3145-014-Q1-K1-F9
ccaagccagagaataaagactcgttatctatgattatcaacccaagggcagtctattctccctgattcacggtgatacctcctgtgacaaactgagttaagctgcgatttaactcggtgttaactcgggttgcacattaattccttgggtttgccgcaaagcatatgatatattaactagcgttaatatagttgaattataaagcactttctttaatgcatttgcatgtgcaggatcgaaatcaacaagggctaagccactccactggacctcgtgcttgaaaatagcagaggacgttgcacaaggtctcgcctacattcaccaagcatggagactggtccatggcaatctcaagtcctctaacgttctactcggacctgatttcgaggcctgtttaacggactactctctggcagtcctaatcacacccacccacgatgaagaccccgactt

SEQ ID NO: 33533 - DNA, 413 bp, Gossypium hirsutum
  unsure (1)..(413): unsure at all n locations
  Clone ID: LIB3145-014-Q1-K1-G5
cccacgcgtccgctctttgaaccttacgtccttgagtaaaaaaaccttgtccaagtgtcacggccaaagtgcaaagcccgtgatcatggcataagatgtgtcccatggaggtctatcgattagatggagaacatttagcccacgagaactggcccgattcaaggaattgttggagaagcctgtcagattgaagcctgattggctcgataatgaagacatggtaacttaggctaattttggtaattaatcttagaagatatagggaatcatatcttgtaaaaattagattagatttgatatggcatatcttataaattcttaaaattaggggatatggttaatctcgtccggcgatgtaaatgtttcttgaccgncggtttttgggagctcaactataaatagagagtctcccc

SEQ ID NO: 33534 - DNA, 218 bp, Gossypium hirsutum
  Clone ID: LIB3145-014-Q1-K1-G7
ttcaaaaggtcacagaatctaacctctgttctagagggaaagaacactgtggggaggtcgggaccatctaaccacgcttgatctcaatacttttgacttggaccttattcaccgccctgatcaaaattgagcaggaaccttttaatagccttaacttacaagaggagagtgctggcatttttatggtatgaatcctgagaatctctctcattatgtta

SEQ ID NO: 33535 - DNA, 310 bp, Gossypium hirsutum
  Clone ID: LIB3145-014-Q1-K1-G8
cgacggtggttcggcgacccacgcgtcgtttttttaacaatgatggacactgctaaacactttacataggacagggttggagcttgattggttgggatatttgaaaggatttgtaaatgatttagataatgtgaaatgcaaaattagggttgatggatttaagtattaggctgttaaggctagaaattggatgatattgttgagaaaattagtattgtagatactattagggataatgcaaattgtaagatggggattctaaataaaaagattattgtaatggatggaagaatttgctataatgagtttt

SEQ ID NO: 33536 - DNA, 296 bp, Gossypium hirsutum
  unsure (1)..(296): unsure at all n locations
  Clone ID: LIB3145-014-Q1-K1-H1
gtcctcccaccgaccggagcaattatgtcaactatctatgatgaaaaaaaggatgaagacggatttctgtacgttacatacagtggagaaaatacatttggctagcagatcatgcagggaccttatttccatgctatagtttacatttaattgaataaattaataattgtggcattctgcctaatatatgatatgattcctcggaatgcctatacgtgtatagtttcaccgtacataattccatgtcaatctaaaatgtcggaactattgctcaaattcnnnanannnaannnnaa

SEQ ID NO: 33537 - DNA, 424 bp, Gossypium hirsutum
  Clone ID: LIB3145-015-Q1-K1-A10
cccacgcgtccgcccacgcgttcgcccacgcgtacggcggaggcatgggaactataacctgagggttagagctgatatcaatgatgtgattgcagctttggccacggaagctggctgggttgttcttgctgatggaaccactttttcatcaagatctcagagttcacctgctgctggcacttctgctggcatgacttcatcctcctctcaaatggtgtcacaacagattccacctccccctgccactttgcaaagagtctcttacggctatcgcaccacagaggagtacaatgcttgacggatgaagagtgttttcatgcctaccccttcaccttatgatctatcctcaactgccccggctcaaagttcacgcgtggatgctgatggtggagaacaaacagaaagactttctcttattgctggc

SEQ ID NO: 33538 - DNA, 375 bp, Gossypium hirsutum
  Clone ID: LIB3145-015-Q1-K1-A2
tggtcctcctgcaacagctcttgggtttaatcctccagatattgggataatgcacaagccaccacgcagaagtgatgatgctctcattaactcttgggtcctcttccgttacttgataataggttcatatgtgggcatagcaactgttggcatcttcatcttgtggtacactcgggcttcttttatgggtatcaaccttgtgagtgatgggcacacactagttgaactgtctcagcttcataactggggagagtgctccacatggtcaaatttcactgtggctccatatatggttggtggaagccaactgatcactttctcaaacccatgtgactacttcaccgctggtaaagtgaaagcaatgactctggcatt

SEQ ID NO: 33539 - DNA, 415 bp, Gossypium hirsutum
  Clone ID: LIB3145-015-Q1-K1-A5
ggcggtccagatcaatttctgtagaaggcaaggttcgctccagcagtgaaatcgatgacgtgagaaaagatgaattgagacaccgtgattgaaggcgctcgcgatcgcgatcaggatctgctgaaggtaggcattacaccaaagagaggaatgagagaagcagagataagaaatctaagcatcgggatagaaggcggtcgaggtcaagatctgctgatggcaagcatcgggatagaaagaggtcaaggtcaagatcttttgatggcaagcatcacagaggaagcaggaggtcccccagaaattcagatgaaactagattaaaacaccgacggcgctccaggtcaaagtctactgatggaaaacatcgatccattgataaagtagatgaaagatcaaaacgtcatgacaaaaagca

SEQ ID NO: 33540 - DNA, 404 bp, Gossypium hirsutum
  Clone ID: LIB3145-015-Q1-K1-A9
ccacttgagaataggtactcattatttatccaatttcccgttttgatcatatttaaagctaatattgaaaggaatcatttaatttaattcatctatattattgcccaagttgaaaaatgaaatatcatttttcccttccaatttaaatgctaatcacagacagcctgcgacagtgagtttttattgcataaccttcattttcaattttttaaaattttttattgcataacctctctctcccccattctcagtttctattaatctttttaattttttttttgtgagttcactcaagaaaggttagtaaaattttgttcagtgttacttgtgttgcaaatgcttacatgttgagacatggattttattgttgtatgttgagtttatatgtaaaaggtactgaatgc

SEQ ID NO: 33541 - DNA, 413 bp, Gossypium hirsutum
  Clone ID: LIB3145-015-Q1-K1-B10
cccacgcgtccgcccacgcgtccggtttttaacaatacaaatagataaaaattttagctaaagaattagtttgctctttgatctaatgtataaagattaatttgtctattttctgaatatatgaagcaaaatgcaatacttttacttgcaaaaaacatatgatacgttaggttgaattatatgaattcgtgcaggtttcatggtcctatacttatactagaccagggtacataaaaaaacaacaccagtctgttccgaaagattggtggacggaagatgtatcggatctcgatatagaccttttccgatgcataataacagcagtaagatcgacatatataccaccgccacagctcattggtgaagctttgcatgtgtatgcatgtcgttggctaccggacactacaaagtct

SEQ ID NO: 33542 - DNA, 393 bp, Gossypium hirsutum
  Clone ID: LIB3145-015-Q1-K1-B2
cccacgcgtccgaaaaaaactgaagtttcttgaatcacaagctgaattctgtagggactggtgaaggtttgtgtttgtatacgtttgtatattgaagacaacgggatgtgcacgcttgtttttggaataggagaaccaactcaatccagcgccttcctccttgtcagtctttttgaatctggttgatggggatggttcaaatgaataataacggtcccgtggctggtggatgggttgaactgaatacacatatctgtgatgagaacacgaacataagggatggagtcacgggtgaggggcagggcctctctgacgaagatgagtcacgtattaatgaggatgtggaaaacagaaataatgggaagaaagcggtggttcagcttcgtggtcctt

SEQ ID NO: 33543 - DNA, 387 bp, Gossypium hirsutum
  Clone ID: LIB3145-015-Q1-K1-C7
cccacgcgtccgtgcttatgggagcccaactaaaacacaaaaaattagttttattttagttttagatatgcgttttcttgtctttagttcagtttagtttcttagaaaattactgaatccaacttttataaaaaaaaaaaaaaaaaaaaaaaaaaaaaaaaaaaaaaaaaaaaaaaaaaaaaaaaaaaaaaaaaaaaaaaaaaaaaaaaaaaaaaaaaaaaaaaaaaaaaaaaaaaaaaaaaaaaaaaaaaaaaaaaaaaaaaaaagggggggggcctttttaagggaccaaattttttggccgggggttgggaaggtaaaattttttttttggggcccccaaaataaattaccggggccgggttttaaaaacggggggaggggaaa

SEQ ID NO: 33544 - DNA, 439 bp, Gossypium hirsutum
  Clone ID: LIB3145-015-Q1-K1-D6
atttaacatttagtcgtcttgaacccggagggaagttggtcatgggtttcagaaaggcttcagctgcttcagcatctgagcaggaaaatgaagccaaaaatagtaatggagtttctacccatggagatgctgaactggcagatcctagctcatggtcaaaagttgataagtccggatacatagcaaaggaagcattaggaaccaaagtagcagttcccagaaagaggaagaatagtgtgctgggttcaaagagtaagcgactgagaattgataatgaagacatgatagagctgaaactaacatgggaagaagctcaagggctgctccgtcccccgcctaatcatgtagccaatgttgtttcgattgaaggttttgagtttgaagaatatgaggatgcgcctgttttatggaagcctacaatatttgcaactgataagtc

SEQ ID NO: 33545 - DNA, 394 bp, Gossypium hirsutum
  Clone ID: LIB3145-015-Q1-K1-E11
ctaaattgaaagagccatatcctcccaaaatcttcacttctcacctcctctcctctcgccggcccgcctctctctcatggcgttctttggctctcaccagcgctgtcatcaactccactacagattctattttttgggagtctaagaacgcaaattaggtgttcattgctacattgtcaagaatgggtttcggctttcatacgtattggacatagggattaggtgcctgatgttcttttgtggcttttacccggatggtttactgctttgttcacgtgctctttggtgttttgatttatagtgctatattagatttctgttgtttaatttttgagtttgggaattaggtgtagattttggagttatccatgggccttttcttttcatttacttt

SEQ ID NO: 33546 - DNA, 181 bp, Gossypium hirsutum
  Clone ID: LIB3145-015-Q1-K1-E5
aagtatacctgtttctcttgtaaatgatgttgatgatgaaaagtggccatcaaatttcacatattatcctggtctaaagtactcgaaacctggtaattcaaatggatcttcaactgggtgggggtggcatgggggatggcttacttgaaacttcaactggccttgcattcaaagaaatggg

SEQ ID NO: 33547 - DNA, 367 bp, Gossypium hirsutum
  Clone ID: LIB3145-015-Q1-K1-E6
cggacgcgtgggcggacgcgtgggcggacgcgtggggtggtgcaatttcatctgttcgtatcatcaactcagaaggggcaggaagtgtaacagtagccactgcttcaaaagatcgaactctgagactgtggaagtttgatgcagaggactctactgaccatcctgcaaggataagagcattcaagatattacgtgggcataatgcatctgtacacagcattgcagcaaagacatctggagacatgatttgctcaggttcttgggattgtacgatcaatttatggcggacaaatgacactgatacaaatggggacgcggtatcaatcaagaaaaggaaggttaataataaaattgaggagtctcaatc

SEQ ID NO: 33548 - DNA, 419 bp, Gossypium hirsutum
  Clone ID: LIB3145-015-Q1-K1-E9
cccacgcgtccggctttttgatgatccaaatacggtggagactattgtttcggtttacaggatcaatgatctctctgatcccaagacccgcttcaaagttgatgttaatgcccaagaaaaccggttgactggttgtgctgtgatttccgagggcattactgttatagtagtggaaggtggaagcaaatccattaagaggtatgggaagcttatgcttcggcgaatcaactgggctgaagctgtaaaagatgacaaggacggagatgaagatgaagacgaagagaaaccacctaacaagtgtgtgctggtttggcaaggtagcgttgcgaaatcaagtttcaacaagttctcggttcacgagtgcattaccgaagcagccgcgaaaaaggtatttgctgatgcaagagttgcccattact

SEQ ID NO: 33549 - DNA, 388 bp, Gossypium hirsutum
  unsure (1)..(388): unsure at all n locations
  Clone ID: LIB3145-015-Q1-K1-F12
cggaaaannngggaggacccacgcgacccacgcgttcgtccacgcgtccgattttaagtttttggattttctacgctaaaagaaaagaaggggtggtggacttacacccaagacaaggatttgatattggaaactatggaagaaatctccaaacaattctctaaaccagatgtgcgagtgatccatacaaaagtttccttatgtgtgtggcggtgtatctgataaactttatgagcagtgtttgctaaaagctgaaactaaataaaaagttattttgtcaattataccggctatctatgaaaacttgatcgagaacctatatatgtgtttaggttgtaaaacattggtaatgttgccgcactttccctaaaagaaaggtctgattgtt

SEQ ID NO: 33550 - DNA, 366 bp, Gossypium hirsutum
  Clone ID: LIB3145-015-Q1-K1-F4
gagaatttaagaggtgcagctggtggtggtgctggaggagggcttggtggtggtttaggaggaggagccgctggtggtgctggaggagggcttggcggaggtgccggtttaggacgtggagctgatggtggtgctggagcagctggaggtcttaaggttagggttcaaagtgggcttgggcctatattgatatgggtttggcttggcattacatggtagataatttaagactctctattactggctggcttgggtgatctctatgttgatcgaggatacaactgatcgtctgcaattattcaaaggtggatgagatatcgtctttttggggagactcttgaagagcgagaatctggctctaccatg

SEQ ID NO: 33551 - DNA, 420 bp, Gossypium hirsutum
  Clone ID: LIB3145-015-Q1-K1-F5
cccacgcgtccgattcgagattgttcataagtgattcgcatttgaaaatcgtcggtaatttaaaatgattggcatttatatttctctttatccttgaagactggcttaatgcaaatatatgcaatttttatagactcacggttgtctatggagaatgacaaactttgttttcaattgtttcttggctaatctagacgcacagaaatgattttgtttttacagtgctaccttgattgccactagtatagcttggactagaagctttactaatactaaaactgcagttagtcttcacagcaacatacgtacgaaaaagtgcctggcaacccaacctatctaaaagtgcagttagtcttcacagcaacatacatacgaaaagtgtctggcaaccaccaccgataggttgggtgaaaattaaca

SEQ ID NO: 33552 - DNA, 432 bp, Gossypium hirsutum
  Clone ID: LIB3145-015-Q1-K1-G4
cttggtttaaaacagaggatggggatgggtcttctttgctctggtgcatccatggtagcatccgcaattatagagtctactcgacggagaatcgcgatcgaagaaggactttccgatgaaccggcagcagctgttcatatgtctgcactatggatactgccgctttatatactaagtggcttggctgaggccttcaatggaattggacagattgaattctgctactccgaattaccgaaaaccatgtcgaccattgcggccaatatttacggattcggaaccttcatttcgaacctggtagcgagttttataacaagcacggatgacaatgttactaaaagacgacgtgaaaggttgatttcaagcaacatgaacgaacggcattatgattactattattgccttctttgctggcttgagcatgcttaaatt

SEQ ID NO: 33553 - DNA, 420 bp, Gossypium hirsutum
  Clone ID: LIB3145-015-Q1-K1-G8
ggcagggattttatcaagtttgctgcttacaattttggtaaagatcatcaagatattgcaaaatggttgccgggaagtcacttgaaaaaagtggtgctctatggttgcgcttcccttgataaaaataatgtcttcgctgctaagagattgcgcaagttctttaaaattcaagaaaacaccgtatgcagtcgatgcatgttaaaggattcatgtgggtatgctaataagagtgtatggggaatcggtaccaacaatttgctcctggttgatgtaatgaaagttatcactttgtatgctttagatttagtgcctgcaaaactcaccgttccggatgaggtaaaagattcaatcaaccaattgttgaagttggttataaaggtaagtcaacccccatgccaagacttctaaaatgtttctaca

SEQ ID NO: 33554 - DNA, 313 bp, Gossypium hirsutum
  Clone ID: LIB3145-015-Q1-K1-H10
cagatttattaacaggcagaactgcagctactttggagatgttcccttcttggcctatgagatatcagcaaacccccggaagttcaaaatcaggaggggaaagtacagattcaggctcagctttgaacactatctcaagcaaaactgagaaccagtttgaaccagactcccccatcagtaaaaaggcatcatcttcatatcatcaggctcttgaccagcagaatctacagcaacaacaacaacaacaagagatggcaagtgatccttcaagaacaggaacatcactgaatcaatcagctcccattgtcaaact

SEQ ID NO: 33555 - DNA, 332 bp, Gossypium hirsutum
  Clone ID: LIB3145-015-Q1-K1-H11
caataaaaccgattcagtgctttgtttcactggaaggcaggctcattcaagcctctcattttctggccttactggagagagtagcggagcagattaccaagattgtggggcttcatcaatgcttctcatgggagagcctccttggtgccctccatgtactgagagctccttccaatcatcaactcgaagcaatgctgtaatgcgttacaaggaaaagaagaagacacggaagtaagcatatgccaataacccatataaggaaacgtgtcacctgacatgtctattaggttggtggctttacaaatttctgggacttactgggcttcctttta

SEQ ID NO: 33556 - DNA, 307 bp, Gossypium hirsutum
  Clone ID: LIB3145-015-Q1-K1-H4
cccacgcgtccgctcagagtagatttggagggtatcaaactcttaatgaaagagaaaaatcattcttagcaaggaatcaaactattcactgtggttttgtgaagggtatgtcaagattatcaagccctggatttgaattgagtgaaaatgataaggcatacatgaatacttgtcgagttgcagtgtcttcttgcatttttggaagctctgactttctgagaagaccaactagcagattgattagtgaattttccaagaaaaatgtgtgttttggtattgttcgggatgagcaaacgctgtccaaact

SEQ ID NO: 33557 - DNA, 310 bp, Gossypium hirsutum
  Clone ID: LIB3145-015-Q1-K1-H5
atccgtcagggtacattttcccagtatgattatggagtcctgaaaaacttactgatatggggacaggttaaaccgccagcatttgatcttaacaacataccaaagtcattgccaatatggatgagttatggagggaatgatgccttagcagatgcaacggatgtgcagcgcactcttgaggaattatcgtctaaaccagaattgctttatctcgataattatggtcacatagaccttcttttgagccttaaaaccaatagagacatatattaccctatgattggggtttttaaggccgtgggaaaatcaa

SEQ ID NO: 33558 - DNA, 399 bp, Gossypium hirsutum
  Clone ID: LIB3145-015-Q1-K1-H8
gaaaaaagttctggtttgatcaaacgacttctttctcgtagtatttaactacgccttcacttgtcttgaatcatgacatatgtgaaatatgtgattatatgctgacatatgatcgaaaagatgtgtagaatacttccgttatcaggtgaaatttgtctgcgacatacagggatacaagtctcatttattgacttcacactctgtcattccttctatatttttcttttatccatttccagaataacgtttcgttgatatcattattttccattaatgaaatgtattctgatgacatcttgttggtttaataccagctctccgcacagactcacctgaagaatgagatgcacgtttggtcatggaaagttcgaactggaaaggattttaatttttttttta

SEQ ID NO: 33559 - DNA, 332 bp, Gossypium hirsutum
  Clone ID: LIB3145-016-Q1-K1-A3
gaggtttatcccatataactgttgctggttctctcttgcatgggttgaaagaagttgaggtttggcttcaaacatttgcaccaggatcgcgcacgccgatccataggcactcttgtgaagaagtttttgttgttctcaagggcagtggcactctatatctcgcctcgagttctaataagtaccctggaaaaccggaggagcactttatattttcgaatagcacgcttcatatccctgtcaatgatgttcaccacgtctggaatacaaatgaacatgaggatttgcaaatgcttgtgataatatctcggccgcctatcaaagtgttcatatat

SEQ ID NO: 33560 - DNA, 430 bp, Gossypium hirsutum
  Clone ID: LIB3145-016-Q1-K1-A5
agacttttcattttcacttttcattttttctctcctcctctcctttagccgcccctcctccttgttccttcgcctttctatcatttttcttccttttcaccaccttggacaccactttatcctcatttctcctccactccaccaccatacaaggatgttgcaccaccatcgccatcgtatcgtcgcaccgctgccattggccaccacaaaagttccccatttttctttttttctcctttactcggccaaatccccctttttagtcggttcatcatgtgaaattgtgaagcccctatccttttgattttattaaatcctggatccgtaccccactggttggaagagtgtgtttgttagtcaattgagattctagattcgatctcctcctctagagtggaaacggggttgctgctatgggagttgcgaaatc

SEQ ID NO: 33561 - DNA, 342 bp, Gossypium hirsutum
  Clone ID: LIB3145-016-Q1-K1-A7
cccacgcgtccgggcacaaaacgccgaggaactttctaataagaaagtagtcgatgctatggtccaagttgatgaagcaaatgtttcgaaaatggaaatcttgaagaaagtagaagaggccacggaggaaattaaaacgagtaagaaagccttggaagaagcattaaaccgagtagaagctgcgaacaaaggcaagctggaagtcgaggaagctcttcggaaatggagatctgagcatggtcagaaacgacgttccttacacaaccctaccaagttcaagagttcttacccatctcacaatcgaaaagattctcgtttatttgacgtgaatggattgaatct

SEQ ID NO: 33562 - DNA, 448 bp, Gossypium hirsutum
  Clone ID: LIB3145-016-Q1-K1-B12
atctccttatcaatcaattctacttctttgtcgccttggcaatgttcatatgtttccgggtggtctgagtccgtattcccagaaccatgccctgaacttatgaattcgagtacttcatcatgcggaatcctaatgctcgagctgcaattctataatataattctttgaaaaaaaaagaatctgggatttttcgacctattcagatttttttttgcaattatctctttttggcgaggtggaaaatgcatatatggttgatagcttcaattctttcttcttgaaaatttttgtagtgatggagtttaaacatacaaaaaaaaaaaaaagaaaaagaaaagtattgggtatattttaagggtaaatggttaatggctttttaattaatgttttataaaattacgattgtttggaaacctctttgtaaaaataattataataaattttgggt

SEQ ID NO: 33563 - DNA, 364 bp, Gossypium hirsutum
  Clone ID: LIB3145-016-Q1-K1-C12
cgcaaaagaataatagtatattaacaattagacttgtaaagcttttgcagtttttatgatgtatataagattagggttgtgaaagccccaaggcagtggcagggaattatgaaacagtcgctcgcctctgtgagcttaagccaatcatttttaaaatgttcatttagtgatttcggtttttatcttaaaaaaaaaaaaaaaaaaaaaaaaaaaaaaaaaaaaaaaaaaaaaaaaaaaaaaaaaaaaaaaaaataaaaaaaaaaaaaaaaaaaaaaaaaaaaaaaaaaaaaaaaaaaaaaaaaagggggggccgttttaaaggatccaactttacttccccgggcttgcaaagatataatttttt

SEQ ID NO: 33564 - DNA, 419 bp, Gossypium hirsutum
  Clone ID: LIB3145-016-Q1-K1-C4
tttctttcttattatatcctaaatcaccaccgtattccaacctccactgatcttttcccaaatggatcaccttgatctgatttccatggttctggagggtgcattggaagcgcagaaagaggagacactgcggttggaagagtcacatagggctgcttttgttgcgttagttgaaaaggagagggagcgttccatgcttatcacgaaaaaccgcgacttggtagctaatgaagcgcccaaggcaaaatttcttgaggacttcatggttttcattgaggctattgaaatgaagatctggagactgtccagagtttcgatgagaaagctatgatgaatactattttgtcaatgatgaactgtgacggcggcgacaacggcggacttgaccgcttttacggagacgatgttttcaaaatcgg

SEQ ID NO: 33565 - DNA, 458 bp, Gossypium hirsutum
  Clone ID: LIB3145-016-Q1-K1-C5
catgtctgtagtttgtcgcttgagctcaaggagtccaaaaaggacattgaagaagaaacctcagcatcatgtgtagcagaaacagaagaaacaaacataaaggaaactgaagctcatgctgaagtcgaaaagggaaagaacgaaataaataatgttgttgtcgtcaaagagaacagcttagcaagaagtgaacatgaagagagtggtgtatgcagtgctgaaattgatgtgaaatcaggggactctcacctaacacacgagaaggacatggagaaagaagaagatacaatgcaacaaagggaagacttcaaagttcaagagaagcagttccaaccttgaagaaaatggcgcctcttccgccattctgttgctcgcttgcattgcctgcactccctcttattgatcaacaattacatatatatatatattaattaaaaatatatacatatatattatat

SEQ ID NO: 33566 - DNA, 211 bp, Gossypium hirsutum
  Clone ID: LIB3145-016-Q1-K1-C8
caactttgccgtagtttagattcttcgggttgtaaccaccgtcgaatgtgtctttaccaagtatcctacggcgacggttcggttacgtacggtgatttctcgaccgaaacgttgacgtttagaatgaaccgaattggacgcgtggcgctcggctgtggtcacaacaaccaaagcttgttcgtcggtgccgccggtttattaagtctcggtc

SEQ ID NO: 33567 - DNA, 486 bp, Gossypium hirsutum
  unsure (1)..(486): unsure at all n locations
  Clone ID: LIB3145-016-Q1-K1-D12
cacgacgtcacggttcacggtggtcccttaagttggtttaccatgggattctcatngcgtgtgcatgnnacgatgatgtagtgcgacgccaagtggcagcctaaagctcgcgcattctacgtggctagcgacctgttggtgaacccnatcttganntcctcgtgcctttgtccttacngnntacaaaanncggcggtacccacccgctntgtcttgcattgctgcagttggggtaaaaagcacttcttactggcgaggttcaagactctccctcggactctgctcaaaacgtgtgctaagtgctatcannaatcggcggtgggaacggaattccgtacanctcagcaataacctcaatcttcgcagcccggccttaacctgctaaatggtggtctccaacttcccttttacagcatcagcccctccacttgactgcaacaaanggtgcagtgagggttgatgaatgatgatatgtgaagggagtgg

SEQ ID NO: 33568 - DNA, 422 bp, Gossypium hirsutum
  Clone ID: LIB3145-016-Q1-K1-D3
attggagaagccctaaatgcatacaccctaagaagattgcctggttttagcaagggtgtgaaccagaatattgatttcgtaaagtatcggtcattggtggagaccattgtgtggctgctgccaactgagaaaggagttgtttcttgtagcttcttgcttagattattaagagcagcaatttttttggattgtggagaaacagagagaaatgagttgatgaggagaattgctcagcagcttccggaggcaacgatgaatgatctattaattcgagctccacctggtgaagcaacagtatttgatgttgacatagttcaaaacttggttgaagggtttgtgactcacagttctcaaactgaacccgtagataatgaattcctcgggagtagaagccccaagtttggacctgatgcttctaaagt

SEQ ID NO: 33569 - DNA, 273 bp, Gossypium hirsutum
  Clone ID: LIB3145-016-Q1-K1-D4
aatgcacaatccatcaatgcatataccctattacgattgccaggttgaatcaaagatgtgaaccagggtagtcacctcaaagagcaatgctcattgcttgaaaccattgtggagctgctgtcaaatgacaaaggaatggtatcttatatcttgtggcttacattattaataacatgcatttgtttgcattgtctataaacaggatagaaataactgagatgatctataattacctactaacttccaaggacaacaaccaatgatctattaatt

SEQ ID NO: 33570 - DNA, 240 bp, Gossypium hirsutum
  Clone ID: LIB3145-016-Q1-K1-D5
aagggggaacccgataaatgttgcacctgtggatgttcatataattgcactcctggcggatgagatgtaccctcttctcgaaattcatgaagctccggaattcccaaaatggaccatatgccacagatacaacgaattctatacatttgactactacatcagatcccactggtatgacagatacgacaagttccaaaaatctatactaatgctcaggatcaccggcatgacatagtggag

SEQ ID NO: 33571 - DNA, 406 bp, Gossypium hirsutum
  Clone ID: LIB3145-016-Q1-K1-E2
cattttctgactatgaaaatattatcatcttcaaaaagggtcgtgagcaatgaggttaaaggggacatagagtgggagcttaggcctggtggaatgcttgttcagaaaaggaacatggcggatgctgcttctgctcctatgattaagatcaaagtttctcatggttcttatcaccgtgatatagctgtgcctgctcaatccacttttggggatttgaaaagggttcttgcacaagaaaccggtttggagccaaaggagcagagactcttgttccaagggaaagagaaggatgatgaagaatgtttgcatatggtaggagtaaaagacatgtcaaaggtggtacttttagaggacccagctagcaaagagaggaagcttgtggagatgaatagcaaccaaagtgtgc

SEQ ID NO: 33572 - DNA, 396 bp, Gossypium hirsutum
  Clone ID: LIB3145-016-Q1-K1-E6
cccacgcgtccgctttattgaagtacccacagattactggcggctccaaagggcggccttccggtggaaaagcaggtttagctgccggaccagctgttgaaaaaccagaaaaattatcgggcggaaaagattttcgggatagatttggtggagtcgaaggggttcccagaagacacatttcgacaacgagacagaaggctgttgaggatgtcaatttgtcaaagcatgtgcatcatgattcagataaaagacgtagtgcctctcgatacggcagcacttcaagaagagctgtaatagcaagcagggctagttcagccggtgaagccaatgacattccacaaaatcgacggctgtcaactggcagtcgtatccataacccagcagaaagaatccaac

SEQ ID NO: 33573 - DNA, 453 bp, Gossypium hirsutum
  unsure (1)..(453): unsure at all n locations
  Clone ID: LIB3145-016-Q1-K1-E8
caggaagtggagaaaatatgtctgactttacctatgcggagaacgttgctcatgctcatatctgtgcagcagaaactctagagtctcggatagtctctgtggctggaaaggtactccttaagagtgttcttagtatgtaaaactctcttgtactgtattttatattgaattatgtatcacggaggtgttctcaatatgtaggccttttttatcacgaatctcgagcctatgatgttctgggaatttgtgtctctgatacttgaaggcttanggtatcaaaggccattcataaaaattcccacttggattgttgcctatgttctctcacttcttcaacgtatacatgaggaatcacacttcagaattgataaatattcacctcattacattgttcaattagcttcatgtaccacaacttttgactgctcaaaggctcaaaagcatctgggatat

SEQ ID NO: 33574 - DNA, 270 bp, Gossypium hirsutum
  Clone ID: LIB3145-016-Q1-K1-E9
cccacgcgtccgcccacgcgtccgtaaatagatatgaccatccgaatatgcagaaaaagtttaaaagaaatttaactgatgttcattctgttagaataaaaaaaaaaaaaaaaaaaaaaaaaaaaaaaaaggtcggacgatctaaaagatccaaaactaaataacacgagcatgcaaaataatagataataatataaagaaaaataagggcaattgattgagaggatctatgacaacggcgggactgagaaaaccatatagttacccaat

SEQ ID NO: 33575 - DNA, 330 bp, Gossypium hirsutum
  Clone ID: LIB3145-016-Q1-K1-G10
ggcctagggtgtcaacgacggtgaaaggatgccattttggtgtaaggccgaaggcaaagtcggcccttgggcatcgtgcataccgagggcacacatggaggggggtacggcgtgagggtgacctaaggttttcattttcctaaacatgagtttaggtcttcggctaacgggcctaatctgtaataggttagtggtttaagttgatgggtttgtaattgggttttgtaaatatgagccaatttaattttgtaactggacatttaatgatcttgagactttatttggttattttttagtttctaatgggccgggcaaaataaggctcttaca

SEQ ID NO: 33576 - DNA, 337 bp, Gossypium hirsutum
  Clone ID: LIB3145-016-Q1-K1-G5
cccacgcgtgcgcgcacgcgtgcgctatctgtgttatttacaaaggcacccaaaatatcaaactggactgatgtcgatatggcatatgaacctgagtggactattggaacctgtaaggctgctactccagttcaagctcatgaagtacattgtgagttgaggaaaaggctacacgctaatgtacatctcgcagttgatgaatcaacccggattatatatggatggtccgcaactgctgaaaactgctaggtactagcacctcagcttgatcttaacgtttaattgggcagtggagcttcactcaagcaggattacattgacattataaaaactgctg

SEQ ID NO: 33577 - DNA, 378 bp, Gossypium hirsutum
  Clone ID: LIB3145-016-Q1-K1-G8
caaaggctctggcaaaggagatggcacctgatacccgagtaaattgtgttgctcctggtttggttcctaccaactttgcagcattcctaacaaaagatgaggtcctgaggaagacggctgaggaaatcacattacttggaaaacttggcaccccgggggatatggctgctgcagcctctttcttggcatccgatgacgctagttatatcaccggagaaactcttgtgatggctgggggagccccctcaagactttagtaagtttctaaaggttaatattacattaacagcaacaatgtaatattccatcaaaattattgcatttgttttgataaaaaacttttcgtaatgcaagatttgtgtcaattttattctttaa

SEQ ID NO: 33578 - DNA, 384 bp, Gossypium hirsutum
  unsure (1)..(384): unsure at all n locations
  Clone ID: LIB3145-016-Q1-K1-H12
cccacgcgtccgcccacgcgtccgaaaaatttgaaaacaaccgctcgtcttctcgtaaaaaaaccgccttttgcttgtttggaaaagacggcggcttttataatttccggtggtgccttgtcgtcgtcgttgttattgaagtgacagtgtcgtacaagtagaaatgggaacagggaggtggggtacgtgggaggagcctttgttaggcggggcggttctccgtcatggtacccgagattggaacctcgtcgcttcggagctccggaccagaactgttgctcctttcggattcaccccggagatttgtaaggctaagtacgaggatttgcagcaacgttactcangttgcaaagcttggtttgaagagttacgtaaacagcgaat

SEQ ID NO: 33579 - DNA, 404 bp, Gossypium hirsutum
  Clone ID: LIB3145-016-Q1-K1-H7
cccacgcgtccgagcaaacaggatattctatctttctgtaccacatgaagcacttccggacgttgcttcttctcttgccgataatgcacaaacaaagaagggttggaatcgtataataatcgagaaaccattcggatttgacgctgtatcttctcaactgtttacgaaatcccttctttctaagtttgaggagaagcaaatttacaggatagaccatctccttgggaggaacctcattgaaaacctcactgtattaaggttttcgaatctagtttttgagccattatggagtcgaacatacattcgtaatgtgcaagtgattttatccgaagacttgagcatgccgctaggaaggtattttgatggttatggggtcattcgggacattgttcacagtcacatac

SEQ ID NO: 33580 - DNA, 330 bp, Gossypium hirsutum
  Clone ID: LIB3145-016-Q1-K1-H8
aaaaaccgggccgaccgacacgtacgaccattcattctatcaaacaagatattttatttttccgaaccacaaaaaacacttccggacggttctttttttattgccgaccccccacaaacaaacaatgttttatattattttataattatcaaaccattttgttttgtttctttatattatcaactttttactaaatctcattcttctaaattcttacacaaactaatatactttatataccatctatcttttagtaactttacttataaccttacttttatacaattcttaaacctacatttttactcattatttattcaaacaatacat

SEQ ID NO: 33581 - DNA, 270 bp, Gossypium hirsutum
  Clone ID: LIB3145-016-Q1-K1-H9
aacccttcggattaagcttccaaacacccaagatttccttgtttttgcgagagccaaaaatgcttggaccgccactacaagcttgcgcgacgattgctctccacacactattctattattacaaaaccactccccgtggaggttgggtctaccaattttatacaatatgcacggatgatatgaaccaccacgaccaattgcagaggactttattgctgcaaacaaaccatacaacgagtgatcagcctactctagcaatacaccttgcac

SEQ ID NO: 33582 - DNA, 426 bp, Gossypium hirsutum
  Clone ID: LIB3145-017-Q1-K1-A2
accactcttctttcgctgaaaacttttagaacattagagagagagagagagaaggcaaatggcagcgtcgggagtagcagcaccgacgagaacggaggttttacagctttaccgatcgcttctgcgagtggcgcgtcagttctgcgactacaacataagggagtactcaaaacggcgaaccattgacgcgtttcgagacaacaagaacctaaccgacccttcccagctctccgccgctttctccgacggtaaagctcagctggaagtcgctaaaagacaagctttggtttattcactctatgctccaaaggtcaaaagcataatggatattaagccttcttagaaaatatttatcattccattttgacttgttcccttagagaaataaaaaggagtaaactgcgattcattgagataaatattgaa

SEQ ID NO: 33583 - DNA, 426 bp, Gossypium hirsutum
  Clone ID: LIB3145-017-Q1-K1-A6
cccacgcgtccgtgagaacatcttaaaagatcgcggagcgagtaaccttgtgaatgttctgattgggatggacattcccgtacgagagaataaccaggcagtcggtgacttcaaccattcagacatcgggattgatgatgaagttccttttgatgatgaatattttgaggttatggattctgaaatatacgaggctccggttcgttgggggatgccagattcggctgatagcagctgggttcatcctatatattttgccaagtgcttgatgaaggctgttcatgtagaacatgacaggaaaatggaccatccctctaatggtgtttcgattgtcggttgccttcgaccagcctttgctgatgaagaatcatatctaagaaggctattccattttgactatgatgaaggatacacctcagattggaa

SEQ ID NO: 33584 - DNA, 417 bp, Gossypium hirsutum
  Clone ID: LIB3145-017-Q1-K1-A7
ctcaagatggaggacgactctgcgctaagatcagcggatgagataacagcagcagttcatcaaatattcagctaaattcaaaattaaaatgaaaaaaaaaaggatttggtcattattcattaggcagctgacttgattcctgaagggaaagtagggtagaaaagagcagaccaggaaaaaaaggtaaaacgagaaaaaaaaatgaaaaaagaggggtccattccaagcaatgctttgttccacaaagacaattgaagacagagcccttgatgtttacatcttaacttaagaaacttcccttgtttatcatttaatgatttaatttgcttacttaatagaaatgataaatctatgtaatttccaagtttcttttcctttattctatgtttatattattctgggactagcttctggagt

SEQ ID NO: 33585 - DNA, 425 bp, Gossypium hirsutum
  Clone ID: LIB3145-017-Q1-K1-A8
cccacgcgtccggagtcctgcagcagttgattctttcatacagcgctgtaatttggatgctgaatcattaataacagtccatcctagagaaatggaaaaccgccatattgacaacaatgtaaatactttggatgtacccattaaattaagaacttttgtggaactgacaatggatgtcacatctgcttctcccaggcgctatttcttcgaggcaagatcttgtgatgagcttctttgccactgctgaacatgagaaagaaagactccagtattttgcttcacctgaaggaagagatgatctttatcagtacaaccagaaggaaagaagaactgttctggaggtaaagtgaagtattggaggatttcccttctgtgcaaatgccatttgagtggtttgtgcaattgggctccaccactgaaaacag

SEQ ID NO: 33586 - DNA, 401 bp, Gossypium hirsutum
  Clone ID: LIB3145-017-Q1-K1-A9
cccacgcgtccgttcaggatcaggcagggctgttattcttcatttcggtgttttgggcattctttccaatgtttactgccattttcacattccctcaagagagagtgatgctagctaaggaaagatctgtaggcatgtataggctcagtgcctatttgttagccagaatgatcagtgatcttcctttggatctcatcttgcctttagtgttccttgtgattgtctatctcatggcaggcttgaagtccacatttacagcattttctctaacaatgcttacagttttcttaagtgttgttgctgcccagggccttggccttactataggagcggcattcatggatgtaaagaaagcctcaactctggcttctgttatcatcatgacttccatgttatctggt

SEQ ID NO: 33587 - DNA, 320 bp, Gossypium hirsutum
  unsure (1)..(320): unsure at all n locations
  Clone ID: LIB3145-017-Q1-K1-B12
cccacccgtcctaattttattaaaactttattcaacccttttattccactncaaaaaaaaaaataacataaaagccgtttttaaaaaaaaataaccctcacaaacccccccttcaactttattaactcacacctacatcacatatccacttactactctctaaaaactattactatccacaaccctacttatctcaacatcatctttaaccctacctccactattattcttcctcacctatccaaaccaaccaatactaactataccccctaaattactatcaaccctccacccccaaacaactcccattagaacaaaaa

SEQ ID NO: 33588 - DNA, 417 bp, Gossypium hirsutum
  Clone ID: LIB3145-017-Q1-K1-B9
gcgacccacgcagttcgatttcttgttccttaccttcgccgccacatttctcttttgtcacctccgattccaagatggagtcccttttgtctcgcaatatggcatttgtttgttgatttcaatctttatttgagattcaatttttgttttctctttcaatgttagatttcgggacagatcttgtttttattggattgaatctaagataataacgtgatctgaaattatttcgctgcatattttgtttacttatttttcgggatgatactgtttgccttgattaaggtattgtcttctcatcagcttttttattattattcagcataaccttagttgagaccatgactttcttcatctctgacttattaatttgaatcagcgtagctctgactttagagatctgctttctagcagttt

SEQ ID NO: 33589 - DNA, 185 bp, Gossypium hirsutum
  Clone ID: LIB3145-017-Q1-K1-C1
gtctaaaggtttggcccaacaaggggtaaaataaggggccaactaaacctacctttccgggttataaaaatgcctatattaaaactttttttttttaaaaaaaaaaaaaaggggaaaggggtctttatatggaagtttaaaatatatgctgagaggataaattaatttgaaaagcttgctttgtt

SEQ ID NO: 33590 - DNA, 427 bp, Gossypium hirsutum
  Clone ID: LIB3145-017-Q1-K1-C5
cccacgcgtccgggctttattgtgcaagttcaatggttgaaggttctaacgaatgggggagaaactctgatcccaaaatgtcattgagaacagagaaaagagcaagtgttttagcaatggaagtagtggaagacttcatatacttaaattgcagctcatcagctaatagtcttcagatatggttgagaggaacacaacagaaagtggggagaatatcaactggcagcaaaataacaagccttataactgcaaatgacgtcgttctctgcgggacagagtctgggttaatcaaggcatggatccccctttaaaagacctcaaaagcaaagtatataatatacaaacaaaaatggaaacaattgaagatagtttttgaatgcttctaaaataatgcattatgtgtacagttgctatattgtataattat

SEQ ID NO: 33591 - DNA, 320 bp, Gossypium hirsutum
  Clone ID: LIB3145-017-Q1-K1-D10
agttttacacatgcatggatacatgcacgcctacactgatgccgcaggaaataccgcacctaaatatctattgcaggaaacgacaggccacggaactcatcaatcgccacaaaacggggactatcattagaagggagattagatatttgatttgacaatgaagcatccttagtcgtagatgtatttaagttacagctttttgcaagagtgaatagaaacaactcttcttggcccttgcacccggagtgctatatgatatacctagacaggttggcctgatactctttcgttaggtgatgctgattagattatgcaccata

SEQ ID NO: 33592 - DNA, 421 bp, Gossypium hirsutum
  Clone ID: LIB3145-017-Q1-K1-D4
ttttgttttcttccgtcaacctgatagatttctagaatcatatgacaaaaagggatacgtttctggggtgcaccttgagaagacaactctaaaaggtattggctctggaaaacagattgccataggtactggacaatttgaaaatctttcttgtgggattgtgctaaagagtattggctataaatcagtgccagtcgatgatttgccatttgataatcagaaaggtgtggttccaaatgttaaaggtcgaattctaagtgacaattctggagatcctacatcaattgagaatggattgtatgtctgcggatggttgaagagaggaccaactggcattatcgctacgaatctttactgtgctgaggaaactgtcgcaagtttatcagaagatcttgaactaggtgtcttagcatcaacaacc

SEQ ID NO: 33593 - DNA, 365 bp, Gossypium hirsutum
  Clone ID: LIB3145-017-Q1-K1-E10
cgggcactgacccacgcatccaatcgaattttccactgtttctacccaaactttcaaacacatatatactatattatagcgcgaactttcaacaacccacacaacctcactaaaaatctaccgacagcagcaacaaaaataatacaacgcctcacctaccaaaaagcgtcacaactacgctacaaaatccaatcagacccgggtcgttaagaccccacatggtaagcttgtgtaccaatacaccaataatatttcttatcggtcccaattaccccaacaccgtgaagaagattcataaaatcccccacttgagacactccgagtacaacaagttcaatttgtctaggaaccacacgacttttaac

SEQ ID NO: 33594 - DNA, 395 bp, Gossypium hirsutum
  Clone ID: LIB3145-017-Q1-K1-E12
cgtacgtaagcttggatcctctatagtcgacccacgctttcgcgcgcatatgtcctctcttcttacgcgtgctttccccaacggacggagcctcactaggggtctaccggcggcggcaacgagatggcgcaacgcctgacctaccgaaagcgtcacagctacgctacaaaatccaatcagacccgggtcgtgaagaccccatgtgggaagcttgtgtaccaatacaccaagaagagggcgagcggtcccaattgccccgtcaccgggtagaagatccaggggatcccccacttgagacctgccgagtacaagaggtccaggttgtctaggaaccacaggactgttaaccgttcttatggtggagtactctctggaattgctgttatggagagaat

SEQ ID NO: 33595 - DNA, 415 bp, Gossypium hirsutum
  unsure (1)..(415): unsure at all n locations
  Clone ID: LIB3145-017-Q1-K1-E4
ctgcccccttgtcgttggcattggcacacgctggtgttgaagacgggaaggtagtatttgttccatgggtggaaacagatttcagaaccggtgacggtccatggtggtcttaaatatctccacaaccattggctcaggctgtttgttgggttatatttgagatttattcagccagtatgttttgtagcgttgctaaacatcctgtgccgtacagttatcctctgtatactgcagtttgtaggttgcaagaccgtatttccaaattagaaatggtactagtattcttgtcatattcatggaggataattatttaatacattagcagtggtcttaaattgtatttaaaaggttaaaaagaaaaaaatatgtgataaaatctcaattntgtggaatgaaaacttttccttnnnnaaaa

SEQ ID NO: 33596 - DNA, 379 bp, Gossypium hirsutum
  Clone ID: LIB3145-017-Q1-K1-E8
atcgccctttatgatgaggagtgtaagaataatttcttgctcaggctgaaactaaagatgctcgctaccattcaattacgccatctgctgcggcattttcaagatttaccctgacatgaacttttctgaccaaaccacaaccgctacacttgttcttgatgctgcaccccctaaagttcactttgatggagctcatatttaaactttggctaaaaatctctgctaatgtggatataactggacttgcaacccttgctactttaaatgagaaaaaaaagcttatcttattatgtaagctgatctaaataatatattatatcttttgggttttacctattaaaataatccctctattgttcattaggtgttttgcttcttt

SEQ ID NO: 33597 - DNA, 400 bp, Gossypium hirsutum
  Clone ID: LIB3145-017-Q1-K1-F3
atcaagaaagaaaacgactgttcatggagctatggaagtgacaacaacagttgtgatgtgaacttagatgtctcaagaacaccactgatgagcagtagtaaacatctcttcccaccatcagtgagaccaacaagcatgactcaactccttcaaggttcatcaagaccagacctacaatgcgtaaagcttgatcaagtggttcaagaagaaagcttctgcaatatgttcaatggagttgatgaacagcaagggttttggccatggtctgaacagcaaagtttccattgaaaagtattaaaaaacaccaactactgttgtttatgcactttcatcagctttggctaatatgcaagttaaaaaagaagaacaactaggaaattctttttttccctgtcaactt

SEQ ID NO: 33598 - DNA, 358 bp, Gossypium hirsutum
  unsure (1)..(358): unsure at all n locations
  Clone ID: LIB3145-017-Q1-K1-G5
ctcccgtaaagctacgtacgcgatttcccgcgattacgccgcttccgtacacgttcaaagaatgtgcaagggtggtatttgctggcacggcgtcnccgtccgttcccctgcttctcaagtccgcttcaggatccctcctcaaattccataccgttctttgtaaatattcaattcaaattttgccacaaaaaagaaaaaaaaaaaagatttccagttttgaatctctgtaagataaaaaaggtcatttgtatttgtttttgtcttgaattttgattgagaggaaataatttgtttttaaaaaaaaaaaannnnnaaaaaaaaaaataaataaaaaatttttaatatttaaatattaata

SEQ ID NO: 33599 - DNA, 269 bp, Gossypium hirsutum
  Clone ID: LIB3145-017-Q1-K1-G9
catcgcagccatcttattacctctttcccgttgaggacaaaataccaaaccacatgtccaagattcgactatgtttatacctatcctcttgcaaagctctacctcttgtgtgtcactagagccatgaacaacctccattctggcattctcaagaggctatctatgaacaaaaccaatctcccaccaatcttcattactcactcttgtcaatttcattttttgacaggatgaaaacatatccttaattgttttctcaatctctgatcaca

SEQ ID NO: 33600 - DNA, 273 bp, Gossypium hirsutum
  Clone ID: LIB3145-017-Q1-K1-H12
cgcagctgctcctgcttccgatccgagcttttctcgcccgccggttcttctcgagcaattcttataaagcatcatcatcaccacttgtgatgggtggaagccagtacgatgatgaatgggtgttgcccagtgccgatatcactcttgttcttgttgggaaacttggctatggaatgagtgcaacttgaaatagcattctagcaccgtgagcatcttgataaaaatattcacatcctgttgttactaatactccttagcttggatgcactaccc

SEQ ID NO: 33601 - DNA, 414 bp, Gossypium hirsutum
  Clone ID: LIB3145-017-Q1-K1-H3
cccacgcctgcgatcgccacttacaactattggaagactcggctcagccataacttatgctataagggtatgcagtgatgcatctcaaagctataatgacaggtgccaccaagagtgtatatattcacttcttgatggatcagtacgtaaatgtccattaccagatatgactggcacaagacatacacaaagcacaaatgctgtgaagggagggctggctgtaacaataaccttcaacgcttgtccatataagtgagaatcaggaccagccaagcactatctcaggtgtagaacctccattttactacgatgataacacacatactgagtcctctgacagcaacgaaccagtgcaccgaggaccatgggtgccacctaaatataactttattgacaagtcacctcctataggat

SEQ ID NO: 33602 - DNA, 166 bp, Gossypium hirsutum
  Clone ID: LIB3145-017-Q1-K1-H4
acccacgcgtgcgtcaaaccctaccctctatttgggagccctttgcaatggctccgactatactcctatggcctttgctggggtacactttatagccgttcactctccaaaactcccaggcctacccctggccttcctttcacctttccccacgcaacatcctttt

SEQ ID NO: 33603 - DNA, 151 bp, Gossypium hirsutum
  unsure (1)..(151): unsure at all n locations
  Clone ID: LIB3145-017-Q1-K1-H6
tcaaaccctancctctatctgggagccctttccaatggcttcncgtcgactgctntcggctttcctccgctccacttctcgcccatctctctccaaatctcccagaacctacccctcgcctcccttcacctttccccacgcgcccgccttt

SEQ ID NO: 33604 - DNA, 405 bp, Gossypium hirsutum
  unsure (1)..(405): unsure at all n locations
  Clone ID: LIB3145-017-Q1-K1-H9
gaanacccggcgcgacccacgcgctgcaagatanaaactctgaattttctccaccttttccaggtacagaaaatacacatgaggagtcagttcaacctatgcgacgcggcggatgccaatgttctgccctgctcatatgatgcttctctgtaatgcccgcgcgaccagaaaatccatgctgccaataagttagctaacaaccaccagcgattccccctctcttcttcttcttcacacatgcctaaatgtgacatttgccaggaagcatctagctttttcttattctttgcaagatcgagctttactctctccaaagtgcaatgctgctatacatacatctaatccttacctctttaatcatcatacatttcttcttactgcaataaaagtttgtcttgaaacaac

SEQ ID NO: 33605 - DNA, 186 bp, Gossypium hirsutum
  Clone ID: LIB3145-018-Q1-K1-A6
tcggccactctttcttccacacaatcgttcactctttcggtcttttcaataacatcccatcgggtgggatactaatatactgcgttcccctctcttaacacccattgcaccatttagatctaccccagggtttatagtcttcactcttccaactccatccaaatgggtatgggacctaaaaactat

SEQ ID NO: 33606 - DNA, 341 bp, Gossypium hirsutum
  Clone ID: LIB3145-018-Q1-K1-B5
gagacgcttggtctgactcttgggcttgctcgatccttttcgagggggcagggtctttcctggagctctggaatgacagcacgaacagctggaattgtcttctgatgcgccgtgagaaaaaccggggacgatcattgggggctatgggtgcctggttatattatccatatattattctggaataactctgcttatcatgacatgcatgatccactgcaaggcaccaagtttaactactctcaaccgaacttcgtcgactgggataaactacttggaactcatattgctcatgatctttcgaatccaccggaagggggttttgaagcatgctaaagaaagac

SEQ ID NO: 33607 - DNA, 421 bp, Gossypium hirsutum
  Clone ID: LIB3145-018-Q1-K1-B7
tgcaaaggtattggtggtggttcacagaaagggattgcctctttggaatgcttgataatgtgaactatacacgcaacgcacatgtttggactcaaatccgtgccctatatcatataaggcacctacagttgagaatgttgatggcttatttacccaacaatgcctcatatgttatagggaaaaggttaaaatctcactaagtacaaatatgagattttcttgccgaatgaccatgcgcattgcgtatatttcactttttcaagcatctgccgaggcatttttattctgtgaatccgtggcttctttgatagagtcgagagatcacttccgaggataatacttactcgtcgaggggtccactagctcctagcttatgataatttgcagacctcgcccgacagagttggcttctcctcaatag

SEQ ID NO: 33608 - DNA, 349 bp, Gossypium hirsutum
  Clone ID: LIB3145-018-Q1-K1-B9
gggcgagccacgcgttcgcgcaataaagctgtttcttgttaagctaactgttgaactctgttgcaagactctgtctgtccggggctccaaatggtttcctcaatcccatcttgtaaactcatcaaggaaacttgtgaaaggaatttttcaatgcactcttactaccgcactactgcaagccccgattttatctctttagacaagacaacttttaggaatattattcaccatccggatctaactgtaatatctgaagaaagagttctcgatgccattttgatgtggtacatgaaatcacaaaaaattgttggatgggaagtggtgaatgagcttaattcaaaattcaact

SEQ ID NO: 33609 - DNA, 319 bp, Gossypium hirsutum
  Clone ID: LIB3145-018-Q1-K1-C4
gtttttgaagacatcctacagatgacctttattgatattactctcaagtcaaacggggggatcttgacagccaccaactctggcgcaatggcgattgcttgtatattgacaacaaattgttcatgttcagttttatcctaattatcatacgctatctgttgagcttaattggtaccaaacaacatagtatgagcgtataatcctaatacaaccatcttatagaaagcttagtagaggaagttctcttaggaagcctcgcacgaacacgcatgtgctgtctgtatgaagtaacatgcatcaattgtgttttgatgaccaa

SEQ ID NO: 33610 - DNA, 319 bp, Gossypium hirsutum
  Clone ID: LIB3145-018-Q1-K1-C9
gcgtgcgggtgcttaacgccttctgcgccgtacctagaatccggcatctgctgcatttaaaaaagcttcaggggtaggagattcctcacctgcatcctttccttttcctcttcgagttgaacccaagccaaagagtgggatcagaccgcaagatttgctgaaaaaaggtgttgaagtttaacccaaaccccccaaaatttcattccccttcagcttttaacccgaagggaatcaatccaatttacaatctcaggggcaggagttcaaccatgaaaagaaaatttgccattgggtttcggaatcaaattcaacggaaaag

SEQ ID NO: 33611 - DNA, 437 bp, Gossypium hirsutum
  unsure (1)..(437): unsure at all n locations
  Clone ID: LIB3145-018-Q1-K1-D2
caagtccatagctatgggaccgtggactttgaaagaagacccatggtcaaatggaacgctctatataagaaaatatcgctcatggaaaaccctgaattgggttctgcctctgtgttgaatgagtgggaaaaaggaggtaggaagctcaccaagtgggagctttgtagggttgtcaaggagttaaggaagtacaagcgtttcaagcaagcacttgaggtgtatgagtggatgaacaatagaggagagaggtttagattttctgcaagtgatgctgcaattcagttagaccttatttctaaggtgcgtggagtttcaagtgccgaagatttcttccttcaactccctgatactttgaaggacaagagaatctatggngcccttctgaatgcctatgtgcgggcaagaatgcaagaaaaggcagaatctttaattgacaa

SEQ ID NO: 33612 - DNA, 343 bp, Gossypium hirsutum
  Clone ID: LIB3145-018-Q1-K1-D5
gcagcagaggattccatgacaaaagagtggatcatgtctggtggcccatattggcgggggaagcactgccatcggaatactccaacagctatattacatgtcttacacattaatatcccaatcgacatgaaagtcttctgagctcgtcctaacttatgaactaatctaaaatatctctgttgacaaataggtactccattcacagctttggtgattctaaataatctacacaaaggtctgacatgcatgcatactcaatcagcttagattaccccggctcgaactttttggacaaactatgtatgcccctcgggtatagatactaaataatagcttcaccatt

SEQ ID NO: 33613 - DNA, 223 bp, Gossypium hirsutum
  Clone ID: LIB3145-018-Q1-K1-E10
acgcgtccgcttttgtggaaatagatatgataatatgaattttggtcaacaaaaaaaataaccattcatttcagggagggtttaaaatcctaaacattcctttttcctcttctttttaatatcattttacccaaatatttggtaatattccttctgttcttcttatcccaaacctttaaaccttacctctatttagtgttaattcttgcccccccctttttaa

SEQ ID NO: 33614 - DNA, 378 bp, Gossypium hirsutum
  Clone ID: LIB3145-018-Q1-K1-E12
cacgcgtccgcccaccatacaatctttcttcacatccttaacatctcgtattgactgctatcttcctatactgcggaggggcctttgtcggtaaataagctcatcatatccttcatattgtaacctctatttttgttgatacattcatgctccaaagtagcttataaaaattactgcacatggtttgtgaagcataaactctattattttcatcccatctctgttataatttataggcacttcggacctttaatacaccctacatcttaccttcccaaataagaaagtcttcataaggttgccagcgctttatgcattccgacgagtcctgcaacgatttttctattaaggcattactaatcaactcctttttttttt

SEQ ID NO: 33615 - DNA, 341 bp, Gossypium hirsutum
  Clone ID: LIB3145-018-Q1-K1-E5
gcgtgacgctctcttccaatttactggaacctggacctttaaccaatattctgtcatccagggggtgccatgttgcaggaggagtccaacctcccctattgattaaatatcgtccactatgtgtgggatatggtgcaggctttggggccacatgaggatgtgctcaacccaataatggtgaatactgttgcagattctggactgcgtgcccattgtcttgtctgcgctcaatgtgcatggcattgctgggcttatcggatcatcactgttgatatggacccacaaatactgggagattcttactagtttgggattacaaattttgggaatccaaaaaacta

SEQ ID NO: 33616 - DNA, 303 bp, Gossypium hirsutum
  Clone ID: LIB3145-018-Q1-K1-E8
aaaaaaaaataaacaaaaatacagattaataaaaaaatattaaaaatacaaaatcaagaggggtaaacaatttcggaaaatcattcaaaaaataaaatttgcctcctctctttttcaatccatttttccttatcttggcacccctactctaatttccctttctgttgcctaaactttatttaattgccctcctttttccaatgctaatatttttacatcccttccttttcccacctattttactttcatccaatagcactttcccccaccatgtttatttttcttttttcccaaaaacattta

SEQ ID NO: 33617 - DNA, 440 bp, Gossypium hirsutum
  Clone ID: LIB3145-018-Q1-K1-F1
gcggaaattaaggcattaagaatgtctgaaaggctaagagaaaaggcttgcgaagagctcggtgaccagctctcaaaaatggatgggaagcctatcttcaatcttgttccggtcctaggtgccggaatatctgctgcatgtacaaatgatataatcacctgtgagctgtttgctgggaaatcttgatcctttacttcactttggcaattccatcatttgttttctccaagggatggttcagtcatcaaagaaactcctttctgaaagttaaaacagccacaccaatgtggtttgttcttggatgaagaggtaatgcttttggtcaatttatttgttagatttattgtctttacaatcaagtattctttacatttcaaggaatctaaagaaccttggtaaagtcaaatttaaatgttaattgcaagattttgtgatatatt

SEQ ID NO: 33618 - DNA, 313 bp, Gossypium hirsutum
  Clone ID: LIB3145-018-Q1-K1-F11
gcgtacgccctgtctaccaattccatgttctttggaaacttctcggaaacttatggtagtgagagattaagggttgcgtgtatttccgggaatgacaaatgaaaaccactctcatattctccattaaaagcaactgatacattatttgctatgttgcctcttaccaatgctggaaagaaccaacagggtggtgtcgatgcacatgatagtgcatccaaaaaacacagcttcacaagggattttgcttatgatgttacatttggagagccatactaatggttcaagtaagcatgtccctttgttaaacctatat

SEQ ID NO: 33619 - DNA, 219 bp, Gossypium hirsutum
  Clone ID: LIB3145-018-Q1-K1-F12
ttacctcgaatgggtgtgtctacctgcacacagtcaaacatcttttcacataataggagattgttaatgacaagtgttacaaactacttgggttgtcacttctactcattagaggctacaatttccaaacgagaattagagttatcagggaaacatggaaagccttcgtggactaaaacggctgctcactctgaagataaaacttggttgtgcctcaaa

SEQ ID NO: 33620 - DNA, 425 bp, Gossypium hirsutum
  Clone ID: LIB3145-018-Q1-K1-F3
cccacgcgttcggtgccccggagtatgcaatgactggtcagttaactgtgaaatccgagggttgtagctttggagttgttcttctagaaatcataaccgggaggaaagccattgataattctaaagctgctggggaacagaatctagttgcatgggcaaggccattattcaaagacagaaaaatgttctctcaaatggctgatccaatgcttcaaggtcaatatcctccaaggggtttattccaagcacttgcagtggcagcaatgtgtgttcaagagcaaccaaatatgagacctctcattgctgatgtagtcacagctttgacttaccttgcttctcaaaaattcaaaccagatacacagccaatacaaggttctcgcttgatgcctggtactcccccttggacaaagagagacatagataag

SEQ ID NO: 33621 - DNA, 387 bp, Gossypium hirsutum
  Clone ID: LIB3145-018-Q1-K1-F5
gcgaccacgcgtccgatcactggtgatgagactaattttaaactctgcaaaattaggtctgtccaaacggggcagaagggttttccatacctgaatacctaccattgtcgcacaatactctacccataccctctgatcaaagtcaacgacaccatcaagcttgacttacagagcaacaaatttgtggattaaattaagcctgatgttgagaatgttgacatggtcactggtggaaggaacaggagacgtgttgtagtgaataaaaacagtgagaaacacaaagacagcctcgccacaatccatgttcaatatgctaatagacactaattttcaacacttctatgccatgaattaacattcttacaaagaacaaatcctttgatttca

SEQ ID NO: 33622 - DNA, 440 bp, Gossypium hirsutum
  Clone ID: LIB3145-018-Q1-K1-G10
ggtcgaccacgcgtccggatgaatcaaatgctagagcttacaatactcaagattattcaaaaatgttggataaaattgccagggcaccggcaccagtatcaactccgctgcaaatgccaattcaaacggcgtatttaacctctgctgcttattcgacatctgcgaccgcagcccccgcaaaccaaccagtttacctcatttcgactcctgcagccggagtttatcaacagtctccgacaatacaacaggtaaccgtaccagctggtcaaccttactacggggtacagcgggtggtttaagatgttaaccgagagcagtcggtttacaatgcggtttcatccacgaagtttggggcatatactgagggaatccaagttatgcatccgactggtgggatgcctgaatcaagatatgttcaaggtggtttatgatggggcatg

SEQ ID NO: 33623 - DNA, 428 bp, Gossypium hirsutum
  Clone ID: LIB3145-018-Q1-K1-G11
ggaaagaagataaaaatgaagaagcaagtaatttgttcgactgtctttcctcttctttgcattcttcttctttttcttagtgttgaagctgagacgtgcagccctagtggcaagatcaaagggaaaacccctccacctgggcaatgcaaccaggaaaatgattctgattgttgcaaggatggcaagtggtacacaacatacaaatgttcaccccctctatcaagccaaacgaaagcaacactaacgcttaacagctttgagcgagatggagacggtggtgcaccatctgaatgtgaaccagtaccactccgatgatgaccctgtggtggcactttctacagggtggtataacaatgggaagaggtgtttgaagtatatcaacatccatggcaacggaaaatctgtgagggctaaagttgtggatgaat

SEQ ID NO: 33624 - DNA, 423 bp, Gossypium hirsutum
  Clone ID: LIB3145-018-Q1-K1-G2
attctcttgtaatagaatcgaagaaggtggaagtagaagagagaaagcggattttctctcttctcttctacattttttgttttttttttcttttgtttctcatgacggcataattcgtcgtttttattccaagaaattagggtttgggtttggtgaatttctaagatcatgaatgtgatgcgtcgtctcaagagcattgcttcctctcgctcttctatttccgattccggtggtgatagcttcaccaagagggcaaagtttgatcaagaatcagaattcaaggcaacaggggaatcaaatatatctgataggagtacacctgggccagagcatcatatggcttctacttcatcggaaactgtagcaagcacgtccaatgcagcttctagttctagtaatataacagagaaattagatctcgat

SEQ ID NO: 33625 - DNA, 189 bp, Gossypium hirsutum
  Clone ID: LIB3145-018-Q1-K1-G3
attatcttttgataaaacccaccaacgcggaagtagaagacaaaaagcggactatctctggtgggctttacatttaagtgatggttcttcttttggtgcctctggacgccataattacagggttttgtttcaaaaaaaataggtttggggtttgggcaatttttaaaatctgaacctgaatcctttttt

SEQ ID NO: 33626 - DNA, 240 bp, Gossypium hirsutum
  Clone ID: LIB3145-018-Q1-K1-G4
gggtcgcccacgcgtccgcacttttataccttggtaataattaatagatggaatgtgagaggcgcagctgtcgttggggggggagactacctttttttctgtagttactttagtggcttaatggatcatagaacggcagggtggctctaattgaccaaagacttgactggggacacatactgacgttttgatgaggaaatgcaccatttaacagaatctgtgcttataggtcacacatga

SEQ ID NO: 33627 - DNA, 422 bp, Gossypium hirsutum
  Clone ID: LIB3145-018-Q1-K1-G8
cccacgcgtccggttctcagagaggtttctagcagtgttttgaaggctgagagtggggtgagggttcatgctttagctcactttccagctgccaaaatcactaccattcttgtgggtgatactattctttgtcaaaatggtaaaggagaagaagacagtttgggttttttactaccatccctcaagaacatttatcactctcttacaaagtggggtctagagaaagacatcaaagtgtcggctgttttttcttccgattgtttgatgcaaaactctgttgtttttactgatgatttgggtaagaaggtggtcaaatctctgttggagttcttccaaaatacaaactccacttactccattgttgcttttccaaatttgtcttcctcttttcatgaaacattggttttactctcctcccacct

SEQ ID NO: 33628 - DNA, 332 bp, Gossypium hirsutum
  unsure (1)..(332): unsure at all n locations
  Clone ID: LIB3145-018-Q1-K1-H1
caaagatatgttatcggactaccaatgcctaggaatctacctgatagggtacaatgtctttcactttgatcattaattgattgatatttttttgttgttttttgttttgggggggaggggggttggaggagagtgaacggccattgttatccgtcattcttctcttactatgctccaagttcttttgctcataattgaaccacacaaacaaaaatgtatgataagaagcacgtagatcttcacacattgtatgccattgattcttcatgctgatcangtttaaacattttgaaatttcttggttggatgtatggtttgatgtatgtatgtat

SEQ ID NO: 33629 - DNA, 358 bp, Gossypium hirsutum
  Clone ID: LIB3145-018-Q1-K1-H11
cgcgtgcgcccacgcgttcgtccacgcgttctttaaactctaacactttttccttacattggcacactataaaagttgtggttctatgttttcaacaattctcatcattatattaattgggggacaaaaaagtttctgtcttactatgaaattaagatgttgattcttatcccaaagactttattgcaatttgttaaagatatagattacttcatccgagatttttttattaacattttttagataacaaattatttccaaattcgtttaaaactataaaaggtaggatcctgtttataacaaagctaatcgaaacgatagctctgatcagatctaagtatttctttcctgaaaaact

SEQ ID NO: 33630 - DNA, 358 bp, Gossypium hirsutum
  Clone ID: LIB3145-018-Q1-K1-H3
cccactcttacttccacacctcccttcaaaaccaaataaaaacatgtcaccacaccttaggatggtttcttccatatatgtgcttttattattattcatttcagcctctaaagttcaatcatacgctatttatcttattcccacctttgacgcaaaaactgacggtaaaactcatctaagtaagccatttttgtatgcttgaaaagaaacatcttcctttgtaaccccatctacagatattattcctaaatggacatatttattatcaaaagtacacttagaaagtccattcaaagtatcctatctatattaatgttcaaaacactataaaagcttctcctcatcctcatactattat

SEQ ID NO: 33631 - DNA, 435 bp, Gossypium hirsutum
  Clone ID: LIB3145-018-Q1-K1-H7
aaatacatgagaagcttagcatcgccaaattcaaacctaaatcgaagaagaaagcaatgtcggaaatgggagagatctgagtcgccggcggcaatcatcttatttttccggctgttatacgatgtctccctcatgcttaccggtgaaggaagaaatggagtactcacgcatccatgagtgcagcagcagtggcagtgagaagagaaggcagagatggagaaatctgctgaggagattggtaaaagatgggaagagtagcatttatggatcctcaaagccattgtcttttcactatgatgctgttagctattcccagaatttcgacgaaggttttcatcatgaacaatcaatatttcaagacgttagatccagataaatttgtgcttatttatgtttcttttttctgggtttggtatcaattttgatgtaattgta

SEQ ID NO: 33632 - DNA, 413 bp, Gossypium hirsutum
  Clone ID: LIB3145-018-Q1-K1-H8
gatttactaggcgatgaatccaaaaggccaggaattgctcatcaagaatatacctgtaggtccaattcgagctgtcaaattgacctgtggaagtgaaatatattcaagcaattagagcatatatatactaattataggaagcaaaatttataagaaaaagatgtttttaatccaggttttctgtacattataaaactatatatatataatatatgggactgcattagctatgggagtcctggtgcccttaatttgtaccaggcatgtagttattgcttaattgacattatgcgaagtacaaataaattagtacgtactttttactgtggccgacagctctttgggactgaatcggcctaatattgaatgtattttcagcttgaaatacatatgatggtttctttattgtgatc

SEQ ID NO: 33633 - DNA, 192 bp, Gossypium hirsutum
  unsure (1)..(192): unsure at all n locations
  Clone ID: LIB3145-019-Q1-K1-A2
aatnaaggcccgacccacgcatacgtccacgcttccttttaaattcaatccttaattataaaaaaaaatctactccataattaagttgtattaatagaaaattcaatcacctatcacccaaaccacctcatttctacactcctgatgagctccaaacttgtacctctgctaacacccttacttttaacaagg

SEQ ID NO: 33634 - DNA, 400 bp, Gossypium hirsutum
  Clone ID: LIB3145-019-Q1-K1-A3
aaaaaactgagatatcaaaatcaagagacacatttctgtagcttaaaatttttccccttgcgcccaaaaatggcggatacagctgttgttgttgatgtgccaaggaaatcaagaaacaatggaagaaaagccttgaaacagaagaactcatcatcatcatcatcaacaacaacaacaacaaatgaagccaatactttggcacaaaagctctcacagcagctttccccaacgcaggctccttctccgatgaaatccgatccgtcgaaagagaaccacgacggactctctcaatctctcaaaggaaaagccgcgggcaaagggaaacagagcaagaaatctttcgagaaagacttgcaagaaatgcaagatatgcttcaaaagctaaggatagagaaagaaa

SEQ ID NO: 33635 - DNA, 427 bp, Gossypium hirsutum
  unsure (1)..(427): unsure at all n locations
  Clone ID: LIB3145-019-Q1-K1-A4
ccgtccggcaccaanncattactgnnatgagagagncagcnncttgtattgnaaagctgnnctgaaacngnntgggtggatagcgtttttgaacaggcncccggcattttatcnnttggtgnnngttcaaaannncccaanntttggcttgnnaccttgnnctgtttttngnngtgttctanaggcnnctatccganntatctaacatnnccggtaaagaatatggtggaaccatacccacatatcggtgaataggtatgnnngtcggataggaaatatagctgtgggagaaagtctgcttagaattaagtgagtacagagaacaacttttgggtgcctggaatnagaagtcccagtaccaatcannacccaaattttgtgaagtagagtgtttctgaaaataatacatgcttagaaaagttgaaac

SEQ ID NO: 33636 - DNA, 366 bp, Gossypium hirsutum
  Clone ID: LIB3145-019-Q1-K1-B11
cggacgcgtgggtcaagttttacaatttgaggtacccccaactggagcaagcgtgattggaagagaatccgagacttgctgtcatataccacaagaccacagcaaatggtcaaagtcctccggcgcttccttgcaaattggacaaacgacatcaacaattaatttcctctgaaacagattacaaaaatgaggcacaaaattattaaacaatctctatatgtgtatttttattttagctggaatgtgcataggccaaaaagatctgcagaaatccttgtaattttctgtattagggaagttgtagattattattttgtaaatgttttgtaactaggacccgatacccacttttcggtgagtacaccc

SEQ ID NO: 33637 - DNA, 288 bp, Gossypium hirsutum
  Clone ID: LIB3145-019-Q1-K1-B5
gctgacttgaacagaggaatgcaaataggttcagttgattcatatgctggagctggaagattcaaccttgccttaaccacatgctcaaatttatcgactcaaagacagaatggtcccataggattttcacatttggaagtgggtcgtccttcttcaactaatgattggcatactgggtatccccgctttacttcaaagcaatctcacttcacaccacatatgacacaaaatcatcccagtccgttggagcaacaaaccctgtcgcgactcaatcatgggagatccact

SEQ ID NO: 33638 - DNA, 232 bp, Gossypium hirsutum
  Clone ID: LIB3145-019-Q1-K1-B8
gatgagtagtagttactagcacatcctctgcgagtattgaaagaactgacaatgggggggttttcatataagttgtgaagactataaccgtagccaatgacatcgctactgtgcaaaagccgtcaggtgacatcaaacatgtattacattgcaccaactttagcgagaattgaacacatgtgggactgaacgagcagaagagtcacttggactccgctatcgaccatgggga

SEQ ID NO: 33639 - DNA, 420 bp, Gossypium hirsutum
  Clone ID: LIB3145-019-Q1-K1-C10
gaattttccagtataatggtggtcacagtcgagaaatctaccatacgaagagaatgcaaagggtattctgtgtgaagtatagctgtgatgccagttatgtcatttcgggaagtgatgatactaaccttaggctctggaaagctaaagcatcagaacaattgggagtggtacttccaagggaaagaaagaaacatgagtatcttgaagctgttaagaatcgttacaagcatctgcctgaagttaagcgtattgtgaggcacaagcacttgccaagaccagtttacaaggcagccaaccttaaacgcactatgattgaagcagaaagaaagaaagaacaaagaaggaaagctcacagtgcccctggaagcattgtgactgaaccagttcgtaaaagaagaataattaaagaggttgagtgag

SEQ ID NO: 33640 - DNA, 352 bp, Gossypium hirsutum
  Clone ID: LIB3145-019-Q1-K1-C3
atgcgtccaatcgtacattctttcatcaatcatctaaaatttgttataagctaagtgcctaaagacggggttatatacaagggatggagccaatgaaatgctcgcattttaattaaaatttgcatctctccttgattcataatcaaggatcaaaatcttgtgctataccatacgcggatctaactcacatggcaggtgtatctaaagaaactttgactctgtctacctctctttgcaaaaaaaacattgtaagttcccattcgtaaaatttgggcagactctgtgctctatctgactatatatattaatttatctaagtggcattctttaactttggcaatgagaaatgaca

SEQ ID NO: 33641 - DNA, 426 bp, Gossypium hirsutum
  unsure (1)..(426): unsure at all n locations
  Clone ID: LIB3145-019-Q1-K1-C5
ccagtacatggttacatcaattcatgaaaattggttctgtgcgaggtgcctgaacacgtcaaaatctgctggggaaggtgccattgtgatgcaggcatcagtgtttctgttggttgcgctgtatgatgggtcagttggcttagcatctcgtgctatggcatctgtggatcaacttgtttggcagctgaatcgaaagaacctttgagcctggcttccacataaaaaaaaaaaattattgtaagtttcggtgctaaaaggttgggctgcctctgtgctgtatctgactctatctatttatttatctaagnggcattgtttagctttggtaatgagaaatgacaagggccaaatgtcagaaacggactaattgttggaagcaagttgcagagatcgttgtgtcagactccagttgcaacatctgatcgt

SEQ ID NO: 33642 - DNA, 119 bp, Gossypium hirsutum
  Clone ID: LIB3145-019-Q1-K1-C6
cccacgcgtccgattagcactctttagcaagttggagaatgagtggcttcattaatctggctcatcacttggtcagccagtggctatatggaacatgattcagatgattgccacatgct

SEQ ID NO: 33643 - DNA, 359 bp, Gossypium hirsutum
  Clone ID: LIB3145-019-Q1-K1-D1
cgcaaaagcttcctattttcatggctgcctcacttcggctcaatcctacttcaaccccggcgctctgcccaatctccacctacaagagcttgactccggtactctgtggcccacgcgacaaccggggacctgtcgttaaaggccgtatcttaagcaccgaagccatccaggccatccaatctctcaaacgcgcccagcggaactcttcatcgacggaaacggtcaccccactcccttacctgtcccgcctcataaaatacgacctgctcgccgccctgcgcgaactcctactgcaagatcaatgcgccctatgcgtacacgtactctccaccggccgatcagaatacccgcctcctgac

SEQ ID NO: 33644 - DNA, 280 bp, Gossypium hirsutum
  Clone ID: LIB3145-019-Q1-K1-D10
gcaacatggagtttcagaagaaaaggcatatgaagagttaaagaagctaattgattctgcttggaaagatataaaccaggagttgctgtttaagccagctagggctccatttccagttcttacttgcgttctcaatcttgcgagggttatggatttcctttacaaagaaggagatggttatacacacgtcggaaatgttacaaaggctgggattacttcactgttgattgatccggtgccgatttgatgacgaattttggatttgagaaagctgacaaac

SEQ ID NO: 33645 - DNA, 297 bp, Gossypium hirsutum
  Clone ID: LIB3145-019-Q1-K1-D11
gtggatccttacttcataaagctagctgatgccatggttacttggattgaagcttggagagatggtcaattgtcctggagaaaagcctgcaatgacttctttacccaacgccacttctaaaaagtaaaaaagcattttgattgagcagtacctttgttatcattaccatcatttatttgttttttctttgaccttttgagacatttccccccaatatttcatgcgttgggttgttgttcaacagcaattgttttagttttaatacagcaaggtgaatttgaatcacaaaacaatgac

SEQ ID NO: 33646 - DNA, 279 bp, Gossypium hirsutum
  Clone ID: LIB3145-019-Q1-K1-D3
cgcactagcactaagtttctataacaaaagttattcacgtccaaaagtacaaagcttgcagggcgaggtggctaccaggtgacactaatacatacatgacgaggatatggtgcccataaaacaaacaggatctaaatggacacatctttatgaccctcgacactttatagaaatgctcatgcagtaaaaaccctcctactcatttttctaaaatggaaacggagaatctcttctttagctgttctgctaatgatagggaaaacaaactgacaccctgta

SEQ ID NO: 33647 - DNA, 428 bp, Gossypium hirsutum
  Clone ID: LIB3145-019-Q1-K1-D4
caaaggtgttatatttttggctgctacaaatcgtagagatttgttagatcctgcacttctcaggccaggtcgttttgatcgcaagataagaattcgtcctccaaatgctaaggggcgattgcaaattttgaaaattcatgcaagcaaagtgaagatgtcagagtcagttgatttgtcttcttatgcaaataacttgcctggatggactggagcaaaattggctcaactagtccaagaggctgctcttgtagctgtcaggaaaaggcatgaatctattcttcagtcagatatggatgatgcagtagatcgactaactgtaggacctaagcgtgttggtattgatctgggtcatcagggacagtgtcgcagagcaactactgaagttggagttgctataacttctcatctgcttaagcgatatgaaaatg

SEQ ID NO: 33648 - DNA, 351 bp, Gossypium hirsutum
  Clone ID: LIB3145-019-Q1-K1-D5
ggaacagcggtaaagaggaagaaagcttctcacgccgggatgtttgacattgcaaagacagcaaatagaccgatgatacacattggtggctgaggtacttatgtaccttctaatgttttaaggaatctggtagctcggtttcttttttgttggtcttgtttttagttcttgcttgttgaggttgaacgattatagtaccgttttatagtgggataacataggctctcttcttcatatgtattgctccgaatagcataggaagactgttacctgttagaatacagaatggtgttgtaagtcaactaatgtttatacccatatttgattggtacaagatcacagatcctgtta

SEQ ID NO: 33649 - DNA, 407 bp, Gossypium hirsutum
  unsure (1)..(407): unsure at all n locations
  Clone ID: LIB3145-019-Q1-K1-D6
ctcacacgtacgcacagtaccaacattaatgctgctcccatctgccaaacactcactgcgagcccgcaaccaagtcgacgatcagacatacgtgactgcgatctcaaatgcctccaaacgatcacgctggcttaaggactcatcttgaggcaccattggcacttaatggaaaggcacatgccatacatgactctaccacaacatcgtgcttaaacagaaatggggaatattggtctttgcaacgccggtcatggttgngaaaacaaaatgacaatatctagaaagattgagtatcatatcttttcaacgacaccgaatcataaatgtcgtgttcatactgaacatggtcggaagaaatcttctgattttggatgctcacaagctacatgccagggtcaaggtacttt

SEQ ID NO: 33650 - DNA, 371 bp, Gossypium hirsutum
  Clone ID: LIB3145-019-Q1-K1-D7
gaggagaagaatgaggaggaagaggaggaaaaatggcgatgccctgtacgtagaccaacagaagccatcagcaaggaaaaaggaaaagtacctgcaacataaccccatgagaatgcttagaaacgatgccatctttttcagctaaatcaaccatctgcacaacacttattgcagcacgatgcacctgacaagctacatgttatgtattggttaccaatatctttgttagcaagcaaaatgctccatggatgacataaaataatgaaaagttatgcagcgcctcataatcaattgaatgctcacagtcaaattgatgttataaataatagacactcatacatatgtttcagtctactagatgaagaaataca

SEQ ID NO: 33651 - DNA, 356 bp, Gossypium hirsutum
  Clone ID: LIB3145-019-Q1-K1-D8
attgcaacgcaccaaacaggccttaacaaccagaagctaagctattgggtgacctgggagccttgtgcaaaattcagatcagccaaaagacttcacggcaaaacgaatgatgccagaatctgaaccgcaactgatgggaacatggcggaacattgggtgtacaactaactttggatgacattagatagggatatagcaaatgaaaagaaaagaaaaactattaattagcgaggaaaacatttgccttggcctctttttatctctatcttatgaatgattcttttttcttttaatgtactcatgtagctgaattggatgttgtgtctgtgactaatttacccttgcaatgtacttat

SEQ ID NO: 33652 - DNA, 411 bp, Gossypium hirsutum
  unsure (1)..(411): unsure at all n locations
  Clone ID: LIB3145-019-Q1-K1-E10
aaatccttctctctttatatataatttattattattatatatcctttacaaattcatcttcaccttatgcgaccagggtgttcaaaatctttagagaggaaagcaaaagaatcccattctcctccttccagtttgcagtccctggaaagctgtaccctataacgggatggacgtgacagtgctcgacagacaacaagcaacctatccccttgaattatttgcaagatcagtgcctctgtttcagagttatttaggtagtggaccaatagttgagctgaaaaggccagaagcttatttgggtggtgatggttttcacgaatttgtctactttccaatgggtggaggaccaaaatttggtgacagtgaaaagttgaatttggtgcccnctgatgctgctccggttactgtatt

SEQ ID NO: 33653 - DNA, 372 bp, Gossypium hirsutum
  Clone ID: LIB3145-019-Q1-K1-E2
ccggagtgtaaggcaacaaacctgggaaaacggaggggaacaaaatcaaggcatgtgggttcagcttgatggtggtggcgatggcgaggggagtccaaggcaagaggaatgatgccgcagccgcagccgcagctgatgggaacatggtggtacattgtttttacaactaactttggaggacattagatagggataaagcaaaagaaaagaaaagaaaaactattaattagcgaggaaaacatttgccttggcctctttttatctctatcttatgaatgtttcttttttcttttaatgttttcatgttgttgtattgtatgttgtgtctgtgactaagttacccttgcaatgtacttatgttgggcacatgct

SEQ ID NO: 33654 - DNA, 266 bp, Gossypium hirsutum
  Clone ID: LIB3145-019-Q1-K1-E3
acgaacgtaacgcaacacaccctccaaatcgcgtgggaccaaaatcaaagtttgtaggttgagatcgataccggaggccattgcgaagccattacacagcaagatgaactatctcatactcctaacaacagtttatgtgaacatggcggtacattgtttctacaacaaaatctggaggacattcgatcatactactgcttaatataagataataatggcttttaataagcaaagaaaacattatccttgacctccttttctctcta

SEQ ID NO: 33655 - DNA, 325 bp, Gossypium hirsutum
  Clone ID: LIB3145-019-Q1-K1-E6
attgaactgcacctgactaaatgttcattgcggtagctagttcatcgcatgtgagctcgggtttatcgttcatgcgagggcgcgcggattacatttcattagaaaatatgccgctcacgtaaccaccgctgacgtgtatcatgctggtccattccatgtacaactaactatcttggacctctcacagggataaggctactgaacaaaaaacatttactattaattagcgatgaaaacattggcctatgcctctttacatctcctatcctatgaatagccctttaatgcttaaaggttagtatatcgatgaagcgattgctgtgtc

SEQ ID NO: 33656 - DNA, 286 bp, Gossypium hirsutum
  Clone ID: LIB3145-019-Q1-K1-E8
gggaatgaattgctcgaccgacgcatgcgtactatttgccagtgtgcgtgaaacatggaattgcacaccatacagaagcgcatgaggctgggacggtgcttgacatttgcttagcattctaaattctatggatgacaatatagtgaagacctaaccgagcatgtccagaatattgatgaaattactcgaagtgcactatcagagtcaactcagaaacatatctatttcaaaatagaatatctgattgttactttaattcgaaatcattacaatgtccttatgtctt

SEQ ID NO: 33657 - DNA, 357 bp, Gossypium hirsutum
  Clone ID: LIB3145-019-Q1-K1-F10
cccacgcgtccgtgagaggcttcatatgaaagaggttgttacaaagttaaagaagatcaaagtaaagttatcaagggatatgcaacgcgttcgatgaagggaccattgttaaattgactaaaataaacataagctttgctttctagcaatatctttgataaatatttctacagatgctctgttttcctataaagtttattaatagttatttctgcattttgtgcatttttttttaaaaaaagaaacaagttcaaggaattagctacaattaggttaatgggaatctatattaatcattgctcgatgaacatctttttctaacaaagattgagcatgatcagttgggtcttcaaaaag

SEQ ID NO: 33658 - DNA, 413 bp, Gossypium hirsutum
  Clone ID: LIB3145-019-Q1-K1-F6
cggacgcgtgggtgtggctgaaaattttgtgaatactattaaggagataagagtgcagtgtgcgggagacacttctagtaattacccggcaattattaatgactatgatattaatgggggggctcctcagtgtgtatattttgtaaatggatgtcgcaacaggggtagtctgtgcatattttctcattcactccaagcaaaaaaaccagcctgcaagctctttttctctctgcatgggtgtaggaatggagatatatgttccttctctcatgagtcgtatcagccaatctcatcatatggctcaaatgtatgtcagccagaagctgatcatgctgatgcctcatcacttgtacgactatttggaacctcgtctgctggatacatccttttgttggatgatgctaatatgcatt

SEQ ID NO: 33659 - DNA, 327 bp, Gossypium hirsutum
  Clone ID: LIB3145-019-Q1-K1-F7
aaaaaaacacctgcgccttgccgacttctctcacttcgactggacagatccttcaaaggcagagagaggagctgacgcaaccaactaagagttagatatccttaatgcatgcatggatccgagtattaaacagcacttaacagaagcagttgagcagaaaaatggtgaatatgcacttattagagatgcggaaatctcctagctgaccatttatgagaaacctattccttgctttggctgatggatacggagggtctctcttctgctaggatcatctatcccatcgatgctgtattatgccaccattctctactttggaaactacta

SEQ ID NO: 33660 - DNA, 406 bp, Gossypium hirsutum
  Clone ID: LIB3145-019-Q1-K1-F8
accgggaatgaattgctcgaccgacgcatgcgttcattctccgataattgaggagcgtgcatgtggggaggctagcgaagcatctacaccgccatgaccacgtaggaaagttcctaagacacccattaaggggcgtgatgctccatctcttgatgatgatttctatttgtaccttgatgattggtcatctcaaaatgtactggctgacgggctgggtacttgtgattatttatggactgcatacattagtgaagtcacaaagtggtgtgatttgtgaccaaatgataatgtctgtgctgttcaatggacccggcaaggttcttacatatcgagtggtgcaaatctcagtcaataacacggttgcgatggaacttattcgaagtaagtccaaagcatgggtggacat

SEQ ID NO: 33661 - DNA, 247 bp, Gossypium hirsutum
  unsure (1)..(247): unsure at all n locations
  Clone ID: LIB3145-019-Q1-K1-F9
tttagtgaagagagaaaagcagtccaagggtgaaaggtgctggcatctgacgatgctgcttgcnattgaaactaggactacaagcggctgagagttgtgcgcaaggtttagaatagaaaggcaacgtgaaacactgttagaaggctcaagctacataattgcagattggatttgcggagcttgattcaaaaagctttgacttgccccgatataggaggtgaactcgatacaagcttgaaagaaagat

SEQ ID NO: 33662 - DNA, 123 bp, Gossypium hirsutum
  Clone ID: LIB3145-019-Q1-K1-G11
ggcggacccttagatccacccttgcaggtttcaaaggtgacgacagaatcagacacgcttagtttatcctggaaccactggcctaaggtcttgtattaacccatgcgtcttgcttttattcct

SEQ ID NO: 33663 - DNA, 271 bp, Gossypium hirsutum
  Clone ID: LIB3145-019-Q1-K1-G3
cccacgcgtccgcccacgcgtccggtggaggagtcgttcgtggagcatggcacgagtggaagaatcgactagaggctgcagtggctgaaatttctagggtttctgccgaaaaaatccttagtgttttgggctggggctaaaaattgggtattacattactagcatgaagcatttctgccctattagtctttgtacggtgttgtataagactatctctaaaatagtggaagccgacttcaaaaagtattaacataaagatcttagaacgtaa

SEQ ID NO: 33664 - DNA, 163 bp, Gossypium hirsutum
  Clone ID: LIB3145-019-Q1-K1-G5
aggcgtactggaccgagattggctatgcataaacccgacagaactgaaatgtcttgcgggcccaaaccgacgtttacgttccatatcctcctctggcttgcataacaaccaatcatcttcttactatgtaccgatgccttatcttggtctactggatgcattg

SEQ ID NO: 33665 - DNA, 242 bp, Gossypium hirsutum
  Clone ID: LIB3145-019-Q1-K1-G7
cccacgcgtgcgattccaatggcgactacatcttcggatgttcatgctggtgagcgcgtgcagcgtgcatgctccgtgaagcaaccgcaactagttgctccacttgtccagacgcttgcgtactcttaagctgtacctgctgcatgggctcggcttgtatctatggaacggcttcagaaccgtatcaaaggccaacataaatgaatgatcgggtgcttatactcgggtcatgatgctgagcg

SEQ ID NO: 33666 - DNA, 220 bp, Gossypium hirsutum
  Clone ID: LIB3145-019-Q1-K1-G8
tgtagtatacccaaacttacttacccgtgcatgcgatgatactgctcttacatagagtgacgatacatcaattcagatggccgtctatgttcagcgtcgtgactgggatatcccttgcacttccccacgctgttgtgttggctctcactcccttttctacggctggcgtcacaacgcatatgctcgcacctatctcactaatcaacaattcatcagtctg

SEQ ID NO: 33667 - DNA, 397 bp, Gossypium hirsutum
  unsure (1)..(397): unsure at all n locations
  Clone ID: LIB3145-019-Q1-K1-H12
gaaaatgaaggcatcgaggttaatcaatggtggaatcgccttgccaaacgacaagtccaatatggccgagcgagagcttgaagagagacctctttgtgatcaaaaggtttgcagcaatgaggtctcggatttaaatcttgagtctgaatccaatactcatctaattgaaaacgcgaaaatagtgctccgacttttgcctatatggacgatgcttctagtgtttgcagtaattttccaacagcctgctactttttttacgaaacaagggatgacaatgaaacgaaacattgggaagaacttcaagatcccgnccgctacgctacaaagcgctattacattgtctataatcctttgatgcctttatacaacaaagttttcatcccgatcacaaagatgg

SEQ ID NO: 33668 - DNA, 409 bp, Gossypium hirsutum
  Clone ID: LIB3145-019-Q1-K1-H3
cttccgtttatttaaccttttaccggttccaaatcaaattccttggaaaccttttggagctctcataaatcatactagatcttcgattctgttctttttagtttaagctttccattctgcaagatcatgtcctaatagggtactagaaaatcggaacattagaagattaatgtatcagcatgttcagagtatccataagctgcaaatctatggaattcatttgtgcatgtacatattggttgagaatcttcctgctggtttatggaaaatgttttttatcctgtaagtttctttattaagggtcttaattgagcataagcagggttctttctctgattgttatctcgagagtgcgaattttgcacctcagctgatgtacgcataggtattttcttatttactttttgcg

SEQ ID NO: 33669 - DNA, 319 bp, Gossypium hirsutum
  Clone ID: LIB3145-019-Q1-K1-H7
atcaatcttacaacaactccttcacttattttcacctatactcccactatcctgcagaagtttttctccaattacactgctaacaataaatcgactggtctcatctacagaaaatactcctcctaacacatatactaaatctccacaactctaaaaaaatgaaacttacatcacttcctaattttataatttcacacacatacctaacaaaattcttttttttacactttcacattataactcttacccctttatattcaacaatatcatattatactagctcaaccaccacacttttgatattggccataaccagatc

SEQ ID NO: 33670 - DNA, 435 bp, Gossypium hirsutum
  Clone ID: LIB3145-020-Q1-K1-A12
cccacgcgtccgggacaatattcagttaaatccgatgtttacagctttggagtattgggtgtggaaatcattagtggtaaaaaaatcagtagcttctccaaccaagaagtgggcgactctcttctaacccatgcatggagaaactggagagaaggaactcctttggaagtagtagatccaatcctgagggatggctccagaagtgaaataatgagatgtatccatcttgggttgctttgtgttcaagacaatattgattctagaccaaccatggcctctgtcgttctcatgcttagtagctattccatatcactgccattgccatcaagacctgcattgtccatgctttccaccatggagacagaaacgaagtctcagtcatcatcactcttcaatccatctatacgaagaaacatttcaagtgtcagtcaacga

SEQ ID NO: 33671 - DNA, 312 bp, Gossypium hirsutum
  Clone ID: LIB3145-020-Q1-K1-A4
gctctttgatgttttttgatgatcattctgcacatgatcaagatcatgaacggaatcgggaggtccagtccttaactgaaactctattagcaacatcgtcttttacaagagaacgctcaaactatgttttttgggagcgggaaaaggaacttacgagacatttgataaagggatttgtagctgcgtttctttttttggatcctttggtcatgggacatgaaaaaactgccaatctgatggcgagtaaagacagtctaaatcggagcttcttacccagatctctgacttccttcatgatgattcctccaaacc

SEQ ID NO: 33672 - DNA, 149 bp, Gossypium hirsutum
  Clone ID: LIB3145-020-Q1-K1-A5
gcaaaataaccctgaagtaaaagatggtttcttcaaggttatggttctttgtgtagcgatgttgctgctagtgttgctatgctttcttttccccatactctattcacacgtgatggcctggtataagaaggcgttttttaaacgaactt

SEQ ID NO: 33673 - DNA, 408 bp, Gossypium hirsutum
  Clone ID: LIB3145-020-Q1-K1-A6
cccacgcgtccgcccacgcgtccgcccacgcgtccgcccacgcgtccgaaatcgaactgctcatcttttcattttcttgactctgagaaacagtgactttgagaggaaaaggaagaaactttgttttttgaaagcgagatagggtttttattgtgtatttgataaagggatttgtagctgtgtttctttttttggattttttggtcatgggagatgagaaatcgacgatcgtgatggcgagtagagagagtagagatcgagagcttcttatcccagtctctgacttcgttcatgatgattcctccaaaccgtcttcttcatcttcaccgcgtcatgccggtcacgagaccttttacaaatttgtcaagagttgggcttctaagaagtttatgacaggatgtgtcattt

SEQ ID NO: 33674 - DNA, 420 bp, Gossypium hirsutum
  Clone ID: LIB3145-020-Q1-K1-A8
gaaaaaaaaaactgaacctatcctctcccttttaaggttgccagctgccaatcatggtcgacgccgataaccggcggctactaaggccaaagctcctttactagcggtggtcgaagcgagaaaaggagggctattcaaccccgttctggacctccaccttaaggcccgttactccagaccaaacaagtctaaccatggagagacctttcgtcgccttctcgaaccgataacaacaccgattatggtctccggcgacgggctgtctagaccgctactggtgaattcatccggtattggaagaattaacctagcctttattgttcaaacctgatggtgctttaggcacttaattgcttttcatatgcacgaagagacgctccgttcactaaagcttgctaaaagttgatgcttgattttttt

SEQ ID NO: 33675 - DNA, 384 bp, Gossypium hirsutum
  Clone ID: LIB3145-020-Q1-K1-A9
cttcaaaacacctgtctcacctattaactctctcggcactggaattgctcttgctggagtgttcttgtactcaaaggtgaagcgcataaagcccaaaaccaaggcagcttgaaagtttagccggtaagtttatattggtttaggaaatgttcagtggcattaattgaaggacatgtttgcagtttaggccagaaaagtagtaggcttggtttgatttctatcttttaaaaaaaaatagttttctaatttttggtccatattcgtcattgggatatttcatttttggaatgccacttgattttagcaaagagcaaatgtagctgagaaaaaaaaaatatcattttttggtttaagcttaatgactttcctgatggttcattgttt

SEQ ID NO: 33676 - DNA, 372 bp, Gossypium hirsutum
  Clone ID: LIB3145-020-Q1-K1-B12
gattactgaatactataagtctcacgtgtctggtcactatgtcgttctcgaggacattaagaaatcttgtattcaggtgagtttccaatattcggaggaaagagtgacttgggcaaatggacatgatgtagatgttgtggctgttgatgctgtttgtatctgtaaatgaatgatcgtaattgcgatgctggttatagcaatatgctgattgcagggacaatctgctaagtacttttaactgatatctataattgaccaaggttaacttgcggtgatggtagaaaaggaaatttgaactgtgaaatgctgcttatgatgtacgtatgatgcaggttcctaaaataaagaaagtattgtcttgatctgaccttt

SEQ ID NO: 33677 - DNA, 426 bp, Gossypium hirsutum
  Clone ID: LIB3145-020-Q1-K1-B4
cccgagactaacccttttggaaatggagcaattcgggtttatttgcgtgaagtgagggactgtcaagctaaggccagagggattccatatcgaaagaaaaagaagaagaagactcaaattaaacccaacgtcgacgatcctatgccttcttccaaccagcagccctcttctcagctagctacctagggtctttctttggattcttcacataaacggatgatgagcattcagaaaacatgcatggcagagtggtggggaagggtttataaggcaaggcaaggcaacgagtatatatgaagttaaatttagcactacaactactatacaagtaggcattaagcactggtttctgagtctctggcgcctttccttgcataatatgaagcactacttgcattatgatcaattaatgcccttgtcttactt

SEQ ID NO: 33678 - DNA, 332 bp, Gossypium hirsutum
  Clone ID: LIB3145-020-Q1-K1-B5
ttcttatagttaaccgaagacactatatcacactagcgctctcactgaacccaatcattcagcttgaaatacttcttgggtttctttgctaaaaagctcctcctcctgacgccttaatagagcagaatcctccttctgttccaacattagtggctgtaaagtgggcgagctcattgagaaaatcggcattcattgttgattggcataattgtggatataccttacttggattggctgggggaagaagcagcccatttgtctcaatataccattggtttgagaagcattatgggcaaatggcaaatggttccctatgtgtaacaagggcaatg

SEQ ID NO: 33679 - DNA, 415 bp, Gossypium hirsutum
  Clone ID: LIB3145-020-Q1-K1-B8
cccacgcgtgcagacacgcgtccgcccacgcgtacgcccacgcgttcgcccacgcgtgcggttcagctctttgaactgaatgacatctcaaaacccatggtttaattaccttgtccggcctcttggtgcaaatacttaataatgatctactggcgggattgttggataaccatggcatgcaatagctgctttttgttgttatgatgatgccaactattgtaatatttgtcgacgctgaatcctaaattatgtcacttgttgactggtataaggtgtggcagactcgattgctcctcttaacgtttattgagtgaatggggagatcgagtgactgttctctcattggagctgccttgctaaattttgattgatacttggcatttgatgagtttcatagtttttgttcactggaatg

SEQ ID NO: 33680 - DNA, 241 bp, Gossypium hirsutum
  Clone ID: LIB3145-020-Q1-K1-C6
gcgtccaagaccatctattcctattttcaccaagttgaaatctgccgcatcggggggattcccaggtgcgccgagcccggccgagctcgctacagccgggtatgtgctggtatccgcagaaattatggcacccgccaacggggttatgatggaaccttactgagctgaggattctattaacactgtacttaagtaatgaaaagatatggaaagttcctatgcttgcaacacaagtataact

SEQ ID NO: 33681 - DNA, 228 bp, Gossypium hirsutum
  Clone ID: LIB3145-020-Q1-K1-D11
gcgtccgcccactcgtccgaccactcgtgcgatgatttttaaaatagaatttgccatcttaaccgcaggccggtttacaatggggcacgctacaccacccgtcttctaacaactcatttacaagccctttgccacccgtgaaacttggcatctattgttacaaatattcctctcaaacctctctaatacgttaaccatcactgaagaattggcaaatcttttccactt

SEQ ID NO: 33682 - DNA, 399 bp, Gossypium hirsutum
  Clone ID: LIB3145-020-Q1-K1-D9
ggaatttgacacagttcttccggttccctttttacttgtggatactgtttcactaagtaatccacggatggatggacatctgtatcttcttttggacctttatttatttccatatggccaagataggttcaatacatctggaatttcgaagattgcatctgcctttagcagtcaggattacaagccgcctgaacagtactttggaccttatgttttcactggtgctgaatatgagtacttttctgatggacctgcacacttaaacaaatcaagtgctggcatcgcaataagaacaacaattggtgcttcaatgctttttatactattaatgggtgcttggatttatgcttaatctcagaagaagaaagcagacatagcaaccaaagataagcacccttt

SEQ ID NO: 33683 - DNA, 431 bp, Gossypium hirsutum
  Clone ID: LIB3145-020-Q1-K1-E2
ctgcaacctctggcacaccgatagcagcatcaactcctggtgcaccagcagcaacaccaagcacatcaataggaacgccacctctttgtgcaccggccacaacaccaagcacgccaataggagcaccacctcccaatgcaccagctgcaacagtaggaaagccaattggagcaccacctcctggtgcacctgctgcagcagcaacaggtgcaccaccacccatatcaggagcaagtgaacctggttcagatgataaatctgctatttcctcatcaggcaatcaacatacgactgcttcagtagaaagtaatccaacaaagtctatcaatgacaaaccagcagatgcaacaccaacagataaaccattggcagatgtaccatctctaacaccagataaccaagaaacaagtgttccaactacagacccaaca

SEQ ID NO: 33684 - DNA, 292 bp, Gossypium hirsutum
  Clone ID: LIB3145-020-Q1-K1-E9
tgaatttagagctgggtttgaagtaaagcttagagttgattgcttgtgcaaacaggggtgaattcatagagaaggatttaagatcctatggaaagaaccaagattgattttatatgaagtggaagagattgagaagaaaatagacttcttggtgaacacgatgaattataaagttggttgcttagttgaagttccggaatatttgggtgctaatttcgacaaacagatccttcctcgatacaatgtcgtggagtatttgaaatcgcaaggagcactagaatttgatgtggga

SEQ ID NO: 33685 - DNA, 161 bp, Gossypium hirsutum
  Clone ID: LIB3145-020-Q1-K1-F1
gcatgatcgagttcctttgcaagaaatgaaagcagattggcatgcttgcttaaaccacagaggtggattcaagaaattccatcttaaatccccttgccaccaaaggggttaattttggccaggtcacgccaccggtttttaaaattttattccaggggaaa

SEQ ID NO: 33686 - DNA, 325 bp, Gossypium hirsutum
  Clone ID: LIB3145-020-Q1-K1-G11
ctgtacagtgtcctcctccatatcgctgtctacatggtcaagttttagtcggaactgaagtaccatttaagaacggaaattaattttaaagagtcgaaacgttatgttctttttattgtaatcttatgttcttcgctcatttataattgtttttttattaaaacatttttatttatatatatattaaaaaggatcgcttgttttctattgatcttcaatgtcttaaagatctccctttataattcaaaattgtttttctatatatatttacttataattcttactttctttaaattacttttataaaattctatattttttattt

SEQ ID NO: 33687 - DNA, 227 bp, Gossypium hirsutum
  Clone ID: LIB3145-020-Q1-K1-G4
gctttacaaaccaaaatcttatttcctggagaagcgccaattatcaacgaactctctctctatctcacctaatattccccgataatcttaagcttcaaaaaaacccgacatcaacaaacatgaagaacgaagacacagtttaacttattaccactcaagcaatggaattttttattaaacaaaaaagctgcgtatggttgtctcaaacaatccataacatgcttact

SEQ ID NO: 33688 - DNA, 383 bp, Gossypium hirsutum
  Clone ID: LIB3145-020-Q1-K1-G6
acatttacacatgcgtcaggtctgaagagctttccattccaaaatgttatctacagtagaggcggtatttatcaactacctctctattgatctcacctaacaatcgccgctcatctaaatgttcaaaaataacccaactacaaccaacatgaagaacgaagacacattctaacttactaccactgaaggaatggaattctgtatagacatacaagctgatatcgtttattaaacactccttctcatgcttacttctccacgtggatgcgctgaagcggatcatggagaagtgactatcccagacataagagctctgatcctcgagaagatctgtcacaacttttattgctactcttcactatttcaaaggtaaaaagactgtg

SEQ ID NO: 33689 - DNA, 353 bp, Gossypium hirsutum
  Clone ID: LIB3145-020-Q1-K1-H11
cgcgttcgctttactctccaaaaaaaaaaaacagtattatggtttatgactttacgactaaattctagggtctttggtattggtggttgtgtttggcgtaagtgatacagacaagactgttggctgacaaaggaaagaaggcgatactagaagagaagggtgtcgaatagaactctgaacatattgacggcgcactcgtcttttccatctaaaaactttcaagagatccaaaactggcttgagaagatcaatgaggatgcttgtgagaaagtcttggaagtggagcttaaatacaaccacttactcattgccattctatgataagcggcactacataatcaaataaattcctg

SEQ ID NO: 33690 - DNA, 372 bp, Gossypium hirsutum
  Clone ID: LIB3145-020-Q1-K1-H6
cacataaccagaccaacattgcttcgctattaaggctcggcccgctcttaactggctagcgcacagtaaatacatgcatgtggcaaccacctctaaccaagcgccggttcttgctctatgtgcagcccactacacaccagacgatgacaccgagcaccaaacccttgctgccgatctagagagctgggttcacggtccacccactcaccagatgaagaagcgcttactcaccgccgctttatacgacgatccttatcttttcgaggtcaaccgtgttttagacaccgactttggatccacctgaatcgtcagatgctgtgacaacagacgatcgatctcctgggttcacgcttggactgttcgtgatgggac

SEQ ID NO: 33691 - DNA, 366 bp, Gossypium hirsutum
  Clone ID: LIB3145-020-Q1-K1-H7
atttaactgggcaatatgtcctgtatttaggggcttatagtgcattctacattcgtgaggggatttatagatattggacggagcagcattttacttgatggatagcatgtgtctgttgtattgtactaacagccactcatgcatatttttaatactattatttcgtcagtcggaaaaacaatgctgaactgaagataccactttgagccgagagaagttgtttttcactatatagaaatctaagttatggagcaaaggtagtgttggaacaccactcgtcgcgattgatattttgaaattagaagaggaagatgtagaggaaaattcattacatatatgtgtagatatacagataggtagatatag

SEQ ID NO: 33692 - DNA, 160 bp, Gossypium hirsutum
  Clone ID: LIB3145-020-Q1-K1-H8
cacaaaaccagaaaatctttgctttgctattgtggttcagagcgctcacaactggatggcgcactgtaaaaaaatgctggaggaaaccaacatgaaccaagcggtgggtcttgcccttttgaagccctaaacacacatacggaacaccggtacctaatct

SEQ ID NO: 33693 - DNA, 224 bp, Gossypium hirsutum
  Clone ID: LIB3145-021-Q1-K1-A10
tccttttgttcatcacctcattttcctacaactaagcacatgaggggatctctaaccaggggaatttcatataacataacctacccctattcccaccgtcaattacaatcttactccctaatacctattaaattaacttaattcattactctactctccatattttaacttattaataactctgcatattacccttttgatactgctactttctaattaacttt

SEQ ID NO: 33694 - DNA, 391 bp, Gossypium hirsutum
  Clone ID: LIB3145-021-Q1-K1-A12
tgtttatcttcagcagccaaaagtaaggggtcggccaaattcgcgcttcctcaccgctactgtgcttggtgtacagcaagctaaccgagctgttgaagtgaatgagatgtggcgagttcgacaaaaggagattgaattaaacgataggctaaaaggaagatcaaaaaaagataccagccacatcaggagttatggggacactagcaattcctccagaagaaccagtgggaagcacgagagtgattttagtgcttcatgctcatcaagcaagagaccagatgagagttctcgttcaagggaagatgatgaaggtctaagagacgaagagatcgaggaatttcctcagtcaaaggtgaagcgcggtcgagggtctataggttcaaggatggat

SEQ ID NO: 33695 - DNA, 175 bp, Gossypium hirsutum
  Clone ID: LIB3145-021-Q1-K1-A2
ataaaccctaatgtatttgcttgacctttagcttaatccatccagcctagttaatggccaacagtgttctacgtcggggaatcattgcggagactgagctgttgctcaatgaaccatgtactattgttagcgccgtaccatactaagagcacatgcggatcatgtgcgaggtgat

SEQ ID NO: 33696 - DNA, 325 bp, Gossypium hirsutum
  Clone ID: LIB3145-021-Q1-K1-A6
tgggcttcttaaactacgacgctgctgttaaatgcctacaggatgttttgcaactccatagcttccactttgtatgataccatttttgtctggcataaacttcagtcaagcatttactctgctgcttggaagcatttgataatgtttactccttcgaaagcctttcaatattctacagaaattcaatatcagtttaactgtagagtttatatattgatatgggatgacagaagaacaaaatataatgaatatgttattctttcgactcatgtagttgtaaacttcacttgctatataatccattcagtaacttgatattacaccg

SEQ ID NO: 33697 - DNA, 414 bp, Gossypium hirsutum
  unsure (1)..(414): unsure at all n locations
  Clone ID: LIB3145-021-Q1-K1-A8
ntttttttttttttttttttttttttttttttttttttttttttttttttttttttttgttttttttttttttttttttaaaaaaagggggtgaattttcccttttggaattgaaaggggggaacttttgggttttgggggggggggccttccccaatttttcctttttgggggttggggggggtggaaaatttggcaatttccatttgggggggcttttgggaattttacaaggggcggtatttttgggtagggggggtttaaaaatcttttactgggctatttgggggttattcgggaggtcttttaaagggaaatggttttttactgggggggggaccttatttggactggaaaatccccactcttggggaaaataaaaagggggggcgcaccacaaaattttttggcctc

SEQ ID NO: 33698 - DNA, 409 bp, Gossypium hirsutum
  Clone ID: LIB3145-021-Q1-K1-B6
cagggacgtgcagcgaatcctgatctggattcatctgatatggagaagctcttccgtgagcacataaagatgctatttgagagatgtgtgaacgacttcagagctctgttagcaaaagtcataactcaagatgcagctgctcaagagacagaaggtggtaaaacagcccttaattcatggtcaactgccaaacgtcttctgaagcccgatccaaggtataacaagatgccaagaaaagagagggaagcactgtggcgtcgatacgcagaggatatgttgcgaaaacagaagtcggcattagatcaggaggaagagaaacacactgatgtgaaaggcagaagctctggtggtgattttggaagatattcgtcaggtacaaggagaactcatgaacgtagatagttcgttt

SEQ ID NO: 33699 - DNA, 425 bp, Gossypium hirsutum
  unsure (1)..(425): unsure at all n locations
  Clone ID: LIB3145-021-Q1-K1-C1
gtggccgaagctgtaaatgacattgtcaagcaaagaaaaagaggaggattttatggcaatgaaagggtgtaaacctcctcaaagacctagaaagagagccaagatcattcaaaggagcttacttgtaagtaacatcgatgaatttattccaaatttccaataatttaactattgaatcatatgtcgtttttgaatgtgagaattgtcatagccaacaatcgattggatcctttattttggttgaggtacccgtgtctaacccatatttggacataggtacgaggatatgaccctccaaggattctccaaatacatggaaaaactctgaaaatattgaacactcatagtctgagtaacatagagtaaattggttttgggttgtttcttttgcaaattgngtttacttatgtggtgaatggcagttg

SEQ ID NO: 33700 - DNA, 346 bp, Gossypium hirsutum
  Clone ID: LIB3145-021-Q1-K1-C12
aagccattaggggccgaaatacagctaatgggtagtaacggggggaatttcactttggattctgatgaaaatctcgacaatgggattaaagaagaagatgatttggtgaaagagaagtcagctgttgtggaattggctgttaatggccatgcttcacatgtcagatgtaaacatttagaggtttctttcggatagctgggtgaaaagcattgcaatcttattcttttgtaatgatattagtgaataagtgatgattgactttgcataaactataatataccctgttgtttgctgttttgctcaatgagatttgagctctatttcatgttcaaaacaaaaactttat

SEQ ID NO: 33701 - DNA, 403 bp, Gossypium hirsutum
  Clone ID: LIB3145-021-Q1-K1-C7
tgaagagtgcacctgttcctcattcaaccacacaacaatctagttggagttctgctccttctactggcggtggcagtgatgacgatgagccacacagttcaagctaagacaaagaagcaaccgcatcaatccccttttttcgttcaaggtcataaaccaaaacattatcattattattatttttctttttgaaagtcttcaaaataggaggattcatttctttactatcacagttccgccgttctcttccatatcgaataagtctgtgccgccaaacccataaaaacttcaaccgaaaaaccctacataccttttccgaaaaaccctgcatttacattagggagaaccgagtcaaaaccatcctaattttcggagctcgtaaaaacgaaaacataggaatcat

SEQ ID NO: 33702 - DNA, 425 bp, Gossypium hirsutum
  Clone ID: LIB3145-021-Q1-K1-C9
cccacgcgtccgatcaagctttgctcaatatcgagctcgatttttaattgggttcggtgtgcttaaacctacatcctttgtcccacaacccgtccatacattttgtttcaatttgaatactcttgagttgagcatataatcctaacagacctacctatttgtaatttagtaatgagaatgtacctgccaagggatcgaacaagcaaaaaaagcaaaatatcatgttacgtttctagtaaatatttgatcctttcttaatataaaaccatagatgtcatgacaacctaccaaccatgcatcatctttaaccctttttttttaaatggtgatgatgtatgcactaatcaaagtaattaattaaatgttcagtgtgagagcatgggagcagtggagaagaagctgaaggaaatggaactggaacacgt

SEQ ID NO: 33703 - DNA, 366 bp, Gossypium hirsutum
  unsure (1)..(366): unsure at all n locations
  Clone ID: LIB3145-021-Q1-K1-D9
cgcgtgtggaggtcgttgtggaggtggcttgcggtagtcgaaagttagtgttacccatgttgaaaatttatttattttttgggccattcgggcctaagtttttaatcattttgggcttgtatttgggtaaggtttggtctgtaaaaaacaggccaattgggccgtgtttatttgggttttgtnaaaaaaaaaaaaaaaaaaaaaaaaaaaaaaaaaataaaaaataaaaaaaaaaaaaaaaaaataaaaataaaaaaataaaaattgggcgggcgtttttaaggttccaaagtttctttacgcgggcttgcaacgttaaagttttttttttattgtacctaaattaaattaaatggccgtggtttt

SEQ ID NO: 33704 - DNA, 406 bp, Gossypium hirsutum
  Clone ID: LIB3145-021-Q1-K1-E10
cgacatgccagcggataagttattgggtcattttgcacagtatggggaaattgaagagggtcctttgggcttcgataagcagaccgggaaatcaaagggatttgctctttttgtttataagacggcagaaggggctcagtcggcgttggtggagccggtgaagaatattgatgggagacaattgaattgtaagcttgctattgaagggaaaaaagggaagccaggacaagatgggatgatgcaaagtggagttggggctccaggaaatacagagatgggggttggaggacatggtggaggttacggtggccctgtggggcctggtggaccaggtggcatgggtggttatggtgggtttcccggtgggttgcaagggccgcccggcccaatgggtcatcctcatcac

SEQ ID NO: 33705 - DNA, 331 bp, Gossypium hirsutum
  Clone ID: LIB3145-021-Q1-K1-E11
gggttatcttttatccatctcgagactgcatgcagccatcttaggtctatttatgtacggaaaatttcatgctaacaaacttgtagttctactggaccttctgaagtacaacacatggagaaatggaaaattgttcttgcaacaataataactttgcacataaatgatttcatgtagtagatttataccggttcattggattaggagtgacactttatatcttctaactgaaataggttactttggcttcatttaagtgagaaacttggtttttgtttctatgatgttctaaaataaatttttgtttgcaaaacaaggactgatttaagca

SEQ ID NO: 33706 - DNA, 422 bp, Gossypium hirsutum
  Clone ID: LIB3145-021-Q1-K1-E3
attgaggtaaaaatattgagaagaaaaatgaagaaagaacataatatatttgcattggcaatgttattttgccttgccatagtgccagtctatggccaatactactcgaaaactgttatgcgagctactcagcgggcgaaaaagatgacccgactccacttcttccttcatgataccgtcagtggtgaaaaccccagtgcagtcgtcatagcccgtcccaacatcacgcaaccatcctcattcgggtttggcacattgtttgcaattaatgacccccttaccgtaaggcctgcactaacatcaacgttgattggaaacgctcaaggactctatgtatcatccagtcgagaccctgctgtgtttactacagttatgtacgctgatttcgcatttacgagtggcaggttcaatgagagcttttt

SEQ ID NO: 33707 - DNA, 390 bp, Gossypium hirsutum
  Clone ID: LIB3145-021-Q1-K1-E5
cccacgcgtccgatttacactagcagcataggttgcaccgactattatctttgaggatgaggttgatagtatgttggggcagaggactcgagttggggaacatgaagcaatgaggaaaatcaagaatgagttcatgacacattgggatggcctattgaccaaagccggtgaaagaattctagtccttgctgcaaccaacatgccatttgaccttgatgaagcaataattagacggttcgagcgcagaatcatggttggtcttccatcgattgagagcagggaaatgatattgagaaccctactgtcaaaagaaaaagctgaaaacttggactacaaggaacttgcaaccatgacagatagatacagcggaagtgatctcaaaaacttatg

SEQ ID NO: 33708 - DNA, 336 bp, Gossypium hirsutum
  unsure (1)..(336): unsure at all n locations
  Clone ID: LIB3145-021-Q1-K1-E9
gtaggngctngggagcaatacctnggggagagcatagtggaacactcctaagagggcttatgtaaatcagaaccgtcacacatacgagaaagcagttaaaatatacaactaggagaaagctaatttgatagagagattagcaggtaagttagttgatgtggagatagccttttccttacaaatgatggcattgtagatatcatcattattatgattatggaggaaaccgttgttgcttagagagaatttatccagtagggtttgattattgttttttttgaggataaaaaaatataattattaatatatgatataggtttggtttcttttctcccg

SEQ ID NO: 33709 - DNA, 412 bp, Gossypium hirsutum
  Clone ID: LIB3145-021-Q1-K1-F3
acaaaacgtacgaccactgtcgcattgtaacacgtgtcaccgatgagtggtgtccaaagtgcccattaattaaaggcagtgtcacgacaccagtcttgtggtgtcacaacatcaagtgaagagatgaaattttaattaaggtattttttgtccacacaaagtaacttaaacagcttttttgggttgtttaataaccttaattaggtctgatcataaactctataaatagatattttaagtctcatttgaggaggcttgaccaattgagtcacttagttattttagggttttactttagtttttattttcttccaatttaatcctttacatactttttgttcttgtttaacttggattcaattgtgatccaatagtttaatatagtagtttttttgttaaaaataaaaatcaa

SEQ ID NO: 33710 - DNA, 386 bp, Gossypium hirsutum
  Clone ID: LIB3145-021-Q1-K1-F4
gtctctgccgaggcgaaagcttgaccttacatatcttctcccatcagctttcaagcacgcataaacctctgctgcagaaggggaggggacatctctgtggataaccgtctttaacaccattaagttttccctaaaatcccaccctaccaaacctggcggtgaactgaaagttctactgtcaaacgctacattaaaataaagtctcgtactcgagcgttgcataaaagtagacattgaccgttgtcgcttctcttgaagacccaaagggcattcgcgataaacatggacactttgttcaaccgacgaatagcatccatgacatctatcattgacagtaaccctcctgtatctaagattcgcataattgagaaataaataccatgaaa

SEQ ID NO: 33711 - DNA, 233 bp, Gossypium hirsutum
  Clone ID: LIB3145-021-Q1-K1-F6
cccactcgttcttagacgcgtggtcggactcatgttctgactcgtggttgctaggagagcatattctcatgttcatgcaatctctgtggtgattaaggcctattcaaaggatagccagctaaatcttatgggagtggttatgcattcttctacatcattccatcaacatgttcattctttttgtcaacataattcttagaattatgaactgacaagtccttttacttccaaat

SEQ ID NO: 33712 - DNA, 406 bp, Gossypium hirsutum
  Clone ID: LIB3145-021-Q1-K1-F9
cggacgcgtgggttgtttttcccttcgattccttcttcttccatgcgaagaaaccacctgtcttatccaaactcccttttctttacatttaatatcaaccgtctattcagatacagagttaatattgtatgtatttatattgactctgtgctgatgatgaaagtaatttgtacaatggctcatcttctccatcgcttagtaattttcaccatcttaataaccatggctgccaccgtcacaccaataacccatcaacattcaaaagaagcctctaaattctataattctccggcttgcctttcaatatctgaaccctatattttatgctcccatcaagcgcttcatttggcaatgaccatcgacaaagcttacatcaggggatccatggccgctattctttccgtac

SEQ ID NO: 33713 - DNA, 428 bp, Gossypium hirsutum
  Clone ID: LIB3145-021-Q1-K1-G10
catctctgaggggtgctaattgtaatataatatgtactcagccacgtcgcatatctgccatatctgttgcagcgagaatatcctcagaaaggggagagaatgttggtgaaactgttggttatcagattcgcctagagtcaaagcgatcttctcagacacggctgttgttttgcacaactggagtgttactcagacagttggttcaggacccatatttaaatggcgtgagtcatttgctagtggatgaaattcatgaaagaggcatgaatgaggacttcctgttaataattttacttgaccttcttcctcggcgtccagacttgcgtcttattttgatgagtgcaaccatcaatgctgatttgttctctaaatattttggaaatgctccaactattcacataccggggttgacctttccagtggctgag

SEQ ID NO: 33714 - DNA, 158 bp, Gossypium hirsutum
  Clone ID: LIB3145-021-Q1-K1-G11
tcgcatctctgaagtgtactaattgtaatataatatgtactcatccgggtcccatatctggcgtatcttttacaaccaaaatattcctcacaaatttttaaataatgttattataaacttctaccttatcaaatacacctatagtcaaatcaatcttt

SEQ ID NO: 33715 - DNA, 363 bp, Gossypium hirsutum
  Clone ID: LIB3145-021-Q1-K1-G2
cttatgattacatattattgtgcttttttttcagatcttgatactgtctacatcaatgtagaagatccgcactgatgaggttgttgtaccatcagctttggtggaatcagttgcccaagcattctttgatccggagaataccaaccaggatcagaaaagtgacctggaggatctctacatttattcaccaatccatatcgatagtgtctaggaagcctgaaagctgttgttatacatgtgcccgaccaatagaggaaagctgctagcatggttgatgttaagctcgcgagggagctagtaaagaagtgcaagaggaaggatgtgactctcattgccacccggaggatattgatgaccccaaag

SEQ ID NO: 33716 - DNA, 409 bp, Gossypium hirsutum
  Clone ID: LIB3145-021-Q1-K1-G8
gtcgtcgggtccaatgaatcgggtcaattagaattggtttgttggagtgataaattggctgtttcgattcttgaaaagaaggctatggaaggagggtctgggtattccaaagggatgcctttagcatttccagtgaagttttcaaagggatttgagatggataagaaggtgaaaaaatggtgggatgattggcagaaattgccttacgtttcaccatacgagaatgctcttcatctttcaccaaaaactgatgaatctgataaatgggcagctgctgttttgcatgaaattttgaatcttttcgtagctaaaaaggcagaaaaggatgatgtgttgtgtattggggagtatttggggataaggtcaaggttcaagagagttttgctttaccatccacaacatttttact

SEQ ID NO: 33717 - DNA, 435 bp, Gossypium hirsutum
  Clone ID: LIB3145-021-Q1-K1-H10
aaaaaaactaaaggaacctttaatctctcccctctcttccccatgccgacgatcggtttcttcgtcgcaccaccgcaccaccaccgtatccggtggccggtaatgcgcaaaaaggggcttttagcctgcttcaaacggatccaaagcaaggctctccaaaatccgaagaaaaacgaaagaaaaggcttctccccttcccttttagatccgatctagacgaatgagaagagtctttcgacggtgtgaccgtgggttctccgtttcgtcttgcaggtgtcagacgcgtagaatgccgatggttggtgccccaagcggtggtggtggcgcgcgtgatggccaagggcagaggggggagtggcggctgaactttggtggctaggggtagggtggctgctgaaaaaaagtttaagatagtgggctgacttgggctttagg

SEQ ID NO: 33718 - DNA, 351 bp, Gossypium hirsutum
  Clone ID: LIB3145-021-Q1-K1-H12
ccctgctgcctgtctcagtgcctgcttatccatagtactgaataatattggggcttgggccactttatgagcttcacaacttcccaatttaattctgtgttattccttccaaagtgtccttaagcagctgtcttcaataaccgaccattgccacctcttttgaggtccattttgatggtgatcattccattcctaaactttaaaatctcctctacaataaagagtatatcctttttacgaattttcccatttctctttcacacttttcttatctgtaccccacatgatgagactgtttactactatcaaatccattcttacctcatacttcatttccttataccttttctt

SEQ ID NO: 33719 - DNA, 343 bp, Gossypium hirsutum
  Clone ID: LIB3145-021-Q1-K1-H4
cccgaaggcaacagtggggttcaaaaactgaatagcatcattgaaaaggatgataagtcctgtagttcggttcttactaatggtgatgaaaccatcaccgtcgaaagaagcgatcaaaataatgtagttgttgcaattgagggattaggaataccttctagtttcgagtatcttggcgatgaggttttaattccggcggaatttttctacaatgaggggttatcgcttgatgagttattagaagtaccacaggcaactaataactctaattggattcaagatcaatctatcaccaacccagatgatgttgagttcttgaattcaagttttgttgacaatgatg

SEQ ID NO: 33720 - DNA, 379 bp, Gossypium hirsutum
  Clone ID: LIB3145-021-Q1-K1-H7
caagattgttgttcagtgcatagaaagttacgctcatgcggattatttaatggcagaaaaggcgaaagaagatgtgtatgatcctttgattgcgttcttgaataagctaccatgaaatataggttaaacggattgataattttcccaagtttttgaacacctaaaatgttaaggtcgaatctgttgggaaaggcggtgttaatttgggttcttttattaagggttaggttgccattttattagttttgggtgtacttttatttcagttaggtaaaaagattagttgtttaaaaggacgtatggaatgataaattttaagaacctatcataaaaaaaaaaaaaaacacaaaaaattacatactaaaaaaaataatttaaa

SEQ ID NO: 33721 - DNA, 374 bp, Gossypium hirsutum
  unsure (1)..(374): unsure at all n locations
  Clone ID: LIB3145-022-Q1-K1-A10
gacaacttcacagcgtgcatacaagcgctccaagggcgatcctttacgtggctttgaagatgaaaaattttctttcattgctttcagaagaggacaacgacctcgggaccgttggcctctggatggtatgaaatttgagactttgaaagagcagctgtgcagaccggagcatttgcagtagaagttacagtccagtaacctgcatttccacctcgatactcgttaattgacagaagcaacagagtaataatatgatgcaatttcaaagaacttccgtactgtaacaaggaataaacagaaaataccaatcacatgtaccacatcgaaagggaacaagacangatgactaanatcaatgggtaaaaaactcactc

SEQ ID NO: 33722 - DNA, 260 bp, Gossypium hirsutum
  Clone ID: LIB3145-022-Q1-K1-A12
acggactgattgaagttatccttgaccaaaacatcttctaatgtctggatcactacctcggtgtgggcgattgtattagtattttctgtactttagctatctgaaaaatattgaaacaatttatctacaaggaacacctatctggagtatattataattcaaaccttgtttgactacaaagaagcatacaacttttcaagagctctaatgccgagtttcgatgtttcgcttgcttgctcttacccttgtactaaaatggc

SEQ ID NO: 33723 - DNA, 224 bp, Gossypium hirsutum
  Clone ID: LIB3145-022-Q1-K1-A3
gagcgtcccgtccgcccacgcgttcaaccacacgtgccttcatcgtccgcaaatcccactaattcctggacggttgtgatgtgacagtagcctgtgctttcttatcatttgctgtgggacttgtgctgagtgtggtcagcccttgtgcgcatcatgatattgtctggctacatactgtgtagagcacatggatacaaaaagttattgacagtgcacccactcct

SEQ ID NO: 33724 - DNA, 116 bp, Gossypium hirsutum
  Clone ID: LIB3145-022-Q1-K1-A6
ggaaaaagtggccggtccgatgtatttatgggcagagcagttggaagtttaccaaaggatgggctgaatttgtcttggacaataatttagatgaaggggatgtttgtgtatcagct

SEQ ID NO: 33725 - DNA, 328 bp, Gossypium hirsutum
  Clone ID: LIB3145-022-Q1-K1-A8
ttatttttaaggacagcttgttggattaaataccttaaaagaaccgaaatgtaatgaatggtaatatcaatgtgtattaagttttggatgcccaaaaaaaaaaaaaaaaaaaaaaaaaaaaaaaaaaaaaaaaaaaaaaaaaaaaaaaaaaaaaaaaaaaaaaaaaaaaaaaaaaaaaaaggatgccagatctaaaaaaacccaaataaaaaataccaacaaatacaaaacaaaaacttttttaaaaaaaaaacctaaaggggcgccccttttaaaaattataaaattttaccaccgggaaaaccccggatttctcttatttaattcc

SEQ ID NO: 33726 - DNA, 306 bp, Gossypium hirsutum
  unsure (1)..(306): unsure at all n locations
  Clone ID: LIB3145-022-Q1-K1-A9
ctttgatattcctctctcataaactcgttggttcggatatgcaagggctgacacaaaaggccggtggcggcattacaagaccgtcaatggctaaggtatgctttttgaaaaaatgggatatgttgtgggctatggtcgattgaatttcggtcatgcaaaattactcctgtacaaggatatgtaatggttttgaaaacagagcgtactcgataaaaaccttactcttaataaacccatttttgctctcatttatttcngaaacattttggatttgaaaattatttgggttaatgaaaacaacaacct

SEQ ID NO: 33727 - DNA, 393 bp, Gossypium hirsutum
  Clone ID: LIB3145-022-Q1-K1-B10
caaagattcaagaagagagaaaaaaaatcgaaagaaagagatccgagaatcacctttgagaatttttttctttttctttttggattgatttctattcaaatgtatgcgtaaaaaaatccctttacaccgtttttaaccggctttatatagccgaaaataaaaataaaaatttacaaattttgattttttttgctctctttgctactgttattttttgctgtttgttatccttgttgtaatttgctgtcaatctatgttgccgctattctgttttgctactatgtacggcgtggagatggctgttcgtgggagagctgcggatgtggccatgacgcgctggagatccctgctgaggcaactgcggcgctagccttagggttccagtttctggag

SEQ ID NO: 33728 - DNA, 322 bp, Gossypium hirsutum
  unsure (1)..(322): unsure at all n locations
  Clone ID: LIB3145-022-Q1-K1-B3
cccacgcgtccgcactgctcgtgtatttgcaatccgagatttctgttagttccgagaccctcatgtggtgacttattgtatagttgcttagaagcatgtatacccaaatacttgttttgctgtaatttctctttaagttggacagtaaacatttacaaagaattatcccccaaatgtattgcatctatggccgcccttgncttgtttggtgtgtgtatctgctaaaggtaaagatcatatttattttttaccaaagcgtaacatattgtctactcaaatattaagtcgcaaaatcacatccgtttaaacttccaaaaccatc

SEQ ID NO: 33729 - DNA, 414 bp, Gossypium hirsutum
  Clone ID: LIB3145-022-Q1-K1-B6
gtccagttcttaaaatcaaactcaaaccttaaattctgtgtcttccccctccccccctttgccgccatatctaacccttctgctccttggttcgtctttatatggcctgtactaatctttaaccagactattaatattgttagaggaaaaacaattcctagatacgatgttgtatttggttccattttggatagcgtttttagtaggtatattagttggctgggcttggaagccgaagtgggcagaactgttaatacagaaactgagttctgttgtatccaaatcgttggaattatcattgccgtcatcgtcttctatgtcgcctatgttctgtctgaaaaactccggttcttcttcatgtttgaactccttgaatatgcagccagaagcttgggttactgataatggagaaca

SEQ ID NO: 33730 - DNA, 153 bp, Gossypium hirsutum
  Clone ID: LIB3145-022-Q1-K1-B8
gataagcgaaagatatcaactgcttttttactgtgtgaatcacctcacattaatgggttgggaaacctacatgagtgtctaagaaccacacttactcaacccagaacacttgttcttacaagaaagagaatttctacaggagctaaggcaaca

SEQ ID NO: 33731 - DNA, 205 bp, Gossypium hirsutum
  unsure (1)..(205): unsure at all n locations
  Clone ID: LIB3145-022-Q1-K1-C10
cccacgcgtacggtttatataagtaattatgagaaccattaattagntagatcagataagtggtggatttatgtcgtgtattgcacttttttttcatctgtcgtgtaatatacatattatatagattattgtactaaaagttccagtacgaatgtaatactcttatctttaccatgtcctaaaaaagttttttgtacatttttcc

SEQ ID NO: 33732 - DNA, 293 bp, Gossypium hirsutum
  Clone ID: LIB3145-022-Q1-K1-C11
taacgccttctgtcccgtacccaaaatagtgctttttcttcatttaaaaaaacctcaaggttagcagatttctcaacctcatactttcctttttcttttcgagttgaacccaaaccaaagaatggtattataccaccagaatttcttaaaaaaaatgttttattttaacccaaaccccccaaaattttattcccctccaactctgaacctgaatggaatcaattcaaattacaatcttaagggcaggagttccaccatcaaaaaaagaattgcccttttttttttgaattcaa

SEQ ID NO: 33733 - DNA, 220 bp, Gossypium hirsutum
  Clone ID: LIB3145-022-Q1-K1-C3
aacagatacgcgaacgatgtcaactgcttcttcatcgctctccatcaactcatatcaatggcgttgcgaggcttacttgactctctcataacccatctttcttaaccattgacactttctattacacaatggataattagtactggacagaccgccacctctcaagttgataatttctcacaacacgatatcacttggttacacatctattctctatact

SEQ ID NO: 33734 - DNA, 417 bp, Gossypium hirsutum
  Clone ID: LIB3145-022-Q1-K1-C4
caagcttcgagaacgagacctaaagagggacctgaaccgaatattctcctcgggaacaggaaactttcggacccgacaagaaccggttcaagcctgccgggttcaccgacagtcaagcccaaaatcaacccgaaaacacagtccaagttatcccacacggtttcgttaccggtcctagaaggcaaccaacgtgtggggaatccccggaaacatgatcgggtcaattcaaaacagcaccaacggaaaaacaatggggtggtcggaaaattcgactccgccatgggtttgtccattataatggtgactttggtaataatgttagtttggggtcgattatgtgccatcctttgtacctcggcttggttttattttcggtctcgttatcgaaccattaataatgataacgatactgaatct

SEQ ID NO: 33735 - DNA, 369 bp, Gossypium hirsutum
  Clone ID: LIB3145-022-Q1-K1-C5
cacacttgtacaaccacacctaaattgggacctgacccgaatattcttctctggaacaagaaactttctgacccgacaagaaccctttcaagcctgacctcttcacctacagtcaagcctaaaatcaacccgaaaacacaggccaagttatcccacaccgtttcgttaccgatcctagaaggcaaccaacatgtggtgaatcccccctaacatgatcgggtcaattcaaaacagcaccaactgcaaaacaatcgtgtggtcggaaaattcaactacaccattggtttgaccattataatggagactttcggtataatagtagtttggggtcaattatttgccatccttagtacctaaacttggtttatt

SEQ ID NO: 33736 - DNA, 182 bp, Gossypium hirsutum
  Clone ID: LIB3145-022-Q1-K1-C6
acgttcacgcgtccgaccaaagacatagcacggggccgatattttgttaaagactcatgtatgtgtcatggcccactagcagctgctcatgaccgtcggaaagaccgacagccagcctccgtctgaatcagtagacacacactcagtgatgtctcccggttacgttacctaacctgcaaagc

SEQ ID NO: 33737 - DNA, 383 bp, Gossypium hirsutum
  Clone ID: LIB3145-022-Q1-K1-D8
gaggtgggacactcagatggtagaccattaacatggtcccttggttcctgacaaagtgtgggctgctgataagcagtattgtaccgtcctgggaaataccacttcggcacagaaaacagctcacggccactcacttaacccatggcatgaactgagctagccgattatatgaacttgtcttcacttgatgaaccctcagcctcaaaatttttctcatgctgaccgttctgttgtccggaggtggatcacatgattctgcgatctaaagatcaggctgcgttcactacgattaatgtgagaacagatacttattaactattcttccaaggattaatgatgagtgactaaatcctatcttttgttgggctctgcctacttatcta

SEQ ID NO: 33738 - DNA, 456 bp, Gossypium hirsutum
  Clone ID: LIB3145-022-Q1-K1-E10
agggacgacgccacgcgttcgattcacaaatactatgctgctcttttcctctccagtattgggatgttgattcatttgtggaaggggttagatacaacaacaaaacttcacttcttgttggaatgtctttggcccaaattggggaatttgcttttgttcttctcagccgagcttctaatcttcacctagttgagggtaaactttacctgctacttctgggcacaacggctctcagtttggtgactacaccgttgcttttcaagctcatcccacctgttgttcatcttggcgtgctcttgcgatggttcccccctgatattcacagcgagatgggttttaaaggagatagtctccgctcatacagtgttaagcaaagcaatattcttcgctcagacagcggtaagcaaagtaataattttcgctcatacattgcgaaacgtatcacgttgttggttc

SEQ ID NO: 33739 - DNA, 415 bp, Gossypium hirsutum
  Clone ID: LIB3145-022-Q1-K1-E5
cccacacgttcgcgtcaatgaaatcaatttcctgaagaaaaattcctgtccttttacaggcaaacgcatgcgcgtacagacacaataaaaaccatacctctttggcatctgaactaatttctgtaatgcagatctgcttcatgccttgtcttagcagactgcaagcatatctacattacaaaatgaaaattttcactaaattgctttcatggagcatcttttcatcagaaatccaatttcaggttctgattagatgaggtaaaagaaagcttaatattgaatggcatgagacagaccctatatttatagcagattccaccttgtcccctgtcaaaacccacaacttcaagccaacttgtgcaagtttatctatacattagggtaccttgaatgaagaaagtaaaaacaggttgat

SEQ ID NO: 33740 - DNA, 437 bp, Gossypium hirsutum
  Clone ID: LIB3145-022-Q1-K1-E9
gtcaagagggtgattttatggccaaacctggatcgcctatttttaaatgctctcgaaggatggaggtggtatatagtgacgtatacatgctggatgacgaaatgaagtggaaaacgttacctccgatgccaaaaccagattcacatatcgaatttgcttgggctattgttaacaattctctggttattgctggaggcacaaccgagaaacaccctataacaaaaaagatgattctggttggagaagtgtttcagtttaatctagatacactggagtggtctgtgatcggaaaacttccttaccgagtgaagaccacacttgtcggattctggcaagaatatttgtatttcacgtccgggcaacgagacagaggtccggatgatccatcaccgaggaaagtgatcggagaaatgtggagaacgaagttaaaactgaac

SEQ ID NO: 33741 - DNA, 409 bp, Gossypium hirsutum
  Clone ID: LIB3145-022-Q1-K1-F12
cttgaagaggaggctgctgaagagttggcaccgaggttggaagtgattttacagcatgggatgtgcgcttttggcaagtatcagagacggaatatcagaattgtttatgatgctattggaactctagcagatgctgttggagagaaattgaatcagccagtttatcttgaaattctgatgccaccactcattgcgaagtggcagcaggtttcaaattctgacaaagatctctttcgactgctggagtgcttcacgtccatagcacaggcattgggtactggattctctcaatttgatcagcctgtattccagaggtgcataaatatcatccagactcaacaactggccaaggttgatcctatttcagctggagttcattgtgagctcacttgaattgctctctggactt

SEQ ID NO: 33742 - DNA, 192 bp, Gossypium hirsutum
  Clone ID: LIB3145-022-Q1-K1-F5
gaccaagttgcttagagttccgaccctatttaattaccactcattcgacccaaagccggggcttattcctcaaatgaaataatttctcatgactaaccaaatcatccaatgaagcgtcctctttgtctaaactgccctcactacaaaccaacttcacacattatcgaattaacaagtttttccttcttaaca

SEQ ID NO: 33743 - DNA, 415 bp, Gossypium hirsutum
  Clone ID: LIB3145-022-Q1-K1-F7
cgccccaacctacactccatgcacacaaacattcttccgaactctatatcctattaagatagcacgcaatcgtcccaagctccaatccattcacaccaagcatgctccctacctatctttctcgtcagagcataaaaaaaactactttactgaaggaacattgtaaaaacgatccatgtaccaatcgccttaacattaaccacatccctgtcattgaatttgatgaacaactcataatataccaggcgcatccactgacacaacaaatgttctgacgcaaataccatgttccaaatattctgagaaacttcattctaaaaaagacaggctatccacacatgatgaaatcaaactcctatctcaaattactgactatttacaaagctcttcagactgttcattttgtgtattattc

SEQ ID NO: 33744 - DNA, 360 bp, Gossypium hirsutum
  unsure (1)..(360): unsure at all n locations
  Clone ID: LIB3145-022-Q1-K1-G2
gctgattttctcatcagcatttttagtgaattggttgaacggtnnggaaaaaacaaaaggggagacaccataaattgcatataaaacaacaacaaaaatggccattccctctaaaaaaaaccaaacttacaaaccctaacatacaaaaaaaaaaaaaaatggggccgccccttttaaagaatccaactttccttccccttgcttgcaactttatagttttttttttgggccccctaaattcaattccctgcccgccgttttccaccttcgtgactggaaaaaccctgcctttccccaacttattcccctttcagcacatcccctttttcccagttggcttattaccaaaaaggccccccc

SEQ ID NO: 33745 - DNA, 219 bp, Gossypium hirsutum
  unsure (1)..(219): unsure at all n locations
  Clone ID: LIB3145-022-Q1-K1-G3
cggacgcgtgggcaaattctttgtactttacattccactatgaactatctctacctcttggttggtctctgtagttcgagtactatgttattcggttttaaaataaatattttgtaaaagacaaaaaaaaaattgtaaaatgaataaacttaaaattgtggnggttaaagggcggccgttttaaaggttcaagatttaataccccgacaatgcaattta

SEQ ID NO: 33746 - DNA, 414 bp, Gossypium hirsutum
  Clone ID: LIB3145-022-Q1-K1-G5
cccacgcgtccgcggataatttggttgtaaatagaacaatggctttgaatttttcccatcggccggtctttcctgctaatttgactgaagataatctgctgtctcctatgagaatcgcgaatggataccttgttgaaggtgtagcagagaagaatggagatgggtgtatgaaaccttgtcattcggatcatgcaatggaagattgctttgattatggaagggataagggtggtggtgatcgatgtggttctcaagagtctgtttctaatgatattattgatcttttgccgtcggatccttttggaatggatatcactagtactttcaccgcaatttccggttggcttgaggccttggaattcgattatagtcactatgtgagggatgaggtggggactggtgataggagttatc

SEQ ID NO: 33747 - DNA, 408 bp, Gossypium hirsutum
  Clone ID: LIB3145-022-Q1-K1-G7
gttcaaagaagggttcaacttgttaagtttgaagaaggaaaactatggtttttctttgtgggaagcaagaagtgaaactatgggttttgactccttcttttttttatttctttaaaatgtctttaactcattgggaaatggaaaaacttaagactaataagggttattacataagcgtaattggtgcacagttcttggctgtacgagaaattagataacagactagcatttcttggtgattttaagttggaagttgtcttacaaacaactacttaaatgccgttggaacaggtattgatcgatgcgtacggaaacaagcatatatgtgtgttgcatgagagcttgatttcacatataagagtttgatctagctttaggttgatttttggagccataaaattcaaattg

SEQ ID NO: 33748 - DNA, 256 bp, Gossypium hirsutum
  Clone ID: LIB3145-022-Q1-K1-H3
atcggaaatgaactttagaaaagggaagtatttgtattatgcgcggggaggggactactgcaggggaatgaatcattacttgtggagtttcttgtgtggtttgggggaggctatgtatttgaatagaacatttgtgatggacttgagcgtatgttgatcggcgacttataatccaagcaataaggacgaggagggaaaagatttcctgttttattaagattctgagcatattaacgatgttacatcttttgtcgaa

SEQ ID NO: 33749 - DNA, 307 bp, Gossypium hirsutum
  Clone ID: LIB3145-022-Q1-K1-H4
atcacacctccactcactccaccgcaaatatgtattataagctcggatcttgacctgcagaaggggactcaatcattgatgacaaccaaactctatatctttaatcatttcctatacatctctgaacacaccacagtgaagtcacccctccatatgaaggaacgctcctagattcgtccaacccccactctcaagatctaaagcagatacatttttcaaaccatagtgctcaccttataaacaacattaaaattgccaaagcctttaaaaacttgcaaccttatcggaaccaccacagtaaacctta

SEQ ID NO: 33750 - DNA, 413 bp, Gossypium hirsutum
  Clone ID: LIB3145-022-Q1-K1-H7
cttcctttcaccatcttccttctccatcttattccttttaactattttccaactgtcttgcgccctagatgatttccactttacttcatgcgctccatttgattgtggaaacctttctaatatttcatatcctttctggaccgatcaatataatcgaccttcatattgcggttacggtaatgaagggtataagctgaagtgcaggcagaatcaaccccctgttatgacgctcagttcccaagaattctatgtgctgcatctcaatcggtctcatgatttgttgacaatcaaacgagtggaattgaacaacacttgtcctcagccgattttgataaacaatgtttttaatcatactgaaacagctgaaaacattactctgttctacgactgccgaagcaggggaggtccgaatc

SEQ ID NO: 33751 - DNA, 342 bp, Gossypium hirsutum
  Clone ID: LIB3145-022-Q1-K1-H8
cccacgcgtccgcccacgcgtccgtggtattcttgctttgtattttccagcttctaaaagacattcagtcattgatgcagggaagctttatatgtttaataattttctattaatatatattagattaaaataaaaaaaaaaaaaaaaaaaaaaaaaaaaaaaaaaaaaaaagaaaaaaaaaagggaggacgctatataaaatccaagctgaaagcaaccgcccagtataagtcttaatttaaaaaaatgggaacctctagtctattaattggccgcatgattacaaaacaatcactgggaaaacataagaggttccccaattaaaaccccttgctgataatc

SEQ ID NO: 33752 - DNA, 256 bp, Gossypium hirsutum
  Clone ID: LIB3145-023-Q1-K1-A11
gacccactcgggctttactgatcttaaaccgcgttgggataatttctcaaagaatcctcctgtgtttatccaaaggtgtgtcccttgtatagggagagaattgaaaaatttttgggtaagcaaatgaacgctggaatttagaggaaaacaccttgcccaataccctgtgtgtttatataaatttaaacagtagcaaagtgactgttcaaattaccatcgacaccatcaatacactagacgtcaatctcaactttat

SEQ ID NO: 33753 - DNA, 420 bp, Gossypium hirsutum
  Clone ID: LIB3145-023-Q1-K1-A2
tcgaattgatgttagtatataagccagaatgattccttcaatatgtgctctatatctctgaaaaaaaaaacccgtccctttacaattaaaaatcgagggctttatagccaacatacaagcagcttctgctgtttccttgtccaactcgcacgccatgaagttgtggagaacgaggggcgtggagcacgggcgcgagcatggagcggggcacacggggatcgtgcgtggagtgccgacgtggggattgtggcgtgggtgacctaagtttccctaggttggccgattagatttagattttgggccatgggtattgggcctgtctcatgtaattgggataggctcattaagggatttgggttcgtatctacgctgcacagttttggcccattacatgtcatattcaataaaattgtgatgatt

SEQ ID NO: 33754 - DNA, 441 bp, Gossypium hirsutum
  Clone ID: LIB3145-023-Q1-K1-A4
cgacccacgcgaccgggagagtataggagagagctatagggttttaaacttcactcattactcaaaccctgctaagagggtcgatatctacaacttctcaatttttcgccaatttcgcaaacaagactaaaacgaaaacgctattacacattacctcttttcttcttcttcttcgtggtcgtgcttcatcttcgtttcaatcccagctcacttcaaaaatgactaaattgccctagctcagcagccaaaatttcatgcccgaaactagctctttccacttaaatttgccgtcatgcttttttttcttttaattataagtttgaagtgtaaaggaaggatttttttttgttgtttgaagatgagagaaggaagccacggaaggggatagggttgctctggcgtgtttgatttcttggatcctttttgcaattttgggtttag

SEQ ID NO: 33755 - DNA, 429 bp, Gossypium hirsutum
  Clone ID: LIB3145-023-Q1-K1-A7
cggatcggaatggccggcccacgcgacccgttttgtcaagacacgttctaagctgggtttataatgactattggggtgtgaatgccgcatggagtgaattacacactaggattgctgtttgacgtatagagcttttcattttaaaagtttctagttcttcctcgtgtgcaaacctcaaggcctaagtaactttcacaagtagcaaaggcatccatgttacgttacttgtgctcaatcatgttagatacaagaacatgtactttattgccatgttttcaatcttataaaagattatctgttgcttctatagctacactagtaagagaactatcgaatattcagcttttagttcaaggataatgtaattgttggatctcgaagatagtaactcggatcactttggttcttaaaaactcagtaattagatct

SEQ ID NO: 33756 - DNA, 405 bp, Gossypium hirsutum
  Clone ID: LIB3145-023-Q1-K1-B1
cccacgcgcccgcactgagcttgtttcaaaatgactaaaggggggtgaatgccacaggtggtgaattacaacactgagagggctgataagaaataaaaagctaaatcataaaaaaaagataatagaatattactagcgtgcaagacctaaaaagaccgggggggcgtttcaaggggaacaaggtttacctccgcgggtatgcgaggtcaaagtttttttatggggaaacctagttcaatttcgcggggcgtgggttcaaacacaagtgactgggaaacccctggggctaccctattaagagaacttggggaaaatccccttttcgccaagggggaatattacaaaaaggccccccccatgggcccttccaacaatttggcccccctaaaagtgaaaggggacccc

SEQ ID NO: 33757 - DNA, 294 bp, Gossypium hirsutum
  Clone ID: LIB3145-023-Q1-K1-B11
gaaggcgtccccaagcaagattttcacaaccaaacaagcaggaagtatctacaaagaagggggatgaggatgacgaatataactgggacatgccaaatgaagcccttccctattgatcgcattttgccatgccttttatttacttatcttcttcgcctttgagctctggcagttttgtctgtccattgtaagttgaattaagatgaattctgccacttgaattgcgctatgcttttctttttacataaatgaagtcaagattttcattccttagaaaaaaaaaaaaaaaacaaa

SEQ ID NO: 33758 - DNA, 292 bp, Gossypium hirsutum
  unsure (1)..(292): unsure at all n locations
  Clone ID: LIB3145-023-Q1-K1-B2
cttcatattatgatgataatctttgtagaagggttnnnnnnnnnnnnnnntnnnnntggtgtgggtgttttgcacggtatttgtattttcttcttatacaaaccaagttcctgcttttttattagtggtagcctgccatggcaaaagagagactttttggggtgcaaagtttcttacaccctatcttaaggcctgtgtccggacctccattacctactcaccaatctactggctcgacagctgtagattgtaatacacgggcttggcccttggacattacgaaaagctgatt

SEQ ID NO: 33759 - DNA, 209 bp, Gossypium hirsutum
  Clone ID: LIB3145-023-Q1-K1-B6
aggcatgcctcttgaagtcatcacggaattcttttccgttggatcaaagcaggctataactgctaaaaacacgggttattctaactgctaaaaacaatcgagtttggtgaattatctgttggaaagtttactgtgttttttcttttcttttttaagcattgtgtatacatttaagacataatgtgaaggtcatgatgatctctgagttt

SEQ ID NO: 33760 - DNA, 130 bp, Gossypium hirsutum
  Clone ID: LIB3145-023-Q1-K1-B8
accgcatcaatgatgagaagttgtcagccaagcttataagagattactagcaatgtggactctgattggagcatactctcaaaactctctcctcctttaggtgggctagagcttggcaatatttgtctac

SEQ ID NO: 33761 - DNA, 307 bp, Gossypium hirsutum
  unsure (1)..(307): unsure at all n locations
  Clone ID: LIB3145-023-Q1-K1-C11
gtgctcatcatgctttactacttcctatgtcaaatgattgctgctattctcatagatggccttcgtgtgcgattggtaactggtggaagaaaaaaagagggctaattatggcatatggatgcccacacgttattgaacattactggtttgattgttaacactttgacttggtgggtggtccttgtggcctggttgttattgtttatggcatctggtgcttttttctgtgtctgatagtgactgtgacagagaaaaaaatatgctnaattccctagaaaaaagagggtacaagcttatggctacatct

SEQ ID NO: 33762 - DNA, 410 bp, Gossypium hirsutum
  Clone ID: LIB3145-023-Q1-K1-C12
atttaagtgattccaagtctcaacagttggacactggcgaaaaacgtggttactgttgttcatcttgatgacatcgagggcattgtgtgtccaccaccactttcttttgcttgaggttaacaagggaaggaataaaattccaagagattctccaaactgtcaatgtaacttttgaggggatgtataatttccatagcttcttatagaaattttttatttcggtttgtataaagtaattattaggatccatgttagactcctgtaatagtttataggcgcttctgacttagaactcaccggacagttcacctcgccatacttgaaagtcttcgtattctgtttttgccaatggaatctgcatgattttccttgcaatatccatactaaaggtattcataataacagttgtt

SEQ ID NO: 33763 - DNA, 403 bp, Gossypium hirsutum
  Clone ID: LIB3145-023-Q1-K1-C4
gcccgacccacgcgttcgtttgaacattaattacactttagttcacaaaggcccatgcttatcggggggcttgccggtcacaaatagcctacctcaaacgaatatacactcctgaacttataaaaaacgctgctcacactgtaacattgaagcacatggcccggattttccccattcttggttaagcctctagccgggatgaacaatttattggagttatttgtgccatgatttctatgacattgcgaccattttcatggtttaattgggaaggactttatatatatatatatatatagctgagaacaatctatctttggatagacttggtaagccacaccaaagcatagctttgaatccgtaccattgtatttctatctttacactcatcaggaacccccaa

SEQ ID NO: 33764 - DNA, 438 bp, Gossypium hirsutum
  Clone ID: LIB3145-023-Q1-K1-C5
cccacgcgtccgaaaattccagcccctttggatcaaactaatgtaaagctcggactcaaaccatcaactggtatctcagcctaggtggcggccacgccttctctggtggagggggagttgattctacccttgacacaatgacgacattgccgatcaatcattcattttcacaacgctcgaaaaactatctggtttccattttgaatattaagcaacgacgacgcttttgagtatttacagtggcaaaatgcttgaggccatcatcaagacaatatatgacaagaaatccaaccagcttctccaatcatttgaaatatatttatatgtttgtaaataaactgtctctgtgatccattaataaggtttttgtctctgatgtttagtttataatggcagcatatatatatgtgtgtgtgtgtgtgtgtgtggaagaaaaga

SEQ ID NO: 33765 - DNA, 302 bp, Gossypium hirsutum
  unsure (1)..(302): unsure at all n locations
  Clone ID: LIB3145-023-Q1-K1-C8
ggttccccaaattcatctattagggttattaagatgtacaaaaatcccatgttgaatcttgaaactattacagtttgccaattttccatgttttatgaaggattatatacttgtgaaaatatatagcaagaggtacacacannanaaaaaaaaaaaaaaaaaaaaaaaaaaaaaaaaaaaaaaaaaaaaaaaaaaaaaaaaaaaaaaaaaaaaaaaaaaaaaaaaaaaaaaaaaggggnggnngaaaaaaaaagagaaaannnnaaaaaaaggggggggcgccgttaaaaaagatccaattt

SEQ ID NO: 33766 - DNA, 262 bp, Gossypium hirsutum
  Clone ID: LIB3145-023-Q1-K1-C9
cgaaattgccatctgatgtatcatttcggctcaattaatattatcttaaattttgaagagttttacctactaagtatgtatgtatatatagaggtatatacggttgttataccgtataatcatgtaaggagatcgtacatggagtttctcttttgggtgaaattttggaacatgggcaagactaggcggtgtcacacaaagaaaaaaattgttatatataatataatacatgttggtagagaatagatgcaatgttcctttc

SEQ ID NO: 33767 - DNA, 258 bp, Gossypium hirsutum
  Clone ID: LIB3145-023-Q1-K1-D11
tcgcacctcgcacctcggctctgtcattcatacctggtgtcgtttgaattagggcgaaaatagaagtgcatttagtcacatcggtcagtggtttaagtgaaatgtgtggcttactgctgaacatggatcacctgtgcatccatgcaagatgcgagaggtatctttacacctttatgaactggtctggaagactcctggctgttgggtctgagtcttatgtgatgagaggtctaccgagtttcactgagcactatacga

SEQ ID NO: 33768 - DNA, 421 bp, Gossypium hirsutum
  unsure (1)..(421): unsure at all n locations
  Clone ID: LIB3145-023-Q1-K1-D7
gtaaatttttgtctttggtgggagaaatggagtttgaggatcaagaggagcaagaagaagagatgggtttggcaccgagttatgacccgcttgcaaactcatctcgagtcaaaatgtcaggtgtcgaaccgggttcgataactccaacgggtcagcagcagcaacagcagcagaggaaaccaaggtatagagagtgcttgaagaaccacgcggtgggaatcggcggtcacgccgtcgacggttgcggtgagttcatgccagctggaaccgaaggtaccctcgatgctctcaaatgcgcagcttgtaactgccaccggaacttccaccgtaaggaaacggagctgggttccccacactccgtccccatgacggacctctacttncaccacccccaccaccaaccaccgcaattcactcctta

SEQ ID NO: 33769 - DNA, 289 bp, Gossypium hirsutum
  Clone ID: LIB3145-023-Q1-K1-D9
gttaaactgtttggcctggagcctgggaccacttggagaaacgaggctctgtttcttgccatgatgaaaatactggaaaatacggaatgtgattgtgcaaaaacagtcgagatcctgatgcagtgtgaattaccctacaggtcttatgggtttatgcttttttggacaagaacaacttaagagcagcaactaaaatgtgggacttctattttcagacaattaagaacagacctattaccactgacagcaggtgtgacacggtttttttttttttgtagacatatgtttc

SEQ ID NO: 33770 - DNA, 295 bp, Gossypium hirsutum
  Clone ID: LIB3145-023-Q1-K1-E10
gcggtggaatccggcgacccactcgtggaaaaacaattataataggcagagattgagccacttatattttggattccttctattcttgcccttgtctgtaaataagtcacgtgcaatgcctaactgctcggtatagaacattggtaacgacttaccctactgtcaatttttacacagtgctgacaaaagcccactatgccatcccctacggaccttaacgcagtaactggcatagtaactgcaagcagattgacctcaagggcgcagcaatgctgagatgagaccatgaactgaa

SEQ ID NO: 33771 - DNA, 216 bp, Gossypium hirsutum
  Clone ID: LIB3145-023-Q1-K1-E12
tcggtttactcttatttgtgcttcacttgttttattggtggttgagaacaccattgaagaaggctgttccatgggttcatgaatccaccggtggctaggctttatggtgttgttcttgtgtttggtttttattttaataagaatttcctaaagcttattgttatcatatgaattgctttgcttttacatttggtttggtccctattcggtttaaaa

SEQ ID NO: 33772 - DNA, 297 bp, Gossypium hirsutum
  Clone ID: LIB3145-023-Q1-K1-E2
aagctcttgtgtccggctcttcatagttgaaaagggtttagttttttgtattggagtcaaagctccatttatgtataactcataattttctgtatacagtttttggaggtggcgatttctgtttttagctagggaatttgcgacttaaaacttgttcaagagctgcaattggttactcgagcttgacagtttgctcgagggtttggatagaattattagggtgcaaaaattaaaccttattaaattagatagaaagaaatgacctggcccttgggtggctttttttgtctgccccca

SEQ ID NO: 33773 - DNA, 364 bp, Gossypium hirsutum
  unsure (1)..(364): unsure at all n locations
  Clone ID: LIB3145-023-Q1-K1-E7
cccacgcgtccgcccacgcgtccggttgctgttaacgatgagcttatacaggaaagtgacaatgaatgtgaagcaaaagtgacagtcagttcaaggaaaactaccagaaggagaaaaagtcgctcacaatgaggttcacaagtaaccatcctgaattataatattttattatcctggatttgattgttgcttgacaatttttggcaataccattgtattattgtttcataaatctgacatcgagaatggtaattaaggaatttgcttatatgcatgtaaagatccactgtatgctatttaaggaattatttagcaatnacattggatcatttgtatataaatctgacaccgagtatgctatttt

SEQ ID NO: 33774 - DNA, 296 bp, Gossypium hirsutum
  Clone ID: LIB3145-023-Q1-K1-E9
ggtattgttatgccacattgcattatctactgagcaaaaaaagctggccttttggacccattaccctaaaatgtgtttaaccaatttctggtctgggggcatccatgttgattgacctaatatgagagggcactatcattaaaatctgtcataaaacctacctgtataactgtctgggttttgcaggagttggttaaggtgttgtgccagtgcttatggttaataagcaatgatatggctacagatgaaaatgaagcacaacgagaaaaatagaaaaagcgtgcagaacacattat

SEQ ID NO: 33775 - DNA, 463 bp, Gossypium hirsutum
  Clone ID: LIB3145-023-Q1-K1-F1
ggtgcagtaatgcgtcgcgggtgctatgcggcggcccatgtgcaggctggcttcgctatacaagttatcagggaggtgtatcaagcgctctgggaacaagcttattggcatctcaaattgcactctgtatatgccgagtgtgttccgcataggcggacagctcgaggtgtgttcgggcacattctgaactccagatgtcgactgtatgtgacgtgcagctgcatcaacgtaattcctatgacctgataggtgaagacattcatggtgatgcgctgataatcgctgaacatcagattgcatcgtgtccagctcgttagggtcgaacgggttcttttgggctgggcttactggtatgatatcttctgggtctttgcttccaaatggttgtttcatgagagtgtgatgatagtggtagctcgtggtgatcggagtggagaggatggcataccaatgctactaaaaa

SEQ ID NO: 33776 - DNA, 189 bp, Gossypium hirsutum
  unsure (1)..(189): unsure at all n locations
  Clone ID: LIB3145-023-Q1-K1-F11
tccccacctcgggattgccatatgagtttttgaagccgtcttgagcctggggtcactgggaagggagttcttacattncattgcttaatatctaaagttctgttgggatgctcgaatgccttcggtatggatggacatgtgtctactgaaataaaatgacctttaaaataaaaataaaatgaagctgaa

SEQ ID NO: 33777 - DNA, 428 bp, Gossypium hirsutum
  Clone ID: LIB3145-023-Q1-K1-F6
cggaaattgacaaaacttgtgatgggttatgttgataagtatgtcaaagtataagatgccatcaaacttgttcccatgcatccaccgttaaaaggttttgattaaacacgtaagcttctttccttattttttcccacttgaggttgagggccattgaagcttttagaagtatttctatttgttgtcgtgttttgaaaaaggatctaaaacctagagccggttggtttgtgtagttttgaatggttagggggataaaggaaaagctaagcttatgagaaggtgaacaaggcaagagattatctatacatcttaacaaagttctatggaacatgaatgaacatatatgtagtactttgtttgtatattgtcattccttgtagatatccagtctttgtcattgactaatgctgtatgtgatcattatgatg

SEQ ID NO: 33778 - DNA, 304 bp, Gossypium hirsutum
  Clone ID: LIB3145-023-Q1-K1-F9
ggcggaatccgggtcgacccactcgaaaaaaaaaaaaaaaaaaaccccctaatcgaagcttagatctgagtgttgattggcatcggccatcctggggtcaactttttcgcgtttgtttcccggcgaccatttctcaatcaaatggatgcacggatccaccgtgagtgcctgatgcagggggggactgtggctcatgccatccctgggaccagaccagccatttacgcagacggcatactacgcctgggaaaacattccggtccaccggcattatataactgcacctgactagcaatctactacc

SEQ ID NO: 33779 - DNA, 422 bp, Gossypium hirsutum
  Clone ID: LIB3145-023-Q1-K1-G3
cccacgcgtccgtctcgatgtcgtatataatgcctcgaacaatgagcttgttcgcacacagactctggtaaagagtgccattattcaagttgatgcggctccgtttaagcaatggtaccttcagcactacggcattgacattgggaggaagaagaagatggcctctaagaaggaagctactgaggaaccagaaggggctgccgaggaaaccaagaggagtaagcatgtggcaaggaagcttgagaaacgccaaaaagatcgcaaataacttgatcctcacgttgaagaacaatttggtggtggtagattgttggcatgcatatcttccaggcctggtcaatgtggcagagctgatgggtacatattggaagggtaagaattggagttctatatgaagaaaatgtataagaaagagggcaagg

SEQ ID NO: 33780 - DNA, 306 bp, Gossypium hirsutum
  Clone ID: LIB3145-023-Q1-K1-H1
cccacgcgtccgggttccccatgtgctaaataacatgtaatgggcctatttagctcgggacccaataaaccaaaattgaaaccaaagataatgttaatagcccaaagtccatttacatcaaaagcccgaatagcccaaatcatttaacccattttacaaacaaaacctaaaacccattttttaatggcccgataggcccaatgcctaaaccaagtttcagccaaccgaaaccctagctagccttagcgccgcgtctaccttctgccagccacgtgcgtcctcggtgcaaacatcagctcgagggtc

SEQ ID NO: 33781 - DNA, 369 bp, Gossypium hirsutum
  Clone ID: LIB3145-023-Q1-K1-H12
gaataattaacaaactctgcccagggacataatgtatcgatgctattggtacaggctggatggtttaatatatcccaatgcttgagttcgactgtcggggttttcctttggcttcagagggttatgcttactctgaaggcctcttgcggatcaatctttaacctttaagcaagccatgagatacatgttacacccttgctccctatattgcatactttgaatctctacctgtgcatgaaaacactgaagaatataggagcaagacagaactctttgtagacgcataccttgtgaatgtgaagcctgtccaacagcatgaacatgaggtcacaactttcataggattatatagatacaaagtgagggaca

SEQ ID NO: 33782 - DNA, 287 bp, Gossypium hirsutum
  Clone ID: LIB3145-023-Q1-K1-H3
ctgatgtctcaaccatgacatagacgactgtactaaaaatgctatgccctatcgacatcccagtcatggctcagataccgcagatacgactagctgctctatgattacacatacttaacacctaacaaactctacgtgcacttatactgctacttgtgcctgcacattcggactgagtgaggggtctgtgttgactggatgtaccttgtcaatacttgtgctgatcttgatcattccaaggtctctgtaatatgtgaacgctcttttactgaactgagcatatggat

SEQ ID NO: 33783 - DNA, 415 bp, Gossypium hirsutum
  Clone ID: LIB3145-023-Q1-K1-H5
tgcagcaaaaacagtacaagtctaagaatatagaaagttccatagtttttttcctcatcagccgatagccctatacaaatcagcaaaagctgcaaacaaagggatagggaaaactcacattaaagctgagttcaaggtacattctgtgaacatgaagaatgccttgaacatcagcacaggttttctttgtttatttcatcacatgtttataggtcaaaacaccaggaaaatggactaatttgttagcaaactagtcaaaaacacctacaggtcctggttttcctgtttttgaacccagagtacttggatatgttacagcttttacatttttcattatgtatcacatcccccatgaatgtcttatttttgttaccgtaattgtctgtcattgccatatatataccctgtcaaatat

SEQ ID NO: 33784 - DNA, 256 bp, Gossypium hirsutum
  Clone ID: LIB3145-023-Q1-K1-H6
cgactaatatcaattatacgacggaagggcatttaccaaacgttaaacgcaggacacagggatctgcggtgcgggtaataatccatggataccccatggacatgaataacgagttcaactccatcattgctgccggcgcatcactgagcgccgttatgggcgctaatgcacactgatagttgcgattacgatgaggttctagccgtatcgactctaccgctcgcttactaacagagtgagcggattacagcgtctg

SEQ ID NO: 33785 - DNA, 426 bp, Gossypium hirsutum
  Clone ID: LIB3145-023-Q1-K1-H7
cttttattgatttttgtatataagccagaatgattctttcaaaatgggcttctaattcttaggaataaaaaacccgaccctttacataattaaaatttggcagccttcttctagaaactcaaaaagctttctttgtttctctgtccaaccccagcagcttgtcagtctgtacactgacgcaccggcacactccggcttcggacaaccgatcaaaagaaagctccaagcctcctctatctcttctccagattagagttcacaaacatagcctcgaactccatgaaatcaacacccaagtctcaaactaccttaaactcgatttatgccattggctgttagataggcttggaaattcagttatggcctccctgccttcccactgttggggttctcgaacgaagactcaaaagatttaagaacctgata

SEQ ID NO: 33786 - DNA, 355 bp, Gossypium hirsutum
  unsure (1)..(355): unsure at all n locations
  Clone ID: LIB3145-024-Q1-K1-A12
gggctgnnacctaggcattttaccccaaacttgtaagcccaactacaaaaatccattttttagtttgtttttgatttgcctggcgatcaagcaaaggattgtaaaagcggctacgtaggatcatattacagttacaatcaaagatttcaatgtgttgnattttgggtgctttggcgatgtccaattgtacatacttgaaaagagaagctgactggcaatggcatctgcctctgccttcttaacattatagagagcacttgatttactaatgattgatttggttattttaaatataattcatatctaaaagtattatttttttttttttttttacctaaaatatttttatttttat

SEQ ID NO: 33787 - DNA, 244 bp, Gossypium hirsutum
  Clone ID: LIB3145-024-Q1-K1-A3
gggagtttagggtatactgtattgcacaatagttcttgtcagcatgctgctccaacctttatcaacttgatgaactctgcaattcttaggcttgctactagggacaaaaatatgacgattcgagcacgttatcatcctctttcgatgacaaaaagcctgcgtttacagcatcaagatcttggtgcattctctgctgcaattatagttaacatagcctatttattcatatcctgcttcatttgct

SEQ ID NO: 33788 - DNA, 134 bp, Gossypium hirsutum
  Clone ID: LIB3145-024-Q1-K1-A6
taaaaagcttattaaaggtaaaaaaaacacttttccattgagttacctgaaccgtatttgggtggcgactagcatggcgatggtacaaggtcacggtaaaatccaatgtcaaaactgtaaatcaggcatcaagt

SEQ ID NO: 33789 - DNA, 134 bp, Gossypium hirsutum
  Clone ID: LIB3145-024-Q1-K1-B1
tcgctgacgcgtttgctgactcatttgttatctttgttttaaaaatattccatgatttgcatggggtggtcatgaattttggtggttcattttgcataataaacgagactgctgttcgttacgtacctttgtcc

SEQ ID NO: 33790 - DNA, 240 bp, Gossypium hirsutum
  Clone ID: LIB3145-024-Q1-K1-B2
cattattgtttattcttccttgtaattcattaaattcattcccttaagcttctcattcatgggaacgagttaacaaattgtacgccaggcttacctctgttcttaagacaccccatgattttttcacccttgttcaattttagttgaatagtgaaaatcttggtccactatatttttctgtacataataatttaatttctatttttataactttttttttaaaatatattaaaatttttt

SEQ ID NO: 33791 - DNA, 347 bp, Gossypium hirsutum
  Clone ID: LIB3145-024-Q1-K1-B6
acgcttggttgttaaggtggccattaatgttcatcaaagggtatactctcagtgttaattctattgattcgttgatgtatgataaagctgaggatatatacttgcttactgagaagggttgtatggctggtgaatcttaagaataaaggtggtactattctctattggcttagatataaactgaagttcattatgaatgaaaaacaactttgtcttctttgtcttattttaaaaatatatattatttaattaattttatttttaatatttttttcttaattatttaaattttattataatattttaatatacttattttttattataaattgattctgttttttttt

SEQ ID NO: 33792 - DNA, 204 bp, Gossypium hirsutum
  Clone ID: LIB3145-024-Q1-K1-C10
tgatctgttaaaatattctatactattgtttttgggatatctattttaaggctgatgttgctttttgatcctggggtgtcgatgaatatgtcttcaaacatactgcctttggaacctagattgtgtctgagtcacaaaaaagactacctacagaagataaaagtggcgctggcctcagatttcatgatcacaaagagggagagg

SEQ ID NO: 33793 - DNA, 216 bp, Gossypium hirsutum
  Clone ID: LIB3145-024-Q1-K1-C2
acgctctctcgatctataacttgtggatctcctttgactcctgaagctggtgaaattgtggagagagctaattgattaaatggcgttattcgaatcgattgctttcatgtagagttctgttcatcttgtagacattgataaccaaaataatgctgaaataatatgatcctgaaaggaatggttcagattaataatattaagttttcttatttaaat

SEQ ID NO: 33794 - DNA, 227 bp, Gossypium hirsutum
  Clone ID: LIB3145-024-Q1-K1-C4
ctctctcccatcggtcgtttccaagtataagatagagaggtctccttacaaccaccgtgatgggtcgtgttattcgagctcaacgtaagggtaccgtttcgttcttaaggtcctaccaacttactatagtatttttacattttgttttcttactttttatattatactttttatatttaattttataatttttttaattttaattttttcatttattttatataatt

SEQ ID NO: 33795 - DNA, 412 bp, Gossypium hirsutum
  unsure (1)..(412): unsure at all n locations
  Clone ID: LIB3145-024-Q1-K1-C5
aaaacccgggccgacccacgcgtacggaaacatgcttttatttttatccttcttaatacaatgcganntgaatctagtcaggtggtgtttatagcatacctggtggagtattaaggattggtgctgcataagatttaggtccaaacaattgccaaaaattgcttgtttaacttctttcttgtgtgtctgtattacacctttcaaacagaaagatcttgtgttgaacacattgatacgtggttcatgaatgagaatctatttaaaaaaatatatctattcttatgatgtgtagttacttgtttctgttcattgacttttaatgttataagtaacatattgctgtttgtataaaatgttggacttatgtcatatattagtacattattaaagctcttttttaaattatttttgt

SEQ ID NO: 33796 - DNA, 141 bp, Gossypium hirsutum
  Clone ID: LIB3145-024-Q1-K1-C7
aataaccgggccgacccacgcgttcgtgtttctctcactgctattgacggaaactttaatccttttgctttaaatttgttcggcagtgttaattttgaagcaaatgagtgacaaagatggtgggtaagcctatttatttat

SEQ ID NO: 33797 - DNA, 458 bp, Gossypium hirsutum
  unsure (1)..(458): unsure at all n locations
  Clone ID: LIB3145-024-Q1-K1-D11
caaaaatattaaaaaaatacaagttttttctcctttccttcttcactctggttgtctgaaaagccgaacattctatgctctttcttccagcttaagcaccagcagatccgctatcaggttgcatacttttagtgtatggttcgcccacatatggattcagtaccgtcatagctataagagagtgctgtcaatcctcatgcttctgcaactgacacatgaccattcttgaatcctgcctttgggccttggtgtattaaaagattgtaaagattttaagaagattccacaaagtggatgggataaactgtatatatcctttgttcctgctgattctggaaaaacgactgcgaagacaaccaaagcaaatgtgagaaatggaacttgcaaatgggctgatccagtctatgagactacnaagcttctncaagacatcaaaactaagcagttcgatggaaaac

SEQ ID NO: 33798 - DNA, 318 bp, Gossypium hirsutum
  Clone ID: LIB3145-024-Q1-K1-D2
aaaacccgggccagtatccgaaaacctaaagattctctttcccaaaccaatcttttcatttttcagcaagagagagagagagaacttacgtttcttttacttcgatcatcagcttagggtttcttaattcgattcccctatttccctgttccccaattttacagatcaggtctgtgtgttcttgttgttcttctgtttctatccgctaagatttatgtctgatctttgatatttagattcttactgtcttagttccgtttgctgtttcaaatgcttaagacgctatttcttgtgccaatgtatacttttacatttttt

SEQ ID NO: 33799 - DNA, 345 bp, Gossypium hirsutum
  Clone ID: LIB3145-024-Q1-K1-D8
cccactcgtccgacatgatctactttgagtttcttatagtatatatactattgagtctgtgaatgctttttgtattattacttctagttacaaagagggtaaatcttgctctgttataaataatataaaataaaaataatataataaaataaattaaaaaatattatatttatttttttaaatatattatatattaattttttattatatttattttatttttaatttattattttttaattttttatatatttttatttttttttattatttatttaatttatattttttatactatgattattaaatttatttttactatatttattttatattatattttat

SEQ ID NO: 33800 - DNA, 177 bp, Gossypium hirsutum
  Clone ID: LIB3145-024-Q1-K1-E1
aaatttagaatatagttttagtttgaaattttaacatcaggggtctgctttgaaagttgctggtgcttataaagaaaaaacggcagggtttttgctgattaaaagtgcataatctaatggttggtgtcggcgtaagtttgttttgattgtaagacagtaaagcttgtctacaccaaa

SEQ ID NO: 33801 - DNA, 452 bp, Gossypium hirsutum
  unsure (1)..(452): unsure at all n locations
  Clone ID: LIB3145-024-Q1-K1-E11
gttacttatttttttatttttggggttattaatgtacgacttcttcctactggttcctcgtgggaggcaaatcctgaagcggccttcatgtttgatgctgcaaatggtcatgagaatgatggtgatcttttactccatggccacgctacaggtaataaatcaagtttttgcatttattatattggttttcatcttctttatatcttaattctcccatctgattggcaaaggatcatgtcctgctcattcttgattaattttccttgttaatttaggatttcaactttctgaaaatccttcttcagaggcagtttggaaatcttctccataaaactccacagctcaagcagagcattacttggccatttatgtcgtcttatttttatcatattatcgtgattgtgcttcccccaatgtttctattgttgctgcaactttntatgttgaacatg

SEQ ID NO: 33802 - DNA, 466 bp, Gossypium hirsutum
  Clone ID: LIB3145-024-Q1-K1-E4
tcggttgtcacaacataaatttattatggactatttgatttctttgtcgcatatgcatacataaggtggggatgaatggagccctaaccatgtggacacggtgtggtgttccttcattttatggctttgttttataatatataacatgttatatcctatgcggtcatatttagcttctagctaaatgtggaatctagtttagagttgctgttcttttttttttccttttacttgtttttaatatagctaattgatttttttatctctgatttgatatttatatttttaatttattaatttttttatttatatatttttataaattaattatattatatatttaatatatttacatatattatttttttttattatttatattttattttctatatttaatatatatatatattatatcttattcattaaattttttattttttatattataattttttattatata

SEQ ID NO: 33803 - DNA, 203 bp, Gossypium hirsutum
  Clone ID: LIB3145-024-Q1-K1-E6
aaagcaagtatcatctgtaagatgttattattggcaagatatatttacttctagtgaggaggaagattaagaatatggatctggagatacggtgtatagagtcaacaggatcaggtgcaatttcccatgtagagactgagacactagctaaatatgagttgatggatggtgctccagtcagaggagaatcaaattcaatcagg

SEQ ID NO: 33804 - DNA, 135 bp, Gossypium hirsutum
  Clone ID: LIB3145-024-Q1-K1-E7
ctcatcgacggaccggtttccaagtcctctttaaaggggcgccggtaagggtgtgagccctgtgatgctttttaccttgttctgtccaagaggcacattttacttgtcgaattgtttttaaatgcatacataatt

SEQ ID NO: 33805 - DNA, 228 bp, Gossypium hirsutum
  unsure (1)..(228): unsure at all n locations
  Clone ID: LIB3145-024-Q1-K1-F4
gcacttcggacggttcgtttttggctnccatttaactcttngaagcaaacattttagctgggttgtgtgtaattttatcagcttctttagctgaagttttgaatggttaacctgaatttactgttcatattacacataaattgaagcatcatcctggacaaattgaagcagcttctttaatggaacatatacttgttggtagctctattgttaaagctgtttaaaaat

SEQ ID NO: 33806 - DNA, 301 bp, Gossypium hirsutum
  Clone ID: LIB3145-024-Q1-K1-F6
aaaacccgggccgacccacgcgtacgggcgctacattttgtgaactccttttcttatcactccaaacttgaaaatcatcaggaggggcttcattcagcgggatactgagaatcatctaggctacattctacggaaaggtatactctatcaactcctgtatccatgttctactgttagaatcaatatattccgtaactaaactataaaattctttttcaaaaaaaaaaaaaattaaaaaattatatataaattaattactatattataaaataaatatatttaattaattaaaaacttattt

SEQ ID NO: 33807 - DNA, 175 bp, Gossypium hirsutum
  Clone ID: LIB3145-024-Q1-K1-G5
atctggtttatcccaatttcttaatcacagtcatggcaagtgggttatcagtgatgtttatcaaggcagtttccccaatggggctgaggtttgttcttttagaccgtcgtcttttttaactgtaagatcctggcatgagttatccaatttgtcaaccatatttttattgagttag

SEQ ID NO: 33808 - DNA, 423 bp, Gossypium hirsutum
  Clone ID: LIB3145-024-Q1-K1-G8
ctgaagggcaccaccatgtagtggagcctgctttttaatttgacccaacacggggggctctgggagcttctataagactctttgaacgcgtatatgctcatgtggacgagagtgcatgagttattggtcttcgcgaggtcaaggggcaacgtaaacttattggtatgccactttatattctattggatgcccgtgtgattgatggttgttttttagaagttatgtgatgcatgttcatcctttggtggttaatttttttatgtccaatttcttttttgttatttagttagaatttgattttatttgttttaattttttatttttaatatttaagttttctatacttttatttaattttaaactttttatttttattaatattctattattattattctataatatatttttaatttatcatta

SEQ ID NO: 33809 - DNA, 222 bp, Gossypium hirsutum
  Clone ID: LIB3145-024-Q1-K1-H1
caaataataacaatcacctgcggatccccattcgccagttattaaacgcaggtctcattcagttccggtgcgtttaataatccctttatacgccatggacatgaagaaggtctccaccgccatcattgttgctgccgcctcaatgtgcgccttcaaggcctgagatgcacctgctgcttcccctaccgcaggtggtactagccctagcttctctcccgtatt

SEQ ID NO: 33810 - DNA, 411 bp, Gossypium hirsutum
  Clone ID: LIB3145-024-Q1-K1-H5
tcgcccactcgtccgtaaagatctgttctttttttctgaaactcccaaggagcctgccgggggtgtatcatatgaacttgagccaaaccgaacctctactgatgaaaatagatctctacttttttatgcttattgtctatccttcttttgaaagtaatatagaaaccccttgaattttagtttttgtactacattcaatttattaattttatgtatttagtaattaatattaattatgtatttttataaatattaatttattaaatcatataccattttttaatttattatttttatttaatgataatatttaatatattcattttattaattataactttatatcttttaaattacatttttattattttgtttaatttattaatacattaattataatttattatatat

SEQ ID NO: 33811 - DNA, 382 bp, Gossypium hirsutum
  Clone ID: LIB3145-024-Q1-K1-H6
ataacagttcttgaatctttatttatgtcgcattcatgaaaacccaataggattcctaaccttactgcttgttctcctgcatgtgcttccgccgcaaacggtgaggcaacattttcatgaatgaccgattttgagaccaaaatatccccttgcatgtttctaactagcaaccctgatgcggatttgatgagttgttgatcgaatgccctatttaaagatatgactaccctcgttcgtcgttcttcatgtattagccaatgcctgtagtcaaaattgtctgtacagacttgccgtcttttgtgtccttctgactttaattagttaacttgcctttattatatgaattagtctagtttaaggtaatttttatccagtgtaattt

SEQ ID NO: 33812 - DNA, 355 bp, Gossypium hirsutum
  Clone ID: LIB3145-025-Q1-K1-A12
ttcaaactggctatttaaatgtattttcaaccaaatagccattcgaaatggcgaattctaagacggctaattctactgtgtcattttgaaatctcatatcaaggggtgaagctaagatagtttcttaggggctaaatgaagagctaaatgaaatataatctatatatttatcaatattaaagaattaaatcatatttttataattataaagaggcaatgtgcgatgcttataactagaccctgctcgagacttaaattggcctttgcccaaatcatcatatcagatgactatttggttgacattatggatgaattcaaaaacctattcaaaggcttatattttacttaataattt

SEQ ID NO: 33813 - DNA, 285 bp, Gossypium hirsutum
  Clone ID: LIB3145-025-Q1-K1-A3
cccacgcgtccgtccatttgtacattgcttatgaattgtatctaggatgcgacgatgattcggaggatctaatacaattctgatgaaaggcgatagctcttttttgctgccagactccttattatgccagaaccgaccttacgtgcgttcaaatctatgagatacttatgggttgactggaatggacaatttcttgctctaaaaccctgatgtctcaacaatagaagcacgtccaccacatgaaaaagaatctacattgatgaacaaaatctaggagatgatgtt

SEQ ID NO: 33814 - DNA, 428 bp, Gossypium hirsutum
  unsure (1)..(428): unsure at all n locations
  Clone ID: LIB3145-025-Q1-K1-A6
cccacgcgtccggaagaaggtcgaaacgaaggaaatttaatggaaagcctttcatctctctattctgataatcaaaacaagcaatctaaagctaatgcttcaccaatgtccgcaactgcgcttttgcaaaaagcggctcaaatgggttcaactagaagcaatccgtccttctttggcaacagtttcggtgtaatgagctcatcttcctctcacacagcacctactttcatggcatcaagcagtgcatcaatgagtgcaacaagcaacaagcttgataagctcatgttacaaacaggaggcaaaccaagtgagcccagtctattaagcatgcatcacccttgttcaaattcattcgctcaaagcttgacgagggacttncttgngatgagcaatgatcaatcaccacgtncatttttaccccaagaact

SEQ ID NO: 33815 - DNA, 262 bp, Gossypium hirsutum
  Clone ID: LIB3145-025-Q1-K1-B11
cccacgcgtccggtcgaagattcgtgcgatgaatcccgacgcgccttcccttctagatcgcatgcttcggctcctcgcttgccatggtttagttacttgtgtttcgtgaaagctcgatgccggtgcggatgatggaaaagatggtgagagagtgtatgagattactttggctggtaaagcttttgttaatgacgaacataatggatctttggctgtttttactagcgacaaggctaacattgaagtctgataagttgagttc

SEQ ID NO: 33816 - DNA, 370 bp, Gossypium hirsutum
  Clone ID: LIB3145-025-Q1-K1-B7
cctttttcaggtcaaaatggggatgtcaggtctccgaagagacaatgcactgactacaggagtgtattggttgaacggaattcttttacatcaccagcgaaggaccgtctattagctttcagcgaccttcggaaggctcctttgcaatctgtgtttgccagtccaacacgccctaaccctgttggtggaggagaaacatgtgccgaaacaggaattaatatattctttagtaagattaataagttggctgctgtctggattaatggtatggttgagaggctacaactgtctcaagagattagggagagtgtatattttctttttcaacaaatacttagccagcggacttctctgttttttaaccatcata

SEQ ID NO: 33817 - DNA, 364 bp, Gossypium hirsutum
  Clone ID: LIB3145-025-Q1-K1-C10
cccacgcgtccgggaaaaggattttctgtaggaagatactgctataagtcaacttgttggatttgtttaactgattggatgcatctaatgttcaccagttttgaaactcttttgtttggatcaggttcgattagaggcgtcaacaggaagcagaattgaaactgatagaagaagagactgctaagagggtggaagaagcaattcagaagaaggttgaagagagattgaactcagaagaaatcaagcaggaaattcagaagcgactagaggaaggacggagaagacttaatgatgaagttgctgcacaacttgagaaagaaaaagaagctgctattcttgaagccaggcaaaaagaggaggtagc

SEQ ID NO: 33818 - DNA, 262 bp, Gossypium hirsutum
  Clone ID: LIB3145-025-Q1-K1-C11
gactggcaccatcaaaattcgtactgaattaaatcctcaagtttaacgtcgcggtgggggactgttataaagcattccaatcaatactagaacgaaagtgtctaccatgactaaggctgaggacgtcattgcttaacaaacggactgatgctcgaaaaaaagcttttctttgaaaagcagtgaagaacgaccctcgttttggtaacaatttgttaaaagctgagaagtgcttttgggcagacggagaagtaaaaatttttag

SEQ ID NO: 33819 - DNA, 395 bp, Gossypium hirsutum
  Clone ID: LIB3145-025-Q1-K1-C12
aaggaaaggtggtgattgccactgacaatctcataaaactgtcaaccgacggaataacatggaaccctggctccgccggatttgattcacatgggaaccttgcattcatgatctgtgatcctatgaagctagctacctctcctaataccaagtcatctgggacttcttcttcatcctcatcgtcatggaagaaagatacacctatgcagttcggtattcccatacccgtcatttgcgattggttaaaccaacattgggaaggaagtcttgatgaagttaccaaacccaagctaccaattattagattgatgtcttcaagccagaagagtgagcattcttctgcatcctttacaatgcgccaagttttcaaagtaacaagaagacgatatgacata

SEQ ID NO: 33820 - DNA, 347 bp, Gossypium hirsutum
  Clone ID: LIB3145-025-Q1-K1-C3
atataataccctgtcagatcagaagagtacttacattaaagctagaaggtgactgtcttgtcatgctatttctgcttttgcatatgcaaacttattaattgcatttattgtccatatctgatctttaatattaacttctatacatacaaggactacactgcatttagcattttccctctgctttactatctttaaaagttttggagggtgctgaagattggaagcaggttatagcacacattcaacagcttgtttttgatacaatttcggcatgctgtctgactctgttttgaggagttaatggccttggatgctgctgcattgctggttcagatactgggagctac

SEQ ID NO: 33821 - DNA, 328 bp, Gossypium hirsutum
  Clone ID: LIB3145-025-Q1-K1-C5
attcaaatgagtttggtcatacatgtggctttcagaaacatgtggttcatccaatcctcgatcagaatttctttcttgatacaagtcacaaaaggaggctgaaggaggagtatgaaattgagccctggacatttgaacaacatgttggagaagccataataattccagctggctgtccataccagattagaaacgttaagtcctgtgttaatgtggttttggactttgtttcaccggaaaatgtgaccgagtgtatccggttgatcaatgaatttcgtctgcttccagacgatcataaagccaaagcaaaaaagtttgaggttgagaa

SEQ ID NO: 33822 - DNA, 366 bp, Gossypium hirsutum
  Clone ID: LIB3145-025-Q1-K1-D10
cccacgcgtccggtttttttatattttttatttttactttttttttttttgggggttggttttttttttttttgccaaagaaatggtaatatgatttcccggataaaagtttccaggttttgaaaattaagggaaccaaagggcaataggatccgcggggaaaggaaaaaaagtagtaaaaaaaaaaaaaaatagaggggggggggggtttaaagggggccaggttttgtgcccggggcagctaagctgaaaccttttataagggggctccaaaataaaaaaccagggaggtagtttaaaagggggggatggggaaaacccggggtataccaaaaaaaaaggcttggaaaaaaaatccccttttcc

SEQ ID NO: 33823 - DNA, 394 bp, Gossypium hirsutum
  Clone ID: LIB3145-025-Q1-K1-E10
cccacgcgttcgcccacgcgtttgcccgtaattacaaagagtaaaccaagagcgttacaatcgaaatgtgtgttggaaagggaacctgaataccgccatacatcagttgtacacaaaaaagggtggattcaatatcccatttgatttgaacatctctgacacgtttccaaagttgatagaaatatggaaaagaaaccctcaagaaatcttggagtcgaagaaccttagcagaatggagatttataaatgtagcagcttgaactatatttttaccccgtctatgcttttgagcctgaagcaactaagaaggatagaaagtaaagaatgcaatgcaatggaacaagtgatcaaggaaagacgaggagggagcaaccatacataatttgatattttc

SEQ ID NO: 33824 - DNA, 312 bp, Gossypium hirsutum
  Clone ID: LIB3145-025-Q1-K1-E2
ggacataaacatacccatatctgatattcacttttgaatcctgaacccgggtaacatggactatatttactggcattatactcttagcttgagaagaacttgaacaagagttgatagtgtatagacatttcacactactcaccccctgtatacatgtattggtatattttctgtacaaaggtcaccaacccgttgcctatcgtataccactccatcaaaaccttcggggtcctagaaatgcaagccaataaggctttgatcacttcccctgatagtatacctacaaagtgagatcagtgttaactgattgag

SEQ ID NO: 33825 - DNA, 365 bp, Gossypium hirsutum
  Clone ID: LIB3145-025-Q1-K1-F12
ggtgtattcatcatttatgtatataagaggaagaaaaagtaataaatcttaaaaacaaaaacctattttgaatcatatgaaccctaatgaatactttgagcttggttgtagctttgttagttcagagtttcatgattcttgaacttagtaaaatttactttcggctgctgagcagagtgatttgaacttgtagaacgtaaatctatacgatatatatgtacatgaaaagaagaatgtgttataccttattctctggtattgagaagtgaactcaacgagctcctcggccacatgcatcggaaacattcttctgcccctcaacatgagggctccattcattaattgtcattttgtaatacaactat

SEQ ID NO: 33826 - DNA, 350 bp, Gossypium hirsutum
  Clone ID: LIB3145-025-Q1-K1-F4
cccacgcgtccgcggacgcgtgggttgcaaaccaaagtgtgtagctagcagtttgaataacatcgtttgggtttcgtagtaaaaaatggaggaaaggaaacctggttcaccatcgagaactcgtatttatctgatggttaactgtcaagtattcatacatgtgtaaaaagttcatagctatttgagctgttgttttaataaactgactttactatcggtttagcataggctgctggtcctagaagaaatgtggctgaatgaaccaactagtctaagtcccgagttggtgggatctaattcgaatcaatttatttacttacagtatgcgatcagttctgtatatatttgac

SEQ ID NO: 33827 - DNA, 332 bp, Gossypium hirsutum
  Clone ID: LIB3145-025-Q1-K1-F9
cagagagaaaataaccaccatttgcaggtttaccctgttgcttaccgtgctagggtcttccatctgcgggcactctcgcgaactagccggctcaccgacgccttctccggaaaattcggggctgattgctgggactagaaggcctggatctttaccagcttctcgtgattcaaagtgcaagcagtgcgagccgaggatgccggtccaagcatcggttcgggcggtggagatcgaacagaatgactgctaccctcagtgtgagcatgcatgtgccaagagaatatatacgcaccttaattattaccaacatatatgatgtaacttgcttatat

SEQ ID NO: 33828 - DNA, 296 bp, Gossypium hirsutum
  Clone ID: LIB3145-025-Q1-K1-G1
ggtattcttcacctcttttccgtgtaaggacagcaaatgctatccaggaacgagtacaggtccacaacaccggtccatcatgggtccctggcttcattgtgatgagtatcgaagatggtaatgaaggcattccagggctatctcagttagatccaatcttttcatacgttgtggttgtcttcaatgcatgttcaacagaggaatcattcactatccctacactgcgaggaaggactcttcaactgcatgccatacaagtaacgtctactgatgaaacagtcaagaagtcatgctat

SEQ ID NO: 33829 - DNA, 268 bp, Gossypium hirsutum
  Clone ID: LIB3145-025-Q1-K1-G12
atttacttattcggaatcggagcggtgacggcccctttttggacccagggccctttgccggcgagccggcggatgacattgcaggtggagtgtttggtgggcggacattcgtaaagatgacgcagtgtgctaacatgagctaacagacagaaattctgtggaacaaggggaaagctcgatgattctgattccttacgaaacaaccgtgaagctggctataatacttagacttagattgaactagagaggagaaagtacacaggatact

SEQ ID NO: 33830 - DNA, 346 bp, Gossypium hirsutum
  unsure (1)..(346): unsure at all n locations
  Clone ID: LIB3145-025-Q1-K1-G2
tacataccgtatacaataagtcttgtgagcaagtatataatagactgaccttctgataaaaggaaactagattggaatacaatgatgaaaatagctagcacgtgctgcaaacggtatggagtattaggacgacacatgcaagactactggcatatatcgcgatgtaaaatgcttaaatatatcgatcggtgcgggctatcatacaaaactatctgattttgactgggcccaactgcgacctgttggggataagactcatgtctccacaacagtgataagcacttatcgatattggagcacaaaataatcatatgccggtcngcttacattgaaatcggacgtttat

SEQ ID NO: 33831 - DNA, 225 bp, Gossypium hirsutum
  Clone ID: LIB3145-025-Q1-K1-G3
cccacgcgtccgataataaaaaatataatataaaaattaaaaagaaaaaaataaatgtacagacgaggctagagtgccaagacataaatgaacatacatgcaacagaatgcaaagggttttggggttatagaagacaaattcaatgaccgctggtgtacaacgtaatagggggggcttacttttgaaataactgagcttacttgcctggcatggcataccgattt

SEQ ID NO: 33832 - DNA, 257 bp, Gossypium hirsutum
  Clone ID: LIB3145-025-Q1-K1-G5
gccacgcgtccgcgaagcacaaaccattccatccccaacaacacgcataggaagatgcataaagagaccattgtggtattgctttgaatgggcaaagcgagcttcttttgtttgaccaagcttttgaataactgtcaaaaagagtgtgtagttgacacttagggttatcagcatatcattctatcttacaccttagaaaggatataacagacccagcgataatgaacgataaaactatagggacagaatcgacggat

SEQ ID NO: 33833 - DNA, 277 bp, Gossypium hirsutum
  Clone ID: LIB3145-025-Q1-K1-H7
accacgcgttcggcatgtgctttcaatctttaaagacgcctacaagatagtggatgaattaagaatctcgtcattgcttacaagtgcaaaccatgcagagtatacgtgctctcatttttgtcattaactatattttgatgactcgtataagaagaaaacacatgaggatcttgggagtcacagctaagtttgtacaagttagtgggaggtataaagtaaggaccctatcgtgtgatttgctatggattatgaggacatgtgcggagagcgggtcttg

SEQ ID NO: 33834 - DNA, 430 bp, Gossypium hirsutum
  unsure (1)..(430): unsure at all n locations
  Clone ID: LIB3145-026-Q1-K1-A9
atttccccaacttccactttgggttttccttgttctttttttcgatttggtcgagggtttttttttagcaatggctgtttcaggtttcgaagggtttgagaaacgcttagagctccatttctttggggacgataatgatccaacggtcaccacaatgggacttaggctgcttgattttgaatcactggaaaatgtgttacgtgtcgttcaatgcactgtcgtttcggctgtcgggaaccatttcttcgatgcttacgtgttgtctgaatccagtttgtttgtttaccccactaagatcatcatcaaaacatgtgggaccactcagttactcaaatcgattcggccgttgattcacttggccaaaaatctncgccttacgatatgcgggtgtaggtacacccgaggtactttcatcttccctaaatcacag

SEQ ID NO: 33835 - DNA, 405 bp, Gossypium hirsutum
  Clone ID: LIB3145-026-Q1-K1-B1
ttcccaccctcaaaacagacaacaattcccccttccccaaaaataaacaataaaaattatgagcactggcgaaggaaaaaccgtgtgcgtaactggagcctcaggttacatcgcttcatgccttgttaagcaccttctccttcgtggttacactgtcaaagcctctgttcgtgacccaagtgatccaagaaagacacaacacttacttgcacttgagggtgctgaggaaaggctcaagttgtttaaagcaaacttattggaagaaggttcctttgattctggtgttgaaggttgtgatggtgtttttcacacagcatctcccttttatcatgatgtcactgatccacaggcagaattacttgatcctgctgtgaggggaacactgatgttctgaactcatgtgct

SEQ ID NO: 33836 - DNA, 306 bp, Gossypium hirsutum
  Clone ID: LIB3145-026-Q1-K1-B10
agactaggctgtcttagcccatcatgatttatttttttgcccctctagcctgattccagggggggccttttagattgtagagtggttctttacgaacatgcaaaaccagcatcacttgtgacaaacacattggaagctgatcctacatgccttgtgccaaaccgccatcgtccttgtgcaaataactgtagttcttacggttattaggcgactacaaacctacgcgctaaatgtatacaaacctttgttagaaggcacacgaaccatctggcttcactattcgcaaattctttttagccttcttct

SEQ ID NO: 33837 - DNA, 378 bp, Gossypium hirsutum
  Clone ID: LIB3145-026-Q1-K1-B2
aaccgtggccattttcagcatactacttttgattcaggtttcatcctgcttgtatagaaatgacagcagaggaggctaaaagacttgaccacttcttttgtgaaacttgttcttcttaaggtaagaaaaagttgcggaattcccatgctgcttgcagaccctcggatacaaaggtggatacaaaacgacgccggaggtgacaaaaaggtacataaaagctagcattttagtcaagatacccaactcgactcgttttctcactgttaaccatggagtaggcttggagcaaacacggagactaatatacgtaccatccaaatctgtaagccttgtaagtttataatccttgagttgacagtaaagtgtttgaaaacttga

SEQ ID NO: 33838 - DNA, 302 bp, Gossypium hirsutum
  Clone ID: LIB3145-026-Q1-K1-B5
tttgcaaaacgagatccacaagacctccattgagagggagacattgaagctcgaaatgatgagtgctcaaactatgatcgacattctacaatcgaaaatagattttcttagcaaggaaaacgaggatctaaagaagagcaactgagtcgcgtggtacaggagcctaggttctttccggttctggttccttgatttcctttccttatttatgcatgtattattgttcaccggcacgattgtaaacttcagatgacattaacattcagtttgttgatgaacaatgttgtagctttcctccttaa

SEQ ID NO: 33839 - DNA, 383 bp, Gossypium hirsutum
  Clone ID: LIB3145-026-Q1-K1-B6
gcgaccggtcaatcgtcgacccacctcgataattaaatggtacatggctatgctacttatttcttcctagcggggaagtgtgtgttttgcgtgttgtgggatctgaggattataacataaaaagaagagaaagtgtgactgtatgattacaatttcaattacatcatttctgaatgcggatggaaactgcatttacactgttacaactgccatatgattgtgctctatctttctggggagcaaagagggggggggggatccagttggctggttgttaatatcttttttcattgagcagtggggttactacgagcatggtacacacaagttactcgattgctgaaaccttgtcagttgctggaaatgctttaaagataaaagtg

SEQ ID NO: 33840 - DNA, 275 bp, Gossypium hirsutum
  Clone ID: LIB3145-026-Q1-K1-B9
cccacgcgtccgggcttctgcagataatatcaaacccgaatgcagtggagggaagggcttcttccgtgccgtctgcaaccaccacggttcctaacgatttaagagccaaaatccgagctatgctgatggcgaccttgtagtaaacaacactgaacctgttttcttgtttctctttgtatcagctttggtcttttcttttttgaatattagcattatactcttatataatagtggcttaagattcatatatgatcaaattaatcaatttttaattg

SEQ ID NO: 33841 - DNA, 424 bp, Gossypium hirsutum
  Clone ID: LIB3145-026-Q1-K1-C7
acaaaatgcaatgtttctctttcttttttttgctgctgttgtgttcgtccttttacaggtacggggtatgctggcgcctggcgtggggcgtacgggggttgtgcgctgggggctgctgaggcgtacagaggtagttggtgcgtcgtacggtgcgagggctggggcttggctgcggcacgagggagagggccctagggtttctgaaaccttgacattttgggcttttcgggcctgatcttgcagttgggccacaagtttttgtaattggattgtaaactggattgttatgatttgaattttttggtcttgtatttgggttagattttggttaagtttaatattggacttttatttttttgttttggtttttttttgggtttctaatgggtcgggtaaaaatggcccattacagttggttctaagc

SEQ ID NO: 33842 - DNA, 431 bp, Gossypium hirsutum
  Clone ID: LIB3145-026-Q1-K1-C9
cgaacctgcaaagaaatatatcagtcactgtccgttctctgcattcagttccatagacaaggggttataccaatggctttcttaagtaaaattggaagtatacttaggcagaccacaagtatgcatgtcaatgctaagttgtctgcatcaggaccaggcctatttcaagtgttgagaagcatgtcaacatcgccaagctcgaaactttttgtgggaggtatttcgttccaaacagacgatcaaagtctgagagaagcttttagcaaatacggtgaagttattgatgcacgaataattatggatcgagaaacaggcaggtcccgaggatttggctttgtcacttacaccagttctgaggatgcttccagtgcactacaggccttggatggtcaggttcttcatggccgtcaagtaagagtaaactatgcaaa

SEQ ID NO: 33843 - DNA, 272 bp, Gossypium hirsutum
  unsure (1)..(272): unsure at all n locations
  Clone ID: LIB3145-026-Q1-K1-D10
ccgattccgtcgccacgcgtcgcacgcgtcgccaccgtcgattgtacatgagcgcagcttggtgtatgggactntggttccaaaaacgtatntacacctgaacttctcttctctaaagaccaggctgcacaataaggcgatctgtatgggatcatagtccatgcagcctntctactgcacagaggaccgacggatctttatcatcaagttcgagtgagagaacttctgacaaataaaagggaagatagttcaagccatgttgggaaacttgc

SEQ ID NO: 33844 - DNA, 416 bp, Gossypium hirsutum
  unsure (1)..(416): unsure at all n locations
  Clone ID: LIB3145-026-Q1-K1-D12
cccacgcgtccgccccaagtttgcaaattatttggggggatggtttccttccaatatctatttctcttttttctaaagccggatttcatgcctttggtccaagggggggtatacccctttcaaagaaggtctacccggtcattgccgataaagcctttggatattggacttattacctttaatggatgccctaatggtaaaaataggggctgatgtagtctgatagtacccattgtattttaacttacaatatgatcccttgctatcactctggattttagactttagatggtggtctgaggtgattctttgtctaaagcccanatgtgagccntgtaganttctttgtattataacagagtcaaaatctcagaagcagaaatgcagcagaggccccttttacatgcctaaaagtt

SEQ ID NO: 33845 - DNA, 384 bp, Gossypium hirsutum
  Clone ID: LIB3145-026-Q1-K1-D2
ccggaaacgagtactttttaagtaaaaggaaaagcccgaaacaacaatatgaatgttgatttatagtagttaattgttggtgtgtttaaattgtgaacaggatatcaagaggtgatttaggaaacttgttcatcttgaaaatgatcgacccttcttaccgcgtccctgtctagtgaaatgcagcattagcatcatcgctctgccattgagctttactaccaatggatctactcttacaacagtggtcttgtatttgatacacagcagacagtcattttttatgttttatggctttatatatatttcatgtaaagatttgtatttgatacgcatacattatattacaacacatttttaataaataaatcatattgacttatgatt

SEQ ID NO: 33846 - DNA, 415 bp, Gossypium hirsutum
  unsure (1)..(415): unsure at all n locations
  Clone ID: LIB3145-026-Q1-K1-D3
attctcttctttcccaacctttccttctctatcagataaggtaatcccttctcagttccccgccatggcggaagcttctagaatcttccattcaacactctttccaacactctctctacaactcagcaagccatgttacaattctcacgtttacccttcactctctctcaagaaagcaccacgcccagttcaatgctcagtttccacaagcgaaaccaaatcgacgtcgtcgaatgcgacccaggaagtgccttggggctgcgacattgattccttggagaacgcagaggcgcttcagaaatggctttcgaattcagggttgcctccccagaagatggccatagacaaagtggcagtaggggagagaggattggttgctttgaagaacatcangaagggtgagaagcttctcttt

SEQ ID NO: 33847 - DNA, 215 bp, Gossypium hirsutum
  Clone ID: LIB3145-026-Q1-K1-D7
catgaactctagagtggtattagctgcgaatttgttatttattactttctggcctttccctttttgacagcatgaaactggatccttatttttattatatatatatgtgcgtatatgcaaataagatgtgtattttccctttcaagttttgagtgggaaaaaaacataataagctttgtgtattgaatatcaggtatttatttatgccttttttt

SEQ ID NO: 33848 - DNA, 283 bp, Gossypium hirsutum
  Clone ID: LIB3145-026-Q1-K1-D8
cggacgcgtgggttaaaaaaaaagtttaaaatttacggtccgtttttgttgtgaaagtgaatggaaggagtagacgacttagctatagctagccatgtggtgcaagttgaattttgagttggacagagattcttcattttcacattttcatggacaatggacgaatttgagcccatggaccattgttgaattcgattgtagacattattttagacctttgtttgagttttccagctccctcaggattcggaatcataagaatataaatcagttttctttcttt

SEQ ID NO: 33849 - DNA, 225 bp, Gossypium hirsutum
  Clone ID: LIB3145-026-Q1-K1-E10
ctgacactatgacgattagagctatctgcttatctccttccgcgctctctgctgagacaaagtccaacccgtgactctcaatctcgatagcaatgccagcaactgctgcagaattggatctcactcagtcttgtcacaccgcctcttctatcgtgaagtatacattcgcacatgctggaagcttggaccactgtgcatagtacttgaaccagacgctcgatacct

SEQ ID NO: 33850 - DNA, 194 bp, Gossypium hirsutum
  Clone ID: LIB3145-026-Q1-K1-E11
ctcttctctcctaacctttcctttcgcttggaaagtcggattggaagggttgccaaatggtggtaaaaccgaattcctttccagggggaaggggaaattttattattccaaaacctttgtagggggaaacttgaacttaaaggaaaaaccttggattgtaaaggttgtgggatccagaaggaaaaggaacctta

SEQ ID NO: 33851 - DNA, 391 bp, Gossypium hirsutum
  Clone ID: LIB3145-026-Q1-K1-E8
gcctgaaccaccgtcttcttctagaagccaagatgattcttcatcttcttccagtttgattgggaagagaacgaagcattctcaggatgatgagctctcttctccggttaaccgtccaactcctgggtcatctggtgcgtcgccagagtctagatatggaaagaattcttcctggggctgttcacttagtttgaccgagtataaggtttgtaagaatgatgggttagctgatgcttcaacacagactgaggaaaacacagacagacctaagtcacgagaaacttgtacaaggggtgtttcgactgatgatgggtctttagaacccgaatgcaatgagaatttccaaaacctggtccctaacgcttgtgtaaaagataatcccgagatatgc

SEQ ID NO: 33852 - DNA, 382 bp, Gossypium hirsutum
  unsure (1)..(382): unsure at all n locations
  Clone ID: LIB3145-026-Q1-K1-F10
tcttgatgtttacaatcatgtcgatgactttcttccctgacctaaaacaaagcactatttcaaagcaaaaaataagaaacaagaaataaaatccaaaaccagatcaaagtctactgagtgacagtattgttggaatacgtgaacttgggttttcgggctctcgaaatgtttctgatttcatgactttgtgtagaactttcttcgagaaaactctactggttgtgaaagtaattgaatcaactggtctgaaagaataaatccaccttgatatggtatatttctattcttctgcaacttaaagacagtaaatggaataatggaaatgaaagcgggaccttgtaatatttntctgtatgtttagagcttatattttccttttcag

SEQ ID NO: 33853 - DNA, 342 bp, Gossypium hirsutum
  unsure (1)..(342): unsure at all n locations
  Clone ID: LIB3145-026-Q1-K1-F3
cttgaagtgctttgtgttctctcttatctcgctccacttcaagatcaagcctatttgaagattgataatcctcttccatgcagaggtgtcacaagggctgttttcactgttcctgctattggtatagcttccattttgcttttaattaatttaaatggttaagctaagggtatgtttgtaggagtgattacagtgattttggaactttggggggaaatgtaggtctgaaatggaaatttctggtatttaggtatattaaaggctttttctccattgactatttaggtatattccttgaattattatcatgaattaactttttaatctaaaacttnttgagct

SEQ ID NO: 33854 - DNA, 410 bp, Gossypium hirsutum
  Clone ID: LIB3145-026-Q1-K1-G1
tgcaataattatagtctgaaacaatagaaataatattgtattttactgtgtttttattcatttgtcttttgcccctccatcttcaataaatattgtctaacacattttccttgttagcggacataagcgtgggagatggagtccgagaaatctgccagatagatattaaaaatgtataattctatctgctctttctctttttcctcttttcatctctcaaagatttcaacttgcagtctgaatataatttctaaggaaagataaccacaccttataactccttatccttttctgggttcatttttcatcaaagccacccatgaatttatcgatcatgtattctgaatttgaagttgatgacctcttactatgttatgaatttatgaaaatttcaactacaagtgcataaa

SEQ ID NO: 33855 - DNA, 113 bp, Gossypium hirsutum
  Clone ID: LIB3145-027-Q1-K1-A1
ctaggccagacaccaaacgttgcacctttaaaaccaattttactatgcccaaactgtgacggcaaaacgtatccaataaggacgcatgctcaagtaacaacacaaatggatac

SEQ ID NO: 33856 - DNA, 400 bp, Gossypium hirsutum
  Clone ID: LIB3145-027-Q1-K1-B1
tagcccaaggtagtactagcggttttatatctaatggcactattattaccctattacactctcacttattcactaattacgggagctcggttatcaacagaagattatactcacacccttgtattaacaaatgttaatattgcttttatgaattggtttaataataatgcaccttctttctctaccctacattctatggctatcctaaaccctcatctactttattttctacatcatcttacaatattttttctcttcatcacaattaattaatactatctcctataacttattcgcggccacacaccactttatctctttcaataactagcggattaaatacctcacaccaacgtactaccaatactttaattacatctcttacaataccattctcatc

SEQ ID NO: 33857 - DNA, 401 bp, Gossypium hirsutum
  Clone ID: LIB3145-027-Q1-K1-B11
aacccttgataccctttagctaacccaactcttcttatcaccccaatcctttcccagggcgtgctgtttctcatacaattagccagccccacaactactccctacttctcgccttaatcccagtccttactgcagcaatgtttccaccaactcaagcaattgtatcctcaacacctttaccaagccatcttccactttatcctccaatccatccttcaacatcaacctcaaaactgtcaactcactttgcttttttctatccacatatcgcaacaacttacagcaaatttccgccttcaacaaccgactccatgcccctacccttcttcccactgtgttccccactaaaaaaactattttctttattaaaccccttgcctactatctattttaataattta

SEQ ID NO: 33858 - DNA, 347 bp, Gossypium hirsutum
  Clone ID: LIB3145-027-Q1-K1-B5
atctagcccttgcagcacatgtttccaccaatccaacaaagccaattttatcagttcacatctctcactacccactgggggaagcgtggtaacttccttaaaccaccaatcttattatagcactagtatgcactcgctattatattgttcaaataactacaactaatctacctgtcgacttattctctatactgcaggaaattacatattaagcttatccatacccaaatcctttcccgtaaacaacatacccaagttgatctataatccctataataaaacgctctctctatgcagcggactataacgttctatccacgacaacacctagattaccaaacttactt

SEQ ID NO: 33859 - DNA, 268 bp, Gossypium hirsutum
  Clone ID: LIB3145-027-Q1-K1-B9
cgcctacgtaaacttttattctttaaattctacccactccttttataatcacttccttcaacataaaaaccggccgatttaacttcttcacatattcttaaactatttttacttacactttatctaatctaacacaaccccttattttaaacctctttaatttctttcttaccttttttattttttaaaaaaccaaccatacatctttacataaactcacccttcaatttttctttctttcctcataaaaaaatatattataacttct

SEQ ID NO: 33860 - DNA, 197 bp, Gossypium hirsutum
  Clone ID: LIB3145-027-Q1-K1-C1
ccagggagttatccctaccagaattaaattgtacactcctcatccctttctaattcatacctatttaagaaatccttgcgctgtttaatttatcatttgatctttattcttacccttgtaccacttctattttataatcttttaatttaatcccacttaattcacaacgcttttctatatttatcatttcctctatc

SEQ ID NO: 33861 - DNA, 315 bp, Gossypium hirsutum
  Clone ID: LIB3145-027-Q1-K1-C5
gctctacccggatgcactgatcaaagtaccctatgacctcctaaattctttcacaaccattacttactccttgggtgagatataatcacttcctaactatcatatctcttttccagtattccataaaattctttgctaatattatatatcaatctacctactattattcaatatacaatcctttaaattttttatctttataacctaatcttttcccatcaccaacatattttatcttatttcttattcctattataaaaagtttattttataaaccttactatcattttcttatacatctcccttatctatatt

SEQ ID NO: 33862 - DNA, 221 bp, Gossypium hirsutum
  unsure (1)..(221): unsure at all n locations
  Clone ID: LIB3145-027-Q1-K1-C9
gtacgtaagctttgatcctctataatttacccactccttttcattacccctatcctataccagggcgcgtattttcttattcatcaacgcacccccacaaccacnccctactgctctcctcaatgccaatcgatgcggcaacagtgttgtcatcagctcacgcaggtggagccgcaacaccagtaccaggccatcttaggctttgtcctccactccatcct

SEQ ID NO: 33863 - DNA, 374 bp, Gossypium hirsutum
  unsure (1)..(374): unsure at all n locations
  Clone ID: LIB3145-027-Q1-K1-D10
cgggcgcgtacgtaaacttggatcctttttagtctacccattctttcttccaccaccattccttccccaactgtnncggtctgtatcataacctccctccacaccggacacgcccctatccaaatccaggggcgtaacatggcatcaaaacgtatcctcaaggaattaaaggacctgcaaaaggaccctccaacgtcatgcattgctggtcctgctggtgaggatatgttccactggcaggcaaccatcatgggtcctcctgatagtccatatgctggaggtgttttcttaatgaacattcattttcccccggactaccctttcaagcctccaaaggtatcttttaagacgaatgtctttcatccaaacatcaa

SEQ ID NO: 33864 - DNA, 188 bp, Gossypium hirsutum
  Clone ID: LIB3145-027-Q1-K1-D3
tcgatggacttactatctacactcgcaccatactctatcgccacttttacgctaattcatcttaaaccggttccggctaattcaatcgactaataattccttccacactcctaactttctcatcctatatcaaaaccttatctatctattctatctctcgcctcatgaggggttcggactacagcaaa

SEQ ID NO: 33865 - DNA, 240 bp, Gossypium hirsutum
  Clone ID: LIB3145-027-Q1-K1-D5
ctagcccgggcagcactcattaaaagtacctacctttgctcttaaattgattttccaaactatacatccttaaccggtcagtggggtgtcacatgaatacatattccatgcttttactaactgtattaaataatgctatattgctcaatagtatactcacgatctgcactactattcatacaagggcggatccacttatctgcagtaaaccttatatcaatcttatcgataccctccacc

SEQ ID NO: 33866 - DNA, 219 bp, Gossypium hirsutum
  Clone ID: LIB3145-027-Q1-K1-E1
tacaagagaaatttatccttacccacttttacaaaattttaatggtaagtttatacgctcctctcatggcataaaacgaattttttagaatccacatttgattgatattcttaccagtctaaccatctatactgatcctcatagaagaaaatatttattggtaaactatcaaataataccttcccctcgtatgttttggaggccagaaatttacttttt

SEQ ID NO: 33867 - DNA, 234 bp, Gossypium hirsutum
  Clone ID: LIB3145-027-Q1-K1-E5
gcggccgctctagcccttgtaggcatcatcaaacatacccaacaaattctcttgtttcattttaaatcccccacttcctaatggggggagggtgggaacattttcaaagcaccacatgttcatataggaccagtatttactggttattatattgttcgataaactaatactagtctatttgctcctataataataataagctgataccccggactgaagtaatttcatatcaaa

SEQ ID NO: 33868 - DNA, 333 bp, Gossypium hirsutum
  Clone ID: LIB3145-027-Q1-K1-F2
cccgaccgcacgcgtgtcgcgaagctaacatgactgaccttttatgatacgtgtgagcgcttcatattaccacagcctgaacggaacgtcgggggatatggtactcgaaaactaaatccttgcctaggattcacgtttttattctgtggcggtatatgatccagtgaatctaccgttccgatttttctgtatacacatttaagcaaaggtctggacgagtttatacatctatccttgtcctgctagaacagatagttattgattatttattcctatattaaatggtcttctatgtattgtggaccataatgtttttttcgcgctctgacctac

SEQ ID NO: 33869 - DNA, 171 bp, Gossypium hirsutum
  Clone ID: LIB3145-027-Q1-K1-F3
agggccgacccacgcgttccaaggcatcatttcacctaagggcttccctacccaagtccctcaaacgcctgaactaagcgtggtgtgccaatttagtccatgactagatctttacctagttttcaccatattattttgttcctttagatcatctatttaatatatcttgtc

SEQ ID NO: 33870 - DNA, 326 bp, Gossypium hirsutum
  Clone ID: LIB3145-027-Q1-K1-G12
taagctttgattctttataatctacccactccttctctcatatacccctccaaaacacggtttgatggattataaacaatttggcttccaacgtcacaaataaaattttttctctggtcatcacacaccattattgcataaaacaggaaggtggcatttgtgagaatcattgttctgatcctggtgcaaaagaagaaccaacatcttacggaacaaatacacctatatggaatgcaccacatggtcccttttctacagatgagaacttccctgtgaaattaacgaacccaaacactgattaattataaagaaaagtaggtcttcac

SEQ ID NO: 33871 - DNA, 346 bp, Gossypium hirsutum
  Clone ID: LIB3145-027-Q1-K1-G2
attatacatgaagacattatatgcaaacccagacttagaaaagtttgatggtcgtttgcgatgcttggctcaaggcctataaggaactataatcagtccacatttgatggatatacttaacagaataaccatctataccgatgctcatacaggaaaatattattggtcacggcatcacataatggcttatcctgtagggttttacgcgccagaactcacttttgcgttatatggaactatgtgaaatgcacctccccaacaacatattgttggtcaactaggtcatggcgcttatagaacattatcgtgtcactttatatagaagaccttttaatatttgggataa

SEQ ID NO: 33872 - DNA, 156 bp, Gossypium hirsutum
  Clone ID: LIB3145-027-Q1-K1-H5
tctagccccgaagcactcatcaaatgtaccctatataatcacaatattctctttacataccactttcacttactcgataactgggatatcactaccaccccattcattatcaaatcactcatcaatatataccaaattcaatatctcattaataaa

SEQ ID NO: 33873 - DNA, 348 bp, Gossypium hirsutum
  Clone ID: LIB3145-028-Q1-K1-A1
ggttaatccgacaaaactgaggtgggaaatgttagcttacaattgtcagaatgtggaacgggtagctctatgtggtaatgatacagacggtgatgccgagatttgttgaattgctttgaagtgtatatctccaaagaagctttgtatttagagatgccccatatcatatcatgggatggaagccctcgctagtggttgccctgatttggttaaagggaaagtgacagaacgtggaggcgtcactccggaacgggcttattggtctagagtactttatggggtactatccggtaattgggctatgggggtacatttacatgtgacggccgatcatggtgtattacagga

SEQ ID NO: 33874 - DNA, 325 bp, Gossypium hirsutum
  Clone ID: LIB3145-028-Q1-K1-A3
gtcacgcgtccgaccacgcgtgcggggaagggcataacactgtgagtaaaaactgaaaaggagaagaacgaaaagacaagctctaaaggatgcaaggcaatgaatcaacaaggttagtatgttcaattttaacaatggatcagtcttgtttctcttacaaagcttgtcgtttttgcgaaacacctgtccctgatgacacgcctgccgtatttatctgcaagaatcacagatgcgccggtcgcctgtgcagttctaaacgactatttcgcttactcttttcaaatggaacaaagacaaggggtataaatgttggaacttttgataa

SEQ ID NO: 33875 - DNA, 219 bp, Gossypium hirsutum
  Clone ID: LIB3145-028-Q1-K1-A4
gttcgaggaaaaaggccagctcagacgagggtgagttctccttcacagatctgggatgcgctggccttgcattctttctattagtgtaaagaattatttctaagatattgattataggagaggatgagctcgctaacatgtcacgatagcgagtgaggtgcacgcgccgcttagatacagcggaaactgacgatgctctggcgctttacactgtagatc

SEQ ID NO: 33876 - DNA, 371 bp, Gossypium hirsutum
  Clone ID: LIB3145-028-Q1-K1-A5
cccacgcgtacgctcggtggtgcatgccctgcaggtaattcatctgacttcatgaggctagaacttggtgatatggccattcctgccatgcttctagcattagacctctgttttgatcacctaaagactagggaaacggtaagtcttgtaaatttacattcatcgaatgggcacaaactcatattagttgcccttcctggctatgcttctggattaataactagccttgctgtcggcattttgactcactcggactaaccagctctcttttatctagtacctccaacatctgggacctgtgattttcatctcgtggataaggaaggatctagatgtattatgggaaagaacaatgccaaatctcatcgaca

SEQ ID NO: 33877 - DNA, 430 bp, Gossypium hirsutum
  Clone ID: LIB3145-028-Q1-K1-A9
ggatgttcctggaggatcaacatacagggaaagcagctttactgaaccagggaaggatattgctgcagtagacagtcctattggacgtttgggattgacgatctgctatgatttgagattcccagaaatttaccagcagttgcggttcaatcatgatgcacaggtcatattggtaccttcagcttttaccccggttactggtcaggcacattgggagattcttcttcgtgctcgcgcaattgagactcagtgttacgtcattgcttccgctcaagctggaaagcacaacgagaaaagagaaagctacggtgacacactaataattgatccatggggcacagtagttggccgattaccagatcgattatcaactggtatcaccgtagctgatatcgatttgtcattgatagattcagtgaggaaaaagatg

SEQ ID NO: 33878 - DNA, 444 bp, Gossypium hirsutum
  unsure (1)..(444): unsure at all n locations
  Clone ID: LIB3145-028-Q1-K1-B10
cgataataattaagaatcatagaatatctttagagcatatagtttctttccttcctcctcaggcaccagtgctttttccaatcctcttctcctccaccagccgntgaagctagcatccaagaggtaatattattagcatggtagaagataagaggagccgaaagatcgtagataatgaggtattagtgtagccgaaaccccgaatgccagtagatagctgcattagcaaatagaaccctatgattagggcatagcgagtcaagaggcatcgattagtagtccagattcaacccaggtggatatttgcggtgatcccagccactgtgagagtttcgtgcacatatttgccatagaattcttactatccggaaggaaaagtgagcattgataagtgcttagtgaattttaagtggcacctgctcaaaatcatcccatagtcgatcc

SEQ ID NO: 33879 - DNA, 289 bp, Gossypium hirsutum
  Clone ID: LIB3145-028-Q1-K1-B2
gcactggcctggttcgtgacttagcgaactcggaaatatccttttatgtgctgtcctccttacatttatcaagtttatataatctgtctatatttacttgggttatttagatcattgaacaatatgttggccctatctatcaacagtatctttcctatgtgaatgctaattgcttgagaagatttttaaccatttgcttatttagtttgactcctttgttagaaacacccgggatatgtttaatcttgtaaactaagacctgttctttattcaagccgtctggcctttc

SEQ ID NO: 33880 - DNA, 181 bp, Gossypium hirsutum
  Clone ID: LIB3145-028-Q1-K1-C1
ctaaatatataccgggtgcctgctgtatacaggatgcaagctcacacacacacgcctgctgggttctcaccgccttataacgtcgcctatgagtgaggatattcagccgcgtgttaccacactgggacctggaatgccgtgggccggcccagccgaatacgatggtccgacagccccgttt

SEQ ID NO: 33881 - DNA, 381 bp, Gossypium hirsutum
  Clone ID: LIB3145-028-Q1-K1-C11
tcggcctctcttaccatctttggcaccgactcttgtgcagctgctattgaagctgccaggaagttccacaggttgatacatcctgttattcatcctgctgatacacagtctgtcaccttttctattagctttcctggtaggtcgcatggtgcgactactggagcccttgatgagccctgccatgcacccttccagcctgcattgcccccagttactccctgggtttctggcttcatacatggtagcatacatgctattatgaatgggatgatggctgggatgtttgctgatccatttgaagaaccaggtcaagattacagtgcaacatacaatgcttcagaagatcttgtgtcagctttgcattatgcttgataccattct

SEQ ID NO: 33882 - DNA, 377 bp, Gossypium hirsutum
  Clone ID: LIB3145-028-Q1-K1-C12
aaaaacatgaatcccacaaggcttagcacagctttaacttgcacatattcgtatattcgacggagaaatatggcgactgaaaagagaattggggcggctctacattcctcatctaattgccagagtagcaggaaaacgggctatggaaaacgttatccgcaaagagaatcatcttatccttattaccattcatcccgaaaggaattattagaaaggcgagacgcatctctgggaaagcatcggtccacgcttaaagcctcatgaaaaaggatcgaggtgatccacatgaaaagaaatttgaggctatagatagtatccttcttagctgcataatggtaggaaataagaggctcctctagcttaaaaagtcaaacatc

SEQ ID NO: 33883 - DNA, 415 bp, Gossypium hirsutum
  Clone ID: LIB3145-028-Q1-K1-C7
ccgaaacgatgtctggacccatctgctttatcttgtcaaacttatagcgaacttgctccgaaatgccattctccagccctgaggcagatctaaaaaatttttggtcaaaagtcacatcaaagtggatagttacacgcgtcctttgttcatcctgattgcggagtctgccttcttcacagatacgtagtttttcctctaacccttgcagctttaaattataacttgttatctgtcttgaaatatctctgctatttgtgattttattttcataaagtaattggtttctatttgaccagatgagccaaagcccgcaacaaaataagcaacactgctcatttattccttgattaaagacccaagcactgtcgaaaaacgtggatactgtcttattctgtttgtctacatctgggacacc

SEQ ID NO: 33884 - DNA, 142 bp, Gossypium hirsutum
  Clone ID: LIB3145-028-Q1-K1-D1
cccacgcgtacgggtatcaagtgaggttatctttcgctgtccagtcaaagatacccaagttttagtactggatgcggtctcgctggaagtaacctgctatatcgacggctggttcaatttatacgggtcttgacggagataa

SEQ ID NO: 33885 - DNA, 439 bp, Gossypium hirsutum
  Clone ID: LIB3145-028-Q1-K1-D4
ggcttccaatgattgtggggatggatggtagatcctcctcacccttgacaatggagtagagatatccaaacgcaggtctggctctcttcacattttccgtagtcgctgcctgctcagatctgtctcaccccagcaattcatcaccgttgccaatgctatagatggtgccaagcaatgggaccctgacctggtagaagccagatatataaaagacgttgaagataacttgagcattattcgtctcaagtttggagaaaactccaaagctttgttcagaaaaagagaattcataagttacgagcgacgtgaaaacatggaggatggcactgtggttgtagcagtggcgtcactgccaaaggaaatagcagctggattgcttccaaagccaaataatgcaattagagggttattggtgcagtcagggtgggttgtggagaac

SEQ ID NO: 33886 - DNA, 301 bp, Gossypium hirsutum
  Clone ID: LIB3145-028-Q1-K1-D6
catgaattaattattaatgttttatcttacctggagtgtttcattattagctcgaaaaaaaaaaaaaaaaaaagaaaaaaaataaaaaaaaaaagaaaaaaaaaaaagaaaaaataaagaaggtacttgaccgaggagagaagattgaggtgcttgcggatgaaactgaaaaccttcgtgcacaggtaactcttataaaaaactgaatttaataggttgaatatatgggaaaaagggggcttaccaaaatagaaaaaatttttgcattgttcaaaaagagaaaattaatctctatgtggaa

SEQ ID NO: 33887 - DNA, 296 bp, Gossypium hirsutum
  Clone ID: LIB3145-028-Q1-K1-D7
ccaatgcaacagggtggaatgatctccattgaagccacaatgacacccttcactctcatagtgagtttccctgctggtgcaagcaaaggaaaagccaaaggaagcctctatctcgacaatgacgaactcccagaaatgaaacttggaaacgggtattcaacttatgtggagttatatgcaaccctgcaccacggaatcgtgaacgttcggtctgaagtttatgaaagcaagtttgcttttaacgaaggctcgatcattgaaaaaggtacttgggtgggggtttgacgaaggaaaaa

SEQ ID NO: 33888 - DNA, 279 bp, Gossypium hirsutum
  Clone ID: LIB3145-028-Q1-K1-E1
accacgcacacgatgaagaatcttttactttcacaccaggtacatgatgaatggctgatgagtgccctaattctgggcctgctgtgggcgatccaatagcgcccactttacagtaccggtgaacaagcctacccaaaccgtaaatcaaggaggagaaaacactcagagagatgccaacataggtactgccgggatcataacctgctgtgctcttctgtacaccagtgaccatgttattgaaagcacagacacggatgcttctctttcgcaaagcatgtt

SEQ ID NO: 33889 - DNA, 229 bp, Gossypium hirsutum
  Clone ID: LIB3145-028-Q1-K1-E12
tgcttgatgtggcttctcttacgcggtctcttgagacggcccggggggtcaggacggatgcctttggcgtgcctgccttcccttctgtgtgccatatcaatgcattcatcaatctctcgctacagtcttctactgttgactttaagtatctgtttggtgattagattacttcaactgattgtatgtaagcttgggtaatccttgtgggattgaagattttttggatcac

SEQ ID NO: 33890 - DNA, 353 bp, Gossypium hirsutum
  Clone ID: LIB3145-028-Q1-K1-E5
cccagttcagttttctctttccttttccctttgcctttgcaggggcaggggtcagattaatttcctgttcagatttcaattcatattttttgtttcttggtttctgttcaaagctagttttgggagccaatactgtgatattaccgcgactgacttcatggttacatgaaatgaaataatcccttcatgatgattaccacttcactttttactttccccctccttcacacctctaccttacttattatttccctttgctttcttcttctttctcccggctcttcccttcggcacctgcaatcttcaacctccccttatccgggactcttttttgttgagaaaatcaagcttgg

SEQ ID NO: 33891 - DNA, 145 bp, Gossypium hirsutum
  Clone ID: LIB3145-028-Q1-K1-E6
cccaggcaacatttctcttgtcttttacatttgccttggctggatccggtgtctgagaaatttactgtctccgattgccattcatatttcttgtctctagggaccggttcagagctagttggggacgcctatgctgcaatgttac

SEQ ID NO: 33892 - DNA, 272 bp, Gossypium hirsutum
  Clone ID: LIB3145-028-Q1-K1-E8
cggacgcgtgggcggacgcgtgggcaagtatcaaaacataataatctcactgatttggagattaacactgctaggcctgttgaaacttctcagggtgttgatgaaactgttggagagccatcttctagaagtcaaggtatattaccggctggtgaagggggcaatgctgatcaacaagaagctcctcgtgagttggagaaagtgactgaatcagatggcaatgtttcatctgataccaacttgaaaagtgatcagtccaatcatgaaatgca

SEQ ID NO: 33893 - DNA, 327 bp, Gossypium hirsutum
  Clone ID: LIB3145-028-Q1-K1-F10
gagagagtggggggtaatcgaactatactgaggggcaatgatacatgtttttcggaggcaaatagcttttaacctttgatatagtgatcagacggttgtcaatgaatcagagttttaaaaaaaaaataaaaaataaaaaaaaaaaaagaaaaaaaaaaaaaaaaaaataaaaaaaaaaaaaaaaaaataaaagaaataataaaaaaaaaaaaagaaatggaaagaattacacataaaaagatagataaaactaaagggggggcctttatagaatatcaattttaaccatcccgatggctaacatttataacatttttaaggtgtccc

SEQ ID NO: 33894 - DNA, 429 bp, Gossypium hirsutum
  Clone ID: LIB3145-028-Q1-K1-F11
cgagcttgtcacctgagtggggggctcgttgtggagattaacatctgacatcttaaatttctatcaagagtgaaagtattcattctagagtgccttgggcggcacgaaaagtgttatttggtgttacacgaaacgaggatgttgggtttggtgtggtatgctatctggtttgaagtgccttgggtgagactgtggttgaaaatggctatgttggaagtttgaacagctttcagtagttggtggcatttccttttacagggaatcctgcaactttgtctcaaaaattatgatgacagagcaagaagatgcatgcatgcctatagtctgctttagatgcatgcgtgtttggattgcctcctcatcgcctaaatttgatgaattgtaattacttttaatgaactactttgttctatctttttaactgacttg

SEQ ID NO: 33895 - DNA, 337 bp, Gossypium hirsutum
  Clone ID: LIB3145-028-Q1-K1-F12
tcactataacaataaatatgcctttgttttgcctttcaaaaaaaaaaaaaaaaaaggggaaaaaaaaaaaaaaaaaaaaaaaaaaaaaaaaaaaaaaaaaaaaaaaagggaaaaaaaaaaaaaaaaaaaaaaaaaaaaaaaaaaaaaaaaaataaaataaaaaaaaaaaaaaaaaaaaaaaaaaaaaaaaaaaaaaaaaaaaaaaaatgtggggggcccctttaaaagaatcaaagtttatacccccgggggggaaaagttatactttttttttgggcccccctaaataaatttactgggccgctgtttaacaacgttgggtggggaaaaacccggg

SEQ ID NO: 33896 - DNA, 440 bp, Gossypium hirsutum
  Clone ID: LIB3145-028-Q1-K1-F2
cccacgcgtccgctttcgaggacaactaatgatcttgctgatattcgaggttcggtggaatcactaaacaagaaattagagaaggaaaggaattctctcgaaaagactcgagacaggctaagtcagaattctttgaagatatcgtcgctcgaagaagagttaactcaaacaagactgaaactgcaagtagcaaaagaggctgaaatcaaaactggggttgataatcctttggatatatcaagggaacttcaaagactaagttccgaagctgaacaattcaagaaaataggacaagcagcgaaatcggaggtttcaagagcagtatccgagattgaacagactaaaacgagaataaaaacgactgagatgaggatacttgctgctaagaaaatgaaggaagctgcccgagctgctgaatctttggctcttgctgagataaa

SEQ ID NO: 33897 - DNA, 294 bp, Gossypium hirsutum
  Clone ID: LIB3145-028-Q1-K1-F3
tccaagtgtccttctagctgattggatttggaggacttggttatttattataacaagcaatgggttatattttggattatacgcttacacttaaccccataatccaatgtcatattcgcttcttcttttttgtagcaaatcgaaaaaggatgctccatttcctactattgaacagtttgatgagccgaatcataagccctaagataagaacaaagaagaatgtgtttgaaagttgtaagaagggggcaggtgaatctgcattgaaatcctcaacaattcctctaattagaacct

SEQ ID NO: 33898 - DNA, 389 bp, Gossypium hirsutum
  Clone ID: LIB3145-028-Q1-K1-F4
ctacctcaacgctggtgctcagtttagctgggcacaaacgcttgttcaagagaggtggcccagggaattacatggctctaggaaatgctgcatgggttgtaaatccttatgatctaagtgtggaaacaggtattgatgactgtgatgcaacgcgcatggcaaatggtgaggtggcattatcagattcagagccaaactcgaagccttggattgatcctggagccttccctctaacggtgcggatgctttcaacaattcctgtggcactgtatgcaattggtggtggtgatggacccctcgagatttgggtacgattatacatgagttcatatttgaagtaactcgtgttttgaagaaggggcaatggagtatggaccgacctggggggg

SEQ ID NO: 33899 - DNA, 229 bp, Gossypium hirsutum
  Clone ID: LIB3145-028-Q1-K1-F5
cagagctagaatgttttcaagcattacattagcaggagcacttagcagcatcacacagaataaatggtctctgggaggaagtccagaaacagaaggagcttgaacaaaccttacaaagacgctacgggaatctcatgtctgagttggaaaggatgcaaagacttatgaatgtatatagagcacaagcagaaaagcaagaagaggtaggtgaaaaagaatcatgctcttg

SEQ ID NO: 33900 - DNA, 299 bp, Gossypium hirsutum
  unsure (1)..(299): unsure at all n locations
  Clone ID: LIB3145-028-Q1-K1-F7
ggctaacaagatcttagaggatgatcatgtttaagccattaaagaggaaaataacaaagttggtgacctttaagaagagctagacatttatggacgggttcatggatagcctagcagaaatggcattgttgagtactgtggtgagcgcttatctcgtnttgctttcactgataacggattggagcactattatgggtctcgatctgtcaagacaccaatcatatactgagatcagagcctccccaaatcaaaaactgttttctggtcctctacttgccaaagcattacttatcccccaa

SEQ ID NO: 33901 - DNA, 413 bp, Gossypium hirsutum
  Clone ID: LIB3145-028-Q1-K1-F9
catgatataaccaccaaagacagcaaacagtttaatgttaatgttttgggatgcaaaaacattactttcgagcatttcaccgtcactaaccccgagcatagcttaaacaccgatggaattcacatcgggcgatcagatggagtcactattctgcactcggagataaaaacgggggacgattgtgtttctttgggtgatggttctaagaatgtggtcgtcaatggaattagctgcggtcctggtcatggtattagtatcggcagtctcggaaagttccaaggtgaagaaccggttgccggaattaaaatcgcgaactgcaccatcactaatactatgaatggtgttagaatcaaaagttggccagcctcttatcccggcacagcatcggatatgcattttgaagatataacgat

SEQ ID NO: 33902 - DNA, 287 bp, Gossypium hirsutum
  Clone ID: LIB3145-028-Q1-K1-G1
ggctaccacgatcttggacgatgatcatgtttaagccattaaagaggaaaataagaacgttggtgaccttataagaagagctagacatttatggacgggttcatggatagcctagcagaaatgatatggttgagtactgtcgtgagcgctgatctcgatttgcttcacactgataacggactggatgcaatattatggttctcgatctgtcaagacaccaatcatatactgagatcatagcctcaccaaatcaatgactgtaatctggtcatctacttgccaaagca

SEQ ID NO: 33903 - DNA, 381 bp, Gossypium hirsutum
  Clone ID: LIB3145-028-Q1-K1-G10
aaaatattcgggagacccacgcgtccggcttcatcttttttagttgatcttctctctcttcttctgaaattgaaaaacttcagaaatgccttgctaacagatccgctccaatgctgtccaatttgcttggaagcaaggttgacagaatcccatgaaaaggaaattgaagggttatatttcctagtgaggatctgttttgggctatcggtggagagaagctttgtggtcattgtttcatggaagatcaagttggttcatgttccagagaaagttatattatttaacgagcctttcactgttggaatctccattcttcgctcattgtttgtgcttcctttttacttttattcttcagctcttttaatcatttttcaattgaaa

SEQ ID NO: 33904 - DNA, 201 bp, Gossypium hirsutum
  Clone ID: LIB3145-028-Q1-K1-G11
tctcctccactgctacttgatcttcttctgcctatgccctgcctgaagaggctgtgttctgccctgccatcatcacttctgcttcctctcaactttttttatgttcagagcaaatgcgattagaattggaaaagatcatcaagacagaatagagagtgaaagagtaaagtgtcgtgcatccgggagtgggattggaagatg

SEQ ID NO: 33905 - DNA, 350 bp, Gossypium hirsutum
  Clone ID: LIB3145-028-Q1-K1-G6
cccctctatgcttcgatttcgacgcagcaaaagggaatccacagcatttggtaaggtgtacctttaaattttattttcaaatgctttaaaaagggaaatagaatcaaaagaaaagtatggaaccgggaaaagatgaatctaaaatcaccttttttaagaactgactttggattgctctctatttttacaatatgcgtgtgtgcgtttgcctagtatgcgttcgtaggttctttttttttattacaatgaacatagggcttttatatagctgaaaataaaagaaaaatacaaagaatttttttcttggtttttctctttgctgctgttttgctgtgcttgtttttgtcttc

SEQ ID NO: 33906 - DNA, 186 bp, Gossypium hirsutum
  Clone ID: LIB3145-028-Q1-K1-G7
acaggatatgcttggatttctgcgcttctttttggcagccacaacataagggggggagtgcctttcaagttaagaaaccaacgctactgaatgcgagagtttcttgatcgaaaagtccctgctcatgctaacccgaatgttggggcactctttttaagagctgtcactgatcagcgctctagccta

SEQ ID NO: 33907 - DNA, 284 bp, Gossypium hirsutum
  Clone ID: LIB3145-028-Q1-K1-G8
cccacgcgtccgcccacgcgtccggaagttttagttttataagctctgtgtgaccttttttgaacatctgaaatgtgattaattaccatgaagatattgatgattcacagaaaaaaactcaaaacagatatagagattatctaaagccatcagcgatcatgaccttaataaatacagaagcagcactgaaagatcatgaaggtcttcaacaaagggctgaaaaacaacaaaagagatcggggggctgaaggctaaaggttgaaaatgttgcacccttatatgac

SEQ ID NO: 33908 - DNA, 225 bp, Gossypium hirsutum
  Clone ID: LIB3145-028-Q1-K1-H3
gagaaatgaggcttgtttttggatcaatatattcaagtggctctgttgcatatgcaccacaggttccatggatcttatctggaacaatacgtggcaatatattgtttggaaagaatctagattcccaaaggtacgcagatgttttagaggcatgtgctctacatgttgatatttcattgatggctggacatgacttggcttatattggagagaaaggaactaatt

SEQ ID NO: 33909 - DNA, 338 bp, Gossypium hirsutum
  Clone ID: LIB3145-028-Q1-K1-H4
ctcaagtgtgagtgacggatacgagtatgtatccgacatggatatgttcagttttatctaaattatatttggaggatcccttcaagttcataactgggaacctggggcggcttttggtgataactgccttatttttggtcgctctaactcacctcatgacatagtgttctccatcacgaagggtctcacgaaggcgagaccggtaaagtttacagggcaatatttcatgatcatcattgaaggaccgtacttataatgaggcctggaatgcatgttttgaactcatgtatcctttccctctgtgcgtaaccaaacttaaatgaatttgcttttttaac

SEQ ID NO: 33910 - DNA, 191 bp, Gossypium hirsutum
  Clone ID: LIB3145-029-Q1-K1-A1
ggttgattcgacaaaactgaggctggaaatgttagctcccaattgccagaattgggaacgggtgagctctatgtggtagtgatacaggtggtgatacctagatctgttgtattgctttgggatgtatagctcccaaggactttgtgtttagagttggccatatgagatgatggaaatggaaggccttgcta

SEQ ID NO: 33911 - DNA, 376 bp, Gossypium hirsutum
  unsure (1)..(376): unsure at all n locations
  Clone ID: LIB3145-029-Q1-K1-A10
tgaaatattcaatgtgatattgtattgtactgatgaatttcaattgtttcaattccgtagctaatgttgtgccggaaacttcggctaagaaggaaatagaaaaagtcaacgaagagtagctcgaaaattacgattaggtgttaaatttgaacgtcaattcaacatccacaacaatctcgatcttataacgtggtgatgtttatttctttttggtagtggcatgtatctaaaatgttttaattgtcattttgaaaagtgaatgtatataatattataagatgatattggttactcatggtaaatgataatgtatggtatttgaaggctaaactatggcatccttaagtaggtnaaaaaaaaaaaaaaaaactttaaa

SEQ ID NO: 33912 - DNA, 285 bp, Gossypium hirsutum
  Clone ID: LIB3145-029-Q1-K1-A2
agcctcttctccatctatctgtctctctcttttcctctgttctttcacaaatccgactttttcttttgtctgattccaatcttctaaaaccttcaacttcccatggatttaagctttcattctctctagttggggcatttttctttttctcttgtcaacttagtattgttttggagcttgggttttgcagttcttaaaacagagctattcctttttggttgcttcttcttcaagatcttatctaactctgcttataaactaaagctgaagtgttttttttttcat

SEQ ID NO: 33913 - DNA, 346 bp, Gossypium hirsutum
  unsure (1)..(346): unsure at all n locations
  Clone ID: LIB3145-029-Q1-K1-A3
aacacgcgtacgcccacgtatcctttacatttcacccatctgatgatgaagttgttgccgcatgttcatgccaagaggattgcattgaagttacagatgcttctatgagagcgcaatttctcatatccctctccctggcaaggccgaatggtcttggtactatgtgctgatgcaaatcaagggatgcactttgattgccagcctttgttatgggtcagacaagagaacacgcctctatcttccctatggatgttagaaattcaaggtgcacaatgtccacgagctacagctattcatgatgcacaacacgacatactgngctgagatagcacatgatgtttcaacg

SEQ ID NO: 33914 - DNA, 408 bp, Gossypium hirsutum
  Clone ID: LIB3145-029-Q1-K1-B11
cccacgcgtccgaaagagaaaaattcctttgagtgttcttgcctttctcatggcttgttaacactcgaattccacaaataaggtaatcacttgctgaaatgagagcagttaagaggatgacttgaatatgtttagatgattttaacataaagacaaggaggaaagccaccatgagaagccgcaaggagcagacgcagatagccccttgcattcaactgtttacttttcatattgtgaaatggtcatggatagcccccctcgctactctttctacccttatctttattgttaaatttttttaatgtcaaaagacaagattgcatctcatctttatattttcagtttaatatgacatgactaattttgtttattaaaaatggatttgaatcttggcttgagttaatgggt

SEQ ID NO: 33915 - DNA, 281 bp, Gossypium hirsutum
  Clone ID: LIB3145-029-Q1-K1-B2
gcaactcctgttactacaaggatgggggcattgatcatcctcataagttaacgaatcatgcatccttggctgaacgtgatgcacaaaataaagaggcaaggcaactaccggttgtgcagctgatgaaaatcttgaccttttggttcagcatcacaatgtcgttctgcacatagccaatacccaaattgtcggaaagtgaaggggctcttccgtcatggaatacaatgcacaaaacgagctcctggtggtagtgtactttgcaagaaaatgtggtatctact

SEQ ID NO: 33916 - DNA, 123 bp, Gossypium hirsutum
  Clone ID: LIB3145-029-Q1-K1-B6
cccacgcgtacggttgtaatacgtgaacgaactagtgtagatactacctatggggcatcggctacaaagaagccagaatttcttgatctaggtgttgaaaaatttgtccttcatggtggggga

SEQ ID NO: 33917 - DNA, 421 bp, Gossypium hirsutum
  Clone ID: LIB3145-029-Q1-K1-B7
ctgccacaatttgttgtggcaaattaagcttttctcaacgcttaataaatttgtattcaagtaatttaatatctttttagttagtttatctttaaattcaataaaaatagacattttcgtgtgccttataacctgtagaccaatatgggctaaggaacgattaatgtgttcgttgagtgttcaaacgatgttttgggctaacgagttagtagactgccctagatgtcaaaaaatttaaggaggatgtcgcgacaaccaacttcgaacttcaaagggagcattctgcaacgatatcgtgacaacaaccctataatatcgcgagattcaacttcaaattaacttagagggggaatatctagctttcaatgtcgtgacaacaactgacttcaaaccaaaaagggagggatattcaatgtttcat

SEQ ID NO: 33918 - DNA, 132 bp, Gossypium hirsutum
  Clone ID: LIB3145-029-Q1-K1-C1
ctaaatatagaccgggagcggccgttatacaggatccaagagcccttaaacacgcctgctacgtcctaacggttgtatagggtggccgaaggtgaggatattcaccgacttgttacaaccaagggaccggga

SEQ ID NO: 33919 - DNA, 159 bp, Gossypium hirsutum
  Clone ID: LIB3145-029-Q1-K1-C12
cccacgcgttcgtccactcgttcattcactcgtccgatagagcaattaacgaatcttgctactggctggtgcgtgtgatgcacaaaaagaagaatcaaagggctggatgaatatcatacggaaaatgctcgtccttgggcttgtatgatgaggacaacc

SEQ ID NO: 33920 - DNA, 356 bp, Gossypium hirsutum
  unsure (1)..(356): unsure at all n locations
  Clone ID: LIB3145-029-Q1-K1-C6
acgacgaaaacggatttggatcgggaaaaatgaaagtagttgaatagtcgatcgtgtccgttgatatccgaggtaagtttattagctatttaattttattaaatcagtttatattacatgtatgaatatcaatgtatttatgttgattaaaattaaaagtatataaatcgaatgagaagtatgaaaattatgtatatatatgtgttaggttcgaatgagtatgatatacaatatatatacctcatgttttgtaataattangtatggactatggcatgtgatgtatcgacatagttgtttatgtcataagtttattagtatgtaatgttattgttactgatgtcgatgattattta

SEQ ID NO: 33921 - DNA, 171 bp, Gossypium hirsutum
  Clone ID: LIB3145-029-Q1-K1-C7
gaccggaatggaatggtcgacccgacccacccgtccggtgagcctattcacatgataaggaacgtgttcaattcgcaatcccgagaaccctttcatcagggttggtcacaagacatgtctgtgcacaacgagcttattgacgtgggtggtataatagcagcatgctaatgg

SEQ ID NO: 33922 - DNA, 243 bp, Gossypium hirsutum
  Clone ID: LIB3145-029-Q1-K1-C9
tgctgaacgaattataagtcgactccaatctgaacttgccacatcaatggctgtagctgcggctgccgagttgccttgcacggtgaagcttaaagtgtggtcgtatgatataaaaaatccttgtgcactactaaatgttggcaaatgccgcttaaccataccacatgctgtcctttgtagtgaaatgggtgcacatttttcaccttgtgggaaatttttagctgcttgtgttgcttgtgtgct

SEQ ID NO: 33923 - DNA, 120 bp, Gossypium hirsutum
  Clone ID: LIB3145-029-Q1-K1-D1
cccacgcgtacgggtatcaagtgaggttatcatgcgctgacgagtcaaagatatccaagttttagtagtggatggggtcacgctgaaagtaatatgctatatcgacggctggatcaattt

SEQ ID NO: 33924 - DNA, 219 bp, Gossypium hirsutum
  Clone ID: LIB3145-029-Q1-K1-D11
ggagataatacgtatcgctgtgtcttcatcaactaaattatgtatcagctcattattcaaagcaggtgtctcaacttcaatcaatacaaaaaaaaatacaaaaatacattcataaacaaacaactctctcaagttttaagaagaaaaggtaacctcgcttccaagggttttaaagaagggcaaaaaaaaaattcctgtatgcaaacccatttttttttt

SEQ ID NO: 33925 - DNA, 304 bp, Gossypium hirsutum
  Clone ID: LIB3145-029-Q1-K1-D4
tccacgcgtccgtgatgatcatgccttttggtcttgggcttactgagttcctgtatttataatctctcttgtttaagtctgttctgtagtagcaattataagtaagcaataaaaacccaatgaatggcattgaatgcaaatgtgttggtgtggtttgtggttcgaaatggttgttttttgtccccttgtgtaatcttagtttgctttggggggattcttacttcttagagttggataagcttcaattccccaggaatgtaattaaataacaacttttctgataaggttcttagaaatgttacac

SEQ ID NO: 33926 - DNA, 112 bp, Gossypium hirsutum
  Clone ID: LIB3145-029-Q1-K1-E1
atcaggcgtccgatgaagaacaaaaaactttaacaccaggcacatgataactagctccggagagcttgcgctccaggcctggtagaggcaatccaaaacacgcccacctcaa

SEQ ID NO: 33927 - DNA, 235 bp, Gossypium hirsutum
  Clone ID: LIB3145-029-Q1-K1-E11
tagaaatccaaaagcttccagaaggaaaggaaaaagacggtcttcagtggttgtttgtgaagaaaagcagctagagaattatggtgattggcaaggccccccaccatgggatatttccttggggggtgatggatgccctaagtttttgtgtgacgtgatggttgaaggcttggcaaaacatcttcgttgtgttggtgtagatgctgcagttccacattccagaaaaccagaaccc

SEQ ID NO: 33928 - DNA, 177 bp, Gossypium hirsutum
  Clone ID: LIB3145-029-Q1-K1-E12
tccaactgtagctcaacacccaacgactttactcagccagcctcttattttaccaaaagaacaggtgtagtggctcaaagcttacaacacatatcccatgttcgtgtgcatattaatggatatcttgcccgaatgatcgaccatccagaatccacggctttgcttgtgcgctcatta

SEQ ID NO: 33929 - DNA, 420 bp, Gossypium hirsutum
  unsure (1)..(420): unsure at all n locations
  Clone ID: LIB3145-029-Q1-K1-E2
ttcctagatcatggcacagctcctgcactctcgatgggctaaacctgttggttcttgggggtgggccgattcaagagtactgcttagtgatactttcctgcttgatctttcaatggaaaaacctgtgtggagaagatacctgtagcatggccccaccttcacgcttgggtcacacactgtcagtatatggtggtaggaaaatattgatgtttgggggtcttgctaagagtggtccactccggttccgttccagtgatgtattcacaatggatttaagtgaagaggaaccatgttggagatgtgtaactgggagtggaatgcctggtgctggaaatccaggtggcatagctccccctccaagacttgatcatgtngccgtgagccttcctggtggaagaatcctcatctttggtgggtctg

SEQ ID NO: 33930 - DNA, 288 bp, Gossypium hirsutum
  Clone ID: LIB3145-029-Q1-K1-E4
tccacacatccggtcaaaaatacaaacctttaatatagcactgactcaatagaagaacggggatgaccgctatgacaagtctatctgaaggaggtaacaaaacggcaataacattcaatgaactaaactgggatgtctgaatacattttggctggcacaccctgactcagtgtgtacataatgttatactgatggatgaggaaaaaaaagatgtcttgcagaattgttcaatattgacaattttcatttctgacgttcatatatatgctaacatagttgatcatatat

SEQ ID NO: 33931 - DNA, 384 bp, Gossypium hirsutum
  Clone ID: LIB3145-029-Q1-K1-E6
gaaagaagtcacctctgccatttgattgcttttttgttttctctatgcgtatatttcgtttgtccaaaatacaatgatttttttgaggcctttatagctgaaaagaaagaaaataaaaatacaattttcattctttctatttgctgctcgctgtcgtttttttgtttgtgtttgctgctgtggtttgtccatttcttcgcaggtacaggtgcgttggagctcgggtacggggctgtactggagcgggcgtggctgctggacggtacgaatcgtacggcgttagaggcttggctgcggcgcaagggagataaccctagggttttagggttttaaatttctaggcctatcgggcttgtattttgggtcttgggttaattttgggat

SEQ ID NO: 33932 - DNA, 115 bp, Gossypium hirsutum
  Clone ID: LIB3145-029-Q1-K1-E7
gtgtgcagttaggactaagaggtggtagtttaaccgcgattgctaaccgaattgggagattgtacaaacctcagagtggattgggatgcctaaatggccgtcctgtagtagaaaa

SEQ ID NO: 33933 - DNA, 235 bp, Gossypium hirsutum
  Clone ID: LIB3145-029-Q1-K1-F12
cgtatgcggggctgcagtcaatcggtgcatgtgattatagcactaattcagtgctttagacatgtgtgctttgacagcgataagcagaatgagcgcgatatgtatacaagccagagctacaaagctctatcaaggaagtgtagagaggtccggttcgggctaaatattgcgcaagagattcttgcatcctcggttgaaagaccaagttctcattaaatactcttacatgaaccca

SEQ ID NO: 33934 - DNA, 304 bp, Gossypium hirsutum
  Clone ID: LIB3145-029-Q1-K1-F7
cccacgcgtccgcccacgcgtccgcccacgcgtccggaattatctgggttacgatgaaagtaatttggatgctgatgttttaaaacaacttgctgaggtagttgataaagcagagatgacaccagctgatatagtgaagttttgatcagaaccggcgttgtaagccaaaagctgtcagtgaattgctagaagccttgaagacaagagcaaacaggaacttgttgcaaaatgggattctgagggagaaaaattcagaagatattatggaagatgaagaacaagagaaagggctttagaagagtct

SEQ ID NO: 33935 - DNA, 194 bp, Gossypium hirsutum
  Clone ID: LIB3145-029-Q1-K1-G1
ggctaacaagagcttagaggatgattatgtttaagccattgaggaggaaattgagaacgtgtggggcctttaagaagagcgttgcatttatggacgtggttcatggatagcctgccagaaatgacaatcgttggtatttggtgagcgctgatcgggtttgctttcactgataacagatgggtgcgatattatgg

SEQ ID NO: 33936 - DNA, 364 bp, Gossypium hirsutum
  Clone ID: LIB3145-029-Q1-K1-G10
accactcttccggatttatggatcataaaactgttaaaaaactaagcataatatattctctaagggtgtcgtaactaaatgcaaggtcacttattgtcttattttatatatagcttgcttctcctatataaatatacactcttttgatatttaatttatgtttgttttttattattttacttgttctttttaattgttttctaatttttatttttatgtttattttatgttaattttcttttcttattatttttttttttatttttaattcttttataatttctttatactttctttttttgtaatattttattttattttagtatatttatttcttttttttttcttgtctatatcttttttt

SEQ ID NO: 33937 - DNA, 258 bp, Gossypium hirsutum
  Clone ID: LIB3145-029-Q1-K1-G8
acgcttagctgctggtacacaacaaatatctatggtggagccacacgggaaaatggtcgaaggagaggttattggtgattaaataacaaccgtgactagacctgatgaagcccagcgagcacgagctgggcgatgagtacttgtaactaaaggttctatggaggttattaagactgagaaacatgggttcatgaaatgctggtcaaggatacacatttgacgaggctaagggtctttcccttatacttatagatctct

SEQ ID NO: 33938 - DNA, 135 bp, Gossypium hirsutum
  Clone ID: LIB3145-029-Q1-K1-H10
gaaaaagaaaagttagttatctttgtgaatatccaagaaaattaagggaaatacaaaaacatatggtgtaatggtaatgcatatgcatcatacatagaattataaggagctaatggaaagttgtttctgggttac

SEQ ID NO: 33939 - DNA, 247 bp, Gossypium hirsutum
  Clone ID: LIB3145-029-Q1-K1-H11
ctatgcccaagagctggtctctgtcggggacaaaacggtatcactgggttacatcattcgtctaactggcgttacccgcgttgggaagggcatggatgctcaagaatggcatgctgcctgtgtcaaatacatacttgtacaatctgatgcagcaactgttgtggaagccatgtcattgtttacggaagatgttgatgctgtggtgcgaacgacttgccactgagatgctactttgatcagctctatt

SEQ ID NO: 33940 - DNA, 402 bp, Gossypium hirsutum
  Clone ID: LIB3145-029-Q1-K1-H2
gaaatactgatgcaaatccacaaaaaaatcagcctggggctcctgggaaaatggaggaggtcaattctattgctgctaagccaacaaccatgactagacctgatgaagcccagggagcacgagctgggcaattagtactggagctaaaggtgctaggaaggtcataggacaggaaagataggttctgggaatgctggtcaaggatacacgtttgaggaggtaaaggttcttttccttattcttatggatctctgtaggcgtacctctggtctaccacacccgttaccagtttctcaggtgggaagcagcagcatccaggtgcggttgcattatattgatggaaattatacggtattgcctgaggtggtagaagcatcccttggcccacatatgcagaacatg

SEQ ID NO: 33941 - DNA, 367 bp, Gossypium hirsutum
  Clone ID: LIB3145-029-Q1-K1-H4
tggcgattctgcatctagcacatcattcttttgaaacatataatgtaaaatcatttggggcttgtatgttttggagatggatcatgtttatgcgaccccaagaaaagaaaaataggtaaggaaaagtaaagtaactctgtatgaagttgttgatgttttgtacattaacacccacatattctttctacttgtcgatagcttaaagaagaaaaaaaggaaattcctcgaggttggttgatttttgttctccgattctacttgaatcaagaccattttgaagcatatctctaagttcttatcagcttatgtcagaaattgtatttccgatacattatttgtttgcctgcacattatacaccttatgtta

SEQ ID NO: 33942 - DNA, 201 bp, Gossypium hirsutum
  Clone ID: LIB3145-029-Q1-K1-H7
gaaactgcttcttttggggttttcttaaccctttggccgccgatcagcccatgccccgatttcgtcgaaggggacaccagctcgacgactccggcgaaaggtgatcgtggcgattacagcatgcgttaggtggtcgactcctattgtgcagtgactggagttgctgtgagcgaaatcgagcaaaaaagataagggtgacag

SEQ ID NO: 33943 - DNA, 396 bp, Gossypium hirsutum
  unsure (1)..(396): unsure at all n locations
  Clone ID: LIB3145-030-Q1-K1-A4
cccacgcgtccgcccacgcgtccgcggacgcgtgggtttattttctctttatttctcttccatttcataaataaactgaatcatcatcatcatcatcatcatagttttgtagtgaaggggaaaagaatgaagcaagagatgagcaatataagcttctgcgatcgacatgtggcaaatccgtgtaaaacattcggacggcggtgcagccggctggtgaaggagcaaagggcgaggttctacattctccggcggtgtgttaccatgcttgtttgctggcatgaatgcggtgaaacttgaagaagcaaacaaaaagaaaaagaactatgntaagaagaaaagatatatagaggaaatagtagacaaaagttgatgtaatatataatatatgtgtagatg

SEQ ID NO: 33944 - DNA, 317 bp, Gossypium hirsutum
  Clone ID: LIB3145-030-Q1-K1-A6
gtctttttcaatgcatatgatcatctatctttctgatctcgatcctagagctcatttttcttgattggactttacgatttttttttggggggaccaggggggggggcggggcttggtttcttcatgtacgggagctaaattcatgggtgtgtcgaattcagagatgtttctcactgagaaagatctaaccagtagcatggaaatcagtttcttggttagacgacgccctcctttagtgttacaacaaggagatgaatgtcaaattacgactttccaagacgattatgatgagcctcagcagcaaaaagaagaaagac

SEQ ID NO: 33945 - DNA, 285 bp, Gossypium hirsutum
  Clone ID: LIB3145-030-Q1-K1-B1
ccggggcggaactcacccggtccaccgacgcgtgcgttaggaacaaacaacagcattgggctacaaaacagtaccatccaggccgcctaaaaatacattcaatccaatgatacaaacatggccaatgtgcggagaccaaaataacacaaagataggcctatcataagtgcagtctaaaaatgatacatgagcaaaccagaggaggttggataaaagccacgggccagcggagaaagatataatctaacctgagatggcggaaaaaaagcatacaaaaatggtgcc

SEQ ID NO: 33946 - DNA, 411 bp, Gossypium hirsutum
  unsure (1)..(411): unsure at all n locations
  Clone ID: LIB3145-030-Q1-K1-C1
cccacgcgtccgcccacgcgtccgcccacgcgtccggtggttatatagatgggaacatcacagtttctggtttccagaagaaacaagaaacatttgctcgaatatctggatactgtgaacaaaatgatattcactctcctcatgtcaccgtgtatgagtccttgctgtattctgcttggcttcgattatctgctgacgttaaagctgaaactagaaagatgttcatcgaggaagtcatggaactcgtggaattgaatccgttaaggcaagcactggttggtttacctggtgtaaatggtttatcaactgagcaacgaanaaggcttacgattgcagtagagcttgtagcanacccttcgatcattttcatggatgagccaacttcanggcttgatgcgagagctgcagcaa

SEQ ID NO: 33947 - DNA, 414 bp, Gossypium hirsutum
  Clone ID: LIB3145-030-Q1-K1-C10
cgattaaatagatgggaaaggagtgagttgagtgggtgtgttgctagttttaattagtgaatatcggaataagaagtgatcattataatctaactatatatattagagtttatgtttcacgaaaaatctaactataaattaaaatttacttttcacagaaaattgattggacgagacaaggaatttaaattaatgggcgagaagttaacacctttacttatggtgcctcattgtgatgaaacactaatggggtactatatcgatgattcggtcgttaatgctttttttaaattgcttaagaagagatccgacaaatatccaaatgtatacatcaaacattattcgtttgatcctcaaatagctacttgcttaataaaaggatccaaattagaaggtgaagtattagcttggttt

SEQ ID NO: 33948 - DNA, 322 bp, Gossypium hirsutum
  Clone ID: LIB3145-030-Q1-K1-C7
atccccttgccgtgccagtaaaccttgagtaagagattggagatgggtctgaacagaagccatctgcagtggttcttcaattggctctcgaaaaggaaccgagtacaacagctcaggttgggcgcagtgtgtttgaggttgaatatgtgcctctttggggatctacctctatatgcggaaggagacctgagatggaggatgcctttgctactgtgcctcggtttttaaaggttccaattcagttgttaattggtgatcgggtagttgatggccttagcaaggactttgttcatcagaccgctcatttctttggtgtctatga

SEQ ID NO: 33949 - DNA, 361 bp, Gossypium hirsutum
  Clone ID: LIB3145-030-Q1-K1-D10
accggagagatatatgattgacttgaaattccaaagtactttccttgttggtttattacatttatcagtttttatgcaaaaaaaaaaaaaaaaaaaaaaaaaaaaaaaaaaaaaaaaaaaaaaaaaaaaaaaaaaaaaaaaaaaaaaaaaaaaaaaaaaaaaaaaaaaaaaaaaaaaaaaaaaaaaaaaaaaaaaaaaaaaaaaaaaaaaaaaaaaaaaaaaaaaaaaaaagggggtgctcctttttaaaaaaaaaacatttacaaacgaggcctgataactgattgctttttttattggaccccgaatataaaataaggagcgctgattataaaaacgtggtattataaaaaaattggtg

SEQ ID NO: 33950 - DNA, 448 bp, Gossypium hirsutum
  Clone ID: LIB3145-030-Q1-K1-D12
cacgcgatgcgtttctgagagcatattggactttactctaattttctatcatcgggcccgggcaaacatcagggtcgattggcaatattcttctacaagaagaccaactctcgtccattatctgttaccgaaactgatgcctcgcctctgactatgagatatcactgtctatacacagattgagcatgtggggaacccaaaaggcagaccacacacccttgcatgtgtggatcacactcattcaaaggtactgcctaattgctggccgatcccaagctgcatactaccccctctccaatgtttagagcgattgttgtcacccatgctacatcggaggctgatatgagaatacctcccaaacataaagctctatgcaggaagctacagcccacactgcactgatctactcggaaagacaataaaaggaattgtccaggtcgaaaattaa

SEQ ID NO: 33951 - DNA, 308 bp, Gossypium hirsutum
  Clone ID: LIB3145-030-Q1-K1-D2
atctgcttgtcattatctagagacttaaatggattatgcaagacctttttatacttctgatattcttgattaatgcatctgcagttttatgtggtacttattggggtccgaatatttgactttgtagaaaaatgtaatgcactgattagatatctctgtacaggctattgtagcaatgatgcgtgctcaggaggccgatcctaccaacctggaagaatgttatgagccttgacataggatctagtcataggtctagacgtgagagaattcttgctctgacttatagttaatgaaagaagcagatttgt

SEQ ID NO: 33952 - DNA, 384 bp, Gossypium hirsutum
  unsure (1)..(384): unsure at all n locations
  Clone ID: LIB3145-030-Q1-K1-D3
gtaaaattggggatgaaggccttgctaatttaacaggcctttcactcctcaaaagtctagagttgtctgatactgaagtcggaagcagtggactgcgacacctgtctggattgactcatctggagaccttgaatctgtcattcactttagtgactgatagtggtctaaaaaagttgtctggattgactgctcttaagtcacttaatctggatgctcgccaaattacagatgctgggctgtcggctttgacaagtttgactggactggtgcatctagatctttttggggctaggatttcagacactggaacaaattatttgcgatgctttaagaacctccagtcccttgaaatatgntgaggggggtttgactgatgcntgtgtg

SEQ ID NO: 33953 - DNA, 298 bp, Gossypium hirsutum
  Clone ID: LIB3145-030-Q1-K1-D8
tgtttttagaattaaaaactgaaagaggacttaaatttttcctgaggcaaggaggtgtatcagctgcatgactgtatattccgagtggggaactagtaagctcaggggtgatctcggagttggttatattttaacataggctttttagttacccttgggtttacagttatgtggtttctgggtcttatagatagtaaacggcaaattctggttgcctcatcatgacaactatggaagacggagagctaccccttgacaaatatctatcaccgaagcatgtaaggatgtagttgatggc

SEQ ID NO: 33954 - DNA, 343 bp, Gossypium hirsutum
  Clone ID: LIB3145-030-Q1-K1-E1
cctaggccatcacatgattcgggaaaaaatgttatactaagatcaatttattgacaatgattcttactagccaccatgcctagagaagtaatcattatccaatgaaatagcaagagcaacagcaattgctcgctctgatagagtcagtgaacggcttacatccaactcttggatcatgctagcgggaccagtctttaagacgggatcagcctttccaaagtggatgacatactgtctggcatctgtaaatatctgcatgcaaatcattttgcctattagatacccataacaaaaagctaagaattttaattcatgtaataaaatggataaaagcaaaagcaca

SEQ ID NO: 33955 - DNA, 333 bp, Gossypium hirsutum
  Clone ID: LIB3145-030-Q1-K1-E2
gttttggtgactatctgcatgtaaagagcacccactctcctcgttgaaggcagttgaacaagttttttaaaaaagatttagtaagtatctttctcttctccttctttactttctttccaaaatttaaataaaaaacaaaaaatcctattccgtgaaggccctttcatcgcgcagccactaaccttcatcagtttgatggctaatagtgctgatgatgatcggattttatcaacggagatcccaattttagaaatccggtaatatggcttcctttcactcttccttttttttaaaaaaaaacgaattcttatgtttttttttcaaaaaaatgaa

SEQ ID NO: 33956 - DNA, 357 bp, Gossypium hirsutum
  Clone ID: LIB3145-030-Q1-K1-E4
ctttaagttttgaactcccagtcctggctaggttttggtggtgcctgccatctgggaatccatttaattttgttacatcaatatgtttgctggggcctttcctactagtttctgcttgtttcatttgtggctgcttcttttgcaaattggtggcacctgacattggtttggagaatagttcatttcccttttgtttcttcctccgcaatatctgttcagtactttgttcttccttcagttctgactgttgctttttgccacgaagctctgatttttggagcatttgcacctcttgaaatccatgattactttgcagcttttgttgattgcctaggagaagcttgtagcatgtttgct

SEQ ID NO: 33957 - DNA, 319 bp, Gossypium hirsutum
  Clone ID: LIB3145-030-Q1-K1-E5
agaaaaagtaggtaagctgaagttattttatctgcatattcaaccccacatcttttctgtgaaaaggagacaatatcaacaaacatccctttcgaaggttgaattccggaatcctccatccactgaagaacctcgatatatttccgccaattttcagctgccaacagatttttcaacaagattgagtaggtgttgaaactgactggaacacctgatgctattatcttgtaaaacagcttcatcatggattcagtctttccactcttcccaagcagatgaagaagctgattcaaaagcccaatggaaaccaaagggaacc

SEQ ID NO: 33958 - DNA, 394 bp, Gossypium hirsutum
  Clone ID: LIB3145-030-Q1-K1-E7
gcaactttgacaaggtactgggtcaatgggctccgaggacaaagcagacatggccttttgaagcaaggaaatccagagtatgacgccaagaggcaagcattatttgaatactatcatccattagaattctctccagcgattccacttgaagagaaaaccaaactcatggaagagtggtgggggaaaacacatggtcttctcattgaaggaggccttacatatgatgcaataaaaagctctgttgctaactctaatattgcctttagggatggtgtagttgaactctttgagttattggaggagaaagatgtccctgttctcatattttcagcagggcttgcagatattatagaagaagtcctgaggcagaaagttcacagatattttaagaaca

SEQ ID NO: 33959 - DNA, 328 bp, Gossypium hirsutum
  unsure (1)..(328): unsure at all n locations
  Clone ID: LIB3145-030-Q1-K1-F1
gggatcctgatgcttttgttgcattttttgaagatatatactttcgcttcattgactcgtaggcaggtcaggttttatgggactgactaagggtcaggattactgctactaaattaagtccagatttagtctctgcactctttctaacataaaccacaacccttgatttgcaacatcaatatcaatgtttgaattagtccctaagctgcagttaagataaatacttggtgcttgaatgtatatgtacatgtaaaaatttgtggtagtgtggtgttgggatgttgcangcggggcggtcaagctatgtgtctgcatcaatacttgcaac

SEQ ID NO: 33960 - DNA, 274 bp, Gossypium hirsutum
  Clone ID: LIB3145-030-Q1-K1-F2
gtgagagggcgtatgtaggaaaatctgcactattaattaggtcggcgtttgcattggaaggcttcaattcgggtgttaacgacgatatatcgacagccgattaagcacgaaaaaaacatgcacggctttaatgccattggtacagtcaactatacgtagtataattgagcctctgatggcgttcactaaaatcatgttgtcacaaaatgtgcttaaattggtaatctaggtattgacttgaatgcggtactgatacatgaagaaaccttagatg

SEQ ID NO: 33961 - DNA, 371 bp, Gossypium hirsutum
  Clone ID: LIB3145-030-Q1-K1-F4
cccacgcgtccgtccacacgttcggggacgtctgggcggacgcgtgggctgaaaatacgggctcctcgagaatgatgcaccaaggaaatgaaaatcatccctatgccaagttctgaaatgcaaaggaaccactgaggaagtgaataagaaaagagagtactttgaatgctggagaggtgccttctacggatgttgatgaagttgaggatagccctccatttttgatacttcctttggtaaaaacttcactgagacctgagttccaaagttgctgtacaaaattgttgggttaagaaaggaggtgctttaactgttgaagtttgtgcggaaatgcttggaacatttgagcatttccttggggttatttattg

SEQ ID NO: 33962 - DNA, 388 bp, Gossypium hirsutum
  Clone ID: LIB3145-030-Q1-K1-F6
ggtgatcagcaggtagcaccagctacgaccgaaccgaaaatttcacaggctcaacaagtcaacagtaaggaagagggttctgtttcaggatccgtagtaaccaaacctgcggaacccgaggaggttgtgtgtcaaggaaaagagtcttgcaaggaatacataaagagcttcttagctgctatacctattagggaaatgcaagctgatattaagaagggtttaatggcatcgacaccgttacatcatcggttacaaatcgaattccactataccgagttctggcaaccaaaacctgagacttctgcaactccgatgacaacaacaaaaccgctgttggtcgaagttccgttaactgaagttgctgcatagagaaaacttactgtaaatt

SEQ ID NO: 33963 - DNA, 373 bp, Gossypium hirsutum
  Clone ID: LIB3145-030-Q1-K1-F9
ctatcaatgggaatgtctagtgattttgttctagctattgaaatgggcagtacgaatgtcagagttggatcaaccatctttggagcaagggaatatcccaagaaaaaatgaaacaaagcttatgaagtagaggggcttaatccttagatcttcagtgcgttgtttattaaaagagttgtaggcaaacacaatcctcggtctgttattctcgtacgtgaggagaaagaaaaggtgaaaagatactgatctatcttataatccatggaacttgtttattccatcaaaattaatgctaataaaatgtaatgatttgatcttatatttaattcttactgttccattggaaaattattaatataatatttggttcctg

SEQ ID NO: 33964 - DNA, 419 bp, Gossypium hirsutum
  Clone ID: LIB3145-030-Q1-K1-G10
cccacgcgtccggttttttcctggtagaattaggatttgaatatgcttacaaaaaaaccctccactatgtcatggacttcattaaaacatcaaagtataaggggttgatcttttttaggacgtccacgccagatcactttgagaatggggaatggcataatggtgggacttgtcctaagacaataccagcttaagaaggagaggttaaaataaaggacttgaatagaattctacgaaatattgaattagaagagtttgagaagacattcgcaaaagtagcccataatgaagtgaatctcaagcttctcgacttcacaaatctcttattatcgaggccagatggacatccaggtccatatcgacagttccaaccgtattcaaagaacaaaacagcagtcggtcaaaacgattgtttacat

SEQ ID NO: 33965 - DNA, 239 bp, Gossypium hirsutum
  Clone ID: LIB3145-030-Q1-K1-G8
aaaaaaagttttgggtgtggctttcagaggctgaaagggcattgtttgggaagggattgccaaacttttggtcttcgatgaggcttccaaaaagtttcccccttttttgtgccctttccatgaaattaacttccctttgccaaccaagttcatccaggaacctggcccttttcattgggaatttttttaaaaaggaattgccttcccattgggggatttttccaaaaaggttttttaaa

SEQ ID NO: 33966 - DNA, 404 bp, Gossypium hirsutum
  unsure (1)..(404): unsure at all n locations
  Clone ID: LIB3145-030-Q1-K1-H10
gatgaagaagagtacaaggttggtggtgtattgatctccatgctgagagatccagtagtgaaagcaatggctgcaaccaaggaatttgatgatcttgaccaaattgaggaagaggaggatgctgagcgagaacttcaagaggccgaaaggaagcgccttgaagaaattgaaaagcttgaaaaagatggcaatcaatgatagctagccatattttgttcttctttcttgcttttggtcactgaagtttccgaaagtttgcttgaggctttaacaatgccggatattacttaattttatgaggaatgcccttcattatactgattgtggccattgcttttttcaaatcaactttcttgtactcaaatgcttcggtgaaacaaataaatcgtacaattgacatnnna

SEQ ID NO: 33967 - DNA, 374 bp, Gossypium hirsutum
  unsure (1)..(374): unsure at all n locations
  Clone ID: LIB3145-030-Q1-K1-H6
cccacgcgtccgcccacgcgtccgancctccttcaagtaactcccttaagcccttgctttgtttctttatttccttccattttgaactttctctaacttttctttgtgatttgcagatattgcttctacttgcagctttccctctaggtatgcttattaagatcaaactttatgccgaaggactgaaagtatacttacaaatcatctataaaatgaaattattgctaatgctagccagggtgttaacaagtacttgaacaactacttggacccacccaagttagcattaagaataaacccttcagcttattggaatacatttaccttcatgggaagttcctttctaatataattcaatgaaaccttttttaacc

SEQ ID NO: 33968 - DNA, 362 bp, Gossypium hirsutum
  Clone ID: LIB3145-031-Q1-K1-A10
caagttcaagcatgtggaacttgatctgttttttgtccgtgagagggttgccgctggtactattattgttggtgaagtacctgcctgtgatgaaatagctgatattctcaccaagcctctttcgcatacagtttttactcggtttcgccagttccttcgggtcttaccgattgagacgatggatgcatgttagagtagttagtttggtatgagttggtataagttggtagtctggtgcaaataagtagttacgctaatgagagtggtcaggagtacagtcagtagtgatcttctataaatacttttgtattccttaaagagaggaagcttttgagaattcaatatatgagtttattctttat

SEQ ID NO: 33969 - DNA, 427 bp, Gossypium hirsutum
  Clone ID: LIB3145-031-Q1-K1-A4
cttttctatggctttctgatttcctctgctacttttctctccactcatcccttccaattttcacactcttttccttttttttttcatttttattatataaatatatttcagttgatcaattatatcaagttgaaaccctaaactcttcaaattttctggttgcttatctcctcgttcagcattaatttcctggtggtgacaatgtcaactcctgcaaggaagaggctaatgagagattttaagaggttgcaacaagatccgcctgccggtatcagtggagcacctcaagacaacaatattatgctttggaatgcagttatatttggtccagatgatactccatgggatggaggtacgttcaagttgacacttcaattcactgaagattatccaaacaaacccccaacagtgagatttatctcccgga

SEQ ID NO: 33970 - DNA, 423 bp, Gossypium hirsutum
  unsure (1)..(423): unsure at all n locations
  Clone ID: LIB3145-031-Q1-K1-A8
aagatatttgcacattaagatgcattcggagtgatatggtaactggtgatcagtttctggaagaaagtgtttgggacacaacagatgccaagtttggcactgtaccatttagcatctgggttgttgctaatgagttggggactttttttgtccgtggtggatccagaaaacccccaaggaggtttgctttaaagctggctgatccatatttacacagtggttcagatgatactgtcattgatgcagaaataacaaccttttctgcagccctttttgatgactatggtggcctgatggtgccattgtttaatatatcattgagtggaattgcattcagtttacggngaagacctgattattcaaattctaatgttagcttctctttagctgcgaggtcatataatgataaatatgaatcatggg

SEQ ID NO: 33971 - DNA, 260 bp, Gossypium hirsutum
  Clone ID: LIB3145-031-Q1-K1-B11
aaacgcggacccaagaggggaaaggacggcttttgtgaagaaatgcatcgatactaaactgggggccatttaatacctgtgagccaactcaatgacttatacctatcatcaaagggcactcctctggaattagctcacagaggcaaggcttctgggcatatctggacaaaaaaaaactctagaaggaattcacgacatacaaaggcaggaacgtcatccagatgaggcaccgtaaaaggacctgccggaaccttcaaaac

SEQ ID NO: 33972 - DNA, 222 bp, Gossypium hirsutum
  Clone ID: LIB3145-031-Q1-K1-C1
ttgtatctttaggtttttcattttcaatgttagtcatatttgggtgagatcctctactttccagcgaatagttttgttggagttgtatgctttttattgtggtttttaccctcatgtccctttgtttttaccctcaacccttgcttcaacggggttttccacgtaaaagatcacatgttttgtttaattggttccttgcgattattgagttttattttgtgc

SEQ ID NO: 33973 - DNA, 426 bp, Gossypium hirsutum
  unsure (1)..(426): unsure at all n locations
  Clone ID: LIB3145-031-Q1-K1-C11
aattcatatggtttatggcttggaacctgcaatagccacttgggaagttaggctaggtgcggcagcaacagctttccttcataaacttcagaaaggtatacctccctgggttccccttaaagggcacgaggagaaaacttataaacagcttcaagaagaagcgatagagagcaaaagacgtgatttggctgtcctaaaagctaatgatggcatatggcccggagttagaattcctagccatgctctatttctttgggctagcggctctgaaatgacaactcttttggaatctgatcatatgccaaacaaatacatttcaaaagatcttcggcgcaaattggccaaagttatccccggattaaggccgtgggaggttntaagtgttgagcaagcaatggatgatatcacatatagcggagagtggta

SEQ ID NO: 33974 - DNA, 406 bp, Gossypium hirsutum
  unsure (1)..(406): unsure at all n locations
  Clone ID: LIB3145-031-Q1-K1-C9
gagaggccatccgaccaccccatttttgagcctaatcccgacgacggagaaggactctccagtgccatgaccgcgagttcaggttgtgggtggcgttgtggacgtgggcactgatgtggtacgtgggtgcgaacgtggaggagcgggatgtagggcggccgacgaacatgcggcgctggtcaaaggggcgtgctgcttccttattttctgtttcgggttttagtttgggctagggttttgttttgggcctgttgggctactttgtatattttgggttttaagtttggttgtaactgggctttgtaattctagacttgttgttattgggccccgtgctaaaattgngccttacatntatcattgnattaatatttattattttgtaaaataataagttttttttatt

SEQ ID NO: 33975 - DNA, 432 bp, Gossypium hirsutum
  Clone ID: LIB3145-031-Q1-K1-D1
cccacgcgtccggaacaagctgataaagaaatcactaacgaggaggaggcacaatacgccgcgcatcaaattttctcaaatgctgctcgacacgaaagcaaccacaaccacaattacatcgatgaggatgaccttttaaggttcatgatcaaagaggaggtggatcttgtgtttccattgtttgaaggatcaaacaccggaaaaattgaccgaaaaagtttcacaaactgggtgataaaggtttacaaggatcggaaaacactagcacatgctttgagtgacaccaaaacagctgttaagcaattgaataaacttgtaacagtagtccttgttgttgttactgtcatcatatggcttcttttgatggaaattgcaaccacaaaggtgcttttgctcctttcatcacagcttgtagttgcagcttttatgttt

SEQ ID NO: 33976 - DNA, 394 bp, Gossypium hirsutum
  Clone ID: LIB3145-031-Q1-K1-D5
gtgctttttaaaaaaaaaaaaaaaaaaaaaaaaaaaaaaaaaaaaaaaaaaaaaaaaaaaaaaaaaaaaaaaaaaaaaaaaaaaaaaaaaaaaaaaaaaaaaaaaaaaaaaaaaaaaaaaaaaaaaaaaaaaaaaaaaaaaggggggggccgttttaggggatcaaagtttacttccccttgcttgcaacgtaatactttttttttggggcccccaaatttaatttcatgggccgggttttaaaaacgtcgggattggaaaacccttggctttcccaaatttaatcgctttgaagaaaatccccttttccccagttggcttaataccaaaaaggcccgaaccaatcgcctttccaaaaatttgcccaccttaattggcaattggaacccccctt

SEQ ID NO: 33977 - DNA, 427 bp, Gossypium hirsutum
  Clone ID: LIB3145-031-Q1-K1-D8
gaaagatgttcaagagagcttgtgagggaggcactgaaacgcaacacttgtgataatttaacagtaattgtggtttgtttctccactgaccctccgcctcgaatagaaataccacagttccgtgttcggaggagcatatcagcggaagggctgaattttctaaagggtgtgctggatagtaactgatgaaacagtggatagatgaaaagaggttgtacatgaaggcattggagggcaaaattggcaggctgcaggctaacattcaatcctccttcaaggacatgctcatcatgttgattctttatgagtttctaaatcctgtacatctgagataactcatgttgtacggattggcaggagtcgatggtcaaccaagttttccttcttggtcttcttctttttttctttttctttttttctccttcat

SEQ ID NO: 33978 - DNA, 120 bp, Gossypium hirsutum
  Clone ID: LIB3145-031-Q1-K1-E12
tatctcctctatagtgctacagcaaaagttttgagagctaggatttttcaagatgggaaatgctcttaagctcctatatgggaaatgtttggaagccggcgtcattacgggaggggggtc

SEQ ID NO: 33979 - DNA, 377 bp, Gossypium hirsutum
  Clone ID: LIB3145-031-Q1-K1-E4
cccacgcgtccgtttctttcttctctctggttttttaaaagctctattcatgccatgttcatcaagcattcattaagagtgtgggttaatgaattcttaatatgcttgtaactaaaagttgtttaaatgaagaatataagtgtttcactacagaaatttcatctttacaaattgacagagcaaggaggctagctcgaaacttaggatagcctttagccactgagccgaccttgtcttgttgattgtctgcatttaaaagagggtacttggtccactagaaaggaagattgagaacaatgattcatgtgcctagctttatggactgattttttacaactttttgacttcctacgtgtatgctattatgtttctttata

SEQ ID NO: 33980 - DNA, 419 bp, Gossypium hirsutum
  Clone ID: LIB3145-031-Q1-K1-E6
ctgagagttgcttgtacttgtgtggtgcctaggccaaaggacagaccttctatataccaggtttatgaatcgctgaagatcatgggtgagaaacatggtgccttggaacagtatgatgaatttccgttgatctttgggaaacaacaagatcatgataattatgagcgaacccttgtttggggggaatgagatgcataagcagcagctgaaagaactgaaactgtttatcttctactttgtggttctgagatttgggcaaatatatctgcattggtgaatggtatcttctttttaaaggcattttctgcaattggtatgatttacgcttgaacaggatttcttgtctaaatggtactttgttggagaattctgtatattacatgaagcattatcactcactgtagtgatcactatcttca

SEQ ID NO: 33981 - DNA, 427 bp, Gossypium hirsutum
  Clone ID: LIB3145-031-Q1-K1-E9
gccaaattggagaaatcttctcacaaagctcaggatcaatacgcagtaaataaattgaagcaagtttcacagaagtctaattttacaaacaggtaccctgtgccattatctttcgatattatccagtctaggttggagaacaactattatcgaagtttagaagcagtgcagcacgatatccaggtaatgttgttgaatgcggagtcttacttcgggagaaatgcagagctcttatctaaactcagacgcctatccgacttttttatgcggacattgtcgtctttgcagccgccgtagatagatcttatagtgaagacccatctttgtagataaattagaatttttgctttttcatttttaattttcttttccattgtctcttaaatccagtttttgttattgatttatactttgagattctttcgag

SEQ ID NO: 33982 - DNA, 377 bp, Gossypium hirsutum
  Clone ID: LIB3145-031-Q1-K1-F1
gtggaccggaactgaattttgaccccttagatagttttttgtagggattggaatataaaagttgaatatggtaaataagaagtaccaaagatggggctacttgtccggtctggtaagtcgaccttaaaaaaaaaaaaaaaaaaaaaaaaaaaaaaaaaaaaaaaaaaaaaaaaaaaaaaaaaaaaaaaaaaaaaaaaaaaaaaaaaaaaaaaaaaaaaaaaaaaaaaaaaaaaaaaaaaaaaaaaaaaaaaaaaaaaaaaaaaaaaaaaaaaaaaaaaaaaagaataaaaataaatgggggggcctctttaaaagaacaaaattttagtggcccttatgtgaaatttaaaatttttttttatgggacaaaaaattta

SEQ ID NO: 33983 - DNA, 222 bp, Gossypium hirsutum
  Clone ID: LIB3145-031-Q1-K1-F11
acggccccacacactgtcgaccttcttcatccatactatctcatcactgtactcatgctcaacggcctcaaagcagtcactcgttgatcaatgactgacgaagctgcacgtgtacaggccactggagctgcatggcatatatgccatgctgtcatacccatggttgctcgcagagtcatgaaccgtgctcaccaccccgtgatgcttcacaatcgtgagatc

SEQ ID NO: 33984 - DNA, 425 bp, Gossypium hirsutum
  Clone ID: LIB3145-031-Q1-K1-F6
cccacgcgtccgcccacgcgtccggtgattttctcagcctcatcgttgctgtctggtatactaattgcgactctgcttccggtgacggaatctttagcggtggtgttgtaccatgaaaagttccaagttgaaaaagccatatcccttgttttatcactttggggatctttgaattacttctatggtgagttccatgagattaataagatgaagcagaagcaagatgcaaaaacagatgtagcctaaaaccctttgccttatcttatattggatcatattaaacaaggtggctatatataatatgggggtatacccatattatcttggttcatggtttcccttaaaatatggtaaccagcatgtttaaagggcgcatatatattggtggaattaaggatatatgaaaaggaagctttgatatattt

SEQ ID NO: 33985 - DNA, 192 bp, Gossypium hirsutum
  Clone ID: LIB3145-031-Q1-K1-G2
acgcaactcttgaaggctgaggaaattgataccagtcagcctccatatgttttcaaatgccaggtgtacgatctgactggagtacctgctgaaaggcataaaattatggctaaaggtggcttgttgaaggatgatgcagattggtcaacagttgatctgtagcagggtcaaaagatgatgatgatgggaact

SEQ ID NO: 33986 - DNA, 151 bp, Gossypium hirsutum
  Clone ID: LIB3145-031-Q1-K1-G9
tcccaaccccatgtcctatatcaaaatcggcatcaatggtgttcggcaggatcgtaatgcttttttccagggtggccctgcacagtgactattcctactcgtcgtctggatctaccccttcatcagcacccacttctttacctacatgttc

SEQ ID NO: 33987 - DNA, 216 bp, Gossypium hirsutum
  Clone ID: LIB3145-031-Q1-K1-H10
agaagattataatgcggatgataggacctcgcattcgacaagaggagttcactctagagggtgcgatttgcgtcaagctcgtcactcttgtgtcctactaaaaccctaaccctcgctccagggttactatctattgtaggatccccaataccatttagcgagctggcaaggagagatggcattgagaccacatggtatagatgaattcttatgggc

SEQ ID NO: 33988 - DNA, 303 bp, Gossypium hirsutum
  Clone ID: LIB3145-031-Q1-K1-H11
accacgtcgacacgacgcgcgccgtgagcttgcatcctatagagaggaccgacgcgttcgctcgctagtgacgactgggcgagcgccgggcttcaatgcctcagtccgtccgtgagctcctctcccgcggaacacgccagcgtgcgtagagacggcctatgcgctgacacaggctcaccagatccaatgaaagctgccaactcgacacagggtgtgcaagaaatataaaccatgcactcttcatcgtcagttcaaggcaatatctagtgttaatcttggaggccttcagtaggaagctagaga

SEQ ID NO: 33989 - DNA, 419 bp, Gossypium hirsutum
  Clone ID: LIB3145-031-Q1-K1-H12
cgaagagagagtggcatacgtgagtcctgctgttcatctctatccaagacaagataatccatcgtgcaggctaacgaatgccctaaaatggatagggactggaatacaaaattgattgtgaactggagatctgaaggatcatctggaagcagtagaaaaaattctttcaatttcgtggagatgtcccagctaagctgcaaagcagatccagcattagtatattttagaaatttagttttgggcttgattttgttcgtagttttagttagagaagttatgtttcttagatagttcagacgtgtgtgtttccagcattccattatagtaagacatgcatggtattgctattcttgtgtcccatctgtgatggaaattggaataatggccgtataaagaggtttctttacagttaagctgat

SEQ ID NO: 33990 - DNA, 206 bp, Gossypium hirsutum
  Clone ID: LIB3145-031-Q1-K1-H4
acgtacgcccacgcgtgcggtcatcgattactgtcgtcatttgggtgccaagctttatactcgaggcttagtcttaagcattgaagccatctcgggttcacgcaaatatgccatacgtggatgactcggcctgctcggtggctcattatagcatgcttggctgtggctcatataacaagatatgcagagctagagcgagccatgac

SEQ ID NO: 33991 - DNA, 194 bp, Gossypium hirsutum
  unsure (1)..(194): unsure at all n locations
  Clone ID: LIB3145-032-Q1-K1-A10
gggccgacccacgcgaacgtctatacctacnttaaacaacacttttattctttatctaacctcaatattcccaccgccggccttatttcacacccccattcattaccaacacctccacatctttgtgattccaaccaaaattactttctgtccttacgtctcaacataattgccaacaatgttcgccctaacct

SEQ ID NO: 33992 - DNA, 308 bp, Gossypium hirsutum
  Clone ID: LIB3145-032-Q1-K1-A6
gggaaacggaggaattagtgcttcgtactgggagtgttggtgctgggtgctctcgactactctctgacatgcaagctttcaaggctgcaaatcctggctgtgttttagaagattttgttagatggcactctcctcctgattggattgaagatgagccaagcgataaggttccgggtgctagaagtcaactaagtagtagaatgcaaaaaggaagtaatttgtggcgtgaactatgggagacatccaaacccgtaccggctattaaacaaacacccctctatgatgaggattttgcaatggatggaata

SEQ ID NO: 33993 - DNA, 375 bp, Gossypium hirsutum
  Clone ID: LIB3145-032-Q1-K1-A8
acccacgcgtccgcccacgcgtccggaaaatggatatgattcttttgcagctatacacactggtgagtgggtgggtggcgctcaaaatgcctatgaaactggatacggtaagattgatgtagcagatgaggctcaagttgagggttctttcttggataatgaacacaaagacaatatcttcaagggtagcgaagaaagtaaactggattctacatattcagagaaagttgatatggctctgaaaaatgcttcgttaattgacggagaaacttcaatctttctggaagttgatgcagtcaatgaagaaaagatctctcttgcagataatcctactgcatacgaggatgttgctgttgcaaatgacacaaaattttt

SEQ ID NO: 33994 - DNA, 383 bp, Gossypium hirsutum
  unsure (1)..(383): unsure at all n locations
  Clone ID: LIB3145-032-Q1-K1-B7
cagccttgctatcttgaaggctgatctgaaaagccaaagaaagcaagtaagaaatttaaagaaaaagtcactttggtccagaagtttggaagaggtcatggagaaacttgttgatattgtccattacttaatcttggagatccattgtgcctttggtagtaatgaccacaggtaaaaagaaaacaagcactaagcgttagagagatacaaacatgcatgtgcatgtttacatacacatgcatgtgtgagcatgcttgcctgctattgtacgaggataaataagtatgcatgggaaatgtgtcttatcctaatngacttatagaaatggtgcctttttctaatagtttagtaatacaacnaacatcaatttcataaaataatga

SEQ ID NO: 33995 - DNA, 355 bp, Gossypium hirsutum
  Clone ID: LIB3145-032-Q1-K1-C11
ccgggccgacccacgcgttcgctggctctgaacccaaaactgaaacagagatcgctgatcttgaagccatttcggcgcgcagggaattaactgctctcgaactcaacgagaaaggcaacgagcttgtgaaaaagggtaaaaagcattacccagaagccatccactgttacagtagagccatcgatcaaaaagctctaaatgaccatgacacctccgttttattctcaaacagagctcatgtgaatttactccttgggaaatatcgccgtgcgctctccgattctcaagatgccattaagcttttccctgctaacgttaaagcgtattatcgagctgtcaaagcgtgtttatcatt

SEQ ID NO: 33996 - DNA, 347 bp, Gossypium hirsutum
  Clone ID: LIB3145-032-Q1-K1-C8
ctaaaagtgagtggagtccgattgttttgatctatacatcaggcaccacatcatccggcaggggagtggttcatagtcacagaggaattttcaccatgaccgttgattctttaatcgattgggaggttccaaaacaaccagtttatttatggacactccccatgtttcacgctaatgggtggagtttcacttggggcatggctgccgtcggcggcaccaatgtttgtgttcgcaaattcgatgcctccaccgtatatagtttaattaaaaaacatggtgtcactcacatgtgtggagcgcctgttgtgcttaacattgtatccaattcccctgaaattaaaccactc

SEQ ID NO: 33997 - DNA, 148 bp, Gossypium hirsutum
  Clone ID: LIB3145-032-Q1-K1-D1
ttcaagccgtccgccaagccttccggaattccttacttaacctttcttcttcaattttaaagcttgccaaaaccgccttcctggttaaacactggtggccggttttggaaggaaaccatcttgtggggatttgccggtttttcctgga

SEQ ID NO: 33998 - DNA, 280 bp, Gossypium hirsutum
  Clone ID: LIB3145-032-Q1-K1-D7
tttttttccagatttactagccttcttatgcactccagcgttcctgtctccccaaatgacgcataaaacatagcaaaaaagcctacactgagatggcgacctctgcgaaaatacccaggctaggtaaagttgaagtttggtacagcatctgagtcaatcctaacctcagcttaatttctggtgaagaatctatcttttggaaatgtggcatgtattaggttttgttttagtcacttaaatatatttatgttttgggtgtaagtaatttgtaatttttaag

SEQ ID NO: 33999 - DNA, 152 bp, Gossypium hirsutum
  Clone ID: LIB3145-032-Q1-K1-F1
cgtgtacccataggaagcctgaaagtggctgtgacatacgtaagggtgcttcgagtcctctgtaaaaccccaaggcccaagagttcatacttggggagctcgcaaagactggccaaaagaaaaagcttgaagggtttgaaatcataaaagct

SEQ ID NO: 34000 - DNA, 225 bp, Gossypium hirsutum
  Clone ID: LIB3145-032-Q1-K1-F11
acgcataagtcttcacagctttaaaagattaactaacatcactcaacccaccattttgggctgggttaattccagcgacagcgtcctaatttatttcaaccttacacactaattaactaattatttcaaccattcttgtagtatacaaacaaaaccaaatcatgttttattttatggattttctggattatatacttcgtcaaatgctaaatgtaccaacacaat

SEQ ID NO: 34001 - DNA, 331 bp, Gossypium hirsutum
  Clone ID: LIB3145-032-Q1-K1-F9
cccacgcgtccgcagcaatttaagtaggtatagctgtagcaacaaacctcacatgtgaaaggatgtgaggtgggcagccatccgccacattaagatgcaggaaggggtcttggggttgcggcatttcaatcttttgaagaagcttggatgtggagatattgggacggtatatcttgctgagcttattggtacaaactgcttgtttgctataaaagtcatggacaacgaatttttggcaagaaggaagaaattgccaagggcccagacagagaaagatatattacggatgcttgatcacccttttcttcctactttatataccccaattcac

SEQ ID NO: 34002 - DNA, 252 bp, Gossypium hirsutum
  Clone ID: LIB3145-032-Q1-K1-G10
ggggcgacccacgcgttcgaaagaattcccttaatatatcatatcttaatgctgcgttgggtgatttgccatccgcgagggcacttatgggcgggggacattattatcttgattacatatgatgcacttatgtgcaaatcgatcgtgtatcccacttgcattctgatgtgttcaacgggtgaaatttctagtgaaatggaagaaaacttttcatgcatgcgacctttttgtaattgttgtgaaatggacact

SEQ ID NO: 34003 - DNA, 343 bp, Gossypium hirsutum
  Clone ID: LIB3145-032-Q1-K1-G12
aaataatctaccacctataggaagcttatttaaggcgaaggtggttataaataggggtgtgcgcacattccgaatgcggattctcattgctgcggtgaacgttcctctatacatgatgttgttgttcaaagattggattgacaaataatcgtatcaaacatggtgatattttgcaaaactgagtttctcctttatacaggtaggcatattaggctagtagtaaagcttcaatttgaattgcaagttgatcttttgttatttctctaatattctaactaatagctagaagcgagtcctcttttttgcattatgcggtttataatttaaagccttgagaatggtg

SEQ ID NO: 34004 - DNA, 218 bp, Gossypium hirsutum
  unsure (1)..(218): unsure at all n locations
  Clone ID: LIB3145-032-Q1-K1-G4
cccacgcgttcgcggacctgcaggcccaaataactctcagtttaactggatcacagctcaatgcaactgcatctggtacaaccacactnctggggaagttcaagccaaggaactgaagcgaccaatcaactttttcggaaaaagaaagatacaagatctagtttcacaggtttgattcgcaaggaaaagctggaaaccaagaagttgaaagatcttac

SEQ ID NO: 34005 - DNA, 253 bp, Gossypium hirsutum
  unsure (1)..(253): unsure at all n locations
  Clone ID: LIB3145-032-Q1-K1-G5
cccacgcgtncggcttgtttgggcttcgtaggctacctgggtacgtggcaacttgcacagattctaatttttctttttctgggaataagtagatcgttttacattaatcaattatggttgcccctgggtagttttaccttaatggatttgtttatttgtaagccattgcttgaaatcagtttttgagctagttttcttattttcaagtcagcaacatggatctttgagaaaaaaaaagaaagctaagatcaat

SEQ ID NO: 34006 - DNA, 347 bp, Gossypium hirsutum
  Clone ID: LIB3145-032-Q1-K1-H5
tccatatgaagccttatatggtcagttgccacctacacacatgctctatctagcaggaacgtcttcagtagcagtggtcgatagaagtttacaaactcgagaggcgacgagaaaacaattgcagttctatctaaagagagttcagacacgcatgaagcttttcgctgacaaatatcgttcggagagaactttccaaataggggatttagttcatttgaggttgcagtagacagttagaagaattcttatcagaaactatcttcaaaattctatgggccttttcctgtgatcaagaaggtgggagaggtggcatacactctttagttacagccgggatctcatattca

SEQ ID NO: 34007 - DNA, 334 bp, Gossypium hirsutum
  Clone ID: LIB3145-032-Q1-K1-H6
ccacgcgttcgcccactctttcgtgaagtaatggggtcaataatttaggtgggcgtggtatggataattcagaacttgtgaacacttaaattgtgttcaaactccaaattgcatccggcagaccgtttttgatgccgtagcacataattaccaaccagttaccgttattgtcgatgccacagctgctgcaacagccgacatacatgatgccaatatctatgacatgagaaatattggagttgcaacaccaacacttgaggagtggtattgaactcaagctttgatgaatcaaatgattgaactggtatgtattctttgggaggccttacttttt

SEQ ID NO: 34008 - DNA, 337 bp, Gossypium hirsutum
  Clone ID: LIB3145-033-Q1-K1-A11
tcccggcgtccgcccacgcgttcgatcctcgtccccctcctctccattcaccttagcactctcttatcttggagtcgtgtcggtcttagcatgtgtgaattggtcctcttcccactaccatcttcttctttctagttgatattgtgtatcaacaattatttatttgtatttataaattttattttatttttaaatggtagaattcatagttagagatccaaattacggaaagtgtataaataggtaggtaggtaaggtacctgaaagctaaagtcctcctactttacttatcttatacccatgatcatatgcactttccttttttaagttataaaac

SEQ ID NO: 34009 - DNA, 282 bp, Gossypium hirsutum
  Clone ID: LIB3145-033-Q1-K1-A12
tccactcgttcgtctgcctaatactctgtcttaatctctccctttcatgcgccgctgcaggtttgacagatgcgatcctgcacgcctagccgaatttcatcccgcaatcccttcttcacttggattgggaggaagataggaggatagatccaccggttgcgctcacgggaaggcgcctctgtcaccgtttttttgaaaactaatttgaaaacaaacctcatgaatgacccaaactgggcacttaacgctgcatagaatacttaaaggattccatgaacaaag

SEQ ID NO: 34010 - DNA, 287 bp, Gossypium hirsutum
  unsure (1)..(287): unsure at all n locations
  Clone ID: LIB3145-033-Q1-K1-A9
aattnggggggcgacggacgcgttcgttcatatacctttaatcattcaccattcattccatactcacttcaccttctatgggcgtggccattattaactcaaacatatcccattctatcttccctatattggaaacttgattgtagcattcaattatatttgttaaacaatctcatgtagtcattctttcttcttgtttcattaacaccctctacctcataactctaattccaacctcatttcaactatttataactcaaacattctttattatgataatttacctt

SEQ ID NO: 34011 - DNA, 366 bp, Gossypium hirsutum
  Clone ID: LIB3145-033-Q1-K1-B10
gacccaggcgtccgactatttcagcaaatggagaacgtgaaattggagaattgatagcaagagcaatgtataaagttgggaaggaaggggtcattactgtcactgataggaatactttagacaatgagttataagtggtggaaggaatgaaactaggcagaagttatttctctccctattttgttaccgatcaaaagacccagtaatgtgaacttgagaattccttgattctcattcatgacaagaaaatttcaaatattaactcacttgtgaggatatttggagttggctataaataaaaacagaccacttcttttttgttgctgaagattttgaagaagtgattgcgccttaaattacttaatt

SEQ ID NO: 34012 - DNA, 393 bp, Gossypium hirsutum
  Clone ID: LIB3145-033-Q1-K1-B2
atggatcacaaatctcctcttctcgttaaagatgacgttgatgatgagcttgagccaactgatagaagccctgttacagaaaaggactttgagcttgagccagctgatagaagccctgttacataactcgacaaagtaccgctactgagtattcttacaacctatagttgatcagaatgtagaatgtgtgtcgtttgcaatgcttggttgcatgaatgtgtaggataatccaatttgagatgaaactttgaaatatatattttatgtgctattctgatgcttttttacagtatagcaccttagtttggagtaactttctttacagtttgataaggaacaagtgttttaatttaactatataaaaatataaatgatatgatagtctgttgattc

SEQ ID NO: 34013 - DNA, 336 bp, Gossypium hirsutum
  Clone ID: LIB3145-033-Q1-K1-C10
taaactcgctcttttggatcgctcacccctgtgtttcagccatattgtaccatgttgaggcgaggctagcccttaaatccgaaaaactcctatccacgaggcacgtgctttcataatatcggaacatgtcaagtgcttgtgcgctggtcatattggatgaaatgaggcaaatatcaatcgtagattgacttggaaccactggtgaagggctcgaagcaggtgtcctgtttgggtttagaccaaagctcactttttagaccgaggtgctttataaatatctactgcttaaacacggatcttaatgtttaatggtggctttccccctggctatcactt

SEQ ID NO: 34014 - DNA, 240 bp, Gossypium hirsutum
  Clone ID: LIB3145-033-Q1-K1-C4
tcgtctctctactctccactcaaatggctctatccttaaccatcatcagtggcaccaggggcggtggctatgcatatgggggcccaatccttcccaacatccatcttcccttctgccttcctcatcgccgcaacgtcctcttcccaatctcccccaaaaccttccacttgacctccgctgccaaaaatgtctctttcataacctgacgctttgatagcaagaaccggaagatcaatctca

SEQ ID NO: 34015 - DNA, 302 bp, Gossypium hirsutum
  Clone ID: LIB3145-033-Q1-K1-C7
ggcgaccgcacgcgtccgccatcatgcaattactgtggggaatcgtgttataaccgacactaatattcctgcgggagcggtttctgcgagctccgctgctgttgaactggctttcatgaagcttcctgaatcatcacacactactgctcgaatgttggtcgtcggagctggaaagattggaaagcttgttatcaaacacttcttggcaaaaagttgcaccaagatgggtgttgtttaccgaagttaaaataaaactccagcaagatcttgaagaagttttaaaggaagtcgacatttattta

SEQ ID NO: 34016 - DNA, 327 bp, Gossypium hirsutum
  Clone ID: LIB3145-033-Q1-K1-C8
ctctaatcttaaaacttgtaagttatctttcatatatttattttaaagttcgatgcctggtgtgttctacttcattaattttataatttttttgtttacttatttgcctatgtccaaatggaagttggtttactctttaaatatatttagaaattgtcacaccttatagtttggactttaagttggaaaaagatatgtatattataaaattacgtgatttagaggaagaaaagataattcgagcttatataattcaggtatgataaattctggttagtgagttatatcttgaactttggattatcttaggtgttattagaattgaat

SEQ ID NO: 34017 - DNA, 243 bp, Gossypium hirsutum
  Clone ID: LIB3145-033-Q1-K1-D10
gatgactacaagactagttcatcagccccaaaggcaatttctggtactagcgggggtggtgggaagagcattcgtagcaatgctgtatattacgaatatagtgatgatgatagagatttcaaaaggaggccgtcgaggtattcacggtcaccatcagctgagtggatagaaccacggcactccatatgatccaaggaacgcgagcgtagcagctattataagcatagattaaagagtaaataa

SEQ ID NO: 34018 - DNA, 304 bp, Gossypium hirsutum
  Clone ID: LIB3145-033-Q1-K1-D3
cccacgcgttctcccacgcgttcgcccactcgttcttccactcgttcgtccactcgttcgaggagacatattttaaaatatggcaaaagcttcacagagggccctggtttcaatggcaatctgcttattgtcttccctcgttggcttctcctatgccatcagtctcgtcaacatgttcttcttactcagcaaattttattgcgacacttgccgcgtatagttcgaaaccaaacttatcgaacccattccatgtgccaatgttgaatttggattgcatgaaaatatgtgactaaactgttactta

SEQ ID NO: 34019 - DNA, 189 bp, Gossypium hirsutum
  Clone ID: LIB3145-033-Q1-K1-D5
tgaattccaggcccgacccacgcatactctttctcattctctaatcactaatcttaattctcaatcccatcaactatataaagcagagttgtattttcaacatctattaacatcttccctattttttttttcttccacaaatatacttattaattttcatttcttaatcttaatccttcattttacaac

SEQ ID NO: 34020 - DNA, 152 bp, Gossypium hirsutum
  Clone ID: LIB3145-033-Q1-K1-D6
aattctccacactttctctcataaagaatttccacaatagctattagatcaactttaagcgatagttcatcataatatgactgttgcaccataactcaaacattcttccatttctaatcctcataacaactttcttaaatcattaacttttc

SEQ ID NO: 34021 - DNA, 414 bp, Gossypium hirsutum
  Clone ID: LIB3145-033-Q1-K1-D8
caaaacttggtcgtgaatatgctatccaatactcactccaataccatgcaaatgaacagccatgccaagatgtgggaagaaatgcaacccaagattcatgttgatatttcattacccgcatcatctaataataatgcttcgggtaggtatggatatgggcatggaggagtagtgtttattggtggggatgtagtgttgcttagtaacgggaacaagttttattcttatgacatgaagaagagggcctctaaagatttgggtgaacttgatattgataccaaggcaggaattgttgggtatgtgaatagccttgttgagctctaagaccaggcgctgctgtttgtatggaccggccttgacaagaacaccctacacaatctccctctcttattctcattatcaggcaaaatattt

SEQ ID NO: 34022 - DNA, 377 bp, Gossypium hirsutum
  Clone ID: LIB3145-033-Q1-K1-E10
gtcagtcagcaccaattgacacaagaagggctttgtataagaatatagtgttatctggtggatgcgaaccatgttcaaagacttccacaaaaggttgcagcgggatctgaaaaagattgtagatgcccgagttcttgcttctgatgctcggtatggtggggaagtaaaagcacaacctgtggaagttaatgtagtcagtcatcctatccaaggatttgcagtgtggtttggaagttctgtacttgcatcaacacctgaattttatgcggcatttcatacaaaagcagaatatgaggaacacggaacaagcatttgccgcacaaatcctgtgtttaaagggatgtattgaggcaaattttcttttcaagtgattaatg

SEQ ID NO: 34023 - DNA, 280 bp, Gossypium hirsutum
  Clone ID: LIB3145-033-Q1-K1-E11
cgaccacgcgtccgaaaaaaatctgtgcatgatctgatgtctaatcattttctttgaaagatattcctttttgaggtgcggacacaaaaaaattggaatgtatacattacactacacagttcttactctttggttgttttttcctgcatctgtaaccttttcgtttatccgttttgagttatcgctttttgtataggccattattgtataaatatgttatcttgaattcaacacctttttatcccgtattcttctcctttttatgtttttagttacccta

SEQ ID NO: 34024 - DNA, 391 bp, Gossypium hirsutum
  Clone ID: LIB3145-033-Q1-K1-E7
cccactcgtccgggagctgatagtttctcactcactgggcttttagcctttgctgaactgggaaacaatatagtagaggacatgactagtgttacctcgaggattgatgtagtaaggagttatgcttttgggtttctataggaggatatggggaaattgtcttagtcagctctcttatgatattgactatttgtagaactaatagcctcctgacatcttattgattacaagctgtcagtgtgctgtcatatatattgatattgtagttaagctgctggactggggcgaggatggtatcgccacaactgctgaaactgctgctctacgagcatcatttctgcaagaagttgctgtttggcacaagcttgatcatcctaatgttacaaagtct

SEQ ID NO: 34025 - DNA, 230 bp, Gossypium hirsutum
  Clone ID: LIB3145-033-Q1-K1-F1
gaaaaaaggaaaattccccatcgtctctttctggctcatgtacataaactatccaccatgtgcggatatgctctcagctacagttgtgactgttttatacttaattatttgctttagtaacaaatattgttgctaattgcaacttaatcgctgtaattatcgttgctctactttgtatctcttggaagttgaacttcagttttattccaataaaaatatttctagccgtg

SEQ ID NO: 34026 - DNA, 374 bp, Gossypium hirsutum
  Clone ID: LIB3145-033-Q1-K1-F2
tttggattcccggtcgaccgcgcgtccggtcgttttcccacacttcccacttccttcactctcatcttcaccttcttcttcttcttgggctgagccttcacccagaccccaattttttgcatcctctgcatctcccatggacaattcccccaaaaagttcatggatttcccattcgtcactgccccgcgtaggaacttgatgatcgatctcgtatccacgatggagcaccgtctacagtctcaactcataccatgcactttacccttcgatttacaacattactacaatccaagttaaacctcccatggctcactttttatccgatcaggccatacctcttcttaagttgatttcatgctatggaagttggtta

SEQ ID NO: 34027 - DNA, 352 bp, Gossypium hirsutum
  Clone ID: LIB3145-033-Q1-K1-G11
cggggcgacccgcgcgtccgctcctttattacatgtatatttgctcttgcttattcaaacctgagattttgatagagaaggaggtgttacatttaaacccaaaaagaatcaaattgtataatggttgttgattgaaagttgttcactttggctcaagtctcttagcacaacacccccaaagattgtttgctcatcatcaactgctaggttttctttttggcaaaaattttttaagaccattcttgtttgccactattttttttttttatctacaaggaattgattccacatattttttttatgatttatttacacaatcatttttgcacttttacattttttgattaaatac

SEQ ID NO: 34028 - DNA, 310 bp, Gossypium hirsutum
  Clone ID: LIB3145-033-Q1-K1-G12
tggaggggcgacccaagcgtccgacgaaaccatatcggaaataccctatcgttctctctcaaatagtctccaatttctcctgggcaggatcgactctagactatccatctccaccgtttcatcatcgtctcatccgcctctcttaaaaccagtgattataaaagatgtgtagctttcatatctaatttctggatcatgttatttcccgcaaatgattataagattgtggtggttggtataaataatgctgtctaaacaaccacgcttttcaaagcttcacctttttaggttgtaactacccatcctactt

SEQ ID NO: 34029 - DNA, 260 bp, Gossypium hirsutum
  Clone ID: LIB3145-033-Q1-K1-H11
cagcttttgtcccatatatgggaactgaggtgaatggaaatggattacagtctaggttaatttctcatgctgaaggaaaattcaatctgtcatctcttcccaacattcgggatgtaactactgattacactctttatgaccaacttcaacaagtaatggcagaagaaacaaactcgtaaagagaagcatttttagaagcaatgaaacgttcaaaagcttagaaaaaagctctttgtgctatacgtatggtgaaagcatca

SEQ ID NO: 34030 - DNA, 122 bp, Gossypium hirsutum
  Clone ID: LIB3145-033-Q1-K1-H7
tcggccacgccttcggccacgccgtccgattttttaaggggaaccaacccctccagggttccggggtttttggcccaaataagccttaattttaacctcgaaaagaacctttgattggggtt

SEQ ID NO: 34031 - DNA, 176 bp, Gossypium hirsutum
  Clone ID: LIB3145-033-Q1-K1-H8
acgcggacgcgtgggaaacccagttcactcgttcaccccactcgcctgttatagaatctgcgtgagtagcggaagcccatttcgaggatgttgctttgcctgttgtggatatgagtgataaatagctggtaacccgaatcaaggagtactcataagggaatctagaggcaatcctt

SEQ ID NO: 34032 - DNA, 409 bp, Gossypium hirsutum
  unsure (1)..(409): unsure at all n locations
  Clone ID: LIB3145-034-Q1-K1-A1
gagaaaaatggttaagccaaatttgtattttagtaggtgaaagcgttggaaaaaacatgaaatggccggcaagcttcttctcatgcggaacaaactgcagtagctggcctgcgatgggaggaaagcttccagggccagcgtcaggaacggcaccggccaatgcctatacgacggagagtaaccccattgtggtgatcggtgaacagtacattgccccataccctgtggatcttaaaatacaacacacggtatttacggttgctgaaaataacttcgatatcaccgacgttaatgataaccctattttcaaggttaaaaataagttgttcagctttcctgatcgccgcgttttgcttgacgctgctggaaatcctctcgtttccctaaacaaaangtgaagtgtgaggaa

SEQ ID NO: 34033 - DNA, 317 bp, Gossypium hirsutum
  Clone ID: LIB3145-034-Q1-K1-A10
ggaaaacccggcccgaccgacgcatacgcccacaccaccgcccacccctccgttcatttttaaccagcaatatgaaattcacgaggcgtttttttattttaatcggcaccttccattttaccaattttgaaataccataatagtttttataataaaacttttttctctacttttctaaatctcactaaatatcttttcttcataaagaaatatctgaagttaagttcttttccaaatcctcaattctaataaattaataattttatcaaaatttccatattaccatcttccaactataattaactccttttatcatt

SEQ ID NO: 34034 - DNA, 275 bp, Gossypium hirsutum
  Clone ID: LIB3145-034-Q1-K1-A12
ggaaaacccgggccgacccacgcgtacgcccacccgtactcaatcacaaactcttctttcacccacccactaacttctcttgtgggggtcttcttaaactccagagccctcatcccaccattctcaacttaaccttcattcctgtaatgctcttccacatcgaccacaagtttcatctcatgtctaccaatctttcctttattcactgatacgtgttttacactttataataaagaaaattctttctatctcaacaacacctatctccactttaa

SEQ ID NO: 34035 - DNA, 268 bp, Gossypium hirsutum
  unsure (1)..(268): unsure at all n locations
  Clone ID: LIB3145-034-Q1-K1-A4
tctcaagtaatcttcacatgctcncacccctataacaatgaatcccaccatcacctcccgtgagatccatactgccttaagactggtcctccctggggagtccgccaatcacgctgcttccgaatggactaatgctgttactaagttcactaattcttactttccataattttaaaatatcaaaaaatttagtattactataatttattttatttgagaactgcatttagctagtttaagatatatttttcatgccttccttattaat

SEQ ID NO: 34036 - DNA, 424 bp, Gossypium hirsutum
  Clone ID: LIB3145-034-Q1-K1-A9
ccgggccggccgcacgcgtccgcccacgcgtccgaaaagaacaatgttttttgtttatccagatccggatcaacccgggccggttgatcacttcgaccgtcttcctcattcggttcttcttttagtcttcaacaagatcggtgacgttaaagctctcggccggtgctgtgttgtttcccgtcgtttccattcccttgttcctcaagtcgaaaacgtcgtcgttcgagtcgattgtgttatctccgatgacgattgttcatcttcttcgtcttcatcggataaatcgcgtgctctcgtcggtcctttttcgaatctctttcgtcttgttttcggggccattgttaaaccgcttcaagctttgggtcaattccttggtcctaaacggtcggttttgaatgaaaccctaaactcccttttctcgtct

SEQ ID NO: 34037 - DNA, 392 bp, Gossypium hirsutum
  unsure (1)..(392): unsure at all n locations
  Clone ID: LIB3145-034-Q1-K1-B12
acatcanataactccncttccaatttttttttatacttcaaaacctctcaccacaggtccgcttataccctaagcctaatcccctcaaattctttaaatccatcacttatactcgctctctcctcccttttctcctcaaacacctttccctgccccttcctaataactccctcttctcatttcgctaaggtaatatacccatcacgccagaccaccttcccttcaccttctcacccattactgctctttccatattcctcatcaatgaaaccctattactccacgttccacaacttataccttaaagagaaaaaaaaagtttttcttttaaaaaaaattcaataaattattaactataaaactttttattatgtccaaaataaaataattta

SEQ ID NO: 34038 - DNA, 286 bp, Gossypium hirsutum
  unsure (1)..(286): unsure at all n locations
  Clone ID: LIB3145-034-Q1-K1-B6
gaagtnntgtaagttacctaattanntttttnnctttgcttttgccattantnncccagcnnccttgcaagggtcaacaaatcgngagnaaatatgaatgangnntattggaaaacannacgtgaatnnntggaagccttaaaagaaaacaaaccgaagcaggccattattaaaaacccaatcctnnngaggaagtnntacccagnnnatgtcaaccaaaccttgtttccaaaggtcgcttgatgaagggctaananntagcacaagaacgaacatnnttgagggc

SEQ ID NO: 34039 - DNA, 328 bp, Gossypium hirsutum
  Clone ID: LIB3145-034-Q1-K1-B7
taccacttacacttcaagctcatatttgctttcatctcacccaaatagactagtcctggcgttggacttcttaattatctactattagatcttaaattcttcctagagggcttgccatcttgctaaacaagcattctatgaggctattgctaagcttgctggccttaatgaacaatcttacaacgatagcaccctaatcatgcaccttcttagggacaacctcaccttgttgacctccgatctgccacaggaacgaagtgatcaatcaaaatcatatgaacctcatgctgagagttcattggatgaaagagtattcttttaaaactgg

SEQ ID NO: 34040 - DNA, 395 bp, Gossypium hirsutum
  Clone ID: LIB3145-034-Q1-K1-B9
aggaggcattgacacatgaatctgtgcatgagtcctactgttaccagaggcttgaatttgttggtgattctgtgttggatttgctgatcacccagtatctctacaaccatcacactgatatagatccgggtgagttgactgacctgcgctctgcttcggttaataatgaaaattttggtcaagttgccgtgcgccatgaccttcataagcatcttcaacattgttcaactttactatcaaaccaaataagtgaatatgtgcagtccttcactgaatctgataacaccaccagattagatcccagcataaaaggtcccaaggctcttggagacctggttgaaagtattgttggggcaattctgattgatacaaacctgaatcttggaaaagtctgg

SEQ ID NO: 34041 - DNA, 294 bp, Gossypium hirsutum
  unsure (1)..(294): unsure at all n locations
  Clone ID: LIB3145-034-Q1-K1-C11
acaatanatcccaagcgcaacgctactttttttaatgaaatctccnatttcatgcggacgagtttgcaacaatgggtacacttcatgacatatttcatgtaacgaaagtactacaaggtgcacaacctgttccgtttcttgactccatacataggataagaattacaattaatacatcatggtacttggaatattttcacgaaaacattcaaccttctattatccacagatatatctaatctatcaatttccatatatttgaagacttcaaaactaagattgcatattttaacc

SEQ ID NO: 34042 - DNA, 406 bp, Gossypium hirsutum
  unsure (1)..(406): unsure at all n locations
  Clone ID: LIB3145-034-Q1-K1-D12
cggcccgacccacgcgaacagttttaatctaangttttatgatttttacttttatgtccaagtgaaactttctgtctgtctcttttatttttgtttaactctcatttcaagacgttctctacattattctgttacaaggttatatgctcttacaaacaatattttatcttgagtgcctttgcatttttgttctctaagctaatttagtacaatcaaactctggttgacaacattgctgaattataaagaagtaaatgtctcttctattgtcaatgaatctaatatcttttattgaaaatgtatcattctatattatgcatgatattgaaagttttttataagattcaatctcttcaatctttaaaaaccaatgtttaacacttcttctaatttaattttatttaat

SEQ ID NO: 34043 - DNA, 353 bp, Gossypium hirsutum
  Clone ID: LIB3145-034-Q1-K1-D3
agacgcaggacaggaaaatcgatgaaccattactaaggaagcttccattgccctctaagagagagaagatcatgccgcttggtattcaggttaaatgtgaccaagggcctacaatttggttaccaagatgacaagctatcgattcaactatttgagtcaccaaatcattccgagcatggatgaccctgataagtcattttactttcacgagaagattcaaccatatcttacttttccccttgtggggatctctatatacgtgattcagactaaggcctgcagtctatacatttatgatattgttactatatgagctttttatcatccctgtctgaaatgacatgtatagtgct

SEQ ID NO: 34044 - DNA, 373 bp, Gossypium hirsutum
  Clone ID: LIB3145-034-Q1-K1-E12
atcctaataacaatatcactttttttccttctgaagaatattaaatattggcgccgttttttaatgtggaagggccatcttttatttctaccacaaagtaatcctttgctttctccttctaaatctatgtatccattgaattataagaacttcaaattcatatcatattgatcattctccatattaaattacttttatagttttaaattaaaataataaaaaaaactgttttgtttattataaatggtacttactttcttgataaatattctttatgttaaaactagcttttattctcttttatcttccttattactatcattaatttctaactataactttcaaattcttaataaaaaccttttttcatctt

SEQ ID NO: 34045 - DNA, 343 bp, Gossypium hirsutum
  unsure (1)..(343): unsure at all n locations
  Clone ID: LIB3145-034-Q1-K1-E3
aaacataatcggagagatatagattctcattcccttatatgaacacagaactacaatgcaagagagagagattacaagcaagcccacattttatgcattcaacaacaacatttatcaatactacaatctatgctctgactatttgatccaaacccaactaatgtgtaagccaaagtttcaccccaaaaaaaaggaaaaagatttaaatcctacaaacattaacctttatttagcactaattatttagaaaatgaacgcgtaagtcgtcatggtgatagttntaattcacaggattgcaggggttgtgttgggcaatgttcgtggagcagggaacgaagggaaa

SEQ ID NO: 34046 - DNA, 389 bp, Gossypium hirsutum
  Clone ID: LIB3145-034-Q1-K1-E4
ttcgctccgcacagtccttaggaaagttagtgatgatggtggttccattgatgccaaccggcaggaatctgctgctgtttctgttggtgaagggacaagcagtagctcctccactttaggtgacaactacgtggctttatttgtacggatgcttgggctagaccatgacgctcttgaccgagaacaggcaatagttgcactatggaaatattcactaggtggaaagaattgcattgatgctattatgcagttccaaggctgcataaacttaactgtgaaccttcttaactctgagtctagtgctacatgtgaagcagctgctggtcttttacgatcagtatcttcaatcaatttgtacaaagatatagtagcagaaagtggagcaatag

SEQ ID NO: 34047 - DNA, 377 bp, Gossypium hirsutum
  Clone ID: LIB3145-034-Q1-K1-E6
aaggaatctcttttaatattcataaactttttttttttcccatttcctatttaaactacggtgcattattttatagctttagcatcaatatcctattaaaatatataatacatctcttaacatgataatattatattttctttctaatctttattcacaatacccaaaacctacctattctggcttttatcataagcaccatcaaattttatcttgattaaatttttctttttttactaccatctttttttttcttctttcacaacataatattttacctttataaacgctaaacttatctactacccaaatccttcttcacatctaagacagcttatattgactactaactttcagttctatatattcaccctttt

SEQ ID NO: 34048 - DNA, 374 bp, Gossypium hirsutum
  unsure (1)..(374): unsure at all n locations
  Clone ID: LIB3145-034-Q1-K1-E8
cggacgcgtgggggaatttgcagaattttttgtactatgtccgctcgaaagttccaccggtatcaactcccggtacccaccgatcgctccagatagaaatttagtctctcctaccaacacgccagcataagccatctttcagtaacccttttgctgcccaaatgctcttccaggccaatgaaaaagccccgtagtacgtactatcctagaaagtgaagagatatttggtagactgtcgccgtataacagcctaattttcagtggtgtcgggaatagagatttgagatcactaaatccgacgagtgagtcaaaaatttaataaattaatacctatgagtcaaatgtgaatatagaagtatttttgaaaaanaaaa

SEQ ID NO: 34049 - DNA, 395 bp, Gossypium hirsutum
  Clone ID: LIB3145-034-Q1-K1-E9
aaaaataaaaattaggagtatattgggcttagtaaccggggtggggtgcttggctggcagctctcttcgcgtcaaaaggttcaatatattcctaagtaaaaataaatataaaaattaaaattctattaaaaaaagaaaaaaaaagacatattaataaagtgtgaggactaaaggtagaaacgaatagggtgtcttgataggtttggtaaattacctaattttcatgaaataatccaagttgatcttaatttttgtgtgtgttaattggaatacttttttttcaattttacttaaagcaagctaagggttctctttatttttcacatgcattttgactagtttttataaaactttggagtagtatttctttcatggtagaatttaattttcgcagt

SEQ ID NO: 34050 - DNA, 373 bp, Gossypium hirsutum
  Clone ID: LIB3145-034-Q1-K1-F5
gcaagaacaaaaatttcatttgaaaccccgttttcttttggtctcgaagcgattcaaaagggcgggattctattttttagggtttgggttttcattgatttttagtgaaaaaattataaaaaaattatgggaagaggtagggttgaacttaagaggattgccaacaagatcaacaggcaagtcacttttgcaaagagaagaaatggtcttttgaagaaagcttatgagctttccgttctttgtgattcttcaaactctcttattatcgttatatatgtattcaggatttttctgggctcacccccttttacattcgataacacattctagatgtacctaacatgcaactatggagctcctgagccaaatgtgt

SEQ ID NO: 34051 - DNA, 323 bp, Gossypium hirsutum
  Clone ID: LIB3145-034-Q1-K1-F9
aggcaatcaatgtcatctcatgctggtatgaagataagactgaatgggggcaaagtgtgggatggatctacggatcagtaactgaagatgttgtcacagggtataggatgcataatcgtgggtggagatctgtttattgcgtaaccaaaagagatgctttccgtggcactgctccaataaatatcactgatatacattaccacgttctacactctgccactgtgtctggcgagatatatttttcacacaacacaatgccctgttaggcagcccgaggcttaagtttctacagaggattgcttatcttaatgttgggatatacc

SEQ ID NO: 34052 - DNA, 306 bp, Gossypium hirsutum
  Clone ID: LIB3145-034-Q1-K1-G1
aagcataagtgtatcattaaagtgggtgggcatattaccttaggagttgcattctggtccatcatgtgttgaggggggttgcactggtgctgacactgcctgcaagcaagcaacatcttttctccggtttgttaattatgcatcttaaatcttactatgttcaattttgggtttaattctcatatgtaactgatatatttgaattacatgatattacaattcatgaaatgtaactcatgctggaactttgatctttctaaaacaaataacacctccccaaattttttaacttgcctgcctttctat

SEQ ID NO: 34053 - DNA, 267 bp, Gossypium hirsutum
  Clone ID: LIB3145-034-Q1-K1-G10
aacaccttcaagggcggatcatatttttcttacaaatgcccatctttcatcaaccgtagggtatctttcttgacgatggttctatcatgagtcttttttatgtgaattctggcattgttggactgctaactttctagtaagtgatgtagtgaatttagattttagttaatgtgacgttttaatttatgaaatctttatttttactttttatatttaagttgttaactttctgttttatttgattataaaatatgattattattatca

SEQ ID NO: 34054 - DNA, 390 bp, Gossypium hirsutum
  Clone ID: LIB3145-034-Q1-K1-G12
cttgggtaaactcacgcttacaactgaactttgtggccaacaacttcacacttaacaggggaagagataagggttttaccaggattagaatgcctacaaagaagcttcccatgctttagaaatgcttcacgatatgcaaacttctcgctcaattgtggtggaccagcaataatagctgatgggatacagtttgaggctgagaatagaacactcggcccagcaaaatttaatgtaaccagtacacagaaatgggcagttagcaatgctggcttgtttgcagacagacaaaatcaacagtttgtggaaaacaatggaggacaagtgagaagtacaaacactccagagctgtatgagacttcaaggctatcccctggatcactcagatactat

SEQ ID NO: 34055 - DNA, 359 bp, Gossypium hirsutum
  unsure (1)..(359): unsure at all n locations
  Clone ID: LIB3145-034-Q1-K1-G7
cgggccgacccacacaaacgcacncaattaccaaccctaaccctattttttcaaccagaattcaacattaattgggggtgttcctttttatatgctaatactaccaatctatcctttaaatccaaagctgtaaataaatcttttaattctgccaattatccaaacaatccaaaaattcctactatttccttctttctttatatattataattccattagcaatacattaatgatcaccctaaaaacaaattctttacttttttcttctaatctttttacattaattaaatatctttatttaaacttaaaaaacactttatttttctaaagcataaaattttaatgatttatattaaaat

SEQ ID NO: 34056 - DNA, 392 bp, Gossypium hirsutum
  Clone ID: LIB3145-034-Q1-K1-G8
ttttgcaggaagtacaggttcggattgctggttttggaccagaggaggatgagtgggtagacattcgcaagcatgtcaggcaacggtccctcccgtgtgaagcttctgagtgtgttgcagttcttcctggggaccttgtactgtgttttcaggaaggtaaagatcaggctctctactttgatgcccatgtcctcgatgcgcaaaggcggaggcatgacatacgaggttgtcgttgtagatttctggtgcgctacgatcatgaccagtctgaggaaattgtacctctgaagaaggtttgccgtcggcctgaaactgattacaggttgcagcaactgcatgccgcaagtaacttatccaatgatcaacacaaaactagcaccgatcaatctact

SEQ ID NO: 34057 - DNA, 359 bp, Gossypium hirsutum
  Clone ID: LIB3145-034-Q1-K1-H10
ctattcttcaaatgactaaaccggtacgtttatttaaacccacacccactacataacaccacaagaccacaacaggtgatcagaatccttcatctctgtcttacacagtggacaagatactttcacactcaaagtcctactctccaaattatcaaagtgaggcaccagattattcaccattctccaaatatttattttaattttccctaaaatgttcaactaccataatactctgtaaaaatctttgtaatcctcatcaataaaggacatgtatatattgtcctgtaaatattttttatttatgacccgatacccactcttaacaatttattccccataacctttatttttccaaacca

SEQ ID NO: 34058 - DNA, 252 bp, Gossypium hirsutum
  Clone ID: LIB3145-034-Q1-K1-H11
ataaacaacaatccgaaaatggtgaagctcctgggtcatatattgttgggggatcagcaggggggtggaactttatcacctttacaggtaacaaatcagtctattatggagtaaccaaggaattatttcgtagtgctcaagcaagtttaggtgagtgacgtgtttctgatatgtattgttggctaaataatgactttaacagtaaatgcttttggagctctaccttaatattaacatcaaatgattgtactg

SEQ ID NO: 34059 - DNA, 393 bp, Gossypium hirsutum
  Clone ID: LIB3145-034-Q1-K1-H7
cccacgcgtccggcttcctgttttctctttcgctttgttcctctccacttttttcgagtggataaatacgtaaacaaaggcttttctctttacaattttgattccattgttgatataattaccatatacgatattttgtaaaactgctttcatggggtttccagttggttacaccgaagttttcttgccgaaactcttcgttcacacgctttcctttctgggtttcatccggaatctgatctccgcacttttaaatttcatgggactcaccaatttcctcgaaacagacgcagtctggcccgaaaacccgacccgaacgacacccgagcatccgcccgtatcagctctcctgatccgggagatacttcccgtcataaagtacgaggagctcgt

SEQ ID NO: 34060 - DNA, 225 bp, Gossypium hirsutum
  Clone ID: LIB3145-035-Q1-K1-A11
acgcggcggaaaaggtttcgctagtgcatcttcagccgcagctaaaccccgacattgcgaggggggtggcgggtctttatcaatgagccaaattgtcttatacatctcgatctaaaaccaaggaatgtgcttttggtcaactccagagctggtcatttgaaagttgttgacttttgtccgagcataactcttatggtatataattgtcttgtagttatctaatat

SEQ ID NO: 34061 - DNA, 315 bp, Gossypium hirsutum
  Clone ID: LIB3145-035-Q1-K1-A12
ggaagacccacgcgtccgcacagctgcattaaggcaatccctttgaacctgcactttctgctacgactgtacataatcaggcaatgcacatttcaaagtccgaagcacaagaagagagggtttggccaaatgtacctgagcatccatcggaccacaccagaatttggtctgacctctcaggaagtgcagcaaaaagcagttatgagagtgaagaaaggcatagtgaaaggacagcagaacttggatgcttgttatcagagggttttacaaaggattagcatgttgcatattacaaatgatgcaccgttttatgaa

SEQ ID NO: 34062 - DNA, 329 bp, Gossypium hirsutum
  Clone ID: LIB3145-035-Q1-K1-A6
tccactcttacgatttctccatcaaaaaagtgcttatctctagacggagaagctgagaggtggcaccatctaaaacgctggaagtgctgctggctgatcaaagaccaaattaacctatatctccacctagaaaaaacgttcgttactatgctgtgaaagctgtatacccagctttatatcacattttcactgagaaagctactgtgtgagctttgttccgctctcggaggcagaatatgatgttctaagatgctagcataggaggtaggagaagtatgtgacctatgatggaaagtgtgaggctctgcgctgagcaaatagatgcacgc

SEQ ID NO: 34063 - DNA, 421 bp, Gossypium hirsutum
  Clone ID: LIB3145-035-Q1-K1-A7
ctcttttttaccttactaactcatactacaatattaaatattattattattccctgtgtataatatgaacgatggagagggcgctcaaagactgctcatttctcatcaccttcttccgattatctgatcccttctttcacttccattcaaaagcttgaaatttttatggttttgaaagagcttctgaagttgacacacacacacacacatatatagagatagagagagagaaaaggatgggattgagttgtaaacaggtttccagtgatgaggttgagtggatccagggccagtctttgttgcaggctccaactatggagcgtccaaaagcttcatcaatgaaaaggcgacatcatcaagaaaaccagctgcagcaatcggaaccgccattgaagtgtccaaggtgtgattctttcaacac

SEQ ID NO: 34064 - DNA, 367 bp, Gossypium hirsutum
  Clone ID: LIB3145-035-Q1-K1-B1
cccacgcgtccgcccacgcgtccgagccaaatctatggcaagacccttgctcaggacctcggaggtgagggaattttaaaagataccgtagaatgcctatgtacccctcaaacatatttcaccagggtattggaagcagctgtgaaggaggacgcagatgaggaatcaaaaagagcactgactcgagtgattgttactcaaaaggagcagctggtgcaggaaggctttgttcctaataaaattcaagacattcttttagggctttacaaggatttcttgcttgcctccattgcaagtggagatatcaaataaacaagaaaccccactcttaaattgttcaataaaattatgaattaccttggattcc

SEQ ID NO: 34065 - DNA, 437 bp, Gossypium hirsutum
  Clone ID: LIB3145-035-Q1-K1-B11
gggaagccacgcggcgaaacaatgtttgcagctacaaactttaacagatgagcttttacactccactttagcttctagatatgtgcgcgcttttgtaccaaggttcaagatgccaaataagtctattccaaaggacgcggcgtatcaagtaatacatgatgagcttatgctggatggataatccgaggttgaacttgactttttatgttacaacatggatggaacctgtgtgttgttagcttatgatggctgcatttaataagaactatgttgacttggatgaattccctgtcaccacttgatcttataaattgatgtgaaaacaatgaattgtaatcatttttttaatacaacaagatcattgttttaatgtagttcaagaaaaattgattttatataatctgatatatatatccttatataatgtataattaatt

SEQ ID NO: 34066 - DNA, 184 bp, Gossypium hirsutum
  Clone ID: LIB3145-035-Q1-K1-B12
gtgttctgtatcaacatagtgtttttaaatgttagcttacaccatatcccgttatctctcgtgcagagctttatttcattcactccagcgaccaccaattttctgcttgtgtcaagtaaggagaaagtactttgtcaggcaaataatagcctttctggttcctaattgcagaagaattttagtt

SEQ ID NO: 34067 - DNA, 245 bp, Gossypium hirsutum
  Clone ID: LIB3145-035-Q1-K1-B2
cccacgcgtccgcccacttgtccgtccactttttctttgacgcgtgggcggacgcatgggcgtacacgtgttttttcatcagggtcagcttaacaaattagtacatgtattatgtatcctaaataatgatagataaaatcctacaaatacatccatataattggatcctgaattcaaaaaagttgttaaaattttaatgtagattgaaatcaattttcaagcattattgagattgattgaattaa

SEQ ID NO: 34068 - DNA, 411 bp, Gossypium hirsutum
  unsure (1)..(411): unsure at all n locations
  Clone ID: LIB3145-035-Q1-K1-B3
cgacccacgcgtccggcgatggatcattcaaattcaaatttgaagtatccttattctataacatagctaanaatatgttctggctcttatagatggagtgagctacaactgcanaaatgttagaaattaagggacccaactctttttcctcacttacattcaaataagttaaaatcttttcggctgataatctgtaaacaactcaatgatcccttaatttcttttttcttatagtgtattttcattttgctggctattgaattttttaatctaatttttgtttataatttgaatatcactgtttaaaatcaagnctcataatttaaatatctataatatattaaatttttttactttttatatttatcatcttataatatataataaaagggcggcccctttaaagaacca

SEQ ID NO: 34069 - DNA, 329 bp, Gossypium hirsutum
  Clone ID: LIB3145-035-Q1-K1-C1
aaaaaaaaaaaaaaaaaataaaaataaaaaattaaattaaaaaaaaaaaaaaaaaaaaaaagagaaaaatataaataaaaaaaaaaaaaaaacaaaaaaaaaaaaaaaaaaaaaataaaaaaaaaaaaaaatggggcgccccttttaaaaaaccaaattttacttccccttccttccaacttaatactttttttatggggcacccaaaattaaattaattgcccgtggttttaaaacatcttaactggaaaacccttggcgtccccaaatttaattcctttaaaacaaatccccttttcccaaattggattaattcaaaaaaggccccc

SEQ ID NO: 34070 - DNA, 414 bp, Gossypium hirsutum
  Clone ID: LIB3145-035-Q1-K1-C8
aaaaacctaatcttcctatctctcatattctgccgaatctgacggttcttcgcccccaactgccatttcaccaccgtggttggcggatggcgtcacacgagggcctaacccgattccctttgaagccacatcctcctaatccccatctaaacttcgatttcaacgaagcaaacaaggattcgaaggccattataaagataagtccctcccctttatttgttttacatgcagtagataaatcaaagaaatagaagcaaaatcgaaagaaaaacgagattccaaaatcacctttctcaaactgatttttaatggttcttgtatttgtatccagtatgcgtaaatgtgaaaaaaggaaaggaaaggaaaaaagagtcccctcttagaatacaatcggtttccttttataaccgaatc

SEQ ID NO: 34071 - DNA, 259 bp, Gossypium hirsutum
  unsure (1)..(259): unsure at all n locations
  Clone ID: LIB3145-035-Q1-K1-D10
cgcggcgagcataatggttgntaaaagatttttgttttgggatatacagccagtggaaagtcaactgtaaatgaagttttttaaagactggttgagccaacaaaatgttaattttttattgataaaatatatatcttcatgctgtctctaaatgatcttaaatcacgctttagagacatccctcaagaaccagacctttaaaaaaagaactgtattaaagcaacaataaatcctattaatacattttccttaaataaaa

SEQ ID NO: 34072 - DNA, 213 bp, Gossypium hirsutum
  unsure (1)..(213): unsure at all n locations
  Clone ID: LIB3145-035-Q1-K1-D12
acccacgcgtgcgcccacgcgtcctcacaaatacacttctcttatttnatctttaaacagctctacatctttggacatatggcaagttggagtccacaactactctgtgggcacgaccagaccaatcgttaataatgaattctccactgataccataccatgccagattgctattataattattaggaatgttgcaatagcccacaatatgtt

SEQ ID NO: 34073 - DNA, 296 bp, Gossypium hirsutum
  Clone ID: LIB3145-035-Q1-K1-D5
ggcccacgcgtacgcccattcaaacatcttatttaccattaccttttcaacctcacaaaagcattaccagggagggaaattaagacccagctgtggggcacaaaatcataaactgcactactactaatactacatatggaccttgcatcaaaactttgtcattgctaacataaagagccattatcaataatacacatcgatgatattaccaccaataatatccatttccatatactcatttacaaacaatagaccccatggactaaatccaatagataagaaaaaaactacttaaa

SEQ ID NO: 34074 - DNA, 178 bp, Gossypium hirsutum
  Clone ID: LIB3145-035-Q1-K1-D6
cccacgcgtccgcggacttgtaaaagctttttaattgcaaatgggattctctcttggcgaccatcttttttcttaactttggagcccaacccttcattggttggtcccgtaggcgacccgaccggccaaggttttttttgttaagggggggtttttggtcaaatcttcccggggtttc

SEQ ID NO: 34075 - DNA, 436 bp, Gossypium hirsutum
  Clone ID: LIB3145-035-Q1-K1-D7
cggacgcgtggggaaaatcacctttctttttttgctttctattgcttgtgttcttgtccgggcgtaaaaaaaaggaacctctttacaattgaagatagtaggctttatagccgaaaataaaaaataaaaaaacaattttcattcctttctatttgctgttctgttgtcgttttttgtttgtatttgctgccgtgttcatcctttttacaggtacgagatgtgctggcgcgcgttggccctcgacgtgtggcgtacggaggcgcggacgtggtcgttcggggctgaaggctcatggaagctgggactgctgcggcgtaagcagacggctagagttctgaagtcttttgggccatttgggcctcgtaactttggactattttgtaaatgggctagggtattagttataaggtcatgtaattgggattgggtattgggc

SEQ ID NO: 34076 - DNA, 158 bp, Gossypium hirsutum
  Clone ID: LIB3145-035-Q1-K1-E10
aaccgaagactctggatacgcatgtgttagttttagcaatcagttggagtttcctaaagattgatcatagtgttgtcagattatagtacagaggagttattgagcttgttatcagatgtgcagctagttttaaaatgtgccatgcaattttacggttt

SEQ ID NO: 34077 - DNA, 138 bp, Gossypium hirsutum
  Clone ID: LIB3145-035-Q1-K1-E11
cgcgggcggctcctgcttatagtatttatccttcccattcccctataaacaccactactattagatcatcaggtcacctgtagatctaagaattgcttttaagctcaagtctagaaccaagcagccaacataggcctt

SEQ ID NO: 34078 - DNA, 235 bp, Gossypium hirsutum
  Clone ID: LIB3145-035-Q1-K1-E12
cccacgcgtgcgtgcagatctcttttctttcacgatttgcagttcactttttattccccctatctctttcacgcgtaacagtcgtctttaaaaaacgtataggccaactaccaattgttcaagaggccaagtttataaagtggttttgtatgcccaaggtaggaacaaggcgtttttacacgccaaattagcatgctacataagaaggagaagcgcctaaattcttccctaatca

SEQ ID NO: 34079 - DNA, 335 bp, Gossypium hirsutum
  Clone ID: LIB3145-035-Q1-K1-E3
gacgtgcatgcggattgcttattggtgcagttgttaacatggggcctgatctgtggaaggctgctgccgctggattgccttgagacgatgtcctgactacaatgctcgaccctactatccctcttacaacttcacagtgggaggaatggggtgaccctcgcaagggctagttacactcatatatgaagtcgtattcctctgtagataatgtgaaagctctaaagtatgcgaatatactggttacaagttggttacatgatccgagtggcatggactctacacctgtatagtttgtaactaaactaatggatatcaaaacagactataacatgcta

SEQ ID NO: 34080 - DNA, 433 bp, Gossypium hirsutum
  unsure (1)..(433): unsure at all n locations
  Clone ID: LIB3145-035-Q1-K1-F4
gttccttccattttcctctcttctaattttcctgcacttttttttgctttctttttctttcggttaataaagtttttcttttcctctctttcgtttttttcttatctataaaattccatcgattgttggaaagagcaagagaggaaaattaaatcaaagataaaatgattattagcaataaaggacaacaatgaagaactgtgaaaaactcgccaatttagctttagcaaaccaaaatggccttccttctttatttgtttcacctgatggattgattacagccatggcctaccgcttgcctcatgttgcttcttttgcaaaacctcaagactctgctgctagagccaacagtggatcacaggcatctaatgctccacaattgngatcccaaaactgttccagaggtttaaattcatcactgaagcttctaatg

SEQ ID NO: 34081 - DNA, 198 bp, Gossypium hirsutum
  Clone ID: LIB3145-035-Q1-K1-G11
cccacgcgggcgatatgtgtgtattaagtttagaaatccacctcaaatttagacatgcatatccggccaaggggaaaaagaacagcttaaaagaagtgttagggcatgatttttgcatgtttgagactttaatgtcaaatgtttaaattagaacaaaagagccttgtgttcatcaatcagctgcctaaatgattaaat

SEQ ID NO: 34082 - DNA, 369 bp, Gossypium hirsutum
  Clone ID: LIB3145-035-Q1-K1-G8
gggccgacccacgcgtagcaatgaatctttttacttttacattttaattttaatctattgtccctcaacctgtggtgcgggaaacatctaattcgtccgagtacatattaccactatttttaattcaaaatgtgcaattcgaatgaatgcaatacatacacctctcttaacccatccaaaagttctaaattatacttgtctcaaagttctccttgtcggtttcaatttttatttttctcctgaggattaataactttcaattggttttccacagctagatcctataatttaaaacttacatcaggctgaaaaccttctatcttattccttatattcccccttatatatatatcaggcccttacatcaac

SEQ ID NO: 34083 - DNA, 339 bp, Gossypium hirsutum
  unsure (1)..(339): unsure at all n locations
  Clone ID: LIB3145-035-Q1-K1-H10
cgcgtgcgtgatgatgctgtttcacctggacttttgcttccacttccaatacctgaattagctngggaagatatgattcatttattttgtggaaggcctgccacgctcgcaagggaagtcaacagtccttgtggtggttgatattctaaccaaatatgaccattttttggaattggttcacccttacactgctctcactgtggttcaagagtaccacactcatgtttattagctccatggcattcatgaatctattgttaccgatcgagacaaaatatttttagtgccaatttaaaaagattattttatatctcatgtgcacttaaaatgaaattaatt

SEQ ID NO: 34084 - DNA, 403 bp, Gossypium hirsutum
  Clone ID: LIB3145-037-Q1-K1-A10
aggaattgaaacgaaatgaaaaaaaaacagataagataaactcgaatatcaaccttgggggtatattttttgattgctggtgggcgttttttttttacaaaatttctcccttcggttttataaccgattacaataacaataaaaaaaagtgcttccattcctctgttgcggctgctgtttttgttgtttgtgtttgcagggtatgggtgtgtcagacgcatggagggagcatatgccggtggtggtgcgcgaggcggccgttggtttgccgagtgtgctgctgaagcttgagggctgctgctgttttctcttctctgcacggggctaagatttgggctttaaggtttgtatttaattgggtttggtcttttagtttgggccgggcataattgggcttgtacat

SEQ ID NO: 34085 - DNA, 415 bp, Gossypium hirsutum
  Clone ID: LIB3145-037-Q1-K1-A8
aacccacaccatgaatggtggagtgtgaaatctatattgacgatgttctttcttactgcagcgtatatctgttctacttcagagtggcaccaacaaggtggttcattaacagctccaatgacaacctcaacaacatggacgctatttctcccattgatgcactgaaccataccaagttgaaccaaccctgtgataccatttactaaaattttgtagcaccaaaacgtgctgaaatttgtactatagcttaatgttacgactgcagtccagataaatgttgttcttgtggacagtccagtattcgttatcctattggtttcattctaccatttcctcaaattccagacatcccaagaattccagaaatcccacaaatcccacagatcccacaaatcccacaaattccactaatccc

SEQ ID NO: 34086 - DNA, 437 bp, Gossypium hirsutum
  unsure (1)..(437): unsure at all n locations
  Clone ID: LIB3145-037-Q1-K1-B1
accgaanaaaaaacccgacccgacccacccgtacgatcacctataaatttcttacacaatttcattagagctcttttcttattatttttcggatcattcttctttcatggggctcgactaaaagcactatatttatcattatataacatgaattagccccttactttatttttacaacctattctaaatcatcctacctataagatctatctttgtcattcaaatcatttcctctctaccacattaactttaattcacttctttacaatcaaatatcctcaatatactcgttaattttacttgggacttctcttgctctccatcattatctaattttttatcacaaaaaaagtaggaaaggaaaaaagctaagtacttatttctcaccttttaaactttttaaggtaaacaatttctttttcaaatgaaaaaccttt

SEQ ID NO: 34087 - DNA, 361 bp, Gossypium hirsutum
  Clone ID: LIB3145-037-Q1-K1-B6
aaaaaaaaaaaaccctccgaatgttgagttgacatgattgatgatcagccattcccaaccaaatggacccaaaaacaaagttgtgaacacatcgggaacgggcaaccaatccgctggtgtggtgtgctgctatcatctgcaccatcttgaccgtagcagtcatcatcgcaggcattgttaccttcataggatacttagttatacatcccagggtgccttacgtcagtgtcatggatgctcacctagaccatatccagattgattatgcgggtattctggaaattcaggtaaccatactaattcgagcccagaatgggaacgaaaaggcacatgcaagcttctcggattcgagttacagctt

SEQ ID NO: 34088 - DNA, 406 bp, Gossypium hirsutum
  Clone ID: LIB3145-037-Q1-K1-C8
cataaaagcctgaagtatttgatgacttaaaatgagttgaatctgaaacaatgatggtggcttgagctattgaaagaggatgatttactaattgattatcaacctgaaaaaagctaatgttggtgtagattcattaagtcaaaaatcattgtttgctttgagagcgttgaatgctcacttgattctgaatcatgattgttctattttagctgaattgaaagctagaccagtgtttcttcaaaggattgaggagtttcaaaatgttgacccgaagttagtagctaaacgagatcagattcagagtgattcatctacagaatttagtgttggtattgatagtatattgtaatttcacaatagattgtgtgttctgaataatttggaattgaaacaaaacattttgact

SEQ ID NO: 34089 - DNA, 320 bp, Gossypium hirsutum
  unsure (1)..(320): unsure at all n locations
  Clone ID: LIB3145-037-Q1-K1-D12
agcaagtgcagttccaacagcatgattagattaaaaagaaatcgaacgcgttaactggctggttgaagttagatgtgtgtgtgtgtgtaacatangtatgatgttctcaggacttggcaacttaatagcatagcttgtaaatacactgatgtcatctcttatgtaccgtgtgtatatcatacaaaagtcaacctgttagaggctaccgtgtgtatagggttttgagtgctgcttttctgagttttggttgtatattttttttttcaaaattccttcttggggttttgatactgtaataaagtttgagttttgggtgtcaa

SEQ ID NO: 34090 - DNA, 381 bp, Gossypium hirsutum
  Clone ID: LIB3145-037-Q1-K1-D5
cggacgcgtgggcgagacttggtcaaggttatatggtgtaattcatagggcaggtcgtgctgtgagtaattggatttaccttggaggtgttaaagcttttgccgatggctctctcggttcaaatagtgctctcttccatgagccatattttgatgaccctcacaactatggcttacaagttgtggaattcgaaagtcttttcaacatgacaattgcttcagacttgtccgggcttcaggttgccatccatgctataggtgataaagcgactgacttgatccttgatatgtatgaatccgttgccttaaaaaatggaaagagagatcggagatttaggattgagcatgctcagcatttggcccctggcacagcagatcgatt

SEQ ID NO: 34091 - DNA, 375 bp, Gossypium hirsutum
  unsure (1)..(375): unsure at all n locations
  Clone ID: LIB3145-037-Q1-K1-D8
aaaaaaaacccgggccgacccacacgtccggttaaaacaaaaacttgattatcctttttctttcatacacttttcccaactaaaccgcccgcttacataaaaaagaagggctgtctcaaanaattaaaacttttcccacttcaattttattttcattttcttcataaacaacttatttaccttnaactttttatttttatcaacnacatcaccaaaaaaatcctttttttacacttttccactacttacttaaaacttcatattataaacaaatttattttcaacatccaaaacccatctttctatatacttttcaaattacacaaccatattatttttccccttcactactttcaatccaaatccttcttatat

SEQ ID NO: 34092 - DNA, 413 bp, Gossypium hirsutum
  Clone ID: LIB3145-037-Q1-K1-E3
ctcgttactccctcttcttctcatctatgtcgctcgccctaaattccccaaataaaatttggctgctcttcttgtacactgggctgtaacttcatccatctctctttcccttctccattatagacccttcttttgacttttctgtgctttctttcgaggtaaaaacaaggggaaggtaatactgctgtgaagttcagctttgggttttcttttttggtttaggtaatggcgctaaggctcgatggcacagatgtttcggggtttaaattcctcttctcattggcggtcatgtatggtctcatgtatggtttacgtaatgtacaccaagttcatcacgcctttggggatcgatgcgcctctcgatcggttctctgaagccagagctatcgagcatgttcgagtcttagcacatg

SEQ ID NO: 34093 - DNA, 135 bp, Gossypium hirsutum
  Clone ID: LIB3145-037-Q1-K1-E8
aaaaacccgagccggcccacacatacactcttataaaaatttacctcaacatctttttgtctttcatcaatacaaaactaaaccgcctcttaaacaacaataatcgcccgcgctaaaaccacttacaatcatata

SEQ ID NO: 34094 - DNA, 409 bp, Gossypium hirsutum
  Clone ID: LIB3145-037-Q1-K1-E9
ctcttatagaaggatacgagaacagcttttggacttgcagcaatacaagacttggggagtggggaacagcgatggtgtgggggataaagccacttgcagtcagatatggcctaggcatatcagatcatgatagtgaaggacgggttgtgacagcagagttcgattctttttatttattaagtgtctatgttcctaattctggtgatggcttgagaaggctggcatataggattacagaatgggatccatctcttggtaattacataaaagaactggaaaagtcaaagccagttattttgacaggggatttgaattgtgcgcatgaagagatagacatttataatccggctggaaacagaaggagtgctgggtttacaattgaaaaaaggcagtctgttagcacaaattt

SEQ ID NO: 34095 - DNA, 387 bp, Gossypium hirsutum
  Clone ID: LIB3145-037-Q1-K1-F4
attaatttcatccggtactcaacagctctgtacaactaggcatgccgtttctttaagaatggtcaggtatcggctatgaacagttgttggttcctcttttagtgggacttttattgccttggccatccttattgtgattgtttcataactttttgatagttggtgccactctacgtggtcgcatttgtttcgccagatttgattctctgcatggccatttatgacttttcgaaacgtgggttattgtggacaaggctgcttgaaagctgtttcaacaaggttagccaggttactctgtcaccatccttcggaaacgccttgccaaacgttcaagctcaaaatgctggtcctccaagcgcaggttcagctaatgttggtcgatctgag

SEQ ID NO: 34096 - DNA, 402 bp, Gossypium hirsutum
  Clone ID: LIB3145-037-Q1-K1-F8
cggacgcgtgggcggacgcgtgggatgttttcaggctggtgttggatgctctcccagggggggatgtgaaggtggtggggggagttttggtcggaaggatggatgtgatgaatctggatctgatggggagggcttagaggcctgtgaaaagaatgcatcagataaaaattcccacgacattgtaacccataaaaatgctgaggagcatcgagatcttccagtaccatctaatatttccaggctgccgttagcttatagtgggaagttcactggatcttttcctcattctatcaggtcatcttctcagttgtgcaacaccccagaacgttgctcatcagaatcttccttgggtcagtccaagttcaattcaaatcttcaggcaattccagaagatgaaactcc

SEQ ID NO: 34097 - DNA, 268 bp, Gossypium hirsutum
  Clone ID: LIB3145-037-Q1-K1-G10
aaaaacgggggccgaacgtacggaaaaaacatttattatactttatttttataaaacaaaaaaaaaaatgggcggtaaaacggaagggtgccgcgccaaaacaatcaaaacatttatctttatatccccataatatcttcctccactaatatgctcatcacctctaatcatcattcttctttccacattacatcactacatatccatcaactttttacatacactacaactttctccacttttactctttatgtctttttcctttccc

SEQ ID NO: 34098 - DNA, 347 bp, Gossypium hirsutum
  unsure (1)..(347): unsure at all n locations
  Clone ID: LIB3145-037-Q1-K1-G11
aaaaaaccgggccgacccacacgtacgacctttanacatttcaatttcacttttttttttatacacccaaaccaaaaaactgtgcaagataaaataaacattgggctggcccacaaaaaaaccaaaacacataccctattatcaacaaattcaatttctaccttcttttattgcacatctccaaataacatttttctatttcagaaactaatttattactaaaataactttaaaattccacattacactaacatattatttaactcctattcaatttttttttacttttaatcatatattaaatcaatttaataaattttttaataatctaattatttttacttcta

SEQ ID NO: 34099 - DNA, 385 bp, Gossypium hirsutum
  Clone ID: LIB3145-037-Q1-K1-G5
tcacaagttcacaagttaaagacccgagttgacaatgtggttaatgaaagtcctcgaaagggcacttccgttaatgtattgagttcagttacaccatgcaacacattaactggttctagaagttactcttctccacctggtagcggagagagaacccctgttacatctcaacgtcgttctgggggtaacatgggagatcttcttatgcctggaagtagtgcagtttctagtcatggagaggttacaccttttcccgatgcgattgatggaaccggtcagcatcttcctgtggtttcttacgacaataccgaggatgatattttgatacacaatcacgctgccaaggaagagttgcgtaattttcaaagtggtttaactcaacaat

SEQ ID NO: 34100 - DNA, 204 bp, Gossypium hirsutum
  Clone ID: LIB3145-037-Q1-K1-G6
ctggactcgacaagcaaagggtgcatcaatttgccgctacagttcgaagttgcaagcctcgagaagtttacaaaggcgaaggtataatgtacactgatgaaattatcaagaaaaaacaaggtggaaaaatcaaaatgatttgttgaagagctggatttttacttgccttctttttaggaggattgcagagactcattttttatt

SEQ ID NO: 34101 - DNA, 239 bp, Gossypium hirsutum
  Clone ID: LIB3145-037-Q1-K1-H11
cccacgcatccgctatctttatacttttttttttcgctattacaactaaattcgctggctagcgataaagaagagagtgtttgaccaaacattcaccagaatttaatctcccctattcttattgataatcacctccatatactctgaatctcataataccataacttacctaaaagtttaattcactatattaacgcctttacctctttatacttcccttctaatatccacttcttccc

SEQ ID NO: 34102 - DNA, 406 bp, Gossypium hirsutum
  Clone ID: LIB3145-037-Q1-K1-H12
ggaactgttactcaaacacaaaaaatatggtttagcttccaggcacttggaaacatggctggtgcctattcttatggggtgtgctcattgaaattcacgtatgtaacttcattttgtccaatttatctacctccaataacagtatgatacttgtataggacacacttaaggctccaccatccgaatcaaagacaatgagcaaggcaactttgttaagtgttggagtgacaacacttttctacatgttgtgtggttgcatgggctatgctgctttcggggacttgtcccccgggaaccttctaaccggttttggattctataacccattctggctccttgacattgctaatgctcgccattgaattcaccttgttggtgcataccaagtttactgtcaacccctttt

SEQ ID NO: 34103 - DNA, 215 bp, Gossypium hirsutum
  Clone ID: LIB3145-037-Q1-K1-H5
ctcaatctaataccaaatgtcctactgttgttttttaatgcattgcttgggcctttgaaggcgatgagctttgctcttggatgtggggctgctcgcataacatgtgcccatattaactcaactcggacctttcgaatgttactggcaacgaagctggaccttacaagggccacattctacatgatcatgcaatgccttgttgctatctactgagc

SEQ ID NO: 34104 - DNA, 383 bp, Gossypium hirsutum
  Clone ID: LIB3145-038-Q1-K1-A10
ataccctgaaatgtcaaaatgccccatctctctctccctctctctctttcttggtgccatcaccatgattacagccgcaaaagctttgaatctgaatatctttaattcaaatccccattctccatacatactctcatctagatctagggttcccttcattatctcaaaaacccctatatatctacaaaccttacagaaaaacactccccaaaatcaaaatccctctccaaatgattccccaatggctaagatcaccaagcagggcagcagcaacaaaccccacaaaatcaccctcccatttctctttctcttcattcaaagacattgatgctatcctcaaagaagaagaagaagaacaagtcctctatcctcaatcccctaaa

SEQ ID NO: 34105 - DNA, 404 bp, Gossypium hirsutum
  Clone ID: LIB3145-038-Q1-K1-A12
atgaaatcgggtggtggtggagattcagatcattccgatctcgaagtttcgggtagtaaagaagcagatgggggaggagttactatttccgcggaacccgaaaagagaccacgaaaacgggggagaaaaccggctaacggaagagaagagcctctgaatcacgtagaagcagagcgtcaaagaagagaaaagcttaaccaaaggttttacgccttacgtgcagtggtaccaaacgtatcgaagatggataaagcatcgcttctgggggatgctatttcgtatattaacgagctaaagataaagctacagaaggtggattcaatgaaagaagagttgcataaacaattagaagaaaccaagaaagaaagtcagcgaggaggcctcaccacgtcccacaaattact

SEQ ID NO: 34106 - DNA, 219 bp, Gossypium hirsutum
  unsure (1)..(219): unsure at all n locations
  Clone ID: LIB3145-038-Q1-K1-A7
cggaannccnnngggggggggggccacgcgtccgggcatccttgtgtttgcttcttgttagtcaacttttttatgaactttttactgaattacctctagttactatgtaagatgtttgtttgatgccattatttttgttcactaaattaatcaagttctgaaacctccagcaactgggtattttggtttgtattaatacaatttcggttggatttgcct

SEQ ID NO: 34107 - DNA, 407 bp, Gossypium hirsutum
  Clone ID: LIB3145-038-Q1-K1-B12
cccacgcgtccggattgcgattggtgcggcgagggcgcttttgtatctacatgaggaatgtgatcgagagatggtggatagagatgttaaggcagctaacattcttttagatgattactgcgaagctgttgttggtgacttcggccttgcaaagctccttgatcatactgattcccacgtgaccactgctgtccgtggtactgttgggcatattgcaccggaatacctctcgactggtcagtcttcggagaaaaccgatgtgtttggattcggaattctcttgatagaactcattactggaatgagagctctggagtttggaaaaactgttggtcaaaaaggagcaatgcttgagtgggtgaagaaaattcaacaagaaaagaaagtggaagtactagtggacagag

SEQ ID NO: 34108 - DNA, 346 bp, Gossypium hirsutum
  Clone ID: LIB3145-038-Q1-K1-B4
gctacacgttcagtagacttttccattggtcagatgacactttatggatgactgggtggatttgcatatgggggcaagaacagataactttcatttattatgaccaggttctgggcaaggcttactcacatatgagctacaaccaccatacctaacatggaaatgaaatacctattgctaaatgcaccactgaaagaactcaatattcaaaaactggtatcaatctgaatgggcctgccacatggatactctgagcatgataatggacccctacaggacccatataccacaatgaatcgatcgaccacaatgatgattgctatgttcgagattacttacagtgcat

SEQ ID NO: 34109 - DNA, 400 bp, Gossypium hirsutum
  Clone ID: LIB3145-038-Q1-K1-B7
ttgataaagagctacctggatttatctcgaaggaggcccttcttcacggagttgagactagaactagctggtggatgcagattccacgtgacagtgacacctacgagagcatgtctttaagagggctctacccagttggtgaaggagcaggttatgctggtgggattgtaagtgcggcagttgatggcatgtatagcggtttctccgtggcacaaaaacttggtttggttcaatggtgacataaagtcagttttaggaaaggctcagagtgctggaatggtgaagtactagaacggatttattgcgtttgattttataacgaatggtttcagatgagtacatgctccattatcattgtaaagctctacaaaattgaggaagatgacgaggggacttcaaa

SEQ ID NO: 34110 - DNA, 202 bp, Gossypium hirsutum
  Clone ID: LIB3145-038-Q1-K1-C5
cccacgcgtccgcccacgcgtccgatttctaccgccggccaacgagctcatattgagcgtcgcttgttgtgctcctgcgcctttggaacttgaacttgttaacctttaacaataaagctggggaggggacatgctaacgatcccacaggtgcgtttcttgaactccctgatcctaagcaaaatgctaactttttggaccact

SEQ ID NO: 34111 - DNA, 397 bp, Gossypium hirsutum
  Clone ID: LIB3145-038-Q1-K1-C7
cccacgcgtccgcagagtttcctttaatattttgggctatcctcttcgcccaggggagactgagtgtgcgtatggtgtaagaactggacaatgcaagttcgggagcacttgtaaatttcaccatcctcaaccaactaatatgatggtttcattgcgtggctctcctatttatcaaactgtcccttctccggccactcctggtcagcagtcacatccaggaggaattacaaattggtcaagagcatctttcattcccagccctcgttggcaaggtccttcaagttatgcatccttgattttaccacaagggatggtatcagttccaggctggaatgcttatagtggtcaactggcatcagtctcttcttcagagaacctgcagcagacaaatgtaaat

SEQ ID NO: 34112 - DNA, 413 bp, Gossypium hirsutum
  Clone ID: LIB3145-038-Q1-K1-D11
gttaaaaaaaaggggaaatctgggttcagaaatggggcattctgcagcagtgggggattatagggcggcgaactgagattacaaaggattggaatggggttgataagattgttcttcggagccctcgaggggcttcagcaagggttagcttacatggaggacaggtcacttcatggaggaatgagcaaggggaagaacttctttttaccagtagtaagccccccaaagctgtgcgaggtggaatccctatttgttttcctcagtttggtaactgcgggtcactcgagcaacatggatttgctaggaacaagatttggacaattgatgagaatcctccgcctctcggtcctaatgattcccatgccaaatccttcattgacctattgcttaaaccatccgaagaagatctcaaa

SEQ ID NO: 34113 - DNA, 401 bp, Gossypium hirsutum
  Clone ID: LIB3145-038-Q1-K1-D3
tgctagacaaacttcggagtatccaatttctagcaatccagttctagagaaagagcgggccgttggctttctctctgttgcttttgagagtaaagcttacgagaccacccgcaatcttccaccgtttcagtcacttctagacgttgataaaacaaaagcatctgaggttgatgtagaagagatttctttaaaagaggaacgtgaccttgaagttgaattttcagcgcatgctgcagaagcagctgatgcccttcataaggccaaagaattatcatctcaaggagtcaatcaagatggaacaagatggtggattgaaacgggaatcgagcaaagacctgatggtgtgatttgcaggtggacaatgatcaggggtgttagtgctgaccaagctgttgaatggc

SEQ ID NO: 34114 - DNA, 396 bp, Gossypium hirsutum
  unsure (1)..(396): unsure at all n locations
  Clone ID: LIB3145-038-Q1-K1-E11
gaactttgaatttgccaccgatactcttgaggaacttctatatgacaaagagaagctgctctagaatggggaccggggggaaactgatatcgcanataatctcanatccgaaagcctttatcgctgatgttgttcctctactttttttcttgctcagttgctgaaaataaaatgatacatgcatgttcttgcaatggcatataccatgtttttagggcattgacactgtgaatctatgatatgaattattttgtttttgctacattttaatgcaatgatggataaatgaatcatgtggaaatcccaagttcaaggaacaaattttcaatttttaaaactttgcccaatgagaaatgacaagatttttcttgttctaaattataaccattttttcct

SEQ ID NO: 34115 - DNA, 294 bp, Gossypium hirsutum
  Clone ID: LIB3145-038-Q1-K1-E4
gtcttatctccctctgctaaaaatggatcgaaagcattgcgggcttgatgttggggaccgtgcgtgtaatctcgcgctacctactaaagctcgcggcgggtctctgtctgtccgtctgccctgtgcaaacctatacggctcaactgtgccctacatcccacacttctaccacgctgcgctcgaaattgcgggtcagcccattaattgtacgtttttctcggtgtgctcgggtctcactgtcagaccggacttctcaccaatcgctccgtgcacgcactcacagagagtggcttc

SEQ ID NO: 34116 - DNA, 302 bp, Gossypium hirsutum
  unsure (1)..(302): unsure at all n locations
  Clone ID: LIB3145-038-Q1-K1-E7
acgaaattatcttgtatttttttcataatcccataaaattgtctaanttataggggggtttttaaagaagcagggtgaanctaaaaccaccccttctccaccaccttcattatattttccaaaagcttaatcttattaaaaaactttatctccaccttttcatattacaaaccttaaaaatccaaatctcttcttttatttaataaagctccatatccttaaccaaataaaatcttatgatgatcacatcatataaatattttcctttcataagtttaaaaatcaaaaacgttctcattcat

SEQ ID NO: 34117 - DNA, 397 bp, Gossypium hirsutum
  Clone ID: LIB3145-038-Q1-K1-F10
cttggattagggaaggcaggaaagctctaacacagcgtgctagtgaattccttcgaaatatggaacaagaacgggatgcattagctacggagtataaatcattgcttgagggtttcttaactcagttgcctgttcagcaacatgtagatttgaaattcctccttttccggttagatttcactgaattttatactcgacagcatgctaccatgtaaagctatcaacacgtatgggtttaaggagttgctgctcatatttgagacataaatgtagttcttcaattcactaatgtcattttcacaatgctcccacttgaatgaacaatctcttgtacacctggtgaacatttagactgaccaatttgtacaacatctcttcgttttagatgtcttttgat

SEQ ID NO: 34118 - DNA, 226 bp, Gossypium hirsutum
  Clone ID: LIB3145-038-Q1-K1-F2
attgagaaccagagaaaacgcttcacatctaccaattgatagaatgaagatgtccgtgaaacgacgtagaaaatcgggcaagaaaaaaaagaaaacacccaaaaacaaacaaaaccctaaaactcgtgccagcggcggcagacagaactgtgctaagatagtagacctatttcttattaattcttaaagcttaaggtttgatattaaaaaaaaaaaaaaaaaataa

SEQ ID NO: 34119 - DNA, 390 bp, Gossypium hirsutum
  Clone ID: LIB3145-038-Q1-K1-F3
gccgccccacccttccgaaaagctaaagcctcccctctgtgttttttccccccctttcttcaaagaaaaacgacacatttttaagctcgctgtgagccatcaccaccacacactctagattctacacaaaatttttatattatattttgggggttaaaattaatacccgccaaaataaaaatttaaagggcactttgattgtggccatcatattttgctgctgtggaaaatgggatctcatttaaatttcaagaacttcggtggtgatgggaacaacaggtcgaagccggttgtgatattcccgtttgttaggcagtcatctatatattcattgacctttgatgagttgcagagcactttttgtggacttgggaaggattttgggtcaat

SEQ ID NO: 34120 - DNA, 387 bp, Gossypium hirsutum
  Clone ID: LIB3145-038-Q1-K1-F5
gctcttgattctgcttccatctgttgtaagtagatacagatatttgagaagaaagggtgcacccttggaattatgcgcttcttggttcaatccgcccacgacaagttttttaaatcccatgtcgagagtgcccttaaatctgctcttcggaagcccaagacgaccactgttaaactaccatttggactttgtggatgtcaggaggagagtactaaagggagagactttggggaaattgaggaagaaccaagtgagcaaactcacagaaatgggattgaaaatccaaataccaggattcagcttccaatgcctctgccctcttcatcgttggtcgtattggttgatgaatggcaaaccattcaatcaggggcagatgagattgggaaa

SEQ ID NO: 34121 - DNA, 355 bp, Gossypium hirsutum
  Clone ID: LIB3145-038-Q1-K1-G1
cggacgcgtgggcaggttttgtcaatgaactgcccttcgtttacgcggaatgtttgtgaacgtgactggttaaaaaggtctgccaagatatgggaattggtgaagagctcacctattattgccgagtatagcagaacattactaagctctggtatgtttaggagataatcgttgtcaccatctgtatttggtctgttttagttgctattttcgacaatatttcaccattgtcatgtcaagctttcaaataccatattgcagttagggttgctgaaagatttgatttagtgggatatcaacattattgtcatctggtattcctggttggaagaataaagcatgagtgttgtagttg

SEQ ID NO: 34122 - DNA, 481 bp, Gossypium hirsutum
  unsure (1)..(481): unsure at all n locations
  Clone ID: LIB3145-038-Q1-K1-G5
gcgacgctcacgcgnntccgcattggcgcggatcttggtggttacccattgcttcctgtagtatgcnnatatacactgcgtgtggaacggaggaagagtgacgatatacgagcgtgtcggtgtannttattatnttagagttggtnncacaggcgagactctctcaattgacctcagagttctggagaagaaggggacctagtaaagggtgggtcttgcactcatctctaagaatcagaaaaggaagtggacttcattgttctcgannttccaagcttcnngatcctatgtttcaaaaggaagaatatatttacaaganntcctcaacattgnngcctcctgtgtacctagtcnncactcccaatcannaccgaccatcannatgagaaggggtggttaataatgttgcaaagaaagctggcgctgatagcctgccaaaaacttgctgctaaaaggatggggaattgactccttactacta

SEQ ID NO: 34123 - DNA, 403 bp, Gossypium hirsutum
  Clone ID: LIB3145-038-Q1-K1-G7
cccacgcgtccgctggtcaaggtattttcttatttgcagcaagcaagccgcaggtgatggctttttgtgactctgagtgggcttcatgtcctatgtcaaggaggttagtcactgggttttgtgttaaacttggggattctcttatttcatggaagtcaaaaaaacaaaccacagtctctcgatcgtcagcagaagctgaatataggagtatggcagtggctgtagcagaagttgtatggttgaatggtctgttgagagaagtgagtcctagtcagtttgataaagctttgattttttcggatagtaaggtagcactgcaaattgcagctaaccttgttttccatgaacggacaaagcatatagagattaattgtcattttgtgcgtgataaaatcaaggatgg

SEQ ID NO: 34124 - DNA, 401 bp, Gossypium hirsutum
  unsure (1)..(401): unsure at all n locations
  Clone ID: LIB3145-038-Q1-K1-G8
cccacgcgtccgcccacgcgtccgtctacgcgtccgtaaacataaaaaaaaaaagagaaatagaacgaaggaaaagagaaagaaaaaagaacgtancaaaaccttttgaaacttcagtttttatttctattctgatttgctaatgtgcgtaaccattacaaaaggatttctttcggtttttatagccgagttacaaactatttacttttctatttttgtccttttctatttgtttctacttcttgtcgtttcttttttttgtttttactgcttgcgtgtgattctttctttgcaggtgacagaagcatgcgatggcaagtgacaaacgagccgagcggtattggcaaatgcgagggtggcgcgcgttgggtgagcggcggctaaagagggtaggctgaggg

SEQ ID NO: 34125 - DNA, 355 bp, Gossypium hirsutum
  unsure (1)..(355): unsure at all n locations
  Clone ID: LIB3145-038-Q1-K1-H10
accctcccgtccgaattccccaaaatttgtttcattaatttctgcctcacttatagcttcttcgggtacccttaaacgttcaggcggtgttgaaaaaccntttntaaaaagggttccttcccttgctacgtccccttcttctttcaaggttgaaaccagtggtggcaaaaaaatcaagaccgacaatccttaccgaatcaatagtgatattagcttgacggatggtgttgatgccttttataaatattctcacctttaaaatgtttaccaatatctaaacaaatatattgctaacgtccatgggcacatcactggtttggacaccaacgactggtctcccactagtgatttttat

SEQ ID NO: 34126 - DNA, 245 bp, Gossypium hirsutum
  Clone ID: LIB3145-038-Q1-K1-H12
aatcctctcatctattgtgacccaaatttattttatgatcattataatgacattctacttcacccacccagccaaggaacgcttggcaaatcacgggaagaagaccctttagcttgactctacccgacttgtaaatgactgaaagggtggttaatggagctcttggcaaattgaaatccactctttaacgttttttcttattctgaatcggagcgtgcaggcccctcttttgacccaagccgctt

SEQ ID NO: 34127 - DNA, 374 bp, Gossypium hirsutum
  Clone ID: LIB3145-039-Q1-K1-B12
acggttctttacttaacatacgatccaattttatgtttcaaaaactcccatgcctttattggatggggtatcatagccggtgagcctgaacgtgccttctttcattgatacaggtagacgcatgacggtcagatcacatggcaatgcttgaaagagagggggtgctcctcgtgatatttttgtcgtcattgaagtgatcccagaccctgtactgaaactgtatgacacgaacattctctatacatgcaagatttcatacattgatgcaatcttggggacaacagtgaaggtaccaacagttgatggatcggccgatcttaaaatccctgccggtgtccatcctggaacaatcttggtgatgtcaaagaaaggag

SEQ ID NO: 34128 - DNA, 485 bp, Gossypium hirsutum
  unsure (1)..(485): unsure at all n locations
  Clone ID: LIB3145-039-Q1-K1-B2
cgnntccgtggaaataatgggtctcttccttgaaagaaagggaaatggttctcgatctggtggtgcggaccaannaataccaagggatcaatngaattgcgattgaatagacggaagaaatggccaannngatagggannaaaaattggttgatccnatatcnngaacacggtgattggtggtgttgaagaaagncctgtagagaacccacgaacaagggcgtttttactattaaggtcgcgcgaattaccagtgcataatgtaagaatgctgaacaattaaagatgggatcgcgtannatatgaaatttcaacgtttgatttcaacgtggtttagaaggttgtcatannttcgatcgagcancgtcatcgaaaagcnttaaagccctagtttgctaggtttttgctcggctatttttgcagcgaaaaatatatagcagtaatgctttgtacatgtaaagtacaaattcctctgcggattttaca

SEQ ID NO: 34129 - DNA, 401 bp, Gossypium hirsutum
  unsure (1)..(401): unsure at all n locations
  Clone ID: LIB3145-039-Q1-K1-B5
ctttttcagtgttgtgattgtagcaacttatcttttgcttggttaatgtgtatgaggttcgcaattattctccacctccgtcaatcaacaatagcatcaaaatggaagttggaattgaagattgcctgcacattgagtttgagtataataaaagcaagtaagtttaacatctatggattgtgcttaaacctggcatcataagttggcttaggtttgtgtggatttaagatttaagctggtcagcttaaactattataagtagcaattttcctagtcactttttatcacgtaggttttgattagacattggtggaatccaaattgctcangtatcatctgaaggatgttattattggtaagatatattttcttcttgtgaggatcaagattaagaatatgga

SEQ ID NO: 34130 - DNA, 320 bp, Gossypium hirsutum
  Clone ID: LIB3145-039-Q1-K1-B6
gcgaatatctttcgaagatgattgactgccattccttttcgactcctatttgaacggcttggcaacaggctattgcttcaggtgcaaatgcaaagggtatatcattatggatctctgagcacgataaaagaactttttctttcgcatctctaaccacaatacctcaagacggacgattttgactctctttgtatgcactggcgcaagtgaaaatgttaaattttaataaaatcaccaaattgcgctccagaaaacgcgacattgacaaggggtgaactactcatacacccccctaaaccactgtacgaagactatgtttt

SEQ ID NO: 34131 - DNA, 327 bp, Gossypium hirsutum
  Clone ID: LIB3145-039-Q1-K1-B7
cccacgcgtccgcccacgcgtccgcccacgcgtccggttgaagccttcaccaagagcctgaattgtgattcatagttagtgtttagtaagccagtgaatgtatgaacgaataaaatgcccataaatttatttgtttagtatattttccaaaaaaaaaaaaaaaaaaaaaaaaaaaaaataaaaaaaaaaaaaaaaaaaaaaaaaaaaaaaaaaaaaaaaaaaaaaaaaaaaaaaaaaaaaaagggggggccgttttagaggatccaagtttacgtacgcgtgcttgcaacgtaatagtttttttttaggggcacctaaattaaatta

SEQ ID NO: 34132 - DNA, 308 bp, Gossypium hirsutum
  unsure (1)..(308): unsure at all n locations
  Clone ID: LIB3145-039-Q1-K1-C1
tactgttacacctgtcccccaaaaaaaaaancttaattcttataaacatctttcctcacaacacttcttccactaaaaaacccttctattataagatcatcttcgaaacgttcttccctcaaaactcaacactatttacccttcccagaagaacaaatctaacatacaacaccgacaaagcttcctaattttatgccacttttaaaaacaacctttacccctcctccaaatcaacactttgaatgcatctattaatttactatttcgaaaacactctttccataacattcctaacaatattgtttatt

SEQ ID NO: 34133 - DNA, 400 bp, Gossypium hirsutum
  Clone ID: LIB3145-039-Q1-K1-C4
cccacgcgtccgattttttctggtctccataatggtgaacattttcttagtgttttttaaagttgtgtgcaatcatttcaccagaccatcgttgtttcttcttttttatatgcttgcagagtcttacaaaccattccttcaaatgaagcaattcatactgttgaggtaagtcttgcctgattttaatattcgttaaaattttgctacatctgtcttttgcactagattgtggccacttcaatatggttagaattcgagtatattttctaatcttgatgtttagatgaacttaattttaatattcctgttcagtgagttatgttgctctggacataacaattggtgcaaaaggaatatgtagggtcgaaagacatttagatttaactctttgtattgtaac

SEQ ID NO: 34134 - DNA, 396 bp, Gossypium hirsutum
  Clone ID: LIB3145-039-Q1-K1-D1
cccacgcgtacgatttcgagactcgattggtaggttaatcccttacccattttagattgcgttacaatctagttagtatgctagcacatatacattctaaaattcgtcatgtcacaccctacatggacaccggtgtatttcttttctagtatggccacatcaatgcaggagggaatggttgaaagcatcgaatatcaacttgaatacacttttatcatgtaaattaaaatgattggcacttgaagttttgggtcaagtaacctggttttgcctttcatttgggaaaaagtatggacctctttctcatcaatgaagctatttgtcaatttagcttttccacattattgaggttgctggactttgattgtttgtttgattgtttgtttgtttgtgtgg

SEQ ID NO: 34135 - DNA, 215 bp, Gossypium hirsutum
  unsure (1)..(215): unsure at all n locations
  Clone ID: LIB3145-039-Q1-K1-D11
tgagatgaaagcgtcnnaatttcactttttatagttgttttttctnnccggagttttccaattccaaagctgtgccactaacttggtcctggcgttaaaaaaacccccaattgtggttaatttttgtgccatataacttttaccaaacccactaccttaaaagcttggtcaccaacttccttattgtaaatcttattaccggtataccatataac

SEQ ID NO: 34136 - DNA, 393 bp, Gossypium hirsutum
  Clone ID: LIB3145-039-Q1-K1-D5
caggttaggccgcaaactattggtcaagcgagcagagtaggtggggttagtcctgcagacatcactgctcttatgattatacttgaaaccaaacgaagaaaagctcaagaactgagaagacaccagatacgtgcttctgtcatggtagatactgttgaaaacttgtctgatacattaacagaggcagttggtaagtagcagcagaatgtaagcccgtcatctaatttgaacttatgcatgtctcatcatcagtgcaatttatgaagaacaattcacgaacacatatatgcggatgagatcttgagtctttaataattagaaccttgaggaacaagtactttgaagatttttccggaggctgcaatctctcatagcatctggaccaggaatttg

SEQ ID NO: 34137 - DNA, 264 bp, Gossypium hirsutum
  Clone ID: LIB3145-039-Q1-K1-D8
cggaaccggcgacccacgcgtcggtggataataatttagatgaggtttggaccatatttatgtgctggtgaaagggtaactctgtgatcactgtaaatactgtgatctttaagtgtttctggcttaatgccatgggctatgcggttatacggatttaaaggaagctgtgcgtaaaataagtccgtgagctgcaggaatggtgtcgtgaaacagtaatagaaggtctttttatcgcttcctggactttaagttgacacatgcaaa

SEQ ID NO: 34138 - DNA, 354 bp, Gossypium hirsutum
  Clone ID: LIB3145-039-Q1-K1-E1
cccacgcgtccgcccacgcgtccgtgatgattaggtccaagggctgttcaatctatttgagacggacaacgatgggagaattagcagagatgatttcttttactgccttaggaagaacccattggtgatagcaattttctcacccaggttgctgcgtaaaaacttgtcaaaagctggcgataagatgttggatgatattgtttgatggggtggatgagccatgctgatgcagttgacttgataagatttttgtgtactagtatgttgtttaacttgttctgtacgttgcttacatggtcctaatacatgctatcttttaaataaatgcggttggtacttaattgtccttccttt

SEQ ID NO: 34139 - DNA, 404 bp, Gossypium hirsutum
  Clone ID: LIB3145-039-Q1-K1-E2
ctcttattttccttaaagaaaaacagagagaaagctctcaaattttctcttaggcctgtgccaccctcatcggagatccggctagccgaggtcgtgagttcgtcggtaagtcccctctctccctctcttgttttttaaaaaaaaaccgtttaaaaaaatttgaaaaggaaacagaacaaacgaaatccaaatcaagagaaaattcgaaaagaaaaaaaactgaaaaatcacctttcaaaacttagttccgattcttgatttactcttgaactttgtattatctccgaaaaaatatatatatcccccaaaatacaatcgattcctctctaaaaatcccccctaaaatacaatccattcttccatcgaaatatcaaaaaatcccccctcaaatactatcgatcccc

SEQ ID NO: 34140 - DNA, 281 bp, Gossypium hirsutum
  Clone ID: LIB3145-039-Q1-K1-E4
atcttccataaaattcaaataggattgcctttttaaattatctgatacgcctgcggcaagcgtcaaagtgactgtggtgcatcatctatacaagcttctatcgaataaaatgccatactttctggatttttataaaaaactcgttcatttaaaatctgcttctaatcttcaattgcaaaatcttgctgaacaaatgctagctgtgaataagggccttgaaaaggttcttcaaaaactattcgcttcacataatgatcgttatatctctttatgctttccga

SEQ ID NO: 34141 - DNA, 354 bp, Gossypium hirsutum
  Clone ID: LIB3145-039-Q1-K1-F2
cccatacttccggagcactgcactcacaatgaggcattttgtttgtcaccgagagctatcagtgtttttatcgctatggtgatggcaatatgcccctctgaattctgaaatgattgggagtttactgggccttaagtgaactttgggtggattaacatctgaacgtaacagacttggtacaagggaaaaatgagaaacgggataccttcctatatggataggatgctcggagacctatttgagctggcatgatacgacgattattattggttgacggacttgttatatggaatctaactaggcaatggtggattggaaacaagaggtattaaaatcggactacaaaggatcggg

SEQ ID NO: 34142 - DNA, 286 bp, Gossypium hirsutum
  unsure (1)..(286): unsure at all n locations
  Clone ID: LIB3145-039-Q1-K1-F5
ccgaagcaagcgcaggcgagcaacnacccttaaccagcagaacacaaaggccancagaggcggcacaggancgacgaccgggggnggnncngaancaaaancagaaagccagggaacagagaaancggccaaaaagagacagaagaaaaagaaccngacanggcggncaggggccagagagaaggacagaaccnccnccgaagaggcngcngnngnnaggaaagggacgcaccgngaagggacaaaaaccccacaanggagagaaggacccaagggggcaaagacc

SEQ ID NO: 34143 - DNA, 395 bp, Gossypium hirsutum
  Clone ID: LIB3145-039-Q1-K1-G2
atttccttgtattcaattgcagcagatatgcgtgggaaagcagcaattcttggtccactaataacagagcatgcgaaaggagggaagtgtattgttttcactcaaacaaagcgtgattcagatcggttggcatatgccatggcaagaaactttaaatgtgaggctttgcatggtgatatatctcaaagccagagggaaagaactctctcaggattccgagatgggcattttaatattttagttgctactgatgttgctgctcgtggccttgatatacctagtgttgacctggtaatacattatgagcttccaaatacatctgaaacttttgtccatcgaactggccggactggtcgtgcttgaaagaaaagaagtgcaattcttatctatactca

SEQ ID NO: 34144 - DNA, 139 bp, Gossypium hirsutum
  Clone ID: LIB3145-039-Q1-K1-G4
ccccaattgaagcatttttaaccacaaccataggtttatttaaaataaatattaataacgcttgggaaatatttcaagggaccccgtaatcccaccaaatcctgcaaggcaaggggctcttatcttaagggtcatttta

SEQ ID NO: 34145 - DNA, 363 bp, Gossypium hirsutum
  Clone ID: LIB3145-039-Q1-K1-H12
attttcttatttcatataaacattcaataatatctttcacagtaacaaatgcgtcaggtttcttaagaatggcggctcacaacaaaaacacttacctgtatctacaaacaaagaaagtttttcgattcgtcctctttaaaatcaatgaaaagaaaattgatttattatttgaaaaaactgaaaatccatctcagaactatcatgatctcacttcttcatttcccgagaatgattacctctttgcagattacgacttttattttcagactattaataattgtcacaatatcaagatcttttttattacataactaaaaactcattcaattgtccaataattcaattatttcagcacatttatta

SEQ ID NO: 34146 - DNA, 342 bp, Gossypium hirsutum
  Clone ID: LIB3145-039-Q1-K1-H3
acgcggacgcgtggggttttggcgaaccatcttttttgctagaacgatgagtaagccaaacgcgatgaagaattaaatgaagaactaaagtgattatgacttttttataaagtcaaatggtcaaataaattaatattgttagaaactagcagtacccaacttaaatcgacttgaaaaacatacacctttcaacaactgggagtaataacgaaaaaggccgcaaccgatcgaccttaccaacaaattgcgcaaactgaattgggaaatgggacacacccctgtaggggggcatttatcaacggagcccgttgttgttaccccccagggggaccggtacacttt

SEQ ID NO: 34147 - DNA, 385 bp, Gossypium hirsutum
  Clone ID: LIB3145-039-Q1-K1-H5
attgggcagtaatgtatacatgcaacaaaatcattgtttcagtcctctgatggtttatatgggtagctaaattgttagtgctggaaaaaaaaaaaaaaaaaaaaaaaaaaaaaaaaaaaaaaaaaaaaaaaaaaaaaaaaaaaaaaaaaaaaaaaaaaaaaaaaaaaaaaaaaaaaaaaaaaaaaaaaaaaaaaaaaaaaaaaaaaaaaaaaaaaaaaaagggggggcccttttaaaaaatccaaagtttttaaacggatattggaaacgcaatattttttttttatttaacccaaattaaattgtggttgcccgcatttaaaaacgcttaatttggaaaaaccctagcggccccaaattaaagttttttaaaaaaaattctttt

SEQ ID NO: 34148 - DNA, 401 bp, Gossypium hirsutum
  Clone ID: LIB3145-039-Q1-K1-H6
atgttgcccccctttttgctctctgcttgggtttcgcacccccctcgccgccgccgttcatgtgccatggtttggacgcaaccagtggccggagaactgggttttcaacccccttttggagcagccctgagggtgaggtaagtttcccttctttttcttttttattttaaatgaaaaataaataaaagaatagaaaaactaaaaacgattcaccttcgaaaaatatcttagtctcagtatatttttctctctatatttggatgtcttttacactgaaaaaatccccctcccccttttacactgaatccccacggcttttaaatagccgaaaataacaaaaataagcaaaaaaaaaaatctccccttcaatattagttgcaatttttgctattactctgcta

SEQ ID NO: 34149 - DNA, 261 bp, Gossypium hirsutum
  Clone ID: LIB3145-039-Q1-K1-H9
taaaacatcatctactaattacacacaccaatcactgatacatctgctcctacttaccatcccataatagatagaggccatctggataaatttttaacacaaatgacaaagccaccccctaactactctaattatttagaacaccaaactagatcatgaattactctaaattcatatcaacactcattcttacttagaatggcatcaaaatcaacactgcctttctgtggaagcccatatcctatccatgaacaaaatata

SEQ ID NO: 34150 - DNA, 403 bp, Gossypium hirsutum
  Clone ID: LIB3145-040-Q1-K1-A4
gtactcgaagaaattgaagctttacatggatgttagtgagcctacagggtatttcctatgtggaacttatctttgtataaaaactggtcgttggtttagtcattttaaaacttcaagatgcagttgtggagaattgatggataatccgactgatatgtgtttaaaagtgggaacagttgcatataaagatgaaagtgagggagaatcaatgtttttcataactgatgatttaagagtaatgcacggtttgccaggtgatctcatgaacatccttctcaatttgggtatcaataatgtttgtcagattgaagaaaaagttgtggacatcagttcaaatgaggtaatataaatccttgaaccaaattctacatatttcctttgcttgattatttcagattttagt

SEQ ID NO: 34151 - DNA, 389 bp, Gossypium hirsutum
  Clone ID: LIB3145-040-Q1-K1-B11
aggagagaagaggggtttggctgggttgcagaacctaggaaatacttgttttatgaatagtgctcttcaatgtttagtgcacacgccgccacttgttgagtattttttgaaagattacagtgatgagatcaacacagaaaatcctttgggaatgcatggggagcttgcacttgcctttggtgagttattacgaaaattatggtcctctgggcaaactgcagttgctccacgtgtatttaagggaaaacttgctcggtttgcaccccagtttagtggttataaccagcatgattctcaagaacttttggccttcttactggatgggttgcatgaagacttgaatcgggtaaaaaaaaaaccttatattgaattgaaagatgcagacggtc

SEQ ID NO: 34152 - DNA, 390 bp, Gossypium hirsutum
  Clone ID: LIB3145-040-Q1-K1-B7
attatattcattaccatattgtttacttcacaaccaactatagtccgatgggcatgtacaccaccagtatcagatgatgtcttgcatcaatggaaaggcttttgcgctctcatagcgaatgcatacttcataagaggaatggcatggcttcctgtgaaaactctccagctcgagcaaatggcagtggccggacgtgcagaagagccttcagttgttgctagccgaatgcggttagtttttagcacacttgaggtagttagtccacagtggccaagagtgtaaccaagtaattcaacgttgttgtgatccgattttctcaggatcatatgttggagcagtggttccttgtatattaataatgtaagaacatacgacactctgtgtctgctt

SEQ ID NO: 34153 - DNA, 391 bp, Gossypium hirsutum
  Clone ID: LIB3145-040-Q1-K1-C4
aaacactctttctaggctgtctggacatctaatcctgtgagaacctccttccactccaactcttccttctccccacctcttacttcgcatcaacaatcctaaatccttataccttgtgtgttctttccatttcaaatgactgacaagtgatttgctatggaaagaagttcgaaaacaatcttttagttctaatgatctatattacttggacttagatttgattgttggatataggtatgcgtccaaacatgaatatgtttttctcttaagttttctcatgtatttagagaatctttggagggttatatcaacaaccctgtatgggtatttcaagaagaaaaaaaaaagtccgagtaacatatcttatgattatctgataaatttgcttaca

SEQ ID NO: 34154 - DNA, 386 bp, Gossypium hirsutum
  unsure (1)..(386): unsure at all n locations
  Clone ID: LIB3145-040-Q1-K1-C6
cccacgcgtccgggcgtggagagaaactgttcgtgggtatgctggtgtggaggagtggtggagaacgtgggtgcatggtggtgctgaaaatggttgcgggctaagtctaggaaaattgggctttctgctttaggccgttaggcccaggcagaaattgggtcttacaagcccatcattaattagaatttgattagaactcaattactagagtatctacacctattgacccatactttatttaataattaaatcctaataaaattttaaccaaattagatcacttttaatttgagctatcctattatgatagtaaataataatatgtaattacccttattatatatgtgatgttcatatttttcaacatanannaaaaaaaataaaaa

SEQ ID NO: 34155 - DNA, 396 bp, Gossypium hirsutum
  Clone ID: LIB3145-040-Q1-K1-D1
ggtttttgtccgagatgtaggagtgacaaggagacccttcttcatgcgatgagagactgccccaggactaaggcggtgttggctcttggtgggctgaataccaaagttctcgagggcacctacagtcgatgtgtggattggattgaggacatggctcgcacgctggacaagaaggcgctttctgacttgatcacggtgctctggaacatttggaacagtcagaataatagaattttccgtgacaaggaggaagcggccatggtgatgtggggtagagctgctgccctaagccaggatttccgcatttttaatttcgtggagaagccgttgattccgaaaccagagagcgagaaaggttggagcaaacctgatcaaggagtggtcaaaattaatttt

SEQ ID NO: 34156 - DNA, 271 bp, Gossypium hirsutum
  Clone ID: LIB3145-040-Q1-K1-D12
ccacgcgttcggcaagacttgttagcactatgtatctttacatgggagggaaagtgactggggctgtagaaatttgctcggtgaaaatggatcaactgctgagttatttgggtgatcacagcttccaaaaacattcgtgttcttggatgtcaggattgaatgtaattgatctcgtcaggtggagagacctacacatctctgaaacttactggaagttggtgaaagaggccatctttaaagagggatcactttcgcttgctactttgctttc

SEQ ID NO: 34157 - DNA, 409 bp, Gossypium hirsutum
  Clone ID: LIB3145-040-Q1-K1-D6
cgggattctcttaatcaagcttcatgtgtttgtttgttggttttcgcccctctcactacattttcaaagtgatgttttaatttctcaagcaatctctttggccaatccgttgtctttggaaacgttaaattctataaatctttcttgttttctggaatcaaaattattctgatagttacaatcgttttgtttttatatatgtcaggataatttatatgtattaagcagttagggtatcgttaaaccagtgggggtttaggtcagggttagtgtttaaaagtcgtttgagagttttgcatactgacataaatggagtgcagcttttttagttcaaagtatatgccaatgtctgagattgcacatcttggaaggacaaattcaagccagttttcgagtttcaggccattgg

SEQ ID NO: 34158 - DNA, 202 bp, Gossypium hirsutum
  Clone ID: LIB3145-040-Q1-K1-D8
gtcaaaacaaattaattaactattttttgtttagcagacccacctaatgttgggggcgtaccttataatgctaaagacaccacttcaaagaacaacagaacggatgtacatttacatgcatatcgataccaacagtctagtacagaccatggatgcaagatactcacaggatgggctgcttgtaaatatatacaataaaaca

SEQ ID NO: 34159 - DNA, 392 bp, Gossypium hirsutum
  Clone ID: LIB3145-040-Q1-K1-E1
acccacccgtccgcccacgcgtccgggcttgcttttcattttattatgcatcaactccatatttcctgccttattttggatgcccattaatccttagaactcgaaacttgccacctgcaaagaaaaggcaggctttcttatgtagaatagcggtggtattgtcaattggagatttccaattaactgcagaaacatttgatccgttttgcttcgacacactgattttgtgggtgctctgtttgcagtatatggcctgtcaagtgggaagaatcaatttgcaagcaggtttatcaatatcggagaatgatgtctttgcaagttcatgtctgacgcttgcaacttgtgcaatccagaggtggagcaatgagtatagtttaagtggacaatcctcg

SEQ ID NO: 34160 - DNA, 309 bp, Gossypium hirsutum
  Clone ID: LIB3145-040-Q1-K1-E10
cccacgcgtccgctttttacgttttttctctacttcgcaggccttctttctacaggggggagcctcttatgttactagaaacaaagggcgtcgagccagcatccttgttggtgcagtcagcttcttcctaggaggagctatcaatacaggtatccaacatttattgatgcacttagagatttggatgaccctcttacaatggtgcacctgtttgcaatgttaactttgaatctttgaatatttggatttaggatttgtttgaattattcttctaatcagttttcttttcttaatgtgtaaaatatttta

SEQ ID NO: 34161 - DNA, 396 bp, Gossypium hirsutum
  Clone ID: LIB3145-040-Q1-K1-E12
gaaaaacacctgccctgcttgttttattagcgtctctcttttttttaatcagctttgcaaggcagtagtagtttacaacatttcatctttcccatctcaaatgctaacgtattggggtttccgggaggccttaacccagtagagtttcgaaggatctcagaactagtgtctcaatctttatatatgtatatatatacaagagggtttccgagttctaaacgtattggatctcataacactagtgtttcgactgatataaaataacaatctgagctgccaacataaaaccaaattctgtttacctagaacatggattcagattgggcagggttattcagggacctggttgatttgatattagcacgactggttttcgtgtctgattatttgcgattt

SEQ ID NO: 34162 - DNA, 397 bp, Gossypium hirsutum
  Clone ID: LIB3145-040-Q1-K1-E2
ctgagctctcttcttccaaacaataatgattctaatagcttcgcacacctcctttctttttctctgattaacccttttctctttaaccttcaaaaccaaacaaaagctttgaaaaattctccccatatccatgcttttctctttttacacacacagacatatatattgaaaattttttcatgcttctttaactttccctgcatatgtaaaagtaaaaattaaaaccctgcaacatatagcagcagtaaagagggtggtgcagaaagtcttgtgactcagatcccaatacactgtccaatctatattacaccattaacgagaaaaaaatttatttcactctcaagcacaaagagttctttctttctttccttctttctttcccttggggtcgtttata

SEQ ID NO: 34163 - DNA, 411 bp, Gossypium hirsutum
  Clone ID: LIB3145-040-Q1-K1-E4
gatcagaagaaagaccttttaacaaataagatgaagagctacaaatagaaggcacaatttcgaattacataggaaatacaatgatatgccagtttcagcatgcagcctaaaagtaaaaccaaatactcacacaaaacttgaccttatgccattaaaacaattagaaacagaacaacaaatagaacataattaccttccaccatatagtaaaaacccaagggctgcaaacaatgatacacctgctcatacacgtgtcacgttaaataatttcattcattactgaaaatttttaactaccatgagattaatgtctacaaatcatctaaaattactaaggttccatttgctaaatgcttctctttttttctttttctttttcttctttttttttttcaaaaagtaaatgaatag

SEQ ID NO: 34164 - DNA, 412 bp, Gossypium hirsutum
  Clone ID: LIB3145-040-Q1-K1-E5
tattccccacctcctccggttcactcttcaccaccaccttcacctccaccatgtatagaacgtcctccaccgccaccaccaccatgcgtagagtactcgccaccaccaccatccccatcgccgcctcccccaattcattacaagccacccccatcaccttcaccaccgccacccgttgtaacatattcctcacctccaccaccacctccagttatttaccattcacctccaccaccatcactgtcaccccctccagctcctgtgtatgagggaccattgccaccagtaattggagtgtcatacgcttcacctcctccgccacctttctattgattcttttgagaaatttcctcctctcataaccttcttctcaaaccacaaaaggcaaaaaaaaaaaattgttcgcagaatt

SEQ ID NO: 34165 - DNA, 342 bp, Gossypium hirsutum
  Clone ID: LIB3145-040-Q1-K1-F10
gccacgcgtcgcttacctggagatggaatctactggcataggatccggtttggcacaattggacttaggcccgaggtgttaggagtttttttggctggtatgtaggaaaaactctaactaacgtgagaggaaacggagactttgacaaagataattggccaattgtatgcgcctagagagttctccacaccctcgtgattgtaaggcgatatttggtgtggaaacgttaaccgcggataatcaggagtctttttgtatgacttgtaattggtcttactatattaataaaatgcaattaacatgaactttaatggacacattttagatatatgtggtttgttg

SEQ ID NO: 34166 - DNA, 341 bp, Gossypium hirsutum
  Clone ID: LIB3145-040-Q1-K1-F4
cgacaaataagatgtagcaagctgttgttgccttgttgtatcacattgaaaatggttttagcatagttgcttagctctgttgctagtctgcttgtagcggcctgttgctgcccttcctgtgggggatgtgccggttatggcactagcagcatgtgatatcccacatacggtcacatggcagggtttagccttcaatgtcgctcctttaattgatatgttctacgatattgcgtgactatatgatctaatagtatattacaatccggagacccctattctatattgctttagagatggtaattaaggaatgcagtgagtggtcttctgtgctgaatcctcaa

SEQ ID NO: 34167 - DNA, 392 bp, Gossypium hirsutum
  Clone ID: LIB3145-040-Q1-K1-F9
cctaggaggaaaaacaggagtcgtttttggaattggaggaataaacaacatgaggatgctcctcccctttatggtgagttattcccatcaggccttgggaatgcactgttgcaagcgagtgagaacataaacaggctattcgacagcctcaatatgacaccatcccagttgattgggcgcgtaaaagagcaagatgactgctacaaactgcattacgacatgccggggttaaccaaagaggatgtaaagatcacaattgatgatggggttctaaacataaaagggcagcataaggaagaagaagaagaaggttccggcgatgagcattggtctgccaggagctatggctactataatacaagccttgtgttgcctgatgatgccaaagtcga

SEQ ID NO: 34168 - DNA, 368 bp, Gossypium hirsutum
  Clone ID: LIB3145-040-Q1-K1-G10
cccacgcgtccggcatattttttaacttagagcggaggcagcagcgagggaggcggggcagaacaggaaatacaatgaactccatcagcagcttcagtctatgatgactatgttccaccaatttcaaaatccgccatcatagacatgttttcttgtaacttttaacattattttaagaatattttgaatattcatttccaatttatataatatatttttcgtataattttgttttaaaaaaaaaaaaaaaaaaaaaataattatataacattctatataaattatttatatattatataatctatcttataaacaaaaatatttttattaaaatattattttgcttttatttattggtttctattttt

SEQ ID NO: 34169 - DNA, 359 bp, Gossypium hirsutum
  Clone ID: LIB3145-040-Q1-K1-H12
acgccagaatcctgaaaagcaagtggtcgctttcctttaaaaaaacatgtttggcagcaatcccgatcttccgtacccctttcctaggggtgtctctcgttttcatgcttctttatgtctggagtagagagtttccaaatgctcaaatcaacatatacggccttgtaactcttaagtcattctatctaccttgggcaatgcttgctttggatgttatttttggctcaaaactcatcccggatctgctcgggatcattgccggacatctatattacttcctgactgtgttgcatcctcttgcaaccggaaaggtctttcttaaagacgcctatgtgggttaacaaaactgttgcaagata

SEQ ID NO: 34170 - DNA, 262 bp, Gossypium hirsutum
  Clone ID: LIB3145-040-Q1-K1-H4
gaagtcctccctcgacctacgcgtacagggcagcttaacattcggggtgttaaataaacaaaggaagccgcgcactgtgggaggactcactaccaagctagggacagaaggcaaacatgctatccgatactaagcaccaatgaaggctcgcaagagcatggtcattgctagaactctgtacgaggccataaattgaacacgcgttctagatgacacaagaatgccactaatgatccgccacaaggtgtatacacatgctaat

SEQ ID NO: 34171 - DNA, 404 bp, Gossypium hirsutum
  Clone ID: LIB3145-040-Q1-K1-H5
cggacgcgtgggtgaattttgtttgttgatgattatggaagggatagcaagcagatcagagttgcgcaaagagctagagagagaacgccgtcgtgtaagggaccggcaaagaaggcagtctatgagccatgaggagagagagaagcatctcgctagacgccgaagaaactatcaattgcggagacagagagctgaaactgctcggttataccctgctccacctcccgttcaatttgaagatacaagcatttcaacaattcaatcgcccttgagcaattccatttcaaatataagtcctcagttttatgctgccgctcttgtggatcccaatcatggaccaaaaagactaatgccggatacgagaagtgcccagagtttaaaaattccagcttataagttagcga

SEQ ID NO: 34172 - DNA, 337 bp, Gossypium hirsutum
  Clone ID: LIB3145-040-Q1-K1-H6
acgacagaatcctgaaaagcaagtggtcctttcctttaaaaaaacatgttttgttattttaccagcctatctatctttttgtactgaatgtaaagctatttttatcataaaatacttttcaaataatatcttaaaaaaaaaaagaaccttaaatgtcatggcaggctggttttcttttctttgttaccactattaccaaatgtggtatttttattagaccctttcgtatagaattcgtatgtgtatcaactgtaaaccaaagcaaagttgtcatgttgtgcgtgtattaggaaaaggtatgttgaaattgtgaactacattgctttttgcctgtttt

SEQ ID NO: 34173 - DNA, 289 bp, Gossypium hirsutum
  Clone ID: LIB3145-041-Q1-K1-A10
cccacgcgtcctattttattttatattaagaatgctgagtttgcttgctaatggaaaagctacatatgctaataaatattagaactagactttgtcatgcttctctgttgtatttcagcttgatataaaacattttgtggcgattgaataaaatgatctagtcttcttttatttgttaaaaaaaaaaataaaaaaaaactaaaaagaaggaaacataaaaaaatttaaatatctttgtagaggatccttgcccaaaaacgactgcttgctacttagtttgcattttttt

SEQ ID NO: 34174 - DNA, 291 bp, Gossypium hirsutum
  Clone ID: LIB3145-041-Q1-K1-A12
ggactgtattttacatgtgattgaaacaacttaattgataaagaaatggtagccaagtgcggaacgctcttgcattacagcacatctcaagtaaatacaacttgtaatatttaactttcatttctttttgtaattgttatcttgattttgttccacagacaaataaagatagacctctgaattttgttttgattgatggtacatggagcaattctgcagcaatgttcaagcgtgtaaaggagcaagcaaagttggcctggggagaggaagacatcccttgcatatctcttg

SEQ ID NO: 34175 - DNA, 200 bp, Gossypium hirsutum
  unsure (1)..(200): unsure at all n locations
  Clone ID: LIB3145-041-Q1-K1-A5
gcttatggaggtttgaatgaanttgatggacatagatgaaattcgagaggagtctggttgccctttttgttaatagtatttctacatcgttaacttgtgttgccacattgctgatgagcatccagcggaggctaaaaatgaagatcgcacactctatgcaatgaggatgggcgttgatatggttgtgcatataaccctac

SEQ ID NO: 34176 - DNA, 257 bp, Gossypium hirsutum
  Clone ID: LIB3145-041-Q1-K1-A6
gaaaaacgttaatgtttccttccatgccgccttggggtaggcctccaatgggcgactgtaaccccttatgagcttggattgttctttactgaaggtgtttcttaggagaaaaaaccatccatattatcaattcgatataatagtgctattctagtgtttactactaacaggaagtgaaaatgaatttcatcctagccctcattatgatttttcttatttgtggtaacgaacagatgattttattggctgatgatata

SEQ ID NO: 34177 - DNA, 279 bp, Gossypium hirsutum
  Clone ID: LIB3145-041-Q1-K1-A7
cccacactttcgtttttacaaaaaatttgcatgatgactggccacttcccaagataaaagacactataagattcaagaaaacaaatcaaagagaagctgttcaaagccagaatggggagttcattgctaggatttgtaggcaaagtgttagaaagatgaataaaagctgttgtgaatatgatcactttatatctggacgactagcatcctgatcgaccttacattttcatcaaccatcaaaaaacaggtgatttcacaagtaaagtcgctggattagga

SEQ ID NO: 34178 - DNA, 281 bp, Gossypium hirsutum
  Clone ID: LIB3145-041-Q1-K1-B1
attttaactttcaaatgcattttttcgcatgctctgcggggaccggtggatgaaacgcggccgtcaagggtttaaacagcccttcatcatatgagctaagctcatatcgaatatgctgcaccggttcctatgaagtcttcaactctttgcatgtttttaaagaaaaccgagttcgaccacaaggctgttgatataacactaccttgcaaggtatcatcataccttggattatatactatatactgcactatacgtaacatagctgccatttggcatgtagg

SEQ ID NO: 34179 - DNA, 258 bp, Gossypium hirsutum
  Clone ID: LIB3145-041-Q1-K1-B11
caaacccgaagggttcctttcgaagggatcacggctcaagacgtcttagaagggggcagcccccagacccagatcgccgacgcaggaaaggcatattacaagacgatgggccttacccctccaaactccacccgtgtctagcctcgcctctcttcttggttttccatccccgccaccctgacctttgtggtggcgggtgagctgatgatactatactatagcactacttgattataaggagtcagagatggtgggtgt

SEQ ID NO: 34180 - DNA, 269 bp, Gossypium hirsutum
  Clone ID: LIB3145-041-Q1-K1-B4
gtctaacaaatcaccaatctttccaatgcctgagcctcaccacttcagagattatggcttcgacccccaataccactatttacaggttttggaacatgcaaggaagcacaagatagggacgcgagacttcattgattcactacagttcaagctcgaaaaacccatctctaaagacgacccatagtctaaaacgatgaaatattggcggagaaatgctctcttgttcttcaactggaaaaaatggcctgcaaatagcaataatcaacatg

SEQ ID NO: 34181 - DNA, 211 bp, Gossypium hirsutum
  unsure (1)..(211): unsure at all n locations
  Clone ID: LIB3145-041-Q1-K1-B6
cggacgcgtgggcgttcgccgggagggacacaggggaagggagcacccgcacaccgggaaagcaacagacagaacggaggncangagccaagggaggaggcccccagagcgggggacaggacaacgagcaaaggaaancccacgccaggaagaggaagaagaagccccgccacgagacnananccagaagccagagagggggaaaaaccgg

SEQ ID NO: 34182 - DNA, 281 bp, Gossypium hirsutum
  Clone ID: LIB3145-041-Q1-K1-B8
ccctcgcgttcggtttggaacaggctctttgagtgataagcagtctgaaactggttcaacggacgatgaaaaatccgaaataactgatgctgctctttctatgggaacagaaactgatggctcagctgaatacgtgcattcccccgaagagcgtatctctggggaagcccaaagtcgtaccaaaggtccgagttttacaaaaacctgcacaagcaacaccaacatcaaaatcagaatctccgagagcttcttcacccgccattaaaaagactctcagctcg

SEQ ID NO: 34183 - DNA, 278 bp, Gossypium hirsutum
  Clone ID: LIB3145-041-Q1-K1-C1
cccacgcgtccggtgtctattttggctgccattagtgcttattggcaatatttgcacttcccaatcccaaaacacaactgtctctcaactcaaccggaatggctggagcccattgaccactgcatcggaagaaagcgagatctatattggtccttttttctttaattttctggggcctacttcttgcaaaatttcttaattactgactgatgtaagtcttgaatgggcattagccttccttggatcttaagttttatggcgatatttatattttgatt

SEQ ID NO: 34184 - DNA, 258 bp, Gossypium hirsutum
  unsure (1)..(258): unsure at all n locations
  Clone ID: LIB3145-041-Q1-K1-C11
nccaaagctccggtttttttaccgctaccatctataactaggaggcttctgagccgaagggggaaccatctctaccacacctgggtgctgatctccattccaaggtacgctaaatcaccctaaacttttccattacctgtgttgtttactggaaaaccactcatgtaaatgctgctacgcgcataacgatggactgtttttgcctacacatttaatgtttcatgttctgccccatcattcaatgtttgataccacact

SEQ ID NO: 34185 - DNA, 280 bp, Gossypium hirsutum
  Clone ID: LIB3145-041-Q1-K1-C6
gttatacgttatacttgcaatattctaacaggcaagaaattgttaacaacaaaacgactgcagatgttgccgggaatgtactgttggttacaatcgatagtcaagatgcacggcttgtttccatagatgtatagcacttgggttgtgtagtttttgtcacgctcttttggagaaaagcttatgagttttgacatgagtgtgaatggatcagcaagatcatgtcaagggaataatctccaatggcagcttagtgcatcgtgagaaagagaacatgtatttt

SEQ ID NO: 34186 - DNA, 279 bp, Gossypium hirsutum
  Clone ID: LIB3145-041-Q1-K1-D1
gccacgtcaccgttttcatcttcacagccatctcagtcgtctgacgggcggcgtatgcggctaggacaagggtactgtcatggagagggagaggggcaaaggttcaggggcacggatgggcaacatgcagggcggttgattgatttcatgccgtttaaaaaatgggtgccttggatgattccaggcttaggtttgggtaatattttccttttcatgataacaatgtacattaataattgtcccaataactcgaagaaatgtgtgggaagcttcctgggc

SEQ ID NO: 34187 - DNA, 295 bp, Gossypium hirsutum
  Clone ID: LIB3145-041-Q1-K1-D11
ggggcgacccacgcgttcggttaaacgtacagtttctcttgataatatctatctataaagtcggttaagacgaccgagcaataaaaataagccaagtggaagtgaagcttagctgtatatacaccgtacgtcgtcgtcgtcgttccggatcgatctcggccggctagctagcaaaacgtgtacgtagtagtatgtaatgcatggagtgtggagctactatctagctggccgttcattcgattataattcttcgctctgctgtggtagcagatgtacctaatcgatcttgtacgac

SEQ ID NO: 34188 - DNA, 288 bp, Gossypium hirsutum
  Clone ID: LIB3145-041-Q1-K1-D4
ttgcacaccttgtttttgtatttaacctgaggttccgtatgggccctgtggtagaccacaagtgcagagtatgtggaaaactttggtggcaaaagtcaccctgaagttcacatcgaataattaaaggtagtgacatgccaactgctgggattctaccctgctgccatgtgtttcacgctgaatgcttagagcaagttactccgaagtcccagattcatgatcctccatgcccattgagcctcaaaaccattggaccactagaagaatctgcatcagtttcagaaccta

SEQ ID NO: 34189 - DNA, 281 bp, Gossypium hirsutum
  Clone ID: LIB3145-041-Q1-K1-D6
cccacgcgtccggttaatgcaaccgagcttataatagcattatttgcactttacagaaacaaaatacatgttctcaagtactctctaatgggttccattctctcaaatctcctccttgttcttggcacttctctcctttgtggaggcctagccaacctcaaaagagagcaaagatatgataggaagcaagctgatgtgaactctgggctgttgttgttgggattgctttgccatatgttgccattgatgtttaaatatgcagtaaaacctgaaactggggt

SEQ ID NO: 34190 - DNA, 240 bp, Gossypium hirsutum
  Clone ID: LIB3145-041-Q1-K1-D7
cccacgcgtccgcttctattcagcgtatcggaacattttgccgatctgggccctcggagaatatcattgccgggtgttgcaggccccctgagattatcccgccattcataatatggtcagatgacctttttatcattcagaacattttatttttgttaaaaaagaaaacccatttgacatcaatgaaatatgaaggctttttgtgggggcaaaatataaaaataaattttttttatatag

SEQ ID NO: 34191 - DNA, 184 bp, Gossypium hirsutum
  Clone ID: LIB3145-041-Q1-K1-D8
ggaaaaggtaacgttttacatgcgacttcaaagacacaagatgggtgttgacgacttcgaacttttgaccattatagggaggggtgcatttggggaggtaaggctttgtaaagaaaaagctactagcaatgtgtatgccatgaaaaaaagcatcacaatttaaataaataaattcgattttatc

SEQ ID NO: 34192 - DNA, 292 bp, Gossypium hirsutum
  Clone ID: LIB3145-041-Q1-K1-D9
ccctcgcgttcgttttaaaaaaaaaaataaaaaaagggaggtaaataaaaaaaaaaaaaaaacaaaaaaaaccaaaaaaaaataatcaacaaaaaaaccaaagtacactctataaaatctaaactgtatcattaaaacataatcctgtcctaataatcaaaatactatcatggggggtcccctttaaagaaccgaattttctttccctcccattggaactattatgtttttttttggggccccaaaatttaaacccccggccccgtttttcaaaaagtccagacgggaaaac

SEQ ID NO: 34193 - DNA, 282 bp, Gossypium hirsutum
  Clone ID: LIB3145-041-Q1-K1-E2
caaaattccaagactaatacttttcgtgtggttgctttagaaaaatatgcaggaaagaaagagacagagaaggttcgatagcagactgatgccttctcatcaggattgctatagaaagaatgaaagtacaaacagtttaagaaccttggtctcagaattgtggtaccatgtgaagctggctaacatggttgtatcaagatcttctcttttccttattttatttcattatatctgattaatttgtttttggcattttgactctgtagaatgagttgaattact

SEQ ID NO: 34194 - DNA, 285 bp, Gossypium hirsutum
  Clone ID: LIB3145-041-Q1-K1-E3
gaaagagcttgcttcttgagctcgggttataatccaatccaaggcaccttgtgataccattgttggtttctcctaagaaagcagcatgttaaaggtaagatcaggccttggatcctttttgacaaatcttgtttaaggtgaaaactactgggttttcaaaattggtttgaatttcaaatgatgttaagttagataaatatcaggaaaactagagaagaaaaaaaaaaagcagaaaagaagagaaaggtagatatcagtcctgatggtagggattaaatttttgga

SEQ ID NO: 34195 - DNA, 191 bp, Gossypium hirsutum
  Clone ID: LIB3145-041-Q1-K1-E6
gcttagcattatgcgttattcgttctccatgatttagtttcatagggccaagtcatatatagagtagcttcatcattgtttagactactgtaatagcaactagctatattataactacatagatcgtttaacgacaaagtctcttattccatatatcatagtgatagcaggcatactctaagcatagatgt

SEQ ID NO: 34196 - DNA, 259 bp, Gossypium hirsutum
  unsure (1)..(259): unsure at all n locations
  Clone ID: LIB3145-041-Q1-K1-E8
aaacactaggagaatggggagcnnnacaaacaaggcnagggccggagncccnaagnaggncnccaaganccncaaggngagcaagacgangangagcgcacccaaagcagccaaagccgccancacgagcagcgacgaggagaaccacnngancccgagcnngnccnacgnacaaaacggcggnacacccgcngcngcaagcngcagnggggnaaaagcacccnacggcgaggnncagaccnccccggaccgccaaaac

SEQ ID NO: 34197 - DNA, 223 bp, Gossypium hirsutum
  Clone ID: LIB3145-041-Q1-K1-F11
gccgcgcgggggtgcggccgttccaggatctggcgacgcggggccagtgcgcggcgagcggcgggtgccggtggtgccgcagcgaggcgctcgacgacatgtgcttcgaggccatcgaggcgtggcgccttccgcgtcaggtgttctcctgcgacccaccctccggcgccgcccacgcccgcttcaactgaagtaatgccgcggccggccgccggcgaagctc

SEQ ID NO: 34198 - DNA, 259 bp, Gossypium hirsutum
  Clone ID: LIB3145-041-Q1-K1-F2
gataatgtcgaattttttttatcccatgatgatacagatgccagagatgctgttggccgatgtgtggatgtcactaaaggtgtcacatttatggaattaaattctgttcgagcgagcaataacaaagttacctgttgtcatttctcatccgatggaaagttgcttgctagtggtggccatgataaaaaggctgcattatggtatacagacactttgtagccaaagtctacacttgaagaacattcatgtttaattactg

SEQ ID NO: 34199 - DNA, 283 bp, Gossypium hirsutum
  Clone ID: LIB3145-041-Q1-K1-F3
aaaaaattgatggatactaatatgtttcattttcattttcccagtgatctaaggtcattcaaggacatggcggatggtatggcaagggggccaacgagtccagcaggagggagtcatgagagtggagagcagtgcagttctcactcaactgtgagggaacaagaccgttaccttccaattgccaatataagcagaatcatgaagagagcattgcctactaatggcaaaattgctaaggatgctaaagaaactgttcaagaatgtgtttctgagttcatcagct

SEQ ID NO: 34200 - DNA, 232 bp, Gossypium hirsutum
  Clone ID: LIB3145-041-Q1-K1-F5
aaccttctccatgtttcacgccggcctatttcctgaaagggacgtaatctcccaaacctcaatcggcttgcaacgggaactcgggtctgctttaggaagcggggcgctcgaatcggcaaggggatcagcccatacaaactgctggcggagcatgctccgcttaccgaagcgcttttccctatccaaagaacggacgtcctgtggcacgatgggtcggggatccctcgaacca

SEQ ID NO: 34201 - DNA, 310 bp, Gossypium hirsutum
  unsure (1)..(310): unsure at all n locations
  Clone ID: LIB3145-041-Q1-K1-G10
gacccaggcctccnatcctttttcccactttcttggttgaagctggaacgcgagactggtttttgaatttgtgtggtcggagtaatgaatcctatctggccagaggttcgaacctgggtgggtgactgggtgttccattacggtgctaccaactgagctatgcttgttctcatgtaataagaacaattcctgttcaaggaggaaaacaaatctgcaatactgctttaagataaaattttcccttttttcacaacaagcaaagataagtgctactgcgtgctaggatacctaatccattatcgatgaggaa

SEQ ID NO: 34202 - DNA, 181 bp, Gossypium hirsutum
  Clone ID: LIB3145-041-Q1-K1-G11
cacactattcactcattcattacacatgctaccattatcactatactatgatttttgtagctactcctcttgtacaataccgagtgcaaaaaaaaatacataatcatcgtatacataccaatacaataccgtacctataagtcttcctattcctgtggaagaacagaacttgaatccttat

SEQ ID NO: 34203 - DNA, 205 bp, Gossypium hirsutum
  Clone ID: LIB3145-041-Q1-K1-G4
cccacgcgtccgagttgatttaccaataacagacccatggatgtagcgagctctctagattgggtccgctaaaaaaaaacaaaaccaaaagaaagaaaagagaaaggagattgagaaagaaaagcaaaaacaatcagacataatagaaatagaacatgaacggggaggaggcaacacgaggtcataaagaaaactcacagtgggg

SEQ ID NO: 34204 - DNA, 275 bp, Gossypium hirsutum
  Clone ID: LIB3145-041-Q1-K1-G8
cccacgcttccgtttttctataaaccaaagggggaagcggggaagaagaaccgacgatagtccatcgctgcggctctcctcgatttcaaatggctactcttccatatatagtccatcttagattccaatgcaatcacatctcgttcatcaactttgatgtaactataacgtcattttaattgctttcaaggaaatcccaggctaattgtaagcggcgtgatttgttggataataaatcagaggaatgattcattgtcttgtgaggatttctttct

SEQ ID NO: 34205 - DNA, 293 bp, Gossypium hirsutum
  Clone ID: LIB3145-041-Q1-K1-H10
gttctatctcacgtttttttatcggcaactactgttcaagaaggatacttgaaaaaagatcctcctggatagcacccgctttgcatctactgcctatggaaatgcatcctccatggccagaaggattgttgtctgctcctggaataaggaagaacagtgttggtcctagtatgcgtattagatctgataaatctactccgggcggcctctacacataacccaaggtgatgacgcgtctcaccgataacattaccgatgaaaagcttccctaatagattgatgagatccgtctt

SEQ ID NO: 34206 - DNA, 276 bp, Gossypium hirsutum
  Clone ID: LIB3145-041-Q1-K1-H11
cgcgagtggccgccttttttcaagatatttccctctagaggtttttttatgcccagggggcaccaatcttaatttaattttcacagatacaaaaatgcatcggtcgccatgaacgcaaacatgctgcactagcaatttcatctttcaatggcaaacaactgtatggtcagcctatatatgcaattgggcatctccaagtaccccaagggagggcacatcaagtcattttaatatttttgttggggacctttgccccgaagtaacacatgctacttt

SEQ ID NO: 34207 - DNA, 298 bp, Gossypium hirsutum
  Clone ID: LIB3145-041-Q1-K1-H12
gttcgagcttacgattgattatcgtcaactggttttccttgatgggagaggaaaaaagaaactcatggatggtgcccggatagcatttactgacgatgtagatccatcctctatcgccgggaggattgttgaatgctcctggaataaggaagaacagtgttggtcctgtatgcgtattagatctgataaatctactccaaacgacatcaacacataccggaaggtgatgaggagtatcacagataacattaccgaggaaaagcttctcgaagagattgatgagataagtcttctcccg

SEQ ID NO: 34208 - DNA, 213 bp, Gossypium hirsutum
  Clone ID: LIB3145-041-Q1-K1-H5
aactattttgtgttttttcgaatggagcacaaatgctgggaagtttgaactggattaaaaacttggagctcgatactcaaatggagataaattgaatatcattttttaagctcaagatggggtaaagatattatcgatctacatgagctgaattaaacttggttatagagtcttctactatgaagttggaacccgtagcttgtttaaataaaa

SEQ ID NO: 34209 - DNA, 262 bp, Gossypium hirsutum
  Clone ID: LIB3145-041-Q1-K1-H8
ccctaccttagatttatcagctccattaagtttgccttgggtagttaaacaagagcccaatcttgaaagcatacataatcctcttcaggtcgatccctggttcctgaattaatcttggacccaagtatattttctgatgagtcgagattcggagcagtaaaagaccaatttaatcgaatgcaatctcggagtagtaaaaccaccacgattactcagtcatcggattcaacttcaacagtatggcttggctctttctcaacac

SEQ ID NO: 34210 - DNA, 288 bp, Gossypium hirsutum
  Clone ID: LIB3145-041-Q1-K1-H9
ttctcccctttttttcataaacctcacctcgttgagcgggtttatataagagaagcgcccctcatcgcttactccccactaatatatactacctatacacatccatactatatcaccatgctgtttttcgaacacacctttaataagccacaacaaacacggtccaacttccttatgataacatacacctctacaccctacaacatcttcacataccatataaataattggtgtcacaccacacactgtgccctgctaaacacactcgaagttatgcatgaccttacc

SEQ ID NO: 34211 - DNA, 226 bp, Gossypium hirsutum
  Clone ID: LIB3145-042-Q1-K1-B1
cgccgaccaaagcagcggaccatgccgagagcccatgggctatgaaatgggggacattaccacgaactggccgataagagctactaagaagcctataatgacctggggccagaaaacatgactagcattggtactattaaaatgaataatatattgagaaataattgtagaattgtatctaataaggatggattatcgtgagacagcttgacgcgttggggactac

SEQ ID NO: 34212 - DNA, 331 bp, Gossypium hirsutum
  Clone ID: LIB3145-042-Q1-K1-B4
actaaaacctgggcatatcaggctttatttttagtcaactatcgtacggagcatgggggggtttctttgaccagctcggtgcttaataaacaaattcacttctccagtgttgtcaagacaactgactctacttcttcttcaacgccaatgtttatgccaatggtcgaacccatgagatcatgtgtcaatctattatggaactttagtggaaacgatccgatattgtggattttactcaacatcttttgaggcggaccttcgccaaatgataaaggtttgtccataaatcatattgttgaaggaaccaatgtgtccttgattacgctttttt

SEQ ID NO: 34213 - DNA, 351 bp, Gossypium hirsutum
  Clone ID: LIB3145-042-Q1-K1-C1
gtttgcatatgtgaaaatgaagtttcggaaccttttttgtttgttgagagcattcctggcactttggacattaatgtgaaggttcgcaaaagttggctactcaatgttcttcaaagttagacgaactaaaaaactggaagtggatgttccgatctctgtacaggtaagtgatactaacaacccaggttctctcgtatgaataaggccatattttattttgttaagtccatgtatattatcccatcttttgcttttattgcatcatgagatgacaaacaaatgatctgatgtacctttgttttaactgattgagaaattttatgatgaaataaagatgttataactcgtaag

SEQ ID NO: 34214 - DNA, 248 bp, Gossypium hirsutum
  Clone ID: LIB3145-042-Q1-K1-C2
ggtgggagatgttgagcttcacacaggaaccgtctctaattgacactaacaaaagatgctttgtcaaataaacagggggggtctacgaacttaatgacatgggcgtgggatatgaggatgccccaccaccgcctgagattgaagaagggtgcggggaggtagacgacaaccataccctctaacttgttactgttgatctggttgtaactggagaaaatgaagactactatgctaatgacaaaattatt

SEQ ID NO: 34215 - DNA, 294 bp, Gossypium hirsutum
  Clone ID: LIB3145-042-Q1-K1-C5
gcgaccgccggaattcccggcgcccacgcgtcggagccatataagttagtaaataaaaacggtcttatatatggggccttgagaccaatcctgactaaatctctattgcccgtcatgctaagcggtaaaacatttacgagcttgaagggcaggccttaatgcttttcatagctcctcaagtcatgtgtgtgcatatgcgcagatcaattaaaaagaaccacaaatcgattaataaatgagaaaactggaagtgatatattcgaaaagtagccgcagaatagagttattgtgtgc

SEQ ID NO: 34216 - DNA, 395 bp, Gossypium hirsutum
  unsure (1)..(395): unsure at all n locations
  Clone ID: LIB3145-042-Q1-K1-C8
cccacgcgtncggtaagggttacaacatagttggtctctcccagggtaacttgataggacgggctgttgtcgagttttgtgatggtgcaccccaggtgaagaatttcatctctttaggagggcctcatgctggtactgcttctgttcctctttgtggttctggttttccgtgcctgattgcggacaagctaatcaagtcagagatatacagcgactatatccaagctcatctggctccaagtggttatctaaaattaccaaatgatatacctcattatttggaaaaatgtagatttcttccgaagcttaacaacgaactaccccatgaaaggaattccacttataaggagaggttcactcgcttgcaaaacttggtacttatcttggtaagctgg

SEQ ID NO: 34217 - DNA, 393 bp, Gossypium hirsutum
  Clone ID: LIB3145-042-Q1-K1-D1
aagaggatcagcggctcgaactataattaaaccagaggagggtagcagattctgttggcgaatgttattgatgatgctgggacttatacctgacacgccttgaataatactgctactgttatggatgaagcatatgccttgaaaaggcagggcttgactgtatatggcaaaggagggtaatgttaggatcattgttacatacgttactgccatggcttcacatcttgagtgtatagctatgtcagtatgtacatggtgggaatctcatgaaagagataattaggattctgaccataatactgacagccttagtatatttgcagagctgtggttggggctctgttctcattcaagccttaaaaaaatttcccattttatctggttgatcaacac

SEQ ID NO: 34218 - DNA, 251 bp, Gossypium hirsutum
  Clone ID: LIB3145-042-Q1-K1-D7
agctcttggttgatgcacctgatatgattgagaaggtccataagagctggacgtgcactttaagggtaacgtatggtctggtgtgattttgaagctttgtttagcattaggttgttaagaatgtagatattgtttttgggaagtgtcaatatggatttttaggatcttgtcattcttcacaagcctcataagtattctatatgttcttttaatcctttttgtggtataagaatgttcaatgacttgattat

SEQ ID NO: 34219 - DNA, 420 bp, Gossypium hirsutum
  Clone ID: LIB3145-042-Q1-K1-E1
ttttcttcttcttcttcgattatttttcgccggaactctcttaaaaagcaatgggaaacaatccctcgcagcttcttccgtcagagttgatagataggtgcatagggtccaaaatatgggtgataatgaaaggggacaaggagctcgtgggtactcttagaggcttcgatgtttacgtcaacatggtcctcgaagatgtcactgaatatgagatcaccactgaaggaagacggatcacaaagcttgatcaaattttgcttaatggaaacaacatcgccattttggtcccaggaggctcacctgatcccgaatgaaagtgttagctcctccatgtttcttttaatgttattaattcctggccatattctcagttttagtgagaaatctggcgcagaacttaaatagttaacttggatcact

SEQ ID NO: 34220 - DNA, 419 bp, Gossypium hirsutum
  Clone ID: LIB3145-042-Q1-K1-E2
aaaaatcaatgggaacctcatgaacttgtacccaaaaaggtgatgaaattaatagaatcctgagtgggtcttctccccattgcaacttatgcagatggttattaaatgtccaagaagaccctttaataactctctccatatccataatgtgaaaaaatttaaaaatacacctctttcccccagatctctaatttgtacccctttgattggatgccataaattagccataatacttttcattgctgggtaatggataatactggcagtaaggaaacacccaactagacttaaatcttcttctttacttaccgattctatttctccttccatttgcaggatttcttcctcttcgtcatcaagggatagagttgtaaagtcagattccatggtcgttatacgtgaagaatagaaagagaaga

SEQ ID NO: 34221 - DNA, 406 bp, Gossypium hirsutum
  Clone ID: LIB3145-042-Q1-K1-E6
cccacgcgtccgcccacgcgtccgataaaagataaaaatatcaaattgaacacgcggatgacaaggaggggtgaatgggaaataatcccatcctccaaaacgcgtagttccattagggattgaaatgtgatgaaaataaaattatcaggcttaattgaaagaaataaaaacaatcagaaggatctaattgaaacaagtgtaaaatgcggaaggacctagagggatattctcccattttaaaagaaaacacgcggatccctgggtgcgggtagcccaaaacggtgcggttttggcgctaaaacccccaggtgaaacgatgttattttatttgtgctataaaagcaaaaatttattcaaaaattttcatttctcccttctttaaaacaaaaaataaaccagaaaaacc

SEQ ID NO: 34222 - DNA, 270 bp, Gossypium hirsutum
  Clone ID: LIB3145-042-Q1-K1-E8
cccacgcgtgcgataaagagggctatagtgagctacaaggtggtacacagtctctctgtgaggcccatcgttggaaccctagctagaatcgccaccgccttaggagtctccgaactaatcctagacggccgccgcgacttcaacgccttctgcagctaccggttcaccttccatcattgatatcgccacttccattctctcaccgacgctcgactattacttagagagattgattgtgatatttgcggagttgacatcacagacgacgct

SEQ ID NO: 34223 - DNA, 353 bp, Gossypium hirsutum
  Clone ID: LIB3145-042-Q1-K1-F4
gtttttgctgtatatacatacaaaggtacgtacgtacatacatacatatatacatatgtgtctttaatttgtttttcgcttcttttggtcaaggttggatatggtgaaattgcatagaagtctcgaagatgagggctttgattcccatgtgaagtgaaatgtatatcatattgggtcttggttttatatgcatcattcatgttttttttgtcttttaagaatgtaagaatgtaacttccggtgcccagtatgatcaactgagcaggaaaaacaatgtaactgatgcattaactcctctgtatgtatgtatgtacgtatgtatgttgcattaccttgattatatgctagtgatt

SEQ ID NO: 34224 - DNA, 399 bp, Gossypium hirsutum
  Clone ID: LIB3145-042-Q1-K1-G10
attttatgtcatgcatgaatatataatgctcatgaactttctaaacttgtttgttgaattagaaattggcttctcttctcgataggatttaatttctctcgttttctatgcatgattgttggagttacgggttgctaaaggaaaatcggcaccatcagttgctcctcaagtttctgttagcaagaacctgccccctgcttctgactgggaccatgctccccagcacactgctcagcagcctgttctctcctcaaatgttgtcgagatgtctggggttgatatggttgatgaaatttcacccatagagtatgaaggtgaaataaaatctgtttatgtaaggaacttgctctctactgtttctgagtctgaaattgaagaggaattcaagaaatttggtga

SEQ ID NO: 34225 - DNA, 431 bp, Gossypium hirsutum
  Clone ID: LIB3145-042-Q1-K1-G11
cggacgcgtccgcccacgcgtccggagaccttattttcaataagatacgggcagtatttggttttggaatatgattaattttattccaaaacgaggaattcttttttgggtttgaattattggaacttcatgaagaattggaacttcatgaagacttattctttcaactattttattgtgaaagatttataagactttgcaactctgatcttggtcctactggttcatggttttaaagttgaaacttggaccgagtgtctctgttgtcttgtttgccaatacccaaactatccttttagacttataataatgacaatgatgaaaatgttgccttccagcaacttaaagtctgtcagggcgcagagtgtctccttgaggatgtatatcctttgtgtacatattaatgttatgatgttacttaagggcgaaat

SEQ ID NO: 34226 - DNA, 178 bp, Gossypium hirsutum
  Clone ID: LIB3145-042-Q1-K1-G3
cagacgcgtgggctcctttactaacattacatcctatctgaaaccctaaattccatggcgagttgttactgatgcgaagaaaaattctacttaaacaaccccccccttcatggctacctctatcaaatgcttgcttctttcaaatacaacgttttcagcagctaccccgcttccaatg

SEQ ID NO: 34227 - DNA, 187 bp, Gossypium hirsutum
  Clone ID: LIB3145-042-Q1-K1-G6
aataaaatgtttaaattgcctttttttttttttccagattgactacttacgggggggctgtataagagagcggatcccgctactttcttaaggcgtctttaccaaatgtcttttcttatagaatttctcgtgtctccatgttatttatcaatcttccacgctcttttttatctaattgttgaaattt

SEQ ID NO: 34228 - DNA, 328 bp, Gossypium hirsutum
  Clone ID: LIB3145-043-Q1-K1-A12
cccacgcgtccgaaaaaagtaggtcaaaatccatctccaccaacaaagatgaagccatgagagaattttgggtgattttgggttatctttcgcctacttgttctttcagtttatttatcccttccttcttttgattgaatcctaatcttctcctaagtttggtatctgctacaatggccgttcaagctcaatacccttctaatgttcttcttttaaacagaagtggacaagaggggaatgagtttccattgcagtaacaagcatgaggagtttttctcgatcaatcccattctcatattgttgttcaacaataataataatattccac

SEQ ID NO: 34229 - DNA, 274 bp, Gossypium hirsutum
  Clone ID: LIB3145-043-Q1-K1-A4
atcaattgaagatttacccttgctgcctgggacctaggttgatattgaagcttttatgtcaagactactactgtactgctgggaaaattataagtggaaatatgattctccgaaattaaataataattattatcataattaatattatttactattttaatatttatattttatatatatatttttttaaagttaacttattctaattttattaagtttatttttaataattatattttaatagggggcgttttttttagagattaaaattttt

SEQ ID NO: 34230 - DNA, 378 bp, Gossypium hirsutum
  Clone ID: LIB3145-043-Q1-K1-A5
cccacgcgtccggttgaatctaaaggaggtcaagtgaaggttgaatctgctgcccctcccatgaggcaaagtctttctgatggttcacttgatacgatggcaagaaaacctgctgatcctgaagaagagcttcgatggatgtcccaagaagtgcgtggttatgttgaagctgttcttaacagccttgctgccaatgttcctaaggctgtcattctttgccaagtggaaaaagcaaaagaagacatgcttattcagttatatagctccgttagtgccataagcaatcccaggattgaagaattgctcatggaggaccaaaatgtaaagcgcaggagggagcgttaccagaaacagtcctctttttttttgaaacttaca

SEQ ID NO: 34231 - DNA, 219 bp, Gossypium hirsutum
  Clone ID: LIB3145-043-Q1-K1-A8
cccacgcgtccggcagtatatacgagaacacttcccacttcattgtttcttcgtgttggttcattcttttcctaaatcgaaacataaaatttgtttatgatccatatacatgttttttttgggctactctttattggtagaatatgtttgcagtatatacatgtacatcttttctatacaaaataaatattattgctggtctttagttagatttgatta

SEQ ID NO: 34232 - DNA, 317 bp, Gossypium hirsutum
  Clone ID: LIB3145-043-Q1-K1-B1
cccaaagaacatatctaaacccccgatcctgtacttgttcaccgccaaaagaagccacgaggaggaaacgcaccctatacgtatggggagtcggcattctctgtttcgcactgtgagatgatcggcactcctgctattccacagtctcagagagtaccacaattgcgctgatcaacgcgaatactgcggattacccaagacgtgtaacgtgatgatggatctccccttactcagtatatcggagctataggccttgcattgaggatttataagaaacatttcaagctcaagctgcaaggtgaactatggggttggac

SEQ ID NO: 34233 - DNA, 245 bp, Gossypium hirsutum
  Clone ID: LIB3145-043-Q1-K1-B10
cccacgcgtccggtaaaaatggatgagagtattgagcttaggagaaggggatttaactggaatcaaaactcattctggtacttagatttgggttgaagttccttagtgttgatgatattgaatttgtttgtatgtacagaaaactgtgtgaagttgttggtctcaatctgtattaacaatattgtttgtctggtgatgaaaaaaaaaggaagaaaaagcaaatgaaatgactgtaatgtattcat

SEQ ID NO: 34234 - DNA, 324 bp, Gossypium hirsutum
  Clone ID: LIB3145-043-Q1-K1-B11
cgacacgactgctcccgccgattccgcccttaacactttagggcatcgctctcccgattcggatccgactccgaatcccgacgcctcaccgacaccgtctgatcttaatcgcgcggctgaggaaaccgggcacgacgaaagcaatctcgagcagcagttgcaggacctcgatttgaaggaggaggttgcggcggcggtggcggctgctgagacgaaagatgatggggagagaaaaggcgacaatgattacaatgaagctgatgctggcgctgccgaggaaaaagaagatgaggaggagaaaaacgagaacgaaaatgatggtga

SEQ ID NO: 34235 - DNA, 364 bp, Gossypium hirsutum
  Clone ID: LIB3145-043-Q1-K1-B2
agaagagagagtaaattgcaaagtaaatatgaataaggatttcatagctgaagaacttgacaatgacatgcaagaagaagaagaagaaggtgttgggggtgatcatggtttcccagatgatgaaaagaagaagaaaggttatggaaggagaggagccgctggtggcggtggtggggtgtcgccgcctgcttgtcaagtggaaaaatgtgggcttgatttatctgatgccaagcgataccacaggcgccataaggtgtgtgagattcatgccaaggcgccatttgtggttgttgctggtctcaagcaacgcttctgtcaacaatgcagcagattccatgagctaccgtagttcgatgaaacaaaa

SEQ ID NO: 34236 - DNA, 253 bp, Gossypium hirsutum
  Clone ID: LIB3145-043-Q1-K1-B7
ggaacccggggacccacgcgtccccacctcacttgaaaccactttcactcctagctgtttttcttctaccaatccacacttgtttttggacacattggcctgtggtggactaaagaggagccaatgatgatcagctggttttggactaaaagaacgaggctaccatacatatttgacattcatgaatggaaatttacaggattctgttctacttttggtttatacatgactctggagacgatagaagtcttac

SEQ ID NO: 34237 - DNA, 290 bp, Gossypium hirsutum
  Clone ID: LIB3145-043-Q1-K1-B9
ggtgaagattaacaccctaccaagtttgttgattatgtcttgaaagctgcaccttggctgaacatggtgcactgcctgttctttgtggatctttggggaccctacatgagaccaagcattgataaccatgaattggcaactcgccctgtactgttctacgatactggaaagatacagtgagacgattttactttccatagagagagagatggtgctacattgggggatgaaacgggtcgtagtctgctacagaagactgaatactgtctggatggatttaccttaagagc

SEQ ID NO: 34238 - DNA, 431 bp, Gossypium hirsutum
  unsure (1)..(431): unsure at all n locations
  Clone ID: LIB3145-043-Q1-K1-C1
tctgatgctcgcaaaccacgcagaaagagtagaccaaaaaagagaaaacaacaggtttgtttattgtttgtgacttgcgttggtttttctttttccttgccatgattcttcaactaccgatatccaaaagccacagtttcatagtaatgcagatggtcttaatggttaaagctggttcagttgcagttttccttatcattgttacttttactattccatgtctggttgaactatgctgatgtgtatttgggataatatcttctaaggacctttcgagtaaaaaaaaaaaaaaaaaaaaaaaaaaaaaaaaannttttnntaaaaattaattaaattttttaattaataaatatttattattttttatttatttattttattattttttatattattttttatttttttttattatattatatatttattat

SEQ ID NO: 34239 - DNA, 333 bp, Gossypium hirsutum
  Clone ID: LIB3145-043-Q1-K1-C10
cccacgcgtccgaaacttcaattaacttccacaatttcagaggctttgagaagcctctctttccaaggcttctttctctccatttctttctgctgctgtatgttggagccttggggagttgtggttcattttattttccattaactccaggcaaaaaatgatgataaggaagacatgccctatccctaatctccataaccaagacggcctagaaaccgtcctggaagtgcctattctcgaagaaatgtatacccaattgggcaccgatgcggctttattaccatggctaaacatgcgagccttaatgaatgataatatatcatcaacacccca

SEQ ID NO: 34240 - DNA, 362 bp, Gossypium hirsutum
  Clone ID: LIB3145-043-Q1-K1-C11
cccacgcgtccgcccacgcgtccgcccacgcgtccggacaaactgaagcattcccatgttctattggttggttttaagtattttctactatggacattttgtgcttgatcctcgactattttgtgtatctctacctaaatcttactatttagaagaactagtcttggagagaactattagagtcttgatttatggagtttgggcttttactggtgattattcctttgacttgggtataaagaatgtgggttagtggaaagctatcattctgtaatatgcaatgcttttggttccatttgaaatgaatcatcgctcaaaattggtacaaaagcagaaacttttttttctcggttttccatatg

SEQ ID NO: 34241 - DNA, 208 bp, Gossypium hirsutum
  Clone ID: LIB3145-043-Q1-K1-C12
gcgatgcgcagtcatgtgatgctttactgctgttggacataacatgaaggagcttgtgggataaggagacagacaggatctttgtcctaatgaatttcaggtgcattgacaccatcaaataagctgcttaaagggaatgtcttgcagttgtcacttgcgctgatatcctagaactgtctgctagagaaggcattgtttctgagggagg

SEQ ID NO: 34242 - DNA, 250 bp, Gossypium hirsutum
  Clone ID: LIB3145-043-Q1-K1-C2
gcaggatcatagctttctctcacaaagagttaaccacagtggagtaaccacaatgtaatgtcataagtatttgacgagaaagacatgtgacatatatcttgcctatagttcttcgctgctctatatacaaaaaacacagattgcgagtgcagactcatgcgatttagtgtaatagctattaaaggtgcggtttacttaaaagtagagagtttgatataccatctttgattcttgttttctactagtgtgt

SEQ ID NO: 34243 - DNA, 378 bp, Gossypium hirsutum
  Clone ID: LIB3145-043-Q1-K1-C7
gctctctaaaatttggcctcttattcgtgagaatttagtatggtatattagggatggggccaatgtttgctgttggaaagaccattggattccaagtatgggccctttaatattaaaaattccatcttttactaaccttgatttggattgtagtattagggagatggttaattttgatgggagctagaacctagacttgtttcgtgtttgggtttctgaagaagtgattagcagaatcactagtattcctcctccacatccggatttcggttctgatagagtagtatgggctcgttcagtgtcaggagctttcgcagtttgcagtgcttaattggtcattgaaaggagatacgtggaactcttaagaggagcaattga

SEQ ID NO: 34244 - DNA, 341 bp, Gossypium hirsutum
  Clone ID: LIB3145-043-Q1-K1-D10
gtgagaaggcatctccaaatgcaagtccgtgcgactaagttaagtgcattcgcgacttgtgtgaagatagctgaggaaggtggtggaatgcatgctctttatgcaggactcattcccagcatattgcaggtgttaccatcagcagccataagttacttggtttacgagtttatgaagatagttctaaaggtggagtcggcatataacattatatccttttattgaaattctaagaggagccttgtcaacttcaaatttaccaaataacatgtggacaatcatgattctcgtttaatgcagttatttcagatgatatgattcttttttataagtgatttatt

SEQ ID NO: 34245 - DNA, 204 bp, Gossypium hirsutum
  Clone ID: LIB3145-043-Q1-K1-D7
attacaggacaacacagtggcttattatcttacagctttaaaagacatgttcggtggtgggatcaatcgtctgtttcttctttatgagattgggggagcccagggtgcccttcaccgtctagctatacccatgaagaatgttttatactgggaaatatttgcggtgaatataaacatactaaggaggtggtgggagcaaacgaa

SEQ ID NO: 34246 - DNA, 192 bp, Gossypium hirsutum
  Clone ID: LIB3145-043-Q1-K1-D9
gcacgcgtcggagggcactcagagaatgtgggggccgggtatgatccgtgacattttcccttctttggggacccgtgagggggcgcgagtaaaacaaaagggagaggatgttacatcttgaaggcactgagacttacttggatcaaaaaacttttttccgacggaatctcaggctgcagggcaattgactta

SEQ ID NO: 34247 - DNA, 123 bp, Gossypium hirsutum
  Clone ID: LIB3145-043-Q1-K1-E10
gccacgcgtcgtttatttttaacctgcgttagtgactagaacccaccaaaaggagttgtggctagacaggcgacgtgtccctttttcccttatgaagtattatgtatgtattcctttaaaacc

SEQ ID NO: 34248 - DNA, 406 bp, Gossypium hirsutum
  Clone ID: LIB3145-043-Q1-K1-E5
gcaaatcaatgagaccgaacctgggacagagattgcagctgaaacttcagctgcaatggctgcttcttctattgtctttagatatgtcgatcctccttatgcacgtagacttcttaacaaagccaaatcgcttttctactttggtaagaggaacaaaggaactttcgatggagaatgccccttctattgctctttttctggctataatgatgaattgttgtgggctgcatcatggttatacacagccacacatgatcagaagtttaggaagtttataacagaagaagcagtgagtgcagttgtggatgagtttaattgggatctcaaatatgctggaatccaagtcctcctttccgatattttccttcaaagcaatgatgaggctttgaaaatcttcaggaacatg

SEQ ID NO: 34249 - DNA, 257 bp, Gossypium hirsutum
  Clone ID: LIB3145-043-Q1-K1-F10
gtacagtactggagggggaaatattatgaatgggtacttaagggattgaaacccaatcttttgaacaataaggaactcaaaatatggacttggatggcgcgacagttgggaccctttgcttacaccaaggggactagggatagctcgacttttactgagcaaaatttacagcgggacactgctgggagtataggtgatgtactagaccctgtaagacaggaatgaactccagaattgaacttgggtcaggaaaattg

SEQ ID NO: 34250 - DNA, 375 bp, Gossypium hirsutum
  Clone ID: LIB3145-043-Q1-K1-F12
gacccacgcttccgctaaaagattcctaaacagactgtttatttcatatgatgaaaagaaatatcagggagcggagtttaaagatgggatgaaggatgtggctaccaaacgtatggagcttcagaattctttatctatactatggtcaaagcaagaagctgcacttgtaaaaaccagggaactgaagaaactatgtgatagtactcctttcatcgtatttagaaggaagacccgaatcaatatttggagagatcaatgccttgttaattaccagtatctagctcttgatttgactttacatttaatgatagtgtatttttgaagtcaaattattacttgttccttgcttttaatactaatggaaaataacttcaa

SEQ ID NO: 34251 - DNA, 356 bp, Gossypium hirsutum
  Clone ID: LIB3145-043-Q1-K1-F2
caagagaataactggtgggtaagcaaagttatcaggaaaaaacatgattcctctgtcacaagtgttgcttggcatcctaataatattctacttgctacaacatccacagatggaaaatgccgagtattttctacatttatcaaaggtgttgatacaagggaatcaaaaacaggctcttcttcagatccaaagtttggagagcaaatagttcagcttgatctgtcatcttcatgggcatttggggtgaagtggtcaccaagtggcaatactttggcttatgtaggtcataattctatgatttactttgttgatgatattggtccttcccctttggcccagaatgttgcattccgtaa

SEQ ID NO: 34252 - DNA, 279 bp, Gossypium hirsutum
  Clone ID: LIB3145-043-Q1-K1-G1
aagatgactgatgaatgggcatgtggagtgactctataagttatgttgggttgggctaacacatttgaagaccaacaggatgcaaagaagcataagaaaactattaggagaatgatgtgagttcaatccaaaaaccgagactagggctatatatagcaagagtgctgacacctactgtctagcatatttgttgctagcctctgcacgaagatcatcatacatgatatgaggagccattcatggctactgaagaactagtgcagggtactgacataggca

SEQ ID NO: 34253 - DNA, 160 bp, Gossypium hirsutum
  Clone ID: LIB3145-043-Q1-K1-G3
cccacgcgtccgaaaaaaataaaaaaagaaaaagcttcaaaaaaaattggtttaatatgagggcattgatattccgttatagagcaacgtgtttcatatattaaccgatttaccttcatgggcgtcacggtcggctgcccttacaatcgccacctggctt

SEQ ID NO: 34254 - DNA, 235 bp, Gossypium hirsutum
  Clone ID: LIB3145-043-Q1-K1-H2
gggatttatggcttatcgatggaccaagatttgacggaactagcaaccagcagctataggggagacggggaactgtgactggcgtcggatctactgattgcacaagacccacgactgttgccaacactgacggttatgaaaacagaggaagcgacctcgaagtacacacatgatacggcagaggagataaatctgacgacagacgcggcggtgctggacacggtgttgataacac

SEQ ID NO: 34255 - DNA, 195 bp, Gossypium hirsutum
  Clone ID: LIB3145-043-Q1-K1-H6
cccacacgttcgaccaatcatacgtacctatatgtcgctctcaagggaatcatagcctgttgcggcgacgtttatctctatccgtttacatgctgtacaaaagaccacgcagagatggtcactggtgcatccttaacgattgtgaatgattactgcacttggtatatgcaagacaccagtggaaaaagatccctc

SEQ ID NO: 34256 - DNA, 393 bp, Gossypium hirsutum
  unsure (1)..(393): unsure at all n locations
  Clone ID: LIB3145-044-Q1-K1-A3
gttcagtcttgtgtggtgcatttacagaaagtacctttggctcggagatttgcattagttcctcttggacccccattgctagcttacaggagcaattgcaaggcaatgttaagtgctgttgctggtgctgttgaactagtggttgatcgcccatataaggctggggaacctattgttgtctggtgtggaccacagcctaattcgaaactgcttataaactatggttttgttgatgatgataattcttatgatcgcctggttgttgaggcagctttgaatactgaggatcctcaatatcaagacaagagactggttgttcaaagaaatggaaaactatctgtacaagcttttcctgtttatgcanggaagggaaaagaagctgtctcggatatg

SEQ ID NO: 34257 - DNA, 366 bp, Gossypium hirsutum
  Clone ID: LIB3145-044-Q1-K1-A7
cccacgcgtccgaccgctggaagaataaaaggcaggtagctgtggactcgaaaattggacgtatcaccaatttcatcaataaagtaaaggttccaatgcaggttttcatagcttgtgggataagcagttctggtggtaaagctgttgatcctttccgcaaaccaaagcctggcatgtggcacattatggagaaacatttcaactctggcattccaattgatatggatcaatctttttatgttggcgatgctgctgggagaccgaatgatcatagtgatgctgatataaaatttgcacaagcggtaggattgaaattttacgttcctgaagactatttcaaatcttaattcggcatattcatggaaa

SEQ ID NO: 34258 - DNA, 287 bp, Gossypium hirsutum
  Clone ID: LIB3145-044-Q1-K1-B2
ctcaaccctaccgagttcaatggaccctgtgttgttattcacgaagatcatgttgtcccgaaagggtccgaaattggtactctcggttttggtttttaaggtggtcctgaaaaatgttggtcttatggatgttccggtaattgtaatcctggcggttacggtctaccattttctcaaattccaaaaatcccaagaattccacagatcccacagattccacaaatcccacaaattccactaatcccacagatcccacaagttcctcaaatcccacttatgcctggaca

SEQ ID NO: 34259 - DNA, 324 bp, Gossypium hirsutum
  Clone ID: LIB3145-044-Q1-K1-B7
aaaaagaccgtagatacttgaaaaaatacgcacctgagctatccatatactctcgcaagacctgaatacgtgtgctaacacctgtggttgctgcttcttaatagagtgagcaccaatcagctgacattctaagatacaccactacgccactaagactggctatgacaccttatataaccacctgcgttgtagctatactcatacaacatcatgggccgtgtgcacacaccatgaatagatgctggcttaaagagtctgcctgcctaagtccactagataggtaacaatctagtgacactatggcatgctacgctatcgtatatg

SEQ ID NO: 34260 - DNA, 343 bp, Gossypium hirsutum
  Clone ID: LIB3145-044-Q1-K1-C11
cttggacagcccactaaggagatggaggcacaaaccatccacaaggtggcccaagccgtccatccaaaggtaaaatagttcgcaagaccctttcttcagtgacgacaactaccagtggagggggacggcatcttcctcctccaaaaaaaacaaattcatccactcttcttccactactcaagggtcggccacacaagtgagattttcaagggattcccatgatattattagtatgggatgttggggctactccactataaataggacatccatccctcattcatcccatatctggattttcttcccacttcttgagcactacacttgagagaagaaacataag

SEQ ID NO: 34261 - DNA, 327 bp, Gossypium hirsutum
  Clone ID: LIB3145-044-Q1-K1-D2
cccacgcgtccgaccacgcattcggccacacgaacggagtggcgcaaaaactgggttatctgcaataatatcattgaaccataatgtgttgcgctcttttggtcttgactgcattatacgaatacataccacagtgtgctatggctgctatagtaatctctggtgctataaccatggcggattatgaagaggcgctattcttatggcgtgtatataaaaaagaatctattctttggaccattacaactactacaacactgtgactcagaatcaacattggagttcttgctggcgcatgcgtcacacttgccatcgtgattcacaaat

SEQ ID NO: 34262 - DNA, 431 bp, Gossypium hirsutum
  Clone ID: LIB3145-044-Q1-K1-D9
cccacgcgtccgacgacattgataaccgaattattactgaagttttgggtcttggaaggtatggtcgaattcgatttcaaagatcttttgttaacccaacccaatattttggatctagctcgcagcaatacgtgccttcggggaattaggctcaaactaaagttcagaggttaagaaaccagatgactgagatgcaagcgagcacagttgagcaattaagcggaggcagcatcaaaagaagcaaaggctcaaagaaaatatgaagaactccatctacaacttaaagcgaatgcagcagcgagggaagcagatacaagcagaaaatatgataaacttcagttagcttcagaatatgatgaagatgtttcagcagtcacagaaatttgccgtcttagacgtttgttttcttaattgtaagaatattttaacat

SEQ ID NO: 34263 - DNA, 345 bp, Gossypium hirsutum
  Clone ID: LIB3145-044-Q1-K1-E1
ctttcaagtttgactaaatttgggtgcttattatcttcttctttttttttcacatatttttaactgttgtcaaatgatgtttgttgcatttgtatttgatgctgcataaccaataaataaattcgatatttatactttgttgttttatggctgcccttattgttctgccctcgatgtatgctttgccaggttgaaagagtttctcacagagacaatttggagagttttgtgcaaaaatcagagaaccttgagaggcaatgccttgcaaaagctatgagatcatactgtgaactgcgagtgttgccatatgaggaaaacaagactgttgtattttaagagcaaaaa

SEQ ID NO: 34264 - DNA, 388 bp, Gossypium hirsutum
  Clone ID: LIB3145-044-Q1-K1-E12
cccacgcgtccgccgtaagacattttccattctcttctctacactctcatcggctcagcttcaaaattttctttgcagactttctttagaaatgtatgttttctatttccactttcatttctactcattttctgtggcttctcccattccaatccattcttcatttcgattccctcaatccttcccgctccgaccctatacccgaatttcaatccattcttcattctcattgaattatttctgttggtgaattaatgcaatttccaagcttctacgtgatgggtttgtaattttctaaacctcatagcttttatgggtttctttttggtattaatttttagcttttaattggatttctcgatgttcttaaacttttcttccattggat

SEQ ID NO: 34265 - DNA, 216 bp, Gossypium hirsutum
  Clone ID: LIB3145-044-Q1-K1-E4
aaaaaaaggaagggcggggtcccaaggacagggtttaaaggggtaggggtttttaaatccccccccccaaaacgggttttttggggggggcccgactttttacaaaagcttgggattgaaaatgcttgaactgaaaagggatcctgataaaatttttccaaaagttggagggcaaaaaggttcctcccccctaaattttaaacaccccaaattttt

SEQ ID NO: 34266 - DNA, 315 bp, Gossypium hirsutum
  Clone ID: LIB3145-044-Q1-K1-E5
ggaacaaatagctaaacagtaatggacttggacttcattcagaatcgacactgttcagaagtcactatttctattcttttggcaataaaaatagttgtctcactgtgagagagataagagttgtttttcatgcataactgtgatccataaagaatagggtagtttattttaatgcttgtagttgtctgaatcgttgtcatttttttaaatcttagaacattcaacccctcaccccatttctggtctgaaatttcattctttgtccccatgttttagtccagatgggtataaaataaagaaagaaccgcagaactt

SEQ ID NO: 34267 - DNA, 336 bp, Gossypium hirsutum
  Clone ID: LIB3145-044-Q1-K1-E8
ctaacacgcacgagtaaacaactgtgattgttgccacggcctgagagaacggcagggctgaaatctgtgatcgaacatgccaatagattttatatagactaaccggtcgttgtaagactgatagtcctgttgcatttgatgaccgtaatggtgcatatatacgtgggtcatgggattacactgttccaattgggtaagggttgctacatgtaacaactgacagcatgcatattccgaaccagcatacctatgaagggcaagctggctcggttcattgcactgacagctacatttgtactgcttcactttacatgacgcggtgtgcttatgattttt

SEQ ID NO: 34268 - DNA, 260 bp, Gossypium hirsutum
  Clone ID: LIB3145-044-Q1-K1-F5
accacgcgttcgaatagtttattgttttcgatggcgcttttatttctgagatcttcaccatacatcggggtttggctagcacaagtaaggcagttgaaatttacaaaatccgcagtgtactaggctctccaactgagaaatcattgacaaatgggcttaattatgctagacctatacactatcaaattcccgtgttctattggacacattatgcttagttgatttcatttgcaaggcatgacacaacaaaccttattaca

SEQ ID NO: 34269 - DNA, 372 bp, Gossypium hirsutum
  Clone ID: LIB3145-044-Q1-K1-F9
cccacgcgtccggcagctgcaggagtttgtcagggatattttaccgatagccaccgacatcaatagcaataaaatttacttgagcaagcaaggccttgtttaattagtctaattggatataagagcagatatttgggacggttttgataaattccagtgatggaccacatcaccacatgaatcaaccggtgaaagctattagcctttttagcttagcttactaattttagaaaaaagatgccaaagtttgccgaacagctttctgtttcttgcctgctttggattttagtgaagacagtctcagtttcaattgattggattattgaattcagggctgttagataatggtaactttgagcaagccccgaatgc

SEQ ID NO: 34270 - DNA, 175 bp, Gossypium hirsutum
  Clone ID: LIB3145-044-Q1-K1-G10
atgtatctataaatactacactcttcctttgattgcagacaagggacactgggggttcgcgattctttgactggcccctctcatcttgcttgctctccatcctaacatggcggtattgtttacattcttgcacttaacttgtctttacttcaataaacaccctctcttcttagac

SEQ ID NO: 34271 - DNA, 199 bp, Gossypium hirsutum
  Clone ID: LIB3145-044-Q1-K1-G12
gtttctgggttaaagacacaattgttattatgttctattcctgccaggtctggcgatttgtttaaagatgctgtgggcgtattaaaatgaatgcaacggagtcagctcagttaatgaaataaatcttataatataaaatatattttgaaataaaaaactcataaattatctatacaaaaatactaagaaatatgtttta

SEQ ID NO: 34272 - DNA, 355 bp, Gossypium hirsutum
  unsure (1)..(355): unsure at all n locations
  Clone ID: LIB3145-044-Q1-K1-G2
ccttcggctacattcccccagaatacgcatatacaatgcaagtcaccgctcctggaaatgtgtatagctatggtgtggtgttgcttgagatcctcaccacacgatttccagtggatgaggattttggggaaggagtagacttagtaaaatgggttcatggtgctcgagcaagaggggagacccctgagcagatacttgatgcaaggcttagcacggtttcctttgggtggaggagagaaatgcttgcagctttgaaggtagctttactctgcactgacaccacacctgcaaaacgacccaagatgaagaaggtagtggaaatgctccaagaaatagggcanaattgatccacaat

SEQ ID NO: 34273 - DNA, 309 bp, Gossypium hirsutum
  Clone ID: LIB3145-044-Q1-K1-H5
aaattatttataatgttatgtcaatttactagcactgccatatcatttcaattgatttgattttcaaaaatttgaaaacaaggttactcaattttaacttcaagtcacatattccatttgttaggaaaagctatatcttttttcagaattttataaaaaaagattttatttgaattttctactgtggtacattaaagttcatatgtagctcaattccatgtgttgctttatttataggtgcttcgagagttcaatcatgttaatccacaaacagatgaggaaggaaaagtatttttagacacaagagac

SEQ ID NO: 34274 - DNA, 330 bp, Gossypium hirsutum
  unsure (1)..(330): unsure at all n locations
  Clone ID: LIB3145-044-Q1-K1-H7
ctggattcatttccaatggcaatacagaattctaccagggttagccaggatatggggatagaggcacctatacctatcagctcaaagttgagtgatttcaataacatatttcgaaggatagtaaatgcagctgagcatcctcacttgagcattcctgaaactgaggctgggagaagccggaagcagtaccatcggctcataaaccgatctctcatggttgtttcagttggagctgctgtagccattgttggatttgcagcttaccgcgtatatgctactaggaagaatgcttctagttgagggatgacgattctnctatcttctagacac

SEQ ID NO: 34275 - DNA, 228 bp, Gossypium hirsutum
  Clone ID: LIB3145-044-Q1-K1-H9
attaggttcatcaagcaggatttagaggtgaaaagatcgatgttgttgttaaggtaagtgcccttgaaaataattttaaaacctcacatgtctatgtgattttgaccattcaagtttatggcaagtgcaatattctggaatctgggatcttatgatgaccgacatccgttacttacaagcatttgcactatacattcacaagaatgatgtcaaatttgctctgttttt

SEQ ID NO: 34276 - DNA, 423 bp, Gossypium hirsutum
  Clone ID: LIB3145-045-Q1-K1-A3
cccacgcgtccgcttgggagatgtttgtcgaatcatgcaaaaggttacgcataatgaaaggaacagaagcaatcggactcgcaccaaaagctgtggagaaatgcaagaagagaagctgaaggaggtaggagttgctaatagagcaacctgctcttttgatcttgtgggtcgcctgctgcatgcatgcacatcatcatcatcatcatcatcatgtgatgaaaaattattgcaaagccagcagatggatgcatggatggatggagcagtttggctttgttattactattagggtgtttttgtgttcttaaatattataaaagttataatgtgagataaaataatagtaattaagtatttgatgactactttgttatggaatatggacaaaacataaaaaaaaaaaaaagggacatgaaatattac

SEQ ID NO: 34277 - DNA, 410 bp, Gossypium hirsutum
  Clone ID: LIB3145-045-Q1-K1-A4
cccacgcgtccgaaaaaactcaacagcccccattttctctcaaacccccctcatattcggtcgtttggactgccgccaacgcactcgtggccgacggccggcctcgtgcgagggcttttccggccaaagcgttgaagcgcgttcaaaggccaaaaccgcagatcggggaaacaaggagagaaaaaacttggccccttcccaaaccgaatccgacgacggtgaaagaccaccgacggcagggctgcgagtctgcttcaaaagcgtggaagaggcgtgtggtggcgcggcggcagcaatggcaggtctagatgcggcggctgaagagggttaggggctaaggtttattttttgctgaatgttaagataagtgggctagggtttttaatttttgggccttggttttatttggt

SEQ ID NO: 34278 - DNA, 364 bp, Gossypium hirsutum
  Clone ID: LIB3145-045-Q1-K1-B10
aaaaaaaaaaaaaaaaaaaaaaaataaaataaaaaaaaaaaaaaaaaaaaaaaaaaaaaaggaaaaaaaaaaaaaaaaaaaaaaaaaagggaagaaaatataagggaaaaaaaattaaaaaaggggggcatgtttaaagggtggctgtttttttagggggttcttggttgtgggttcccttttttttggttttactaacgtttttttttgtggaatgccggggtttttacaatgtggggggtttttaaaatatttggctttttaaatttttggctttttcgggatttggccttttcggagtggcctttttttaagtggggtggcataaatggaaatttgtaaacgggttgttcttttccatttt

SEQ ID NO: 34279 - DNA, 419 bp, Gossypium hirsutum
  unsure (1)..(419): unsure at all n locations
  Clone ID: LIB3145-045-Q1-K1-C10
cccacgcgtccggtttaaattcatttactaatataaattgtcttttcgtattatgatccgatcatgtaatactgttaaatattagacaaccggtgagctgatatttatttttattttacatgtaaaaatcacgggaagtcaatatacaaagagtactaatgtaattatgaataattttattaaaataatttgttcgaaaaaatataaatgtagatagatgaaaatattaaacttagaatatcagatacaataattctgactttcgttttatgctctattgtttacttcttactttagtttctttctaattgattcttttatggctctcacntttaacttggatttctgggattgttcagaccctcctttatgcagactttttctactattacttcgacagctggaaaaacaacaaaaag

SEQ ID NO: 34280 - DNA, 426 bp, Gossypium hirsutum
  unsure (1)..(426): unsure at all n locations
  Clone ID: LIB3145-045-Q1-K1-C7
aaaaaaagaaactctctgaaagagagttggggaggggctctcggagtgtcaccggacctccatccaggggtgcgcacgcgctcacgcacccccatcgtctccatcgcatacggtggccagaggtttaaaaacctcgcctttcaacgccgattaaaggtatccctttcctttttattatttgcaatatatatatgtacatatattttaaaaaatttcacctttgcatatttcgatcgactgtagtactcctttctgtatatgtatgtaaaaataaactttttattgaatctatgtacgtattttgaaaacgtaaaaatcggtcctttacatctttttcgattcgggcttttatagccactgtttacagtatatttggtaagaataatttccttcgattccttcctatnttgtatgctgcttttcttt

SEQ ID NO: 34281 - DNA, 400 bp, Gossypium hirsutum
  Clone ID: LIB3145-045-Q1-K1-E11
accacgcgtccgtttccttacatttgcagtcttcacaggcagctttgctcagtgcaaagagatcatatatggcaatgcagaggagcaatggcataagaaactatggttctttattgtgggaagaccggcttatggaaagtggttttatatggatggactgccttcattgttcctttcttgctttggcattctgtttgacgatcacaagggccctccaatgtatgtttttgttgaccagaatgacacaaacactgtgcctaggtgggttggaagtggtcaaaatgggattggaagaatgagggcagtcagcttagatgacagccacgaagaaatgaagatcccgttgccgatgaggttcttaggttgtgctagatcttcctatattgttcttgaactttta

SEQ ID NO: 34282 - DNA, 439 bp, Gossypium hirsutum
  Clone ID: LIB3145-045-Q1-K1-E2
cccacgcgtccgcccacgcgtccgtttcatcgcaaccaaaaaaatggcaatcccttcactttctcttctcttccttttcacctctcttcctcttttttcctcttcgccggttaaagatcctgaacttgtagttcaagatcttcacagggccattaatgtgtctaggaggaaccttaagtatctctcttgtgcaactggtaaccccatagatgattgctggagatgtgaccctaactgggagaagaacagacggaggctagccgactgtgcaatcgggtttggcaagaatgccattggtggaagagacggtaaactctacattgtcactgattctagtgatgatgatcccgtgaatccaaaacctggaactttaagacacgctgtgattcaagacgaacccgtgtggatcgtgttcgctcatgatatgaccattcaattg

SEQ ID NO: 34283 - DNA, 228 bp, Gossypium hirsutum
  Clone ID: LIB3145-045-Q1-K1-E5
cttacgacgatcggagtccttgctggaggcaagggcttgctgcggctagggttcttctttttttttttatttcaattttgctgtattgggttgctagttactgagtttagagtttgggtctgttaggtggtttgggcctgagtgttataatgtaaagtgggtgttagattggacctgggcacatttgggtttatacaatgtatatatataaaatgaaatttaaaaggt

SEQ ID NO: 34284 - DNA, 225 bp, Gossypium hirsutum
  Clone ID: LIB3145-045-Q1-K1-F2
ctagaagatttttttttcctgtcttatttttcttttttcaataaagaaagtaaattttccttcgcgttacctgacccaatcataaattttgtaagtataaattttcttaggcaaccctatttggatataggatgttttttgggtttataatagttcctgccctcgtgaaaattgtacaatgcattgcaaaactattggaataaaaaggaattggattatttattt

SEQ ID NO: 34285 - DNA, 444 bp, Gossypium hirsutum
  Clone ID: LIB3145-045-Q1-K1-F3
tgaggattatacatgcgtgaaatcccacggacctaatcccaaaacaacccatatatatggtaactgcgttgtaaagagcttctgcagtagtgtattggatgagcccaggtgtgcagcagagagtgatttcctcagcttttgtcacacatgcaaaaagaatcttgaacagaaaatcgacatttacatttacagaggtgagaaggctttttgcagtcaagagtgccgctatcaggaaatggtactagatgaagaagagaaataaaaaattttcatttcatcactgctttagatcataaaatcattttcatgtttgataatgattccataaaccaaatctctttgtagtgtttaatttagcttttgtttttaaaaaccctctccactgcagatagtgaaaagagaggatgagatgatgtagagttaatgttaattatttatatgact

SEQ ID NO: 34286 - DNA, 445 bp, Gossypium hirsutum
  unsure (1)..(445): unsure at all n locations
  Clone ID: LIB3145-045-Q1-K1-F9
gttgcgtaaccctttacaaagactgaaattctggctttatagtcgaaaaggaaaggaaaaatttacgaaaaataaaaaaaatacaatgtttttctttttttgtttccctttgctgttgttgcttgtttgtctctttgcaggtgtgggtgtgctggcgctcgggtacgggtggtgcgtgaagaccgtacggaggtgcgcagggggccgtacggaggcgcgggcatggctgctggagggtactgagcgtttgacgcaaggaagggggacgacttanggtttctgaaacctgttaaggatatgggtttattgggcctgttcttgtagttgggctatcgtttgggcctctggggtattgggttaagttttaactattagattttaattgggtcttgggttatgttttgggtttgtatatggtacttggggcatcgggcccattgtattt

SEQ ID NO: 34287 - DNA, 123 bp, Gossypium hirsutum
  Clone ID: LIB3145-045-Q1-K1-G2
ggtcaaatgataaaactactggactcttaattctagtaaaatcatgatcaaattccggaaaacggtgaatattaaaaaacagaaacttgaaaacagaaatggttcttaagccaagaaaggaaa

SEQ ID NO: 34288 - DNA, 383 bp, Gossypium hirsutum
  unsure (1)..(383): unsure at all n locations
  Clone ID: LIB3145-045-Q1-K1-G4
cccacgcgtccgattcagcagttttttgaaaaacatgtgccgaaaactggatatggtattggtaattaacctttttcccaatgtaactatcgctggatgatatttgacaggattagcctttttgcctcttgatgatatttatttttcctcctctatctcttgcattataaatttgtctgcttaagctcgaatttgcatccgagcctagcagcaccttgtgaacaacctagtttctgcatcttgttgattgtcttgcaaaaatatactactgttggaagcatttcttaatgtcatgacactaangctacattgtttaatattatattcaacggtgaacatttccacatcgaatctttacatgccttctttctggtacatgtgga

SEQ ID NO: 34289 - DNA, 265 bp, Gossypium hirsutum
  Clone ID: LIB3145-045-Q1-K1-H11
tctaaatgtcgagaagggatcgatgttaatatgatggagtcatctggaatgctcagggctcgtttggactcatcaatgcaagagccacaacaagaagaacaagaagttggtgtcaaagatggaaaagataggacggtgggacagtctggcatgtctctcgctaacagttctactgctgaatacatgcctgagcctttgaatgctttaccttgtgggacagctgctgagctaggcttagatttcaaagttagggaggatcttgtgt

SEQ ID NO: 34290 - DNA, 310 bp, Gossypium hirsutum
  Clone ID: LIB3145-045-Q1-K1-H12
gaaaattgttcactagggttggggtactccgtaggggaggagttggcacttaggggaatgattgctatgaattctttaatgtttcacataaacccggtgaagatcctgaaatccaaattgacccgctgttttgttattacatttataatttttcatacctgcctgtcctcttctcagtccaggcacaatgttgtcttacacccattagattggcatgtgaggccgttgaaatgaataatttgttttggaatatgtgtttttgcctgcagcaaaagtactactgcgcggtcaaatacatggacgtgctgtt

SEQ ID NO: 34291 - DNA, 251 bp, Gossypium hirsutum
  Clone ID: LIB3145-046-Q1-K1-A1
gacacaccttcgtatttttttaagcacattatcataacagctctatcaaacttcttaggggaggggttcatacatgtacgttactccaaaatacacttgcagagaataaataaactgacagtgtaacgaaaagtaccgaccactaatgtagacaaattcactctttacaaataacctagacttaataatcatatataaaattttagaaaatcatacatatctttaactaccatatttataatccttatcat

SEQ ID NO: 34292 - DNA, 218 bp, Gossypium hirsutum
  Clone ID: LIB3145-046-Q1-K1-A3
cccacgcgtacgatatgaaagacgttcatataagtatgacgcgactgacttaagacaaatccttggtatacttgagatattgtgcatatagggttatactggggggaaacgctcgtacttaggctagactgctaggttggatatcctgatcgcatattactcattacagggaaccatgaaagtctttacaaatataggtttacagatgctatgatgag

SEQ ID NO: 34293 - DNA, 413 bp, Gossypium hirsutum
  unsure (1)..(413): unsure at all n locations
  Clone ID: LIB3145-046-Q1-K1-C6
gacaaatccaagttccggatccttcttagttttgggcagcatggacgggagcttattacatctgaactggcattgcggatcttgtcaatcttaagcgaagagcagtttctacccaaaatggaccgagcttccttaaatggtacccttgaaaatgttgtcataaagatagtgccaatggagaatctgaacggtcgcaagcttgttgaagaaggaaatctttgtgaaagaagaaatgggagaggagttgatctcaataggaactggagtgtagattggggaaagaaggagaaggactatgatccatatgaagagaatcctggaattgctccttttagtgagcctganacccaaatcatgcggaaactngccatatcatttgatcctcacatatgggttaatgtacactctggaat

SEQ ID NO: 34294 - DNA, 426 bp, Gossypium hirsutum
  Clone ID: LIB3145-046-Q1-K1-C7
cccacgcgtccgcccacgcgtccgtgcatttgcttgggagcccaagggtcacaggtttgctgttatacatggggataatccaaggcctgatgttagcttttactcaatgcgaagcactcacaatttgggtcgagttgcaaagctcacaactctgaaaggcaagcaagcaaatgctcttttctggtcacctggtggtcgtttcatagtacttgctggattgaagggtttcaatggtcagttggaattcttcaatgttgatgagcttgaaactatggcgactgctgaacattttatggcaacagatgttgaatgggatcccactggaaggtatgttgcaacttcagtgacttcggttcatgaaatggaaaatggtttcaacatatggtcctttaatggcaagctactttaccggatacttgaagatca

SEQ ID NO: 34295 - DNA, 338 bp, Gossypium hirsutum
  Clone ID: LIB3145-046-Q1-K1-D3
cccacgcgtccgggagaaacggtcgtacggaaaaaaccgctcgtgaaagtcgtgcgtgagttcgattgcagcactggtgtgttctagaagcccttaggtttctggcattttcaaacagttgggccttttgggccatttgtgaattgggctacaggactgtgtagtttgggtgtctgtttaattgggtcaaattatatgtagttgggttaaggaactttgggtacttgtttaggctagtatttttgtttgggctaaataaattgtaaatggactttaaatccataaacactttaatttaatatttaattatatttttttaaaaaaaaataatgattaaa

SEQ ID NO: 34296 - DNA, 323 bp, Gossypium hirsutum
  Clone ID: LIB3145-046-Q1-K1-D7
cccacgcgtccgaacgtcgtcatcgtcgaatgtggatgatatgtcatcgacaccggaagagctgagtgagatagtggagctgccgagtttagggacgagctatgagtcggctgagtcagggaacgagttcgtgtacgtggaccgctttgatgggtggctttttaatccttgtggtatcccttgggattatgaagaaaattgtgggtacttcggggatgaaacttcaatgcaaatacaagatagtctcattacaaatgggtttagtcctttactatgggatcattaatgcataattaataataaatcaaattttgtttggctta

SEQ ID NO: 34297 - DNA, 382 bp, Gossypium hirsutum
  Clone ID: LIB3145-046-Q1-K1-E10
cgcgtccgcccacgcgtccgggattgcaggtcttcaaggatggccattggatcgacgccaaatatatccccggcgcccttattattcacattggcgaccaaattgagatactaagcagcgggaagtacaaggcagtgctgcatcgaacaacagtagacaaggagaaaacgaggatgtcatggcccgtattcttggagcctccaggggaatttgtcgttggcccacttcctcaactcgttgatccccaacttcctcctaaatataagcctaagaaattcaaggactatagttattgtaaatttcacaaactaccccagtactgaacccaaattgcatgctctattatttttcttttttctttttttttttggtactatgtagt

SEQ ID NO: 34298 - DNA, 403 bp, Gossypium hirsutum
  Clone ID: LIB3145-046-Q1-K1-E2
cttcactaaacatagaagaggatgaggaggacttcccgcaagactctccagaggagcgccgagttgatttagttgttcccttaaaaaaatcagtgaagcaaataattcgtgagaccactgttgtaactacaagacggattcttgaaagacttgctgttatctatgtttcacaacgcatggcgtggaaactccttaaagatgtcccaaaatcagctgtcagaaaatcccaaaggggaatgcctgcaacagtgtatttcttcagagttagcagaacaactttcagaggtcaccttcttggagtcacggctgcatggattgtccaaaccggtattgaaatctaccgaagcttttctcgcataacgaactctgatgagagtaatgaggccaatgtaacagttcgagc

SEQ ID NO: 34299 - DNA, 105 bp, Gossypium hirsutum
  Clone ID: LIB3145-046-Q1-K1-E5
tcttccaatggttcagatgtgaggagtagttcgaaaagccatcgagaaacatagacctgcggggattatctagttgttcatcacacctggaagctatcgggtctg

SEQ ID NO: 34300 - DNA, 161 bp, Gossypium hirsutum
  Clone ID: LIB3145-046-Q1-K1-E6
ggcgaccggattccggtcgccccgcgtcgccacgcgacggaatctcagaaggcccaaaacaaagcagtttctcccacgatttcgatatctggtgagagatcgtgtcaatgagcgacggggaaagacgctgtgcgacgcccggaaatgcggttgcgggagta

SEQ ID NO: 34301 - DNA, 407 bp, Gossypium hirsutum
  Clone ID: LIB3145-046-Q1-K1-E7
aaaaaaaaaaaagagagtaaatttatacagtcaccgttaagtcttttgggtccgctctccaccgtctgttacggacaccatctgcgccgtgaaattcttcatagatcttctcctaccttttgggatctaacaaagtcttgaaaggtaaacgcagataaacccccattttcattttcaatttcgtttttggatcaagagtctatattagaagaaaaaaaagggacccgattttagtttttttgtttagtttcgcattttcaaggataaaaaagtttataatttctttatcaaaaagaacaagccagtttcagtttttattgcagacgtttcgttttggagcataaagatttgatcgttctttctttctttatataagatacataaaaaaattagattagaaaggaaag

SEQ ID NO: 34302 - DNA, 391 bp, Gossypium hirsutum
  unsure (1)..(391): unsure at all n locations
  Clone ID: LIB3145-046-Q1-K1-E9
gtgaagcccactcctgttacccctgaagggaaaccagtggaagcagctccatctcccgtggaactcgaaattcagaaactctctgaggagaggaaggagttgctaaaagggtcttacagggatagacacttcaatgctggatcaatactgctagggtttggggttcttgaggctgttggtggaggtgtcaacacatggtttaggacaggaaagcttttcccaggtccccaattatttgctggagcagccattacagtgttgtgggctgcagccgcgggcctagtacctgctatgcagaaagggagtgagactgccaggagccttcacattgccttgaatgcagntaatgttatactttttatttggcaaatccccacaggtatagatatag

SEQ ID NO: 34303 - DNA, 286 bp, Gossypium hirsutum
  Clone ID: LIB3145-046-Q1-K1-F12
ccacctcgactgccattggatcatggctcgacataatcgatcatgattttattgcctggccacagactttggctcacatttttgatgtggacagctggacttatgggccttaactatacctatggtgaatgctatggagcattttgaaagactgactgttgccaagactagagatggtccacagtagacataaccaacacagagtgatgtctccttaagtagacacatactgcagtgacttgccttacaacaaaggctgtagttgccagttgtatttttttaatgt

SEQ ID NO: 34304 - DNA, 305 bp, Gossypium hirsutum
  Clone ID: LIB3145-046-Q1-K1-F2
gtggcacctactgagaaacatcctggaagtttattggaaggtttttcacaaagccaaatacatacactggcggtcaaagacacttgcatggacgctggtagtcttccaggagagtttacttttgagcactcttacagacaacgggtcgcatattgtacgcgaaccacctatgacaataactctgatacaaatgctattgcaatatacaacagcttgaagggcagaatcaattgtatgattgccactaatgactgcagcatgctctagtatgacacggatagatttccgcttatagaccatctcct

SEQ ID NO: 34305 - DNA, 316 bp, Gossypium hirsutum
  Clone ID: LIB3145-046-Q1-K1-F5
ctactgctttcggtggagagttccaatctgagcatactgctgatgtactgaggcatatgatggagatggcaataggtatggaactggatcagatgatggaacttgcaagttatctgatatcagaaatggccaccagttgcaagtatactatcagcaacacaatgataaggacgttccacttgtgacctcaattgcattctccatatccggaagactactttttgctggatactcaaatggagactgctatgtatagtacacattattggccacggttgtgttgaacttaggatccgaccagaaatcacatgagaac

SEQ ID NO: 34306 - DNA, 360 bp, Gossypium hirsutum
  Clone ID: LIB3145-046-Q1-K1-F6
gggaagttttgatacgagcagtgtctcatagccggaagaaacatatggttcagtaagaactgatttgtctgatacacaacagtcttgtcaacatagtgtttcgatgaatcgtagtgctgctattgttgttccatcaccaatgatgcatcagagaccttcacaattggatgtggggtaagcacaaagggaaacaaagagaaagttacctttttcaccacaagattctcttggtgaatgatctcaaggccctatcgtggtggctgtgatcttgaacccagtacgatctgaacaggtagagaaaaagaacccatcttttgaaggttgaaggtaattaagttagcaagttacttgatggaaaca

SEQ ID NO: 34307 - DNA, 272 bp, Gossypium hirsutum
  Clone ID: LIB3145-046-Q1-K1-G1
aaagcagatgatcagatatgatctactaagggagctgtataagatcaagtctgtagaggcggcagtcaacctatagcacctgaaaacgaagaattccttattcatgcaagccacttcgatactgacaatttcccgtctgtgtgttttggtgaacaaaatcgatgttgatggtggaatcagtaaattggtgtctttgaaaaacgtcctagcatggcgtgccttgaaaggaaatatcccctatttcgagacatctgccaaggaagtgagttacg

SEQ ID NO: 34308 - DNA, 294 bp, Gossypium hirsutum
  Clone ID: LIB3145-046-Q1-K1-G11
agttcatccattccctcgcatatttctagcacccacaaacaatgctagcgatcgggggggatattctacctatgtgcaccaaataacaagagtaaaacggcgtattgtccatttgactatttgggcattaatcagcatactactaactatctatatgacccacatcatcctaaaccaaaagtttcaggctatcagcaagattggtatgctggatttgcttatgcaaaatgaggattgtctattggtcctacaactcattctcctttggatttacaatgtaccttggggattata

SEQ ID NO: 34309 - DNA, 267 bp, Gossypium hirsutum
  Clone ID: LIB3145-046-Q1-K1-H11
aaactatttgcatggaactgcaaatattttcgtagatatcaactgggacaatatgggaggataaaatgcttcagtgtgcaattaaatattggatagaacatggatttattgtcatatatgttgctctacaacataactagtaggatgttcgatctgctagagttggtaagctgtggagatatttggataaatctgatttcataagcaaattgatactgacaagataactattaaatgcttaaatatatgcttacattcaaagaaagc

SEQ ID NO: 34310 - DNA, 115 bp, Gossypium hirsutum
  Clone ID: LIB3145-046-Q1-K1-H2
atcagaagggtatgcataaagtaaaacaaattggatcacaagatcaactccttaatgctgcaaaagtatctttaggaattttgggcgtcatttccaagttgactttgaagagagg

SEQ ID NO: 34311 - DNA, 343 bp, Gossypium hirsutum
  Clone ID: LIB3145-046-Q1-K1-H6
cccacgcgtccgctgcagttccgcaagtttactacaatgcacagcaaggggtcaagaatgtcgtgactgaaactggtgctggccaatggggtagttcattggcctttgcctgcagcttgttcggtcttggctgtgaagtgtggcaagttcgtgcttcttatgatcagaaaccatatcggaaattgatgatgcaaacatggggtgcaaaggttcatccttctccatctgacattacccacgcaggtcgtaaaatacttcaaatggatccttctagccccggaagtttagggatagctatttcagaagctgtagagattgccgctgcaaatgatgataccaagta

SEQ ID NO: 34312 - DNA, 347 bp, Gossypium hirsutum
  Clone ID: LIB3145-047-Q1-K1-A2
cccacgcgtgcgctttgataagagactctcaatacattgttgaagaagtttctgatgcacaagttaaccagattgttagtggggctttagaccgtttacattatgaacgtgatccttgtgtacaattcgatggagaaaggaaattgcgggtttatttacacagagaaagagaagaagaagactttgcggatgatggtacttcatctactaagaaatggaagaggcctaaaaaggatactgctgaacaatctgatcaaggagctgttattgcggcttttcatgcagccggggatcagttgggatttgatgatgataaaaagatggagacagagtgtgaggatagacaa

SEQ ID NO: 34313 - DNA, 389 bp, Gossypium hirsutum
  Clone ID: LIB3145-047-Q1-K1-A3
acgcttttgagcactgctttgctgtctactcgccattctttttgcccgtttcgatgcatgttgtgcttgcagctctaagagaactaagaagatataagcaagaaaaggccaagtacctaacttggaaggctaaagcaaacacggcaacataaagcaaaggccccaactgcaaaagggattattctaagccatgggagatattcaagaaacaatttggcgacagggtccgaaacacaatttttgcaggcttgtaaccctaccaatttacctcatgccttataccatagaaacttatctaaaagtggttgaatttcggactattttttatgagtccaagatttggatatatgcgactgctgtctgatggaaatgcaacgaatgtgttcttt

SEQ ID NO: 34314 - DNA, 169 bp, Gossypium hirsutum
  Clone ID: LIB3145-047-Q1-K1-B3
ggaacaaaaggctgaaatcattttgttgcaccgaccatatatagctgctgagggcgagataacaagctctgatatacgaactaacacatggtgctgtcgaattcccatacgtccttgactagaataaggaccacgacatccaagcaccccttattggatgacaagaaga

SEQ ID NO: 34315 - DNA, 387 bp, Gossypium hirsutum
  Clone ID: LIB3145-047-Q1-K1-B4
agcggaggagcttttgaggaagatccaagaactggaggcaggacatgagcatctccagcaagaaatgtctagattaaaacaatccggcgccggtcagtcaaagcccgaccacattcgtcaaagatcccactctacttcccctcaacgccgccgcttcccggggaattcggccgcggcggcggctacgacggctgctgctttgaagaaaagttcttgctcgtttcggcattcgtcgccgttgcaaagagagagcagaaggtgtgataccggaaatggcggcggcggaggtgatggagaaagccggaataccggtccggttgccgttaatttcactaacagtcagtatttaaatatattgcagtctatgggacaatctgttcatatatt

SEQ ID NO: 34316 - DNA, 223 bp, Gossypium hirsutum
  Clone ID: LIB3145-047-Q1-K1-B5
cccacgcgtccgatttgtagagcctttaatgaataaccaatatctgttcgcacgacatgagcatctccagcgggaagtgtctaaattaatacaaacccgctccgatcactcaaatctcctaccacattcgactaagataccaatcttcttatctctaacacctcctatttctgtagaattctgtcgcatctataaatacgacatctgcaagctttcaataaaa

SEQ ID NO: 34317 - DNA, 331 bp, Gossypium hirsutum
  Clone ID: LIB3145-047-Q1-K1-C12
ctcacgcgtccgcccacgcgtctttctattagaagaagacgaggaagaagaagaggaagaagaatatccttgtagctccgaggtcgagtttcccttacaggaagaacctttacctcaaatacttatcgatgagaaatggtcgaatcgcttgttcaagttcatcgccattggcattccttcagccattttggtcatagttgcaattaaatgggttggaccctttatgttgaaaaaggagattgtccctgttttacaatgggaggcccatgcattcatcacaaccgagagtatacttgtaaatggaacttcattagcttctatttccaacttt

SEQ ID NO: 34318 - DNA, 152 bp, Gossypium hirsutum
  Clone ID: LIB3145-047-Q1-K1-C2
cggacgcgtgggaaagttttgatattagctctgctggttgtgtaagattgccgtttcaaaatacaaagttatctgctatattttagtttattatatattatatatatgtatgtatgactatgtgataatatcaacttattcattcctttttt

SEQ ID NO: 34319 - DNA, 251 bp, Gossypium hirsutum
  unsure (1)..(251): unsure at all n locations
  Clone ID: LIB3145-047-Q1-K1-C5
ctttattgtagggtactcccaaaacaggtgctccctcgactccgctccattctggcatcttcgacaggtcgcagatcccaacattcttcgataatgtagattacaaaaagtaggaacatagttacaaaaaatcctccagtttgtaattttaatttttggatgtaaatcaaggctccacaatctcttgtaaaagagtctgtaatttgattgtatttgattttgttcaccctgtaaaagaagtttgtgcccnc

SEQ ID NO: 34320 - DNA, 241 bp, Gossypium hirsutum
  Clone ID: LIB3145-047-Q1-K1-C9
cccacgcgtccgggttgattgatttcatgtttgactggcaacagcttttgcagtggattatcttaagccttatattctcttatcttctagccaagctaatctccttagtcgtttcttttcaagacgataaccttttctataaccctagcccgaaacttcaatgttcaaggctactagaaaatcgaccatttcggtttttgatcctacccgattggaagtactgagcacttgggactgcaca

SEQ ID NO: 34321 - DNA, 408 bp, Gossypium hirsutum
  Clone ID: LIB3145-047-Q1-K1-D11
gtcgaaggcggttggccgggcataacgaaaggcgtcggaagagctcagctgaatcatcatcagcagcagaaagttcaagtcgcagagggatgatgatcagtgctcaactgaaagagtctcattacctagctgatgatcaaagagccagagtcaatccaatggcaatccatggcagttcatcttttaagcgttcccaaatcagataaggaagcttaagcgaccaaaacaatacgctccctctcttctgtcatccgatggttcatgtcttgcactatgtactacttactagattttaatggaggattttaataacaatgtcaggcatcaactcgattatcgagatttcacaaagtttgttttcatgcgaacttgccttgctgtataatgatgataatattcctttatcta

SEQ ID NO: 34322 - DNA, 365 bp, Gossypium hirsutum
  Clone ID: LIB3145-047-Q1-K1-D2
cccacgcgtccggaagagatggtgactggattgtcccaattttagatagttatgatcaaaatgcttttggtagtctaggtgacatcaatgattctaagcagccatttgatggatgtgagagtggaagaaattgaactttttgctttgaggataagtctagttgatttcaagtcattgcacctttatctctgcaatatacagttccattctcttaggtagttagatcctagcttgaatggagatgatcgggtgtttgaaaaccacaatgtgcttcgcgagacaactaataagcttatatcaacgcagtgacagaatgacaggcttgtcggtacagtaataaagaagcttgggtggaacggatgatg

SEQ ID NO: 34323 - DNA, 356 bp, Gossypium hirsutum
  unsure (1)..(356): unsure at all n locations
  Clone ID: LIB3145-047-Q1-K1-D3
gaagacatcaactatgaaaaatcagtgtacaagactaaaatgtgcccactctgccttgtttcaactaaggaaatcctgatcgattccttttttggcctccgcttgcttgtttcgagagatgttttgtctgtggatgcagtaaagtaaaaaaaatcccggattcatcagatcatctgcaaataggtatatatagatattaatgcttgtaattctatttgaccacttaaatgatggatgggtactgagaccattcaacacactgtaaattaggcaaaacattcatgattttgcatttataaattcagctaagcttaaagtaacaacaatgttaatagatatgcaacanagattacact

SEQ ID NO: 34324 - DNA, 232 bp, Gossypium hirsutum
  unsure (1)..(232): unsure at all n locations
  Clone ID: LIB3145-047-Q1-K1-D5
cccacgcgtccggaatcattgttttcagatttcatatttaatttaatcttttttatggttcagttcagaatgtaaaaattaattaaaacattgtactcaacgtgacactttggccattcttatttcaaaagaaaattcatattgcataatcagctcatttacactttaatgagcctttttctttgnaaaaaaaaaaaaaaaaaaaaaaaaagaaaaaaaaaaaaaaaggagg

SEQ ID NO: 34325 - DNA, 258 bp, Gossypium hirsutum
  Clone ID: LIB3145-047-Q1-K1-E10
gatgatacaaatgcttattagctgtttttgtcggtccagccatggataaaagcaagacaggctgctgaatcaggatctgctacatacaaataactgcacatggggctggagaaatgcttactctaacactgtttgaacacaccgggttatgactgtacgactcgcattggatattctgaataacatgaaaagacacgtgctgcaacactgtacgagaatgatatcattgctgcagccgctctttttagtaatagaaac

SEQ ID NO: 34326 - DNA, 373 bp, Gossypium hirsutum
  Clone ID: LIB3145-047-Q1-K1-E7
ggccgcccacgcgaacgtcttgctatgaatgtttcttccaatttttttttgcgaacgagggaggaaaaggggaccattcaagaattaaccatgttcactgacattttaatccatgtaacatctattaaaacttgggagaacttatatcataacattatgactattctaaatgcatattttcatttttctaaaactaaactatcactttatatgatatattacatgggataaaacttgttatctctaaacatttatatgaaatatacacatcttaggtttttttcttttatgacactaaattaaatttatgagttaaatcatcttataaagttcatatatatattatatttattatatatttatctttattata

SEQ ID NO: 34327 - DNA, 347 bp, Gossypium hirsutum
  Clone ID: LIB3145-047-Q1-K1-E9
tagaaatcactttatttcttggtgtcaaaatcaaaacaaaataggatatgtggtataaaaacggggaatctattctcttctttttccaaaaaaatgctcttggagattgtgtaatgcttactcttaaactctttgtttacaccgtagtaatattctttgtttctctcttcatcttcggattcctatctaatgatccgggacgtaatcctggacgcgaagaataaaaaagggagagttccttgcttcatttttagaaatggtattaggatttgatctattccactaccaaaaaccgaaacggaaagagagggattcgaaccctcggtacgaataactcgcacaacgga

SEQ ID NO: 34328 - DNA, 409 bp, Gossypium hirsutum
  Clone ID: LIB3145-047-Q1-K1-F11
cccacgcgtccgcccacgcgtccgaaagttttcacagtctcttcctatcaaaatcaaacccaaaatatatgatttttcttcttatttccttcaaagtttcagttagtcagattctttcaagtatcaaattaagtcatgcccaccaacgaaaacttctcaggtgtttcgaattgctatgttttcaagagccaattgcaggagtatgcacaaaaggtgggtcttccaacacctgtatacgagactttcaaggaaggaccgtcccataaaccttctttccgatcaactgtaactgtaaacaatgttaaatacgattcgttaccccgggttttttaatcgcaaggctgcagagcaatcggcagctgaaggggctctcttggagttgttcaaagcggggaagcttatgaaagca

SEQ ID NO: 34329 - DNA, 429 bp, Gossypium hirsutum
  Clone ID: LIB3145-047-Q1-K1-F12
gatgcaatcttgataggagcccagttttgctcagattctttctcttccatttctcatgctggagtcaagaatggtgtttcatattcgctgtatgctaggattgaatctatcacttcactggaaattctggaacaatgtggaggtttgcagaggaagcaaatcactcttgttgacaatgatggagtaaaactaagatttctcttgtggaatgagcaggtaatcctagccaatcttttcagtgttggaagcatgctcgccctggataggccatatattgctattgcagcagagagtgcccttgaaacaagtatgcctatcatccacacaaaatcgaactcaaggatcaaagttgcatgctgcagctgatcctacacaaggtcccaaagtttctcaagtgagcttgccctgtgattccccagggtcaattga

SEQ ID NO: 34330 - DNA, 345 bp, Gossypium hirsutum
  Clone ID: LIB3145-047-Q1-K1-F7
ggggacccatcagtataacgttacggcaccgcttgctatgccgtgttgttagagatgctgctaaaaatgagtacgaaacagaagaaccttttcttgttctaaatgaggttacaattgaccgtggaatatcatcatacctcacgaacctggaatgctattgcgacaattcctttgttacatgtgtgcaaggggatggtttaattttatcaactacatctggtagcactgcatattcattggcagctggaggatcaatggtccacccacaggttccctggtatctttgttcacaaccaatctgtcctcattcattattcctttcgacccctgatatttgcctgagca

SEQ ID NO: 34331 - DNA, 422 bp, Gossypium hirsutum
  Clone ID: LIB3145-047-Q1-K1-F9
gagagtttggtagaaattgaagcaaacaaacctgcaaggcagaaaataattgaacccaagacaccgtaccatcccatgattgatgatgatgatggtatgcatagtgtttacccttctacttaagtttagtatttcatgcttagatacttgtgtaagtattcacaaattggtgttgaactagctttatttttaatttattcctgctttgggttagaactttattctgaaagttgaattgcattttcacattgcaatctggctcttgatttgcagggtctttgtctcctgtagggcatggtttcaatgattgtatcggtgatgctatggatgcagaagagttgcgctctgctttgaaggatgtggcttcctcgagcaaaaaaacaattgggcagtctagtggttggacatcttctgatgatgat

SEQ ID NO: 34332 - DNA, 364 bp, Gossypium hirsutum
  Clone ID: LIB3145-047-Q1-K1-G1
gtggatactctaatctcgggtgagattgattgtgctgatttcagagctaagttgcttgctaacaagagcaagccagctataatcaacgttaacataggtctctctctctctctccatatatataacaaaaagtcatgggttttgttaaaatgagagaaataaccagataacattgtttactgtaggaacaactgtcaaaggtgctgtagatgacctggatcttgtgatacaaacccttgaaggatgtggtttttcacgtgataggttctacattcattgtgatggagctttgtttggactcatgatgccttttgtcaaacgggtaagttaatcgcgtgtatagctttgttttaacgtggatttg

SEQ ID NO: 34333 - DNA, 363 bp, Gossypium hirsutum
  Clone ID: LIB3145-047-Q1-K1-G10
gcagaactagatggatgtgctatatatgatcagtgtgccagtttgctgaatgtggggcgggggaaagatttgcgtaagcttgcttcaatgcttgtgaatctgatgaacggtggacaaccactacaaaatgcttctattgatgttctgagcccttcacttattcctgcaacttatgcttttgtttttcagaaagccatggacctttacaagaaacataggctgcagatctgtgcttttacaaatgccattggtgggatgtttggcatctactttattgcccaacgaggagcatagttctgatcttgtattctatgaagcaaaatagccagtttaagatttctgaagctggaatgggtgattcag

SEQ ID NO: 34334 - DNA, 379 bp, Gossypium hirsutum
  Clone ID: LIB3145-047-Q1-K1-G3
cccacgcgtccgcccacgcgtccggaacaatcagtcagatgctatgttgaacccacttggcatgcaaaacccaaaccagccacggatcccaagttttgctgatccttatcagcagtatatgggtcttcaccagatgcaattacaccctccacagtgtcaagcaacggcccagccgagttccagtaaaccaagtaacagtaagggagctgagaatcttgaaaatcacccatcaggtgatatggcacgatagcactaaaatattggctggctatctgagttctggacgagtgttgctcgtgtattccttttaatctgcaacacacaacattaaagatctgtgcattgcaggttgacaattcaagcgaggatcattcccgaa

SEQ ID NO: 34335 - DNA, 348 bp, Gossypium hirsutum
  unsure (1)..(348): unsure at all n locations
  Clone ID: LIB3145-047-Q1-K1-G5
gttcccaatgatgtccctgatgaattggttgaaggctcttctgaagacgacgaagaagaagaacccaagaagtctaatatcaagcccaagaaagctaagatcaactagtacttaggtaaaaaacaatgtatggaattattctagttttcaaccttgtcaccctcctgtgtcattgaagaaacgtgaatcaactatttatagcattatgttgaacaaaaaatgcattgtgaaatanaaaaaataaaaaaaaaaaaaaaaaaaaaaaaaatataattaaataaaatataaaaaatttttaaaatataaatattatttaatttaaaataaataattaaaaaattatattat

SEQ ID NO: 34336 - DNA, 396 bp, Gossypium hirsutum
  Clone ID: LIB3145-047-Q1-K1-G6
aaaaccccaaaatagatttccccaaacacacagccattttggccaaaaccccaaaacaaatttcccccaaaatccctaggcatctgaagctcctcagtcgacccgaccacctactcatcaccgtcctttgtagtctctattgcgtcccgtcgccgtcgctctccgctgccgtaaccaatagattagcgctagtcaattttcttctccattttggttttctctagaagcaaattcattaataaagaagctccttgatcccaatcctaaaacttttcatgaacttttctagatatacaaggtgcttaaagtgtaaagcagagggtccaaagagggttgttacggatgatgttcaaatgaagaaagaggattggaactacccagggaacattggcaccc

SEQ ID NO: 34337 - DNA, 404 bp, Gossypium hirsutum
  Clone ID: LIB3145-047-Q1-K1-H2
agctttctcaagaatctattcatgttattgttctcggtttctcgtctgccatcataacagctgaaaacattcgtggagaatttaaatatagaaccaaagacaaagaggaactatttgccagcaaatctcacaagcgacatgtcataaaggttggaaccatgatccgatttttagtcaagagttttgatgaggaaatacttcatatcattggatctctgatatcagctcacacaggaagcattcgttggttggatagacatttggaggaagattcagaatttgataggagttctatgaagagtagagatagagaatggcttggggataaagctgttgatgagggagcaactcccatgagctacgataatcatattaaaatgtccaaaaagcgtagaatcacagaa

SEQ ID NO: 34338 - DNA, 376 bp, Gossypium hirsutum
  unsure (1)..(376): unsure at all n locations
  Clone ID: LIB3145-047-Q1-K1-H7
atttaatcagtcgattgtttaagcaaagtaatgatgaagcttaatttgctctttggtcttacattggccatcctcatctcaggggctcaaatggcgaccttcaccgtaaaaaacaactgtcagtaccctatctggccggcaacccttgtcggtgatcctaatttgccacaattgcccaagactgggttccagttagaccctcaagcacaagattcccttaacgttcctagcccatggaaaggcaggctctgggctcgaacacaatgctcaacctcaggcggaaggttcacttgtgccactgctgactgtgggtccgaccagatagcttgcaatgganaaggtggagccccttcggcaaccctggccgagttcacta

SEQ ID NO: 34339 - DNA, 310 bp, Gossypium hirsutum
  unsure (1)..(310): unsure at all n locations
  Clone ID: LIB3145-047-Q1-K1-H8
gtttccttgttttatacatgaacaagatcaatttttcctttgaaaacatgaacaatatatatatttgagaatattatatattcatttgtacaaaagacttcccacatacttttgggactcctttcaagggccgttgggcttattgtaatcttttaatccaaaatagtttgcttcanaaaaaaaaaaaaaaaactaaatataaaaaaaaataatatgtcaaaaaatacaaaaagggcgggcttgcttggatagacaatcgttaagaatactcgcatcttaaaagggcgctcttttttaaggagagatcgat

SEQ ID NO: 34340 - DNA, 280 bp, Gossypium hirsutum
  Clone ID: LIB3145-047-Q1-K1-H9
cccacgcgtccgatcgattaatgtttatgtgtaagctgcaaaatttggactgcaaagtgcatgatttctgtgccctcgatatttttgggcttaatgggccaaaatttgaatgatgggccaacgggcccaattcgctgagtcttggaaaaaaaaaagaggagaaagggagttttctctctggggaagcccagaaatcggtcaggaaagccaccgcacgccgtcgcagcttcaccgcgtcggccaccgtacacggtggccgaaaatcgccttaaggtatgga

SEQ ID NO: 34341 - DNA, 250 bp, Gossypium hirsutum
  Clone ID: LIB3145-048-Q1-K1-A10
gatatgagcagtgacagtgaagttgataaccctctcgtgtaggatgatgggtctcatgtgaatgccgagatgaacggggacgacaaaaaggaaattaatttgatcatagtttgttgaaaggaacataaatctaaagagcagatcatatttaaagcactaagcttggattactgttgctgttaggaaaaaaaatttggcttgcaaaatagttttctaaagtatggttttttaatagatattaattcattgc

SEQ ID NO: 34342 - DNA, 356 bp, Gossypium hirsutum
  Clone ID: LIB3145-048-Q1-K1-B7
gcagtctcgtatgcagcctccattgctttactttcagaattcttcaaataggagaggagtgcagactcatttccccacttctgctagagtttcaaggttaaggaatcgaatattgaatcaacctcggatggcaccatctaggacaaggaattttcaatttcctttagacatggacttagatatgagacttgatatactggaagccatggatgctgcaattggagattcttatgacatgggaatggctagtcacattttccaaattcagcgtgattttaatgaaattgattacgaaatgctgttggcccttgatgattactatcatcagcattggtgtgcatttattaatcaaatta

SEQ ID NO: 34343 - DNA, 297 bp, Gossypium hirsutum
  Clone ID: LIB3145-048-Q1-K1-B9
agctgtcggtgcttaagggaaaccactgactgtacggcaagaagtttttggtgctctgcgtccaactgctctgaggggtacatacacagactatgctattcttactgaggactaactttcttctaaaccagcttcattgactcatgcggtaacaaatgccattccatttgctacattgactgcatggagtgccttaaaaagtcctgcaaggacaactgtaggtgaaacgctgttagaagtatgcagcggaggtacagtaagtttttctagcattcaaatcgcagttgctgcagggtg

SEQ ID NO: 34344 - DNA, 381 bp, Gossypium hirsutum
  Clone ID: LIB3145-048-Q1-K1-C2
cccacgcgtccgaaaaaagggattttcgtcgtttgtggatcactcgaataaatgcagtaattcgtggagtgggggtatcctatagttatagtcgattaatacacaatctgtacaagaaacagttgcttctgaatcgtaaaatacttgcacaaatagctatcttaaataggaattgtctttatatgatttccaacgagattagaaaataaggagatcggaaggaatccaacgaaatgctttaaatgaaatggggttccctcgagaatgaactcggggaaagtagagtagaaattaatatgataaaaaattctgattctgataaggtcatcaaaacaagatgagcgaaaacgctcaataaaaaaaagattttttttctttccc

SEQ ID NO: 34345 - DNA, 391 bp, Gossypium hirsutum
  Clone ID: LIB3145-048-Q1-K1-C8
cgaaaatagacagttgtctcccagtgatgatattgacgctgagggataagagcggcaacaagatatgggctgactacatttgacaatggtttttgtgtatgagaaagagtaatctgtaaattcatttccattgttggagatgtacaaagttcatgtcaagctgattctgttctttaaaagatgtgcaattcagtcaacagttgcatcttctgaatttcatattcctgcattgtataaatctgaaaattgtcacatgtggtcaaaacatagacgacacaaattatccttttgggaggtttactgggggccggtgttgaattttaaatcaaacgttatctgtgcgttgggtggtttttttgaatcataagagcacaaagagaaaacttcaaat

SEQ ID NO: 34346 - DNA, 390 bp, Gossypium hirsutum
  Clone ID: LIB3145-048-Q1-K1-D3
attttacagttggggggaggaatcaggaggcaggcttgggcatggtgtggaagcagatgttcccaaacctaagcacatagatactctcaatggcacgaaatttgaatcagtagcatgtggggagtatcactcttgcgctgttacagtctctggggatctttttacatggggtgatggaacacacaactcaggtcttcttgggcatggaactgaagtcagtcactggatccccaaaagggttagcaacatggaaggtaaacatgtcttatatgtatcctgtggaccgtgtcatacagctctggtgacatgtggcagccagttgttcacatttggagatggatcttttggtgccctaggccatggggatcacagtagctcaaacattccccg

SEQ ID NO: 34347 - DNA, 298 bp, Gossypium hirsutum
  Clone ID: LIB3145-048-Q1-K1-E12
cttttcaaaatgaagatcaagccttacattccagatttcaagctagcttttgaacatttctgcattcacgctggaggaagagctgttttggatgaactggagaagaatttgcagctctccgaatggcatatggaaccatcaagaatgactctcttccgatttggcaacacctcaagcagttctctgtggtatgaattggcatattcggaagctaagggtaggattaggaaaggggacagaacatggcaaatagcatttggttctggattcaaatgcaacagtgctgtatggaaagctt

SEQ ID NO: 34348 - DNA, 382 bp, Gossypium hirsutum
  Clone ID: LIB3145-048-Q1-K1-E5
cccacgcgtccgcccacgcgtccgatcattatgcactttcttttcggctggatcaacactctactcttgtttgaaaataccttacaataaagaaagttttactgccttacaatgttttcgagtataactggaattagtcaaaaacactagaagcataaaaagtagtttatctggaattcgtgcatcaaatgtgactagatgcaaaagaaggttctttgcctgctcaaaagctagtagctgtatagcgaaaggagaggcctaagaagcaactaataagcacgacaacatgcagcaacaagtatgcaggcagagtataaacctttttaaatctttcagagccatacatatgctacagatgtgaagtgtattacataattaaaag

SEQ ID NO: 34349 - DNA, 364 bp, Gossypium hirsutum
  unsure (1)..(364): unsure at all n locations
  Clone ID: LIB3145-048-Q1-K1-F11
tcgtttaccccctcataaatgaanttgttccgatccatccataacacccatatagcgcgggcagtcattctatagaaagccatgggtctactctcaatggaggacatgccttgaaaatatgctcccttgtttcagctcctgttagacaccttctacacatgggggaagccatcattctgagaaatttaagattactaaaactaggcatatagttacaaagtttctccattttgtaattttgattttcgagggtggattcattttccataatttcttgaatatttgcttgtgatctgaattgtatttgatccccgaccttctttgtgtaatataaaactttttcttttttattttataatggtat

SEQ ID NO: 34350 - DNA, 301 bp, Gossypium hirsutum
  Clone ID: LIB3145-048-Q1-K1-F12
catagttctaccgtcatggagagattacctgctatgcgttattctctgatttatgggggagcttacccatagtctcttttttgtcgttgttttcctgatcccaagattatggatttatgatgtgggaatgaaaaagaagggtgtggatgatttccctttttgtgtcacttggtcttctggtgagaaggaaaatgtctcttgtgaatctttggaagcatgctcgtattgctttcaacaagtattttttcaagtatgctgtgaatgattccttactcctgcttgttcgtgttcacccattcca

SEQ ID NO: 34351 - DNA, 298 bp, Gossypium hirsutum
  Clone ID: LIB3145-048-Q1-K1-F5
gccacgcatgaggtaacttgtatcctgcctgacgaccaccggtagaatgcgtgtctacaggaggtggcgacgaccaaaatccgacacatgctatgcacgccgttgtaacgactgctatgctcgtccttgggtgcctatgtcagtgtctctgacctattctgagaggtggcggcacctatggcgaaagaatacttgaaggaacggacgtgggtttcaacatcaactctgacaataactggggtgggatgatgccaaccatatttgcaggcatctatacttaatatatacaggcacctct

SEQ ID NO: 34352 - DNA, 380 bp, Gossypium hirsutum
  Clone ID: LIB3145-048-Q1-K1-G4
gcatcagcagctacatatgaagatcttaagagaaaactcgaattctttcaatcaaaagtgaagcatgcagttgaagtactaaagcctcagtgcatcaacaacggaacaggcgcaggcgcgatccaagagttagaaggacttgcagaaatggacattaacgcaccatttcacgagcaagctcagccgtcgcagcaggtgccaacacagccaccgatactacagaacgaaggacaagggccttgatgttttttagttggtgtaggaaatgttttgacttaggcacacaaccatgatatatgtctgtaaagggaaacagggaagttgcagatcaattttttttttctttttgttgttgctgagggtgtctgaaacattttttc

SEQ ID NO: 34353 - DNA, 265 bp, Gossypium hirsutum
  Clone ID: LIB3145-048-Q1-K1-G7
accatatccatggcagtatcttaagctggatctcagttgcttgccattgcttggatctcagttgactttgttgtatttattgacaccatattgtaatataattacaatctttctcgcttaaaaaaaaaaaaaaaaaaaaaaaaaaaaaaaaaaaaaaaaaaaaaaaaaaaaaaaaaaaaaaggaagggcggtctatttaaaaaaaccaaacttaccctcgcctgcaaggcaataaatttttttttttttgaggtaacttaaatta

SEQ ID NO: 34354 - DNA, 224 bp, Gossypium hirsutum
  unsure (1)..(224): unsure at all n locations
  Clone ID: LIB3145-048-Q1-K1-H10
ntcacatggacttcactcaaccttcatgaagcatggctcgaaaactgatttttgtctgcaactttaaaactcctgctgtatattactccaatttgcattgaaagaagggtattggataatgaaacagtatgtacaatgagatgagagttgatagttgctgctatagaaaaggattttatgtgagaccagatgaagcaaactaatttcatatcaagagatatttt

SEQ ID NO: 34355 - DNA, 376 bp, Gossypium hirsutum
  Clone ID: LIB3145-048-Q1-K1-H3
agacaacatgtgtaagagaccttcatctttttcacctccacaagtgcgaaagtccaactctattggctggtaatgtggatgtacgaaactattattgacaattgagctactttaaccatggttgttagtataaagggtttttttttgtacttcagtttaagatatgcttgtccgggacttaatctcgttggcttatgcagttatctttaagaagtagcatccagcaagtacgaagttcggattccatcgttccttctttctttcgaagaaaaaaaatacatatattagtttctgaagactggaatctatatagcctttccactattgcttcatagattacaaatatttagatagatagatgatgaaattgaatgat

SEQ ID NO: 34356 - DNA, 217 bp, Gossypium hirsutum
  Clone ID: LIB3145-048-Q1-K1-H4
ctctagccaagcaatgaatgatgtaggtgatttctgttatcgggtgggcctacgggggctgaagaaaagagttcatttttgcttccttaggaagaaaccaacttcattgaaattgtgcatctattcaatggagtaaatgcagaatttagagacggtcttctctatattattaaatctttaaataaatttattgcgatttcatatgcaattatcttta

SEQ ID NO: 34357 - DNA, 217 bp, Gossypium hirsutum
  Clone ID: LIB3145-048-Q1-K1-H5
cccacgcgtccgagcagttggagtttggcgaggagcagttgaggcttcatagagagtggattaatgggtcttggacgccaccattggcgggagatgagcaagttaaggagtctgacagagcagtgaccgaagcaaagatgaaatttagcaaagttgtcacccaagagaagttaaagcgtgataatgcagcaagcaaaaaaaagtcaaagtctggttt

SEQ ID NO: 34358 - DNA, 358 bp, Gossypium hirsutum
  Clone ID: LIB3145-049-Q1-K1-A1
atcaagctggcggtatcggcagagaagtctgttttggttctgtgaataccgatcaacaggtggctggtcgattggcagcaccagctgccccacagccattctcttctgttgggggtaacccgtttggctaagcatcctttcgctgcctgtaaaattgatggaaagttttggttttagttggaatcatccaagcgctgctataagattttcactcttgttcatttcagggttcaaggaattgatgtccgtattggcaatttatagttagtttgaaactcataacggaaaagcgaggtgcaaagcttatatgtagcgatggtactgcatgtaaatttttggggatctattttactttttt

SEQ ID NO: 34359 - DNA, 320 bp, Gossypium hirsutum
  Clone ID: LIB3145-049-Q1-K1-A10
caacttctgaatccagtgtcaacatctcggtgtagctttgtgtaaattacgattagagagaaaagctgggaaagaaaatggcttcttgggcatttgcgatgtagctgtataactgatttttaggtttccgttaaaaattataattataaccttatctttcttggccatgtctttctctctaggttgttgtatatggaactctttccatgtagtttggcttgacattttgcagagcatcattgccaactgatcaatcctttgttattccagcgcttcaagttgatcttaaaaaaaaaaaataaaatcatcaaaaaataatt

SEQ ID NO: 34360 - DNA, 351 bp, Gossypium hirsutum
  unsure (1)..(351): unsure at all n locations
  Clone ID: LIB3145-049-Q1-K1-A11
cggacgcgtgggaggaaattaaagtctagtttttaggtatgaagtatgaaaatgttagttaaaagaaatgagacctaaaccttctttaatcattggctccgccaaagccctgggtattcgagatttactatgtgcaattttatgcatggtttccgaatcctctcgtgtagttgtcatgagtggtttttaatccagttagtttagttaatttgttggctttagtttagattgtattaatttttagtttgtttgtaatgtataatggtttgattctattactcaaactcctcgtttataataatttgatacttgtggttatttgntaaaaaaaaatattaactaaaataaaat

SEQ ID NO: 34361 - DNA, 232 bp, Gossypium hirsutum
  Clone ID: LIB3145-049-Q1-K1-A12
gaaaacaatcaacttttgaaacatgctgcattcttcattaggctttttcaaatgtccgaacacagaaaaatcatttcaattttgaggtctctgtgttattagatcaaactattgttctatttgcataagccttgtaatgtactttttatttgcagtacgtatcttattgtatatagttatgaattgggtgctgccgttgtacaacattttatgaatttacattacttgcgca

SEQ ID NO: 34362 - DNA, 393 bp, Gossypium hirsutum
  unsure (1)..(393): unsure at all n locations
  Clone ID: LIB3145-049-Q1-K1-A6
atttagagtctcttcttaactattcatttcaagacccttcttttttagtggaagcactaacacatggttcttacatgcttgctgaaattccaggatgttataagcggctggaatttctaggagactccgttttagattatctcatcactcggcatttatataataattatcctgggatctcaccaggattattaacggatctgaggtcagcatctgttaacaacaattgctatgcattatcagctgttaaggctggattgcataagcacattctccaaagttcacagaagctntacaagcatataaaagaaactgttgaaagttttcaggaattatcgttggattgcactttcggttgggaatctgaaaaatctttccccaaagtactgggtg

SEQ ID NO: 34363 - DNA, 302 bp, Gossypium hirsutum
  Clone ID: LIB3145-049-Q1-K1-A8
gacaaaatgaagaatcgttaaaactaaagctacatcatactgaacaagtggctcttcgcatggaagaggcagcagaagttgtttggggacggtttctagaggctgagaatgttgctgaggtgctcatgggaatttcaaaggaactattaggtcgacttcagattgttcagtttaacatgaatggttcgattcaacgagaagctgagctcaaatctaaacttgaaggttgcattgaagagttgaatgccaaatgtttagctttaggaaaagcttgatatcaacaatgtggaacatgctgaaaa

SEQ ID NO: 34364 - DNA, 384 bp, Gossypium hirsutum
  Clone ID: LIB3145-049-Q1-K1-A9
gagaaatcggattcaggtgggaatgacgagcactcggattcaaatacaacccctacttcaactgagaatggggatggagctaatggaggttctacaagtaattcggattccggtgaatcaaatggacagactgaaaaatcgaatgccggatcagacagcaattcaaatgctgttcagagtgaagaatcaaacaataattctggaggagaggggacacacacaaatgaaaattcaaatgctgaccagaacagtggaacatcgtcgaacactaatgataatgctggtgcaggtcagaatgagaatgatagtagcaattcgaacaatgacgggaatgcgaatgggaatggtggcagcacaggcaatcagagcaacaccaatgacaat

SEQ ID NO: 34365 - DNA, 219 bp, Gossypium hirsutum
  Clone ID: LIB3145-049-Q1-K1-B11
tccgaattcccgtcgacccacctcggctgatccgaggaggctaccgaaagttcggtgggagaggtgctgggcggttcagaagtccgtgaaaaatttcacggttgtttaaaattggtttttgtaccttttttttcaagattgttggattgatgttggttgattaattaactgtctgtgaaatttaatgttggttgattatctaattaactcgattgatta

SEQ ID NO: 34366 - DNA, 352 bp, Gossypium hirsutum
  Clone ID: LIB3145-049-Q1-K1-B12
cccacacggacgtagaaatggatgttgttgactctgccattgtctatggcgaggagagaggtgccgccataggcaccaccaaagacactagcaaaaatgctggtttgtattggcggtcgttccatctgacataccatgaactgtttgacgctcgtgtggaccctgcggaggaactgtccaaagagcgcttcgaagagtgcatcaaagatatggtgacaagaatagggactagtgttggtcaatctgttatcacttacgtgaactctgacatggctttgttatggactctcttgtctgaatcatagccttattaaaaccctgatgaaatatctgatctcaagtatgatatcaa

SEQ ID NO: 34367 - DNA, 389 bp, Gossypium hirsutum
  Clone ID: LIB3145-049-Q1-K1-B4
gaaaaaattcggattctgctctcttttttctctatatctgtattgtattctcccctttacattaaaaaatttaaaggctttatagccaaatacaagcggtttctgcccattttcttgttcaagttgcaggatatgaagacatgagagtgaagcgcacggacgtggggcgggccatgcgcccacgtccgtgcgcgagtctggggtcgtgtgatgtgccgacgtgtgtggtagagggatgccgaacgtggggctgcattgcaagtagagggaaaccctagggttttcaaaaattccaaccacttgggcttatcaagcctaatttaatttgggtccatattttggtctattttgggccaaattttgatttcgggcaacaactttaaaatttg

SEQ ID NO: 34368 - DNA, 392 bp, Gossypium hirsutum
  Clone ID: LIB3145-049-Q1-K1-B5
cgaagttgctttgtaagcaaagtttttagctatgttgaatccaaaagctggttggaggttgagactcaaaggggaaagccttcatggcagatgaatgctgctatgctatgttgaaatttggatgaataaaattctcattttactttttttttttttgaaacaaagttatttagttttcaataaatcgtatcggggagtcatgaaaatgtaaacccaaccatttatagatttatattttcttgaacatttatatagttattataatttgttatgtcaatgtattattatacagttatataaattttaacgtattagtaattcatgtaatataagttttgatacagaaaaagatgaaaatttcactttcaacaaacaatcagtgatgtgtattc

SEQ ID NO: 34369 - DNA, 273 bp, Gossypium hirsutum
  Clone ID: LIB3145-049-Q1-K1-B7
gccaatttccctagattggcgaaactctctcacttcgattctttcacgatacacaacgaatccgaatattttcttctctttggttcaggctcacctaactgaagtgaaacataaatatcattttctgacccctttcttaatgccgaaagacttttagactccgggttctccccttggtaattatcatgaactgaagacttcccattgaaacttggaataaattggtgttccacattaactgctgcttcatccctacacttggtacccatgatt

SEQ ID NO: 34370 - DNA, 385 bp, Gossypium hirsutum
  Clone ID: LIB3145-049-Q1-K1-C7
gaaattttggtgaaaaagttacaaaatatggtaaaagccgactcttcagcagtctgtaactctggaggtgatgatggcaatgagatatctgttctgaatagtgattcaactagagctacatgtacaaaaacattcgaaaaagaggtcccctctgccacaagtgtacaggtggatgagccatcaaaagatgtatctcttcttaggacagcagctaggccttccagaaccataattgacggtggcactagtgctattccgagcaagcatgttgaggaaaaaagaaagacaggcaactttaaactgttatgtatgtttatagcaattctggttgcaatattttctgcattagctgtatattttttgagtgagaaacaagtcatgtttg

SEQ ID NO: 34371 - DNA, 387 bp, Gossypium hirsutum
  Clone ID: LIB3145-049-Q1-K1-D7
gttacatcctgcctccttataggctgataggtattcgaaattaaattatatatttttataatttaataatttatatttttataaaatttaaagaattaaattaaaattttattattttttaaagaaaatataattttattattaatttaaaattgtataaactataaacttacggaagtaaaaaaaattatattttagaggtcgcggtatttgcgactgctcccccagttctcgacgtcgtttttacatatcattctgttctgtgctgttagaaaattgttgccctacttgagttcttgtacactcgcagtcttggaatgtgacgagtgaagactcgttaaatcactacacaaagtgtaaattattgaagtttttttttttttgaaa

SEQ ID NO: 34372 - DNA, 373 bp, Gossypium hirsutum
  Clone ID: LIB3145-049-Q1-K1-D9
gggttcatctttctctcttttgttgttgggttgaagaaaaatgacagcacaagtgagcagttcattggtaagggtattgagtggtcacatggaagagcagcatgctgggaagtctgatatcttgattacaaaagatttgctgggaaatttgtcaaatgctaaaccaacaacacccaaagctatagatcttgaatttaaggtgaaaaattttagatttatcttcttcttttttagctttgtttctgcaacaaatcccaagaattcatttatgtcgatttaactctctgtactatagttttcagttcacaattagtttgcttctccatttatattgaatttaaaagaaacagagtatttattacagttttttaat

SEQ ID NO: 34373 - DNA, 170 bp, Gossypium hirsutum
  Clone ID: LIB3145-049-Q1-K1-E10
agtcgaactcttggtggagaaaggaaccgcttccatcacctcagatgactagacatgggccattaacaagagcctattacacacccggctggaaaggccaaacgaatacaacaaccacatgattatatgaaactgtataacaagcagaactaaaaggggctaacgaactg

SEQ ID NO: 34374 - DNA, 318 bp, Gossypium hirsutum
  Clone ID: LIB3145-049-Q1-K1-E3
gccggtccctggtattccatattatctcacagagtacagcaccctagcgctctctgttgcctacttccatgtcaacctacccaggatttattgattaatgcagcaataatatataggctcgccgagaggcgaatgccatatcatgcgacccgtgtgaagctaggcggccaggatagaccatctctgcatgagggacctgttacatgaactgtgctacgttagtctgcaaggtcccactctccggcgtaaatgtatgtggacacataccttcgaatgccaacatctgtgatacgggagatgcagttataagagtgcatg

SEQ ID NO: 34375 - DNA, 298 bp, Gossypium hirsutum
  Clone ID: LIB3145-049-Q1-K1-F1
gtgatgcgaagctatctcgtaacatccctgctcgctctgggaagactgatggatttgggcgtcctgttgctgtgcagatggagtggacgcacgtgctcagacatcttttgtgcgtgcagtgtagcattgtattcatgcacaatgcaaacaggtacagaaaccgactccaatatagagctgatggcggctgattgagctcatagcatggtgattgtgaggatagcacatattcggcttacaatgagctgatgacgtatgaggatgccctcaataatggtcttacctgcggccgtgccaa

SEQ ID NO: 34376 - DNA, 395 bp, Gossypium hirsutum
  Clone ID: LIB3145-049-Q1-K1-F5
ctttttgtgtaagatcaacaccagttgaataaaccctttcatgcccaacctgatttctcgcgtactaaagcaaccaaaaagcatagaaagaatatctgcactgttcatctgttccttgttcgaagaccatggatatttcctaaaaatgtgataacaatcttcttccccaaaaccacattgaggaagcaacattcatcactattcttctctatctaagatttgctaaagtagggatgtaattccaggcaatgcgccagatgataattgtaatcttagatggtagttgttgattccatagcttttcaaaaagtttcttattttcggtctataataaataattgctaggatccaggttagcaatttgtaatagtttataagcactatggactgagtat

SEQ ID NO: 34377 - DNA, 165 bp, Gossypium hirsutum
  Clone ID: LIB3145-049-Q1-K1-G4
cgatcctattgtgttggccttcgggatcggagtaatgattaacaaggacacgccggggccttcctatttcattttcagaggggaaaatcttgggtttttttaaaaccaacaaccgccaaagcctttgcccagggtgtttttatttatcaaaaaccaaaattgggg

SEQ ID NO: 34378 - DNA, 390 bp, Gossypium hirsutum
  Clone ID: LIB3145-049-Q1-K1-G5
aaaaaaattctccttacatcgttttaattcgggctttttatagccactatacatagtattttacatatttaatgttatttcctgccatatatgtgttgcctctgtcgttcttctttccccttttgcaggtaccaacgaggagatttagcagtgaacgaatgctgacaacggtacaccggcgttgattcgggcgtcgaccacggcatgatttgaagcctggaatcatggcctggaaccacggcactgatagtgggtaactggaacgacgcgagatgaacagacgcgttgattgaaatgtttgcggcgcttagggtttctgaaaccctaggcctctctgtcttccattagtaaattgggccacttgggccctgtgtattttgggtagcatac

SEQ ID NO: 34379 - DNA, 288 bp, Gossypium hirsutum
  Clone ID: LIB3145-049-Q1-K1-G6
ctacaccctattttgtaatcgtttacttgcatatttgcatctacttaataataatctcgtgtcaactaatttaaaaaaaaaaaaaaaaaaaaaaaaaaaaaaaaaaaaaaaaaaaataaaaaaataaaaaaaaaaaaaaaggagataacgttaaagaaaaaatgctgacaacggcacagatgaaaaaaaatttaacttttaccacgggatgattaaaatgtatggaatggtggaatgtaaacaaagcactgtttgtgaacaaccggaacgaccccagattaaccgtct

SEQ ID NO: 34380 - DNA, 390 bp, Gossypium hirsutum
  Clone ID: LIB3145-049-Q1-K1-H7
ggagaagattcaagttagtggtctaaaagagtttttatattcagaaggaaagctgatctctgtcagtttaggcgcagcaccaactgtacagttgatgttcagttcacctatgaccaaatctaaggcggagaaatttagggggcatattttacaagcattcgagactgttcttggttcatccgtgacagttgaaattagatgtgaagcaaagaaagatggccgagctggggtcggtccatctcagatggtcatggatctagagtctaattctagaaataggatgcatgctggggtcggctcccaagctcagcaatcagggaatgaaattgttgaaataccagcttctccaagagaagccaaggataacgaacatgctgataactttgaatc

SEQ ID NO: 34381 - DNA, 394 bp, Gossypium hirsutum
  Clone ID: LIB3145-049-Q1-K1-H9
tccacgcgtccgaccgtagacaaatccaaggagtctgtgctaaatgagtgaaaaccaggacatcccttgcccaattggggttgtttcggactctgagagtgatccacctgaaaatgaaccggatgatacccagacgcatatgtcgatgtcgactggaagcaagaaaagaagctgggaaatcgataattaagtggaagctaaaggaaaagccccccagaaatggatatcgggaaaagaagcttcaacctcccagcaacagccaaaaccgaaaagtgaaaagaactgtggggaagctgtgcaaaacagattgaaaaaatttccaccatcaagttgacagacgaagaaagacggtaaatggtcctaattgaactattgaaaaatttccaccatcaag

SEQ ID NO: 34382 - DNA, 366 bp, Gossypium hirsutum
  unsure (1)..(366): unsure at all n locations
  Clone ID: LIB3145-050-Q1-K1-A1
ccacccgtccgtttcctccagagtccaggtccttagttttagcgccatctttcgtcccaaaatctcgtggctttgtgctagggtttgaagttaacaattcttcagaaagaaaaatataaagcagggtttgaagttaacaaatttttcaaaaagaaaaatataaagcagcaatgaatccggttcacttncaacccgcgccgncttcaccttggttcccaatgttacttccggaacctncgaattcgagtacattnttggagaccagaaatgtgcgtgatcccttagagaatngcaagataccctcaatcttgccaacgccgtgcaaaaggagttggaaatactgatgatgataaaagatgggtcgat

SEQ ID NO: 34383 - DNA, 396 bp, Gossypium hirsutum
  unsure (1)..(396): unsure at all n locations
  Clone ID: LIB3145-050-Q1-K1-A3
cccacgcgtccggcgcaatcaaatgacgagcgtaggttctgggtagcgaataaccagcttagtatatccagtataaatagctgtagccgtggccttagcagtgactgaatgaaaaactttttgtaatggccatttcttgggttcctaatcttagcagggtattgtaactttaatctaaacgtagtctatgtaaatgctttgataaagttttaaaatatattactggtgatattcctgagtgctgactatgtaaaaagtgtattatattcgnnaaagaaagaannacnggaaaaacnaaagagcccaaaggattacaactacatgaatctggtgacacaacgaatgggtgcatgtctacaggagcacatttcaattctaacaatatgacacatgggt

SEQ ID NO: 34384 - DNA, 266 bp, Gossypium hirsutum
  Clone ID: LIB3145-050-Q1-K1-A4
cccttgcgcggttagtcatggacaagactcctcatatttatctggcatttgatggtgctgaggccttcgcaagggaacaagtaggtgacatgcaatctttgatttgctaatgctctttaacatccatgtcactgaaaggtctatcgggtctgttcttaaattttgtaaaaatctgaaccttttattctttagcttttagttccttgttgcttgcctttagtattatttgttctactttattcctacttaaacattcaaggtttttc

SEQ ID NO: 34385 - DNA, 391 bp, Gossypium hirsutum
  unsure (1)..(391): unsure at all n locations
  Clone ID: LIB3145-050-Q1-K1-A7
atcacaattggagcaatgcttgaagaaattcagggcctgtatcaacaacaccaccagccttgcttcctttatctctctagtgaagttataaagatatttggctctgatccttcttgtgcaagctacctcaaaaatatgatcgaggcgcttttcaagcacacaacatgtcttctcacaagtattaaggagttcaccagaagaccagacattggagatgattgttttctgttggcatcaaggtgcattcgttattgtcctcaattattcattccttcttccatatttccagctttagtagattgcgcgatgattgggatcacagtgcagcacagagaggcctncaattccatcttgaccttcttgtctgatatctttgatcttgcaaagtcta

SEQ ID NO: 34386 - DNA, 304 bp, Gossypium hirsutum
  Clone ID: LIB3145-050-Q1-K1-B12
cccacgcgtccgagaatgtggtgtcattgtcgaatggtgtatctgccaatgtcgtttttgtatgggaagaagtttgtgggtcctatcacacccacaattctatcttagagcatagctgattgcatgcatatggttatgtatttgttgaatgcatacatatatacatatttatgtctgtaaatgtgtgcattgggataaattttataggagatagctttgtgttacactgtagattggttggctaaggaattggttatacttgagagtggctgaaatttgataatgatgctatctgtgttgtttg

SEQ ID NO: 34387 - DNA, 213 bp, Gossypium hirsutum
  unsure (1)..(213): unsure at all n locations
  Clone ID: LIB3145-050-Q1-K1-B4
cccacgcgtncgnccacgcgtncgtgaaaaatgggggagggaaatctcgatggtcacactcccttctccttcaacggctggatacggtgaaattttaccatcaaacttattccatatccacttcgaagcgtaagtgctttccctaacccaaactcgtttccatacatattgaaccttggcgagctttcaataatcacacttcggggatataaa

SEQ ID NO: 34388 - DNA, 320 bp, Gossypium hirsutum
  Clone ID: LIB3145-050-Q1-K1-B9
tacttaaatggctgctgttttggcttttattttcattgttttcaaagacaacaaagggggctataaaaagctagtccgtggtgcccaaacactctttaagaaagttagggatcaaagacgcacatatactgctggtggttctgaccctgacctgttttataattacttaaagcactgggatgaattggattggggtgaaacctggttatactataccactgtgaattcatactattttgagttagctactcatgctaaactagccaagcatgctcgtgcttgctggggtggcccatattatggtggtcttagctggaata

SEQ ID NO: 34389 - DNA, 113 bp, Gossypium hirsutum
  Clone ID: LIB3145-050-Q1-K1-C5
tttatatcgcgggcggtcgctcatgaggatccaatcttacggccgcgtgcatccgacgtcatagttcttttgtccggtcagctaaacacatttcactgaccactgttggacag

SEQ ID NO: 34390 - DNA, 158 bp, Gossypium hirsutum
  Clone ID: LIB3145-050-Q1-K1-D4
ttggatcttttaaaaaaagtttgctgggaaggattggtgggttcttcttaacaaaaaaattaaggccaaagccttgggccttggtgggcacccctgggccagtcaatttcctatttacttttaaaccctattttcagggaaggggtttccttggggga

SEQ ID NO: 34391 - DNA, 404 bp, Gossypium hirsutum
  unsure (1)..(404): unsure at all n locations
  Clone ID: LIB3145-050-Q1-K1-D5
gaagaaatggcactggattgtgtaaaccatgtaagtgccctggatgaatcgttgccagaattcgaggaaaaaaggctgtccatcctgaatcagcttaaggcattggaagataagttactaactatgggggatgatcaattcatggaggacttgaaatcaattcagaattccctttgatggtcttgatgagaagaatgacctgcgcagcanagaaggtaatgaattttcaaaagaaacaagttgtggcaaaacaatggcttccatggcaaagagtctccttcctttcctggatgcagctgataacgggactgaagaaggaactatgtatggaaaacaaggagaatctgattctgaaccggtagtaatgcagacatatcctggtccagaactggagttggacccca

SEQ ID NO: 34392 - DNA, 172 bp, Gossypium hirsutum
  Clone ID: LIB3145-050-Q1-K1-D6
cttccgccaacccttccaaaagattattttgttcttaagctgggaacctgaacttagccttcattaagggtgggattggagaggggaaaaatttttttaagggtaccggggtcaaaggttattaatggttattcttttaaactatgttttagagcgacttaataccttcttg

SEQ ID NO: 34393 - DNA, 264 bp, Gossypium hirsutum
  Clone ID: LIB3145-050-Q1-K1-E11
accacgcgttcgtctatacatgcaaaaacttgctaatttttctatggttaagctgaaacagttttcttatgaaaagcggccactgaccccggatgaaatatcgaccacatacctccgttttgttccccaaatatatgttctctccgctgggttcctaaaagtgcttctccctacgatggtgatattgccgctttatacgcatataaagctttatcatttgcggcttgcaaacgctctcttatctgctctttgttactctaccta

SEQ ID NO: 34394 - DNA, 384 bp, Gossypium hirsutum
  unsure (1)..(384): unsure at all n locations
  Clone ID: LIB3145-050-Q1-K1-E3
cggccccgtgggaaaaaaaatttaaggcctaccctctttttaattcggccgacctttaagtcttttcgcctgccgtccaaccttattcctggatcgacggtaataatacaaaaggcctaatccgcttccgttcgaccgtaagtccaaaggttcttttgaaagtctctgaatccccccccaaaaaaactccgattgcgacgaagtgagcgagggatcgaggggaaccaagaacggaggtacgagacgtgctgggcgttcggtacgatagctggcgtacgggtgcgcgcatgactactgaaacgcntgagcgtactgaggcgtggaggctgaatggttgcggcgccatggagagagccttanggtttcatttggccgatcctagat

SEQ ID NO: 34395 - DNA, 350 bp, Gossypium hirsutum
  Clone ID: LIB3145-050-Q1-K1-E7
gaacggaagggccgggccgacccacgcgttcggtaaattacctttccttgtatcagaatgtttatgtagtggtgcaaatgggcattcagggggtatttttacacttgacgcggactctaatataaaatcaacaatcactcattacttatctatttaacaacacaccaaatgggaaactgatgaaactcaccatttatctaaacatgcatggactgaacttgattaaagcgactcattttggaagataattttaattatatgccgaacaagttggttaaaaactgaaaaccattgtggccggattgaaagggttttgaaggttcacaacatgcagaatacttttgttttat

SEQ ID NO: 34396 - DNA, 374 bp, Gossypium hirsutum
  Clone ID: LIB3145-050-Q1-K1-E8
cccacgcgtccggaagaattggatgcttcctcaagtaaggataatggagtcatagctacccgcctgaaccagatcaaacgttggttgttatcccattcccaacacatgaacttcttcaccattttagtgcttgcctcggtcccgaatcctttatttgaccttgctggcatcatgtgtggacaatttgggattccgttttggaagttctttcttgcaactttggttgggaaggcaattattaaaactcacatacagacggtttttattatctctgtctgtaataatcaacttctggactggatagagaatgaactgatctgggttctcagtagcctcattcctggatttgattcttacttgcccacactcacaga

SEQ ID NO: 34397 - DNA, 406 bp, Gossypium hirsutum
  Clone ID: LIB3145-050-Q1-K1-F2
cccacgcgtccgtttcaggagagtttcctgattcgtatgtcgattgcaaatcactggaaaggttgaggatcaataagaatcatctttctgggaaaattcttgatggagtttgggcacttccacatgcaaccatgattgattttggtgataatgactttgagggagagatatcccccatgattgtattttccattagcttaaatcagttggttttgaagaacaataggttttcaggtaatgtcccatcagtacttggcaagttggcaaacctagagaggcttcttttgaataataatagcttttctggcaatctacctgctgaaattggtgctttgaagcagttatcttccttgcatcttgagcaaaattcactgactggattgataccgggggaaataagcgactg

SEQ ID NO: 34398 - DNA, 406 bp, Gossypium hirsutum
  unsure (1)..(406): unsure at all n locations
  Clone ID: LIB3145-050-Q1-K1-F3
cccacgcgtncgcttttatcttcttagatcatataatctgtcattcatggcggaaaaaggggaagcgttgccaaagtttggggagtgggacttgaaggatccagcaacggcagatggatttacggtgatattcaacaaagctagaaatgagaagaaaaccagagctactgctcctcctcctcctagtattgtccctcaaaaagttgatattggcaataaacctcccccttctcctcctaagaccaaatgcttttgcttttttagagtttaaaaggtagcatttagggggagatcggaaatggagaattgaatgatttggctagtgatgagcaacttgcctttcccctatatatgtatatataatattacactattcataattggctgcaatggaatgggaccacct

SEQ ID NO: 34399 - DNA, 396 bp, Gossypium hirsutum
  unsure (1)..(396): unsure at all n locations
  Clone ID: LIB3145-050-Q1-K1-F6
caaacttgttgaaaactctcatctttcttatttctcccttccgttctttcctcactctttctcttatttcaccaccatctcctttccttgatccttctcataacacctaaggatcctgagttttttttttaacctttctttttgttcttttatcagattttaggttcaaccttaataaaattgtctttctctctctgttttcctcggnttctgcgctgtcccgactaccaccttttctttctcctttctcaggagcatagataaagggataaatgcaaagctaaaccattggtcactgattgaagcattgccaaatggtgagcttacgcagacgcaagctcctgggactctgctcttggacgagttccttttttactccactttctagatttttcg

SEQ ID NO: 34400 - DNA, 385 bp, Gossypium hirsutum
  Clone ID: LIB3145-050-Q1-K1-F7
aaatttttaaaaatggccaactctctgtggtctttcaagaggtgacaccgcctgagccagtatgaagcgtaaggcagtgatgaggacgcccttagtgctgcaatctgtgaggtccctattcttttgggggataactgctgcaattgaattgtaaggggtcttcttttcccttgagggccttcccaaagggtcatagcagtctcatttctcttggcggccattgcatagataagagcaacctttgactcggggtcagtactctccagtagcatgtcttccttttcaaccctcagctgccaagactaataaggtccagggaattagttggccgtaaaagctgagaggagcattgatgaaaagaggtgtgagcaacatgcaaacatgt

SEQ ID NO: 34401 - DNA, 153 bp, Gossypium hirsutum
  Clone ID: LIB3145-050-Q1-K1-F8
aaattttgtaaaaaactctaatcttttttgtctttcacgaggggacaccgcttaagggggggttaattttaacgcaaggtggatgactcgatccttgttataacacctaaggatcctaatcttttgtgggaaccctgctgttagtgaattgat

SEQ ID NO: 34402 - DNA, 404 bp, Gossypium hirsutum
  Clone ID: LIB3145-050-Q1-K1-F9
cttttctttcattcaaatcgaaggcccctctcgcaaatggagatcgaaacagcgcaatctccgaagacgaaaatggagtccctgagatccatctgcgacagagaggttcgggtccatcaacagaacctagattcttttacggccttgtttcccacttctcttcatttcatcaaggccctggcgcaggatgctgctcaagctcatgttgaactcgcaaaattgaaagctaatttaagagaagccgaagatgagcttgtcaaagttttagcagcgaagacccgtaaagaggcaaagcagatggctacgagggactcaatatctgctataaaagctagagtagaagaatttaaaagaaccgtccaagtacaaaaagctaggagggatgagttagaatcaattatatc

SEQ ID NO: 34403 - DNA, 358 bp, Gossypium hirsutum
  Clone ID: LIB3145-050-Q1-K1-G1
gccaaatttctgtcactgattttgtccggttaacaggtactgaatgtggctaggatcttcaacatctatccaagaaaaggagcaattcttgttggatccgatgcagatatcattatatttaaccctaattcgagcttcgaaataaatccaagatctcatcattcgagaaccaatacgaatgtatacgaaagtagaaaaagaaagggaaaagttgaggtaacaatttctagaggaagaattgtttggaaagatgatgaattgaaagttgcacctggttccgggaagtatataccaatgccttctttcggttttcttttcgacggaatcgaaaaaatcgatgctaagcttgtttctttct

SEQ ID NO: 34404 - DNA, 398 bp, Gossypium hirsutum
  Clone ID: LIB3145-050-Q1-K1-G7
gttcgagaagacggccatattatgctcacggattttgatctttcacttagatgctcggttaatccaactcttctaaaatcctcatcgaatttggatcctgcaaggatgtctggttcgtgtggaggatcgggttgcgctgaacccttttgcattgaaccatcgtgtcaaatccgttgcttcagtcctaggttatcgcctgctcctacaaaaacaaagacggtaagaccaagccatgcttcccaagttagatcattgccacaactcgtggccgagcctactgatgcaagatccaattccttcgttggaacacatgagtacttggctcccgagatcattaaaggagaaagtcatggagccgccgttgattggtggacttacggtgtctttctttacgagct

SEQ ID NO: 34405 - DNA, 246 bp, Gossypium hirsutum
  unsure (1)..(246): unsure at all n locations
  Clone ID: LIB3145-050-Q1-K1-H11
gggttttgtcatcaatttcattttatcctctcttcctcgctgatggcggaggaaggctacatcctccaggtatgtttcttctcccgtttttaaggcttctgttgcannnnnnnnnannnagcacaccatattatttctttttaaataaaaaaaggctttcttgaaaaaaaagtttctttctttggatatattggatgaccgcccctataactgacttgtttgttggtgttgaaatgcattttttta

SEQ ID NO: 34406 - DNA, 330 bp, Gossypium hirsutum
  Clone ID: LIB3145-051-Q1-K1-A12
gtcggagtggctcgccgcataggatccatggattgtttgagagggcactagctatcgataaatttcataattcagttatactctggcgattgtatgtcgcatatgagattaacgttgttcacaatccatctgcagcgaggcgaatattttttcgtgctattcatgcctgtccatggtcaaaaaagctttggcttgatggttttctcaaattgaactccatcttaaccgcaaaagagctgtcagatcttcaagaagtaatgagggaaaaggagttgaatttaaggacagatatttatgaaattcttttacaagatgagatactgtcatgat

SEQ ID NO: 34407 - DNA, 387 bp, Gossypium hirsutum
  Clone ID: LIB3145-051-Q1-K1-A5
cactcatgtcagtaattgttctgatcaaggcagtgacatacattacttctttagaagaactgagagggacattaaatcgaaaggggaacatcaaagtgaaacaaatatcacaatgacatgcataccacatacctcgaggacacgcaaggtattatagattgcaggggaattgaggctgcgcagatgaggatccaccttatacgaatcaatgacgacaaagtgcgggtcgctaggtgttatcgcggtaccggcaaaactaaatattcctgcaggaaccatttcatatatgtgagcaattgcaggcacaaaaccagaaatgcagtggacaaaatgctagaaatggatattaggggttggctgcagaacaaatccgcagatacatttaca

SEQ ID NO: 34408 - DNA, 218 bp, Gossypium hirsutum
  Clone ID: LIB3145-051-Q1-K1-A8
aaaaaaaaaaaaacaaaataccttttaattctgaccgctatacataaaaaaacggggccattgcaaaggaacttgggcaaataaaaaaaaaaaataaaaccatgaagaaccttaaatctgggcggcctttttaaaagaaccatatttacatacgcgttaatggaaagtctattcttttatttaaatgcccctaattctaatgacatggcccttatttt

SEQ ID NO: 34409 - DNA, 254 bp, Gossypium hirsutum
  Clone ID: LIB3145-051-Q1-K1-A9
ccatttatttggacgaccgacggttcttatgtgatggactgacctgcggcacgctcgcagaggaaacgggcgctgccttgttatttttctaagataatcctgtttaacaaaactctaaatccacgttgataaatgactcaagaggagtgagagaagtataaactatcgaactatacacatagaccaatacttttaacgtacttctacttattgagggaatcggacgcgggatacgggccctttttttggtacca

SEQ ID NO: 34410 - DNA, 301 bp, Gossypium hirsutum
  Clone ID: LIB3145-051-Q1-K1-B3
cccacgcgtccgcaaatgaaagcatggtgaaaaaagaacctcctcaagaaaccagcaagctcaatggaattatgccggagggtgctctaagtaatgatggatataacctggaatctagcacaaggagtgctcaagcatctgattctgctggaattcaaactgaaatgagcagtccttcctctctggcaagtcagcagaacatcaagaaaacagagccacttgtgcggaggactcctccagatgacgttggaagttggcatcaaaggagtaatgctgatagagttcatcgagaaaacaaatt

SEQ ID NO: 34411 - DNA, 324 bp, Gossypium hirsutum
  unsure (1)..(324): unsure at all n locations
  Clone ID: LIB3145-051-Q1-K1-B4
attgaagcttgtattgtgtggaaaaggtctctcttcaaaatcttcaagacgttgatgttggcaagccttcttccatcttccatctgaccatggttgatcacggattttccgcactcaatggcacacatccatcagttcatgagacatgcattcagctcagcctcagcacatatttggtgtgaatttttttcatctttatgcaaccattaatgatgtcgatccttctcccacttgcagtctgaccatggttgattgcggatttgatttccctgagcacatatccatcatttcatggtacatgcattcagcanagcctcagcacat

SEQ ID NO: 34412 - DNA, 305 bp, Gossypium hirsutum
  Clone ID: LIB3145-051-Q1-K1-B7
ctgaaattaagccactcccaaatcctgttcaaatccttaccgccggagctccaccgccggcggcagtgctgtctaggaccgagtcactcggattcgtcgtgagtcacggttacgggttaaccgaaacgggagggcttgtggaatcttgcgcttggaaaagggaatggaacaagttaccggcgacggagcgagcaaggttgaaagcgaggcaaggagtgagaaccatcggaatgacggaagcggacgtggtggaccctgagtcaggactcagtgtaaaacgagacgggtcaactcttggggagatc

SEQ ID NO: 34413 - DNA, 273 bp, Gossypium hirsutum
  unsure (1)..(273): unsure at all n locations
  Clone ID: LIB3145-051-Q1-K1-C11
gtcgttatggggcattttaaatcgcaagcttagttaacacaacctttatatgtttttttatctatacacagtgcaaatatatctcaattataatatgatttaaaataacaaaatctcgtatcatcaagtacgaatctgagcttgcgtggctcatctctatctcccgagggtcttcagttgccgatgatgtcccccgctttaggtgagagttttgcagcagctacgagtggtggatggatggatggtggcgcccaaaagcctncagatgccagc

SEQ ID NO: 34414 - DNA, 341 bp, Gossypium hirsutum
  Clone ID: LIB3145-051-Q1-K1-C3
gtagaccataaacaacttcacttcctccaaaaatattagcaatttctccctttccaatatgaaaactaatcgaaagctcaagaaatcagatccagcgtcatccaaggagttctatgcctaatagattctgggctgtcattaagaaattcggttgatttaaaggttgaaaaaggatttgcactatctgcatccagcaagttaattgcttgtgcttgtagtaacggacaataacggacaagtacagctcttcaatggtgaggatcttggatatgtgggaagcctattgtactctaaggccaaatcatgccatggagaaaatgatcttttttgccctaaaagct

SEQ ID NO: 34415 - DNA, 166 bp, Gossypium hirsutum
  Clone ID: LIB3145-051-Q1-K1-C5
ctgctactggattctgtaatggctgtttcatttcttctcgcaggttcaactgatgtggaagtgtacagaagtgccatcgaggctgttgatggttgctacggcgcatgagaaccctagggttctttagagtgttttaatttttgggctatttgggccttgtatcttt

SEQ ID NO: 34416 - DNA, 348 bp, Gossypium hirsutum
  Clone ID: LIB3145-051-Q1-K1-D10
cttagcttgatttcgactccatgtaatcatgccgttaacttgtctacaatggttgaagagagatcaaaccttgacagcagtcagcaaaagggtgaagcttcaacaataaaggttcaagatgaacaaaatctaaataggaaaataccgagctgcttaacctcaaagttaaaccatgtcaaagaatcctcatttgagaaggagactcggaagaaacttgatttcgaagaagttgcaagttctgtatccagagaaagaaaagggaataaatctatcatctctccggattctctgaatttcaaacggtcaaaatcaagtagagtccttttaccttcaatggaattttggcgc

SEQ ID NO: 34417 - DNA, 377 bp, Gossypium hirsutum
  unsure (1)..(377): unsure at all n locations
  Clone ID: LIB3145-051-Q1-K1-D2
ctaggaatgaactctcgaaggcggtcgtttttacaacattacttctaggattccatttgcccctaagcatggttagttggttctaattatatcatctaaatgaagatttttttgtgttctggtgctagggactatgttactcgaactcgagggtttcgggggtcagtttgcttgctgcaactccatttgcccgaaagcattgtttgttggtactaattacatcatctactagttgttattttgcagttgccagggattagcaaccattgttttactggaaattccagattcaagacatccaacttcttgtattctggatataagttaatgaacaccacctgtgactngattcctagtctattagggttgattttaat

SEQ ID NO: 34418 - DNA, 149 bp, Gossypium hirsutum
  Clone ID: LIB3145-051-Q1-K1-D7
tgcatgttcatgatgaatcaatgtttcgtgagtcgctaatagagtcgaaactggaaatgggcattgaataaacggatctagcatattacatcaaaatacacaataaattagtatgatgcagctggggcctctgttactgaagatccaag

SEQ ID NO: 34419 - DNA, 268 bp, Gossypium hirsutum
  Clone ID: LIB3145-051-Q1-K1-E10
gttttgttgttgccacaaacatagctgaaacttctttgacagttgatggtgttgtgtatgttattgattctggttacgtgaagcaacggcaatataacccagcaactggaatgtattcccttgatgttgttcaaattagcaaggtacaagctaatcaacgtgctggacgagccggaagaacacgtcccgggaagtgttaccgtttatacccatccagggtttaccatgatgatttccttgatgtaacagttcctgaaatacagcgatc

SEQ ID NO: 34420 - DNA, 286 bp, Gossypium hirsutum
  Clone ID: LIB3145-051-Q1-K1-E11
gaggaattgagtggtgggccattggctacacttgggaattaccaacaacaaggttttgaagtggtttatgatttggagaaaaggaacgttggatttgcaagaagaaaatgttcttctttgtgggatagtttgaaaaattaagttctgattttgggcaaaaagcgaaacttttcgagttttgcgagttgttccttttaacaatatcgtacatttcgctttttagtatgtgcacttcaattcttactttatgggacagagcattgttaatactttcatgtaaaagttt

SEQ ID NO: 34421 - DNA, 369 bp, Gossypium hirsutum
  Clone ID: LIB3145-051-Q1-K1-E12
gagggaattgtcattacctgaaattcgtaacatgctgatggataaggccctgcgtgtcattcgtaaaaagcttaaagacttgagctctgtaactgaagctaaaaatggtgacaaagttaaagggaaggccagagagaaagaaaataggaaacaaaggagcatggcaaatggagatggatgtgataccaataaagatcatcagggcaagcagcctgtgcctgcctcttctcctgatgaatctggtagagggactgcaccattgtctataaatgttcctgatcccgattttcataattttgacttggatcgaagtgaaagttcttttgaagatgaccaagtctgggctgcttatgatgctgatgatgggat

SEQ ID NO: 34422 - DNA, 318 bp, Gossypium hirsutum
  Clone ID: LIB3145-051-Q1-K1-F10
ctcaagttctgatgacgatgagaagaagtcaaagaagaagaaaaccaagaagaagaaaaggcggaattattctgggtcaagttcttctggtggtgcagagtttgataagcataagaggcagagaataaacaagcattcttattcatcagaagactctgactctggcaggcaatacaggactaaagaaagccgagaaaagcgttcatatacatctgaaggttccaaatctaatccagaaccctgtggtaaaaagaacaggtcaaagcattcttattcatctgcagatgactttgataggcattataggaagggcaaata

SEQ ID NO: 34423 - DNA, 319 bp, Gossypium hirsutum
  unsure (1)..(319): unsure at all n locations
  Clone ID: LIB3145-051-Q1-K1-F2
cccacgcgtccgcccacgcgtccggtcattggaaggcaaggagagtcttgtgattcagtttgcaagtcaaatggacaatcatgcgtactaaataagcttttgatacttaaccagtgtgatattatccagaaatatatgagctgcaaaggagcatgcttggcaagcgttggacccgatcaacctgctgaagttgtagatgatgctcccaaaaatttgaatccaggagcatgcttgtatactcgaacacaatcaatgctatcttgtgatggttctcatcggcataccangaagacttgtccctgtgcatagtgcatcatca

SEQ ID NO: 34424 - DNA, 336 bp, Gossypium hirsutum
  Clone ID: LIB3145-051-Q1-K1-F4
ggaagtcaatggcgaaggtaaacagcatgccacagaggaaagctcctgtactccggtagacgaagatgtaaaaggaagcagcattatgagtctcagagcaaatgctccattggatcaacctacagcagaaggcgtagtaactcttgatttttcaatcataaagcctggtattgccgcagacctgaaatttgggggatctggttcttttccaaatttaccatgggtttcaaccacaggtactggcccacacggtagaacaatttctggcgtcacttacagattcagcgcaaaccagataaagattggttgtgcttgccatggtacccacatgttccc

SEQ ID NO: 34425 - DNA, 325 bp, Gossypium hirsutum
  Clone ID: LIB3145-051-Q1-K1-F8
actagaccgaaagaataggacattacaaactccactgaataaagaaaaaaacataacttcccattattgccctttaccactctccctcacaaaacacatcaggccaccataccttaagccctgtcttatcgttcttgttcggttattctcatcccgcaacaatcatcgacatatatctcgacattgtaaaaagcttctaaaaagcttctctaaatttgatacgagtaaagttattatttccatcaatctcactttcattgttgctcatctcaataacatgggatttcaatttcagtattggaagattggttaatgcaagtatgtc

SEQ ID NO: 34426 - DNA, 221 bp, Gossypium hirsutum
  Clone ID: LIB3145-051-Q1-K1-F9
tcaattatacctaaaaactatcccttttctttcttcaccccaagacaatgaaagcggaggcgattatattgctgtttgtcatattccataactcagcaaatgcaaacccccaaccgccatgctatttcaattgcgctgactccttaattcttaatcgcaaccacaatatccttaacaccttggccaaagacaactcttcaccctatctcatctattttccc

SEQ ID NO: 34427 - DNA, 313 bp, Gossypium hirsutum
  unsure (1)..(313): unsure at all n locations
  Clone ID: LIB3145-051-Q1-K1-G1
gtcgtctagaaattctagggttttttttcctaatctaagaaacaagaggaagaatcaagcttggttttctctcatgtattcttttctttttcctcttatgaatccgatattgaaatgtgttttaattcaattttgagtaattgatttttttttagttttattatctttgaatctgctgatttgatttactagaaatgattttcctaattttgggtaattagaattggatttgatctatggtatttgtggattgtgaaggtattgattcaagaacaaagcaatcaacctagnctcttttctttttttctttttg

SEQ ID NO: 34428 - DNA, 201 bp, Gossypium hirsutum
  Clone ID: LIB3145-051-Q1-K1-G12
tttctttttccgtggggggttaatttggaggggggtggggatcctagaatctgggtatttctgaaaatggggaaataccaagcctacaactctatgcaaaagagccagacttggctcttactctggtggccctgaagagattgaggatggcatgggggatgggtctttttatttaccaaaatggcatgctgcttcgttggc

SEQ ID NO: 34429 - DNA, 355 bp, Gossypium hirsutum
  unsure (1)..(355): unsure at all n locations
  Clone ID: LIB3145-051-Q1-K1-G2
caaattttaacccttactcgatttactccttgtaccttaataactcctaatttcacgaaatctactattccaaaaactaattagctactaagctagcctcataaatatttttattaaatatttacgagttcggtttatgaaaatggagtcccagaaatatgttttctgacacccctgactatcaggtcgttacatatcaaatgttggttagacccttatatacctaatgttggcccgttagtcgataaaatctcgctccatggaaaccttgagatggattgtctttttaaagatatggttactaaagatggtaagtggaattttgatatttcccaactctaactatncgatgaca

SEQ ID NO: 34430 - DNA, 331 bp, Gossypium hirsutum
  Clone ID: LIB3145-051-Q1-K1-H2
ctctgtgttgtctctcccaccaactcgcgagataacccagttgaactcacaaaggagaaaggggaagggaaaatgagtctggaaccgtttatttacagcttcgtggctcgaggaacaatgatcttggccgagtacactgagttcactgggaatttcccagccatcgcaactcagtgtttgcaaaaactcccttcttctaataacaagtttacttacaactgtgatcaccatacctttaattttcttgttgaagatggttacgcttattgtgttgttgccaaagattccgttggaaagcaaatctctattgcatttttggaacgtatgaaaa

SEQ ID NO: 34431 - DNA, 235 bp, Gossypium hirsutum
  Clone ID: LIB3145-051-Q1-K1-H3
cgaagaggagtcccgttctgaatccgacaatgccttcaaatcctctcctataccagacgctgacgtccctaataaagatagctctatatacgacgctgcacccagcgatatcgcaccagaaccaaggactttcggcgccgctattgacaaagactcagacggcgatggtggtgtagccgatgtcgcctgatgcttgctcttttaagcttccacaaatgatatgcgcctacatgga

SEQ ID NO: 34432 - DNA, 225 bp, Gossypium hirsutum
  Clone ID: LIB3145-051-Q1-K1-H4
ctaagaggagtccctttcaaaatcccattatgcatttcaatccccttctataccaaaaggggagggggctaataaagattgctctctatactacactccatccagcgatatcgaacaataaccacggacttgggcaatattttaagcccatgactacctctagtcaggccttgaaaccagcgtcgaccgatgctttctattataagctttaataaatgatatgac

SEQ ID NO: 34433 - DNA, 210 bp, Gossypium hirsutum
  Clone ID: LIB3145-051-Q1-K1-H5
tcggaatagtggccactatatagcggtagcagtgtcgtccgaaactactactactgaaaatagcaatgtgaagcagagtgacattgatagcggtggatcgcggctgcaatttaatgggtaatggccaattgcagcaataacgggccactattcccgttatttttcgttacagtaaattaaaaaaaaatcaattgtgatcctctttcttag

SEQ ID NO: 34434 - DNA, 121 bp, Gossypium hirsutum
  Clone ID: LIB3145-051-Q1-K1-H6
gggggggagctatagaggatccaaggtgactgccacgtgcatgcgacgttatagtgtttctatagaggaacctaatggcacttcactgaccgcggttttacatgggaaaacactgggaaaa

SEQ ID NO: 34435 - DNA, 338 bp, Gossypium hirsutum
  Clone ID: LIB3145-052-Q1-K1-A10
cccacgcgtccgattattaaccttgctttctaagcttctcttttataacaaaaattgttcaccattttcaaaaaatggcaatgttttatcgtatgcaaatgctactgcctgcctacgctttacttctcatcttattcactttggcctcatcaactactataacatcttcatccaaagaacaaataaaacgcgatacttgtacgcctgttccctctgcaacgacaccacccatcgtggtaactgagtgcccaccacctacttatccggcttttcctcctacagcatcaccttcaccaccaccaaatccagcttcgccaccaccagcatgcccttcatgt

SEQ ID NO: 34436 - DNA, 351 bp, Gossypium hirsutum
  Clone ID: LIB3145-052-Q1-K1-B3
cccacgcgtccgcccacgcgtccgatcattgagttggcagttctgcgcgaatgcacagctacaatcgattcaagtgtatcagttctgaatgctaatcctgattctgaaaatcgtgatggtgatattgggtggcctggagttatgactgtgagggtttatgaacttgatggtatgtctgatcatcctgatcttccaatggctggagatgcatggcagctgctggaaatagcatgccactcaaagcttgctgctagacgctaccagaagcctaaaaagggttcaaaacctgatggctctgatgataatggtgatttgcctacagtagatatgcgttcgagtgtagactcccca

SEQ ID NO: 34437 - DNA, 365 bp, Gossypium hirsutum
  Clone ID: LIB3145-052-Q1-K1-D11
ccaaggtctcggagctgggaaagccgccgatttgacctactgggagagcgccgctcgtatgatcgctgatgtagcgaaatcgaacaagatcgtggtcgaaaaatcgacggtgcccgttaaaacagccgaggcgatcgagaagattttgacccacaatagcaaagggatcaacttttcgatactttcgaaccctgaattcctcgctgaaggcactgcgattagtgatttacttaaccctgatcgtgttcttatcggtggcagggaaactccggaaggtaaaaaggctattgaagcattgagggatgtgtacgcacattgggtccccgtggatcgtatcttatgcaccaatctgtggtctgctgagc

SEQ ID NO: 34438 - DNA, 298 bp, Gossypium hirsutum
  Clone ID: LIB3145-052-Q1-K1-D9
aggatttctaaattagactgcagaaggaatcatgtgcatttatgaatggaagggaccatccgtgatatatgcttcttataccgcagaagaagtttctcatgggattgatggatctgctcctactggcatggatacaggatcatctagtggtattggtgaagagacaactatcgttctcgaattgagcggagtgcacatacttatggcggtatggaatgcagatgcccgtcagaatgtcaaagaatcaatactatgagaaatccctagtgctaacactgatgttatggaactggatctg

SEQ ID NO: 34439 - DNA, 139 bp, Gossypium hirsutum
  Clone ID: LIB3145-052-Q1-K1-E5
ggagaggttaaaatgttacctattttgtaagatgttcatcaatgttatccggattcgagatgattaacatttatgtatgcaactaattgtatccataccatctattatgcttaatcatatataaatattcaatccaatc

SEQ ID NO: 34440 - DNA, 222 bp, Gossypium hirsutum
  Clone ID: LIB3145-052-Q1-K1-F12
caggcttgtattttacccaacttttttttattgctaaacctggtgcaacttagggcggggttctcagtggcaacggcgtggtctaaacttaaggtatggcatcacatggacatgttggtcaccattattataacatacgttatggacctgtaagtcttaatccttaccaatgtccatcttaatgcacaaggaggtgttttcatacacaattccataaaccat

SEQ ID NO: 34441 - DNA, 434 bp, Gossypium hirsutum
  Clone ID: LIB3145-052-Q1-K1-F2
ccttcacaaaagataatcagagagttcaagaagaatgaacttcaaaaacatgttgctcagcaaactggtccaactacaacgaaagctagtgtcacagaatggcaggtcttgtatactacacaagtaactcaaaaggccaagaagtaccatgatggtttcttaaaactcgtaaattctgcagcgctgcagagacagattatgttatatgatggaagcaagaaactaataaatagcagattcctcaataaagatgaagtaatacaatctggtgaatcaataacgtttgatgctcatttggtaaatattggagaagctgaaggaaaccatccaggcctcatggactctgatgcccatgtaagcaattataatgctgctggtaaaacagagatgatccacagagtgcagaatcgtcttaaaacccacaaatcgttttt

SEQ ID NO: 34442 - DNA, 406 bp, Gossypium hirsutum
  Clone ID: LIB3145-052-Q1-K1-F6
ccttaatgcatcttccaactccccagaattgacatcagtgattgactgaaaggaatcgataagttttgttcactatagaaaacagatttaagaagattgcaattggcaagcaggcaaaaaaaggaataaatttaccttggtgtaatcatgtccatagatgtgtttatagcaagaaaatgtcagcttaagatgtggaatgcttcttttagtgaaaatctcaagcacagtaccttcatcaattgcgcctggacttccttcccctgtctcataaagcctcctcgcatcacatttcgctgtatgttggttgatatctgcctggtgtgccttgtgtgatgtggataatgcaaccagaatctattaaaaacaacaaagatgatgtcctattatcgtatgcatattctgatat

SEQ ID NO: 34443 - DNA, 399 bp, Gossypium hirsutum
  unsure (1)..(399): unsure at all n locations
  Clone ID: LIB3145-052-Q1-K1-G3
cccacgcgtncgctagatcgtatggctaactgggtcggcaccagcatggcatctgcatttttcgcatcattggagcgctgctcctgtattaatctcagcaccaccgattttgatgacgaagaggaagcctatgaccgccctcttgtactcaccaagcccctcatccacgacgaacctgaaactgaaccacaaccccgtccagccgcttagacccttttcactgtcaatttgctcgaccttcgtcacttcgtattctagggttcgttccttatatttatgtacttttctttttagttttatacgtgccgaggatattgtgaatcaattctcgcacaggttggtttataatttgaaagaattntggttcttttcttatttattttaatggaactcccttgg

SEQ ID NO: 34444 - DNA, 312 bp, Gossypium hirsutum
  Clone ID: LIB3145-052-Q1-K1-G4
ctcgtaatacttgtctccttcttcgtttttctgtaatatttgtcacaacaatcaactttaatcttatcgatcacaatttttttgataaatggtgatattgatgaagaagatagtgaacaagtttcataaataattacaatcaccggtaaccaaaaaaaaaaagttacaatcaacaaatgaagtttatttagcagattttcatgcaaatgttataaaatataggggagaaaaagaaaaagaaattggtgtcttttagtcatcaaggagtattgcaaataaacaattaagtagatttgcaaataaatttctttt

SEQ ID NO: 34445 - DNA, 281 bp, Gossypium hirsutum
  Clone ID: LIB3145-052-Q1-K1-G9
aaacaaagaggtgagtgtgtgtatattttttcatatacccttggtcaagcctaatcgtggatgttaacaggcttagaagtcaagacagtaaatgtcttttacatgtattatgccaagctgaccaaactcaataaggccatgcttggtaggattgttagtggtgtcttatgttatttggtacagatgtaatttaacaagttacgtgactgacttttataaatgagttgtgggatattaaatattctaatggaaaagattatacttcttccttactttgtact

SEQ ID NO: 34446 - DNA, 329 bp, Gossypium hirsutum
  Clone ID: LIB3145-052-Q1-K1-H11
atctctactttgtttaccatccgttttttacaatggcggacgaacttcatgctggggggaatctaaggcaaccactgcaggtttctgcaccatcaaggaccaatgtgcctgctacattcttacaaatcctcaataaggccatcggattcgaaatcctgttgtagcttgctacaccaaatcgtttgcaaacggcacctcaaatgacttggctcagacgtttgcagatgccaccaatcctcatggtttcgtgcttactacataagcggttgttgtctcgtcagcaagcactaaatgaatttcattgtggttatcctcacaataaagtccaa

SEQ ID NO: 34447 - DNA, 415 bp, Gossypium hirsutum
  Clone ID: LIB3145-052-Q1-K1-H12
gaacatcgaggctgtagttgaacattctaacgagaaattaatggttgacggtgatcaagtaggtgtcaaagcaaacctggtcgaagagagtgtaaatgccagtgatatcaaggattgtttattggttaagaaaagcacaactcagcctacagctgaagagagttgcaggaatcatagcatgactgagatgacggctaaagctggctctttaagtgatggatgcgcgaagaatcttgaagttttgagcacagcagaaactggccgagctacatagcgagacatggcatcttgtttatactaatacaatttatccattaaggttttttatcctgccattttagaaaatatatattgtagatttatttggaaaatgaatctcgtgaaaatgaaagaaaattgcattcgacaccagtgt

SEQ ID NO: 34448 - DNA, 257 bp, Gossypium hirsutum
  Clone ID: LIB3145-052-Q1-K1-H2
atacaatacaaaatgtggactattggatttatttaaaaaaaaaaaagaaaaaaaaagatacaaagaaactgatgctagatgaataaaaaaaaacatataaacaacaatataattaatagacagaatatggaacacaaaaaaattaaagggggggcccgttttaagggaccaaggttacctcccccgtctttgcaaggtattagtttttttttggggcccccaaattcaattccctggcccgccttttaaaaccgtgg

SEQ ID NO: 34449 - DNA, 373 bp, Gossypium hirsutum
  unsure (1)..(373): unsure at all n locations
  Clone ID: LIB3145-052-Q1-K1-H6
cccacgcgtccgctcaaagtactcgtatccaaatacatgaaaaaaggtgcaaaaattcaattaatattaggatcagttcatcctggttcactcaccatcaatcttggatcttcgggtgtgatggcttattctcgcgaaaaacagaacccccttctgcccgggctgtctgcggtagtcgacgaaattttctgcgtgttattgggacatattgagaacgttggtgtgcttaaacatctatgtggctggcacataacagcatacgangggattatcgttactgaagcttactgaaccgttagaggctgacgcccttacccttcttaccaggttgtgagatatatacaggggaaggtcattttcatgctcttcgata

SEQ ID NO: 34450 - DNA, 408 bp, Gossypium hirsutum
  Clone ID: LIB3145-053-Q1-K1-A10
cggagcaccaaactaaccagttagaagttttgttatatatatataaattaccttttgagtaaaagttattaggtggatttatattgcatgttgagcaactgaacatgtcaggctatgtactctcgatattttagtgttatgtcttcttcataggtcagttagggcatgttagaacatatgctttagtaaagttgtggattgagttgtaggtatcataaggagcttgttcatgtgctgaggctggagttttcatgtgcaagcttattgttcttcgatcttgatatgacgaacttagctgtctttccgagaaaattctaaaaccaagaacgaaactatgaaacttgaagggccatatggtactttcagatcccggtctctaacatgtgttcttatagcagctgtcatgcg

SEQ ID NO: 34451 - DNA, 123 bp, Gossypium hirsutum
  Clone ID: LIB3145-053-Q1-K1-A2
gtagagaaaaatgggtatgctgcagaaactatgagatgatgagagggacgtacctgactctaaacgcggtctagagcgcttgaggtagatcacaaccaccccatacttggacaccacagatga

SEQ ID NO: 34452 - DNA, 414 bp, Gossypium hirsutum
  Clone ID: LIB3145-053-Q1-K1-A3
cagtaatgttgcagaatgctactcaaaagagtcaaaaggtttttgttcatgttccatctgaaattgctgctcacgaagttgaggagattggtatgccatttgatgaaatttggtgtcatcttttcaggatattacccttgtggttaagataacccctttttcacttgcaaacagcagtgaaacacttgcttagggatgtaaaggatacaacaattagtacacttgcaactgaggtcacagggaaactcacagctttgaagggtttggatgcgaggttacgggagatacgcggttaccttgatcttgttattgatgagaagcttcctttgaatcatgaaatactttaccatttacagttaaactaagttgagtgaaagctgaaaatgaagctaaagatattttacaattatgaac

SEQ ID NO: 34453 - DNA, 418 bp, Gossypium hirsutum
  Clone ID: LIB3145-053-Q1-K1-A7
attactagtaagcgcgagtcatcagctcgcgttgactacgtccctgccctttattatatatcaaaagcttttacaactgctgcatcaaagttggagaagattggatatgttgatactgaaaatgaaagtgaagcttcggaaccaaagggtggtaaagaggcaattgacttcaaggaagttaagcgtgtggatcatattcttgcctctttacagcgaaagttaccaccagcccctccaccaccttcgtttccagatggctttgttccgcctacaacagaagcagataaagagccagaaaaccagcaaacagcagaacctcagcctcctgctgttgatcccatcatagatcaaggtccagctaagagaatgaaattttgaactcattgtttttcctcccatttcaatggagcattagaac

SEQ ID NO: 34454 - DNA, 297 bp, Gossypium hirsutum
  Clone ID: LIB3145-053-Q1-K1-B1
tgagatcgaagaccctagctttagcagcagtctcttctctttgatagtggctgaagatgatgtgtgcttagagagccggatgcttgacagattactggaaattactgacactgatgcccatgttggcagaatggaagccgataatgtagccgtggacgttattgatgaagcaggctggcttcttcatagaagtcacatgaagactatattgggacagcttgattctaactcagaattctatgctctaatgcggttcaagtgggttaaggaatttattatagaccatgaatggtgtgc

SEQ ID NO: 34455 - DNA, 304 bp, Gossypium hirsutum
  Clone ID: LIB3145-053-Q1-K1-B10
acatttctttatttgttgctcgcatatttacagggcacagggtgttttatttatggccactctagttgcatcaggatagcgctttgtttacaaatgctgctttacagctttatatttaacaacttggggggtattgcaactagctatatggtgatcatctatgacttttttgataattgataagatattaacgatgacatctttttttccttatgaagctatgtcgtatcaaggtggtgctgattggtatttaaattatgtgctagagataaaatctactttaacaaatattgagggccattta

SEQ ID NO: 34456 - DNA, 296 bp, Gossypium hirsutum
  Clone ID: LIB3145-053-Q1-K1-B6
cccacacgtccatggacacgcgggcgagggaggcactcacgatcattagtctgatcgcgggtaagcctatacttatacgccagcgtgctgttcatcagctcctgctccatcatcagacgaaggctatactactgcggccactggatatgatgcctattctactacgacgactagggaggactgccacagttaccaaggctatcttgctggaggctgcggagggctgctacagcactaaggggagagctgtatgggatactcgcttaaaacactgtgcctattggccttgaatcttt

SEQ ID NO: 34457 - DNA, 336 bp, Gossypium hirsutum
  Clone ID: LIB3145-053-Q1-K1-B9
tattttgagggttagaacaagatatttcgagatttggtgcttgaaaatttactgaaatcatcctgtttcgtttatggcgactcaagtggagtggtgattgtgctttgtttccaaatgctgcttttcggctttatatttaacaacttggggggtattgcaacttgctatttggtgttcatctatttttttttttttaatttttaagatattagtgatgacatttttttttccttagtaagctttctcgtatcaaggttgtgctgattggttttttaaaaaaaaaaaaaaaacaaaaaaaaaaacaaagaaaaacaaaaaaaatataattacaaaaat

SEQ ID NO: 34458 - DNA, 197 bp, Gossypium hirsutum
  Clone ID: LIB3145-053-Q1-K1-C1
ggtttgaggacctttaaatggacaaagaagttgctttcttttttttgggtgtggcctgtaatggaattatcctttctgtttctgtaatttcttgccaattttcctggttacacgtacctaaaaggcttgagaaagagtttcctttgtttttaaatcgtttttttggtaaatggaatacataaaaaggctttccaccc

SEQ ID NO: 34459 - DNA, 367 bp, Gossypium hirsutum
  Clone ID: LIB3145-053-Q1-K1-C10
acttactacacgacgagattttgtttttggcatttgttgtgggtcgaaaatttattttagcgggctggtgagtgagtgattggggattgtgtatagaaaatatagactggtagagacctaatgttgtttttcatttaatctcctaaatttgtgaactggtttttgcataggatgttgtcacttgttaatggggaccctcgtcccagcttttgtgtaatagaatgaatcatatcaccataaactacccagcagaaaaaaaaaaaaaaaaaaaaaaaaaaaaaaaaaaaaaagaaaaaaaaaaaataaaaaaaaaaaaaaaaaaaaaatataaacaaaaaaaaaaaaaaggggggggccgttttagagg

SEQ ID NO: 34460 - DNA, 416 bp, Gossypium hirsutum
  Clone ID: LIB3145-053-Q1-K1-C3
cccacgcgtccgcccacgcgtccggtgtaggtgggtgcatccattcttatattgaaatgcacctcttaatcttttaccggttggttttaggttgggcgcttaacagttttcaaatgttgattaaaatcagttgtgtagccgctgcattcattattttgtgaaatggtggtgttttgccggatatggcatgttaagcgtcaaaactaaaaaccaattggtagtaagtataggggcagcttgaatataataccgagtgaaataaattgcaaaatgatagcacattaagcatataactcaagcagccttcacaattgcccctctattctattaacaattcagtggaaggttgttcggtactagttttgagacctgacataaccttattttatgtttcatcattatcatttttattacat

SEQ ID NO: 34461 - DNA, 411 bp, Gossypium hirsutum
  Clone ID: LIB3145-053-Q1-K1-C6
gcaacacgtccggtggctatctctaaatgcattgaagagaggcagatgaatctttctgtaaattccaagaggcttctgcttttccatttgcagaagcttgtggctgctgcgaaattggccacgggtaacaatgcgcctctacttacttccgctcaggcttcaaagccgggtataactggttgtgctcgcgctaagagaaaaccggctgttgacaccatacctgtttcaaagcccactgagggaaaacgcgctccaacaacttatatatccgctgctgacacaaaggctaaagcggcgctcaatccaaaggcttgttctaaggctacatccaccccaccgtaaacggaggctgtgaatgctgggacaccgaaagcgactgcatctgcttagccaagaaccgttgcataatca

SEQ ID NO: 34462 - DNA, 403 bp, Gossypium hirsutum
  Clone ID: LIB3145-053-Q1-K1-D11
cccacgcgtccgcccacgcgtccgctttctattcttctggtgctgctggaggtagtggtggttctggctcagatttgggccttgcttctttgtctaaaagttcaaaatcggcatctattaattcttcttctatgggggaggtaaaaatgaccaaatttacttcggaagcctttgaagctatcccagatgatattagcaaccagaacgaagctttcagggctgagctggctggtacttccccaacacttgaggcttcagttggctctggtgagccattgctcagtttaaagcttggtaaacagacatactttgaggatgtttctggaggaagcaatactaagaatttgtcttattcttccacttctggacaatctcctgcccaagcaaagagatctaaacccaa

SEQ ID NO: 34463 - DNA, 212 bp, Gossypium hirsutum
  Clone ID: LIB3145-053-Q1-K1-E10
gaaaggaaacctaccttaaatgatgcaagctagtcgacgaagatgccgacgtagatgacgcgcttggtgaccgacagcatatacattaacgttggattgcaacaattgatacactatgatagcatttcataagggatatcagatgacttcgaatccggcgtactatattactatatttgacggactatttctatatgtacacaagaacagat

SEQ ID NO: 34464 - DNA, 517 bp, Gossypium hirsutum
  unsure (1)..(517): unsure at all n locations
  Clone ID: LIB3145-053-Q1-K1-E2
ccgtccgtatttaggtcggccccagcttaggcttaacttttttttaatttataaaaaaacaatgaaagagaatctttcttctttatttgggttttgtgccgccgcgtgacatcttagtngnngtggtgtnntgttttcaaggtgccagaaggcagtagtcgcnccagcgccaaaatggtgatannaccccttagaagtatttagctcatggctcnnngaacgcgtnnataagaagcncacnctcncatttcagcncggttgggttggccagaaagaatganaggggaacaacgnncaccatgctttattgcnngagtacccatgaagaaaatagaagatatttcaaacccgtgtttttgaccagaagttgagaatnntgcgaaaatggcttaaattgggtgtggagtttcatttattctttcacgctgcnttagaatcccgtttgggtttcaatttgactatttctctggttgggataaacctggcatctcaataaaagaaaattttattagaaaac

SEQ ID NO: 34465 - DNA, 383 bp, Gossypium hirsutum
  unsure (1)..(383): unsure at all n locations
  Clone ID: LIB3145-053-Q1-K1-E7
cccacgcgtccgcccacgcgtccgcccacgcgtncgaaaaaaataaaaaaaataacacaaaacaagagaataatcacaaaaagaaagcccggagatttagatcggaaaatcatcttcagatattggttgtctttttgtattgcctattgtgcatccaaaaaaatacaatgatcgaatgcttttgctttatagctgaaaatgaaaaaaaaaataaataaaaatacaaaattctttctttgctttcacattgggtatatgctgctgttgcttgtttatttttttttgcaggtacgggtgcaaggcgctcgggtacgggactgtgttggcgcgggcgtggctgctggacagtacggagcgcacgacgctggcatcgtacggaggct

SEQ ID NO: 34466 - DNA, 410 bp, Gossypium hirsutum
  Clone ID: LIB3145-053-Q1-K1-F11
ctacgcgtgagccaagcagtttcatttgctgccctgcagattcgtgtaacatttgtcaatgaatttggagtggaggaacctggtatcgatggcggtggaattttcaaagattttatggagaatattactcgagctgcatttgacgtgcagtatgggttatttaaggttgttaatttatgctactgctatctccttttcatcttttcatgtaaacaagtaatttctcgataagctggttgggcatatccacaagatacttttattttttatttcacttacggtaaagatgtcacttggggcttccttacctttctgatttaagatggcatgcttcttttggatcaaataggttgagagagcatattaatattcaattcttgctgaatgagggaaagataaaagaggcaaag

SEQ ID NO: 34467 - DNA, 405 bp, Gossypium hirsutum
  Clone ID: LIB3145-053-Q1-K1-F4
tacagattggactgagggtgagacatttgttttactagatgcgtggggtgaccggtttttacaacgcaagaggaagagtctccgagccgaagaatggcaagaagttgcagagaaagtttctgaagtctcaaagattgaaaggaccgacactcaatgtcgcaaccgattggatacactgaaaaaaaagtacaagaaagagaaggctatggtagctgagaccggcactagcactagcaatagcaaatgggtttatttcaagaagatggacatgttaatgtcaagttctccacaacagggtgttatccacaaggctatttcaggtgaaatgcgggatagtccaacaatctcagaatcaaccgatagtgaggaggatgtctcagaaggattgccaccgaaaaagagaag

SEQ ID NO: 34468 - DNA, 399 bp, Gossypium hirsutum
  Clone ID: LIB3145-053-Q1-K1-F5
cccacgcgtccggaaaaggtttcatcttggcacatgaaggtgttggtagatgctatcacgaattcagggctttcaacgatctccaatacgttagacgaaagtgtttacaaagaaggtggtgaacaagcagataaagagatcactaatgaggaggaggcacagtatgttgctcatcaaattttctcgaacgtggtctgtcatgagagtaatcaaaatcgccgttacattgatgaagacgatctcttaaggttcatgatcaaggaggaggtggaactcgtgtttccattgtttgaagtatcaagcactggaaaaattgacagaaaaagtttcactaactgggtgataaaagtttaccaggaccggaaaacgctagcacatgctttgagcgacaccaaaaca

SEQ ID NO: 34469 - DNA, 406 bp, Gossypium hirsutum
  Clone ID: LIB3145-053-Q1-K1-G1
gttcaacgtgaaagggtctaatctgtatttctggatagcagtccttcccattacccttgttcttcttgtgggcgcaaagctacaacatgtcatcgcaaccttggcactagagactgccgacatgactggttatgttactggagcaaagctgaggcctcgagatgaacttttctggttcaagaagccggaatggttgttgtcccttatacatttcattctattccagaatgcattcgagctggcttcatttttttggttctggtggcaattcggctacgattcatgcttcatccgtaaccatacgcttgtttacataagacttattttggggtttgctgggcaatttatttgtagctacatcactcttccactctatgctttggccactcagatgggaacgaactac

SEQ ID NO: 34470 - DNA, 387 bp, Gossypium hirsutum
  Clone ID: LIB3145-053-Q1-K1-G11
ggaccctgatgtgcatcaccgacatctttcacacttgtatgggctttttcctggacacacagtgacaattgaaagcatgccagacctttgcaaagctgcagagaatacacttcataaacgaggagaggaaggaccaggatggtcgaccatgtggaaagctgctttgagggcacgtgtacatgacagtgagcactcatatcggatggtgaaacatttaatatactttgtggatccagaacatgagaaagctttcaaaggtggaatatacagtaacttatttgcagcacaccctcctttccagatagatgccaactttggttttactgcatcagatgcagaaatgctagttcaaagtaccttggaagacctatacttgcttcctgctct

SEQ ID NO: 34471 - DNA, 306 bp, Gossypium hirsutum
  Clone ID: LIB3145-053-Q1-K1-G3
cacacgcgtccgaagtccataaatgggggcgagttccttacatttcctgcgatgctagaaatgctggaacgctgtgcacctgtgagtgaccacttctggatgacagttgtggctgttggctgatcggttgattcacaataccgcccgacggtggaccactgttggtcaacgcacgatgaagattacgtcccggcggtggcttattatattggaacagagatgagtatcgttgagattgtgcaacactggcctctggaagatcttggcagcgataatcactatgaggatcacatggctgagccttgt

SEQ ID NO: 34472 - DNA, 361 bp, Gossypium hirsutum
  Clone ID: LIB3145-053-Q1-K1-G9
aaaaaaaaaaaaaaaagaacttgttaatctctgttgtatgagataattagaccgaagtaaatgtgtacctttgtcctaaaaaaaaaaaaaaaaaaaaaaaaaaaaaaaaaaaaaaaaaaaaaaaaaaaaaaaaataagaaaggggggaatgatcgagacaactgcagcttatggtcccaacaatgttaatgtcttaaaatatactgaggtctattcaattcaatggctcttgaaaagaatactaacggttaagctcttaaatgcttacaaataaataattaaatggtgcaaagctcatattaatttatgcatggaaatatgaagtttttacgttccttccattattactattgcaaagtga

SEQ ID NO: 34473 - DNA, 353 bp, Gossypium hirsutum
  Clone ID: LIB3145-053-Q1-K1-H10
ggccgtccacgcgtacgagagcagcctacgagatcaaccaaggctgaatatcctttttggccatttggcagcaggcccatggttgttctctaagatcatgccatccacagaagataataacgatgatgatttagcaatcacgtctcctgggttgtcgatatggaagaaatgggttcctagcttatgtggtaccgatctaacttggtgtttgtctgttgtgaaaaatgaaaatcgcgataaactggatgaggtcgtctccggagcagacgcagtattatttcttgtatctcagaacattccatggaagctcctaaaggccgaactttatagtctttttaatataaagggttgtg

SEQ ID NO: 34474 - DNA, 234 bp, Gossypium hirsutum
  Clone ID: LIB3145-053-Q1-K1-H11
aaaagagacacggaaaatctggaatgattctgatgttaaagacactgctacatgcatacgagtccctgtgacgcgtgcacatgcttaaagtgataatcttcacttcaagaagccacttgattaggacacagcaagagaaaatttggtatggatcaccggggacatagttattgatgatctgatttctaatcacttccctacgccattggaggtatcaaacaaagatgatgtagc

SEQ ID NO: 34475 - DNA, 348 bp, Gossypium hirsutum
  Clone ID: LIB3145-053-Q1-K1-H2
ggacaccatcgaatccattgccaactaacgatcaacttagcacccctggtggacgggcagttgctcctgctgtggctggtagggctccgccctccaaaccttcagctgctgcccatacccacctaccatcttcttccctgcagttttgttatataaatttgcttccgctgcttgtcctttggcatcttctcgtttcatcatttcccatagatacgggcaccaccactcacggttgagccattctcacacttaacctcacttgtatgtatatcatcttttttttcttctttctatttttcctaatatttggattattatatatctttttaccttctgtattatgtatga

SEQ ID NO: 34476 - DNA, 270 bp, Gossypium hirsutum
  unsure (1)..(270): unsure at all n locations
  Clone ID: LIB3145-053-Q1-K1-H5
gccgcaacatggtgcttggtttaccacgtaagaatcacgttataatgtctgaatgggtatcggaccaaaatgtatggaaaccaatgtgcttcaagaaataatgggacgaatcccctatanaatgaattttttaaccttttacanttttgatgctaatgggtgtgtaaattatcntggatanntgtttcttctcccctctnttttcagcaaaatagagggtgttgaagtgaatggagatgtnggcgagttcgacaaaagggagatggaact

SEQ ID NO: 34477 - DNA, 374 bp, Gossypium hirsutum
  Clone ID: LIB3145-053-Q1-K1-H6
cccacgcgtccgcccacgcgttcgatgggcaccattgatgggaaaacagctttgttcggctggagatgattcgagggctctaatatgggaggtggtgggctccaattatcgagcagaaaatggagttgcagtgatggaaccagagatgtggtatggatcagcggctgagatcaatcatgctcgatggtctccaattgagttggattggattgctatagtttttctcaacaaattgcagctgttgaaagtttaagaaaatttttgacttctaataacaatagtttcaagttagccagccatgttaattaaaagtcctatatatgtttcattactaaaaataatttcttatatatgagattggaaaatgatacacc

SEQ ID NO: 34478 - DNA, 410 bp, Gossypium hirsutum
  Clone ID: LIB3145-053-Q1-K1-H7
atcaactccccttttaaaaagatgtcctctacgagaagtaaagataaatcatcgggctggactgcctttgatcttaagcagaggcagaaacaagttctggtaccagaaactgaaaatgaccctttccctcctgtagcaatggcggctcttcatccctgcacaagccagacaaattgcaacgacctttcagcaaggtctttctcatctgtgctaaagccttctagcgattttccaactttgaaacagaataagaattccataaaatcaataaatgtgggcaagcctattggaaatgaagataagatagctggggtaaacaataatgatttagcccttaaaaagcttaaagagatacattgctgggctgagaatagtttgattgaggacatcttgttggctaccaataatga

SEQ ID NO: 34479 - DNA, 407 bp, Gossypium hirsutum
  Clone ID: LIB3145-054-Q1-K1-A11
gtgatgttgcaattgcgtcatccatatcaaaagtgcttgcctctattatgacttacccacatgaggtaattcgatcaaggcttcaagagcaagggcaggcgaggcacaccgaggtccaatatgcaggggtggttgattgcattagaaaggtattccggaaggaaggtgtttctggcttttaccgtgggtgtgcaaccaatctcctgagaacaacaccatcagctgtcattacatttaccagttacgagatgatacaccgatttctgcaccaggtattacctcctgaaaggaagaaatcagaggctgggcctaggtctgatggccatgtgaacaagtcatggccaaataagagagccagtgcggaagaaagtaaaatatcgcaaactcactcaaataagattacacct

SEQ ID NO: 34480 - DNA, 408 bp, Gossypium hirsutum
  Clone ID: LIB3145-054-Q1-K1-A2
cccacgcgtccgagcacacagcattgttgtagcagaaagaatagctctcaactttatgcagcggatgagtggtatagctacactaactaaggcaatggctgatgctgcataccctgcatacatcttagagacaagaaaaacagctccgggcttacgtttggtggacaagtgggcagtactaattggtggaggaagaaatcatagactgggtttgtttgatatggtgttgataaaggataatcatatatcaatagctgggggaatcagcaatgcccttagatctgttgaccagtatttagagcggggaaatcttcaaatggaagttgaggttgagacccggacgcttgcggaagtaaaggaagtattgcagtacgcatcacaaatgaagacttcattgacccggataat

SEQ ID NO: 34481 - DNA, 361 bp, Gossypium hirsutum
  Clone ID: LIB3145-054-Q1-K1-B1
cccacgcgtgcgcggagactgaatctcaagggacagaccttcacgggatataccggacgaatctgatgctagcattgcaattactagaacagatgggaaagctggcagtggttaaaggaactctaactgatgatgaaggtgtaaaaatgtctgtgtaattattgatcgaataggctctcagaggcaaggcagcatatagcctattgaccatcataactttaatcagcagcaggctgtcagcgacctgatatgcgttgaacaaccaaacctgacggtatttgtactcaacaattccatggtgctacaatggagccatcattgggatcattgttttcctctttctgaatatgtgctataagaa

SEQ ID NO: 34482 - DNA, 411 bp, Gossypium hirsutum
  Clone ID: LIB3145-054-Q1-K1-B3
cggaatttccgggctgacgaacacggacatgcactcgcctgttcagtggaccaaaatggcagtatagcatcacatgccttcatggaaactttgagggagcggatgttcaagccatccttgtctagtatcattgctgaatattcatatgatgcatgtggttaactatggcaccctatctgtgttgctgcaaaaaagatgagggacttgcgggttaattcagttgttacagttacagggaacactaatcatgggatgctaacttcttacgatatccttatgtgagtctgtgcaccaaacctgtctcctgaacttactccggtggaaaaggtgatgacacccaaccctgaatgtgtgacagtataaacaacaattcttgacgcactgcatttaatgcatgatggaaagaaattt

SEQ ID NO: 34483 - DNA, 401 bp, Gossypium hirsutum
  Clone ID: LIB3145-054-Q1-K1-B8
gttaggtctaaatcaataggtttgggtttagtttaatttaggcccgaaattttgtaaatggacattggactcataaataatttggtttattatttatttctgtttaattttattattttatttttgggtttttggttttttatggatccggacaaatttggcctattacaagctgaatagctaaaattcctggtaccagattgtcttaacaatgttttaaaaatgatgataaacgattcttctggtgttgtcatcaaagatttggaagtttgcttcgggggaagagaaggtgggggcgaatcttcaattatgggtctctttcctaattgtttggagtcatgctgagaagattcttcctcctgaatcttctttgtttcagcttctttcttttctttctccat

SEQ ID NO: 34484 - DNA, 384 bp, Gossypium hirsutum
  Clone ID: LIB3145-054-Q1-K1-B9
aagaaagttaagctttgaatacccagaaacagagtggagaagatgtggttagcggggttggtgaagaacaacataaagggagggaatggcggcgttgggagtctactggttcgatacatgtcgagaactagggcagtaaatgtgagaaagatcaatccaaaagtacccattccggaagctaaatccatcgccagttccctatatgacctcatcaagcaacgtggtcctctcaccgttcccaacacttggactctcgcccaggaagctggaattggtggattaaacagcaaaacacacatgaagataatgctcaaatggatgaggggaagaaaattgttaaagttgttctgcaaccaagttgggtccaacaagaaatttttgcac

SEQ ID NO: 34485 - DNA, 234 bp, Gossypium hirsutum
  Clone ID: LIB3145-054-Q1-K1-C1
cccacgcgtccgcccacgcgttcggacgaaggcacacgcgaccgcccttacggccattgtttggttgccgggttaaaaaataccccgaccaaatcattccgcagggcctgggccaaaaaaccgggaaaaaatcgcgcgggaaatggttcgtcaagcttgtgaattaccaacaccttattgccacgcgcttcacccttgaagtggattttaaagacatggtcaacgcccatgctt

SEQ ID NO: 34486 - DNA, 396 bp, Gossypium hirsutum
  Clone ID: LIB3145-054-Q1-K1-D1
cgagtagcaaaggcatgtgaggcctttgttgaactggcagatgcttgtggctatccgattggcgtgatgccatcagcaaaaggattagtgccagaacaccactctcgattcattggaacttactggggcgctgtgagcacttctttctgcgctgaaattgtggaatctgctgatgcttacttatttgttgggccaatcttcaacgactatagctcggttgggtactcactccttcttaaaaaggagaaggccattgttgtgcagcctgatcgtgtagtcattgctaatggaccggcttttgggtgtgtcctaatgaaggactttctccaagcacttgcaaaaaaggttaaccgcaacccaactgcttttgaaaactaccagcgtatattcattcca

SEQ ID NO: 34487 - DNA, 401 bp, Gossypium hirsutum
  Clone ID: LIB3145-054-Q1-K1-D11
cccacgcgttcggtctgattatctggatatggcggatgatttaacaggtgatgtagagttcatgaatgctgatggcaatgggtcagttaaaaaagaggatcttagtaatgatcagagtaatggcgaattgatggcctgtaacatgagtaataatttcttagaggaggaggatgccgatgaaaatgttgtaagtctcgagatttcagacggtgaaccaaacaaaggatcggctaatgatctgggattaggctcgactcacgtcacaaccaccgtgtggtcctgcatagaatccattgatgcgtccacttcaacaactccggaatggcccagctctgagccttgtactgattctatcactcatgtgatttctgccgaagaacacattttaataaacatggtgc

SEQ ID NO: 34488 - DNA, 412 bp, Gossypium hirsutum
  unsure (1)..(412): unsure at all n locations
  Clone ID: LIB3145-054-Q1-K1-D3
cccacgcgtccgcccacgcgtncgtataaatctttttttttctgtaattgaaatcaaacagtccaaaacatatcgacgagatttcgccttccaatgtagggaaatcaaaatatttttaatttaatgttatccggaactcaatcaaacgtttaataattaaagaaaaaaaaaacatacaaggaagaatttcccgtaaaagaaaaagacgaatgtgagtcttggaggtggggtccacagtgacaaccaataaggagaagcgttgtgtccagcacctgcggaaagagaaggcacacgtggatgctatctcgataagcgagtttccttttttctccttattcttactgttgagttgaaaaagagaaagaaaagaaactttaaagggagaggattcgagaaagtgcatacgtggtct

SEQ ID NO: 34489 - DNA, 397 bp, Gossypium hirsutum
  Clone ID: LIB3145-054-Q1-K1-D7
gttattcatgttcttcatctccatgcaaattctatgacctacccaccatttccgcaaatgcaaatggaatcccatcggtgattcctagacccaaacctcccattccaacctttttatgtcattctaatatttcatctacctttcatatatgcctactctttgtttcctcttgggaagaccagctgagatggatgatgataaatttaagagaaggatgaagaagatgaaacgcaggtattccaaccctacgcctgcagtgttgcgtataacaggctctgttgttaccatggtgttgctcttattaaccatctgctgcggtttccaattgaccattgaacctgggcgataccgcgccatcggtgctcgggctttccatgttggcatctccaccataatc

SEQ ID NO: 34490 - DNA, 229 bp, Gossypium hirsutum
  Clone ID: LIB3145-054-Q1-K1-E2
gttttgagagtagccactataggcaatcttgagagcttttaagcttggcagtcacgacaagaagaaaagaacaatggaggagcaaagtgagctgtgccacagagatccactagaaacgacttaataattctctttcccttcaatcttttttttttcaattcaggaaatatgattgcaactaagttttctgcttttaatataatcatgagtgcttaattttgttggtttt

SEQ ID NO: 34491 - DNA, 189 bp, Gossypium hirsutum
  Clone ID: LIB3145-054-Q1-K1-E5
ttttaattctctatagagtaatacgaacatcattgggaatttttagactctaaatttttggaaaataacttctagttagatcttggtctgctgtaattttgtttctcagcattttcaaatcttctaagacatacattttgtaatcgctttttatcgtgtattctcctgacttgtcaaattattaaatat

SEQ ID NO: 34492 - DNA, 355 bp, Gossypium hirsutum
  unsure (1)..(355): unsure at all n locations
  Clone ID: LIB3145-054-Q1-K1-F4
acanaatgttcatccttggtgaccagatgttgcagagtgatcctagggtgccaatattgcctattgagagaaagtggaaatccaacgttgaaactgctcccaattgtccacgttgtgcctctgccaacaccaaattctgttattacaacaactatagtttgtcacagcctatgtacttttgcaaaggctgtagaaggtattggactaaaggtggttcccttaggaacgtgcctgtcggtggtggctgtcggaagagtcgaagaggcaagtctagaagggaaagggtcgagaaaagagatcaaatttccatgactgatagtaagaattcaactagttcttctgatggggattcggg

SEQ ID NO: 34493 - DNA, 403 bp, Gossypium hirsutum
  Clone ID: LIB3145-054-Q1-K1-F9
cccacgcgtccgcccacgcgtccgggaaaagatggcgatgcagcagggatgttatccccgatcaaaaatattgtgcacgacacatgcacagaggtgctagaaaacagactgaggtttctcagcctgttgcagttcccagtgttggtgattgccgtccacctagtagattaacaacagcatacaaagcagcatgtccagccctgagcaccagtctgtctatttcgattccaaggtcgcagcacattgcagaagatgaaaagagtacgagcagcagcagtgagacgaccatcagtgacaccaacggttactgtcttcgagaatagtaacttagatgtgatatttggaaagttgtgatgattgaggtgtttgttcctaatgacaaactaagatataggtatcagtg

SEQ ID NO: 34494 - DNA, 284 bp, Gossypium hirsutum
  Clone ID: LIB3145-054-Q1-K1-G10
acgctaatgggttgcccacaaccataaataaattatcagccctctggttatggtgacactggaataaaattttgaaaactccaacaacttggtctgaaataatattgccaaattgagcactcaattaatcaatgtatatggggagtggtgggttgcagatttcttgacaaggcatacattgaggctgtaaaacataatgtgaaagctgcaaatatatggagactaatcagggcggaccttctggaggaaccaaaattctttactccgaattgcaacaatatggg

SEQ ID NO: 34495 - DNA, 222 bp, Gossypium hirsutum
  Clone ID: LIB3145-054-Q1-K1-G7
ataaaaaaaatactcactataattctactttgatcacataaaaataattttaaggagcgggcggcctgtctaaaggacacaagcttaaccacgcttacattcaaaaaatatttccttttatattgtgcccccattattcatattctctggcgggtgtttcacaaccgggagactaagaaaaccccgcgcgaacccaacttaataggccttgagaagatcccc

SEQ ID NO: 34496 - DNA, 360 bp, Gossypium hirsutum
  Clone ID: LIB3145-054-Q1-K1-G9
ttagctccttgaacactttccaagttcaggaattgcatccatgttgatatcataggacaaattgtcggtcaagcgccaagtgattatcaagttgccttgttaaattcgagatgcctctcattcgccctgtgtacgtaggtgtggaaggatgtttcatttggcagttaggcatgtttaatgtgttcgtacttattttccctgttatgagattcttcaggtgaaatggcagcttggaaataagaaataaaaaaaggacaaatattaaatttatatatgaattttgatttaatgtgtaatttgatacatgaattttgatttggtgtatttgtacacattaaacttgaattgtagttgatatgt

SEQ ID NO: 34497 - DNA, 324 bp, Gossypium hirsutum
  Clone ID: LIB3145-054-Q1-K1-H2
ttttaaaaaaaaaaaattaataaaaaatttttaaattaaaaaaataaaaaaaaaaaaaaaaaaaagataaaatgtgtgggtacaaataatagaaaattaaaattattaggggcggccgttttaaagaaaccagatttacgaccgcgtccatgcaacataataacttttttttatggccaccaaaattaaattgattggccgtgtttttacaaatttaggaatggaaaaaccttgggttatccaaacttaattgctttgaagaaaatcccccttttaaaaggttttgaaaaaaaaaaaaggccctaacatatcgaccttcaaaaa

SEQ ID NO: 34498 - DNA, 402 bp, Gossypium hirsutum
  Clone ID: LIB3145-054-Q1-K1-H3
cccacgcgtccgcaggggtaaaggagctagttcggccagaaaactaaaaaacagggaagctagaaaatcgagtaaaatgaacgaaaactcgttttgatgaagaattagcgatggatcatagatctgttgaaccaattcggctaggaaacaagaaggtgacaagtgacaactctacttggggtgttgaaaactaaattcgaaggcagattcatgcaaatatacactctcttttgtcagtctttatcaactagaaagaataatacatatgctgtacatgctttggcattgccattaatgaccattgatattttatggaacacttgtatgttttatgccattactgttagaaaagggttaaggggtttttgtaaggaattaggcacttgttctttgtaacctcat

SEQ ID NO: 34499 - DNA, 315 bp, Gossypium hirsutum
  Clone ID: LIB3145-054-Q1-K1-H5
acgcaattatactgaatactggattctatattttttatgtatggaagcccgcatgggactgggtctggctaataatgcactcatacgcatctcccaagtctaattaaaaaggcttgctgagattcatgttttctctgcatcaagtattgaacattgattggacatacctcgtgactaaaacagatatcaactggcctacagttaaaagttacctggacatatactgggcagtgactggaatgcaaattttacaaagacgttggggaaactacatatggccttttctttatatgaagcaactctttgctttttgaa

SEQ ID NO: 34500 - DNA, 406 bp, Gossypium hirsutum
  Clone ID: LIB3145-054-Q1-K1-H7
gtctgtctcacctgaagagaatattgatgtcacagaaacaatcggtcctgctatgatatttctgccttccgaaacaaccagtgaggatttggatagtatcgtggcttgtaccaaacatggagttgctttgactggggctgcagcaaccggaacaatgggaccgatcgtagggttagtggacatcggtgtattagaggattcatactattttcgtgtctcccttcctggagtatcaccggataaaaaagacttcagctgtgacatcgagtctgatggaaaagtgctaatcagagggataacaacaaccggtgagaaagttgtagtcaagaactttcaagtctttcatatgctcacacaaaatctatgcccatctggacacttcactgtttcattcgagctaccgggc

SEQ ID NO: 34501 - DNA, 106 bp, Gossypium hirsutum
  Clone ID: LIB3145-054-Q1-K1-H8
cccacgcgtgcgaccacgcgttctgttcttttgggacgatatggaaatgattgggcatgatacattttacaacgagcttcgctttgccccagaatagcacccggtt

SEQ ID NO: 34502 - DNA, 429 bp, Gossypium hirsutum
  Clone ID: LIB3145-055-Q1-K1-A11
cccacgcgtccgatatatatatacatatacatgcgtgtaatggaaatcgaaatggagaaagaaaagttgtgcatattcaactcaaagtttagcttatttatgcaagtttacaaagtttgaaaaaggaaaggaaattgtagaaaataatgatatgatttaggtgctaaatcagcagcaataaaagaattagtggctaaacaaagtagtaagagagaagatgaaactctagaaaacttagggtttaaaaaaaacctctagtttctatatattaattcaaaaaaaaaaaaaagaatcataatatgactgtgaagcctacaacttatttatataggctttcttcttgcaagttcagttactaggctttcttacaaataaagttttattctagccctaggtttaaaccctaaagataactaataacctccggca

SEQ ID NO: 34503 - DNA, 429 bp, Gossypium hirsutum
  Clone ID: LIB3145-055-Q1-K1-A12
cccacgcgtccggaaaagcaaaatgaaacaaaatagtaagaccagactcaagaatcttcgtccaaacccttcagttaccagagaaaccaaaaacgcccaaatcccttccttgttcagacaatcgaagaagcagacatgggagggggattgaggtttgctttcagacacaaatgtagtagaatcctcaagccagagacaataatatagtcaagaagagctacgatggttgctggaaatgatggtcggaatctgctaactcactaactctcgacagtgcatctttaacccatatgtggttttccaaacttctcatcgccattgcatgcgcagctgagtttcctcctctggcaacaaactcgaatcgacaagctaagaagttccttgctagaaccctcacatcccaggtaatcgatctaatattcgagtaat

SEQ ID NO: 34504 - DNA, 269 bp, Gossypium hirsutum
  Clone ID: LIB3145-055-Q1-K1-A2
ctttagacttaatgaacaagcacatatatgaatcatacgttgtttaaagtagttgtgtgatgaaatcaaaatttccataccagatcattactaacaacgccttttaatgtttttggtggatgctttttcatattgttagtctggccatgaacaaaatctgacataccaaatgaagtaagcataatatgagcctgcacaccttttgctggacagaaattatttcttatattccttccatttaatctattgtttggataactatcaaatac

SEQ ID NO: 34505 - DNA, 348 bp, Gossypium hirsutum
  unsure (1)..(348): unsure at all n locations
  Clone ID: LIB3145-055-Q1-K1-A7
acgggaacggacagccagcactcctctatctcgttccttgtacactaggagttacagttgtattagctgcaataagaggagatttgaaagcgctctggggttacagcagcaagtcatctgccatgataaatcccactgcagaagtttgaaacctgtaattttcttcaaagcggcaatcttgatcatccaaaactacctaatggtttaaaagatggtttcggtgctatctatacaaggagtacagggtcgatgaaaagtcacggctcaagttttttaagcaaaaatgtggggcagacagatgttacatatataacttccactttaagggaatgngcccactttttatat

SEQ ID NO: 34506 - DNA, 279 bp, Gossypium hirsutum
  Clone ID: LIB3145-055-Q1-K1-B11
cggacgcgtgggtttgtaggctttaaatatatcaattccattaaagttgccaaaaatgtgagcatcccaccagatgctcctgggtgcaattgtagaggatagtgcacatatccaaggtcatgttcttgtgctcaacttaatgggggtgacttttcatatgtttctcgtgatgggtgcaaggcctgagtgcgttaaccgttcatctcagcaggggcctaaaaataccagacttggggtctatcgcactaaaaaaaaaaggatgggcaggttagatctttt

SEQ ID NO: 34507 - DNA, 380 bp, Gossypium hirsutum
  Clone ID: LIB3145-055-Q1-K1-B12
gggatgcgtgggtaagtaggcttattatatatcaatcacataaaagttgccaaaaatgtgtgcataccaccagatgctgctgggtgcaatactcgaggatagagcacatatgcacggttatgttcttgagctaaaattaatggtggtgaattatcatatgtttcacctgatggaggcacgtctgattgcttatgccgtccatcttacatagtactaaaataccagattggcgcttatcaagctagggaaagagaatgggaaattacaactttaagactctattgctctaggtgcaccacgttgatagcatgtcacgcatcataaagaacaatggtgcattataagatgtttgagaaaatgactactattatgcgattgat

SEQ ID NO: 34508 - DNA, 153 bp, Gossypium hirsutum
  Clone ID: LIB3145-055-Q1-K1-B6
gggttagtttgggtttgggccattaggtctaaattttgggtttttcttgggttaggtctaaataaataggtttaggtttagtttaatttaggcccaaaaatttgtaactggacattggattcataaataatttggtttactttatttctgttt

SEQ ID NO: 34509 - DNA, 397 bp, Gossypium hirsutum
  Clone ID: LIB3145-055-Q1-K1-B9
gcataacttacatactgagctgcattaccaaacattctcctcagtacaaggttttaatgctaggacgagtcttgggtggcattgcaacttcccttcttttctcagccttcgaatcttggcttgttgctgaacacaacaagcgaggttttgatcaacagtggctttctataacattcgcaaaggcaatatttcttggaaatggattgatggcaattttatctgggttgtttggtaatgtactagtggatagtttgaaattaggtcctgttgctccatttgatgctgcatcttgcttcctttcaattggcatgataattatactgtccacatggactgaaaattatggtgacccttcggaaaataaggatttgcttactcaattcaagggtgccgctgc

SEQ ID NO: 34510 - DNA, 427 bp, Gossypium hirsutum
  Clone ID: LIB3145-055-Q1-K1-C12
cccacgcgtccgcccacgcgtccgggagtgataaacaaaagaagtgtttccagaagtttcagatcattcacttttgaaggagtttgtacgttcaattcgtgcccgcaggcggtattgggccaggagctatgctggatggaggcagtttactgcagcacaacctggtgctgcacatgttgctttagcatctctagagcaagctggccgaataaattttatgataacacagaatgttgacaggctgcatcatcgtgctgggagcaacccacttgaattgcatgggactgtttatagtgtgatttgcttagattgtggtttttcattttgtcgaaatttatttcaagatgaagtgaaggcccttaatccaaagtgggcagcagcaatagaaagcttggactatggtaatgctggatcagataagagcttt

SEQ ID NO: 34511 - DNA, 436 bp, Gossypium hirsutum
  Clone ID: LIB3145-055-Q1-K1-C2
gagttgagcaaattacgcagtgaattgaatggaaaaatggtagaaataagacgtttgcaaatggagttgaatagacaggaggatgaaagtgcagatgatacacaggataatttgaaaagagctatttccaccttggagaaagagaacactcgtctaaagatggagaagaatgaacttgaagctgccctggaaagtagcaggaaatctttaactggcaagatcgatcccaatgcttcagagactctgaagttagattcatcaggaagttcttcccggatgaaagaaatggaactatcactgcagcaaatggaaaaggatctgaaagaaacctgccgtgaaagggataaggctttacaagaattaaatcgtcttaagcaacatttgttagaaaaggaatctgaagaatcagaaaaaatggatgaagacagcaaaatta

SEQ ID NO: 34512 - DNA, 198 bp, Gossypium hirsutum
  Clone ID: LIB3145-055-Q1-K1-C6
gttagaaatgtgacttattttctttccatttatattcttcgggattaaaccgaattatttatcactcttttgacctttggaaaggcggttttggttgatccgtaattaaccttggatggaaatgggaccggaatttaatttccgtcaaaggcaatggcatggcattcctaattggaatccgtggttaatttggggggt

SEQ ID NO: 34513 - DNA, 422 bp, Gossypium hirsutum
  Clone ID: LIB3145-055-Q1-K1-D11
aattatacgggatttggctaatggatctctttaacaccagaaattatattagttgatctcatccctgagcaatttagagggtgatttcaacgagttaaagaaagtcaagtgtgcagtttgggaaagacttgccagattctctgaagatttgctgctagctagtaatgttcgagttcatgtcttagagcttatgcaatttatcgctggtaaaagtgagaagggtttatcttctgagctgcagctaaatgttcatccatgggtagggtgggatgagtcactatgtgcttataacaagagccaaattacttcaaatgatgggttgcccgagcaaatagatactttcagcaggtttacaagtactatagttgccctgagatcatctcaacttatggcaaccatttcttctggctttggaatcaccc

SEQ ID NO: 34514 - DNA, 257 bp, Gossypium hirsutum
  unsure (1)..(257): unsure at all n locations
  Clone ID: LIB3145-055-Q1-K1-D5
cccacgcgtccgcgaagagtgggtctccttctctttntgcanactcctcccaagcaccacctacagtccccgccaaacatgtcgagaacgtagatgattcgctggaggatcttaaggttatgatgggtgccaacttgctcttgcttggctcccaagctgggtttgtcaacctctatttcagagactattacatgtccaagttttttcaagaaatctttttcagagttttgaacccctgatanntgctactaagtctt

SEQ ID NO: 34515 - DNA, 411 bp, Gossypium hirsutum
  Clone ID: LIB3145-055-Q1-K1-E10
cgcataatgtagcatgaggctcatattgagaaagatagacatacccatactgccaaggctgtacttcctctgtaatacatatccaaataggctttgaatggcactccactacagaaccaaattgaaaaaccgctctttttaactcgattctagcaaatacgtgcatactacgattactactgcaaagattgtgactgccaaactcttgattatacgtcataaacacactgcccacactgcccccataatagtgtgacgcattcttgacattggaataaatacatcgctactccaatacaacaatctcgacatgaacagatctgtaaaagagctctgatattgctaagacacatagattctaataacatctacctataacataccaaaaaacgcaggccagctgatcttgat

SEQ ID NO: 34516 - DNA, 396 bp, Gossypium hirsutum
  Clone ID: LIB3145-055-Q1-K1-F1
aagacggagcagcttcaggatttggatgatcccttgcctccagcacatcgctactttttccatgctgatccaaggatccaaaacttagtccgtagtcggttacccttcttctcccccttgagcatggttgacaatggaggacatcaacaacctactgtctcaattatggattttaagaatcaattcaacaaaggagaatcatctaaacagagaggatctcggaaaggcagtggcaagaattgctcaataagtagaagcagcaaatcaaagaagccaaatgctgaaaatggtgctttcgaaggatgggtaaatccaaaaaccagtggagctgttccgaagaatgctgggaagagaagagttcatgctagcggtcaacctgctggccactggtataca

SEQ ID NO: 34517 - DNA, 387 bp, Gossypium hirsutum
  unsure (1)..(387): unsure at all n locations
  Clone ID: LIB3145-055-Q1-K1-F10
cttgtaaaattatttgttgggctgttatattttatttgtttatgggcccgggcaatattgggcttgtacatgaagtaaaaggtttaactgagcatgagcgctatctcgcattgagcaaaattccaaatcatccaacgcaaatgctcattttctttagtttacctttttctgtgcgattggaatggatcagaagatttcttgctgaccattaaaaatcatggttgtgttgatgatattttcgtaaccttttgtgtttgtaatttttggatgctataatgacatgatagaatgtcattacaatgttgtaattttttgaagttgtaaaattttataatatatagattatgatatataaactaataaaatcatgtaactttttgttnttna

SEQ ID NO: 34518 - DNA, 426 bp, Gossypium hirsutum
  Clone ID: LIB3145-055-Q1-K1-F11
caaacactacattacaactatcatcaatgggtctgatgtggagcctactttctcagctggtgccgtgtgcagaacttcgcacggaggatacagcgtgctcgctgttaaatgatgtgcgggatcaagttgaacgaaccacggatgctaatgttgtttaccgtactgctactggtctgagtgcacgggttcactcgatggctactggaaaatctagtgttgtcggtgctggtgccacttttcgaccggcttctagcagcactaatgttggcatgaaaggtgctcagaatgatggtcatgctgatgtaagaagccgctcatctctaactacatggtcttgcattggtcctcgtcgacagaatgtagttttgggatcgaatgctgaaggcgatgatatgaccgaaccttcattaaaatctaaaacaagtt

SEQ ID NO: 34519 - DNA, 299 bp, Gossypium hirsutum
  Clone ID: LIB3145-055-Q1-K1-F12
cccacgcgtccgattatcattgagatggatgttgttgttgttggcctgtcatgcttatttaggataattttacttcggtataaataaaaataatgaatagtgtgcgaaaaataaaaaaaataaaaaaaaaaaaaaacaacagatgttaattttatttaaaaaaccatataaatgtgcgaatgaactggatcatcaagatggcttgctgaccatataaaataatctatgttgtcatcattttccaataaaattttttaattggcaaatcttgtattcaatggtgactctgaaagaatgtc

SEQ ID NO: 34520 - DNA, 357 bp, Gossypium hirsutum
  unsure (1)..(357): unsure at all n locations
  Clone ID: LIB3145-055-Q1-K1-F6
cccacgcgtccgttttttttctcagcaaccaaacaagctaagaaatctgaaaagaaagtgaaaaagatataaccttgaattgaaactagtgtttggcttttgagtcaaagcagtcaaatgaaattactcaaattcaccctgnggcacgtcatataacacccattactctgttttttaccttcaacctagatctcgcatgtgtttttcccttggggttagccgctttgctcatttaagtagtgtttaattgttaacaaagacctccatggcagcaacaaagaagctttcatctcttttccctttgttgtctctcatttgcttcatctctttctttcttcttctctctatttccagaaa

SEQ ID NO: 34521 - DNA, 224 bp, Gossypium hirsutum
  Clone ID: LIB3145-055-Q1-K1-G4
gcggataaatgttgttcttcttgatgttccgtgtttttgtcttcctggtggaaacgttctaccatggtctgaggttccagaaatggggtgaagtgcagatatccctcaaattctacatatcccacaaatcccacaaattccactattcccacagatcccacaagtcccacagaatcccacatgttccaaatattccacttatgcctggacagtcgtggatgtga

SEQ ID NO: 34522 - DNA, 338 bp, Gossypium hirsutum
  Clone ID: LIB3145-055-Q1-K1-H10
ctcacgcgtacaccaccatagcatttacatggggccactcactatggttccgctgcggatctatcgaaggcagggtgcatactcgctgatatatatgctggctagcctatcatgccaggacgaactgaggaggagcatttgcataaaatttgcaagactatgtggctggccttatgaagactattggagtaaattaaagatgcttaatgcacacattttgacacctactcgtccttgtaaacgctgagcctgtgaaacattgatggaattctctgaccagctctagctacaatggagaccttactttgcatggaccctgctgtgcgaggatctgcagc

SEQ ID NO: 34523 - DNA, 289 bp, Gossypium hirsutum
  Clone ID: LIB3145-055-Q1-K1-H5
gttatgtgtgtgtgcaattagccttaatcattttcctttttctttaaaactcattcgtatataatatctgactaaacgtgcgctgaataccatggctactgcacaggtattggattcttattaagttctcgatttgagcttgctttgattcatcaatctctgtgtgttgattacttgatgttagcattgcacctagcttataccatttggcatgcgatctttggtttatagatggagctgattataacagtgaagatgatgatcatatctatctgtcataatctgcaca

SEQ ID NO: 34524 - DNA, 320 bp, Gossypium hirsutum
  Clone ID: LIB3145-056-Q1-K1-A7
tcgctggaacgggtctgacgtggcgtaacttctggtactgctcctgcggcgctgaggttccaaggaaaccctagggtttcctgctggtgttttaagtcattgggccttttggtcccgagtgacttgggtctgtaatagatgggtctgtttgtaagggttattgggtttgtacttttaacgggcttttaaaataaataattattcatttattcgttaaaaaaaaccactaggacgctcttcaaagaaggaaaaatcttaacttgctaaaattactagagatagcgcaaatataactgtggtgcaaagttcatggtttaatg

SEQ ID NO: 34525 - DNA, 176 bp, Gossypium hirsutum
  Clone ID: LIB3145-056-Q1-K1-B10
ataatcccgttggaatacttatgagtttacgaagatgggaacgtgtaggcgattttcgtagagtggttagggctacgcgtcagattcatgcaaaggagggcctaccttcctttcctatgggaaaaattgatcagacacagatgtagaaagttggagcacgtgtcctgtcaacttta

SEQ ID NO: 34526 - DNA, 377 bp, Gossypium hirsutum
  unsure (1)..(377): unsure at all n locations
  Clone ID: LIB3145-056-Q1-K1-B6
cccacgcgtccgagaagaggatctaaaagctgaggatttctatttattaaaagacaaaacagaaacgcagaaaatcaactgccaaccaataaaataaaagcctttaaaaaatcgaagaaaaaacaagaatggaagaaattcaaaaaaataaaaaaataaaaatctttgcttggatttagagataatggagatcgganaaaaaaaaaaaaaaaaaaaaaaaaaaaaaaaaaaaaaaaaaaaaaaaaaaaaaaaaaaaaaaaaaaaaaaaaaaaaaaaaaaaaaaaaaaaaaaaaaaaaaaaaaaaaaangggggggggccgttttaaaggatccaagtttacgtacgcgtgcttgcaacgtaataacttttttatagg

SEQ ID NO: 34527 - DNA, 304 bp, Gossypium hirsutum
  Clone ID: LIB3145-056-Q1-K1-B8
agattctacgatgaaataaaatcaaccggaattatgcctagtgagaccatattggagaatttactggaggggttttgtagacgccggagattcaatcaagttaaagagttcatcaaatcttgtctagaagtttggcaggaaattagtgtcaagatggctgaggaggttgtaggtttatatttggaacatggaaaagtagaagaaatggaggagctactttcaactgtagtggagtcaggtcaggctgtcacacttttctcacaggtgaactccgggatcataaggatgtatgccgcgttaaatc

SEQ ID NO: 34528 - DNA, 332 bp, Gossypium hirsutum
  unsure (1)..(332): unsure at all n locations
  Clone ID: LIB3145-056-Q1-K1-C5
ataaaatcccaagagaaacgccatattgtaaatgcaatctttgacggcaactgtagattccatagtttcttgtaaaaatctttagtttcggtctgtaataaatagcttctaggatctagattaannnaaaaaaaaaaaaaaaaaaaaaaaaaaaaaaaaaaaaaaaaaaaaaaaaaaaaaaaaaaaaaaaaaaaaaaaaaaaaaaaaaaataaaaaaaaaaaaaaaaaaaaatataaaaaaaaaaaaaaaaaaataaaaaaaatgggggcggcccttttaaaggaacaaattttacttccccgggtttgcaaattataagtttttttttagg

SEQ ID NO: 34529 - DNA, 235 bp, Gossypium hirsutum
  Clone ID: LIB3145-056-Q1-K1-D10
ttaagctgcttgaaaagaatatggtattttgaaggaaaacataccgacaggcagtatgcatggtccagtcacgggaataaatgtgacgccccataggaggccgtgcaaattatgagatgcttacatggtctgtgaaaacttcggccatattagaagaacgacgaacatccggagatcatggcgtgacataccacgagtgttgactgcaatcctcttgctcaaagttacattttat

SEQ ID NO: 34530 - DNA, 176 bp, Gossypium hirsutum
  Clone ID: LIB3145-056-Q1-K1-D11
aaaacaaatgtgcaatgtttgaaggacaaacaaaccgacggggcagggggcaaggacacagggacggggcgacaaaatgaaccccccacaaagaaagccatgccagatagagaacaaactgacatgggccgtgaaaactacggaaagaaaagacgaacgacgaacagccggagaac

SEQ ID NO: 34531 - DNA, 397 bp, Gossypium hirsutum
  Clone ID: LIB3145-056-Q1-K1-D7
agtactggttcactacctacgttctaaccgctgtagaacttggcaaagcacatggggagatcagaagtctgtaagaagaattgccgagaaatcgaagtgaactcgaatccgaaagttctttaattgatgaattaaatgcaagggtgagttctttagtggttgaaagagataattctatgcgggagttcgtttctcttcaagaggagtacaacgattcgaaactgttgtctgaaaataaagcagtggctgatgctgagcttttgggggaaagagaaaatgaaatccggctgctaaaggaaaaactcgagcttgctctgaacgatgcgagtgaaaataaaacaattgctgctgatttgaacaaggaaaaggaaagcctggagcgagcactggagatgga

SEQ ID NO: 34532 - DNA, 245 bp, Gossypium hirsutum
  Clone ID: LIB3145-056-Q1-K1-D9
ctaatgagtgccttgaaagaaatggtggttgttggcaggataaacatgccaacataacagcatgcaaggacacattcaggggaagagtatgtgaatgccccattgtgaagggcgtgcagtatagaggagatggttacatatcttgtgaagccttcgggcctgcgagatgtacgattaacaacggaggttgctggtctgacacaaaagatggattaactttctcggcttgctcaaaaaagcaatta

SEQ ID NO: 34533 - DNA, 354 bp, Gossypium hirsutum
  Clone ID: LIB3145-056-Q1-K1-E10
gattgaccataatccacaacaaattagatgacattattctatatttcctcgactgaatgctcagtaccggaagatttggttactgtcttcttcggagttgtgacatctgggacaaagagctgctattaccattttttattcttgagattagttaaagtagtaatataattccaagaaattctccaaattgttaatttaatttttgaagggagatgtatattccataatttcctacggacataaatgacacatataaatcaaggagcaatggaagagaagaggttattcctagtgcagcacaacatcggggctccgatgtgctattgccaccggggatgaatcctcggtttgagt

SEQ ID NO: 34534 - DNA, 409 bp, Gossypium hirsutum
  Clone ID: LIB3145-056-Q1-K1-E12
cccacgcgtccgtccacgcgtcttgtccaatacttttccttatgcagggtttcgaggcatatgttggagtactactgctcaagacagcatttttttgggttgttcctgaatggcagataatttttgtggcatacttttggttgttatggctgttgggaactttataaacacggtacagacactcgttgccaagtcaaggtttaaggcaaagatgaaaaaaacaaatggcaagcaagagttgtagagggggtgtttgtaattgttagctcaatcctaacatagcgtttatgatctcattttgtttctaatgttttgcggtgtcttgaacatgtttgtttaaatgaggcaatggccagttcacctttgtaaatggaaacgggcaatgcctagaactctcacttaaatttgc

SEQ ID NO: 34535 - DNA, 402 bp, Gossypium hirsutum
  Clone ID: LIB3145-056-Q1-K1-E2
ctaaattaataaaaagtaagaaataattaaacaaaattaagataattgaaaaaatatattaaaaaattgaggttgcgttagaaaaggagcaaagtcagtaaattttttaaaagggggaatagtggcgtgaactgtgaagaagtcctttttgttaaaaaattaaaatgacagagccaaagacttttttttttctttcatcgtcttcatcccttcagtctttaccaccagaacactcatttcaccattttggattgctggcgatccttgattgggatcgaacgatccaaaatggaaattgcacgagagttggggatttaggtaacttatgactggtcatggtgatataatgctccaagtagtacattatataatttggaaaaaattgaacatacctaatttgag

SEQ ID NO: 34536 - DNA, 336 bp, Gossypium hirsutum
  Clone ID: LIB3145-056-Q1-K1-E3
cccacgcgtccgaaaaaaaaaaaaaaaaaaattttaaaaatttaaaaaaaaaaaaaaaaaaggaaaaggcaaccaaaattgagagcaaagcgttagagagagaacaaaacaggaaaggagagcgatattttttctttggctaaaaaaaaaaaaggatccgagaatggcgagcgggtgggtcaaatctttgcaatgcaaatcgagagcatatgaagatgtttatcaccccagccctaagtatttgatccctagtaccagttgtacacgaagttctcaaagcatcaaggatgtcatccaaacggccaagaaaaaacccaagaaatcgggcaccaaacc

SEQ ID NO: 34537 - DNA, 311 bp, Gossypium hirsutum
  Clone ID: LIB3145-056-Q1-K1-E7
gccacacgaccgcagtatagtttttgcatgtttgaacgctgattatgaatcagggaactcagttaagttcaatgagattctaacaatcttagcagccaaaattggcgcaaaagctgacggcaaaacggattcgagcaagccattaatggatgctgggaaagaaacatgtgcctctgaaactccatcaacagttgtgattgctaaaaggacatatttattatcaaaagtcatcttcgaaggtccatgcatggctgctattgagatttatgcttagagcactatacaagcttcggctgatcctagtgctttca

SEQ ID NO: 34538 - DNA, 359 bp, Gossypium hirsutum
  Clone ID: LIB3145-056-Q1-K1-F11
aataactattctgaggtggtgttttctgaatttttggggtataaacgccaccggggacgggacaggtccatgctggtgccgaattgctttttcaagatggaatgctccactgtgcttttgtcttaaccgccgtcgtgactaccgccgttctaagtatttgcttgaacaccttgtacagacccataaatagtccgatgtccggagatgcatgtcaatctaccataaaaaaaattaacaatgtttcaaatgtcttaaaatcaacaaagacctaatggaaatcggcggcatcgtccgtaaaacctacattacaacatttggggcgctctctctctcattcttctaacaactattttattttt

SEQ ID NO: 34539 - DNA, 188 bp, Gossypium hirsutum
  unsure (1)..(188): unsure at all n locations
  Clone ID: LIB3145-056-Q1-K1-F4
gctttcgataactatgcttgcagcatgtttttggtattttgggaataattgntacccaggactggacatgtccatgctgtgttgctggtatatcatatgtaaccactccaatagtttggcttcagcataccgaggagaggaactaccgacgtgctaattatcgcataaaacacactgtacggacgcat

SEQ ID NO: 34540 - DNA, 172 bp, Gossypium hirsutum
  Clone ID: LIB3145-056-Q1-K1-F7
gccgaaagagaatggaaaaaggtttctgggatctggtgaagaccagaaaaagcgagagaactgacaatcaaccaattatccaattaccgcataccaattccttggttggtagcgcccaaagggatgcatttccttcagctaaaaaagctgaggctcctagaaggcgtgctga

SEQ ID NO: 34541 - DNA, 247 bp, Gossypium hirsutum
  unsure (1)..(247): unsure at all n locations
  Clone ID: LIB3145-056-Q1-K1-F8
tcgnccacacgatctgatngaagtgtttcatgagtttaggggcagaaagaaaaacgggagtattcgaaatgatatgcgacccccgcatcctcaaagcaagcataggataataatcgacaacaaaaagatgctatcaaagcattaatgctctctatcaaagctggaggtgtcagaattaacctaaacagctgcaagcacaggtatgtctgaagagtagcaacggacgccacgtgacctgattcaagca

SEQ ID NO: 34542 - DNA, 348 bp, Gossypium hirsutum
  Clone ID: LIB3145-056-Q1-K1-G5
cgttgatattgtcacctacgatagaactggcgtcttaaacatagaaggcgagtaggacaatgggcgacttgatgaatatacacgcacacgcgtgtatcggaagcaaaagtgcgcgtgaagatataacaaagctagaaaacggagtgcatgtaatgtcggcaactcctggtcgagtctgtgatatgatcaagaggagaaccctacttgcaagagctcttaaactattgattctagatgaatctgatgagatgttaagcagagggttcaaagatcatattgacgatgttgacagacatcttacacccgagcttcatgtttgtgtgatatctgctacacttactcatgaaa

SEQ ID NO: 34543 - DNA, 413 bp, Gossypium hirsutum
  Clone ID: LIB3145-056-Q1-K1-G9
ggctagggctgacactaggaaacgtgtgaaaggcagatttgtgaaagcaggcgaagaatatgattatgatcctctcgttgcacggaacttctaaggcgaattatggaatcatgcccctgatcatgaaggtaagagatttaataagatgataattagtccatctaaaaatgtttgtaaataatgttattcataatggcatgataagcattgaaccgagactctagcctattttcagtaaagaaagaaaaggtctacaatggatcaattgataaaataaagagcttattgtagaatactagattgaagaaattaagaaatcagtaacattagagcgaagaaaatataaagaaacactgaaaatttagtcatcttcagattagcctacttttttttggtttatagggaaagtccaa

SEQ ID NO: 34544 - DNA, 445 bp, Gossypium hirsutum
  Clone ID: LIB3145-056-Q1-K1-H1
gattcttcctcacgtcgataactttgcacatatcggtggcttcttgaccggctttctccttgggtttgttttactgcttcgtccccaattcgggtgggttcaatgtcagcatgttcctgctggtgcacctgttaaatctaagcacaaggcataccagtatgttttctaggtgattgcagtggtcttggtcataattggattcacaatgggattggtgatgctgtttagaggagaaaatggaaatgaccattgcagctggtgccattacctgagctgcgttcctatatcaagttggcactgtggaaaataataatgaaaccattaccattactactataaaccccagtcttcatcttgtcacactccattctttcacaatttttattcggttattaatttcttccgcttgatatttgcctatgtatatgctttaagattatatttg

SEQ ID NO: 34545 - DNA, 357 bp, Gossypium hirsutum
  Clone ID: LIB3145-056-Q1-K1-H3
gtaaagagtcacaaagaagccgctcaattcagacaccgtactttcccttactacgaccagctgactccatatacgtaagagatcgagcgactgggaaagatgctcaaacagctgctgatgttcaataaataaatgctgacgatatacctactacagatatgaatgaagagagaaacacattctatgactgcgaagctgacgtctctttggacgacagggatgtttttggtccggagcggcgaggagatagagaccaaaggggttcctcatcttcgaacaagagaaagaagaaatctgatgctcgtgataatatgtattcttcatttgatgaagctgccactttattggccgaaaaca

SEQ ID NO: 34546 - DNA, 172 bp, Gossypium hirsutum
  Clone ID: LIB3145-056-Q1-K1-H6
gaaaacattgaaccaaggaaccgcaaggggttctgctattggatttaagttggacagtcttctaaagctcacagatacacgtgcttcaacaagcaagatgacgctgatgcattatctttgcaaggtcctagctgccaaggcaccagcacttctagattttcacctggaattt

SEQ ID NO: 34547 - DNA, 338 bp, Gossypium hirsutum
  Clone ID: LIB3145-056-Q1-K1-H9
cccacgcgtacggttataattttttttgcatcttacctctgctctccatccacttgtaggttgactctggatcggggtactttagatcctaatgacagagtaactgaacttaaatttgagcagcgagatggattaaaacatagcatgcggaagaggaaatgatgcattcttttgggtacagataaaatgcgttgctaacgattgccgtgactattctagcgctaatgtgcgccatcacatctgtatcggacaacttaaacactccctcttgctctgcatagatcaagattatgaacattaattggttccagaagcaagcacaggggcatgatgagggc

SEQ ID NO: 34548 - DNA, 396 bp, Gossypium hirsutum
  Clone ID: LIB3145-057-Q1-K1-A11
cccacgcgtccgcaaaagttttgctagagggatggatcgctagggatggtatccattgtggttgttgtagtaaaatcctcacagtttcaaaatttgagattcatgctggaagcaaattgcgccagccatttcagaatatatacttggactctggtgtttctctccttcagtgccaagtagatgcctggaacagacaagaggagtctgagcagattggtttccattctgttgacgttgatggtgatgaccccaatgatgatacttgtggcatttgtggagatggtggggatctaatctgttgcgacagttgcccctcaacatttcatcagagctgcttaaatatagagtttttaccagcgggtgattggcactgtccaaattgcacatgcaaatttt

SEQ ID NO: 34549 - DNA, 180 bp, Gossypium hirsutum
  Clone ID: LIB3145-057-Q1-K1-A2
atttgaagtgattgttggtatcttgataggggagtgtatattaagagaaaaagagttggaattgttgcttttgatgcataagaatttgattttggatcatttatgaaggggatgtgtgaattatgataaaaattttatgggtttgctgtgattgtggaagaacaaaggatagtttatgtt

SEQ ID NO: 34550 - DNA, 223 bp, Gossypium hirsutum
  unsure (1)..(223): unsure at all n locations
  Clone ID: LIB3145-057-Q1-K1-A3
tgatgggtgggatacttgatacattttgtttgtcataaacagaaaaagagatcatagttggcgctttttatgcatgaggaatgtggctttaagctcatccaccaacgccttganacgaagcatcataccatggtcatgctatatttgcgatcaatgatgaacacactgtcggataacccacccaaagcgtctgtaatgatagcatggaatttgatcattagac

SEQ ID NO: 34551 - DNA, 284 bp, Gossypium hirsutum
  Clone ID: LIB3145-057-Q1-K1-B1
agccgtcggcccacgcgtccgggttggtgcatttgaaaccgtcatctccctccaagacggcaaaccttcatcaaacaccgtcacttgagttgtgaagaacatctctaataacagtacgtttcagggaagaggggtggagaaaaacctaactttgagagttactcgaatacacactttgagttgaagagatttcatgttgactcaactctagcttgatcacggaattcgggtctgactgcatcttaatacagctgcaagggtctttttttttcgagttctacaat

SEQ ID NO: 34552 - DNA, 415 bp, Gossypium hirsutum
  Clone ID: LIB3145-057-Q1-K1-B4
cccacgcgtccgcccacgcgtccgcccacgcgttcgtccacgcgtgcgtgatactcaaaattttgaaaagtttgacgagtccgacgatcagtgtcctatgccatcaaaatctggtccatggagaaaaatgctttcatccaaggacgtaaattttgtgggatacacatacaaaaactttgaaattgtcaatgattttcacgtgcctggaatggccgagttgaagaagaagagctccaaatcaagtacgccgtcagttaagacactttttgacagtggggcagaggcatctgatgcttcagactcaacacctggtgcacagcctgttcaagggagctttttgaatctcttgcctccagaactggaagccactgtaaagcagtgtggatcccagtaactcaccccatctcttagaact

SEQ ID NO: 34553 - DNA, 310 bp, Gossypium hirsutum
  Clone ID: LIB3145-057-Q1-K1-B5
ttaagattcacgcccaacataagcattacaccataccatgcaaatgttaaggagtctcgctttaatgttgatttctataaagagtttgatgttgttctgaatggacttgataacttagatgcaaggcgccatgtaaaccgtctttgcttggcagctgatgtcccactggttgaaagtgggaccacagggttcttgggacaggttactgtacatttgaaggggaatagaaatttagcattgtctacgacgaaaattaaaacactttttgacaattgggcaaaagacatctgatgcttaaaactaaacacct

SEQ ID NO: 34554 - DNA, 368 bp, Gossypium hirsutum
  Clone ID: LIB3145-057-Q1-K1-B7
gaacggtctgagtcttgatggaaggaattttttcgtcaacgaagcacaatctcaccgaagcggtgacggctgtggtggtggaggattttgaggaaacggctggtacaaccgtctatgccgtggatattgtgttcgccgtaaacgtggatatggaagtggttgttaccgatgtggacaccgggatggtcgtggatacggataccgtggatcttcttactcaggttgcggccgctcttgggctcatgttaacgcagtttatgatttgagtgagcttcaggtcttattttatggtttaaggggtttgtttgctagtgtggggtttctatccaaatgatatgttgcatcattcggagtcttaaaacatctaa

SEQ ID NO: 34555 - DNA, 352 bp, Gossypium hirsutum
  unsure (1)..(352): unsure at all n locations
  Clone ID: LIB3145-057-Q1-K1-C1
cttcggttgggaaaaaaaatcggagttggcatgggccaaagatcctgtgatacaagcagcgtttgaaaaatttaatgggaggttaatggagcttgaaaggattattgatgagaggaatgcaaacaaggatntgaggaacagaaatggtgctgggattgtgccatatgagtttttgaagccgctctctgagcctggggtcactgggaagggagttccatatagcatctccatctgagcttaatatctcaaattgttctgttatgggatgctcgaatgccttcggggtatggtatggacatgtgtctacttgaaataaaattgacctctttaaaataaaaataaaattgagagc

SEQ ID NO: 34556 - DNA, 377 bp, Gossypium hirsutum
  Clone ID: LIB3145-057-Q1-K1-C10
acactattcactctcgcccaaacaggttttttttcaatgaatggccgtctaaaataaagctggggatctgcatcactatgagaggaatgaaagatatctccctactccaaataacataccctaaactcagaaaccacgtttacttacttcgcctatattgctccttttaacaccctaatatatatggcttatatggcgaaacgggtatgaataactgatgcgatgtcttttttgctagaacataaaccctatctgtaacgcgacctctacaacaccatattcagcttttacttttgagactacggtcacatagcaggggcatggaccttacttgacttaccacgactcgtatctacctattactagtggatctggca

SEQ ID NO: 34557 - DNA, 305 bp, Gossypium hirsutum
  Clone ID: LIB3145-057-Q1-K1-C2
cggacgcgtgggattatttgttgcttttttctgtaaaagagaattttaatctctcatcatgtgtaagaaatttgtaatacgtatcttcctaatatcaaaggcaatatttattatgtgcaaaaaaaaaaaaaacaaaaaaaaaaaaaaaaaaaaaaaaaaaaaaaaaaaaaaaaaaaaaaaataaacacgggcggcactgctaaaaagagccccatatacgcgcccccgtctgcgcctaaaaatctcctattgttgctgtaccgagatgctctaaagcgtccggggttttacatcgacaagtctgg

SEQ ID NO: 34558 - DNA, 406 bp, Gossypium hirsutum
  Clone ID: LIB3145-057-Q1-K1-C4
cccacgcgtccgcccacgcgtccggagacagtccaatataccttcctggattacctagctgcgggttttgaacttaactttatggttgctattgatttcactgcttcaaacggaaatccccggctccctgattccttgcattacattgatccatcaggacggctgaatgcataccagaaagcaatctatgaggtaggagaggtattgcagttttatgatgcagacaagcgctttccagcttggggattcggagcacggcccattgatggtccagtttctcactgtttcaacttgaatggaagcagtaactactgtgaggttgaaagaattcgaggaattatgatggcctacaccagtgccctttttaacgtgtctcttgcagggccaacactgtttgggcatgtga

SEQ ID NO: 34559 - DNA, 223 bp, Gossypium hirsutum
  unsure (1)..(223): unsure at all n locations
  Clone ID: LIB3145-057-Q1-K1-C6
cccacgcgtccggaaatgctgcttaagacgttttctttaaccactcagggcagnctgttccagcctgtggcacgtaactgttgaagtgatgctgacatatctgtggtgctgataggaatttacgacatggagaatgcgtcactatcatttggctgatgaactacatgacaaaaggaaagaacgatcattatgtccattcatgaagtggagctttataaaacaa

SEQ ID NO: 34560 - DNA, 323 bp, Gossypium hirsutum
  Clone ID: LIB3145-057-Q1-K1-D10
tcattctatcgagtttctagtgcagatttttctgtgagaggcgaaagatggtgtccacatctgtattgtacacgtatacactgtccagctacaccttcggttccaaacagccaaggatggaaaatgactcgtgcgatgcctaccgccttgcttgcatgaaaactaattgtctgaaagagggcttgtgaacgagcgttgcagcgatgatactggtccatgaacataattatcctcacattcttcttctgcatattgggaacaaattctgtatacttgctggtggacgcccgaagcctgtataaaatgagattgatggtctgaag

SEQ ID NO: 34561 - DNA, 391 bp, Gossypium hirsutum
  unsure (1)..(391): unsure at all n locations
  Clone ID: LIB3145-057-Q1-K1-D12
ccgtccgcaacatacgttctggtttgcatcggagtgcctcttactaatgctcgttcttctatctctagttcattcccatagacataggtgctcgtcgtccgatacctatgtgtggannactaagcttcagatacctcgaacctgggccttgaccaagtacanagaagtgtcccacactaaagcggnntcaggtaaaagggatgtgactagtgcgtggaaccctgcaagaggatnatatttaaatgccacaaaagaagaaattgctatgcagcgatgactagcagctctttgttggtactttttataggacattaaagggaaacaacatgaaaagcangaccaattctcatgtgtctcagcnncacgtgaaagcggatccctacttcattga

SEQ ID NO: 34562 - DNA, 410 bp, Gossypium hirsutum
  Clone ID: LIB3145-057-Q1-K1-D3
cccacgcgtccgttttttataacgaaaatctttacatggaaaatgaatacaataacaatgtggtcgacaacttgatgagaagctcatcgtacaactatggattcagtcggcgtgccacttctccagaaatcataagcttggaaccccattcttttcgaagtgtcaaaatatcagctgatgattttgagttcaattccccttcatctcctgcctcttcactttgtcatgaaccagtcagtgtcccaagtgattcaatgcaccaaaaagaagatgatgaagatgaagatgaagacgaggaagaagttatgagttcttatgtcattgagatcaactctgatgttagagagagtaatggtgaagcagtttcaattgatgaagcgattgcttgggcaaaggaaagatacaattca

SEQ ID NO: 34563 - DNA, 411 bp, Gossypium hirsutum
  Clone ID: LIB3145-057-Q1-K1-D4
gttaaaacaagagcaagatgatgatgatggtgatcatgatgatgatgatgatgatcatgatcatgagcacgaatctacgacatgtggagatggcatggctcacgaagtacatgaaacaagcttccacaacgcaccagaaagcatgacaaggctggttacccatcttattatggaggcagagactgaacaaaactgctacggtgatggagaagccagctcttatatggttacgcagaagctggaatcatggaaagaggtggaatcaaacaccatatacatgatggcgggacaagatttgagaagatcagatgttgatgaggtggacagaattgtattgcagattcaagagaccgcattagaactcgaagacgctatcttcggactactgatggaagaaatgtcggaagaact

SEQ ID NO: 34564 - DNA, 235 bp, Gossypium hirsutum
  Clone ID: LIB3145-057-Q1-K1-D8
attagcctatattaaaaattgaatcattattattctactaaaaaaaaaaaaaaaaaaaaaagggaaaaaaaaaaaaaaaggggggaaaaaaaaaaaaaaaggggggacggtatggggggaccgggcttacgttcccgtgtttgcgccctcctatctcttgtttggggggccttattttttctttattggcccttgttttgcaccgtcgtgtctgggatttaccctggggttaccc

SEQ ID NO: 34565 - DNA, 389 bp, Gossypium hirsutum
  unsure (1)..(389): unsure at all n locations
  Clone ID: LIB3145-057-Q1-K1-D9
cccacgcgtccgtaattattgtgcagccattagagtggcatcctcagttgcaagtccacatccacatcctgggtccagagaccgtaatgtgaagcttcggattaaatccttcaaggttccagaacttcttgttgagattcctacaaccgccactgttggttcactgaaagtcatttcaagaaataatgtatgaccatatcagagatgaagcggcttcttattcttcaatttcatagatatgaagtcaagcatattggttcctatctgtatattgctgataattaatgtccagtggttattatagaggtcagtcatggaagcagtgactactgtacttggagatggcttacatgtcggcatccttcttaaggaaaagaagntagagatga

SEQ ID NO: 34566 - DNA, 228 bp, Gossypium hirsutum
  Clone ID: LIB3145-057-Q1-K1-E6
cccacgcgttcggaagaagtttatggaacatgatttttgggagaacacttcacaaatatctactgttgacttttatcaagcacagaccgtctctacagggttaggtttgtcacttgactatgacaataattatcaaacgggcttttcgggtgattcggctatgttgaccctcattggtgatgacatagataatgagctgcgacgaaacgacgctgacattgatcggtt

SEQ ID NO: 34567 - DNA, 408 bp, Gossypium hirsutum
  Clone ID: LIB3145-057-Q1-K1-F11
gaataatttcagagagaattccaaggctcaaaaggttctaaatgaagcttctatctcccatttgtaatctcaccaaagaaagtcacaaaagagaattgaaagttgcaagattctaggtaagcagctgtttacttgctcatgaagctcggagttcatcgtttctgaagatcagaaggttcatccgtagctttcccatctctttctagatttgtggagttatgcttcgcattttcgaccaaacgttgtccgtgacttcgcaacgagaagaaagcccttgtcctaatgacgcatgacgacgtgcacttcaaagaatttcagcttataaataggccttagttactttaggtttaacataacagaaatatttagattgagcgatgtgcacttcaaggaatttcagcttataat

SEQ ID NO: 34568 - DNA, 253 bp, Gossypium hirsutum
  Clone ID: LIB3145-057-Q1-K1-F12
ccggaacggaaggcccgggccgaccgacccgtcacgccttcgataccaatgtatagaaggctttattatggtgcatgtcatagataaaatatgcattgctgtggggtcatttatagctgcctcaggaaacttgatgtatggaggaagaaaatctttcatgctccgaccacttcctaacgaatcgaaacgaagaacgaaaaaccttcacgagggcggatctggtaccgccctttgtttgaactgcttgctttat

SEQ ID NO: 34569 - DNA, 155 bp, Gossypium hirsutum
  Clone ID: LIB3145-057-Q1-K1-F2
ttacgtgcgcgagcatgcaacaacatagctcttctataatgccacatgaacacaaatgacagagcggcaaccaacaacgatccgactgggaaaaccgtagcggtacccaacacaatggtgttgctacacaaaagcacagcggcaagtgatgatat

SEQ ID NO: 34570 - DNA, 419 bp, Gossypium hirsutum
  Clone ID: LIB3145-057-Q1-K1-F4
gcaatttgcagatacccaatataagttcttctcaactagatatggacaacaagtgattgacattttggagttcccaatcaaagtagtgctctctccgttcactcttgcctttgacattgctgggtccgctcctcgtgggtttggcatccccgagtttatctccaagctttctcatacttctatctttgctattgctgctttgggaacctatgatattgctttagagctaggaaagaaggtgatatgtcaaaggaactgtcgtacttgcaatggatggcaagctttgcggtgtaccatgtgcaaaggatcagggaaagtgcactatcaagtcaaaactcattccttgagaagtggggagaaggcaaccgcagaatgtgttgcagatgctattgctgataatcgagcagagttagtgcacc

SEQ ID NO: 34571 - DNA, 356 bp, Gossypium hirsutum
  Clone ID: LIB3145-057-Q1-K1-F6
ggattctgcagatgccttctttaagtcacttttaggtatgagatcgactacccatgaaagcggggtgggcactgcccccagaagtcgccttctgtcaggtcactagtgcctgtgacattgatcattccaattctcggaatcccctcatcccactctttatgcacctgctgatgcataaaagtgaagctaatttccttgctgtgtgaacacatgagctggattcacatgcatgcaagagggggataccaggtgggaagctcattcttcaactttgaagagctatcatactcggtactatgctctaatgaggagctttagggcatgcactaaatcatactacttacctgtgatgctca

SEQ ID NO: 34572 - DNA, 162 bp, Gossypium hirsutum
  Clone ID: LIB3145-057-Q1-K1-G10
gcacttagtgtttcactaatgggaacttcctatgattcaagctcggacatctcagatcgtttggctgagaaaaaaaccaaaggtgcgttttgatttatgtggtccgggtgaggacaaatgtcccccctgcgacaaaattgttcaagattttggttacactca

SEQ ID NO: 34573 - DNA, 406 bp, Gossypium hirsutum
  Clone ID: LIB3145-057-Q1-K1-G3
gaaaaataatacatcttaatttttcattttctttgcgcgttccttctgttctgtcttcattttccttttgttctgctggctttcttctttttgtgtgtttgcaggtctatggaggaggtcaacggggcagaggcttcctttttggtgcaaaggacgggtagagccgtccctcgagcgatgtttgcactgagaacgcacatggctggcagaaggaaggcgcggcgctagggtttcggttggctgaacttggtttaagcatcggtcctatcgggcttaggtctttcttttaattgtgggcctattaggttgtaattttggcttgagttaattgggtttgatgtttgggttgatgtaatgggtttggattggccctttaatgggcttattatttgggttatttatggct

SEQ ID NO: 34574 - DNA, 331 bp, Gossypium hirsutum
  Clone ID: LIB3145-057-Q1-K1-H11
gaattccgggtcgcccaccccgtcggttaccaagacttttgacaagaacctcgcttcttgtttgttcaagttgctcctcaagtacaggccagaagacaaagcggtcaagaaggtacgtttcttgaaaaagaccaggccgaggctgaaggaaaagcccccgagtgttaaataccaattgtgtgtgaaatacgcggttaaccatgttactgtaccttatctagcacaacaagggtcaattggttgttattgctcatgatgtggatcccataaagatggttgtgtggcgtctcgctttgtgcctgaaaatggacggaccatatttgattgttaa

SEQ ID NO: 34575 - DNA, 296 bp, Gossypium hirsutum
  Clone ID: LIB3145-057-Q1-K1-H12
gcaaagctgcctattgtgttttcagtgactcagctgagaaaataaagttggaatgttcttcaattttaaggttaccagtttgcctgttgggaaataattaatatgcatgtatgtatccaatatacatatagatgtgctcccccttttttaataactattagattagattagattagattagattagatttgagaatcttttagttaacttcatttggaaaggggtataatgtaagatgtaaattacatcttttacatcttatgattgatctcggagttagattgtatttttttatt

SEQ ID NO: 34576 - DNA, 243 bp, Gossypium hirsutum
  Clone ID: LIB3145-057-Q1-K1-H5
gttcaacaaaaatttttgacaagaacctcgcttcaggtttgttcaagttgttcttaagtaccgggcaaaagacaaaacgggcaagaaggaacgttttttgaaaaaagcccaagccgaggctgaaggaaaagccccccaattttaaaaaaccattggtgggaaataccggcttaaccatggtacttaccttattgaacaaaacaagggttaattgggtggtattggtcatgaaggggatcccat

SEQ ID NO: 34577 - DNA, 237 bp, Gossypium hirsutum
  Clone ID: LIB3145-057-Q1-K1-H7
cggacgcgtgggctattacacaagccttgatgcttgtatacgaatcttctaacataacgggcgggtcttaattgttggggtaggatcacttttcttcggggaatctaaccatactaaacacaaaaatcaatgccaattatgttggatttggctcaccctccactaagctctaatgttattactgacaaaccctctgctgttgtaataacactagttgggtctgcctcgtcatttctt

SEQ ID NO: 34578 - DNA, 258 bp, Gossypium hirsutum
  Clone ID: LIB3145-058-Q1-K1-A2
taacttctaggacaatggaaatggcaaaagaatactgtcaggttgtagaacaggatgaaaagcatagaaatctttcatcaactttggaagagctttatgaatgggaaaagaaattatataaagaagtcaaggatgaagaaaggctacgggttatttatgagaagaagtgtaagagacttattatgttagataaccaaggagcagagtccagcaagattgatgcaacccgggcttcaataagaaagttgttgacaaaaa

SEQ ID NO: 34579 - DNA, 246 bp, Gossypium hirsutum
  unsure (1)..(246): unsure at all n locations
  Clone ID: LIB3145-058-Q1-K1-A7
gttttattttaggggttgttccaaaagtagtatagtttgttttattagtatgtgacctgaaaaatttaagtgtctatattctctatgttataaatgcaaatccatatgccatattccttggatttaaaatattgcaagagtatgcctgttggtttttcaaaaaaaaaaaaaaaaaaaaaaaaaaaaaaaaaaaaaaaaaaaaaaaaaaaaaaaannnaaaaaaaaaaaaaaaaaaaaaaataaaaa

SEQ ID NO: 34580 - DNA, 402 bp, Gossypium hirsutum
  Clone ID: LIB3145-058-Q1-K1-B10
gggaccgacagatctgtccggttctggaaggaaaatctctgagcacacggaataatcttggaacttaattgacccgacttggtaaaagctatgtgcattatgagcgcctctggttctgcgtctggcttgaaactcgtatgcagatttggagtttatattgaggcacatcgttggagtgaatgtacaaattgtgaatcatcgccgagcccccgtatttccgtagtcgtttattcacctaatggagagaaacacacgcacaaaaattgcactttgtttaatttccatttggttgaagttattaatgtttgattagtgttttagttattttggtttgtgtagaaggaaataagtgaaatgaaatgtaagtaaccatatttacagtttgattaatttcatatgctc

SEQ ID NO: 34581 - DNA, 202 bp, Gossypium hirsutum
  Clone ID: LIB3145-058-Q1-K1-B12
gtgattttccttctcagccttttcttaaaggatggagaggaacctatccgtggtttccctgctatgcatcattctgtctaaagcaaacatattgttctatgcagctgctgtggtaagccaacgcatctgaaagcgtaatcagaatcacaggcattcacctgagctggaacacaatcctgaaacgacccttggacccccaaaa

SEQ ID NO: 34582 - DNA, 301 bp, Gossypium hirsutum
  Clone ID: LIB3145-058-Q1-K1-C4
cacatggttgctatcttcttctgcatttcgacaccgagggcaggagatatctgaagccactctttttagtattaaattttttaaagtaggaataaagttccatgatagacgccaaatagtgatggcaatttttgatgggagatgtaaattccatagttttctatataaattttttgtttcggtctgtattaaataagcactaggacccatatttgcctcttgtaatagtttataggcacttctgactgaaaattcgctagaatgttctcctcagcagacttgaaaatcattatgttctttc

SEQ ID NO: 34583 - DNA, 391 bp, Gossypium hirsutum
  Clone ID: LIB3145-058-Q1-K1-D10
cccacgcgtccgcaaaaattcaatttcttgtgccactattactactactactactactcccttcccagggttcgataaggaaaaaaagggtagaaattggtgtaaaatgttggctttaagcgtgaattcaaaaaggcaaaggcgaccgaacgttaggttaggggaaattggatatgtgtctgctgcttttgcatgtgggttttctcagaaaactaaagaaaatctggttcacaaaacatggaaacctgattctctctactctcaacacaatgaacttgatactgttattgagttttcttctaagggaatttctccagatttcttcatatcggctgattcccaacacaacacagagaacaagaacccgaattcttcgaaaccaggtttcgat

SEQ ID NO: 34584 - DNA, 388 bp, Gossypium hirsutum
  Clone ID: LIB3145-058-Q1-K1-D3
cccacgcgtccgattcgatcaaatgattgaatcaggattagaaccagataatgcgacatatatgactcttatatctggctattgtaaaagaggatatttagcaagggctttaaatctttttgaggaaatgtataggaggggcatacagccagatatgcgtaccatttcaactgttgaccattgtatcttgaatgccaagagagttgtgagaaagtagccatactccacacaagacggtttatcttatcatgcattgaagtatcctgctaatatgtagcaggctgaggaaagctttctctctatgagtagaagctttatgtgcacttatgattcaatatgatgaattctcttgcatttactatgtagaatagccggaggatgtcaaaat

SEQ ID NO: 34585 - DNA, 305 bp, Gossypium hirsutum
  Clone ID: LIB3145-058-Q1-K1-E12
accgatgagggggctaaatatttctattggattccgacaaacgcagcaaaatggtgccgatagctgcatgcccatgtagcagataagagctctcagagaggccgcgagagcacagataaatagacgcagttgaaatctacttttgacgtggatacacagtacataattaaatgcggctatactatcatatactcccttggatcataacatcttataccatgcaaagcaacacaagctattcagaagtgttcaaacattgtattatccaatattctatatctttgcaattcaatagcattcatgta

SEQ ID NO: 34586 - DNA, 404 bp, Gossypium hirsutum
  unsure (1)..(404): unsure at all n locations
  Clone ID: LIB3145-058-Q1-K1-E5
cccacgcgtccgctgatcatcatgctgctgcaaacaaggctgatgttgaagttgaaacctcggttcaggttgacgcagttcagacaaacgaccagcctaaggatccaaaggatgcagcaggcagccgggaacttcaggaaactgaagcaactaaggcagttgagaaggtggtggtggacaccacaaacctagccaattttgttgggaaaccagttttccatgcagagcgcatctacgatcggactccagttggtgttgtgatgggtctagcatggactgccatgggtggttccaccttgtacatcgaaacaactcaggttgaacaaggtgaggggaaaggagcccttcatctcactggtcaactnggagatgtcatgaaagaaagtgcacaaattgctcacaca

SEQ ID NO: 34587 - DNA, 386 bp, Gossypium hirsutum
  Clone ID: LIB3145-058-Q1-K1-F12
cttaattattacatccaatattttattgttttttttattgtgaaggataaaatagtaattttatttttagtagcctacaaggagataagaaaatttgaacatcatctacccatattgccttagcacacatgaatgaagtaaaccttcacatatatgtatgtatgagaaaaaaaaagtaggtttgccatttcatgcacgaatgttcagtgggtatatctattgtttctgctgtatatacatacaaaggtacgtacgtacatacatacatatatacatatgtgtctttaatttgtttttcgcttcttttggtcaagttggatatagtgaaatcgcatataaatctcgaaaatgaaggcttttgattcccatgtgaagtgaaatgtata

SEQ ID NO: 34588 - DNA, 300 bp, Gossypium hirsutum
  Clone ID: LIB3145-058-Q1-K1-F3
cccacgcgtccggaaaaaaaaaatgggaaggagtccttgttgttcgaaggaaggccttaacagaggagcttggactgctcttgaagacaaatttcttacagattatatcaaagtacacggtgaaggtcgttggagaaatctccccaaaagagctgggcttaagagatgtgggaaaagttgtaggcttcggtggttgaattatttgagacctgatattaaaagaggtaacatatctcctgacgaggaagagcttatcatcaaactccacaaactcttgggaaacagatggtctttgatagc

SEQ ID NO: 34589 - DNA, 323 bp, Gossypium hirsutum
  unsure (1)..(323): unsure at all n locations
  Clone ID: LIB3145-058-Q1-K1-G2
cccacgcgtccgcccacgcgtccggggagtctcaaatatgaaaatatggttaatttgtttggctttaatcgacatagtggtgatggaagaggtgatccaaattgatgctgctatgacaactcaccacccagaggtccctggtcttgtttcttaccgtcgccttctccaagaagatgttaatccctggcaacgtggttgcttaaaactcactaggtgtcgaagttaaagaatattttgataatatgtgacggtatatttcttatataaatataaaaacctcttcatattaatgcaacatgattaatactaaaaaaaacacanna

SEQ ID NO: 34590 - DNA, 330 bp, Gossypium hirsutum
  Clone ID: LIB3145-058-Q1-K1-H10
ggatttgaatgtggagttcagtaacgaagtggaagagccggtaccaaggaggagtgaggggaaccatgctggatacggtgaagaggataacatggaagggaacggattttttgagggtcttgatgagtttttaagtagcttgcctatactctcagctgttggggatgataaagttaaggctacttagtgaagtaagatccttgtttccttttttgcagcagttgtagttctaatcgtatgcttgtagtatttaactatgtggaggtactcggttgaatttgactggatactttgtagcatcctatgttattatttttatagttccgagct

SEQ ID NO: 34591 - DNA, 406 bp, Gossypium hirsutum
  Clone ID: LIB3145-058-Q1-K1-H11
aaagatgaatgtctcaacttatctctccggccattacaagtttcagatgtggatgatttcatggtctgggccagtgatgaaaaagtgacacgtttttgtacttgggaaccttacaccaacaaagaagatggcttgaattacataaagaacactgttgtgcctcacccttggtttagagcaatatgtgttgacgatcgaccggttggtgctatttcggtgagtgcaaattcaggcaatgataaatgtaggggtgaacttgggtatgttttggcatccaagtattggggtaaagggattgtaacgagagctgtgaaaatggtggttgataccatatttgttgaatggccacatttggagagacttgaggctttggttgatgttgaaaatgtggggtctcaaagggtgc

SEQ ID NO: 34592 - DNA, 296 bp, Gossypium hirsutum
  Clone ID: LIB3147-001-Q1-K1-A7
ctttcgttccctatcgcaggatttactgggagaaatatgtacgctgaaaggagtcaataaggcgttagtgatactaacatatatcatcatcctttaaatcttggaagaagtgtttctaccagaaagctgactaggctaccatcaattactcagaacgatgcaaagttcagggggtatgatgggattcacaggtcaggattcagctactgtctgctgaaactggaactgatctgatctatatgggattttgcttatgaacatcctttccgaagcaaaggtttaaactcatgtctaat

SEQ ID NO: 34593 - DNA, 185 bp, Gossypium hirsutum
  Clone ID: LIB3147-001-Q1-K1-A8
tacgcttttctaaaatcactaaggacttgttagtacctgcagagtcacgggtgacaggcattaatgagatatgcggccaagcgttaacttcagatcttacaaaggactttttgggtatactagccgataatggaatgcttagacatatagaaagcattgcgaatagatttgtggaggttaccatt

SEQ ID NO: 34594 - DNA, 169 bp, Gossypium hirsutum
  Clone ID: LIB3147-001-Q1-K1-B6
agagctcaaagaactacgggtacgatgctgccacatgagcctcaaatatgcacgaagtagaagatcaaccagagccactcatgatgcaacttaaaactgccagaggtcgaaagcccttgatttgaacaatccaatagtataaattcaggcgtattggttattcagcttc

SEQ ID NO: 34595 - DNA, 120 bp, Gossypium hirsutum
  Clone ID: LIB3147-001-Q1-K1-B7
ggaacaggaagaacgatataggcagcccagttatgggagatccgaggaagaagcagtaagagatctgaagccacgatatgggagatcccatgaaaaaaggtatggcctcaagaaacatgg

SEQ ID NO: 34596 - DNA, 229 bp, Gossypium hirsutum
  Clone ID: LIB3147-001-Q1-K1-D6
accacgcgtacgaccaagcgttcgaaacacttctgcaatcacccaaagaagctgaatcgcgtcttctattgaacactcaatggctggacttaaactctatagggctatagtgttgagcatgttgacgatgtcgcagattgcctcaaccatactgaaaggctgctgatttgacaagaacagttcatgcttgcctataagactttcaaaaacgacggaacgttatcaaggt

SEQ ID NO: 34597 - DNA, 379 bp, Gossypium hirsutum
  Clone ID: LIB3147-001-Q1-K1-E4
gccacgcattcgtcaacgctggctgtagagctctgactaacggattgctccagatagaccatagtgcgcgcaccgtcactgcttgcacagatagatgccaggcttgaaactctatgctcgatggagcgagcccatgtcgacagtatccgatcgagacgacgcatttccattgctcgctgaggacaatctaccatgaaagacagcccatacgtgttaatacgactgggacaatgcaaatcatcgaggactcaatgtatccacggcaatagctaatgacgctggcatcataggcgacagccataatgtactgttagcttaaaaacctccaggactactgaaatcccgtaaccattcttttgatcttgttatcactgttaat

SEQ ID NO: 34598 - DNA, 251 bp, Gossypium hirsutum
  Clone ID: LIB3147-001-Q1-K1-E5
accacgcgtacggaaaaaccttctattgatctctgacaaaagcgttgctccaagattcacctagtccacagaaccagcactgggaagaccataaccctataggttcaaagtccccactcggttgaccgtgtccaagattacatccaacactcggtaaggctcccatgtgtaccacataatctcaaattttccggtaagaactttgtggactgtcggaacttaacttacttcaaccatcccatggaaaacac

SEQ ID NO: 34599 - DNA, 310 bp, Gossypium hirsutum
  Clone ID: LIB3147-001-Q1-K1-F4
gaatagaacaacaaatagtacactagttaaaagaaagccttttgtggtgattaatttaaatgctagcacatctagtgtctattttctctttaatgcttggcccgccacgaacatgagcaggatttatgttgaagattaagataatatcaatttagtttttactgcatgaaaaacagaaaggaataaaaaaataaaatacaaaccaaaaagaaatgcccttgacttaatcaaaggatctaatactaaaaacaatattgattaaaagttacattgaaaatgaattccctgattatgctgttctttcgaaggg

SEQ ID NO: 34600 - DNA, 253 bp, Gossypium hirsutum
  Clone ID: LIB3147-001-Q1-K1-F6
gacaatcttacaaatcttcctgttcatatcagatatcttagtatcatctctatggcctcaaatgccaagggcttcgttgacatgaccatcggtggtcaacccgctcgtgcaacatgtatggagctttttgcacattgcacttctagcactgcggagaactttcgagccatacgtactggccagaaaggcgtgagtcgaagcggtaagcccctgcactacataagcttttcttttcattgggtgatccctaact

SEQ ID NO: 34601 - DNA, 415 bp, Gossypium hirsutum
  Clone ID: LIB3147-001-Q1-K1-G2
gtcaatgagactggatacgggagcacatttgactaggatgctttgatcaatgatatgtcatggttaaaggcatctatgctggtccttttgctggagaacttatgaatgctatctgctaagagagttacttttacaataagaatgtggagatcacagacttgaaccaccatgactttgtcttgaccgagcatataacgtttacagctgctactgatgatgcatgctctaatatatacttggtatctcggatgcgactacagatgcttcctagacacagtatgaaactgggaaaaatgctttgaagctgcaaacccatttgtataccaattgcagtgctctgatacagacatcaaatgcaacatgttcgtagtgtgaaatatgtatctatattttctggatcagactgtaacagtgt

SEQ ID NO: 34602 - DNA, 161 bp, Gossypium hirsutum
  Clone ID: LIB3147-001-Q1-K1-G6
cctttactgccttactgtctgattagatcttatcaagtcgttacattttcattgttcattgatgcgtgaattagagtatcttgggttacattgggctcttatgatagttaggagaagccatttattaggatgggtcgaccatactatgagtatgtgctggg

SEQ ID NO: 34603 - DNA, 278 bp, Gossypium hirsutum
  Clone ID: LIB3147-001-Q1-K1-G7
cccacgcgtgcgacagggatatgggtacatacagatattgtgcgccgtgttatgctatgacggctcagctggcatgcatgtaggatatttacagcttgtgaggggacctacaggatctaaatactgatgagcaaggtagatgatagacaagagatcgactctagcataatctacatcatgcgcacgtaccatgctcaaagaccgaacaaacttgtgacgtatgggcgttcctctactactaggtcgatatccgggacgacgtgcaatacgaagcactt

SEQ ID NO: 34604 - DNA, 176 bp, Gossypium hirsutum
  Clone ID: LIB3147-001-Q1-K1-H7
tcggatcttggttactttagtttcattccccatcctctatcatgatcatcattcatggcagatgttgattacaattgcctgccctgaaaaaatagtatatgagtgactcactgtaagtcctttttattatattattcaaaaccaggatcacggcttgaaaagttacttttcatttt

SEQ ID NO: 34605 - DNA, 275 bp, Gossypium hirsutum
  Clone ID: LIB3147-001-Q1-K1-H8
ctgactcgtgggcggacgcgtgggcggacgcgtggggttttttttgtgcgtgggaattgttgggacaaggagagggtgggcagagacatggcggaagggtgattttgtctgtctagtgcttgcacatctcttctggcaattgtccaatgatggtgcttgaatgtaaccttcattatcattctcatatggatctttcacaggatgctcctgaatatcactctaatacgatatctaccatgtcttttgaattccactccaccttatggttggcaatc

SEQ ID NO: 34606 - DNA, 273 bp, Gossypium hirsutum
  Clone ID: LIB3147-001-Q1-K2-A1
gcaagagtaagtgtgatagagaatgtaatgatttgcacttaagttcagtaatgaccgatggtgggttctttcagggccgtgtgcgcacgtacatgcttaccgcttttgattccatttttaagctggttcatcgggtgtacttatcagtggccttgtggtattttattacatttgcattgcgttgcattgtaatgaccttgaagtggtaacagccattgttgcattgactttttgtgaccggaaatgagagcaacttggattgggcagtgggtt

SEQ ID NO: 34607 - DNA, 237 bp, Gossypium hirsutum
  Clone ID: LIB3147-001-Q1-K2-A7
ctttcgttccatatagcagggcttactgggatatacatgtacgctgaaaggagccaataacgcgttagcgatcctaagatatatcaccaatctttaatgatggatgaagtgtttctaccagaaggctgactaggctgacttacattactcataacgatgcaaagttcagggggtatgatggcatttacaggacgagattcagctactgtctgctgaaacaggagctgatctgatcta

SEQ ID NO: 34608 - DNA, 437 bp, Gossypium hirsutum
  unsure (1)..(437): unsure at all n locations
  Clone ID: LIB3147-001-Q1-K2-B10
gaactaatgtatcggtgtgaggatgataatggaggagccatgcgtgacgatacttgattgccttgacggcgttgagtaagggctggtagtatatgatcgattagctagagatactggtttcagactactgattggatacaagagtacccttgctatgtactaagtattgtagtactggatctataaagcatatgcagatgaagtcggcataccttttatggaaaccagcggcaaagattccatgaacgtggaacaagccttcatggccatggctgctttcattaaggatagaatggcgagccaaccggccatgaacaatgcaaggcctncgaccgtacagatccaaagacaggctgttgcacaaaagagcggctgctgctcttttaaaaaggaaaagggaaaaaagtcaattatgtggttagattttacatggttct

SEQ ID NO: 34609 - DNA, 367 bp, Gossypium hirsutum
  Clone ID: LIB3147-001-Q1-K2-B12
accatgcttcctgcgactcatgctgctactcttaaaattatacgcgccagttcatcattcggatgctggtgtaactcaattacttcttatgcttactgtcatctaccaactatcttcataacgaccgatcactaggactcagtactccttctaatagctagtgaacctgacttgactgcccatacactgcatattcttcattggaaaatgcttacacttaaaaaagcggtataacaaatcttacttcttgagttcatgaccatgctctgtatgacacattgccttaactgaactactctccatatcaacattctgtctcatatgctgtctctctagccgatacacacttacctacacgtacttacaa

SEQ ID NO: 34610 - DNA, 447 bp, Gossypium hirsutum
  Clone ID: LIB3147-001-Q1-K2-B6
agagctaaaagaactacgggaacgatactcccacatgagcctcaaatatgctgaagtagaagatcagcgagagcaactcatgatgcagcttagagctgccagtggtcgaaggcgctggttttgatgattctaatagtataaatccggtcgtattgtttctccagctccggcatccacactgagcttctgttttttcaccatctaatttttttttcctatggtgtttgtgtagattctttacgaagcagaatagggaaacaaatttatggctcctacatcaggagccagccttgcctgcctggggactgagatagggatttatttacaggctaattgtaatacaagaaacaacatataacaaagttgtatactaatagtattttcatttcttgtaggtatgctgagcaatgaaaacacgagtataaggctatgataagccttgatttc

SEQ ID NO: 34611 - DNA, 408 bp, Gossypium hirsutum
  Clone ID: LIB3147-001-Q1-K2-E12
gatcaatacaggtctctaacttacatgcgtccgttggccatatgggcaatgcaatgggccttatcaagagcaaaagttccaaagcaggagctaaaacctgaaatggaggcggattcgctacgtgtacaccatgccggcttctccaaagttgctcgccttctaaaattgcctgaagatcaaagatccaaaagtcttttacagattatgttcgattatacttgcaagagaatgttgacttaattgattggtgcaattattagtgtgtatggtgagtgtgcaatgcattattcaataattggaaaacttgagtatttgcaaaaatataatggtattggaaaataagtgtattcagtacttcaaaatataataatttgcagtgtaagcaaaaaaaaaaaaaaaggccggccg

SEQ ID NO: 34612 - DNA, 381 bp, Gossypium hirsutum
  Clone ID: LIB3147-001-Q1-K2-E5
accacgcgtacggcaaagccgactatttgtctttggaaggagcggcgccctgaagatgcgaataggggttagatctcctaacggggacgaccataactctagatgttgagactcatgactccatctacgatgtccaagtcaacattcaagactaggaatgaatgacatgcgaccaacatagcctgatgtttgttgctaagcattttgaagtctacataactttagcttgctacagcgtgcgtactgaatccacggtacaactcaagctacgacttacgagaagtgctaataagattatgaagatgatctacgatatgcgtaagatgattatgcacaataggaataatgttgagctcgttgatctacacttgtacaatgtgg

SEQ ID NO: 34613 - DNA, 178 bp, Gossypium hirsutum
  Clone ID: LIB3147-001-Q1-K2-F4
gaatagaacatcggatagttcactagttaaaactaagcctcttgtggtgattaatttaaattctagcacagtatagtagtctattaccctcttgaatgcttggcccgccacgaacatgagcaggatgtatgtttaagattaagattatgtcaattgagtttttactgcatgatgaact

SEQ ID NO: 34614 - DNA, 422 bp, Gossypium hirsutum
  Clone ID: LIB3147-001-Q1-K2-F6
gaaaagcttacaaatgtgcttgtacttatgagttatctgaggatcatgactattgcttgaaatgggaagggctaggatgacatgaccataggtgctgaatccggttgtgggatagtgatggatgctttctaagattgcacttcttgcactgagaataactatcgagctctacgtactggcgagaaaggcgtctgccggatgcggaagcccctgcactacataagctcttgtttacatcgtgtgatccctaactttatgtgccaaggaagagactataccggctgaaactgtacctgaggtgaatccatctacggatcaaagttcgatgacgagaacttgatcaagaagcacactggttccgggattctctcaatggctgacgcttgaacgggaactaacggatcctaagtcttcatttggac

SEQ ID NO: 34615 - DNA, 326 bp, Gossypium hirsutum
  Clone ID: LIB3147-001-Q1-K2-F8
ggctatgggataggatacgtatgcagaatgaactcgaatgctttcgtctatgacaaatcttcagtagatgcatctaaactggaccttgaggtggagacctcatgaaagctatgggctaatatagttagttttacaataagaatgtgtacatcacagactctaaccaaggtgactatgccttgaccgatcatattacgtgtacaggtgctactgatgattgatgctctcaaatatgctctgggtatcggatgccgctagggatgcttcctagacacgatttgtcactgggaaaaatgctttgaagttacaaacccatctgtatacca

SEQ ID NO: 34616 - DNA, 407 bp, Gossypium hirsutum
  Clone ID: LIB3147-001-Q1-K2-F9
cccacgcgtccgtgaagataaagcaactatctctttatatttatagaaagcaaagtgttaatccatgggaagttgggaaaatacatcatcatcaccatcaccatcaccatagccattaattcacattaaaataaagcatagcattataataacatcaataaaaatacttcttcaatccattcccactgcatttcaatgtatgatgatgaatgaccatgattgatgattgatgattgatgattgatgaaccatatgctccattgctcctcctccttcacctttagaatctcatttaaaaaaaaaaaagaaaagaaggaaactatatagaaaatatatgtttatatttgcctggcttcatcctgtctgcctttttgcaagcccatagagaaagaagtgaatttttttta

SEQ ID NO: 34617 - DNA, 275 bp, Gossypium hirsutum
  Clone ID: LIB3147-001-Q1-K2-G2
gtcaatgagactggatacggaagcacattggactaggatgctttcatctatgatatgtcatcagcagatgcatctatgctggtcctttagctggagaactcatgaaagctatctgctaagagagctactattacaagaagaatgtgtagatcacagacttgaaccaccatgactgtgtcttgaccgatcatatgacgtgttacagctgctactgatgatgcatgctctaatatatacttggtatatcggatgcgactacagatgctacctagaca

SEQ ID NO: 34618 - DNA, 215 bp, Gossypium hirsutum
  Clone ID: LIB3147-001-Q1-K2-G6
ttcccgaatcgaccgatgcgtccagcacgttcggccatgcatgcgatgcttctcaactgacttagtgtctgtgtagatcttgatcgagtcagtctcgttcaaacaactcatttatacgttaattagactataacgggtgacattgagctattttcatagttaagagaatccattttttaggactatattgacaatatgatgagtatgttctttga

SEQ ID NO: 34619 - DNA, 308 bp, Gossypium hirsutum
  Clone ID: LIB3147-001-Q1-K2-G7
gccacgcgttcgtcaggcatatggctacatactgtaacagtgcgacgctttatgctaggaccggtcagctgacgtgtacgtaagataggtactgtttagaggacggccatcaggtactaaatactgtttacaaagcaacctgctatactggagatcgcgcgactcatcatttgacatcatgggcacgtaccatgcacaaagactgaacaaacttgtcacgtatggtcgaccctctactacaaggtcgatatctggaccgcgtgctttaccaagcacttgacatagctccaatgcgcgttcaagagcat

SEQ ID NO: 34620 - DNA, 140 bp, Gossypium hirsutum
  Clone ID: LIB3147-001-Q1-K2-G8
tccgaatgaccgcatcgacccacgcatgcgtccacaccatcgagaactccttgtttggatgcttacttgtgcgctgccaacattgagaaaattgaatcagaagactgaacaccatcttcaatcaaatgatgcatgtacat

SEQ ID NO: 34621 - DNA, 290 bp, Gossypium hirsutum
  unsure (1)..(290): unsure at all n locations
  Clone ID: LIB3147-001-Q1-K2-G9
cgcacgcgtacatgtacataaagggacaatctagctagattgatagcttgcagtgtgacaatccatgggacgatcagaccttacatcatgattacgatatgcatcaccgctatcattaattcacattcatatcatcgtatcatgatcttaacatcaataaaaatacttcttcaatccattcccactgcatttcaatgtatgatgatgaatgaccatgattgatgattgatgattgatgattgatgaaccatatgctccattgctcctnctacttcacctttagaatctca

SEQ ID NO: 34622 - DNA, 297 bp, Gossypium hirsutum
  Clone ID: LIB3147-001-Q1-K2-H12
caaaggttcaaaagccactagatcaaatagattctattgactattgtgagccacgtgtttgttaatctgtagatatctgatctagttatatgatgaggtttagcagattcagatttgtggtagggactctcaagagggaatttaatccaaccaactctaagacaggatttgaacttctaggaggtaataccagatggttgaaagcatctgtgcaagttctgggtcatgccagtacctaatgatccgttttttttttcctgagtttctaatggtctatataaacttgaaataatgaag

SEQ ID NO: 34623 - DNA, 204 bp, Gossypium hirsutum
  Clone ID: LIB3147-001-Q1-K2-H2
gcgtccacacgtaggagacgtacttgtctggctgcgaactgctgcgctgccaacgtttagtaaactgtatggggagactgcacaagatcttcagccaaatgatcaaattcctgtgacattggataattacttccattcttacaggttcaatggccagaaaaaaactagtgctttcaactactagctggcttggtgggaaaaatg

SEQ ID NO: 34624 - DNA, 208 bp, Gossypium hirsutum
  Clone ID: LIB3147-001-Q1-K2-H7
gatattggttaccttaggatcaatccacatcctgtatcatgatcatgattcattgcagaagatgagaaccattgcctgccctggaaaaatagtatttgagggactcactggaagtcctaattactatattattcaaaaccagcatcagggctgtaaatgagacttttctctttaaaaaatgatagttgcacgtattctaaagtaccat

SEQ ID NO: 34625 - DNA, 373 bp, Gossypium hirsutum
  Clone ID: LIB3147-002-Q1-K1-A11
cgactttgtaggaaaatgtggatcacgtgaatgcaaccgacacattccaaaacgaaacttttgcagttcggtgtccgacctgaataggcgaagaaatatagttacatggacagaagaataacatgaattttgacatagggcacatgtaaaattggtgataaatcttcagtacatgtaaggttttgttaccctacttttagattcttttgcttttatggcaaattcttttgtaagaaaggaagttgaaacatgaaacaggaatttaggtacaaattaagggcaaggtagaaaattgattccttttcctttagtcactaattttcatgaggatggtactttgagctgatgttaattgaagtaaatgtttaactaa

SEQ ID NO: 34626 - DNA, 433 bp, Gossypium hirsutum
  Clone ID: LIB3147-002-Q1-K1-B12
agctgtgcgaattgttcttgaaatggcaggtgttgagaacgcattgggcaagcaacttggaagtaaaaacgcccttaacaatgctagagctacggttgttgctgtgcagaaaatgaagcagttccgagaagttgctcaagaacgaggaattcccatggaagagctatggaagtgatggtcgtggaaacaacttcaccattaccctcaattctcctctgcaaatgtagatacagtacatgaagctttggtaatgtaagtcaaccaacaagatttgagcatctatttaacttttcgattataaaagttatgttactctgagcttctattagaaattttccattttcttttcatttcttgtctctgatgtttgtaaaaactgaatttcttgagaacttgccatcgattactgaaaaatcaagtaccttttgtaggc

SEQ ID NO: 34627 - DNA, 474 bp, Gossypium hirsutum
  unsure (1)..(474): unsure at all n locations
  Clone ID: LIB3147-002-Q1-K1-C11
agcaaccattatggtggtctaggtggtggccactacactgcctatgctaagttgattgacgagaatagatggtatcatttcgatgatagtcacgtctctgcagtcaacgaatccgacatcaagacatcagctgcttatctcttgttctataagagagttagatctgaatccaaagtggaggcaggagaggcatcacatagtcattccatctcttaaagatcccgatgagtgcaatctccaatactattgccttatcgagctgcctccaatcaaggattggcagccggcctcacctgcaacaaccactgttatactacaatgatttttacttgtctgagcagaagctgagcgaaccctcaatgttataaaagatacgataggtgagcctaactcggaaacaactcacaacgaagcagcggcgcaattcaaaggtaggggcaactattattattagttctattaaattnttttaat

SEQ ID NO: 34628 - DNA, 450 bp, Gossypium hirsutum
  unsure (1)..(450): unsure at all n locations
  Clone ID: LIB3147-002-Q1-K1-D11
gggatttagcacaagcctttatgaaacaatacagtcatgtagctgatatggtccttgacagaattacccttcaaaatatggagaaaaagcctaatgaaagttttaggcaatacgcacaaaggtggagggaggtcgctatccaagttcagccgccactcctagagaaagaaatgacgatgctcttcatcaacacattgaaagccccgttcatcacccacatgttaggaagtgcttcgaagagtttttcagacatagtcatgagcggtgaaatgattgaaagtgccgtgagaagtggaaagattgatgctggagaaaataataggaggtcagacttaaagaagaaggaaaatgangtgagcaatgtgaacacctacaacaaatcgattacacagccaagaaaggtgattacaagtcagcaaagttcatctagacaagaatcgtatgtgaagc

SEQ ID NO: 34629 - DNA, 349 bp, Gossypium hirsutum
  Clone ID: LIB3147-002-Q1-K1-D9
gtaaaatctgcagatttagacaagtgaacatatggacaactgattgcaatacataacaggtgatgctgtaagaagcagattatatggaaaaaggtacacttttagaagcttttgtttgtttgtttagctgactatacaggcaacttgaacaggggaaaaaaggattgtgatattaacatataaccatgttttccaattttaacttgttgaagtggattttctgtgatgaaagctaatattcatacctttgaatacacttattaatggaattacctacaattttagtcaaaaaaaagatcttgtgtacccacacgtttgtgtgtgcggacacaacaaggttctaacatgt

SEQ ID NO: 34630 - DNA, 241 bp, Gossypium hirsutum
  Clone ID: LIB3147-002-Q1-K1-E10
gggacggtctgctgggtcagctaaaggcaagcctaaaattgaagtctatgacaaggatcgaaagaagggggccgggttgataactcctgccaagagttacaatcctgcagcagattcagttcgcgggcaaacaacaaactcgggtgctcttgatgagcaagacacagccccaaggaagaagaaaaaggtcgatgtcgaacctcaggaggaggaagcagcagaagtggctgctattgaagat

SEQ ID NO: 34631 - DNA, 449 bp, Gossypium hirsutum
  Clone ID: LIB3147-002-Q1-K1-E9
actagtggatcccccgtgctgcatgaattcgcgaacgtgtcgacccctggcccggttcaaaccgctcaaatacatctacgagacggagactgtcatgtatgcctactataaaaacctcaactacttcagcacggagcgcacctactcaccgtttgcggcgcgaagactgtcccgcgagttcatcatggacctggagctgacccaaccgtgcgccatcatcgacctgatccagacctgagctcaaactaggatacaggactactacaaggcggtcgtccatttagatgggcacctgcactcactgaggatacctgaacatgcacaaaatctgcaaggcgctcctattgctggacgctctgaaaaacgtccgaccgcggataggcattgctagggtgaatcagggatcggcctgagtaaggaagcgctaacccggttgttcgcctgtacat

SEQ ID NO: 34632 - DNA, 348 bp, Gossypium hirsutum
  Clone ID: LIB3147-002-Q1-K1-F11
ggttgacctcagcttcccatccagtcctaatgtctcaatggaggctagaaatctcatcaaccggcttcttgtgaaagactcctcgaaaaggctctctcttcagaagataatggagcacccttggattattaagaatgcaaaccctacgggtacttgcaaaaaatagaacttgtagtagttttagattctatgtcgtaaaagctgttaacagattgcaattcagctgtgaatgtattgttcaaactgggatgataatcatcactttattctcttttgtgatgcattaagctctacttttgtccatataagcgttcatctatgaatctgattacataggattatagttgt

SEQ ID NO: 34633 - DNA, 269 bp, Gossypium hirsutum
  Clone ID: LIB3147-002-Q1-K1-F12
cccacgcgtccggatttatccaaggcttttgtatggttatttatgagaaagcctttccatgacagcttgtaataaaataccactgactaggtttacagtctcttgttggtcctagttgggaatccttattaactaaaatccttaaagaacatatgctttagactttaaaaagaaaaaatataacatactaggacgtaaaaactggaaacagattagaaattaaactgagaaggaattgtccaaactgggatgttaataataacttaatt

SEQ ID NO: 34634 - DNA, 398 bp, Gossypium hirsutum
  Clone ID: LIB3147-002-Q1-K1-G12
tcgcccacgcgtccgctttctagaaaacggatctcccccacctaaacggaagaagggaactgagcttcctggcagtgaagtaccttctacaggaaactctcctggccaaaaacagaagaagtctgctaaaaaacagaagccgttgaactttgatttcattaacgttccggagaaagtcgattggtttttaactgatgcctgttcggactcctggactcccttcctcgggaacgatttagtgtctgaatctactaaacaagattgggcagctgcatttacgtccctaacagtcaagaaaagtagtcaagcaatgttttgaagacattttctacgtcgttttagatttgactacatcgattaaacgcctggtttcatactgaccagcaatatctatattc

SEQ ID NO: 34635 - DNA, 459 bp, Gossypium hirsutum
  unsure (1)..(459): unsure at all n locations
  Clone ID: LIB3147-002-Q1-K1-G9
cattcaagcccgatgcacctgcttccggtatgtattcctgcaattgtaacatccaagatatgggtatcgaagaaggccaatttgatattcctgtttttcctactaaggaagcttatacttccattttactccttcacattgttctgcatcatacttccattaacaatgttcattcctgaagctgaacttcccctttgggttatctgttatatcccaattttcatgtcattcctaaacatccttccggccccgaaatccttccctttcttagtcccgtaccttctgttcgaaaacacaatgtcggtaaccaaatttaatgccatgatctcgggactattccagctcgggagcgcctacgaatgggtagtaacgaagaanacaggtcgatcttcagaatccgacttagtggccttagctgaaagggaatcgaaatcattgaatgaagaaaagatcacgagg

SEQ ID NO: 34636 - DNA, 445 bp, Gossypium hirsutum
  unsure (1)..(445): unsure at all n locations
  Clone ID: LIB3147-002-Q1-K1-H12
aacagattgaggctgctggcagaggtgttttggtataccttcgtggacatgaaggcaggggaattggtttgggccacaagcttcgtgcatataatcttcaggacgctggtcgtgacacagtcgaagcaaatgtggaacttggattgcccgttgattcaagagaatatggcattggcgcacagatactgagggatcttggcgtgcgaacgatgaaactgatgactaacaatccggccaagtacagtggactcaagggttatggattaacaatagcaagcagggttccactactaactcctattacaagggagaataggagatacttggaaacaaaaagagctaaactgggtcacgtatatggcttagattntaacggcagtttgaacagtctcattatcggcggcaatggtaacacggntgctccgacggatgctgcatctgaatc

SEQ ID NO: 34637 - DNA, 459 bp, Gossypium hirsutum
  Clone ID: LIB3147-003-Q1-K1-A5
gcgcccacgcgtacgcttctactttatatgacactcttgtgttcaaatatgatccaccgagcaacaccgcgtttcctcacggtgtctcattgctacccaacctcaggagcttccttaactgcgacttgaagaaagctaagctgatcgccaaccaaactcaaggtggcggaaatgggtttgagtttgttttgaagaagaagaataagaagaagccctactacttcgtttgtggtgagcgtaatggctttcactgcaaggttgggattatgaaattcgctgtggcgccgctcctccgtcctcggcccttctgatggaacaccaccagaatccaaggaagacgcagtgcctgactttattatgttctgtatcattttattcacaataatattagagattggaattcagtaatgccgtcatgtttcttctttctacctaatatgtcagaatttgctttatgcg

SEQ ID NO: 34638 - DNA, 421 bp, Gossypium hirsutum
  Clone ID: LIB3147-003-Q1-K1-B7
gacgaggttcaagaatggctgtatactgatggtgaagatgcaactgctacagagtttcaagaacgcctaaatttgttaaaagcagccactgacccaatatttttccgatttaaagagttgactgcacggccagaagcggtaaaatttgcgcgacgataccttactgaattgcaacagactattcgtgggtgggagaaggacaaaccttggctgccaaaagataaagtagaggagttgtcaatcaatattgataagttcaagacttggttggatgaaaaggaggccgagcagcagaagatgtctggattgaggacgcctgttttcacatctaaagaagtctacgagaaggtaaccttcgtgcaaaacaaggctgatagcattaagaaaatccccaagccaaagcctaagactgagaagccat

SEQ ID NO: 34639 - DNA, 184 bp, Gossypium hirsutum
  unsure (1)..(184): unsure at all n locations
  Clone ID: LIB3147-003-Q1-K1-C3
ggcgagccaagcgtacgggtgttttttgtggatgaccgtgtctcctcttttaatgaaggangacaaagcgggctcaaatgggctgggggggccttaattctcgctgagaaatcatggctttttgtttgctttatgttaaaacaatattctcagcatatacaactgagtgtgctttgcacttttt

SEQ ID NO: 34640 - DNA, 432 bp, Gossypium hirsutum
  Clone ID: LIB3147-003-Q1-K1-C4
gaaacaagcaacagagaagtcctcatatagcgctatgggctagttgacacaacacacaaacatcttagcactgtattgtataacaaggggtattgatgatgaaagcgaaaaaaaaggacgtgtgaccttgaaaaaagctggacttgtcagctaccattattggcactaggacaaatttttgttttgctacacatactatgggcaatcataatggggtgtggagctacaatccattggaactatttgctcaaatccagcctgctttcttgcaataacttcaatcatgaaatatgaactgaacctttctactacaaagactgccatgactgaagataatgtgtttaggagtccatactagaaacacttctttcgatgcctttgacgcgtgatccgacaaaaagatgcacatatgtttaaaagttgttctttact

SEQ ID NO: 34641 - DNA, 274 bp, Gossypium hirsutum
  Clone ID: LIB3147-003-Q1-K1-C6
cccacgcgtccggataaaactaaaaaaaacatttaaaacaaaaaaaaaaactgcgaaaaaaaggggcaaaaaaaaaaacaaggggggccggtcgtaacgatccaacaaacttacgcaagcctgcggccagcttggtttttttttacgtgacctaaactcaatcaaatgccctccctatgccaaccaaccgactgggaaaaaactggctctacccaacttaatagaagattgataacaaacccgtttctcctgctggggcaattaataaaagact

SEQ ID NO: 34642 - DNA, 439 bp, Gossypium hirsutum
  Clone ID: LIB3147-003-Q1-K1-D11
caaaatttaaaagaaaagtgcattcccgggactctgttctcgtaaatcaaactcgtaaatatttattataaatatttacgaagctatttggtgtagttaattaggtttcgattaagtgaatttgcttgaattaaaagtaattaggtataaggactaaattgtatatagggtgaaagttaaattatagattaaagaaaaatttaagggactaaataagcaattatgccattgacattaaatgaggcggcgtaaggatgaagatatttataaaatttaaagttaaaatatatattaattttaatattataatattatatcttaattattatattatattatattatattatattatattatattatattatattatattatattatattatattatattatattatattatattatattatattatattatattatattat

SEQ ID NO: 34643 - DNA, 423 bp, Gossypium hirsutum
  Clone ID: LIB3147-003-Q1-K1-D4
cggacgcgtgggaaagaaaggaataaaaggatgtttacgtgtagacagttgagcagaaattgggggaaatagaaaaactggattaataatttagattttatattggagaggaagatgacgacgaattttagatatagacattggaaaagttattatgtatgaccatattatggtttgattaagttgtgaattgttctttttaaagagggatagtattactagaaacgcttttggatttatttttataataggtactatgtatattgataacattgctttacaggattacatcatgtagttacactttggaaaaatattacatgttttgcgtattaacaaaatgctttgatgtattgtatcataataggtttaaaatttgtattgaaaattccttggggcgtgcgttttaggaattttttggtt

SEQ ID NO: 34644 - DNA, 327 bp, Gossypium hirsutum
  Clone ID: LIB3147-003-Q1-K1-E1
atcggatgcctagtgttcagtttttgcactttcaaataaatttttattcacttcggatttcctctcttctttgtttcacccctatgaatatattcaaagtttttttccacttgtgaacttggttacatgttcatacaggttggctctttcttgatggggtggtggggtgttgttttcaaaggtgacatatctcaagtatctgatattttggcaattggattgactaccggatacttgggtagcgtcacaacattcagtggttggaatcagaaaatgcttgatctcagtgtagatggccactgggtgcaagctatacttgggtttctc

SEQ ID NO: 34645 - DNA, 452 bp, Gossypium hirsutum
  unsure (1)..(452): unsure at all n locations
  Clone ID: LIB3147-003-Q1-K1-E12
atctttgcaaagcatccgcatagggcaggagacatggtgattgaatatactggtgaacttgttagaccttctatagctgataggagggagcatttcatatacaactcattagtgggtgctgggacttatttgttccgaattgataatgaaagagtgattgatgccactagagcagggagcatagcacatctaatcaatcactcgtgtgaaccaaattgctattcaagagttattagtgttcatggcgatgagcatattatcatttttgcaaagagagatatntaaacgatggggggaagagctgacatatgattatagattcttttccattgatgagcggtttggcatgttactgtggttttccaagatgccggggtgttgttaatgatactgaagctgaggagcaagtctcaaagatattggtaaaccgcggtgaattaatacaatggact

SEQ ID NO: 34646 - DNA, 305 bp, Gossypium hirsutum
  Clone ID: LIB3147-003-Q1-K1-E6
gtgggtctaaagcatccgcatttcttaattttaaccagcggatgaaaataacgtgcagatgtaggcagcatgttcaagcttgaaatcagattttggtgggaataatggaagaggatgagtcatttgcaattacattattactaggttttgtgagatttaattgaacttgttcatttattttgtcctacggaactaaacaaacagataacgataccaatgtgattgtgtcgctaatattttgttagttttaaagaaacaaaagaggcaattttctttgatttttcaaaaaaaacaacaacaaaaat

SEQ ID NO: 34647 - DNA, 350 bp, Gossypium hirsutum
  Clone ID: LIB3147-003-Q1-K1-E8
cccacgcgtccgcccacgcgttcgattaacttttcgattgttataacttacgtgggtcaaattataacaagttaaagtagagggattaattttttaatttttgtaaatgatgatgctcttaattagagatatgtaagtcttggaattttgacgggtgcaaaaacaaaggaaaaggtttatgaatgtttttcggtacttccgtttgattttaatatcgaattttgtatttgagtttttctttttaaatttcaatttggtaaaaaaaaaaaaaaaaaaaaaaaataaaaaaaaaaagaaaaaaacaaaataaataaaatgatgggacagttaatacttaaagaaaaataaaa

SEQ ID NO: 34648 - DNA, 428 bp, Gossypium hirsutum
  unsure (1)..(428): unsure at all n locations
  Clone ID: LIB3147-003-Q1-K1-F10
cccacgcgtccgagttgccgtacccaaggatcgatgggcttcacatttacacctaccgcgccttcctcgacgccgttaacttttatctcgagatgtgcgatatttctgaactcttccacattcggggtatgccgcttcaccggagcaatgaccggagccggaaatggcgatgcatggaggaagacgatggtgtgtttgtatacagggaaggaacattggaacaaacaacgtacaaaatgtaccatttcaacaagctaaactccaacagctgcaatgggtataatggtgccattttttgtcattcgtgacaaagggaacaattacaagaacaatacccctgttagctgntttgttccattgaaggatattatagtatgagggctagaaaacatggaataatatgtccgtaaggatcaaatttttgttac

SEQ ID NO: 34649 - DNA, 304 bp, Gossypium hirsutum
  Clone ID: LIB3147-003-Q1-K1-F3
cgcatgcgtttgacttgaaaaataaacaatatattggtttcatttgctgtgtgcacgcgctatagaaatacaaggaactactgctgacgaaacagaacctattcggcgcgtctaatgcggtggcatatttcaaacatgatggttataggtacacggtcggtggatgtgacaacgactgcgcttcaaacgacaagctggtcagaaagagatagatgcaccgaatctacggactatatataacatttacataagaatgaggctagggctaaacttgaaatgtgcggctggaataagatatcctgac

SEQ ID NO: 34650 - DNA, 204 bp, Gossypium hirsutum
  unsure (1)..(204): unsure at all n locations
  Clone ID: LIB3147-003-Q1-K1-G1
cggacgcgtgggcggacgcgtgggcggacgcgtgggcggacgcgtgggtcaatactgaatattgtgtcatcctttgggatattgttggtttacttgcttaatggttccttctgttaataggtcgagaaaaatgaaataatcacactagtataactagtttgcaatttatttaaactnagnngagtggatcccgaacaatgtgaa

SEQ ID NO: 34651 - DNA, 465 bp, Gossypium hirsutum
  Clone ID: LIB3147-003-Q1-K1-G3
cccacgcgtccggctttaaaaaaaatcactttctttctttcattttctctgtgcaggcgctcttggttcggtcggggctccggcgagctgccaccgctctccgtcgcgtctccgccgttggcgacctccgtgcacggcggtcagaggtacacgggcggtggatgtgacatgggcggtgctgcaagcgtcggctggtcaaaagtccctaggtgcaccgcacctacggtttatttattatttttttctaattttgggtattgggcttaacttgggatttgggccttgatttgtttgggttggggctttgatttgttgggctaaacgggctagtacagtaggattttcaatgcagccgctgatttacacttagtaccaagtagcaaaccatcaacactctacttgacaggatggatccacaagtagcacttccctttgtaaacgaaaacgaatatgcacgatgaaaca

SEQ ID NO: 34652 - DNA, 345 bp, Gossypium hirsutum
  Clone ID: LIB3147-003-Q1-K1-G4
cccacgcgttcgcctacgcgttcgaaaaaattattaaaaaatttaaaaaaaaaaaaaaaaaagggaaataaataaaaaaaaaaaaggtatttaaaaaaagtataagaaatgttataggtatatagaataaaataaaggtggttttgaaaaaataaatattatatttgttgggctatatttaataaattgggcgttggtttaaaatttggttattggaaaaactatggttttacgtatttataattttttttttgattattgattttttaatagatgggggattttttgattgtttaaaatctattgggcttttaatttttttggatatacgcttttttattggga

SEQ ID NO: 34653 - DNA, 348 bp, Gossypium hirsutum
  Clone ID: LIB3147-003-Q1-K1-G6
attgttttttgtttactttttttttttttattttttaacaataaacaaaatatggaaagatcggaataattgttgtattgtgtcacctaaaattaatgacggtgctgttcgtataactgtgtcctgctgtgaagattcagatacctgccaagaacaaggtcgtggagtacatgaacatgtaaaccagtggagctatagctatcagtcacgctattatctactttggtaacattaccatattctgaatggccaatggtgctcatatcttatgctgccaataatctctagctgttgcttgcttcacttctaactgactgattataaatgcattgcattatctatcgatat

SEQ ID NO: 34654 - DNA, 290 bp, Gossypium hirsutum
  Clone ID: LIB3147-003-Q1-K1-H10
cccacgcgtccggaaaagactagtaacttttgataaagtttttgcagcatatcatgaagctaggagctgtatccggagtgacttggccagtgcaggtagtgctgaaaatgtgaaagatgacttaaatggtctggataaggctgttagtgctgttctaggtcaacgaacaattgagcgcaatcagttgttggttagcattgcaaagagcaaacttacaagacgtcgtgatgacaaaaacgagaaagtcaccaagcctgaggagttggtccgcttatatgatcttttattac

SEQ ID NO: 34655 - DNA, 300 bp, Gossypium hirsutum
  Clone ID: LIB3147-003-Q1-K1-H12
cgactcccctacttctaaaaacttcctgggtttcatcgtcgccttgtcggaatctatccgcggccgtaaaatctccgatcccagccatgaatctgccaccgtgtccaatatcgtctctatcatcgaaaacctgagtctctgggtcgatcagatcccacccgttcaacagtcctctcgttacggtaacatctcttatcgaacctggcacgaacgcttaaccgaaaacgccgaatccttcatgctacagttcctccccgaggatctcaaaccggccactattgaaatcgtcccttacttttt

SEQ ID NO: 34656 - DNA, 415 bp, Gossypium hirsutum
  unsure (1)..(415): unsure at all n locations
  Clone ID: LIB3147-003-Q1-K1-H2
gtgttgaggttgaggaaaagtctaataacatgcaaattgaataggaatccttggaagatcgcgagcttttatctagttatttgcctctattaagagagtttatccctgcagctgctgccgaaattgaagctgatgttcgagcttacatgtttgaaaaagatgcagatggatatgtgtatgactactacactgtgaagaatgacttgggtgtaggtgaggaggatatggcttcaaatccattcccactggtgaaggtggatgatgaggatttctatgatgtgccatatgagtcagaatatgatagtgaagattcaaatgccgaagataatccgagaaatgattatcctgatgaaacatccgaagaggaggaagaggaaaaggaagaggaangggacgaggatgaggatgaggagac

SEQ ID NO: 34657 - DNA, 432 bp, Gossypium hirsutum
  unsure (1)..(432): unsure at all n locations
  Clone ID: LIB3147-003-Q1-K1-H6
ctcgtcctctgtttactttcccctttcttcttccttttcaataaacaaaagaaggaaagatcaaatcaatggcagattggggtcctgttttagtagcgacggtgctgttcgtattactgtgtcctggtctgttgtttcagatacctggtaagaacaaggttgtcgagttcgggaacatgcaaaccagtggagcttcggttctcgttcacgctattatctactttggtctcattaccatcttctgtctcgccattggtgttcatatctatgcttcccaataatctttagctgttgcttgctgcacttttcactttctcattattaatgggtttcattttctattgatattgcttgatctgttataattgaagctgtgttttaatagactcttttacggattaatttatgtattttggtcgatctnggaaatgc

SEQ ID NO: 34658 - DNA, 445 bp, Gossypium hirsutum
  Clone ID: LIB3147-003-Q1-K1-H7
aagaacatgggcctctatggcgaacgtgttggtgcattgagtgttgtctgcagggcagccgatgtagcaagcaaggtcgaaagtcagctcaagcttgttattcggccaatgttttcaaatccaccaattcatggtgcatctattgtggtaaccatcctgaaggacagcaacatgttcaatgaatggactattgagttgaaggcaatggctgaccgtatcatcagcatgcgcaaacaactttttgatgctttgcgtgctagaggaacacctggtgactggagtcatatcatcaaacatattggaatgttcaccttcacgggactaaattcaaagcaagtggaattcatgaccagagaataccatatctacatgacttctgatggaggaattagcatgcaagaactgattaaaagacagtcctcatcttgctgatgcaattcatgat

SEQ ID NO: 34659 - DNA, 331 bp, Gossypium hirsutum
  Clone ID: LIB3147-004-Q1-K1-A12
cccacgcgtccgcccacacgtgctattttgatcacaaattaaatactgttgtatgtgaggttgtattatatatatatatcatatttataatgccctcttttaacatcatacttagcacagatcatatagaaaaaataagtttgctatcaaatctaatgacagacatataaccattctgtctttttgagattcaaacaatatttaatgaatcaaatttcttgctttcttgaatattaaaaaaaaaatatttattaaaataaaaaaaaaaaaaaatataatatataaaaaaggatctccctctttaaaagttccaagtttacttaccctttct

SEQ ID NO: 34660 - DNA, 460 bp, Gossypium hirsutum
  Clone ID: LIB3147-004-Q1-K1-A2
attcaaaacaaaaatggcttccatctactgctgcaaagaatgcggaaccaaccttaacctacgatcaacttatttatcccctccagatttctatttcgaagcgggaaacaaaggtaccctttctttcgccacgatcgatgataccaagttcaatttcgagaaagaagataagtttaggccttttttttgagactcttgattattgggggattcaacggaataggaccaagatgaagtgtaaaagctgtgggaaacttgtgggttatatttatgatgatggtcctccattaacggatagtcctggtcaatttcatatgggacctagtcaagtggtacccagatgtcctagatatcggttcaagatcaaagcacttacgatctcatctgaaacttgaggaaattaaagaaattgaataatttcttttctgggtttttgtgttgatggcttgaattttgggtt

SEQ ID NO: 34661 - DNA, 279 bp, Gossypium hirsutum
  Clone ID: LIB3147-004-Q1-K1-A3
ccgaaagccatttcttctcattatcgagagcatcttttttaacggctccttccatatcttctgagcagatattaatcacaaaaatggcgctggcttctatcatcggcacggttgctctcgcgtcagcgtacatactatctgctcggcaagagttcaatgaatgaggcgtcgatggtggcccagcggcgaaagagctgatgccagagtgcaacgtcttctcaaagactgtgacatctgacacaggcttgcaagtgcctgaatttgatatcaatgatgtag

SEQ ID NO: 34662 - DNA, 359 bp, Gossypium hirsutum
  Clone ID: LIB3147-004-Q1-K1-A7
cgttactgtagcaaggagagtggtgatgaagcagtggcctcctctatcatcggcttcgccgattgaagtaatggcgtcgccgcgggcaccgaccctttgcggccgaggagacaagaagacgaagaagggaagagattcaaaggatcgtacgggaacgccagacccaagaaggagaagaagattgaacgtatcaaagacaaggtcgaagttcccaggtccaccccttggcctctccccttcaagctcatctgattatttttcaaaatctatgcgttttttcttttttttaatagctgtaataataaagctaaaatttttgtacaattttcagggtttttattattagtagctttgctttt

SEQ ID NO: 34663 - DNA, 376 bp, Gossypium hirsutum
  Clone ID: LIB3147-004-Q1-K1-B10
cccacgcgtccgctaacacgtgctgttaaatttgctgtaatcctaacgagataccagcgcgtgtgtccttgatgtgattttgcttatcatgagctgagatgcttgtacagtaacagccaggtttggtcaagttgtaaaattccgaaaccatacccataaaacttgtaattgatcccataatatggtccggtgcagcaggggaccatctagtatctggtttcatgtttctgcaaaaaacagagcacatttcatgactttagtttgatgcttgtttgttttgctctgacattccccccattgttcctctaaaaggtgggaagatgtgctagttttaagttctgtatacttaagcttcattatgattgtaaatttcttg

SEQ ID NO: 34664 - DNA, 356 bp, Gossypium hirsutum
  Clone ID: LIB3147-004-Q1-K1-B2
cccacgcgtccgcccacgcgtccgcccacgcgtccgcccacgcgtccgaagaaaaggcccgaggattccaaaacatgtccctactttcaccaacttgatgctttatatagagaaaagaacaaacatgacagctcctccactcaattcaaaccccagaactcagtcccattaatggtacgcccagagcagcaatggccccctcttcctccttccgatcccgaccatcaacaccgtcgcgaccccgaagacttagaaagctatcaaaatcatcaggacgaagacggcaatgacgagtatgaagatgaagatgaagatgaaaggggtgagtatgaaattgtagccagcaaaccagtgtc

SEQ ID NO: 34665 - DNA, 291 bp, Gossypium hirsutum
  Clone ID: LIB3147-004-Q1-K1-B3
cgacggcgtgttgcctctaccagagaactgtagggtttaagaatgatccgaagcttggtgttttgtacgactgacttcccttctcttcgtgattctggttatttcggtttgctgtcgtgtttgagacggatcggacatgcggactttgttatgtaaggctgaacttttgtaatttagttgcttctgggtttgttaggttccaatttttgtgtaaattttggtgtcttaaagaacttgattgaaataaaataagaacccaccttcttggtttctaaaaaaaatagctttact

SEQ ID NO: 34666 - DNA, 393 bp, Gossypium hirsutum
  Clone ID: LIB3147-004-Q1-K1-B6
attggggtcagtcgctactgatgtcacatgaaaggagctacgcttgaagagaccgatggcgatggcaatcgctgtggagacaggatacgagccgtgagagaggaacgaaatgaggcactgaggatctgtcagttgcgcaactgacatctcgaatctctcatatatctagagacttgagtaaaatgagctgaacgtgtgttagaatacatgatcagagggtcactcgctagacatgctctgtgggattgggaaggattacgttccactgtcttggatacataggttacacttatgtatcggtgcaacacgtggattacattaccttcacaccgttgctaagcatgctgtaatcgaccgacacatcaacagctgcaacatacttttagatgaaga

SEQ ID NO: 34667 - DNA, 293 bp, Gossypium hirsutum
  Clone ID: LIB3147-004-Q1-K1-C2
cccacgcgtccggtgagatgcaaataaaggtagtaaaataactgaaaatttcccgttaataggggactcctagttttccttcagtttaggtttttaggacaggccttgcctgtctgtcaataaacaaaattacttcaagaaatttagctttttttttttctcattgacctaatggggatatttcgattggcggactttgtcgatttgtattactgattagacattaaattattggactttgttgaattatagtacacaataaagcaccttgagaattcaaggttatcttttct

SEQ ID NO: 34668 - DNA, 343 bp, Gossypium hirsutum
  Clone ID: LIB3147-004-Q1-K1-C5
aacgtcatcgcgtagggatgctctcatatggaggtgagttgtagctttcatgccaatggcttgggtctctccaaaagattgtccgaccataaggagaatatttgaagctcaaaggtgtagcgtactctttcttgcagagagacagattaatacggacatgtcacaatcttctggaagaggtaatcactctaactatttgaaccctaccaatgaacaatatgctggcttgccatcttaaggctgcattacattcaacggtgaagcagaaatgaaggctctggtcattggacaaaatgctactgatgtaatacctattcgtatatttgaccaggggcaacagaac

SEQ ID NO: 34669 - DNA, 260 bp, Gossypium hirsutum
  Clone ID: LIB3147-004-Q1-K1-C8
ctttaccttacgcgaccggaatgccatcgtactgactgtcgtatacttcagcattgccacggacgccatacttgggagctgaactacacctgaacgtgctggcggccagccatcaagctggacgcattggcagcgagtcatcctacggggtgataaatactgaccaacacgtggtcggaagactctcagcaccgactacctcacaggctgtctcttacgacggtaggggcaacccatacggctgaacatatgagaacaaa

SEQ ID NO: 34670 - DNA, 221 bp, Gossypium hirsutum
  Clone ID: LIB3147-004-Q1-K1-C9
tcgaccaatatattataggccccaatttgatttccgtggactgacaaattttgcttgaattgtttcttacaaatcatcggtgaaccatgcttcttaaatggatgtttggagctggagactggattgtgctgcttgttttatttattttatattcaaggttcttgataacattaatgttaatatctattattgtactatattatttttatataaaatttatt

SEQ ID NO: 34671 - DNA, 321 bp, Gossypium hirsutum
  Clone ID: LIB3147-004-Q1-K1-D7
gatccccacaaccctcccaagagcaacaggtaaaatttaacacgaattctgttgcatgcatgttggcatcgatttcacagctcttacctgttccatgtctaatagtggaggggacaccgttaggaggggatttttttttcagtcggatggtggggtggcatgctgaaagtctttgtacaataatctcaaaatgtgctcattgtaggccatttattcggcatgcaatacaacttgctatcattttatgcttccacctagactgtatcacaagtgctattcagaggccttgttgtatatatatagagatgattgtttctgttt

SEQ ID NO: 34672 - DNA, 274 bp, Gossypium hirsutum
  Clone ID: LIB3147-004-Q1-K1-E11
tcaaatacttgttcacactttgcgtgtcggatgctgagaaagcttaccagcttaaacaatccctttcttcaagttttagtggtcaagacctgttaaaatattgcaatctcaaggttgtcacccgatttatatgtgatgaaagctatattttaattttgggcttaatggatttcttggcattctgcaacaatgaaactcaaatttctgtaattggatctatgtttttttgttgattaatgattttaatgatatatgcaccttttaatttccatga

SEQ ID NO: 34673 - DNA, 366 bp, Gossypium hirsutum
  Clone ID: LIB3147-004-Q1-K1-E12
cccactccttcgaaatctttcaatgtattattcactggtggactgaaaaggaagctggaaggtttgcttggagtacctaaaagtgatgatgattgacaggatgaaattgatggtggtgctagaaatccaccatgtgtacaatgttgcttgaaatctcattccattaaacggctccgctggatatttgataccaagcttgttggttaacaagtttgactgtacttgctttgtatgtaactaggtttgttcaagctaaggactaacaaggaattaagttaagattgattaggcctttacttttgcacttgctggctatgagaataatctgtatgacattagtgactccattatgtgtatatatttaaa

SEQ ID NO: 34674 - DNA, 434 bp, Gossypium hirsutum
  Clone ID: LIB3147-004-Q1-K1-E9
caggcgtcctctgaacaagatgcttcagttttaacaaacgatgttcatgaatattgagcgtattttaccctaaatccctgagtcttactcttccttcattactgtcgtatggatcatccatgagctatagaatcatggtacaaggttacatgcacaggacataatcaagactttaaggcaagctggagtgacatttactgaatcttctgcatagattgtagtatcaatgcatgatgtattcaatcttaaaggccttctgaattaacacccttattttcttcctataaaaaggaaaacttttttttctgaataaatttaatttggacatttttcatataattccattgcttttcttttgtacaaaactctttttaaactaaataacgaatgaaatttcttacacattattcaattatacctgatttgttatatac

SEQ ID NO: 34675 - DNA, 199 bp, Gossypium hirsutum
  Clone ID: LIB3147-004-Q1-K1-F8
ccttgaaccaactgctacatgctagccttttgaggagtacatattatagaaagaactaaggaaaggaaaagaaaggccttataaagagcgtcaaaaaggaaaaagaaaaacagttcatgaattgaaatttaaataataatttaatttttttattgttttcaattcagtattttcttctaattcgattagttgaatttct

SEQ ID NO: 34676 - DNA, 359 bp, Gossypium hirsutum
  Clone ID: LIB3147-004-Q1-K1-G1
cccacgcgtccgcccacgcgtccgacaggagaaaagatatttaacatgatttatatgctattcaacattggtcttacagcctacacaatcggtaacatgactaacctggtcgttcatgctgctgtcagaacctttgccatgagagatgctctgaatgagttattgcgttatgcaagcaaaaatagactcccagaagggttgagagaacaaatgatggcacacatgcagctcaagttcaagacagcagagttacaacaagaagaagtgctacaggacctgcctaaggctataagatccagcattgcccaacaccttttccgtagaactgtcgagaaaagctacctattcaatggagtctc

SEQ ID NO: 34677 - DNA, 279 bp, Gossypium hirsutum
  Clone ID: LIB3147-004-Q1-K1-G3
ttcgacctacgacgtacgcgtacgcgtacgcctacgccttcagacatgcttcatgttcatagcactgaacctatatctatggcccgggagctatcacagcctccacagtctggggcttaactgaactagtcccctattcagacaaagaaaacctctatcatgacatatgcatagaccctgatactaagatgatctagcaagattaaacacgcatcaagaagtggagaataagaagggccttacatgacgaataacatccctatctgccaaagcatatcc

SEQ ID NO: 34678 - DNA, 383 bp, Gossypium hirsutum
  Clone ID: LIB3147-004-Q1-K1-H2
accacgcgttcgtgagcactatcatgagctcttcatgtatgcttcagagactgggtatacgcctcgggaaatattcggctgctgtgctgcctacatagtgactgatatcggcatctgacggattatatcacgcaatggtacatgatatacatgacatgatgctgtttatggttttgtttcaattgaggcagcccttttgactcatctccaggctcagctcatctctatatgttgtggactccattctacacacgacactgaacacgcagatgaccactgagacaccctggcaacatggaacgttacataaatttttatgcaggattggctgcgctctctttggcgtacgctccaggacacccaacgcgatcaaacatgctatc

SEQ ID NO: 34679 - DNA, 442 bp, Gossypium hirsutum
  Clone ID: LIB3147-004-Q1-K1-H7
ggagaatatcacaaggaaggaagaaccctctcctcaaacagtgtcaactattttacatgatgagagaaaaaaagaagtaaataaagttattggtgaacaacattgtggcgacattgaatcgaagacttcagtaaaggcttcaaccccgcaaatgcaaactaagctgcctgcaattccatctttctctcagtttgtaaacagcagaaagtcaaaagagatgcagcaaccgaaggcatcagaggaaaaggagcatcaccattcacccaatatacatacgaagaagagaatgaagttgcagtaggggtgagtgtcccaagccttgtgtgttattttcagttcaattggttcggtaggactgcaaaatcccaatggttccagtttgcttataatatgtgcttttgacttttccctgtctcagaatgcatcttttttttggtttctt

SEQ ID NO: 34680 - DNA, 390 bp, Gossypium hirsutum
  Clone ID: LIB3147-005-Q1-K1-A2
ggctaatcctggtttgggaatttgaattagagtacttcaatgctactgaatttgagtcaaattttagaaaagataaaaacagattgccagtatgtatgatattgtgtgttattatgcttagaacttttgcattttattttcagcattacatcatcatcagagtctttctagaggtaactgaagctttacatactataggaataaaatccttgtataaagggaaatttttaggatggttgaaaaataaaaatatggttaaaaatttcctggggaacatttgttttgcctagaaggctattacattaaaaaaaaaaagggcgggcggtttttatggttccagcttaacttcccctgcattccaaggcataacttttttattggggcccctaa

SEQ ID NO: 34681 - DNA, 136 bp, Gossypium hirsutum
  Clone ID: LIB3147-005-Q1-K1-A8
gaagtccggaattgaccgacgcatccacgcgtacggccagacgtacggaaaaagtgggccctaccttatttgatgatactactggcccggacttatttgagaaccttatggatgctgctgaggagggaccaagcct

SEQ ID NO: 34682 - DNA, 153 bp, Gossypium hirsutum
  Clone ID: LIB3147-005-Q1-K1-C1
agtatttctgcaaatcttaccgttttttaaccgttcatcgaataatcgtagctcatacgggggtggtggacaaacggatcctgtagtccattgagcacctacagagccaaacgatatcaatggctgatgttgaaagaggcgacttctctgagc

SEQ ID NO: 34683 - DNA, 397 bp, Gossypium hirsutum
  Clone ID: LIB3147-005-Q1-K1-C10
cccacgcgtccgagtgtcgtatcatgtactattggtataagaagcagaaggacttacctgggtcggagatgggaggtttcactcgtattttacactctggaaatcctgacaatttgatgaacgagattcctactgtcatagtcgatcctcttccagcagggcttgatcggggatacatcgtcttaaatcgaccatgggcttttgtgcaatggctggaaaaggctacaattgaagaagaatacgtattgatggcagagcctgaccacatttttgtcactcccctacctaatctagcacatggaggatacccggctgcattcccctttttctacattaagccggatcagaacgaaaagttgttaaggaagtttttcccggaggagatgggaccggtgac

SEQ ID NO: 34684 - DNA, 429 bp, Gossypium hirsutum
  Clone ID: LIB3147-005-Q1-K1-C11
cccacgcgtccgcagcatgcacagggttagttattggcggaaaggtgcatgtgttgcacaagggattatctaaagtgcaagtcctggacaacgtgtgctctgggtggacagtggaggattacggttggctccagggtccaatggcagttgtacagggagccctatatgtgatgagccatggacttattttcaagcaagaaaaggaagtgagaaaggtcgtaacctcttcttcagagtttcgcaggagaatcgggtttgcaatgacaggagtgagagatgaaatttacgtgatcggaggcgtaattggcccggatcgatttaattgggatatcaaacccatgtctgttgttgatatcttgacagttgggggtgatagacctacatggcgtcaggctgctccaatgacaatgtgccgaggaacaatttttg

SEQ ID NO: 34685 - DNA, 454 bp, Gossypium hirsutum
  Clone ID: LIB3147-005-Q1-K1-D11
accttgccccaaacaattatcatttcgtttgctgttcaggatgtgcagcaaattactgagcagtggagcttcatccctcgtgtggtcaaggagcttgccttcttagatgccagtaaccatggctcactcaccaaggaagatcttttgagagaggccaaggtatgcaagcaaatatacgaggatgaattaagccggataaacagtggttctttgaaaagaaaaaggccaaagactgatggaggtgaagaaggcaacaagggtgaaaccaaagccatttttgcatcaggttatgacagtgatgaaacaatcaagatgacggaggaagaaatcgagcttgcttataaaaatttcaattctggaactttgtaacttgagctttatgacgatgggctgaaaacaccggttttatgatataagctagtctgacttttggcctatgcattacagtacaaag

SEQ ID NO: 34686 - DNA, 422 bp, Gossypium hirsutum
  Clone ID: LIB3147-005-Q1-K1-D6
ctggattactttcttatgggatttggcttatacaggtcgactctaagtgttagccggagaagcccattgagtccaacttgtatctccccggagcttctttcaccggaaagcatgggcttgaagttgaaaccgattaaaacccggatttcttaggaagtccaagagaagatgacagagaaagggcaagatcagcttcttcttctttttttgtttataataatataatatattatgtaagggtgtttatgagcattactagggatgtagatagagaaaggaagtagagagagaagataaaaaggagattattgtcaattctttaattagttgagttgaagtcattatcaatatctgtgaatcatgggaataattattttacaagagaaaacgctaataatggtatgctttacttttttcaaaaa

SEQ ID NO: 34687 - DNA, 318 bp, Gossypium hirsutum
  Clone ID: LIB3147-005-Q1-K1-D9
cccacgcgtccgcccacgcgtccgcggacgcgtgggcggacgcgtgggctgtcgcgtagagagacccgtgcttagtgaacagagaccagctgacatgtacacattgagcgcatattttttagcgaggactacaagcgaccttccacttgatctaatattaccagtacttttccttctggtagtctacttcatggctggcctgagactgagtgccggccccttttttctcagcatgcttacggtttttctctgcatcattgccgcccagggtcttggactagccattggtgccacactaatggacttaaagagggctac

SEQ ID NO: 34688 - DNA, 432 bp, Gossypium hirsutum
  Clone ID: LIB3147-005-Q1-K1-E11
cccacgcgtccgaatccatcggatccattgaatggagaagctgctgcacttatgatgcgtgatcgtacatcttatgaacaaagagtgaaagagtattgtgagaagtatgccaagccagaagacattggagcagcccctgaagagaagtccagtgatgaagaactaagcgatgacgaatatgctgcctcggatgacgaggaaatagctggaaaagctgacccttaagctgatatgtgcctttagagaaaaaattcccttgtgttgtacataatttaaaacctgacaaacaacttgtggggggggggtatggaaaaattcctgcctcccccctctttgtgtctttattttcaatggatgatgatgtgtaaataaaaaatcccacttgctgtttaacatttgaaaaatattcattcacagtttgcaatttgcatc

SEQ ID NO: 34689 - DNA, 245 bp, Gossypium hirsutum
  Clone ID: LIB3147-005-Q1-K1-E12
attttctcctttttatctttaaaacacgcacccaaaaaaataaaaccctttgaaaaccaaagaaggaagaagaagatggtcgggcaaagcttaacgtaaaataataacttggttgggggaaatcgaaggaaaccttttttttgccgccgttttattggccaacgacggcagcgttgggccccaaagcgccattttccttaagttcaggcccgagaaaattaaggccttcttgattgactttattg

SEQ ID NO: 34690 - DNA, 199 bp, Gossypium hirsutum
  unsure (1)..(199): unsure at all n locations
  Clone ID: LIB3147-005-Q1-K1-E3
cggcgcgtgggccaaaatgaacctcgctcttgaatggggtttttcaaaaaaaaaaaaaaaaaaaaaaaaaaaaaaaaaaaaaaaaaaaaaagggcggncaatataaaagatccaaaggggggggcccttttataggaaccaaattttcttcccctggcgtgccccaaattaatttttttgtggggcaacttaaatcaat

SEQ ID NO: 34691 - DNA, 227 bp, Gossypium hirsutum
  Clone ID: LIB3147-005-Q1-K1-E4
ggacatgtatgtatagcataggtattctatttctaagttcagtttagtattttaattgtttgccaaaagtaaataattgtgcctgctgggtcagacaagggatatacacttgtggttctcttttgtggttggatttgtacagcactggatttgatcactttgcactttggatggacattgtgtgtaaacttttatacaaattaccaaatgatactcattttctaatt

SEQ ID NO: 34692 - DNA, 341 bp, Gossypium hirsutum
  Clone ID: LIB3147-005-Q1-K1-E6
tcaaaatcccgctcactcttacccgctcgttactccctccttttctcatctatgtcgcttgccctaaatctcccaaataaaatttagctacttttcttttctcgatctggaataaaagaaaaaaagaaactgaaaaaggcacaaagggtttttggaagcaaagcagagcgaagaactgtgtgaagccagagctatcgagcatgttcgagttttagcacatgaaatcgatggtcgtcaagaaaaggctactgaacaagatgctgttgaaatcttgatgtatgaaagtttacgttttgcttacggcttgcttgaggggtggacctttgtgacttctttcccct

SEQ ID NO: 34693 - DNA, 368 bp, Gossypium hirsutum
  unsure (1)..(368): unsure at all n locations
  Clone ID: LIB3147-005-Q1-K1-F4
cccacgcgtccgcaaaaccatggcaggttagaagcaatagcatgggtggaccacctagtcttactaaaatccctcaactcgatttgcatcatcgtcatcccatgcctgttgattgcagtaattcgcagacaaatgtggcgcctgatttggagcttacacttgccgccccaaggccggctttagaagaaaacaagtcatccccaacaacaacaactctccttattagacccattagtgttacttgacaacttttcagttcatgctgataaagatgaacacagtactatagtaatcagtagtaattatttaattaattaatccttgtaatcataattagtagtatncctttcatcaatcgcccttgatgg

SEQ ID NO: 34694 - DNA, 296 bp, Gossypium hirsutum
  Clone ID: LIB3147-005-Q1-K1-F7
gggaaatcagctgctcgtattcaagatcatcttcggcctaatggtgcacatagatggcataactacatgaagacaccaaatgagatcaaattggatgaggctgctgttctgcattatacataccccaaattttctgatctaacttcaaggcacgatcgatgtggctgcaagcctacaaaggaggatgttaaaagatgtttcatgttagagtttgatagagctgcattcataattgcgtcaactgcaacggaggaggaaatgcttcgctggtaccgggagcatgtagtgtggactga

SEQ ID NO: 34695 - DNA, 350 bp, Gossypium hirsutum
  Clone ID: LIB3147-005-Q1-K1-G11
cccacgcgtccgggtcttgatgcctagagaattgttcaaggcagcccctactcctgccccggcaccagccccagaggaggcagcggatgcaccaaaagcatccaaatcaaaatctaagtcaaaatcgaagtcgaagtcagccccaacacctgaatctgatgcaccagcggattcgccggacgatgatccagctgatcagacagcagacgataatgctgcattgagttttaaaggtggaaggtttgttgctgttggattgaacttcttgctagtgtttttgttgctctaaggtttctagtttcattttttgttgtttcattttcattttcattttaaattatatagatact

SEQ ID NO: 34696 - DNA, 193 bp, Gossypium hirsutum
  unsure (1)..(193): unsure at all n locations
  Clone ID: LIB3147-005-Q1-K1-G7
atcatgntttgaccttgcatggatgaaccggcagtcttactcatctttgcagactaatctactcttgtgaaaagattgtggttggtgcattcacttgtccgctctttattgaaacttcctttgggaatcggatgcttgatgtattagcacatgagttgcgattgctatcatgattaaaacgagctctgtgatt

SEQ ID NO: 34697 - DNA, 419 bp, Gossypium hirsutum
  Clone ID: LIB3147-005-Q1-K1-H1
agcatttacaggcattctcaggtcatcaaaagcctgtgtcatgtttaagttttaggcaaggtactacagatcttttttctggatcgtttgatcgaacaatcaagtattggaacatggaagaccgagcttacattgacacaatatgtggtcatgaaagtgaagtgttgacccttgattgcctaaggaaagaacgagtattgacagttggccctgatcaatgtatgatgtggtttaaggttctcgaccagcctgaatgggtttttcgtccccaaccaacatcttgggagtgctgttgcttaattaacaaggataaattttaatttgcctcggccaatggaagtttccacctttggaccgttttaaaaaaaaaaccgtgttttttggggaaaatggctattcctttgttgccggttggccaa

SEQ ID NO: 34698 - DNA, 313 bp, Gossypium hirsutum
  Clone ID: LIB3147-005-Q1-K1-H6
acggtcacaggcctttgctaagtcttgctcgggcatgattgcagagaccaaacatacctgttcttgatgaagcaaccgcgggtgacgatgtcttaactgatgctcttattcagaaaacaattcgggaagaaatcacattgtgtaccatgctcatcattgttcacatacctaatacagtaactgactgtacatcgcttctcttgcttgagtctggcatggtgctggaatatgatacgccagacgaactatggctaaatgaaaggtgttgtttatgcgaagggctcaaaccacaggggatgctaatgcacaatac

SEQ ID NO: 34699 - DNA, 158 bp, Gossypium hirsutum
  Clone ID: LIB3147-005-Q1-K1-H8
ttccggaattcccccatccacccacgcagtccgtgtcaagtgctgtcttccaacgcaattggattcattgaagtgtgtggggtccgggatgagaagagttcctccacctcctcattttcagtgtttccattgtgtgataaaaatctgctatcttcttc

SEQ ID NO: 34700 - DNA, 349 bp, Gossypium hirsutum
  Clone ID: LIB3147-005-Q1-K1-H9
cccacgcgtccggcttgtttctcaaaacattcgcagtggccgcctgagagctttcgcttttcgccgggcttgagagcttgtgctgcttttatccttccttggatgtctgagaccttttattatatctttataattgtttcacattttaaatataatttgtgattgaaatccagttatattcggtgagaaggagtttttaaattgatgtatatgtgttgatgatgacaaattcaaaggcttgtttctcaaaaacattcgcagtggccgcctaagagctatcgccttcgccaggcttgagagattgtccgatttatataataccgaaacccaaagaataacctgattcgag

SEQ ID NO: 34701 - DNA, 442 bp, Gossypium hirsutum
  unsure (1)..(442): unsure at all n locations
  Clone ID: LIB3147-006-Q1-K1-A1
cccacgcgtccgaagtaatcgcggatcccgaagcagattcagctgaagatatcttgctgaaacagttcatgaagaaggatctggagaaggtattggacagtctgagtccaagggaaaagcaagtgattagatggaggttcggaatggaagatggaaggatgaaaacattgcaagaaatctgggagtcgatgggtgtaagcagggaaagaatccggcaaattgagctatgcgcttttcggaaattgaagaacaaaaggaggacaaaacatctacagcaatatttactttcatatgcctcatagatacttcatttctttccttctagttttcctttttcattcctacaagntcagagaaaacatgcaattttttttactgtatcaaacataaaatccaggtactaataacatttttttctcattaattatcaaatgtagatgaa

SEQ ID NO: 34702 - DNA, 214 bp, Gossypium hirsutum
  unsure (1)..(214): unsure at all n locations
  Clone ID: LIB3147-006-Q1-K1-A3
gacgcacacgcgtcgcaggtatgcagtagcgcataacctatatacccaacgactttatgaggttgaaatcacttgtgcctgcaaataacaaggctgacagggttctatactagatgtcacgatagaatacttacaaaccctncaaagaaaggttgcggaattggaatcttgcagaagtcagaagcagaacgaaaatgagcgaacatcaatacta

SEQ ID NO: 34703 - DNA, 201 bp, Gossypium hirsutum
  unsure (1)..(201): unsure at all n locations
  Clone ID: LIB3147-006-Q1-K1-A4
gaattccggtcaccacgcgtccgtgagtgataatggtgaaattacatcccgggtatatggaatggtcaaaatggaaactaaccttaaagggatctaattttggagcaataataatagtccccaanaaaaaacaaaaaaaaaaaaacaaaaaaaaaaaagaaagagagcagaaaaaaaaaaaaaaaaaaaaattgggaaggg

SEQ ID NO: 34704 - DNA, 392 bp, Gossypium hirsutum
  Clone ID: LIB3147-006-Q1-K1-B12
actacgccttctacttgactcatacatttttctaaccttattcactcaaactgtgcaaagggataaaagatcgggggacttttcccttcttctcctcattgacttagcctaccaatgggcacttctcccaactgatgcaagggttttcctgtcacaaatccatatattccatcagtcatgagttattatccacatctgttcgatggtgtgcacggacgaatgtttttcctgccccttatttttagtatttcttccccgttgcttttgcactaatctttgctaatacaatcttgcccttagctcatattttaaggttttttcttgaaaaaaaagacctttatctttttttcagcatgcatgtcaaatttttaataatgtttctactaattact

SEQ ID NO: 34705 - DNA, 394 bp, Gossypium hirsutum
  Clone ID: LIB3147-006-Q1-K1-B3
cggacgcgtgggcggacgcgtggggtggacaagtaacggataagtggaggaacttcatgaaagatcagataaaacgagcgaggatgttcttcgacgaggcagaaaagggtgtttccgagctaaatgcggcaagcagatggccggtgtgggcatcattgttgctgtatcgacagatattagacgtcattgaagaaaatgattataacaatttcagcaaaagagcgtatgtatggaaagtaaagaaatttgcttcactacctgtggcatatggaagagcacttatgggcacttccaaattgttctgaagttagtcatttttactttaatttcccctcttcttttttttttttttttagttttatccataaaatttgtttttgatttgttgcaatgc

SEQ ID NO: 34706 - DNA, 283 bp, Gossypium hirsutum
  Clone ID: LIB3147-006-Q1-K1-B9
cccacgcgtacaacctgaatctggtacctgtagtgcatataacattcagagagctttaggacatcgctagtgtggttattaaaagcatgcttagatgatccatatggcttattaattttcaccttccaaattttttgtttcagcaaatatccattgattgaggagtttcctgagctcatgacataccacacttatgaggattaagaacataactttgtcatgcgctgcttaaacttgttttaaactcttttacccacaatcccttaaacgaagatgtgttttt

SEQ ID NO: 34707 - DNA, 374 bp, Gossypium hirsutum
  unsure (1)..(374): unsure at all n locations
  Clone ID: LIB3147-006-Q1-K1-C1
cccacgcgtncgcccacgcctnccggcgaagataaggtcaagaaagtcacactaaaaggtggtgaaaccggcatctcctttgctttgcagggagttcggttggttaaggaatggcttcaataatactggcttacttggaataaggtgatatgtgggcttgttccaatcttcagctttcctgctcaattcatgacttaaaggcatggcattcctgggcggtgggcaggtttagtctgcttcagtattgcaacaccttgaggatgggaatgggaaagtggaactattggctattcggccactatttcttccagcagaacttgcaattgttaacaatttgataccaattgtaaatttcaaatatatttatttatttt

SEQ ID NO: 34708 - DNA, 347 bp, Gossypium hirsutum
  Clone ID: LIB3147-006-Q1-K1-C11
cgcgagcgccgcccttttttttttttttttttttttttttttttttttttttagaaagagggggagatggaaaggaatgttttaaaaaaaacaaacaaggagggtaaagggccaaaagcaattaacaaaatgcgaacagcagcaaagaagacaaaaaccagaaagctaaagaaatgagggggcggcccatgaccaacgacttaacaggtgccgagaaagagaggcgaatgacacgcgccttcgagcgatgcacaaaggacggcgggagcacaaggacacgcagaggaaacggacaatggccagcgccatgatgcccgtagagagaatgcctgccctctctttctcgt

SEQ ID NO: 34709 - DNA, 455 bp, Gossypium hirsutum
  unsure (1)..(455): unsure at all n locations
  Clone ID: LIB3147-006-Q1-K1-C8
cccacgcgtccggagaagcaattcgacaatgttgtagagagagttttgcaggaaacaaagagcggaaaagacgggctgcagaagacaacagagctaatcaggagtttcttcgagaaacatggaaaggatttcggcttgccaccatcagaatctaatgacgctgtgattcttctctacgatgcagtcttttctgaagtagaaaatgaagagagtgttgtgaaagcggacaatgaattcagggaatacatgaaagacgtcctcaagaagtttgcagaacagctngaagataatcccatctattgtgaccttgatgattaagggagtganttaacaatggatccggttcttcgggtgatggaggctgttcatatttatccggcatttgcttctccccacagggattcttatgtttataattatatgcttaaatatattggatgtatacctgatgatga

SEQ ID NO: 34710 - DNA, 448 bp, Gossypium hirsutum
  unsure (1)..(448): unsure at all n locations
  Clone ID: LIB3147-006-Q1-K1-C9
gtggcactcggagttcatttcacggtctccggagtttcaatcaccggcctttacgttgccatcaagaacaacgttgacgttgaatctttgttcgacaaattacatctcccaggcttttccaatgatcaaaagaaccaaaatccaccatcacaatcgacggaatcagataggtttttgattgaagaaccgatcggggagaaatcaacggcggtggtcggtgagaagcagagaaatcggacggctgagcttgctgcttctaccggtggagcccttgcattggctgtgctttgtaacaaggcattgatccctgttagggttccgatcaccgtcgcgcttacgcctccgatcgcaaggtttttggctaagaggaggataattaagaatagtgtatgattntttacaacgaatttgcagtaattatttacttggaaatcattagaatagtact

SEQ ID NO: 34711 - DNA, 348 bp, Gossypium hirsutum
  Clone ID: LIB3147-006-Q1-K1-D7
agctaataaaggagcttgaagatgaccaacctccgaatgttcagaatcagaaccagacccagaaccatggtcatggtgtatattctgaaccggaagtctcataggaaatcatttcccctctcttgatgcaagcaaattattttcgaaatcctttatttttatatgttaaacgttttttctttttgttattttctcatattaacgattcctccccttctgaatcccacagcacagttttatgttggtatatttatgttttgtattcaagggagggacttatttacacctgtgtaaaatcaaagagttctacagtttctttaacccttgaatcaagattcaatctactgt

SEQ ID NO: 34712 - DNA, 366 bp, Gossypium hirsutum
  Clone ID: LIB3147-006-Q1-K1-E11
ccgtcgatgaggtcggcggtcctggcaaaagctacgatgatctcgctgcttctttgcctaccgatgactgccgttacgctgtctttgatttcgattttgtcaccgttgataactgtcggaaaagcaagatcttcttcattgcatggtccgtcgccttttctacttataccgtcactactgtacattttcttgtaggaactttattatttatacaaggataacatgttatatggcatacataaagaacaataatgaagagtattattttctttagtgggttaataataaccaaataattgaggtttatataagaatggtcgggaacatgtattaataatttatgaattggaatccaagtatctcttt

SEQ ID NO: 34713 - DNA, 233 bp, Gossypium hirsutum
  Clone ID: LIB3147-006-Q1-K1-E2
tcgcccacgcgttcgtgcacgcctttgctatatttccaagcttaaggcccttattttgttagacaagatttcttcagaatggctttaacccacaactcatttcaagtgaagattatggtgggtttcttagccatcatgcttctcatgttctcagccgcagctgctctacccatacccctcttaaccttgggggtcggaagcttcttcaatattataacattttcgactcatat

SEQ ID NO: 34714 - DNA, 311 bp, Gossypium hirsutum
  Clone ID: LIB3147-006-Q1-K1-F10
aaaaaaatgtaccatatgtaccccacgcgtgtgctgaagctcaaccaaaaaaccctagcacaagtgtactaattccccatttatcacatcctttacctcaaataccctttcttttaaaaccatatgatttgactaattaaatgtcaccttcttcatgaatctgcttattgctttcaaattatcttcagtcccattatctgacattggcacagacccacgtccacttttgcatttattgataaagcggtgaataacgaaaattccgttttcaaaggaaaaaaacggtatcagagattgaattgatcaccgag

SEQ ID NO: 34715 - DNA, 332 bp, Gossypium hirsutum
  unsure (1)..(332): unsure at all n locations
  Clone ID: LIB3147-006-Q1-K1-F2
gccaccaaaaagggtcttacaaaactttctttatgctccagtgaatcatcaggaggggaagtctgtacttgtaaagcgtttcaaatgtcccgcagaatagcacacgtccacaagagatgagtagaagattccagttcagtcttgcacaaagggcatactacttcttcacacaatgttcgtcgtgccagatttccgtagtgaggcgccagattatggatcaaccgccatacatgtattttatttttgcaggaatatctaaagtccatagccccttatagaaatttttttactcctcggattcagaggataagttagatntattttgtaacaaa

SEQ ID NO: 34716 - DNA, 229 bp, Gossypium hirsutum
  unsure (1)..(229): unsure at all n locations
  Clone ID: LIB3147-006-Q1-K1-F5
cctatggtaggaaaattactaatgaacaaaattcctgngttacatgatgctcatcatatccacatggaccccaaagccaaaaacctgcctaaaacttcaagtttcatacgcgcgtgcagtgagtccttgggtaatgagagagggccatttgcaaggatggaaaaggtggagaacgttggtggagaatggaagctgagaaaggattaccctgtcagagtaaaaattgatg

SEQ ID NO: 34717 - DNA, 388 bp, Gossypium hirsutum
  Clone ID: LIB3147-006-Q1-K1-G10
accaacgcgacctatcgctacctgctaacataacgtcaacaagagacactacgggtcgtgacccttctaatgtaatatagatgaggcatatacaaccttgtccaccactaatgatgtctgactcgccctttacacctatgcaacagctgatggagtgacctaaatatgtgagagggatcacaccccaccgttacttaaaacgagcgtacactgagaacacatgtgtggacattactgccactacagctacatgaatcttgctgaacaacggacgacggacctatagcccggaatacagcgatgggaacaactgatcgatacatctaactgtgggcaagaggacatggtttactcttgttgcggctatacacaacagcaaatgcgatgg

SEQ ID NO: 34718 - DNA, 171 bp, Gossypium hirsutum
  Clone ID: LIB3147-006-Q1-K1-G5
aaatttttcagggctaatctgcaggtttgggttcgagttatgtgagattgttatctttaattttagtatttttgttgatgatgtttgtaactgatagttcatggatgtattgtgatcagtgtagagacaattgttatgtcggttagaaaaaactaatattttgcaagcatc

SEQ ID NO: 34719 - DNA, 453 bp, Gossypium hirsutum
  unsure (1)..(453): unsure at all n locations
  Clone ID: LIB3147-006-Q1-K1-G6
cccacgcgtncgcccacgcgtncgtgcaaccgtcaaataacagtttcttacgcatataagagagacaccaaaggggagcgtcatggcaccccagcagagagggttttggctgcaagcaatccaagttcccagaagagcaggccccatactttgtttgcgagtggacctccaacacttccttctggtccccaggccaatggtggtataggagcaccggtgccgccacgaccttttccaaatggcactgttcctcctggctctatgccagtagcacggcctccaccccctcaaaatgttccctacccacaaatgcagcttgccggacagtcaccttggcagggtcagccacagcatcttggacaacaaattccacctccagtcatgcctcctcctccaatgcagtacagaccacctatgccaaacatgccaccaccaccacccccacaatcagta

SEQ ID NO: 34720 - DNA, 377 bp, Gossypium hirsutum
  Clone ID: LIB3147-006-Q1-K1-G9
gccaaccggacgacaaactcgattactggctgcatttatgccagtcaagctatcacttatgctgagactgctctcgaacatgggcttatgcacggaaaccaggacgaacgacgtcgggatctatgcacctacatgtaaacctacaggatgcccgagtgaatgctcgagtgacgactggaatggctatgagattggctaatacaattgcaccatctgggtgactacttgaccgactaatgatataactctcgatgaggccatcaggactggcactattaatgtatttgactacatttaaggctacatccaatgcaagcaccaaatcgagatgacagctgcggtgatcactgcagttataactggcgatggacccttct

SEQ ID NO: 34721 - DNA, 340 bp, Gossypium hirsutum
  Clone ID: LIB3147-006-Q1-K1-H1
ggatgagggatgaagtaatggaattcggtgggggcagggtctgtaattcctcgcttgagtccggccctttacaattgtaatgatctgaaatagcgacttctgattattctcgagtcttcattggacagactcgattgaaggatttcagctggagatgtatagagcctgagaagttatgataataaggcttgtgtgcactattaaatattgaccctttttgcaaaattgtgattttgtatatctttaaattaggaactatctaaatgcggtcacaaacttagtaatttatatagaaggtaacaatttcttatgaattctatatagatgtatcttgtttaaa

SEQ ID NO: 34722 - DNA, 374 bp, Gossypium hirsutum
  Clone ID: LIB3147-007-Q1-K1-A11
gttgagtagccgcaacaatgccaagttgagcttggttcaggcgacgaaggaatcgtccacggcgagtacgaatgatagtgctgctgttttttctggtgaaaatctccaccagatagctactaacggcaaggcaacaaacattgtatggcacaaaagttcagttggtaaagttcatcggcaagaggtgcttcagcaaaagggttgtgtcatatggattacaggtctcagtcgctcaagaaagagcactttggcgtgtgcactgtgtcaagccttgtattcaaggggaaagttggcttacatccttgatggtgataatgttcggcatggtttaaaccgggaccttagttttaaagcaaaagatcgggcagaaaaca

SEQ ID NO: 34723 - DNA, 385 bp, Gossypium hirsutum
  unsure (1)..(385): unsure at all n locations
  Clone ID: LIB3147-007-Q1-K1-B1
ccgttttgttcaagatagagaatgccattaaaaacttattcttcataagctctatgaatatttgttgttgtactagagaagggtcattgttcttaataagcagacataaacttcttcacgggatcatattcaaaatgcccaaannaaaaaaaaaaaaaaaaaaaaaaaaaaaaaaaaaaaaaaaaaaaaaaaaaattaaaaaaaaaaaaaaaaataaataaaaatntttaaaaaaattaaaaaaaaaaaaaaaaataaaaaaaataaaataaaaaaaaaaaaaatttaaaaaaaaataaaaaaaggggggggcccttttaaagaaacaaaattaaaatccgggggtttggaaaaaaaatctttttttttggggccccaaaataaa

SEQ ID NO: 34724 - DNA, 342 bp, Gossypium hirsutum
  Clone ID: LIB3147-007-Q1-K1-B11
cccacgcgtccgcgtacgcctcctttgccaccgcttgtcagccttgcaccaaaatggccaaggttatccctccaatgctcgttgactttgccgaaacttgcaaacaggacaacaaggagacagacacagaagcaagatagtagaaaatagtattgaaatcggctataagagccgaatgaaatgtaatgaaaaagggggccaaatcactgtaatcggggggttttctttctttttttttcttttggcttttcctgtaaagaagaactgcttcttctttttatccacattagaaatcaaaaaccgaatttaaatttgaaaaggttgaatccttgtgatttccaa

SEQ ID NO: 34725 - DNA, 136 bp, Gossypium hirsutum
  Clone ID: LIB3147-007-Q1-K1-C4
agctagtaaacaggactataatagcagcgcagtaaatttctgtaatcttttgttagaagccactgcggctgtaaactgctgattgcttttgaacttgtgtagctgattaaatgaatgtctgcacctgttttctttt

SEQ ID NO: 34726 - DNA, 246 bp, Gossypium hirsutum
  Clone ID: LIB3147-007-Q1-K1-C6
cccacgcgtccgattttgtaagatgttcatctatgttttccggattccagatgattaatcagtgtataaatactcaatccaatcaaattatacgttgaacttcattcaactttggttttgtaaatttctattcaatcatttatatgtttactcgatataaaaaaatattattaattgcaaagagatcaataaaaaaagatagacccaatgctaaaagtaggtaaaatctggaaagagaaatatatt

SEQ ID NO: 34727 - DNA, 382 bp, Gossypium hirsutum
  unsure (1)..(382): unsure at all n locations
  Clone ID: LIB3147-007-Q1-K1-D2
gttaaaacagaacctttaaagctgggtattacgtttgtaattctgttttcgattttgttaagttttagagttctccaatacttgaaggaaaagcttaaatatttttggaaattagtcannnnaaaaaaaaannnnnaaaaaaaaaaaaaaaaaaaaaaaaaaaaaaaaaaaaaaaaaaaaaaaaaaaaaaaaaaaaaaaaaaaaaaaaaaaaaaaaaaaaaaaaaaaataaaaaaaaaaaaaaataaaaaaaataaattttggggggggcctttttaaaaaaaaaaattttatttccggttgtttgaaaggtaaaaatttttttttagggcaacaaaaaaaaaattaacgggccgttttttaaaaaagtgtgaattgaaaaa

SEQ ID NO: 34728 - DNA, 447 bp, Gossypium hirsutum
  Clone ID: LIB3147-007-Q1-K1-D5
gaaaaacaagtggctagactttaaagcaaggttgaacaagattttgagcatgacagaaccttggactttaattctggatgatgcattagctaactcttttattgcaccagcaactgatgatattaaagatgaccatcaattaatttttgaggaatatgagagatcatgggaacaaaatgaagaactgggcctgaatgacatcgacacctcttcagctgatgctgcttacaactcaaccggggtgacatccaatgagaacccccaagaataaatgaactgcaaatgatgtgtgatcgaaagcaagcattggatcaaactgtgctgtgcaaaactattcatactggctgctggactgaaacaatgtattcctaaaagatttaaagccagactgcaattttgaggcttcatatatacttattacttgaaaattatactgtaaggaatttt

SEQ ID NO: 34729 - DNA, 342 bp, Gossypium hirsutum
  Clone ID: LIB3147-007-Q1-K1-E1
tgccaaaaaatggagtgacctgccacctttggtgatggctaactgtgtgaaggtaaacccggattcacctcaaaagcaagtcaggtttctcactctttctgatggcaagaagttgcttactccgcaacctcgcttgagaaccggtttcttttcaatactcgagtcctctatgttgactcctagtaccatcaacgaggcatgcacttctgtaggggttgcaaagtatggaaggccaattggattggatgaaaagatcaaggttgatgtaattgtcattggttcagttgctgtagatccgaagactggggctcgactcggcaagggagagggatttgctgaact

SEQ ID NO: 34730 - DNA, 317 bp, Gossypium hirsutum
  Clone ID: LIB3147-007-Q1-K1-E2
gccacgcgtccgccaacgcgtacgggttgacattagtcttgatgatctcactcgttctttagaagcgattgctatttaatgaccgactaaacttgcgctgaattccacggctactgcagatgttgagtcacctgagactgctctccgtgatgagaaacctgaagaactggtgctagatggataaactgcaacctatgaagctccctgtgttgcatactgcagcaaaacgctgtgctgaagaaccaaaggaagcagtgcactgtgcagccatcggagaaacacatgctccagacactgaaaccacaggtggaactgaa

SEQ ID NO: 34731 - DNA, 267 bp, Gossypium hirsutum
  Clone ID: LIB3147-007-Q1-K1-E8
cccacgcgtccgggaagatgacaaaagatcttgcgcttttgattcacggtcctaaggttagtaggtctcagtatctaaataccgaagagtttatcgaagcagtagccaaagagttgagtaacagaatgtatgtgaaaccaaagttgtaaagcatgcgtgtattgtgtgccctctcgtctatcttttaggcttatttataattgcgaataaataaggtctagtacatgtcctgcaatgcatgcccagtctataaattaataaacaaat

SEQ ID NO: 34732 - DNA, 270 bp, Gossypium hirsutum
  Clone ID: LIB3147-007-Q1-K1-F11
cccacgcgtccggccacccaccatctgaacgccatgctggtgccaataaattcttcttcaaacattaaagagctatattactgtgattcgaacatgaatgtcaaatacgaatatgttcttaatctacatggaaagacaagaaaaaggtggaagaaagtccatctcaagcacattgcatattgcagaatttgaaactgaattgcttatgtgattgaattcagatgtctttataaattctgggttcttggtccatacaaaagtttactttcc

SEQ ID NO: 34733 - DNA, 218 bp, Gossypium hirsutum
  unsure (1)..(218): unsure at all n locations
  Clone ID: LIB3147-007-Q1-K1-F7
agccttcggccacgccttcggtttggtagtgaaggtatattttaaagagcagngtgttaaaatgttgcgagaatgttagttgcaatattgaatgagttgagttaaatgagggaatcaccaacaaactgaccgacaagactcttgaaactgcaacgtacaaagaatgttgtcttccatgttgctgcttgtagaaatataaccctatgatgttcactttt

SEQ ID NO: 34734 - DNA, 325 bp, Gossypium hirsutum
  unsure (1)..(325): unsure at all n locations
  Clone ID: LIB3147-007-Q1-K1-F8
ggcggttgtctctaaatgctaatcaacatggcaacagatctgcaggaaaagacgggaagagagacagtatgaagttggcagctccagccaacatcgttacggtttcaaaagaagacgctgcctcccacgtttcgagaacggattcggttccggcatcaccatgagagatttaacaaccccttttgtcttgttattaccagattgtttatttagtgtattggtttgaatccaagagctgttgtttgtaagggatatagttagtgactggattgtatactatatactgttatatttgcttaataatgtgatataaatatttagcnna

SEQ ID NO: 34735 - DNA, 430 bp, Gossypium hirsutum
  Clone ID: LIB3147-007-Q1-K1-H1
ggctgaatatcgagctgcctttttggggatgaaatatgctcttagaaaggggttcaaacatgttcgtgtacaaggggactctaaccttgtctgtatgcaggttcagggtcggtggaaaattaaaagtcagaatttggttgagttaaataaagtggcaaaggatctcaaggataagttcatatcattccagatcaatcatgttgacagggaatttaactccgaagctgatgctcttgcaaaccaagctgttaatctcatgaatggtcaggttcaagaggactggctcttgaagtaaacccaagtttaggccaacactatggaagatgcctacgaagtactcgaggttttaactggttcataacatttgtcaatgccctagcttgcacagacatgtttttcgttcattaacctttaatgtaagttttatgat

SEQ ID NO: 34736 - DNA, 368 bp, Gossypium hirsutum
  unsure (1)..(368): unsure at all n locations
  Clone ID: LIB3147-007-Q1-K1-H3
ctttatcgccctggttcaattcccgcatttcacatggctaggtaacattagtgttaattggcttttctaaaactgcaaccactgtctaaattgtgtttataccagctttttcttaactttgattttaggcaatttttacattagagaatttcttctccgtctagaattctttttgttccccaaattcataaaaaccaatttccatgtactgagaaatctaaaaatattagttccttnnnaaaaaaaaaaaaaaaaaaaaaaaaaaaaaaaaaaaaaaaaaaaaaaaaaaaaaaaaaaaaaaaaaaaaaaaaaaaannnnnnaaaaaaaaaaaaaaaaaaaaaaaaaaaaagggggggggcccttttaa

SEQ ID NO: 34737 - DNA, 432 bp, Gossypium hirsutum
  unsure (1)..(432): unsure at all n locations
  Clone ID: LIB3147-007-Q1-K1-H9
gtatccacgcattcaaagtttgtaaagtaaagcactcaactttgtaccagtaggcatcactcaatgcaattagggtgcgtttgtttgcaggaaaacatttttcagaaaatattttcttaattttacagtgtttggaagcctgaaaacattttacaagtgtaaattgttttccaagacacgggtaaaatggcctcagtttagggaaaatgtcttaccaatttcatttccgtaagacattcttcggaaaatccctccctccttccgtccttctctttcttcaatctgtcttcccctcacgaatttgcaggatctaaacgtcccaaagttggcccgtcgtcgatattggagcttgtgntcaatacttgggttacacacctggcctctttattgtaggactgttcaacattttggtattttggataataagaacac

SEQ ID NO: 34738 - DNA, 372 bp, Gossypium hirsutum
  Clone ID: LIB3147-008-Q1-K1-A9
gtggagtttggaagaactgtgactaatgtcggagatggaagctttacatacaaagcaaatgtgacacctatcaatggacttaaggtaacagtggaaccagacacattggttttcaagacaaaatacgagaagaaaagctacaagctgagcattgaaggtccaaaacaattgcataaagctgtgttgtttggttatctcacatgggaagatagtggaaaggaacatgttgttacaagtccaatagttgccacaagctacaaaattgaaaaatgacaaaactcccattgtttttttctttaaattatcttaatgtttttttgctgaacatttataattgctttattcattaccataaaaacattaagataattt

SEQ ID NO: 34739 - DNA, 291 bp, Gossypium hirsutum
  Clone ID: LIB3147-008-Q1-K1-C3
cccacgcgtccgaaaaaacaaaaaaaattcataatatctaagaaaaaaaaaaaaaaaaatattaaatggcgttttacatagaaaaaaaaaagtcaaaaaacaaaaaatttcatggctcgaaaattctttgccggaggcaactgaaaatacaagtgggaccgcttttgaggttacaaagatcattaccccattgactgaagctgaagttctttctgaggatgccgaacatctttttgtgagccctccattttcaaaccttacctttgggaaaactctgtgtctccctgattt

SEQ ID NO: 34740 - DNA, 357 bp, Gossypium hirsutum
  Clone ID: LIB3147-008-Q1-K1-D3
cccacgcgtccgcccacgcgtccgcgagtaaaaagctccgccgtcgacggctccgatcggcggcaacctagtcgacttcaacggtgtgctccggcttctatacggattagtccggtttcgaactggaacgttgcgatccctctcttatcaccggtccctccttcgcctccctcgattgatctggggatgactgagaaaagagaagagctaccgcgaaaagagcagcagcggcaaaagcagacaacggagcgtcagaagcgtgtttttgcgatgtggcaacatccagcggccccgttttgttacgaaccggcgccgtttgtgccggtttagatgtaaacaaaaaaatgttgttagatg

SEQ ID NO: 34741 - DNA, 306 bp, Gossypium hirsutum
  Clone ID: LIB3147-008-Q1-K1-D5
atcttggatgagcctcagagaaattgttgagagcaacgaggacaaccgcttctaattctacaataccattcttggtttaatgatacataccggaccgaatcgatcaccgattgtggtacgatcgaccggtttgattttattattattaatatttagtagtagaatcacggacaactgattatgcaaacggctgatgccccttgtgcataattaaagcaatcttatttgatacgaaggtactccattgtcatttaaaaaaaaaaaaaaaaaaaaaaaaaaaaaaaaataaataaaaaaggatagaaa

SEQ ID NO: 34742 - DNA, 375 bp, Gossypium hirsutum
  Clone ID: LIB3147-008-Q1-K1-E10
gttgtctataattcaagaggctagagaacctggtgagagtccaaaaattgggagtcaattacttggtggtagtatggagcttgatgacttatatactgatgcagatatagatgatatagagacgagtggtgattttgtctgtgcattgcaagtgtgaataataattaaaaacaaaatagcatcaacttttcaaaccaatatggctggaaattcaataaatagaaaaagggaaagcaaatttgaaggtaaagaaatgtggaagaagttgctttgcatagtatatgggatatggaattaaaagaaaaatgttgcatctcaggcttaaaaacttcacgactttccatatttgctcacgtttagataagaaatgacagc

SEQ ID NO: 34743 - DNA, 366 bp, Gossypium hirsutum
  Clone ID: LIB3147-008-Q1-K1-E11
ctactgttcacgaggaagcaatgcttgctataggtgctcttgcctatgccactggatcgcagtttgagaagtacatgcctgagttctataagtatcttgagatgggactgcagaattttgaggaataccaggtttgtggaatcacagttggggttgttggtgatatctgccgtgccttggatgacaaggtcttaccttattgtgatggcatcatgggtcttcttttaaaggatcttgctagttcagaacttcaccggtctgtaaagcctcctatattctcttgctttggggacattgctcttgcaataggagagcactttgagaagtatgttccgtatgctctgcccatgatgcacggagcaactg

SEQ ID NO: 34744 - DNA, 378 bp, Gossypium hirsutum
  unsure (1)..(378): unsure at all n locations
  Clone ID: LIB3147-008-Q1-K1-E2
tgaagactacagtgaaactatgcaaagtattgccactggatgtgcagcacaattttcacttattcctcctgtttccagcactttctcatcccctaatatgactgatgaattgcaaactggagagatagaagcagatggaattttgatagatgaaaatccggcattgatcgtctacacgagtggtacaacaggtaaacctaaaggagtagttcatacccataagagcatctctgcacaggtgaaaatgctagctgatgcctgggagtatacgtctactgatcagattctggatttgctaccactacataatgttcacgagactttttaatgctntacttgcccctttgtatgctggctcaactgttgaatttataccca

SEQ ID NO: 34745 - DNA, 244 bp, Gossypium hirsutum
  Clone ID: LIB3147-008-Q1-K1-E3
atttcatccttggttaacacttagtggtataaatcattaaatgaccaggcatttggtctttagcgttgtttaccaaaaaaaaaaaaaaaaaaaaaaaaaaaaaaaaaaaaaaaaaaaaaaaaaaaaaaaaggcagataaaataaaaaaaaaaaaaaaaacgtacattaataagaaaaaaaaaaggggtcgtctagtaaaacctaaagagaatttcatgcccgtgggaacacaaatgcttatttg

SEQ ID NO: 34746 - DNA, 323 bp, Gossypium hirsutum
  Clone ID: LIB3147-008-Q1-K1-G11
cccgcgcgtgcggatgtttaggttaagcccagagtttatggaagcgtctgggtattcgtgtggaagatgctttgcaacatgatttcaagagatattatgtaatccccttcattttgctgtatctatcttgtaatgaaagggtagaatttgagatcagaaatttgctttttgtcattgcttatgtcattatttattcatgcatgacttggcgatggtaaatgcaattatatctgcaaattaaaatggaatctgtataataatatcatttcaatcacatgtgtgatatgtagtctatagcatctttcacaaagcatgccccttat

SEQ ID NO: 34747 - DNA, 332 bp, Gossypium hirsutum
  Clone ID: LIB3147-008-Q1-K1-G4
cccacgcgtgcgggaaaactggaatccaaagtgtattgttacatggccttaaccaaggaaagaaggatttgacgtggcagaaatggtcataccaggttggcttaagaggagaagcaatgaatttggtctctccccatggagcctcttctgttgaatggattcgaggtgaacggattcaaggttcactagcagcacggagccggcagtctatgacatggtataagacgtatttcaatgccccaggaggtaatgaaccactggctttggatatgcggagtatgggaaagggtcaagttttggttaacgggcagagcttataaggatattggatg

SEQ ID NO: 34748 - DNA, 395 bp, Gossypium hirsutum
  unsure (1)..(395): unsure at all n locations
  Clone ID: LIB3147-008-Q1-K1-G5
cccacgcgtccgtaccaattcaaatggttcaaatgttttcggtgcggtgccttacaacccatctccgccgtcagccgccgctatcagattaagaccacccgggcagccctttttcaccactttgacatgcctgggcatatactatcaacgtagcagatgaagacctttttttctttttcttaaaatctcttggttgccacaaggttttaaaatttttaatggaaactaaggagaaccatataaattgcttagtgaatgatgagcagataaaatgtactagaaaaatgaaagaatgagagagaaccacattttattttcctttttctttttcttttaactttaggttgaaaatgcgttgtagtagagggatggctnatccatgtaatttttttttt

SEQ ID NO: 34749 - DNA, 222 bp, Gossypium hirsutum
  Clone ID: LIB3147-008-Q1-K1-H10
ggaaatgaacactaagaaggtgagtgtgcaaacaatgcatagtgactatttaaatggagtgagcatagctacatctactgagtcacttatcatcctaaactgatgcttttaattaggacgatgcgactgtatcaacttaacatgtggaacatcgagggggggattggcttcttgcacagtgttattctacatctctgctgcctacagattggctatccgaac

SEQ ID NO: 34750 - DNA, 368 bp, Gossypium hirsutum
  Clone ID: LIB3147-008-Q1-K1-H7
caggtacgggtggtggacacaagttttaccattaagacaacaatgtggtagatcccgaagatattaatagcttttatcttggagaaaaaagaaaaagaggggcattacttctacggaaactgcattaatcaacgggtcccggctttccatgttttaacaaaatttgacacacaaagctctttcccaacttgttgtcaaggcgtgttttggacagcacaatgatttggaaccatacacgtgactcacaacgtggggtgttaaatctctaagctccttgctgtcttatatattaaagggatactgctttattgtgtactccaattttattaaaaatatattctaatcttcttatttaaaattttatgtgt

SEQ ID NO: 34751 - DNA, 268 bp, Gossypium hirsutum
  Clone ID: LIB3147-008-Q1-K1-H8
ccgagatccttggcggtgaaatctccgggaccgaagcggctattgacgacgcttatcaacaaggcgatcaagtttgtgaaccggaaaaaggccggtgagaaaaccgggaacgaagaggaggagatcggagacggcggcgtatggcaaagagcgatcctgatgggagataaatgtcagccgctagatctttcaggtgtgatctattacgatcgcaaacgaaatcaagtggaggagttgccgtttcgttccccacgtgctagtacgatgc

SEQ ID NO: 34752 - DNA, 393 bp, Gossypium hirsutum
  Clone ID: LIB3147-009-Q1-K1-A1
cccacgcgtccggcagtgctaaagcatttagcaatgaaccgtaaagcccttaaaacttgtgccagctaattaatttatgtgtttctttctggggagtgatgcaaaaagcttcttttcatacagctgggatccctttccatgaagggtagcataaactttaatagttaagtttgattgattttagatgtctcgttgcaaaggcaaggcaaatatcaagaagccattaaataccactcaatggttttagcaatatctgatcgagaaggagaagactctagaaatacagaagcctatggagcaattgctgactgctacaccgagctaggagaccttgagaaagcagggattttatatgataaatatatttctaggttggaaacagactaatgaagc

SEQ ID NO: 34753 - DNA, 300 bp, Gossypium hirsutum
  Clone ID: LIB3147-009-Q1-K1-A10
ccgaaccaccccctacggacaaagcgtattttgataacttgccagctccctctaaagatgtcaaaattaaaagcaacctggctgagaccctacaatccaaatgcagtgtcaacatcccttacaagatcagcacttacactaactgcctaaatctccatcgagatcgatgaagagagtgttacgcatcagcttgcacgagataaattatatgcttaaaaagaagaagaataagattgaataaccattttcggatggaatttttcaaatccaaaattagtctccactctaatgtacagaggc

SEQ ID NO: 34754 - DNA, 272 bp, Gossypium hirsutum
  Clone ID: LIB3147-009-Q1-K1-A11
ccacgcgacccacgcgtgcgatgggcccctttatggtcttcttaagtttttgcttaaggacaaactgaatggcaattgcggggtgggtgagagatgcattcgtaatctgattcgaaactgtagacttgatgcaaagattggctcgaagactgaaaaccccatggggggggcctaataaagcgtctgagtacgagccgctgatcgaccacactaacgctcttcaaggtcggacctacaacctactcggccggcttcttgagcacgcacaagca

SEQ ID NO: 34755 - DNA, 265 bp, Gossypium hirsutum
  Clone ID: LIB3147-009-Q1-K1-A2
aaaaaaaataaaaaaataataaaacatattaagattgaacctttaaaacattaaaacttgggcaagctaacttgcctatgtgtaactttcttatgaatgatccaaaattcttttttttgtccgtctgttatcactttccatgatgggaaacatatgccctaatcgataagattggttgattagaaaattctcgttgcaaacgctagggaaatatcaagaaggcattcactacctctcaatggttttagcagtatatgatcgataa

SEQ ID NO: 34756 - DNA, 317 bp, Gossypium hirsutum
  Clone ID: LIB3147-009-Q1-K1-A5
ggaacacccggcccgacccacgcgtccgaaatttttcagggcttatctttatgtctgtgttcgagttatgtgagattggggtctttgattttagtatttttgttgatgatgtttgtaactgatagttcaaggatgtattgtgatcagtgaagagacaattgttatgttggtttaaacaaaaaaaattaagtttaaatgaatttaaaatagaatagaaacaaaatgcaaagcaaatataaagaagccatttaataccactcaatggttttagcaatctctgatctagaaggagaagactttataaatacagaagccta

SEQ ID NO: 34757 - DNA, 263 bp, Gossypium hirsutum
  Clone ID: LIB3147-009-Q1-K1-A7
cccacgcgttcgaaaaagcagtctctgtttcttccctacctctctaccattcgcttcagtaagctaatctattagttgctcgctcactaaacatggcaaaagaagccgagaacagcatccctacatgccagagcttatgtacacccaaccaagcgccattgatagaacttgaatgctcactggacgtcgaggaccgagaaacatggataagaatttggtcagaactaatcaaacaatgtccaacgcgaacgtatacaggactc

SEQ ID NO: 34758 - DNA, 425 bp, Gossypium hirsutum
  unsure (1)..(425): unsure at all n locations
  Clone ID: LIB3147-009-Q1-K1-A8
gctaatctcatctgcattactcaataccaatggcgtcttctgctacctttaggacttgggttctctcttcttctttcgccactcaatgcaacgtttcaaatcgtcaccaccaaagttgttttctttcttctcctcccaaaattcccattttctctatccctaaacccgtttctttgaagctcacttctctcctctccaaaacacccacattttttacaatccccaaatcttctgaatccgacgctgccgttgtcgatgttgaacctgataacgtcgagcccgaaccagaacccgaagcagcaccagaaccggaaccggtaccggaaccagcttcggttgttgaggcttccaaggaagaacccaaaagggaagagatttttgctggtgttatgaatggnggtcgccaatacattgttttccctgga

SEQ ID NO: 34759 - DNA, 361 bp, Gossypium hirsutum
  Clone ID: LIB3147-009-Q1-K1-B1
cgatgggttagtgaaggtttacctgtttattgtggtaggttcaagcatggggagcctgagagcattgaagatcgtcttatgttttcccatttgataagttgggaaaaaggaccatatagagatacctataagatatatccaagaaaaggagaggtttgggccctttttaagaactggaatgtcaactggaagtcgaggaccgagaaacatggatatgaatttgttgagatcttatcagagaatggtgaaggtgtaggtatacatgttgcttacttgactaaggtcaaaggctttgtgagtgtcttctgtccaatgagtaaggatggagttaatacaattctaattccgcccaatgaactac

SEQ ID NO: 34760 - DNA, 434 bp, Gossypium hirsutum
  Clone ID: LIB3147-009-Q1-K1-B10
ctcttcctcgctttcgcgctccgctatagaccaacctgccgtttttgtgagcagatcacgccagcctccagatgtgcaaaaagtacatggacacgaaactccagatcaagctggatgcaaatcggatggctgttggtactcttcgagggtgagatcagattatgaatctagtggttgacatcacagtagaggagaatggccatgagaaaactgtcataagcatggaggtgataagaggaaatagcgttgttactgatgcagcccttgaacctgttggcaaaaggcagtgatcatggtttgtttatggattcattactgtgatgtatctcttcgcttcgatgatccaatggcatccctgctagtttgagattgagattgagctattttatgtagttgagaatttgtcggaggttagatgggactacatggaatct

SEQ ID NO: 34761 - DNA, 255 bp, Gossypium hirsutum
  Clone ID: LIB3147-009-Q1-K1-B9
gcgcacacgcgtccggactatatttcagaatttgtgtcacaggtacatcaataaagagttgagagatgcatacgtatcgaatagtctgactgacattagtcaaaggttcaatggatcaatcattaacaacagaattctaaaagctgatgttgaaacattgaaagcaaaggtaaaaatggctgaagaggcagtcaaaagaactactggtttgaaccctgtgttccatgcattacctagaataccaagcctgtcatc

SEQ ID NO: 34762 - DNA, 265 bp, Gossypium hirsutum
  Clone ID: LIB3147-009-Q1-K1-C3
cccacgcgtccgatttctagaagcccatttaaacttgtgcacaaatatggacatatgcagaagaggagaaaacattcattgatcaaggagctcgaagatgcactgaaagtagaagcaattaagatagatatcgagatatgagacgttatcgagaagatgcatgaatggaaagcagcgcactatagagctgccgatattaatgtgcacgatgaatcaaaaatgtctgaacaaacattaccgcatgaggaaaagacgcataagaaca

SEQ ID NO: 34763 - DNA, 337 bp, Gossypium hirsutum
  Clone ID: LIB3147-009-Q1-K1-D10
gccgctcttcttctatagaactctctctatataaatatgtaatgagactgcggtcgggtccttatcacaaaacggatggtgcttgcatgtaatgcaaaggaaaagttataatctgcacagtctactggacggtgcatgtctaatatatatatatatctgtattgtcaagccagaagaaagaatgttttgtagaaatcgtatcttgataagatgccgaggatagtgtatgaaagaagattccgtcttttcttcgaagtgcaatgaaaaaaaactgtacgttggttatcattgaaactgctggtgaatctacaaaaagaagtacaggaaagaaatgaaa

SEQ ID NO: 34764 - DNA, 427 bp, Gossypium hirsutum
  Clone ID: LIB3147-009-Q1-K1-D12
aaaaaacaccttgagaatgctcaatttttaacgctattttttgtattttgatgtcttcgtgtgctctgtaatacaaccctgtttttcgaaaaatcccacttacaaaaatcaaaagaatggctttatagccgaacaataataaaaaaaattcctttcttgccatcctttgtttttatttctatttgctgctgttttcttgtctgtttgcaggtacgtggcagcgtggaggtgtacggcgtacggaggcgctgaaggccagtacagcgttggaggctagagctgctgcactccctgctgttagggtttgctgtttggctaatcctatgtttaggttttgcgccattgggccacatgggtatttgggtttgtcattgggcttgtttgggtctttggttatgtaagtgggttttggtttaaattttaatta

SEQ ID NO: 34765 - DNA, 312 bp, Gossypium hirsutum
  Clone ID: LIB3147-009-Q1-K1-D6
cgcaaaccatacatcctctttatctgtttcatctcagaacctccgtaattcagtgagaagtggatgacgaagggaaggctgaggttcctgagtcactcttgaagaaacagtatatgactgaggaatgggatcttgccaaaaagcacgagcttgaagttgcaaacaagaagatagtcaaaaaccgcaagcttatttacactatggctgatcagtatgcataggagtacgaggctcaggacaaagagctgattcaactgaagcgggaggctaagttgataggaggattctatgtagatccagaaactaaactct

SEQ ID NO: 34766 - DNA, 286 bp, Gossypium hirsutum
  Clone ID: LIB3147-009-Q1-K1-D7
gaatcccggccgaccagcgtccggttaaagttgtttggcattatttatattgattggagtcccctataatgggccgagtgcattccatgagatccctatcttgggcttctaaacatgcatacgcttctgctgcaaagacgaggaaacattgctgtgtaaggtcgactacaagatcagaagctcccccattagatccaaaccaccagtatactcggtgatatgaaatgctactgccatcgctcatttaactgaatttattatctgtatatcctcctgaatttctata

SEQ ID NO: 34767 - DNA, 321 bp, Gossypium hirsutum
  Clone ID: LIB3147-009-Q1-K1-D9
gcgtccacgcgttcgaacactcttttgacttttctgggtgaaccctcagacttaggtatcgggggagaaactatatcctaatgccggccatcctgccatgagcgccgcagagtgaatcttctataccatatcatagcgatctctggatggcaccaacccgcagagaagacaaagcttcatgctgctcatataatcatgggcatcttaattatatgaatgtcgggatcattcgagtaatgatgtattttgacatgacctgagatttcatgttaatgggcattgagttatttatcatacatactgatggctatctacaagttg

SEQ ID NO: 34768 - DNA, 406 bp, Gossypium hirsutum
  unsure (1)..(406): unsure at all n locations
  Clone ID: LIB3147-009-Q1-K1-E1
cgatcttctttcttaatatgtttcaacttattttttgcttgcaagagtttttcttttttaaaatggcaatgcaccttcatatttttagttctttaataaataaataaaaaaaactaaattctctgccaaatgtattgttaacaagatatcaggaattggaaactgcgctagctgaagcaagtcctcaaatagttgcaaaagccaagtgctctcttgagctgccatcatcgttgcatggtactttgcttttgtggttgacatagacactacaagtttttgctacacgaagaaattgttccagaccaaagcataaatacgtatccagtggggtatcacgtgcacctacaatagttagtatcacaataaccaactaacttgcactcttcactggnttttgtacataata

SEQ ID NO: 34769 - DNA, 419 bp, Gossypium hirsutum
  Clone ID: LIB3147-009-Q1-K1-E10
ctttagaaaagcaatttcctactgtccatacgtaaataaggaaaacatgttaaactgctacaattcgataatcgatatgggttggaggtctaacaaggccgaagatatggtttctcagcaattttcaagttcagaaagagacatgttgaagagaagaaaaaccaatgattatgggaagaagcacacggtccacctctctcaggtccaacactgttgatgatagtgggtgagaggtttgaatcaatgggctgttttgagagtgagcctagctacctctttaccttcaaataagaaatgagatgaaaaccaaagagaattttgtttgctttgattattttcctttcctttctatttggtaccaaataaaaacgaggacaaaattgacacttcgaattatatggttggatttttgtcatctt

SEQ ID NO: 34770 - DNA, 199 bp, Gossypium hirsutum
  Clone ID: LIB3147-009-Q1-K1-E2
cccacgcgtccgttaaaaagtttgatcttataatttgcgatacagaagttttatttgtgggaaatggtaaagcaccatcatatcgtcccttcttaaagaaaccaggaaagataacgtctactctctaccaaatgtgtcgagacaaacataccatgaattggaaactttgctagctgtgactagtacacaaatagtagca

SEQ ID NO: 34771 - DNA, 337 bp, Gossypium hirsutum
  Clone ID: LIB3147-009-Q1-K1-E4
cccacgcgtccgcccacgcgtccgtcattagattcaactggcaacatcccttgatcaagaaggtgtcaaaaaggctttacagcgagtactggaacgtgttccttgattctaattttcactgcgactgctgtttatcatttcaggttatttatccagtttttataaattttttttaaaacttgtaatcttgttttccactttaatgtttattttgtacaaaaagttataggagtggagcacatactctaatctatatgtgctaatagtttatatcataaacattgatccacattcttggtgtttattttggttaaaaattaaaagattagtttaccca

SEQ ID NO: 34772 - DNA, 299 bp, Gossypium hirsutum
  Clone ID: LIB3147-009-Q1-K1-E5
ttttctcgcacgagcactcctacataagaacgacaattttcaaccatatctttacctctctaataaacaacctaaaaaaacttaattctatacccaatgaattgtacacactatatcaataataggaaactaccctatcttaatcctgacacacaatcgtttcaactaccatatgctctcttaagctcacaacatcaatacactgctcttctcttttgtgattgacatacacactacaccatttttcctctcaatgaaattcttacagaccaatgcatacatacttatccacatgcgta

SEQ ID NO: 34773 - DNA, 316 bp, Gossypium hirsutum
  Clone ID: LIB3147-009-Q1-K1-E9
ggacggacccactcgtgcgcacacacaaccaacgattcctttaggtttatattcactatggccacatgatctgagcaagagaagttcatacctgatttctataaatatcttgaacatggacctggataataatgaggaataccacggctgtggaataacagatggggttgatgcagatatcatacatgccttgtaaaacaagtgatcaccttattgagattacagcatatttcttacaaaaagggatcttagtggagcacatactctaatgtatatgaactcttcgataatctcttacacatgggacaacactctt

SEQ ID NO: 34774 - DNA, 337 bp, Gossypium hirsutum
  Clone ID: LIB3147-009-Q1-K1-F11
cccacgcgtccgtccacacgttcggaattaaacacccaaagtctcatatcacgccgtgggttaaatcaagatgcagtcaaccaacggatctcatctgagctcatagcaccaaaaacaggagcccccaccgccgtcgcagacacagcaccctaaaaggatgccgaaccagtggatggtagctatgcaatacccgcctgctgctatggcaatgatacaacaccagcctatgatgatgatgtatcctccgcatcattacatggcttataataaccatcattctcattatgaacgacactatcatcaacacctgttgcatgaacaacaacaaggatctaat

SEQ ID NO: 34775 - DNA, 273 bp, Gossypium hirsutum
  Clone ID: LIB3147-009-Q1-K1-F3
cccacgcgtccgaatataactagcttttttttgttctatggattactggtccgctttgggtttgcaataattttgactgtctcttctttattcttgagttggaaagttttaattgcaacattcaaattctagcttttaatcgcatattacacttgccttagttgccccttctcaatcaacacaaaccaccagacacttaatccaaatggcactgcttcaagtgcttatggccccttcgaatccgtaaatcatggccttcttctccgtaaccag

SEQ ID NO: 34776 - DNA, 353 bp, Gossypium hirsutum
  unsure (1)..(353): unsure at all n locations
  Clone ID: LIB3147-009-Q1-K1-F4
cccacgcgtccgtcaatatccgccatttttgctttagaggactgctgctatctagctggcttgaacatggatttcctttcgagctcctttaaaaccgtcaatggcactagtgaaactctaccccccgtggaagctgaggatgtacaaactcttcttagtgctattttaactaaccagcaaacctgtttggacggcatacaatccactgcttcaactcgaggcataagggaaaacatcacagttcctatgtctaatgacacanagctttacagtgtttctctcgctctttntacanagggatgggttcctaaggagaaaaaatcagcctcacggcatccgagtagtaagcagat

SEQ ID NO: 34777 - DNA, 374 bp, Gossypium hirsutum
  unsure (1)..(374): unsure at all n locations
  Clone ID: LIB3147-009-Q1-K1-F5
cttaattttcagattaagaaagtaaaagatcatatttcttttgtcttttatttggatagggaaagaagacgataataagttgttcatttacacttgtgataggccggccgttcttgtatgtagaacattaggcccaccttcctaatttttttttccttgcagcaacgagaggctgttgtttattagtatcatgtaatttacaacgtgaattattattattatttttttgtgatcgattaatgtggtgaatacaaaatggtgtgtttaacgcatatcgatacaatggtttaaaaaaaaaattttaataattaaattaaaaaattacacttccatatatatttttttttaaaaaataattaaaaaatnttaataat

SEQ ID NO: 34778 - DNA, 426 bp, Gossypium hirsutum
  Clone ID: LIB3147-009-Q1-K1-F6
cccacgcgtccgcccacgcgttcgattttccccatgacaatgttcattcccgaggccgagcttccggcatgggtagtctgttatatccctgctacaatgtcgctcctaaacatccttccaaccccgaaatcattcccattcattgttccttaccttcttttcgagaataccatgtcggtgaccaagttcaatgccatgatctccggtcttttccaacttggtagcgcatatgaatgggttgttacgaagaaatcaggtcgatcatccgagggtgatcttgtatccttggtcaagaaagaaacaaagcgacagcgcggtgaatccgaacgcaatctcgacgaaacataaaccaatattcttcgagaacaaaagagtagcccaaagaagcataatatgatgtatacaaaggaactagctttagcattc

SEQ ID NO: 34779 - DNA, 247 bp, Gossypium hirsutum
  Clone ID: LIB3147-009-Q1-K1-G10
gcgtgcgatcaacatactcttcgctttttggattgtaatcaacaaacacaagttccggttgctgctcatctcataacttcacactaagaaaatgttatcactgctacatactacttattcgacaataatcttccaagatacagctcgatttcttggaatgagtgacgaagattcctcttactatgttctaagacaacgtcgaacatccaatcctactcctcaactgataacccgaatgaatctcgct

SEQ ID NO: 34780 - DNA, 364 bp, Gossypium hirsutum
  Clone ID: LIB3147-009-Q1-K1-G12
acccacgcacccacgcgtgcgcccacccatgcgtttcctattttttattttccatcaccagacacaagtccatgggcgcggagaaatcaaaagtttacactgataaaattgacaaaccagcttcttatacttattcggacaattatcacaatatatgcacgtcaatttttcagaaccagagaggaaaatgcctcaaataatctactaatacatgtttcgacatggaatcctacatatcgaatgctaaccgtgatgattcatgctataccgacggaccgatatttatacccagccaaactgcagtgactaactgtatacttcttcccactacaacattgaatgatgcttttgcattctgtgattt

SEQ ID NO: 34781 - DNA, 344 bp, Gossypium hirsutum
  Clone ID: LIB3147-009-Q1-K1-G2
gtccatttgctggttggaacccccggcttaatactagaccttgccaaaaagggtgtttgcattttgaaagattgttcaatgcttatcatggatgaggcagataaacttttgtctcctgaatttcagccttctatagagcagctgatacgtttcctttcagcaaatcgccaaattttgatgctttcagccacatttcctgttaatgtgaagtactttaaagacagatatctacaaaaaccttatattattaatctgatggatgaacttactataaagggtattacgcaatattatgcttttgtggaaaaaagacagaaagtccactgcttaaatactcttttctc

SEQ ID NO: 34782 - DNA, 268 bp, Gossypium hirsutum
  Clone ID: LIB3147-009-Q1-K1-G7
cggaagtcgaggcacgagccacgcgtaccggtaaaactttggcatatgaatctatttttacgaactctatacatggacgaggcagggatctctactaggaagaggagtttgagatgcaaatggcacagtgggaggaaagggatgacgaacgtggctggaacatgaacatgaccgtgatgtgcgatgtatgaaataatctaccaacagaagaatatcaaggatatgcagcgccgaggtataaagaaattcctgatcatagatatcgagt

SEQ ID NO: 34783 - DNA, 236 bp, Gossypium hirsutum
  Clone ID: LIB3147-009-Q1-K1-G8
acacttctgaatttacttttactgtactgatccccaaaaccaaaacccgcaccagggatctatttgccgggcaacaccttgtctaataacaggagcaaactcagttactgagcgagtcccttgctaatgtttgagaatacaatatcagacgctctttatttattcacacattgcattcattacatgtgcatggccctcgtcaagggcacacatcatagaataatgaacaattcgaa

SEQ ID NO: 34784 - DNA, 190 bp, Gossypium hirsutum
  Clone ID: LIB3147-009-Q1-K1-H1
cttaaaatccgaaaatggctacacgtttaagccgcccaaagcagtacatcgccgactcgggatcgtgcgactcggggatcgttcggtcgtttggcagtactgggtgcgttaatgacattcggtagctcgaccagatgggatcgtcgatctttacggaaggcttatgcaaggaaaatatggaagacgttga

SEQ ID NO: 34785 - DNA, 205 bp, Gossypium hirsutum
  unsure (1)..(205): unsure at all n locations
  Clone ID: LIB3147-009-Q1-K1-H12
cggacgcgtggacgcgtgaatanatatgatggatttttatggactttttctgcataaagcgcaacgattaagaatcatcccgatttcaaattaacaatatagtgttggttattttatctataactattgacgtgtaataagtgaaacttagctaacgacaagttattgtgtcgaaaatttcatgttttctatcattctgccaatc

SEQ ID NO: 34786 - DNA, 170 bp, Gossypium hirsutum
  Clone ID: LIB3147-009-Q1-K1-H4
ccgggattcgacgccacgcagtccggccacgcgtagcgcccacgcgtcacgccctctgcttgctggggaggattagtctcaccgtagctcttgtgttgcgcgtagctatatgcactaaaagccgttcgctcgtcaatagatgaacatatgtcaagtctaattcgccgatg

SEQ ID NO: 34787 - DNA, 355 bp, Gossypium hirsutum
  Clone ID: LIB3147-009-Q1-K1-H5
aagatatcgaaaacgggctacctagctctccagtagttcatcctgccatgcaaagacagccatcacagacggagcttgataaaactttgaggccaatcacggtcgggaccattgttcggtacgaggaggaaaaaattgaattgcagtacagcgagtgtgttatatgcttggaagagtttaaaggcggagattgctgtagggttcttcctaactgcaaacatcaataccatcaacattgcatagatgaatggctggttaaggacaggcattgccctctttgtcgtggttcagtccatggtttagaaccgacaccaatcactgtgtagcattgaaactaaattggctggtaatggtt

SEQ ID NO: 34788 - DNA, 234 bp, Gossypium hirsutum
  Clone ID: LIB3147-009-Q1-K1-H7
aaagagcatatccactaggcctttctttatctgagcccaatcttacacgctcgagccggggaaaccacgccgaacgtgaatcctgcaacaatgaagacctataccaggccaacctatgttatcatggggatcattatgaactactataccgtgacaccatccgattaatgtcacagtaggaaaacctatatacttgatgagaaatccacattctactaccgaatacgttcttta

SEQ ID NO: 34789 - DNA, 266 bp, Gossypium hirsutum
  Clone ID: LIB3147-009-Q1-K1-H9
ggcggtggtgccaaagtccatgttatgtttcatgcgagcaagtcaggctcgggtgaagctgaatctgcaccaattccattcaactgcgaagcgtggagatataatcggtgtcactgggtttccaggcataactaaaagaggagagttgcccatttccaacgtcatttttagcattatcccattgtctccatatgatgccattgcaaaaagcaggccctgatgccagcgtgaagaaaactgatgtatggatcccaagaagcactaag

SEQ ID NO: 34790 - DNA, 274 bp, Gossypium hirsutum
  Clone ID: LIB3147-010-Q1-K1-A2
cccacgcgtccgcccacgcgtccgaccatgtgtctgtccactcgtacacatttattactttagagaacatgggagcaatcactatcacggggcttattagaggtgtgaccatccacgttctcaatggtgctattgcctcacccaaggaagacgataagacacgctgcacttgcttcttatcctacaagagatggaacttcaattgaccaacgcatagcttacgttctaacgcttgtggcactggcgcttacatacctgatctagactctagaca

SEQ ID NO: 34791 - DNA, 400 bp, Gossypium hirsutum
  Clone ID: LIB3147-010-Q1-K1-A3
cccacgcgtccgatagagctgctgttgttatacaaaagtggattaaaggcaggaatgtgaagaaaacattcaagaaaattaacgatgcatcaattgtgatacaatcagttattcgtggctggttggtcagaagatgctctcaagatataggactagtcaaacctgggggctctaaggaaaatgaatcagatgaggtgctggtcaagtcatcatttctctctgaagtacagcgccgagttctcaaagccgaggctgctctgagggagaaggaagaggaaaatgatatcctccatcaacagctccaacaatacgaaagccgttggtctgagtgtgaggtaaaaatgaagtccatggaagaagtatggcagaaacaaatgaggtcccctacatccagtctctc

SEQ ID NO: 34792 - DNA, 317 bp, Gossypium hirsutum
  Clone ID: LIB3147-010-Q1-K1-A4
acgaggccaacgatgaagctgctggggaggtactgaaggtcattaaaggcgagaaccagacgagctcaggcaagaaagttcccgacgcaggcattggactacattcagatatgcgctgttggacgcacacaatatgctatgacaatgtaagagtagccgaacctgatggctctaaagcaaaggaagcagattacgagactgacaagaaataactaatatctgaactacagggccaagctcttataatcgatgctgcgctgatgcaaactgacaaacctgatgactgtcaccgtaacctactgcatcaatacgcactg

SEQ ID NO: 34793 - DNA, 353 bp, Gossypium hirsutum
  Clone ID: LIB3147-010-Q1-K1-A6
ctctgatgtagccatcgcctgcgtctatctattcatcactctgcaccaaaaagtgtgtaggtgtgggcttcgagagagaccatgtcggtttaccaggatctcatctacgctgacgagcttgtttctgactcattcccctacaaggaaatctagaacgggatgctgttgtacgttgacggaaagtggctcgtgcatggagctgtccatattgtcattgctgccgatccttaagccgaaggtgcagaggacgatgaaggagtcggtgaccaatcatgagactgttgtgacattgctgacactatcatgcttcaggagctacctcctttagacaagaagcacgttgtcgtgttcat

SEQ ID NO: 34794 - DNA, 418 bp, Gossypium hirsutum
  unsure (1)..(418): unsure at all n locations
  Clone ID: LIB3147-010-Q1-K1-B1
ctggatttcagtgccacctgaccaaacctcattcttcatcaatgttggtgactccttacaggtaatgaccaatggaaggtttaaaagtgtaaaacatagggtagtgaccaacagtgtgaaatcaaggctatcaatgatttattttggtggaccaccattgagtgagaaaatagcacctttgccatctttgatgagaggtgatcaacaaagcttatataaagaatttacttggttcgagtacaagaaatctgcttataattccagattggcagataataggctcattcactttgaaaaaattgctgcttcttaatctctttttttatttttcacttttgagtagattttttttatacttcanataaaaaaataggattagggaaaaagtttgtagtatcaaaaaaggcttgtgtgatct

SEQ ID NO: 34795 - DNA, 111 bp, Gossypium hirsutum
  Clone ID: LIB3147-010-Q1-K1-B5
actccttacggtaattgcgaattttgtgctgcccctgtaaaacataaggtattgaccagcggtgcggtatcaaggctctcaatgatttatttcggtggaccaccattgagt

SEQ ID NO: 34796 - DNA, 466 bp, Gossypium hirsutum
  unsure (1)..(466): unsure at all n locations
  Clone ID: LIB3147-010-Q1-K1-C3
gaataccacagagtgaggaatgtgctgctgctgaaccgaccaaatttgcatcagctcgtgttgagtcgtcatcgaggcaagattcatactctgcttcaagtcttcatgcttcatccggtggaatcgacgatactgctcaaaagttgtatggtagccattttgatgagaatggcagagaaatgctcagagaagaagaatttcctgaagtgagtgttgagtttcaggagacatttttgggccacacaagtccaattactcggtgccggttttctgcatctgggaacaatatagctagtgcatctgtggatggcactgtcaggatatggacatatgactcatcgattccagcatctagaaacgcgaccatctattgtggagccgagataatgtcacttgactgggaatgcanatctgaccgtttgcttctcataggcactgctgatggangcataaaagcatggaatgt

SEQ ID NO: 34797 - DNA, 213 bp, Gossypium hirsutum
  unsure (1)..(213): unsure at all n locations
  Clone ID: LIB3147-010-Q1-K1-C9
gcgngggcggacgcgngggcggacgcgngggncnnaancnncanancngcaacagagggcngnnnncannncagcacaaagaaacccggnnncaccccagaannncnaggacgngnaaaacnngncacttcggnngcancannggncggagnngganggganaanggannnnnaaaaagagnnccanngcggaagaaaanncnggccacaaca

SEQ ID NO: 34798 - DNA, 270 bp, Gossypium hirsutum
  unsure (1)..(270): unsure at all n locations
  Clone ID: LIB3147-010-Q1-K1-D10
cgggccgncccacgcgnccgccatggnccacgggccaccgcagcnccgnttttcggcgnncagacgcngccggcgacgcgcgaagaagaggccgcgaagaaggccgacncgccaacgancgangccgncnnncacaacgcggncancgncaccanggaggangcgnnccgcgnccnccaggacggcgcggncgccgncgccggcgaccgcancgccgcggggggccccnccgcggangnccccgccgccccccccggcgccgagcagacc

SEQ ID NO: 34799 - DNA, 275 bp, Gossypium hirsutum
  Clone ID: LIB3147-010-Q1-K1-D4
tcatctccaaaacaacaagaaagacccaagtagctggcctccccaactttaatttcttggaaatttattaatttattcttcttcacaaatccaaggtcagagctcaaacagctcccagggtgatttagaaatggacgctgattcatggagtacccgcctttcttcagtttctaagagataccaatttactcttcaatcacggtcagatatgtttatggggtttgaagaaatagatggagaagatgatataagagaggaatttccatctccttttt

SEQ ID NO: 34800 - DNA, 468 bp, Gossypium hirsutum
  unsure (1)..(468): unsure at all n locations
  Clone ID: LIB3147-010-Q1-K1-D9
gtccgcccacgcgtncggctaacatacgaaacagtgtaaacagcagtgaaaaagagagtagatatgagaacgaaaacatatggtcaagagctaaactttcaactgaatggtgttgcagcagttccagatcctgtgtacaaaatcgagccaagtttagtagctgatctctacggagattggatcatgcccttaacaaaggaagttcaagttgaatacttgttgcgacggttggactaatgtaaagtttccctcacaactgaccaagggaaggggaaaccaaagggtgtatgaacatcactaccttttacatgttaaactacagaatttcagttttctaatttatagcacaactttccaaatacccagtaatgttcttcatcaagaaggcaaagggttcgaatacggaaaaagaactcgtccctcctatgtgatcatctaacagcaatgtgagcttcaagcttgtgttag

SEQ ID NO: 34801 - DNA, 306 bp, Gossypium hirsutum
  Clone ID: LIB3147-010-Q1-K1-E1
aattcccgtcgaccacgcgtccgaaaaaaaaaaaaaaaaaaaaaaaaaaaaatttaaaaatttaaaaaaaaaaaaaaaaaaaaaagaaaaaggggaaaaaaaaataacaaaagaagacaaaatctagaggttccccacaaaaaaacccgggcaatctatgtttaaaccgctgcttttttgcaacttaattggcattcttgcccttcttttttccctgtaatcctttgattgccccgccttttcctatctatatgccctgctgacccccgccttttttggcaaatgctgcgcttccttaattttttt

SEQ ID NO: 34802 - DNA, 312 bp, Gossypium hirsutum
  unsure (1)..(312): unsure at all n locations
  Clone ID: LIB3147-010-Q1-K1-E5
gaggggtgtcagaaaaaaagttaccanncagggattaacnntggcttnngtggcagcnncaagcgttcatttagcgacgttgctttttttgaaatccttcgnnatgtcggcttctttcctttatcattnngtgaagcnnagaattcaaccacagtgtgtggatttgttcaccnnncaccaatagggaaacgtgaagctgggtcttagaaaccgtcgtgagacaaggttagtttttaaccctaactgatggcnncgcgtcgcaatagtaaattcaaacctagtaccgagagggaaaccgttgattcgcacaat

SEQ ID NO: 34803 - DNA, 432 bp, Gossypium hirsutum
  unsure (1)..(432): unsure at all n locations
  Clone ID: LIB3147-010-Q1-K1-F10
cgggccgacccacgcgncctgtcggcgagaacgccctgttcgtgcggccgtaggtcttctacaacaacccgctgctatcgttcgtgcagctggtgatcgggccctacgcggacgagctcgggaacgtgctcccgaacgcggtggagggcgtgggcgtgcccgtggacccgctggcgttcgcggggctgctgggcatcgtggttacgtcgctgaacctgctcccgatcgggcggctggagggcgggcgcatcgcgcaggcgctgttcgggcgcggcacggcggcgctgctgtcgttcggcacgtccgtcctgctgggcgcgggcgccatcagcggcagcgtgctgtgcctggcgtggggcctcttcgccaccttcatccgcggcggggaggagatcccggcgcaggacgagatcacgccgctcggcaacgagc

SEQ ID NO: 34804 - DNA, 210 bp, Gossypium hirsutum
  Clone ID: LIB3147-010-Q1-K1-F2
acacgtgcgtccaacttgggatggtgagctgttctacaccaaaattataaaaacttctccatgttttccaagtgtcgttacttacataattatgtgcattcccacattcagagtataaattgatgcccctcaaagaaagcatggtgccatcccttttaagtctcttcttgtcaaaaaccggctcgtttgcttactcttctttgctaaata

SEQ ID NO: 34805 - DNA, 292 bp, Gossypium hirsutum
  Clone ID: LIB3147-010-Q1-K1-F6
gcgtgcggcggtgttcgatgtctgatcctaccacatataactggtgatgcacttaggggtcacgaatgcgtgctagggaagctgacaaagcagctaaacgagcctattaagagaaggagcatgttatcaaacttttattcaaacaagcctgacaactctttgtctacaaacagtggttccaaatattgcagctcgaagctcttattgtccataccaaagataatgggcagacacactcccctctatatcctgtaaatcttgcacctacgttctacaacagaaggaaactgct

SEQ ID NO: 34806 - DNA, 228 bp, Gossypium hirsutum
  Clone ID: LIB3147-010-Q1-K1-F8
ggacctttgcacgggggttaagttggcattgtgggaggtgtcgaaacccctttgtgaaaagcaaaaatttagtggtcggcttaaaaatgaaacaaaaattggagtcgccaccgatcctttattgaggtgtgatcggtacaccttaaaatgattttagatctacgaattttgagaaaaaaaaaaaaaaaaaaaaaaaatgaaaaaaaaaaaagaaaaaaaaaaatgaag

SEQ ID NO: 34807 - DNA, 259 bp, Gossypium hirsutum
  unsure (1)..(259): unsure at all n locations
  Clone ID: LIB3147-010-Q1-K1-F9
tagcaaacgggcaaccagaagaggaagcaagnngagacaaacaactagannacaaagngnctcaacccaatcgacttcacaagaaaaggaattatggtggtcgactgaattgtcgatcagaatcagccacttccaagactttcaatggtgcgtcttcaacccagaacgaatcctcatcagttctcaaaccttcaacagccattgcatgcgctaccccatttccttctcgcgttacgaattaaaatcgacaataagaaaa

SEQ ID NO: 34808 - DNA, 445 bp, Gossypium hirsutum
  unsure (1)..(445): unsure at all n locations
  Clone ID: LIB3147-010-Q1-K1-G1
gatgattttaactggttccatcgtcttgaattgcctaccagtttatggagccattggcttaaggaatgatgcagggaaaatgccaacccaaattactattatctcaacatttgtgtcggtggctctctattatgcctcttcactttgtttgtgaagtattaatgagtgttttaaatactaaaaataaggccttttctagtgaaatattggaaactaggatctttgtcttccttatttatttatttatggtttttttggtatgttgatatttgttttattgttgaatactgccttgcttcttttatcatgttcttttggggtttgtaagattagaaaatttgaagccattgngctcgttttagctgaggttcaatgagaagagaaagaaatggacaaggagtggcgcccaaagctgtccgtttggttggtcttgggcctattgcgc

SEQ ID NO: 34809 - DNA, 283 bp, Gossypium hirsutum
  Clone ID: LIB3147-010-Q1-K1-G6
tttcttttgttttaaaactttcttcagcataagtgcataacagtatctttgaatactctattatgaaattatccatagtgtactacacccagatttgtatatgtttacttttggctcataaccctacattgaccacgactacgggaacccaatggtcaaagaaaaatgttgatcgattggtcgaagaaaaaatgccaaagagtatcaagaagccatctgactttctcaaggatttaccccctcttcccttctttaattttcaacatcacccaatgattggcaa

SEQ ID NO: 34810 - DNA, 307 bp, Gossypium hirsutum
  unsure (1)..(307): unsure at all n locations
  Clone ID: LIB3147-010-Q1-K1-G9
ccgnccacgcgnncggccactctnnncnncaagcgggngagagagaagaagaaaanccnaagagggcaaagangccagcnggncacggnnnacgnnctcgaacaagggannngnncgccagacccnncagaaagaaggggcacatnccctcgnctacttacctcaggacctacaagatcggcgactacgtctaccgtaagggtaacagcgccgttcacaagggtatgccccacaagttctaccatgggcgtactggtcgagctttggaatggaccaaaaacgtgccatcggtgtcgaagtcaacaag

SEQ ID NO: 34811 - DNA, 369 bp, Gossypium hirsutum
  Clone ID: LIB3147-010-Q1-K1-H1
gtccttagcgaaatatcagatgcatgatgaaaatagccagatgagctctattgatgcagcaatagacagaaggatcctggaaagcagacttgctggtcgaatggcattttagttgggaggagaggaatgcgtcttgagaacttctcttgggataaatgtgcatgcttttgtgattgcactacttacatgaattggaaatggatttgggtcaatcaatttttaggtgggtatggcaaccaaggcagatgtatttgtgttgtattcttttgcgaagtgatgcagaagagagaagataagtcattgttttttaatcttaaattttagtttctccaaaaaaaaaaaaaaactggtagggatataaaattttga

SEQ ID NO: 34812 - DNA, 274 bp, Gossypium hirsutum
  Clone ID: LIB3147-010-Q1-K1-H2
gcaaaatcttgtttggaaaaagggatcacataggttgcctttgacagaggtggatatcccgatcatggacgcgtacaagcccttgctgattctgctagggagcatgggcttcaattttaaaagttgtgcagttagcattcttttgaactttgtcacttttccttgtttcgttttgtaactttccttttactgtttttccaaatccttttactaaacagcatgaagaacgctctttcgtatcatctagcagtgtatttgatgacttttttgcttc

SEQ ID NO: 34813 - DNA, 319 bp, Gossypium hirsutum
  Clone ID: LIB3147-010-Q1-K1-H4
cggacgcttgggctgactctttctatgactcctgggcctgcgccagatcagccgataagaggttactggcacatatgatgatgatatacaagtgtaatctaagcatgcttgcctgttagtaccgccactcaattgcttaactccatgataaagactccccggccatctcaagctgacacaaccgatattgctaatgctgtgctcaactgcaccaattgtgtcatgcttagtgatgaaagagctgctggagcctatccacagcttgccgtgaagatcatgcctcgtatttgtatagagagcagaatattaccttgactgt

SEQ ID NO: 34814 - DNA, 264 bp, Gossypium hirsutum
  Clone ID: LIB3147-010-Q1-K1-H7
cgtacgtagagctgcatatattaaatctttaaacactgaagagcactctgcgcttgtagagcatggagggatatcaaacatctgtctttttgtttatcaatatcctcatgaggctctagcagtcgctgatggtccataacttgggaaataatgctccatcagtacaaactcataccgacccacgcaaagatatcaatgggtatcaagaagcctattaactctatcgcctgatgaagatgacgagttcttcacaagccctgatct

SEQ ID NO: 34815 - DNA, 224 bp, Gossypium hirsutum
  Clone ID: LIB3147-010-Q1-K1-H8
cggacacgtggacttactcttcctattacttctttactttattcacatcagccgataatagcttactagcgcatataatgaacatctacaagtctaatcatacatgcaatcctatcactaccgtcactcaaatgcttaaatccatgataaaatctcccaatccatcccaagctcaaacaaccgatattgctaatgctgtcctcaacggcaccaatactctcatg

SEQ ID NO: 34816 - DNA, 237 bp, Gossypium hirsutum
  Clone ID: LIB3147-011-Q1-K1-A10
cccacgcgtcctgataccgaatcctttagtttgcacccgaatgagccattccgaacattgggtgactgcttcaacgacttcttagcaaaaatgaacgatgaaaacatgaagcaaagcgacaaaaacactaatcaaactaacgacatcccccctccaaagtcaataaacaaagccttcgccctcacataaacatgctcttgacgttaacactatcgacaccaaactatccttctcttt

SEQ ID NO: 34817 - DNA, 332 bp, Gossypium hirsutum
  Clone ID: LIB3147-011-Q1-K1-A11
acccgagcctgaagctctagcttatataacacatgacatttactaatgtactaaaggaagagaactttttgttgatgattcgctacaaagctgtcaatgatcaccatgtcatgctggattgtactgtttagcaacctaacatggcgacccatgttttcgacttctccatagtcaccccagagattaatgctgagtacactgatggtgcattgcattgcacttccaatgttcaacgtgatcctatagaaataacctctgacgaccactgagaagatgaagctacctttaaccttaatgtcattatctatttgcagagcaataaaccatggtta

SEQ ID NO: 34818 - DNA, 241 bp, Gossypium hirsutum
  Clone ID: LIB3147-011-Q1-K1-A4
accacgcatacgaaatagaagaaagatgagaatagtgttttcaaaaaaataatggaaaaaacgatggtgtattcaactgtaatgaagacaataaatttgggatcgactagtggaaatattaaacctaatttcagccatgttagcagccaaatgggtaattggattcaggaatggatgcaggattctagtatggaatctattattgaactgctcaatgaaagggcttaaagcacggttgaag

SEQ ID NO: 34819 - DNA, 259 bp, Gossypium hirsutum
  Clone ID: LIB3147-011-Q1-K1-A5
tccagtcgtccacacacctattaaatctaattactatgaccaaaagaacgacaatgccctgcgttgatttaaaatgccatgagcaaccagttacctttactattgaaacacattactaatattgagctcaatcgagacattcctatctgttactagatgccactaaagcctacactgctgacaatactatatataattgcgaatatgcatgcagagccatacatacaactctacctgactaaatttaatacacttcttg

SEQ ID NO: 34820 - DNA, 361 bp, Gossypium hirsutum
  Clone ID: LIB3147-011-Q1-K1-B1
acggcgtgcggtcttattcaacgtctgacatgatgctctatatcgaatatcatccaaaagagaagcgccagagatcatttgaataactgcgtgctggaagtacctgttaggcgcattatacgcccccatttgctgccaactgtgtgccttttcttctttggttattctccctctacatattaggcctttaccggaatatatgcctgacctttacatacgttggaaaggccgaaattttcgaggtgctcttcaaatgagcctaacgaaaatgtcagtactggctgtggctgaggctgacgctggtgaccgactatattaacctatttctttttttacaccctgtttttatgtttttattacc

SEQ ID NO: 34821 - DNA, 262 bp, Gossypium hirsutum
  Clone ID: LIB3147-011-Q1-K1-B11
cccacgcgtacggcgatttcttccggcgttattaatcacagaatgctctgaagacgaagcgttaggaggtgcaaaacatgcggcccaataaaggtggcaaggtggctgtgcccgccaagaagaaacaagagaaggccgtcaatccagtgttcgagaagcgtccaaagcatctcggcattgaaggggctctaccttctaagaaggatctgcatcgattcgcgaagtggactaatgttgttcgtatacaaaggaagaagacgat

SEQ ID NO: 34822 - DNA, 418 bp, Gossypium hirsutum
  Clone ID: LIB3147-011-Q1-K1-B12
gggttgttcagagtcggtgggtcgggtgaagtccagggtttggcccaatgtgtgggggaccttagcttggcggaatgtcaggattgtttgtcttccgccatccaacggctgaaaagcgaatgcgcggcagccgcttatggtgacatgtatttaggcaagtgttatgctaggttctccactgctggagataatggtcactatcatcctaaatcccataacgaaaaatctggcaacgaaggtgagaagacgtttgcaattatcattggattactggctgggatcgctttgctcatcatttttcttggtttcctaagaaaaggggtgaaccgaaatggtaaataatatttcaactttttcaaaattcaaatcattaaagggagaattggatatcctccaatcctttcctttcttttttttg

SEQ ID NO: 34823 - DNA, 395 bp, Gossypium hirsutum
  Clone ID: LIB3147-011-Q1-K1-B2
attccctatagtactatcacgtcttgaaacattctgggtttcatatgctccgcacttgaacttagaaatattcggcgagacgaatcagttgtttgcacgagcccttcgcatggttgatgtgaggagagtttggaccaaactaagactatgcaaaacccggaattttcatcagggtgcagaaagggcccgtgtttgggcttcttcactggcttcggtctctttaggcaaatcttcttcaggtagatcctcatcctcaccttaggttgttggaattttatctaactgagcttaaatgtagagaagggattcagggatcggagagggtgttacaaaccgttgcaatcctttgggttgattagtcaaaccaaggaaaagcccaaggaaggattccccaa

SEQ ID NO: 34824 - DNA, 284 bp, Gossypium hirsutum
  Clone ID: LIB3147-011-Q1-K1-B5
cggggtcgagccacgcgccacgcgtccggtcatctccaacgtcttacattaatactctatatcgactatcttccataggaagagcgacagagatcatttgaataacagcgggttggatgtccctgttatgcgcactatacgcccttttttgatgcctgttgagtgcctttggtttttgggctattccccctctaaatacttaagcctataccggaacctatgccctatctctacttactttgaaatgcccagagccctagagatgctcttaaactagccgtatg

SEQ ID NO: 34825 - DNA, 407 bp, Gossypium hirsutum
  Clone ID: LIB3147-011-Q1-K1-B7
cgcacgacgccacgcgttctggtatcatgtagaacggccctagaatatggcttaccacttcctaagagactgagaggcagaggatttatttactaaagatctgcttacctagccaaatgttcgcgaactcgacttacacctctccttccttgtgctggctcttggctccaagccttatccccttccctaaacctaaacctaaaccaaagccaaaccctactctctctccatcttgatctgaccagtgccctacacttacacttactctcctcacacatgctaagttgcacgcagactagatcatctgtaccattgatactcctcccggtcaacactggactgcatttattctatgccgtgctgaaatgaacactaacgaaagcctttacccgatgttgaatgctcat

SEQ ID NO: 34826 - DNA, 219 bp, Gossypium hirsutum
  Clone ID: LIB3147-011-Q1-K1-C11
caaatgcaacccatcccaccttctttaatatttaatggtactagttcccactgctgagtgtgggataactgtatatcaaagcatcgaaccaagaacctgcattcggttccacactccctaaaacaacaaattatagattgctcaataatgaggtctactttctatcagaacccacgaacaggaaaactatacatgcgtgcaacacaagtcatgcacatt

SEQ ID NO: 34827 - DNA, 222 bp, Gossypium hirsutum
  Clone ID: LIB3147-011-Q1-K1-C12
gcagacccaattcttagggtttcaactcaacttattatggggttttcccatcccgggattggaccattcgactgccgcattccaccattgaaattgatggacggtggctccccatggagtcaacctattctgatatcctaagcctaacctattaaggctaggttgcatgcccaagcacctacgtcaagcttattactcaacgctgaagatagggaatactat

SEQ ID NO: 34828 - DNA, 164 bp, Gossypium hirsutum
  Clone ID: LIB3147-011-Q1-K1-C5
acgacgcgtatgacatcactttctgcacactttgcctatacactcccaactgctctattgggaaccggtggatttgtgcatcaaagcctgaactcacatgctgcttccaacaacatggacagctcaactccgatctgaggaaacatgccgacaatctcatatcc

SEQ ID NO: 34829 - DNA, 266 bp, Gossypium hirsutum
  Clone ID: LIB3147-011-Q1-K1-C8
gcatttttaaattttaattttatggatcacatgtaaatatcaaatccaaacaaataaagcggatgcgcttggactgactctgcactgcaaggaacactcaattcactggtaataaaaacaaatgtgaatcaaagtacgcttggaaaaataagtaaaaaggaactaaagagttgaagtctggacgtacttggcaacctacccagagcatgcgacttatgaaatcttctatgagttgcaatgaaagccatatctgatcatcggaaact

SEQ ID NO: 34830 - DNA, 263 bp, Gossypium hirsutum
  Clone ID: LIB3147-011-Q1-K1-D6
aactaaacccaacgaagggctcctaccaagctcgctgataagacggactatcgcctcataagccagggaaaccctaggcaatgacaagtcttccaccacaggcttcccacccagcatatacttaatcaaaatctaacactgcaaatcaacaaaaaagtgaaacggaatcgccttcccaagctaaacaaggccctcaatgcagcaagccaaacaaaatgtcaccggatatatctataaacatcaactccaaaccccttttcatg

SEQ ID NO: 34831 - DNA, 244 bp, Gossypium hirsutum
  Clone ID: LIB3147-011-Q1-K1-D9
ctcacgctatttcccacgcgtcctcttagactgatgctctacacggccccttctgactgcgagctttattaacataaacttgaatacctcctattcatttccaaatatgatgaaccaaaaccaatatatccatacgcaactgcatctaactacacaaacccctaaaaactgcaaacattactgtgatcatctgctactagaaatgacagaccaaaacagtcagcatggaccataccagtatttt

SEQ ID NO: 34832 - DNA, 422 bp, Gossypium hirsutum
  unsure (1)..(422): unsure at all n locations
  Clone ID: LIB3147-011-Q1-K1-E10
ggaagnccggggccgacccacgcgtacgcccacgcgtccgattgcagataagttttgttcttactaatttctcattccctctaggcgaggcagtatttcgaccatgtgctcttaggcagcagattttgttgtaccataacagttgttggcataccataatctgcatgcctttgcttacgagatcattctttttattgaaacatacccctaccagaaccacttgaataaaaaaaaagaagacataagtatagaaaaaactcactaaaaggaactaaaaaaataatgaactccattagaagaatagtgatatgggataaacaacatatttaacatgtttaggactgccactttataggaacaggaggggggcccccctttaaaaaaacggtataaactgcgatctttgcctaaccaagttttgt

SEQ ID NO: 34833 - DNA, 311 bp, Gossypium hirsutum
  Clone ID: LIB3147-011-Q1-K1-E2
aagagatgtttagaggaagacatacaagattcgtatacaacagtgatgatgagattgaaagggaggaggatatgatacgcttgaagggattgccaacacctaaagggaagcacctgcgctttcctatagaggaagaagaaggtgcatgactgaaatttttttaaaaaacatttctgggtttttttggtagatatccatcagttgtctttcttgacacccatctttgagctgctttttgtttcccaaaaagatacttggaaacttgaaattgattgaataataaagaattatcttttctctccttcatggtt

SEQ ID NO: 34834 - DNA, 298 bp, Gossypium hirsutum
  Clone ID: LIB3147-011-Q1-K1-E3
tccggaatccgccgcgacgcacccacgcgtccgcgagctctgtaaatcttctcatcatatgctccctggcctccagcacggacaggagaaaatgtccaaaagtgatccatcgtcatcaatcttcatggaagatgacgaggcagaagtgaatgtgaaaataaaaaaggcatactgcccccctaaaattgttaagggcaatccgtgtttggaatacatcaagtacatcatattcccatggtttaatgagttcagggtggagcgcaatgcagacaatggtggcgacaagacttacaaggat

SEQ ID NO: 34835 - DNA, 309 bp, Gossypium hirsutum
  Clone ID: LIB3147-011-Q1-K1-E4
ccctgccccagcaccggacatccgggttttgaggtgtggccctccacccatgaacaaggccgtgactggacaccttgatgcactcggatattcaccggatatgcagttccagttctgatccttgtagactaagcttaagctcgactccgaatgtcatttgttgggtgcccttctgttataatcggaaccgctgctcagaacttgttataataagttttctatcaccatgattgaaaataatgtagacttgtgaacatactcatgtcggattcataatcagtcggtaatttacacccgataattacagcc

SEQ ID NO: 34836 - DNA, 320 bp, Gossypium hirsutum
  Clone ID: LIB3147-011-Q1-K1-E7
actcgggcggccactcgtgcatatatgcctttaaaacgttttcgcattcttccattcaaggggcgattgaaagggttgccaaaaaatatcccttgcacgggaatgaaaaaccagggagctaacagtgtggactacctacctgaaataaaccaggcttatctaacagaaaaagctatatatgagctagactgtgcagagaaaaaaaaaagaagtgttatagactaatttgtctaccataagaactgtaccttttcactgacctctctaatcctgtggaagctgtgcctgaaggagccccttattaatgcctgttaccggct

SEQ ID NO: 34837 - DNA, 301 bp, Gossypium hirsutum
  Clone ID: LIB3147-011-Q1-K1-E9
gtcacacttatcggttctgtaaaaatctggttgaatgatgagaacttggctactgaggggagggaccattttcatttgcgctgtggcttacctcatgacaaaggggcttaaggtagagtctacttccggtttgatgcaatataagggcatccttgcttgcgaaacttcagccgtcctactctatttctccacctgtatcataaacacaatcctgaaatcctctgccgtgggggctacatgaagttgctgagtgatatcatggaccacaagaaaccgggtgacctcaccctgtacaggatca

SEQ ID NO: 34838 - DNA, 284 bp, Gossypium hirsutum
  Clone ID: LIB3147-011-Q1-K1-F1
ctctggcggtgattcgggtatatatgccttcaaaacgttgtcaaattcttccattcaagtccgcattgaaaggcttacaaataaatctggttcccccagtatggaagacattgaagctttttctgtaagctacagagcaaaattggatgaagctgaacttgctcgatcagtagcagagaatataaccttggaggtttcatctcctggtgttgaaagagtagttcgaataccacaggatctagaccggttcaaggaccgctctctttatgtgaaatatgtgactg

SEQ ID NO: 34839 - DNA, 260 bp, Gossypium hirsutum
  Clone ID: LIB3147-011-Q1-K1-F11
gctactcctccgcacacgctttcgtttacgctttcagttgagaactagccttctagcgtgggggtcacatatgtcgtccagtgatggaaattccttgaggtcttggctcgatgtaatagtgcatagactcatcccaatgatgataaggatgatgatgctaccttctacatgtgtagcactcagagatgcgttgactgtagacctaccggactaaaatggggtcatatctatcactcaccatatccttgacatgacatata

SEQ ID NO: 34840 - DNA, 328 bp, Gossypium hirsutum
  Clone ID: LIB3147-011-Q1-K1-F3
ttattatcttacttggcgtcgaattactggaaatctcaggggtggctatgtagttattatcgatagctgtgttatagaaatgtgaagcggctcattgatgaggtaatgatgactcatctatttcaggaccaaatttcatcatatgtagaaacggggccgcgcaacataactggaaaaacctgagtaccttctgtttgcttcgagtttgagacaataattttctgttgaaaatttttgtcccaaacttgaaaattattgattcaggacctgccgaccacattggggttattgcccctgcctggccttgggcctccaatgatgaacaagg

SEQ ID NO: 34841 - DNA, 170 bp, Gossypium hirsutum
  unsure (1)..(170): unsure at all n locations
  Clone ID: LIB3147-011-Q1-K1-F5
cggaangaccggnngcgacggtttagcttgacggcgaagagtgcgcaggttaagtgaatctgcttagtattgggcgtagggggttatgaggggcgtaatcaagaaccaaaaagaaaaaaaaaaccagtaaaaagaaaattttatttcttacaaaggaaagaggggaatcg

SEQ ID NO: 34842 - DNA, 366 bp, Gossypium hirsutum
  Clone ID: LIB3147-011-Q1-K1-F7
cgggacgacccacgcgaccgacgcactcctacgacaccttttgcagatgttattctaatctccaacttatctggaggcctcgggaatagggcggctagaaaacatgatgagttactaaaccaacactgccctgacgatcaagctgttggagaaatgcatttggagaggatgtgtaacacacaaagtgaaagcccacttctgaagatcgtgcccgccaactccatgaatctgtaagatagctttttttccgtggtaagagacggaaaagctatatatcattctaaggttacgtgacacgcccaaatattttttcaatacatcttttaaaaagaatcccggactgccaaataaaatcccttttttgcg

SEQ ID NO: 34843 - DNA, 271 bp, Gossypium hirsutum
  Clone ID: LIB3147-011-Q1-K1-F9
gcgttgacgcgtaggcgcactgcgactgctatacttgcatctcagacaaaaccctactgaggcgggactccacgatatctgcagagaatgagagacctgtagaaatgaaaccgttgattcctctgtattccttaacctaatggcaaggagagatgattgtgactggttgcaaggaacaactcatggaggctttgacggtgattgacagggaccagagtggttgcatatcatggtgctgatcttcgccatacgatgacaaatctgcggtaga

SEQ ID NO: 34844 - DNA, 213 bp, Gossypium hirsutum
  Clone ID: LIB3147-011-Q1-K1-G12
cccacgcatccgcgatttcttcgtataagtttctatggacagctatgtcggccggagaattggccactcttgcccattatgtgtatactgggtataaatacaagccagaggcgcattacccatatttagccatctatgatgcaccggaagaggctgctgcagagcagttgaagctctatgatgattacgtattgctaaacctatcatcgcgaa

SEQ ID NO: 34845 - DNA, 228 bp, Gossypium hirsutum
  Clone ID: LIB3147-011-Q1-K1-G5
tcccacacgttcgggcaggctgatacagcaagagatcatatatgcacagagttacggaacaaatgagagacagaactcttgattaagctcaaggatataaaagccctactttttctccttcgtgttgccaaagtcactggtagtgcccccaataaactatgcaagattaaagttgtgaggctatccattgcacaagtatttactgtgatataccaaaaacagaacgct

SEQ ID NO: 34846 - DNA, 296 bp, Gossypium hirsutum
  unsure (1)..(296): unsure at all n locations
  Clone ID: LIB3147-011-Q1-K1-G6
cctcactccacccttcactatccttttattttttttcctaccttaaaaccacagggcctctgtganatttctgtttctactttcacttaaccttctacttcattccttcctatcctacctctaactataggaatgtttgtaacaaaaagctctcgtcacaactgctgatttacatgatgccaatccccagctaattctttagcatgaacttaggacccttcaactctatattccaaatatatagtcctcgcccagtattatccggacctatattcacacttaaagacgttgatgac

SEQ ID NO: 34847 - DNA, 410 bp, Gossypium hirsutum
  Clone ID: LIB3147-011-Q1-K1-G9
tactctcactagccgtggccgacaacctctccttaagtctcataggagccatggagcgtcggtggtttcaccaaattatccttttcccagaacccatttcactattttcccttaaacccctacaaccactgcagccctactcggaatctatcgctacgcctacaagcccgtctgcaacatctcttgcagaagacaatatctcaacgcctgtttgccctctctttgatcatcagccattagctccagcggacgattctaaaaatgaggaagaagaagaggaaatgaagaaacgagcaaggagagggagtgttactctaaaagtcgttaacattcttaatttcattcaaccgaaaagcgtttaaggaataccaggccctcaacttcacgttcactagggggtaaactgaaaa

SEQ ID NO: 34848 - DNA, 271 bp, Gossypium hirsutum
  Clone ID: LIB3147-011-Q1-K1-H11
aataagcccactattaacctgctaactggagttcttataatgaatatactgcataagacgggggagctgctagacgccttacagccaactcaaaccctaatgagatgttaacacagctggaagctctataagatcacgatgagcgttaacatcactatctagagttacggaattcatatgctggcgatgattttcctaagcacgatggctctcgcgatttcagaacgcatggagcgagaaacgccattgctaatcatcactcacttactgt

SEQ ID NO: 34849 - DNA, 256 bp, Gossypium hirsutum
  Clone ID: LIB3147-011-Q1-K1-H5
ccgggagtcgagggacgcgtcacgcgtaccgcgaaagcacacccgttggcacccatgtgcttgctaagcgacgccttgcactccttggtttgactaatgaacagaggggcccagcccttaccgtattgtggttgacgatgcctactatgccctataatatgacacggttgttgtacaagactgttctagagtctgtaataggagaattaacatgcaaaatgcaatactaggcgaatcacgatttatcatattcaat

SEQ ID NO: 34850 - DNA, 146 bp, Gossypium hirsutum
  unsure (1)..(146): unsure at all n locations
  Clone ID: LIB3147-011-Q1-K1-H7
tttattctttttttaacaaaaaaaacggacttccctttttcttccacataagaaccngagggcaacggcttttaacaaaggcccacaaacaattattcaaagttccatttctgcactatacacaaaatgacacacataggagccag

SEQ ID NO: 34851 - DNA, 352 bp, Gossypium hirsutum
  Clone ID: LIB3147-013-Q1-K1-A11
aattactctttcttattacattttctacaactttttcaacatcttccattgactgtttaactcatatactgcatttttcatatcaccaatatttattaaaatcacattttctgctttctgaacatataacataaaataatatccattgttatcaatgttattcgctttacttatcaatacaaacatgtttattactcactaacatttagatttattatcttcattcatcaatcctatcccctatatattaaattaaaaaaaaaaaaaatgccttccctttctaaatatccaaccttacttactccttcactcaactacataatttttttattaattaactctaaattaattc

SEQ ID NO: 34852 - DNA, 262 bp, Gossypium hirsutum
  Clone ID: LIB3147-013-Q1-K1-A9
acgcaagacgtctgatgctttgacacaaaaccttgcatttctactcacccatactccattggggattagaggatctgttatggctgtatttagagtcttgattatcacacttgaagttacatacaaaaatccattcgatgaggcatgcaacaactgctctagtactggtggcggtcaaagacattatataagagtgctaaactggaatatcactatcccacaaatgattgtataacttaataacggaccgattgatgatgca

SEQ ID NO: 34853 - DNA, 341 bp, Gossypium hirsutum
  Clone ID: LIB3147-013-Q1-K1-C10
ggccgacgcacgcgtgcgcccagcgcgtccgcccacgcgtccgcccacgtgtccgttgaacttccattgtgcgacagacaaatcggggtgcaatcctggttatcgaaatttttttacttcaacttaacgggaaccaaatcgttactgatgtagaattttgcattatattttcagtttaccattttcttcagggctttttatgcaatttcatgtttccatctgataaataaagatgatgtatgatgggaaaatgcaaatactgaaatttctaatgacatttctcatgtatacaattccttttcttggtggttttaattgagattctgcctactgaattgacc

SEQ ID NO: 34854 - DNA, 420 bp, Gossypium hirsutum
  unsure (1)..(420): unsure at all n locations
  Clone ID: LIB3147-013-Q1-K1-D9
gccgaccacgcgtacgcccacgcatccgattataatctgccacctattttggttacaacataattttcatgngctcgggtgagggtatgtcattcagactcttcattattctctcaagtacatataattgacgcttatgttcaacatgtcatcgatcatacccttgtaagagtcacgccctagcactctagaccaagttacatgcaaacaaattttactgagatgaagagtgtcaaaactgaagttgccgatcgctgaaggtggtgggctatggcatcatacacagtaatcatatgcgtcatatgattgtttcgatatagttagggcgttttccttctgctgagctatgccctacacgttatatgtcgaattgatgattgttcatccatttagctcactttgatttattttcacataaat

SEQ ID NO: 34855 - DNA, 443 bp, Gossypium hirsutum
  Clone ID: LIB3147-013-Q1-K1-E11
aaagaaaaaaaaaaatataaaaaaaaaattttttttattaaaaaaaaaaaaaaaaaaaaaagaaaagggttgattggcctttatggtttccccatttttacgtcccacgctttccaacgcaatcatcttttatattgggccctctaaagaaattccacaagcccaattttttacaacgtcgtttttcaaaaaaacccttgtgaaacccatttaagtccccttttaaaacacccctctttacacatctccttttacagcaaaaagaccatctaatagcccctccccaaacacccttcccaacaaaatcgaaaatgaaacgccccctgtaaccctccttaaaccgccgcgtttaatggtggatacactcatggttaccttcacatttaccagacctattaccccccgccctattgaattttactttttttttttttccctacttt

SEQ ID NO: 34856 - DNA, 311 bp, Gossypium hirsutum
  Clone ID: LIB3147-013-Q1-K1-E5
gtcatattatatacagacgcgcaatttcatttgactaccaggcttttcttgcatgggccgggctaatcaggaatctctggcaagactttcttctttgctagagcaaaagacacctcttcatgaaagcttggtttatgatgaacgaaaccaactttagcgcgtcttatctgtaatagagaaccctggaacccatcagccattgtgttgttttcaatattggatctagcatgagggctaaacctattttattggaaattttagagtgccacactggctaaatatacctgtgcacaagcatatctgaatgacag

SEQ ID NO: 34857 - DNA, 361 bp, Gossypium hirsutum
  Clone ID: LIB3147-013-Q1-K1-F10
gtttgtatctagtaaatttgtattgccttttgtaatccattttaatttcctgggaagcgggtctcaggttggctcattcctaaattcttgtaagaatagattgagaagattataaaatcagagttatttcaaaaaaaaaaaaaaaaaaaaaaaaaaaaaaacaaaaaaaaaaaaaaaaaaaaaaaaaaaaaaaaaaaaaaaaaaaaaaaaaaaataaaaataaggggtagggcgctggtttaccaaaaaaaaaaatcaaactaatcctggggggggggccttttaaggggacccaattttatccccggggggggggggggttattttttttaataagggcgaaaaaataaaaaattggggg

SEQ ID NO: 34858 - DNA, 464 bp, Gossypium hirsutum
  Clone ID: LIB3147-013-Q1-K1-F11
cccacgcgtccgggtttgggaagtttggtctcaggtgctcgctttataactgatggaatggtgcaagctgctgctgaatgccttgcatcttatatgagtgatgaagaaattcagaagggcatcttgtatccatctatcgacagtattcggcatattacagccgaggtcggagcatctgttctgcgagctgctgttgcggaagaactggcggaagggcatggagacgtgggtcctaaagaattggctcatatgtcgaaagaggagacggtgggatacgtatttcgaaatatgtggtaccccatttacagtccacttgttcaggaaaagtaggcttccattttattatctctcacaattgggaaatggaggccatttctatgtggaccgaggagataaataaaattgaattattaatcattaagagttcaataccgtctattgaaccagacagaagattatgttga

SEQ ID NO: 34859 - DNA, 203 bp, Gossypium hirsutum
  Clone ID: LIB3147-013-Q1-K1-G5
aatgctaaaagaacttttttttgtggaagaagaaacgctataaaggggccggttatggaatctgttgattcttccggttaaaaaaaacttgctatacaaaggcttgagatcacaaagaatgatcttcaacatcttattgcaaaagaggctttatgaaatgccaatttgcaagcttgcttggaaaggagaaaacaagctctact

SEQ ID NO: 34860 - DNA, 402 bp, Gossypium hirsutum
  Clone ID: LIB3147-013-Q1-K1-G9
gattttgttcatatcttttcattatgtagcatataatttttcctttggatgagtacaatatttcattacacgccaaactaatgtttggcaagttgaataaataatacgccacttcttactcaaaatgtatatttgcttgccttaagttcatgcatgaaaattttgttggcctcttttgtgatgttttactctttaatttattataaacattcacatgcaatttgtatgtttaaaggtctaattgtgcaggttgctggaagagaaaaaattaactgctctcatgttaaaaatcagctgattctaatcattatttgcgattatatttttaatacacacttatcttttctttttttatagtaatttgaatttttttataaatttttaattttttttaaatgaatt

SEQ ID NO: 34861 - DNA, 366 bp, Gossypium hirsutum
  unsure (1)..(366): unsure at all n locations
  Clone ID: LIB3147-013-Q1-K1-H8
ctgctattggctcttatcactgaacatcctttttaangcaaaaccttaaacaaaaggggcgtatcatttataagagcctattgcaacacactccttataccacaatgtaatttaatacaaatcaaatcctacataccttctttatctatatttatacatctacgcccccattcatacaatatgcttataacatcataacaaatctaaactttatctaaatacatacctacccttttgcttatcatcactatctatacaaattaataataaatatatatcacttacataccatatatttattattactgcacacaaccaaattacatatatttatacaaattttcatctatacctaattatatatat

SEQ ID NO: 34862 - DNA, 227 bp, Gossypium hirsutum
  Clone ID: LIB3147-015-Q1-K1-A5
gctttataccataagcatttggacaaagaatacaatggagaaagtgtcttatacatatgggcgggtcttttacttaacagatatgtttaacattattccttgaattattattctcaaaagtaccttgggaccatttacacaataatctttatattgttaccattaaaacaattattacatatttcttaatacctttctaatttgcttattttctaaaacaaatttac

SEQ ID NO: 34863 - DNA, 435 bp, Gossypium hirsutum
  Clone ID: LIB3147-015-Q1-K1-B12
gcagaggagaagagggccataatcgttttaaagacacggttgcagctgcagaagcagcagaagaatctgcaaaaaaagcaattactgccgcacaagctgctgcatatttggccaaccgagagagtaatctatttagtgaagcatctggttgtgtaggcaacgctgctcgaggatctgttccaacttctcctcctggaactaggagaatgtatgaatctcggagttttgggacgttcaaccctccaagtactgaggatgtaagacccggcaacaatggaggtggaaagacctgtaggagacacagctacaatcatgcccctgctgcacattcagatataaagtttgatgaatcagattgtgatgaagaaatagaaattgaagattatcctgttggcagcactgatctgccaccaccagtaccttctcttgagaaac

SEQ ID NO: 34864 - DNA, 358 bp, Gossypium hirsutum
  Clone ID: LIB3147-015-Q1-K1-B9
gccgtacggtgctgaaggctgggggctgcggcgctccttgctgctagggcttactagcggagtcaaacctaggtttagattttgggccattgggccctattgtaaatgggtatttgggtttgttattgggcttgtattggttgtaatcggacttggactgctggtttggttttattattatttggtttatgtttgtatgggcccgggctaaattggcccattacataaagaatatttaaaaaaattgaaaaacttctacttaaaaaaaaaaaaaaaaaaaaaaaaaaaaaaaaatataaaaaaaaaaataaaaaaaaaaaaaaaaaaaaaaaaaaaataaaaaaaaaaaaaataattg

SEQ ID NO: 34865 - DNA, 140 bp, Gossypium hirsutum
  Clone ID: LIB3147-015-Q1-K1-C1
atattttcatgtcaaaacaaagtttagcatatacttatgttactcacgtgttaagcttcatcagcattgtaagctatccagatgtcaaattttgcatcaaactgtacactctctgcaatgaaaagctcttttgggggccc

SEQ ID NO: 34866 - DNA, 396 bp, Gossypium hirsutum
  Clone ID: LIB3147-015-Q1-K1-C6
cccacgcgtccgcgtgctttcatcttcttcaaattaggagcttgttgaaggaaacgaaaagcttttgcttgaacttgatgctggtgattaggcttttttgaggggtaagttcttaaagaattgcagcatttaatttatgctataacttgtgtttggtaaataaaaatatctactatttgcatcaaaaaaaaaaaaaaaaaaaaaaaaaaaaaaaaaaaaaaaaaaaaaaaaaaaaaaaaaaaaaaaaaaaaaaaaaaaaaaaaaaaaaaaaaaaaaaaaaaaaaaaaaaaaaaaaaaataaaaaaaaaaaatatataatagggggggcccttttaaaaaattcaaatttttttccccggttttggcaaataaatatttttttttaggcccccaaaa

SEQ ID NO: 34867 - DNA, 164 bp, Gossypium hirsutum
  Clone ID: LIB3147-015-Q1-K1-C8
cccacgcgtccgtatcccttaaaatcagtcctttacataccacttcagatcaaagtgttatgcctatttcacacaccattcatttacaaatattaagggacaaatgccaagtggattgtagagaggcaaaatatgttcttataaatataattgtgtttcttgcc

SEQ ID NO: 34868 - DNA, 372 bp, Gossypium hirsutum
  Clone ID: LIB3147-015-Q1-K1-D5
gttattttatatatatgtgagagacaagatttagaagttagctaaatgacttctcatacagagtgcaaggagtcttgttttttttatatgtacttcagagcagctgatttcctttgttttttatttttatttttattttttattatcctttttggagttataatgttgctagcttttgtagcattttgtatttccaatataaatatagtttgtacaacaatgttttgtttcacttctactgttcaagtttcaattgagttgtgacaagaattacatggctatgctaccatgaaagagagaaataaaaaacagttatcatttaagcaaacaatataattttactaaaaataaaacgtatttttaaataatatt

SEQ ID NO: 34869 - DNA, 435 bp, Gossypium hirsutum
  Clone ID: LIB3147-015-Q1-K1-E11
gaaagattccatcaggattggatctcccaagtgatgttgtcgatgagaaggctgactaagggacctgatacaaattgtcctctgaacattatgtttcatgcttgtgatttagcgctgcctaaactcataattaggtatggcttatggtactatatattcatatggtgattttggcatgtggatgaggaaattcaacatggtaattgatatacaaatagattgtaagaactttgtaaagaaccggttgttggaattcctttggtttgcaaagactgaagaagttacaggtgcctcaaatctcaactatctatatgttttactgtaaaaaaaaaaaaaaaaaaaaaaaaaaaaaaaaaaaaaaaaaaaaaaaaaaaatagggaaataatattaaataattaaaaaaatttaattttttattttttatttattaatta

SEQ ID NO: 34870 - DNA, 432 bp, Gossypium hirsutum
  unsure (1)..(432): unsure at all n locations
  Clone ID: LIB3147-015-Q1-K1-E2
cccacgcgtccgaagagttgaaaggctttttaaaataacaagaatcggctaaaaagaaaaaagaacaattgcatacctttataaagaaatcgacttcctttgactccttcgggatttggcttgttgctattcggttagcaataaaaagaatgataggttcggcttttactataaatgaaagagaggaagaatgagaggtagagagtttgtggaagaaataatggaagagaaaagagagggattagcttaagaacaatcggcaagaggagaaagaaaagagaagaggggaagagatgagagaaggaaagaaaataataaaaaaaatgagagaattgtttagcttttgggaaaaaaatagaaaagaatatgagcaaaaggagattcgattnatcaaaaaaaatccaaaatttataaatttctattaaataataa

SEQ ID NO: 34871 - DNA, 432 bp, Gossypium hirsutum
  unsure (1)..(432): unsure at all n locations
  Clone ID: LIB3147-015-Q1-K1-E5
gtccgacggtatacatgggatattcctccatgatcctgttagtttcatggctctagctcgggccgatctcttcacatacaagaagggagtggtgagggtcgaaacgcagggcatatacaaggggcataccttgttggatcaaggattaaaaagatggaatggaagcaatccatggacaggctattccccagtatccgttgcatggacagtcaatgtggatgaagtccttaattatattaaacaacagttgatgaaaccatgaaacaaaaagctggaaatactcacttgacaattaaaaagatgtcctcaagattagatcacctttgaaattgatttctgcttaaaggtccctttgtagtttattcccttcttgctttacccatttctggggttaaaaagctaataattgttctcgtatcntgtctttaatgg

SEQ ID NO: 34872 - DNA, 436 bp, Gossypium hirsutum
  Clone ID: LIB3147-015-Q1-K1-E6
cccacgcgtccgcgacatcacggtggtgcttgaccagcccctggttggccaaggcatgtccgataaccccatgaacgccgtcttcatcccatctcctcttccagttgaggtttcgcttatccaagttgttggtatcactcattttggaagctatattgaagccgccagtggtgaaaacttcgcaggtggtgcttcttcctctccagctgttgaatacatgaacaatcttgacgagacaacttttcgaggtgggtttatcctagaaaaagttatgggtccgatttcgacaggccatttggagcttcggacccgaaatccaaacgataacccatcagttaccttcaattatttcaaggatccacaagacctgcaaagatgtgtccaaggaattcaaaccattgagaaaatcatcgaatcaaaggctttctttagattc

SEQ ID NO: 34873 - DNA, 309 bp, Gossypium hirsutum
  Clone ID: LIB3147-015-Q1-K1-F3
caacaatccggttctcgaggttgctggccaatggaatgggaaagagcaataagcatccattattgaaatccaagcctggttttaaatcttcaaccccctcaacaacaaaggttcaaccaggtgacactttgtggagcatctcgtctcgtattcacggtaccggggctaaatggaaagaattggcagcccttaatcctcatattcgaaaccctaacgttatattacccaatgaaactatcagatatcgataagtagtatatgcattggaatctgctttgagattattacagtgttgatgagttctgcttg

SEQ ID NO: 34874 - DNA, 428 bp, Gossypium hirsutum
  Clone ID: LIB3147-015-Q1-K1-G12
cccacgcgtccgacagaattcaaacaataataatatattaaatcttcttcatttccggcggacccatggagacagttatcggaaatccattcatcaaggcattgattattcttttcttggtatctgcaactaccgccgctggcgacgctccgttcattatttcccacaagaaggcttcgctcaccagacttaattcctgcgctgaacgcgtctccgtctctatcgacatctacaatcaaggcttctcgacggtgtatgatgtgagtcttgtcgatgatagctggcccaaagatttatttgatatcatcagcggtaacacttcaaagtcatgggagagacttgatgccggtggcattttatctcattcatttgaattagatgccaaaagacaaggaatgttccatggtgcaccagcagttattacttac

SEQ ID NO: 34875 - DNA, 430 bp, Gossypium hirsutum
  Clone ID: LIB3147-015-Q1-K1-G9
gcgccacccgcatctcgtctctcttatcgggttctgcctttcagaaaaggagatgttcggtgtgttagagtacatgagcagagggtcactcgctcatgttctctacgggaaggatcatgttccactggcttggaaacataggctacacatatgtatcggtgcagcacgtggattacattaccttcacactggagcgaagcgtgctgtaatccaccataacatcaagagctcaaacatatttttagatgaagaatggtgttctaaactttcagattttggattgtccaaactgcctcttagcacgtcaaaagccttgacaagaatcgacacagatcatgcggtgggaactagtggatatatggccccagagcatcgcgtgcgtttactgaaagaaaaatccgatgtcttctcatttgggattgttttgtac

SEQ ID NO: 34876 - DNA, 308 bp, Gossypium hirsutum
  Clone ID: LIB3147-015-Q1-K1-H10
gtgaggtacaagctggttgaatgtttctataaagaaccacgggattttgagtttgggggtgtcttacgagctttagacatgcccattctgtaacttcttaaaatgatatatttttgaattgtagtgcttcattttgaagaagtgaagcaataatgtctctaaaaattgtttttctagacactacttgtttcattttcaagaaattatttaaatcctctccgggagagaggacagtcttgagattaaaaaaaaaaaaaaaaaatataatcaaaaaaaaaaaaaaaaaaattaaataaaaaaatggggcg

SEQ ID NO: 34877 - DNA, 290 bp, Gossypium hirsutum
  Clone ID: LIB3147-015-Q1-K1-H12
acgcgtacgggctgatcgacaagaaagagttatctctccttcaagagctcattgaatccatcatagggccttgctaaatatataagggtttaattcaattccccttaaaaatctccgtttttcttatgattttacatttttatcacatattttttattgaagccctgacaggccggcagcccccttgtgtcatcccggcttgatgcttgcatctgttggacttaaatcttcaatattcttttatttaaattaatcaaggaaatccaatatggacatatcacataatatgc

SEQ ID NO: 34878 - DNA, 384 bp, Gossypium hirsutum
  Clone ID: LIB3147-015-Q1-K1-H4
atttttgcagttaaattgtagtggaaatcaatattatgagacgagtaaggaaaattgagaaggtattttcaattgaaaatttccaatttttacttcaaaaaaaaaaaaaaaaaaaaaaaaaaaaaaaaaaaaaaaaaaaaaaaaaaaaaaaaaaaaaaaaaaaaaaattaaaaaaaaaaaaaaaacaaaaaaaaaaaaaaaaaaaaaaaaaaaaaaaaataaaaataaaaaaaaaatataataaaaaaaatttggggggggcacctctttgaagaaacaaaacttaattccccgtgcaacaaaaacttttttttttatattggggaacaaacaaaaaaatccactcccatcgctttcaaaaccagttgctcaaaaaaccttggg

SEQ ID NO: 34879 - DNA, 164 bp, Gossypium hirsutum
  Clone ID: LIB3147-017-Q1-K1-A1
cccacgcgtccgattgactctaactctgattcttgatagaaaacatgaaatcaatgcgaagatctcaaccaagaggaagaagactgcactaaaaagttatgctctattgacatcaaggtcaaggataagaaaaagaagaaaagtttagcagcttaatgtttttt

SEQ ID NO: 34880 - DNA, 289 bp, Gossypium hirsutum
  unsure (1)..(289): unsure at all n locations
  Clone ID: LIB3147-017-Q1-K1-A3
acgcgtacgctggctttctttgttttaggcatgtattgntatttaaggccaattctattacaacagcggggaaacaaagatcccgacgatgaaaatctttggtacaatgcataatggtaagggaaaactgaactacgcccagcacatgaagaggagcaagtactgcatttgtcctagaggttacgaggttaacagtccacgcgtggtggaggccatattttatgaatgtgtttccggtatcatatctgacaatttcgttccttcttttttcgagggttttgaattggga

SEQ ID NO: 34881 - DNA, 145 bp, Gossypium hirsutum
  Clone ID: LIB3147-017-Q1-K1-A7
ttatcacttcccgggatctctcgaggggtatgttcatagcagggggcggacacgaaaggctgcggcaaaaggaacagcctatactttcttcacagctgcaaatgcaagattcgccaaagaacttatcgccatactggaggaagct

SEQ ID NO: 34882 - DNA, 367 bp, Gossypium hirsutum
  Clone ID: LIB3147-017-Q1-K1-B12
gacccacgcgtgcgcggacgcattttttatctcgtgatcattttcaagctcaggccccagctcacgcggcggcatctagagatttgcgtggggcatactaaactgcgtttacacatgccaccatcaattgcttttgctactagaggacgcttacaaggactaagactccaacttgcacttcttgaccgtgaatttgacgatctggattatgaaaccctcagagcattggattctgataatatttccacaactccttcaatgagtgaggaagagataaatgctttacccgttcacaagtacaaggttcctggaacagagagtgctggatcattaccaaagcaggcatcatcttcgtctgctccagttg

SEQ ID NO: 34883 - DNA, 195 bp, Gossypium hirsutum
  Clone ID: LIB3147-017-Q1-K1-B2
ccaagccttccccaacccttccgtctatccttccgttttccttccgttaagttttcctttttttgggaaggcaccgatccatgagggggaactgattatcataattttcatttgtaatatttttgggtttttttaaaccctaactgtataaacaatgcaccggttccttttataatgcagaaattaaacgaccaa

SEQ ID NO: 34884 - DNA, 149 bp, Gossypium hirsutum
  unsure (1)..(149): unsure at all n locations
  Clone ID: LIB3147-017-Q1-K1-B4
cggacgcgtgggtctttattgttttttgtgttgaaatggtgaaatgaaaatgaatgctgtcccatcaaaacaaactgctgctcttactattagagaatttatatgattcattggagagtttttattaaaccaaagtttgggtttggntt

SEQ ID NO: 34885 - DNA, 255 bp, Gossypium hirsutum
  Clone ID: LIB3147-017-Q1-K1-C1
ctagttctagatcgcgagcggccgcttttttttttttttttggaactctaatgaaaggaataagtaaccaatctgatggcacacacagtagagatagacaagcaatacagtacactaccaagaaacatagtgggatttaccaaacaaaaatgaagactttaaaagaacagattaattgctatctttaaacttggaaaggccaaggccagttcttcaaatcctcatctgcaactttcccattcccctgtttcaatg

SEQ ID NO: 34886 - DNA, 280 bp, Gossypium hirsutum
  unsure (1)..(280): unsure at all n locations
  Clone ID: LIB3147-017-Q1-K1-C10
gacccacacgtccgtaaaaaaaatttttataaacaaaaataataaaaaccaaaaaaaaaacaaccgccgggcgctttttaaaaaaccttccgcgccctcacatacatccnacttaataactcttctatacacctaaataaatttaattcaccgcccctcaccaaacaactaactaactaaaacaaccctcaccatacccaaatcaatttccttcccatacatccccctttcaccagctgacctactattaaacatgcccctatcgatctaccttcccaac

SEQ ID NO: 34887 - DNA, 383 bp, Gossypium hirsutum
  Clone ID: LIB3147-017-Q1-K1-D12
cccacgcgttcgtaaagggctgttgttcatatgactggcaaatccactgccggggaggggccaaagtctaggactaccgtcgtctccgttgagcatgtcggggacaccgacggctgtagatccaacgctttcgagagggcattagcaaccgaccggcgagggcatcgtttaactcgatcgacatcaccatgtgcgagccgtcaaggccaaatagcgacggtgtgccgccgtgcgcagtgaccttgctggagtgttcaaaacaaaagccgagaaaactgaaactagtccagcggtagtaaaagaggaagaacccttggggggaagtaagccgccgcctttttccgaatacctttttcccctgtaataaaaaaattcaaattaca

SEQ ID NO: 34888 - DNA, 369 bp, Gossypium hirsutum
  unsure (1)..(369): unsure at all n locations
  Clone ID: LIB3147-017-Q1-K1-D8
gaaacccgcggcgacccacgcgtccgtccacgcgtccggtgcaaatatgttttatccaggtgttccagatgcccttaaattggctagctcaagtatatatatagtcactacaaaacaggtgctgtgagtttctttcactctgattgtcccttcctcctctctcacacaacgcacacatgcacaagaacaagatgaaaagtttgctatcagttcgaagaggcaaacattgtggatatatcggtagtttgatccagtctccggaatttgaaatgaaaaccaaggcaaaaggaaagaataagggggtaaaaggaacttgaatgtaggaaagtatcatagttgagatcagtcatagnctttcctggttctcct

SEQ ID NO: 34889 - DNA, 407 bp, Gossypium hirsutum
  Clone ID: LIB3147-017-Q1-K1-E12
gtttgaagttagttccactccttatatggtgatgagacagtagctgcagaaggcggtggtgtcccgtacgtgtgcgtttgcaccgaaaccataaagaagaggagcttgccggagagttcagtgtactttagagaagaagaggtgctagacatgcaggatgttacggttctttggctacctggcggtgttacaagttatgtggatgtaagtaacgatggcactcttactatcggagtcggatggtactcagatgagggaatcaaccttgttatggagcgagattacggcatcgatgggaagttgaaggaagttagatggaaatcagaggtcaagagactgtggtctcatccagtttctttgtaaatttattactttttgaatgctaacttcacaacagcaaatgctta

SEQ ID NO: 34890 - DNA, 294 bp, Gossypium hirsutum
  Clone ID: LIB3147-017-Q1-K1-E4
aataaatttcctgtaagaggcggcatttgtgatcaaaattactattctagctttcacaagacacgtaaccgaaagaaattgacgaaacaagaatggaaagatttcactcgcgagtctacccggcacgccattgcagatttggcggcaaccccagagttcactgattggatgattgaacatgctgacaggattaaactccttccttgtgatagttcagaagaatcagttggaagcaaatcaaattcatccgattatgatgaagaaggaagctccagccgattcagattatttaac

SEQ ID NO: 34891 - DNA, 393 bp, Gossypium hirsutum
  unsure (1)..(393): unsure at all n locations
  Clone ID: LIB3147-017-Q1-K1-E6
gtccgggatgatcaatcttgttcagaagttttttttatgaaggaaatgctgaaaaacaaagcggcttcagttctgcgatcatgtggctggtacattgatgtttacaatttcatgtattcgaggaagcagtcatatgcactggagactggaagcactctgagtgacaatgatttggagaagaagctgattgcagatgcgaagccaacctttattccacaaattcctgagtcactgaaagaggaatttattaaacttctccagtctttcagccaaacgaaacaagaatctccggatccttgatcggcatcgctgtcctgttgcgcgaaanacctgtgtataatctgtcctagtaatcagtattgtaacgaaagaccattatcaggcgaatgtcag

SEQ ID NO: 34892 - DNA, 393 bp, Gossypium hirsutum
  Clone ID: LIB3147-017-Q1-K1-F11
gcaattcctcaagagctgccacattttcgtcggggatggcaacgtgggcaccctgggtgaggtacacgtggtgtccggcctcccagcggcatccagcgtggagaagcttgagatccttgacgatgaacgtcatgtgcttagctttagcgtggttggaggtgatcatcggttgaccaattacaggtctgtcacaaccctacaccattctcccaagggtaacgggacacttgtcgttgaatcattcgtcgtagatataccagtcggaaacagtagagaagatacgtgcatttttgtggataccattgtacgttgcaaccttcaatctttggctcgaatggcagaaaatatggcaagaacagaataatcatcatcatcatccgcataatgtataaa

SEQ ID NO: 34893 - DNA, 387 bp, Gossypium hirsutum
  Clone ID: LIB3147-017-Q1-K1-F12
gctagtcgctacttcactttatgtttttaccactcaaactctcgacaaggagcggggtataactatcctgagtggagcaattgcagcttgcactgaagcaataaagcatcacatgggtaaacttgatgtcaaggagcagactatagccgtgagcgaacgggatgataaactgctggctgaccacatggctaaattgcggaatgataatgaagaggtgagtggagatgaagatagcgaataagacgaagacacaggcctgggtgaagacgatgttgagaatgcaggtcatgggataatggaatagcggcgcttcttcatacaaggagaaggataattatcaattttgttttgaccaacacttatttcaattggcctcatctcatggat

SEQ ID NO: 34894 - DNA, 149 bp, Gossypium hirsutum
  Clone ID: LIB3147-017-Q1-K1-F2
catgtctatccttggttcttataaggcgcctgtataaagaaagggctggtttttgttccgcaagaaaatggacaggtacaagttaattaaggaagttggagatggaacatttgggagggtgtggcgagctattcataagcagtctgggg

SEQ ID NO: 34895 - DNA, 334 bp, Gossypium hirsutum
  unsure (1)..(334): unsure at all n locations
  Clone ID: LIB3147-017-Q1-K1-F6
aaatgctgtagtttgtggagcttgaagaaggtgccaggctcnagactcattactctgagagtggaaccttcactgttttagttaaccctgaggagtctttcttcgaatggaatggaagcctaatcatgtgtttacaaaccggagtaaataatggacatattcaatttagaaatggtgcctataagattaggggtaactaggacagtgcatattcatgatccccgaaggttataaatattctaattatacatggagctgcctaccattgactttctttgtactttgtgatgatatgacgtatagtagaaaaggatatgatggttttcaccctana

SEQ ID NO: 34896 - DNA, 225 bp, Gossypium hirsutum
  unsure (1)..(225): unsure at all n locations
  Clone ID: LIB3147-017-Q1-K1-G12
aaacccgcggcgacccacgcgtccgagttattagctattgtgtcgnngtcngcaaagaacggcgttcaattgtaatggcgtgcttatatctcagatttatgggttccaacaagtgataagctgttttggggctctgcttttcttttttaatgttgttttggaacttgtaatatatgcctggtctactactagcgtttaacttgtaagggcacttcttctctcctc

SEQ ID NO: 34897 - DNA, 143 bp, Gossypium hirsutum
  unsure (1)..(143): unsure at all n locations
  Clone ID: LIB3147-017-Q1-K1-G2
atatgaactttcattttggtaatttnttgnttttgtaatatttgaatggtataatgaggtgataaaatgtcattacggtgttgtaacctttttatgttgtggattatgacatataaactaatgaaatcatgtaactttttgtt

SEQ ID NO: 34898 - DNA, 198 bp, Gossypium hirsutum
  Clone ID: LIB3147-017-Q1-K1-G6
ctctctaacacaaagcatggctaatttgatcatccgccattgagtctgaatccgttattggaaattactgttttgttctgtgatgttaaaaagtacttaaactatgaattttgtgcattttgatccttgtatttatcaaacttcctttttaaggaaataatcttaaatgtgtgctcgcgttcgtgattacatcgcaat

SEQ ID NO: 34899 - DNA, 226 bp, Gossypium hirsutum
  unsure (1)..(226): unsure at all n locations
  Clone ID: LIB3147-017-Q1-K1-H9
cgaccaaacnccgaaaaaaaaaatattaccccctggttatttcaccccacaacgnaaanaacccccgcccttttttaaacacctggcgccccctaaaaccnaananggaaaacaaaaacagccttgcctcttcagaggaaacggtccttatcaaacgaaaagcttcactgttagcaacacttcattactacaccgctatgcatacccacaccccagcctccccctc

SEQ ID NO: 34900 - DNA, 264 bp, Gossypium hirsutum
  unsure (1)..(264): unsure at all n locations
  Clone ID: LIB3147-018-Q1-K1-A10
tggagcgaagaaagggaatagtcanaaaacaacatgatacaaaaattattacaaatggccagtaacgcaaaagaggccgcattacactggtttatctataaactcccaccaacccatcagcaataaattactgacatctaaacaatcaggtagatagcacagacacatgtatcaatataccaggcggacaacacctataaggtctctagtgctctctcctgctataaaactggcagctaacgtatacatgcactcctttatcaa

SEQ ID NO: 34901 - DNA, 323 bp, Gossypium hirsutum
  Clone ID: LIB3147-018-Q1-K1-C12
gcaaaagccctgtcagactcaacgggaaatgacaaagaagcctattatgagcccttaagagaccttgtcaaaatggtcttcggctcgatattggcatctctcttgctattgacaccaaaagtactgctcgcatttaagaataacctcttttagatagaaaattaatggaaaaaaataaaaaagcttactatgttcataaagtaaatacgggtctatgattctgataaaaattacaggaacttgtttgaatgccactattttggctttgcataaaaaaaaaagagatttttgaagactaagtatccaattttttgaatttaagg

SEQ ID NO: 34902 - DNA, 355 bp, Gossypium hirsutum
  Clone ID: LIB3147-018-Q1-K1-D12
acggtttgccatttgccctactcatctctctctttctcataaaacctcttgctatacactatccggctacactggcaccggactccatggctactgcacaggccgtctcacttcacactgcaatccatgaggagaaacccgccgaagtcgtcaacgttgcagaaattgcaacaaacgaggaaccgcctgttgctcctgcagcctaacactgtcgatgcataaccaaatgacgcagtgcctgaagcaccatcccgagaaccccacgctccagaaactgaagccacagttgaaactgaatcaaaggaggtggttaaagagcccacggctgctactgacgagcccgaagttgacaaaa

SEQ ID NO: 34903 - DNA, 250 bp, Gossypium hirsutum
  Clone ID: LIB3147-018-Q1-K1-E11
accacgcgtccggttggctcatggaatcaaagttcttttttttttccttaagttgaaaaaggtttgatttgcatttccatctctacaattacaagaatgaccccaaagagaaggttcatagtgttgaaagatgggtggcaaattgggcaaaagaacaaaaaggaaaggaaaaaaaatgcgcattgaacgatgagttgctgtatgtttgtttccctacggagatattgagattccttaaattttccatcta

SEQ ID NO: 34904 - DNA, 386 bp, Gossypium hirsutum
  Clone ID: LIB3147-018-Q1-K1-E12
tgtgtctgtcgtgtcgacggcaaagatttttcagattttggtcagacatggtggacaacggttcatgggattccctttctgaattcaccttagctgaggttctggaaatggagaacaagtacaaggcaataggagatgaaacgcttaatgaggaattctgcaacaatctagctaccagattcagttgctcttcaaaccgtcttggaaaatctactataacatggcaacaggtccaactttttttccaagaaaaacaaatggaggtacaaactcagcaagagtcatcagcaatggccttaaagctatttgttgatctttctggtgaagattcaagcaaaccgcttgagggtcatgcaaaagcgaaaaggtacagttgaagaccttaa

SEQ ID NO: 34905 - DNA, 322 bp, Gossypium hirsutum
  Clone ID: LIB3147-018-Q1-K1-F12
cgcgtacgattccgtcttcacttaacacgttacccgcctccaaacaaacctctctcaccgccactctggcactgtctactaacccctatcttgcctttcaagtttccggcgaaattaattcataatgaatgcaaaaaggaaacgcccggatacggcttctgcttctgtgacagaacacgaacgaattgttcatgaagtaatccgaagcaagcaagacatgggaatatcgcaacaagacatgaaacgtgaaattaatcttgacagcaacctaatcgccaaatgtattaagtcactggtatctaagaatctcataaaagaagtg

SEQ ID NO: 34906 - DNA, 296 bp, Gossypium hirsutum
  Clone ID: LIB3147-018-Q1-K1-G10
aaataccggcccgaagcacattaccaaagtaaacacacctatgtaccacgtttttatccccgatcacctatatccgtctatccgcgggccaaaatccaatattcgacccatcccgcatacaaacatcacaatctcttatgaatcacaacaatattaccaagattattttctcttaaccgcgcctgcgcttctcctactaatctatcacaaacatctactctcttacctactatactacacactctttattggctgatatgactgttcatacaccattttactaaatctgttccctg

SEQ ID NO: 34907 - DNA, 187 bp, Gossypium hirsutum
  Clone ID: LIB3147-018-Q1-K1-H10
aacagggatcggcgggatgacgacaaactgtaatacgactttctatggggagatttgatacccctgcaagtacaggcccttaagtgcggtttataccaacgcggtgccctcataccatgtcttacaccctcacgctgtctactatcataccgcctcccaaatggagaaccacgccagcaacgcttct

SEQ ID NO: 34908 - DNA, 463 bp, Gossypium hirsutum
  unsure (1)..(463): unsure at all n locations
  Clone ID: LIB3147-019-Q1-K1-A5
ccgggaaggaannnccgggcgcaggccacgcgtccgttacaagaaacaatccttactctcacacaaacttttgttttctgcacaccagatttgggagcgcttattaaataagtaatgccacccaaatatccctccaagaacacaacagacaagtgtctatgatcatataaacacacattcactcatgcaggacatgcagtcataagttttataggggtcacatacaccaagactgtactgaagatcgactatatcattatgatctacctatccaaactgcttcaacaaaaaagttatgttttgtgacgaacaaaacaaacagaggacaggcttactaatccacaacaacactcgcctgcaagcttccctcaacatatatcatatgtgcaaccgaactcaattattttagctgacgtttacatccatctctgagatgaaatccatgtttttcgcatccaaatta

SEQ ID NO: 34909 - DNA, 294 bp, Gossypium hirsutum
  Clone ID: LIB3147-019-Q1-K1-A6
aacaaatcacatgtcctctcccatgtgcatcatgtcctctcgtcatgctgtgaaagtgtaaagtcccatctccggtttctatgaaagcactgcccgttgatggtatctaaattaccttaaaaaaattatgcaagtttaagaatgcttggatttttcgaacaagcttgaaagcagcaatttggttttcgaactgatcattgtgtatccacccaaaatgtaatacattggttctttataaataaattaggatttgacaaaaaaaaaaaaaggcgccgtctaagatcaacttactcc

SEQ ID NO: 34910 - DNA, 228 bp, Gossypium hirsutum
  Clone ID: LIB3147-019-Q1-K1-B11
ccgagttgttgtatgaactaagatacgagtatttttatctatttttaaagagattaggtggtctttttgggttagaattcggtccatttccggtacacattcttcattgtcattcacatggtgaagaatccatccattaaattatatttgtgagtgaatagtgaaaatatgtattggagggttgggaggggagatcaaaaaaataaactatagacttgtttttatttg

SEQ ID NO: 34911 - DNA, 212 bp, Gossypium hirsutum
  Clone ID: LIB3147-019-Q1-K1-B5
cccacgcgttcgtccaaacatacaagatttgccaaatcacaccatccttgcattaccagggtggtgctgaccccaagatgcatcttcctgctaactatgcctcgccaatattgcacccctaccattggtctgatgaatactcattacttccaccgtggaactgctgctcttcctcaatccagtcagcatctatcaagatgactgctcttctt

SEQ ID NO: 34912 - DNA, 292 bp, Gossypium hirsutum
  Clone ID: LIB3147-019-Q1-K1-C1
gcgaaaaatggctagtctttaatcattagtattggttttggttaatgtcttatgggttcttggtggagtgtttaactttataaatacagttatggcttatatacatgtaaaatactgcaagctatgttttgttgattatatggtgaatgagatgatatataagatgagatgaatgtatgcaatggattttcaaagggaaaaaaaagtggtcataattgtacaagtttttaggcatttgagtcttcaatctattttgtttttgtttcttaaataaaagaacaaatattgattg

SEQ ID NO: 34913 - DNA, 508 bp, Gossypium hirsutum
  Clone ID: LIB3147-019-Q1-K1-C11
cgggtcggccgacgcgtacgcccacgcgtccgggcaacctaaggctcatcggtgctacgatcgagctgaagatgttatccgaggttgttttgaggggaacccatttaagaccgttccaggaccttttaagctcttttggcagtgcatgcgttctaaacctggggaggaaccaacagagccatacacctatttgcagctggatcccccaaagagggaggtggagcttgaatgaaatgcccttttttgcactttcttttagattttgattgttgctgttactggaggacacttttcatatcagtcatctacgagaaaggtagatgttctgaatgtcactgatataaggctctcttggcaataagtaggagtgtgtgaacaaagaattttagaagtattgcagtgactattatctattcaaatgctggttttctctcatttgcaatacacagttatttattctttgttgaatggtattgtccttttactggaaaatcgatttgttccattt

SEQ ID NO: 34914 - DNA, 327 bp, Gossypium hirsutum
  unsure (1)..(327): unsure at all n locations
  Clone ID: LIB3147-019-Q1-K1-C2
ggcttctgaactggctgcctttccagtttgccactccctttttatcatttttctaattttcagctctctttctgtttaggttaaaatttttttcttggggaaatctttttgtattttcagggtgaatcactaaaagggttaatgtatttattataaatatgttatatagcgttgctgaaaaataaaaaagacattgcagaggggtttagttgaaaacccaacattttcttctctaaataataaaaattggactgaaatatccccanngaaaaaaaaacaaaaaaaaaaaataacaagaacataaataaaaaaaaaagtgataaaaac

SEQ ID NO: 34915 - DNA, 419 bp, Gossypium hirsutum
  Clone ID: LIB3147-019-Q1-K1-C9
aaaaaaaaaaaaaaaaaaaaaaaaaacaaaaaaatttaacaataaaaaaaaaaaaaaaaaagaaaaatttaatataaaataaaaaccactttacaaaacaaattcttgcttgcctttttaatgtttccaacttactttcccttacttatctcgggaattccttttttttattctcccttaaaccaatcccactgccccatcttaaccaccccctatctacaaaaaccctttccaaacccaaattaatttccttcccttactatccctttttccctactttccttatcattaaaaagccccactcctttctcctttcccaataattcccctcactaattcccaatttacaccccccttaatgggacaaattaacccctaccttttttattttactttcaaattattccccttccttcccc

SEQ ID NO: 34916 - DNA, 490 bp, Gossypium hirsutum
  Clone ID: LIB3147-019-Q1-K1-D10
ggcgaagatgggtttttcgtcgacggtgatgccaccgtcgtgttccaggacgacgaagcgagtgatgatagggtcaccgggttataccgaccctcattacttgagaaccgggttggcttccaaaaagaacgatgtttacagcttgggtgttattattttagagcttgttactgggatggaagctttttgtcccgaaaggggacaattattgacgtcgataatggcgcccaatttaaaagccattagtgaagttgggacggcggtcgaagtggcggagctggtggatccacgtttgggtggagaatatgatttggatgaagctaaggctatggtttcaattgctgggctttgccttcaccagtcgccgactgttaggccatcagcttcgcaaatcatgcaaataatgaaggagaaaatgggttccattgacttactcttgtcgcccgccaaagattgccgccataaataactaattgatggtgacaaacat

SEQ ID NO: 34917 - DNA, 265 bp, Gossypium hirsutum
  Clone ID: LIB3147-019-Q1-K1-D5
gataaaaggaactcattgctggaagccatgaaggtgtgcttggaaggtggcttacacgggagggtttcaaatataagaggggtatgtcaagatcccatatcagggcctaatatcaaatactgcaacctctctgtactaacatataataaactcaccaatgtgcctcttgctgtgcacatgctatacttactgtgaatactttgggtgatagctgctttcgttctagagatctaactaaccgtgcctcatataataaatccagcca

SEQ ID NO: 34918 - DNA, 112 bp, Gossypium hirsutum
  Clone ID: LIB3147-019-Q1-K1-E2
aacgttaacatcattgatattgatcctaaaggtggtatgataatcacatcgaacggccaaggggagctggaccaggtggccggaaggtttgcagttgccttctgagtgactt

SEQ ID NO: 34919 - DNA, 292 bp, Gossypium hirsutum
  Clone ID: LIB3147-019-Q1-K1-F7
aaataaggggtttttttatgtatgatgtcgtcaatcttatattccctttataatattctccaaaaaaaaaaacattttttttccttaatctctgacaaataaaatatcgacctgtttttaatggaactaaatatcataagcacccacccatttttattttataatataagtcacgcacattcaatttatttctgggaattttattcatacaaccgctaacaattacgattttaccaaatttattaccattgctaaaaattgaagttttgcctgctatttttattattaaaaa

SEQ ID NO: 34920 - DNA, 465 bp, Gossypium hirsutum
  Clone ID: LIB3147-019-Q1-K1-G11
gcgtccgcccacgcgtccggagaaagtcaatagaaagttacctgatggtcatacaaagatcgaagatgggtggctttaagagtgaggcaataataagttttgaagagatccctgccctgctgaataccccaaaagaggaaccagactctcaaaatgacaaggttgctgataatattaaaagcaaaatcataaatgtagacaagatattggtgcccaaagaagatctgcaacaggaagtaggcactggaaagttaccaaaagctgtagatggttccgctggtagcacgagaatggaatttgatgctattgagaaggatgaaaatagggagcagaacgatttgaaaaagatttttgagcccggctgtgtttttgttcaatatagaagaacagaagcatcatgcatggctgcacactctatacatggacggttatttgataaccgggtgtgacagtagagtacatcaa

SEQ ID NO: 34921 - DNA, 277 bp, Gossypium hirsutum
  Clone ID: LIB3147-019-Q1-K1-G6
atcttgtggaaaccattgcaaaagatataaaaatgttcaacaagctttcatctaaaggggggggatttttctaagggtatcactcatgtctcttgtacgatgataacatatgtccagcagatattcgctatgatcggtgcgtgcaatcttatttctaaacagaacctgattatcattaagacgcttgaagcaaacaaacgtaatgacttcatcaaaacttataagggcgacttataaaacacaacaaaactttatgaacctttagagcctggaatat

SEQ ID NO: 34922 - DNA, 361 bp, Gossypium hirsutum
  Clone ID: LIB3147-020-Q1-K1-A5
gtgaaaaggctggatggttaacaaaggcttttatgactgattgcatgatcgtaacagcagcggcaggatgtggcatacgtccgtgcatacatactggcactcaaagatgtatgataccgcagaggggtgactgatgaacctgccgctgatgctatgatgatagctgctgtgggtaatgagaccaaaacactaagtactgctgctctgacggatgacaaagcattaaggggtctaggcactgatgaggttcacatgaacgatgagactcttatgatcactgacgaagacctgcccaagtgtgacaaacaactgaaactgctgagagtcaatgctcaatatgaggagctgactgatgatgctc

SEQ ID NO: 34923 - DNA, 334 bp, Gossypium hirsutum
  Clone ID: LIB3147-020-Q1-K1-A6
gggcggttcgctgcccgcgacgtcgcgagaagtgcactcgccatatatcattgagaggcagaggcggaagcaacatcaggcgcagagaagcaaccacataaacttgagagaaagtggaccttccggtttgatatccaatcaaagcctaaacaaggcgccgcttgaggtacctatctacgcaaggtttacacatttgacaccgtagaagaattttggagtttgtatgaacaaatattcaagcgcaccaagctgctcgtgaatgcttatttacacttgtttaaggccggaatagaacccaaatgggaagataccgagtgtgctagtggatgaaagt

SEQ ID NO: 34924 - DNA, 367 bp, Gossypium hirsutum
  Clone ID: LIB3147-020-Q1-K1-A7
gaataatgactagaacgtttacaaacttttctttgcaagttagagctgggggggatggggctaacattgaggcacctgagcatgcagaacgggttcttgatgcaaacattgggggctacatggtaagtgtacacctttggcaaaacgtggctgatgcatattacaatagggatacacaatctacacatgataaaatactagatgttggcatcatatgttgaaccaggccaccttgaagcactgaagtggtgacttccagtgccctaagacttgcacatagacagtcggtaaaatacagatcttgcttgcatggctgttcaaatgatggagaaccttggtctcatcaccatgacattgccatatacat

SEQ ID NO: 34925 - DNA, 377 bp, Gossypium hirsutum
  Clone ID: LIB3147-020-Q1-K1-B3
cagacgcgtgggcagacgcttgggcagactcgtggactgacgcgttgtcaggaaagaagggttcgaaagattctaatctcgggggcgatatgttatccaagatcgacatggaacgagctggagtgctagttggaactggcatgggtcgtctaacggtattatgtgacggaattcaaaatctgatggagcaaggctattgaacaataacatcattcttcattccctatgctataacaaacatgtcatctgccttgctagccattgatctaggactcatgggaacaaattattcaatgtcaactgcttgtgctacctccaattattgcttctatgctgctgccaaacacatccgtcgaggtgaggcttgaatgatgatt

SEQ ID NO: 34926 - DNA, 248 bp, Gossypium hirsutum
  Clone ID: LIB3147-020-Q1-K1-B7
cacacgcgtccgcagactcatgcccagtctttatcgctgtttcttaaacactaaagatgggttcaattgaggctaatatccggtcctatatgtgatccaagaacgacaacgtaccagctgacctgctaccttgaactaacaatgggcctgtaacgacttgattagacagcattaaaaagctgatggaacacagctgttgtatagcaacagttgattcatacacctactcgctaacagacaattcataa

SEQ ID NO: 34927 - DNA, 264 bp, Gossypium hirsutum
  Clone ID: LIB3147-020-Q1-K1-C1
gaaggtaacagattgcatgataccatggagttgaagaacgcaatggataatatgttgcatagcatttgaagcgctaccttgagccatgcaatgacatggtattttacctactcagtctgagcactatattattctactcctttgatattatcagcctatctttagatgtcactatgtgggcatgacaaagcctgcgaaaactcattactgcggttcgctttgtataacgcctccataacaatccaacggtttattttatcacct

SEQ ID NO: 34928 - DNA, 178 bp, Gossypium hirsutum
  Clone ID: LIB3147-020-Q1-K1-C5
attccaagaccctactgttttgccagaatccatacactgtattcggtatgaggaacatatgggaagaagcatgtggtgagagcgacacatgatacatatgatagaccaactgaagtgtatacatatcaatacatgccaactgcccactcgatcgatgtgtccactacagtgattctat

SEQ ID NO: 34929 - DNA, 373 bp, Gossypium hirsutum
  Clone ID: LIB3147-020-Q1-K1-D12
ctttatctgggcctaaatatttgtaaattgtcattggtatgtagattttttttatttggagcgtttttttttattttttatttatttttgatttttaatttctattttttaatgggcccaggtgaatgggcctctttcagaataaaaaaaaaaaaaaaaaaaaatttttaaaaaaaattttaaaaaaataaaaaaaaaatatgggctgcggctttctctgaataaaacttacgttcgcgtgcgtgcgaagtcataatttttattttttgttacctaaaataaatttactgtccttggaatgacaacgacatgtgctgggaaaaaaaaaacgttaactatctacattaaacttgtggcataaacaccttttttt

SEQ ID NO: 34930 - DNA, 301 bp, Gossypium hirsutum
  Clone ID: LIB3147-020-Q1-K1-D4
tgcaatcttaccatcatttcatggcatagtttttgcttcttgagaatgtagacacgatggcggccattcggaaagatgcgcgttacgtaccagtgagcatgtgatgaaagaccagccgatccctcgagcactggaggagcatttgcggattgatgatagcgaagacgaccctattaagaaacaccaagctccatacattaggacacattgagctcaaggacgagaagatgattgataatgaggagttcaagccatggacaaacatttcatcttacggcgatgactctaatgtacaacgaca

SEQ ID NO: 34931 - DNA, 302 bp, Gossypium hirsutum
  Clone ID: LIB3147-020-Q1-K1-D5
cccacgcgtccgttcacgcgttcggaaagcttgagcgtaacaaaagcgtagacaccgggcgggcggtgcttgacacctgccgtggcatacgtttgacatctgacgatatgggtctcgatgcctacagctgtaaagggctggttaacataggacagcaaatctctcatcttggctaaggcgtccatgtccatttcatcatgcgtcctgggggcatcggcgctggtgaccagcgccatttgcgtgtttacaccacagataaaacctccgaactgatgccattgaccaattttttaccaacccaa

SEQ ID NO: 34932 - DNA, 293 bp, Gossypium hirsutum
  Clone ID: LIB3147-020-Q1-K1-D6
acggcttttaaggtcctcaatatgagtctgaaacaatagatcaagtgctgacgatgcctaaaaaaatctttcccaatcattgggaacttaaattattaatcttgtcctggaaaacactggggagcataattttaattttttaataacctaaggggttttcttgggtttcttacttaattggaaaccttccaattttggtagggacggtgttttggttggctaattaataatcccttctagaagggtggggccttccttatggttgggtgagggggtgagaatatattatatcg

SEQ ID NO: 34933 - DNA, 397 bp, Gossypium hirsutum
  Clone ID: LIB3147-020-Q1-K1-D7
cacgcgtccgcgcaagcgttcctttatttctttgcatttttttgacttgttttgtctgtagacaccattggggcaattcggaaagatgctggtgagtactggggagctgtaacgaaagatcagcctatgcgccgaggcacatacagcagcattgctcggattgatgctgccgttgccgacaactaggagaaaacctagtgccatacatcatgtaacattgatcttaaggaagagaatattattgtttatgaagaattccaaccaaggccaaacatttcaacttacggtgatgactctaatctaaaaagagatggatcatcatctttagcagacgattttgaacacgacacctaacatttcggcttacgggggcaatgatgctggtcttaaatgacag

SEQ ID NO: 34934 - DNA, 282 bp, Gossypium hirsutum
  Clone ID: LIB3147-020-Q1-K1-E1
tggagtcattcttggaaagcgttattaatttagggcttttttagcattcctttacgtgtatgattgtactacgcagctgatttttgttgtgtttgcattttccttctttaagctatgaagcagaatagataagctttatttgctcggttttgaggttcttgtggggaacttgttttcattttttaccttgaccgctttgtcaaaaacagtcagctttatgcatatcgatattgaagtctgtatgcatgaaaattgaattggattgatacatgtctctggttt

SEQ ID NO: 34935 - DNA, 315 bp, Gossypium hirsutum
  Clone ID: LIB3147-020-Q1-K1-E11
cccacgcgtccgggaacttctgtcatggtgttggttgaagtttttggggtttctacaatgcggactttgcacaagtgatgattgcttttagagtcgattttcacttgtttccttacaatcttaattttcattaccccattgtttttagtcattgttggagaaaatgttgtgccttctgttggtaaacattacgcaggcattgtctgaatctaatcaaattgaactcccaacttagcagagttaaaaaaaaaaaaaaaaaaaaaaaataaactaaacaaaaaaaaacattcaaaaataaaaaaaacataaaaattg

SEQ ID NO: 34936 - DNA, 386 bp, Gossypium hirsutum
  Clone ID: LIB3147-020-Q1-K1-E2
gtcatattggcaggcaaatccaaagatactttccaggtagagagagctaaatcacggaacatggaatctgaacctcaaatggatgccacagccgatgcttcttgattcaggatctgagttctaagtacagagagggtgccagtgcctgcaaatgagggtctcacgactcaagtatgcacgacttaagtatgataatgctgcgactatatttcagctcatgcggttggtcatttacagaatcttagatacggcgagtcatagatctgacataatatgtcgtacctaggcatatattcgtcggacctcatactctaaggtgtctatgtataaaaaaaattataccgactgtatgctttgtgtaaagatcgcattaggaatatactacg

SEQ ID NO: 34937 - DNA, 297 bp, Gossypium hirsutum
  Clone ID: LIB3147-020-Q1-K1-E3
ggcattcttaccatcagatcagccaatagtttttgcgtctagagaatcgacaaacacaaggggccatacaacgcgattcgtttacaatgcagcgtgcctcttaactctgccagcgcctctgcagtaaaaatgcgctgcccctgccgcctgatgcaaggctagcaccgcccatgaggcgaccttaacacaatcatgggcgacttattgctgtccacgtacggctaataattgatggtatcgaattaaagccgagtagaaggatggccctactacggctaaaattgactgaccatcgcc

SEQ ID NO: 34938 - DNA, 349 bp, Gossypium hirsutum
  Clone ID: LIB3147-020-Q1-K1-E4
cccagtcatcctggcatatcagcagagcgtttgcgcgtattgaggaccgtcaaacagaaggggatgtagatggtcataggtgtcgaagcgtgcctgcctctgaccgctgccagcgcctctgcaatgcagatgccctgcccctgcgcggggctgcagggcttgtacggcgcttgcgccgacctgaccacgatcatgggcgcctgtgggctgtacccctacgcgtagtacctgatgcagccgcagtgcagcccggtagcagcagcgccctactacgctcggtgtgggcagacgagcgccatgtaccatcctctgcggcgacagggctgacagcagcaaatgacgatgatgg

SEQ ID NO: 34939 - DNA, 212 bp, Gossypium hirsutum
  Clone ID: LIB3147-020-Q1-K1-E5
cttactcttatatctaattttatgcgatgataatagaaaaaaagagaatcggaatctaccagcaatcaccacctttgaatatcttgcgtttgccttctatagattctgatactgtattatagatactacatgtgtcctatctttaggagcaaaatgaaaactagaagaaaaaccacccctcttacaattaaaaaaaaaacatgggctgtcat

SEQ ID NO: 34940 - DNA, 212 bp, Gossypium hirsutum
  Clone ID: LIB3147-020-Q1-K1-F1
gccaggcgtacgaggccagagatcctagccttgatacatgtgcactaagacgacaccgagagcgatactgctagatacgagacctggtgctacggcgttcccgttgttggtgagctaacatgcgctgtgacatactctgatcattagaactacccgagtccatcacgcggccatatacagctacaatgtgtgcatctacatcagagctgctg

SEQ ID NO: 34941 - DNA, 316 bp, Gossypium hirsutum
  Clone ID: LIB3147-020-Q1-K1-F7
cgcgtcggcggacgcgtccgaaaaaaaacacagaaagattcctctgaagttgattcctggttctctgagggccgccattgagccgatgcgctatggtcatcggacctccacactgagatccacgctccgccaccgactccatcacacattatggtcggaacttgaagagtttaacttttgaagggacttgcgaaaaatcctgctctggcactggcttgatgatggtgctccgttggcgtctgtctcggcgtgacttgggaccggtaataatggactcgacggtttagctggaacaacatgagctaaagggtcatga

SEQ ID NO: 34942 - DNA, 324 bp, Gossypium hirsutum
  Clone ID: LIB3147-020-Q1-K1-F8
gacccacgcgtcgacccatgcgttctgacacgcatccgcccactctttccgagggtggaaacgatgcagctatgcgggaaatcgctgacggtcaagacaattactttcgcggtcaaaaggacgagagtagtcacatcaaaagagcgtatactctatactttgacagaatacaagctgtccaataaccaatgatttgtggcgcaaaacatctagaatgatgccatacatcgcctgacttcttttttagaatgaatcaacacttcatctctttatgatgttgataggcgtaattattgaaccgattgggatggcttttgcttgtaa

SEQ ID NO: 34943 - DNA, 286 bp, Gossypium hirsutum
  Clone ID: LIB3147-020-Q1-K1-G3
cccacgcgtgcgagcaaagaccttgcgtttgtgagcaacgttagctctgaacgaacagtggagaacaaggagcgatggttgttcaatttcatggggaaaaaaggactggagaagcctcatgacgaggtgatcgtctccgattttgaacaggttaatactggaacatacatgcgcaaaggaaaagtgcgacgagaacaagaagcttcgtctcatggaaaagcttcaccgataagatagcattagttgcagctctttaagcgactatgaagaaggtgaacgataagag

SEQ ID NO: 34944 - DNA, 366 bp, Gossypium hirsutum
  unsure (1)..(366): unsure at all n locations
  Clone ID: LIB3147-020-Q1-K1-G6
gccacgcgntcgaaacatgaagtcacatttactgggatgcgacagtgagaaccacgaggcagcataggagcttttcttttacgcacgatcatagtccaagactctgctgaagacatgacatggacgtccacatattgctgaagcaagcacacaaggctcttttggtgcagtgcagtagcgaactctctggctcaactcgaaacatactatgcctggggtgaaagtgaagaatccacacagggcacgtttgttaagggctatacctatcaatgcgtaagacactgaaatatctggtttttgtgcatctatggctttttgagcgaggattattacttgctgtcagataagctttttacatattattgt

SEQ ID NO: 34945 - DNA, 391 bp, Gossypium hirsutum
  Clone ID: LIB3147-020-Q1-K1-G8
gactcattcgttctgctacaacttccactcatattgaagctatctactgctcaattcatattctccacggcatctgctgttcctaaagacgactcagatgaggaaagaacctatcctgcttattatgaaaattcctcacatcatcaacgtcgataaatagacttattctaatagtaatgctagagatgctatcttactctcatatactgataacgcattgctattaccacacagtattagacatcatcaccacgttttcccctcgaaatttacgttcaagaaaacaagatctaaatagatttatgaggtagatgattctttgcaggatacaccaggctcacctgtccacagtcccaaggttagtgatgagtctaaaccaaatgatatgaat

SEQ ID NO: 34946 - DNA, 395 bp, Gossypium hirsutum
  Clone ID: LIB3147-020-Q1-K1-H2
ctcttctcttctgcttaatttgactgatatggaagattactctatcaattcatctatacacaaatctgctatttctaaggacgactcagttgaagaaagtggctggactgcttattttgaagatttctcaaatcatcagcagcaaaaagatagttattcttatagttttgattgtgattcttccttgatctcagatgctgctactgcatggaaatcaccccacaatattgaccatcatcaccatgttttccccaagaaattaaggttcaagaaaacaagaactaaagagatttatgaggaggatgattctttggaggatacagcaagctcacctgtcaacagtcccaaggttagtgatgagttgaaaccaaatgatatgaatcctagaaagagag

SEQ ID NO: 34947 - DNA, 350 bp, Gossypium hirsutum
  Clone ID: LIB3147-020-Q1-K1-H5
cgtccgggaggaaaactcttgcatttatgtctttcttttaaaaagatttgacaggtgacatttcagggtgtgtttcggtcgaattgtactcattgcacgaatgggagttcaagtttcatgaacaagaacgtgaatgttggaaccatcaagaagacaacagttgcacttaccgaatggaatgccagtggagaaacctcaggagccgcatatactgattctaattcaactgaagaatggccatcacaaactacagttactgggtcaagaaaaaaatcttctcttgcatatactaaggaagaataacatgttcgaactttagctgtgtttgtttttaacaagttatcactctt

SEQ ID NO: 34948 - DNA, 424 bp, Gossypium hirsutum
  unsure (1)..(424): unsure at all n locations
  Clone ID: LIB3147-020-Q1-K1-H6
ggctgccgacggagcaaggaaccagttgtttctcaacgaaatatagagatgggaagctcaagcaaagatcttctacggtttgaacaccataaatcctcttcttcacccttagaatccgctctacttgtttgtaagaaaaaggactcggaatctcaaactcatgaacctgatccttccaagaaaccccccttcactccttttcctaaaagccaagttttggggaaagtgaaagatttcttgggagtcatggcagaagctaataaaaggctggagcttgatgcaaagaataattctcaagcatatgatattgaagtactcaatgggaatgattctgaagtcattgaaatggatttgatgttaggtgtagctgatcttcacacancctaagctctggctgctgctgaatctgcaattgctggcaatc

SEQ ID NO: 34949 - DNA, 479 bp, Gossypium hirsutum
  unsure (1)..(479): unsure at all n locations
  Clone ID: LIB3147-021-Q1-K1-B10
attggtttcaatgtggaatttgtggaatacattaacatcttctttactgactgaaatattaggggccaggtgtgggctttacttccaaaacacacaaagactcatttttgtggttgataacaatgatcgtgatcgtgtggtcaaaaccagggatgaattgcacaagatgttgaactaagatgatttgagggatgctgagctgctggtatttgcaaacaagcaaaaacttccaaatgctatgaatgctgccgaaatcaatgacaagcttggccttcattttctccgtcagcgccacttttacatacataacacaattttctctttctgttaaagactgtatcaaggactgtatngtctctcaaacaacattgcgaaacaagcttatttgaaacaattgaaccgacttttatactaacaatggccccattttgatgttcttgatgtccatctcgtacaactgttctggcttttttttttta

SEQ ID NO: 34950 - DNA, 247 bp, Gossypium hirsutum
  Clone ID: LIB3147-021-Q1-K1-D10
actaaatatttaaaccataatctctaaacttcattcaacgacacttcaatgagtggaatttgttaactttttctacgaccgagacccctacaaaatctatccattctcattcatctagatcgattatgaacactattgaatctacaaacaatccacttaaaacgatttctgtggtgttgaatttttatagagatatgaacatattgttgaaattttttcaaagtcgaaaaaagctttttaatgcatt

SEQ ID NO: 34951 - DNA, 330 bp, Gossypium hirsutum
  Clone ID: LIB3147-021-Q1-K1-D11
gggaaacagcccatggctttgtctgtggaccatataccaaatcgagaagatgaatatgaaaggattgaagccgctggaggcaaggttatccaatggaatggtcatagagtttttggtgttcttgcaatgtcaaggtccattggtgatagatatttgaagccgtggatcattccggatccagaagtagtgtttgttcctagagcgaaagaagatgaatgcctcattttggccagtgatggtctatgggatgtaatgtcaaatgaagaagcatgtgacctagctcggagacgaatacttcaatggcacaaaaagaacggtactacactgact

SEQ ID NO: 34952 - DNA, 391 bp, Gossypium hirsutum
  Clone ID: LIB3147-021-Q1-K1-E10
gttcaattgaattagtttagtttaagctttgcctactctaaatctaggtgttggagttggcttgagggatgaaactaggaaggcattgacagtgaaacttctggaaccaaagaggacaaaattggtttgagagataaaaccataattaaaggtgaacttgggaaggtaaaaaaacaaagagaaaggaaagagatttggttaatggtaaaactgagatagaagggaggcagggctgcagaatatgcagaagggaaaagaaaaggttgtgttggatggaggagaaggaaaaaaaatactgaaaagtaatgcataaaatgatgcttttgtgggggataaggataaaatggaaagaaattataatgaaaatatgttttaaggattgggatgatgt

SEQ ID NO: 34953 - DNA, 407 bp, Gossypium hirsutum
  Clone ID: LIB3147-021-Q1-K1-E12
cccacgcgtccgcccacgcgtccggccccggtttaaagcgcccgaaggccgtgttctcttggcccgagctcgagagaagagcccattttcttcccctttgggaatcgatttcaacgacggagcaggggctccgacgacactactctgaggttcaggtaagtcctcttttctcttcccttttttattttttattttaaaaactaatttaagaacaaaaaataaaaataaaaaaacgagagaatgaaattcaaccttttttttttgcttaatcgtgtgtctttttttacaatatttcgcctttttggcttcttatagccgaaaacaaaaaatttaaatctattggttgctattggtttggctttggtttctctacctttttggcggtttcccttttctggcattgttgc

SEQ ID NO: 34954 - DNA, 406 bp, Gossypium hirsutum
  Clone ID: LIB3147-021-Q1-K1-F11
cccacgcgtccgtccagcgtatccttcatctgcattccctcctccaccttcggcttatcctccaccacattcggcttaccctccaccaccttccgcataccctccgccaccttcatcgtatcccccatctacgtatccacaacaatcaccctattatccgccaggtcctttcccgggtcattatcccccaccaccgtactaaaacctccaaggaggagacaattcctcatcggccaagggtttcacgtgtcaaccgaaagcaaaaatgagaagtatttaaaatattgtgtggaaacagaaaacttagaactctgtaatagccattgtatagttttgaccttttaataatgatataccattcaagttggggatttctttttaggtcatttctacttctgttttggtc

SEQ ID NO: 34955 - DNA, 417 bp, Gossypium hirsutum
  Clone ID: LIB3147-021-Q1-K1-F12
ggaccacccacgcgtccggcgcgcccttttttttttttttttttcatatatttatcctttttcaccaacaaaaaaaacaaaccgcattctttttacccttcaccaccttccacataccctccaacacacttatcatatcccccatctacgtatccacaacaatcaccctattatacgccaaatcctttccctgatcattattccccaccaccgtactaaaacctacaattatgaaacaattccttatctttcaattatttcacttcttaatcaaaagcataaatgataagtatttataatattttctttaaacatataacttacaacttttgtataacccattcttttttttgactttttattattattatacatttcacttctcaattaattataaaacattctactctctttttc

SEQ ID NO: 34956 - DNA, 407 bp, Gossypium hirsutum
  Clone ID: LIB3147-021-Q1-K1-F9
cccacgcgtccgcccacgcgttcggaattaaagtttacataaggaaataagttactatcaaaacatgcaggaaaaaagtttcatctggcaatatagtaatttgtagacccaaaataatattcgacctcttcaatagctttccctttttttggtaaattggcctatttaccacctttttccaggatgatcttctcctgtgtatataatgtatacaccaataggtcgggtaaagaactgaagcagcttggcaatgtgacccaaaatcttttagcctttggggaaagcaaaatgtgagcaatagatgcaggtttttctatcttgcaactgtaaaaagtatttggattttttttcaatatttttcataattaatttttatttaataatatgataaaaggctttatggttta

SEQ ID NO: 34957 - DNA, 301 bp, Gossypium hirsutum
  Clone ID: LIB3147-021-Q1-K1-G10
cgggcgggagcttacttatttctaacttctttgtcatttataggcgcgctttatatacttgtgattgtggtgtttggtgtcagacccttaacacatattatattgcattcttcgcaaaggctatgctctactttagctccgagattctaccctgccacccagaagagccgctcatgtacacctttgtttgtggttcacatgatgatgccaagagctgacgggttcacaagaccaagctaagagccatccatgtcgcaaatatttcctttatatgttaaaagcatgggttcgaaccccacct

SEQ ID NO: 34958 - DNA, 300 bp, Gossypium hirsutum
  Clone ID: LIB3147-022-Q1-K1-A2
tacactgagtagatagaacattatcgagcagcaggcgcaagtgttctgaagcattggtggagcaggtggacttggttgcgtatgctgtttaatggggtgtgctgactggcgacgaaaggaaccgtctgtctggagctgacaaaaaggtgaatgacgctaggagggcttcatggaggattgtctcttctattgagcagaaagatgagagctgatgaaatgaggatcatgtggcatccatcaagaagtctgggagctagatcgtagctgagctcatgaagatgtgtgatgggagattgagcc

SEQ ID NO: 34959 - DNA, 206 bp, Gossypium hirsutum
  Clone ID: LIB3147-022-Q1-K1-A6
ggaacgcaatcttaacataggagaacccatcattgatttctaaaacttcctgttgttgtaatgtaaatatatagagaaagtttccaaagagattgatcctaagccaaccggtcaccagatttttatgtttggtgatgattcgagttgtttcactgtggggagaaaagcccatatttaagcaatgaatagcatttgagttgttcaac

SEQ ID NO: 34960 - DNA, 220 bp, Gossypium hirsutum
  Clone ID: LIB3147-022-Q1-K1-A7
agcacgatccattgggttgattgggcacactttccatccgtataaaccgaagcacccgcggatattctcggccaagggaaaaaaggtctctacacttaatgagacaacacttccagccgccggtgccatctcctctagcattgttgttacacagagtcctcgtgtgtgtctgcatatttatatgggatgtcggggtgaggctcatattatattttgtgac

SEQ ID NO: 34961 - DNA, 254 bp, Gossypium hirsutum
  Clone ID: LIB3147-022-Q1-K1-B1
agtgattgtgtggttgtataggtagtttcctttttttccccggaatttctgccgttgtcccattttccgtgttttgcatttcatatttgtaatctgcaattagtgtgatttgtctttcaagtttgttaatattcttgtattgagatctgtttggttgtgttattcattaatagttgcttatagatctggaatgattgtttttgttttttcttcggatgttggatgctgtttttaagggtgaggttttgtttggt

SEQ ID NO: 34962 - DNA, 396 bp, Gossypium hirsutum
  Clone ID: LIB3147-022-Q1-K1-B11
gctgcagttacagagtctttggagttacacaagataaaaaaccgacaatgggctattttgaaaacttcagcaataaaaggggaaggtctttttgaaggcttggattggttgagtaatacacttaaatccggaagcggctaactcttagcatgaagaatttgaagcattgctgctatgtgatccagatggagtggggaacgagcaatggtgttttgcttagtattatgatctgatagaaatttgagccatgagaaaagttgtgtcaattgaccttcctaaatttctgcttttattattatttttttggggtaaacatctggtatacatgtaaaatttttgttaaacatttaaccatttccttttattttatgttagcctctcttttagtttttcaaa

SEQ ID NO: 34963 - DNA, 259 bp, Gossypium hirsutum
  Clone ID: LIB3147-022-Q1-K1-B7
atggtatgaacgtggatgaggctggagactggagcacgtacatgacgcaccaggcatagcttgcctatcggataaactatcatgcaattggcatatgggccggagagagagattagagcacgttcaagctcgcgagacggggggggggggcattaaagatgaacaacccgtacgtgtaatgaggggtctctaggtgccaatcaggctcgttaaatttgagctcatgtgcatcggtgtttttattacaagacgcagattg

SEQ ID NO: 34964 - DNA, 419 bp, Gossypium hirsutum
  Clone ID: LIB3147-022-Q1-K1-C7
gttccagcttaaggccaatgaagcaaaacttgaggctgagaggcttcaaaggattgcacgggggaaatttgatgaattgggagaacagtatgctatcaaatacctgtaactacagctgagtgaggcaaaagctgagaagcaatatttgcttgaaaaactaaagctgcaggagttctaacagacattgcagaggagtagtggaggtgacccttaacttatgtattccaaaatacgtgatcacgctccatgggtacaatatgattgccgctgaaacagagtctcagccaaatgagcgccatcgctttagagcaaatccgtgactgtatgatgtgcgagttataatatgtcgctctgatgctaaaatagtgggttaagggttgctgttgcattttaatgtatgaaaccttcaatgaattgtc

SEQ ID NO: 34965 - DNA, 307 bp, Gossypium hirsutum
  unsure (1)..(307): unsure at all n locations
  Clone ID: LIB3147-022-Q1-K1-D1
ccgggntcgacccgcacgccgtccgtgattggtctnncatgacctnnagctactcgagaaagttagttgaagcgacttattgagaagggaaataagagggaagaggtaggagtgacgcaattggctcagccttagggaaaaatcaatgcgcttgattcttttgagcctttttacacaatgtgtaccgccaaagcggttgggtgttgagtcatattggagcacgataggagaagaagtaagagctatactcttcataaatatgggactcttggtggaaaccgcttcattcttnttctttaagntttac

SEQ ID NO: 34966 - DNA, 206 bp, Gossypium hirsutum
  unsure (1)..(206): unsure at all n locations
  Clone ID: LIB3147-022-Q1-K1-D12
tttatttaggcattgaggagggtgctgtttagggttaatgtttttacgcagtatatatcggcacacttcatttgccttttgcataattagagtactgttagaaatatttgaacagcggcaaaaaagattctattgaaaaaaaaatgaatgattccggccgcttcatattagtgttaatggatatgatagttttgcttttnnaaaaa

SEQ ID NO: 34967 - DNA, 445 bp, Gossypium hirsutum
  Clone ID: LIB3147-022-Q1-K1-D4
aggttttgagggaaagatggtgtcttgaggtggaaaggttagggttgagtgctgttataatggggagtagaggatttggagctgagaaaagagggagtgatggcaagttgggaagtgtcagtgattattgtgtgcatcactgtgtttgtcctgtttgttgttaggtatgctgacgataaagatgtcggcaatgcccagcccgtcgtgacggttaggcaggctgaggtggaagaggaaggtggcaaagatgcttagggtaatttcagcttaatcttatcagagtaccaggaattagccggaatgaagagaagtcgtgaaaatgtcttagtagttcatggttaaaatggaattgaacccaagggttttttttctcctttcatctgctctttatataaactcttaacgatgatgatgttgtatggttaatgaggtttcttgatacatt

SEQ ID NO: 34968 - DNA, 387 bp, Gossypium hirsutum
  Clone ID: LIB3147-022-Q1-K1-D5
gaaaaaagagagataagcttagacgaaatcgaccaaggatttttattagttttatggttcttgcagacatcgaattaagctctttttaaggattggttggtattttttggtgagacctagagctgtttgatatttctttgaagtcaaggattagttcatgtagaccatgactgaattttagcttggcagtagtggagttaagtatcttaaggatttggggtttatttttgaatggatcccttgtttacaagagaaagagatattgaagtagatcttgaaagtggtgggattaacagtgaggatgaaagaacaaaagatcgtgttccatcgaatttacaaacaaagagaactctcagtggagtttggagcgatctttttgagtttgat

SEQ ID NO: 34969 - DNA, 344 bp, Gossypium hirsutum
  unsure (1)..(344): unsure at all n locations
  Clone ID: LIB3147-022-Q1-K1-F10
cccacgcgtccgagggctcaataatcaaagtgtattgtgtgagagtgggtggttcancggtgagaggagttgggagatgcttgtttgtaagttgttacccactcctccaatgttttgggttggatgattgtaggcatcgccaccatcatcacacccatttccattgatcccaaatttcccacaatgggtgggggtaggggttgtacaaaattgattccgagaccaggatcatcggaaacttgaacataagtcttttaccgatcgatctgtgattcagtatattgtgtatcttttgaattgtatgaaaggaaataaagttttagattttcattttttttttcaaa

SEQ ID NO: 34970 - DNA, 285 bp, Gossypium hirsutum
  Clone ID: LIB3147-022-Q1-K1-F8
cgcctgcgtctctctgttcatttctctcaaccaaaaagtctgtaccttggcgcttccagagagaccatgttggtttaccaggatctcatctacggtggcgagcttcgttctgactcattcccctacgaggaaatcgagaatgggatgctgtgggacgttgaaggaaagtgcgttgtgcaacgcgctgcccatgtatacatggacgccaatccttcagccgaatgtgctgatgaagatgaaagtgttcatgaccaagctgtcaagcgttgttgacattgttgacac

SEQ ID NO: 34971 - DNA, 284 bp, Gossypium hirsutum
  unsure (1)..(284): unsure at all n locations
  Clone ID: LIB3147-022-Q1-K1-G1
aaaaaaaaaaaaaaaaaaaaaaaaaaaaaatttaaaaaaaaattaaaaaaaaaataaatagcggaaattttgaggagggtaaaaccaacctaccctcccatccaaacntaataactcaaattatctttcttcttaactccacttaaatgcacctcccttttacaaccaattacactacctaaaccatcccaaacccttaactaaatnaaagttttttaccattttaaatttctttaccttttcatccctttttaccaaaaccgaaaangatcccctcttcctaa

SEQ ID NO: 34972 - DNA, 433 bp, Gossypium hirsutum
  Clone ID: LIB3147-022-Q1-K1-G12
cccacgcgtccggtggttcagccccaattgtctactccacttatttagctttccaccctgaaggattttcccaaattcactaatttgatcaaggtttaaccttataattccactaagatttctatctcaaaagagtaaacaaataagcaaacagtgaaaaatctttacaagattagaatgtttgtaagttaatcacacccaatgaaaaacacttggacttagaaaattcaatgaatgctcacagtgtttacaagaaaagatgaagaatttaagcacaaaaggttggtaaaagaattttttgatctttcttgataacttttgatctctagttattgtagaagctttggaaactggtatttatagttcttaattgattttcctaattgatttctaactgttttggttggtgaaaaattgaatagagtcattggat

SEQ ID NO: 34973 - DNA, 477 bp, Gossypium hirsutum
  unsure (1)..(477): unsure at all n locations
  Clone ID: LIB3147-022-Q1-K1-G9
accggnccggaangccgggcccactgacccagagagtgttcccattaatgccttggttgcggtgaaaggcacacctcttcaagagcaaaaggtgcggctctgtcatttggttctttcctccctttgttttagtccacattcaccactacagcttgaagctttgttctttttaataaagaatatctgatatgtatatagttttaggcaccatcaccagtttttacattcttactttcaaaaggcatcatttgcttatggttttggatatgctagcactttgcattaactggacatgaaagtgtatcgaattagggtgtgtgttcgactcatgtatatccaaatttctaaagtgctttttcataaatttggatggttggacctgcatacccttatcaatctgacgtgtggngcaacttaatggataatgaagagctggagcagcataagccagcagtctagttgtaaagatgagtggaa

SEQ ID NO: 34974 - DNA, 406 bp, Gossypium hirsutum
  unsure (1)..(406): unsure at all n locations
  Clone ID: LIB3147-022-Q1-K1-H9
gaaaacaggacaaccccagccttatggctatggtaataaaaggattggaccaaatggtgatgttggttgggtggaatatcttctcctcacaaccaaccaagacccgaatctccttggaactgaaaacccagagagtttcaggattgctttggataattatatggcagcagtgaagaaaatggcatgtgagatacttgaaatgatagctgatgggctaaaggttcagccaagaaatgtgttaagtaagctgatgatggatgaacagagtgactctgttttcaggctgaaccattaccctccgtgccnagaggtggttcagtccttgaatggaacgagcagtaatgtgattggattcggtgaacacactgacccacaaatcatttcagtcctaagatccaacaacact

SEQ ID NO: 34975 - DNA, 242 bp, Gossypium hirsutum
  unsure (1)..(242): unsure at all n locations
  Clone ID: LIB3147-023-Q1-K1-A1
ggtagcgttgggggctgctgcggcgcaaagcagatgcggctagggttagggtttccaaaatgtttcaaaggattgggcctatcgggctctattttgttgggttttggtaattataggattgggcttgtaactgggttttaactttaggctgggtttgtgaaatcgggtagtgcattgggccagtcatattttgggccgttcttgtaattggactgaactttagacacttttattgtatnngt

SEQ ID NO: 34976 - DNA, 292 bp, Gossypium hirsutum
  Clone ID: LIB3147-023-Q1-K1-A10
gaaaacccggggcggccgacgcgtccgatttatgggataaacggtgatagctcgacttttccgcctccggcgaccatatgggtcgcgggaagaatactgggggctgggtgatttttttctcttttatttttgtttaattacattttcttagtgttcgtttatttatttatttttgatgttaaggatttttggatctttatttataaattttattaacgctttatttttatttaaaaaaaaaaaaaaaaaaaaaatataaacaaacaaaaattaaaaaaccataaataaaaat

SEQ ID NO: 34977 - DNA, 358 bp, Gossypium hirsutum
  Clone ID: LIB3147-023-Q1-K1-B1
tttgcatctttacgcgcaacatgcacaggaagcgctaataataaccggtgaggagaaacctgggtggaagaggggaacatatattactgtgctagataaaggacatgagctatctaatcaactatcagcagaccttgtattcgtaatctaactactctcgatggcggtggccgtgatcgacaccattttttaattaactgtatgagttctatgttcggacagtcttcgtacatacgagctatatgtgtgaaagcgaaccatatatacatggtgggcagatgaaacctcatacaatccatgctgatgtatgtgaactttattcgctcctgccatgaacactaccatgaatttattgtag

SEQ ID NO: 34978 - DNA, 177 bp, Gossypium hirsutum
  Clone ID: LIB3147-023-Q1-K1-B11
tcacttcttcaaggagttcaaccaaaactcttggaaactttgtcaaccccacctttgaatttcttctgaaaacatatcctttctttacacctgatttctccaaaaagactcttttcacaatgtctccattccatgaatatactcatctgttaacaaagccatccaagacccttgtac

SEQ ID NO: 34979 - DNA, 441 bp, Gossypium hirsutum
  unsure (1)..(441): unsure at all n locations
  Clone ID: LIB3147-023-Q1-K1-B12
ccggggcggcgacgcgtacgcccacgcgtccggaaccttatgttggaagatgaaacgggtggggtaatgtccggcccggagagggatctcagatcggctggcgttaggtccatcnaaatgtgtantantggtcaccgataacaccggagattttattttattttatttttatttttagcatgtaattttatattccaatttttttctaaaataatgtgagaatgaggtaagcaatgacataggagtagttttgactaaaaactttaaggctcatcattaactttggttagcctagttgtaggggatgtggggaccacctgttcttttgtataataattatatatatacatatcaattccaatggaagatcaactaaccaccttttgtctaaaaaaaaaanaaattataatcttttaatttttattaataattattataatt

SEQ ID NO: 34980 - DNA, 355 bp, Gossypium hirsutum
  unsure (1)..(355): unsure at all n locations
  Clone ID: LIB3147-023-Q1-K1-C5
ccacgcatccnnacctcttaaacattcggttttatcacaaggtggccaaaaaggtttaacgcgctttttaatcgggaagcgcgcctgcataactcttttttcatcatgctcaccacaagaacaaactcgtccactttcattgtaatgcatctgatccatctactgttgttagtgtatctgattactgtgataacactgctggaagaaggacattacaaatataacccatcagtgatctgatctacactccataagacgatgttttgccatatctgcacaaattcaaataccatatcatttcatgctcctcaaagccatgaaacatgaaagcgccccaacatatttccacattgac

SEQ ID NO: 34981 - DNA, 323 bp, Gossypium hirsutum
  Clone ID: LIB3147-023-Q1-K1-C8
gctactcctacttttactcctactatgatgccaccaactccaggagcaacacctccagggcgtgattcaaatggggatcgggccgctatttatgccactccatatacgataccgcatacgaccccaccttctgtcatgagctatcccttgactgaaaccactgcttatactcctaattatactcagatgcaacctcatgaagtcccagatcaatccgcacaaccggcctgccaatacttgctcaaaaccttggtctgtactgtcaaatgaaagtgcaaatctcatcgtccatatcatcgatctgcaaagcctgtcccatatgc

SEQ ID NO: 34982 - DNA, 421 bp, Gossypium hirsutum
  unsure (1)..(421): unsure at all n locations
  Clone ID: LIB3147-023-Q1-K1-E6
accggaatcaaaaagccatctcaccgaggaacctgccaaaaagaaactgaagaagaaaatgagcctgacatggctggcggatggcagcgagatgaagaaatccccctcccgacagcctatcgaagttaggaaatgcttgcactgcgaagttacaaaaaccccacaatggcgagaaggaccaatgggcccaaaaaccctttgtaacgcatgcggcgttcgtttcaggtccggccgtctcctccctgagtatcgccctgctgcaagtcccacatttgttccagcattgcactccaactctcataagaaagtggtagagatgagaaaacaggccaacttgccaacgaccggaacaccacccatgctgtcgatcccgcangccccgattagtatgtagttgagagaaagcttcacatagggagct

SEQ ID NO: 34983 - DNA, 304 bp, Gossypium hirsutum
  Clone ID: LIB3147-023-Q1-K1-F11
cccacgcgtccgctatcacttctcttttttccttcttttttgttggctgaaattccttgaggggaccaattgggaatgaggggctgctagttaaattgttctgtttctgcatggccatgtcattatttgtagaacctaatcattaattaattaacatgcaaactgaaagttgtttcatcaaaaaaaaaaaaaaaaaaaaaaaaaaaaaaaaaaaaaaaaaaaaaaaaaaaaaaaaaaaaaaaaaaaaaaaaaaaaaaaaaaaaaaaaaaaaaaaaaaaaaaaaaaaaaagggcgcccgttttaa

SEQ ID NO: 34984 - DNA, 388 bp, Gossypium hirsutum
  Clone ID: LIB3147-023-Q1-K1-G2
gcgtccgctttccgtacaccttgagaatctgaaaccgcgattccgcctttttagggttaggttctgatgtgaatttttgaagcgggggcggcggattcctatatttatcagtctccagctgagtctacgatggagaagatcatctagacgattcacggcaaagatgcatcgtcatcttcagattctcatcatgacaaaccgacttcccttcctccgttaacgctaaccatatatcggtatgattggaaaagacagaccatttcatcatgtgctcggtcttggaaaacctgctgatccgttcttgaggagcaacactatcatttcaacctgtgtcctttatgaaacaactgcaacatgagtccttatacagttgattgcataccaccta

SEQ ID NO: 34985 - DNA, 229 bp, Gossypium hirsutum
  Clone ID: LIB3147-023-Q1-K1-G3
ccttagtttgctgtccaccgctgtcactttgtttctctgctagtgattcaccacaccagctggggcgattggtgacggagggcgcgtggctccatggtgctatgtttcgcaggatggggtttgaatgtaattatgctaaagcctttcgggtgaatagaaaagttgaaagcatttttcattctttacagtttgtcgaatactactttaattaaaaaaactattttctgac

SEQ ID NO: 34986 - DNA, 396 bp, Gossypium hirsutum
  unsure (1)..(396): unsure at all n locations
  Clone ID: LIB3147-023-Q1-K1-G4
ttcatgctgctattctttcanatccgaattatataaatccaagaaggaacctccaaagcgcgcatattttatacaagctggcggcctctcttatnaataaannaangctaaattaatctataattttaaaactcttaattcatctgctggagttgacaatgattcctattacgttgatgattacgttgctaaactacataaatttaacactcaacattacatatttcccaattatcttacccacttacctttcttttttcgtgctaaaattttcattcaaaaccacaattgttctttctttattatctaaaatgctccttccaattcaaaaactaaccttaaccttctgttgtttgtacgattcatcccaaatttaaatttcttttattttttaaa

SEQ ID NO: 34987 - DNA, 436 bp, Gossypium hirsutum
  unsure (1)..(436): unsure at all n locations
  Clone ID: LIB3147-023-Q1-K1-G8
ggaaaacccggggcggccgacgcgtacgggacccaatancttttgttaatagtcttagttattagagcacattaattacggaactcgcgcgttttatttaagggacgggaggtactggctttttcaagaaagttaagtagattatgtgacctcttattctcttctttaaggagttccaagttcagtttggtttgaatgtttagcattggtgaaaaagaacctcttgttgcctctgttctcccttgtctcaacctgcacgaggaggcttcccatggagatgataagtgggatttgaattttgtaattccttatttaattaactatgttcgagagggttgaagaattatgtcagatatcaaccattttcacggtggtattcaacaatgaagacagtatatttggactaacgtttcaataatgaacgttgatagttttc

SEQ ID NO: 34988 - DNA, 227 bp, Gossypium hirsutum
  unsure (1)..(227): unsure at all n locations
  Clone ID: LIB3147-023-Q1-K1-H12
cggaannncccggggcgagccgcacgcgataccgctttttnngtcccttgtttaatttgatacctccttttctcatgagctgcncnngctgatgtcnagtggcggcggtgctttcttctggaggggctgcgcgatgggctcaccgactaaccgggccccttgaaagaagctcttcaagtgccgtttggtgaaaatcgtccaaatcgaaagatcaattaatgatcgtg

SEQ ID NO: 34989 - DNA, 324 bp, Gossypium hirsutum
  Clone ID: LIB3147-023-Q1-K1-H4
ggttcggtggcttgttattgacgccccagattttttatcggacttgacaccctcgagttctcagcttctttttgcggagctccgcgagtatcatatgttgttcaataacttgtaattatacaaagattacaaagtctgtagagttggaatgactgtgtgtttattatggcatcatccatacttttttgtgctctttggttgtctcagtactaattgctaaatcgatatgttttccgatcttgtcctgtatgaaatattgtctataatataatagaatcacactaaaaaactaagcaaaaaaagaaaattattgtaaaaaattta

SEQ ID NO: 34990 - DNA, 355 bp, Gossypium hirsutum
  unsure (1)..(355): unsure at all n locations
  Clone ID: LIB3147-024-Q1-K1-D10
cccacgcgttctcnatgataaattttgttgttataactactaaatttaatgctagggaagtgtttgtgttttaaaaaaaaaaaaaaaaaaaaaaaaaaaaaaaaaaaaaaaaaaaaaaaaataaaaaataataaaaaaaaaaaaaaaaaaaaaataaataatattaaaaaaaaaaaaaaaaaatactataaaaaaaaatattgggcggactacaaaaaatataaaagaatatatgattattttatcactactattaattttttaaagaggcaaaaaaatttaaataatattcctatgttttaaacttttataactaggaaaacaacgataatacccaaatttaaatcttttaaaa

SEQ ID NO: 34991 - DNA, 191 bp, Gossypium hirsutum
  unsure (1)..(191): unsure at all n locations
  Clone ID: LIB3147-024-Q1-K1-D12
cccacgcnttttannactcttggtcttacgtatacagcaaanatntaacgcaccgcggtccgcaatatttattttcgcctatcatcaaatcttgtatttatagatattcaaggctcgtattatgatagaactctgatttatgtttatggaaaatcttgattttcttaatctaaaccaactactattttcaa

SEQ ID NO: 34992 - DNA, 314 bp, Gossypium hirsutum
  unsure (1)..(314): unsure at all n locations
  Clone ID: LIB3147-024-Q1-K1-D7
ctagtttctatatcgcgagcggttgtccttttttttttcnaanntaanagacaccgccaacgcgaaattttaaaccgctaattcctcctacaaaaaataccctaatacttaaaacaacacacccccccaaaaacaacacactacttattaaaaaacaaatctaatccatccacattacatctcaatataaaaactccaatctatcaatatcaccattaatattcccatcctgacttatccacttatatccaccccaatcctttgcttttataaaacaaaagtatctcacacaccaaaaaattaactaccaattc

SEQ ID NO: 34993 - DNA, 426 bp, Gossypium hirsutum
  Clone ID: LIB3147-024-Q1-K1-D9
aacaaccgggccgacccacgcgttcgttactcatttgtttcaatagtatgtcgatttcttacgaccaaaatcacctttcgcgttctgtccctgtcttcttattctctcttacatacttttgggggcaaacgaaaaaaaaagggtattatctcttcttcttgattgattgatttttcattgataatctcatcaacaagaacaagaatctgctaaaaagaataataacaagaaacagatgacagaagagaagataggataattttctttttacttttattttttgagaggcaaaaaaaccccaacaatattcccatggatttgacttcaacaacgacgacgactactataaccgtcgtgtcctgagctgttaaccacaaagagataactgacgaccctttcttgcttgacgcttctttaaaatccttg

SEQ ID NO: 34994 - DNA, 250 bp, Gossypium hirsutum
  Clone ID: LIB3147-024-Q1-K1-E3
ggaaaacagaggatttggtgtcgttgaaaggtcaatgatggtgtgtaaatgttgtgattctcgaaattcctgcgttttgttccttccttgcagacatctttgtacatgtaaggattgtgcagcttttcttgattgttgtcctgtttgtagaacagtaaagaaagctagtattgaagctttggtttcttagatgcttgagcagaaaattttctaggaaaattgaaaaggaaaaacaatgatgatataagac

SEQ ID NO: 34995 - DNA, 365 bp, Gossypium hirsutum
  Clone ID: LIB3147-024-Q1-K1-E8
gcatgttcccgagacacaaagagttattggtcaagaaagtagttgacgtggctcgggaaatggccaaggcagaattgcctccttaccgatcccacctggatgtggtggtggcatgcgaggatgatgatgacaatgatatcgacattcctcaggtatccatctactatggctgagttatttcgttcgaacctccaaattatttagagttgaggatgagaaaattctcagagcaggctggcttccattccggttttatagtgatttgagcatacacaatggagtacattgtgcaaactttatatgaaatttgaagtacttttagttgcagaatatttatataatcttgtcattttaccttttctttt

SEQ ID NO: 34996 - DNA, 403 bp, Gossypium hirsutum
  Clone ID: LIB3147-024-Q1-K1-F10
cccacgcgtccgggagaagtagtatttagatagaatgaacgtaagtctccaagtgctgagcgggatgatgataccgaaagtttgtcgtttgctgtagaaatggccaaggtagcaagtgatgtgaaggctgctgatataagggtcctctttgtgaagcctcttgtgtattggtctcggtttttcatcattgcaacagcattttctcgcccgcagattgatgccattggatccagaataagagatttggctgagaagaagtacggaaaagttccatctggagatgcaaaaccaaactcatggacacttttagactttggtgatgtcgttgtccacatatttcttcctcaacaaagagctttttacaatttggaagagttttacggaaatgcaacactcattgagc

SEQ ID NO: 34997 - DNA, 481 bp, Gossypium hirsutum
  Clone ID: LIB3147-024-Q1-K1-F2
ttgaactgtcctttttgcccaactgatatttttgaattccttcaaaatcttcaggtcaatggagaacgagtggatgtgattgaatcattgaaacaaaagagtgaggagaatcaggaacctgctgaagagttgagtgaagaacagataaatggatcggttgaaaatgcatacttggattctggtgatggtgaaactggtaagaaaaatgagaatgccgatccagaaggtgactctcagaatcctccacttgattgcgaaacagaaagaagtagcaagaggaggaaagtggatactgctcaagtgacaaatgatgaaaatgactctccatcaagcatcctccaggtgcaatcatctgaaggtgatatcgaatgacatgttttctttaacaggaatttttatcacaaaagtaaaggttctttttcccaatttctcttttaagttgtttataggtgtgggttaatttcacagttttatttttttt

SEQ ID NO: 34998 - DNA, 354 bp, Gossypium hirsutum
  unsure (1)..(354): unsure at all n locations
  Clone ID: LIB3147-024-Q1-K1-F8
cccacgcgtccgtgctcttgttattcagtctctggctgccaatttgggtgttgggacaggggagcatttagcagagcactgtagaactgaatatcctagaggcccaaacttcgtgttatgggttcttgctgaaatcgctattgttgcatgtgatattcctgaaggtgaccataagatcttaaaagctaaacaagctgagttcttcattgccacttgatgaagatcttaatgtaattggaaatatctcaaaagtgaaataagacaaaaaactatattttgtatcatcnaataaaaaaaaattaaataaaaattaatatattattattaatatatattttaaaatatatataataa

SEQ ID NO: 34999 - DNA, 165 bp, Gossypium hirsutum
  Clone ID: LIB3147-024-Q1-K1-F9
tgattttattacagacaccgacctcgaggaggggcgtgctgatcaatctctcgcagatatccaacaacgatttcatcagcatgcatttgctggatctgcatacctacaagcactctataccgctgatgataaaaaaatcccttcctgaaaccatccacatcctaa

SEQ ID NO: 35000 - DNA, 280 bp, Gossypium hirsutum
  unsure (1)..(280): unsure at all n locations
  Clone ID: LIB3147-024-Q1-K1-G3
ccgaaaagctcccttaacaatgaggaccgagttcagtcttgcaagcgtgtacttctaaaatggtgagtgaggaaggccaagctttttatacagtanaatgtattctcagtaaaactagcaacaatgtgaaatccagtagggaatttaactccatagagaaatgatgtatgtatgtgatgggaatgaattcaacaaatgattgatgcataatagatatgttttcagttnanaaaaaaaaaaaaaattaaaaaataaaaaaaaaaaaaacataaaaaaaata

SEQ ID NO: 35001 - DNA, 417 bp, Gossypium hirsutum
  unsure (1)..(417): unsure at all n locations
  Clone ID: LIB3147-024-Q1-K1-H3
ggtaaaagaagacctaacgggggaggaggcatttgaagccaaaaagcgtaagctagctaaccttgaaatggcactacttgcaaacccagaggcaaacattaagtctctgaaagagatgttgcaatttgccaaagatggtgatcactcaattctaaagcttggactgctgtccttgttggctgtcttcaaagacattattccaggctatcggattaggctacctactgaaaaagagctagaaatgaaagtttccaaggaagttaagaaaatgcgattctatgaatcaacacttctttctgcttacaaaggatacctgcaaaagttgttagcattagaaaaacaacccangtttcatcaatgttggggttcgtgtatttgtactttgcttgatgcctgtcctcactttaacttcaaaaa

SEQ ID NO: 35002 - DNA, 479 bp, Gossypium hirsutum
  unsure (1)..(479): unsure at all n locations
  Clone ID: LIB3147-024-Q1-K1-H5
aaaaccgggccgangacgcgtgcgaagggttgtctgctttatccattgttggattttgattgggaagtggacttgcgtagcttggtgctaagttttactggggtttgtatttggttgaagattacagaggaaaaaatggctgccgaagaaggcaaagttagtcaatatatgcctgattattgaaaccttaatctgggtttaacttgttattcaacatcattcaactcaaatgcttccaaaaaaaaaaaaactcgaaaaattccagccttccaggtatgtcttatttagggaagttttcttttttttttcttcctatttttgtttcctttttggagagctttctgtgttccttttttagaatttttttgggtttttttttcattaggatattctctataatttttactttcaacaatcattccacaatgtataaagcaattcaaacattgatccgtatagtgcagttatttatttaatgt

SEQ ID NO: 35003 - DNA, 278 bp, Gossypium hirsutum
  Clone ID: LIB3147-024-Q1-K1-H8
ggccgacccacgcgggcggataagcctgactttgagcctattgctgcttttggtatcgagatttggacaatcgaagatcgcatattgtttgacaatattttgattgccaaaaatgacaaggttgctgagtcatatagggagaccacatggaagcctaagtttgaggttgagaaagaaaaacagaatgctgatgatgagtccactgattcatatggacttttatgctttcatatgtatgtctttgatgttccttttacttggtttctttttttttactt

SEQ ID NO: 35004 - DNA, 241 bp, Gossypium hirsutum
  Clone ID: LIB3147-026-Q1-K1-A12
tagtcgacccacgctttcgactcaactcatgtgagcactacacattgcggaaggctcatattccgagctgccgcatactcttcaacgattcatgcgactaacaaatcgtatatctataataccaacgacttgctactgaaaattgatgctggtatatgtaactacaactatatattgcctcactgcaaccataatcttctcaagaagacatgtgcctactaccctcataaaaatctagata

SEQ ID NO: 35005 - DNA, 351 bp, Gossypium hirsutum
  unsure (1)..(351): unsure at all n locations
  Clone ID: LIB3147-026-Q1-K1-A2
cccacgcgtccgcccacgcgtccggttcaatatgggatgcttcatcatgggcaactgaagatggcgaatataaagctgattacaattaccaaccctttgttgcaaagttcaccagtttcaaagctggcggttgctcggcttactcgtcacctcggtgccggccggtctttgcctcgcctcatcgatccggcaggttaaccatgcaacaatataaagcaatgaaatgggttcaaaggtaccatttggtctatgattattacaaggaccccaaaaggaaccatgccttaaccccagagtgttggaattagcttttgaaatgaacttaagtgatagctntgtgggaaaaaaata

SEQ ID NO: 35006 - DNA, 301 bp, Gossypium hirsutum
  Clone ID: LIB3147-026-Q1-K1-A3
cccacgcgtccggctgatgtgaagattagagatttcgatcccgacggtgatggcgacaacgaggggggctgttaatgctgtggaaaaacattacctgtgttccgaatttccatatgtagataactttacaaaaaagaaactaagatgagaacctattgaaaactggaatttggatgatgaacaagtactggactaatattattttggtgtaatgaatgcatcacaatccggatttcttgagcttaaaaaaaaaaaaaaaaaaggaccacaaaaggaaccatgccttaaccccaaaaaaata

SEQ ID NO: 35007 - DNA, 240 bp, Gossypium hirsutum
  Clone ID: LIB3147-026-Q1-K1-A4
tcagctgatttatatcattttataaatctttatatcgaactgtacgcaaaagatttgatatttatgtagaatagttatttagtttattcatgtttaatttttctgcttcggatgagatttttttttgcttggaatcatttaatattgggataaatctcaaaactatacatgaagaatgatttaatgtacaattgtatttatgaactttgattttatacaattttatacatgatttttttt

SEQ ID NO: 35008 - DNA, 235 bp, Gossypium hirsutum
  Clone ID: LIB3147-026-Q1-K1-A9
ttcatgcgttcgtctacctttctgtctagctattttgatgataaaaaaccggccaaacgcaaagtgggttttgttgtagagtaacgtgggctcactaaacaggaactttttagttatataccaaagtgataaaaatcttgtatgttgacaattgatctgctattataatttggcgcaatctaacacctatgatttagagacattggacagactgttacccatatcaaaataaaat

SEQ ID NO: 35009 - DNA, 325 bp, Gossypium hirsutum
  Clone ID: LIB3147-026-Q1-K1-B10
gggaccacccacgcgtccgggcacattgtaccaacaaatctatccaaacgacgttcacaggtgaattaatggcgtctacctctaagagcagggaccgacttctaattctcgcaaccaccttcctactatgcttgctcgcggctatcagctccatctccccgacctacttcttgccggagtggtccatcccgcacaacccgctccctagctatcgctactacgtgaccagcccaacctgcagaatcgtgccacccctcccacttccggagctgaaaagaagattcttcctataactgtcggacatcccggcttactgtcggtacac

SEQ ID NO: 35010 - DNA, 233 bp, Gossypium hirsutum
  Clone ID: LIB3147-026-Q1-K1-B4
gcgcccacgcgtccggcatgttaccgtgccatggtttgaggttacattgactatggattggtggaaggggggatcaacttttttgagcagattcaggatactgccgaaccagataagtatatcatgagtgcagccgtgcatatttacaagtttgcgggaaaggaacctgaagctagcagtgttcaggattccatgaataattttgggatccccatttttggaataacctcaaa

SEQ ID NO: 35011 - DNA, 309 bp, Gossypium hirsutum
  Clone ID: LIB3147-026-Q1-K1-B9
aagaacgggacgacccacgcgtgcgggcacatggcaccaacaaatctatccaaaggccgtttacaggtgaattaatggcgtctacgcctgggggcagcgaccgacgtctcatgctcgcagccaccatcctactctgcttactcgcggctatcagcgccagcgccgggacctacttcttaccagggtgggccataccgtacaaccagctcactagctaacgctgctacatgaccagccgaacctgcagaatcgtgccacgcctaccatggtcggagctgaaaaggaaatgctgcctatagctggcggaca

SEQ ID NO: 35012 - DNA, 372 bp, Gossypium hirsutum
  Clone ID: LIB3147-026-Q1-K1-C12
cccacgcgtccgctcatgttgtcataatccctttgtttcaacagctttcctgtcatccaacaaccccacacaactcaacgacccctgttctaatctcaaaaaccaacacatcttccccttaccaaaccctacgatcccccgcttttctccctccaatcatggcaatgaaatccatgcaaggccagttcttttgtgccacaaatgacaagacaatcgcaattgaaattgtgcctttaaccccccatcccaagtacacaaaaccttttataaaaaaaaaaaaatttcaatctcaccacccacataaccaattcaaagtttgcgattatattcacctttataaaagcccccctattatcaataccaaaactttca

SEQ ID NO: 35013 - DNA, 434 bp, Gossypium hirsutum
  Clone ID: LIB3147-026-Q1-K1-C3
gctgaccacttgatcaccaaaagaataatgtccgtgactaaaactaggaagttcttgaacactggggggtttatagtctcttctcttgcattgatggcactaccaatcttcagaacatcagctggagccattttctgttcttctgtggctcttggtttcttggcgctcggaagggctgggtttgcggtgaatcatatggatattgcacccaaatatgcaggaattgtaatgggtgtctctaatacagctggcaccctagctgggatcattggggttgatatgactggaaagcttctcgaagctgctaaagctgaatattcagatctttctagtccagaaagctggagaacagtctttgtcatcccgggattgctctgcgtatttagctctttcatattcttgctattctcaacgggggagaggatttttgactg

SEQ ID NO: 35014 - DNA, 371 bp, Gossypium hirsutum
  Clone ID: LIB3147-026-Q1-K1-C6
tggaagaatgggagtagtccttattagcaagggaccaaataaggagaagaaatttatcataacattgcagataacgagacatcactgacctttgttcccacatagctttggtttgcggtgaccattcctatatttatttgttagctttgctttctctttcttctttttcccttaagtctgcttgagtctttttctttttttatatgtacttaatgtaatattagaagccaaggcagggccatgcttttctattgtaaaattcatcacttcgctattttatatttgtatgtagacacatttcccgtttcaacatatttccttatttttatgcaagtcgattggtattcatcatcgctaaaacaacaaaattt

SEQ ID NO: 35015 - DNA, 306 bp, Gossypium hirsutum
  Clone ID: LIB3147-026-Q1-K1-C7
caaatttttaaaatattaaaaaaaattcttatcaaaccaaccaaccatcattaaacaaaagaaaatacttttaaacaaaaattctccctctttaaataaactcctttctacccctctgtttcaaaattttatatccctttaaaaaaactccgattttacttttactaaaatacaagaaaaaaaaaaaaaacgggtcttttttcatcaaaaaaaagtaaatcaaaatttcataaaatcaaaccacccttttacctaaaaaccattacatcctttgattctacattaaaaccctcaacacctaattac

SEQ ID NO: 35016 - DNA, 233 bp, Gossypium hirsutum
  Clone ID: LIB3147-026-Q1-K1-C9
gtcatatccaacaatctgcattgagcatcgagttttttagctacacaaaaactgcaattgctctcggcacaggggtcgttcttacaattctcactttctctgcatatcttactcacgcaacaatctctcctcatatactctctaatatcctatatcatccttacttacgactatcctttcataaatgatagctgcaccctttctcaaacccacctattcaaccctataagctc

SEQ ID NO: 35017 - DNA, 259 bp, Gossypium hirsutum
  Clone ID: LIB3147-026-Q1-K1-D2
gcgaccacgagtccactctccaccaccaccatacttctactaatcacccccaccttcaatggaggggagaaggacctacctaccattacagctcccctcctccaccataaccatttcctcctccccaatactactacaaatttcccccaccacaagcccattttccctcaccaccattctattacaaatttccaccttctatatgtccctcacacaccttctatataataataccactcacctcccacacgtgagaaat

SEQ ID NO: 35018 - DNA, 341 bp, Gossypium hirsutum
  Clone ID: LIB3147-026-Q1-K1-D4
gtttcaattatgttcttacgcaatgcatttcttgttgttatcgttaatgaaaaagataggcgagtggtggaactaaactccattgagaatggacgaatttggaaaggatatgacgtcttgatctttgacacttggcattggtggcttcttaccggtagaaaacaaccatgggattatgtccaagacaataatataactcgcaaaaacatgcatcgtacggttgcctataagaaagcattgagcacatgggctagatgggtgaacctcaatgtagatcctgctaaaaccaaggtgttcttccaaggggtctcccccgatcatgtggattcaagggattgggc

SEQ ID NO: 35019 - DNA, 376 bp, Gossypium hirsutum
  Clone ID: LIB3147-026-Q1-K1-D6
cacccacgcgtccgcccacgcgtccgagcttaagttatttactttgtctttacctcccctaccaatgctctagaagaagagcatttctttcctttttaccacacggaaatcagaatacaatatgcaaaaactaaatctgacataatagcaaaagcatatggctcttttgtcccccgagagaagcgaaaaatgcatgactaaaatggagggaaaaaaccgaaacaacatcttgatcctaatcaagctgcagcaagtttgaatccatcttatgcggatgcttacggtgcaacaccttctctatcacaaataccctacctgggtgctagacctatagttgcagaagcacctgcaccaccaaataacattctatttgttc

SEQ ID NO: 35020 - DNA, 121 bp, Gossypium hirsutum
  Clone ID: LIB3147-026-Q1-K1-D9
ccacgcgtccggttgtagatcacgagcaacctttctagacgaaccttgctttcttactcgtgcatccaacatcatcgggtcttgatagcttcacatactaccaattcactctccatctatg

SEQ ID NO: 35021 - DNA, 336 bp, Gossypium hirsutum
  Clone ID: LIB3147-026-Q1-K1-E2
atagaactcttcttttcttttggggggaggggttttagaacttaaaatccaaatacgagtgagtgagtgagttttgatgcttggattatatcagttatgcaacactttcaattttactcaaaactcataacgtgcttttttggaggcactatcattcactaatctctggacttgaaattgattcattgaaggtagaaccataggatagaattcatatgcctccgacaactactccatagttttgtttaaaacataggtttcgactgtgttggatactcaattacaacaatatttgtgatcaagttatgttataaataaaatgtttcttgctctggc

SEQ ID NO: 35022 - DNA, 255 bp, Gossypium hirsutum
  Clone ID: LIB3147-026-Q1-K1-E5
ttcaaagccaatgagtcatttggttcacttgttcctgttttgttaactagtttatgtctagaagataactttcattcgcaatgaatgactggttaaaaatataaaatcaatgatataaatgctatgaaaggacagttcaaacagagaaaaaaaaaaaaaaaaaaaaaaaaaaaaaataataaaaaaaaatataaaaaataaaaaaaattataaataaaacaaaaaagttttataataaaaacctctttaataaaa

SEQ ID NO: 35023 - DNA, 333 bp, Gossypium hirsutum
  Clone ID: LIB3147-026-Q1-K1-E6
aatttgtctgtcacctcatcaatacataaaattgtggaaggaaccacactatatagtaattcatatagttggtttcaaaaatgattttggttgtatgtaatgtttcaccacaagctctgaaggatttgatgaaataagatgtttagcattttttttatgctctgcaagtttaaattctagccttgtcttcaaagggtagcccgctgatgaacatattgccttttgctggtatgttattgttagtacctaaagcttacactttcctatttgtacatggatatcatgtaatgtatttttttttcttcaaagcttctaggtacatagccatatttc

SEQ ID NO: 35024 - DNA, 425 bp, Gossypium hirsutum
  Clone ID: LIB3147-026-Q1-K1-E7
tggcatcggaaaagaagctgtcgaacgaaatgagttagatttaagttcataaacttgtcctcaacatctgtgtctgtgaaagcagtgatcgtctcacccgtgccactaaagtcttggaacaactcattgatcatacccctgtcttctccaaagctaggtacactgtgagatcttttcgaatcaggcataatgaaaagattgcttgctacgtgacgatgaggggagagaaagctatgcatcttctcgagagcggtttgtaggtttaggaagttctactttttgaagaaaacttctaagatactcgattctttcgaatggcattcaagagcacattgatcttggcatcaaatacgacccttcaactggtatctacagtatggacttttacgttgtcctgtaacgagctgggttccgcgttggtcgtc

SEQ ID NO: 35025 - DNA, 203 bp, Gossypium hirsutum
  Clone ID: LIB3147-026-Q1-K1-E9
cccacgcgtccgtcgaaggataccctaaaccagttacaacttactcttcagtgttctccgcctcccaatccacccccggtgcaaggattaaatcttacataactgcaaacccaaacctacacccttttattcaccaaataaccattctttgccacattaatcttaaaatatactttcacacgataagccacaacatctttacc

SEQ ID NO: 35026 - DNA, 419 bp, Gossypium hirsutum
  Clone ID: LIB3147-026-Q1-K1-F11
aggagccattaaagcttgatattgttataagttttccagatcatggcttccatctccgttttgaccgttggtctcagaggttgcgccttatcgaaatttttgatatcaaacgtcttcaaatgcgctatgccacttctttgataggaggaccatctactcttgctacgtttgtagctgtctatgcactttttggtccaacctatcctggaacttatgacaaggatagaggtgtttataccctattctacccaggtctttcttttgcttttcctattccaagtcagtattcagattgctgtcacgatggggaagcggaattgcctttggagtttcctgatggcacaactcctgttacctgccgcgtatccatatatgatagttctgcgggcaaaaaagtgggtgtggatccttatggataa

SEQ ID NO: 35027 - DNA, 390 bp, Gossypium hirsutum
  Clone ID: LIB3147-026-Q1-K1-F12
cccacgcgtccgcccacgcgtccgccagctgaaccagcattctcatggatgattactttggagacggttaccttgcccattccatctctaacaaccactcccgatcctaatctgaaaagttcactattaaagccgacatcaaaattaattttgatatcctctccagaagagggaacccatacttctctagtcacctctttgtccataaggcccaaagggagacacagaacactcgttgctgggagtttgagcagacactaaaagcccaagtaattgataagtgggtgaccatttttggttggaggttttggaagagttaagtcaccctctatcaagcaaggtacatgcctagttgggtgagaaaaatggcttctagaatggtctattttc

SEQ ID NO: 35028 - DNA, 244 bp, Gossypium hirsutum
  unsure (1)..(244): unsure at all n locations
  Clone ID: LIB3147-026-Q1-K1-G11
cccaacaacaaccnctacgagaactgtgttgtacctttacaaggaggccgcgctctatcccaacaacgactacaatcctttctaagcacccgcatatctatgtgcccaacctctcattgatcaagctcatgcacaactttcattacaaggagtatatcacgcagaccttctcctgccataactactactaggatctcaccaacaatgtcattcaacacctactcaactacctgaacctcccttc

SEQ ID NO: 35029 - DNA, 341 bp, Gossypium hirsutum
  unsure (1)..(341): unsure at all n locations
  Clone ID: LIB3147-026-Q1-K1-G2
cgcgtccgtctatatcgcgtnccgccctttttttttttttttttttttttttnttttttttttttttttttaagaagtttttttttttttttttttaaaaaaaaaaaacaaccttttattttattgaacccaaatttaaaatacatccccttattttttgcaacatttaagtcaaaatttaacaccaacattttcttacaaacatttaacaaccagcatgtctaaaaactttttcaaacccgcaatttattggaattaaaaccttttttttttttttttttgaaatacccatttacaaactttgtttcatgtcctttttgcttttaaaaatcttaaatcac

SEQ ID NO: 35030 - DNA, 345 bp, Gossypium hirsutum
  unsure (1)..(345): unsure at all n locations
  Clone ID: LIB3147-026-Q1-K1-G3
ccacgcgtgcgcccacccgtcctctcttacactttttattagnaannacaacatcccattgccaaagaaaacggtttnaaaaagggggctgtcaaatctttcttttctttttttaatatganaaggaagacattnatcttctgcgagttctgctgctacattctattaccggtaaactggtcacattcncaaaagaaaaggaagggctcaaactcgagctggaaaaaagctcagctgaaaggccatcgaagttaaaaggtgtgattgatccctcaatacgaggcacttttgcagatgaatcaatgaacaccacagttgaatccgctataaaaagcccgtcaaaaa

SEQ ID NO: 35031 - DNA, 368 bp, Gossypium hirsutum
  unsure (1)..(368): unsure at all n locations
  Clone ID: LIB3147-026-Q1-K1-G7
gcgtccgactgtggttcttcaagggcttccccgaagtgctgtctttagaggatgttgagcgtttccttgggaggtgtgagtatgactcggccgcaanccaaacggttacattttcttgtcctgtattcaccaaccttgtcagattaacaactgngcaattcccctctcatatccaagcaatgaacgcatgcattagcaaaaacagaaaaatctgtctcaataatcaaatctctgtccgagttctttattaaaaacttcagtctgttagggtattgcctaaagatggaccaccacatcagtaggctgcctggtccatattgaactatgtgtatattttgcctgtttgagggtttgtgcacgcattggac

SEQ ID NO: 35032 - DNA, 265 bp, Gossypium hirsutum
  Clone ID: LIB3147-026-Q1-K1-H11
cattctcttgcctcaggaaagatttatgggggaggtgggttcaactacatcaaagaatcttttgaaaatggtactcttcaccttattgggttgttgagtgatggtggtgtccactcccgccttgaccaactacagttacttctgaaaggtgtcagtgagagaggagcaaaaaaaattcgtgtgcacatccttaccgatgtgcgtgactttattgatggaagcagcattagtttcgctgataccctatatattgatctgttggagc

SEQ ID NO: 35033 - DNA, 288 bp, Gossypium hirsutum
  unsure (1)..(288): unsure at all n locations
  Clone ID: LIB3147-026-Q1-K1-H5
cggtnatcctgaaacaacgggcatagggnccgccgaccaggaaagtcggcaaaagaacgaccggcccaccgggcaagagggcacantgtgttttaccgcccagcaagggaacaacaccgccgaaancaccagnggaggannaagccccggccggaagaagaacaaagcaaagggatatgggaaaccaggattacacaaggcaggcaccaaagcaaagaagtaggtaagaggaaaggcccatgacggagtagtcacaaaaatgccctaaatacccacaaaacactacaa

SEQ ID NO: 35034 - DNA, 262 bp, Gossypium hirsutum
  Clone ID: LIB3147-026-Q1-K1-H6
cccacgcgtgcggcgaagcacaacaagagttaaagcaaactttaatgtaacatgtttatatgcctacttgaaaaagaatgatgtttaatcattcttaaaaaaaaacacaaaaaaaaaaaaaaaaaaaataaaaaaaaaaaaaaacaaataaaactgaaactaaaaatacaagaaaaaaaaaaaaacggggtcacaatttcaaaaaaaaaagttatctaaaaaattcttaaaaaatcacgccaccctttacgtggaaaaataa

SEQ ID NO: 35035 - DNA, 395 bp, Gossypium hirsutum
  unsure (1)..(395): unsure at all n locations
  Clone ID: LIB3147-026-Q1-K1-H9
agggnncacccacgccgtccggaccaacgatcaacataacattttgaatccacgttctacattttagcacccatgcaaaccaccagagtgccggtgcttattctcattgctctttctgcatctgtactaacgctacaattttccctcaatgctacacaagctcctatacctacccttcttgcctcataccttacatcaatgatagcttcagtctgtgaaaacccaactcttcaaccctataggctccaacaagcaatctcagcaagcaacatacctttatcaccctcttttcaacaatcttcaaccctatctatggtgcagtcattggtacaaaacatcatggcacagcaactgcagcaactcctgctacctgtgatcaaccaaataactttttc

SEQ ID NO: 35036 - DNA, 367 bp, Gossypium hirsutum
  unsure (1)..(367): unsure at all n locations
  Clone ID: LIB3147-027-Q1-K1-A2
gaagaagaagaagaagaagaagaagaaagaatgaaagaatgaaagaaaaaaggttgtttgaaagaaactaatcaggtaaattatgagaaattatgagatatttaccgtgtttttttgtttcagaaatttgaaataatttattgtattttttgaaacaaattaaatgaatttttttttaattgcagatttgcaacaaatgagttctttgattaataataatcacatatcaagtactattaanaaaaaaaaaaaaaaaaaaaaaaaaaaaaaaaaaaaaaaaaaaaaaaaaaaagggaagggccgtccgatataaaggatcctagcttcccggcgcgggcatgcaaaaacatagatgggggggggcgtt

SEQ ID NO: 35037 - DNA, 482 bp, Gossypium hirsutum
  Clone ID: LIB3147-027-Q1-K1-A4
cttcttccaggtaaaggacctgccaaggggaaaacatcccgttcaactcaaatccaatctcccttctagccctcacaaattcgagtcggaggttattgaggttgacctagagaagaatgctcaagttcatgtcggtcccctgaaatatagtgtggaggagtatcatcacaaacaggaattaactccggcaccggtattccctcttattgttggagtttcagtgatcattctctttctcagcattccaagactaaaggacatttaccaagctgccacgggaatacccaacaccgggttttatgacaactgcaaaaaaagaaccacggaagccagttgtgagaaagaagactttttgaagaacccttttcccacaaagggggtgcgactttggggctcagaagacttgtaaaaaagttaatattttcgtacattccccccggccccagaagctttggtagatgataaaactaatttggatgaca

SEQ ID NO: 35038 - DNA, 489 bp, Gossypium hirsutum
  unsure (1)..(489): unsure at all n locations
  Clone ID: LIB3147-027-Q1-K1-B1
gtccattaaaatatctaaatgttagtggctgcaaccaaataggtgatgctggaattgtagccgttgcaagaggatgtcctaatctcacttacctcgatgtcagtgttctccagaatttgcgcgatatagcactaaccgagttaggagaaggttgccccttactcaaggatatagtactgtcccattgccaccaaataactgacattggtctttcccacctcgtcaaaaactgccaaatgctcgagtcatgccacatggtgtactgtccgagcataaccgcggcaggagttgccaccgtggtctctagttgtcccaacataaagaaggtcctggtcgagaaatggaaggttagtcccagaaccaaaagaagagccagttcagttctttcttatctctgtgtagacctctaattaggaccatccgagttgtgtattaaccaagctcgtcgcttctcaaaacaacctaacattatatgannatattatgtac

SEQ ID NO: 35039 - DNA, 260 bp, Gossypium hirsutum
  Clone ID: LIB3147-027-Q1-K1-B10
cccacgcgtccgatgagttcttacatgtatggtgatctctataaagaatagttgtatggaattgagtgtttgaatttggaaaattttcattactgtccacggcttatgtatggtactgcagattttagtttatcaagggacagattaggcatattttgtgacaaattgcctgctgtaacactgcctctgcagatccttccccatttatttgtaggatactatcaagttaacaaatgcatctcgatcgatgcagttcaatg

SEQ ID NO: 35040 - DNA, 178 bp, Gossypium hirsutum
  Clone ID: LIB3147-027-Q1-K1-C2
attcaaatggaggacccaccaccttaccctaattttgcacccttaaccacaaaatgttgttaaggttttcaatccatgataattggttaacaactaataaggtatgcactgggtttttattgataactgggtgggtgattggctttaaactgtgattttatatatatacgaagtttag

SEQ ID NO: 35041 - DNA, 400 bp, Gossypium hirsutum
  unsure (1)..(400): unsure at all n locations
  Clone ID: LIB3147-027-Q1-K1-C3
agaaaaccctttcctctttctctatctgaaaatcactgccccataaacaccaaatggttagtggttataatggcctctctctcttttttctcatcttcttcctgagttaaggttttttgaagcaacatttgtgaaaatggaaaatggggtagtaatggtaataataagattgcggaagaaagagttgccaatgaggaagtgaaggtgaggcttgctggngattccggtgaaacagaagaaccagtagatgaggtttttgaggaggcaagttcatcactggagaatttgcaagaacaggcagaaatatctggagtggatggccgccagttcagttgaagatgcaattggaaatgttgagacatttggcgatactggttcagaggtagttaaggagaacttg

SEQ ID NO: 35042 - DNA, 303 bp, Gossypium hirsutum
  Clone ID: LIB3147-027-Q1-K1-C4
acaagacctaattattggtgggggcaggatgcatttaacatggccctcacccttaatttcaagggggattccgcctttaaccacctttttaaaatggcccgtccttatttgggttccaaggtaatggaagggaaaagcggtgaaaaaatgctcaggttcaaaattgtaaatgggaatctggaggtccccgaagattgtctacgtgaagctgattattttagcggcaagcctcttagcaccggtttgctccgctagtaattttctacctaaagccataacctatgccacttatcactatcagct

SEQ ID NO: 35043 - DNA, 361 bp, Gossypium hirsutum
  Clone ID: LIB3147-027-Q1-K1-D3
cccacgcgtccggccaaatgttgacctgttaggcattgttgcccccacttctaattctgggggttattttctcaatcttcacaaggcaacaggccatcctattcttgtctatatggctgctggaagatttgctgacgatctggagaagttttctgatgaatatgcctgtgaactttgtgatgtcgcagttgaagaaaatgtttcctgatgcaactgagccggtacaatatctggtgtcacattggggaacagatccaaattcccttggctgttattcgtatgatccagtcgggatggcaagagatgtgtatgataagcttagagaacctttggataatcttttctttggaggggaagcagt

SEQ ID NO: 35044 - DNA, 327 bp, Gossypium hirsutum
  unsure (1)..(327): unsure at all n locations
  Clone ID: LIB3147-027-Q1-K1-E1
ttaaaacaaggtgaagtccctaaaactctaaaaaaacctttaataagtcgacatagagataattaaaggtaggtttcaattatgaacgttctctaatagaacaatttactagggataagaagtcgcttcgtaagtgatttatttagccttgttgctgatttggcttattagaataatttaaggctgcaaaggatttgtgctgggtggattaaggcgtcaataactaagcaattattttccttgataattttcagcattctcaattcaagctaaaagctatatgctactnntagatatnnttagcatcgtaaaacataaatttcccnc

SEQ ID NO: 35045 - DNA, 418 bp, Gossypium hirsutum
  unsure (1)..(418): unsure at all n locations
  Clone ID: LIB3147-027-Q1-K1-E2
cccacgcgtccgcccacgcgtncgnccacgcgtccgataaaggagtaaaagccatatccagggattggaaggaagagaaaacgcatgtttcttcattaaaccaggaaagacaggctttagagaatcagattgtgaaagacaaggaagcaaganaatcactcanaaccaacctggaagaggctaccaactcacttgatgaagtgaaccaaaaaatattgaaactttccagagatctggaaatcgctaatgctaaaatatcgagtctcgaggatgagaaaatggttctctataaaacacttaccgagcagaagaatgcatcgaaagaagctcgagaaaacatggaagatgctcatagcattgtgatgacactgaacaaggaaagggagagtcttgaaagcgagtgaagaactcgaggaga

SEQ ID NO: 35046 - DNA, 401 bp, Gossypium hirsutum
  unsure (1)..(401): unsure at all n locations
  Clone ID: LIB3147-027-Q1-K1-E5
aagaatggcaagggcaagaccggttccaccattaagtttttgggacaaaggaagaacctggggatcatagttaacaaaaatggaaggaaaaaaaaccaagtccccaaactgtacagaaaagaaaagcaaaatctgcaaacagtttcctgtttattctttcttactgtttattctttctttctccaactcatagcaaagaataaaaaaatggaaaaggagtgtcttttgtaagctttcttaatttaaatgaagtccgcaaggcanaaaaaaaaattcatatttatatgaattatttgaaaattttatacatctgtattgatttggttggaaaaaaaaaaaanactacacaatcaaatttataccattttcttcttttttaaaaaaaattttccaaaaatttt

SEQ ID NO: 35047 - DNA, 109 bp, Gossypium hirsutum
  Clone ID: LIB3147-027-Q1-K1-E6
cgggcaccacgcgtccgtctatttgtccaagttaaaataatcgtcaatttgtttaacttaataatgtaacaatgggcactgataattcaagcacttctatttagctctt

SEQ ID NO: 35048 - DNA, 393 bp, Gossypium hirsutum
  unsure (1)..(393): unsure at all n locations
  Clone ID: LIB3147-027-Q1-K1-F2
aaaaaaaaaaaaaaaaattaaaataaaaatttttattttaaaaaaaaaaataaaaaaatttggggaatgaaaaattaaaaaaattaaatttggaaaaagggaaaggaaataaaattgaatttgttttnnttgggggcccgccttttttaaaaacccaactttactccccgtccttgcaaccttttaacttttttatttttgcccctaatttcaatttccccccccgccttttacaacctctggccttgaaaaccccttcctttccccaatttaattgctttgcaacccattccccttttcccaacttgccttaaaacaaaaaagccccccccgatttccttttccaacaattcccccccctcaattgcatattggaccccccctttacccccc

SEQ ID NO: 35049 - DNA, 235 bp, Gossypium hirsutum
  Clone ID: LIB3147-027-Q1-K1-G7
agaaaaataatgaatatggtgccaggatatcaatttctcagcagacactactacaatgcgtaataaaaaacatgactgccatctaatttttcattcccgtagtcaataaagaacctatgtaacacgaagaatgtcaatgagaccataaatcgtgttaaacgtaacttgtgaatgcacccttcaaagatataaaaataaaaaagcatttctagtgcacactcccatgagttcaaag

SEQ ID NO: 35050 - DNA, 209 bp, Gossypium hirsutum
  unsure (1)..(209): unsure at all n locations
  Clone ID: LIB3147-027-Q1-K1-H10
ccgacccacgcgtncggcgttgccttgacataagtgagcttataagtttctaagattngctctggtgctggctgaagattgtgattatgttgtttgcatcattaccacttactatacatgaaccccataactcttgctgtcggtagcatgttgttctttatacgtgatattcgtgataggttataaatatttataatgaatcgctcttg

SEQ ID NO: 35051 - DNA, 353 bp, Gossypium hirsutum
  Clone ID: LIB3147-027-Q1-K1-H3
gtccgaaaccaccaccttcacctatcccggtcagcatggtcgtgcaactccttgaacgagtccattatgccttgaattaataataacaacatgctatttgagacagcgttgatgaaggagagatcaatgacagtaacaaatatggcttgtcttcatagttctgattcgagatatcaagggaacatcaaaagtggcagtgtgagggctgggtacaagaagctgacaaccaccggctgcaatcttgcacattttggttttatagtttattacagaaaccggaggttgggtaaaaacagctgcaggcacaaggaataaagagctgtagtaaatgggtaaagttggtgctatgtttt

SEQ ID NO: 35052 - DNA, 264 bp, Gossypium hirsutum
  Clone ID: LIB3147-027-Q1-K1-H5
caggcgttcgacaaaatttcttcttttccgggattgtatatttaaaattaacctaatggaatctgccttagatttattttgaatgcctgtactttatataaaggcaaattttatccactaacctatcttactgcctatgaattatgtattatgcttgcgatctcaagtactgtattcggatacaattataatagtatttatatttgggagttaagatgataatgatgaagaatcaggaagcaatttatggagtggagttaaagt

SEQ ID NO: 35053 - DNA, 280 bp, Gossypium hirsutum
  Clone ID: LIB3147-027-Q1-K1-H8
agggccgacccacgcgtacgaggacgcgtccgtccactcgtactttgactttttcgcccacggcgtacgcagagggtggcgggtattgacttgagctatcaaaaaggtgcaaagatcgttggcctgtttcttatgtctcgtgatggtgataagctaccagcggggcgtgcaatcgactgaggcaaggcgtggtcagtcactcagggataagcttcagggaggatgcgtgagtagccacaactggcccatggtgctcaatgacaaaggtacctcccgcggc

SEQ ID NO: 35054 - DNA, 368 bp, Gossypium hirsutum
  Clone ID: LIB3147-028-Q1-K1-A12
tcgcccacgcgtccgcttgctggattcctcatctccctaacccaagtttccagcaccactcagcgtgtgctccctttatcactcaatttcatcatctgcgcattgtttggggtcacttttcgctatgcaattaggagggacttggacaattttcagctcaagaccggcacatatgcagctttcggttttgtgaaaggccttgctacattgggaggagggacttcctctggaactgcatcctgtaagctatttgtctcatgctgttgatggtgcagtttatgtatcccacaatcatcttcgcttttttatttgctgctgatgccttggatttttgcattaagatgaggattttaagttctttttctatg

SEQ ID NO: 35055 - DNA, 284 bp, Gossypium hirsutum
  Clone ID: LIB3147-028-Q1-K1-E1
ccgatccggtcgccacgctcgacactggagatgctgaaggcaacccgtaggatccgaccgtatctacgagggctccgatgagcctttggtctatcaaaggtaacgtcaggagtcatcattcgtctcgactgcgttaacgactccttggcagcgccatcgtcacacgaaagttagggcatgcttacacaaatggcttggcctggattaggagatatatccactcgaggttttctcttctaccaatttagagaatataaaaatttgggagcttgggaatgcacaag

SEQ ID NO: 35056 - DNA, 367 bp, Gossypium hirsutum
  Clone ID: LIB3147-028-Q1-K1-E11
cccacgcgtccgcgttaattcaatttaaataatttaattttatttaatttttcaagtgaaggaagttgtgctcaccgttcactactttaaaaaaaagtgtgaattggaacagattgatcaaggtcaactgggagaagatttagttaatccttttttggaatgtaaggggttttaacaatcccctcaaatacattagggttatgaatagaatgaaggagttgagagttgatatagtttgtttgattgaaactagagtgaatgaaaataatgtgacaactattggaaaagtggtttcagggttggaggggcattaacaactacaatgatgctgagatgtataggaggaagatgagcaaagatcttgagc

SEQ ID NO: 35057 - DNA, 140 bp, Gossypium hirsutum
  Clone ID: LIB3147-028-Q1-K1-E2
ttttgtcatcttcatgaagatgcttctaatcacccctactaccagtgtatgcactgttccagagacagtgcaagagtgaatcgcttaatactcatggctgatgcatatttgttagatggatcctatttgtggttataatg

SEQ ID NO: 35058 - DNA, 449 bp, Gossypium hirsutum
  Clone ID: LIB3147-028-Q1-K1-E7
aaagcgaatgcaaggtcctctccataagcggcatgggtggtctggggaagaccactctggccaagaaaatatataggcaaagccatgttgttggtcatttcaagcactaggcttgggcatacgtttctcaaaactgtcataaaagaaaagtatgggaagacattttatctgattttaacctcttaagtgaagttgacaagaagatgaacgttgaaaaattagcatagaagttatctaatttcttggaggaaaataagtgtttggtggtactcgatgatttttggaacaccgagtcttgggatagcttaaaaccagcattttcagcatgggatacgagaagcaagacattactcacctttttgaacacatagatattttcacatgctgacagtcaaggtttcctatatgagtcgcagtatctaaactaccatccaaactgggaactattt

SEQ ID NO: 35059 - DNA, 494 bp, Gossypium hirsutum
  Clone ID: LIB3147-028-Q1-K1-E8
agaaactgtgcaagtggctagttcaactcctgatggctcttgactatttgcatgtgaatcagattcttcatcgtgatgtcaagtgttcaaacatcttcttgacaaaagaccaagacattcgtctcggtgattttggactcgctaaaattttgacttccgatgatctcacatcctctgttgttgggactccgagctatatgtgtcctgagcttctggctgacataccctatggttctaagtcagatatctggtcattaggatgctgtatatatgaaatgacttctctcaagcctgcatttaaagcgtttgatatgttggcactgataaacaagatcaataaatcaatagttgctccacttccaacgaaatattctggggcctttcgtggtcttgttaaaagcatgccgcacaagaattctgaactcatgccaagtgctgatgaactgctcagacacccggaccttcagccatatgttcttaaggctcaaaataaa

SEQ ID NO: 35060 - DNA, 205 bp, Gossypium hirsutum
  Clone ID: LIB3147-028-Q1-K1-F9
tccacgcgtccgaaccctaccttaccaatcaggattcaacatgaagggaggttaatccaggggggatactaacggctcgaggctcgccgtgaacaagatatctatcgcctaatctggaaagatatcggcgaaggcgtttaacgatccaaacaagccaaagaggcctgttagtgccttattttttttcatggaggagttccgtgag

SEQ ID NO: 35061 - DNA, 305 bp, Gossypium hirsutum
  Clone ID: LIB3147-028-Q1-K1-G10
ttgccgttgagtcgtacgtcgttgatgtaccgtcgggtaatactaaagaagatacatgcacgtttgttgatatgattgtaagttgtaaccttcgatctttggctcaaatggccgcaaattcggctaaaaaagaaaaatattcatcatccccataatcattcaacaaaaagaaaacatatttctcttagtttcaacatataatcatacatacagacatacatacatacatacatatatatgaagaaattttggcttggatgatgacaattaatttttatttcatttccctatgcaattattgagta

SEQ ID NO: 35062 - DNA, 374 bp, Gossypium hirsutum
  Clone ID: LIB3147-028-Q1-K1-H3
gggaaaacaagccatgcccatgattctctcaactcctcgtcaggctgaaccatcgcgtcttgggggaggccagggcaggaagggggtgcactcaaaggaagaaaactgcaactttctgctcgaggcacagatgaaaagacaacggggccagtctgcagagtggacgggtattgcataggaaggaaaacttgagccggaggcgtctgagggttggtttaggaacatcaggctggggtccaaccttggcttctgccgggaagaccaagagaaagaacccgtaggatgaaaaacgctggctagaacagaataaacggagacagaaagagaacaaacgctcccgaagacgtcgccaaatttcaataaaacaaggcttt

SEQ ID NO: 35063 - DNA, 402 bp, Gossypium hirsutum
  unsure (1)..(402): unsure at all n locations
  Clone ID: LIB3147-029-Q1-K1-A5
tccaccccgccccacgcgtgcggccacgcgtccaggccgatctccgcgcttttctttcctaatccagaacatgattcaccgcgttagatgaccgatccatcggccaattcttaacctccctcaaaacccctcacccttactctatactcatctgctttgacgccacccaactccacaaaaaaaccggactccacctccgggagctccaccatgaggatgcactcacccactcttcggtcatcaccaaccacatcaactccaacaccaagctgttgtctggcgacatcgagttcggggaatctcaatcttgctttcaccaaataaagcgaaagactacgtctctcacattcgcctcgacggnccaaccgcaaaatcgttgaaagatgagtcggaacagatgga

SEQ ID NO: 35064 - DNA, 402 bp, Gossypium hirsutum
  Clone ID: LIB3147-029-Q1-K1-B1
cgcatttctttcaatctgtatctgtcttttatcatcatctgagattgtccagacagcacaacaaaggagacgacattgtttactattacccatggtgaagactaattaagccattcccacagatcttgaatattagtattaatgacccatgataggcttagatttttccatgtttttgttattgtaggacattgtttgaaaacatggttgctatcttctttcgcatttcaacactgaagacaagagctatccgaagccattcttcttattttgagattttttagagtagtaataaagttccaggaaatatgccaaatagtgatggcaattttttatgggaaaatgtaaattccatagctgtctgtaggaattttttggtgcagtctgtattaaataatcact

SEQ ID NO: 35065 - DNA, 361 bp, Gossypium hirsutum
  Clone ID: LIB3147-029-Q1-K1-B5
agcacatgttgtggaggagtatcttccttaccataacgagaccatctccggcgttcctgacaggcttcccgccatgggtattgacacccctggagtcgctgccctcctaggagctcacagtgtcatcagaactcactgtgtgatgctgagccatcgcttgtacccagatgttgaccatgacctcatccctgaccatgttgcacacatactccataaatgcgctgatcagatcccagaccccatggccgtccagtatgtgataaacgacgcgtggtcacccttggttttgtataacagctactactggaacatactggacaacatggctttgttgattgttgatcaccaactgtcgtacgac

SEQ ID NO: 35066 - DNA, 485 bp, Gossypium hirsutum
  Clone ID: LIB3147-029-Q1-K1-B8
cccacgcgtccgcccacgcgtccgcccacgcgttcgagaaaaatggagctgttaattattcgctgttgatccaaggttacgatagtatgttgcctcctgaaagagttaaagccaagatgaaacttcaacttgctgaagcagctgaaaaggatccaacaacaggccctggttgggaacggttcgagtttgacaaagatgcccctgttgacgatgatgaaattgaagttgctgaagatgatgcatcattagtgaagcatattggtcagagctttcggttttctgccatagagaaaaggagggaggagcaactgaaagctgctcatgatgaggccatttttggcacatcaacagcttctctttctgttacagcagatagtgaaccagaagaggaaaatcttaagaaggatagcaacgataatgctgttgctactggcctcttaagtgagaaggtgatagcaaaagcaccaggttcgtggcgagatcgg

SEQ ID NO: 35067 - DNA, 204 bp, Gossypium hirsutum
  Clone ID: LIB3147-029-Q1-K1-C2
gccctttagaaaaacacaatttggattacagaacatgaataaaaaagaaaagaaaaagtccaaactattctctgaatattttattcatatagattacttacaggtccaccttgtaaccaaagaatgattggccatggctttgaaggctgttcaactctgtaaggacttctgtaaagccaccaaaacatatgtgcttctatttat

SEQ ID NO: 35068 - DNA, 159 bp, Gossypium hirsutum
  Clone ID: LIB3147-029-Q1-K1-C5
ggacgaccacgcgtacggtacgtcacgcgttcgttctgacgtttggatttgcgatccaagcgcaggattctccgggtgagagtccttcagacgcttacaccacatttgctcactccaattttcacctagaatcagaggctgcgagtttttcaagtgcat

SEQ ID NO: 35069 - DNA, 235 bp, Gossypium hirsutum
  Clone ID: LIB3147-029-Q1-K1-D3
accacacgtacgaccacacgtccgggaagcctgttgaggttatgggtatgctggtgacaaccggttggtcaccaggagggatgatcaagacattctccacacatttgaaggagacaatgcagatcctctgcaacaggtagcggcatatgtattgaagcaacacaaggacaagctccacggttgtgctcttgttgtcacatcgaactacttgagagaatctaggagcacatacttg

SEQ ID NO: 35070 - DNA, 483 bp, Gossypium hirsutum
  Clone ID: LIB3147-029-Q1-K1-D5
tccagggacgacgccacgcgtccgcccacgcgtccgcccacgcgtccggccattcaatttgagaatcctggcccacgggtattggagggcttcactgttggatttcatccgcgatcatgggaaattgttcacaatggtctgactcagttgggttttgaaaaatctcaccctgattttagtttcagcactgaacagcctcatgttaccctttatttgactgccattgcatcccaatccaacctcgtaaaaaaacctggagtcgaggtgtttccagaaaacggactggaggtcaagttatcagggactgctgcaactgggaatccacctacaacattatcaccatcaactttgcttttagattggagatgtgtaaaggcccgtgataccccgtatgaagttaagatcactatcccagtggaaggttatgaatcaatcgagtttgttctaacgaagatgtgtgactctgcacaaaatcaggaagaa

SEQ ID NO: 35071 - DNA, 287 bp, Gossypium hirsutum
  Clone ID: LIB3147-029-Q1-K1-D6
agcacatccaagttggtaactacaaaattctcttgaaaactaacggagcatactgaactagagcggtaatacgagaagcagcaccttgcaggtataaacaacatcaaacatgttgaatcgtatgataaaatacatagagtttgatgcaatcatcatagcaagctttgtatttactttttgtttttgcaaaatgatcttggttgttttttataacaatcgtatgtaaatatgatggcgctacaattgttatatttcgatattgaaattaaacctgagtgttaagtgtc

SEQ ID NO: 35072 - DNA, 404 bp, Gossypium hirsutum
  Clone ID: LIB3147-029-Q1-K1-D9
tactacaaatgctacaacattgtggaaaaccatttcaagaccaactgaaatccccatggcgaatgcaacagtttggaaagcgattcccaagtccaccgaaatcccttcaactcatcccaatagatcggagaagctacggaaatgtacttccctaagggttgccactacgtttactcgagtttgtctatgtgcaccaatctcttcctacaacgaggtatttcgtgccgatgttccccctagaagaagcaacacttaccctaggtcaaaggcctttcccctggcgcaagaaagggtaataacaagcgcgagacttagcacggaaggaagaagagttttccgtggtaaatcattgacggacgatgtattgatgaggaagattgttgtggaagaagaagcaatgatgc

SEQ ID NO: 35073 - DNA, 495 bp, Gossypium hirsutum
  Clone ID: LIB3147-029-Q1-K1-F5
cccgtatctacccgatggaaggtttgatctcgaatcatacgatgacttgatgcacatgcaaattgaaaacggtgcagaagctgtaattgttggtggcacaaccggtgagggccagctgatgagctgggacgaacacataatgcttattggtcattacagtcaactgttttggtggatcaattaaggtaatcggaaacactggcagcaactcatccagggaagcgattcatgccactgaacaaggttttgctgttggaatgcatgctgctcttcacatcaatccatattacggcaaaacatctatggatggcctgatttatcacttcgatagtgtgctgccaatgggacctaccatcatatacaatgtaccatcgcgaactggccaagacattcccccacgtgtcatatacaacgtatcacatagtcccaacttggctggtattaaagaatgtattggaaatgaccgaattgagcagtacacaggtgatggaattg

SEQ ID NO: 35074 - DNA, 171 bp, Gossypium hirsutum
  Clone ID: LIB3147-029-Q1-K1-F7
tcgctcttgcgcgtgccagctaccttatatctgttatgttatgtctgctagcactaatatattggctggcgttttacactctctcacttgtacaagcagggacgtcccccaagctaataacgcttgacctgatacactttagtctgttaactacacaggtatcacaagcca

SEQ ID NO: 35075 - DNA, 456 bp, Gossypium hirsutum
  Clone ID: LIB3147-029-Q1-K1-G11
aaaagccaaaacccagaaagctgactcatcgcattcctctgaaaatgacaccaagttcccagcttggtcggctcggttcctccttcgtctgttgccatcaccatccacgccaaacccggcgccaaatcttcctccatcaccgatttcagcgacgactctgtaggggtccagattgatgcgcctgccaaagatggtgaagctaacgctgcacttcttgattatatcagctcggttttaggggtgaaaagaaggcaagtttcaataggttcaggctctaaatcaagagataaggtggtagttgttggggatatcactctacagagtgtatttgatgctttgaacaaagcgtccaagtgctagcgatggagagacaccttttgaagtgctagttattgtaagatggttagttcaagccagggatgatacttggttgcttcctggattcaacatgagaat

SEQ ID NO: 35076 - DNA, 462 bp, Gossypium hirsutum
  Clone ID: LIB3147-029-Q1-K1-G5
ccttaagcccccatatcccattttcggttctttgtaatcgactgaagaccaggccacctcccaccgttctcagccgaacagcagcccctttcaactacgattttgacagaacaggtgggggcgacggcggacgcgagatgcaggtaaggtttccctcgccttttcctttttttttattttttatacattcttatatatatatacatgattaaataaaaaggaaatagatagaaacaaatcaaagaaacagaatgaaaaagagaaaagaagaaaacaccttctcttcaaattttttattgattcttccaaatttttttcaatcgtttttttctccccccttttacagtatattcggctttagccgaaagaaaagaagaaaaaacataaaagaaaatcccctcccttttacaattcttggcttctggcttatatagccaaatacctcttggatactattttttt

SEQ ID NO: 35077 - DNA, 345 bp, Gossypium hirsutum
  Clone ID: LIB3147-029-Q1-K1-G8
gccacgcgtccggagcaactgccacattcccaattcaggttgtgtcacggctagagcaaatcaggagtataggcatctattggccctctgtgagcagcttcttaaccaagaagctgtgcatctacagcagaatcatccacggagcggaagtgccaagcggcgcacatcatgcgctctacgcgaatctgcgagcaagagagaaaagagatattccgacttgaagaagattgaccgcggtgtgcaccggcatgttcaccacgatatcacagtaatcgcggtggttctcgactcaaacctcatgagcatggatagctcagactagggccctaatctatgcattagagg

SEQ ID NO: 35078 - DNA, 342 bp, Gossypium hirsutum
  unsure (1)..(342): unsure at all n locations
  Clone ID: LIB3147-029-Q1-K1-H5
gggacgacgccacgcgtacgtcgtaaaataccttgttcatgggcaccttaagatttgagccttgaagcaaacgatttaagggatgggtagctgtctgaagatcctaatctgtgactcgatccccaacgagcatgccaggtgacgcaacatgtattgtttaacagacataacttgggacactcttgctaggcagaaagctgcttttggtccgacgtaatacagcgcacttcattctacatactgtaccagactgttactctgggtatacttcatatgagcacacatctnctgttagtgattactatgaccgcagtgatgcttacttcttaagtggccagctta

SEQ ID NO: 35079 - DNA, 460 bp, Gossypium hirsutum
  Clone ID: LIB3147-029-Q1-K1-H9
gcggatcagtccaaggacaaggaagcttgaactattttctcgcatgcataatactcatgcaggatggatatcgcttgggaatcagttaaatggggttagactggttgatgaaggcctaagagcaaggtacaaggctgcctacccacatgtagaagtacaacctctctctcctcccaaagcttctgccatggaactagactctacttctgctagaagtccctttgcaacagagtcaagatcacaatttgcggatccagctgctcccgatgctggccatgctcccgaagagagggcaatggctgtagatactgatatgaccacctgaaaacctgacctaccttggttaattcccagatactagttcaagggccgatgtaccattacttaatagttcttttgtttcttttgtaatgattctactgtatcagtcccattttactgtttttagttaatttttgac

SEQ ID NO: 35080 - DNA, 391 bp, Gossypium hirsutum
  Clone ID: LIB3147-031-Q1-K1-A12
cttgactaagattagtaactccgagaatgatgctaagccagtccatgattgggagagtcttgcttccacttaccgccctcaatatcacaatcaagctttaagggatctcttttctcattacatggaagcttggaaatcatggtattcggaagttgctggcaaaaccccaataaaacaaatctcctaaagcttttgatccaatgacacaccacttgctatctccggttgactgcatcttcggaagcattcttttcttaaaattgatctattttcactattttctcctttaaaaaaaaattgttcctttctttgagatagagatttgacctcttgctagatgcattttctctttgcaccaatttgagtggcaacacacttgtacactaattca

SEQ ID NO: 35081 - DNA, 214 bp, Gossypium hirsutum
  Clone ID: LIB3147-031-Q1-K1-A5
agaacacaaggcgagtcagttggctaactccttaggtaccccaggctctactttttatacctacggccagtaaattgcatggaggtgacaccatataacagctgcgcactcgcatgctctcttaccttaactacgctcatctctagcgcgcgcccctatttataaagctggtacacattccccttccaaaaccgggcatcaaattcgatatgcc

SEQ ID NO: 35082 - DNA, 324 bp, Gossypium hirsutum
  Clone ID: LIB3147-031-Q1-K1-A6
cggtcttgatttacagcgcttgactaagaagtacttgaagaagcacaatgttcgggactggattttagtgactgcttgcaacaaggatcggacggtgtgcgagctccgatactttaacattgcggataatgagggtgaggaggaagagtgaagaccggttcagctttttctctattcatcacccctttgtttgatttatttgttatgaggaacctattttatcaatctcaggtgtcgaatctttggacttgatttggttgttttctgaaccctagtctgatttcaatgaaattttggttgctcatagtaaaacattatgttttc

SEQ ID NO: 35083 - DNA, 281 bp, Gossypium hirsutum
  Clone ID: LIB3147-031-Q1-K1-A9
gcgatacctacaggccattcgcttttatgtttacgtacggctcaacttgattctgcgcacgaaaacaaagtgtaagagatgaacaaaatataaagtaccacatttcaaaattacacattaagtttgatctaatgtgcaatgtaatgcaaactttgatttgatgcacttatatacatgaaaggtttatatacaacaaaaaaagaccaaaagctgcatccaaagatctatgggacaatatataagtgagaaaatggcaacgcggaggccgttttataacatcc

SEQ ID NO: 35084 - DNA, 291 bp, Gossypium hirsutum
  Clone ID: LIB3147-031-Q1-K1-B10
cccacgcgtccgctttgatttggcaaacattgaagtcaataatgtaattgcagaaggctgggcagtttctcagatgctttctcagttatttgatgtggttgttgaggcagatgatgtaccagatgagcagaaagctagaatttgcaagagtttggctgaagcatataagcgtttatttgatggtgcggatgagtatttgcagctgctgtatatggccatcaacacaatgcgagctttgtctaacatgccttaagaattctctttttgtaacttatcgtgaaatgcccattg

SEQ ID NO: 35085 - DNA, 444 bp, Gossypium hirsutum
  Clone ID: LIB3147-031-Q1-K1-B4
caagctcaggccttgagcatgagttggatggtcacaactggtgcagcggctccacttgtaacggaccttccactatacctagctgtggatgaaagtggtgagggaagaagaaaccaaccaacctgcgagaaatggtcaaatgatggcacagatagacacgcagctaaactggtggatgaagatgtcggagctgacatgcaatttcttctatcaaaggctctttgcgtggtgccaatttcactgcccaccgcactttaccacacgctatatcacaatacctcctctgatgctaagcctgatacaaatcctgcttcatatactcctctcttgacgcatagagggaaagaaaacggtgtatcatacggtggatgagactgtggacaaagacggaagcacttaccttgtgtattggcgtggcatggatttttgcatttggtgttatgt

SEQ ID NO: 35086 - DNA, 313 bp, Gossypium hirsutum
  Clone ID: LIB3147-031-Q1-K1-B5
ggcgatgtctagatgcagggcaagtgctgattgagagcgcatgctcggtggaccgagtcgaggaaacactgaatacattgttgcctatgcaccccaagatccgttacttccggttcaatccagtggatgaacgttgtgacatgaagctggacgagactgatccagcagtttggcagaagttggaagctgctacaaaagattacattgaaaataattcggaatactttaatatagcatgtgaaacactggttcaagcctctgctaatagggatactgagaaataaaaaaacacttgatcttaaaataaaacaaa

SEQ ID NO: 35087 - DNA, 406 bp, Gossypium hirsutum
  Clone ID: LIB3147-031-Q1-K1-C3
aaacggtcctgcaccttcattttctttcaatctggttctcttggtctcctctcctccgatgcttgacgatcaaaatctggaagccctcctactaggtaatggctaactcctctcttcagcgcttcttttgctagagcatgagcataaaaattttctatgttgggtatgaaatggaactttatctcttgaaattttcctttcttatgttgaatatctctgatgatcgcaccgatgctcgatttgtctatctctgtgttttggtattttttaattacctgctttgaatctcccacaatttccagtttgtttaaacccattaataaccctaacttgactgcttgtaaccctgcatgcgcttctgctgcaaatggatttgcaatttcggagtggatggtcgtttttgatg

SEQ ID NO: 35088 - DNA, 374 bp, Gossypium hirsutum
  unsure (1)..(374): unsure at all n locations
  Clone ID: LIB3147-031-Q1-K1-D10
cggacgcgtgggcgcaagttctatggagattcggccgtacgaaagaagccgctcggggtgacatggaggccgtgagtggaaaatccctcgtgaaaacccgattccctggctgcagtactagcgtgttctagaaacctctaggtttttggtattctcaagttgttgggcctttttgggccattttggcaatgggctactgtgacttggaccagggattaagttgggggattttgggtgtaatgggactttgggttaaggtctaggtcaatagattttgggtttcaattttgagtctcggggttgaatgtaaaatttgatatttaattgggccaaaactgggcttgttgtaattggactttggacccttntatttt

SEQ ID NO: 35089 - DNA, 453 bp, Gossypium hirsutum
  Clone ID: LIB3147-031-Q1-K1-D2
cccacgcgtccgttagtttctcatcgagacaaccttcatcattaggcattttgtctcagatttctgaaatcgaaaatgaaaaccttggggctaatagctttgatggtggcaaacctgaataccaatgtggttcttggaatgaatctgcacaattgactgagaagcacaagttgtttaccaataaccagaatggagatattggaagtggtgttcatgtattaccgcgccatttgagtctgccaaaaacttcgaacgagatggctgtcatggagaagtatctacagttccaagattcagtcccttgtaagattagagctaagcgtggttgtgctactcatcctcgaagcattgcagaaagggtgagaagaactcgtatcagtgaacggatgagaaaacttcaaaagcttgttccaaacatggacaagcaaacaaacacagcagacatgttggatt

SEQ ID NO: 35090 - DNA, 422 bp, Gossypium hirsutum
  Clone ID: LIB3147-031-Q1-K1-D3
gcgagggccgccctttttttttttttttttttttgtatattttggccttttcatgcactttgttgaatgcaagtttccatcgttgagctctaaaaaaaaaaaaaaaaaaaaaaaaaaaaaaaaaaaaaaaaaaaaaaaaaaaaaaaaaaaaaaaaaaaaaaaaaaaaaaaaaaaaaaaaaaaaaaaaaaaaaaaaaaaaagggggggccgttttaaagaatcaaagctaaccaacggggtcttgcaaagaaataggttttttataggggccccaaaattaaatccactggccggggtttaaaaacgttgtaactggaaaaaccctggggttaccaaatttaatggctttgaaaaaaatcccctttttgacagttggtttaataaaaaaaaggcccaaacaaattgcctttccaaacatttgc

SEQ ID NO: 35091 - DNA, 166 bp, Gossypium hirsutum
  Clone ID: LIB3147-031-Q1-K1-E12
ggccgacccacgcgtcgcgtccacacataactatcgtttagaatttaacttttatacggttcgttcctttattgggatacggtatcattagcacctgtgattgcctcccttcccaaaacaagtcccttttgaacttatttaagatatcaagacttttgtttaaaaa

SEQ ID NO: 35092 - DNA, 449 bp, Gossypium hirsutum
  Clone ID: LIB3147-031-Q1-K1-E6
cacctctgtctatgtccccaccacaaccacctccatcggcaccgtcgttgccacaactggaaccatcagatcattcaccacaacttccggcgttgacggggctgatgctggtgccgcctccggttccgcttttcaaacatccatcatggtcgccagacattttccgggacgaagcatggcttagaaggaaaggaaacagcaagaaaaggagaagcaagagcgtaacagatgaagaccttgatgaactcaaggcttgtattgagttgggattcgggtttgattcccctgaggtggatccacgtttgtccgatacttttcctgctttgggtctttattatgctgttaataagagctacaacgacgccatctccaagccttccacctcccctccttcagttgtatcggattgtgatagtattcattcccctattggcagcccccacgccatt

SEQ ID NO: 35093 - DNA, 125 bp, Gossypium hirsutum
  Clone ID: LIB3147-031-Q1-K1-E7
ggaattgatcagccacggctgcgggggcatgatttattgtggagcatgtggaaaatatacgaatgagttattaccacacactgatattttggtgaaaacttttcctggataacacatgcaaagtt

SEQ ID NO: 35094 - DNA, 248 bp, Gossypium hirsutum
  unsure (1)..(248): unsure at all n locations
  Clone ID: LIB3147-031-Q1-K1-F1
ggtcgaccccaccctcccnnataaaaacatttaatattattaaaaaaaatttttttttttaatctaataaaacaaatttgaggcggcatttttaaattgaggaacatgttaaaaatataacacttgttttataaccacacacttatattttgtgggtggccctttctaaaatacacaaactttatttccctctctttatacacaatctatattttttttttggacacccaaaaactatatcaattgcc

SEQ ID NO: 35095 - DNA, 317 bp, Gossypium hirsutum
  Clone ID: LIB3147-031-Q1-K1-F7
gaaaactttgactggaaaaactataacaatggatgtggatagcacttatacagggcgcttggctaaggtctcctctaagtaggagagcctacgtcataatttgtggcagtgggggcctgcgttcgcgcggcccctgttcaatttcagttagttttttttcagttgataactctcaataagattatcagatgccgtagcttataaaattatgatcttcagttaataagaaaaaatcaaaaatggaaaaaattaacttgttatcaagtgtttcattacttaaaaaagatacaatgtttacaagggagattaattaagtt

SEQ ID NO: 35096 - DNA, 434 bp, Gossypium hirsutum
  Clone ID: LIB3147-031-Q1-K1-G12
gttggtccaacgaaacgtggtgtttttggaatgtcgacgttctatttcttttcgggcggaatcgcattgctctcgggcatagcgtacatttttccttcatggcgtgcgctttacgttgcctcgtctgtcccctctatcctttttcttgtcctggtggtccctttcatctctgagtccccacgttggtatcttgttcgtgggaaaatgaatgaagccatgaaaattatgcgcaccatagctaatgccaacggacatcaccttcctgatgaggtcatccttgcactggatgatgaatctaatgatgccttaaatggtaatcaaatttgggaagcagccacagttgataaagaagccatcaatggttccattgtaaatgtaatccgatcaccaaatactctaattctactattcttagcagtgggaatcaactttac

SEQ ID NO: 35097 - DNA, 249 bp, Gossypium hirsutum
  Clone ID: LIB3147-031-Q1-K1-H3
agcgaagcgaggaaaatggtgagctaactgacagtgagaaggactatgatttgctgcctaaggtggttgaattctcagaagagaatggccatggaagtgaagagaaacccaagttagagctgccatcagaacaacccaaggagcccaaaaatgagaattccctggaggttaatgatgactcaaaggatgaatctcttcgagatgagggtgccaaagtggagaatgtgaacggagaattgaaggaagatg

SEQ ID NO: 35098 - DNA, 440 bp, Gossypium hirsutum
  Clone ID: LIB3147-031-Q1-K1-H4
cccacgcgtccgcccacgcgtccgtggatatttaaggagctgcaggatatgggaaacatggacttccgttttgctgaggaagaacctcaggatgattatgctgcagagcttgcagaaaatttgcttgtttatccaccagaacatgttatctatggagactatgtctttgagttctgggatgaggaaatgataagaaagattcttggttacttcactcccaaaaacatgagagttgatgtagtatcaaaattcttcaaatcacaagatgtccagttggagccctggtttgaatcacattattctgaggaagaaatttcttcatctttgatggaattatgggaagatcccccagatattgatgtttcactgcatctgcctttgaaaaatgagttcattccatgtgatttctccattcgagctgacacttgcgaaatcaattc

SEQ ID NO: 35099 - DNA, 413 bp, Gossypium hirsutum
  Clone ID: LIB3147-031-Q1-K1-H5
agcttacctacgatcagatctctgaattctttgacgcctttacactgctcgacacggacggagatggttgcattactaccaaggagcttgtaactgttatgcgatcacttcggccgaacccctctgaggcagaactgcaagacctgattcatgaagccgttgctgttggaaatgagaccattgattatactcatttccttaacctgatggcaacacaaatgaaggatacagactctgaggaggagcttaaacaggcattcagggcgttagacaatgatcagaatagcttcatatctgtagccgagatgctccatgtcatgacatacgttgcgcaaaagcttacatatgaggaagtcgacgatatgatccgagatgctgatgtcgatggtgatgggcacatcaactacgaggag

SEQ ID NO: 35100 - DNA, 464 bp, Gossypium hirsutum
  Clone ID: LIB3147-032-Q1-K1-A10
cccacgcgtccgctgcgagtgatgttgatgataataatactgaaccgaggatggatcgaaagactgtggttcattccgatgaatccgacggccagggaggtgctgcagattatgatgatggcgaagaagaattggacttagaagaatcttatgatgaagaggaagaggaagaggaagaagaaattgatgaagggggggtagagaaagtagggaaaacagtgttgcaaaggaatttggatgaaattggagaagatttgaaggaagccgtggtgagtgatgtgaattggagttgtacggatgaggaagaagtggatgtggagattaatgataataatgataatcatgttgaagagaaggatgaaaaggaaaaggagaatgagccatttgctgtgccaactgctggtgcattctatatgcatgatgatcgctttcgagagagagcttaaatgatgtatatgatgatt

SEQ ID NO: 35101 - DNA, 396 bp, Gossypium hirsutum
  Clone ID: LIB3147-032-Q1-K1-A2
acgcgtacgaaaatcttcatctgcgaattcgtacgttgttgatgatttatttggaggaatgcccgtctcacaaaatgcaaataacgatgatgattttggatccttcgtctcttccaccaagcaaaagggttctgccagtgacttgctgggtgattttagtggcgtggcggcgaaattgaagagttctagcaagagtggagcgtgggattcggtgaataatgaggctggtgttgatgatttgatacccgggttcggtgcaagcagcccttcagttaataggactaatgttaagacaaccaagtcatccagatcatcagaggaaccttttgttgtattagactctgattttggctcagaatataatttctcagaaacgcccatggatccactgggaga

SEQ ID NO: 35102 - DNA, 284 bp, Gossypium hirsutum
  unsure (1)..(284): unsure at all n locations
  Clone ID: LIB3147-032-Q1-K1-A3
ggcagccttggtggtgaagtctgtgactgatggactgagaacatgggaggatgtgtgggagaaatatccccatcacacttctggctcagcagatgattgagccagtagaaattggaaggacacatttgttgacgtaataacaaaaagtatccaccagttggagtttcttaaagtcctcttaatgatttggatggagattacggtattgaacattttgtattcaaagaatctgttgatgttgtttctgaaattgcttattacatatcagttacgatnccnnnnna

SEQ ID NO: 35103 - DNA, 267 bp, Gossypium hirsutum
  Clone ID: LIB3147-032-Q1-K1-A4
taaccggcatcgaggtagctcgaaggcgggtgaaaggatcaggcctgactacgagaactcgggatctcaaatcttttgaaaacgtataccgagctgttacctatcggaacacctggcgtaaactgtaccgtatgatgtgttatgctctcaagagacaggaaggacttttatggttcgtggtgatttggttttaggtctttttgtgaaatctttctgcactgcttgtgagttttcttgttggataatgatttcgttcatgaaattcct

SEQ ID NO: 35104 - DNA, 464 bp, Gossypium hirsutum
  unsure (1)..(464): unsure at all n locations
  Clone ID: LIB3147-032-Q1-K1-B11
ctgcttctttctcatctccttatcttttttttttcttcattttctcctttcttcagcttcagctttttttttgttctattataatggctgtggctatggcttctgctgctaattgtggtgtatacttttcaagcaacactaacaagcttaattttcctgtttttgatttcaaaaaccattcttggtctgctgcctttgtcaccacaccacccaacattcttgagaaaagaagtgttagattgtcattttcaatgatggggatcattccacgagcaacatcatcagccacagctgtggagagtgatggaagtttccaggacactgatacagttccaacccccaaagttataattgaccaagactctgatccagatgccaccgtagtggaaataacctttggcgatcggcttggagctcttttggatactatgaatgcactaaaaaatctggngttgaatgtttct

SEQ ID NO: 35105 - DNA, 430 bp, Gossypium hirsutum
  unsure (1)..(430): unsure at all n locations
  Clone ID: LIB3147-032-Q1-K1-B6
gcgagcgccgccctttttttttttttttttttttttnnnnnattttttttttttttttggggttggtttttttttttttgggggtgcaaagttaaactattttttatttaatgttaaagttgttttttacatttggaaaaaacctatagtgtttttaattaaccccctaattaacaaaaaaaaaattaccgaaatcgtttccaaaatatacagcatttatttaaatttaaagggggggaaaaaaactttaaacaatactttaaaaagttacaaaagatctaagattgatattaaaaattaaacaaaacttttttaaaaaatgttttttggttatttaaaaaactgaagggggggaaaaacctttttaataacctaaaaagcagggggggacaaataaaggaggggaaatgttaccaatgttttaattttt

SEQ ID NO: 35106 - DNA, 337 bp, Gossypium hirsutum
  Clone ID: LIB3147-032-Q1-K1-B7
atacctctctcctttcactatatctttctcaaccccgtttaaacaccccaggagatggtttttaaagacatggcttcccatgcacacaactatcgatcatcttaaagcctaatcgactttgcttagtcttactctaaaccccctcttaacactattaaacacaaccctctttccagttcaaatttgactagtaaaccaactggagataacgtcaacaaattacctgaacatatatacaagcatatcaatggaaaactgttactcaataaattataccaaaatttaatatataatgagtttaatgatgaaaccattttctacgaatgttataaaaatc

SEQ ID NO: 35107 - DNA, 133 bp, Gossypium hirsutum
  Clone ID: LIB3147-032-Q1-K1-C3
gaaagatactggggaggataaaattggttaatttttgatcaatggcatgatgatgaagggctttgttttataaaatatgtaacattttcagcatatgtattagaataaagttactggtaatatattttcagtt

SEQ ID NO: 35108 - DNA, 279 bp, Gossypium hirsutum
  unsure (1)..(279): unsure at all n locations
  Clone ID: LIB3147-032-Q1-K1-C6
tcggatattggggcgttgaatgaatctaagnncactaaacggaaagaaaccttgcagttcaatggcataccatctatctgcaatggatgtataccctgagagcaattgaaatgctttggtnntctgcagtgcattgataccctctctgatataatctggtttaaatgtaaaataccttttaacctttgttgaaagcccttgacattcatatnaaaaaaaaaaaggattggttaacaatgcagcaacctctggtaataaaatttgctattcatcttttta

SEQ ID NO: 35109 - DNA, 460 bp, Gossypium hirsutum
  Clone ID: LIB3147-032-Q1-K1-D11
cggacgcgtgggttttcctgcttctgcttcccaaaaaccaagtcacacccgggcttgttgggctctctctttcctacgctttatcactgaccggtacgcaaatttttgcatcccgttggtactgcagcttatggaactatatgatttcggttgaaaggataaaacaattcatgcacatacctgaagaacctccagcgattatagaagacaacaggcccccatcttcatggccttctaagggtaggattgaattgcaagaactgaagataagatatcgctcgaatgctccttcagttctcaaaggaatcacttgcactttccaagaagggaacagagtaggagttgttggacggaccggaagtggaaaaactacgctcataagcgccttgtttcgcctagtagagcctgcaagtgggaaaattcttatagatggacttgatatatgctctatgggactgaa

SEQ ID NO: 35110 - DNA, 466 bp, Gossypium hirsutum
  unsure (1)..(466): unsure at all n locations
  Clone ID: LIB3147-032-Q1-K1-D12
cccacgcgtccgcacagtcatagttgtttttcttgattcgaatctcgtgagcagagccagctcagcaaaaggcccttcattatccctgagaggaggtggaatcaaactgcctgcaaaaaccaaggctccctgttaatggggttggccacatatgctgttgtactgtacctaccaagtgcgggatccttttctgaacttccatgatgccagcagttattataaggcaatagagaagtttataagccgttgagctggaaaggaaagaagcaggaaaatagaggtgcaaaggtgacagaagaaagattcttttctgtaggactatcatcgttagcattcatttcgtatatttgctggcattttggagtgtttttgggtttgtaaattatgttttacatcccctaaaatcaatcaaaattcctgtaatcgttgtttgcatgtngacatgaatggacactagtggaacaat

SEQ ID NO: 35111 - DNA, 317 bp, Gossypium hirsutum
  Clone ID: LIB3147-032-Q1-K1-D7
agaagatgatgagatgaattgttttagttttctagatatccactctcaccaatggcttattaatccttaatgtttatagatttttagatgcaatttgcttgttttttttttctttataattttatgcaacgttttaagtcattttgtcggatttaaaaaaaaaaaaggtgttgtaaatatgatttgggtcacacattattcatatgagagaatattgaaatcgcacaaaagcttatccaaagaatgagctttacataaaaaaaaaaataaaaaaccaaataataaatttaaaaaaaaagaagatcattttatataat

SEQ ID NO: 35112 - DNA, 468 bp, Gossypium hirsutum
  Clone ID: LIB3147-032-Q1-K1-E1
gaagaattctccagggtcatgagtcaacatatggtacatttttcaactgatcccaatgctgatagattaaaccggttgaaaggggaaatgagccaggtacgtagtgtaatgattgacaacattgaaaaagtattggagagaggcgaccggttggagttgctggttgaaaaggcaagcacaatgcaggggaattcacttcgattcaaaaagcaatctcgtcgttacaagaatgccatgtggtggagttattgcaagatcacggtgacattgatactgctgctttcgctgatcatcgcttatattctgttcgcatttgttttttgatggactcttttttttgtcgtcctggttgatgtaacaaggcagtggcttttcctgatttgtcccatctttttatttttcacatatatacatacacatctatttgtaacatatttttaaaaccagttgatgaatccataaacaaac

SEQ ID NO: 35113 - DNA, 432 bp, Gossypium hirsutum
  Clone ID: LIB3147-032-Q1-K1-E2
ttgagagatgctgacacaggcgatgttttcaatgtagaagttagaaggccggagcttccagagggatcccaagattcagtgaaagataaagggttggtggtgagagattgggcacctcagctggagatattagcccaccctgccattggtgggtttgtaagccactgtgggtggaattcatgcatggaaagcatcaccatgggagtaccaataggggcttggcctgtgcattcagatcaaccaagaaacgcagtactaatcacaaagttgctcaaactcggcattaccatcaaggactgggcacgtcgagatgaagtagtgacagcagcggtagttgaagatgctgtgaaacgtttgatggcttcaaaggaaggagatgagataaggaagagagcggcagaagtaagtggtgcggtgcgccaatcggtggct

SEQ ID NO: 35114 - DNA, 458 bp, Gossypium hirsutum
  Clone ID: LIB3147-032-Q1-K1-E3
aactgaacctgtcaggacatacctcgttttcctttcgattttcacttcgatccccgatgtttggagtattggtcaaatttttcctatcgtccccattcatcgtttggatcaaaagccagaagtgaaggctattttgtcggatttaacttgcgatagtgatgggaagatcgataagttcattggaggtgaagccaacctgcctttacacaagccgggtaatggccagtactatttatggatgttcttgggcggggcttatcaagaagctctcggcggtgtccacaacctattcggcagtccgagtgttgttactgtcttgcaaagcgacggtccacatagcttcgcaataacacatgcaatgtccggcccatcatgcgcggatgtccttcgagtcatgcaacacgaacccaaactcatgttcgaaaaccttaagcaccgtgccgaagaattttgcggca

SEQ ID NO: 35115 - DNA, 415 bp, Gossypium hirsutum
  Clone ID: LIB3147-032-Q1-K1-E4
ggagcattgagagaaaaaagaataaactcttcatcttcgcttcttccaagtccaccgccggccggtctatcaattgaggctaccagatcttcattttatggataataagaaacccggcaatgacggaactgccgacgaagtgacacgggagtcactcattgctatctcttactcgttaccggacaaagttgctgctgcctccaaactctcatccgataattcaaaccgtgaaaagctgttcgaaagaaaaggttccgatggggacgaaaaatacaggtccgaattgatctcgatatcatattccaagtcacccgaaggtaagggcttgccgtctacgttgaattgacctaagcattagaagtgctgttgttcactgtgtttgttgtaagttgtacattttggatttgatcaaact

SEQ ID NO: 35116 - DNA, 462 bp, Gossypium hirsutum
  Clone ID: LIB3147-032-Q1-K1-E6
aagagttgatgtctcttaagacatattacgagtgttaaggacgtgagccttttttgtcagactcagtcattaatggtgtagtgtggtggagtgaaagaggttttagaagaggaggttagctaaagaagaaagcacctacaccatgacaaaggtagctttggttttcaagtgctccctcttattaatgacctgctgttttctagtgcaagacaaggcagatgcagggattccagtgacaaccctttcacccccagaaggaaacacaactttccttgatggcaccacatggtgtgtggcactggcaggtgtctcccagattgacttgcagaatgcattagactgggcatgtggactgggaatgtctgattgtggtgcaatccaggagggaggaaaatgttatgagcctgacacactcctttctcatgcttcttatgcctttcataattactaccaacagaatgg

SEQ ID NO: 35117 - DNA, 430 bp, Gossypium hirsutum
  Clone ID: LIB3147-032-Q1-K1-E8
cccacgcgtgcggtctaggaagttggtttgagaggactgaccagcaagaggtacatgaggatcgtgctgagatggctgagagggagacaaatgatcaggcttgtatgcaaccatgtggggccttcactaaaccaagcataactcacactagagctgtacataatacctcaacttctacagctagtacttctgtcgatacttctagttcaagattggattgaggtcttgaaggaggactctaggctttatgctgcgagtagggtaacggatattggacctgaccatagtccaaacgattataagacgggagatgggactgatggtaaatccaatggggatacgagtacgagtacagagactgaacctgctaccgtggaggatattggcgaggaactttactatgtggaaacgtatctagaaatgagttgat

SEQ ID NO: 35118 - DNA, 405 bp, Gossypium hirsutum
  unsure (1)..(405): unsure at all n locations
  Clone ID: LIB3147-032-Q1-K1-F2
cttaacttggcctgaggcaagctgacgatggactatcatttcgatatgatcacctcaaaagttggtgaaccattggggagtctaatgagttgtgctggaaagttgggattttctaattgaacttgtagcagttaactttaaggtacagtatggttctcactacttatcttttccttgtattcgnggttgcgagaaactaaatttcagatgctaatcccggtgggaatgtagttaaacaatatttgctntattttgtaatgtgtttagacttggccgtagtctaaaaggcataagaagataggagtggatgctgtgagtaattagaacatttttgcatgtaatttgcaatagatcaatagtatactttgattgaagaaagtaaatacttcgttttatttggntttt

SEQ ID NO: 35119 - DNA, 461 bp, Gossypium hirsutum
  Clone ID: LIB3147-032-Q1-K1-G1
acgcccacgcgtacgatttactttttctccacacttgctctaaagcacccatctcttttcttcttcgctcttttgtctctcaaatgtccattaaccacttccagtaattcaaacaaaacaatccaacgacaaaacaaactccttctatggaaccaacccaaacccccccttcttcaaagcttcacaacccttcctcaatttcccttgaaaactccccctggacctctcacttctacccctccatgttcctatcctccatccacgctccccgccacttcaaccttaaccatgacgacgacgaagaactcgacgaccaaacctccactctcaacaccctaaaccctaaaccaaatccccctgaaaaccaccagctaggccatgaaacggaacccatgtttgaaaagcccttaacccccagcgatgttggcaagctgaacaggcttgttatccccaaacaacat

SEQ ID NO: 35120 - DNA, 311 bp, Gossypium hirsutum
  Clone ID: LIB3147-032-Q1-K1-G6
cccacgcgtccgcccacgcgttcgattgcctgtctgaggactctgtacattgccatggagtgagactaaaatctacctcaagtagcttccttcatttgctcatcagtcagtaagcataactgagaagatcaaaagcttcggtatctgagaagatcacttcaagtaaaatgggtttgactgctacagtttaggatggtaggaagcttttaggttaactctaaaagacttttgacacttgcgaagggttgcaaatctggtttttaccactggttgttctcttaagatgattaatgccatgtagcctgcataat

SEQ ID NO: 35121 - DNA, 413 bp, Gossypium hirsutum
  Clone ID: LIB3147-032-Q1-K1-G7
gcggggacaacagattactagtatttcatttatcatgtcagtcatataatttagcatgtggagcttcactagactgctcagaccaaacactttttagtagtgaggaggaaggtaatggccaatgcactggcactggtgagttgaagctttcatggtttaactggttgcgaactagcttattttcaagcaatacatctttgaaaagaacatctatagaatatagtcagtcataggctctaattgttcttctaatttttgacctgtaattttctaggattctagcatggtaaaggtggcacataatactgtgccccagctgtagagattgtttgtgctcgagcccaaaatcaattagaaaaattggacatcattatgctctgaaagatcagagccacttgtagagaaaacaatac

SEQ ID NO: 35122 - DNA, 453 bp, Gossypium hirsutum
  unsure (1)..(453): unsure at all n locations
  Clone ID: LIB3147-032-Q1-K1-H1
aaaacaatttcttattaagtatatcatttctctaacactcgctaaaacgccttggttccccttcccggcccctcccttggttttatgcttctccatttcgaatcccttttaagctcccacagccctaatctctttatttcctttttgtttttctgcacttatttgaattggtaatcgtttcattaaattgggttatcgatgagagcaccaaacatggcaacgatcacagaatcattggagaggtccttacagaacttttctttgaaccatgaaagaagcaacgaaggtggggctgaagaagggataatagggaggtcttccacatcaggtgacaacaacaaccttccaaacaccgtttctgacactagctnggagctcaactctcatctctctcttccttaccattgggaacaatgcctngatctcaagacaggggagatttactacataaac

SEQ ID NO: 35123 - DNA, 290 bp, Gossypium hirsutum
  unsure (1)..(290): unsure at all n locations
  Clone ID: LIB3147-033-Q1-K1-A5
ngcncnccancgngccgggccggcgcaaagccgggaaagcaaaanccggggggcgccaaaggccgcgacgaggcccgcagagaaaaaaccaccggaagagaaaaaagccgagaaggcaccagccgagaaaaagcccagagccgagaagaagcagcccaaggaagccggcgacaagaggaagaagcggccaaagaagagcgacgaaacccacacgagcaacaacaanaaggggcgggagcaagngcacccngagagcgggaaggggagcacggccaaggggacgcggaaca

SEQ ID NO: 35124 - DNA, 247 bp, Gossypium hirsutum
  Clone ID: LIB3147-033-Q1-K1-A6
agcttgcccttttttggttgtaaccatagagtcagtttgttaaggggttttttgcgtttaacagtaattgtttgacaaaactggcataattctattcctttgagtcatgagaattgaggagacgagcatgagatacagagccattctcattgctctctaagtattcatttcttttattgatgagttcatttgatttcaataatgattaacttattgtagtattttgtcatttagtgagacgaaatgg

SEQ ID NO: 35125 - DNA, 243 bp, Gossypium hirsutum
  unsure (1)..(243): unsure at all n locations
  Clone ID: LIB3147-033-Q1-K1-A8
ctnnnggagcaggcagaggannnnataaaagaaaggcctatggaaccnggagcagccatgctaggagcaatgtagccgggtctcgagttcataataatgttgaagtaggtgaacgaatagcaaagaaacttattagtctagagccagagaaagcaggttatatgtgttgttgtcaaacatatacgccgctgctagcaagtttgatgaagctgaaaaagtgagggagctaatgaaggggaaaaa

SEQ ID NO: 35126 - DNA, 433 bp, Gossypium hirsutum
  Clone ID: LIB3147-033-Q1-K1-A9
cccgcgcgttcgaatttttaattttcttttttcatggcaatcctaaaccttgtctccgttgcggttattgaggcgccataaccgtcaccaaacgctacagctggattctcagtaggagtttctaccgtcgacattggctgctttatgatcgttatcccttacttgcttttttcaagcattaaattgaaggactggcatgagtctcctctctgtgtggctatcttttatatatatatatatgtatgaatgtatgtatttatgataccattctatcttatttaaatgcattgtaatgaattttattatctgaataaaatacttgcgttataagttatcttttttatactaaacccttcgagttcaactatgtagtttcaaactttaagagataactccctccctgtttctgttttctgttcatgtatgaatttat

SEQ ID NO: 35127 - DNA, 439 bp, Gossypium hirsutum
  Clone ID: LIB3147-033-Q1-K1-B12
cccacgcgtccgataaacccctacattccctccccccccatgttgcagcaaccacattggggaacgcaaacgagccgattctaaatgcatcatacatcaaagccggaccgttcagctatggatcgggacatatacaaccaaactttgctatggatccgggacttgtttatgacttatccactaaggattacctaaactttctatgcacattggggtacaacgacacactaatatcaacattctcgcaggacaactacaagtgccccggttcgctcaatcttgccaacttcaactacccttcaatcactatccctaaccttgttggatccattacagtgaccaggactgttaaaaatgtaggaacaccaggcacttacagagctcaagtgcagaaaccagtcggaatttcggttaaagggtaaagccgaaaaatttgaag

SEQ ID NO: 35128 - DNA, 328 bp, Gossypium hirsutum
  unsure (1)..(328): unsure at all n locations
  Clone ID: LIB3147-033-Q1-K1-B2
cccacgcgtccgcccacgcgtccggnggtccgactggttcatggatattgatcccttctgggttactactggggggtcagggtggtttccaatttctcactacaatttcatttcatggcgatgcctcacaaatcaatctctgaaaactcaacttccataatattgtcttcacaatcatgtgccctactacagcttttcctcctcctcctcctcctcatttctcctctctttgctcgtcccatctgttcctcttcctctactacgagaaatttgcacccattttcgacttctttgacgtcgatcccagcagctcaaaaccccgggaaaa

SEQ ID NO: 35129 - DNA, 254 bp, Gossypium hirsutum
  Clone ID: LIB3147-033-Q1-K1-B8
aaaaaatactttcagaagctctctccccttccagttcgttcggccagaggtccgaccgtcgaccaccgcgccggccaccggcggcggcgccgcatgcggtggtcggagagccgaaaattttagatccgacccttccaaagcccttaaaaccgaatctagccccaaaaatgccaaaatcttgacggagaggggccaaatctcaataaactcttcggcttccgaccgtctatcctcgaagacgggtacctcaatcg

SEQ ID NO: 35130 - DNA, 298 bp, Gossypium hirsutum
  Clone ID: LIB3147-033-Q1-K1-C4
ggtaccgctccctttcctttctctctttctttttccttcacaataaaatgctttgaacagatcgattggaatattatcatgatttcctttttttattataaatggaagtgggattcatttcgtttgagaatgagcttttttttctttaataattaaactcttgattctgtttttgttcatcagatttgtgaaattaaggataatatttggttcatctataaaagttgtagctttcgaatgctactgatctctctatgttttgctatgtccataaattgctcgatttcataaatcccta

SEQ ID NO: 35131 - DNA, 205 bp, Gossypium hirsutum
  unsure (1)..(205): unsure at all n locations
  Clone ID: LIB3147-033-Q1-K1-C5
cccacgcgnccgcnccngtttacccaagtccncccgnngngaagcccccggcagnggggaccccnngnccaccaccaccaccngngccananccaccacccccggcacagcaaacaggccccanngacacccncaagccaggcgcangngnngangngnnagggggcnnagngcacanaggnancggcagcagcgccaaggacac

SEQ ID NO: 35132 - DNA, 224 bp, Gossypium hirsutum
  unsure (1)..(224): unsure at all n locations
  Clone ID: LIB3147-033-Q1-K1-D6
atcgtgtgtttttgcttattctattgcgttnncttcggctcttctaagcgttgttctgggctatatggactgcaatagatttgacgagtagttcggctgagtttctagtgttccattgctgagaagaatttagactggttgaacccatgcatgtgactataaaaacaatggtcacgaatataaagtcatctatatgtaattgaggccaatttgagcgggagttg

SEQ ID NO: 35133 - DNA, 392 bp, Gossypium hirsutum
  unsure (1)..(392): unsure at all n locations
  Clone ID: LIB3147-033-Q1-K1-E11
attgagtgtgacattttggttttttgcttttcttctctctatccccacattgtttattctgctagttatttcattaaattcattcctttactgctcacccgttggaacgagttaacgaattgtatgcaatgttgacctttgaagacaccctatgattttttacatttagacaacagaataggtggaatcttatatgaatgtattttttgaacaatggctcccctttctagatttaaatttatatctttataaagactccggctnaaaaaaatacaaagaaaaagggacctgtaactgatttattagttaataaaaagataatttgatctgtttataaagaattcttaatatttaaaacactaagttttggggccttttttaatctaataaaa

SEQ ID NO: 35134 - DNA, 272 bp, Gossypium hirsutum
  unsure (1)..(272): unsure at all n locations
  Clone ID: LIB3147-033-Q1-K1-E2
acccacgcggccgcccacgcgnccgccnanccnggcacaccatgagncncanagcnnggccgcggggccnggcctancgacgggaaccacaacnaaggggaaaccggagaggcaccgaagggggacagggggaaccacccacaanacnnagaagacaacgcacccgnggcgnnccagacagcaacggggagggggacgacgccggngaagaaacaccaacccncagcccangacggnngcgngggcgacgggaaaccaaccaagaacgacac

SEQ ID NO: 35135 - DNA, 362 bp, Gossypium hirsutum
  Clone ID: LIB3147-033-Q1-K1-F11
ctccatactgtaatttttatttttgagggcttgtttaagctctatagtttcttgtaaaaaggtttagttaaaaaaaaaaaaaaaaaaaaaaaaaaaaaaaaaaaaaaaaaaaaaaaaaaaaaaaaaaaaaaaaaaaaaaaaaaaaaaaaaaaaaaaaaaaaaaaaaaaaaaaaaaaaaaaaaaaaatctaaaataaataaaaaaaacaaaagtttatcgaaatacggctgctattcctaaagtatgcaaaactttatccaaataaaaacacccgaaatctactattattaaaaacccaggaataaaaaatagattgtgtcaacaaataaaaacctcctaaagaaaaaacactctaacacaat

SEQ ID NO: 35136 - DNA, 231 bp, Gossypium hirsutum
  unsure (1)..(231): unsure at all n locations
  Clone ID: LIB3147-033-Q1-K1-F5
gaaacgngaacnncacaangncnnnancanaaagcncnacaganaaaaccggggggaagaaangnnacaggaaccngangagaacgcngcnaagagaaaacgnacncgagaaacacnccgagnncnccaacaggcanncaggacannggacgaanngccannggaagcngaaacagnngagagggganacagnnngggnncngaacnaacaggccngccaaagaaccacgg

SEQ ID NO: 35137 - DNA, 431 bp, Gossypium hirsutum
  unsure (1)..(431): unsure at all n locations
  Clone ID: LIB3147-033-Q1-K1-G12
cccacgcgtccgtaatttcattttatcatttatatccataagatgtcaagcagagggtccgtatcaatgcaatcagcaagtaattcaagaataactgatgatcagatcaatgatcttgtttctaagttacatcaacttcttcctgagattcgtaactcccactctgataaggtttcagcggcgaaagtgttacaagagacctgcaactacattagaagcttacacagagaggttgatgaccttagcgagagattatcagaactattagcgaccactgacaatgcccaagctgccgtaattcgtagtttgcttatgcaataatagatcacttaattaataaaaatgaaggttaatttttgtattacgacttttatggcttcactactttaattgtatanttttagagttttcttaatttgccttctttatat

SEQ ID NO: 35138 - DNA, 267 bp, Gossypium hirsutum
  unsure (1)..(267): unsure at all n locations
  Clone ID: LIB3147-033-Q1-K1-G3
ctggggaggctcatcggctcatggaaagtagtgcacatatcgggaagatactacttgttccatgattgctggtaagggccttgtcttctagaggggaaatggtttgtattttatgataaaatgagacacttatgaatcatgtatatgaagtttattttgcctgatgtccttgtggcctaatttaatcttttaccaaaataaaaatcatgcaaaagtcaaaaactgataaannaaaaaaaaaaanananaannaanaaannnnnnntt

SEQ ID NO: 35139 - DNA, 147 bp, Gossypium hirsutum
  unsure (1)..(147): unsure at all n locations
  Clone ID: LIB3147-033-Q1-K1-G6
cccacgcgtccgtggagaggcagaagttgtggganggagaagcacggggggaggaagaggagtacgcggcccaaggaggtgaaggcggggaaatcttggacttctgcgcagaagtcctttttggagagtgagtcgattgggacaaga

SEQ ID NO: 35140 - DNA, 330 bp, Gossypium hirsutum
  Clone ID: LIB3147-033-Q1-K1-H10
cccacgcgttcgcccacgcgtttttccacttttccgaaaaccttcatgatcaagaagaaggtggccaagaagatgaggcaaaacaggcccatcccttattggattcgtatgcgcacagataacaccatcaggtacaacgccaagcgacggcactggcgccgtaccaagctagggttctaagctcgatggggttctttagattaaagagtttaattttgttttttccaagtaattttgctgaattttatttatgtgggattaatattattaggaagagatattgatgaaattattggcagtatttgaattcatgattttggtttagcttac

SEQ ID NO: 35141 - DNA, 209 bp, Gossypium hirsutum
  unsure (1)..(209): unsure at all n locations
  Clone ID: LIB3147-033-Q1-K1-H2
cccacgcgnccgcccacgcgnccgcggcggggggcncncccccgccgcccccancccgagagccgccccancccccgacgacaaggggggccgcnaagaagaccaagaagacccaggagagcannaacaacagangggcncncgggangaagaggggnaaanacacnnggggngacaaaacggggcnnaaancgcncagaaaccccaaa

SEQ ID NO: 35142 - DNA, 296 bp, Gossypium hirsutum
  Clone ID: LIB3147-034-Q1-K1-A2
cccacgcgtccgcttgagattagctactgtaggagtataatgccaagagattctccatattatcattgatactatcgaagggatgtataaattccatagctctctgcaaacatcattagtctcagcatgtatactattattactcggaccccaattagtccccgcaatagcttatcgacgcttcttactgaaaaatcgccgaacggcattactctacacacttggcaggcatcgggtcttgtcttcaccgaacggattcacataattctacctgccatatacgcgatatatggatt

SEQ ID NO: 35143 - DNA, 288 bp, Gossypium hirsutum
  Clone ID: LIB3147-034-Q1-K1-A6
actacacgtcgtattagggaagttttcattttttcgaaaccgattgatgttctagggggagaccatctagcgaggcggtgcattcgttacacatttgattgaaagtacatagtcatgggctgatcacattgactcgtgtgcatgagcctgatgtggaatgtgcctactagtctgatcaatacaacgagttctttgccgagatatcctgcctatcctttatgccgtacacagagtctctgcttattggtgtatgttatcagtcatatggctcacttttcgagtatggtc

SEQ ID NO: 35144 - DNA, 290 bp, Gossypium hirsutum
  Clone ID: LIB3147-034-Q1-K1-A8
atagaaagcaatcccgtgcccagaaatcattctcaggaatcatctaaacctaaagttagagatgggctattcagtactttaaggttctggatcattcttctatgggtgttttctggattgggttttattttagtcatgttagcgatgtgttcaggttatacaagcaaggggtcatcaaaagggaaaagtaacaaaagcaggagaagatcttatacggggtttttaaaaaccagtgctcgtgatcggcaaggtcacaagtcagacgcatcattgtagcatcgcaagttgct

SEQ ID NO: 35145 - DNA, 292 bp, Gossypium hirsutum
  Clone ID: LIB3147-034-Q1-K1-B3
atttccccacttccactctctcttgctgctcaatgtcaccctcgttggtaaagatcacgcgggtgctgctatttatgtcaatgattattcctcaaaaatcagttggggaatacgagcaatggtgcatagcagatgaacaaaccccagatgaagagtcgaaggtagccctggattgggcatgtggcgaaggtggtgcacattgcactaagattcacgtaaaccaggcttgttattttacaaacactatgacagaccatgctctctatgccttcaatgattacttccaaaggtt

SEQ ID NO: 35146 - DNA, 333 bp, Gossypium hirsutum
  Clone ID: LIB3147-034-Q1-K1-B6
ggaaggccgggccagacccacgcgtccggacacgcatactgccacccgtacattttgttttcatcaccgaaaaacataaaccagcagcaggcaagagaacaacaataaaagatcgcaggacctctattttgactactcatgacgagagcattgcttctatgatgtgatgcactgtaattatgctccacaaaaaaagatcaggtctgctgacctcaacggggagcaactctgcatacgcattgaagaaagtctagccctgaagataggactactataagattgaccacttgaactaaaattaatgaatatggatgaacgaagatagatatagat

SEQ ID NO: 35147 - DNA, 287 bp, Gossypium hirsutum
  Clone ID: LIB3147-034-Q1-K1-B8
cctgtttcatagctggaaaatgttatggattgtgtatgtccaaaaaggtttttctgttcggttcgtttacattatacacgcttcaaaattttgaagacattgataacgttatggattgtgtttggacaatcattttgaagtggggagaaggtgatgagaaaagctacgggttaaatgatggtgatgtaattattgattaaaattcaaaccccataattgtttttttgtccctaatccctttcattgaaggacaatgaaacatggatgcctaagttgttagcagcagc

SEQ ID NO: 35148 - DNA, 296 bp, Gossypium hirsutum
  Clone ID: LIB3147-034-Q1-K1-C1
tctgtgagagaccactaagtgatgttgtagacaacaaaaggggagatcctcggtcagaacaaggaaatcaaggattgagggagagaagcaaggaagaagaaccggttttgggagccaaggataatgaagcctaaggggaaacaaaatttgtacagagaaagggaagattttacgaaaatgcaacttttgatttatatatatatatatatgatatgtttcggttaggtaaaacactaaaatagttattgtagctagtaaactgttatgatgaacgtacgatggctgagcttgctgtg

SEQ ID NO: 35149 - DNA, 250 bp, Gossypium hirsutum
  unsure (1)..(250): unsure at all n locations
  Clone ID: LIB3147-034-Q1-K1-C11
ctttgattatttattggtttctgactacatttgggatatgatcccttggtatgttatgcagaatcgtgtaattatttaatgttattcagatttttcatttttctgaaatcatttgtatttgactcatatttgtatggcatgaaagtatgatcctttgacatatatgagaggggattttcttttgtncaaaaaaaaaaaaaaaaaaaaaaaaaaaaaaaaaaaaaaaaaaaaaaaaaaaacggcccgccgc

SEQ ID NO: 35150 - DNA, 288 bp, Gossypium hirsutum
  Clone ID: LIB3147-034-Q1-K1-C2
cctgtgagagaccactaagtagatgtaggaatcaacttaaggggagatcactcggtcagaacgaggaaatcaaggattgagggagagatgcgcggtcgatcaaccggttctaagctccatggatcgtgatgcctaatggtaaacataatttgtgcagaccaagggaaaatttactgaccatgcaacttcagacttatatatagatatatctgatatgttaccgatctgtaaaacactgaaatacttattcgttctactaaattgctataatgaacgtacgaccgctga

SEQ ID NO: 35151 - DNA, 255 bp, Gossypium hirsutum
  Clone ID: LIB3147-034-Q1-K1-C4
gttctgggacatcaattcccggtctagagaaggaggagaaagaaggtgtgcccgtttctggaccgctgaagccagatcgattcgttccgcctcatcttaggccgggttttgttgggagagaggagaaacccgaacccaaggttttgcgtggaagagaacaggggttgaagcattttgggtcgtcggtattatggtgaagatggcggccaattggcggtacaagatcaaaagcctgatcaatggttgattccatcc

SEQ ID NO: 35152 - DNA, 259 bp, Gossypium hirsutum
  Clone ID: LIB3147-034-Q1-K1-D3
ggaacatggaaaggttcagattacatcattgtatacaattcgtgtggaccaaaatggtgagaaagagggttcatatggatgaagaggaacactggaaaacctgagggtctctgtggtgtcaataaaatagcttcttaccctaccaatgacaagtgaagagctctaacctcagcatacggcttcaaccaaaatgtgttcaatcattttatctatgctgcagactcgcttgtattgataaaatttgatggcccttcttcgg

SEQ ID NO: 35153 - DNA, 314 bp, Gossypium hirsutum
  Clone ID: LIB3147-034-Q1-K1-D7
aaaacccggcccgacccacgcgtccgttcatacaaacatgctgcaaaagcttttcttgtatggcctagccaagcaaaaccagcggggtggcatttcaccagaaaagcttccacatactccaaatctgtccagattcttcaagatcttaacaccaatcacacatacaaataacaaggtatatgtctccactgcgcaaacacatggctatactgtcactgtcttccagtgacatccatagaaaaatgcttttgaatgggacttgcctatgatcccacacacagacaacgccattgaagttacacaacatgttgcaa

SEQ ID NO: 35154 - DNA, 451 bp, Gossypium hirsutum
  Clone ID: LIB3147-034-Q1-K1-E11
cccacgcgtccgatccacttcccacccaatttcaactttccgacgagggaaaggtacttgctgagcgtgattcattcgatgatagtactagcgaaactacaacttcctctgttggaggaggattttccgaatctccaaacaaaaatataaataggcgaatagcaataggctctacccttgcagcagtgggacttttcatgtcatcgcgattagattttggtgtttctctgaaagacttatctgctgcagcagtgccttatgaagaggctctttcaaatggaaagccaactgttgtagaattctatgcagattggtgtgaagtatgccgggaattagctccggatatttacaaagtagaacaacaatacagggatcgtgtgaattttgtaatgctgaatgtcgacaacacgaaatggggacaaaaacttgacgagtttggcgtggagggtat

SEQ ID NO: 35155 - DNA, 181 bp, Gossypium hirsutum
  Clone ID: LIB3147-034-Q1-K1-E12
cccacgcgtccgcccacgcgtccgatgctgttgaggttgtgagctacccctctgtcttttcttccggtttatgtctttacactttcttgattctggtacaaagtataattgtggagactaattcaggcttgatgtgtttccttgattttcattattatcattattagtatagtcgttcatt

SEQ ID NO: 35156 - DNA, 298 bp, Gossypium hirsutum
  Clone ID: LIB3147-034-Q1-K1-E2
aaaacccttcccctcttctctttcttttcctctgtgagggtttcaaaaatctcttatcgcacagcaccggaccactgtggctccactgcgagcgacagtcggagccacgcaaagatcagattttggccttctttaaagcagatacgaaggcaaaccttcctagtccaaaaagattgaagaaaaaaaggactctcctccctttattagtctgatttcggagccggagaagaacttccgacgacgaaaccgcgggatggctcatgtgttagaagcgtgggaggcgacgacagacactggg

SEQ ID NO: 35157 - DNA, 321 bp, Gossypium hirsutum
  Clone ID: LIB3147-034-Q1-K1-E3
gaattcccgggaattatataaatatttttttattttttggggtcgagaccattgctttctctctccctcctttggctttgagtgtcggacactctcgttttgtagatccaccgtctctttaagtattcgggtacttaatggagccaaaatctaccactggatacaatattggacatgttgagagcttgactccgtccgatcctgaataagattaattatattttcgaggtcgggtcaaaattaatcctacccttcttttattttggtttaataggaattggaggaaagagagaaggtagtgaggaagatgtgggatgttta

SEQ ID NO: 35158 - DNA, 244 bp, Gossypium hirsutum
  Clone ID: LIB3147-034-Q1-K1-E5
cccacgcgtccgcgtcgatctcgattctgttgtttgcctttgcaccgttttcaaggctagcatcttagccttaaacctaacctttccattttccttaacctgcttcctaaccgtttgctcaaagattgttccttccaccttccaaggctaagccttcactgttcccaatattctttcaagccttccttattgtgttgggatatgaaaagacacggttccccactttcacaacacaccaggggtt

SEQ ID NO: 35159 - DNA, 290 bp, Gossypium hirsutum
  Clone ID: LIB3147-034-Q1-K1-E8
cgaggttctcaactttctcgggctatgtgctttgatgtgcatgggagtaacggcgggtgcttacatccttactatatttgctataaaatacagagaacgcgtccttggtttgatacttgtatccccgctttacagagcaccttcttggactgaatggttttataacaaggcgatgactaacttgttatatttttacggaatgtgtgaactgcttaaagaaattttagcttcaacgatactttactaaggaagctcggggtaatgcataagttcccgaatcagatattgct

SEQ ID NO: 35160 - DNA, 186 bp, Gossypium hirsutum
  Clone ID: LIB3147-034-Q1-K1-F1
acgggctgtgggaagaattgccttactagctgttgcatattaggagcaaagcttgctttatatgcttgcgaagaagtgaacatggagcgtgaataagatgtggctgaaaatgggaacacaggaccctcaggtggcttttttgacttactcctcttggagagtgggaagatcggatgcaaagagggc

SEQ ID NO: 35161 - DNA, 294 bp, Gossypium hirsutum
  Clone ID: LIB3147-034-Q1-K1-F2
ctctaatttactgccaatggcgccaaatattccattcccttctgccatttatggggctaggggctcaatcccctttattgttgattcaagtgcacctgtcgtgcctcaaattatgggctctacatcagcggttccaatagctcactctcaggcacaattcattatgaacatgagcaatgcagctgctggtttaaatggttcaggcccctcacggcctaattttgatctgaattccatattagcaatggaaggatgaaatacagatcccatgggtttaaggcagccattcatgcc

SEQ ID NO: 35162 - DNA, 436 bp, Gossypium hirsutum
  unsure (1)..(436): unsure at all n locations
  Clone ID: LIB3147-034-Q1-K1-G12
acccacgcgtgcgnccgcttgttgtaccacaaacgtatccatttatcctttgccaatgagcaccaaaaggcgtggtgcggggatagctggccggaaaatgagtcagggggcattcaagaaggtccttgagaaacttgcagttgaaaattacaacttcagtaatccgattgatttgaggagtcattgggcaagacacggtaccaacaagtttgttactatcgtaggtttaatattggtggtaatgatagttgaactccatcaattatggtctgcttcacttgtatatattcccatggccatctttgttcgaaccttgtagtttttcatttgtgctcatgctttaagaacatcccgtttattccggtttaaagttgtggacgagtttttagttgttggattttgttccgatattcttctttcgccacccggaaagtgt

SEQ ID NO: 35163 - DNA, 304 bp, Gossypium hirsutum
  unsure (1)..(304): unsure at all n locations
  Clone ID: LIB3147-034-Q1-K1-G2
cgtctggtttctctatcacaccatgaatgatgatgttttctttactctcctcaccgatattatttccggtttgcctctcaacacccatttgnttgtaagaatatcttggtctatttctcttaactgttaagctcgcggattgttctgtgctaaagatctgtagcttagagtcaagatctttgtttctggttagatgaagtattctcgagttgcgttggttaaaaaataaaacaaaaaagtggcgctcgttctacacgatgcaaaactacatcctctatcttctagaatacaaaaactttggtgc

SEQ ID NO: 35164 - DNA, 292 bp, Gossypium hirsutum
  unsure (1)..(292): unsure at all n locations
  Clone ID: LIB3147-034-Q1-K1-G3
ccgtccgctccacgtcgtctcgctccacgtccgtccgtcccacgtctgtccgttgttttgtgagcagattngtgtgagccatcgaatttgatgtacctnntggtttggtggttttatttagtactttgcnnaactttagttgtatttttggcacccttatcatttgtggaaagaagactctgggagaatgaaatgaatttggaacctggttgtgaattgttggtggattgtgaatgtacgtacnaactctaaatttatttatnctcttttctattttctggctttggtttga

SEQ ID NO: 35165 - DNA, 465 bp, Gossypium hirsutum
  unsure (1)..(465): unsure at all n locations
  Clone ID: LIB3147-034-Q1-K1-H12
gggggggngcgaataatgcaaatttataacctaatttttcaattcttacaacngaacaaatcccttgtgtttggtggcctttagggtaaaatggtccaaaacaaatcaaaaaatacaatatttcccattgttttttgtcttctttgctgagtgtttgtatttgctaccgtgttcgccccttttgcaagtacaaaacgttctgtcgttctcgttcgggagtttacatacggtagcgctcttgactgcttaaatgctttaacgtaccttatctgtggaagcttaaatttttcctttcatctacttctattgatatggtttctacaaatttctttatcaattgttccctttcttctcatttctattattgattcaacccttcatttatggcatttgtttattgtaatattcctcttgcccatatatacttttttttgaactcatttacttcaaatttacatttattat

SEQ ID NO: 35166 - DNA, 296 bp, Gossypium hirsutum
  Clone ID: LIB3147-034-Q1-K1-H6
cccacgcgtccgctttgctacaaggaaatttaacaaggcactgcgattcctgcttgagacttgaaaagatgcttgcaatcaatggcatgtgtgaagggaaagaatgttcttaggaaagaacctatgaggaaagatattggcgaggatgattcattttttgttaatgaaaagtttgcaagcaaattttacaaggtgaaggtaggaactgtggttgcacaaaaggaatcagaacctgaaaagcaggagacccgacaaagagtggaggaggacaggaagccgcatattgaagctgcaat

SEQ ID NO: 35167 - DNA, 281 bp, Gossypium hirsutum
  Clone ID: LIB3147-034-Q1-K1-H7
cccacgcgttcgtttcgctacaaggttatatatcaaggcactagaatctctgctggggaggggtaaatatgcaagcgatgtatggcttgcgtaatggtaaagaataatctttagaaacagcctgtgtggaatgataacgacgacgacagattcatctcttgttaaagaaaataaacgcagctaactttacaaggggaaggcgggaactgtgtccgcacttaaagaacatgatccttagtattcgccgaccggattaacactatttgattaccaaaagccgc

SEQ ID NO: 35168 - DNA, 210 bp, Gossypium hirsutum
  Clone ID: LIB3147-034-Q1-K1-H8
cccgtcgcgaatttgcgagagctgtgcgttcgggaaagaacaccccaggtgatgtgttggctgggctgaatgatctctcgtgtgagaccaactttctggcgcctctctcactgggtccatactctcttgggatgcacaagaagctgcaacacttttgggtctgttgagcttccggatatgggctgatgtcagctaatcttatatggattc

SEQ ID NO: 35169 - DNA, 229 bp, Gossypium hirsutum
  Clone ID: LIB3147-035-Q1-K1-A3
ataagtacatcatcataacatttgcattggtttacacaatgattgctaccgcatatgacccaaacaagtgatcactcaggaccattacatcccattgccatcggcttcattgctggtgccaacatattggccactggtccattatctggtggatccataaacccaaatagcttcttatgaccaataataacctagagcggacttcaactgcatatggatctactggatg

SEQ ID NO: 35170 - DNA, 327 bp, Gossypium hirsutum
  Clone ID: LIB3147-035-Q1-K1-A4
attttgaagagaaggagaacgaggatataagtataagaagaggacgacgaggaagaagaaaagagtgtaaattacgggatcaaaaaggtcacatgtggtctttgaaaacggagttctaagaaatctagtccacattctgctgataagcaatatccagtgacgcctaatactggtaggcctgcacaggcaaggaaagacttaaaacggtattcacttcctcctcttccaagggcttactcttttaaaactctatcatttgataaggctcctggtggtcaacttaaatatattcccaatggattgcccctgttctcttgcttatttgac

SEQ ID NO: 35171 - DNA, 440 bp, Gossypium hirsutum
  Clone ID: LIB3147-035-Q1-K1-A7
cccacgcgtccgaaatttgcccccaaatatcccaagtgtacccaactctttcatttaccggcgtgggttctctgaaaactcaagcattccagtttctttctccttcattaatccaacaccaaattcaacccaaacgcaaaaatatccatggcagtaaaaaattcaacctctgctcatgccaaacgctctcggaaaaaagctgctgcttcatcttctttgatccccaaattcatgaaaaaccccataacaacaatggcgttggctttactcatcattgactccctcctcgtctacttcatcatcgtatacgtcccttatacgaagatagattgggacgctcacatgtctcacgtaagtgggtttcttggaggagaaaggtattataagaactcgaaaggagacactggaccgcttgtttacccagctggtttcctttatgt

SEQ ID NO: 35172 - DNA, 202 bp, Gossypium hirsutum
  Clone ID: LIB3147-035-Q1-K1-B1
cggaattccgggccacgacccacgcgtacgctcaccatttttagaacaaaaattccaaatttttcagatctctttcacttacagaaatgggccaagttaacacgatgacagcccatttattgtctcctcgcatggcccttctcacacttgactccaagcacgttattatagcttgaacacattaatctaacctctgatcatg

SEQ ID NO: 35173 - DNA, 237 bp, Gossypium hirsutum
  Clone ID: LIB3147-035-Q1-K1-C1
gcgcccacgcgtacgaccacgcgtccttaaatttaaaaatttgaactaaaaataaggagccatgcaacattataattagactgttactttttactaaaatttattgatgatttgtcgtttgatcgatagattttgattttgatttgagtttgcctgtagcatattatattgagttttggtgaataataaatgatgtctataattttcctataactcatatgatctccattacctgat

SEQ ID NO: 35174 - DNA, 428 bp, Gossypium hirsutum
  Clone ID: LIB3147-035-Q1-K1-C3
cggggcacgcgcacgcgtacgcccacgcgtacggattaacaagtttttgattgtcttgatagagctgtgttgagggtgaggaagggtgaaaattcgctcttgaccattgcaccagagtacgcgttgaggtcatccgggtctaatcaggcattggctgtagggcctgtgaactctactgcaatctatgaaggaaacgtgctatcacttgtcaaggtaatgctattatgggatgccatctcccgaaagaaattcgaagcttctggtacaaagatggaagtaagcaacgtattattcatagcttgcaaatatgttagagcttctaagagatatgagaaggctgttaagcatattgattatgatactttcttcagtgaagaggagaaaaagcagtccacggcgttgaaggtagcttgcaatctgaacaatgc

SEQ ID NO: 35175 - DNA, 310 bp, Gossypium hirsutum
  Clone ID: LIB3147-035-Q1-K1-C4
caggcgaccacgatctccctcccttccgaatcaagaatgcttccattctaaaatactgcttcttttcagggaggagggggactttactcacataacagataaacgtcttcttgctgcttttcctaacttggtgataacagcaaatctacacacatatgttgagactgtgatttatttactgtctacatctgccatattaaataatgcactcgatccttatttcaaatgaaaattatatcatgttcaaaaattttttggctgtttgactgctatccactctagtaactgagtatacttactctatagatca

SEQ ID NO: 35176 - DNA, 325 bp, Gossypium hirsutum
  Clone ID: LIB3147-035-Q1-K1-C6
tcgcgttatcattgctgttcaaatcacgactcttgcaataaaccatgaacccgctgcaatgcgaaacggggctgattagacaatcttctatacctacagtatttaacgataccaagatactgtatatactcattcctttagacacatctatatacaatgtgatatatatggtactatggattacatattctataacgccgacgatgcttttgataactgcaacatatatgctgttcctccgtttaatggccaaatcaatgccattactgctcagagtcggacgaatacaaaccacgacacaggcacatctattcataactactac

SEQ ID NO: 35177 - DNA, 434 bp, Gossypium hirsutum
  Clone ID: LIB3147-035-Q1-K1-D10
aaaattttctaatttctagcttgtttatttgtttatttgttcattttcattatatctatggttaggctctgcaccaaagcttgtaggcactagcggtggcgcttgagataggcgtcggcaattttgagtgctaggaatatcagattccggcggtgttttaactattaattttgactcttatttatactttgaagatttttttcaaccggaaaaggaagcaatcggtcgtcgccgtttccttattttatttttgctgttaaacaaattacgttaagaagagaagcaaaaaaaggaaaaagaaaatatccaaggagaaaaaaattattaaatccttccaaaagggaagtaaattgaacggatggaaactattacaaagcaatcacctcaaggttgcaataatatttgtccaacgccaccttcattaccaggcccag

SEQ ID NO: 35178 - DNA, 334 bp, Gossypium hirsutum
  unsure (1)..(334): unsure at all n locations
  Clone ID: LIB3147-035-Q1-K1-D12
ggaanaaaaggnggagctgcaccccgggggcggccgctcttaaactttttgatccccccggcttcaagaaatcccaaggtatgcatacttatcgattatttttagatattactgattgggattataaattcacaagaatttattttaattcttaatttaagaattttcttgaagacaaaccaattctcttaaaagtgggggtatttcataaaccacaatttatacctatttttataccctaccttaacccacctatgaatagtttctccttacattttgggaaatctcctcacccttttaacccgtacaaaaatctaaacaaacaatcgctttg

SEQ ID NO: 35179 - DNA, 428 bp, Gossypium hirsutum
  Clone ID: LIB3147-035-Q1-K1-D5
aacatatctaacagaattttggctcttatgatgtgaattctgatcaccaactgaattgatgttgacttgcacgaattatatcattgttagcttcatttttaaaatttaattaatctaaagcattcatcaagttatgtagagtgatagattttaatttcactttatatttcattagatgctggtgaatttgaatactgatggtagttaaaatatctgctatatgaattcatatcactattaactgcaccaagtccactttcatcggatcttgtgtgacaacattttcattccaatttatagttgaagttgttagtgtattattggactgtcttaacgacatgaatgttatctgttgtccagaacttcttgattggttatgcaagcttgtcttttgttgtattcggctggtagattgggaaggagttggc

SEQ ID NO: 35180 - DNA, 179 bp, Gossypium hirsutum
  Clone ID: LIB3147-035-Q1-K1-D6
gtcctagatcgcgagctgacgatctatatgatgcaaactggcgtgcgcgcgcatgctagagactagctcctctatacctgctcctagatacaattcacttgccgtcggtgtacaacacattgatctgtaaaaccctgcactaccaaactgaaactgcatttgtcacatacacatactat

SEQ ID NO: 35181 - DNA, 174 bp, Gossypium hirsutum
  Clone ID: LIB3147-035-Q1-K1-E4
caaaaaaaatacacttataatactttttattcttatataaaaaaacaaatacgggagatcagtcttaccctactctcgactaactattgcttttaaatgatctgaaagatggaaatcgctttttataatgtataaaattctaatgaatattgcatacaaatatataacgtaatt

SEQ ID NO: 35182 - DNA, 440 bp, Gossypium hirsutum
  Clone ID: LIB3147-035-Q1-K1-E7
gtgagttttgtttttattatagaaactccttggattagacggaactacgccaactaaccgtaaaccatcatctaaagggatcaatctaccttcaaaacatgcagcgtcgaagatcaataataagatcctcgttaagtctgaggctctgggatcgggaaatccatcaaagaactcgatcgttctcgatgtatccttgcttaaaggtggagctcccggtcggaccagaggtctgaatgttttcgccgtcgatccaaatccgttttcggattgcttaaatgggattcataaactaagctaacaaacgccaacactatttagttctgacatgatttttaaagctatctatttaaaactatgatacaaaagctctacttgtgttctaagatcattgcattagttggatatttcttttgcttgtttaaagagaaaaaaacaatgtt

SEQ ID NO: 35183 - DNA, 413 bp, Gossypium hirsutum
  Clone ID: LIB3147-035-Q1-K1-E8
ctttcttcaggaaactctgtatgtattatttttgtttttattttattttgttatgtttgatttcttctgaacctttttcgattagttattgctttgcttgatctgttgttggaaatcctttttgaatgtatttttttttttaatttgcaacgaattattcgtaatcttagttaattcagaggtaggtttagatgcgaagaataaaaattttggatctaggttaacatgttacggttcgttattgatatgactgttatttctttgaatttgaataaattgtcgtgattcttccatttcttctttttacttggaacttctttttgtagatagcaactgttcatttaaatagtatcgagtgtgtgcgtattaatttttactgattttgcgctggcattttcaaaatttcacgctga

SEQ ID NO: 35184 - DNA, 228 bp, Gossypium hirsutum
  Clone ID: LIB3147-035-Q1-K1-E9
actttttgattccccgggctgcaggaatttaaacgagagggtctcacttacaagatacgacgctcttttctctcaaaattacaaacaacctcacattgtttaaaatctttaaaacaattaaatataaatacggtcatgatacaatagcaatcatttatgatcttttcatattgttaacattcgactatgagacattaataaatccatgtcgcccctattttcttcgtt

SEQ ID NO: 35185 - DNA, 228 bp, Gossypium hirsutum
  unsure (1)..(228): unsure at all n locations
  Clone ID: LIB3147-035-Q1-K1-F12
gggagaaanacgcgtacgcgcgcttaagacgcgccccctctttgacttttttattttcctgccaacctggattccggggaaatgggttccttcttccctatcttgcacacttaagaaaacgcaatcatcctcacattttcagatcgaatcctacgatccaaattcacttgctaatctccctacagcaaattgtgtctattagccagtctcttccacctacattatcct

SEQ ID NO: 35186 - DNA, 375 bp, Gossypium hirsutum
  Clone ID: LIB3147-035-Q1-K1-F5
aaaaaaaaaaaaaaaaaaaaaaaaaaaaattataaaataaaaaaaaaaaaaaaaaaaaaaaggaaaaaaaaaaaaaaaaaaaaaaaaaaaaaaaaaaaaaaaaaaaaaaaaaaaaaaaaaaaaagggggggcctttttaaagtataaaattttatttccgcgtgtttgaaatttaattttttttttttagtgagcccaaaattatattcaatgggcagttttttaaaaacgttgaaattgaaaaaaccttggtttaacaaatttaattcgttttgaaaaaaatccctttttcgaaagttggtttaataaaaaaaaggcccaaccatttccctttctaaaaaatttgcacaccttaaatggaaaatggaaccccct

SEQ ID NO: 35187 - DNA, 439 bp, Gossypium hirsutum
  Clone ID: LIB3147-035-Q1-K1-G10
gggagacccacgcgtacgagcagaattgcttcaaacaatgctaaactgttattttctcctgtcctcattgatatgatggtcctgagccttccattataagctaatctcgcggacaaatcaggttttagcctataaaaaaaaaaatgaactaacaaataaaaaaaaatacgaactagaccattaagaaaatttaatataaaacaaatcacccatacaaaaacaaaaatttccttctactacaacctaaggtctattccccaaaccactagtaaacacgcgcggaacatgggtgataatacaaatctttcggccatcttcaaaatatatactcctcaaatatcccaccaaatttctatacactcgaaaagcatttcacacttccatatgggaaaaacatgccatttattaacattattttattgcacagacaggccgattt

SEQ ID NO: 35188 - DNA, 197 bp, Gossypium hirsutum
  Clone ID: LIB3147-035-Q1-K1-G11
acttccacgcgggggccgcccctctaaaactttttgattccccgggctgcacgaattcacgtgtgatgatagtatttgattaaggcacatgaatggcaccctacgaagctttatagctcacattatttattttttcatgtaatatagagatatcaaagcctgctcaaattcagggattgtttgagacttcatcacac

SEQ ID NO: 35189 - DNA, 308 bp, Gossypium hirsutum
  Clone ID: LIB3147-035-Q1-K1-G12
accacgcggacgcggacgcgtgggctgtctcctttgtagctttattgtttattagacgaagcaaagcctccggcatggttctgtaatctgtcaaggaatgtcactaggctttaatgatcgctaacttcattgctttgatgtatagaatactagaatatatctatccattaaaatattgtaccttatgaaattaaaggcactgagattcacccttcatttcctatgactatattttaacctctaacaataaatctctaccaccatacacttaaacttctgaagtattacacattataatacattttcat

SEQ ID NO: 35190 - DNA, 357 bp, Gossypium hirsutum
  Clone ID: LIB3147-035-Q1-K1-G7
cccacgcgtccgcccactcgtccggtaggtttgaattagcattaataaagttgattcgggcaagggttgggttgtcggagaacatgctcaactcaacactggttgatgctgcacttgtcataacatcaaatctaccattcatctttaagcccacctagatgtccctggtctgttgatgtctctatccttatcttctctatactcttttattcaacaactatatgtactctcttttaattcaattactgctcgtcttgtataatagttccatatcttcgtttatcatcaatttttcgttttttctttttttttattccttctcttatttttagtttacttgtcatattctttttttta

SEQ ID NO: 35191 - DNA, 349 bp, Gossypium hirsutum
  Clone ID: LIB3147-035-Q1-K1-H3
cagcatttgaagagggctcaattcctgactttccatccgatcatgttcccaattgcgctcctgtggatttaggtgcttctattcctccagatccttctacctctgaatgtccggtgaatgaggaactggccaaccttgcagttgcttctaatgcaggagttgatctttctggagatgttcctgacatgcctacagaagtgagtgctctagtatcaaatacttctcgagagtccaaacagtcttccactggtgatgacgttaatggcaatggctatgcaagaaagcagttcagagagcaggtgactactgcacatattggtgatgatcttgaggatgggacttgcaatga

SEQ ID NO: 35192 - DNA, 321 bp, Gossypium hirsutum
  Clone ID: LIB3147-035-Q1-K1-H7
gtacatgcctcgcacgctttacaagaatgttctacttaactggatcacctttctctggagcatttccatcattgaaagtgctaaatgtctccgactcatcgagccagccttcttgacattgctgctgctttctgctagcagactacacaattctcgagatttcatgacacacgaagtttggttatgtggcatcttattgagttgacaagaaaagaacttgccctcttattccactggcacaatcaatatatgtgaacccgccgcattggttcaagacccactttaatctttgaatttcctatctacaaccgctatttaaac

SEQ ID NO: 35193 - DNA, 328 bp, Gossypium hirsutum
  unsure (1)..(328): unsure at all n locations
  Clone ID: LIB3147-035-Q1-K1-H9
aaaggaacaacggcggncggcgggctcgggaaaggccctctacaacgtttgcatttttcgtgctgccagaattcgcggggctggtagtatttaatcgagcattggactggcaccctacgaagctttatagcttacattatttattgtttcatgtgatatagtgatatcaaagccagctcagattcggagattgctggagacttcatcacactatccaactatcacttaggtactcttgaacttaagtaattggggtatatggcatgtataggattatgggcattgtaatatatagtttggtaatgaatttggtcatgtgaaacgactt

SEQ ID NO: 35194 - DNA, 328 bp, Gossypium hirsutum
  Clone ID: LIB3147-036-Q1-K1-A12
tcgacacacgcgtcagatggcgatgcttactatggtatgttcactgatgttctgggcaagctatctttgggccagcctatcagaaggttccggagggaactcaactactaagctacatcttacgctatgaacaaaactcttgcacgatggaaaagggaggcctcaactgctcagacgccataaatattcagaaccttgctccgaaatataaccattgaagcagaaactatagacagtataatcggtgtgtccaacgctgatactttcaatcacgttgatatcaatcgcgaaactattagtcgttatcttgcaaaccgatctatttaac

SEQ ID NO: 35195 - DNA, 240 bp, Gossypium hirsutum
  Clone ID: LIB3147-036-Q1-K1-A6
accggcggggagtcccaggcgtgacggcacgcgtccgcggacgcgtgggctgtcgatatcgcacagatgtatgagcccaattacaggctgatcatgaacggactcgatgccaatgtttagaatgccaattatcgctctaccgagatgatgcccttatcttagaagatccaaactttctacaaaaccagtggcttctgtcacatacaagattagatgaacactgagcagccacccttgggt

SEQ ID NO: 35196 - DNA, 191 bp, Gossypium hirsutum
  Clone ID: LIB3147-036-Q1-K1-B2
gtgggtaccgtcgatgctctgtcataccaaagactagaaagttgccgcttgtaatgcaactgcagataagtttgaagagacgttcatgactgatacaaacacgtggttctttacagagctcatgttttaagagttgtattggaaccatgttttatgcttaagctgttatatcgaacaattttgaatttaat

SEQ ID NO: 35197 - DNA, 303 bp, Gossypium hirsutum
  Clone ID: LIB3147-036-Q1-K1-B7
gcgcgacccacgccttcggagctttataaaatgatgtatcggatgtggactcacgtgcagactgcagcaggatggctaatatttagggctttggaagcggatgcagtaggggaagaatcgggaaggagcaaaaagtaagcctactatacctaccaagtctttcataaacatgctcgaatagtgcattatctcctgtgcatattgcacatttacaaacgtaaagtaagaatgtttttgcctaatgtgccaggattatcgataattcaatcgaacatacatccaatccaacatcaatacatggac

SEQ ID NO: 35198 - DNA, 336 bp, Gossypium hirsutum
  Clone ID: LIB3147-036-Q1-K1-B9
agctagttctagatcgcgaccgttcgacctttttttttttctatagctttgtgtgggttttctgtggcgccttttttatcatggttattcttttccaaaccaaagaccccacggacaccggagccgcagcgcggatgctcagcgccgatatcgtcgccccgctgatggaccgcgacacgatcgacgcgccgctcgacctcgtgaccctgttccaccacgatacggacctgcccgacctcatccgtgccacgctgcgcgcgctgtccgatatcggccgcgccctgggccgcctcgtcaccagacgcatgttcccccacgacctctgccagctgcccg

SEQ ID NO: 35199 - DNA, 462 bp, Gossypium hirsutum
  Clone ID: LIB3147-036-Q1-K1-C11
gcagaacacgcgcacgcccacgcgtgcgcttttctgctcaaccgaaccctaatccccttccctcaaacgccacaccgtcaccacaatggcggttagcattcttaggctacgaatgactactttgtagcctcgaagctcccttcaaaactctgatttcggcgaagcaaaggagaaccgatggcctaaacgcaaggtacggggtgtgcgtggcgcgagtacgggggctgtctgctggcgtacggaggcacgggcgtagctgctgaagcgctggagcatatggaggcgttggaggctatctgcggcgcaagcattaggtttagggctaggtttttctgaaaaccttagtattttgggtattaggccattgtatttgggccgtttgggttaatttggttttagggtctttgacttgggttatataattggactttgattattaatttggtttaatctttatggatt

SEQ ID NO: 35200 - DNA, 296 bp, Gossypium hirsutum
  Clone ID: LIB3147-036-Q1-K1-C2
gcttgcttcacctaaagaatgaggctgaaactgcagtatacctgtgggaaaacatatggcttgatgggttcaggatctctgctttacccgaagaatgaggctgcactacataatgctagcattgttttcaatacaacatatccaattcctttgtctcaagcaattcagcaaacctggcaagccatatcaaattcagaagtttatagtaagatttctttggatatgcctctaccaattggaaagacatgctaacttaattgatcaatttggctaattcttctatagcttttggccat

SEQ ID NO: 35201 - DNA, 358 bp, Gossypium hirsutum
  Clone ID: LIB3147-036-Q1-K1-C7
tcgagtgtacgctaagccggtctttactgagttttaaccgactgaatggaacgatcccgatggtctgtttgcacatgtaccccaacatcagcttagatatctcctgaaacaaagcactagggcaaccacctgctcaattcggtccaatgtaggctctctgaacatgtgacttacgctgcaacatgctgacccgatcaagtcacgtcgggtttctgtgctgtaccgatttgcgaatcttagacctgcatacacacttacttgcaggcaacattcaatacgtattgagtctgaaatcgaacttcatgggacttgattcattgtgaaataacttgaagggtgcgctcctcggatctttatc

SEQ ID NO: 35202 - DNA, 245 bp, Gossypium hirsutum
  Clone ID: LIB3147-036-Q1-K1-C8
accccggggcgacccaggcgtgcggacacaggtacatgaggctaatgcggccgcttaaagacttctgattccaagccaaacgatgactacaactcgcttgcctaggagatgctaagaactgaatgggccataaacagatgtaaagcagttctcagggttcaccgatctacgaataatacactcgatgggcatacagttcaagcgaaccggctgctgctgcgagcttgcatgtcgatgggtatgac

SEQ ID NO: 35203 - DNA, 474 bp, Gossypium hirsutum
  Clone ID: LIB3147-036-Q1-K1-D12
cacaaaccctgagcgaggctttaagctgacagatgagatactcattaaagcgctggagactatgaaaaagccatgggtatatatttctggtccaacaatcaacccaactggcttgctttacagcaaccaagagatggaaaacattttaagtgcatgcgcaagatttggggcaagagtggtgattgatacttcattctcaggactggaattcgaatatgaaggtaggggtggctggaatctggggagctgtttgtcaaaaatatcttcctctggcaacccctctttttgtgtttctctgcttggagggctgtctctgaaactgcttagtggagcactcaaatttgcctttctggctctaaatgaaccaattctaattgaagcatttcatagctttcctggcttaagcaaacctcattgtacagataaatatacaatcaagaagttgttgtctctgagagaacataaaaggaggtt

SEQ ID NO: 35204 - DNA, 417 bp, Gossypium hirsutum
  Clone ID: LIB3147-036-Q1-K1-D3
cccacgcgttcgtttgaacattgtcataacttatctactttttaagcttataaaaccatagaggcaaatgcggatccctacaatgttcaatgaactcattgtgcgcattaaagacgtaaagcagttgctggtttctttgaccttggataatcaactcgacgagcgtatggatcaattgaaccggctgttggatcgtcgctacacactgaagggatttatgagcttcactcctttctactgatggatcacacaagatgaagtcccttggtcatgcacgcctcatccaggattgtcgagaaagcacaaaggctatatgacataatgcctggagctaaggatccagcctgtcttattggggatacatgtatatgcatgaactcttgtgttatgtgactctagattatcattatacggatg

SEQ ID NO: 35205 - DNA, 345 bp, Gossypium hirsutum
  Clone ID: LIB3147-036-Q1-K1-D6
gccatgcacatgctgggaagtggacccgtctttgagcgtatccaacctcatgccggaagagggtgcgttttacatgtggacggcactctgtacatacacacatggatgtacaagcatgtgcacagtgatcagcacgagtatgctactacatgtggactgacatctgaagatgctcaccctgccgagatattgaaccttgcctttgcaacaataattggcacagccatcactggccgacacgttattactatgtggttatagatgactgttaaagtcctagagacaggtgaagcacatagtgctatccattttacatggtgcgtctcaaacactctacttttatat

SEQ ID NO: 35206 - DNA, 307 bp, Gossypium hirsutum
  Clone ID: LIB3147-036-Q1-K1-E11
gtgaaacagaaacaatcttttgggaaactttaattagtgcagtagagatctttggttgaaaccgaaggtctgttgaaaattgaccgatgtaataagcgaaatctaactatgtgttgcttttttgaggagggtgaggcattgatcctcatttgagacttgtgctgaatttacatcacaaattgctattgctctaatctttgatgttgtgccactgcaccagctgccttaacttctatggctgaatggttcttttgaagttcattcctttgcatctatctttcgaatccttggcgaatatggaataaac

SEQ ID NO: 35207 - DNA, 321 bp, Gossypium hirsutum
  Clone ID: LIB3147-036-Q1-K1-E3
cgtgcgggcagcgggtggcaaggaactcgcccaaggatgtgccaattttcataacaaggttttaagagggagcatcgggggcattactaaacctgccattccccgcttggctcggcgaggaagcggcaaacacgatccggggccttgccctataaagaaactacgtgaagccttcacgacatcctcggagaatgtgattctttatgctccgacttataccgagcacgccaggaggaagaccgtgaccgccatggatgatgcctatgcctcgcaaacgcaaggcaggacgctacactgtttcggtggccaagggtaggatca

SEQ ID NO: 35208 - DNA, 412 bp, Gossypium hirsutum
  unsure (1)..(412): unsure at all n locations
  Clone ID: LIB3147-036-Q1-K1-E6
cccacgcgtccgcccacgcgtccgtgctttttggtgtaatatttttatttaccatttaggggttttcttttcctgcaattcggatcaaatgaatttaagttttattttgactctttttttggtcgctgctattgaatctaaactcgttatccgattcaaaataagcttgtttagttttctaatgttttttaaggttttcataattatttgacctgatcatgtttttaacataaaaaaaaaagcaataaggtgacgcgttatttatttattagaacaccataccagttatggtatacttcattcgtcttaaacaacatnttaagatactttgctgttttttgttgaatttagtttaagagctcgaagtcttgtttctgcaaaagataatgcggtgctttctcaatgaagaaat

SEQ ID NO: 35209 - DNA, 392 bp, Gossypium hirsutum
  Clone ID: LIB3147-036-Q1-K1-E7
aaaaaaaaaaaaaaaaaaaaaataaaaaaaataaaaaaaaaaaaaaaaaaaaaaaaaaaaaaaaaaaaaaaaaaaaaaaaaaaaaaaaaaaaaaaaaaaaaaaaaaaaaaaaaaaaaaaaaaaaaaggggggggccgttttaaaggaccaaagtttacgtccccgggcttgcaaggtaaaagtttttttatggggccaccaaaattaaattaatgggccgtggtttaaaaagggggggaggggaaaaacctgggggttcccaaattaaatggctttgaaaaaaatccccttttcgcaaggtgggtaaatacaaaaaaggcccaaacgaatcgcctttccaaaaatttgcccaccttaattggaaaagggaacccccctttaacgggccaata

SEQ ID NO: 35210 - DNA, 446 bp, Gossypium hirsutum
  Clone ID: LIB3147-036-Q1-K1-F1
gcagcttggatctttcaactcactcgagaactcggtcatcgctccgacggtaagaccattgaatggctgtcccgtcaagctgagccttatgtcattgctgccactgggtccggtacggcggcaccaccctcgccgcccatgagatctcttgtgcctctgggctcactacaacttcttcgcctaaggaatcgtgtaagctgcacccagtaggggtcggtagcggcgacgatgtggtgacggggatgtataccatgacaacgctgccaccaagttgccggctggacttgtgctagtcaatagggtttcagttttcagttgtatcaaaatatgccgtttacagcgttgcttttgcagctgacggtggaggttttgagagatattataatttataacaagaacaattataataattatataaaattgatttgcttttggttgatcgaatg

SEQ ID NO: 35211 - DNA, 284 bp, Gossypium hirsutum
  Clone ID: LIB3147-036-Q1-K1-F11
ggggagtgtttaacatttgaccaacttgctcttggagcacctattggacagaacacggctctgcttcgaggtccaaagaatgctcgtgaggctgagaagcacttcggacctgctcctggtgtgccacacagccacaccaagccctatgtgcggtcaaaagcaaggaaatacgagagggcatagaggaagaaggaacagcaaaggcttcagggtttgagattccaactgcactggaaaaaaagaaaactgatcatcccatcatgataatgggaatgcacaaagtt

SEQ ID NO: 35212 - DNA, 303 bp, Gossypium hirsutum
  Clone ID: LIB3147-036-Q1-K1-F12
gcgaagtgtttaacaactgttcaacttgctctttttgcacctatcgtacagcgcacggttctggggctacgtccaaacaaagctcgtcaggcttactagcactttagacctgctaatgctatcccacacatgatccactaatccctatgagcggaccgcagcttagaattcacacagcgactgatgaaaattgaactccacatgcttcagagcatcagaccccaactttactgcacaaaacgaaaacttatcatcttattatgactacgggaatgcacaaaattgtatttgttgctaaccacc

SEQ ID NO: 35213 - DNA, 298 bp, Gossypium hirsutum
  Clone ID: LIB3147-036-Q1-K1-F5
acccgccagcagacgccaggccgacgcacacgtgcgctacttcattggaatcggactattttgtagtgaatcacttgtgagcgcgtgggtgctacagcatgtatacatgattttgcgaggtagaggtaaatcagtggacctgaatcgacaacctgcagaatgagaaaagacggctgtcacgcaacgtaactgacctagtagcacatacgagatttgccagatggcgtagtgctaaataggtcatatcctatcggccttgccaagagttgcgccggatctatggctaatgggaccctcg

SEQ ID NO: 35214 - DNA, 329 bp, Gossypium hirsutum
  Clone ID: LIB3147-036-Q1-K1-F6
cccacgcgtccgcccacgcgtacgagccctctgttgtatattgtttcttcttctactctgatctgtttgctttgattaacgagacgtgatgatgatttggcattattttctcaccaggatgaattatgttttagaaattctattattctgtgtgtttaaagataactacaacttcttctactaaggtatcgtttatgctgcacccaatatgggtcggctgccgctacaatgtggtgacagatgatgtatactatgactacgctgccacgggggcggccgttttgaatggtccaagtttataagcgcttccgtgctcagttttatctttt

SEQ ID NO: 35215 - DNA, 350 bp, Gossypium hirsutum
  Clone ID: LIB3147-036-Q1-K1-G10
aattggagcacactgacggttcctactagtggttctgtcagcttttttccattgacctgcaccgacgatttttgggcgcgctcgttcattacatatgttcacgatcttgcccttcaacgccgtcaagcccttcaccgtcgcgacgagattcgtcactagatctgcgcggcgctgatactgcgcctgcacatacgcccatttcgccttgacattttcctctacggtcggtacgctgtttagtccaaacgccgagagcgacagggcatgctatcggctcgagtgctctacgaaactttatggggaagcaacctacaaataccatcaacggtgtgtcttatacgatgcctaca

SEQ ID NO: 35216 - DNA, 380 bp, Gossypium hirsutum
  Clone ID: LIB3147-036-Q1-K1-G2
gtaatacccagatttgtgacctatggcttgtatccaatttgatggccaaaatgtttgcagactgggaccctgctttctcttatgtttaaacacgacggaatatgtcattctttgtcttattgtgttttcagatattgagatgacttttagcgatgtgagattctttgctttcacttaaatcacccatttgtgctagagccttttcttggaatctttgccatatcatgaaggtccagtttttctttttaatgctgcttcctagagtgtgggagttggtgtatatattcatccagaacaaatttttaggggccgaatgaaattttaattttatataatctatatatttataatttataaaggattaaatacaatctttataa

SEQ ID NO: 35217 - DNA, 342 bp, Gossypium hirsutum
  Clone ID: LIB3147-036-Q1-K1-G3
cccacgcgtccgggagaacggagaaatggaagcatggatttttatatctattgacaaacatggaacaattaattatgaaagcaatattattatgtttatccttttttacattttgtaatttgtactttctagccatgctttgttcctagaaattagagattaaacgcagtttgtctaaaattgtggtttgaaacttcaaaaattttgattttcagctttacatgcaatgtctggtacgacttgttttggcaacacagtagttctattggttacttgtaattatgctcttgaaaatattaatgtatcttaagagtttaaataattcagaaggttcttagaaca

SEQ ID NO: 35218 - DNA, 301 bp, Gossypium hirsutum
  Clone ID: LIB3147-036-Q1-K1-G5
cgagcggacgccagtgcgacggatacgtgcgcaatcgcatcacactgcccgtcgtcactagtggatccaagcattgcactggtggaatattttgattattgaaagctgtctagataaatgtgtcgttcaaactctattctcaaaattgaaatactagagggccaatgttgtgacacattaacctcatgtcgagctctgttgagttgaaaagcgattttattgcttaacaaactatcgatatccttgtacctgagacatgagatgacttctgctgcgtctataatctgagcactgataaaca

SEQ ID NO: 35219 - DNA, 265 bp, Gossypium hirsutum
  unsure (1)..(265): unsure at all n locations
  Clone ID: LIB3147-036-Q1-K1-H10
cacactgncggttcctactagtggttctccgcgctttttaccgcagaaccggtgggcagcttattggggctcaccgtctcctccaataactctcatatcacgatcaagtctatcagcgtcacatggcgctcgcctttaaacatcaccagcgtctttcccctgatatttaagttcaaaaattcttctcccctcaatcaatgccatttgctcaccccctcataagccactcccttctttacaatctcgaacccgacctttcccctaa

SEQ ID NO: 35220 - DNA, 401 bp, Gossypium hirsutum
  Clone ID: LIB3147-036-Q1-K1-H4
acatacccctatatgtatcgggctgcttccctagtgttggaacagaacgctcatgccgcacttgaggagatcagccgatctcttgaaggcatactcacatgtccgtgcgaagctcctgctcttgcttttgaagccatcccacgtagcttagccacacaatagtggaggtaatgagagctcgtgactatgactgctcctgcaggcaagcatgctgatggacaaaatgcatggatcggcatacatggccacactgctgcccttgctgacatgaaggcaacagagatttgtgacgcacacaatgtgaaggcgcagacatttaagacagcgatagaagcagcatgcatgcttatacgaatggatgacattgcaagtgggattaagaagaaacacgctcctggagc

SEQ ID NO: 35221 - DNA, 299 bp, Gossypium hirsutum
  Clone ID: LIB3147-036-Q1-K1-H7
gagaaccaggcgcgacccacgcgtatgtcttttatgacaacatatactactctgcctttaatgccccaagactaacgtggcttggaagggcttggatatacatgctcagtcaggataccatcgcattacagaaacccccccagaggctagaacatacaccggctcctaaacctccgctggaccttgtaaagagggtgccgaacacccgtccacggatcgatgatgggttaagatcgtactgtgtgctgatcgaatgctaatgtaagcctgccgctactctgtggaagcttaccagaaaa

SEQ ID NO: 35222 - DNA, 198 bp, Gossypium hirsutum
  Clone ID: LIB3147-036-Q1-K1-H8
tgataatatatagttatagggacaaaagtgaatgtttccttacaatgctgaataattgtggtgatatctctaaccaaacagcctgttgtaagctatgaaaagcttagtctaataggatgattaccttttgttatgctttaggatataatgattgcttcaccagcggagttggctctaaaacaaaaataacactttacc

SEQ ID NO: 35223 - DNA, 436 bp, Gossypium hirsutum
  Clone ID: LIB3147-037-Q1-K1-B11
gaggtactggtgaaatatttaaagatggaatggacctccataatttcgttaagagagcattgcctgaaagattatcccaaatttgggacataataaaaaaaaacaaaaacaaaaataaaaaaaatacacaataaaaaaaacaaatataaaaaaaaggaggaaaacatacaattataagctaaaactgcctctatacaaagcaatgtgaagggaaagcacgacacattgaattgcgctactgttttttactcaatagaatcagagtcggaacttttatcgatcagatttatgttaaaaagattgtatcatacagatacatacattttgggaagatgtttctgtatatatcaaatgagcaatttgtacatgtaataatgtaccattagaagtagtagatatatgtcctgtcaaattagtgtatcactttcatgaaaaa

SEQ ID NO: 35224 - DNA, 235 bp, Gossypium hirsutum
  Clone ID: LIB3147-037-Q1-K1-B8
gccacgcgtccgaccacgcgttcagtattatggcgagcagaatatccaaccggcagatccggtggctcttgatcttgtttgtgtatcaaacccaatcgatgaggttctggacacattgtgcacgcttattcatgattcacattcacaagttgcaatggctgcaaatatctgcttgggtatatataagtgctgaaaccaataatgctcgcattgctggcatgctatgcaaactttc

SEQ ID NO: 35225 - DNA, 376 bp, Gossypium hirsutum
  Clone ID: LIB3147-037-Q1-K1-D6
cccacgcgtccggtgggatactgtagtttccttggcacggctttatgatctgttgtttggattgattgtcatagctcctgtggcattggtatcgtggttgcctggattccaagccatgcagacaagaatcttattcaatgaggcattcagcagaggtttgcagatttctcgcattatttccggcaaaaagtccacagcatgatgttaaggtaacatttgcatccgtagttcagtttaaacatttgcatttattgtccagtaatatttgttctgtctatgcgtgtatagttggcgtttgctctggatggcatgttttgttttgtgtacatgtatgttttgactcaagttgaatttgccaaagttttttttatgcgag

SEQ ID NO: 35226 - DNA, 429 bp, Gossypium hirsutum
  Clone ID: LIB3147-037-Q1-K1-D8
gcgtggacagcctttctgtaactttttcatttcatgcctggtaatggcctttgtactgccgtggttcttccgtgtgaatatgttttagcaaaggtgtgaaccggacataacgttcgtcctctgcaccaccttttcttgccttcctgtcgggtcagcttctcctgtcgaatttgaatggatatgaaataactcgtcagtgaagctacattacgggttgtttccggttttcaatacccatatagacaaaccataaagattgagttttcaaatttcagaagtagccatccatgccccaattcttttactgtgacaaaattgtatttgctgcttgcaatattacttgtttggtatttgtgcctttcagcttaaagtcaaagcttaagcaaaagatggcttcggctgtataactgtattacagtgagaagtttt

SEQ ID NO: 35227 - DNA, 296 bp, Gossypium hirsutum
  Clone ID: LIB3147-037-Q1-K1-E2
cgattgtttgtactcggctagctaggcggctgatggctccagcatactaacccatgggagtgcgtgagccattgaccgtctcagatgcacactctcggttctgataatgtcccgcacagggattgtctcatcattgggaaagcgacctcgcacttgaaccaacggatgatcgtcgtggcccttgttttgatgaaagtgagccgtaacgagttctcgaagacttctgcgtatagacagttttgtcgagattaccaaaaggtggcttgccacgtgattacgcgatgtgcgttggacat

SEQ ID NO: 35228 - DNA, 316 bp, Gossypium hirsutum
  Clone ID: LIB3147-037-Q1-K1-E8
catcgttggtgccgggctagataggcggcttatctgtccagtctcctaccccattggagtacctggaccatcagtccgtgtctatgcacactgtcacgtctgataatatcccgcacacggatagtcgcaacattgggaaagagaccttgcacttgaaacaacgaatgatcatcgtggaccttgttttgatgaaagggagctgtaacgagttattgaagactgctgcgtatagacagttttgtcgacactaccaaacagtgaattgctacgtcatcaagtcatctgcgtgggtcatggtacatgctccatagatagc

SEQ ID NO: 35229 - DNA, 194 bp, Gossypium hirsutum
  Clone ID: LIB3147-037-Q1-K1-F1
gatctttgcatggtcagaaatgtggaacatacaagataagatgtgctggatgcttgtcgcatgtcatgagagttatcgaacggcaaagttgaaatataaagcttgtgcatgattactctaacatggaaatcaagcaacacaaaaaattgatatgggctatttctcggccaaccgaccaacacattcaagtgaat

SEQ ID NO: 35230 - DNA, 176 bp, Gossypium hirsutum
  unsure (1)..(176): unsure at all n locations
  Clone ID: LIB3147-037-Q1-K1-F4
gcgtncgccacgcgtncgccacgcgtnncgtttttggtagcttagctcattttagtttagagctttaacaaagtcatccttgtttgataaaatcttattgtttaaagaaataactcggttttgtacaataatgtattgacttctttattaatactttaaacttatctctgtagttt

SEQ ID NO: 35231 - DNA, 251 bp, Gossypium hirsutum
  Clone ID: LIB3147-037-Q1-K1-F9
ttatgactggaaggaaacgcggggagcttatatgttcaaagggcgtgtgccagatcttaaaaaagaagaactgaaaatacaggtagaaaatgatagggtgttacctattattggagaaaggtacgtggagaaagaagataagaacgattcctggcaccggcttgaacggtgcatcggcatgtttattacgaggttcacgttgccggaaaatgttaagacgggctacgttaaggcttcaatggaaaatgggg

SEQ ID NO: 35232 - DNA, 267 bp, Gossypium hirsutum
  Clone ID: LIB3147-037-Q1-K1-H11
atgaaaaaaatattatattacaagctttatttgtctgaggaagccaatactaactggtgaaggtgatactttggaagaactgtgctacaccttactgtcatgtcctttacttgggtagatggtaaaacctgtaattaaactcaaacctacaagcgcactctgtgtatggcaagggattatgctgccgatcctttaaccgaaaataaaacgagagggtgcgactttctgcaagtgaagctgttatatatacatctattattagctcaa

SEQ ID NO: 35233 - DNA, 218 bp, Gossypium hirsutum
  Clone ID: LIB3147-037-Q1-K1-H2
agaaagatgtgtattccgtgggggcactggttcacgaaaaccttactggtaaggtcaaaaaggtggttggaaggttaaaatcccaattccgggggcccaaattcgagccccaaggtacgggtggtgggggccataacttaaccgcttatgaatccttggcccaattctgggtcccttgggatggccgcaaggcttataatgccaactgtcgatcgtgt

SEQ ID NO: 35234 - DNA, 310 bp, Gossypium hirsutum
  Clone ID: LIB3147-037-Q1-K1-H8
aaaaaaaaaaaatttattaaaaaaatatatttctaaaaaaaaaaaaaaaaaaaaaaaagggggaactttaaagggggggggccgccacttctttccacccaaaaatacaaaccctcccgcccgcaaagcatatctaaaaaaaagggctaccctttccttaccaaccaatctttccaaccctaccatcccaaacagcaacacttttatttaaacccacctaaccctcctcactttccaatactccacaacatccttactgaaaaaactatctgatcctcccccttaccctccacatatcatatcccaatat

SEQ ID NO: 35235 - DNA, 349 bp, Gossypium hirsutum
  unsure (1)..(349): unsure at all n locations
  Clone ID: LIB3147-037-Q1-K2-B11
gaggtactgatgaaatatttaaagtttgtatggacctacataatttcgttaagagagcgttgcctgaaagattatcccagatttgggacanaaaaaaaaaaaaaaaaaaaaaataaaaaaaataaaaaataaaacaaacaaatatttaaaaaaggaggaaatcatacaattaatgggtaaaacttactctatacaatgcaatgtgcagtgcaagcacgacacattgatttccgctactgctttttactcagttgaaacagagcgggaacttttatcgatcaaatttatgttaaaaagattgcatcataaagatacatacattttgggaagatgtttctgtatatatcaa

SEQ ID NO: 35236 - DNA, 192 bp, Gossypium hirsutum
  Clone ID: LIB3147-037-Q1-K2-B3
aaaacattgcccgatgttattattttcttttctgcgtgagccgaggatcatacgtgttggcatcatgaaaatcgtgtttaatgcacctattaaggctcacaattatgctcaacctcatttccaaacaactggatcaccgacggaatttatataccgtttctatttcctttttgactgcaaccttgtgacaca

SEQ ID NO: 35237 - DNA, 255 bp, Gossypium hirsutum
  Clone ID: LIB3147-037-Q1-K2-B8
gccaacgtccgaccacacgttcatcattatagctagcagaatatacaaccggcagagacttttgctcttgaacttgtgtgtgtatcaaacccaaacgataatgttctggacacattgatcatgcttagtcatgattcagattcacaagttgcaaagggagcaaatatctccttgggtataataagggctggaaccaataatgctcgcattgctggcatgctacgcaaacttacaagatattactacaaggatgct

SEQ ID NO: 35238 - DNA, 286 bp, Gossypium hirsutum
  Clone ID: LIB3147-037-Q1-K2-C4
cccacgcgtacgcttattcttgcgccctttcttgtttctataaagacacaccctgaagcgaggcggcctttaatatgatcgtgggcgccatccatgaatctcgacgacccaaatccgaattcaactctgatgatggccgaagctcttaatactagcaaacttctgcggactgaaacactgggcatggtcaaaggccggaatttaaccattaacatcaacctaatttcgaacccgagcggatatcagaatttgagcaaactacaacaactgagtttgcattttagaa

SEQ ID NO: 35239 - DNA, 181 bp, Gossypium hirsutum
  Clone ID: LIB3147-037-Q1-K2-D6
ttaaataaacagggcctgcactctatcaaaacaacagtttcaaaaccacttcaaacgacaactctttaactgccggaggcgacaacaaatttaacctaggtcaacctaataaacctaaaacacttctttaccagacgccatatttccggatatagcaaatgatttcatggataaagggttt

SEQ ID NO: 35240 - DNA, 344 bp, Gossypium hirsutum
  Clone ID: LIB3147-037-Q1-K2-E11
aaaaaccggcgcgacccacacaaacgattgacaaaaaaatttctgagaatttgttttttacccgcaacacgaaaaagagggctcgggtattaaacaggcgagcggccaccacaaaaaactaccaacaagatcccgcaacacgtgtcaagaagctattgccacaccggaagctgacccgcaacaaaaaccaccgcaacctctagggcactctccactaccacgacaagcccgggaatctcaatctccaaaacacaacatagtatcgcaccacccagaccacctcccccactcctacagagcaacaacaccttgataaccttctcaccccttccactaaacaaaac

SEQ ID NO: 35241 - DNA, 290 bp, Gossypium hirsutum
  Clone ID: LIB3147-037-Q1-K2-F9
aaaagaaacgccgggggcttatataaaaaaaggctgccaaccaaaacttaaaaaataagaattgaaagttcacgtagaaaatgatagggtgttacagataagtggagaaatgaacgtttataaagaagataagaacgatactttgcaccgcctttaactgatcatctgcaattttattacgaagttcatgttgcccgaaaatgttaatattggtcaagttaaagcttcaaatgtaaaatagtgtgctcaccctgacttttcctaaaatctaaattaaaaaacctgatttc

SEQ ID NO: 35242 - DNA, 345 bp, Gossypium hirsutum
  Clone ID: LIB3147-037-Q1-K2-G12
cactcttacgtttgttcacctgcttgatttttaaccccatcgaattgatgtttggtgcgagaaaaaaacaagacggccgcccaaaaacaaaaaaaaaaacaaaaaaaaaacctccacgtgctcaatgcaacccacacaatattaccccttcaccccccctcattacactgcccctaataccactacactgaccacctttacaccaccccggggccccccccctaaccttgacccaacccaaacttaccccccccttccaccgcttatcaatttccattggccccccccaatttcaatcccccccccccttttttcccccccggcgcgccccggaaaacccccccc

SEQ ID NO: 35243 - DNA, 176 bp, Gossypium hirsutum
  Clone ID: LIB3147-037-Q1-K2-G7
tatgttcaaacacacgggtatatttggattcctgccgccttatagaaacattatatatatttatatatatatatagctgcgacatactattaccattgtcatcataaaaagaagttgtggtttgtaacagatacaataaaatgctacgcctaacagctttgaactttttcctttaa

SEQ ID NO: 35244 - DNA, 285 bp, Gossypium hirsutum
  unsure (1)..(285): unsure at all n locations
  Clone ID: LIB3147-037-Q1-K2-H12
gacccacgcgtncgaatgaaaaaatttattttaaaatttcgtttnttcaccacgaaaccaaaaaaaaaaggcggcgttattaaaaaaaaagggcggcgacacacaaaaaagacatatagaaatcaatggtgagatttaataacctgtacatagacacaattcatctagcgttcacattgtaaggccttggaatggtattccgaatcaatactgaaaaatgtaatgataagaagcgttttccttccagtgaatctctaatatatatatcttttattaccctaatcc

SEQ ID NO: 35245 - DNA, 527 bp, Gossypium hirsutum
  unsure (1)..(527): unsure at all n locations
  Clone ID: LIB3147-037-Q1-K2-H5
aaccggcccgcacccacgccgtccgnnggaaaaatttntgaatggtttaagttgtttattttgtttgactagtatgcatcaagatggcgtggtatgtgtttattaannatgggagatgaaggaatgatcgatatgttacccatagttaaatgcgtcgcacgtttattggttgcgttaccttagtnntttattacccaaactgccanttcttgagacggtttctttttcaagtatttnntggaccatcgtgcatcnnaagtagaaacttcagtnncttcgggccgctctattttgcttgaaaagttggcattgcttttttgacgcgagaaatattttgtattaactctgcaccatctttatnttccttgctgcttgatcctttatgtgatgcttttttnttttttnttgtggaaattggtgattttttggaacaaccctattttcccttaaaaagaaacaagtataatttcttgttataccacgaacaggatctttcaagacaataataattaaattgctaaacatat

SEQ ID NO: 35246 - DNA, 230 bp, Gossypium hirsutum
  unsure (1)..(230): unsure at all n locations
  Clone ID: LIB3147-038-Q1-K2-A12
acgaacccnaanaagagccggcgccttaagaaggggagaggccgtaaaaaaagaaacgtcacgctgaggatgacggggagaatgctgaagttaaacaaaagaaacagaagaagcgaaagcatgccgaagaggaagaacctgaggtgcagaccaagaaagagaattaaaaacaaaagaagaagaaagatgaggttgaagaagactaataattagaagagggaaagaaagaa

SEQ ID NO: 35247 - DNA, 401 bp, Gossypium hirsutum
  unsure (1)..(401): unsure at all n locations
  Clone ID: LIB3147-038-Q1-K2-A3
ccacgcgtncgcccacgcgtccgcccacgcgtccgcctactcgtccgcccacgcgtccggaagaaagtctggcgttccttggagagattggacaaagcacatctttaaggcatgcagttcaactgttatcacctgctagcattgtggcaaaaatgaatggtcgagacaacatatgcaaggcggatcttgaggaagtaagcaagctatacatagatgccaagtcttcggcaaaaattcttcaagagcaacaggaaaaattcatttcatgataatcctatttttatatcttctttcctcttgccctgcagttttaggttgaattttgttgtgcattgttttctctcagttggacaattgatcattagtatgtgcaatgcangatgattaaatgatttattttt

SEQ ID NO: 35248 - DNA, 377 bp, Gossypium hirsutum
  Clone ID: LIB3147-038-Q1-K2-A5
gccactgctctcctgcaaaaagcggctctatgggatctacaagaagcaaccctacagtcactaacagtggattatttgggttaatgagctcacccccttcaacaattccgagccccatcaatgaccacaacaaaaatgaagcttattacaagctgtttaagcaagcaaatcaatctgagaacataaacgaggtagtgagttcattgccttcaacgcaagcagccatcatcaaagatgggtcatttgtcaataacgcctccatgaaggcaaatgaaagacaaggaggccaagcggttgcatcaaagctgaacacaaatgcaaatgaagtggaagcaagcttaaccagggactttcttggtgtgggaagtcaatcaagc

SEQ ID NO: 35249 - DNA, 321 bp, Gossypium hirsutum
  unsure (1)..(321): unsure at all n locations
  Clone ID: LIB3147-038-Q1-K2-A9
aaccctaaacattcttcccccacttatcagatcaattcgcagagggctccccgcgcncactttcactacgctcaggagccccaacaccatctccaactccaaaaatgtctggagaagaggtagccaatgcccaaccagaggcaccccctactcttggagagccaatggacatcaacacagccacgcctctagtggcgaggaaatcccaagctccacgtgagcttgctcgtggctcacatgaagcttccaaggcaattgaaaagctcaattcacatctatgagacttggccaatgacagaaaccaacctgttataaataatc

SEQ ID NO: 35250 - DNA, 362 bp, Gossypium hirsutum
  Clone ID: LIB3147-038-Q1-K2-B3
gatgaagaggtggttcgatccatggccggttttcttcaagagagagttcaaccggacgtggccctttcttgttggtttcgctgtaactggaactatcatcaccaagttctccctcggtctcactgaggaagatgcgaagaattcgcctttcgctcagaagcacaagaggtgatcccaattgaattcaaatgctcatctggtttgaggcttttggttgtttccactcttttctttttttcaattaactacaaaaataacataggacatcatcagttgtgagtattctactctagttatgaattggtattcttgtattgccattaaggtttttttgcctttgaacaatgttaaaacaccttttt

SEQ ID NO: 35251 - DNA, 373 bp, Gossypium hirsutum
  Clone ID: LIB3147-038-Q1-K2-B6
gaagggtgtaaatatataagactggattatataggcaccccagaagctgatgaggaagttccggttgccggagaatgccaatgtggcagccattacggctaaatgtgaaaatggggttttgactgtggttgtcgagaagcttcccccgccaccaaagcctaaaactgttgaagttgcgattgcttaaaaggatctagttgtttggggggggatagaaaggttaaattatagagggctttcaagtttctcacctttgggaactggagatcaaacaatggttgatgtatttaggtgtggttcatcagcatgtatttttatttgcagtgtaatttgattgggtggatttgcttcttctcagtctacagtcttttct

SEQ ID NO: 35252 - DNA, 367 bp, Gossypium hirsutum
  Clone ID: LIB3147-038-Q1-K2-D10
ctttgagcttagcattgaagattgtttttcctgaaagagcttggtcgaatatgtgctgcttcgttttcgatgtttgaggaagctagatggcattctacttggataaaatttctagatatcacggaattgtgttaaacaattagcattagtgggaagctttgaggagaaccatggctacattgttttcgttatggaatcatcttagacgcatgtattcacagttcacacacccgcaaaaggtgtcgaaccttgaagataaggggatgcatatgcagatgctgaactaacttgttaggccctaagttacatatgataaatcaacctcactgtttgcaaacctcttctttaatttgtggggatatatatg

SEQ ID NO: 35253 - DNA, 393 bp, Gossypium hirsutum
  unsure (1)..(393): unsure at all n locations
  Clone ID: LIB3147-038-Q1-K2-D3
gtaggaaggaagtggataccaatcctgtgctggaattgggtcgtgttttgtccttggattcctctgctaatgtattagatattgaagagacatgcgaggcaagtgattttgagaagcgaatggcagcgaatgcatttaacagcatcttgtctgtgctaaccaactatagtgagtcaactggcagattggtctgtgggacgagatgcagtgtacctggggtatgctacatcagttcatcattaaatatatcacttggtagaatcagacaaagctttgtactaattgatccacatttacccgggatgcctatagtttatgcaagcgatgccttcttaaaaatgacaggctatgataggcatgaaatatngnngcttaatttttgcagtttgaatg

SEQ ID NO: 35254 - DNA, 387 bp, Gossypium hirsutum
  Clone ID: LIB3147-038-Q1-K2-D7
gccgtaaggataattctgaaaagcttttgcattatcagagagaagagttatagaagaggatcaagaatcagcagcgcgttgggattttaccttaagagttggtcaatgctctcatataacaagggatagttttgacgagaatttcacatcatagtataagcaaagcaagcatgaagattttagtatcaggagaatcctagtcctaacatatgcttttgaattaaggataaaataactttaacttcatggaattcttattcttagtcatacactgaaaggcagcctatcaatttgtaagtaaccattattcaccattatctttggaatttggtaaccagtttatcaacagagagagcgctatagaaaactgcaagatgaatgttagta

SEQ ID NO: 35255 - DNA, 394 bp, Gossypium hirsutum
  Clone ID: LIB3147-038-Q1-K2-E11
atcgttactgagtcaattgctccactaatcccaccaaccagaagtgaaggaaaggagagtaatataagaacatgggtgattgttgcttctgttgtgggtggagtggcattgctggcattcttgggattccttgtactctgggcacgcaaatgcaagcggagaaagaaaatgcaagagatggaaaaggctgctgaagtgggagaagcactacatatgacctccgttggggatacaaaagctccgtcggcaacggtcactcggactcaaccaactcttgagaacgaatatgtgccctaaccctccctctgtgatatacgagcattttcctgttttcagtaattcttctgttcacagcctcacacccattcttttttttatggccgtttgttctttg

SEQ ID NO: 35256 - DNA, 162 bp, Gossypium hirsutum
  unsure (1)..(162): unsure at all n locations
  Clone ID: LIB3147-038-Q1-K2-E12
attccttctnaaccttcctctncaccttatgttaatncgnnccntcataaatatgcgactattattggaatgtaggtgcacttaataaagtgtgtgaatttgtatggtatcttttttactttctttcaactttgcatctatttagtaaatattaataaggtt

SEQ ID NO: 35257 - DNA, 372 bp, Gossypium hirsutum
  Clone ID: LIB3147-038-Q1-K2-E2
caaacatggctgcttcacttgttcttttctctcttttgctgcttcatttcactcaagctgaagaattgatgagcattgatggagctccaagcccttcacctcaggcacaacctattgattgtggagtagcatgtgaaggaagatgcagactatcaaagaggccaaatctgtgcaaaaggtcgtgtgggagttgctgtcatagatgcaagtgtgttccaccagggacgtcaggcaactatgaagcctgcccttgctatgccaacttaaccacgcgcaaaaatgttcgcaagtgtccatgattccataaatgttccacttgtttgatgttatttacttagttcaagataagtctttctttctactgggaaatga

SEQ ID NO: 35258 - DNA, 127 bp, Gossypium hirsutum
  unsure (1)..(127): unsure at all n locations
  Clone ID: LIB3147-038-Q1-K2-E5
ccggtttcggaattacccgggctcgacgccacgcccgtccggtcggagaagagaagtgtctcannacatctcctttatcctctnngggacccgnnggtcacaagaagggtgaagggagtattgttga

SEQ ID NO: 35259 - DNA, 383 bp, Gossypium hirsutum
  Clone ID: LIB3147-038-Q1-K2-E6
aatcctgggaaacgaatccaggccgttattacatttggaaaaggtttcagtggatcgaattcaattgtccaaggctgaacagttagatagtgaccaaacactatccatggaccttgagtcagagccaggtcatagtctaccctgcattggaaacggacaaggaaatatccatttttgatatccatcagatgaaaaggttgagagggtttccaaaggctagaaatacgattgtgtaacgccccgtaacctatgttccatcctaacagcttgacaactacgatagtctccatatccctaactaaaaaattccttataagctccgagaagtcaatggcagggattccattaatggaggatcgaagaatgtcaccttcttcaatgac

SEQ ID NO: 35260 - DNA, 404 bp, Gossypium hirsutum
  Clone ID: LIB3147-038-Q1-K2-F1
cgtattattctcccggatggcggacttgtgctgcggtggcgattcaattggcttggaggcggtacaaacaccggttgacccttacgtcgttgtcattcattaggcctcggaggccgttgtcgagaagtaattcattgggggaggacagactcaggctttatacagctatgttaacttcaccaaaaccaaatcaagatgattttgatttttgaaaataaaaaaaaattaaaatgatgctacatggaattcccatggtccttaagtttgagttttctgaattaatgttcgctctaataccatttgtaagtacctcgtatttggtacgagagcattattctttacttcgactcagcctgtagttttgtttttaaaagaaaaaaaaaagtttgtttctacagctatat

SEQ ID NO: 35261 - DNA, 359 bp, Gossypium hirsutum
  Clone ID: LIB3147-038-Q1-K2-F12
accacgccaacgactatgacaacttctttgttcaatacgatgtccaagctgctgcggaagctgacactaaaggcgacgctaagttcgctaccgatgcggctactgatgccgctgctgaagccgatgcttgcagcaaccgatccaaaaaccaacccaaggctacaatctatgctagccacaaggttgctcatgatcttgctgctatggttgatttcatactacaagtactactaagagtacgaacaaatgaatgaactgtctaatgccatgtaaagggctatacagatgtatgttcagatgtgttatagatgttatgaaaaatggatgatgagtgaaatgatttgtggttttgtttaaaa

SEQ ID NO: 35262 - DNA, 260 bp, Gossypium hirsutum
  unsure (1)..(260): unsure at all n locations
  Clone ID: LIB3147-038-Q1-K2-F3
cgcccacgcgtccaaaatcatctggggggttaaaagtgcatgttccgtcctgtaaaatggtgattatatgtgagagatgtggctttgcggtnaaaaaaaaaaaaaaaaaaaaaaaaaaaaaaaaaaaaaaaaaaaaaaccacaaaagaaaaaaaaaaacacacttccaaaataccaaaaaaccaaaaagattgctgacaaaaattaacaagaagcttgccgtgctccagaccaacatcctgagggttaaaccctgactgt

SEQ ID NO: 35263 - DNA, 170 bp, Gossypium hirsutum
  Clone ID: LIB3147-038-Q1-K2-F5
tggtgagcttgcgtgaaaatcccatagtggattttagagaagagatggagaaatttaggaggaaagaatttagtaaagtgtgagctgtttccagatatctgaatcctgctagtagagctgtcttgttgctaatttggctaataataataataataatttgttcttgttct

SEQ ID NO: 35264 - DNA, 380 bp, Gossypium hirsutum
  unsure (1)..(380): unsure at all n locations
  Clone ID: LIB3147-038-Q1-K2-F6
ggaagccatctttctgatttctactctttttcttcttcttctaacaccattgctatccacatcgaagccttaagtaggaaacccatgtctgttagaggaaagggggaaaaagatgatcgcttcgataatgttaatgatgctttgattttgttcaataagatgattgacaagtacccaaagccttccattgtggaatttaataaattattaggagccattgttaggatgaaacattatgccattgttgtttctatgtatagacggatcgatttattgggcgtttcccgtgatgtttattctttgaacatctngattaattgcttttgtcaattaggtcgaattgattttgagttttctggtttggngaaagtgctgaaatt

SEQ ID NO: 35265 - DNA, 362 bp, Gossypium hirsutum
  Clone ID: LIB3147-038-Q1-K2-G4
cccacgcgtccgaaaaaatgggcagacgatatggagaagagggagagaggggagcgggcatggccgattacagtgttcatgggcgctcaacgcctccaccgttgcaccaatccgaagccactcgaactgctggtacagggcgtgtgtacgagggctgggtgctggtcgtacggaagctgtgctggcgcggggcgtgggcgtggcgccaggaggctggggcgtacggaggcctggagctgctggggttgctggttgcggcgcgaggacccctctgccctagggtttgccaaaatcgggcttaacctttgggccgtttagggtattaggttaaatcatttaggattttgggctattgggttgta

SEQ ID NO: 35266 - DNA, 183 bp, Gossypium hirsutum
  Clone ID: LIB3147-038-Q1-K2-G5
cccacgcgtccgtcggatcgcggcgacgtgggcggttcgctgcccgcgacgtcgcgagagagtccactgaaccttatcatgtagaggaagaccatgacagtgggtgttattgaatgtctcatctaattttaaggatgcattgctaataaagcctatgacaagctgagttggacctttgtgggc

SEQ ID NO: 35267 - DNA, 142 bp, Gossypium hirsutum
  unsure (1)..(142): unsure at all n locations
  Clone ID: LIB3147-038-Q1-K2-G6
tcgcggccacatgctttatccgatgcccgcaacgncgcggggagtttttttaaccttatggtgtacaccaaaaccatnacantgtttgttattgaatgactcatctaattttaaggatgcattgctaataaagcctattaca

SEQ ID NO: 35268 - DNA, 290 bp, Gossypium hirsutum
  unsure (1)..(290): unsure at all n locations
  Clone ID: LIB3147-038-Q1-K2-G9
cgcagggctnggttcggactttgttaggctttcttccggagatgcttaaaaacccatttgaaacgagagtttttgcttttgtttgtgaaaattgttatggcttctgtgttttccgttttgtgctaatcaattctgtaatttttccatcagtaaatgtgatgaatgttgcttcctttgacagataaccaaaaagagtaactataaaaaccaataaaaaactataaaagggcggccgttgtggaatctatagactttctcttcctcacttgctactggttcatttttttttt

SEQ ID NO: 35269 - DNA, 315 bp, Gossypium hirsutum
  Clone ID: LIB3147-038-Q1-K2-H1
aaaacccggccggacccacgcttcctaccaaacaacgatttatggctattctatctacggacacattttaaccaaccaagcgggccggttcaaattatgtgttggcacatgaacccccactaccatgcccgggaaaggattcacaattcggtgaggttaacatcggaaggggcaatccattccattaacgtttgccaataagggatggcttaagaaactttttggtcatgtttgattttggcacacccatggatctgcgtatttgttccatcccgacatttataccgaccgaaggatcttcgttcagggtattga

SEQ ID NO: 35270 - DNA, 229 bp, Gossypium hirsutum
  unsure (1)..(229): unsure at all n locations
  Clone ID: LIB3147-038-Q1-K2-H11
cccacgcgtccgcacatgacaatcatgntttattcagttaatgctgacgtggtaggggattaatgaaaacacgtgtgggttacatacactccccaatttaggaaagagaaaaagggaggtttcaaagcatgatgagcattgagacttgttggccttagtgtatacaaagaatttgtcattatttcatggatgttttgttaaatggaaatttttgtttgtttttggttgg

SEQ ID NO: 35271 - DNA, 264 bp, Gossypium hirsutum
  unsure (1)..(264): unsure at all n locations
  Clone ID: LIB3147-038-Q1-K2-H3
cccacgcgtccggttggtaattctaaattactctgttactgtttggtttgggttctgtcgtttttgatcgatgttggggctgttctcttaaaagcataaaaatggaatgaagtatcttcttttcaaaaaaaaacaaaaacataaaaaaaaataaagcaaatataaattaaaaacaaaaaaaaattaaagtacaagcccacaaccaaatttcaaaccttaaagaaaaagattaaaaaaaaagnatggggcggcctttttaaagaa

SEQ ID NO: 35272 - DNA, 363 bp, Gossypium hirsutum
  Clone ID: LIB3147-038-Q1-K2-H8
ggctttgaagactctcctgattgcatgattcctgaagcagattgtgaaggcatgcgtagactttataaagaaatttgggtgcacctaaaatgaagcaaatcaggacagttgagagaaatagatgatgaactcatgtgagtctacaaacatagtgtaaaagatgaattacatgtatagtatgagcataaaagaaaattgcatagctccctccaatttatggctttgattcatagttaatgttttcaaatttgtatatcgtccctgcttaggggaaaggtttcctgttagacaggagcaataactaaaaatggccttttcatttgtcaaaatttctctagagtggggaaaattaccaacgttttt

SEQ ID NO: 35273 - DNA, 215 bp, Gossypium hirsutum
  Clone ID: LIB3147-038-Q1-K2-H9
aaaaaaaaaaatataaaaaaaataatactatacttgaaaagcgtccatattaaaaggggcattttataaaaacgcttgcaggcacctaaaattaatacaatcaaaggttgcctaagattcaatgtacgaccagcagttttacaactgttatcgcttcgttacccgacccacctatcaccaaaggtaactatactctctcactaatttccgatact

SEQ ID NO: 35274 - DNA, 361 bp, Gossypium hirsutum
  Clone ID: LIB3147-039-Q1-K1-A11
cggacgcgtgggcggacgcgtgggggtgcataccaagtaactgcacaaccgatagttgagttggatttaagctagtgcgccagacattattgctactacaagatcataacccgagaacacgctatggaagtatccgatctgcagcattatactatataaacttcttaatattagcatggaggacagtgtacggtatagtaacagacgggctatcaatgatattccgtatgttaaacgatttcttgggtttgatcggaactgatgcgatgtgtacagtaacaggttactagctgatcgagatgcacattgcgcaagctaatataccaaagtatacattgatgtgggtatggctgaaaatact

SEQ ID NO: 35275 - DNA, 377 bp, Gossypium hirsutum
  Clone ID: LIB3147-039-Q1-K1-A3
cacactcctggagatgtgatttcaatgccttcaatgcctcatagtggcagttcttccaagcctttgatgatgtttggtgctgagggtgctggtacacttgcatcaccttcaaatcaattgtgggatgataaagatcttgaattgcaggctgaaatggatcgatttgtggaggatggatctcttgatgataacgtcgagtcttttttatcccatgatgatacggatcctagagatgccgttggccgatgtatggatgtaactaaaggtgtataaatattacttgtatggttgctatgataatgataaagtctatcgttgtcgggaatctattgtagcgtattttttcaaacattgtagtttcactctatttgcttttt

SEQ ID NO: 35276 - DNA, 339 bp, Gossypium hirsutum
  Clone ID: LIB3147-039-Q1-K1-A6
accggacgaaggagaattaggggagccgatttcaatctatcttaacaccattcaccttgcgcccaaaagcgaaggaagtggcaccttcattcactgcactttagacttctagatgttcgggagatggattgcgcatactgggactatgctggggtcagtccaacatatctctaaggacatgaacgcgcacctcacgcaaacgagcttaacagtatcacatgctgatattgtcgccgctactcgaagcacagatcaaatactcgagtgcatgaaggcacttgctttcatatgtatgtcgaactgaatatgcctggacagatcaatatacaatccaaggga

SEQ ID NO: 35277 - DNA, 211 bp, Gossypium hirsutum
  Clone ID: LIB3147-039-Q1-K1-A8
tgaattgaattccagtgagatgaatccatttgacagcacgaaagagttgtggaggacgaaggaccctccattataaaagtacaaacggctattcctagagtatatgatgacactgacacgaataacattaagttgctcctttaagatttgtatttcttagaggcgaatttgagttatttattattggtgatgcatcatcgccgttaagatt

SEQ ID NO: 35278 - DNA, 338 bp, Gossypium hirsutum
  Clone ID: LIB3147-039-Q1-K1-B10
cccacgcccgtccggcagaattcagaattggggtttgagattttactttattaaaacagagccaggaaaactcctacgggtggaggagcattcaaaaactacactgggttcccacgaatattgagataagattgctacgaacgtcatgatgacttgtaatattcctaaaccatattcaaaaatgtatagaaaaaaatgggggggggggagcgtttttagttatcaaagactttgtaccggtgctggacaaatttaattgcttttaataggggccccaaattttagttgggtggggctagttatacaaattttgaaatggaaaacacgtgggtgtcccc

SEQ ID NO: 35279 - DNA, 302 bp, Gossypium hirsutum
  unsure (1)..(302): unsure at all n locations
  Clone ID: LIB3147-039-Q1-K1-B12
naggatgttaaccgagagcagccgggttacttggcggcgccatatcaaggaatgccacagatggcggcatctggtagtgtcccggtggtcagtcaatatagtgaagctaatgttaatgctcatgcttctacccaaacttcttctctgtgatttcaactaaaatatgtcagtgtcggtttgtttataaagttataattaaaaaaaccactctgaatcaaactgaatatctttataggctatggcgaattcttcaatttgttatgtaacttttaagccatttattttaaacatttctaacagat

SEQ ID NO: 35280 - DNA, 252 bp, Gossypium hirsutum
  Clone ID: LIB3147-039-Q1-K1-B3
cccacgcgtccgatgaatagtcatcgactttccggaaagggtagaagaatgggacctatgatgggacctaccatggcttacaagcctattgatcattacgcttcaaccgggttattctattccacctcttaaaacgaaaggaacttaaatcaaaatacttaatagcatggcgatccatttatacaaaacttctaccccgggcccccccatggagccgcagacagtgaaagtggaaatcacaatccatgaaat

SEQ ID NO: 35281 - DNA, 385 bp, Gossypium hirsutum
  Clone ID: LIB3147-039-Q1-K1-B6
ttctgtttgggctttatttccgaaaatcttttgatttcctattgctattgtctatctctgcatgttttctttgtttgcctttgcgtgttgcactttctgttcccctttatggtctgtttgcaggttgggaggagggtcaacgagagaggcttccgttttggtgcaaaggacgggcaaagcctatcctcgagtgtccaatgcgctgctgaagcacatgggcagtaaaggggaggcgcggcgctgacgctagctaaggtttcggctagctgagacccaatttggacattgggcctattgggccgattgggttaggggtttagggtctgcttgtaaaatgggtaggatcttgagtttgcgttttatgtcaaatggactatctttatta

SEQ ID NO: 35282 - DNA, 271 bp, Gossypium hirsutum
  Clone ID: LIB3147-039-Q1-K1-C10
atcgcctacgcgtgacgggacgtagatggaaaattagaatgatatatggaagttcagtggaggagcaagctgaaaggaattgaccgcacatccggatgttgatggctttatggatgaaggagctttcgtaaaaccaaagattgttgatgtgatcagagctactatggtgaaaaggacttataatttagaaagaaggagtgacaggtgaaacgtgaccatccttctgaaaaagtttaagtactcgtgtgaacaactcaccttggaacctaat

SEQ ID NO: 35283 - DNA, 300 bp, Gossypium hirsutum
  Clone ID: LIB3147-039-Q1-K1-C2
cccacgcgttcggctattcttccgggagctcaagtttccactataaccgtccaagggagcgccccttttggagaggtgtggacaaagtctatcgctgctgaagctgttcctggacctgggattggttctgccgctggtcgggggaattcgacaggtcctcttggttaaacataaactggtctttctaggccatgtcctggtgttggtcgacccgcaccttgtaggaaactttaatttttgtagctgacagcttttcttggaacctaaatgttgtccaaaaacttccgctgtaataaggcc

SEQ ID NO: 35284 - DNA, 327 bp, Gossypium hirsutum
  Clone ID: LIB3147-039-Q1-K1-C5
aattgctaaccttctctattggtttgactggaagttgcctcctcatatctctgctcagaacttggacatcactgaagctttcgggttaggcgtttgcatgaagttccctctttgtctcctggcaatgccttatcgtccttagtccacctagttaacatttccaattcaagtccatttcgctctcacctaaagccatttactatgctatgaaataataaaggaaaagaatattagagttatttaagggtactagatcgagcacataatctgctctacttgcaccacattgttttatgattgaatttaactgtgtttgtttccatgtga

SEQ ID NO: 35285 - DNA, 388 bp, Gossypium hirsutum
  Clone ID: LIB3147-039-Q1-K1-C6
gatcgttaaccctctgtatgggtgggactttgcctggcctcacgatatctctgctcagaagttgcacatcactgaaactcccggcttatgcgtttgcatgacggtcgctctttgtctcctggcagtgccttatcaagcttagtccacctatgtaacattgcccattcaagaccatttcgctctcacctaaaggcatttactacgctatgaagtagtaaacgagaagagtattacaggtattgaagggtactagatcgagcacatactctgctctacttgcaccacattggtgtatgatagaatttaactgagtatgtttccatgtgatagggaaaaagaactggacgatgctggatatatggatgcccaacaacagccttaatttact

SEQ ID NO: 35286 - DNA, 370 bp, Gossypium hirsutum
  unsure (1)..(370): unsure at all n locations
  Clone ID: LIB3147-039-Q1-K1-D11
cccacgcgtccgcccactcgtccgcccacttgtccgcccacgcgtccgcccacgcgtncgggatcttgtaccgatactaatagtgcaagggccccagatagaatgttaggtgaagtgagagggagtaactccaggtgcatggcttcatcattagtacgtactggttttgtgcggggttccgtgacccaaggaaacggttgttaccagcacagatgtgtaaataactcattagaggttgctgtggatggtatttggaaagtgtgtcctaaatctggtggaccggttcagttccctggttttaatggtgaactgatttgtactgcttaccacgaactctgtagcactggcactgtttccatgtccgggcaat

SEQ ID NO: 35287 - DNA, 408 bp, Gossypium hirsutum
  Clone ID: LIB3147-039-Q1-K1-D6
tcgcgcaggaaaacgatggactcttggatgaaaaacaaaatgtgattgaacaaatgaaggacaaagttgggggaacccttgcagaaatggagaatgttatggccagaacacgacgtgaagcagacaactcaaaaaagtttgctgtacagaattttgcgaaggacctattagatgttgcagacaatttaaaaagggcttctgcccatgttaaaggcagtttctctaagatcgacgaatccaatgatactgccggagctgtaccactccttaagacactcctcgaaggagttgaaatgactgataaacagcttggagaggtgtttagaaagtacgggatcggaaaattcgaccctacaaatgaaccatttgatccaaacatgcacaatgcagtattccaagttcctgata

SEQ ID NO: 35288 - DNA, 308 bp, Gossypium hirsutum
  Clone ID: LIB3147-039-Q1-K1-E1
gtggtgtttataaccattttcatagggtatctgatagctgctgataaaaaactgccacgggtggctgcatctgggagtgtgccggagttaagtcaaaatggtaaggatgctgcaaatgctaatgctcctccccaacttccttttttgggaattcaattaccatttggcaggattggtttggttatcaaggtataaatataatataagactttgaataagactgaatatttttataggctttggtgaaatcttccaggcttattggacttttcaacatttattttaaaaattttggtgatgttacgttg

SEQ ID NO: 35289 - DNA, 283 bp, Gossypium hirsutum
  Clone ID: LIB3147-039-Q1-K1-E4
cccacgcgtccgctgacactgaagggggttaatgtgaccttaagaccttgcggcgtcactgcgatgctatcatgtgctgcgctctcaaggctttgccagttcatacttttgcaaatcaggctggccttgacatgctggaaacgaccctgggtgctatgcaggacttgactttgggaaaaatatttcaagaacatggacgaaaaaatttttgcaccgagtttccacagaatattcacaaggggtttgcttggtaccaggtgggatctgtttgtcaaacatggga

SEQ ID NO: 35290 - DNA, 280 bp, Gossypium hirsutum
  Clone ID: LIB3147-039-Q1-K1-E5
tccgccactagatcgagagagtgccaccgggtatcttttatctgttgttaaaaaactggctgcgggtattttattacagactgcgagcacaaagatatatcatctccaacattctaaagaaacaaccgcactaactataatgctaacaactattggtccactcaagaagcagacccctggtactgtatctcacttacatactatagccactactcgctcttgcattacaattggccgactagacgatgatacatcgatacccactgataataccttccta

SEQ ID NO: 35291 - DNA, 314 bp, Gossypium hirsutum
  Clone ID: LIB3147-039-Q1-K1-E7
caggatgtttaccgagagcagtcggtttacacggcggcgccatatcaaggaatgccacaaatggcggcatctggtagtgtcccggtgttaagtcaagatggtaaggttgctgcgaatgctaatgctcctccccaaacttcttctctgtgatttcaattaacaatttgtcagtattgttttgtttatcaagttataattataatatagtactttgaataagactgaatatttttataggctttggtgaattcttcgatgtcttatggaacttttcaacaatttattttaaaaatttttgggtgatgttacgtttg

SEQ ID NO: 35292 - DNA, 343 bp, Gossypium hirsutum
  unsure (1)..(343): unsure at all n locations
  Clone ID: LIB3147-039-Q1-K1-F11
accacgcgtccggaattattactgngcgagctttttgagcatggatgtgacgtcagcaagagttgaactacgtatcttgatgacattgcatcttgctttacaagttatggtggctgacaaaagactcatttttacaggtttcctcgatgccgaaccagttcataaccttttgttaggcagaacaataaacactgctgctgaagtgattcaagtatttttttgcgatgattgctgtagctcataaacattgttataaatgttttgctagaaacaagaaagggaaatttagatatgccaaactcttcgacctatgactgttggtgtatgagtgagtcattttatg

SEQ ID NO: 35293 - DNA, 254 bp, Gossypium hirsutum
  Clone ID: LIB3147-039-Q1-K1-F12
cggacgcgtgggtgggatcttgaacacatcttataactgctataacagacactgaccacgaggcgcatgctttcggcgagtgagccgtcatcagtgcagcctatcaaagccgtgacatcgtcactggggtaccacactgtaaggacgccctcagttaccgctcgccctcaaagctcaaggcacctttgggaggttaggataagaatatacaccagtatggtctctgtcgacacactggcactcgttacaattac

SEQ ID NO: 35294 - DNA, 267 bp, Gossypium hirsutum
  Clone ID: LIB3147-039-Q1-K1-F2
cccacgcgtccgaattattgcacggtgaataattatacagcccagaggacgacagtggggatcatactaaacagaccggtgacgctaactttatggttatacggcaaagaatgcagacctttgcagctagggccaacattctcatggcacctgtattttgaagtttcagataagatcctattaatagatggttaagctaaggatgctttttttttttcgactatctgcatattctgttgtacgccttccagatccctaaacagcata

SEQ ID NO: 35295 - DNA, 389 bp, Gossypium hirsutum
  Clone ID: LIB3147-039-Q1-K1-F4
gccacacccacaggtcaacccgttgggtgttgcttagcctagagaagttttgctggaagagcgcggtcaggattggcgaaggattgatcttgaactataacggcgttggatggacagaccagaaacagaggaggaaaagatattgaaagaagaaatagataatctgaagaaagagcttgagaaggattcaactccagcttcggaatctgctttggaccagtctgctttacgtgacacactacttcataaggagagggaactagagaaacttatccgaggtttggagaacaaagttaaatttgggcaaaaagctgttgaaaggcctggttctggatcaagcaggattggcggcagctactctgatagaccaccctctcagtctggttcta

SEQ ID NO: 35296 - DNA, 118 bp, Gossypium hirsutum
  Clone ID: LIB3147-039-Q1-K1-F5
cgatccaaggcatggcaagtacatggctgtctgcctgatgtatcgaggagatgtggtgcccaaggatgtgaacgctgctggtgcttccatcaaaaccgaaaaggaccgggcggttggt

SEQ ID NO: 35297 - DNA, 189 bp, Gossypium hirsutum
  unsure (1)..(189): unsure at all n locations
  Clone ID: LIB3147-039-Q1-K1-F9
gtttgctgttgctagggttntgacatacatatgcggtagctctgttntatgaaggttatgtttcattttaatatcaattagaacccttcatttatactttttagttttatagtcaccggatgaatatgggattctgttttaaatcttgttttttctacaaatgatagccttttgtgataatattttatc

SEQ ID NO: 35298 - DNA, 286 bp, Gossypium hirsutum
  Clone ID: LIB3147-039-Q1-K1-G11
ctgtcgcgtggagcctacggacggagcgtattagcagctaaagatccttactgaacatgagggagagagatcttgcgtggcgcagctatccgcaggaccctgacaagaaacagagatgagtgattacgatcaacatgcgccgtgagctggtgccactactactctcgggtattcaccggaaggatattcggatgatgctgatgcaccacggggatatgctccaccacgatctgctcaagggtattctcctggaggatgttctcctaattacgcccctcaatatact

SEQ ID NO: 35299 - DNA, 198 bp, Gossypium hirsutum
  Clone ID: LIB3147-039-Q1-K1-G5
ctctcgcatacgaatgtacgaatggagttgtaaacgttcaggacctcttatccttaagaagagagacaatcatttgcgctgcgggatcttattgagcagctatattgttactgaagaagtttaattacattctccaactagcctcagattgtaagtttactcctcaatgttatctaccgaccttttatgcagataatg

SEQ ID NO: 35300 - DNA, 238 bp, Gossypium hirsutum
  unsure (1)..(238): unsure at all n locations
  Clone ID: LIB3147-039-Q1-K1-G9
cccacgcgtccggtaactttaaccaactctacaatactgggttatatacatnngggactgagaacactgtggcctaatgatcctgtgttcaaggatgaatccacttcaacttgtgaaacatacgaagtgctactattgacataatacctatatatatattctgcataagaaaataacattcatcatacaaaataaagagtgtagttgaacaaattgactatttctttgagaccttttt

SEQ ID NO: 35301 - DNA, 264 bp, Gossypium hirsutum
  Clone ID: LIB3147-039-Q1-K1-H1
gtaacttcagccaactcgacaagcacgaataagctaaaggggtgactgagaacactgtggcctaaggatcctgtcttcaagcatgaatcggtttcaacttgtgaagcatacgaagtgctactattgtgttaatcctattatatgtattcgtcatcggagataaacattcagctgaagagtttgagtttattgatataattttttttttctttgtgatctttttgaattgatgcatttgagtacaaaattggtgttgattcgtgt

SEQ ID NO: 35302 - DNA, 283 bp, Gossypium hirsutum
  Clone ID: LIB3147-039-Q1-K1-H2
cccacgcgtccgattttatcaagtgtgatttgtactttatttttgaagaaatctgaaatgggtaattttactttctggtaaaaaaaaaaaaaaaaaaaaaaaaaaaaaaacaaaaaaaaaaaaaaaaaaaaaacgcgcgcacaaataaaaagaaccatacatacgcacgcatgcaaccaaaaacaaacctacttataaaaacccaactaaattcaatccactcgccgaaaaaaaacaacaaaatgccggaaaaaaccctgtcctaacccaaataaatctcctt

SEQ ID NO: 35303 - DNA, 280 bp, Gossypium hirsutum
  Clone ID: LIB3147-039-Q1-K1-H4
cccatgcatgcggggatataaacaaggggtctaattattggaccacctatagcatcggggattgttgctatgagggaacctatgaagaaacccaataaattgccatcggaggatttatcttaggagtattgtatggacactgtgaagaacacagtggatactcatgttgatgctgaccaagcatgaaaacttgcttagattatagacgatcttggaaccactggtggtaccttgactgttgtaatacggctactggtacacgtaggggagcatgcttggg

SEQ ID NO: 35304 - DNA, 337 bp, Gossypium hirsutum
  Clone ID: LIB3147-039-Q1-K1-H7
cccacgcgtccgcccacgcgtacgcttggcttcctggtttgattctggcactaggttctacaagtatgcacgagcggagcatagagagaccatatttgactgcattggatcacattaagctccattttccatcatggcccctaattttggcaaagatcgagcttgctgaaatgagtgaacatgatgatctggaagaggatgatagagtttctgaaccagaattcaccgagttcaagaaactcatgggaattatcatttcattgttaaagggaaatcgcagcatactggatgcagttggcgttatcttcttggcaacctcagttgttgggctagatag

SEQ ID NO: 35305 - DNA, 241 bp, Gossypium hirsutum
  Clone ID: LIB3147-039-Q1-K1-H8
ctcacgcgttcgctcacacgtacgttcaggtctgtgtcttgaaaaaggcgctagggtctaggactattcgcgagcctaacgttgctagaccatataagactgcattgaatcacatgagccttcatacccgtcagggctactaatcactgcatatatgaaggtgagctacatgagcgaacactatgctactatacaggagcagtcagtgcatgaaccagcaagtacctatttgacaaaacta

SEQ ID NO: 35306 - DNA, 281 bp, Gossypium hirsutum
  Clone ID: LIB3147-039-Q1-K1-H9
cccacgcgtccgacgagaaactgcatccgctagtccgaagctagctttggcaaacgcaaagcggtacttcgaggatgttattgcccatacgcacgcaattccataccgacgcttctgtggcggagatgggcgaaccacacaggctaacaatcgactttctaatggacaaggccgctggcccgtgaaatctgcaaaattgattctagatatgctcaataatgccgaaagcaatgctgacgtaaaaggtacggatgtagactcacttatcatatctcacatgc

SEQ ID NO: 35307 - DNA, 439 bp, Gossypium hirsutum
  Clone ID: LIB3147-040-Q1-K1-A10
cccacgcgtccggctatgagttgggacaaatgtacgattcacatcttgatgcgttccctgtcgaacaatacggtccccaaaagagccaaagggttgctacctttttagtatatctgtcagaggttgaaggaggaggggaaactgcatttccattcgaaaatgggttgaatatggatggaagttatgatttcaagaagtgtataggtctgaaagtgaagccacgcatcggagatgggtttctgttctattcattgtttcccaataatacgatcgatacggcatcacttcataccagctgtcccgtaatcaaaggtgaaaaatgggtggttacgaaatggatcagagatcaaaaagattttttttagggatcgatcccttcccatcagtcaagttgtcccagagtttttgactgggttctcctcatatcgccattaaactt

SEQ ID NO: 35308 - DNA, 361 bp, Gossypium hirsutum
  Clone ID: LIB3147-040-Q1-K1-B12
cgcagatccgtggcttgtgtagcttacctgctcatcgatctttctatacgcaagtgaaacattgcagtattcgcaataaaaaaaaaagaagcaaatagttcgaaattgtcactctttagattgcagtgatgccacttcacctgaggtgagagactacaccaactctagaactagggcattgttgtaacttttttgtgtactaaaatacaccaaagttctgaaaagtttttctgatgaaaaatagtttcccattaaaaatattgtcgttcaattttaaaactattgttttttacaaagtaattgtttcaagtttcaacaacgaactagtttgtaggcaatgttatatgggcttgaattaatt

SEQ ID NO: 35309 - DNA, 168 bp, Gossypium hirsutum
  Clone ID: LIB3147-040-Q1-K1-B5
cccacgcgtccgatcgtagaatacattttcttgtgatttaaggggcaaaaaaagggaaatatttccttaatgcttttcaaattcatggtataattagtgtggcagcatgaatattatgtttagctgttgacgaaaagtgtgttcagaatatcatcaaaccatatccat

SEQ ID NO: 35310 - DNA, 388 bp, Gossypium hirsutum
  Clone ID: LIB3147-040-Q1-K1-C1
tcggccacgcactcatgcacgcgtccgtttagttttaaatctcatgtgcacgaaccgacgacatggggtggaaacctgggccgtgttctctccaaaccaagattaagccataccccaaaacggaatactggcgcggtgtcccaccttcttacatcacaatttatgacgtcgtgcttaagaacaaaggagaagtctaatttacgttttttgtgcatctggggagttgggtgatggaaaccatatcaagtgaagcatataaaactggccgtactgcctgctacaagtacatggactaatttgcagggacggatgcttaacatttgagagtgcgaaaacatccgttgcatgctctgtgtatcaacatgatgccatcctgtgccggcgctga

SEQ ID NO: 35311 - DNA, 285 bp, Gossypium hirsutum
  Clone ID: LIB3147-040-Q1-K1-C2
ctgccatctcttcttttaacaatgctatgttggaggggcaagaaattcgtgtaaacaaggcataaaacggggtgctccttctcatcttgtatccatttcacattcattgcaaagtaggtagttgttttgtttctgttgaatggacaatcactcaacttatgaggttgttgtaattataggaggctgaagcttaatttgttgaactggaaaaggagaaagaggataaacactttttcatttgggaagctgaatctgatgcatattatatcatctcatttttcccta

SEQ ID NO: 35312 - DNA, 243 bp, Gossypium hirsutum
  Clone ID: LIB3147-040-Q1-K1-D7
cggtaattagttaatatctaaatcaaaagtttatgaagcaaagcaaacaccatatggctatggagaaatcccatggattaaaaaaaataaaataatgagagatcatgcagccaagataaatcatcatcatttgatttctgaatctttagaccatcgtctaaatcattgatacgaacttaggtacttgggcatctgatatttgcactagagtcgcattactcctaataaaagaatactacaact

SEQ ID NO: 35313 - DNA, 226 bp, Gossypium hirsutum
  Clone ID: LIB3147-040-Q1-K1-E3
agctcatcaagcgcttctagcttacaaggtcttttagaacttcgagatgcaaagtcaggatcggtgatggaatcacacgactgttctggacagtcagactctgatgtcaacaattccggcggggactgagaactccccttctgaatcctcgacgcgtacagcggcatcacaatggagtctccgtcagaatcacccgcggacaacctgacgaatgatctttgtgccg

SEQ ID NO: 35314 - DNA, 340 bp, Gossypium hirsutum
  Clone ID: LIB3147-040-Q1-K1-E7
cccacgcgtccgcacatcggctgcacctgcttatcatgtgcagtggtattacccagcagtggggacacctgcgtcaccctttcatcatcagcatcatcaggccgttcccttctatggctactctcccacctacattcccacagatatgagctacaatcataagctgagctacagtggaggatcctacatgaatggacatttctctcaagtgtatccagcagggcaggctgtcgtaagtgcaaatacattgatgccaatgtacccgttctatcattaccatcaatcacaaacgatgggattaccagcagcagccacccacatctacccatcaacaacagct

SEQ ID NO: 35315 - DNA, 185 bp, Gossypium hirsutum
  Clone ID: LIB3147-040-Q1-K1-E9
cagaaatcctgatacacttccattggcgctttcccggtaagaacagcgagctcatcaacaggctgtgaaagacatcctgggtgaggctttccggctcgatccttggataagatattggacttggttttgcccatgtcaagtacccactcgagtagcgggatcttaagttgactggtagcgtgaaa

SEQ ID NO: 35316 - DNA, 215 bp, Gossypium hirsutum
  unsure (1)..(215): unsure at all n locations
  Clone ID: LIB3147-040-Q1-K1-F10
attcctcattaaagtgtctcgtagcaggtgcttgctatgagcaacaaagtcttgtatatgatattcacttgttaaggattaacttgctcatttgttcctcatcttcctctcgttttctatgtatgtgcgtggggttttatggtgacaaaaccacccttgctttataaataaattaattgcaccattagtctgtgcattatcagcnnngcnnanna

SEQ ID NO: 35317 - DNA, 169 bp, Gossypium hirsutum
  Clone ID: LIB3147-040-Q1-K1-G10
cggacgcgtgcgtccactcgttcgtccattgtgcggtcatcgattgctttcctttacgctgagctcttcaccatgtactcaagtgcttgctttaattttcacttaatggctcgctatttttttttttcaaggaaaagaacaaaaacttaagttgcttcatccgcgactt

SEQ ID NO: 35318 - DNA, 426 bp, Gossypium hirsutum
  unsure (1)..(426): unsure at all n locations
  Clone ID: LIB3147-040-Q1-K1-G2
ctcttgcggcagtataattggaaagggaggatctaccataaagtcattgattgaagactcccaagctggcattaagatatctgcattggataataatttctatggcttgaatgataggctagtaacacttactggcacactagatgagcagatgcaagcaattgatttgattctttccaagctttgcgaagaccctcattactcacaagctatgcatgctccattttcatatgcagcgacttactattcgatgagctatgcaccaaatgggactggcgggaagtttccaaatcacaatgaggatcgtagcaactccatcacgattggtgttccagatgagcatattgngctggttcttgggcgtggtggaaggaatataatggaaattagtcaggtaaagtgggcccagaataaaatatcggatcg

SEQ ID NO: 35319 - DNA, 414 bp, Gossypium hirsutum
  Clone ID: LIB3147-040-Q1-K1-G3
gatattttaggtggtggtagccccacagctaggccaatcactggtttacttggcaacatttatggcggtcaagtcccttttgctaagccagttgggttcttaccacccgacggtgccgtcccgatccccaacgcaaatggtgctatcccaaccgttaatggtgtcactggtctcccgttggggaccggtttagccgggacggcttttgcgggaaaccctaaccagaatggtcagcctcaattccctgtaggaccagatgggttaggattagggttcgggacgattaccgtcatcgacgatgtgttaaccgttagccctgacttggggtctcaagtaatagggaaagctcaaggggtttatgtggcaagctcagctgatgggacaacacaaatgatggcgttcgcggcgatgatc

SEQ ID NO: 35320 - DNA, 424 bp, Gossypium hirsutum
  Clone ID: LIB3147-040-Q1-K1-G7
ggaatgtatgagcagaaagttctgccaaatcaaccacctttacccccaatgcctcccccaccaacaattttgccagtccaatccgattatttatcttcggttagtggcagtccttccctgttgcaatcttccattcccgtgtcagattccaagtttatgagaacttctatgccttcgcctagtggaactactaggcctccaccatcccttccttcaacaccgcctccatttgcatctagcccatataatttagcttccttaaatacttctgcttcccaaccagcactgtacaatcagtctgttatgggtaaaaccgaacttcctcagggttctattggacctactattgatgctcgtcttcctacttcagctgctggcttggcttcatatccacctccaccattgatgcaatctttagttttta

SEQ ID NO: 35321 - DNA, 268 bp, Gossypium hirsutum
  Clone ID: LIB3147-040-Q1-K1-H10
gtgctagaccagcttgctgattatttcaagagacgcttggctggctaccctactacactgaatgaagatgagtcattgttgtcagatccaaacttgaatcccaagaaacgagttgccactcagcttgttaggttggaaaagaaaattctccatgcatgtttgcaggcaacaatggatctgattgaccagttacctgatcacactgtgtctccatgccctgcaccttatgcccccctgttgaaataaaagtctgctgtattaccagtct

SEQ ID NO: 35322 - DNA, 229 bp, Gossypium hirsutum
  unsure (1)..(229): unsure at all n locations
  Clone ID: LIB3147-040-Q1-K1-H7
cttccgcccacgcgttcgtccacgcgtncgagactattgtgatcggtacatcgaaccatgtgggtctggccaaacgtgtcggttcaaggattttacttaccataacttgctaagtttatggagattccttggaacattcccagaccgaatgctaatggtgaaatgctaaccctatcggagatcgaagctgctacgatgaaggaaaacgagtggctgaaactttgatgtt

SEQ ID NO: 35323 - DNA, 437 bp, Gossypium hirsutum
  unsure (1)..(437): unsure at all n locations
  Clone ID: LIB3147-040-Q1-K1-H9
gaatggtagaataattttttcggtccggcatggacaggaaacattaggtctaattaacatgtctttcaatctaaaacttgtgttttagtttcagtaatcctttgtgataatgtgttgttttgtctgtacgtgaagttataaaattatgtgcattaaagtaatatctacagttttacattttttagtaccccaatctatcattatcaatatacattgtaatatctaaaacacaaaaaaaatggggttggggtttgagcaagctttgttcttgctttggtcgaggttgttgtagatgtctggtgttggatgcaacaagcttgaccttccaaattttatatcatcggtgggaatatattttctgtggctagctagatatatatatttgatttcccatgtatttagagatttttaaaagaattacgtatngtcattttctt

SEQ ID NO: 35324 - DNA, 278 bp, Gossypium hirsutum
  Clone ID: LIB3147-041-Q1-K1-A11
gaacacaaacaatttcccgagtgagggtttattgctaatagacattaaccaacccctaatgattctttcattttgcctcttgactatttcactatccatcatctttttctaattaataatgtttacacatctctacgattcttagttcaaaactatcctcttttattaagatatattcacataaatctgccactgaatgagaaaataacctatcatgttcttttacaaataactactatatgccaacgtaccttgtaattctttaaccatctttattt

SEQ ID NO: 35325 - DNA, 205 bp, Gossypium hirsutum
  Clone ID: LIB3147-041-Q1-K1-B7
aaagtaataactctcatatagggtgacctaaattgcattttactagaaccgccgttttacaacaaactgactggaaaaacctctgttttccccaacttaatcagccttgtatcgcatgggggttttaccagttgggttattaaccaaaaggcccgccccaatcgaacttcccaacaattgcacaagctgaatggcaaaggggacg

SEQ ID NO: 35326 - DNA, 245 bp, Gossypium hirsutum
  unsure (1)..(245): unsure at all n locations
  Clone ID: LIB3147-041-Q1-K1-B9
cccactcatactaagatttctttttttgtttttaatcacagaaagcttttaacaggaancggttgaattttcaaaagatcctgcccaacaaaggtggaaaggttgctgtgccctccaagaataaacaagataaggttgtcaattcgttgtttgaaaagcgtccaatgcatttcggcattggaggggctttacctcctaataaggatctgcatccatttttgaagtggcctaatgttttcgtattc

SEQ ID NO: 35327 - DNA, 264 bp, Gossypium hirsutum
  Clone ID: LIB3147-041-Q1-K1-C10
cacccgtccgccaccctttagtgacgtttaaattacacatacgacgcatctcttcaagactgggcaattcgatgcgcacctgctccctatgaactagctgacgctactacgactggcgcatcatacctgcacataataccatctgcagacaccaaggatcaaacccaaactagcgaaccctagggacctaaacaggcaatcaacatccacgaagatacactcgagcatcatattcgtgctgaacttgagcgcaagataccacct

SEQ ID NO: 35328 - DNA, 211 bp, Gossypium hirsutum
  Clone ID: LIB3147-041-Q1-K1-D10
ggagatgtagagtactagtgtggtgcttctttttctttttactaggagagaactatttatgggagggacgtatacaggaatctgtatcattctaaattccacattttgtcgtttttgtattgcatgataatcccctgcgtttttaggtgaatttccagggctttgatggtatactcatttgctctcatgcaataagaaattggtttcaggt

SEQ ID NO: 35329 - DNA, 288 bp, Gossypium hirsutum
  Clone ID: LIB3147-041-Q1-K1-D12
cccacgcgttcgttcacgaattcgagaaagttttgttttattctacaactgctcagactggtgtgcgtggacctacgtgagtccactatcaatcatcacattgatggcaaattaagtgctagctcggcaaaatagaaggctacttggaaacatcaggattctatgcgtcttttccaggctgcttgtactgttcttaaaaaacacttgaaattcaccatcgcctatatcactccgctattgcttgtactgtagaaagaaaacttttttcagttcatggaaattttgggt

SEQ ID NO: 35330 - DNA, 127 bp, Gossypium hirsutum
  Clone ID: LIB3147-041-Q1-K1-D3
tcgttgtccaaacagctgcttattgtatgagacaagtttaacgagacactggctagcattagatactaagggtacctggctgtcttctatcagccttcggggcctactgagaagatagctcaagagt

SEQ ID NO: 35331 - DNA, 308 bp, Gossypium hirsutum
  Clone ID: LIB3147-041-Q1-K1-E11
cccacgcgtacgtatcactgcagcggcagttggatctggcgccgaagagcttcgtgtataagaagatgccgctctcaaggatgcacgcctaaggtgcgctgagacagcgaaggcaagaatgagcgacgctggcggagaatgtgtaagacacgacctacttgctctgcatgcacacaacggacagctctcggctctcctccgaatggaacagaatgcgggagaggatgataaacgctctctacattctcatgatgatccacacaggctctgcatgcactatatgcggtcaaattgtaagaaatacttta

SEQ ID NO: 35332 - DNA, 216 bp, Gossypium hirsutum
  Clone ID: LIB3147-041-Q1-K1-F1
atttgagttgccaccacctattccctcggatttctgcgggagcacccttcgaccatctggaagactgctctttcatgtacaacgactgtttttgtgggaaaccgcttatagcttgttgatgacatggggaataaaaatttatctattggttcatcggaacggtaatggaaaaccctactctaacacgaaattttttaaacatcttttgtgacgccc

SEQ ID NO: 35333 - DNA, 263 bp, Gossypium hirsutum
  Clone ID: LIB3147-041-Q1-K1-F11
ctgtgaaactatatattaagattgtgcactataaacatgggatatgccgatgaaccatcgtgcgtgtgccatgttcttagggcggagacactgcgaacctatgataagatttatattgattatgctacatgcaatggccatgttgggcgaatgcatcatgacgcaatcccaggcgcagggaacaaattttgaattagacaaactttgacagacgagaagggacaagattgttctgatgcgtgtctctacagccgaagattatt

SEQ ID NO: 35334 - DNA, 144 bp, Gossypium hirsutum
  Clone ID: LIB3147-041-Q1-K1-F5
cttattgcaaggcaaagttctgggacatgctgcaagctaagacgataccacagagtgcaagctgccagttgcctgctcatgaggattgcatagaggattacgcgcgcctaaaaggtgctatgctaagcatgtgcaccctagggc

SEQ ID NO: 35335 - DNA, 274 bp, Gossypium hirsutum
  Clone ID: LIB3147-041-Q1-K1-G10
cccacgcgtccgaaaaaaaaaaaaaaaaatttataatataaaaaaaaaagaaaaaaaatccggagaatgagaacattacagcctattatatgcaaactagattaatatttcatgccataagctcaatttcccttatttggccatcgattttaaacaggaagactctgataaccatcgggtggcgctttttaatgagtctgaatttcatacccctttatcgagatcaatatatttttttattggccccaacaaatacattttcggcactgttgtt

SEQ ID NO: 35336 - DNA, 441 bp, Gossypium hirsutum
  Clone ID: LIB3147-041-Q1-K1-G12
cggacgtggggaaatcctttatatctgggtgtcatctttgtcggtttcttaattattaaggctctatgggtgcagcttgacatttcgggtgaattccgcaatggcgctcttcctgggcttctttctttatctaccaagttccttcccaccgttatgaaccttctcagaaagttagctgaggaggggcaaatgcctgcaactaacagttctcagacaaaccaagcggtagcatccaagagcttccaaaatggaagctccacaagcaatatgtcatcgagtgcttcatccggaataactgcttcagaaaacagcaccacaaaaggagaatgagtaacttattagggaaaaaaatacgttatttgtgttctgaagatgcctgtgttgtgctggcttttatggtccggtgtttgcccgtgtattttatgataacatatacaactc

SEQ ID NO: 35337 - DNA, 115 bp, Gossypium hirsutum
  Clone ID: LIB3147-041-Q1-K1-G3
gggtatccgttatcataatatacttttatggatgtaacttgagaaaactaatttcattcctaaatatttgacattaactatgcataacctgaatatatcattgcttggaacctcg

SEQ ID NO: 35338 - DNA, 219 bp, Gossypium hirsutum
  Clone ID: LIB3147-041-Q1-K1-H12
aaggaaattttatatacaatatctatgcacttatggtaatggacaggcatatttactaacgttgggcaagggtggttttctttttatctttaaacctatatatatttctgttctctcatgaggaatgatcaaggtgatgaattacctctattcatctttattccataatgaaataaataaatgtataaactggctaaaaaatacaaacatgactgcccg

SEQ ID NO: 35339 - DNA, 333 bp, Gossypium hirsutum
  Clone ID: LIB3147-041-Q1-K1-H9
acgcacgaacttacgaccactcttacagcataattgtcaattccgtctacctagaatggtattggggaagagaaaaaactctctggatttaacatatttcaaaaagacactactgctttcatgtgatttaatgaatacaaaactgaaagaaatcaatatagacgatttaataacaaaagcaaatcacgccctggcaaggaaattcattatggctgaagaaaaagcagccaaagcatttctactagctcaacaggcagctgaaaagaatcccatcgatcgtgtaaagacagcagagacgaaggcagcttcagcatcaacaagcggttcatatgt

SEQ ID NO: 35340 - DNA, 374 bp, Gossypium hirsutum
  Clone ID: LIB3147-042-Q1-K1-A1
cccacgcgtccgagctggtggtgcctgggataatgcaaagaagtttattgagactggagcgcttggtggcaaaggcagcgaatctcataaagcagcaattactggagatacagtgggagatccattcaaagacacagttggaccatcacttcatgtgctcataaaaatgcttgctaccataacacttgtaatggcgccagtgtttctctgagactttcgtttgtttatatatatatatttgatggagagttgagtagcaggctgcataccaacatacaggcacccatcaccgagttattgttagggtattactattttgcacatacacaacagattgattgatagataggtagataggtatttgatgtctatca

SEQ ID NO: 35341 - DNA, 386 bp, Gossypium hirsutum
  Clone ID: LIB3147-042-Q1-K1-A10
tcaaatctcagagtcgaactcttcaaaacttacggcagcacccttgccggactgcgagcgggagggtgtgacatcgatgccgatgattaccacgggtacgtccatgggagattgtcatacgatgtgatcaagccagaccctaagctacgtactatgttacgtatcatctcccaaaggaaaattatatgtacgaattcggacagagttcatgcgattgacgtcatgaaaaggttaggaatagaagactgcttccaccaaatcatatgtttccagacactgaatgctaatttgacagatataaagtgcgtggttctgaatgcgtcgtcagatgccatcaagattgctctgtacgtcgcacgtgttgattccccacgcacgctatttct

SEQ ID NO: 35342 - DNA, 200 bp, Gossypium hirsutum
  Clone ID: LIB3147-042-Q1-K1-A12
acgcccacgcgtccgaataaataaaaaaaaaactttataaaaaaaacaacaaaacatacaaaatcgtgaggtgtaatatttctgatgtgtgtccacctaaaaataagttcactggccattgctttacaaatatcgtgactgtggactcttttactggtaccattcttaatcgccttctttcacattaaaataatttttat

SEQ ID NO: 35343 - DNA, 163 bp, Gossypium hirsutum
  Clone ID: LIB3147-042-Q1-K1-A3
ggaatattcaaggacaggttttataaattgtgttatggaagcacttattaaaccccataggtggatgccgtgaaagggcgacttttcatttaaaacactcttctatggagaatttgggaattctggtcttggatccattccattgaacagagttccatggagt

SEQ ID NO: 35344 - DNA, 442 bp, Gossypium hirsutum
  Clone ID: LIB3147-042-Q1-K1-A5
acgcggacctccacgcttatcaacgtcgttacctattctgagatcaacgccattcttggggtgggggctaactttatagggcgactgggatccattcgcttttggttaattcagaaattgatttctcggaccgattacttagtttggaaattttggggacaataagatggaacctaagatttgcttccaatacaaaattccagttaaagtcattggcggccaagctttggatagataattgggtcttttgcctcatccgtggccatttgaaactgttcataaagagatggataaaaagcctgttacagttaaaaccgaggaagacaaaaacataattaaatccaatgaggcgggaacgaccacttcaactcttgggaatctaaattagctgtttgaagagagctgcactatcacgctttaagaatttcatatactgaaggga

SEQ ID NO: 35345 - DNA, 178 bp, Gossypium hirsutum
  Clone ID: LIB3147-042-Q1-K1-A7
aaaaaaagagagagaggaaaggatataagatgtaagagggagaaaggagaggggagaagggagagcaccggccaggggccggtcaccggccggcttctccgccaatgggcttgccgacgtgcacggctgccggagagggtattgaattgaacagattgttacaggtgggggagaagta

SEQ ID NO: 35346 - DNA, 261 bp, Gossypium hirsutum
  Clone ID: LIB3147-042-Q1-K1-A9
gcttaccttgatcacacacaatcggttttagttcaacaaggattctcaactggacagaacaggacttcaactgtcatacgtcaggcaccgttctcatccggcgataggactgggcatgtgaacgctcaaaacggtaatcaacatgtcaactccctctttgttgacaatacagtaagggtcaaatctgagagagttgctgatgcaccccctgccaatctataccctgctccctttggacaaaaggacctaatgagtgttttt

SEQ ID NO: 35347 - DNA, 185 bp, Gossypium hirsutum
  Clone ID: LIB3147-042-Q1-K1-B11
cccacgcgtccgcccacacgtccgaagaagtttgtggaagatggaaaaatcaaatacataggtctaggtgaaactacacacgtgactctatcgattgcacactctaaaaatacccttactggcgtacaacatcaatggaccgctttatactcgagagaatgctgaagaactatttccgctttaca

SEQ ID NO: 35348 - DNA, 237 bp, Gossypium hirsutum
  Clone ID: LIB3147-042-Q1-K1-B12
acgcttacatttactttcaaacatacgactagcttatcgcactaggaacaccctaactacactggggcgcctgatattagccctgctggcttctttacccctatcagggagcgcaacacatgcgttcattataccacagtgctcagttgctcctagtgcacattattccaaacttactcccaccagcacattaatgggctctaaacatccaaccactcgagcctacatgctacaact

SEQ ID NO: 35349 - DNA, 240 bp, Gossypium hirsutum
  Clone ID: LIB3147-042-Q1-K1-B9
gccacgcgttcgtcaggatacaataaaagccattccaccaaaaaataagtcaatgaataaagcgagtggtgtccgtgtcacgaccaccactttattctatgtactttgaggcattgccggatactcagcattcggaaaccacgcaccacgaaatttccttacagggtccagttctacgaacccttttggctaatcgacttcaccaacgtctggcttgctgtccaccctatttgtgcatac

SEQ ID NO: 35350 - DNA, 278 bp, Gossypium hirsutum
  Clone ID: LIB3147-042-Q1-K1-C11
gccgaagctgcggcatatcctttatagtactctctactgtaaacatgaacaaggcgagggtgaccaaggtggtcggtgcagtgtgcaccgacctaaatggtatcatcagaccaaagaagaacgctgtcctcactacaactaccacagacgacaaacggttactaagcaccctcaacataatacgattcactgctgttcccgtaatcgaggaagtcaacactcttcacgactacgaagatatgcactttatgaatggcaaatgtcacgcatcctttggt

SEQ ID NO: 35351 - DNA, 269 bp, Gossypium hirsutum
  Clone ID: LIB3147-042-Q1-K1-C7
cccacgcgtccgccagcaccagctttcggcattggcaaccataaacacaagtcaggtggaggaagttctgtgaagaagaaagcaaagaggcgaaaagattcggattttgttttaacatttctcatgtcccgaaatcggtttattcgaaccacatgatggtaagggggaattggttgagggtgtgcttttgaggtttgatgcgcatggagtagaggtgttgaaacggcgcattctcttattattcaaactatgataattctttaattgtt

SEQ ID NO: 35352 - DNA, 277 bp, Gossypium hirsutum
  Clone ID: LIB3147-042-Q1-K1-C9
acgccacgcgtacgtatagatctttatctcttttctttgctatccttttcaatgtctcgtcggtgcacaggaatagggaagaccaaggtcttgttatgaacttctacagggatccttgtcctaacgttgaaaccgttataacggtgcagtttcacctactgttcatcctacacaaaatccctgttttttcttggctgagaaacattttccatgactgtgctatccacccatgtgatgcttcattgctgctggactccacatgaacgagctcttctta

SEQ ID NO: 35353 - DNA, 127 bp, Gossypium hirsutum
  Clone ID: LIB3147-042-Q1-K1-D11
acgcttaggctatatggactatacgctacacttttctgcagggacgcctgcgtcataggagaagagtgctcacgatagaacgctctgctaactctttgaacgaacacgcctaattcgactgacatac

SEQ ID NO: 35354 - DNA, 359 bp, Gossypium hirsutum
  Clone ID: LIB3147-042-Q1-K1-D12
gcgcaagcatgttcatgaaactgggctttcttagaaaatcgagttggttattgtgtcccctgtgctcaggactatgcaaactggagtgggagtctttggtagtgaagggtataaagatgggatagatgtacctccattgatggtggaaaatgcaggtgaaagtaaccgacctgcaatttcaagtttgaattgcccgccatttgtagctgttgaactttgtcgagaacatttgggagtccatccatgtgatagaagaaaaagcatcggcgagtatcggcctgtctttcctgcaattgatttttctctgatagcaagcgatgaggataatttgtgggaagcctacagtagagaaaagaatg

SEQ ID NO: 35355 - DNA, 373 bp, Gossypium hirsutum
  Clone ID: LIB3147-042-Q1-K1-D3
agggaaaggcaggaagaggatcctttggtgattaacagcaccaatgtttttgctgctcttgggagtttgaagaagaagaagaagaagggaggtgaaaaggaaaatctgggttcatcttctaagagcaaagggttgaaaggattgggaaaggaagcagagaaaaaagaggtgttttgggccccatcacctctaaaggttaagtcttgggctgatgttgatgaagaagatgatgatgattattacgcttcaatggctcctcctggttctgcttggggccctcctaaagaacctgaacctactttagaggaaagtgaaagcgaggaagatggtcttgaagaagtcgatgatgaagttgaagaagagcaatgaaacg

SEQ ID NO: 35356 - DNA, 461 bp, Gossypium hirsutum
  Clone ID: LIB3147-042-Q1-K1-D9
acgccaaaacgcctctaaagatctaatcccttatcttgttctgaactcttcaaattaggcaacgggaagataacaccgaacagatgaaaatctgtttcctcgaattccgcgctggcgaattgctagccatcttgcgtggcaccaatgccccgtatggaactagatacccaatcgatcgagaagaaatgatgcctcacgatctttactatgaaagggatacaaactacatgtgtcgttggtggatctcaaggctatatccattttgacataacactcatgagggcgtcgatctggtggtgaagggacctaccggcgatcaaatacaacactcttgagacaagatatgtgagaaatttgcgtgtggtgctcatcaaaaaggaatccaccattcttgttctcagaataaatctccttactatgaaacggtcgactatgatgtacatgaaagtcattctacatac

SEQ ID NO: 35357 - DNA, 237 bp, Gossypium hirsutum
  Clone ID: LIB3147-042-Q1-K1-E11
acgcccacccgtacggaatttccttgctattaattttacataaccaactgggctcgccttccgcgggctcgtaactatgcaacgaagagtgatcgtcccccccacatgctctagcagacgcagttgctaacaacaaacaacatcaactgcaacagaatctaccatcgcggtcaacattctctcaatgtgaaccctttcgcctacctacaaccaacacaacagctttcatataccacc

SEQ ID NO: 35358 - DNA, 250 bp, Gossypium hirsutum
  Clone ID: LIB3147-042-Q1-K1-E8
atggtaaagctcttctttttaccttctttcttcattttacttggattatggctaactagatggttcccatatgaagaagattaccactaatcctttgttttgttctgttttgaggttgttgtgacattgtgttggccaagaaagcaagtcctttaatgtaacctttgcagctcttttctgctaaaagggtataataaatgaaactcttaagttcctttggaaaagacatgaacgaggtatatttactgtt

SEQ ID NO: 35359 - DNA, 413 bp, Gossypium hirsutum
  Clone ID: LIB3147-042-Q1-K1-F10
acgaaatgggtatggaatcagtacccaaggtatctccgactgcaacccttggcacccgcggggtgcacaacagtggtcaaacgggggcttaaacctggtgccgcaacgactttcaaatgccgctgcattacccaaggtacacccaagctgattacgaaaccatgccttaatggaaacttgattgtttgcttaaaaaataccgactacccatcaccggcgacgttgagcagaagagaagctctcccatggcagcttttctgttgcctacgtagctacaaaatgttgcttcatggatcccaattttcctccctttaaaaaaaaaattcattagtctgaaaaggcattgtgtttatgatcttttgcttaatttgactatgaaaatattgcgattttgagccatatgtattttaaat

SEQ ID NO: 35360 - DNA, 343 bp, Gossypium hirsutum
  unsure (1)..(343): unsure at all n locations
  Clone ID: LIB3147-042-Q1-K1-F12
cacgcctcgttggaatgtaaatatattctggctctcttttcaaatcaaatggtttcaactagcaaaatatatgccttggtgctaaactatcaaatctgcttacctcacctaacaaaccacttacaaggggcctcattaagttctgatccatcgcaggatcttataggggatactacccagctggaagatctttatnaacaaccaaaacatggtctttcccaatacaatggtcatatgaactacaaacagaatgggagaacatggtatcaaaatgataggtgtaataaatccaacgttgactttgaaacctctgctgaactaacttgtggtccaagggccttaa

SEQ ID NO: 35361 - DNA, 202 bp, Gossypium hirsutum
  Clone ID: LIB3147-042-Q1-K1-F5
cccacgcgtacggacacaggcgtattatattgacgcaatagaattaatttttcaacggtagaggtaacttactttaggcgccaggcactaaaaaatagatattcatactaccagattatgctatatatactaacaaattgattgtcttcatcaaaaactgcatacattccatctatagtcgtatctagttgaaaggacccat

SEQ ID NO: 35362 - DNA, 253 bp, Gossypium hirsutum
  Clone ID: LIB3147-042-Q1-K1-F8
ataaggcaaacaaagctaacaaagtatccttttcgaaccacatgacaaataaatggcggtgggtcaatcttcaatgcgccaaggtttccttggaatctggtaaacgctatgtaaaactgctctcgtctaccaacgtgttgaataccatctacaccaacggactgtatgctgttgctaacaaagctggaattgatcttcgcaaggaatgataatgtaacctaatttttaaatatcatggtgtattacgaaaact

SEQ ID NO: 35363 - DNA, 296 bp, Gossypium hirsutum
  Clone ID: LIB3147-042-Q1-K1-G12
aggaaccttcgtcttcatggcagaactcagtttgaagtgtttttatttgcttttctttggtgacgaagactgtttcggcaggggcatttataacttgattcctacctttttcaagaacggtgtatttttaaaagcctaaatttttagttaggtccaaggaatatatatcctgttcactttgaactcgcagtaatatgttttatgtactcggtttccaaatttttttgttttaatgtctgattagattccattagctaaaaaaacacttaaaaaaaaaattagtgaaactttttttt

SEQ ID NO: 35364 - DNA, 339 bp, Gossypium hirsutum
  unsure (1)..(339): unsure at all n locations
  Clone ID: LIB3147-042-Q1-K1-G7
acgcggacgcgtgggtgataaagaaagacttttaactgcttgctccccatgccaatatctaggttccgttaatggtttagagcccaccgtaaatcaattatggaattantggttccctcaagttttcaactttttaattaaaggaaatcgccagatttttgcctttccggattacttttttttgaataaagcggattttgttcgctttaattctaaaaaaaaaagattcatagccgttataaattttacccaatcttattttacaaaaagttaaaaataaaaatttaactcatttgggcgttccttttattatcaattatttgtaaaccttttaatttt

SEQ ID NO: 35365 - DNA, 264 bp, Gossypium hirsutum
  Clone ID: LIB3147-042-Q1-K1-G8
cccacgcgtccgggatgggaggattatacattattttatcgagcttggtacaaaggccaaggcgtgcggcttcagaggccatggacacttaacctgcccttggagatattcccgacgaatttctcgatccaattcaatatacattgatgaaggatccggtgatcttaccatcttcaagaataacaatagacagacctgttttccaaagacatcttctaagtgatagtactgatccattcaaccgatctcatattacctcggaga

SEQ ID NO: 35366 - DNA, 413 bp, Gossypium hirsutum
  unsure (1)..(413): unsure at all n locations
  Clone ID: LIB3147-042-Q1-K1-H12
tgctgatggaattttccggtcacttctctactaagggtgcatctccgagtgtgacatcaacgtcnagaggcggccgtaccaccggaactgccgttgtgctctccacgacaagtcgttgggaaggaactgttcacgttcattccctaagagcaagaatgtgtcttatcctatgagaagatcatggagtgagggatgcttggccatggtagcagctacgggttattcttccccgtcgtcttcgccgtctttggctggtgttcacggtgctgggaagcagcaactggaatcgtttaaagaagaggaagataaataatcgaaaatggaagggaacgaataattttttggccttcttttgtgatgtttgggatcatgttttagaataaatactgatcatagggtgagtgaaaggagat

SEQ ID NO: 35367 - DNA, 238 bp, Gossypium hirsutum
  Clone ID: LIB3147-042-Q1-K1-H9
acgcggacgcgtgggcggacgcatgggcggacgcttgggcggacgcgtggggttcaatattcttgcaactgtggggtcgaattatgagcattattctccatgcaattgtaagtaccgtttcgtttcaagtgacgggtccatattatcaaatgaaatacaatttcactcttccattgtttcaatcatagcttgagcttgagacatcccacctctctaaccatctaggctcaaacaagcc

SEQ ID NO: 35368 - DNA, 423 bp, Gossypium hirsutum
  Clone ID: LIB3147-043-Q1-K1-A10
cttttgtgaaagacaaaagctttcaatccttctttgccaaaggctgcacggtcttgcatgtgatcgtggccatgtggaggttctggttcgagagaagagtggaggatttggcttgggattggcttagacaaactgttggcgacattttattgggtctctcttgggttttctttttggtttactcttggagagaaaagtatgactaggtttaggtctattttttttttcttttctgcttaaattaaatttactcttttctctttcctgtcgctgcttctgttctttgatttttatattttgtaatctgtgaaaagtggaagaaggcagcggccacgtgtttgcaaagattatagcttagcctaaatttcaccttcttcattattcatttttaaggttcatatttgaattaagggggttttgatg

SEQ ID NO: 35369 - DNA, 196 bp, Gossypium hirsutum
  Clone ID: LIB3147-043-Q1-K1-A12
cccacgcgtccgcccactcatccgctcacttttacgtttacacatcctttatttctggcggtgcttcttttatgcagagggctgcacacatgcatttgaatctcacataacacatcttgccattggatattaaccttaaactaccattgctttatagaaaattgatccttgtagttcattatctgatatcttacac

SEQ ID NO: 35370 - DNA, 419 bp, Gossypium hirsutum
  Clone ID: LIB3147-043-Q1-K1-B4
gctgagtttaagcatgcatggaatggaaaaaaagcaccaggatatttttatatttgtacattggcattgtaagaaaactgacattttcatttgctgcctttttttttgtgacaaacgagagggaattcacaaaaaaaaaaaaaaaaaaaaaaaaaaaaaaaaaaaaaaaaaaaaaaaaaaaaaaaaaaaaaaaaaaaaaaaaaaaaatataaaaaaaaaaaaaaaaactatatttattgacattaacaaaaaaagggggggcctttttaaagatccaaattttacttccggggggtggaaaggaaaaagtttttttttggggcccccaaattaaatttcctggcccgtgttttaaaaacgtggggatgggaaaaacccgggggtacccaaattaattggctttgaaaaaaatccccttt

SEQ ID NO: 35371 - DNA, 316 bp, Gossypium hirsutum
  Clone ID: LIB3147-043-Q1-K1-C10
gccacacttgcagccacgcgatctgccaaattgatgctgaatgctcaaggcgcaaaacttgtggctctactgatttcacttacatgataaatgaataagggagtgggattaccgcctatgatacggatgacccataagaccaatcatctgcagaatcttatgcaccgagataatgtatatggtcgatcaggtcgcatgcctttttatgcttagagagacacggaatggatgtgtccacgacacaacagctgagctcaactatattgcgctgaacaacttgcatatactaacacatgaagaactctggtaacttgat

SEQ ID NO: 35372 - DNA, 381 bp, Gossypium hirsutum
  Clone ID: LIB3147-043-Q1-K1-C5
cccacgcgtacgtctaaacatcctgattttataaaacttactcattacaacctaaatagtggagcaaggggggaacacatgggttgtgtgctgttcgcacgttgttgaatcactgcaagcatgaatgacgaccttatatgacatacatttgctcttatgtttactacaaatggaagatggcatatttaagcccttaaatgctatatgaatttccatttaaataaaggagacgaggtttaccatggatactatgccatggtacaatttcctagatgtgaattgatcaatagacgggaagaagtactaaaggtttacgtccaaataataggactgtacactacattgacgacaatgatgatgcgtcgattgttctaatcgaac

SEQ ID NO: 35373 - DNA, 429 bp, Gossypium hirsutum
  Clone ID: LIB3147-043-Q1-K1-C9
cccatgctttcaaacatgggagaatattcttttgcaatatgcatgatctttgatgactatggcgagaatgagcactcttatggccattatagttgaatctgcacagtccgaggacgcgataactgtctttattgcaaaaagtgcagttcttgctatgccattgacttgccatataatcatttgttcgttgagaactcgatgcgctatcattgtcccatattttatcagtacctattcgattctttgaaagataccactgtgatcaaatgttgtcacacaatgcactgcgaatgttactatgagatgatcattcgtatcatatattggtgtcctatgtgcgcaaactccgtaataattatgtgtataacctggaatacgatataccaagagatccaacctactgctttgtcttaggactaccggttcatt

SEQ ID NO: 35374 - DNA, 383 bp, Gossypium hirsutum
  Clone ID: LIB3147-043-Q1-K1-D10
aaaaaaaagagatgcgttcgaagaagatggtaggaacttcggcccccagtttgcgtcgaggtccttatgaagttttatgcgtttcaagggattcttctgatcaggagatcaaaactgcttatcgaaagctcgctctcaagtatcatcctgacaagaatgccaacaatcctgaggcttcagaactttttaaggaagttgcatattcttatagcattttatccgacccagaaaagaggagacaatatgacactgcagggtttgaggctgttgaagattcgatggatatggagattgatttgtccaatctaggaactgttaatacaatgtttgcagcattattcagcaagcttggtgtccctatcaagactactatctcagctaat

SEQ ID NO: 35375 - DNA, 331 bp, Gossypium hirsutum
  Clone ID: LIB3147-043-Q1-K1-D11
cccacgcatgcacccattctatggcgaacgttttgacggccgcatcactcaacgaggatcgacttttatcttaacgtactactatctctctcatttgtttccacaaccattgacatgatggccctatctatgtggtaatgttcaaactattgatgctctattcctttctttccatgtatcattcaactatgatgtttaatatgatgtttgcagctaaaaagtgattgtgatgcttattccttatattttctttattttcacattcaaggtattttttctccaccgaaaacatttattttcaataacatgttgaattgtaataaattattaa

SEQ ID NO: 35376 - DNA, 398 bp, Gossypium hirsutum
  Clone ID: LIB3147-043-Q1-K1-D6
tcgcccacgcgtccggtgtaattcattgtcatatttcagatgagtactggaatggttgggggtttccaataggtgaatgatatacttggaaggggattgctaatgggggacatgatgctgttgttgaagttaattgtaatttggtttggccatgacctgactttgctcaattgcattgtgttcttgatgaataaatagccctaattatatcagatatcagtccaccatatatcaattctaataaaagtgaaggagtttcgattttgaaaaaaaaaaaaaaaattaaaaaaaaaaaaataaataaaaaaaaaaaaaaaaaaaaattttatttaaatattttatataataaatttatatatatttttttaaaagggggggcccttttaaagattcaaatt

SEQ ID NO: 35377 - DNA, 105 bp, Gossypium hirsutum
  unsure (1)..(105): unsure at all n locations
  Clone ID: LIB3147-043-Q1-K1-D7
acccacgcgtccggnccgtcttcaactttccaatttcattattatcttaaacctaaactttgtaatcgccgtcaaaattattccatctttgacacatttcaatgt

SEQ ID NO: 35378 - DNA, 212 bp, Gossypium hirsutum
  Clone ID: LIB3147-043-Q1-K1-E1
cccacgcgtccgcccacgcgtccggatacccagtttcatacaagaaccactgtggactttgactgagggatgatgcctcatctgccaacctgctctcctctttttgttaactgtagccgccgcggctttcgtttttttttttttttgaatatgaaaacatgtgtcgatgaataatgcaggatcagtagcctaatacaaattcgacttacatg

SEQ ID NO: 35379 - DNA, 429 bp, Gossypium hirsutum
  Clone ID: LIB3147-043-Q1-K1-F1
gcgaaacttcgggcttaccaccacactgctcaaaccaaggctgataaaaaacatttttcaaacatgggtttggaccttttgaatggaaccgttcgtaacaacttagaagctggagtcattgagcctgcaatgagcaaagtgaagattattcagtttgcaactgaagcagccataacgattcttcgaattgatgatatgatcaagcttatgaaagatgaaagtcagaacgaagagtaggggagatgggacttctgttgataaggatgatggttgtaggttaatacaaaggaaggattgggatgcggttttaagaaaattgaagcaggttttcatgttttttttttgttgttgttatatatcgttttattgggtttaaaacgaatataatgtttgttttcagcgattaatagaccagcgttccgttttttg

SEQ ID NO: 35380 - DNA, 402 bp, Gossypium hirsutum
  Clone ID: LIB3147-043-Q1-K1-F10
cttcgctaaatcatgtgcagcttaaaaggggatcttttcattcaataccgcagcacataacaatgggcgtacatcttttgctcggacactacaactataatgtaacattgacacacatcataaaaatccctttaagactatctcagtgaattaaaaacagcttcatatcactccttaatgtcctaaatattctggacaaaaacccgttaaatatatattcatataacacttccctgctatatatataataatatagtttgtgagtgcagactcctaagattttatgtaatttctattaattatgtgtattaattaaaagtggagagcttgatgtaatatctttctttcttgtttaatactagcatataacagtttatagttaaaaaaactcaattctaaaaa

SEQ ID NO: 35381 - DNA, 399 bp, Gossypium hirsutum
  Clone ID: LIB3147-043-Q1-K1-F11
atcatcgtttgctttatacaaaatctggcaactactcatctacatttgtttacatggactggatattcggtactgacaagggttacagaaaattgaaagcactaaagcgtgatggagtcgaagaagaaagcaagcaaacataaccgagaagatgagttttcgaaggctttgaccggcagaaacaccggttaccgataaaatgtcatgttgaggaagggtttttctcattgtgagcttcttctgcatcttgtgtgcaaatccacctctgtttttttggttgtttaaattgctgttttatgttttgtagcatcataggattaagatttgtttgaacatttagcgacctggtcatctccgtgttcctcgcatgaatgaagttgctgtcttatttttattttt

SEQ ID NO: 35382 - DNA, 403 bp, Gossypium hirsutum
  Clone ID: LIB3147-043-Q1-K1-F12
gaaaaccggggcggaccacgccgtcgataggtcacctctgcagttcttctaaggtctagcggcgacaaagctgacacaaccacgggcgggtctctttatggggggacgactcaccatattaatcatgtcgtgcatcccccgtagacgaaaactcaggacaaagagttattatgacgaagcttttcggattattgcctacccagcatgctacactaaaatactgatacatttgatctgatgcatgctgcacttatctatagcatactatgcgactctgtctgagacatgaaagtatgattcagactcagatcagacctccctttgatcactatgtgcatccaaaaatacgagcacttcatctgcatccacattttgtttgttccatgctttaacaccatgaatg

SEQ ID NO: 35383 - DNA, 389 bp, Gossypium hirsutum
  Clone ID: LIB3147-043-Q1-K1-F5
aatcacaccaacgtgcggtttattaacttgccaatatttagaacacatcaaaacagtaaacataacctcgattgaagtttaagtaacagaaaacaagcactaatcctaaccaactgaaactaaaaaaattctttaattgtacatgcccatttcattaatacattgccccctatgtatgccaaaaactaagctgccaaaacggcaaccaaatctcagaacctcagaagcatttgtgtgtcaatacctttctatatgaaaaaccagcacaaataccaaaattaagctgtccgccaaagaatgcaagtacaacaccacagcaaaaaacaaagtgttgtaatgttcattcatttctaaatgagacttaaaaaccggaaatacctcgcgggtgt

SEQ ID NO: 35384 - DNA, 321 bp, Gossypium hirsutum
  Clone ID: LIB3147-043-Q1-K1-F6
tacccacctcgaaaaaaaaaaaaaaaaaaaaaaaaaattaaaaaaagggcgacatataagggcgagttacaaccatcatgcacaatactctttatagggccctattaatcctgccgcgttttacacgcaactggaaaacctgcttcccaacttatgcttggcaatccctttgcactggcgaatacaaaggccccccgtccccttccaacattccatctgaatgcaatggaccccctgacggtcattaaccgcggtgtggggttacccaggtaccgtaccttccaggcctaccccgtcctttgtttttcttcttttcgcacg

SEQ ID NO: 35385 - DNA, 366 bp, Gossypium hirsutum
  Clone ID: LIB3147-043-Q1-K1-F7
cccacgcgtccggggcatttggactgcctgcatgctttgtagatggaattcattgctcagagttaattgacgaattcattgttgacatttcatagtaacatgttacattttatgagttttacttgttccattatcaatactatgttgattcttgtttgtccaagaaaaaaaaaaaaaaaaaaaaaaaaaaaaaaaaaaaaaaaaaaaaaaaaaaaaaaaaaaaaaaaaatggggggggctctttaaaagatccattttttcctgcgcgtatatgacaatatatattcttttttattgtgcccccaaattaaaatattgtggcccgtgtttaaacaccgagatacttgaaaaaccctggggacccaa

SEQ ID NO: 35386 - DNA, 461 bp, Gossypium hirsutum
  unsure (1)..(461): unsure at all n locations
  Clone ID: LIB3147-043-Q1-K1-G12
gaanncccgcggcgaggcacgcgtccgcaactagcaacatagaaagcacaatagtttaccaacaatggcagccaaaatattttgcggccttatgctccttggtctttctgcaaattcttctacggcgaccattttccttcaatgctcgcaagctactatatcttcccttcttcccccgtacctctcaccagcggtgtcttcgataagagaaaacccaattcttcaaccctacaagatccaacaagcaataccatctgacatcttacctttatcacccttgtccctccaacaatcatcagccctattacaacaattaccttagatgcattcattggcgcaaaacatcatggctcaacaactacaacaacttgtgctagcaaaacttgctgcctactctcagcaacagcagtttcttacattcaaacaactaagatcattgaactcctgcttcttatttcaac

SEQ ID NO: 35387 - DNA, 417 bp, Gossypium hirsutum
  Clone ID: LIB3147-043-Q1-K1-G2
aaactgctatgatgtacaaactggaaaaggtggcaactggggcagctacttttactacggtggtccgggtcgaaatgctaactgcccttgactcatttaaatccttaagaaaatgaaagctaagtaaccatcaactgttgccgaaatgaatattcatcaagccaagtgcatgcccttcttcaagctaagtttagactagtaaatttgtgaatcatggattcaccattagatggtagcaatacaggttaaatcaccttattaactctgccaaagatttgttgtgagaaagtgagggatctctagctgatattctttgtttggacatatgagtgtatattttgattttgctttttttttttggcgtgtatgcgtcattaaattctgcttaagcaatataagcacttgggtttgatattc

SEQ ID NO: 35388 - DNA, 429 bp, Gossypium hirsutum
  Clone ID: LIB3147-043-Q1-K1-G5
cccacgcgtccggggcggctcagttgagagtttacaacttggggaacacatcgccggtcccagtggggcgattggtatcgatcctggaagggttgctgagcacaaaggccaagaaacatgtgatcacgatgccaagaaatggggacgtgcccttcacacatgccaacgtgacgttagccttcaaggactttgggtacaagcccaccacggatttgtccactgggttgaggaaatttgtgaaatggtacatcagttattatgggattcaatcaaaaacaaggaaggaaagtcaagctaccggtgaatccggctaaagaacattgagcttcatcatcaagcacatggttggttgggtgtttttttttttttttgaattttgggtttttggtcctacgaaaaaaaaaaggatcaaagtgttggaggtgttgt

SEQ ID NO: 35389 - DNA, 328 bp, Gossypium hirsutum
  Clone ID: LIB3147-043-Q1-K1-G6
cccacacatccgcttttagtagttatatttgtacttaaaagagcacctataacagagcgtgatcctaaacttgcttaaattctgactgcttttcttttttcttttcctttatttaatcctttatttttggaaacgcggctgacatttgctttgaacattgtttaaataaggctgaactgtttcacttctttcttgtttccatgcgaggacgttatatacattttcttttccccgttggaaagagtttatggatgctttcttgcgatcttttattcctggtatcaaacctttaagcttattgtaaaattttcccttccgatgatgcttt

SEQ ID NO: 35390 - DNA, 432 bp, Gossypium hirsutum
  Clone ID: LIB3147-043-Q1-K1-G9
aacaaatccataatctctgagtcctgtgtttcagttggaaaataccatgtgaaagaaagcgtctcctcaactctacagtcaattttcgataaatatggagacatagcagctaactgtcagttggaatcgtcttccatgcgtgcatattatttagagtgcttgtgtgctgtggttcaagagttgcaatccactccattcaatgaactgaccaaatcaaaagtaaaagaaattttttctgttcttaaggatgtagaatctgcaaacattgatgttagttggctgcgtgctctgctcaatgaaatctcagaagccatcaatcttgctagtcaacgacaaacttttgaagccaaaaaggttaagtatgaaagttcgttagagtctgtaaagaacgaactggaatctcgaatggaaaatctatctcagaaagaaaag

SEQ ID NO: 35391 - DNA, 309 bp, Gossypium hirsutum
  Clone ID: LIB3147-043-Q1-K1-H1
cgatgatggacagcctaggaccggtagggttcataggggagctctgcaacgggttccggctggtgatggactgccaaagaggattgatcacgttctacagcttgaataacaatcgcattatgtcggggttacatgacatgcgggacgatgaaattctttgcatgttgagcgaagggcatttagatggacatggcgctccgaaccaagatgactttcgtatcctgatgcttacgatacgccctgggtccatggatcacatgggatcaccataatgtgtgcaagaacatgatgttctataccactatatat

SEQ ID NO: 35392 - DNA, 288 bp, Gossypium hirsutum
  Clone ID: LIB3147-043-Q1-K1-H3
ctgacacaaggatcacttacagaaagttcactggttcataagttcaaagaaaatggtggccatgtaatggtctttgaggctagatcaatctagagatcaatgactatggatgtgataaagcacacttctttttgcgccacttgcctgaatctaacatagtctgaaattcctgatctcgatgaatattacagaaaggtgatgaaggaatttgccgtggaataggagaaactttcagagcaacttttggaccatgtgtgtgagaatctttggttggagcctggttacctg

SEQ ID NO: 35393 - DNA, 304 bp, Gossypium hirsutum
  unsure (1)..(304): unsure at all n locations
  Clone ID: LIB3147-043-Q1-K1-H9
ccggnctggaaaacccgggcccgacgactgctgcagctcatcaacattgatataactgtttggctataaacaggaaaggaaaatttagatatacagagctcttcaatctatgactttgggtgtatgattgattcattttatgaaatcaaagtttttgaacaagaatacatgtaaagaggactatatgatagaagaatatgaaaggagatccaaaaataaatatataaattttacggtttgaaaaaaaaaaaatataattcataaaaaatgaatcaataaatatataatatatttaatttggggt

SEQ ID NO: 35394 - DNA, 283 bp, Gossypium hirsutum
  Clone ID: LIB3147-044-Q1-K1-A10
cccacgcgtccgcccacgcgtccgaatgcttacatgcctggaaaaggttatactcttcttttagactaaattaagccatggtgggtttgggcttcatggctatcaccattacagtatgcgcaaagagcagcttccattaatgaattcacagctgcaaggtggaaaaagatatctgctattggaaacaatacaatcggatacaatgtgcttcatcaacatggtttaccttccgctaaatattggggtttgcagaaagtcgaagttttggaagttcaggtcaggt

SEQ ID NO: 35395 - DNA, 334 bp, Gossypium hirsutum
  Clone ID: LIB3147-044-Q1-K1-A11
aataatattacatataatccaacacttgatctgagatattcattatcgagtgatgttcaaaccattgcttctgaatctgcttaactatgattttaaagatttcaattgagtatttttcagtgtattttttttatttcaatcttgaaaagaatctagtaggcttgcaatgtcttgataatcatcaaatgatgaatttggaaaagaaatcttaggacaccttcctacatagctttaatattaaagctatggatgagaagaacatttcctttctgatgatgagtgatgaccattatgcaagtaatgtcccctgtaattattctgtttttggtaacgt

SEQ ID NO: 35396 - DNA, 311 bp, Gossypium hirsutum
  Clone ID: LIB3147-044-Q1-K1-A3
gagagatttaaaagaaaaatggctgacaagcgtcttgtattttatcatttgcataaccttgttggttgctggaaaatatggtacatgcccctgggggcccttttatttgcctatttttgggggtttttttattttacaataacacaccgttttcggcatattctgtgaacagaagcagaaaaacatgcgggagcgctctaacgcttaagagccttacgccagggcgggcgtcgctctgacgcctctgtgcctgcttacttgggggggctcgatttaccggggtccagattactgcgctgaagatgcttacc

SEQ ID NO: 35397 - DNA, 395 bp, Gossypium hirsutum
  Clone ID: LIB3147-044-Q1-K1-A8
gtgggagaaacgttccttattacccacaaatcatcaatgagattattagtggccgcttgggaataacaaactgtcatttttaggtttggggaaaagtgtattgggcctcttaaaactgtccctggtggggagaacattcccccccttccatgtgggaaaaaacacttggagacatttttgtctttgggcgcgaactattattactttcttcaaggggggtctctccctctttcttgcttttctgtgttctgatttgaaagaaggattgaatggtggcgaggggtcagaatatctcaatataaggcagtacacttgctgtttatgtctaggatggatgtggactggataatcttggatgtttgaaattcaaatctaaaatctacttaatttaggac

SEQ ID NO: 35398 - DNA, 439 bp, Gossypium hirsutum
  Clone ID: LIB3147-044-Q1-K1-B1
aggggatagacgaagacaaaggtacacaaatcagaaagttgtatgtcgagcttgcagaattgtggccaaatgggatcatgggcaaacatggtataaaaagcgcaatttgtagggcaaaggaacgtagaagggcattgtgtgaacatgataaggttagagagaacaggagaaagaagtcggcacagaaaacaaagaccggtgttgtaaaagcttgttcagtttctcaattgcaggctgagcaagagaatcaagcttctgcgtctagtggtcacgtattagctttgccttgtatgacaatttattgtaaagaaaccctggaccagcaccttgctgcaccacttgaaagttgcagtgtgccaccaaattcgagtctggatatttctgaagaagagaagaatgagaaaatgattatcccaatgctgaaaaagcaaatgaagca

SEQ ID NO: 35399 - DNA, 361 bp, Gossypium hirsutum
  unsure (1)..(361): unsure at all n locations
  Clone ID: LIB3147-044-Q1-K1-C10
cccacgcgtccgcccacgcgtccgcccacgcgtccggattaaataagctgtttgctttctaaagcctgacattattcctattctcactaatgttgattttttggtacattttctttttctggtgctgcataaaactaagaatgtgttgtttttcattaccgactgtctttcacctttgaatttgacgagaaatatgatatgattcaacagatgatactttttcttctgtttgaagctaattaatgatagacaggattttagatgtgagtccnccaaacaaagctctaaaaaatcaaaatttaccatttcaatggaaaacaaataatgatccttggaactgtttgtgggaaaaaccttcccg

SEQ ID NO: 35400 - DNA, 204 bp, Gossypium hirsutum
  unsure (1)..(204): unsure at all n locations
  Clone ID: LIB3147-044-Q1-K1-C11
gaaaaaagagccgacccacgcgtgcgnccacgcgtnncgtcaatggttaaaccctttctttttttgataagggtctggctgatggggttggcaaatttgtccgaatcgaacgttcttatttgattggacaaaggtattctttcttttttgggccgaccgattacatataccatgatgaaattttctttatttgaaactattctt

SEQ ID NO: 35401 - DNA, 347 bp, Gossypium hirsutum
  Clone ID: LIB3147-044-Q1-K1-C12
gttttaaaggtggaaggtttgttgctgttggattgagcttcttggtagtgtttttgttgctctaagttttctagtttcttttttgtttgtttcattttcagtttaatttatatagatactggagaataagtaaaggcttcagtgtggttatatttttttatattgtcttttttttttccttcttttaattgtgattatgttgtttttctcttggatagataaaggaaaggtttgtgattttctttttcttttttgcttggaagtttgattattgatgaaaaggcaaatgctatagatattggaatagacaaagttgtggttataaagtgatttacaggcaatttaat

SEQ ID NO: 35402 - DNA, 314 bp, Gossypium hirsutum
  Clone ID: LIB3147-044-Q1-K1-D11
cgtcaatgaaagaagattaaaggagttgagagagaagcaccgatcagctgtaataactgcagttgaggaaagatcaaagggacttcaagattggaaggattgtcagggcctagcaactaagctatataattttaagcatgaccctaaatcagtgcttaccgaaacaaataagacagtgcagcttgttgattcacaaaaaaatgtggatcgctcttgttccgagtctgggtctgggaatgagaacaaagttcttatcagtctgaatggggatgctgagctagatgcagttccagatcttcaagatcaggttgtat

SEQ ID NO: 35403 - DNA, 292 bp, Gossypium hirsutum
  Clone ID: LIB3147-044-Q1-K1-D12
gctgagtttaagcatatcaataagcggaggagcgactgatgttgtttgtttatcagatgatgactaaccataaccagaaaaggtaattttgtataacatagatgcagttatatgcaatgcccgatccattttgagtcaagaggtagtagttgaaggtcagaaattgaagtgggaatttgcggtgaatagttattcaatttgtaatatatatattaatttagttgaaaaaaaaaaaaaagagaacaaaaaaaaaaaaaaacaaaaaaaaaaaaggggggggagaacctaaaag

SEQ ID NO: 35404 - DNA, 333 bp, Gossypium hirsutum
  Clone ID: LIB3147-044-Q1-K1-D4
aggaaattggggctggtgaccaaggtcacatgtttggctatgccacagacgaaacccctgagttaatgcctctaacccatgtgcttgcgactaaacttggtgccaggctcaccgaagtgagaaagaacaagacatgtcaatggttaaggcctgatggtaagacccaagtgactgttgaatatcgcaatgatggtggagccatggtccccatacgtgttcacactgttcttatttcaacccaacatgatgagaccgtcaccaatgagaagattgcagctgacttgagagagcatgtcattaagcctgtcattccagcaaagtatctcgatgaca

SEQ ID NO: 35405 - DNA, 439 bp, Gossypium hirsutum
  Clone ID: LIB3147-044-Q1-K1-D8
cttgaagcaaggtgttcttggtgctgtacttatcccctcggaagatgcaggaaaagagagggtgattgcttctttggtggctaatgtcgaagcaatgataaaagctgatcgaaaaattactgccttaaagcaattgcaaggtcatatatggcgtactggatttgagaataacgagcttgaaggagtagtttttgatgatgtaccagaagctctcgaaaagtggcatgcactgggtataaaggtatacatatattctagtggtagcagattggctcagaggcttatattcggaaatacaaactacggtgatttgaggaagtatttatctggatttttcgacaccgcagtaggatataaaagagaaacacgaagttatgtcgaaatcactgagtcattgggagttgataagccatccgatatgctatttgtgaccgatgtc

SEQ ID NO: 35406 - DNA, 259 bp, Gossypium hirsutum
  Clone ID: LIB3147-044-Q1-K1-E11
gaaaaaagggaaaaaaaacgtacattgagagagggagcaaacagagagacccaattgaacaggctgaaaccagtgatatggaggagagggcttggagacctttgccttggagaaagctcaagttaggcgttcagagaagtttgaaatatggttatcatttaatgatcccaaaaagattgtttggcctgaaaaggacttgatgagcagtgctatgtgtatggttgcaatgctaacgtgcaaagattgataaggcttactg

SEQ ID NO: 35407 - DNA, 134 bp, Gossypium hirsutum
  Clone ID: LIB3147-044-Q1-K1-E12
tctactagtgttcagcgggtactcgctgtgaagaacgagggttggaggatgtaatgcgctatcgccgactggtcatagagcgcaagggagcttcatggctgagcttgaagggaaagaaaaatcgcttgacagat

SEQ ID NO: 35408 - DNA, 210 bp, Gossypium hirsutum
  Clone ID: LIB3147-044-Q1-K1-F1
cccacgcgtccgagaaattattgagaactgaaattaatttgtaaagtaaaatctgaccttttaaactgcagatatgagtagatcactgcagaaggattttgcaacttaagagtgcatcaggattaataattatagtggatatcaacagtttgttggcgcattcatagaccaaaaatagaataatcaccgaggccttgttaaaaaaaacaa

SEQ ID NO: 35409 - DNA, 319 bp, Gossypium hirsutum
  Clone ID: LIB3147-044-Q1-K1-F11
gactccttttgttatcatataatctgccatgtctaggagaaccggtggggagccaacaggagatactacaaacctcgggcctgctgtacgacacaccgagcatgtttatggaggagatcacatttcagaatctattaatgacactgacattcatgtgactgatctgactggaagagagactatgattcttattacaagaggtatcatggtgaacaccaccagggatcaataaatagctcatgatactatggttacactacatgatgttgccctgagatgtaaggaacttctgatgactgccatgaacatcaaattacgt

SEQ ID NO: 35410 - DNA, 163 bp, Gossypium hirsutum
  Clone ID: LIB3147-044-Q1-K1-G1
ggacattgtatttgtactctagtataatcatgtggataagaggcaacttacaagtccgagctgggatatggaattactgttgataaaaacatgaataatactaaaaatgacaaagcaaattgaagatgcaaaaattggcataattaacttgtacatttaaacc

SEQ ID NO: 35411 - DNA, 253 bp, Gossypium hirsutum
  Clone ID: LIB3147-044-Q1-K1-G10
cccacgcgtgcgaaaaaaaaaaaagtaaataacataaaaacaaaaagcgccggctgtgatgtattgttaaagcgtagctagatcataaatgcttgtggctgctcgattctttggttggctaatcttatggagtagaacgcgaatggaaatgcaatgtggggaaatggaaaaagatttcgtgtcgcaatgttgtaacagaacgaggctaagatgtttcatcagacttaaaaaatagagccagcgccagtttggc

SEQ ID NO: 35412 - DNA, 374 bp, Gossypium hirsutum
  Clone ID: LIB3147-044-Q1-K1-G11
gggagaaggtttataatctgttcttggagtacgctcataaaggaagcttggccgatcaggtcaagagaaatggtggaaacttgacggaacccgatgttcgaagatacgttaggtccatacttagagggctaagcttcgttcacgccaaagggttcgctcactgtgacattaagcttcaaaatattcttttgtctgggaatggcgatgtgaagatagctgattttggattagcaaagagaagaggagaaaaacaggggaggatggaaatcaggggaactccttcgaatattgcaccagagtctgttaaaggaaacgattatgattcagcagtggatatatgggcacttggatgcgccattgttgagatgtttact

SEQ ID NO: 35413 - DNA, 216 bp, Gossypium hirsutum
  Clone ID: LIB3147-044-Q1-K1-G2
cccacgcgtccgaggacataaagtgtgtgatcaactacgattttccttcgagtctggaggattatgtacataagattggtagaactggtcgagcaagagctaaaggaactgcttttaccttcttcacacaagcaaatgcaaagtatgctaaggaccttatcaagctcctgcaagatgctgggcaagttgtctcccccgcattgtctacattggctc

SEQ ID NO: 35414 - DNA, 450 bp, Gossypium hirsutum
  Clone ID: LIB3147-044-Q1-K1-G5
tgagctaaaagtcatcacaactatggaggcaatggtgcaagacatcatgaataagttgatgaaggctcgtgaaatggagtatgaagcagaggagaagagatttgagaagaagaaagctaatgttagaaaagacaaactgaagctggagaaggatgaagctgacttaaaagagaagaatttcgtgggcgcctagtgggagaaggtcacaagagagtagaggtttagggcgtgtttttcggagttttgtttctttctttgggaggtttaggagttcgtcacgttcaggttcagattctggatttacaaggagaagtagatcgagttcagtgttcggtagatcatcgagaacggatagcgactgggatttcgaggattgagtgatggtcgaatgtatcttttggtcattttgatgttagccttcctgtccccattactctgatactacaaata

SEQ ID NO: 35415 - DNA, 196 bp, Gossypium hirsutum
  Clone ID: LIB3147-044-Q1-K1-G9
gttgcagtagaaacatctgtgacagcttagatcatgttatatgttttttatgtcttttttttctattataggaaaaaaagaaaaaaggccatcaatgcctagtgggatcatattgtccacattcctttgttcatatgatgtaaatatattggtctcatcttcattatataatatatatacatatatctattttttt

SEQ ID NO: 35416 - DNA, 267 bp, Gossypium hirsutum
  unsure (1)..(267): unsure at all n locations
  Clone ID: LIB3147-044-Q1-K1-H1
cggacgcgtgggcttgcaatcacaattgtaatagacaaagaattgctttgctccttggtgttgggggcccttatttctcccaagttgttcctatggtaagggccttccttgaccaattttcctgtcctggttttagtgggagttttgcattttcagctccactgttgtagagagattggaatgcctctggacatcaattgtctattcaatgtgtacaatgaaagataaccttttcttttcaaannaaaacactnggatgagaatttg

SEQ ID NO: 35417 - DNA, 356 bp, Gossypium hirsutum
  Clone ID: LIB3147-044-Q1-K1-H3
gtgattacaaagtaataaacttggaccagtggataaattttctacgtttttgccaagagattagttttccagatcttggaaattatgattcagccctagcttggccgttgattcttgacaatttcgttgaatggatgagacaaaagcatggctagagttggcatctttttgtgtttcttgcagtttgctgattttataaggaccttgcaagaaccctaaccagtcaccatggagctggctcatttaactgattaaaccgaattgtgctgaaactgtgttttttttctgtgcatgataaacccctacaatcgtgttatactgagatcattttatacattctgcattcagtaaaatac

SEQ ID NO: 35418 - DNA, 375 bp, Gossypium hirsutum
  Clone ID: LIB3147-044-Q1-K1-H4
cgaattcccggggtttcctgacaagaagctgtttcttttcaattcccttagttatatactttcttttttacctttggtttgtgtacttgattatttgagtttctattaaggggtcccttcccctcaaaaaaaaaaaaaaaaaaaaaaaaaaaaaaaaaaaaaaaaagaaaaaaaaaaaaaaaaaaaaaaaagtaaatcaaaaaagggggcccggtctaacgtatacaataatcccacctaaaaccggctacctggacaccattttataaagctgagtgtggcaaaacactgagcggccggactgaaataaccgtgggggaaatcccctaaacgaccatacgtaaaatcctgataaggcccccacctttcaccctt

SEQ ID NO: 35419 - DNA, 222 bp, Gossypium hirsutum
  Clone ID: LIB3147-044-Q1-K1-H5
cccacgcgtccgcagcagcagcgtctgttgttggtattgatgaggatgaaactgaagatgatgtgacaattgatccggacttatgcggaacctggaataagaatcacaatactgaaaatcataaagcagatatacacatacaaataaagatcatgtatacgaagatcctgctccacatgtttagctataacgcaagaagaattcactatttcactggcaatt

SEQ ID NO: 35420 - DNA, 272 bp, Gossypium hirsutum
  unsure (1)..(272): unsure at all n locations
  Clone ID: LIB3147-044-Q1-K1-H9
cggacgcgtgggcggacgcgtgggcggacgcgtgggcggacgcgtggggcgtgagtgccataagttttcagttccacaaagggaatggaacaacaaacaaccgagctgctcaatctcatcagcgaactactactgccttagggaagccaacaacaccttcaaaatgggatgatgcgcanaaatggcttgtgggactgtcgagaagtagagacaaaaagacccactccaaagccaaacctcgaaactccaacgccgatgatagaagactaata

SEQ ID NO: 35421 - DNA, 241 bp, Gossypium hirsutum
  Clone ID: LIB3147-045-Q1-K1-A12
ctcaagcgaacggtacgaaaagtacgcgggtgcttgtatggaatcccgacggaatagtaagagcagtctatctcctggggctgagacctacccaccgatcgagatctatccacgatgaatatgtgctgctagattggcctttactgtgtctgagacaacatttgcacactttttttatgttaaactttactcaacgtaatattctgataatcccatcgggtaagcggattaaacttttttt

SEQ ID NO: 35422 - DNA, 327 bp, Gossypium hirsutum
  Clone ID: LIB3147-045-Q1-K1-A7
gctattattgctgctatgagaactggtaggctcactggacaagccgctgctcctgctgccggggctgttaacgctgatgctaaggatattacttgctgtaatactagctcttatggcattcatattggacattcaaaagtacataagaccttaatgctggaaaatgtgcttgaataaccagatataggtactgatttgagttctgtgagcaatgattttggcattgatacggattttaactcatgtatttgctattggttgtgataggtgtttaccccagatttaatctccgagtttatttgaaccgtatttatcaaggttggaatt

SEQ ID NO: 35423 - DNA, 491 bp, Gossypium hirsutum
  Clone ID: LIB3147-045-Q1-K1-B12
cccacgcgtccgggcaaagatgtcttcattagtgcaaatactcaaagaatgcacaacgattgggttagtgaccctcgagcctttggattcgtaacatcacagatagcctgttgtggacaaggaccttataatggacttggtctctgtactcagctgtcaaatttatgtcccaacagagctctctatgcattttgggatccattccatccatcagagaaggctaacagattgattgtggaacaaataatgactggatccaatgagtacatgcaccccatgaatctcagcaccatcatggccatggattccgggatctgacatcagctctatcttcttctttttcatcatctgggtgtttcgtaataatatgtttctttcaactgtcataaatgttatatttcgagccggtttgccttttgtttgtgttgaatgtaatggggaattcaaatgatgcacatgcatttgtaatgaattgatgatgagcattaatg

SEQ ID NO: 35424 - DNA, 339 bp, Gossypium hirsutum
  Clone ID: LIB3147-045-Q1-K1-C11
cccacgcgtacaagcagcatgagaagaaaagaggcatggacatcgatgaagcacaggaaagggggtgtatacttaggtctctcctcatgaacatctttaaaaaaaattcaaagacaaagattacattgaatatcctgctgctgtgcctgctcacttataatatttattatttacatcaattttctttaattagtatcccacaaccatgactaattttcaagccatcagtactgactgaaaataatgtatgatcacacctacttttctctccaacgagaaaaaataaacggcagattcttatggtgactgattttgcggtttacttggttggccctccca

SEQ ID NO: 35425 - DNA, 506 bp, Gossypium hirsutum
  Clone ID: LIB3147-045-Q1-K1-C3
actgaagcaaataattggcgaggggaacttggtggaggaatctaacattacttgtttaccttatttgcaagcaattgtcaaggaaacgatgaggttgcatccatcgtttcctttgttactccccagaaaagctgaagcagatatcgagattcacagcttcgtcattccaaaaggtacacaactgttgatcaacgcatgggctataggcagagatcctaagttctgggacgagcctgacttgtttcgtccagagaggttcataagatcagaaatggatgttaaaggaagggattttggactgattccgtttggaggtgggcgacgaatttgccctggattaccattggccatgagaatgttgcacttaatgttgggtggactcattcattcatttgattggaaacttgaaaataacatcacaccagggagtttagatatgaaggataagtatggtctttttctgcataaagctcaaccattaagaatcatcccgatttcaaattaac

SEQ ID NO: 35426 - DNA, 126 bp, Gossypium hirsutum
  Clone ID: LIB3147-045-Q1-K1-D6
ttccggaaaactattccgaaccaaatagacttcaaagtgtgtttcaaggtgttggaggaaccttattaagtagcatccctatccctactccctctgagtcaacttctcatccggtaatatcatcac

SEQ ID NO: 35427 - DNA, 495 bp, Gossypium hirsutum
  unsure (1)..(495): unsure at all n locations
  Clone ID: LIB3147-045-Q1-K1-D8
cttttatttgtaatctttttgggattatatataagatcttatggatgtaatataactaaggggcaattgtgtcctaccagctggtttcttgacaagggcttcacgtgcagttgtaaggaaaaagccagggaaggcaaaagcgaggaagagcttccaatgggtcaagcgttgatggtcatttatgttgttgctcagatttttcctcaaaggggcttcttttctttccttttttttgcattggatgaaaagcaaacctttattttgacaatgctgcaataatatctttcacaaggtttggtgttagttatgtaatgtgcttgtaatttctagcttcccctacatgattattagccagttgttaggaagatttgtttagcaagaattacttttaaaaatattccactataacaagggagaaattggctctttatttttatatttatttttggngaaagaaggaaaaccggttggcacctcattgactctaattttgct

SEQ ID NO: 35428 - DNA, 284 bp, Gossypium hirsutum
  Clone ID: LIB3147-045-Q1-K1-E2
aggaaacttgggtcacatgtgtgagattataatcttatgatcattatttaatcacccacagtgcgactaaacgtgggttttagaaaccgtcagggaaccctccttttctaatacccacgtttagtgggattgtgggtgatgaaattcacgtcgcatgtgtgagattataatcttatgatcattatttaatcaaaataattgagaacgaaatatatactatctccaacaaccatttcatattaatataatccataaaattttatattttttaaatttaaaataat

SEQ ID NO: 35429 - DNA, 347 bp, Gossypium hirsutum
  Clone ID: LIB3147-045-Q1-K1-E3
cccacgcgtccgcccacgcgtccgaggaaacttcaaaacctggggattgttttaaaaattgaagcaaaaagtgggtttgaaaagttgcccctcttacttttggaagcaatgaaatcttcaaatcctttaggggttatgattgccaggggagatcttgctgtggagtgcgggtggtatagattggctgatatacaagaagaaatattatctttttgtggtgctgctcacttaccagatatttgtgcaactcaggtcctctaatcactcgtcaaatcccgagttcctaccagagctgtgatttctgatgttgcaagtggttggttggcatagtttgttttattttttca

SEQ ID NO: 35430 - DNA, 486 bp, Gossypium hirsutum
  Clone ID: LIB3147-045-Q1-K1-G12
acgcccactcttatcgagctcaacatgcctgaacagagtgatagcgtgagatcgaaatggaacaaagtggggaaggcatcagtcgctgccgctccaccatcatgagttcagtttcgaactcgatgttcatccataattttcattcattcagaaatggttattttatgaaaccaagatttgtttccacttgcagtccattcaagtcattcattgtttcatacggtctagaaggtgatcaaaaccccaaaaaggtcaaggttcatatccatcgaaattttttgtgtataaagtactctttatccgcaaaacactgtgtttagggaactcctagtttgccatttttggctattcttgggagtcctgcccaactcatacatcagtttctgtttttcattttttcacgctatccatcatagttattcccagttagttgtttccggagtcggatcttctcctcgtcatgactggtccaggaccattcatata

SEQ ID NO: 35431 - DNA, 255 bp, Gossypium hirsutum
  Clone ID: LIB3147-045-Q1-K1-G8
tcccggtcgcgcacgcgtccgcaaatctcaaggaaatcctcctacaattgccaacgcttctaccctctccttggtatcgggcgtttcttgcttttttatacacagaacaaaaattacaatttgataatttatggcagaaagaagtgtagtgaagtaggcttcagcaactatggttttactctgcatttttatatatcggattttcagctgtagatcccatgttcctgaaatgttgaaactgaatttttatttttt

SEQ ID NO: 35432 - DNA, 219 bp, Gossypium hirsutum
  Clone ID: LIB3147-045-Q1-K1-H2
tagtaaaggggttgaaatactgcaatgactcatatatagtgtctctcagccctctatgatataggcttgatactcaatcatctccacacccaaaaaaactatattaatgcctttatatatgtattcttatttgattgactataattttattaatgcctttattacatttgttgaggttgaatccttatttcattaactagaagctgctggtttttggct

SEQ ID NO: 35433 - DNA, 422 bp, Gossypium hirsutum
  unsure (1)..(422): unsure at all n locations
  Clone ID: LIB3147-045-Q1-K1-H6
cccttcgcaactttttaagctatcttaaatgcttgcagccgctgtgattcattcgaggatgcttcaatgttgttggaagagctccggttgtttgataatcaggtgtacggtgttgcccatgggcttcttatgggttatagggagaatgnttggatccaggctcaatccctgttcgatgaagtaaagtcaatggactcgtcaactgcttctgccttttataatgccctgactgacatgctgtggcactttggtcagaaacggcgagcccaactggttgttctcgaagggaaacgccggcaagtatgggagaatgtatggtctaattcttgcctagatttgcatcttatgtcatctggtgctgctcgagcaatggtgcatgcatggttgctaaacatacgttctgttgttttcgaagtcacgaa

SEQ ID NO: 35434 - DNA, 420 bp, Gossypium hirsutum
  Clone ID: LIB3147-045-Q1-K1-H9
gtgcaccggaactagccaagcttctttattggctcatggtggttggatacagccttcggagcgtggaagttcgatttgacatgcaaagggtacttggcactcctccaaaacttgccgagttgcctgcaggtgaaaatatatatgtgctggtgggcaactgcaaatatactcgatagcaaatttggatcacattaacctgctattatttatgtgtgagaaggggttcattcaaagtgatttactgcttgagaaaacttgaaaattttcgcgcatgccttacatttttggcttctatagtagctttaaaacttattatgaaacaagtgcttgcaacagtgacttctacctttaaatacaactgaatttggtttacgtgccgaaaataactgttttaaaggtattattaaatgatttgtttcc

SEQ ID NO: 35435 - DNA, 224 bp, Gossypium hirsutum
  Clone ID: LIB3147-046-Q1-K1-A1
attggtgagatggaatgtttatttaatcaaaattcctttgcagtgggcacaaatagttaacttttaatctattaaaaaaaaaaacttacctgtttattttttaaaaatgggggaatgggatttttttccgttttgtaggaaaatgattgtgcctgaaatcatctaagttgcgacgttgaatctatatgaccttgttgatattcatatatatttttttatttaga

SEQ ID NO: 35436 - DNA, 383 bp, Gossypium hirsutum
  Clone ID: LIB3147-046-Q1-K1-A11
aatctctcccatactagtctctttgagccacgcccacgccattgtcaagttcagatgggccgatgagattgaaggatgtttgcggcggcataagggacccttccatgggagatgtggagatagtggagttggaaatttgatgagtaggggaagcattcatctcttgctgctgggcattggatttggagctggtagaccctgactccttttgctcacttttgtttatattttcttcaccacccttcctttcatgttccttcatttcctccaaatacatctcttcaaccattggcttgcacaggcggactcgagcatttataaatcaggttgacacctgcgaaccaacgtgccctatgttttttaatacaaatagagaattaaga

SEQ ID NO: 35437 - DNA, 267 bp, Gossypium hirsutum
  Clone ID: LIB3147-046-Q1-K1-A5
ccacgcgtccggccacacattcaaatacaagttcgctaacacatcaatctactcctttgcttgttacagggggagttgattctcgaattcgctaatacatattctgaaggtgagaacagtctacgtgatctacgaaattttccagagattaatcatgtgaacaaatacatcatgttctcattaaatgcttttgtggatagttaacacaaccacttgacagtgttaatgttagaaatcatgaaattgaaccttttgagattaatacac

SEQ ID NO: 35438 - DNA, 424 bp, Gossypium hirsutum
  Clone ID: LIB3147-046-Q1-K1-B6
tgtaggaattgatgactggtggagaaacgaacaattctgggtgattggaggtgtatcatggcacctctttgccctctttcagggtttactgaaggttctggctggtgtcagcacaagcttcaccgtgacctctaaagcagctgacgacggtgaattttctgagctttacctcttcaagtggacatcgttactcatccctcccaccaccttattgatcataaacatagtcggcgtcgtggttggaatctcagatgccattaataatgggtatgattcatggggcccattgtttgggcgactatttttcgccttttgggttattatccacctctaccccttcctcaagggtctgcttgggaaacaagaccgaatgccaaccattattttggtttggtcaatcctgctggcctcgatcttgacactt

SEQ ID NO: 35439 - DNA, 250 bp, Gossypium hirsutum
  Clone ID: LIB3147-046-Q1-K1-B8
aaaaataaccggcgccacccactcatccgcccacacttacttctatactcatatttgagtaataactaacgatgacaaataatgcgtgttcttccaattacaacctactcctccaacttacaccatcttcaaaaactattctttttccaataaaacataaaaacccttgacaaatatcataccccataaatacaattgtaatatcatcctaacatgctactcctattaaaaatcaaccattttctcaact

SEQ ID NO: 35440 - DNA, 308 bp, Gossypium hirsutum
  Clone ID: LIB3147-046-Q1-K1-B9
cccacgcgtccgaaaaaaaaaaaaaataaaaaaaaaaaaaaaaaaaaaaaaacattggggaatatacaaaaaataaaaacactaacatacaacaaaataaaataaaaaaataataaaaaataaattcggctccctttttaatggttcaacatttacttccctgttaatcccacttcataactttttttaatctcccttaattacaatcccctttccccagttttccaactatcaaattggaaaaaccctatcgtccctcaatttaattgcttttcctaaattcccttttttacccgtcctttttttat

SEQ ID NO: 35441 - DNA, 220 bp, Gossypium hirsutum
  Clone ID: LIB3147-046-Q1-K1-D2
aggtttgcatgtaatgaagtatgaactaagaagattatggtctggtaaggtaatttgtggatatatgtatatgtagtcaaactaatagagactggcagcagatggctgaatacttgtgaattcccaagtggatacactattatattgtaatttcaagtaagattccatgtgagtaattttttttttatctaataaaaaaaataataaaaaaattaaataa

SEQ ID NO: 35442 - DNA, 119 bp, Gossypium hirsutum
  Clone ID: LIB3147-046-Q1-K1-D3
cggttttattatgatgtgcccttaactatccataaactactaactgaactatcaatcggggatatatcactaaccaaagcggaagatcattccaattaccttgattggacattttttat

SEQ ID NO: 35443 - DNA, 258 bp, Gossypium hirsutum
  Clone ID: LIB3147-046-Q1-K1-D6
gttccactcttgaaggatacagagatacgggaccttatggatgcagctgatgtcgacaggggcgggaccatcgattatggtgaatttatagctgcaaccgctcacctcaataaactagaacgcgtggaacatttcgttgcagcattccgatattttgataaggataatagtggctatattacggttgatgagcttcatcaagcttgtactgagcataacatgaccgatgttttactcgaggatataatccgagaagtc

SEQ ID NO: 35444 - DNA, 260 bp, Gossypium hirsutum
  Clone ID: LIB3147-046-Q1-K1-D7
gaaaaagcaagagatgtactttacgatgaggaaaaatgccattaaggtataagcttgaaatatgacttaagatggatacctttatgttaatttcaaagggactactataggttatagttgaagcattgagttgaagaatattcgattacttcataacattccctataatgcaaaagcatcttacaattatgaattatagaatataaagagcggtgaatactcctttcttttataaaaaaaaaaataaacaaggcggacta

SEQ ID NO: 35445 - DNA, 260 bp, Gossypium hirsutum
  Clone ID: LIB3147-046-Q1-K1-F11
cccacgcgtccggctgaatattcaaaaccattgattcaatatctagaggcccttcccgaagacgagaaggttattttggtgggtcatagcagtggaggtgcttgcctttcttatgcattagaaaatttcccagaaaagatctccaaagcaatcttcctttgtgctacaatggtgtctaatggtcagagacctttcgatgtgtttgcagaagagcttggttctgctgaacgtttcatgcaagagtcagaggttttgattta

SEQ ID NO: 35446 - DNA, 326 bp, Gossypium hirsutum
  Clone ID: LIB3147-046-Q1-K1-F12
cccacgcgtccgcccacgcgtccgcccacgcgtccgcccacgcgtacgatgacgaaggcgtttgattatagtacttaggcatatatttttgttattgtattgttacattttaaaaaaaaatcttaattagtgtttatgattgtatggtaaactttgattatcttgactgattagagtttggtttacgtttaaatgtgtacatagatagtggtttccacagaaaaacatatagattaaaagtttgaatgggaaaagaaaattgacatggatgaatattaatccaatacaccgataatcgttttaaaaaattttactgaattatatat

SEQ ID NO: 35447 - DNA, 335 bp, Gossypium hirsutum
  Clone ID: LIB3147-046-Q1-K1-F3
aaaaaaggtcgcccacgcgtccctgcgcttgttatcctcaatagtcatattcaaactgcctacgtttgaaagttcgggcatttttagacaagtatgaattctcaaatcccaccataattcataattcggtgaataattattcccagtttgcttctttcccaatctacatttatggatcctacagcacatttgaatcctgaattatttaataatatggttgctttgttatacattggacattttgtggtctatgaaaattggttagatgattcgcttccaaattaatgtttgcaagctactatttaatcaatttattgttcctttgacttatattg

SEQ ID NO: 35448 - DNA, 212 bp, Gossypium hirsutum
  Clone ID: LIB3147-046-Q1-K1-F4
tcctccaagaaataaaacgcttcatcatttgatcactcttacacacttcttcaccggaacctggggttcttttcaacccctcagtgtaggaatacaaacacgcctttaccaacatctctgaattctttccaccttaatatttcaagaacgattcactcattacttaccattttaacacccattattcccctagtaaaatattctttacgaca

SEQ ID NO: 35449 - DNA, 188 bp, Gossypium hirsutum
  Clone ID: LIB3147-046-Q1-K1-G6
gattgattgatgtttcacacttaaaaaatcatagagcaaatgttattgtaattacttttggtttgatttttgtatgcatgcatagcatgcaaagattatcgcaagctcctagactgcgtaaattgggtgattaacttatgagacgggacgagctttactcgaagtaatataaccagcttagttgcact

SEQ ID NO: 35450 - DNA, 374 bp, Gossypium hirsutum
  unsure (1)..(374): unsure at all n locations
  Clone ID: LIB3147-046-Q1-K1-G7
cccacgcgtccggctttcagcatatgggatgtaggaggtgacagtaactcacttgatgttcttccaattgcttgtaaaaatgctgtagcaattttgtttatgtttgatctaactagccgatgcactcttaacggtgttgttggatggtatagtcaagcaagaaagtggaatcagacagcaattccaatattggtaggaccaaatttgatgattttgttggtcttcccccagatttgcaatggactatagtgactcangcaagagcatatgccagagcaatgaatgcaacccttttcttctcaagtgctacacataatatcaatgtgaacaagatctcaaattcatcatggctaaactctttaacttgccatgga

SEQ ID NO: 35451 - DNA, 245 bp, Gossypium hirsutum
  Clone ID: LIB3147-047-Q1-K1-A6
tcacaacgattgaattaaccaaactggggtgtagtgctaaaaaacaaatggcagatgggggtgtaggttaattttgtgagggactttgatgagaatttgtgctggaaggatgaatcacttttttggtgatagtagacctctagatatttttgctattgagttgaccctgttataactcgtgactgatagctttctcaaaggtcttttgggttatagattattactaatatggtatttattagttc

SEQ ID NO: 35452 - DNA, 169 bp, Gossypium hirsutum
  Clone ID: LIB3147-047-Q1-K1-A8
ggcagctgtcggattggctttagtgttaatggtgccacatgccgattctacaaggtgggttgtttgatggggaggcatcggttttactactaatgtcaattacactgtcttggctcgaggtaagcactgctacaatgggtacggtcttgcatttgtttaacatcggatc

SEQ ID NO: 35453 - DNA, 305 bp, Gossypium hirsutum
  Clone ID: LIB3147-047-Q1-K1-A9
aacatcgagagtaacaatgtcctgaatgagagacaagtttctgaagtgccttttaaggggggtaatgaatgacccaaagaagaacctttggttgtacggctgaaggtttgatcctgtaccgacttttaagcaccgtatcttcggtctgacttcagttatccattgtcttcactcgacttctgggccatagactgttctaagattttgtaacagcatgtttgttcccgtttcaaaactaaagtcggtctacacttgcaggctcaatgcaatagatgaagggaaaaagagcttaatgtccttggaaa

SEQ ID NO: 35454 - DNA, 393 bp, Gossypium hirsutum
  Clone ID: LIB3147-047-Q1-K1-C4
gatatgggaaatattgacccatacagtatcttcactccctcctgctctgctaatgcgggtcagacgaagtggctgctgaaaagaaggcttatggttagccagctcattgaaaagtacgatccttgcactgagaagcactcagaagtatacttcaatctacctgaggttcaaaagtcacttcatgttttacccgaagctgcaccatctaaatgggagacgtgcagtgatatcttaaataccaactggaaggattctccaataacgatgcggatgtttaccgtgagcttatacatgaaggacttcgcatatggttattcagtggtgacacagatgctgttaatccaattacatccacccgcttacatatagatgctctcaagcttgcaactatta

SEQ ID NO: 35455 - DNA, 384 bp, Gossypium hirsutum
  unsure (1)..(384): unsure at all n locations
  Clone ID: LIB3147-047-Q1-K1-D10
ctcggcatagcatcccagttgttgggttgatagtgaaaaatgatgcatggttgccatgcacgggaccggaataatatattgtagttttgtggtctttctcgctaatccaacttactctgattaatttccaagttagctgagggataagattacatctttcgggagctgcaactgtacaagttctcgtgaatacagttttattcaatggaacactctgtttcactatttacagtatagctatagaaacttacatgcaaccatcaaacagtggtacataaaatttgtctctgttaatttgctttaacattgtttatgattnaataatattttattattttatataattttttttatttttttttttttattattattttttttttt

SEQ ID NO: 35456 - DNA, 290 bp, Gossypium hirsutum
  Clone ID: LIB3147-047-Q1-K1-E10
aatccactccccacctcctccatatgtccataaatctccacccccacctattctggtgggcacctgcaccttatgtctacaagtccccttcatcaccatcacatcccaaacctcattctcatccttatactaagccttattcccccacaaccgtatactccactctcaatacccaagcctcatccttcacattcaaagactccactcccataacccaagtatttttacaagtcgtcaccaccttcgaaggctatctaagctaattgttttttgacatcattattttaatc

SEQ ID NO: 35457 - DNA, 406 bp, Gossypium hirsutum
  Clone ID: LIB3147-047-Q1-K1-E6
gctactcttgcccccagaaatctttgtttttatcttctccctttcatatcttaagccagggatggcaacatcctctcaagactcttcctcttccaagagacacttccattggactaacaaagttgcaaccgaagataccgaagcctcttcaacaacacctaatgaggatgacaagaatggaagatcaggtattaaaacccatgtttctttgtccacaccaaggaagaaaaagcttccggctgctgctgtttccatcgcaaggctccgatcgctgtttcatcttttaggaagagccgatcgagccttccttttggcctcgggtcacgagtgatcggtactctttttggttacaggcgaggacacgttcacttcgccttgcagaaagaagccggttccccaccagctt

SEQ ID NO: 35458 - DNA, 291 bp, Gossypium hirsutum
  Clone ID: LIB3147-047-Q1-K1-F2
ctggatccccgtcggatcctggcgttgctctaatcggatccgtaaggccatactgtgggtcaccttaaaaaaccgacctgtccaaactacttgtttacactccccttagttgtaaaccccgtctggagcaccgttttgacctacgccggtgaaccgttcgatgtgtatttcatcaatatgacctccatcaacgttatcggcaatccaattcagatatactcctcgttattagctgtcgtcgtgaactgttccggtgggacaaatttttcacggtcgttccttactctgttt

SEQ ID NO: 35459 - DNA, 391 bp, Gossypium hirsutum
  Clone ID: LIB3147-047-Q1-K1-F4
gccacccgtccggccacgcgttcgcctgaaccatctatgaaatgctggatatatagagggagaatctaagaacatggaggcaatcaacagcattctatgctagatgacactggcagggcccctgaagtaagctatctcaagaagaactggatgaaagaagcgaaaatagattagtgggactttgcacaaggcttctcgggtacacatataaaggggaaatcagcattccacaaaaaaattggtttctggaaatctgggaaaacaagtccaaagactcacgtggtttccagaaaggaaactgggaatgacagaaaggcgaaactgtaacagctttcgtctctactaatgcatgcagctgggttggagagcaaaaaacgggaggaatttgtct

SEQ ID NO: 35460 - DNA, 372 bp, Gossypium hirsutum
  Clone ID: LIB3147-047-Q1-K1-F6
cccacgcgttcgctaaaacccctgctcaagaaagatgcagtctctgcgcaatttcaacggcgagaaaaaatggcagcggagctaccaaaaccggcaaccgaagacgtaaagtttgatttgtttgaagatgatgatgagtttgaagaacttgagattgatgaagagtgggagttaaaggaagaaggaaaggagattacacagcgatgggaagatgactgggatgatgatgatgtcactgacgatttttctctacaactgaggagggatcttggaataacactgtgaacaacatcttagctggacttatgcatttctctgcactgtacttgtctgaatcggggttattttgtttttagattttctttgccattg

SEQ ID NO: 35461 - DNA, 343 bp, Gossypium hirsutum
  unsure (1)..(343): unsure at all n locations
  Clone ID: LIB3147-047-Q1-K1-F7
cacgcgaccgaaatgtnagaacgagaagggagccagggagatctggtactcctatatcatatacctgtgggtggagacgatttaacgatatggtagcttcttactaattcttaattgtctaaatgagcatagatttggactcaagctagaccacagtataataaacaaggtcgagttgggtcaagctctaccactttaatgcctttatctatgcctaatgcgattttcaagcatcaaaaggatgtaattgaatttgctatgacataaacattattattcatataatgatattctttagaggaaaatgaacaattttgtatcacttatagtttaattcattgcc

SEQ ID NO: 35462 - DNA, 317 bp, Gossypium hirsutum
  Clone ID: LIB3147-047-Q1-K1-G11
cgtagttggaattactcgcctcaagttggatcttttacggtgcaccctaccctttgtggccgttgttttaatgttgttggtattcaaccaacacctgcaatggcagcagccatcatctgagacctaaactcaaacaaatccggctgaaaatgaggttaacctggaagttggccgatctttcgtttcaagctttccagtgtagccaatttcacgtccaagctaaaatattacccattctttgcagaagagtgttaagtcaatcaattttttgcgttacatgtgacctttctgcataaattactatactttgcacacaa

SEQ ID NO: 35463 - DNA, 442 bp, Gossypium hirsutum
  Clone ID: LIB3147-047-Q1-K1-G2
tcgttccgtgtgacgtcgtgtgtgtggtaggtagcagtctgtgtagctatcttccctatcttttatgatctacatcctgggggattatgcgtcagaaccacgtctttgccaaatgatgctaataggctgcataagaataggagtgaggagaggctaattcaattggcgcttgtatgattgtctacaggtatgacacttaaaatcatgattggtattgcttggtctttaccgtggtttacaatatttcatgtgttaggaatcatcagtttaccgtggtctatacttttggaatgtttagactcctctgaagccaagtgcttctcacttggagattctgcaaggatagttatctttgcttagctattgctttttggtttggttcatcacaaaatggttgctgggtttttgcaatcgtaccccaaattgattactggtgcttttg

SEQ ID NO: 35464 - DNA, 350 bp, Gossypium hirsutum
  Clone ID: LIB3147-047-Q1-K1-G7
cacgcgtccggtagtcccgtatcggtttatttgttaacaaaggaaagctgcaccggtgggaagcacagcatgaggaactcggataaaactcatgcccatttgcaagtcaactcagcgattctgatgggtggagctagagggattcggagactaaccaatgcaatgttgacggagatcgtcagagctacaatgcaacataagaagaagaaaaactcgatatcggagtcagaaatcttgagtcaactcgtttggaacgggtatttactaaaaatgtggatttgttcacatcgacggggtcaattcatgtaagcgtagtcactcatgagttcgggctccaacttctcttggag

SEQ ID NO: 35465 - DNA, 410 bp, Gossypium hirsutum
  Clone ID: LIB3147-047-Q1-K1-H4
cccacgcgtccgtgaaagagtaaaaagtgggtcaagggtagtcatgggcaatttccaggctcctggtgaaggaaattacaacttgactgcattctgcttgtgcgactcttggatcggttgtgataagaagactaacctaatgataaaaattttgaaacgaagtcgtgccggtacaaggactggtgccttgtcagaagagggagctggtatggaagaggggattgatgatgtagagcatgtataagatgttgaatattaggattttgagaggaatacagtgtagatgaagaggatgaataagattctaagaggaatggagttttgccccgctgctggtgcttgtgctgctgctgaaagttcgtgacaatgagtgaaattcttaattttttcattttcactttgggggaaca

SEQ ID NO: 35466 - DNA, 274 bp, Gossypium hirsutum
  unsure (1)..(274): unsure at all n locations
  Clone ID: LIB3147-047-Q1-K1-H5
gagggaaagcgaaggcagcncaacaaaaccgggaggcagcagagagaagaagagccggaaccgaaggaagacctgaaccaggcgacaaaaggaggggaccagaaaacagngcaggcgtaagcatgggcagagacacaaaccacngaagaagaagaagaagaagaagaaaacgacgaggacgaacaaaaagaagataggcaggcacaggagtaaagtaacacagcaaaaagaaggtttgtagggtagacagcaaggacatggaaattactaatga

SEQ ID NO: 35467 - DNA, 306 bp, Gossypium hirsutum
  Clone ID: LIB3147-047-Q1-K1-H7
cacgattcctgcgttcaagctatgaacattgactatctgagtcaaaagtgcagccaaggcggcatatattgcatgaaggatttccagaaaggaggaggatggagtttcaagggttataaatgcctagtctatcaagtctttgatgtcatctctattgtcatgaattctgttctgttcgctggatgaattcttcatattcttttatcttttacccatctcttctctgtattatttatttttttttgctatctgcatttctttttttgttgtttcatttttttatctctttttttatatttttcattt

SEQ ID NO: 35468 - DNA, 411 bp, Gossypium hirsutum
  unsure (1)..(411): unsure at all n locations
  Clone ID: LIB3147-048-Q1-K1-A1
tccttaatgattggcctaatgtggcacctggtaaattcttgatggaagaggcaaatcttctaaatatcttacagcttggaactattgaacctctaagtctatggaagtttttattgcaaaaatttttttttaaacacgtaactttgttgttcttttactctgctccatggatgaaatggttgactcgtaagttgtgttgtttatagctaagctccactccactctggactntaagcaacgaacattctcggaaaggatgaacttaatagttggtgagaggagcaacatanagctgaataggatttacttttcattgtctttcatgttgcatangaaatactgaacattaatgaatcggtcaatgagcacgataattttgggatataagccaagtgtaatacggcattctta

SEQ ID NO: 35469 - DNA, 224 bp, Gossypium hirsutum
  unsure (1)..(224): unsure at all n locations
  Clone ID: LIB3147-049-Q1-K1-A2
agggcaggaagccaggcacgcaaangaacaanacgggcangagcgcaggcacggggaggaacanggnaanggggcaggcaacccacangcaancncaaagggggangccaggcggnnacaacccgaagaagggagccaggggcnacacncaacagcaacagggnggggggggaggcnaccgaagagaaaacaagggcaaggagaggaacggaagggacaccccc

SEQ ID NO: 35470 - DNA, 119 bp, Gossypium hirsutum
  Clone ID: LIB3147-049-Q1-K1-A5
agtttgtaggcgcttctggctgaaaattcaccagatagttctccctgccacacttgaaaatcgtcggtaagagtttccgtaagagggatctgcaaaatcatttgagcaatatttgctgg

SEQ ID NO: 35471 - DNA, 468 bp, Gossypium hirsutum
  unsure (1)..(468): unsure at all n locations
  Clone ID: LIB3147-049-Q1-K1-A8
cccacgcgtccggagaaagtgttgcaattgctcgtactgtcggtcatctttccaagagtgctgaagtcatgaaacttgtaaacaacctcatgaaagctccacaaatggctaccacaatgcaagaatttagcaaagaaatgaccaaggctggggtgattgaagaaatagtaaatgatgctgttggcacggcattggattcagaagatatagaagaagagacagaagaagaagtcaataaggttctttcggaaatagctggtgaaactgctgcacggcttcctgaagctgttcggaaggaaagagcgagggtacctacccaaagagaaaccacttcacatcaagaagaagcgattgcagagggtgcagatgatgaagaaaaattggaagagattagggcgcgactcgctcgagttagatcgtaaacctttaacttccattttggntgttcttttgctatctatcaactaa

SEQ ID NO: 35472 - DNA, 171 bp, Gossypium hirsutum
  Clone ID: LIB3147-049-Q1-K1-B4
cccaagtgtcctcgaagcttcttaataatctgccatgtatggatagtattattaccagctagggtgtagctagtttgcaaactcaacctgcaatttgtattattaatgtcattaatctcactacccaagatttgacacatgaaaaacatcaaatctggatttttatttatc

SEQ ID NO: 35473 - DNA, 405 bp, Gossypium hirsutum
  Clone ID: LIB3147-049-Q1-K1-B7
cccacgcgtccgaacttggtgtaaattgtatgcttattgttcttttcattttgggctattagtatccttctattgaattcccaacatattcttttgaaagaatcaatgagaaagttcaaggtaacctggtgtaaatttcttatattatatctgcagatttcttgagggagaagaaaggcaggttatggagattgaatgattggggtcttcggagactagcatacaagataaagaaagctaagaatgcccactacatcttgatgaactttgagttggaagctagatggattaatgagcttaagaccatgttagaccaagatgaaagagtcattcggcatctggtgataaaaagagacgaggcaatcactgaggattgtccaccttcacccgactggcacactgttc

SEQ ID NO: 35474 - DNA, 476 bp, Gossypium hirsutum
  Clone ID: LIB3147-049-Q1-K1-B8
attagacgatgcagagattatgtacgaagctccgctttttgggtctccaatcaacccaaactcttccctctctttctgcttctcgtcgccttctgcatcattcgtttcctccaatccacattatttcaaccaaatggagccttgaaccctttctcaataacagtgtcgcatcacctcctctcgccgtcaactccttttcttcttccccactgcttctctctttggtccaagtccggcatgtttcgtcaagagaacgagcaaagaggaggaagcccatgactccacgtacttccaaactcaagaagattaagatgaaatcttattcgtcctataagtcccgatttaggacaatgaatgatgggaatattcgtcgctggagggaaggcaaaaatcataatgcacatttgaagtccaagaaatcaagacgaagactgcggcaaccagctatagtacccgccgcatatgcaaaggtgatg

SEQ ID NO: 35475 - DNA, 367 bp, Gossypium hirsutum
  Clone ID: LIB3147-049-Q1-K1-C10
cccacgcgtccggaaacaaggcattgctaaagagaaagaaaagatgaaaataaacagaagcagaacacatggtgatgaggcagagaacatggcaccctctaatatctcactaaatttggaggatgtgaagcacaaaaacaaaggggaagaaaggttactgcaaatacggaccaatccaccctctcctcagtgcttttctgcccctaccaaaacaactgccaccccttccaaggcttccagatccagacttatggagaggggaatcctttaagaagtgtagcaaaacatggatattaatactgaataagcatgtagtcatgtatctccttgttcttttgttattaataatgttaatgttacggatgga

SEQ ID NO: 35476 - DNA, 436 bp, Gossypium hirsutum
  Clone ID: LIB3147-049-Q1-K1-C7
accacacgtactatattatcacgtattcattcacatacctataatatgatctaagatgtggcgaaggaagctaaaactcaagctacagctgatacaacggcggctgcaccggcgccagaggctgtatctgaagctgaatctgtggatacaactgcatctgcagcgacagctgaggagaaccctgctcaggccgaagctgttgatgctcctgagactgctccagagactgtatcaagtggaacacctggtggatcacatgatctagataatgcccttgcagaggatgggaaggcattcatgatggcattcgtcgaaggttgggaagacagtgcaaagaccaaagcccagaataagctctatgataaggtctcttgtgtagacacctgggaaaactgtctggaagcatatctggaagcaaatgtggaacaaattgaag

SEQ ID NO: 35477 - DNA, 222 bp, Gossypium hirsutum
  Clone ID: LIB3147-049-Q1-K1-C9
cccacgcgtccggccacctttatcagatatcaaaaggagtaaacctcagattccagggggggaaaaagaaaatggtgaagggactccaaggtgtgcgagtcatactctatgtaagaggaaccatcttgggttacaagaggttgtagtcaaaccagtattcgtacacttttattaatccaaattgggggagttacaccaaagagtgatttgctggtttgcctg

SEQ ID NO: 35478 - DNA, 195 bp, Gossypium hirsutum
  Clone ID: LIB3147-049-Q1-K1-D8
ggaagtatgcttccattatctacgatagctcttcaaaagctacgtttatagctgcgggggctgatggaagggtgccaaactattcttgtactgatgcttattgcaacacatgtacagacagttcccacggagtctagcgcgcattgtataaaacctgcagatggattgttcttagagtcttgccgtgaagttgca

SEQ ID NO: 35479 - DNA, 263 bp, Gossypium hirsutum
  Clone ID: LIB3147-049-Q1-K1-D9
gccacgcgtccgagattaacacccatgtggaatattgcaaacacttgctagaagctgggagagttcaccgggaaggcgctgaacgtgtacagcaacttaccgggcatgatcatgacgcagcttgacagcttgcattggccgaggaagcccgtcaaaggccgaacgcaatggaaatatcagaacggcggtgtaagcgtgctatatgctgatggacatttaggtctgggaggatttgcatatcttacagctaatgagggcggacg

SEQ ID NO: 35480 - DNA, 300 bp, Gossypium hirsutum
  unsure (1)..(300): unsure at all n locations
  Clone ID: LIB3147-049-Q1-K1-E3
gtgaaaaaccagacaagagagaaaacaagaaaaatgggtgttctggatcatgtttcagagcggcgggattcgcttgcaaggnttgttcccaaaatcattgcatccttcatcttatgtggatattttgtgcccagtcttcaccttttggttgtccatcttaggtaacattatcttctagaccgtccaattttactggtttgtccaatgccttggcttaatttgttcttgccttcttctctagtatgataccaacggattgagtgttctaacccactatcttttgttttatgaatgtatgct

SEQ ID NO: 35481 - DNA, 270 bp, Gossypium hirsutum
  Clone ID: LIB3147-049-Q1-K1-F10
cacaaacttacaaaggagactagacgaaatactagtagaattataaatagtagtgatgaacggagtgattatatggatccatatatacatacaaaatatcacattcaaaattacattcaaatatctttattaaaattggtatttgagttcgtgagtttaaaagtgagaacaaatgttagatcaaactttaaatttaacgtttaatgaaataaactaagagcaataatcactgtaatcagctttctgatcattgtgctttttattgtggtt

SEQ ID NO: 35482 - DNA, 414 bp, Gossypium hirsutum
  Clone ID: LIB3147-049-Q1-K1-F5
cccacgcgtccgactcgctacagattactccgggaacacttaccatctcatcacaaagaactgcaatcatttctgcaatgatgtgggtatccaattgacagggaaaccaattcctagctgggttaatcgacttgctagacttggtttcctttgcaactgtgttctcccagcagagttgaacgagacgagagttcgccaagttagatcagaaagtaagcttcaaccggtagagaagaagttaagaagccaaccaagtaagttcgtaccttcttctaaacctctaccttcttcattgaaatcttgcccttcaggccctgccatgagtagtagacaaaggcgatgtattccatcgtcggctttgattcatagttcttcgacctcgactttgagtttgaagctttaattagaactttc

SEQ ID NO: 35483 - DNA, 153 bp, Gossypium hirsutum
  Clone ID: LIB3147-049-Q1-K1-F6
ccggtcgacccaggcgtgcgtcacgctttcgactcactacatattactcctctaacacttaccaatttatcacaaacatcggctggcatttcttcaatgatgtgtgtattctatttacttttaaacttattcctatcttttttaaactacttt

SEQ ID NO: 35484 - DNA, 485 bp, Gossypium hirsutum
  Clone ID: LIB3147-049-Q1-K1-G2
ctcgttcactccattatgcgacacgtggcggagacttggcgtatcgatttgcaggacctgagcatgaaaattgggtggcctctatacgggaaatatggccatgcttgggaggcattcaaaataattgagactgatcctgagtcagtcttgaacaccctcacctgtgaagtcacgaagcctgacccagatggacaggaagtaactgaagtgcttcctgctgctactgaggaagtcaaagatgctttggtaaaaaacattatgagaagaatgactccacaacctttgaagattcgggctgacattgaaatgaaacgtctccagtttgatggtgttcttcacattaaggaggccatgcgcaaagctgaggctgctgtgaatgatgattgccctgttaaaatcaagcttgatgctcctacactttatgttcttaccactcaaaccctcgacaaggagcatggtatagctattctcaataaacaattaca

SEQ ID NO: 35485 - DNA, 260 bp, Gossypium hirsutum
  Clone ID: LIB3147-049-Q1-K1-G4
cccacgcgtccggagcggagttcagtctaggagtgtgtttggtctttttaatgttcctgctaaaaggtattcattcatcttattggtagtatttccagcttgttataccaaagtcttggtcttggacccttttggcatttggttgcttgcaataccttgctatcacttctatctgaccatctttcactgctggtctatatgtgagtgtgaggctatattatgcggggaacctatcatcattcgtaatatctcagcttttg

SEQ ID NO: 35486 - DNA, 492 bp, Gossypium hirsutum
  Clone ID: LIB3147-049-Q1-K1-G5
cccacgcgtccggaaattttttattagcacacagagatcgatctgatttcaatagatcctttcaatgccggttgaaacggaagaagttgcggggccgccgccgccgcctgccgttcccatccctcctcagcggcggccgagggtaagagaagtcagttccaggttcatgtctccggtatcatcctcccattcttccggcgaccattcgagatctccacttcataagcaacaccatttgcagcggcagagacggcaatcggaaccggaggttgacgagaacatcctcgccgttgccccttgtgatactccaagagcctctcttgaatcgccgttcataaatataactaccgttcaaaagaagcatcgccattcaagaacttatagcgataccagcaaattatttgggagaagcacagcaaataatacgcctttaaggccagatacgcctactattgaaagaacttcatcattaccatcatcaacaataaagat

SEQ ID NO: 35487 - DNA, 221 bp, Gossypium hirsutum
  Clone ID: LIB3147-049-Q1-K1-G6
tgaagatgaaaagaagcgaggagaaggaactaaagcttagagttgcggttaatattggagcaaatattgaaacatagctgctacgtggagaaaaagactgcagagtgtatgtctggtttatacaagatatatgatttactatttgttagtgctatcaccattgtttgccttgtaaaaaggatctcattctattaatcaaaatattcatgttaatgcttttg

SEQ ID NO: 35488 - DNA, 325 bp, Gossypium hirsutum
  Clone ID: LIB3147-049-Q1-K1-G7
cgacagaacgccttttggtttatccatttatgcagaatttaagtgtggcctatcgtcggcgagaactcaaacccggtgaacctgttttagcttggcccgcaagaaaaagaatagcactaggagcagcacgtgggctggagtaccttcacgaacattgcaatcctaagatcattcatcgggatgtgaaggcagcttatgttttattggatgtagactttgaagcatttttttgggactttggattttttaagtttttttattttatgtcatcttttttgttcaatttatggatttttttttttattttgatcttatattttttatt

SEQ ID NO: 35489 - DNA, 104 bp, Gossypium hirsutum
  Clone ID: LIB3147-049-Q1-K1-H11
cccacgcgtccgctcgggcatctgtggttattaccttaaaatctgttgatcattctccatatgataatcctcttgatgatcgaaagagagtgcatgtacaggac

SEQ ID NO: 35490 - DNA, 441 bp, Gossypium hirsutum
  Clone ID: LIB3147-049-Q1-K1-H9
acgattcactggaatttattatctagacggtattacagttaccaacaaaggtctacagatggagctggagaaaatcctaactattttcacctccattgacctttcatgcaacaacttggaggggccaataccagatgtgatcagaaaattcaaagcactgtatgttctcaacctgtcacacaatgctctcactggaaaaatcccaccatctctaggaaacttgcaacagctggaatccctggacctctcgagtaataacctgagttacagtattcctcaacagcttttaaagctaactttccttgcagtccttaacctctcctacaatcaactggagggactcataccagatggaaagcagtttgcaacatttactaatgattcttatgaaggtaacaagggactatgtgggaatccattgacgaaacaatgcaacgatgc

SEQ ID NO: 35491 - DNA, 313 bp, Gossypium hirsutum
  Clone ID: LIB3147-050-Q1-K1-A12
cccacgcgtccgcccacgcgtccgcccacgcgtccgcacacgcacagacactctctcaccctttgtatctctatagcctgtgcgtgcagtagtgttcacacgcagcatccaaaatatacaatgaggggacaattagaaggtggtgataatttgttgaaaattccaaatgcatccattatacactgtattcgatttgttcataatgtgagttattcgttgtttttttcccttgaatatatgttcatggtattccaacttgtatcctttttgtaaaaaaaataaaaaaataattaataaaatataaataataaaa

SEQ ID NO: 35492 - DNA, 338 bp, Gossypium hirsutum
  Clone ID: LIB3147-050-Q1-K1-A3
ctcattctccacagtttctttctttcactcttttttttttttgccctatctaatagggttggagtcatcttcaagctccaatctttctcatgcattcgtgtattcaagccatacacggcgacgtttagccttcttcctttttgggtctctttttttggctctctttggagggtttttgggcgtggaacagtgcatatttgacctcccggggttttttgagctgtactcatgtcaaagctctctgcttttagtggaagtgatgatttttgccctgtggggtcaatctacccaaaccggaggggagtcagtctctttctttaccctaaccaggatgtgta

SEQ ID NO: 35493 - DNA, 369 bp, Gossypium hirsutum
  Clone ID: LIB3147-050-Q1-K1-B10
cggttttccttggttgtgtgaaccatttattcattccttggctaattttttggcccgggcggctccgtgaagttggcttgtggccgcctcggccgggtttttcggatgagtggttaaaccgaaaaccgctgtgtataatcggcatgggacctgaaagcttttaatggttttctctttggctgagttgaatcggttgaacttgccagcttgtaaatttgatttccactttactttttcttttccttttcaggttacttattaaattcatttttgttttattatgtattatctttttggataatctgaaatcttgatattacataggaaaattctccgttggattaatccatgccatggcatttttatttt

SEQ ID NO: 35494 - DNA, 295 bp, Gossypium hirsutum
  Clone ID: LIB3147-050-Q1-K1-B5
agacgcaccttagctcgactgggagctaagccatgtaaattttcccataaacattgtgtgacaggcgtaaatcgacttccttggctatgactggttgaaggtatcttataagaaagacctaccggccgtggaacctcttgaactagaggtatttttatacctggtgttgctctagtataacttcctatccaaaagggattagctgcttaactcctcttagagaattaaccaatgtcattgctagagctgatcacaaagattcaaaggaattcactcttggagattttgaaaggtt

SEQ ID NO: 35495 - DNA, 340 bp, Gossypium hirsutum
  Clone ID: LIB3147-050-Q1-K1-B6
ttcatattgaagtgttctcagatcatgaaagcttcaatttaatggttaaggtacatgccctggtcatatgcaatcacagaagtgatattgattggttagttggatgggttttagcacagatgtcaagttgttttggcagttcataaactatattgaaaaatcatctaaattcctgacgaacaagtttggacaatgtggttttctgagtatttgtttttggaacgaagctgggccatggatgaaaacacattaaaggcaggtctttaactgttaaaggtactttcacggtcatttttgttggcacttttcgtagaaggatactttgttatacaatcaaagt

SEQ ID NO: 35496 - DNA, 270 bp, Gossypium hirsutum
  Clone ID: LIB3147-050-Q1-K1-C11
cccacgcgtccggggaaccaactgtagctcgcattatgaatgcccggttcgatggcgagggacaaacactaaccggtctagacgtctaacccttgcatacggaaggtggtctgaccattgcgttgatgttaagattccacatagtacaagggttcgccattccaaagttacgaatgagagacgctataaggctcttacaagttgttactgtccacaagcaaggaatttcatagaagcgctcatgtagaggagagggtcgtacagatcaag

SEQ ID NO: 35497 - DNA, 139 bp, Gossypium hirsutum
  Clone ID: LIB3147-050-Q1-K1-C5
cccacgcgtccgagtggtccaatcctgtaactcatagaatttccccatcaatagaagtcggggggtctactgcaactataagagatcttgactgtaacagtagcttagtagttgctcctgtggaagatcatcagcatga

SEQ ID NO: 35498 - DNA, 325 bp, Gossypium hirsutum
  Clone ID: LIB3147-050-Q1-K1-D1
ctttctctctctccatagctccctcccagcctctgctccccctataagcttcgttaatggcgtttcagatctcaaaaaacaaactctaagccttaagtaaactcaaatcctacccaaacccaataccaaaatcgagataaaaaaaaatcatcctttcatatcaaaagccttcattcttttctttttttcgtgtgtgtgttttcttttttccttcttttcgagttttaattaatgcataagaaaatggcgttttcgttcccagacgaggtgctggagcatgtgttctcattcatacaatcagataaagaccggaacgcggtgtcga

SEQ ID NO: 35499 - DNA, 473 bp, Gossypium hirsutum
  Clone ID: LIB3147-050-Q1-K1-D5
gtttcaaattcggcgtgctcgatctaataacaaacatctggaaaaagaatatgattcactggggagctaccttcgataagctcatggctgacttcgacaatctccttaaggagaaagatgatttaaaaaatcatgtgcttacactcaaagagaagctgcttattaaagagacagggatgtaaaatctgggatctgtccaagccatacattcgaccaatgatgaacctcataaacccaatccagatgcatcccatgttccattgctggcctgctaacaggaagaatcatgttcggctcaaagtgatgtttttgactcggacagcccacactatcccgatggccatgggtattattcctcattcatagagcctgcggaatcctctaacgttttcgaaccgtatcaatcagacaaagaagatgatctcatcaaaagccttctgcattcaccattgttctttccaaattcgattgtt

SEQ ID NO: 35500 - DNA, 137 bp, Gossypium hirsutum
  Clone ID: LIB3147-050-Q1-K1-D8
cccactcttccgaagagacttgactgcaccttatttagatgatggccttctggaaggtgtgggttttagagatgcatggcatgggctcgtgtttctttctccaaagggacatgtaactcgcctttcacatgcacacc

SEQ ID NO: 35501 - DNA, 109 bp, Gossypium hirsutum
  Clone ID: LIB3147-050-Q1-K1-E8
ccttctgatcttaatcatatcaataatcataggatattttacttaccaatattcccctagtgacggttatctaaccgggaaaagcccattcttttaatccttcgccatc

SEQ ID NO: 35502 - DNA, 400 bp, Gossypium hirsutum
  Clone ID: LIB3147-050-Q1-K1-F12
ctgttttctgttcatctactgcacaaatcattacttctcgcccaatgaatgtaacgcggacgggtccctcaaccatactcaactctacctttttcaaaaatgatcatctccccctttcctactttctaccctatatcctttatcaccaaagactaatttaattgatctttagacatcctataccattttgatacaaatcctcgaagcttttttacaatatattttaactataattaaacactatcacaccttatacttgtaatgtactccccactccttcatattcaccaactgcactgctcaatacactacctcatatccactctcatttgaacttctccaacttcaatgtcatcatccactcaattatatacaattcactctgatttcacactcatct

SEQ ID NO: 35503 - DNA, 286 bp, Gossypium hirsutum
  Clone ID: LIB3147-050-Q1-K1-F6
gttatccttattctctaacccctgctaaaaatcctatgaactcgctggaggcccatactaggagagtaaccaggtataaagtcgactttattttcattaaattgttaaatgaaactcttgacccattctttatattgcgttgtgaagggcattcttcatttcctatctatatcgtgaatcaagtctacagcacatgcaattctttttgatataacttatttgaaacatgactcaattatcatattttatatatacatctatgaatctaattcaatacttttgtaaa

SEQ ID NO: 35504 - DNA, 463 bp, Gossypium hirsutum
  unsure (1)..(463): unsure at all n locations
  Clone ID: LIB3147-050-Q1-K1-G4
cggacgcgtggggcaagacttggtgatcttatcaggggggcataccatcggagtaggccactgcaataccttcagcaacaggctatacaactttactggaaatggagatcaggacccttccttgaatgcaacctatgcaactttcttgaagacacaatgccaaagcctcagtgacagcacgaccttcgtggcgatggatcctggtagtgggctaacatttgataataactattatgtcacacttaagcaaaacaagggtctgtttcagtccgatgccgcccttataacgcatgaaatctcgcgcatcattgttgatgagttgcttgtctcagaagtattcttcagagagtttgcactgtcaatggtgaagatgggaagccattgagttctcacagggaatgaaggagagattaggaagaaatgttccgttgttaactaattcctgaaagattntgctcatgta

SEQ ID NO: 35505 - DNA, 446 bp, Gossypium hirsutum
  Clone ID: LIB3147-050-Q1-K1-G5
cccacgcgtgcggtagcacttcttgaccttatcaccactgcactccatcatgggatgccagtggggccccttcagcaagcggctatacacccatcctggagatggagaccaggacccttgcttgaatgcaacctatgcaactgtcttgatcacacagtgccaacacctgagtcacagcacgacccttgtggctatagctcctggaagtgcactaacatgcgattatagcaaatatgccacactgcatctaatcacaggagtgcttcaatccgaggccaaactgttctctcatgaaataacccgcagaagtgttgctgacttgcttgtctgataagttttctgcagataggaaccactgtctatggtgaaaatgggtgccatcgtattcctcactggtgatgaaggagacattagaaagaaatgatccgttgttaactaattactga

SEQ ID NO: 35506 - DNA, 319 bp, Gossypium hirsutum
  unsure (1)..(319): unsure at all n locations
  Clone ID: LIB3147-050-Q1-K1-H10
cccacgcgtccggagagattgagaagtggaaagagtatactcaggagatggaacgactgtggccttgggttgttcaaatgaccctttatcatattacaatatcagtgagggattcaatgtgaactatagtttatatctgaaacttgtaaatatgaaggctacgatcatttggagctaaacagttaacattattttccaaattctgcctcgattaaaattatacaggctcatgtaaaatgatttcaattgtggatcactaaaatcacaataagtttaaacctannaaaaaaaaaaaaaaaaaaaaaaaaaaaaaataatg

SEQ ID NO: 35507 - DNA, 452 bp, Gossypium hirsutum
  unsure (1)..(452): unsure at all n locations
  Clone ID: LIB3147-050-Q1-K1-H2
ctctgtcgttcaaatctatattagaaagaatctagtttagatttaaataattccaaacttgacgatagaacattatctgaaaacatgatacaagggctctgctgctccaccacacttgtgacacaggacatctcttctaatccttctgtgttggagattaacaaaagtaggcaagaaattccaagtggttttccatagattaatttttacttttgaagggatttttagagatcatagttttttgtatagctccctagaatcataatgtgtataattagggttaaaagtacctttatgtaatagtttataggaacttctgacagaaaattcccttgaagattccccctccagacccgtatgtcttcaatcctttctttggccaaaggagtttgtaagattttcgacgcaatctcttcaagaaaggtactattaattagatntactttccattc

SEQ ID NO: 35508 - DNA, 315 bp, Gossypium hirsutum
  Clone ID: LIB3147-050-Q1-K1-H4
acccacgcgtccgacacaccccactctcaaattaattatcacgaggaaaacaaagccgcctacacccctcatagggaggctatatgcaaacatataaacccctcctactgctaatcccttccattatattctatcccaccatacctacaattttcactctactatattttacaggtattcactgcttctatctacacaaaattcaatgttataaattcccttccttttaccatttgattcatgctcatgaataaaagactactacggcacacgaaatattcaaatctgtccaccccgttaacaattaatatcact

SEQ ID NO: 35509 - DNA, 457 bp, Gossypium hirsutum
  unsure (1)..(457): unsure at all n locations
  Clone ID: LIB3147-050-Q1-K1-H7
atccaaaactaggagtgtctgtcaaaagtcccatagctctacacgccagcaggctacttcggatcaccgctctgaagaatcgaggcgtatacagtgcaccaagtgtggtaattcacatatatgggtttgcacaaataggaacaaggccaaggctagatggtgtcaggattgctgtcaatatcatcaagccaaagacggagatggatgggttgagtacaaaggttccttggtgtttgataggcctcaaaaagtggaaataccacgggcttttgtttgcgctgaaagcaagatctttgatgtttcagaatgggctatctgtcanggaatggcttgtagaccaaacacgcatcgacctagcttccatgtaaacatggttggtttagaaaagacccanagatcaaagtcgagccgatatccttgggatttggatgctgaaatgatcgacgaagatgaagaa

SEQ ID NO: 35510 - DNA, 485 bp, Gossypium hirsutum
  unsure (1)..(485): unsure at all n locations
  Clone ID: LIB3147-050-Q1-K1-H8
cccacgcgtccggaaaatggctgcttcggagtttagtgccggtgaaggcagtgtgaatggtgaggttgttaaggtgaggaatttgcggcacggcggcggtggtgaggtcggtggtttcgttttgtggcaaaaaaggccggagctttggtgccttgaactggtggtttccggctgtaaaatcagtgccggtagcgatgggaaagtggcttggagacaaacaccttggcaccattctcatgcttctagaggtccacctagacccctccggcggttcttacagggtcttgatccgcgatcgacggcaaatctgttcacgaattcggtttgtgttggtgagaaaacgatcgatgacgaagactgtntcgtcctaaaactggatgccgaaccttcggctttacgagctcgaagcagcagcaacgtagagatcattcgtcacacggtttggtgttgctttagccaaagaaccggtctcttgatccaactcg

SEQ ID NO: 35511 - DNA, 315 bp, Gossypium hirsutum
  Clone ID: LIB3147-051-Q1-K1-A10
tctctacaccactttaacgtactcgtgctagagacgagaggctgatattggaaatacagacccagatctggcgccagtttgaggaatcaaatgaagaaaatagatgtcacgcaacacatcaagtacttgtgcgagttctgaggaaagtatgcaattgaacagaaaggctgttggaatattgtgctgcaaagattgtaggaaaatctaaagcctggggtgcgtatacttagacactgctagcgctgtgacggtgactagtaccattataaggttgatggaacacactgacagctgtaccaataacattatcatacc

SEQ ID NO: 35512 - DNA, 256 bp, Gossypium hirsutum
  Clone ID: LIB3147-051-Q1-K1-A6
tattcttttattgcttatcggggttaatatgattggaccgtcaatggtggggttgatgaacaggtctctttctctttgaaaataaattgattctcttctataaatgatggtattgttgataaggattgcagggtggacctttatttgagaatatatatgatgattaatcaactttaatggtgtgatgattattttgtactataaatgatgtatcaacatatcacactcttgtgatatgctgaattttaatatagct

SEQ ID NO: 35513 - DNA, 321 bp, Gossypium hirsutum
  unsure (1)..(321): unsure at all n locations
  Clone ID: LIB3147-051-Q1-K1-A9
cccacgcgtccgggagcattgctgcagaggtttatttgcttgaaatccaaagaacacgttgtggatgtgcaacaaatttctctcaacaattgatctaacagaaaaacgaacttaccggaaacttgtactgctaaaatgtaggggaattataggtaccttataatacactttcccctcttctgagtaatgtatgtaaatagcagcttagcaaagattgtaattatgctgtgttccatgaaatagcgctttgcatagattagntaagaanaaaaaaaaaaaataaanaaaaaaattttaaaaaataaaaanatataataatta

SEQ ID NO: 35514 - DNA, 460 bp, Gossypium hirsutum
  unsure (1)..(460): unsure at all n locations
  Clone ID: LIB3147-051-Q1-K1-C5
accggccgaatcccgggtcgccacgcgccggataatagaattaataaattcataagctggtgacagaaaatctctttcctatgcaaatgctctcatctctcccacaaatgaaattttcatacgtaagtttgtatagcactggcttaatactgcatttctatgagaagttttcctactcgaaagttgttgagttattctgtaaaatctttgtaccaaatatacttacaaatgtgaactaggagttgctatccaattcatctagaaaatgcgaatgttccatttagtgggcctctgaaaaagaattcattttcttctagtgaatttgagttgactctttgattgctaaagtataacatcagcaacgtatacatccagaagcaaattggaacctctgattcatcttgtgaaatattctgttctccgttttcagtcatgcattgaatgtgcanattttcattaa

SEQ ID NO: 35515 - DNA, 471 bp, Gossypium hirsutum
  Clone ID: LIB3147-051-Q1-K1-E11
cccacgcgtccggtagggtgctatagtctactcaagtggtcgtgtctccatcattttcgtggatgagccaacttcagggcttgatgcaagagctgctgcaattgtcatgagaacagttaggaatacagtggacactggaagaacagttgtgtgtaccatccatcaaccaagtattgacatatttgaagcatttgatgagctattccttatgaagcgtggaggacaagagatctatgtggggccattaggacaccattctagacatcttatcaaatattttgagggaattcaaggagttagcaaaatcaaagatggctataatccagctacttggatgttggaagttacctcaacagcacaagagttatctttaggcgtcgaatttgctgaattctacaaaaagtcagacctattcaagagaaacaaaactcttattgaagattaaagtaaaccagcttctggtgcaaaagg

SEQ ID NO: 35516 - DNA, 336 bp, Gossypium hirsutum
  unsure (1)..(336): unsure at all n locations
  Clone ID: LIB3147-051-Q1-K1-E5
cccacgcgtncgtttttctttaaaaaaaacttttgagatacttttaactcacgcctcctcttgtccccttttcagtcggcaccgatcctgtcgaagatttgtcgcgccatggccactgatgaaagcccgattccggcgacgagctcacgataacaggtacttcccttctcttactttttgaaattcgtatataaaaagaatgaaataaaaaaaccgaaagaaaatcaaagatagaaaaataatcaccttcaaaagatcttgtttgaatcaattttgtttccgtgctttttcgtactcaatccatattcaatttctctcaaannanaanannnnnng

SEQ ID NO: 35517 - DNA, 254 bp, Gossypium hirsutum
  Clone ID: LIB3147-051-Q1-K1-E7
gcgtccgcccacgcgtacgaccacgcgtccgaccacgcttttcggaatatgactggacattttacagagggaatggattccaatatatgatgtagcacctattctcacatctatccagacattgttgtgtgatccaaacccaaactcacctgcaaactcaaaagctgctatgatgtttattgagaacaagcgtgagttcaacactaaatgaacggagaatgttgagcataactggacaatggactaactccata

SEQ ID NO: 35518 - DNA, 465 bp, Gossypium hirsutum
  Clone ID: LIB3147-051-Q1-K1-F8
gaaaaaccggggcgaccgacgcgtccgcccacgcgttcgtattaggaaagtaaatgacgtttttatgttgatgttaatgaatacaagggggggagatgaattcttgatgggttcaagtcattggttttcatttgaactttgtgattacaacacaacaatttacttgaatggaaatgcacttgtgtttttatatcctacaaagcttctttagtcaacttttgagttgaaattgatattaggatgtaattgatgattttttattatgttaatgaacataattatagaccaagtttgggaccttttattttggttaaagacattgatattcattgagaatttcgtgcattgggattagataattacttgaatgaaatgcactttttggacccctgtatagctttttaaaacatactttgtgatggaaattgtttttatgaattaagaatggagattttttctcaattt

SEQ ID NO: 35519 - DNA, 444 bp, Gossypium hirsutum
  unsure (1)..(444): unsure at all n locations
  Clone ID: LIB3147-051-Q1-K1-G2
cacccgtgctgcagctgtggttcatgtgacagatgattcgacaggctgtgcaatcaccgacctgaaacgtctcttgatgataaaggacttgctttgtaatgttctcaaaggaaatgatgacttgaaaacagcaaaaacaatgctttcagctccgggtgtcatgcatagggagcgaaggttgcatcaaatcatgtttgcagatagggactacgaaagggtggaaagaactggagtcagggcagtcgaagagaggagctcgagaccccaagttaatctgttgaatattgagaaagaatacactgttattaccatgagggcaaaagataggccaaaactactgtttgatattatctgcactcttacagatatgcaatatgttgtttttcatggaatggtcaacacaacgaggatggacgctaatcangaattttatatccgacatgt

SEQ ID NO: 35520 - DNA, 451 bp, Gossypium hirsutum
  unsure (1)..(451): unsure at all n locations
  Clone ID: LIB3147-051-Q1-K1-G5
cccacgcgtacgatttgctgtcgatttcccctttttttgttgcgttctctctgttgctttgcaggtgtttgttgcgagttgttgcaggtatcgtacgaagacgtggcacggctcgacgcgatgcatagaggctacggttacggcggctggagagagcgacgctagaggctactgttgcggcgctcgtgctagggctgaatgcctaaggtttctggcatttggtttaggccagttggccagggtattgtgcttaagtttgggctaagttaattgggttagattttgatgggcatttgggctagtctagcttaagctaaaatgatttgggccacgttgggcccatgtatttggaactgtggactttgntttacttttggttttaatttatttgtgaattttgggcccttgcaaaatttggccttataaaaaagggtattgttgaatattttct

SEQ ID NO: 35521 - DNA, 299 bp, Gossypium hirsutum
  Clone ID: LIB3147-051-Q1-K1-G9
ctgatatattggacttgtcactcagaataacacatatatatccaacctaatccggtgtttacagtttggagcctggaacaggcaacgtataatgtatcctttgtaattaatcaatggtttaagatggttagaaaattgtttcactttcataaatattgtattctactgtcatgagtttgattatgaaagaaggattgatcctcttctaaaaaatataatactaattaaaaaatttattattatatatatataataaattagtataatccataaatttaaaaagggcggccgttttaaag

SEQ ID NO: 35522 - DNA, 329 bp, Gossypium hirsutum
  unsure (1)..(329): unsure at all n locations
  Clone ID: LIB3147-051-Q1-K1-H3
cccacgcgtncgctcttttttcacttggccacacatgaagatacttcgaataagtctgcctgcgttgctttaatggaatcacttaccaataggcggaaaagcatattcaaagctgtccattagtagaaagcagtgctcaattggccgacaatatcaccatgttattgacttggattcagcttatagaacctcaggtaaattatttcattcttcacttggttattaattagaaaagtccaagaaattgctgggtttttgtaccttctgctgtctaagttaccaatgttaacaaatacttggtcattatttggtacataatttttcttttt

SEQ ID NO: 35523 - DNA, 366 bp, Gossypium hirsutum
  Clone ID: LIB3147-051-Q1-K1-H4
gcaccccagccgttaagagtggcaatggaggagaaaacttatgctgaagaggcaagacaggaggcgaaaaggcagattgaaatagctgagcaagagtttgcaaaggcaaagagaatccggcaacaagcacaagctgagttagaaaaggctcaagccttaaaggatcatgcaataaagcaaataaactccaccatccttcaaattacttgtcatgcttgccagcaccaatttcaagcaagaacaccacccgaagagaactcccttgttgcgagttacatttcatcagcggtaacagaaggtgaagttgaaaacgatattcaaacaagtcttacaaaggcgactaacacataaacccatctaaacata

SEQ ID NO: 35524 - DNA, 460 bp, Gossypium hirsutum
  Clone ID: LIB3147-051-Q1-K1-H9
ctcaaacaacatttcatctgtgtaagcaattagcagaggctgctgaagcatgtgagggattgagtggaagaacattgagaaaactaccatttttggcgcatgcagagcttgataacccgtattgttgtgaccctaacaagttgttgaacacaatgatagacacagcccggagggagcgttccgaactgcccgactgaagtaatggagttttgtactggtgtaaaatggatggttcttatgctgaaaatgttaaatctttggcgatacccactgccactgatgccttgtctatcttgactttaaatcctctcgtgtaatgagattataggttatgggatagactatagagtcgtacacaagatgcagagggttgattagaaatcatgtttgttttgttttcaagcataacaaatgtaaaaacctaaacagagcacacaataatataatagactcgagcaat

SEQ ID NO: 35525 - DNA, 434 bp, Gossypium hirsutum
  Clone ID: LIB3147-052-Q1-K1-A3
tgaagattcatgccatggatcacagttcttaagcaattacgttaagaaggttccttttctcctaactcttaaccaacattcttttgatgcattgttgataatgatataatggaattaagcatgcatcaaattatgatgcttgccttgtttcttgaacagcttaatcatgagttagattgtcaattcagtaggtgtagaggcagacttaactcagtcccgatcttcccatcggatgatgttctatgttttccaaggtgattatagcttgtgttctccattaaacagtaaattatgccttgcagatcacgtcaaattggcctcaatcaccaaaatctggaaggaagccatctcccagcacagtgcaagatgcaaactctatacatccaaggaggccttcaattaaggctgaaagctctaaaatggatcaatgaaaa

SEQ ID NO: 35526 - DNA, 351 bp, Gossypium hirsutum
  Clone ID: LIB3147-052-Q1-K1-A5
gagaaatcggggaatgggaagactttcttcacttctttatcgaaagggatcgggaggatcgggatatttagcggtcccggcggaggaaaacgtcgcaagccacgtggatcagaagggaaaagcggaaggagtcgaaggtattctgtgtcttaaaacatttgctttgcttgtatttaatagtaggaaagtagtaggacgtgaagaagcttctcatttctgactgtatgtatttacctatttatttagatttaactacaaaattgacctcaaattatatatattatttaggtaccttcgttttatccaaaaaatatacgacattcaataaaaatgtgcacgtatcatgttttt

SEQ ID NO: 35527 - DNA, 446 bp, Gossypium hirsutum
  unsure (1)..(446): unsure at all n locations
  Clone ID: LIB3147-052-Q1-K1-A7
cccacgcgtccgaaacttttggatgctactatgaatatggaaggagttttgttggccggggttcctggagcaggtggatttgatgcagtctttgctgttaccttgggtgattctagcaggaacgtgacaaatgcatggagttcgcacaatgttctggccttgttagttagggaagaccctcaaggtgtttgcttagaaagtggcgatccacgatgccgggaaatcatttccgcagtttcttcagtcaacatcaagtgagctttgattaattgttttgggtttgatgagttagggatgtcatttaaagatttggtggaaaacatgatttacaagagaaattgtactgtgttctggagatataatttaattgggaaatgatttcannttgncgaaaacaaaatattaattctatttggtttattaatttnntatgaaataaatttaaa

SEQ ID NO: 35528 - DNA, 132 bp, Gossypium hirsutum
  Clone ID: LIB3147-052-Q1-K1-B3
cgtacttatgagatgaaaaggggagattagtgccctagccggaaactgcctctcaacttaaggacgcctacggtttaagaactctgctgataattgaatcatgattctactgaagaaaaactaacaacaggt

SEQ ID NO: 35529 - DNA, 483 bp, Gossypium hirsutum
  Clone ID: LIB3147-052-Q1-K1-B4
caaccattttttggcggagaagagagaagccagtcggagatgcagctagtaaggtccgggcgattggtgtatgacccttgaacggattggtgttggaacgcatatttgccataggggtcgaaccgagaccatgaagcggcgaatgtgagcggtcccaacgcagatgacatatcagggttagattgtccgacgacgatggtggtggtggggggatttgatccattagaaagatcggcaaataaggtattatgaatggctattgaaatctggcaaagaggcgaggttgatcgaatatcataacatgatccatgcgttttatactttcccactcatgcccaacttcccacttggttgtgcaaatcaaggagttcattgccaagtgttcatacagagttccaaacctcaaatctgaaacctacatgtctcaagttcaactttcacctcgtaagctcaacttaatccatataccagatttatgttgga

SEQ ID NO: 35530 - DNA, 216 bp, Gossypium hirsutum
  Clone ID: LIB3147-052-Q1-K1-B5
gtttaaaccgtctgtttgttggccagcatgagccggcaaacattatataggcacctagggtgttttttttagggaatacggtactgtaaggacttatttccatactgccccaagaaagcagagaaaagaccttacatttctggatgcagaacacatacatacagaattccatgttttttgaggatgagaacccttaccttcaaaactttagatcct

SEQ ID NO: 35531 - DNA, 402 bp, Gossypium hirsutum
  Clone ID: LIB3147-052-Q1-K1-B6
cccacgcgtccggattggagtagtttgagagcacaaacccctccaaagcttgctttagagacaggggctcaatcaagtgatggcgatgattataatgattcttcatggaatcctacgcacattggagatggttctgccaggcagagtgatggaatcgtcagctcctcatcatcagctgaatcttctggtcatataactagacttgcctcaattgattccttcgactcaaaatggcaacaatttttggatccgggagaatctgttcttatgatctcaatggtgaagaagctacaaaagttatcaagcaagaaggtgcagcttatcctcaccgacaaaccaaaattgatctatgttgatccttcaaaactggtcgtgaaagggaacattatttggtccaacaat

SEQ ID NO: 35532 - DNA, 276 bp, Gossypium hirsutum
  Clone ID: LIB3147-052-Q1-K1-B7
cacagatactgtggaaggaaattgcctcaaacatcacatgccattgttgcttccaactgtaaaatagaagatttgtgacaattggaacctttcttgtaaggttctgtttatttattttgagttgctagtacgtgtttgatactggaaacttgaattttaagtttcgtacttatgagatgaaaaggggtgaatagtgccctacctggaaacttcctctcaacttatggtcgcctttgttataataacttttctgataatttaatcatgattttattt

SEQ ID NO: 35533 - DNA, 298 bp, Gossypium hirsutum
  Clone ID: LIB3147-052-Q1-K1-B9
cccacgcgtccgcccacgcgtccgcttaaattgatttctatcagaacttgtgtcattgtgggaatgttgaaatttcataaacgatttgtctctttaatggaataccttttttattctcaaaaaaaaaaaaacaaataaaaaaaatggcggactgaataaaaaatttaagttttcgtacgttaacaaagcgacatcaaaaaaataaaatatagacaccttaatttttttatactaaacaaaaatttacatcctctttactggaaacacccttacgtaccccaacttaataacctatcac

SEQ ID NO: 35534 - DNA, 290 bp, Gossypium hirsutum
  Clone ID: LIB3147-052-Q1-K1-C3
gaggaaacgccaatagaggagccagcggccgcaccttttgaagctgagccggacacaacatgagatggctcgggtgggggaggaacctgaattttccatatccgaagctccacctgagctcaataccagggaattggtcaaagaataatcaagcgctgctgaggaatcgtaaaaagcaaaggatgaggcataggatgacacccctgcagtgcagacagaaacagttacagtggacgccaatgtagagaccgtggaacccaccttggaagcagcgttggcagatacaccat

SEQ ID NO: 35535 - DNA, 285 bp, Gossypium hirsutum
  Clone ID: LIB3147-052-Q1-K1-C8
tccgagtttttccttgaaaccatgtggacgtacacgtttattacaacaaggtaactcgtgatgggggattgtactaaacttctagattgcaagctatttttgaaagacttctaaccaagtgcttacaattgctgcgctatttgagtatggagttattcaaagctatctaactctactaaaaatgattcatcttcaccgacctagctcatcattgtacctatgaatactactgtccgcgaccttaaaactgaagctacaaaattttttgaagatgtatatgccatg

SEQ ID NO: 35536 - DNA, 287 bp, Gossypium hirsutum
  Clone ID: LIB3147-052-Q1-K1-D1
gcgacccacgcgtcctccgacgactcctctcttagaacctgatatcacagttctttaagacaagccccgaccatcatggggggcttctgttgacggatcatccgcactttccactacagaaacacctcctactccaaacgttgccaaacccgacaaggactaaacacccgctgctcatgactataagcctatgcaatacaatcgccgctatgtcactgccgcagttcattctgggacgaaccccgtgctcacctatttagagaacttagaacccacatgtgcaacac

SEQ ID NO: 35537 - DNA, 385 bp, Gossypium hirsutum
  Clone ID: LIB3147-052-Q1-K1-D6
ccggggaataattgccgcgaccaacgagtcctccgggctcgcatccgcctacacatccatgttattacgtcatccatcatcataactgaaaacggtgttcgtttctagacgagacacttccattgctcaatcaaaacttccgtaaaaagggcgttaactgccgcgagctgaacaagcttcacatcacctacttcttcttatcccggctcctgacgacgcacttggcgaattatgatggtcgaactctgctgatcaactggcatatactcatcttaacagctatgcaacgaatgatggagtggattgattatgaatgtgaccatcactcttcattcatcatgataatgtcactgagagacaccacgaaaatacatggtccagagca

SEQ ID NO: 35538 - DNA, 286 bp, Gossypium hirsutum
  unsure (1)..(286): unsure at all n locations
  Clone ID: LIB3147-052-Q1-K1-D8
cccacgcatccggggcaaaaccgtaactaagtgaggtgccggctgagaaacggtggctggggttcggatcaaatcgttaggcttcctattgtttgacatgaccttcgcaggcatgaccttcaccatcaaaggcagaacgtcctcatgtggctgtcgcaagtgattttaacaaccttgagccactacatgtggaatcattattattgatgcacgcatcccaacctcgaagtacaaaacatggtggaantacaagaataaacacatgcaaatgcggaacctcatatat

SEQ ID NO: 35539 - DNA, 438 bp, Gossypium hirsutum
  Clone ID: LIB3147-052-Q1-K1-E10
gaggcggtgcctacaaaggaatatgtcgaataagtataatttatctcgtaggaaaaggggggacgaattcgatctccaaagggagagggaagagaaagaaaagaaggttaagaagcttcaagcgaagaagaataagatgaaggttgatggtagtgagaagaaaaagaagaaagctggaagtgggtttcaagtagggaaaagaaaattgaagaccaagttaactgaagttgctaaagctaaagcagctctagcaatggagcttgacaaatgagcttcatggttatgtaattttagagggaatattcaatatcctcttcttattcttctttttttatttttacttttatttctgttaaattttgattattgagatgaatgcatatgttagcttgagaaaaaaaaaaatttatttaaattatatattaataaatttggggc

SEQ ID NO: 35540 - DNA, 488 bp, Gossypium hirsutum
  Clone ID: LIB3147-052-Q1-K1-E12
gaggaagcaaattgaacaactctacaagaaggctacacccaaaaagccccaaagggggtgcgtggtctccaagaaaggggttcaagttagggctggcaaggggaaagtccttgttgatcgacggatgaagaaggatgctagggcacgagcaacgggtaaatccggaaaaggctgttcaaagaagggaaagaatggtaaagttgataagaaaggtaaaggttctggcaaggcttcagggaggaagggaaacaaaaacaaaggtagccattcatgaaagaacaagttttgaaagatgcaattttagataaaaaattgaacaataaattacatttaggaactgttttcttttgttgtggttgatacttgatagattaaattgaaagttcgatgcttttttgagtgtgtgttgattcaaagtgtaatttgcctgttccatttgctgcataaatattgtcgtttaaaagcatatcctttgtgttctgtaccaa

SEQ ID NO: 35541 - DNA, 327 bp, Gossypium hirsutum
  Clone ID: LIB3147-052-Q1-K1-E8
ggcgcaggcgtccgaaatcccccttttttgcggcgattaacgtatgctgttcggggctcgaattccgaggatggggcataactcgcgtgtaccagatagagcaaaatcaaaaaaggcgctcaagcacgaacgggcaaagacagaaagaacactgactatggcttaaccccagaacaacgccatacaaagagatgcgtaggaccttgcacgaaaatgcggcaaacaaagcatgccaagcggcagttttaaggaacaatgctggaggcaacactaacaccaaaaactaattattcaatgatgccaaattgtgaatgagatatttcttct

SEQ ID NO: 35542 - DNA, 488 bp, Gossypium hirsutum
  unsure (1)..(488): unsure at all n locations
  Clone ID: LIB3147-052-Q1-K1-F2
aatggattgagcgagagtgtgaagatgagattatttgctttgggcagtgaagttttgttgcaaacctcatcgtctttatctggggtggtaaagaaacaaaggtgccaaaggagaaggaagttgggagaggaagaacaagctgcaatttctttgatggcattgtcgtgtgacacagtttttgcgtaaaatatgaaacagactagacaaaacaaaacaaacgaaatgggggtttcaaaaaggaggggggggggaaacactaaccgaaaaagctgtttcttcattttgtcttttttttgcctgggattttccttattagtgaaatgaaaaaaacccatgttattgactgctgctgctgcttcttctttnttttgttntggtttttttacgtaagagagagttgagggaagtaatgttttttggggatggctgatgatggttcaatcataatgtaaatagtagatcgagaatcaatgagaatggcgtatttt

SEQ ID NO: 35543 - DNA, 289 bp, Gossypium hirsutum
  Clone ID: LIB3147-052-Q1-K1-F3
cccacgcgttcactctaaccctagccctatatcatgattcaaacacgaaaggaggtaaaggcgaatcataagcctggagcgccaacctctcccagaataataaatcaaccaccaacgctggaaagaaatcagggaaggcagctaatgatccaaactgccatgacgcctggttgcgcctacttcacatttatggaggaggtccgcgagctatacaagaaggaccaccctaaacacaagtccatcgctgctgaaatcaaagccggaggagataaacggaagagcatttctg

SEQ ID NO: 35544 - DNA, 445 bp, Gossypium hirsutum
  Clone ID: LIB3147-052-Q1-K1-F5
ggacaaccttgaaaatctgcaggaggagattaatcgattccaggggagctggggaatggaccggtcatttatgcccagcagaaagtcgtttgagcgtgcaggacgctatgacatcgcacgggcattggagaaatggggcggccttcatgaagtttctcgtctactgtcactcaaggtgagacagaagcaccctagcagacaggggcaaactagtgccaaggaaaaacaggtagacaatatagcagcaagtaggggcatagaaagtgaagaaaagactccaatatcaaagccatatgtttcgcaaaatacacaaaagtggctcacgaagctaaaaggtttagacattaattgggttgaataaatgtgcctactactactattactaccagtctactggtttagtttctttccttatgtttacggagtataataaattgggtttaat

SEQ ID NO: 35545 - DNA, 422 bp, Gossypium hirsutum
  unsure (1)..(422): unsure at all n locations
  Clone ID: LIB3147-052-Q1-K1-F7
gtttccagtgaattacatgcttttcttgatcaagtgatagaggatcacctggctatgatgaatgaagatgatgatgatggtgatacatcagagaacaaagattttgttgatatccttcttcgtcttcagctcgatggcaagctcgatatcagtctaactcaagataacctcaaggctataatactggacatgtttgttggtggaacggataatatagctgcaacactggaatgggcaatggcagagcttgtgaaaaatcccagcataatgaagaaagctcaagaagaagtaagagcgattgttggtaagaaacanacaatcagtgagattgatgtcaatgaaatgcactacttgaaatgtgttgtgaaagagacactgagactccatgctcctgttatggtgtcaagacaaaattccacagc

SEQ ID NO: 35546 - DNA, 268 bp, Gossypium hirsutum
  Clone ID: LIB3147-052-Q1-K1-F8
acgcgtcctacgttcccaaactccactggcctgttttatcaaccaaacgacgctaatcgggggtgaatttcaatagcggcttgctcttctggaatagcaaatctttcgctgctgccgcattgaaatatcttgatgaacgtgatgctccactctatcctcataggtgtgctagcgcccattttgttttcatagtggagttgcgggagcactacttggatgcgcccccttctaactaattgcttgctgatagtagcacagccgccgtaga

SEQ ID NO: 35547 - DNA, 466 bp, Gossypium hirsutum
  Clone ID: LIB3147-052-Q1-K1-F9
taacaatgtcactagtaaagaatgcaagttcgtatcgatatatgctggaatatagtagttgactataaacatggttctgtttgttctttgagacacacagatgtgcattcagtgcaataaccaaactactcgaagttccaaggataggatgctacttcctcgttattctttgttcagacgtgatgacggtccacttcttctttctggtgaagaacacggggagctggatggaaattggtaatagcattagccatttcggaatcatgagtgcccaagttgtgtttgtgctgctactttttgctctcacaaatatatacacgaaagacatcgaaatcagatcagggagtcgagattcccgaaaagtaatgtgattcacgagaaaccagaactcattagcattataattaggtagccaaatttatttgcaaggtaaaagcatttagtttctcagattctatggctttcg

SEQ ID NO: 35548 - DNA, 344 bp, Gossypium hirsutum
  Clone ID: LIB3147-052-Q1-K1-G1
ggcgcgcccgcgcgtgcgaccacgcgtactatcacaaatggtgctggccttgtatcttacccaatcgacactgatcggtggagattgttattgaggtgttgcaaaactgtccaatacaatagctcgcttgctgccttttctcaaatctggaaacacgcacgtgccaagtctctcttcaagggtgctggagcttacatacttcgagccattgccggtgcgggcgtgctatatggatacgacactgtgcagctcattggtatcggaaggaagaactgatcccgtggtgcataaatctaaggaggaactatcacttccttcttttgttaagcattcagttttaaaga

SEQ ID NO: 35549 - DNA, 235 bp, Gossypium hirsutum
  Clone ID: LIB3147-052-Q1-K1-G4
tcccacacgtcctcccacgcgtactcccactcgactttctgtgttttcatacacaccaaaaggggggttttattcaatgtaagctccatcatttaggtaacaattgacccactagcttactatatgccgctaaacttcacggctatacattcatctcaaaaaccaaatatattgggttgctccaaaacttatataatgtgaaacaatatccgtctaactttcactgctttattat

SEQ ID NO: 35550 - DNA, 346 bp, Gossypium hirsutum
  Clone ID: LIB3147-052-Q1-K1-G8
cccacgcgtccgaagggtagaggatctacagcacctggctggacaggggcagggtttgagggggatggtagaacctacaggcataatttcaggtcctcttttctttactgaaggatcaggacaaactatcatgtacggggtatcaccagtctttctccccaatttatttcttgatctcgaccctggcatcctttcaatcgcatatagctggttgatatgaatgatgtcatatggcttttctttcttatttatgacctgaacagataagtgtcattagtattgactccaaggaggaaattatttagaatccatctctttaaagaaataataatataaacaatttggg

SEQ ID NO: 35551 - DNA, 368 bp, Gossypium hirsutum
  unsure (1)..(368): unsure at all n locations
  Clone ID: LIB3147-052-Q1-K1-H2
cccacgcgtccggtcttatctacgggccattgcttcaagttgagtcactacggtaggaatgtgttgtgtacatcagaaaatttttttccctttgaatcattatatccctacttttatgttcaatgttttagcttagaatctatatagttcttgcgaagttacaaaccttaatccgaccattcttttcgcccatatctgctattaagaaatgaattatctgtgtaaaatctaattaggaaacttgtcactttatgcgatttgttggtaattttggatttagagtctagagagtggtttatgcaatggcttacttgtagcttcatcgngcttgttattttccacatatgttgattttttcttaaattgaa

SEQ ID NO: 35552 - DNA, 291 bp, Gossypium hirsutum
  Clone ID: LIB3147-052-Q1-K1-H3
agggatgtgtatattgatagagcataaacccgaacttaaaggtgacccctaccaaaccctcgtcaacttttaattgggggaccaccgtcacataacggggcaaggaccttactttacttaccaagactcgcaacttgctaatactggtggaaccggcctttttgaaagttttttttgccaaggtaaggctcaacaaaatcgcctccattttaatcttttctacactttctattttaagggaattggtgaactcccaaaagagacttttttcaaaccagttgacccacaccc

SEQ ID NO: 35553 - DNA, 487 bp, Gossypium hirsutum
  unsure (1)..(487): unsure at all n locations
  Clone ID: LIB3147-052-Q1-K1-H4
tgcatctccatcactcattttccgatcacacaaacaaaaaccaaagccatggcgccgccacctggaccttactctggcaccagcactctcgctctcgtggctcgtgcatctgctttttcttttggacttgtttatgggaactttaagctcaagtacctcaagatgaaggcaaagtctcaaaggaaagctgaagcaaaggcacaccattgaagcagggggggggggtcttgttcatagttcaattgcatgcgtgacctgagggtttttctttttgtcgtaataatgcattaacaatgggattataccagtttttcattttggcctgcagctttttatggaccatggtgaactgcctttaataactttttcgggtagttatcatcttagccattcagggtttgtttatttcctgtagttaaacatgcaagctgctggngtgattatatattctccgcagttctaaataataaattcagtctcttttttg

SEQ ID NO: 35554 - DNA, 406 bp, Gossypium hirsutum
  Clone ID: LIB3147-052-Q1-K1-H6
ctcaaccattttaaatatcaattggacgcacgcaacatgagctaacatgatctcgatcccgataactatcgccaaaatgcttctgctgtgtctcctctccacactcacaacaactcatcacccttcggtagcaacaaattacactactagttctcaatgccataatatccatatatacaaatattatataataatgcgcacggtggtactacattcaatgccttgtattaatgaatcatttgcttgcaactcgtctcggcttcttcttgttattgctgactggatgatcaggttctgcatggaggcaagatccgcttgcttctaacaatttatttttcattatgcagcagcacatgtatcggaatgaaattatttctatattattactactactgttgttttagcc

SEQ ID NO: 35555 - DNA, 483 bp, Gossypium hirsutum
  Clone ID: LIB3147-052-Q1-K1-H8
cccacgcgtccgcaccgccagttcatgaagcaggtcccgctaaatctttgatacaaaatgtgaaaagttatcctggtagagatgatggacatgaaccgactggatcccttgttcccaacctgaatccaaacatggccatttcgtcaaatgggattttgccagtgtcatccctgcgaaaggttaggtctggagcaccagatagaaaagtcagggatcggcccagcccactggggccaaatggaaaggttgatagtttctcacatcaatccatgggaactgaagacaatggcaataaattgggtttggagaatggggatttgacaccatatgattatcagcgaccattgcagcatcctcaagcagttgccgagcagcctcaaattgaaagagaaggtttggtgcgttccacgggaaagccaagggtgcttagcaaaggtcagactgaacgagccattgttgaagacggtgaggaggtggagcaat

SEQ ID NO: 35556 - DNA, 393 bp, Gossypium hirsutum
  Clone ID: LIB3147-054-Q1-K1-A4
acgcccacgcgtacgcggacgcgtgggggagtcgtactttataatattgcatcagtgacccaaggatttgtttggataacttatatgtgatcaaattgatgacgattgtaattaagccccactgatgtaaaatgaacaatctttattcgaacacaaaaagatgctaaagggagtggctaaaaaaaagccggttctagaaacattggaaaataaagtaaaaaacgggcggccgttttaaagggttcaattttccatcccccccctttcaattttatagcttttctatagtgccccctaaatccaattaaatggccacttttttacaccggggggactggaaaaaccctggagtcacccaatttattcgatttgcacaactttccccttttgccg

SEQ ID NO: 35557 - DNA, 461 bp, Gossypium hirsutum
  Clone ID: LIB3147-054-Q1-K1-A8
tcgaccacgcgtccgggtttgtgacagtaacacggacacaatacacttccatgccgtcttccagtgacaaacttcgcctggaaaagctaattggagctggtgacgaggatgcagacttccctgttaatgaggggtttaatataaaggcattggattcaggcagagcaagagcacagaaggttgctaaagggagtggcttaaagaaagccggttctagtaacattggtgaatcaggtgagaaacgacgaagtgggaaaaaggtttcctatgcaagtcaacctgtctcatttatatcgagtggcgtcatggtatctgaaactgatgagatcagaactacggatcctgaaggcacatcagaaagttacgaacacaaagatatcatcagatcagcacagtttggtgcattcgaggtacatacaaaagggttttggatccaaaattgatggcgaaaatggggattt

SEQ ID NO: 35558 - DNA, 447 bp, Gossypium hirsutum
  Clone ID: LIB3147-054-Q1-K1-B10
gtgaaactttcccctttatcctcttcttttttttattttcttctttgtaaatgaagaaacagaaagaaatagaagaatagtcaagaaaaaaaatgaaatgctatgataagtttttaaaaaagagagcaaatcacctcttttgatttcttgttgttttttattgctatgtgcatgtaaagaaaatacattgatttgtttttgggcttctagccaaaagaataaaaaaaataaagaaaaaaatacaagttttttctattttctttcctatttggtgttgttctcttgtttgtttgcaggtacatggtgtgtatggtgcgtgtatggagggtacgaaggcatatgtggcagggctggcgatcatacaaagctgttgcagcgcaaaaaggtgacctatggttttctagtgtttgggttttgggccagttgggctgtgtataccttttgggc

SEQ ID NO: 35559 - DNA, 246 bp, Gossypium hirsutum
  Clone ID: LIB3147-054-Q1-K1-B2
cacgcgtcgcgccacgccgaccgtgaaaccaccacaatcctcctcgcatgccttctatcaactacaaagtgaaggtatacacgctcagcaatacgagcacacgacgatacaaacatccctggctatgacgtgtttttaaaaaaagacagtcgaatcacacggcttgatgcattgactcgcagaccgttattgctgtgagcgtcttacgaaaagccagctcttctatcgtgggccctatagccaata

SEQ ID NO: 35560 - DNA, 368 bp, Gossypium hirsutum
  Clone ID: LIB3147-054-Q1-K1-B4
cacgcgtccagccacgcgtccgaaaaaacacaaaagactgaagtgtgttatatttgaaattgccaggtgaaagaacactgcgcgtggtgtttgagcccatcattgtttatggcactcattcttaccttggatcaagatgtaaaaaggagttcgtctttacactgtacaaaatccatgctaacgtacggacccgtgcagggcaatttgtataatatacgggagcctgcacacaattgagttgccaagatcttaaggttgcaggactgggagcacagtattgattcccatctgcttcaacttgcagatcatacgcataacaccaggtgaactcctaccgaagtgctcttaacggactttatttacaatgg

SEQ ID NO: 35561 - DNA, 204 bp, Gossypium hirsutum
  Clone ID: LIB3147-054-Q1-K1-B5
gttgtttgagcttgaacgaaaaacaatagcccatgaatgtctttttttttttatgcttctaggagtttttgctgatcattttcatttccgctaaatacttcactttagaacttctccatggatttgatgttcaaaggacatgtttttgcaacttaatatttgagtacacattatgtggtaaaaaataaatatgatctttacctt

SEQ ID NO: 35562 - DNA, 301 bp, Gossypium hirsutum
  unsure (1)..(301): unsure at all n locations
  Clone ID: LIB3147-054-Q1-K1-B8
ccgggncgaattcacgcgtcgccacgcgtgcggaaataaagaacaggaccatggccttctatttataatacggacacattatagaacaattgcaagatgccgaggacgcagtctaagattaaaggctcgtatatggagaatcgtccaaggatgtacatgggagttcatctttccacggaacaaactcaatggacatgtacggaccttggaagagcaaatcgataaatgtacgtgcgcagtcacattgaactgatcctgacatcgaaagatgacacctccaagaacaaaccattgactacgt

SEQ ID NO: 35563 - DNA, 338 bp, Gossypium hirsutum
  Clone ID: LIB3147-054-Q1-K1-C1
cttcgcccacgcgtccggccacgcgtccggccacgcgtgcgtccacgcgttcgcaagaagccatgtgtttctcgctcaaactgacgcccaaatacatcctccacattcctgaccctaatggggggtaaaatgagattgcatttttaaacatttctggaatccgcaattacagatgccttgtctctcataatcccaacaaactctctagctcaatcaacggcgataacaacattgtttatggcccaactgaagacggcaattattcaacgaacaatgatggttcgacggctggaaacaccgaggctggtcaaggagaatcgtttttttcatctaaagat

SEQ ID NO: 35564 - DNA, 440 bp, Gossypium hirsutum
  Clone ID: LIB3147-054-Q1-K1-C7
cccacgcgtccgagtggacagcctatgccgtttactgctttggctacatcacttgcaaatgcagcacctgaacagcagaggacgatgcttggtgaaagcttgtatccccttgtggagcgactggagcgtgatgcaacagccaaggttactggcatgcttcttgagatggaccaaacggaggttttgcatctcctcgaatcaccggaagctttgaaggcaaaagtagcagaggccatggaggttttgagaagtgttgacgctcagcaacagtccaacaatccagctgaccagctgtccttaactgtcactgaatgacaaccttgtctcctgagtgaatgaacttgagtcgagattcttggcagagaagttgctagacccttttatcaaaattgggcttatctttaagtacggttggattttacaacgtttattctttttgg

SEQ ID NO: 35565 - DNA, 187 bp, Gossypium hirsutum
  Clone ID: LIB3147-054-Q1-K1-C9
ggggtgcttaatacatacctttttgctaatgcctccatacttcaaaatactcctcccttactttacaacttattccactgctataacccttgatttacccaccttaaatctaattaaaccccatccttattaaaccataatggccttgaaaaacagcgccttccccaatctaccttcctaacaaaaa

SEQ ID NO: 35566 - DNA, 400 bp, Gossypium hirsutum
  Clone ID: LIB3147-054-Q1-K1-D1
tgaaaaagaagatggctttatagccgaatgagaaaaataaagaaaaatacaatattttcttgtctccttttttcttttttgctgttgtgctgtgctgtttttgtcttcatgcagatgggggaggacgtagaggcacgagcggcgctggggagtacggaggtcgtgcatgggagcgtacggaggctagaggctacggcgctaaggtggaaaccctagggtttctgtggataatctggtcttgggccgcttgggcccgatttgttttatttgggtattgggttatgggtttgtttgggcttagaattgggttttttgggtattgggccattgtaattgttttgggctgttttgtaatatttggactgatggccttttgatttggatattaatatttttgttt

SEQ ID NO: 35567 - DNA, 439 bp, Gossypium hirsutum
  Clone ID: LIB3147-054-Q1-K1-D3
cccacgcgtccgctgagccctgatgttgtgaacatattgccaggcttgcagggggataagatagaagatgagttgcaaccagacaaggtgaggaagccatatttgtcggaggcatggctggtacaaggccctgtaccacctcccattccaacatgtgtatccaagaattcagcaaaggatatgaaggcacaaatcaagttttgggccatagctgtaggcaactaatgttcgacaagagtgctgagaatagcattaaaaacatcacccatttctcgtaccaaatttgacataaattttgcttttcttttctatttctactctcatttatccatttaggactgatatcctttctattttgcccggtgctcatgtttcgaaggcctatagaagcagagtccttgtctgatactatgaaatcttatgtaaacaaaaatctttt

SEQ ID NO: 35568 - DNA, 451 bp, Gossypium hirsutum
  Clone ID: LIB3147-054-Q1-K1-D6
cgtgacgccacacgttcgcccacgcgttcgtagatgctaagcgccggaaggtcaccgtctgtgtggtgataactgtggtgactaaggaagcccggcgactatgaatctttgttctaaatgatacagagatttacgacttaaagaacaacaacaagcttgttctgctaaatcgactataatacctgtccttcatcttgagtcaaccgcaggcgaatctgtgttctcacgcacctatcctgactatgcctgaagacaaaggagtcccgctgaccgtgtcggctgtcgcgatctctacggtggcggatcagaaacgacaagagcgacagcaactttatctagtgcaacaacaacaacgacggcaaccgactcggtgcactgttcgcaagaaactggtcggtttgaccggattcaagtgcatgtgcaggattacgtttagctggtcacacaggta

SEQ ID NO: 35569 - DNA, 446 bp, Gossypium hirsutum
  unsure (1)..(446): unsure at all n locations
  Clone ID: LIB3147-054-Q1-K1-E11
cggaanttccccgggtcgagcccgacgccgtccggacccgtttcccctcatcgaatttcgtcaagggcttatcgccnngcccatctcatagcgcctccggcaagggggtgagccttccttcatnggacctgagtacttgtcaagaaccggcaaatctcaagggatnacttcctccatantgatcnnctgattggtacctanttatcagagccnnngcttccatgtgcgaaggaataatatatnnnctgagggngtaggtcttnnggtgttggtgccctttagaaggatntnttacggtggggctatagaagaaatgtgaagccgtcccctcgccatttctgtaaagagnncagtggatctgttgcttcgccacaattcttcaacatattgcaagaacgttaaacatcattgatatntgatccctaaagggtggtagggagaaatca

SEQ ID NO: 35570 - DNA, 319 bp, Gossypium hirsutum
  unsure (1)..(319): unsure at all n locations
  Clone ID: LIB3147-054-Q1-K1-E3
ccggnctggagaacccggcgcgaccgacgcgtacgcccacgcgtccggaaacgctaaatgggccttccctacatgcgcaccgttccgactcccaagagtgattctggcgactggtaaatcgatcaaggctctcgctataatggtacatatgaagggtcgagcacatctagcatgaagaccacaagccacgaacagtggagatagctcgaaatataccatgagatgagatagttctgtaattaggatttttatttaagatatttttattgtttgggaataagcgagaactgatgtggcgtggaatcatttaatgaaaggt

SEQ ID NO: 35571 - DNA, 207 bp, Gossypium hirsutum
  unsure (1)..(207): unsure at all n locations
  Clone ID: LIB3147-054-Q1-K1-F3
ccggnncggaaaaccacggctcgacccacaccttcggcacagtactagaattccttgtttccattatctatctcaccgctccgcaaatgatcaacatagtgcgtttttggggcaaacctgtcccaaaggatattataccaaacctcgttcatgatacaaaccttttaacatcttaactccattttatatgggtctatatttttaggt

SEQ ID NO: 35572 - DNA, 374 bp, Gossypium hirsutum
  Clone ID: LIB3147-054-Q1-K1-F4
accgggtgggaccacgcgtccgatttttcctgctagcaaaacagcggacattctccaaccactcgttcgcccacacatgcgagggttttctggatgccgaacgcagtcataactatttgttcaagcaaaacacgaaacgcttgtgctgaattgattcacgtattttttgtcgatgattgctgtagctcatcaacattgttataaatgttttgctagaaacaggacaggaaaatttagatatgcagaactctgaaagctatgacttttgtatgtgcgtgatacatttatgcattcataagaggtgcagcgtgtattttggcgtgttcgcggaaatgctggctgaagaaggggagacgtgggacgttttcacgttg

SEQ ID NO: 35573 - DNA, 286 bp, Gossypium hirsutum
  Clone ID: LIB3147-054-Q1-K1-F8
cccacgcgtacgcatatctctctctctctctctaaaagcccactctgaagtttaaagagagagaaagagatcgtacactttctctctctagaactctaaagggtcaaagctttaaagcctccaaatatatacatataaatcgagagagagggagggaaacatattttgcctctcttttaattatcccctagcgagagatattgaatcatgggtggcgcgaagaaattcggagctcttctatgctctgcgtactcgcactacattaataagaggtactgcaggtatt

SEQ ID NO: 35574 - DNA, 447 bp, Gossypium hirsutum
  Clone ID: LIB3147-054-Q1-K1-G12
tgggcttatccaagaagcaatgaagcttttttgattaatgagggaaaagggtacaatccggggagttgtaatatacacagctgttgttgatggcttctgcaaagcacacaagcttgaggatgcaaagagaattttcaggaagatgcaatcaaaaggtgtgatccccaatgcttttagttatactgttttgattcaaggattgtataaattaagcacttggatgatgccgttgagttttgtttggaaatggttgaagctggacattctccaagtgtcaccacatttgtgggcttggttgatggattgtgcaaggagaagagtgtggaagaagcagtgaatgctattggaaccttaaaacaaaagggatttctggttaatgataaagctgttagacagtttctggataagaaggctcctttttcacctttaatttgggaagcaatattt

SEQ ID NO: 35575 - DNA, 212 bp, Gossypium hirsutum
  Clone ID: LIB3147-054-Q1-K1-G3
tcgcggacgcgtggattcaaattcaacgccatgctctaaagtttttctctaaggctgattgttgtgagttcattacaagatttcattgattaactaaacgtatcatatcttttattaccaagatttacttgatttagaaaatgcattgcatattttattacctcgcatatgtattattaactgtaatattgatgtgtagacccttatgttta

SEQ ID NO: 35576 - DNA, 421 bp, Gossypium hirsutum
  Clone ID: LIB3147-054-Q1-K1-G4
agaagaaggtgcagaaaatgagctgtcatttcaagagtggacacaacaggttcaggatatgctgaatacaaagaaatttggagatattgcatttagagacaaagattttaaaaatgctattgattactactcaaagttggtagcgatgatgtctgttccttctggtactgtatttgtgagaagagccctttcatacttgattattggccaaccagaacttgccttgagagatgccatgcaggctcaggtatgcttgcccgagggccccactgctttttacatgcaagcttttgccttctccaagcttggaatggaaaccgatgcacaggacatgcttaatgatggagcctcatttgaggcaaaaagcagaatggctggcgtgtctaagcagcgatcaggcagtattgttaatttttttttc

SEQ ID NO: 35577 - DNA, 415 bp, Gossypium hirsutum
  Clone ID: LIB3147-054-Q1-K1-G5
aaaaagaagggtacttttcaacattctagtttcttggctggtggtgctactattgctgctggtagattaggggttgacaatggtgtccttaaggcggtctggcctcatagcggtcattatcgtcctacagaagaaaactttaacgatttcatttcatttctgaaggagaacgatgttgatcttacagatgttaagatggcaccagttgatggagaagagagtttccatggaaccagtcaccatcttagatgcaattcatctgaagaaaatagcttagagcctgaagaaaacagtgttaaaggttcgatcgagaagctcggtgatttgatcgaagaaggaaccagtgaaagccttgagtgcacaatgtcaagcaggttcctcaacttgagtcatcttgaaataccgatgaaaaccg

SEQ ID NO: 35578 - DNA, 310 bp, Gossypium hirsutum
  unsure (1)..(310): unsure at all n locations
  Clone ID: LIB3147-054-Q1-K1-G9
gtcagggccagcttgacactctggttacgctcattgagaggttcagaaaacagatcagaatagagctctatatccaaattggagtttgtgcaactatcttgcagaagctgtaacgcaagcagacaatagcaagctatcattttatgacttggagtttatggccaaatggattgcttgaggcaaaaatgcaaggccacctttcttgcttcagtagatgaaggattgattgtccttttatacttccaattatttgcattctgattattttgttgaatcagctattatttaatgttttggtgattttgatnna

SEQ ID NO: 35579 - DNA, 331 bp, Gossypium hirsutum
  Clone ID: LIB3147-054-Q1-K1-H10
cccacgcgtccgcccacgcgttcgcccactttttcgcccacgcgtccgtatcatttcaatgcgggagaatagggtttactgtagatgtaaatgtaaaatgaaacgaattatgtaactttaggtgattgctgttgaattagaatttagttttctgatggtataaaatgttaatgggagagggtagaattagatagtgttctaaatttgaactcagtgattaataaaaaaaaatataaaaaattaataaaaaaaaataaataaatataattataaatattaaaattaaaatgttattttaaataataaaataaataaaattatttggggcggc

SEQ ID NO: 35580 - DNA, 314 bp, Gossypium hirsutum
  Clone ID: LIB3147-055-Q1-K1-A5
agccttcgggcctgttttgccaaaaccccaattcgatttttttaccgcaaacaataaatctttctctgaggaggatgcatccgaaagctgttttaccagtgtacgtggaagcgattatgtcagagcgtttataacttttgccttctgaaactaagcctaataatgcctgatgaggcactattaagtttactgcagctcaaaacttgtattagagatatcctaaaatatatatacattggataatgaatagctgggtcactgtattgtggtgcagatatagcacaatgggtggtagatatttcttattctttttg

SEQ ID NO: 35581 - DNA, 322 bp, Gossypium hirsutum
  unsure (1)..(322): unsure at all n locations
  Clone ID: LIB3147-055-Q1-K1-B10
cccacgcgtccgctgattttgagcttattttggttcaaagttcaaacgaggttgtattgggtgttcttgtgacttgtaaccattttttttcctctctttacatttctttcacgattgaagaagaagaaaaaaaaaatgtcgatcagatgccatttaattttctagtttcttcgttatattcgttcatttactggagtgtttatggcagatctgggagtaccatatggattgaagagtttatataanaaaaaaaaaaaaaaaaaaaaaaaaaaaaaaaaaaaaaaaaaaaaaaaaaaaaaaaaaaaaaaaaaaagggggcggc

SEQ ID NO: 35582 - DNA, 377 bp, Gossypium hirsutum
  Clone ID: LIB3147-055-Q1-K1-B2
gagagacccttcctccggttcttttaatctagacagcttctatttgtagtcgatcatttagaagccctacttctacccaaatttattctcctataaaacgattcaaaacctaaagtaattcctttctcatcatcatcttcaacaaatcctcccaagccatgcaaaaccagggcttgcttgaggaacaacaagagatgcctactcccatgggtttcttttctacttttcctcccaacaacaacatcacttcatgtcctccattgggttgccatcctctcaaagccttcaatatagcagcacctgatcatcatcatgcacttcctactgaaaccctactctcatctctctcctctccaaaacatagagaacaccttgct

SEQ ID NO: 35583 - DNA, 347 bp, Gossypium hirsutum
  Clone ID: LIB3147-055-Q1-K1-C1
tattttcaaataaactcagctatttggtttagatgtataacgcttccatttatttattttaagaaaactcagctatttggtttagatgtatcttccttaaaaataaattaagcaacaatctctggatatttatttaaagttaaaaaaaaaaaaaaaaaaaaaaaaaaaaaaaaaaaaaaaaaaaaaaaaaaaaaaaaaaaaaaaaaaaaaaaaaaaaaaaaaaaaaaaaaaaaaaaaaaaaaaaaaaaaaaaaaaaataaaataaaactgggcgacgatatacaaacgtaaaaaaaaaaaaataaattggggggggtgctctttaattaaaaaacattaaccttggg

SEQ ID NO: 35584 - DNA, 372 bp, Gossypium hirsutum
  Clone ID: LIB3147-055-Q1-K1-C12
cccacgcgtccgcaacaaatgaaccagccataaaacaaagatgattgttaccgcaagggacgaactagtgttgatccgtaaaggtaactaaaatagccaaccagtatctgcccttacagagaacaaaaatttgcagccgtagcagagaagaaatttttttactgacattgttgtacacaattgttctttgtctaacatgagatgcatttacccatgttagcacatcagaacgaactgtttgttagtgaaattttgaaccccatggtaagtggaccaatgtagtctgtcaatttaacaaaactgtgatgttatttaaattcatgctctaaagagagccattttttcaataatagccagaaatatttttccctt

SEQ ID NO: 35585 - DNA, 203 bp, Gossypium hirsutum
  Clone ID: LIB3147-055-Q1-K1-D10
cttccgccactccttccgccacaccttccgtctttattttctctgttcatacaattcttttatggcgttgaatattcatatacacacccccatcctaaactctcaatcatgtctttcaaacaaggtggcaaaacaaagcctttgaagccaccctaatctttgaaaaaagaaatttaccacgcatctattttgcttacattctt

SEQ ID NO: 35586 - DNA, 416 bp, Gossypium hirsutum
  Clone ID: LIB3147-055-Q1-K1-D3
gcctagcttacgtcctaatggaccacctgatggttcaaagagtggttgtactaccttcggagcggacttgctatcctacaagatccattacaataaccattacacctgccctgataccagctatgcttagagctataaacatgcttgtacacacgcatttacttacacatataattaccctcatgttatgcactacttcattcacgaacgtgagctaacacgtatgctctgtcacttgaggtagaccatgatgaagacgagtatgaggaataatctgtagaactatgtgaaagactttgtgaaagatatagtgaatggattaaagcattgatggaagcataaaaagtggaagaagaaaattgagtatgttaatacaaatgttatgacagatgttatgcatgttgtttttcatcttc

SEQ ID NO: 35587 - DNA, 232 bp, Gossypium hirsutum
  Clone ID: LIB3147-055-Q1-K1-E1
cccacgcgtccgcccacgcgtccgaaagaaggaaggtgaggcagctcctgagaaacccatgtttttgtatgcttcagggggggatgcaagctacattgctgaaggtcaatggactggaccttacattggttgcgatgttccctatgtttgtctctataaggatattcaggtgcctgtctccactgctgtcgagtgttcttgtgattcgtgatctgccctcttattttcttct

SEQ ID NO: 35588 - DNA, 331 bp, Gossypium hirsutum
  unsure (1)..(331): unsure at all n locations
  Clone ID: LIB3147-055-Q1-K1-E10
cccgcgcgtacttgcgctgaccgtcacctttaccgacgacccagctctaggccaggcgggaggcatttgcggcgtcaatcgtatccatgatattatgcctgagatacctactgtgaggcctgacttcaacgtactctgcccctttcttctgacagctccactgaatgcaccatagaatagtatgaaccataatatgaaccgttgtgacgccggcggccatgccaattacctcaacaatttcatcaacaaattgatttagaaaaccaatcttgggtcctgacttgaaaaactgttgaaaaaactagttgttgatgtattttgngagggattc

SEQ ID NO: 35589 - DNA, 238 bp, Gossypium hirsutum
  Clone ID: LIB3147-055-Q1-K1-E3
cccacgcgtccgatttattttccattgattttaatttttgtttttttgaggcttgggaagagctgtagaagaaagatgccgagaacatttgccctataattaatgctttttttttcgactattgaacagttcgtaatatcggacactaatccgagcaattgcattttatatatatttgtgtttttaaaaattagagggattagtttttaataaaaaaattaacttattttttaatttt

SEQ ID NO: 35590 - DNA, 419 bp, Gossypium hirsutum
  Clone ID: LIB3147-055-Q1-K1-E8
ggccaattggtttcgagttgtcggctgtttgtcccatgcggcaattttggcacgttgggtggatggggttcgcacgtgggcacacccaccaacgactatcttagttcatgttttgcttatagcggtggtgatgtgcccacaactagtcctctccaccatattcatgtatgccttcttaattttggcattgagatttcgttaccgcatgcgagtcacacacaatgtatacctaaggctctcttacgttgacgctgtcggtcctgatgagctcgatgaagaatttgacggactttcaaccacacgatcggcagacacaagtcgggttcgatacgacccgttacgcgcattggcatgccgagcacaatcactattaggggatgtagcaacccaaggggaacgtttagaaacattgtttaatt

SEQ ID NO: 35591 - DNA, 257 bp, Gossypium hirsutum
  Clone ID: LIB3147-055-Q1-K1-G10
gggggtgtaaagttaggtctttcctcatgatgatttttaaaaaaaatttaaaagaaaaagaggacattgaatatcctgcttctgtttttgttcaattataataattattatttccatcacttttcttttaattagtatcccaaaaccatctctaattttcaagcagactgaaaataatgtatgatcacacctactttcctctcatattaaacactgcttcctttagaagctttaacttcaaaaagagcaaaacaaat

SEQ ID NO: 35592 - DNA, 433 bp, Gossypium hirsutum
  unsure (1)..(433): unsure at all n locations
  Clone ID: LIB3147-055-Q1-K1-G8
ggtagtcaatagctcactgtagctctggcagctatgttattagaatggttttatgtggagacgttcttacaaggggaatggtattgttttagtattataattattattccagtggagctttgagatgcagcagcatgttgggggcgtcaaatatattacacaaaaggaaaggatatactgtttttatggttttttagatggttctttaatttgtctcacctgagttgttttgttaatttgtttgaacctcttcnaaaaaaaaaaaaaaaaaaaaaaaaaaaaaaaaaaaaaaaaaaaaaaaaaaaaaaaaaaaaaaaaaaaaaaaaaaaaaaaaaaaaaaaaaaaaaaaaaaaaaaaaaaaaaaaaangggggggggcccttttaaagaaacaaattttttttcccggggtttgggagtttttattttttttt

SEQ ID NO: 35593 - DNA, 193 bp, Gossypium hirsutum
  Clone ID: LIB3147-055-Q1-K1-H10
tttacacgttacaacaataatgcagacctttatcttatgagaactgaaatgtgtgtggggggagcgcttttcctgatgtggaacatacagctccatcacctataatatgactctccgctctactagattcccattcggctcctagtgaaccataaacctgtcattggcgcctttacactcattggagaaaaac

SEQ ID NO: 35594 - DNA, 377 bp, Gossypium hirsutum
  unsure (1)..(377): unsure at all n locations
  Clone ID: LIB3147-055-Q1-K1-H12
cgtccggcangagcanctgctttgccattgatgcttctaccgcgagcttgttcctctaccctctgacgtgaggaactcgaaaggcaagaaagtangcgatcatcatcgtcaacaacccttagaagggctagtgtggaaggattttgattgtttatagtatgaacattttttttttcaattttttctcttaaattcaacaccaacatatagaatataaaagatgtggttcatccacccatccctctatatttagataatgaaatagagaggatgctgttttttgtagatatgagtgcataacttgatgtgaaactgggtccaatattttcctcaaatccaaaatgcaatcatatatttatataaatatatacacaagt

SEQ ID NO: 35595 - DNA, 346 bp, Gossypium hirsutum
  Clone ID: LIB3147-055-Q1-K1-H9
gctggctgaagaggagaccagaatgaccgtcagtttttttgctgggttttatcacgaagagaaagacgttggatattattactagaaatagcacaaattttggatttgcttttcatatatcgtatgtgttatttttttcactcaaacgatgacagtgaaccatcattttgagaccaatgggtgatattgtatatgatttgttcaggcataacatacaagatgccactgctgtattatggcggatttctgagtggtatgctgaaagtttaatgatagcattgaccttaggtattgggagaaagtagttgtcaatttatatacacagccgcttgtattgttttttttt

SEQ ID NO: 35596 - DNA, 449 bp, Gossypium hirsutum
  Clone ID: LIB3147-056-Q1-K1-A1
gcggcagctagtgcgaagccacttgcaagtggaggaaaccaaaatgtgatggctatggctctctttgctatgaccctcgatctgatggtggagatggagtcatgttctacttccatggagccaggggtgggaacttcgccatagtctcagatgatcagcttcaaatcaatgctcatttcatcggcactagaccacaaagaaggactcgtgatttcacatgggtgcaagccttgactgtcatgttcgatacccacacacttgacattgcagcaaatagagtttgtcagagggatgacaatgtcgatgctctcagtgtacgatgggacgactagacggttaccatcccttacgacggagaaggtgactggaggaagggtaacggctatgaaagacaagtgttggtggaaagaaccgatgacaaaaacagtcttcatgtcaaaatatctgga

SEQ ID NO: 35597 - DNA, 292 bp, Gossypium hirsutum
  Clone ID: LIB3147-056-Q1-K1-A11
ggtgaaaagtataggagtcgctaaaggagaggaagcaaagaaagcagcaatagcgcaagtggaggcaggccgttagggtttaaagataggattaaaagggcgtaaaacaataaactttcaagggtttacttttggcacttaacaatctattcttttctttgggcagggctactgtgccgggcccttccaccaaacctgaccataaaccaaagccaaaccccaaccccagcaccccattttaacagggcaagtgccctaaagatgcccttaaattaagtatatgtgcttatgt

SEQ ID NO: 35598 - DNA, 272 bp, Gossypium hirsutum
  Clone ID: LIB3147-056-Q1-K1-A12
attgtgcttacaacacatttcaagacactgctaataactatgtttcttaaataagcgggttccttaattgtgccgggggatggtgatttgatatttgttttgtttaaggagtggaattaattataatttttatgtttcttaaataaatgggcacttaattgtgctgggatggggattggatatttgttttgtttaaaggggtggaattaattgtaatttttatgtttcttaaataaaccggcacttaattgtgccttggatggtgatttgtt

SEQ ID NO: 35599 - DNA, 146 bp, Gossypium hirsutum
  Clone ID: LIB3147-056-Q1-K1-A8
cccacgcgtccttccacgcttccttcctcttctttcgtcagccacatctaccaaagtgtgccagactaacttttaaagcatacaaatttcacctttactaaatggcccacatatcccatatatagccatcctaaacgtaaccgcct

SEQ ID NO: 35600 - DNA, 451 bp, Gossypium hirsutum
  Clone ID: LIB3147-056-Q1-K1-B7
cccacgcgtccgcccacgcgtccgcacgagttccatcaccgcctacatcaatcctatggccgaagccacagctctttctaattttttccatccgcttttcatcaattttagtctccataaagaagaccatttggggattttgttgcttcagcaaaaaccgaagccttcttattgcctgtggattccccagtccacggacattccaacatattgtttttattgcattcggtcggcttgccttttggcagccgccgatctctttcggttggaattttcttcctgcaaaaatattccatcaataatctccaaagttggttgaccatatctccgcttttttgttgcaacttcccagattccatctgggccatattcaccagcttcaatctctaataatttcctttttccaagtttactttctcccacagaagcactccgctcttttgttgattta

SEQ ID NO: 35601 - DNA, 372 bp, Gossypium hirsutum
  Clone ID: LIB3147-056-Q1-K1-B8
gcgtccggtcaaatcagaatgccaagatattgcggaaatgtttttatccactggagttggatgtttatgagcgatgttctaattaacttcgcaaacaattttaatgtcctcttcagatcctgagggatgaggaaggtaaaaagctctgtctgtaagctaatgtgataagctccagctcaaaagattatgatttcaagatgatctgattgataggggtcatccaatgcaagtggataatcatctgtgtcaacatctctagaatgggttccctcttacaaagaaacaccttttaccggtatttattattttgttgccgtgctgacccacaaaatgtttgaaattgccctaatcacgtccattaattttttcgtt

SEQ ID NO: 35602 - DNA, 449 bp, Gossypium hirsutum
  Clone ID: LIB3147-056-Q1-K1-B9
cccacgcgtccgcagaaccgataaagtcaatggcatcgtcaacatcaaagctggcgtttcgtatagcactggcggttctcctcctcttggctctcttctacgtcggccgtccgctttactggaagatctccgccaccgtccacgacatccgccacaacaaacaaaccgttcaagaaggtatttcacagataatgctggaggctcagagatcagtggggtggtttaatgacgaatcagactcaggaatccatgaaaatcgtggtaagcaagcttcaaggagattgaaatttagggttttgtgatgggagtccccccttttgattcttatgttaattaatggagttttatctcataattttaataagtttagtttgatttagctcttcttattagaatttttttgttgatgttttagattggaaatgggtttttttagaggaaaatgtgag

SEQ ID NO: 35603 - DNA, 317 bp, Gossypium hirsutum
  Clone ID: LIB3147-056-Q1-K1-C3
gctacctccaacggatagaaatcttctaaacccgcgaccttaaacgcattccacataattccattgtcggaaggctacgatctatctccgttgttcgtagagaatacgagggcagagtaagaggagttgacgctcgccacgacaaggcccgctcgcatcgcgatgtccaggctaggacaggtggccatataccctaagttcaccgcttaatacagcgagttgtttgcgaggtcgcagctgcaagattgtggttggtacggtcaacttgcaattgcttcccatatatttgctgtgactcctccaatcttggccgtggt

SEQ ID NO: 35604 - DNA, 413 bp, Gossypium hirsutum
  Clone ID: LIB3147-056-Q1-K1-C4
gtccatagaaattgtcatgtacctctgcctcatacacaacaatttcacttgtcataaaacgccattgatcgacctcggcctctttaaggtgccgtagtgttgttcatttctttgttgcttctctttgtaattatgtacttcgctttaacagtttccccctgctttccctctttggccccttgtattcttgtctctttgatgaatttagccagcaagtaaattgcgtaagtataaagtttcacatacgtttcgaatttgtgattaaaaaaaaaaaaaaaaaaaaaaaaaaaaaaaaaaaaaaaaaaaaaaaaaaaaaaaaaataaaaaaaaaaaaaaaaaaaaaaaattataaaataatttaataatataaaaaattttttatataatatttaatttttgggggggcccttttt

SEQ ID NO: 35605 - DNA, 334 bp, Gossypium hirsutum
  unsure (1)..(334): unsure at all n locations
  Clone ID: LIB3147-056-Q1-K1-D10
annnncagcanncagaaacacaccaagcgaagcgcaccagcaacaacccaacaacaaaggcgaccaagacancagccgnccgggcgcacccggccccnncagggagcgcaacagaagcgngcaggcaaccacagggcncacgcgccccnagagccacaagcccacagncccncccaccaganaccacaacgggcgccgaacaaccagccgngcaagccnacaggcgacaacnagcgcnggcggcgagcgacggacaacaaccaancgcccaanggcaacaacaanccggggcacagcgaaaccaacaaaccancgcaacgcaacagcaacaaca

SEQ ID NO: 35606 - DNA, 236 bp, Gossypium hirsutum
  unsure (1)..(236): unsure at all n locations
  Clone ID: LIB3147-056-Q1-K1-D12
cccanccccaccncccaggganggaagcaggagcccacccaccaaccccnangcnnacncacgagaagcaggcccnccnccccgggcgggngcacacccnggagcccccangaacnanccngcanacgggggcnanggnaaagggnnggcaccagcanancagcaggcccacnaccganaggcaaagaggacaccacncnggcganggnaaccacnganacgcngaccaccgaccc

SEQ ID NO: 35607 - DNA, 453 bp, Gossypium hirsutum
  Clone ID: LIB3147-056-Q1-K1-E1
ccagcttagaattgctggacctctcctacaatttcctcaatggatcaattcctgaaagcctagggaacttgaccgcattgcgcagattgaatcttaatggcaactctttgtctggaagagtcccaggtgcacttggaggaaggcttttgaatggagctagctttaattttactgacaatgctggtctctgcggcatacccggattacccacatgtggaccccacctctctgccggagcaaaggtctgcattgccttcggtgtatctctatcatttttacttcttgttatctgttcagtttgttattggaaaagacggcagaacattcttcgagcacagcagatagcagcaagaggtgctccgtatgcaaaagcaagaacccaattctctcacgatatccaaatgtcaaggcaccataatcatggccatactcggactgctgctgagaatggac

SEQ ID NO: 35608 - DNA, 236 bp, Gossypium hirsutum
  unsure (1)..(236): unsure at all n locations
  Clone ID: LIB3147-056-Q1-K1-E10
aaaaaaccaaggncatncgccgagcgccagaacccaacccaccacgaaaccaaaccaaangggggacgcagggagcagaaccgggcaacccccagagcncaaaaaggacagggacaaacaacaccagancaagccgaaggcaaaacggaaggaagggggnacacagcgngggcacgaacaggnaacgaagccaggggcggacaacaccggggaggggaacggcaangagaaaacag

SEQ ID NO: 35609 - DNA, 410 bp, Gossypium hirsutum
  Clone ID: LIB3147-056-Q1-K1-E8
gtcctagatgctcaatgcttttactcgaattcgtcatttaatggtgaaacaacaacacgaatgaatccaaagcaaagttcagttgataagaagttgatgaaccattatttctgttttggagcacaaggcctagctgtcgaggataatagaagccatacacggctggatcgccgcatcaagagtgcccgttctttagttgcttgatgcagagtattgcaattttctagaaccaccgttgacaggaaaggaatttaggattctatgagattcctacacttcagtttactgtgtttgggacctatgaataaattcaaggtatatactgaaaaatgacccagaatttttaatgtatcaataaacataccaagttgtattatatgtttagtttgttgttgaagttgtaagttttt

SEQ ID NO: 35610 - DNA, 452 bp, Gossypium hirsutum
  Clone ID: LIB3147-056-Q1-K1-F2
cccacgcgtccgcagcaagaaagaacaacttttgtatcatctttgcttcctcttttggcggagtattccctgcagccaccagtacccgatgctcaatccattgtaagctatgtcaaggttctatttaaacatctgcaggagaagcttattatcaccgagtcaaagctaaaagactcacagtatcagttggcaccttggcggtcggatgtcaatcattccaatttcgctccccaatctccatctcattcccttggtccaacattgacagcttcgagcaaaaatggtcttgaattggtgccacagccggttttttcccatggaaagacacagatagtctctgatgctcaaacagattcaaattgggatctacccggtcaataccagggtggctcaggtggtggtattgtctcaaaaaatttggaacctgatgatttggggagatattcacccat

SEQ ID NO: 35611 - DNA, 194 bp, Gossypium hirsutum
  Clone ID: LIB3147-056-Q1-K1-G3
ggccaagcctgctaaatcgcaattaaacctttaaaagggagttgagaagcgggccgccgggcctgggacccatgcttaacccaccccccgtccgaccgtctacgttcactgtactggatactggataaatggagatgtgcgtgagttatcatcgtgcacactggatacaccgcggcgtcccctatctttacaaa

SEQ ID NO: 35612 - DNA, 273 bp, Gossypium hirsutum
  Clone ID: LIB3147-056-Q1-K1-G8
ttaaagaaccaagcaaacatacacatgcgtgcgacaaaaataactattatatagaggggccggccgttctttagagtccacgcttacttacacctgcttgcctggtaataccttttctttaccgccacttaatctcattgcactgcacccccttttccaccgctggcgtctgggaaaaccagtgcccttaccgatcttacttgccatcgattgcacaccctttatgccggatggcacactccctgtaacgcccattccgctcgcccttccgta

SEQ ID NO: 35613 - DNA, 321 bp, Gossypium hirsutum
  Clone ID: LIB3147-056-Q1-K1-H1
agttggtacacctgaagaaaatgttgcccatttctttgaggttgctaaagcaatcaggtactaaaagcaataccagattaactgttttcggaccgagtaaagcttatgcatcttcaggttatttttttttcagcccttgattcttcatttgtatttctcggtacacattctcggatacggtgcttcaagaaaaatggagccgtaggaacataaacttgttggaatttagaaagttccgtttggtctttttttcagtttgtatttgtttatgtgcttgagctaacaagaaactctaaatttggaagcattctcatttgaggc

SEQ ID NO: 35614 - DNA, 443 bp, Gossypium hirsutum
  Clone ID: LIB3147-056-Q1-K1-H6
ccgctttcgttaaggtttgacgagaaagtttgatcggatcaaaactgaacgggttcaatgggttccgaggagttttatacgcaatgaggaatgtaagctcgttgctcctaatgatcttgctgtacggactagtttattgtcgaacggaatccagtttcctacgaggaggatatgaagggtgtctaattttcggatcagctttcatgatctcaacagggagattgcagcaaagagtggccgcagagatcaaccaaatgaatgggaggccggggatattgctttatgagttcaggagatcgaagttggcaatggaggagctgagaggggagctagagcggatgggcggcggaggggtggaggagtgggaaacggaggtaggggggataagggaaagggttgagaacttgaaagggtggtttggggtgttgagatctggtgctgac

SEQ ID NO: 35615 - DNA, 352 bp, Gossypium hirsutum
  unsure (1)..(352): unsure at all n locations
  Clone ID: LIB3147-057-Q1-K1-A4
accaaanccgggagtcttttttataagttgtgcggcccatccacaacntctactcccatacattaattccttttctttcctaaacttttctatatacaaactcaatcaaaatctttatttattcacatttcattctaattttcattatgttctcttcaactttgatatgtttaacaaataaatttaaaataaataatttttctaagaaaaatttcaaccttcaaatttactaaatactatttaaaatacatataaatttgtattccaattatattattttatacaaaatcatcatataattaataaaatttttattttaaattcaaaaacttcccatcacttaatcatttaa

SEQ ID NO: 35616 - DNA, 328 bp, Gossypium hirsutum
  Clone ID: LIB3147-057-Q1-K1-B2
gctcctgctcatgtatttctggaagtttccttgtacattatctccttgctcttcatatgagcggacacataatttgttcgctggtgaagataagatcttcaaaatgtggttccaggggaataccttttgcatgcaaagcaagttctagtggttataggaggagccctgacttctcgaggcatagacatgggttgcaaggtaggaataggcaaaatgaagacaaatatagttttgaaaatcttgatgaatctgaaatgttatcatcgaaaaatgggccagttctctcgctattccgttcgacaaatttttaagccacatcatccccatc

SEQ ID NO: 35617 - DNA, 238 bp, Gossypium hirsutum
  Clone ID: LIB3147-057-Q1-K1-B3
cgcgtccagaattttggttagatcaaaaaaaaatatacttcttaagttcttagtattttcttagggattgactatgtttatagtgggctggcgatttgtgttctaagttgatgatctatgggaatggacactgtcttgtttgaaacatgtttgagataatatttgactttgtggattttgaaatcaacacaatgattaataatccaagaatggggattgtttcttaaaaaataaatat

SEQ ID NO: 35618 - DNA, 410 bp, Gossypium hirsutum
  unsure (1)..(410): unsure at all n locations
  Clone ID: LIB3147-057-Q1-K1-B6
ggcgtttatcccgtgaaatgtaaccttttaccggttcgttgttgaagatatagttaggttcgggacaccgttccggtgcggtttagaagccgggtcaaaacccgaactcctccttgctatgtcttgcctttgtaaaggaaacccagaagctttattgatctgtaatggtttcaaagatgctgaatacatttcacttgctttacttgcaaggaagttccagttcaacacagtgatcgtacttgagcaagaagaggaagtgaaattggttattgacataagcaaaaagctttcggttcgaccagtgatcggacttcgagctaagctaagaaccaaacactcgggtcatttcgggtcaacgtcgggtgagaaagggaaatntgggttaacaacgaaccatattttacgggtcg

SEQ ID NO: 35619 - DNA, 310 bp, Gossypium hirsutum
  unsure (1)..(310): unsure at all n locations
  Clone ID: LIB3147-057-Q1-K1-C3
cccacgcgtccgaagatatgtatggttataacnagatcttcctctccatccatagataaatattttatggcagccaatatatattgaagcccgccccccccatccaccaaatctttcacctactctccgtgcctaaatccatatatcaaccatcaattatgtattgtcctctctcaaaacgtttaatcatccacccccattttaaattatacctttcattatcaccgtaataatatgagaaaacaacctatttaaaaatcgtccagcataaaataaaagaattagtacaaactaccgcttgagtcttaac

SEQ ID NO: 35620 - DNA, 272 bp, Gossypium hirsutum
  Clone ID: LIB3147-057-Q1-K1-C5
ttgaagcaccctctaatggtaaaaaggctgaatacacagaagatgggctttccgtcgatgtcaaattacctattaagcatgtattatctagagaactcaaactttactttgacaagatcgtggacattacatgaataaatcagtctcgattctctttaaacaagcattattgagtttggaaacagactctggattacatcctttagttctttattgtacatgtttcattgctgatgaggttgcacggaatttgaataatttccctctcatgt

SEQ ID NO: 35621 - DNA, 215 bp, Gossypium hirsutum
  Clone ID: LIB3147-057-Q1-K1-D4
gacccacgcatcctgtttctataaacttttataaacgattttattttacaatggcatccatctatcttatgggcggtctctatactgagggggagagccaaatttctcccttaaagttccaccatatgttttgccacatgccgcaccatttccaccacactatctctgaaaaagttcaaagattctttatacatataagtaaatttttaacttcc

SEQ ID NO: 35622 - DNA, 424 bp, Gossypium hirsutum
  Clone ID: LIB3147-057-Q1-K1-E2
gtaaaaccagcgggacccacgcgtccgggctgtcctacattttctgtttactttttttttacattgcatgttatagattttctgagcggtttatatgcaaaagagtcctgccttcctgggaatcgagctattaaacgaaccctctgctgcagaagttccattggacacgttagtttcatattacaaacattgctatgaagtggtgcggaaatactctccatcagcgtatgtgataatttgccaaagaattggcagtgcatatccactggaactttatcaagctgatatatgctcacacaacctagttgtggatttgcattactacaatctctttgatactttctttgttaacttgagtgcgattgataatattcaattcatatataagagcagggaaactcatcttcaaacttttaatggtgcc

SEQ ID NO: 35623 - DNA, 363 bp, Gossypium hirsutum
  Clone ID: LIB3147-057-Q1-K1-E6
tccacgcgtccggtaaaaaggctttttatcttttggctttttatcacgaaatagcggatgccattatagcaacgctgtttgaagtcttcttcattcaataatattacctcaacatttctctttgcagagaaaaaaaaagaagaaaaagagtgagaaaaaacaggtacttaaatggctgagctacaacattcagagacagagagcagctcaaattcaacctcatcgccgccgctatcaccatctaactcaacccctaactcaactactacgaccccaaaccataaacccgaaactttcacttcgggttctactaaaaaacccaagacaatgagggactcaagcaagcgcaccgtttaccggggt

SEQ ID NO: 35624 - DNA, 234 bp, Gossypium hirsutum
  Clone ID: LIB3147-057-Q1-K1-F4
ttcaacaactccttgcttctctgttactctcctaactctccaactgttgtttccacttcctctcttccatatctgaatcgcaaaaaggaattctcatattgttcgcacttttatcacttgcctaagacacagctcattacgtcattttgtttttaaaccgataatcttctataccatttacaaacaactcccaaacttctccaacttaatcaccatctgtcttcaaacctttcc

SEQ ID NO: 35625 - DNA, 242 bp, Gossypium hirsutum
  Clone ID: LIB3147-057-Q1-K1-G5
cccaactgagctaaatcagcaagctgcttccaatagagacgggccatcttccttcagaattatatcatccctcattacagctttaacaattatcttaaatttggacctagaactacttttttgagacttttagattgcttttaaacaaatcctattctaatttcaatgttttccaatctaatgtttataattatatctattgctccaatacgacagataattacaaccttcactttcttctc

SEQ ID NO: 35626 - DNA, 382 bp, Gossypium hirsutum
  Clone ID: LIB3147-058-Q1-K1-A10
cggacgcgtgggctttttcaatcctaatcttcatcatttcagcaaattcactttgttttctcacatttccttgtcttaatcactatggcatttgtagtgcaagaaaattccttgcgtatgagctgtgatgttgagttcaacaatgctcttctcatatccttccttgaagaatcacctaacgaagagtacgatagtaaagaattggaaacctggatgagatcgttagaagccgaaatcaatccgaacccgattggtatccaagacttaaagatgggtccagaaagtcttagcgatggaaaagaaagcaatggtacaaaacccattgattgtgaatttcaatggaatgacttggaatcaatgtcatccccatcaccaaaccatg

SEQ ID NO: 35627 - DNA, 399 bp, Gossypium hirsutum
  unsure (1)..(399): unsure at all n locations
  Clone ID: LIB3147-058-Q1-K1-B11
ggcatttatatgccatttctacaacatttattttgccaacacagccggtggtaggatcattgccaagaaggtagctgagaagattctcgacagcagggaattggagttctataaatgggatggtgaactttcgcaactattacaaaatgtaagggataagctgaataaagttgctgagaactggagtagagaagacaagaaccgttgtttgggagaaactgagatatctttcaagttttatagagagatcgttcgactcatgttgtcctagagctgggtagctagggttggttcctaactgcctgcttgttgtcgtgctattgtgttagtccaagccgcaaccctaaagatctcatgtttactgaataaaaccgtgtccttccnnnnnaaaaaannnna

SEQ ID NO: 35628 - DNA, 316 bp, Gossypium hirsutum
  Clone ID: LIB3147-058-Q1-K1-B12
cccacgcgtccgcccacgcgtccgcccacgcgtccgcccacgcgtccgccagagcaagccttgtgctgtctgcggctgaataagattgattttgcaaatcatggccaaattcctaccattgtaagtgtcaaagatgattaaaatgcagatttaaattcaacaccattgtttgcattcatttattttgttatttctgccttgtaattttcatcatctttatcacaccagcaaagcaattgactagattattgagatcaaagcttgttgtaaggattaactattttggttttcaaccataaacaataatttttcaatc

SEQ ID NO: 35629 - DNA, 438 bp, Gossypium hirsutum
  Clone ID: LIB3147-058-Q1-K1-B2
cattcccatctctctttcatcaacccgaatgcctcctacaaccacaagttccccggtttaacactacatgcatcacttatttccccttctacacctccctcatccagagaagaagccattctccaagccaaaacatgcctttccacctgcttggagaagcctctcaacaatcccaagctagtaggcaagctcaagaagctaaaacaacccaggtttcaagttgaaattccactcattgatgactgtccatcatctctagctcaactagctctagacatctttaaagatatgtcactcaaaaagaaaggttctttagttgagattttagttctttggcctgatgttcgtttaaaagaagctggaattcaaacttttgaatcatcctcctcgtttagccatattgaacatattgacttaccttcagttagcaaaaataat

SEQ ID NO: 35630 - DNA, 330 bp, Gossypium hirsutum
  unsure (1)..(330): unsure at all n locations
  Clone ID: LIB3147-058-Q1-K1-B5
aaaacagggccggccggacgcggcggaaaattgaacgaanctaataaactttaattttgtgcacattacaataccaatttgtggaattgctaaattttaactgttggacagtccattataatgttgacataattacagcactctactcatatttgtatcatgaaccccttctgcatgtctctgcatgtttcaagaaattgacttattttcattcttgaatgattcagattgtgctcttaaatgaatttatatttcaatctcaaaaataaaaattcttatttaaatatatatttcatttttatttattataaatattttttatttttctaa

SEQ ID NO: 35631 - DNA, 238 bp, Gossypium hirsutum
  Clone ID: LIB3147-058-Q1-K1-C1
gaaaattgaacgaagctaagaaactggaatcaagtgcacattacagtgccaattgtgggaaagactagaggttttctgttggacagtgcattataatgttgtcataattacagcactctagtcatatttgtatcatggaccccttctgcatgtttctgcatgtttcaggaaattgacttattttcattctggagtgatttagtttgggctcttaaatgaatttatatttcaatctcag

SEQ ID NO: 35632 - DNA, 467 bp, Gossypium hirsutum
  unsure (1)..(467): unsure at all n locations
  Clone ID: LIB3147-058-Q1-K1-C3
gcctgaacaaggttcaactaaaaatagtggtgatttaattgctgttggtgctgatgggagaggtggtagaattaaggttatgcgatctgcgaatcaatcttcaatgggtgataaggagaattcagttagtgcaaagagattaaaatgtggagctaaacaaaatagtttcccttctggaggatgcttgcaaatagagcacttctttggaaagacccattactgattgaaagttgaagactcagcacatgcttgaacttgtaccagggaataatgaaacaaggccgaagcaaatttgcttatgtcatcagtgtatgatgacgtangcttgatgcctcttgaatagtaagttatatcatatatttgtttgataaacactaaaactatgaactaattttatatatgaaatttaattgtgtaatttatacataaaattttgatttaatctaatttttgtaaattattaacac

SEQ ID NO: 35633 - DNA, 311 bp, Gossypium hirsutum
  Clone ID: LIB3147-058-Q1-K1-C4
agagccggcattttttttatcttctatgaagggatcaaattattggtttcaaccacgcacaatgcagcatatttatttatggttagattcaacaacaatatatcagggtttttttttttttcattagctagttttactatgcataggatttacattttttggaaagggcttccattattatatacttaatttgttctttcaatatttaatgggcaatatgtttgcagttttgggttccttgcgttttcttttaggcttgcctcaaaactttggtttaatttcaatctgcagcaaacaagctccatttgttc

SEQ ID NO: 35634 - DNA, 235 bp, Gossypium hirsutum
  Clone ID: LIB3147-058-Q1-K1-D12
gaaagttgaggagaaagaagaatccgatgatgatatgggattcagtctctttgattaaagagttggttttgtgcagaaattctcttctttttttttcaaatttaaggctagtttagattctaaaatttcgttattttcgttgtcgatttggggattcgatgaacaatggcatatgtttttgcttaaacttaatgttgcaatgaattttccgtagtctattatgatgattttcttg

SEQ ID NO: 35635 - DNA, 406 bp, Gossypium hirsutum
  Clone ID: LIB3147-058-Q1-K1-D2
agaaactacaattgtaacaccccgactcgtgtccgtcgccggatttgagttacgaggcattaccgaccaaaaatccaactcaatttttttttataaaaaaaaaaaaaaaaaaaaaaaaaaaaaaaaaaaaaaaaaaaaaaaaaaaaaaaaaaaaaaaaaaaaaaaaaaaaaaaaaaaaaaaaaaaaaaaaaaaaaaaaaaaaaaaaaaaaaaaaaaaaaaaaaaaaaggggggggccttttaaaagaaccaaatttaactacccctttattgcaaaaaaaaattttttttttggggcccctaaaataaaattactgggccggggtttaaaaacgggggaatggaaaaaacctgggggtaacaaaattaaatggcttgaaaaaaaacccctttttcccaagtgggct

SEQ ID NO: 35636 - DNA, 419 bp, Gossypium hirsutum
  Clone ID: LIB3147-058-Q1-K1-D5
cccacgcgtccgagaacacagttattgcaggggcacaatacagaggttcactctatttgttgggacacaaatggagactttttagcatctgtcagtcaggattctgttagagtgtggtcgctggcctctggagagtgcattcatgagctcaattctagtgggaacaagtttcattcttgtgtttttcatcctagctttcctgctctcttggttgttggtggttatcagtcactggagctttggaacacagctgagaacaagtgtatgacaattccggcccatgactgtgttatatcagccctgacacagtctcaagttacagggatggttgcctctggcagttacgacaaatccgtcaaaatatggaaataactgtgtcagccaacttttaatgttgcattgggggaatgctatatatt

SEQ ID NO: 35637 - DNA, 216 bp, Gossypium hirsutum
  Clone ID: LIB3147-058-Q1-K1-E1
cccacgcgtccgcagagatgtatgggaatctatactccaaccgatagccaggaaggcactaggcgattcatttttgtgtggatccagtgggcactgagataatgtagtaagaatcaatacttacaatttttttgcattcctaataacataatcatacatatgtatccacaatattaatgcttacattggtttctaaagcatcctaactccggtctc

SEQ ID NO: 35638 - DNA, 456 bp, Gossypium hirsutum
  Clone ID: LIB3147-058-Q1-K1-E5
cccacgcgtccgaaattaacaggttaagtcggtttctttaatctttaaatataaagataccagattcctttggattctttaaaaaaaaaaaaaaaaaaaaaaaaaaaaaaaaaaaaaaaaaaaaaaaaaaaaaaaaaaaaaaaaaaaaaaaaaaaaaaaaaaaaaaaaaaaaaaaaaaaaaaaaaaaaaaaaaaaaaaaaaaggggggggccgtttaaaagaaccaaagttaactaccccgtcattgcaaagaaaaatttttttaatagggcaacaaaaataaaataaacggcccggggtttaaaaacgggggaatgggaaaaacccgggggtaaccaaattaaatggcttggaaaaaaatccccttttcgcaagttgggtaaaaaaaaaaaaggcccgaaccaatcgcctttcaaaaaaattgccaaacttaaatggaaaatggaaccccccttt

SEQ ID NO: 35639 - DNA, 392 bp, Gossypium hirsutum
  Clone ID: LIB3147-058-Q1-K1-F11
gttctagatctcgattgagataaagcgtcatgtttaatgtgccaatcactgattttcaattatgttattgtgacgtcctttttctcctgttgccataatattgaaaattatttatacttccttttttatctttaaataaaatgataatatattttaatatatttaaaaaaaaaaaaaaaaaaaaaaaaaaaaaaaaaaaaaaaaaaaaaaaaaaaacaaaaaaaaaaagaacaacctaaaaacaaaaccattgctgctgttgaaaaaactaatgaaaatgaatggcattatcctatattaagctgggaagccaccttatgttgataaggtacatacccgaaagggccaagtattaaaagaacatgggggcctacaataaaaaacaggctggg

SEQ ID NO: 35640 - DNA, 179 bp, Gossypium hirsutum
  Clone ID: LIB3147-058-Q1-K1-G11
gaacgaccgaggcgaccgggccgtgagaggtacacctacactatcagtattttaaggttcatgtgcaattactgtatctcggatcaatgctgatagttaatgaaattaggcgtcatggtaacatggcaatatcctattttttcaaataaaagaatatatctaaagtctctataccattc

SEQ ID NO: 35641 - DNA, 373 bp, Gossypium hirsutum
  unsure (1)..(373): unsure at all n locations
  Clone ID: LIB3147-058-Q1-K1-G7
gtatgtatgtatgtgtatgtgcatgcatgcatgcatgcacgtatggttttcggtcccaagaggttctatgtgatgagtttgatattggtgtgatgaggtgtgatctccatatttgcataataaatatatttttttgtttaaaaaaaaaaaaaaaaaaaaaaaaataaagaatccaccaaaaaaaaaaaaaaaaaaaaaaaaaaaaaaaaaaaaaaaaaaaaaaaaaaaaaataaaaaaaaaaaaaaaaaaaaaaaaaaanggggggcgcccgttttaaagaaccaaattttactaccccgtctttgcaaattaaaaatttttttttagggcccccaaaataaaatccctggcccgggttttaaaaacgggggg

SEQ ID NO: 35642 - DNA, 251 bp, Gossypium hirsutum
  Clone ID: LIB3147-058-Q1-K1-H12
gccgacccacgcgttcgcccatgcttgcacccacgcatcccgtcacccgtatggacaagcgttttcatatgggtggactgccaatcattgtctactctccagagacattcatatacatctacaactacaagcaaaggccttacacttctatcaccttcactaaaaaactcatgatcaagataagtgtatagagcattgactcatcattaatattagcttagaccgactcaattacgatattcttacaggcg

SEQ ID NO: 35643 - DNA, 353 bp, Gossypium hirsutum
  Clone ID: LIB3147-058-Q1-K1-H2
ctctctcatgctttatacatggattgaggcatttccagagctgattccaagaccgcggccctgtgcgccaatctctactcaactacgaaatctaccacgaaagctgggaaggcatctaaggatgcaaataagcctccaaagcctgctaacacgtctgttagctccatgttcgagttcatcgagcaataccagaagcaacacactaaagaccactctaatgacactgtcggcactgctggtggcaataaatggaaaaatctatctgagactcttaatcaaccttatattcatcctgacgatgatcaagccgtcgaacgtgaagtcgactttgaaacctacattaaaacacacgc

SEQ ID NO: 35644 - DNA, 339 bp, Gossypium hirsutum
  unsure (1)..(339): unsure at all n locations
  Clone ID: LIB3147-058-Q1-K1-H4
cggacgcgtgggcggacgcgtgggcggacgctttggtgcaaattcccttatgcaggccacggggaactggctaaaactgcttcaggtataccacccanattttcagttttttgcctcacatgggatgtacctcgggtgaaacaaaaagataaaccagtgtgtgattttcttccttttccgtgtccgaaacttgcacctccaatgcagtcaaactgaggttaaatgctttaaatttttggtacggtgatggcataccattcgagagaagcttttttactggatcggatttcctttacttgcaaagaaagaaattgaaacagttaagagacctatagacat

SEQ ID NO: 35645 - DNA, 442 bp, Gossypium hirsutum
  unsure (1)..(442): unsure at all n locations
  Clone ID: LIB3147-058-Q1-K1-H7
gttaaagataaatcgactctgtttccactgggttggattcatacacacccaactcagacttgtgggatgtgatcggatgatcttcacactcattactcatatcagattatgttaccagaagcaatagcaattgttatggcccataccgatacattcagcccacatggtatctttcatctgtccgatccaagcggtgtgatcatcattcggaactgtcaacaacgaggatttcatccgcatgaggagcctgtagatggaacaccaatctacgagcatngctctcatgtatttatgaacccaaagataaagatcgacgttgttgatctccagtgcggtaaaattgtattgaatcaaactgaaaaaaagtagaatggcaatacagggtatactcacttaaaatttttatgaattatattcgtagaattatgaacctatgtatatt

SEQ ID NO: 35646 - DNA, 341 bp, Gossypium hirsutum
  Clone ID: LIB3147-059-Q1-K1-A3
cccacgcgtccgcccacgcgtccgcccacgcgtccgctcgactttggtctcttccaattaggttagataacccgaaatctgaaactttagcattaaaattctcatctaaaagaatattctgagatttgatgtccaagtgaagtatcttttggttgcattcttcatgaagataggccaatcccttggctatatctagaattatcttctttctaatttgccatccaagagcaggttcttggtttttgttgaaaatccattgatctaaggagccatttgccatgtactcgtaaactaaaagcctattggaattttcagcacaaaatccaaccaaagttaccaaa

SEQ ID NO: 35647 - DNA, 266 bp, Gossypium hirsutum
  unsure (1)..(266): unsure at all n locations
  Clone ID: LIB3147-059-Q1-K1-A7
cggaattgaccgggtgcgatcccacgcagtctcgtaactggttggatagaggctggttggtctctcacccatctttgtctattattanntctcaaccagcgcagaaacgagattcacggcttcactttttcgggttacangnnttcaagggtgannagttattggggagccaatcgtttggggagannggaacanncttgtgtnctttagaacccactctcagcgttttacctggctgcnncacacttnngagcattggcatgcac

SEQ ID NO: 35648 - DNA, 348 bp, Gossypium hirsutum
  Clone ID: LIB3147-059-Q1-K1-B1
cggacgcgtgggaaaatttgtaactggacattggattcataaataatttggtttactttatttctgtgggatatatttttttttattttttggttttctggtttattataggcccgggcaaatttggcctattacgtaaaggatagtaatcacggtactaatttgcataatagaataataatgaacgtgataacatgaataacaatataatagcaaaaaataaaaaaggggtaaataataataaaataataaaaccaaccaattacataaaataaaagaaaagaaaaataaagtaacaaataaaaactaaaatttaattaaaaaaattgatagtaattactaatgggt

SEQ ID NO: 35649 - DNA, 302 bp, Gossypium hirsutum
  Clone ID: LIB3147-059-Q1-K1-B12
cccacgcgtccgcaaataggtgctgaaactgataagtttgctcaggaacttgtcacggagagttcttcaggagaaaggttggaaaaagaggtttctgctttaaaattagagtgctcgaattcgattgctaaaaaaaaaaaaaaactataaaaaaaaaaaaaaaaaaaaaaatttctaaaaaaaaaaatttttcatatttttaataaaaacaaatcaatttaacaaatctttgaatttattaactattctatatatttaaaagcatttaagttgggggggccggtttttaaaggttccatgtt

SEQ ID NO: 35650 - DNA, 419 bp, Gossypium hirsutum
  Clone ID: LIB3147-059-Q1-K1-B4
cgggtcggcccaagccgtccgccaaagggaggtttttcgaacctgaaaaggaggttaggaggaacctgccggaggccaggaaggaggtgcggaattttgccgttgcttttttattaaagtccatcgagggagtccaaaactggaaggcctaccttgccgcaggattttcgctaaagtctggcatgaaaccacatgaacttgtcttctagaagtaagttgttagctaagtcccctttacattggtgtgttttggtttttgagtatcattgatcctattttcggatgctatataggtaacctaaatcattttgtgaggcaagaaccccaaatttccatttttgtgttttcttctaatctctactggattttgtttttattttttttattgaagttatagtatggaattttgcccactagag

SEQ ID NO: 35651 - DNA, 338 bp, Gossypium hirsutum
  Clone ID: LIB3147-059-Q1-K1-C12
gccaatcctaaatcggatagttctttgaagactgctgctcaggccatatattacgagtttggtgggacggatgccgagtccaatggcgcatatcatcttctactaaaagaggatgacattgagggactccttgaaaccgatcacataaacgatctcatacctcagaacaacacagtgttcattaaagttttcaaagctgatgagaaaactgacgaaagtactttgctgaccgaggcactcaccgaaaaaccttccattggaacggtcatagctgctggacctgctactgtacatgaggcaggaaacctagaaccactatcagtctcaccttgaaacac

SEQ ID NO: 35652 - DNA, 339 bp, Gossypium hirsutum
  Clone ID: LIB3147-059-Q1-K1-C4
cttccttctgttgctacagcgacttacaattcaatgagctatgcaccaaatggggctggagtgaagttcccgaatcacaaggaggatcatagtaactctatcacgatcggtgtttctgatgagcatataggactggttcttggtcgtggtggaaggaatatcatggaaatcagtcaggtaagcggtgccaggataaaaatatcggataggggtgatttcatgtctggaacaactgacaggaaagttacaatcacgggatcacagagagcaattcatcaagcagagtccatgatactgcagaaagtagcaaacgccagtgaaagggtgatggattagttt

SEQ ID NO: 35653 - DNA, 335 bp, Gossypium hirsutum
  Clone ID: LIB3147-059-Q1-K1-C9
aatggagattgcagaacaagaccaaggactattcctgcgctcgtgtggtgaaagagggtgaaactttgtcttccatttcaaaggtgtatgaattgtccgttcattcaattgcagcagctaataagaacattgttgatattaaccttgttttccaaggccaactccttaacatcccttcttcatccctactagacactcaacttgaccgagccaagaaaagtaggttatggcaatccatccgtgcacttaaagctccttcagggcaaaagtttttcaccatgataacttcacattgtttaataaaatgctaaatccactggttattttctagttct

SEQ ID NO: 35654 - DNA, 302 bp, Gossypium hirsutum
  Clone ID: LIB3147-059-Q1-K1-D11
cggaacgaccgacgcgtccactcgttctctcacgcctacgcccacgcgtctttctacgcgtacggaggacaagtactccatgccctagagaggaagataacagatgcctctcagctgaactatgattacaaaaaccgattagcgacttggggggtaacttatgtgccaatctaacggcgacaggaagatgtgtcctatccatattgcactgctcgcttattccatacccaggatggggcattgattgcattatgtgatatcgcctttgtcagggcatacacaacatgaatgatattgtcttc

SEQ ID NO: 35655 - DNA, 431 bp, Gossypium hirsutum
  unsure (1)..(431): unsure at all n locations
  Clone ID: LIB3147-059-Q1-K1-D4
gaacttatcaaggataagatagaagctcaaatagaagtaaaggctaaagagcaagaagagaaagaagtgattgcacaacagaacatgtatgctcagttactacctcttgccttgcctgcaccgccaatgccaggaatgggaggaccaacaatgggtggtggatttgcacctccaccaccacccatgggaggaatgggaatgcctccgatgccaccttatggcatgccaccaatcggcagcagttattaactcatgacaggttggtttgaaagatattttttagccgagttgattccttctgttgctgtgacaaataagacattgatatcatagttccaatcatggcaatttcttcaggcttgaagatcaagttataataatgccatttctatgnttcatctgtgtgatattatgtgatattattatgttct

SEQ ID NO: 35656 - DNA, 209 bp, Gossypium hirsutum
  unsure (1)..(209): unsure at all n locations
  Clone ID: LIB3147-059-Q1-K1-D7
gcanccncagaaancgagccancccccaaatctaanagncagnnngnacacgagggcggaggggnnggacaaggcgaagaacgnngnggccganaagggggccaanangaagaagccngaggcnagcancacggangnngancngacccangcgggcnnngacggcanccagnanaaagcnaaagncnccgncaccaaccccaaaagcg

SEQ ID NO: 35657 - DNA, 154 bp, Gossypium hirsutum
  unsure (1)..(154): unsure at all n locations
  Clone ID: LIB3147-059-Q1-K1-E1
ggaggacgggaaagccaaggccaccaaggaggccgcnccgaggancgacgngacacagnncgggnaccccaaagnccncggcaaaggggnnnngccggagaancaaccggnggncgncaaggctaagnnggngncgaagaccgcngaaaagaaa

SEQ ID NO: 35658 - DNA, 165 bp, Gossypium hirsutum
  Clone ID: LIB3147-059-Q1-K1-F12
tcgcggacacctgtgcgcgacactcgtgtccagactcgtgcgcggacgcgtggccggacccgtgggcggacgcgtggggttcctttctttttgatactaataataatatattcccctcactttttcaacaataataataccattgattttgaaccaaataaaaat

SEQ ID NO: 35659 - DNA, 467 bp, Gossypium hirsutum
  Clone ID: LIB3147-059-Q1-K1-G4
gattctttgatgtgtggcaccgatgctccaataagtgcttctcggatgttaggcgaaacttgtcaaacctggagggacctatatgctgataactcatagtgagccttcagcacggatgcctcatatgaacccggcaccgcgtgtgtgggatatatatttgtgcacactacacacacccggttttaagaggacggcaggttgttgatcatcaacagacgtacttctagccgcttccaatcaccgcaaagggattacttcctgctgactttgttttggaagaccccgattctcacttcatatatgtttgcaaaaagatggatgacacacagctaaggaacatacccacctatccattaacatctgagattttatagtgaaaagagtaaaatgaatgaagtgctgaggtagcattttatactgctttcagaagcttcaacatcacatttggattcataagcatttgtata

SEQ ID NO: 35660 - DNA, 356 bp, Gossypium hirsutum
  Clone ID: LIB3147-059-Q1-K1-G6
aaaaaaaaaaatttaattttaaaaaaatatttattaaatttattaaaaaaaaaaaaaaaaagaggaatttgggtacttttaaaagggcttaaaaaataaataaaattggggccgtcttttttaaagaatcaaacttaactaccccttcattccaactaaaaattttttttatagtgccactaaatttaaattaattgcccgttttttaaaaacgttttaattgaaaaaaccttgctttaaccaaattaaatctttttgaaaaaaatccccttttcccaatttgttttaaaacaaaaaagcccccaacaattcgcctttccaaaaattttcccacctttaatggtaaatggaacccc

SEQ ID NO: 35661 - DNA, 221 bp, Gossypium hirsutum
  unsure (1)..(221): unsure at all n locations
  Clone ID: LIB3147-059-Q1-K1-G8
nntattnngnatncaatnaattatgatactaaggtaaataataagagatttgatcactgtctgtgcccccctagtgatcgtggaactgtaaattcctgtaagttggagatatgttttagtgtttctccataatagcagtggcattagttgttttttttaactactaaacatgtgttaacggtcaatgttgcaaaaagaaatgataagaaatagatttgttt

SEQ ID NO: 35662 - DNA, 442 bp, Gossypium hirsutum
  unsure (1)..(442): unsure at all n locations
  Clone ID: LIB3147-059-Q1-K1-H3
gtccgatttaataatcaggcttggggattgggttttgaacctttgggccttaagtttttaatatataccaaagtacctgccatacttaacgtgcacatgtgctgacttggacataagtgccaatggaacaggtttttgccgagtacagtcggcttctggctactgagttggagaaacanagacaaaactatgaatctttacttgctgaagccaaaggcaaaagagatagtaccattgctgaagcagtggagaaggctgtgacatccgagatgcaagacatccaaagcaaactggataagtgtacagaggaaaaaaatgctcttgctgagatcaaccgtaaactcataaaagaccaacaagtttggcacgtaaaggtcaaggaaatcgaagagagggaagcctctgaatcgaggttaatggatgagaagatacttgatctgga

SEQ ID NO: 35663 - DNA, 336 bp, Gossypium hirsutum
  Clone ID: LIB3147-059-Q1-K1-H9
cccacgcgtccgtcggctggtcggcagcatcgtgcggcatggagaggatgcgttgcgcaagtccaaaccgaaatagacacttcgcctctctgggagggagtgctgtcgctagaataatcatcctgtttaagcagggagggcaaccaaataaggcattaggtagcttaattgccactgatcattaaataattgcccttcccaccgatctgttgtcaatcatcctgtgttctgtttttgttttgtaatgttcacaatctttatggcttgcttcctgtgggtggtctattatgtgtcttttcattaataaatgcaaaatattataaaatcttttgtggt

SEQ ID NO: 35664 - DNA, 276 bp, Gossypium hirsutum
  Clone ID: LIB3147-060-Q1-K1-A10
cccacgcatactactgtttaatataaagctttatatgtgagaaactgaccttctactgttgcggcttctgaaattgagccggagttctcgaattttggaacaatgattcctgactgcgtgtttatccctaaccgcaaagatatcgtccttgtttgacatacttttgttagaacccgaaaacattcttacttttcacaatacaatcttgcatgtcctatacaatatgctgtaacgcaagtttacatatataaacgcagaccaaatatcactgttact

SEQ ID NO: 35665 - DNA, 190 bp, Gossypium hirsutum
  Clone ID: LIB3147-060-Q1-K1-A2
cccacgcgtccgctggtttaagagaaatgtttacgtctatggatactgataacagtggtgcagtcacatttgatgaactcaaagctggtttgcgaagatacggctctaccttgaaagatacagagataagggaccttatggatgcagctgatgtcgataatagtgggaccattgattatggagaattcat

SEQ ID NO: 35666 - DNA, 430 bp, Gossypium hirsutum
  Clone ID: LIB3147-060-Q1-K1-A3
cgaaaatgtcagaaagctcatcaaaaattcctaatgttaccaccaaggatcccccatgcatgagcacaatcaaagcccatgataaagaagagcaacaaattgaagctcagcaaacgagccacaaagagattacacgctacttcgaggaagaagaacctgaccagattgaagctcgaagcgttgatattgttacgacccgacctgacctgtcagatcgtgtcacaatgaacacgatgatcagccctctgaagggagagaatatttcttatggaagtcttccgaggcaaccggtttgcaaggccgataaatacggcgactgtataaagccagtcggtgaagacaaccgcccttgcacggtctataaccgatgcaagcgcgacaatcattgaaccatttggcttttcttggattaaatgggcgggattttact

SEQ ID NO: 35667 - DNA, 369 bp, Gossypium hirsutum
  Clone ID: LIB3147-060-Q1-K1-A5
caacaggagagcaccttgaattcgagctgttttgatgaaaagatctacttgaagcgaaagggccctaatgtatcaaccgtccgcatgagacctttaatcagcccggtgttgtaaattaaatatgtagctcatagtgtaaatttgatttgagaatattttgtaaagctgatatcagattttgtcacatcagacaccgtaatcttttctttattattgtaaggctgagtttctagctttggttgtgaacaaatcaaatgagtcacgtgctcagaatttcatttgggacaggagatgcgtatacttcattattacaaacaacaacaattgaatttttaaaaaaaaaaaaaaagggcgggcgttcgcgcccac

SEQ ID NO: 35668 - DNA, 235 bp, Gossypium hirsutum
  Clone ID: LIB3147-060-Q1-K1-B10
accacgcgtccggaagtggcctactttcatttagcaccctcaaatgatagcgtccgctctggcactattaatacacaataccacttgagatctttgcaagaacgtatatggagaatgcatctacccagacgatgatatgacaaatatatactattgaggaacaaaaattgcacgttcaaaaaaccggtttacaaatgggatacaagaccattgtaccattctttcaaacaaacat

SEQ ID NO: 35669 - DNA, 208 bp, Gossypium hirsutum
  Clone ID: LIB3147-060-Q1-K1-B6
ctcctatggcgcctgatgaatcaaaccattttcagtcttttgcctgagtttgccactaaggagttttttgcagctttaggttttgctgtactatgactcgaattacactacatgttacataaactcttccggaaatagtgcaatgcttgttgccaagattcctaaaacaatcccaagcgcctccatggttccctgatatctttctatt

SEQ ID NO: 35670 - DNA, 452 bp, Gossypium hirsutum
  unsure (1)..(452): unsure at all n locations
  Clone ID: LIB3147-060-Q1-K1-C4
cccacgcgtccggggggtttgtaatggtaatatctacggtaattgcattgtacctatcggtccatcatatcgtccttgtactgtgtatacacgatgcaagcgaggagttcgataatcattttttcaagattgtcaaatttatttttagcttatttcatctatgttttgagtgagcaatttcatatgttgcttttcttagtcttgttattataattctcataataatctatacacttacccnnnanaaaaaaaaaaaaaaaaaaaaaaaaaaaaaaaaaaaaaaaaaaaaaaaaaaaaaaaaaaaaaaaannaaaaaaaaaaaaaaaaaaaaaaaaaaaaaaaaaaaaaaaaaaaaaaaaaaaaaaaaaaannnaaaagggggggcctttttaaaaaacccaaatttacgccccggggggtggaaagaatttttttttttttgggcccccaaa

SEQ ID NO: 35671 - DNA, 281 bp, Gossypium hirsutum
  Clone ID: LIB3147-060-Q1-K1-C5
gtgtggtttggaggataaaaattatgactctatatcaactaaactcaatgatgggaggcagaaggttttcattatttccggcccataggtagttgcattgcatgttactattctgaattatgatcaccattgtttcttcatttttctcctttttgattcggtggtcttgtcttgtgctttgaagatggaacagttaatgtggattgtgtgtgggtaataacttaactgcgtcatgaacagtaattattacctaaaattcaacaagccgtcttacttcattt

SEQ ID NO: 35672 - DNA, 200 bp, Gossypium hirsutum
  Clone ID: LIB3147-060-Q1-K1-C6
ccctgagctcctttcgattaaagagtcttctattaagcatgtatccgaacccaataagaagactgttttatctggatcagggactttccccgttaaaaagtttgacttcaaaagtaaactatgcgagactagcagagctttagaaactaagttatgaattcattgattatccccactttttttatcatcttttttataaa

SEQ ID NO: 35673 - DNA, 123 bp, Gossypium hirsutum
  Clone ID: LIB3147-060-Q1-K1-C8
attcgacgccctgtggagttctcttgtgtaatttttggatatcacacgtcatgctagaaaatgtctctgtttattgtactggacacctccagattcaaccatctaacattgtgtatgaactat

SEQ ID NO: 35674 - DNA, 290 bp, Gossypium hirsutum
  Clone ID: LIB3147-060-Q1-K1-D1
gacacacacccggatggctgctagcgatgctttcatgtaaacgatgatctttcaccttgcgggacctagctcgggtcagaactataacaaggagaacgacaacgaagcaaccacccatgatatctatgccaacgctattataaactatgattctgagggttctgttattctctacgttggaaacaacatttcaggttgtcacatggacacattcttcaccttcggtgctgtctttggtggcaacatcactactttactcaacgttacgaacatgatcgcccaacttctac

SEQ ID NO: 35675 - DNA, 443 bp, Gossypium hirsutum
  Clone ID: LIB3147-060-Q1-K1-D7
cccacgcgtccgcctacatgtgatgtcggttggtactgctgtaacagcattgtctaggacgcttgcctggtttcgccagcaaatgctattttctggtatcagtcccagcaggattgatatagtgactggatggggcaggcggagcagggttaccggatcatcacttgtgagacaagctgttcaggatcttctcagtatttttagctttccatttttcaccgagaatggcaattccgggtgtttcatagggtgtggagagcctcttaacagatggttacttcaatcatacgtggagcggatgcatttactttagcttgccgtcctcgtagcacaacagaattttgttggaggatgtagtacaagaagaggttttgtatatttatttaaattattcgcaacctttcaaaagtttagaagttaaataaggagctgatggcagcttc

SEQ ID NO: 35676 - DNA, 401 bp, Gossypium hirsutum
  unsure (1)..(401): unsure at all n locations
  Clone ID: LIB3147-060-Q1-K1-D9
cccacgcgtgcaagaaatgttgcgatcaatgatggcggatgatgttgcctattagctagaggatatgaactcatggaaatgcctgaattactataatgtcccgacaggagcatgccgatgattacacccaaagaagacttgagaacactagggcgtgccctataactaaatgtcgaactaccgacgctctaaccttttgacacgcgatcatacttgtattgatggtgcttaccagatgccgaagaaacatagatctgaaacacaatgtggttgtggtcttgtttataagcgctaagagtcgcagcttctgatatcatctgatcaacatattctggaatcgaacattttactttgatgaactaaaaatcaaatntattacatagctatgagaaaaggctgct

SEQ ID NO: 35677 - DNA, 248 bp, Gossypium hirsutum
  Clone ID: LIB3147-060-Q1-K1-E2
gctgcacatgcgaaccatctgtcggacacgtgttgcgccggaaatgatccccaattgtggcagcgctgctccaccttacatgtgaccggatggcttcggcccatctctgaaccacaatggtgaggggggctaaactgacacaatgtaccctccatccgaatgtgttaaaaccttcacataggtgcccacatccgaaactgttataatcatctctatgtgcatagtttattattgatagggtaggaaat

SEQ ID NO: 35678 - DNA, 357 bp, Gossypium hirsutum
  Clone ID: LIB3147-060-Q1-K1-E6
gaattcgtacactcggtagcgcatgttccttcatgcttggttttgggaagtgaaggacgtgggctttccgagaaatctcagctcaaatgtgagctcgtgagcattcccatgacaggaaaatttgagtctctcaacgtttcggtagctggcgggattttcttgtacatgttacagcctaagaactaaagattaaaagtctagttctctttaatttcattaatgcatcacacagttctgaatgtctgattctcttgatttttctcatttctttcttgcaatttgtcttccttttgttttcccccggagaaaaggggggattttaattgatttcattaagtttgggatacctttttagat

SEQ ID NO: 35679 - DNA, 276 bp, Gossypium hirsutum
  unsure (1)..(276): unsure at all n locations
  Clone ID: LIB3147-060-Q1-K1-F12
gaccgacgcgtacgcccaggcnttcttaaaatttgttatcaattttttaaaatgagtgatgtactaatacataagccaacttaatattctaggaaagccccaccttatctaatgaatttccaacttatagctctccttgatttacaactaatggcgtaatcaagtgcacaccccataaccataaaatttcttatccacattgataatataaaactttggatactatacaaacatttttagtgcttaaattaaaaaaaaaataatatattattaaaa

SEQ ID NO: 35680 - DNA, 189 bp, Gossypium hirsutum
  unsure (1)..(189): unsure at all n locations
  Clone ID: LIB3147-060-Q1-K1-F2
tcccactcttccgcccacgctttctcccacgcttncgcccactcttccaagtattttttttaagagccacagaacccacctcataatctcccccttcaatcctctatctacctttatcaatcctcccattctcaaccaacttttaatcatacaatctctctcatcctagataacatattacgaaatata

SEQ ID NO: 35681 - DNA, 383 bp, Gossypium hirsutum
  Clone ID: LIB3147-060-Q1-K1-F7
cacagctcctgggattcttgaggttatgtttttcaccacttgcaggaactgatttaagaagttatgttatgtctggtggtggacttacactgaagaatttcaaaccaaaatttatgagaaagcgatgttttcttatcttccccgtccaaggttctgagagaaagggtcttgtgagtgttgaagtcaagaagaaaaagggagagtatgatatgaagctattagcagtagacattccaatggcatcaggacctgatcagcggctattcctgattggtgatgaagaagagtacaaggttggtggtggattgatctccatgctgagagatccagtagtgaaagcaatggctgcaaccaacgaatttgatgatcttgaccaaattgat

SEQ ID NO: 35682 - DNA, 120 bp, Gossypium hirsutum
  Clone ID: LIB3147-060-Q1-K1-F9
ctgataacccaccaaataattcttctttccaaacctgaaaaacttcaagctcaatcctcttcaaagggaatttgaaaaatattccgaacaatatcctcttaaacgtattattaacccgaa

SEQ ID NO: 35683 - DNA, 116 bp, Gossypium hirsutum
  unsure (1)..(116): unsure at all n locations
  Clone ID: LIB3147-060-Q1-K1-G1
gtttgcggctcanaagccttaaagcaagattctggttcagataatttcagatatatatattgtcaatgcacctccgatcatgatccgtaatgattagttgcataacattattgatt

SEQ ID NO: 35684 - DNA, 464 bp, Gossypium hirsutum
  unsure (1)..(464): unsure at all n locations
  Clone ID: LIB3147-060-Q1-K1-G11
ccgggcgcgacgcgcacgcgtacggtttgttacctatatattatgtgtgtacccttatatttttctaaatagaaagagactgacatatatcaggatattttttatattgcaacgtggaatctacctaagacattgaccatataactttgtttttgtactttgtttactgatgctgtgctaagcaacgatactcgtatccctgccataaccatacctgaaatgtggctcaagcggngatattgttactaaaattttggttcctcatcttccctcttcttatcatgtaatttgacaaaaaacaaaggctttgacaacttttcatcgcacttattaagatgtttaaagtttttatatataaataaaaaaaaaaaaaaaggcctttccttctatatgattcaagccttacttacgctatcattacaaagttataacctcttttaataatgtcacctaaatataaaatt

SEQ ID NO: 35685 - DNA, 263 bp, Gossypium hirsutum
  Clone ID: LIB3147-060-Q1-K1-G3
attagtttaagccttaaggcatggttgttgtctttgtttgatcaaatttgcatgcatgcatgcgatcgttaaccatctgttttctaagcttcgtggtgttagcaaggttccattgtagctcaaaatctcgtttctctgttaataaaattctcattgtgttaaaacaataaaatttgagttttgaaattcaatttcatcatttagatgaagcacaaaccaaggtttttttggattaaataataatgaagatattttaattgctg

SEQ ID NO: 35686 - DNA, 179 bp, Gossypium hirsutum
  Clone ID: LIB3147-060-Q1-K1-H1
cccactcgtccgcccactcgtccgaaaacgttgaaaatattctgtagcatcaaagacttggagtgagaataatggagtagaggcaatttgcttggagatatatcatcctatcaaaatcaggtcacacaattatttctgttgcttaaaatttgtttgccttcctgattattatatgtatg

SEQ ID NO: 35687 - DNA, 429 bp, Gossypium hirsutum
  Clone ID: LIB3147-060-Q1-K1-H10
cccacgcgtccgcaaatatacggtactatatgttatagacatgtcaaagctcttgttgggcgtgtgtagagcagagcaaaaggaagaaccctatgccattattccttatggatatgaaaatatagtccttttaatgtagaaaagaaaagtttaaaatttgagagtatttgcatcctatattcaatcaacattgtgtaagttcatgctggtttgttttgcaattgcattttttttgctagcagcaaaacaatgtctgtaattgttactataattttcatggttgtattttgtgttaaaaaaaaaaaaaaaaaaaaatgaacaataatttaaaattatattaattttatatatttaattaccgtgctatataattttgtaatgtacgattctttgaaaccatttgcttttgactggtatcatgcatgatag

SEQ ID NO: 35688 - DNA, 286 bp, Gossypium hirsutum
  Clone ID: LIB3147-060-Q1-K1-H12
ccgacgcacgcgttctttcacattatacacaactttaaataggatttttaatatgcaactagcagcttttgtctgcgacatttttgattactgaaccccgcccttcatctccaacaatgacaactttaatctcggactatcatcttatacacaaccattagatcctcatccagctatggacaattccctcaaagaggcttactctctatttatgacaaaacttttcctacacttcatgcacagatctgaaaaacatagaagagtgagaccacttgaccctttttaa

SEQ ID NO: 35689 - DNA, 221 bp, Gossypium hirsutum
  Clone ID: LIB3147-060-Q1-K1-H6
aaaccttacggttcgcatttaatgccctggccactttattgtatagtgctgagagacaacttaacgacgtagtgtttccaaggagccattggaggccacaaaaacagataactggctcttcaaaatgaatgctgaagttgttgaatagacgctctaccgcatacattgtagatcatgtcttctacacttgctccaatatttttgtatatcagcacacgctc

SEQ ID NO: 35690 - DNA, 153 bp, Gossypium hirsutum
  Clone ID: LIB3148-001-P1-K1-A9
gctgacatttgtaagttaagaaatataggtagaatgctcctatagcattagagacaagatcaacagttacatgatgcatgtctaacacatccactattacacccccaatcatacacacacatagaccttctatctggttaactaaattcaatt

SEQ ID NO: 35691 - DNA, 351 bp, Gossypium hirsutum
  Clone ID: LIB3148-001-P1-K1-B11
aaaaaataaaaatccaaatttaaggaatgtatccaaactattattacacacaataaaaatagggcaagtaaaaaaaaaaaacgagaaaaacaaactaacaaaataacattataaaaatcaacaatatctgcctacactaaaaaaacctaccattcgggaatcacatgccatccctcaggcatttatccatatctatatctgacgaagcccgaatctcagaactatatgttcagccttaactactgaccacccggacgcaaacatctattgcaaaaccccatatttcgcaatcgatataatcaccggcaagttacatacagtcattcctgcctaattatacaacgcaacatg

SEQ ID NO: 35692 - DNA, 213 bp, Gossypium hirsutum
  unsure (1)..(213): unsure at all n locations
  Clone ID: LIB3148-001-P1-K1-B4
gttgaagatgctgttaaacaagcattgggatgacacagacgcctgagtttgcttcgtcagtgtgtctcagattccaaatctcctggtgatccgaagttgatagatgcatttgaactaagtgaagaggagggagaagatgttcttttcaaagaggcttggttaacatattngtggagaagagccaaagtacattggatagaggaggatattgca

SEQ ID NO: 35693 - DNA, 251 bp, Gossypium hirsutum
  unsure (1)..(251): unsure at all n locations
  Clone ID: LIB3148-001-P1-K1-B6
cccacgcgtccgagcggagctcgaccggnattagtgccaatgctcaaaggaaggttgctagagagatcaagactgctcgagcgtttggtttaatgccatttataactatggggacaaagtcattcgttttctgaagatcaatggaagttgttaataaagattatgaatatgatgctttcgatgacatgacttccgctatggactaataagatgcttgagccgatatttgtgccttgcatagtttcattttt

SEQ ID NO: 35694 - DNA, 422 bp, Gossypium hirsutum
  Clone ID: LIB3148-001-P1-K1-C12
gaaatgacggtacatggatggttctttggctgtccggtccccaattaggttacgatagatggtttgtagactcatccacaagttgacttttgagtgaaccatttggacgttttgaatttttctttcaagttggtgacttcagctgtaaagatctttttttgttcctacaagtttgtatgtcttagcaattatatcttagtaaacactgtatcctggctgtagcgtttacaaatctgagagcaatgtacatacatttatattccgaataaaattagttttagttctgcgtaaaataaggccattacatatgctataacatatttaattgctcctgaatgatattatgatcaagagaggtactacttatgacctctgagctgaggctattatacttaatgctttgaatatcgttaaaaaataaa

SEQ ID NO: 35695 - DNA, 351 bp, Gossypium hirsutum
  Clone ID: LIB3148-001-P1-K1-C2
cggacgcgtgggcgaatggctttaagaaatttgttttgcacaatgttggagggcttgaactgttgatgatgcacaacaggacatagtctgctgagattgcccatgacgtttccacaaagaagagaaaagagatcgtggaacgagcagcacagcttgatattgttgtcactaacaaacttgcttggttgcgaagccagtatgatgaatgaaagcttaaacattaatatgcatttgccgggagtatacatcacctttactttgtagaaatgatccttgatattccatattcttcatgcaattgcatgagaattcgttcacataattgttggtatatcgaggaaaaaagatgcc

SEQ ID NO: 35696 - DNA, 318 bp, Gossypium hirsutum
  Clone ID: LIB3148-001-P1-K1-C9
gacgccacgcgtccgcccacgcgtccgcaatgctgctgggttttgcctcaggatatggcttgcatgcgatatttgcagatgaggcatcctcggaaatcagaatttaagatagtttggcatacaatccggcatatatggtaaagcttaaataaagttggcttttttttttttttttggtttgatacccttcaacccagttcataaactacacgaatgcattctatccgaatgcatatgtaaatggtttgatctttttgatgtctgtggaacttaaatttattggaataaagctttggtattatttggaggttgaccttt

SEQ ID NO: 35697 - DNA, 452 bp, Gossypium hirsutum
  Clone ID: LIB3148-001-P1-K1-D10
ggcgtgtgctacacgcatcggaagaatgtgtagcagttaatgacggagctgtacttgtacgtgctgagacttgtccagacttgaaaattggaaatgatagaacagaaatcatagatggtggcatggggggacttgatgggaaaactgcaaagcttgcttctcctccatgtaaagaattagtgaagactggaagcagtattcctggacctgacacggacaaaaaacaaaaaagatgccatatggagccagttgtgaacagtatctcaatgtctacgagagaaggtcttaccgattcagggctgagtccaccttcgacaaaggctggtggagcaactgttcagattctgaagagacctaactgtggctttggggcatttctggggaattctgccacgaagaaaaaatctgatataggtaaaaagaacgaagagaacaagttggagcagatcaga

SEQ ID NO: 35698 - DNA, 254 bp, Gossypium hirsutum
  Clone ID: LIB3148-001-P1-K1-E10
gccacaaccggcttctggattatcgtcggctttactagctaaatatccagacatgcatcaggtatcgcagaacgcctcaatcacatatataccgtccatgtatattcacaaggatcaacacgcacttgatgtcacgaaatcgactatagactcatattcagcatcacttgatttgccaacgacccccaaagtcatggtcttgtaacacacttacacgagacaaacctattcattaaaatccactatcattgaac

SEQ ID NO: 35699 - DNA, 234 bp, Gossypium hirsutum
  Clone ID: LIB3148-001-P1-K1-E12
gcgactttggtctttaaattaattgcgagatttgccttctctatacatactggacctagaggttcttaaaaacacaactttcgttgttagctgcttgcatgaaaattatgtttcacaaaaatcaaaatctaaacaaacaacaaaactccattacaattgataaacaaaactcagactcactaaagaatccaaacttacaaattctacctctctaggacaaagctagcttatatc

SEQ ID NO: 35700 - DNA, 260 bp, Gossypium hirsutum
  Clone ID: LIB3148-001-P1-K1-E9
tgcagaaggggctagttgtgagtgagtcacctatgtatcttgatatagcgcccaagatcgtgaatgtgaaaacgagtccgaggtatattcaccaaccaaggttcatcgattgctgcacatttgaaatgtgaggacttcttaaagccgaataccgtcagctttaggttttatatgttgctacctgtaccttgcttttcattttcttgctttttgggaattggaataattttcggggccttagatgaagttcatcattccga

SEQ ID NO: 35701 - DNA, 113 bp, Gossypium hirsutum
  unsure (1)..(113): unsure at all n locations
  Clone ID: LIB3148-001-P1-K1-F1
aanggggangcctctaaacatgcgaaggcttgtgctacaaatggagaggaaacgttttagggaagagtagactatgagactgtgattgccgcattctgacctcgggctaccat

SEQ ID NO: 35702 - DNA, 158 bp, Gossypium hirsutum
  Clone ID: LIB3148-001-P1-K1-F2
acgttttatgtttggctcggctcgttcgggtattgccggtgaaacttgtgcgatttgcctagaggattataatgacggggagcttcttaaagtgacttcttgtcaacatgattttcattcaagctgggtggagtcatggatgactaatggggggacgt

SEQ ID NO: 35703 - DNA, 440 bp, Gossypium hirsutum
  Clone ID: LIB3148-001-P1-K1-F9
gcacctcggtctcaaacgcaaacaccccttttcatggcttccttacaaggtgccctaccaagtgtgccgccttcttctggcctattacgcacttcaagcctcggtacaccatcatcagcatggatgccacctcaatctttaccttacgcgtctggaattccatcgcagtcactgccctatgcttcagcattgccacaaaggccatacttgggagctcaattacccggtaacttgctgtcgtcgagccatcaagctggaggcattggcagtgaatcatcctacggtttcataaacactgaccaacacgtggcccgtagattcttagcaccggttaccccacagtctttctcttctgatcgtaggggcaacccatttggctgaacatgaaataacaaaggttccccaaaggtcatttttcgttaagcatcgtaccgttgcta

SEQ ID NO: 35704 - DNA, 394 bp, Gossypium hirsutum
  Clone ID: LIB3148-001-P1-K1-G10
tcgaccgacccgtccgactttactaagagcataatcctaatctcattatcaatgtctactacgccgaacaaaatcacgtcaaccgacggttgcgataggcgccaggctactcgacttcaacgtcgtgctcctgcttgcttacacatcagttcggctgctagctggaacattgcaatacctctctcgtctccgctcgcctgttcgcctccttcgattgatcggaggaccaccgatagaacagaagagccaccgcctcgtcaagaacaacagcagaggcaaatccagaaaacggagccggaaaagcttgtgttcaagatgtggcagcattcagcggcaccgctttgttatgaaccggcatcgatagtaccgtcgattgtgccggattatatgtata

SEQ ID NO: 35705 - DNA, 260 bp, Gossypium hirsutum
  Clone ID: LIB3148-001-P1-K1-G11
gtcggcccacgcctcccgattaaacccgggcttccttatgatcccattttcagtctatgcccgaggaacccacagtttgaatttggttttatttcccccccccttttgcaagtttcatttattcattcattcctcattgctctagggttccctgtgcttcttcctccctttcaccctttccttaatttctctccccctctcttttccattttcaaaagtaggccagcctggttcttgtatcactacttccattcagtggg

SEQ ID NO: 35706 - DNA, 365 bp, Gossypium hirsutum
  Clone ID: LIB3148-001-P1-K1-H12
acaatgatgttgtcattaacgggtcaacaacactctgagaaagtatcagagaattgcggtgctgtgtggaaatctctgggaatctacactgatgcagatacgaaagcccttgaacaattcattgatgtcttcaaggatgaaaacttgcgacctggatctttcattctttgaagtatctcaggccaaggatcgttgactatagaccactgcaaagatagctgagtaccagaaggtcggaacgcaatgattgagaatagactacttgacaactcagagctggaatacatcatatggaagaacggagatgcttctgcagcagatgaaagcttgtcatgaagattatgatcattgtgcaatgactgatc

SEQ ID NO: 35707 - DNA, 298 bp, Gossypium hirsutum
  Clone ID: LIB3148-002-P1-K1-A7
gcgtccggctatgcgatccccctatctgaccaccacacttctttatgcctccatacgaaattgattgtgggggggctaataatggagtatggtcagtctactattataagcctcacctctaatggaatgtactgtattctcggaccccatctaaagcttcaattttgacgaagaagagatttttctatgaatacaaaaagaaggtatgcttgcttttttattatattatgcataaaacatgtggcccacctaaggaagacgaaacatcatgcacatacaaaagaaacacaaggcgttc

SEQ ID NO: 35708 - DNA, 451 bp, Gossypium hirsutum
  Clone ID: LIB3148-002-P1-K1-B12
aggagctgtcagagcatcttggaatccgcagactgaatgagcggctctcacatcctgcagggcaggactcagttgaatctattttcccgagggataatcccaagaacacaaggttttcgatcaactttttcacttccattgggcttggtggtataactgagaatttgcgtgagtatttgaagaacatgccccggcttatcatgcaacaacaagaaccggcatctgaatcagaatcaggtgatgagtctgggagctttagttcatcggattcagaaagtgctagttcagagccggagtcagattcgtcaagttctgatgagggtgagaggcgcatgaagaaaagaaagaaatgaggtataatggctgctgcttaattgaagcgtttagtatcaaactcgtgaatgatatatgtctttctgatatataatgcatgtcgtcggttttattcctt

SEQ ID NO: 35709 - DNA, 213 bp, Gossypium hirsutum
  Clone ID: LIB3148-002-P1-K1-B7
ctcgtcggaggggttctgattccggaagcatggattatgcaaactctgatgcatggtctgccgcatatagcactgttgcagcaggggctgcagttgttgctgggcttggcttattagcatacttgaggaaagctgggaattagcatcggtagaaacttcatcccatatgtaactcaaaaatttgaaggttaaatgcaacaactttctttaggt

SEQ ID NO: 35710 - DNA, 279 bp, Gossypium hirsutum
  Clone ID: LIB3148-002-P1-K1-B8
gtttttaggttcgattgtatgttgttttattgtatgtatttaacaaagtagttaaggtctagcgagtgttcaactcatatcaatgatataagttcaagttgtaaattcaaaaaaaaaaaaaaaaaaaaaaaaaaaaaaaaaaaaaaaaaaaaaaaaaaaaaaaaaaaaaaaaaaaaaaaaaaaaaaaacaaaaataataaaataagggtttgcaatcaaagaagagctaagctatcaaaacggggccggccgcttaaaaggatccattctttctcaccc

SEQ ID NO: 35711 - DNA, 432 bp, Gossypium hirsutum
  Clone ID: LIB3148-002-P1-K1-C7
ctcttacagataatgaaatgattccatgtgtcccgaatacacttattcgttccgtgcacgatttgtatggtgaagagcaacaagacgccatgttgctgtggttagaggaacacggacgccgtttagagaatggtattatcaaagtccgtaaagaaggagatgatcgtagtatcaatttatttcccgaggttcctcccttatgtgttactactgtaacaaatggtgtgcaggttcgtgcttcggctgtgttcgttccagaattttctgacgtactagatgaagccgagaagttcatgtttgcttattcaatccgcatgtcactcttacccgaagggtgcgtcattaatggaatgaccttcggctcctgccaattgaataggaagcattggatcattcgtgctgatgaagaagtcgtattcaagtgtgatgatg

SEQ ID NO: 35712 - DNA, 460 bp, Gossypium hirsutum
  Clone ID: LIB3148-002-P1-K1-D4
gtggatggccacaaacgatattaaagtgccctccttccgaagtcagttcgagtaacggtgagacggttcaaaaaaggaatcaccttccaagttcctctgcttgtgtaactacagagaaacaaaaatcaatgtccaaaactaatttgtgttaccttgttttattgttaattctattgccttcttcatatttccttccgttagtccttgccaaatctcgaaatccgatcacagattctgagattaagaaaaagaagagtgaatgttatgctgatatcgacagtggactgtggggtgggcactgcaagtcttcatcaatagcaaaggagaattgtgccttaaagtgcctttctcctgcttgttacgagcttatatatgaaagtgatccgctcgaagaaggagagaaagattatataaggagccaagaattcaagtactgtatgtataagttatcattaggaga

SEQ ID NO: 35713 - DNA, 335 bp, Gossypium hirsutum
  unsure (1)..(335): unsure at all n locations
  Clone ID: LIB3148-002-P1-K1-D5
agacaaactcagcactcagaccccatcatctccggagtttgcgcccaagtgaagatgactctttgaagggaccccagagatgggcaccctactgaatcagtgacatnggatgcnagctgtgcgatcaaagcttgcaaatgtaatcccatgccacctgttgaaaaagcttgatgaaaggccataagattattgaaaaaagaaaggcagcaaaataacaaggcctctgtaatggatttattttcaaggatggatgcctgcaaggtctatacatatggctctctctgtcttgtgtaatagaagctttgtttgtggtgaaaataatgtataagccattt

SEQ ID NO: 35714 - DNA, 223 bp, Gossypium hirsutum
  unsure (1)..(223): unsure at all n locations
  Clone ID: LIB3148-002-P1-K1-E6
aaaaaaaccaagtatataggttgtgatggtaatgagttttatgttgcttactcatataagtgttttgattgaagtttctaacgaagtaaacttgcattcttactatcagaaaaaaaaaaaaaaaaaaaaaaaaaaaaaaaaaaaaaaaaaaaaaaaaaaaaaaaaaaaaaaaaaaaaaaaaaaaaaagcaaaancggggcggtcgttttaaaggaaccaaaat

SEQ ID NO: 35715 - DNA, 284 bp, Gossypium hirsutum
  Clone ID: LIB3148-002-P1-K1-E7
cccacgcgtccgcccacgcgtccggttttgattgatctatgatgtacatctaaagctagggaaccatattttacagttgtctcccggctttgaattcctccattgaaaaatttcaggttgcgttggatatgtaggaaatggctgcacatatttatatcatagttgtcgtcttcttcttttttctcctttcctggaaagttaatacaaaatctgtatcttatttatttgtatagttggtactgaatatctaaaactctttgttatgtgatatgtatttgattact

SEQ ID NO: 35716 - DNA, 205 bp, Gossypium hirsutum
  unsure (1)..(205): unsure at all n locations
  Clone ID: LIB3148-002-P1-K1-G2
ttttagttctggtattttgaaatactgtttctngcactctgaattttcattgatgtgctgggaattagcgacatcaatgtgtattttcagttgatattatctactcttcttatccacttccaactatggatgttctcttgttctgttataccgctttctgggactctctgtttcagcaaaagcatacaaaatggtgttcataaaa

SEQ ID NO: 35717 - DNA, 371 bp, Gossypium hirsutum
  Clone ID: LIB3148-002-P1-K1-G4
ggttgaaaaaaaaaatagaaatttatttgaaaaagaaaaagaaaaagaaaagaccaaactccattcgctcttcattgggattacttgccctcgatcggggaattatcaatgaaatgataaatcgaatggataacgaccgttctgagcattaaaaagaaaagactttggtttgaaagtttcgaagtcaaaagatttcccccagggcatatcataactcgggtttatgacatcaatattaagagggggaattggattaaatttattctctgtaaatcttcaatttcaatggcaggcccaccttcaattccttgctttgggggattttggttctttttaagctccttaagatgaccttagatctttcacaattt

SEQ ID NO: 35718 - DNA, 165 bp, Gossypium hirsutum
  unsure (1)..(165): unsure at all n locations
  Clone ID: LIB3148-002-P1-K1-H12
ataggatttagaaaaattttcgaagatcaatcaagccgccatcnaaacggcgtgataatttattgggctacaaagcaattacaggcacaaaccaatgtaaagattaattttttttaccttaggatgattgtatgcatatagttcccacagtgaaaaatgagttgc

SEQ ID NO: 35719 - DNA, 149 bp, Gossypium hirsutum
  Clone ID: LIB3148-002-P1-K1-H5
agacttcatctgcgttagtaattacagttagtcgggcagaatcttttagcatgttgaatctatatttccatgtggggcttctattctttgatttttggaccttgaatgcataaattataatactaatataataaattgtggtagtaaat

SEQ ID NO: 35720 - DNA, 177 bp, Gossypium hirsutum
  Clone ID: LIB3148-002-P1-K1-H7
gttggttttaatgttccatctcgttggaacatgttattatttccagtatgtacctgtgacgatctgccactgccgcccccaggactgtatttcaagcatttgggtcttggttgataatgttaggtttgctgtctaaaagtgaataattaattatattgactattaatatggcaagtc

SEQ ID NO: 35721 - DNA, 378 bp, Gossypium hirsutum
  Clone ID: LIB3148-002-P1-K1-H9
agaattttcaattaaaatcttctttatcataatcgtatgcaagtgaggatagaaaagatgtgtaaggatgaactcaaaactcaaccccacccaaagttcttatcattaaaccaagatattgtgaagaataagaagggtgaagatacagtgtatctccatcagaacttcgtcgccggttgcatgtcgcttgtcggccacttcaacaaacaaaatttctcaattccttttttttttctctgccactttaatgaaacataattatagatggtgtgtgatgtttctggggttatcctttttgtcactttcattgagtcaagtccaactttttcaaacaataaattttccacgcaatcaaatgatttacacctatttacgctc

SEQ ID NO: 35722 - DNA, 126 bp, Gossypium hirsutum
  unsure (1)..(126): unsure at all n locations
  Clone ID: LIB3148-003-P1-K1-A6
gtgaacatgtgcttttgtatgtctcgctgctttcgtgttagaaccgttcaaaggatgatgtgttgggtggatatatntttccaataattacgagagataagtgtttgctgcggtactttgattagt

SEQ ID NO: 35723 - DNA, 282 bp, Gossypium hirsutum
  Clone ID: LIB3148-003-P1-K1-B1
cccacgcgtccgatctcgttctcgttcattatcggtgaattctgattgaaattggattgagctgcgatgatcacaagattatctcttttagctgattgtaatattttcttagcatgaactagagtttatattcacattttgaccaatcatgcatggtagttttgaactttagctggattataacatcaactgctgcatcatgattcatcattatggcttgtacttcataattgaatccttgaatttatacccaaaaaaaaaaataccattataaaaaatata

SEQ ID NO: 35724 - DNA, 312 bp, Gossypium hirsutum
  Clone ID: LIB3148-003-P1-K1-B2
cggagatcagtaccagactgtcacgctcgttaatactatggttgtacatcacgacaggtgttctaacatgctttcaggacggaactgattcattagaagatctgttgtgagatatgttcaactaccttcagacggagtcaacattgaatcgctttatggtgccactagacgtgaagcttgcggaagctgaaaaagcagcttctgacgacaaaatcaatgtgctcttaatgatgtagatggaatgcttgaaagattgtgacaagtcatcgaggatttacatcatcatgcattaatgttgacaaacgcgcttga

SEQ ID NO: 35725 - DNA, 342 bp, Gossypium hirsutum
  Clone ID: LIB3148-003-P1-K1-B6
gtcacctggtacttgaagattgcagcgggtatcgagtccggaagcagccggcctggccacttggtcgccaccactttgtccgtcagacatatttacgagattgccaagattaagcaatccgatccatattgtcagtacatgtccctggagagtatttgtaagtccattattgggactgctagtaccatggggattaaggtggtgaaggacttggattagattcttcatttactcttcaatctaaaaaaaatggtaatgttcttcttagcttttggatttgatgcatcttagctgttcgacatattggctgtgttgaaaaaccttgaaacgtttttgttggat

SEQ ID NO: 35726 - DNA, 423 bp, Gossypium hirsutum
  Clone ID: LIB3148-003-P1-K1-C1
gaggagtgcaatgagcaaagacgtggaattcaattagccggtgaaaggggaggatgcgggggtgccattggcagcggtgttaataacttcagcacagtcatgaaaataagcacatatattttcccttttgtaactttttatttatttatttacattgccaaataatgtgatacgtgcatacatatacaatggtggcatcaagggaattcattgttgcgtatagaaatgttcaaagtaggaaatgggaccggattcttttgtgccctggcaccacacgtggccagttgtttgaattttattttgtaaaaataaaagttagtcagcaccatatgatttgttccattgtggttgggtgggttcattgttaatgttgtgacttattggctatgtggcatcaaactacatgcgactgctttgctagtc

SEQ ID NO: 35727 - DNA, 428 bp, Gossypium hirsutum
  unsure (1)..(428): unsure at all n locations
  Clone ID: LIB3148-003-P1-K1-C12
acccacgcgnccgaaatcatgctagcagcccctgtattagtagggttgcctttagcctaccgcctccaacagtagaatttccagaatccagaaaccatgtgtgcagcctcaagattacccctcatacttggatctcagcgaagcaaagaagaacccgtagcaaatgttgaaaaagaacgggtgtacggaggaacctggtgacgtggaggctgagcgcaagggtctgtcgtgtgtgagaccaaccctggtgccgttctagcttgttccagaatcttctggcattcacctgaggctgaaaccatttttgggcctcgattttgggctacatttagggatagaattgggttttaaaatttggtgggttatgaattattttggtacatgtaaaggaacattattgggctatttagtctctagtttttatttat

SEQ ID NO: 35728 - DNA, 235 bp, Gossypium hirsutum
  Clone ID: LIB3148-003-P1-K1-C3
actcgtccggcggttccttctgcaatttaaccctgtcttctagacaattctaacccttgctcacaattgcaaccctaggtttgaatcacgtgtgattcttgaatatatttatgatacatttaatcaaaatcccatattgccccaagatcctatacacatacccaactaacccttcttatccaaatttattcattaaaagctactaccatcactatcgtgtgctttcaccaaataa

SEQ ID NO: 35729 - DNA, 359 bp, Gossypium hirsutum
  Clone ID: LIB3148-003-P1-K1-C5
accttgcataatataccatttgaattctttttagatttcatagctatctaaggaatgcgttcattgacttttgttagaactatggtggttccattgaactgcttcatccatgagaggttgagaaaaaaaaaaaaaccattccttgaatcagcaatgtaaattgtaaattttgtatataatatttttcttgtaattttgtatatatatattctctttccataaaagaaggaaatcaaatatatatttaaaagctttgtaacttttatgttgaaagtgtaaatgggatattggtaatattgcctaacgtcaaaaaaaaaaaaaaataaataaaactaattttatataaattaataaataaa

SEQ ID NO: 35730 - DNA, 229 bp, Gossypium hirsutum
  Clone ID: LIB3148-003-P1-K1-C9
actgcgtgaactccaggtgtgccatatttttatattctcatccacatcgagggtattcggtagtatttgaaactctctggttatacatattagtccttgtagctaagaaattttttgaaattttccagaatgtatacactatctttgagggtatagctatactccatagctaatagtaaaattacttatagtcgttttgtaaagcgtaaaataaatgataatggataag

SEQ ID NO: 35731 - DNA, 386 bp, Gossypium hirsutum
  Clone ID: LIB3148-003-P1-K1-D11
cccacgcgttcgtctcagtaccgtgaaccgggagttttgttatggcgtggtttcacgtggcaagaattcgccgaccagtgctttggaaacaaagctgattatggaaaaggccggcagatgccgattcattatgggtccaaaaagcacaatttctgcaccatttcgtctcccattgcaacacaactttcccaagctgcaggcatagcttattctcttaaaatggacaacaaaaaagcatgtgttgtgtcatacatttgagatggtggcaccagtgaaggttattttcatgctggtttaaattttgcagcagttatggaagctccagtcattttcttctgtcgcaacaatggctgggcaatcagtacaaatgtatctgaacaatttcg

SEQ ID NO: 35732 - DNA, 291 bp, Gossypium hirsutum
  Clone ID: LIB3148-003-P1-K1-D9
tgaaggccgaagaggtgaaggtttcatattaacgtcacttgcacatgggttagtctccgtaaatatgtaacatttactaggcggtttgtatttggaatcggcttataataaactgtaaagttccagggtttggactgagttgcagaggctgtaagattgttgacatatacatatatgaacacatacgtatatctatatttgttgttcagttatcagtcaatgtaatgttattagggtattaacataataacacacgcaggtatagacctctttttgatttctgactttgat

SEQ ID NO: 35733 - DNA, 316 bp, Gossypium hirsutum
  unsure (1)..(316): unsure at all n locations
  Clone ID: LIB3148-003-P1-K1-E12
gngaacagggagagacagaccagggangcaatctggagtaagcgcggaccctaagcatgggaaaggcaatggagtgaatgccgaggcataggcacagaacacccgtgctgcagaggtgagacaagtgaccgacgaggaaacaggaacatgagctaccaaccgagaaaggcaatctaggaaagaggaacgtctaagcaacgtacttaagggaggcaacagagctaggttagccaaaaccatagcttctcaaagaggcacacataccgacagaaggcttcaccaaatgatgcgtgcggacagggattatgaacagacc

SEQ ID NO: 35734 - DNA, 393 bp, Gossypium hirsutum
  Clone ID: LIB3148-003-P1-K1-E4
ggggttgaaaaaaatgggtgaaatcgagttagcagttcggttcgcatgtccgtcattgtgaccggacacatgttcggcttacggtcaaccattgcttccaagaatgcattatctccgcccacttggggtggctcaacaggaggcattacgcggagctgcgacaaagatggtagcacaatggctagcgaggtcagaaccgccgcttgggcaagaagtagtgaagtacatgctggatgcggattctcatacatggagcatgagaaagagcaaagcgaattggtttcggatcgttgccgttctagcatgggcagtggggttagccaaatggttggataatattaggaggtggaaaaacccggttactacagtattggtccatgttttatacttggt

SEQ ID NO: 35735 - DNA, 441 bp, Gossypium hirsutum
  unsure (1)..(441): unsure at all n locations
  Clone ID: LIB3148-003-P1-K1-F12
gattcttcgtacttcatggaatgtaattacagcaactacaaggtatggaactaaggacatgagatatatgatggaataaatcaagaaaaatgaaaggccattgacatattccaaaccagggaaaaacaaaaaaatttgcaaaagcatcatttaaaatttctttttacttggttgtctctttataaaattttatgccctttgcacttttgacctttcagtgtctcacactctttctccctgcaaaccaggctcaaaatgatgtgaaagagttgtagtttcttcagtggacgatgtcagacttgtggagaccttcagctgagtgaaggtcaatgaattttatcatcgactntggtgtggaaggttaatcttatctggtcttagtcctcattctcctttntttttttttctactttgcttacatttngtttctcaaccgaatgg

SEQ ID NO: 35736 - DNA, 198 bp, Gossypium hirsutum
  Clone ID: LIB3148-003-P1-K1-F2
attttcagttggaggtttccttgtttatgttgaagaaatgaaatagaaaggttttgcagggtgggttaaagttgaggtcgcaaatcattaatagtagggtcgattattttcattttatttttgggaaatccattaccatatggaaggaccaaattgtttttgttttgattcgatattatgcacggagagatttattgc

SEQ ID NO: 35737 - DNA, 428 bp, Gossypium hirsutum
  Clone ID: LIB3148-003-P1-K1-F8
cccacgcgtccgcccacgcgtccggggcttcttatggatctttcaccctggttgaaacgttctctgacaaacttctttcctggtttccatattattatcacttcaagtttgcatttcttgtctggcttcaacttccttctactgaaggggctaagcaaatctacaagaaccacctgcgcccttgcttgctgaaacatcaagctagagttgatcaacttatgtgcattgcaagtaccgaaatggcaagattcatcacggcacaccaaaaagagtttcgatttgtccgggcaatgatgatcaagattataggatcagacccaaaagtgagtggcacggaaccggctgaaccaagaagtctacccgcaatcaatgatgaaacaagaacgactgcaaatccggaatctgataatggagactagtttctattt

SEQ ID NO: 35738 - DNA, 274 bp, Gossypium hirsutum
  Clone ID: LIB3148-003-P1-K1-G6
aatgcttctccaggtgtggacaaaaagcatccacctcatctcctataaaaggccaacatttctgataaaaaagagcaggaaaaccatcttcaccaggtgccttcgtaggatgcattccaaataaagcctcccttcttcttttgtgtatttcgctataagattcctgttatcatcctctgagatacaccgctcaattccggagcgtatacgctcataattcgtttgattttctgacaagaacatttcttggaaatatgattgtacaatttgctcc

SEQ ID NO: 35739 - DNA, 379 bp, Gossypium hirsutum
  Clone ID: LIB3148-003-P1-K1-H1
ggagaaaataggttttgacctatgtgaattatgctacaattctccggccacaatcccaggccgatttagggagcagcataaaccagatcatcaatttaaaattgtacagccgttaagcatacgggaccttatgctaagactgaactctgaacaatctgatgatgatgatgatggtggcttagatgcttcggaacatatggatggtgcttctcatactcctggtatgcaagcggatgaaagccatggtgtttctcaagagcctgaagatatttcgcctttgatattttcagttgatgtctccttggatcacgaggataactctgaggatccaagtgataatatttcatcaggtttgacttaaaactgtagacaattgtga

SEQ ID NO: 35740 - DNA, 294 bp, Gossypium hirsutum
  Clone ID: LIB3148-003-P1-K1-H7
aaaaaaaaaaaaaaaaatttttaaaaaaatttaaaaaaaaaaaaaaaaaaaggaaaaaacgggaaaatataaagaacccaaactaacaatcaataaaaatacctctttttaaatctcgcccgctccctcctaagtatccatttttacgacccctttcttacaacccaatactttttatattagtgtcccttaactacaaaaacctggcccattacaaccaacatttgttactcttaaaaccctgtcattacccatcttaatctcattttcaacaaattaccccttttcccattt

SEQ ID NO: 35741 - DNA, 422 bp, Gossypium hirsutum
  unsure (1)..(422): unsure at all n locations
  Clone ID: LIB3148-004-Q1-K1-A10
cccacgcgtccgcaaaaactctgccaagctgattggaatggttgtaaaagaattgggtcgtccaatcattgatgtttgaattaggtaacatcgttggccatctaaaattcattaacttccaaattttaattgattttttatagtatttgaaaatatgttccaccttttccacaccacctgcaatgtagattagcaaaagtaggcaggaaatttttaataattctccaaattttgattttaattttgttgggaaaatccagcaaccaaatttttttgtaaagtaaagggtcattnaaaaaaaaaaaaaaaaaataaataaaaaaaaaaaaaataataattacaaatattattataataaaaattttaatattataaaattattattttatttattttatttatattttntgggtttttttttt

SEQ ID NO: 35742 - DNA, 352 bp, Gossypium hirsutum
  Clone ID: LIB3148-004-Q1-K1-A3
ggatcctcaatgaaaacaaaagactatgacatttatgggatatttaaggagattgataaagtcagagttggaaataggcgatgttgactttgtccaaaaaaaaaaaaaaaaaaaaaaaaaaaaaaaaaaaaaaaaaaaaaaaaaaaaaaaaaaaaaaaaaaaaaaaaaaaaaaaaaaaaaaaaaaaaaaaaaaaaaagaaaggaaaaaaaaaagaaagaatatattgttttcctaaaattaaaaaaaaaggcccccgttctataaactttgctaaaatgggtaaaaaaaaggacaattgggaaaaaccacgttttgcggaatataacggtttttacagaataaacccttttg

SEQ ID NO: 35743 - DNA, 216 bp, Gossypium hirsutum
  Clone ID: LIB3148-004-Q1-K1-A4
ggaacccaagactaaggactgaagcaaacagtgatcaaagaagacgaggatgtcgaaccgtttgtgcaattctttttgctgtacctgattgtagcaggctttagtttctgtgttgtttgtgtcatgataccatgagctattcagatttaatctggccgtaacatgttaaaaagcactttgtaataactgaaccaattacagcagttgtttttgttt

SEQ ID NO: 35744 - DNA, 243 bp, Gossypium hirsutum
  Clone ID: LIB3148-004-Q1-K1-B1
ttgagttgcactccatttttttttactcaattttcttagttaacccatagggaaaattacgaaagttattccccccaaaaaagaggagagaaaaaagaagcattattggtcaaaatcactaacaaagcaactaaaacaaatgatcttttccattgtcttcaataaatttgctttgccttcttatgtattgcattagtgtaattttcatttatataaaatatcgatcatggaaatctttatgtt

SEQ ID NO: 35745 - DNA, 418 bp, Gossypium hirsutum
  Clone ID: LIB3148-004-Q1-K1-B10
cggaaactaaaagttgctgaaactacacctgatagctggtttggaaagatggtatgtcatgcttcacagggatgcttaagatgtgttgagtggacaatcaaatcagtgaatcgaaatgcttatataatgatcgcaataacagggaaaagcttctgtagatcttctgcaattgcaacagaattgatcatgaataatatccttagattagtgagggtgaatgtgattggagatgttatcctgtttcttggaaagttgtttgtcagcctctcgagcgctgtctttggtttccttgtgttggatacccacaagtatagttctggtcataacaaattatcctccccattgcttcctgtgctggtttgctggactcttggttatgtagttgcaactcttttctttgccgtggtggagatgtcga

SEQ ID NO: 35746 - DNA, 546 bp, Gossypium hirsutum
  unsure (1)..(546): unsure at all n locations
  Clone ID: LIB3148-004-Q1-K1-B3
cgnntccgagttgtatggacacccttcaatttcaattttaatttttgttttanntctctcaaatannaatgtgtgttagtttgtgtaannaatttctnntttcaattttatatnnntcagcttcttaatgctnnntttgcagcaccacctnnttctgcntnnctcagacccagtgaatgggggtaaagttattttcgatttcntttttgtctcttannattgannaatgantnnttcttattttattagaaatcaaggggttcnttaatgcncnncctcgaagccttatttcatatnnncggttggcttctttcggataaacaccgnntaagttcaccttctacntnnttctgtnntaaccaaagggtatttattatgctataagcctagngnnaaatagaaaagaataaatttgatacctaagtnngagttgatgaaaacaaannngtttctattatttaccttnnactttaggtgatccgaatgaggaattgttttaggacatgntgtattacaatgattgtgatatgcanaatatgcttatgt

SEQ ID NO: 35747 - DNA, 388 bp, Gossypium hirsutum
  Clone ID: LIB3148-004-Q1-K1-B4
aaaaaaaaaaaaaaaaaaaaaaaaaaaaattaattttaaaaaaaaaaaaaaaaaaaaaaggaaggaaaaaaaaaaaaaaaaaaaaaaaaaaaaaaaaaaaaaaaaaaaaaaaaaaaaaaaaaaaaaaaaaaaaaaggggcgccctttttaaagaacccaattttacttccccttgcttccaactttttatttttttttttgggccccctaattttatttttttgcccccttttttaaaacctcgtgcctggaaaaaccctggctttccccaattaaatccctttgaaaaaaatccccttttccccagttgggttaataccaaaaaggcccgccccattcccctttccaaacatttccccacccttattggaaattggacccccccttt

SEQ ID NO: 35748 - DNA, 298 bp, Gossypium hirsutum
  Clone ID: LIB3148-004-Q1-K1-C10
cttgaagagtgggagaacaaagtacgacttttgagcaatttcatttgatttttgcgggggattagttagcatgctaggttatccatttaagtgatacttgattttcgcacgttttgatcgaatctaatacatgaatacatttagaagacagcttatagattcaagattgtggaaatgtacaatttgcgaaagttttctcattcatttgagaaacaaatgcagtagaaatatgtacaattgtagtttttggttaaagcagataaagtgaattttttcatgcctctctaacccggggatc

SEQ ID NO: 35749 - DNA, 424 bp, Gossypium hirsutum
  Clone ID: LIB3148-004-Q1-K1-C2
caagtctttcttagaagcactttctgttattaacagagattcccgatctttgccaaacaagatttcccgatctttgccacatcaaagcttcctaaaggatgaaattgaagaagaggtggaatgtatactcagcgtgagtgctgagatgaaacaaattttttgggacttgcttcctgatcacgagttggatgaggaatttgctgatgcctatggggaaggtttagaaggaagtgatgatgatagttgtattgaggatagtggttgttatgaaaatgattggaaaatggttaataaggacttagagagttgtatgtcccattctgtcaagtcaattgagagagatgaggttatacaggacgtgaaaatggatccagaatattcctcgagtaatgcgaaaagtagcgaagataaaaacagagtaaag

SEQ ID NO: 35750 - DNA, 299 bp, Gossypium hirsutum
  Clone ID: LIB3148-004-Q1-K1-D2
gtgatttgtgaagaacatcaaacaaaacatgcactggctttaatatgatgataagtattgtgggaattaattaattggcaaaaacaacaatgaagctaaaattttatttattgagccttgcggttactttcttgtgatgatcttttttattttctaattatatatagtttccttcgctttgaaaaaaaaaaaaaaaaaaaaaagataaaaaaaaaaaaaaaaaaaaaaaaaaaaaaaaaaaaaaaaaaaaaaaaaaaaataaaaaaaaaataaaaaaaaaaaaaaaaaaaattgtttgg

SEQ ID NO: 35751 - DNA, 347 bp, Gossypium hirsutum
  Clone ID: LIB3148-004-Q1-K1-D3
acgcgttcccacgcttccaaaagggtgcttttgggtttattggaatcaataatttgccccagtggtggtgtttggtgatttgtaattcgccccactaattccccattttaatgaaatttggaatttaatttcggcaaaaaaaatatatcggaatgaacctttgccctaatttaaaaaaaaatttcatgaaaaaaaattaatacccctctctttaaggaaacctctttaaaaaatccccacctttaaaaacccaaaaaatttaaaaaattccttataataattaaaaacctttctctcccttataaggacctaaatttttttcccttggggggaaacccaaatttttt

SEQ ID NO: 35752 - DNA, 265 bp, Gossypium hirsutum
  Clone ID: LIB3148-004-Q1-K1-D4
cccacgcgtccggagttgtacaagggtaattcatgtattctaccatgtagctgataatagttatgagtgttattaggctagggaaggagaaatttatcaactcctggaaattctgaccaacgtacgttaaccaaaagtcgatgtgtcttttgtttaaatatcgatttaaaaccgacgcttagggtgagggttggtttgattgttagatttgtggcttaggtaagtacacgctaatttaaggaacggtgtgatcttttagcagttc

SEQ ID NO: 35753 - DNA, 421 bp, Gossypium hirsutum
  Clone ID: LIB3148-004-Q1-K1-D9
cccactccttcgaccacacatatctgatatcagatgccattgcatgtcatccatggggcgggatggtggccttgatgattcaagcactctcacaccgaataaattatctgtgggtcgtctaacaaaatcaaactttattcgggattggaacctttgctataatgattaaaattttacgtgaaacgattgtgtaccatgacttaaggaaagctttgaagaaatccccaacataaaaagccaaaaaatttaagaaatccataataataataaaaaccatatatttggtgattgtgatttagatgtattaattcagggagatccagaatcttaaaaagaaattcaacctgaaagtaatcaacttaagtgcagatgtttatgaattaaaagaatggaatagattgaggtttctggagaacaaaaa

SEQ ID NO: 35754 - DNA, 309 bp, Gossypium hirsutum
  Clone ID: LIB3148-004-Q1-K1-E11
gtaagtcttcatttgctgacattgctcaaatagaatctgcaaaatctttttagtaacgtcggtattgaaggtattaataactaaaaaaaaaaaaaaaaaaaaaaaaaaaaaaaaaaaaaaaaaaaaaaaaaaaaaaaacaaaaaaaaaaaaaaaaaaaaaaaaaaaaaaagcatgcgacatcataaataaaaatataaagtcaccaaaattaaaataactgaccttcttttttacaatccacataactttaaaaaccctggcgatacccaaattaattactttggaaaaaataccctttttttcagttt

SEQ ID NO: 35755 - DNA, 291 bp, Gossypium hirsutum
  Clone ID: LIB3148-004-Q1-K1-E8
atgaaatgaaatctgtaactttaggtgattgctgttgaattagaatttagttttctgatgatataagatgttaatgggagaaagggtagaattagataaggttcttaagttgaacaaaagtggaagacgtgtatggtttccttgggtggggagctacacactacaggttttaaaattgaatttatgaacggtggatttgactcaaaaaaaaaataaaaaaaaaaaaaaaaccaaaataaaaaaaaaaaaaaaaaaaaaaataaaaaaaatgaaaaaaaagaattttaaaat

SEQ ID NO: 35756 - DNA, 247 bp, Gossypium hirsutum
  Clone ID: LIB3148-004-Q1-K1-F2
cccacgcgtccgggaattctttgggctaacctattgctgttatttttgaaatgtaacaaaatgaaaatccgcaaactgatgaattgaaatttaataaattttcatttataatttgttttcgagaaataaaaaaaaaaaaaaaaaaaaaaaaaaaaaaaaaaagaaagacgggagaaaggaaaaaaacataacctacgcatgcaagcaacgaaaaaactatatatattgttgtacataaattaaaatt

SEQ ID NO: 35757 - DNA, 379 bp, Gossypium hirsutum
  Clone ID: LIB3148-004-Q1-K1-G4
cggacgcgtgggcatctgcatattaccgaggtgcggttggagctctccttgtgtatgaggtcagcagacgacagacttttgatagcatcggcagatggctaaatgaacttcagagtaagaaccacaatagaaaaaccaaacatttgtattatttcagacggtataagacaacccagaaaagaaaatagattttatatatagccacattgtcaccggctttgtgagtgtgtcatggcttggactttaacaaagcaaatgtggggtgttaagcagagaattcacttcaatttgttggtctgtatcaacttgaacctccaaagttgaaagtactgaagaattctccaagggattaaagttggaaagtaattcacgcgaaaca

SEQ ID NO: 35758 - DNA, 294 bp, Gossypium hirsutum
  Clone ID: LIB3148-004-Q1-K1-G7
tatcagtgcaggaggatataggttcgagtgcattgaaacacattattctcttcaaagtagttttagacattttgtcaaaaaaaaaatcggaatctataatgagattatttaaaaaaattataaataatattcgcgtaaattattataattgaattctgaactttttttttttggttggaaatgatgttatagaaacctacttggtgaagatttagggccattggactcaaaggaacttgatcaacttgaacatcaattggaggcatctttgaagcaaataagatcaaccaaggt

SEQ ID NO: 35759 - DNA, 303 bp, Gossypium hirsutum
  Clone ID: LIB3148-004-Q1-K1-H12
aaagaacaattgctaaagcatggactgattcaaggtctggcaaaacaaatgatcctttgaagggttatcgttgaatcccatttgaaaactgagatgaaatggggttcgttttgggtattttagcacaatggtcttgtttttatgctttttttgtttggacttgtactgaagttgcagaaagatttgtttctggatatttttgttctcgctataaaaagtataattgaaatttggagatggttggatttcttaaaaaaaaaaaacaaaaaaaaaaaaaaaaaaaaaaaaaaacacaaacctaaa

SEQ ID NO: 35760 - DNA, 317 bp, Gossypium hirsutum
  Clone ID: LIB3148-004-Q1-K1-H5
gaaacatttggtgattggtagttattaaaatctgtgtttcccttctaaaaaaaaaaaaggggagggaaaaaaaaaaaaaaaaaaaaaaaaaaaaaaaaaaaaaaaaaaaaaaaaaaaaaaaaaaaaaaaaaaaaaaaaaaaaaaaaaggggcgaccaaatttaaaaaaaaccagcctaccggccccccgctatgcaagtgcaaaactttttattgcctcccccaaaattaaatttttctgcacttgctttacaaaaacccgtttgtgaaacccttggctctccccaaattaattgcccccctccccattcccccttt

SEQ ID NO: 35761 - DNA, 230 bp, Gossypium hirsutum
  Clone ID: LIB3148-004-Q1-K1-H7
cccacgcgtccgcaggaaggagaagacatttcttgcagagaataagaagtttatcaagaggcagccgaagtgaacacggattttctgtcaaattctggcgagggtcccgttaaaattttgctaaaaccgttttcattgaagttgcaataatttccatgggaaattagagtttgttttcttgagtaagaacagggaaatttacagaatccagactgatgctttattctctt

SEQ ID NO: 35762 - DNA, 259 bp, Gossypium hirsutum
  Clone ID: LIB3148-005-Q1-K1-A11
ggttgttgatttcaaagcaataatcttgttggaatcgaattagatcgattaatatgatcgggtgaattgagaatcgataaatgtattaattctgacgaaaacattgaatttgagcgaattatttagaaccaccattgaatcaaaaatcgaaataggttgaacaagtaaaaaaaactaatggaatcggtttgttatatttattaactgttaacattttaattgaatttggaatgttcaattgaattagaattattagttt

SEQ ID NO: 35763 - DNA, 289 bp, Gossypium hirsutum
  Clone ID: LIB3148-005-Q1-K1-A4
tataagggagagagggaggagaatttcaacaagtcaaaggaggtggatttgttggatgagagtagtgaaaagttggagaatgtggattgggaagatgttatcactatcttggatgataatgaatggccatccaaaacacctagcttccaggaaaccatgaaggaatacaggtttgagttgaagaaattcgcagaaaaggtgatgcaagttatggatgaaaacttgggattaccgaagggatacataaggaaggcactcaatgatggagatggtgataatgccttctttg

SEQ ID NO: 35764 - DNA, 429 bp, Gossypium hirsutum
  unsure (1)..(429): unsure at all n locations
  Clone ID: LIB3148-005-Q1-K1-A9
gcatcttgtattcacacaatcactatcgagaaacgaagaaaacggaattggatcgggggaagtcaaaagtagtcgagtagtcgactgtgttcgttgttaaccgagattttggaatcgtgtacgagctcagggatcatcagcaagcctatcacactatcgactgttttctttggtattttactaagttaaagtttgagcttatggcatgtatagtctggataaaataattgattttggaacttgtatgtatatagccatgcgaaaaatggcttgtctttaatcattagtatttgttttggtttttgtcttatgggttcttgattaagtgtttaactttataattntggttatggcttatttacatgtaaaatacggtagctatgttnntgtgataatatggtgaatgagatgatatataatatgagtgga

SEQ ID NO: 35765 - DNA, 232 bp, Gossypium hirsutum
  Clone ID: LIB3148-005-Q1-K1-B2
aagaaattgaggcatcatttgaggcatccaaatttcttcctgtccatgcaaccaataaaagcgtggagcctgttgaagttatgcccctcttacccgattttgaacggtaccattaccagttcgttatggtggcattttataatgctcctacagctgactcagaaattcttagcaagctttcatggctctgtactttattaatattaattgaggtccatttttttaatgtttt

SEQ ID NO: 35766 - DNA, 293 bp, Gossypium hirsutum
  Clone ID: LIB3148-005-Q1-K1-B3
aaaaaaaaaaaaaaaaaaaaaaaaaaaaaaaaaaataaaaaaaaaggggggccataatagggagggaaaattacgacgccggcatgcaacaaaataaatattttttaatgtaaccataattaaataatttgtccgccgttttacaacaacgcgattggtaaaaaactggcgtttccaaccttaatagccttttagcacatcttcctttttccagctggtgtaatataaaaaaagaccttaccaattttccttcttaacaaaatggtcagccttaataaagaatgggacgcccc

SEQ ID NO: 35767 - DNA, 432 bp, Gossypium hirsutum
  Clone ID: LIB3148-005-Q1-K1-B9
cttaggaggaagctggacaatgatccccagcatcccaacccacagtaacgtatctacgccggccaatcaagaccatctatacctttcccctcctccaccctcacaacaacaacagtttcatccacaacaattccaacaacaacagcagcagcagcgtatgttacagcagcagcaacaacaacaacagcagcagcagcaagtgcagcagaatcagcaacaacaatcactagcttctcacttccatctcttacatttggtggagaatttggctgatactattgataatggaagtcgggatcaacattctgatgctttggttaatgaactgaacaatcactttgagaagtgccagcagcttttgaactcgattgctgcatcaattaattctaaatccatgactgttgaaggtcaaaaagaaaaagctggaggaaa

SEQ ID NO: 35768 - DNA, 378 bp, Gossypium hirsutum
  unsure (1)..(378): unsure at all n locations
  Clone ID: LIB3148-005-Q1-K1-C3
cccacgcgtccggagaactgtgcgggtccatcgtgtggtaacccatacaaatatcgagattcgaagtcgaagctacctctttgtagtctgcagtgctacaaggcaattcaaaaacagcagatggctgaaactacctgctagtgttgctgaaaatccagcacttccctcttgtgcatgtggtaaattctgcacatttatgttccatttcaacccagggacggattaaaaaatagagccaaatgcaaatttctttttggagtaatattaatgtaattattacaggtacaagaaaatcttagttgtgcttattttagtataatccataaataaaagatttcctctccattccaatccnnnnnaaaaaaannnaaanaaaaa

SEQ ID NO: 35769 - DNA, 443 bp, Gossypium hirsutum
  Clone ID: LIB3148-005-Q1-K1-C5
cccacgcgtccgaggaataagagcacctttatttttctagctagctttcaatataattccttgtcgttctatttgcttttaaaatttagcctctaattagatacccagttctcattttctctttaaaattaaccacaaaataagctatcatttgtcttcttgtcgtgtctgcctttttttgcttgtttccttttctttcttcccttatttgacgccctgtggagttctcttatctaattttttgtttatcaaaggttatggttgaaaatgtctcttttttattttattgtattgtttttgttttatttcttttagttttgtttatttaattatatctttatatttattttttttgcatttttttcttttttatttttttatattttttttttcattaactttttttttcttttttttctctttctttattttttttttttttt

SEQ ID NO: 35770 - DNA, 167 bp, Gossypium hirsutum
  Clone ID: LIB3148-005-Q1-K1-D2
accaggcgttcaaccacgcgtcggttcacgcgtgcggccacgcgtgcgcaaaggaaatgtagtggctgtggttacaagatagcagcggaggacgagcaaacaaagggtatcacaggtggagactgtatctggtttttgtacaactaacaaagaaccgaactcggtga

SEQ ID NO: 35771 - DNA, 206 bp, Gossypium hirsutum
  Clone ID: LIB3148-005-Q1-K1-D4
gagacaagtgtgggctctcagataatactgctgtgtcgttcccaacgagcaaggcactcgcggatgaaaggggcctacctgatctcgggacgtgtgccgaccattcaaactctgtggcacaggctctaatggacatggcttgttacatctcagactgaatggcgagccttccaaccatgaacaatgcaatgactgcaacggtaccc

SEQ ID NO: 35772 - DNA, 247 bp, Gossypium hirsutum
  unsure (1)..(247): unsure at all n locations
  Clone ID: LIB3148-005-Q1-K1-D6
gaggccaataggattgaaggccatggggagtatggaaagtgattcagattgaagatacatcaatggcagtagcaggaccctttttcttttgatatttttgggggaagatttttggaattggtgttaacaagttggggaggggcgtctatgggtagttttaagtattatgtcaaagtgagccgatataatcaaaacttataatgagattattcaaaaaaaagttttaaaatggctaaattattcnnaa

SEQ ID NO: 35773 - DNA, 379 bp, Gossypium hirsutum
  Clone ID: LIB3148-005-Q1-K1-D9
ggagatcggattgcttaagctggactgaccctgtcaggttgctgttgggtgcagatctaagctcgtggaagaacaagaactgaggaagagtatagcacgctcaagtctttacaaactgtgttctcgacaaatgccactgaaccaggtggtaagcttaaggagcacttacgaggcgaatgaaatctgctctacttacagtttatgtttttagtatatgtcattttattttattttattttaattttttttttttttttttgtatttttatttttttttctatttttcattttattattttttttaaattatttttttcttttttcctcttttttatattaatatattttatatattttttttttttctattttttttttt

SEQ ID NO: 35774 - DNA, 417 bp, Gossypium hirsutum
  unsure (1)..(417): unsure at all n locations
  Clone ID: LIB3148-005-Q1-K1-F7
cggacgcgtgggtgcagtcataaacaaaagtagtgatggcttactggacaagtacaaaataccagataactggtggactcaggagttgttcaaaaacatggttcaaacggacgatgggcactggaagttcaatgacactgcctatgtgccagatccgccgagtgcttaattggaccggtcgatcatgtcaaataaataacatccttttaaatgcaatcatataaaaccagtattgcatctctgtcctgcaaagtacctctacttacagtcctaactcctaatagcaaattaaaacaaagttggacgttaaggtcgcttatcagcatagcccccattgcgtcggacatgattgtgctgtctgaactctgtgtgtttgtctacatatttncatgaantaaagtttgtgctttttttttc

SEQ ID NO: 35775 - DNA, 336 bp, Gossypium hirsutum
  Clone ID: LIB3148-005-Q1-K1-F9
ttccgtcgacccacctccgctcgtttggaaacccaaacaactctagatggaagatgtcaggaggaaggccgcgccttctttcctgaagggattcaacaagcctttttggctctataaggctcgatctctagctggaaagctggaaaaaagtattccccctccctttcttttaatagagatttacatacattcatgcatcatgtcttgatgttttccaaaacaaggaaacggaaatgagtgtaaatttgatattatctaatttttctttcttcaatttgtaaataaatttctgctttcattatattcgttcctttgccaatttttttgtgtaaattt

SEQ ID NO: 35776 - DNA, 395 bp, Gossypium hirsutum
  Clone ID: LIB3148-005-Q1-K1-G1
tgaggagaacttttgtttggagttactttgttcagattgttcaaagccacaacttccgaagtgcggggtgagtcagaatggaataattggcatgtccagttcgttcactcttcaacaaactagcaatgttcatctccatggctagactgaaatatttcacatttttatggttttgaaatgctgttaacatgatgagttcctgataattcaaggcagccagaaagcaaaatataaagaatatgatctctctccatctttcttgttgactttttaatctgctaaaagttttagtcgcttacgggacttagcttgaatagccttggggttctctgagctaaaaggtcaggaaactgcacttttgcatgtcttgtccaagaaaaacaatctcgctttgg

SEQ ID NO: 35777 - DNA, 429 bp, Gossypium hirsutum
  Clone ID: LIB3148-005-Q1-K1-G5
cccacgcgtccgcaaagtttcactggaaagcatacgactgaagtacaggaagaaaaagtaacgagaggaatccctaggaagagagcatgggatgcaaacctgaaagaaatcagtggcaatgatatccattgtgtaagggagaatgtagctgatgggacgagtcaaccggatgtcatacaagctgatcatccaatcatacgctgcattcccagatgaatatcttgacttgggttggtactacaaatagtattatacacattttaatactaataatttgaaaacactgtatgccttgtcagatacccatttggcattcggcgcctattcctaatattatattgaaaggaagaaaatattgaacggagtgcaaaatgtttttaactatttcataaatatgtatttattaataaaataaacttataaagtttt

SEQ ID NO: 35778 - DNA, 349 bp, Gossypium hirsutum
  Clone ID: LIB3148-005-Q1-K1-H1
atgcattgtacagcacggtgaagaagcttgtgcaaaatggatagaagctcctcgtatatgccttcgtgcagagggcttcaatgtttgagatttgatacacaaagtttatagagtgaaaacatttagttacaaaaccatttacacatattatttgaaaaatctaagaaataaaggacagatacattttcttgccctattgatgttggattcatcccaactgttaaattttcatgtattttcctttgttatgaggctgtttagccttatctaatctcttggaacagccacaatactttcatttgtaactggtttgagttcagacattaatggtgataaaaatgcttcatgt

SEQ ID NO: 35779 - DNA, 288 bp, Gossypium hirsutum
  Clone ID: LIB3148-005-Q1-K1-H2
cacttaaggttctgtgttcgagtctctgtaagcataaggattgttttaaaaaaaaaaaaagggaaggaaaaaaaaaaaaaaaaaaaaaaaaaaaaaaaaaaaaaaaaaaaaaaaaaaaaaaaaaaaaaaaaaaaaaaaaaaaaaaaaaaaaaaaaaaaaaaaaaaaaaaaaaaaaaaaaaaaaaaaaaaaaaaaaaggggggggccccttttaaagaatcaaattttacttccccgtgcttgcaacgaaatagtttttttttagggcaaccaaaattaaattaacggc

SEQ ID NO: 35780 - DNA, 135 bp, Gossypium hirsutum
  Clone ID: LIB3148-005-Q1-K1-H5
gtaagagcaggcggcagtggtgggaatcagttgcattaaagagataatagcaagtcatagtaggaactattgttgtaacaaagatgatataatactctattcacccgtatcgaataaacttataggtttcttatt

SEQ ID NO: 35781 - DNA, 172 bp, Gossypium hirsutum
  unsure (1)..(172): unsure at all n locations
  Clone ID: LIB3148-005-Q1-K1-H9
cccacgcgtccgcagacaacaaaaccctccctcggcattccgcccttgaggaataataatggatccataatcagtgatcccattctttctggggctccttagaattagcggaacaaattttgttcatcgcattttagttttataactaatcttttcctggctttgtgtnnna

SEQ ID NO: 35782 - DNA, 381 bp, Gossypium hirsutum
  Clone ID: LIB3148-006-Q1-K1-A10
cccacgcgtccgggggctttgaaacgggtgtaaaatctcacataaaaaatcagagtggggcgccataaaacccggggtttgcaccaaacaccgccatacttcgtgaagacgccgaagactactgatgctgaaaaaggtcgtcgttgcatccatcaaccatcgctgaatgagtgtattaaccacccagcctttagctgaaataatctggtcggtcgtaactgacaaccttcgtagattatcaagttatataactatgctaccattctaatgccttggtttctagttgacgatatatcaaaaaggaaaaaaaatgtaaaagagactgtgaaattttagataaaaaaatagaaaaacggaaaaaagagagaatcatctttcatc

SEQ ID NO: 35783 - DNA, 204 bp, Gossypium hirsutum
  Clone ID: LIB3148-006-Q1-K1-A3
cccaaccttccgcaaccacgacccgattcttttactctgtagcaccatctgattcaaccagcaacgactaatatatatttcattccaccgaccgcttaaaaaaaaaaaaaatacaacaaaaaagaaaacctacaactaactaaatttttaaccaaaaagatgattaacaactaaaccctcgcgatggccctaaaaactctcaaa

SEQ ID NO: 35784 - DNA, 147 bp, Gossypium hirsutum
  Clone ID: LIB3148-006-Q1-K1-A5
gtcaaaattgacctgttacatataatattgaatttcttgattgttgtttgtgtttacatgtttttgtgatagaaagctactaatcgtatgttggtttcatgaactttgcaaattcagaatgtctcaatttatctcatatttactatg

SEQ ID NO: 35785 - DNA, 307 bp, Gossypium hirsutum
  Clone ID: LIB3148-006-Q1-K1-B1
cccacgcgtccgcccacgcgtccgatttttttaatatagctactcaccatgctgacatcgttttggctttttccttttggattttcgaagtgacgataagaacaaaattgagtgatgattgtaaatttgagatgataaaagataacatttcgtttaaaaaaaaaaaaaaaaaaaaaaaaaaaaaaaaaaaaaaaaaaaaaaaaaaacccggaattaaaagaaaacaataaaaaatgtggagggtattaaaggggggagcgtaaaaaaatttggacggcgaaagcggagaaactttggcattggtaat

SEQ ID NO: 35786 - DNA, 253 bp, Gossypium hirsutum
  Clone ID: LIB3148-006-Q1-K1-B2
gattgggcctgggcacatttgggtttatatattacccttaattctcctgactttcttggtgatggcatgcttttgccggccagcccaaatagaccttgggtctatttttcttttaagtcctcttccttttatcatttaagttatttaatcatttcttatcaaacaaaaaaggctatagaataaaaaaaaaaaaaaacggacaacaaaagcagaagatatattacataaaaaaaataaagagattaatgggggt

SEQ ID NO: 35787 - DNA, 389 bp, Gossypium hirsutum
  Clone ID: LIB3148-006-Q1-K1-B7
cccacgcgtccggccaattcacatctagaaatctggatttttacatgttattcttcattgtgatttatgtttgaaaattttcgagaacaacgaagataccaccaaggagaacgagaacaatggtgataacagcagaaggtttgagtgccattattgttgcagaaacttccccacctcccaagctttaggtggtcaccaaaacgctcacaaaagggaacgccaacatgcgaaacgagctcatcttcagtcagcaatggtgcacacctctttatctgatgctcatatttatggacttgttaactacaggctaggctcagctccaacaccaccaatcacttacccttcatggaactctagctttacccgtagtaccagtaggttttatggga

SEQ ID NO: 35788 - DNA, 413 bp, Gossypium hirsutum
  unsure (1)..(413): unsure at all n locations
  Clone ID: LIB3148-006-Q1-K1-B8
gtcgaagcagatgcacagataaaggacatgactttcattgcagaatacacaggggatgtggattacattaagaaccgtgaaaatgatgactgtgatagcatgatgacccttcttttagcaacaaacccatctgaaagtcttgtaatctgccctgataaatgtggaaacattgctcgctttatcaatggcattaataatcatacaccgtaagcctgtataacctatctcctttgtgttgaatactgtatctcaaaaaaaaaatcatattgctcaatttctgatatacataacctctcatcatgtagcctangctaaaactacacaaccaccaataacttacccttcatggaactctagctttacccggggtaccagtaggttttatgggaaccatacctgcttttgtcatcacc

SEQ ID NO: 35789 - DNA, 300 bp, Gossypium hirsutum
  Clone ID: LIB3148-006-Q1-K1-C3
cccacgcgttcgccctattggatgccaaacactcatcaacatcgatcacattgctcgaagatgggcaacactagaagtaagaaatactcccactaacataagagatcttttgatttttctcctccctctccaattgaataatttcgtcttcttcatcatccaaagaaagcaccgcaattgaatcttccattaagaatcaaaccaaaaagacaaccaggatacccaaaagaaacataaatgggataatggggtacaaaaaaaaaaaaaaaaaaaaaaaaaaaaaaaaaaaaaaaagaaagg

SEQ ID NO: 35790 - DNA, 342 bp, Gossypium hirsutum
  Clone ID: LIB3148-006-Q1-K1-C5
ggaaggtaaaggtgttatcgatcataatttcttgggtggactctgctctttgataaagggggtttccgaagttctctctgattcaaaggaatcctcaatcaaagattgtgtggaatctgagaagccaggcatttgtaccgataatggaaattgccaatagagttaaaatggaaggacaccgtttccagagttcttagtttgttttttgctctgttttgagtgtcggttcttttccccgggaaaatcgtgattcctttctttgcggtttagagattgatatatatgtctcaataaaaaaattcagagatgaagatcactctctgtctaacctgataaaacctt

SEQ ID NO: 35791 - DNA, 365 bp, Gossypium hirsutum
  Clone ID: LIB3148-006-Q1-K1-C6
agaaaacggagaatgtttggcagaaaaagaactacgatagtaatttccattaattgccaggtaatttccattaactcgaaaataaatcatcctagatttgcagcattggttcgttttcttgtttctttgtgtcaaaacaagaagagtgaaataaacctcaatctagttaaagcaagagcttgagttaaaaaaaaaaaaaaaaaaaaaaaaaaaaaaaaaaaaaaaaaaaaaaaaaaaagggaaaaaaataaaaaaaaaacaaaagggaaaaaaaaaaaaatgaaaagggataaaaaaaaggtgaggggggggtgaatttaatttattgggggggggttaaaaaagttgggagtgggaaaattttt

SEQ ID NO: 35792 - DNA, 408 bp, Gossypium hirsutum
  unsure (1)..(408): unsure at all n locations
  Clone ID: LIB3148-006-Q1-K1-D11
ggaagaagaggagtgaattgaaaggaaaggaagagaggggtcgtgttgcagttcacagggaagtcagaaaaataaagcaggaatcagattcccaacaaatcatggattgggcgtttggatttggacagccggaggncanacctgttcgacaccagctttccaggtctcccttggggttaaccgccccacctctctcatcacttggatttgatcccctatatatgtaatagttttggaatttggatgggaaagttctcatcataggtttaatggaagcctggctgacaggtaaaggacgncacaaccccatgaatatatcaattttaatggatttggttgcagtcaggttttgtttttcatttcttgttcaatctttgaatatgccaaagaaacaatctgatatatttt

SEQ ID NO: 35793 - DNA, 314 bp, Gossypium hirsutum
  Clone ID: LIB3148-006-Q1-K1-D4
ctcgaatgaccagttcacacacaccgacaatttactcggctggaagagaagcgcgtatgggacgttgtcatgcgttaagttgggaaacaaggcgaacacataccgaggaccagggaagaggttcaaatcatggctgaagtccacatgccacggaactgtaaacagggtgacaacagcttgaagctaccgtcggcacattcaggttctggcatatatctcaactcaagtataacagacaatgacagatggaccggacagacgagcgcatagaggcgaaaaatccaattattgcatcacgtgatcttaatagcatg

SEQ ID NO: 35794 - DNA, 280 bp, Gossypium hirsutum
  unsure (1)..(280): unsure at all n locations
  Clone ID: LIB3148-006-Q1-K1-D5
gcgggaccatgccacgccatatttcctctaccaagccacccacagacaaacgaccagccgagagtttacaatcctgtttcagctccaacatccacgtaacccaaaacacgcagacaacagcancaagcaacccacaacacaaccaggaccagacacaacgctcaaaacaaggacaacaacaatcacaatccaccctacacacgaacacaaccagcccccaaatccaaatattacactacctgatcttcataccatttactgcctctttactttcttatta

SEQ ID NO: 35795 - DNA, 225 bp, Gossypium hirsutum
  Clone ID: LIB3148-006-Q1-K1-D6
cagaacatgactggaccgaaaagtctgattagtatgagtggatgaaaacagatatggcttgggtttatagatcaaaaacaccttgattggtgtttactgggcacaggccaatgtacagttctttaggtgctgatgatcaatttcttgaaacagtataaccccttctcttgaataacaaggtgcatctggtcctttattgacatgtacatatttatgtgagaacat

SEQ ID NO: 35796 - DNA, 318 bp, Gossypium hirsutum
  Clone ID: LIB3148-006-Q1-K1-E12
caaattaaattatacatttctaaaaaaatttaaaaaaaaaaaaaaaaaaaaaaaaaaagggggaaaaaaaaaaaaaagaaaaaaaaaagggcggccaatctaaaaaaaaccaaaactaacaaacacatacatacaaaaaaaaaaaaaataaaatggggccccctttttaaaaaacccaagttcacttccccacacctgcaaaactttaaattttttttcgggcccccaaattaaaatccttgccccgcattttaacaacgccagctcgggaaaaaccctggagtcccccacttaactccctttccaacaattcccctt

SEQ ID NO: 35797 - DNA, 328 bp, Gossypium hirsutum
  Clone ID: LIB3148-006-Q1-K1-E2
aaaatcataaaattctttggagttgaataatgtaatttaaattaccaaaataagttcattgtgaggcaatgtaatcaacatcttaccatgtatcgaatatttgaagtatttcacacgatatctattttatgaggttgggtaaaaaaaaaaaaaaaaaaaaaaaaaaaaaaaaaaaaaaaaattaaaaaaaaaaaaaaaaaaaaaaaaaaaaaaaaaaaaaaaaaaaaaaaaaaaaaaaaaaaaaaaaaaaaaaaaaaaaaaaaaaagggggcggcctttttaaagaaccaaagtttccttccccgtgcttgcaacgtaatactttttt

SEQ ID NO: 35798 - DNA, 425 bp, Gossypium hirsutum
  Clone ID: LIB3148-006-Q1-K1-E4
attccgagaaagcagatgagttgtcggaggaggacgatcgtgtatagtgctaccaccggggaagaccaaaaaaaaaaaatactcgaaatcatgctcaagtaagtctacaatgccttttctgatgctgtgaagctgccttcaactgtttgcatttgtgaagacattacccattttatcctttttcttttcttctttgaatctatccacgtggtatttagaaaaagcctttatgatgaaaaaaactgatagaataggggtagtaatattttgccccattgttgttcagttttgtggtgggtgtgtggctgactgtgttatactttaagatgatgggttagggacggtccaaattttctttaattgtaattttaaaacctcattatttatagagcatttgtaaattattataaccgttttttttgttt

SEQ ID NO: 35799 - DNA, 418 bp, Gossypium hirsutum
  Clone ID: LIB3148-006-Q1-K1-E5
accaaatccgtcgccgccaccaccagcatgcccttcatgtgcttcaccttgctccagctggcgtccaccaccgtgctctggatgcccttcgccacccaaacaagtggttccttacttcatatatagctacaagaaccctccaccttctgagtcggccgctaccaacgcccactcacttttagtctccgccacacttgtaatcctttggggtactctcagcttattctctaattgaactacgcatgggggaggaaacatgcatcaagatatggttctatattcaaattgtagtttgtgtagtagactagtaataatttttttccatttctcatctgtgtatctagggtttaccaaatttgtccaagggcatcgatcaactaatctgcttagttggtgataatgtgctaaagctagaaat

SEQ ID NO: 35800 - DNA, 347 bp, Gossypium hirsutum
  Clone ID: LIB3148-006-Q1-K1-E8
atggttttaaaagtgtcttaaaaagtgctttatttgtttttgaagcactttgagacacgagttgcagtgaaaaaaaaaaaaactatactttttgtctttccccatcttctgaacttttttaatcattctctctttgtttttttcctccttaatggagtttgtgttgtattgaatcatatacaatatgtattcactgaatcttgtaataataatttctgaacttgttatggtcaaaaccccaaaaagcacactatgaaggagctgaaatggaaattcagggctaaaaacggctgggggtgtggagaacaactgaacctgccacccttgcaattgtaaaatgattagag

SEQ ID NO: 35801 - DNA, 278 bp, Gossypium hirsutum
  unsure (1)..(278): unsure at all n locations
  Clone ID: LIB3148-006-Q1-K1-F1
gccgctcgggcggaagctttgaagcaagctttgaaatgctggattaattactgttgttcgcaggggcgatcacaacatgcctgaatatatgcgtgtaatttggcgggtcatgtggcgggtcttgtggtggttcaatcgaatgagtaatccaaagaaggctcccaaacatgtgctcatacatatcttggtgcaaaacaacattgaaataaacatcangatatgcatgatgttgtgcatggtcctgaagannnaccntaaaaaaaaaaaaaaattttatt

SEQ ID NO: 35802 - DNA, 373 bp, Gossypium hirsutum
  unsure (1)..(373): unsure at all n locations
  Clone ID: LIB3148-006-Q1-K1-F12
acggangcgtacggaaaaaaggaaaangnagaacngaaangtttaaagaaaaaaaaacgtttagaaaaagagggaaaaaaaaaaaaagggtgaatacaaacaaaaaagcgacaacaaaaaacaaaaaaaaaaaaaaatcacaaaaacgtttaactaatcatttacataataaacatcggaagcatacaatgaatgtgaaggcttgtcaaaatatatgtataatatagatattaatatgcagaaaaaatcaaaaaaaaaagtaaaaaaaagggttgtatttggaacatgataggaaaactgtgggaataataaaacaacctatgattgtactttgatataaaaaaaaaaaaaacggcattatctatactccaaa

SEQ ID NO: 35803 - DNA, 169 bp, Gossypium hirsutum
  unsure (1)..(169): unsure at all n locations
  Clone ID: LIB3148-006-Q1-K1-F2
cacgccgnntccgcccacgccgtgccgcctcacgccgnntccgtatagtatcgctgagcctggcgcgctcnttagaggatctcaagcgttagcggtgacgctgtgcatgactgacgttncatagcttcttctattagtgtcacgctgaaattctaattcactcggcgct

SEQ ID NO: 35804 - DNA, 386 bp, Gossypium hirsutum
  Clone ID: LIB3148-006-Q1-K1-F6
cacagacacacacaaaaagaaaagttttttgatgttctaattctttcatgtctgtgttggatttctaaatattaaatatttatttaaaaaaaaaaacaaaaaaaaaaaaaaaaaaaaaaaataaaaaaaataaaaaaaaaaaaaaaaaaaaaaaaaaataaaaaaataaaaaaaaaagaaaaaaaataaaaactaaaaaaaaaatgggcggcccgttttaaagaatcaaaattatccaccccggccatccaaggtaatagttattctatattggaacaaaaatcaaaaccactggcccagattaaaacatggagaacatggaaaaaccttgcgatgcccaaacaaatttccattacaagacatccaattttgcccagttgatataa

SEQ ID NO: 35805 - DNA, 366 bp, Gossypium hirsutum
  unsure (1)..(366): unsure at all n locations
  Clone ID: LIB3148-006-Q1-K1-G1
ctgacgtacatgagagcaagatttgagaaggtggtcggatcaaaggactcggaagcattgtgcatgattaatccagatggtgcacctggcccagaactgagtattttctttgtaagagctcgttagaatttgtgttatttttacacatgagcaccataaaaaaaaaatcaatgatggaaacaaacagatcaccatggctggactatgtttaatgtccnnanggtggttcaagctagctcattgntatagcgatagaattgaatgccaatataatctcctgtttctgccttgagaataagattgaataccgacacaccaagttccctttgtctcaaacgggacaatgaacatataatataattcatt

SEQ ID NO: 35806 - DNA, 359 bp, Gossypium hirsutum
  unsure (1)..(359): unsure at all n locations
  Clone ID: LIB3148-006-Q1-K1-G7
gctgtacgtgttatacatgtcgaaatcattcccgagcctacattaatcatctactcagtgtccatgtaatgttggcacaaattttgttggaaatacataacacccaccattttctagggtttttccggttgataagggatgccatcaatgcaggccgatttgaataatttcgtagggaatttgttcaatgatggcgctgaatttcttagatgatactctggtgataaattaagaagngattcctgggatcatttgaaaactccatttttttacttgtttcagaagaattaccacatttatatttttaatctccaaaggattatttgttacacggccagttgacccataattttcaagct

SEQ ID NO: 35807 - DNA, 300 bp, Gossypium hirsutum
  Clone ID: LIB3148-006-Q1-K1-G8
catgtacagagcatgaatcacaacttcatgtacgctcccacaataatcatcgacgccgtgttcatttcatcttagcacataatatgaaccaaatacataacacccaccattttctagggtttttccggctgatattggatgccatcaatgcaagcctatttaaataatgtcccagggaatattatcaaaaattgcactaaatttattagattattctttggtgtaaaaaaaaaaagttatttttttgatcatttaaaaatcccattatattttttgattcataaaatctttctttttttt

SEQ ID NO: 35808 - DNA, 274 bp, Gossypium hirsutum
  Clone ID: LIB3148-006-Q1-K1-H12
cgacccatgcgtccggttgctttcgttaatctttgtaatggccgtagatggtgttgcctggctgtgaaaacatgtgtatctgttccatcactagacttgtgtgaactttttattccagagtatagtcatttcattggctgtcaactttcaatttcaaaaaaaaaaaaaaaaaaaaaaaaaaaaaaaaaaaaaaaaaaggcaagaaaaaaagaagtacaaaaaatacccctcttgccagctggcgaaaaaaataatagtgtagggtacaataaat

SEQ ID NO: 35809 - DNA, 424 bp, Gossypium hirsutum
  Clone ID: LIB3148-006-Q1-K1-H5
atgacatatgggtaattggttgattttgaatttttggcgtgaccattggatcagtaaatacagggcacaactcaatcattacaatcaatcaaaggtaatcccaaatcatcacacaccattatattaatggtgaatcctaatggtgattggaattaggaaaacactatctctttattgccatcgtcgattataaacaaaattgtgagtaagcatccaccatgtggttgggatatggatgactttcccgaatgggtatggaataaagggcatagtttctctatgcaatttccttacgaggctttgactggtaatactgctagtggtgtagataaaatatggtagcacttatggaagtaccaagggtcacggcgtgttaaaacctttttgtgtcttggtgcatgtaatagtctccttacatgttaaa

SEQ ID NO: 35810 - DNA, 318 bp, Gossypium hirsutum
  Clone ID: LIB3148-006-Q1-K1-H6
cccacgcgttcgcttcaagtgaagctgatatgccctcaattccattaggggatccctcagtccagaatcctttgtatggttgcatgcaatactcttcaaagttgcagagcacaaggcaagtggacccaccaacttcatctcgaacatttatcaaggtttataaatcaaggtcggtggggcgctcattggacatctcccggttcaacagctatcatgagctgcgagaagagctggctcaaatgtttggaattgaggggaagttggaagaccctcttagatcaagctggcagcttgtatttgtcgacagggagaatgata

SEQ ID NO: 35811 - DNA, 307 bp, Gossypium hirsutum
  Clone ID: LIB3148-006-Q1-K1-H9
attgatgctaaaggattagtttccgggtcatcaaagcttcaagaattcttaaagtttgcggcgtcttccgattttgtgttgacagataaggtgtcgagtctctgcagtagagtcgaagcacttacaacccaatttcccattcctggtgtgtgaacaacaccgattcactaagtaatttttgagttattagaggctgagaagaaacgtcagaacaaggtgaaatctccaacacagattccagggtttatatttgaataattgaatgtattcacagatttatgaaaattttcaactgatattgagatct

SEQ ID NO: 35812 - DNA, 223 bp, Gossypium hirsutum
  unsure (1)..(223): unsure at all n locations
  Clone ID: LIB3148-007-Q1-K1-A10
gctaaatggtggtggattctcatacgaacgttatatgctgtatcgtttgtctatcatgttggtacatattttccttattatgcggctgtttggcattgaggaaatgtgatctttttttaaaggtaaaagttnaaaaaaaaaaaaaaaaaaaaaaaaaaaaaaaaaaaaaaaaaaaaaaaaaaaaaaaataaaaataaaaaaaaataaaaaaaataactacaat

SEQ ID NO: 35813 - DNA, 408 bp, Gossypium hirsutum
  unsure (1)..(408): unsure at all n locations
  Clone ID: LIB3148-007-Q1-K1-A11
cgtgtttgcagaaaagggctgacgttaagcttcaagaattgccggctgtgctcggcgcttgctgtgttttgcataatatttgtgagcttcgaaatgaagaaatggaacccgagcttaaaattgaaatttccgatgatgaagtcgtgccggagaataatttgagatccatggttgccgttcaagctagggattatattgctcataatttgcttcaccatggccttgccggtaccggttttctatagtgatttcattatattatccttagttaaaaaattttgtattttttttagtgtatagtccaataataataggtagataggcagattttgattgcattttttgggggtatggaataaaaaattctatttgactttttagttaaaaaaaaaanannnaannnnnaat

SEQ ID NO: 35814 - DNA, 371 bp, Gossypium hirsutum
  Clone ID: LIB3148-007-Q1-K1-A7
tccacgcgtgcgatggccggctgcagtacttttaaaagtcgaaatgactttgatcaagtttgataaatgtaaagtgaggcctaaaaaaccaaaaaaaaagagatttttttaaacaaatttaaaatttaatttaagaaaaaggaatgaatgaaaaaaattaaataaaatataaaattttataaatttaaatgaaacgaaatactaaaatgaaaataaaattttttaaatgaattttttttaaaatcgaaatgagatttttttagacaaattttaaatgagattttataaattgaaatgagatattttttatcaaatttaaaatttaaattcgagattgatgaagctggatctcgtgttcgccttcgtcatgc

SEQ ID NO: 35815 - DNA, 390 bp, Gossypium hirsutum
  unsure (1)..(390): unsure at all n locations
  Clone ID: LIB3148-007-Q1-K1-A8
tcgcccacgcgtccgatggccggctgcagcacttttaaaagtcgaaatgactttgatcaagtttgataaatgtagtgtcaggcctaaaaaaccaaaaaaaaagagatttttttaaacaaatttaaaatttaatttaagaaaaaggaataaatgaaaaaaattaaataaaatataaaattttataaatttaaatgaaaagaaatactaaaatgaaaataaaattttttaaatgaattttttttaaaatcgaaatgagatttttttagacaaattttaaatgagattttttaaattgaaatgagattttttttatcaaatttaaaatttaaattggggcatngacaattattactgttactggtacaacaaaccaacctttgtaatatgggg

SEQ ID NO: 35816 - DNA, 275 bp, Gossypium hirsutum
  Clone ID: LIB3148-007-Q1-K1-A9
caggttcaagtcagtacgccattgctatgtcattgaagagaagcagaacaatcttcgctggaaatttcaagaagcttctgcttgtccatttgaagaagcttgtggctgctgggatgttggttaaaggttacgcttcgtataaactttcttttgcttggtcttaaaagaccgatacttctgctgatgttcctgcgaaatagataccgtctactgcttagtcgaaagggacgcctgcctcaatgactaagggagggaagggtgctagctctactgct

SEQ ID NO: 35817 - DNA, 286 bp, Gossypium hirsutum
  unsure (1)..(286): unsure at all n locations
  Clone ID: LIB3148-007-Q1-K1-B12
cccacgcgtccgcgtcagtatcatctgtattttaatgaattttgtttctttgggtattgcattcttatctaccgtagcttgcattggaatgtattgaagccccaattgttgttccggcatgtaactgcactgtgccaaggttgtaggaagcctcatccttggggggatggcatgaggttttttcttgttgattcatgtacatcaaaatccgcatcagctagtccttgcaactcagtctgatggcttataaactaaaggtctgttttaggccagaccgagttnttgg

SEQ ID NO: 35818 - DNA, 370 bp, Gossypium hirsutum
  Clone ID: LIB3148-007-Q1-K1-C11
atgctttcgcccaaattggcacatagatttggtgggtatttggaggaggaagccattcagtcgtatacagagtacttgaaggacattgaaagtggtgcaatagaaaatgttgcagcccctgccattgcaatagattattggagattgcctaaagatgctaggttgaaggaggttataactgtaattcgtgctgatgaagctcaccatagggacgtaaaccatttcgcttctgatattcattttgcgggaaaggaattgaaagacgcgcctgctactgttggttatcattaagacttcatgttgtggatcgtgaagattctttaaaagggtccgtgcttgatgcaaaccttgattatatttatctatggtt

SEQ ID NO: 35819 - DNA, 194 bp, Gossypium hirsutum
  Clone ID: LIB3148-007-Q1-K1-C4
gttttatttttgaaacccgataacacaatttaatagcttagctattagaaatactgggaaacgcaatcaattggtttgctttaccacttaaagaagtacataaactctttcaggtcgcgaactgataccacctcacaaacccgaattcattcctgtttaccaacatcattttttttacagcattactcatttcg

SEQ ID NO: 35820 - DNA, 294 bp, Gossypium hirsutum
  unsure (1)..(294): unsure at all n locations
  Clone ID: LIB3148-007-Q1-K1-D4
cgcgnccggngggcggntcgctgcccgttacgtctcttgaagtccactttaccacacctttataggacgtggtgcacaaagnaagaagccccaaagcnaacacaagggtaccaccattttaaactagatgttcagtcacctatgattccaaataaacattatgtttttatataaggtcaaaaaaaaaaaggacaaaagaaggaaccaaactagacaagcgaagcgaggaaggaaaaaacaacggatcccaaagcctcgactccggaggacagcaagaccaccaagaacgaaaaa

SEQ ID NO: 35821 - DNA, 189 bp, Gossypium hirsutum
  Clone ID: LIB3148-007-Q1-K1-D8
cagtaattagagctttttatgagtcgagttggatcgacccgaattagagaaaattacattcaaatagagttgttcatgagtcgagttggattaacttaaattagagaaaattacattaaaaaacttaaactcgactcttgaacaagtttaattgtaatcgttttcaacaagattgctttggtcgttttc

SEQ ID NO: 35822 - DNA, 247 bp, Gossypium hirsutum
  unsure (1)..(247): unsure at all n locations
  Clone ID: LIB3148-007-Q1-K1-D9
tgcgtttattttccttttcacaggttttattgacgtggaggcgtatggagaagaagcgggtctttgagaggccgttcgtggaaacccncttctggctagctgcggcgctggtgttccagaaacctttaaggtttctggtgccttcccgatattgggctcactttggccatttatgaattgggttaggttaaagggtttgggtgaaatgggactttgaagtatggtcttgtttgggtgtttcgttttt

SEQ ID NO: 35823 - DNA, 343 bp, Gossypium hirsutum
  Clone ID: LIB3148-007-Q1-K1-E1
tttaaggagtttgtcgttggggagaagattaaaagagaagaaagatcggaatcacccaaagccaatgaagccgttaagaaatgttcgggcgaataccaatacctaagccagtaattcaatccgtctactctcgatgtgcttatcatattttgtgatacttcgatcccgtttttgttgtctgaggtagaaacagtgacatccatggcacaatttgtgagcttgtgtaatgtttcctaatttggtggttaagatacacatcctatatttgtattttttacgatacagtctttactcttccaaaatgtatctttccttcatagtccatcagctatttatggttcat

SEQ ID NO: 35824 - DNA, 407 bp, Gossypium hirsutum
  Clone ID: LIB3148-007-Q1-K1-E8
aagaacaaaggtggcaatggcggtgccgaatatggtggacatggtggtggtggtggtggtaagattgaaaggagcaagatggaatttatggttcaaccccaatttggatacatgcccgcttactcgggatatgagcacccgggctattggttccgttaccggcaccgctacttcgggtacctgccgggttacccaatatctggtcattcttctcaacacatgttcaatgaccagaaccctaattcttgggccattatttgaagaggaattgatttttaataacctaaaagtttatttttagggattgggtaattaaaaaccaaaaaacccggaggttactttggaagtcaaaattttgggttaaacttggatggcattttattaaatgttaattttagggttttgat

SEQ ID NO: 35825 - DNA, 399 bp, Gossypium hirsutum
  Clone ID: LIB3148-007-Q1-K1-F2
ccggtggaattgggattaatttctttcacatgattggcgtttttaaagagcataggattgttcgattggtgaggaaattgaatgcgaagagaaatgatgatttttcaaggtttcgggaacttgagattctatttcttgggattaaaacgatagaatatattggctgatgtctaaaacaaaagtttgacaaggctaatgtacttctataattcatttggctttgtctgcctgatgggaaaataagtgaaagcaaggcgaaagctttggattttggcgtcataatccatttggctttgtttggttgattgggaaacaagagacaccgaagcaaaatctttggattttggctttatgtcattcggctttgtttagttgatgggggaaacaagaaaaaagcag

SEQ ID NO: 35826 - DNA, 169 bp, Gossypium hirsutum
  Clone ID: LIB3148-007-Q1-K1-F4
ccgacactcaacaccaattcaagagtgaactaaattgaaggtaccggacgacgaaatacaacgatttgcctaggataaaccttgccttaataagctaaattgtagcgtagaaaacctattttaagcttggatgccaactaacaaaatagcgcttaccaagggttctttg

SEQ ID NO: 35827 - DNA, 122 bp, Gossypium hirsutum
  Clone ID: LIB3148-007-Q1-K1-F5
tttagcttcattctacaaccccgggggggacgctgttatttattcggcgcccgcgtttgtggagaaagaagctttgggaaaaaacaaacagggttaccccaaatttgtggttggagagggca

SEQ ID NO: 35828 - DNA, 235 bp, Gossypium hirsutum
  Clone ID: LIB3148-007-Q1-K1-F9
accgttcgatcccggtcgacccacctccaagattttggaaggcttttataagaatgataatgtaagagaggtcggaaaaaaaggagaccctttaaaaagacatgtaaaaacaaacaaaaaaaaaaaaaaaaaaaaaaaaaaaaaactaaaaaaaaaataacaaaaaaaaaaacaaaaaaaaacaatttatttttaacgatagaaaaaaaactataatccctacggttcgcttttt

SEQ ID NO: 35829 - DNA, 243 bp, Gossypium hirsutum
  unsure (1)..(243): unsure at all n locations
  Clone ID: LIB3148-007-Q1-K1-G9
atcatcactgcaatactaggggcaatnattttagcagaaaaaatccaccttgaaagcagccttttttctattatcataggcacacgcctctacacagtggtgtcggataaaaccatatattggctattcgcatttaacaattccattaacgaacccatcatgcacatttttagctttagtattgagtcaccaatattcaaattactgtccgtcgtttaaaaacataccaacttgggaaaaccc

SEQ ID NO: 35830 - DNA, 108 bp, Gossypium hirsutum
  Clone ID: LIB3148-007-Q1-K1-H1
ttccggaaggtggggaaatttgacctttggcttttatttgtggatttctggcagtaaaaactggtgcatgacactgcgttttataaacttctagttcttttgcttttg

SEQ ID NO: 35831 - DNA, 301 bp, Gossypium hirsutum
  Clone ID: LIB3148-007-Q1-K1-H3
ttttcaagctggatctatattatccatgtggaaaatcttttgagagttgttgggaattggggactttctttttgcataggaagtccaatgcaagactgaagttttaaggtgttgaagaagaagaggatgcattttgcctaggttaggtattgtgaataaaaatgaaagaaaaaaaaaagaatctgattgtcatttgtgtaaatcatgtcagaaggagaagatggtagggcaggctttgagagaactggttttaatacaaaattatttagtacaaaaagaatcatgagaatattcgagtggc

SEQ ID NO: 35832 - DNA, 271 bp, Gossypium hirsutum
  unsure (1)..(271): unsure at all n locations
  Clone ID: LIB3148-007-Q1-K1-H9
agaagcagtgggaagagaaagaaaaggcatggatggagagagaggcagctatgcaagtaaagaaggagcagagagagaaagctgaagctcanaggaaggtagaaggaaagagatgttcaaaaagacacgacatggtcagcctgtaatgaaatacagaatccagcatcttttgcagtccatacagggttcgtctagtgcttccagttaatacaaattagtgatcttcattagtgcttatagtagctgagagtagagaacatgtgcaacagta

SEQ ID NO: 35833 - DNA, 230 bp, Gossypium hirsutum
  Clone ID: LIB3148-008-Q1-K1-A11
aaggccatcactgtgcctgaattttggagtgaggaccattaagcagatgggagagcctggaagaagagtaaattgccttatgacaacaagatatttattaatgcttctttaccctgcaagtcatgaacaagttacctcttctcagttctcagagcagaagcgtgtaagatttgcttatcctataacattatatgtccaaatatgcagattatagaattgaataattctgg

SEQ ID NO: 35834 - DNA, 324 bp, Gossypium hirsutum
  unsure (1)..(324): unsure at all n locations
  Clone ID: LIB3148-008-Q1-K1-A2
gctgcgcaaaattgcacgcgctcggatttgtaccagggctgaaaaataggcttaaaaccagcggggtcgcgatcgatatgtatccttatttccaggtttatacatactaaccctatctaaaatgggctattacactgtgatcgaccattatattaaaaaaaaaaccacattttttttccccacagaacagaaaagaaccgaaccgaattgatcctgnnaaaataattttaacttttaatgaagaanattgggaaaaaaactgaaattgaaaagggtggaaaaggggggtggcataacgtttggtaactccttccatccgctttc

SEQ ID NO: 35835 - DNA, 397 bp, Gossypium hirsutum
  Clone ID: LIB3148-008-Q1-K1-B2
gtctgtacctaactaaggaacgtgacttcatatataaccattcaaagctgaattgtggccgtgcactggtctaaccatgctgaagatcaaaaatgttaatggtccaggacaaggggtttatgaatgtcgaaatacaataatgactattgaaatcttcatttgcttcatcagagtaagcgtaccttttaagaccagaacaaccgattagcgtgcacgtgctcaaggatatatagacatctcacagtgcgctcgacggtgtaggtatgtgctaaagacacttgaataatgaactatgtcataaaaaggcgacgcaggaagtgaaaactcaatgctcaacgcgatagatcttaccgtatcgaatattgagattgcgcccaatgaacacatatgacacatg

SEQ ID NO: 35836 - DNA, 423 bp, Gossypium hirsutum
  Clone ID: LIB3148-008-Q1-K1-B7
cccacgcgtccgctttctttctcatttggttaaccctaaatcccttacttcaaccaccaatttaccttcacaaacaacaacctgtgcattcaagtttgaaaggataggttttcagccttgagatcccctttcggtttcgatttcaacgaagcaaaaggaatctattggcatattcgcaaggtaagagttctctttctcttttttcctttgtttacaaacgcaatgatgaaagatcaaaggaaataaatcgcaagaaaatgaaaaaacttaaagaaaattaaaacagaaatcacctttaaaatctttgttggttttctttgtattcaatttgcattcgtaatcccatttacagtatattaatcggccttttatagccgaaccaagagaaaagggaaaagggaaaaaaataataaaaatgtaaat

SEQ ID NO: 35837 - DNA, 425 bp, Gossypium hirsutum
  unsure (1)..(425): unsure at all n locations
  Clone ID: LIB3148-008-Q1-K1-B8
cccacgcgtccgcccacgcgtccgcccacgcgtccgcccacgcgtccgggttcatttgcttgatgattataaggaattgtggaacgtggggagcgagtggtacaacgagacgacgttgcttaacggcgggaaaccggtcgagttcgatggttacatgagagctgttgtggataccgaggtactttatcgagcgaaaactcgtgttgaaaccttttataatctgactaaagattgcaaagatggaattaatacatgttgaacaggttgtttaattgattcatattgctttgattatgttagaaaatgtaattggttgatgtattcttgtattggttttttttattacaatttatgtcattatcagntcatcatatgtttggtggttttttgtcataagtggtattcatatatagactttgaaaatg

SEQ ID NO: 35838 - DNA, 402 bp, Gossypium hirsutum
  Clone ID: LIB3148-008-Q1-K1-B9
aacccatgtatttcaaaaatatatacttttacaatgttttaagaattccaaaaaaaaagggaaaaataaaaaaaaaaaaaaaaaaaaaaaaaaaaaaaaaaaaaaaaaaaaaaaaaaaaaaaaaaaaaaaaaaaaaaaaaaaaaaaaaaaaaaaaaaaaaaaaaaaaaaaaaaaaaaaagggggcggccctttaaaaggatcaaagttaacttccccttgcttccaacgtaaaaatttttttatagggccaccaaaataaaattaattgcccgcggtttaaaaacgtgggaactggaaaaaccctggcttaaccaaattaaatcgcttggaaaaaaatccccttttcccaagttggctaaaaaccaaaaaggcccgaaccaatcccctttccaaaaatttgc

SEQ ID NO: 35839 - DNA, 146 bp, Gossypium hirsutum
  Clone ID: LIB3148-008-Q1-K1-C11
cttaatgaactgcaattaataagactgggtggagacacaagccttcgagagtgatttaggtaaaactatatatttggattgtaactttttgttgaatgtttgcagtagtaatagatttaaggtaattagcattgcacctttttttt

SEQ ID NO: 35840 - DNA, 212 bp, Gossypium hirsutum
  Clone ID: LIB3148-008-Q1-K1-C6
gctaaataaaacatcagacatcaggtttcatgctacattccatacaaaatactgctcccaggaaattgagttacttgaaaggcttgatcgtgttcgatgcaagatctgtaagactgtaattgccaggcgcagtgatatgttggtgatgtctactgatggtcctatgggtgcttatgttaactcatacggctatgtgcacgaggtaatgactt

SEQ ID NO: 35841 - DNA, 128 bp, Gossypium hirsutum
  Clone ID: LIB3148-008-Q1-K1-C7
gctttgtattcatacctggctcgtgtgttttcaaggatgtatttcacggcgtcatgcaaatttacatgaaatgcatgactgattcaagtccaatcagaacaaggaaaatggcactatgatcttaattc

SEQ ID NO: 35842 - DNA, 149 bp, Gossypium hirsutum
  Clone ID: LIB3148-008-Q1-K1-C9
ggcttatgctttaagccttaaactaagttgaagaccgtgcttgttttgttgccatcagggtgagaacctgaattgagcaactctcatatgttctattcatgacaataccaatcccatagcattcaatggatataatgctttcctggcct

SEQ ID NO: 35843 - DNA, 368 bp, Gossypium hirsutum
  unsure (1)..(368): unsure at all n locations
  Clone ID: LIB3148-008-Q1-K1-D2
atctgaggctggcaagaaactctatactaggggtgattttgctgaatcaaaaatctccaatcttgatggttatctcttgaaaaaggttggactgtttccagatttgttggagcgaaaagttatgcgacattttgaggaaggggatcaagtttctgctttggtgacaggggaattctatacaaagaaggatctctttccgggatttggaaggccttttgtatttaatgcagaggttttgcttaaagtagggcgcacatcagaggcaaaagattctgcaagggtggctttgaaatcaccatggtggactttaggctgcacatatcangatgttgccagtattgcacagtgggaagatgagcaaatcgagt

SEQ ID NO: 35844 - DNA, 276 bp, Gossypium hirsutum
  unsure (1)..(276): unsure at all n locations
  Clone ID: LIB3148-008-Q1-K1-D8
nccaatacacaaaacttttgaatgttttctatatttccaatgctttacaatgaaagctacgggattattttattggtggatcattcacaaatgcaaatttatgtaaaatatttaagactttcataacatcaatagtgtatccacttaaaaccatatatttaacatcactttttttattgttcaacactgctagtttaataaatgttatggccacactcaagaataaagagattaattttccttttattcatactttgttttttgaataaactttat

SEQ ID NO: 35845 - DNA, 393 bp, Gossypium hirsutum
  Clone ID: LIB3148-008-Q1-K1-E10
gatccctgacacaaaaggctgatctcaatctcggtgtttgggcgaaaaccaatgttgggtgcaattcattcaacatgcatcaaacactgaaaaccaattgctatccgctagcatcggaaggccttcgaaatatgtatttcccttacagtgaatttctcaaaaccgtccaagagccgacaatgagctcttatgcatgtccacttccaagaggtaatgtcccgtttaatgcttcctcaattaggacaggggtaggggttatcgtggatgggttcagaaagccgaatcaactgaatgagcataagccattggagaatattccaagtcctgcttcggaaaacaattcgaggaaccaacaagatgactccttcaaaagaaatgttgctggatgtaaac

SEQ ID NO: 35846 - DNA, 191 bp, Gossypium hirsutum
  unsure (1)..(191): unsure at all n locations
  Clone ID: LIB3148-008-Q1-K1-E4
cccacgcgtccggggtccagctaaggtagctaggtaagataccagattctgattaaaggctgaaaaacatacgccaattgtatctacatagctaagtggaaatttcaccatataatgtacttgtgatagttcacttcagctaaatatagggagagagagtttacanttnaaaaacaaatataaacagataa

SEQ ID NO: 35847 - DNA, 434 bp, Gossypium hirsutum
  Clone ID: LIB3148-008-Q1-K1-E7
cccacgcgtccgaaaaagcataattgagtattattatatatttaatttgattttaaataaatcattgcaatatatgtaaaagcaatttaaaatataaatttattaatatatgtaaaaacaatttttctagaaaatatttttaggaaatctgtcaaacaacagaaaatattttacacagattcatccaaacactagaaaagcaaatcattctcagaaaagtaaatcatttttcagaaattattttctagagaatattttactggcaaacaaacggaggtttgaatccaaccgcatatataaaagagataatatttcgatgcataggtctcatgcactatcaattaatactaagatgaaacatcttaatttgtgaaaaacaaaaaaaaatattaaaggatttaaaaataaatgtaaatacctttattttaaaatat

SEQ ID NO: 35848 - DNA, 416 bp, Gossypium hirsutum
  Clone ID: LIB3148-008-Q1-K1-E8
cccacgcgtccgatctaaatgaagaaggtttaatgtaaaataatagcctgttaggaattggagtccacagacctttcaacatgagataaatttttcctgaagaaatggagaaataaggcgattcctttattagtagaaatttaggctggatggtatatacaaacgttatgctgccaatgcttatatgtgactattagttttcgcttcgtctttttaaaagtaaaatcatttttcagaaattattttcttgagaatattttactggcaaacaaacggagggttgaatccaaccgcatatataaaatgaaataatattttcggtgcataggtcttatgcactattaattaatacttagatgaaacatcttaatttgtgaaaaacaaaaaacaatattaaaggatttaaaaataaatgt

SEQ ID NO: 35849 - DNA, 402 bp, Gossypium hirsutum
  Clone ID: LIB3148-008-Q1-K1-F1
gggaaacttcgacaattacgaggaatacatgtatttgttagcaatcgcaattctatcgactttgtacacgggaatacaagcgttgatacacgtgaatgcactttggaacgtgaagcagatattgaatcaacgtatctctgccatggtggactttgttggtgatcaggtgatgtcgtacttgttgatatcgtcagtatctgcagcaattccattgacaaacaggatgagagaaggacaagacaacgctttcactgattcctcagcttcggctattagcatgtctttctttgccttcctaacactggcaatatctgctggtgtttctggctataaattgtctactcaatcgtacatataatttttctttaaaaaagaaaaaaaaaaaaaaatatttaaggatgt

SEQ ID NO: 35850 - DNA, 321 bp, Gossypium hirsutum
  unsure (1)..(321): unsure at all n locations
  Clone ID: LIB3148-008-Q1-K1-F12
cccacgcgtccgcacacccatgcaaagtttctatattttgggcgattcgaaaacagcgggtgaatacaacattgaatctgttgtctaggttctgctagtgaattcaatcagaaaaatgtttagtgcaagatttaaaaaaaaaacatgtaatattacataaggtggcctcttcttttctgtcaagtgttgattatagatatgaattcttatgaattgccttattaattttctttcatcagttctttccttttaactgtttatctgaacttgggttataataaaaaacctggttatatttcttcgnnnnnaaaannnnnnngg

SEQ ID NO: 35851 - DNA, 327 bp, Gossypium hirsutum
  Clone ID: LIB3148-008-Q1-K1-F4
cggacgcgtgggcggacgcgtgggccaagatcgacttaacttgatcaataagttcgctcgttgctcactactaagatggccaatatgtttgaagagatacaaatgacaaagatgacagtaaatgaaacccaattgtacattaacattgctccccaaataataatatatatttgttataactaatgtatattttatacatttggtttaaaaaaaaaaaattgcataaaacaaaactagaaaaacaatgaaccggcttcggtattaagtccctctgtacgaacgtctagttggcctgatgcgatatgacttaataatgaatgcttggat

SEQ ID NO: 35852 - DNA, 429 bp, Gossypium hirsutum
  Clone ID: LIB3148-008-Q1-K1-F7
cccacacattcgattaattgaaaatttattttatattttattactaaaaaaatcaaagatgtggaattcaaaaaatgggcactccacccaaaaaattacaattttttacatttgttgacatcctacttttttaaaaattattttttcgaatttgcaacatccctcttcaattttcaattccttaatatacttcgcttgactatcaaaaattttttcttaaattgatcattttttgagaatcattaacttaataatttttttacttcctatatatgaaagtgttaattccctctccttttttaacaaataattttttctttcctttgtatccttccccttttatttaaacattaatggtaccattttaatttcttaaaaaaaaaaaaaatttttatgttttaaaaaaaaattaatacccttttttaaaat

SEQ ID NO: 35853 - DNA, 340 bp, Gossypium hirsutum
  unsure (1)..(340): unsure at all n locations
  Clone ID: LIB3148-008-Q1-K1-F9
cccacgcgtccggtggaaatgtgtcgtggagttcaacatcccatacgtggactctttttaaggagttaccttgctcaaataagccgagataagttaccagatattggttccgagtatgagggtgatgctgacactgtgatggatgctgtggactttgtgctacagaatttcaccgagatgaataaactttgggtgagaatgcagcatcaggtgtcatggtgcttgtgaataattcatactctttggtcatcctgagttgaagccttcaattgcgatttctggtctgcagggacctggtagagttagagagaaccgagaaaatcgaatccgnaccananna

SEQ ID NO: 35854 - DNA, 297 bp, Gossypium hirsutum
  Clone ID: LIB3148-008-Q1-K1-G4
cccacgcgtccgaaaaaaaaaaaaagaatttttaattaaaaaaaaaaaatgaatgaaccttgcgaaggaaagataactatttaataaaaaataaaacaatacaaaaaacataaaaaaaaaaggggagtccgttttatagggtccaaaatcattcctaactccatgaccatccttaattttttttttgggatacctatattaaatggaactggccgaacgtttactaaaatttggaacggtaaaaacctgggggtgcccaattacattgagttgtaacaaatgcacctttactacatt

SEQ ID NO: 35855 - DNA, 391 bp, Gossypium hirsutum
  Clone ID: LIB3148-008-Q1-K1-H10
cccacgcgtccgcccacgcgtccggcaaaacgcgttgagcgagcattgagcaaaattgcgggcgcagatcgagagatcaataagaagtgcaagagtaacaacgatataaaaggttcatcgagttgggttccacatccaaagagtgggatatatttccccaaaggccatgaatgggtgatggatgacgttccggaccgggcggcttctttcagttcaagttactgggttcgaagcgtcgacggtgttgataaaccggagtcttcggttcatgatgaacactattcccatgcaaatatgtgatgatcaaacaaaattagtcatggagacaggggaaggggtttttatgaaatttgaataaaatattttggaattagaagctgcaactatcaat

SEQ ID NO: 35856 - DNA, 426 bp, Gossypium hirsutum
  Clone ID: LIB3148-008-Q1-K1-H2
aaaaaatattaataaatgagatcgtaactttattttgaggagaaaaaaaaaggaatataaagctgttgaaaataaacaaaggatgaaaccttacacagcggaactacgggtagagatccttaggcaaattagaaggtagcgactgaatagagacaaaaagaggaaagtcgcaggcaacccttctcagccacctcaggacactgcgcaactgaagtgtgggttggacaagcgaacactatcttgccgacattgttccattatttcaaatctattcctttgtgaattacaatgatgaaaacgatgtttgagtttaattttatttgccaaactatgagttaaatcctataggttgggattacttcgatgaaactttaattgtctttaatggctgcagtataaatttgaattatatttactgtttcattc

SEQ ID NO: 35857 - DNA, 294 bp, Gossypium hirsutum
  unsure (1)..(294): unsure at all n locations
  Clone ID: LIB3148-008-Q1-K1-H7
naaaaaaaaaaaaaaaaaaaaaaaaaaaaattaaaaaaaaaagggcggaaaataaaaagagaggggaaaattaaaaacgcatgcatgcaaaaaaaaaaaatggggtgtcgggtttaataaatccaatttactgtgcccgtgctttacaacgggtggtttttttataccgtgactttacttaatttaattggctggcgttttataactgttttgactgggaaaactattagttaacaggccttaatcgatttgcattcaaacagttttacaccctggatgtaaaatggaaaaggc

SEQ ID NO: 35858 - DNA, 298 bp, Gossypium hirsutum
  Clone ID: LIB3148-009-Q1-K1-A5
aattcccggcatgttattaataaaaaaaaaaaaaaaaaaaaaaaaaaataaaaattttaattttagggcacacaaaaaaaaaaaaagcgggggggaaaaacacaaacatacaaacgtaataactcttctataatgaaaccaaaagtggcgtcccctgcccgggttttaacatcctttgcgcctgcaaacaccctggcgattcccctcttattctcctaaaaacacatccccttcccgcgaggtggccttttagcaatgaggtaccccccgttcgcccttcttaacagtgccgcagtct

SEQ ID NO: 35859 - DNA, 315 bp, Gossypium hirsutum
  unsure (1)..(315): unsure at all n locations
  Clone ID: LIB3148-009-Q1-K1-A6
cccacgcgtccgcccacgcgtccgcaacatcaaccaagttgcctccatagtgatggaagcagaaagtgagcaggaggcggcaaaggcggtggtggaagcggctactgcctcatggaaaaagaagttcccatctccaaaagtagatgactgcaccgtggtttgcctcttcttccacaagaagcaaaagccaagctaaatagttgtgtggtagagaggaacatatgttttcaaacacccgtttgtgagctgtgactaatttgttaaccagcgttaactattctatagattgagatgctttttggtcccccnnaaaaa

SEQ ID NO: 35860 - DNA, 348 bp, Gossypium hirsutum
  Clone ID: LIB3148-009-Q1-K1-A9
cccacgcgtccgcttaggatttatatttgatttctttgatttcctttcaatttttgcccacccttttaaactggtattgggctgaccttaccaattaaaataaccaggatttaccatagtttgtattatggtgatcaatgtttccaaaattttagcacagggaggttcaagacatgtttgccatcacagattcagtctcttgcttaattaaatagtgcaatgataaccattgcaaattcacttgaattaaatattgtacacaaactgtccaagttgtaacggaagtgatattttggtgatatttgaattcacaccaattagattaataaaatcttaaatttatcaatc

SEQ ID NO: 35861 - DNA, 352 bp, Gossypium hirsutum
  unsure (1)..(352): unsure at all n locations
  Clone ID: LIB3148-009-Q1-K1-B1
ggaagcatggcatctgtgggtcgttacaaggccctagtagatcttcgccaatctaaggacgcgcaaggcatatcacttgcggggttcataagttggttgatatggcgctcggcttacttgacgcgtgtggttagttggaggaacaggttctatgtggcagtgaactgggccaccacgctggtctttggcagagacgattccaggataggttgaggcatggcatggcatagtcattgccttgcgctgcacttttaatattttcaatcttatatgctgctataaatctttcatttttgtatggtttattattaacttaataaaatacccagaaaaaggaaacatagattcangc

SEQ ID NO: 35862 - DNA, 314 bp, Gossypium hirsutum
  Clone ID: LIB3148-009-Q1-K1-B4
gtcccataacaaaaactaggcttgatagtggcaataataacagtcattatgaagaatgttatacaaggcgggccaggatccctttccttttggcaaagaagaaaaagaagatcatggtggcatcatcagatcatcatcatcaccaccaccaccatcatcatgctaatattgctttgaagagaagcaagtcaactacagctcccaggagaggccggttcttggatggtgaagtagataatggtggaggcttcagtcccagaaaaagaagtggtttttggtcatttctctatctttcttccaagagccatagttcc

SEQ ID NO: 35863 - DNA, 268 bp, Gossypium hirsutum
  unsure (1)..(268): unsure at all n locations
  Clone ID: LIB3148-009-Q1-K1-B6
aaaattcttgcgacatatataaatcatcaatttgttggcctgcnggaaaaaaaaaaaaagggaagaggaaaaaaaaaaaaataaatacggccggccgttttaaagatacacaaatttaataacgcttccttgcaaaaaatatagtttttttttagtgtacctttaattaaaattaattgaccaaagggggccccctttttaaagtggcaaacttttggccctccccaattaaattaattttttttttttgcgctttccaaaatctaat

SEQ ID NO: 35864 - DNA, 338 bp, Gossypium hirsutum
  Clone ID: LIB3148-009-Q1-K1-C10
gggagattctggatgcagctttgctcaacatgcggattcacggtcgtatagctgtttgcggaatggtgtcgctacatagtatctccgatccgaaagggatccacaatttgtattgtgttgtaccaaagcgcatcaagatgcaaggattcttgcaaagcgactacttagataaattccctgaatttttagaacatgtcactaagaacttcaaagaggggaagattgtgtacattgaagacatgaatgacggtttagagagtggtccagctgcttttgttggactgttttcaggccaaaatattggcaagcaggtcatatgtgtagccagagactgagct

SEQ ID NO: 35865 - DNA, 205 bp, Gossypium hirsutum
  unsure (1)..(205): unsure at all n locations
  Clone ID: LIB3148-009-Q1-K1-C12
caaaaagcaggactagggttttttcctttttaaaaaaaacaagagtgtgttttcccttgtctagttgcgtgcttagatactaattaacatttgatttgtttacattaaaactctgaacttgcatttagctttgttgggtattaatttgtaagatccatgcattggttggtaaaaccaatcttttcaaaaaaggtactttttnttt

SEQ ID NO: 35866 - DNA, 380 bp, Gossypium hirsutum
  unsure (1)..(380): unsure at all n locations
  Clone ID: LIB3148-009-Q1-K1-C6
cccacgcgtccgggagtatcctagatgacacagggttctcttttgtgaagtgtaaggtgacaggggcaggggctttatatttagggagggcatggggtcctttctcgagggtggtctttgcttacacttacatggacaacatcatactgcctaagggctggtataattggggtgaccctaaccgtgagatgacggtgttctatggacagtacaaatgcacggggccaggagcaagctttgcaggcagggtttcatggtcaagggaacttacagatgaggaagctaaaccttttatttctcttagtttcattgatggctctgaatggatcanattataattatacaatgatccatcaatttttatttttttaatgtatatc

SEQ ID NO: 35867 - DNA, 350 bp, Gossypium hirsutum
  unsure (1)..(350): unsure at all n locations
  Clone ID: LIB3148-009-Q1-K1-D10
cccacgcgtccggggttcgatggctaaccaatttgttagccaaaagcagcttgaatatgattgattaaaaggcaactacatcattatttttttttaattgagcaatgattcggctgagtcgacacaggtgagtcaacttagtggcgagggagctcaagcaggattttgtattgaggtgtcttaaaaaagatattctgttattggattggaatttggaagttaaatgtgcatttccattttctcttaaattgacgaggaaaacataattcgacaagattttccatttcagagcnnannananaaannnaaaanaaaaaaaaaaaaaaanannnnaaaaannnnnnnnnnna

SEQ ID NO: 35868 - DNA, 310 bp, Gossypium hirsutum
  Clone ID: LIB3148-009-Q1-K1-D3
cccacgcgttcgcccacgcgtccgctttattttgttgtctgttacggataaaatataggcaggggtaaaagaaagtattctcaaaacagttgttgataaatgaatttcagatatgtaatgttggaagaattggcttaataataaataaatataaaaaaaaaaataaataaataataattaaaatgaaaaaaaataaaatattaaatgaacataataataggaaaagagttactgatgatggaataattaatgatggaaaaaagttaggattttggtattttttttttaattatttgggggggggcctttt

SEQ ID NO: 35869 - DNA, 254 bp, Gossypium hirsutum
  Clone ID: LIB3148-009-Q1-K1-D4
cgttacgattatttattcaatcaattccatcgcctaaataatttaagtacatgttttgtacttttgatgtaaaagacatgttatcttaaataagtttacttttcatgtaaaagacgtgttgtctcaaataagtttcaaaatataaaatgtttgttaaaaaaaacaagattatgaattgaggtgtcttaaaaaaaaaaaaaaaaaaaaaaaaaaaaaaaaaaaaaaaaaaaaaaaaataaaaaattttatattgg

SEQ ID NO: 35870 - DNA, 402 bp, Gossypium hirsutum
  Clone ID: LIB3148-009-Q1-K1-D7
gtggattggaggattatgccctgcatggtatcgaaaacccggatcttagatatgaccaaacattgagttatcctggccaagtcaataattccctaacgtgtgacgcagatatttctcagacttttggtgacgaggatcatcttggatattttgatggtgatcttcattcccagggccttggtttggaatcacaagcggatctacaaactgctgttgacggattccttgtgcaacgtacagttgctgacccagcgaagacgagatggaccaaggtttttagtgtactgaagtggttctctatcaaaagaaaagttaaagaaaaatttctaggtctgagatatggcactggactttaatacttttgcagctgcagtgggaaatagtaggggggagccaagtgct

SEQ ID NO: 35871 - DNA, 416 bp, Gossypium hirsutum
  unsure (1)..(416): unsure at all n locations
  Clone ID: LIB3148-009-Q1-K1-E3
aggggatgttatctgccatggggatgcaaagattgtaaaggaaggatacaaaagtttccctagtggtcatacttcatggtcctttgcaggtctttgtttcctttcgttgtacttgtcgggaaagctaagagcattcaatcgcggaggcaatgtctcgaaactttgtatcgtgattttcccggtacttgccgctgttctcgtgggtatttctcgagtggacgattactggcatcattggacggatgtttttgccggagctcttataggaacgtccatggcagcattttgttacctacaattctttccctgtcctcattatgaagatggttgggcacctcatgcatactntaagatgatntgcggaagacanagtgatgaaagtncagaaagcacagtcagatcttcaagcaagaatg

SEQ ID NO: 35872 - DNA, 374 bp, Gossypium hirsutum
  Clone ID: LIB3148-009-Q1-K1-F1
ggtgatcaggcatgggagccctgttggatgtgaagcagtagagaaagcatatgaaggggaagatgagcatgaagagaatgcatcaatcaagagagaattctctgactttgatctccaagtccatgtggtcaactcaagtgaagaatttgattttggaaccaaaagggttgcttcttcagattcatttgaaactgaagccaaggaagaggttgaaaaggctgttgataagttccaaagtggacatgttagtgatcctgggatgaggagggctgagttctgggcttcacctatgcttaagcgctcgtgttctgatttggagaggaggaatgtgctaagagaggtagctgatcatttccctccatctcagtcatttg

SEQ ID NO: 35873 - DNA, 352 bp, Gossypium hirsutum
  unsure (1)..(352): unsure at all n locations
  Clone ID: LIB3148-009-Q1-K1-F12
gtttaatctaaataagccatagggtgagaacttccatgtacctgtataggcaactgtggagaaagaaaatgttaaatatggcagatttatgaattgctcatcattttcgcaaaaaaaaaaaaaaaaaaaaaaaaaaaaaaaaaaaaaaaaaaaaaaaaaaaaaaaaaaaaaaaaaaaaaaaaaaaaaaaaaccccaaaaaaaaaaaaaaaaaaaaaaaaaannnnnnnnnnaaaaaaaaaaaaaaaaaaaaaaaaaaaaaaaaaanggggggcgcccctttaaaagaaccaaattttatttcccgtgtcttgcaaaataaaattttttttttgggcccccaaaaataaaata

SEQ ID NO: 35874 - DNA, 233 bp, Gossypium hirsutum
  Clone ID: LIB3148-009-Q1-K1-G2
cccacgcgtccgaagaaaagcacaactttaaaacgctaacaggagagaaaacgaaatacaaacagaaaaaaaatgaagctagtttggtctccggagacagcatccaaggcttatatcgatactgttaaatcttgtgaacttcatcatgaatctggtgtagcagagcttgtttcagccatggcagccggctggaacgcgagattcattgtggagacatggtcacagggtggcgc

SEQ ID NO: 35875 - DNA, 289 bp, Gossypium hirsutum
  Clone ID: LIB3148-009-Q1-K1-G4
gtttcagttacttcccatacaatggctgatgatatgcacatgcgacttctatacctagagaaccgagtggcatttgcaaggttacttttcccgagtgaagcgaaacttgccatggacatcgcacatgcagagagaacctccgagttttctggtctctcatcaaaaggttcaaatgggaacttaagtcaagttgacttgaacgagacgcctgtaatgcagaagaaacgacttcttgcgaagatggaagcccttatgaaaacagtggaaatgggtcggcgttatttcccgc

SEQ ID NO: 35876 - DNA, 260 bp, Gossypium hirsutum
  unsure (1)..(260): unsure at all n locations
  Clone ID: LIB3148-009-Q1-K1-G6
tcgaggacgcgcccgcgtaaaaaagaacctgtttaaaagcatgattttttttatttgtaaagggcattgcttggtggaccttgatggggcctgtttgaatggtgaaagaacttcgcctattatctaaaaaaaaaaaaaaaaaaaaaggggggcccgccttcattccactccccggnnggaaaaaaccgtggggacacgaaaaactttgcctttgccgaacattaattattttgccggaggggnttaaaaaaaaagggggg

SEQ ID NO: 35877 - DNA, 385 bp, Gossypium hirsutum
  Clone ID: LIB3148-009-Q1-K1-H11
aaaaaaaaaaaaaaaaaaaaaaattaaaatttaaaaaaaaaaaaaaaaaaaaaaagcgaacagaagaaattcaaaaatacaaacacatacatacggggcgccccttctataggttccaacctttcgtccccgttcatgcgacgttatttctcttctttagggccaccaaaatccatttccctccccgactttatacaccggccgtactggaaaaacccgcccgttacccaattataaaggttggccgaaaatcccctttttaccaactggcgtaataactaaaaggcccgacccactcgcccttcccaaaattatcccaccctgaatgggaaatgggacccccctctgaacccccattaaaccccgcgggtgggggggtaccccc

SEQ ID NO: 35878 - DNA, 372 bp, Gossypium hirsutum
  Clone ID: LIB3148-009-Q1-K1-H4
aaaaaagaaatcctaataatttgaaaataaaactgtgaaactacgagtactaatacaactataggaaggattaaagggaaaaaaacctcatcaaagaaaataaaaagaataaacaataaagtaagaataaaattatactaagcacaataataatatgaaacctaataataataataataataacaaactagtaataacagtataataaaaataataaataataaataataaataaaataaaataataaatggggaggggccaaatggttgatgagggtcggtcgacgaggcatggggctccgacaacggcgagacgggtgacgacgatgaaaggccagtgactgggagaaaggaaaaggagaccgggttgat

SEQ ID NO: 35879 - DNA, 235 bp, Gossypium hirsutum
  Clone ID: LIB3148-009-Q1-K1-H6
tctcactccaataataaatgttatttttgttttaaaaaaaaaaaaaaaaataaaaaaaaacgaaatttttattaaaaaataaaaaaaaacaaaaaaaaaaaaaaaaaaaaaaaaactgccggcccttttaaaaaactcccattttacttccccgtctgttccatggactgcctatcataacaaagattttaaattcacttctctctccttacgttttacaacacaccaaaccgga

SEQ ID NO: 35880 - DNA, 411 bp, Gossypium hirsutum
  Clone ID: LIB3148-009-Q1-K1-H7
gatatggagttttgattctcttctgaggcggaaattgttggtctctaaattaaaggttatactagcttataactggttgaaaatacaaatacattaaacataagttggtagttctagtgctatatcttggtcgcaattgcagacaaaagtaaatattgcccattttcaattaatcagagaacgagcattggtggcatgaaaaaaaaaaggaaaaagagaaagaccattatgagcaattgaagtttctccggatgcggcaaaattaattttgttttttgaattgagttatgagaatcatgtgctctcgatttatttttacccgaaaaccagatcttttttttatttttttgatggtggtgtagaaaatgatttagagaaatttcttttactaaattcctgagccttttcttt

SEQ ID NO: 35881 - DNA, 217 bp, Gossypium hirsutum
  Clone ID: LIB3148-009-Q1-K1-H8
cccacgcgtccgtgtcaactggtctatggtctttttaatcataaaatcggtttattattgcatttgattaggaatttttgacccgtagtcaaattgacattgaagcaaaggggtctttcatcatcttcttcaatatggcttttaattactcttctttttttttctgtaataaatcatcaaattgcaaatcccatggaagttcagtattgggtttttg

SEQ ID NO: 35882 - DNA, 274 bp, Gossypium hirsutum
  Clone ID: LIB3148-010-Q1-K1-A11
gtccgtggctgaaggattctagccgggggcggcattttaggtatacaacgtatatggatgcactaagagagatggatgatcctcttacggaggggctcctgttcgccatggtaacttatcatacaggaatctgcgtgcctaggatatgttagacttatacctctaattggttattgacttcatttgctactggatccaaaggtgtttgactctggatattttcatcatttcaggcacgaatgattgatttttattacagtctgattatagtttt

SEQ ID NO: 35883 - DNA, 234 bp, Gossypium hirsutum
  unsure (1)..(234): unsure at all n locations
  Clone ID: LIB3148-010-Q1-K1-B3
cccacgcgtctnnnacattaatttaaagttttatttccagcttctggacaaaaaacatatgaaagaaaattttttttaatatattctcccccaactcaaaaaaattcaataaaaactaaaaaaataaacaaacaaacaaatattcataaccttacctgtcgcccttcctctagctatcaatctaaaccccccttccaagcaacgtaaaactttttttacatcctccccaaaatc

SEQ ID NO: 35884 - DNA, 399 bp, Gossypium hirsutum
  Clone ID: LIB3148-010-Q1-K1-B9
acggtattgtgattctgtgaatggtggaatcatgaatgagaattatgatcctgttgaaagaagacttaaaggtggaaaagagcggaactcgaagggttctcttaagagctcaaaatctctgcaggcaaacaatctccataaccttgcctctggagatgcagctggcattaataaaaacactgtttccaagcaaggtaagactggtgtagcagcatcttcaagtgaggtccgggctttgtccaaggagattaccgatttgaaactctcggttgacctcttggaaaagggaagagatttttacttcgccaaactgcgggacattgaaatactttgtcagtctaccaaagtggagaatcatccgatggcagtagtaataaagaaaatactgtatgcagctga

SEQ ID NO: 35885 - DNA, 241 bp, Gossypium hirsutum
  Clone ID: LIB3148-010-Q1-K1-C2
acccgccacgcctgttgtcccgaagcaacctgaatctgacccaagtttagagagctaaccatttaggcttatttttctttcacaataggtaaagcatccttgattcttccattagtgcttcttctaaagttctaatcttcgtatattatgtacaaaaatggaaaaaaaatgcattggcccatgtggatatctgtgaatgctgtctataacttaatgcaattagcaagagtttgttcgtttc

SEQ ID NO: 35886 - DNA, 230 bp, Gossypium hirsutum
  Clone ID: LIB3148-010-Q1-K1-C4
gttcgatcaatcatgttcttactataccctttgatttaaaatcattcatactatttacttgggggcgttgaatatataaccacagttaatttctcccatttgttcatatgaaaagcttgaaatctgtacaattgtcaattgactcttgctgttttttatattaagtgcaaaaccattagtttaaaaaaaaaaaaaataaaaaaaaaataaaggataactaatattaaaaa

SEQ ID NO: 35887 - DNA, 410 bp, Gossypium hirsutum
  Clone ID: LIB3148-010-Q1-K1-D10
gtaattagtccatgttttttaaatcaaaggataaattagtcattttgttaaaaattttatctatttctattgttaaaaattgatctcgtatgtcagcataaggtacacatgacagatcacgagtagttgtctggttattcaatcagttatacaagtttttaacaatagaaatgaaaagaatttttaacagaaatgatcaatttactctttaatataaggtaaagagactaatttactcaattttttagtaacaggacaaaatgcaattgaatcctaatggaggggtgtccatgatactatactactatacttttacctagtatacatataaacggtaaaaaataatgtttttgatttgtctaaaaggttacagtgaatggtaccccttaccacaagagttgtttcaaatg

SEQ ID NO: 35888 - DNA, 408 bp, Gossypium hirsutum
  Clone ID: LIB3148-010-Q1-K1-E9
gtttcctttggggcattggggatgttggggctcaatacatcacccatttcaccacaaacacacgccttcaatataaagattcagagcaagaatttataatcgattggaaaagagtggctatcaccagtatgtttggatttggctttgttggaccggctggacactactggtatgaaggcttggacagatttataaagttgaggcttcaactacgaccaaagtcggtgaaatttgttgctgctaaagtcgctatggatggccttatctttggcccctttgacttgttcgtgtttttctcgtatatggggctttccgctggtaaaagtgttccggaagtgaaggctgatgtgaagagagattttatcccagccttgattttggagggtggtatatggccgattgttcaga

SEQ ID NO: 35889 - DNA, 276 bp, Gossypium hirsutum
  Clone ID: LIB3148-010-Q1-K1-F11
caaaaaaaaaaaaaaaaaaaaaaaaaaaattttaaataaaaaaaaaaaaaaaaaaaaaaaaagagggggggcaaaatttcgggggcctaccataaaaaaagcgggcctgcggcgtcaagcggactactattgtcgtcctcttggttcaacaccttggcctctgttttactccgcccttattcgaaatacctgggcgtggcccaacttcatcttcccgcagaaaatccgattttcaccaacttcagtcttttcgaggattccccctcttgcccccct

SEQ ID NO: 35890 - DNA, 408 bp, Gossypium hirsutum
  Clone ID: LIB3148-010-Q1-K1-G12
cacgagcatcgtgcgacgtcgatgaagaaacgaagaagatggttaggtatgaagtggacatggcattggctttatcggccaaagggttcgcttggagccgtgccttgaaacacaagcttcgactgaactacaaggacgatgatcgtgtaggagatggtcatggtgagcccgtaacgaagaaaccgaaaaccgaacacgaagaggaagagaggatgatgtgtttgaggaagcttataccaggagggaaagagatgatggctgatgatgaaatgttgttgagtgaattgggaagctatgtttcatgtcttgaattacaggtgaatattcttagatcaatgcttcaaaataattaattttttttttaattttggaagttaatttctattgaggcatgcaatattcaatgtg

SEQ ID NO: 35891 - DNA, 225 bp, Gossypium hirsutum
  Clone ID: LIB3148-010-Q1-K1-H2
cccacgcgtccgatcgatgtccgtccaaattaattgagcttaatttggatgattaatgttggggttttgtgaacttatataatattttggattaagtatggcttgtaataggaaacattgtagtactataatatatattatatacatatatatgagaattttcaatgataattagctattgtaaataccctttgagatgtggataaataagcaatatctttttat

SEQ ID NO: 35892 - DNA, 388 bp, Gossypium hirsutum
  unsure (1)..(388): unsure at all n locations
  Clone ID: LIB3148-010-Q1-K1-H8
cccacccgtccgaagaattgtccgtcatattttcgatgttcatgtcattaatcaagagagaggaaacaaaagggacaccagatcaataactgttaccacaaacttgcctaaaacatgtgataatccaaccactggtgggttagaaattgaccctgcgaggaaaagaaacagtttaaaaagacctggtgggttaccgccaattggtccttcacgagtcaaatcttcacctttcatttctcgtagaaattccacgtctgctttagattatgaaaagtttaaaatagataatgaagtcggtttacttagagaaaggctaangattgtacagcaaggaagagaaaagctcaacgtacctgcagggcgcaaggaaagagaacaagttcaaatg

SEQ ID NO: 35893 - DNA, 213 bp, Gossypium hirsutum
  Clone ID: LIB3148-011-Q1-K1-A11
gtggtctttctgccagcgggatactgatgatcatctcggcaacgtgctccgaaaaggtgggatgtgagtgcaattattaatcccatgccccattcttccgcatccaaaatagaacattggcaaattttcatacttaaaaggaatctatactttactaacatcgaaaataatacaaaaatgaaagataataaatacaaaaaaaacaaaaaatta

SEQ ID NO: 35894 - DNA, 358 bp, Gossypium hirsutum
  Clone ID: LIB3148-011-Q1-K1-A12
cccacgcgtccggcagaaatgcctgggtgaggctgaaggataccttgaacctgttgaggagaatgaagcgattttggaagcttatgtgaagtcatgggtgtctggtgcccttgacaaagctgcaactcgaggatcagtcgcattcacattagttctgcatcacctttcatcttttgttttcagctctcataaaagtgacaagccattgctacggaataagcttgtgaagtctctactgcgagacaatgccaggaagaagcagcacgagggaatgatgctgcagttcatcgaatatatgaagccatcgagtgttacaaaggccgaaaaagaggaaggtttgacaatggagagtagcaat

SEQ ID NO: 35895 - DNA, 309 bp, Gossypium hirsutum
  unsure (1)..(309): unsure at all n locations
  Clone ID: LIB3148-011-Q1-K1-A4
cccacgcgtccgnaaaaaaaaaaaaaaaaaatatatataaaaaaaaaaaaaaaaaaaaaaaaaaaagagggaaaaaaaaaaaaaaaaaaaaaaaagggttggaagttttaaaggataaaaagaattaaaatcaaatgcttgcgacggggttggctgttttatagggtcaacttatttgaatgcattggtcgaagttttacaactttttaaatgggaaaatcctggatttacctaacttaattttttaaaaggaaatcctgtttaagccagatggtttaatagctaaaaggcttggacctttatcctttt

SEQ ID NO: 35896 - DNA, 414 bp, Gossypium hirsutum
  Clone ID: LIB3148-011-Q1-K1-A5
cgcttgcatagagaagaatctccaacgaaatctcagttgcatacattgatagacttgaatgttggtcaagtttcaatggatttcgaaacggagggccccttcgtcacggagaccacgcaaaatagtgagaatttgtttgcacatacgtcattcaatcagtccgaagttaccatgcaacctgataaagttgcagaggtgaatcagcagccagtagtgcacaatcgaaggcaaagtaccaggaaccggccattaaccactaaagcattagaggctcttgaatgtgggttcttaagtcccaagaggaagcgaacggcagcggagactccacagattaactcacaaagaattcgcagtaagccggttgtgaatgccacttttaagaaggaaaaggcggtggagactccacagaatagc

SEQ ID NO: 35897 - DNA, 286 bp, Gossypium hirsutum
  Clone ID: LIB3148-011-Q1-K1-A8
ggagtctatgcgtgatatctagaattctgtcttctaatatggtcatgcttttgttgaataaggggtaaaatctaaagcattgtgccttgtagctttaaacagcacattctttctcacagataagcttgctcagatcttagatctatgtggtcgcttggatccaaaggctaaggatttgttgggttttcgactatcaactcttttcagttttttttttaatttcctcatagaagaatgtaatttctagtttgggaaaaaggatatatttggtgggttatcatttgaa

SEQ ID NO: 35898 - DNA, 223 bp, Gossypium hirsutum
  Clone ID: LIB3148-011-Q1-K1-B11
ccttttctatctatctatattattctctaatatgaccaagatattaactggtggtatcaccaagctttttcctttattattaattggagcctggttgtgtcgtatgatattgggaggcatccatatggtaatgttaatatatgaattgggcaaaacccaatcttgatggacaaaaaaaaaaaaaaaaaaacaaaaaaaaaaaaaaaaaaaaaacaagaataac

SEQ ID NO: 35899 - DNA, 351 bp, Gossypium hirsutum
  unsure (1)..(351): unsure at all n locations
  Clone ID: LIB3148-011-Q1-K1-B4
attagattccacttgatgcaatttcggatttcaattcgagtagctaccgaataggacagtttgtatagtcattacaaataagcttgtattacattttttctggcatattgtccggattccgattattgaacgaaaaaaaaaaaaaaaaaaaaaaaaaaaaaaaaaaaaaaaaaaaaaaaaaaaaaaaaaaaaaaaaaaaaaaaaaaaaaaaaaaaaaaaaaaaaaaaaaaaaaaaaaaaaaaaaaaaaaaaaaaaaaaaaaaaaaaaaaaaaaaaaaaaaaaaaaaaagggggggcccttttaaagaaccaaattttttttcccgtttttgtcaaaanaaaaatttttttt

SEQ ID NO: 35900 - DNA, 379 bp, Gossypium hirsutum
  Clone ID: LIB3148-011-Q1-K1-C11
atttgttgagttgaaaaaacaaaaagaggtttagggttggagttcgattttagaacacactccggcacttaagttagactgaagtgcaaaaggctgcgtaagccggattttccctcacttgggttgtatagatccggtcggacacattagtggatgggacgatgttttcttattgaggggtttggtggttaatggtacgaaccatttttttttctcaagggctcaagctgtaagaagctggatatgatccgaaatatcttatgcaatgtcggttcgggttatcggaactgctgatttggactctgaatctaatgggcttaacagtaattcaaaagggaagacataatgatgttaacaagagatgactagattgtgattt

SEQ ID NO: 35901 - DNA, 332 bp, Gossypium hirsutum
  Clone ID: LIB3148-011-Q1-K1-D12
cctacgcgtaggtatgggaagagctgcttttaccaaaacgaagatggtgatgctacgggaagcgcaactcgtggagcgaccatcgagcacaattgcaggcaccaatcgggagatcaataataagtgcaagattaacagctatttaaaaagttcatcacattgggtgccacatacatagagcgggatatgttatccgaaaggccatgaatgggtgatggatgacgctccttacctggcggcttgtttctgtttaagtatctttgatcgtatcgattactgtgtttattaacctgatgattacgattatgatgacgactatttctatgcaatta

SEQ ID NO: 35902 - DNA, 404 bp, Gossypium hirsutum
  unsure (1)..(404): unsure at all n locations
  Clone ID: LIB3148-011-Q1-K1-D3
ttgatgggaaaataaatgaaagcaaggcgaaagctttggattttggcgtaataatccatgagggtttgtttgacaatttggagacctgganacacccattcaaaatctttacattattgctcaaacagtggaacaatatttgagaagtcgatttggttttatttattaatttcttgtttgttgttgttgtcataattttttgttttcacctgttttcttttttattctttttttttttcgatactttttattgtctttaatttttcaaagtactttttgaaatttaatggttcatttctttaaatttttctcattattttccatgattttttttatttattaatttttatattatttatatttattttttaattattttataatatttattatatattcttttt

SEQ ID NO: 35903 - DNA, 412 bp, Gossypium hirsutum
  Clone ID: LIB3148-011-Q1-K1-D6
cccacgcgtccggcagtatttgggtggaatacctaagtctcctgaagctatattccattacaaccgtgatgatctcaaaggattaccatttaaatttcctaaaaccgtaattcgtgatgtggtacgcagccccatggtagaagctcaatgttcagtccagctatgctttcctgtggtgttgaagaatggaacaatggtagaagagattcactgtgtcggtttcctgagcaaacttattgaaacaaaaatagtgcaggttcttcgtttcaagcatgggcagatctattctgcttgtgtttctgggttccttggtggcaataaaccttctagaactggtgatgttcgtggagatgtgagtataaacttttcttgtgatccagaaatctcctcaaagttggttgatcttgctttg

SEQ ID NO: 35904 - DNA, 385 bp, Gossypium hirsutum
  unsure (1)..(385): unsure at all n locations
  Clone ID: LIB3148-011-Q1-K1-D7
agatgatctctttttccactccgacacgatgagtaaacaatgtagaaaggtagtagtagcttaggaaaactgactcaaagagattaacctcttaaaaatgatgcatgttttagaaaatcaacgaggggaagaagagattaaaaatcttattacgatatttgagttaaaatgaggtaaataagtgtttttgggagggttggatatgtaatgtacttactcatgtagttagcttagctatgtttaaagaaagcagcctatccctttttgttaaaaaaaaaaaaaaaaaaaataaaaaaaaaaaaaaaataaaaaaaaatttataaaaaatataaaatatttaaaatatttaataatttattttataaaaaaantggggcggcccttt

SEQ ID NO: 35905 - DNA, 370 bp, Gossypium hirsutum
  unsure (1)..(370): unsure at all n locations
  Clone ID: LIB3148-011-Q1-K1-D8
gtaaaaattaaaatggcatagatttaatatatgaataaaagcatggaccttgtacggattgtttgtttcacaatttggagacgtggaaacacccctagaagatggagacttcattggtcaaacagtggaacaatatttgagaagtcgatatggtttcagacatgaattcctgggagttgtcgttgccgtaattcttggtttcactgttttgtttgcatccatctttactgtgtccattaaggtctttaatttccaaagacgttagaatttatggtttccatctctgtaatgtttaaggtcatgcttttattcatatattaaatctatgccattttaattttaacatacaaattctttcattgtnnaaaaa

SEQ ID NO: 35906 - DNA, 348 bp, Gossypium hirsutum
  Clone ID: LIB3148-011-Q1-K1-E10
gaatcgaagatgagccagttgattccgatgctgaggacgacgtttattatactgatgatggtgaaagaagtgagtcggattcaaacaaaaatagtgctgtggagaatacgcattacaacatgatgagctatagggcaagaggtatacagttttgctggtgaattgggtgtgagctgctaaacaacaagtgcataaattctcttagtatctttttaagatgtagacttattagttgttatttagataaaaaaagaatagtttgctggcaagagaaaaaaatgagtgacgcgctctattatgatttaattaattatgtctaaataaacaagcggtgtttttattaacaaa

SEQ ID NO: 35907 - DNA, 399 bp, Gossypium hirsutum
  Clone ID: LIB3148-011-Q1-K1-F10
gcaggttctggatttagaatgttgtggaactctgtcaagtctttcctagatcctaaaaccacagccaagattaatgttcttggcaacaaatatcatagcaagttgcttgaaataattgatgaaagtgagttgccagattttctgggaggcacttgcacttgtgctgataaaggaggttgtatgctgtctgataagggtccatggaaggacccagagatcattaagatggttcaaggtggtgcacataaaggctcaaagaaatcacaggatgaaagcactgaagagaaaacgacatcagaggataaaactgagttcccaaagtctatgcctgctagtgaagccgtggctgctgagccagttccagatgcaccaattaaacaatcagacaattcttttgag

SEQ ID NO: 35908 - DNA, 475 bp, Gossypium hirsutum
  Clone ID: LIB3148-011-Q1-K1-F4
cccacgcgtccgcgaaaaagatcatccccttgaatatgctgaaccaagtttcaaaacaccctgggtatgatgactcgggtcttgccggagttagctcacagatcatataaacaatgggttttgggggaagttttatggagtttcctcttatttgttattacattttttaactcttctttaatgttttctatttttaaattttcttctttcttgcattatttatttggagactgaagtttattttatttttttttttgtattattattaattttatctttttatttttttatttttctagtttttgttatattatatgtttttattattatatgtttttatctatctttttttttaaattttattttttatattttcatatgattgctatctatattttcttttggttattattattatccttatttttttattctttattatcttttatatattttttatttatatattcttttt

SEQ ID NO: 35909 - DNA, 382 bp, Gossypium hirsutum
  Clone ID: LIB3148-011-Q1-K1-F6
cccacgcgtccggattacatattttgtgtatttacatcatatttatataaattttgataagttcataaaaaaaaaaaaaaaaaaaaaaaaaaccaaaaaaaaaaaaaaaaaaaaaaaaaaaaaaaaaaaaaaaaaaaaaaaaaaaaaaaaaaaaaaaaaaaaaaaaaaaaaaaaaaaaaaaaaaaaaaaaaaaaaaaaaaaaaaaggggcgcccctttaaaagaaccaaatttaactaccccgtccttgcaacgaaaaattttttttatggggcccccaaaataaaatcaacggcccgggttttaaaaacgtgggaatggaaaaaaccctgggttacccaaattaaatcccttggaaaaaaatccccttttcccaagttggg

SEQ ID NO: 35910 - DNA, 145 bp, Gossypium hirsutum
  Clone ID: LIB3148-011-Q1-K1-F8
cccacgcgtccggccaaccgcttccttactttgattctatcgtcgattcaaagcggtttcttattccatggcgtttcctttttgggccctccccaaaaccttacttcaaaccaggctaccttcttttctttttcaacccaccaac

SEQ ID NO: 35911 - DNA, 143 bp, Gossypium hirsutum
  Clone ID: LIB3148-011-Q1-K1-G12
gtccaaacatttcttaaactgacgattttttttacgagcatggaagttactgcagagggggtgtctcaaataatgttactagcgtcccattgtataaaaaccactccccaatgttttgtcacataatcaatattctttaaaaa

SEQ ID NO: 35912 - DNA, 116 bp, Gossypium hirsutum
  Clone ID: LIB3148-011-Q1-K1-G8
gaataatgccaagcctcctcatgaagtttcttcggacgatcccaactatgattctcctgggcagaattttaagagaccatgcgaagtttttaattacatacatctccaacgaattt

SEQ ID NO: 35913 - DNA, 428 bp, Gossypium hirsutum
  Clone ID: LIB3148-011-Q1-K1-G9
cccacgcgtccgctgtgttttaaaatgagaagcaaagctggaaatgggactatatatatatgtatagatggaaccggatttgaagaggtaagttgcttttgtcttttgttatatttccttttccatgtcagttaattacaagtacaatgttgtcccatgaactagtacatgttatagtgttgcaaattaatcactattatagtatattcaacttttagctgtcaaaaaaaaaaaataaaaaattttaaataattaaaaattatttaatattaaaaattattaatattttattttttattttaatttaaaataaaatttttattttatttttaatttatattattattttttattaaaggggcggggtttttatttaaaataacaataatttttttctctttgtttatattaataatttaattattttt

SEQ ID NO: 35914 - DNA, 188 bp, Gossypium hirsutum
  Clone ID: LIB3148-012-Q1-K1-A2
atatataagagttagtttaagtctatagaataactattatactacaactttatcgaaatataatcgtatgctgctccttctttccaaaaagcgtaaatgttctctactctaggccaacctcccaggaccgccaaacgtttgcaagttcataaatagcaatgaacaaaatttcgaaccgggcgccctta

SEQ ID NO: 35915 - DNA, 392 bp, Gossypium hirsutum
  unsure (1)..(392): unsure at all n locations
  Clone ID: LIB3148-012-Q1-K1-A5
cttttttttaaaaaaacagaagctttaacccctctccctagggtttgattcaacatgcaggggcctaaaccatcatttatttgatggcttcggcgcgccaatggcgaccggaccttgtcaacggaggacacgcccacggagatcgggtacagggtacgttagcatcgtacggaggctgtgctggtgctggcgcgggcgtggctgctggagggtacggagcgaggctgggggttgtacggcgcctggaggctgcggtactaagcaagggctagggtttctgaactttggtttaagtattgggcctattgggccgtctggattttgggttagacattagtttgggctttgataggntattggtttataaaatgacacttaattattgagttttt

SEQ ID NO: 35916 - DNA, 397 bp, Gossypium hirsutum
  Clone ID: LIB3148-012-Q1-K1-A8
ctcagtctcttatccgaaggttggtccggcagcccacatgcacgatcttcgttgtcaacaggtctgctgcagacgacacctttcagatcactttctgatatcagttctgggaacaattctatatatgagaataagaagtcctgtgacagagcgagcctttgcgatgatgtgctcagctcgactcttgtaagttcaactttgattccttctgtaatccgaagctaaagatgggaagttgggagaagaactaagcatggaggagagcttgattagaagaatctttgaagaactttgtgtttgtctaatgaattttcttttaatctttggttaaattttaactagattgttctttctttttacaagtagagaatattgaagattcttagctcatttggaa

SEQ ID NO: 35917 - DNA, 349 bp, Gossypium hirsutum
  Clone ID: LIB3148-012-Q1-K1-B11
ggcttcctcaaggtgattattatcccaaagcttgccatgttggttttggacttgttcttggagaatatggcatgcgtttgctaacccccaacactgaagtggttcgtctagttgatctacttgacgatgccaagatccgatgttaagctacacttatcgagcatggtctgggtgaagaatggaccgaggaggagattgctagtactgctgatgcacttggttatggtgctgttaagtatgctgacttgaagaacatcagattgactaattatacacttaattgtgaccatatgcttaacgataataaagcatttcgcaaggtgcctcaatagtcaaagattcccccatc

SEQ ID NO: 35918 - DNA, 379 bp, Gossypium hirsutum
  Clone ID: LIB3148-012-Q1-K1-B12
cccacgcgtccgcaggtgacacagtttgaatttgaaaagccacccaaacactatggaggatgtcacaggaccatagaaggtggtccatatcttctggtgccttcatgcaaagagggcaatgaacatcaacctttagagttctttgtgacagattactataatgaggcagaaagttgctaaacaacctccaaagatgtattttgatttttggtgtgagtatagatcaaaaaaatttgtaaaagtccttgcaagcctcaaagataggcatgttgtaattaataccctatagggaatctgtaactaagacccgatatccacttcttatggagtaatctccaaaacccacatatttccagaccaaaccaataaaaacttgatc

SEQ ID NO: 35919 - DNA, 454 bp, Gossypium hirsutum
  Clone ID: LIB3148-012-Q1-K1-B4
cccacgcgtccgaactttatcagctctactttatttttataaacctactcaccctcccaagagaagagagaacttttctatactctcaccccaccaaaattcaccgaccttggcccgacaacttttcctcttttatttctcaaaaccttcaaaacttaattctcttaaattatatatattattatttcaaatatatacttttatttaaaatttccaaattatttttcttctttttacattaataatatttctttatataatttatatatattttttttttatttttatatatttttatatttttaatattactcttcatttttaattatatctatacttttgtgtataattttatatccctattatttttttaattattacatatttaaaatttccctaattatttttagacttttatttattttttcattttttttattatattttttattta

SEQ ID NO: 35920 - DNA, 231 bp, Gossypium hirsutum
  Clone ID: LIB3148-012-Q1-K1-B6
aaattgctgaagagtcgccacatgtttatcttaattttagcaggaatatgtaaagcctagagcattttgtagaaatcactctatttatcacttatgagcgaatgttgcccgttattttgtacttgatttgtaatcaaaacatgatacccattcttcactgattaaataaaataaaaatcgacataaaacatagaaagaaaacatgcgaagaagctgatctacaaatgagga

SEQ ID NO: 35921 - DNA, 247 bp, Gossypium hirsutum
  Clone ID: LIB3148-012-Q1-K1-B8
aagccaccatatgatttatgtgttagtatctgaatcatcgagcggcggaactctgcgttgcagcatgttgtattgagaggagttcttgtttgggtttattgaatggaagagctaacctgaagaaagggcatgctcttgattttgagtcgatggtggtcttaatccccatatgcaaagatggttcgggaacaattagtcctcgcgtcctaatgctatatggaaacccaattgactgcaatttcccagc

SEQ ID NO: 35922 - DNA, 423 bp, Gossypium hirsutum
  Clone ID: LIB3148-012-Q1-K1-C9
gagaaaaagcagaagacaatcaagcagtctacaagcagaatcaggcttgccacgtcagaagcccaggcataaatctcacaatttgaggcaaagtgatgaccaattgagtgatatcagtagtgacatgagagatttgaatcaccaaggagatgatagttcgatgcaatctgagagcaatatgagcatggcctcctatggtgacactgaagtcactgctcaaagttatggcaagatagagggtacattctcccaagaacaggaaacgaagcagaaaaatccagcagcaaggttaattgaaggtgatccaaaagcagaacctccaagaactgccccggaacagcctagtcctgtctctgttctagatgctgcattttacggagatgaatcaccgtctcctgtgaagaaaacatcaaaagcttttga

SEQ ID NO: 35923 - DNA, 178 bp, Gossypium hirsutum
  Clone ID: LIB3148-012-Q1-K1-D1
aaaaagtttcctcgggataagctctacccctgatttgtgacaaaactattaaaactaggctgaaagccatgtataaccccgttgaagctttttagtcattctgtttcttcaaatgaaatctctctctttttgtcaagtgaaaaataaaaaaaaaaaaaaaaaaaaaaaaaaataaaaa

SEQ ID NO: 35924 - DNA, 405 bp, Gossypium hirsutum
  Clone ID: LIB3148-012-Q1-K1-D12
cccacgcgtccgccacagttgagtctgagtaatattgctcagtagttccattctgcttggttagtctacaccaagtgacaccctcttttatacctttgtcagccattgggctaaggtcaattggtaaacctaaaatctgaacttttgatgtcaataccagctgatgatcttcactaactctttcatgttcatcgaccaacacaatctatcgacacatctgagcaacatttgtttgtctgtttcattcttgcgtcattgctactttttgtgtttaaacttttctaggtttgtactgtaaccattacttcttgcaaatgttggctcaaattgggagaggccattatgattgcacttacaatgcagataacattgaattgcgaatggagagattattactacagcttc

SEQ ID NO: 35925 - DNA, 130 bp, Gossypium hirsutum
  Clone ID: LIB3148-012-Q1-K1-D4
cccacgcgtacgcccacacatacgaaaaaactatattatatttaagcatttacaccataacgagtgaggttcacagtggctatgaaacactgaaccaatgagagccaatctttgtatccgtagcaaacta

SEQ ID NO: 35926 - DNA, 281 bp, Gossypium hirsutum
  Clone ID: LIB3148-012-Q1-K1-D9
cccactcgtccgcccacgcgtccgaagataataaaaaaagaaaaaaaaaaaaaaactaagggggaaatattgatacaaaataaagaactataatattattatttaatagatatagtaataaaaggtctatggttgatagaattcatctgacatttgatatcatgatcatgtgtactgttctggtttggtgcaagaatcatttatattacagctgctataaagctatcatagacattcattatggctgtactaaatcttagctatcttggtttaaaaacaat

SEQ ID NO: 35927 - DNA, 426 bp, Gossypium hirsutum
  Clone ID: LIB3148-012-Q1-K1-E10
acagccttccgccacaccttccggtgtgcccaagtgtctctacaaagagatgggcgctactctaagagagggggccccgtgtgttattatatcttgatgatgaacaaattttgatgtggagaggacgggattggaaatctatgtatggggacacttcttcaactttagttcctgttaaagctgacatttcaagtggtatagataattcagccaaatctagtgatgatagtggtacacctgatgcccaaagggtagtatcaagcccaaaaatgatgtccctctggaggcgtgcaatcgagtcaaacaaggcattgttattggaagagcttgctttgtgtccggatgctcttctggaaaaggtggaggaatttgaaggcatgtctctggcgatagagcattcctgtgaagcattagtcctgtccagcg

SEQ ID NO: 35928 - DNA, 294 bp, Gossypium hirsutum
  Clone ID: LIB3148-012-Q1-K1-E12
cccacgcgtccggtaaaataagagttgctaactgagcaccagcagcaacctaatatacggagagaatatatggaggaaaaatgcttgaaattcaagctttaagagcagaaattggaaggaaaacaagaacagtacttaagcacacaaagaagaagcatgaataatagttgagagtattgatgaaaaaaatatgaattgtatttctttcatacatccatcataggcacattgccattacataaaatattaataaaacccaaaaatgattttcttatgaaaacattcaattatatc

SEQ ID NO: 35929 - DNA, 351 bp, Gossypium hirsutum
  Clone ID: LIB3148-012-Q1-K1-E3
gcgcttcccatcaaattaatattctatctaccgtccactccagcaaggaatgataaaaagtgttgaggagaatctgattacagcaaagctttcttactatctcaaagccttctgtaccattttgattctgcataagacgatttctactgctactatcagtaacacgcagtatatagtctttcttgcactgatgttgccgtcgataccttctgacacattgatgctcatcctcttttccgctagaatcatggatgctcttatgttattggccctttctccggcagttaccgactacgatttcctccataccgtatatcaacactacatatcagatttatacgattatgtctc

SEQ ID NO: 35930 - DNA, 344 bp, Gossypium hirsutum
  Clone ID: LIB3148-012-Q1-K1-E5
gattccacagctgccaattcagcagccttccttctagacgaagtcacgtctttgaaaggtggggaggtcatagctcgtgctgagcacgcatattctgttctatctgccccataacctggttttcttaccaatacagttcccttccctattgcccaaaccagcttgccgagcgagaaaaaacctgggaggccaaagcggtttaaaatgtgaatcaagtttattattacaatttcatatatcttcatagtgatactgattcttggccacactgtgtcgatctaaatgcctgattactatataagaaaaggaagaaagtgtttaatggcgttgagcatgtgattctt

SEQ ID NO: 35931 - DNA, 245 bp, Gossypium hirsutum
  Clone ID: LIB3148-012-Q1-K1-E7
gatgcctgcttcgatctgtagaataaggagcagtcaaatggcaatgtggaattacagataagttattaatattaatgtgtgtgtgtttacaattacttctttttttatactttattactaaagaaatagtaatctagttctgtaatgaacatttaagctacaatgttgtattttgttctttgtattgcgagaaatatttacattagttaaataaagaatttttataataaaattccatttttttt

SEQ ID NO: 35932 - DNA, 304 bp, Gossypium hirsutum
  Clone ID: LIB3148-012-Q1-K1-E8
gttaaaaccatcaccgaattatgtgaaatcgtcgatgctgtcctaaagatctgattgaatgggcccgcctaccttcattgcctacttctctaactaaattacttcgtattgcaaaaatagattttaaatgctctttgtgctttgtatttctcggaaatgagaggcttaatttttttttctattttacaccaacagatgaaggtgacagttataaacaaattatacatgattgaaatggatgaactagttataaccaaatttgatgatctatataaaaaatccaaacttacatacacatactttc

SEQ ID NO: 35933 - DNA, 340 bp, Gossypium hirsutum
  Clone ID: LIB3148-012-Q1-K1-F1
aaaaaaaaaaaaaaaaataaaatacataaatttcactaaaaaaaaaataaaaaaaaaaaaaaaagaaaagaatctaatatcaacatgaatgattttaaaaacaaaataccttcattatcatttattccactacaaaaaaaaaatgaattcctttaatataaaaatatacgcgccccattcttaaattgatacattttttttccccctatcatttacaacattcattttttcaaatctcaccttaaataattttcagcgtccgaatcaaaaaatactggtgcctgtataatctacagactaccctttcttatcctgcttttcatcaataatcctttttcat

SEQ ID NO: 35934 - DNA, 195 bp, Gossypium hirsutum
  Clone ID: LIB3148-012-Q1-K1-F10
ctatctataacacttccgttcgcattctttgtcccggatctctcttacaaattcacaccatcatacactcttcttttcttgtgagacaaataattcatccttatattactatgattgccgtacaccttttgcccaaattatattctcatttccacatatgatgttctttcgaaagcgtccattcctatctaacat

SEQ ID NO: 35935 - DNA, 217 bp, Gossypium hirsutum
  Clone ID: LIB3148-012-Q1-K1-F4
gtctcttttcatagcaactttaccataacatggcatcgcgtttaatcccttctttcaatcgggatggggttccataaaacaattcctccttctaaaaccacttcctgaatcttacttcccgagacaacctttaaagtgccttccaacacaatcaaaacatttactccttaagcccgatataatgacggaaaactcaccccgcttactctaacttaaa

SEQ ID NO: 35936 - DNA, 424 bp, Gossypium hirsutum
  Clone ID: LIB3148-012-Q1-K1-F6
gaaccacattcctaccgtcaatggacctgactaacttgccctgcaggctcaacccaatatggaatcaaactccctattcattaatggctgcatcgctcctcctcgaacaagttcatgccatgttgcacatgctgagactcaaaagaagggccaactagataatgatggtaacactaatggagttccagttctgctttcatgcatgtgtggacaaacctgaacccttccctccatttatgcctttgcatctcattatttctgatgattcaattggtatgctttagaggttagggaggactaagctctattctctttgtcatatattactgtttgtttttcctttttcttcggtttttaaagcttaactgaatcaatgctttcatgaagctccttttcctacaaaatctttaggttttctataata

SEQ ID NO: 35937 - DNA, 337 bp, Gossypium hirsutum
  Clone ID: LIB3148-012-Q1-K1-F7
cccacgcgtccggttttggaccttaagttgaaggctttcaagttttggaccttgggtgacatataatgaatatattatgtcccaaaagtaatttatttaagattgataatccttgaatatctttttataactacaattaatttttatatttgtattgtatatttaatttgggatattaagtgtgaaagagaaatttgagtgagttcattagtttagacaatttgagttgagctagttattaagcaattaaacttggtgtttataattatttattgtaattggaacaattgttatagataatttagataatttgagttgaattaattattgaattatt

SEQ ID NO: 35938 - DNA, 323 bp, Gossypium hirsutum
  Clone ID: LIB3148-012-Q1-K1-G12
tcccatttcagacccacgcgtccaaaaattcgataaattgactcatcaaaccattttttaaaaccaaaacacaaaaaaaaaaaaaagaaatttttcaaaaaaaaaaaccccccatccatatacaaaaaaaatccttcaaacctacaccatcattcaaaccccccattcacccataccacctatccttctcttcccaacttccccattacttatcaaacccttttttacacctcccttcctccatcctaaccaaccccttcaaccccctcattcaatcctcacatttactatttcaacacaccatctctacttctctaaccttc

SEQ ID NO: 35939 - DNA, 297 bp, Gossypium hirsutum
  Clone ID: LIB3148-012-Q1-K1-G2
cccacgcgtccaaaaaaaggtgatccatattgatgcatcaatgacaatccaccatccataggggtcggatctttttccacccggccctttttcaaaaactattaatcctagaaatcaggctactcaaaactactaggggccaaagtaaaagatatttcatattatgtgacagtatctccctataaaaatgtaaaaagccctgctttttatggcataaactctacatacttaaaaaaatcgaatataaaactaaaaatttaaagaatttaaaaaaaaaaattgaagaacacagtaaaa

SEQ ID NO: 35940 - DNA, 288 bp, Gossypium hirsutum
  Clone ID: LIB3148-012-Q1-K1-G6
gcgtccggcgacatgaattctcggtccaaattttagcttcatttacaccacaacgctctaatagggaagaacatatgtatctgcatagatttctacaaaatgcatccattgctataaccattgcttattaaaaactaactaagacacaaaaaaaaaaaaaaatacaaacaaaaaataaccaaataaaaactaaaaaaaatgcataaaaccctgtctaaaaaaacataaaaccctatccatcattaatgcctttacatataattatttatttataattcaattaaaata

SEQ ID NO: 35941 - DNA, 422 bp, Gossypium hirsutum
  Clone ID: LIB3148-012-Q1-K1-H10
caacgtatgattaatcaacgacgggaacttggtttttccgacaagagtgatcttttgtcgagatttatggcgacaatgatcgacgacgaccagtatcttcgtgacattgtcgttagtttccttttggctggtcgtgatacggttgcttccggtctaactagtttcttctggttattatctcaaaacccgaaagtcgagttcgccattagagacgaactcgaaaaggtcactgccgggatttcgccgagcgacgatcaagatttcgtaatgttcgatcaaatgcgtgaaatgcattatttgcacgcggcattatgcgagagcttacggttgtttccgccggttcaattggactcgaagttcgctcaacacgacgacgttttgcctgattttacttttgtaaggaaaggtactagggtcactta

SEQ ID NO: 35942 - DNA, 183 bp, Gossypium hirsutum
  Clone ID: LIB3148-012-Q1-K1-H12
cccacgcgtccgtgaagttcttcccctataatgttttgaaaacagttacagaaacttatgtggagtaacatagtaatgtcatgtggatgtggttactgtattttttttggacttgacacaatgtcttggaatgctcagttgccaaatatgatatactgtctgtatcaaatcctttttttgttc

SEQ ID NO: 35943 - DNA, 162 bp, Gossypium hirsutum
  Clone ID: LIB3148-012-Q1-K1-H3
gagccaacaaggcattggtgaacctggtaataggctgtaccttttttagccctactcggatgggttatcttgtaataatatgaagctaggttctgaagtctgcattatttcattgcaaaattttggtactctttgaatactacaaattctcctttcatattt

SEQ ID NO: 35944 - DNA, 378 bp, Gossypium hirsutum
  unsure (1)..(378): unsure at all n locations
  Clone ID: LIB3148-012-Q1-K1-H5
ggacagggtaacacaaccggcgacggagccgaggagggaaagtgactgtgatggtaggcttcttttacaataggatttgtattcctctggcggtcatctcatagactgttgtagaattaaaatcttcaacttgctctttaatgtagcagtttagttagtttaactcttgttgagaggttgttggcatgccaatgaattaaacaacaggttgttaagacaacgatggttttgttgtaaaaggaggtggtatataagagcatgtggtcactacctctgaggctatcattttgtagtaacctataaaagtttgcagcttgtatctaannnaaaaaaannaaaatttaaaaaanaaaaaattatttttaaaacaaaaaataa

SEQ ID NO: 35945 - DNA, 261 bp, Gossypium hirsutum
  Clone ID: LIB3148-012-Q1-K1-H7
aaaacagaaaaaactagtaataattttatgaaacgactttgattctaacctttaacgactctatggatatgtcaaaaacaccatgtaatgtattgacctccgtgggggttctctacttttctccattcacaaaaaaagaaacaatacaaagtagttgactacaaaagatacttaaaacccaaaggttggaaagtgattccatcatccaggtacattcatcataacccagtattttttcccaaacctcaagaattcgatcca

SEQ ID NO: 35946 - DNA, 422 bp, Gossypium hirsutum
  Clone ID: LIB3148-012-Q1-K1-H9
cccacgcgtccgagcgtaaaggcactcctgctggtggtccacttgctatcccacataatcacgggttataccctacaacgcaaccaccgccaatggctgttggcctgccaccatccttcatccctaacggtgtagggatccacggcaatggccatgtcaatggagctgtcgggccttggttcaaccatgcttgatttctagggctacatgatgtatttctgccccatagagctggttaacatctctcatttctccatttgacgagatatcctattttttattttatttttctttttttggcatttttgctgctagaacttttggaagcacatctctgggaaagaaacaataaaaaggggggggggggcgcaaggcatcccattccccgttgaaggaaagggttgtgggtaagcatctgctga

SEQ ID NO: 35947 - DNA, 366 bp, Gossypium hirsutum
  unsure (1)..(366): unsure at all n locations
  Clone ID: LIB3148-013-Q1-K1-A1
ctgactcgtgacatgttaaggcgggggactatatgccagtgggatacgggtgcagatagcggaggaggtactactgctctggatcctgaaacatgtataactgttctcaaagaggcgaacggcgctgtatatgagacactgttctgtttgaaaataactgcggtcattacttttatgttatcgatggaacacagttatgttaattttgggtcgaatgatggatatgatctgtgaaagtgcttggtgctctgtttccttccctgtaagggttgcaaaattgcaatgcatgccctttggttgtgtttgggaccagggcttttttgtcagattggaaatggaaaaaaggnagtgcaggtttattccaat

SEQ ID NO: 35948 - DNA, 414 bp, Gossypium hirsutum
  Clone ID: LIB3148-013-Q1-K1-B4
cgagtttatcttaatcgtgttaccattgattggtgaactctaattgtcaattgtttgatagatgaagggtataaagaagtcccttgtcgcagggttatatggttttcattttcaggatcaaattttgcacggggccgagacgaactaagaggacatatggtataggaaagaggcccctaagtttatagagtgtggattcgttggatttgtgatgaacaagttttgggttcttgagcattaagaatttaaaacagttgattattttgctgtctgtttgactgtgcttatgtctattaacctttgatacatctttagtggtctctaaaaagaatgcccgtgatgcaatttctaatctcctttggatacttttcagacttacattaaaacttcatgccaaaatttgatttgatgttg

SEQ ID NO: 35949 - DNA, 415 bp, Gossypium hirsutum
  Clone ID: LIB3148-013-Q1-K1-B8
aaagagacacttaggctccacccaccagctcctctattggtcccccgagaaacaactgaggactgtgttgtcggagattacgagatcccggccaaaacaagggttatcatcaatgcgaaatcaattggaactgatccgaaatattgggaaaaccctcatgactttcaacccgatagattcatgaaaagttcagttgatttcaaagggcaacatttggagtttttgccttttggagtaggacgaagaggttgtccagggatgagtttcgcaattatgcttcttcagctcatggtggcaaacttcttatatcggtttgattgggaattgcctgaaagaatgagtgttgaagacgtggatatggaagaagaattagggatcacagtattcaagaaaactcctcttttgttggtaccta

SEQ ID NO: 35950 - DNA, 224 bp, Gossypium hirsutum
  Clone ID: LIB3148-013-Q1-K1-B9
cctggattcatcatgtgactctatcgggtcataggttgctctcagagttaaactatatattatatattatactctttaaaattttaggctgtttgtggattgttgattgtataattgctttctttgattatgttgattttgttggccttccaacacgaatactcgccacaacaataccttgattaatctatataaatatgatgttttaggcccttaacgggatg

SEQ ID NO: 35951 - DNA, 339 bp, Gossypium hirsutum
  Clone ID: LIB3148-013-Q1-K1-C10
tctaaatggactctagagtgttttgttagagaataaaccaattgtcgggcttttaaagcgttttaagttaatggttcctcactttactatgctacagtttttgtctataaatataattttgcttttgcaaaaaaaaaaaaaaaaaaaaaaaaaaaaaaaaaaaaaaaaaaaaaaaaaaaaaaaaaaaaaaaaaaaaaaaaaaaaaaaaaaaaaaaaaaaaaaaaaaaaaaaaaaaaaaaaaaaaaaaaaaaaaaaaaaaggggcgccccttttaaaggaccaaattttacttccccttgcttgcaaagtaaaactttttttttggggcccccaaattta

SEQ ID NO: 35952 - DNA, 408 bp, Gossypium hirsutum
  Clone ID: LIB3148-013-Q1-K1-C11
agtgaagtagggtttagccaaagttagagggcatttaggtcatctatacagcccaccaccctcccctttttatatatagcttcgttgcttcggctacgatactttcctcaccggtttgccgcatattgtaattagtgggccctctagatttctgtttttccggccacagtgggccatctagattttgggcgcttttttttctctgtttttttactaatggcttaatagtacataagaccctaaattattccaaaataatcaatcgagtctctatgaactttttcatccaattacacctttgaacttataaaattgaccaaatcaatcctttgactgatattgaacattaatgatgtggcactggtatgctagaaaaaaactaaaaaaaatcaagaaaataaaatttat

SEQ ID NO: 35953 - DNA, 251 bp, Gossypium hirsutum
  Clone ID: LIB3148-013-Q1-K1-D12
caggatttaggcgaaagataccatgtaagtatatgcaaagaattcaacagaaaaggaaatgattgaaatgaattgagaaaattgatttattattgtctattttgatacagtttatcaagtgtatttatatacaatttacaaagggaaaaaaaaaaaaaaaaaaaagaaaaaaaatataaaagataaaaaacttaaaaaacaaaagcatgcaaaattataggtcttatatagtgaaaactaaatttaatgcg

SEQ ID NO: 35954 - DNA, 409 bp, Gossypium hirsutum
  Clone ID: LIB3148-013-Q1-K1-D5
cccacgcgtccgatgaaaacttgacgtgtttgccggctgatgccggtgccataaggagtatgattagtgttccacttgcaggatttaacagcaaagatgatctttataacttacacatgaactgttgtcttcttttacggatttggttcagaacaacctagtaaacgtaacccttgacgaacattccttgcttggcttcctcggaccacccttcacccatgtacttgccgagttgagcgagagagttggcctttgccgaaacaagcagcacatcctgagccaccttcacgttctcaggtccgccttcccatttctttaggcaagtattttgaagggctcttgcatatgagaatgacacatgccatggattcggagcaaggtagcctcaatttcagactgcccaccggac

SEQ ID NO: 35955 - DNA, 243 bp, Gossypium hirsutum
  Clone ID: LIB3148-013-Q1-K1-D6
gttttattcatcttttagtggcacaaacacaagcttacagcagaaaataagctggagcatcagaggtaggcactaaaacagagtggatcaacactgagtgaagaacaactcatttttagaagagttcatctcgttgtaaaccctaaataaaaaaaataaaaaaactgggacagcatatagaaactccatcttgaagaaaacgcaatgttattggctcacccaaatgtaacacaagcgggcggc

SEQ ID NO: 35956 - DNA, 207 bp, Gossypium hirsutum
  unsure (1)..(207): unsure at all n locations
  Clone ID: LIB3148-013-Q1-K1-E1
tggctaagatggctatggcagacagtgatggatcgtcttggcagacgttagatatgcttattaatgaactatgcaacaagaagcaagacgtccgcctttaaaattgtgttcaattccacatcacacgtgagagtcgtgtacttctttcttttttgtgcgggtgtggtcctaatttcaataaatgaagatcagtgtttctatggcnna

SEQ ID NO: 35957 - DNA, 407 bp, Gossypium hirsutum
  Clone ID: LIB3148-013-Q1-K1-F11
caacacaaggtctggtggaccaaattctatgtcaagggaagtacaccataacaaagtagtaccggcatcgcctcatcaaaatgcatcaatgctaccaatggatggtaaccaggttggtttgaattcttatgggaatggaatcataaagacaaatgggtttcatgaaaagggtgtaaatgatgttgaaaagccaaataagtggagaaagcataggtactgttgctttggtttcaattcagggtaggtattagcctccacccctgaagaagactgaccttagatggatgaaagtaaggcatttcattttaataagacctaatagagtggattttgtaacatcttatacaataataaatcactcctagttttttcggtgatttttagtatatggtgtaatatgttgtaat

SEQ ID NO: 35958 - DNA, 410 bp, Gossypium hirsutum
  Clone ID: LIB3148-013-Q1-K1-F12
ctttcttgggctacaaggcaatgttctaagggttcattgagccaaaaaaaattgagctgaattttgcagatattgatggactaagacgtaagctttccaacaagctttccgcgagcagggatggcaacgaaacagaatgggaggtgggagagtgtctaggcatgtggtggcgacatgatttcgaaacactgttgtgtccctacttaccacccaccgttaaaaagcccaaggagtgcaccaaactctttcttgtccggttgccggagagtcggaaatttatcgtacccgaaaacctaaaattgcttgcggttccgttgtcccaggttcatgaaaatcacaagacatatggaacggtaatatcaggagtgccgcaattgctgtccaaatactccatcaacattattgatatt

SEQ ID NO: 35959 - DNA, 337 bp, Gossypium hirsutum
  Clone ID: LIB3148-013-Q1-K1-F2
aggcagcatctgctggcacccgttataatgtaccgttaatcaactctctggtgctttacgttggaatgcaggccatccaacaactgcagtcaagggtacctcatgcacaggcaacagcaaacactgttccgatgtctgtgttcttggttagtgctgccttggatatcttccagagtctaataggggaccttgatacggaggggcgttatcttttccttaatgcaattgctaatcaattgcgatatccaaacagtcatacacattacttctccttcatcttgctatactcgtttgctgaagcaaatcaggaaattatccaagagcaaattacaagagt

SEQ ID NO: 35960 - DNA, 410 bp, Gossypium hirsutum
  Clone ID: LIB3148-013-Q1-K1-F4
ggaatcctgaaacctaatttacgtccaacaaccaaccaagcaactaaaacgatgaaaatgacatggattaaaactcaaccaattatgtcgagaacctcgacacgaaacttctaacaaacgaacgcctaccagaaaatcaacaaactaactcgaaatagcaggcgaaggaccaattttcttagtattcatgcctaagggaaagagatcaatgacaatttaacagaaaattcaagtgaaacagtcagagaaatcccaatttaaatacacaaatggaaaccaacagaacttcgtagaaacacaagactttatgataaaacttatacagaggtcttctaacaacgcattgaacaacttaggaccctcaattagttttggtaaccacatgtcgatcacaatcaaaaagaaaaatt

SEQ ID NO: 35961 - DNA, 441 bp, Gossypium hirsutum
  unsure (1)..(441): unsure at all n locations
  Clone ID: LIB3148-013-Q1-K1-F6
cacgcccgtccgattggtctttggttttttggttgcgttnngtggtttgttcgaaggggttannagaagttatttagggaagggaaagagtggtttagggattgcatgggangagtanttaaggggtgggcggcacnagcagcccacccatcgggttattaccccgaacggtttgttacccgaatgaagnccgcctcggttattctggtacttgactcggagcgatggatgaaggctgaggaaagaaccgctgatctcattgcctgcattcagcccgattcaccctcggaaagtcgccgtaatgcggtcgcggattatgtacaacgcctaatcgctaaatgtttcccttgtcaggtgtttacttttgggtctgtgcccctcaagacgtatttgcctgatggggatattgacttaacagccttcagtaagaatcaaaatttg

SEQ ID NO: 35962 - DNA, 308 bp, Gossypium hirsutum
  Clone ID: LIB3148-013-Q1-K1-G1
aaaaaaaaaaaaaaaaaaaaaaaaaaaaaataaaaaaaaagaataaaaaaatacaaaataaaaaggggtacatcaaaaaaaataaaccttaatgtctaccttaatgtgcggtttcttgtttttcgtgtaggactgtcccctgtaatggcctcctgaattatttctactgtttggttaccgaaaacatttatgtatcgcaactttttgaattgactgagtatacctatctgagcatcttgcttaataaataagaggcctaaatagctaatttttcaaaacattttcccactctgtatgcccttttggac

SEQ ID NO: 35963 - DNA, 330 bp, Gossypium hirsutum
  Clone ID: LIB3148-013-Q1-K1-G10
cccacgcgtccgcccacgcgtccggtttgtttcaaggacccaccattcccgtgggctgcattatcattttccgcagttggtttccttgcactctcttatgtgtatgcaaaaagggacaaactttttagaaacaagaggaagcagttttgatagttaatgaagcaaagtctgtatcatttaaactcagtagaacacatttattcctgtgcgagtggtaagtcccaagattgaaacttagttttactccggactttctgaaaatttagggcaaattctgttttgttgattttcctaacttcataatctctcaactcatgctatattttcctt

SEQ ID NO: 35964 - DNA, 354 bp, Gossypium hirsutum
  Clone ID: LIB3148-013-Q1-K1-G11
cccacgcgtccggagacggcaatgcaacgggttctaaaaaggcatatatcaacaggaaagccccctgatgttgctcaatggcggatagactacaatgaccgacccaatgcggaatttataatgaaatcaaagaaaaatgctgacttagtgatcaagtctattgacttcttccaaagataattaaacctgatgaaatattacattttgagtaatgggagatgaggggaaaatgtatgatttgagttggaaagatggcttcaataatagtgtcttgggacagtgttggaaattaaaattttatgtactttcactgttgtttcggtttaatgaaaacgacttgactgactatatgac

SEQ ID NO: 35965 - DNA, 129 bp, Gossypium hirsutum
  Clone ID: LIB3148-013-Q1-K1-G12
ctcaattagttaagttgtgtagtttgtagcttgatgtttcagtactcatcaaagattctgtgacgcaagtctgtcatcttactttgctcctatctttagatgttatattttgctctggttttttgtggt

SEQ ID NO: 35966 - DNA, 441 bp, Gossypium hirsutum
  unsure (1)..(441): unsure at all n locations
  Clone ID: LIB3148-013-Q1-K1-G3
aattncngggaaaaataatattaatatttaatagacatacatataaattatccaaaataatgaaataactttaaaaaatataccttctgctgctattttctacaaacttttgaattttaatgccatcttttttccgtcatgtaaataacaggtctatgaagctcatatgatatagaatcgtgtatatgatatatgcacaatattttcatttaaaagcacatttattatctctttttttccatcattataaataattttcccctttacatcttttcgaatctccatttttttcttttgcagttgagatgtttcagttttggattcaacttcttttcctttgcttgttactacaacttcaacagctcttttaacatataaacaaatatttcgttagtgtaatttttatatatcaatattaaaattacaatataatctaaatag

SEQ ID NO: 35967 - DNA, 406 bp, Gossypium hirsutum
  Clone ID: LIB3148-013-Q1-K1-G4
ctgaatgattggttatttttataacttggattaaaaagattttaatcatcaaatccaagtgaatactaaatggaaatcttaagtgtgtaccttgtagcattgattttattagactgtaagttgcaatagtatttgctgaaattagagtaatttgaattttttatggaactttgttttgttgcttacagatttagtactttccaacaagctggttttgtatgatttggaaaatcaaaccattggattgagcacaattgtgagtatcatgttacttttcctttcacgattactttataaattttgtactaattagtataaatctcaatgtattattattgtttcttttgctttataagaggtgttatctctctacaattaccttagttagaaaatttattttatgaac

SEQ ID NO: 35968 - DNA, 175 bp, Gossypium hirsutum
  Clone ID: LIB3148-013-Q1-K1-G6
aaaacactataacagattctgaccatgctctcctaccttcttgacctgtaagtccatttccacaagctcgaccgaaaaaaaaagacgctttcgaacttttttatctcatttcttttgtatctttgtgttgtgtacataaaaatttgcagaaatgaagtgtaaaaacattattctt

SEQ ID NO: 35969 - DNA, 328 bp, Gossypium hirsutum
  Clone ID: LIB3148-013-Q1-K1-G8
gccactcctacgcagaatactatggttgatttgattgataatatcacttatatctgcagggggacttgttgaaggactaattacatgtcttccaacatatactccatatgagactcgatacgaggtgtaatgctaggttaaatgatatgctttacgaagtactatacaacggtcaatgcgacagatgtagcagataatggaattcactgatgtcttcaataatctaatccatatgcagatctgcttgttcttgtgaaagtgcatttgaaagacaattgtaataccaatcattatgtgctcctatttgatccgttaaaagggcggccgc

SEQ ID NO: 35970 - DNA, 192 bp, Gossypium hirsutum
  Clone ID: LIB3148-013-Q1-K1-H11
ccacgcgtccggaaaatcaaggaagatagatgcttagttctttgattaatcattaaagtttctgatgtgaacaaaaaaaacaaaaaaaaacagtgtatcggtggagttcttcgtttgtttgccatggttgatttgcaggattcctgcaagggagatatattagttatcataaaaatgtttatttcaatctct

SEQ ID NO: 35971 - DNA, 410 bp, Gossypium hirsutum
  Clone ID: LIB3148-013-Q1-K1-H4
gcgtacgagcaaacaatccagtcatgcattccaagtttaaacttgtggaactagacttgttctttgtaagagaaaaagtggtagatggttcgctgctagttggtcatgtttctgggcaagatcaagttgctgacatgctgacaaaacctttggctgtagggttatttgacaagtttagaaagagacttggagtggcctccatagcagaggatattatgcaaaagcaaggaacgtcgagaagcaggagccatgttaaggataagaaacagttagttcaaagcagttagtcagttagtatcagttagctgttatggttagcagttaataaatttgtatattaaatacccagttgtaagtatgcttatgatatgagaaaatcaataagaatcagtccgtatttttcagatctt

SEQ ID NO: 35972 - DNA, 395 bp, Gossypium hirsutum
  unsure (1)..(395): unsure at all n locations
  Clone ID: LIB3148-013-Q1-K1-H7
cccacgcgtccggaaggaacaaaaattatttagctattttggccgcaagattgccatgtagttactcaaagaaggcagatgctactgaggatttgcaagaagccatggaggtatttttctttggtcaaacatggagtgataagtaaagttttcttttgttgtttcaccactacggaaaattaaggtgctgttgtttttattattagactggaaataaggaggacattgaaataaggtagccaaaattttgtcacctgtcactaatatacttgtagagttcaatcaattcaacgccgcaagaaaatggaagcgtatgtataataactgtatttgtagtactgatttttgttatataataataaaaggaatatatgttcttttcccnnnnnaaaaaa

SEQ ID NO: 35973 - DNA, 307 bp, Gossypium hirsutum
  Clone ID: LIB3148-014-Q1-K1-A10
gtggcacttatttaaccaatcaaaatggatgcccccacaaaataaatgacaatgcctggccaccatagcctcattttgcaaccttcaccacgaaatgttgttaaggtattcaatacatgatttgtttacaactaataaggtttgcactggtttttattgattattgtgtgggtgatttgctttaaactgtgattttatatatatacaaagtttagtagtatattggagaaaaaagcatgggaagatatttttactatcaaagcaaaatgattattgtggcccggcattgtaatttatttttgggggg

SEQ ID NO: 35974 - DNA, 372 bp, Gossypium hirsutum
  Clone ID: LIB3148-014-Q1-K1-A7
cccacgcgtccggtttctttgcaggatgaagagctaagttttctgctgatggatatagtttagtcgtgacagttattgggaaaaagggtgagggtattgcaaaaataggctttagtttttcttcttcttcttcttcttcttcttttttttttttttttttcttggttgtattaaaatgggcgtagctttgctttcccttgcaactttctttacctattaaattagtgaggttgcagttcatgtttcatttggtgaccgagtaaatcttgttgttgacatatcttttttttcttctttctgctacttagaaagttgtaaaattttccttggttcctgcaagttttgtgatacttgattgcaagatcaattcat

SEQ ID NO: 35975 - DNA, 317 bp, Gossypium hirsutum
  unsure (1)..(317): unsure at all n locations
  Clone ID: LIB3148-014-Q1-K1-B1
atttttattggcagggttctatcttttttgttatanaagggtgaaaattatattaaaaaaaaaaaaaaaaaaaaaaaaaaaaaaaaaaaaaaaaaaaaaagggaggaaaaaaaagaagaacaaaaaaataaaaacaagtgcaaacaacgggggcgtgccttttttagggcccctttttttttatctcttggccgtttttttaccacgttttttcgtggcacccccttgttgtaacccttctgaattttcaagtaactcgcctttcttaaccctgctgttttcatagcaaagaggcttgcaaaaagccccttttcaaa

SEQ ID NO: 35976 - DNA, 328 bp, Gossypium hirsutum
  Clone ID: LIB3148-014-Q1-K1-B10
gttagatcatcatcagcctagagcttctcatcaaatggcaaacttgaattttagtgtagctgctgtattttgctttaagtttctttttcccttttcattgtagtcgaagacttctatcttgttttgatctttagttagaattacttttgaggtttggctgtaacttttaggcaattagtaatcgtacgctagattgtcgatcacctagagaggtggttgcgtcttttaacattctatgttttttttggcatatggatctcaagttcgtaggtaactttcaaggggtgccaatgcattataggttattgaacttcttattttatgcttt

SEQ ID NO: 35977 - DNA, 134 bp, Gossypium hirsutum
  Clone ID: LIB3148-014-Q1-K1-B11
cccacgcgtccgataaaagtcaggcaaaagcaatacatgccaaagtgtaatgcctagcagtgcagcatagatgaaccgattaatgggaacacacaatcatttatttgacataatattacaatatattcataaca

SEQ ID NO: 35978 - DNA, 271 bp, Gossypium hirsutum
  Clone ID: LIB3148-014-Q1-K1-B4
gagctgatttgcagaacctgatgaatgaagcggccattcttgcagccaggcgtgacctcaaggaaataagcaaagatgaaatatcagatgccctagagaggatcattgctggaccagagaagaaaaatgttgtggtctccgtgagaagaagaaattggttgcctatcatgaggctggccatgctttagttggtgcacttattcctgaatatgatcctgtggcaaagatttctattatttctcgtggtcaagctggtggccttacctttttt

SEQ ID NO: 35979 - DNA, 155 bp, Gossypium hirsutum
  Clone ID: LIB3148-014-Q1-K1-C3
cttccgtttgtcctacttttggggtgggttaaataacaccgtcgtagtcttaggtggccaatatttaccagattaaagtaatcattaaaattacatttattagctttaaaattatgagatggaatacgcatggtagtattatttatattaatttg

SEQ ID NO: 35980 - DNA, 422 bp, Gossypium hirsutum
  Clone ID: LIB3148-014-Q1-K1-D1
gccacactcacacttttgttttcttgtctatatcagtagtggggctttgagtatcccttcagaataataacctctttaaagaaaaagcaatcaagtgtttggtaatttcaagtctttgggtctcttttgtctgtgattactacgcagcagaaatagttgtcagtagaaaccccaaaaaaaattattaaaggaaacaatatatggttgtgcatgcagtaactattacctaaagagcaaactttcttgggcacatggcggttccccttgtaattaatgaaaagctaaagacatattaccctctttttttatacattttacaaaagtcatcgtgaaacgggctatggttcaagttcaacattatgaacacgcagagcaaagtccctttaggaaaaggcaaattgttttgagagaaagaaaatgca

SEQ ID NO: 35981 - DNA, 299 bp, Gossypium hirsutum
  Clone ID: LIB3148-014-Q1-K1-D10
cccacgcgtccgcggttttctactccttgtttgtcttttcttttgcaggtgtggtcagaggcgtggagggcagaaggtatgggcgatggtatgggacgcctgtttcaggtgttgtgcaccctgaggccagcacatggaggcagcggcgcaaggcttgtggagctagggttgaattgttgaaaagttttaagatagttgggttaggattttgacttgggcttgggtattgggttaatgggctgatctggtctgtattttgatttgtaaaaggacggtataaatggacattttgatttttt

SEQ ID NO: 35982 - DNA, 180 bp, Gossypium hirsutum
  Clone ID: LIB3148-014-Q1-K1-D11
accacacaccatgcgagaaaggttcatatgaatactggcggaacgtttgacctatctgaaaatatgaatactatgggatgatcagatattatatgcacgcccgatggcaaagctgaagaggctcagataaatgcgtgtgctgtactctaagtatcatgtactttcttgggaatatcacat

SEQ ID NO: 35983 - DNA, 379 bp, Gossypium hirsutum
  Clone ID: LIB3148-014-Q1-K1-D12
atccaccgatctgatgcagtgtactctggatgaagaaatgcctacaaaccggcttaattctcgttttcgtccctctactatgttgagatttgagatttcgacatagtagagagattaaaaccataatcatactgtcctcttatattagtaacaatgtccatgtcaatcgagttagaattcaattgacttttgtctgtaatatttgtacaaatttcattataaaaaaaatgttaacactatgttttgtacttatgaatagtgagagtaaacattgttcccaaaaataatgtaagtgaaaaatgtattttttatgctaattaaaaaaaaatattattattttttttattattttatttattattatatattattttttttt

SEQ ID NO: 35984 - DNA, 147 bp, Gossypium hirsutum
  Clone ID: LIB3148-014-Q1-K1-D8
gcagctgctaaagcgaaagcaactgtgtaatttactcagagtttaattcggttggtttattatcgtataactattcgtaaaagtttgtattaaaaaaatttggaatttataatactagtattttggtttcaatattttagggactgg

SEQ ID NO: 35985 - DNA, 411 bp, Gossypium hirsutum
  unsure (1)..(411): unsure at all n locations
  Clone ID: LIB3148-014-Q1-K1-E1
ccaaggcgtccggacctggagaggtttttggaacttaacaaaccccggggccgttagccacaacgaaatcctcgagaatgtacaagacttacatcgaccccaacttccagtggacgaacttcacattggaagaacaagccaaggtaatcgtcgcccctcgaagcaataacgaaatggatgcatccaagttgaagaaagagttccacgagttgttaccgatcaaagaatcattgattaagtacgtcttcgaacccaacaaacgaacctaaacctatgaacccagttttctcagctatagaacccgagttttgacccctctaacttctgcatttactataattaggttgtattggaggttacttagccattccttttactaaagaaaactcnctttaggtgtatttttttttt

SEQ ID NO: 35986 - DNA, 278 bp, Gossypium hirsutum
  Clone ID: LIB3148-014-Q1-K1-E12
cccacgcgtccgcccacgcgtccgcccacgcgtccgcccacgcgtccgcccacgcgtccgggccaagtttctgatatagtttttgacacagtacagggaaaagaaacaaaagctagataatttatggatgtatattgtatactactcttgtttcataagtaatttccaagcctgggagttccacaatggaaccctgcaacttggaaaataaacatgtttcaagacatgtttgagctccagtttcatgtttcccaaaagaaataaaatatttttttatg

SEQ ID NO: 35987 - DNA, 248 bp, Gossypium hirsutum
  unsure (1)..(248): unsure at all n locations
  Clone ID: LIB3148-014-Q1-K1-E7
ccggnttggaagacccgggccgaccgacgcgtacgcccacgcgtctcgcccattcgtgacgttcatgtcttacgcccacacgtccagtcctcgcgggggggccatgtatctgatatagcatcagacacagtccaaggtaaataaacataagctagataatttatggatgtttttcgacaactaccctttgattataagtcacatccaagccttggagttccactatgaaacccttcaacttgaaaaat

SEQ ID NO: 35988 - DNA, 199 bp, Gossypium hirsutum
  Clone ID: LIB3148-014-Q1-K1-F1
cccacccttccgaaaaataaaaaagggggttttagccttgctttttttccatcccaaaggggtggaaatgttgaacagggattactttatccagcctatcttttttgcctagtgtcggcttcacaatcggtggacagatacttgagcttccccctgagcagtacattctaaaagttggtgaccgagagctagctcaatg

SEQ ID NO: 35989 - DNA, 428 bp, Gossypium hirsutum
  Clone ID: LIB3148-014-Q1-K1-F10
ggaagtcagctgaatcagaactaaacaaaggtaatggacgattaaagtactggttagacgaatgggtggatactcaagtcactaaaagtaaagaacttgaagatttggactcggtttggacctcgaatcgcaagcccatggaggaaaacagagctaaacatctaaggctgaagacttctccgagaccatatcattataattcggaaggattggagtctccggtagtaccagttccacgaagatcgtttcataagaagcagtgttctttgggagaagacaattcttttccaacctctcctgtagttccaccttacatggctgctacacaatcagcaagggcaaaagtaagatcattgagttcaccaaaggtaaagcctggaagttttgaaactcagtctgaaagctactcaccatataagaacaaactg

SEQ ID NO: 35990 - DNA, 434 bp, Gossypium hirsutum
  Clone ID: LIB3148-014-Q1-K1-F12
gccctgatgtatcgacttacttgtacaacaggaccgaagctttggccggtgactggtattgcgttgccatgaactgtggagctcacaactacgctagccgaccaaactgctatcgatgtggtaccataaaaaccgactatggtggttacactgtgatggggtctgaaagcagtgccccacctggttggaaaactggtgactggatgtgcaccagatatgggtgtggagttcacaattacgctagcaggcttgaatgcttcaaatgcaagacaccaagggattttggtggtgcttaggaaaatcatgaataacatgttttgaaaaagtttcaatatttttcattaacatgtttctgtttttgttaacaaattttcatttttaatagattggatatgtttttattgattatccattggtttatggtctatttttac

SEQ ID NO: 35991 - DNA, 429 bp, Gossypium hirsutum
  Clone ID: LIB3148-014-Q1-K1-G6
gtggatatttacaggaaaaagtacaaggcaaagcaacatggatctgttggggtatcgtttaatgttatttggtttgaaccagagactaattcaactgaagacattgaagcagctcaaaaagcccaagattttcagcttggctggtttttggacccattgatgttcggagattatccaagttcgatgctaacccaagtaggaagctggttgccgaggtttactaaagctgagtctgctcttcttaagggatctttggaatttgttggcgttaatcactacactaccttttatgcaagagaaaacaaaactaatctgattggtagtatactaaatgacactgtttcggactccggggcctttacattacctttcaagcatgggaaacccataagagacaaggcaaattctatattgttatacataggaccc

SEQ ID NO: 35992 - DNA, 250 bp, Gossypium hirsutum
  Clone ID: LIB3148-014-Q1-K1-H10
gtaattattgggatatggaacaaagtaacttaatacaaagaaattttacatttgattttggaaaaaaaaaaaaaaaaaaaaaaaaaaaaaaaaaaaaaaaaaaaaaaaaaaaaaaaaaaaaaaaaaaaggggcggcaaaaaaaaaagaaaaaaggtgtccgttcaagagaatgcaaaataaaggggggtgtgttgtgaaagctaaatttaatttacggggcgccgaaataaaatgaattgactgggaaaa

SEQ ID NO: 35993 - DNA, 258 bp, Gossypium hirsutum
  Clone ID: LIB3148-014-Q1-K1-H12
tcgacgcgttcgcccacgcgtacgatttatttaggcctcatcctagcttataggcattctgctttgaatgggatcacaccggttcctagtttccactatgagagattatacaagcatgttatcaggtagagtccaatactggagtacaagactgtcttgttcattaaggcagattatttgattgcgagatatttatacaaatgcattatccaccggatgtccatctttgaaaaggtataaatgtataatctttttatt

SEQ ID NO: 35994 - DNA, 427 bp, Gossypium hirsutum
  Clone ID: LIB3148-014-Q1-K1-H4
tatggacccacgtataaatcgtgcggatagtattctacctgcaatggcgacaaacatggcatagcggacaacctgcttcgccaccaccacccttaccatcgacaacaaatcggctgcctcatcctcctcgtcgcaacctcaagaagccctcgtcctcgaacttcgccctaggaaaaagagagttacctggaaagaaggaaccgttgacaacgaattcatgaacaagaagagctccaagatctgctgcatttaccacaaagaaaagcccttcgatgaagacgacagtgatgatgattgccatgatcatcatcaccatccatcccacggcaacgatttctccaacgatggccgcaggctcaaccctagcaatagcacctaatttttttgttttgaatatgggtttattaccccttattattgatgtaat

SEQ ID NO: 35995 - DNA, 292 bp, Gossypium hirsutum
  Clone ID: LIB3148-015-Q1-K1-A12
cccacgcgtccgaaaaatcatggccaaagaaagaagtttatggtgttatctgctgaaaatctataattttacactataattgttggtctgtgattcctttttacactataattttagcgaatcaacaaattttgaatcttcatcttagaagttaatacgaaatttgctcatttaaattttcatcgcttatgattttgtgtaattagggaaaacagtaagatcaaaataatgaagaatatttttctttaactcaaattatatagaaagcccttggttttcaaaaaaaaaaaaa

SEQ ID NO: 35996 - DNA, 248 bp, Gossypium hirsutum
  Clone ID: LIB3148-015-Q1-K1-B2
cacacgcgtgctcccactcgttcagacacgcatacggttcgatgcactgatggatgacatcaaggatgtctaggttcgttgtacatacatccataaacgtgtgtgttatgggatatgaacggtgacggaggaaaaacgccaactgagtatgctatgggacctgtaagtacaaaaaaaagatgattagggtaaggaggtactgaaataaatgtgtatgcctaaagctgatattacgagtcactatgaat

SEQ ID NO: 35997 - DNA, 369 bp, Gossypium hirsutum
  Clone ID: LIB3148-015-Q1-K1-B4
ggagaaatctgacttagctaatggagatctaacaacactcgaaactccaaatgattggtttagggagatgcagcgaagattaaccaaagcttaggaccatttttattattctttctttgtgcaggcctccaaaactggaggcaatttgctgttgcaatgattctctgtaaggcccgagtattttccgtccttgacaggagaatttgggttaccaagtaacttttgtaaattttgtttctaagtccaaattaattcttaccgaggaggaatgtaggcatatttccactgcccctcaaaatttaagtctgttaggttggttattctttttgtagtccatgaataaaatgcagagaaatgccttcttttttt

SEQ ID NO: 35998 - DNA, 196 bp, Gossypium hirsutum
  unsure (1)..(196): unsure at all n locations
  Clone ID: LIB3148-015-Q1-K1-C2
aaaatttttaacggtgaggtaatttatatatcatatgcgtgactgtacaaatgttgggatggagagctgttgatgtagttgaggcctgagtttttgccctctcaatgtatgcttaatgacattttccccctaaatgcgcaattttctttgtgttnaaaaaaaaaaaaaaaaaaaaaaaaaaaaattttatttggct

SEQ ID NO: 35999 - DNA, 255 bp, Gossypium hirsutum
  Clone ID: LIB3148-015-Q1-K1-D10
tccatctgggcgcggcccaagaccggttagacttgatctcgcgcatggatggctatgaagcaggagcatactacatcagcaggattgaaggtgatgttaaagaaaaaaaaaaaaaactcaatttatattcatatggtttttttacatgatgaattcttttattgtcaagtcttatcacaaggatggaaagaatgaaaaaaaaaaagggggggtggaagctgaattagacacatgacgggttagtttacaaagaaa

SEQ ID NO: 36000 - DNA, 314 bp, Gossypium hirsutum
  unsure (1)..(314): unsure at all n locations
  Clone ID: LIB3148-015-Q1-K1-D3
cccacgcgtccgatgacaagatctaatttaggttgttatgcatgggggttcttggatgatacaaagaaatggcatgatttggaaaggttgattttatcaccttgtgcggttctacgttagatttactcagttggggaagtttttaacatattttgttctctcagatacagaaattattttcttacatctctttatttgttagagtgcctcaaatatgtagtacatgaaatcaatggaaattttctccattttgctgctcanaaaaaaaaaaaaaaaaaaaaaaaaaaataaaaaaaaaataaaaaaatataaaa

SEQ ID NO: 36001 - DNA, 374 bp, Gossypium hirsutum
  Clone ID: LIB3148-015-Q1-K1-D6
gctccttttgcaggctttcctcgatgatttttgggtgtaaatttaactaaaaacagattgcattttataggggtcttgatttgttgttgtctgagttcattgtgtaaatcccaatttttcctttagtattgaatgaggaacaatagtgttatagttaaaaaaaataaaaaaaaaaaaaaaaaaaaaaaaaaaaaaaaaaaaaaaaataaaataattatattatatataataaaaataattataaaaatttaattatattttaattatataatataatattttattatttattaatatttgggggcgcctttttttaaaatccaaatttattttccccgtttttacaattttatttttttttttttttttcccct

SEQ ID NO: 36002 - DNA, 312 bp, Gossypium hirsutum
  Clone ID: LIB3148-015-Q1-K1-D8
cccacgcgtccggactggtgaggccatacccaaggcgtgcttttaatgatgaagagagcagtttgacactaaatgaacttgggttaacaagcaaacaagaagccctattcctggagttgatctgatcttaataacatctcattcctacacgaatatttgtagaaatttactctgaaatttatttagttttattgaaatatgaagtgctacatggagtagtggaatttcctaagggttgcttggttgcatttggttgatgaaatttcaggagagagtacaattaatatgacttgacgatggtcagtattctgc

SEQ ID NO: 36003 - DNA, 408 bp, Gossypium hirsutum
  Clone ID: LIB3148-015-Q1-K1-E1
cggacgcgtgggcggacgcgtgggtgcggatcattgagaattcggatgtaacattggacattgtgttcttcaactgtctagtggatgcttacggtaggatgggatgctttgcagagatgaagggggtgcttgaaatgatgaagcaaaaaggatataaacctgataagatcacatatagaaccatgattaaggcttactctatcagtggtatgactagccatgcaaaggagcttcgcaatcttgttgagtcagcggcagggtcatctttggggatgccaaagcctgatttccgacaaccagaatattacaggtcatattcctgagatctaatgtatattttcattttttcccccttatgttgtaaatgtacatcagcaccatgagtaaaatgaaatacagatcaccact

SEQ ID NO: 36004 - DNA, 378 bp, Gossypium hirsutum
  Clone ID: LIB3148-015-Q1-K1-E3
agacacgtccgaggagaccattatgtcacctatgatgaattgctcgccacatcatcttgaggcggagctgaaggcgaatatcgagtcaaatcttaacttggattatatcatgccagtttggttggctagctatatttcaagctttacacccactgaaacatcctatgaggatacatataaaatgtgtaaactattgcttgccaatatccttaccaattcactcaatgaataacaaaatgaagtttttgtgaacacaattgtcatctcaagtttcgccaaagctagatcgatttatatacatatcgcttagctgaacttgtcatgttcttgattatacatagtgttatacaaaatcgcgttgaatgtggaaataataac

SEQ ID NO: 36005 - DNA, 406 bp, Gossypium hirsutum
  Clone ID: LIB3148-015-Q1-K1-E7
cccacgcgtccgtattggtttacaggtatcatcatcatcattggatgttggggtagtcccagacggaagtacgatgacggacatatcaaacccgtacggaagagggcctgagtcaacacatcagacggtgcagctatcaccggcggacagagaagcaagggtgctgaggtacagagagaagagaaagaacaggaagttcgagaagacgatccgttacgcctccagaaaagcatacgcagagatgaggccgagaatcaaaggaaggttcgcgaagcgtacggacatagaagtcgaagtggatcgcagtaacatgtatgggtttggagttgtcccgtcgttttgaacttaacctctcctctccagtcttccccagcatggtctagtaatatgttcaattttgaacttt

SEQ ID NO: 36006 - DNA, 195 bp, Gossypium hirsutum
  Clone ID: LIB3148-015-Q1-K1-F10
cccacgcgtccgcggtaatacattcttagcttcatttttttttttttttttggtttaaatgaccttttggggttaacctgattcctctggggctgggccctccctgtgcgagtttttccaccgtctttaatgaaaatagagatggttttcatgctttaaaaaaaaaaaaaaatataaaaaaaaaaaaaaaataaa

SEQ ID NO: 36007 - DNA, 228 bp, Gossypium hirsutum
  Clone ID: LIB3148-015-Q1-K1-G11
gtacccttagcatggattttgctattttagtttattccctttccttaaaaagaaccaacaaaaagaattccatataaagaatatcccctatctttaatatgctacatgtttttattaatcgtttgggtctgtgataattcacaatcattatcgaatttaacaatattttgtatgatcgtattttgtttcgaaaaaagattatataatataaacttatttatatttaaa

SEQ ID NO: 36008 - DNA, 367 bp, Gossypium hirsutum
  Clone ID: LIB3148-015-Q1-K1-G5
ccgtctgcctacaatctatttatcaagctatctaattaactgaaacttgatttaccccgcgtgcactcaacggttcatcttatctaccaacttacatatcttatttgaatgggacacacacattgaaacaaatgcttgtaatatctcaactctacacggaataaatccaacgtctcaaaactgggaattctgctgttagtcacatagacaccttgagcgctgctgtcaacatttggacccacttcccacgcatacatgtcagtcaaacgcctgatcaagctgttcttaaaatgaaaaattacttacgccttcacgcaggagagagacgctctgtgaaagatgggttatcttgtgcctaccaacgttt

SEQ ID NO: 36009 - DNA, 402 bp, Gossypium hirsutum
  Clone ID: LIB3148-015-Q1-K1-G7
aaagaaatgaaccctctgctagggtttacatttttctctgccgctgcagtcaacaagggcgtgtcacggcgtccgtcgttgccccggtctccgattacgacacagaggggaaaaagccaaccacgtcaggtaaacccttctcttcttccctctttccctttttcgttttcgttttaatagattcgtataaaaaataacaaacaaacataaaaaaacgaacaagaacacgaagagagaaaaaagttatataaagtttaaatcaaccttttttatttctgtttctgccttttgatttttctcctgtgtgtaaaaaaaaaggggatacaaaaaaattggaatctttttacactgttttcttctagtttttgtccatttctatggtggttgtttcttttgcgccct

SEQ ID NO: 36010 - DNA, 301 bp, Gossypium hirsutum
  Clone ID: LIB3148-015-Q1-K1-G9
atttttatacctcatggggggggggagataataatctgtttagatatagagtaagggactttgtttattagtttaaattttgttcctttcattttgttcctaattagtttaattaaggatcatcacgttgctgctaatatataacctgggaattaagagctgctttgcaatccaaaagggaatttgatttagaatctcagttcttctttgggatcaaaaaaaaaaaaatattaataaatatatattaattaaaaaattataaaaataaaaataaaaataataaattattaaaatataaatg

SEQ ID NO: 36011 - DNA, 406 bp, Gossypium hirsutum
  Clone ID: LIB3148-015-Q1-K1-H2
cccacgcgtccggctagagtcttggttgccgctccatttcttgcctttgtaactactcatatattgtacctcaacttttatacctttgactatgggtggaacatgaaagtttgtgtagccattggggttgctcaacttctcatttgggcaatctgggttggtattactcaccatccttctcgctggaagttgtgggtggtggtggttggaggggggcttgcaatgcttttggagatctatgatttccctccttatcaaggattctttgatgctcatgctatttggcatgccacaactattccacttacctgcctgtggtggagcttcattagggacgacgcatagtttaggacttctatccttcttaagaaggctaattagtcccatgttaaactaacaatatttt

SEQ ID NO: 36012 - DNA, 259 bp, Gossypium hirsutum
  Clone ID: LIB3148-015-Q1-K1-H8
cccacgcgtccgcaaaatcttctggatgaaagtacaatgatgtgtttcactgcaaaagccatatatatattcatcaaaaatcaaatggagtttcaatatactttttcatggtaatttatatcccttgtatatatgatgttatggagttaaattaccatgtaaaaaatctttggtcatggttctcaataattttatgcaatttttttccataaaaaaaaaaaaaaaatataaaaaaaaaatatatataattaaaattaat

SEQ ID NO: 36013 - DNA, 413 bp, Gossypium hirsutum
  Clone ID: LIB3148-016-Q1-K1-A2
atttttagaaataaatgttaggttaccttttctcttatataaaaaaaaaaaaaaaaaaaaagagaaaggtaaaaaaaaaggaggggggggccccccaaaacaatcaccaaacaaaacactaaaaaccaacgaaaatcatgcacccaaaaagccaattctatcgtaaaaacctgtgtctttttctaacacaatcaccccctggaagacacacttttggggcccccccccatggggccccacttttctcccccttccatcacccggctttacccttttttagggccccttaaaaaacttttcccccccctcttttctcaaaagcaaatagttgaaaccccctcgctaccccaccattaattccttggttaaaaacccctttttcccctcctcttttaattacacaaaaccccccc

SEQ ID NO: 36014 - DNA, 419 bp, Gossypium hirsutum
  Clone ID: LIB3148-016-Q1-K1-B12
gaaacttaatgtaaaatagcttcaaataaatatataaatataaccattttaaaataagtcatgatagaagagtattatttaaaagtaaataaactaaatggactaagtatgaggttgaaatggaattaaaattcggggctttaattgcaaaatttacaaacaggttatagaggactgaaataagatgcgcttaaggcatgagggactgactgggcaatatccccgtcccttatgcgcgtcgttttttgcaggacccaattgaaacgggtttaaaaatgtcgcggtcaaaatataaaagggaaggacccgattgtacttcactgcagaagcgaaggggctgaacatgcaattagccccttctaacaaaacacgcaaatcctcagtaccactgggtcgggtcacgggtcaaacgccaaaac

SEQ ID NO: 36015 - DNA, 406 bp, Gossypium hirsutum
  Clone ID: LIB3148-016-Q1-K1-B2
attatgaagtgctcaatgggcaacagttttgtaagttgaatcaaatccagagttccctgcagaacaggtatgaatttcaactctctattcttggctggaattgtagataagaagaggattcatgtaattttggtttttttataaacgattttctatttataacaaaatttctgaaaaaaaatgctacgtgtggttcaagcaacctataaattatctcttatctagggctataatcaagctgagttgatctcgaataataacaagctcaaactcaagcttgattaaaaacttctggctcattatttgtgattcaaacaatgatgctagaccgaatcggcctagttggatcgggaatcgatcgattattggtttaaagaaatgtaactgaattagttggatcgagatt

SEQ ID NO: 36016 - DNA, 252 bp, Gossypium hirsutum
  Clone ID: LIB3148-016-Q1-K1-B3
attacgcatgggcgaacgcgtatgcggacttttgttcggaagcaatgacagactccttggcagacgcgtttacggacgcgtgggtgttattccctcatataaggcaccaaaagattgaacactgcctacttggctgagttataaaacaatgtacctgtatcaaaaacttaatgaaagaaaacattgccagctatcaaaacaatctatatatattatgttatgtaatggactaatgacgtttatcttgtatct

SEQ ID NO: 36017 - DNA, 203 bp, Gossypium hirsutum
  unsure (1)..(203): unsure at all n locations
  Clone ID: LIB3148-016-Q1-K1-B8
atggagaggaagaaagggatgagacagaggttcacgagggcggattcatgganaagttccgtttcatggaggatggtgttgagtttcaagcactttaattaaattttcaactttgttcttaatttgtctgttgttttttttttaaaatttttgttgttatttgaaaataaaagtttgtactcataaaaataaattagtttatc

SEQ ID NO: 36018 - DNA, 349 bp, Gossypium hirsutum
  Clone ID: LIB3148-016-Q1-K1-C1
aaagctctttcgtaataaataatatacaatttattcaaaaaaaaaaaaaaaaaaaaaaaagggaaggaaaaaaaaggaggaaagagagaaaaaaaaaaaaaaaaaaaaaaaaaaaaaaaaaaaaaaaaaaaaaaaaaaaaaaaaaaaaaaaaaaaaaaaaaaaaaaaaaaaaaaaaaaaaaagggggggggcctttttaagggatcaaattttacttcccgttgtttgcaaaataaaaattttttattggggcccccaaaataaaatcccggggccggggtttaaaaacgcgggaacgggaaaaaccttgggtatcccaaattaaatccctttgaaacaattccccttt

SEQ ID NO: 36019 - DNA, 353 bp, Gossypium hirsutum
  Clone ID: LIB3148-016-Q1-K1-C5
cccacgcgtccgcccacgcgtccgcccacgcgtccgccaacggctgagatccctcagaggagcttcgctgtgtatacaggatagactgcatggtgccgcccgtacagacgccctgccctttgaagtttgaaacacagaagactaggcctacttccctctgtaacgaatggaaagggtagattggtaatttcttaagtgctagtgccgggtactttaggaagataaaaataatgggaaattttttttatttattttactggatttttttattcgtttatttattttataagaaaatttgttgaatatgttttaggttcaaaacgaatttgttgattttttttttcttttcaaag

SEQ ID NO: 36020 - DNA, 335 bp, Gossypium hirsutum
  Clone ID: LIB3148-016-Q1-K1-D1
caatatagaatttctcgttttgctatatgatattatagtgtcttatactgtgaaaattggactattgacataagttacctgaagattagtgttcagcggcttacttaattgttgttattgcataagggcaacttatggtggattggattctttattcttgagtacaatattttgtattaacagtttcttttaacttgacagcttattttctaaaaaaaaaaaaaataaaaaagagaaaaataataaaattaaaaaaccgaaaaaggatataaaaaaaaatctacagaacaagaaagagatcggaactaccacacaaaagggggggcggttttaaa

SEQ ID NO: 36021 - DNA, 397 bp, Gossypium hirsutum
  Clone ID: LIB3148-016-Q1-K1-D12
gaaacttaaaaagattgaattagatcctcctatcatcatttcacaagctaacctgtaaattggcttatttaaccagtgagatacaacgtaatgacactcttgtgcgaaaaaaaaaaaaaaaaaaaaaaaaaaaaaaaaaaaaaaaaaaaaaaaaaacaagaaaagaaaatgatatatacagaataagaaaagaagctctactgaaattacgcacgattcttctagcaggtgaccctcacgtaacaactgatgttgtactggtgttgatataatttgcaaaccttacttttattggtccttttaaaatagaaaatggggttttattaattagatcgtctttaattaagatactcaaaatttatggaaggaaaattgtttaaaaagttattaaattttt

SEQ ID NO: 36022 - DNA, 114 bp, Gossypium hirsutum
  Clone ID: LIB3148-016-Q1-K1-E12
cccacgcgtccgtgttaattatagttcataatacttgtagatatttgaaatcttagcgtaggtttttcgtttgaacatatttggatttctctccgacagctgatttgatacatc

SEQ ID NO: 36023 - DNA, 316 bp, Gossypium hirsutum
  Clone ID: LIB3148-016-Q1-K1-E2
cccacgcgtccggaatgggtgaggaaacgcttgatacaatgaacctggatttgaatctgggtcctactcctgagacagggtcaggttcagtgtctaatgaaggtttgggctgggatgcttcggttaataatcggttcaataggattagagaagctgttcggcgtcgacggtggagatggcagcaggttcaatttcctgctgcaactcagaacctatctgtggaattggatcagctcatggtgaatttggacaatgcatgtacgttacaggcaggtgagggcagcatcattccagaggaaagaacgagtgatgtgcc

SEQ ID NO: 36024 - DNA, 398 bp, Gossypium hirsutum
  Clone ID: LIB3148-016-Q1-K1-E6
cccacgcgtccgcccacgcgtccgatttaacttaggttgatctaggccagaagcagaccggggtcaagataacgcttgcccggtttgaaacactttggaagtgctcctgtatcagtaatgaatcagagcacaatgaatcagagcacacggaaccgtcttctttttttctgttagaaaaaaatatatatacggtagactaactgatatttctatcagttaatgaaagagcccagtgcaaaaaaaaaaatgcatgttgggtctttgaaataggccgaatcattttgataataatcagttcgatctgttttaccgagaaggtctacggttcgagtccgtatagccctatattttcgaattttctattttattaaatttaaatattcattaaatttattaaa

SEQ ID NO: 36025 - DNA, 276 bp, Gossypium hirsutum
  unsure (1)..(276): unsure at all n locations
  Clone ID: LIB3148-016-Q1-K1-E7
cccacacgttcgttcactctaccgttatattttaccaaccgccangcccaacccccgcctgctttaaaagaacgcggggcctcccaaaaacactccacaacccctcctaccttataaatgtatcactacaccacaaataaaatcacactgaacctaacactttttttttgttctacaaaactctatatacagatcacaaacttatttaatcatcaaatattcaaataaacccttgctcaaaacctcatgcacaatttatatataaaatacccctca

SEQ ID NO: 36026 - DNA, 363 bp, Gossypium hirsutum
  Clone ID: LIB3148-016-Q1-K1-F10
cccacgcgtccgcccacgcgtccggtaattgtagattgttgatcagtttatgttctgcagcgatttcccttttgtacttgttgttatgcttacctcatttttagttcatattctaagcttttgatttgactttggattaaaaaaaaaaaaaaaaaaaaaaaaaaaaaaaaaaaaaaaaaaaaaaaaaaaaaaaaaaaaaaaaaaaaaaaaaaaaaaaaaaaaaaaaaaaaaaaaaaaaaaaaaaaaaaaaaaaaaaaaaaaaaaaaaaaaaaaaaaaaaaagggggggggcccttttaagggaccaaattttacttcccggtgtttgcaagtaaaaaatttttttttggggcccccaaaataa

SEQ ID NO: 36027 - DNA, 337 bp, Gossypium hirsutum
  Clone ID: LIB3148-016-Q1-K1-F11
cccacgcgtccgacaagcttttcctgcatcttggaacagaagtgcaactatcctatgatgcgtggctcatgcacggataatcgggaaacacaaattataaacaagtgagcatctgaagtgttaattctactcaatagaaaaagatgataatcttgctagactgccatccgtttacaccccaatttgagtagagcttaaaaacaaagcaatacacatacgtgctaaaaccaatacctagttaagattttaggatctgctttttaattttacaccatcttagtgctatctgtgtttttttttaaaaaaatgcttgcgatagcataaattattaacaata

SEQ ID NO: 36028 - DNA, 404 bp, Gossypium hirsutum
  Clone ID: LIB3148-016-Q1-K1-G3
cccacgcgtccgcggacgcgtggggggaaaaacccgatgaggacactatcgagaacttgatctcgagtggagaaagcgagagttttctccaaagggctattcaagaacaaggaaggggtcagattatggacaccatttctgaaatacaagaaaggcatgatgctgttaaggagatagagaagaacctgattgaactccatcagatattcttggacatggcggcactcgttgaagctcaaggtcaacaactcaacgacatcgaaagccacgttgcgcatgcgagctccttttgtagaagagggaccgaacaacttcaagaagctagggaacatcaaaagaactccaagaaatggatgtgtatagcaatacttgctgcaattttgctcattatagtcatcctcata

SEQ ID NO: 36029 - DNA, 244 bp, Gossypium hirsutum
  Clone ID: LIB3148-016-Q1-K1-G7
gtcctggcaatcctttgttgagcttcagcataccccgggacacttattaccaactacatgggtgactttatttttagagttgatgttgcccaactatgcacacaatcttaggccgatctcggcgtgtgtttgaacatgaaacctacgaatatgactactaccttgatgacaacatctatgtatactacaatgtgtgatgcatctataatgtagattgtacatttcttgataatcgtgagagagt

SEQ ID NO: 36030 - DNA, 355 bp, Gossypium hirsutum
  Clone ID: LIB3148-016-Q1-K1-H4
gtgaggaactacatgtttgggattgaacaaaatggtctttggttgcaaactgaaactatcggaagtgcttgtggtaaacggattggtgttaaccagaaccagttgaccaccagaagaattcgcggaagaaccaaaaataaaggctttctggcactctggtaaaatctctctctgtgtgggtagagatatttatacggccaataagagataatatatgtgggggggtgcatatggatgcacacaacgcggggatatatttggttatggggccccacacagattatagaaactctgatattgtgaaagagcatatagtaggctctctgaaagtttaaagagagctgactctcatact

SEQ ID NO: 36031 - DNA, 388 bp, Gossypium hirsutum
  unsure (1)..(388): unsure at all n locations
  Clone ID: LIB3148-016-Q1-K1-H9
tatgcatcggatccacaagtagtgtatgttgtgaaaggaagtggtgaagtacaaattgtgggtcttcaaggcaagcttgtgttgaacactaaagttgagaccggccaattgtttgtggtgccaaaattgttcatggttgccatttctgctgatgaaaatggcttggaactgatctcaatcgtaacatctactagagctataatgggagaaatggggagtaaaaattcggttttcaatacaagtccttcaattctgcaagtgagccttaatgtgagctcagagctaaatcaacaattcattgagattatggaaactggcaccattattgttaccccatgaacttgtactangtcctatgattgtgtcattttaggggttcaataaaaat

SEQ ID NO: 36032 - DNA, 272 bp, Gossypium hirsutum
  Clone ID: LIB3148-017-Q1-K1-A1
cccacgcgtccgcccacgcgtccgcttaaatatatcataatgttgcttttctttatacccgcccccctttttttgtgtcttgcccgtgttggtagttgatagctcactgtagctctggcagctatgttatcagaatggttttatgtggagacgttcttactagggaatggtattgttttagtattaattattattccagtggagctttgagctgcagcagcatgttgggggcgttaaatattacacaaaggaaaggaaaaactgtttttatg

SEQ ID NO: 36033 - DNA, 399 bp, Gossypium hirsutum
  Clone ID: LIB3148-017-Q1-K1-A10
gatcttacatggaccgagatccagagcttgaaacctaaaatgtatagccgttttgaacaaaactctgggttagagagaaaccctgaggccaaaaacaaaggaaaactcatctcacttggtgactttttagggtttgctaaaacaaaaccagttggagttttgatcaacatagaaaatgctcgttacttggcatcgaagatgcatcttgacgttgtagatgcagtgaccaaaaccttgaaaaatgcaagcttagaaaagaagcaagtcatgattcaatcagacgacagtgcggtgctatcgaagtttaaaggtgagtctggttacaaaagattgctccggttcgaggagatcagcggggtatctaaacaggcagcggaagaggtcaagaaatacgctgat

SEQ ID NO: 36034 - DNA, 433 bp, Gossypium hirsutum
  Clone ID: LIB3148-017-Q1-K1-A2
cccacgcgtccgaaaaacttttaaaaaatcttgtagatatcagcagtagagttgatgtagttgatgttctgtaagtagtcagtagcaagaactctataaccacttttcaccgaatactccccagacccctcatacttccacaccagtaaatcctccgttgaagtctcaaaaatcgggatggaaataatacgttgtgcctgatcttcattcacaaggctataaataagtcccttattccaggcaaccaaggatcattccaaatgtttaccataacaccgttgtcgattctctacaaaactccatcagcaatcaaatcacaagcgttgcaaatgctctgcctagtaaacgaaggaatgagaagatggttactgaaaaaccaatgagtacccgagatcactatttgcatattaatctcatggaaaaactgaaaaag

SEQ ID NO: 36035 - DNA, 415 bp, Gossypium hirsutum
  unsure (1)..(415): unsure at all n locations
  Clone ID: LIB3148-017-Q1-K1-A6
gtaaaattaatgaaaaaaatccttttagaggcatgctccccaattagttgtttgctattgtttttcaatttttatctaggaagaagttacagcaggggagatcttatgaatgaaacattcatagtgaatcatttgcattcattcaacgagaaagatactgtacgtgaaatctctcctgcatagattttaccaagtgcaaagtctctatccttgccaagtcgaagctttagctttttcagtctcttctttcattcatgtgcatggttggaaaagaaagctgaagagtagggaactttgaaagacatgttgctgctggaagtttgttgcattgcagaccaatgctcaacacttcaaccgggaattgttagagacgatgaatgcgtcaggcanagtttttatgactcacactatagct

SEQ ID NO: 36036 - DNA, 359 bp, Gossypium hirsutum
  Clone ID: LIB3148-017-Q1-K1-B1
acggttatatgccgcccgatacggttgtttttattgatgtaccccacttccacttgctatatagaaattgaagtattgaaggtgagtttgccaaaaaaaaaaaaaaaaataaaaaaaaaaaaaaaaaaaaaaaaaagagaaaataaagaaaaaagaaacaaaagaaaatttgcttataaatagacgtgctaaaataaacaataagggcaattgaataaaaaagaaagtgttggacaaacacaaaaatgtgaaataggaaaaaacctgggttgaccattataaaattcccttgcctaacaaccaccctatgtgcagtttgatttaatagcaaataggcctgaaaataaacgccctttcca

SEQ ID NO: 36037 - DNA, 357 bp, Gossypium hirsutum
  Clone ID: LIB3148-017-Q1-K1-B10
gggcggacccaggcgtccgcccacgcgtccgcccacgcgtccgcccacgttttttgaaacaccgtcctgtattcaaagtatgcggggaatgacttcaagggcaatgatggtagtaactatattgctctgagagcatctgatgtaatggctgtgctctcttagttgtgtaataaggaacggtgttagatattgaggttaaaactggaacgattggatgagtctatactaaacatacaaagactgggatgacttattcgttagagaaagcgggtgtggcatttggtagcagtatgcagtgtttgatgcaaaggttcttagtaagaatccaaagggaccattaggggggacgatgaagga

SEQ ID NO: 36038 - DNA, 362 bp, Gossypium hirsutum
  unsure (1)..(362): unsure at all n locations
  Clone ID: LIB3148-017-Q1-K1-B12
cccacgcgtccggcactttggagaggtttgtttatcacattattcctataggatcagaggatggtgtttttgttagcataatttgagtcgtttctatgttgcacagtatagtgatgaaatgggtagtgagttggtactggaatcaattcttccttcgcctgtcttcggatgaaatcttcaactattccaactacctatgaattgagtattctttcaattgaaaagtgaaagtgagacttgatccgttggacgcaatattacaagtgttatattaggaattgggagatttaattnnaaaaaaaaaaaaaaaaaaaaaaaaaaaaaaaaaaaaaaataaattttaataaaataattaaaattaa

SEQ ID NO: 36039 - DNA, 365 bp, Gossypium hirsutum
  Clone ID: LIB3148-017-Q1-K1-B4
gtcatcagcaagaaaattgggaacttgtggagcaatctgacagaggccgagaaacaggtttatcaggagaaagggatgaaggatgagagatacggaactgaaatgttggaatatcgatcttcccatgattcgacacctcaatagcatctgatgagttggtcgttaggaactaaatgatggggttgtcaaccctccctcgatgtttgtttgtttgttgttgttgctcaacttttcccttgaaaactttctgtatgaacagattatctgaaccctgcccctttgctcagactttgggtgatcagatggaagatctttgtaaaatgtggttatattaatctatcagaatgctagaagcttagaacagt

SEQ ID NO: 36040 - DNA, 285 bp, Gossypium hirsutum
  Clone ID: LIB3148-017-Q1-K1-B7
cggacgcgtgggcttttatgtatcttattattattatttacttaattctcattggttgggacacgtcacttatgagttttaagtaattttattggttaggttattatttatttattttcttagataattttaaagagttttattagggttcaattactcttgtattttgcttataaataggcttgctttctacacattgagggggtggaataaaaagagagtatttgttttcttccaaatttgtgtgaggcaaattttttatagtagagtgattcttctcttgct

SEQ ID NO: 36041 - DNA, 264 bp, Gossypium hirsutum
  Clone ID: LIB3148-017-Q1-K1-B9
acccacccgttcgggctgttgccatcttttcaaacgataaagatagttttcatcttaactgcccctttctattcaccgcggaattttttgtgcggcttgtacatttcaaaaccaagaatccctccatggggggtattgtattatttgatctgcccaatggcctggacaggttatggattgaacaccttccaatatggacattaccagcgctccataaaaataccaggggttaaacctgacccttctattaaatggtacttaaaa

SEQ ID NO: 36042 - DNA, 514 bp, Gossypium hirsutum
  unsure (1)..(514): unsure at all n locations
  Clone ID: LIB3148-017-Q1-K1-C10
cccacccgtccgaacacgtttaactccctttataatgcaacaagatagttgcgaccccaataaaanggccactcgtattttctaaactgagagggtggccatccaaaanactaacctatataactaaaatcttattatataacaaattttccaatcatagcaaccggagaatttttttttttttttttttttagaatttcttaaaatatatattttttctttaatactttttatatattatatttttcctatattctaacaccttttttattattttattctatacttttattattcatttatttaacatattttctaatttattataatcaattatattttttttttttttctttcacatattattttttttctattttttctaaatttacaatattattttttatttctttctttttattattttttttttctcttcattaatactctacttcattatttttaattattattttttattctttatattatatctcattttttctattatttt

SEQ ID NO: 36043 - DNA, 421 bp, Gossypium hirsutum
  Clone ID: LIB3148-017-Q1-K1-C11
gtccggttgggaaaagagggtccttgctatatggtcttcttggaactggtaaatccagtttggttgccgccatggctaattatctcaaatttgatatatatgatttggggctcaccagtgtacgctctgatgctgagttaaggcggacactgctatccactaccaatcgctctatactgttgattgaagacatagattgcagttctgaggttcttgaacgacaaatgagaaacaaaaacaaaaagctaccagatagaactgggcagttgacactatctggtatattgaactgcatcgatggcctgtggtcaagctgtggggatgagagaatcattgtgtttacaaccaactataaggatcggatagaccctgctctgttacggcctggtcgaatggacttgcacatcaacatgtcctattg

SEQ ID NO: 36044 - DNA, 407 bp, Gossypium hirsutum
  Clone ID: LIB3148-017-Q1-K1-C6
cccacgcgtccgaaaaggcattccagtattttgtgttatagtagtggttgggtattgttcgacaccaaaaaaagaaaaaaagaaaaaaaaaaaaaaaaaaaaaaaaaaaaaaaaaaaaaaaaaaaaaaaaaaaaaaaaaaaaaaaaaaaaaaaaaaaaaaaaaaaaaaaaaaaaaaaaaaaaaaaaaaaaagggggggccgtttaaaagaatcaaatttaacttacccttgaatgcaaaaaaaaatttttttaatagggccaccaaaataaaattaactggccgggttttaaaaactttgtaattggaaaaaccctgggttaaccaaattaaatcgctttgaaaaaaatcccctttttccaagttggggaaaaaaaaaaaaggcccgaaccaatcgcctttccaaaa

SEQ ID NO: 36045 - DNA, 343 bp, Gossypium hirsutum
  Clone ID: LIB3148-017-Q1-K1-D3
gccacgcgtcgccacgcgtcggctaaacccaaagggtcaaactgtgcatttttggactggtgccgtggtcttgccccctaagtcagggtttggggctttcggatcatcgtgtgatggaaccccaaagatttgaagaagctaaagttgggattacagaattggaatcaaaagactacatagccgtcaagaggtgattgggagatgaccggcgagagggatcgaggtgagtgacaggggcgtcaaccatgatttcgtttgatgctcatgatgtggggttggtgctggggtggccaagaagacatgcatcaaactatcatgatctactagggagacctaagggctt

SEQ ID NO: 36046 - DNA, 327 bp, Gossypium hirsutum
  Clone ID: LIB3148-017-Q1-K1-D6
aactcttgcatcgcaatatgaatgattttttaatttttgattcatgtaatgtatgtatgacaatataattaagagtattagggggtatagcaatggattctcatttcattggtttagttttttagtttttacattgtatgaaccggccaaggaaggttcaaaattacaaccaaatgttgctgttattcttacgttgtaactttctttattcttctgaatggatagtttcaagtttggaatcttttttaaaaaaaaaaaaaaaaaaaaaaaaaaaaaaaaaaaaaaaaaaaaaaaaaaaaaaaaaaaaaaaaaaaaaaaaaatataaa

SEQ ID NO: 36047 - DNA, 369 bp, Gossypium hirsutum
  unsure (1)..(369): unsure at all n locations
  Clone ID: LIB3148-017-Q1-K1-E12
cccacgcgtccgcccacgcgtccgcttgattccatcgatgaacttcatatataccttattcgggattttggttttgctcaatagtgcctcctttgtgttcttgctgcacctcttgtattcattgttccttacgagaatgggaatgaaaacttcattgagattgccaagatggttcaagaaagctatataatggtgatctacgtttactcggacttttcgttaacatgcctgtatttgcttcatatttgaacatgtgtataagaatatgattattcaaatatatagaaaaagaacaaatgtacttgagaggttcttctattatagggaattgataaaattagtctctctattattaaatggatcnnanna

SEQ ID NO: 36048 - DNA, 413 bp, Gossypium hirsutum
  Clone ID: LIB3148-017-Q1-K1-F6
cggagattggtagggagcaaggtggtttttatatccttgaaccgtcttgacagactagtgtggctttgactccgtgtgttgcatctgttacattcgttggaccatctttttttggcacactagacttggccatacttctatttcaagattgaataagatgcttaatcttccctgcacagttttgaatagtgatagcatacaacaatgtcctatgtgtcctcttgctaaacaaactagactttcatttcccataagtacgtctcgtgttgatattggtttttccctttttcatatagatttgtgagggccctatcgagtttctactcatagtggccataggtattttttttaaccattggtgatgattactctaggatgacataggtgcatatgttatgatataaaagtgatgc

SEQ ID NO: 36049 - DNA, 332 bp, Gossypium hirsutum
  unsure (1)..(332): unsure at all n locations
  Clone ID: LIB3148-017-Q1-K1-F9
catttttctttaggcatccttgttcaatcatttgtatttgattaatattcgaacatgagtattgagtatgagcatagcatgttttactgttnaaaaaaaaaaaaaaaaaaaaaaaaaaaaaaaaaaaaaaaaaaaaaaaaaaaaaaaaaaaaaaaaaaaaaaaaaaaaaaaaaaaaaaaaagggggaaaaaaaaaaaaaaaccaagngaaangaagaaaaacattaaaaaagattgttttaacattttttttaaccaaaattaaatcaaatcccccaaggatttgacaactgtggtgatgggaaaaacgtggggggaacaaaattaaattcc

SEQ ID NO: 36050 - DNA, 367 bp, Gossypium hirsutum
  Clone ID: LIB3148-017-Q1-K1-G11
gcgaacttccatgctatatctcaagaggattaattttagattgcattttggtttatgtcgatgggcttggatctcggaaagttgactctttaaccatattttgttctttaactgagttttttcctttcttgaaggtagtatatatgtttgatctgaagttgtgaacagcatattgcaaaagcctgcagggttgcttggttggagttctatttgtgtgtttctggtacgattttgccggtatgattgtcagctttttcgaacaaactgactttagcttctcagacgaaaagatcaaattgggcggatgagggttcttttggccaatcataaattcgcttccccatctctaattccaccggagctagat

SEQ ID NO: 36051 - DNA, 226 bp, Gossypium hirsutum
  unsure (1)..(226): unsure at all n locations
  Clone ID: LIB3148-017-Q1-K1-G9
cccacgcgtccggtttagcctttttcttgatatgtgtcctccaatagttctttatctcattgtcagttcttcctggtaagcttcttgcaatggttgaccaccttaaaaattttgttcaaatacgaatattaaatacgaatacttcaagaaagtttaatccgaacaaatttatatattaaaatcattacctgtttccccaannaaaaaaaaaaaaaatatatatttt

SEQ ID NO: 36052 - DNA, 150 bp, Gossypium hirsutum
  unsure (1)..(150): unsure at all n locations
  Clone ID: LIB3148-017-Q1-K1-H10
ccggcccgaccgacgcgtccgttaattacctcaactttcttgaaatggtcttaacattgagttatttaatttttactatggcgatgaaagggatgactatgcgttggacctagccctgngtgatgaataagctgcttacattacattagt

SEQ ID NO: 36053 - DNA, 317 bp, Gossypium hirsutum
  Clone ID: LIB3148-017-Q1-K1-H11
aattagaaggcccgacccaacccacccgtccgaggacgcgtgggaaaaaaagaaattttatatttaaaaaaaaataacaaaaagacaaacgatgggataaaaaccaaagttacgtacgcatacatacaaaataaataactcttctataaagtaaacctaaattcaatgccctgccctttaatttacaacagtttcactcggaaaactccgacgttacccatctttaatagggttgcataacataaattttttgccaggtggtttaaaacttaagaagccggaaaccctcgcccttcccaaaattaactccttttaaa

SEQ ID NO: 36054 - DNA, 278 bp, Gossypium hirsutum
  unsure (1)..(278): unsure at all n locations
  Clone ID: LIB3148-017-Q1-K1-H5
tggaattaaaggcccgacccaggcgtncggtncagggcttagcctggatcagcgaggttttatgttcatccgggtgacctgcacccttagccatgtatggcacgagagatacgaccaaactactttcattccatacctctcaccatatcatgatctctaacatgcatagcaattgtgtgaaatgcggatggactattaacaaaggacctttgatggactttacctgacgtactaagattgatcttgggtgtgctgcgcatgctgatgtactccattta

SEQ ID NO: 36055 - DNA, 311 bp, Gossypium hirsutum
  Clone ID: LIB3148-018-Q1-K1-A1
cccacgcgttcgtccacgcgtgcgcgcgaagctagtgggtcaatgaagccgccggtccttgaacgagcgtgcttgaagcttggaaggcttgattcatgttcttgaagtgatcatgagcctaacagcattcacaacaccaactgtcaatctttcgtaatgtgcttaccttgataggtcatatacaacatgtatctaggtcattaagaagtattgtggcgctttagtgacgttttcaacatggcttacatgttttggatgattgtaagattacatatctgatggaaccgataggttacatacaacatgtatct

SEQ ID NO: 36056 - DNA, 420 bp, Gossypium hirsutum
  Clone ID: LIB3148-018-Q1-K1-A11
atgcttatgaaaagaagaggtgttcattctggtttagtagtgaagggtgaagaaggtgccctctcggtgacaactaggttgctatcagcaagcacatcaaaaggacttcctgtgaaccattgttctggttttcgttcggtaggcatggaatcagcttgtgaagtggatggtgtataacgtccgagtttcaggcttgaggttaatgcaatggactatggttttgaaccaactgatactcccaagaaccaatagatcggtatcgaagaatatcgagttgggtttggcagctctttgaggtgaaaaagggccggcatatgaccggattgttttgaatgctggaattgtggatcatttactaggatgtgatggggcagaagacgttccttagctttggaaagagccaaagaagccattgacagt

SEQ ID NO: 36057 - DNA, 370 bp, Gossypium hirsutum
  Clone ID: LIB3148-018-Q1-K1-A5
cccacgcgtccgacataataagtcctaacgtgctagataaaatttaaaattagcggtactctttcggtcgttcaaactgaggccgtgggtgtgattggtttggatgataaatagaggtgagaaaaatagctcattatgtgcaaaaaaaaaaaaaaaaaaaaaaaaaaaaaaaaaaaaatttattataaaaaaaaaaaaaaaaaaaaaaaaaaataaaaaaaaaaaattaaaaaaataaaaatattttaaataataaattataaaaatatataaaaaaaaaaagggggggggccctttaaagggttcaaagtttttttcccgttgtttagaaattaaaattttttttataggggaccaaaaaaaaaataaa

SEQ ID NO: 36058 - DNA, 208 bp, Gossypium hirsutum
  Clone ID: LIB3148-018-Q1-K1-B10
cggacgcgtccgtgaagcagaagtgtatcctactgatgattttagggggttaaatgactttggtatgattataaaaaagagaaagaaaagagaaaaaaaaaaaaaaagggcggacgaaaaaaaaagaaaaaaagcaaaaaaacacaagcatgcaaagacaaagctcttctatagagaaacctaaaattaaattcactggcgcgcgtaa

SEQ ID NO: 36059 - DNA, 450 bp, Gossypium hirsutum
  Clone ID: LIB3148-018-Q1-K1-B11
cgagaatctgagcagcgtcgaagttgagtcggttctgtacaatcacccggcaatcaatgaagcggcggtagtggctcgaccagatgagtattggggagagactccttgcgcgtttgtgagtttgaaaaatgagttgactcagaaaccgagtgagcaggacataatacagtattgcagagctaagttgccacactacatggtgcccaaaacggtggtgtttaaggaagaattgcccaagacgtcgacggggaagattcagaagtttgctcttagagatatggcgaaggcgctgggtccttcgtcatcttcctcacggctgagtcggatgtaagctcccttgtactcactatctgcatggtcaacatcggattgccgtaattatgaaatagtagtgtaaagacttattcttagtgcctcgactgcattattacaatatattaaaaattaagt

SEQ ID NO: 36060 - DNA, 450 bp, Gossypium hirsutum
  Clone ID: LIB3148-018-Q1-K1-B5
gaaacaaatatgtttctgtttgggtttgtggacttaattgaaggctcggttagtgagacgattaagagggtgacgaaattacaggatgcacgtatacaagttgcgtatgagaagttgtttaccgatactgcgatcgagcaatacatctcaatggacttgggtagggaggttgacctcaatatgctaaagaaaatgtccaccgaatatgaagtggcgaagagaaaagccattgaagaggctggaaaggtggtggatgtccagaacataaagcatatatcagaaaacgaggaacctctaagcgaaatagttgaaaagatagatgcgagctggaaaaaccaaagagaagcattttatcagcggaccggattgacccctcaaaatcctgcagaaccacagcagctgcagttacaactgaaggaaggcgatgcagagaacaacgatgccgatgaa

SEQ ID NO: 36061 - DNA, 318 bp, Gossypium hirsutum
  unsure (1)..(318): unsure at all n locations
  Clone ID: LIB3148-018-Q1-K1-B7
atattgttgacgaatttgacaagatcaactgaaacagcagtgaatttttctacacagacggtttgcttcaatggatggaggtgttgaggcaatagctagtcctaaaagaaagaaacctcgtactgggaaataggctttgtttttagatagctctttatcttggttttggtttggaattgacaagtcgatggtgttatcgtttcaaataaaaataataaatatttaatatatgaaaaataaaattaattaaattggacttatttttaaaatttaattattgaaaaaaataatatattaaangggggcggccgttttaga

SEQ ID NO: 36062 - DNA, 371 bp, Gossypium hirsutum
  unsure (1)..(371): unsure at all n locations
  Clone ID: LIB3148-018-Q1-K1-B8
aatggcttgattataatgttaaagttagtttatgtggctatgacttaaacttattttggaagtatcaaatgtggtataatgtgtgctggatgattgtataatatggcttggtgatgaggtaaaatgatggatatgtatttggttgtaaattggctttataggttcggatccaaacggctagaaataatgcttatgattacatagatttgatcatgatatatgttcatgtggggaattaagtttcatggtacttatatgaggtgtgttggctatatgaatcaatttggaaactatttataaagtgttgtgtattcggttnaaaaaaataaaaaattatttaaaaaaaaaattttntttttttttttttataa

SEQ ID NO: 36063 - DNA, 361 bp, Gossypium hirsutum
  unsure (1)..(361): unsure at all n locations
  Clone ID: LIB3148-018-Q1-K1-C8
ttttgagtggcaatatgagtgatcacacgtacggccacccctatcctcctccaggtggttataggtataatcaagggccacctccaccagtaatggcacctcctcagtattatggtgccccaccaccgccacccaggagagaaccaggttttcttgagggattccttgcagctttatgttgttgctgtctcttggatgattgctgctgcgacccgtctgtgataattgtggactagggatcttacatcaccttactgtttatctaaagctttgacaacagtatgatttcatcacatgtatttatattttgcagatggagttgacaaatccatttatgtattgtaatatgtgaagcttagnt

SEQ ID NO: 36064 - DNA, 506 bp, Gossypium hirsutum
  Clone ID: LIB3148-018-Q1-K1-D10
gcctgtctccactgctgtcgagtgttcttgtgattcgtgatctgccttcttattttctgcggcttgtgtttatctgagtggctgggtgtctcttaaaacttttcattgtcttactgatccttcaaattgttatttaatattatctttcttttgatttttttcaatattatctatatttttttttttatcttataaaacttttaaatctaatacatttcttattttctaaatatgaatatttatttttctatatttttttcttttcttttttatatttttattcactttttttttttattaaattttatttccttttttaattttttactcttcatatttctatatattatttttttatatttttttttttatttttctatatattattttttattatttattattcttttttctaaattttttttttttttttaatcttattttattataccttttttaaattcttttttatatatcttttattttttctatttaattatcttttc

SEQ ID NO: 36065 - DNA, 451 bp, Gossypium hirsutum
  Clone ID: LIB3148-018-Q1-K1-E5
aaggtattaaacgggcaagcacttgagcaaggacagtgtcagcaacagcatcaaaagatgatgaggatgggaggggatgaaatcaacgggggattgcttgatcaaacggtgcaggttgagttatcaaatatgcatagtagatcagataatggttttggagcgttggattggcaagggaacgaagatcaagggttgtttgatcttccgaacgatgttgataagacatattggagtcaaactcagtggactgatcaagatcaccatggcctctatctcccgtaaattacctctgacccttttttatcccacttaaattatttattaactacaaaattgaaatagagattaaaaaaatctcataaaatcaaagcttaaggcaggatttaactgttattttcgttattaattatgataatttcgtccaagtgtgtactttatacagttatatggg

SEQ ID NO: 36066 - DNA, 308 bp, Gossypium hirsutum
  unsure (1)..(308): unsure at all n locations
  Clone ID: LIB3148-018-Q1-K1-E6
cggaanntaccgggacgacgccacgcgtcgcggtanaaagatannaacattaggattcaaggctagcgannnatgnnaatgtgtttataggcgcccttctgaccctgagggactggcgcctgaatgcgttcgtgtcgtgcacgaccnntgaaagtnncagcatgnnaatattcagggggattttcgaccgccctatgtccgnngctgaaaggtnattggttgannttagcatcannatccattgnntttaattctgggtcctcaaatgccttgaaaagggattctttttttccttnctcccaacctat

SEQ ID NO: 36067 - DNA, 341 bp, Gossypium hirsutum
  Clone ID: LIB3148-018-Q1-K1-E7
aaaaaaaaaaaaaaaaaaaaaaaaaaaaattatgttataaaataaaaaaaaaaaaaaaattaaggaggggtgaataagaagggggggaatggtatataatataaaaataaaaaaaattaaatgagacaaagggggggaacgttttaaatggtaaaacttttggagtttttcaatttaataactttgtattttattcgggtttccaaaattaaatgtattggcgaatatttaaaaactgatggactttaaaaacatttgcgtagcctaaattattaattttacaaacaattctccttttcattaagggcttaagatgaagaggttacgcgcaaattgacctt

SEQ ID NO: 36068 - DNA, 148 bp, Gossypium hirsutum
  unsure (1)..(148): unsure at all n locations
  Clone ID: LIB3148-018-Q1-K1-F1
cccacgcgtgcgtntatattaatctatgtgaatccaataatcgctaactgttcgatcctagagtgagcaggttcgcttacctggagcgagaggcctgtgacaagcttctttatgactcattcccatacatggaaatcgagaatgggat

SEQ ID NO: 36069 - DNA, 369 bp, Gossypium hirsutum
  unsure (1)..(369): unsure at all n locations
  Clone ID: LIB3148-018-Q1-K1-F11
gaggagaatagtaacacagtgaattgcactaacttgtgggattttgacaagttggtaaacatgctggtcatccacaagagagattttgcatggaatttggttcttggtgtcaaaaaaggcttttataaatctggctattactttgttgtccacaattgcaaattagaatatttgaattcagtttgtttcatagattcatctgcttcatgttttttttttttacgggctatggagactaaattttttgaggtccatagttgtccctctcaatgatattacttttagagttttttctctcctaaaaaaaaactnantanaaaaaaataattaaaaaatataatttatataaaaataataaaaaagggcggc

SEQ ID NO: 36070 - DNA, 105 bp, Gossypium hirsutum
  unsure (1)..(105): unsure at all n locations
  Clone ID: LIB3148-018-Q1-K1-F12
aattacccgggtgcgacgccgagcgcgtccgnngaagcatgtcggcacaaggtaccataggaagtatgtctctttctaactgnngttggcccaattgaaaatcat

SEQ ID NO: 36071 - DNA, 148 bp, Gossypium hirsutum
  Clone ID: LIB3148-018-Q1-K1-F2
gccacgcgtgtgtctatattaatctatgtgaaccgaatagtatctacctgttcgctcctagagtgagcatgttcgtttacgaggagctcgcctccggtgacgagcttctttctgactcattcccctacaaagtaatcgagaatgggat

SEQ ID NO: 36072 - DNA, 372 bp, Gossypium hirsutum
  unsure (1)..(372): unsure at all n locations
  Clone ID: LIB3148-018-Q1-K1-F8
caangttgaccagaacctcatacatgatcttcctctccgtcaaatcagtaagattatttgtgcggtgtttttcacagaagaagaggctcaacatgtttacattaactgcgctgtttcattcaataaatatttttacaacattcaaccaactatttaaaaatattctgtaacagtttcttttaaattttccccatgctgcaatcacttactttgatttctacttatttaaatactccctaattagccaatgtatcaagcatgtgttcaagcacccttttaaaacattctgttgccattgttggaagtacaattataacatagatctttgtgttttttatccaaatgttaacaatacattttaaataattgttt

SEQ ID NO: 36073 - DNA, 431 bp, Gossypium hirsutum
  Clone ID: LIB3148-018-Q1-K1-G10
ggatgggataggaatgaatgatggcagttaatatccttataaaaaaaaggaaaatatagaggagagctgtttttactgaagaagcgcatgccatctcaagatcttatatgcggcattagcggatttataggtggaaaccgttcaacttatttaagtacatggacaatagttcatataatttcttttttatatttacattatagtcttttcttcattcgaatgtgctacatgatgatttatttttatgtttctatacttttacaatttgttgcctttttttatattttacattttttgactttcttttcttagattaatttttttgttgtataattaactatatttatcatatttttgactcttttactactttgcctgtttatcttcaatttttttagaaaaatttttttgaatttaccaatttttttttt

SEQ ID NO: 36074 - DNA, 154 bp, Gossypium hirsutum
  Clone ID: LIB3148-018-Q1-K1-G4
cccacgcgtgcgtttatattaacctctgtgagctcaattttatctaactgatccatcctagagtgagcatggtcgattacctgtagcgagccgcctgtgacaagcttctttatgactcattcccctacatggacatccagaacgggatactttt

SEQ ID NO: 36075 - DNA, 337 bp, Gossypium hirsutum
  unsure (1)..(337): unsure at all n locations
  Clone ID: LIB3148-018-Q1-K1-H12
acgcgtcacgcgtacgcgtgacattcacgcggtacgcccattcgtttcgaccagcgcgttcagttgaccctgtgagctgtggtaaagcaaggtggcgcagggcacttggccatacagaccatagtatttagtaggaccagcaaaaagaaaccagagtaagaaagaagggagccaaagaaaggaagggtgaagcccaaaaatagaagatgaacacaaagaaagaagcgtgatacccatagaagggaagattgaacaaactgaaagatganatgccttaaaaacaaaaaataactggaaaaaacccttactttaacccaactaaataaatattgggcgg

SEQ ID NO: 36076 - DNA, 317 bp, Gossypium hirsutum
  unsure (1)..(317): unsure at all n locations
  Clone ID: LIB3148-018-Q1-K1-H8
tacgagaatgtactcaaattgttaagaccataaatgaaggaatgattgaggaaggcatatttggttgtattcttagtgttgggttacaggcttcacattgtaccatacgaagatcatataatttttctgctatcttattgttttgcactcagtggtgaaatagctnaaaaaaaaattttttaaaaaaaaaaatataaaaaaaaaaataaaaaattaaaatattatattaaatattaattttttttataattaaaaattatttaataatttattnttttttttattatttaaaatttttttttttttttttatatttt

SEQ ID NO: 36077 - DNA, 402 bp, Gossypium hirsutum
  Clone ID: LIB3148-019-Q1-K1-A1
aattttcttgtatatttctattgtattagtaacattattgtctgtaatatgttgaccgatgagagtcttgtacccactctgaatggtatattcgctagttttgtcgcaagcccatatgagtctatcatcctccaccaatcgagagaggcacgcatatgatttctgtagtatcttcccttgagaaaacattgcccgttttggaagccatcaatctatcgatactgagatttcagatccagagccgactcttcaatcgactccatcttccagcatctttctagccgcaaatgtaacaatctgtttttagtcaaatcagaacagcagttttagaaccataaattcgaggttgaaatatttattttattattaatttgaagtctacaacatgatagtatgattgtg

SEQ ID NO: 36078 - DNA, 293 bp, Gossypium hirsutum
  unsure (1)..(293): unsure at all n locations
  Clone ID: LIB3148-019-Q1-K1-A10
cccacgcgtccgggaccaagctaggtcggcctaagctaatcgttgcgcccatggttgataagtcggagcttccgtttcgaatgctttgtanaaaatatggggctgaggctgcttatacccccatgttacattcacgtatttttaacgagaacccaaagtaccgttctgaagaattcaccacttgcaaggaggaccgtccattatttgttcaattttgtgccaatgatcctgatatattacttgaagcttgcaggagagtggaatctcattgtgattatgtcgatattaatttg

SEQ ID NO: 36079 - DNA, 371 bp, Gossypium hirsutum
  unsure (1)..(371): unsure at all n locations
  Clone ID: LIB3148-019-Q1-K1-A4
gtgagaaccctgaagctatggaggaagatgttgaggatgaagtggcagaaatcaagcctgcgcattttgaggaatcaatgaagtttgctcgtangagtgtgagcgatgctgacatccgcaaataccaagcatttgctcaaacattgcagcagtcgaggggatttggaagtgaatttaggttcgctgaaactggttccaggactgcagcctctgatccttttgctgctgctgctggaggagctgatgaagatgacctttacagttaaaattacctgtcatctatgttttccctaattcatgatttgacaattatcttctatctaaatacgtagtaagtaattaagttgactgtatgatttaaaacagtaaaa

SEQ ID NO: 36080 - DNA, 409 bp, Gossypium hirsutum
  Clone ID: LIB3148-019-Q1-K1-A7
gtgggctaggaattgcaaaacataccggatatctacttgcatgttcagacaaacaacgaagatgccatcaacttgtataaggaatttggatttgaaatcacagagacaatcaagaagtattacacaaatattgaccctcccagactgctttgttctcacaagcgaagaaataacaattaaaagctggtaatgttatctagaggaattggttattgttatcttagtgaatttgatcaattcctacacttttgggaattattttgacgataaggatgctgtgatgcatgaatgacatgagatatggcgttaatgatgccagttatgattggtttttatcttttgagctgaaattttgttagtcttgttcaacactttcgttggtcaatgtgaccattgccagttaatgtca

SEQ ID NO: 36081 - DNA, 305 bp, Gossypium hirsutum
  unsure (1)..(305): unsure at all n locations
  Clone ID: LIB3148-019-Q1-K1-B10
agacttatagnagatcttatttaaccgaatttaacnacccgcccggggcacccaacacaaggttaattttataagccatcaggccatttaaaacacactttaaaaccacatattcttctaaaccaatattaatatcctatctatcaccttttatttataaaacaatttcttaccatatatcttggttaacaacaaaattttttttcattcccatcccctatcatcattatcattaattccaaattttttcaattacatgcccttaaaaaatggtatattaatcactcactctaattcacttcttt

SEQ ID NO: 36082 - DNA, 239 bp, Gossypium hirsutum
  Clone ID: LIB3148-019-Q1-K1-B4
gaagaaactaagagcatgcaaacaccggaggttgggattgcggacgatgatggttccgcacggccccttgttccgcaggttggcccaacttgatggatcattcaggttagtttgattttgtacatttgggccaataaattgttacctttttactcgaatctctattaatgaccatgtcttggctgctttttaacattgtatcatttgtacatgattttaagttgtcaacaatagttgtt

SEQ ID NO: 36083 - DNA, 403 bp, Gossypium hirsutum
  Clone ID: LIB3148-019-Q1-K1-B6
cccacgcgtccgtgaagggtctccttggtacaaagagctcccaaaaaccaacatggggttggagactggtcactgccaagtcttcacggaatcagagaatgtgggaagaaccctagatctttcagttctcagatcatatgaagagctgcacggcaagctagccaacatgtttggcgtagaaagttcagatatgctgagcaatgtgttctaccacgatgctgctgcttctgttaagcacacaggagatgagcccttcagtgagtttttgaagacagcaaggaggctgaccgttcttacagattcaggcagtgacaacatgggaagatagagattgcctattttcgctaattgtacagtttcaaacccttggttttgattttcatttcatttcatttctttttgg

SEQ ID NO: 36084 - DNA, 268 bp, Gossypium hirsutum
  unsure (1)..(268): unsure at all n locations
  Clone ID: LIB3148-019-Q1-K1-B8
cacctccacccgagaaggtgtccatattgggtatcccacttctcgcagaagagaaaagcgaggtgatcttgttgaaattcttgagggcaanagatttcaaggtgaaggacgcattcactatgatcaaaaacactgtcagctggcgaaaagaattcggaatcgaaaccttgctcgatgaagatctagggaacgaactagaaaaggttgtttttatgcaggggttcgataaagaaggtcatcccgtctgttacaacgtctatggagaatt

SEQ ID NO: 36085 - DNA, 358 bp, Gossypium hirsutum
  Clone ID: LIB3148-019-Q1-K1-C10
cccactttcactgctgaaggatttgaacttattgcggcgactaatcacctcggtcacttccggtctatcgcggttgttgctcgatgataagaaacaatccgattatccatcgaaacgcctcatcaacgtcggtgtccataacaggaaacacaaatacatgggccggtaatgtacctcctaaagcaaaccttgtggatctaagaagacttacatgttgactaaatggactgaacagctcttccatgatagatagaagagattgggatggtgcctaagcgtacaaagactgcatactctgccatatgctcactatgcaagatattcataggcgcttacatgaagtaactggcattacatt

SEQ ID NO: 36086 - DNA, 186 bp, Gossypium hirsutum
  unsure (1)..(186): unsure at all n locations
  Clone ID: LIB3148-019-Q1-K1-C11
cggagcataagtatgagtcattttcagcaaatgtctgacgatcccatgaagcaagtttcccaggggttctagaagtcactgcaggatgtaaaacacaacanccgttataaaaatccagatgctgatagacaagttcgagatatctcgagtcgagaacacatcgctcaattcttgctctgagcacgc

SEQ ID NO: 36087 - DNA, 218 bp, Gossypium hirsutum
  Clone ID: LIB3148-019-Q1-K1-C12
ttctgcgatataccaccactactacgagtttttaatataggggaatggttgcgggccttggtgaaaaataataataagagtaatgttgaaataagagattaaatataatgtgtgtatgttcctttatatttgttgtgatcgttgttgtttgtttgaaccatgtgttttaatacctgtatgggaaaatgttgtttaactaaaatgtacaatatttattc

SEQ ID NO: 36088 - DNA, 380 bp, Gossypium hirsutum
  Clone ID: LIB3148-019-Q1-K1-C7
ctacatcaggagcattaccatctgaggcatctcttgacacaagtctgaaaataactccgaagatcactgtctgtgctgtgccacccctggagtttgcggagggttcccgaagttcttcctgaccaaggtctcatagctcaactttagacagacgaggatgtgagatacatatggcgaaactttctatatggcctcacttcgcatttgatatatacgttttttgtatgaaggaattgagatgttgcagtggtctttgattcaccgttttttcaattgtttaacactttactacgatcttccccatcttgattgatatatagggggttaccattgtgtattttaagccctttgagacttgatgagttgatggtctatttctg

SEQ ID NO: 36089 - DNA, 288 bp, Gossypium hirsutum
  Clone ID: LIB3148-019-Q1-K1-C8
gttgccgaattgttcctttccctttcccgttttcggcctgcaccgccgccaaaagtgccagggttacaccaaattggttcccattttccctcttactcttgattccagttctacacaagccaaaaaaccctttggtcattggatcgagccacgggaaccattctgcttctaacttcttcgaactttgagaagactatgagtcaaccgcggtgacagaggagttggtggaggcaaacagtatgggcgatatgacaagtgtggctagggggtttctcttttcttttcttt

SEQ ID NO: 36090 - DNA, 411 bp, Gossypium hirsutum
  Clone ID: LIB3148-019-Q1-K1-D1
aaaattcataacattgaacaacaatatggtacaatcaaagaaattcagaggtgtcaggcaacgacagtggggcacttgggtctcagagatccgccaccctttgctgaaaagaagggtttggcttgggacattcgaaacagccgaagaggcagctcgagcttatgacgaggcagccattttgatgagcggacgtagcgccaaaacaaacttcccagtgcccaaaaaccaaacaggagatgagaataccacgacttgcaatgccctttcttcaatcctcagtgaaaagcttcgcaaatgttgcaaaatcccatctcctccttcccttacctgtttaaggcttgacactgagaattctcacatcggggtgtggcaaaggagagcagggagccgatcagattcatgctgggtaat

SEQ ID NO: 36091 - DNA, 223 bp, Gossypium hirsutum
  unsure (1)..(223): unsure at all n locations
  Clone ID: LIB3148-019-Q1-K1-D3
aatcaatagtattgtgaagggggctcgttcttatgtgtcaaatgttgtcaatgctnatnaagttgagttcaatggtcctgtggatggcgcaaatacaaagcaccatggtattcggttttgttcnaggattgatctcaaatttttttttttgggtggggagcggatatttttttttgtttaatagggacaatttttttttttttatttttaaattcttatttta

SEQ ID NO: 36092 - DNA, 415 bp, Gossypium hirsutum
  Clone ID: LIB3148-019-Q1-K1-D6
cccacgcgtccggttatgctcgaaacttgatttttgagccagatcaagctagcctcagggaagctagcaatgaaggacagtgaggggagtatctgcagagctcgaagctgtcgggggtggacccgaagaagaagagcttattgttcgaggcgttagattctcgtttttttttcattatttatcctgaggattaaacgtctaatctatatgtagtctttattgttttcatgagactaatctttgatatttcaattttcatagtctaatattttctttttttttttttttttctttttttacttatttatttttttttgtttggtttcttttatttaatttattaataatttttttttattaattttctaattaattctttttttttattatatcattttaatttaatttttttatt

SEQ ID NO: 36093 - DNA, 361 bp, Gossypium hirsutum
  unsure (1)..(361): unsure at all n locations
  Clone ID: LIB3148-019-Q1-K1-E12
cccacgcgtccggttctttgggtgattgcatggatttttctgttcatctatttttttgccgacatgtttaaccactttgatgaggtcaagaagatatttccgttggggttctacagcttgctcactgtacctccggtgctggggttgatgaatgtggtatggttttggaagatcgtgaagggattgattaaaacaatttcaaaagcaagacacagagaataataacaatccgaattaatatttgttttctgtgtaatgttaaaaattgaagaaaatccaattaatatttgtctnanaaaaaaaaaaaaataaaaaaaaaaaaaaaaaatattttgaaaaaaaaaaaaaaaaataaaaatgg

SEQ ID NO: 36094 - DNA, 158 bp, Gossypium hirsutum
  unsure (1)..(158): unsure at all n locations
  Clone ID: LIB3148-019-Q1-K1-E5
cccacgcgtccgctcctacttaggatagcattagctngccgagacaactannaaggncggggtatatattaggttaagagggaaatcaacacnanaagatcatcactcgtatatatgggatcatttaataagaataacnaggnnnnncgaagggggag

SEQ ID NO: 36095 - DNA, 288 bp, Gossypium hirsutum
  Clone ID: LIB3148-019-Q1-K1-E9
acttgaaagctcaaaggaagttcaagagcataacataatcagagtctcaacccccccaaatgcaatcatctaaaaatcaaaggcgatatagtacctgacatattagagacagtacatctaatgaaatacatatccccggtccattactttttcttatgggctttaatgtgtgtacaagaacagaaattaatatgtactatagcaaggtgtttttttactgccaaaaaaaaaaaaaaaaaaaaaaataaaaaccatttaaataaaaaaaaaaaaaaaaaaaattaaaaa

SEQ ID NO: 36096 - DNA, 402 bp, Gossypium hirsutum
  Clone ID: LIB3148-019-Q1-K1-F2
gaaatattgaagagggttcaaaatggtgaggtcaagtgcatgaggaggaacacgtctggggtcgacgacaaagcatgcctagagatgagtcactcattcaacgtggaaacagctacaggcacgggtgaaaggattgccgaaaacacacctttatcacctgttgccgaatctccgattaagaacgagtcccgggatacctttacttatgacaaagttattccgatggttgacaagggtattgatgcttgctggcctaaattgatggcagatgaaagttttgccatattgaaagatagttaccatatgaaggatgatgggaaggttgttactacaggaatgggcaacaatgttttcggaggaatcatggcatttgttatgggaatcatgactatgcttcgactg

SEQ ID NO: 36097 - DNA, 314 bp, Gossypium hirsutum
  unsure (1)..(314): unsure at all n locations
  Clone ID: LIB3148-019-Q1-K1-F3
cccactcgtccgannccatataaccaaaatctatatttcccgaggaggaacacatctangcgcgacgtcttaagagcctagggatcagccaaacattcaaccccaaaacaactacatgcactgttgaaattattgcctaaaacacacctttatcacctgtttccaaatcttcttttaataactattccctctatacctttacttatgacaaatttattccttttgtatacaaatttatttaaactaacattcctaaatatatttcatatcaaaatttctcccatatttataagatttttaccataattaatttt

SEQ ID NO: 36098 - DNA, 431 bp, Gossypium hirsutum
  Clone ID: LIB3148-019-Q1-K1-F4
ggggcgagccacgcgcgcgggaaaaagagaaagagaaagagaaaaaaaaatcctattaatctaatctcctcattcatgaggggcgccgcttcagccccccattcatccggtctaaactccaactacggcggagtgaaccaggatgcggcgtttccacctctaaggtacggcgtacagagttggggacgtggcatgtacggcggcgaaggcgcgcgcgtacgaaggctcgtcatgtgcggagagagagcgaggggacgtcactgctgcgacgctgggaacccttgctgctagggtttctgaatctttttctgttttgggctgtatgatagttgggctagatgttgggttaaaagtaatttgggccacattgggcccatgtacttggactgttcttatattggatttttaaaattattattatttatttgggt

SEQ ID NO: 36099 - DNA, 359 bp, Gossypium hirsutum
  Clone ID: LIB3148-019-Q1-K1-F7
tccggatagctccaacttcaatatgtattctttaacggagcaataactgtgcacggccgggacagtgcaagttagctgttatatcatctcaaacaaaacaaaacaaaacaaaccccatatgcaagctgcatttactctattaatactacatatatgggataatttctgactttggccataatgatcatattgaggcatgggtatatattaggttattttttttaacttttttatgcttcctgttgctgctagagtggtaaaaactggtatgtcttaatggttttggtgattccttgtaaaatattttttgatgcatacagcgataggattatttattatgaactattattagctattat

SEQ ID NO: 36100 - DNA, 321 bp, Gossypium hirsutum
  Clone ID: LIB3148-019-Q1-K1-F9
cctactcgttcgggatgttatgccttttgtttaccccgagcccgaaaggcccagaatcacggtggatgaggcatttcatatgtggtcaaaattatcaaaatggctatacaaagatccctctattaatttccttggtgttggaagaccttattaaatactaacggaagtttttagcttttggtgattagaactcactagattcaccttttaacacattggagattaatgaaaaaacatctacatttgtttttttaaaaacttttttttttcaaattcaaattatattttaaaaaatttattttatttttaaagttttttttg

SEQ ID NO: 36101 - DNA, 303 bp, Gossypium hirsutum
  Clone ID: LIB3148-019-Q1-K1-G11
cccacgcgtccgatgttgtttcttgtttcggattttgttttacttctgtttgttattgggaggcaaaaacaaaagatcatgaaaaacccggatgattgtttttaacaagtttaaggttgggatttagcagaaaaatgttgctgtaatttgtgtgcatctatattgtatttgatttttactgttggtaaagcttatattgaagtgcaaaaccttttcatatctggaacaaaaagaagtaaatacctaaaaaaaaatttccaacaatttttctttgaatattggaagtccattggggaaaacttt

SEQ ID NO: 36102 - DNA, 382 bp, Gossypium hirsutum
  Clone ID: LIB3148-019-Q1-K1-H10
aaaaaactaaagaacccttatggtcctcatttccgcttagtaaccaggccattcaaaggcggttaaaccttcgcgcaactccgattgcggcggaatggaagaagatccggccaccaggtatggctagctgtaggaggtgcacacgcgtagaggcgcagcacgcgcgggggaggccctgggttcgactgcggcgctgctggctgctgaaggctagagttcgggtttgggtattttgggctagagttcgggtttaggtattgtattgggtattagattaaaaacgaattggggcatggtgggcccattgatttggactttggactttttaaaggttatttgggttaataataccggcccgaaaaataatggggcctaccataat

SEQ ID NO: 36103 - DNA, 290 bp, Gossypium hirsutum
  Clone ID: LIB3148-019-Q1-K1-H3
cccacgcgtacgcttttggcaattccaatatttactgtcgcttctgaatcggcttttaccatgggcaagaaagtgatcacacgtttgaggagttcacttaagccaaaaacggttcaagccgttgtacgcttggatgataggatgcgagctaatgaattttcatcagaaattgtgtgcaaaaatgacgatgacgatgatgatgacgatgaggatgatgtctcttctgttgctttttaagatactctctttctaaatgtttaaaatttaatttagcttacaatttatatttt

SEQ ID NO: 36104 - DNA, 380 bp, Gossypium hirsutum
  unsure (1)..(380): unsure at all n locations
  Clone ID: LIB3148-020-Q1-K1-A9
gtcttcactgtctgttttggcaagtgggatctgtaaaattttttgcgcaatgtccatttgagaggttcgatccttggaatccaccaatcantccaaatagatatgttgttacctttctcaactcttcaacatatcccttgaatgagaagtccctttgcagcccagatactcttccaggggcaaaaacgcgagaaatcgagaagaaaagacagacgaaacaagaaaacctaaaaacttgctagaggcggcagacacaagcgtgctaaggtagcagactattcaaagtttcacttttttttattttggtgattatttatcttaataaatgattcatcctttttgtttgtcagacatatattaaaattttaaaattatgacac

SEQ ID NO: 36105 - DNA, 404 bp, Gossypium hirsutum
  Clone ID: LIB3148-020-Q1-K1-B5
atgacaacggagcaaaagaagaaattgctgtgggggagcaagaaaagcactcctgcagaagagtctggtcatcgctgggatactgcactatttggtgatcgtgagcgacaagagaagttcaataaactcatgtctgaggttgccttggtacctatggccgattgtagggtgtaaaaggagatgtgaaggtggagcataaagccgacaatcaagatgcagagaagcagcgggagctccagctggatttggagaagcagtacacagccggacttagacgaagggatggtcgcactgttggattaggtctttaagcatcagaattggaaacttatggtgctgcggggaacttttttgtgacatttctgttctactatcttattctgtactcctcgaattatgcattt

SEQ ID NO: 36106 - DNA, 347 bp, Gossypium hirsutum
  Clone ID: LIB3148-020-Q1-K1-B7
cccacgcgtccgtatggcttgcgcaaataatgacagagcagcagttattgagatgtcacagagacttggattcttgacaggaaaggaatcagaggtaatgttggaggctcacgttcaagctggttttgttgtgggattgccattctcaaagtctggtggctatgatttccgctcaactaatattactcaaagcatttcaaacctcggggcaacaatgctgaggcaccgccttacaccacccccagacgaggcctacagtcttcatcggaaattgtcaggtgctttcttggcttgcattaagctaagggcttgtgtaccatgcagggaatttgtgcttgatgtctatg

SEQ ID NO: 36107 - DNA, 305 bp, Gossypium hirsutum
  unsure (1)..(305): unsure at all n locations
  Clone ID: LIB3148-020-Q1-K1-C2
cggacgcgtgggcgtacacttgatccccgttcagaccaaagaaaatgcctccaaagggggcacataccaaagcgttggtttgtcataactctcccttctagacatggcacatacaggggaagcatgagattattgaattgaacaacacagacccgaagatgaagagcatgatcgcgagtatttccacatgaataaatgaagatcatctggaattctatgttctgtatgaagattgaattttgagtttgtctcgttgatttcatttatttctgttttgaaattttctttgntatctcttatttctc

SEQ ID NO: 36108 - DNA, 229 bp, Gossypium hirsutum
  unsure (1)..(229): unsure at all n locations
  Clone ID: LIB3148-020-Q1-K1-C7
tttccgagttcgaatagagttcagttgaaggtagcagaaggtaggttgctcgtcgtgtatgtaaaccaactccctttatctaattcacatccgactgtaattttataagccaaatcccctacagttaataaaatgttatacaagtagatatgctgttaagaaaagtattcaaacgagttatattttttataaataatgtttttgaagttaaaaaaaaaaccanannant

SEQ ID NO: 36109 - DNA, 162 bp, Gossypium hirsutum
  Clone ID: LIB3148-020-Q1-K1-C8
cccacgcgtccgatctgctcgtttgctgttgcaaataaacaaccatggtgaaaaggagcgtaaaccaaacaagatgatgaggatcaaacctgttaaaaaaaataattcttaaaagttattggaaccaaagaatggtattaagaaagatgaaaaatgtttaaa

SEQ ID NO: 36110 - DNA, 244 bp, Gossypium hirsutum
  Clone ID: LIB3148-020-Q1-K1-D1
aagcgtgtgttactattttaatgtatatgacccacaaactattcaaatttacaaacaatttaacctccataagccatacgttaaacaaagacaacatttttttaaaaaatatttcccccataaaaactaagaaaactaatgttttccaaccaaactatttctcctctcatttcaatgtaagacatcccaattcatgaaaggccatttataaccaaacccatcccttcaaaaaccataaaaatct

SEQ ID NO: 36111 - DNA, 405 bp, Gossypium hirsutum
  Clone ID: LIB3148-020-Q1-K1-D2
ctcagtggcaaaaatatacgatcgtggtcctatatatgcaatatatatacacatatatattatctgcaaactgcaatatagtattgaaaaagctacaaactggggaccaagtttggagtgtaggtgtagaaggcaaagcaaaaaccaaactcccagagcacagtaagctcatcttgtgaatggtcagtgaaactgccgaggtggccccaattccgtgtttgaaatgactaaacaatgagccaactccgagtaatgcatgtttccccacattgttgttcttgttgttttgccccatgtctcagttcttttatccttttttttttccctcagttttattattatttgcttccctttgcttatcttaattaatcgttatataagttgaaattttctctctcctttttt

SEQ ID NO: 36112 - DNA, 390 bp, Gossypium hirsutum
  unsure (1)..(390): unsure at all n locations
  Clone ID: LIB3148-020-Q1-K1-D3
tttcattgcaacttctcccaaattgtaattgatgattttattaatgtttcctgtattaaacactggaaaactataggaaagattattaccaagaaggtagtcatgtttacgaggaattgaatgttcttgaggctttccggaaagcattgacaacatggtctagatggattgatgccaacgtaaatccgatgaagactatggtgttcttccgtggctattccgcttctcatttcagtggagggcagtggaattcaggaggggcatgtgataacgaaaccaatccgatcaagaacgagaaatatctaacgccatatccgtcaaagatgttggtgttagaatncgtgctaaaggggatgaaaacgcatgttacctacctaaacgttactcgac

SEQ ID NO: 36113 - DNA, 339 bp, Gossypium hirsutum
  Clone ID: LIB3148-020-Q1-K1-D8
aaaaaaaaaaaaaaaacataaaaattttctatacaaaaacaacaatccaaaaaaaagaggtccggtcttatcttacctcaagctgctaacaaccaaacttacccactactttcacctaaaatcaccccactcccccacccttccatccaccctttcccgactacccctttcttttccacacccaatctttctttccactcatcctttttcaaaaccccctcacccccaccctaactcttcttttcgaaaccccttcccaacatctttacccaccccatacatataagttccctctcttttcttcatcctttcacccccaacctattttttttacccccc

SEQ ID NO: 36114 - DNA, 411 bp, Gossypium hirsutum
  Clone ID: LIB3148-020-Q1-K1-E11
gtacctgaaaatctagatagtgtagccgagtttgaggctccagcgtctccaacttccagttacagtcaggcatttccaacggaggaagatttcgcaaaggagcctgctgtagttccatcccagctacatttaactgtcctcggtacagatgaccaagatggagcatcatcctcgaagcctcaacatgttgtacttaaccatcttttcatagagaagggatgggcatcacagtctgttgttgccctcggatacacccataggtttgagtccaaatatgtgactgttgtactctataagccactcaaaaggtaacatgtgcttttcccatgcttgactctgtaaagaaatcaaagtgactttcatattcgtttgtgaaggtacacctctgttttatagatgatgcttcgacac

SEQ ID NO: 36115 - DNA, 327 bp, Gossypium hirsutum
  unsure (1)..(327): unsure at all n locations
  Clone ID: LIB3148-020-Q1-K1-E2
cccacgcgtccgcccacgcgtccggcttgctgccggaactggatcatttataaaaattttagctgatttttctggatctcagaattataatagttatatgactcattctatggctaaaggttaccaggtagggaaagttttgtttcgaccgtatgaagatgttttggggataggacactccatgggttggtctagtattcttattccaggatccggggaacccaactttgattcttgggtggcaaacccattcgaaacatctaaacagaggcgagagaaggaagtgcactctctgctcgacaagcttncacccgaaacaataatgtt

SEQ ID NO: 36116 - DNA, 191 bp, Gossypium hirsutum
  Clone ID: LIB3148-020-Q1-K1-E8
ggaaagttgatctcaaaatctatttctgctacaaagatctctcctcggcactcgaaaaggtgttcatttgcttcacaatcggtcagtttggttctaaatgagattctagcggtgattgaatgactttgagcctgttcaattatctggttaacagtactgtatactttgtttccttttatgatatggacgga

SEQ ID NO: 36117 - DNA, 368 bp, Gossypium hirsutum
  Clone ID: LIB3148-020-Q1-K1-E9
cccacgcgtccggttttctgcatttttttctcattaccatttttatctttctgaatgtatggataatgtgcaatctcttacagataaaccgacttcctccagaggttgtaaaatactttacagatccaaatgcagttgatccaccagatatggaactactatacccatttgtagagtcagcattgcccctggcatatggtgttttgggtgttcttttatttcatgaacttgggcattttctggctgcttttccaaagaaagtaaaactaatcatttccttttttatttcgaacatcacttttggaagctctggagctattactcaattcaaatctattcttcctggccgtagtacctaagttgacatt

SEQ ID NO: 36118 - DNA, 272 bp, Gossypium hirsutum
  Clone ID: LIB3148-020-Q1-K1-F7
agattcttatatccgatccaggatagaagttcctgctatcttcctcaaaaactgcagtggagaccttgtttatgatatgtgtgtactgccacctgttatgatggccaagctctgctgactgcagatccattatagaagaagctgctaagcttgtagaggctggtatgcatacttggcgaataggttctatatatcatttttaagaaatgtttaagctttcaaatggcatgcttattaactcgctataattcgtggggtagcttaaaatgaca

SEQ ID NO: 36119 - DNA, 202 bp, Gossypium hirsutum
  Clone ID: LIB3148-020-Q1-K1-F8
ataaaattataatctaacatccttttttttctaaaaacccttcctgaaaaaccgcgagcgttacttttttaatcagataggcctactcccatcttaaatgttagcaacccactccataaagtaatccccccagccacgctacagctaatctcagcacggaagccacttaaactagtactacaccttccccacaccattttcc

SEQ ID NO: 36120 - DNA, 399 bp, Gossypium hirsutum
  unsure (1)..(399): unsure at all n locations
  Clone ID: LIB3148-020-Q1-K1-G6
cccacgcgtccgattatgttataaactctatattaggtgatccttttcttccatggttttcgtgcaattgattgcagggtctctttcatcccgatgaccggggttttccacagacggtgcatctagtcagttctctaaggcaaacttgtgttaccggttactactcaaacggaatatttttctcattttccgatggttgtagacttcactgtgtgtaaagcactgtatgcatgtacaaattatatattagcctctgttggaatttgcaattctaaaatacaatttaactctgttgtttggagacttaactatgcccattagttcaattaatgaataaaaaatagaaaaaacaaaattggtggttggcattgaaaaaatatatttnnataaaaaaaacaa

SEQ ID NO: 36121 - DNA, 330 bp, Gossypium hirsutum
  Clone ID: LIB3148-020-Q1-K1-H3
gaaaaagttaagtgaaaaaaaaaaaaaaattttaattttataaacaaacaaaacaaaaaaaggggagaccaaatatgtgagtacgaaaaaataaacacaaaaaaccaaacgcgcgccccttttaaatatccctagcttatttccacatcctttcacctggttatccttttttataagtccacctatttctaattcaatgccccgtgtttttcactgttgaaattggaaaaaccatggctttacccaaattaatttcctataaacacatccccctttccccagattggcaaataacaaaaaagcccccacctatctcccttcccaaaattt

SEQ ID NO: 36122 - DNA, 246 bp, Gossypium hirsutum
  Clone ID: LIB3148-020-Q1-K1-H5
cccacgcgtccgtaataatttttgtatttttgcttagagaagaaattcaaagtctagtgctgtagggttttgcttatgggttctggatttcttctactaggctactttttggtattattattgttatttcttggaaatattcaatgcaattatgaaacatcaaatttttagcttccaaaagaaaacaaaagaactgtaatcttgaaatatacacattattaagcctgaaaactattttaattgcag

SEQ ID NO: 36123 - DNA, 311 bp, Gossypium hirsutum
  Clone ID: LIB3148-020-Q1-K1-H6
tgaagaaaatatggaagtgtcaactacaattaaagccaaaaataagaaacaagctgagcctgatattgatttcacaaaagccttggataatgaaatgcctgacatctttgctcctccccaaaatcttaagtcattgcttctaccttcaaacagagcaccttgtaatacaaagcttcctgaagattgtcactatcaacctgaagaccttgtcaaattgtttcttatgcccaacaagatagtaatgtttaccaccagtttgctactaaacattatagccggatctggaacagttacattagttttgttaaaaa

SEQ ID NO: 36124 - DNA, 272 bp, Gossypium hirsutum
  Clone ID: LIB3148-020-Q1-K1-H7
gatacattggtcactattagttcacaaaaatcttagcagagtgagcttctccattggtgagtcttttttatatacatatattttctttttctgacgatccttgtttctcagtgtgtacattgatggaataagtaggatgttagatgattgacatgtttggcaagcaagaaatatcttattgaagtaaatgatgatcgaacggttgatttttcaaaagttaagtttaacaaggttgtgtttgacagtatgaggtctatcacctcattcattta

SEQ ID NO: 36125 - DNA, 363 bp, Gossypium hirsutum
  Clone ID: LIB3148-021-Q1-K1-A11
gcgcccacgcgtccgaaactgtatgaaatctctaaataatgtttgccatttcgcacattttatagaagcagcaatcaacgcccatttgtttgaaaaaaaaaaaaaaaaaaaaaaaaaaaaaaaaaaaaaaaaaaaaaaaaaaaaaaaaaaaaaaaaaaaaaaaaaaaaaaagggcgggctttttaaaagaaacaagctaagtttcgcgtgcctgggagggcaaaaaaatttaattgtgtggcctaaattaaattaactggccggcgggaaaaaacgtggggaatggaaaaacaatggctttacgcaaaaaaatttgttttgcaggaaatccaaattttgacagggggcgaaataattaaaagg

SEQ ID NO: 36126 - DNA, 396 bp, Gossypium hirsutum
  Clone ID: LIB3148-021-Q1-K1-A12
gatcttgagtagttatattgcttgctagcattgtgccatatacactaaaatgaggaacctaaaactttttcttgtcactgcagctgtgatttttcttgtaagcaaccatccatttgaagcttctggccgggttctaaatgaatatgatcttatcctacagtctgtccagaagggagtaccaactcctggtggacacaatagctgcaccaatattcctggcaggaatgacccgccatgcatcaaccagaggggattcgcaggccgtgttatggctcctccacggctgcaaccgaacaaaaggattccgttcaatacagcagcctaatgtcaaaagaatccatttcgttccagctaggaaccgattagtactttattgatttagcttgtaatagtatg

SEQ ID NO: 36127 - DNA, 433 bp, Gossypium hirsutum
  unsure (1)..(433): unsure at all n locations
  Clone ID: LIB3148-021-Q1-K1-B1
cccacgcgtccgcattagggtttcagcgctgcatctttcatcccctagggccgactcttgggtttcaccagcacataatgtgcctccgccaccgccgagacccaaagcccccttttttggttccgtttccatgcccaagggaccccgatgacggaaccgatgatgtaatcaggtaaactcttcccttttcttattttcttctgctaaaacacattcaaacctcgaagaagaggatctattcaaaaaaagaaaaggaaaatggaactcgaaatcacctctcgaaaatttcggcttgatttttttgtattttgtatttccgtgtgcttaatatgcgttcgtttgtattgcttgtgtccaaaaagagatttacagtcgaaaatcaacagctntatagccgaataatcaaaaaataaagaaaaatataattttttct

SEQ ID NO: 36128 - DNA, 365 bp, Gossypium hirsutum
  Clone ID: LIB3148-021-Q1-K1-B5
cgcaaatgaaataattcattatcaagccttaaatttacgatgccacagctcagcaacacgggagggcgcaacaataaaggacgaagaggaccataccattctaactgaaaaccataacgactcaactaacaaacaaaatcctatcactaaacacttttaaacaactacaccaactcttctattccacacaattgttaaccacacctactctatatacaaacgtaacagctaaccatccacacaacagacagaattcacaacactcaactgcttttcttatcttttctaaccatgccaacacaatacaaaaataccctcccttatatctcaaaccattcaattgaatgacaccacacaaataattt

SEQ ID NO: 36129 - DNA, 289 bp, Gossypium hirsutum
  unsure (1)..(289): unsure at all n locations
  Clone ID: LIB3148-021-Q1-K1-B6
gggnccacccacgcgtccgaaaaaacgaacaaattaagcatcaaaccatggatttcaaaccccatttttaatccccaccggcgcggcgaaaataaaaagggtgacaggacccaaccagcctaaaagaaaacagaaccaactcagcaaaaagaacccaccgccaaagaaaacaaaacccaggaacccaatggttgatcatagggaaacgcaagagaaagaataaataaaccacataccgacaaccaaccataacaaacaaacaccagaggaggaagaagccaagcaaact

SEQ ID NO: 36130 - DNA, 329 bp, Gossypium hirsutum
  Clone ID: LIB3148-021-Q1-K1-B7
cttcggaaagtcctgatgcaagccaacaaagtttaaggttcttcaatcctgagcaccggcaatgacgacggaaatggtacacaaagttcactcctttaacctttcatccccggcttaatgtgctcgatttcatgttggatttgcctagatagtttcagatctaatcaaatagcttttattagaaattctcttcaacaacatcactctaaaaataagaaatatagatttacatacatgcacagtgcaaaaaactagattaagatcaagttattgcatatcttaaaaacacaaaaaaaaaaaaaaaaaaaaaaaaaaaaaaaaaaggggcg

SEQ ID NO: 36131 - DNA, 328 bp, Gossypium hirsutum
  Clone ID: LIB3148-021-Q1-K1-C11
ggaatcgggcgacccacgcgtcgttgtgcaaatgcacgagctcctcatttgggtgaaagggaaaatatttggatcggtcactggcattagcacctggaggtcatatgaagagaacagaatgtgtaacaagtttgtggatgattggacgaatgcccttagttcgactgtatgaagctgggatagccgctacagtggtttgggatcctgaatgcaccattaacaggcttacttcacttattattgctcaatccgcagttgagatcattgcacactgttcaatatcctgagttgtataatatataaattttgtgtacgctaaatgtgtttt

SEQ ID NO: 36132 - DNA, 387 bp, Gossypium hirsutum
  Clone ID: LIB3148-021-Q1-K1-C7
cgggcccccacgcgtcgtggtaaaaaatcacagatgctgctgttggcattctgtcaaatgcttaaacagcaccgcggcgacagactggttgctatcacacattcattaagactgaatatgaggagggtagatcgtttggatttttatgccggtaaacggcaatgcgctcaagagctacactcagagaaatgaagactactactatcgaaagggaactcggttgtcggcagagaaatgaatacttgggttgaaagatcatatactgcaactgtgtaatacacacactaagtattagcttaaaatagaacaattttttttaaaaaagaaggattacagttatgtacatattatatagtactaaaattgctatgcaagaaatatcttatg

SEQ ID NO: 36133 - DNA, 386 bp, Gossypium hirsutum
  Clone ID: LIB3148-021-Q1-K1-C8
caaccaacagcctgtacggtaaaacatcttttttgttcgacatacatacgtatatgaacatgtcttgtcttgttgttcatataacaatgcgaaaataaacagtcggggtttgcttccttagaaaaatgaccatgtagttgtatttgagtgcattgttggactaaacgaaagttttaggttttatagctttttggttcgtattgtttgctctttttatcattgaacacattgttatggcagttttgtttgctaaaaagttcttcatcagacaacagctgaacttaaaattttctgtgtgttacattttcttgctgctaagtatttttagatgagacctggtatgctggatgtaggaaacatggtaatctgaattctgagttgtcaat

SEQ ID NO: 36134 - DNA, 336 bp, Gossypium hirsutum
  Clone ID: LIB3148-021-Q1-K1-D1
ctggttttgagaaaagcagtcccgacgcttcagagcaggaaccagctgtgttggtggatagtgaaatacccggtggagctaaactgctagagaagttgcagggaagcatttcagttgatgaaaaggtgttcttggcagcggcggatgctgtaaaaacagcaatgtgcaatttgttaattaagaagcaatattctgatgagaaacgagagttcagaaagcgaacaagaaatgataggaaaagcaagcagtgattcagtgtattgattgacaatgttggtacatgtaacattagttatatgggaatctcccaatctatttaaggcattgcaaaaactt

SEQ ID NO: 36135 - DNA, 447 bp, Gossypium hirsutum
  Clone ID: LIB3148-021-Q1-K1-D5
cggacgcgtgggtagaatagttcaatagtttcattttcttggtttttattactgtactatgcagctcctttgattctaattgctattggtgtaaatgtgtgacatatttgtgcataaatttgacactgttagcctagtggttgtgccgcagtaatcccaaggtttgtcattgtgatactgctgcgcctgaatattacatttggagtatacaaagattatccaaagatgatgctcttaaatacactgtaaatgagtgtaaggttgagttaaagcctccttattctgcttttgggtagaggccttttgcgatgacaactttgaggtcatttctaatgttctctgtttgagttgaggtcatgtgctactaatgtttcatatatgtatgatttgagacacaatggcatttgtaattgagcttgagatctttggttgtgaatgaaagatgca

SEQ ID NO: 36136 - DNA, 235 bp, Gossypium hirsutum
  Clone ID: LIB3148-021-Q1-K1-D8
agggataggaggtggagctggtggtggaaaaggtggaggcataggagcaggtggtggtgccggtggtggcgctggaggcggtgctggtggtggttttggaggtggaaaaggtggagggataggaggtggagctggtggtggcgctggaggcggtgctggtggtgtttttggaggaaaattaatagaaaaagcatatgactgatttatgtctgctatatttggatatgtggatgta

SEQ ID NO: 36137 - DNA, 417 bp, Gossypium hirsutum
  Clone ID: LIB3148-021-Q1-K1-E1
cggacgcgtgggcatgggttgaagaaagctgctgttactaatgctccaagacctaatgctgaactcatgatctcaaaacttgggctcaaggatttctttgatgttgttattgttggaagcgagtgtgagcatgccaaaccatacccagacccttacttgaaggcacttgaactactcaaggtgtcaaaggatcacacatttatatgtgaggactctgcatcagggataagagcaggagttgcagctggaatgcctgttgtggggttgacaaccagaaatcctgaaaatgtacttatggaagccaatcctactatgcttgtaaaggattatgaggatccgaagttatggtcggccttagaggagcttgataagaaaggagattctttgaaaacagcaacttgagcgtgaattccaaag

SEQ ID NO: 36138 - DNA, 315 bp, Gossypium hirsutum
  Clone ID: LIB3148-021-Q1-K1-E9
cccacgcgtccgcccacgcgtccgaaaaattttataatttaaaaaaaaaaaaaaaaaaaaaaaggaaagaggaaaataaaaagggggaaaaggaaaaggtcggcccctctttttaatccatccttacttacgcttccatgcttcctcctacttttttttttttttcacctaccttaatttatttggccggccgtttacaaccaactgcctggctgaaccatccctttccccacctaatttgccttcgcttgacatacctttttcttttgctggcctttttactaataggcccgcccggattcgtcttccttacaa

SEQ ID NO: 36139 - DNA, 294 bp, Gossypium hirsutum
  Clone ID: LIB3148-021-Q1-K1-F1
cccatactttctttaataatttccctttctagtttttattattacgaacgcaaccaatactaatacgggacggcacactattgagaacaaaatacacatactttaacacaatcttcatgcatacttttatattatctctatctctaagactatcaaaataacagaccacaacaataccctatttcctgatgccttaggacactacatgacccaattcattcactttacaaactctgtagcacttaaaataacaataaatttatatgccgatacacatgatcaactaaccaccaa

SEQ ID NO: 36140 - DNA, 423 bp, Gossypium hirsutum
  Clone ID: LIB3148-021-Q1-K1-F11
gtgaacgagaagagaaagagaagaaagagaaggaggttcgtgaaggaggagaaagaggctaaaaaacgtcaacgtctagccgatgatttcactagactattacatacgtataaggagataaccgcttcttctgactgggaagaatcgaaaccactttttgaagaaagccaagaatacagatcaattgcggaagaaagctttaggagagagatctttgaggaatacattacacacttacaggagaaagctaaagaaaaggagcgtaaacgagaggaggaaaaggctaaaaaggagaaagatagagaagagaaagataaacggaaagagaaggagaaggagagaaaggagaagggaagagaacgggagagggaaaaaggtaagaccgaagtaaaaaagatgaaacagatagtgagaaattagata

SEQ ID NO: 36141 - DNA, 419 bp, Gossypium hirsutum
  Clone ID: LIB3148-021-Q1-K1-F12
cccacgcgtccggaaccattcccggatgcctggaacaatcttgttttactatttgaaagaaacaggtcatgtgatttgccatctctttcgagtgaggaacaatttgatttcttacaaccatttgaaagaagtgattcccaggtaatttttgtaactacagaagagtagaattagttcatttaagatgcaaatatgtttaaggcttcatatgctaatttgtctcatccgtatcatgtctgcttttcatgcttgtaaattaccatagggcatagcatatggagtatatgaagaattgacttttgagttgcaaaaacatacttatgatgatccaataaaataagtttgtctttgaaatcaccacagctagatgttttctgattgctttctatcaatttgaatgctgccaatcttactcgata

SEQ ID NO: 36142 - DNA, 450 bp, Gossypium hirsutum
  Clone ID: LIB3148-021-Q1-K1-F7
cccacgcgtccgctgatatagcagagtgctgtgtgtttggcttaccggataaggattatggagaagctgtatctgcaatagtagtgctggattcggaacaaaaaaggaaacaagaagagtcaaactctgctttcagtttggaagagctttgcaactgggctaaagacaaacttgctccatacaagcttccaacgagattaatgttgtgggattctcttcctcgtaacgcgatgggaaaggtgaacaagaaagagctgaagagacagttgggcagtgaaaagtaagcaatctttattctgagctacatgatagaacacaataattagggattgaatatcagacttgaaattttagaactgagaagcttatgtcatgctcagaaatatcaaataagagaattttttacaattttttttggggagtgaaatgaaccgtttttcttctggtacg

SEQ ID NO: 36143 - DNA, 440 bp, Gossypium hirsutum
  unsure (1)..(440): unsure at all n locations
  Clone ID: LIB3148-021-Q1-K1-F8
accacgcgtccgaagatgtaccagatgtgatgtatgatatgaagatgggaacaaatatgggaacatgtccggacataaattcccagataatctatgggacaatagggggtccatttggttttaaaaaaaaaaaaaaaaaaaaaaaaaaaaaaaaaaaaaaaaaaaaaaaaaaaaaaataaaaaaaaaataacaaagacataaacgatgctacatcatcttctcnttaaaggggggggaagttgggggggcccctttttaggttccaggttaaggcaccgggaaatcccatatataggttctcttaaagggaacccaaagcccaattttttgccccgtttttaaaaggaaaaccctgggaaaacccatgttattccccagctaaaacacctcccttaaaaccccttttgtcaaagcggggaggccagaaaaaaggcccttt

SEQ ID NO: 36144 - DNA, 190 bp, Gossypium hirsutum
  Clone ID: LIB3148-021-Q1-K1-G1
gctacaactaatcgcccatcataactagatgaattcatatttatgcgtttcccccaggctttagagattggactacctgaccgcagggagcggtgttgagattataaatgtgatatccaagggagataatattttattaagcctctacatactttacttatccagttaatgtgaatttactttattttac

SEQ ID NO: 36145 - DNA, 106 bp, Gossypium hirsutum
  Clone ID: LIB3148-021-Q1-K1-G10
attgaaaatcgtggatagaacaaaacaaacaaattagatgccacattatcatgtatcagatttaagaaatcaagataatgagaaagtaagccaataagcttgtttc

SEQ ID NO: 36146 - DNA, 196 bp, Gossypium hirsutum
  Clone ID: LIB3148-021-Q1-K1-G12
cggacgcgtgggagaacctatccgattattatttaatcatacttgccaagaatcctttttttgccttgcagagcaatctacaataaattatctcaaaaacttgggaaaaaaaaaaaaaaatattaaaggtatttgattaatggtaatagaaaaggatgaactcaaatatgtaccttaaaaaactgaaacataatgg

SEQ ID NO: 36147 - DNA, 309 bp, Gossypium hirsutum
  Clone ID: LIB3148-021-Q1-K1-G8
cggttataattgaagtggtcaactatcgattctgttgttttattatgtatccatggttccaggtgcttgcatgcataatggttattttgtttgcgttttcttttttcaccttggttctactgttctgagtttttgacatgggtactcaacgattttacatactgcgcctgcgaccttatgatcattagctcatataagtctgctgcatttactatgtggttggcaatgtagggtcccttcctaacaactatggaagctgccagtctatgtcccattgtcgcaaccaatgtgtgtaaacccatttgtgac

SEQ ID NO: 36148 - DNA, 329 bp, Gossypium hirsutum
  Clone ID: LIB3148-021-Q1-K1-H1
ataaaacatgggttgtgttacaaccaagtgattggatttgcttcttactactgacgttgcttgataatgaaatgtgagctgattgtgattttgttcaaaaaaaaaaaaaaaaaataaaaaaaaatataaaaaagaagtaatgaaaagaaaggtgatagcaagtagaagagtcaatgtttacaaacaagaaaggcataaaaggtactgtggttgaacgtcattaaagtacaaatgatggccaacgaaaacctattttttaagaaaaaaaaacgactcttattacattcgaagatttttgtcatgctatagagaaagccgcttagggagtc

SEQ ID NO: 36149 - DNA, 411 bp, Gossypium hirsutum
  unsure (1)..(411): unsure at all n locations
  Clone ID: LIB3148-021-Q1-K1-H11
gacgttttgaagagtaactgccaaaattcgatggtaagttgattctgtgcgggcacacagtgtattgaaaatataatttatgagattattgaggtccaaggaattaaaaattagatagctgcatgtgtatagccaagctgaatgagctttcatatgtaccaacaaaagaaaagtaggaattgaactttagactacaaatggatcaaaaaagaatataaaatgggcccctgagagcttcttttatctgatatacatttcttgcttgaatgtacataatatgaatttcattagccgaattggttgtaggtctcttccgaatccatgaaatcaatgggcaaatacttttctctatttgaatatacatggntatgtagcttgtnnaananaaaaaaaannaaaataaaataaaaa

SEQ ID NO: 36150 - DNA, 422 bp, Gossypium hirsutum
  Clone ID: LIB3148-021-Q1-K1-H2
tggagaactggtactatgacatagtgctggttatgaaggaaaccaatgggtgcatagaggttttaatgttagaacgtgtggatggcttcaattctgttttcagggttcaagcaaaagggggatctaatgttgcagccgaaatctcttgggtggatcagctaaggttttcgcatcaaattccatttttcgagctaaccgaagagagaaatggcagcctaagaggttgctgggaacttgatcctgcagcattgccggtacattatttttcttaatttaagaagtaccaactagtaaagactagaattctaatgtttgtcttcatggaaccaactctgggtgaaagtctcaattacttagctgcaactgaaatgcttttcttcatgtttctgattcatattttcgatgtaaaatataagttgttt

SEQ ID NO: 36151 - DNA, 358 bp, Gossypium hirsutum
  Clone ID: LIB3148-021-Q1-K1-H4
gtctcactgctataaatccagggagttaattatgttcattagacgaagctatagtgcttcgtcatgtaagggcctttgcagacggcgagctgagattttataagtcaatgggggctttcatcggtttgaatcatctgtcaactgcgttattctggtctttgggcgttatatccacaacatataacattgcatgtatgattttcaggtaggtatgatgctacgagatcaatgtatcagaaacgtttgtattattattaacattgtcctgccaataccatattagagaaatccattaattgcttaacaaaaaggtgaacttgtaagaaccaagtctgggtcaaagaattaataaactcat

SEQ ID NO: 36152 - DNA, 418 bp, Gossypium hirsutum
  Clone ID: LIB3148-021-Q1-K1-H7
atttttgttattactttcgttcttgttattccttcttttctgagatcatgttgcaatactgagattagtttgaatttcaaggtcccagtgcagctgcatctagacctactagcattgctgctagtgaggctcatgaatctgaagctaatgttgatcttgtacattcatcggaggtatgattttgtgtatatcaactactgtattctacttagcatcactgaagctgttattactaaatggttttggtaaaatatagcaatgtttggcatctcctgtgaatgttgctttgattctttattttgcttgaagtatttctgtttggcatctatgttctaaacatatttagacatggatgtgaagatatgaacttccaaggatcctcgaaaataaaagaaaaaacatacctgtgtcagacaca

SEQ ID NO: 36153 - DNA, 338 bp, Gossypium hirsutum
  Clone ID: LIB3148-022-Q1-K1-A1
aaaaaaaaaaaaaaaaataaaaaaaaaatataatttttttaaaaaaaaaaaaaaaaaaaaaagaaaattttaaaatattaaaaggtttttagttgtttgggaattattttaaggggggcggccgtcttaggggttccatgtttttttttttcttttttgcggctttatatttttttttttttggcgcctattttattttcacggcccgttgttttccacccttatttcctggaaaacccttggctttaccaactttattgtcttcgaaataaattccttttcccactgtgggttttattattttgggctcttttcctttttttttttttccaattttt

SEQ ID NO: 36154 - DNA, 363 bp, Gossypium hirsutum
  Clone ID: LIB3148-022-Q1-K1-A12
gcaacaacagcatttcacatccagcagcggtcctggagattccccaggaacaagccgtggaaatggtttatggagtaggtcaggcgcatcaccaatgttgcagctgcatcttcactcggactattcaccggtttgggttctaccacttcatcaggagcctcttctccagttgattggagcagtggtagctcaatggggcaattggactataccaatatcgattggagcttgaatcgagggttgtcttcttcgccaagtcctggtggaatctggttaggatcatctacatctccgatgaagagcattcacatgtattatcctaacacaaacggattaagtgctaaaccagcaatgagattgaca

SEQ ID NO: 36155 - DNA, 290 bp, Gossypium hirsutum
  unsure (1)..(290): unsure at all n locations
  Clone ID: LIB3148-022-Q1-K1-A2
tttgtatgggcctgggcaaaaatggtccattatacttctagccctaaaatctagggtgttacagctacaccaatcctgtcttccacattttttatctttagtcccaaaatcaagctatgccattttgtttttatctttaataaaaccaaaacaacataaaaaataacaaaaaaaatgaaaagaaagaaaacaaaaactctgggggaacataagcaaaccattattacatatcgntccctgaagccgttctggtttgccttacattttttacattttttaatttcttggtg

SEQ ID NO: 36156 - DNA, 377 bp, Gossypium hirsutum
  Clone ID: LIB3148-022-Q1-K1-A4
cgatgactaatttaagtaaataaaatttttttaaccaaaaacttgatcatcatgaattttatatataaagcataaaataatgaacaatttgaatgtttgaataatggcaggtgggatgataggatgtcagctgtaataccagatgaagaaatattctacacagtgggttttttacatttaagtggatttgatacttggaaagcttttgaagaccaaaataaagacataatgaggttttgtaataaaactggaattatgcttaagcaataccttcctcattacagtactaaagaagaatgggttcatcattttggctcaaaatggaaggtttttcaacacagaaaatatcaatttgatccaagaatgttattgtcacc

SEQ ID NO: 36157 - DNA, 369 bp, Gossypium hirsutum
  Clone ID: LIB3148-022-Q1-K1-A7
aggcgttcggttacgcgttcgaatggcgaaactgatgattacccgtgcgcacttcttatgatactgcttttgagagccaccggaattttactcccaatgtacatgtaattcgatcaattacagccattcgaaacaacattcgacgacgacgaccacgacaacatcatgattccgaggagattgccatgtctgaagacaatgatgatgattgagcagcagcaacttcacattgcccgacagatataatcttgttgtatgttcttaaatcaattcccacttttaatctgggcattactttgatgcccatcttgtccaaattcctcaattttttttggcatcaatgggaaatatcgtgaagtatttatttgc

SEQ ID NO: 36158 - DNA, 413 bp, Gossypium hirsutum
  Clone ID: LIB3148-022-Q1-K1-B11
gctagacggagcttaccttcataagagagatcttagattttacaactctgagatgcatagggctgcttttgcattgccttcgttcctgaagagggagtgaggctactatgagactccgcagccccggaacaagaaaactgtctcctaaagcaaatttgtagaacttgcaattgtttactttttatcgtaagcttataaatacttgtattcgagacataggcagtaaataaatgtgttcaacatgcaagtgaaattggaaccattttagtatgtatttacaggtctaatttcagggaatacgtagtataggacttagccttatgggttgtgtgacgcagcaatgtgtttgcttgatgataggtgcttcaaatgtctttcaagtcagtggtctgaacttgacaacattgaaacac

SEQ ID NO: 36159 - DNA, 367 bp, Gossypium hirsutum
  Clone ID: LIB3148-022-Q1-K1-B2
tggatactgggcttcattcaaaaaaaaaattaaaattttaaaaaaaaaaaaaaaaaaaaaaaaaaaaaaaaaaataaaaaaaaaaaaaagataaaaaactaaattcaaaataaaaaggggcgccccttttagagattcaaacttaactaacccttccttgcaacataatactttttctttattgaaacctaaatcaaatccactgcccgttttttaaaaacttcgtacctggaaaacccctgccattcccaaaataaatcgctttgaaaaaaatccccttttcgcaagttgccgaaataccaaaaaggcccgcaccaatcgcctttccaaacatttccccatcctaaatggcaaaaggaaccccccc

SEQ ID NO: 36160 - DNA, 270 bp, Gossypium hirsutum
  Clone ID: LIB3148-022-Q1-K1-B8
cccacgcgtccgcccacgcgtccgatatcttgacatcagaagctgttgggaatcgtggtaagaacttagttcaaattgaggtttatgatctacattgtggatagactttgtccaaccaattcaactggtatcgaagaaagattgaattgatgcaatatccgttgaaccaataaaaagccgattgaatcgggcaaaaaatttgaaaaaaaataaaaatcatttggactgattttaagttagtttaaatatttaattttgttgctttagttt

SEQ ID NO: 36161 - DNA, 245 bp, Gossypium hirsutum
  unsure (1)..(245): unsure at all n locations
  Clone ID: LIB3148-022-Q1-K1-C12
attttcatcaaaaaaaaaaaaaaattaaattttaaaacaaaaaaaaaaaataaaatgtgagtgctaatctttaaaaaacaaataccacatacttgcgnttctataatattaaggaactgacttgaaaaatacaaatttataagcctgtatacttcactaacaaggcttttcttaatgtgatgaggagaaaagggcgcctctttcatgatgtcaattctttttgaaatctttatccctgctttaat

SEQ ID NO: 36162 - DNA, 415 bp, Gossypium hirsutum
  Clone ID: LIB3148-022-Q1-K1-D10
gagaattaaagctgaagctaaagctcgagatattgaagctgcagaagcagccaagagaagtgcaaaagcggctgtctcatctattcttccatctaattatttgggaagaaagaagatgaatctgactcaaccgtggcaaatgaaaatggtgaagtgccggatgaagatgagagtgaagggtctattgaggaagctaccgttatggagtcggtttcagattcgaatcctgttgatgcaaagcaaccattctgatagcaagaagtagctccgttgttttgaaggataaggtaagatctaatatgttcatttatggacttaattttatcagcttgtgtatcttgaattaggggattaaagaaaattaggttctagagtcactctctgatttctaaatattgatgggcatactggttga

SEQ ID NO: 36163 - DNA, 212 bp, Gossypium hirsutum
  Clone ID: LIB3148-022-Q1-K1-D7
cccacacatccttacattcacattttattttataaacaaaccgccaagcgcagagcggggcgttaacatacactagaaatcacttccactcatgaagtacctcaaagacacccaaaacctttgccttcatgatcaatctcagaaatacaatcaacacacaaagttgaacgtgtcattggtaactacattgcatggtcaaggttgatctcata

SEQ ID NO: 36164 - DNA, 404 bp, Gossypium hirsutum
  Clone ID: LIB3148-022-Q1-K1-E11
ccacacctaacgaatagacatactatatatataaatgtgtgatacatggacacacatccatgatcaaggtacagatatgcagaaaagcaacattcggcattacgtgaaccgggaattgccgcgctaggaggcctcactaacaacactactaaaggcgaacttcataagaagcactggctcatccctatatatacccgtttagtaagagcggacagcagcacaactcgtacctaacatgctaacaccacggtgatggtgtttaggcaaggcatcttcctgtatcaacatatgcataaatagatcctcatctctgtatagcataacagtaaattaaagtcccctctttttttactttagattttcatgtctcccccaagggaaaaggttatgttttatttggggcg

SEQ ID NO: 36165 - DNA, 158 bp, Gossypium hirsutum
  unsure (1)..(158): unsure at all n locations
  Clone ID: LIB3148-022-Q1-K1-E4
cttnccaatattcccggttcctagaaatgtatacttttgttttgagcccggccaccagaggcaagggttaatttttcatcactagacctggttgagacacaatatttgcgactttaaaaaaaaaaaaaaaaaataaaaatttaattatttatatattt

SEQ ID NO: 36166 - DNA, 242 bp, Gossypium hirsutum
  Clone ID: LIB3148-022-Q1-K1-E9
gcttcacagtgtttggaagtaaaggtgatttggtgttcagggtagatacttacatggacggtaacaagggtgagatccttctcaaggatgccactgcaaccatctctttaccattcgccgcaagaaaatgatcctgggaaatagctggttgatttacaaaggcgaacgtaccttaacgaatcccctactttgtgttacgcaattgatgtacatgttaaacaacaagtgcttggcttacgtta

SEQ ID NO: 36167 - DNA, 133 bp, Gossypium hirsutum
  unsure (1)..(133): unsure at all n locations
  Clone ID: LIB3148-022-Q1-K1-F11
atttttgtaatatgcttaactagatttagtttaatgtgtgaccatcatttgtatgaaatggtgatctcattatctctgagcatcaaatggaaacccaagctttgagatttgactntagtaacattgaaaaata

SEQ ID NO: 36168 - DNA, 333 bp, Gossypium hirsutum
  Clone ID: LIB3148-022-Q1-K1-F4
ctcgaatccagttggattctggaaagccattttccatggctttccagaaagtcatcttttatatatgccaaaacctacatcctttaaccctctccaatatttttcttcgaatcatgctcagtaaggggggctatctgaatatccaatatcctttttagatattagattgcatctatccttttgcttatatatgaaattttaagtgcggaaaaatattgctgaagtatttattgtcttcaattttagaagtatattcccctctcaattcggataacttgtaaattactgataatccaaaatcttatcacctctaaggttcagattgaacaaagg

SEQ ID NO: 36169 - DNA, 414 bp, Gossypium hirsutum
  Clone ID: LIB3148-022-Q1-K1-G11
cccacgcgtccgcccacgcgtccgcagaatgggatatgccatcatccatggttgtatccgagggtcgagagagggcacaaaaagcccgagtttgctgtagttgccagcgctcttgttcggataaaacacacaatcgtaagcaaaagaggatcacaaataatcacttgaggtcttggtttacacacatatatataggcaaactttttcagtgaattataggtaattttttctgtttgtaatataccatttctatgtatcagctaccttcggatatcctgtggctcaatgtgttcatagctccaaagggtaaagaggggtccgtttgtgtgttaaagggttaggggtctattctagtttttacatatgtatatatatacacatatcatgtatgtgtatatgtatgttctggatgct

SEQ ID NO: 36170 - DNA, 132 bp, Gossypium hirsutum
  Clone ID: LIB3148-022-Q1-K1-G4
ggaactaatcaagtaagtgaaatttcaatttttggccttagagacggcctttgttttaaagaaggaaactaagcttaaaaaataaaagttggcctgaaaagaaccaatccaatttgcttgtttgatttgctg

SEQ ID NO: 36171 - DNA, 324 bp, Gossypium hirsutum
  Clone ID: LIB3148-022-Q1-K1-G9
gttagtgaattgcaagtaagctggtttgtatcagtaaaaaaaattccagctgatggcaaagaaagttgtaaggtgggggtgctgaagcggctgcaaacaaaagaaaacatgcagcccgcagcactcgagtcatatagtagtttcatttttactgctatgagaataagagagatttagataaaccaaaacaatattttcttgatctgcaatgtctttcttgtgtctctacgttaaataaaagaaaaggcaattgctttttttattatattactattattttaattatttttttatttctatttattttattgattttttgtatat

SEQ ID NO: 36172 - DNA, 303 bp, Gossypium hirsutum
  Clone ID: LIB3148-022-Q1-K1-H2
gtcgcacgctcgaggaaattcaacacctttattgcccaatcggctttgcatgcaacacacgggccgggagaagtcgagtcaatgacatccatgagaaactgcgtctttgatggcgaggttctggagttgacaacttcactagcaacaaccggaatcaacacgcgatcagtctaaagtccgggttggggaggtgggcatactattagcatcgtgaaggtgtgtggacaatgccacctacttaactatgactcaccacgattgggacactacttgcagtgccatcggagagatgtacagatgcac

SEQ ID NO: 36173 - DNA, 341 bp, Gossypium hirsutum
  unsure (1)..(341): unsure at all n locations
  Clone ID: LIB3148-022-Q1-K1-H7
gcaattcaaatagtatcttcgacaccagacatggcgaaagcagcgaagcgtttaggcgagttcgcggcctgtgcttggaagaagaaaaggaaaggcatgcaatggatgatatttccgctatctgcctcttcttccactcatctcaccatgaagttaatcttgtaacaacttcaaaatagtgtgtacttaaatgagcaaatggtggctgctcttaaagtttattacaactatattatatatttagttaatcagaaagtattcatttcatgctcatanaanaaaaaaataattaaaattttctaaattaatattaaaaatatttttttaaaaaatctatattt

SEQ ID NO: 36174 - DNA, 328 bp, Gossypium hirsutum
  Clone ID: LIB3148-022-Q1-K1-H8
cccacgcgtccgcggacgcgtgggggcaactttgggtgattttccggctccgatgtccttatgtgcaataacatcgtttattggactggttataactcaatagtgcagttgttcaaaaatcatggtgccgaatggggttggccccttgtcagtgttttggacctagttggctattctctactgggaggtgctgtgagcggagcatgtgtaagcttcaatggatgggcaatgaagaaaaggggaccagtgcttgtctcaatgttttgccccattggaacagtcattacagtagttctctcctttattactttaggccagaccatttcgt

SEQ ID NO: 36175 - DNA, 419 bp, Gossypium hirsutum
  unsure (1)..(419): unsure at all n locations
  Clone ID: LIB3148-023-Q1-K1-B6
acgattaaggtgttgtgcccaggtanataaggtgatggcacanaatcaanggaaaggtcctctncttccttctggtgggaagacaacctttatttgaggcacatgctcattgaaaaggcaccagaaagactttcctcactcaaccaacttttttctgtttgtttataatacagcgagctgatagtagcaaaaagaatgacttgttattttgcttcagtaaaggaaaggtgctaacatccatgtattaacaacttgataaccacactttatggaaatcaacctatcaatcatgcccctaaggatttgaccaatggtagtgtgtccgcatcgattcttacaactcaccttcaaaatcttttccagcaaacctcacttcaacagggtcttatcgtgaatttgttgaatagcttgcagtcagc

SEQ ID NO: 36176 - DNA, 129 bp, Gossypium hirsutum
  Clone ID: LIB3148-023-Q1-K1-B8
ccttaaatcccctttataactcttcgatagggccccctaaaaacaaattacttgcccccgtttttacaaccttttgacttgaaaaacctggccttacccaacttaaacaccttgagcacataacccttt

SEQ ID NO: 36177 - DNA, 407 bp, Gossypium hirsutum
  unsure (1)..(407): unsure at all n locations
  Clone ID: LIB3148-023-Q1-K1-C10
gtttatttaggaagggctaaaggaaaatattcgaccgtggtcttcgcacaaacatacttgtccaggacaatcgtccccgcaggatggaccgactggagctaccagggtggccctgatcatctgttccatgccgaatacaagtgtcacggaccgggtgccgatacattcgggagagttcattgggcgaaacaattgacggacgaggaagctaagtactggacttccattgagttcatcaatggcaacgtttggcttcctgcatggctttgaacagaagatatatactttgcaatgagcggaaaatttatggaattagtttatttaaaaaaaaatngatttgtattgtatgagaggagaactttggatgcattcaatgtagagtttcataagatctattgaaaatgaat

SEQ ID NO: 36178 - DNA, 317 bp, Gossypium hirsutum
  unsure (1)..(317): unsure at all n locations
  Clone ID: LIB3148-023-Q1-K1-C9
cggcccggaancccggncgacccacgcgccgcccacgcgtccgaaaaaatactagtccatgctttcaccattgtaccaatagtccaaaccgatactttttatgctacctaatgaaactctattatttttcaccatggggtttctactacaatcatgtatatattattacctttggctatggcacgtaataataagaaaagagtttaatgcanaaaaaaaaaaaaaaaaaaaaaaaaaaaaaaaaaaaaaaaaaaaaaaaaaataaaaatataaaaaataaatataaaaaattataaaataaaaaaaaaaaaataatt

SEQ ID NO: 36179 - DNA, 194 bp, Gossypium hirsutum
  Clone ID: LIB3148-023-Q1-K1-D7
ggttcttgctagtttgtttaagtggcatgtattaggaaaggtctttagcattttgatattgttgtgaagatgtaaatattgaaagttgatatgtttatgcttgttgcttgtgaattacatttgaacttgtgtgcataactaggaaaaccttttgaaccacatataagtagatactgtacaaatctttttggtgc

SEQ ID NO: 36180 - DNA, 330 bp, Gossypium hirsutum
  unsure (1)..(330): unsure at all n locations
  Clone ID: LIB3148-023-Q1-K1-D9
cgaatatgcaacaacatgaatattcgtgagcgttcaaactaatagaggttatgcgggtggtgtaggaacctaggtcatacaatgtcgtcctatccacatcaaagttaaatattgttatatgtcttcatgggaattgttaaccattgttaatccaaaataaatttaataaataataaaaatatattaaaaattttttaaaaaaaaatattataattatatataaatattttaattaatatattttattttnttatataataattataatttttttttttattttttcttttttatatttttattaattttatatttttattatattttttt

SEQ ID NO: 36181 - DNA, 312 bp, Gossypium hirsutum
  Clone ID: LIB3148-023-Q1-K1-E8
gccgggatggtacatagcatggttattacttaagatggagcattattttattgggtggcggtagattctcatcttagatgccaacagctatattccctttctgagaaaacaatcgtaagcatttctgctggataagaactgggctgtaactgctactgctataaactatttctacatgttaaatggcaagaaaagtttttataaaacttttgttccaactcaaatacttctgcttttattaaatattgtttcaaagatgaatcatatttttttgctacttttatatttctttttccttttttattttttttt

SEQ ID NO: 36182 - DNA, 326 bp, Gossypium hirsutum
  unsure (1)..(326): unsure at all n locations
  Clone ID: LIB3148-023-Q1-K1-E9
ggcgaccacgcgtnggttacctttctctttacctttttatttattttcgtatatgaaaaaataaaagaactaagggatgaagaaaaatataaaatcaaaacaaagaactagatgaaaaaccctcgtaaataaaaaaacaacaatcaccttcgaaggttcttttagattaatagtctctgccttttgtttgtggctaaaaaaaaatacaaaggtaaatttctggtttttataaccgannntcaagactggttactcctatttttttttgtcgtttctacttgttcctctgttgatgcgtgtgggttttgtctgcaggtgtcagagag

SEQ ID NO: 36183 - DNA, 357 bp, Gossypium hirsutum
  unsure (1)..(357): unsure at all n locations
  Clone ID: LIB3148-023-Q1-K1-F10
cttcatttcgcccaagaattggccattctaattgaatggcctattcttaaccactaactgctccctgcatttggccagggggtcaagggtcccaatgtcaattggaaaagatccggaaccacctgctatcaaaagttggctgttacatgccccaatgtcaatgatgttcggtaccaagactgcagtatgacatagaagtcatggtgtttgttgcatangngatgaactacgtgactgtctgcagagtgccactttatgtatcacatctaatgcaaacaccattatatgaagatgtgcatattgatgagttgctgtgttattatattatgcacttacgtatatcttaataattgatgc

SEQ ID NO: 36184 - DNA, 411 bp, Gossypium hirsutum
  Clone ID: LIB3148-023-Q1-K1-F5
ctctattttattctctgcgaattcattcccctgtttttcttttcttcttttttgaagagcttcatttccctttcaatggaaagcatggaagccaagctcccacaaaacccacctcataaaacacacaaacttgtcctttgtgcacaaatttgtttgagaatcgtggccatttcgactgcatttgctgccacatggacgattgtcaacgccaaggaaactgttgtggttttcggcttgcaattcgatgctcgatatacctattcctctgccttcaagttcttcgcgtttgcaaatgccatcgcatgtggtttcacttcgctttccttgatgttcgtgctcttaatcttccgccatggccgctttacaccttcgaacttcttcttcctattcctacacgattttgttatgatg

SEQ ID NO: 36185 - DNA, 309 bp, Gossypium hirsutum
  Clone ID: LIB3148-023-Q1-K1-F9
accaatcatcacccgattccatcttggactattcctatcttttcttttataattatcttgacccctttacccattctgaaaaatccaatatatacccaccaaagaaaaagcaagagcagtaaaaatccttgatcagcaacccataaggtttcttttctgtttttgtttttttgtcaatcaatcaatcatgacaggcaaagcctagcccaagaagcacactgccaaggaaatcgcatccaaaagcgatgccggcactaccaaccgaggttgtggccaggctggattaatttgccgtgcttgcgtggagac

SEQ ID NO: 36186 - DNA, 396 bp, Gossypium hirsutum
  unsure (1)..(396): unsure at all n locations
  Clone ID: LIB3148-023-Q1-K1-G12
gggcttcactcttgaatgactagtgattccaaggtgtaattatccgactaattgcaatgggggtttttcttttatgcttttaacttgagatctggatgctaaggaattgatatggtcaaagcaaatatgttatgattttggaagcaaatcttgaatattttgaagagttattgttgtattagcaaaaaaaaaaaaaaaaaaaaaaaaaaaaaaaaaaaaaaaaaaaaaaaaaaaaaaaaaaaaaacccaaaaaaaaaaaaaaaaaaaaaaaaaaaaaaaaaaaaaaaataaaaaaaaaaaaataaaaaaaaataaaaatataaaaattattnnggggggggactttttaagaaaaaaaaattttatgggggtggttgggaaaaaattttttttttt

SEQ ID NO: 36187 - DNA, 397 bp, Gossypium hirsutum
  Clone ID: LIB3148-023-Q1-K1-G4
ttaatatcatcttagattctgcgcaaagggctcttcgatcatgggatataattagtgcaatgattaagtctcaagtgtttggtatgatcatatctattgtgagctgtgcttggggagttaccaccatgggaggagccaaaggtgttggcgaatcaacaacatcagctgtggttatttctcttgttggtattttcatggctgattttgcactctcatattgcttcttccaaggagccggagattcgttgaaaaactgtgtataaccaggttggcctctttgtcagcatctaactctttacacctatctcaatgttgttcaatggatggctcctagaggacagataacatagaggggaactatataggttctgtataaagtcttgcaatctttggctag

SEQ ID NO: 36188 - DNA, 233 bp, Gossypium hirsutum
  Clone ID: LIB3148-023-Q1-K1-G7
aacatatccaaaaatgtagaatgtgctttacctagagcttcttcctaaatatcagttagtccttgatttttttttcagtatgtactatgtgttatcaagtagatttggagtttgaatatctacatctaaattattttcatttccaagcagagatcttttctgatcaattttcttgtaacaaaataaatagtatcattgtgtttgttattatagaattacaagagtcttgtact

SEQ ID NO: 36189 - DNA, 400 bp, Gossypium hirsutum
  unsure (1)..(400): unsure at all n locations
  Clone ID: LIB3148-024-Q1-K1-A10
cacaagtttagctttgaatttgggatggattttgcttccttgttgactacaatatgtggttgattgtcattaatgtttaaggctttcaacaagttgccaagcatattaagtttgtttagattaggtggatgattaacatttctcttttgcttggattttcccatattgttataaattatgtgttcctgtttcttaaaaaaaaaaaaaaaaataattaaaattttattatttatataatttttaaataaataattttatatataaaattattatttttttttattaaaattttttttttttttatttttattttttttttatttttttttttttattttttatttttttttttttttattgntttnttntttttttttttttatatttttatttttttttt

SEQ ID NO: 36190 - DNA, 444 bp, Gossypium hirsutum
  unsure (1)..(444): unsure at all n locations
  Clone ID: LIB3148-024-Q1-K1-A2
accggaatggnagggccggacccacccgtccggatcgcggggaggtggtgtggcccacgactcgtttttgcgcgacgtgcggagcccggaggcaggcttgcggcgctggcttccctgatgctgggtttctcatttccttttttgttttattggtatttggcctaggtattatgtgggcttgtgttttgttttgtatattgggctgagagatgtgggttaggttttgggtaatctgttgggctttgggtttgttttaaatttggtcctacagtagggttttggcattcttagctttgattgattgcttcagagtttgaggagtgaagaggtgaagtatgaaaaatatttttgcatgactgagaagaatcattcattagtggtagggtatacaaagattatgattttttgcgttatattccttcacactacttttttagatatgta

SEQ ID NO: 36191 - DNA, 410 bp, Gossypium hirsutum
  unsure (1)..(410): unsure at all n locations
  Clone ID: LIB3148-024-Q1-K1-A4
atcccggggcggaccaaggcgtccgcccacgcgtccgacgaaagcctaatcgaacaagagttagaaacaaattgtacggagcacccagaccctgatttgttaattagaaccagtggtgaacttagggtcagcaacttcttgttgtggcaattggcttacactgagctcttctttgctcaagaactctggcctgatttcaggaaagacgagttcgtcgatgctttgagttcgtatcagcagcggcagcgccgctacggcggaagacattgatcagctcatcagaaagtaaataaatatggtgttagcaattgaagatatatagtcttactatacatatatagaaatgttatacaaatatgtaaaaactttcgtgtaggatagtcaactgaatcacagaaagttgatattna

SEQ ID NO: 36192 - DNA, 270 bp, Gossypium hirsutum
  Clone ID: LIB3148-024-Q1-K1-A6
cccacgcgtccgcgtgattgcagcactggtgtgttctagaaacccctagtgctttcggctgctaagattcccctttttggttctttcgagtttgggccctttttgcaaatcgggcttaaggatttggtctttgggcatctgtatatgtttgggctattcgggcattagaccagatttgtttttttattattattttgggttagtgtttattaaaggttgtaaatggacaatttggactttatttaggtttatttgactggctatttattt

SEQ ID NO: 36193 - DNA, 177 bp, Gossypium hirsutum
  Clone ID: LIB3148-024-Q1-K1-A9
tgccgttgagcctgaaatagcagaggagttctaggacatggtcgttgtggaatcggttagtaggtattgatcgttatattatccagttggttagagttcatttcgcatttgttcattggcaaggtaatagtatggatgcttctttggcaatggtgagttatttaaaatttggtggcg

SEQ ID NO: 36194 - DNA, 156 bp, Gossypium hirsutum
  Clone ID: LIB3148-024-Q1-K1-B1
gccaaaggaagctattctctgctaaagcttcacctataaaattgtgtcagctgtatttgtgtgatgtaccaggtttatggaccatggattccttgcttgcaagatgcaggatcaagagaatttgttaatccatgttaatatatagattttgtcccc

SEQ ID NO: 36195 - DNA, 220 bp, Gossypium hirsutum
  Clone ID: LIB3148-024-Q1-K1-B11
atttatttattattatgaggagcaaaggatatcgaagataatattattttaattaatagaggagcggtagtagtagatagtcgggatttagggtcattttcctttttcctaaatgttggaaccattattatgttccgttgttactctcttttctttatgcaactgagggaattcctctttttttcttttttaacagcataatagtaacaccagctttcat

SEQ ID NO: 36196 - DNA, 246 bp, Gossypium hirsutum
  unsure (1)..(246): unsure at all n locations
  Clone ID: LIB3148-024-Q1-K1-B3
cccacgcttccgtgcgatttacttaccgaagggcaaatatgtaacatggagggatccgtgcagttgaccttgcatatgatttgattcaacagggagaaatgaggcaaatatgcaaatgttgtagtgaaatatttcgagagtttttaattttctgggtgttgatgtgtttatgttggagattcttgtttgctaaagtaacacgactttcgcatagacattataaatgcagagaaaggttagcngttt

SEQ ID NO: 36197 - DNA, 431 bp, Gossypium hirsutum
  Clone ID: LIB3148-024-Q1-K1-B4
agccgtcgcccaaggcgtccggttcccttgtactaaaacatgttcctcctcagagtatggtagcaggtacaccggcacaagtaattggatccatagatgagcaagatccatctttgacaatgaatcatgatgctaccaaagagttcttcaaacatttagctgttagttttagagatggaagatccaaataagccaaagaatgatgaggaaaacaaggatggtggacattgatgtcaatgtccactgccagttgcagctgtatgtaaagaaaaataagactagaatggtaaaagtaccatgaaagcctgcattttgtcccctctactaaaaaaatggcaaattaatccctctgagttagattaaagagcaaactagtcattccgttaaaaatttcatccatttttgttgttaaaaattggttcttgtacgtc

SEQ ID NO: 36198 - DNA, 143 bp, Gossypium hirsutum
  unsure (1)..(143): unsure at all n locations
  Clone ID: LIB3148-024-Q1-K1-B5
atttagactgtttatgttatgttgtagtataataatttgtatgcaaatttgtaagttatgctagtttggctctaaaacaaaaactcttgaacttcagcaagagctttattcagaaaataatcaatgaatattttttatcangt

SEQ ID NO: 36199 - DNA, 408 bp, Gossypium hirsutum
  Clone ID: LIB3148-024-Q1-K1-C7
cccacgcgtccgctcgtttttgaagtttacttccaaggttacaggcaggcatcttggtgggagagacggacaacggttccaccattttcaattgggttcttgttcttgcaaggatttctggtgaagctcttgggacgatttaatctttgtcttgaaatgaacgtggtctctgaaaagacatcggggtatttagtggacaatggcaatgcgaggaaggctctgttagtcatttggtgcttgtgttatgttgggttcataatttaagcattataaattgctgaaattatcattctggttctgctgtgaaaggatacctcctatgttactgggatttggatacgagtgtctatacaaatatctgtacggcacaaaaatgtttgcatggtttttaaaaattgtagtaaaaat

SEQ ID NO: 36200 - DNA, 383 bp, Gossypium hirsutum
  unsure (1)..(383): unsure at all n locations
  Clone ID: LIB3148-024-Q1-K1-C8
gcccacctccgcccacctccggctttatattataattcatatatcaaccaaancgcttgtaattaacgtatttgcttgctaatgcttcttttccttgaattggttgggtcagtcttcggcatcatttttccaagacaacagcgtatctctagggaagttaatcggatttagacaacacagagaggatcaagcattttctaacgcaatcaacggggagagagtatcctgatccaatagaagctactgtcgggatgtctcccgacgtgacaacaattgccgattgagccaaggattgcatcctcttatactagctcacttgtaagatcaacaaagcaaagcagtgaaaccatttgtgtttgaggttgaatctaccatgatttagt

SEQ ID NO: 36201 - DNA, 259 bp, Gossypium hirsutum
  Clone ID: LIB3148-024-Q1-K1-C9
atttcctccaaagcttgtaatactttttctcaataaatcataggcacttccaaccggatacttactttaatactcaccttaccacaccaagaaatcttattgaggcatacctactaaacatatacaaaagatttttccagcataatctccagaaaatttattgcttatcaaatcatacttacattttctctcaagatactaaaaagaagacttctaaaaaaatcataaaatatttatgcttcatcttagaaagccaata

SEQ ID NO: 36202 - DNA, 299 bp, Gossypium hirsutum
  Clone ID: LIB3148-024-Q1-K1-D1
ccacccgtccggaagtttttaatcccaactttctgctaagtctaaaaggacattttctgatcgacaaaaggttaggttcatcattgcccagaaatgtgaaacgtttaatgtgattattacaaataaacattacatatgaatggttttattttttttacatttttgtgtgtgaaatgaaatgttcggtataatgctgacttgtggatatggcatgatttgtggtttgctctctcgttatataattaccaacaattcatggattttaaaaaaaaaaaaaaaaaaaaagggggccccccttt

SEQ ID NO: 36203 - DNA, 349 bp, Gossypium hirsutum
  Clone ID: LIB3148-024-Q1-K1-D10
gtttgaattccaagtgatactttgcactcttaaaaaaaaaaaaaaaaaaaaaaaaagaaggaaaaaaaaaaaaaaaaaaaaaaaaaaaaaaaaaaaaaaaaaaaaaaaaaaaaaaaaaaaaaaaaaaaaaaaaaaaatttaaaaaaaaaaaaagggggcgccctttttaaagaatcaaagtttacttccccttgcttccaacttattagtttttttttagggcccccaaatttaatttccttgcccgccttttaaaaacttcttaactggaaaacccttggctttcccaaattaaatccctttgaaaaaaatccccttttcccaagttggcttaataccaaaaaggccc

SEQ ID NO: 36204 - DNA, 415 bp, Gossypium hirsutum
  unsure (1)..(415): unsure at all n locations
  Clone ID: LIB3148-024-Q1-K1-D8
cccacgcgtccggaaaatacagagtgcatgtatgcctttttcacatgcaaaaagcggactgcagctctaccttttattggctttgcttaggttctttttggaattagtataattctagtactccctttttacccctcgctttgcatcaagcttttaagattcaatgggctagagagccttgattatcacaaccgattgcggattttcatccatgaagtgcatttttttgggttttttctttctttcgtcttgcatcgactgcaaatgttgcctacgtacgtataaattacagtatgacagttgctctgtccatacagtttgattaatattacaggtagtattttctgcttntnanaaatatttaaaatataatatttttatttttaattattaaattattttttttttttttttt

SEQ ID NO: 36205 - DNA, 302 bp, Gossypium hirsutum
  Clone ID: LIB3148-024-Q1-K1-E12
gagggatgcgttaattcaagaagaggttaaggagtattttcgaattgcgtgtatgtgtagcagtgaaggatcgaaagaaaggcccgcaatgatacaagttgtagagcttttgaatcaaatttcgacttgaattttgcgttaggaaattttcttcttcccttttataagaatgttgtattatttggttcatgattctatctctaattggggataggatcatgtgaattatgtaaatagcttatcatcattttggctaataatcaaatttccattaataatgttgatgagaatacattttctcc

SEQ ID NO: 36206 - DNA, 413 bp, Gossypium hirsutum
  unsure (1)..(413): unsure at all n locations
  Clone ID: LIB3148-024-Q1-K1-E2
ttccaaccctccagcataagccatccaacatgagtttttttgttgaccagatactcctcgaggtgagtgaaggtaagttacccaaagaagcatttaagaaattcgttctaggaaaatatttagcttttaaaacttgggctaacaaagaattcggataattaaaaaggcgccaaccctgcttggctaatagcgcaacattgaacttgtttaaacttctaaatcctaaaccacccaaatcttttggtaagcaaacatctttccacgcacaccaatggatcccctttttacttttatttttttgccaccaaaattttgcaataattccctccaaccctatacataaagttttaggaagaaaaaaacaagacattgcacaggttggtatagattgtaaaatggctntaatgaaaatt

SEQ ID NO: 36207 - DNA, 372 bp, Gossypium hirsutum
  unsure (1)..(372): unsure at all n locations
  Clone ID: LIB3148-024-Q1-K1-E7
cccacgcgtccgcccacgcgtccgggattagcatggcaggactgagttcaaagacgggcgctcatctggctgatgcaattcatgatgcagttactcgtatgtcatagaaattgggcttagcacacacagcaggtcctcaatacacttgattgggaatcacatcaaatgagtatttgtttttcactttaccattcaataataactgtatttgaacaaaattgtagccctcaaaacactgaaagggcagaaagaaataaactcacttccacttccttaaaaaaaaaaaaaaaaaaaaaaaaaaannaaanttagaaaaaaaattaaaaaaaaaaaaaatatttattttttaaaaaaaaaaaaattaaaaataaa

SEQ ID NO: 36208 - DNA, 381 bp, Gossypium hirsutum
  unsure (1)..(381): unsure at all n locations
  Clone ID: LIB3148-024-Q1-K1-E9
cccacgcgtccgcccacgcgtccgcttactcgttcgcccacgcgtccgcccacgcttgctgccactcgtccgtgaactatagatttgataacactgtttaattgtgctggagaattgtgttttacttgtaattaaagtgtgtttaattgtatgcttaaacttccatagttataagttttatgttttactccattttcaggttgttgggaaaaaaaaaaaaaaatataaaattatattaaaaaaaaatatatttaattaaaaaaaaattatatttttaataaataaaaatataatttttttttaatttttaaatatatganttttttttaaattaaattttaatttttttttttangttattaaatattttttttttttttt

SEQ ID NO: 36209 - DNA, 422 bp, Gossypium hirsutum
  Clone ID: LIB3148-024-Q1-K1-F11
cccacgcgtccggaagcaaatggcggtgaagagaaaaagggcaaggttgaggaacaggggaacgagcagctagtgaaagacacttactctagtaaaaccagattatatacagatcagtgcactgcatttgcatcaaatcttaacattagggcaatagatgaagatctaaagcaattctttagtgatgttggtggagtcactgcgattcgaattctgcatgacaagttcactggaaaatcgagggtctctctctctgtctctctctgaatttgtgtatgccgacatgcatgtgccctcttaattatttttgtgtccgtcactgccatgttagaaatgaaacatgaagctgtcttcattagctgcttactagatgtcagtttggtgctcaagctgcactttccatatcacaatctttattaagt

SEQ ID NO: 36210 - DNA, 229 bp, Gossypium hirsutum
  unsure (1)..(229): unsure at all n locations
  Clone ID: LIB3148-024-Q1-K1-F2
ttttcnnacaaaaaaaaataaaaaaaaagaaagatttttaaatcccctctaaactacccaacttacttacacatacattcttccctataacttttttatttttcaacctaaattaaatttactccccttctatttacacactaactactttaaaaaccctttcttaccccaacttaacaccacttatacaaaatccccttttcccaactttcctaatttccaaaaatcc

SEQ ID NO: 36211 - DNA, 262 bp, Gossypium hirsutum
  Clone ID: LIB3148-024-Q1-K1-G10
tttttgaaaagaacctggtttttattattaaaagggttaaagaatccctaagttggggagctttggtggggggtgggtggcaaggggaacctaatggcccttggattttaaaattccctttggtggatgccttaaaaaaaaaaaaaaaaaaaaaaaaaaaaaaaaaaaaaaaaaaagggcggacaatataaaaagatcaaaaataacatacacatacatgcaacgtcatagctcttgtatagtgaaacctaaattcaattcg

SEQ ID NO: 36212 - DNA, 360 bp, Gossypium hirsutum
  Clone ID: LIB3148-024-Q1-K1-G5
aagaggctttattgatagcttgtaaaatacaatgttttatacacttttcatccccaatggtgagtgcaactttgtgtggatgatagcagccataaagctctgtttccagatggtggaaacctaaagcagtgctggcagcttgaaatacattggagaagattgagatgattcaatttgtttcatacttttctggacagaaagttgtcaaacagcaaaaggtaaacttgttcattatttgatctaaatgaaggaaatgacattcgagatgactagagaatgtggtgttttgtttatcacttctgtaaatatattttcagcagttgtaaaaaactccattactgaaaatatatgatgatcatt

SEQ ID NO: 36213 - DNA, 426 bp, Gossypium hirsutum
  Clone ID: LIB3148-024-Q1-K1-G6
cggacgcgtccgcccacgcgtccgcccacgcgttcgcccacgcgtccggaaatagcggagtggaaaacggcgccacctctctctagcgacgtagaaatcggcagttacctctttgattttctcttcgccgctcaagacgcctccacttcgttgctcctctgggtggtgaccctcctcgactctcatctcgatgttctccggagagttcgagaggaagtgtcaaggatttggtcgccggagtcggatactttaataagcgcagagcaactgagggaaatgaagtacactcaaacagtggcgcgtgaggttataagatatcagcccccggcggcgctagtaccgcacattgcgatgaaggatttcccgttgaccgagtcgtacacgattcccaagggcacgattgtgttcccttcggtttacgaatca

SEQ ID NO: 36214 - DNA, 376 bp, Gossypium hirsutum
  Clone ID: LIB3148-024-Q1-K1-G7
cccacgcgtccgcggacgcgtgggttgatgtactctttataaatttgatagaccaagtgggacattgagagcaatgatggatttgtagtgcatttcgcgagttaaaaaaaaaaaaaaaaaaaaaaaaaaaaaaaaaaaaaaaaaaaaaaaaaaaaaaaaaaaaaaaaaaaaaaaaaaaaaaaaaaaaaaaaaaaaaaaaaaaaaaaaaaaaaaaaaaaaaaaaaaaaaaaaaaaaaaaaaaaaaaaaaaaaaagggggggcccctttaaaagaaccaaagttaattaccccggccttgcaaataaaaacttttttttttgggcccccaaaataaaattaaggggccggcgtttaaaaacgttggacctggaaaaac

SEQ ID NO: 36215 - DNA, 321 bp, Gossypium hirsutum
  Clone ID: LIB3148-024-Q1-K1-H5
gctcggaccggaatggaatggccggaccgacccgtccgaaatcggagtattggtcggaaaagggggattttatggaaatgtgttcagaatgaccccgccgcgctgctttactaaagaagatgcagatttcctagtagatgcaatggattacaccatgggcaagatgtaagtaaagcttccctcaagtcttaaatgtagataaaaatatgttatgtaattgtgattatatcacaagttgatccatttatgcactctgcttctataaggttaatagactgtgctgtttggatacccttttattttttaatgcttattttggtg

SEQ ID NO: 36216 - DNA, 261 bp, Gossypium hirsutum
  unsure (1)..(261): unsure at all n locations
  Clone ID: LIB3148-024-Q1-K1-H6
cggtgagagaatcctaatcccccgagctacaacggaggcattggatgttcgtgagtaccctgtttacacctaaggttgacaaacgtgggcatgtaattctaggaaatatgccagatcgttattgcaacttttgtgggaagctgtaaactccatagtttgctgtaaattttttagattcggcctgtaataaataacttctagaatctagtaaagaattctgtaatagtttataggcactacgtacagaaaactctcccgnct

SEQ ID NO: 36217 - DNA, 266 bp, Gossypium hirsutum
  Clone ID: LIB3148-025-Q1-K1-A1
gttaaccgggagcatcgggtcaaactcttcttcgttatcaaggtaatagctacgaatgttcatcgactacccggaaatggggtggcctttctttgaacaatcactgacttctcataaacagttagggtattctttgtgaaggctaggaaagatggatcttgatatttttatttattttccattatctaatttatgttatgtgtaaatatatgtttttataattgaattttatatttaataaatcgcttccaattgttattgatttt

SEQ ID NO: 36218 - DNA, 308 bp, Gossypium hirsutum
  Clone ID: LIB3148-025-Q1-K1-A7
aaaaaaaaaaaaaattttttaaaaaaaaaaaaaaaaataaaggggagataaaaaaaaaaaaaaaaaaaaaaaaaaaaaaatggaaaatagataattaaaaaaattaagaatttaaataaagaaagagtaaaaaaagttacttgagggataaatggattgtggttttttgggagaacatttggagtttgctattttattctgtttgtgacggatctttcttttattgagatggagtaattaccaagtgttggattgttacatgtacttataaaagaacgtgagctgtgattagacaatggtgagacagg

SEQ ID NO: 36219 - DNA, 227 bp, Gossypium hirsutum
  Clone ID: LIB3148-025-Q1-K1-B1
gttgctttgaacagttctatgtttggtgtggtcacactcacagattgatgatctttggttatggcggatgagtgactcatccaccattactacaagctttgttttggttggttttttttttttaattttttttccaagtcatcatatcttgtaggcctctccttgtatatgaattgtacaattgcaactactctgtttttataaatgaagcttgaaattttaccttc

SEQ ID NO: 36220 - DNA, 331 bp, Gossypium hirsutum
  Clone ID: LIB3148-025-Q1-K1-B8
cttagacattatctcatctcccttactctccctttattctccagccgaaaggctcatttcaacccaaccatttccaaaatctgatcgtgaccagcggagcaaggcccaccgacggtgtgaacgcgatataactccggtcatgaagacgcggaggagggcgacgtggtacgtgggtgcgaacgtggagcagggcgcgcgtgtatggcggaggcgatcgcggctgcggcgcaaatgaggcttctagtgtttagggtttgctgaaaagtgttttgggtttgcggtattttggggctgtttgggttaattgtttttgtaattttggaattttttt

SEQ ID NO: 36221 - DNA, 299 bp, Gossypium hirsutum
  Clone ID: LIB3148-025-Q1-K1-C12
tacctaataaaaaattattaaaaaaaaaaaaaaaaaaaaaaaaaaaaaaaaaaaaaaaaaaaaaaaaaaaaaggggcgccggttgtgacccacccgtcctcccacgcgtccgaccgctacttccaccatggcatggaggggctcaaaccttctatttagcgtctaaatctaatcataaatttaatgttggctattagagtttttttcggacttcacccttaataatttttttgccttttaatcttaccctttgttatcctagaattgggctatttgctctccaatttttttttcatttt

SEQ ID NO: 36222 - DNA, 256 bp, Gossypium hirsutum
  Clone ID: LIB3148-025-Q1-K1-C7
cccacgcgtccgcccactcgtccgttttttaaaaaaaaattgagcattagttttttttcctataaatggaaacattaactcgttaaactcatttgtctttcggcattcctaatctacctttaatccacaaccccccccccaactaattatactcacttgtaaaatttgagtcatgttatttcttagttcacgctcaaaccctttattcttaagagtaatgtaaatgaggttattgacccactattacttctgttgt

SEQ ID NO: 36223 - DNA, 260 bp, Gossypium hirsutum
  Clone ID: LIB3148-025-Q1-K1-D9
tggaatttgatgatgcacggaacaaattttccttgtagatttctttcaaacttttttttttttacatttccatttaaccaagcccctctttacacaaatcaaagtaatatagaacgtgttttttgcaatctccttgattcagacagtaatgaggaagaaaagtaaaattcaaggttgttcatattgcttgttgataaaccttggtttatgtaatgctaaatttgattttttttccctaatgaaacaaccttttatgccat

SEQ ID NO: 36224 - DNA, 297 bp, Gossypium hirsutum
  Clone ID: LIB3148-025-Q1-K1-E11
ctaagcgtccaaaagtatagtttttttttatcatttattttaggtgaacggttgtagtagaagatctcatgggaattttgtttaattgatgaatgctactgtggtataacagcaaaaattgtgagagtggaggtgggggaaagaagatgaaagcaaaaagggaacttggtgatagtgtagacggggaacgagacttaaaatggcagagggttgtggattcaccatcttcacctcctgaagagtcacttgtgccttataatgacgatgaagatgatgaaagaagagcattgaatcaca

SEQ ID NO: 36225 - DNA, 151 bp, Gossypium hirsutum
  Clone ID: LIB3148-025-Q1-K1-E2
atcagttttaatgcctggtgaggaaactcctactttcattgcacatcctactccagctctgctgccatgtccaccagaccgtgtcttgagacctctgcatcaacagagccaaagcattggtgtgccttcaagcttaagctgatgctgcact

SEQ ID NO: 36226 - DNA, 309 bp, Gossypium hirsutum
  Clone ID: LIB3148-025-Q1-K1-E6
atctgttcataaaaagagctgtttatgtgaatctatctgcagccatggatgatcggagcataaatcacaagtcatggatagcacagcatagagtttaatttataatccggagatagatataatatcattagactgttgcattataattttaattagatgagttagtagcggctggaagccccatctcatcagttttctttttattatatctttttttgttattgttgcttttgtgtgagctgttgcagaaactttggaacttgacaaactcattgttgaatcttgaatgcattcgacattcactggatt

SEQ ID NO: 36227 - DNA, 303 bp, Gossypium hirsutum
  Clone ID: LIB3148-025-Q1-K1-E9
agattctttacttcggtgtctgttattgagaattttccttttatggctacttatgtggtgcgccaaactaattctgaccatgatgctatagtcttggataaaaaaaaaaaaaaaaaaaaaaaaaaaaaaaaaaaaaaaaaaaaaaaaaaaaaaaaaaaaaaaaaaaaaaaagaaaaaaaaaaaaaaaaaaaaaaaaaaaaaaaaaaaaaaaaaaaaaaaaaaaaaaaaaaaaaaaaaaaaaaggggggcccatttaaaagaaccaaattttacaaccgcttcctcgggaaaaaaaactttttt

SEQ ID NO: 36228 - DNA, 329 bp, Gossypium hirsutum
  Clone ID: LIB3148-025-Q1-K1-F1
agagtgcagaaaactaatatggaaacagaaatccggcttgtgaaatttgggatggcggatgtgtggtggacccttctcgggactgctatcccggcagttatcgcagggcaagtttttagattgaggaaaaagcatgcctaagaacagagacttaagagtgccaggggaagggagatgtgctcggatgacattttcatttgatagaaattttttttttttttcatttttttttttttggtttttcttctttttttttttattctctctttttttttttttttctctcattactatttttttttactttatatcttttttttttttttttt

SEQ ID NO: 36229 - DNA, 332 bp, Gossypium hirsutum
  Clone ID: LIB3148-025-Q1-K1-F2
taaaaaaaaaaaaaaaattatttaaaaaaaaaaaaaaaaaaaaaggagggaatttaaaaaaaaaaattaagaaaaggaaaaaaaaaacaaaggaaacaaaagaaaccaaacgggggcaggcggggaaaataaatttagtaaacaggcccttgatttcaaaaaaaaaggacttaataaaaccacgtcctgaaaaaaacaaaagcggtgacgaaactaaattgctttgccagggaaaacattttcgtaaccaggcttttagcgattgggatagggcccgcttgccttgcctgactgaacatttgcacggccgggaaaggggaggcgtccccccc

SEQ ID NO: 36230 - DNA, 281 bp, Gossypium hirsutum
  Clone ID: LIB3148-025-Q1-K1-F5
gccaatttgatccggtgaatggcggggaaatgactcagctggaatatcacaactttctcaagccagaggcagctttctgaagatttacatttatatatacatatttataaatatatgtttctctatcttattcggtcaaatatttggcatcttccacggtccacttcctcctttcccatcattcacttaatgcatttcccaatctgtaaatatatatttaagcgtagttttgtaaagttcgtaattgttcctaagaaaaagtacataaatttcagctgttc

SEQ ID NO: 36231 - DNA, 311 bp, Gossypium hirsutum
  Clone ID: LIB3148-025-Q1-K1-F6
ggacttccaggtttagaagtgtacaatctcaaattttggtactgaggatcaattacccttgaaagactgaaggctgaatccagtgaagattggcagaagggacacactcttagaggtatgaagccaagatccgtcggaatttgcttataacacatttaaactgtctgattgaaaactccttacatataacaatttgtcctcgaaagataaagagttttctgtctttttgattggtcagtttatgcttttgtcttgtatatcaaatactggcggaggaatggttatggctgtgtacaactgcaactgaattc

SEQ ID NO: 36232 - DNA, 324 bp, Gossypium hirsutum
  Clone ID: LIB3148-025-Q1-K1-G1
gtcgaggagttggaaccttttaagaatcaccagaatatgttggctggtttagactacgttgttgcccttaagagtgatgtatttgtttatacatatgatggaaatatggcaaaggcagttcaaggacataggcgatttgagaacttcaagaagactatcaacccagacaggatgaattttgtaaaacttgtggatgattatgacgagggaaatatttcttggaagaaattcagttccaaagtgaaaaagcttcacaaagatcgagatggatctccctattatagagagtctggggagttcccaaaactggaggagagtttctac

SEQ ID NO: 36233 - DNA, 312 bp, Gossypium hirsutum
  Clone ID: LIB3148-025-Q1-K1-G8
cccacgcgtccgctcaaataagcttctagtttagggacatcctccctcctaaaaatatcccacagtgcaccacctgtctcctttctgctggtcaagggttccggaattgaagctcctctaagctcaccactggaaacatatattatattatcaccccaattggtggcttccgattcatcgacgccttctttaagtcgctctctttccaaacgttccttttcatcctgtgccttgtgtttcattttcaacttctccattgcggcaagctgctcatcgcttaaggctacctctgaagtatgtgtcaaaaatgtt

SEQ ID NO: 36234 - DNA, 307 bp, Gossypium hirsutum
  Clone ID: LIB3148-025-Q1-K1-H11
cccacgcgtccgcaaggacatagtttattggatctacaataaactgaagaccaaagaaacattggttgaggcggtggaccctaaaatctcgatggcatcaaaggaagatgccatcaaggtgttgagaatcgcagtccactgcacggcaaagattccggcacttagacctagcatgagaaaggtagttcaaatgctggaggaggctgaaccttgtaaacttactgatattattgttcatgaaaaaggtgaaaagtagcctccactgaggaatggaacaagagtggcaagaaatgattccagattgatc

SEQ ID NO: 36235 - DNA, 326 bp, Gossypium hirsutum
  unsure (1)..(326): unsure at all n locations
  Clone ID: LIB3148-025-Q1-K1-H9
cccacgcgtccggaacttttaatctggatccctgagagttattatttttgtattggaatttagattatctttgaactttataaatgcaagcttattttggttggtnaaaaaaaaaaaaaaaaaaaaaaaaaaaaaaaaaaaaaaaaaaaaaaaaaaaaaaaaaaaaaaaaaaaaaaaaaaaaaaaaaaaaaaaaaaaaaaaaaaaaaaaaaaaaaaaaaaaaaaaaaaaaataaaataaaaaaaaatgggggggccgtttttaaagtatcaaatttttataccggggaattccaaggttataccttttttaatggggccccaaaaa

SEQ ID NO: 36236 - DNA, 297 bp, Gossypium hirsutum
  Clone ID: LIB3148-026-Q1-K1-A7
gcgtccggaattctggaagtatttccagcggtttttttatccaaagcagcatacgtaatccatgggcgggtttctggccattccggacatcaaatacaagctctagccataatggagctgcgggaagtaattccccacggcatgtgcatgacaacaatcattctatggcgtataatggacggccccctgactgaagtctgtaatcgtgtacacctgcagtgcttgggcaaaaattagttgcactgaatgtggattgagggatctaaaaaaagtctgaccctgtaaaagtgaataaag

SEQ ID NO: 36237 - DNA, 319 bp, Gossypium hirsutum
  Clone ID: LIB3148-026-Q1-K1-B9
ctcactcttgcattctgttaagcattctgtgatgggctgcatcatgttctgcactaggaagtggactatggagatagttagggagatgcttctgagacagcttttaaaacacttgttaaagccatgatagaagccaatatagaattcaaagtatgcttaacagaatacttatttaaccaaatccttaacataataatacctaaaataaactattaaagaaactcccttatactgcccctcgatcctcaaatctatactaaaatctagaacaaaacctaaatcctatccctaatactatgttaaatatattcttaaaaag

SEQ ID NO: 36238 - DNA, 211 bp, Gossypium hirsutum
  Clone ID: LIB3148-026-Q1-K1-C2
cttcaccagtatttgaatgtttaaattatggtcacttttctctttgtaacttctaactcttttgacttgagattcatttaaacatgcctattgttgtattaaaggtggatacatctatatacagatacaaacagattactcagctgacaagctttgaaattcctttttagggaatttgaaactgctaattgacaaaattactggttgatgc

SEQ ID NO: 36239 - DNA, 403 bp, Gossypium hirsutum
  unsure (1)..(403): unsure at all n locations
  Clone ID: LIB3148-026-Q1-K1-C6
gccccacgcgtccggtttgaggtcgtcgactaggaaatatggtgttgtacatgagtctcgttagaattcactcttcttaatttcttttagtttggtgtgaaatgattttctttttattctttggttattattgtagtgtttatgaaaggaatttgtttttttgtttttgtttttatttactgtaaaggatttgtatgcatagattactttggttaatttagtattatcgagtttcaatccagttataaaattattaaaaatttattaaaaaaaaaaaaataaaaaaaaaaaaataatatataaaataataaaaattatatattatatattttttttanntattttttattataattatttttattttttttttttttattatattatttttttttttttaaaa

SEQ ID NO: 36240 - DNA, 421 bp, Gossypium hirsutum
  Clone ID: LIB3148-026-Q1-K1-E12
cggacgcgtgggcggactcgtgggctgcgtatcgtgagcggtggtggcctcggctttctgggctcatcgcctcgtcatttctacccggagattagcaatggaggcggataaaactttatcgccgtcgtcggatcgagtgaatcgggagggactacagggtccaagggacgataattcctcttggccagtgggtaccgaaggtagctgctgacgcttatgtggcgcctaaatttgtcttggccgtcaagtaaccgtcaacgatggagcctcggtatgggacggctgcgtcctatggggcgatctcaacaagaacaaccgtggattctgctctattttgcaggaacgctgtgttattcacgccccttggttctcaactgcctggtttctggcagagacatcaatttggcgcatccttgttcta

SEQ ID NO: 36241 - DNA, 374 bp, Gossypium hirsutum
  Clone ID: LIB3148-026-Q1-K1-E2
tttactttgaccaatgagccaattggggtctcttggtctgaagttctggatgctcagaagagttctggttggcattcttccacgagtgctgaaatggatgaagataaatggcccagcgatgcctctgttaaccgatatgaagctggttcagacatgcaggttcctgccccactggcaacatggtgcatggctgctgtaaacaccacttggagagcatgttgagaaactacatgaaccaactgggaagccattcagggaactccaatttttcattctggaggtttaggtcaaggaacgaggagtatcggttggggaaacagtcggggaacattccaggacaatgaaagcatcaactcatgcacttattggggaag

SEQ ID NO: 36242 - DNA, 250 bp, Gossypium hirsutum
  Clone ID: LIB3148-026-Q1-K1-E6
gtccgcccacgcgtccgcccacgcgtccgaaaaattttttttaaaaaaaaaaaagagaacaaaaaaaaaaagaaaaatataaaaaaaaaaagggcccccaataaaaaaaaaaaaaagctaattaacacctcaatacaacaaacatggccgtcctaaactggaacccaaattcaattccactgctcatcgttaacaacattctattctgttaaaaccctatcttaacccaactgaattcgctttcaaaaca

SEQ ID NO: 36243 - DNA, 217 bp, Gossypium hirsutum
  unsure (1)..(217): unsure at all n locations
  Clone ID: LIB3148-026-Q1-K1-F1
ggtccgcccaacccgtccgcccacgcgtccggaaagctatatgaatcttttgttagaccattaaagggttcctttcctgggtcataaatggctgttcccagtcttaataactatttggttaaatactacaaatccagtactatataagtgactagggtattttcctctagcatatatatagcctataggcagtttcttttgaaccttatactactnt

SEQ ID NO: 36244 - DNA, 438 bp, Gossypium hirsutum
  Clone ID: LIB3148-026-Q1-K1-F2
cacgcgtccggcggcttcttcatcaatcgtgacagaatcccgggttactggatatggttccattacttatcccttgtgaaatacccatatgaagcagtcttacaaaatgaatttgaaaacccagcaaagtgcttcgtgagagggattcaaatatttgacaattcaccacttggagcagtccctcccgccatgaaagtgaggttactgcagtcattaagcaacactttgggaatgagaattacaagctcaacctgtatgacaacggggttggatattctgaagcaagaagggattacagatttaagcaaatggaattgcttgttgattacagtggcttggggtttcttgtttcggattttgttttacttctctttgttattgggaagcaaaaacaaaagatcatgaaaaacccggatgattgtttttaacaagtttaag

SEQ ID NO: 36245 - DNA, 414 bp, Gossypium hirsutum
  Clone ID: LIB3148-026-Q1-K1-F6
aacttctttgtgaagattgtcaatgcgactgctcaggaccatctgaaaaagcagcaagataagcagcttgcgaagaaggtatctgcttcgagacattaagcttgcgaatttatgaagcgggtatactggcattcggtcatcgttttactttattattcgtttaggggtagtaatagttcactatatgttaccgctctttcataatttaccattaaagcaattccccaacaaaccattgcactatgtagtccccttatagagctttgtataaaggaaataggtacacagacaaatagaagctacaggtttttataattcctgtgtaatgctggcagtaatatttgtttttctcccattgttaagagctatttgacacttggaaatttattctttcgcaatgtaagacttcaaatt

SEQ ID NO: 36246 - DNA, 419 bp, Gossypium hirsutum
  Clone ID: LIB3148-026-Q1-K1-F8
cccacgcgtccgcatgaattgtttggttgtgatgattttataaaacaggagatggaaaaaaattgcagagcatcatcaggttccaagtcagatggatctggtagacggatgaaggaggttgcttgtcctatctgcaccgttcatttgcaggtccaagttcccagctcaggttctgagacaattgaatgtggggtttgccagcatcctttccttgttagtgcccattgatcttcggtcaccacccaaccttctttaattatgtcaattaatttctccttctattgatttcattattagtcataatttggattagtcttgtgtattccttttcattgttctaacttctaaataaaagactaaaccctgtcaaattttccagttctgtgtatattaagttttctgaatctcgagtcttgtct

SEQ ID NO: 36247 - DNA, 313 bp, Gossypium hirsutum
  Clone ID: LIB3148-026-Q1-K1-G1
gattgacataacataatatgtatggttgcttttgattcgcgggttactcacatggttcttgatagcattgattactccgagtatgtacatcagcttacaaagctaatgatgaaaactaccacctgaacgtcatgctcaacaacacccactataccgaataagattatcaaaatggcatctaaatggtttcgctaaaaccccatccacggggcagtcctataacggactcaatcttaccaacaaccccataccactttgctcctaataaccagcctacaatacatgaaagcaccatgcccacacctttcaactt

SEQ ID NO: 36248 - DNA, 378 bp, Gossypium hirsutum
  Clone ID: LIB3148-026-Q1-K1-G11
cccacgcgtccggaaaaaatccataactagaagtgaaaataatgaagcccatcattaccaagaatgttgcagttgctctatctttctttattttcctttctttcttccccttactaaacgctaccaaatactcggacatggtcaacgaaatctgtcctagtgttaacaacactaagctttgctccgaaacccttaagaatgatttacctgacgatataggcgccagcgattctttcattgtgagatttgtcaatattgctaaaggaaatgccacagaagtttccgctagcatcgacaagtcaatagggtcaggtggtgaaggaagtgtggaccttctggccttggaaaaatgccaagtagatataaaatctgcagtac

SEQ ID NO: 36249 - DNA, 232 bp, Gossypium hirsutum
  Clone ID: LIB3148-026-Q1-K1-G5
atcaaatgagttcggaaccacgatataccatcagtatatatacactgctggtcagaacgaaagtagtaaagttgaaaagagtgtacagtgctacccttatctttgttttgaagttggtatctatcttgtacatgctaggttcttggcttcttgccttgtgtattcaagttttggttgcatatttttattgtgatattatgcctattttcttatataaacacagtattctctt

SEQ ID NO: 36250 - DNA, 351 bp, Gossypium hirsutum
  Clone ID: LIB3148-026-Q1-K1-H1
gagctgctgaccaagattgacacacaatctgtcatggaactcgagaaggaacccaagatcgtgccgaactgctatgcaagcatggttacaatgattgccaccatacccacggcggttgagactgtgtccgagtacccaccactctgacgttctgttgtacgtgacattcgccataacatgcgcgtcagcgtcattaacagtgtcgtgaagaatgacccaactgatgctccagctaccgcttctgctgccaagaataattgcgagattattggagagattattgtatcaattttcatttcagctttggtcacttatcttgacaatggactttaaatttaccttttgagagac

SEQ ID NO: 36251 - DNA, 168 bp, Gossypium hirsutum
  Clone ID: LIB3148-026-Q1-K1-H12
gacgaagaacttgataccttgatcaatggaaccatagctggaggtggtgttatcccgcacagtcacaagtcgcttatcaacaaatcctctaaagagtagtgtatgttaattgggttctcttgtggattttggttgtagccatattaaacttttgaaaatgtttttggg

SEQ ID NO: 36252 - DNA, 438 bp, Gossypium hirsutum
  Clone ID: LIB3148-026-Q1-K1-H3
ttccggttccctgtgtttgtgtttgtaagtatttgttccctagtctgttttcaaagaaattttggttgcgcattgtttaaaaaaaaaaaaaaaaaaaaacaaaactaaaaaaaaaaaataaaaaaaaaactatacatacaaaattaacacttataaaaaaaaaaaaataaaaaacttcaacttaataataaaaatacaaaattattttagggcccccccctttaaaaatcccaaatttacttccccttccatccaaagaataatctcttttttagggcccccaaaatcaatttccctcccccctttttaacaccctctaacctgaaaaaccccttcctttcccaaattaaatccctttaaaaaaaatccccttttccccattttgtttattaaaaaaaaacccccccccattcccctttccaaaatttcccccccctt

SEQ ID NO: 36253 - DNA, 313 bp, Gossypium hirsutum
  unsure (1)..(313): unsure at all n locations
  Clone ID: LIB3148-026-Q1-K1-H5
ccggaattgactgtgctcacaatcccgccaatagtttggcccagctttgaatctgattagcttttgtaggttatatatnaactgtataatgtattttgtgggtgcgtcatccatctgatcaataaagcatanaaatttgtatccccaaaaaaaataaaaaaaaanaaaaaaaaaaaaaaataacaataaaaaaaaanaaaaaaaaaaataaaaaaataaaaaaataaaaaaaatacaaataaagggcggccgaatattttaaaaacaaaattttattataaaccttgtatttcctattgtctatttatctttt

SEQ ID NO: 36254 - DNA, 271 bp, Gossypium hirsutum
  Clone ID: LIB3148-027-Q1-K1-A2
caggattagagaggcgtacgatgtttccaggggatggagtaagtgtagataagggtaaagggggtaggaagccctggaaatcccatttcttttaacctttaacccttaaccctcatacctttgggtccataataaggtttaagaatcaagggccaagaccgggtaaccttattggttctaccgggataaagcttttactctgttctactatgttgaaggggtctggcccaatatatatatatgtatataatgaaggtggcaatgcatgaac

SEQ ID NO: 36255 - DNA, 251 bp, Gossypium hirsutum
  Clone ID: LIB3148-027-Q1-K1-A8
cccacgcgtccgcgtagagaacttgaagcggccaaagagagttgttcaatgtggtagatgccatttattaggtcattctcaaaagaaatgcacaatgccaatttgaccctgatttagaatcttttttttgcccctttctttttagcctttgaatattttgtttttaagtttcaatagaatcagtaatgtgtttgtaatgttattgtatggttttaacattccagtcttagaataaagcatatcctctgctc

SEQ ID NO: 36256 - DNA, 241 bp, Gossypium hirsutum
  Clone ID: LIB3148-027-Q1-K1-A9
atttaagacaggtatgcgtcggcgtggggacacagtttgatgaagtgggggttaaacttggtagtgcagggatgggagattggagtctatttataaaattagctaaccctacttctgtaaaacgaaaggtgaggggctgttctcactcatgactcgtgtattgcgcctaatagctaatccacttgtgaaaggtgtacactacatttcgtttaatcattgatttttttttcttttccttttt

SEQ ID NO: 36257 - DNA, 164 bp, Gossypium hirsutum
  Clone ID: LIB3148-027-Q1-K1-B1
cggacgcgtgggctgcccttttcggtgagactgatgattgattgctacttaaatatgtaggttggtggcttttgaagcttttatggtttatgcattatgctcctggtatttgtactctgtatatttttaatttgaggaattcagtcttactgctcttttgattt

SEQ ID NO: 36258 - DNA, 446 bp, Gossypium hirsutum
  unsure (1)..(446): unsure at all n locations
  Clone ID: LIB3148-027-Q1-K1-B11
gtacaccacaaggataaagtttttcaaggattacatttctcagttgaagaaagccattgatgataagtccaacttgaccggctattttgcgttgtcntttttttataactttgtatgtgtattatgatatactttaaggttttgcattgtttacgtttatttaacttttttattgtttttcattgttttttttttttttcataaattttttgttttagttactttgtattttttttttttatttttttttttattgtttttatttttttattatttatatttattttgtatttattttttattttatattttttttttaatttttattctttttattttttttctctttatcatatttatttatatgctttttttttttttattttttattttattatattttttataattacctgttatacttttataatattttattttttttt

SEQ ID NO: 36259 - DNA, 256 bp, Gossypium hirsutum
  Clone ID: LIB3148-027-Q1-K1-B12
gcgatcccttatttcgttcgtttactcccccttagccttgacattgtcatatcacactagctggtgagctgaaattatacagcaccccgtctggaatcaacttgaggcttcctgtgcgattgaaatgcttggaattgggagatatatgtatgaaaacactaacgtacgtctgaagtgaagacagaaaacgctgtaaggaatcactattattatcattatgatcaccattatgagaggctcacagagattcattaga

SEQ ID NO: 36260 - DNA, 263 bp, Gossypium hirsutum
  Clone ID: LIB3148-027-Q1-K1-B2
gttcgagcgacgcgtcacgtatatcgcgagcggtcgccctaatgaattattgtcctgtgattggtctaactataatgggtgctgaggttgaacttttttgtcacagatctctaataccaaattgtatcttattccataaatgtgacgatttgaaattattcatccctatagctatctcttttagctcaagttaggaagccaaaaagaagtgtaagagatggtggctttcctgtgcctacaaaaaagattactatataacaagg

SEQ ID NO: 36261 - DNA, 163 bp, Gossypium hirsutum
  unsure (1)..(163): unsure at all n locations
  Clone ID: LIB3148-027-Q1-K1-B3
tcgcccacgctggtggattccacattttgtaacattgnnataanctcgggtnncagnagncaaggggggaccacagtaaaaaagccaacatagaagtaaaaaaacagaaggatcatactgtaaaaccatgttgtaaaaactgtaattttctgcccgcatgcat

SEQ ID NO: 36262 - DNA, 400 bp, Gossypium hirsutum
  Clone ID: LIB3148-027-Q1-K1-B8
acgcccacgcgtccgaattgcaaaattcttggcatgtgattgggcaagagataatatgggggttaatattgtcaccccgggggtgatcaaaactccccacactttaccttattttgaaggtaataaagaattattagagacaaccatgagccgaacaccattagctcggttcggaaagccagaggaagtgtcggcgatggtggctttcctgtgcctaccggcagcttcctatgtaacagggcaacttatttgtgttgatggtgggatgacagtgaatggcatctactttccaaagcaaattaggaaacaccatgagccatgttatcggatcaaataatgttatattataatagagttaatatttattgtttaacaaataatacaacgtttaccattcaat

SEQ ID NO: 36263 - DNA, 215 bp, Gossypium hirsutum
  Clone ID: LIB3148-027-Q1-K1-C1
cgaaatctaaagtttgagcagagcaagcgtttctacatatcacattgtataggattggatgccgatgataaaatattttcttgacataacataactcaatgcatggttacccaaattataaagtaactgtttaagtaaaaaaaaaaaaaaaaaaaaaaaaaaaaaaaaaatttactttataatcttaaaaataaaaaaagaattaaaatgggcgg

SEQ ID NO: 36264 - DNA, 304 bp, Gossypium hirsutum
  Clone ID: LIB3148-027-Q1-K1-C11
gacatttcttcatttggacttttaggccagatctctctcaatttcaatctttcagatctggcagctgacttttctcctagttcacgtttctttctgtcaatttgtatgggcacatgcatttgccctgtagcacatattttctgcgtgcatccatgtcttcattgtgagtccgttttagacattattcttgatttagccaatgttggaggccttttatgtgttccctatctaaaatattttctccaggtcataaacaaggactttgcccctgttccattagtttattcattcatgaaaattacaa

SEQ ID NO: 36265 - DNA, 293 bp, Gossypium hirsutum
  Clone ID: LIB3148-027-Q1-K1-C6
tccaaagaagatgatgtccggaagtatgtctacacttaccggaggactttcacagcaaagtgctggcaagaaggtcagtaaagctccaaaaatccagaggctggttactccattgacactccagaggaagcgtggtagaatcgcagaaaagaagaagagaattgccaaggccaagtctgaggcagccgagtaccataagcttctcgccacaaggttgaaggagcagctggagcgccgtattgagaagttagcaaagaggaggtcgaagctctcttctgctgctgctaagcctt

SEQ ID NO: 36266 - DNA, 308 bp, Gossypium hirsutum
  Clone ID: LIB3148-027-Q1-K1-C9
gcgtccttctatccttctcacaaccctattttcattttcccaaaaatcaactttatctgcgggccagttcacatgcacatgtaactcctatgactgacctctgctgtcaagaaatacatgggtcttcttgtctaggtgcactttcaccacatagctcgaccttcaaagagggcaacctggaatagaaacaacacactttcccttcgcctctaccgttgatcccctgtaccgtactttgtgattttgttccttctatcttggctttattactattgtaaggtttataataaattttatacgttatattt

SEQ ID NO: 36267 - DNA, 454 bp, Gossypium hirsutum
  Clone ID: LIB3148-027-Q1-K1-D12
ggagcaaaagaagtagttgtttggggaacctttatttcatttaagggaatttatgcacgtcgacgatgtatcttatgctgtggttttcttactaaaaaatcatatttgtttttaacatgttaacttagttaattaaaatatttttatctttttattgaatcatcatttttttttttattaatatttaggaacgttatattattttattttttaaaaatttaaatattattttaataaaatattaatttaattatttttttattattattattatttatatcattatattattttttattatttatctttatttttatattatatacaattattttttaattattttaatctatattttattttattctttatatttattaatttttaatttttaataatttaatttaaattttgttttaatacataataatttttatttttatattatatttat

SEQ ID NO: 36268 - DNA, 223 bp, Gossypium hirsutum
  Clone ID: LIB3148-027-Q1-K1-E11
aaaaaccagtgataacggtagagaagactctactgcattaaagactacaaacgatgtgttggaaagaaggatcctgactctgcaatcgagattgtatctacaatgatgacatagagcttaagagcattgggaaaaaaaagtcaagggttgcctaaacagtgcaatgtaattactcgggtagcaattacactatctagtttatacaaaaaaaatttaatttttt

SEQ ID NO: 36269 - DNA, 397 bp, Gossypium hirsutum
  Clone ID: LIB3148-027-Q1-K1-E3
gttatctctctttttaattttttttccaatttcatttcttcttattttgcagttagaaagcttaagaaatttagtcacatttgttaatttctttcatttttttatgaaacgtatggagttaaggaggtgcaaagagttttctagggcgaaatggaggaggaggaggagaagatggacaggtgacagcggtgaccgtggcagtagatcagttcgaacaaaggtgaagaagttgcaaaggctaattccgggtgcaaaagggttgaagccggactggctgtttctaaagacagctgattatatattgcagttgagattacaagttaatatattgcaagctctttccaagatttatggaccctcacattaatggttatgatattttatgtatattttgata

SEQ ID NO: 36270 - DNA, 245 bp, Gossypium hirsutum
  Clone ID: LIB3148-027-Q1-K1-E6
cccacgcgtccgcccactcgtccggactctaatacgtgagtatggagggttatgatctggatatccgtgtaccggtatgcaggcatgagtatttcgagaaaaatgaggtgtcggagcaatatataagtataattaataaccattctttggtatagagatccctacaccccctttcatttctcgtgtttgtgcattcatatgcatgtattgtgtggggaaatgaatttttcatcgattagaaagtt

SEQ ID NO: 36271 - DNA, 372 bp, Gossypium hirsutum
  unsure (1)..(372): unsure at all n locations
  Clone ID: LIB3148-027-Q1-K1-F12
cctgactctaactccaccttccaagttgctagtgtgaacttcacagccaaggcggagaggacacgtatcgcgttctacagtgtgtattacaatacaagaaccgatgacatgagctcactatgtggtccggtggtggacgatgttcgggtgtggtattcatgggcaagtagaaatgaggtccaagtattgttagggcttggactttctttttgggcttaccttttggttttggtttagagttgggtgccttaagtgaagggtagattaatacttgctttagttatgtacggttttaaggctaaaatatccncaagtgcttgtaatgtcatctttccacgttttcgtttgagaaatgaaaatgangttagttgc

SEQ ID NO: 36272 - DNA, 202 bp, Gossypium hirsutum
  Clone ID: LIB3148-027-Q1-K1-F5
cttttttgcttatttttcgcttatttgtatatgtaaattggctgcagtaatctttacaacgttgtaattggtgtttggagttaatatcctccattgtttaattgcttcaatagcagctccatttttgtcttatggataaggtgtcattttcatttttgtcggaaagcctaatcagaagggacacctatgggatttgtctatt

SEQ ID NO: 36273 - DNA, 385 bp, Gossypium hirsutum
  Clone ID: LIB3148-027-Q1-K1-F6
cccacgcgtccgattgtgatacactcacttttccttgttgctgcagatggtcttgaatgctattggaatgcatttgagttaccttatacttttcctgcttcttaccttgaccctcaaaactacacttcattacttccattatattccattccacctgaagtcatctcatatgaaactttcacgatccattggtgatatggatgttggggagttcattgttcctgttccatacgtaaagcaagtaaaggaattggagagaagaaaagaagaacttgaataattgctcttgggagaaagggtatgaaagaatgtgggtgattaagtcaaatggagaaagggacatcatgtccttgttgtgtgcaagtgtttttctcctaagacaggc

SEQ ID NO: 36274 - DNA, 385 bp, Gossypium hirsutum
  unsure (1)..(385): unsure at all n locations
  Clone ID: LIB3148-027-Q1-K1-F9
gctgggaaggttgccaaccatccttcaatccttgcagacgcttgaaatctactactgtaagagactggtagtttcaatttcttgttttcccttgctgcgtaaaatatgggttgaagggtgtgaagaattggtggatgaaggttctttgtccgtacagaaggttacctcctttaaaagtttgtgtgtttcaaatatttcaaattttaacatttcagcagagaggataatgttgaggtttgcaaactccgaaagattcaacgtctctggttggaaggagttgggatctttatcgcaaattgngttaagattagtcgggcatcgttttattagtattgcggattgtccccaattggtctctttggaaacagaggaggagagattgcaa

SEQ ID NO: 36275 - DNA, 324 bp, Gossypium hirsutum
  unsure (1)..(324): unsure at all n locations
  Clone ID: LIB3148-027-Q1-K1-G1
gcgtccgnccaaaacaaagtgtgaattacgttgcaatatttcccatatgcatcataaaccaagggattgtgggactaatgcaccaagttctggatatttggctcacaataaaacaagccctcgcaaatggtgtccatgggtcaatagtttcctaaaagcccattacctttcatgtgaaggcctgcaaattcaagcccaaatctcaagtgaaaaaacaaattaaaaggttaaagtacatgagaggttcctgtattattagtctctggatcaatttagtctttatgatattaaaaaagaatcaactaagttcatcttaattttttt

SEQ ID NO: 36276 - DNA, 332 bp, Gossypium hirsutum
  Clone ID: LIB3148-027-Q1-K1-G11
gggttttatgtgccttcaaggtggtatctgcttatcaagcatggggaggccggtctcgtgtgagagagccgttgcatggaaagtggtaaatgatgaagaaaatgctcattgtatctgtttcactttcatcaactggtcttttgtatgaaaattctaagagaaaataggatttagatatcaacctagattagaagatgctccctttccatttttttcccaagacttttgtagtttggagaaacctttgatgtgatatgatatcgaatcaaaatggtatggggggcctagatttcggttttaaaaaaaaaaaaaaaaaaaaaatataattaatt

SEQ ID NO: 36277 - DNA, 138 bp, Gossypium hirsutum
  Clone ID: LIB3148-027-Q1-K1-H2
cccacgcgtccgctcatcttcctagtcccattatacgacaagttcttcgtccctggtgccaggaagattaccggtcacgaatccggaatttcgcctctacagaggataggctcgggtcttttttctctcaaccttttc

SEQ ID NO: 36278 - DNA, 131 bp, Gossypium hirsutum
  Clone ID: LIB3148-027-Q1-K1-H5
cccacgcgtccgatttcaatgagcttcctctcggttatcgaaaaggaaatgatagattggttgctaggtgtgacatcagtaactataaccaatttatcaaagaaatagagattatctttgcattgatgatc

SEQ ID NO: 36279 - DNA, 219 bp, Gossypium hirsutum
  Clone ID: LIB3148-027-Q1-K1-H9
cccacgcgtccgcctttctttcttttatttttgggtttgttcttgtaagagagctatatatgatatattattaatggtttctatatgaaggtgtgatggaaatgatggccacccctaaacaaacctaatctcttaagcctatgatatttttatgggattaaccccctccatttatgtcatccctgtcatgcaatgatattttttattcataatttatat

SEQ ID NO: 36280 - DNA, 404 bp, Gossypium hirsutum
  Clone ID: LIB3148-028-Q1-K1-A1
cccacgcgtccgggaaacttcaaggtgcttacagaaagtggccagactggggtaacttatattgcagagtagcaactttaatgattttgtcaatggtagtttcatagattctttgccttcaaccacgaaggagatgactctgatttcatctgcagcatacctcagtcttcctcttgatgcgtcggctttcctttacattaacatactttgtttaagaagccatggattcaacaaatatcagtatgaaactgtctttttcttcccctgttttgtttgctgacaatgcagattgagatgccgtgaaagtgattaagggaaacaatttctgttccttgattggattacgccattgatactctttgataaaatctttcaatgaacaaagcatgattattttgatcaag

SEQ ID NO: 36281 - DNA, 417 bp, Gossypium hirsutum
  unsure (1)..(417): unsure at all n locations
  Clone ID: LIB3148-028-Q1-K1-A12
tcgnttccgctctgggatgaacntnnttgtgatnatctttggctaggtatttgaccaagggtgctttnnatttgtttttacgcagtgcatatgtctatgctggacactatggagctaaaactaacaactgtgaaactatnntaaaagaactctncaatgaacctaattagagctcttttttttgagcgtttcggaaanntccttgagaatttaaatatttatatcnntctatgttcnntacacttccaagtgtcnnggcttatttcaaatttaatttannatatgtaattaccatannttttattcaattttttatnggaatatttannttaaatattatattnnattatttgtatattaagattgttggttttaaattatatttaattgaataaatgtataaagtttggagcttna

SEQ ID NO: 36282 - DNA, 234 bp, Gossypium hirsutum
  unsure (1)..(234): unsure at all n locations
  Clone ID: LIB3148-028-Q1-K1-A2
accggtattgaatggccggaccgacccatgcgttttaaatgctctgatccgcgaacttgcagtgaagtcgtaaaacattatgactaccaaatctatgcagttgattttagacaattcctgctatgatagtttccctttagggttaattacactatcccctgattgatataaatataaattttaaatcataatttgaatgctgccnaaaaaaaaaaagaaaaagaataaaaatat

SEQ ID NO: 36283 - DNA, 215 bp, Gossypium hirsutum
  Clone ID: LIB3148-028-Q1-K1-A5
cccacgcgtacggttctagatcgcgagcggtgccctttttttatgggtggtgttaattccggggttttttatataacggtatcggtgcatatatatatatagacacaccaaaagcctagctgcttagagaattatctcttaggctcaattgacgtaccatacgaagagtatggaaaagttctttgcgaagactaaccaattctactagatcgcaa

SEQ ID NO: 36284 - DNA, 184 bp, Gossypium hirsutum
  Clone ID: LIB3148-028-Q1-K1-A6
tgaaataccggggtcgaccacacccgtccgccacacgcgtccgattttattttggtctcatcatagctgtacttttatagtgagttatattgaggtataggattgttgaattatgcccctttttttgatatctttgccactggttttctggcaaagaaaaaaaagtatagacacagatattgtt

SEQ ID NO: 36285 - DNA, 197 bp, Gossypium hirsutum
  Clone ID: LIB3148-028-Q1-K1-A9
cccacgcgtccgaaaacatcaccacatttatggattgagaaaactttattgttgttgtgggaggactactatgcttgtatgtatatgatgcgcctgcaatctgcttatgaatcttttactggatacatgaaatatacagattgctttcaaaaaaaaaaaaaaaaaaaaaaaaaaaaaaaaaaaaaaaggggcggcga

SEQ ID NO: 36286 - DNA, 259 bp, Gossypium hirsutum
  Clone ID: LIB3148-028-Q1-K1-B6
cccacgcgtccgcttgaatcatggaaataccattgagctttattgatcagcgtatgatttggggtctccgtgtgcaggtataaataaatcccaaggtttcaagaagtgaatctagcatttagccagagatcctcgacttagcaatgtttgtataatttttttttaaaatatgacatgtacctaagttgagtcggtgatcatatttgtatttgaagcttgaaatggtaatttggaaatggttagatggtttatttgcata

SEQ ID NO: 36287 - DNA, 311 bp, Gossypium hirsutum
  Clone ID: LIB3148-028-Q1-K1-B7
gccacctacgacacgcgtcgacaccttcgccacgcgtcgacatggggcggcgccttgttcacaaccatccataacggtttatgcagaatctaatagtcattgtatgaaactgcatccgattatctgtatatgcgtatggtataagatagctagcgactgaattcttacaattctggttggtggttacacagcatcatgtcagttttaactgaatcactattatgttaagttgatgcagtgtctagtgttacagactggaaccgattttacacattcaatgcacgcaaagcaatatagaataaacaagcctt

SEQ ID NO: 36288 - DNA, 184 bp, Gossypium hirsutum
  Clone ID: LIB3148-028-Q1-K1-B8
ggattaatcatcattgttggcggtgaataccttggttacgaccaaaaatacagcaggtgcgggtgtataaaaaaacaaaatcgtgtaaattaggctagagtatctatcatatgggaatcttactatttcttccgcctgcaacaaattaatcaaagaagtaccgattttcttgttctatttcttt

SEQ ID NO: 36289 - DNA, 403 bp, Gossypium hirsutum
  unsure (1)..(403): unsure at all n locations
  Clone ID: LIB3148-028-Q1-K1-B9
ggccgatgtaattttgaggttgggcttgtattaggttatttttttgaatttgggtcatgtggctgagctataggcctgttgggcctgttcttgtagttgggccactagtttctgtaattggactgtaaggactattataatattttttgattttttttgttttgttttttgtttgctcggaccagacaaatttggcccactacaagattatttatcaaaatggtatatttgatnaaaaaaaaaaaaaaaaaaaaaaaaaaaaaaaaaaaaaaaaaaaaaaaaaaaaaaaaaaaaaaaaaaaaaaaggnnnaaaaatataaaaaaaaaaaaanntaaanaaacaaaaatacaaaaaaaataaatattgggggggggccctttaaaagaatcaaattttacttcc

SEQ ID NO: 36290 - DNA, 436 bp, Gossypium hirsutum
  Clone ID: LIB3148-028-Q1-K1-C10
cgtttaaatacaggcctggaacttctaaacatgagcattgaggttgaacaaaggcttaggggggtttcattaccatttataattcttcaaggagaagatgataaagtaacagataaaactgtaagccaacaactgtacgatgtggcatcgaattcagacaagacattgaagctatatcctggaatgtggcatggcttgttatatggtgaaacaccagagaacactgaaattgtgttttcagacattatcgactggttaaaccagaagtttgaattaagaaattcaaggttagagagggaattgaagcatcaaaatgatgagatttttatttccaaagacattttctaagcacactcaaaacctatcgtatatctaaatcaatgtaataatggcatccaatttatcacaaattataatataataaatgcaattgcaa

SEQ ID NO: 36291 - DNA, 225 bp, Gossypium hirsutum
  unsure (1)..(225): unsure at all n locations
  Clone ID: LIB3148-028-Q1-K1-C11
gctcgtgtgtgcgatcttttaatgatctatcccaagtttggcggacatattttggaagcaagntctattcgaatgtntgcatgcggaaccacagtatntgttgaatgcatntcaatgtttttncccgagcaccgttttctttaggaatactcctaatagatcatagacattgtttgctgttgaatctcattgaaaatatatggaatttttttttgcaacggggcc

SEQ ID NO: 36292 - DNA, 432 bp, Gossypium hirsutum
  Clone ID: LIB3148-028-Q1-K1-C4
cggacgcgtgggcggacgcgtgggtttttataggcatattacaaccgtatattttctattaggtgtctcttttattgtctgtttctgcgttgttttcttctgtctctgttgcgtgtttcttttgctttgcaggtgtcagagggttggtggtacgggcgacgatcgccggtagtagaggcggtggtagcgtgtggcggctggcttaggtagctttagggtttctgtttggctttagttcttgggctagtgtgctagttttttgtttgggctgttggtttaatttgtttttgggtgtaatagggtgtattgggtttgggtctggtattggttcattgggcccggtctaatttgggcatttacaccatgatttaagttctgcataaaagaatagaagaaaatagtaaagcactttcgttttaaaaaaaataattt

SEQ ID NO: 36293 - DNA, 400 bp, Gossypium hirsutum
  Clone ID: LIB3148-028-Q1-K1-D1
gtccgttttcttcttgttcttaaaaaattatgatatggtatcatattagatatattacattaaactggagtttaaaccccatcagttttgttatagttattaagtttcaaacttcaaaaaaaaaaaaaaaaaaaaaaaaaaaaaaaaaaaaaaaaaaaaaaaaaaaaaaaaaaaaaaaaaaaaaaaaaaaaaaaaaaaaaaaaaaaaaaaaaaaaaaaaaaaaaaaaaaaacaaaagggggccgcaaattaaaaaaatcgggggctttttttcagagacctcgcgacttataaaccttttttaaggcgcaacaaaatttaattaatggcccattttttaaaaaccggggggctggaaaaaaccggggggttccaaaaaaaatcgtttgaaaaaaaataaa

SEQ ID NO: 36294 - DNA, 426 bp, Gossypium hirsutum
  Clone ID: LIB3148-028-Q1-K1-D2
aatggagatgatgtttcaactatgcaactaccatacgcttgcaagcttttaatccaggaacggcagtcaatgaatatcgttccacgtttgaaattagcagaggcgaattaatggtatgttcagatgattttgtgttggtgtatcatctgaaaatttggtagctatacagcagatggttggaatgtttttgggaggaagaattctgcaccttaccgatatgctcagcatcaagtctgtagaaattgtggggaagtgttagaaatggattctccatgcatgtcactactattttcttttttatttttactgaaatcttagcttgtgctgtatgtaactcctcccaagctaatgtgattttgtattatttacttaaagtggtttacaaatataatcattttattattattattagtagtttcttaattc

SEQ ID NO: 36295 - DNA, 352 bp, Gossypium hirsutum
  Clone ID: LIB3148-028-Q1-K1-D4
gggggggggaaattctgaaaatgatttgagatcatttcagaacatctctttatttaagtttttagaatttttaggccacatacggatactacattaatggtcactgacaaggcgcttgataaactccacaacaacattaactgaattgtttgaagcaagggaaatgaaagtatcgatctcattcgattcagccgagccaccaccggccaagtcggagagagccctaatgatgataaaaggaaccctttgttgcatacatatcagtgccactgctgcactctccatgtcgaccgggcttacgttgaactttttgtaaatgaagcttcgataagcagcgttgtctacgtaaatg

SEQ ID NO: 36296 - DNA, 350 bp, Gossypium hirsutum
  Clone ID: LIB3148-028-Q1-K1-E11
cgaaaatagaacaatcttgtatttctagaacaaaaaagaagaagaagaagaagacgaagaaaggcataatttgtatatgtatatctgattcaactttcttgatcttgactattgactataataggaatttgaacctgaaaattgtgttggaacaagtttacaaatacaatcacctgttttgatggagattttgtaacatatattctgttttaaacaatctgactaccaatttccttttctttttgacaatatgattttgtgaggattccagaatctctgtgaacttgcggagtgcgattgttgcggtttaaccgaggagtgtacgcaagcttacatttgcttgccttaag

SEQ ID NO: 36297 - DNA, 285 bp, Gossypium hirsutum
  Clone ID: LIB3148-028-Q1-K1-E2
ggatgcttacgggtgggtttgaagatgagaaaacactgtttcaccttcgtccgagattcggtggtggtttaggaggtggagctggatttggtgggggtgctggtgctggaagtggtggtggacaaggtggagggtttggaggtggaataggtgggggtgctgggtttgggtttggagctggaggtggtcttgggggtggtggtggagctggtgccggtggtgggtttggtggaggtgctaattgtgttgatgtattaatactggatgcatgaattcttgcaataa

SEQ ID NO: 36298 - DNA, 388 bp, Gossypium hirsutum
  Clone ID: LIB3148-028-Q1-K1-E3
gaaaattttggagaagaggtagtaaaccccacacattgaaaggggaccatagccatacatgatatttggagttcaaaaaagggttgaaactgagtgcctaccagatttattattcatggtctaatctgttcttttttttttttttgcctattattgttgttattattattattatttgtttttaggtctaccctgtatgtacgttctggaagatttgtttgttttgccaaaaaaaaaaaaaaaaaaaaaaaaaaaaaaaaaaaaaaaaaaaaaaaaaaaaaaaaaaaaaaaaaaaaaaaaaaaaaaaaaaaaaaaaaaaaaaaaaaaaaaaaaaaaaaaaaaaaaaaaaaaaaaaaaaaaaaaaaaaaaaaaaaaggggggccctttt

SEQ ID NO: 36299 - DNA, 316 bp, Gossypium hirsutum
  unsure (1)..(316): unsure at all n locations
  Clone ID: LIB3148-028-Q1-K1-E5
ttaaggagagatttgcttcctattgtagcctttcatcagttcataggccagcaggatatttatgattaatgttcctccccttgatgaaagcactctggctttttaaaataagaccaagcaaataaagagtaatcctgttcaccaaaaaaaaaaaaaaaaaaaaaaaaaaaaaaaaaaaaaaaaaaaaaaaaaaaaggnatccgaaaaaaaaagaacaaaaactggcgttcacgtgcttgcgacccaatctctctttcgtagtcttgcctaaatacaattttgttgtcggcgaacttaaatttcaatgaatgggaaa

SEQ ID NO: 36300 - DNA, 223 bp, Gossypium hirsutum
  Clone ID: LIB3148-028-Q1-K1-E7
aacaaatttcgttgcatcatctccttcccctgcagcatctggtggcacttcagtcttacgagaggcttggcagccaagcccatggaattagaatctgtagcaaattgaacttttcttgtgacttgagcctctaagatgtgtattgcgagcttggcaacattgtaagccctttctagttcttcctgcttaatcaaagcgagaacatcggttctcaatttcatat

SEQ ID NO: 36301 - DNA, 405 bp, Gossypium hirsutum
  Clone ID: LIB3148-028-Q1-K1-E9
gccaaagtttgtgagtgtcttctccgaagagtgtccgctaactctacaagcgatagtcccgggccacggagctcacttcttctcaagtcaagaacagcttacttgttttgattcaacacaattgcgttcaagcttttactctcgatcaaactggtgagcatggcgatggagcaagctttggttccccactcaatcccacttcaaaaagtgattagtgtttttttttggggcggggttaacctttggttgtaatttgtaatcctctttgccgtgaaagatgttcatctgtacttctttttgaggatcttttacttttacttttcatgtaagtttttaatccatctatttatatttttggggcattccagtacctggtcccgttgttacccaattttatcataaatc

SEQ ID NO: 36302 - DNA, 352 bp, Gossypium hirsutum
  Clone ID: LIB3148-028-Q1-K1-F2
ttaacgttgattaatttcctccaaccgagtttgtgatgtattaatgtttaatagaaattaaggtggaacaggaaatgccgagctcatcgatgacgggactaatagtttaccttcattaatgtcggtgataaagtaaggtttcctgcgttaatagaagttgtaaaaaatttcttgatgtttacagttctggaaaacaagtttgtgtgtaacttttaatcaattttttcaatagggattatctttttcttaagtacttgatcccgcatgcatgcatgcctggtccaattgtcatttgtcttgagctcgacattcttaagacattcttaagttgaaatccaatgtgtttttcttt

SEQ ID NO: 36303 - DNA, 184 bp, Gossypium hirsutum
  Clone ID: LIB3148-028-Q1-K1-F3
cccacgcgtccgcttttgtgtgaggaagtgtttgcgtgtaactcagtgggtgttgagtcaagaacgaaccgcgcttggagactccttgcatggatcgtatatcaggcttgtgactcaagtgcaaaatgtaagggtggtggttcgggtattgactcaggtcgacccttgagatggctcaacatgg

SEQ ID NO: 36304 - DNA, 200 bp, Gossypium hirsutum
  Clone ID: LIB3148-028-Q1-K1-F4
tctgcctttcgtccatcacatattgtaaaccatccactactctcctagctctatatattattatccatttcctttcatatagatttatcttttccgtacaagttgtgtttcaaattttttataggcggaaaataccattggttaaaatcatttaattagcatttttttattattttttaataatgaaatggactacaagt

SEQ ID NO: 36305 - DNA, 129 bp, Gossypium hirsutum
  Clone ID: LIB3148-028-Q1-K1-F7
ggaacataactttggttttggagttaaaatactccactcgtgatagtgttaaatattgtgagttgtcaaaaaatctgtgtatgatctacataagatgattagagtaaataaaaattcttttacggttgt

SEQ ID NO: 36306 - DNA, 270 bp, Gossypium hirsutum
  Clone ID: LIB3148-028-Q1-K1-G2
ccacacattcggggggatttgcaatgtcatttatggggaaattatttgggggtctctaaaaaaggggatagggacagacaccatattttgtaaaatccctgtgtatatataaagggaaaaacccctttttacacccctttggggttttgagattatgatataaaaaatgttgttgtgtataggggagtacttggattaaaattcaaatttcggcaattggttcggaaaaaaaaagccctttttaaaagataaaattttaatttccctttt

SEQ ID NO: 36307 - DNA, 406 bp, Gossypium hirsutum
  Clone ID: LIB3148-028-Q1-K1-G7
cggacgcgtgggcaattgcttgcctctacactttactaatagtgcttgctacatagaatgagagcaatatttggatttgagataaagaggaatgcaataaatttagatgtttttgctttgttgcatattcatcccgcattcttggatgatgctagatgtacagaaactttactccccttggtattgttatttctgcagttgattcaaaaaaaaaaaaaaaaaaaaaaaaaaaaaaaaaaaaaaaaaaaaaaaaaaaaaaaaaaaaaaaaaaaaaaaaaaaaaaaaaaaaaaaaaaaaaaaaaaaaaaaaaaaaaaaaaaaaaaaaaaaaaaaaaaaataaaaaaagggggggcccttttaagggatcaaattttacttcccgtggcttccaaattaatagtttttt

SEQ ID NO: 36308 - DNA, 256 bp, Gossypium hirsutum
  Clone ID: LIB3148-028-Q1-K1-G9
cccacgcgtccgcggacgcgtgggtttgcaaccatgaatagaataacttttttcagcttatggaaatttccttgtacagtttaaatgaatgattgcaaagtcttccaaagtttagtttaagataaaaatgtgaaacgtgggaggaatgatccacagatgcaagaattgttaaaactaggttattatcttcatgtaaagaaatgctaatttagaatccttaatcatcttattctcaatttaatcttgtctgaatgtt

SEQ ID NO: 36309 - DNA, 423 bp, Gossypium hirsutum
  Clone ID: LIB3148-028-Q1-K1-H11
tctacacttactgctctatgtgatttgggtttaaaccctgaggctttggctgctggggtcaaggaacttcagagagaacctccaccatcaaccctgttgtcatcttcttcatcacaagtaccttaacttcggattttgggtagcaataattaaaaagcgatcggctctgcatatcagttaggggaaaaatgaccaaacacaaaaatgacttgaaaaattataggttaagggcattatgttactttcctctgcgtcaagccggtatataacatttattactaaaactaattgtcttgtgctttatgtttgaagcaaaaatggttaagctcaagttttacgtagaattttttgtttacttgggtggtcttatttctctcaagttcaaatcaccttgttataaattattaattactagttcattgt

SEQ ID NO: 36310 - DNA, 292 bp, Gossypium hirsutum
  Clone ID: LIB3148-028-Q1-K1-H12
ttttaaaaaaaaaaaaaaaaaaaaaaaaagggaaggaaaaaaaaaaaaaaaaaaaaaaaaaaaaataaaaaaacaaaaacctcctacataaaaaacccatcttttttatacacctcaatccaatttaacccttcacctccctacaaatttcattttcttttactacccccacatttcacttctccccccgccttttttccaaccccatatctgggaaacccctgcctttccccaacttattcgccttgcaccccttccccttttccccacctgccttatttccaaaaagccc

SEQ ID NO: 36311 - DNA, 359 bp, Gossypium hirsutum
  Clone ID: LIB3148-028-Q1-K1-H2
tccggtcgccacgcgtcgcacgcgtcggcacaagctttactcggaccgactccgttttgccagcgacaacaactgcatcgcgtgagtcacgactgcgtcgcttggttagacgagtcaattctacaacaacgggtctgactcgctctgactcgctggttcagtcaccagtcggtggcgaaaacagtcaacagcgcgcgcgaggaattcgcgtcgagggcgccgctcctgccggtcaaataccggactggtcaagatctgagaagagtaccgagatatggaggagatcggaagcacatatgactgaaccgatgatggtcgaggagggtaggattcgctacgagtttggcaacaatgcagga

SEQ ID NO: 36312 - DNA, 427 bp, Gossypium hirsutum
  Clone ID: LIB3148-028-Q1-K1-H3
gccccacccgtccgaaaaaaaaaaaaaaaaaatttaaaaaaaaattttattaaaaaaaaaaaacaaaaataaataaaggagggaatataaaaaaacgcaggcgtgcaaacaactaaactaaactatagtgacacacacaattaaattcaattgccacaactgtaacaacaaataaaaggggccggcctttttaaagacccaaatttttttgccccgtctttccaacgtattattttttttttggggcccccaaattaaattcccgcgcccgcctttttacaacggtggcccgggaaaaccctggggtttcccaattttattcgcttggcaaaaattccctttttccccggtggggtaaaaaaaaaaaagcccaccccttaccccttttcaaaaaagtgccccatttttttgggcaaatggccccccc

SEQ ID NO: 36313 - DNA, 266 bp, Gossypium hirsutum
  unsure (1)..(266): unsure at all n locations
  Clone ID: LIB3148-028-Q1-K1-H4
gttccttttaattccttccagacttgactccaagagtgagaaagactggctaagcccccagaacaaggtatgttcactcaaatttgttactggaatccatttctttagatagaaatctatgatgtatatttcggacctagtgttcttagctcggtcacctttacaaaaattagatcttatccttgtcttagatggaatgatggtagactagattgtgacattgttaatagagactatagtttttggtccttgaatttgacagctna

SEQ ID NO: 36314 - DNA, 321 bp, Gossypium hirsutum
  Clone ID: LIB3148-028-Q1-K1-H5
ccggaactgactgccccgacccacccatccgtccgggtttacccgctgagtttaagcatatcaataagcggcgaaaaaaaaaaaaccaaagcgaggaacttataaaaaatgaaaaagacaaaaaataaaaaaaaaaaaacaataaaaaaaaataaaaaaatatataaaaccgcctgcgattcaaaaagattattcctttccttcaaaaatctctttgcatcaacggagtttctcattccctccaacttaaaaaaccttgttgtaatccaacaatatttcttttagtcattttccaattttcccaaattgctttttttttta

SEQ ID NO: 36315 - DNA, 425 bp, Gossypium hirsutum
  Clone ID: LIB3148-028-Q1-K1-H9
cccacgcgtccgattttcggttaaaccgagcgaggctacttatgttaacgcactctcttgttgtgctaatttagaaaagcaaggtgggttttaccaagggaggcagatacatgggtatattttcagaaacgagggcgttatgaatgttttcatgggcacagcattgattgatttttatggaaaaagaggtcatttagagtttgcctttagagtttttaatcaaatgttggatagagaggtttgtacttggaatgcaatgatctcttctcttacatgtaatggtagagaaaaggaggctttggacttgtttgagaagatgaaagaggacggaatgtgtccgaatgaggttacatttgttgctgttctaacagcatgtgctcgcaccaagagagtggaagtgggtttacaattctttcaatcaatgt

SEQ ID NO: 36316 - DNA, 426 bp, Gossypium hirsutum
  Clone ID: LIB3148-029-Q1-K1-A1
cccacgcgtccggttgctatgacaattatctgtgtggctactaataattgaaagtcaaaaggtgtttatcgaataataataatgttaaaagcttacctttgaaaaatcattttctttttgaaagtactaatcaggctacaccgtcaaagttggatggataaaatagaaatgactctgtttagagattgaattttaccctagccttttagattacaatgttcatgcacagcaatgacatgtataagcttcaaatttaacctttgagtctgaaacataaattcctatggcaaaactggtttcaactttcaagtggcaaatcatgactgcttcatgttcagcttcgactgttgtaaaatcagccaatgccactaaatttcaatttgtttttctgtaaagtttcgatgacatggacagcatatatgcctc

SEQ ID NO: 36317 - DNA, 194 bp, Gossypium hirsutum
  unsure (1)..(194): unsure at all n locations
  Clone ID: LIB3148-029-Q1-K1-A10
ctaatactctaatactaatagaataggatactattaggattagacaagcatccatctgataagacgggcaatgcatatngaggcctgctcaatggggccttaattacatcatttactcgtggcgccagatctatacgctctaatactattcctgtactaatacaataccaatctaatactctaattctaataga

SEQ ID NO: 36318 - DNA, 434 bp, Gossypium hirsutum
  Clone ID: LIB3148-029-Q1-K1-A11
cccacgcgtccggtgtgccgcaatcaattgagtctgccttggaaaaagctggtctcactgcatctaatattgactggttattgctccatcaggcaaaccagaggattattgatgcagtcgcaacacgtttagaattcccaccagaaaaggtcatatcgaatctggcaaattacggcaacacaagcgcagcatccattcctttggcattggatgaagctgttcgaagtggaaaggtgaagccaggccatacaatcgcggctgcaggtttcggtgcaagtctaacttggggttctgctgttattagatggggctgaaaaaaactgccaaattaaccaagtagaacgaaagacagattccttgcagagagcagcacttgaatccccaactaccttatcggaaaagctcacagataatccggattagcgcctgcataa

SEQ ID NO: 36319 - DNA, 269 bp, Gossypium hirsutum
  Clone ID: LIB3148-029-Q1-K1-A7
ctgctattgtcgaacaccgcgtcgaactgaatcgtcattcttgggcattgacggaagatgtaaggactgtcttctacccaggaacagcagcggaggcatctgtcatttgcaatgactcttctgtatctaagattagctagattaggaatgaaatcccaggaaattcgccaaatagttactgtaatttttgaaggtagttgtaagccccatagtttcctgtaaaattctttaatttcgatttgtattaaataattacaaggatccgaatt

SEQ ID NO: 36320 - DNA, 115 bp, Gossypium hirsutum
  Clone ID: LIB3148-029-Q1-K1-B1
agagaactcaccacataactccgctttccaagcttgaaaatcattatgcgcagtctctgcaaggggaatttgaaggattttctgaactatgtcctcagaaaaggtattctgaatt

SEQ ID NO: 36321 - DNA, 170 bp, Gossypium hirsutum
  Clone ID: LIB3148-029-Q1-K1-B4
ctgtttccaatagctcctaatttagagcaaattatctaataaccaacctgataaaaatgatgctttgattggttcaaaaaccactaaaaagaaaaataaagaaggcaaaaaaaacaaaaaaactcaccgcaataggtgacgcttctaggttttattggatctgaatgaca

SEQ ID NO: 36322 - DNA, 306 bp, Gossypium hirsutum
  Clone ID: LIB3148-029-Q1-K1-B5
gggtaatggagagggttagggaggtaggggagagattggggtacagagtggagagagggaaaagaggggttatggggttagggaaagggagggtggtagtggtggtggaggtggtagaggtcgcacaggtgttcgtattggtggaggttaaggtgatggatggtggcgtagagtttgaggaatggcaatgggtggatctgtgagccggccttgcaaacatttttgtttcttgtaataatggtgcttcacgctgatggcatttttgcttggtaatgtacatcgaacgtttttttttttacctctttc

SEQ ID NO: 36323 - DNA, 234 bp, Gossypium hirsutum
  Clone ID: LIB3148-029-Q1-K1-B6
tgactaggccggcattggtttatgctacaaatattcaagaatccggtaaggttgcttggtgtatttatatatttcaaaatcggaaaggtgttcagttgcttttgatctaaagagaaacccttaaggtaagggtgctctgtgttttctttgtacgattgtaagcagagagaactcaaacttttctggctactatgaattatttgatagatgatcgaaaaaaaatttgttatttag

SEQ ID NO: 36324 - DNA, 290 bp, Gossypium hirsutum
  Clone ID: LIB3148-029-Q1-K1-B9
cgttttatgcaacaacttaaaaaggaagaattttaatattgatcacacctttaatctctagtagtttggatccttttgaagttgttcggtccatgcttttttgttttcaagcgctctttctctctttcatgtcccctatcattacttgtaaacttcatatgtatctttgtcatcttttttttcattaagcttttaaacgaacagttatgccttttaaaaaggtatggaaaaaaaaaattaaaacctagaacttatatataattttgtggtccaggcccaaaaaccaaaat

SEQ ID NO: 36325 - DNA, 321 bp, Gossypium hirsutum
  Clone ID: LIB3148-029-Q1-K1-C1
ttttttttttttttattttatatacttcaataaaaaaaaaaaaaaaaaaaaaaaaaaaaaaaaaaaaaaaaaaaaaaaaaaaaaaaaaaaaaaaaaaaaaaaaaaaaaaaaaaaaaaaaaaaaaaaaaaaaaaaaaaaggggggggcctttttaaaggatcaaagtttatgtacgcttgattgcaaattaatagtttttttatagtgtaactaaaattaaattaattggccgcggtttaaaaacttttgaattggaaaaaccttggttttacaaaattaaatggtttaaaacaaaatccctttttaaaaagttgggttaat

SEQ ID NO: 36326 - DNA, 310 bp, Gossypium hirsutum
  Clone ID: LIB3148-029-Q1-K1-C3
aaaaaaaaaaaaaaaaaaaaaaaaaaaaaattttttaaaaaagaaataaaaaaaaaaaaaaaaggggtaaaaaaaaaaaaaaaaaaataaacggtcgtccgttttaaagggtcccccctttttgtacgcttccttccaaccttctctttttttctatagtgtcacttttttttagttcactgtccttccttttacatcgccgtgattgtaaaacctctggctttgcaaaacttattcgttttccaccttattcccctttcgccagttgcccttttagccatctggcctaatccctacgcgcttcccacca

SEQ ID NO: 36327 - DNA, 312 bp, Gossypium hirsutum
  Clone ID: LIB3148-029-Q1-K1-C4
aaaaaattaaaaaaaataaaaaaaaaattttttttaaaaaaaaaaaaaaaaaaaaaaaaaggggggttttataaaaaaaataggataatctggcataaaatttaaacggtttgggcattaagaattcttccataccacgggacctggtctttctatattgacaccttattttagttctcgggttgttcttttttttggtgataattttaaaacatctggattggtttaaactttgtcttatcccacctcatgcctttattacattttggcttaaacgcattgaggctgtaaacctgttcgttttcaactgtt

SEQ ID NO: 36328 - DNA, 307 bp, Gossypium hirsutum
  unsure (1)..(307): unsure at all n locations
  Clone ID: LIB3148-029-Q1-K1-C5
gggctataaacgaggggattgagagagagatggtttcagctttggatttagaagaagaatgctacgaacagactttgaatacaaaggatcgcttggaaggcttagcagcatttgctgaaaggcgaaagccaatatataccggggaataagaaagacccagactgttactaaaaaaatggcttcttcataagtttgtttactaataacagttcttactttgttctaaatttggacctttgagaagtctttatgttggatgaactctttaatatcaattaaaatgtcagaaataataatttatatcana

SEQ ID NO: 36329 - DNA, 141 bp, Gossypium hirsutum
  Clone ID: LIB3148-029-Q1-K1-C6
gttactcttatgaacacgcatacggacttgccgcgtttggtttcagaatgcacggatcacatgttcaatgttcgagggctggtgcctgatagaagtctcaacttataaagaatggaactttcaaactttggcggcctgcgt

SEQ ID NO: 36330 - DNA, 236 bp, Gossypium hirsutum
  unsure (1)..(236): unsure at all n locations
  Clone ID: LIB3148-029-Q1-K1-D10
gtaagataggattttcgtttttcaatcaattctttgcttgcttaagaaccaacatgtaatattactgttcccgcatgagcaattagagaattcatcatttgcttgatctannnnaaaaaagcaaagagaggatcataatttgatgagtgaaaaaaaagccaaattttgggagacaaaaaaagaagaggaaaaaacaaaaaaaagggatgaaaagttaaaaggggcggccgctttaa

SEQ ID NO: 36331 - DNA, 226 bp, Gossypium hirsutum
  Clone ID: LIB3148-029-Q1-K1-D11
atcgcgagcgccgcccttttttttttttttcttttggtctttcccttgatatcctgaaatctgcagtgcttgatactgttcatctgcctctctctttattgttcctagcttacatgaagtcttcttatgttctttcaacaagtgataagaaaaaagccagatatttgtataattcagcaatgtaagcaattaaagttaataaacatatacggagttaatatttccc

SEQ ID NO: 36332 - DNA, 414 bp, Gossypium hirsutum
  unsure (1)..(414): unsure at all n locations
  Clone ID: LIB3148-029-Q1-K1-D12
cgtnnccgattaaacattnagatggaagaacannacttgtttcatatgttttatgtctaggttagaaacccttattttgagggcctgattagtcatttgatttaataggcgacagcgtatgtctttaaacttaactatttttagagctccgagntgatgtccaattctttgatgttagattganccattctcttcaaaaaaaaaaaaaaaaaaaaaaaaaaaaaaaaaaaaaaaaaaaaaaaaataaaaaaaaaaaaaaaaaaaaaaaaaaaaaaaaccaaaaaaaaaaannnatacatatttaaaatttaaaaaaaagttttttttacacttactatttcaaaaaaaaatggggggggccctttaaaaaaaccaaacttttttacccctgtttgcaaaaattttttttttttt

SEQ ID NO: 36333 - DNA, 374 bp, Gossypium hirsutum
  Clone ID: LIB3148-029-Q1-K1-D5
ggaaaaagaaaggttctagggtcacaacaattacagaacaagctgatagtagcgccgccgcccaagaagttggtcctgaattggtggctgaaccactcaatgctaagtccaagtccttcgttggtacccacgaatacttagccccagaagtgatatcagggcaaggccatggcagcgctgtagattggtggacacttggggtgtttttgtatgaaatgctgtacgggaggacgcctttcaaaggcgaaaacaatgagaaaacactgattaacatccttaaacagccattaagcttcccgagaatcagtgttaaaagcggcaaagagtttgaagatatggtcaaagttcaagatctcatcaacaagcttgtagtg

SEQ ID NO: 36334 - DNA, 396 bp, Gossypium hirsutum
  Clone ID: LIB3148-029-Q1-K1-D7
ataatgtgggatttaggagaatattgttgagaacacaggctcttgtcttaaagaagcgaagcctaaggatgagtgaaaccttattgcgaggagttgggtttagagcaactacatgtatttcaagtaattaatattctgaagactgttgtagaattgaaataatttgaggattaatcttttcagaaaatcaagttgattggatttgttaaaaaaaaaaaaaaataaaaaaagaagacataaaaaataaaagacaagaaataacaaaaaatagataacaaggtcaaaggaaattcaatattctgaggatcatggcataaaagtgttcaaagataatagaaggttgaatcgagtcccaggaaatcatttggggggggccttttaaaagattcaaacttt

SEQ ID NO: 36335 - DNA, 415 bp, Gossypium hirsutum
  unsure (1)..(415): unsure at all n locations
  Clone ID: LIB3148-029-Q1-K1-E11
cccacgcgtccgtgccgaggcaacccggcgaatgctggttaggaagagattaagttcaaaaataaactatgatgcattggagaagctctttgatgacccggttacagagaaacccaagaaacaaagaatagaatcaaattcagatgaaaagggggagaaggcttctaaaattggcaaagaaggtgatttagaagatgaatataacgacaatgatgatgatggatatggaggaattttttacggtgacactgaatatgagtatgaggataattatgattacgatggatattgaatngtctnttatgtnggatttgggtgaattcttatattcagaactctactcgtagagcaaaagaaggcaatggcgttagtaaaagaggagttaaaactgcagtcaatagtgatagttttactc

SEQ ID NO: 36336 - DNA, 436 bp, Gossypium hirsutum
  unsure (1)..(436): unsure at all n locations
  Clone ID: LIB3148-029-Q1-K1-F1
gaagatttcatacttccttcgaccactctgggaatcgccaccgaaatctttccatgatatcccacattattatcatgagaatgtatcgatggaaaagctctgtaaacttcatggttggggaattcgtgaatttccgagacgggtttatgatgcagttttgtttagcaatgaggtggatatcctaacaatacggtggcaagagttgtacccttacattacacagtttgttcttctcgagtctaattcaacattttcgggaattccaaagcctatggtttttgctagccatcgagatcaattcanatttgttgagccccggttaacttatggcacaattggaggaaggtttaagaaaggagaaaaccctnttattgaggaggctatgcaacgagtagcattagaccagcttctcaaaatagctggaattactgatgac

SEQ ID NO: 36337 - DNA, 304 bp, Gossypium hirsutum
  Clone ID: LIB3148-029-Q1-K1-F9
cccacgcgtccgcccactcgttcgcccacgctttcgggtttggtcattttctctagtccttatcttgtgtgttaaatgggttcgcttaagtgctttgtaaaatgttctcttccaatttcctttgtaacaacagatttcatttacttttcttgcaagaaatatatataacagtatttctttttcccaaaaaaaaaaaaaaaaaaaaaaaaaaatatattggtgggtgtcgaaaaataatacaaaattaacagacgcgttccttctaagaataagttttttcttttgtgaacctcttatattaatt

SEQ ID NO: 36338 - DNA, 397 bp, Gossypium hirsutum
  Clone ID: LIB3148-029-Q1-K1-G11
tccggcagttgtcgactcaagcgtccggccacgcgtccgcttacatcacacccacggctgaaagttttctttaggacaatctctccaaggcactaccgcaatggagattggaacaccggaggtacttgcaataataccattcccttgactaatggtagtgaggtcttgcaagatggatctaatgacaaagttgtggagagtgctgttaggggcacaaaagtaaagcttttggatataactgcgatttctgaactccgagatgaagctcacatgtctggttacagtattaggccgacacagagtgtcaatgattgcttgcattggtgcctacctggcataccagacacatggaacgaaatccttattgcacagatataggaccttccatgcatatggt

SEQ ID NO: 36339 - DNA, 296 bp, Gossypium hirsutum
  unsure (1)..(296): unsure at all n locations
  Clone ID: LIB3148-029-Q1-K1-G12
accacacattcgtatatataacactgaccgttttaagttttctttaagacaaactctccagggcgcttgcgcaatggagattggaacaccctaagtacatgcaataataccaatccctggactaatggtagcgaggtcttgctagatggatataacaacaaattttaggaaagtgctgtttggggcacaaaggaaaagcgagngcatataacttttttttttttacttcgagatgaaactgacatgcctcgttacatgtattaagccgacacagagtgtcaatgaaagcttacatt

SEQ ID NO: 36340 - DNA, 427 bp, Gossypium hirsutum
  unsure (1)..(427): unsure at all n locations
  Clone ID: LIB3148-029-Q1-K1-G2
cccacgcgtccgagggcaccgaaaagtctgaaattggtcatttagtaaagagaaaatcagcaggtggacgagttcctagaaagcatatgaaactgcaatcacatttcccgccatgtaaatcaacaaaagcaaagaaatctggactattgtctaagaagactcggaagctgtcttcattgactggtcagaagataggtgtaggtgacaggaaaccggtaacagggaagcccaagggtcctgtaatagcttgtgttcctataaagttagtattcagtaggataaatgaagcagtgaacggctcagcacggctaacacaccggcctctaacatctcgcaatccatgagttggtggtgatccatcgtgttgtgaaagtggtggctgattcattntaaaactattgccgcagcttgcttgcattcattctct

SEQ ID NO: 36341 - DNA, 233 bp, Gossypium hirsutum
  Clone ID: LIB3148-029-Q1-K1-G3
gttattttaacttatgttgacgacatttacaattctaaatagaactgtagacctgttgctgcaaaaaaaaaaaaaaaaaaaaaaaaataaaaaaaaaaaaaaaaaaaaaaaaaaaaaaaaaaaaaaaaaaaaaaaaaataaagaaaaaaaaaaaagggcggctcgttaaatgatccaagcgaatgtactcttaaaagcggaaaattgatttaaaaacggtgtcaccgaaatta

SEQ ID NO: 36342 - DNA, 427 bp, Gossypium hirsutum
  Clone ID: LIB3148-029-Q1-K1-G4
cccacgcgtccgacttaatggcggagctcctcttccctccgatgaattaatagatcgccggcgattcttatccaaaaccgtccgttctgttcccgttaatatcccgcttcatcaacgtagtactatcgttttcgattacggtggtgatttagatgaagatcgggaaattgtgccgccgcatgtgatattagaacggagaatcgctgcgaaaacggcgttttcggtttgtacaggtaatggaagaacgcttaaaggaagggatttgagtcaagttcggaattcgattctgaggttgactggatttttggaagtataatatatatatgtttaatttttttcatttctttttttttcatcatttcaaaattcagaaatggattgggagaaaagaatttgattttatatgttatatatataaattattgat

SEQ ID NO: 36343 - DNA, 329 bp, Gossypium hirsutum
  unsure (1)..(329): unsure at all n locations
  Clone ID: LIB3148-029-Q1-K1-H11
caggagcatgtccttgaataaagtattttatttttattttaaaaaatgagaattgtaattctaggttgaataaaaaaaataactcttatgtcttcggttttttaacaaaaaaaaaggcttatattgttggagaatacaaaatgactttttaaggtttttattggaaacattgagagttaaaattttttgccagtgaatagtaaaacaccatttctttaaactttacctgaatgaaaaccaangggnaacggccggccatttttttaggaagaatattacaacccctcgaaataagaaatttcatgtggccttaaggtccaaatgtgctt

SEQ ID NO: 36344 - DNA, 260 bp, Gossypium hirsutum
  unsure (1)..(260): unsure at all n locations
  Clone ID: LIB3148-029-Q1-K1-H12
tgaacttgatgtaattttgttattggaatggttatggaccctaaaattatcctagttcatgtcccatttaagggnaaaagcagcaatattcagacaaaatgagatagccgcctctttccctgaagccaggaggatatttggggctctagctgtcaccagccttatttcgaaattgcaagatgctggtatacaaaggcaagatttgtacaaaataattacagaccccaaccctgggtcgagggtggataaaccctttgaaa

SEQ ID NO: 36345 - DNA, 422 bp, Gossypium hirsutum
  Clone ID: LIB3148-029-Q1-K1-H3
cccacgcgtccgcccacgcgtccgcccacgcgtccggccaagtcatgaagtttagaaatgggtatctcaagggttgaagtttgtttgtagaacattatgtacacttactagcctgccaacttttttttttcctataaaaaaaacccttatctgtgcaacaataggtgcattaagtcataaaaagtaatgaaaccataatactctaatcactattttgaatgtaggggggaagttgcatataaaagatgtgtgttgaagtgatggatgcatgcatttttcccaaatgtggaccagaggatgtggaaatgcatgagccttgggagggaaaggccaccgaccaatgtccacgtcccaatatatatttatatgatattaaaatagtcgtacgtcggaatacatgtatgttggtctaatttaattta

SEQ ID NO: 36346 - DNA, 112 bp, Gossypium hirsutum
  Clone ID: LIB3148-029-Q1-K1-H4
ggcacttcttttcatgatgagaaaagggattttctcaaagaaaaaggtcatgggtgatctcaacatggtgcttaaacggggcaaaatcggcggcgcccaaacccttggcaac

SEQ ID NO: 36347 - DNA, 352 bp, Gossypium hirsutum
  Clone ID: LIB3148-029-Q1-K1-H8
gtggaatcgagtttgatccaattgaatctactacagcttgtaaaggcatttttggtcccggagccgcccctaaaaatcctggcaaggtctttactgatcgaaaaactgtcgagaatttcagtgctcatggaaataacgggcgcaagttcttacttcccgcaatttggaaccctacaacttctacctggtggactattacttcacgctatttttctacttgaaacatctttcatcttgtttaaaaaaactcctttttcaacttatgccaaaattaactttttataaaccaaacctaatttgtatataatattgtcttctataaaatcatcacattataaagattagatgtgat

SEQ ID NO: 36348 - DNA, 412 bp, Gossypium hirsutum
  Clone ID: LIB3148-030-Q1-K1-A10
cccacgcgtccgatttttctggtggctgtagagtgagcttgctcttgttgagaggctgatcgacaggaagactgagagtgaggaggaattgcttgttacgattgctactgctagagaagaggtgaagcgtgttaagagatatgattctgttgttgataaagctaaagggaagcttgaggaggctgtaaatttggtggggtctatcattgatgctgagaaggctaaggttaggcaaagggagccaatcatttgaggtttttcttgtgaagggttctcgtgttggtattcttgaggtagttgattatctgtttgactaactctgtgttactgggaatttgtagatctgaataaagactagttacttggttcaattgataaaacaaaatatagatgaattaagtaaacaagacaa

SEQ ID NO: 36349 - DNA, 349 bp, Gossypium hirsutum
  Clone ID: LIB3148-030-Q1-K1-A11
cccacgcgtccgataatagagtaaaattaacttgcttggaaaaaaaaaaaaagaaaaaaaaaaaaaaaaaaaaaaaaaaaaaaaataaataaattataaaaaaaaaaaaataaaaaaaaaaaaataatattaaaaaaaaaaaaaaaaaaaaaataaaaaaaaaaaaataaaaaaaaaataaaagggggcggcccttttaaaaaatcaaattttatttcccctttattgcaaaaaattaatttttttttttttacacttaaattaaattaattgcccgcgtttttaaaacgtggtacttggaaaaaccttggttttcccaaattaaattccttttaacaaaatccccttt

SEQ ID NO: 36350 - DNA, 156 bp, Gossypium hirsutum
  unsure (1)..(156): unsure at all n locations
  Clone ID: LIB3148-030-Q1-K1-A4
cccacgcgtccgggttataataaatcttagtccttttgtttaacatttgttcaatgtccaagttcttcctattgctccaatatacccaaaacccgagactgcttttttttttaaaatattttattgcaaatgcaattttttttcnnnnnaannnaa

SEQ ID NO: 36351 - DNA, 318 bp, Gossypium hirsutum
  Clone ID: LIB3148-030-Q1-K1-A5
gtttgaagatctgaacgtgctcggaaatggtgacggaaggcgtagtagtacatcaccaaacttgtcaggtagtaatacgcaaagtatggttggtggaaggaagtaaaaaaaagagtgtcgtagttttaagatttatgcaaaaggatatatatgtccattgtgaatctctggtgtaaatcacagtatctaagacatggatttgtttttttttttttagattgatttgctgtggaatttgtctttttagatttgatttgtgattcattcaaataaatgaccaaaaatatacaacatttaaaactgaaaaaaccattaatt

SEQ ID NO: 36352 - DNA, 387 bp, Gossypium hirsutum
  Clone ID: LIB3148-030-Q1-K1-B5
ccggattggaagggccgggccgagcgtcgcgtcacgcgtacttgataacctctaactgcaattttttgtcaagatgatgttgactttgcatgtgcgggttaccaaataggagagagaagttcaagtttgatgccataatatacttgaaaatgttctttttttttaattatagggactatcttgtatttcttttttcaattttatgttggattacgggttaaaccatgatataaataatatttttgttgaaagatataggggaggactataaatgttgcacgtggaaagtaactggtgtggctttccctttttttatgagaatgtctgttgaattattgacattatatctagccatacatttgagaacaccacttaatttttttttct

SEQ ID NO: 36353 - DNA, 334 bp, Gossypium hirsutum
  Clone ID: LIB3148-030-Q1-K1-B6
aaaaaaaaaaaaaaaaaaaaaaaaaaaaaaaataaaaaaaaaaaaaaaaaaaaaaaaaaaaaaggtaaaaaaaaaaaaaaaattaaaaaaaacaaaaattacacaaaataaaaaaaacaggggcgccccatttagggggtccagtttacgttacccttccttgcaacgccatgtttctcctttggagaaccctaacttaatttccttggttttttttttacaccttcgtgtctggaaaaaccctgccgttccccaattaaatcgccttcctaaccttctccctttactaaagttggcttgataacaaagaggccctcccctttcgcccttccaa

SEQ ID NO: 36354 - DNA, 235 bp, Gossypium hirsutum
  Clone ID: LIB3148-030-Q1-K1-C1
gcttttcttaaaaataaagaataagagaactccctcctataaccaaataaaacaattttatgtacctatttgataaagagaaaaagccaataggggcaaattcataaagtatttttgaattgccaatccaataataaatacgagtttgaacaattgctgattagtcaagaattacatacttttagatgcaattttaattattgtaaattatacatttactatttattggtgaatc

SEQ ID NO: 36355 - DNA, 264 bp, Gossypium hirsutum
  Clone ID: LIB3148-030-Q1-K1-C10
agctgcatctgtgctatcattggagtgacatattagtagctttgattaatagtaaaatacatgggcttcaagaaatgcattgattgacgtgatgctaagatgatacgaatttctcttcctatatcatcacttgatttaatgatttacggctccacatgggatgctatactatgaagtggaacgccgtgcttattcaccaaggacccacacgtgatggagatcgcggaattcgccgtgggggagtgttacaagcaatccaatgtt

SEQ ID NO: 36356 - DNA, 420 bp, Gossypium hirsutum
  Clone ID: LIB3148-030-Q1-K1-C2
gcttgagatggctcgtcaagcacagatgaattcccagcacacacaatctcttaccgagataagttggggcaaccagatacgtacttatgtccttaatccttatcgcttggtgaaggatctgaggaccaattatgaggtctctgatcccgattctgtgctagagggagatctagacagcttcatcttgagctatttatctgcttcattggacaaaggtgaaggtgaacaataagattagctgcaatgcaaaagatcttgtcggaatattacatctacgcatggcttgcaagctactaggcagctgtggcaacacagtcatgcacgagctttgcattgtcacatctaagatatgatgtaatagctgattctacagagccattggacctttgtgtattgtatattcattacaaggactaaagg

SEQ ID NO: 36357 - DNA, 399 bp, Gossypium hirsutum
  Clone ID: LIB3148-030-Q1-K1-C6
cccacgcgttcgctttcatacaaaaaaaactacaaaaaaaatgcaaatcttaaaataagacgggtgaccagaaagaccatcacacctaaaaatcaaaagtaacaacaacgatcgacaacgttaaagcaaaaaatacaagacaaaggaaaggggccggccgttctaaagaccccatatttttttccgcgtaactgctagaaaatagcctttctttggggcgacacaacatcaattaaggggcccgcctttaacaacttcctacctggaaaaaccctgtggttccccaacttaataccctggcaggacatcccctttctcccggttggcgtatttccaaaaaggccgacaccgttcgcctttccaaacaattccccacctggattggaaaagggcaccccc

SEQ ID NO: 36358 - DNA, 415 bp, Gossypium hirsutum
  Clone ID: LIB3148-030-Q1-K1-D10
cccacgcgttcgcccacgcgtccgcggacgcgtgggtgagaaatcaagttggaaacctgcccgaccccaaaccccagaggaggatcacccgcctttctaaggcgctcccccaaccaagcatttggagtatcatcattgttgtagtctaaatattgccaagttttgggagacagaaaaagagatgcagaaacagataaatgtgttgaaagttagtctggtctcattcctaacagagtcagaaaccagaaatgaagtgtattcatatttggatatgggatgaggttgtattgacactaactattcagaagaaaaatgtctgaaatctgacataaacccttacttgtgtacccataggtccaaaaattttgactgtgttttgcctttctccaatacaaataggggggaaaaggagaaa

SEQ ID NO: 36359 - DNA, 407 bp, Gossypium hirsutum
  Clone ID: LIB3148-030-Q1-K1-D12
accacacgctgctaacaagtccagctacagcgaaccaagtggctgagaatgcaaagaatcctatacagtggaaggcaaaattcgcagcggcaatggtgaagatggggcagcttgatgtcttgacaggatccgagggagagattcgagccaactgtagggtgatcaaaagctagagatttgaacacatcaaatgtgtgatgatgaagttaaaaaagtgaacttgaagctttttaaagctggatgtcacataatttgcaatagttaaaagtcataagcaccaaaatttggattagttgaaagcactatggttcgtaaaataggattatcaaggaaagtgacaaccattttcaataaaaaaaaaaaattttttttgaggttggcctataaacaaaaaaaactcttgtggg

SEQ ID NO: 36360 - DNA, 418 bp, Gossypium hirsutum
  Clone ID: LIB3148-030-Q1-K1-D7
ccaaaaggaaggcttgagaagaagaagaatgatgaagagactgaagaatgggtgtgtagaatgcttgcattttgtgcaattatcttcaaatgatcatccctagaagttgcattttcatttttctgtcttcataaaattgtgcagtgggttcaatgtgacaaatgtgaggcttggcagcatcaaatttgtgctttatttaatggtcgaaggaatgacggtgggcaagctgaatatacttgccccaattgctatataactgaggtcgaaagaggagagcgaaagcccttacctcagagtgctgtccttggggccaaagatttgccaagaacaatccttagtgaccacatagagcagcgattatttaggagactgaaacaggaaagacaagagagggcaagggttcaaggaaaaagttatg

SEQ ID NO: 36361 - DNA, 364 bp, Gossypium hirsutum
  Clone ID: LIB3148-030-Q1-K1-D8
ttctttcttccttgtattctttttccctcctctatatatgttctagagaaactattatatagataattaaacatgggggtttctttgtcgtttaaaaccttacttagaacacttatagttttggggttcatcataattgggaccctgcagcaagaggggcaagtgaaagacttgggtaaagggaagtcgactttggtgcatcaacggttggatctctattacataagcagaagaagagtttcttatggaccggatcctattcataacaagcgagctggcaactcgagacgacctccaagacaagcttaggcatcaaagtatggggaagcttcgaatcaaccgaagtgctaaaagatgatggcca

SEQ ID NO: 36362 - DNA, 268 bp, Gossypium hirsutum
  Clone ID: LIB3148-030-Q1-K1-E10
gccagctctgcaagccaaagcgtccaaaacaccgaaacactcggctcatcgtatgatctggatacagtatccactggcaagagtttctacaccggcgcattgcttccgcacccgcttcaccgcgcatcatcacttccggtcgatgccgtggatgtgtagaggctgccaagttttttaattattgtaaagtacctacctaccccccgcccccccccccccttcctccttacattgaaagtatgtaaaaggttccacatagctttcatgt

SEQ ID NO: 36363 - DNA, 389 bp, Gossypium hirsutum
  Clone ID: LIB3148-030-Q1-K1-F3
ataaatctgtagaattttgttaatgtactttctctttattaaataataatatcataaatcataagctgtaaattttaaagtattttttcaaactggtttttattttttccccctgatgtcccgatttgcatagtagaagaaacatgtactatacacaatcataaattcaaaataaaaacaaattccaatatccaaaaaaaaaaaaaaaaaaaaaaaaaaaaaaaaaaaaaaaaaaaaaaaaaaaaaaaaaaaaaaaaaaaaaaaaaaaaaaaaaaaaaaaaaaaaaaaaaaaaaataaacccccccaaaaaaaaaagggggggccccttttaaggatcccaatttatcttcccctgggttgacaagtaaaactttttttttggggcccc

SEQ ID NO: 36364 - DNA, 366 bp, Gossypium hirsutum
  unsure (1)..(366): unsure at all n locations
  Clone ID: LIB3148-030-Q1-K1-F7
cccacgcgtccggcaaaatacgagaagctggttgacactgaagcaactcagctggatgagatcaatagtttgaaagtcatggttgcggacaaagatgaaaaaattcgcatacacgaacaactgtgccgtgagcttcagaaagaggcgaacgaattgaaagcgaatttagagaaaaccaagaaggaacatgatgtgaaagtatctgagctcgaggaaaagctcaaggccaaggaaaaggaagtaggcaaaatgatcaataaggttgaggagatggctaactcgatgacttgnngaaagctaagaaagctnngactacgctcggctccgcagttggatgacagcccanatactcatagatcaagatct

SEQ ID NO: 36365 - DNA, 385 bp, Gossypium hirsutum
  Clone ID: LIB3148-030-Q1-K1-G11
gccacgcgttcgcccacacgtccgggccatccatttactggaatctgtatatccaatgccaccattgaactaacaaaaaagccaaagaagattcaatggaattgcactgaaattgctggggtttcaagcgatgttactcctaaaccctgcaatctgcttaaggatctaagatcccaaaatacctgtaatgttcccgaggacgacttaccaattgtgaaattttaaatgtaaatgtgctctcttatagaatttgacaaaatgaagaaagatatcgatacttctctgtatgaaataatatctataatctatatataatataaatatataggttaaattatactatgcttaagctgtaatataagtgacatttgaaatttgaaaattt

SEQ ID NO: 36366 - DNA, 408 bp, Gossypium hirsutum
  Clone ID: LIB3148-030-Q1-K1-G5
caaaacttgatccgaattcatccaataaaacggattttgtgatgccacttctcggtgacaagaaagatccaaaaccattgggtaaacccaagaaggtgagtgcatctcctcaaaaggaaaaagttagtggaaacaatccaagtttaacttcaaacccgaaaagtgataaaacaatgaaggaaaataaggcgaagaaaaataatgtaggtggtggaaacaatctaaatagtgcaaacactgtgaaaagaggttatacaaacaaggataaggaaaagaagaagacgacaaagtcaaatgtaattggaaatgattccaagtctgagattgatgatacatgtgccggcatagctagtagatgtgaagatcaaaactctttgattgcatgcgttaagggttttggaactgggt

SEQ ID NO: 36367 - DNA, 404 bp, Gossypium hirsutum
  Clone ID: LIB3148-030-Q1-K1-H10
ggtgagttttttatttaagaaaaactatttgctatagaaaaataaaatgatctgtgtggctggtagaacaaaaatgacatatatgactacactattttgccaaaacaagcacagatctatggttggagatcccaaaatgactggttaaggttttagttgcagtcatgttgagtcgactttctggccagagaatagtcagccaccattccgtacactgtcaatgactgtgcctcaatgtcaaactccagacaatgtttacagtatgatgatgacaagccatctaaataagaaattccagggggcctaaaggtcgagtcgtgctttaataagtcagtccaatgatggttttcattctctaaaccctactgaactttaaaatatagagtttctacaagaacttaatt

SEQ ID NO: 36368 - DNA, 428 bp, Gossypium hirsutum
  Clone ID: LIB3148-030-Q1-K1-H12
tttaccaacttagacaaattaatcagatttatctctcgatctcatcgattaatctgggactaatgaattggtgcacaataagattaccttttggtatcatttgtccggatattcccttagaggcgtcaattcctaagtttctaggtctattcaatttagtccaatttattacaatttagtcctttgtctaaaaaaatcaacttatcctcatctctatcaaccaaccccctttaaagtttagctactcattctgaaaataaaaataatggacatggaaatgaaaaacaaagaaaccatcaaatttaaacttataaaaaatataaaattttggatttttatgcaagaaaacttaaagaacatgaaattaaaggcattcaaccaagaaatctaaagcaataaacataaaatgaacaaactttagatgattt

SEQ ID NO: 36369 - DNA, 139 bp, Gossypium hirsutum
  Clone ID: LIB3148-030-Q1-K1-H3
gtggagcgaggccttaaacaagcggcttggaactaagggtcttgatctttctgatatactggtggaaatcgaaaagcgtggttcctcgtttgatcaactgctgaccgttcctgaacaagatgattggatatatagtgat

SEQ ID NO: 36370 - DNA, 433 bp, Gossypium hirsutum
  Clone ID: LIB3148-030-Q1-K1-H6
cccacgcgtccgattaattaataacttaaaaggtcttgttgtttgaaaaaaaaaaaaaaagaaaaaaaaaaaaaaaaaaaaaaaaaaaaaaaaaaaaaaaaaaaaaaaaaaaaaaaaaaaaaaaaaaaaaaaaaaaaaaaaaaaaaaaaaaaaaaaaaaaaaaaaaaaaaaaaaaaaaaaaaaaaaaaaaaaaaaaggggggggcccttttaagggatcaaattttattaccccgtgtttgcaaggtaatattttttttttggggcccccaaattaaatttaaggggccgggttttaaaaacgtggggattggaaaaaccttgggtttcccaaatttattggctttgaaaaaaatccccttttccccagttgggttattaccaaaagggcccgaccttttcccctttccaaaaatttgcccaccttaattggt

SEQ ID NO: 36371 - DNA, 325 bp, Gossypium hirsutum
  Clone ID: LIB3148-030-Q1-K1-H9
ggatgtttatttaaataagtctcgctatcttttatatggctttggctgatctatacagcctgagacacacaaattagccgtatgccttcccttttttgtgcatacaacacccatctactgtcggagatcccaagtgactgactaaggttttagttgccctcatggtaatcgactttttggcctgggaatagtcatccaccatgctctaaaagaaatcgtatcgtgagaccaagaaaatatctccattcagttctttcagctatgatattatcaagccgacattataagaaatggctctggacctaatgttccaatggatctttag

SEQ ID NO: 36372 - DNA, 201 bp, Gossypium hirsutum
  Clone ID: LIB3148-031-Q1-K1-A1
aaaaaagccctctcccctgcactcccgaataccctgttgtgtgctgtctaccgaatcccgggtgtgttttgccattattactgaaagctttgaagacctttcctttggcgtgcgtgttgaaactggaaccttatgatgcttaaaagacgcataaacatcctgtttgtagaagacgtgttgctccactatctgaaaacatat

SEQ ID NO: 36373 - DNA, 214 bp, Gossypium hirsutum
  Clone ID: LIB3148-031-Q1-K1-A8
cacgtgaggagcttcgcggcgcaaaggctgggggctaaagttttctcatccgagaatgtggtttaagtgttgggccatgggccttctattaatttgggttagggtttgggcccgttttaaaaaaacttagatcgataaattttattaaaagcttggataaaattgggctggcagaatgaataatcaaaaaaaaaaaaaagggggaaggtttaag

SEQ ID NO: 36374 - DNA, 208 bp, Gossypium hirsutum
  Clone ID: LIB3148-031-Q1-K1-B1
aaaaaagccctcccccctacaactaccgaaataccctgggggggcctgtactaaccgaagcccgggtgggtcttgccattattgctgaaacgctttaaaaaacctgtccttcggtgtgcgggttgaaactggaaccttttgatgcttaaaagacgaataaacattctgttggcagaagacgataacacgggcgatgggaaaacaaatg

SEQ ID NO: 36375 - DNA, 295 bp, Gossypium hirsutum
  unsure (1)..(295): unsure at all n locations
  Clone ID: LIB3148-031-Q1-K1-B10
cccacgcgtccgggcctgcagagctggaatgtatgatccatcgaacaaaactcctgtgcaagattcatagcaatagtttattcagacagatagaactgggaagctcttttttgtcatgtttttttatatttatttataatcttgttagggaagggaaagaaaggggtaagtaaccccattttccttctcatattttgcatcattttcttctggtgggtctttatagggtgcagatttgagttacttgtaaactacatgcatcgatttgtagtacatataaagtgaggtgttgntt

SEQ ID NO: 36376 - DNA, 406 bp, Gossypium hirsutum
  Clone ID: LIB3148-031-Q1-K1-B2
acaaagtcattgatagttactctaatattcgccagtatattttacgttggaggatggatatttttgcaaaggctctcaagtggatggcaatatcccactttagccaccattattggaagtgttgccatagttgttcacattttcattgaattcaccaaaatgcctccaccaaagatcaaagctactcaaatttgtacacaataatatctacattaaagcctaagtagtaataataataataataataataataataatgataatgatgatgatgatgatgtttccgagtcggttatcgaagtaactagagttgttggactttatgggaatgtagagtagatttcatacacatatatatataattttgcaggagagagcttagaaatcaatactcaattgtatttct

SEQ ID NO: 36377 - DNA, 290 bp, Gossypium hirsutum
  Clone ID: LIB3148-031-Q1-K1-B7
cacgcgtccggtggctggcctacaacttttagaaggccaggccaacatatgatcacaacaactagactagatgtcaatgtaataccttaaagtaaattaatttcttttcttttctttaaaacactacaatgggagatccgaatgatttattcaaaagacggtgaaaggttgctttgagttcgcaagaaattctggcgtaccaccgtggaagaacctataaaagactaggggggggcggtcttaaaggttccaagtttctgtcccggtgcttgcaacgaagtatttttttt

SEQ ID NO: 36378 - DNA, 423 bp, Gossypium hirsutum
  Clone ID: LIB3148-031-Q1-K1-C1
cttttttttttttttttttttttttttttttttttttttttttttttttttttttttttttacaaaaaaatttttaactaatcataataattataataacaatcgggagtaagccattattatatttcaaccggcaaaatagcaacacgctttcatgatataaaatcatcatcaccggcgaaattttaattaaaattaattaaaacaaaagaaattcccttctaaaaataagaaattaacaatgggcctaaaataaaaattatcaaatccaaatcctgtcctcccccgaaaggcagatcttaatcaacaaagcagcaaaaacgactgcgacctaagaaaagtgggggtgaaattagggggatatatgtgaaagtgagcatggatggggctccttatcttaaaaagatagatttggaggtgttt

SEQ ID NO: 36379 - DNA, 216 bp, Gossypium hirsutum
  Clone ID: LIB3148-031-Q1-K1-C11
cggacgcgtgggcaagcagccatggatgggccttttcatggcaaccaaacaagggttcttcatagggtgagcattcgatcgagtcaaaccgcgtaaaaaaattttgcgtcgagtcgagttaatgaatactattatttatacttaatgttgtgtttacatggactgattatttcatgtacccgaaatgactggatcatgattgaaaaaaaaggagtt

SEQ ID NO: 36380 - DNA, 223 bp, Gossypium hirsutum
  Clone ID: LIB3148-031-Q1-K1-C3
ccttcaatcttccctggaaagcggccaactctccctcagctgccttattgtgctctgtttacaaatcctgcaaaccttccatattagccggagcaccaaaatggggacccaatttggcttttcccttaatatccggtctaattagaatatcactccgaggggtttgctgatttttcctcttaaccaccatccatgggctggaattcaagaatttttctttttt

SEQ ID NO: 36381 - DNA, 207 bp, Gossypium hirsutum
  Clone ID: LIB3148-031-Q1-K1-C9
ctcaaccgtgctcacacgcgatcactacctgtgactgatcaacactatctgacccaccatgggtgacgagtagaagctactgccactgctcttacatgcgcctaatcgtgacggaaggacacggcatcgtcattgagactgcactgagctacaatcagaactgtgctgtcggacgtgctgcgggacaaaatgcgctatgagcgattg

SEQ ID NO: 36382 - DNA, 276 bp, Gossypium hirsutum
  Clone ID: LIB3148-031-Q1-K1-D11
aatacgcaggttgctaggttgatggactctatatgatggaatggacatgagaggatgttgagcttttctcttatgtttcttaattggattggaaatatgatgcagtttttattgtaaaaccaattatttttttttttttacaagattgttgcaactcgcaagcgtgtttttgtatcttccacaaaaaaaaaaaaaaaaaaaagcaatcaagaatgatgtttggcttttgtaaaaaaaacaaccttacctacatttgtatgcaacagcataactctt

SEQ ID NO: 36383 - DNA, 384 bp, Gossypium hirsutum
  Clone ID: LIB3148-031-Q1-K1-D12
gaaacacttgaaaacactgggcgctgcatgactgcacagctagaacactcgcgtctcgtgcgtgtgctaccacattttgtagccgttcctgacacgtgcttgtgttcgattatgtacctacaaatgtcatacgatatacgcaacataacagcgaaaaggcgcaacagacgggatggggagaggacttaactgtctatgagcacatttttattttcttctgcatgcttgccataaaaaagggccattccgatatttgtaaggaacaagtattcagaataaaaaaaaaaagggattttgcatgccacggcacattaaacaccgcgggtgttggggttacccccagcgtgaccccctcaattggcagggccctaacgcccggttctt

SEQ ID NO: 36384 - DNA, 280 bp, Gossypium hirsutum
  Clone ID: LIB3148-031-Q1-K1-D6
aaaaaaaaaatacaaacaacaatattatataataataaaaaaaacaaaaaagggcggaggggacaaaacgctaaaggaatacgtacggctgcttgctaaaggtatggggcgggcttaataacagttcaaaacattcaaaggggcggtgccacataatagcgctttttgtgctgcgccgaaattgactaacttaggcgttgggcaacaaagatgaatgtgggaaaacgttggtttagcataactataaaggctggtacgtcttaacattttggtctcatgg

SEQ ID NO: 36385 - DNA, 394 bp, Gossypium hirsutum
  Clone ID: LIB3148-031-Q1-K1-D9
gctgacacaggtgctcaggaaagaggtggtggaataatttgtttctttcaagaccaagccaccccacaccctgcaaatgcactctggtctcataagatgctaatctcaagttttgatcattattaattgccccgcaaggatcaattgtattgtacaaatatacatatatatatatatacacctatcgcctggcatgagctcgacactcaactgtttattttcatttttatctgccctgtttagaaaaccagtggttacaaagcaaggaaatgaaactttcctggaaacatgcagcggaatttaattatgtagtcagtgttaatctgcattcttttattcctagtatctgttataaaacaatattggaaagtatataatcagccatctatttcac

SEQ ID NO: 36386 - DNA, 377 bp, Gossypium hirsutum
  unsure (1)..(377): unsure at all n locations
  Clone ID: LIB3148-031-Q1-K1-E11
ggattactggtccatgcagttgcttaatggagactaaacatggacattaatttattacagtgctattgcataatgatagagctggctatagatgaggttgaaaattggactttatattccaatatgttaatttggtttaagaatggcttgtagtaggatctcaatatagtgctaaatatatatccacctatacatacatatacatatgtatatgtatgagagctttccgttnaaaaagagccatcaaatattgtaaaggaccactcattcagaatagaaaaaaaaaggtgattttgaatcccaaagaacaataaaaaaaatattaagttgtgtatactaaaaaaaataaaagggggggggcccttttaaaggatcca

SEQ ID NO: 36387 - DNA, 336 bp, Gossypium hirsutum
  Clone ID: LIB3148-031-Q1-K1-E8
gatcgtgatccacactttcagtggtattttgtttaagatcgatctggccaaggggtgtgaagtgaatttgatcgaggttgttggaggctcattagccttcggtgatggtctagatctaatatctccgacaaagctcgtcgtcgcctggaacccttcggggagattggtggagagctctgacggatgggagacggtttccgtggtggcaaaatttaaggggcccatccatcggttgtcaacggcggcgactgagaatgatgggaaggtttatcttaaccatttggttgggatggtgtacccgcagaaaacacatgcccttgttgaggcagctttttg

SEQ ID NO: 36388 - DNA, 340 bp, Gossypium hirsutum
  Clone ID: LIB3148-031-Q1-K1-E9
ggaaaaaccaggaagtcaagtaaactctgcccgtaagaagaaaaattctgcagtcgggctgctgcaaatagatgatgggacgaagctgttcccgcaggctagacgacgacaagcttttcctgcatcagggaataggagtgcaactttcccgtgagtgtgtctgatgataaaatcatggctctgcatgacaaatgaaaaatgaattttgcgtttcatatttaaaattttgatcaatagaaaacgatcacaatcttgtttaggaaagttttaaacgtactcctattttggagacctactaaatacacggaaaaaattagtgaattaaatatattcgtattgg

SEQ ID NO: 36389 - DNA, 294 bp, Gossypium hirsutum
  unsure (1)..(294): unsure at all n locations
  Clone ID: LIB3148-031-Q1-K1-F1
acattttgtttgtaattctatctaggctttagtcatgtatcttatacttgactcgttcaagcttttgatggtttttgaaccatgaacaataagaaatgaatcagatatgttgatgaagaattgaacatgtggtttctattggatttcttctgaaattaagaaatgaatcatttttcaaaaaaaaaaaaaaaaaaaaaaaaaaaataattaaaaaaaaaaaaaaaaaaaaaaaaaaaaaaaaaattaaaaaaaattaatactattaaaaaaaanggggcggccggtttaaaagat

SEQ ID NO: 36390 - DNA, 209 bp, Gossypium hirsutum
  Clone ID: LIB3148-031-Q1-K1-F11
ggaacgcttgccgatctagcttgtaaaaatacgcgaataagcggcaggcatttggtttctgaaagtaacctaacgacttaacctattaaaaagagcgtacattattggaaataatattcacaatggaaatggaaaaagaacggcaagaagaagatgttattagtgctaaatattatctcctatacataattgcatatgttatgtatgaa

SEQ ID NO: 36391 - DNA, 205 bp, Gossypium hirsutum
  Clone ID: LIB3148-031-Q1-K1-F2
gtataaatctagtatttgctggaagttgtaagtgaactttttgggctatcttagtcttggatattatttgtcttttattttaatttatttgggtttattgatctgacttatttatttattgtaaataaataaattaaatgggcctgggcaaaatgggttatctacatattcatcaatgaaaaaataggtcatatttttcatatgg

SEQ ID NO: 36392 - DNA, 237 bp, Gossypium hirsutum
  Clone ID: LIB3148-031-Q1-K1-F7
tctttatctccatcttttgtactcttcgctcttttgccattatagtaaaattgtctttgcccttcgttttttaaacccaacaaaactataaaaataaataagacataataaatatatgaactggtccctactaatcctgtccccaacggatggggtcgggacgaacacagtctacctctatggggaactgcaactctcctcatcgtgcttgcagtcttgctaaacaagcttttgatg

SEQ ID NO: 36393 - DNA, 402 bp, Gossypium hirsutum
  unsure (1)..(402): unsure at all n locations
  Clone ID: LIB3148-031-Q1-K1-F9
aactgatagcttaatatcttttggtatgttggttatctatatctcattaatgtgtgcctaaactttgtaaacctcgatctgatatgttttgtaaacatacatcacaatattaattttcatatagttcttttcaatgagaaattaataatgacgttgtagaaataacaaacttggatggattttaatccaaaacaaattaaaggattaattacatccaacattaacaatgatgtatcaatcagaatcagaatatgaaaactatntagaccaattaaatcggtttaaatttggattaatttcatctcagtattaatacgtttgcacaaaatatttaccaaataaaaggaaatcaatttttggtttatatgtaccaacctaatgcaacaagaagagggggaaaac

SEQ ID NO: 36394 - DNA, 419 bp, Gossypium hirsutum
  unsure (1)..(419): unsure at all n locations
  Clone ID: LIB3148-031-Q1-K1-G4
aagtattgcgcaatgacggaaaatgaacaacactatctgttaggcaccgccccaccagacaaagttgattaactcgacccaccgctccttcatcctcttgaaaagcatcctcctcctcgtccatcaaattcaaattttccattgcatcttccatctcaccctctacaacttttcaaccaaacaagaaaagacttaaatcgtagaacaaacagggactgcaactagagaactgaagaatcccagatgcaaacacaaagaaacgtgccaataccggcagacagagaaccccgtgccaatacggcaaactctctaaaccatgatttaactntttctttgtaaattatctttgctttctatattttgactaattgtattctgaattacaatctttatctagttaatttcagttatattactgt

SEQ ID NO: 36395 - DNA, 340 bp, Gossypium hirsutum
  Clone ID: LIB3148-031-Q1-K1-G6
gcttcagcagatgatgcacgatgtttcagcaatcgcaaaagccgccatcttagacgatagttttctcattgtaagaatgtttttcactttattacgtttaacattattgtaataatatttaaaattatattttatttattaattatatcatatatctgtagttgaaaaaaaacaacaaaacaaccaaacaaaaaaaaactaaaaaaaaaaaaacaaacacggactgcaactagcgaaacggaagaatcccacatgcaaacacaaagcatgcgtgccactaccggcagacaaaagaacccccggcctatacagctaactctctcaaccatgatctaacttt

SEQ ID NO: 36396 - DNA, 387 bp, Gossypium hirsutum
  Clone ID: LIB3148-031-Q1-K1-H11
cccacgcgtccggaaggttttgttcgttgcattctcattggctttggtgctctcaatccaatacgtagtaggacaaaatgagaatgaggcagcatccccagaagccgtagggatatttggggctctagctatgaccagcattatttcgaaattgcaagatgctggaatacaagggcaagatttgaacaaaataataacagaccctaactttgtgtcgagggtggatacactcgttgaaaagtttaaaagctctgttggagatgattccgagaatgtggaagggccaacttctgccttagctgatgtagatactgatgaggttgcagcttccccagaatctgaagatgaaattgctactgaagttgctagtggcttgttgaaaatggc

SEQ ID NO: 36397 - DNA, 155 bp, Gossypium hirsutum
  Clone ID: LIB3148-031-Q1-K1-H8
cgcgtgggcggacgcgtgggctcttttctaattagagtaatgtaaagttgatggaagttcttaatttggcctattaaaatttaactgttatttcagtgcacctcttttcttcctcggttaccaacaattattacaaacaaggcaagagttgaatt

SEQ ID NO: 36398 - DNA, 276 bp, Gossypium hirsutum
  Clone ID: LIB3148-032-Q1-K1-A1
acgggctttcattttacttgcacgaaatttggttctaaccaaatcccaggttgttggaagaaattaactaaatttgtgctcgttggagacaaattaaattttagttttttaaatagaagaaaaaaaatatggttaatttataaaaaaatgggtaataatggaaagggtttaaaatggggagtatattgaaaacataaattgggggggggttttagaggattaattttttcttaaccgctcttgcaatgaaattttttttgtttggggttccttaaa

SEQ ID NO: 36399 - DNA, 167 bp, Gossypium hirsutum
  Clone ID: LIB3148-032-Q1-K1-A10
gccacgcgtgctatttatttagggggcttaaacacaggactatacttgaccaacaggcaccattctcgtaaacatgcctaaatggcttgctaaaccctgcatacaaatatacagttcctgtatgaacatcctagcgttgatctgctcctatcgaacagaatcactca

SEQ ID NO: 36400 - DNA, 221 bp, Gossypium hirsutum
  Clone ID: LIB3148-032-Q1-K1-A11
acgaagtcgcatgggcggacgcactgggcgcgacttcctcgggtttttaatgataatagagagcgtgtgaaacaggctgctttgaacctctattacaccagagatgctgctatgtactttcaaacttttgctaaaaggcgggctgataatgctctgtttctacaaattatgccagagctcaagaggccacgcgtttcatgatctatgatcatgctaaaatg

SEQ ID NO: 36401 - DNA, 315 bp, Gossypium hirsutum
  Clone ID: LIB3148-032-Q1-K1-A8
ggaactgacgcgatctctcacggggacactatgcttgtggagtccaactacaggggaatcaggcatcatactggacgatcatggggcatgttctacattttgcctgcagacgagttgtccaagccaatgcacaccttgcacactgatgataaaacacaggacagttttatggtggctacatatcctgtgcgctgccgtgagctaagatcaggagaatgacctgtataccatggtgtacatcattatcgacttaaacactaaggtgaagatcgctatgaagcaattgagatctgaatgttctgacataaactatac

SEQ ID NO: 36402 - DNA, 400 bp, Gossypium hirsutum
  unsure (1)..(400): unsure at all n locations
  Clone ID: LIB3148-032-Q1-K1-B10
cataaataaacctaaactattttatctgtgttttatcctatgtaatgatattatatgaatgaaaattacatgtttaccttacaaaaaaaaaaaaaaaagaactaaaaaaaaaggaaaatggaaaaagaataataaaaaaaaaaaatgaagcggaaagaaagagggaaaaaaaaaaaaaaaaagggggggggctttagaaagaataaaattttacgtgcccttttttgaaagcaaatncttcttcttttggggacccaaaataataatactgggccgcggattaaaaaagaggtgcttggaaaaacctggggtttcccaaaataaatggtttggcaaaaaaatccctttttgccagtgggggtaaaagaaaaagggccggaaccaattccctttccaaaaa

SEQ ID NO: 36403 - DNA, 223 bp, Gossypium hirsutum
  Clone ID: LIB3148-032-Q1-K1-B11
tgcttttaaaaaaaaattaaaacatttgttttataaacaatataaaaataaacactaggggagaagtttaacgtatttctcctgcttcttcatgattcatgtcctgacagaagaattcaatgttcgtcatttagactcaaatgagcgtccttcgtaattaaactttctgacctgtaaaaccacaaaactcgcccatgctagtgtccattgtatgctatatcta

SEQ ID NO: 36404 - DNA, 402 bp, Gossypium hirsutum
  Clone ID: LIB3148-032-Q1-K1-B3
cccacgcgtccgcccacgcgtccggtttgctgcagctaataccaaacctagtttattacgaaaactggacagtgattgatggggatcacatcgagcttgcagatgagacaaagattttcctgagagagaaggggcatgagctgcgggccaagtcaagtggggctatcgtccagtttgttgttcaagccctccagaaagacatagaaaggggccgaaaatttggaaaagattcatatatatttcatggaacattaactgctgttagtgaccctagaaaagatggaaagccagcagccgtctgaataagttgagaagcattcaagcaataagccgttaaagaaaattaaaatgcaaagctttgtattcccttttcttttgtttaaagtgcaatgtatagaaatg

SEQ ID NO: 36405 - DNA, 238 bp, Gossypium hirsutum
  Clone ID: LIB3148-032-Q1-K1-B4
cccacgcgtccgcccacgcgtccggccacgtgtacgtaataacaagcctaatgtagatcaaaaggtggacagatccatgatcgcggtcacataagacaggctgctatcacacttgtccttttgtcagagaaggggcctgaactgcgaccataatcacgaagtgctatcttgcactaaccggggaaaatgctacaaactgtcattgtgctgagacgcacatgaggtgatgcaactgata

SEQ ID NO: 36406 - DNA, 249 bp, Gossypium hirsutum
  Clone ID: LIB3148-032-Q1-K1-B5
ggctctgggcagcttctggaatcgtcgatatttacagtgagtacggttccgttgccgggttgtaaattttgtgttatccatttagtttagtgaaaaaattgtacattataaatgtacacggatcaaaacagtatcccttttttaggcttaaattttatatattcgaaaagaattagataaattttaggttaaaaatatggcttttgggttcttaagaattcaataaaatccaccattttattttttctt

SEQ ID NO: 36407 - DNA, 407 bp, Gossypium hirsutum
  Clone ID: LIB3148-032-Q1-K1-C10
cccttttcaatgtttataacccaaatgtggttttaattggttatgggaaacttttcatgttgtttttcttttaagttttgtttggaaaaatctatatcaaacatggccttgttgagttgaaactatctcatactctgtgtcagtcggattatcaagaaaaagaatacagttccacattttgcctgtaagagagagcagagcttgtgctcatttttggaccacccgcggtcacctttggagctcatagttatataaagcggcattaggtaattgctttggatcggaggattgggttccaatcgagttctttatcacggctaaacacggggaaatcaccatatgcctttcatgccgtaagtcacacattggcattatgtatgttgatgtgtgtgccagcatttgtttta

SEQ ID NO: 36408 - DNA, 291 bp, Gossypium hirsutum
  unsure (1)..(291): unsure at all n locations
  Clone ID: LIB3148-032-Q1-K1-C2
cccacgcgtncgtaacaatccaactaatttcttctaaaggaccatattgttttattttcgaattatattctctctttttctttttctttttttgttaatcatccttaagattataattttttttcatttgattataaaaatggttatgatttaatttactttattattatttcatactaatattagaagaaagaaataaactcacttccaattgcttatattttatggttcaatctatccccttttagcttggtttcactgcacatgaccgcgtgcacacgccatgggcag

SEQ ID NO: 36409 - DNA, 269 bp, Gossypium hirsutum
  Clone ID: LIB3148-032-Q1-K1-C6
ggtacccacgcacgtttgaaggggacacattgcccttggaggtggcccatccaactcagggtcccaattacccaaaattaactgcagagtagacacaaccatgtggaaatattccccccttgggtggttaagggaaataaccgtttgaccaaggaccaggttggtttaaaaattgccaaattccttaaaaattaccaccccggccttgtggttaggccgtttgacaccaaaaatggccaaaaaccctattttctaactgcacatgaacc

SEQ ID NO: 36410 - DNA, 331 bp, Gossypium hirsutum
  Clone ID: LIB3148-032-Q1-K1-C9
cccacgcgtccgcacgttttgtctcacacgttgttatttgaagatcttatataatacaaaatgtggataatgattcgtattacatatagtggctttgacaattcaatgcttgaagcgaaagatctaatgtaacattccaacccaccttgatcgacggcgaggtcctccattgtacttcacaaagagcatgtgataaccaggtggtgcaatgttgctgttcatgcgagttagaagaacaatgttgtttggatttagcgccacatatttgttaaatttcacaatctcaaattgaatcaatctctgaatcaatgcaacccacgtggtcacaaat

SEQ ID NO: 36411 - DNA, 143 bp, Gossypium hirsutum
  Clone ID: LIB3148-032-Q1-K1-D10
cccacgcgtccgcttttgagtttgggctgttcgggctaggggtttatgaatttgggttgaaattgtatttgggctaggggtcaatgcaacatgcttgcaatcaaatcataataacggacgagaatggaattaaacttgagttc

SEQ ID NO: 36412 - DNA, 308 bp, Gossypium hirsutum
  Clone ID: LIB3148-032-Q1-K1-D2
cccacgcgtccgccggacctcggatccaatgggtcttttaaacataattcccataccagtcattattaagggctaccgcacctgctgttgtttgaaatataggatatggtgataatctttatattattgtaaaatagaggtcaataaacttcccagagtgtaagatgcgtattatggcaggctgtcctggtactacataactatgagctgccttttttcaagttgagaagcttttctgagatgccacccgctgtaatacgttcagttcaaacaactatgctttggaaatacaagctgaactagcttca

SEQ ID NO: 36413 - DNA, 255 bp, Gossypium hirsutum
  Clone ID: LIB3148-032-Q1-K1-D5
gaataattgatcatgtatgcactgattccttgctgaccagagaaaccagatcgcacgcacaatctatctacaggtgccaaagctgagagcaaaatgacggtgacagacttcatgctccaggctttcaacaccccttatgcattgtggacatgctaaccgtgtattggatagattatgcttattaggggttagattatggaatatttgccagactgtaattataacatttactggcaatctgaaacgtcatcttta

SEQ ID NO: 36414 - DNA, 365 bp, Gossypium hirsutum
  unsure (1)..(365): unsure at all n locations
  Clone ID: LIB3148-032-Q1-K1-D6
atttggtgatagttgttgttgttgttatagttgggggggggggttgaatagacatgagcacattgtggaagattgagaggcaggcaatgctttgtttgggagggaagaatttgaatggaaagtgaatgaaaagaaaaaaagaaaaacatgagaaaagttgaaaaagattggggggggggggtttgtgaatttattgctggcagagagaaaaagatgaatattaggtagaacaagaaatatatatatggtttattatacaaaaaacatttgtacatatatctactattaggtattaattaattaaaatggttgacttgattatttttttnaaaaaaaaaactntaaaaaattaaaacaaaaagggc

SEQ ID NO: 36415 - DNA, 364 bp, Gossypium hirsutum
  unsure (1)..(364): unsure at all n locations
  Clone ID: LIB3148-032-Q1-K1-D9
cccacgcgttcagggacgcgtgggtttggtttagaagactgtttagaagggattatgtgctttgaaaccctaaatcctacccataagaacacggctcttcgatgactaggacgacgactagttgttgggatcggattatgccactactggtgttgctcacatctctgtgattttcgacataatctgtcattttgtcgacccaaagccaggtgctacattgtctataacacccattgattgcacaccacaagatagtgccattgaacttgctcttaagattgccaaaatcaatccttaaagaacatngttctttgacgatagtgttcgtaacatccaagcctgaaaacatgtccgtcttcacact

SEQ ID NO: 36416 - DNA, 174 bp, Gossypium hirsutum
  Clone ID: LIB3148-032-Q1-K1-E10
tatttttagttgattgagtcagtaaatattatttattaatatttacgagactattatagtattatgctggattatggtctaataattttagtcatgtggaaagctagtcaatgtacaaatgtatcagttcaaaagttagtggttctggaaattgaggtatcagaacctcgtttt

SEQ ID NO: 36417 - DNA, 158 bp, Gossypium hirsutum
  unsure (1)..(158): unsure at all n locations
  Clone ID: LIB3148-032-Q1-K1-E3
ggccaaagttgtcatttgcgcttggctccaaatgattggtttggagaaggtggtgttagttgttgtaatatgtttttttgtttcttttgaactttgcttttttgcattgtaatttgaagaagatactaatattttttagtgaagtagtttttggncgt

SEQ ID NO: 36418 - DNA, 148 bp, Gossypium hirsutum
  Clone ID: LIB3148-032-Q1-K1-E4
tgttgaagtacttgagcaaaatgtatcggtcactatgaaaaatattgaataacctttacatatccttggcaaggatgtgcaaatcaaatgaaatgtttatttacattaattgagtgaaaaataagataaagcgatggtcagtccgttt

SEQ ID NO: 36419 - DNA, 353 bp, Gossypium hirsutum
  Clone ID: LIB3148-032-Q1-K1-E7
atgattataaacaagggaatacttcagacaattggggtagatgtcggcaaaggtcttgacattcctctgtaaagattcaacccaaggaaacaagcacgatagctctatctaaatggcgctttattgtgaaccaagtaaacatatttttgttgtattaaaaatcacaacacgttatgtattccatatcttaattctgtaacacttttgactatcatatgaagtacttcacgtttgccgtgttcaagcttcaaattctcagttttgaaagtacaatctaatttttgaaatcataagcttttgacatgtttgtaaaaaaaaaataaataaaattttaactaaaataaattcggctc

SEQ ID NO: 36420 - DNA, 207 bp, Gossypium hirsutum
  Clone ID: LIB3148-032-Q1-K1-E8
tcgattctcttttacgaaatttcctttttcattttggaggcttctactacaacatagggatggttgttcaggaggcttacgaacatatacacaaaggttttgataataaggcgggcatgacagaataacagctggttgtgttcagtttgcatggcgagttggtggatggctgttcttagaactctgatatgttcaagattgaaaatt

SEQ ID NO: 36421 - DNA, 372 bp, Gossypium hirsutum
  unsure (1)..(372): unsure at all n locations
  Clone ID: LIB3148-032-Q1-K1-F1
aaagccaccccctggccctagaatgcctgatggaacgaggggattcacaatgggacgcggacagccactagtttctaggcaaagctagtgagctgtgcttttgcgtctggtataatcttgcctaacgtgttggttattgtgattgtggaattgtacagatgtggaaagctggaagcgggttttctattatatggtttcaaaggctaagttttgaagcccaaatatggattatttacttagtgatgctgttagcttatatttaagaactggcatcgtgataaaaataccacctacatggttcttgtttttggattatgttcatatcaattaaatttttagcgaaaataatttggctctttaacaaannanaaa

SEQ ID NO: 36422 - DNA, 358 bp, Gossypium hirsutum
  Clone ID: LIB3148-032-Q1-K1-F10
gccacgcgtccgttgattctaagaataaatttaccttgcgtgatcaatagtaatggagagagccaccctcgcgaatgatgcactcataaccatgttctatgcctctacttaaggcatgctataggtcgtcttcaggccgtgcttcaaagtgatcagtgagttgcctttggtgaatcataaccgtggttatattggagagcttgacaatgtcgatgatcacagatctgtaaaaattgtggttgaattgaactgaaggatgaacaactgtggggtgattatgcctcgatgcgatgtctgagtttaacagagtgaatggtggactgctaagctactttctttcagacagttcgggatacat

SEQ ID NO: 36423 - DNA, 392 bp, Gossypium hirsutum
  Clone ID: LIB3148-032-Q1-K1-F2
cttcttcttcatcatcaatatcatcatgttgagctactttgcttttccattggccccttgaaagcgtcataagacagaaagcgatatcttcttcagttgtagtgtcagagagggaactcgccggttcaagttcatcccaagtccgtctggatcgtttctgagttgggtacttggacgactcggtctcactttctttgctttgaacaacaactgagtctgcatcaaacaaatttatgatctacataccgaatgcttctctttgggtgctctctaagaccataaaactgccctttttcttccgaggaagacgatgaatatgaatgtgaagcagattcttgttcaacgttgggaggaattggaagattcaacatgttagacctcaattgagtttc

SEQ ID NO: 36424 - DNA, 228 bp, Gossypium hirsutum
  Clone ID: LIB3148-032-Q1-K1-F3
caaaaaaaaaaaaaaaaataaaaaaaaaatttaatttttttacaactcacaaaaaccaaagggaagtcctcattcgtacaaaagccttctcctcttttaatgttacgtaaattaaattacctgtccgttcttttacaaccacaatactgctaaaaccatgacgttacccatactaaatcgatttggcctcaatccctttactttggactgcgatttactaaaaatgaa

SEQ ID NO: 36425 - DNA, 396 bp, Gossypium hirsutum
  Clone ID: LIB3148-032-Q1-K1-F6
gcaagtggagccattgccggacacctactcgcaacatcaattgcaattctcggaggagcatttcttgccaactatatttctgagaaactggttggttatttgggcggagcgctttttcttgtgtttgcagttgccacattttttggagttttctgattgattatacagaacatagagcaaatgtcgggctaatttccggcgcaaatgttgtgatacaatgctgagaaaacaattagggtaaaatgttgcagttaggggtattaagaggctgccatgttagttcttagaatggtttattgtatttggaattatatgtggacttagatgatttctttgtagcttttagctaaatattgaagatatgattgacatgtttttgctacaattttcttcctt

SEQ ID NO: 36426 - DNA, 195 bp, Gossypium hirsutum
  Clone ID: LIB3148-032-Q1-K1-F7
cccacgcgtccgtgtttttcctgtcttttgttatccttgggagcagctgataagaagcttttgttcaagtgagccaataatggccgaagtggaagaaacactatttattgttggggaaaggaacttggttggtctatgatttgtgttcctcatgctcactttttctgttgctaaaaaaactcatttttcttgttg

SEQ ID NO: 36427 - DNA, 141 bp, Gossypium hirsutum
  Clone ID: LIB3148-032-Q1-K1-F9
acggccacgcgtccgggtagtttaggatgaaatttatctataatttgggaggatgtggatgtaacttttgactctattttaacctaaatttggttatcattatttggtcttatatttaggttttgaatcaatgaagtgttt

SEQ ID NO: 36428 - DNA, 365 bp, Gossypium hirsutum
  unsure (1)..(365): unsure at all n locations
  Clone ID: LIB3148-032-Q1-K1-G11
aataaacacagctcgaagtcggtcatatattataagtggccgcggttcttgttggaggggtgcttgagtgaactgtgctcgaactgggagatcaaaggttgcctcctatgatgaaatttttgagaggtaagangncggacttccgcgtggatggcgggggttgtggccacccattaagagaagcgtcaatagagagaaaaaagaaaatattgttttagatgaaaagagaaaaagcatcaattaagatataatatatgtagttatattttgatgattttagctttaaaaaaatatgataccattgcttattttttttaaaaaaaatatacacattctattaataaaatattaatcattattttatt

SEQ ID NO: 36429 - DNA, 263 bp, Gossypium hirsutum
  Clone ID: LIB3148-032-Q1-K1-G5
accacgcgttcgtataagcccaattttacctggccaacgactaaataaataagagcaaatgcctaatcccaaagccgggaacaacaacctacaggcccaaactataacaccggcctagcccggaaatgtaacactttctgaggaaccctagggttacacctctgcaccgcttcgctcacccacgtgacgtttggctactcttaaacaacctgtggcccattcccatgactaccaaagacctgtgaataggacaaaaggaaaca

SEQ ID NO: 36430 - DNA, 368 bp, Gossypium hirsutum
  Clone ID: LIB3148-032-Q1-K1-G9
gattttgcttggcaaacagtgctgattcgtatttgggcaacccgaccaacacgtctggggtgttcccaaacatgtagaaattcgcagatacatgcgaaatacctgtcgatcgcattacaaagaaggaagatctgtgagaagcgatttgcaaaatgttcgaaacatccgtacctaacttcttagacgtgatcatcccgcatcaagaacatgtcttgcctataatccccacaggagggactttcaaagatgtgattactgagggtgatggaagaacaaaatattaattttaataaacatcaaacattttttagtaataatggatttacccgccctagttaataagcattgcttattttttgaacaaatta

SEQ ID NO: 36431 - DNA, 414 bp, Gossypium hirsutum
  unsure (1)..(414): unsure at all n locations
  Clone ID: LIB3148-032-Q1-K1-H10
cccacgcgtccgacgatactgagagtgttcctccaatagcaattttggctggtcttcactatgcagccataactgacattgcatggtcatatgatgcacgatatttagcattgtcatctcaagatggttactgtacattggtagaatttgagaaggaagaacagggagtacccattcctctagcagaacctaaaataatgaacgttgagggtacgagctctattgtccagaaacctgatgacgtggtgattgaagttaatgatccagtcacggtagataacaggacggtagaatgtgcagaaaagagagaagggaaacaggcatcgccaagtttggcaaatactcccatcgtaaataagccagccaagaggcgtatcactccgatggcaattgatccatgatatngtcatgtta

SEQ ID NO: 36432 - DNA, 201 bp, Gossypium hirsutum
  Clone ID: LIB3148-032-Q1-K1-H11
gccacgcgttcgaatactctgggagtgttttttcaatcacagtcttgtctagccgggacggggctgggataactgagatagaatgatcatatcatgcacgctggtgggcattgggatctcaagacgtgtactgaacactgttaaaattgtggaatgaggaacaggcaagacccagccttgaatcaagaatgacgaaacttc

SEQ ID NO: 36433 - DNA, 216 bp, Gossypium hirsutum
  Clone ID: LIB3148-032-Q1-K1-H2
attacttggtaccataagaccccataactttgtaatgaaagtagatgaaatttcattatgtaatgtaggatccccattataataacccatttgtagccacttttaactgtgtgttaaaaaaaaaaaaaaaaaaaaaaaaaaaaaaaaaaaaaaaaaaaaaaagagggaaggctacttacaaaaattaaaatctgtattactagggggtgccacttt

SEQ ID NO: 36434 - DNA, 401 bp, Gossypium hirsutum
  Clone ID: LIB3148-032-Q1-K1-H3
gtgtttttttttcccttttctcagagaaaaaaattattacaacaatgggtatttgttcatcttctcaatacacgacaaaggccgacaatcgccttacctggccgccgcccaccaccaccaaaataatatacccagatggaaaccttcaacaactaattcaacccatcaaagccagcgttgttctgtcccagaacccgagttgtttcctttgcaactcggagctcatgtatgtgaactcgtgcctgtctcaagtacccggtgacgaacaacttcagctggaccaaatctattttctaatgccactgtctatgtctcaagcaccactttcacttgaagaattatgttcgctcgccattaaagctggtgctgcattatctcgtttgaatgacgcttattctcac

SEQ ID NO: 36435 - DNA, 409 bp, Gossypium hirsutum
  Clone ID: LIB3148-032-Q1-K1-H5
aagttttcaaaaagatcctataaattatatcaatttctctattgtttttcaaagttgcagcagatgattttcaaaatcagccattgctgatccaagctaggatgtgctttaacatatatgtatgttatatgtggtgtggttgaattgtcggatccattggtgcattcatcaagcaagtcaagaggcaaggagaaattgattagaagcgtcaatgtgagtgttctggtgtttggcttctagtaagtgtgatttcagatgttaatcaaaggcttaagaagtcttaaatgagattaaaggctttggtgtaagttttttttaccttttcttgtgttgagtaaagtatgcctatgtgatgctttgttgatgatgtgtaagtgtgtaaacttgtaagtaaatgtgatttaatata

SEQ ID NO: 36436 - DNA, 388 bp, Gossypium hirsutum
  Clone ID: LIB3148-032-Q1-K1-H6
acgatgcgaaaaagatgctataagagatataaaggacggtatcgtggtgacaagaagcgggggatgtttgtgaaaagctgtccaagatggtccgagctaggacgtgctgacacatataacattgacctatgtggagcggttgaatcggatctgactgacacgcattcatggggtaactcacatatcgtggataaacaaggacattgcaaccacactcattgcttgaatccggtgtgattcccaaaattacctattatgacaaggattatcacaggcggtttcgaatgtaagttaactgtatggcgtgcaatttttcaataccgtatgaagaaacaaaagatatgaaacacatatgaatcttctgataggcgccttagcactgaccacc

SEQ ID NO: 36437 - DNA, 325 bp, Gossypium hirsutum
  Clone ID: LIB3148-033-Q1-K1-A2
aaaaaaaaaaaaaaaaaaaaataaaaaaaaaattttatattaaaaaaaaaaaaaaaaaaaaaaaaaggagggggtataaaataaaaaaagaggatgaaaaaaaaaaaataaataaaaataaataataaatataaatggggcggccgttttaaaggttccaacttttttttccctttcttcgcaagaaatatttttttttttgggccccctaaattcatttctttggccgtctttttacaccttttggattggaaaaaccctggggttccccaatttattccctttgaaaaaattccccttttccccacttggggtaataacaaaa

SEQ ID NO: 36438 - DNA, 160 bp, Gossypium hirsutum
  Clone ID: LIB3148-033-Q1-K1-A5
ctgatacgaacaactacacgctgatctttgacctctggctccaaggcaagtattctctcaagggtggtcgtcaacttgcaggagccgacaatacatgctcgtctctgcaagctaaacaacgtccaataatgagtgaaaatctacatatgttggacgaaat

SEQ ID NO: 36439 - DNA, 455 bp, Gossypium hirsutum
  Clone ID: LIB3148-033-Q1-K1-A6
cccacgcgtccgttctatcgatattttttcttgtatcatcaggagttttaaaacataaaagtggagtgaagtatatgccttcttttcaaaaaaaaaaaaaaaaaaaaaaaaaaaaaaaaaaaaaaaaaaaaaaaaaaaaaaaaaaaaaaaaaaaaaaaaaaaaaaaaaaaaaaaaaaaaaaaaaaaaaaaaaaaaaaaaaaaaaaataaaaaagaaaacagaagatagaaaaaaaaataaaaaaaaaaaaaaaaaggggggggccggttaaaaaagtcaaaagtacacctcccggggttgacaaagtttaaatttattatagtggtcccaaagttaaaaccatcgggaccggtttccaatatcataaggatataaaacccctgttccccccaaaaaaaaagatgttaaacaaaaatggttttcccacggggggtaagatcaaaaaaccccccccc

SEQ ID NO: 36440 - DNA, 375 bp, Gossypium hirsutum
  Clone ID: LIB3148-033-Q1-K1-B11
cccacgcgtccgggaaggttgtttggcaaggaatgaccgaagaatttacaacgtctacaaatccaattgttagacagtttgcatctgggaatctggatggtccaatcagatattagaggcacatatatacgaaggtttcaaaagatcaaatttggtcattgaatttctttttagctaggattctcaggaaaattaagtgaaaaatgtcaattttgaatgtttggcattgtatttgcaggtcaatgttgttttagatcagtgtagctcttttcttttggggagttggttacctttgctattatctttgcaagtgttctttcctgtaaaagacacaattttctacaacagaaattaaaaaatcctgcactctgagaa

SEQ ID NO: 36441 - DNA, 371 bp, Gossypium hirsutum
  Clone ID: LIB3148-033-Q1-K1-B12
cccacgcgtccggccccttaacatttgccatgtaagagacaataaacagcttggtttttgaaggcgttgagtaaatatggaataacaatgtgatttggaaccaacaaaaaaaaaaaaaaaaaaaaaaaaaaaaaaaaaaaaaaaaaaaaaaaaaaaaaaaaaaaaaaaaaaaaaaaaaaaaaaaaaaaaaaaaaaaaaaaaaaaaaaaaaaaaaaaaaaaaaaaaaaaaaaaaaggggggggccgtttaaaaaaatcaaagttaacctccccgggcttgcaaagaaaaaatttttttttagggcaaccaaaataaaattaatgggccggggtttaaaaaacctggaattggaaaaaccctggggtaaccaa

SEQ ID NO: 36442 - DNA, 173 bp, Gossypium hirsutum
  Clone ID: LIB3148-033-Q1-K1-B2
catttgcttgggcggccgaatgccctcactttacctttttatcaaccctaagacaaaaaactcattatcatttttccactcccctactccgatgttaacttattctcttcgtcactcgctgcaactcctctggttgtgtcacctcctccttctctatcattacccctaattct

SEQ ID NO: 36443 - DNA, 482 bp, Gossypium hirsutum
  unsure (1)..(482): unsure at all n locations
  Clone ID: LIB3148-033-Q1-K1-B4
tgaattncccgggntcgacgccacgccccgtccgcccacgcccgtccgnngtttccccaaaccaagtgggtttgattgtaaaagggggattcagctttactgggnnttgaagaacgagtgcgtggtgtttcttcttttnggaaaatgcgcggtaattgggaaaattgtgatngnnaaaattnngggtaacctggtctagaagtnnaatggtangnntttagaaagaaagaannngcgtggnngttagcnnagtaatanatgggtggatgaacnnctcacatgnnaatgacgannttatgtgcttagggggcttaganngattagtgngnngcaaaaaactttagtaatannattttgaagaggtggnngtgtaaaacaaaagttcattcaagggcattgccaaatatttgtgacntttttatttcttatgtaccgannaattgannattactgtnaatgataagaatattacttttaaatgc

SEQ ID NO: 36444 - DNA, 382 bp, Gossypium hirsutum
  Clone ID: LIB3148-033-Q1-K1-B8
atttaattgagtttgagagaattttatcatttttattttaattttaatgttttattttaagttaggttttaccgttttcatggaatgtttaattatgaaatcatggtgcttggtggtgttatgagaaaaagtaaaaaaaattaatccttgggttggcaaataatattgtgggtttactttccgttaaatgacaatattatgtattagctttaaaaataaggggggcccgtttaaaagaatcaattttaacgtccccttcattccaaattaattctttttttttaggtcccctaaatttaaataaatggcccaatttttaaaaccttgtgactggaaaaacccttgggttacccaacctaattggctttgaaaaaattcccct

SEQ ID NO: 36445 - DNA, 371 bp, Gossypium hirsutum
  unsure (1)..(371): unsure at all n locations
  Clone ID: LIB3148-033-Q1-K1-C3
tggagagtcaagttcattcatataaacttgattgccccaaatttgatggcacaaactatcgaggttggtggtaaaagatcaagtagtactttgaggctgagagagtagctgatagtgttaaggttcacattgtaatgcttcatttggaggggaaggctctaaattgacaccacttctacacttagaggcaaaggggttttcatttgctaacacgggatagctactctcatagcttgaaagaatgatttggatctaacttattcaaggatcgtatggtagatttggtctctttgaagtaggtgaactctgttgatcaataccatgatgagtttgtaagtttgttgnanaaaaaaatananatannnattntt

SEQ ID NO: 36446 - DNA, 173 bp, Gossypium hirsutum
  Clone ID: LIB3148-033-Q1-K1-C5
ctgatgctagactcagcactccgaaggtctcgtagttatgcattttaaataatttgtctaagtactattttaaaaactgtgatatgaactgttgtattaaatacatataagcgttatttagatttaggtttttgtaataccaagattttatatctgagaatttttacagaact

SEQ ID NO: 36447 - DNA, 298 bp, Gossypium hirsutum
  unsure (1)..(298): unsure at all n locations
  Clone ID: LIB3148-033-Q1-K1-C6
ctcagcttaantcaacacttccaaggtttatttattatccattgtcaacaattttattgggtaggattttataaacagggagttcagactctaatataaaatacatataagctttatttacatttatttttttttaataccaaaactttatatctgatattttttacatatttttatttatattcccttaaatttttatctaatgttttacattattccattctttctttcactctcaaactaaaacataactatagtatggtttcaaaaaaattcaattcactattcatcttttaac

SEQ ID NO: 36448 - DNA, 289 bp, Gossypium hirsutum
  Clone ID: LIB3148-033-Q1-K1-C7
gctcacataacatggtggatattgcacgatggctattctcgaataattacaaaactactgggtggggatgtcgtaacactttggacatttagagtgggatccgaaggcaacctgaaaaagtaattacaccaaatggcctttggaaaattaaaataaagaacaaccgtttaagacacgttttagaaaaattctgtttgtgaaaaaatatcctggcattttggtgaaaaaaaaatggcagatattttaaatgttatcccataaccacctgttatatagaaaggatctctct

SEQ ID NO: 36449 - DNA, 332 bp, Gossypium hirsutum
  Clone ID: LIB3148-033-Q1-K1-D11
cccacgcgtccggttcttctgggtgctggttttatgtccctcatggccaaatgggcttgatcattttcaaaaccatacggcgagtgaatttgatgtaataatattgggagacaaaaagaaaaacaagtgcaaaataattatctatgttgaccatatgttttgctgaaaacatgtttttgtatgttgatctttacattgctacagtcaccaatccaataaaaatcatcagtttttcagtattcaaaaaaaaaaaaaaaaaaaaaaaaaaaaaaaaaaaaaaaaaaaaaataaaaaaatataaaattttaaaatttttaatttttaaaaaataa

SEQ ID NO: 36450 - DNA, 314 bp, Gossypium hirsutum
  Clone ID: LIB3148-033-Q1-K1-D3
ggaccagccgcgcgggcggtcaatgttaaaccattacttagctcttggacttttgtttcaagaagatatccaatcatcaaaaagctggggtcaaaccgagcagtgcgtccccacttacattttcgagcctcactgctaaaccataatcatttgctatcaccctaatgttcacatgacaaacagcataccctatatgatattctaaacaacatttcaataactgcttattgataaacgcaaaatatactattgagcactatagatttggggacaaactctctattatacacattttacatatattactaatcaca

SEQ ID NO: 36451 - DNA, 364 bp, Gossypium hirsutum
  Clone ID: LIB3148-033-Q1-K1-D5
cccacgcgtccggttccgtactacttcatccttcttcattgtcttcgtctagtgattcaccttatttgcggccgtggtatttgaatgctaacaaagtgatggcacaacatgaagatgatggtattacgaggcaaccggggtttaagtattcaccggtcgagggcggcgatatgctttacaaacgtgggatcattacttaagtaacgcttgagaaaaatattctgtaccacttttttatggtagcaatatggaaagatgtgcacataatttggaagactttcatgttattgattaaaagttaaattatgtatactttaagggatccaaaggaaaacctatatatatatatatatcaggtttcagc

SEQ ID NO: 36452 - DNA, 186 bp, Gossypium hirsutum
  Clone ID: LIB3148-033-Q1-K1-D9
tatgaattcgtctttaggtaaatttgtttgtgattacaaaataaatgtcttcaaaatgttggtattttctcttcttcttttttttttttgttttttttttgggggggggactcaattgaaattgggaatccatattcttgttttgattcaaattgtacatcaataaaatctttgtggagtttaatc

SEQ ID NO: 36453 - DNA, 238 bp, Gossypium hirsutum
  Clone ID: LIB3148-033-Q1-K1-E1
ataattttaccatatcctagtagtcggaaaactacagcggaaaaaagtagctgcaagtgcaacacttccctggcattctcgaattgctgtctgcatgaaattttgtagggcattgcttaattttgatctgaggttatacacaggtaaggttcgttgccgatttgccttatgtactcggatttggatgtgaatgttagatacggatacatgtccagcacgggtatgtttcattttgtcc

SEQ ID NO: 36454 - DNA, 393 bp, Gossypium hirsutum
  unsure (1)..(393): unsure at all n locations
  Clone ID: LIB3148-033-Q1-K1-E10
cccacgcgtccgcacattcggagcagagattgcttttgaagtgctaatggaggatcataatgtttcagtgtaagctagtgtgtagaaagtaacaacatgccatacaatgcaattcaatgttttatgtcagttatttttgttgaaagcaactatttttgggtacaagtatggaaggggcccctcttcaataccaagaagttcattttagtcctctacattttggaaagcaacattttaatccctgtacctttggtttatagcaaaaaggtaaagaaaatgctagttgtgcttttaaaataaaaaaatattttttattaaattatatcttaataaatttttaattttttaataaatttttctatttttatttannattatttanttttttttttt

SEQ ID NO: 36455 - DNA, 167 bp, Gossypium hirsutum
  Clone ID: LIB3148-033-Q1-K1-E12
caagtatggatgttattacaattaatggtttgagttcattcgatagatatcatgtctatgtgtatgcactttcaacttctccaagttctaggcttcatttttatgtaggtcggtgctttattcccgagtattttggggtgtttttgaattcatttcttaatctcttc

SEQ ID NO: 36456 - DNA, 391 bp, Gossypium hirsutum
  unsure (1)..(391): unsure at all n locations
  Clone ID: LIB3148-033-Q1-K1-E2
cgttttgctaccaattccgctaccatgnttattactatttntgttgttattgtttggatattgtatanaatgttattttattgttaaattttgttactaattttagaggcaaanaaaaaaaaaaaaaaaaaaaaaaaaaaaaaaaaaaaaaaaaaaaaaaaaaaaaaaaaaaagaaaaaaaaaaaaaaaaaaaaaaaaaaaaagtgggatacgggcgacgttttaataattgcaaatgtttcatttaaagggaatgccactgaaaaatttttaaaaaagggaaaataaaaaaaacccttttctcacccatttaaaacggcaaaacaggaaaaaacccctttcttaaactaactaaattggccttaaaggaaaacccccttttgcccttttt

SEQ ID NO: 36457 - DNA, 378 bp, Gossypium hirsutum
  unsure (1)..(378): unsure at all n locations
  Clone ID: LIB3148-033-Q1-K1-E3
cccatatcaatctcgaagaggagcgctcgttcacaagccttagcttctgcaacaaaagcatctgcagacgcctacataagggtattcctgctgagatcaatcgagagatttagagactgccaaagctgccgtaatgcaccacaaaaccacaataagtggtcaggatcctccggagcctccttgcgcagagggcaaacattgacaactcttagacttcgcttgattaagttattaaaatgaggcacataatctttaattaaccgccacatgtgtattttaattttagaaggaagtatatcccaaagtaacttgtagaactttttgtaattgtttgtagtattcgagttgtattcagacagctgaaattttcttgtnnaa

SEQ ID NO: 36458 - DNA, 389 bp, Gossypium hirsutum
  Clone ID: LIB3148-033-Q1-K1-E5
cggacgcgtggggcgttaatgtaattgcttcatttcgttgctgatgttactgtgattcttaataggtgaaatgctctcaaaggatttgtatcaaaaaaaaaaaaaaaaaaaaaaaaaaaaaaaaaaaaaaaaaaaaaaaaaaaaaaaaaaaaaaaaaaaaaaaaaaaaaaaaaaaaaaaaaataaaaaaaaaaaaaaaaaaaaaaaaatacaaaaaaaaaaaaaaaaaaaaatgggggggctcattatgaggaccaaattttacgtccgtggattttaaatataaaatctttatttatttgaccataaaataaaaatggttgcgcttagtttaaaaacgttaatagtggaaaaaccttggcatacataatataattctgttagaaataa

SEQ ID NO: 36459 - DNA, 453 bp, Gossypium hirsutum
  Clone ID: LIB3148-033-Q1-K1-E6
ttagaattcaactataagcaaaaaaaaataaaaatacatacaacaaaacctaggaaaatatttgggtcttggctttgaatattcttattttctcttaaaaaccgaaggattttaaagttgatttcagatccaaaaatagaaaattttgttaaaagcgtaaagaaagcatatgcatgaggcaaatatagcatatttcagaaaaaaaaaaaaaaaaaaaaaaaaaaaaaaaaaaaaaaaaaaaaaaaaaacaaaaataaaaaaagatcaaaaatacaaaaaaatagaaaacataaaacataaaaaaataaaagtagataaaaaaataaaaaaagggggggggcctttttaagggaccaaatttttgttccccgtgttggcaagaaaaaaatttttttttgggggccccaaattaaattcacggggcggggtttttaaaccatggggatgggaaac

SEQ ID NO: 36460 - DNA, 243 bp, Gossypium hirsutum
  Clone ID: LIB3148-033-Q1-K1-E7
cgcggagactgctgctcgatttataaggaaaccatataaacaacagtctatctatagcctggatatggcacacattttcttgggtgtagaataaatagcaactgagatttccaggctcttatatttgcattttcttggtgtgccatatcattttcctattgtatctgttaaaaggcctatggtggtcgatcatctgctccaaaataaagcattccttcgttttttattgatatcattctagtt

SEQ ID NO: 36461 - DNA, 441 bp, Gossypium hirsutum
  Clone ID: LIB3148-033-Q1-K1-E8
gcaagtttggttgctctaagaaacaacagttttcggatgttcagtaatgaggatgtgaccattggtgcatggatgcttgcaatgaatgtcaaccatgaggataatcgagcattatgtgagccagagtgtacgcaatcatctgttgctgtctgggatatccccaaatgttcagggctatgcaatccggagaaaaaaatgttggaacttcatcagatagatgcctgctctaaaagtccaactttgccatcggacgatgattagcttaattggcaaaacacagattttattaacatggaaaggtgtcagaattgtttgttctggtaagttgatcttattgccctcagacatatctcaattaccccgttcgatcatcgcaagccatttttgtcttccgccatcgttttagtctgtaatatattaagcttttttttcactgacgat

SEQ ID NO: 36462 - DNA, 428 bp, Gossypium hirsutum
  Clone ID: LIB3148-033-Q1-K1-F1
cccacgcgtccggaaattaggatcgagaatagcaattctcagccagagagcagcggctcaatgtcggagttacagatcagtggcagaaaatataacagcaatagagccgaggaacgcttgagcttcagcatttgccaaaagctagtgcagttaatgcatgggaacatctgggtagtacaaaatcctcagggttcagctcaaagcatggcgcttgttattcggtttcaactccgaccgtccatcagtataacaatcaacgagttgggagaatcatcagaccagccatgctccaactcccttttcaagggtttgcaagttttacttgccgatgacgatgatctgaaccgtgccgtgactcgaaagcttctcgagaagttgggatgcagtgtttctgccgtaacatctggattcgaatgcctcacttctat

SEQ ID NO: 36463 - DNA, 324 bp, Gossypium hirsutum
  Clone ID: LIB3148-033-Q1-K1-F10
catggagacatgggagcaaagcgcacagatatggggcgagccatgcgcgagtcgatgatcgtgcatagtgcgtggaggctgctggtggccactgctgctgcgcgaaacatatgaaaaccctaggttttccgaaattgggcctattagtgttgggccatttgtaacttgacttgtattttgggccgttttatgttttatctttgaatatatatgggcccgggctaaaaattgggtctacaccttctatttaaataacaattttatagaggaaccaaaattcaattcatggggcggcgtttaaaaacgcccggactgggaaaaacc

SEQ ID NO: 36464 - DNA, 415 bp, Gossypium hirsutum
  Clone ID: LIB3148-033-Q1-K1-F12
cccacgcgtccactaggacatgaattgcggcatgagtttcgcccgttgcttcaataacgactcaccgtaccctaacgagttaactggcgccatcctcggtggaccgaacaagcaagatatgtttaggaatctactttgaacgtgaacttacactaacccttccccttaccttaactctttagctgcggcaggttttgcaaaccttacttgcccaaagtattaaaccaaatcgcttattaaatcgcgaattggccccttttttttccccatgttggactaataaatggcccaatatactgcatgaaatatggaacgcatatagcggcgctttaaacacattttttatttcttttcctaaaggagaggcgaagtgtatataatatgtgataaaattctttaaataaatatatatttt

SEQ ID NO: 36465 - DNA, 451 bp, Gossypium hirsutum
  Clone ID: LIB3148-033-Q1-K1-F5
cagatcacttcctccacatatacaaatcccaccccaaacacaaatatagaatacagattaacatacttaacatgctcgtatatagataacatatatatactctaacagaacaatcatacatacatatcagtgtcctattcaaatcagactatcaacatatcagatcacatgaattagggtttggttagcccttatcaaccctacggtaggtccatagttgactagacgacccatgtgaccctaaggaaaatttcagaattctgggcccagatgcctgtgtagcccacacacctagattggccttgcccgtgtggcccacatggcctgacccaaaacccatacgcctgtgtgggactacaaggccaatctggcctagcctatgtggcctaaacggcctcactcacaccgttacatggtcgtgtcttgagcacagccacaccttcgtcaaaca

SEQ ID NO: 36466 - DNA, 328 bp, Gossypium hirsutum
  Clone ID: LIB3148-033-Q1-K1-F7
gttgtactctaggattcttacttattgaggtccattgccgaagccttgtaccaagttgcaatgtgagcatttatgacaagccaataaaaataaagcacatatattgaataaaaaaaaaaaaaaaaaaaaaaaaaaaaaaaaaaaaaaaaaaaaaaaaaaaaaaaaaaaaaaaagaaagggagacaaaaagaaaaaaagaaaaaaaacgcgggcaaaaaaaagcaaaaaaacgaccaaaaagccacctaaaaaaaaaacaagaggcagaaggtgaacaaccgagaaaactggaaaaacccagaagttacccaacttatttgggttgccc

SEQ ID NO: 36467 - DNA, 383 bp, Gossypium hirsutum
  unsure (1)..(383): unsure at all n locations
  Clone ID: LIB3148-033-Q1-K1-G1
gttatcttttaagtggacagggttttcaagttagtgggcacatcaaggtcactaacaactccatttgttttactggaaattacggattgaggtcattggatttattacttgtattctggatatttatgaatgaacaccactcgtgtctcagtttgaaaaaaaaaaaaaaaaaaaaaaaaaaaaaaaaaaaaaaaaaaaaaaaaaaaaaaaaaaaaaaaaaaaaaaaaaaaaaaaaaaaaaaaaaaaaaaaaaaaaaaaaaaaaaaaaaaaaaaaaaaaaaaaaaaaaaaaaaaaaaaaaaaaaaaaaaaaaaaaaaangggggggggcccttttaaaggaccaaatttatttcccctgttgttggaaattttttttttttttt

SEQ ID NO: 36468 - DNA, 200 bp, Gossypium hirsutum
  Clone ID: LIB3148-033-Q1-K1-G3
ggtttaaaaaaaaaaaaaaacaaaaaaaaaaaattataaataaaaaaaaaaaaaaaaaaaccgccatgggtgtggtaaaaaactcgagcgcgtgcgtgcccatacgacagctctgctttttcggtacctccaccaaaatcactttcactggccctccaacttcaccactgggactgccaatactttcccctaccccatct

SEQ ID NO: 36469 - DNA, 343 bp, Gossypium hirsutum
  Clone ID: LIB3148-033-Q1-K1-G5
gccatgtctatggactttgtctgattaatgaatgattattagcacaaaaaaaaaaaaaaaaaaatgaaaaaaaaaaaaaaaaagaaagaaaaaaaaaaaaaaaaaaaaaaaaaaaaaaaaaaaaggatgaataaaataaaaaaaaaaaaaaaaataaaaaaaaaaaaaaaaaataaaaaaaaaaaaaaaaaggaaaaataaaagaaaagctacagaacatgaataaaataaaaaaaatagggggggtgttccgtgtaaacattaatttagttggaacaggcatataccaattaacacttaataatgaacatgaaaacttttcggaggcggagccagtttaaaa

SEQ ID NO: 36470 - DNA, 427 bp, Gossypium hirsutum
  Clone ID: LIB3148-033-Q1-K1-G6
cggacgcgtgggcaattttgtgttgtaaaaggtgccaacttgtttattaccacacgtaaatcacccgatggcttttggattcaatggcattcggggttctgaagagatattggctggagggtggaacttggaaggttaatttacttttacaggtttaaaaggggggactggccattaacattaacatagaacagaagatgaaatcccaaaacttgtgttgtaaagacggattacctgctatgaacctgtgcctaattctggaaatattactcagttcagctgttacaaaatctgcttcgtttcagtcacaaggaagacgcggttgcaaagatctatgttgtccgaattctttacttctattgaagtactcgtcaacaactggtcttgtcatttgatttcgaaagccgataagaacatattttctggc

SEQ ID NO: 36471 - DNA, 412 bp, Gossypium hirsutum
  Clone ID: LIB3148-033-Q1-K1-G8
cccacgcgtccggtcgtgacacaagccagaggatgtcgcgacacagccttgaagacacgcccaaataaacgaactgccctcagtgtcgcgacataggccaaagggtgttgcgacacctacgtgatgtggtcacttactggaccaggggtgttttcatctgcacaatgaactttaacgaagattagtcaaccattttaggtcaaggacgggttgctaaccctagacctataaatatgattgctcaaaatagtttagaggatagtttttccttagtttaattttactttcatttgagtttagatttcttttgcttgtaatctttatttcagtttttattctgttcttccagagatctggattgtagctttgtcggattcattgcggagtgttgtttgcacatcaatattatata

SEQ ID NO: 36472 - DNA, 288 bp, Gossypium hirsutum
  Clone ID: LIB3148-033-Q1-K1-G9
acggcctctttgaaacatttccagtagccgaaattgttgttaatcaaccattattcaattataagaagcctcaattctgttgtttggttgtttcaccagaatctgtatttggttttgtaactaaagaaatgaaaataattgtattaaattaaaacattccttttgctgaggaaataatacaaggctcaatttctgtgtttaaaaaaaaaaacatacaaaatctttcatacctactttataaaaaatataaaagggggccctaaattcaaattatcttgcgcgtttttt

SEQ ID NO: 36473 - DNA, 318 bp, Gossypium hirsutum
  Clone ID: LIB3148-033-Q1-K1-H4
cccacgcgtgcgaaaaaaaaaaaaataaaagatttatatgtataagcaacaaaaaatggctaccgaggccggctacttttatggggagatcatatttgtcatctcaatatgcagataagttgttgatttgaaaaaaaaagaaaacttaaaaaggaaatattaaaaaaaagcaatgtactaaaaaaactaaactaacaaagcatcagattgcgttttggaaaaattgcacaaaaagaaaaaaatgcacataccaaataaatcttaaaaacatttaaacatacttgaacgggggcggttgcgtaaattcaaacagcctat

SEQ ID NO: 36474 - DNA, 439 bp, Gossypium hirsutum
  unsure (1)..(439): unsure at all n locations
  Clone ID: LIB3148-033-Q1-K1-H6
gtttacttgttttttgaatttcatccctctcgttgttttgtgaaggacatcaagacagggaaggttttgctagtaggtcacattcataaagggttatatcgatttaacacatcaccacaacaaagaagttttgctggctttgatgagggctttcaatatgcacatactactaagattcaagcttgagacaccttctgttctgagttcgacttatggcacaaaaggcttggccatccctgcacaaaaattctttttcaagttcttcgaagttgtaatatttcactgaataaattcacaccacctagagtgtgtgttcctcgtcagctaggaaagtctcataagctggtgtttgataattctaagactgtatatacttccccttttcaacttgttgtgtctgatttgtggngacaatcacctatttcttctaaaggctatc

SEQ ID NO: 36475 - DNA, 431 bp, Gossypium hirsutum
  Clone ID: LIB3148-033-Q1-K1-H7
ctaaaataatggttagacatatgaaaacaatgtgcaaaaattaaggaacatttaacaaccataataataagtaattaccttattcaccaaccatatatatggttgtaatgtataatatatatgattgtaataataggatcctttttgataaattaaaacaatatatattttgctaaaaaaaaaaaaaaaaaaaaaaaaaaaaaaaaaaaaaaaaaaaaaaaaaaaaaaaaaaaaaaaaaaaaaaaaaaaaaaaaaaaaaaaaaaataaaaaaaaaaaaaaaaaaaaaaaataggggggggccgttttaaaggatcaaagtttacttccgctggcttgcaacgaaaaagtttttttttggggccaccaaaattaaattcactggccgcggtttaaaaacgtgggaattggaaaaaccttgggttacccaaat

SEQ ID NO: 36476 - DNA, 239 bp, Gossypium hirsutum
  Clone ID: LIB3148-034-Q1-K1-A2
gccacgcgttcggccacgcgttcgtccacgcttccggatttttggtcaataaaaaccatgtggagattctgtttcatagtcatgaaacttgcctcgttgtttctaggatgcccatttaagcattcaccatttattccatttagccatttaagcataagggtaaattgtgctatatatataaatatatttcgctattgtcttctaatgagtgtaaaaaaaaaaaaaaatagttctgaatt

SEQ ID NO: 36477 - DNA, 269 bp, Gossypium hirsutum
  Clone ID: LIB3148-034-Q1-K1-A4
aaaaaaaaaaaaaaaaaaaaaaaaaaaaattttaataaaaaaaaaaaatataaaaaaaacggagattacttacgcgtgctttcgaagttcccactcttctatcgcgttactctaaattcaattcccctgctatagggtttccatcgtctcattctggtaaacccctttttttacccttcttaatgggtttccaccttatttccctttcttcatctgccgtaatcccatagaggccttaaccgctagcctttcccaacatttgccctttc

SEQ ID NO: 36478 - DNA, 143 bp, Gossypium hirsutum
  Clone ID: LIB3148-034-Q1-K1-A6
gctggaggagttgctgtcatggaatgagctcatctgctttgcttcttttttgttgattagagataatagttgaaagaacgacttttacatgaactttgttttctatagatgataaagtttttgtgagggatagaaagaaaaac

SEQ ID NO: 36479 - DNA, 148 bp, Gossypium hirsutum
  Clone ID: LIB3148-034-Q1-K1-A8
caagaagagaatacccctttgcatacaaaatttttatttaaaaacgacaacatacaacaaagaggcagggcatttttgacattgcgaacaaccaaacctactactaagtaacctacattccattccctggctaacatatctacaaata

SEQ ID NO: 36480 - DNA, 342 bp, Gossypium hirsutum
  unsure (1)..(342): unsure at all n locations
  Clone ID: LIB3148-034-Q1-K1-B10
aaaaaaaaaacagggccgacccacccgngcgtccacacatactattatctaaaacttttttatttacaaaaaacaaaaaacactctatcgctttgttttaattttaacaaaggctccaacacacatactaaataaaatatccctcacattcatatttcattcggatactaaacgaaattttgcccctctatatttccccatccaaggaacaaaactttaatattttgacctactatgtaatatataatatacctacttaaccttaattccccccctatcaataatgcctatattcaactcccctctctctcccaacttaaaaaaaaaaaaaaaaaagtcctt

SEQ ID NO: 36481 - DNA, 336 bp, Gossypium hirsutum
  Clone ID: LIB3148-034-Q1-K1-B4
caaacatgatattttatcctctttgtttttcatacaactgcagactggtaatgaagtgtccctccattaacgttatacagtatgtggaagccaatcatttgagttttagatactgtgttctcccccacccaacccccctcccccccggcccagaaaaaaaattgtatttaattcgtagcaagttggggttctatctggtttggaccatataattcactttaggatacctgaaggtaatctcaaaatttctaaggtggcgttgggatctatatttcaaaatttggattaaatttcaaaaattatggtaattatttaaaaatatatgggatatttatt

SEQ ID NO: 36482 - DNA, 291 bp, Gossypium hirsutum
  unsure (1)..(291): unsure at all n locations
  Clone ID: LIB3148-034-Q1-K1-B9
cnnnaaaaataaaacaaaaatactttgggggttaactttattttcagaaatacactacttgggcattcaaaattgtggatattgtttatcattattcaaaattttgtccaatcttgtttgtttaactcttctcctcttttataacctccaacttccacaccataattttttttttaggtccccttaattaaattccccccccctctttttaaaacgccgggatttgaaaaacccttgctttaccaaacttaattgttttggaccccattccctttttccaaatttcctttt

SEQ ID NO: 36483 - DNA, 144 bp, Gossypium hirsutum
  Clone ID: LIB3148-034-Q1-K1-C7
cccacgcgtccgcccacgcgtccggaggaacttgagtattatgatgcggaggaggagcacagagatactttatatgaatcagaatgagaagtgcttactgatccagggttgattggtgtgctcagattgcagccaagggtgatg

SEQ ID NO: 36484 - DNA, 347 bp, Gossypium hirsutum
  Clone ID: LIB3148-034-Q1-K1-D1
cccacgcgtccgcccacgcgtccggacattattatcatataaaatgtgagaaattggagtttgtttgaaaaaaaaaaaaaaaaaaaaaaaaaaaaaaaaaaaaaaaaaaaaaaaaaaaaaaaaaaaaaaaaaaaaaaaaaaaaaaaaaaaaaaaaaaaaaaaaaaaaaaaaaaaaaaaaaaagggggggccgctttaaaaaatcaaagtttatatacacgtcaatgcaacgtaatattctttttttagggtgacaaaaattaaattaattgcccgcttttttaaaacgcagtaaatggaaaaacccgggcattaccaaattaaatcgttttgcaaaaaatacccttt

SEQ ID NO: 36485 - DNA, 348 bp, Gossypium hirsutum
  unsure (1)..(348): unsure at all n locations
  Clone ID: LIB3148-034-Q1-K1-D10
cccacgcgtacgcccacgcgtacgaccacgcttccgattttctctttgtttggtatttctcggggtgcgtctaaacgtagaagttgtttaatccaattgaaaatttcaacgtttcgtctaggctagaaatttccaaaatataaaggttgcgattcaatcgaagcttacgctattatcttccctcgtaccactgaaggtgagtttatctgatttgatattttatgagaacatacatggctcacttctaatcggntgctgcgatttaaaaatttgctgtgtgtgtgagctttaaggtgccatatcttgaaacgtttttccaaaacaatgggatagttcttttaatgattt

SEQ ID NO: 36486 - DNA, 451 bp, Gossypium hirsutum
  unsure (1)..(451): unsure at all n locations
  Clone ID: LIB3148-034-Q1-K1-D5
aattcccgggttcgatcccatcgcagtccgatgacatcttcttagctatgatgctgttgcataacatgatactgatgccttagcttcatttcgtagttattaggatagtgagctaggttcatgaagtatagttaggtagaagagagcctaagaataggttcagaagaggttagtttcatgattggcatcagttcataaagaaaaggcttagcattagtagttctttagatgatagttagatgccccatcggggagtgcaccgccctttgatgattgagtgtgagggggaagacatatgatggttcatgcgtacctatgcttgagattagtgaacncatgcttgatgggctttgatagctcgtggaaacatcataagtccttgatggcaaccatacagtgccagacacactatgatncctgcatttattatcgtcctgggacgtctgggacc

SEQ ID NO: 36487 - DNA, 271 bp, Gossypium hirsutum
  Clone ID: LIB3148-034-Q1-K1-E11
aaccacccacacctacgcattcttatacctatccatttctccaatccattaattacacgtccctgcaaacttctatctgtatcgttttattcaaaaaacacccactaaacaaccaacaaaaaaaacctataacaatcttaaattaactacttaaaaatacccaaaattcaaaaacaacctatacttacaacaatcaatatattttatgcaaaatccaaaatccattttcccccttttttactaaaaaaacatcaataatactttttaataa

SEQ ID NO: 36488 - DNA, 409 bp, Gossypium hirsutum
  Clone ID: LIB3148-034-Q1-K1-E7
cggacgcgtccggcgaaaggaaagctcgcagatatagatggtatgaagacaaaaatgatattatggataaaagtatcatgcatcacttctgatggatcaaagctgtatgttagtgctggaataaccaaaaccaggaacagagatgcttatgaggttaatagggatggtataggtgtcgacaagttctagatttgttagaagtatgtctatggggaaaacctatgtatttgttttaactcctctctcatagccctttgaaccttttgtggtaaggctttttactctgttctaacattgaaggtggaaatgtcatggctcatattagttgtgtggaattggacattattaagggttaaagttgatattataccaaatttaaaagttatttgtaaatttttataattggtca

SEQ ID NO: 36489 - DNA, 406 bp, Gossypium hirsutum
  Clone ID: LIB3148-034-Q1-K1-E9
acgggaaatcattgttgaagaaaaccaagatatgtctggcgaaattgggggtggtgaaggtccagatgggattcataagagagataatgttgttcaaccaaagagaaaagtaggccggggccggccaaagggttcaaagaataagccgaaaagtagtgatgagaaacttggactgtcaagtgaacagcagacctttccagttaacattatagggggttattttgttgataaaggatttggtttagtgaggactgcccatgtaagggaggaagatatggtaatgcctgttgaagctgttacttgtggggatgctattgtcaagaagattgatggtcgaaggtggaatcgtggccgacccaaaagttcaaagaataagagaaaacgtccatatgtcttgatgaaaaat

SEQ ID NO: 36490 - DNA, 312 bp, Gossypium hirsutum
  unsure (1)..(312): unsure at all n locations
  Clone ID: LIB3148-034-Q1-K1-F8
gacgagttcgtcgatgctttganttcttattatcagcagcagcgccgctacagcggaaagcattgatcaactaatgagagggcaaatcaatatggtgttagcaattgacgaactataaacaacaacaaaaacaaacaaaaaaaaaaaacaaagactaaaacaactttacataataaataaaaaccaaagataggggcgggcgccttttaagagccaagcttactaacccttcaatccaactggataactcttctatattgtcgccgaaattgaatatagtgcccgggagtttccaccccgatgattgggaaa

SEQ ID NO: 36491 - DNA, 364 bp, Gossypium hirsutum
  Clone ID: LIB3148-034-Q1-K1-G1
cccacgcgtccgcaggcaacaaagctgacaccaataatggaacaagttgttcatcagctgggagaatctcaaggagatgggttttcttgaaagattttctaaggagcaaaagtgaaggaacaaacaataacaacaacaatagtaagctgtggtcaacaatttcattttcaccagcgaaggaaaagaaaccagggagcaacaaaaccaatggtgtggttcatgaatctaagaacaaaaggccaagcaagaccaaagctgtgaatgggataggtaaaaagagggttccaccatcaccacatgacttgcactatactgcatataaaacacaagctgaagaaatgaggaagaagactttttgccttac

SEQ ID NO: 36492 - DNA, 387 bp, Gossypium hirsutum
  Clone ID: LIB3148-034-Q1-K1-G7
aatatttttaactttcgatcttacgcagggctgatttatttctggtttcatatccttatgaaaatggggtctttgaagaaggaagaagaaatggggcagattggggaggaatccaaggaggctatcgtatacgttaatggagtccgcaaagtgttgcctgatggattggctcacttgactctgctggagtacctcagaggtaataatatttttgttccattttttttggttttccttgaaagtattatcggagaaaagaatcggaaagcttttttttttcctctctttttcttcctctaaaccttgcaagccaaactcactccaaggttgggttaaaactaacttccaattttttgggttttcgcgtggggaaaacccccccccccc

SEQ ID NO: 36493 - DNA, 256 bp, Gossypium hirsutum
  Clone ID: LIB3148-034-Q1-K1-G8
gggatatcaaagctgacacacactggcactcaactcactaccactgtgtgtgtgtgtgcgacaagagtgatggagaaaggaaaagaggggtgggagtaaatagcgtcggagtttactatggatttaccataccggacctgggtggatgatctttataacaggatcagtttatggtcgacatctttattactgcttgttgccaacattctggctgatgtagacacatgggctaactttattttactccatataaaca

SEQ ID NO: 36494 - DNA, 424 bp, Gossypium hirsutum
  Clone ID: LIB3148-034-Q1-K1-H12
acgatttccttgtgatcctaaaaaaaaaaaaattataattaaaaaaaaaaaaaaaaaaaaaaaggggggggtgcaaaatttttatctggaaatctaaaaaatgtcgtccacattcaacgggcgatgaaactgctccttttttttggcttacttaaaaacaaatgataaccacggggggcgccctttttagaggttcaaattttaccacccctaacttgcaaaggtttactttttttttggggcccccaaaattaaattactggcccgggttttaaaaacgtggggtttggaaaaccctgggggtacccaaattaaatggctttgaaaaaatttccctttttgccagttggggaaaaagaaaaaaggcccccccctttcccctttccaaaaaattgcccaccttaattgggaattggaccccccc

SEQ ID NO: 36495 - DNA, 144 bp, Gossypium hirsutum
  unsure (1)..(144): unsure at all n locations
  Clone ID: LIB3148-035-Q1-K1-A10
gccacgcgtccggtaaaacttctcctttaaatatggccaaaatgaaacgcgatcgggggcgggttgtagctgctgtgcgccgcacccataaaaacccgcgggnggactatgacacatctctgtttgttcggagatagatgaaat

SEQ ID NO: 36496 - DNA, 173 bp, Gossypium hirsutum
  Clone ID: LIB3148-035-Q1-K1-A11
tcataacacaaaagtcctttgggggctaactgtattttcagttttacactacttgaacatgcaaaattgtggatatttttatcattattcaagattttgtccaatcttgtttgtggaactctgtatatcatacaaatttggaactggtaattataaacttgtattcaactttg

SEQ ID NO: 36497 - DNA, 338 bp, Gossypium hirsutum
  unsure (1)..(338): unsure at all n locations
  Clone ID: LIB3148-035-Q1-K1-A12
ccacgcgtccgaaggacacaagtgttaatggtaaaaccaaaaattccgcaagcgggacccagacctttcccaaaagccgcaaactttcattaaataaattatccatcagattggtattggttgcgacattgaacttgaattggacccggattccattcatttcgaanggaaatggtgttttcattgatgcacacagttgggatataaacaaggatttttgccggtaaaacaaccaggggatatattgcttaatcttcccaacaaaaaacctccaaccaaaaaaaaaaaaaaaaaggccggccctttttaagaatccaacttaacttccccttccttcc

SEQ ID NO: 36498 - DNA, 260 bp, Gossypium hirsutum
  unsure (1)..(260): unsure at all n locations
  Clone ID: LIB3148-035-Q1-K1-A4
gctacttctccttgtccttcaaaaatctatccttttttatttatctcaggcgccgccgtattctctaagccggcggtaaatacccatttcttcctccacccttccctctcctccattaaaaaaaaagccaaaaaaaagagaaaaatattcacaaaagacaagaaagtttgctactttagtaaggtttatcgaacgcacttgggattttagtttgtttcatttattatcttctctaggattttttaattaatacccganga

SEQ ID NO: 36499 - DNA, 390 bp, Gossypium hirsutum
  Clone ID: LIB3148-035-Q1-K1-A6
aaatcttacaatgggcttggacactatacaatcccaaatgaaatggaagaggcctgtgcgtggttaacttcaaaactggagaacaacggacggtctacatgacgaatgtacatgcggaaatggatatgcattaatcgaagcaaatgtgtgatgtatgacgatgcaaaacatggatatagactagtgaacatacgccgagggaatgaaagtattctaaatgggttccggatcttggctggtaactcaattgaaacatgataacttgtaccgatccaaatcgtaaactgggcggggttgaatataataatgtggaaggcaatgtgcgtgtgtaattacaaaataagcaatcgaaaagggaaccctattataatttaacagcacccgaataaa

SEQ ID NO: 36500 - DNA, 390 bp, Gossypium hirsutum
  unsure (1)..(390): unsure at all n locations
  Clone ID: LIB3148-035-Q1-K1-A7
nccacgcgttcggagtttggaaaaagaattttttgaagaatggtggaaaatggaagaacagggatgttttagatatgaacactccaccatggtggtaccgcaaaggattcaagcaacaatggaattacgtgaacgatgaaaggaggatgacgaaagacaatgatcgcatgacagcatataggacagctcaaacaacatgggccaaataggtagattcacatgtggatactaacagaactaaagttatatgtcacggaatcactgcatcacactacaatggctaagaatggaatgagccaagggagagaaagtgctgcaaggagatggaaccattcaatgagtcatcagcttatacagttgggctgcctgaggcagcatatgtggataaag

SEQ ID NO: 36501 - DNA, 396 bp, Gossypium hirsutum
  Clone ID: LIB3148-035-Q1-K1-A8
ggaatttgcaaatgtaggtactgcaaactatgtaacacaggaacttattatatacgggatgctggcacgctaaaagactataaagatgatggggttagtgaggacataacctaaagttggacatggatggtcaagacagatacgatgtcaatgataccgacagctatgtaaaaggggaagccaatctaaaagagacatgctggcgtaggccggcaaggaaagtaaaaggtaaactttaggggaagctaaaagaaattaaacgggcgatgtaaaaaaacggctagaaagggaaaaacgtgggtggaccaaaaataataaacttgaaagaaatgcccctttgggcaggaaacggaataatgaaaaagcccgaaacgtttgacctttccaaaagttaag

SEQ ID NO: 36502 - DNA, 434 bp, Gossypium hirsutum
  Clone ID: LIB3148-035-Q1-K1-A9
gttcgggccacgcgccacgcgtgccgatttgagatttggatccaaccttttattgatttcagagatttttaatggcaggcggaggaggcaaaacagcagatgcacagtttttccacctcctttccaatctactccatcaggtagaagcattgactaaccaggaagaagttgaactgcgttcgaaaatcgaagcccttggattggaggttacaaaagttccttccatgtctacacacagacttgatgagctggaaattgcgagagagttggacaagttatcggctaagttagacggtgtggatgagatgatatcctcagccatggcagcagacccgcaagtgcgatcccttttgagtggcactgctgatttatggatgccggttattactgccaatgctgatgagcgacacaatttggctgcatcaatcagtact

SEQ ID NO: 36503 - DNA, 384 bp, Gossypium hirsutum
  Clone ID: LIB3148-035-Q1-K1-B3
cccacgcgtccgatcatttccacttttttcccttatcatgtatattttgagctactgtagtgtaatatattaataaatttgaactactgtagtataattatattaataaaatgaaataaagccggtaatggctggtaaattattaaaaaaaaaaaacaaaaaaaaataatacaacagatatataaaatagatacaaaagctcaacaagatatgctgggggggttcgaaaagtacgttaagtgaaaaaactaattcaaaagggggggcggttttaggggatcaaatttaatttccggggcctgggaaggaaatattttttttttggggcccctaaattaaaattcctgggcgggtttttaaaaaggggggaatgggaaaacccgg

SEQ ID NO: 36504 - DNA, 382 bp, Gossypium hirsutum
  Clone ID: LIB3148-035-Q1-K1-B5
gctatatatcaagcgcgcgctctagaggagacacacttacacgcgcgcgcatgcgacacgatagatctcttatatagtgacataaatataaaacacagtgcgcggcgttacaccacggcgactgtgaaaacactgtcgtgacacaaatcaatagcgtcgcacaacatatccctttcgccagatgtcgtgatatcgaaaagaggcgcacagagagcgcttttcaacacatgcgcacactgtatgtcgaatgtgacacgcgctgtgtcgccgcatataacgcgccgggtgtgggggggacacgcacagtgacagctacactcttgagagcgctatagcccgctcttttggctttctttcctttctttatcgcgacatgtgccgg

SEQ ID NO: 36505 - DNA, 407 bp, Gossypium hirsutum
  Clone ID: LIB3148-035-Q1-K1-C11
ggcccgaaaaccccggtccacccacccctccccccaccccttccaaaaaaaaaaaatttaattattaaaaaaaaaaaaaaaaacaaagcggccgggtaaatttaaaaaagacgccaaacaaacctcccgccccttttatagacccaacccaacttaccccttcctcccccctaaataactctgccccacgttcacataatttcaacttacctgccctaattatacaccattatatcttttaaaaccctgccctaacccaaactaatccccctcgaattaaaccccctttccccatgcaacccttttctctaacaacctctaatcccatccaccatacataccatatccccactttatctcaaacataaaaaccccccttcttttcccctttaaaataaattacaaac

SEQ ID NO: 36506 - DNA, 246 bp, Gossypium hirsutum
  Clone ID: LIB3148-035-Q1-K1-C12
cccacgcgtccggtcggaaatttggtgggaatcaagttattgctgtctactatccggagaacaagtttgcagagagggagtacgatggctaattttcatataaactcttcttagtattgtgattctctatgttcagttgattcacattgtgacataatatatgttaaaactagttgagatgattgtggagattatttctgattctgaaacctttgttgaacaatatatttcaaaaggttcatttcg

SEQ ID NO: 36507 - DNA, 377 bp, Gossypium hirsutum
  Clone ID: LIB3148-035-Q1-K1-C5
ctgaatttgcccctctttggggaggtttcaattgtctcatttgtggttgcattgtgctggtggagttttgctgttgtctgggctgtcaatcggcgagaatcatattcatgggtgggccaagatattcttgtaattctccacatcgccactttgcattccagtaatggatgttttgggaattgatcatactttctaagatacaaatatttaccactctctctagtgtaaaatcttggcttaataatatgtggaatttgtggatgccaatttaaggacaagaaagatggtttaataaactgggcaattaactgattttatggctgggaaacaagtagggttttgagatttaaatttaatggtgaatgatgttaaaagtt

SEQ ID NO: 36508 - DNA, 405 bp, Gossypium hirsutum
  Clone ID: LIB3148-035-Q1-K1-C6
atcccccattgttgttctcatatatagatcacgccattaacgaagttccccctcaaccctcgattccaccaatattttgtaatctggtaaacagagatgagtaattgtagaaaaaataacatttccctattgtaaaaaaagaaaaaaaaaaataaaaaaaaaaaaactaaaaaaaaaaaaaaacggaaaatctttctaaaatgggaacttcttcctgtaggtaccaatggataaagaagattgggaaacctataatgcagattaaatatggccaaggaaatgcaattaaattgttcctattgttgatcaatttggggtggaaaaaacaaggcggacatgattaattgcattgagttaagatcctgatgtggatgagaaggtttttggcacccaagccctaaagtt

SEQ ID NO: 36509 - DNA, 188 bp, Gossypium hirsutum
  Clone ID: LIB3148-035-Q1-K1-C8
gacgagttatgatatgccctgggggaaatctttagactttgaaacttttaaaatcatattcggttctttttaacgctcagaactgctgttatccattcgatttatcatttcattgataattccctgatcgagggcaagtaataccatggaagagcgaatggagttcggtcttttctttttcttttttc

SEQ ID NO: 36510 - DNA, 281 bp, Gossypium hirsutum
  Clone ID: LIB3148-035-Q1-K1-E12
gtgatttttgttatacattgattttgaattttaaatggaatcttactgggaaaattttatgcgtgcttaaaaaaaaaaaaaaaaaaaaaaataaataaaaaaaaaaaaactaaataaataaaataaataaaataaagaaagaatcaagaaaaacgcatgtatcaagaaattgatacttttatgtggtgaaatattatgcacttgtacaatgactttactaagtggtgtaatactaattaagtatttggatcatcttatttataatactcattgcggtttcg

SEQ ID NO: 36511 - DNA, 369 bp, Gossypium hirsutum
  Clone ID: LIB3148-035-Q1-K1-E4
cccacgcgtacgcccacgcgtacgcggcaacctctgttcctaggcaacaatcataccgttcatcgcccctgatctgaaccgagaccccccaaaaatcgtcgaacacccaaagaatttagcaacccatcaccacctcaaaagtaacccaccgatctttgtacccccaccctagatagtagtagccctcaatacccttccccccttaaaaccccgttaaagtttcttgcgatcccttcaaaaaccatctccaccattcttttcccttcccccgacctgccgtccgccccggccgtggccaatggcttccttggaaaagtcaacacacaaccttccaaattaagacttccaacttttattaaaccctttttt

SEQ ID NO: 36512 - DNA, 361 bp, Gossypium hirsutum
  unsure (1)..(361): unsure at all n locations
  Clone ID: LIB3148-035-Q1-K1-F11
tgatattgcacctctgaaattatggttgtcggtttccttattcgccttgtatattaatttgtggaatgatgtatgcaacttttattccaactaaaattcaaaaaaaaaaaaaaaaaaaaaaaaaaaaaaaaaaaaaaaaaaaaaaaaaaaaaaaaaaaaaaaanaaannnnanggggcggccgatttaaaagaaccgggcgtcccttctcaagcatccaacttaataactcttttatacaaaaaaataaatttaatttactggcccccaatttaaaaaaactggccggggaaaaacaaggcggtacctaaaaaaaccccgttgtaacaaaattaaatttcctcgaaagaataataattaaa

SEQ ID NO: 36513 - DNA, 305 bp, Gossypium hirsutum
  Clone ID: LIB3148-035-Q1-K1-F12
cccacgcgtccggagttttgaagttgaattcaatgaggaatggcgatcattggaagaacagtgatgttttagttttcaacacttggctatggtggtaccgcagaggattaaagcaacaatgggattatgtgaatgatgaagggaggattacgaaagatattgatcgtatgactgcatttcggacagctttaacaacatgggccaaatgggttgattcagatgtggatactaacagaactaaagttatatttcaaggaatctgtccatcacactacaatggctcggaatggaatgagccaagggtg

SEQ ID NO: 36514 - DNA, 368 bp, Gossypium hirsutum
  Clone ID: LIB3148-035-Q1-K1-F2
gccttgcaatgggttatgctaaggggaaattgactttcttcctcggtgatgtggactcagttgttgacctgataccagctgacatggtggtgaatgccatcatcgtagccatggtagcccatgcatcgaaccaaccatcggagacgatctaccaagtgggttcgtcgatgaggaacccggtcaagtaccatagcctccaagactttggctaccgatacttctccaagaaaccttggatcaacaaaaatgggaaagctgttattgttggtaaaattcgtgtcatggatagcatggccagcttccatagatacatggctcttcgatacttgcttcctttgaagggactggaatttgcaaatacagcattt

SEQ ID NO: 36515 - DNA, 278 bp, Gossypium hirsutum
  Clone ID: LIB3148-035-Q1-K1-F3
cgacccacgcgtacgggaagcgcgcacacgaagtcgatatgcaatgttcatgtgcaagtaagtttttgttgcttgggcacaaaacgtgaagcagctgaaatgcttaaaagctgctaccgggtcttcaattcaagaaaactctgagcatcacccttcggctgcaattcaaatggtgagagtgttgcgcaatgcatctgctactgacgagattcatcctgcccacgtaacatactgagctgagctgaaaagcaatggaaccatacttcagaaattattta

SEQ ID NO: 36516 - DNA, 227 bp, Gossypium hirsutum
  Clone ID: LIB3148-035-Q1-K1-F6
ggaaattcagagcttggaggaaatagagaagagatacaaggacgagtagtgttgttaactggaacatattgggatgagctgctgctaaagaaaactcatgtatgtagtaccccctctagacttgagactgttattttataaaaagcatatttgcggtatttgtatgatgtcatgtttcctttatagcttaaactctcctgcatctctaggctacaatggagggtttt

SEQ ID NO: 36517 - DNA, 405 bp, Gossypium hirsutum
  Clone ID: LIB3148-035-Q1-K1-G10
caattcaagattcaagcgtgtatgcgtcttctgtggtagcagtcctggcaagaatcctagcgtccagcttgctgctattcaacttggccaacaactggttgaaagggacattgacttggtttatggtggaggaagcattggcttgatggggctcgtctctcaagcagtctttgatggcggccgtcacgtgttgggggtaattcccaagacactgatgccaaaagagctaacaagcgaaaccgtgggaaaagtaaaaactttatcaagaatgcaccaacgtaaaacttaaattgctcgtcaagcttatgcctttattgccttaccaagtggttattgaaccttggaagaactgctggaagtgatcacttgggctcaacttggaattcatgacaaacctgtgggatt

SEQ ID NO: 36518 - DNA, 325 bp, Gossypium hirsutum
  Clone ID: LIB3148-035-Q1-K1-G3
cccacgcgtccggcataaaacacagcgagctacatcccgtacgtgctctctgctgttctgtggtgaattatggcgcgggccgctcatagaggatgcccctaatgtgaaaatggaggatatggtatacagaaatgcagtcctgtgcctccttagtatgaaaccagagacctgcattaaatattgtatagcattatcaaaattaattgatctctcctaatcatgaatagaaaaatgtaacttgatgaacatgaaaaaattaaccacgttgcccatgtatggggccacaaataaaatatgcgggcttctgtaccagtccacttttttt

SEQ ID NO: 36519 - DNA, 284 bp, Gossypium hirsutum
  Clone ID: LIB3148-035-Q1-K1-G4
gagagtccagataccaaaaacaatgtgcaggctaaaatccatgacacggagggtctacccccagaccaacagaggttgatctttgccggtaagcaactggcagatggtctaactgtccctgattacaacatgcaaacggaatacaccctacacttggtgtcttgtctctaaagtgaatgcatatccttgtgaagacaattaccgggcaaaccatcaccttggaagtcgacagctactacactattgacaatgtcaacgtcaaaatcctggacaaagaaagtata

SEQ ID NO: 36520 - DNA, 397 bp, Gossypium hirsutum
  Clone ID: LIB3148-035-Q1-K1-G6
cccacgcgtccgcaagattcaacccaaatctaaacacacagagctcagcagaaatctgctgggttttaaggtttagggttttagtatttgagttgcaaaggtctcaatataaaaaaacaaagtgaaaaaaccctaaaattgatacaccataaattagggataaaataaaatatggtgggatgacaaattaatggaaaggccatcaccttggatggtcaaaacttaaatgcttgtaaattagtgcgctaaccaaattttaagggtgtgggtttttgacttaaaaccgctgagttccgcatcagtgggccaactttattggggttaagggactaattttttagttgaacatttaaaaaaaataaacattccagtcggaacaacctttccttcccccttt

SEQ ID NO: 36521 - DNA, 150 bp, Gossypium hirsutum
  Clone ID: LIB3148-035-Q1-K1-G7
tatatcgaaaacatttcatagatggattaactctttttttttgtgtcaaatccttaaattggtagaataagctttaaacattgatttcaattagtgaaaaatgctattactattatgttatataataaaatggataagggattcattgag

SEQ ID NO: 36522 - DNA, 432 bp, Gossypium hirsutum
  Clone ID: LIB3148-036-Q1-K1-A7
ctgaaactaacatgtctcggacctgacctgggagattatcagcaggtgcaatatacggtacctccatatgtttggtttggtgcatttccaaccaaggattttcatatttccagtgacggcagagcggccatagctgaaccaagggatgctgagtgtcactattccctcgttggatgcacctgcgcacctgcctttcaatttcaagactttgagctcagaaaacattccgagcttgtttccacctttccgaattatgagcctatcatttcttttctcaccaatactgattgacttgccatctgatttctcctgttctcagctcattggtgccaagaagttttcatgtttttgatccctagattgctacttctgtaatttacagtttttccacagctgaaaaaagcgttaagctttgtatcaaatgctgttttc

SEQ ID NO: 36523 - DNA, 210 bp, Gossypium hirsutum
  unsure (1)..(210): unsure at all n locations
  Clone ID: LIB3148-036-Q1-K1-A8
cccacgcgtccggtttttcatttcaatttccatttatttttactttgatttttaaagtagtttcatttataatttttaatttatgtgcggattaagttttagctcaattagtataggcattgtagccaaacgcaggagaacgtgagtttaagtgcgttgaaacgcatttttaactcaggtttaatttaatgaatcttaatgttcaacana

SEQ ID NO: 36524 - DNA, 153 bp, Gossypium hirsutum
  Clone ID: LIB3148-036-Q1-K1-A9
cttttaggcattttaatcatactaagaatcttgtatcaccttaagttatgtatgacttttttttgtctgttaaatgtgaaaaattgaatgtataagtagtaaaaccgaaggtttgcaactagtggcaacagccaaatcatcaaatttgacgtg

SEQ ID NO: 36525 - DNA, 409 bp, Gossypium hirsutum
  Clone ID: LIB3148-036-Q1-K1-B12
catacatctgtgttaagaaattgcacccattcactgcctcttcattttcctaccaaccattgccgtatttgtaactatttttgagaatttagtagatgcttttcttcagtcatggttttatgaactaagtagggttcactctcgagtttttgtataataattacgaatagaaattttttattgcattatggatttcaaaaaaaaaaaaaaaaaaaaaaaaaaaaaaaaaaaaaaaaaaaaaaaaaaaaaaaaaaaaaaaaaaaaaaaaaaaaaaaggcaaaaataataaaaaaaaaaaaaatgccccccacctgaaaagataaaaaattttctttaatttgggggggcgccatttaaaggaaccaagttttccttcccgggggttgggaaggagatttttttttttggg

SEQ ID NO: 36526 - DNA, 425 bp, Gossypium hirsutum
  Clone ID: LIB3148-036-Q1-K1-B8
ccagcgtccgccagcgtccgccagcgttcggacaacgagtatgtgtaatgcgtgagcatggatagggtcataaggtcatgggctttctagtgttttcaactcacgagatgatccctcttaatcaaggatattgactcacgaggtcaagaaaacgtgtggtataactagatcaaagaaagcaacaactaccattcgtccaccagagcttatagcaagagaatcaaatcttgcaaagatggtttcagtcacttgacaaggaaaaccctagtcatcacgttggtaccgataaggaagcaggcaatgaaaatgctaacagtgaatgaacaagcaaacaccccttaatcaaaggaattggggtcaaaacaaagcatgatgatcggcacaaaacctggcaaccccaaagttgaaagaattggggtcaaaat

SEQ ID NO: 36527 - DNA, 454 bp, Gossypium hirsutum
  Clone ID: LIB3148-036-Q1-K1-C10
tcccctatatgttttgatgaaagctgtggtcttgcgctggtgaataatttaataatatattgcattggcggtttcttatgggcccacttgaacgcaatattggaaaaactggatcatgaggaactgaatcaactaaaaatcatatgccctttatgatccattagttttaaagaaccggttatatggtatttaatttactttttattgaaccactggtgagtggagatatcaccattttaacattcaatccgggggtttattctatgcattgatctctgaaaaggaaaccaattgataatcttcttgtgaagaaagaattattttgtaattaagaaatgtctttattaaaaaagctggatggaatggatccttcaagttcaagtttttattcctttttttttaaaaattaaccaaatgtatgccaatttaaatgggattttttttaattaaatat

SEQ ID NO: 36528 - DNA, 357 bp, Gossypium hirsutum
  unsure (1)..(357): unsure at all n locations
  Clone ID: LIB3148-036-Q1-K1-C12
atggaaacaagggtgttgaaataacagaaaagatgcaaaaaggagatatggagggctcagtgggggatataaatccatgttttccagatcatgaacaagaaatcaaagagattacaatcgttattgctgagaaaccagttgaatccgacgaaatgaaagcttgattttgattcaatttgtggaaactgcagaaatcgaagcttttaaagacgaggatgcatagatagccttcttgggagagaaaagtaataatttgttattaagatatgtacgaactacttaaataattcaagagtctttatgaactaaaaaaataaaaatccaaatttaaaaatgtatccaaactattatttcnna

SEQ ID NO: 36529 - DNA, 162 bp, Gossypium hirsutum
  unsure (1)..(162): unsure at all n locations
  Clone ID: LIB3148-036-Q1-K1-C3
ctagttcactaattatggcctgcttcactctgtactgtggaaaccccctctggtacactgctctcttaaaccaagttgctagggtgatggactcttttgaggaatgggcatgaaaaggatgtcagcttttctctttgtttcttagntggattggaaaatctg

SEQ ID NO: 36530 - DNA, 352 bp, Gossypium hirsutum
  Clone ID: LIB3148-036-Q1-K1-D9
aacaacctgtcaagcagatattttacaagctgttttggtagcaaaagcgctttgcgagccgcttggactcatctgaacagaattcacttgtgacggtgatacatcttctacaccaagtcactatgtcatattctgggagattaagccaaaagaaggcaacatcaacaacaagaacggcaaagaacttagacacaaaggtaatgggacaatgttgctctaaaatggaagattcatcgcattgtacatatagaatgtgtatgaaggaaaacatgattgcagctttggagattatggttgttatacaaagatctattgaatcattaatgaaatactgtgtgactcaaaggagctt

SEQ ID NO: 36531 - DNA, 162 bp, Gossypium hirsutum
  Clone ID: LIB3148-036-Q1-K1-E3
cccattcaatgggtgggtatttgggatgattagaggaattgtcggcctgttgctagtgctaaggctttcaaagaggttaagtcatctgcgtgtttggtttgtcataaggagtttgtgtttccaatccgggtgttcaagcactccgccctgctttagcctttc

SEQ ID NO: 36532 - DNA, 441 bp, Gossypium hirsutum
  Clone ID: LIB3148-036-Q1-K1-E8
cccacgcgtccggctacgtttcagtgccccataaccgggctcgaattcaatgggaagtataagttttttgcgttgaggaattgtgggcatgttgttagtgctaaggctttgaaagaggttaagtcatctgcgtgtttggtttgtcataaggagtttgtggagtctgataagatggtgattaatggaagtgaggaggagatggcagccttgagggagaggatggaggaagagaaatcgaaaatagtgaaggagaagaagaagaggggaattgatgttgtggatgggaaaaaagattgtggtaagttggaagggaatgaaaagcttgagaatgggaagaaattgaataatggtggggtgaagaagtttcgagctacggatgtggcaccagctaatgcaacaaaagaagtttatgcttccctatttacttcttcaaagaagtcg

SEQ ID NO: 36533 - DNA, 390 bp, Gossypium hirsutum
  Clone ID: LIB3148-036-Q1-K1-E9
gaaagttcttaaatatttgagtttagatcttctttgagagtgccgttgggagtgaaggttttgtgaagagcatacctaatcgggccgggtgttcgacccacccgttgatttgatcaagtcgatgcactccagggtgaaagccatgttcccaatccggctgttcaagcactcgcctgctttagcctttcagacaaccctactaccacctctctgctatccacatgcctctccgcggcgcgtgtggacctgtgccacggatcaagatcttcggaccgaagcgtcgctgtctttttctggcgtcttgtaccgtctccgcaacccttattcaccacccgatgggacttcgacatctaaacaaagggctgataagaaccaaacatgcctttcgcg

SEQ ID NO: 36534 - DNA, 425 bp, Gossypium hirsutum
  Clone ID: LIB3148-036-Q1-K1-F8
cacaataccaactaaaatttgcaagcatattttaaagtattctttcaagcttaggatgatggaatctatccttcacataacataatttacacggctaaaagtgaaataacaaaaatattagagtcagaccttttatattgataacagctttattttcttttttgtatttatcaatttggccttattttaggtttgaaattgagacagttgaggatgaaaaatctgacttgcaaaacagactcagagaagagattgaaggtaataccaaactaagccagtgtggaaaaacgaaagaagacattgcaagggtgtcaactatgtcttgagaaagaagtagcaatattaaaggaagagttacaaagggagagagataagaggacaactttggaatccgttcttaactcatctcaagaacaacccacagc

SEQ ID NO: 36535 - DNA, 223 bp, Gossypium hirsutum
  Clone ID: LIB3148-036-Q1-K1-F9
cccacgcgtccgattagaaatcttactttaagttctaaacgtcggataaatcaactacttttgaatctaaaagttgcattcgaaaaggcattctcattggtaatgccatctgaactctctgattgtaatgttcatataactgaacaccactcggctcgaatagcttatacgtctaattgaacttatattttattaaatgaatgtaatggagtatgttggaatt

SEQ ID NO: 36536 - DNA, 366 bp, Gossypium hirsutum
  unsure (1)..(366): unsure at all n locations
  Clone ID: LIB3148-036-Q1-K1-G1
cccacgcgtncgcgatntgtcagaaattcaagaagctgaacaatagcataatctgatggtcccataatctgccatttttattttgctcggtagctctggctgatatgttatattgggtaattttagtttggtcaccttggacactacttttactcagatgaattggccattcgtccttgatgtaccagttcattggattggaaataccctttcctattcgatgattaaacagagattggagttactgaactaattccatatgcagaaaaggccccttctggtggtgaagagaggttggtacaaaattttcaatacttcgctaggcccgcaatgcaaaaagggagggggttggggggggggttgggt

SEQ ID NO: 36537 - DNA, 354 bp, Gossypium hirsutum
  Clone ID: LIB3148-036-Q1-K1-G10
tcaccgtgcatataatcccaacctctgtccctgtatccgtaaggaacatcatcgcggacagaaaggattccttcccgaatttctttacaacaactaagacagagttcatatgaacattttgggcagctacgatgaaggtcgaagattgaagttgcacagtggtcactgttccaattttagaaagacggtcaatgataacttatgaataacagatacaatcacatgaaaaattgtatgcctatgtagagaggaaatgcttaccaatagatacgttcatcggcataacaaagtgtttgttgtatttcaacttcagaaggcagtaatcctatataaagaaccatttgtcaggaaaaa

SEQ ID NO: 36538 - DNA, 286 bp, Gossypium hirsutum
  unsure (1)..(286): unsure at all n locations
  Clone ID: LIB3148-036-Q1-K1-G2
cttccgaggcctttaaggaatggggcctttttggtggaacccagggggtttttttttcggatttcttccggaaaaagggatggccaaaaatggtggtttctggattgggttttttctttttttttttttctaatggtactgctgcccttgtttctgggaggtgattgtgtaaacatttgtgtactttaattattgtaaagaatatttttaacattgttaattntaatatttttgtaagaatattcagttatcaatttatatcatatatcttttattggaaaanaaa

SEQ ID NO: 36539 - DNA, 291 bp, Gossypium hirsutum
  unsure (1)..(291): unsure at all n locations
  Clone ID: LIB3148-036-Q1-K1-G4
gttgtgtgctagtcaattctggaatttgttgatcagtaaatgtgatgaatgttgcttcactatggatgcaaagggggaaaatttggcgcggataatgtaaatgaaaagaaatagtgggtatttatattatggttactgttgactttgggggtgggcggtttaagggatcaaagtttgcgtacgggggcttgtgatgggataggttttttatgggggctgttggatttattttgcgggctgggtngnatgcctatgttgagaggtaatgctttggtgtttttaaggttattg

SEQ ID NO: 36540 - DNA, 339 bp, Gossypium hirsutum
  Clone ID: LIB3148-036-Q1-K1-H1
cggtctgaaggatgaagattcggtatggcaatacaaagttatatggtagtggaatagaagtatgtagttggagtatcaaaattcgagttagcaagcaaatcaagctaaattggaacacaagcaataaaagggggccgaattgaaaattttgagaaatttatgtttgattagatttttttatttaactttgtaaaagttagatttaaaaaatttttgatataaaatctgattttatatggttggttgttagatgaattaagctaaatttagcatatgaaatgtatataaataccttgtatggtggctttgagaaacaattgagattgaataaaatataat

SEQ ID NO: 36541 - DNA, 274 bp, Gossypium hirsutum
  Clone ID: LIB3148-036-Q1-K1-H2
cccacgcgtccgaaaggtaattaattgggtagaggtggagcagtgtgatgcaaacaagcggccggttcatccaaaagcagcacaaatagctaggaagctaaggattaagatgaaaaacccttgagttaattacacaatctgtgtttttgtaagcagatattaaagtgcattattttttgttggattgttttggtttccaatcactttcggaggttgtctatctctcacatcatcatgtattcgattgttttcacccataagtataacaatattg

SEQ ID NO: 36542 - DNA, 456 bp, Gossypium hirsutum
  unsure (1)..(456): unsure at all n locations
  Clone ID: LIB3148-036-Q1-K1-H3
cccacgcgtccgggagctcacagttagcccgctgtttatggacaaacacacaagacatgggacatgtgaaggaaagtgcagctctggtagccaagttattgggtcttgtggaaccaagtcaagcacccaaggaagtagttggactcagtatcttgccccgatccgtaacccgaagatccagcagctggaaaaatgtcattcctcctctgttatagaagaaggtagagcgcagcacaccatattacggataaaactttagctccagtcaccagcagccttaacgagaccttgctcatgcgcggattgtgacatatacactatatagattgatatatatatatatatactttgcaaggtggtggtgaaatgaaatcatctcaatttctaaattgggagctgcacattgaccagactttttagtaatggattcaaatttgtggattntattttttacta

SEQ ID NO: 36543 - DNA, 448 bp, Gossypium hirsutum
  Clone ID: LIB3148-036-Q1-K1-H5
ccaaatccttcattgacctattgcttaaaccatccgaagaagatctcaaatgctggccccatagttttgagtttcgtctgagagtctcacttgcggctgatggaagtcttgcattaatatcacgaattaggaatgtcaacgggaagccatttagtttctcttttgcctatcatacatacttgtcagtttcggacatcagtgaagtgaggatagaagggctggagacgcttgattacctagacaacctttgccaaaaagaacgctttactgagcaaggagatgccataacattcgaatccgaggtggatcgagtctatctcagtactccaaacgtagttgctgtacttgatcatgaaaggaagcgaacatatgttattagaaaggatggactacctgatgttgtggtatggaatccatgggagaagaaatcgaaatcaatggtagattt

SEQ ID NO: 36544 - DNA, 440 bp, Gossypium hirsutum
  unsure (1)..(440): unsure at all n locations
  Clone ID: LIB3148-037-Q1-K1-A11
cccacgcgtccgaaacacgagataaaccgcaagccggggtttcaaatgtgggaagggcaggaattgatgcaggagaggagaatttccataaccttgagaaagctgtgccaggtcgactagcttatcatcaaacatgtgcttctttgttttttttcttttaatagttccgtttacttatccaattttggacattctctaatttcttctgtttgccagctttgaatgtggaacactaaggaacgtgttccatgcttgaatacttgaatgttttgggctcctgggagttgattgacatgtgtttgggaataacaattggagcttcttttttttttccaaaaaaaaaaaaaaaaaaaaaaaaaaaaaaaaaaaaaaaaaaaaaaaaaaaaaaaaaaaaaaaaaaaaaaaaaaaaaaaaaaangggggcggccgttttaaaggat

SEQ ID NO: 36545 - DNA, 435 bp, Gossypium hirsutum
  Clone ID: LIB3148-037-Q1-K1-A3
cccacgcgtccgctcatgatgagtgacacactttttggtactctcatggaaaaggacaagtgaatacgtaaatattcttttgtaagaactttgataagaaaaatatgacatacactatcatcatctttgttccaatacacttggtaagatttcctatgctgatagttgacagctgccatgcaacttactaaatattgggttggaaatagtagtcaaggctagtttgcccgtttggtagatgctatagttgtgttcaatatgttatggccgaaacggtttgctatagtatgtgcttagctagttgttgtggtatacttttcaaatctctgtggccataaaagctttcttttgagtttctttataaatcctaagaattcgttgcaagccctataggggtgtataatactttgtgctgatgtccattgtagatgtttc

SEQ ID NO: 36546 - DNA, 311 bp, Gossypium hirsutum
  Clone ID: LIB3148-037-Q1-K1-A6
gtaaaaagtagaaaaactaacatattcatgtggaatacatacccgtactcaatacttgcactcgaagttgagtaaacatgacatgatcctccaaagatccttttgatacatgaaaaggaaaaaaaaaacttagacaatacccattttcaacactcatacctgaattcaagtaacatctcccttttttgttgttctagtcttggctttttctagatatcataatgatctggggcatgaaatttcattctcatattttctacattctagttactcaagtataacaacttttttttcttctagcactttttttt

SEQ ID NO: 36547 - DNA, 401 bp, Gossypium hirsutum
  Clone ID: LIB3148-037-Q1-K1-B1
gcgctatatatccttaggagtctctatgacagttacagtgagagccaagaaaacaaagtgaggtgcattatctgctatttccaaaggatatgtttgcaaatgccgacaggatctgtcttatttgagctcaagcttctctctttagaatatcatccttggcaatcattcctctcttatccgtatgctgatttttggaccaaatcaaatatccccctctgcccttttcaggtccacagctcaggcttgatagaagatcacgctattgaggctcttgaagtggattttgctaataaatatcttggtggtggtgctctacataagggctgtgtgcaagtctgatttttccttttctgcttcattgactccattattgacattatggactactcttttcattttcc

SEQ ID NO: 36548 - DNA, 363 bp, Gossypium hirsutum
  Clone ID: LIB3148-037-Q1-K1-B10
cccacgcgtccgctgtatctggtgactctgtcacattatctgttctggcagccatgctgcaaattctgtggtgtgtagcggttgggtgggtcgagttgtctccccacatggtgtaaggttggtacgggggtgtatacggttggatatggttgggtttctgcataaacatgtaatatctgttctgttctgttatgggcttatgggctttattctgaattatgttctgggctaaggccaacttattctatttctgtggtttgagctgatataggctatggttgggttaatttacacacttaattttcccaaacttaacccttttattttcattcacgcaagaaatccccaaccatagtgggcttg

SEQ ID NO: 36549 - DNA, 438 bp, Gossypium hirsutum
  unsure (1)..(438): unsure at all n locations
  Clone ID: LIB3148-037-Q1-K1-B12
gtttgttccaaagctaaaccctaatttggacgaggcatttcactgatcatacctaaaaagaatttcattcaaattccaagaattttgacaattccgagttattaggtgcagggacataaaataccatttaagttttgtatgtataagaaatttaacatcatgaatcgagattgtttatagtcaaaaaaaaaaaaaaaaaaaaaaaaaaaaaaaaaaaaaaaaaaaaaaaaaaaaaaaaaaaaaaaaaaaaaaaaaaaaaaaaaaaaaaaaaaaaaaaaanaaaanaaaaaaaaaaaaaaaaaaaaaaaaaaaaagggggggggcctttttaaaggaacaaagttttcgtccgggggtttggaaagtaaaaatttttttttagggcccccaaaataaaattaacgggccgggttttaaaaacctggggatgggaaaaac

SEQ ID NO: 36550 - DNA, 402 bp, Gossypium hirsutum
  Clone ID: LIB3148-037-Q1-K1-B2
cccacgcgtccgaattttgaatggacattgggatttacaattaggtttggccttcaccatgttgatttcaccactctcaagagaacaccaagaggatcagcaacttggtacaaacagttcattgccaaccacactgctgagaagattttaatgcctcaacattatccagggaatcaactgggacaacatttcaataccatttgaaaaactttgttcaaactttatcttattagaattggtccataaccaatgatcatggctgctgatttctgaaccccgaaaattatttattggaaatctagagtcggctattagggctaaagaagacaaaaaagggttctaaattctgtacaaagcagattatttggagataatatgcatcttatcatcgagttttcgaat

SEQ ID NO: 36551 - DNA, 428 bp, Gossypium hirsutum
  unsure (1)..(428): unsure at all n locations
  Clone ID: LIB3148-037-Q1-K1-B9
cccacgcgtccgaacatgatttacattttttgactaagattttccaactgacaagcatgcctgcttttgcaactgatgggatgtctcgcagagagagagctaatgtgttttgtgaagccatatgtgctgtggatgcgacagatatttctgcaaatagcattcgtgatttccttcttccttcaattcaaaacttattaagagaccccgatacactagatcctgcacacaaagaggccctcgaaataatattgaaagaaagatccggtggaacttttgatgctttgagtaaggttatgggagctcacatcgggattccatcatcaatgactagtatctttggtgagggtgggctgctaggcaagaaagaaagcactgcaccaacatctncagttggatcttcgagagcttgggcatcatccgcacatgga

SEQ ID NO: 36552 - DNA, 435 bp, Gossypium hirsutum
  Clone ID: LIB3148-037-Q1-K1-C12
cccacgcgtccgcccacgcgtccgattatttattgcatgatacagaagttcctgccccaagttcgagggatccagcacagtctgatctatcgacccacaaggaatccgtgaaacaagatttttctcaatcggcagctcatctaaacttaaacgatgataaggcaagcaatacattgaactctggcactgaagttctgaaaggaattgaagctgtgagtgctggtttctctgtaaacttatctccaaagcaagatgagaggagaccaaaaaccttggagcacaacaatcccgagaaaccgatatgaccagtgaacaatctttaactccattattgactacaagacataaccgaaacgagcaagccatgtgtacatttattgctttaaagtggttaattgatgcatgttatgttactgctgtataaatactggatct

SEQ ID NO: 36553 - DNA, 139 bp, Gossypium hirsutum
  Clone ID: LIB3148-037-Q1-K1-C6
ccgaattcggtcgacccacgctccgaaagccgttgaactgttactatgaacttcggatgcggatttgattgcggagcaacatatatgggcggcggtggatccctaccccaaaaaccaaaccttttacctgacttatggg

SEQ ID NO: 36554 - DNA, 395 bp, Gossypium hirsutum
  Clone ID: LIB3148-037-Q1-K1-C7
cacaattacatgctctttagaatgcatattatgattgatgaaagacacatagcacctaacgacacacacagtcttgcttgaaattctctaattgtgaagacctaatgtgtactttttgtctggttgtagtttgagtttgatcagaccttttttgactcttatgaatttgatggagtggaattcctggcttcagctaactggattttcaagtgttttctgcaaagtctagaggatattgagctaactggtttccaatcaagttcttgggggtccgaatttttagtgaggttcatgagatttctgctcaacaacacaaaagtgctcaagaaggtgactatctatgaacagggtggcactcttcttgaatcctggcaattttctggaccaaacatgaa

SEQ ID NO: 36555 - DNA, 193 bp, Gossypium hirsutum
  Clone ID: LIB3148-037-Q1-K1-C9
aaaaaaaaaaaaaaaaaaaaaaaaaaatttaaataaaaaaaagaaaaaaaggaataaaggataaaagggtacaaacatataaatgcagaaataaggaatggggtgttgttttatcggagctaaattaattgagtcgttggttcgcaagttttctgtttgggaatatggttaaattaattgaatttactgactt

SEQ ID NO: 36556 - DNA, 118 bp, Gossypium hirsutum
  Clone ID: LIB3148-037-Q1-K1-D10
cccacgcgtccggtccaattagtgctttggaaaaggtcttttagccttaattacacgatctgaatgtatcaaatgtcgtaaaatatgcgaatatgaatacataattgggttggagtgg

SEQ ID NO: 36557 - DNA, 444 bp, Gossypium hirsutum
  unsure (1)..(444): unsure at all n locations
  Clone ID: LIB3148-037-Q1-K1-D4
cccacgcgtccggtgaaggttaaacttaaacaaagaagacccaagaaagcagtgcaggtatctaccacttaagtgcatttatctggctgtcctgataatatattggctatgttttcggttcattctaaagttctcgagtttgctaaatgaaatcactgtcctaatgatgcaatattaattcatagcaagtagatgcttgttctttctgtttcatggtagaaaggatcagtagttctacagattttctgccctagtaaatgtacatatgctcactttgtaaatgtttgattatttgcgggttaattgatgaagcagcttcttcttttttttgttgaannaacactngcctggggggttcaattgcaataataggttgaatcaataatggttcaggggaaaatggtgatgcagattttcgatatgttggtggtgcttcaggaaaaa

SEQ ID NO: 36558 - DNA, 233 bp, Gossypium hirsutum
  Clone ID: LIB3148-037-Q1-K1-D5
cccacgcgtccgatcattgtggaagtgatatccattattgttatatgtaatttagcttttagactgttagcgtaagttttcaacttagtttcatgttccatccttaagatgcaagtgaaagtaatttctttctgtggatgttggttttaatgttaaatgtagttctaaggcactctgaattccatgattacttgcatttggcatttgagagaaaagtaactcttatcattgtc

SEQ ID NO: 36559 - DNA, 385 bp, Gossypium hirsutum
  Clone ID: LIB3148-037-Q1-K1-E12
cccacgcgtccggaccgattgtcctatgttatataactcgtcgaagcctcaaaaggtgttgggttgcatttgtatctgtaaaaaaaaaaaaaaaaaaaaaaaaaaaaaaaaaaaaaaaaaaaaaaaaaaaaaaaaaaaaaaaaaaaaaaaaaaaaaaaaaaaaaaaaaaaaaaaaaaaaggcccgccaaaaaaaaaaaaaaaaaaaaaaaaaacgccggcaaacaaaaaaaaaaattttttaaaagggcggccggggccctttttaagggcccaatttttaacaccgcgtttattaaaaaaaccctgtttttaaacagctaacatattttaaaacatcccccccttttaaaaaactggttaaataaaaaaaaccccccccccccc

SEQ ID NO: 36560 - DNA, 278 bp, Gossypium hirsutum
  Clone ID: LIB3148-037-Q1-K1-E3
cccacgcgtccgaaggcatatgtactgtaatgctcctaccacacttcgattcaataaaaataaagggagccaaatatataaattaaaataaccaaaacatacaaacataattctactaaaattaatactaaaattgaatcatgaaagtcctttgtttcattcgatagattctcatcattctaatatcggatctcaagtgaagttcatggatccggggggctttttttaataatcataccttaccaacactctctattatctgcaaatatttttttttc

SEQ ID NO: 36561 - DNA, 229 bp, Gossypium hirsutum
  Clone ID: LIB3148-037-Q1-K1-E7
aggatttcgatcctattgtgttggccttcgggatcggagtaatgattaacagggaagatgatttcatggacttctaaatgttgtcattcttttttcttatcacaatattggagcttcgattttcagatgacattggtgtgctgtaaaactaacagacaaggggacaaacaccatttttaatgaataaacacagaaaatcaaatgaattatggctttcttttttcttctc

SEQ ID NO: 36562 - DNA, 363 bp, Gossypium hirsutum
  Clone ID: LIB3148-037-Q1-K1-E8
gccacgcgtaccgaaggaacaggttactgccatgcaggatgctgcggatattatcggtgctcacggtgctggtctaacacatatagtgtctgcaacaccaaacaccgtgattctcgaaattattagcagctttttcagacggcctcactttcaattgatcgcccaatggaaaggattggaatatcatgccattaaccttgacggatcgtatgccaatccaggagttgtcatcgatcggcttaacaagataatgaggagtctcgggtgctaagaaattattattttttccagattttatttccaatccggcacttatggaagaaacttagaagagattgttttcctttcaacagactgttttca

SEQ ID NO: 36563 - DNA, 429 bp, Gossypium hirsutum
  Clone ID: LIB3148-037-Q1-K1-F12
cgttttagtaatatggtcgggtctcagttaataaacacattgtgttcgaagattggtcggtttcctcgagctgattgtcgtgtgcttgaagacattgatgcattgatcgacaaagatttgccggagatgaaactccggtgtgtgatggcgtatgaagaagaaggggaagggattgtgtcggagatcggaaacagcatattagaggcgttggtacatgaaacggcagctgatttcgaattttgttttgctggtttcaattttcaaaagtctcgtcttttagaactaaacggtgccgtttaatgtttgaatagtggtgaatgagaacatatcacatgggtgattcacgtgatgagatgctattcgttggggtctttgtaggactgtacacgtggataagtatagctgttggaccttttttttatatatata

SEQ ID NO: 36564 - DNA, 367 bp, Gossypium hirsutum
  Clone ID: LIB3148-037-Q1-K1-F7
cccacgcgtccgcaagccatccatcaatggttgaggaggaggaagaggaggatcttgggtgggatgaaattgaggatctcagcagcattgatgataagaaagaaactcatggtgggagcccgagctccaatagggatgagctgaggaagagactaagtacagctgaagaagaggaggatttaagctgggatattgaagacgatgacgaaccgattaaagcttgatgaaaagccttaagtttcatctgaaattgttgatgtttattgctcataatttgctgcattgtttccttttttttcccttgtgttcctcatatttgtcccctggattcatttctcgtttgaaatgcaaacatctattatcgtgt

SEQ ID NO: 36565 - DNA, 450 bp, Gossypium hirsutum
  unsure (1)..(450): unsure at all n locations
  Clone ID: LIB3148-037-Q1-K1-G10
cccacgcgtccggtcgagaacccgttgttccgtgaactggcggaacgatccggagatcaaaacgacgccgtcatcaacgtgccgtgcgaggttgtgttgttcgaacacttgctttggatgctcgaaaacgccgatcctcaacctgagtcattggaggagctcgtcgagttttacgcttgttgattttttttttctttttttatttttgaaaatcagaagaaatgctcccgtgtggtcgttcgcatggtaccaaagttgtacattatgtgataatgttgagaacggcgatgaaaatttggaggatgatcagatagttaacgagagaaagtcgatttcaatggcgaggatttaaccgagttcatgccccggtgaagagatttatatttgtgtatgtcgntgntctttgtcatttttcttaaaaaaatttttaagagattaatgaatgttcat

SEQ ID NO: 36566 - DNA, 415 bp, Gossypium hirsutum
  Clone ID: LIB3148-037-Q1-K1-G11
ctttgattgctgaatgcttcaggaaacatcacaaaatgctttacagacgttgctagattcatatatatatggtattgagtttattttgttattttccatttctttctcaaggaaaaagcatatggtaaatggagcctgaatattcaaaatacatatacttttgaattttgagtttatttaaatatatataatcaaaattgtgatctttgcctcaaaaaaaaaaaaaaaaaaaaaaaaaaaaaaaaaaaaaaaaaaaaaaaaaaaaaaaaaaaaaaaaaaaaaaaaaaaaaaaaaaaaaaaaaacaaaaaaaaaaaaaaaaaaaaaaaaaaaaaaaaaaaaggggggcccgttttaaaggatcaaagtttcctccccggtgataaaaaaataaaattttttttttggggcccccaa

SEQ ID NO: 36567 - DNA, 165 bp, Gossypium hirsutum
  Clone ID: LIB3148-037-Q1-K1-G12
tggataaaaaaataaataaaaaaaaatttatttttcggacgatctaaaagaattcaagcgggagggcgcgtaattgcgaacgtcctacttctaatatattgtaacacaaaattcaattaactggctcgcgttttacaacttcattaactgggaaaaccctaaaat

SEQ ID NO: 36568 - DNA, 302 bp, Gossypium hirsutum
  Clone ID: LIB3148-037-Q1-K1-G3
gccacgcgttcgggttttctattccgccaactctccctccaatttagatgcagatcttggttgggaccctgaccggcatgaccatcacccttgaagtcgcgagttacgacacgatcgacaacgttcaggcgaaggtccgggacacggcagggatcccaccagacctacaacgtgtcatattcgtcggaaaacagctcgcatatggccggaccttggtcgattacgacatccagaaggagttcaccctccatctacgtctccgtatacgtagcggcatgcaaatcttggtcagaaccatgatc

SEQ ID NO: 36569 - DNA, 427 bp, Gossypium hirsutum
  unsure (1)..(427): unsure at all n locations
  Clone ID: LIB3148-037-Q1-K1-G4
cggacgcgtgggcggacgcgtgggctctagcatacttattgtagacacaaatttagagatttggtggagctgggttggcatgaaatcacaagaatgatacatgtcttgagaatttttctgtattgagaaagtgacctttagaaactacagatataatgggtatttccattgacaatggtgatgctcttttcttatttatatacatatatacatgtaacactttttacccgtatccgttgtcggaatagagtacgaggcattattgnaaaaaaaaaaaaaaaaaaaaaaaaaaaaaaaaaaaaaagaaaaaaaaaaaaaaaaaaacaaaaaaaaaaaacaaaaaaataaaaaaaaataaaaaaaattctaatnacacctaaaataaatatataaaaaagggggggcccttttaagggacccaagtttt

SEQ ID NO: 36570 - DNA, 464 bp, Gossypium hirsutum
  Clone ID: LIB3148-037-Q1-K1-H12
cgcgccacgcgtacggcaattcacttggaaatacggcaatacaccaccaaagaagagcacctaggtttaaaaacagagttttatgcgtgctggtgaacagaggaaactgcaaccactgaaagagtggaagctcgtatcgatgcagtacaaaagctttggattgccattaatggagggttcagtgagaggtgaagcctgtatttcccaaataaaacaaactcttgcctgtggtttgtagctagtaatctcccaattcatgtattactgtggtttatgtctttattctaatgttattgtgtcatgttttgtatcgcgttcgaaataatcaagtccaagtttctacttagctttacttggacgaataaggttttacctgttgtttgataagtatacctttctattgttatactggtctctcataataatataatcccatttatatgggtgaattctgtataagttaa

SEQ ID NO: 36571 - DNA, 338 bp, Gossypium hirsutum
  Clone ID: LIB3148-037-Q1-K1-H7
ctgtcgcgaaagaaatgagagagaatggaactgtctgtggcattgatggtcctgtaactggaattactttttctgctgattctgggaagaaaaagatccttctcctaaaaccaaaagatcgagaggcacctaatgtgccagagggtgcatctgaacagcagggtgcatcatctcctgtagtaaattcacctggttcatctgcttcaagacagggtcaaagacgcaaggctggtggaaagttaataaggagcatacttttgagaaatgaagcgggccaaaatcaatcttcagcggcagtccagcctcaacagaaaactcaaagtccggacactgtcaaa

SEQ ID NO: 36572 - DNA, 308 bp, Gossypium hirsutum
  Clone ID: LIB3148-037-Q1-K1-H8
caaaattgttccatctcatgcattcatagaatttttctgtcttttgcgtttctttggggtatacaactgtttttccttttgctgttcttttttttataaatgtatttttggttagcactgcttagagaaaagtgatactattataatcacaatttgggcatatgacattaaacacagtttactgaggcaacttatttctgtgttgccttattattataatattattattattggttttaatgaaattgacgctataatgcatgtagaagataaaatacaccctgaaagtggtgctccccgtaatggag

SEQ ID NO: 36573 - DNA, 372 bp, Gossypium hirsutum
  Clone ID: LIB3148-038-Q1-K1-A4
cccacgcgtccgcccacgcgtccgcccacgcgttcgcccacgcgtccggaacagagcaacaaaacgaaggaatattcaatgtttgttccctgcaatggcggtttcaagcatagacactcaaaacccacccagcaaagcgacagctccgatcgaaattcactgcgttaaatgtgagtcctgcggcttcacagaggagtgcacccttgcatatatactgcgtgtccgggaacgttaccaaggccgttggatttgtgggctgtgcatcgaggccgtcaaagatgaggctctgagatcggatacgcttatttccaccgaggaagcactggaccgacacatcaaattctgcaatcagttcaaggcgtcgagttcttt

SEQ ID NO: 36574 - DNA, 182 bp, Gossypium hirsutum
  Clone ID: LIB3148-038-Q1-K1-B4
agaaatgcagcaaatttaacttttaatcatgtctttgagggaatagatcgtgtagtaattgtatggatgttgagtattgagacagaggcaagggtttcgggacttgtaaattccttcatcatatcgaaaagctctttcgggagaactcagattgaatgtaaattcttgccaattttctcttc

SEQ ID NO: 36575 - DNA, 193 bp, Gossypium hirsutum
  Clone ID: LIB3148-038-Q1-K1-B5
aaaaaaaaaaaatagggtatacggtcgcctgatttcagggggctgcccttcttttggccaccatcttccttgcgaatgctttcaccgttactcatttttttttggcgtgccgtaaattcatttaacggccggtggtgtaataactttgaggttggaaacctttggcctttcccacactttctccctttgaatg

SEQ ID NO: 36576 - DNA, 330 bp, Gossypium hirsutum
  Clone ID: LIB3148-038-Q1-K1-C12
attattttttgggtttatatttaatgggcctgccaaatttgggcctatacagacggttatagcttaaaaatgtttgttcaaattaactcaaaaataattattatactgggtgaaataagttcgtcgcttaaatatatctttattttaaaactgtaacaaatgaacttaactcattgggttagaaaatgcattgatgaatgggacaacttggtcgggccatatatacgatccaagctgacaagatcgttcctacgaggttataggtgtttgatagagtagctgaatgtaatatactggacatgggagtaaaacggccatacatgaaaaacc

SEQ ID NO: 36577 - DNA, 415 bp, Gossypium hirsutum
  Clone ID: LIB3148-038-Q1-K1-C8
gcatcggttacccaaacggtgttcgaccaaaaccccgttgccattttcggggtttccaaggttttgttgcctagagagatttttgggaaagactcggctggagtaacatcgaagccggggaatgcggtggtggggacgacagttcagccgccggaaacatctccatcaccggagaattcggccgggtttagtggtccagcgtcacatctttcatcgccgccgggatttcgtgaagagataacatcgaagggtggaagatatagaatgcaaagctgcattgttactgtatgttgtataggattggttctagtggtatgagagcttcagccttgaaacctatttactagcttcaattgggttgaattccttgtataatttcctgtatgagatgttggtcaacaacttgtttttttta

SEQ ID NO: 36578 - DNA, 420 bp, Gossypium hirsutum
  Clone ID: LIB3148-038-Q1-K1-D10
agatatgaagactgagattaatgtggtgctgccagttcttgaagcaagatcagcagaagatattgatttggcttttaagcaactgcatgaaggagctgatgttgaggaagtaattgttccaagtatgattgtggaaccacaggatgacacagataacaaatcaaaattacctgttgtggaggcaagatctctgaaggaattacataatgctgtccaacaaggccgggaatctgatccagctaagctgccgcattcttcaggtgtaaacaatgctggtggatcaagaccttgaaagtaagaaggcaaaaactaatgactcaagttccagctctagctctagctctagctccagtgataatgaatgaaagcaacaaaacatagttcagaaagttagaagagagtttgtgggttcaagtttct

SEQ ID NO: 36579 - DNA, 188 bp, Gossypium hirsutum
  Clone ID: LIB3148-038-Q1-K1-D2
gtagaaccccgttgaagctttttagtcattctgtttcttcaaatgaaatctctctctttttgtcaagtgaaaaatatacatattttgtacttccacataaggaaatgaaatgacggtaaagaagtacttatgtatcaaaaatgaagggaaaagaaagataaggttgttcataaggtgcaggtccaatc

SEQ ID NO: 36580 - DNA, 188 bp, Gossypium hirsutum
  Clone ID: LIB3148-038-Q1-K1-E10
gacaactgtaatttgttttccctttgtgttttccaaatcaaaattcactgcttgtatgtattttgtgttacctttctgaaagagaatgttcagaaagttgtgtttttaccataaaaaacttgttaaacacaactcgttggagtactggtttttgatgtttaatgggacggatggattaatctggatgc

SEQ ID NO: 36581 - DNA, 374 bp, Gossypium hirsutum
  Clone ID: LIB3148-038-Q1-K1-E11
ggtgtcattgtagagaaaggaaaacatgacaccttgataaatatcaaagatggtatttatgcttctttggttgcacttcacatgagtgcttccgcttcataaaactattttctttttttggtaaccataaggatcattttcttattcttttctctgctagcaaatctgatcttataagcattgtatcttataataaatttatggttaaattacctaaatggtccttgtactataggttgaaatgtctattagaaaattgaggaatttaactttgaagcaaactgttaaatttacttgatggataatttggtcttactattgcatataatatgggaataaaatatcatgaattcaatgaaaaaaaaaaaaccccc

SEQ ID NO: 36582 - DNA, 166 bp, Gossypium hirsutum
  Clone ID: LIB3148-038-Q1-K1-F10
caccttttgaagactgttttcccttttcatcaacaccataaaacttataagtgctaggaagatgctacattattcggtaccttactttgttcgaagtgaggcatattttgtattattccggtatggatgataaataaagttgacaaaagtagctttttacttgacc

SEQ ID NO: 36583 - DNA, 288 bp, Gossypium hirsutum
  Clone ID: LIB3148-038-Q1-K1-F12
cgcggaatgaatggcccgaccgacccacgcggccgggcattttagcggatattactttgctttctacattaagaaaagacagtaactctacaagatactcgcggtacgcgagcctctaagcgtcatatatgtgcagccatctggagattgcgaggcagactgatacttggagataactattagctccaaccatgcctacaagcgtagacattctatattatataatgcaggcagagaaagtatcaactaacgtactcccacattggttgtttcttatggtaagggaat

SEQ ID NO: 36584 - DNA, 417 bp, Gossypium hirsutum
  unsure (1)..(417): unsure at all n locations
  Clone ID: LIB3148-038-Q1-K1-F2
ggaattattacaaagaatgcctagatgtcgatggggtttctttcatgttgttaacaatgactacacacattggaaaatgtatgctattggtggtagcatgcatcccaccattatcagccaaggtaacaggttcattgctccgcatgaccccaatgccaaagaggtaacttataggctctatgcatcagagtcagaatggaaaaattggatatggagatcagaaggagacgtactccttaatggagccatctttagaacttctgggccactctcgccaccccatttgaaattcaacagaaaggaaatgatcaaatccaagcctggagcatatgtcagaagactcactcgtttcgcagggactcttaattgtaaaaaaagaatcaaatgttagatgtgatgttcaatntaccaatcttt

SEQ ID NO: 36585 - DNA, 271 bp, Gossypium hirsutum
  unsure (1)..(271): unsure at all n locations
  Clone ID: LIB3148-038-Q1-K1-F6
cgnatattcaatgacattactttgctttctcagttaagaaaagacggtcattcttcagtctactccggagccggccctaagctcattgattgcagacattggagacttgctggcatgcctgatacttggaatcaactattatatgcagccttcttctcaaagctaagctattctttttcttatagtgtggggcgaaaagttacctactctcttacaaccacattggttgtttcttatggtaagggaatcaaaggctagctacaataaaaag

SEQ ID NO: 36586 - DNA, 385 bp, Gossypium hirsutum
  unsure (1)..(385): unsure at all n locations
  Clone ID: LIB3148-038-Q1-K1-G3
cttggatggttatttatcatgatgggtgtgatcttgcttgtgagctcgacgagactgatgcggcacctttcatggccattgcagaacttaataccaagtggagcagaccggaatttcagtctgaggaaaacggggtctcatcgagtcaaggatcctagcccagctgctgttatcccagcaacaacattgcaccatctgataccaacaccggctaaagagaaggcataagccaagaatgcaaaagatgactgcataagcagacaaatatgacaatctgcgatcaacttttgagtcttcagtctgggtactgtttccatttcggagggcatgaaattntttaagatcactctcccattgatctgtttgacatcattgacattataac

SEQ ID NO: 36587 - DNA, 262 bp, Gossypium hirsutum
  Clone ID: LIB3148-038-Q1-K1-G5
tgatttggaagctggatagatgctccctgaattttttagaagcagtgacggctcaagggggaaaaggcagaaaccgcggagtttcctgccttaatgtaataggttgggccaattgggccacttttatttctgggctaggcagggtgtaatgggtaccgggtaatttagctgggttttgggtttgggtttaagctagttgggttttaacttttgcgctgtaaaaggattgtttaataaataaacatttatttttttttgtttt

SEQ ID NO: 36588 - DNA, 405 bp, Gossypium hirsutum
  unsure (1)..(405): unsure at all n locations
  Clone ID: LIB3148-038-Q1-K1-G9
gcgctttcacttctgactacatctttaggcaattacctgagttcttttattctaactcttgtaacttacttcacaacaaagggtggccagattggttggatatcggacaaccttaacgagggtcatctcgactatttcttctggctcttggctggtctcagcttcttaaacatgttggtgtataccctttgtgcttcgaggtacaagcagaagaaggcttcctaaagttccttctcatatggagagaaattaagctgaaatgttgttatagataaaaactgtatgcatctcaatacagggacatccttccactttggaaaccaactatcttgtatcttattgggttatattcattttctagctgattctcgcatattgtacattaatactgcatggntttcaatt

SEQ ID NO: 36589 - DNA, 415 bp, Gossypium hirsutum
  unsure (1)..(415): unsure at all n locations
  Clone ID: LIB3148-038-Q1-K1-H6
gtcgatctgtcgtacaggttttggtaccggagcactctagtgacacgaggaaaataggaaacctccgcacgacaattagaagggtaacctggcatttcagcccttcgtcattgacacgtaggggtcagattggggagttggagtttattagagccccaatttttttcggcacaatgagcgttgaaatnggagaacattnnttgatggcgatattagaagcgaaaagcgtgagagcccatttttaatgcgcgatgtgccattattgcttgaaaaaacacattttgtttttgagagagaattttgtcatgtaattttgatttcatttggattgaaaaggattggttatttgtagattagagaaatatgtttattttgaagccagccctttttagacaaatcaaagtgaaagttgcag

SEQ ID NO: 36590 - DNA, 283 bp, Gossypium hirsutum
  Clone ID: LIB3148-039-Q1-K1-A1
cttttaccttttgaaagtggaaatcatggagtactgtctgttagtaagttacccattcatgtggatagcttctttgcaccctgatatcagagatcgagtgttctttttagagggtaatcatatgcattctagcattcagaaggttcctgctttggtgcttgactgtgaacccaacatagatttcagcagagatattgaagcaaagagacagtatgctctccaagttgcaaaatctttggatttggtgaaaaaaaaaaaagaaatttcacctactaaagctggg

SEQ ID NO: 36591 - DNA, 305 bp, Gossypium hirsutum
  unsure (1)..(305): unsure at all n locations
  Clone ID: LIB3148-039-Q1-K1-A11
gttgagttgcctgataagactagtttgaactacaattctaatggaattgttttgtccctagacccttgtatccagactcaaactgcaaactctttcaatattttgataatcctaaacgttgaattataaaaaaaaaaaaaaaaaaaaaaaaaaaaaaaaaaaaaaaaaaaaaaaaaaaaaaaaaaaaaaaaaaaaaaaaaaaaaaaaggggggaaaaaaaaaaagaaaaaaaaaaaaagaaggaaggaaaaaaaaaaaaaaaaggggaaaaaaaaaaaaaaaaaatnanggggggcgcccctttt

SEQ ID NO: 36592 - DNA, 149 bp, Gossypium hirsutum
  unsure (1)..(149): unsure at all n locations
  Clone ID: LIB3148-039-Q1-K1-A2
taaaaccacccccacatttaatgggttgggtttattattaaagtcgcactagccacacctacatttaattntaaatatcttcccacacaaattttggcctatacacttataactttcagtactaggaacccacgcatcaataaccatag

SEQ ID NO: 36593 - DNA, 296 bp, Gossypium hirsutum
  unsure (1)..(296): unsure at all n locations
  Clone ID: LIB3148-039-Q1-K1-A3
gtatttttcatttttcattttcacgcctaataaaacagatgatttaagaaccaaacaaaacaagaggaaccatcaaagatccaaacttttcctttcctaacgactcattctgaaaggaatctattcttatgatggcggaggaggatgataccagaagtggtcacaccacaaagtcccatcccgattttattttatttttcttctcctttctaagatctgttaataagattaatttctctttatcgatctgtaaatttcaattatttcttttctaggattngaaaanaaaannnnaa

SEQ ID NO: 36594 - DNA, 179 bp, Gossypium hirsutum
  Clone ID: LIB3148-039-Q1-K1-A4
gtttgtagttgggcctaggtttagttttaattttcagtgatttgggtttttggttgttaattcgtcgttaggctggaattaggtacttgggctcgggctaaaaattgggtctacaatcaacattaatattgttttttatttttcctcaatagtttttgcacacaaaccaaaatgtatgc

SEQ ID NO: 36595 - DNA, 185 bp, Gossypium hirsutum
  Clone ID: LIB3148-039-Q1-K1-A6
gctgagtggtttggttttaatagttagggttgagttgtaaaaggacttggacatttaattgatttggtttatgattttatttttattattattttttgttttgattttaggtatgggcccaggcaaatttgggcctatacacttataactttcagtactaggaagccacgcatcaatagcaattg

SEQ ID NO: 36596 - DNA, 417 bp, Gossypium hirsutum
  Clone ID: LIB3148-039-Q1-K1-B11
gcttcaaggtgaattcgctccttgggaaccaactagtgctctctacgagtttgtgagctcagcactgaaagaaccgtgcttggagttcgagctgttagatccggtaattgttaaactacgagtgatcccatcatttcctgcagcaggggagaaaggcaggacgctggaggaagaagatttggttccctcagcacttattaggttcaagcctgttgaaactgattctgtcgtcttcactggcctttctaatgaactcctggaaatcagtgagccccttgtaactaattgactaaaacccttcatctctatttgttggggaaatatacccaaccaattattatatgcttcgatttttaaagctgtgtggattcttagtgtgacatagcctgaattttctcccctttctaaatcatcaaa

SEQ ID NO: 36597 - DNA, 365 bp, Gossypium hirsutum
  Clone ID: LIB3148-039-Q1-K1-B4
cccacgcgtccgaaacaatgaagctgcaggacgtgctgagtccttgccaattttgctatgccatggagaaggtgatgatgtggttccatataaatttggtgagaaatcgtctcgggcattgacttcaaagggatttaaggacatgactttcaaatcctacaatgggcttggtcactatacaatcccagaggagatggaagaggtatgtgcttggttaacttcaaaactggggctcaacggtcgatccacataacgaatgtaatgcggaaatgtttatgcattacttgaagcaaagttgttctggttgtgggtgtcatacatggtattgtgataattttgcataccttgttgtagttgatgttttc

SEQ ID NO: 36598 - DNA, 345 bp, Gossypium hirsutum
  unsure (1)..(345): unsure at all n locations
  Clone ID: LIB3148-039-Q1-K1-B5
gcaacattgggtccttgacattgaagctgacgaaagatgatttgaaagaaatgtgtgatgcagtgccaattgaagaagtgaatggtgaaagagaatatgatgtttttgctcagtattcctataagtttgcaaatacccccaaaaagtgattgtaaatgtaaagctaaattgctagaatcgaaaagcttatgccgatccatgaagactaatcttttcgagattcatgattgttccatccaataatattatttccatgatttgaaattgagtttgcaatatactttacagttgtacaaaaaacttgttatacttttccagattataaatgctttatattactccnna

SEQ ID NO: 36599 - DNA, 386 bp, Gossypium hirsutum
  Clone ID: LIB3148-039-Q1-K1-C10
gggttttattaatttatcctattttactactctgttttatgaaaaatctcattagtcaggtgtcaaaaaaaaaaaggaaaaaagaaaaagaaaaaaaaaaaaaaaaaaaaaaaaaaaaaaaaaaaaaaaaaaaaaaaaaaaaaaaaaaaaaaaaaaaaaaaaaaaaaaaaaaaaaaaaaaaaaaaaaaaaaaaaaaagggggcgccccttttaaagaaccaaattttactaccccgtccatccaaaataaaaatttttttatggggccaccaaaataaaatcacctgcccgctttttaaaaccggtgtaattggaaaaaccttgggttacccaaattaaatccctttgaaaaaaatccccttttcacaagttggcataatacaaaa

SEQ ID NO: 36600 - DNA, 345 bp, Gossypium hirsutum
  Clone ID: LIB3148-039-Q1-K1-C8
cccacgcgtccggatggttccttttctgttcactttagtaaaccagtatgccgacgtatgcagcttgcaacaagtagagtgagtcccctctattgaaatacaatttaaacccatgtcgaggtagcagtagagaaggtaataaaagcagtgggtgagagtcttaaggttgatgaattgtcgataagggttggaggctttggcggctactcaaaataaacttggaaactatttcatgttccaacttccacctttcaactacgttctaacttccatctttcaactaggtgtcatctgtactattaagaaaaaattaaatgacttaattaaaatcattagttattatgg

SEQ ID NO: 36601 - DNA, 412 bp, Gossypium hirsutum
  Clone ID: LIB3148-039-Q1-K1-C9
actaaattggttaaaatcgggtcggttccggttttattaagtatggttaaatcgggtcatatgacgggtcgggtattccttatcctgtgtaacttggcttcgggttcggacgggcgggctgcgatgttggattcgggtgcggtggattgtctggtgaaattgttgaaagggagtgagttggatgagccgactcgggaaggttgtgtagcggttttatatggactgagtcaagcagggttgaggtttaagggactggctaaggctgccggtgcagtggaggagttggcgaaggtggagcggacggcaaatggtctgaccagggagaaagcaaggaaaatgtcggagatgttgaaaagggggagtgaggaggagcaagaggaagtggactgggaggcattgcttgactcgggat

SEQ ID NO: 36602 - DNA, 319 bp, Gossypium hirsutum
  Clone ID: LIB3148-039-Q1-K1-D1
cccacgcgtccgcccacgcgtccgcccacgcgttcgacttcagaacaagagtcgtgctttacagctgctaagagcaaaattgtatgaaataaaagtaagggagcagcaagagttaataaggaaccaacgaaaatcacaggttggtactggtgctcgtgctgaaaagattcgaacctacaattataaggacaatcgggttactgaccaccggctaaagatgaactttgagcttacatctttccttgaaggcgatattgagaatgcagttcaggcttgttcagctatcgaacagaaggaactccttgaagagcttgctgag

SEQ ID NO: 36603 - DNA, 404 bp, Gossypium hirsutum
  Clone ID: LIB3148-039-Q1-K1-D12
cccacgcgtccgctcatttccccatttcaaaaaccaaatcaatccggttcttctctccatcttctttccggaactggtgcgctgtgactcctcccttccctcaccaggtatgatgcttcccttttctctagtgctcctttcactaggttatttgcttgaacattttccgatctaggaataaactagaaaataacatcttgaagactgtctctttttctctgagtatctcgaatgatcgctccaagaacggatttgtctacttcttgcgatttacatttcttaataactgttttcgagtctccctttattattactgaaaataaacccattgatgttactaacttgatggcctctaaccctgtatgagcttcggctacgaatgaggaggagatattttcatggag

SEQ ID NO: 36604 - DNA, 258 bp, Gossypium hirsutum
  unsure (1)..(258): unsure at all n locations
  Clone ID: LIB3148-039-Q1-K1-E1
cccacgcgtncggaaagaggtgccgcagactgcgtcggagactgngatgtcgggttggctgaggaagaacgtgcangaaggaaaatatgtagtggataaagcttaagcttaaatggttgaaaatattgtgaaaaacaaggctattaaattgggtgatgagctggtcttggaatgccaaccttaaaggcttggtgggagaaagaaccttaaccgaaaggcttacttggaatgcttggctttgtattggaaggtaaagga

SEQ ID NO: 36605 - DNA, 254 bp, Gossypium hirsutum
  Clone ID: LIB3148-039-Q1-K1-E3
gtttgtcggcggcatcttacatcgggcaccttgatttgagttacaaccacctatgcgggcggattccggcgggagcaccgttcgatcatctggaagcatcctctttcatgtacaacgattgtctttgtggtaaaccgcttagagcttgttgatgacatggttaataaatttttatctaccgcttatatctattgtattattggaatgataatgtaaaccctacttaaacagaaattataaaatataatttactt

SEQ ID NO: 36606 - DNA, 332 bp, Gossypium hirsutum
  unsure (1)..(332): unsure at all n locations
  Clone ID: LIB3148-039-Q1-K1-E6
ctctccctgaaatcgcttgaattttttttctcgtgccagtcgcgcgacaggaaaataaaagacgtggttagtaacggcgagagctcctgtaagtggaagcgattttttaaactacggtcgatgtacgtgaatatacttcagcagataacctctactcttttttcaacatttgaaacattcagtttctttttgttgttcataattttgttactgtatttttttcgctgatgaatcaacacccgaaaaaaataaatcaatttatganttaacaaanccaaaacaaaaaatcaaaaacaagaaacactaaaaaactctgggcgctgaatgactgc

SEQ ID NO: 36607 - DNA, 307 bp, Gossypium hirsutum
  Clone ID: LIB3148-039-Q1-K1-E7
gaaggatatgaaggagatttacttcaaacagttttttgaatacacaatagaatgagttaatattaggtttagcacactgactttttattctttttcaagttttattcatgtatagagaaaccaaatgatagggtggattggtccttaaaccaatgtttcattgggagaaaaatagagtttggaaggtaattttagccacctgagacggattccgactctggcggctataggtgttccggttgaagttctaccggttgccgaaaaggctacattgttttattggtttattaaatttatcgcttatatt

SEQ ID NO: 36608 - DNA, 268 bp, Gossypium hirsutum
  Clone ID: LIB3148-039-Q1-K1-F12
attttatttgcagactcgttttaatggaagtgtttccaatggaagattactgaaaatctagagggaaaaagtgtggttgatttagtccacagattcaatctattttctgttgatcatactgataggacttgttgatgacatgttgaacaaatgtgtgttacattttgaatgtgatcccaagtgccagcgatttacaaaggcttctatggtctgtgaatcacacaacattggctaatcttcttgtaaatctttttaactgcaatggctg

SEQ ID NO: 36609 - DNA, 405 bp, Gossypium hirsutum
  Clone ID: LIB3148-039-Q1-K1-F9
cccacgcgtccgccgatctgctacctcattggattcgaactcggaagtatcagcagctgagtcggtgggcacaagggggaccagccatttcatttctggtgaaagttgtggaaatggaaatgaaaagatacccttcattgatttccttggtgttggaagagcttcttaaagactagcggaggttttttgcttttggtaattagaactaaagagatccagctgaaaacacaagggaaataaaagaaaaaagagcaacattagtttgctgaaaacttcgttatttagattcaaatttatgtaagatatgagtatattttaaagttattttgtgtttagaagatttttttaagatgaaagtattgagtttgccagttgttagtcaagttacaacagggaaaacaacgc

SEQ ID NO: 36610 - DNA, 367 bp, Gossypium hirsutum
  Clone ID: LIB3148-039-Q1-K1-G11
accaagcgtgctatcaattgcgctaacacgttttcgaaaacgctgcaaggactggcgcaggggggagcgaagctgggtgcgtaggtaactgaacatgaaattaaacaatcaatggcagccagcgacgcagctatcaactacactatgtatatcgcagagaccatgcctgtcaccatgcttattaaccgaaagcatcgggaccaacatttgcaccactcctatcaacacttcaataaatacatcaccatgtacaagatgatacaagatctacaacaatctatcctgcactatggcatgcacgatggcgaaaacatcaatgaaatcatctatgacgatgacggcgacattgactgtgagatatactatg

SEQ ID NO: 36611 - DNA, 122 bp, Gossypium hirsutum
  Clone ID: LIB3148-039-Q1-K1-G12
gaaatgattcactgttaactttgtgatctgtgtataaacaaacaatttctatccatttgttcggaacaccaaaaaagggccacgtttcggttctatctattttcaaaattaggtttataaac

SEQ ID NO: 36612 - DNA, 167 bp, Gossypium hirsutum
  Clone ID: LIB3148-039-Q1-K1-G3
cccacgcgtccggaaatattgatgtcaacctcattaaataacgatggataagctcattgttgacatgacaaatatcataggccaaactgtgttgttgtcatctcttctccaattatatatatgtactaaaataaaaaaggaaattgatcatcaccatttttactatt

SEQ ID NO: 36613 - DNA, 180 bp, Gossypium hirsutum
  Clone ID: LIB3148-039-Q1-K1-G7
ggaagttataatcaattatacagtacatgatatgatcgaaatgccggaattcgacacaaactatatgcagacaaataggtgccatcttgtagatgaacatcaatttttttttttttgtgttctactctattcttatgtttgaatgataaagaagaatttacttttgttcattatagtatt

SEQ ID NO: 36614 - DNA, 395 bp, Gossypium hirsutum
  Clone ID: LIB3148-039-Q1-K1-H2
cccacgcgtccgcctccccgttggaagaatcagctcttgtacatttaagtttctttagtgccatagaataagaaaaaaggttaggccttttgcacaggagggaaaggcaaaaaaaaaaaaaaaaaaaaaaaaaaaaaaaaaaaaaaaaaaaaaaaaaaaaaaaaaaaaaaaaaaaaaaaaaaaaaaaaaaaaaaaaaaaaaaaaaaaaaaaaaaaaagggggggccgtttaaaagaaccaaagttaactacccggggatggaaaagaaaaattttttttatggggccaccaaaataaaataaacgggccggggtttaaaaacgtgggaatgggaaaaacctgggggtaaccaaataaaatggcttggaaaaaaatccccttttcgcaagttgggg

SEQ ID NO: 36615 - DNA, 254 bp, Gossypium hirsutum
  Clone ID: LIB3148-039-Q1-K1-H9
cgcgtccgatccttatgttgtcatttttttacaatttatttaaaagattaggaccgagaactccattgtggatgtattgggtggaacagtattgtactactactagtagtttaacttatttagtagctgtataaagctgcttcttgtgcataaaaaaaaataaaaaaaaaaataaaaaaaaaaaaaaaaaaaaaaaaaaaaaaaaaaataaaaaaaaaaaaataaaaggctgaaatttaaaaaaggggcggccg

SEQ ID NO: 36616 - DNA, 401 bp, Gossypium hirsutum
  unsure (1)..(401): unsure at all n locations
  Clone ID: LIB3148-040-Q1-K1-A4
gggtgttgttggaaaattctggtggaaatttttgggcttctactgattgaaacttactccttcaatgtgattcttcactgtcgtaagaagtaatattttttgggaacacaattgagctcaaattgaatttacttccatagaaaattttcatagttacaactttgcctaattttttgactgctctattttcaactgtttgttaacatttcagcaggtttatattgcttattcaattcagtccataactgttgtcctcccatatcttgtgtgtttatgtttttactggagattgagacctgttctctcatgataatttagtggccttgtagcattagcccccaatccatatgtaataaaaggaaaggactgttcacatgaaaaaanaaaataatatttttttt

SEQ ID NO: 36617 - DNA, 334 bp, Gossypium hirsutum
  Clone ID: LIB3148-040-Q1-K1-A6
ctcacgcgtacgctggagtccgcactaacgtctgcactaacggtgacaagaaaggccaagtccttgcgatggaacttgtgctgaatactatgcactataccattcaatacatgcatgatgaactgttttatttgcgtgagagacaagaactgatgcaggatctgacctacgctacgacctgcaagatgttctggttgctcgttgtctgactgtcactttgcctatcacaagccggattacaattatggcatttaaaaaccttcttcctgaagaagaagcttatgtacgtttgtaagaccataggtctgtttcctgaactgttgccaaatatttt

SEQ ID NO: 36618 - DNA, 406 bp, Gossypium hirsutum
  Clone ID: LIB3148-040-Q1-K1-A8
ccagcttctagttcttcaatgcaagatgtaattatctgaaagaagccctttttcacattgatgtgttactccatttggtttccatgctgttccaaaataaatgtcttctcagctcaaggatgctgtacttggatcttgattcttgaatggttataactgctttgagttgaagaaatggaaaaaaagagggcttagaagatgtgagcatggattgtaattaataaattaagatatatgtttttatataggtttgtaaatgttaagggggagcaatagaaattcttaagaggggtagcaaagggcatttatcctatccagatttaatccaattgatttatgtaataatttttaaaggtgtggtttaacatatctgaaattcgaatttcaatatatgaaatgctttgtg

SEQ ID NO: 36619 - DNA, 410 bp, Gossypium hirsutum
  Clone ID: LIB3148-040-Q1-K1-B11
cagcaacccttctcatgccaggtttcgagatgtcagagatcaagctatatcaatatagaggaggatcagagttgttggtggaagcgggggaccaaagacgagtcatttctctcccaccacaaatgcaaggtaaggtaggaggcgccaagttcattgaaagaagtcttgtaatcactattcgataaatgctttgtgatcaattttttccacatttgagtgtgtcttcttgaaacgatagtgatcaaattttattgtgaggggtatcccttcaaattggactcgttaataagccacaggtagcaagatgaaccaatctgcctttaaaggcccttgattttgtcccttgcctccacctcctttacacaagcttcatttatcctctcaaaccattatgattccttaaatgcaaa

SEQ ID NO: 36620 - DNA, 329 bp, Gossypium hirsutum
  Clone ID: LIB3148-040-Q1-K1-B2
ccggcgccaccgtcggggaggtcatcatacaaacacccatgtattgcgagggtcattttgtaccaagggactcactgaaagcctgcaatctggctaacatgttacatgaactatatgggtgcacattcatatgacttctatggaccgtttgcttattgcagatttactatggggggaaaatcttggtcgcatccctgaaacttagtcaatcatttggatcacttttcgggtaatcgaccttttccatgctttttaggctttcgtatgccacgtccattccgattatcagatcttacctgatgaatgccttagcagttggctttatatat

SEQ ID NO: 36621 - DNA, 191 bp, Gossypium hirsutum
  Clone ID: LIB3148-040-Q1-K1-B7
cactttatagctctggtcttgcgttacctaaattcaatttattggccgtttttttacaacgtcttaactggaaaaacctggccgttacttaaaataatcggctcggagaaaatcccgcttttaccagctgaaatcatagcgaaaaagacctaactgatctgcccttacaaacatttttacaacctgaatgg

SEQ ID NO: 36622 - DNA, 247 bp, Gossypium hirsutum
  Clone ID: LIB3148-040-Q1-K1-C1
cgggacgacccaacccttccggtcttgaaccccaaccggccgccttttttttttttttttttttttaacccaaaaaaggggggaatagaaaattaatggatgcctgttaattattataaaaagctttacctttgatttttgctaagttaatatccatccccatatttggggcccaaatggggatccccatccttttggtccatttgaaaataaccttcttggggaaccaatcctgcaaaattaacca

SEQ ID NO: 36623 - DNA, 396 bp, Gossypium hirsutum
  unsure (1)..(396): unsure at all n locations
  Clone ID: LIB3148-040-Q1-K1-C12
gacctgtaggattttcacatgttgaagtgttcagccctccttcagctaatgatatgcatgctggatatcctcgttttctgtcaaagcactctcacttcatgccacatacaacacaaaattatcctagccgtttggggcagcaaactgctcagcggttcaatcctggtagatccactggtgctcggggaggcgaatggaatcacatgaaagtgcagctccctcctagctttaattctttgggcccacgttctcctggaaatagtacattcagtagtggcatgccgtgggggcgtagggccaaccatcctgtctcaaatattccatcaggttctcgtggaaaaaaggactatggaaggattgcctaatgtctgaaatcaacttgcgtgngattatgta

SEQ ID NO: 36624 - DNA, 198 bp, Gossypium hirsutum
  Clone ID: LIB3148-040-Q1-K1-C4
aatgaatttaacatacaacaatggtattaggattccatgtgagtaagtctttataatacgctcgaaatttatatcgaggttagtttgtgcggccaacagaatagaaatccttttttttttttttgtatctatactggatagctaaaccctgatgtagaaaatcaagtgatgtttcaataaagtactgccatttttgtg

SEQ ID NO: 36625 - DNA, 308 bp, Gossypium hirsutum
  unsure (1)..(308): unsure at all n locations
  Clone ID: LIB3148-040-Q1-K1-C5
cggggcggaccaacccgtccggccgcgactggcaacttaagccgttccaccaaaaagtttaccggtattaaaccatgagaagcaggtgtgtcaaatgtcagccaattttagtttctagcagagaagcagttgaaaaaaatgctctttttaacctttaggttgtagagaagaagcatgtaatatttgctatctagttatttcaacacctttagagcttgaccctaagtaattttaaaccagttcaactaatctctaagaggttttaccattgattctgtaaatctatgatcaaatgagnttgaaattag

SEQ ID NO: 36626 - DNA, 167 bp, Gossypium hirsutum
  Clone ID: LIB3148-040-Q1-K1-C7
cccacgcgtccgtccaaacgccgcttagctttttaaattcctcactaccttatgtacttgggttgcttaattgtaatatccatgtcagtataccggtgacatgaaaacatcttgcaagatgatattatggctaattagtactgaaactaaaagtttctggctgctgc

SEQ ID NO: 36627 - DNA, 360 bp, Gossypium hirsutum
  unsure (1)..(360): unsure at all n locations
  Clone ID: LIB3148-040-Q1-K1-C8
cccacgcgtccgcccacgcgtccgcccacgcgtccgccagttcagtggttcgaccatttgcacagacgggcaatgcaagttgtcgaagaagggatgatatcccaagatcattatactgttgcatggcaggcctttaaagaatctctgaataaagttcgacttgttgcagataagcatgtatagttaaaacaaagaacatgtagataaatttctctgtagcatttataattatctcttgcgtccatatttgtacacagtcgagtttttccagcatagttcttgaatttggaataagtgttacatagctaattttaatgtcaaaatttgtttttagtccttgtattatggctnnnnnnaaaa

SEQ ID NO: 36628 - DNA, 306 bp, Gossypium hirsutum
  Clone ID: LIB3148-040-Q1-K1-D12
atatgaacagaagttgaaaaagggaaacgatggcagccaacagctactattttataactgttaaatgtgtatgctatgttttgttctgctcactggaattcaggtttatgtttgtttgatggagtttgagtgtgcagtctgaggcgtttttgtacaaaatttctaaataaatgcgagctgtcgaaggcgtttttgtataaatttctgtctaaataaattgaagaaactgataagtccattttaagaaacccaagcttgttcaaaatgttgagtattcaaacggtgtatatgaaatttaggattgac

SEQ ID NO: 36629 - DNA, 418 bp, Gossypium hirsutum
  Clone ID: LIB3148-040-Q1-K1-D2
cccacgcgtccgaaatcctgatattttcgttcatagcattgttaatgggtcctacaacgcccctttttttgtgacacggttccgggaggcactcttccatttctctgcactatttgacatgtccgagacaaatatctctcaagaagataacttgaggtccatgctcgagcaaaagttttacgggcaagaaataatgaatattgtagcatgcgaaggcacagaaagagtagaaagaccggaggcatacaaacaatggcaggttcgtagtgtgagggctggatttacacagcttccattagaccctgaactcatgaagaaagttagaggaaaagtgaaggagtgctaccacagtgattttatggtggacgtggatgggcggtggatgttgcaaggatggaagggtcggattatctacgcg

SEQ ID NO: 36630 - DNA, 409 bp, Gossypium hirsutum
  Clone ID: LIB3148-040-Q1-K1-D4
ctttgtgaagatctaagattggtcccttgtgtgttttttttttttgcaataatgtgcagcatggagaagagtatatacttatatatatatagagagagagagagtactcctcttgttcttctcttttcattttgagcagcatttgcagcacccctaccggcatcaacttcgcttgtaattttcgtaagctttttcttcaatggcctttattagcctatagctttagtctgagttgtacaccaccaatccttaatgagttcaagatccatggtatatggacacataattctaagaacaaaccaatgctctcttatgatccaaacaatccttgcacctatcaacggtgtatggattacttgaatcataacgagacattgtattgtcattagcattatgagcccacaatctg

SEQ ID NO: 36631 - DNA, 281 bp, Gossypium hirsutum
  unsure (1)..(281): unsure at all n locations
  Clone ID: LIB3148-040-Q1-K1-D5
cggacccttggccggacccttggccggacccttgggcaaaaaatgaataatccagtgtgatacttgggtttgattgttgaggaattgattgtgtatatcaagttgaaactggcaaaaccattagcattgtattcgaagggataaagtgtgatgtacatttattagtgtacgaattgatggagatggaaagtctcatttatatgatttttaaagtgaaattaataataccgaatttgtactttcatcttatctgctatattgntatttttacctgctttttt

SEQ ID NO: 36632 - DNA, 412 bp, Gossypium hirsutum
  Clone ID: LIB3148-040-Q1-K1-D8
cccacgcgtccgtaaaagggaagccatgcttcaatccctttggaaggtcaatgtggttgatattgaaacaactttgtctcgtgtctgcttagccgtacttcaagaccctgatgcatccaaggatgttctgattttacgagccaaagcattgaaaaaacttggatccatttttcaaggagtgaaagttcgttatagtagagaagacagccttcgccatgagattgattgttgatgtctttttcatagagatggaggttcacatggtgcctgacggcctctgaaggaagagacaggttgaaatgttggttggagaacaagttgagcagagtaacagtaggtacatcaccgaactaatgttgatcataaggccttagctatcattgtcatgagtgactctcgacatgtgcacatg

SEQ ID NO: 36633 - DNA, 410 bp, Gossypium hirsutum
  Clone ID: LIB3148-040-Q1-K1-E9
cccacgcgtccgagaggtatgttatctacaatctcccgagaaactacctgaaagctcttcggatggtctgttactggtggcccctttattataaggttcttagtttgattttgctttgtatgcaaaatgcattatctcggatccgtttagcttaattctgtaaaatcaacattgactctaccttcctgcgtgatcgttatttgcttgctcttttctagtgctgttttttctgacactatgtagtttccttttccttggaatatagcttataggttcacccgatgattcaagtcttggtttccttcgaagcgagaacgctagaagatatgttagacagcttccgcaatatccaaagcaaaatttctctactagatttcctaacagctcgtctggtgcttgtgatttgctcg

SEQ ID NO: 36634 - DNA, 419 bp, Gossypium hirsutum
  Clone ID: LIB3148-040-Q1-K1-F6
cggaagagggtggaagaagctcaaagaaggtaagcactggaacagcaccaaagggaggaggaacggtatcgagaactagaggagcttcaaagacaaaaggaagaggcaatgaaaaggaagaagcaacaggaggaggaagaacgtttaaaccagatgatattactgggaaagaacaaactgcgaccgaagttgtctttcgcactcggttcaaaatgatagaatccgaaaagttgttactctacgttgtaatagttgtgttgtctgtccagttttgaagttgaattctattacggcttgctcagggttcagactcgaacgctggggatagattcgctaagagtgaagctcttgactggttaagttagggctagtttagtattggtgcccaaaaaaaagttttaggttgaaatatattttga

SEQ ID NO: 36635 - DNA, 413 bp, Gossypium hirsutum
  unsure (1)..(413): unsure at all n locations
  Clone ID: LIB3148-040-Q1-K1-F9
gggccgaccgacgcggccgcccaggcctccngccaatactatttacatctgcaaggcncnatcntgcaaaggaggtgaattgcgactttttcaatggaccatcaaaacttctaaatttcataaattttttaaccttttatatattaatagaaatctgataaaacaatccacgaattttcaagataatacttaaattaaaaaaatgttccaactcatttataaatacaacctcaactgatagatcatatacatatcatcctatataaacattatttataacaaccaactaaacccgctacataacataacacaaattttttcctttatacaacccttattatattaatccttttaattaactttctttaaagccattacttattgtttacctacattatcaacttgcaattttt

SEQ ID NO: 36636 - DNA, 122 bp, Gossypium hirsutum
  Clone ID: LIB3148-040-Q1-K1-G11
cccacgcgtccgcacatcgtactatcaccaaccattgcttccctgttgtgaattgtattaccacacgctatagccgtacaacatagtgtttcccttaataggagactttagaatatttattg

SEQ ID NO: 36637 - DNA, 151 bp, Gossypium hirsutum
  unsure (1)..(151): unsure at all n locations
  Clone ID: LIB3148-040-Q1-K1-G12
cccacgcgtccgcacatcgtactatcaccatccattgcttacaagtccacagggccttatcgatttatgtgaggacnacaacatactgtctccctaaataggagactttaaaatatccattggaacaaaaaataaaaaatgcaactaaaat

SEQ ID NO: 36638 - DNA, 348 bp, Gossypium hirsutum
  Clone ID: LIB3148-040-Q1-K1-H12
cgtacccaagcccaacgacaccccaaaacctgttccaggaatgagcggagccgttgaagtgccccgaccggagagtgttacggtgtttgaattcgggtccgtagctgctactgcagataaggttactttagccggatattgccctgtgtctgacgacctcgagccatgccgctgggaaattctgcctgccaatggatccgatgctcctcagtttcgcgtcgtcttttgacaacgaaaaaaagtggattgtaagtgggtaaaaacaaaattggtttcaaggaagttgagcgagactctttgctgagattattgtaattttagttaatgtgaaacgcgttattcttattg

SEQ ID NO: 36639 - DNA, 326 bp, Gossypium hirsutum
  Clone ID: LIB3148-040-Q1-K1-H5
aaaacatgtccagaggcggattttaaggttgtttcaaatgcggggcattcagccgacgaacggggaatagctgctgaacttgtggctgcaaacgagaagctgaaaagccttgccaagaagaacaaaccttgaaattcgaaagctaagtctacatgttgatttgcctcataaacacaagcagtttgataatcaattgaagagaatttggtttaaacttagaatgttgaatccatgtgcttatataggtatacatatgcatatattgagaaaaatgcaagccatgagagaaataaacctggaaataaaaaacaaaatcaccttttcac

SEQ ID NO: 36640 - DNA, 262 bp, Gossypium hirsutum
  unsure (1)..(262): unsure at all n locations
  Clone ID: LIB3148-040-Q1-K1-H6
cggggnggaccaacccgtccgagaggacgttgttccaaaacccaacgacaccctaaaacctgttccaggaatgagcggagccgttgaactgccctgaccggagagtgttacagcatttctattccaaaaccagactcctactggctacatgagaaattttcacacatatcttactgtgattaccatgtcataagggttttggctacaagaagcaaggcacagatcaatgcaactttgaatcactacaaaaattaatatggaa

SEQ ID NO: 36641 - DNA, 295 bp, Gossypium hirsutum
  Clone ID: LIB3148-041-Q1-K1-A11
accataccaatggtctcttcctgatttcaagagcccatcaactcgtcatggaaggatacaattggtgtcaggagaagaatgtggtgactgtcttcagcgccccaaactattgttaccgatgtgggaacatggctgcaattttagagattggggagaatatggaccagaattttcttcagtttgatccggcacctcggcaagttgaacctgacaccgcacgcaagactcctgattattttttataattcttttttaattcatataatatatactacatataatatatattcctgct

SEQ ID NO: 36642 - DNA, 220 bp, Gossypium hirsutum
  Clone ID: LIB3148-041-Q1-K1-A3
ctttttaagaacatacaccccatacactgatcatataacgaaagagaagcccctttagctttggctataactgatgaggcttgagtgtgatgtattgaaggggactttgaatatttatatatgggtgtggtgcagagggaaccttggcttgtcttcggatagcattcaaaagaaagtccaactgatttacaaaaagggaaattccctataaaaacaaaac

SEQ ID NO: 36643 - DNA, 226 bp, Gossypium hirsutum
  Clone ID: LIB3148-041-Q1-K1-C2
gaccaagccttcgccagcgtccgccctattcttccgggttccacatagtcatactagatcaaagttgtaagcccgtgacgttatatgtacacttattgtaaagccagtactttgggaatcctaagattttgctcttaatgattagatttctaaaatctattctttcaaaaaaaaaaaaaaaaaaaaaaaaaaaaaaaaaaaaaaaaaaaaaaaaaaggggggcggc

SEQ ID NO: 36644 - DNA, 271 bp, Gossypium hirsutum
  Clone ID: LIB3148-041-Q1-K1-D10
cccactcgtccgcccactcttccgattttactgggtcattgttcagtttccctctttaaaaccatcatttggtctccacatgcactttggtcctttgggtctttctaggttcgaatgattttgtgattttttttcttttaaaaaaattgtgtctagattacaagcaaaagtgtctgaatgtcaaacttccaagttattgaaagactttgttacagatgatgaaatatgatgatgcattatagtcaaatagcattgatgtttcttttacatt

SEQ ID NO: 36645 - DNA, 145 bp, Gossypium hirsutum
  Clone ID: LIB3148-041-Q1-K1-E10
cccacccgtccgtgattttaaattgaagtcatcagtatgccttcgcaatcgatgtatataggtaatgcaggattcgggatgagattataagttttgtatgaacctgatgcattactcagttgatttattcaaccgatttatggtt

SEQ ID NO: 36646 - DNA, 150 bp, Gossypium hirsutum
  Clone ID: LIB3148-041-Q1-K1-E12
cccacgcgtccggggattttaaccatatgcattctatttcctgacattctatagccaaccctaaatgcgcagcctgcttgatttgtatgcgtaaatgctttgtagcctgcctgatttattcacaagaagctaaattgtatgttgtttctt

SEQ ID NO: 36647 - DNA, 289 bp, Gossypium hirsutum
  Clone ID: LIB3148-041-Q1-K1-E7
tgtttttttaaccctttttgctgcttgcgtgtctgctccatcttgcagagtagttgatggcggtggaatgggggttgacagagacgatgggacagaggcggcggctggtggaggcaggtggctgccagtgctagggtttttcctttttattgtttttcattattggtttgggctaggttagtgatttggactgatgtaatttgggtttgggtatttgtatttgtttggttgggttttattgggttctgggctgtttgtttagaaattgggttttgggttgttggttgta

SEQ ID NO: 36648 - DNA, 249 bp, Gossypium hirsutum
  Clone ID: LIB3148-041-Q1-K1-F11
gcctcttttcccatcttatcttaaggcatttccaatatgttggcatagtctgtttcctagtaaacctggaattgaactgtcaaggctgttgttcttaagggtgaagttcggttttgaaaagaaaaagtgaagttactgtgtcaaaaaaaaaaaaaaaaaaaaaaaaaaaaaaaaaaaaaaaaaaaaaaaaaaaaaaaaaaaaaaaaaaaaaaaaaaaaaaaaaaaaaaaaaaaataaaaaaaaaataaa

SEQ ID NO: 36649 - DNA, 286 bp, Gossypium hirsutum
  unsure (1)..(286): unsure at all n locations
  Clone ID: LIB3148-041-Q1-K1-F3
gtgacgctgtgcattgcgatcgtcattatgctcttctattagtgtnncacctaaattcaaattcatctgggccgtctgttttacatacgtctgtgatctgggataaatccctggtcgttaccccaatcttatatctgccttgcatgcatcttttccccctttctgccagtctgtgcgtaattatgcgaatgagggcccgcatccgattcgtcccttcccaaccagttgcgcatgcctgaatgtgcgaatgtggtcgccgccctgtagcgtgcgcatttaatgcgcg

SEQ ID NO: 36650 - DNA, 289 bp, Gossypium hirsutum
  Clone ID: LIB3148-041-Q1-K1-G10
cccacgcgtccgcttttttttttttttttttttttttttttgggttttttttttttttttaaaagctccattttattcaatattttcaatattcatcacatgtttttttaaaaaaaaaaaaaaatcgtccacatgttgatttttcgtacatgtagcttactgcagcttgtaaaaaaacaaaaaaacaatggaagccccaaccaatgttccaagaacaggcaaggttgcggcagccatcccaaatttgctttatgtaatagtttttttgggaagatgagatgattaatga

SEQ ID NO: 36651 - DNA, 212 bp, Gossypium hirsutum
  Clone ID: LIB3148-041-Q1-K1-G2
cctgtgtagctttaatcttggctgcggcaatcacacaatccccagctgcatcaacttcataaccccaaaacaagaaagaattgatgggatttattgacatttcaataacaatgaaaaaaaataaaaaagaagggtaaaaacgacaaggaaacagaggaattggcatatcttatcttcagaattagtagttcagaagctgagagactacacgt

SEQ ID NO: 36652 - DNA, 290 bp, Gossypium hirsutum
  Clone ID: LIB3148-041-Q1-K1-G3
caaagagtgacagatcttgttttgccagcttttcaatttcatgagttcctaattgtggagaaggctgtatttggaaagccgatctgataataagctttggagtgtggtgcattcaccgaattcttgatctttcgctgatggaaagccgaccagagctgtggggaaaatacacttatgtgcttaatcgtctccagggtgtgatagatcttgccttttcgaagcatcgatccctggtgcccccatgcttctgccttcaaattcccgtggaataccagcagaggttaagtcct

SEQ ID NO: 36653 - DNA, 293 bp, Gossypium hirsutum
  Clone ID: LIB3148-041-Q1-K1-G7
gtgctatcagttgatgtggacattattgccgatccctatcagttgtgtgacgatcttgaagaagctctgaagctcattaagaattgtgtcattggtcaaggtgtgatagataactaagaatcgccattatcagttgcagtagtggcctgtgcccgtaataaagttgcttaaatatgtttaggatggcgtctacgctttctttattattatctacttgatgtcgtgtttatgaactatatttactgaacgcttgaattcctgggtaagtttaatattacggaaaaaaaagtatg

SEQ ID NO: 36654 - DNA, 253 bp, Gossypium hirsutum
  unsure (1)..(253): unsure at all n locations
  Clone ID: LIB3148-041-Q1-K1-H7
aaattttcttcttattgcattgttatctttgattaacttattcattttaagttaattcctttcttattgcaaaaaaaaaaaaaaaaaaaaaaaaaaaaaaaaaaaaaaaaaaaaaaaaaaaaaaagggaagngggtgtaaggggtcaaagcttcaagacgagggactccaacgtgcaaggtcttaaatagtgtaacctaaaaccaaaaaacaggccaatggcctacaacgtacaacactggaaaaagggaaaa

SEQ ID NO: 36655 - DNA, 214 bp, Gossypium hirsutum
  Clone ID: LIB3148-042-Q1-K1-A1
cccacgcgtccgagaacgccaagagttggttatggggtaactggtcaaaccgaggttcaatttttttttcctttcattttattttacttttgaaaattaggtgtaaaggttgaacacagatgacatatggatgtcttgtataaatttgattttcctttctatcatttcctaatggaacacaatttaaagaggaataaacagaccttatctcttc

SEQ ID NO: 36656 - DNA, 181 bp, Gossypium hirsutum
  Clone ID: LIB3148-042-Q1-K1-A12
ctaaaactccaaattcaacataccattgatatcttcgatccaaagcaacccaccggggcgcagtaataaacctttgatgaagattaccacaaaagtcaacatttccacttcttctaccctacaagaaccaaacaggttgactttttatctcaatcaaactcttacccatgttctactaaca

SEQ ID NO: 36657 - DNA, 339 bp, Gossypium hirsutum
  unsure (1)..(339): unsure at all n locations
  Clone ID: LIB3148-042-Q1-K1-B12
gtaaaacgccaagttcgagagatcacaagataccagcgattcaaagttgcccaccgacacccaggaagaaaccaatgatgaggatgaagagaaaagtatcagagttgcagttctttgaaactacaagaagtgaagaggtagagtctttttttggatcaaactcttacccattttctactaacaatactgctgctcaccctcctttcaagaaaaggagatgtaagagtgcttgatggatattatcatacatatatattcattaatctgtccttcttcatcaccatcatatcttctcccccaagcaatntaaatttttatttcgaatttaatttcttggag

SEQ ID NO: 36658 - DNA, 161 bp, Gossypium hirsutum
  Clone ID: LIB3148-042-Q1-K1-B4
atcaataataggggatcccatactttcacgggcacctgagagatggcaaaatagtctagttcatggcatttagtttatgttgtttgctttttttttggtttataaggatgtggctttgtcgttaattaccgggtaatctatcccaagttcttaccctgctc

SEQ ID NO: 36659 - DNA, 368 bp, Gossypium hirsutum
  Clone ID: LIB3148-042-Q1-K1-C10
gcagaatgaatgtcatcccctgatctcatgcactgtactcttgatgaagaaatgcctttaaaccggtttagttctcgttttcgtccctctactatgtcgagatttcgacatagtagagagattaaaaccataatcatactgtttttgtccataattttttttttgaacaatctttctgatcatatttgctatttttaacataatacttaaaatcacccatatctctttctcaacccatacataaataggagtataatgcgcttcagaacattcaaactcatgtctcttatattagtaacaatatccatgtcaatcgagttagaactcaattgacttttttttcgtatatttgtacaagtttcattatt

SEQ ID NO: 36660 - DNA, 293 bp, Gossypium hirsutum
  Clone ID: LIB3148-042-Q1-K1-C6
agtcggcttctgagtatgaagtcagctaatgctttgaagttatgtatggtcataatccgagaagaaactttcttgctaaatgaggaaaaagtatgaaacagggtatttctatttcgctgcatatgaagtggaattgcctgtctaggggtggctgaacgtatacatgtcatatgggggtcaaggatgccatagcgaggccacactcctatgctggcgagtaagatgagagccactggctgacaattacttatttctatggatgctcaacacatatgacatgctgcaattgtttc

SEQ ID NO: 36661 - DNA, 276 bp, Gossypium hirsutum
  unsure (1)..(276): unsure at all n locations
  Clone ID: LIB3148-042-Q1-K1-C8
cttttgatatatatatatgcaaagaaaaaaccccgactgctttttgattggaatattgtaaagaatattgattatatgggaggtcggtggctaagtgatatgcattatctttccttgttctcattgctatttattcaaagatgatatgctatgtaatatatctgtcaacttttgtatatatatttatatatcttttcaatcaattaaacancanacaaaccaacaaatacacaacctgaatggcaaataaaacaccccctgtaacaacacattaaa

SEQ ID NO: 36662 - DNA, 264 bp, Gossypium hirsutum
  Clone ID: LIB3148-042-Q1-K1-D11
cccacgcgtccgtaatcagcatgcgtcttattttagctcaattagcccattgctttgattgggagttgcctgatgggatgttgcctaatgaactcgacatgagcgagaagtttggcctttcgttgccgagggctaatcatttacttgcaaagtcgacttatcgtttaattgcttaaagttaaggttgtaaatgaacatttgggttgttgtttatgttgatttctcaaaataaataaatgagcataaacaaataaaacttatttt

SEQ ID NO: 36663 - DNA, 314 bp, Gossypium hirsutum
  Clone ID: LIB3148-042-Q1-K1-D3
ggaataagcacttaagtcactatgggagtccaggatattcagggtgagggatttcccgatcagttttctgggttggctgactccttatttctggacctaccgcaaccttggctagccattccttcaggttgaaacatgttgaaacaagatggaactctgtgttgcttctcactctgcatggagcaagtgcaacgttcatgtgaaactctgagatctgactttatagagatatatggacctttgaaatactgctccgcatgtatgaaatctgtgaatggaaaatggataatgatgggaattccattgcatgctca

SEQ ID NO: 36664 - DNA, 379 bp, Gossypium hirsutum
  Clone ID: LIB3148-042-Q1-K1-E1
aaaaaatgctagactttaaaaaaaaaaaatttttttaaaaaaaaaaaaaaaaaaaaaaaagggggggaaaaaaaaagaaaaaaaatttaaaaaattggggggtggttttaaagtatcttaaaatttcggcccccccctttagaggtcccaacttttctttcccttccctccaacccaatacctttttttttgggtcaccccctatttattcccctgcccccctgtttccaccccctttactgtgaaacccctggcttcccccaatttaatctctttgaataccatcctcctttccccagttgccctttttccaaaaaatgccccccccctttgccttttccaacaattccccccccttattggttatttcccccccccc

SEQ ID NO: 36665 - DNA, 228 bp, Gossypium hirsutum
  Clone ID: LIB3148-042-Q1-K1-E3
cccacgcgtccgataccgtcctagtctcaaccttaaacaatgcctgcagaaaacacatgtgtactacattagaaacaagaaagcagatatcctctaaacaatatcttcttaaaatcttgcatttcaatatttggtgttcactctttttaggaaactataaattaatgatttcttgtttggcgcattcagtaaaatttgagacattcatacttttatctttcataaacc

SEQ ID NO: 36666 - DNA, 347 bp, Gossypium hirsutum
  unsure (1)..(347): unsure at all n locations
  Clone ID: LIB3148-042-Q1-K1-E4
gcgagtggccgccctgttttctttgcgtcatttaaccctttaacaatggttatagttgccattatgagctcctttatcttttctgagataatgtatttaggaagggtaattggagcaatggtgatagttgtagggctttacatggtcttgtggggaaaaagcaaagatcagatttcgtcagattcatcgaacaacactaaggatgaaattcccattagtggtgatgaacttcaaatggccactcaaacaacaacacccatttncaatcaagattttgtagttttggatttaaacaaaggggatgtttctaatcagtcttccaaaaacaaccccaaataaaatatcat

SEQ ID NO: 36667 - DNA, 234 bp, Gossypium hirsutum
  Clone ID: LIB3148-042-Q1-K1-E5
cataccctatcggaccttgtttgtttcatttattcgatggggttcgtcaccgccaatctaacaccttgaagttggaagcctgttttgcccaacagctggtatttatcgtaaataatttattgaacgtgctttaagttcatatgggtagcttgaagaatttgtaacccggcgacctgacctgattaataatactaatatatattgatttagtgttgaaaaaaaaaacttaaaacc

SEQ ID NO: 36668 - DNA, 339 bp, Gossypium hirsutum
  Clone ID: LIB3148-042-Q1-K1-E6
cccacgcgtccgccacggtctaaattaggacccgcagcaagtggcggtgaacgtgcggcggcttctgcaccaccgagaaaagtggggtcaggtataaggtaccgggagtgtcaaaaaaaccatgccgtgagtatcggaggccacgcgttggatggctgtggggagttcatggcggcaggtgatgaagggacacttgacgccttgaaatgtgctgcttgtaactgccacaggaactttcaccgtaaagaaactgacggtgaaggtagtagtatctacaaccctcaccatcatcatcaccactaccagcagcagcaacacccccaattctcgccctactat

SEQ ID NO: 36669 - DNA, 158 bp, Gossypium hirsutum
  Clone ID: LIB3148-042-Q1-K1-E7
gaccctctatggaggctctttgttttgcagcaaagcatgtaaaatagattgcctcgtgtaataaaatttcaaagtgaaaaattgtatattcaaattgtttgtaacaattggcataaagtgttggtgtgagtgtgattcaattctataatctcaaggac

SEQ ID NO: 36670 - DNA, 288 bp, Gossypium hirsutum
  Clone ID: LIB3148-042-Q1-K1-F1
cccacgcgtccgggaaagtgctggatcctagattgtccttaaaagaccccttaacatggccttggtgagtgtacatgtgctgctgaagctctttccttttttcttttttctgttaatctttttgtagttggatagctatgtgttgatgatcaatgtgttgacaatgattgcaagaatgtgttttgtaattatttcgagtgagtttcgattagatgagccaatcagacacataatgttcaatcttttttatgaccaatgtatcttttattttgtttatgggtacagatt

SEQ ID NO: 36671 - DNA, 271 bp, Gossypium hirsutum
  unsure (1)..(271): unsure at all n locations
  Clone ID: LIB3148-042-Q1-K1-F4
tgtttctttccaattaagggggccattttttcctaatctcatctgnnaaactaaagaaccaggagccacgcttgtatctatttccattnggaaatcaatttcttnttctttatttcatgcctgtcatagaggatcctaatttggataaacatggttgtttaggattctttaaacaagttttccttctagctttaatttattaagtagtttcagttggtgttcccattnaaaaaaaaaaaaaaaagacccaaccatataactccttcttaac

SEQ ID NO: 36672 - DNA, 305 bp, Gossypium hirsutum
  Clone ID: LIB3148-042-Q1-K1-H1
ggaacctacaatgggggactactttcgacagaagctgggactattgctcgagtgattgcagatgccacaataacaatggctggcttcttaggtcagagtcagcttttgaatatcactctacttccttcactactgatatgcgtcatctctattgctgctacatgctttacctacaactctctgtattgatctactctataacaagaagaagaaaaatcagtatctccttcacaattcaatcatgatcctttacaggttttacctgttcaaaagttgttttcatcatcatcatcatcattattata

SEQ ID NO: 36673 - DNA, 260 bp, Gossypium hirsutum
  Clone ID: LIB3148-042-Q1-K1-H10
ctgggatttgaatgctttgtatagatggataggaataggcctagggcagttacttttctttctctcttttcacttttcagagtacttttcctcttagttgcctgcctaccacaatttacttctcatttctcgtgtatgtaatctagtttccttgtcaactagttataagccttttttgaggattaccaactctttgtattcgtttgcaattagacctgttcatgagctgagttatcaatctaaacttaaaggtttgcttt

SEQ ID NO: 36674 - DNA, 389 bp, Gossypium hirsutum
  Clone ID: LIB3148-042-Q1-K1-H3
gatcacatagcagcagtagaacagcaattagtttcagaaagaatgaggaggaaacttaatgaagtaaatattgcagcccaagctcaacttgctccggtccaagaccacatcaatttcactcttcagcaagcgtatttcaaatgtgcatatgaatgctttgatagaacaaggaaacaagaggagataagcaattgtgtagaacattgcagtgttcccgttgttaatgctcaacagcattttgagaacgaaatggccaagtttcaagaaaggttaaatcgatccttgatggtctgccaagacaagtttgaatcagctaaacttcaacaaaataaagccgatgcaatcaaatgagtggagtcatgcgtcaaccagtcaatcgaggataacat

SEQ ID NO: 36675 - DNA, 300 bp, Gossypium hirsutum
  unsure (1)..(300): unsure at all n locations
  Clone ID: LIB3148-042-Q1-K1-H5
aaggtccacctatgggtattgtatcttccttggaggttatccggtctcgtggagctcgaagaaataacatgttgtgtctcgttccacagcagaggcggaatacaggagtgttgcacatgtcactgctgaaatgacgtggattcagtccctgttaactgaattgtgtgttccaaacttaccaaaggcgctgatttgatatgatagctcagcagcgatagcagttgtaggaaatccagtcatgcactccaaatttaagcatgtggtagtggatatattcntttgttttaattggaatcaaaa

SEQ ID NO: 36676 - DNA, 294 bp, Gossypium hirsutum
  Clone ID: LIB3148-042-Q1-K1-H9
gtcgtggaccacatacgatgcttacatctaccattctgcagacacttggtctctcttccgctgatgaactaattgggtggacctatgcagatccatcctgggctcgcatcgccgcacttgtcccagttgttgtctcttgtgcagaggctggtgatgaagttgcaaataagattttgaaagaggcagttcaagagttagctttaagtgtgaaagctgttgttcagagacttggcctgtgcggtgcagatagaaaaaattccttccctcttgttatggttggtggtgttcttgaag

SEQ ID NO: 36677 - DNA, 362 bp, Gossypium hirsutum
  Clone ID: LIB3148-043-Q1-K1-A10
tcatcccaaagagaaaaccaggcatccttcaactagtatgcgatgtcagtgaggttcaggagaaagaaaatgaatgtaagaagtcattggacccaaaaagactccctgtgggaattgctgcaggcgcagccaaatccggtgaaaatgatggcaccaaaaaatgttttcccaaaagtaagcgccgccattggtcctccagttttcccaaagggcggccgcagttttaaagtaaattcccagccaaagggctggaaccagaagggctgaaaagacccgttttggactttgctactagagtatctttcagtagtttttaagtttatacagttccccgagtttttttttttatcaaccataacgct

SEQ ID NO: 36678 - DNA, 403 bp, Gossypium hirsutum
  Clone ID: LIB3148-043-Q1-K1-A3
gataaaataatcctagaaaaataattaaaatggccttattacaacccaaaaccaaataatgatatgtaataagataaaacttataaagaaataaatcggctacttattgcaattaaaagaaacagaaacaatagtgtggccatctccgagtccctcacagctccaaaccatctaagcttagggattacctgataggagactggagttaatccacgctccgagcactcttggctgatccctttcgctgaatggcgagcttgtctgtgtagggcgttgaataggaaagatcgaagaattcacttaattctggcttttccattggggttgctttcattttctgcaggatggggaattgaagattggggatgggtttattgttcaatggccatgtgagagttttttt

SEQ ID NO: 36679 - DNA, 399 bp, Gossypium hirsutum
  Clone ID: LIB3148-043-Q1-K1-A8
gaaaatggtcaacttcatttcataggctctacaattgcttcattaaatggaagtagtctattggaatcctgtagggtgagtagtgaactaaaccccgatgactatttctttgaatggtcaactgaaatgaatggcttcacaggcaataattcgaacaagtcttggtctaaaaagcttaaacagatgaagcaatcctctataacccaaaagctcaaggcatccagggagtatcttaagtcattgttcagtaaatctgcttgttcagatgaatcttgtgccaaagcagatgtttcaaagaccaaagaatgtgcaaacaagtacatgaaaatgggaaagaagaacccatttggaaaggttgataaaggtagatacaaaatattcatgaagactattgatagg

SEQ ID NO: 36680 - DNA, 390 bp, Gossypium hirsutum
  Clone ID: LIB3148-043-Q1-K1-B1
cccactcgtccgcccacgcgtccggcgaaagatgcagattcagaggctaccaggttatggcataggcgattgggacatgctggtgaaaaagctttgcagactttggcgaagcaaggcttgttgaaaggtgcaaattcttgcaaattggaattctgtgaacattgtgttctgggcaagcagacgagggtaaaatttggttcagcaattcacaatacgaaaggaattctggactatgttcacagtgatgtgtggggacctaccaaagtggcttctttgggaggtatgcactattttgtcacttttcttgatgattattcaagaaaagtatgggtgtatctaatgaaaagaaaaaatgaagttttggatgcatttctgaagtggagcttgaaa

SEQ ID NO: 36681 - DNA, 306 bp, Gossypium hirsutum
  Clone ID: LIB3148-043-Q1-K1-B10
ctttttcaaccctattttcatttttcaatcttgtttgtaataagttcattgtaaacccagttttacctatgttgaaacaaatagttggcaatatattggtgaatttacatgagaaaaaaaaaaaaaaaaaaaaaaaaaaaaaaaaaaaaaaaaaaaaaagaaaaaaaatataaaagaaaataagattaaaaaagcaaaaataaaaagaaagggaatattatatagagtggacaaaattaaataaactggccgttggttaaaacgttttaactggaaaaaccttgaattgccccaggttagtctttt

SEQ ID NO: 36682 - DNA, 281 bp, Gossypium hirsutum
  Clone ID: LIB3148-043-Q1-K1-B11
cagccttgtccaaatttggtacttcatgaaccctaaaactattcagaacatcttacccataggcattaaatgaagaacagatttagggtacatgaagtaccaaattcgttcaaggaagaaatcgcactggattgcccttgcagagaggattgtgaaaactctctttttattacctttcttttttgaagttgttaaagtctgtgaatgtaatttgaaatgtacatttccttttaatttccatcataattcactatttatataaaaaaaaaaggggggggcgt

SEQ ID NO: 36683 - DNA, 229 bp, Gossypium hirsutum
  Clone ID: LIB3148-043-Q1-K1-B3
cccacgcgtccggccaaatctgacattcccatccttgctcaaaaatatctacacaaggaaattaatctggatggattcataacgcacgaagtgaattttcaagatatcaacaaagcttttgatttactgcttgaaggaaagagtcttcgttgcatcatatggatggattaattaattcttattttttttatcattttaaattttcatcaataaaagaaatattgatgtc

SEQ ID NO: 36684 - DNA, 329 bp, Gossypium hirsutum
  unsure (1)..(329): unsure at all n locations
  Clone ID: LIB3148-043-Q1-K1-B5
cccacgcgtccgatcggagttgatggtctatttacggatttcacagagagcctccataatttccaggaatggacgtcgcctctctcacaaaaggatagtgacagtgcatctaaattggtggataaaattgccttgttgatctcttcttatagaaaaggatagattgtatcatatatttatatcatcctaagaacatatccattgagctttattcactccaaggcataataagcacatcttaattcaggttgagtttatgcaccgaagtgtgtaagttttaaggagtcctcctttcgaattttcaattttttttttctggnaaaaaaaaa

SEQ ID NO: 36685 - DNA, 274 bp, Gossypium hirsutum
  Clone ID: LIB3148-043-Q1-K1-B6
tctccattccaaaaaactccaatccaaagaaatggttgggtaaaatacataagggaaaaaaggatgccggggaaacctacctttcttttttatctaataaagcctgcaatgttatttgaaatgccatttctttaaattcatcacaattcacatattactcaaaaaaaaaaaaaagctcccttctaaggatccatctacatcgcgtgcatctacattaagctctttatataccacctaaattaattcactaccctctttttacaacttcgttaag

SEQ ID NO: 36686 - DNA, 191 bp, Gossypium hirsutum
  Clone ID: LIB3148-043-Q1-K1-B9
gccgattcgggtttgtgtgtatctccctgtattggttcttaggtgacatgaatatggaaatatgacgttctgattttgttatctccgtttcatgaatgtgtaggaaatttgtgtacttgtattattcacgggctataatcgtgttcaaggtcttatatttatataaattttgatagattgcttattcttac

SEQ ID NO: 36687 - DNA, 412 bp, Gossypium hirsutum
  Clone ID: LIB3148-043-Q1-K1-C4
ggaataagaaaatccttaatcaattggattctttgtacttagttaacgtggggattcaattgaagattagtagctaaaatgttagattttctctaaaaaaaaaaacaaaacataaagataatatatagtgtaaaaattataaaagggttataataagggtgtgcggagggaaatattaatattgaatgctattttttgtgtttgggtctaatttatttatttatcccctcaactgttttgtatttatcagttctttttctcttgtatttttgttcaatattaaaattaaaatgttaaaaggaggaatatgctttttattttgtcccatttttccttattattttatcccttcccattcttgctccaaacttttttaagatgaaggtttgaaaaataattattttattttggt

SEQ ID NO: 36688 - DNA, 373 bp, Gossypium hirsutum
  Clone ID: LIB3148-043-Q1-K1-C5
ctttgatgggtgtaagggttttaaacttaacgaattctagtatctatatcggcgattacaatccaaaaaaaaaaaaaaaaaaaaaaaaaaaaaaaaaaaaaaaaaaaaaaaaaaaaaaaaaaaaaaaaaaaaaaaaaaaaaaaaaaaaaaaaaaaaaaaaaaaaaaaaaaaaaaaaaaaaaaggggggggcggttttaaaggaacaaagtttacgtacgggggcttggaaagtaatagtttttttataggggaacaaaaattaaattaaggggcgggggtttaaaaagggggggaggggaaaaacccgggggtaaccaaattaaatggcttggaaaaaaatccccttttggcaagttgggttaaaaacaaaaa

SEQ ID NO: 36689 - DNA, 405 bp, Gossypium hirsutum
  Clone ID: LIB3148-043-Q1-K1-D2
cccacgcgtccggggatggtcttatcaggcagactaacaccccagagaggatgcagaactggagaaagatctgtagaggtatctgttctactgaacaaaattaagaaggaagatattatgaggttcctggaattacatcatgtgaagaagtttgatgttccatttattgccatgtatcggaaggagcaatgtctgagtctgctggatgattttgagaaaaatgaggctgagaatgaagataatgatgatgttgaacaagcagggcaattgaagtggcataaggtactttggattataaaagaattagacatgtggttgctcctttagaagcgtaagagtctgcttcagatgcaccaaaggaaaatttacgatgaggaatgtctgaagattgataacagtgaaaag

SEQ ID NO: 36690 - DNA, 385 bp, Gossypium hirsutum
  Clone ID: LIB3148-043-Q1-K1-D4
ctttttattattttaatataattttttttttattatcaaggcattgacatactgggggggactttaatattaaaaggatgaataacatgtaaatgaaagttggtgatctaatatgtaattataatataaacaagaagatacatctttaacaaatgaagaaactaaatgatgaaattgttgtctataaacatatcaagggaaagaaccctaattcttgcgttatttttttataaaaattgaatatggtgaatagacaatgtcatcatatggataatattttccattgttctaaaaaattgaaaaagaaacacattgaatattattaaaattcttattatatatatatagcaaaatgcctctttctactcctttttagtcttttaat

SEQ ID NO: 36691 - DNA, 193 bp, Gossypium hirsutum
  Clone ID: LIB3148-043-Q1-K1-D8
gtacactttgttttgttctcggatcaactgtataatgtttggttgaacaaggcaaaggaattgctccaagcttcaatgcatcaaagcagccagaattaacttgtcctgccttcatccttaaggattcagaaacttcaaaagtgtgtgtattaaatttaactatgagagaattgcattcagttggtttgcttgg

SEQ ID NO: 36692 - DNA, 347 bp, Gossypium hirsutum
  Clone ID: LIB3148-043-Q1-K1-D9
gccatccgtaggcgccctattgtgacttgctatagaggaaacgcctatgcgtcgtgtctgcctgctaaaaaccaacggataagatctgaacgttgcggtatttacaagcgtcgtggatgcttctagtttatttgctcaggcaaaggggtaactcgtgtgtatggacttcctttgcttttttgtgttctttttttttccctctgtttctgtgtcaagatttatggcttccatttgtgtgatgcttagatatgtatctacactttaagaaaatggaattttatatgttgtgtttgaagctttttaagtcaattttctttttcttaaaaaaaaaaaaataaaataaataa

SEQ ID NO: 36693 - DNA, 406 bp, Gossypium hirsutum
  Clone ID: LIB3148-043-Q1-K1-E10
cccacgcgtccggattcaacaggtccagatgaactcttgggagcatcagaaggctcttcctcccattccacttcactatcatcattaatattgctttccttattcaaaagattatgttcagcattcataccaggagtaacatcatcccattttccttcaaccactccctcctcccactcaaaatctgaatcagaacccgaagcctgctttctcaaagatttttccttaggagaaggtagtgttacaggatcacctgctgctaagcatgcaaaaatatcatcatcatcatcaaaatactccgtctttccatcatcctcaaaagttatttccatacaagattcagtttcaaatgcagacttccggttgctctcattcacatttacagattcaccattatcatcacgtg

SEQ ID NO: 36694 - DNA, 386 bp, Gossypium hirsutum
  Clone ID: LIB3148-043-Q1-K1-E4
ttctaatttggttttcctacataacaatttttttttcttttaagaaccttacattctaggatgggtcttttacattggatgacctatattcaattcactttcctttttaatacaacttctttacttattaaacctttactttctcaacttaatctccttcaaccacatcctccttccactaaatatcttaattacaacctgaaaccttcttatttaaatatttatcattatcacaatgtattattacaaaatcaacccctcttaatcatgcaaaaatatcatcatcttcatcaaaatactcctcctttccatctttcttatatgttattttcatacaacattcattttcaaattcaaacattccttttgctctcattcacatttac

SEQ ID NO: 36695 - DNA, 296 bp, Gossypium hirsutum
  Clone ID: LIB3148-043-Q1-K1-F1
ggcaatgcctgatgtgaagtcattggacattcggaacctcatctgaaactcgaaattcggctttggtgggtccaggttggaggtggaccaatattaactggtcaacaattggctaaaacccttctttttcattttgcttccattatttgattaaataattattatgggaaaggggaacccgggattggaagggccccacccgtaaatccggaccaactaaaatggtggttttggttggggttaataattctcaggttttggggatgacttccgcctcctaattgttataattgggt

SEQ ID NO: 36696 - DNA, 392 bp, Gossypium hirsutum
  Clone ID: LIB3148-043-Q1-K1-F11
tggtaataatgcttatagacttggttacttttttatcaaaaaaaaaaaaaaaaaaagagggaaaaaaaaaaaaaaaaaaaaaaaaaaaaaaaaaaaaaaaaaaaaaaaaaaaaaaaaaaaaaaaaaaaaaaaaaaaaaaaaaaaaaaaaaaaaaaaaaaaaaaaaaaaaaaaaaggggggggccgttttaagggtccaaagtttacttccccggcctggcaaggtaatagtttttttttggggcccccaaatttaatttccgggcccgggttttaaaaccgtggggaggggaaaaacccggggttccccaaattaattcgcttggaaaaaaatccccttttcccagggtgggtttataacaaaaaggcccccccctttcccctttccaaaaa

SEQ ID NO: 36697 - DNA, 142 bp, Gossypium hirsutum
  Clone ID: LIB3148-043-Q1-K1-F2
acaccaaagggaaaggtatataaaacacagcaaatttcagtgcattacatgcaagagaaatccaatggtaaactttatgttggggatggggattttgttaacccccaaataaacaaagttgccgggtatctttagtattact

SEQ ID NO: 36698 - DNA, 384 bp, Gossypium hirsutum
  Clone ID: LIB3148-043-Q1-K1-F6
tccacgcgtactaccacgcgtacgcttgattggtttgtgttattccataatttcctatagaaaggttttgtttcggtctgtattaaataagcactaggatccgtagttgcctcttgtaatagtttataggcacttcttctgactgtaaatttgccaaaatgttctcctcgccagacatggaagttgttatgttcttcttccgccaggggaatttgcaaaatcttctatacagtattttctcgaaaggtattttcaatttaaaaaaaataaaaaaaaaaataaaagaaatatataataaattaaataatataattatattattaaaatttaattaatatttaatatggataataaaaaaaaaaggggggggcccttttaaagttt

SEQ ID NO: 36699 - DNA, 333 bp, Gossypium hirsutum
  Clone ID: LIB3148-043-Q1-K1-G8
ctagaagatcccgagtcttttcatttttttctttccgtgactagaaatctatcagggacgcgatctaacgaatgaacggtcaacatcttaacggactgaacattacctctaaccaatcccaatcactcacaaatgcttgccgtggctgtggatcttgagcaggaaacggtggttacagccgcggtggaagcagcagcatatatggtgatcgccaaggatgatatgctgacgaacgccagtaatgtgatatacggaaatggtggaagctatcgtggtgatgttctcagaaatagactccctttattaggataactttaccgctattctattttc

SEQ ID NO: 36700 - DNA, 149 bp, Gossypium hirsutum
  Clone ID: LIB3148-043-Q1-K1-G9
ccgggccgacccactcttcctttttaatatcccctaattttacattttttttttttcgaaactagaaagctatcatatgcacgttctatgtaatgaacgatccccatctttatggactgaacattaccctctaccaatcccaatcgctc

SEQ ID NO: 36701 - DNA, 345 bp, Gossypium hirsutum
  Clone ID: LIB3148-043-Q1-K1-H12
cccacgcgtgcgacatatctcacaagatcgtttgaagttgaaggacgagtttggtggctactaacggcgcctaattgaaacccttggcaaaaaaagaaaaatgaaaatgagcgtggctggccgtgtacatttgggcttaggattatgacaatttggacttattggattgacgacactggggatgtgcactggactgtttggttctatctatatgttcttaattttgggttttgggtgttgggcccgggcagatttggcccattacaattagtacctaaacttatttacctctatcagattggtacttatgatttttttttctaaattggtatccaaatttttttt

SEQ ID NO: 36702 - DNA, 375 bp, Gossypium hirsutum
  Clone ID: LIB3148-043-Q1-K1-H5
tggagtttcgacccacgcgtacgcccacgcgtgcgtccacgcgtccggcctggtttcatactgaccagcaatatctatattcgtgtttccatctctaattgttttcgtttttcagctgtaatcgctcatgtcttgttatcttttgatcagacatttcacacaccggccaggctcgacaaaggttaggacttttttctagttataaaaaagttcaatatacactcatgtattcattctttttggtccccctttcctctgttcatatgtagcctgtagctagaaagtttacttttaaatggctttgttgtttaaaaaaaactctgaaaacttatggttttgttttgacttttagagaatgaaatgcagagatccctt

SEQ ID NO: 36703 - DNA, 382 bp, Gossypium hirsutum
  Clone ID: LIB3148-044-Q1-K1-A3
accggaccggaaggcccggcgccagagcgtccggtcacgtaacattgtctaactaccgggactatcgattttaaacgtgatataaacatgactagggtgatgtgatttggtcagaattctgtagaggttaacatgggctttcttgaaccccaacaacatatctggaggccccagagaggcctaccagaacgttcggtggctattcttagagcttcggtctttgagcattttctttatccgtacccgacagacacagataagcacatgttggccactcaaactggtctctcttgaaatatgtgtctaactggttcataaatgcacgtgttcgggttctgaaaccgatggtggaagaaatacatatgcttgaaagcaaatgctt

SEQ ID NO: 36704 - DNA, 408 bp, Gossypium hirsutum
  Clone ID: LIB3148-044-Q1-K1-A6
cccacgcgtccgcccacgcttccgaaacaagcatttgctaagggctccaaaaaaggtgcgcaacagacatcattgaagtctaaggtcggtatatttgtggcattagctatggtattgcagcgtaaacctgatgctttaattagtgtattgccaaagttgagagaaaattccaaatatcaaggacaagataagccccccatttttgtatggacgatagttcaggcatccaaaggagatcttgctgtgggactgtacttgtgggcacatctcctcttgcctgtacttagtagaaaaaactgtaatccacaatccagagatctaattttacaactggtggaatggatcttatctgtctcaaaagctcggtcaattttagtaaataatgctgttagaaaaggggaacgtttg

SEQ ID NO: 36705 - DNA, 390 bp, Gossypium hirsutum
  unsure (1)..(390): unsure at all n locations
  Clone ID: LIB3148-044-Q1-K1-B2
cccacgcgtccgcatgtttgttatatatgtatgttattgttatcatctaatgcaataatatataggtcttctttaaaaaaaaaaaaccanaccaaaaaaaaaaaaacaaaaaacaaaaaaaaaaaaaaaaaaaaaaacacaaaccaaaaaaaaaaaaaaaaaaaaaaaaaaaaaaaaaaaaaaattccggccccccccttaaaagaaaccaacctaactaccccctccataccaaaaaaaatcttttcaaaagcgcaaccaaaataaaattaactgcccgtgtaaaaacaactttttaactagaaaaaccctggataaacccaactaaaaccctttgaaaacatcccctatttacaaccttcttaataacaaaaaaccccacctatcgac

SEQ ID NO: 36706 - DNA, 233 bp, Gossypium hirsutum
  Clone ID: LIB3148-044-Q1-K1-B5
gaagaacatggttgtaaatttgatttcaaagcattggggaaacaacagattgctcaagctaatggcgttgttaaagctatcaagcttcataaaatctgaaatttgaagtgaaatgatcggaaaaaaaaaacaagaaaaaaaaggatttgttttgttttgtgattgtgtcatttgaaaaaaaaaagcgatgaaattatattgaccgtcgagtctcgccggtcggttggccgttc

SEQ ID NO: 36707 - DNA, 289 bp, Gossypium hirsutum
  Clone ID: LIB3148-044-Q1-K1-C10
cccacgcgtccggtaactgagtttattactcttgataacatattatttttcaaaagagagaggaaaaaaaaaaaaaaaaacaaaaaaaaaaaaaaaaaaaaaaaaaaaacgtgcatccaatataaaagggtccgctcttcttacacatccatgctatcctcctccttcttgtatagcaacacctttatttaattaaccccccaatttcttacatcggccggacttttaaaaccctgtcatttccaaaatcctttgctttccaaaatttacccccttgaccaacattccc

SEQ ID NO: 36708 - DNA, 310 bp, Gossypium hirsutum
  Clone ID: LIB3148-044-Q1-K1-C12
tagccatacatttgataattgaccttgttcttggctagcaaatactcacagttaaggtgggttatagtgtttgtagggttgaaggattttttttttgggtctctgttttatgggtagaaggaatgaattccggttatttaaggtgcagcattaggataagattgggttagtctttttttgccagagttgcttctatagataatgtaatagttccagaaactttgatagaagctatcttctgtttcaaaaaaaaaaaaaaaaaaaaaaaaaaaaaaaaaaaaaaatatttaattttttaaaatgttattta

SEQ ID NO: 36709 - DNA, 277 bp, Gossypium hirsutum
  unsure (1)..(277): unsure at all n locations
  Clone ID: LIB3148-044-Q1-K1-D10
accggnttcggaaaacccggcccgacccacgcgtccgctcacacctacggtatttgttacgtttttttttgacaacaccaatcgcttaacacggcggggacacatttttagacgggtctcgatacaaatgcaagaacgacagccgtctaggcatctaaggccgaactctgaacgtgacacatcttctggaagaacatgcagtacgataagaggtataattgtaatcagcaaggaaagatgcgaacaatgaagtccacggtattgatcataggaagtg

SEQ ID NO: 36710 - DNA, 339 bp, Gossypium hirsutum
  unsure (1)..(339): unsure at all n locations
  Clone ID: LIB3148-044-Q1-K1-D2
tccggcttttgaactcttcttttggggtggnngcttggaacttatagtatatggttcnntagttgannactttagtataagagagtgttagtagggactannggaagtannaaaatgttgcatttattaatnnatggtttcnnctgatttcnnagtattacctggtttanttggtgaccctagatctnnttgataaanncttgtagtttaaaatcgtttgaaccctacgagaaaccgttgtttgacaattnnaacattcgaagttcaaccctttgtaaaagctgccttgtttatnggtgcgccnnannaaaaaaaaaannaaaaaaaaaaaannnnnng

SEQ ID NO: 36711 - DNA, 415 bp, Gossypium hirsutum
  Clone ID: LIB3148-044-Q1-K1-D3
cccacgcgtccgagggcatcaaattacggtttttgtaatctaaaaaagtgtgagaataacattcgtgcactggatagtccatgtgccaatataagaatggaaattgggtggcctcacggagtgccgttcgttcatccccacgatctacctaataaggccaagatcggttttcttgaagcatatgaacctggttggacagcaactcacgatatggatttaagcctaatggaacctgcacagaccagtcaacagtactgtaactgaatcatcgttgtggttttgtatgtccattatcctgaattcgcttgttcctggtcagttttctcaatctcaacttggtggtttcttttcctgctaaatccaggacaagagctgttccaaccggtgtaagctgttttgttgaacccaacccatt

SEQ ID NO: 36712 - DNA, 382 bp, Gossypium hirsutum
  unsure (1)..(382): unsure at all n locations
  Clone ID: LIB3148-044-Q1-K1-D9
ggcttggcacgcttaagagggctattttgtgcagtgtaagcaactatgtagtgaacaagggctcctgtcctgttactgtggtgaagcatcatgtttaaggattgtttttcattgcctttgaggttttaaaagtgttttcccataatagaagtaataaggaatagttgagatatgtagcttgatttatgttttattgcatgggattgtatgtatggaagtaattaaagcttttgttgaagctgaacacacttcatcttgttgtatattgagatgggtgtttgtgtaaactagacttaccaattgagtgatgtgagaataaattgtgtaggcagtttctaagaactgctggttcttccanaaaagaactgataaatcctgtctt

SEQ ID NO: 36713 - DNA, 269 bp, Gossypium hirsutum
  unsure (1)..(269): unsure at all n locations
  Clone ID: LIB3148-044-Q1-K1-E12
cccacgcgtccggctattcatactttatgttttctgtaagttatatccaatgttgtgggtgcaacttgttgagcaagttgtttgccattcttgctgcttcaccaatcaattataacaagctgtatctcaacaatttgcttggatttcaagtcatcaagttcttcatttttatgtttgtagcttttttctgctgaatattagccaccttgcttgtaattttagttatgaattggtacatgaatgagccatttcatcacgtttaccccana

SEQ ID NO: 36714 - DNA, 272 bp, Gossypium hirsutum
  Clone ID: LIB3148-044-Q1-K1-E5
cccacccgtccggatgaagacaggctatttttttttcaccagggtccggtttggctggggatgggaccaatctaagggtttggtaatttggtcctttaaggggggtttcagttgtggtttggttctaaattataaccttaaagtagtagcaaatgatagctatattgtaatgcaagtttgataaatgaaatcattgtttgtttgtttgaaaagtaaatacaattcaaacgcaaatgatcattaaaataattcttcatgaggagattttcaat

SEQ ID NO: 36715 - DNA, 417 bp, Gossypium hirsutum
  Clone ID: LIB3148-044-Q1-K1-F1
cccacgcgtccgcccacgcgtccggccacttttttcatgctcgctactggaactggaatcgcggcctttcgatcatttctgtggaaaatgttcttcgagaagcatgacgactacaagttcaacggtttggcatggctcttccttggtgtccccacgagtagttcattgctatacaaggaggaattcgagaaaatgaaggagaagaacccagaaaacttcaggctggactttgcagtgagcagggaacaaacaaacgagaaaggagaaaagatgtacattcagacacgaatggctgaatacgcgaaagagctatgggaattgctgaagaaagacaacaccttcgtctacatgtgtgggttgaggggaatggagaaaggaattgatgacataatggtctcactcgctgcagctgatggt

SEQ ID NO: 36716 - DNA, 246 bp, Gossypium hirsutum
  unsure (1)..(246): unsure at all n locations
  Clone ID: LIB3148-044-Q1-K1-F4
cggacgcgtggggttgggagggatatgagtatttgtttgttccctcctgctaaaaatggggtgggaccctgttgtatcctagtactcgtggtgatagatcaactgctatatttgtcagtccaacctgtgtttcccctgaaacaatctgttgtgtggataaaaaaaaggaatttactagagatgccaggtggaagttgagatttcaaannnnaaaannnnannnnaaaaaaaaaaaaaaaaaanaaa

SEQ ID NO: 36717 - DNA, 412 bp, Gossypium hirsutum
  Clone ID: LIB3148-044-Q1-K1-G12
aaataacatatataaaaatcatctttttatatattccaaaaacaacacattgcgcaggcgtgttccatattctaacctaacacccttcacaaaatcttaaatatgaaattaaaccttcttcatataaaatcaacatataaaaagatctgtttcaaaatctcaattgtctcatttaacaaaattcatctttcaaaaaaaattgacctaccagtctccccccatcgttgcccattcacatccaagcccttcaaatggaaacatcatgtggtccttcaaacatgtcaatataaagaatagcttccttcataaacttaccaatatcacttctttccatccataaaattatttaaaataccttatctttccattaattaaacttattatcctccattaaaatttattaactatattt

SEQ ID NO: 36718 - DNA, 411 bp, Gossypium hirsutum
  Clone ID: LIB3148-044-Q1-K1-G2
gttagctaataacccatctgatataaattttctttttcctcggttaagttcaagagtttggggggcggaaacagtcactggttatgatctccagcctgatgtgaacgctctgggattagggttttcttctgggatagtgtctagtgatactggagatggtgattatcgaaatggttttaacactaacccgactaagcaaatccaggatgtggtgacttcaaatgcactccttccatgctattccaatatctttggatcaactagcaccaccacggcaccaacaattgcttctttgttagcttctacactttaccaacacaaattcatgaaatgtggtgtcaaaaattcttcactgcctaaccaattgcaagccttatcaccttttcaagaccttcaaatgacatgcaactg

SEQ ID NO: 36719 - DNA, 392 bp, Gossypium hirsutum
  unsure (1)..(392): unsure at all n locations
  Clone ID: LIB3148-044-Q1-K1-G4
ctgtgaagaagatgtatgatattcaggccaagaattggaacaacctggtcaaggcccatgggcccaaaaaaggcttatgtaaggtggaccccgaataacaaggcctggaatgttgcaaacaaaatcggatttatctaaccagttggcaactaccttgttttgaatgcttaatttttggggtttggttgcagggtgagaactgtattttcagaatcagctggaaaattaaagcttaagttttttgttttttaaaggttgtaaatcttgctttactgcccactaaatcatctttggtataaaacttaagtcaagaaagtatttaaacatgtttttcatatttgtttaaaaatggttgaatgcttgaattttcggctattcttactttacanatg

SEQ ID NO: 36720 - DNA, 204 bp, Gossypium hirsutum
  Clone ID: LIB3148-044-Q1-K1-G5
gttcctttggatgatgggatcgatgacgagtgttcccatttttggttaaacccaattttgggggaagttatggaagtttttaagcctggtgcatttgtccttcaatgtggtgctgactccttatctggagatcggttggggtgtttcaatctttcgatcaagggtcatgctgaatgtgttaaatttatgagatctttcaatgtt

SEQ ID NO: 36721 - DNA, 202 bp, Gossypium hirsutum
  Clone ID: LIB3148-044-Q1-K1-G9
atttaatggtcatatttcgcgaatttaatatggactattttcattatgaactgtgtatgtcatttgcaatgcttgcatgaacgtggtggataatccagtttgagatgaaactctgaactttttaaataaaaagaacccaaagttaactgaaggcactgatcaagtctaaacttataaaaaaagaaagttgatcaaaaatatg

SEQ ID NO: 36722 - DNA, 418 bp, Gossypium hirsutum
  Clone ID: LIB3148-044-Q1-K1-H1
cccacgcgtccgatgggaaacatggaggatggtgtcagtggcctttcttgttgccgctttgatttccgtatcggttatttccgtggtggcggctgtcaaatccgcaaagcctgtcataataggtttggcaagtgcgttgacgactgctatagttccgttgggaacatggtgcaacaattcttggaagcggaacaaggaaaagataaagatgaagaagaagttaacagctataatggagatctttggttctagtgcaaccaccatatggatgcttgttgaacaattgtaaattaagaaagcgtcactgtccgactccgttgattacgtgctcaaagaaggatatactttgaaggctgggatggatgatatcaacaaaaaattgaaacttgttacgcctatcatcacagatttgcttcga

SEQ ID NO: 36723 - DNA, 241 bp, Gossypium hirsutum
  unsure (1)..(241): unsure at all n locations
  Clone ID: LIB3148-044-Q1-K1-H10
cagttggtgataataatgataatggtatatcatcaaatggagggaagtgcatgaggtggagcagtgtaagaacaagtcccacatgttttctgggtttgccagcaatcangccagttcactcttagcttagttacccaaaataataaactctnttaagggtaaaaaatgaggtgtcgcttttattggataaatggaaatatgtacgatccaacagccttagaaacccaannnnnaaaannaa

SEQ ID NO: 36724 - DNA, 256 bp, Gossypium hirsutum
  Clone ID: LIB3148-044-Q1-K1-H2
cgaaaaaatcgaaatccagcacagtagggttcgatctctcgaatttttaaatattgaacattggtttgttttagaatttagaaaacatgagtgaagttctaaagggatatttgattattttgaataaacgggaaattgcaacccagcacgatagggcacgatttttcgaattgtcaaatatcaaacatttccttcgtgttaaagaatttttaaagacatgagtgaaattctaaaggaatatttgattattttgaac

SEQ ID NO: 36725 - DNA, 280 bp, Gossypium hirsutum
  unsure (1)..(280): unsure at all n locations
  Clone ID: LIB3148-044-Q1-K1-H4
cggaatggacagggccggccgaccacgcgttcgacggtcagtctctatttccactaagttcaaaattacctggttcccttaatattttgggccgctttccaatggcctccaataattttttgacctgccaatttaccatccttatttttatgtttgcccttcgtaataaaatacaataagcccctggaataatctttaatctcaatagcaggattaatctttcnnaaaaaaaaaaaaaaaaaaaaaaaaaaaaaaaaaaaaaaaggggggggccgtttta

SEQ ID NO: 36726 - DNA, 380 bp, Gossypium hirsutum
  Clone ID: LIB3148-045-Q1-K1-A3
cagattcaaaaagaggccagaaattcaatggctgttgttagacatctccgggaatcataggggttggctgtggtgaggattgttgatatccattaatttgagacttagtcagagaaacactatttgatggttaacctgaggaaagatgtatgcaattttcatgataaaaggttcggggaaggatgatacggcagtatgaagtagccaaatataccaaggtagaaattaggttgtagtagtgtatatctatgtgtttcttaagtgcgatgtaattatgcagtagtttattgtttgttgcagctggttatgctgcgagggtccgaagctacggattgtgtcgatgttcttcactttcttgtatagatttcagcaatgaaaag

SEQ ID NO: 36727 - DNA, 373 bp, Gossypium hirsutum
  Clone ID: LIB3148-045-Q1-K1-A5
cccacgcgtccgaaaggggcagttttgtgccgatatcttgtatgtacaaggatttagacgggacatccctgagctgcaaactctcgatggctgctgaagaccaaaaactggtttccaagtatgctttattgatgaagaagagaatggaactagagaatcaccttgtcaaaaagttgggacggtactagaagtcaataatagtgtgttatatctcgtgatttttaggtactatcagagttcaattcaaatttaacatggacattgttatagttttttttttccttttatttaaatcattgcaaataaaaggtattatcagagttcagttaaaaaaaaaaaaaaaaaaaaattgttagaataaaaaaatttaaaa

SEQ ID NO: 36728 - DNA, 202 bp, Gossypium hirsutum
  Clone ID: LIB3148-045-Q1-K1-B10
gggtactcctctttatctttttgactccattcaacacatcccataccctttacttaaactttatgacacgaacattctctatacatgcaatatttcatacatttattcattcttttggacaacatttaatgtaccaacatgttaatttattacttaatcttaaaaatccttttccttatccattccttttaacaactttttt

SEQ ID NO: 36729 - DNA, 387 bp, Gossypium hirsutum
  Clone ID: LIB3148-045-Q1-K1-B3
cccacgcgtccgcccacgcgtccggttgccaaacaatcgagtgttttatcacggagtttagagaagaggattgtcccgagggctttgtttgctcaagaattgtcatcaaaaggtttggttaatgactttaaattgtctgtattgtttgacacatcggagaagacgttcaacaagatgtttggtgactatttcgtaaagaaagcacccgagctcttgaagctatacaaagaaaatgttgagaagtgaattaatgtagactgcagcgttagtgtttttcgtgctgtgctgcctggattttggttcattcttttgatctgaagcttgttgtagttgttttattgtcttccattaatgaaaccttaagctcaacatgtttgctgtttgatt

SEQ ID NO: 36730 - DNA, 363 bp, Gossypium hirsutum
  Clone ID: LIB3148-045-Q1-K1-B5
cggacgcgtgggcggacgcgtgggttggaacaggtgattttcaagaaagaaactgggactgacaaaagggtagactgtaacagcttttgtctcaaagggatcttgttactccattttctattcttgtttcattttcctttttccaattctacttatttatctgctcctgcaaatgcaatgggaaacaacccatgaacattaaaaataagttaagtttctgtcattgggggtgtatatatattatatatgcatatgtatatatattttatcaatgatgacatgataaggtcacttgtgcaaaaataaaaaaaccacaaatttaataattggggtccaaatggtcaggtgccagatttctttctt

SEQ ID NO: 36731 - DNA, 372 bp, Gossypium hirsutum
  Clone ID: LIB3148-045-Q1-K1-C6
cccacgcgtccgattcatctttcctttatttgaacagtcaggacctggacaagtgaggggctgtgaataaccctgaagagcaaaactaggtcgattatatacgactgagtttactaggaaactctattagtttttttacctatttattgacccctttttctccatactctctttatctctttctgataataaaaaaaaaagcagtggcggccaaaaaaaaaaaaaaaaattaataaaaataaaaaaaaatataaaaaaagaaattaattaaaaatatcaaaaacccatagatttcaccaaaaaaaaaaataacattaaaatttaataaattcttaataaaatattatttatatttaaaggggccgccttttt

SEQ ID NO: 36732 - DNA, 349 bp, Gossypium hirsutum
  Clone ID: LIB3148-045-Q1-K1-C8
tcgctgatgccttggaagttttgggaaatgaatctccaaaatcaattgtgaaaggaaggctagccaacaatcgtaacatggacaatgacaataacggggttgagaatagttcacatttgacttcaaatatattggccgagcgccgcatccttgattttagcgaatgtgaaacacccagaaaggaaaccgaaaatgggaaatcctcaacaactgctgcaaccatgagtttctcaagcccctctttctatctttttaaaaagagcggatagtgcctcttattattattttttgactaaaaatccctcatgtttgtaggttatatcgtatatgtatgccttttttttttttc

SEQ ID NO: 36733 - DNA, 417 bp, Gossypium hirsutum
  Clone ID: LIB3148-045-Q1-K1-D8
gccacgcgtccgccacgcgtccgccactcgttcgccacgcgtccgccacgcgtccggccacgcgtccgtaagttatttcgtgaaattaaaggggttgtgggagatggagaggaaatcaaagaagatgatttacaaaagatgccttatctgaaagcagtgatattggaagggctaagaaggcacccaccagggcattttgtgcttcctcattgtgtgacagaagacactgtgctgggagactatttggttcccaagaatggaactatcaatttcatggtggcagagatgggatgggatccaaaggtgtgggaggatcccatggcatttaagccagagaggttcatgagaaatgaacaagtgtttgatataacagggagtagggaaatcaagatgatgcctttcggtgttgggagaaag

SEQ ID NO: 36734 - DNA, 190 bp, Gossypium hirsutum
  Clone ID: LIB3148-045-Q1-K1-D9
gaaaacccgggcgcgaccgcacgcgtccgtagtagacaaattctgtgctttactggttttgcaatgtccaaaattttgagttaggtctgcaatttttatgtgccgtatgtgaagttttgatttgttgttgatcttatgtgattaagactgagaaaagacaattatcaaagagaatgaatttgatactatt

SEQ ID NO: 36735 - DNA, 292 bp, Gossypium hirsutum
  unsure (1)..(292): unsure at all n locations
  Clone ID: LIB3148-045-Q1-K1-E10
ggaaaacccggcccgaccgcacgcgtccgcccacccctccaatccttttcatgattcatgtttcgtcccatatccagctaaccgggtcgtttcatttgaacaacgcggcatgccaataaaccattttntgtaaacacattcctattattgtgttaaatacaaatatttgattggtgtgtattttcgttggtatattataatattttttataaagcacctcctttttacacttctattgactttaaaaaccatcctttttatatttaaatatttaataataattttattcttc

SEQ ID NO: 36736 - DNA, 210 bp, Gossypium hirsutum
  Clone ID: LIB3148-045-Q1-K1-E12
cccacgcgtccgtggaatcttatctatcttcggctccatggaagaaactgaggttagaggttcatcatgcttagccttgtacatttaacttctctttgacctatgctgtttctagccccatcagtgttagggattatcggggtcggcaatcccgacatccgagcatgtagttgactggaatttatgcaatctcaatgagacttttcattt

SEQ ID NO: 36737 - DNA, 366 bp, Gossypium hirsutum
  Clone ID: LIB3148-045-Q1-K1-F12
cccacgcgtccggtgctttatctctgaactttcaatcaaatatctatctgaattgggtagcgtttaaaacagaatattagaatatataacttttggtttgaaaaaaaaaaaaaaaaaaaaaaaaaaaaaaaaaaaaaaaaaaaaaaaaaaaaaaaaaaaaaaaaaaaaaaaaaaaaaaaaaaaaaaaaaaaaaaaaaaaaaaaaaaaaaaaaaaaaaaaaaagggggcggcccttttaaaaaaaccaaaatttatttccccgttaatgaaaaaaaaattttttttaattgggcccccaaaataaaaaaaatggccggggtttaaaaaacttggggtatgggaaaaaccttggtttaacaaaattaa

SEQ ID NO: 36738 - DNA, 359 bp, Gossypium hirsutum
  unsure (1)..(359): unsure at all n locations
  Clone ID: LIB3148-045-Q1-K1-F2
atgtattggacgcaaataggatatatttcagtttcagttatgttgtgctttatacaatatgattgataattatacttgtaaaacttcttaaaaaaatattggccacaggtatttcaaaccaaaaaaaaaaaaaaaaaaaaaaaaaaaaaaaaaaaaaaaaaaaaaaaaaaaaaaaaaaaaaaaaaaaaaaaaaaaaaaaaaaaaaaaaaaaaaaaaaaaaaaaaaaaaaaaaaaatataaataaatttggaaattattataaaaatatataaaaattaaaaaatattaaanagtgggggggggcttttttagaaaggaaattttatttgtgggacacaagggaattttatttttttttt

SEQ ID NO: 36739 - DNA, 350 bp, Gossypium hirsutum
  Clone ID: LIB3148-045-Q1-K1-G1
gaaaaaaagtttaagatagtgggctgacttgggctttaagattttaattaggttttgttttaatgttgggccatgtattggactatttttttgtttatttagtttgggttcttttaggccaaaattagctattacattaagagtgaattttttttaatcaaatttgaagttggatttacaaggtttttaattaaaagttttcacaatttaaaaaaaaaaaaaaaaaaaaaaaaaaaaaaaaaaaaaaaaaaaaaaaaaaatataaaaaaaaaaaaaatattaaaaaaaatataaaataaaaaataataaataaataaatataaaatataaataatttcatcctccctctt

SEQ ID NO: 36740 - DNA, 424 bp, Gossypium hirsutum
  Clone ID: LIB3148-045-Q1-K1-G12
cccacgcgtccggtagaatttatgtttatttaaattaatctcaataaattgatcggtcagaaaaaaaaaaaaaaaagaaaaaaaaaaaaaaaaaaaaaaaaaaaaaaaaaaaaaaaaaaaaaaaaaaaaaaaaaaaaaaaaaaaaaaaaaaaaaaaaaaaaaaaaaaaagggggggcccctttaaaaaaaacaaatttaactaccccttcattccaactaaaaatttttttaaaagggccacaaaaataaaataaatggcccggtttttaaaaactctggaccggaaaaaaccttggcttacccaaattaaatctcttgaaaaaaaatcccctttctccaaggtggttaaaaacaaaaaagcccctaccctatcccctttccaaaaattttccaaccctaaaatgaaaatggaaccccccttta

SEQ ID NO: 36741 - DNA, 246 bp, Gossypium hirsutum
  Clone ID: LIB3148-045-Q1-K1-G5
atcagataatgggaattgtctactaatggtgtgtggggcaatgatttctacaaaaaaaagaagaaaaaagaaaaaaaaagagagagtaatggttcctctttctctccccaccctgtttgtaatagtaccatgtaatgtatgtatatctttgtggcagtccattcaaagaaattcaatcctaaattaaaaaaaaaaatatataaaaattaaaaaaaaaaaaaaaaaaaattaaaaataaaatatttg

SEQ ID NO: 36742 - DNA, 266 bp, Gossypium hirsutum
  Clone ID: LIB3148-045-Q1-K1-G6
caggattcttcatcttctcctttgtccatctccacaataagtaaagctctatcatgtcgagcatgcaggccatcgaccgttggattcaaaatttgagtgaaacaatgatgcatttgaaatgtttagagttttgaattttatgcgttatgatttttatcggttaaagaaaaaaaattcccgtaaagatatccgttcagtttaccctattttttttgttcccctgttataattatttttcatttttgacttattttggtttttttttt

SEQ ID NO: 36743 - DNA, 316 bp, Gossypium hirsutum
  Clone ID: LIB3148-045-Q1-K1-H1
cccacgcgtccgtcacaatgtcaataacaaacttttcttgtttaaaaaaactgttactaggcgatgtcatataataataaaaaaacaaaaataaaatatatataaatagaagataaaaaaaacaccaggggccgccccttttaaagacccaatccttcctcccccttccttccaaagtaaaactctttttttggggccccctaattcaattccccggcccgcgttttaccacccccggaccgggaaaacccttgcgtttcccaacttaattccccttcaagccaacccccttttccccgcttgggttataacaaaa

SEQ ID NO: 36744 - DNA, 274 bp, Gossypium hirsutum
  Clone ID: LIB3148-045-Q1-K1-H2
cttatggtcaggagaataatggaagggaatcacaggatgggaatggtcatccgtgatccggctgcagatgcaattgctgattttgcttgtgaagtggagatcacagagtgtgaacctcttcctgatggacgctttgttttggagattgaaagtcgacggatatttcgcatcctcagatcctgggatcatgatggatatcacatgacccactcatcgctttggatatgatttgtagcaaaagaactagctttgtgacccaaacttttccattttg

SEQ ID NO: 36745 - DNA, 195 bp, Gossypium hirsutum
  Clone ID: LIB3148-045-Q1-K1-H3
cccacgcgtccggatatagaacagtttgaggcttttccggtttcagtgaactgttacttgcgttgtcatatagtagtagaaaagcgagttgtagtatgtataaatgtggataaaaagaacaccacggaatgcgtgtttatgtaccgaatcctgctcgacaattgagtttgaatcaatttcaagttcccagccttc

SEQ ID NO: 36746 - DNA, 397 bp, Gossypium hirsutum
  Clone ID: LIB3148-046-Q1-K1-B10
gttttatgtgtagccacccttggtgacatatttaagggagatgctgatagggcttgagtcaaagtgagttgttctcctttccaacattgaagaggtataatataaaagacagagtgttgatcgacttttcgatcgggggtttatctgatgtctgtctgagctgatttttggacaatgactagtaggctcaaggatttcgattgtgcaaggttggatttttcgtacggattttgtagcttcaagtttttcaatttcaatattagtcatatttgggtgatattctcgacttttttctttagtttgcttgagattatttgttgttattcttggtggagttgtatgctttttattgtggcttcatattgtgattttgtagcaaaccttttgagtggacttt

SEQ ID NO: 36747 - DNA, 341 bp, Gossypium hirsutum
  Clone ID: LIB3148-046-Q1-K1-B11
cacacgcgacacaactcttaacactgtcgtcaactcctgcaactcggtgtctggtaaggatctctgattttgttttgcttgcttgcttgtcttccaatggcgaatcaactcaagtatcccattccagcattaactggtctgattttccaaatgattttctttttggagcatcaactgctgctgcccagactgcaggatctgctaaatcacgaagcaaaggacccagtgtttgggaccaatatattcgagaatacccggacataataatatacacaagccacttgtatgcaactgctgattcatataaccgctacaaggacgatgtatcgattttgaaagac

SEQ ID NO: 36748 - DNA, 112 bp, Gossypium hirsutum
  Clone ID: LIB3148-046-Q1-K1-B2
cagtattggagatggttgctgcttttgaaagggcatctgagaagaaaattcctcttgtaattgcgggacctcgagcccgtgattccggaattggttattctctaacccaaaa

SEQ ID NO: 36749 - DNA, 356 bp, Gossypium hirsutum
  unsure (1)..(356): unsure at all n locations
  Clone ID: LIB3148-046-Q1-K1-B3
ncnngattttcttannaccttttnntaaaaaacccataaaagnatgtgtaaaagggtgtcctttcgtgtgtgggttctcaagtggcgtttctgtgcttctcaaggtccaattgcgtagtggggaccatgannagagaagggctttaagatgaggggcagcatctccctgtaagccgaaagatgccactttttgagttcaaggggtaagctcaactttgtttgaaaactttaaaaagctctgcttggagatgattcccaaaagtgtgggatggggccaacttctggggcttagctgatgagatttgcagctacctccagaatgggatgtagaaagttgctacttgaaatatgccgat

SEQ ID NO: 36750 - DNA, 239 bp, Gossypium hirsutum
  Clone ID: LIB3148-046-Q1-K1-B8
tgtaaattgggcttgggtaatttagtttgtgccattcataattgggcttgtacaccattagagtggtgagaagccaaaatgggtgattaaaagatccaaagagcatgctttgcttatgaaatgaatcccaccatcagaaattaatgccttattataaaaaagggttatataaagtttttttttttttattatttttttttatattaataaaaattgtttttttattttatatttatttt

SEQ ID NO: 36751 - DNA, 248 bp, Gossypium hirsutum
  Clone ID: LIB3148-046-Q1-K1-C6
ggacacccacgcgtccgcccacgcgtccgatttggagctaattgctatccttgtctttaagacttcagtaaacaaatgcaaataactagtttaaatcttgtcagcggtttgtcaattgcaaaccacattttatgctgtcattctccattaaaataaagcttttacttttaattttttaccattttacacaatattatttttttttttcttatctttgtaaatcttttatattttattctttttctttt

SEQ ID NO: 36752 - DNA, 332 bp, Gossypium hirsutum
  Clone ID: LIB3148-046-Q1-K1-C8
gacgtagtagttctattatggtgtcaactaaaaataaactactggccgttgtacaacaacgtgactactggaaaaaccctgtcgctaaacaaattaatcgtgttgcagaacatccttttttcagcaggtgtcgtaataaagaagagggcagcaatgatcgttcttaacaacagttgagcatgcttaatggataatgggacgcgcgctgtagcggatcattaaccgcggctgttgtggtgactaccagcatgatgactgctatagttggcagcgtactagcggccgctccttttgctttctttcctttctttgtcaccacgttcggctgtttt

SEQ ID NO: 36753 - DNA, 451 bp, Gossypium hirsutum
  unsure (1)..(451): unsure at all n locations
  Clone ID: LIB3148-046-Q1-K1-C9
gttcctctgccggttctttgttcctcttttccactgaagaagtctctggttctttgttccggttcggcaccaccggtgacaagtcaggagaccaacctagtggctagatgtcgacgagtatactgccatgctcatgattatcacatcaattttattcaaataacaggtagctagtgggttttgtttttattgcaattttgtggagttttggctccgtattttagtattatctgaaaatcaattgaagaggaagtattctttttctgggataatatgtggttgaatcacacatcttacattttttcttctctgatggaaaaataagtcttcattagctttantcaattttttttaattatttaaaaatttttctaacatttatttaatttatttctttttttttctctttttttttttttattctatgtttatctttttctatttttttttt

SEQ ID NO: 36754 - DNA, 300 bp, Gossypium hirsutum
  unsure (1)..(300): unsure at all n locations
  Clone ID: LIB3148-046-Q1-K1-D10
gctagtattcaacataaagtacacacactttctgttggcctggggagctgacaaaagaccttggtgtgttagctatgatcatatcatgctataatgtgcagtcttatctctaaacaaagggacaggagacataaaatattctatatatcagaactgtacaagctagcacgtcaactaatattgacattgactaacgggactcgaattaatactcacacaagaatttggttcttcttgaactttattaaanaaaaaaaaaaaattaaaaataaatatttaaaaaataaaaaataaaatttt

SEQ ID NO: 36755 - DNA, 310 bp, Gossypium hirsutum
  Clone ID: LIB3148-046-Q1-K1-D4
agcaattacggggtataagttgagcaaggagtgtatgatgaaagtggttttggatgggatgataagaggaaaatgatcgcatgtgatagagcgacatatgatgcagcagtgatagtaatatatgtatgtatatgttaagtatatttcaattgttttttacttgttattctaattgtgtataatatccaacaagcacacaagaagtatgaactatttttgaataaaagcattgatcattatgaaaaaaaaaaaaaaaaaaaaaaaaaaataaaaaaaaaaataaataaaaaatataaatataataaataaa

SEQ ID NO: 36756 - DNA, 235 bp, Gossypium hirsutum
  Clone ID: LIB3148-046-Q1-K1-D5
attggaaggtggacgcagtctggtacgacaaatttgggtatcccctatgaaggctggggtgcaggggagtgcggaatctaatgacgtgtctatgaggccatcccatcacataccgaatggcagaacttttaccagaaaagtatcgggatgagatagctccgcgtgatgccattataggctgtatactgatactgctaagcagaagacgacaattctactaactacatactactaa

SEQ ID NO: 36757 - DNA, 347 bp, Gossypium hirsutum
  unsure (1)..(347): unsure at all n locations
  Clone ID: LIB3148-046-Q1-K1-D7
cccacgccttccatcccgagcccccgccctnnnttnngttttttttttttttnnnnnnnnnnnnggaaccaaaagaaaagggattggttattggatgtcccattggatcctaacttactgctcttacatttgcaactataggtgggccgacctccccctttggagttgttcaagttttttcaatctttggtccgggccttttgtttttcttggtgtttggttggtagattggtttctagattagctaaaataaatttaatcaattaggctctttttgatagtctttaatgcatatgatacgatgcatgaaatgaatgcaaaaaggcgtcaattctaatttgatttca

SEQ ID NO: 36758 - DNA, 414 bp, Gossypium hirsutum
  unsure (1)..(414): unsure at all n locations
  Clone ID: LIB3148-046-Q1-K1-E1
ccgggttcctggttgaatgaaatgctgaaaactttgggttgctgtggtttgtacccatcattgtgtatatgtatatatgaggtatgcgcaggcttggttttctttctaaacaaagaggtgagtgtgtgtgtatatcttgtcatatacccttggtcaggcctaatcatgtatgtgaacagttagaagtaaagacagtgaatgccttttacatgtatttgccaagctatcgaaactcaataaggccatgcttggttggattgttagtggcgtctgatgttatttggtacagctgtaatttaacaagtcacgtgactgacttttataaatgagttgggggatactatatttatttaacactgttgttttgagtctttttnnanaaannnnnnnnnnnnnnnnnnnnnnnnnnncccc

SEQ ID NO: 36759 - DNA, 437 bp, Gossypium hirsutum
  Clone ID: LIB3148-046-Q1-K1-E6
cctggccatatcagtttctcagggagaaattgaagaggaaaagctagattgttatgatgtccattgttatgcagcatcaagaaatgaaatagaagaagaagtgagaagagaaggttccttcgaattggaaagggtagagatgtttgagattgagcgagaagttcagaggggagagagctacggcacagcagtggccatgacagtgagggcaatccaagaatccatgctttacaaccattttggaaatgggatcaacttagatgccttgtttaacaattatgggaaaatgatagatcaagaaatggctaaacaagaaattaaacccatcacttttcttcttgttcttaagaaattatgatatggtatcatattagatatattacattaaacttgattttaaaccccatcagttttggtataagtattaaagttcaaac

SEQ ID NO: 36760 - DNA, 365 bp, Gossypium hirsutum
  unsure (1)..(365): unsure at all n locations
  Clone ID: LIB3148-046-Q1-K1-E7
gggaaaggaaggtattgatgacagtattttcagttaggaatatattgtgacggtatattttgttttggttttgtttttaattgaatcaggggagagtggatgtgtttgtgtattgaatttaaggttatataatataatgacattattggggtttaaatatgtttaatatgaacatggcatttgcctaaaaaaaaaaaaaaaaaataaaaaaaaataaaataaataaaaaaaatattattttaatatatttttnttaaattaaatattttatttattttatattttttctttttatttatttaatatttattttttttttattataattatttttattttatattattatttatattatttttttt

SEQ ID NO: 36761 - DNA, 444 bp, Gossypium hirsutum
  Clone ID: LIB3148-046-Q1-K1-E8
cccacgcgtccgaaacaagcagcaaagatcgttgttgccacaatcttgatcttgaacctcttgcaagtggaagtacgcccaaggtggaagatccagctgatcagcttttgtcgagcaatcttcaacgcggctatggagagtgtagtttctctgctgcaggtctaataacttactctgggccaatagcatattcaggcagtctctctcatagatcagatagcagcacaacaagcactcgttcttttgccttccctatattgcaatctgaatggaatagcagcccggtaagaatggcaaaagctgagaggagacattacaggaagcaccgaggttggagacagggcttcctttgctgtagattctgaatacttctctattcaatccataggttatacaaatatattattttgcgcttatcaaaattatatttttgggtgggggggg

SEQ ID NO: 36762 - DNA, 364 bp, Gossypium hirsutum
  Clone ID: LIB3148-046-Q1-K1-F12
tttaaaagtttggcctttattatatgctttttcctggggtagctatcattttggttaaaaaaacgtatactcaatggtctctcctctttgcttttggcaaaacatagtgatagctttagccattattatatgctttttcatgggtgagctaccattttggttaaaatttctttaacttaatggtctcttatctttgcttttggcaaagcataatgatagctttggctgaggccatgacctctctatgttgatgaatgcactgggagagatattctgaagtaaaatttaggagaaaatgttagtcactctatgtttttagtttttcttcagatttggtaaccatatttaagtctcactgtcatta

SEQ ID NO: 36763 - DNA, 146 bp, Gossypium hirsutum
  unsure (1)..(146): unsure at all n locations
  Clone ID: LIB3148-046-Q1-K1-F3
gcgtcncnngcccacgcccgtccgnncccacgccgtcncnngctagatcgggcgaggcggctctngctctagaggganntccaagcnnttacgtagccgcgtgggcatgcnngacgtcannntagctctntnnctatagtgggtca

SEQ ID NO: 36764 - DNA, 504 bp, Gossypium hirsutum
  unsure (1)..(504): unsure at all n locations
  Clone ID: LIB3148-046-Q1-K1-F6
ggaatntcccggggtcgacgccagcgcggtgccgctttanncattgcggatgcccatacatggngnnactgcttataactatgtgtccanngcaggtgnnngcttagcnncactcgcgtatggcgcatacgctatggcgtcagaggcgtganacgcggggatccctntctcacaaattcnaaccaatangnncttggacccatcaatnncaatctgatggggctctcatttatttcaaacccacacctctnntctctttatcacanggagggaaccatattnagcagtggttctaagtggggataaaaccaggaatggctgttgaaatacgagccaacttggtgattatccaaagcaagtaaatgcacaatgaagcatngatggtaggtttcccactgttgcctgatgtgattcatcatcattgagttgtgtacaataatctatttggattgaccaaatgttggtccgttaccatggtactttatcaccataaaaaaaggggat

SEQ ID NO: 36765 - DNA, 173 bp, Gossypium hirsutum
  Clone ID: LIB3148-046-Q1-K1-G6
cccacgcgtccggaattgaaatttttgttgtaaactttaatcattgtttatttggcgtttgtttgatggtggaattgatataaaccagcaaataatgcagtaaatggcaacgtaaactagtcccgatgtatatatatatataaaaatccatataaggcattcttgtttgggat

SEQ ID NO: 36766 - DNA, 212 bp, Gossypium hirsutum
  unsure (1)..(212): unsure at all n locations
  Clone ID: LIB3148-046-Q1-K1-G7
taattaagtaagaaagtttttttttctctgcncggatggatgttaaaccagcgggttattatacggatgtgaggaaggtccaaaaaactgttctatccttttagatgcctgtacttttttggggagcatcaaagcttgttgctgttggttatggcatcaagaatcttcatatcatgctttccataatttatgattctttattctgttgatac

SEQ ID NO: 36767 - DNA, 277 bp, Gossypium hirsutum
  unsure (1)..(277): unsure at all n locations
  Clone ID: LIB3148-046-Q1-K1-H5
gcccagccacgcgtacgcgtccttcatcttccttcttcctcttccggttctcctagccctcttcaacgccgccgctgtcctcttggccgacggtagcaagtgggctaggaagggcctangtcggccgccgccgttgtaggtgcaacttgggtcggtggctgccagagggatcaaatcgtaaacgcaggaaaggtttttggggccaaagtgtaatttagagaaaatatttgggtcaaattgtaatttataaaagttacggggttaaaatatacttttc

SEQ ID NO: 36768 - DNA, 375 bp, Gossypium hirsutum
  Clone ID: LIB3148-047-Q1-K1-A2
cagagttttctctgccatcctattttcctttggtttttgatcccttggtttagactactacttcccttccatccttttgttgcatggtgttaatgaccggacgcccaatctctattcatttacatatgttggtgatacctttgagatcaatcaagtggtttgacatatgtatcttttttccaaattttagtcttggatttttccggagtgtcttctttcttgtgcctttacatatgttggcgatatatataccatcaaggatagcagtggctatcttggcattactgtatgagtttacttttagccacccaactttaaggctctacttggaatgaaagatggaaacgagtgacaatggaaaaatttgtaaatcta

SEQ ID NO: 36769 - DNA, 292 bp, Gossypium hirsutum
  Clone ID: LIB3148-047-Q1-K1-A3
cggaatggaaggagccgacccaagcgaccgcccacgcgtccgatgattttggttatctcattgtttcaggcttggaatatatctttggaagatggagacttttgtaatgtataaactagtagtcttccatggaaaaaaaaaaaaaaaaaaaaaaaaaaaaaaaaaaaaaaaaaaaaaaaagaaaaaaaaaaaaaaaaaattttataaaaaaaaaacaaacaaaaaaataaatatttttaataataaaagttaaattaaatttaaatttgaccggttgttttaaaaataaatt

SEQ ID NO: 36770 - DNA, 339 bp, Gossypium hirsutum
  Clone ID: LIB3148-047-Q1-K1-A5
cttttaggtccaaaaaaaaaaaaaaaaaattttttttaaaaaaaaaaaaaaaaaaaaaaaaagagaggaaaaataagagagaaaaaaagaaaaaaaaaaaaaaaaaaaaaaaaaaaaaaaaaaaaaaaaaaaaaaaaaaaaaaagggggcgccccttttaaagaatcaaagtttacttccccttgcttgcaaagtaaaaatttttttttagggccaccaaaattaaattaactggccggggtttaaaaacgtgggaactggaaaaaccttgggtttcccaaattaaatcgctttgaaaaaaatccccttttcccaagttgggttaataccaaaaaggcc

SEQ ID NO: 36771 - DNA, 332 bp, Gossypium hirsutum
  Clone ID: LIB3148-047-Q1-K1-A7
gcagaaattagctgcttgtgggtttgctgatgaggctgttgagaaatgggcatcggcttcgaatttggcttcgctttctcttttggcagagccgcgtcttcaaggttccctccttaaagttacggcatttttattcaaccaagcgaagaacattagagtggaagaagatcgtgaagaaagcagcaaagaaaactggagtcaaacaaagatgaaaatgataacatcgtggctgccgttgttgtgcagagggagcaatggcagcgacgtgccggtgctgagcataagcgaaagagccgagctcgagaagatattggaggacgccattgaaaagc

SEQ ID NO: 36772 - DNA, 277 bp, Gossypium hirsutum
  Clone ID: LIB3148-047-Q1-K1-C1
gaaaatagaaaaagagatgtcttctccaagcaaacgccgagagatggacttgatgaaactgatgatgagtgactacaaggtggagatgatcaatgatggcatgcaagaattttatgttgaattcaatggaccaaaagacagtaaaaaaaaatcccttctttaaaccctcttttaattttcatttattttcatgatctatctctttacttttgctcaaaacttgattttattgggtttttctcattcatctcaaaagttatcttctttttttcgcgtg

SEQ ID NO: 36773 - DNA, 302 bp, Gossypium hirsutum
  Clone ID: LIB3148-047-Q1-K1-C2
cggaaaggggggatcccattttattgttgtcataaaatttggggggggggtggggaatcaaacccaaacatttttcagggtggggagacacacccatttttagcttaaaacccatttattttcatagggaatgcttaggatgaaaaagagctgtttttttttaaaagcatcaaattttgggtgtaggggatgaattagttgaagctcaaacatcaaattttattttgatatccattttttccacactcactcgaacctaaagaatttaatcagttcttttctaaaaaaagaagacaatttta

SEQ ID NO: 36774 - DNA, 198 bp, Gossypium hirsutum
  Clone ID: LIB3148-047-Q1-K1-C5
cccgactctattgtcgaattccagttactttataccattcttgatgacagaacactgatgatcaattccaactggattgctcaaatagaatattaagacacctaaacatatttcaaataattttgatagcaaatttgtacttgtgttcaaaaatatatcgaacttccagttaggtttggtggacttaggctgcaaatt

SEQ ID NO: 36775 - DNA, 332 bp, Gossypium hirsutum
  Clone ID: LIB3148-047-Q1-K1-C6
gcaacccaggtggggtatatgacaagcaaaggtttcatggtacctctgctcaacagtcttgtccagatcagccttcttcaccccacctccaaagaggactttgattttattgccaaatctgtggctgaagacgaggattctcggcccctttcttttccatcagagggaagaaataatggagtgccattcgtgaaaagccccttacaaggcatgtttgttcacatctcactcgagatggtcaaccattggcttgtgcctgtatgtacattatgaatgataaaatcatttttttaaaaaaaaaaaaaaaaaaaaaaaaaaattatttatttttt

SEQ ID NO: 36776 - DNA, 422 bp, Gossypium hirsutum
  Clone ID: LIB3148-047-Q1-K1-D1
ggcggccgggatatgacgacggtgaggttgttgatgaagcagaagcttccaccggcgacgatatttccggcgtttacgtgtagggtaagggtacaatacagttgtgggaaggataggaaatcgttgacgttgccgtgtgatgtatggagaatgaacggcggcggaattgcatggcggctcgatatcaacgccgctctttgcttgggccggtgagaacaaaaaaaaaaaggggcaagaagcagccattttctttgcatgaagaaagcttagcatctatatattctggtcatatgccacgagtccgaggcttgtaggaattctgtgaacaaaaatggaactccgacaacgtaattaaagaacgaggtgagcaatcaccgcaatggtcttgtaatttaatggtagttttttttttttttgttaaa

SEQ ID NO: 36777 - DNA, 391 bp, Gossypium hirsutum
  Clone ID: LIB3148-047-Q1-K1-D10
catggttatggtgtttggtgagatcacgactaaggccaaagttaactacgagaaaatcatgcgggatacttgtagaggtatcgggttcacatccgcagatgttggccttgatgctgataaatgcaatgttctagttaatatcgagcaacagagccccgatattgctcaaggagttcacggtcacctcacgaagaaacccgaggaaattggggccggtgaccaaggtcacatgttcggttatgccactgatgaaactcctgagttgatgcctctaacacatgtgcttgcaactaagcttggtgctaagctcactgaagtaagaaagaacaagacgtgtccgtggttgaggcccgacggtaagacccaagtgactgtcgagtataaaaatgat

SEQ ID NO: 36778 - DNA, 290 bp, Gossypium hirsutum
  unsure (1)..(290): unsure at all n locations
  Clone ID: LIB3148-047-Q1-K1-D12
cccacgcgtccggggggcatgcggcgtcataaagggttagggaaccctagggttttgttgtgactttgttgaatgtttgggcttagtttggattaagggttttgggccatattgggccattgtaatggattatttaattattttaattttggctgttttgctggtatggctcaggcaaaaattaggctctacaatttttataattttnannttttaaatcaaatttttatcataaaaaaaaaaaaaaaaaaaaaaaaaaaaaatgcaagagaagggattctttataaaat

SEQ ID NO: 36779 - DNA, 302 bp, Gossypium hirsutum
  unsure (1)..(302): unsure at all n locations
  Clone ID: LIB3148-047-Q1-K1-D3
cccactcgtncnnngactcatgttcggacttgatggcctatctcagattgaataacccccgcaggagtttacagggaaggaagggggtcatataaaatatctttaaaaatccaagacctatgatacatgtatgcattgactgtacttggagattatatttgctttataaatttatccttatgatttttaaaataattagaattaatctactaattaaaattgatttataatatatataaaatatattttttttaaactctttcttattacttattattattatttttatttattatatatat

SEQ ID NO: 36780 - DNA, 413 bp, Gossypium hirsutum
  Clone ID: LIB3148-047-Q1-K1-D7
gtgaaaagcttagaagattcgctttgtatctccgagctggtggtttgaccgatgtaggcctcagttatatcgggaaatatagccctaacgttagatggatgcttttaggatatgtcggggagtcagatgccgggcttttggcattctcccgtggatgtcctagcttagtgaaactcgaaatgaggggttgctgctttagcgagcaagcaatagcacaagccgtgatgcggttaccctctttgaggtacttatgggtgcaaggatatcgagcatcaccagccggtcgcgatctattagccatggcacgtccattttggaacatcgaactgatccctgcaagacgagtcaatatgactaatcaagtcggagaaccagtcgtggtcgaacatccggctcatatacttgcctattac

SEQ ID NO: 36781 - DNA, 219 bp, Gossypium hirsutum
  Clone ID: LIB3148-047-Q1-K1-E1
gccaggcgtacagcttgaaggctggggccatgcatatttaataaacccgataatgtggagagttgtgatgaagggagcctgttcatgttcagtcaagaaatgattctcaaggagggtaatatatatacatggaccggtgttcatgattgtgatttctttttttttatatgaaatttccgtagacgaaaaaaaaaaaaaaaaaaaaattaaatttaataa

SEQ ID NO: 36782 - DNA, 347 bp, Gossypium hirsutum
  Clone ID: LIB3148-047-Q1-K1-E12
gtttgttttcaattgaaagaatggcagtttttttcaaaaaaaaaaaaaaaaaaaaaagaggaaaaaaaaagaaaaaaaaaaaaaaaaaaaaaaaaaaaaaaaaaaaaaaaaaaaaaaaaaaaaaaaaaaaaaaaaaaaaaaaaaaaaaaaaaaaaaaaaaaaaaaaaagggggggccccttttaaagaaccaaattttactcccccgtttttccaagtaaaaactttttttttggggcccccaaaataaaattcatggcccgctttttaaaaacgttgggacgggaaaaaccctgggttacccaaattaaatcccttggaaaaaaatccctttttccccggttggtt

SEQ ID NO: 36783 - DNA, 279 bp, Gossypium hirsutum
  unsure (1)..(279): unsure at all n locations
  Clone ID: LIB3148-047-Q1-K1-E3
cccacgcgtncgaaggcccatgaatctggactggtctgacagtcaactatcaacaatcaagggcggataattaccgaagtgaagcgagccaccttaaccgtgtgcatatattttgatcttacgtcgagggcccatgagatcaaagactagggtggatttgggcttcttgttatctttattgcgactattagaatagattggattgtaatgtgtgttaccgcatgcatggctgatacatctaagaagttaatttggttgaatagtaccgacgaaacgatc

SEQ ID NO: 36784 - DNA, 230 bp, Gossypium hirsutum
  Clone ID: LIB3148-047-Q1-K1-E5
gagtagggtttattaggttattggaataatatgctatataacattaattcttttggcagtggtattttagggtgtaatagtaccttaaaaaattgaatgagtttggtctttccgaggaggttctgtcactgctcaacttgtgatattgtctgggattttgggagtgaaatggcggctgtaagctattcaacagtcttttctaatcaaatcaaaattaaagttttgaatgt

SEQ ID NO: 36785 - DNA, 256 bp, Gossypium hirsutum
  Clone ID: LIB3148-047-Q1-K1-E7
cccacgcgtccgaaagcccatgaatcttgactcggctgacagccaaatatcaacatgaatgtcacataattaccaaaatcaaacgatccaccttaaccgtgtacatatattttgatcttacgtcgtggcacatgagatcaaagcctcggtttgttttgttcttcttcttttcttttttttttttattaaataaattggattttaatgtttgttaccgcatgcatggctgataaatctaaaaatttaattttgttgg

SEQ ID NO: 36786 - DNA, 324 bp, Gossypium hirsutum
  Clone ID: LIB3148-047-Q1-K1-F11
cggacgcgtgggtagttctagatccctagtttccgccctttttttttttattttttgccggcacaataaagtaggggagtgagttacctttttcccaattaattaattttttctataatgcatacatgtttgatgcaaaaggaaacaaataaacattcctactttatcaactcccataccttatatactctacatatagacaagggatttgcttcacataattgtcgctcaaaaccattaataataacataataatgaaaagatgcataattaataaatcaattattccttaaacacactttgtttctaaaatcaattataatt

SEQ ID NO: 36787 - DNA, 381 bp, Gossypium hirsutum
  Clone ID: LIB3148-047-Q1-K1-F3
gaaagatcaatatctctttgactattagtgaaaccagtgagctaaagttaagtgctggaaatggagattgtgtgcttcacatgaaccctcttgtacctgaagggaactttttcttaaaccttccttcttatgacaagttgctgactccagtaaatggcgcatacttcttgattgcaaccattgtaattttgggaggatcatgggcttgttgcatgtttaggaaagggaggcggcatgatggtggtataccttaccaagagctagaaatgggattaccagaatccatgcaagctactgaagtagaaacggctgaaggttgggaccagggttgggatagcgattgggatgaagacaaggcagttaaatcaccaatgggacgac

SEQ ID NO: 36788 - DNA, 134 bp, Gossypium hirsutum
  Clone ID: LIB3148-047-Q1-K1-F4
cccacgcgtccggtttgtactctacgcactcatataaccatggcttgtcaaagtatcccttatgcctatatccgaaaagatttgtagaatgtgatttgaactatgaagtacatgctggcatcgacattgttttt

SEQ ID NO: 36789 - DNA, 331 bp, Gossypium hirsutum
  unsure (1)..(331): unsure at all n locations
  Clone ID: LIB3148-047-Q1-K1-F9
cccacgcgtccgcccacgcgtccgcccacgcgtccgcccacgcgtccgattatattgaaatataaaaattaaaaatttgtaattagatatggacacgattgtattattataaaaattatttttttatttttaattaattaaacacttatcaatttctgtcaatgtattgtaatattataatgtttttgttctaatatatgataatgcacattatttgtcatatttttgttccgatttaatgcacactactattttagtgcaatgtttgtcaataattgtttcaaaatggtatgaactttggaccaaatgaaaaaaaaaaagtttttttnna

SEQ ID NO: 36790 - DNA, 138 bp, Gossypium hirsutum
  unsure (1)..(138): unsure at all n locations
  Clone ID: LIB3148-047-Q1-K1-G10
ggaanttcccgggtgcgaaccgcacgcgnntccggtattatntnngtgtattttaaagttggaaatttgttatgcaagttacctaaacctttnngtgtataaagtcagatnnggattctaagatagtgttagttcgtg

SEQ ID NO: 36791 - DNA, 254 bp, Gossypium hirsutum
  unsure (1)..(254): unsure at all n locations
  Clone ID: LIB3148-047-Q1-K1-G11
cccacgcgtccgatttcaaaccagcatagttgaaccttgttttcaaaattaacgttatcggcgaatgtatgtttgtaattggcgttgcctctacgagcacttaacaagccttaccattttttggatttttttttaaggcaacctattggaaggggaccggtttttccaaaaaaaaataatnaaaaaaaaaaaaaaaaaaaaaaaaaattaattaattttaaattaatttataataaataaaattaatatttttt

SEQ ID NO: 36792 - DNA, 303 bp, Gossypium hirsutum
  unsure (1)..(303): unsure at all n locations
  Clone ID: LIB3148-047-Q1-K1-G12
aaaaccgggccgaccgacgcgtccggggctagcttgtatgtactcatgcttctttctctcnaagatgaggaatcaatacatggttggcagatacaccgtagccagatgggtgccttcatctttgctgcgaggtctgcgccttgtgtcaagaataccgcgagctcaaaagccgtggcttcgatatgtacattggatggcatgcgaacatggagaatatgcgaaatcgtgctatgcaaatgtcaatgcctccggtggtggaagatgggatgaaacgataaacaacgatgattctcttttctaaat

SEQ ID NO: 36793 - DNA, 477 bp, Gossypium hirsutum
  unsure (1)..(477): unsure at all n locations
  Clone ID: LIB3148-047-Q1-K1-G9
gaaacccataaacccctccctctccttgatgctnaggaacaaaatcatgttgttgtttgcgattttaaagagtgggtgggaagagaaataactgtttaactttataactatttgtctatcattatgaaccctttatttctcttgatcaatacctttaatatcattttttttttaattcttttgttttgtcataacataatttatgtatctcttatattcttttttttattcttaacttttttttaattattctctattttttttatttcctattttttactctttcttttacttatatatattattttttcctttaattttctattttatttttatatttttaattactttttatttcttttttttatattttcctctatactttttctatttcttttttctttttttaatatttttttcttttctttttttatttttttatcttttatttttatttattatttattttttttattt

SEQ ID NO: 36794 - DNA, 441 bp, Gossypium hirsutum
  unsure (1)..(441): unsure at all n locations
  Clone ID: LIB3148-047-Q1-K1-H10
gaaaacccgggcgcgacgcgcacgcgtnnccgcggacgccgtctcgctccacgtccgtccgcctcacttctgtccnnngcccttaaatttaatnntttacctcgtccagtgtcatactccgtgttgggtgcccaaganngattttgaaaccccggatcgcttanntggcaattgggcttcggaaggaaaaaccacccgcattatgcccaatcactgtnngacagggccatacnncttcttctaaccattgatttgcattatgnctcatnntgctcccgtaatttagaaaggatgtnaaagtttggtggtgatatgattcccaaaaaggcattgcagaggaacccatttcttaaacacccatctccggtnnggcgtgttcactgtgcnagtgaagacccaatggaacgttgaaattcttggctattttcataaagggtgaaa

SEQ ID NO: 36795 - DNA, 346 bp, Gossypium hirsutum
  Clone ID: LIB3148-048-Q1-K1-A10
ggagaaaccagaaagaacggaatatatataaataaaatccacactcaaatgtaacaaaccaatgccgaagacatgaaaattccaaaacccatctctccttttaggctttcatctcttcttcgcacccaaaaagacccaaccctagccttcaaccttgtcaaaaacccaaacccagacctccgtcctatgacctcatcatcaccaagctcggtcgcgtcaaaatgttccaagaaatggaacaagttcttcaccaactcaaaagcgacacgcgcatagtcccagaggagatcattttttgcaatgtcatcaagttttatggtcgggccaagttacacgaacgtgcact

SEQ ID NO: 36796 - DNA, 203 bp, Gossypium hirsutum
  Clone ID: LIB3148-048-Q1-K1-A12
attagattttccggtgccgccaccgccatggtctcatcctggtcatcattcttcatgcagttgttaaaataagtgtatcccatttttttatatacaaagaagaaataatgaattttatcgtttattaaaaacgagaagttagtgttttatttggatttgtaaaaatttgaactttttcataaaatacaagaattagatttgac

SEQ ID NO: 36797 - DNA, 364 bp, Gossypium hirsutum
  Clone ID: LIB3148-048-Q1-K1-A3
accacgcgtccgaataaatcccactgttgtttctaaaattttcatttacaagtttaatggcaaggaatgaccggcggcaatgttgaaatggggtgccattatatgccaattaaaaaaaaaaaaaaaaaaaaaaaaaaaaaaaaaaaaaaaaaaaaaaaaaaaaaaaaaaaaaaaaaaaaaaaaaaaaaaaaaaaaaaaaaaaaaaaaaaaaaaaaaaaaaaaaaaaaaaaaaaaaaaaaaaaaaatcaaaaataacaaaaaaaaaaattaataaaaataaaaaaatatatgggggggggcctttataaaaaaaaaaaagtatttaattcccttgcttaaaaataaaattttttttattggggcc

SEQ ID NO: 36798 - DNA, 240 bp, Gossypium hirsutum
  unsure (1)..(240): unsure at all n locations
  Clone ID: LIB3148-048-Q1-K1-A4
ggccgacccgcgcgtccgcccacgcgtccgatgaattgcagatgtcggtctttgagactgttgcaaattgcaacacttagaacagttgtatggtaggtattctttaataaagaacatattgattgttgtcaaagatgtaagaaaaccgaaagatgaatcggagtgtttaggaaggcttgattataatcttcatagtttttcattctattacactngttaatgaacatgcaatnttaattg

SEQ ID NO: 36799 - DNA, 311 bp, Gossypium hirsutum
  unsure (1)..(311): unsure at all n locations
  Clone ID: LIB3148-048-Q1-K1-A8
gctaatatggatttcacggtcaacattcctaaaggtgtgcaggttgattgggaagccattgtgaacttcgatgctaactccttcatggattcagttaagagttggctgtatccatccctaaagatttcgtcatcgtggaaagattttcccgatgtaacctcaacttttgcaacgacgggatcggttgtcgccgctctgagctcatatgatgattgaattattcttcttaacgtaaacagaattactgccagcgcaaatgtaatatctgcagttgctattttattggagtggatntttttcctgcatgtcgt

SEQ ID NO: 36800 - DNA, 415 bp, Gossypium hirsutum
  Clone ID: LIB3148-048-Q1-K1-B1
gcgctctttacatactggacctagccctccttaaaaacacaatattcttgttagttgtttgtgtgaaaattatgttgcaaaactgaaatccccttttcttaaaaaaaaaaaaaaaaaaaaaaaaaaaaaaaaaaaaaaaaaaaaaaaaaaaaaaaaaaaaaaaaaaaaaaaaaaaaaaaaaaaaaaaaaaaaaaaaaaaaaaaaaaaaaaaaaaaaaaaaaaaaaaaaaaaaaaaaaaaaaaaaaaaaaaggggggggccctttaaaagaaccaaagtttacgtcccggggattgcagaggaaaattttttttttggggcccccaaaaaaaaataaccgggccggggtttaaaaacgggggaaggggaaaaacccggggttacccaaaataaattgctttgaaaaaatccccttt

SEQ ID NO: 36801 - DNA, 334 bp, Gossypium hirsutum
  Clone ID: LIB3148-048-Q1-K1-B2
acccttccaatcactcctaaccggagattgacctatattgtttctccttcggtctacagtcagccaggggtgtgcgagtggagttccattccacatgatcaaaatgactactgtattatcggaaactggaccagagaaatcattgcaataaagtcaattgtaaagttgatggccttagattgctcaaaattctgtcattttttggtgctcagttgccacattagccgcatctaaccaattcagtggatagctcagttaataggtttttttttttttttaagatcttcaatttttacatatttcccacttttgtatataggtaaatatgtaaatg

SEQ ID NO: 36802 - DNA, 369 bp, Gossypium hirsutum
  Clone ID: LIB3148-048-Q1-K1-B7
aattttaacaaaacaggaatgagacctgttgtaactacagcttgggttgtaacagttggggctataaagaaaacactttctcgacttctcatactttcagtttctatgggctatggtgtcgtacgcccaactttaggtggtcttacctcgaaggtgcttcttattggagctacgtattttgtggcatctgaattgcttgacattactgagcacgtagggaccatcaatgacgtatcaggaagagcaagactcttcctaggccttcccgatgcattccttgatgcatttttgatattgtggattcttacatctctttccaaaacactagagcagttacaggcaaagagaatatcagtgaagttggacatc

SEQ ID NO: 36803 - DNA, 385 bp, Gossypium hirsutum
  unsure (1)..(385): unsure at all n locations
  Clone ID: LIB3148-048-Q1-K1-B9
cccacgcgtccgcaaaatctaccctgtttcaaaagaactctttgctttgagttacgatgtggtccaaaagcctgacttgaggtatttcaagttctcaccggacggtaaaaaatcacccgacgtcgaaattcccttgcccgtacctaccgcatcaataatttagttaattaaataacatacatagtgcagtcaaaaggtaattaactgggggaattctattccctctttacatcattccattctgacggttgctacgtcacctgcttccacttccaccttttatattttctgaattgattttgntccangagaaaagaaaggaaactcggactgaaatgaacataatgggcaaacttttaaatgtaaaaatcatttgtggcaattt

SEQ ID NO: 36804 - DNA, 258 bp, Gossypium hirsutum
  Clone ID: LIB3148-048-Q1-K1-C5
gcagaggctgcttaagaagatgagcgaacaacaaagtcttagctcggtctaatgatggatgggggtggactttgtgcgtaattgaagaccttctagtaattatcaactcagtagattcattatttttctccaattctgttctttaaatgcattgctagactgtcatgatgaatgcaaaatatgtaagtgaccccacaaggcaatgttcttgatgccaaaacctaccttgagaaaattaatatgcaagagttcttaagc

SEQ ID NO: 36805 - DNA, 349 bp, Gossypium hirsutum
  Clone ID: LIB3148-048-Q1-K1-C8
gaaggatatgtgcttaagcacgtgtgttttaggtgaaaggttcgagggttggtattccagaagaaaaaaaaagaaaaaaaaaaggacaaaaaaaaataaaaaaaaaaaaaaaaacgtgcgcgttcatgcaaaaacaataactaataaatagtgcaaccaaaatacaaactactggccattgatagacaaattcatttacatggaaaaccctgaaaaaacccaacttaatcaaaatccatgacatacccatcttgacacgcttttgtaaaaatgaagaattccgaaactgtcgtcattacaaacaggtgcgcacccaaaatccataactaaacgcgccctgtctcaatgc

SEQ ID NO: 36806 - DNA, 301 bp, Gossypium hirsutum
  unsure (1)..(301): unsure at all n locations
  Clone ID: LIB3148-048-Q1-K1-C9
cgagcttgaagattaaatgaaatcagatattatcgtctctttttctccttggatatttttgcagtgggtgaattggggggggggggagtgtttttggtggcaactgcgagctatttagctgcaggtttttgtgaactgtggatttgagattgtataacacccacgtctacaatctgataattaatctaaacataccccaaattaatgtttgtttgcatgaacatgatccccttcagttccaaattgatgaatggattggatttgttttcttttcgaagcannnnantntaaaaaaaattaa

SEQ ID NO: 36807 - DNA, 275 bp, Gossypium hirsutum
  unsure (1)..(275): unsure at all n locations
  Clone ID: LIB3148-048-Q1-K1-E1
ccaagccggcggccaacccttccgcccacccgtccgcctggagacaacttgtatatgtgtgtcatgtcatctaatcttgagcctggctagatacggtatattaatgtttgaatatgtgtcgttttccttcttttcttccttactcccagntcgaatttcctacgatctgaagctcattatagatttgatgcatcgtagacatcctgttttaagctatatttttcgtgccatgttatttggccaccacatatttaataaatcttggggatacatnt

SEQ ID NO: 36808 - DNA, 264 bp, Gossypium hirsutum
  Clone ID: LIB3148-048-Q1-K1-E6
ccattttatcatttggtttggtctctcgccggcactcggcagagaaacaaaaagcaaaacaaaaagaaaaataaggaaagaaaagaaaaataagaagaaaatataaaatatctcttcttgatttggagctctgcatttgggtacgatcaaacatatggtgcaaaaaaaagaaaaacacggggcggcacatatcaaagatcccagattacttactcgtagcacccgacctcacacatcttctatagacgccacctaaattcaatc

SEQ ID NO: 36809 - DNA, 322 bp, Gossypium hirsutum
  Clone ID: LIB3148-048-Q1-K1-F10
cccacgcgtccgcccacgcgtccgccaagtactggctcttcatgcactttttctcaatggataaatacgctcttgatgcgcttcttatcaatgagtattcttgcctggtgtcaaggtgttttctttggtacaatgaaaccagcacttgcatggtaacaggagctgatgtattacaaaagaaaggcctccatgagagacaaagatggacaaacatctacatcttagttgggttctttgtgttctatcgtctcctttgtttgctagttttgattagaagggtttcaagatcaaagaaatgaagaaattaagtttcaattgtcac

SEQ ID NO: 36810 - DNA, 231 bp, Gossypium hirsutum
  unsure (1)..(231): unsure at all n locations
  Clone ID: LIB3148-048-Q1-K1-F5
tcgcccacaccttcgggccaaagaaaataaacgtgtttgttggaaaacactgaatttagtaagtgcttggaaaaatattggagtgagtgcttacctacatgtaacctgaccaatggcttaaaaaaaataattttattaaagaaacaaagaaagggagatcttctaaaccttgttgctttttttnnaaaaaaaatttaatataanntatatttttattttttataatataaa

SEQ ID NO: 36811 - DNA, 165 bp, Gossypium hirsutum
  Clone ID: LIB3148-048-Q1-K1-F6
gctcaaaagatggaataagcttttgaaactctgctgggcggcagtgccattaaggcatggaatctggatgccaacagcataaaaagaataagcgtttatcacattaaattgcatgttgtataaaataatatagggatgttgtacacaatggactttgtttaaatc

SEQ ID NO: 36812 - DNA, 137 bp, Gossypium hirsutum
  Clone ID: LIB3148-048-Q1-K1-F9
cttgggaatgctagagatcctctatattttataagggtcgttatcacagagggagttcttgcttcagttatattgctatatcgttccatacaatatcataatatgtttacatttgtgctcctaatgaatgatcttac

SEQ ID NO: 36813 - DNA, 300 bp, Gossypium hirsutum
  Clone ID: LIB3148-048-Q1-K1-G10
cccacgcgtccgcccacgcgtccgttgcttccccatgcagtttcttgttattttccaaaaggggtttcagttattggagtacagttggagaacgatgtctctagagctccccttgttgctatttgctggatcttgtttttgggccttttcttcgattttgctttggattacttttgttttaggcttttgtttgtttggttttttagtctgtttgttcagactggtcttttaagactcataaccttatggctttgattttatgttgtcctttttgaataaaatccagcgattatttcttca

SEQ ID NO: 36814 - DNA, 415 bp, Gossypium hirsutum
  Clone ID: LIB3148-048-Q1-K1-G6
tcttgatataattacagtcagcctatgtgatatgagactaggtaatctttctttgactagcttggattttgagtactgtaatgaagttcgatcagctttgaccagtctgcagggaccatttgttgcaatatatgaggcagtggaaagggagaggagctaaaatcatctgactagcttggtgatggtcactccaattatagactcatttttattcgacattactgtaaaagtagatacattaatgatagttagacattagtgtactatacactggtatttttgtagtcttgtaagaatagggctacaatcttgttttttcgcttgccctttgatcaccattaatgcagggatatctatgatattttttttaacaaaaaaaataaaaaaaaaaaaaaggaaaaaaaaaaaaataaaa

SEQ ID NO: 36815 - DNA, 306 bp, Gossypium hirsutum
  Clone ID: LIB3148-049-Q1-K1-A10
catataacttatcagacgggctgaatttttacttaatgaactctacttgattgatttaattttgtatgggaaaacaattcactgcaacttgccttgaacaaaaaaaactatcgctgttcttccttttgttaaccaaagtcaatgactgatctgttataaatgtgcataaaaagccggactttcaagcttgccggaagttcctgttctaagcactgctttcacggacattctcatgcgcgctgtttttcgaacgacatgcttactgctcacaagctgacctatatcgtaccttctttccacaattgt

SEQ ID NO: 36816 - DNA, 399 bp, Gossypium hirsutum
  unsure (1)..(399): unsure at all n locations
  Clone ID: LIB3148-049-Q1-K1-A3
gtccttggcagatttgctgctccttttttttttttctttttttcctttccttttacaggtatattagttctgtaggtgttagcctcacatcttcaaacacacacacactgcaataacctttgttaagctggttacctttataccaagtaaatggggcgcctctttgtctttgtctctgtctgtttctttccacatttattatggcaggctaaggctcgggctgtcttgttatccatatattctgctggtgctaggtggtggccgagatttggtttatcaatcatctatatttataagtaacgatagaaacaagttgaattcactaaaacagaacataacatattaaatttattcaaatgtaatcggttggtttaattccttctttttcaaannaaaaaa

SEQ ID NO: 36817 - DNA, 428 bp, Gossypium hirsutum
  unsure (1)..(428): unsure at all n locations
  Clone ID: LIB3148-049-Q1-K1-A8
agtttctggatatctaaatttggggttggtttttgttattctcttttcattcctctgggagttttttcttttaccctttttcacattcgagcaagaattcagtgttatttcttatcttgttcaggttaattgcatttttacccattttttatatttacagaggtgtaaagacgatcctcgaaagcatcttatgaaagaaatgtaaaataatgcaggggttctatcactttgagtttcatatatatctgaaatgtaaaaagttttagtggagtggagagacatttatgatttatgtcaattcactgagggttggaatttttctgaaggggcagtagtatagatgttcctggcttagttgatatcggntagtctttagaatcttgaccttatctgtatagtggttgctgagctcactttgtatgagaaat

SEQ ID NO: 36818 - DNA, 313 bp, Gossypium hirsutum
  unsure (1)..(313): unsure at all n locations
  Clone ID: LIB3148-049-Q1-K1-B11
ccgtccgcccacgcctgtccgcccacgccgtnnccgaacttgagnntaaattttttgtagggttnttaaatgtatggctcatatgtaataaacgcataggcttgaaaaanagaaccaaanaaaaagaacctttttgttgtattcctatatctccaatgngattcatgcaagggaatgccaaanaaaacattgaatctcatctttcgtagagctttcataaatgcaaaatatgttgtttcgggctcctgaaatatacaaaaactaaataaaggctatcgatgaagccctaaaatgtaaaagggagttgaaaata

SEQ ID NO: 36819 - DNA, 226 bp, Gossypium hirsutum
  Clone ID: LIB3148-049-Q1-K1-B8
tatattcatatatatatgatgttgttcctatttaaaaaaaagaaaaaaaaaccacggggggagggaggaattaaactgacataagcacaccacaacagaaagtaaaaaagacaaacgctgaggaggttcgtaagggtcttcgctagtcttggctcttttcatcggcgtccattgcgttggtgtcgcttctacctatatagtgtggtttacctgtgggggggccttt

SEQ ID NO: 36820 - DNA, 296 bp, Gossypium hirsutum
  Clone ID: LIB3148-049-Q1-K1-C12
aaaaaaaaaaaaaattaaaaacaaaagaaaaaaatatacaccatgcaatacaagaaacacatagggggggtagttgaaataaaacaaggttgaccggctgataacaaaaacttaaaaagacacacaaggatgcttatcataaacaaatgcttaccctgggggtggctggttaccatatgtatgcagcctgtccctccgctggtaaagttttatttattgatcctgctgctcgaaatgtttgatttgctcgagcaagaacaggacggtacttgactaaacatgcatttgcccaatta

SEQ ID NO: 36821 - DNA, 267 bp, Gossypium hirsutum
  Clone ID: LIB3148-049-Q1-K1-C4
gtgaaatccatctactattatctgcaaacataaatactaaagaaaaaaaagaaaagaaaaaagaggggaaaaaaaaagagccagaaatagggtagcccggaacttgagggtacagacgcatagaggccaggtcatcgagggcccaggtatttaatgagtggtgcgtgtaattgccatgaaggagagcccgtatcggaccgtataaggccgtggtgaagcgcggtccttacctaattaattttttgttgaaagtttgaaatacattgg

SEQ ID NO: 36822 - DNA, 250 bp, Gossypium hirsutum
  Clone ID: LIB3148-049-Q1-K1-C6
atgacatcgtgatctaattaccacctacgtagtgcttgttttagaattatgttcatacaaataaaattttgagcgaaactctttcggttcttccataaaatatactatgaacattaggtataacttctttttattggcacgtctagtaatacaaacggctatttttctagaaattgttggcacacatttcattaaatcttcttagctaagtttcgtatccacacatacacctttacgcagctggcttaat

SEQ ID NO: 36823 - DNA, 400 bp, Gossypium hirsutum
  Clone ID: LIB3148-049-Q1-K1-D1
cccacgcgtccgcccacgcgtccgaattttttatttatgatcttgctgtcttgttatggtttttttgtaaggaaactctgtaagttgttaaccatgtaatatagtttttttatggtttattatgttgtgccacgtattgctatatccaacaaaagaaaggagactgtgcttttgattttgaaagacggttaggcatgtagaaaggtgaaatgcgtttctttcaaaatacgtaagtttgattactaagctactaagtaagtagctcatcaccatttctatgttttaatacagttctttgctgctaatataacttctatatttcttgatatataaatcaacataaatcttaatatggtcctgcaggggtttgggccccgattttcaagttttggttcgaaaa

SEQ ID NO: 36824 - DNA, 377 bp, Gossypium hirsutum
  Clone ID: LIB3148-049-Q1-K1-D11
gattctgagtgtgagatacaagtatcatcacatcagagtccatttacttctgaagggactcctatggcactggtagagcatactccaaaaggaatctatggtcatatcactgctctagttatttccttcttgacccttttttctatcatccgaacaatggtgttgcatctgatgaagaagtcgagtgtaagtgatttgacatgtaacattcctgaccagcatgttgagtcaacgttcaaagacgaaaccccgcctccttcaactgctccaaggtttacaaaaggagacctggtgtcatctggtgtaagaaagcttggtgatctaaaaaaaaaaggtgagaagctacaatcaaaaagatttgagatgccttattagaa

SEQ ID NO: 36825 - DNA, 287 bp, Gossypium hirsutum
  Clone ID: LIB3148-049-Q1-K1-D12
actgaatggacgtaccacaagtcgaattgctctgaatggccattgtcgctgtaaagaacgacgcggatgccacagtagagcaatccaccttgtttggaagggctctttgggaacatcctagacaatacctaaagacgtgagattattattcctacccagatctacatctcgaacaaacagtagtgtcgactactctgttagatcgaagattaacttgagtaggcatatagctccgtgaagagctcaaaactgtaatactgatctttgagcgtaactgtaaaacccag

SEQ ID NO: 36826 - DNA, 292 bp, Gossypium hirsutum
  Clone ID: LIB3148-049-Q1-K1-D5
aaaacaggaaaagcaattacagactattgatttgctgcaataagctacttcgtctttcacttaaatgtaattgctgattgctgaaaaaaaaaaaaaataaaatctttaaaaaaaataaaaataaagactaatattgctatatttaaaaaaaaataaaaagagctgtggtattaaatttcaaaaaacattttagcctgttaaataggataaatacgttatatcttataatatatgagtttataatcattaactactgagggagaggggttatgaccatttcttttttttaata

SEQ ID NO: 36827 - DNA, 296 bp, Gossypium hirsutum
  Clone ID: LIB3148-049-Q1-K1-D8
cggacgcgtgggccaacacatcgcaacattgacaacaaattcagtgggaagaactactcgagtctcgcgctggtagacgaggagggtctacgctatttcaaacagcagcaaatcactgtctacaggctgcccttgcacgatacctgattatttcaaaccctcacatttcatcaactaatataagccgagaaggtctgatcattactttttctttcatcatatgaaaaatacattgattgtcactattgaaatctgcaagctcccttcacaaaccggatctaacttgcattgaataa

SEQ ID NO: 36828 - DNA, 435 bp, Gossypium hirsutum
  Clone ID: LIB3148-049-Q1-K1-E1
ccacggacttcattgggttaaaccagtatacgtcgaggttggtttcacatgccaaagatagtgtcgaagaaggtcattttgagaaagctcaacaggttgccaaaattgtggaatgggaagatggtgaaataatcggtgaaaaggctgcatcggaatggctctatattgttccttgggggatgcggaaggttctcaattacatatctcatacatacaacaacccaccaatatatatcatggagaatggtatggatgatgaaatgaatgaaaatgtcccaatccctgaaatgcttgaggacaaaaaaaggattgagttttacaaaggataccttgcttctgttgctcaagcaatcaaggatggagtagatgtgaggggatattgtgcatggtcattattggacaaacttgaatggtctcatggctacaccaagcgct

SEQ ID NO: 36829 - DNA, 370 bp, Gossypium hirsutum
  Clone ID: LIB3148-049-Q1-K1-E12
gtcactctttgagcaaatgatcagaccctcaaacagaggtattgttctgaagatatctatggtggaggttagtccccagtgcttgactcccgactgaacggagagtcctcatcgggttcacggagtttatgtgggagcgcccgatccaataataccaagtgcgagtgttcttgcccaataatgccttttaagggcgtggattggaacccccactaaaatgtgtgaactcgtcgacagcttttcgtaaagtacggagacaaaaacctgtggctttaaacgagcataggcatcctgagaacaatacttacatttaggatccaagaccggcctagagagtgacttcctctcaacattacttctactcgggaga

SEQ ID NO: 36830 - DNA, 263 bp, Gossypium hirsutum
  Clone ID: LIB3148-049-Q1-K1-E4
cccacgcgtccggaggtaatgatgatttgacattcactaaaaaatataaaaaaaaaaaaaaaaagggagaaaaaatacggaattgcataatgagaggaagtatactcaacagtcaaatttgactatttacactatgactgtcctgatccgaaagttatatgctatagcttggatggtggactggtttcaatatttggatacatggggggggcggtctcttatattgactcgatttaagacgcgcctcatgaggttacaatgtt

SEQ ID NO: 36831 - DNA, 417 bp, Gossypium hirsutum
  Clone ID: LIB3148-049-Q1-K1-E7
gaacatcgttatatttttcatgttgtgcatactcttgtcgtttgtccttacaagtaaagggagattcatcgccaggaatgacttatggcggaaaaaaatcaactcccaagaaagccttattatcatacctccgaccgccctttatggtaccctttagcggtggcttctgattggctcgatagatgcttgttgggtgattacaggttcgacccgttccggttagggaaacgttccgaatacgggccatatgattagaattctttggaccagaacctgtctaagattatggctgggagagatcattgtaactaggaccgaagtcgccgacgggaaagctactccgtttcagcctcacaacaaagtttttggcctactgaggtatagggagtgagaattgatccatgggctgttttccat

SEQ ID NO: 36832 - DNA, 169 bp, Gossypium hirsutum
  Clone ID: LIB3148-049-Q1-K1-F10
cccacgcgtccgatccactgtagtcatatatgcactggtagaattttgattagatgttttaaataacaatcagcatgcttacagaataagagtacggatttgtggcctgtaaaaacaaaattaattgtagcatccacttttattgttatatatcatcattagattaccc

SEQ ID NO: 36833 - DNA, 425 bp, Gossypium hirsutum
  Clone ID: LIB3148-049-Q1-K1-F12
actcatgcatccgcctggctgcatgaattccgcacgagtttttttttttttttactttttattttttattttcgggtgggtttttttttttttttttttttctcttttcccgaacaaggattattttattaatcactttgggatattgcatttccaagcaatgaaacttcattttttgccaacaaggggttggattttttttttttttttacaacaaaaagttgactgccagagaagccaaacaaggggtgggagatatatatatatattcttattcttattcttatcatgggggggcttttcattttttggaatgaaactttataaagccctcccagagatgatttatcttcatattattttttcaataaaaaacaatcattctcatcccattcaaataatgcctcttaagtttccttttttga

SEQ ID NO: 36834 - DNA, 418 bp, Gossypium hirsutum
  Clone ID: LIB3148-049-Q1-K1-F3
gccacgcgtgcggtcaggcgagcacgcatttattggtcccagcctttgctgctttcaacaatgtagtagcccatcagcagcagtgtcgcgaagctgatttctctaaaaaaaaaaaagagaatgcatgcctctcagacgtatctcacccaattggttcgtgcaggcgctcgctcaacagtctgaggctcgtttagtgggctgctttggtgtggcctctgacacacactcagactggacatcctcgttcccatctaatggtgtcacataatagtgaagtagagagcgtgttcatgacagcacgcgcgggtgctcttccataactctcgatgactcaaaatccgaagctgctggattaagaagctggctactctagtctcctacatgtagagataatatctgatgcatcatatctttttat

SEQ ID NO: 36835 - DNA, 367 bp, Gossypium hirsutum
  Clone ID: LIB3148-049-Q1-K1-F4
cccacgcgtgcggttggatttgctgatgaacgtgtagaggaacgtatcgctgatgatgacgtgggtacgattaaagggaccacgagcacaagtgcggtttccatgatcctcaagggtgcacatgactatatgcttgatgaaatggatagagctctacatgatgctttatgtactgtgaaatggactcttgtatccaacacggtagttgcaggtggaggtgcagtttaagctgctttatcagtgtatttggagtatctagccacgactttacgatcacgtgagcgggaggctactgcagagcttgcaaaaactcctttaattattccgaacgtgcctgcaatcgatgctgccaaggatgccactgaat

SEQ ID NO: 36836 - DNA, 380 bp, Gossypium hirsutum
  Clone ID: LIB3148-049-Q1-K1-F6
ctttggtatgcttattgccttacctgtagcattggtctactatcttcttttagcattgtgaaaatgttttcctggaaaaatactgcaaattttctttccagaagcagtaacctgacatcagtttctgggaaacttcatagatggacatcatatatttatagatgtccaattcagttttctggaaaattctttgacattattgattgtttcctgggaaaaaacaaactatatttatacaagttattacatttaatacaacagagaactaaactgttgattgagtgaaatatattctcgtatttattctttaatttttttttcaaggttttgaataacacaaattcagccaaacagcaacgtgtttggtgttcaaaagtttt

SEQ ID NO: 36837 - DNA, 311 bp, Gossypium hirsutum
  Clone ID: LIB3148-049-Q1-K1-F7
gcatggtgtgcttattggcatgcctgtgtctcttttcgactatggccttctaacatcgggggggtcttttccaggaaaaagacttccccttttttttccagagtctgtatcacttcatcagttactgtcaaacttcatatttggacatcatatatttatagatgtgctattcagtcttacggataaatgtttgacattattgattgcttcctgggaaaaaacaaactctatctatacaagtttttccgtttcatacctctaagaactaaactgtggatcgtgcgaaagaatagctcgtatttattctttaa

SEQ ID NO: 36838 - DNA, 308 bp, Gossypium hirsutum
  Clone ID: LIB3148-049-Q1-K1-F9
cctcacgcgtatcgaagaacaagctaggaagcatttttttttatccgaacactggtctatggcgtgggggatttcatttccgtttaaaatcaccagctcatctggaaaaatcatcacacgtaatatccattcactcagaccgtgttgctctggctgatcaaataataactcctcgccgtatcactaattgattatacttgcaggaaagccaatggactccagccctttgctaaacaacttcgtcccccattagctcctctttaaataacatgttgcgctataaatgctaatgtatacttcttattact

SEQ ID NO: 36839 - DNA, 138 bp, Gossypium hirsutum
  Clone ID: LIB3148-049-Q1-K1-G5
tccacgcgtccgtaaagatcctagaccttatctgaatgtcatcttcagtactgtaaatagaatgaaaatacttggaatatatgaaaaagcacaagtcttaaaatcaaataaaaataaaaaagagaaatacatttcaat

SEQ ID NO: 36840 - DNA, 298 bp, Gossypium hirsutum
  Clone ID: LIB3148-049-Q1-K1-G8
aaagttcaaaaaaaaattaggacacagattttggtctttaattattgggcaatctaatttgaaatttgtgtttttctttttcactacagatagtgtctgtagtttgtaattttgtaaatactaaagctttttttttcttctttgtagaaagtttttaactgatgggcattatcactttgttttagactagcataattttttttcccttatttctatttttggaaaaaaaaagggcactatctcttatttatcatcccaacaaatattaaaataaattgtctatgaataaatagtttta

SEQ ID NO: 36841 - DNA, 332 bp, Gossypium hirsutum
  Clone ID: LIB3148-049-Q1-K1-G9
actgtacctaatgcttcaggggatcccacgttcttaacattattagatactcataacactaatttgggtgcaactgaaaaagatcctcaaaaatcaaaccatgaattgacagtcaaggattccaaataccaaaaggctgtccttagtttgtacaacggaaaagcttatcttgttgtcaatgttgcttataaatgtgcactcactgataaaaattatgcccacttgactgatctttacaacaaattcaacggcccaggactggagatttattcattcccatgcaatcaggatttgagccaagaacctgttaccagacaagatgcacaggaatt

SEQ ID NO: 36842 - DNA, 306 bp, Gossypium hirsutum
  Clone ID: LIB3148-049-Q1-K1-H1
cccacgcgtccgagcctttgctggattcgtctcggacaagctgagcatgctttaacagatgcaagggcttgcaaagcattaaaaccagactggccaaaagcttgctataaaaaaagggctgcattgcggttggtggcaaaaatttattgaacaacttatggcctttaccaaggtgtgccagttggcccccaaaattaaaaacctgtaaatgcctttaaggaaaccagtgaaaccgggaagaaggttcatgggacccatcaaaaaaaatctaattaagtttcccagccgattcacccaaaatttgag

SEQ ID NO: 36843 - DNA, 420 bp, Gossypium hirsutum
  Clone ID: LIB3148-049-Q1-K1-H12
tccatacgtgttaggatgtagactcgctcttttagacaaattacctacatatggcagccgaactggatgcggcttaactctatggctgtgacacatagcatgattggcacatggatgacatatccacatacgaattaattcctaaaagatgagagcgaacgattctcataaacttccttaatagacctaaaacgtttaaatatttataaaagattgacatctcatccactttgcaacccatatgtatgtcacattatcgtagattaagaaacttttacttttctatgcattttggggcgttttcacggaaaaaaataaacttacccgctcatagaagcgaataaaaaatgttatcctggaacttacgtcaatttacactaggaatattgtcaatgttaatcgagtgaaaactcagtccac

SEQ ID NO: 36844 - DNA, 347 bp, Gossypium hirsutum
  Clone ID: LIB3148-049-Q1-K1-H8
cccacgcgtccgcccacgcgtccggtttgttcctaaactctgatacttgatgatggccttaatcaattatggatagtctttgttgtggttaacataaaaaacaaaaataaagggtcacacaaataagaacaaaaaactccatcaacttatcaaatgacacctaaaaaccgaaaatgttagccaaattagagtcggctcaacaacaaaaagaatgtttcaccagttaatgtaaaagataactggtaatataaaaaaagaaaaagagaggttggcctaagaaatatgggcccgattggacaatggcaaaggcattgtcaccaatgcctatttcctcatccgtccctccc

SEQ ID NO: 36845 - DNA, 264 bp, Gossypium hirsutum
  Clone ID: LIB3148-049-Q1-K1-H9
cccacgcgtccggcgatgtaaacgagcttaattacagcaatggttttgattcgtcaccctcaccggatcagcctcctatggatttctccgacgaaatgctaaaagagtggacggccgccgcctccactcactgctgtcaccaaagtgcggcttccaatctccagtccttgcctccatttattgaaaatggaattgaatgaccttgaaaaaataaaagacgaaaaatattttctcatgtaaactaaataaacacatcttccatca

SEQ ID NO: 36846 - DNA, 244 bp, Gossypium hirsutum
  Clone ID: LIB3148-050-Q1-K1-A10
cccacgcgtccgcccacgcgtccggaacaaactacgtcgagggtacatgttcttctctagggacccattttggtgcgccaaaactaattttgtcacgactatattgttattgcttgtattctcctgcctatcattattttatatctgcaactctttggtgtgaaatgttagatccatggtaatttacaaaaattatttatattaaaattgtttttcctaaaaaaaaaaaaaaaaaaaaaaatat

SEQ ID NO: 36847 - DNA, 375 bp, Gossypium hirsutum
  Clone ID: LIB3148-050-Q1-K1-A8
cccacgcgtccggaactctgttttgccttttctcatccttggtggtaccatataatgtaaaagggaatataaataatatatgaaaaataaatcttccagtgaaaaaaaaaaaaaaaaaaaaaaaaaaaaaaaaaaaaaaaaaaaaaaataaaaaaaaaaaaaaattaataaaaataaataaaataaaaaaaaaaaaaaaaataaaaaaggggcgcccctcttaaagaaccaaaatttactaccccggtcatgcaatataaaaatttttttattgggcacctaaaatttaattcacgggccgtgtttttacaaagtctgaattggaaaaacccttgcataccccaaataaatgtttttaaaaaaatataccctttt

SEQ ID NO: 36848 - DNA, 353 bp, Gossypium hirsutum
  Clone ID: LIB3148-050-Q1-K1-B12
cccacgcgtccgcccgggcctattattttgttgcattggagtggtaaagggaagccggggttgaggctggactcgaggaaaccctgcgttgttgatcatctttgggcaccctatgatctttatggctcatcagatcactctttggaggaataagggaaactgagtacaccaatccagtctgcttttaaccatggccacaacaagccctttaacttttcattctacatatattcccagaaccataactttgaagtctcagtatgaaagggataagattatgtttcgatttataaattaataaaaattatagggggaaagagtgagtgaggatttgtatattatttacttatttg

SEQ ID NO: 36849 - DNA, 288 bp, Gossypium hirsutum
  Clone ID: LIB3148-050-Q1-K1-B3
cccacgcgtccggttttccgtaggtacagagagattatttctgatcgcgtgtccaaggagaagagtgagtttgtgaatgtcactgtttctcttataaaagcttgatcattatcgtcatcatgatcttcctttattttattattagataaataatcactggttatctatgctagaaatgaactgttcgaagcaaaccgcagtatccagtcaagagtaatctcttgcaagcatattgtttttaattatagctctctcgcatgtaatttgattaaatcgaaacaaccaatt

SEQ ID NO: 36850 - DNA, 370 bp, Gossypium hirsutum
  Clone ID: LIB3148-050-Q1-K1-B4
ggaaaaggtaagggtgcagcagaatatgagtaaatgatggaactttcataagggcccaaacaactaaaagttgacaaaataacaatgtacgacaaacgagagtggaattgcattttgcaatactgatttggtttgtaggaaaatgtgaaaatctttgtgtaacccataatcacaaagccatgtagtgctaatactgtttaagaaggttccaattacttagtttcatgctcaaaaaaaaaaaaaatattttatatttaaattattattatttttaaattatttttttttatattattttttatttgggttgtcttttttaagatatacttaatttttttttttggtgtttatttttatgattttttttttt

SEQ ID NO: 36851 - DNA, 412 bp, Gossypium hirsutum
  Clone ID: LIB3148-050-Q1-K1-B6
cccacgcgtccgaccactacaaacagtctttccaactcgacgttcaatgcgcaaatctccaaaacaagaggactctgcaaggttcaatgcaaaattaaacaccggcaataaaagtgtaaaggaaccaataagaaagaaagtaattgaagctcaaccatcttcgtacaagaagattgaaactgttgctcgtcagacaccagacaggattaaccaatcagtcagttcaactaggggagacgcgaagtcaaatgccagaagattccactttaaaagtggagaacgagcagaaaggagaaaagagttctatatgaaattggaagagaaaatgcatgcgaaagaggcagagatgaaccagattcaagcaagaacacaagaaaagacagaagctgagattaaacagttgcggaaaaag

SEQ ID NO: 36852 - DNA, 193 bp, Gossypium hirsutum
  Clone ID: LIB3148-050-Q1-K1-C1
aaggctttgagctttgacttgagctcctagtttcaatgtcttcaaattgtacatttgtctgagaaaaaataatttctctgttaaattaaattgatgaacaataaaatttttgtggtcatcaatattaagctaataaacttccattatgtatacaaggaaaacctatgttataggggtttccctttttcttctt

SEQ ID NO: 36853 - DNA, 427 bp, Gossypium hirsutum
  Clone ID: LIB3148-050-Q1-K1-C3
cccacgcgtccgaagataatggaattgaatgaaatcaatgattgaggagatttaaatgaatcagaaatggatgagcttagacgattgaatattgaattgtgggtagcaattaaatgtcgtgaaccgatttggtgtcaaaaataagaattattttgttaggtgaaggtgattccaattttgtttctttcataaagcagtgaaaattagatcgaaggaaaagatagtgcatggcttaaaatttgaggattcatggtgcaatgatacaaagtttttgaaggaaaaaatgttcaattcgttcagtaattactttaacagctcatcgagaaaatggttagtggatatggctttgaactttaagaagattttcgaggaagatgcagcgaaacttaagttatctttcacgttgaaagggattaagaaagcatta

SEQ ID NO: 36854 - DNA, 234 bp, Gossypium hirsutum
  Clone ID: LIB3148-050-Q1-K1-C6
cgtaaacgtaccccctagtctcgatctgtttggggccatttattagaaatctacttaatttgtagctaaggaaacctttagcaatgaagaactttatgacccatttagttcatcctaataaaatataggattgtaatggagtagtcattatttgataatggaatgtaatggaattaaatagacataacaggttgaaatttataaaaaaaatttatttttatatattttatttta

SEQ ID NO: 36855 - DNA, 413 bp, Gossypium hirsutum
  unsure (1)..(413): unsure at all n locations
  Clone ID: LIB3148-050-Q1-K1-C9
cacgtgggtgaggccgacgcatggcggtggtgcagcacgtgctaagggaagcctggactcgactgcggcgcaaggattttcagaaaccctagaagcttctggggtattcctccgatttgggctacggtttgggcttgtaattcgggtttgggtgtgggtaaatggttttgggttagtgaatttgtgctttgggtttgtattgtatttggactagtatcggcttttgtaatttggacattaactggactttattatttttttgttttnnaaaaaattatttattttttattttttataaatatttaatatatatttaatgtttattattttattaatttatagtttttttatttatttatattttattaatattatttatttatatgtattattttatatttaatttataattt

SEQ ID NO: 36856 - DNA, 205 bp, Gossypium hirsutum
  Clone ID: LIB3148-050-Q1-K1-D1
taaaaaaaaaaaaaaaaaaaaaaaaaaaaaaaaataaaaagggcaaccgatctaaaaagaggcagcttacaaacacatacatgcaaacggccaacctcttttatggtgtcccctatatttaatccagtttccgggcgccgtacatcttatttcctggctattctatgggttcacccaacttaattcttttgctttgggtccccaa

SEQ ID NO: 36857 - DNA, 280 bp, Gossypium hirsutum
  Clone ID: LIB3148-050-Q1-K1-D10
cttttctgtattgtcataatactttcaaggaatgccatccaaagctacaccaatggcggtcgaaggatctcatgtgcctgtaagagcaacagatagagttcccacttcagtttcattccttcgaaaccccttatctaatggactatgttgctggtttatctgctgaaggaaaaatgagcatattttttggatagaaataaaaatgttgttggtctatctatggcttcataagataaatctttgttgttcaacatcatatgtttttatggagtttactttt

SEQ ID NO: 36858 - DNA, 387 bp, Gossypium hirsutum
  Clone ID: LIB3148-050-Q1-K1-D4
cccacgcgtccgcaacaaccccatttatcatcaagtgtggagcaaattccaattccgaactggttatcaaagcagatgcaaaggttcaggaacccaagggtggtgaaattgtaagggttgttcctagaccctctgttttagaaaatatgagcttggatgaaatgaaacaaatattctccgaacttccagaggctctgagcttacttgccctagccaggactgcggatggcacccgagctcggtattccagattgtataggacattggcgatgaaggttccatcgctgagggatctagtcggggagctcgaaaaggggggagtgttaaaagatgttaacctgtgatttgacgtgctctggagggatttgcggaatcaaatgtattgga

SEQ ID NO: 36859 - DNA, 408 bp, Gossypium hirsutum
  Clone ID: LIB3148-050-Q1-K1-F11
cccacgcgtccgtttcttccagtacattcctgggtgttgcggttatcttaggtctggttgttgctagtatgtcaccctatgttgaggcacagtctgcgtctccagctccttctcccactagtgatggaacttcaatagaccaagggattgcttacgtgcttatggcggtggcacttgtgctcacatacctaattcaccctttagactcatcttcctacaccttcttctaaatcattgtttacaacaatagaatgatttatttatgtcaggctactttttaaccaaattgctttgttgattatatctattaaaatctgttttcttttttttaaattattatattaatatttattatattaattttaatacttattaaatattttgtaatatttcttttatattttttat

SEQ ID NO: 36860 - DNA, 371 bp, Gossypium hirsutum
  Clone ID: LIB3148-050-Q1-K1-F2
cccacgcgtccggttgggaacctccgtcacaagaggttggtcaatttgatcggctgttgcgccgagggggacgagcgcttgttggtcgctgagtatatgcctaatgataccctctctaagcatcttttccattgggaaaaacagcctttaccatgggaaatgcgccttagagttgcttaccatattgctcaagcccttgagcactgcaacgctcaaggccttaaaatttatcacgatttaaatgcttacagagttctttttgatgaggaaggtgatcctcggttatctagttttggactaatgaaaaatagccgagatgggaaaagctacagtacaaattttgcatatactccttctgatttttgaggaca

SEQ ID NO: 36861 - DNA, 406 bp, Gossypium hirsutum
  Clone ID: LIB3148-050-Q1-K1-F8
cccacgcgtccgagcacaacaaataagaattttaatggggtttccagtaggtttctcagcggttctcttcccaaagccacttctccctacattaactctcctcctttaccttcgcgatttcatttccgctctcttcctttttctgggtttccctgatttcctcgaaccccacgttcccccgactcacacggcggacaccggcgttcccgccgcgcgccaccgagatacctcgatcaccgctctcctgttacgggaattactacccgtcgtcaagttctctgacctcgtggacccgccggacagttgcgccgtctgtttttacgacttcgaaagggaggatgagatcagatggctaacgaattgtcggcatgtattccaccggagctgtttggatcgttggatgggg

SEQ ID NO: 36862 - DNA, 281 bp, Gossypium hirsutum
  Clone ID: LIB3148-050-Q1-K1-G1
aaactgactaggctatcaaccaatgataaaatctgacaggtttatgccagctggtgtgctctctgcgacggtcactgaggaggtaaacccgatctgatattgtgaatgattgcaaacatactcctttatgcttgggttgtatgctctgatataacttagaactgtgtccatgaactggatagtttcaaccaatgcgatgtatgatttttttttttggtagaataaacaaaggattatatagaagtgttcataagtaaattgccaatagtgtttttttcttt

SEQ ID NO: 36863 - DNA, 229 bp, Gossypium hirsutum
  Clone ID: LIB3148-050-Q1-K1-G3
gccacgcgtacatcatttagtgcaccaaataatgttccataagaagttgctgacatattagcgggcgaattacagtaacactgccatgaataaagctctgatttgctgtctcatctgttgcacaagaatatgccccatacttacatgaaagctaacagttgaccgctctgttacacgctttggaaaaataaaaaatatatatttttataaattttatttatctatattt

SEQ ID NO: 36864 - DNA, 338 bp, Gossypium hirsutum
  Clone ID: LIB3148-050-Q1-K1-G6
cgattttcgccgcctgtggagcgttttggtggttcattttgcccatgttaccctcactcttaatgaaatttgtttaagggtcaaatggacatgggcggtaattccatcattttattttgttataatttgtaagtatcatacaaataagtaataaaaatattttgttaaaaaaaaaaatataataaaaaaaaaattaatataaattaaaaaaaataaataataattaaatttaaaaatatattattattttatttttttttatatataatatttaatggggcggccttttttaagattccaagtttatttcctcttttttcctaatttataattttttt

SEQ ID NO: 36865 - DNA, 274 bp, Gossypium hirsutum
  Clone ID: LIB3148-050-Q1-K1-G9
aaaaaaaaaaaaaaaaaaaaaaaaaaaaaaaaaaaaaaaaaaaaaaaaaaaaaaaaaaaaaaaggggcggccgttataaaaggaatccaaagctaacaaacacgggcgtgcgactttataggtcccatgtttgcgtcccctaaattcactccactggccttttttttacagccccttaattgaaataaccgggccgttacttaacaaaatcgcgttggggaaaatcctgcttttcccaacttgaatattttcgaagaggcccccccttttccgc

SEQ ID NO: 36866 - DNA, 354 bp, Gossypium hirsutum
  Clone ID: LIB3148-050-Q1-K1-H10
cccacgcgtccgataaaaaaaaaaaaaaaaataaaaaaaaaaaaaaaaaaaaaaaagggagggaaaaaaaaaaaaaaaaataaaaaaaaaaaaaaaaaaaaaaaaaaaaaaataaaaaaaaataaaaaaaaataaaaaaaaaaaaaaaagggggggccccttttaaagattcaaatttttcttccccgggaatccaatgtattttcttttttttatggcccctaaaattaaatttactgccccttttttaaaaactttggaattggaaaaacctggtctttcccaaattaaatttcttatgaaaaaatttcttttttttccagttgtgttaataccaaaaaggcccgccttttt

SEQ ID NO: 36867 - DNA, 414 bp, Gossypium hirsutum
  Clone ID: LIB3148-050-Q1-K1-H9
cccacgcgtccgtgtgaacgatggaagaatcagggttaagaaggtttgtgagatgcaatagtggattagggaggaaaaggattgaaatatcaaacgagattgaggaattttcgcctattgattcaccaacaaaagttccgttattgaaaaggcattgcagtgagagaataaagaagatgatgatgattgatgattgtgatgaaaaatctgttcttgaatcacttcctcaagatgttcttgttaagataatttgtggtgtggatcatgaagatttgaagcaactctttaaggtttctaaatcaattagagaaattactgtaattgcaaagaagatgcattttgcttatagtacaccaaggaaggtcaaggcttttagaacctccattgatttggaggaacggagtgagttaaaag

SEQ ID NO: 36868 - DNA, 384 bp, Gossypium hirsutum
  Clone ID: LIB3148-051-Q1-K1-A1
gcaccctgatattctcagcacagctgtaatctttgggatgctaatagctttgcccataacacttgtctactatatattattggggatataaattaagcggcaaatgcaaatgcgcaatactcttttgatgttccacattcaaaggccaaagaaatcctggaccgacacatcatgactgcattcatgattaatgtctctctcctttacttttaatccttagttaaatttgtaaaatctttatttgtagtcaaattatagggggaactgttttttgttttttttttctagctaattatctttttattccaaacaattttattccttgtcatgatagcttaaaaaaaaaaagaaatttaacccctcgatatttgtgatggaagtttg

SEQ ID NO: 36869 - DNA, 198 bp, Gossypium hirsutum
  Clone ID: LIB3148-051-Q1-K1-A11
cccacgcgtccggtgaagcatggcatgtgatatatatatatatgttaatggatttcatcagtctgaaatcaacggaagcttaaatacattattacatttcttattatttttttatttttgatctagagtctatttttttgtatgaactgagaatgaaatttgtgaatataaagtaagtaaatttgactcttgattaac

SEQ ID NO: 36870 - DNA, 373 bp, Gossypium hirsutum
  Clone ID: LIB3148-051-Q1-K1-A2
cccacgcgtccgcccacgcgtccggggctttgctgggatcccaaaacttgtgcatgtgcaaggcttaatggttctgattttccttatgtgcaccgtgatggtggcaggttaattgaagccaaacatgttgtttttgaatgtggtccaaaatgtggctgtgatccaagttgtgtaaatcgtacatctcagagaggattgaaatatcgacttgaggtcttccgtactccgaagaaaggatgggccgttagatcttgggattttatacctgctggtgcccctgtttgtgaatatattggagtgctcacgaggacagaagagctggataatgtctctgagaataattacatttttgacattgattgcttgcaaacta

SEQ ID NO: 36871 - DNA, 424 bp, Gossypium hirsutum
  Clone ID: LIB3148-051-Q1-K1-A3
cttcttttggggtttcctaacccttcggccgccgttcagcccacgccccaatttcgtcagaagggacaccagctcgacgactccggcgaaaggtaagtctcccttcttctttctttttcgtattttaagcgaaaaaataaataaaaaaaatgaatcactaagaatgatgaaccgaaaaaaaaaacttttttattccaaaaattatcggatctgctctttcaaatccttcttttttcctctgtattctcttttgtccaaaaaccccccattacagaataaaagttggccttatatagcccgaaaaatcaaataccagtgccgtctttccctgtttcttttcttttggactcttttgagtccgtgtttgcaggtgtatgtgcgcatatagggaggatcggccccgagacgtgcggcgcttgggacg

SEQ ID NO: 36872 - DNA, 425 bp, Gossypium hirsutum
  Clone ID: LIB3148-051-Q1-K1-A6
cccacgcgtccgcccacgcgtccggatttctatatccgagaagttgctgccagcatatcggtcatttctggggcggttcaggagccaaatagagagtgggaaacaccctgagaattacatcaagtactcagctgaagacttggaaactgctgtgttggatttcttcgagggataccctgcgtcctagcacttgatcatggatgctttgtagaaactaggagacattctttcaattcttttgtggagggtattcgggtgatggtggtgctggtaaatctgtggctgccttgagctctccaatttgtttaacaattgttgatcgaatcatttccactgttgaggaagcaacaaagatcaggtgttagcattccagaatagccaggcctcctggaacctgaatgctttctgcaccgtcagcattatgg

SEQ ID NO: 36873 - DNA, 209 bp, Gossypium hirsutum
  Clone ID: LIB3148-051-Q1-K1-A7
aaaaacaatgctttcttgtttcatcctaaacttctattccatcctcaatcccaaaacttaatttcttacgcctttgtattactaaggtaatggcatgtcttgtctcgcactacctaatgactcaatatatttttatttaaaaatttataatatgaaactatactatataaagtccataaaacagtaagagactgatcaatagaaatatg

SEQ ID NO: 36874 - DNA, 421 bp, Gossypium hirsutum
  Clone ID: LIB3148-051-Q1-K1-B4
ctgtaatagacctaaaattgaagtggcgaaagcaagggatttccttgatgaaaacggatttgtttttgctgttcagaaaacaagtgggatggttaaagctttaacggagagatgggttcttgaaggaatggaaaagatgctctcatattgtttcgatgttcttaaagaagcatctgagtcaaagcttcaaattatatctgttgcagggtcgcctcgatttggtgtttatggaatagattttggatggggcaaaccccagaaggtggtagttgtttccattgataagagtggagctatttccatggcagaaagtagagatgggagcgggggggttgaaattggtttggctttaaataagcacgagatgaacaatttttcttggttgtttcctagatacgttaaacgggagggtttattttaa

SEQ ID NO: 36875 - DNA, 342 bp, Gossypium hirsutum
  unsure (1)..(342): unsure at all n locations
  Clone ID: LIB3148-051-Q1-K1-C1
tacttgaggacggccattcttggtcaatttaagaaacttgataagcaattttgtgtattgatggacactttccaagaactcgagcctgaaatcgttgaatacatgtccaagttttgccttataaagactgttggtccattgttcaagtaccccgaagtaccaaacaacacgatccgttgtgacatcatgaaacctgatgactgcatcgagtggctcgactcgaaaccggccgcgtcagtgatatatatctcgtttggtactggtctttacttgaaacaagaacaagtggatgaaatagctgaagcgctgntagccactggtatctcatacttgtgggtgatg

SEQ ID NO: 36876 - DNA, 348 bp, Gossypium hirsutum
  Clone ID: LIB3148-051-Q1-K1-C2
gttgagccacaggtgagatctggtataaagtatgtaaaattgtatatcatattagtttgtttccattaaactcatggagattgggatggtggaaattgggttttgaatataaagcttggaggggctttccaagctattctttttcctttgtaaacaggatacacccatgtggttctgtgatcttttttttatttattgaaatccacatggattagagggagatgatgaatttagagaatgcagattttatttttctaaatccaaaaaagaatagaacctaaaatagaatagaacaattgcagacatactaaaaacaagggtctgacttcagaagttgtaaacaatcaa

SEQ ID NO: 36877 - DNA, 330 bp, Gossypium hirsutum
  unsure (1)..(330): unsure at all n locations
  Clone ID: LIB3148-051-Q1-K1-C3
atcatacttatggatattaggctaatggcccgttcctgatatcctcacgtttgttgaatcttatgatttatgagaaactaattggaatttggtgtnaaaaaaaaaaaaaaaaaaaaaaaaaaaaaaaaaaaaaaaaaaaaaaaaaaaaaaaaaaaaaaaaaatttcaaatggaaaaaaaaataaaaaaaatggtgaggctggaaaaaatgaatcaatattaacttacataatcaatctaaattaatagtatattttaatttttttccttattgttaataatactaaaattttaatatattttaaatttaatatggttttttatatatatt

SEQ ID NO: 36878 - DNA, 410 bp, Gossypium hirsutum
  Clone ID: LIB3148-051-Q1-K1-D1
tgttattgctcagctggttgccactttgatagctgtctatgcaaattggggttttgcaaggattaaaggaatggggtggggatgggccggtgtaatctggctttacagtgtggtgacatatatccctcttgatcttatcaaatttgcaatccgatacgttcttagcggcaaggcttgggataaccttttggacaacaagactgccttcactacaaagaaagattatgggaaagaggaaagagaagcacaatgggcagcggcgcagagaactctgcatggccttcaaccacctgaaacctcaaatcttttcaatgaaaagagtagttacagagaactttcagagattgcaaagcatgcgaagcgcagggctgaggttgcaaggcttgaggagctgaatacactgaaagggc

SEQ ID NO: 36879 - DNA, 310 bp, Gossypium hirsutum
  Clone ID: LIB3148-051-Q1-K1-D10
ctagtttgtagtttgaagaagagtaacaaagtgactttttttggaagttgattcgttgaggctagaagtaacataagaaaaagcttactaagtacgttgtatacgattcactatgtgtatagaaagaatacatctgtttgcaaaaaaaaaaaaaaaaaaaaaaaaaaaaaaaaaaaaaaaaaaaaaaaaaaaaaaaaaaaaaaaataaaaaaaaaaaaaaaaaaaataaaaaaaaaaaaaaataaaatggtgtgtgtttttataatattatttatttttatgtattgtagattaaatttttatttttttt

SEQ ID NO: 36880 - DNA, 189 bp, Gossypium hirsutum
  unsure (1)..(189): unsure at all n locations
  Clone ID: LIB3148-051-Q1-K1-D4
gaaatatataggaaatgtgaagaaaaaaaaaagggggggacacaattatgaaagggagagagaaaaggttgtagatctgtggagatgaggtgtaataatttggtgggctctgcttaagaaaaagggcaggtcttgaccgttgatttttcatatcaaaagaaaagaatgaacttgtgattgaacaacana

SEQ ID NO: 36881 - DNA, 386 bp, Gossypium hirsutum
  Clone ID: LIB3148-051-Q1-K1-D7
cccacgcgtccgtcaaaccaagtagtgtgcatcagctcatgcgggtcttacattggacgagggcgtgggttgctaggatgagtcgactggaataatgtattaagactgctatgtgttctggcgctatacaaaggaattctgatgtactgaagctcaccattattatatttggtacagaaatgttaatcttgaacttgtgaaatgtttcaatttaggctgggcctgcttctgtttacactgaaggtatattggatatttggcgattccaaatttattgttagcgtctatatgcttgggttttatggctgctgctttacaccgttgtagactgctgaaacaccttgacgttatgaactgtaattttgtttttaataacattacctttt

SEQ ID NO: 36882 - DNA, 395 bp, Gossypium hirsutum
  unsure (1)..(395): unsure at all n locations
  Clone ID: LIB3148-051-Q1-K1-D8
aaagaagcaagttactggatcgagttgtgtcagttgaatatgctttaagggatgatgatgagagggatggtagatacgatagtcccagaagaggaggtaatggcagacatggggatagtccatatcggaggtctccaagccctgcatatcgaaggcgaccaattcctgattatggtagggctcggagtcctgtttatgatcgctataacggtcctgcttatgacaggcacaagagtcccgaatatgggagatatcgcagcagccgatcccctgttcgaaggtcccagacatgaatggcggtcggaatgattgagaagaatatgttaaaaacatgcacttattagagtttgcagtttgagtagaaagntgagtagcatttttcttgattgaactct

SEQ ID NO: 36883 - DNA, 393 bp, Gossypium hirsutum
  Clone ID: LIB3148-051-Q1-K1-D9
cggactccatggcaaaaaatgacggtacggtaacatattgggcgacctgactggcgggaacggtggactataccattagcgaactatggaaacaatatcaagcggcctcaacagataatgaaaaacaaacgctaacacagatctatacaataacagccgtagtgcttgagatgacaaatgcgccagttatggtgtgccccatgctaaaaaaggcatacgctatttaaactacgcatagacactaaacaacaaggtcttacattgaaactctagaggcgtcagtcggaacataagccaaagcattagcaatctgaaacaccgattcattggtatcgtacccaaagcatcttgctattcaagttctacaagtttagctaggaaccattcctatct

SEQ ID NO: 36884 - DNA, 371 bp, Gossypium hirsutum
  Clone ID: LIB3148-051-Q1-K1-E10
actgctcttcacttcttgtgctcccttccataatgcacccctagccaagttgtgaaagtcgcaaaacaacatcatgcccttattatctcaacacccaactcatttttctcaataaaaatgtgcatcatacaacgtgctcctaagattccatcagatcatccttgtgcttataagtataatgttatattgctaattcattactgctattcaattactccgatagactgagctatttgaagatcatgatacagatgcacttaactggtgatctccttggtagactttagcactccttgccatgtgctcaaatataaaatggggggcaagtttactaagcacaaaattcatctccttcactgaacagttctagt

SEQ ID NO: 36885 - DNA, 417 bp, Gossypium hirsutum
  Clone ID: LIB3148-051-Q1-K1-E4
ctattcttgggtttccagtttcttggtcaccgaatcaaagtcaatgggctacgagattgtcaactaattatgattcaactagaactgttttataggcgtttccagctaaaataccctagagcttatgaaatgagcttatgcagatttcgttgaatggtttgtgacagttttgctgagtataaaatggtgctcctgcttagtagaatatgtaaacagccgtaacgagaagggcaccgtcaatatccaaccggatttcaaatatggttgcgtgattcttcacaactttgcaggctgtagccatgatttggggggcagactgcgagtccttgcaatgatttggagcaggggaacatcgtgcaaggtaacttgcacgcggaccataaaaaccattccagggttttatctaatgttcccaat

SEQ ID NO: 36886 - DNA, 222 bp, Gossypium hirsutum
  Clone ID: LIB3148-051-Q1-K1-E8
cttagatcgatagcattaaggagtttttgtagtagatatgccaaaattttcatatttctccacccaatgcttcgcttcgcgattctgacttaacactttccgctgatcactaatttatgttagttttctgttttagttattttatttttgagacatatatgctttgttttttgtttattatgcactattatttttattattttataggttgtttgcttttct

SEQ ID NO: 36887 - DNA, 328 bp, Gossypium hirsutum
  Clone ID: LIB3148-051-Q1-K1-E9
gccacgcgtccggccctttggtcttttggttgccgaagaaccaactaactttgttaggagggggaaatgcttactctagctcgtcttcctaaacgcgatacctcggtcgctagttcatactacatccatgctcgaacaagcaaatatcgaacacacataacgttacgcttaatagtgcaaagtgaagtttcataccaactactggacataagagagcatctcagacgtgtccagctccaagaacatgatgcagcatctcctcactggcgatctactctgttgagccaacctaatcctgctatgcgcgcatattgtatgctcgggaaac

SEQ ID NO: 36888 - DNA, 323 bp, Gossypium hirsutum
  Clone ID: LIB3148-051-Q1-K1-F12
cccacgcgtccgcatgaactggacactttcaggaattgcatcaaatacatgggaacgaatgcactagaagccacctgaacctggaaatcgtatcaaatattcgcaatttattctggagctttcatggacatttattcatttgaacgcagctggagccttataaaactgtttccttttttcttttatgcttgttttcacgtgtcgcaaataaactttgattctgcatgttctggacatgcaaagtgtatatgatgaaagatagaaatggattatttcctattatttcttgatcgaaataaatgaaagtaaaaaagtttagagtt

SEQ ID NO: 36889 - DNA, 263 bp, Gossypium hirsutum
  Clone ID: LIB3148-051-Q1-K1-F6
gtagagattgttagaattgtgtgactcaaattctaagagattgcttataagtcaagttaaacaaaaatatattttctttctaaaaaaaaaaaaaaaaaaaaaaaaaaggacagcaaataaaaaagaaaaaaaacgaaaaaaaacgggcatgcgaaaaaaaaaaaccaaaaaaaaaggaaactagcggccattcactgggccggctttttacaacgccgagaatgggaaaacgggggggctaattaaagtaaccgaaatggaaa

SEQ ID NO: 36890 - DNA, 389 bp, Gossypium hirsutum
  Clone ID: LIB3148-051-Q1-K1-F8
cccacgcgtccggttggtttcatacaaggttaaaaagggaacactaacctctgaaagttgtgcagaatattatcggtttcttttttgagttgatttaagttgaattccattataaaaaaaaaaaaaaaaaaaaaaaaaaaaaaaaaaaaaaagaaataaaaaaaaaaaaaaaaaaaaaaaaaaaaaaaaaaaaaaaaaaaaaaaaaaaaaaaaaaaaaaaaaaaggggggcggccttttaaaaaaatcaaattttactaccgggggctggcaacgtaattgtttttttttggggccacaaaaataaaattcacgggccgtgttttaaaaacgttgggactggaaaaaccctggccttaccaaaataaattgcttaggaaaaaatccctt

SEQ ID NO: 36891 - DNA, 339 bp, Gossypium hirsutum
  Clone ID: LIB3148-051-Q1-K1-G1
cccacgcgtccgatggagatgaacatgcagcaaggacctaagaagcaatgtttgcgaagaacacggaccggtccatggtgaagtgaaaacattgtgcttgtggttcttggttagcagatagttgtacaaatttaagtcaaagggtagtagttgatatttctttagattttaatagatgaaattagtgcacagtagataaaagaaaacaccaatattggtagtattctttttttatgggcaacatgcatggttttattaaacaatatctgtaaatataagaatctcagagttccttttgttggttcttattaattgaagtaatcatgtgtgtctttttct

SEQ ID NO: 36892 - DNA, 310 bp, Gossypium hirsutum
  Clone ID: LIB3148-051-Q1-K1-G3
tcgaccacaagattccttctacgcttcgatttcaacgaagaagacggaatctcttagcacatccgcaaggtacggaggcaacgtggcgggggtagctggcgtgtatggatgttgctggtggcgtagctgctgctagggctagggtttgctgcaaacatggtttaagttttgggccctttttgggcttaaggttttattagttttgggttttaaatttgggtttgggtttgtaatgttttgggttttaaatttaggtcatgtaatttggattttgatgatggactattaatttatttagtctttatttttg

SEQ ID NO: 36893 - DNA, 243 bp, Gossypium hirsutum
  Clone ID: LIB3148-051-Q1-K1-G6
acgctctgatgatatttgaaagtaggaaatggttaattttatatcgatgtttatatatagataggatgggctccctttgagagaaatgataataagtggaactacatgacaaggaaagttacagatggagtgattaggttttgttgcaacaaattatattgaatcagaatgcatatatgtatacgaaggggggatggagttgatagtgtctgcctatctcatgtgagattatagatgttaact

SEQ ID NO: 36894 - DNA, 171 bp, Gossypium hirsutum
  Clone ID: LIB3148-051-Q1-K1-H10
aacagacgtagggtcaatgaatttatagatatgggaagaacgaattgagtttgtgggagggttattaaggtaaatattgctaggtaattgaataaagaggtgatttttgattgactgtattacatgcaaactagcttatgaaaggatggggccacaatgagaaggaatgta

SEQ ID NO: 36895 - DNA, 354 bp, Gossypium hirsutum
  Clone ID: LIB3148-051-Q1-K1-H6
aaaagacaatatttgaaagtacgagatgaattataatagatggcctgtacacagtgaataggggtgggctgtctttgtgaataaaccataattcttggaccgacacttgcaagaaacattccagggtgtgggcgattttgaggagccgaactagatttccctgcactggccagactatcttttattctagggggcctggagttaattaaatgggccgtaattttaaaaacatagtaagctgaaaatcctcttacatacacaaatatattgcttggtaataatactccgttttacgtccctgaatattctcaaaaagtctgttacaattcttcattataaaaaattccccaacct

SEQ ID NO: 36896 - DNA, 279 bp, Gossypium hirsutum
  Clone ID: LIB3148-051-Q1-K1-H7
cccagacctactaataaggcacttcatgagtttgttcggataactttattatatgctaatggtcaaacgtagcataatcttatccatttttttttggtctttttttaaaaaaaaatattatttttaaaaaaattaaaaaaaaaagaattgaaaaaattaaaaaataaatgtctaaaataaataaaaaaggttttatattatactaaaaataaaaagaaaattaaattataaagttttttggggggtccctatttaagggccaagtttattttccctaaa

SEQ ID NO: 36897 - DNA, 300 bp, Gossypium hirsutum
  Clone ID: LIB3148-051-Q1-K1-H8
ggtggttatggaggagctggtggacatggatgtggtgctggtggcggtaatggtggaggcagagctagtgcaggtggtgcttctgggtatggcagtggaggtggcaacggaggtggagctggtagtggtggcggctatgaaggagctaatggacacggaggtggtggtggcaatggtggtggaggagctagtgctggtggatatggtggaggagcttctggatatggaagtggaggtggtgaaggaggtggagctggtggtggttatggaagagcctgttgacaaggaggtggtgctagt

SEQ ID NO: 36898 - DNA, 299 bp, Gossypium hirsutum
  Clone ID: LIB3148-051-Q1-K1-H9
gctaataccgccgcgtaggcatttggttgaataagttgggtttggttcgttttggcgaggcgtgcatgcttaattctatctagcagacgatgtaaactgtgtgcttaatttctatactcttccacatgctttgataaacaaagaatgtgaccccaataaagaattagatcctcaatcaatatgaaggtcttgcacttttattgaagtactaagtaccttcgaaactatagatttcaaggggtacaatactttaaaaggcgcggctattttaaagtttttcagtcatatctcccggttct

SEQ ID NO: 36899 - DNA, 363 bp, Gossypium hirsutum
  Clone ID: LIB3148-052-Q1-K1-A6
gcaaatcatcggctaaagtctgaaatgagggctgagatggatcgctttgctcgggaaaagaaggaactttctgaacaaatacaggaggttgagagtcaacttgagtggcttcgtttagagagagatgatgaaattgcaaaactagctaatgagaaaaaagcacttcaggatcgtcttcatgatgcagaagctcagctctctcagttaaagtctcggaaacgagatgagttgaagagggtagtaaaggagaagaatgctcttgctgaaagattggagagtgctgaagctgagcggaaaagatttgatgaagaactgaaacggtatgccacagaaaatgtgactcgagaagaaattcgtagtcac

SEQ ID NO: 36900 - DNA, 178 bp, Gossypium hirsutum
  Clone ID: LIB3148-052-Q1-K1-A9
atgacgttcattctttttattatgtatttttatctgcatttagacatttaatcgaaactatgcatgcccctgtttttagaatcatataaaattgcttgtattgttcagagacatttaattgaaactatgtattaccctgtttttagaatcatatggctatttaactgccatttacttg

SEQ ID NO: 36901 - DNA, 365 bp, Gossypium hirsutum
  Clone ID: LIB3148-052-Q1-K1-B12
cccacgcgtccgtgttggttagcgaatgcattctttgttatttagatttgctactagaatattcatgacttctgcaatttgtttttgctcgatttcctttttaattattaaaattttctcacattgtgtaggttctccccgtaatcctcagactctatctttccaaatttgcttgaaacaattgtcggcatgtgatgggccagtttaggattattccagttcaggaaaacacctcttcaggagttttggagaaatcacatcgaataaccaagttttgaagctttcacgttaataatctgttaaactaatgaatggaaggcttcaaacaaagccaacaattgtttcgggtttacctatttatttta

SEQ ID NO: 36902 - DNA, 300 bp, Gossypium hirsutum
  Clone ID: LIB3148-052-Q1-K1-C2
gaaaactctggtggaagcaaatatgaagctgattaaggtccctaaggccccaaaggattatgacatacttgccatacccttaacaagctcagcaatgaggatgttgaggaagagaaatggcacacctgaagaatggcgtcaatatctcttccccactactgatccttagacattcatttctacctatgttacttagatttggatgtaaatgttggatacagatatgttttcgtcaaaaaacaataatcaagagtaacataggtccatacataccggttgctgtacattctcttatatttc

SEQ ID NO: 36903 - DNA, 189 bp, Gossypium hirsutum
  Clone ID: LIB3148-052-Q1-K1-C5
tccacgcgtacgcccactcgtacgagcaggacggaggacacggaaggcaagagtcggttgtgtgggccaactagctgacctgtcatataaatggaatgccagttgcggggcttcttgcttctaagactaagctttatgctaagggtttgtggatagggttgatatgtggtctttcatgccaagctgctg

SEQ ID NO: 36904 - DNA, 273 bp, Gossypium hirsutum
  unsure (1)..(273): unsure at all n locations
  Clone ID: LIB3148-052-Q1-K1-C6
ccgacatgtaagatattttcgtatgtttatatgaagatttcttggtatatcactcganatatcaaaagaaaaaaaaaaaaaaaaaaaaaaaaaaaaaaaaaaaaaaaaaaaaaaaaaaaaaaaaaaaaaaaaaaaaaaaaaaaaaaaaaaaaaaaaaaaaaaaaaaaaaaaaaaanggggccgccccttttaaaggatccaattttacttccccgtccttccaacgtaatagcttttttttagggccccctaaattaaatccactgccccctt

SEQ ID NO: 36905 - DNA, 258 bp, Gossypium hirsutum
  Clone ID: LIB3148-052-Q1-K1-C8
cccacgcgtccgaacaactttctttaggtaaactcggtgcttgatttcatttcattcctttttggatcaatcaagaaaatttctttttttttccaaaaaaattaataataaatctggtttctgttggttgcttacctaaaaatgtgaacctttggtggtttttccattattttaataactgaacctaaattttggttggaatggaagggtttcctattattaaccagcccctttttttgaaataaaaaatttacttca

SEQ ID NO: 36906 - DNA, 191 bp, Gossypium hirsutum
  Clone ID: LIB3148-052-Q1-K1-D6
gtgtgcagaaacctgagaagcgcctctcatttttctgagataacggaaggcttgtatatggctgccatgtttctcggagttattaactgccaaacagcccaaccagttgtagccattgaaggaagcgttttttatcaaaaaagagcaaccggattgacctttgcattaccttttgcactcgcacaggtaat

SEQ ID NO: 36907 - DNA, 426 bp, Gossypium hirsutum
  Clone ID: LIB3148-052-Q1-K1-E11
cccacgcgtccgcccacgcgtccgagtagacgcttagaaggtttcttgttgcctaaaacaccttcgcttcctcttataaattatattaaacctataaatttctttgcttgaaatcgacccttttctcttgatctatcaatcaattaaggtttttgtttttagttgaaaccctaatttgtcaaagcctcctccttgtttcttgtcggcggataatcagggatcgagtcttgcaatggcgaaaagttcctttaagcttgagcatccattggaaaggaggcaagatgaagctgctcgcatcagggctaaatatccagacagagttcctgttattgttgagaaagctgaaaggagtgacattccggatatcgataaaaagaagtatcttgttcctgctgatttgactgtgggtcaatttgtttatgttgt

SEQ ID NO: 36908 - DNA, 327 bp, Gossypium hirsutum
  Clone ID: LIB3148-052-Q1-K1-E2
gagaagtttgatgtcttcaaagattggctgctttaaaacgtcctgtgttaatatttctccctcctaagtagcctgcagtaattaacattaaaagttctgagaagatataagctgaaaaccattggaatcccggaacataattttgtctgttgtggacaatgatgagggagagcaaccattgaacaggggagggattcaccgaaagggggcttgagatctttgttgaagagagggagaaacattgcttagaagaagttgagaattatttgagtaatttttgagattatctttttttttttgataaaaaaccaccctaagatcaacctc

SEQ ID NO: 36909 - DNA, 402 bp, Gossypium hirsutum
  Clone ID: LIB3148-052-Q1-K1-E5
aaaacttcgaaaaaaatgagtatacctatactcatatccaatgctcacttatcttagtattatagatgttgtcttttgattttcatttttgtgactgttatgcagattccttgttgatttgagatatctggcttaagttaatataagattaaattttggtttgccatgtgaacattctatatgaactccattgcttattattagtttatcatggttgaatttggatgataatcatctcttctagatatgagcttaatcattgtaacttataaaaggaagcaaactgttaatggtgagaaacaaaggaagaaagatagatggaaccaccttagagtgaaaagggagaaaaaaggtgagtgaaagaagggaaacaaagaaaaagaataatagagaaaaataatt

SEQ ID NO: 36910 - DNA, 247 bp, Gossypium hirsutum
  Clone ID: LIB3148-052-Q1-K1-E8
attataatcactatgcaaatggtagtgggtggtgggactgtgtcatggaaggcgtggacagcgaggaagttggctatggcgaagtatgggaaggggtgggctccacaacctttggtggaatagtagactggcattgatactagtccctgttgcagtaagtctaactaactatgctactgcttgaatatgtcatcaaaggttctaattttggttattatgaatagaatctaaatccttgttttctgtc

SEQ ID NO: 36911 - DNA, 112 bp, Gossypium hirsutum
  Clone ID: LIB3148-052-Q1-K1-F2
gatagatgcatgtgtgagagtcacgtgcctagaatcatgatgtgcttttacatgtttgggcccattgtcatgatgtacttcatgcgggagaaaagcgcgtatgaacgttgtt

SEQ ID NO: 36912 - DNA, 355 bp, Gossypium hirsutum
  Clone ID: LIB3148-052-Q1-K1-F3
gccaattggtggttggttggttcatggtggtgatgatgcaaatatggtaacggtgctgcaattttggaggtggatgagaatctcaacaagcaatttcgggtgtttaaagcagcacaacatgaggaaatgtgttacaatatgaagtttggtctacgttttagtggtatcacatatggttcaagatgtgtgaaaattcaccacgtaaatgcacgtgctgaatcaagtaataaagtgataagaagatgtcgttcccaagtagaccaaattataagttgctaagtaccaaattataaaaattactaagtttctcaatcaattttatggtcttggaaatctaacttcacctattttcgtt

SEQ ID NO: 36913 - DNA, 430 bp, Gossypium hirsutum
  Clone ID: LIB3148-052-Q1-K1-F4
ccatttgcacaatttcttatgcagcctcagtacacctggtctcagatccctaacaaatatacatcaaaaactaaggcatcaatagccgatattgaggtgacattgattgaaactcatgctaatcttcgaattcttttgcgaaaaggtcccactcagctttccaagcttgttgctggttttcaatcacttttcctttccatcctccacctcaatgtcacaaccctggatccatttgttctctactctatcagtgccaaggttgacgaaggatgccagctcagttccgtagatgacatagcaagggcagttcaccacatgatcagaataattgagcaagatgccactgccttatgttgatctattcatatcaccaatatgccacccacttttttttctttttttttggggttctggatttcttcctttttac

SEQ ID NO: 36914 - DNA, 232 bp, Gossypium hirsutum
  unsure (1)..(232): unsure at all n locations
  Clone ID: LIB3148-052-Q1-K1-F7
ggtaaatgatttttactatgtcaagtttatgcttattgaatatttgaaacgtgtgcgcactactgtggagtgttaatgattaatttatgtatccgtatttggttccataattagttaataaacaatgttgtattgctagaatttcattgnacacaggtngctntttaagactaactgtttagcatctatcaaataaaaaggctaatcattatttaggcttcaaaaataaatt

SEQ ID NO: 36915 - DNA, 404 bp, Gossypium hirsutum
  unsure (1)..(404): unsure at all n locations
  Clone ID: LIB3148-052-Q1-K1-F9
gtttccggattggagatgttcatcgggcaggcctacgaacagtttgagcgattcactggtttgccagcaccgaaggagcagttccggagaactatgtcaaagtactaacaacgttgacacaacgactcgtttgtctgcagcaaattgctggtttgtttttactattcatttgatgagaagggcaatgaaacaacaatttgtttaggaagtacttgaagtgtttttgaataattccaggttttgtttcatatgaactntattttctttatttcctatgatctgtgagtatgtacgatagaccggaaaattcatatattcctattcgtgtaaattgctttgtagtaatcgtgtttatgacataaatttttacatattaataatattcgtgttatattaattttgag

SEQ ID NO: 36916 - DNA, 365 bp, Gossypium hirsutum
  unsure (1)..(365): unsure at all n locations
  Clone ID: LIB3148-052-Q1-K1-G1
cccacgcgtccgctaaaatcaatttgttagggctcattctagcaatcgtcgaaccaccattccatttggtggccgacaatgcacaagcagcgaccagattccactgacgaaggctctgctcaaggaaatttggaacggctgtacggaggagaggggaaatggctcgtgggaacccaaccccctagcactgttctggcgtattccagaagtttctggtgttctcggttgttgattttctttgagtccaattgngtctcgcgtttgggttatagaatncgggttaggtttgggtttattcaattgggtttaaaaaaatgtatttggactgcttttaatttaatttactatttggcctgatggtttgt

SEQ ID NO: 36917 - DNA, 289 bp, Gossypium hirsutum
  Clone ID: LIB3148-052-Q1-K1-G11
aaaaaacatacaaaaaaatatacttgtggatttaataaaaaaataaaaaaaaaaataaaaaaaggaataaaaaaaactaaaaaaaaagaaaaataataaaaaaacaaaaaaaaaaaaagggtcggccgttttgagaatccatggtggtgtcgcttacatgtctctttaagctttttttttagggacgcttatttttattactttggcctcccaattataacattttgtcggggaaacccgggtcgatacccattttaagcaccttgattttcttcctcttgtcgccagc

SEQ ID NO: 36918 - DNA, 228 bp, Gossypium hirsutum
  Clone ID: LIB3148-052-Q1-K1-G3
gatgctagctcgagttggaggttgttggagattctatcacactaacaagtttttgattggtattgtatcaacgatcttcaagtatttttaagtctatggcatgtatagggatttgattatgtgtgtatatgttattatgagttggcataaaattttggcgtataatatttgatggttcattttgtataaggctattgaggttggctaatattagttaagttatatgtt

SEQ ID NO: 36919 - DNA, 400 bp, Gossypium hirsutum
  Clone ID: LIB3148-052-Q1-K1-G5
gccacgcgtacgtccacgcgatcgaccacgtgtacgttcatgctcaaaacaagaaacttactgcacagctattgtctttgaaagccaaagattcaaatgaaaccaggatcaagaacgaaaacgagggttcatggtgcagcaatggaagcgaaaacaattatgatatgaacttagccataaggcctgcagcaacaatgactcaacttcttcatggttcatcgaaaccaagcctccaatgcctaaaacttgaccaagtggttcaacaagatcagagcttggcttgccatatgtttaaccaagatggtgatgaacagcaaggtttctggccttgggctgaccaatcaatcaaattttcattgaattaagaaccagtgccacattgttcttaattatgtacttc

SEQ ID NO: 36920 - DNA, 335 bp, Gossypium hirsutum
  Clone ID: LIB3148-052-Q1-K1-G8
caaattgcttgcagttccactgcgccaggttcatgaaaaccacaagacatatggaccgataatatcgggagtgccacagttgctatccaagttcaccatcaacattgttgacatttagaacatgcttgtttacaataatcgttgctttccaggttaagtaataggaacggtgagaagatgtgtgctgcagctgtacggggttttaaatcttaggtttgtaatttttcatggaattcccaaatacatttgtatatagtatgttatataccatagttttcttacaatatgtgatatactaacattgagctcgacaatatcaaatttatcttcttggt

SEQ ID NO: 36921 - DNA, 162 bp, Gossypium hirsutum
  Clone ID: LIB3148-052-Q1-K1-G9
ggttgtcgttgttgcctataaatggtatatttctcgttttcttaaattatatcgtcaatgttggttttccattgagtcgtctgtttgtggtgttacaagggattaatcctttaattccacaaatttagaaagaaaataaggaaattaattctatgtcgcgat

SEQ ID NO: 36922 - DNA, 260 bp, Gossypium hirsutum
  Clone ID: LIB3148-052-Q1-K1-H6
gccacgcgtacgcgcagtgtaaaaccgaaacttttgtctctgcactattcataacacctactgccagctaaatcctgaagagttttccaaacttgtttctctcatgagtctttggaattagttcttacagcagatcactaggttccaggaagccatttaatccgggggccattcagctcggatttaagattttgaattagaagctagaaagatttactgagggactgatttatctgtgcattccgggtgattgatctgtc

SEQ ID NO: 36923 - DNA, 394 bp, Gossypium hirsutum
  Clone ID: LIB3148-053-Q1-K1-A1
cgatttgcatctaattgtatcagtaattatattatagatcttcattgttgatgtgcgggttttactatgcagtgaacaaaattggattcaatttaaaaaataataataataaaaattgatcttcgagttaattgaatcaagttattcgatttttcaagacaacttgcattctcgaataagtaattcgagtttcgagtttcgtgtttaagtcgagttaaattttacaatataaataacttaaataattcgaataacatattggtgtaaataaccttttagtccttgtcaattttgaaaatgagcaaattggtctctttcaacaaaaattaaaaaaaatcaaaataatttttaaaatttcaaaatatttataaaaattccaaaatttatatttttc

SEQ ID NO: 36924 - DNA, 169 bp, Gossypium hirsutum
  Clone ID: LIB3148-053-Q1-K1-A12
ttcccaagtaatgttgtataattgtggagaaaactctgaccaaacagcttgttgtaagctatgagaagtctagtctaattgtgtgattaccttttgttatgctttcggatagcatttttgcttcaccagtaggtcagttggccctatgctttatccttgttatttcatt

SEQ ID NO: 36925 - DNA, 421 bp, Gossypium hirsutum
  Clone ID: LIB3148-053-Q1-K1-A8
aaattgcattacaacaaaataacattttgttttgcatttattcattcaacataagcggcatggagatttaagaaggcgcgcaactccacaacaaaaaaacacctttgtctgtgaaaaattcttgaaattccatgcaaacttggatagctgtaatttcctctcatcaggaatacacagttataacagatgttcgttactgtaaaaattatatctttggaaaaacccttctcacatcttatatttaacactactataaacttcacattatttatcatctttcttttacttataagactatgccaaacactagtaattaattatttcatatgttgattgactactgatacttgctctctatgaattcataaaattttttctttaattatttttctactattttgaatctttttatttcaaattt

SEQ ID NO: 36926 - DNA, 217 bp, Gossypium hirsutum
  Clone ID: LIB3148-053-Q1-K1-B10
gtccgatcaaccatcggtgaaggtggcggtcacagttgatgcacctgctgttctcaaattggtgctggagaggttgatgggagtgatgatgaggatggttgtattgtgtaatcagtgtgaatgtttttttaagaccgtatcagctttgtcagtggactaatttgttctgttacggtagctgttattgtttcaataaaaggtaataattttatgcttt

SEQ ID NO: 36927 - DNA, 384 bp, Gossypium hirsutum
  unsure (1)..(384): unsure at all n locations
  Clone ID: LIB3148-053-Q1-K1-B12
ttttatttttctaggttatataataaggtaagtaaggttgaagaaaaagtaaatagtttaggagagattaaaaatttagacttaaaccatgagtctaaagaaatattaactaatgttaataataaattagatcaagttataaataataatattgagcctaatgtagattttggtccattatattacggtcatagtaatgtaattttaactttatctgaagaagaaaaacacttcttctgatgaatcgtcatctacgttnaaaaaaaaaaaataaatattacctatagtataatataattttaacaaaaaaaagggcggcctcgcttttagggacctaatttaaataacggttgattaatacctaataaaaggggggtgctttta

SEQ ID NO: 36928 - DNA, 419 bp, Gossypium hirsutum
  Clone ID: LIB3148-053-Q1-K1-B4
cccacgcgtccgcccacgcgtccgattttccttcactcttggattatatggcttattttatatacgatgtgtctcatcacataaattattatattatatttgaccaatattataagtatttcaaacctaaaaaaaaaaaaaaaaaaaaaaaaaaaaaaaaaaaaaaaaaaaaaaaaaaaaaaaaaaaaaaaaaaaaaaaaaaaaaaaaaaaaaaaaaaaaaaaaaaaaaaaaaaaaaaaaaaaaaaaaaaaaaagggggggggcccttttaaaggaccaaagtttacttccccgggctggcaaggaaaaagtttttttatggggcccccaaaataaaataaaggggccggggtttaaaaacgtggggaggggaaaaacccggggttacccaaattaaatggcttggaagaaaatcccct

SEQ ID NO: 36929 - DNA, 409 bp, Gossypium hirsutum
  Clone ID: LIB3148-053-Q1-K1-B6
cccacgcgtccgcccacgcgtccggttttctgatgtagttctgaggatgggttttctcggaaaataactttccggtgagtttttgtaaattaccggcactggaattctctctcttattttttgctttacagtattgaaactgttaaaaggaggagaaaaatgaatgttggtcggtaatctttaaaatcatctctttttttttttttactactttgtgtctagtattgaatgtatgaaatgaataaatcaaaattattggaacatttcccaattcaaaaaaaaaataagcattgctaattttctgaacagataatgcatgcatgcatgtatgtacacatacatatgaatgtacgttgaatgaagtcttctcaaaaaaaaaaaaaaaaaagggggcggcccttttaaagga

SEQ ID NO: 36930 - DNA, 371 bp, Gossypium hirsutum
  Clone ID: LIB3148-053-Q1-K1-B7
cccacgcgtccgcaaacatgttgaaattcgcagaagcatgcgaaatacctgccgctcgcatgacaaagaaggaagatctgagagaagcgatttgtaaaatgctggaaacacctggaccttatttcttagatgtaatcatcccgcatcaagaacatgtcttgcctataatccccagagaaggggctttcaaagatgtgattactgagggtgatggaagaacaaaatattaattttaatgaacatcaaacatgtgttagtcataatgtatttatgagcagtagtcaataagcattgctaattttctgaacagataatgcatgcatgcatgtatgtacacatacatatgaatgtacgttgaatgaagtcttctc

SEQ ID NO: 36931 - DNA, 223 bp, Gossypium hirsutum
  Clone ID: LIB3148-053-Q1-K1-C10
gtccaatttaaacagttcattgtgccgtaagtggattacaagattgttttcttggtgctagccagtcttgtatgtgtttatggttatggccactttgccatcaatggtcgaggttgttttgttctttgtcggttacttacatggaccaatcctataaatagccattaaaatgctaatttgactcgaacgatttgcaaatacaatgagttctcttcatttattt

SEQ ID NO: 36932 - DNA, 304 bp, Gossypium hirsutum
  Clone ID: LIB3148-053-Q1-K1-C2
tttttttttttttttttttttttttttttttttcttggttttttttttttttaccggaagaggcttcgaagtactcggtttacatggacgaacaaagcgaggaaagcaaaagaatagaagaggtgttgatgaaaataccgaaagaagaggtggacacaatgcgtgctacggggattgatatgatcccaaggctcacttacgcacaccctaatgcgagccatagcgatgttggcttcaaaaatgccgtcgacgttgcgcttcaagcattggcacagcatgttagggacaaaatttaataaggaat

SEQ ID NO: 36933 - DNA, 207 bp, Gossypium hirsutum
  Clone ID: LIB3148-053-Q1-K1-D1
gcagatcagggttctcaaaagtctaatgggtactgctgaaacacaatggcatccttgtgagtggaagacagttaccattatcatcatatcatatcatatatataataaatatatcatatgtttaaacactaaatgtgtgctggttttcacattttatcccttagatgtaattcctttctgctgtagtgattgcatttatatatgttt

SEQ ID NO: 36934 - DNA, 418 bp, Gossypium hirsutum
  Clone ID: LIB3148-053-Q1-K1-D11
cccacgcgtccgcctgagtttatccattaccagtttgattttgacatgagttcttgacatgagtgccttaaacatcttttgcctttttcttccaaaagtttaatgtctttccattagagtttcatcgtcaagtttatctcctcttccttttgatcgacattttcaataatttgggttcaagatcccctatatgctagaggtatagagttcgaactttggcatgagcttgtttttcagcaatggcattttgcgctcatcttcaacgattagacatttcaaagtgactaaagataataccaaatttgtttgaatgaaaaataataactttatcaatgctattggacatagaaattaagattataataactgaaacctgtgatatttgtaagcttaataaaaaaaaaagtgaaacatgtta

SEQ ID NO: 36935 - DNA, 440 bp, Gossypium hirsutum
  Clone ID: LIB3148-053-Q1-K1-D4
ttcttaatggatttggccttgttacctcccaatccggtgggggtctatcctatcctacatggttaggtagcaattacaagaaaaaaaaaaaaaaaaaaaaaaaaaaaaaaaaaaaaaaaaaaaaaaaaaaaaaaaaaaaaaaaaaaaaaaaaaaaaaaaaaaaaaaaaaaaaaaaaaaaaaaaaaaaaaaaaaaaaaaaaaaaaaaaaaaaaaaaaaaaaaaagggggggcccttttaaaaaattcaaatttttttacccctggttggcaagataaaatttttttttttgggcaacaaaaaaaaaaaaaagggcccgggttttaaaaacgttggatttgaaaaaaccttggtttacccaaattaaatgctttgaaaaaaattccctttttgccgggttgggtaaaaaaaaaaaagccccccacaaatcccttttcaaaaa

SEQ ID NO: 36936 - DNA, 398 bp, Gossypium hirsutum
  Clone ID: LIB3148-053-Q1-K1-D6
gttcaccattgctccgcccactccccattggtttggaggccttaattttctcttcaggcggggatgggaattaaagcggggggacggattacaagaaacagccttctttggaatttattccaattagcaagctttttcttccctccccaaaaagatattaattttccatattaaaaaatcgtctccatacagataaaacaacctaagcgctttatccagaacctatgaccagtaaccctgtctaggttataacagcattcgagaggagcgggcaccaacaagctattcaatacttgcacttgtcggcgcactgattctctgctggcacttcatagcattttccaactattggttgtggttataagaagaatgcacactattctatttgtaagatttcc

SEQ ID NO: 36937 - DNA, 335 bp, Gossypium hirsutum
  Clone ID: LIB3148-053-Q1-K1-D7
acgctttctatatttttctcatggaaatcaacattatcgcgattcgtttatgcatgaaaggagtgtgttatcaatagggacagcaaattcttttcacacattttgaatcctagattccttacctgattggctaatggaattataatatgcgaaaattgtttgtgaggtagtttattcatatgtaaattcagctcttatcaatagatatgatgattcggatccatatattcattgctcttttcactattgagcagacaattttcttccctttaagccatgacttattttgttaatgtacttgtgtctatttttaaaaatatcattctgctattagt

SEQ ID NO: 36938 - DNA, 387 bp, Gossypium hirsutum
  Clone ID: LIB3148-053-Q1-K1-E11
gctgtggttctttccctcttttgcaagtgcttgcagaaaatctggtgatggaaagatcgacgggggtgatagaggcctgaaatctggcggtggtgtcagtgaggcgctgattacagaggcagagccttgagtgatggcctcgattggggagctggacagacgctccccgaactttccagaagcagttgcggcgcgagggaaaagagctagggttagaaaccttagctggaaatttttggttctgggcctagttcattttgggccgttgtattaggtcaaaggtaggcttagaaatgggattgtaatgtagtgggttgagtctgccgggtaatgttataattgggcctcgggtgtaatgggtttatggggcataatttgggctgtaaa

SEQ ID NO: 36939 - DNA, 461 bp, Gossypium hirsutum
  unsure (1)..(461): unsure at all n locations
  Clone ID: LIB3148-053-Q1-K1-E5
cgnntccgcccacgtcgttctcgcgtgaccgcgttgggaggacaaatttttgtcattttatttcgantattttgttatgagttttgtgagcnnncaggccagaagattggtgctattctacattacgtagaatacgcgaaaagcttatattcttcagaagattcgagggcnngagccatattcttcgtaagaattacgatattgtgagaatagattattgtnnaatcttgtgaacatcccttgactttgntagggatagagctacatctcattcgtcgatataacttcgatctagatcactggttttgggggagctcaactataaatagagtctccccctcacttgtaaatcattcattagaatccatgcatccattgtattttgtattctttgaaagaaagtaatacaattgagatcatttacttnaaaaaaaaaaaaaacaattagtattaaggaaagg

SEQ ID NO: 36940 - DNA, 431 bp, Gossypium hirsutum
  Clone ID: LIB3148-053-Q1-K1-E6
gtaactgttcttattataatttttgtcgctctcaatgaaatcttcataattctttggtgggggttgcagacattgacagcaggatttgcaatgataggtcggatgggaaggggaaattcctacaccccatcaaaattgcctcccaagccactcgagatatggtcatacgagggttctccattctgtaagattgtacgagaagtgctggtagaattagagttaccgcacactcagcgcagttgtgctcgaggcagcccaaaacggcagatcctctatgagaaagccggacattttcaggtaccttatttggaagatccaaatactggagttcaaatgtttgaaagtgcagaaatagtgtagtatttaagagcaacctatgctcaataatcatcgggtcttttgaatatgttctttcaaagtcggttcattta

SEQ ID NO: 36941 - DNA, 393 bp, Gossypium hirsutum
  Clone ID: LIB3148-053-Q1-K1-E7
acgcctacgcttacataccaaaaaacaatttctttctttcctttttctttttttttaatgtcaagggttctggggatgtttgaatctagctatttctgggaatggggaaaaaccaagcctactaggctttccaaagagccaggcttggctctttctttgctggccctgaaaaaatcaaagattgcatgactggcatactgctcgttttggcaaaattaaaactttttatacagttacatgggaagagttcaaaatgaaacaaaaagaagatgcattgagaaaaggggaactataagcaaataccgatcaaatgatgcgagaatataaagcttaatttgatgctgcatgggcaagcaagctttcacatggtagaaaccacttcaattgttaatc

SEQ ID NO: 36942 - DNA, 136 bp, Gossypium hirsutum
  Clone ID: LIB3148-053-Q1-K1-F3
gaaaccctttgtttcgttcaatgtaacaaaaaagtctttagttctacactgcataacttaatgcttggtattgacctttgtggaaggtaagttggggttctttttataagaaatgtgcctttgatgccatttcatg

SEQ ID NO: 36943 - DNA, 291 bp, Gossypium hirsutum
  Clone ID: LIB3148-053-Q1-K1-F6
gaacttatgaaccattcatttctatgcctgctagaatcacccaaaagttagttgaatgagagaacttgaccaagttttatgaattctactgctagtttttacatgttatctgtagccaattttagattcttcaattgttgactgcgataacatggttgaaacatgttctttctggttcccatagattataaatgacggatttctttgcatttgtaataatatttttgtgattcattggtgttaaaaacaattatacataaaagataatcagaataatacacaaaaaatgat

SEQ ID NO: 36944 - DNA, 355 bp, Gossypium hirsutum
  Clone ID: LIB3148-053-Q1-K1-G10
aacgacggaaactaaaggggcgtgacgtttggttggcttctggaactttctgtttacgacgcctagggttccaaaaaccctaggtcttccttcatctgttaacacattgggccatttgggtcgttcctgcttgtgggttgggtgtaaatgggttaatgggtagttttaggtattctgggttaaaggcaaccgaattttgggcttatacatagactgttaaaaaacaaataaacatttatttatttattttaaaaaaaaaaaaaaaaaaaaaaaaaaaaaaaaaaaaaaaaaaaaaaaaaaaaaaaaaaaaaaaaaaaaaaaaaaaaaaaaaaaaaaaaagggtgaaaaattaaaa

SEQ ID NO: 36945 - DNA, 344 bp, Gossypium hirsutum
  Clone ID: LIB3148-053-Q1-K1-G11
aaaaaaaaaaaataaaaaaaaaaaaaaaaaaaattaaaaaaaaaaaaaaaaaaaaaaaaaaaaagtgaaaaaaaaaaaaaaaaaaggaaaaaaaaaaaaaaaaaaaaaaaaaaaaaaaaaataggggcgccctttttaaagaatcaaactttacttccccttccatgcaacgtaaaattttttttattgtgtccccaaaattaaattaactgcccctcttttaaaaactccggaattgaaaaaaccctggctttcccaaattaaatccctttacaaaaaatccctttttccccagttggctaaataacaaaaagccccccaccaatcccctttccaaaaatttc

SEQ ID NO: 36946 - DNA, 426 bp, Gossypium hirsutum
  unsure (1)..(426): unsure at all n locations
  Clone ID: LIB3148-053-Q1-K1-G3
gtgagtttgaaatatttaagtgtatggtcaaacttttataagtttttcatatacatgaagggtcgtacactgctggacagagaaaaagaagaatccgggtagcataggttaatgttagtattcattttttctcgatgaataaatgaaaaagaaaatatagaaatttttaatacaaattgtcaagaaattatgttgagtgatcactaaattgtagaatatttttatgaaatgtattctttataggactttgaataattgaaattgcagatgtggttcaaaaaaaaaaaaaaaaaaaaaaaaaaaaaaaaaaaaaaaaaaaaaaaaaaaaaaaaaaaaataaaaaaaaaaaaaataataaaaaaaaaaataaaaaataaaaattttattaataaataaatataaaaatatattttatnatcccccctt

SEQ ID NO: 36947 - DNA, 390 bp, Gossypium hirsutum
  Clone ID: LIB3148-053-Q1-K1-G4
cttttgaaactcaatccaatttatcagaagtttcttgatctccgatgaccaaaaactgtgggggtgaaacaagttcttctagaggcgttggttgtggtaaggtagggaatcctactcaaacgatgtgggaagttgtgcctagcagatgtttccgatgtaccaccacctccaacaaacctaaggcaatgttgttggctagagggctacgccacaagatggtcatctatgggatatcttgagtggaggagagaaataatcttaataaaacctacaaaaatctttcgtgtttcttgttccctttgtatgccttagaagggggtcttacccttccattgcaccctttcgtgagagaggtgttgaatttttataaaataattcctaagtagctaa

SEQ ID NO: 36948 - DNA, 286 bp, Gossypium hirsutum
  Clone ID: LIB3148-053-Q1-K1-G5
cccacgcgtccgaaaaaaaaaaaaaaaaaaaaaaaaagaaaaaaaaaaaaaaaagaaaaagaaagggaaaaaaaaataaataaaaaaaggagggctattatatagggtgacggtatgttttattgattgatgctgttatattgattgttttgtagtgtgaaaactatttaatttggggggcttattttttttaactgctgttttgtttaagcctgcttgcctggtaaatcatttgcgttggctgatttaagttttttacaggtggtctttttttatagtggttggg

SEQ ID NO: 36949 - DNA, 437 bp, Gossypium hirsutum
  Clone ID: LIB3148-053-Q1-K1-G6
cggacgcgtgggttcagtttctttttcagttatattttctacagagatagcaaatgtaggtgttgatggatcaggaatgttagggtctgaaccaagggtgccgatggcaagaaagccatggaatagctcagacattgccaacgatgaatcctcttcatagtcttcttcatctactcgtgctgcttctacaccagcaaatgactttcgaagatggtctctctgggatggactgaatggcttggtaccatagtttggctttgaatagatttgttggtcatccagtaatgactgcccggtaagacaattacaagaatgccctgacacgaaaaagttaaaagaaaaacttggatgacagtgagatagatgaaagaataagttcttgcgtagcattttagcagagacagtgattacttttccctaaccatgacaacatttaa

SEQ ID NO: 36950 - DNA, 399 bp, Gossypium hirsutum
  Clone ID: LIB3148-053-Q1-K1-G8
caattatgcaattgatagcgttattggtcctgatggcaaaacaaaacaactgcctggcttctgcggtacatctgaatgtcggaagcgattatattaggttttaagcaacttaaaagctttggaattctggtgagcggaagcccattcctatctcctctctctcttgtactggagaaaagtgtgtttgattgaacgattatataaaatatgggggttttcaagaaagttgatttacttgttggacagtttttaatctcaccattatcgatgggcatatgtatagatgaaacaagaaatactgtcatgtttctgctcctggactgatttgaaacgatgtattataattctatgcttttaaaaaaaaaaaaagaataacggcttgcgaattataataaaata

SEQ ID NO: 36951 - DNA, 346 bp, Gossypium hirsutum
  Clone ID: LIB3148-053-Q1-K1-H6
ctgatttggaaggcgaagagacgggcgaagattttagtaaatatattaacgaaatccatctaaattatcttaatcaggggatcctaacatcgtatcctttgcctaatcatgattaccattctaatacgaatcaaagcagagaaatcagtggctcaggctggaaaacacctccacctccggctccgaggagtgcggcttgggattacttgaacttttttgatgaaatttatgagagatacgagttgccttatttttcgagcaaagaagtgaaagacaaaggaggagttcatgaacatcttgaagcacaagcagtaaagcaagttcatggagatgagaaatctagtgc

SEQ ID NO: 36952 - DNA, 410 bp, Gossypium hirsutum
  Clone ID: LIB3148-053-Q1-K1-H7
ataaaaaaaaaaaaaaaaaaaaaaaacaaaaatttaaaaaaaaatataaaaaaaaaaaaatatgagaaatataaaaaaaaaaaaaaataaaataaaaaaactataaataataaaaaaaaaacgggggggcccttttaaaggttccaagtttccttccctttgcttgcaaaataattgttttttttttgtgccacctaatttaatttcaatggcctgagttttacaccttaaagttttgaaaaaccctggttttcccaattttattgcctttgaagcaaataccctttttgcctttttgattattaccaaaaaggccccgcccgttcgcttttcccaaattttacccctcctgattgtctattggaaccccccttttaccggcgctttacgctctagaggtttggtggtta

SEQ ID NO: 36953 - DNA, 363 bp, Gossypium hirsutum
  unsure (1)..(363): unsure at all n locations
  Clone ID: LIB3148-054-Q1-K1-A12
tctgaacatagggttgtttctttcgaagggctatagtgtttcttttcttttttgtgtagactttgatttgttgcagctttgcctcggaaatggtcaatggtgtacatggttcatatgttattcaggggaatatagttgctgtttgctacagtcgtcactagggcttcttctgctcagtttggacattggagtctacaagatgccagtccccatctgatgtccgtcaaatttacattgcaatggcatgaatcatgatcaattttgtttcccttgttgatttttttgtgtgattccaatgttgatgagcgcttgtcatcaatgattcaataatttccttattctganatatatacattatggttc

SEQ ID NO: 36954 - DNA, 399 bp, Gossypium hirsutum
  Clone ID: LIB3148-054-Q1-K1-A4
ctgcaccatctacaatttatgttttttggattcattcgattgtaggtgttgagtagtatatgtatgatgtatctagtgtaggtgtattcattatttttgagatttttatatacaaaattcttaaaaaaaaaaaaaaaaaaaaaaaaaaaaaaaaaaaaaaaaaaaaaaaaaaaaaaaaaaaaaaaaaaaaaaaaaagaaacagaaaatataaaaaaaaaaaaatataaaaaaaataaactgaaaaaacttccaattaaaaaaaaaaaaaaaaaaaaaaagggggggccccttaaaaaaaaaaaattttaatacccggtgacgggggcgttattttttttttttggggcccacaaaaaaaatcctggggcccggtttttaaaacctggggagggggaaaa

SEQ ID NO: 36955 - DNA, 325 bp, Gossypium hirsutum
  Clone ID: LIB3148-054-Q1-K1-A7
tgctatttgttatgtgaattgctccgttatttctacgtgtagaggacttctataacttagggatcttacaaattctattaccaattatataaacctaagctatggcttctatctcggaagtatttttttgggtgaaaataaatactccataaccatgatggggtatgcagaagaacatgagactactgttcttgaagtagacttacaaatatggagtgaactgaatatgggggggggatttcatgggcccaagttgctatcagcactgatgaagtatacaaaagctgtgagggtgacgaacatgtaatacacgggccgggggtaa

SEQ ID NO: 36956 - DNA, 409 bp, Gossypium hirsutum
  Clone ID: LIB3148-054-Q1-K1-B6
ggccgactatgacaatctcgtcaaggagactgacaaactaaaagaagagctcacggacaagttacttttggaagggaaagagaagggaaagtcggagcttcctgatgcgaaaacatcctcgcaagagctaccatcagaggctgccgagggggaagagtctaaggttgtgccagtgatgaaaagcgattacactgaaggggttcattcttcagtactcttggagggtgctggttcatcttatccatttgaaccagaccagtctgatttatcacaagatgaggaagacaacttgagtaagggcctcttacatcttccttcatgcgtcttccctaaactccaagacatcgattactccgacccgcctgcaggttcctgtaattttggattccctcttgatgatcatgccttt

SEQ ID NO: 36957 - DNA, 414 bp, Gossypium hirsutum
  Clone ID: LIB3148-054-Q1-K1-B7
attccatacttttctgtaaaaatctttagtctcagcctatatatattattactaggatccgaattaaaaaaaaaaaaaaaaaaaaaaaaaaaaaaaaaaaaaaaaaaaaaaaaaaaaaaaaaaaaaaaaaaaaaaaaaaaaaaaaaaaataaaaagaaaaaaaaaaaaaaaagcaaaagctataaatcaaaaaaaagatacaaatgggaatttgtagaaaataacaaaaagagaaaacttaaatacaaacaaaaatagttatataagcttccgttaatagcaaaattggaccaacctgtttattaaatgctctttgtgaaataaaaaagaataccttgccgaagatcaataagggtaagaattttaccttagatctttcaaaaaaacattggatggtagagccactatatgtat

SEQ ID NO: 36958 - DNA, 358 bp, Gossypium hirsutum
  Clone ID: LIB3148-054-Q1-K1-B8
cccacgcgtccggcttgaggcaggattattatttcataagagaaataaatattaatacctattggattatgcacaagcactgtgctgtgtgccccaaaatccagtgtgaaagtacatcattgtgtcatagctcagcagggggtaggatttaatgactgtttacaaggattagattttgtcggttcgagtgttattttgtccccgttgattgagactgaatcaagtgtaatgtttttccttaaaaaaaaaaaaaaaaaaaaaaaaaaaaaaaaaaaaaaaaaaaaaaaaaaaaaaaaaaaaaaaaaaaaaaaaaaaaaaaaaaaaaaaaaaaaaaaaaaaaaaaagggggggccgcttt

SEQ ID NO: 36959 - DNA, 407 bp, Gossypium hirsutum
  Clone ID: LIB3148-054-Q1-K1-C12
gaaaaatctcattctttttcgctattttatcttcttccttttttgctgctttgggcttgttgtttgctgcaggtatgggtacggagacgcgtgacgtggctcggcgcgtacgaaggcagaggctagcgtggagcggctcggaggcgtggctcgtggggccgagggaaaaccctggtggctgcggcgctggaggcattctggaaaccctcggggtttctgaaaattattcaaatcgggccatagtgtattgggcctagggttttgggtatgggtgtatttgggtttgattttgggctagtaatttaggtttaggttttgggccgtgttgatttggtctgtacgatttttggcttgtaactatggactgatattatttgtaaatggacttttaatatttttacttttat

SEQ ID NO: 36960 - DNA, 289 bp, Gossypium hirsutum
  Clone ID: LIB3148-054-Q1-K1-D10
ggatgttaaaagcaatgatttgcagaatggaaataagagtgggtgagaaagccaccatggttgagttaatattcaaacattaacctcgggcctcagctctgatatagttagcaagtaagtacgtacatacacggaatacgcaaaaaaaggtatgtcatctcacagggttaggaaaaggtgggaggggcgatatcattgttccttagctcttatgaatgtgctatggactatatacgaatgtacaaactgtgattggcatgatatgaaataatatatgtatatattatgt

SEQ ID NO: 36961 - DNA, 416 bp, Gossypium hirsutum
  Clone ID: LIB3148-054-Q1-K1-D2
cggacgcgtgggggcgaccatctatgttgtttacattttcaaatattatgaaaaaccaggcaaagtggcagttcaattcactcacaaataatgcataaaatcgagtgtaaaaccaggcaacgagaatactttgacaaaggaacagttcacaactctctacccaacaaaaaacgagcactttaactctgcagtctactgcctatttataggcctcctaggcaacagcgataagcactcattaatcagaaaaatatcaccttgaaaatagccacctatcacgtattgggaaggagaaaaattaccaccttcaacttatgtgtaatatcacatttttatgtaatattaaatttattaacgtaaaagataaaaacacttaaataataattatataataatattaaatatttatttactta

SEQ ID NO: 36962 - DNA, 253 bp, Gossypium hirsutum
  unsure (1)..(253): unsure at all n locations
  Clone ID: LIB3148-054-Q1-K1-D6
gcttgagcgtctggtaaatctttggcctttccataagaatgctgctcataccaatggaaaagtaacaaattcgttcttcattttcccttttctttttgttgtgctaatgatgcatctcacttttttgtttctacttctgctcaatataacaaccaagaaatgtttgactaaaacagttttctcctgacgactttcaacaactgagttttgttggaagatttaaaattgtataaaatttccctctcgttnaagc

SEQ ID NO: 36963 - DNA, 173 bp, Gossypium hirsutum
  Clone ID: LIB3148-054-Q1-K1-E12
cccacgcgtccgaagctctaaaagcttgccttactaaaaaaactttttatgtaattcttttgcaagggcctgtaattattgcaaatgatgggaaagaaagatttcccaaagttagatggaagaaatcagcaactttgcgagagaatgcaatgcttcttcagtaattagcgtat

SEQ ID NO: 36964 - DNA, 106 bp, Gossypium hirsutum
  Clone ID: LIB3148-054-Q1-K1-E5
aattttggcttatgtttcagttaaaacaagtctttgtaataatttctcctatgcttaaacaaattcttgggtctatgtatttatgttacttggactcgggtttcgg

SEQ ID NO: 36965 - DNA, 257 bp, Gossypium hirsutum
  Clone ID: LIB3148-054-Q1-K1-E8
cccacgcgtccgctctcgcgtacgatttggttcttaattagggcccggacaaaaatggcccagtacaacaagattggtgggggtagacagctaaatggtacaatcagttgagtcgaaatggaatttagcaattgattaattaaccgaattagatcgattcggccgattaattcagttttaatcgaactaaaaaaaaaaaaagaaaaaaccaagaaaaaacaaaaaaaaaatagggattaaaaaaaaaaagcctttag

SEQ ID NO: 36966 - DNA, 351 bp, Gossypium hirsutum
  Clone ID: LIB3148-054-Q1-K1-F1
cgcaagcgttacttggggctcgactaatgattgagtgaatgactagcatttacttgcgctgttgtggcagagtgatcatcagttggttgttaggagatattgagactattacatacatgactggaggaggaccatgcatatagtaattatataaaataagctgctatatcgaatggcaaagatattgtgttttgcattgatgattttggtgaagaaaattttgccttttacctcatttccctgtcagatagtgtatgggtgcccgggaataggattcatgtttgggatcaagagctgcgacgtgatatttgccctttagagggcctacatatggatgccaatgggcgagaa

SEQ ID NO: 36967 - DNA, 333 bp, Gossypium hirsutum
  Clone ID: LIB3148-054-Q1-K1-F3
cccacgcgtccgcccacgcgtccgcccacgcgtccggatataacacccttcccttctttctttggaattatatatacagccttcaagctatatgcaaaggaagtgatggatatacatgcctttcaccatgctattgacaagatcaccagcatcgagatcggattcattatttgaatatgtcacaacactctttattttatgtattctgtaatccatactattactatgtaagagattggttgagtacttcaattgggattcagctcgtttctaaatttgtctaaaaaaaaaaaaaaaaaaaaaaaaaagcaaacaatataaaaaaaaacaaaa

SEQ ID NO: 36968 - DNA, 413 bp, Gossypium hirsutum
  Clone ID: LIB3148-054-Q1-K1-G1
gtgaagtctggttttgatctaatggcagacccactagattgtgtttttggttatacggctgcatcggaggaaattcatcactctactccttcaagtatgtcaagcagagcacagagtcgtgcgcacaggagagctaatcgaaggcgtcgattgcatcatcaggaagcttcatcgagctcgcatgataataagtattctaagttttatgtaatgtgacatttaagttaatttttagtacacacacaacaaaaagaaaaaaggagttaagaagttaacctaaagggtggatttggtgctaaacatttgaggcaccgagtgaattaggatcaaatctttcaaattggtcggttgaagattaaatagtttctgagactactcaaataaggactttgatgggcaattgcaccaaacgt

SEQ ID NO: 36969 - DNA, 375 bp, Gossypium hirsutum
  unsure (1)..(375): unsure at all n locations
  Clone ID: LIB3148-054-Q1-K1-G4
ggtgaggacttggatgaaaagaatgggaaaattggggatcaaattggaaatgggaaattggcaaggctaataagctgcaaaggaaatgggtgtgggcacaaagggttgcttgattgggagccatacttggtggctacttaaaaatatttctcaaccctaacaaagagaattactagcattgaatgtcactaattttttttctttccatttttctaatttttagctataaaaagtttgagattaccaatnnaaaaaaaaaaaaaaaaaaaaaaaaaaaaaaaaagacaaaaaatataaaagaaaaaaaaaaaaaaataaanaaaaattaaantaaataaaaattaaataaaaaaaaaggggcggcccttttaaagg

SEQ ID NO: 36970 - DNA, 384 bp, Gossypium hirsutum
  Clone ID: LIB3148-054-Q1-K1-G8
aaaacccgggccgaccgacgcgtacgaaagaatcataaatttcttgtaaattattttatattggagaaaaaaatcataaattgtgaggggttttttatttggggagggggtgaataacgacaaaacatgatacaactgctataactaatactttccgggtacttgaaaaatatattaaagttttatgcatattattataacaaaattttctaataaataaatttaaatatcttgtaaaaaagattttaacttttaaaaatattagaaactcaacatacaatgataataatggattgaccattaatagaaaaagcatttttttaacttgttttcgattcctatcttattatactatgtaaacaatatttaataaactgataggtt

SEQ ID NO: 36971 - DNA, 410 bp, Gossypium hirsutum
  Clone ID: LIB3148-054-Q1-K1-H7
gatgatgtttggttttagtactctcttttttgtcgtcagatctcacacatgatgttaaagtggagtttgatgctatcactttggtacaaattttattataattttttggatattggcataatatttttttaatattgtaaagcaagagatagatttagtgttacagtgtacattagattaggcttctttattggaaggacatcaatttggggtcacgagggattttgttttagtttttttatcaatgtgggataaaaatatagttcacacacccttattttttttaaaaaattaatattttagataaaagaaacaattggttaaaatatggcgtaagtctccatactcttcgaaaatttaaaatttagtttttatacttttatttatatgaatttagtcctttacttttt

SEQ ID NO: 36972 - DNA, 421 bp, Gossypium hirsutum
  Clone ID: LIB3148-054-Q1-K1-H8
aaacccgggccgacccacgcgttcggatgatgtttggatttattactctcttttttttcgtcagaactcacacatgatcttgaacgtgacattgattctatgggtggggcacaaaatttattataattttttggatattggcataatatttttttaatattgcaaatcaagagatatatttagtgttacagtgtacattagattaagcttctttattggaaggacattaatttggggtcacaagggattttgttttagattttatatcaatgttggataaaaatatattttacacacacttattttttttaaaaaattaatattttagataaaaaaaacaattggttaaaatatggcgtaagtgttcatactcttctaaaatttaaaatttacattccatacttttatttatatgaaatta

SEQ ID NO: 36973 - DNA, 383 bp, Gossypium hirsutum
  Clone ID: LIB3148-055-Q1-K1-A3
gatgggtttgaggtgggagacattccagacaatgctgttatacatataacgggattggatgcacgggtatctacatgctggatatttatttcaaacatagcctgatgacattaaactagatgttgggggcttcatactgagaacaactacctacttattctctatcacttggcttactgatggataacatgaaacaggcaaacaatatgctgacaaattgagtgcaagtgtgctgacttagaagatggctcccatgttcaagactattaaaaacaccatatgacaggaaaaaagctgttacacgggctgcattcttacccacacagctataccaaggaaaatgtgatgacgtggatacacataaatccggagagagattctct

SEQ ID NO: 36974 - DNA, 408 bp, Gossypium hirsutum
  Clone ID: LIB3148-055-Q1-K1-A7
ctcatatttgcctcgcatcagtgaaatggaagagaattctcttcgtgttgaacttcacagccagaatgacagacctcttactgatccagagttggatttccttgtggcaatactgggtctgcttgtaaacctagtagagaaggatgaacataacagatcacggcttgcagcagcttctgtttctttaccggattcagaagggttaaatgagggaagtcacatggctgtaattccgctgctatgtgccatcttccttgcgaaccaaggagaagacgatggtactggggttctttcttggaacgatgaggctgctatgctacaggaagagaaagaagcagagaagatgattttagaagcctacgcagccctactacttgcttttctttccactgaaagtaagagcacacg

SEQ ID NO: 36975 - DNA, 304 bp, Gossypium hirsutum
  Clone ID: LIB3148-055-Q1-K1-B1
cccacgcgtccgaaaatattctgtagctttgttgtctttgggtctgtccatcttgtaagaaaaatttatgccgattaggtgccgaaaaaaaaaaaaaaaaaaaaaaaaaaaaaaaaaaaaaaaaaaaaaaaaaaaaaaaaaaaaaaaaaaaaaaaataaaaaaaaaaaaaaaaaaaaaaaataaaaaaaaaaaaaaccataaatgaaaatcaatgaacaaacgaataaaatgggggtgactgtgaaaacacataacattatccaacttggtcacattgcagctctatcctgttttagacagctg

SEQ ID NO: 36976 - DNA, 392 bp, Gossypium hirsutum
  unsure (1)..(392): unsure at all n locations
  Clone ID: LIB3148-055-Q1-K1-B10
catcaggtccaaagtttaccgatgcagcctccgccgtgaaagttgctttacaaaaatatttggccgatgagctagctgatggtgacttaaagatcattgcggaacctggtcgcttctttgctaattcgccatttacattaacaacaagcgtaatagggaaacgagaaagggcggaggttaaggagtactggattagcgatgggatttcggggtcgatgaattttttgaagtacgatcacgatgaagtgatttgcactcctctcatcatgacaaagcctacatgcaaagaatgaaaacatggggttcactgttttggaccgcatgcgatganctgtacggttttgaagggtttgaattgccaaatggacgtgatgatggctgtctttacacat

SEQ ID NO: 36977 - DNA, 404 bp, Gossypium hirsutum
  Clone ID: LIB3148-055-Q1-K1-B11
attttgctttcatgcatgacctgattcctgtaaaaccatattaaccataaagcgtagcagaggagtcgacattgagtttcagggcctcttgtaaatacccaggacattgatgaaaaatatgtaggctatcttttgcccaaagcatgacaacggagacatctatcatctgcaatgactctcctgtgcttaagattaacaaggttgggaataaagtcccaggaaattctccagatagtaattgagattttagaggatagttgttaagtccacaatttcttgtaaatttttttagttacggcatgtaataaataattcctaagatccggattaacatcttgtaatagtttataggtactgcgaactgaaaataagccagataaattccttttccaagcttgagtatc

SEQ ID NO: 36978 - DNA, 297 bp, Gossypium hirsutum
  unsure (1)..(297): unsure at all n locations
  Clone ID: LIB3148-055-Q1-K1-B12
ctagcatttctatgctttttgctgacacggcgaataaaatccaaccttttaaaacagcgatcgccacctaaaaggtcagtattgacagtatgacctcacttaaaacttgtactcttgcattatgatcgataaattaaatagaatatctttttgcttgattgtgcataanaaaagaggttatagaaaaaaaataatatcatggtaaaacgccagcctaaggactggtttcaaatttatttggcggaaccgagcctgtccttgtatcttttggtggggcttccatcgaatctttggttt

SEQ ID NO: 36979 - DNA, 371 bp, Gossypium hirsutum
  Clone ID: LIB3148-055-Q1-K1-B6
cttttcccttttttttttcttttaatttcataatttgttgttatgaacataaattgtgcattaggggaactggagaaggtggaagacttctatattaagaccctatttgatttggtgtgctggattcatgaacatcattgaacaattgggtgctttgtaaaccattttattcatgttctattgattagtttgtggtgttcctttaaaaaaaaaaaaaaaaaaaataaccaaaaactgtcaagggagagctaaaaaaacattaaaattcataaccaaattggttttagaattgcttaagacatgacaagataaaaaggcaagtggttcgaattttgagtcttcttaaaatattatggctagcattttccttt

SEQ ID NO: 36980 - DNA, 380 bp, Gossypium hirsutum
  Clone ID: LIB3148-055-Q1-K1-B9
caatggctcaccacgggcatcctccacctacaccagacccttttgcacccccaccgccagggcatccggcaccacctccgccagacccctttgctccaccaccgccagggcatccggcaccacctgcacctgacccttttgctccaccaccgccagggcatccggcaccacctacaccagaccccttcgcaccacctatgtttgggcagactgcaccgccagcaccacccccatattagcctatagcataaaaatttgattagattcttatagaatcgtaacaataaataagagagtagatattgttatgttgaatgttggaagtggatggtaataatctttatgctacaataaatgagctagagggtggtgctcacaaa

SEQ ID NO: 36981 - DNA, 308 bp, Gossypium hirsutum
  Clone ID: LIB3148-055-Q1-K1-C12
ggcaacagggcacacgacttagggttcaggatgctgttgatctggcggagtcatttgcattcaacctcgagggttcaagttctagtgtgagttcggatgtaggctcggatcatatatccagcttgtgacatggtgccatgcactatatattgattcctccattcattcagagctcattgtttattatagcttgtaaccttgtatattaccctaaaaaacacatctggcgacatatatgccttgccattgattcactcattccaatgtcatgcgggatcaatgggataaaattattcatcaaactcacc

SEQ ID NO: 36982 - DNA, 291 bp, Gossypium hirsutum
  unsure (1)..(291): unsure at all n locations
  Clone ID: LIB3148-055-Q1-K1-C6
cccacgcgtccgcccacgcgtccggctagcttggctagcatgatgggtatgatgggttcaggttgggcttttcgtcaacctgattcgggtcgagttgatgatgataggtcttccaatcaaagcacggattgcaattgacacaaattttcattttttgaattttgttatatttttaaccctgtaagaagggagtaaattgtaaataaataattaaattattcattaatttattgtgatacaaaataaaagtctcctaagatcatccaatacaagctttacttctattgttna

SEQ ID NO: 36983 - DNA, 282 bp, Gossypium hirsutum
  Clone ID: LIB3148-055-Q1-K1-C9
gccgaggcttacattttttccatgttatatttcgctgcatgcttaatcctaatgctttgtgggtgccttatattttagactaggccactcatgaacttctctctctactaattaggtctgctaataataagttcgactctaaagcgcctcttacacgacctaactgactatactgaagaatgaaatactgatagcatattttataccctcacccactctgaaaatcctgcaacccgcgccgtaccgtatggctcctcatgctttggataagggggcctagcc

SEQ ID NO: 36984 - DNA, 205 bp, Gossypium hirsutum
  Clone ID: LIB3148-055-Q1-K1-D2
tctttctctcttttttttcttctgcttttttctgataataatgtattttgtctgtattatacattttcttactgtacaaatcaattattagttgtaaaataattgcaacaagcaactaagattttgtcccaatatcgcttgatctctcttccctttacaaaaagatgagtttcttttaataaagggctggcactttctttctcct

SEQ ID NO: 36985 - DNA, 407 bp, Gossypium hirsutum
  Clone ID: LIB3148-055-Q1-K1-D3
cagaatattgactcgttgagagtgaaacttacttccgatgacttgaaagaaatcagagatgctgggccgattgaagaggtcgcaggcgatcggaactacgatagcatgaagaaagcttcatggaaatttgcagacacctgcaaaagatgttggggtttcaattgaacaaggcaattgaaatggttatggcatgtttgtttcatttaagggaaaatgtgtggcatagatctttttaaggttttaaaaccatccatacttgcgtttgggacaaaaattatagatggttttgatatgaaataataaagagagcaatgttaaggcaaagacttttatgctgccactattactgatgagcgtatgaaaagaagaaaaaccagagggagctctaatgtgctgtcgatctgagt

SEQ ID NO: 36986 - DNA, 401 bp, Gossypium hirsutum
  unsure (1)..(401): unsure at all n locations
  Clone ID: LIB3148-055-Q1-K1-D4
ggccttcaccatcttttaatttaagagggcctactatattttgattcacaattacaagtgttaaaagattgaaatcctttgtttgtaatatttgttttctcattgctggtacaaccatctttgtaattttctttatttttagaatgaaattgctaaagtgatgttcaagtgtnaaaaaaaaaaaaaaaaaaaaaaaaaaaaaaaaaaaaaaaaaaaaaaaaaaaaaaaaaaaaaaaaaaaaaaaaaaaaaaaaaaacaaataaaaaaaaaaaaaaattaataaaaagattaaacaaaaaaaaatataattgaaataagatttaaaaaattgggggggggccttttaaagggtacaaaatttttatacgctttctttacaaaaaattttttttttttggggg

SEQ ID NO: 36987 - DNA, 367 bp, Gossypium hirsutum
  Clone ID: LIB3148-055-Q1-K1-D7
cccacgcgtccggtatgaatatggttgtgatatctgaatgtaaagtaataatctccatagagtcgagtgttgacatctatgaatgttttgagtggtatattaaatattaattattaacgtgttaaagttcacataaaaaaaaaaaaaaaaaaaaaaaaaaaaaaaaaaaaaaaaaaaaaaaaaaaaaaaaaaaaaaaaaaaaatgaaaaaaaaaagaaacaaaaaaaaaacaaaaaaaaaagaagcaaaaaaaactaaaaataaaaaacataaaccgggggggggccgtttttgggaaccaaaattaacggccccttatgcgcaacgataaagttttttttaggggcaccgaaattaaaattgaggg

SEQ ID NO: 36988 - DNA, 164 bp, Gossypium hirsutum
  Clone ID: LIB3148-055-Q1-K1-D8
tggagcttgttctttctggaatccgtggctggaacatgcagtattttacagttgtgatatgagttgatgtaacattgtttggaacactttaatgatctaatcgcgaacttatttcctggataagtacttcattacagttttacgaaaaaaatccagtttaatag

SEQ ID NO: 36989 - DNA, 352 bp, Gossypium hirsutum
  Clone ID: LIB3148-055-Q1-K1-E11
ccctataaaaatgccaccatatttcgtcatttaactctgggggattttgaactacaggatgggccggtcggggtcaatgatgctgagctcaaggagcgcataattcaacacttggctgctgctgctgcaatggggcagagcacaccatattttgagaagggaagctctgaggaatacgccatcagctcaaggacgtcgtccacagtacttggtcttttatcattcaaatgatgaaccctactcgtgtggccccatatcttcattatcttcaactcaaagtgaaggagaaccggtccctacgatcaccgttggatcttcctcttttcctgaaagaacagccggggaagaattt

SEQ ID NO: 36990 - DNA, 187 bp, Gossypium hirsutum
  Clone ID: LIB3148-055-Q1-K1-E12
cccacgcgtccgtaaagaacatgactttgtttaaaacaaaaaaaaaaaaaactcaagcgacggagcccataactattgcatccccctcgcacccaaaactttcccccagttagatttataaacatcagaagctgtgccccccaataccccgctccttcatttcttttcctcccaacaaaaacgcccc

SEQ ID NO: 36991 - DNA, 371 bp, Gossypium hirsutum
  Clone ID: LIB3148-055-Q1-K1-E3
cccacgcgtccgcccacgcgtccgcccacgcgtccgtccacgcgtacgcccacgcgtccgggtgcaagtaagagtgggtaaatttagatccatggggcatggtattgggatctgttttgatgtattttcgttaaagcaatatattttttaccatatttaagaatgcaaacatcatttgttgtgtgaaagaaatgaaactgctattaagtgaagaaaacaaaacaaaaaaagatggtatgtataggaggcaatataacttgggctgacgccctttgaggctcatgttgctccttgcggacaatgacaagtgctgctacttattaggtgcgacatataacaaaaatgtttactgatgttataaatgtgggggg

SEQ ID NO: 36992 - DNA, 264 bp, Gossypium hirsutum
  Clone ID: LIB3148-055-Q1-K1-E6
accacacgtacgcccacgcatccgcacactcttatgatagacggaaaacaactggaccatgggcgtatcatgtttgactgcgaacagcacaaaggtttctgtatcttgtatgactacaacattcatacaggtttatttattgaatattctaagaagacttttacattttaattttattaatatgcttaaaagactctggctcttaaattgtggtcgacaggtaaacaaaactagctttttttgatagctttggaggtgaaattc

SEQ ID NO: 36993 - DNA, 359 bp, Gossypium hirsutum
  Clone ID: LIB3148-055-Q1-K1-E9
cccacgcgtccgaaaaaataaaaaattaatttaaaaaaaaaaaaaaaaaaaaaaaaagagaagaggaaaaaaataaaaaatataaaagaataaaaaaaaaaaaaaaaaaaaaaaaaaaaaaaaaagggggggcctttttaaaggatacaaattttgtttccttttcatgaaagattataattttttttataggaaaagcaaaattaatttaaagggccgaattttaaaaacatgtgaattggaaaaaaactgtgtttatcaaaataaaataagtttaaagaaaattccctttttccacaatgttgtaaatggaaaaaggctcgatctaatgatctttaaaaaaatgatggaaatcttaa

SEQ ID NO: 36994 - DNA, 388 bp, Gossypium hirsutum
  Clone ID: LIB3148-055-Q1-K1-F1
gtcctgatgctcagattacttaattctgaccaagatcatgttggagggtccatcatatcttgtgtcaagggattttccaagctcctgcgagcaagagagcaagtggatttataacacttttcatgtaaccgagctcgcaagaagcaagtgccagatggaagatggagaagaccagatgatgagaaaagttctcaagccactcgaaggtgatgaaaacaagggggaaaaggaggatatgtcccttgcccagtttgactgtccagataaccaccgccacgcaggtgatcattcagaaacaagtttactgatccagcagcttgggcaagacatctcaattaactgtctcctccgctgctcaaggtctgattatggtgccattgcatctttg

SEQ ID NO: 36995 - DNA, 394 bp, Gossypium hirsutum
  Clone ID: LIB3148-055-Q1-K1-F11
gagaatagcagtgttaatcttcctccagggttcaggttttatccaactgatgaagagcttgtggttcatttccttcaacgcaaggctgccctgttgccttgccaccctgatgtcatccctgatcttgaactgtatccccatgatccttgggaacttgatggcaaagctttgggtgaggggaaccaatggtacttttacagtagggggacgcaaaacaggattaccggcaatgggtactggaagccaatgggaatagaagaagatgttattaatagcagaagcaagaaagttggcatgaaaaagtatttggttttctacattggagaaggccgggctgccatcaaaaccaattggataatgcaggagtatcgtctttccaagtctgattctagct

SEQ ID NO: 36996 - DNA, 411 bp, Gossypium hirsutum
  Clone ID: LIB3148-055-Q1-K1-F4
cccacgcgtgcggttgaaatgaacaaaacgattgtgaagactagacagtgggaacaacagcagcggatgctagttgatcttgtagggggtgaatggactataatgatgggatatgacgtgttgattcttttttatgcggggacaccccttttgtatatatctatgatagtaaatgagctaacgttgctcttaaacatgctcatctgtattgcgacatactgtatccttgagtacgcctgcataaataaagacaaggactaagatttttaattgcatgatgccttgcgttaatatattaataacaaaacgttaagtgtctacgcatgttaacggtattcagcggctataagcggattttaagcgggcttgaggattctttgtttaaatcaactcttattataataaatgaaa

SEQ ID NO: 36997 - DNA, 198 bp, Gossypium hirsutum
  Clone ID: LIB3148-055-Q1-K1-F6
cagacgcgtggtatggaatgaatgtgaatgcttgtcaaaatatttgaatcatctggattggtatatgccgaaaaaacgaagagaaaacacaaaagtcaaaaacggggttgtctgcggtgtattgtattaataacgtgcgatgaatcagacaagctatgaatgtactatgaatccatgagtttaattttttcacttgaa

SEQ ID NO: 36998 - DNA, 397 bp, Gossypium hirsutum
  Clone ID: LIB3148-055-Q1-K1-F8
cccacgcgtccgcccacgcgtccgatcccaaaccagatccagtcgagaaagaaacgaatgggtcggcactagcagggtcaggggaattacctaggcagtcattgagtaaaaccaaaagtaccctatggaggatggatcttcaagctcttggaggttcctacaagatcaaaaggctgaagcaacaacttctcttgctctagaggttaaccggaaagcaagaaactgtggaggacacggagggaagccaccgcaacctgatgaaaggctttctactgactctatctttactaaacaaacaagacagccgctatcattgcctttaagggaagaccgacgatctattgtaactgatgcacttcgatgtcatatacatgaaccaaggagattgtagtactac

SEQ ID NO: 36999 - DNA, 293 bp, Gossypium hirsutum
  Clone ID: LIB3148-055-Q1-K1-F9
ctggagaaggcgcgtgtggacttggcgcggtatgcgcaacaagcgcagggatctggttcggctacggcgcaagggcagaaagctgctagggctgacgcacaagtgttttccagaaacccctagggatttctggaattcggaccgttttgatttgggcttaactgggttcatggtttgggtctggtatttgggttaaataagctaatgtaaatcacactaaattaggattggctttcattgctgggccatacggctgtgctgcatgtatttgctatctgaaatactaaacgcta

SEQ ID NO: 37000 - DNA, 368 bp, Gossypium hirsutum
  unsure (1)..(368): unsure at all n locations
  Clone ID: LIB3148-055-Q1-K1-G2
gaccatctatgggtgatgtgctgtggaaccttgagtttgccttgcagctgcaggagagtgcagaagagagtgggaagggaattggtgaaatggacatggaggaggggagctatgaaggaacctgtaaagggaagaaagatcctaatgcatccctggggtttgatggtaacataactgattctaggagcagcgggatgagcatgagcatcggtggtcgcagcctggctagtgaagacttagagggtttgacacctagtgctgttttctcacagatcatgaaccctaaagggcgttgagatgagaagtgcacaagtgattgttgcatgacttgagcatggcatggaatggaatataggaatattgngttt

SEQ ID NO: 37001 - DNA, 364 bp, Gossypium hirsutum
  Clone ID: LIB3148-055-Q1-K1-G5
cccacgcgtccgattttatgcagtctcttatgtaatattaacttgcagggctatataatgggttatcattgatcctttctgtaatttatattaatgcaatctcattatgtaatagggataaaaaaaaaaaaaacaaaaccaataatacaaaaaccaaaaaaaaaataaaaaataactaattaaagaaaaaaaaaaaaaaaatctaaacccctataaaaaataaaaaataaaaatgaattatctattttgttttttccttaaaacaaatttcaaataaaataaatcaaccaaaataaatataaaggggtgcactttttaaaaataaaattttttttccctctttttttcaaaaaaaataattttt

SEQ ID NO: 37002 - DNA, 213 bp, Gossypium hirsutum
  Clone ID: LIB3148-055-Q1-K1-G7
aggtgatccaaatcgatgcagctatgacaatccaccatccagaggtctccagtcttgtttgctatcgccgccttctctaagaagctgttaatccttggaattgtggctgctcaagactcactaggtgtcgaagttaatgtatattttgataatataagacggaacctttcttatataaatatataaatatagaaacctccacatattaatgca

SEQ ID NO: 37003 - DNA, 284 bp, Gossypium hirsutum
  Clone ID: LIB3148-055-Q1-K1-H2
cccacgcgtccggcagaaatgaacaaaatgctgctgaagaagaacaatgggagcatcacagcagttgtcatggatcttctaggtggagaaggggcttaaatgaggggatatgacggttgattctttcttatggttggacaagccttttatatatatatataaaaataaataaatgaagcgtgcttctaaacctggtcatcttattccaacatatgatatccatgaatttgtatccagaaagaaagaaaaagacttttaatattaattccatgacacctttcttt

SEQ ID NO: 37004 - DNA, 202 bp, Gossypium hirsutum
  Clone ID: LIB3148-055-Q1-K1-H3
cccacgcgtccgtgctagatgagtttttttggttaagtttattattctttcaatctactaattaattcctcaagatgctttacttgtgtattagtgtttttcccccttttggccaaatacttgtgtatcataggttaaaatatgccacaggttcctgtaattttcacaaaattagaatttaatcctagagtttagttcttct

SEQ ID NO: 37005 - DNA, 168 bp, Gossypium hirsutum
  Clone ID: LIB3148-055-Q1-K1-H4
ggctgatggagctgctcgacgtttggcacggtgctataatttgagggtttcagatgactcaggcccttctacctttcactgacatgcaacaaccctatgtactaacgtaagtagagaggacctttacttgtagagaggatctttacttggcatgtattagaacacttc

SEQ ID NO: 37006 - DNA, 322 bp, Gossypium hirsutum
  Clone ID: LIB3148-055-Q1-K1-H6
atcaacattaacatcattcaagtcatttttattaacaatattaacatcattaaagagaaaggaaaaaaaaaaaaaaaaaaagaaaaaaaaaaaaaaaaaaaaaaaaaaaaaaaaaaaaaaaaaaaaaaaaaaaaaaaaaaaaaaaaaaaaaaaaaaaaaaaaaaaaaaaaaggggggggggttttaagggaccaaagttaacgtccccgggcatggaaagaaaaattttttttatgggggcaccaaaattaaattaacgggccggggtttaaaaacggggggatgggaaaaacccgggggtaaccaaattaaatggcttggg

SEQ ID NO: 37007 - DNA, 198 bp, Gossypium hirsutum
  Clone ID: LIB3148-055-Q1-K1-H7
cccacacgtacgatttccctatatattgtattttattctatctagaaagctaatggaaaaggaataaatatgcttggcttgggaaataaagattttactacttttggactaatactagagtataatatgttaaaatataccacaaagttcctgtaattataacaaaattagaatttaatcctagagtttagttcttct

SEQ ID NO: 37008 - DNA, 185 bp, Gossypium hirsutum
  Clone ID: LIB3148-055-Q1-K1-H9
cccacgcgtccgcggacgcgtgggttttgttccccttgctcccacacatgccaatgttgtaggagtcagcctacattactttgtacttgattgtaatcattggatacgagatgtatccgacttgggtatggtttaatgtatctggaggatttttgggaggttgaaaaatatatagagactgaagg

SEQ ID NO: 37009 - DNA, 413 bp, Gossypium hirsutum
  Clone ID: LIB3148-056-Q1-K1-A1
atttgagtgaaattagagagttgaatttagtctaaagtggaaattgaatgaaaatatggaattagttttgcagaaataaagttagcctcagtttcgggactaaattggaatttagacaaaagttgaataaatatggaaatattcaaagtgaaattgtattgtattgtattgatgaattttaattgttttaattcacgtagctaatgctgtaccgaaaactttgactaagaaagaaaaagacaaagtcgacgaggagtagctcggaaattctggttaggttaaagtcagattgccgattcagcatccatcaaagatcccaaactcaaaatgtggtgatatatatttctttttgtgtcggcatgtacctagtgtagaagcccaaatttgcccgggccctaccagcaaaacaaact

SEQ ID NO: 37010 - DNA, 407 bp, Gossypium hirsutum
  unsure (1)..(407): unsure at all n locations
  Clone ID: LIB3148-056-Q1-K1-A6
ctccgctcccctttctcgggcctttttaaagaattccgtttttgtaaaataaaataataaaaaaaacattgcaggtttggaccatttggtaatttgctctttctttgttagcactggtttcgaaatttgattgtgtactatactgttcagttgtactttctgtattttagaatttattctatttttattttcatttttcaaaatttcagatagataatgtcgttgaaatttttctgttaaatttatttgtattacattttaaattttaatttttttaaagtacttactagattgctgtgtaacaaagaaaatgacattgtaataaatctaaatttaatagacaatttctactgtattagttnnnaaaaaaaaaaccggaaaaacactaacattaaaaacagccgaaa

SEQ ID NO: 37011 - DNA, 207 bp, Gossypium hirsutum
  Clone ID: LIB3148-056-Q1-K1-A7
gggattgcaagttatattccaagagatctctctctcaattttctttttagttcttcacctttctcttttgcttattatcttttcttcctcctttttcattttttctttgactttttcacttgtattgaagcaaagtttgaataaggcagatcgaaaagactgtaattaagatcatgattttatgaaatctagaagctgtttaatgtt

SEQ ID NO: 37012 - DNA, 332 bp, Gossypium hirsutum
  Clone ID: LIB3148-056-Q1-K1-A9
gccacgcgttcgacattacccattttatcctgtgtctttacttctatgaatctatccacgtggtatatagaaaaagcctttatgatgaaaaaaactgatagaataggggttgtaatatttggccccattgttgttcagttttgtggcagggtgtgtggatgactgtgttatactttaagacgatggcttagggacggtccagattttctgtaattgtagttttaaaacctcattatttatagagcatgatggaaattattatgacgcgtctatatgctttacttcagaaaatagggcttttcttgttttttattaagctcacatctcctaaa

SEQ ID NO: 37013 - DNA, 238 bp, Gossypium hirsutum
  Clone ID: LIB3148-056-Q1-K1-B10
cccacgcgtccggctaacaacctaaggatgatgttcactagtggtatatatgggatggatgaggttgtgtgcttcaggttggatatatttttctaatattaccttattatttttcaaatttcttttagaatgattctcattttttccttcttgtttctattttagttggtatagagagcatttgataccgtatcgagttttggttggtttgaaacatttttcacctcaatttttttgc

SEQ ID NO: 37014 - DNA, 234 bp, Gossypium hirsutum
  Clone ID: LIB3148-056-Q1-K1-B11
cccacgcgtccgcccacgcgtccgcccacgcgtccgctgaattcgctttgtttgttgcatgtgggattcaattagacttccatacattgtttgttgtatagattctttggtccttttgctcaaatttgcaaactactagagcgtgaaaatgaacaaaaggttccaaagtaatgtagaaagacaacatgcatgtagcatatgtttcaatgtagagaataataattttcaatcatt

SEQ ID NO: 37015 - DNA, 423 bp, Gossypium hirsutum
  Clone ID: LIB3148-056-Q1-K1-B5
aaaaaaaaaaaaaaaaaaaaaaaaaataaaaaaaaaaaaaaaaaaaaaaaaaaaaaaaaaaaaaaaaaaaaaaaaaaaaaaaaaaaaaaaaaaaaaaaaaaaaaaaaaaaaaaaaaaaaaaaaaaaaaaaaaaataaaaaaaaaaaggggggggcctttttaagggttcaaattttatttccggttgtttgaaaattaatattttttttttggggcaactaaaataaatttaattggccgggtttttaaaaggtggggtttggaaaaaccttgggtttcccaaatttattggttttgaaaaaaatccttttttggccagttggattaataaaaaaagggcccgaactaatcgcttttcaaaaaatttgcccaccttaattggcaattggaaccccccttttacgggccttttaagcggggggg

SEQ ID NO: 37016 - DNA, 412 bp, Gossypium hirsutum
  unsure (1)..(412): unsure at all n locations
  Clone ID: LIB3148-056-Q1-K1-C5
tgaaaaccttttctttcacggaaacataagaataaaaagggattccgtgttgcagtgtttcccacacaaaaggtgtaaatcctaagtcatgctttataaaaattctagtattgatatgaatgttcaatatcatagggggtttagcttcgtttcgatttttctaggtttcctagctttaagttttcgttgtttttggtaccataattagtcgacaatacaaaggactgttgggttttgttggttttgaattggtttttttggggggaggggtttggggtttgattttttttgaagaatggcaagtggaggagagaaaaacaatgatttttatgcagttttggggttgaataaggaatgcactccaacagagctcangactgcttataagaaacttgccctgagatggcaccct

SEQ ID NO: 37017 - DNA, 412 bp, Gossypium hirsutum
  unsure (1)..(412): unsure at all n locations
  Clone ID: LIB3148-056-Q1-K1-C8
ctttaatccctctctttgaatgccgacctgccaccctaaacgacgtccagcagattcaagtttcgagggccgacattcttgactataaaaccccctcaaagctccgacttcagcgaagcaaacggaactccacagcctattcgtgcgtgattgaacacgtctctgacgtggcgtggtggatcaacgcacgtcacgggatggtggtgcctggtgcgtgagggggcacgctgtttgttgaaactgcgcaaaggggctgttagggtttcccttgctgaaatgttttaagttcgtaggctaattgggctgcgttgtaaatgagtatttatggtttgggttgaggttttagggttttgttcttatttggnttttggtttatgggctctaagctaaattgggccctacaattattact

SEQ ID NO: 37018 - DNA, 139 bp, Gossypium hirsutum
  Clone ID: LIB3148-056-Q1-K1-D10
gagaaaacagctgtgcttctagctattcgttattgcagtgcttgagaatttaagttgaaaacaaatgattgtatgtgacatttaaattattgccttgcaattttttgggtttagaaaaaaggaggtatgaacatttgcc

SEQ ID NO: 37019 - DNA, 321 bp, Gossypium hirsutum
  Clone ID: LIB3148-056-Q1-K1-D2
taacatggacattaattaaaattaaattactattgcataatgatagagctgtctatagatgaggttgaaaattgcactttatattccaatatgtcaatttggtttaagaatggctcgtactacgatctcaaaatagtataaatatatatccacctatacatacatatacatctgtatatgtatgagagttctcagttaaaaaaaaaaaacaatgaagagaaaacattaaagaacaaaaatcaaacaaaagcaaaaaagctaaaaaaactatataataaaaaaaacaataaatcttcaaaagccggggggcctttttaaagg

SEQ ID NO: 37020 - DNA, 393 bp, Gossypium hirsutum
  unsure (1)..(393): unsure at all n locations
  Clone ID: LIB3148-056-Q1-K1-D3
gatatgtcaagcaactgaggccatatctgctggctctcggtactttccagtnaaaaaaaaaaaaaaaaaaaaaaaaaaaaaaaaaaaaaaaaaaaaaaaaaaaaaaaaaaaaaaaaaaaaaaaaaaaaaaaaaaaaaaaaaaaaaaaaaaaaaaaaaaaaaaaaaaaaaaaaaaaaaaaaaaaaaaaggggggggcggttttaaaggacaaaattttagttccccgtgattgcaagttaaaacttttttaatagggcaacaaaaataaaattaaggggcgggggtttaaaaacttttgaacgggaaaaaccttggcgtacccaaattaaatggttttgaaaaaaatccctttttcaccagttgggtaaaaaggaaaaaggcccgaaccaatcc

SEQ ID NO: 37021 - DNA, 317 bp, Gossypium hirsutum
  Clone ID: LIB3148-056-Q1-K1-E1
aaaaaaaaaaaaaaaaataaaaaaaaaaaatttaaatataaaaaaaaaaaaaaaaaaaaaaggggatagaagaagaaaaaattaagaaaaatataatgatgataaaaagggggcgggttttttataggttatgagttttcttacgcatgggtggttgttgttaatttttttttgttgtgaagacttttgattgatctggttatatttttacaaggtatgatttgttttaacttggtggtatgaataattattggtctggatgcttttctctttttaacaagttggtataatgaatagtaattgggacctgtatgttt

SEQ ID NO: 37022 - DNA, 324 bp, Gossypium hirsutum
  unsure (1)..(324): unsure at all n locations
  Clone ID: LIB3148-056-Q1-K1-E3
gaccaaccatggttagacttaggtaatcaccatcactctctctcgaccgcaatatcacttccctttccttttctttcatccctctctgtggaacttgttaatcttttttatgtataagcctatggatttggattgtaactagggattctttctccatccatgaccttgatgcatggttgagaatgaatttgccacttactactatgctttcatttcaaaaaaaaaaaaaaaaaaaaaaaaaaaaaaaaaaaaaaaaaaaaaaaaaaaaaaaaaaaaaaaaaaaaaaaaanaaataaaaaaaaaaaaaaaaaaaaaaaaannnaa

SEQ ID NO: 37023 - DNA, 312 bp, Gossypium hirsutum
  Clone ID: LIB3148-056-Q1-K1-F1
ggtggatctggtgaaagctctggaaatagatgatgtagttgacagtgatgtcaatgaggatgatgattaggttgctgaactagatgaactgaactctcaacattacaattctgggaattgtcttgccccctttcctttggtttttggtgctagaatttgcattgaaaaccagaattgttgtttatttattaactaaaatgctcctccaattggagaaagtagccttaagttttgtttgtttgtacgattggacccaaatttaatcggcttttattttaagaacataatttatttgattatgttcatttgcat

SEQ ID NO: 37024 - DNA, 114 bp, Gossypium hirsutum
  Clone ID: LIB3148-056-Q1-K1-F11
gaaaaaaagtatagtcgtggattgactaataaggggaaaacctccctcatttgtaaggagactgattgaagtaaagttgaaggcaaaataaaagagatggcatcgagttttggt

SEQ ID NO: 37025 - DNA, 135 bp, Gossypium hirsutum
  Clone ID: LIB3148-056-Q1-K1-F2
aaacatgtaaaaaacgatgatccttaaactaagctgataactttacgacatagttatgggatcaaagattttgtgggtctgatactcacaccttaaactaccactagaagtgcaataaaagttaaattttcttag

SEQ ID NO: 37026 - DNA, 415 bp, Gossypium hirsutum
  unsure (1)..(415): unsure at all n locations
  Clone ID: LIB3148-056-Q1-K1-F5
actcgacccatctggggttatgaagagtgaaacatgggataactttgtaagcttgtgtattaaaggatacctggcttcccgtcgatatatgaacgggattatcaacacggtgttgctgatgctcgacagcggattgccatgcttcagtaggggagaccccattggaaatcttcgcaagagatttcatccagaaatgtctgagcgtgaagcagccaatttcatgaaaagtgtatgcgtagatgcatacaataagtggaccactgccggctatgatctcatacagtatctgcaacaaggcattgaaaagtaaaatggaaaagggaaaatcatgtttntgcatttgcgtaaatatttccaattttctaattatactgtttttttctttaaatcttctatggtttcgattattcttgag

SEQ ID NO: 37027 - DNA, 333 bp, Gossypium hirsutum
  Clone ID: LIB3148-056-Q1-K1-F6
aagagacttaagttgggttgtgcatacaggatcactggttaatgcgtaaaaagagttgtagtaaagactgataagcactaagctcttgtatcgcaaacttcattatacttgtgaaggcactgagaaccgaattttctgctatgtattagagaatccaagcacccatgcatgattgtagttggtgagtcaaacaaaaatgtacttagcggaaaataaacacgtagtgttggcttggctgctaaaagattcaatcagacggacgctctccttgcttttccaatgggaatatttgatcacacacatttaaagaaagggccggagctagaaagaaag

SEQ ID NO: 37028 - DNA, 412 bp, Gossypium hirsutum
  Clone ID: LIB3148-056-Q1-K1-F7
atttacaagaaaatgaagttgaggatcatagaggccattggcttagttgctttcctgaaagctgcacatctcttgtctccctcaatttcgcatgcctcaaaggagaaataaacttagcatctctcgaaagacttgtggcaaggtcgcctaacctcaagagtttgaggttaaaccgcatggtgccgcttgatacgctccaaaaactgttgatgcgagcaccccaactggtggacttgggtattgggtcttatgtggatgatccatcttctgaggtcttcagcaaactgaaaactgtcattcaattgtgcaattcaatcaggagtttatctgggtttttggaggttgctccttgttgcatgtcagctatttatcctatttgcgaaaacctgacattcttgaacttgagctatgc

SEQ ID NO: 37029 - DNA, 394 bp, Gossypium hirsutum
  Clone ID: LIB3148-056-Q1-K1-F8
aaaaaaaaaaaaaaaaaaaaaaaaaaaaaaaaaaaaaataaaaaaaaaaaaaaataatgaaagaaaaaaataaccccgcgcgtccgttggatttaagctgacaagtatttgtagttggcttgtagttgaagttttttatagggaacataatgttgtttttttggtagaagtttaaaaatttttattttttaaaaaaaggtgttttgaatgttttaaatggggttttaaaagttggattttgaactttttaattaattgaaaagcccttttgttaatgtttttgaactctgaaaactgccattcaattgtgcggttacatccagaataaatgggggcggtcggtttaagggtaccaatttttcgtacccttgcttgcgaatttttaatttttttt

SEQ ID NO: 37030 - DNA, 402 bp, Gossypium hirsutum
  Clone ID: LIB3148-056-Q1-K1-G11
cgtatgaaggaataaaagaatatgatccccttttttcacccaaacgatcgtgctcgggagttggattattacaggtaacggaaaacacttggtggtcaaatacctttacccgaacccagtgcgggggacccgctcagaaaagaacaaattgagttgcagcaccacaaaagcgcgatccataccatagatgattctatttgtccgtcatgggcccttgctttctttagctcacttggtggatcaaaccgccgggcgcattataataaccttgtgtgaactctcattttatgtgacggggcctataccctatttcgtcactctcatgcactttatagaccggatatgcattttttttttgaaaagtgcaaagaacctttttcttatatgattgtatcaaaagca

SEQ ID NO: 37031 - DNA, 413 bp, Gossypium hirsutum
  Clone ID: LIB3148-056-Q1-K1-G5
aaagtgggttaataatgttcaactttctatttaaaaaaaaataaagataaagaatgtgtaaagaaaaataaataaattaaaaataaaaaattaaaatgaaattatcaacacgatggggctgacgctttaaaggttcaaagctttgttacgctttcttgcaacttaatagcttttttatggtggatcttaaattcaataaagtgtcagcgtttttacaacgttttgattggaaaaaccttggtatatccaaactttatgtctttgaatgatatctcttttttgctattttgtgtaatacaaaagatggcttaaccgattgtttttcccaaaattatctcttcctgattggctaattgtactcaccttgtaatggttctttaatttcgtctgaagtggtggttacccccattttt

SEQ ID NO: 37032 - DNA, 326 bp, Gossypium hirsutum
  Clone ID: LIB3148-056-Q1-K1-G6
gaattttgaaaaaattgaataaaatggagctttgaattagaaaaatgaaaataaagggaggggacaccttataaaataacaagaaaaaggataataaaagtgctgttagtattaataaaaatacaaaacaagcatgaagagtctgaaccaaggaacaaggggggggccgttttatggtgtcaaggttttcttccccttgctggcgccgtttttctttttttttgggggcccctaattttatttctgtggccgtctttttacaactgtttgtttgggaaacccttgggtttccccaatttattggctttgataatttcccctttttg

SEQ ID NO: 37033 - DNA, 349 bp, Gossypium hirsutum
  Clone ID: LIB3148-056-Q1-K1-G9
ggctttgctgacgactcatggattttggatggatttattgactgtaagggtcagtgttcagacatcatatcagttgatccatatggggctgtttatttgaggtatagaagagctcttggctatatggtcgtgggcaaaagaatctattatttaggtgaatacctaacccaatggcgctaatggacctgatggatgtggattcatgaactctgcttaaggtcacttactttgtggtggaaaccaccgggttcatgagactaaccttttttgaactctcatttgatgtgatagaacctattttcttttataaaactatcatgtactttatggcccgtgtatgcattttttt

SEQ ID NO: 37034 - DNA, 354 bp, Gossypium hirsutum
  Clone ID: LIB3148-056-Q1-K1-H10
aatttttgcttctctgcaaactcccttgattgcatactgttaatcaattgagccatcctcattttctacatctgctagatatctggtcaatgggcagattttttcccgagctcagtcgtttgtatacttttattacaagagagatatacaacacaccattgcatgtagtgctggcctgacctttcaaagcattcaaaatagaatcattgctgctagctgtagaattctaaatgaattttgtgagtgatccaaatggaaattcttttattttgtatccttttagttataaaagtaactgaaagtttactggtaaaaaaaaaaaactaaaaaacaaaaaaaaaaaaaaaagggcgg

SEQ ID NO: 37035 - DNA, 277 bp, Gossypium hirsutum
  Clone ID: LIB3148-056-Q1-K1-H6
attaaaatttcagatttgttaagtgcattttaaaaaaaaaaaaaatatggaatggggaaaggggaaattttttttaaaaatgaaaaaaaaaaatatgttatttaaatggggctgatatatattaattatgggatttatctttcggggttgggttttaatgggccctaggtttgcattggcgttcgtgcgcttgttttatctcttttttaacagttggcttgtggtatggggcgagggctcctaaaatttctgagtgggaaattacttgtttttctta

SEQ ID NO: 37036 - DNA, 375 bp, Gossypium hirsutum
  Clone ID: LIB3148-056-Q1-K1-H7
acgcacacgggttctggaagatctaaattatctttccaaaatgacaactcgctttaagaggaagcgcaagaagcgcggccatgtgagccccggtcacggtcttatctgtaagcacatgaagcactccgggggttgcgtgaacgtcttaagcatgcaccaccacaggatcctattcgacaagtaccatcctggttatttcagtaaggttggtatgaggtactttcacaggctccgtaacaagttatcattgccccatcgtatacatcgacatgctctggtctcttatcccggaggacgttgaagccaaggccaccaaagatgctcctccgatgatcgacgtgacacaattcgggtactttaaagttctctgcaaaa

SEQ ID NO: 37037 - DNA, 278 bp, Gossypium hirsutum
  unsure (1)..(278): unsure at all n locations
  Clone ID: LIB3148-057-Q1-K1-A1
tttaattngagggtcgacccacaccttcacccacgcgtccacggacacctacttccactctcgcacccatataaatctcctgagtctcagaaggattatatgagtattttagggagcgctccatcccagattaatcgttctaatctcgtgtaagcaagtgggtctaacaaccacaaaatatctctatatggacgcctcattatcctaacactgcttggagctaatgttgaaatccgcccggaaataaaggaggagaatttctttcttttctttgcaag

SEQ ID NO: 37038 - DNA, 307 bp, Gossypium hirsutum
  unsure (1)..(307): unsure at all n locations
  Clone ID: LIB3148-057-Q1-K1-A10
cttaaaccttggccaggatgctcttaaactaactgaattttgtactcgctaagttgctctgaagatttagcccatgaaaaggcagttagttaaatctttgttcatttttgtgagagatgggcaagacagccaaaggtacgaaatggctattgctacaaatgcttgtacccaactgtgattttataagccaagttaacatttccgagttcgcnttggncnaaaanaaacctcccaacccctcctaaaaagagatatggggccttaaaaaataattttacccccaaaatcaaaaaaaaaatattcccaa

SEQ ID NO: 37039 - DNA, 417 bp, Gossypium hirsutum
  Clone ID: LIB3148-057-Q1-K1-A11
gtctagattccttacttcacattcataagactggtcattttgatgaccatttttaccattatactatggttaccaacttatccatcaagcactcatgttcaatcattatcacgttgtgtatataacatacaattaccacatagctatgaccacctcaattggtcatagagcatacatccaacacacatgtcatattactaaccatgcatggcaaacaaacataatcacattataaacattagacatgacatgaatagctaggcttacaagccataatcaatatgagccacatctcatggccatatgcatataactcaatctaagccaacacatttggccaaagcaaaataatgcatgtcaatcagctagatccctgtacatgccactcacttgaaaattctaatatatacttcattt

SEQ ID NO: 37040 - DNA, 187 bp, Gossypium hirsutum
  Clone ID: LIB3148-057-Q1-K1-A6
acgaaacaccctcctttttttaaaacttccaatctcaacgcccatcatatgcccctgaggactgggtttaaaaaaaaaaggccgaggccgtttactttctttcacttatcacccgtcgaagaggccccccaccgttacaacacaaaatgtgggggccgcttttctacccccattcttacgaacccgg

SEQ ID NO: 37041 - DNA, 152 bp, Gossypium hirsutum
  Clone ID: LIB3148-057-Q1-K1-A8
agcagctccacgcgtccgggtgatatttcacagctcatgttattttcaataaacaagtttatgacgggtgtaactatttgcatgctgggggaatgaaaactgaaattagtcagtctttgcagggtaaactagatgattctagtgagctagtg

SEQ ID NO: 37042 - DNA, 379 bp, Gossypium hirsutum
  unsure (1)..(379): unsure at all n locations
  Clone ID: LIB3148-057-Q1-K1-B10
cgtgacttgattaatatgtatatggttgcagggagggtgggcaagtgtaaggaggtttgtgaggaggccactatggcgggtttttcattaaataaacgtaccttgttaaatttgtcaaaacttgacccttttcttttttgtatcattacatctttcccccnnnaaaacnnnaaaaaaaaaaaatattggtttattttattaacttaaaggtaaagaaaaaaaaaaatacaactaaaagtgccccctgttaatattctggaaaacgcgtcctttttatatacattggactaactttcttaatcaaacaaaaaaaaaaggggggcccttttaaaaaaaccaaattttttttccctcctttgaagaatttaaattttttttt

SEQ ID NO: 37043 - DNA, 137 bp, Gossypium hirsutum
  Clone ID: LIB3148-057-Q1-K1-B2
catttgcatatgtcaaatagtgacatactttatgtttcatagtggcggtattcttattgagcatgggttatctgtataaagatggggttcttggctcccaaaccacctttctttgcttatatttatagttttgcttg

SEQ ID NO: 37044 - DNA, 384 bp, Gossypium hirsutum
  unsure (1)..(384): unsure at all n locations
  Clone ID: LIB3148-057-Q1-K1-B3
gacagcctcatccacatttttttttgaccaccttatctgaccttgttattttgttgagtaagttggtcagggtttgcatgtgttgagataatgggatgttttgcaaggtatgtgttgctgtcagaagtttttgtggactccaatgaaagctttttggtatatcggctagtactggcctagcttcatggtcttcaatagaatgaatggctttgttcccattttgtgtgtagcgttaggagagtgttggtgtagtgtgcttatataatggagttcagaatttttgtatattctgttagctgcttagtggcgcttcttgttggatctcctatatatcaagtgtccagaagttggntattgtatatgatataattcacagnttttctc

SEQ ID NO: 37045 - DNA, 288 bp, Gossypium hirsutum
  Clone ID: LIB3148-057-Q1-K1-C10
cccacgcgtccgccccgaagtgcataaaaagctcataatggtcccagtgtgaagggatactgctcgcatccttcacttctaataccatattttttgtttggaatcaattaaggtgggtttagatggacgttgcatttatttgtagttagtgtaaaaacagcgataacggtgaaattagatactataatgatactatagtatgagataaaaaagtaaactaaacgtgcaccgtccatccaaatccatatttaattttttttcttggagaaacaaaaattttgtactttg

SEQ ID NO: 37046 - DNA, 234 bp, Gossypium hirsutum
  Clone ID: LIB3148-057-Q1-K1-C3
caagttgtcttctagtctcagcccctcagtaggtccaatgaccagtgaaacaatagtaatattgttgggctaattctctgtgtaaatttcgcccactttaatatattttgtttaattcaactttttcaattacatattagagagtacattgtgaataaatttactcaagctattgatttatttaaatcgcatggaaaggatcagaataaataaattaaaataacatattatgaa

SEQ ID NO: 37047 - DNA, 343 bp, Gossypium hirsutum
  unsure (1)..(343): unsure at all n locations
  Clone ID: LIB3148-057-Q1-K1-C6
agtataattgttcttaaaataaaactttttcttctaaaaaaccccaaaagctcccacagaaaaaggtgccttctcaaataaaactagaccactcatctanactaattcctacttgttaatcaaccactcttatttactttaatttctttacactcccccccataaatatccaaactttcttaaccctttttattcccaatttaccttttttttttttccccctaatttaattccatctccctttttattaaaaaatgaaaaccgaaaaacccctcgttatcccaatacttaattacttacaaaaaaaccctttttacacacctatttttctatccaaaatccc

SEQ ID NO: 37048 - DNA, 362 bp, Gossypium hirsutum
  Clone ID: LIB3148-057-Q1-K1-C7
aggagaaggcctaaacgacctaaatccctctgcaatgcatgcggagtgtcgggtaaatctggcgggcgctttcccgattaccgaccgagggcaagtccgacgcttatcccatcagtgcactcgaattctcatctgaaagtgctgcaaatgatgaccaaatgtcagaaacctgatgcaccacaaatgatcccacaataaatgcacccaccactagataacatatcagagacacggctctggagatactctcgaaccctatagtgattagatgcaatactcacacaaagtatcccccctcccaatcttacaatataatcttaaaatgcataaaatattgggagtgacaccaatatgattgattc

SEQ ID NO: 37049 - DNA, 408 bp, Gossypium hirsutum
  Clone ID: LIB3148-057-Q1-K1-D1
gggagaaaggatgaacggtgtggatttgcctcaatggggtgcttctatagtgaaagaagagtggacgtatgaagtattcgagcttgaggtaatgaatgatgcatcttccattagtgatgagttgttaaacactttgaagctagctttacattgtgtcgatccatcaccgtcggcaaggccggaagttcaacaagttcttcatcaactagaagaaattagtgcagatacaccagctagttctacaccgccatgatatatggtttatatgctatacgcaatagagtataaattctttcattcttacaatataatcttaaagttcataataaattttgtgttacaccaacttgattgattcagtatgtttcaattctttcattcttaccatataatcttaaagttcataat

SEQ ID NO: 37050 - DNA, 399 bp, Gossypium hirsutum
  Clone ID: LIB3148-057-Q1-K1-D2
ggtagccatgcctgggaaactgctcgtgctagtccgtccctttggcgctgctgtaacgtagtccagagtcttcaatgtttgggctctgtgcacctgctttgaaaacggacggctatgagcgatgaccatttctgcggcgctaatcatcacactagggtttgggctaacgttacccttaggttgaataattgggccacgactgggtctaatgtactgggctaatggtttcatgactgtcttggactcaatggatatctatggttttttcatttccgtttaagaactgagaaagaaggctgatgctgataagaatgacaagtctgtgaaaaaccttgttctgttgctctttgagactgcccttctcacctctgggtttaacctcgatgacccaaatacttt

SEQ ID NO: 37051 - DNA, 356 bp, Gossypium hirsutum
  Clone ID: LIB3148-057-Q1-K1-D4
cccacgcgtccggacaaactctttaattcttagaatcctgctgaacttgataattggctcggtgaggtcaacccgaattccagagtgggggtacctactgcatatgcagtgccatcacttggtaaggctgctgtaggggatacatttcaattcgaaaggctaagctatttcacaattgacaaggactccactgccgagaagctcgtctttaatcgtacggttactctcaaggatacctacaagtagggtgggaaataagtaagggccccatgaaccacgcacatcaagaatgcagttatgaacacacactcgttatacagtttgctgttttaatgaaattcgacatggttttgata

SEQ ID NO: 37052 - DNA, 220 bp, Gossypium hirsutum
  Clone ID: LIB3148-057-Q1-K1-D7
gccaattgggccgtaagttttaatttgggtctaggtctgtttttggtatttgggctattgggaaaaaaaatggactattttatttcagtttctagtttatgggccccgggctaaatggggtcataacacatatcatgatatattctagatcttttcctgatgtggagatggggaaagagtacaaatccgatggagggtccagttcgtcagctgtgactat

SEQ ID NO: 37053 - DNA, 365 bp, Gossypium hirsutum
  Clone ID: LIB3148-057-Q1-K1-D8
gccaggcggccattttgcctaatatccgtcatatgtgcggtgacatgttcggtggcgggggcataccagactgaataccggagccatcttcagggagctgtcaacggatcaggaaactttttgggaagctgtgtggaaagcagcgtctgcctcaattgccgagtctactatagtgaatgacttcgactatatgtgctactctattggctatgaaaacactttgcaaacctacttccgcccataagatgctggtgtagaggttggagcctacatataagctttcacataatgtactatatgccgttgtcttcaccatggccaccatgttgcctacttaattgcctgtcttttttgactaacatttc

SEQ ID NO: 37054 - DNA, 411 bp, Gossypium hirsutum
  Clone ID: LIB3148-057-Q1-K1-D9
cccacgcgtccgcccacgcgtccgcccacgcgtccgcccacgcgtccgagccaaggagggcggtcgaagcagaatctgaaaccagagttttcccaggatttaaccgtgtccaaccctgaaatgattcaacttccttcatgttctgcaggagcaataaacctgggttacttctggggttactaaaattgaatattcaaaactgaaaaaaggaaaaatcaatggatgtaaatggattgaaagagttggaagaatattattgtcatgtgtgcatagataacattagtaggggaagtcaagaaaatgattgtgttgtaaaagtagttaaaactctgttaaggttttcattgccatattaggatttcactcgattatctcatcccatgcctttgtttgatacacaactattgtaat

SEQ ID NO: 37055 - DNA, 239 bp, Gossypium hirsutum
  Clone ID: LIB3148-057-Q1-K1-E1
acagccaattgggccgttagttctaattcggttttaaggctagcgcgagcatctgagctctcggttaaataaatggaggagtgagaggcaatttctaatttatgggccccgggctaaattggctcataacacatatcacgatatatctctatatctttccctgatgtgcagatggggtaagagtacaaatccgatggaggatccagttcgtcatctggtactatgcactgtgcatacca

SEQ ID NO: 37056 - DNA, 239 bp, Gossypium hirsutum
  Clone ID: LIB3148-057-Q1-K1-E10
gttgcgtggacgcagttatacttatgattgtcttctgggttttgtaacttaccagaatgaatacatacatagatatgatccctctgttgaagaaaggtttagactagattggtattgtttggtttattattggttggctggataaagcaaaaaagtacatgctaaataaatgtttctatttcctttccttccgttactgttattattattttatattaagaataagacaattatttagt

SEQ ID NO: 37057 - DNA, 386 bp, Gossypium hirsutum
  Clone ID: LIB3148-057-Q1-K1-E12
caaccatggcagtctatgatatcaggtttccttgcgggaacagctggtccagtatgtactggtccctttgatgtcgtcaaaactaggttgatggctcaaagtcgagatggaggggaggtgaagtataagggcctggtccatgctatccgaacaatatatgctgaggaaggacttcgcgctttgtggaaaggactgctgcctcggctcatgaggataccacctggccaggccataatgtgggctgttgctgaccaaataattggtctctatgagaggagatactttcatagtgcagctctataaacttgtactttttttgcttgttctggttttgattaccatagcaaacgcaaatctttgaaatcttggacaccatttttttcagt

SEQ ID NO: 37058 - DNA, 325 bp, Gossypium hirsutum
  unsure (1)..(325): unsure at all n locations
  Clone ID: LIB3148-057-Q1-K1-E3
cccacgcgtccgaaaaataaaaaaaaaaatttaaatttaaaaaaaaaaaaaaactaacaaaggctagggctacatatgaattagggcccgtccctcaaatgnattctattataccttagagatgctgatattctctttctatggcatatctacaaaaattctgaaatgaatccaatatcacagaactactgaaacatatttctgatactattttccttatcatccacttggatgagcaaattgacttgattcgaacatcctttcatttaccaacacataactctttctttctcaatcccttcatgtaacctttttttccccttgt

SEQ ID NO: 37059 - DNA, 401 bp, Gossypium hirsutum
  Clone ID: LIB3148-057-Q1-K1-E4
cccacgcgtccgcccttgagtgccgacgttcagccttgtgccaaagctccgattacgacagagacggcatcaactcggtggtgccggcggaaaaaggtaagtttccctttcttcccttctttttattttaaaaaaagaaaaataaaaagaaaatatatataataaaaagtaaaagaacgatgagcaccaacaaagtagaataaaataaaataaaaaaacctttgtattcaaaaagatttttgtatctgtattcaaattttctgtcttttgctttcgtaaaaatcccccttttgcagatttctttcctggccttaaatagctggaaataataaataatacacatgataaaaatacaaaatccctcttttccgtttgttactcgtttttcccctttattttgc

SEQ ID NO: 37060 - DNA, 395 bp, Gossypium hirsutum
  Clone ID: LIB3148-057-Q1-K1-E8
tttttcttagttggacttgtcatgtttttcatgttaccaatcaatgtttgctactagtttcggagagttactattgagatgggaacataatttgttctaaaaaaaaaaaaaaaaaaaaaaaaaaaaaaaaaaaaaaaaaaaaaaaaaaaaaaatataaaaaaaaaaaaaaaaaaaaataaacaccaacaaaaaaaaaataaaataaaataaaaaaaaccatagaattcaaaaaaaaaattagatataaaaaaaaaaaaatataggggggggttttctaaaaaatacaaattttgcaaatttctttccagaccttaaatatcttgtaataataaataatacaaaataataaaaatccaaattccctattttccggttggtaataacttttgccctt

SEQ ID NO: 37061 - DNA, 408 bp, Gossypium hirsutum
  Clone ID: LIB3148-057-Q1-K1-E9
attttcttttaaaaaaataaaaaaaaaaaattaaaaaaaaaaaaaaaaaaaaaaaaaaaaggggaaaaaaaaaaaaaaaaaagggaaaaaaaaaaaaaaaaaaaaaaaaaaaaaaaaaaaaaaaaaaaaaaaaaaaaaaaaaaaaaaaaaaaaaaaggggggggcccttttaaagaaccaaattttatttccccttctttccaaagaaaaattttttttttggggcccccaaaattaaattcctggcccgggttttaaaaacgtgggaatgggaaaaccctggggttaaccaaatttaatgcttttgaaaaaaatccctttttcccaagttggggaataacaaaaaaggccccccccgttcccctttccaaaaatttgcccaccctaaatggaaatgggaaccccccc

SEQ ID NO: 37062 - DNA, 410 bp, Gossypium hirsutum
  Clone ID: LIB3148-057-Q1-K1-F9
cccacgcgtccgattctacatcttgcattgcctcaccaatttcatctatccagaataattgacagccagataaagaaacaaatccaaccacaacatcacgtcctcaagcatgtgataatgttatacatgttataaggcacagtagcttccgagttggcaatgagcagccagtgatggaaaaagtagatacaggtgtccaaaatgtagatgttgggaaactcataaatgttgtgagggatgaatcagacacaagaaacgtgacaagcccaatgaccctcaggtcatcaaatgttccagattatcctggcattaaagaaatggatgtcaggaactccatttcttcatctccaaaactggattcaccagaccctacgaagccaagctcttctctaacagacgaagagacacca

SEQ ID NO: 37063 - DNA, 101 bp, Gossypium hirsutum
  Clone ID: LIB3148-057-Q1-K1-G11
caagtcaacaaaggcaaaagcatagcttgcccttatttgagggaattaatttaataattgggtaataaatcaacttccagaattttcaatattatgaccct

SEQ ID NO: 37064 - DNA, 412 bp, Gossypium hirsutum
  Clone ID: LIB3148-057-Q1-K1-G12
cccacgcgtccggagacttgttaaaacagtactcaaggaagcagcacagaaaagagaaatgagatactcagacctgaacaagattgatagaggggtgaggagacattttcatgatgatataacagtcatagttgtctttctagatccccatttgatcaatggaagctcatgctacaactctcccatgtcgataaaaggcggaggaagacttgccagcctctgctagtaccgttgctggtgactcatcgctaggaaattaagatgaagagctaaatgtctaaaaaacttatcctcaaatttccttacaaataggggactaaccttgttgagattgcaagacaatgtgtagatatggtttcatgcaatttagttggtaaattgtctgctctcctgctaccacaattgataacgt

SEQ ID NO: 37065 - DNA, 333 bp, Gossypium hirsutum
  Clone ID: LIB3148-057-Q1-K1-G4
tttaagttttatatatgtaattcccatcaactaaatgaattttatatttgagtactttatgtcttagggtctataattgtgacgcttggttttgttttgtttcgtattagtgtgggattatttgctacttggtaacccattcaatcttttgttacattataaaaaaaataatacaaatgtgtgtgtaaaaataaaaaaagaaaactactacaataaattgaccagttcaacaatgcagttctgattctgaatcttctgaaaaagctatgtgcaaggagctacttgtacccataaaacattattcattcaatgggattttgtcattgtaaaatt

SEQ ID NO: 37066 - DNA, 375 bp, Gossypium hirsutum
  Clone ID: LIB3148-057-Q1-K1-G5
gcgcccacgcgtccgtccactcttccgtccactcttccggggggtgcaagagacttgagtggcgggggagctgtataaaaacgaattctattattacccaccaaggtatgccactgagttctatgctcatcctccacagcacttcactgatgagaaccctcaagcttgccctataatgtaatgaacaaaaaaaagttaggtgctctgctgatctacacgttcttctacttgttctgcttaatggctctctaaaaaagtataatctacaatgaaactctagaattctgccagtttgtatttttctttaaaatgttatatataattatatctaaaataaagatatagttccaacttatttgcacatacttttttcta

SEQ ID NO: 37067 - DNA, 438 bp, Gossypium hirsutum
  unsure (1)..(438): unsure at all n locations
  Clone ID: LIB3148-057-Q1-K1-H1
tccacccacgcgtccacccacgcgttcaatagacaccctgctctaaattttacttctaaaaataaaaaacaaatactgggtggagcttttacttaaaaaagaggtgcggctatcacactcctnnncttatattgcaacactgctttgggctgccgccttttaaacaaccactttcaaacccctaaattacaaaataaagattcttttctgtgaccccaaatttaaacaactgccccccgttttacaacacccctaacataaaaaaccccactttaccccactatttaacctttacaaaaattcccctttttcctattcgggttataatcaaaaaaaccccccccatccccctttccaaaaatttctcaaccctaataaaaaaaaaaaaacccccttctttaacactttttttacaaatgatttttttttttccccccc

SEQ ID NO: 37068 - DNA, 427 bp, Gossypium hirsutum
  unsure (1)..(427): unsure at all n locations
  Clone ID: LIB3148-057-Q1-K1-H11
cccgggtcgacaccacgccgtccgcccacgcgntccgggaaggtaaccacacatatttattgttcatatgtgtggtttcaaaaatgatgtgcggttgtatgtagtgtttcaccacaagctctgaaggatttgatgaaataagatggttaacattttttttattctctgcaaatttaaattctagccttgtctttaaagggtagcccgcttattaacatattgcctttttctggtatgttattggtagtaccctaagcttacacttttcctatttgtacattggatataatcgtatgaattttttttttttttaaaattcaaaaaaaaaaggtgtgtttattctacttttgtggctttttctcggattaaaatttttcttttttttgttttttggtagagaggggaaaaatttaaggggggggggttt

SEQ ID NO: 37069 - DNA, 296 bp, Gossypium hirsutum
  Clone ID: LIB3148-057-Q1-K1-H2
cccacgcgtccggtcaatcacctctgaagtttgaaatgttgtaatgctattgacaaaaagaagcttgtattgtcgggttttaaaatagactataacgaggattagataaggcgaataaaaaaaaaaaaaaaaaaaaaaaaaaaaaaaaaaaaaaaaaaaaaaaaaaaaaaaaaaaaaaaaaatataaataaaaataacaaaaaagaggacttacgtaaattgaccagttaaaaaatgaactttcttctctgaatcatcaaaaaaaggtattctcatgagctaattttatgcaaaaa

SEQ ID NO: 37070 - DNA, 181 bp, Gossypium hirsutum
  Clone ID: LIB3148-057-Q1-K1-H5
gcaaaattggtgtgtactgttacttttactttaaaaattatcgtcacttttattatgtgcgtatggtgtatcagatctgtgaggacattatgtatttgatgattatggaacattttcctggtcctcgttttctaaatttctgtatttaaatcttatgtgaaagatatatttccggtttaat

SEQ ID NO: 37071 - DNA, 390 bp, Gossypium hirsutum
  Clone ID: LIB3148-057-Q1-K1-H6
cggacgcgtgggcggacgcgtgggttcagaaagagattcattcgaagattatggagataggaaagaagcacaatgagaccggttctaaagacttgttgcaagtgatgattgaaggttcaaaaggtggtattgggccatctataacagctgatcagttcatagtcgacaactgcaaggatatctgcatccctgcctccgagattactgcagtttccgcaatatggggtctaatgttattggcttcacatcccgaatggcaaacccgtattcgtggtgaggtttcagaaccatgtaagggtggggtgctgagtttcgatgtgcttcacaagatgaaagcgttaaaaatggtggttcttgaagtgctacggctttatccagcaacagcatttg

SEQ ID NO: 37072 - DNA, 260 bp, Gossypium hirsutum
  unsure (1)..(260): unsure at all n locations
  Clone ID: LIB3148-057-Q1-K1-H9
gaatgctgcagtgcatagccaaaatgtgaatgggtatttcccaggatggatgctttaattatataaaagaaggaaatatctagctacctacttttcattatttatttaaacaaaaattaacgcaacttgtaattatatttgtgtgaatgacaataaacataaacataaacatgaacatataatatattgtgaggacttaatttctaannaaaaaaaaaaaaaaaaaaaaaaaaaaaaaaaatnnaaaaagggggggggca

SEQ ID NO: 37073 - DNA, 148 bp, Gossypium hirsutum
  Clone ID: LIB3148-058-Q1-K1-A2
cccacgcgtccgcttttagtccactttaatatttaacgttatctgatttttccacaaaacaggaggtattcctaattatgaaagctggccccgtaattacgaggttaagtttgcatgtctattcaaataagatcatgggaacagtttc

SEQ ID NO: 37074 - DNA, 379 bp, Gossypium hirsutum
  Clone ID: LIB3148-058-Q1-K1-A4
cccacgcgtccggtaagggaggattttttaaggctaaagaagatccatggttgtaataagagggcaatagagaaacagctagctgccgcaaaggatttggtcgaggataagttcgctgagaatatattcttgcacaaagggatttcaataaatgcagcttacaatttgctatctgccgtcagggagaatgatgacgacattattttttgatgaagaggttacgtctgtattttttctggcattctcggtttttctattcgatgtatgttccactgctggagattaccttattttcatgtggtgttttgaataaatgttatatgcatgtctctactggacttactttgtgttatagttaatgatcatacatacaccattt

SEQ ID NO: 37075 - DNA, 101 bp, Gossypium hirsutum
  Clone ID: LIB3148-058-Q1-K1-A5
gtgaattctggttagttttagttgggcattaactgagatccaagtagaaatataccaaaggggtatgaatattcttggtggattatagcctggaatgatta

SEQ ID NO: 37076 - DNA, 285 bp, Gossypium hirsutum
  unsure (1)..(285): unsure at all n locations
  Clone ID: LIB3148-058-Q1-K1-A6
cccacgcgttcgcccacgcgtgcggctgctcatcccgaccctgctttgctcttaaccaagcaccagagagttgatgttgatgacaactgtgaaggagttgggaaagaggagagcttgatgcgaaaacctngctggtcattgatatattttcctcaaaccaatagcccaggaattagtttgggtcaaatgttaaacaataaggaaatggaatgaattggattagatggtttaggctaattaatggcaccaaaccaattcccttaaaatggaggattccggcggttt

SEQ ID NO: 37077 - DNA, 234 bp, Gossypium hirsutum
  Clone ID: LIB3148-058-Q1-K1-A7
gaaccagtagctgcctgatttcccaaaaagaaagtgtacgaacacactcttggaaataaggaaatggtgattggtaataaactctctggtcttggaagaaggggcaaacgcaggaccgcattttctagcccagactgggtaaaaatcttaaattttgggggcgccctttgagggggtcaaatgtttctgacccgggtcaagacggttattacttatttttttgtgacccttaaa

SEQ ID NO: 37078 - DNA, 323 bp, Gossypium hirsutum
  unsure (1)..(323): unsure at all n locations
  Clone ID: LIB3148-058-Q1-K1-A8
cccacgcgtccgctctgttgttttccctcaaaattatgattgttatactactattcaaccagctttgacgaaaaccaatgttgccctcttttttttttattagttatttttaatttaaaaaaaaaaaaaaaaaaaaaaaaaaaaaaaaaaaaaaaaaacaaaaaaaaaaaaaccaaagaaaaagataagggtacaaacgtaaacaaataaataaaatgaaaagaatctgatcaaaaggaatatgacttactattcgcaacaaaaaaaaattcccattacattagaagattcctggcgaaaangggggggaggctaataaaaat

SEQ ID NO: 37079 - DNA, 236 bp, Gossypium hirsutum
  unsure (1)..(236): unsure at all n locations
  Clone ID: LIB3148-058-Q1-K1-B11
aattttgtatcacaaagcccttccctcccttatatgtacctatatttttaggttttaactttcttgtgtccgttttgttgaactatatattgctggagaatttgaaacatgttttctttgtgtttgacttattgaatgatattccttttatttttcagaaaggaaaattcctttggtttttacttgtnaaaaacaaataaaatatgtaaacttgaaaaccaaaaaaaaaaacaatt

SEQ ID NO: 37080 - DNA, 188 bp, Gossypium hirsutum
  Clone ID: LIB3148-058-Q1-K1-B2
cccagcgtccgcagttgttgaaggaataaaccaagcttataccccgctagaaatgaagcaaaacatatgcagaattggaaatgctatccgagtattgaccagttagtttaatgtgattaattgatcatgagacgtggtggtgctacttaatgcatcatactgctgtcgtatttgtgcatgagtacaat

SEQ ID NO: 37081 - DNA, 185 bp, Gossypium hirsutum
  Clone ID: LIB3148-058-Q1-K1-B3
ccgtccggtaggattgagtatatacacgtacgaagtataatcgagtatgaggggatgtccgttgcattttccaaaaatggataacggtgggttcttacttgagaaacatgttatcgacattgacaaaaccaataagccgaaaccgcccacgaccagccttaaaagccttgcccggccccttttta

SEQ ID NO: 37082 - DNA, 133 bp, Gossypium hirsutum
  Clone ID: LIB3148-058-Q1-K1-B4
cacagccgtattaccacgcagtggaagcaactaaagccgtaaagccaatattgagcgagtattactcatctgaaggtgcaccagtttataaagcgatatttaaagaggcaatggattgtatttacgttgaacc

SEQ ID NO: 37083 - DNA, 285 bp, Gossypium hirsutum
  unsure (1)..(285): unsure at all n locations
  Clone ID: LIB3148-058-Q1-K1-B6
aaagtgacctttagaaactacaaatataatggtatctccattgacaatgttgacgcccttttcctatttatatgcatatatatattaatgaattttggtcttcctggtattctaggtgatagtttattcttaatggaactttggatatgtggtaaatattttcgttttgtggagtaaattttggtacaaaaattgcatattagtccaaaaaaaaaaaagaaaaaaaaaaaaaaaaaaaaaaaaaaaaaaaaaaaaaaaaaaaaaacaattatcaaaaaaatangg

SEQ ID NO: 37084 - DNA, 412 bp, Gossypium hirsutum
  Clone ID: LIB3148-058-Q1-K1-B7
aaataattgtatatttcttggaacaaaatgggagtggagaagaagatcatggtgttgtggatgtgttcattggtaataacctcaatgcttatggaagagggtccaaccccgccaccatttacttacccgggactgggaaaaaatctttaagttccatgcaacctaggaggcggaaattgcttcccaccaccttaaaccggttatgacagaggttgttctcccctaaaactatgtcgaagtctttttacatcgcccttttttatttgaccacatctagaaagcgcacataataaccttctccctttttcctataaaattctgtgaaaaaaaggatttaatcatctcatttgttagttctttccttattttagaaagccattatttccaaaaatatattcaacaattttttttt

SEQ ID NO: 37085 - DNA, 409 bp, Gossypium hirsutum
  Clone ID: LIB3148-058-Q1-K1-C10
cccacgcgtccgctggaatgaggcctgttggacctcctatgccaaattgttttgttcccatggtacagcagggccaatgccctcgtggacgacgaggaacagttccagtgcaacaggctcagcaaccagtttcattaatgcagcagccgatgctccccaggggagaagtttatcgttacccccctggtcataaaatgcctgaagttgcaccgtctaatgttcctggaggcatgctttccattccatatgatatgggtagcatgcctgtgcgagatgctggcagtggacagcctatgccggttactgctttggctacatcacttgcaaatgcagcacctgaacagcagaggacgatgcttggtgaaagcttgtatccccttgtggagcgactggagcgtgatgcagcagc

SEQ ID NO: 37086 - DNA, 344 bp, Gossypium hirsutum
  Clone ID: LIB3148-058-Q1-K1-C2
ctgcattatccttggcattgcacctacgattttctgactaaggtcaaatacaaagcaatcttgatctgcatcacacactaaatgtctgattctgactgttagagtgaatattcccttttttgcttgcgttttagcttgaaaaaaacataaaaatgcataccgctcttgcatgtaataactagcttgctgaaccttaaaaacgctttcactgtaggtggtctgaattcaatctatttatgaatcaagatttatcaatcgacgaattgtgtaggcctctagctaacacagctctgtatcatatatcctcattctattttattttttgcaactttggataaaaccct

SEQ ID NO: 37087 - DNA, 351 bp, Gossypium hirsutum
  Clone ID: LIB3148-058-Q1-K1-C3
cccacgcgtccgaaaaaaacttcaaaacctctccccaaccctctcctttcaggccaaggggcccggccgcaggccaccgcgccgaccggcgccagcgccggtgccgccgtatgcggcggtcagaaggcgaaaggtcgggtttttttaaccccgttgcaaggcctttcatagatcaggctctcctatccttaaagccgagaggaaaacccccaaaagccgccatccccgtccattttcggtgacccgaaggactccggcgacaactcaaacgcggcgttcaggtaagtttcgtttattactttaagcctattaaccgtgaaagaaaagaaagagcgaaaacagaatcgaatc

SEQ ID NO: 37088 - DNA, 177 bp, Gossypium hirsutum
  Clone ID: LIB3148-058-Q1-K1-C6
gtgcattacccttgtcattgcgcctttgattttcagactgaggtctgggccatagcaagggggtctgcatcacacactaaatgtctgattctgactgttagaggtaatggtcctttttttgcttgtgtacttgcgtggaagaaccatcaaacttaacaaaaactttgcatttaaaag

SEQ ID NO: 37089 - DNA, 276 bp, Gossypium hirsutum
  Clone ID: LIB3148-058-Q1-K1-C7
gttatgaagaaggatgagaccctccgattatgtattgattataggtagcagaaaaagtgaccatattaagttgcccaggattgagaacttttttgatcagctaactggagctagagttttctcaaagattgatctatgagctaggtattatcaagttgaaacttccaaatataaaaacaacgtaggattttaataatatcctttaaaaaataataaaatgacttgtattattaaaacaaaaaccggtaataatatcttacaatttatactatttta

SEQ ID NO: 37090 - DNA, 348 bp, Gossypium hirsutum
  unsure (1)..(348): unsure at all n locations
  Clone ID: LIB3148-058-Q1-K1-D11
gaggatctgaagaagaagctcgtgagcacataaagaaattgattgatgcggcatggaaaaacatgaacaaagatcaaatggccgccaagtctctttcgtctcgaatgttttttgagactgctatgaaccttgcgagagtatccatgttggtataccagaacgatgacggtcatggtattgaagatggtgagcctaaagagagagcattacgattatttattcaatcagttccattgccaaaatgattgagtacatgtttggtacttttcatgtaaaagacgtgttgtcttaaataacataagtttcaaaacataatgtattaaagtatttggttgttgaaacttanna

SEQ ID NO: 37091 - DNA, 353 bp, Gossypium hirsutum
  Clone ID: LIB3148-058-Q1-K1-D3
attacacatctcgagtactcatcgatttctgttgtccacacctcttccatagaccagagcgcgcagtcgacattaaccggcgtaccttctctagatgacgcacacggcattgccgaaaaacatagacacaagtgttaatcgtctaatcgccctttgcgacatctttcatatacaagaaccccctcttctctaagactagcagaaaacacaataaaaccctcatcaactccccatattggtaaccttattgttttcggcaactactcaaacccaaggttcatgtaaaattcgcttaatactgtctgccgtttaaccgtgaaaaaaaaaaaagagctaaaacataatcgaattat

SEQ ID NO: 37092 - DNA, 322 bp, Gossypium hirsutum
  Clone ID: LIB3148-058-Q1-K1-D4
gttataatcgcgagcactgcacgatttttggcgtgccataacatctatcgagaggagctcaggatttttcttgaaagggctctctaaagatgtaccaatggccgccagatcgatcatacatttgagtcgcccatagataatgacaatatcatgcagaaccccctgtttaatatcgtgaagcatagtttaatgctatgaactcgcagagtgaaatttaattattgcgaatctgtgtatcaaaactacctagtaacagagcttaactagacgttaattcgctctttgtcaccagctggcttttgcataacggtttgagagtaaa

SEQ ID NO: 37093 - DNA, 419 bp, Gossypium hirsutum
  Clone ID: LIB3148-058-Q1-K1-D5
aaaatagccgatatgatcgatggagaaattgcttccttagtacctggttggagacgagggccgggaattgatgaatcaccgcgcttttcgaatcagaacttttgtcacaattgtgcttcgaaccgtacatctaccggctccctcttagattttttgacacataatggaggtgtcaaagactcgcgagttcttcagtgttgtagaactggatgtgcttcaatgcatggccggtttgaagagattacttttcaagttgaggaatccgagcattgtgtgacagatggtgcaccgaacgagtcaagccagtcggacaatttgcattaccaggaaatatgggatcagcacgaaaatcatgaacttagacagagaaattcagacgaagagtttgataaatcagatcaatcattcttggcaaatgg

SEQ ID NO: 37094 - DNA, 352 bp, Gossypium hirsutum
  unsure (1)..(352): unsure at all n locations
  Clone ID: LIB3148-058-Q1-K1-D9
cttcaattgttaaaatctgtcttggatttcccttgttctgctttttgctgccttgctgactggagtctcgatagattggtttgttttactttgttgttttaggtcgcatatttctcccttcgcttgccatatagtaggatagagggagactttgtatcttggttgattgtataggttatagttccattgaaggatttcttctctcatgttgtaatggagaaatacttggatgcctgcatatccctccccccccccctttcttttgaaatgttattgacttggttgttttgacttgcttatnaaaaaatccaaaaataaaaaaaacctcctccttaaaaaaataactccctgt

SEQ ID NO: 37095 - DNA, 398 bp, Gossypium hirsutum
  Clone ID: LIB3148-058-Q1-K1-E11
gtggggtaaaagcaaagatggggaaaacccggaaacagatgtgaaatgcaatggcctgcaggaattgcctatcacaggcaatgctaaatcaatcactgatgatgatgatgatattaatggacctaccaaaattgttactattccagtttcaaacacccccttcactcaaggaacataaaaaatattcccttccaggtgtttgattaaattcctagcagagttgttcttcccccaaccaataaaaaaaaattaaaaatcactatgtaaccatcccttcccctctctatctctctaagctgctctgcatctaatgtaatttagctaattatgttttgattgtactcttgaggcttctgaacttggtgcagtaaaaattaaaaaccacgagtggtttgcct

SEQ ID NO: 37096 - DNA, 412 bp, Gossypium hirsutum
  Clone ID: LIB3148-058-Q1-K1-E4
acggacctctacttccaccacccccaccaccaaccaccgcaattcactccttactttagacccccaacggggttcctccacatggctggacagcaaaggccgttagccctaccatcgatatcaggaggcggcggaggacacagcagggaagaccaagatgatgtttcgaatcaagggagttcgaggaagaggtttcgaacaaagttcacgcaggaacaaaaggagaagatgttggctttggctgagaggttagggtggcggattcaaaaacaagatgaagcgattgttcaacagttctgcaatgaaactggggtcaaaaggcatgttttcaaagtttggatgcacaataacaagaatactcttgataatggtgcattgaggcaaagtggagacatgcaatgcaatacaatgc

SEQ ID NO: 37097 - DNA, 327 bp, Gossypium hirsutum
  Clone ID: LIB3148-058-Q1-K1-E6
ggaacacagtagtccaaatgaaggaattgaatcaggttcaacttcaagtatagctagagaatcgagggtatcgtttgagggtctaaaagaggctgtgagcctaccaaagcccgagccagccccaaagaatgaaccctgatgttgcacaccatgaaccatttccttgagacgacaatctttcacctctttctataattattgttcttttataaaatttggtaccaataggaaaatgtttgagattgatgaacagtattcaccctgttatttgttctgtatcctaaatgcaaccaacgctgatgaatgtaattcaaccagttgtcccaa

SEQ ID NO: 37098 - DNA, 373 bp, Gossypium hirsutum
  Clone ID: LIB3148-058-Q1-K1-E7
gcttatcctagtcttctttttttcttctcctttcatctgtattaatttgtgttggtaagctgaaaaagcttgacgtttgatgtacgttgtgccaggtgttgcttattaagctttttgaatctgcattaaaaaaaaaaaaaaaaaaaaaaaaaaaaatacaaaaaaaaaaaaaaaaaaaaaaaaaaaaaaaagaaaaagaaaaaggaaaaaaaaaaaaaaaaaacaccggggggccggtttaagaggctcaagttttacatacgtttggttgggggggattgttttttttttgggttaaaaaaaatataaatatatggggcggcgttttaaaaagtttgtgaattgaaaaaccctggggttgccaaattttttt

SEQ ID NO: 37099 - DNA, 405 bp, Gossypium hirsutum
  Clone ID: LIB3148-058-Q1-K1-F12
cccacgcgttcgtgggggtttgcttagagaatatatcacatattgcaaagtgagtgggtgccacgttgcgctttgctggttagacttattaacaaatatgtgaggtgtatcctatgccatagatgagactcttggatacattctgtgcctactaatgacttttcagaataataatcaatctcttttagggtgttggtcctcagttcctggtcagtctctgatagttgtgagaatgagtcttgatttatattatcctactaaatgacatcatcttgggtggctaaactaggttcaaggtataattgtttctgatcttaaattgtgcacaaaatgcttctgccttgtggtctgcctccagaaagagaagatgattaagaactactggttgggctgtgaagtgaaatg

SEQ ID NO: 37100 - DNA, 304 bp, Gossypium hirsutum
  unsure (1)..(304): unsure at all n locations
  Clone ID: LIB3148-058-Q1-K1-F6
gactgatccgtggaacaacatagacagttcgtacatgcatgactacgaggagttggatgaactagaacaatggctgcaggaaggagagtgggagagtgatgatgaagagatggaggatgctgaagatgatgcagatgtggtggtggaatgatttctgtttgtatttttactttcgtaatgttgtttgttagtgtaactagctactgctgaatgtgctgttaacttattagtgggagtcacaatggattgtgaatattcaatctgattgtttttgtggattaaaatatgggtaaattacacanaa

SEQ ID NO: 37101 - DNA, 243 bp, Gossypium hirsutum
  unsure (1)..(243): unsure at all n locations
  Clone ID: LIB3148-058-Q1-K1-F7
agcctaatttgtatgaagttgctgatcatagggctcataaaatntagcttttggtcgggcccagttttgcccatctttactgctttcttaggcgatgatgatttctaaatgacatggcttaccttgagccatggccaaccttattggcctaaaaattttgcgggtgcctgaaaagtgccaccataccagttagtatgtcttattctttcatgtatttttcaattttttcacagaaagaatgga

SEQ ID NO: 37102 - DNA, 158 bp, Gossypium hirsutum
  Clone ID: LIB3148-058-Q1-K1-G8
cccacgcgtccgcggacgcgtgggttcactatctatagttgcaagtgggatctgtaatattctttgtgcaatgtccagttgaaaggtatgagtaacaacctccactttccacatcttatgtattccatcaataagatctgatacattttccagctctc

SEQ ID NO: 37103 - DNA, 359 bp, Gossypium hirsutum
  unsure (1)..(359): unsure at all n locations
  Clone ID: LIB3148-058-Q1-K1-H12
atttcatatgcttgttgccaaaccgttgttcaatttacttggttgagttactagtatgatgttcttatatataccctatgtatggcggatttgccctccttttcaactaaagaattttattggctagcatcatgcttttgtggcatcatcacctgcaaactggtctatgatataacaggttttatcagccctttttgtttcaaaggatatggaaaactaagtgataaagaaaaaatggaatggaacaatcggtgcaattttgtcctatgttcttttcttctttttcctttttcttgtataaaaatttgttcaaaatataatctactttcctaaatttctttgcnnnnnanaaaannnna

SEQ ID NO: 37104 - DNA, 357 bp, Gossypium hirsutum
  Clone ID: LIB3148-058-Q1-K1-H3
gggcataaattttgtcactactagtactaaaagaaataggtgtatttgggttccaaaacccaaagccttgaaggatttggcaggaaactttggattcgaaagggttggtcttaaaagtgtgttcatttgattttcgaaggaatccatcgtttcttaaaaaaaaaaaaaaaaaaaatgacagacatttaaaaagaaccaaaattaagtacacatgaaataaaaataaaaataaaaaataaaatttggacctaaaattaataaaatgtgaggtcgcaatacaaatttaaaaatggggggggccctttttaggggccaacatttttttccccggggctttgccattttttactttttttt

SEQ ID NO: 37105 - DNA, 412 bp, Gossypium hirsutum
  Clone ID: LIB3148-058-Q1-K1-H5
ggagattggatccttcctgatcttacgatccagggatcgataaaactgaacagtaatctgcaaacctttgcgaatacgttctatttcagctatgctacaaaacgtacaaggaagatccttggtgtcacagttccttctggcattcttggtattcatcctatgctttttattcgagttctacagatgagcctgtatcgatatcctaccgatgttcctccgccgtataaaggctaccgggacgaggattggcaggacaacgatggagcacttaatacgatatccatgactcaccctcgtctcccgatagaacacccaagctgttccattgtgaatgattctgattgccaacctttgcagccaggcatatggtattacaagattgtagaggcagatcacatatttttcatattga

SEQ ID NO: 37106 - DNA, 418 bp, Gossypium hirsutum
  Clone ID: LIB3148-058-Q1-K1-H6
cccacgcgtccgcgaaagataatggaggcatggttaccaaagttagctcaattctgggacctgaatcacctgaaactgagccaagcaatgtggaaaaatgggattctcctgcaaagtatcaagctgatattaaaagagagaaaaggaaaatgaagggtaggccactctggacacagtttgtatgctgttcatctgcaaattaggataggatcataaatgcctctagacattattgagtgggggattgcttctcaatggcattgtttaatagcaactcttttattttttttctttttagccttgaatttttcttattcatgggaatttgtagcttgtaaattatttggacaattgcattgtttttttttggtgttgctgtagtactagtatattcatcttatttagtatactataattc

SEQ ID NO: 37107 - DNA, 147 bp, Gossypium hirsutum
  Clone ID: LIB3148-058-Q1-K1-H7
cacagacttagagaacatacggaacagaggttactctttgatgtatagctccagaaagcggcgagtttccttgctattaaacatggatcatgtaatgaactgtccttttgttttttcttaactattaaatgaaaatgatcgtatccg

SEQ ID NO: 37108 - DNA, 255 bp, Gossypium hirsutum
  Clone ID: LIB3148-059-Q1-K1-A1
cccacgcgtccggagaaattgctgctggtacttgctcgacatggagggacatgaatctgatatcttgagacaatctcctggtgaataaatgtttatgaccgatctatagtggcctcgtgcgggtactaggttgtcctgcttttctatgtactcacgccagggagttgctatacaagatatgcctacgtatttataaccaactatactatctatggtgatcgtttccccatctactactgatgggcatgactgtgc

SEQ ID NO: 37109 - DNA, 367 bp, Gossypium hirsutum
  unsure (1)..(367): unsure at all n locations
  Clone ID: LIB3148-059-Q1-K1-A12
cccacgcgtccgaaaaattttaccatcaaagtatatacgtaaaacttttagaactttttttatataaataaaatcttttcactgattttatttttgttttttgggggatagacaattagtttgtaggtatatggatgatggtgggatggatgatttttgttttgtcatgttgtggtgatgaatgaatgggggggacggcgttgatatttcagtgttaatagaccaatgtctttgctttatcatcaccatcatctattttatctaggaatagtattggttgaatatagtgaaggaattttaattttccaaacntcctctttataaaaaataaaaaaaaaaaaaaatttataaaattatcttattattg

SEQ ID NO: 37110 - DNA, 384 bp, Gossypium hirsutum
  unsure (1)..(384): unsure at all n locations
  Clone ID: LIB3148-059-Q1-K1-A4
atgacagtgaatggagctggtgccatccttcagctcatctatgttatcctctttctcgtatatgctcctaaagatgcgaaggtggtattactttataagtttgaaggcatcatatttgtgcgggttgaaaagtgttttgtttagagatttttttatttatttttagattcaagtgtttggaaagttgaaatattgttttagacaaaagaattaataaatttaaatgaaatgtaaataatttaatatatatattaaatataatgataaataatatttaaataatttaatatatcananaaaaaaaaaaaaaaaccaaaaaaaaaaaaaaaaaaaannnnnnaaaaaaaaaaaagaaaaaagcgatttgaaggaccaagcttacat

SEQ ID NO: 37111 - DNA, 376 bp, Gossypium hirsutum
  Clone ID: LIB3148-059-Q1-K1-A8
cacaagcgtacgattgccggatccaagcgcgataagtgctgaggagcatataggctacacggaaagacctatatctatctatctataatgaggacctgattcacgagttggtaaatccaaagttgcaggattaaggatcacaattgcaatgcggacctggacgttctgggaatttgtaaaacggaggaacagagagaggttaactgacgtatgaagatgtacggtgattggagataacggtaactgattgtgacatagaaaggactatggacgggcgcatatatagtattaagatacatctagtactactgagtcatatgctgacgactagaatcgatgaacatcggatcaaagagataatttaccgtttgtgttt

SEQ ID NO: 37112 - DNA, 186 bp, Gossypium hirsutum
  Clone ID: LIB3148-059-Q1-K1-B10
ggatgatctgctaaaataagaatgggctcaaactgattcttttaacatattgagttcaaaaactttatgtactgaagttatggcgactccccaagatacaaagatagagactgacttgattctaaaaatgagcatttaacctctctgaatactatttatagcaatcacgagtgtccatacatggaa

SEQ ID NO: 37113 - DNA, 399 bp, Gossypium hirsutum
  Clone ID: LIB3148-059-Q1-K1-B4
gcgttgtcaattctcatggccgtagaaggggtgactacaaggatgcaaaatgaattaggaataatataaggcgagcttactcaactgcaagttgaattcactcagttagatgcacgcttcaagaactttcaagaaggaattaagtcggaagttcgttcggagatctgttactcttgcgactttttttggtgctacatcagggagtcgaaatgttttcctacttgagccatttcgtgtattgctcaattcggaatttgaggacctgttcagaaaaaaggacactttcgaaagatgtgctccatggattctttattatttctacatactgggcataaattttgtactccaatgtttctttgttgtaaatttgataatgtgtgcatgtaatttttaataatt

SEQ ID NO: 37114 - DNA, 149 bp, Gossypium hirsutum
  Clone ID: LIB3148-059-Q1-K1-B5
caaattttatcaaacttcatttctatttatgggggttattgctaactttcaaaattataaatcgatctcttttagtactgaagttatggctgactcccctaagatacaaagatagaaacatgacttgattcttaaaatgaagcatttaa

SEQ ID NO: 37115 - DNA, 141 bp, Gossypium hirsutum
  Clone ID: LIB3148-059-Q1-K1-B7
cgttttcatcgcctcatatgccgaagataattttgcttaaatttcaatgttgttgctattttaaatattgaagagttggctttagatttttattttttgtgaaggttgagtttgatattctataaataaatgttgactttc

SEQ ID NO: 37116 - DNA, 293 bp, Gossypium hirsutum
  Clone ID: LIB3148-059-Q1-K1-D4
catgaccatccagtgcaaggtttgcatgcagacattcatatgcaccacatcagaggtgaagtgcaaggaacatgctgaagcaaagcacccaaagtctgatatctttgcttgcttccctcaccttaagaaatgaaatcaagtttgtgtatttgtgtgattaaatttgaagtttgtgttaaaagttgttgccaaggtattggattcccacacaattcatacttgttttgtgctattatatatggtatacttgttatataaaaaaaaaaaaaaaaaaaaaaaaaaaaaaaaatttt

SEQ ID NO: 37117 - DNA, 397 bp, Gossypium hirsutum
  Clone ID: LIB3148-059-Q1-K1-D6
atgaaagttacattagtttttaaccatttcggtgagggtcttatcgagaggatgccgagggtcaggataggctatgcacatgttgctaacaacaaatacgacgaatggaagatgtacgccatcggtggtagtgcgaatccgaccattttcagcgaagggaacaacttcgtagcgcccgataatcgtagttccaagcaagttacgaaaagagaagcaacaaattggcaaaactggaaatggcaatcttcaaaggatgtgtttataaatggtgcatattttgtaccatctggttatggtagctctgctcctctctatactcgagttcaatcgttcaccgttgctccgggatacatggtccctgttttaacatcaaatgccggtcctttacgttgtcttg

SEQ ID NO: 37118 - DNA, 395 bp, Gossypium hirsutum
  Clone ID: LIB3148-059-Q1-K1-D7
cggacgcgtgcatttggctgaagccagtgttacttccacttgatctaaaattgctgtggggtgcaaccatcttaaagacactaatgccacagcgattgataaggcatacccttgtgatatcatgcaaagagggcgagtgcgggtccatttaaaaaaggaaaatggtactttatggaatccgttcattacttcaaggaaacatctgatacaccaagtacctgtattggtacctacacaccgggaaaggactaagaagcaggaatctacatcgacatcaattgctgctgccggatcttacaaaccctggatgggtggaagaaaaaagcgattgttctcgtactgcctaattaacagaatgttagtgattataccttttaacatttccaattttgcca

SEQ ID NO: 37119 - DNA, 392 bp, Gossypium hirsutum
  Clone ID: LIB3148-059-Q1-K1-E12
gataattcgaaatccaccaaaaaggatcacttctgcttacatctcaaattcaattcgctttaatttaaaatcaaaccaattttttttattgattattgatttgaaattctcaggaatagacaaccaaaacaagtggatttatcagaggttttggatttcaaatacatttcagaaagctgcacttcctcaaggagttgtagcgattaaaaatggattagatcgtccagtttttggcttggaaaatcggtgtggtgtcaatttgactggtctaaggtaggtgtctaggtcatactcatttagtcttcgatcctcttccttgcatcttttgtcgatgaatttgttaactgtctaattacagacgttgatgctcatacaacaccattgtatgcaat

SEQ ID NO: 37120 - DNA, 379 bp, Gossypium hirsutum
  Clone ID: LIB3148-059-Q1-K1-E8
cccacgcgtccggcttttgcctaaactgcctccgctcctctgccatagggtggaggagattcggagaagcagaaaaagggctgttgctgactccggtgaagatcttatttcccaaaatgataatagtaatgaatcaaatggaagtcaaaagctttcctctgtacaaacaaatgatagcaacaacaacaacaacagagaaagaagaagtcagagtttaaaggttggcaatgtagatggccctcttaattgtccaagctcaacaaaccttcagattttacattacacctttggtcaaggataagaagaatgatgataattgtaattgcaaaaatgatcttaagaaagaaagagtcgtttagcaaatccgatgggacggacg

SEQ ID NO: 37121 - DNA, 393 bp, Gossypium hirsutum
  Clone ID: LIB3148-059-Q1-K1-E9
tcccacgctttcttcttttgcctaaactgtcttcgctcctctgccatagggtggaggagggggggagaatcataaaaagggctgctgcttactccggtgaagatcttatttcccaaaatgataatattaatgaatcaaatggaagtcaaaaactttcctttgtacaaacaaatgatagcatcaacaacaacaacagataaagaataagtcatagtttacagtttgtcattgtatatggccctcttaattgtccaagctcaccaagcttcagattttacattacaccttttgtcattgattataagaatgatgattatttgcaattgcaaaaacgatcttaataagaaatagtctcttatcaaatcccatagtacttaccaattccattacatt

SEQ ID NO: 37122 - DNA, 156 bp, Gossypium hirsutum
  Clone ID: LIB3148-059-Q1-K1-G1
gttttttccgggtaaattttcctggctattcttggattcaatatacagggatatttggctatcttttggttaataatgtatgtgtgcatgttctaatgcaaagatgtactctttagctatgaaattcaatgataatatatcagattccttggaatc

SEQ ID NO: 37123 - DNA, 259 bp, Gossypium hirsutum
  Clone ID: LIB3148-059-Q1-K1-G10
accacgcgttcgaccactcaatcgatttttataagaaagggggtggtaaatctctatagggcgactttaatctagcagggtactatgaagccccaaattgacgatgactgataatgaatgttctgtccacataattatatttcggcggcgtcttatgtgaatctcatactctcatctagcatgcttatatggtacaaattaaacactggcgtgtacacgtatactgaaacctgcgaccacttatcgcttgataatccct

SEQ ID NO: 37124 - DNA, 341 bp, Gossypium hirsutum
  unsure (1)..(341): unsure at all n locations
  Clone ID: LIB3148-059-Q1-K1-G12
cccacgcgtccggattcttgagttatgtggtgtattgcatgcgcatactggatggaaacgtacggatatgagaggaataaaaaagaagaagctatggctgaattctaaataaaaaaaaaaaaaaaaaaaaaaaaaaaaaaaaaaaaaaaaaaaaaaaaaaaaaaaaaaaaaaaaaaaaaaaaaaaaaaaaaaaaaaaaaaaaaaaaaaaaaaaaaaaaaaaaaaaaaaaaaaaaaaaaaaaaaangggggggccctttttaaagagcccaaattaactccccctggtttgccaagatatatttgttattagggggacccaaacctaaacttacggccaatt

SEQ ID NO: 37125 - DNA, 196 bp, Gossypium hirsutum
  Clone ID: LIB3148-059-Q1-K1-G2
cccacgcgtccgatttaaaccccatcagttttgttgtagttattaagtttcaaacctcaattaagtacaacaaaaaccctgtaacaactaagaaatttagatgcaactgatattttagtctctatcttcttttcactaaatattatagacaaaccgaaaagaaatgacataataacttatttggctcctttcattt

SEQ ID NO: 37126 - DNA, 424 bp, Gossypium hirsutum
  Clone ID: LIB3148-059-Q1-K1-G3
ccggtgcggtattcgggggtccgccacgacgtccgcccacgcgtccgctcatgccaaaggcattgtccttgataagatagggattgaagctaagcaacctaactctgctatcagaaagtgtgctcgagttcaattgatcaagaatggaaaaaagattgccgcattcgttccaaacgacggttgtttaaattacatcgaagaaaatgatgaggtgttgattgccggatttggacgaaagggtcatgccgtcggtgatattcccggtgttagattcaaggttgtgaaagtgtctggtgtttcattattggcactttttcaagagaagaaggagaagcctagatcctaatgttgcaacaatgaggatatcttttatgatgttttcatagattgtgttttgcggattgaatgtaaaagcaattgtgtt

SEQ ID NO: 37127 - DNA, 394 bp, Gossypium hirsutum
  Clone ID: LIB3148-059-Q1-K1-G5
cccacgcgtcctgccacgcgtccgcccactcttgcgaacagccgtaaccgaggcgtgaaggtggatgatcctatgctattagcatcttctgttcatgtgatcaataaaaccattgatgaagacaggtttgatattccagatgtacctatggcggaggattgactttactatggctgaccccattgatgccttgtattttgatagggttgctggacgaatccccttaagattaaatgtgaaagctgggttgctgagatgggatattcgctaggagtaagcatgaattctcaaggtgggggcttgccaattagaagttattcgagaaggttataccataatggcatgtaatatatgattgctagtaagggatctttacaattctttgttctttttt

SEQ ID NO: 37128 - DNA, 385 bp, Gossypium hirsutum
  Clone ID: LIB3148-059-Q1-K1-G6
acggaacaaaattcacaacggagaaagggttttctccaccctttgagataccccatttcgaactccggggaacggatagctcggaagatgcaagaaatttctctaatgaaacccatctctaatggggatcaatggtgggaattaatcagggaggatgatttgccaagtctcgaccaagagacagatcctgatctgctgctgctgctcctcaaatacaaggtccatatcttgatggagatgatgaagcttttcaccaatggcagtccgaaatagctcgtcttggtatttaggatatataggagattagtatgatgtatcctaaacttaaggataatttagtcttgtaattatccatattttctttatatagaaattcaactttgat

SEQ ID NO: 37129 - DNA, 382 bp, Gossypium hirsutum
  Clone ID: LIB3148-059-Q1-K1-H10
gaataatcgaagacaagttaaacatttcaaagtatttatcctggacattttgttcgtgtatgtatggaaagaggaagcctgatcctgatttctatttggctgttgtggaacatcttaaagttgatccagcaagctgtatattcgttgatgacaggataaaaaacgttgaggctgctgtatgagttggcattactggtcttcaattcaagaactcagatttactacgtcaagatcttctacggttgggggttgacattgcaatagatgcacagtgaggatcatcttaatgctgcagaatgaacagacattgtgacctccaaacttgcattaaactatatttagattttgtccatttttgctcttctgcctttttaaaaattat

SEQ ID NO: 37130 - DNA, 394 bp, Gossypium hirsutum
  Clone ID: LIB3148-059-Q1-K1-H12
tctctattatgatttacgaatataaatatgaagtgctgaaatgatgatcatgtaaaagaatattatatataaaattcttcatattattttaaaagtataaataaatacaaccatttccatattagctgctcacgaatgtttgtagtggttttattatgctccttatggggtgggtttgggtatgaatatgattaggttgtttcattgagggacggaagttttctggctcttcagtcgtaatttgttctgaaaagagaagtaaacaaattgtgctttttgatcttatctggttggtcttatttgttacaaggcaacttcttggtgtttcatcttttccttcccattaggatgttcttttgactcttcaacccaatgtcatttagttttgtaacca

SEQ ID NO: 37131 - DNA, 394 bp, Gossypium hirsutum
  Clone ID: LIB3148-059-Q1-K1-H3
gtgggcttgcacattgttggaacctttaatgctgatacggggttcaaagccggttatttaaacgagttataaaaatgttagaaaaagctttacccaatgcattctatgcatcatgcatcatgaattacttttcatcactactattttaattacattcacttatcatatattctctttgtaacctattccaacttatttatatgaaatataaatgagattgatattaattcttagataaaaggatgtgaaagtgtcatggagtttaattattggcacttttcaaagagaagaaggagaagcctagatcctaagtttgcaacaatgaggatatcttttatgatgttttcatagttttttttgggattgaatttaaagcaatgtgtttctcgttagc

SEQ ID NO: 37132 - DNA, 311 bp, Gossypium hirsutum
  Clone ID: LIB3148-059-Q1-K1-H6
cagaatcgaacctggaatcgctgatggtacagtaaacagctgttgcaagaggaataaaacgagtgaccattaccccaaagcaggaatctcacgttattgttcaaaggggagcgtctcatgctatcaaggggcagtagatattaattctaggatgaaacgggaaaccagatcaaggactcgtacacaccagaagtctgggatgtacagtccagctcatttaagttgatataaagtgtacacgagcaattagggtgcaagatacacttttacgagcatgcagcgtgaactgaggtataaagggccaactattg

SEQ ID NO: 37133 - DNA, 309 bp, Gossypium hirsutum
  Clone ID: LIB3148-059-Q1-K1-H7
cccactcgtacgtccactcgttcgctgtacttaactcagccgatgcaatgcccatatactagcgaccattattcggttgcacgaacctaacttaatatttccaacatgtccttctcatgctttagaggaagatgcaatgctactagaaagcttcatatattatcctggaaaccaactttagcactccttatttcttaataagaacccttagctcagtcagcctgtttgatgctatcaaaactgtataaatgctcgttactcagcatatctagctcgatcttgcaaagagcaaactggcggatcataatt

SEQ ID NO: 37134 - DNA, 222 bp, Gossypium hirsutum
  Clone ID: LIB3148-059-Q1-K1-H9
cccacgcgtacgcccacgcgttcgccctcttttactcccacgcatccgggctctgctacgagcgagtaatatacatttttatgaaccaccgcctaaagctccaacaagtcccctttttggtcccatgctaccagccactgttgctgacttgcatcttcttctgtcaaacgctccgtctaacatcactcgttacttttgggcactctccatttacgaggttga

SEQ ID NO: 37135 - DNA, 275 bp, Gossypium hirsutum
  Clone ID: LIB3135-023-Q1-K1-H2
accgctgatgtggatgcgttttagtgcacaatactcgggcagttagcagggggataagaagggtggtgagaaacaaggttttgaggtggggtgcgttacaaagagttacctgataggtgtggtggtggtagacaatcggatcagttacatctcaccttttgggatagctttctgtgtcgatatggactatgatgtcaaagattgacttgactgcacgatcactattctctgctattttagtactttttattatatttcacaactgtatgtaaaaa

SEQ ID NO: 37136 - DNA, 234 bp, Gossypium hirsutum
  unsure (1)..(234): unsure at all n locations
  Clone ID: LIB3135-023-Q1-K1-H5
ggaaaggtggcttacaaattatccttgccttcttcagctcggatacaccctactttccatgtgttgcagttgaagaaacatattgggacggcggtgagtgcacccacattacctcccattgggtctgatggagctttgctcaagtccccagttcgaattttggatagacggttggtcaagcanggtaaccaggctgcagtggaagtactagtggaatgggcagacacgttccct

SEQ ID NO: 37137 - DNA, 355 bp, Gossypium hirsutum
  Clone ID: LIB3135-024-Q1-K1-A12
ggaagggggtagggttcttaacctgtcttgaataggtgagattggaatgagagatggtttgatatgagcggacagggccaactcaagttcttttgttaattaagggcgttcgattccatttctttcgtttcttttagcttttatccttcactgacatgactaaaatatatatatgtattatgtaatgtgtgggtataaccgtaaaacgaaaatggaaatcctttcctctaatgctcataaaagaataaaaaagaattataataacataaagcaacccatcaatagatgaacataaaaaggactaggaaaactttgaccgaacgaatagagatcaactcgtatgacattttcattg

SEQ ID NO: 37138 - DNA, 367 bp, Gossypium hirsutum
  Clone ID: LIB3135-024-Q1-K1-A3
gcgggtagctaaggatcattccatatatttatactagcaccattaccaattcgccacagtatcccatctggggtaaatccctagcactacaaatgcttctccaggtaaacaatggaacgttttcggcagggcaaaatattgcataacgtaaactggtatagcttgtaaaatcgacttaacaaagacctttccccccatagataaatagcgcaaactctaacctttgttcgtcttctaaaccagcgaataaagttagcaaaagcccaagtatttttttgtccgaccatcataggcaaccctaaatacttctcaagatttgaagccaccctaacacccagtaatttgattatgggtttttttaacattt

SEQ ID NO: 37139 - DNA, 281 bp, Gossypium hirsutum
  Clone ID: LIB3135-024-Q1-K1-A6
gtggaaacatgtctccaacatgttatgctagtgatgtatgttaagaaaaataaaataatgagcatggcgatgaaaaaaagagtatgggctcatccatacgccttcgtagccgccgatgatcatcccctgacggctgctgctgctgccgactcgcagctgggtggagatgtgcaggttgttgtgctcgcggctgcgacggctgcatgcagcccgcacttcatagatggaggctacaccaccgggatgtacagcggctgctctctcagcttatcaagaagggg

SEQ ID NO: 37140 - DNA, 313 bp, Gossypium hirsutum
  Clone ID: LIB3135-024-Q1-K1-A7
aaagacggcacccggatttaaacttgaatgatggtgtaaggcgggctatccctaacatacttgcaggggaaatgcttgtagccgccagcattaatacgcaggctacctgaggcactgaaaaaatcgctacagacacagacaacatgctttgcattgaaaccaatacatgcatgccctgccatacatcatcctatcgacttttgacacccaactgtaaaaggagagcaagatacatcgaatcaagtatgatgcaccaacatcccagtgtcttaaatgcggacctatcacatatgtactataggcgacttgcatg

SEQ ID NO: 37141 - DNA, 320 bp, Gossypium hirsutum
  Clone ID: LIB3135-024-Q1-K1-B1
aaaaaaaaacttatctggctcgttgacgtggtgacatctcctacttcgatatactccctcgccgccgaacactttcaagactacaacccccccacatagatgccatagcctcactgctttaactctcctttcttcgtgtcatagtaaactagacatgctctctccttcatccgttgcgcatacaatcatcggaagaggtattataacccagcggagatgaatctaccgctcccaatttttatatgcaacgtgcatttaatcaaatcctctaacaagaagggactgccttacactcttgctgtccattaatttgatgattg

SEQ ID NO: 37142 - DNA, 405 bp, Gossypium hirsutum
  Clone ID: LIB3135-024-Q1-K1-B10
gcgtccgcctccattttgtcttatcccgtataacataacattggagttgtatgtagagtcgtagattgttttaaatggtgatgtaaatagtcatcgaatgaggatggtttgtgtcagccatattgttgtaaatgttgcttcagtccggaaaggatctcttctttactgaattatgatgatagatattcattcagtcaccatgactttttcaaccaaagagaatcaatttgttggaaatgatcaaacagtggaagaggtggggtatcccttcatatgtaaatatatgtatggtcacactttcttgaattcgggatggtcgtgtcaccatattcaatggacaaggttgcttgtgttgcgttaatcgtataatttaaagagagaaaaaatatatatatatttatatat

SEQ ID NO: 37143 - DNA, 392 bp, Gossypium hirsutum
  unsure (1)..(392): unsure at all n locations
  Clone ID: LIB3135-024-Q1-K1-B12
ttttttattatctttcaaaaaaggttcaacccaatgaaaaaaacaccgttctagtcaaacttcattgtccatgtacaaaacctantccacctattacaaagattattaaaattattctctttcccaaattaaagcaacttataaatcctttgaatcaaaacaaaaaataacaaatatcttttcttctacctgtttttttttttttttttatcatgttttataattttgtgacaaattgttctttgtactctgaaaatatttattcaaaattaccctataattctattgtatttatcctacatagcttcaccatgtatttcttaactagtttgataaatattatttgtggtcgttaatttttccctttaaaaaaaaaatctggaattttgcac

SEQ ID NO: 37144 - DNA, 422 bp, Gossypium hirsutum
  unsure (1)..(422): unsure at all n locations
  Clone ID: LIB3135-024-Q1-K1-B2
gcgcggncgctttgctattcttttttctntttgttgtaaaagaaaaaccttaaatagtaaagatcaagagccgcaaatcacgctgtccaaaagaataaaaattggtctcatttaattgaaaaactgttttgtatatgaaaaattcggattctgctctctattttctctatatctggactgtattcccccaatacaatggtttatttgggtttttatacctgaaaatacagccaaacctctattttgctgcgctttttccgcaggcatggcgacgtggggcgaacttggcggagcggcgcgcgtggaggtgaatgccgtgtgtggcgagggctgttggaggcggcatcagtanggattttttctgccaaaaatgttaaggttttgggcccttttgggcttaaggtttggtggtttatttttgg

SEQ ID NO: 37145 - DNA, 281 bp, Gossypium hirsutum
  unsure (1)..(281): unsure at all n locations
  Clone ID: LIB3135-024-Q1-K1-B4
cgggcgngcggataanataagcaagctgcctatatggaggccatcaagccgggaatccctaactcaaaatggaggcactctggcgtgatggccatgccttgcctagagcgaaacttatagaacttcttcaatatttgctggtcacttatatgcatcataagtcgatgctaagcatatccaggtatagttggaaacgctgaaacctgacattttaatttctttgtctctnggaaaaaagcccttcaaaaacaaagcaccttgggagaaccatacccccacca

SEQ ID NO: 37146 - DNA, 223 bp, Gossypium hirsutum
  Clone ID: LIB3135-024-Q1-K1-B6
gcgttcggagatttttgcgagaaagtgagaggtcgagagagaaaataattcgcagggaatcaacgagaggcggccattttactgcgagttgtctctacaatcttctacggctatctgatctatccgacatcatgacaacatcaaggcgtcttgcataaagaaaggtggagaagctccaaacgaacataacaaatgagaggagctgcgcctgagacacaccaca

SEQ ID NO: 37147 - DNA, 359 bp, Gossypium hirsutum
  Clone ID: LIB3135-024-Q1-K1-C11
gtaactgacatacctgtctgaatggactttatagcctctcgtacaaccgactataaacatcctatgatcttttttaacacactagcagtgcttgagcttgtcatcgccaagttccccaacatgcacaaggtcccgatctttggaatgaatgcagacaagtgaatgagtctccccttaaagaatagttggctttgcctgctagaaagccactgctgcttcccctatgctaaaaacgggcatcttttgtataggaggacatttcgaaagctgtcttttgattttttggattttgctgagtctgcgagactgcatttacaagctctcttagatcaataagtgtacagtggagaaatctaatg

SEQ ID NO: 37148 - DNA, 267 bp, Gossypium hirsutum
  Clone ID: LIB3135-024-Q1-K1-C12
tttaccatttcaattccttcgattccgtcacgttactgggtggcgtacatatgtacaaactaacataatatcttaaagacctgagcaaatacatggattggtaagggttactgtagttaagtcgtaattaaaggaataagcatgtattgatatatttggtgtacagcaaaaagtaaagtgaaaattaagtattaaattatacatgattgatataaaatattgaatatgaataaggtacgggtgaaaaagaaagtgctgtaaatatat

SEQ ID NO: 37149 - DNA, 296 bp, Gossypium hirsutum
  Clone ID: LIB3135-024-Q1-K1-C4
gcggtcgctgacaaatatggcaggggagtacccaagatctgtactgatagcccttgttattttctctcggggggagtctcccatgttaccttgagttacggctcgtcctcctgttgtctgacctgcttgcgtatgttgcggtccttcaccaccaggcggatcctgctatagctgcggatgcgcttaggttcaatctccaccctccgaaatggcaactacttgtgattgattactggatttttgtcgcttcaagcatccatttagtagctacataaatcaacctttattttcttttc

SEQ ID NO: 37150 - DNA, 331 bp, Gossypium hirsutum
  Clone ID: LIB3135-024-Q1-K1-C6
cccggggcgaggcaggcgtccgcccactcgtccatgctttctgatgtttcaatcttattatcctccggtcttctcatttctaaggatgaacactgacgataagttgctgtgatcgtcataaaggacctgagatcatttttttaccttaggtatcctgcctttgatagatctacatatgcatcatatcttacgaggttactaaaatttaaaaaagtaatgtatggtcgcattacagaattaacttgttcctttttaattgcttgcttgatgcatccctctaatctctgctaatcataatcttgattgctctaatgttttgagttgtaacaaa

SEQ ID NO: 37151 - DNA, 311 bp, Gossypium hirsutum
  Clone ID: LIB3135-024-Q1-K1-C7
tcccttggcacgagaaaacaaaattatcttgaacccttttggggaggtgcatttgatcaggcaaaccgtttgaccataaggcaaggtatccaactctacttcccagtgtttgagtgttcatatatatgcatagaccataaggaaattatacatattgactaacaaaaaagtttactagctcggtagataaattagaacacgctttagagttcattacgatttaatcttcatatatatagacacacatatacatattgtgcttttgcttactcgggctagtgcttttattgtgccttttgcatgacgtaaaa

SEQ ID NO: 37152 - DNA, 395 bp, Gossypium hirsutum
  Clone ID: LIB3135-024-Q1-K1-D11
ggcactgggatataggggaaagacgccatttttggtagggtttcctaacgggcaacgtagaatctaaccggtcaacagaaaaaacaagcggggttgattcatttgcaacaggtactcgtatttttacgggtagtaaaaggggttcactcttctccttaacttcagagctttcgtagctttctttcactcctggtaatcatactaaaaggctagctcgataaaataaagggatatttaaggggctattttatcatgctttctaactggcttacttactcacctcctttaatacagcggtttacgcgagaagggacaaggcaggatggatggcctatgaactatgcaactacaacctactagctggaccctattcgcgctcgcttagatcagcattc

SEQ ID NO: 37153 - DNA, 405 bp, Gossypium hirsutum
  Clone ID: LIB3135-024-Q1-K1-D12
ggaaaaaaacgccgttgccagtgttatgatcttatcggactgtcatgatgggcagggacagtccaatccgactaatcagaaccttccagttgtttccaccacgcgcttggcccattcggatatccccgtacacaccttcggtttcggatcgtgcactcacgcgccaaacaacgatgccttttgcaaaatcgtgaatggtctattgagcgtcgtggttcaagacgtgaggcttcaactcggattctcatccggttctgccccgactgagatatcatcggcctattcattaacgactcgaccagctttgatcgggtctaattcggtgcgagttggagatctacatttgggcgaggagaaagacttattagtggaattgaaagtaccagtaacgactcgcgggtccca

SEQ ID NO: 37154 - DNA, 257 bp, Gossypium hirsutum
  unsure (1)..(257): unsure at all n locations
  Clone ID: LIB3135-024-Q1-K1-D4
ggcgaaaaatgtcgtcgtcggggaggaagatcacccttaagagctcatactgcgaatcattcnatgttgaggaggctgttgcgttggagtcacagactattaaacatattatcgatgactattgcgctgataacgggataccgtttcctaatgttacgagcaagatcttagcgatcgtgatccattactggcctatacacgtcaccgctcctaagacagaccatcgatccggcgattacgaactcaagagacttgac

SEQ ID NO: 37155 - DNA, 385 bp, Gossypium hirsutum
  Clone ID: LIB3135-024-Q1-K1-D5
attgaaacacctttctagggcgtctgtatatagtcctacttacgaacactgagcttgccattttattcttcctggttatcttccatgggaaatcttccttaattcatgcaaacgcttacaaataatcaaatcatctgacgcacctttacttaccccaacaccagtacacacctgccttaacacatgctaaggtacctttaaaaacaacactcccaattaaaatcaagccagatcaaaatcaacattctatatcacatcaattaactttagaaccaacatcaaataaacggtttcaatctctctatcatcaacaacaaatattaataaaaattacccaacatatattttcatctttatcaaggcacaagaaatcacatcataaaaa

SEQ ID NO: 37156 - DNA, 347 bp, Gossypium hirsutum
  Clone ID: LIB3135-024-Q1-K1-E11
gttttatatttgattttttttatgggaagctggcggaattgaagttttacgggtgggagtggatcatgtgactaaccattacgtaaaagttacaacctcccaatatatactttcatattctcaaacatttgtatagcatatttctgtacatcatctttgtttatcctctacactgaatttcaacttccttcatttattcgtttgtatctgtaggaaatataaacccatacaatcaatgggttctataaatacactgtatacacatttacgaataaaagaaaattcaatgtcaaaaaaaaaaataatttgccccttgactttcttcaaaaatgccttaaatctctttc

SEQ ID NO: 37157 - DNA, 310 bp, Gossypium hirsutum
  Clone ID: LIB3135-024-Q1-K1-E12
cccacacatccggtctcttactagagtttcacagacacccctgttacaaaactcacgtaagcttcataagcgaagaaatcaaaattggcgacacaaaaacataaaaacgaataaagaaaaacaaaatcgtgccatgcggcggcagacctaatacgtgctatggtatcagactcatcatgattggattgtttcttacttacatagtgatgtgcttgcttataatataaattacggttaattacaccaatgtcctcactgaatacacatttacgaataaaaaaaaatacaatgtcaaaaaaaaaaaaatatt

SEQ ID NO: 37158 - DNA, 319 bp, Gossypium hirsutum
  unsure (1)..(319): unsure at all n locations
  Clone ID: LIB3135-024-Q1-K1-E2
gcgcgggcggtcgctgacaaatatggcaggggcagtactccaatatcttttcttgatagacccttgttatttntctctcgtgggggtgtgtctcccatgtgtacctgtgtgttaccggcttcgctcctcctcgttgtgctgtccctgcttagtgtatagttgcagggccctccatccatccaggccggagccctgcttgtaggctgcgcgattcttcttcgtgctcatatctccatccctccgaaatggcgaactccttgagatattattaccttgattttatgtcgcttcataggagtccatttattatgctacataa

SEQ ID NO: 37159 - DNA, 265 bp, Gossypium hirsutum
  unsure (1)..(265): unsure at all n locations
  Clone ID: LIB3135-024-Q1-K1-E6
aattttcttagcaatttcctcttgaaatatactattcatcacatcccttctccntnnnaggggagagtattttaaaagagggcgagagtcccttctaaaaacaattttaaattaaataaaaaactttatctatcaaatctaccaacaccaaacttaataccacttgggcccccccttttaaacaatccaactttacttacccgctcatgcaacattataccttttttatattttcacctacaataaattcactgccccccttttt

SEQ ID NO: 37160 - DNA, 379 bp, Gossypium hirsutum
  unsure (1)..(379): unsure at all n locations
  Clone ID: LIB3135-024-Q1-K1-E8
catgtttttttttctgaaatccaacaaggccntnatagtaggtccattttcgatacgctgagcgcacatcttnaatctttatatccttcaacaatagaacacctcttctcccctatgaccacttttattttacacctatttataagtaccttaacaatgccattctcattaattcctccaataaaacatcaaataaatctctctttatctactctctcaatctcttcaacttccaacatctaattcccaccctctacaccttccacatatactttaatcacatattttaccacaatgcacttcataccataaacaataaattttcttctttcataacaaccaattagcttttctaatagatatttaatactaaaaataa

SEQ ID NO: 37161 - DNA, 409 bp, Gossypium hirsutum
  Clone ID: LIB3135-024-Q1-K1-F10
cccacgcgtccgcccacgcgtccgccagaattgaggccaaaggcacaggaggtttggcatcatccgttattttggagttctgagatgaggctttcatttcttcgagaggctagtgatcgtgttgaattggaagacaggaagagtgcatcagaagtattaaatgaattagaaagtattgcagcagtagctttggatgggaagtgggatgaaaagctggaacctgcattccttaataacattggacactataggagatacaaatttgatagtgttcgggacctactgcgggtaataaggaacaagcaaaaccactacagggaaattcctcaagatatccaagaattattggggccacttccagaaggatttgatggttatttctctagtcgatttccaaaactgttgattg

SEQ ID NO: 37162 - DNA, 407 bp, Gossypium hirsutum
  unsure (1)..(407): unsure at all n locations
  Clone ID: LIB3135-024-Q1-K1-F3
aacaagacccacacgctctgtttcagatgtggtctccgcaacttccacctccataaaagccancgggcggccttatcatagggcgtttggccgtaatattacataaaacctgaagacgaataaactatctcgaataanagataccatacacctcatctcaattggttgagaaagaaaaccacattatttgaccagaaggatcgacaatcccgcaacgaaaaaaaactttccaagaacataacaccatcttagcgcggaaggaggcatccaacttagagttctactcaacaaaagaaacgcaagcacctattaatggatgattatgcgaattcgggttaaaaaaagaagtgagccagtaattttaactacaaattttgggcctaaaatcttttatatttattttggtt

SEQ ID NO: 37163 - DNA, 386 bp, Gossypium hirsutum
  Clone ID: LIB3135-024-Q1-K1-F4
aaaacaaacatggcttccatctactggtgcgggaatgcggaaccaaccttaacctaccatcggggatgtatcccctgcggatgtgtatttcgaagcgggaacacaaaggtaccctttctttcgccaccaacgatgataccaacctcaatctccagaaagaacatatgtttcggcctctatttgagactcttgattatcgggggattcaacggtataggaccaccatgaacagtaaaagctgtgggaaaactagagggctacattgatgatgacggtcctacattaacggataggcctggacaatttcatatgggacctatacgagtggttcccaaatgtactatatctgggttcagaaccaaggccctgacgagctcatctgaaac

SEQ ID NO: 37164 - DNA, 321 bp, Gossypium hirsutum
  Clone ID: LIB3135-024-Q1-K1-F6
aaccaatctacatcatctccactgtcttgtttttttctaaatccaacaaggcccaatggtgcttcaatccgatacgctgggcgctaacaatatcattatatccttcacaatagaacacgtaatccccctaggccactgttttcttcaaacataaataataccctttcaatgacatccgcaaggattcccccaagaaaacatcaatgaaatctctcgtcaagcgctttataaagctcatcatctaccaacacctgattcccaccctttacaccctttacgtatacttgaaatacgttcttaccggctatgcactttaaacca

SEQ ID NO: 37165 - DNA, 420 bp, Gossypium hirsutum
  unsure (1)..(420): unsure at all n locations
  Clone ID: LIB3135-024-Q1-K1-G10
ncccacgcttccncccacccctcctagcttcttcaccttctccttcaatcagtttcgctccatttcctaccccatcaagctaacctgctccaacctactagcccactgcctaccaaggccctcctccctctgccagcctccaccaacggtaccttcattgatacaatcgatcttgccaacactttctttaatgcacctttggcttaataaagtgaacctaagaccatcccttttgggctcttcatcatgattctttagaatctttactttcatgctctcttttcttctttataacaatgtttacttctcttactttatataattcattacaccctaccctaaccgttttgattaaattaattgctatgtatgtttgatgattacgattctattattnttacttcccatggttcattttat

SEQ ID NO: 37166 - DNA, 419 bp, Gossypium hirsutum
  Clone ID: LIB3135-024-Q1-K1-G12
aaaactgcacgatgcagctctgcctaaagccctggaagagttggagaccaaactaggagaagttaaatattcaatgcattatttgaatatttcttatgctgaaagaaggaacaatcccgaaaaatatggttttaaggaggcaaatatagcatgttgtggaagcggtccatacagaggaatgtttagctgtgggggaaggaggggtgtgacaaaatatgaattatgttcagaccctaatgattatttgttcttcgactctgaccatcttaccgaaaaggcctgcaagcagattgcccagctcatgtggagtggaacacccaatatcacgggaccttacaatctgaaagcattgtttgaagtatgatatttgatttgatccaatatcatctcaacatgattactttgttggttacctaaat

SEQ ID NO: 37167 - DNA, 298 bp, Gossypium hirsutum
  Clone ID: LIB3135-024-Q1-K1-G6
cctatgaatacttccgaccctatcacaatcattacctctaagtattacgctttcccacatataaactttgtacacttgaatgaacctacctgatacactagcacattcttcactatctctactaattgatcaaaacatgcccaaaatgatactgacagccttctacactaactattacccataaacaaacatgtatgcccacatcaatgaattgatacctttttaccctacactatatacaaactccttaataaaaaaaataaatgcgacaactatatatttctaacctcttatatat

SEQ ID NO: 37168 - DNA, 340 bp, Gossypium hirsutum
  Clone ID: LIB3135-024-Q1-K1-G7
aattccggggcgagcgcaggcgtccggcaagacctggtgcgaaaagacacaatcactaaatctgtggctgacagatagatgtattggtggggggatccatcatccggagcaagatgcccactttgtcagttagcgattatatccagggaggagtgtaggtattagctcttgctcacacgtttattcgtaaaagatttggcatttctacagccgatcagagagcttaaagagaatctgagagctaccatgtgtgtaacagagcactaggctgtactctgacgttgagcccccctaatgaaaactggcggtatgacaaggaaattgagaggcagcagcggca

SEQ ID NO: 37169 - DNA, 350 bp, Gossypium hirsutum
  Clone ID: LIB3135-024-Q1-K1-H5
ggcgacgactgctattattatttttcaatgcatatcaaatcttttgcgctgtcagatttaaaccgaaatgggagtggaccgaatgataatcaccttgtcacaactattggattgttcttttatgtggattatgcatgtatgtattcgcaatactcctactgtatacagacaacctacctcttatattaacatagaaaatgatatcgctgcctgagcatcatattatctcttatgctattgctctctatgatcctgttaccttatcttctcgcaggcttggctgacgtaatagtgacggatgctgctcgaccgtagtgcatcaaactgaccgaggctacttaaaggctact

SEQ ID NO: 37170 - DNA, 370 bp, Gossypium hirsutum
  unsure (1)..(370): unsure at all n locations
  Clone ID: LIB3135-024-Q1-K1-H9
ccactcgttccctccttattttatatccttcacaaggcctnccaaccaagtgctgtaaacattcaggctcctcatcctcctcataataagtctcttgaataggacttttctcatcacacaactgtttacttccataagctcctcctacctttattgacttcatacacatattaaatataccatgttaacatgactctctcaaaaacacaagctaatttacttcatgagaaaatttcaaacaaatcttacattgataacgatgtcataacgctttttgctacaacaagcaatgcacacatcaatgcaactcttaatcactacaaaaatgaatattaaaatgacataaacaatgacttgatatctgacccta

SEQ ID NO: 37171 - DNA, 339 bp, Gossypium hirsutum
  Clone ID: LIB3135-025-Q1-K1-A2
cgtgaattcagacgttataaaaatgttttcttgcggaaaatttacaggtctaagagaactgggtgcgcggtgatgcatgtgtcaagacattgtatcctttgctccaagatgggttcggttctaatgaatgggagtggttccagaattccctatgggatttgagaaggaccgcagaggaactatcacaagggctggataatcttttcaaagcagtagctgggtatttcaaaatagtttcgactgggggctatgctttgctttggaatctaaaaacaagcgttggtgtcccaaattcaatgctaggaagaaaagtcaaagagcaagctcttagatgaatca

SEQ ID NO: 37172 - DNA, 189 bp, Gossypium hirsutum
  Clone ID: LIB3135-025-Q1-K1-A4
gtttgactttcagttattctttttctttttaatgcaaaaacgccagctttttaatagagagatctggtatttagagatgaaccgaattcaactgacagtgacgttaacagcctgagtttttaggagacgaagctgtctttaggattgccaggggtgggacgatcgtcatctggagctgtataaatttgt

SEQ ID NO: 37173 - DNA, 363 bp, Gossypium hirsutum
  Clone ID: LIB3135-025-Q1-K1-A5
cccacgctaccgactactcgtacgacaatcttaaggactactttaagcttgctgtcggcagaccggaatgttactgatgagtaggcgtgccacatggaatgtggaacctctggaggatattgaaggagctaaacccgtggggcacaagataactgaacctattactgccgtaccaccccatgattgatgatgatgcggctttgacttcgacaggacgtatgttcaacgattgtcttattgatgtggctgctgctgaactatgctctgctttgaaagatgtggcttcctcaagtagaaaaacaactgcgcagtctggtggttggacttcttctgatgatgaggctgatcctatggatcatgatg

SEQ ID NO: 37174 - DNA, 264 bp, Gossypium hirsutum
  Clone ID: LIB3135-025-Q1-K1-A6
accggaattgaaggtccgggccgagccacccgtgcgattggacgctttatcaagatcgtgaatggcaaaatgaccccgtgtaatatacaccagtctcggttgatcgattgctgcagatttgaaatggtaggtctccttagagcctgaaacctgaagatttggagtttatctggtgatacccatggcatgttcgatcgttctcttgcgctatatgaatttgtgtaaataatgtgttcagagttataggtgggtattttaaaatcg

SEQ ID NO: 37175 - DNA, 241 bp, Gossypium hirsutum
  Clone ID: LIB3135-025-Q1-K1-A8
gcgaccacgcgtcaggttatttctcttatttcaacacaccacctccacaagcatattaggatcaggggcgttgctacttactgctataaatcgacctctgcagacacccctacaaaacttaccaaggctattcatcttgaggctcacatggggtggcccaaacgtgctcttaataacgttaaatgcgttgagcttaaagctaagcttgcccttggaagtatcgtaaagaccacctttgttg

SEQ ID NO: 37176 - DNA, 430 bp, Gossypium hirsutum
  Clone ID: LIB3135-025-Q1-K1-B10
gggcattttacgacccgacacaggaaaaagcgataggcgagagggcaaagactgaacctatccccttagtaagggagaacgggcactgccaaagcagctttctcttctaggtctaggaaagaacatcgtcctgacagacacgactggattcgattgattgaaagccttagcttgagccttttatcactatcacaaatagaaaaaggaaaaagcaccacaaaaggacccctgacttattagcgagagtcgagaattcaaaccccctcgggagaaagaaagtggtgatgattgccatgaatgctgcttccaaccaagatattgttctcctcgatgcggttcttttcccgcgagttatattgtgctttcatacccggacttcgcatattacttggcacctgccttcaacttcaaagacatctctgcaaatagc

SEQ ID NO: 37177 - DNA, 256 bp, Gossypium hirsutum
  Clone ID: LIB3135-025-Q1-K1-B7
cgccaaaaaacataccaataactactaattgaattccaacaaataaataatcaaaaaaggaaagaaggatccaaaacctttcgaaagccctttctatcgttcgctttcattcgactgcttctatcgcgctttactaataacatacaaaggtctttcttttctcgcttgctaagtagggtcacgttattaaccttatcttgctaattaccacgacttgcagttgatggcccttaaagactctgccttcatgccaacc

SEQ ID NO: 37178 - DNA, 133 bp, Gossypium hirsutum
  Clone ID: LIB3135-025-Q1-K1-B9
cccacgcgtacgttatcttagatgatggactgagttggaagttgaattttaaatgaactggacagatgcatagaaataactcatgttgaaatttaattttttcaatgcagagaaatctccgttgactctgttt

SEQ ID NO: 37179 - DNA, 356 bp, Gossypium hirsutum
  Clone ID: LIB3135-025-Q1-K1-C3
agacaccaccgagaagatctctcagcatgatgttagtgacattataggaaggtatattaatgacaataaccttactaacccagcaaaaaagaagagagttctttgtgatgaaaggctttattctatttttggaagaaaaacaataagccgaatcaaagtctatgacttgcttgagacacactatgcagaaaaccaagatgcatgggatgatgacttcttttttagctcagaagaggagaatcttggtgaagaaaaaaaaagtttgagattggagaaaaaaaattaccagaagaaaaggggttttgaaacaccaaaaagctgctttgctgcataaaaccagagaatataaactagtg

SEQ ID NO: 37180 - DNA, 258 bp, Gossypium hirsutum
  Clone ID: LIB3135-025-Q1-K1-C5
acgcctaaccaaaacctcattctgtgtgacattcttagatcatggaggcgtcctattgaggagggtttttgctcaaccatctctaggatatcccatatatgtcgacccctggaacttaacctctatggcttgcccgtatcttccacaaagtcactgtgcactgtcttaaaccgtacgtcctgttcaaaacatcctcttccctatcttaacatgcttggaataaatacttcttttttaccttagaagaatagaattttg

SEQ ID NO: 37181 - DNA, 199 bp, Gossypium hirsutum
  Clone ID: LIB3135-025-Q1-K1-C6
gccacgcgtcccgtcacgcgtcccgtcacgcgtgcgaacaggtgtgtgttcacaacaacaggggcggacttccatgaagaacatggataagttctaaagctaaggaatggactgcagcatttgcgtctctagatagtgcccttatgttatgaatgcctgggcagacaaactgcctgcccaaaaactgattgaattttaa

SEQ ID NO: 37182 - DNA, 135 bp, Gossypium hirsutum
  Clone ID: LIB3135-025-Q1-K1-C8
ccggaattgaagggccgacccaagccacccgtccgcatcattacctaattatgcctagttattcatctaataatagttacagtatcttttggtgaggctatcaagcttaagtgacacaaaacccaacatattata

SEQ ID NO: 37183 - DNA, 167 bp, Gossypium hirsutum
  Clone ID: LIB3135-025-Q1-K1-C9
ttctttatatacataaaaaggtcaatcttgcccagaataacatcgccttgtggcaaaatataagggagaacccatatatataatagctaatgttgtcaaaacgtgaaaaataaacctgctttcctgctaaaataaatatagctggtcactcctttccatttctatcc

SEQ ID NO: 37184 - DNA, 374 bp, Gossypium hirsutum
  unsure (1)..(374): unsure at all n locations
  Clone ID: LIB3135-025-Q1-K1-D10
ccgggcgacgacgcgtccggacttngtggtaagaaggtgaatggtggttggtgtagttagatcaaatgaagtcaaaagtagcatttttttttttttgaaaaaaaatgtggttatggactggaaaatgtttcacattacatgaaatagaaacttgaaaggtgtcagaatcaacaaaaaaaagacaaaaaaaaaaaaactaataaaaacaaaaaaccttaaaaaaaatcaaggtttgggttgacgatctagagcaaccaaaatttctttcacggggatgcaacattttaaatcttttgttggggccccaaaattcattcaactggccgtcgcttgaccactttcatggttggaaacaccctggagtaacccaattt

SEQ ID NO: 37185 - DNA, 367 bp, Gossypium hirsutum
  Clone ID: LIB3135-025-Q1-K1-D11
cccacgcgtccgcccacgcgtccgggatgttcctgattcccttccccatatctgaaaagggcagggagatcttcctctgaataacaacatgaagactgtgttatagctacttctgtttatatctgttttctgtactatgctatatatccagaatggagcaaacaactgctgcagaaaacaacactgctgtagctgcttccattctcctaggtaacattagtctgttgttttgaatttgagttcactgtaatcttttggcctcatgttaaagacctacatgtaagttttcttttcccacaaggcaccatatgaagattgtgtatgttaaatgcgtgcttataccagtgtgacagaaacaaaactatgc

SEQ ID NO: 37186 - DNA, 288 bp, Gossypium hirsutum
  Clone ID: LIB3135-025-Q1-K1-D6
ccggaattgaattcccgacccaacccacccgtccgaaaaacaacaaatcgtatctctttatttcaatcaaaaacctaccagaaaaacatatggggggggcctgattttgacagccaagcttagccaccctgacattcgacgtactagcttttctatagtgacacctaacttcacttgattgtcctgcgctttacatcgaagacaccgctacaaccatggctgtaaccaacttaatactctttttaaaaattccccttttttatacttgcataacatctaacaacctca

SEQ ID NO: 37187 - DNA, 368 bp, Gossypium hirsutum
  Clone ID: LIB3135-025-Q1-K1-E11
tcgagcacgcgtccgcttgaattaagagatttggggtcaagcattgaattggttttgataaccggattgaataagggctggatgctatatgaagttattagcattcttgaacaagaaggggctgaagttgtaagttccaccttttccactgcggggggcaagacttttcatacccttcatgctcaggctaaactttctagagttggtgtagagactacaagggtgtgtcagagactgcaagaactgattaagagttattaatacaaagaagtgctttcatttggtctgctatttgtactttgcttatcgttggagggggatctccaattttacagaactaaaagggttctgagaactttatcaaatcg

SEQ ID NO: 37188 - DNA, 285 bp, Gossypium hirsutum
  Clone ID: LIB3135-025-Q1-K1-E5
actaacttacacagctattctgatataagtgattgagaaaatatcgccggctgcgattggtcgggtcaattccaatactggctgccatcttaagaaagggcaaaagactcgagaaaagtttgagaaaaccctgtctgtgctcatgggagctcttgactttgaaatgcttttgtgatgtagacatggtcatccatgctgctatccataatgtgctactcaagctacacatttttagcgatcttgagaaatactgtgcaccacattgcatacttgcatagtaacact

SEQ ID NO: 37189 - DNA, 356 bp, Gossypium hirsutum
  unsure (1)..(356): unsure at all n locations
  Clone ID: LIB3135-025-Q1-K1-E7
cccacgcgttcggctggttcttgatggcatatttctttgttgcatatcttggagtggtaaggagaaaggagtggcctcactttttcacatttcatgtggtgatgggaatgctattggaaattgccttacaggtgattgggactgtgagccgctggatgccacttgcaatatactggggtaagattggtatgcacttttggacagctgtggcatttgcctacttatttactgttttggagtgcattcggtgtgctcttgctggtatgtatgctgacattccttttgcctgtgatgctgcatacatccaaattccatatgactaanggtggaatgtagtgaaaatggtttgggattca

SEQ ID NO: 37190 - DNA, 327 bp, Gossypium hirsutum
  Clone ID: LIB3135-025-Q1-K1-E9
acgcgtcacactgcccataacatttccaggcgcgaagctcactggcacacctcgttctctttgcagcaggaggggggggtactgaatatacactttactcatcactcattgaggcggataacggctggggctgatcttaaccactagcgccatatgagaagaacatcttatcaagaccactactttcatgcccactttccctgtccgacatgctcaacacctgcgaaggaaaaaaatgctgaagagccctgattctttgcgagatcagcgacgaaaggagatgcaacacgggggactatggactagtgctctatttggctaaaagaa

SEQ ID NO: 37191 - DNA, 300 bp, Gossypium hirsutum
  Clone ID: LIB3135-025-Q1-K1-F2
gattagctttgcagctgccgaggatgttggtttcatctacaacggattccggtcggctaagctaaaccttgatggcattgcagaactcacttccaatggactcctaaagctcaccaataaaaccgtgcaagaaacaggtcatgctttctaccctcaccccgttgatttcaagaactctaccaacggctctgttttttccttctcttgcacctttgtcttcgccatacttacggagtatccaactctcagcggccatggaatcgctttcgtgattgcaccaaccaaaagcctccccggatc

SEQ ID NO: 37192 - DNA, 298 bp, Gossypium hirsutum
  Clone ID: LIB3135-025-Q1-K1-F3
gcgacccgtagcttaagaacaaacctaaaaaactttaaagtgtctttcaagctcgcatcaatctagtggggaggaccttttgtagcaaatgactgcactgactacaattttcgagattgaataaactttcgtttgttgtcatgggctgtacacagctgaaagagaagcaaacaattacatggttattaagatccaagtgttcttgctgctgaaacaccttttacagttaaagaaaataaagtccctggaggagctttatttgaaactaaccacttcgataattgcagatggacttatt

SEQ ID NO: 37193 - DNA, 192 bp, Gossypium hirsutum
  Clone ID: LIB3135-025-Q1-K1-F7
gaggtcggaaagttacgaagaaaaaactgtacttgccgttcgttatgaatccaacggcaagagaaagataattgattgcaacaaaataaaattaagtggaaaagagaaagcatgctaatgtttgatgagttccagaaggaacaatgatgcgtctgttttgatgcaaattaatgaattttgtgttttctctta

SEQ ID NO: 37194 - DNA, 276 bp, Gossypium hirsutum
  Clone ID: LIB3135-025-Q1-K1-F8
cccacgcgtacgcctagctcgcaacagataaacttgtgcaacaataaactcaccgggattggtccgaagtcgcttttaaggttccctagtttgatgttagaaggtaacaatgtttcttttgaaagaatgcctcctcatacgtcaccatttggtgcaccctatggcgaaccgtatacgacatccaagaagtccatgaggctcggagaaactgcattgtcgagaataataattgcttgttgcattctagcgcttgtggcgttggtgtctttcgaaatt

SEQ ID NO: 37195 - DNA, 308 bp, Gossypium hirsutum
  Clone ID: LIB3135-025-Q1-K1-G1
cgtccggaaatcttcaacttaataacaaaaaacttactctcaccaatcactatgaatcctacagccaggaggagatcattagattccatcacaaagcctaaaaatttacagagaaagcctactaatgtttgatgaatatcaaaacccacaacaacccctatacttacatttacaacattaaaaaccatattttttcttatgataaacttactgacaagctcgaatccgaataaaaagagaaagttgcaaccgctgttaaagaatccctctattggctgcatgactaccacaatgtcgatcttgtatac

SEQ ID NO: 37196 - DNA, 458 bp, Gossypium hirsutum
  Clone ID: LIB3135-025-Q1-K1-G12
cccacgcgtccgcttgttttgatgatgaataaagagagagtgcaaactagaggtgttaaggttgatgagagtgtaaagactgggtgtacttatatgaaggttaagtttgatgagaatgggaagttgaagatggagactgttaaggaatctgctgaggactctcttcttagctctgaattgaatcttgctgttctcaaagaggctaggattttccacttcaattcagaggttttaacttccccttccatgcgatctacactttttaaagcaattgcatggtccaagaagtttggggggctcatatttttcgatttgaacttaccattacctttgtggagatcacgtgacaaaacaagggaggtgatcaagaaagcctggaacaaagcagacatcattgaggtatcaaggcaggagctggagtttctactggatgaagagtattatgagaggaagagaaa

SEQ ID NO: 37197 - DNA, 328 bp, Gossypium hirsutum
  Clone ID: LIB3135-025-Q1-K1-G2
cccacgcgtccgcccacgcgtccgcttttttatttagttctatccattcttagtttctgcggcttggttgtttcgaattacatattagaataatgagggaaacaagtaggaaaaacaaaattaagaaatatcaaatataaattacaaaaattaattcgagattagaggattcaaatgcaaacatacatgcaactaagctgaatacagaatataaattaacatctatttaactttttttttaattacagaacttgcttattcggtggtcgtgaccgaaaaatgtgatgtctatagttttggagtgttggcattggaaatattgatggga

SEQ ID NO: 37198 - DNA, 286 bp, Gossypium hirsutum
  Clone ID: LIB3135-025-Q1-K1-G4
tctttactttggaattccagtttactaaataacaagcaagggaggtaatccttgtaaacgaagagagcctagtatttccattgctcgctttacaattatggataggtcagaaacacattattattattattattattattattattcagtactaataaaggacttgcctcttaaaaaaaaaaaaacaaaaaaaaaaaaaaaaaagggagaacaataacaaaagaaaaaaaataacgcccgccgtctttaaaacaacaaaaatttttttaatatttaaaaatcaagg

SEQ ID NO: 37199 - DNA, 200 bp, Gossypium hirsutum
  Clone ID: LIB3135-025-Q1-K1-G6
accacgcgttcgttaatataaacatacaagggaagatcacaatcaccaccaatcgagggcggaagatatattgccccagctaaccatgctaatacatgacaatctctaagcacaacttacatggattgctcaacagagagtagaagactttattcgcgttatgccgtggaggttctacccaaacctaatagtctgtatct

SEQ ID NO: 37200 - DNA, 441 bp, Gossypium hirsutum
  Clone ID: LIB3135-025-Q1-K1-G9
atcatagaagaacttgattcaaaaatacctataggtgaaattaaaggaggcggctattccgtgtgggtgaggtaaagaatttggtttatctccatggagcattgtgtgaggcattaaggttgtatccaccagcccctttcaatcataaggaacctgtcaaaccagacatacttccaagcgggcatccagttcatccaaagacaaaaatcttgtttagtgtgtattcaatgggaagaatgaagtcaatctggggagaagattgctatgaattcaagcctgagagatggattaatgagagaggagagatcaaacatgagtcatcgtacaagttcttatcttttggtgcagggccaaggatatgtttggggaaagaaacatcatttattcagatgaaagccgtggcatctgctctaatttacaattatcgcattcatgtaatgg

SEQ ID NO: 37201 - DNA, 279 bp, Gossypium hirsutum
  Clone ID: LIB3135-025-Q1-K1-H11
aatttatctatccttccggcccttttaaaaaaaactcaaccaccttatatccaacaaaacttcacatctttaatcttttactttctttttctcacctaagctatatcctaattctatactcttcactttatcttctaatcctttcaaatattactaaaccactttacatttcaaaaccttaccaatttaaaatcttatcttcataatctataatctaaatctaaactcttaaaatcattactctcctctctataatctttttcataaaacaattactta

SEQ ID NO: 37202 - DNA, 273 bp, Gossypium hirsutum
  Clone ID: LIB3135-025-Q1-K1-H8
cccacgcgtccggcaatttagaaaataatagaaagaaacgggaaaaacgcattcgcgcctgtgggtggatgccttgactaaggaaaacacatggccgctggagctgccgatggacttatctggtcgctttactaagggtgcatatccggcaacgaaatcagcatcgagcgccagacgtaccacaagaactgtcgctgcgcactccacgataagtcacgagggaactgccctcgctcaatcgctaaaagcaagaacctatcagatgctattagg

SEQ ID NO: 37203 - DNA, 318 bp, Gossypium hirsutum
  Clone ID: LIB3135-026-Q1-K1-A1
gcctcccccatgtgcgccctcagcatgcacgactcccgatgacgactccttcaccgaggttgcaccaaaatggcaatggtttctgcccgttgactcctcatgacctgcaaaatagacgaaaacaacatccaatagacagaaacagagatagcagaaataaacagtagcacaaaagatgtatttggctatataagcccaaaaaccaaacaaatgtagggggattttcttttatgctttttctttctttctttcgaaaagccgaatatgctgtaaaagggggattgaacaaagagaatagtaaagagcagaggttatttc

SEQ ID NO: 37204 - DNA, 383 bp, Gossypium hirsutum
  Clone ID: LIB3135-026-Q1-K1-A11
cacaaaccagataagaaatttgggatgagaaatgtcatgtgcgttttgacgatcaaagatgcggtggagcatgcttgtgcacgggcatgttcatgggctgatatctgctctgttattgctagagatggcgttgtatagctcgtaggaccactcgttggaacaaacaccgatctgaaagacagccggagagattacctgtgaaaggtcgattataccatacacaatcacattgattaactcgatgatgcgctgtaacgcttgctatcaatctgcatatacaccgacagaatagcacctggattaggagctcaatccggaggtcacgttgattgtgtagacctttgacacaaactattccacacagtttatccgacattggaccc

SEQ ID NO: 37205 - DNA, 319 bp, Gossypium hirsutum
  Clone ID: LIB3135-026-Q1-K1-A12
aaagaacattgtatagttgtgtgatcgctaggggaaactgaatagccaatggcacacttccaaatgtcaggaataacacctcttgttttttcccctgttttacaaaaaaaaaaaaaaaaaaaaaaaaaaaaaaaaaaaaaaaaaaaaaaaaaaaaaaaaaaaaaaaaaaaaaaaaaaaaaaaaaaaaaaaaaaaaaaaaaaaaaaaaaaaaaaaaaaaaataaaaaaaagggggcggccgttttaaaaaatcaaaacttactaacccgtgcattgcaacgtaatagcttttttatagtgccaccaaaattaaattaact

SEQ ID NO: 37206 - DNA, 413 bp, Gossypium hirsutum
  Clone ID: LIB3135-026-Q1-K1-A6
aaaaagatgatcaagtggtgtccaggcccaggctgtgaaaacgctattgactttgtcgccgggagtgaaaatcttgatgtttcttgcctttgctcccattccttttgctggaattgtactcaagatgctcatcgtcccgtggactgtgaaaccgtgacgaaatggatgtcgaagaacagctcggagtctgagaatgtaaattacatactagcttttaccaagccttgtcccaaatgcaaaaggccaattgagaaaaacatgggatgttcgcatatgacatgtagggcgccttgcctttacgagttctgctggctctgccttggagattggaaaaaccatggcacttgcaatcgtttcaaggggaaccccgaggaggaaaaaagagaaaaggcgaagcaatatgtgatgaaata

SEQ ID NO: 37207 - DNA, 238 bp, Gossypium hirsutum
  Clone ID: LIB3135-026-Q1-K1-A7
ggtatttgcaatcccatcattgcaaagatgtatcaaggaggtgctggaggtgatgtgcgaaggggtggtggtgctgagatgcctaacggtggtgggtctggtgggtctggtgcggggcccaagattgaggaagtggattaagttccatggcttttcttctgcatattaaattacctgctgatgtctctgatcttttttttttgcgtgtaccttggtttggcttgtattacgtgatgga

SEQ ID NO: 37208 - DNA, 418 bp, Gossypium hirsutum
  Clone ID: LIB3135-026-Q1-K1-B1
attgattttgatatagagctcgggtcaactcaatactgggatgaccttgctcgttatctatgagcttacagtaataatggacgaaaggtgtatttaacagcagctccacagtgtccatttcccgatagtttcttagggactgcccttaatacaggtctctttgactacgtttgggttcagttttataacaatccaccatgccaatacacatcggggaacataaacaaccttgtcaactcatggaaccggtggacttcatctataaaagcagggaatatatttttagggttgccggcggcaccagcggcggccggtagtgggtatattccacctaatgtgttgacttctcagattcttcctgttatcaagaggtcatccaagtatggtgggattatgctttggtctaaattctttgatg

SEQ ID NO: 37209 - DNA, 347 bp, Gossypium hirsutum
  Clone ID: LIB3135-026-Q1-K1-B3
aatattcgctgcgtatgtccgcaaagctgcaggagataaacgggaaagctagtctgaaaccgtggaggcaacttatgtacctgacgcagaaaaacggacagttgagtctgaaaagaacatggaagcccacaataagatacaagctgagggtccgaaagacgaacatctgaatcacagccataagtcattgaggagaatgatgaggatcatgatcaacaacgcatcggacacgaggacaatgactaataggaacgtccgctgtggataacataatcaacgttcgcagcgatagggctagatcaaaaccttatgctactgctttagaagattccataacattcttttag

SEQ ID NO: 37210 - DNA, 294 bp, Gossypium hirsutum
  Clone ID: LIB3135-026-Q1-K1-C1
gtcagtcagtcacaggctgtcatggagttatttctattttcgagttaaataaaaaaatttggcactaggctatgttttaatagggtcgatttgtagactgatttaaaatatgattggtaaataaaaaggtctggcaatggcataatctttgcgaggggggtccctaggcaaagcttattgtcagtgtcacttggatgccttcgtagcgttagagtcgaactttatgatttgattgtaaggactgatctgaattgaaatattagtataaatgtgatttgtcgttcattgttggag

SEQ ID NO: 37211 - DNA, 435 bp, Gossypium hirsutum
  Clone ID: LIB3135-026-Q1-K1-C11
caaccttacatctcaacacaaaccaaccaactatcccaaactttacaagaaacccaatgttgcaaacatcaaattaaaaccaaataattatttggatgcaaagaagaccagcttggctgttccaactgctgcccttctttccacttttgagctgccggcattagctgttacaggggtaaacaatgagccagatctcatcactgtgataattcaactaggaattattgcttttgggtacttcctcatcgtgcccccaatcatcatgaactggcttaggataagatggtatagaagaaatctgttggagatgtacttgcaattcatgtgtgtgttcttgatctttccggggctactgctctgggctccatttttgaacttcaggaaattcccaagggataaagtcctgaagtatccatgggacacacctaaagatcc

SEQ ID NO: 37212 - DNA, 368 bp, Gossypium hirsutum
  Clone ID: LIB3135-026-Q1-K1-C2
cccacgcgtgcggggagacccggaatacggatatgcagtgcatgaaccggatcgacactggtaagaagaagtataagttagagaaagctaaaattgcagctggaggtgggccaagtaagcggttctctttcgataagttggatcaacttattgttccgacggagaagactgttgataatgttgatacgaggcgattatggtggcagtgtgagaagcactgacatgttgtctaaagtgcctatggggatttctggtgacatccgatccagtttgaacccgcttcaagttttacagcttgacgaagagcgggaacaacaacaacaaaagcaaccgaggatgggtgcattaaaggatcagaataagatgca

SEQ ID NO: 37213 - DNA, 167 bp, Gossypium hirsutum
  Clone ID: LIB3135-026-Q1-K1-C4
ggcttcttatcatcccctgttcaatcaaagcctaacaggatatcaaagggaaatagtaacgagagggctatcagatataaactactaagagatgtatggatgaactctgaataaaccatcgattacatgttcatgagcatatatgcaagtaaattttggtttgtatt

SEQ ID NO: 37214 - DNA, 241 bp, Gossypium hirsutum
  unsure (1)..(241): unsure at all n locations
  Clone ID: LIB3135-026-Q1-K1-D9
ctttgatcagttccataagaaagaaagaaagaaatcaaatatgggttccatttccaanaagttccttctccttgcccttttagctgctactgttcttctcatttcatcggaagtggcagctcgagaccttgcttaaaccaccactgaaaagaacaattgtgaggtggctactgaaacaaccgatgctgatgctcangtataagaggccaaatatggatattgttgataccggagcctttta

SEQ ID NO: 37215 - DNA, 413 bp, Gossypium hirsutum
  Clone ID: LIB3135-026-Q1-K1-E1
tcgcccacgcgttcgcccacgcgttcgcccacgcgtccgcgtgattttgatcgagaacgcgctgggggagaggctaaagtatggggtgagaattggagggagaaaaaacgagcaaacgccattggtagctttgacagtacaaatggctgatactaccaaatcctttaattcatgccgtttctctctttcgagctaagacatgtcttaacattctaaggataatcactcgcaaaaggtagctttgaagaacaccgtccgtcaccgtttcaaaccccggcaatcagagttcatccatgtatcagtaatccgtccaacttctataatcatccatgtagttcccggttgcttcaaaccttgtggttgaaggaagaaaacacagttaaaagaaggaatgaaagagtgacagattttgc

SEQ ID NO: 37216 - DNA, 172 bp, Gossypium hirsutum
  Clone ID: LIB3135-026-Q1-K1-E10
gcggaagttgtattacttgattcatcaaatttttaatatcctacttccattaatgtgacatgtcttacatgtcactatccacttattctacctttccatcaatatttcaaattccctccaaagccatcttatattcaaaggattacttatgatatacaaatccctccatatt

SEQ ID NO: 37217 - DNA, 148 bp, Gossypium hirsutum
  Clone ID: LIB3135-026-Q1-K1-E6
caaccacaagctgtaggcggtgctctttcttttttttttttgagaagatcagttccaagcggccggctgctgataaaaagaagattgaggatgcaattgagcaagcacttcactggtgcgatggaaaccagctggctgaggcggatga

SEQ ID NO: 37218 - DNA, 285 bp, Gossypium hirsutum
  Clone ID: LIB3135-026-Q1-K1-F2
tcccactcgtccgttggacaggtttgattccattcttcccccatgccatgtagctatcggtgggtgttgtagcatcaaagccaactgctataactaatgcttagggattcttcaccgcgaaaaacaaaatgctggtgaatgttactgctgaccaccaaattatctatcgtgctgatttgacttccttacttcaaaccttctcaaagattgttgacaacgctgaaagccatactttgtatatgattctcaggtttatgcaatgaattcacacctagtcttctaatt

SEQ ID NO: 37219 - DNA, 357 bp, Gossypium hirsutum
  Clone ID: LIB3135-026-Q1-K1-F3
cccacgcgttcgaaaatgtttatgtatagcagtgtagcatccattttgactatatgtatgtggcatgctccggaatgttttaattccttccaaatgaagctgaattttactgtattgcatcttaaggatctaaagaccctgcttctttccaacattcatagggagttatgccgacacatcacacgtctactctcaacatgcttacataatacctcgtggacccggactgtctataccttcttaaaagtcgtagtgagctgaacacgctttaattacttgtacgccgcgacagtagattttgtacgatatcctccagtccctcatctgctgttttctgctaggaagcaacttattgac

SEQ ID NO: 37220 - DNA, 287 bp, Gossypium hirsutum
  Clone ID: LIB3135-026-Q1-K1-F4
cggatcccgttctacccacgcgtccgaaataattatataaatctccaattgcaaagtatatcaaaaaaatatattattaaaaaataaagagacaatttatacatattacacaccatatataatcattactataattccatctattctaaaattatacatcttcaatcattcctatttatactcattcttctcttgtcatttattttttcttacctcctattcttaattcttaatctcacaattttctctttcatctttattgttctattatcttttcttttattcta

SEQ ID NO: 37221 - DNA, 298 bp, Gossypium hirsutum
  Clone ID: LIB3135-026-Q1-K1-F5
ggactggtctgcggcttgtcctgcatggctgaaaagtggtcgtgctgactggggggtccttaaattaactgcacaactgccatgtgatcacatgctaacagcttctaggtgaatggagacgtatagatagcctgtggacttgatgcacagtatttctcaactgctcatcttgggagggatgcacatctgaatgagccatatgctcatgagcatgcatgtgacgtcgattctaacatagcgcaatacgttgtcgctggttatccggtttggagaaagcttacttgctggattgacacag

SEQ ID NO: 37222 - DNA, 416 bp, Gossypium hirsutum
  Clone ID: LIB3135-026-Q1-K1-G4
gcccctgcctctccattctcttttgctctcaaaatccggccatagtgactgtcgggctcatggggcaccaacgacggcgtaaccgtccgtggtgatcttaaaacgcccattttcgagccctcttggagatgaaatcttcggcctttacgaggagagtgaggaaggggggttttctttgaaaaccgtcgtatcatcaagccccgaatcggaccccacagtgttttgggtctcggcgccggaaaggtagaccgacggaggaagacgaaacgcttccggagtagttggcggtggagcaggtggccaccagtggcggtgacagagtcttggggctaggttcgacgccgaataggcaataggggctaggtttttttgttttttgaaaatgtcgggaatgggcttgtaattgggtagtgggc

SEQ ID NO: 37223 - DNA, 431 bp, Gossypium hirsutum
  Clone ID: LIB3135-026-Q1-K1-H2
tcgcccactctttcttccacgcgtcctgtttgtttaatttctttgggatattatactttcaatgttagattccaatttataaatgttgcacccaatatccaaatcaattcctttgtgatccaaactttccttttgtcccctttctcatatttaaaattattaaattaacttatttctttatattttcctacttttccacttatttttattatttttgtctattttttatttataatattttaattcctctctttttggctttttttttttaattaattttagtttcccttttttatttttaattatttttttttaattgtgcttgtcaaaaaaattaaattctgttctctaatcaaaattaatatttttttttttataaaccttttttttttcccctcatcttttattatatttccttttcttcccccttt

SEQ ID NO: 37224 - DNA, 264 bp, Gossypium hirsutum
  Clone ID: LIB3135-026-Q1-K1-H3
tcttcaatcaaaaaatttaaagttctataattctttattttgataaaaattaaagccgaagcatctttctcattctgttctccccccaatccttccaatctgtttcactcaatgctgctttatccgatttcatttcattgcttattttttttttctccccttaaatctcttacatagctttcaacaattttaccttctattgcttctttacactctcatttttattttcttcatcatattactcactccttgtcgttttttaat

SEQ ID NO: 37225 - DNA, 362 bp, Gossypium hirsutum
  Clone ID: LIB3135-026-Q1-K1-H5
cttcagtatgtgattcggagctcgggtctccaccacatagctgaagtttataaatccagaggtggaagaggataggatcatatagttgcaataagtgtagactggattaatagcagcagaaccgtgtgttgtgaatatacgaaagaaagggtatggatagattagtgtacggattgtgaattggtaggagtcggacaggtgactgacttttgtgggtgttcgcatggaaatgatgttatttgccattgcggagagggagaaaagaagaaaccagtttgaaaattgtgtttaacttgtttttgtgtggtgttacatgtactgataatattgatagtagtagtattactggatttttttgcttg

SEQ ID NO: 37226 - DNA, 424 bp, Gossypium hirsutum
  Clone ID: LIB3135-026-Q1-K1-H6
ccggaactgaatggccggatcgacgcgtgcgagaaaatggaagaggaaagatcactctcacttcttcagtggcatgggttaagcgagtagctgggcgacgtcggcttcctaaacaagacatagctgctagtagtgctaccttattaacatatggctcttatggccttggggttcatggttcaaagttagacatcgatcctttttgtatcggtccttactttgccactatggtagatgatttctttattgttctatataacatgcttaagagcagacctgaggtatctgagattcattatgtgaaggacgcaaaagtcctactaatgcgttttgagttcgatggaatctcgataaatcttccctttgtgcagcttaaagttttagttgttctaaagggtgctcgcaaacacaaggatttgtcgca

SEQ ID NO: 37227 - DNA, 340 bp, Gossypium hirsutum
  Clone ID: LIB3135-027-Q1-K1-A10
cccacgcgtccgggagtttccttcatggtttttaactgctctaccccttctcaactcagagccgtgtaatttgccccacgctccgatacatcctaacctcacatctttcatccctgttcattagaacactcccatacaaccaataactaataagcttcttcctctcatacccaatacaagctgccatcaacaaataatctctatttataccaacatccgacatttgattgaccatcgatgccgcttttgtgctacatccgtcgcgtcagtccgcctttggtgtactgtacatcttaaatctggaatgagcaactatatctatagtttgattgagtcagaa

SEQ ID NO: 37228 - DNA, 413 bp, Gossypium hirsutum
  Clone ID: LIB3135-027-Q1-K1-D10
gagatagtgcaaaaagctcttgcttcaaggtttgatttcaacagatggctcatccagacgatggtttggttcatagccaaacctgacataggtttaatattgtcttaaacgaaattactaataaatatattgattgaaggtaactggaaaattttctacggaacgagataaaatggcttttttagattaaccatagttataagaaattacctgcactaaattatattcataaacatgctggcgtgttcttaagacagggtcaatacaattgatgagatttgaccgcataaatattccctactccctactgatccttaccaaagagccatcggtaggttttggggagattttgttgacaagaagatatatcggttacagagtgggaaagtattgaccacatatggggaataaca

SEQ ID NO: 37229 - DNA, 325 bp, Gossypium hirsutum
  unsure (1)..(325): unsure at all n locations
  Clone ID: LIB3135-027-Q1-K1-D12
cccacgccgtgccgcnnaagtgttgctcggttcttaagaagtaactttcggagggatttggataaccaannnactcaacatnaaacttaactacgtcggttgatnctctttgagggggaaacctgtcgaagaacttttatgtaaacaacagaacgaaatannagctattgagcatacgngtagcttgatgccttgtgaagacacagtcacctcgttctcaagaaaagcagacacagtatttgtaaagcaccattatctgggaaaagctttatcacgttggccattggatgccttaannaagctttgtgccttcttggtgcgttgc

SEQ ID NO: 37230 - DNA, 405 bp, Gossypium hirsutum
  Clone ID: LIB3135-027-Q1-K1-E10
gcaagcatccgttccgtgtgtgaaccaagatcagggacctcgccaaccgcaagatgtttggctcagggctcacagatagatggcatgcctatacgaaaacctacctagctaaggcgcctgaacctatatccccacaggatggacatgatcgttacatatcttaaacacaaataccataacatgccaatggtgcttacctcaaacggataccgagaggtgatcaaagcacactccaccattgatcaactcttacactatgaagaacgaatagacttcatggatagacacttagatgcactgtccacaactgtccaaagaagagcacatgtaaaggggtactttgcctggtcgatgctagacaactttgaacaggactcttgttatacacttaagctcggggtttag

SEQ ID NO: 37231 - DNA, 295 bp, Gossypium hirsutum
  Clone ID: LIB3135-027-Q1-K1-E11
aaaaaaaaaaaaaaataataaaaaaaaaaaattttttaactaatataaaaaaaaaaaaattaagtaggcattcataaaaaaaaaaaaaatcttttataaaataaacaaaaaataaaattactaaccttaattttacaacttcaaaactaaaaatcccctttctgccctctaattattccatttcttgccccttaattttttcaccttattcttttttttttggtagcccttcataattttcccttgccaacatttttatactttaattttcaaaaaaccctccctttaaaccctt

SEQ ID NO: 37232 - DNA, 288 bp, Gossypium hirsutum
  Clone ID: LIB3135-027-Q1-K1-E12
cgtgaatttgcctaatttcatttcaatgagtcgattgctttctggagctttgcttggatggatgattgtaaatgaaatgtttggtcttgcatttgtgggattggctatctctggtgcaactgattgggtctctaattggatgtgtggctttgtcaagggcacatccccatcttttgcacactgctctttctggctctttgtgtttttagatatttgcccttttagtgctgctttgtaccaaaaagcccccttccctggtttgcagtggaaaaaatggctagatttctt

SEQ ID NO: 37233 - DNA, 429 bp, Gossypium hirsutum
  Clone ID: LIB3135-027-Q1-K1-E9
gaagaattcaagcaaatcctctaaaaatggcgctaagagctcagatggtgaaaaagggaatggtttggcaccatatttgggtaaattcaagtctatgaggacggtttccaaagagggttatgcttcgtttatggactataagatacttgaaaaagctacaaacaagttccatcatggtaacattctgggtgagggtggatttggatgtgtttacaaggctcaattcaatgatagttcttatgctgctgttaagaagttggactgtgcaagccaagatgctgaaaaagaatatgagaatgaggtgggtttgctatgtagatttaagcattccaatataatttcactgttgggttatagcagtgataacgatacaaggtttattgtttatgagttgatggaaaatgggtctttggaaactcaattacatgg

SEQ ID NO: 37234 - DNA, 105 bp, Gossypium hirsutum
  unsure (1)..(105): unsure at all n locations
  Clone ID: LIB3135-027-Q1-K1-F10
accacgcgtccnggaacgcgaaaggaaacgcgaagagccaaacgaaaacgaagacacnacagggcagggagacaaaaggcaaacgcgaggcggaaagcacaaacg

SEQ ID NO: 37235 - DNA, 352 bp, Gossypium hirsutum
  Clone ID: LIB3135-027-Q1-K1-F11
aacaaacatacgttccctgaaaataccaatattaaactccttaccaacctaaaactgtactgagctgggttactttgaacgatctcatacctttatataaacacaacacaacccttatctaatcccactatttaccaacaaaatgaaataaaaccactcccttcgcactcatcaactccctttcatacctaataaacttccaacatactctttctcattatgctcacaaattacacttcaccattttccaacttttcctccgcgttcatccaaacaactccatgcctccactcgaacatcctctcttaacctctttccagattccaccactcgtcaaagtttaactaccctc

SEQ ID NO: 37236 - DNA, 370 bp, Gossypium hirsutum
  Clone ID: LIB3135-027-Q1-K1-G9
cacgcgttcgtttaaaatgatacttatatcacctttacttgccctgttgtctcccaaatgcatggtttaattttttccctttctctcacctcatatataaatgtttcttagtattagccaataataataaaccaatcatctcttgttctagttaaactactacttgcatctattatttaaaaaaataatatattcttcctaattttattaaacacttgaacctacttcctctattttacatattatccatttaataatattgagtatttttaacatcacataccgtgacatgtagcaataatctttaatcaatttttccaactcataaattctcatttataaacgatatattgactcatattatcttttt

SEQ ID NO: 37237 - DNA, 369 bp, Gossypium hirsutum
  unsure (1)..(369): unsure at all n locations
  Clone ID: LIB3135-027-Q1-K1-H10
ggcgaccangcgtccgccacgcgtccggtgccggttaaggcaactagctgagtactgcgaaaatgaaggctatactgggcggcgagacaatggacattccttgtggagttagcataaaagtcaaggctaacgcgatcgacgatgtacgtacaaggtggaagcttacccaccacttctagcacctcaaccttgtttcacatctaatgaaagaccaacagaccggtacgcataagctcacgatcgagacttggcttgtcttcaagatgaccaccgccgtcatccttacagcttttaggcacgatgagaacatcaatcattcggcgtccttaaagataccttttcaagatgagggtcacttaccctcacttt

SEQ ID NO: 37238 - DNA, 312 bp, Gossypium hirsutum
  Clone ID: LIB3135-027-Q1-K1-H12
aaatggcggcgtccaactctgaaaactatttaaaaaccgaagtttcaagctcgggtgaatcagaacagcctcagactcaatctattcgaatgccaagcatggagtaaatccctgcccatgaagtttggaataactttgccgttcgtagtgtacccagtcgagtaatgggtggcattcttggattcataatgggtatggttctagctgccttgtataatcctgaacttcatgatctaatgattggaacgccacaattactctttaatttgaagcaaatgggttcaataaacttgagatctgcaaaaacatttt

SEQ ID NO: 37239 - DNA, 445 bp, Gossypium hirsutum
  Clone ID: LIB3135-028-Q1-K1-A11
gtgagcctgcatgggatgggagtgaactaagatatgctggaaatccattttgcgatcgggatggggttcatgtgcacctgcgacatgattctaccattcttgtccttactttcttaacttcaatcatgatacttaggtgagacattaactttaagcacctgcttgatgaacccattgctatgaacaattcaactcgggtgttagtttgagtcgacggttgacatttcagtgacccccgatgctgattttgtgcgaccggagttgcgtcaatctggcaattgagtctatagaattctcataactggaatgggccgctatatttatagtagtgaatgatccagaacttgctcggcatgtatgtagttgatgaatttgttgcaatgacttgaggctggctgccgtttttatgaatcatttttaaatggtttaccttttggtaggacca

SEQ ID NO: 37240 - DNA, 257 bp, Gossypium hirsutum
  Clone ID: LIB3135-028-Q1-K1-A12
cacgcttcctttaatttccttcatattttttaactgctctaccacatcactatttggatcgatttatattttccccactttcttcattacatcctaacccaacaatcttttctgtcttactacaatgtcactcccatcaaccatgatcttctcagcaacttcttgtcatacccacgtcatcatgccatctaattctgttcttattttagaccttccttttacatttcatcaacctcctatacttattttttgcgacc

SEQ ID NO: 37241 - DNA, 342 bp, Gossypium hirsutum
  Clone ID: LIB3135-028-Q1-K1-A3
gttgcgtgcttcattcatgcggcttttctcctttggaagtgatgggaatctctagtatcctccctatgctatgggcgcttcttctactggaaggttggttagctggatccggataacaggaataagtagaaaggctggatggctgtacctgctttagtgacggaataaggcggcgacctttttctcatcttgagtcgatgcttaagacatgatagttgaaggctttcttcctgctttcaggggcttttcgcctgaaccaaatgaacggggcgctcttacgtaccgtaggttgtgtgaagaccgggaatttaatccagtaattcaatttttcccgagacctac

SEQ ID NO: 37242 - DNA, 257 bp, Gossypium hirsutum
  Clone ID: LIB3135-028-Q1-K1-A6
ctacaatttacaagtataagtttccaccacctacacctccgtcaccacccaaggggccttacaagtgcaagtgcccaccacctttaccgtcaccacccaagcacccctacaatgacaagtcacctacaccaccaccatcatcaccccctaagcattcttacatgtacaagtccccaccaccaccgttaccacccaagcaccattacaagtacacgtaacctgcacctcccccactatttttccttaagcacccttac

SEQ ID NO: 37243 - DNA, 356 bp, Gossypium hirsutum
  Clone ID: LIB3135-028-Q1-K1-A8
aaaagaatggaccatacaagcctttatcagaagattatagaatcgaaaaacgacggcattgaggggacgctggagagggcgttacacccatataccctaatctgcttgcttgccttaaaaaaaacgaatttttaattaaaaaatgagaaaagtttgtggattttgaggtgtcgtgcaaataaaggatgagtgcactggatgcaactagagcaaaacttgctcttggagttttgtattttaataaggcttgagcatgggataagatatgcagggctatacaatatgggtcgaaatttctaaatgatgggcagcctggcacatcacagaatgttgacaaataaaccagcttggcacgg

SEQ ID NO: 37244 - DNA, 326 bp, Gossypium hirsutum
  Clone ID: LIB3135-028-Q1-K1-B11
cccacgcgtccgaaaattaaattgatgtttgtatacatgctctaccacagtactatatgggatgggggatatggacacggggcggtcgttttcatggtatcccacctagcttcgcttgctttcgacaatgtcactcctatataccaaggtcttcgtggtatctattggccagacttattccatgttgccattgaaataaccgttcatttgacgaactcaattgccatttaagatacccccgtttctgattttgtgctactagcgtagcgtcaatctcccattgtagttcatagaatttgtgaactctaattagcaactatatttat

SEQ ID NO: 37245 - DNA, 328 bp, Gossypium hirsutum
  Clone ID: LIB3135-028-Q1-K1-B5
cgcacgcgtacgccgacgcgttcgcgcacgcgtacgtgcgaatatcacacacaggcactttccaggtctaacatgcacttcgtgggatgggatcatatgcttttgctacatagttgcatggctgccagaaagtgtctctcttgtgtaccaggagccttacacaatgtacctcaagacatcacaatccattaggaagtgtgaactactgctacatggcttatgcatgcaacacagctaggttatgacatcttgtattagaatataaatagcttcatctgcgcggtcaataccgacacagtgatgatttataactttctcaaaccgaact

SEQ ID NO: 37246 - DNA, 460 bp, Gossypium hirsutum
  Clone ID: LIB3135-028-Q1-K1-B7
gatcaatacattcttttttggctttatagccgaactttaaaagaaaaataaatgtctaaaaatagaatattttttcttgctttttgctgctttgtatgtcttggttgattgcaggtacggggtacagggcgtgtgctagcacttggcgtgaggcgtacggaggcgcgggcgtggatgtggcgccaggaggccgtatgaggcttggaggctggaggttactgttgcggcacaaaggggggtgacctatggtttctgaaactgtttaagtttttgggccgtttgggcccttattaggtttgggctatgggttttaaattaaggttttgggtctaggtaattgtgtcaaggtctgtaaatggacatttaatggactattaataattgggcttttttattctttatatggccttgatgtggaccccggcaaattggcctgtttacaaggggttcaataaccttg

SEQ ID NO: 37247 - DNA, 280 bp, Gossypium hirsutum
  Clone ID: LIB3135-028-Q1-K1-C1
ggaagaccactataaattttcattccccccgcccccccttcttttttaaaatttgatgaaccaggttagctgcgaggttgcatggcatgattaagagatgtagaggtttgatgtatttttatataaacttgctaaaatcttaaactatgctaaaaaaattgatgctatgtaataaagagaatatttaatacaaaaaaaaaaaaaaaagatataataacattaagaatttgtcacgcattaaaatgattggaagaactcgatttctaagccttaaagattt

SEQ ID NO: 37248 - DNA, 391 bp, Gossypium hirsutum
  unsure (1)..(391): unsure at all n locations
  Clone ID: LIB3135-028-Q1-K1-C10
cacgcgtncgaacgaacgtaacaaagttgtactacttttacagattgcaaggttcataatgaagaccgggtcgcggctgtggtctggaaagaagcctttcataacaatacctcacatgggaccatcagaacacctgttgccatgccgttgtgaagttgaaagggctaacgattggctaaagcctaatgtaatattggacgcattctatgctagggctactacgatgtcaggcacctgtgcaaaacaccttaacaattttgcaaatcaagaacagcgtcatgctcaactctcaactgatttgtcctaagctgtagtcggtcacgttcagttaattattgcttacaagttacatttgaaattgcaacaagacattcccggaaagggagtaaaa

SEQ ID NO: 37249 - DNA, 162 bp, Gossypium hirsutum
  Clone ID: LIB3135-028-Q1-K1-C2
cccacacgttcgctgacacgtccgtccacacgtcctctagaatcttttagccctttactctggtggtttgacctgagatgtgtacattgacttcgtgcttgttcatgtttcaacactcatctaatacaataattcacatcttctgttgaatatcatttctta

SEQ ID NO: 37250 - DNA, 434 bp, Gossypium hirsutum
  Clone ID: LIB3135-028-Q1-K1-C4
gcatgattaagtaactgacagatatgcgacaactggtcaagcttttttgaagctacgctgggatacttggatgacaactcttgaagcttgcgactatgctgacaactaatagggatacagtttccgactcatccactcgattcgacacatgtcataacgcttaagagagtgagttactgtgcttgcagaattcaaactttagcaattttaatagagaatagatcttatgatagaataaactaaattttctgatcatatttatgaataataaaagtgtattttcatttttattacccaattacttaaaatgaaacatggttcattagtagtaggtattgaaccttaatgcatatctggtgatgatggggtccctgctttgtagctctaaatttttatcccctaagtaattggctatttaaatggtttaatgaatt

SEQ ID NO: 37251 - DNA, 427 bp, Gossypium hirsutum
  Clone ID: LIB3135-028-Q1-K1-C5
tcgaacgatgccccggctcttaataaggctgcaatctgttttgctgttccggatgggactgacacggcgaggagtgcttccgatattgtccttactgagccaggtcttaacgtcattatcagcgccgacctcaccagcagatgcatcttccagaggatgaagaactacaccatctatgcagtttccatcacaatccgtatagggctcggatttatgctcattgcgttgatctggcaatacgatttctctcccttcatggttcttatcattgccattctcaatgacggttctatcatgaccatctttaaggacagagttaagccatctccgttgcccgacagttggaaactgaaggaaaatcttgttacgggcatcgtgcttgaaagctaccttgctctgataactggcattttcttctgggctatgc

SEQ ID NO: 37252 - DNA, 351 bp, Gossypium hirsutum
  Clone ID: LIB3135-028-Q1-K1-C7
cttaacattattattcttaccacccctgggctccaaaccgcgagtttacactttcaatctgcccctaaagctttcaaattaaaaggcttcttttctcatacccttccagccaattctactgccaacataccttacaatattatcactttcactaactgcaaaaattccaattgaaaattattaatatacttctttttcttcatcttgcaatacataaaatttatctttataaagaataatataaacaatgtatattaattttttaatttaattatcaaaatccaaaattattcttcactttactttactgaacccttttttattttttgttatcttttgtaccccccattt

SEQ ID NO: 37253 - DNA, 347 bp, Gossypium hirsutum
  Clone ID: LIB3135-028-Q1-K1-D1
gaagggaatagtaatggatcttggattacttgaggggagatattgacatacatcacggtgaaaagaatacatgtatgcatgtatgtatgtatggtcatcttgtcaaatcatctattcgctatatttggttgcttttttttttttcttttaagaataccggaagataacaaatattttacaacagaggttaaatatttcatcacctcgtatccatctgtgggtggaatgcacaaccatcctcctttcaattccaaaatcatgtattctatgcaagatgtagtagtttacaagacaactatgcagcaaatgtttttgctttaagtttgaagtggctgaaactttttgct

SEQ ID NO: 37254 - DNA, 234 bp, Gossypium hirsutum
  Clone ID: LIB3135-028-Q1-K1-D3
ggatcaggtaagatgacctacccccttctggatgtcaaaaccacgacttcttcttcaaagcctgacatacatggggcgagtctacgattgcaaacgcaccacactgctataaagcccgagctagctatatctgcgcatgataaacagcggggcgctgcaaatgttgatgttcggacccgtgcttattgtgctacgaataatacgccctaaactaagactggctccaagggttct

SEQ ID NO: 37255 - DNA, 304 bp, Gossypium hirsutum
  Clone ID: LIB3135-028-Q1-K1-D4
caattgcttctctgcatttgccttggcagatccgggcgtgagatcgaaaccacactattttccagatctgggactggtaatatttgtgtggaaaagtctgttttgcccaaaggtgattcgcttcaaattcaagaagtttggaacgattatctggaagaagagttcgttttgatcctgaaaatagttgatgcttacaactatgatgctatcgatactgagatcccatgagttgttctacgccccgttggaactttcaagaacgtaagtgcttatagctaccaaactttgaaggataatgaggata

SEQ ID NO: 37256 - DNA, 265 bp, Gossypium hirsutum
  Clone ID: LIB3135-028-Q1-K1-D5
gccacgcgtcctttcacagatctcttctttttttttacctacctttataattcataccttccccggttcttccaagtggttttttcaacctcctctccacccttactattacaccattaattatttcatttttatccacatctaacaatcctttattcacaaacttttatttttcttttatctttacttcctataacaataaaatcacgctgacgattatatacccagttacaataccattatatgacgtgattattcttttaac

SEQ ID NO: 37257 - DNA, 263 bp, Gossypium hirsutum
  Clone ID: LIB3135-028-Q1-K1-D7
ggaaaaattacattcatcaccattacaacatcattccttatcaccactaacctgagaaatgtttggcgaataattacccagcggagactactgcttgccaaagctgctaagggagctcaagtggatagtgtccagatgagcggttagaggaaaacagagggcaacaattgcttgatttagattatgtttagcagctgcagctgctgctatttgctcggttgcagtgatcagcatcttcagatgcctaaacgtggtatctcata

SEQ ID NO: 37258 - DNA, 256 bp, Gossypium hirsutum
  Clone ID: LIB3135-028-Q1-K1-E10
cccacgcgtccgcttaggctcattacgattataaattatatatacaggtaaataatctaccgggacagcgtggactttgtctgggtcgtatgatgtgtgattgactgtgccattgtccataagaagctctggtgaatatgacacaattattgtactatataataaatactatcctgggggcatttatcattccagcaggtttattcatagaaaggatcaaggtccgtaaagatgagattcttcctgtaagaggcct

SEQ ID NO: 37259 - DNA, 219 bp, Gossypium hirsutum
  Clone ID: LIB3135-028-Q1-K1-E2
gttactagtgaaatgacgtgtcccatctagacattcacactcagatcgacggagtgccttcgggaatcacgtatggagagaacacctgggctgatgcgaaggcttacaatgaacccctagctagattgacttggctattctagacgaacgatcagacctttactagttacaagaacgcgagagacttcaagtagacacaagaaatcctgaactctggtt

SEQ ID NO: 37260 - DNA, 309 bp, Gossypium hirsutum
  Clone ID: LIB3135-028-Q1-K1-E3
cgctaatgcatttagaggtagtgattctggcttttatcatacactccttcctatcccagatgatagccactctgctaggaacacctttggctgtttgcttttcttcggactcacctgggggaggacatcttcctcttccgagtccaggcccttacgctccagcaagctccaataattctgatgctgattctttcagcaataatgttatattgcagagctggccaacaaccgaacgcgcaagacagtcgccagcctcagcagaaacgggcacgttggtgaataagccataatctggacgtgtgccgactg

SEQ ID NO: 37261 - DNA, 148 bp, Gossypium hirsutum
  Clone ID: LIB3135-028-Q1-K1-E4
agtacacatcgagagcggtgcggcttatagttatttttatagctagcttgtagtgctgtgggaaggactatcgggtgagcaaaccattgctcctctaatacccataggacgacgccgttaacataggggtggacaaatcagagtagga

SEQ ID NO: 37262 - DNA, 379 bp, Gossypium hirsutum
  Clone ID: LIB3135-028-Q1-K1-E5
caaagaccaatgggagtggttatgggtgtggaccaatatgctaactcatcagatgtgtaactcaggggtttcggcaactgagtcagtgggaacgaataggaccaacaactcccaaactgcaattggagatgacaagatcaacatgcacttcattgattgccttggagttggagcttcttaaaacacccaccattagttcttttttttttcttaattactttttgtgtttttttttctttttgttaaacttgaaagtagagaaatccagcttgaaacagaagagggaaagaggagcatattgagtccattgtgcaaaaacaaaaaatgttatgcttctgcagttgattcatcatttttataatttttgtatatacagttt

SEQ ID NO: 37263 - DNA, 268 bp, Gossypium hirsutum
  Clone ID: LIB3135-028-Q1-K1-E6
gaaagaacgtcgtcactgaccattactacatacttccttagcacctctttccctggaaacgtttggccaagaattactgagcggagactaacgcataccaataacccctacgaagactaagttgcgagtgtccagatcaacatgcactggattgcttatgtcaacattggcgcgtgttagaacatgcacgatgatgccgctgctcctgtttactcacttgctgtgtttgccactctacaggctaaacttgatagtagagaagcccata

SEQ ID NO: 37264 - DNA, 442 bp, Gossypium hirsutum
  Clone ID: LIB3135-028-Q1-K1-E9
cccacgcgtccggagagtctgcatagtggttttagcttgtgtggcgggatcatcggcggcagggagtgctttcaatgtgagagctacttatcatctgtacaatcctcagaacataaactgaaacttgactgctgcaagtgctctatgcatcacatgggatgccaataagtccttagcatggcgtcaaacatatggatggactgctttttgaggtcctgctggtcctcaacgacaagctgcttgttgccgatgcttaatgttgaccaacacccacactggaactcaagcaatggtgagaatcgacgatcaatgcagcaatggaaggctcgatacggatacttacgtctttaaccaacttgacacaaatgggcatgggaatgctgaaagtcaccttgatgcgaactatgaatttgtaaactgtggtgacttaacccacaattta

SEQ ID NO: 37265 - DNA, 254 bp, Gossypium hirsutum
  Clone ID: LIB3135-028-Q1-K1-F2
ctcacgcgatcatagatgcgttgggtctcgcgatgggcatcgagaacgtattggcttcgggcgcagtgtcgtcactgtggatgacctgtgctgagcatgcgggatacttggaagtcctggagtaaatggttggactaaaccagacgatcgttgagcatttatctaggatcatgatggttatagacacgaagtttacagttggaatggtgagagacggatcgatctcattttatctggagctagggcttcaccaa

SEQ ID NO: 37266 - DNA, 193 bp, Gossypium hirsutum
  Clone ID: LIB3135-028-Q1-K1-F3
cgcacacgtccatgtattcgtacgttaacccgatgggaatcccgtacctattggcttacggcacagcggcatccggggggatgacatgatcagagcatgccacacatttcgaaatcctggagtacaattcttgaaaaaaccagacgattgttttgcatacatcaaagatcctgatagttattggatcgaaatc

SEQ ID NO: 37267 - DNA, 196 bp, Gossypium hirsutum
  Clone ID: LIB3135-028-Q1-K1-F4
cccacgcgtccggagtagtatgcggtactgatatccctatcggttacgggtttgcttatgtgaggggctcccttgcgttcagcaccttttgtccccaattcgcctactatgatgcactgattaatttatttgagatatgcggggtggtgttggtatcctccactccaaacatgagcttttacaactttaattttac

SEQ ID NO: 37268 - DNA, 341 bp, Gossypium hirsutum
  Clone ID: LIB3135-028-Q1-K1-F6
aagcacctttactttcaaggaatacactgctgttcatgtcgagcaggttgccaagagcaatccggaggctccgcttgataaagtttaatttctaaactacgaaacgctcacaaaatttggtgccactttcaatgtaactatacccaacaccggtcaatacgtggcaatattaaggactacgtgctgacactcttgttgctgctgattgagcaagagtctctatttcttacaaaatcattggcgtctatttgaaccctaaactattctaactatccacgaacttttatgaaactgagttaagttaattctaatgatcacgaggatccttgctaagaatttaa

SEQ ID NO: 37269 - DNA, 315 bp, Gossypium hirsutum
  Clone ID: LIB3135-028-Q1-K1-G3
gactcgaacccattgattcgacctataacactttctgataggactactggtggttatgggggtagatatcaaaccagtgatgatggtgaacatagtaccagatatgcaatgattgattgagtgaggtgttacgagacatatgggggagtctgttggattcgttatatcctaaaggatttattcatggctcagaactatttaaccgcaactaattctaccggggtcttatctagacgcgccgatgatgcaagatgcaactaggacatgcagtgatgataggtgaatttaatattatatgcacaactgtgacaggat

SEQ ID NO: 37270 - DNA, 475 bp, Gossypium hirsutum
  Clone ID: LIB3135-028-Q1-K1-G5
gggacagagagatcgtggaagggatcacttcttcaattccaggaaaggatacgagagacgaccagcatctccaccacttccaccaccacagcttccaccccgtggcagaccacgtgacatgagagaaaggagtagatcaccaatcaggggtgcacctccaccaaaggaataccgtcgcgatatctacatggagcgaggacgagaggatctacgaggaggtgccggacgagacagaataggaggcccgtattaaccaaatggcagaaaagcgtattgggatataaacttttgtatcgattattttaactaataaattcgggatttacagctttttttggttgggtttggcttttacactataaatgcagcttgttatcgttgtaaaccctttttcaagtgttatgaagacagctaagactttatttctcaatgctttggtaaaaacaatgattcacattgctttcctgcattcaaa

SEQ ID NO: 37271 - DNA, 402 bp, Gossypium hirsutum
  Clone ID: LIB3135-028-Q1-K1-G7
tacaactttcattgtttttaagtagtgatgagctaataacgaagggtgatcaatggaggggaaagaagaagatgttagattgggagccaacatgttcccagagaggcaacctattgggacagcagatcagtcccaatatgatatggattacactgagccaccaccagcacccttgtttgaacctagtgagttgacctcatgatctttttaccgagccggaatcgctgaatacgttgctactttcctttacttgtatatctcggtattgactgtgatgggagttgctaaggacaaaaccaagtgtacaactagtgggattcaaggcattgcttgtgcgtttggtgggatgatcattgcacttgtttactgcactgctggtatctcacgtggtcatatcaattc

SEQ ID NO: 37272 - DNA, 426 bp, Gossypium hirsutum
  Clone ID: LIB3135-028-Q1-K1-H11
cgcaaacgcagccgcttttcatgcaaccgcagccgccgcccccgccggaagaaacgcaaacgctgttcatgcaatcgccgccacagaaagaaacgcaggcgcaagttacgcaaccgttgttcatgagaaggagccctagaaatactgataaagatgggaatgccgctttagaaggagaggagcagttgggattaaagaataaatcgccggagcaaaatcggccggctgagccaacatggaggaagcagatgagtcagatcggtttagctgggtcgagtcaggtgaatcggacaggatcggttggttcgagtcagattagtcaggcgagtgaggttaatcggcctcagccgattcgaatgagccagattaatcaaacaggaaccgatagctcgagtcactttaattgggatgagccaactcggacgg

SEQ ID NO: 37273 - DNA, 216 bp, Gossypium hirsutum
  Clone ID: LIB3135-028-Q1-K1-H2
gccaagcttgcattattactaccataaaccatttctttggtctgtaccaaaccgcataagggcgcggagcctcttggctattaaatcaactatacataaccctttattcctcgatgaatagaaagaattccaaaagactcgaccctgatttctttaattcatgtgatgcactagaaaatgctgttatattatgttgaaaaggaaacaataatgtct

SEQ ID NO: 37274 - DNA, 359 bp, Gossypium hirsutum
  unsure (1)..(359): unsure at all n locations
  Clone ID: LIB3135-028-Q1-K1-H4
cccggtcgacnacgcgtccgcccacgcgtccgaccacgcgtccggccatcctatcattgtttttgtccagaaattctttatctaggcatatgagggtcctagatagaggctgatgtgaaatcttgcagctgaatttacagcttcatttccctttttttggcccattcccatgtatagtatgcccttatcgaacttcatagttaaaacaaaatccaaaccctgcatgataagcttgtctcctccctcttatattcaacacttgaacctgcaggagcgagatggtcatgttgcatctggttgttcagtttcagtaggcactatattcttctcttcccttaaagaaaaccatgcaatctctt

SEQ ID NO: 37275 - DNA, 460 bp, Gossypium hirsutum
  Clone ID: LIB3135-028-Q1-K1-H9
cccacgcgtccgattccaggttcttcctctccgccagtttggaagttggggaccagaaataactagcaaatttgatccaacaaaagatacatacgtcttatgtcaccatggcatgcggtcgttacaggttgccaagtggttacagactcagggatttaggaaaatatttaatatatcagggggaatacatgcgtatgcaaccaaggtggatccatcagttcctacttactgagatcctcacgtatccattgctcctattttcatgttttcttcacgtgtgtggtttcaggctccaaatttttgggtttgccctccgtggtattatagagtttaacatttcacaataattagcaagtccaaaacttgttattgcttaattatggtggttgtattgagtatctggaattaagtgtatttcgaaaaagttcattttaaattcaataaatatgttaattttatt

SEQ ID NO: 37276 - DNA, 388 bp, Gossypium hirsutum
  Clone ID: LIB3135-029-Q1-K1-A1
cacggtgtaggaaacaacagttttcagctaggttcccaaatatgtcagctggtgctgttgatttgctagaaaaaatgcttgtatttgaccccgaccgacgaattacagttgatgaggcacttagccacccatacttggcatctcttcatgatatcaacgacgaacctgtttgtgccaggccttttattttcgattttgagcaattatcatgcagtgaagatcacatcaaagagcttatttggagggaatctgtaaaattcaatccacatccaatccattaagagaaatcaatctcccatgtagaaatatactgggaaaggcttctttccgcagaattccctatgtgacattgttcttcattgttcatgggagtccttgtcagttgagt

SEQ ID NO: 37277 - DNA, 385 bp, Gossypium hirsutum
  Clone ID: LIB3135-029-Q1-K1-A10
ggtcgaccgacgcgtacgcccactcgttcgcccacgcgtccgttgtcctctcaattaatggacaaaataaaacagggtgtgaaggtgaagaaagtgacaaacgtgactttgaaagtgggattttgggttcttttcttttctttttttctttttctatacttttggggaaaaaaaaggcaagatttcaagaacaataactgaaaaaaaagggaaagagataaaagggaaaaaaactctctctctctcttttttttttttaaatattggaacattaataaagattgtgaagaaaaaaaaaacatatatatgatttgaatggatgcattaaagaaatgcactcactttacataccttatctttttatagggtttaattgtttgaaata

SEQ ID NO: 37278 - DNA, 273 bp, Gossypium hirsutum
  Clone ID: LIB3135-029-Q1-K1-A8
atggaaactgacatattatgagaaatctatgtaattgtttgtcaaaaaaaaaaaaaaaagggaaaaataaaaaaataaaaaaaaaaaaaaaaaacaaaaaaaataacaataatgtacaaaatttaaagcatcaaattactaatgaaattgacaatctaaaataataattggaggcccttattaaaaaaaaacaatccgcacgcctctgttgtacaaatttggctattcaatagacgtcccaaatttaattctttggccgggatatataaaatc

SEQ ID NO: 37279 - DNA, 373 bp, Gossypium hirsutum
  Clone ID: LIB3135-029-Q1-K1-B10
cccacgcgtccggcaagttctagcacagtgatgaaggcagagaatgggcagtcgagctcgagctcgagctcaagctctaagaagagggggagacgagcaacaacaatattaacgctaccacaaccgcgaccacatcagcctaaggagcggtcgccgttgaccatagccaccttacgattagtgaaagagaaggccgagaaaaggggtaaaaggacgtcacgggctgtctccgtccggcactttgataatactgatattaactattactggttgctccctggatgggttgcggaggagcgctatgttccgtctggccagaagggccttggtagggattataaatattactatgatcctcctgggcacatgtact

SEQ ID NO: 37280 - DNA, 285 bp, Gossypium hirsutum
  Clone ID: LIB3135-029-Q1-K1-B11
acgcgtccgactgattacacattctcatgggccgtcatgatactcgaccatatgacttatgcaggggggccgcataccgaatgtataccacagtggggccttgctgctgttcggggcatctttacttgcatgtcttgctattacgcattatccgacaccgtggtgtgagcaaaacctattttggacgctgctgtgtagccgacattcgagaactcggattacgagcgagacgtcgatggtataactgacgtgcatgatgaatggttcatgcgtgcaccattgacc

SEQ ID NO: 37281 - DNA, 292 bp, Gossypium hirsutum
  Clone ID: LIB3135-029-Q1-K1-B2
cccacgcgtacgtccacgcgtacaatcaacatcaatgctgttgctctgatgcattcttggagtatagcttgatttgctgcactacttgcaaaataacgagctgaacccgagctacaataacactagtgatttcaacactaaattaatgatagtcggcgcttggttcttttaaactctaaatataatggaggccaaacatgcctccttttagaaacctaatttggagggctgatgaggccactcattctgactccatgagagacaccttggctgaatgtctgtacactatcat

SEQ ID NO: 37282 - DNA, 398 bp, Gossypium hirsutum
  unsure (1)..(398): unsure at all n locations
  Clone ID: LIB3135-029-Q1-K1-B3
cccacgcgtccgtaaagacccagatcgggtggaagcttttcacggccttgtaatggcttattcggagtcgggtcagaaattgaaagaactggaaaaaagaattgaaggggcaatggagaagtgcaagaatgagaagaagaataaagatttcagggatttcaagctattaattgctcaaattctggtcattgaagggagacattcataagctatgaaggtttatgaaggcttggttaaggaggaaccataggattttaggccatatttgtgtatggggattatctacacgttactgaagaagaaagctgaagctgagaaacagtttgaaaagttcaggaaacttgttactaagaatcacccttacaaggagtactcntgtgataacatgatacgcacta

SEQ ID NO: 37283 - DNA, 220 bp, Gossypium hirsutum
  Clone ID: LIB3135-029-Q1-K1-B4
gagaaagagaaacttcaagctagcagtggcagcgagaatgcaatgcagaacatcgcagacgcaccatgagataatactctaattcaactcccactattctgtaccacgaatcataggaatagtattcctaattcaatttctccttccatgtatcacaatccatgttcatctgtaaaaagagtacttaatggcattgttatgaaattaacaactttagatt

SEQ ID NO: 37284 - DNA, 355 bp, Gossypium hirsutum
  Clone ID: LIB3135-029-Q1-K1-B8
gagcaccacgatgacaatcctggacagcgcagtgggtgaagtctgacaattcatgcttgggggatattatagctataagagttcatcatctgcttgcgtagctagcttatgctgggcttttagaagagacctttctcaaggtatatgcacagatgtttgcagagcatcaagaaacattgatgatggatcttgcactagctcttgccgtacttatcaacctagctgtcatgattgatcctccttaggacatatgaatagacgattcggctgacacattgaagatggtcgctcatacctctaccgtgtaatggtaagtaagactgacaaggatcaggttgataggattagctatgag

SEQ ID NO: 37285 - DNA, 331 bp, Gossypium hirsutum
  Clone ID: LIB3135-029-Q1-K1-C2
actttattcgttgcccctgtcttattcaacctttagagacacgattttatatagccgcaagtctctcacagttaatgaggcttatgattctttaacctcatatgataagatgaaacatcttatggttaaaaccgactctcagggagagggtctcattgtttgtgggagacaagatcggaatgctgatgatgatcgtggaaggacacaggaacggaattctcgcggtaaatctaagggtatatcgaagtctttaaaatagaggtaaaacttataccttcttgcaaaaggaaatgacacattaaaatatgaaatgttataaagctaccagaac

SEQ ID NO: 37286 - DNA, 450 bp, Gossypium hirsutum
  unsure (1)..(450): unsure at all n locations
  Clone ID: LIB3135-029-Q1-K1-C3
accatacgtcctgacgatagattactcaatctgaaaagacaacactttatatagacccaggtaatcgcgagtntaatgacgtatatgaatctttaacctcatatgataagatgaaacatattatggctgaaaccgcctctcagggagagggcctgattccttgtgggctacacgatcagattgctgatgatgatcggggcaggacacaggaacagaattctcgcggcaaatctaagggtctatccgagtcttcatatcgaggtcaaacttataccttctgcaagaagaaatgacacattaaatatgaatgttataagctacagaacaagatcaaaagggaggctacgaatcaaaagggaaaacaaccagaattctggtgaaactgatgttgtagaagactacagcgatgatgaatttctagtcttttctatcaacaattctaaagtgagc

SEQ ID NO: 37287 - DNA, 453 bp, Gossypium hirsutum
  unsure (1)..(453): unsure at all n locations
  Clone ID: LIB3135-029-Q1-K1-C4
gggaggacgagctaagggtcgtcttcatagatgggactttgaaacagaagaggaatgggcgacgtacaatgagcagaaggaagcaatgccaaaggctgcattccagtttggtgtgaagatgcaagatggaaggaagacaaggaagcaaaacaaggaccagaagctcaacaacgagctacacaagattaacaaaatactggcaagaaagaagatggagaaagaatcaggtggtggtgaaggtggaagtcatagcgatgatgtacagcctggaaagaaacttaggatatcaggttaaaaagttccagttcctttaccagaaaggtaaagaaaagctactatttcttggagctgatgtgttaatttgtatgaaagtaggtcattggcaaagagtgcnaaaattcatgaaaaaatcttttttagaagcattgaatgccaacttaaggccggttttat

SEQ ID NO: 37288 - DNA, 316 bp, Gossypium hirsutum
  Clone ID: LIB3135-029-Q1-K1-C6
cccacgcgtacgcccactcgtccgtccacgcgtacgctcactcgtactttcaagcgacgggtatcttttgtacatctatggctcctatactccttcttatatggctatatcagttcaaacttgtatcctactgatgcacagatcgttgtctgctatgggatgctaggcattagtctccctagataatgggatgacattcaactggaccaatcatacagcatccgtcgactgaggctctacgatccatatcaacaatcattacacagctcttatgggctctaacattgaacataatgttatgatgttccaaatgatc

SEQ ID NO: 37289 - DNA, 466 bp, Gossypium hirsutum
  Clone ID: LIB3135-029-Q1-K1-C8
attactcgcaaactctttcatgaaacaaactcatagtactgcctatgctcgaaagcggtgaaggcgttcgttttacactttcatacctacatgtcgtggaatagcatcaagtatgtaaacacaaagaatatgcattgctgcgttatgaaatgagatacatttacctcttacaaatcttttaattgcctgcaacctgcttttaacatgctagacaactttaagctcctccggtagtactatgtgtatcattagtaacgcacaccaaccagggacacgatgtagctgtaacctaaaaaaatagtttggaaggccaatgtgttcacatagggtaacgactctgctacttgaagaaattactccctttcacataacaggacccatactgagatcgctgaggtgctttacaagagttgctctcccattcctacttttgagcagcagtgcatcacactggtgtactactatg

SEQ ID NO: 37290 - DNA, 227 bp, Gossypium hirsutum
  Clone ID: LIB3135-029-Q1-K1-C9
gttaattctagctatcattcaacatcatttatctttcatactgacccttgcatgggccgcgtcgttcactgtacatgaatgcatctatgccaaaagatccatcatcagtttcgtgatgcagcaacaaaacctaaatctcatctatgatgcaaccactgatcattatcaaaccattttaatacaatacatgaacacacaactgagcccacagaatatcacccactcat

SEQ ID NO: 37291 - DNA, 191 bp, Gossypium hirsutum
  Clone ID: LIB3135-029-Q1-K1-D10
cagacgcgtacgatgatgtgcaagtgcaatccaaagcatgattagtacattcctggctacctgacatatttgtgtgacacgtttctcaacgatacaatatctgttgttgctaccatcacatcgccttgcaccgagcagtgtgctgaccggcccccaacagatatctaccgcacaataaactatcatctccc

SEQ ID NO: 37292 - DNA, 324 bp, Gossypium hirsutum
  Clone ID: LIB3135-029-Q1-K1-D12
cccacgcgtccgctgagttaatactgtagagaagagaatgatgatggcatgattgaatatcgagaaagattgttaggagagtattgcggaagtacggtaagcttgggttggttggacccatcgtcatccacaagctgacatgcgaacctccccaatgaagatatcgaccacacattgtcgtacgtacttccatgctgttgctggtgaatggtcagttgttctgtcttttattatatgagtgcattactaacaaaccacgataaaaaataacttatatccaaatcttaaaaataatattattggtggaattattatgagtttaga

SEQ ID NO: 37293 - DNA, 285 bp, Gossypium hirsutum
  Clone ID: LIB3135-029-Q1-K1-D3
cccacgcgtgcgctgatacatacggaaccgtttctagagcatgccatggcactcacgtgtgagatgagaccggctttcactgtcctgcacgatattgcattaagcagagatcttaagacgtccctgtctgttattgctggattatgggtcttgcctattgtggcaagttcgagcaacttcatgactctgacctacataggcaccgtactacttcacactgtacctgtgctgtacgagaagtattaagacaaagcggatcccttcgccgagaacgcaatgcctgag

SEQ ID NO: 37294 - DNA, 234 bp, Gossypium hirsutum
  Clone ID: LIB3135-029-Q1-K1-D6
aaaaaactgaagtacacaacgtcgtgctattaatgatatctctgaggctctatacacagccgcggctcttaatacgacgatctattgacaatgacgtgctcggaaagaacccaataaaaatggggtgaagatatttttatctatggttggaatctgcatcgaatgacaagtatgtctcacgatgcagagacactgaatcctgaaaggtggcccttagatctaccgaatcctaat

SEQ ID NO: 37295 - DNA, 304 bp, Gossypium hirsutum
  Clone ID: LIB3135-029-Q1-K1-E11
ctttagttggtatagagagcatttgataccgtatcgagttttggttggtttgaaacattgttcacgtcaatttttttgcaacttgaacacttttagtttgcaatttcaatagattcatttctcatttaaaaaaaaaaaaaaaaaacaaaaaaaaaaaaaaaaaaaaaaaaaaaaaaaaaaaaaaaaaaaaaaaaaaaaaaaaaaaaaaaaaaaaaagggaaaacaaaaaaaaaaaaaaaaaaggggggggccgttttaagggacccaagtttacttccccgggcttgcgaagttttaatttttt

SEQ ID NO: 37296 - DNA, 401 bp, Gossypium hirsutum
  Clone ID: LIB3135-029-Q1-K1-E12
gaactcgcagagtggtcgagcggcgaaaatgactccgacgccgtcatcaacgtgtcgtgtgaggtggtgttattcgaacacttgctttggatgctagaaaatgctgaccctcatcagcccgagtctttggcggagcttgtcgagttttacgcttgttgatcatatgacagttcccatgtggtcgtttgcatggttcgcaacttgtacattatgtaaggatatttatttatataataatgcatgtgattaggcggtgtagattaagaaacaagaaatgattgtagagagatttaaccaagttcacgccggctaaaccaaaagccctgtcggaaatcatatttgtgtatcattgttgttcatttttgttatataataagaattgaagttcatttttcttatta

SEQ ID NO: 37297 - DNA, 291 bp, Gossypium hirsutum
  Clone ID: LIB3135-029-Q1-K1-E6
gcaatatgagttgacgctagcatttatcatacaacatcttgtggcacttcaaggacttgggcggaactttgatacgcatctctatttttataatacatcatcaatcaatcaagctgtcattttatgtaacacacaactataagcgtatcccttaccacagacaagtcaaactactaactgaacgttatgctcactacatgccaatgtttctatccaacagagataggcaccattcgctattgtgaggagtagtcctacgacacgacctatcacctcagatagttaatcata

SEQ ID NO: 37298 - DNA, 366 bp, Gossypium hirsutum
  Clone ID: LIB3135-029-Q1-K1-E7
taataatgaactagcaagcatatttactcatatatgaacgcgcaacctcaaaggcatgcagcaaaaatgagagcataaaaaccactattatacatgaacttgcttataacgagttttctgaacatgattcatattttcatgcccttgatcaacagctgaatcaagaagctgctatcctagactggaccaaatctagcggccacgctttaattggaatcagacactccgcgaactatgaaaaatattatgatgaagatggcacaaattatcagaacgttggtggaaatatgtcaactttgctggaaaatgcccgcgcgtcttctgtagctgctgcctttctacgaacgaagaaacactcctgccaat

SEQ ID NO: 37299 - DNA, 399 bp, Gossypium hirsutum
  Clone ID: LIB3135-029-Q1-K1-F2
cccacgcgtccgtggataatgaccgatggatttcatcgacagcttggaggtaaaaatcaggttcttgacgatccgtaccgaagatcatactctctcttcctacctccgatgctgatgaatcccaccgtaagagtattttcttcgcacgaccgtagccactattatccttagtactattcgccggcgactgcataactatctttcacgaatccaaaatagaaaatgtgacacttgcagaactatgattataattactcctttcctttataaatgctggagaaaggttgtagcaaaatgtaaataattaagtttgaagctccttcagcttctgaagctgctgcctttcgtcgtctgataaacactcctgccaatgtggacgcatctgaaacacatgatgag

SEQ ID NO: 37300 - DNA, 336 bp, Gossypium hirsutum
  Clone ID: LIB3135-029-Q1-K1-F3
gatccgcatccgggtccggatacggaagtgtgagtgggagtgggaatggaagtcgaggtggtataggtggatgagacagcatatcatactctcttttacataatcttactcatatgaaatttactgaacataaatcatattttcatgctcttgatcaacattttactgaagaatcttctagcctatactcatccatatctatcagccacgctttatatagaatcagacacttgcagaactatgaataatattactccttacattgctaaaatccttaaaaaagtttgtagcaatatgtcaaacttttctgtaagatctccctgcgtcttctgtaac

SEQ ID NO: 37301 - DNA, 232 bp, Gossypium hirsutum
  Clone ID: LIB3135-029-Q1-K1-F7
ttcgtattaaaaaacggcctggctagaacataggatcctcatgcatacatatgggagtacggacgtataacggtggtcaaaccatctattttcttaatacattactacgagagattataacgctgtttacattatgaagcttgctgagctaagcatacatgattatggaatgactaagacgtacataggatcattatcatagcccattgctggacctttaccattgtctacc

SEQ ID NO: 37302 - DNA, 328 bp, Gossypium hirsutum
  unsure (1)..(328): unsure at all n locations
  Clone ID: LIB3135-029-Q1-K1-G11
attcnggattcgacgcgacgcctacgcgctacggtctgatgcacacaatctctacccttcattttacgccttgaccatacattttatggttggtttcaatacgaagttgcctactgatgaatatttcatctaggaaaaccaggaaaagctacgcttactactggatatatatgaggataggctgtcaaagaacaagtacttggccggcgatttcttaagccttgctgatctgaaccacctaccatttactcagttcttgtggcttcaaattgcaaggtaatacatgataaccagcacgaagcaaataagtgctttgttggattatatt

SEQ ID NO: 37303 - DNA, 300 bp, Gossypium hirsutum
  unsure (1)..(300): unsure at all n locations
  Clone ID: LIB3135-029-Q1-K1-G12
gcncctggtcaagctccatcgtccaggtggttgctgttctctgtcccgtcccttaaggcgccccaaagggtaagagataacactttctattcttgtgtatgttgcctttagaaatgggcctgcgtttacattcttgtagaaacactttggattctgctgtagaagggttctttgattcagttaaacagtttgaatcgcactttgacaaagctatgaactggttgagaatacctggttggaatctcataatttctatttagttgcttattttatccaaaataatcttcacacctttgagac

SEQ ID NO: 37304 - DNA, 306 bp, Gossypium hirsutum
  Clone ID: LIB3135-029-Q1-K1-G2
gcctgagaaacttgatgattctaaaagggggttggcaaatttaattgttgcaaaacttcgccagtagagcaagagccgctgaaaagcccatctaatcttcaagagaacgggatcctataaaaataagcgtacggtcatccctggagctctcccgggccatatgactgtccgaatctaaggaacacttctgcgggtatagtgaagctaaaagaaaaaactgacagagcagtcaaaaagcaagtcttgctgcagcaaggtctcataactcggtgaagtctatgagaatgccaagacaaaatggagaga

SEQ ID NO: 37305 - DNA, 313 bp, Gossypium hirsutum
  unsure (1)..(313): unsure at all n locations
  Clone ID: LIB3135-029-Q1-K1-G4
ctgctttgatctttctttttattttatattagacggagaaagcatttctcaaacaccccagaggtgtttttaaggtgaactagcttcttccatgtctttattaattcttggttttgttgatttcatttttaaattattggtgtttttcgagatctgggttaaattagtgatggtttttttttctaaaaaaaagaatgcatctattacaaaatattttaaagttaataataaaaaccatttatngggtactttaaaggagaatgtccttgaattcatctgggttgttttgaatgaacaatgcttcttttttttc

SEQ ID NO: 37306 - DNA, 249 bp, Gossypium hirsutum
  Clone ID: LIB3135-029-Q1-K1-H10
cccacgcgtccggcatattccatttagtggaaaatttagtcgtttacttttatgtctatggttaattaatttagaaaataatttgttgtggtaaatatgtttatttttaattatttatttcattttggttaattgtgatgaacatggttggttttatagagtaatatgtaaatagagaaacagtagaattttccctaaggatttttcttaaaaaaaaaaaaaaaaaaaaaaaggcgaacaatctaaaaa

SEQ ID NO: 37307 - DNA, 401 bp, Gossypium hirsutum
  unsure (1)..(401): unsure at all n locations
  Clone ID: LIB3135-029-Q1-K1-H11
caaataccaaccctcaggaaaaacataatttgtatatttcggaagctgaactgcagatgcatcaagctcagacaccattgtgggcaaaaccagagatatactttcaatcaatggtgatggatgacatcaacatggctgatgaaaatgcttttgttggggaagttgaaattgaaatgttgctaactcgcatgattggaacacggaaaaaaagcttagttccagtttttgattaccttcaaagctttaaattccagcaagcaagggttccaactgtagatagcaataacaatggatgcctgctgcatcagaggtcaggtctgtctgaaaatggccggctttcatgtagaagtatttctggctctcttaattgcatgaccgaaaatggtgatgcagntgatgaa

SEQ ID NO: 37308 - DNA, 229 bp, Gossypium hirsutum
  Clone ID: LIB3135-029-Q1-K1-H12
accatacattcagtttatcaaaaaaaatgttggacttcttaactgataaagacgttttgcctcatggcttcaccaaggcttacgccgcccatctcaagcgctcccactagatcgagcttgctttattgactgatgttgagaaaactgctcaactcaaggaacttccatcctacgagccacattggctctttattagaactgctttcatggcaacgaatacatactttaa

SEQ ID NO: 37309 - DNA, 258 bp, Gossypium hirsutum
  Clone ID: LIB3135-029-Q1-K1-H8
tcttatccagaaaacactcctgcaagagttcagatcatgtaccatgctcatcggtgctgagagactcaatacagtggttggctgatatcgtgttctgttgcttgattctgacaaggttctgagaatatgatacgctagaagaactattgtcatatgaaggatgttgtttctccatgatggttcagatgccacgttgatgcttatgcacaatactcacgaagcctagcactcggatgtggagaggacagggtccgcaaa

SEQ ID NO: 37310 - DNA, 388 bp, Gossypium hirsutum
  Clone ID: LIB3135-029-Q1-K1-H9
acggaaattttctgcctctaccaatgaatggctatcaaaactacatgcaactgaagatttttgcacctggcagcgaatcattcgtttagacgccattcgtgccaatactgaatggatgccatactctgtttctcaggctgcagtatcagatcggagggcacgccgcttagctaaggctgttggattaaaggattatgatcacctggagccttacgtaattttacatgctgcacgtttgggtactatgcttgaagcttatgcgctttacgatcccgaaattgactactgccatggcatgagtgatcttctttgtccaataattgcagtcatgccagatgattatgaagctttttggtgctttgcaggtttcatgaagaaagctcgacat

SEQ ID NO: 37311 - DNA, 223 bp, Gossypium hirsutum
  Clone ID: LIB3135-031-Q1-K1-A10
gaaacttgaaattggagtagactcgtgctaatttgtccaatgctttgtatgtttgtgggctatttgcaaagcctaagctgcacttggttttgctcttgtcatagcaccaagttatgggctattcattgttttctttttcttcaattataaatcttgagagagtactctttaatgtaatttcaatcctgttttgaaatgaatcacaatattgcttttcaaaaat

SEQ ID NO: 37312 - DNA, 377 bp, Gossypium hirsutum
  Clone ID: LIB3135-031-Q1-K1-A12
gagagaaggaaaagagctaagagacttggagagatggcaaataaggctgttgagatagggggatcttcccacctccacatttcacggttaatccaagatatcaggcaaagggctaatgagaggaagcaacttagcacctgaaatgaagcggcaacctaaatctccatactccaaaagagcttagggagtcacttcatggtcacttatatgaatcgctatgtatgctttaccagagaaatataattgtaaaatgcaaatggcccaatctcaagataaatgaaaggagtacgagtcgcagcaaaaaaaaaaaaaataaaaaaaaaaaaattaatttttaataaataataattaaaaataaaataaaattattttatttt

SEQ ID NO: 37313 - DNA, 469 bp, Gossypium hirsutum
  Clone ID: LIB3135-031-Q1-K1-A4
aaagctttcaaatctgcagcaatggaaaaaagatgagatcgggatttgatttgaggggaaaaaaatctggttgccaatactcgacgattgttattattacaccttttttttttagtatgaaatggatcgtggttatgatgatggcgttagctgcgtcactgctggttttgccgctgcttctgccgtcgcttccgcctccgccgtcgatgcttcttttcgtaccggttctgatcatgattcttctcctctttttggccttatctccatcacaagcccctactgccatcaccactgcagtatgaaatctccagatttgtatgtatttgattgcaaggaatatgaatatctcatgtaagttgaattattttctctctttttttttccatttttgttgtttgaaatcgtaactgagcaagattagaaaacaaaatccttcgtctagattttcatttcttaaaattagttgtag

SEQ ID NO: 37314 - DNA, 397 bp, Gossypium hirsutum
  Clone ID: LIB3135-031-Q1-K1-A5
gctgggatgagcacgatgaccaatcaacccttacccgtcccctgagttgcttatactgcaagaccagacttatggagtcaactgccaccatcttcctgatgagctcccagttcgcggttttgacgaggcgggacactgtctggctcattttcgagaagctgtctctggcggatttggcacctgccagctgcgtatgcaaggacctggacgccgcctcttgcgaagacgatctggggggggagacagttcatgcttcttggcagctattagaggtgatggggaagcccaagtcgagaagtttctggagagataaggggatagggaagtttgctatttcccatggatttatatgctttgtgagacaatatgttatttgattgcatgtggattaatggat

SEQ ID NO: 37315 - DNA, 407 bp, Gossypium hirsutum
  Clone ID: LIB3135-031-Q1-K1-A9
cccacgcgtccgcccacgcgtccgtatttatgttatatcaaaataccttcataatgggggaattggcttaatgacaaagttaatcactaacatttacatatttttgtcaaaatgatcataattgtattttttagctttttttggctattaatttttttttcaaactgttttttttttaaacagattcgatgaaagtaccattaaaaaaattaatgtggatgatgtggaatattttcaatgagatgtaatttattacttaggtgttcaataagatagttacatgtgaaaaataatgaaataaataaattatacattaaattaaaaaaataactcctaatttaaagataataaatgtaattatctaaaaaagttttaatttgaaaaatgcatgcctttgtttactaaga

SEQ ID NO: 37316 - DNA, 337 bp, Gossypium hirsutum
  Clone ID: LIB3135-031-Q1-K1-B1
cccacgcgtccgaggactctcagctgatcccgagaccttcgctcggaaccgcgagctcaaggtcatgccctgcatatgggccgtgttgggagctcttggctgtgttttccctgagctgttggctatgaacggcgtcaagttcggcgaagctgtatggttcaagggcggatctcatatctataaagcgggtggacttgactacttgggttacccaagcttgatccatggctcaagcatattggccatctgggctcgccaagatatcttgaggggagccgaccatggttaccgtgttgccggtggacccctcagagaagtgactgacccattgttccca

SEQ ID NO: 37317 - DNA, 428 bp, Gossypium hirsutum
  Clone ID: LIB3135-031-Q1-K1-B11
gttcctcgaagcctcttccccttccccattttttgccacctccatctagtccttgcggccagccagcaatgcttctcagcacctcgccggcgttcatatttcattttcctccttttcgcctttcattgtcgaaatctacactgcaccaatcgatgacagcatttatcttcctctctcgaaggttgcaggagccgctgttatttttgaggtacaaagaagctgtagatcagaagcaagaaaagaggagcgacgcatacaagaattggtgataaaataccacatctttattaagaagtgatgtctatggaggtggaaggatttgatgaccactttctttgtaatgtgattatcttgtgggtcgtgaatactagaccaacgttttcttagctaaaatgtcgaaacatagaaaattttggcttttaaatttt

SEQ ID NO: 37318 - DNA, 374 bp, Gossypium hirsutum
  Clone ID: LIB3135-031-Q1-K1-B2
cccacgcgtccgcccacgcgtccgcccacgcgtccggcagagtgcatggtcacttgaattttgagcatgcagttgcaattgctgtaggctgtcttggtacccatatgatcttatcgcagaaggttgggtgacctacagaggttgcagatggtatcactgtaattaacacacgggagggtgaagaaatctccatctttgtgaaagatggttgagaatagaagaaggttatgattttctaatcacacgataccactgttttcttggtccctgcagatattatccagttgaggactcaactggaactgtaaatataaatgcagcggtgtggtcttgtttgctggactttagtttagggttagcactttgtgtataaa

SEQ ID NO: 37319 - DNA, 341 bp, Gossypium hirsutum
  Clone ID: LIB3135-031-Q1-K1-B3
ctacaactcatgtacatatatatttagtagggatttgaacctctagattatcctaacttcttaatccttctatttttggttatcaagtaattaattctacttagtggagtgacaaaaacccttggaagtttgacagtagcagatatttctaattgtattttgttttaaagctaactttgttagtaactttctaagccttttgctttacaatttagagagtttcgacttaccatacgaatctgattaaattaactcatttattattaaaaaataattaaattaatctaaatttaaaatattttggttggaattaaaatgttaattaaaaaaatttaatttta

SEQ ID NO: 37320 - DNA, 293 bp, Gossypium hirsutum
  unsure (1)..(293): unsure at all n locations
  Clone ID: LIB3135-031-Q1-K1-C1
cccacgcgtccgccctggttaatgattaaattagaggctatggaagaggatcgagccagactccgccaattgaggaaaaatagagtggtagccgtaacttgcataagaggggcactcctagaggctacgcctcggaggtttagttggatcatgaaattttaaagttttaaattcaaaattttaaataaggttgtaaagaaataaatttaaaagacgtatatggtggtatggtttaatgtgtatattaaacaatcgagaataaaataagatttgatttaaacatgttagccgnt

SEQ ID NO: 37321 - DNA, 474 bp, Gossypium hirsutum
  Clone ID: LIB3135-031-Q1-K1-C3
attttgggcccgttgggtttatttaatattcttggttaacttcagataacatggcgtacaaatgggggtgaacctggtcgcttgcaaacacagcaaattctaggcactccaatcagttgcaaagagattgagttgcaaatcctggagattccatctctaatcaatttggataagtcctttttggtacatctaaatctccttaaccatacagacagagagttgggcccatttgatgtccggctatcacaaaatagcgcacatgaggagaagaatgttatgattaatgggcttcagactatcttattaccacaggtggaagcattcggtaccactgattttcatctgagcctgattgcaactaaacttggagtccagataataagtggaattacagtgtttgacacaaaagataagaaaacttatgacccattgccagatgtcgagatctttgtggagtctgattgatttatcaaa

SEQ ID NO: 37322 - DNA, 442 bp, Gossypium hirsutum
  Clone ID: LIB3135-031-Q1-K1-D12
cggacgcgtgggcagccacctccagggatgaaattcaagtgctacctgcagtgatagcagcccgggcagcactggcaaaaactgcttttgccaagagcctccgccctcaatccttgcccaccaaagtactggtgatagggatgttaggcatggcggcaaacgtaccgttggggatatggagagagcataccaaaaagttctcaccatcttggtttgtggctgtccatgcggctgttccattcatagccatgctccggaaatctgttttgatgccaaagacagctatggctttcacaattgcagcatccatactatgacaggttattggctctagggctgaacggtatcgattgaaagcagtatctgcaaaacaattacatatcagggaatcctctgtttctgttggtgctgcacaacaattggatgtcgtcagttttaagga

SEQ ID NO: 37323 - DNA, 468 bp, Gossypium hirsutum
  Clone ID: LIB3135-031-Q1-K1-E12
cccacgcgtccgcccacgcgtccggacaagacaaatagggacctcaaaacgccctgagtgggacgcccccttcgggctgagatgctttccggacatgctattctttttatttatagaatacttcgctacacggcttagccgacctggagcggctgccttcgttgattccccacgaaggaactcgctacttccccttactgtcctaagcgggggagaaggattcaaaaccttgtgtgaaggaaaggctgtcaaagtcgttgaccattaatccggttgaaggacaaatggacagtgaatcaacagaatcgagttctttgcaggataaggattcggcagtcgagacatctatatccatttcattaagaaagaaaggaaaggttgcgcagcaataggttctttgtgaaagaaggttgcttgcaagttctcgaataagctctttgctttgacacagatattatctagatgcca

SEQ ID NO: 37324 - DNA, 459 bp, Gossypium hirsutum
  Clone ID: LIB3135-031-Q1-K1-E4
agggtttcaatttcaggtctcaatttttcaactcagggttttgtactgttttgtgaaggtggatatgggtgctgaggaggggacaagaaacggtgaaggagcagagattggggaggagattaagtgcttcaagagtgaaccagtgaataatgggtttgggtctttatttgtaaacgattctggtgatgggagctcaggagcaagtgagagtttgcgaacatataagagacggagacagttaaggtcaacttcaaatatcgaagtgcaagatggtgggagagcttctacagaccagatggaaagctctgcctggagactatcctatgagtatgagcagaaggtgtgactgggtcgttgggtgcataaaatacaatttcaagctactgtgttaagtctaaaactggtttgcataatatgagataaatatgtgattttttgatgtctagagatataatgaat

SEQ ID NO: 37325 - DNA, 438 bp, Gossypium hirsutum
  Clone ID: LIB3135-031-Q1-K1-E6
cccacgcgtacgggaaatatgtcatggcgcatgctatcttaggagagcgctgcgttagctttgtcttgttttaaataatattgtgcagcaagtccgtggtcttataaacagatcgggaaaaggtgattcaacttctgaactgcatcggcaggcaacgcgtgatcttgagtccgctgtctctgcctggcactctagtttttgccgtttaatgaaatttcaacgggattttattcactccatccatggctggttcaagctcacccttcgtcctgtcagcaatgacaatgttgaccgcaatggtaaaacagatctctctgatgtatacgctatttgagatgagtgtgaacttgctcttgaacgtgtccctgacacagtagcttcttaagctttcaaaagtttcattaatggtcgccatgtgatattctgttaaacaaaaat

SEQ ID NO: 37326 - DNA, 422 bp, Gossypium hirsutum
  unsure (1)..(422): unsure at all n locations
  Clone ID: LIB3135-031-Q1-K1-E7
cccacgcgtccgtttttatcatataaccaaaaatggaaagatagtcacgaagagttgtctatgaaagcttacgaagaagaggcggaggaattcaagatgaagtttatatattctcacatcgcttccacagaacgtgaggaaggagttgtgggcctgtggttgcattctctaaaccacagaaactatcccgatttacgagccggcagtggagactcagttgaagggaagaagagtcctaaggttgatgataaagcagacaccgttgaagaggacagtaatgtagtggagaaaaacggtgatactactgagatgcaaagtgccgaagagtagaatattatgatacgcatactcattgaacaaattaactattttacataatttttattaagttatagntggatggtcttcctgtttcatttgga

SEQ ID NO: 37327 - DNA, 452 bp, Gossypium hirsutum
  Clone ID: LIB3135-031-Q1-K1-F11
gtggttgtgatgtgggtgctagtggttggatttgggttcggtggatgggctagcatgaccaattttgtcaggcaaattgacactttcgggttgtttgcaaagtgctatcagtgcaagcctccaacaccagcagctgcacagcaccactagtcttactcatgaatccaaaccccaacaaaaaaaaattgaattctctctttttactccatgttttgtatcatacatagggagatagcaaaacctcccctacatgtgatgtgtgttagattttgccttttctcctttttatatatatatttatcccctcccccctctctaaattagttgttcaattaaaatagtgtgcttaatagtaatgattcctttttgtgtcatggcaaaggcctaaaattaatcataaaatagccttgtatgtttagcttcacttcattctcttcttttggttatatata

SEQ ID NO: 37328 - DNA, 204 bp, Gossypium hirsutum
  unsure (1)..(204): unsure at all n locations
  Clone ID: LIB3135-031-Q1-K1-F9
ccacgcgtncgaggggtgtataattaacttgcaaatggcctttaatggctgggtgtggatttcttaactttgccggcgggaccacccaattaaaatttccaccatggtttactttatctttttcccaaggtgtggtgagaaattgtggggtataaacttaatgtgggactttggttgagacactttaccccatttcttgcgcct

SEQ ID NO: 37329 - DNA, 327 bp, Gossypium hirsutum
  unsure (1)..(327): unsure at all n locations
  Clone ID: LIB3135-031-Q1-K1-G1
acgctcacgcgtccgcccacacgatcgattgatggtgagttgcatcatttatataactggctctgaatgtactattatggtaaggtgattgagcacccagagagatccctaactgtactgcttgtaatcctgcatatgccttcgccatgaacggagacgatattgctgcatggagtactgattttaaggcaggaaactcatacatatnccccactaccattatactcgaagccgatcttgaatattctgctgcaaaggctgcataaacatacatagctgctgccgtacttcttagcatctgtctataacgtatgttatcacctaaag

SEQ ID NO: 37330 - DNA, 258 bp, Gossypium hirsutum
  Clone ID: LIB3135-031-Q1-K1-G10
ctcatcagacataaacaaccctcgaaactttattgccaagattgcacgctacaacagcgggggcaacattcacaagaggaggacaatctcggatgaactacagcctataaaaatcgagatggccaaaaggaacaagcaggggatctggaactatacaaaccctgggggtgaagccacaatgagatcctggagatgtataaaactaacattgacccaaacgctcagtgggcgaacatcacatcgaaagaacaagccaag

SEQ ID NO: 37331 - DNA, 385 bp, Gossypium hirsutum
  Clone ID: LIB3135-031-Q1-K1-G7
cggacgcgtgggtaagcgtcatgagatatgcaccaaatgatcatgaatttattttcagaaagataagacatcaaagggatggcctttgagatccttgtactcttatattgctgtccattgtaatatctagaattcatataactggatactcaccattgggttccccaggcaccggaaccatcaagaaagaagtcctcaagcatccagttctgaatatggtagcagagaaattgggcaagtctcctgctcaggtagctcttcgttgggggctacagatgggtcacagtgttttgcctaagagtacaaatgaaacaaggatcaaagagaactttgatgtttttgattggtccatacctgaagaattgttttccaagtttgctgaaat

SEQ ID NO: 37332 - DNA, 474 bp, Gossypium hirsutum
  Clone ID: LIB3135-031-Q1-K1-H1
gcaccctggttctggatcatcagctcagacacagacagcaggagaatctgaagcacctgcaatcaccggagccacgccatccggtccactatcatctagagatgaggcttctccatttccttctagtcagaatacatcagcttctggatctactgtcagtcctctggatagacgaggattttcctttaataatcgaagcacttctagtaattcctcattgccaaatcaagaggaagcaggaccatcagagttgcagtcattttcggagtctataaaatccagacttaatgcagtgtccttgagatacagggagtcaatttcaaagagtacaagaggctggaaggagaggttgttctcacgtagttcttctatgtctgatatcgggaatgaagttcgtcgagaagtgagtgcaggaatagctagtgtatctcgtatgatggagcgtcttgaaatcaatggaaatagcagagaaca

SEQ ID NO: 37333 - DNA, 143 bp, Gossypium hirsutum
  Clone ID: LIB3135-031-Q1-K1-H10
gttttggacaatttgccgatttttgttcaccagaggttgtttttgaggtcaagttagacgattttaacatttatggatcctcaaatcgctctatatgtgatgtttatttactttgttttcttaaagatccctttttgcatctt

SEQ ID NO: 37334 - DNA, 363 bp, Gossypium hirsutum
  unsure (1)..(363): unsure at all n locations
  Clone ID: LIB3135-031-Q1-K1-H2
ctgcactttatcttgggcagcttcttgcactttttcaaagttgcgacgctatcagagctcaaagatgtagatatgacagaaagccctgggttaacaaatctgaaagcaacacctcttgaggttctcatcactccacgtcttgattccaagctttacgtgtgataggcaaagaattcatatatttagctgaaagaaaaaagtatacactgtgcgactactatggtgaaatagatgcatttttcaagcatcttgtagacctgcactctgttattattgttatgtacttatggctttcccacttgtctatgattcaatctgagtagcactccatctaacaatcnnnnnaaaaaaaaaaaaaaaata

SEQ ID NO: 37335 - DNA, 233 bp, Gossypium hirsutum
  Clone ID: LIB3135-032-Q1-K1-A11
cgcctccgcgcatttatatatttccaatggatcaaggacactgatctgctcattctgacttcattccttggggaggcgcacttttcttgttaatatggggcccgaacttaccatcccaactctgggcccctttgaacgcgaataagtattggttgtggatcaaccgaccataataagattgtgggctaaatacgctatcaatacaacaagtcttttctggacaatcaccattc

SEQ ID NO: 37336 - DNA, 365 bp, Gossypium hirsutum
  unsure (1)..(365): unsure at all n locations
  Clone ID: LIB3135-032-Q1-K1-A2
aacaaaaatacccctgcgaaggggtctctgtacatttaatttcactctaagacggcaaaactcacccagtatttcagatctaagcacccctccaaaagtaacacctactgcatgtagcagatcttttttgtcaaactctggtaagtaaggcccagttttaatccaaaacggagatgaaacaagccttatttgatctctcgccattgatttactcaattgatcaaaaaggattaattgcttcctaaacaaccatggctgaccttccaggaccgtttctaaatcctcttctgattcaaacgatatcataaaaagatnttgtcctaccccttgaatcccaaattttttatttgtctttcaaatactcc

SEQ ID NO: 37337 - DNA, 271 bp, Gossypium hirsutum
  Clone ID: LIB3135-032-Q1-K1-A5
accacgcgtgcgcccacgcgtgcgttaaaacaacagatactcttgaaccgaacgattgtttgcgagattctgcctgccaagaagttctatcgtgcagaggaatattaccagcagaaccttgccaaaggaggtcgattcgggtttaaacaatcggctgagaaagggtgcaatgatcctatccgatgctacggctaaaatcccaatactctatatgcaacttttagcttatgatagcttacagatttttgctttagccattcactagcatatt

SEQ ID NO: 37338 - DNA, 340 bp, Gossypium hirsutum
  Clone ID: LIB3135-032-Q1-K1-A8
tctagatcgcgagcgccgcccttttttttttttttttttttttttttttctgaacatttaaaattgccaatcctaggaatgcttcactcataaacttctaattcatgctgaatacatttgaaaaagaaaaagaaaaagaaaaaaacattttgaaatcaatcccaaaactgcaaaaatgccttgaaatatacaaagcagatgagatttaaaatgtttgaaaatttttatcattcctgactttatgaataaaaattcaagcgcttaatctacaagtcggcagatattattagatccttacttcaatgcctttcttcaacaagggtccttttacagactggat

SEQ ID NO: 37339 - DNA, 385 bp, Gossypium hirsutum
  Clone ID: LIB3135-032-Q1-K1-B1
cccacgcgtccgcccacgcgtccggttataatgttgctcttggaactgcaaggggaatcacataccttcatgaggagtgtagggactgcattgttcattgcgacataaagcctgagaacattctcttggatgaaaatttcaatgccaaagtgtcagatttcggacttgccaaacttataaatcccaaggaccatagataccgaacattgacaagtgttagggggacaaggggctatttggcacctgaatggcttgcaaaccttccaataacttcaaaatctgatgtttatagttatgggatggtcttgttggagatagtgagtggaagaaggaattttgatgtttcagcggacacaaataggaaaaagttctctgtgtgggctta

SEQ ID NO: 37340 - DNA, 262 bp, Gossypium hirsutum
  Clone ID: LIB3135-032-Q1-K1-B10
tccggagcccgaaaactttagccaagatgctaggaacagtaatctgtgttggtggagccatttccatggcattgctcaaaggcccgaagttaataaacacacaactattaccaccaaagtctttgttcagcccaggaggagaaaattggttgctgggttgtctatttctgcttggaagcagctttttctggtcactttggatggtcttccaggtcccaatttctgaaagctgtccagaccacttgtattcatctacttggat

SEQ ID NO: 37341 - DNA, 229 bp, Gossypium hirsutum
  Clone ID: LIB3135-032-Q1-K1-B11
tcgttcggagcccgaaaactttagccaagatgctatgaacagttatctgcgttggtggagccattggcatggcattgttcaaaggcccgaaggtaataaacacacaatctttaccaccaaagtctttggtcattccatgaggagaaaatgggttgcttgggaagtctatttctgtttgtaatcagctttttctggacacatttttatggttttccacgtcccaaatatt

SEQ ID NO: 37342 - DNA, 284 bp, Gossypium hirsutum
  Clone ID: LIB3135-032-Q1-K1-B9
caaatttgaccctagatatttactctgtgtccaaacgccccccaaaaaatcaacagcctatgaaagaccagtgttttagactcttttttaaaggtacatttgcctttcgtttacccgttggattttgtttcaaaggtcgaagaaagctatgagattttggagctttttgctcttgaagagaggcggcatggagagagggaggattttgtactgcttatatggatcgtgaaggaggtatccacggcggatcttgttattactcctttcttggcattcggactgat

SEQ ID NO: 37343 - DNA, 264 bp, Gossypium hirsutum
  Clone ID: LIB3135-032-Q1-K1-C10
aggggctaggagcaagcagacggccgtatagggttccaaacctatcttactaataataagaaaggggcaagccaaaacctactcctaacaagttgctggcttttcatccgttgcgcgctagcgcgcttctgttattcagaaagcttcttcaaatatcccaaaaaagtacgggttataactaacagtcgctagctggcgcgctagcgtttttccttactaggaaacgctcttgttgttgtagcgcgcagtgcactaatgaatagg

SEQ ID NO: 37344 - DNA, 330 bp, Gossypium hirsutum
  Clone ID: LIB3135-032-Q1-K1-C6
cgcgtcgcgaccgacatagagacaggaggcaccgatacatgacgaccctcgtgaatatctggacgattaccatggtgaactatgaggctgtccaccacattatagtgagattcaggatcccatttagattacgaaaaagagaaaagccgaagctaggtcttcacgctgagagagttggaggtacctgtgtactgtatgttctcattgttgtcgacgttgtagagacatcgttcgtagaatatgaacatataagcttgggaactgttaacattgcatgcaccaccttatgtttggatgcatattttgttgaataaaatggaacttttaatt

SEQ ID NO: 37345 - DNA, 378 bp, Gossypium hirsutum
  Clone ID: LIB3135-032-Q1-K1-D10
gtcctgatttagaggatcacgttgctttctttttatgacgtagacatggatactagtgatggcagtgcgtgtaaagctgttgataaggagcaatccaaaagtatcacctataattcgaggtgaagagatatattttaattttagctgcgcttaggggtagaaatagaatattgactctgttttggtgggaaggaaatagggggctagaatcaaaagtttcatagcaagatgtgtttgtgtgttggtatatatagtgttggtaggataagcggcttctaaatatgcgaataagtttccctattctgctgtcaagaatttaaagtagagttggaggacaagattcacgatgagtgtacagctttcctttttttgtttttt

SEQ ID NO: 37346 - DNA, 283 bp, Gossypium hirsutum
  Clone ID: LIB3135-032-Q1-K1-D12
gcttcgaatcattcatagagacttgaaagccagtaacatcttgttggacgttgaaatgaatccgaagatttcggactttggcatggctaggatctttgggggaaaccaaaatgaagcgattacaattcgagtagttggcacatatggatatatgtcgcctgaatatgcaatggaaggattattttcagtgaagtccgatgtgtacagctttggggtattactgttagaaattgttagtggccggagaaatactagctttcgttcatctgattacacaagtctt

SEQ ID NO: 37347 - DNA, 442 bp, Gossypium hirsutum
  Clone ID: LIB3135-032-Q1-K1-D6
caaataaaattaagtttttacgaaagagccaaggtctcccctccaaaatcaactccagaaataagtttgtcccacccatctgatttcaaactttttccttgtcttccataaacttttcatatgagccctaaaactatctggattatataatttccctgcccaaaccgtacaaatcaatgttggtttggaacttggtaccaccagcgatcctttgactgatagttgaactaattcttcagcaagaagaccgatctcatcccctccctctctatcgtcgccaccgcttgcttccatccccagccacagtagttactgctatctctagggtttctcaaccaagcactcttgggagcagaagtctttagtttttaaatttaatatttatttcaaatttaatagtgtatttaaaaaagtttttttttcgcttagaaggtgaattatt

SEQ ID NO: 37348 - DNA, 288 bp, Gossypium hirsutum
  Clone ID: LIB3135-032-Q1-K1-D7
gcgctctaaattttgaacacacccaccaacactctatttacaacgatggagcaggagaggacacttctcacatcaaacgaagagctcgtatctacgatgaagcggaggaagaagggccgcaaccgaaacggatgcatacggtttttatttttataatgggccgaccggcgaagaagcaattactgtggtgaactacttaaccaacctcctattgatttttttttgttttacacattcataaggagaagtgcatccatcaatgggcgtggataagatgcttaaactttt

SEQ ID NO: 37349 - DNA, 309 bp, Gossypium hirsutum
  Clone ID: LIB3135-032-Q1-K1-D8
acgcccacgcgttcgctttcatccctttttgcataataagctgcctctatgaatgggggcgtaaaatccggggggttcacatcagggttatcaatgtttcctccagaaaagcgcccccaacttgagaaaccaatgcctgtatcagatgctttatacatcccaagcacaactcatttcaaccctttacagcagctggcaattaacaacatgccacttgcaccattaactggaatgcaaccaatgtctcaaggcaaccagatttcaagctccctttgcttctgctacaccttcccctttttttactgcaaa

SEQ ID NO: 37350 - DNA, 342 bp, Gossypium hirsutum
  Clone ID: LIB3135-032-Q1-K1-E1
cggtggtctataacaaaggcttgttgctgagtttcgaggacgagtcaggcaagtgttggtgtttccgttactcgtattggaatagtagccaaagctacgtgttgactaaaggatggagcagatacgttaaagagaagcaactcgatgcaggtgacattattttattccaacgacatcgtctcgatgctgagaggttgtttataggttggaggaggcgcggtgctgcactggatggcgggaacgccgagttgggaaataacagcggcggcgttcgcggtggtgacaatagttggtggagcagtaagagaggattgtatcaagggaatccttatcctgggcaca

SEQ ID NO: 37351 - DNA, 299 bp, Gossypium hirsutum
  Clone ID: LIB3135-032-Q1-K1-E10
cccacgcgtccggccacgcgttcggccgaactaagccaaactcctttggccatgggcccatcgcagcctacaacggacgccttcgtccgtcatgggcgatttacaaccctgcgatttctcctccaccttcgacttctacgagacgaggaagaaccaatggcggatttgcgaggtaaggtttcgcccttctctcttcttttatttgctttcggaataaaataagaaaaagtagaacaaaatacatagcatgagaatgaccacaaagagaaagcccgaagatttagatcgaaaaaatcacc

SEQ ID NO: 37352 - DNA, 114 bp, Gossypium hirsutum
  Clone ID: LIB3135-032-Q1-K1-E11
cactccctaggccagggatgacaaacaaaggcaatcgttagcacacaaggcacaggaagacgacagaacggtgaccggagaaagagcggagtgagctaaaggcgccaaaaccga

SEQ ID NO: 37353 - DNA, 376 bp, Gossypium hirsutum
  Clone ID: LIB3135-032-Q1-K1-E12
ccacgcgtccggatttagtttgttgcatgctggaaagcttattatgcctagaagaccaaggactcaattatgttgagtttcttgctgcaaaaggttggaattcaaacagagaagctagaaaatctgcgactttcaattgcaaaaggatctccaatgtgggagacacttgacttgtgcataaatgttgtagatggcaaatcattggagctgttggttccacgtcttgctaacttggttccatctggagttggcctcaatactatggttggtgttgccacctttatcaacttattatttcagaaagttgttgtgggtattaaaccctatatcaacatgctattgaggtcattgtttcctgttgtaaagaagagaaaag

SEQ ID NO: 37354 - DNA, 200 bp, Gossypium hirsutum
  Clone ID: LIB3135-032-Q1-K1-E3
accacgcgtgcgccaaagcgtccaggtattgttgttactaactggatacctctgcgcctccgcgagcaggatgatgagcttgaagctgatggagctctttatctaacccgccatgatgtgaactctcagggagggccatgtcgataacaacactgccgctttgtacccattagaagatatggctacatctcaaacagcag

SEQ ID NO: 37355 - DNA, 431 bp, Gossypium hirsutum
  Clone ID: LIB3135-032-Q1-K1-E5
cagaaactgaagtatggaattcgggaaaatccacagttcttcaagttcttctgtcactccaggctcttgtgcttaatgagaagccatacttcaatgaggccggatatgataaacagttaggaagagccgagggggaaacaaactcggtgagctacaacgaaaatgctttcctcgtaacctgccagtctatgctttatatactccggcatccacccaagcattttgaggcacttgtcaaggagcactttagtagacgtgccaaaactattctctccgcttgcaatgcatacatggaaggagcacctgtaggatttgctcttgaatgtggcaaaaatgggcacaatgtaaatcttaaagaaaggtctactgggttcaaaatcatgctagccaaagcttttcccaaagctttggggatgcattttctgatcagg

SEQ ID NO: 37356 - DNA, 332 bp, Gossypium hirsutum
  Clone ID: LIB3135-032-Q1-K1-E6
acgcaaagactcccatgctttccgtttttcaacaaccaataaaagcaaactatattttgtcactactcgtacagggaaaatgaaggctctccttcttttggggggagcggagaatgaacagaatgaaagaaaaatgaccacggctattcaatattcaaaagaatcttttttaaaatgtttgtcttggccttgaccaaaaaccgctggttctgctacccctggttttgctatcgctggcttagctaccgctggctcttctaatgacctgtgggtgggggggcaaatggaaccaccccaaccacccatcgtgcccagcccccttgagcaatgtg

SEQ ID NO: 37357 - DNA, 363 bp, Gossypium hirsutum
  Clone ID: LIB3135-032-Q1-K1-E9
cccacgcgtccggattgattatacaagacatccgtcagcagcttcatcagctctggtagaattaacaacccatctcgactttttcaaggaaaggcgttcccaactgatagaacagcttcacaaccttgatctgaactatggaacatcctctcaggagtttttatacaaaccatcatcatcacccccttggaactaaccggtgaatctggaggagcaacgttgtctcgtgttgttgtacatcctaatttgttgcatgtaatctcatttcttatcttttactctcgttttttcactttggtttgtgaaggtgatcggaagtgtaatcagaatgttttaatttttttatgggacattgtaaagaaa

SEQ ID NO: 37358 - DNA, 369 bp, Gossypium hirsutum
  Clone ID: LIB3135-032-Q1-K1-F12
tcggccacgcgttcggccacgcgttcgaacactcgttcgttcacacgtgacggtttttttttttcagtgagaatggattctatggaaccagggcagtacctaacacaaacagaggcttactctcggcttcctcatttcattaatggctctatgcgccaagcgcgctagccggcttttcaagaagctaaagcctaaacataacaacttagcttccggcactccgagattctacgagccgaaatcgcctttgaaatcttcgctgagatcgccgatgccgaatcaatttttggcgacgataagccacaaagcgatcacgctggtgaaccggaaaaacataggcggcggaaacgggaaacacgtggaggagga

SEQ ID NO: 37359 - DNA, 435 bp, Gossypium hirsutum
  Clone ID: LIB3135-032-Q1-K1-F2
cggacgcgtgggcggacgcgtgggtttgcaggaaaaattgtagtcccaggctcattatcacggccgttatcggagctgtttttcgattttttgttggtgtttcctttccatctgtttccctttacaagattcgaaactttcctttaagcctcggaccgtcagttggtggagccacatctgaaagcaaacaattctatatggtcggatcttctgaatcatatcgagccaatatttataagatatatgatccaacaaatcctcatggtgcagaaacattaccaccagcaattgttgtaccagagaccgatctttacctgcgcagattatggggtgaacctagtcaggatctagagaagaaaccaaagtatctagtaacatttacagttggtattgatcagatgaataatactgataaatgtgtttaaaaagttttct

SEQ ID NO: 37360 - DNA, 446 bp, Gossypium hirsutum
  Clone ID: LIB3135-032-Q1-K1-F6
cccacgcgtccgaaaataaagaaccgcagtaacagcttaatcagcaactttggtaccgacatccacttttttttgttctatactctccacttgatgtggaagtcttccaatcctagtagttgagatgaagaaaggacaggggaggaagtactttatattccccaatctgataaagctgagccagagactttatttaataatttatctttgtgattgaccttaaagtagattcttaagtagtttagattcattcctatccctcaacagaggaagttaggctaagaaagagtagaaggcagactaagctggatagctagctagattaatagacagtgaaagttacggctacagtaagcacttttctttctattgattcttttgattctgaaactcaatcttgaactcaagcaggcgagcaagggtagagaatttccagtggagctacg

SEQ ID NO: 37361 - DNA, 248 bp, Gossypium hirsutum
  Clone ID: LIB3135-032-Q1-K1-G5
gcgtgcggttggcggtcggacggtggaaatcggcgaccccatacctttcgacggtggggggtgcaggtatcgatcatgtctgatctgccctggacaaagcttgccctcgtgacaactcatgtgccgatgttaaggcacttgctgctcaaacttctcgtttctttgggtggaggtacgacacaacaagttccgtaagggagaagggattgtctgactgcgcacctggaagggaccggatgaatccctac

SEQ ID NO: 37362 - DNA, 297 bp, Gossypium hirsutum
  Clone ID: LIB3135-032-Q1-K1-H4
gaagctggtctcactagtctgatcacacactggaaacaagcactctttttgcaagagcacggacacaatcctattactaggtgtatacccacttacgaggatagacagacagcttgcaaaaccatgtcaaactcaaactcatcattgctgtcactccgcgatgccattaagctttactgggatgcaaggtcatgggttaaatattaagccaaaacagcgttctcgtgatgcaccagcaacaaggtgcgctacttgagactgacgactcctggctgatttagaaagagaactggacgc

SEQ ID NO: 37363 - DNA, 222 bp, Gossypium hirsutum
  Clone ID: LIB3135-032-Q1-K1-H9
cggacgcgtgggaaagccttatgttttgtttaaacgacaagaacaaattacaaggtgttattcaacttataatttaatgtgtgccaacataagcatcaacacacaagtcatttgtatatacagccaggaaatcgacatcttttggaagggtcctaaaaaaaaaaaaaaaatattaaaatgaataatattaataaaaaaaggccgttcatattatatataatt

SEQ ID NO: 37364 - DNA, 285 bp, Gossypium hirsutum
  Clone ID: LIB3135-033-Q1-K1-A11
cccacgcgtccgcttcagatgaataattgacctgaaaattgtgtagaaagccattactgaaagcttttaacctcttaccaagtaattgactgtttgccaaaaaaaaaaaaaaaaaaaaaaaaaaaaaaaaaaaaaaaaaaaaaaaaaaaaaaaaaaaaaaaaaaaaaagggcggccactttataaaaaacaaatttaaaaacccgcccacacgaaaaaatatgtcttttataaaactcccaaatttaaaaaattagagcgcattaacaaaaaatgcatagggaaa

SEQ ID NO: 37365 - DNA, 394 bp, Gossypium hirsutum
  unsure (1)..(394): unsure at all n locations
  Clone ID: LIB3135-033-Q1-K1-A12
cgctatcactgctgctctgttcttaaaacagtttgttgatgaaaaagtacagtggatgcacatcgacttggctggccccgtctggaatgataagaagcgggtagcaacaggatttggcattgcgactttggtggaatgggttctgaaaaactcatcttaatgaaaagcttggagcatgctgtagtagtgacaaggaagatggaggaggaaacaggagaataaaacttttcccaagttgttggtctttgagatatgtttgatgaacaaaaatttatgttgtgattaagggaaaaaaggggagtgagatagttttgtttttgaggttgttgcanaaagtgagattataaaactattccatgctctttttattgtttaaaaaaaaaaagccccttta

SEQ ID NO: 37366 - DNA, 395 bp, Gossypium hirsutum
  unsure (1)..(395): unsure at all n locations
  Clone ID: LIB3135-033-Q1-K1-A5
ccggaaaaccgggacgagccacgcgaccggagagggggagaggacaggaagaaaagaacatggcgggggacaacggcnnngcaaccaaaaggggagacagcacaggcgggcgagacgacagagcaaacgagacaaccacacgcggagaaacacaagacaaaccaaggcgaagcacgtataaatgcaagtaaacagaaagagtgatggcggaacaaagcttttatagaatagaaggaacaaattggacgaaaatccagaagggaagcgcaaacgcctgaaaacagagaagggatcaactcggcgacctgggccaaagcataaaaaaaggccaccttatggcaaaacacgtatgggacctggaaatgcgagagggcccgaaaaggaagatctaaagg

SEQ ID NO: 37367 - DNA, 390 bp, Gossypium hirsutum
  Clone ID: LIB3135-033-Q1-K1-A6
caaaagtcgttattgatgctaatactggtcgatcaaaaggttatggttttgtgaggtttggggatgagactgaaaggtcacaagccatgaatgaaatgaatggtgcatattgttcaagcaggccgatgcgcattggtgccgcgactccgaggaaatcctcagggtatcagcaacaatattctttgcaaggtgggtatgcatcaaatggtaactcaactcaatctgatggagattcttcaaacacaaccatatttgttggagggcttgacccaaacgtcactgagggagatctccgccaacctttctctcagtatggtgaaatagtctctgttaaaatacctgttggaaaaggatgtgggtttgtacaatatgccaagaggaataatgctg

SEQ ID NO: 37368 - DNA, 333 bp, Gossypium hirsutum
  Clone ID: LIB3135-033-Q1-K1-B1
ccaaaacagcttccaagtcttcctctaattcaaaacttattagaaagagattttgccctgctgattgaatctcaaattttttctttgttttccatatacttttcatttgtgctataaaactgtcttgattattagaaaaaaaaaaaaaaaaaaaaaaaaaaaaaaaaaaaaaaaaaaaaaaaaaaaaaaaaaaagaaacaaaaaaaaataaagaaagaaagcgaaggcattaactcttctatagatgcacataaatacaatgtaatggccgtagttttataaaattttgtcggggaaaaccaaggggttacccaaattaataaccttgaatta

SEQ ID NO: 37369 - DNA, 249 bp, Gossypium hirsutum
  Clone ID: LIB3135-033-Q1-K1-B10
gggacgagccacgcggacgcccacgcgttcgatgcattcaagagtaacccttttgatgaagatgccttgagagcaatacagctttggtatgatgcatcactttgttatagaggctacactcctgacaatccagcacagcttagtggtaagatatatgacatgatgggaatggctcttgttggttaatggtcaaacgtttacagttatcattcattagcacagccgccccaaacagaaacattggaagct

SEQ ID NO: 37370 - DNA, 367 bp, Gossypium hirsutum
  Clone ID: LIB3135-033-Q1-K1-B11
cccacgcgtccgttctctcgaagaaaaacattaatcttgttctcccggaaaaaacacaccaccaacaacaagccaaacaaaacgtcgaaaatggacctggatgatttgggagagctcgacggttcaagtcaggccaatactcgaaccaccaaattcgcgcccaaatcttccaaattcgcacccaaactcaaatccacctctaagccaaaacctgaaccctcatccaaacaagagcctcaagactccgcgcccaaaccccaaccaccacctgtggaagcagtttccaaaaagaaagaaaacgatgaagaagatgtcaagccgccgatggttgctgaaccgaaagccgaacaatcgatatcaaatggcg

SEQ ID NO: 37371 - DNA, 454 bp, Gossypium hirsutum
  Clone ID: LIB3135-033-Q1-K1-B3
ctgcactgccggtccggaactgcgtttcgacccagagcgacccgtacgatggaactcactgtagcggactgatttgctaataaggagccagagctccttcccagtggagaaatgtctaaaccacctccgttgacagaaaatttggatggcttcaatgagaattcagagggctcaaatcgtatattcaatgcttgctgaactgatactgagcctgtagttggatgatcaaataatgaggaaacaaatgtcaacgtttcccgcgtattgaagtccaagaaggtggaagcagtttccaaaccaaaagagaggacacggcatggctagacgtgatagacaatacttgatatgctaatcaaacaatatataattcttacagtctaaattcgaagcacctgatgccggaaagcatagttctaaaaagcttaaaaggtgctttcaagcttaattttgttta

SEQ ID NO: 37372 - DNA, 222 bp, Gossypium hirsutum
  Clone ID: LIB3135-033-Q1-K1-B6
ccggaccggtattgaatggtcgggtcgagcgacgcgtccgtattggctctcggcaccgggcggagatttatttttggtgcagaatatggctggtgcgggggaggtgcttaatgacaccgcatggtgtatgatttaaagcacggttataacagaacactcgggttgaacaaaaggttatgaacgcgttggggtctgatattgggcacagatacttaccatgta

SEQ ID NO: 37373 - DNA, 368 bp, Gossypium hirsutum
  Clone ID: LIB3135-033-Q1-K1-C4
gccacacgtccgtccgagcaaatctggagttacccctatatcatcttatggatacaacccgcaagacgtctcatgcactggacgatcaacaagggtgacaaaaagtcgcctggtttaagaaaaaacgagatgtttcaaaggaatagacggtgttacagatttcgatatggctgggggcgcatgatccttgcaatatataatcatactgatactgtgagacaaaatttttaatcatctctgcagtcattatggaagaatatatgacgacaaccagtgactattacattttgaactttaagatgccaattgctctcaatggtgtaacatggatgttcacgtcttcatctctagcagtataatatgaacaa

SEQ ID NO: 37374 - DNA, 169 bp, Gossypium hirsutum
  Clone ID: LIB3135-033-Q1-K1-C6
gacccgttcgatcacacatgcggtatgacggtgaacgttctttcttgttgagaactggggctcaaagggggacattgtgagaagcaaaataactaatgggacttcatagactgctgctgaattttctgttggacatcccatcggaaaaaacggtgggattgcttaactt

SEQ ID NO: 37375 - DNA, 218 bp, Gossypium hirsutum
  Clone ID: LIB3135-033-Q1-K1-C8
gtcagacaacatgagcgaaaggacgtgcagcttggtcttggaacaaggcactacattactagggggggtggaccacatcaatgagctcaaaagaaactcaaacaagacatgaacgactccactttaggatgcagacattattcttggaaatgaaactgatccagtctataatattgaaacccgtgcattgaaaactgttatgaataagagaattgtac

SEQ ID NO: 37376 - DNA, 169 bp, Gossypium hirsutum
  Clone ID: LIB3135-033-Q1-K1-D11
cccacgcgttctgggggcgctgccccgaagtttaactttggatagtttacatcccagtttggggaggggctcctctggcaattcgtttaggttcgtggcaatccgaacctcgccctgtttccctaatgaaaccatcgactagagagaccaacggcctttgaaaagacac

SEQ ID NO: 37377 - DNA, 274 bp, Gossypium hirsutum
  Clone ID: LIB3135-033-Q1-K1-D2
gcgagacaacctgatggagaggactaccaacttggtctgtgaccagggccctactttatttgagggtctggaccacatcaatgagcccaagaggacttcagacaagcctgtacgacttccactttaggatgcgtacattattgttggtattggaacttatccaggtggtcctgatgaaacccatgccttgacatctgtgatcgatagaacatttgaaacttatggtctaactacctggagtgacctaattcaaagtcaccatggaactcttaca

SEQ ID NO: 37378 - DNA, 439 bp, Gossypium hirsutum
  Clone ID: LIB3135-033-Q1-K1-D4
aacagcagaccctaaacccaccattatcaaatctcgtgagcaccatttcctcctacgaaggcaacgtcctgctggctgccatcatctcattgctcctcgtcatcctcttcgtcctgctcctccatctctacgccaagtggttcttggctcatgctcgccaaaggagccgatcttcctccactctctctcacgtcttcccccacgaccggttccgccatttccacgccttttccttcgacaacaacgcctccgactcctccccatccaagggtctcgatccttccctcatttcctccatccccttgttcgttttcaaactagatgaacacagcgacaacaacaacaacaacaacaagaagtatgggttacacaacttagactgtgtcgtgtgtttaagtccgttcgaggataacgatgttggaaggaacttgcccaagtg

SEQ ID NO: 37379 - DNA, 351 bp, Gossypium hirsutum
  Clone ID: LIB3135-033-Q1-K1-D6
acccgtccgacaaactctagcctacagaataccaagtttgttctgtaacactagccctgctcatatagggggccatgacgacagacatgctctctataagccttcatacaaacttgtcagaaaacaactcttggatgactacaggaaggtggggattgcatctcaaacaggatcgcgaaaagagaccggtgccttgacatgggattcgagaaccatgtgtaggaaccaatgctcagacctcaggagattatatctttcaaatgcaccacctacataagactgatgcacgttatgctagatatcgtcccgtggaagaaagaaacagggctgtaaacgttcataatctacaca

SEQ ID NO: 37380 - DNA, 358 bp, Gossypium hirsutum
  unsure (1)..(358): unsure at all n locations
  Clone ID: LIB3135-033-Q1-K1-D9
cggacgcgtgggcggacgcgtgggcgcaaggtatagatctcgcttttccctctttcttttgtttttaaatgcaatgatgaaaaaaaaatcgaatgaagtagataagaaaattcaacagaaaatttaagaaactaaaaaatagaaatcacctttttcagaattgcttttgaaatccttttttgatatttagtatgcataatcttttcaagtacaaacgatggctttttatagctggaaaaataagaattaaaattaaaagaaatctattttcttttcttttttgctatttttccattgtattctgttattgctgcttctcgtgaattctgntgcaggaataatcgtacggaggaagtcg

SEQ ID NO: 37381 - DNA, 234 bp, Gossypium hirsutum
  unsure (1)..(234): unsure at all n locations
  Clone ID: LIB3135-033-Q1-K1-E10
acgcatgggcgatagggttacactattaggtggttttacttttggagtgggacattgcttttttggctgggttcggataactaaattgcaggggacagggaaactctacccaagtgtggatgcgggttagggaactacgctgaaaggtattcatggtaatggatcgaaccctaatgcgtttgnngtccacagcacattttttaactcagataattatttttatacgcagattcg

SEQ ID NO: 37382 - DNA, 387 bp, Gossypium hirsutum
  Clone ID: LIB3135-033-Q1-K1-E11
tccacgcgttcggcgggggatgccccaaagaataagtggggaaagtttacagccaagtatgggtagcaactcctctggcaattctttacgtaatgttgcactccaaaattcgacccttctttcctaagtaaaccagcgactagaagaaccaatgtccttcaaaagacaatcctctaacgttctaccaaatccatcacttttagcctttatccttagtataccttattgcttttcatgtgctaagagaatatcattaaaatctcccccagccaaccaaggccatgaattatttctccgcaatcgggtaattaaatccgatgtgtatactttactaataacattcggcgcctcataagaacccatgaacaggcatcgatgtgtttcttt

SEQ ID NO: 37383 - DNA, 170 bp, Gossypium hirsutum
  Clone ID: LIB3135-033-Q1-K1-E12
acgtcttgctgagctccatggtgacaaaaggagcataacaatgacttctcttcaagaaactcgggagaagtggggcttctttcatgctgatagccatggtgttgattagaagttcatggagaaagtgaatgacatagggaatggtgtactatcatgagaatttgaaggaa

SEQ ID NO: 37384 - DNA, 349 bp, Gossypium hirsutum
  Clone ID: LIB3135-033-Q1-K1-E3
cttgactctccctctatgctttggggatgattttacatgtcaaggggaaggaaatagtaaagagttgccttaaagcagaattgccgcacacggcgttcattgagatcaccttgttactatagtgccaacatatagccttgtggggtgagttggaattagtgactacgtacccactgatgactttacaatacaaaataaagatggtttgtataggcgcgtgttgaatacaaccgtggaatatctcgatgagctgaacatgcttaagaaccttactggatcagctatggctggggctctcggtctatataacgctgactccagtcacatcgctgctgccatatacatattt

SEQ ID NO: 37385 - DNA, 181 bp, Gossypium hirsutum
  Clone ID: LIB3135-033-Q1-K1-E4
gtgctctctaagaacatgtaatcagtaaaacctttcccatgaccaccattttgatgtttgggtgctgttaggtaccgtatacttgcacagaagaaacaagatgctaactagctttttttgatgtattgacataaaccttctccttctgtgtcttaaatatatttctcgttcttttctaaaa

SEQ ID NO: 37386 - DNA, 415 bp, Gossypium hirsutum
  Clone ID: LIB3135-033-Q1-K1-E8
cccacacggaagcccacgcgtccggattgagatcaaggatctccacaagagcctcagagtggaggactgcgagccctgaaacggaagacatatttacatcgcaagcaacgatgatgggtgctccggaggggccgtacgccacccagaggggagcttagtcaccaacccttggcctacacaacatgcatacaaaccactcaaggacgcatacaaaaaaaaagtatctgacgctagtgctaacagcaacaccagcacctgacaaaaaaaccaaaacgagcacatgaagcgacgcccacaccagatgcaatgagacgctggcaatctgctaactgctgaccgatccaaatactgaaggccctggactgccatacactgaccacatgtacttgatggatgggaacaaatgttaaacagc

SEQ ID NO: 37387 - DNA, 426 bp, Gossypium hirsutum
  Clone ID: LIB3135-033-Q1-K1-F10
cccacgcgtccggcgggagatgccccagagaataagttggaaaagtttaaagccaagtatccgtagcaactcctctgtcaattctttccctaatgttccactccaaaattcgcccctttttcctaagtaaaccagggactagaaaaaccaatgtcctccaaaagacaatcctctaacgttctacgaaatccctcagttttagccttttcccttggtataccttattgcttttcatgtgcaaagagaatatcattaaaatctcccccaaccaaccaaggcaatgaattatttctccccaatcgtctaagtaaatcccatgtctctactttatttctaacatccggagccccataaaaacccgtaaacagccatcgatgttttcctttatcatcttgaatttccacatcaatgtgacttttgagagac

SEQ ID NO: 37388 - DNA, 393 bp, Gossypium hirsutum
  Clone ID: LIB3135-033-Q1-K1-F2
gagggctccgatcgaagggctctatcgtctatgtgaggaacatggcttgtggaatgaatatgggggcatgaagccgagagcgacattgacgggctctgccgtgtactattaacggaagcatagctgccactgtcttggctattacaccagatagaggtctctgcactaccctctttataacataacaggcatacaactctttgctctttggatctgcacatgtactcaccagcacttcttttgttggctgcaagtagacctgtgacaaaaaccagatttttattattgaatacatgaacctatgttgacccgacacacatgcacctgaagaaaggtgatgcgtcttaaagaacacgggggagggaaagatatgcgctcaccacaccaattgct

SEQ ID NO: 37389 - DNA, 381 bp, Gossypium hirsutum
  Clone ID: LIB3135-033-Q1-K1-F3
gtaaagatgtccatgcttcctcgaaatgcttttttgttggtccatgcaacttccggaaaagatggatgccaacttcgtgcttattggactaaatctgatgggctctcaatcctaaagagatgtggttcaaattccaactttaggaacatcattgatctagagaaagcacggatgggttcaaattggttagacacattggaggggggaaagtttatggaacataccgagagaagcttcacttagccgtcggcttgctgacgatgaaaagagtgacaaaattctcgaagttgatacttggaaacctttcttgaccttccaacataactacaggaatggttaggtcattttaagcattttttaagctttgggattataccccag

SEQ ID NO: 37390 - DNA, 153 bp, Gossypium hirsutum
  Clone ID: LIB3135-033-Q1-K1-F5
attgtgttttgtgcctttatgcactatttatttcaatttctgtttccagattctaatgtggcgtatgatgattcggtggacttgaaaaatattttttggcttgctgcattgccttgctattcatcactaggcttgattgctgcagggtggtct

SEQ ID NO: 37391 - DNA, 249 bp, Gossypium hirsutum
  Clone ID: LIB3135-033-Q1-K1-F6
cattgatgtctacgatgggcggccgcataaaaggaactgtcttgacatatcacagccttgcagagagctaggctctacccatgggatcacaaatcaaacacacagccctttgctttcaggagctgaaaatgtacaacacccgcactttccccgctttatgcgcgttgacctgagacaaaatccagatggttgttattgaatacaagagcctatgatgacccgacttacatagcactggacaaaggtgaa

SEQ ID NO: 37392 - DNA, 301 bp, Gossypium hirsutum
  Clone ID: LIB3135-033-Q1-K1-F7
gcccgctaagtaaagcggcgaacaaaattatgttaaagtgtgaacaaagtgagagtagggcgagcatatatgtggggggggaaagacgacaacttgccctacaacgggtgggacaagaatactcacaacttaaacggagacgaacccgaaaaaatgaacactcaggcatggtcagcaaaaaaaaaaaaagaaggcgatgggcacaaacttgccgctgaaaaaaagcagacatacccccgaaaagaccattgaccaaacatagatgcagttccaaaaacaaaaaaggggggggcgtctttga

SEQ ID NO: 37393 - DNA, 451 bp, Gossypium hirsutum
  unsure (1)..(451): unsure at all n locations
  Clone ID: LIB3135-033-Q1-K1-G1
cccacgcgtccgcccacgcgtccgatccaattcatgcaagagtgtgaacaaggtggtagcaaaaccaccatattttttgtatggaaatgttgtcaacttgccttacgacggttgggtcaagatttctcagttcttatacgggatcgagcctgaatttgtgaacactcagtctttctcggcttttaatagaaatgaaggctatgtacacaatcttcccgctgaaaataggtttcacatccttccgaagtcaccattgaccatacaggatgcaataccaaatacaaagaagtggtggccatcttgggatccaaggaaacaattgaattgcatggggtctgaagttctaggagcatcaaagctgtgtgctaggcttgggaacatgttagctgattctcgaggattactctcatcggatcaacanaaatatattcttcgtcaatgccaaatatca

SEQ ID NO: 37394 - DNA, 243 bp, Gossypium hirsutum
  Clone ID: LIB3135-033-Q1-K1-G2
cgtctcatcctgaatcctgcaactaggatatatgttgctttgaattctcattcttgcttttaaagagcggtcatttcttttaatggagggtcccatatattttctctttccttggaaaacctaaattgacttcttattctttacctaacagtggtggtgaaccaccttttctctttcaactaataacacaaaatagggcttttttcacaatcttccaaaaggaaaaaagccttgacattctcc

SEQ ID NO: 37395 - DNA, 384 bp, Gossypium hirsutum
  Clone ID: LIB3135-033-Q1-K1-G4
ctgcctctacctcattagatccgttgcataatgatcgtgctattaatattactggtgagagggatgcaaaaaagtatgttcctgccatcggatactatattttgaaaaagaatccacaattgccggtttcactaagagtgaacttcaggggcgacactatttgtgctgttcttacgcatccggtcacccgtgtgacatctcatgcagacatttcttactattgaggtttaatcaactataggcaaaatggtgaacttgaggaagcacactggtaggctagtgagttgattaagattgggaactggggtgaggctactaatgctagaagtaaagtcttaagcaagctacacaacatttttgggttatcaccattgtttgactttt

SEQ ID NO: 37396 - DNA, 201 bp, Gossypium hirsutum
  Clone ID: LIB3135-033-Q1-K1-H6
attctcacgggattgttcacgtgtagattgtttcacgcagcaagattgtgccgggtctgaaagcccactgacttggtcctgaaaaccccgcggatctgtacctcttgatcaagacagccggtgccttctcaaaacatcacgtgaggagcatgctagactatgcttccatcaatcatgttgatctttgtcgagagcaaaatt

SEQ ID NO: 37397 - DNA, 155 bp, Gossypium hirsutum
  Clone ID: LIB3135-034-Q1-K1-A1
atttttatcctgtgcggttggcaaatgtgcaatgaattgggggtcgatggcggacctgcagcataggaggcgataccaaagcgtgatcttgctaagaaacatatatcatctaaactgcatggaaagttgccagagatcgaagttagacaatcagt

SEQ ID NO: 37398 - DNA, 378 bp, Gossypium hirsutum
  Clone ID: LIB3135-034-Q1-K1-A12
atttttatggcgttttgcctcttttttgtgtgtcaaaatcatttgaactccagctagtcttgtgcaataactgaaaggtaagaagttaagttatggaatcatgcttaagccaaaatcattgaggtttttgttgaaccatgcagaaattctggagcatttatagtctcttaagtttgtcctaaagtattgagtttctgcaggtttctggcaactcatgaaagctatgcccaccccacgtacaagctgaaactgattgaatacgataaaaccgagtattacagatgtcttttgcagagcaaggtggtctggtgcaccacaccgtgttcttgaaacacccttctttctgtgattggaaaatgcctttagtgcttcaagaaa

SEQ ID NO: 37399 - DNA, 283 bp, Gossypium hirsutum
  Clone ID: LIB3135-034-Q1-K1-A6
cccacgcgtccgtggagcaggtggattgttgccacattttggtaatgttttcccttcccttgctattattacaatctgattagggtggatatcttggatattggtaatggatttagttatttaatagatacaataagaagcattttgtctttcaatttttgccatttccttgttaatctgtatctgtaggcggtttagcatacatttcagtatgctcgatattgcagaaagtagtatctttttgtatacatataatggtttcaaaataaaccccatatctttg

SEQ ID NO: 37400 - DNA, 289 bp, Gossypium hirsutum
  Clone ID: LIB3135-034-Q1-K1-A8
ccgcgttctacaactatgtagttatcatgtttgctgttaatggtattacactgtttgcttctggtcttgctgctattggaataggctttagcatttggtaggttctgcttttttcctcttgcgattgaagcatttgatgcctagtgattgtcaattatgtttcttgaagcaccagtatattcaggtatgggcatggggatatgaccttcagatagacctgttaattttaatctgaaagcaaaaacacaaatccatctacctaagccgaaactcaattttgtcttaaaaa

SEQ ID NO: 37401 - DNA, 285 bp, Gossypium hirsutum
  Clone ID: LIB3135-034-Q1-K1-B10
tcgcccactcgttcgcccacgcgtacggtaccacgtacacacccttggaccgaaccaatgttgttccgcggtgtgtcaacttatcgaagcctcaatcgagacggcttggtccttggttcgcagattcgataacccttaagcttacaaaaattttctcaagagttgccacgttatagtcggggactgtgacgtgggaaccctccgcaaagtccacgtgatatccggccttcccgccgtttttatcacagagaggcttgagatccttgatgaagaacgtcacgtgct

SEQ ID NO: 37402 - DNA, 340 bp, Gossypium hirsutum
  Clone ID: LIB3135-034-Q1-K1-B9
cttccttaaatgaaccctagttgccgccatcttagctccaatcaagcaccatcaaaacactcctttccgccacttctcttcaaatcgtcgattagttttccaagaatccgacccaagtttgatgaaacaaaggtcaaagctttgatctctttctatcttcgatctcccttttacaccgtcagattctatgatatgtggtacatcatgtcatgattcgccttaccatcgttggaatcgccgaacgaagatctggagtttcaaaccctgatcttgatcagataagtccttcgacgtacctatctatttttgcttctcttttaattatttattggttttttgg

SEQ ID NO: 37403 - DNA, 444 bp, Gossypium hirsutum
  unsure (1)..(444): unsure at all n locations
  Clone ID: LIB3135-034-Q1-K1-C12
caaaaacctattcatctattttattgaggctttccttccttatttcctcttctctgaccgtgctcaatttggttcttgcaccctatcggttttcttttggttttcgatatatccaggacgcttttaaccagttgccttcgataatgttctccggccactgcatttcgattcctatttggactgcttttcgacatgcaaacgtttcaacagtgaaagccgatgccacctctngatgaatttttgaacaagataagaggatgatcggttcattatttctggccacaatccccgaagtcgattggaaatgatgcccattctatgcttcgtcaaatatgatttttaccgactcacaggctacttttcttatcatgcattctagcattcctttcttcctaaatgggccataacacatagtaaaaaagtttgctttgaaaatggggattt

SEQ ID NO: 37404 - DNA, 178 bp, Gossypium hirsutum
  Clone ID: LIB3135-034-Q1-K1-C2
tcggtgagaacaatgaactgagagggcctgtaatcatttgagccaaacacccccaagagtcagcaccttctctctcttttagttgcagtcgttcatcgcataaaccaagaacaggcgcttagagaacttgcggatactacacatgaagacagaactggcgaggctgcatccgcgccaa

SEQ ID NO: 37405 - DNA, 225 bp, Gossypium hirsutum
  Clone ID: LIB3135-034-Q1-K1-C4
cggacgcgtgcgttcctctcttcgtaaactcttactttaagagttcagtctcattcaagcgttttcattggcagccaacatggggaagactcgcggtatgggagctgctctcttgctgagaacccaccgtagaatgcatatgtggtccgtcaggtcatatatgaagtcaaatctcggatatgaatggaagaaaccctttgctggatcatgacatgcccagggcat

SEQ ID NO: 37406 - DNA, 238 bp, Gossypium hirsutum
  Clone ID: LIB3135-034-Q1-K1-C9
ctgaaatttggctctgcctcaatatttctcttttaaattcttattgggaatcttttttccttttaaaatcctataaatataatgccttttaagatctcattaaccctctgagattctcccaaattttaactcttttgattttttttgagagtgctcaaagaacaaaaaaggctccctgtgtattcttttgggtatgatttagcccttatagcctcgagtatcacttctctttattaac

SEQ ID NO: 37407 - DNA, 224 bp, Gossypium hirsutum
  Clone ID: LIB3135-034-Q1-K1-D10
gcaggaacggcgtacggaggccagctggagtcgcggggaggcactgcatgcgtcgagagtggttctgcacgcgcggaggatggccttggtggctgcggcgctggaagctgcagctgctagggtttctttgaaactgctttgggcttgaattgggctaacggttatggtagtttaggttaaatgatctgatgttattgcgctaggctagcgagctaaaacgatat

SEQ ID NO: 37408 - DNA, 282 bp, Gossypium hirsutum
  Clone ID: LIB3135-034-Q1-K1-D11
aactgggaagctgccagaaagatggtggctggaaggtttataaattcttactctacgaaagattggatgcttggagttgctttccgtgcaagtttattgacaaatggattagccggattacaaccagttgatgtgcaagggattgagaatgtaagtcatgccagttataatttttttcacctagctgttcatcgtgctaattccttaaaattctcttcagggtgacgtaacaaatacgatcgaaggtcacttatcctattttgggtcttaaaggaaaaattt

SEQ ID NO: 37409 - DNA, 313 bp, Gossypium hirsutum
  Clone ID: LIB3135-034-Q1-K1-D4
cccacgcgtccgcccacgcgttcggctaaattcaagagcaaaaaaaaaaaaaatcttaaataaaaaaaattcatcatgacaacccaaatgaaagagcttgaagatccaatggctctaatcacccaaatgtacccttgcatatacactcaagttgcaccacaacaaggggaaatatcgaagcctcgacgacgacagaagaagaacaagggaggggaaagcggggcggcaaccgcggcggagacagctaagaaaaggaagcttagccaagaacaagttgatcttcttgaacttaactttgggaatgaacataaac

SEQ ID NO: 37410 - DNA, 419 bp, Gossypium hirsutum
  Clone ID: LIB3135-034-Q1-K1-D5
gggagtacaaatttttcaggtactctaacagatagagctttttctgcggcatattgagagccatatagtctcccgccaatcaaaaaccccctaacattatcaggtaggcccaggatctctaactgcgaatcgaatcaaagcgttctccaataaaggcatcatgagatgtagcggtatctctcctcagtctatggtctcgattgtgggtgggaaaatggatgctactatgctactctttcttcaaatgcttcagcttgagcttgagaacccaaactggcagaaaaaaaaaaaaaccccttggcggaaactgactaccaatatatacccgtaaccgacacgttgggatagacctacagccatcaaattataccccgcttttggaaccataaaagagctactttttattttaatgacccttg

SEQ ID NO: 37411 - DNA, 373 bp, Gossypium hirsutum
  Clone ID: LIB3135-034-Q1-K1-D7
cgtttcaatcactctcagctcttctatggcgagcagtcacacgagcaaggaaacttccggctagcaaaacgacgacgtttagaatggcggtgaattgccgtcacaggttgaacccaaaaatggatcctttatatttcggaaacgcaattcaaagcattccgacttacgcatcggccggtgacgtcacgtcacgtgacatacggtggtgcgccgagcaattgaacgaaagcgtgaaagctcatgacgacgagacagttcgtctgtttatttgtaattgggaaaaggatccgcggtgttttccgttgggaaatttcgatggtgcttcgatgacgatggggagttcatcgaggttttcgatgttcgacaatgattt

SEQ ID NO: 37412 - DNA, 262 bp, Gossypium hirsutum
  Clone ID: LIB3135-034-Q1-K1-E10
cccacgcgttcggcctgcatgataaccctacgacaagcattttgcgacgctgctttaacaatttctatgtgcttttatcgctttacggatgactatatagcccatacaagtacccaaaaaaagagaatcaatggttttagtatatatattttgaattgtcataccgctactttgtggtattggagtcattcgcaaggctgttgtgaatattgtcgttttccacatttaataaataacatggatgatgcttctgaaccttctt

SEQ ID NO: 37413 - DNA, 187 bp, Gossypium hirsutum
  Clone ID: LIB3135-034-Q1-K1-E2
ctcgcgctacggatattatttcagtcgatcgtggatctgaacgccctgctgtcttccagacgctgatgttcgtcgcttgtgggcgaacattgaactcctgagaacggtgccgtggggctgttgcggaacggacactgccacgtttgccaagcggcggtggcaaccgttctgcgaggaggatctctac

SEQ ID NO: 37414 - DNA, 347 bp, Gossypium hirsutum
  Clone ID: LIB3135-034-Q1-K1-E3
cgacgaacccttgaggcaactacttcatcaatcctgctcaaaatcttccaaacctgctgccgcaggaatcatttccaaacgaaaacttgacgcttcttgctgatacagatgctgggggatgcatttttggtctcatgattaagtgattccatagttttcaacctaatgaatactataatgtacgatcaatggcaaatgttagtgataaatatatgaaaccgcaaaataatgattgctatatatataattgagacgagccctcagtatttttgtactatgagagacacagagaaagagaggagatcattatattagaaatttttgttaaagaaagaaaagatccaagt

SEQ ID NO: 37415 - DNA, 313 bp, Gossypium hirsutum
  Clone ID: LIB3135-034-Q1-K1-E5
ggaagcttggtgaaagagattgatataaagggagtgaagaaaatgattgaggaagggaaggtaggcggtgggatgattcccaaagtgaattgttgtattcgatcgcttgctcaaggggttaccactgctagcattattgacggtcgtgttgagcactctgtgcttcatgagattatgaccgatgagggcgctggcacaatgatcaccggttaaactatagcctactcttaccttttggtagttttaatattggagctcttctatttatcgcagttattgaatgcattgctaccaaacttaatgcttttttttt

SEQ ID NO: 37416 - DNA, 189 bp, Gossypium hirsutum
  Clone ID: LIB3135-034-Q1-K1-E6
aatccggtcatcgacaactggcacctgctctcactcgatttgttgtctgacccggtacgacccgttgcatccatcggcgccctcatccttgtgagaccaacaaattgtacagatcttcaattagctctatgtaacccttttactaggcaatttaggtaccttccaatgtcaaatatcaggagaacgaat

SEQ ID NO: 37417 - DNA, 313 bp, Gossypium hirsutum
  Clone ID: LIB3135-034-Q1-K1-E9
gctgaattatatatataacaattgtctatatgttcaaaaatttgtgcattcattacagaataacagtcaatgactcaattatacctaagggttctttttttttttttgtggggggggggggaatgcttttagcttgaacaaaataaatatggttgcaggatgctattgaagaatgccggaaattatgtggtggtcatggttatctttctaacaatgggctccctgagttatttgcagtttatatacctacctgtacctatgaaggagacaatgttgtgctgctcttacaggttgcaagatttctaatgaaaac

SEQ ID NO: 37418 - DNA, 207 bp, Gossypium hirsutum
  Clone ID: LIB3135-034-Q1-K1-F1
ctcgctcgttcgagcttaaggactgggacgtgattggagatcactccgctatggtgcgtcgttataatgaacaaaactaggcgttggagaacaacgtctcaacgttagatcacgagatgcatgtttgagcataggaggtgaaagacactggcgtgacgagtgaccagggccctgatattgatatacatcacggttgtaaccctatat

SEQ ID NO: 37419 - DNA, 110 bp, Gossypium hirsutum
  Clone ID: LIB3135-034-Q1-K1-F3
tgcattcgatagtcatgcagtggattgaatgatctgacagggctgtcatggatactttgtatgacaacgacgatcgtcttaatgcggtggctgctggacatgaaagaatc

SEQ ID NO: 37420 - DNA, 259 bp, Gossypium hirsutum
  Clone ID: LIB3135-034-Q1-K1-F4
cactctcttccgaaggataaatatacccaaaaagagaaaccgcaaaaacaaagctcggaaatcctggttttttttttattcaaagttaaaacccagttttcattttggtctgtttcagcttcctctttacctaatggctatggaaccaaacttctttgaacaagaatcacatttcgagtctgatggagatatttcactgaagaacaaatggaatccaataccagaaccaacataagaccttaaaaaagattccagctgc

SEQ ID NO: 37421 - DNA, 377 bp, Gossypium hirsutum
  Clone ID: LIB3135-034-Q1-K1-G1
caagtatgaggttgtgcttaaggctgagccatttgcctatgctccaaagaccccttacaaggagtgtgagaagccaaagccaaagcctactccagctccttactattacacctctccaccaccaccatcgcctacttatgcttacaagtcaccacctcctccaccatactattacaagtccccgccaccaccaagccctacctatgtttataagtcaccaccaccaccaccatactactacaaatctccttctcccccatcgccatctcctccttctccttactactacaaaactccaccaccttcatcttcattaccaccaccaccatactactacaaaatctcaactcctccaatccctttaaccccctccccat

SEQ ID NO: 37422 - DNA, 346 bp, Gossypium hirsutum
  Clone ID: LIB3135-034-Q1-K1-G12
aaaagattctacattgctcattcgtcccttgattgaaaaccaaaggtacaatcagaagacatggttactgtctccttcaccttgatggcatctaatacactgatcctcaaccattactcttctcatcttcagattagaaaaaagtggggatggaattccacaaaattttccacattgtaattttgaatttcgaaggcatgtataggttccgcactttcttgtaaaaatttttagtatcggcctgtatttaattactagggatcaatgtagtattcctggaatagtttatagggcactttcttacttggaccgttttctaaatggacttcccctcttcaacaccctg

SEQ ID NO: 37423 - DNA, 382 bp, Gossypium hirsutum
  Clone ID: LIB3135-034-Q1-K1-G4
cgtgaaacattcataggtgaaatcataggtgcaatattcatgggtggagatcatcacaatctgaaacctaccattgaagaaatgccaatcaaagtgattgctgaaggtgatgaatccatggatggacagattttgatcgacaacaagcaagagaaatcagtaaaagtattgaaaaatggtgacactatggcttatcaccatctatttgcagatctaatgggtcatcaaaaccagtctgctggcttaggaagcctatgatgaacaaaaaaaaatggtgagttcacccccaaatgaaatggaatgcgaaataactttggtaatttgtgaaaacaaaagttaattatttcaagattattaaacctttttaatagactttgtttaa

SEQ ID NO: 37424 - DNA, 287 bp, Gossypium hirsutum
  Clone ID: LIB3135-034-Q1-K1-G7
cacaaagcctcagttcattaacacaagaaagaacagaaaaaaaggaacaaaagatgggtgaggagcagcagggaattcagattcccagaatcaaactgggaactgaaggacttgaggtttcaaagttggggtttggctgtatgggtctcactggaggttacagttgtccagtctctgaagaagttgggatatcgattatcaagcatgcattccacagaggaatcactttctttgatacatctgatatctatggacccaaaactaatgaaattttgggtggaaaggca

SEQ ID NO: 37425 - DNA, 209 bp, Gossypium hirsutum
  Clone ID: LIB3135-034-Q1-K1-H1
gtggatctctcatctgctataacaaccttcattatggtcgtgttgttttgttttgttttgcaagagtccttgtcttgtaggtttttccctgtatttatgaaactgcaactactttgttattatcaataaagcttgatattttactctaaaaaaaaaaaataaattattaaataaatatttaataaataattattattatattaaaatgg

SEQ ID NO: 37426 - DNA, 191 bp, Gossypium hirsutum
  Clone ID: LIB3135-034-Q1-K1-H2
cccacgcgtacgtcgaggtctgtgggaaaaggtccacctaatactgcttagcatagtggtggatagagaatatgacaagcttacgtgcatacaatagtgcgcaagtcctctgaggctgcacaatctaacggtggaacatctagcgaagtcaatggcgaccgtatacagcatgccgcagcggaaagctcctg

SEQ ID NO: 37427 - DNA, 262 bp, Gossypium hirsutum
  Clone ID: LIB3135-034-Q1-K1-H6
cccacgcgtccgcggaaccatacggtattgggatggggtatggaggttatggtcatagcttgaggagcccgagttttaaaagtgtaagcggatcgcaattcggattggaacgacaatctaactattcatcttgttgtactgagagccttggtggtgaaatgtcaccatcttcaactagtgatctaagaaggtggttgaggtgatcccatcaatgtagctgttggtttttactagttttatagtgggtttccattgttgattt

SEQ ID NO: 37428 - DNA, 177 bp, Gossypium hirsutum
  Clone ID: LIB3135-035-Q1-K1-A1
gaagatcatgttgacgctcggtgattcacggtcctccagctggatgtggatggtgatttgcggatacattcatggatagaggttccacaaacgtggggatcagcttggcgagcggttgtaaatcaatgtctggactttgcaactcgtgatcaacgaggcatctgcgcatttaatgcc

SEQ ID NO: 37429 - DNA, 373 bp, Gossypium hirsutum
  Clone ID: LIB3135-035-Q1-K1-A2
acgcgtacgcgtacgatatcatgctatgatctgtgcgtctcatatgaatctcaaatgaagaagaaaaaaaaatgacagcaaacaaggaagagaatgtaccaataatatcacaccaatcaaggctaagccagtgttgttgcatgtgtggagattctggtctcactcatgagctttttcaatgcacagtttgccatttcagatctcagcacagatactgtagcaatctgtatccaaaagccgactcttatgaagtttgtaattggtgtttgaatcaaaaggcggattccaagtctcagaattcttctaattcatccccgtcgtgtaaagataacagcgaagacgatggaaagaaccaaaaaaagggtgatcaaaa

SEQ ID NO: 37430 - DNA, 216 bp, Gossypium hirsutum
  Clone ID: LIB3135-035-Q1-K1-A3
acgcgcacgcgttggatgtcctgctgggttctctgagtgttacacgcacttcatgcgaagatggaacagaaacgacagacatcattgatgagaatgcaccaataatatggcacctatcaaggctattccagtgttggtgcgtgtgtagagaccatgctttcacttatgagcctttacaatgcacgagttgtcatatcagatctgaacaaagatact

SEQ ID NO: 37431 - DNA, 380 bp, Gossypium hirsutum
  Clone ID: LIB3135-035-Q1-K1-A6
aaaatggctttcgaatatttcctattcaatctgcgtgtttagtatgggtaacccccatacaatgagaatgtttatggctttatagccgaaaataaaaaaggaaaatacaaagaatttttgttgttttttctctttgttgtgttgtcctttttgcatctgtgcgtaggtaggaaggtacggagctcggtggttgaacggcgctgtgctggagatgaggacgaggagttgcagtgcctattatctagggttttcgcccttcagctgaagcttgtttcagttttgggccgtttgggccaggggtatttttgggctacttgggttaattccggttttgggttttaaatttgggtttgggtttgtaatgttttgagtttaaaaat

SEQ ID NO: 37432 - DNA, 302 bp, Gossypium hirsutum
  Clone ID: LIB3135-035-Q1-K1-B11
cccactcgtccggatcacgtcaagcgctggtcgtcgggtctaccttgactatatcaagaagtacgaaacgtctgagaggcggcattaacacatacacggtcatattatagcatgcttccgtgtgatggaaggggatcatgtgattattgggccccgcattccgttaggcaggaccgtgtagctcaatgtcttgatcgcgatctcaagaagatctttccatggtgatacgaaagcgttgaccagaatgcatgctcttatatggaagtacataggcttaggaaccattgataggaatgctgata

SEQ ID NO: 37433 - DNA, 338 bp, Gossypium hirsutum
  Clone ID: LIB3135-035-Q1-K1-B4
ttgtcactgggtcaccctatgtgaaagcatttctacgcgagctttgcttgaacactcgcggttccgagtggctcttatggttcgcgaagcctatggtcttaatcagtcgccagagcgggccctaatgctttggaatcagcatagcgtaatgcagaactcacagaagagtatgtggcggaataagtggctgtagctcacactttagcgatatatgcttatcgaactggcaagattgtacaaggacatagttgctgcctcaggtgaacaatcccaatcctagggctgggtcactggacgagggtgaccaacagaattggccaaataccttgagagagcat

SEQ ID NO: 37434 - DNA, 405 bp, Gossypium hirsutum
  Clone ID: LIB3135-035-Q1-K1-C12
agtcgaactggatcgtaatatccggggtgtcccacgcgtacgtttgctcacctctattttttgacgcgtcatatgcagaacgattgctccgatttgtcgggggcccctagttttaacagctactactccgattagaaacttggtgacatcgccgccacggtttgccgagaaagcaccggcgtttcggatgatgaagaattcgagttctctattgaactatgggagagtccagaaacgtcgttgttttcagtcttaaatcgccatctcttatcgagccggtgagggaggagggaaagatgatgaggtgaaagaggctgttcggattccggtgaggaatctgttcatcagcggtggagatcttccatcgtcatcgtcgtcgtcggaggtggacgagcttgaagcact

SEQ ID NO: 37435 - DNA, 196 bp, Gossypium hirsutum
  Clone ID: LIB3135-035-Q1-K1-C3
gtgaaaggttattatgctaagcttggtgaaggtgctatacatcatcaagattactattcaggcttgtgacaagacaaacctctagaagtaattcacggagcattaatgagacgacttcagtcaggactctactcgtgatgccattgctgaactggcagtttatgccgaattcacaaattggatgattgagcatact

SEQ ID NO: 37436 - DNA, 237 bp, Gossypium hirsutum
  Clone ID: LIB3135-035-Q1-K1-C5
aaggctatatgttctggctacagtttttgttctttctacggatatccaagtcaataagagggaggtgggtccctgcaccactctgcattggggatcgattatctcacaccttcccatagaagacactggtttttggatatgaaccaactaactttttctaaaagacatatttagagaatgagcactgggaatgctgaaacaacttggggagcctcaattcaatggagtccattgaac

SEQ ID NO: 37437 - DNA, 410 bp, Gossypium hirsutum
  Clone ID: LIB3135-035-Q1-K1-D2
gctgattgcaacaatcgatcaattttaccaagatgaacagaaaaaagcctttcattatcagccattatgctatctttatcagttgtaggcttcttgggaacatcacttggaaccaaattatccttgggtgaaatgactgctgctttcatctcaccattgaaaagcttcctagattgcatcgatggtacctgatagatcaaaacaaagacaattacaagcaaagcaaggtttaagcgagccattattgggatcccaagtaacctctatctcttggttttgaaggctttagatagtgtgtagtatcagttagatttcgaggtacatatatatatagatgaattcagtgatagattgctttacgtcatgttggctaagtcatatcatacttagaacaaataagaccttaaaaa

SEQ ID NO: 37438 - DNA, 278 bp, Gossypium hirsutum
  Clone ID: LIB3135-035-Q1-K1-D5
cccacgcgttcgaccacacgtacgcactatttattgttgcttggagaaagtccaacatccggacagttcaagtgaggtaagaggcattgttgctcgcacagactgaatccaagatggtgctccatcctaggtacgagcacatttgcctaggaccatgaattgctgctttaacacatacaaggggcagccgattcaattctggtcttaaccactacagacattgtcatgaccacacaggccttaatatctaatctgaaggctatttatatacaggtcgt

SEQ ID NO: 37439 - DNA, 128 bp, Gossypium hirsutum
  Clone ID: LIB3135-035-Q1-K1-D7
ctggggcattgagtctccacagcatctcgttttatcttaagattagcaagagtagggatggggttccaggaaattttccagactgtaattttgtgtttagaaggaacatgaaagtttcatagtttttt

SEQ ID NO: 37440 - DNA, 385 bp, Gossypium hirsutum
  unsure (1)..(385): unsure at all n locations
  Clone ID: LIB3135-035-Q1-K1-E1
cccacgcgtccggatggcctaggagagctagggtggtggtagcgtctttagagaagactgaggaaggaggttggggtactgtcaagtcaattaagacgtggaagcgccttgatgataaacatctcactgccattgacggggaggtcctttggagcaagaaacatactggtactcgtagaaagaaacatatcaatggcagtcctgcttgaacttcgggaacagaccaactgacagtattattacattattgtctcggaatattttgatctcaaccggctttcaagtttcggactactatgcanaatggagtttagcttgtgtaaaatggtttacggacttgaatgatttgcagtcaatggtgctgtgctggtttctaataatccta

SEQ ID NO: 37441 - DNA, 342 bp, Gossypium hirsutum
  Clone ID: LIB3135-035-Q1-K1-E9
cgaggaagttgggtttgaaaggtgttattctgagacatgattgtctatagcttcggatgcacagatatgatcaagtgatgtttataggctttcataatttttgtgtttttttttatattatcatatttcgtatcatgttttatttaattttttcaaatcatatttattaaatctccaaacctatttgagtttgggaaaaaatcgaatatgatttaattattaaaaagttatgttcaagctcccacttgtttttaatggcttgtcgtaacttgatttattatgcactatccatgcagtgttcgatgatatcttttgagtttaaagcacaactatagccttacc

SEQ ID NO: 37442 - DNA, 322 bp, Gossypium hirsutum
  Clone ID: LIB3135-035-Q1-K1-F1
tcgcccacgcgtccgcaaggatgtatcaagcatgcccggatcccaaccatcttgaactttatccacagggagaagcacaacaggacatgcctatcttcagcttggttccacataaaaatggaatttatgcaattgagttcagttcatcaatcactgcattacaagcgttctttgtctcagtaacaattataagttgtcggaaatcctctggttttccagaatttggtgacctgcctgaaggaaaacttataaaggagacaatgttgaatggcagccttgagatggacaacatacataccgttgtccttggaaccatgcctgc

SEQ ID NO: 37443 - DNA, 404 bp, Gossypium hirsutum
  Clone ID: LIB3135-035-Q1-K1-F9
gaaaggagcacgacgatgaggagaatgagtttatggggctcgaatcgaatgcttgcatagattcgcagtacctatcagaccattatgcggatgaacctgatagttggcaacaaggaaatgctgatgattgttatgaaggagataatgcgttgcttagatcaggtgatgaatgggaccaaacgagatatgcgtgtaatgatgttaccggtgtccgaacgtggttggaggacttgggattcggtaggtatgctggtattttcgaaatgcatgaggttgatcaagaaactctgcctttgcttacactagatgatctcaaagagatgggtgtgtttgctgttgacatcgacggaagttgtacaccgcaatacaacaattaagagggggcaatgctttctcgtgaaaac

SEQ ID NO: 37444 - DNA, 318 bp, Gossypium hirsutum
  Clone ID: LIB3135-035-Q1-K1-G11
cgtccgaaagtacctattcaaagaactaactcaattgctcacttgttgctggatatcattcccattggggacagtgagttcagaatctttctggctctctatttttatcttgatggcttatatagcttcatctacttagatttttaagtacttaatctgtctcttatttttacccatctttagtggttgcttcatccatattgatatttttattttcttaaaccctacccttctcgtccccggacaacctaatctttgtatgtatgtaaactaatgtacatttgtactctttcaaaaattatatttatgatatgataa

SEQ ID NO: 37445 - DNA, 370 bp, Gossypium hirsutum
  Clone ID: LIB3135-035-Q1-K1-G12
gtcttgattgggttcctggatgtatggatcctacttcacacttatataaccctttggctaatgtagatgatggatcttgccctcttgattctgatgttgaagagtagtggtcatacacctgcatttcatacaatgtaacattttaattattcagtatagtcttcttaaagattaaaatgtgaccattggtgtatagaatgtagcatttagcatgaagatatattgaaaatgggaaaattttcctttagtccctcttataaattaaatcatttcaaagccccttttggggccaaaatcatttgaggttttcccattattcaattgagtttgacttggcataatttattccatcattttttaacatatatta

SEQ ID NO: 37446 - DNA, 242 bp, Gossypium hirsutum
  Clone ID: LIB3135-035-Q1-K1-G5
cgcgttcgccacgcgttcggctcctcatcattatgcttgtaattcgcctcgaaagcgagctgtatatgtatattacaaattttacatatatatgcatgtataactatactaagtgttggtttggatatagaactaacctcttcattattattgttcccgattgaaaaaaaaaaaaaaaaaaaaaactgtgaacttaaaaaaaaaaaaagaataaaactaaaaaaaaaatagaattgaacaat

SEQ ID NO: 37447 - DNA, 335 bp, Gossypium hirsutum
  Clone ID: LIB3135-035-Q1-K1-H1
cccacgcgtccgaatcagtttatgctccagagccttttgatgttggtcgaatcctgcaggttgagattatttatgatggccagctaattgtattgacaactgccggtgctattgatccagctgctggtttgggaaactatgtggaggcacttgtgcggaaacatgatattgaattcaatgtagttgttagccaaatgaatggtgcagatcatccatctgaatctattcatgtactacatgttggaaagatgaggatgaaactatgtaaaggaaagacgacaattgtcaaagaatattattccagctcaatgcagctgtgtggagtcagagggggc

SEQ ID NO: 37448 - DNA, 295 bp, Gossypium hirsutum
  Clone ID: LIB3135-035-Q1-K1-H2
gcgaggcacaatctcgaggcgtagatgctgtggctgatactgtaccaaagatcactgccttgactggtacacgaagacggacgcatgggaaacctgagaaacaacagcctgctacactttcttggcatgggaccaaaaaccaagaacctgctgctttcaatgggaataataggcggacttgtctaggggctagttaacaaaatagcgcacgatcaggctcatggcaagctggcatgtggatcaaatggaaaccgttgtaaagatactaaacaagcccccggatgacaggctatac

SEQ ID NO: 37449 - DNA, 200 bp, Gossypium hirsutum
  Clone ID: LIB3135-035-Q1-K1-H9
tcggctaaaattgattcctctttatctgatactgatacaaagaaggctgcggttgaagcggcaaagaatgccctctccaaaggaaaaatatcacatttactgttagagcttcatttaacttttctctcctttgttcttttaattgatgttgtctgggtttttatatttgtcagttgatgttctaggcctcaaactttcat

SEQ ID NO: 37450 - DNA, 306 bp, Gossypium hirsutum
  Clone ID: LIB3135-036-Q1-K1-A12
cttagtcagaacttgaattaggtgttattgaaacagggttttgtagctacctcgtgtactagcttctttaatcatgattgttaattaaaaaaaaaaaaaaaaaaaaaaaaaaaaaaaaaaaaaaaaaaaggggggcggccaaaaaaaaggaaccaagcaaacgcccgcgtgcgagcgacgacatagcgcgtcgatggcgccacctaaaatcaactcaccggccgtcgacaaacaacggactgacagaaaaaacccgggcccaacccaacttaaccgcctggcaaaacaacccccttccgccagctg

SEQ ID NO: 37451 - DNA, 260 bp, Gossypium hirsutum
  Clone ID: LIB3135-036-Q1-K1-A2
aaaagaaccccaagagtggggctagcaataggggtgcagcaaaagatatagcagtgaggtctgagggcagagcacctgcaaggacttatactatacgtgccagggaagaggcagagtctcccgatgtgattacgtgtactttttctatccatgatctaactgttgttgctttaattgactcgggatctacccacttgtacatttgtatggaattgatacctcatataggcatggtagtagagtccattgagtttgtgatc

SEQ ID NO: 37452 - DNA, 438 bp, Gossypium hirsutum
  Clone ID: LIB3135-036-Q1-K1-A7
gattgggcaatgacagaacttatcatgaattcgaaagtactctaaaaagctcaagccgacatccggaaagttgtatgggatagaagagtcgtcttagaaactgagctgcctcaccttgattacatgatagctggcatcaaagagacctggcgattacatcctccggcaccggtcttactccctagagaatgcatggaagacgttacgatcgaccggttcgatattccgaccaaaacacggattttcgtcagtgtatgggcaataggaagagatccagaatcatgggaaaatgcagaatgttttgcaccagaaaggttcgtacatagttcaattgacttcaaggggcaaaatttcgagttgataccctttggagctggtcgaagaagctgtcctgttattacattgggcacagtgagtagcgagaaggcactggctcag

SEQ ID NO: 37453 - DNA, 171 bp, Gossypium hirsutum
  Clone ID: LIB3135-036-Q1-K1-B11
cgttactctgcggatggagcagatcgtgtgtttcctgatagaggggatggccgtgcacccgctgtcgggccagcattggctgtgggtggcatgcaaatatttattaggaggccaggggagatcaaattgacagcggaaacaacatctggtgcttggaccgcgcttcttatg

SEQ ID NO: 37454 - DNA, 386 bp, Gossypium hirsutum
  Clone ID: LIB3135-036-Q1-K1-B4
acgaaaaaaaaaaaaaaacataaacgggacccccttcccggttgtacgatctatagcttccacgggggggggcgtctccttcacctgtagccgatatttacatcttgttctccagcacctactcactagtgcgtcttgaaagatcaacctcactggcacaacgctcatgttccagtttttcaaaacgaataaaaaaaggctcctatgagcgaaaaggaggccatgaaagatgcccatgcccactgaatcttacgaacggacagcgcatttgggagcgccaatggggctcgccctagacatcctgcttacaactctttggtggccatgttacacatcatcttaaccggttcaatgggccggttactaaagcttgatagttaaccttc

SEQ ID NO: 37455 - DNA, 328 bp, Gossypium hirsutum
  Clone ID: LIB3135-036-Q1-K1-B9
tcgcccacgcgttcgcccacgcgtccgagacggtctcgtagctattcacctcgacaaaatgacagagattatcattcaaggggtagacgagggagatcccgttctcgttctccatatggtaggagaagagatgatcctgacttacataggaggcacagagagcgctccttggctggtgatggcaagggtcatcggaaaataaaaaaaattcatttttcaatttggacggaaaagcgataaatatgactttatattggaagggcgcgctcaaagccaaagggcactccctggtgtgggatcattatgaaggcaaccctttattttaatt

SEQ ID NO: 37456 - DNA, 238 bp, Gossypium hirsutum
  Clone ID: LIB3135-036-Q1-K1-C1
gggcaggcctacgctttcctccaagcgttcggtttgcttaaaccatttattctagagggctatcttctttttgaggtgcggaagtgtatggaaacgtattatctatggaacctgaccaacactgcgatggtatacaacctatagctttttgggatctaactatttttagttatggattttatatctgaacttgagaaaccatttagggatatttgatgattgaaagaggtcattgttc

SEQ ID NO: 37457 - DNA, 431 bp, Gossypium hirsutum
  unsure (1)..(431): unsure at all n locations
  Clone ID: LIB3135-036-Q1-K1-C11
gcgatgatgggttcaatctctgtcggtacttcttcaatccaataggatgggttatcaaggttgtatgctcgagttgaaagggcatgcactacgtcatttgtctttcgaggggtatactcaaaagataagggcatctccttcgacaaccacatctcgaaagcccatttcttccccaaatatgacggtctgtagacatgccttcgcttcagcagtggtcggatcccttgttcttcctagtgggtgtccaactcaacttcttgcaggacctgttttgtgaattcgcaatctcgaaagaggtgttccacagtttcttcttcaactgagcagactgaacatgcaacatcgttcttgattcttcgaagtctaagagtactgagcgtcngaagaaaattattggcaactcttcacagatgtatttttattttacttgg

SEQ ID NO: 37458 - DNA, 468 bp, Gossypium hirsutum
  Clone ID: LIB3135-036-Q1-K1-C12
acaagttgtattttgccgctatcggattatatcgatcatcacaaggggaaataaaaaaaatgctgaggcaattttggagaaagagaggttattacagacaagttagaagggagaagggtgaaggtgttgttcctaaagggtatgttccagttatggttgggagggaggaggagggagccaagttttttatccacatcgatatgttcgaaaatgattatttcgttagcttgcttgaaatgattgctgtggaggttgggtatgaaaatccaggcatccttagaatcccatgccacacccaatgtttcactcacatacttaaccagatttcaaggatcaacacctagttttcattgtttcgccttccaccactgttttcattgttgcgctctacttttattttatagtgagtttctttttgtgagtttatagttaaggcattaataaaacaaagatttattgggtcaaaaa

SEQ ID NO: 37459 - DNA, 429 bp, Gossypium hirsutum
  Clone ID: LIB3135-036-Q1-K1-C2
ctcgactaacagacatatgcattacctggatggatggtacaatcgaaccgggcggtacgatacattgggtccaatcactatgcagatccagaatgcaaacgggccgaggagttagtctttggcaaggaaggcatcatttcacaaatggtcgaaaccacaccaaacaagctatacagcttgaccttttcattgggccacgctagggacaaatgcaaggaaccactagctgtcatggcctttgctggagaccaagcacgaaattttcactacactccggactccaactctaccttccaagtcgctagtgtcaacttcacggccaaagccgagagaacacgaatcgcattctacagcgtgtattacaatacccgaacagacgacatgagctcattatgcggtccggtggtggatgatgttcgtgtttggttt

SEQ ID NO: 37460 - DNA, 320 bp, Gossypium hirsutum
  Clone ID: LIB3135-036-Q1-K1-C3
acgcccacgcgtacgcttgctggcacacagactctgaatgcataagttgatgaccttctacctggcatggtacgtgcggtgctggataatattcattgcttagcctcctacgatgcctaacttgattccattgcttcatttggtgcatcacttggctaaagtgctcaactgggccggcggacacccaaatcagcttgcgatgacttatctttgagagcggaacactgagcagcgtataaaggcttttacattgggataatgatacaaataagatctaatgattgaaacatcagattgttgcttcgtgcatagctctcaat

SEQ ID NO: 37461 - DNA, 178 bp, Gossypium hirsutum
  Clone ID: LIB3135-036-Q1-K1-C5
gctgggatggattatattcactacttgaccaacttgcttatcgaacacaacctattgctttttgtgggcgcatcacttgtagtaagcgctcatataggccaatgtgcaaccccatttacgggtaatgactgatcgatggggtccattcctcagcagagtaaaaagctctgagatcgtg

SEQ ID NO: 37462 - DNA, 394 bp, Gossypium hirsutum
  Clone ID: LIB3135-036-Q1-K1-C8
aaaaaaagttgtgttattaaaataaaaatacatgatttgcatgatatgcaataggcctaagggtcttatcgtatttgccaagattgagagcagcacacgcttttgttaatctataagaacctcctctcctcaaccttcatatcccctttcaacaagagcttagaatactttgccttattgtcatcttccaagacttatagtcccttatcaccatgcagcctagtgaggtttcaggcatccaatacctagttccttccaatccatccccatattcaccccatttcagcatgaatcagagcaacaagcctgcactcgactcgaaccagttcttgaaccccctgtataatttctatatccctcctcacattcaagacatcagtccccactcgtgctg

SEQ ID NO: 37463 - DNA, 459 bp, Gossypium hirsutum
  Clone ID: LIB3135-036-Q1-K1-D10
gccgctgccgctggctttctcttagccggattttatctactggttgacatctatggatatcaacgcatgacattggtattggaatggatggggaagcatgcattggtgatatacatccttgcagcctgcaatctcataccaatcgttatacagggattctattggaagcagcctccaaataacattcttagcttaattggcattggaagatgaagtgacgattttgctgcaatccatggaagtataggttttctctttacctcttttatcaactacagttgtgaactctctctctatttagattacctaagtgagagaggggtggttaggcaggacagaaagggtagaaaatatggtttgtatgtaaaaaagagtgagcagagcaagcttgcttgagctttctactttcatatattcttggaaaaatggatataatttttatgtcgtctgacctcgtgt

SEQ ID NO: 37464 - DNA, 399 bp, Gossypium hirsutum
  Clone ID: LIB3135-036-Q1-K1-D6
aaaatgatctctgccggtgaagcaacctataataagtggcggcgtcctgatccttagatcggtccttgcgctcctggcggttccaagttcactcaaaaccctgtaccaccatctgggattgagattttatgtgattatggtaaagaagaacatgattaaaacaagatcttttctaccccaacacataaaggtctagagacttcttcgtggatcaaatggcagctactcttattcatgccagtgaaaagtgatgaagctttaataacattaacgttgatgctcctttcgactgaatttggtgtgtctggatcatgatatgagagcattgctcagattgaaagaaccaaatggctgttgacatttgcataggaacactatgatcatgaatgctcttttgtc

SEQ ID NO: 37465 - DNA, 423 bp, Gossypium hirsutum
  Clone ID: LIB3135-036-Q1-K1-D8
aaagacttctacgttggaacttttggtgtcagtgttgaaacttataatcagaatcacttgaagaacactgctgttaatgaaggtaattccgatcggctatggtggtttcaagtgtgtactgaagtggcctatttccaggtggcaccctcaaatgatagcatccgctctaccaaaattaatacaaaataccacttggatctttgcaagaacgtctttggagaaggcatctacccagaggttgatatgacaaatatatactatggaggcacaaaaattgcaggttcaaaaatcgtttttacaaatggctcacaggatccattggcgccatgcttccaaacagacatcatctccagacatgccttcggacattattacttgtcataattgcggccatggaactgatatgcgaggatgtccccaatc

SEQ ID NO: 37466 - DNA, 345 bp, Gossypium hirsutum
  unsure (1)..(345): unsure at all n locations
  Clone ID: LIB3135-036-Q1-K1-E10
gcgcccacgcgtccgctctgcaacatctggttgttagcttatatccccggtatccatgaatctccccgtgggggaatttgtcacctttccccaccctccaacagcgtccattattaaaaagtcctctcgcagcccatatatttttccaggtaaatgaaggtaaattccccaactgagctttgtagaaatctgaattgggaaaatattttactttcaaaacacgggaaataatgaattctgatatattaataagacgccatccctacttcgctaataatgcaacgttaaatttagcaaaatcacgtantaaataaatttatttataatatattatattttaaatat

SEQ ID NO: 37467 - DNA, 464 bp, Gossypium hirsutum
  unsure (1)..(464): unsure at all n locations
  Clone ID: LIB3135-036-Q1-K1-E11
gttatcctttacatcttactttgtggtgtcccacctttctgggcagaaacggaacaaggagttgcgcaagcaatttttcgctctgttatagattttaagagggatccttggcctaaagtttctgataatgcaaaagaccttgtgaggaagatgctcaatcctgatcctaagcaacgacttacagctcaggaagtactagatcatccttggttgcaaaatgcaaagaaggctccaaatgtttccttgggtgagaccgtgaaggcaaggctcaagcagttctctgtaatgaacaagctcaagaaaagagctctcaaggtaatagctgagcatctctctgtggaggaagttgcaggcataaaagagggattccaattgatggatactgccaatagaggcaagattaacattgatgangttaggggtgggttgcataagcttggtcataccattcctgatgcagatct

SEQ ID NO: 37468 - DNA, 457 bp, Gossypium hirsutum
  Clone ID: LIB3135-036-Q1-K1-E3
attttggcatgaaaaccaggtgaaggtgtcgattctcgttatgtctggccaggtggaagcatcggcaggagtgcattgggctgtgagtgtatatcgatggtcatatgaagcgcacacatgctatcggtcagattcatcattttgtgagagctcattggattgattatagatggttcgcgatgatgaacatattcagacgatgcattgctggtatctgcacgaggttcgctgctgctaagagctcggatgtttgttaataagccagatggaatggttagggaagagagaggtccttatggtgatcctcaacatccatatttctatgaggaggaagatgtgtggatggcaccaggctttatcaatcagttctaccaaagtccttgatattggaagacatacctgccttaagttgatcaggaaagaaaaatggggctaaactcattttataaagcttccc

SEQ ID NO: 37469 - DNA, 240 bp, Gossypium hirsutum
  Clone ID: LIB3135-036-Q1-K1-E4
cagagagggtaattttccaggtggctgcggtcattcatgggtagcaatgttgcctctttcgggacaggtcaaaccaatcaatcacttctctactgaacaaactggcttcctaaccaattgtgttgaaaacagaggagcagaccgtgttggatctcaagctgaggcgggaactgctcctttgaaatggcatatgccaccgtcatgaccatagatgcatgtctgcgctgcttgataggagat

SEQ ID NO: 37470 - DNA, 369 bp, Gossypium hirsutum
  Clone ID: LIB3135-036-Q1-K1-F2
gagaaatcgagagtcagcatagaggtggcagctggcggggcggcctccgcagctgcccatagtgcgtccaatgtgagagctacttatgatactgacactgctcagaatatacaacgggacttgactgctgcaagtaccagtctccgccacatgggatgccagagagccatcagctgggcggcaacactatgtatagcctgctttttagaatcgctgtgacacctcaggggaacactagcttcgtgtcctagctcatagacaaccaacacactcactgcaactaaggcaaccgtgatgctcgcgcatcaatgtaaccgtgtaggtctggataaggacgtgaatgtctttaaccaactcgtcccaaatctg

SEQ ID NO: 37471 - DNA, 305 bp, Gossypium hirsutum
  Clone ID: LIB3135-036-Q1-K1-F5
acgctctggtgtgagttctgagatacgatcacctattaaatatgccgtagaatatacccgaaaggcgaaacatggtgcatgagtgcggtcatgtgatctgtccattttttttggcaatgctgaaggcaattaatcagcgtgtgaacaagaccgacaactgtaaggaacaactacagacatactgtcggccctcgtcgacggctgcaacgccgtctgacactgccttaaacgctatcgtgttagtacgggttctcgtgtgcaagcctccttcttaatctaatgtaacatgtaacgggagctttctt

SEQ ID NO: 37472 - DNA, 312 bp, Gossypium hirsutum
  Clone ID: LIB3135-036-Q1-K1-F7
acgcatgtgaccacaagcgatggaaggacgcgtgaccagctacaacgaggcaccgtgatacaggcggtaaggacatacatttgatggtcatcagttctagagtttcacgacacataatgctcatcaaatggaagctagtatatgaaatacccaccgcttgagataggggacggtatacaaaggagcgatagggtaaatgtacatgctaatccggccccataaagatgccaatagctaatgtgatttattggcaccccttatgactatacatatatctatactagatggaagatgatccacgctattaaaatt

SEQ ID NO: 37473 - DNA, 165 bp, Gossypium hirsutum
  Clone ID: LIB3135-036-Q1-K1-G11
gcagactgacattcaccaagctatggctgcagctgcgctgcaagaaatgagagcagtggatccctccagatcagcaactactacccttctgcaattccagcaaccccaaaatctatcctgcaggcctgctgctttaatgcagtcccagatgttgcagcagtctca

SEQ ID NO: 37474 - DNA, 178 bp, Gossypium hirsutum
  Clone ID: LIB3135-036-Q1-K1-G3
cccacgcgtccgaaaatgaagaattttgatcaatgatgtatttttattacatggaaaaaaaaaaccattcttgaaataaagttaaaccttgaaaacaactccaaagataattggagttgaaaatgatttttgttaagactaaaatctcttgatgatgaggaatttgattatttcattt

SEQ ID NO: 37475 - DNA, 294 bp, Gossypium hirsutum
  Clone ID: LIB3135-036-Q1-K1-H10
tggagaggctggtacattctgacctactggattgaccactgaagctaagtctgttgagatgcataatggagctatgcaagaggatattgctggagacaatgttgcatggaacatgaagaatgtacctgtgaaggatctaaagcagatatttgttgcgtacaactccaagagaggatctctgacgggaagcaaccagctttacctgcaaagatattatcatgaaccacgcagggcagatggtagaaggctatgcaccgtgtctagatggccacacgttccatattgctagaaagt

SEQ ID NO: 37476 - DNA, 463 bp, Gossypium hirsutum
  Clone ID: LIB3135-036-Q1-K1-H11
gttgaattaaaaactcctaattcttggagcacttgttgagtgaagttacaatcccgaaagagatgactcaccgtctcctcttcttcttgacacactggacaagtcgtgtttgccaccagtttcagaacttttagatttttcaagaccggcataaattcattagcaactttccatagatgtattctgatcttgtttggtacctttatttctcaatttttttttgtaaaatttagatagaagattagattgtatgttggtaccctctgctgtattcagccaactatatccagttttagctgtataatctcctgtattatctcccctccaagttataacgtcttgtggtgcactactcgccagcaggattgagactatcttttgcatttgctcatccctaaataataaacgattttcctcttgctttcagctcccagtaaccagacatcattccagatattaacac

SEQ ID NO: 37477 - DNA, 303 bp, Gossypium hirsutum
  Clone ID: LIB3135-036-Q1-K1-H2
acgcggacgcgtgaggtacttcagattctgacttgggcggagatttactaccatgcacaaacggtatcagctgatggagcgcggcctactttctttacagtataagctgcagtttatactcttcaaatagcaagcgtggctgatattgcagtgctaacatatcccagttctaggcattctatgtaacacgctatttgcaggggcgtgacatggagcagaactgtgctatttacgagatggaggaaggctcctgttagcgcagcctaggaaccctgtcgagtcccaaggacggcaaacgaagct

SEQ ID NO: 37478 - DNA, 228 bp, Gossypium hirsutum
  Clone ID: LIB3135-036-Q1-K1-H4
cccacgcgtccgtaatgatatatttttagttcttgctcccagttttacttcctttgggctggctctatttatgagttacgggctcttttgtctgtgcgtgtacgtgtttacgtcggttttcatatatgataaatttatcgttgacctaaaatctggcagaattcaagcctaaagaaatccagggattggattcggcaaaaaaaaaaaaaaaaaaaaaagacccaactt

SEQ ID NO: 37479 - DNA, 342 bp, Gossypium hirsutum
  Clone ID: LIB3135-036-Q1-K1-H5
aagaaactcatttagatcaggcacatattcccttaggcttctctctctctctctctgtctcccctttctgattaattttggcattgcagtgagtttcacggaaccacaaggaatcttcaaagattatgtttatctgcattgttcactcttaaaacaaagacacgacatggggtaaatttaattaagaaccaaagttgcagctttgtaaagaatttattagtcaaaggtggagggatgctgctgttattactttcagagtgacatcatccagttgttattaggcttgtaaaatatctctatttttccttagcttagagtggtttaatgacaaccctggtagtg

SEQ ID NO: 37480 - DNA, 314 bp, Gossypium hirsutum
  Clone ID: LIB3135-036-Q1-K1-H7
acggctcgaacagtggggatagcgatcggtgggtataagatgaaattgcaattaggacggtgggcacagcgactgaagagacttgtactatgcgtgccagagaagaggcagaggctcccgatgtgattagcgacacgttttatatccatgatctaactgatgtggctttaattgaatcgggatctacttacttgtacattagtgtggaaaagatacctcatataagcaaggtaggagagaacattgagtttgtgatcaacggacatacagcgtgtactataaggcgagcacaaggctactgatatagacgtagg

SEQ ID NO: 37481 - DNA, 327 bp, Gossypium hirsutum
  Clone ID: LIB3135-037-Q1-K1-A4
aagaaaaaggactgagaatggaactgtgcgaattgacatagtaagaaaaaactgtcatctaaacttgatgtctcgacgagaaagaatccctcatggatgaacgcaaaaaaaaaggatgcatacacttgataacggataaatgaacatttggggcgcccgttttaaaagatcaatgttcgagcacgtgctctggtggaagaatggctttttttatcgggaagatatgtacaaagagcaggcgggggtttaacaacccggactgtgggaaaagcttgaggtgcgcatacttaacggctaggatctaaacccgacttatggcgatgggct

SEQ ID NO: 37482 - DNA, 446 bp, Gossypium hirsutum
  Clone ID: LIB3135-037-Q1-K1-A5
ggcgaagtggcaaagaaacagcagatgcctcctgcaagtgtgatgacaaggcttattcttatcatggtttggaggaagctcattaggaaccctaacacatattccagtcttttcggcttgacttggtccctcatatctttcaggtggaacattcagatgccaacaattgtaagtgggtcgatagcaatattatccgatgctggtctgggaatggcaatgtttagtctaggcttattcatggcattacaacccaagatcatagcttgtggaaaatctgtagcaacattttccatggctgtcaggtttttgactggtcccgctgtcattgctgcaacctccatagccattggtcttcgtggggttcttttgcatgtcgctatcgttcaggctgcccttccacaaggaatagttccatttgtgtttgccaaggagtataacgttcatcc

SEQ ID NO: 37483 - DNA, 317 bp, Gossypium hirsutum
  Clone ID: LIB3135-037-Q1-K1-A9
acgcccacgcgttcgcttgctggcacaaatactctgtttcaaagagtggatatccttctacatgacatgttgtgtgcggagctggataaaagccactcctcagcctcctccgatgcctaacttgattccatttcttcttctggagcatcacttgtttcaagtgttcaacttggccgatgtacacccaagtctgcttgcaaagacttatcttttagatcgaaaccaaggttgtgtattaagctctgagattgtgatagtgatataaatattattatatgattgataaataaaattgttccttcttgcatagctttgaa

SEQ ID NO: 37484 - DNA, 158 bp, Gossypium hirsutum
  Clone ID: LIB3135-037-Q1-K1-B11
acgctggctggtgtgtaatacctaacatctttcttatgtgttttggggaaagaaagcggcgacatctattaaagcaacacgtcgttgtagcttcgtatatgataaagaaaaggaacactcttcatatttattccatactttatcacccgaatgaaacc

SEQ ID NO: 37485 - DNA, 110 bp, Gossypium hirsutum
  Clone ID: LIB3135-037-Q1-K1-B12
ctcattcgttcgtacagacgaccagtagtaaataactgctctgacaggtataaagatagcgggggtgcgtcatcccgtaaacctgcttactatagagagccagattgagg

SEQ ID NO: 37486 - DNA, 187 bp, Gossypium hirsutum
  Clone ID: LIB3135-037-Q1-K1-B3
cgaaatatgattggttaggagaaccctacttttcccttgcttgggggcgggttgattcactaggatgcgactgttactgtgagattttctctatgtgcatgctcccaggaactcaagagtatctgtctgccatagagcacttattatatatatatatatagctggtcatcaatgattttaaaacaaa

SEQ ID NO: 37487 - DNA, 312 bp, Gossypium hirsutum
  Clone ID: LIB3135-037-Q1-K1-B5
cttacttttcttatactttggacattcatattctggtcatcgactctaatctacaaatctgggaaacaaaaaagaaacgacaatactcatactaggcttgaaaaacacacaaactatctacacgcaaagctgatacttctaggggccgttcttttttggtgccgatcgcccgaacaaatgcatcaagcttcttagacttaaatcattcttcctatcctccaacaatgggccgtcctataacagctggatggtacatgaataatcctgcggctaccgactctattcgtctgttagtatccaacccttttcttc

SEQ ID NO: 37488 - DNA, 441 bp, Gossypium hirsutum
  Clone ID: LIB3135-037-Q1-K1-B8
cttggatgtatggtggagctcctaagggacctcagattacggatcgtaaaagacggggtgacataggctatgcctcacctcgtcgactgatacatctgctagactctctatacacaacctggagaagagtgacttaccttgttttgaaggaagttgatagaatgttggacatgcggattgagccgcaaacaagaaagattgttttttaaagtctacctgagttacaaacattgtactggagtgcaacgaggcctaaagatattgaatctttagcatgacagttattacgcaacccataatatgatgcccatattcttatgatgttatggctatcattgcatctacttatctgaaagcaaccaatttattaaccaagttgttgaagtcataacagatccacaatagttcaacatgctaatctaattgctcgaggatctgatg

SEQ ID NO: 37489 - DNA, 430 bp, Gossypium hirsutum
  Clone ID: LIB3135-037-Q1-K1-C3
aaagcaaccgaactcaactcaaaattacacttatccgacacatccaacttgccgcaaggaacgacgaacagctgagcaagctgctcggcgatgtgaccatcgccaatggtggtgtgatgcccaacatccacaacctcctcctgccgaagaaaaccgggacctccaagacttccggtgccgatgatgattaatgcagataaatttagattccccaaagccgttcacaaatcaaccccttcccccctctctatgtagtacatgacgatcctgatattcaaatctctaaggtttttggctttggctgttgttctattattaccttctgtggaactttagctagcaattagatttttagggatctcggtatgatgtcgatataaatcacattatccatcttttttttcctttgggaaaaaaaagcaaggtcata

SEQ ID NO: 37490 - DNA, 430 bp, Gossypium hirsutum
  Clone ID: LIB3135-037-Q1-K1-C6
aagaaaggttgtgtcattcagatatattttctatattcgcacgacatactaaatcgggcatgggctttatcgtatgcggcaagacttagagcaactgctgctaacgttaaattataggatacctcctctcctcaacgatttaactcccctgtagacattgagcgcacacatacgtctgccttattggacgccatacacgcttatatagaaacaatagcgccatgcatcctagtgctggtacatacttccgacatcctacactctctggataataccgatattcaccccattgctcgatgaataacagcaacaagcctgcactccaccctcactctatagtataaccgggggtgtgagggtcattcccctccttagattcagaacatcagtccccactcgtcctgaatcataatggtttccactttttgac

SEQ ID NO: 37491 - DNA, 139 bp, Gossypium hirsutum
  Clone ID: LIB3135-037-Q1-K1-D12
gcccaaccatcgtatactagccacgaactggactggataggaggattcatacgctgccggtgcttgagctaacctcagtgctaaacatgtcgctcctggtccctacggaacctgatcgcgaggaaggacccaccctccc

SEQ ID NO: 37492 - DNA, 385 bp, Gossypium hirsutum
  Clone ID: LIB3135-037-Q1-K1-D5
gaagaattctacgtgggaactatttttgtttttggcgaaacggataatcagaatgacttggggaacactgctggtaatgaaggtaattcctatcgggtatggcggttacaagtgggtactgaagtggcctatttccaggaggcactctgaaatgatagcatccgctgtaccaagctttatacagaataccacttgtatctatgcaagaaggttttatgagaatgcatctacccacaggctgatatgacaaacatatactattgtggcacaaaaagtagaggttgaaagatagcctttacaggtgtttcacaggatgcatggcgccatgtcttacaacagacattatcttcagacatgccgttcgtccaacttacatgccatacat

SEQ ID NO: 37493 - DNA, 215 bp, Gossypium hirsutum
  Clone ID: LIB3135-037-Q1-K1-D6
aaagagctttgcgcgagacccctttttctatttccagacgctgcctaacggcggccgtgctataacactgtttagggtgagaaggaccataatggagtactgggacttgccttgcttaataaggagacctgctttgagaactcttcgtagatccttctatatttgttgacatgggattcgatgctttgcatcttgaataattgcaagaacatctt

SEQ ID NO: 37494 - DNA, 348 bp, Gossypium hirsutum
  Clone ID: LIB3135-037-Q1-K1-D7
gaagagggtggtagagcgacaaaatttcttgtactcgataattgccttccagggcgcacgttcttgtaagtatctatcataatttttgaccatttcgtttaggttctttcttttggtctttgctggaagctaattaatgaattctggctttctctgatcttttagattgccgatatttaatatgatccaagaccttatgaggttcaatcaagaaaaactgaagaagaaaatgatgatgtgatgttcaaaatggtcaactaaatgcatgaacatatattaaaagtgaccaaacaaacctgtagcatttattcacataactcgatccatcacggtgctagacatgcgggg

SEQ ID NO: 37495 - DNA, 179 bp, Gossypium hirsutum
  Clone ID: LIB3135-037-Q1-K1-D9
ctacgcggacgcgtgtgcggacacgtgggcgcaaggtttgatctcgcttttacctctgtcttttgggggtaaatgcaatgatgtacaaaacatcttttggggtatataagacaattcatcagaatagttaagaaactaagaaatagaaagcacctttgtcagaatagcttttgaaatat

SEQ ID NO: 37496 - DNA, 175 bp, Gossypium hirsutum
  Clone ID: LIB3135-037-Q1-K1-E12
acgcccacgcgttcgagatgcgtcaaagggtatcttcattaaaggtatatccatgcatgcgcagcaaatcgtacaacggctcaatgcgtcaggatccacacctaaaaacaaacctaacatctaagaaaggctgggactaaaacaaccaatggcactcaaaaagacaatcctataa

SEQ ID NO: 37497 - DNA, 306 bp, Gossypium hirsutum
  Clone ID: LIB3135-037-Q1-K1-E6
taaagattaacttaggggttaaattttatttgccgttagacttgacaatctttttcggctttcatgaagaaatgacactattctaaaaaaaaacggtcttacgtgaggatcctgttcgatgtcatagtatgggttaaactcgggagatatcgtcaagggctagggattgatgtcggcaagagatttaagatagcaccatgagaacattacttattttagggactaaatattcacttatctcaagacatacacttatggggttgactatacaggagggattttgcacagcatcacctcaagaagagc

SEQ ID NO: 37498 - DNA, 342 bp, Gossypium hirsutum
  Clone ID: LIB3135-037-Q1-K1-E7
cccacgcttacctatgggttaaatttaatatttgtcttgactagagcatatgttgggtcggtcacgaatgcatgcttcttcaactccacatgcatacgtacaaacactaaggatagggagaaaaaaaattatactttgcctgatcagaaacaatagcctccacatgagaaagaaccattactaatattttatgaatcttcttgaaaacaaatcccaacttgtgaaatggaacaatcctggatgaaggaacatgcacttattgtcccctgtgagaggtagaaaagcgtgtgagaagcaccacagaaagcacaatcggatcgggccggcactccaattaaacct

SEQ ID NO: 37499 - DNA, 392 bp, Gossypium hirsutum
  Clone ID: LIB3135-037-Q1-K1-F6
gctaccttctcggagatatgacgattcttatagatgctggacttgagggattgaaggatgtggtagctctagccccacctcctgaaaatggctcaactgaaagataccctgaggatgatacttacttcatctgtacatgacctgagaacggccctattctgatatcaaatgacgctgtggctgttcttgacccacaaactaggcttgctagggacgaagtggcatactgtgtgtgcgcaccattggtaacacttatcttcaccgtgagctcaatgtctttgagctggacaagtgtaatataggatatttattgagcatgttgtcggaagactgatgggtacgttgtgtagcttatgcgcacttacgtacagttgaggattgaatgctcatca

SEQ ID NO: 37500 - DNA, 339 bp, Gossypium hirsutum
  unsure (1)..(339): unsure at all n locations
  Clone ID: LIB3135-037-Q1-K1-F8
ctnnntttttttttttttaaaaaattaaaccccattttaatggcttatactttcacttacattttcatattaagggagccttttcatttaagacttatgcccatttatttattaagatacctgcccaccgtgaaagcgcaagggtcatttgggggaagttaactttacagagtctccagaataagacagaccttggcagcctttccggatgatctgaacgaagcaccataggcgcacctcttatacctctcatgtcacggaccgcgggccaccacacgtatctcgggccacacatccctcggggcacacacataccctcggcccactcatccctttttc

SEQ ID NO: 37501 - DNA, 288 bp, Gossypium hirsutum
  Clone ID: LIB3135-037-Q1-K1-G5
gattaatgaggtctaccacacactttctaatattactactaggagaggaccctctgggcgcggcctcttttggtacgtattagtttaccaactatggcaagcccactacggctgtgtatgagccgacttatgagaaagccacatcttatgaacataaaccatctgtgtatgtacctacagagaaagaacaacctgtgcctgaaccactatttgttacaccaccatagatagagacaccagacgcctggccgcctctatatgaatctaccggcaaggaaaatgccccac

SEQ ID NO: 37502 - DNA, 434 bp, Gossypium hirsutum
  Clone ID: LIB3135-037-Q1-K1-G7
gtaactactataaatcctacccttgtgggtgatcctcggccttctaaacactgtagggggtttgcacccagtggatgtgttccttctaagattgggttctgtagttcacatgaactgaacggtgaaaagttctctggttctgggaaatcttgcaaccagattaatgcttctgaaacaaggatcagtatcacatctgaagatggtttgcatgaagatcatgaacatgaaaaggatcccactttctcttctagtggaactgttcttcctgaatcacacagtacatgcttttatcaatgctgctttgggtgcctacatgccctccttagttggatgccaaaggctctggttactgaatggacatcagatgagagccattggacagctgttgatgtatatgaaacagctgcgttattgtctgcgcatcatctttcaac

SEQ ID NO: 37503 - DNA, 429 bp, Gossypium hirsutum
  unsure (1)..(429): unsure at all n locations
  Clone ID: LIB3135-037-Q1-K1-G8
cccacgcgtccgcccacgcgtcctttcacgcgtccgctgacttgcagggaagaatgggaacagtttgggatggtggttccatggtgttcgcaagtggaagtattgtttcatccatcgttgggttgcttcgtgacgcattgtgggtggaactcgacgttggagagcatggcggccggtgtaccggtggtggctttccctcaatggacggatcaaaggactaatgcgaagctgattgaagatgtgtgggggaatggggtgagagtgagtgctaatgaagaagggatggtggaacgtgatgagatcgataggtgcttggatttggtgatgggggatgataagaaagggattgaagtgaagaaaaatgtagagaaatggaaacggttagccagagaagcccgcatggaaggcnggctccttggatatgaagct

SEQ ID NO: 37504 - DNA, 232 bp, Gossypium hirsutum
  Clone ID: LIB3135-037-Q1-K1-H11
acccacgcaaacgcccaagccgttcgcgacccagctccacaccttagaagctgccgtgtcatactgcagcaagcatgcagctgccacgagagtttactttgttcgctgtccttatgcagaccaatcaaatagcgctgtctcatataccaaaggctaacaacctggcatggtggcaactacattctacgacatcgatatacaaaaacatacccgctgtatttatgatggcagc

SEQ ID NO: 37505 - DNA, 381 bp, Gossypium hirsutum
  Clone ID: LIB3135-037-Q1-K1-H2
cacacttgataatattgctactaggagtgttttctcttgccactaccgctgttggtacctagcacgctcgccacgatgggaagccgcctactttactttttaaacctgctaaggtgaaagcctccaccttatgaacactcatgcctataaacctcctaacgcgaaaccttcaccttatgaacataagccctctgtctatgaaccaccaaagaaagtattacctgagcctatggcaacagcttatacaccttcaaagaaagagaagcctgaacccgaaccaccagtctatgaaccttccacgaatgataagcctgagcctaatacaccagattatacacgcacccatgaaagagaagccgtgagccataccaccagtatatg

SEQ ID NO: 37506 - DNA, 315 bp, Gossypium hirsutum
  Clone ID: LIB3135-037-Q1-K1-H7
gagggattgagggataagctcttgctatgggctctactaaggtttctgcgctgcgtgtgctggtgagaggtctggacgatcgccattccctggtgaaaacccaacttggacgaagcgccaacgcgtggctgttgctagctatgagaagaagctggtctaaatgcacatataattctcactctactactgaatttggaaacggatgacaccctgcagaatattatatttagtgaatcagctcgagatatgccgctgcttcttttttctcatttgatatatgcgagagcacgtggtgcttaatccttttagactggg

SEQ ID NO: 37507 - DNA, 250 bp, Gossypium hirsutum
  Clone ID: LIB3135-037-Q1-K1-H9
cccacgcgttcgcagttcaaaggatgtgaaatttgcaggtggggggcctataaagagggctgctgaaagagtcatgggtagcagggtcttttgcaaataaagccaattcacactatggatcaaggctccttgctgcggcgaaggtctaccatctgttaaccggagagaggatgcgtgcccttttaaatgatagaggaccaccttccaagggatataatgagaaactgtttgctcacccgaaatgcgtaaa

SEQ ID NO: 37508 - DNA, 341 bp, Gossypium hirsutum
  Clone ID: LIB3135-038-Q1-K1-A3
cccacgcgtccgcccacgcgttcgcccacgcgtccggggaatggtttctagcattctgcagattgttattgctcctattactgcaggattgcttttgaatcgggtgttccctcgtctttgtgaagccatgagaccatttctgccgccgctttctgtacttgatacagcttgttgtgttggagcgccccttgctattaacattaattcgggtctgtccccatttggcttaactgattcggtgctcattgctgcattccatttatcagcattcattgctggttatttcctcaggggatcactcttgcataaagcacctgatgtgaaagcattgcgaagaacac

SEQ ID NO: 37509 - DNA, 137 bp, Gossypium hirsutum
  Clone ID: LIB3135-038-Q1-K1-A8
gcggactcagccacacatgatatacaatgttcagtgttcccgagcaatcgggggaaccgtgggggaggaaccctgaaaaagcacaatcgacaactcgtgtgaaagagaactctacaatcttgccgataccaacacta

SEQ ID NO: 37510 - DNA, 273 bp, Gossypium hirsutum
  Clone ID: LIB3135-038-Q1-K1-A9
acgatccctgttcccgacggaccttacaccggttttttttggaacacgcaaccaaccaacgctccttggagctgagtcaatgtggaagatgacaactcccttggggatctggatggtcttacggaatctggtttaaagaagaaggggtgatatgaatcatgcaacccttttagctccaaagcatgtatttgagaactctgtgtttggataggctaaatgacaagtttatggagctggaatctatttgggtacctttttaggacgatccaaaac

SEQ ID NO: 37511 - DNA, 352 bp, Gossypium hirsutum
  Clone ID: LIB3135-038-Q1-K1-B1
gattgctgctcatttggaagcattagagttcgatgtctccctcgttgctacggagtggtttctatgcctttttgctaaaagcttgccttccgagacaactctgcgtgtgtgggatgtccttttctacgagggagcgaaggttctttttcatgcagctttggctatatttaagatgaaggaagaagatttacttctagcacatcaggtcggcgatgttattaatataatacaaagaactacgcatcaccttttcgatcccgatgagttattgacggttgcattcaataaaattgggtttatgacgacaaacactatatcgaagcaaaggaaaaagcaggaacccggagtaatg

SEQ ID NO: 37512 - DNA, 233 bp, Gossypium hirsutum
  Clone ID: LIB3135-038-Q1-K1-B11
gttggatgtggtctaatttccatctcaagcagaatatgatagacttttatgagatgagaaagagaccctcttatcgttctttggttgagattacaattaaaagaaatgggaaaaaattcctgcaatggcaatatgaatgtgaacgaattctttagacctcttagtttttgttttgttattgtttccatggtgtgagtttgcaggcattatttaaatttgtgttgaatctgagt

SEQ ID NO: 37513 - DNA, 339 bp, Gossypium hirsutum
  Clone ID: LIB3135-038-Q1-K1-C10
agaaggtgaagtgttgactgagaagattggtgtagagacatgggttcgtgccctcagtgtttcctcattgccaacaactcctgcagaacgtttttccatcctcttcaaagaacgagctaaatgggagtggaaagatttagagccctacattagggatctaaatgtacccgggctttcatcggaagctttgcttctgaagtacactcggagatctcaaccgagcattgatgcggaacctgtttttagtgctagatagatatatgtatatattgaggcttggctttctgagggtgccattgtcgtggtttcatgcaatctagtgatttagtactagaagaa

SEQ ID NO: 37514 - DNA, 393 bp, Gossypium hirsutum
  Clone ID: LIB3135-038-Q1-K1-C12
cccacgcgttcgggcgcacgttggcgtcgtacgactggtcaagaagtttactcgccggtccttttagccttcacatatgagaacatggagacctggaaatcatcccatttgacaaaagcaactgccatggatccaggctatactttgccactcaatgttgctttaatcactcttcaggaattgagtgatggaactgcactccttcgtttagcacatttatacgaagaggctgaagattctacatattcacaactagcaaaagttgagctaaagaagatgttcaatggaagaacgataaaggaagtacaagaaatgagctttacaacaaatcacgtgaaatcagagatgaagaaattatcatggaaagtagaagggtgacaatggaaacaacct

SEQ ID NO: 37515 - DNA, 315 bp, Gossypium hirsutum
  unsure (1)..(315): unsure at all n locations
  Clone ID: LIB3135-038-Q1-K1-C2
gcccgtgtttgcagagtacatcccgcagagaggctatcatctccatgacgttaaagcttatggccagatgcttaaggatgctggacctgatcacgtcattgcagaggaaccaacccaccagcttatacacgatctggggcgtggattagacaaaactgagaaggacaaggattccttcatcaccgacttttatgaggaagactacgacnaatatccctgggggacggaacgcaaagctgattaggaccaaatttggcgagctaagatggggccttttcattggcaacaaaaactaagtactgcttcgtctctaat

SEQ ID NO: 37516 - DNA, 151 bp, Gossypium hirsutum
  Clone ID: LIB3135-038-Q1-K1-C9
cccacgcgtccgctctttgagtttagcatatatattaaagtttgacacaatcttgctgaagaaagggaaaaaataaaaaaaaaaagagacaaacggcgttcagacatgggaatacatgccttcgtacgcgaacaaacaaagagaatatagg

SEQ ID NO: 37517 - DNA, 350 bp, Gossypium hirsutum
  Clone ID: LIB3135-038-Q1-K1-D1
gcacatttatatgccgcattaaaacatattttagtgcctttgttctcacaaaggttagtttgctgatttcttgtacattactttgtgaatcaagaattatggtgagagaaagaaaagaaaaaaaggtaaaaggaacacgacttgtcagctgtttttttactaactggtgtctggtttagaaagaaatccaaaatggaaggttgcagctcttctataggctaggcaaaaggaggttatatctaatacaaatgtcctacgaatgcttgtctggtcgtgtttgtttcacttattcattctctgcaatgggaatgccatctcatatataacattagatactttttgcgtgtgta

SEQ ID NO: 37518 - DNA, 339 bp, Gossypium hirsutum
  Clone ID: LIB3135-038-Q1-K1-D11
ggcgtcccaagctgctaacattgagagaccgacggctgtgctaatgttccaatattttgccgccctggcgtgggagacctatggatttacatgtggccggacactatacaaccttacatgcaaaaaccgcgcgaaccctatgctggatgtgggctaaccaatcaagggaccgataggaactaattgattacaaagaaagtgggaaaagctcatagctttcttgttacacagacgagctgactacagacccgctggcaccactgtgggcttacaatcaaagacagcgctgtcaaaaggctttactccaccaactggggattaaatgaacgcttagaaaaa

SEQ ID NO: 37519 - DNA, 342 bp, Gossypium hirsutum
  Clone ID: LIB3135-038-Q1-K1-D4
gcagatccaccctccttgttcaaagatagatgttcatcttcattttgtgtcttatttaggatattatgatgacatttgatgggcttatttaggatatctatttgtgtcttatttaggatattatgatgacatttgatgggcttatttaggatatctattgttggattcaacaaatttcctcaagcatatcatgatgagtcaatgatataatttgaaatgaatggatttttttgattgatagattcattaaggtattaccacttatttgtgggaatgcttagtgattatcaccatagatacatttactcaagtattaaccacttgtttgtctagttgacacaa

SEQ ID NO: 37520 - DNA, 413 bp, Gossypium hirsutum
  Clone ID: LIB3135-038-Q1-K1-D5
gccacgcgttcgatactaatgtacgcccgacaattaacatgcacggcacttcaattgtctttatcacggaaaaaagtctgggacagagtggaaactggggccgacgaactggatggaggagagcccttggactgtgtagttgcaacatattcctatacctgctcacactcgaaagcaccacatctgtagaatcaggatcattgcgtctatccacggaacgcacactttgacgtaccatgaatagaattcatttctgataacggtagataaatgaaaacaacagtcgcctgctcccgttgataatccaatgattggaaaccatattgccttctatctgacactctatactcctctggatgaaagaaacaatagctaggagtgtctatgggtttttacaataaatcagacttgac

SEQ ID NO: 37521 - DNA, 457 bp, Gossypium hirsutum
  Clone ID: LIB3135-038-Q1-K1-D6
ggtgaattggatgtttcaaaaaataggttatctggtttgcttccaaacaaccttggtagctgtgtaagcctagaggagttgtttttggatggcaatttgtttgaagggcccattccttcatctttgagttcattgagaggtcttgcggcactagatgtatccgaaaataatctttcaggtaaggttcctgaatttcttgcaagttttgggacattaaagtatttaaatctctcattcaatgattttgaaggagtgataccaagtgaaggagtcttcaagaattctagtgctacatttgttgaagggaacaataagctttgtggaggcatcactgagttacacttgtcaagatgtaactcggaaaaatcatcaaacacttctcttcgtttaaaatttgttattgttgctgtaattttaggagtgactttgatctttctttttctccttatcatgttgc

SEQ ID NO: 37522 - DNA, 339 bp, Gossypium hirsutum
  unsure (1)..(339): unsure at all n locations
  Clone ID: LIB3135-038-Q1-K1-D7
cccacgcgtccgttacgcattataatagattatatatattggctgagctgctccactgggggtcagacattcttgagtccaatatcatgtgagcagngcaccaccttatggttaagtcaggatctagaatcccagatcttgagcaacattttcctaatgatcgaaaccttagtatttggaccacaagaacttaacttagctctgaaaccttactagctgcttatatattatcgcgtatgtggggtttcagcatgcaaactgtgaaacccacgagccttaaaaatacgagatattaaaattttaatcctcgtgtgtcggggccttaaggaaattaattaa

SEQ ID NO: 37523 - DNA, 157 bp, Gossypium hirsutum
  unsure (1)..(157): unsure at all n locations
  Clone ID: LIB3135-038-Q1-K1-D8
ggatggtcgaactttattatactacaatattcagaaggaatccactctgcatcttgtccttggcctccggggtggtgtctaattgggagtcttgngctcgccatcataattttgcatttctatggaaccgtgcgtgttttaagcgtccaaagccatt

SEQ ID NO: 37524 - DNA, 247 bp, Gossypium hirsutum
  Clone ID: LIB3135-038-Q1-K1-E11
cgggcgcaaggcccaacttgttcattgagctcagtggctaaatgacctttggagcaaaccgccactggcatgatcacctttaactgcggctccactcaccgactctgcttagtacgtacttaactgacaaaaccgtagttctttgtgctaaatcacatgactcacacggaaaccagaggggtgaatttaatggcgacgctcacatactctttaaagaaaaaaagtgagcaagtcctataccgctcgg

SEQ ID NO: 37525 - DNA, 278 bp, Gossypium hirsutum
  Clone ID: LIB3135-038-Q1-K1-E2
ctctctcatacctgctctaacttactcccgttcagactgctaaggaagtggattacgttgttgactataaatggagttcttgatggaaatcttgattggaagagggattagagcaccgaatgtacctccgcttacccacgtactaacacagacgctactgtaccatgtggaaactgaccatgaaactgtgcaccgactggtgtaacgacttgaatgagcttgtggaagaccttaaggaataccccaatgcattcattagaaccattgttataaacaac

SEQ ID NO: 37526 - DNA, 386 bp, Gossypium hirsutum
  Clone ID: LIB3135-038-Q1-K1-F2
cccacgcgtccgggtggattgattggaagatgtggctccaatatttcaaggatcagaatcgagtctggagcaaccataaaggtttatggcgggaaaggagagcaaaatgtgaggcatattcagttcagtggtagttctcagcaggttgccttagcaaagcagagggttgatgaatgcatatattctcagatgattcaacaagctggtactcaaccaccaggtttgcagatgtaatgaaggtgcaactgaatatctttgggatcattaacagttgaaggctagtattgtctcaatgttgtttcaccttctgaccttgtagctaagattgcaaagtcattaaatattgggtggctttttgtttctttcaatggatgaacaacgtgatt

SEQ ID NO: 37527 - DNA, 315 bp, Gossypium hirsutum
  Clone ID: LIB3135-038-Q1-K1-F3
cagattggaagcgagagagaggctggcgtactcttcaaaagacctggagttgatgcctttttggaacacttggcgaagttctatgaaattgttgtttactccgaccagatgaatatgtatgtcgatcctgtttgcgaaaggttggaccctaaccattgtatacgatataggctatcaaggggtgatactaaatatcagaatggcaagcattatagagatctctcgaagcttaaccggaatccagccaagattttatacgtgagtgctcatgcatttgagtctagccttcaacctgaaaattgtgttcctattaag

SEQ ID NO: 37528 - DNA, 167 bp, Gossypium hirsutum
  Clone ID: LIB3135-038-Q1-K1-F5
gtgattcagaacaatgttttcattatcgctttcttccccaggactgaagggaaccgttgaggcgttttgaccaatacacgtggttggtaacacgcattgttgatgaatagaacttgttccagagcctgccaaaggatttgaggagagatattaagaggcacctctgt

SEQ ID NO: 37529 - DNA, 275 bp, Gossypium hirsutum
  Clone ID: LIB3135-038-Q1-K1-F9
cttttagaactcttaaggagggttcagaaatctgttttggaccaaaactttgtgctaacacgaatggggtgttttgcaagggaacaaaacataccacatttgtcattgtctctttacatggaccgaacaatctctaatatcttgcttgcctgctgacatctggatcagaacattatctttaattgggatgcagactgctttattaaataaaccctcttgattgtgtcgctgctattcttatcattgagagtttttctgaactgtttttgatacaa

SEQ ID NO: 37530 - DNA, 261 bp, Gossypium hirsutum
  Clone ID: LIB3135-038-Q1-K1-G12
ggcaggaaaaccagagcccaaaccacacaccctagaaggcgggcaaagaaaccaccagaggcagaaccccaaccaccaaaggcaccggggtacacaccaccaaagaaggaggagcccgaacctagaacaccgcggcatgaagctcccaagaaaccaacactcggacaatacgcaagacacccaccactggggaagcctcaacagagagatcccaacggctgaccatcccgaaaacaggaccaacaacggctacatggataa

SEQ ID NO: 37531 - DNA, 255 bp, Gossypium hirsutum
  Clone ID: LIB3135-038-Q1-K1-G2
agatgtcgagcgaaaaagccctgaatgcactcaatggtggaacttcaaacaacgacttgtgttccttagcttatgcagaaaatgaaataaaaccctttaccgtgagcaaaagaaagtgaccggatcactcggcctgttctgtttcctgagaatgagttctctgataggatccccttttccagcaatttgaatggaagttggactttctctttcaatggcaagggggggtctttttatattaaccaagattacctt

SEQ ID NO: 37532 - DNA, 262 bp, Gossypium hirsutum
  Clone ID: LIB3135-038-Q1-K1-G6
ccacgcgtgcgaccacgcgtgcggcttaaaaccctaaccctataaaattattcgtaattgatcgctggtgctatctgacctcattcaaaaagcctcgccgtaactctgaaaagtatgcttatcgccctgcccctcgtcctgctcctgctcgcaaccctccacctcaaccagctcatcatgctccgtgctcaaatactgctaatagtgaaagtgaaggaaccttgctgggaggcataggctctaccataagtcagggcatggc

SEQ ID NO: 37533 - DNA, 254 bp, Gossypium hirsutum
  Clone ID: LIB3135-038-Q1-K1-G7
cccacgcgtacgcggacgcgtgggattttatccaggcgggaagcgccagctttatggttatatggctatgaaggaagacctagacagcttcaaccagcattctcaaggcaaatctatgctgaaatttgagatgagatcctatcaagagatggttgttaagcacatcacgcgcatgagggaggacaaccagcagcttatgttttacaagaacaaggttgcataataacaaatgctaaacgttgtttttgaaagtc

SEQ ID NO: 37534 - DNA, 141 bp, Gossypium hirsutum
  Clone ID: LIB3135-038-Q1-K1-G9
aagcctacttaggttttaacttttttggacagaagtctgaaaccagagtggaatagttggccataaatatgacgacttgcaatcttcaatagatttatatataaaacatcacgcgttacatcggaaaaaaaaaaaaacaac

SEQ ID NO: 37535 - DNA, 248 bp, Gossypium hirsutum
  Clone ID: LIB3135-038-Q1-K1-H10
gtgattcttcaacatatgacactgaagggaggtttatgccaatgaaccttgggaggattttcaggggggtcccctcaaccggggtccgttaagttacctttcaagaacttttggacatggcttgaggctattcgaaactcatatgcttcattggctggataatatccgaagggggaaggggacacttggaatgacctgcaaaagatgaaaatggggtttttgtccaaaaaaaccccgggggggttttt

SEQ ID NO: 37536 - DNA, 168 bp, Gossypium hirsutum
  unsure (1)..(168): unsure at all n locations
  Clone ID: LIB3135-038-Q1-K1-H7
gcgggcgggacagtgacaagaggaaaagggatactgctttctataacgaatgcaggggggatggaaacattataaagatgagattcaacatnaaaaagccacgnncatctgatgcatcaatgagcagcgaagaaccagcctgctctagntctgggaggacagattcaa

SEQ ID NO: 37537 - DNA, 290 bp, Gossypium hirsutum
  Clone ID: LIB3135-038-Q1-K1-H8
cccacgcgtacgacatgatattgacaaggaggcttgcaacaaggtcaacaaggaataactgtcataacatctgtgacgcatgaagagctcacttgacgaatcgagccatttttaagtgtggatgggtccaccttgtaacagaatgtgcaagaacagccatcgcagtgttattgattcttagagatgacactgtccaaagtcacgggaactgtatgaaggaatgaagccatcctctaatgactaaatccttgttagttgctggtatgaactgttaaataatatactttaat

SEQ ID NO: 37538 - DNA, 449 bp, Gossypium hirsutum
  Clone ID: LIB3135-039-Q1-K1-A2
tcgggattcgagccacgcgtcacgcgacccgtccggaagaacaggatatcttttatcatccttggccgaaaatgcaaaaaggaagggggaagagcttgagaaaatcggctatggtggtttgctagactaagctcaagaacctaaaggagaggcgtccaacaaggggaaatcgaaggtcatcgagtagcccactcggaattattttacccaacataaagttgcttggtctcatctatttttgcggggtcgggccgtcattgaagtcatcacaccggatagcaagttttggtactttcttcttagtgtgtttagaagatcattttggcatgtataagctagtacgttgtgtttgaattatggcatgtaaactttaagccatgcgaaaatggcacgaatgttcgattgaattggatcaaaggtaggcatgaaatgggcctacgtactttcgt

SEQ ID NO: 37539 - DNA, 356 bp, Gossypium hirsutum
  unsure (1)..(356): unsure at all n locations
  Clone ID: LIB3135-039-Q1-K1-A3
atgctttgcgtgcctntgngagatgaaatgccaaaaaaagatgagctgtactatttttttcatcaaaatgttccaaataccgatgaaacgagaagtctttttgaacttaggtccagatgttagggtttggtggcttcgacgtgagtatgctgaacaaaatccaattgcgtcattttcatccttggtagcaacatcctcatttcccttccaaccataccatcaaccacctccaccataagctccttagaattattattgtaatataactatactactttttttatatgtaaaactaatgaatgatattttttatgtttggtatttntatgctatgcttttattcaagttnnnnaaaa

SEQ ID NO: 37540 - DNA, 294 bp, Gossypium hirsutum
  unsure (1)..(294): unsure at all n locations
  Clone ID: LIB3135-039-Q1-K1-A9
cccacgcgtccgcttcaattcccatgatgaaatacggtttaatatatgatcaaacagaaaaatgtataacttaacttcaatttaagaatcacataataatttatttggccctccaatattaaaaaaaaatattttatccnnnanaaaaaaaaaaaaaaaaaaaaaaaaaaaaaaaaagggcnggggctgtaagatgtaagggatctatgttcgcgtacacgcgaatgcaacgtttttgcttggtgataccgaaacttaaattcaatggcactggccttacatcgacaacggctg

SEQ ID NO: 37541 - DNA, 409 bp, Gossypium hirsutum
  Clone ID: LIB3135-039-Q1-K1-B1
caactgagaagactgacgtttacagtatgggcattgtgctgatggagcttgtcagcgggaaaatgccaactgatatcctttttggtgtagacatggcattgccagcgggaacattgtgtgaattgggtgaaataaataattgtgattctgtcaaagtttgcttcgaaccctgtaatagttgtttgataagtggtgattgtctgttctcattcaagcctcaaaataatccccattttatctgtttgatcaacatagatatggtgtgtgaagtttagtttcataggaataacggacaccatttggatgattataatttgtcagtttgatagtgtggcaggcaccttcattaccttgctgataataagcttatttcatgtgtaattttcattttcaggacggaatgtttatt

SEQ ID NO: 37542 - DNA, 458 bp, Gossypium hirsutum
  unsure (1)..(458): unsure at all n locations
  Clone ID: LIB3135-039-Q1-K1-B11
catgtccgtcctatccatacacggatccatattatgggggagtggtgcctccttatgtacctgaatctttggtacattctcatagtcttggagtgcatcctgctagaatggctttgcctcttgaaatggctgaggaaccagtttatgtgaatgctaagcaataccatggtattttgaggcgaaggcagtcacgtgcaaaagctgagctggaaaagaaactgatcaaagtcagaaagccctatcttcatgagtctcgacatttacatgctatgagaagagcaagaggatgtggagggcggttcttaaacacgaagaagcttgatagtgatgcttctaaagccacgcctaacaaaagcagtgacactagtttgaatcttccatcacaatgtcccgaanacacgagtggcatctcagttaccaatcagatgtcctggaatgacaattcatcttgtggtcat

SEQ ID NO: 37543 - DNA, 254 bp, Gossypium hirsutum
  Clone ID: LIB3135-039-Q1-K1-B2
gcatatgcgcattgcataacggagtaacgacaccaatgcgatgttctaatggcgactgccctctatttgctttaatttatatataaaaaaatgggagaagaaaaaattggggtctcatttcttttaatttggggattgaggtgactaatagtaggagcagggcttaacttgatgtaacagttttttgttttggttgaactgatatgtatttcccatatttgattaattggtatctctctgcattatcgaccccc

SEQ ID NO: 37544 - DNA, 186 bp, Gossypium hirsutum
  unsure (1)..(186): unsure at all n locations
  Clone ID: LIB3135-039-Q1-K1-B5
aggtaatggctatacttgggggatgtttacttgctaaagatatatctgctaagattcaacacaagaagccattggtgcttcataaggttacttttttttggttagtagcgtcagatattagtgttcaaactttggattatttgcatgcatgctcatgttggnccttttaattttagtgatttannt

SEQ ID NO: 37545 - DNA, 439 bp, Gossypium hirsutum
  unsure (1)..(439): unsure at all n locations
  Clone ID: LIB3135-039-Q1-K1-B8
cgcatgaccatatcgtccacaatgaaaacatattatagacagggattcgtattctaccttctgtttccggccattaatcaatatttgagacactaaaggcttctctaaatcgacataaacagccaacctagcaaatcgtcccctcgtcctactatcggtgctcatatctaacttgaccactttgcccacaagttctcctatttctgtaatgattttactattgtaaagataactcggtagagcagggaatcaaattcatgtcataacaacacttgcgtatgcctgaataggatcgaaagccatcgtccaaggctgaacagtcaaatactgcccgaaaatcgtccatggaccttcggaaagaggcatattgcagtcaagtttgttctagaatttgacaagaaaatagccattntctatgtccatcatatgaataggggct

SEQ ID NO: 37546 - DNA, 418 bp, Gossypium hirsutum
  Clone ID: LIB3135-039-Q1-K1-C12
gccacgcgtccaagcttctcgagaaagtcaacgtcaatgatctcatcaccagcgttatctccggcggtggttctggccctggtgccgatgctggtgcttctggtgcagctggcggtggagctgatgacggtgctgctgctgatgacgagaataaggaagaagagaaggaagagagtgatgatgacatgggatataacatgggtgactacacacatgacttaacacaacggatatcacttcggatatgttgatagaaatgacgcaaacatacgactaagcttaaagattagttgaaattttgtatggatatttgagaagctatgcagaaactcaagaagtgacatagcaactactacttcgctttaaacttggcgaaaacatcgaaacgtttaacacatgggcggtcgttgtagaggat

SEQ ID NO: 37547 - DNA, 436 bp, Gossypium hirsutum
  Clone ID: LIB3135-039-Q1-K1-C2
aggaaatcagattatgtgagagagccaatcccgaaagctggtttggagtcgctttggaagaaaatgatggagctggaaaagcctaaaatggactttaatccttatggtggaaaaatggcggaaattgcagcagaagaaattccattcccacataaagctggaaatctatggaagattcaatatctggcgaattggaacgaagcagggattgaagcaacaaatccttacatagatttgacaaggagactccacgagttcatgactccttttgtgtcaaagaacccaaggcaagcatttctaaactacagagacgctgatttgggaagcagctcccatggaaaagcctcgtattcggaagcaagacttaatgggatgaagtggtttatgggtaatttcgacagattagtgcagattaaaacggacgttgatcctacta

SEQ ID NO: 37548 - DNA, 152 bp, Gossypium hirsutum
  Clone ID: LIB3135-039-Q1-K1-C7
ccacctcccacgctcggaagggaagcaatatctttagatgctctgatgaagagagttgcacatcgattgatatctattgagcctatatgattgagttgtcttttgagcgaatggcttaataactttctactatacgttgaatcaatcataac

SEQ ID NO: 37549 - DNA, 106 bp, Gossypium hirsutum
  Clone ID: LIB3135-039-Q1-K1-C8
cccactcattcttatactataaactatctattcttcaccataccctatatataggcgagctgggttaaatatcaaagctcaattgcacctatattactaaccatgt

SEQ ID NO: 37550 - DNA, 357 bp, Gossypium hirsutum
  Clone ID: LIB3135-039-Q1-K1-C9
atccaatctaaattcaaaaccaagtggtagctcagctctgcggagaagatgaagcacagtggaaagaatagcaaaggcaatggaaagccatctgatgtgaggaaagataggaaatcgggtacgggaatgaacggatcgcccaagaaaggaggtcatggtggcaagttcacttgggttggagatggcctttcgcccgccgagatcgggggtgaaacagagcttgtcgatgccaaggaccctaatttcgaagatcccgatgagatcctggccgattgattgagttcatcatcgctcttgcttctatactttggttagaaatatttcagcaactcaatgaataaattgtaatgcttgcca

SEQ ID NO: 37551 - DNA, 411 bp, Gossypium hirsutum
  Clone ID: LIB3135-039-Q1-K1-D2
cccacgcgttcgcttttcgaagcagggatcatgcttatctgcttctctcaatttgtcttggttactttttacttcaattcaaagcaatggatgttatcgaaacacctaacatcaaaagataaacaaaagaagcttatttgattgtgcactaacattaacttcatgagactgatttttactgggatgtatcaacagattgatttgttagttcttggttgatgatcacgatttacatacatgcatgtatgtatgctttcttgatgaatttctttcgagtatacagaacttatgtttgtctcttactagatgttctctggctaaacttgcgccgtcataatgttatttttatttggtaccaagtcggaattacagtaacagtctcaatttttggtcattggggtgtcaacaagg

SEQ ID NO: 37552 - DNA, 315 bp, Gossypium hirsutum
  unsure (1)..(315): unsure at all n locations
  Clone ID: LIB3135-039-Q1-K1-D5
ggccgccctttttttttttttttttttattttttttntttttntttattttttttttttcggggtttggtttttttaaaatttatagcatcaacctttaggtgtgtgctgtaaatttataaaaaaatatgagcttatttttgtgttggttttttaggcaaagggactgaattgcaaaaatttcagtgtacattttttatgaaacagctttgagcaaatttttaatcactttggggatattggctcacatcaattcaggaatcaattcatattcttttacctgtttttaataggaaatgacagtgacgaatttttt

SEQ ID NO: 37553 - DNA, 200 bp, Gossypium hirsutum
  Clone ID: LIB3135-039-Q1-K1-D8
gctgcagtgacccgttgctgttagaaagcaaatttcaaagttatgtagcaagtacttttgggttttagccccatccatgtcatgactgttgtcttcttaacttttcaagcacatattattttccataataattgttgggtctggattggaaccagatttttgatatttcgatttcaatgttatactttacacgtcctttt

SEQ ID NO: 37554 - DNA, 440 bp, Gossypium hirsutum
  unsure (1)..(440): unsure at all n locations
  Clone ID: LIB3135-039-Q1-K1-E5
ccacgcgtncgaccgaatgatttctttataatgtggttggacttagatattgaagcagtactgcaacttgtcaacagagttgccttgtttatcccattgagaggaagcatatgctctcattctgattattagcatcctcatggcattcttttcgcctgatttatcaatggaccatataaatgcatgcagaatttggcagagttgctctcatctcaaaactcgttgaatgaacacatggagcctggatgttattttcaatgccaaccctatcacatttttcattctcaagctagattgatgtttaccccatagaggaacccaacataagcacctggaaaaaaaaaatccaaatgattttggtttagttggaacttcaaaatgaagagttggttccatgacacangctattgacttgattgtcacatcagtttgggctaaaa

SEQ ID NO: 37555 - DNA, 174 bp, Gossypium hirsutum
  Clone ID: LIB3135-039-Q1-K1-E6
ctctatcttctacaccgtcttcgtttctatctatatctctctgaacctaacattctctagggcgacgcttcctgagaaaccatgttcttttaccaccttctcattttctctcacgaacttgtgttttactcaattccttaccaggaaatcaatcatgggatcctgtggtaactt

SEQ ID NO: 37556 - DNA, 288 bp, Gossypium hirsutum
  Clone ID: LIB3135-039-Q1-K1-F4
cggagtgaggttgaaacctaatgtgatattcggactgaaactcatcgatctgagtcgcgactcactgggtattgaacaagacgaaccactgggcgttaagttcgggtgcaagctttaccggatgccggacgaacacgtgttccttatgaagccaagagactagctcttgcgccgcgtgaaatgattagcatcgctcgggctgacattagtggaacaagagatgctcacaaatacggcgccgatcgcgttaagggtgttagaagcatgcatatattacggagctatatt

SEQ ID NO: 37557 - DNA, 319 bp, Gossypium hirsutum
  Clone ID: LIB3135-039-Q1-K1-F9
ctcacgcgtacgtccacgcgtccgggttcttctacggccttttgttgaaggatatggacatggcggaaccaaacgtactatggcttatctttgggatccttcatatgatactttatgcaagctacaagaaccacgcaaagaaaatggtggtggaagatccaaagcttcaactacgagatcatcacattgtggatgtcattaaactcgagtctggcgagtctacagatgaaaacacaacggatccttaaccgtacgaaaatagaggaagagctagaggaggtgttgaagctaaaatacgaaggaaaaagcatcatatgct

SEQ ID NO: 37558 - DNA, 280 bp, Gossypium hirsutum
  Clone ID: LIB3135-039-Q1-K1-G12
cccacgcgtccgatttgatgctaagtcagaacccagaatttaattagttttagggtgactacttatatatttttttcatgtcaaaccttagagaacaatccaatacacctgatttttgtacctttagtaaacacatggtggggaagttgctgattataaatctcagaaaaatgtatatctcttgtgcctgaataaattcttcttataactttagttagtatataaaacatacatttgtggggttaaaaaataataattaatatattataattatttatat

SEQ ID NO: 37559 - DNA, 360 bp, Gossypium hirsutum
  Clone ID: LIB3135-039-Q1-K1-G2
acagccttgaccccttgtgctatcttggatgtcttatctccgccctactccgatgacttgggcaggccctccacctacttcttagacttccccatcccttctcttcctggttatgcttggcttgaggaaagagaagtaaaactgccatgtgacttggttgttaaaggggcaccttaccttggtcctccacttgatgtaccagatgatgatctttgctaactggatctacaagaattctcaatatatgtatatctgtaacctttttgtttagtattgtaaaagaagtatacatgtacaacataccccagcatctcataatgggcgaacccatcaaactgaaaaatcatctattgcagttcc

SEQ ID NO: 37560 - DNA, 196 bp, Gossypium hirsutum
  unsure (1)..(196): unsure at all n locations
  Clone ID: LIB3135-039-Q1-K1-G3
cggacgcgtgggctcgaatcaattttttgttatgtcttaacaattggaatttcacatttagaatagtgaagaactttcattgtagttgggaaataaagatgaaatgcactttgctttatttaagtngacaaaatcagaaactacggtccacccgtatatccaacaagaaaaaaaaagcccgggaagagaagttcat

SEQ ID NO: 37561 - DNA, 228 bp, Gossypium hirsutum
  Clone ID: LIB3135-039-Q1-K1-G7
ctcacgcatacgctcggttctttttcataataaactaaactcaaaagattaagagtggagagctaacggatcatattaatttgatgaatctccatcttaaacctaaactatcatcctcaaatattctgcaagatagacgcacccgcgcattaccacattagtaccccgatagaatgaacttctcgctatatgaattgtgagctttcattgaatggccatttaacaaaa

SEQ ID NO: 37562 - DNA, 439 bp, Gossypium hirsutum
  unsure (1)..(439): unsure at all n locations
  Clone ID: LIB3135-039-Q1-K1-G8
gaaactctctgcagaggggaaaagaggggttccagtctcggccttcggcctccgagcaattcaggctcacgcacctcacgcgccaccatatacggtggtcggagggttaaaaccctcgccctttcaagcgaaatacaggtaaccctcttcccttttaatatttcagtagtttattcgatgtatgcatgtttccgtaaaaaggaaaaaaaaataaaataattacctttactctcaatcgactgttggtatctgtaagtttgtgtaacactgtgttttttattgaatctatgtattctttttctctgtaaaaaaaaatctcgtccctattacagtaaaatccttcggcttttatagcctctgtttacaagtttgaatattctctgctctatttcttgcctntgttcgcttagtttccttttctattacattttctttttct

SEQ ID NO: 37563 - DNA, 405 bp, Gossypium hirsutum
  unsure (1)..(405): unsure at all n locations
  Clone ID: LIB3135-039-Q1-K1-H2
cccacgcgtncgggagaatcctctacagttgaagtgcttgaatcacatttcacttgtgtgcagatcagttgaaaaatctgtagatttctatcaaaatattttagggttctttcccgtaaagagacctggttcctttgatttctctggtgcatggctgttcaattatggcattggcatccatcttcttcaatctgacaaccctgatagcatgcctaagattggcggtataaatcccaagaacaatcatatttctttccagtgcgagagcatggcgccattggagaagaaattgaaagagttgaacatagaatacgtgacgagtggtgtggaagaaggtggaatccgcgtggatcaactcttcttccacgaccccaatggctacatgattgagctatgcaattgcga

SEQ ID NO: 37564 - DNA, 407 bp, Gossypium hirsutum
  Clone ID: LIB3135-040-Q1-K1-A11
gcgtcgataatttcaggattaatacttatttattctttttaattgaattaatacatgctgtctgtcatttatataaactttttaaatatatcacgttgaaaggatagctttcatattctatagcttgtaaaatggatgaaaaataaagagttagtttttatttaacttaaaagatgataccaggttgattattaattttgtaacagatttatgattgattgaactctttcctcgtgattgaattcattggaatctgggttttcattgatatctatgtttctgaagttcaattgacaaaatggtgttgccttgatagaaagaatatgcttgctcgacatgaggaaagctgtttagattttaaaagtatgcgttcgtttattcccacttttccggatccctatttttta

SEQ ID NO: 37565 - DNA, 192 bp, Gossypium hirsutum
  unsure (1)..(192): unsure at all n locations
  Clone ID: LIB3135-040-Q1-K1-A12
gaagaaaggacggaatncggaaaatagattacgttgacgctgccgcgttcttgtcagtgaagggtatcggtactgcgttgtggaagaacgtttttgctcggaagcgggtcggacccgggaccccatcccgctctgtaatggtgctttgggcccgaatatctgtttgatgaatatataggaggtttgaaggtt

SEQ ID NO: 37566 - DNA, 202 bp, Gossypium hirsutum
  unsure (1)..(202): unsure at all n locations
  Clone ID: LIB3135-040-Q1-K1-A2
cccacgcgtccgcccactcgtccgaccacgcgttctgctttgtccaagtatgaactattgtcgtgagggtttggcattcaaagaaaaacttgtcagataatgttcttgttgaatctattatgggacattaaagtgtcttaccatcagtgcattattgtttttcaatgaacggttaatgcttgcttgctcttgngggcatcta

SEQ ID NO: 37567 - DNA, 174 bp, Gossypium hirsutum
  Clone ID: LIB3135-040-Q1-K1-A4
gccacgcgtactgaaaatccaaatcctttttttaccacgctcacattttaaaaacctatatcaggtctggctgttcttttctcaaaatttcccatcaactatatggctctaaaatgtgtttatttaggctgcaccctaccctcttaaaccatcatgttggttctacttacacta

SEQ ID NO: 37568 - DNA, 282 bp, Gossypium hirsutum
  Clone ID: LIB3135-040-Q1-K1-A5
cccacgcgtccgagggaatgaaggtggcaaaaacgaaaacatatggacaacaagatgggctgctaaaaggatgataacaatgatgttatttggctttggggttggcttcgtttattacggaatccaactaaacgccgagaatctcaatttcaatctctacttaacagttataatcaacgccgcaatggaaatccccgccgttttcatcggcggcatactattgggtttcaccgaccgacgtctcctttcatcgttatcagcaatttcagccggcgtttcatg

SEQ ID NO: 37569 - DNA, 460 bp, Gossypium hirsutum
  Clone ID: LIB3135-040-Q1-K1-A6
cccacgcgtccgaggaaacagagaacagcgttccctccaaattttgtgcattcacttgatggttctcacatgatgatgactgctgttgcatgcagagacgcgggtctatattttgcaggggtccatgactctttttggacacacgcgtgtgatgtggagaagatgaaccagatacttagagaaaaatttgtggagctttacagcatgccagttcttgagaatttgcttgaaagctttgagacatcatacccgtcgttggtttttcctcctctcccagagagaggcaactttgacttgcttgaggttctcaagtcgccgtactttttcaactgattctccgagaaaaacaacatttgtatatcatttgcagaaacactgctggcttgtacattcttttgcccttgagaatcaacaaagttcaattgaggactaaggagaaaatccatgtgggactcaactg

SEQ ID NO: 37570 - DNA, 314 bp, Gossypium hirsutum
  Clone ID: LIB3135-040-Q1-K1-A7
tatcattattagaggctagataagaaaaatattgtatggctcacttaatctgttatgttccagactatcagtcccacttgaagcttggggcaagataagatcaagcaagagccatcgggttttaggtttttcataaatctttagacattgaaggaagataattgttgtggtgataattcttgttccctcgacaaattgtttaaatttagtgtttagattcttgaatcatgttgtagatgcaaaaataaattagtatacaagtaaaaaggcttctcaactttgactcaggtctgggtcattgttattttggattc

SEQ ID NO: 37571 - DNA, 429 bp, Gossypium hirsutum
  Clone ID: LIB3135-040-Q1-K1-B6
tcgacagaagtcaaataagaggaaaggcagaagcactgcacttgcctcaacattggctggcgttgaacctcctccgatagaagaaaatgaggtgagcaagaagctcagaaggcatttcattcttcttcgggacattaaagagaacgagagattaaggggtgagttggataggacagcatcagccctacagttatatgaagaatacaagaagcaacggaagccagccactctgacaaacaagaaaagcaaaaaagcaaaaacgacggttgggatgtgaaatatgcagagggagtgttttgccattgaattcacttcattttagaagttggcgtctggtaatgctgataattattcccatttatgttttaggttttacgtgcatccatcatgggttttatttcaatgagtataagtctttttttttctttt

SEQ ID NO: 37572 - DNA, 392 bp, Gossypium hirsutum
  Clone ID: LIB3135-040-Q1-K1-B7
tccggtttttgctcaaaaatccatctgcaaggaaacaaatggggatggaaggaagaaagaaggtagaaagaaattatctaaagaagcacatgtacaagagatttgtagaggttctgaccaggtgtatgagaagccgatagcatcctattgtgtctattttaggtccaccactctcattcttttatttattttcattaattaggaacttttctatcagtcatcagcaaccccctgtcatttgacgcacaatttctttagctatttcttttttctgtcaggagatgtgatattgccttttaattcagtttaaaagactttaaaagcacatataaacaattttcaactttgtaatctctccaatagtaaactcctttaaaaagatatatatattt

SEQ ID NO: 37573 - DNA, 342 bp, Gossypium hirsutum
  unsure (1)..(342): unsure at all n locations
  Clone ID: LIB3135-040-Q1-K1-C3
cgggcgcccagcgtcgttgtccggacttttttccatgcaatacctaaactatggtgctgcagtgagtgaggtggagataaccttttaactggtcaaaccacaatattgcagacagatatcatatatgattgtggcaaagcttaaaccctgccgggtttaggacagattgaaggggcttttgttcaaggaatagggttctttatgcttgaagaataccccacaaactcaaaggattagtggttgcagaaagacttggtcatataagaacctactgggaactgacctaaaagttaatgttgaaatctgaacagggcatnataagaccgtgtctttcataaaagc

SEQ ID NO: 37574 - DNA, 274 bp, Gossypium hirsutum
  Clone ID: LIB3135-040-Q1-K1-C7
atcagcgacatactcttttggtaaagatcgcatctgttagagaagtggtattaggggccccggcaatagtaatcctaaaacaccttgcttcaagaacagatgctcctgatatagatcagattgttgcacttgtgcatcggccaaatgagaccttcttgcttgttccttaagcagataaggtgactgtgttgtttacaatgagactcaaggactctatagatactgttttggcaaccgccttcctccatgaattaatggactcatggcgctcagc

SEQ ID NO: 37575 - DNA, 329 bp, Gossypium hirsutum
  Clone ID: LIB3135-040-Q1-K1-D5
aaagaatcctggtggaactgtcgcaccatgtggtggatatgttgccgggagaaaaggatgggttgatgctgcagcagctcgtctatcaacaccaggcctaggagttgactgtggctcaacccctggcgatatcatgcgtgccttttttcacggtttgtttcttgcaccgcaaatggttggtgaggcaattaagggaacctttctggttgctgaagacatggcttcaaaagggtataacgtgcatgctcttactcgagtcccccgcagtgatacagtacaggcagtgcatcttggaaaccgtgaacttctccttgctttctgtgaagctg

SEQ ID NO: 37576 - DNA, 317 bp, Gossypium hirsutum
  Clone ID: LIB3135-040-Q1-K1-D6
gcgctaacctgaaagaaaatttgaacctggagaatcatctaggagtcgatttaaagtcgaagatggggaaggaaatacattttatgacatccaagatttaacatttagtgactaggaaataaatgaatattctgacccacctccctgaaaatataaatcaaaaatttccatgaaaaccgtgctacttccacattggggcgtgaagctgccggcgcgtttattacgacatcaacttcctcttcgaggagacccggggcctccctgcttgccgaacggacctctgagtctatatcttttccaacaaatttccccgcgta

SEQ ID NO: 37577 - DNA, 294 bp, Gossypium hirsutum
  Clone ID: LIB3135-040-Q1-K1-D7
aagactcacaggaaacctggtctgttatgtccgagggggtccctttgttttgtcggacgtcggttcatttcatgtgaatttgtccaccgagtggactttattttgtctacattaatttttgcttctcttgtgttagagaaaaagggctccaatgcctaaatttctggccggggaaaaaaatataaagcccacgtcaataaacaacaattgaaatgggacactcatgatctaacaagacctcgtcactatacttgaaaaaggacaaagcttttaactagacgccgctactttgtt

SEQ ID NO: 37578 - DNA, 259 bp, Gossypium hirsutum
  Clone ID: LIB3135-040-Q1-K1-E1
cggacgcgtgggaaaatattttctcttcctttggggcaaatgattatatttttgattctttggtgtcgattgcacattgtaatgaaatcgaaaaagtgagagaaaaagaaaatgaagagaaagaattcgaaaaagaaattgagattgtacaagagtgcgagcgagaaaaagaaatcaaaagaaaagaaaaagagattgaaaaagaaaaagaaatcaaaaaagagagtgaggtcgaaaataaaattgaaaacgagagagg

SEQ ID NO: 37579 - DNA, 379 bp, Gossypium hirsutum
  Clone ID: LIB3135-040-Q1-K1-E10
cccacgcgtccggctagccttgtacggttttggtgcatgtggggttattcattttcgcgggtggattccaactgcgcttctactgcttattccggttgagattctccgatggatcattatactcattgctggttcagcctcatcatgctttgttgccttgaatttaaaatcttatatcgagggggcgaacgatctcaaaatgatggttgtcgcagcattcttgttgcaaatggcccttgcaatcttcatcaaggtttggttctttccatagtcaacttatgtagactatccgagcatctaaaaacccaaactttgattactttgtttctgtgaaatacgcaaaagaagatccgaattagatcgaggaaaagcttgtgtg

SEQ ID NO: 37580 - DNA, 381 bp, Gossypium hirsutum
  Clone ID: LIB3135-040-Q1-K1-E4
cggacgcgtgggtgcaatcttagttttgggtagagatctcgtggtagttcctaaactcattggtccgtgacccccagcaatgtcatcaccagaagcatccccagaacgtcatatagaagatacatggatgcaggagctgaatgctaacaggcctccaacaccaactagaggtcgtcctcaagtagcaaatgatcgaggctctcttgcttggatatagtacatccttccaattgtttctatatacatactccttcaggctcatgctataccacatggggattctggctttctggatagagcatgctgccatatacaggcattttcctaccttgtaatctctcccattagaagttagaagggtttacaagattttggtttttt

SEQ ID NO: 37581 - DNA, 318 bp, Gossypium hirsutum
  Clone ID: LIB3135-040-Q1-K1-E6
aacgaaccagatgctgtggtcgaagaacgcaaaaaggagtccgaagagctttctagaagagcgaagagaatgacaatagaaatcggaccgagcagctttgcatcaaggaagaagaagagtcggaaaaacacaagcagcttaattgcccttatggcttgtgaaggcgagtgtttttggcatgtaattcagctacaaattttccagttttttgtttggcaaaatagaaaggcaaattaccaaatccctttggattaaatgcgtttaattgtagtaaatttgacttgctcttttgatgtaccttaatctactctttctagt

SEQ ID NO: 37582 - DNA, 458 bp, Gossypium hirsutum
  Clone ID: LIB3135-040-Q1-K1-E8
ctgaaactctcagcaacaatgctcttaagagagaacggagggcaagagagaggcaggtcagagaagaggagaaaaagaaggtgaccacaaataagacaccagagaatcagaggcaacaggtggcaaataatgataccatggatccttcgcaattcctcagcaacagaatcaaaagtttggcattactaaaggaatctggtgtaaatccgtaccctcataagtttgatatttcaatgtctatcactgaatttattgacaaatatagaagtttgcacgttggtgaacatgttgagaacactgaaatctccttagcagggagaattttgaacaagaggtcatcatcgtcaaaactatatttttatgatcttcatggaaatggtgctaaaattcaagtaatggcagatgcaaggtacatacataaatacatacgcattccaacatggatgaaaatgagttct

SEQ ID NO: 37583 - DNA, 370 bp, Gossypium hirsutum
  Clone ID: LIB3135-040-Q1-K1-F11
cctacgcgtccgaaataaaaataaaaaaaaaaataaaaaaaaaaaaaaaaaaaatagggggaggtgttaatataataaaaaaaaataaatttataaataaaaattaaaaaaaaaattaatattataatatcctgttcaagattcaccaaaaattttgcaagacaccataactaacaattttattaccatccccacaatcatcgcctgtacactcattctatttattcacgactgtctttctaacggttgcgatagttccattctcatatcttacactttatttaacaaatcttaacgttattccgatataatactttatttttcctttgaagatccattttgaccttattttttctaatctaaaacattt

SEQ ID NO: 37584 - DNA, 261 bp, Gossypium hirsutum
  Clone ID: LIB3135-040-Q1-K1-F3
cttttttgccagtactttcactttatttgacttttttttcccctttatttaaggctaagtagggttaattatgagatgaatacgggatgtaagagatgcatacgggggaacttgcttgcatggttaaaggtgggtgggtagtatcggaatggaagatttggggattgggatagtttttaaacataaatgctgccgggaatgcatcgtttacaccataaagtgcctggcggctgtgggtggaataaggaaaaagaccatatt

SEQ ID NO: 37585 - DNA, 318 bp, Gossypium hirsutum
  Clone ID: LIB3135-040-Q1-K1-F4
cccacgcgtccgcccacgcgtccgactagttctagatcgcggcggcgccctttttttttttgtgataggtttttttttatttcttaaaaaccataccaaagatctttttaatatacccttatttccccaaagaatgcacagacttcaattataacctattttacttatactttctatctttccttcaaaaaaaggcgtttaatgcaataaataatttgcttacaatataaaaagtggcttaaaattgttcttttcaaaagaaaaaaaaaaatctttaactaaacgctttaaattttccaaaccttttatccctttcac

SEQ ID NO: 37586 - DNA, 355 bp, Gossypium hirsutum
  Clone ID: LIB3135-040-Q1-K1-F5
gtcacgcgtacacaaattactcaagcttggtcgattttacatatcacacttaagaggggacggtccattatatatcctcatacgccatataccaatgcctttctccaccaaaacgaacctgatattttggttgcttgttttgcgaaaacaacccacattgtctgtctaattcactaaccaagatttagcgttcaacacataaagctaacaaataccgctctcttgctcttactttcctcacatgggccactccttggacctgaataattaaccgcgttagatgagtgaacgaattctccatcgacatccctgacccacctgctttagaccctccactaataggtaccacaacttt

SEQ ID NO: 37587 - DNA, 353 bp, Gossypium hirsutum
  Clone ID: LIB3135-040-Q1-K1-F6
cccacgcgtccggaaggatccgaagaaggctcttcacctcgggcttccgtttcagacaatgggggctacaacagtgcaaatttggcatctaaaagggctctcatttccaagctaaatgaggagaaaaacgccaccattctggaaaataacaagctccagcaagaactggaactcttgggacgcgaagcgaagagagattacagtggtatgaagtttgtatacgtaattcttgttggtttagtcagcatcattctggggtacctcttgaaactaacatgaccacggcaccaaggtactactactactactattctattcttcgatgccgatacaagctcgaaaaaaatgtagag

SEQ ID NO: 37588 - DNA, 272 bp, Gossypium hirsutum
  Clone ID: LIB3135-040-Q1-K1-F7
ccacgcgtgcgctgacattccagatcttagcttatttttcattatttctctcaccccattctcatctaagtggggcaggtcttccatttaactcgccctgcttcaccaacattctacaaatactatctctcatatacaataaagactaatttgaatcgtacattaaaaatttttgattgtataaatcttaaacatacatgctatctacaaagcataacttacacctatcatgtacatccttttgtgcgttccctaactaaaaacaacatctt

SEQ ID NO: 37589 - DNA, 428 bp, Gossypium hirsutum
  Clone ID: LIB3135-040-Q1-K1-F9
gatacctacactctaaatattacatgatcatcttcatataacgatcaacattccatgcggggacccagaccttcataaatgctcaatgtaaaacatcatttcttaccgatacccacgccgagtacacattaccaagattgaaaacgcactaaaaatcgtactatgcaacatgaagttatatcataactccagaacatgcatacaactcatgttatatagcgaggaagaccagctttctgtcggacagatgcaaaaattctcatatatgctatagcattacttatgcatctcaagatattcttcttcttgatgaagccacatgatctctacatgctactagcaactacctcgaccctgatgccatgcatactctgatgaaagcaagaactgttttagtgatcgctcatctgatattaacggtccaaaca

SEQ ID NO: 37590 - DNA, 432 bp, Gossypium hirsutum
  Clone ID: LIB3135-040-Q1-K1-G2
attggaaccgttgatgattctaatcgcgaaattgcagctttctttgcgcatgtgacgcacgagactggacatttctgctacatataagagataaacggggcctcaagagactactgtgatgaaaccaacacacagtatccatgcaaccctaacaaaagctactatggccgacgaccaatccagctatactggaatttcaactacggaccagctggcgagagcatcgggttcgatggactaaactagcctgaaaccgatgccaccgacccaattatgtacttcaagaccgcagtctggtattgagtgaactctgttcaaccagcgataaaccaagggttgggggcaaccattcttgccattaatggagctctggagtgcgatggtgtgaacccatgcaccgttgagcgacgggtcgagtactatatcgattat

SEQ ID NO: 37591 - DNA, 264 bp, Gossypium hirsutum
  unsure (1)..(264): unsure at all n locations
  Clone ID: LIB3135-040-Q1-K1-G4
atccaacattaaaagaaaaaaaaaaatcgtatatgcatgctcacacaccaaccaaaagcagcgcacggggccacactttcatactaaaccagattcttttaaataaaggcgntttattttcctttatttcttaaaacgggcaccacaaacggcgacatgatcctccaaaaaagtnnaattctaataatcaacccttcaactgaaccaaaccgttatgaatctgagatctcttattaaaaaccttattacaaaacccctaacaaa

SEQ ID NO: 37592 - DNA, 381 bp, Gossypium hirsutum
  Clone ID: LIB3135-040-Q1-K1-G6
gcgaaaaaaaataccaaacatgtcgaaatcggtgattgaaatgcccccaaagggcggcgggagcgggcgatctttgttaaaaaaacgagatgctttcaaagaaaggcgatttttttgctgcatttcataaaacgggtaccacacaacgccggcaagagcgtccacgaggcgcggacccaagcagcatacactagagcaactgaacgactcatagtttgcgataaaaattgtgaaaaaaataattacatggtcaagaacatttactgtcgcggagcttgaactgatactgacacataggctgtaactgacattgtccgttcacagattcagctacaccgctatcataccgctatagagcccatggttgcgacagcattgacc

SEQ ID NO: 37593 - DNA, 311 bp, Gossypium hirsutum
  Clone ID: LIB3135-040-Q1-K1-H8
agaaaacaaaacagatagcattccttctctctctctccctctttctcttctcctcttagccggccccatggccggccatgggttcatcggagggtgtctccacacccatgaacggcggccggtgttaggtgaaacgggcccctttcggtccttctccgaacgagtacggaatcggggccttcacgacttgcagtaccacaaagaacggagggacccctcggctctctttctctccgttacggacaatggccagaccccgaggggttaggcgacctacagatcggcaagagcgtaccggagcacaccccgaa

SEQ ID NO: 37594 - DNA, 271 bp, Gossypium hirsutum
  Clone ID: LIB3135-041-Q1-K1-A1
accaccctttcttccactcatccgaaactatagccgctctctcgaagcatatacaccctcaagggatccgccccgctcttacaacaaccttgaagactacatctacaaaggtcgtccgaacaggatagtctcttctaacacaacagtattatgaaacaaaagacattatacttgaaggtgccattactttagactataggagtgggcacatgaatgctagagccgctatcgattcgaggctaatgattgataaaggttatgatgattatat

SEQ ID NO: 37595 - DNA, 350 bp, Gossypium hirsutum
  Clone ID: LIB3135-041-Q1-K1-A6
ctcgctttcttacttcaatctgcttctactaccctatcaatttcagggtgggtttctgccgcgtcaaggagtcatccaaccagagggctgtccggcacgcttttgcttctgccccaaaagttgaggaaactctttgatgaacctaccgacatgatctaagaactaaaccctacttattacgggccacaactacgataaccgctttactttgtctaccatcgtatgccgcatcgtaattgattctgactaccctgcccactggctttatgcatattattacggtctatcgctcctgtctgcccagatggcccatactactacacacaatatttgatgctgaagagtcgagc

SEQ ID NO: 37596 - DNA, 302 bp, Gossypium hirsutum
  Clone ID: LIB3135-041-Q1-K1-A8
ttggatatacgctccgattgtgcattgataatggcttgtcagtgagacttctatataatagggaaggcatgccgttcaatactgatgtgctgaccattgcaagtacgtggctactgaagtgctcaaagatcacggttatgatggtgcatcatatgatatttcgtcatgcggaggaatcctcttcgtgatcatggctggttattggccctttgatgagccaagcctcataggcttgtataacaaaatctgggaggcttctttcagctgtccatcgcggttttcatctagtgctaggaatttga

SEQ ID NO: 37597 - DNA, 373 bp, Gossypium hirsutum
  Clone ID: LIB3135-041-Q1-K1-A9
ataaaattgtttcctgagaagatatataaaacagctttgtagacctttttgtgaagattaatggatgcgggaggatccaaaaccaaagcctgcagcatttatccaggtaattgtatctaaaatcagttgcatgattacctgaattgttgcctatttataggccaaataaaacaggtttgcagaccagttttctactaagataaatacatgcacaatgatccaagaattggagagtttgtgcgaccaggggactatttggctgcttttatgatgtggatttctgggattggttgaatcctggataaaagactacctgtgatttgatgctactgctatactactaaaattcacttgcctttttcgtatataacct

SEQ ID NO: 37598 - DNA, 386 bp, Gossypium hirsutum
  Clone ID: LIB3135-041-Q1-K1-B11
cccacgcgtccgctttgcgttgtttcctttctcatgttctttttgtgcattaatacccaaaggcattcaataatatctaagggaatacttgcttttgcttcgagcggttagagatgaagaagaacagctgcggcggtcagtcgaactctaaacctgataggaaagccatctagaagaagcgcagaaatgacatgaaaatttcgcgttctaagcttgcctctcttattcctcaccacaacttcaaaccctccaaggaaattgcatcacaacaagaccagcttgatcttgcagctgtctatatataacatttgagagataggatagagaaattaaagaggctgacagatgaagcaatgagattcatgggaagcaagcgagtacatgat

SEQ ID NO: 37599 - DNA, 231 bp, Gossypium hirsutum
  Clone ID: LIB3135-041-Q1-K1-B2
cttagaccagctccataagaaagaaagaaagaaatcaaatatggggtccatcgccaagagtgtgcctatccttgcccctctagctgctaccgttcttatcatttcataggaagtggcaactcgagaccttgctgaaaccaccacagaaaagaacactggtaaagccggctactgaaacaaacctaagctgatgcgtcacgtataagacgccaaatatggatatggataata

SEQ ID NO: 37600 - DNA, 272 bp, Gossypium hirsutum
  Clone ID: LIB3135-041-Q1-K1-B7
gcgctcccaacaaaggtggcatcaaactgctcatttaggtttgacactcgctaccatggtctctggcacgcacgccgaatgtgcatgtctccaggaccagcggccactaatatgggcaacatcttggctccaactgcagtgatgggggtattccttgctttgattgttgcagacttgggtcctttaacagaataatatttaatattgcagcgttgttttgagtttcttcgctggtctcaaaaaaagaaatagaagatacaacaggggcgcgg

SEQ ID NO: 37601 - DNA, 307 bp, Gossypium hirsutum
  Clone ID: LIB3135-041-Q1-K1-B8
cgacccacgcctccgctcactttaacacatccaacatgcctcgccgtaagtctggatgatctgcttatcgcccatccgctctttgggctactgcacgcggcccaccacctcaacctgctcaacatgctcctcctccggctcctgctcaaagtggaagtgggggatcccttcttggaggcataggctcaacaatatctcactgcatggcttttgaaactgtaagtgctgcatcccacaaggcctgtcgttgctgttattggtcctcgtactattcaacatgaaactgctgtttcctaggctgcatctt

SEQ ID NO: 37602 - DNA, 272 bp, Gossypium hirsutum
  Clone ID: LIB3135-041-Q1-K1-C10
gccacacatacggtcatgagtatatacactatgttggctcctggggtcccgctataattgggggggcacataatgaaggccttgctgccttggctgaaactatgaataaaggaacaagctttggtgctcctcgtcttcttaacaatgttatagcagaagaaggcatcactgctcgacctaccattaaaatggggcgatatataaactctgggacagaagcatgcatgggtgtgctccgacttgcccatgcttttactggccgagagaagatc

SEQ ID NO: 37603 - DNA, 300 bp, Gossypium hirsutum
  Clone ID: LIB3135-041-Q1-K1-C4
aatacacataatctcactcagtcggtacataataaaacttattataagaataagaactacaatggttttgggttttaattcaagttttaatttctcgtcctcaaaaaaatgttgatagattttatcaatgcgatagtgtctcctccggacaatctgttggctaactgatatctaactttattatctaatataacagtgtacgctatgattaaacagtttctttaatactaactactttgtcgtttccattcacattttataccatgttcaatttgcttatttttaccataaagagtttcc

SEQ ID NO: 37604 - DNA, 358 bp, Gossypium hirsutum
  Clone ID: LIB3135-041-Q1-K1-C5
aagagccccaggctcgccgtgtacaattaatcttgcgcctaagctagaaagaaatcctctaaggcggttggggatccaaacaagccattgaggcctgctaataccttctctctcttcatgaaagctttcctttagccattctagtataaacaccccaaagacaaatctgcctctactttgggcacatcttgtgtagaaatatcgctgaacttgtctgtttctaaaaaaccaccttatctagcaaaagcactgtagcgatatgtcgcgtctgcatagaacatgatcgcctacactcttagacacgctgtggctcccacagaagaacagtcgaagtctgagaagtcggtgtctgatgcga

SEQ ID NO: 37605 - DNA, 254 bp, Gossypium hirsutum
  Clone ID: LIB3135-041-Q1-K1-C6
cttagtgcttacatcacatattgtatgtactctggcgtttgtgccggcgtgacccccgcacaggatgagggtgcctatcctaagcgctatgttgacccttctaaccccttggtcttcaatgaagctctggctaccgacctctcctagagtgaatacataaatggccaagctgtaaagaatgacacctatatggcacacacatctgtgaggttcactaataaccgactcacgtagggtttttgcccaaacgttga

SEQ ID NO: 37606 - DNA, 258 bp, Gossypium hirsutum
  Clone ID: LIB3135-041-Q1-K1-C7
caaagtagagccaggtttcgatggtgggcattgccacggcttgttttgcagatgctattgcacttaaccgggttagatgagcaatctattaatatttcattatactttatagattgcctcattttcgcttgtcatgtgcgtactcgagagacgagagaataagatcaacatcatattggtgtacattgaattatattacgattaaatatatacattatttttatggattggaatgtaacagccatatgcttctataaa

SEQ ID NO: 37607 - DNA, 336 bp, Gossypium hirsutum
  Clone ID: LIB3135-041-Q1-K1-D8
ccgggagtttgatagtaatggctttgatatcttcagcattattgattgtaagtcgttactggttttgccaaagtacgttgccttcaaaggatataataacaagtacctgtgtgttcgtgaaaattacataacattttcagcagatgacattggtgactcaactgtggcatgcgagacttttgttactgatgatggaaaggttcacatcaaatccatttgtgctggaaagttttggtgggccgacccgaaatggatttgggtaggatatgatgaccctagcaacaatgatcgcactacgtttcgccctgtcaaaattgaccgataagactataggtc

SEQ ID NO: 37608 - DNA, 426 bp, Gossypium hirsutum
  Clone ID: LIB3135-041-Q1-K1-E1
cttgatcattcgtcgagagtcccgtataaccgtcactaagggacaatccatttcacatcctaggcgcatcacctgataacctgccagggcctcatcagcaaatggtgactgaacattcctgtatagaacagtctacttagccacgagtcttcctctttcgccccaaaccacaataccaaatgcccacttaaagttcctgttatcaaaggctgcatcaaactggatcgtcattctagtgtaaccttctcgatgcttgtgactactacttgcgtttaagtacttgagctccaagcataccacaagccacatcatatgatcttgcactattcagaagtactcaatctaaatatccagattgctctccttacatgcttgaaaatcctcatgatcagttttcgccaggggtatccgcagaattttttgagc

SEQ ID NO: 37609 - DNA, 344 bp, Gossypium hirsutum
  Clone ID: LIB3135-041-Q1-K1-E10
ccgacgcaatacatgccacctatgatgagtgcctgaaatgtgggatggatggatatgtctcggagcccttcatggaaaaaaatctctaccacgcagtagccaacttcttcaaagccaaaccaacctcgtaatcgtcatcaaaacaccttgcaccatcattggaaagtcaacacaaccaaaagctggttggactttttcagcgaaactttcccaatccttctggtgcattttggtcataaaaaaactacgtatagtttcctggagctcccgagaattctggactgcatcgatagcaaacatgcatgcatgttcggtgaattagagttagagtatgtgtatactac

SEQ ID NO: 37610 - DNA, 324 bp, Gossypium hirsutum
  Clone ID: LIB3135-041-Q1-K1-E12
gcaaagcgttcttcccaacgatgcagctgccaaagctggtgctgcaaattcatcaggcactggaggctgcactgaatgcggtatgcaatgcaaactgaagaacactctggacaactgtgtggacgacagaccttatacgaaaccaagaatgtggaaaagacgctgcatggaaccatgcatgaagtcacactatattggcgatgactcctgcgccatatgctgctgccttactcagtgtcaagcaaaaggatatgaacccacagaacaaacgactggacatatacccagaaaggtacacattatggaagacatgcatgatatcat

SEQ ID NO: 37611 - DNA, 321 bp, Gossypium hirsutum
  Clone ID: LIB3135-041-Q1-K1-E7
cccacgcgtgcgaatcattcaaggttatttttaatctatatagaagacgccaggaataatatagggaagggtgggacttggcatgggaggagcgaagcgccaccgtgaggtcctacggtgacaacattcatggcattacatattctgcaaatcgactctttgcccgcaggggaagagtgaaacgtatcaatggctttatctacaatgaaacccgaggtgttctcaagatcttattgtataacgtcattcgcgatgctgtcacctacaccgatcattccaagaggaacactgagacgcgacatggatgtggcatatgctctg

SEQ ID NO: 37612 - DNA, 296 bp, Gossypium hirsutum
  Clone ID: LIB3135-041-Q1-K1-E8
gagatcccttgaggacatattcatacagattcagagcagcggtgctaatgggcgatcacaaagaaaacgaagctattgcggagctcacaagagcactagctcttaagccagacctgctactactacatcttgaagctgatttccatgactcgatgggggaatatgcatttactgttagagactgtgaaacacacatatgtcttgaacccaaccacgccgatactgtctagctatataataaacgacgagagccggtcttagaacgatattgagaaaaatcaaatcccaataaatca

SEQ ID NO: 37613 - DNA, 273 bp, Gossypium hirsutum
  unsure (1)..(273): unsure at all n locations
  Clone ID: LIB3135-041-Q1-K1-F1
cggtccgtgtaattcccgggntcgtacccacgtccgtccgcttcatatatcttatatgtccctctgtatttcttttgaagnntagatgatgttatgccttatatacgattttgtgatggtatctctgtgttttctttgtccctccacaatactttgtcttcatgaanntcattttccttcactttggattaaaanaaaaaaaaaaaaaaaanaaaaaaataaaaataaaaaaaaaaataaaaaataaataattaataaaaaaatttaaatata

SEQ ID NO: 37614 - DNA, 288 bp, Gossypium hirsutum
  Clone ID: LIB3135-041-Q1-K1-F8
gacttcggagccatcggagacggcaaacactacgacacatcctccatccagttggccatcgagagctgcggcactaaaccatgctacgtgaccttcccaacaggcacatacctaacggccaccatcttcctcaaatccaacgtgattttggacatcccgaaaggctccaccatcttgggtgggaccaaattggaagactacccgaaagagttcgataggtggtatgtgatattggcagagaatgcaagggatgtagggataacaggtggaggggtggtggatgggcag

SEQ ID NO: 37615 - DNA, 262 bp, Gossypium hirsutum
  Clone ID: LIB3135-041-Q1-K1-G11
cccacgcgtccggcaaaacgtggtactgatcccaaatttgtagctcgaaagccaggaacttggggatagagatctgtgcataacatgaatattatgtaaatagtggcagactctatttagttttgtgaggtcgaaccattatgtttgttgtctgatagcatcgcatttaaaacgtttaaaaaaaaaaaaaaaaaaataaaaaaaaaaaaaaaaatgaaaaatataaacaaaatataattaaaatttaaaaaaaatattattg

SEQ ID NO: 37616 - DNA, 225 bp, Gossypium hirsutum
  Clone ID: LIB3135-041-Q1-K1-G3
cttttatagggctgggattgccttgtttgttgctactttactctttttgtatatggggattttgactgttattggagtcgttaacgaaaaaactaatttcccaactgttggtattcaaggaattgctagtgccttacggtggttgtgatcttttatctagtttactgtaaatgtttgcatttcatgtggccatattatacacgaaagtgactttcttaccattct

SEQ ID NO: 37617 - DNA, 295 bp, Gossypium hirsutum
  Clone ID: LIB3135-041-Q1-K1-G4
gagagtggatgcacctattaaggatccggtatccatagatcatcctgcacaatacacggaagcgtactgtggtagagttcatgactcacttccaacaagaaaggccttgatggaaagtatgcactgctgcatttcaagatatgaaccaattccctcaaacaccaatataatgaagcattggtctttccatgtataactagaactcgaaacgtatgcgtgtatgaatgtatgtatgtattctttgtaaacaaaaatattgttgactattgaatatgccgattgctgcctgaataca

SEQ ID NO: 37618 - DNA, 280 bp, Gossypium hirsutum
  Clone ID: LIB3135-041-Q1-K1-G6
cattcttctatgtgctgtctgcatcacagcacatctaatctctcgttctgaccacgttcttcgaacaccgttgcattgttggataatggccattgtgatggcccttttgagtggatttgcatgagtgtacactgaggctataattaataatcgcccatcaaggaatataaatttgcagaatttttggttgtatatctttgtaatggcctttaatgcttgttctattctgatacaagttttcgatgctgtcattatacatgggtttttttcattgtattct

SEQ ID NO: 37619 - DNA, 352 bp, Gossypium hirsutum
  unsure (1)..(352): unsure at all n locations
  Clone ID: LIB3135-041-Q1-K1-H3
tcgcccacgcgtncggtttaggtcaagttgaattatcggaattggatggaccctttgtgaagattagtctcaagggtcgattttggcacaaacgtaccacggttgtagccagagtcggaaattatctgaagcagagaatccctgaaatcctggaggttgagattgaagatgagaaacaattatatgacagccctgaaaacttctgagaccctgaaatgaccctagggtcgtttattcatttagttgctttcagtttatggccctttttttattattactatttttgcagctcaatggatacaactctaaagggaaaaagactttaatccgttaattataaactattgatttc

SEQ ID NO: 37620 - DNA, 290 bp, Gossypium hirsutum
  unsure (1)..(290): unsure at all n locations
  Clone ID: LIB3135-041-Q1-K1-H5
gacccacgcgtncgaccacgcgtncgntttgagcaggttcataagaaagaaagagatccaatatggggtgcattctcgagagtgggcttctacctgctcttttagctgccgttgctcttctcatttcttcggaagaggcagctcgagatcccgctgaaaccaccactgaaaacaataatggcgaagcggctaccgctacaacccaagctgaactcgaagatggtcacggaagatatcacggaagaagacacggatggtaaggagggcacggaggtggtcacggagggtat

SEQ ID NO: 37621 - DNA, 351 bp, Gossypium hirsutum
  Clone ID: LIB3135-041-Q1-K1-H7
cccacgcgtccgtaattagcccttttcttcaagtttcatcatgtagagtcttggttagtaggtatttctcgttctggcttttttttaagtgatcctgagggggtgctggtaattggaaatgaaattcaatttctgagtttcatcttgagcttgtaggtagtatacttagtgtgtttcttttactacactctgttgtgtcactgttgcagtgtcagttcttttgtaattgtcagttgtgcagacttcacggctgcaattaagttgccagtggcattctgtgtcctcagtcagcttctggtgatggatattaatcgtgatgtttctctaagtgacaatatgttcttaagctta

SEQ ID NO: 37622 - DNA, 244 bp, Gossypium hirsutum
  Clone ID: LIB3135-041-Q1-K1-H8
gccacgcgttcgagcagtattgcgtctgcgagcgaagataaagtggtgaaccattcgttgtctgggtcagatttgagcaacaggaacaatgtcatccttagagaggcaaagcaaacacgtccaagctaagatagatgacgaatgcaagcacagcgacattcacattatctttttgacgagactatgagacttaaggaggcttggtcaaggcgatctacgtaagaagccctcacttacacttcat

SEQ ID NO: 37623 - DNA, 436 bp, Gossypium hirsutum
  Clone ID: LIB3135-042-Q1-K1-A4
aaaaaaaaattgtatattcaattcaaatcaacacattcaaaagaaaaaaagtgttttatttagcttcaagttttagtaagaaaaaaaaaaacatgtcgacaatagtaggggtgtggatggatgaatttgaaaggctcaaagagagagttcaatctaaaaggtcgttcatgttgaaggctaaaaaggatcagcagcttgttaaggaaagacatgttgaagaagaaaaagaagctggtaaagaaactataatgtcggaagctacactttgtatgcttatggacaggtttgcaccgtgttgattgaagagaacagaaaagaaaacgtatgagaagaagttccagtgtgtactatatttgatggagctttgagtgttgtatgtaaaaagataacaaggtttgtttataggttgcgtaattatgtggagatatggttcatt

SEQ ID NO: 37624 - DNA, 261 bp, Gossypium hirsutum
  Clone ID: LIB3135-042-Q1-K1-B10
gatgcaatggatggcttatggcttttatctattaaggtgacctaccctattatggggatatgtattggccatggaaaggaccaggggagggttccttttgccatggtaagcgcgctcatcatttgaacctgtccccttggtcctatctcttgacaaggtttggttcttctccaacttaacactctaatcccttcggcaggccttcaataatttcaagatcatgatcatcttttgcaatggtttttttttccctccttcttc

SEQ ID NO: 37625 - DNA, 354 bp, Gossypium hirsutum
  unsure (1)..(354): unsure at all n locations
  Clone ID: LIB3135-042-Q1-K1-B4
ccgacccacgcgtgctgccagcgtcacacacaatttttattttttgtttccaacccaaaattgnctttagggatgaagtttgtttagtttccgagacaagctcttttcgataattttattctaagctcacattccccatctcgtcgttcgcagctcttgcattttctttcttattggatgctccatagatatggttggtgaatgcattccttaaagtaaacatctcgtttaaacctgttttccccttgttgaatgatttgtggagtataaattagatgattcaccagtctttaaaataactggaaaaaaggtgtgactcgatatgcttatttcaattttcaaattggttacttt

SEQ ID NO: 37626 - DNA, 429 bp, Gossypium hirsutum
  Clone ID: LIB3135-042-Q1-K1-B7
tatttacaaaggatccaaaggcactgactgatagaacctcatagtggaagtgcttatctatgccagatgtcagtttgcattacatactcatcacctcaatccttgctgggaggcttgatctggaatcactggggcacaggtctatttctggtgcgtatcatttgctaatcatatggaacagttgaaagcccggaattattatatgttcagttacatggatacttccgggtagtgccttaattatttatggcttgtacctgtaacactcgcaagcagtcatgccatgaagctggatgagtttcaaatcagtataaatgtagattgaacttataggttaaatttagcttatgatccgaatgattattaatctaagaattttagattgtgtacgaggcacatccaacataagttttgcaccatggtcacaaa

SEQ ID NO: 37627 - DNA, 417 bp, Gossypium hirsutum
  Clone ID: LIB3135-042-Q1-K1-C10
gctaaacgcacgtcatagtctatagtggttacacccgtatatctaggacggtatgatgtggggaatggggatgacagtaatcaaagaaaaagattgcggagctaaactctattagattggcttctaagcttatgtataacttggtttgagtgtcatgttagtcgtatgctctttctaagttttatcttagtgctggcggttgcagtagcttggcgagatgccaaaaccatgtacatgtatagttgaacttgtaccatgcacattatcttgcatcacataaggttacagataacatcggagcctttatttctgtggcatacatcttggttctttactgcgaacacgcatccagaggaaccgctttaaacattcctttatcgagtcgcatctttgatcgttaaaaaggttatatgggga

SEQ ID NO: 37628 - DNA, 350 bp, Gossypium hirsutum
  unsure (1)..(350): unsure at all n locations
  Clone ID: LIB3135-042-Q1-K1-C12
cccacgcgtncggactatgtagaaacttctcattgagatttctgacctcagaagcgccgcgcgggaaaagatcaacactgatacaaccgtctcacaagcagctgtcagtctgcgcaccgacaaccggatcaaaaccatatagattgaatgaaggtacaagatatattgactatgatcagctatggaaagagcgcttgccttatgaaaccagcccctattattggttattcgcatgcttagactctcgtgtgtgatcatgccacattacgcatgggcaaccataagtagcttgtattgcttttaacatttccacgactgtggcgccagatgacaaggaataaattctgaaa

SEQ ID NO: 37629 - DNA, 433 bp, Gossypium hirsutum
  Clone ID: LIB3135-042-Q1-K1-C4
tgaagaaggtgcataatttagctttgggtatggcggttctggtgatattattgtcgtggatggcttttccagctctagcttgttcctataatggcggcggtagtaataataaagggtgtaaagactgcattgccgagcaaatgaaatacggttgtccaaggtgtgtgccgcttctacggtgcatggcacggtgcttgtggggcggaagttccaggtctaaatgcatgaggcggtgtgattgcgacggtgggaagccgacactttccgattgtaagaaatgcatgtcacggtgcaaatgtagttgtgttgcttgaatccactcttttcatgcaaaactacgtttgtatttgttgtttttttctattctaaactcttttctttcaactgttgttttgcttcaagcttaattaatattggaatctaaattctatcc

SEQ ID NO: 37630 - DNA, 433 bp, Gossypium hirsutum
  Clone ID: LIB3135-042-Q1-K1-C7
aagtaagaaaccctctcctcatctccaccgtttcgaactttaccgatttattcttaaaaccggtgcccagacttctaccacggctaagcgtgcacagatctaacggtgtgcttcaagaaggtaaaacccccctctcttttctcttttatttttcgccaagtaaagagaaaaaggaaaaaaaactaaaagaaaacgaaaaaagatccagagaaaatcgagaaatcgcctttccttattcagatgttctgtatttcgtaacgatttctccctttttattcaacaataaataaatttcataacacagaagctgaaacaatgaacaatccaaaggagaaaatcaaatctctgatccttttgaaactttttcttgcttttgtttgtattcaatatctgagtctgcgtaaaaaaaaggaaccaaaaacccttttacaaa

SEQ ID NO: 37631 - DNA, 143 bp, Gossypium hirsutum
  Clone ID: LIB3135-042-Q1-K1-D1
cccactcgttcgcacccggatttctttggcattcacccgttaccatgttctgcggcaaactggtgccaaagtgactgatagagagatcaatgtaaatgcagagaagcccagataatctgcgcatttttttgtctatggttaac

SEQ ID NO: 37632 - DNA, 321 bp, Gossypium hirsutum
  Clone ID: LIB3135-042-Q1-K1-D2
gcatactttgtacttttgctattatctattatcactaagcaaacctactaaacggatcaggcaaaattaataaccgactatgtatactttttaatagacatgttctttcctcaccttcttcaccatttttatccatgtgcttttcatttttattttaatcttattaatatttccttttttattattttaattacactttatctttatatgctttgtatttttatttattattattcttttacttttcatatgtctttttttttattttttataatgatcttttttattaatattatatttatattcattattttattattt

SEQ ID NO: 37633 - DNA, 421 bp, Gossypium hirsutum
  Clone ID: LIB3135-042-Q1-K1-D3
cccacgcgtccgcgaaaatttaaccccttcatgaaccagattatttctatgtaaccaaagactccacataaatcttgcaatgattcgcttttgttggtcatctactgccaaacgagttctaacaaagcgaatcttatctcacatagactcttcataggtcgaaatctttacttgcagcgatgcccacacccactacagttcaccaccagaccacaacatgtgatcagaatcctccagctctgccttacacagaggacaagatactttcacacgcaaagtactacgcgccaaattatcaaagtgaggcaccagattatccaccagtctccaaatacgtattttaattttccctagaacgttcaacgaccatgacactctgtacaaatcttcgtcatcctccataattagtggacatgtatat

SEQ ID NO: 37634 - DNA, 175 bp, Gossypium hirsutum
  Clone ID: LIB3135-042-Q1-K1-D7
aataaacattagatcttaaggatcccgctggtccatcgtctaatacatatttcccaaaaatggacgacgatgatcttcatttttgcgcttcaactgaaggctcgcatgtgccacccactaacgggcccacgctcgagccatcaatgcgtgtcgtgatatcgtccaatcaatgatg

SEQ ID NO: 37635 - DNA, 220 bp, Gossypium hirsutum
  unsure (1)..(220): unsure at all n locations
  Clone ID: LIB3135-042-Q1-K1-E12
ctcacacttactcctacacgctctaacttaaatgcgacattactaacagagaaggggggttggctgctctatcccattgcctatatcaaccctaaaaacaccttcactcgaatccgataaactgccactacgaccactgtntgctagtactatggcagacactcgctcatctatcatatcccatctttgacacataactactcgcgcacattgtggatga

SEQ ID NO: 37636 - DNA, 180 bp, Gossypium hirsutum
  Clone ID: LIB3135-042-Q1-K1-E5
acgcttgtttttttgatatacaactatattcacttctgtaatgtccataaccttggagttgttgagcaacccatacctgctgtcaattgatcccacattttcctttaagtctgcgttttgttttttggatgactccaccattcactgaagtcatcttgccacatttggatcatcttagca

SEQ ID NO: 37637 - DNA, 361 bp, Gossypium hirsutum
  Clone ID: LIB3135-042-Q1-K1-E7
gtcaggctttgatgaagaagcatatggcacggccggctgctgatactaatttgttgctaatgaaaaaggaggctcttgatgcgttgccggataaactcatagaggcggctgtgataccaaatttgtccccatctgcggcaaatcgattgatggcgtgttttactccacctattgaagggtatattgagaacgctatagaagcggctcagaaaagttccaccaatcagaagcttacgtgaaggcgatgtgtaagtatgcaaaggacaaacttcactcgtgaaactgatgatcaatttcagctgcaacgtagtgtgattctctctgatggcaatgagtctcataacaagtattatttaacatt

SEQ ID NO: 37638 - DNA, 351 bp, Gossypium hirsutum
  unsure (1)..(351): unsure at all n locations
  Clone ID: LIB3135-042-Q1-K1-E8
gtgaaacctaagatgggagatgcattgctgttctggagcatgaggcctgatgccacactagattcttgaagtttgcacggtggatgccctgtgatttcggggaacaaatggtcctcaacgaagtggctgcatgttgaagaatacaagttgtaaactgctatatagaggataacagggtacatcagtatgtcataatcgtacggtgctgagaaagtattgagtgatgcaaccnctatgtgatgggggcatttgtatctttgtaggttnggagtacttgtctcatttttttcttaacgccgtggaactatcgccatttcataggagaatacaatatcatcgtaaaatagacgt

SEQ ID NO: 37639 - DNA, 302 bp, Gossypium hirsutum
  Clone ID: LIB3135-042-Q1-K1-E9
cccacgcgtacgataaaaaataaataaaatattctggaccattatagactatcgccacactcggtcgctggcgttcgcacgctggatgctcctttatttccacctacaatagattctcagcgcgacgttttacatctgaagaactcaagtaacactctggtttctcaactatatcagcttgcatcacattgtcattttcgcacctggcttaataagtattaagcgatgcaacatctatcttatgaacacatgtgcatccttaatagctaatgaaacactccctgtaatttttcattaataaa

SEQ ID NO: 37640 - DNA, 349 bp, Gossypium hirsutum
  Clone ID: LIB3135-042-Q1-K1-F12
atctggcaccatttgtagttagcgtgagcggagatcgtctcattgacatggtaaaggataatggaattatcagagacgttgtatggcaagatgaagcctctggacttttgcttgaagcccccacctcagttgccgaacctgacagtatgcctctttatcttactttagtcgagaacgaagaagagcaggaaagtcagttaaacattggcaaaagaaggctcggctgcatccatgtcttgatttttcttcccccgatgttccatctcttgttacaaatggaagtaagtgatgcttcgactatagttcgtattcgcaccgatcattggccatgcttagcttacatcgatga

SEQ ID NO: 37641 - DNA, 342 bp, Gossypium hirsutum
  Clone ID: LIB3135-042-Q1-K1-F6
cccacgcgttcgaacggcgaatgctgatagacatgctggtaatatcttgattggcaaaggagatgatggtcgcaccgtgcttatttcaatcgatcacggctactgcctgcctgagaattttgaggattgcacatttgattgggtttactggccacaatcacggctgccttactctccagacactcttaactatataaaatcactggatgccgaacaagatatcgcacttctgaattattacgggtgggatgttcctgttgagtgcgctcgcacactgcgaatcttcaccatgcttttgaaaaaaggtgcagagcgaggtctaactcccttcaccatttggag

SEQ ID NO: 37642 - DNA, 332 bp, Gossypium hirsutum
  Clone ID: LIB3135-042-Q1-K1-G10
accacgcgtccgtgaagattttgcattttgatatcaagccacataacattctttgagatgagaattttaatccaaaagtttcagattttggtctcgcaaaattatatccagtggatgatagtattatttctctcacagcagcacgtggtacatttggatatatggctcctgaattgttttataaaaatattggaaatatcctcgtataaagctgatatttatagctttggaatgatgctaatggaaattgtaggaaggagaaaaaatttgaaagattctgttgaccattcaagtcaaaattatttccctacatggatttatgatcaattttg

SEQ ID NO: 37643 - DNA, 146 bp, Gossypium hirsutum
  Clone ID: LIB3135-042-Q1-K1-G11
cccacacgatcatgtcagcaaacgactataatgacgccgggactagcatcagagggggcggggcagctggttcccgcatgcttacgctacacttaccaggggcgcatcggatacctgatggtgaacacatacaaacactgttaaaa

SEQ ID NO: 37644 - DNA, 303 bp, Gossypium hirsutum
  Clone ID: LIB3135-042-Q1-K1-G4
gatcatactacagatggcaaggcgagttacacttttatggcagatctcaggcggaagctgattggaacaggaccacttaaagatttaagatgcttctaattgcaaattcgagttctggaggaaacacatgccagtttttttgaaagatgataggcgtgagatagaggggggccgatgtgtcacgctgaattgaacttattgcagcatctcagaagtttggttaccgacattatgggatttgaatgcaaatgcaaaggagtgcaataaatatgcggcttaatccacacattgatggtctcgatg

SEQ ID NO: 37645 - DNA, 357 bp, Gossypium hirsutum
  Clone ID: LIB3135-042-Q1-K1-G6
ataattttgatttctccaactgctttcagtggaagcgaaccggataggagaggcgccgatcccattgtgaaagccgtaatcggagcacatgagcgatgaaatggaaacggcaacgggaacggcaggaggcggagaagagaagtggaagaaacggacaagggtttgatctggaaacttccgcagctgaagttgaaggaagtgggtaaggttggtcctgctttcgggctcggcgctggttgcggtctcggctttggtatcggccttgttggaggtgctggctatggtcctggaattcctggcttgcaagtctgctttgttttggtgctggatgtggcgttgggttaagattttgctatg

SEQ ID NO: 37646 - DNA, 271 bp, Gossypium hirsutum
  Clone ID: LIB3135-042-Q1-K1-G7
tgacgcgtgggcggacgcgtgggttgtggtgcaccacccgttgcatctcttgcacactttgagacagggaatggtggtgggaacaatgtcacttaatttcctaacactgttgatgttagtagttacagcggggagcagcataatcatgttatgggggaacatgaaatgtaagatgaggaatatgctgaagaattatgggagaattttttttcaggcacccattagatatttgcactttgaaaaggaggaaattcttgcaccccacactcat

SEQ ID NO: 37647 - DNA, 156 bp, Gossypium hirsutum
  Clone ID: LIB3135-042-Q1-K1-H10
acgttctattcttctggtcttcatcttttatgcagtgtttgctgtgcggcgttatgggggtgcgttgtgtttgtttagcagttgtattcttaattgtaccctcatgttttgcttgatcatcttttctatcaataaaatttgtttagacttcccgtt

SEQ ID NO: 37648 - DNA, 411 bp, Gossypium hirsutum
  unsure (1)..(411): unsure at all n locations
  Clone ID: LIB3135-042-Q1-K1-H2
tcgaccacgtcgttcgtccactcgtctcgaccacgcagtccggcgattnttccacactttgggtagtcgacgcgacggcgtgtttgacgctcaccaaacccgaaactctcgctcggattggaccgttcgttcttggtttgcatcgcagtatgtatatccaggcacggagcttccgattgaatccatcttctacttataagatcctaacatagcatatatatttaaggctagtgagcagaatgaatcaacactagccctatgagtttagttgtcatcatcccatgacttctgttggtctaaccggaccaccactcccgacgcattttcgggaatcaccatgatgattagtgtacgcttgcttccccactagagggaagggaaggaaagcgttgcaaagctgtatcttaataa

SEQ ID NO: 37649 - DNA, 246 bp, Gossypium hirsutum
  Clone ID: LIB3135-042-Q1-K1-H5
caagatcaagactcggttgacacaaagccatgacgatgctaacctataattgctcccgggtgcgcacagattatcgtgtatctcaagggtcattcaaaacatgctcccatataccatacaacatcattcttacataccacatctgcgattgtctaaagaagaaacaggatggagcatatgttaccagatatgagtctgaccgaaggcatcattcaacgtaatcgtaccatgcctacaattcaaaac

SEQ ID NO: 37650 - DNA, 363 bp, Gossypium hirsutum
  Clone ID: LIB3135-042-Q1-K1-H9
aggcgtgcgttttttttaaaaaaaaaatcacgcatccggtgattatacacacatttatatgaagacgcgagggcttgtttgactctcaccatacccgtaactatagatcgggttggaccgctcgtgcttggggaggattggattatataggctcaatcccggagcgtctgcttgaatgcatcttatacttacgacatcctgcaatagcatttatttttgaggcgagtgcgctaactgcatcaacactttccctatgagttatacggcatcagccgatgactcttggcggtctaaccggaccaccactgcttacttctttacaggtattaccattatgattacagtacgcttgcttaccactat

SEQ ID NO: 37651 - DNA, 387 bp, Gossypium hirsutum
  Clone ID: LIB3135-043-P1-K1-A10
aattgatatgctcagccttgagacctaccctggcgtcaagcgcatcaccatcaggccccacactgaccgctgggtgttccccgagaccaacactggcatcattgtccttgctgagggtcgcctgatgaaccttgggtgtgctactggccatcctagctttgtcatgtcctgctcattcactaaccacgtcattgcccaacttgaactgtggaaggagaagagctctctcacgtatgagaagaaggtgtatgtgctccccaagcaccttgatgagaaggttgctgctctccacttgggcaagcttggtgccaagctgaccaagctcaccaagtctgaggccgactacatcagcgtgccgatcgagggtccctacaagccttgccacta

SEQ ID NO: 37652 - DNA, 199 bp, Gossypium hirsutum
  Clone ID: LIB3135-043-P1-K1-A11
gcgaatcctgagctctgcatgtacttggcgtattgcatgcagtgaataatttggctggggtttgtttgttgggggcagtgttggggacggatttggattggggtttatgcttggcatcgcgtcgtatcgaaactcagctgctgtttcgctgagtaatgtacatttccctggtaatggtacttgtggactctgatgcttt

SEQ ID NO: 37653 - DNA, 338 bp, Gossypium hirsutum
  Clone ID: LIB3135-043-P1-K1-A12
tcgatcggcggcgatgggcggcggcggcgcacatggcggcaccacctacaagggctgcacgcatcccgcacaacaagcgctggcacaccgtcgccggcaagggcctctgcgccgagatgtggttctgggttttctacagggctaagcaggatggtgctacgctcttgggtttgcgtcatccttgggagggacatgatgaccactctcatggtcatggacacgggcatgaggcatcatcatcgtcatcttcacattaagttccttactggctgcggacgatgtttggcatgttccaacaactaaagtttgagttaataaattctatcaccctgcatggg

SEQ ID NO: 37654 - DNA, 187 bp, Gossypium hirsutum
  Clone ID: LIB3135-043-P1-K1-A7
attattacctttctattttctgtcaactttcacaactacttgaaaaacaaaatcactcggaaagatcttgaaaaacctcttcatattctcacaaccaaatatgaaactaagaaaaacccaaagccttaaatccaatcaattcaaacaatattctctgcttccaaatggcatccccttattcaaaccc

SEQ ID NO: 37655 - DNA, 345 bp, Gossypium hirsutum
  Clone ID: LIB3135-043-P1-K1-B10
cccacgcgttcgataacacgttctttcaggcgctcaacaactccaccaagattaagagagggactgtggaaattatcacgctcgcaccgcttatcaagaaggggacgacgaggctttcctggccgactacacttaggagccagcagagcctgcggccacactcaaagtgctgcatgatgtgaagtgcgaagacaagctgagcaccggcagcggcaggagcgcggtggtggacgcggacgcgctgctgtacggcaggttcgccgcggcagttgatagcagcgtggagtcgtactttcccggcggcgaggaccactaccacgactgcgggacgatgggccccgtgaa

SEQ ID NO: 37656 - DNA, 359 bp, Gossypium hirsutum
  Clone ID: LIB3135-043-P1-K1-B12
ctttctgagatggctaatcttttcatcagccttcacttggcggtcgctcctggggtggataacaacccgaacaatctggttgcatgcacgacattcttttatgaagcaacacgggccatgctttgtctgataagacttgaaacagatccacaagataggacccaactgccgctgacagttgcctcgggcgatcaacatttgacattcgagttgaaagagttcgccaaggaacatttgattgatataccaaggactcaagctgccccacctatggcaatggtacagacacagttgcttactgcagcacctggcacatacaatgaccctgttgccatgcttgctggattgctatgagaagt

SEQ ID NO: 37657 - DNA, 293 bp, Gossypium hirsutum
  unsure (1)..(293): unsure at all n locations
  Clone ID: LIB3135-043-P1-K1-B3
cggacgcgtgggcacgggggcaccaangtctgtagaattaatactcatattgactaccgcttttgtggattcctttcttttatatatataaaaaaacagaatacagggtgagttcttcaactcaaccaggtaactcatgttttaaaattttaagatttttgaacttcacatggaacttggaccttggagattttcaaagaagcggctgcgtttgtctaatcgttgccgatcttaacatacttgtgctcgctaggtttggtttgttctttttttacctcgtttttacacttaaa

SEQ ID NO: 37658 - DNA, 208 bp, Gossypium hirsutum
  Clone ID: LIB3135-043-P1-K1-B5
agagtccgcagcactaatcaaatagcacatagcatgtataatataactactaggatccaagggagacttctataatagcttataggcactcctgactaaaaaatccccgaacagtcccctcacaaattgaaaaacttaaggctgcccggccaaggaacggcaggtctttcccgggccaaaaaaaaaaaaaaaaaaaaaaaaaaaataa

SEQ ID NO: 37659 - DNA, 381 bp, Gossypium hirsutum
  Clone ID: LIB3135-043-P1-K1-B7
cacactcctcccttcaatctgatgaagaaatcatgaaaacagtcgcagaagcgaaaggggctcctccagaataacggactatagacggcttaagctgcagcaggcatacaagatgctgatgcaagggaagaagaaacacagcaagaagaagaggaagaccaagaagagaaccagaagacagaatagagcgcacatgctagaggacaagtatatgagttctaaaacgtgaatgctataccactgaaccatacgcttgtgagccatccagtgtgccaaaggatgctgcctggaaagacatggctgttaaattgagagctgaataagcctgatggttaggagggctagatagcaatagtaatgccttaaatggcaccaggagaa

SEQ ID NO: 37660 - DNA, 387 bp, Gossypium hirsutum
  Clone ID: LIB3135-043-P1-K1-B9
gcgcgatcctattgtccctgagattgttcacatgtacaagaccgatcggcctaagtggaaggcatcatcccgcagctggacccataaatatgccatgggatgaaaaagaaatgaagtcgaaactccatattcgtcattactgcttaaatgcagacgattgtggtgttgccccatgaaactttttgtggggacgtatgttcttacattccttgtcgcccgtatgcattctgatccatctaatgatcgcgtgcttatccaacattaacctaccattgccgtcgataatgagatgacttgtgctttctgttataactatgctagtgtcgatgttattaggtaaatgattctcattgaaggcttgttcaagcctcaaggacaagagtcttg

SEQ ID NO: 37661 - DNA, 227 bp, Gossypium hirsutum
  Clone ID: LIB3135-043-P1-K1-C1
ccgtccgaatccggtcgcccacgcgtcgggacctggcggaccgtggcggaccttggcaggagggaatgctatgtgaggactcccagtactatggttgaggaccatatacatgtgatgggtgtcatcttgtgaagtcagttcgcctgccatactcctataactcaagacgctgatgacgctatcatgctcacgtataccattcaacatcatgactacatgataagcat

SEQ ID NO: 37662 - DNA, 189 bp, Gossypium hirsutum
  Clone ID: LIB3135-043-P1-K1-C10
gccaaaaatctaaagtcacagtacaatattaatgcataaaaaacctaaacaaccctggggtggatagccttagccattttcagcttatcccatgcgggcacagttgttatgaagaatcacgtgaccttactccgggggggctggcggatcttcagcgggcgggatgtgactcttgctggtacaaggatg

SEQ ID NO: 37663 - DNA, 395 bp, Gossypium hirsutum
  Clone ID: LIB3135-043-P1-K1-C11
gcgatcgagcgccgcctcaaccggaatcttaaagaggctgtgaagattcaggcgcttgaggacaacatgggggatgtcgacatgatctcaactgaagggtcttcctaagctgcaaagggcacgttccaagagaagttcagcgtgaagaaaaactcaagaatacggattaagagattaaagggcaaaggccggaagaaagccaaaaattcaaaaccacctgccaaggagagagttgatgccatggtagaatgacagttgatgccatggtaccatgacggacaagactacatacatccctttgtatgttttctcagagtttgcagcatggaccgacctcaccgaacactggcgcgtgtctcttgcatcttctgcctgaatgttaaattgaagctact

SEQ ID NO: 37664 - DNA, 237 bp, Gossypium hirsutum
  Clone ID: LIB3135-043-P1-K1-C12
gcggacgtcattgtactcctattgaaggttgacgcctacagacgacgttctgcaaacagtggcgcttctacacgcttcttgaggtgatccgctgaacacacatgggtgattggaaccatcctcccttgccccgttggggctgccgcatctccgggtggtggcaagagacttgaccaaggtcaagcatggcaaatcactgcagcctctggaaccacacaagcccgaatttgggctcgg

SEQ ID NO: 37665 - DNA, 210 bp, Gossypium hirsutum
  Clone ID: LIB3135-043-P1-K1-C2
cccacgcgtccgacaactctttcttccacgcgttcatccacacgaccaaggttactagcggggactacatctgtactactcacgtatgacttatcaaaaaagatattgcttagaaagcttgaaaatatgcacttctctaacactattgtatttatccacacttaccctgatcgaatatatggtgtctacatccaagagtcattccattta

SEQ ID NO: 37666 - DNA, 146 bp, Gossypium hirsutum
  Clone ID: LIB3135-043-P1-K1-C3
aagaaaacccgacccaccatcctaccatcatcctacaatcttctaaactttttttcttaccaataataaacccactccttatgctattttttacaaaatttcacctcttaccttataatactattatcattcctataaacttatta

SEQ ID NO: 37667 - DNA, 167 bp, Gossypium hirsutum
  Clone ID: LIB3135-043-P1-K1-C6
cccacgcatccttcttactatactctttaatataataaattttttttacacaaaaccccatccttcacccctgctcttatttcacttaaactccaatctatcttaccttcaaatcatcttctttcatccacctcataacaaaattttatacctctctttcacaacca

SEQ ID NO: 37668 - DNA, 437 bp, Gossypium hirsutum
  Clone ID: LIB3135-043-P1-K1-C9
gcggttggttacgtcgtggggccatccgtgattaaagttctgatatcaagaatggcggggaaggatggtgagttacagtttcacatccatccacttgtgatggattccatttagtcagatgtacatggaccaactgaacacccttcatgggtaaatacacgtttcctatcttgcagccctgccttcccttgccttcatatttactacgttctacgtgggcgttaaggtgattcctcgctaatcaattccgttcaacaatgtgtaccccttttgccgacatcttgtcaaattattgcagcttatgttccatatacgggatgctagcaagaaccaacgttgagggagctttaagatgatgtctccagttttgactcgcaagcaagcagattgctttcccgtggctgaagatgatagcttcgtctttttttgttgcatat

SEQ ID NO: 37669 - DNA, 297 bp, Gossypium hirsutum
  Clone ID: LIB3135-043-P1-K1-D10
cccacgcattcgttgtatgcccggacttatggcttccttaacccgattcctagcgtagacttaaacagtaccgcttaggaaacgtcattgtatgcgcgatgatcgaatcatgcctctggactacttcgcactgttattttctgtaaccccagattattatctgagacttatgcggacatttggtgagccctatatgggttctaactttggttcttagaaaaaatccctgcgttaatgaacaaatatttttttttgaatgggcggcccgtttttaaagatccaatctttccttcccct

SEQ ID NO: 37670 - DNA, 219 bp, Gossypium hirsutum
  Clone ID: LIB3135-043-P1-K1-D8
cacgcgtccgcttatgacaactttcttattaaatacttaatttactcaggaacactgtaatctttccattgcacatttttatcccaactttattaccatcattactaacacccgtaaagttcttcaaaaggaacatcacttgcatgaacacttccaccttataataaaacattcttcatcctaaacccatattaacacactagaaacttctctactttt

SEQ ID NO: 37671 - DNA, 399 bp, Gossypium hirsutum
  Clone ID: LIB3135-043-P1-K1-D9
atcgactccttgaacccactcatgcatgctgggggtgtggacttcatggacgaggactgctccacaactgctcgtttgggatctaagacgcggacaccacactttgattacatcttgacccaacaggcgatggtgactgttgacaagaaagcgccgatcgaccaagacctcatcagcgagcttcatgtctgaccctgtccacggagccatagaagtctgcgctcagctgaggcccactgttgacatctgagtgaccgctgatgctgatttcgtgcgtccagagcttcgacagtcttcataagcttgtatggatccgcagtgtgactgcaatggctagtttgtaagaacttaatatgcctgggcttttgaactcttagattgtgcctgtattgctcatgt

SEQ ID NO: 37672 - DNA, 222 bp, Gossypium hirsutum
  Clone ID: LIB3135-043-P1-K1-E1
gtttgttagatgaagtgaaaaaaggaagttctttggatgttaatggatcaatcatcgcagctttggtagttcatggactttgtttctcatcaagagaatcagaggctttttgggcattggatgagttgaggagcagaggttgcaagcctgattttatagcttatagcattgtagaagaagcgttcagaatgaccaacaatgtggttgtgagggagttgtttt

SEQ ID NO: 37673 - DNA, 316 bp, Gossypium hirsutum
  Clone ID: LIB3135-043-P1-K1-E10
ttgcattcgaatctcgcttctaaaatttcgtcttcaactgataatcggtaataaatgagtatgaagccaggtgcgacgtttctcctgggggctatgttcggagcccttttaactggaggattcaatcgctgccgccatcttaaagaaacaagcagtagcggtagcaggggagaaaacaggcgctgacctcgcaccaaaccaactcaaaacaaacctgctgatgccaacccaggcccccaagtggaacagcaatcggaggcaacgcttgttggctcgtgattgaagacatgggtgtgttttgctttgtagatcgtat

SEQ ID NO: 37674 - DNA, 355 bp, Gossypium hirsutum
  Clone ID: LIB3135-043-P1-K1-E11
ctagctctagcctctagccctagcccctactagtagctagccactcgatcggggggcataccttctgatcgtcacccatggccactgccgaggtccagaccccgaccgtcgtggcgaccgaggaagcgccggtggtggagaccccggctccgccgcgtcggcccgaggaggtgccccgcgcgagccaagtggaggagccagctgccgcgtgacccgaggcggccccgtggcggcggagaagagacgccaaagaggaaagacggcaaggaccggagccggcggcggctgaagagggaagagaaacgagccccgtgcgagacaaacagaaccgagcgtgacccgagctgtgtgcgag

SEQ ID NO: 37675 - DNA, 376 bp, Gossypium hirsutum
  Clone ID: LIB3135-043-P1-K1-E12
gcggtcgccgagcagcctcgctacatttgctctgaagttcaaggacacggccaccatgtaggaattcaaggatgcggtggagtctcacaagacaagcaaggcacaggaactgccgctgaagacgcccgagaactctccgaaggcagcagaagtctgaagccgcacccgagtcacgcttgctcgtgtcttttgtacgtgtccaggaaggaaggaactgagagagtttctgttgttgcggagtttttaagaatgtcgcgtcatgacatgatgtcctgagttgtattttgcgtacgggttccctagtgctgtttttgtgaacttaccattactacaggcgcataatcttgggatcctggacaagggacttcgttttttt

SEQ ID NO: 37676 - DNA, 419 bp, Gossypium hirsutum
  Clone ID: LIB3135-043-P1-K1-E5
cttggagaggatagagagaaagtaccagtagctggagcagtggctatttgctccccaggggaccttttgattggtgataggtttatatgccgcaggctacttcagaagttatatgatagagcccttacaattggccttcaaggttatgcaaaattaggaggcatacagagtgaggcctcaggaatagtgtacctagtaactggtttctgttccaattcttttaccctttggagctttacagtacctataatacctgtttctgttttctttgtggggagaatggggttcttggacatgtctcaattgatgaatgtgtaataatatttatatattagctttctagagttgttattgaccctcacatgtttattggagtcatgggccttgctatttttggatagtttatttgttagttattt

SEQ ID NO: 37677 - DNA, 280 bp, Gossypium hirsutum
  unsure (1)..(280): unsure at all n locations
  Clone ID: LIB3135-043-P1-K1-E7
aaaacctcccgaaccacgcgtgcgaaagcagttagtttgtacaaactactttttctgnctatctttgtagtttattgtaattcgcacactatatgcaatagctgtgataaaaccacaaattttgtctgcattatgttaaacatccttattccaaattgaaccacacattatcttatgtctatcgtcccaaaatatcttctattattttctacaaccaggtcttatacatgttcctagatgagaaattttcctcgtcatttatcgtttgcatcactattaa

SEQ ID NO: 37678 - DNA, 433 bp, Gossypium hirsutum
  Clone ID: LIB3135-043-P1-K1-E9
cccttacctctttttacattattgacccactctaaaattcctctacgcacgcctgaggaggtctcctttggacatgtccaaaccatctcaaccgatgttaaatcaatttctcctcaattggtgccaccccgaccctatcctggatatcttcgttttggactctatcccttgtgtgctcacaaaaccaaagtaacatgcgcatctcagttgttgacttgttggacatgttgcctttttgtcggccaacattcagcaccatatagcatcaccggtgcgctagagtgatgaatatatttcttaaatgacttgtattgttatatttcgataataaaccttatttagactaattccaattggatggactactgtgctgagtgcacgggaatggtgaacagtcattttttaggactacagagcttgcctagatttttta

SEQ ID NO: 37679 - DNA, 341 bp, Gossypium hirsutum
  Clone ID: LIB3135-043-P1-K1-F10
cccacgcgtccgcaaaagcaaagccctgatacagatgttggacaagaagctgggcaggtagaagcagatgctgaagtggagactgggatgatagacggtgagacagatccagaagccgaatctgatcatgtaggatgagattcaaccttcaaggtatgaagaaatagcttctgctttctagttgttcattaagggttcttaacactagatactggtgaaaaaaaaggagagttgagtgtttgactgaacttaatccaatgttgaactataagctctgtagttattattctcaacctgaattgaattacttgcttatcttatacttacagtcgttctacttg

SEQ ID NO: 37680 - DNA, 403 bp, Gossypium hirsutum
  Clone ID: LIB3135-043-P1-K1-F11
caaccgcaaaggagatgatgtctacaccactcacaatggcatcgtggggcgacagtagtcatgttcctagctacgagtctgttagccgcaagtttcactcgaagtgagaggatccagcatcggacttgcatgacctgttccaacaactgatgtgaagcctgcaacggccctcagctgggacagttactccccccacagaataaaaaagcatgtggtttctagcgccccccctaattactccctctgcatgtatacgccaaacatgtttttttttttgtggtaagaatcatcaagccccttggcgactcgtttctgagtttcgcagcggcgctagattttattttatgtggacaagcgagctttcggggtgcgctcgtgcagaaatattttgcaacgtattttg

SEQ ID NO: 37681 - DNA, 308 bp, Gossypium hirsutum
  Clone ID: LIB3135-043-P1-K1-F12
gcgcaattcggcatatctttaccagatctccaccacctcaccaggctgcagtcgagtctatcgccgcacgcgcacgggcttcgccaccagctcgaccacggcgcgcggccgaggatcgccggcggcctcatcgtcggccacccggcagctcgggacgacatctcgtgcttgctcaccattggcaccgccccgcacaagaaaccatcagacgtcaagtcggccgcggcggcgccggcgccgcagctgatgctgtttgggaaaccgattctaaccgagcagcaaatatttttaggctttcggccgttgcc

SEQ ID NO: 37682 - DNA, 365 bp, Gossypium hirsutum
  Clone ID: LIB3135-043-P1-K1-F9
ctcggcacgcaggctagcagcacagcagcagccagagccatcccctctcctcgctgcgcttcgcttcctcggcgccgattcctcctcctgctcctccaccctcgtccgtgcccttccggcgcgcgagctcgcccgagatggcgaacgcgagatcgggtgtcgctgtgaacgatgagtgcatgctgaagtttggcgagctgcagtcgaagaggctgcaccgcttcataactttcaagatggacgacaagttcaaggagatagttgtggaccaggtcggggatcgcgctaccagctacgatgacttcacaaacagcctccctgagaatgactgccgatacgcgatctatgatttcgactttgttact

SEQ ID NO: 37683 - DNA, 297 bp, Gossypium hirsutum
  Clone ID: LIB3135-043-P1-K1-G1
agttaaaatgatcaaatacccgatgtttttttagaaagtacagaaaacataactgtgggtatgaatctatttgagatcgacagaaaaacgatgatcgatgtacatgtatcagactgtcaagccatcaactctttatagctgtttcaatcacaaaggctaatctcctggaaaaaacagtgattaacctaaaggcgaaccacgagggcatactccttagacatgatatgagtatcatcaacgaggaccatattcatatcataactttcattatcaacctccttatggaggctacccttt

SEQ ID NO: 37684 - DNA, 303 bp, Gossypium hirsutum
  Clone ID: LIB3135-043-P1-K1-G11
atccggtcgacccacctcggcagggaataaaaacagtggcagtcaaccagctgcaggggctggggcctgcactgcaatgcgggcagctgtttacaaacactgtgtcttgatcgttgttaatcacatatgtgatggcacaagcaaacttaaattggtgctccctgtacattaacctattactgtcccaaaactcgagtattatgatctgaagttgtctatactgaaccttaacaatatggctgttattcctgtcttatcaggctatggagttcatcaaaaaaaaaaaaagggcgcgtctaagat

SEQ ID NO: 37685 - DNA, 273 bp, Gossypium hirsutum
  Clone ID: LIB3135-043-P1-K1-G12
ggaggccattccaagttatgatgatccatatatcaaagtgccaagagtgctgaacagagaatgatctgtagcatgtatatcagaattgttagaatattaatactctacaatgcagcatggttaaacataatgataaaatttgcagaaagattgaacgagtcaccagcaagcttaattgattctgtgcatttcaatttgataatgctgtgattgaacagagcaatcagcaaccttgcattgggacaggataacaggaaagatttgggagatcta

SEQ ID NO: 37686 - DNA, 387 bp, Gossypium hirsutum
  Clone ID: LIB3135-043-P1-K1-G5
cccacgcgtccggctaaaatgatcaaataccccacttcattcaacagttgcttcacaaacggaaagagggtgatcatgaaaagaagtttaaaaaaaggaggagattgcttgagacccaagccacaacgaaccctatagaagaacctatggacccaattcaagatgaagagtttttggtttccatggatgatagggttgtaccagagatgtcaacaaatgaaagaggtagatgtgaatgattcaaagatttatgttgaattaaagcagttggtgaattggaagccatgtagctagggtgggtttccaagtgagccagtggagcaaactggctgttgaataatatatacatatttttgcgtgtatgtatatgtaatgtatatgaatgga

SEQ ID NO: 37687 - DNA, 191 bp, Gossypium hirsutum
  Clone ID: LIB3135-043-P1-K1-H10
cacccattcctgcaattacgtcaaaccattcaaagttttacatagctctgaactggttcctgacagcagccagttttagtctactctttatttcgctaaataaactccgtctgctttgtccctcgttaagaatgagctttgagttttctgtactgcaattgttggagcttcgcctgttttcatattggaat

SEQ ID NO: 37688 - DNA, 362 bp, Gossypium hirsutum
  Clone ID: LIB3135-043-P1-K1-H11
agaaggtgaagctctccgtgctgcagttctataaggtggacgacaccactagcggggggacccgcctccgcaaggagtgccccaactcagagtgcggcgcgggcgtcttcatggccaaccacttcgaccgccactactgcggcaagtgcggcctcacctatgtctacaaccagaaggcgtaattgcttgccccgatttgctttatccgcctaccctatcgagcatccagctgttggttactcgaactgtatctcatgtacatctgtctgaggttgaaacttaaatggagcagtagtatctgacatattggtacccctgttactgaattgacgtgatgctgagtttaattttgttttcgtatc

SEQ ID NO: 37689 - DNA, 234 bp, Gossypium hirsutum
  Clone ID: LIB3135-043-P1-K1-H12
attcccgcatagacacaacacgtctcttcactcttatcttaccatgacattgctggttttgttcatactgttactgcgtgatgttatacccagagctattggagacacatctcaaacctcataccatctgcaacgactctagaagtactgccgaataacgccgaacaccatgtcatttacatcctgataaacacacttaatgccgcccaccaatttgccttgtataacaccatc

SEQ ID NO: 37690 - DNA, 386 bp, Gossypium hirsutum
  Clone ID: LIB3135-043-P1-K1-H3
cctgaattcaagagcaagcttacatatctgcctgtcaacttcttcaagatattaccatggaagtcagacactaattcgagaacctaatgttacttccatcattatcattcgattaatcaggatgggaataaagatgattcgacgaataactttcagcacatcttacctggagatgggggagagaagagcaatctactaccccattacaaagaatctcacttttcctggtccgaatatgcactttcacagctttcttcagattcatctatgaaaccccaccattcttttcggacgctattcaagatattgctttagatatcatgtgtactttcatgactgaaagcttattatgtccacatgggtgctttaaaggagtgaaaaaggtg

SEQ ID NO: 37691 - DNA, 275 bp, Gossypium hirsutum
  Clone ID: LIB3135-043-P1-K1-H7
ctttccttaaaaacaagctcaatcaatttccccattaaccctaaacgaaaatcaccttgaaaaaaaaccacttatttttcttcacctctaaacgacaacaacaatggctggcttcaagaaagccactgctttgattcttacagtggcttttcttgtgaatcttgctttaatggatgatgctgatggtgatgattatatcaacataccagtcaggaaacataatgctttgtagcagcgtatactttgatggttacgttcctactgttctaaaataa

SEQ ID NO: 37692 - DNA, 365 bp, Gossypium hirsutum
  Clone ID: LIB3135-043-P1-K1-H9
tgcagttcatctctcccgaatcaagaggctggtttatggggccaaggcggaggcggccatcgccattgggttcgacgacttcattgcagatgctctgagaggcactgggttctaccagaaggccaacatggagatcaagaaggccgatggcaatggcgcgctgatcgccgagcaggtcttcgagaagactaaggagaagttccagatgtactgatgcttggctgaagagggatttcggatttgtacaatgctcacccagaaggaataaatacatcgcccaaatgtccattgtttcgaaaaaaaatttacctcaattccaatgcttagcattctgatgatgtctgaattccttgtaaacagacaca

SEQ ID NO: 37693 - DNA, 177 bp, Gossypium hirsutum
  Clone ID: LIB3135-044-Q1-K1-A12
atttcaatcgaatgtagcaggtcagagtcaaacagatctaacgaactcagtgccgagtgacagcttggtgcatcctcaaccaacaagccaacctcaattgaatgaaacacgtcagtaccagactctgattcatcactcgaactctcagcatactgggcaatttcaatcaaatgtacc

SEQ ID NO: 37694 - DNA, 448 bp, Gossypium hirsutum
  unsure (1)..(448): unsure at all n locations
  Clone ID: LIB3135-044-Q1-K1-A2
cccacgcgtccgctctgaggcaaaatttctgagaagggccactttcttgaaacataatctgtgggtgacgccgtattcacgtgaagaaatgcatcccggaggggagtttccaaatcaaaatccacgtgtcggggagggattagctacttgggttaagcagaatcgatctttggaagaagctgatatagttctgtggtatgtctttggagtgacacacattcctcggctggaagactggcctgtcatgccagtggaacgcattggtttcatgctcatgccacatggtttctttaattgctcaccagccgttgatgttcctcctagcgcaactgatctggagctcaaggacactgacattgcaacaaagcctatccaaaacgggataattgctaagctttgaattgatcttcaactcggattntagcaaacattatgctttgcagtttgc

SEQ ID NO: 37695 - DNA, 360 bp, Gossypium hirsutum
  Clone ID: LIB3135-044-Q1-K1-A3
ggaggacagcctacgttgtcgtgacagccgtggtagccatgattttcccattcttcaacgggttctgtggtcttatcggggcgggctcgtcttggccattaacagtctacttccccatagagatgcacattgctcaaacgaatctgcccaaatactccttcaggtggacgtggctgaaaatactaagctgggtttgcttgattgagtcgctcattgctgcagccggatcggttcacggactgattcaaagcctcaagacgtataagccgtttcagactcaggaatgaaggcattacggatccttttgcctacagtgctttgattgtatgtaaaatataagaaattgtggacaactgtaat

SEQ ID NO: 37696 - DNA, 296 bp, Gossypium hirsutum
  unsure (1)..(296): unsure at all n locations
  Clone ID: LIB3135-044-Q1-K1-A7
nccacgcgttcgtttacacctattatctttattggtttgacgcttttacaaatagatcacggttctatataacttatgaatcttctaatcagtctatgttgatatactatgaattagattctcaaggaaaattcgttttacgaaaataatatgtcaagaaagtggactgtagtaaaaatcaccctactattcaaacagattgcgatgtttatgggaactgtagagcattcattatttgtgattcaatgaaacgaaccatctgcagttgcttaaaaaggtttgagcctacccatata

SEQ ID NO: 37697 - DNA, 447 bp, Gossypium hirsutum
  Clone ID: LIB3135-044-Q1-K1-A8
tcgaaaaagacgactcttggcccccctttatcctctcggatccgacggccacgaacggggagaggcctccgacggcaaacccgaaaggcgtttcaagtgagccccgctcccttttgtttcttatttattatatgtaaaaaaaaagaaaaacaaacagaaagagcaaacaaagggaaaaaaatcgaatctaagaaaaaacctccgctttgtattctgttttttcaaatcttttttccttcgtattttcccttctattttcgtatctctttacaccgaattcccccccccccctttacatgatttaaatcggcctttaaatagccgaaatggaaaagataaatcaacaaaatcaaaaaagagatttattctgttttgttggcatgatttttgctatcttgttgctgcaagtactgttggaggagactacgcgcgacgtggaggcgcaac

SEQ ID NO: 37698 - DNA, 268 bp, Gossypium hirsutum
  unsure (1)..(268): unsure at all n locations
  Clone ID: LIB3135-044-Q1-K1-B10
caaattcttaattaaaattttaatattttacccacggaaatcccctcaggaccctgttaaactattccttactctcacaaaaccatcttctttttcaaatctctgcttcatctactcacaaattaaataaaaactttctcaaacccttcattatcttcaactacatcttaatttgattattattttcaacaatcctcctctggctctcaaactttcatatttttctaagataaaaanacccacatctaaacacttgctttactttctt

SEQ ID NO: 37699 - DNA, 359 bp, Gossypium hirsutum
  unsure (1)..(359): unsure at all n locations
  Clone ID: LIB3135-044-Q1-K1-B12
ccacgctctctcatcacccttccttgtacctgacttgtcagagagataacccggaccgttttttaacttcgacccaaacccccaacttgagatgctattccattaccttaacaactccttgaagcttcgggctggttcaagggaaagttcaccaataaatgattgggcccatggatgggctcattcgacttatgcgcgaggcctggtcctaaaaaaattnnnnnaaaaaaaaaaaaaaannnaaataattgaaaaattttgtttttttttttttaaaaattttnaaanaaaaattagggggggggggtagaggttttttttttttttttttggggggttttttatggtatgtaaatttt

SEQ ID NO: 37700 - DNA, 311 bp, Gossypium hirsutum
  Clone ID: LIB3135-044-Q1-K1-B3
ctcaaatatcaaatccctctaaaaatcctcttcatcctatcaccacccgaaaccatggccgctccttgtccactctaataaaatgtctacattgccaaactctcctagcaagcctatctctactaggagattgtcaagttcatggagaacgtcttcttctccgtccccgctccctactaactctccgtctaggaacgtaacctcctctcttttgcctacaagaacgtcatcagctcccttcgtgctttctgtaggatcgtttttttcatttagcataataatgaatttcttttcatctcctaccacttttt

SEQ ID NO: 37701 - DNA, 338 bp, Gossypium hirsutum
  Clone ID: LIB3135-044-Q1-K1-B4
tgaagattccacctctatctatgttcacagttcatattgtttgaacacttgttgcagtctgggatggaccatatcatcatggttgctaatggaaaaaattcccaatctttgtgataccttcttgttaccacatgacagtccattgacttgtccaatggaccgcgtgttttttgacgcatcccttatatggtgacttttcggacctcgtaaaatatttggaacaaaaagcgaatacgggaatgtcaatactatctttttcagtggagctctatctcctttcctagtatggctggcacacaaattattctcagataaagaatggatccgcctcattcaca

SEQ ID NO: 37702 - DNA, 156 bp, Gossypium hirsutum
  unsure (1)..(156): unsure at all n locations
  Clone ID: LIB3135-044-Q1-K1-B5
gaagtgaggtggcaggtangtcatttgccaatgatcggggtttaggtgttcaatggaccagttattgattccagttagatgttcaataaaccatttattcaagtgaaaatattcccggaaaataagaatgttgctgccgtacggcattgaatcttg

SEQ ID NO: 37703 - DNA, 307 bp, Gossypium hirsutum
  Clone ID: LIB3135-044-Q1-K1-B6
cggaatatatgctccctgttctccaggcctttcttgcatcttggacatactcccgcgttggtgtaatcttttgattcttagattcactagagtaggcaaataatttaaggtggctctcgaaactgtaataagtatttttgaagggaggtcactatcccatagcttgtaactattattagtaagcaagttaccatgtaataacaatttatacccacttcgcactgagtattcacctgttgactcccccctccaagccagaaagttgtcgtggggaattgtagtgagtgggatttggagaattttttgg

SEQ ID NO: 37704 - DNA, 410 bp, Gossypium hirsutum
  Clone ID: LIB3135-044-Q1-K1-C12
aaggttataaagaacctgatcctgatgctatttcaaatgaaatactacaagcagagccggagccaggtgataagctattaccacaattgggaatatccaatatgaaaattgatgagccacatctggatgatcaagaattacagagaattcaagacactgtgactggtgtttgtagccgtctgcaaaaggccattgagatgttgcgggctgaagtcaatcccaccaaggcaactgttgttctgcaaactctttttaagattattagaaatgtgattgaacacccagatgaaatgaaatttagaagacttcggaaggccaatcctataatccaaagaaatattgcaaattacaaagctgccatggaaattcttcttttgattggtttcagtgaaaatgttatatttgatgaa

SEQ ID NO: 37705 - DNA, 236 bp, Gossypium hirsutum
  Clone ID: LIB3135-044-Q1-K1-C5
cccacgcgtccggaaaactcggtttcctcttatttgtaagcttgctttttttttgatgatgtccacttatgtcggcagttgttgcctatttgcctaataagagtctgctattatcttctaagttgtcaacatttcgaattgcttctcctctatatttaaaagaagaatcccatgactggtgagtgttggaaacttaaaaaaaaaaaaaaaaaaaaaaaaaaaaaaatattgggcaa

SEQ ID NO: 37706 - DNA, 414 bp, Gossypium hirsutum
  Clone ID: LIB3135-044-Q1-K1-D11
gctgttgataatactggtaggactgtggtattgggattggatttcgagacaaatttgattggtatgcctgtttttggtggcgataagaagtttttggttgattcaaagggtgagttattgttggttgatatgtatttgagcattgaatctgagccaggttcgtcttcttcttcggccggtttcgggttcgtcgaggagtattttgaaaaccttgctttgtatatgaacgagaggatggttaagtttaaggtttttaagttggatgatgctggtaagcagtgggttgaagctaaggatttggacgatcgtgtgttgtttttaggtgatggttgcaccttttctgcttcaatagaagatttatccgtgtgtagagggaattgcataatctatgtggataatttcttttattcgctc

SEQ ID NO: 37707 - DNA, 190 bp, Gossypium hirsutum
  unsure (1)..(190): unsure at all n locations
  Clone ID: LIB3135-044-Q1-K1-D2
cttttaccctttttttctaagatactctgattttgcattgttttcacgtgcttatttctggttttgtgctcactgatgtaagattgaattactttaaaaatgttttctgctaatgggtattgtttagcactcttcagtctnaaaaaaaaaaaaaaaaaaaaaaaaaaaaaaaaaaaaaaaaaggacgacc

SEQ ID NO: 37708 - DNA, 300 bp, Gossypium hirsutum
  unsure (1)..(300): unsure at all n locations
  Clone ID: LIB3135-044-Q1-K1-D5
gcgcccacgcgttcgctaagtgagttttatgatttcctgcagtatgattatccgcatgtgtccgtacatacaagcaatggtagagaaacaaggtttatcatcttccttgcaaaaataaatgtcaactttcacgtaacgcaattccgagaccttgcataacatgattattattgctagttattactctttcgaccnaaaaaaaaaaaaaaaaaaaaaaaaaaaaaaaaaaaaattatataatnaaaataaaaaaatattattaataataaaaaaatattcatttaattaaaaaaataaaaa

SEQ ID NO: 37709 - DNA, 443 bp, Gossypium hirsutum
  unsure (1)..(443): unsure at all n locations
  Clone ID: LIB3135-044-Q1-K1-D7
gggtcgacgccacgcgtgcctnggtttaacatccccatggagttttgtccttctaanggcggatgtcacaacatgcggtggtctgctgacatcaacgcacaattcccaaatgagttaaaagctcctggtggctccaataacccatgcacggtgtttaagaccaataaatattgttgcactcaacggttccgcacctgtggacctacccgccattcaacgttttttaaggacctgtgccctgattcatacagttatcctcaagatgatccttcgatcacctttacttacactgatccttacaattacatggtcatgttttgcccccgaggctcacctcatatacacatagtctgaacttagagccaataaaaataaatgcatcatctctttttctagataatatgcgccttgtaactaaaaataaaaaaagtcattttttcttc

SEQ ID NO: 37710 - DNA, 447 bp, Gossypium hirsutum
  Clone ID: LIB3135-044-Q1-K1-E3
gtcgaaaactggtacgtatataaatctcgtgtcaaattcaaatctccgagacgaacacgggggatagtcaataaaaaattggcgacgatggcgagggcaagctctggcctcgcgtacccggaacgattctatgcggcggctgcttacgttggcttcgacggatctcccaattccaacgacaaggacattggctccaggttctccaatgacgtcgctttgatcctgtacgccttataccagcaggctactgtaggcccttgtaatgttccaaaaccgagtttgtggaatcctgtcgaacaaggcaaatggaaaagctggaagcagcttggaaatatggtgtctgcagaagctatgcgtctctttgtgaaaattttggaggaagaagaaccaggatggtattcacgggcatctaactctgttttggagcctgttacagatgtacaaatg

SEQ ID NO: 37711 - DNA, 381 bp, Gossypium hirsutum
  Clone ID: LIB3135-044-Q1-K1-E4
gggagtagcatcaggcgaagattagtgaccttaggttaggacaaaatttatatattctttgtgcaaattgcacgtgcagtggaattgatgtggggttctcaagccggggggtgtttttcctgtctttggtaggagaaccttagtgtagaaaatttggattagtgacttttgtttctgttggtatattatttgcttattctatacatatatattcattgaatgtatatgccaacgtaacttgttctgtgctttgtagtttaagttaagaaacgaagtcctttgattgggttgtaatttttagatttccactaagttagggagagaatgattgggttgtaatttggcccatattgatatcaaatttatttcaattctttcttt

SEQ ID NO: 37712 - DNA, 379 bp, Gossypium hirsutum
  Clone ID: LIB3135-044-Q1-K1-E9
caccctttggccctctctccttcccctctggttcagtcaccggaccgtccccgtctgccacgccggcgaccgtcggccaccgtcggccaccgtatccggccccgaaagcggtggccggagtttaaaaaaggtggatgaggtcaatggtggcaggtggagcgacggtatggtggctgatagaggctagggcgtctgacctagggttttttttagtttcttttttttaattgttgtgggctagggttaaaagaattttgggctgcattgttttgggcttagtgggtttaggttcgtttagggttagtgggttggttgatgggtttagctaatgttggggtttgggtcttgttttgagttagtgggtttaatttaggtgggg

SEQ ID NO: 37713 - DNA, 240 bp, Gossypium hirsutum
  Clone ID: LIB3135-044-Q1-K1-F10
caacttgaataccgacaaatttgtttcagctgtagaaatgcaatggggccggggtgtatctcatactgcatgccttatacacatcattctcctttataagcttgagaggattgagaaccattcattaaccctaaagcaagacgaatatctacgtcgaaaaatagaaccaaattcgctaatattgtgaaagatcgagagactaaacctacacacgacccagattaattctgaactctgccc

SEQ ID NO: 37714 - DNA, 156 bp, Gossypium hirsutum
  Clone ID: LIB3135-044-Q1-K1-F2
acccacgcgtccgcccggcacatattgcttcttacaggaaacatcgctgttatattctctcataatccacctttgtatctgtgtaaatattaaaattccccatactcttcaaaaattttactatacctttcattataatcttttacgtctttctga

SEQ ID NO: 37715 - DNA, 383 bp, Gossypium hirsutum
  Clone ID: LIB3135-044-Q1-K1-F4
cgggcgacccacgcgtccgcccacgcatacgccacccgtacagaaatattaaaattttgctcagaacttcaaccccatgcgctcagtgtggtcaaatctctccaccatacctgatgcttaccatagccctatagactttaactcaatagattccaactcttgttcttactcttagcattgattgggagttacaatattgtcaactgcacccacaccagagctttacatcttttataatcaacaatactccccacatactcataaaaacaaaccttacccacataatacatttacaatatagaagaagaacatgttttcagaatcaagtgtacatctagtgaccatagcccaagccatgcactggttcgaactttctgtgtttt

SEQ ID NO: 37716 - DNA, 337 bp, Gossypium hirsutum
  Clone ID: LIB3135-044-Q1-K1-F6
cccacgcgtccgcaagatgaaagggttggtgacgatgaagatgttgtggaagaggtggtagttagttcggatgaagatgaagatgaagatgaagaagatactgccgaggaagatggcaatgaagagcagctaggtggtagcaaacagcagaacaagaagcaaaaacctaagaatttatcaaacaagaatgtaagatctcatcatcacgcaaaaaataataaatcaaagaagagaaaaagagcgaagctaaattaaccaaatcttgtaactcatcatcagctggagctgctcttttgtttatgtttttatagataatggcatttcaaacttatttgag

SEQ ID NO: 37717 - DNA, 456 bp, Gossypium hirsutum
  unsure (1)..(456): unsure at all n locations
  Clone ID: LIB3135-044-Q1-K1-F7
cgacccacgcgtgccgttgaaggcaatcttttctttattctcccattttaacaanggacgttttgttgaggaaaatgccaactacaaatgccgatattgctcaacccatttcctgccatcaataatattgcattccacaaactaagaacactgaaaatataataaaactacatgaaaatgctgatttgaattcatcatcacctatcgatgaagacttggtttatagcaaggaggatgatgaactttaatctgcaaaaacttacatggattaagtgatggaagaaaatgaaacattaaagaacatgttggataacatccaggagaattacaagtctcttcaattaactttctttgaaatccttcaacaatgagctgtcaagaaatctaaatgttcatcaatttcttcggatcacaatgattaaccagttgttgtaaaacctgaacttgtttcacttt

SEQ ID NO: 37718 - DNA, 345 bp, Gossypium hirsutum
  Clone ID: LIB3135-044-Q1-K1-G4
ctcttattggtttaaattctgcccttgaatcccattaattactactgagtatgacattgggcgtacgcacttcattatgagctcaatccacctattgcaaaagccttgcattttcatcatgctttcaaggtagttccattccattctgccataggctttgctcatatccaattttaaagcaaaataccctgtgcctcctcttttcttttctttttttgaaagagtgtagtaattcataagcaatcattatgttgtcagttatttgtcttcctaggacaaaagcactttgtgtttcttcaatacataagtgtagcacccttcgaaatctattaaccactattgttt

SEQ ID NO: 37719 - DNA, 421 bp, Gossypium hirsutum
  unsure (1)..(421): unsure at all n locations
  Clone ID: LIB3135-044-Q1-K1-G5
tttaaaaaattcttcattttcttgttttgtcttcaaattaaatattttttgcaccattaaacatatcttcgtatggttcttaatattgaattttgcaaattctcttttttgttgtttagatctattatctttaaaattaccatctttatgctcataggttgaataatttgagcccttttttgaacaccgcatctttctatttatgggctttgatggtaaactcactccttgacttttcattactgtttcacctctaatataatctcactttcattttatacacataaattttttacccctttcttttctttttccttttggattctcataacactactcttttaaataatttgttcatattaaaaaaaacaactttttttttccaaaaaaaaaataancccacttatattaaacctttttc

SEQ ID NO: 37720 - DNA, 398 bp, Gossypium hirsutum
  unsure (1)..(398): unsure at all n locations
  Clone ID: LIB3135-044-Q1-K1-H10
caaagattgcagaagctatatagcatgcgctttcatgatggggtgctaaagtctgtaattgggtatggatgtggttggtttatgtgggttggcangactgtgttttatgggcagtacaaatgcactggaccaggggcaagctttgcaggcagggtttcatggtcaagagaactgacagatgaagaagccaaaccttttctttctcttagtttcattgatggctccgaatggatcaaattgtaatcatcaaagaagcttttgtacaatctaaccaacaaaaataatacatttctacatgaaggaagaatattataatcaatgataaaatcgataattagaatttggaacccnnnnnaaaaaannaaaaaaatattattaaatataaaaaaaaataaagg

SEQ ID NO: 37721 - DNA, 219 bp, Gossypium hirsutum
  unsure (1)..(219): unsure at all n locations
  Clone ID: LIB3135-044-Q1-K1-H12
aaccaaaaanaattctgattcaccattacaattcaagtagaaagaaccccaccgtggctgttgtcattttcaacaaagaaatgcctacctactcctttaaacattactttcttccagaataatatcaaatctcttttccattgcaatttgggttaacttccgttccctctcctttaaataacaactcatcttcacacttctttttcaaataataattct

SEQ ID NO: 37722 - DNA, 381 bp, Gossypium hirsutum
  Clone ID: LIB3135-044-Q1-K1-H2
cccacgcgtccgtgaccacatatcataaggctctctgaagttctttcttcgaatacatcgaggccagtgtatttatatccaagtttttctgctagctcagatgagaaatcatcctgccgtctctgagcctggtcagtgctcgatgtttctgtaagttttgtattttggttaatcgttattcatatttttcttgtgttgtgtatcttatgttagttcatctcgacgaaaatgtctgtgatggccttcatgtcatttccttttacagtagatccctacaatttccttatctctttcaacccactgttaaattgtttgtttttcctatgaatggtagtattatcatgaacactcaagctttatgaaatatgatcttttcaaata

SEQ ID NO: 37723 - DNA, 347 bp, Gossypium hirsutum
  Clone ID: LIB3135-044-Q1-K1-H3
gcaaaaatccttatgtaaacggtcgtctttctatggagttctagtactttcgtttgaaattgggcttgacttttgatttcgagtttcacattcttcatcatcaaccgatgaatgattttgaaatgattaactaaatctcaaaataattttgtgggaaaaaaaataaataaaaaaaaaaaaaaaaaaaaaaaaaaaaaaaaaaaaaaaaaaaaagaaagaaaaataaaaaaaaataaaaaataaaaaaaacataaatacaacttaaaaaaaaataaaaaaaatgggggggggcccttttaaaggacccaattttacttccccgttcatgtcaaaaaaaacttttttta

SEQ ID NO: 37724 - DNA, 292 bp, Gossypium hirsutum
  Clone ID: LIB3135-044-Q1-K1-H4
gacacaatgaagacagcttcaataatatcaatttctgccacaacctttttctatctctgtggtggagcgcttggatatgcagcctttggagataagacaccagggaatctcttgactggttttggattttacgaaccatattggctcatcgactttgctaatatgtgcattgttcttcacctagttggaggatatcaggtttacagccagccactatttgcaaacgttgagaaatgggtctcagtgaaatttccggacagtggaatcatacacaaggatttcaagttgaaac

SEQ ID NO: 37725 - DNA, 365 bp, Gossypium hirsutum
  Clone ID: LIB3135-044-Q1-K1-H5
cccacgcgtacatcctctcttacaccatcattctgtttatcattatccaccactctcacctaaaatggaacggtttttattaacatacctttcacattacttatcaattttctgaaaaactatctaaaattctcacactaaacctcaaaatactttttaaggagctcaaaatctttcacaatttttttacaaatattattacaattattataaacattcttctcaccaatcccactttttcttagaatccacctctttaaccacttcttgtactgtacatgcacaagaccgtccctcttactgttattaatagcgttatcaataaccttccaaccaatgctccattcaccacttatactaccaaa

SEQ ID NO: 37726 - DNA, 210 bp, Gossypium hirsutum
  Clone ID: LIB3135-045-Q1-K1-A10
gacccacgctacccactcattcacttgtcttggaaatttctacttaatcgaacaccacttatttcctgagcatgcgtatctttcatcatagcctactcatcttgattctctcacactaactacagtcacctatcaagctattattaacgctattatacaaagaaaccctatctcatcgatgcacattaatcttatttttgacattgcttt

SEQ ID NO: 37727 - DNA, 399 bp, Gossypium hirsutum
  Clone ID: LIB3135-045-Q1-K1-A3
gtctccctctctctcagcctcctttcccacaataagcttaagctttcggccatggttgccaccgtggcttcgccgtggaactgccgcgtctagcaaccagcatcgcacgaaaggggctattttgagcctcccctttgagccctgttccaaggccgaatccttcaggcccgaagtttgaaggaaaagagaaacccgtgccctccctcggtccaatctccgcggccataaagggcttccggcgagggtatcagtagggcaattctgggtacggagcctgtacgagctgtggatgtggcgcagcgcgtggaggcgtggtacggttgctgcggcgctgggaatttctggaaaccatatgagttttcctgttctgatatttcttggtgggctgcctcgtgattg

SEQ ID NO: 37728 - DNA, 150 bp, Gossypium hirsutum
  Clone ID: LIB3135-045-Q1-K1-A4
ttgtattccttttaatgcccttcttacttttactttaacctaattgcccttaaaatggggctcgcgcctttattaaaagtggccacacctcctccctgcctctaccttaatgcaaggaattataatccccattaatatcatataccttct

SEQ ID NO: 37729 - DNA, 434 bp, Gossypium hirsutum
  Clone ID: LIB3135-045-Q1-K1-B1
ggcgatattagagatgagagtacatatggactgtgaaggctgcgcggtcaagataaagaaggctcttggaaaactcaagggagtggacagtgtagatgtggatatgaggatgcaaaaggtaacggtcatggggtgggcagcgtcagaccagaagaagatgttgaaaagagtgagaaaaagcggaaaaagagcagagctgtggccgtatccatacaaacctgacaaccaattttactacgaatactatgaaagacaacccacgattacttaccatgcaaccggccattcatcgtcctactactactacaagcatgggaatgatggccatgatcatggttactatcagccaccaccttattcaactcttgttgatgaacaagccagctctatcttcagcgatgaaaaaccacacgcttgctccataatgtgatata

SEQ ID NO: 37730 - DNA, 258 bp, Gossypium hirsutum
  Clone ID: LIB3135-045-Q1-K1-B10
gaaaacccgggccgacgcacgcgtccgctcacgcgttcgttcaataatatatttccgttggggttctacatcttgctcagggtacctgtcggttcttacattgatgaatgaattataatttattaagatcgtgaagggaatcattaaaacaatttcaaaatcattacacatttaataataacaatctctattaatatttgttttctgtgtaaatgtaaaaattgaaaaaaatccaattaatattttttaatctttaaa

SEQ ID NO: 37731 - DNA, 229 bp, Gossypium hirsutum
  Clone ID: LIB3135-045-Q1-K1-B3
gcggccaatcttaaacccacacatacagatcgtttatgttttctatcccaagaaaaaattaacgagggtagattatttacaaagaatccataacaaaccaaaataaaatattatcatacaaaaaattgtcggtccttctatatgaaccaacctaacatactcattcattctacaaaatatcttttttatagtatcacacaaatttttttcactgttcgttcctatacaa

SEQ ID NO: 37732 - DNA, 368 bp, Gossypium hirsutum
  Clone ID: LIB3135-045-Q1-K1-B6
acagtcgagaaaggcctgaaagctctgtttcagctccaccttctgaacctgtatcgatggggcagtcctgctccctcgtatacctgacctatgcgcttctattatcagcactcctccattcctatctgatcgcatgtctatgtacaaaacagctccatctaaacattatcatcgtcttgcaaatgatcttacaactgctacaccggcatatttctttcttttagttggttcacttgttttcataatatcagacccctttcattcttgattttcatatatccctcaacgcattttatacaactgctgatcagaatattgttgaatggaatatattcgcttataccttttctcctatactacttatggtt

SEQ ID NO: 37733 - DNA, 414 bp, Gossypium hirsutum
  Clone ID: LIB3135-045-Q1-K1-C2
ataaaatttttaaaaaaaaacactaaaaatttttttttttcttcaaaaaataaaaaaattatgttcgagccgctaatgaacaaaataacacactattccaatctttaaacattttctgcattttaccggattcttactttaaaagatgttatattttagttctcaatgatttatgcatactttgttcttttttaattgttgtgaaaccttatttctgtttaaatataacatttttaagagtttgtaaacaaattcatatgcattatatttccttgttatgacttaatttgagagatttatattcattctgtatgatttatcttaaaattgtttattattgtctttaccaacttttattttccaaaacttctttttttttattaccttttatttttttccaatttttcatttttt

SEQ ID NO: 37734 - DNA, 404 bp, Gossypium hirsutum
  unsure (1)..(404): unsure at all n locations
  Clone ID: LIB3135-045-Q1-K1-C4
gcgcgttactctagaatagtangaacaacaggattaattttatctttaaaggtagagaaaatgaggcaggtgtggtgtgggaaagggctaacaatctcagtcaagattttagaatccataacctacttgagctgccagcgattccaactacccctatttataaaacttggactaagcccctgaatgattacattaaaatcaattttgatgcctcagtctccaatggtaaggtgagctttagtgttatcgtaagagattcggacgatttcattgtcggcagtagcggtggctctaaagaaaaaataatgtatgcagaatggactgaaatggaatcgcttgatgaaagattgaagattgctaccacattaaaagtgtcgaatgtaattttcgaatctgattgtact

SEQ ID NO: 37735 - DNA, 417 bp, Gossypium hirsutum
  unsure (1)..(417): unsure at all n locations
  Clone ID: LIB3135-045-Q1-K1-D3
atttcattcattgttataacttgtgcattctaatgggtggtggcaaaggtggaagtggcggtggcagcaaaggtggttgcggaggcagcggtggtggctctggaaatgttggaggaggaagcacatccaaaggcggaggtggggcttcgggaatgatggtagctccggggagtggaggtgcggccattatatcgaggggcgcattcgagagcaaccctcagggatactttgctggtctgcattcaagtgaaaagggcaataaataaataaggaatggtattgctggaaaagcctaagttcatgtattatttatagtaaagtaatgcatgactaatttaataaaatttatggcaatatctcttttttctccnannaaacattttnatgaaaaaaaatttgtctttttggagaccataa

SEQ ID NO: 37736 - DNA, 364 bp, Gossypium hirsutum
  Clone ID: LIB3135-045-Q1-K1-D5
ggccgaccgacgcgtccggaatgacctaactttgaattttcctccgtgtctcatgacgaacttctatatgtcggagaagagctgctccagaatggtgaccgctgccaaacttacatcgcagagaatctcacatccgaaagcctttatcgctgatgttgttcctctactttttttcttgctcagttgctgaaaataaaatgatacatgcatgttctcgcaatggcatataccatgttcttagggcattgacactgtgaatctatgatttgaaatattttgtttttgctacattttaatgcaattaccgattataaaaccatgtggaaatcccagcctcattgaacaaattttcaaattttttata

SEQ ID NO: 37737 - DNA, 367 bp, Gossypium hirsutum
  Clone ID: LIB3135-045-Q1-K1-D6
ggccgacggaggcgtgcgcataaaaatggccagacctgtttatttcctttttccaaggccaactgatatgcaggggatgcaggatcttcttaaggagcttcgataacttgttccaaatggtgctaaatatagcattgatgctcatttgtaccaaactgttaaacacatactgtttttaatgagtgttaccaaccaagctgagaaattgaggcaatgggttcatcgtgtggtatctgatctcaataatacaaggtcattttaaaccatatatggttaccaaactattacaagcttttctttttagattgtaaattaacgaaaagtattccccatcttttttgaataacttacatatccaggacatttt

SEQ ID NO: 37738 - DNA, 263 bp, Gossypium hirsutum
  Clone ID: LIB3135-045-Q1-K1-E3
gagcaaggctactataggcgcacctggtacttctactctggacgcgaagataaacatatggggcgggctctattccggtagccttaatgttcccaaccaacccaaagttgccccagaagaactctatgctacacaattctctcacccacatgaaatgcgtttttacgacactggatagaacctttgagcacttcgtgctacttgtggaataccacacactagaaatgatagacttgtccttaacactgatcactaatgcctac

SEQ ID NO: 37739 - DNA, 191 bp, Gossypium hirsutum
  Clone ID: LIB3135-045-Q1-K1-E4
gcggggaggcatcattgtctttggatcgtcatctctttttatcttcctgttcttcattatttaggagtgtgtattttgcctctggcaattgccctacaattattgtgaaataatgggtccgcatgacaatatatgatctgaacattggtacatcaaataaatgcttcttgccttatataaaaaattttaac

SEQ ID NO: 37740 - DNA, 117 bp, Gossypium hirsutum
  Clone ID: LIB3135-045-Q1-K1-F10
tcttcttgcttaccttctcaaattaatttccactctattcctctatttcgttctccccgatttcctttaacccgacattccttgtctccaatacgctccttaaacccaccacgcttt

SEQ ID NO: 37741 - DNA, 390 bp, Gossypium hirsutum
  Clone ID: LIB3135-045-Q1-K1-F2
gatttatgcatcgtgcttttcaatcgtatgagaagcatcgaggccctcttggaaatgtcaggaaaggagtgttggtatcaatgggttatggtacaatcacagcttatgcattgatgagtttggaagctcgtggaactctttttgtgacccctgggatggagacatacgatggcatgatagttggtgagcattcacgtgatacagatcttgatgtgaatccagtaaggagtaaagaactgtcaaatatgcgtgcagctggcaaagatgaaaatgtgaaactatctccgccaaaacttatgactctcgaagaagctattggttatgttgcttctgatgagcttatagaggttacaccaaaggccatccgattaaggaagagatatctggatg

SEQ ID NO: 37742 - DNA, 328 bp, Gossypium hirsutum
  Clone ID: LIB3135-045-Q1-K1-F3
gcccgtcttcattccactcgtgtacttggatcctttggttatcatgctcctgaatacgcgatgactgggcaattaaatgccaagagtgatgtatacagctttggtgttgtgctgctggagcttttgactggaagaaaacctgttgatcatactttaccccgtggacagcaaagcctattgacatgggctacaccaagacttattgaagacaaggttaggcagtgtgttgatcaaagactaggaggagattatcctcccaaggccgccgccaagatggctgcagttgctgcattatgcgtgcaatatgaagctgattttaagccaaata

SEQ ID NO: 37743 - DNA, 439 bp, Gossypium hirsutum
  Clone ID: LIB3135-045-Q1-K1-F4
taaacgtgaaccaaagaccagggaagctggtgacagtggatggggaaacagagctggaggtagagacattgttgaaggcatcggcttatatattggggacgagtgggtggagcattgtttacaaggcagtgctggagaatgggactgcattcgcagtaagaaggataggggagagttcagtggagaggttgaaggattttgaaagccgcgttaggatgatagccaaattgaggcacccaaacttggtaaagattcgagggttttactggggagatactgagaagcttgttatctatgactacgcctccaatggcagcctcgcctgcaccactaccgcttacagaagatcaggctcatcatcagtttggcatttacctcttgaagcctgtcttaaaatagcaagaggagtggctcggggactggcctacattcatgaaaa

SEQ ID NO: 37744 - DNA, 430 bp, Gossypium hirsutum
  Clone ID: LIB3135-045-Q1-K1-F5
cccagggaggatttgaaagatgaagttcttgcttcaattccacgaggaacagtacccgttggaggacctgttgatgcacttccttattacatgcctgcccaacatgcacctcaagttggaactccgggtatgattatgggaaagccggtcatggaccctgctttgtatgctcagcaatctcatccgtacatggcacagccgcagcagatgtggccaccaccaggtcccgagcaacagcagtcatcctctgatcattagcaactctattcatagaagacatgctcctcgagatatctcgagaatgttgtacggaaacggaataaggaggctttgtcttgttgaaaagcatggtcaagattctagctcatagatcagactgtgtaaatatcactctgaacaattttcatttcatttcctttgttttctctat

SEQ ID NO: 37745 - DNA, 257 bp, Gossypium hirsutum
  Clone ID: LIB3135-045-Q1-K1-G5
acgcccacgcttccgcttccacacacttattaatattgctactcatataaaagcctcggggcaggtggccgtttaatacaaatacatctttcttttttcaaacccaccgaaacttgatcaacaaaaagaagaaagcgtaacaccaacataatgaacatctaataaaaaaacattccttggggaaacatatacctaatgaacacaaatatcccgattatcaacaaacctataaggataacacttatccctatccacca

SEQ ID NO: 37746 - DNA, 211 bp, Gossypium hirsutum
  Clone ID: LIB3135-045-Q1-K1-G7
gttggctactgaaacaaccgatgcttaggctcaagtagaagaggccaaatatggatggtgggtatacgtgatccgtggaggttattgaggatacggatggcgcggtggttacggaggatacagaaggcgtggtgggtatggtggtggttacagtggacgaggacgtggacttggacgtttatgttatggaggtggttgtgcctttggatgc

SEQ ID NO: 37747 - DNA, 170 bp, Gossypium hirsutum
  unsure (1)..(170): unsure at all n locations
  Clone ID: LIB3135-045-Q1-K1-G9
cccacgcttcctcccacgcgttctcccactcgtccggaggaaaccaaggttggagctattgatggctatcaagatgtanagcaatcanatagtgcttctttatgttccgttgctcatcaaccttttattttgggaaattgatggtcccgccattgattttcaacttttac

SEQ ID NO: 37748 - DNA, 256 bp, Gossypium hirsutum
  unsure (1)..(256): unsure at all n locations
  Clone ID: LIB3135-045-Q1-K1-H11
ggaggactcaactattatcgagctatgaatctaaactgggaactgatggcaccgggggcgtgattacaaatccaagtaccgggtaagttcatcgtacgcgacctgtacattacctaccacattcctggcgttaaggaatacttacaaaatggcggattcaagaaaaatgtgcctttcttgcaggaactagttgtcaatgaaggagtagcccattntatcaaccaaagaaaagccttaggagattagcatgcacatt

SEQ ID NO: 37749 - DNA, 391 bp, Gossypium hirsutum
  Clone ID: LIB3135-045-Q1-K1-H2
cccacgcgtccgaattattgttaccgatcccgtttctagctgaggagagtgcacttgtgtcggttgaaggtgatatgagtgtgaaagggcacaaggctgacgtgggtgttaatgatatggagggttcggtaggattttcggattcaaacgattttgggtttgtgggtaatgagagtcattcacagggagtgggagatgaggagattccagggtttaatttgaattctgctggactacttgggagaccacaggtaaacaaacagatcaataaattgggaatctttttgggggaaagtttggtacttgaatttatgaactttgtttgtgttaaatccttgaaaaattactgttttagcttgtaagattgatttagtaattgcggcgagtgctc

SEQ ID NO: 37750 - DNA, 273 bp, Gossypium hirsutum
  Clone ID: LIB3135-045-Q1-K1-H8
tcgccacgcgttcgcccactcgttcgtccactctttcgtccacgcgttcgtccacgcgttcggaggtcttcaccaccaccttctgctttaccacctccaccatactattacaagtccccaccaccaccaaaacacgtataggagcccccatacatttacaaatctccttcaccaccatcaccatctcctccttcaccatattattacaagtccccaccaccaccagtccactctgcaccaccaccatactattacaaatgccctactccacca

SEQ ID NO: 37751 - DNA, 322 bp, Gossypium hirsutum
  Clone ID: LIB3135-046-Q1-K1-A10
gcgtccgtttctaaaatttaactttttttataatgaaatcatcgcctttctctctatgtgagggtctgttagttcaatacaatccaatattttcttacctacaagaaaaaggacgatgattaataatgatttctgaggctatccttgacttaaatccctacaatactctttttctgcgcccgaaaaaaaaggaaacatttgaatattcccggtgttgaaagattattatcaagactttgttattaaaatgggggacatgcatcccacgaagctgattaggtacaaatagctcacctacaaaaaaaattttcttttttttatc

SEQ ID NO: 37752 - DNA, 296 bp, Gossypium hirsutum
  Clone ID: LIB3135-046-Q1-K1-A12
gcgtacgcccacgcgtgcgctttttttttaaacgtaggagcatgactaataaataaatattacgacgggatagacatatcacatatgacatacaaatagaaaggacccctcctatttctttttgtttacccaaatatacatggaatgcgctgcaaaacaacacaccatcacagattatttaaccttacctagctactttatatagctgagctgaaaccttgtgccactccttcttacatatcatcatcatcaacctcactgcaccttgttgcaaccaatgtaggggctgatgttgt

SEQ ID NO: 37753 - DNA, 341 bp, Gossypium hirsutum
  Clone ID: LIB3135-046-Q1-K1-A5
cccacgcgtccggcagcttaggcaaccagagcgcagccatggtgaagtaggcgaaggagtcagagaaacccaccaagacccgcaaggcaaggggcccagaacacaggggtcacttcaagaacacaagggagactgcgatcgctaacaggaagtcggccaaggagaaggctaagacgcatgaggaggacggaacggctcacaaacaggccagacccagcagacgcttcagaggtggtgtaggacgtacagctcaggcaaagaacaggcattcgaatggacaaggacgcgggcctggaaaaacagccaaactcattctagacgggccgaagaatgcagagagc

SEQ ID NO: 37754 - DNA, 155 bp, Gossypium hirsutum
  Clone ID: LIB3135-046-Q1-K1-B1
agcatctccttattgtcgttaaaggccagatctacgaccactcttcctacaacgtggttcatgggcgtggcggggctgattccatgtttacagggagggatgcgagcatggcatagacacagttggctctttaacctgacgacctgactgctaac

SEQ ID NO: 37755 - DNA, 298 bp, Gossypium hirsutum
  Clone ID: LIB3135-046-Q1-K1-B10
gcccccgactaatccaccattgcatccaccgacatattctacaccatcgccttctccagcggagcggcctactgatcctaaaccacaaaggagcctagcggctgttcatggcgttgatttttgcaagtcttgcaagtactctgtatccaacaccccattgggagcacatcctatcttgtgcgccgctgtttagtttacatgcgataacaccatatacaagtcactgttcaatgtaaacactgtcaagaatagttcaccttttctgctagcaccgaagaccgtcaccagctttggagcc

SEQ ID NO: 37756 - DNA, 235 bp, Gossypium hirsutum
  Clone ID: LIB3135-046-Q1-K1-B4
ctggattcaactttaggacccgtgggcctcaggaaaaaccaagtttagacaacattttaaatcagggcaatgctccaagaagactacgcttgctaatgaaaatttctaacgtaccaatgaaagtgtctgcaggctgttttgatgatggcaaattgacaagtgctggtctcggtgaagaagaagaagttcaatctactctaactgaggtcacagaagcagaagctaccggacagac

SEQ ID NO: 37757 - DNA, 335 bp, Gossypium hirsutum
  Clone ID: LIB3135-046-Q1-K1-B7
gtctattttactgctagccgaaaaaaattaaaccctctttcctttctctggggcttgttccctttcattcctgcctagctacaatagcacatatgccgatcagtggggtttaaacgcagggtcctttggaacccctagcaagcttttaaccagctgatgaggaatccagtgtcaccataggcaagtcgtttacatgctttaatgtagaaaatgttgaagataacaggcgggctctccgtgagctccgatttacaactcctggatctcttcattacctctgtggcgttattctttttgaagaaactctctatcaaaaaaccctttctgacaagccc

SEQ ID NO: 37758 - DNA, 369 bp, Gossypium hirsutum
  Clone ID: LIB3135-046-Q1-K1-B9
attctggttaagcgaaagggtctcaagttaaaccctatatctatcatgtattatgttagtccttgcagtgctctttgtctgtttattccttggatctttctggagaaaccaaaaatggatgcccatgggatgtggaaccttcaccctgttgtgctaacgctgaactctatctgcacctttgcactcaacttgtcagttttcctagtgatctcacacactagtgctctaaccattcgcgttgctggagtcgtcaaggattgggtggttgttttagtatcggcccttctctttgcagatacaaagttgacagtcataaatttatttggttatggcatagccattgctggtgtggcggcatacaataatcac

SEQ ID NO: 37759 - DNA, 172 bp, Gossypium hirsutum
  Clone ID: LIB3135-046-Q1-K1-C10
cttagctataacaggattatccgttggcgtaacgagaaaaaactatgatcaagcgtcgcgtggacggcttctgtggggcgtgactggcggtgcatctgttagcgcgtgaaagtccatcagcatgcgcactaacatagccttccgtagggtctcacgcctgcttccgggactg

SEQ ID NO: 37760 - DNA, 213 bp, Gossypium hirsutum
  Clone ID: LIB3135-046-Q1-K1-C12
acgctttcgcagagtatgcttttgccttacgtttattgtagtttgttcctactaagggggcagggctctgaaaagacatgatcatacttaccttttagagtatgaattggctcaagacaaactcgatggcgaatgctgtttgatggatacagttatgcagcttgtgactggataaacagtcgagcttgtgatgagtggacacactttggctgt

SEQ ID NO: 37761 - DNA, 291 bp, Gossypium hirsutum
  Clone ID: LIB3135-046-Q1-K1-C3
cttcccaatgcttaaagctcaacaagatgcacatattgaaaaaggctctcgaggaggggttggtatactgacaactcttgtgataaacaacagacagtgtatagggactttggacagacgagctgatattaaggcaattagcgcaggtttacaagagaccacaaagcctgcaatacttttaactgaagatgtacaaactaacgagtgcttagaaaaaaatggtgtttgctgtcaggacaagagtggcaacataactgcatgcacggataccttgcggagaagagtgtgcga

SEQ ID NO: 37762 - DNA, 318 bp, Gossypium hirsutum
  Clone ID: LIB3135-046-Q1-K1-C7
atcattttctctcatccttctgatttttttcctgtctgtacgacggaacggggggggatggaggcttacctgccggagtttgaaaaaccaggggttaagcttctaggtttatcttgctatgattagcaatctcacaatgagtggatcaaagattttgaatcctacactgcctggattcaaggtggcctactcaatcgtgtcacattccaatatagtgatcattaagcaacttaacatgttagaccctaatgaaaaacacttttcatggaacgagctcacatctagagcttttgatatcgtgggctttgataacaagat

SEQ ID NO: 37763 - DNA, 272 bp, Gossypium hirsutum
  Clone ID: LIB3135-046-Q1-K1-D10
acgctatggatgttccgttctgcggagtctactatctcaacttcgtcagattagtatgggggacaggggacggtatggtaacagagtgtgctagcaatgatattagctttgtttagcgagtcctcagggtagatacgagctggctcgcgatcgccattaacggataactttcccacacataggcacattgcgcacacgacagatccgagagaatgattcaggggggtgtgttttaaaatactaagctgggcttgcttgccaatatcacttat

SEQ ID NO: 37764 - DNA, 201 bp, Gossypium hirsutum
  Clone ID: LIB3135-046-Q1-K1-D12
gaccgcacgcgtcacgcgtaccttaagtatatctattggtgatcctttcttatcaaccatcttctttctaaactgggaatgggaacgctccattttttgttccttttacttatcggacggtggattgatttctcaaatgatcctgtggtctgtcggacaattcttcccttttttcctttacttcttgcttcaataactttt

SEQ ID NO: 37765 - DNA, 303 bp, Gossypium hirsutum
  Clone ID: LIB3135-046-Q1-K1-D4
gtcaatcttaaggcatcgacattacatttccaaaggggaccatgttcgacacacaagttcagtgtacatagttactgctatgacacgcaagtgaacggtgaaccctgttggaccatatgatcttgtaaacaagagcgtatgacctgaatcttatattcttgtgcgaagcgtggccgtggtacacagacttgtttaggcaggcactcacatgaaatgggagctaactgagtaccgtgctagagtgaaccttgaccctcgcttcatataacccgcgtcgcaacaaacgatatagtgcctggagcg

SEQ ID NO: 37766 - DNA, 170 bp, Gossypium hirsutum
  Clone ID: LIB3135-046-Q1-K1-D5
gcgacgcgtgcggtcgacacatttcattaggcatgtgactaatgttggggacccaaattcagggtacaaagttactggcatgccacctagtggcacactgctgacggttgagccaacacagcttgtttttatgagggtaggccagaaatgaaatttacttgtgagagtgg

SEQ ID NO: 37767 - DNA, 412 bp, Gossypium hirsutum
  Clone ID: LIB3135-046-Q1-K1-D8
gaaaaccctgcactgttcgacaatctgttcctcaggttcttcgatccccttttcaactccgatgacgacggagagaaagaagatgcggccaccaggtatatgactctttaactcctattttcttttatttttttacactgaatatggaataagtataaaaaaacgaagcagaagaaagaacgaaaagaaaaaggaaatctgcaatcacctttcaagtttttgatttttctaaatctctttctttctatttaatatttttttttgtctttgtattgatattctgtgtgtgtcaactttacagatgctgaaaaatggctttatatagccgaaaaaatgaaaattacaaaagaaaatgtggtttgctcttttttctatttttctttttttggggtcgatttttgctcttttggtc

SEQ ID NO: 37768 - DNA, 419 bp, Gossypium hirsutum
  unsure (1)..(419): unsure at all n locations
  Clone ID: LIB3135-046-Q1-K1-E1
gccatgggagccacaaatgcattttgccgattgacaatcggtaatggaccaccccggcaaaccaaggtcgtgaaccacagcactactcccgagtggaaagaaggattcacatgggcttttgatgtgcccccaaagggacaaaaactccatatcatatgcaaaagtaaaaatacttttgggaagacaacattaggaagggtgactattcagatcgacaaagtcgtaacagagggagtatatagtggtttattcagcctgaatcatgatagcaacaaagatgggtcttccagaacgcttgaaatcgagataatttggtccaacaggacagnaaatgatgaaaacatatgaaaggcgtgacatanctcattcttacaagcaccataatgaatcangtgaggacaatatatangagtttggtt

SEQ ID NO: 37769 - DNA, 417 bp, Gossypium hirsutum
  Clone ID: LIB3135-046-Q1-K1-E2
cccacgcgtccgcccacgcgtccgcccacgcgtccggggagtcggagttggagtaggagtagtaggagtaggagtaggagtaggagtaggagtcgaagcagaagcagaagcaggagctggtcacgtggtcgtagccgcagctacagccgtagtcctggtcgagggcggagccgaagccatagccgtggccgccgcagtcgaagccgtagtcacagctatgagcggaaggatgttgcaaagcgggcatttgattctcctcctggttccaacgaacataacttgcaacagaaggatgttgcgaagcgagcatttgattctcctcctccttccaacgaacagaactttgagcagaaggatgttgcaaagcatgcatctgattcacctggtgcacaaggcaattcagtgcctgaaaataat

SEQ ID NO: 37770 - DNA, 357 bp, Gossypium hirsutum
  Clone ID: LIB3135-046-Q1-K1-E4
cccacgcgtccgagtttatgctggttctccgatcgtgttttctgcaaacagatatcgagttggcgaatcaacccccaaggtcatgctttatggcatctcttgaggggtttcaattcatattttgcaaacacgtttttaatgttctgtcctgctcagcaacggggatgggcgccgaacgtcgcttatcttatgggcattctcccgtatgtgaagactgagaaaccgaagacacaatgacaatcggggggggaactctgaaatataagattcctttccccgctatgggaggtaatcaagaaaagcagtgaacaaagcctcaaggattatttattcattgaagtttgttgtcaggatctc

SEQ ID NO: 37771 - DNA, 336 bp, Gossypium hirsutum
  Clone ID: LIB3135-046-Q1-K1-E5
gaagtcgagccacgagccacgcgacccgtacttgtagatccgtcgaactatgaaaatgacttaggcacccaatctatgggtggtgcgaggaagaggcattaggatatttgctgccaatgcttggtaaatccgacgatgaaggatatggccctatgaaacatcgtgatgactacagcgatgattaatattaagagaatcgtcatcaccaccgctgtatggcccaccaccataagcgccatgaagactatgactactagtcatactggacgttccctctacatattggatatctgcaataataagttattaataaatgatcgaagcatgccaactttg

SEQ ID NO: 37772 - DNA, 314 bp, Gossypium hirsutum
  Clone ID: LIB3135-046-Q1-K1-E8
agccacgagccacgccacccgtcatacattatgctagttcttttataacagtctattgcaaacagatatcggggttggggcatcaaccccccaggtcaatctttattgcatctcttgataggtttcaattcatatttttcaaacacatttttaaagatctgtcacgctaaacaacctggatgggcgcctaaagtctcttatcttataggcattctcccctatgtgaacatttagaaaccgaaaacacaatgacaatcgaggggagaactctcaaatataatttttctttttcccgtttttggaaggaatttaag

SEQ ID NO: 37773 - DNA, 275 bp, Gossypium hirsutum
  Clone ID: LIB3135-046-Q1-K1-E9
tacgtcaccatgcaaacgcaatctgtattctaccaatccttctacattgggtagcgcacgctctattgataatgtacttcccgaaatggactgctcaatatatcgtgtactattttcgaccctctcgtctaatcctatccatatattcgttactactcgcttcatgacactgtttctccatccgcactactacaacccccaacttcttcttctcgaccctttatttttggttgttttcttttactacgactttttcatttaccatacctgataag

SEQ ID NO: 37774 - DNA, 385 bp, Gossypium hirsutum
  Clone ID: LIB3135-046-Q1-K1-F3
gagcaacaaaacagataaacattggatttccaagatgcaaatccagaaggaagaacaggcacgttccagtcttcctggtgaaagcacaatccgggtgataattcatgggcatcatccaagccaaggaacgtctagtgacagattgggaaagctcgtgtatttgcctgactcacttcaagacctcttcaatctagcagagaagaaatttggaaagagagggagcactattcttatggctgatggctcaaaagttgaagaactgaatgttctgagagagaatgatcacttattcgttgtttaaagattaaagtaacttttggcttggtatccatacattgatctgcttaagagatgatgctaaatgtgtaataagttatgcgtcaat

SEQ ID NO: 37775 - DNA, 414 bp, Gossypium hirsutum
  Clone ID: LIB3135-046-Q1-K1-F6
attagaggaaaacaacttctttttgaaaacagactgacttagttcaacaaaaggtgtttaccaacgcaacgaaaagagctttttccaccagtcttttaggccgggcatcctctttctatccatttcatttcaggaagaggaagaaaggcgaagttcttccatccagcaaggaagactagccaagtcgtacaccccattcttcaacccccccctttttttgccattgtcactactggtacctgaccccgtcggctcaacatttttgcaaacaccgacccttactcaatagggcaatgaaaagaggagaacgaggacagctgactaccactaaaagtcagactacgagtacacattgtatgattgaaaactgccgctgcgtactatccggtgcttgcaggtctgactggagccttc

SEQ ID NO: 37776 - DNA, 282 bp, Gossypium hirsutum
  Clone ID: LIB3135-046-Q1-K1-F7
attataggaaaacaacttctttttgaaaacagactgacttatttcaacaaagggtcggtaccaacgcaacgaaaagagctttttccaccagtcttttatgccgggcatcctctttctatccattttatttcaggaagaggacgaaagggcgagttcttccattcaggaaggaagacttgcccagtcgtacaccccattctttaacccccccctttttttggcattggcactacttggacctgaccccgttggcttaacattttttggaacaccgacccttac

SEQ ID NO: 37777 - DNA, 291 bp, Gossypium hirsutum
  Clone ID: LIB3135-046-Q1-K1-F9
aagtaaaataatcttgctaacaagctaaactaaaatgccttgccaaagagaaagcggagtgtggtcgaataaaatgttagcatactcaaattttttttccagtagacaagtttgtttatgtgcaggtgagcaatggtgcaattttactgctttgtatcgacagttccattgcatttctcttttagcatattccaggatgccttctctcgatgtttaacatgggcttagacgatgtaaggattgatgtcatttatatttgtaaggatggtgaaatctttatatgattcatga

SEQ ID NO: 37778 - DNA, 406 bp, Gossypium hirsutum
  Clone ID: LIB3135-046-Q1-K1-G12
gaccaatcccctcgagtttatgaacaagcttttagagtctatgcgggtaacctggcatggggtgtggataatactcgattggaacaaattttcagtgaacatggtaaagtattggaggctcgtgtagtctatgacagggagaccggccgttcgcgcggtttctgttttgtgactatgtcctcggagactgaactgaatgatgccattgctgctctcgatggacagagtctggatggaagagcactaagagtaaatgttgcagagcaaaaaccaaggcgaagcccctcttgagctgaaatgattatagattaagactatatgttgctgatggctttttatttcatatttgccctttcctatttgtatttcttttcattttattaacagttgcgaagctttgtaaata

SEQ ID NO: 37779 - DNA, 169 bp, Gossypium hirsutum
  Clone ID: LIB3135-046-Q1-K1-G2
agtatattagttttggtttgcgtgatttgaccccacactcctccatgcatgccctatttgaagcagtttaccgtagccatgttaagtcaagctggtatttttcaatttgtttagtgggttcacatgtaaacctgatttatcttagttgtcatcttacttttctttgatt

SEQ ID NO: 37780 - DNA, 232 bp, Gossypium hirsutum
  unsure (1)..(232): unsure at all n locations
  Clone ID: LIB3135-046-Q1-K1-G3
gttatagatcgcgagctgccgcccttgctttttttcttttttttggctaggcntggggcacagaagaggccaaacaaattagaataaaataaatcattaaatgggtttttgaggtgataataaaccacaaccatatgccattgatgcctcaattgttcctttaatgaaacgtctcaaaagatatctttaccaacttcttgttatagaatctgatgaaaaattggtcctactg

SEQ ID NO: 37781 - DNA, 392 bp, Gossypium hirsutum
  Clone ID: LIB3135-046-Q1-K1-G5
gatcaattcacgaagaacagttattttaatagttcatggcatattgctcgaagctgctttttgatgctttttggtggaacactcgcattctttatggttttaacagagtacatccttgtttctataacaagcgcagttacagtgacaatagctggggttgtgaaggaggctgtcaccatattggttgccgtattttacttgcatgatgagtttacgtggttaaaaggtgctggactcctcactatcatggttggtgtcagtttattcaactggtacaaatacctaaagctgcagaagggcaaactagaagaagatgaagcggcaatagcgctcacagctaatcatgccgctaagtatgtcatccttgacgagatggaggattaagatgatgt

SEQ ID NO: 37782 - DNA, 233 bp, Gossypium hirsutum
  Clone ID: LIB3135-046-Q1-K1-G7
cttttaacaacatgggggagaaaatcagtactagacaaagtttgtagcagcagcatgatggaggaacaagtattaaggtaaataccaccttttacaccattggtgacattcgagtactcaaacctaatgctgcaaatcaaggaagcatctgataagcgagcccttattttgaaagctattgagaattatgtgttgagaaataccgatagttaatttgtcttactgaaaaactg

SEQ ID NO: 37783 - DNA, 162 bp, Gossypium hirsutum
  Clone ID: LIB3135-046-Q1-K1-H11
gcaaattcttctctcttcaatgcatctgctttagcagaaaaaatccagacattgggccatgttgttattgcctcacctgaaaaaaccattttttcatcactaacaacacctttctatgaaataatgattaaaatgcaattacacccaattacggtcctacca

SEQ ID NO: 37784 - DNA, 374 bp, Gossypium hirsutum
  Clone ID: LIB3135-046-Q1-K1-H3
ataactcttcgaccattcaagctagaagacgccgatgatttcctcttgtttgcaggcgacgatcaagtcaccaattaccttcgatggcaaacactgagctcaaagcaagaagctctggatcacatcaaggatgtatgtattccccatccatggcgtcgatccatatgcaacgacaactgttcgatcggcttcatttcgatctttccgttctccggggaagaagacaggttcaaggctaatattggattcggtgttgcagtcaagtattggggacatgggattgcaacgaaagcagtgaaaatggcagtgcctcagttctttgttgacttcccagatgtggtaaggcttgaagcatttattgatgcacaaaattt

SEQ ID NO: 37785 - DNA, 271 bp, Gossypium hirsutum
  Clone ID: LIB3135-046-Q1-K1-H8
ccatttttcttctttggagacttcttttttactttccccatccaacccaacttgatggattttcttaaatttgaacttccctatccaggtttctttaaagatcaaaaggcgcccttcccttctgatttccatttgaaccccctttccgccagccatttctttaacagcaaaagcttatggaatacccaaatgaatctcttaattttaaaaaagaatattacccttcgaattttttgccccaaatcccacacccgactggatccttacttta

SEQ ID NO: 37786 - DNA, 342 bp, Gossypium hirsutum
  Clone ID: LIB3135-046-Q1-K1-H9
gccagacgtaaactcattcgtactaacacacatacaacgactcgtaagcattactgataggacttaaccccattcccatcaacacatactaatcacatggctacacattaattcaccccatcaatccgcatacgttacaacaaaaccatcaaacacacgcacaaccaaatctatatcatataattccaaggctaagcgtacaaaaagtattacacgtcattccgccaaaaatgccacgaatgccgttacttacaacaaatttataagatttcactttacgctttatatgtaatcagtaacttatctttgtgaatacatggttgctaattcggtgcttgtgtt

SEQ ID NO: 37787 - DNA, 280 bp, Gossypium hirsutum
  Clone ID: LIB3135-047-Q1-K1-A2
cggacgcgtgggtggaaatgttgtttacttggtggcagataagaaaagtaacgaattggctttttccttggctattgctggcgtttatagggagaaaatgtttaaagcttggtagttagatttttgttttgtcgctctactgatgttgttatggtggtatgcgactttgttatctgatgtaattttgtttttattttgctattttgtttgtcttttgacaacagcacagttcgaatgttgcaaaaagaaaaagtatgaagtataactatctggttatttc

SEQ ID NO: 37788 - DNA, 236 bp, Gossypium hirsutum
  Clone ID: LIB3135-047-Q1-K1-A5
gacccacgcgtacggagtgactttactttacctaaccacaaccttttcttttattagatgtgatttattgtaaacgcgggggtttattttacgagttcattgtccccttcacacttgaagaaaaaataacggataaaattcgttgaaacgtttccattcttgtatctatacaatgtaaggaatagtaaaaggaagcatttaaagttcgtaaaaaaatcgaaaaaaatagggttggt

SEQ ID NO: 37789 - DNA, 417 bp, Gossypium hirsutum
  Clone ID: LIB3135-047-Q1-K1-B7
cggacgcgtgggcggacgcgtgggcggacgcgtgggcggacgcgtgggaaaaaactggagacctttaaaagctcttcttctaaaaccctactcccacttcccaaatatcaaaagcgatttgttttctcttcttattcaaatggctccttctttatcattggcacttcctttgcaatccaagaagatttcatgcacaaggcagcagctttccaatatcatatatgtcgtgtttctaattacacttcttgctggctctagttttgccactaggcccggcaaaaccataatttgtggacgatacagtttccatgaccgtgttcccgagaaagttctgagacgggcttttcgattccaaaggacaggatgtttaaacctcttttccccaaaagggattcccctatacccacccttttgggt

SEQ ID NO: 37790 - DNA, 400 bp, Gossypium hirsutum
  Clone ID: LIB3135-047-Q1-K1-B9
aaataaacataataaatatatataattataaataaaaaaaaaaaaaaaaaaaaaaaaccgtgggattaaattaaaaaggtcagctcctctatataaaaccattcttacatacccaaccaaactacaaaatttcctctattattttctcaccttaaaaaaaactctctgtctcttttttaacaactcctttacttttaaaacccttcctttactcatcctatttttttttatatccacatatcccttttcccctctgcttatattatccattaggcccttacaaatctccctttctatcattttcccttcctttttactttatatttacccccccttcttcttctctttttcctcttccttctttttttttccctttccactacttactgttatccttttt

SEQ ID NO: 37791 - DNA, 255 bp, Gossypium hirsutum
  Clone ID: LIB3135-047-Q1-K1-C1
gccacgcgtacagacacatattcattctggaccctgtctctaaagatcgtagaagcaatggaggaagggtgctgatgactttgctaagggcgtcatggggaaagatatcgtctgcatgcaaggaaaggtggaccaaatgaagacaagagacccttatgtgatagatatggcgagggaaacgaaacgaagagagacagaagatgcactgctgatggaacaagaggcccaccatcatatcgcctcaacttaccatgc

SEQ ID NO: 37792 - DNA, 401 bp, Gossypium hirsutum
  Clone ID: LIB3135-047-Q1-K1-C9
gccacgcgttcgctaaatattagtcgttcaatatctaatgaccgtaaatgagtcacgtgggggaatatatggaccactaatatacgtacatggggtatgcttggtcaatgttcatggttgccattttatactcataaatcaattcacaaactgaagcattctccttgaggtaccatgttggggctcacatagattgaccaatctattatctgtacattttgtattcacggaactcttcattgaaacaaatatttgttcaatgaaaacttgtcttaatgttattagcagaatttcttatacaatttttttcctttttcctgcccaaaatttccatattgactatgaaaagaagcattaatggtggttggtaaaataaaaatataaaattaaaaagtgggcgg

SEQ ID NO: 37793 - DNA, 139 bp, Gossypium hirsutum
  Clone ID: LIB3135-047-Q1-K1-D11
cccacgcgtacgtacacacgtacgttttatatacctatatctcccacaaatgaacgggcggggcgtttcatcacatttaatcaaaatttatcttcttcataaaccagtatatttttatgaacttaaacacaccacatgc

SEQ ID NO: 37794 - DNA, 182 bp, Gossypium hirsutum
  Clone ID: LIB3135-047-Q1-K1-D6
cttttgcagcatgttatccttcaaccaaatttattctgcactggcctttggttgttggggggcgggtgagctgtccactatatgactctttttattcttctcttgaaagagtgggcctccccaacaacttttatattattgctttgcatcttgatgcctttgatgtgactctctggtctttt

SEQ ID NO: 37795 - DNA, 340 bp, Gossypium hirsutum
  Clone ID: LIB3135-047-Q1-K1-E1
gccagcgtacgtccacgcgtacgggaaggggacatcatggacttgaagcagcatctcaagagcaaagctggtttatctcgattgataacaagagtaggtaatatagcatataactttaaagcagaggtaacgaggaaaggctttggtattgtatgaagccatcgagatttccagacctatgtttggagggtttagcaaagcaggatctgttgccatttggctttttaaacctgggtttgctttctcccaggggtagcatgttcagggatacctgttctagggttaaagctctttatgcattgtgctgctcatgatatcgcaatatataatcattcctatg

SEQ ID NO: 37796 - DNA, 339 bp, Gossypium hirsutum
  Clone ID: LIB3135-047-Q1-K1-E12
tccacgcgttcgcgtttatggaaaatcctttttttctcgacggcaacttgccctagcgcggggaaatagttactatgacggcatgtttcgaaagttctgtcccagcaaaagccataagcaagcgctttcgaaccggatgccgagtttggtcccttgttgccaccccttctcttacagaatcctcttcgagttctactttatcatctttcttctcaagcccttgtccttgtatgctttgccccaacagtggttccgtcttcaatcttttaactgtctgaacctttcttttgttaaaaagccgccgttttataagcattaataagagactgtcaacctatt

SEQ ID NO: 37797 - DNA, 375 bp, Gossypium hirsutum
  Clone ID: LIB3135-047-Q1-K1-E7
ggaccattacagatcccattgagattaagaccaagagccatgttcgttcaatggggacaagagttcacggtcgaagaagtcggaaactaaaaaaggaactaacgaaactcttgtcccaaaaccgaaccccgacacaaaaaaagaagtagcaagtttaccattggatagatttcttaattgtccatcaagcttggaagtggatagaaggtttaacaatgcggtttgcagtgatgcaagggatagatcggaggaagacatcgttcgaaccattagcattatccttcgcagatgtaaagacatatgtggtgaagataataagaaaaaggccattgggaagaaatcaatttcttttcttttgaagaaaatgtttgtttg

SEQ ID NO: 37798 - DNA, 320 bp, Gossypium hirsutum
  Clone ID: LIB3135-047-Q1-K1-E8
catattcgtccgcgacattaccatcttttttaaggaggaactaatcattaactctccgaagggcatctatggtcgttgtgccagtttttacattgcatggggtcctcgtataaccattcattatgtgaccaacattttcattcatggacttaacatccattacttcatgcatggaggtaatgctattgtgagggacttcccacgtcattactgttggcgaaccttatcatattgggattgtgtgtctattttctgtggtagtctttttttgtgtggattatatacttcttgtataatctcatttattgttttttttgatt

SEQ ID NO: 37799 - DNA, 405 bp, Gossypium hirsutum
  Clone ID: LIB3135-047-Q1-K1-F10
gaaagtgccaaggaagaatggagatttgtacattaacgcagtttcttgtctaacaccagcggggaaagattttatcattacattgtacacatacaatttttataattcatgcctacatattactatcacttctttggttgccatgtaacacattcttctctatttattgtaatgccataagaaggaattcaatctcttaaaaaaaataaatattcgccttaattattaatttattctcgtatataaaccaaaccttccttatgattgatgcatctcttactatctatttttagacatgcatatgctattatggggataatattatgttccatgtacattattaatatttatatatttttattttttttaattttcaatctttaatctatctttactattatttta

SEQ ID NO: 37800 - DNA, 351 bp, Gossypium hirsutum
  Clone ID: LIB3135-047-Q1-K1-F11
cccacgcgtccgcccacgcgtccgggttgaggagcctggtgaaaacctctcatatggggatgaagatgaagaggaggaaagttatgaaggttgctccaaagtcaatgatgaagatgaaactgaagatggcttttttgtaccagatggatatctctcggaagatgagggtgtacaagttgacaggatggaatctgatgttccagttcaggatatccaaagttcccatatcagcaagcaagatgggcggaatgaggagtttagtgcattgcttctgcaacagaagtgtctaaacaatataactgagcatgcactaaggaaaaatcaagtgcttgttatattaaatttgtttca

SEQ ID NO: 37801 - DNA, 175 bp, Gossypium hirsutum
  Clone ID: LIB3135-047-Q1-K1-F12
aaatgtccttcccctttaccctttcttttatttcacttctcgccacctcatccaccagcggggttaatactggatcattaccgctcacaacaaaagcttcattccttacacggaacaaacttactatctgtgacaaagtacacataatcatcctttctcaccaacatttccagtg

SEQ ID NO: 37802 - DNA, 409 bp, Gossypium hirsutum
  Clone ID: LIB3135-047-Q1-K1-F5
cagaagttgaagtccagcttgggaaacgtttgcaggcctctatagttaggcagctgaaagaggcagagatggctatgcaatggaccttgatttacaagcttacaagtcgtctgcgagttctactacaatctgcaccttccaaacgtcttcttttcgagtattctgctacctcgcaagactaatctgctatcagttgtttgttttagggcaaacctgctacctgccattttcagggctttgcacaggtaaaagtgccacagtgatgcttatccttcaagtaaaacgaacggtaagagaggtcttagggaaggggtagtagtttttgaaaatgcaaaggtaggtttaattacgtatttcattctttgctcaaaatgaagagcttgtttatatttgaataaccttcattttt

SEQ ID NO: 37803 - DNA, 140 bp, Gossypium hirsutum
  Clone ID: LIB3135-047-Q1-K1-F6
atcacgcgttcggattatttgtttacatggtagaccaggttccatacacgtgtaacgagcgggcggtatgactagacaactaagtgcgtaatctgtcatacgtttttttgaaacatgcgtcccaataagctcaccaactc

SEQ ID NO: 37804 - DNA, 201 bp, Gossypium hirsutum
  Clone ID: LIB3135-047-Q1-K1-F7
gccacattaaagaggttcccattgatattttagaccaagagccatgtacggtcaatgggtgggaggagtttacggacatgaacgtctgtaaactgaaataggatctaacggaacttttgtgccgaaaaccgaacctattctcataaaatgaagttgcaagtttgcccttgcagggatttagcgtaatcggccatcatgctc

SEQ ID NO: 37805 - DNA, 349 bp, Gossypium hirsutum
  Clone ID: LIB3135-047-Q1-K1-F8
ggtatatcaattttaacatatgcaccatcaaatgcagtatggtgggcatcttactcaggtgctcaaagacttgtttggggaggcattggatgttacttaaaaggcggcggggatgaaacaattcggcctgattcaaagacggtaatggcggttcaaggagcgagtgcggcaatggcaggtgggatatcggcattgatcacaatgccactcgatactatcaagacccggttacaggtcttagacggagaagagaaccggctgcgcggaccgacaatcgggcaaaccgtgaggatatttgttaaagaaggaggatggcttgcttgttatagagggttgggaccaatgtggg

SEQ ID NO: 37806 - DNA, 436 bp, Gossypium hirsutum
  Clone ID: LIB3135-047-Q1-K1-G2
cccacgcgtccgcggacgcgtgggttagggactaagggcatacatgaatattcgtttagcacgatgtctactcatggttttacttgttgcacaagtaattaaactcttaaaaggttcgttggttcgttgcagaggtgtcggatcagaactttgttgacgaggaacagggtgaaaaggctagaaaaggatgtagcagcccaaagaagctgaaaaccccggtaaccgatgcttcatgcaatgatcaggtaaaatttaataccattaatcctctatttacattagccaatagtcacttatcttagtccctaagcatcaaggcatttctctcattttgttttcaagttgttccataaggtgaaacccacggagcatccaccggtaaggctccgtttcgaagaaagaaatttgtaatcaccatcctaataccgacagcaaa

SEQ ID NO: 37807 - DNA, 339 bp, Gossypium hirsutum
  Clone ID: LIB3135-047-Q1-K1-G3
aaaaaacttatggttccctgtatctgtatgatcctgtttctggcatgaaggaaacttaattgtttcctgtatgtgtagttttatgttattgtattagatagttaatcaatcgattaattagaatctgtttcctgtattaggccatattaaaagccattgtaatgggggggggggagtatttgggaatggatttggtggcaaataaattggtgatttggtgtatgcatttgtatcatatggcattgcaatgaatatgattatgaacaaactcagatttttctcaaaaaaaaaaaaatatataaatataaatttaaaattattataatattattattattt

SEQ ID NO: 37808 - DNA, 221 bp, Gossypium hirsutum
  Clone ID: LIB3135-047-Q1-K1-G6
gtacccaaccgtggatatggtaggataagtatggtgtcccttcattactccgaggggggcgttttattcccctgtaaagcttggaccaaaaactttcccgccaccttatggaactgcatctgcctatcccccttgcatgaacaatgggggtggtctaatgggtacagtgactggtggcttcaatgggattactgggaacccacgttatggaaaatcaaatt

SEQ ID NO: 37809 - DNA, 254 bp, Gossypium hirsutum
  Clone ID: LIB3135-047-Q1-K1-H3
aaaaaacttatggttccctgtatctgtatgctcctcttggtggcatgtaagaaacttaagggggtagtgtatgtgtaagatttatgttattgtattacatagttagtcactcgattaattagaatctggttcctgtattaagccatattaaaagccattgtaatggcggggggggggggtttttgaaattgatttgggggcagttaaaatggtgatttgatgaatgcgtgtccattttatgggatccaaattta

SEQ ID NO: 37810 - DNA, 431 bp, Gossypium hirsutum
  unsure (1)..(431): unsure at all n locations
  Clone ID: LIB3135-048-Q1-K1-A2
cccacgcgtccgttcagctcgtatactctcccgtgctctagagatgtgtgacaacaagataaaagcagaaactctgattgttgaaggaaatcctaaggataagttatgtgaaattagcgaggaaatgaaagttgacctcctttttgttggcaaccgtggccttggcaggattcaaagagcattcttgggaagtgtaagtgactattgtgcacactacgcanaatgtccagtcctgattgttaagccaccgaaagagatggccggccagtaaaagcaaggattaaaaatgttgacattgaacctggatttaataattaaattttattggttcatggtatcgtccgttttaagtccggtaacttttttataccaaaacaaggttgtcttgagtttgacacctattcatatatatacccatatataccaaggtt

SEQ ID NO: 37811 - DNA, 344 bp, Gossypium hirsutum
  Clone ID: LIB3135-048-Q1-K1-A3
cccacgcgtccggtgatattattggatcttatcttttgtagaactgcatttgatcactgcgaactgggggaaagcgggcacctactgacatattttacgagaatgctctttaactaggtgctgttcgaataagtcctcagcctcctcaattgaccccaatgcaggaacgctttccatcatcatctctcctaaagagttgacgctttattgcttagctacgaatccttattatagtaaatactaagctctattctctacaagtgtaaaccttattactgtaacttttataacttacccttcaacttgcttatacatataaagcctataccttcatacgttcttgc

SEQ ID NO: 37812 - DNA, 423 bp, Gossypium hirsutum
  Clone ID: LIB3135-048-Q1-K1-A5
atccaatcctttgaaaaaacattacctgggagacaaggctgcatcataacggggcagctgggacggaggtcagataaactgaatgtccaggaatggcgatggtgataacgtgattatgttgacgaatgattagacatcatcaatatcttgacggacaccatgcaacagatataactacttctgtataaacgtctcatgggcagcttagtttggctgaagcaaggtcgtatggataatgcataaccactgctcaactacgcggtattacgatcataagctctaggaaactcataagtgcactattttcttgtagggctatttgatatcacatgcttgattgtgtgcttgcaactcccgaatgtacatggctttgcatatgaatgtactgtcattgatcatacactgtaccaacacaggtcattt

SEQ ID NO: 37813 - DNA, 464 bp, Gossypium hirsutum
  Clone ID: LIB3135-048-Q1-K1-A7
gtgaactcaaataaaataaataaaatggataaattgtgtcgaatccattttctattggggaacgaggagacaaccaactaacactttgactttactttaacttattagattcagtagtgggtttattaattgcacataatatctcgaataagaagaaaaaaagtatcgcacgatcgctcgaagaaatcaaacctttatttgggtctaactcgattctaagactagtaattcctatgttcttttccttttaggttctacattttttctttcaatattttagagtaccatccttgtagctaggtcaagaaaaacctttggatctaatacagcaatgcttgcatcacgaatattaattgttgcaaatattttattgtttggtttgattcttttatcgaagactatatactataatacttgttattgtacgaccaaccaattccttagaatgaaaggattcgaacaaa

SEQ ID NO: 37814 - DNA, 439 bp, Gossypium hirsutum
  unsure (1)..(439): unsure at all n locations
  Clone ID: LIB3135-048-Q1-K1-A9
cgttttctcttcttcccatcgaaaacttccacaatcattcactcttccgctcgatcgttcgtcaaaatagaagaagaaaatgtccgaaaggcccaatcgccatcaaaggagggcatcgcaaagcgtttttatgtccttcgacgacatcacggctcccatatccgataatgctacggctaataagcccgtaccatccaacgaagcgccacctcctcagccggttcgttctccggttccagctgtggcagcggcggagacttctgatattgtagccaaagacggcgagaaaccagaataaatgctataggttaattccgtcctattatttgactatttcgacgttgctntgtcttacttttatgttatgtttgatcggcttcacgacatcaaaaagagaatgctcgtttatcagntgtcataaatccatgttgaattctgc

SEQ ID NO: 37815 - DNA, 386 bp, Gossypium hirsutum
  Clone ID: LIB3135-048-Q1-K1-B1
ggattatgattcgtcgtataacgagctactaggatggataactactatgcgggagtacgtaccggggactatgattgagttacagacaagaccatattacgacccggacgaccaattacagccaaggaaaagaatttttcatcggatgttctggacgtttgatccatatgtgcgggcattttcctactgcaaactgtttgtgcaggtggataggacctcgctatatgaataatatacacagatcctacttcttgtggttgctcaagacagcaatagaaacatgcttccgatagcagttgccatcgtagataaagagaacttgaaatcttgagaatttttccttaccaatctgtggaggtatattattagcaacgataatatttgca

SEQ ID NO: 37816 - DNA, 409 bp, Gossypium hirsutum
  Clone ID: LIB3135-048-Q1-K1-B6
gtacaaggcgttcgaaaaaaaaatcaccttctagatctatgctgatgcctatatatcgcggcttgcggaactctctgaccctttgagtccccgattacgggggttgaaaaacaaactgtatagccgatgacaactgtccttaatgagccataacaccttttgatgtgatgaatgcactcactgctgatctggctcgaatgaccgcggtacatgaggtatacagccagctggggggatatgaaacactcctccttaggcgtacagaagcttagaaggcattcgtatgacgctaggacttgctctctgatgtaattgccttgcatacgtgaggagaaaaccctagggctaatttgtttaagcatttgggcttattgtgcctatgattggatcaagtatatgtatagtcatt

SEQ ID NO: 37817 - DNA, 424 bp, Gossypium hirsutum
  Clone ID: LIB3135-048-Q1-K1-C11
cccacgcgtccggacatctagctaagcttatcctctcgtcttctcacatcatggccatgcttagagctttcagcacaagaagaaaccgtgatggctatgaaaggttacttcttgaaaccgaagttgaggagcctgtaatttccagcaatggtcaattcgaagcacagttgaagagagctagaagtgtgccagctcgagtttttggcttatccagaaagtttaacggccccgaactggggttgccggagaagtgtcaagagaaatcttcgacaatgaccaactccaacaaaaagggcagcaagtccaagactattcacccacttttcagcctatttgatggtcgtcgtaagaagaaaactacagctaaaccagagtttgctagatatattgagtatctcaaagaaagagggatgtgggacatgaa

SEQ ID NO: 37818 - DNA, 360 bp, Gossypium hirsutum
  Clone ID: LIB3135-048-Q1-K1-C7
gaggcgcactcttaaccattaattattctgcttagctggcacatgctgttaacgggggccttggtgttgtgtttagacttcccgagccgctcaacgaacacgtccctaaccttacctaccctgactacaattagaacgctggtgtcctagaccttgagattactgccggacctgctattatctttcatccccgaagagaggacatgcctcactcaccacctgagggccgagttcctgatgctaccaatggtggtgatcacctgaggcaggtttttagtgctcatttctgtcttagcaaccaatacaattacaatctttatagtggccacactttggcaaggtgccaaaaagagaggtccg

SEQ ID NO: 37819 - DNA, 266 bp, Gossypium hirsutum
  Clone ID: LIB3135-048-Q1-K1-D12
aacaaggcctaccttctagcctaagtttcgcactctcggtaagtttgagttctttgtacaggacattaattctgatatcatattctatatatatatatatcttcttttttgtttcccttttgtgggaattttctttctccttcaaaacatggttaatttatatatgaacagtagagattttatgaaagaaactaaacctaatgcatatatagagagttctagggttaatttttaaaagtttcaaattgatcccatccaattgttac

SEQ ID NO: 37820 - DNA, 304 bp, Gossypium hirsutum
  Clone ID: LIB3135-048-Q1-K1-D5
actatgttaatattaaaagctcgttggacttgcctgccaactggggctatgtggaaaagtaaagacaccccaggagattcccaagaccttcgacatcaagaacgatttcaccccccaagaaaaatatgaagttaagacggagaatcaatgggcattctagtgataggagagcctttcaatctaatgatgatattattataggttctaagctgtacacgcctgggtttcaaggttgggaaaaaacataaaaacattggctattgcttggcttattttgttatatgccattacagccttctattct

SEQ ID NO: 37821 - DNA, 181 bp, Gossypium hirsutum
  Clone ID: LIB3135-048-Q1-K1-D6
ccaactcgaactctcatgctttattttgtacaatatgaacacttccttggctattacggaatcctgggtttcaatggatggaaccaacgcctcctttccagaaaccaccaactacgttcttaaaggaccgtaaccgctttcactttttaagactcctaacttcattacaaattcaacatct

SEQ ID NO: 37822 - DNA, 374 bp, Gossypium hirsutum
  Clone ID: LIB3135-048-Q1-K1-D8
ccagctctagtcctaatgctctaacttgaagttgaaagtagcctttttgcctattaccaaagcctctctttaagtggaataaaggaacttgttcactatctatcccaccaccaccggcattagtgctgtctagttgtgttcaatgtttgagcctcgtagctcggtgccttattaaggatgtggaaaagagttggaaataaagagactaatataatagagaataggggttcttgcaggtatccatcaatcccgaaacgacagcccctgcaagagaagagaataagcagctatttcatcttctttttgcgtgatttgattctcctgatcccggtagaatcgtattaggagtcgccctactgagattttcaatctga

SEQ ID NO: 37823 - DNA, 290 bp, Gossypium hirsutum
  Clone ID: LIB3135-048-Q1-K1-D9
ggcgagcacgcgtccgtaaacccctgggactattttgacgtcggttttccttattctgatggaatacaccccagggccgattccgacatcttgcaatggcatgtcttggtgcgtaaccgtctacgcgtcaccctgttgtgctttgtcggatcgccgggcggcatcaacaagaacgatctacgaggctagctgtagaaaatatgatgaactctttcgttttatggaaacacgttatttgttaaggtacttgggggcttcaacagacacatgcttgatcctggaaacagaca

SEQ ID NO: 37824 - DNA, 328 bp, Gossypium hirsutum
  Clone ID: LIB3135-048-Q1-K1-E12
cacacacttacacccactcgtccgcttggttttagttatggagtacaccctttcacaaatgtggtcttacattgacctctctaaaacctctacatttgattaacacctacacacaattttaatcatatcaaaaaaaaattaaaaaaatttcttataataacaaacgtttttaaacaatttattttttttttttaacaaaataatgattttttttttttttaaagaaatttacatttttctcttttattttttaaaaatttgcgcccttcttttattaaatattttcctttctttataaacttgtagtttaaaagctttttttttcttt

SEQ ID NO: 37825 - DNA, 204 bp, Gossypium hirsutum
  Clone ID: LIB3135-048-Q1-K1-E6
gccacgcgtactgccacgcgttctaaccggctctgatatgagacgtatgacctatgaagactctgggcgggtaacgaacgtatcttacgacactcggcatgctgacttgcatgatctttttggaccatttggtgctttgtcacgtttgtatgccgctattgatcagaacacaggcacaagtggaggcgttcgtgcttgtcaact

SEQ ID NO: 37826 - DNA, 452 bp, Gossypium hirsutum
  Clone ID: LIB3135-048-Q1-K1-E7
gcagcaggagcggttaagctttgatttgtacaatattatcagtggcttggctttcactgaattttggctctcaagggatggatcctacttttctcttccaggtgacaagcctgcgttcttggaggagtgatgacgtcttcattatttatgactgctgcattcatgacaagctcactgacttgatgtgtctcacggcttgtatgatctacatggtctgatggaggaagagatgctgttgtacgtttgacatgacgggactatgagtaattgttactacaatctgcacctctcctcatggtgcttgttgtagcggtgggattctgtgatagagctgattggcttgacttcttgaacaccgaagatgatcagaatgagaccaaggcactctatccatcggaatacatttaatattgaacgtctataaacatcgattgagtgcagttcttaaagga

SEQ ID NO: 37827 - DNA, 213 bp, Gossypium hirsutum
  unsure (1)..(213): unsure at all n locations
  Clone ID: LIB3135-048-Q1-K1-F5
gcaatggatttatagctgcagtctttttaacccaaatatgaatcacttacgcttatatgattcttggggagaaagggatgggctcttcctttctggtacagttcaccgcatttgtagaatagaaccaaactgtccttgtcacaaaacantattgatgatttattcattatagtcgcagatgttcacttcattaaaaacttacagcataattgt

SEQ ID NO: 37828 - DNA, 230 bp, Gossypium hirsutum
  Clone ID: LIB3135-048-Q1-K1-F6
gtaaagcaaactgtcaagcgttgtttttagctgttttttaactcgcatatgtttggaggaatctggggttgaaaaggaaggaggcttccatcctagaactggttatttaacttcctgtcaagaagcaaattatcctttataccttttatggacggacttttacattagaagagaaatacttgttactcttcttacaatcctaatatcaaaaatgactttttggaaggaat

SEQ ID NO: 37829 - DNA, 330 bp, Gossypium hirsutum
  Clone ID: LIB3135-048-Q1-K1-F8
cttgcaggaaaggttcagcgaggtactgtcgcatgtcaaaaggcccttgacatggactgaattctggctttcaagggatggagccttgtcagctttacttggtgtgataataggtgttcttgcaggcaagaaatttttttggtaatttataggtactgcaatcaccagcaaggcaccaacttgtggtttctaactggttataaatctagtctgttcttgatgaggaggtgatgttgttgtagttttaaataacagcaaataagatgaattatgcttactcctgccaattttatatttaagaattcactactgcacctttcacttaaaggt

SEQ ID NO: 37830 - DNA, 309 bp, Gossypium hirsutum
  Clone ID: LIB3135-048-Q1-K1-G11
cccacacatacgtagactcccgcataaccctgaccacaaatgactgccattttatacttgggggcactctcccgcaaaaatgtgccggtgcgccgctagatctgtcagggggagcaacctacgccgacccggatatacaaccggcgtacctgagcggaaagtcgctgtcttgggcacagctggagggatcggacgacccttggctatgctcacgaagctgaaccctgctgtttctcaactgggtctctatgatatcgctgacactcccagtggtgccgctgatgtcagccacattaactttagatctga

SEQ ID NO: 37831 - DNA, 241 bp, Gossypium hirsutum
  unsure (1)..(241): unsure at all n locations
  Clone ID: LIB3135-048-Q1-K1-G12
aaaaancgggccgacgcacgcgtccggtggttccaatgcccttcttctccaccacactactataaaactattgaccccaaatcccctgtcattatcaaaaaaaggaacactcttgctttctttatcgcttataatcaataaagttgcttttaaaatgggtacaaaaaccatgtattagaatttcatcatcactatcaccaaatgtagaacatttgctttcttgacggggtcttttcaatct

SEQ ID NO: 37832 - DNA, 486 bp, Gossypium hirsutum
  Clone ID: LIB3135-048-Q1-K1-G3
cttgtcaggcttctgggcttctgtgtggatcagcaagaacagttgcttgtttatgaatttatgcccaacagcagccttgatgttgtcctctttgatccaaagaaacgtgcacaactcaattggagcaaacgtttaaacattattaatggaattgcaaggggaattctttatctacacgaggattcacgacttaggatcatacatagggacctgaaggctagtaacgtgttgctagattttgacatgaacccgaaaatctcagattttggaatggcaagaatctttgctggagcggacagtgaagctaatacagcacgtatagtcggaacatatggatatattgctccggagtacgccatggagggattgtattcaatcaagtccgatgttttcagctttggagtactcttgcttgagataattacaggcagaaggaatgcaaggttcaatcaaaagaaacatgcccaaacccttgttgcatatgca

SEQ ID NO: 37833 - DNA, 345 bp, Gossypium hirsutum
  Clone ID: LIB3135-048-Q1-K1-G4
gcggcaaagggccaacaacttccacaactaattactctcaaagcaattcatcctattccacttgaaaatgtgacattggatggggaagcacttactttggagcccatgcttttaattatgaagaacttgaggaagccactgacaatttcaatccttctaaacaactcggagaaggaggattcggcactgtttattatggcgtactcagggatgggcgagtcgtatcggagaagcacttatacgagaacaatattaagcgtgtcgatcattacatgaacgagatcgaaatactcactcgcatgcttcatacaaacctcatgaagctctatggatgtacctcgagac

SEQ ID NO: 37834 - DNA, 491 bp, Gossypium hirsutum
  Clone ID: LIB3135-048-Q1-K1-G7
cccacgcgtactcccacgcgttcgttcacgcgtccgtgattcgtgaggggctacactgtgacccatgcttttcaggaagagcaattgccatgcctaaaatgcttattgatggtgctgtaaagtatgaagatggtacccctgcaactgaagctcagatgtggaaagatgtggagacatttttgtcatgggcggcaaaaccagaaatggaagaaaggaagctgatgggatttaaatggatatttgcattgtcattggccttgcttcaagctgcttactaccgacacttgaggagctcggttctcaaatctagcaggctgggacttgatgttgtgaactagcctactgctccccaagattgtcgatttttagagatatgattcggcaataattgcttatcacgatgttctacgttctgccatgaccaacgtggagggtgagtcttttttatagagctgagaagaaataagctggtcgacacacatgcattaaat

SEQ ID NO: 37835 - DNA, 354 bp, Gossypium hirsutum
  unsure (1)..(354): unsure at all n locations
  Clone ID: LIB3135-048-Q1-K1-H1
cccacgcgtncgcccacgcgtncgcttttctccctttttttttcaccaaactcctccggcgatgccatatttcacgtttctgttttcattttgtacgaaaatcccatcctaaattacctaagaagatacaatttttgctccactcttttctgtcccctgttccttctgtttaaaccctgttttcctcctctctttttttttttttggcttgttcatcagcattttctctgttgctttaactttttgtttgatatccagattttgttttccaattttcgatagttttcagaactacccatatcggaatttggctccttttttttttggttgtgtctatgcctctgatagaggtga

SEQ ID NO: 37836 - DNA, 205 bp, Gossypium hirsutum
  Clone ID: LIB3135-048-Q1-K1-H10
attttatcatcattcatgccatgccccatcttttgtgattgatctgaccacagtttacatgtgaatgttatgctgccatgttcgtacatttctgcattttgttggtttcatgggaaaaaaaaatcttattcttttatcttccatgctttcaatgagttttctaaatgtgttgacattgtttacgaatgtgtttgttttttacatg

SEQ ID NO: 37837 - DNA, 450 bp, Gossypium hirsutum
  Clone ID: LIB3135-048-Q1-K1-H2
gcagctctcttcgaaagagagtatgctcttattgatgcagacgatggagtaaggagagattctttcaagccgagagtttggacagttgaaaaagaaagggcaccctctttagaagagtttgatcaccaaagaggttttttcaactattcattgaaagggggagctttacccgctaaagacttagaactcgaggggagacgaatgctaagatgaaggccagtctcgggaatcagactcgggaagaataggatttttttccttgggactttgccacccataacataaatagaagaggaagcttctgccctttttccttcttttgagtctacgcacttttgcttagtatggtggttatatgcttgttaatttagtttaatggatcttctcataggtagctgcctgtaattagcgaccttcctcttttttacaagcatgagtaggacttctagt

SEQ ID NO: 37838 - DNA, 318 bp, Gossypium hirsutum
  Clone ID: LIB3135-048-Q1-K1-H3
gacgagatatcttttatatagagctacctacaattaattgaccggccgtcgacaaacaacggactgactgaaaaaaccctgtagccacctaaattaatttgcatgaaatacatctttctttagctagctggagtaataaaaaagaggcacggatcgatcgtccttacaaacaggtgggctgaatggatagtgagagggacgctctctctagccattcattaagcgcggtgtgggtggtacttacacccagagcgactcacttactagcgagctagctagcgctcgcttcgtttgctttccttcctttctttctacgca

SEQ ID NO: 37839 - DNA, 454 bp, Gossypium hirsutum
  unsure (1)..(454): unsure at all n locations
  Clone ID: LIB3135-048-Q1-K1-H5
gcttatattggaattccgttctcaatttatacagatataacctgctacattctncatgggtagaagccgttagtctatatgatggccataaattatccaccgtaacttccatttgggattctggctatagtgcaatgaattcttggacaatcacacattgctgttccatccattgacaatggaccttcttgctttgtgaaaaagagggcttaacctttctctctgatcaacaataaacgtcttatttaagaaaccatgcttatacaataataagggagggattctaatccgtttgatccgcagctaaacattgataaaaaaaaaatgaacttcgcttattacaaatatattatcaatttaatagtatctttaatactagcttaagctgcatttttatcctgtttagttaacaaggtgtatcttaccttttagtatcctactttttctttattaa

SEQ ID NO: 37840 - DNA, 457 bp, Gossypium hirsutum
  unsure (1)..(457): unsure at all n locations
  Clone ID: LIB3135-048-Q1-K1-H7
cgcggcggtatacgttaacaagccctcccttcttctttttccgacaaaaaacatgagcgcggagcgcgaagggttgctttactaaataatataatgcacgttagcgctttaattttcaataacgggcggatcttgaagaaacaaaccgagcctaaagtaacagcctattacgtttttcaggcccctttacttgatattctattaataaagcactagcacccctatatagtaaaggtattctgctatcaattaaaccgaaagcaaaaatccatcgcgtttcgtatacatcgagacttgtagcttgattctttagtcattccatactgtttagaattgcaggaaatcacncgactcttcctatttctcaatgatatcctacgatcaagacaattcccgttaaactttttcatttcatagaagtgcattcttattcctacatagcaaattgcatttccta

SEQ ID NO: 37841 - DNA, 235 bp, Gossypium hirsutum
  Clone ID: LIB3135-049-Q1-K1-A11
gacccacaccttcgcggacgcctgggccaacacaaaacatttaatccaaccccagcttcacctgctggcagtgcgttctaatatttggttcaacccatttcattgttaaaatgtagctgtcaatgaagggttatttaataagagagctgggcaattaaggtggtgtaaaaacaatggctatgtccgtgtgagaaaagggcccctcaacttcacgatattatatatagttatattc

SEQ ID NO: 37842 - DNA, 416 bp, Gossypium hirsutum
  Clone ID: LIB3135-049-Q1-K1-A12
gacgcacgcgtcctattgacttattattttttgaagcattttatttattgcgaaacaccaggtcaaaccgggggctggaccttaattcaacaagataagaacaagaagaagcatcttgagaagcctgcccaattcgatatatggagctcaatcatatcacaaatggctgaggagtcttctaagtcagttccagatccgtatgttcaccctcttgtcaaaagatcagccagctctttaagcgagaaaagccttgaaatctgcactgagagccttggttccgaaactggctacaatggcttctcttcataccctccatcagaaacgagtgacatgcaagaagaggacggtcaataagacgatcaacaacttcaacaccaagagcaagaaaagggtgggggagctcaaaaatgttaaaa

SEQ ID NO: 37843 - DNA, 297 bp, Gossypium hirsutum
  Clone ID: LIB3135-049-Q1-K1-A3
cgtccggccagcgtcggaccagcgtccgctcaccctaagtgacatgatggctctgtgagctgcacacaccgtgggattctctcattgcggcaaggtgtgaaaccggatatacaataccagcctgccaagtgcaagctacccgcacattgaaccaagcatatgcgacccaacatacagcacatgtgctctaaaaatgctcattccaggacagccctggacatggaccctaacacaccacaggccatcaagcatgtctactacaaggacttgctacaaggcaaggcatcgttcactcat

SEQ ID NO: 37844 - DNA, 420 bp, Gossypium hirsutum
  Clone ID: LIB3135-049-Q1-K1-A6
ccggaccggagaagagggacgagccaggcgacgcgctacgcccacgcgttcgaacacacaaagtgacaagaaagatcagaaagaagggcgcagcgagggaaaccataaggcaacaaggccagaaacccgagacacgagcttcaaggggcaaagcgcagaagaccccacagtgaggcaaacggatgcgacccaagcacaaaaaaggggggcggaagaagctaatccaggacctggaagtaacagggagatcaacacacgcacgaaggacccgacaatgcaatatacgaagcaccagaacggaggacaggacgacaagaattcgacacacagttagagaatgaccgaaggaggacaccagggggacaagcctgagaaaatcagctaagacaacaagaatgaggcagcagcaggtggaggaag

SEQ ID NO: 37845 - DNA, 439 bp, Gossypium hirsutum
  Clone ID: LIB3135-049-Q1-K1-B1
gaaagcacaaatggaatggctgatcatttattgtatgaagtttttaagacctcactaatcagccttaaacttttgagttcataatgaatgaaatgaacccccggatgaagagaaaatctcccctcccttttactaaaccatggggagtcccgagtagtttaccgggcaaatttagttgtcgtgacgatacctttcttagtggaagattggaaaagacttctcttcatcacgagactgatcggatccgccgtagacacccgagaaacccccacaaggcaggctaaaagagtaagaggacaacaagcaaagagttatgctttcatttctttgttgagattgaaataaagttatttaaaaaagggggtaggtataatgcacgcaagccaagtcaagaaaaggacttccttacttttatttcatagtagtcttaatgactagt

SEQ ID NO: 37846 - DNA, 390 bp, Gossypium hirsutum
  Clone ID: LIB3135-049-Q1-K1-B11
taaaatcgtgggcgacaatctaaactgagggtccgagcggcagcttatatcgcctgggggggatgacatggttccctacccctctactgtagctctagccatacacctttggtagctcatcacactgtcgtcaacactcgtagactgttcgacagcgacatcgataccgcattcatgcaaactgtatgtattagaagccaattgcttaaaaccatcatgtgcttaggctttttgccactactcccttcaacgggcagacataattaataacatgtaatcctctatgggccatggcattattatttatttcctttgagagaaagaacatgaatttattcattgataaaatggaggatcctacgctttccttgtttcatagcttcaaacctt

SEQ ID NO: 37847 - DNA, 281 bp, Gossypium hirsutum
  Clone ID: LIB3135-049-Q1-K1-B3
ggcagcccctttaggaataattgatgtttatacgggcgttaaaacggttgggttcttaatggacttaagatgcttgcaaactttgtcatttgttcacgcagtttaagaataattgctaaaattttccgctttcaaaaacaaggttgactagaaagaacttccccctcgggtaaatttgggagaaaaactgcgctccatacaggaggaatgtgagctcaaccggcactccaaagaatgatgtgaaaatgcttaaaacccatataaaaggatcaaaagggggg

SEQ ID NO: 37848 - DNA, 422 bp, Gossypium hirsutum
  Clone ID: LIB3135-049-Q1-K1-B5
gaaagcacaaatggaatggctgatcatttattgtatgaagtttttaagacctgactaatcaggccctgagcccttgagttgataaggaacgaggtgaaccccaccatgaagagaaaatctcccctaccttttactaaaccatggcgagtcccgagtggtctaccgggccaatgtaattgacgtgacgattcctgtcttatgggaagatcggaaaagacttctcttcatcaccagactgatcggaaccgccgcacacacccgataaacccccacacggggggctaaaagagttagaggacaacaagcaaagagttatgctttcatttctttcgtgagattgaaataaaccatatttaaaaaagggggtatgtataatgcacgccggccaaggcaagaaaaggactttctttcttttatttcat

SEQ ID NO: 37849 - DNA, 247 bp, Gossypium hirsutum
  Clone ID: LIB3135-049-Q1-K1-B6
ggagaacaggtgcgcacccaaggggggaaagaggagcccgagacgacaaggcaaaaaacaaaaaggggcaaggggacgctaaaggcaccgaaaagaccatctctgggcaacctgactgaagaacaaaacgcctgaacagaggggacaaaaaaagccatgcgaacacaagaaaattgaggcactagggcacgcccaccctgatcgcatgatgggcgaagagcacagcgcaggattagaagaaagcaag

SEQ ID NO: 37850 - DNA, 138 bp, Gossypium hirsutum
  Clone ID: LIB3135-049-Q1-K1-B9
atgaagactgggtcccgatctctcatacgggtccaaactgggccccttcaactgatgatactatatatatgcgtctaccatgaatatgttcttcaagtgccacattgcaatgattcattatcaggaacaggtgcaact

SEQ ID NO: 37851 - DNA, 284 bp, Gossypium hirsutum
  Clone ID: LIB3135-049-Q1-K1-C1
cacacgcgtacggatggctacatgtacatattggcgggggctgtggtagctcatgattaacttactcatgctgataaggacaaggagtacctggcggctccaagtcagatggctggagccgctgcccctggggcagctgctcgtggcggggctacatctgatggtgccgctgccgagcaggaaaagaagaccctacactgacaaaattctgatgacgatatgggattgaggctctatgactatacatattagtgtttacgcacaaacatatatgaacgtagaca

SEQ ID NO: 37852 - DNA, 414 bp, Gossypium hirsutum
  Clone ID: LIB3135-049-Q1-K1-C6
tgcgcacgttcggcttggtgatttctgatcagggctgtggatgacggagagaagaaattcaaccaagctcggttgaacctgcgaagtgacatagtgactcatatgatggtggtctaatgcctgagcctctaattatagacgcacgtgcatggattcacgagatttcaactgttagtgtatactattcacagaaaccaccttcaacggagcggcctggtcaaaatccggggggtaagaagaccctgatgagctcgactatactgcgactgtatcaaatgacattgagaggtgtacagataagagggagctgtttggcgagattgatataacagtccttgtaacgttattatactaattactagaataggtcgcggagctcggaccatctgtatcgacccaaggccgagttttggc

SEQ ID NO: 37853 - DNA, 177 bp, Gossypium hirsutum
  Clone ID: LIB3135-049-Q1-K1-C8
tcgcccacgcgtacgccttactttagatacactgcctttcttttgggggttctttctttatggtgtgttggtacaaggcttttgggtcccacccacaaaacccacccaaaccaagttttccaccaccaccccaaagccattggccgggaaatgtaatggggaagtcgcgggttatgt

SEQ ID NO: 37854 - DNA, 317 bp, Gossypium hirsutum
  Clone ID: LIB3135-049-Q1-K1-D10
acgcgtgcgaacaaggtctactttaaaaactcagtgctttttctatataatgaagagatgggttatacaggggcagttccaatgagagagagcccatggagaatgccataaggggatcatcggctacctaaggctcatcgttgcaactgatctatctgaaagatgttatccaaggaggaaccaacagagccatacacctatttacagctggatcccccaaatagggaggtggagcttgaatgaaatgcccttttttgcactttcttctataccttgattgtagcttgtactagaggacacttttcatattcatcatt

SEQ ID NO: 37855 - DNA, 357 bp, Gossypium hirsutum
  Clone ID: LIB3135-049-Q1-K1-D12
ctttcaaatccaacaacttctcgtggcctgattagtcctttacatgatgagagattagctttcaagtttgctcaatataaacccgagtctggacgaggtgcagatggtagggaaaaagcattcggcagaccggaaagaattagatccacttcattagtgatggatgcagtactgccggaccaggtgaattcggtttgtggcttatgtcaaaagcatttgagacggaaaccttatattctcgggaacaccctgccttctggtgaattctctgttgtggcagttctagtttgtggccacgtataccatgaggattgtttggaaaagagaacgagtttcgaggagaggcgtgacccgcgg

SEQ ID NO: 37856 - DNA, 312 bp, Gossypium hirsutum
  Clone ID: LIB3135-049-Q1-K1-D2
cccacgcgtccgcctcactttagatacactgcctttcttttggtgtttctttctttatggtttttgttacaagtcttttggttcccacccacaaaacccacccaaaccaagttctccaccaccaccccaaagccatcggccgggaaatgtaatggggatgtcgcggtttatgtgtataatttgccggcggagtttaacctcggtcttctcgatgattgtagccatttgaatgtttataccaatatgtgtccgcatgtggctaaccatggtctatgtcagccgttggacaacatggaccttcagtcgagtgac

SEQ ID NO: 37857 - DNA, 207 bp, Gossypium hirsutum
  Clone ID: LIB3135-049-Q1-K1-D3
cgggacgacccacgcggtcgcccacgcgaacgcctcactttagatacactgtctttctttaggtggtacttactttaaagggtgagaggcaagtctgttgggtcccaaaaacaaaaccgacctaagaccaagatcgtcaccaccaccacaaaggcatcggacgggaaatggtgtggggatgacggggtttatgcgtataaatagccg

SEQ ID NO: 37858 - DNA, 289 bp, Gossypium hirsutum
  Clone ID: LIB3135-049-Q1-K1-D5
gaccaggacggattaacagctagagggtcgagtgcttcgaccataaaaaactttaggcattggctcaagatgccccgacttaggatgcatgcttcgaaacaccccccgctctgctggaatggacatatgacttccaatcatccgagatgatgactatattcactgccggctggggcaacctgacgaactaggcctgactgaacatttatgagaaaagacctataaactgtcttaccagatcaataccaaaggcgctcgctttgagtagataacctcagcaaaccgcgaa

SEQ ID NO: 37859 - DNA, 379 bp, Gossypium hirsutum
  Clone ID: LIB3135-049-Q1-K1-D9
tttcttcctattcttttactactttcttgcccagacagcggggaggctcaacacttgggaatcattaacaacagggatcgcccaacaggcaaaaggtgtaatagcccccaaagagaaaactccattcataacttttgtcctaggtggccctggtagtggaaaagggactcagtgtataaagatagttgagacatttggattcgcacatttgagtgcaggagatttgttgagaagggaaatagcttctaagagtgcagatggtgccatgattcttaacacacttaaagaaggaaaaattcgcccgtcacacgtgacagtcaaactgatacaaaagagatggtattaagttacaatcacaaaattctcattgatggctttc

SEQ ID NO: 37860 - DNA, 287 bp, Gossypium hirsutum
  Clone ID: LIB3135-049-Q1-K1-E11
tttttctttgaaccctaaaataacaccattatgctggacgcgctttaatagttactattcatttcccttcacattatcctataaagccttcttacgttgcatctatgaccaaagacttacatcccaacatcaacagccatggaagcataagacttgatttccccaaagtacaatggatccctgcactaaccattttcaaggctttgctctttaactaataactgctgaccgatccaaaccctgataaccctcttgttccagaaattgcttacatgtatcacaccgat

SEQ ID NO: 37861 - DNA, 274 bp, Gossypium hirsutum
  unsure (1)..(274): unsure at all n locations
  Clone ID: LIB3135-049-Q1-K1-E2
naaaaacaatacaaccgtgtgtgggagcttgcaagctgccgaataaggctgacaaaaataaaggcaacttggctgggaccctgccagccaaactgtaggcgtccacatcccttacaagatcagcgcttccactaactgcaaaaatgtggactgagatggatgaacagagggctttgcaacagcttgcaggaaatcaactttatgatttagaagaacaacaacattactgcatatggctttttggatggaattttcagaatccaacactcttctc

SEQ ID NO: 37862 - DNA, 281 bp, Gossypium hirsutum
  Clone ID: LIB3135-049-Q1-K1-F2
cacacgcagccggatgggaagaggcgaccctatgaagcacgtctgcaaggttagatgaacaactcctatgcctagtctgggtgcctactggcgatgcacccaggcctgccatggttggagcgcttagggatttttcatagaagggatattgtgagatctatacgccaaaacttccgatgcgatgaacacaaaaagcgatgcatatcctgctctagcatgagactggggatgggacgctttcagcataataaacagtatcgtcaaatcgttttcaaggaacc

SEQ ID NO: 37863 - DNA, 194 bp, Gossypium hirsutum
  Clone ID: LIB3135-049-Q1-K1-F3
gccacggaaaaagctggcgtaaaaaacacctgtgagaataactcacggggtaaaaagcagagcgttcaaaagaatagtgcatgtctcaatgacttcgacagatacaagatcaggttggccaccatcaaaaaagctggagttgtgaggcacagagcctcgctaagattgaaaaaggaaaatgcgccttgaagaga

SEQ ID NO: 37864 - DNA, 367 bp, Gossypium hirsutum
  Clone ID: LIB3135-049-Q1-K1-F6
gccatctctaaactgcacttcagaggtggttctagcccacacaagaggagaaaacatttttccgagttcaatctattggcttgttgatgttcaagatgttgcatatgcacatattcaagcatttgagattccttcagctactggcagatattgcttagtggaaagagttgtagagtttccggagattctgaagaccttgaatgagctttatcctactttgggactcgaaagaaaatgtgaagaacatgacgaccctcttaagcgtatataccaggtgtcccaggagaaagcaaaaacgttgggtctcagcttcactccttgggaaaggagtctccaggaaactgttgaaagcttgaaggagaaagga

SEQ ID NO: 37865 - DNA, 359 bp, Gossypium hirsutum
  unsure (1)..(359): unsure at all n locations
  Clone ID: LIB3135-049-Q1-K1-F7
ccacgcgtacgncgaagagcgggcaaacaagaagagaatgctttctccggaggaccagactatgacgagccggagaatatgcccatgggcgaagatataccctacaagaaagagaagcatgagaacggggaagctgaacttggaaagaaggaaacgatggacaatggacaaccaaggtctcaagcaagcctggaagaacttagccgctctaaccaggatgctctgcctgccagcctagctgaaaaagaaaagcaaactgaacaggctgctacagattcgtcacggaaacagaaaatggagcacaacttggaagagcaggaaacacatccttcaagtggtattcaagagtatggtgaaag

SEQ ID NO: 37866 - DNA, 366 bp, Gossypium hirsutum
  unsure (1)..(366): unsure at all n locations
  Clone ID: LIB3135-049-Q1-K1-G12
aaggccggaaactgatatcgatagttattaatacttgaaggtgtgctctccctatgaataaaattgtctggttcttgtaccaaatctaatatgagctcatgatatctaactattcttgtttttgagctcatgatttatagattcatgttgtactatgcattctgggatttttcttgaatcttcgcacttgcntgaaaaaaaaaaaaaaaaatataaaattttttatttataataataatttaatttttaatatttattttttttttttctataataaatatcatttttcttttatataaatggggggcgccctttaaagataaaacatttctaccgccgcctggtgaagaaataattttttttttt

SEQ ID NO: 37867 - DNA, 235 bp, Gossypium hirsutum
  Clone ID: LIB3135-049-Q1-K1-G2
caaaaatggctttagctgggtttttcttgttgggtttactttcaatggtctcagctgttcatggatatggtgggggaggaacaaagcttacacctcactttatatggggggagtgaggcttaacgcacaagggggggcgcttggggttatggaaccctatagccagggatattggacaaacacaccaacttttaacacacctttgttcaacaatgggcttaactgtgggtcttgc

SEQ ID NO: 37868 - DNA, 432 bp, Gossypium hirsutum
  Clone ID: LIB3135-049-Q1-K1-G3
atttgagaaaattgcttctactcttatgccagaaaaagattggtccattcgcattgctgcaatgcagagagttgaaggccttgtttctggaggtgctgctgattatccatgtttccggggacttttgaagcagcttgttggcccactaagtgcacagttatcagatagaaggtcaagcattgtgaagcaggcttgccatttattgtgcttcttatcaaaggagttcttgggagaattcgagtcatgtgctgagatgttcatcccagtccttttcaagttggttgtgattactgtgcttgtaattgcagagtctgcagataattgcataaaaatgatgttgcataactgcaaagttgcctgcgtgctttcccgcatagctgattgtgcaaagaatgaccgtaatgctgtactccgtgccaggtgctgtgaata

SEQ ID NO: 37869 - DNA, 210 bp, Gossypium hirsutum
  Clone ID: LIB3135-049-Q1-K1-H1
gaagttcatcatatttgaaaaagctagtaatagacatggggtattcatttcttagaaagaactgcagggggccttcagttgcactaaacattcctcacatcaatctcattgaagttggaatgatatactatgtctagtgtagtgtggattatgccaagaacctgaaactgttggttcatattattattattattattattattatccaac

SEQ ID NO: 37870 - DNA, 248 bp, Gossypium hirsutum
  Clone ID: LIB3135-049-Q1-K1-H3
gttcctgaattcaagtctcaacagtcgggcaagaactccgtctctgcttctactccaattttaaattcaacttcgcttgctaaatcgtcgtcaatcaatacaacatatgctgcagtaacaaataacacgagcggtggagataacttgctagcaagtgtaaagggtggttcaccgagtagcatatcggaatacttgatagagacgctcccagggtggcacgccgaagattttcttgagtcctcttcacc

SEQ ID NO: 37871 - DNA, 278 bp, Gossypium hirsutum
  Clone ID: LIB3135-049-Q1-K1-H6
ctgtgtgcttagatttgtagacccatttcctgcttacaaatcttgttgtgcatttctgggggttaatttttaagaaaaagaagatgtcaaaagattggcgaattggcgtctcaatgggtttctccaaaggaagcaaagcagctctttaatggtcaatcgacaatattgttgtcaaaggggataccctttttcttattcacgtcaaacccaatctgagcgacgcggtttcggaccctttttggttcaccagaggctcaccttttgtttcattttctggg

SEQ ID NO: 37872 - DNA, 411 bp, Gossypium hirsutum
  Clone ID: LIB3135-050-Q1-K1-A11
tgcattttgaagcatgccatatcagattagctcccgtttatatagcattgttgcggggtatgggggacaataacgaggcaaagaactatagctacagcctcgaggtgggtgggaacgggaggaagctgatttggcacggggtgcctaggagcataagggacagtcaccggaagattcgtgatagtttcgatggtctcattatccaacgcaacatggctttgttcttctcaaggggagaccggaaagaattgaagcttagagtgacaggaacgatatggaaagagcatggacggggttgtgcctgtaaatatggcctcattctgttttgtagtgatcccaagcaatatataagagtatctttctagaaacttcatgggacttttggacatgtattatttggtttgtagaagg

SEQ ID NO: 37873 - DNA, 252 bp, Gossypium hirsutum
  Clone ID: LIB3135-050-Q1-K1-A4
cttttattaattatgtatatatattgacaatgtgtttagttccagtgagccaatgatgatataatccactgtggatgaggtgcagtggagccaagaacgaacctacttggcagaagctgcaattcaatgcgtttaatggattcaactgatgctgcgtctcttaattaaatgcttttaacttggtgtttcttgagcatgggtttgggtttgattgagtttaactataccctataccttttgctattaatttcg

SEQ ID NO: 37874 - DNA, 164 bp, Gossypium hirsutum
  Clone ID: LIB3135-050-Q1-K1-A9
aaacaaaaccagaaaattgccagtttggcttaaagctttataattgcatgcatgcacccacccacacacacatacatatatacatacatatatagatttcaaattgtggcatatcacattacttgatgcttggccacaatcaactataactaccgttttacacc

SEQ ID NO: 37875 - DNA, 434 bp, Gossypium hirsutum
  unsure (1)..(434): unsure at all n locations
  Clone ID: LIB3135-050-Q1-K1-B3
ggagacaattgtttgcaggcttgagcataaattacattaagattgttccttcagttgcagtgggattcgcggcatatgacatgatgaaggtttggcttcggattccaccccgacagaaactacaggcagaatcatctggataaacagagatggatttacaatgggttgcaaccaaaatccgaaagaacttggtggtagcattatatgaactaagaaaagtttagcaaccaaaaactagtttcctcaattcattgtgattctttttttctattgagattgttatgttttattgtgggatgcatataaaataccttgtttcccaaaaaaattcatgcttggattttcattatggttggctggagtatagttcttgccnaaaaaaaacttttagaacaaaaaaactttttttactatataaaaaaaaaattataatt

SEQ ID NO: 37876 - DNA, 124 bp, Gossypium hirsutum
  unsure (1)..(124): unsure at all n locations
  Clone ID: LIB3135-050-Q1-K1-B4
ngcgagcgtacggttgatacctaatgtaattgtgcagaaattctgtgcggtaaggttcagggcataccaggggattgtgcagcttgaacgcaagacactaactttctgtgggagagctgcgaat

SEQ ID NO: 37877 - DNA, 176 bp, Gossypium hirsutum
  Clone ID: LIB3135-050-Q1-K1-C1
ctcgattatggcggtcgggacggtacatcttattaaacacatgtacgccgtattaatcccgcttatgctggggcataaagagatagttcccagggcgctgggctttgatctctgaccaccaatgggagggcaatactcgaactgtctctagtggctactacggacatacctgatct

SEQ ID NO: 37878 - DNA, 458 bp, Gossypium hirsutum
  Clone ID: LIB3135-050-Q1-K1-C10
gaacgcgtgtttgcgaaacgattctcgcaacacgtccaagcttccattgacagaatcaggggcggtaatgatgcccatatgccctgactgatcccacatgaccacatggcatgatcagcattctccggatctttcttgcacacgggagagacaatttcaacactcaactttctacatgtcacattgcaacaatcacacacatacttatcaaacagcctccatatgtgtattctgatttctgctagaatgcgcatagtccataatgatttgtcaaattcatcgttgtcatcactattatggaaagtgactgtagtcttctatatgtgctccgcagaaagaactcgatacacacttttcattgtatattttcccgacccttcatatttccaaaccatcaatgtttccgaaccacccctagatctatgaatgcagaaaatacgcacttgtgtagctgcatt

SEQ ID NO: 37879 - DNA, 389 bp, Gossypium hirsutum
  Clone ID: LIB3135-050-Q1-K1-C11
cccacgcgtccgaggaaatccatcattggtgattttctactctctcggatccctcccctgcgaaacccttggtttctctttggtggaacactatccaaacttacatgaaaaaagcaggcagaagcgatgctcgtattgttttagcaaatcaagtcaccgataggaactattccatcagaaaaattctgaaaaaatctcaagtttccttgttggctaaacgagttcactccgaacccgatggattgacttttgttcttacagccaaagacgtggctgtcgaaggcttttgcacgagcaactgtggattccatgaaccctaaagaaaagtccgcgtttgtatgggttggaaactcggagactcaatgcccaggtcaatgcgcaccgtcaaa

SEQ ID NO: 37880 - DNA, 156 bp, Gossypium hirsutum
  Clone ID: LIB3135-050-Q1-K1-C2
atcgtgtataacgaaaatgactgtccatcttttcaaacacttgtacgccgtatttatcccggttatcttggggcatatataaagatttcccagttctctgtgctttgatctatgtccaccaattttccagcaatacactaactcctatctaacaac

SEQ ID NO: 37881 - DNA, 341 bp, Gossypium hirsutum
  Clone ID: LIB3135-050-Q1-K1-C4
cccacgcgttcgctaccacacacttgctaatatttctacttggagtggccgctctaaccactccctctttgggtacccatgagtcctcccaactctgggaagccctctacttctgtttataagcctcctaaagtgaaacccccaccttatgaacataagccacctgtctatgaacctccaaagatggaaaaacctgaacctaaaccaccagtttatacaccaccaaagatagagatgccagatcccaagccaccattatgtgaatcaccaaaaaaggaaaagcccgaaccatagccaccagtttatacacctccaaagaaagagaatgcttgacacaaacc

SEQ ID NO: 37882 - DNA, 264 bp, Gossypium hirsutum
  Clone ID: LIB3135-050-Q1-K1-C6
cccacgcgttcgcccacgcatacgcttggttgagtgggtgttctggaaaaaaaaaaggcagaaaaaaagaaagcaatgaacaatggaaatggtttttattgtggttcaaagttttaagctattgtataatacaacccaaaatacataaactaacttaaggaaccgtttgtgtcgaagattaagaggataatctcttggtttttttatgaccatttttaataccttctgaacatacacggaaagcattgaatcggtgaaaacata

SEQ ID NO: 37883 - DNA, 392 bp, Gossypium hirsutum
  Clone ID: LIB3135-050-Q1-K1-D1
cttgagtgatgaagtataagctggactatttttgagtcgctgatacattgattaaacaaaggtagaagcatgcagcagagcgatgctatcataaacgatcatgctcactatatgacttgctataccatagcgtgggtgcatgtgtatttttgggaatataatgcatatgcagatagatgaaggcagtgcttggtatagctagctagctatatatatatactactcttacattaccatacgaacagcctattcatagactaattggattaagagcatgcctttcttgataatatacttgtgccaatagtgagattgaaattagcatctcgataatattcgttgctcgtgaatagaatacacttatataatgtcggcctatgacttgatgcact

SEQ ID NO: 37884 - DNA, 366 bp, Gossypium hirsutum
  Clone ID: LIB3135-050-Q1-K1-D11
cacgcgtccggccacgcgtacggctatgttcgtgctggcgagccccgagaggcttacactctcaccaactgcctgggcgaacatggtgtgcaaccaaacgttgtgatctttacaacatgtgcattaaagggtgacgcactgcgtggccaaatgaatcatgcactgctgcgctttatgagaaaatgtgccatatcagctttaccctcaaactgactacttttgagacacctatatggggatatggtgaagctaaacagcccttgaaaggtcgataaccttcttcggattatggcataaacgggtatttttgcttataggagcaccatacagcttcttgctgatgcttggcgagccatcgttttacta

SEQ ID NO: 37885 - DNA, 367 bp, Gossypium hirsutum
  Clone ID: LIB3135-050-Q1-K1-D12
ctcacgcttacgtttagcaaagaccttgactgcactcgggtatcgagggttctctaagtgggggagggatgggttatgccccgcaaatcagactggcattacagcctatgaatgccttttgtggaaacactcctaatagttcggccatgtgtgcaatgcatgcaagctattttgcctcaaaagagactaaagcagatgataattcaatgggtttacattccagaaatgcaaaggcgtcgtacccagatttagcattagcaaatatgatcatgtgtggcgagaaatgtaaagattgaactgaatataacacataccttgattggaaagttcgagttgagtagttctgcaaaaaaaaaaactcaatgcc

SEQ ID NO: 37886 - DNA, 338 bp, Gossypium hirsutum
  Clone ID: LIB3135-050-Q1-K1-D5
acggctaatcatcatgcacatcttcttgctggcttttatcgggctaaaaaatgggggttcataggctcttaggctggcgatagcctacaccctctgttcaaacagtacaaccctcctcctgatttacaaggccatcgtataaactccttataacgcagatagatctgaacattatcagaagattagaaagatacatacacatccaacgctcattaacctcgtcatagctcacacctagatcctatgaaatgtacttcacatatatatatccttagaccctgatataactttacagaagttccacttacaaatatggaaatccttcagtgccacaatta

SEQ ID NO: 37887 - DNA, 140 bp, Gossypium hirsutum
  Clone ID: LIB3135-050-Q1-K1-D8
gagagagagagaaaatgacagcttggctgtatacgtccttgctgttgcagtggcttctgagagactagagagggctcctgcctttatactccatacttactacctgtgaatctagtcactgctactggatgggcacacca

SEQ ID NO: 37888 - DNA, 285 bp, Gossypium hirsutum
  Clone ID: LIB3135-050-Q1-K1-D9
tcggccacgcgtgcggtcgatgccatcccgtggaaccaccgtttctttaaaggtgaggaccagagttgcattccgccaatctgtcgtcgccccttacgaaaacttggacgataaagacacgcagatcccaggatcggaagaagatcgacaagcacctcacggtgaggcacaattctcggaaaaagtgtctgttaaagtttaccacttgcctgggggctatacaggggctctcctcaccgtggacagagacatgtgatctaaaagtcgatgagtggacaggctaaa

SEQ ID NO: 37889 - DNA, 357 bp, Gossypium hirsutum
  Clone ID: LIB3135-050-Q1-K1-E5
ccaagatatgtttggcatgtgcctgatgtaaatggaccggcattgcagcgggagctcagggctttctacgggcaagcccctgctgtggtggaaatttgtgtgcacgctggtgctgatgtgcccgatcaatataaaccaaccatgaggttagatattgggatccctactagccttagagaagctgaaatggtagtctgatccttgaatgagttttgcgcattatttcgtatcttcatttattgtaaattagttcatcagacggttgtagagcttgcttgcttataccatgcatcaaagcactattatgaattcttttacttttattttactgaataaccatacgtgattatatgattg

SEQ ID NO: 37890 - DNA, 415 bp, Gossypium hirsutum
  Clone ID: LIB3135-050-Q1-K1-E6
cccacgcgtccgcccactcgtccggtttttttgccttttcattccgttcttaccatatcatgggcagttgggttggaatccgcgtgatggttcgagagtggtttcaaatattcttcgcatctatcttcggccttgtcttagaagtcccgcgagactaagttagtggtcgagtcgtttttggtaattgacacccgtcgcattagtttcaattcatatgttaccattcatagtgaagtagccctctttttgatgtctgagtgccttattctatctatcaaagtccttcctttatctatagctcgggtcagtcccccatggtctgctttgattttctcgaacagtgccggtccgcatcaggggctctcgtgcgagccatgcaacgttctcaggcaggaactgctcctttccttgagct

SEQ ID NO: 37891 - DNA, 340 bp, Gossypium hirsutum
  Clone ID: LIB3135-050-Q1-K1-E7
cccacgcgtccgcccactcttccggcttttttgcctcttcattcccttcgtgcgatatcgtgggcagtcgggttggaacccgcttgatggttcaagagtggtttcaaatattcttatcatctatctcgagccttgcctcacatgtcccgagagactaagttcctgctcaagtcgtttttggcaattgacaccctgcgaattatgttcaattcatatgttaccattcatattgaaatatccctctttttgatgtctgagtgccttattctatctatcaaattactcccttcatctataccttagatcagacccccatggtctgctttgatttgataaaaca

SEQ ID NO: 37892 - DNA, 438 bp, Gossypium hirsutum
  Clone ID: LIB3135-050-Q1-K1-E8
gcttggggtttgattcacgggatgactaattattgggcagtttccacgctgggatggattgcagttgttttcattttcagtttgaagcattctggtgcttatgatttcagttttctcgagattgagcctgttacagatccttcattgccttctgtcccgtttttcggaaatggtagaacttgcaaatgaattccagttccggtgaagaccagaaagtgaatttgatgatgctatcacaggcaaatgtggtgaccaccggaaggtgaaatgtgggggtgaaagagactaaattggaaaaagataccgcgatgcgttgtcgcgggtgttactcgtgtgctctttctataaacactttatattacagattcattgctttcctctgctttgataatacaaagttaccaggtttgcttgttaacttgcaaagatttacacaaa

SEQ ID NO: 37893 - DNA, 279 bp, Gossypium hirsutum
  Clone ID: LIB3135-050-Q1-K1-F2
tgccgttggaccgtttaagaccaaatgctgctcactcatatcgggtttggctgatctcgagggtgatgttgggctttgcactgctataaaagctcatgggttagtggttaacctagacgttcctgtttgattgtctttgctcctcaaatgctgcgaaaagcaaatgcactgcttgttacaagatgagcttaagcaatggttgggagtttcttttacgaagatttatttctctgagcgtgttaaatgcggtgaactgatatgccaagggttcgcataaat

SEQ ID NO: 37894 - DNA, 294 bp, Gossypium hirsutum
  Clone ID: LIB3135-050-Q1-K1-F3
gtggtgcagccgtattctacttgcgttttgctgtaacactgcagaacatctttcctacaagtggtgccgcagaacatatgcttcctcagcatttcattgtcattttatgcaggccactcatatgattttggtaattgcagcactcacgcttatcataatttacactgaagcttgtcgccggcttgatctaaccattgtgggatctctagttggtgaacattttttgatatctccccagacagggtacccacaggaactcttcaaagtgacttcatgacacagcttgtttgctat

SEQ ID NO: 37895 - DNA, 458 bp, Gossypium hirsutum
  unsure (1)..(458): unsure at all n locations
  Clone ID: LIB3135-050-Q1-K1-F4
cgaagacgatctatattcacgtaagatgtccttgaataagtgtgctccattggttgtagcatctccaaataaaatacaatcatcggcaaatagaaggtgggaaatcggtggaccgcttctacaaccttaacacctttgaaaaacttctcatttgttgcaagtcttaataagcccgaaagaccttgtccacataaaagaaagagaaacaggcttagaggatcgccctgtctaagacctattgtgggtagaaacttttatccaatatgcccattaatgaccactgaataagaaacagtcgttacacatttcataagagcatcaacccatttttgatcaaatcccatttgtatcattatctctcttataaaattccattcgaccatatcatatgctntactcatgttgagcttaattgccatatatcctttcttccctgatctcttatgttttaacatatg

SEQ ID NO: 37896 - DNA, 439 bp, Gossypium hirsutum
  Clone ID: LIB3135-050-Q1-K1-F9
cccacgcgtccgggaggatttgtgactcattgtggatggaattcaaccttggaaggcgtgtgtgctggtgtgcctatggtcacttggccaatatttgcagagcagttctacaatgaaaagttggtgactcaagtcttgaagattggagtggccgttggtgttcagaaatgggtgagactggagggagattttgtggaaaggggagccattgaaaaggcagtgaaggagatcatgaagagtgatagagcagaagcaatgagaaacaaagccaaagcactggccgaaacagcaaaaaaagctgttgaaaaaggagggtcttcttactctgatttggatgctctgattgaagaaataagcttacattctcattaaatccatagacatttcatattgtcggttggttcttcaacttcatgcatgttttgctttactggtaaat

SEQ ID NO: 37897 - DNA, 333 bp, Gossypium hirsutum
  Clone ID: LIB3135-050-Q1-K1-G5
cccacgcgtccgcggacgcgtgggctagaccaggtgctcgttataaaggctacgaaccttgcaacgggctatagctttgttggaattgattctgatcgaggtagtgtatggggatgcatctaaatccgcgtatggaaccacaatctctgccgctagctttgcactcggaggatctgaaaatggctcccttcattatttggttgaaccgagggaagtgcggaagctagagctaaagcaaggtacgaagctacagctagcaagctgctttggtagtactcgactgaaaggagagggctttgcagctgctgtccaacaagttgaagagtttgctac

SEQ ID NO: 37898 - DNA, 414 bp, Gossypium hirsutum
  Clone ID: LIB3135-050-Q1-K1-G8
cccacgcgtccggccacgcgtccgaccacgcgtgcgctttgaagaatattgaacttctttggatttgattgctattgtgtatattctctatttttgcatcttttcgtgagtatttgcgcgtcaatgtctcccttcacaagattaaaatctggctttttatatccgaaaagaaagaggaagaattcgaaataaaatacaatgtttttctcttgtttgcactcgctgttggtttccttgtctgtttgcaggtgtgctggtactgtgccagctggcatttgtcgtggaggtgtacggaggcgctagagattgttgaggttgctgcagcgcaaggcatagaaccctagggttcttcctgttctaaaatctttaggccatttgggccggtgtcattttggtgttgatccaaggcattgg

SEQ ID NO: 37899 - DNA, 356 bp, Gossypium hirsutum
  Clone ID: LIB3135-050-Q1-K1-H11
acgtgattaacacatttctgggggactgaattcggccctgagttcaaaggataccgggagggggattcataacctactgcctttccgcacatttgtatcaccgtggatgacatgtatgaggcatgtggaagatttcagagacttggagtagagtttgtctaagaaccacacgatagctatgcatgtatcaaggatgcccctcgttactggattgaaatctccgatttgaatggaatttgtgcaatacttggcaatggagcttaagctagtgcttacccagggtcatgcgacaaggatatggtatatgtagggggttgcgaccactgtcatgattatagagtgataacgcatgatat

SEQ ID NO: 37900 - DNA, 199 bp, Gossypium hirsutum
  Clone ID: LIB3135-050-Q1-K1-H12
gctagactaacgtggcgcttggagaagcagtggggcctctgataacacaggaagcggcagggggagacctagcagaaactacgacgaaacacactagagaggaggaggcgaacaaaacaccaaggctgagactcaagaaggacgcggacggtataatggacgacgacacagacgataggaggcatccacgtggacaccg

SEQ ID NO: 37901 - DNA, 355 bp, Gossypium hirsutum
  Clone ID: LIB3135-050-Q1-K1-H2
gccacgcgttcgcatttgtggagtccctgattacgtgataaatggtaagcagcagatgtggggctgccaaccacccgaagtcgtcttgaaagcttttcaagtggcaacaaatttagataccctctgcttatattatcaagcatttgtaacctatacaaatcaataaatcgtctatgataataaacatcaattcttaccaacgaggcgtgggattttattaattgattgaataacctgtcgatttatgcttgctcgtatgctatagagtgtatacgaacaaattgattggctcaaacttctatgtgcatggcatgacatgacacattgattgaatatatcaaacaggttgtcatgt

SEQ ID NO: 37902 - DNA, 342 bp, Gossypium hirsutum
  Clone ID: LIB3135-050-Q1-K1-H4
gcttaaagtgcacaaactggaaaaataccttttagataattttcctttattagcagcaagagtgcaatgccggggaggatcgttttctcctgcatattagggttttaagtttcgaattcaaacgccgttcacaaggtgaccactgctgttgacagcaactacatctcttgccgttattttacatacaagtaacacccggtgtatgatacggtggtccatacactacgtgcgcgtccaagaacacaaccaccacctattggctatgatatagttcatcacagagctacttcaccaaccacgtctacatgtgcgccaacgtcatcaacatcatgtagattaccc

SEQ ID NO: 37903 - DNA, 246 bp, Gossypium hirsutum
  Clone ID: LIB3135-050-Q1-K1-H5
cccacgcgtccgcagacgcgtgggctagactcaggtgctcgttataaaggctaccaacctggcaacgggctatagcatcctcggaatcgattctgatcgaggtagtgtatggggatgcatataaatccgcgtatggaacacacaatctctgtcgctagctttgcactcgtaggatctgaaaacggctcccttcattacttgggtgaaccgagggaagtgcagaagctagagctgaagcaaggtacg

SEQ ID NO: 37904 - DNA, 262 bp, Gossypium hirsutum
  Clone ID: LIB3135-050-Q1-K1-H8
cccacgcgtccgggggcgtttctgaaaagcctcccgcgtcttactcgttgctctatactgggaatcattagctctacattgtattacccaatacatcaacatttatatatccacatccaaacaatgtcctagtcctctgaatataaaccgcattagctgctttgcttgtgaactatttattcaaataggctttctaaatttagaatctgttcttatgccaagacgaaaataacttagacagtaacactcttgatcttgctaa

SEQ ID NO: 37905 - DNA, 450 bp, Gossypium hirsutum
  unsure (1)..(450): unsure at all n locations
  Clone ID: LIB3135-050-Q1-K1-H9
gatataacaaaccgtgcaggcctggaactcattgcagtactcttgataagctatatgctggggagcagaagctttataaggaagtgaaggaggaagaaaccaccaaattggagcgtgaaaggaaattgatgttgcttcaaaagcaagacgaaaaccatgactggagcaagacagagaagatccaatcaagcgttgagaatctggataatgtcctaagacacctgcaaaattcaataagcacgtactgttcgtctatattggagatcatcgatgaggaactttacccccagctggagacattaatatccgggctgatggagatgtggaaaatgatgtacaaatgtcatcgagttcagaaccttatttcacagcagttgaatcatgtgactgatatangcattgacctgaccaccgactctgatcgttaagctacagatcagcttgaaactg

SEQ ID NO: 37906 - DNA, 281 bp, Gossypium hirsutum
  Clone ID: LIB3135-051-Q1-K1-A6
cacaatcgatgaagcacagctctttgagttttggccagcgaccattattcaatgggtactttgggcatgaaagcataagaggcgtatacatcgagtacatggaccaagatctggcttatgatacgacagatctgtgagtgcattacaaccggagttaataaaaagatcatagtgctcagtcatggaggggaggcagatggcgcaccttggggatgcttggagtatctaaaataagtgtggcacacataatcctgctgtccgaaaagatgctcacaagagat

SEQ ID NO: 37907 - DNA, 344 bp, Gossypium hirsutum
  Clone ID: LIB3135-051-Q1-K1-B1
ctacagtcctggaattacatttaccgctccctctttactgacaaaaccttggatctcacatgggactcctttgatttgactaagcacggggaacgagtaaagtacaaatcctttaatgagattattatcaaggaacccaggctgtggaaacggtctgtatcacgtagtcaatttgttatgatgccggaggtgccattccaggagtatcgagatggatcttagaagtatgtgtcgactcggaaacacgcgctactgtgagtataagatcggactctgtgcaggacatggaaggaaccgtgttatcgagccagctagtgctacccggaataacattatgttccgac

SEQ ID NO: 37908 - DNA, 371 bp, Gossypium hirsutum
  Clone ID: LIB3135-051-Q1-K1-B3
accgatgacagattctacaatgccggctgtgaatcaaattacattcttgcgcactatcaaggcccaaggatggtgttatgcctttgggaaaagttgcagaaagagcaccaggcctactgttgtgagtaataatttaaccatacttgaagcttcatacagcttttacatgtaacatcatgtaacattgaaaccaaagctaacctttttagggaatagtgtatgcgcagttcatgtaattacgagattttaagcaccgggaatcttacattacaacaattatttggggtcatatatcatttgttcattcgttaattctttagcattatcgtctatgttgggtgtgacaatacattgaaagattgtccatggaa

SEQ ID NO: 37909 - DNA, 149 bp, Gossypium hirsutum
  Clone ID: LIB3135-051-Q1-K1-C11
cccacgcgtccggaaggaccttccactctcttgcttcaccttctctttctttccccggatctcgttcggtctctttgaaactcacccccgcttcaactcggcccttctttggtctttagatgccaccaacgccacagattagggcaccc

SEQ ID NO: 37910 - DNA, 262 bp, Gossypium hirsutum
  Clone ID: LIB3135-051-Q1-K1-C12
gtggatccaccatgttcaaagacttccacagaaggttgcagcgggatctgaaaaagattgttgatgctggagtacttgcgtctgatactcggcttggtggggaagtaaaagcacatcctgtggaagttaatgtagttagtcatcctatccaaagatttgcggtatggtttggaggttctgtacttgcatcaacgcctgaattttttgcggcatgtcacacaaaagcggaatattaggaatatggagccagcatttgccgtac

SEQ ID NO: 37911 - DNA, 400 bp, Gossypium hirsutum
  Clone ID: LIB3135-051-Q1-K1-C2
tggctgaaaacccgagaaaaatttaagtgactccatatttccttcacagtagggcacagttggaagacgtggttgctatcttcttctccttggccacatctcatacatcgatcctcagtcatcacttttctcaacttcagattggagaaagtggggatgtaatttcacgctattttcgacactgtaattttgatttttgagggcatgtgtaaattccacaatttcctgtagaaacttttagtattggtctgtaaataaaaactaggatctatattagcctcctgtaatagtttataggcactccttactgaaaagtctccagttgcctcccttctccacacttggaagtcttcattggttgactttgaaagcggaatctgcaatattttcctagcaatat

SEQ ID NO: 37912 - DNA, 468 bp, Gossypium hirsutum
  Clone ID: LIB3135-051-Q1-K1-C5
ctgaaagctaaaaaggaaacatggtttttttttgagttagtgaaacaatcatggccgacaccttgcttttcacctgcctgctattatttcttgctgccatgcaaggcgtccatgcagtcgactatgccatcaacgacaacaccggcaacagtggcggcggtgttcgtttccgaaccgaaatcggagcccaaagcagcctccaaaccatgtcatccgccacagacttcatctgggacatcttccaacaaaccaacccatccgacaggaaaaacgtcccgaaagtaacactgttcatcgaaaacggcgacggcgtagcctttgccatcaacaacgaaatccatgttaacgccaattacctaggaaactacacaagcgacctgaggaaggaattcaacggggtgctttaccatgaaatgacgcatatttggcagtggaacgggaacggtcaaacccctggggggttgattg

SEQ ID NO: 37913 - DNA, 446 bp, Gossypium hirsutum
  Clone ID: LIB3135-051-Q1-K1-C6
caaaccttaactacttccatgaacaacaagtattaatcctttctttttggcgatggcaacgtatggagttggtttagcagaagcttacgttatgcgatctttacataaggagaaaatgaagaagatggacaagcaacaggcgtcaaagagtgaggaggaggaggaggagaataataacaaaatggtttttgatgatgaaatgaaaatgcctgcttcttgtttctcctgggtttctaagaaaacccattttgctagggtttctgatgcttccggaaaaccaaacgtatgatgacaaacagtgtcttgagggccttgcttgtatttttattatataagctttggccaaaggaaatgccttttagcctgttaaactaaggaattttatacaaagcttgggattgctttgctgggattcttgcttgtatcaataaaagaaagatacttgc

SEQ ID NO: 37914 - DNA, 340 bp, Gossypium hirsutum
  Clone ID: LIB3135-051-Q1-K1-C7
ggaattataataaaggaacaaagggtggacttacgtcacgtgtgttgcaatcaaggatcctgggcgcttgacgatatatagagagaacgagggctgtctacttgtttttacggccagtgtgaacatcttggcaagcgaacgatctgtcgcgcatatctcacagcaactgtaactgagtgacgaagccctcgacccaagaatccggtatgtagaagtctcgaaccctggcatcaaagaaagtcactttcagtatggaatgcctcactcaatgagggggggtatttattacatatgcaagctctctatgcagcgattgaacccatgcttgttatcaaaaatt

SEQ ID NO: 37915 - DNA, 160 bp, Gossypium hirsutum
  unsure (1)..(160): unsure at all n locations
  Clone ID: LIB3135-051-Q1-K1-D1
cccacgcgtncgggtaaggagatttgggggttattctttagattcttaaaagcaccataattttctttgtgtactgttttgaacccattgtgcccccatctttcccctacatccctgtccttcatgttcccttatatccctaacaatgatctttattgtg

SEQ ID NO: 37916 - DNA, 327 bp, Gossypium hirsutum
  Clone ID: LIB3135-051-Q1-K1-D11
cccacgcgttcgcccacgcgtccgcggacgtttggggataaggctaccctcctctcttagattgagatgcttaccaaccaagtactactattactgtacatacagagggggagaagcactaatcaaagtatatttcgcctagttgagcttttttgagtgtggcgaggtcttgagaggaagaagctggcgagtagacttcttgggctatgttcggtagaagacttccataaatgttggaaggcacctttcgcgggatgctgtcccactcgcaagagccgacggggtgacccacataacgatcagaacgaactagcccctcgtttattt

SEQ ID NO: 37917 - DNA, 243 bp, Gossypium hirsutum
  Clone ID: LIB3135-051-Q1-K1-D5
gtaagttctcaacttttaaaggcaagtgatttgaggctggtgacgtttgtgccaagagatggtgagagaaaaggtgctgaatcaacttttaatgaaaactgtaaagatgcagctgaccaagatgataaatatcacctataacaacgattacacgtgtacagtaaaatcatgaattctgcttgtcattcttaacgttttaatttgtatgaataataataatggatagtaaaatgtttgagaggg

SEQ ID NO: 37918 - DNA, 456 bp, Gossypium hirsutum
  Clone ID: LIB3135-051-Q1-K1-D7
ggaatttcgattagtgaacatagagtggatttactccacctggattggaatataacaacccctccccccaacgttatatagctataacgagggctgcctttctctctctaccgcctgtgtctatctcctgtcaagtgtactccctgccacgcaactctcacagcaactgtaactgtgtgacgaaaccctcgacccaggtatccggtatgtagaagtctcgaaccctggcatcaaagaaagtcactttcagtatggaatgcctcactcaatgaggaagtatattcattacatttgtaagctctctatgtagcgattgaacccatgcttgttatcaaaaatttcgttctcctttggaggtgatcctcctcttcagaggaaatctcatggtggtcagaatgagcgcttgtgggggaagcaaggagagtaatcttctatttgtgaaactatatttcttat

SEQ ID NO: 37919 - DNA, 333 bp, Gossypium hirsutum
  Clone ID: LIB3135-051-Q1-K1-E11
catcgatatgtcaagcaacaaattcgaaggttcaattcctgaaacagttggaaaccttatttctctccaggtgctcaacttttctcacaaccacttaaccggtcatattccttcctcattggggaatttggtagcacttgagtcgctagatctttcttgcaacgagcttgttggggagattccttcggagttgactggtttgaattttcttgaagtgttaaacctgtcagagaaccagctcgttgggctcatacctcaaggaaaacaattcaacacctttcttaacgatttctacgcagcaatatatgactgtgtgggtttcccgtttaaaaa

SEQ ID NO: 37920 - DNA, 401 bp, Gossypium hirsutum
  Clone ID: LIB3135-051-Q1-K1-E12
aaccgtttaagcacaggcaagagctggtactagcctttttagtacaaagaatatgtagacgagcccggggatgttcgaaacattttggtagtagtagcaacccttatagctttcgttaccttgcaagctgggggcaaccctcctggcggagtatggcaagaaagagatcatgcaggcagagccatttatgcatccaactcagcaacctactatgtggttttgatttacaacaccctcggtctcggcactttcatacttgtgataataccgctcacctacaaatttccttggcacctggaaattgttattgccaccattttcatgggcgtcacttacgggtacgcagttttcgcggttacttcccatgaaataccgatccggtacgccatatgccccttttg

SEQ ID NO: 37921 - DNA, 331 bp, Gossypium hirsutum
  unsure (1)..(331): unsure at all n locations
  Clone ID: LIB3135-051-Q1-K1-E2
cccacgcgtccggccatctttgctgcattactcatcatggttgtttccgctcacgaggggcacgaccacacacctggaatggccatgtctccgggaccggcggccactaatatggccaacatcttggctccaactgcagtgatgggggtattccttgctttggttgttgcagttttgggtcctttaacagaataatatttaatattgcagtgttgtttcggatttcttcgctggccttaataaatgttttccatgtattgcttctcattccgcttcccttttcatttatgaaaatttcatgcgttacagtttaaaaaaaaaacaaaaatnn

SEQ ID NO: 37922 - DNA, 395 bp, Gossypium hirsutum
  Clone ID: LIB3135-051-Q1-K1-E5
aaacgatgagttgcataggaacgtgctgggcggaagcttggtggtcttagggtcgagaactcgtattggctcaatgaggagtcatcttacaaatactttgaagtcatcttagtggtgcctgcacacaacactatccgatatgacccaggcatgaactggatctgcaatgtggatcacacgcacaggttacgtccatgactgacctctgctggcatgaaatacaggggtcttctaggcaaggggcacttgcaccagacggctcgacctttgaggaggagcccctggaagagaaacatcacactctgacattcggcgctgccgctgatcccctggaccgaacttggtgattttgttgctgctatcttggcttcattactattgtaggttttataaca

SEQ ID NO: 37923 - DNA, 236 bp, Gossypium hirsutum
  Clone ID: LIB3135-051-Q1-K1-E6
gtgattatgagacaagtcaaatcctgcggacaggttgatgatgttcgatcagattctgaaggcgaggatgaacatgaggattgaatatgaaagcgtgcaaaccactatatttacttgttccccaaggtatttaggaaatcataattttcaatacaaatgtaattttctttcaattctacatatttcctattattgatgaaattaatgcagtgttgtacctttcctttttctctttc

SEQ ID NO: 37924 - DNA, 281 bp, Gossypium hirsutum
  Clone ID: LIB3135-051-Q1-K1-E7
gaccgcaaaatcgactgttgggtgtatgttacttagaaaagacccaggggcctgtgtgaaaaaaaagtgggatggggtcaaacccaaaaacacaccgaggacacactggagtactcgttagccgtctaagttacatattagcgcgagtaggtaggaagtttcacgagatctttcaaactgtgattttgattttagaggggatattgagaagccattattttctattaaaagtcttggagagaatttgccaaacataaaatttaagaacataatccatattt

SEQ ID NO: 37925 - DNA, 310 bp, Gossypium hirsutum
  Clone ID: LIB3135-051-Q1-K1-F2
aggactcttacctgtataggcatttggagaatctgcaggcacaggatcgttttattgtttataggatggtggtggttctctttaggaggggattgacatttgaacagacaatgtgcctattggaggtaatgtgggctgatcaagcaaccattaaagctgggctttctaaaaacacctggaggaggataagacagaaggcacccccgacagatgatctattggtggatgcaattgcagcttccatcttacagaagaagaaattgatcattgagaagtaccgccgcattgattaaatttttagggagtggca

SEQ ID NO: 37926 - DNA, 351 bp, Gossypium hirsutum
  Clone ID: LIB3135-051-Q1-K1-F3
ccgacacgtactctcagcctttcttggtttacctacaggaatccatgccgccggcctatgcgaggggccacacatacaaccctgctaaactaccatcacaaaaggcaccaaaggtctccatatgccgacttgcctaccataacaagccagagattcccgttattctactgggaactatttcgtgggcatactacggggtagtattgacaatttttgtgaccctacactcctgcgtgatgcacccattctttaaaccacatttattgagagaagattcaagggtctgggcactgatattcttggcccatgacgcggcatcatttgttgtatacacagcacacaattacttct

SEQ ID NO: 37927 - DNA, 260 bp, Gossypium hirsutum
  Clone ID: LIB3135-051-Q1-K1-F9
ctggcatatataccttggctacatgcattgttaatgctcttagaaaattcccaacatgtgggccaaatggaaaacttgaattgctaaaggatctatatgccctaagtttgaagaaaagagatattcttgtgctgcatggaccctctgttttgtccaaggaacttgagaaggagcgcatatagcgtggtgtgaggaagttcaaagtgaccacggaggtccaaaaagcttacttggaatacttgagcttccccaagggagac

SEQ ID NO: 37928 - DNA, 432 bp, Gossypium hirsutum
  Clone ID: LIB3135-051-Q1-K1-G3
tcgccgccattcattctcagcatctttaggttacctactggaatgaatcccgccggtcttgcaatggcagacacagaaaaccctgctgaactaccatcagaaaaagctccaaaggttttcatccgccgacttgcttacctcaacaagccagagattcccgttatcctactcggaactatagctgcagcagccaacggtgtaatatttccaatttttggtatcctaatttccagcgtaatcgacgcattctttaaaccacatgaattgagagaagattcaaggttctgggcactgatattcttggcccttggcgcggcagcatttgtggtatgttcagcacaaaattacttccttttcatcgctggaagtaaattaatccaacgaatcacatccatttgttttgagaaaaaggtccccatggaactttggtgg

SEQ ID NO: 37929 - DNA, 359 bp, Gossypium hirsutum
  Clone ID: LIB3135-051-Q1-K1-G9
aacagattgtccagggcctcctcttttatcttcaccaaaaccatggtcaaacttgacaggtgacagaggtggaggagacaagagtccaagaaccctacttgttcgagaaacacacaaagaagacatcactgtcggttgtaagagaaagagaaccgatgatcacacacccaccatgaccttattaccattctttctcgagccgatttcaattcaaaagcaccatcatcatcacccaccagctgatgaagacaacaacatagatcttgagctaaggcttggccatccacccaaggtaaaatagtttcatcataagaccatattataactgggccttactttctataatcatatgtttgtct

SEQ ID NO: 37930 - DNA, 264 bp, Gossypium hirsutum
  Clone ID: LIB3135-051-Q1-K1-H11
gaacaagggaggctcaatggagctcctatcttggtatttgagatagctcagttccatgtcggggatgtggtaactagcatgcataaagcatcttttattccgggtggtggagaatgtgttctttatggaactgtcatggggagcttgggggcgtatgcttccgacacttcccgtgatgatgttgacttcttttcgcacctagagatgcatatgaggcatgaacaccctcccttgtgccgacgaatatcatatggcttacatatc

SEQ ID NO: 37931 - DNA, 349 bp, Gossypium hirsutum
  Clone ID: LIB3135-051-Q1-K1-H2
cccacgcgtccgctgatttattacattgcagagttggcacgaatagtcagatgatcatggctctctctcgtctctccttgcctttctcattacttgtgttgtcgttgccagtcattgcttccgctggttatgatgattcatctaaatatggttttgatggaataccagctgacagcccccaagcaaaccctatttatggcactaaagaagatatctacacgccaaaacctgaggaaaaagtagaagaaaaagaaaagccttactatggcacacaaaaagaagaaaaggaaaatcgtctcaccataggtgttcaaggccttgttttatgtaaatcagattccgggtattc

SEQ ID NO: 37932 - DNA, 285 bp, Gossypium hirsutum
  Clone ID: LIB3135-051-Q1-K1-H4
accgcgcttactgcggttgacatgtgcttggcctgctcactatccataagctttgctgctgccttacgcaaaacaaccagtctatggtggtgaacgaatacttgcacctcattgtgcgtgtgctgaacaccgacgttgatggaatgcaacacatcatgtacgctttgacctacattaatgctattgcaaggcgatgagattgcactgactgactgaaggcgtgatgttaacatgaacacaatggcttgtgaatatactgatcatgagcttgtcaatgacatgacc

SEQ ID NO: 37933 - DNA, 299 bp, Gossypium hirsutum
  unsure (1)..(299): unsure at all n locations
  Clone ID: LIB3135-051-Q1-K1-H5
ctctcaagcaaagccagcaaggagaatacttggaaaattcccaagaggtttaatgaaggtttctttttttttcttacatttattctggtatttttcatcaaattttcatccataatatatttagtttgtaatatatttgagtgatggttaccgattaaatccatccgaaatttgcatgtactgtaccataaatatccattattggtgatttaattcatgttactattacacagttnacaaaaaaaaaaagaaatcttttattaacaaataaaaaaaaaaaacaataaaaaaatataatt

SEQ ID NO: 37934 - DNA, 353 bp, Gossypium hirsutum
  Clone ID: LIB3135-052-Q1-K1-A2
aaaaaaaaaaaaaaaaaaaaaaaggcaggggatgacccctaagcataaataagtgctggtcgagaattgcctttataaacaaagccctacttccttgcaatgactgccgccagagggataattgccacgctaggagtaacggtataacacttctctaaaggcaaagataggccttattacgtttagattcatttcctttattgccccaggcttgcttatcagaacggagaggataattccttgggcttgttttcgacgaaggctagaatacgttagatatagtacaagtgtcaaagagacgattttttcatgtgaacagaccattctcaactgttctctgttccttaagcgga

SEQ ID NO: 37935 - DNA, 265 bp, Gossypium hirsutum
  Clone ID: LIB3135-052-Q1-K1-A3
gccacgcgttggtctatgcgttcggagagcacctaacgcgcgagtttatacactagctgagaaagaatcgcttgagccgaatcgcgctatgcatattatcgctaacggagggagaggccatgaccgagactaccggtttatataccgccacttaatgaaaggctttagctctggcctgggctgtatgatctaccaaagcaggtatagcctgagccataccctgaccatattcgtcatccgactacagatttaccggagcccatgg

SEQ ID NO: 37936 - DNA, 269 bp, Gossypium hirsutum
  Clone ID: LIB3135-052-Q1-K1-A5
acgcgacccgtgggggaaagtagaccaccggtgtacattccgccggttaccacagcatgggtgggaggcctggtatcacggcactgagtcacgtcgctgggagacgaacggacacgagtcgaaagggtgtgactcttgtactgactgcggcgcaagttcttgtttagctttgtatggcttgtgagtctcctgactaaccctagctaagatttcccgcaactgacaataaagtgtgccaaatggggctactaacttttgggatactgacc

SEQ ID NO: 37937 - DNA, 235 bp, Gossypium hirsutum
  Clone ID: LIB3135-052-Q1-K1-A8
cgcttgcgaggcgcgtacaacattaattgcgtaaaagatgccagagaggataggctctacgttgtgaaactcgcgcctggaggacacctgggccgaaacattatttgtgccaactgaccttacgagacgcgttgcttatacatagggagccattcgagatggcatcatagaagaagaaaggtctacggcatgcctgcatctaaaaatgggcacgccgatatggctaagaacatta

SEQ ID NO: 37938 - DNA, 393 bp, Gossypium hirsutum
  Clone ID: LIB3135-052-Q1-K1-A9
cttttctttggtcagcttgacttgttttcattattggattctgaatattgcttggtttgatatttcacgtactctgttttggctatgatgcacttgttttctcaaacaaaagttgattggcagtgtatattatgttgtttattggtatactcaagcaacaagttgagtttcgataagttattgccacgatgacggaaatagttgggccaaggttgtacagttgctgcaattgcagaaaccaagttgcccttcacgacgatgttatatccaagtcttttcaggggagaaacggtcgagcttttttattctcccacgcaatgaacgtgatggtgggtcctaaggaggatagacaactgatgactgttctttacacagtggctgatgtttacttgt

SEQ ID NO: 37939 - DNA, 338 bp, Gossypium hirsutum
  Clone ID: LIB3135-052-Q1-K1-B1
atttcttcaattgatttttctctcattgtcccccattttctttcttcatattttcaagcggctatgtctttcagaggaacaaatgcatcatctggcatgggagtggctgatcacagcaaaagcacttacctggagctgcaaagaaagaaagtgtttcgatacgtggtctttaagatcaatgagaagaaaaaggaggattgcaagattataaacccttacaatttatggatgatgtggtcaccgtctgtttcaaggatccgtgccaagatgctgtatgcaacatccaaggaaaggttcataagcgaattaaagggcattcattatgaaatccaggcaac

SEQ ID NO: 37940 - DNA, 256 bp, Gossypium hirsutum
  Clone ID: LIB3135-052-Q1-K1-B10
cccacgcgtccgcccacgcgtccgggttcttgcattggaagatctgcagctcaacactaatgggtgctccctggatgctatacgcgagaagtataagcaacagaagttcaaaatgtggtaccatggataccttcccggaaaggggtggatcaatctttttaagaagaagaagaaagctgatttaatggtctaaaaccattccccttttggaaaatggatctggtcccaatatttaaaaatattacctttttttttt

SEQ ID NO: 37941 - DNA, 197 bp, Gossypium hirsutum
  Clone ID: LIB3135-052-Q1-K1-B11
gtgaagaagaatcatcgaacactaacggggctgaagctaggacctctcaagacgcacgcaaacgactaatctggctataatacctatagtgttgtgacaaacctatacccgatgggcgaactgaagaaccggatggggccatgttgtctggagcctatggaggcgataaccattgctggaccgatcgctatgcctta

SEQ ID NO: 37942 - DNA, 175 bp, Gossypium hirsutum
  Clone ID: LIB3135-052-Q1-K1-B3
cccacgcgtccgctaaaatgaaacatgtcaaggttctaatcttactatgatacccccaatgttttagccttatttatgtcttttaggggcatgttgattttgtaagcatatgattttcttggatgctttggttcactttcatcaatcgtatgtttttctgcagtcatttcctttc

SEQ ID NO: 37943 - DNA, 356 bp, Gossypium hirsutum
  Clone ID: LIB3135-052-Q1-K1-B4
aaaatcatgatacttaccatttaactagtatcataaaaagaaaaagattgataacttaaggcataacaataccttttaaaaagaaatgaagttgactattaatctttcaaaaagaattattattttttaacaaaatattaactaaaaggttactttttttcaacatggaagcttgaatttttatttttaaatatttttataattattaaattatttattaacatggtatgcaagacgtaagtagactgcccaagcaaacattgttaaaaaaaattaatattttagcattaaaaacgatttaatttaataatcaaatttaactaaaagtaagaataaggattacactaacaaaaaga

SEQ ID NO: 37944 - DNA, 271 bp, Gossypium hirsutum
  Clone ID: LIB3135-052-Q1-K1-B9
gttaaatggagatctagctgttttgagttcgctgggtttttctgaacctaattggatataatatgtaagatatcatagtgctaattgcatatctcgtgacattcttgtgcataatttagcagtattggtatgattttgagtatgacccttctctctaaatagttccgactttgttggctattttgtttcatagtagttctcatttctctgatagtgcagggatgctgggaaaatcgttagcttcgtctttgatgacattggattctgcgac

SEQ ID NO: 37945 - DNA, 263 bp, Gossypium hirsutum
  Clone ID: LIB3135-052-Q1-K1-C10
gagattaggaaaactattcatttagttctctagtgagtgggcaattctgtgggcaaacttgtctataaatctttttaacctttctgtaagggactaaatgtaggggagggctgtgagaaagtttccggaaaagcttttttttgaggaagaagaactccttcctttttttgtttaggggagggcttgtcttgtaataagggcttcaaggtttcttcctgcccacgggagtctttttgcttcccctcatttaccttcttggaaaa

SEQ ID NO: 37946 - DNA, 203 bp, Gossypium hirsutum
  Clone ID: LIB3135-052-Q1-K1-C4
gccgttctggagattcccagctcaacttgattctttatgaaccgactcgttgttctatggctttttggaccggagacctcttcatagggctgagcgtgcagagaccggtcaagcttgttgcgtcggtcgggaagttatggccttacttgactatagcctatattctggagcgccacaataacgccgctttccattacattgat

SEQ ID NO: 37947 - DNA, 261 bp, Gossypium hirsutum
  Clone ID: LIB3135-052-Q1-K1-D4
cccactcgtgcgaataaaagatactttctactcatgttctattctaccgtatgacagggagggaaggtttctttatacctgcgagaatgccgatggcagtacctatgggaaagcttattttatgtctacatgtgataaaagtataataaaacaatgggcgttcgctctaaaggaaaaaaacatatggacgctttctttttacatgataaatcttttagaggggcgattaaaactaagggatatgtacgtgtatattataac

SEQ ID NO: 37948 - DNA, 143 bp, Gossypium hirsutum
  Clone ID: LIB3135-052-Q1-K1-D5
agacagaaggagattttcgatttacatgctttggggcatttgttttaaaaagaaggaatgtaatctttaaacctgagaaaaatgccgaatcgctgaacctatagaaatgccaaactataagacatgttgttaataaaaatata

SEQ ID NO: 37949 - DNA, 268 bp, Gossypium hirsutum
  Clone ID: LIB3135-052-Q1-K1-E11
taaaaaaattaaaaaaaaaaagttcaaaataatataacaaaaaaaaatggggcgggcatacgaggtgctcaaatctgtcgaccgccaccatgacgcctttcattttttctacatggggtacaaaaggaacactagtggccgttgatctacaacgcctcgtgtggtgaaatcgttgatgcctcccaaattagtggctttgcataacatgcatcgataaaccgcgtgacataaccaagaagaggggctcaaacattctttcttaacaatt

SEQ ID NO: 37950 - DNA, 330 bp, Gossypium hirsutum
  Clone ID: LIB3135-052-Q1-K1-E9
cggacgcgtgggcttcaggcaaataattcctaacctggtatagtttgagagccactacacaagaagtgagggttgtgaaggtattcatggatatcttgaatgcagacccggcatcgcttgctgagcaactggtggacacgttctcggattgtatctggagcaaaaaatcgtctgtggtgcctgctggtctttgtatgaagctttggcattgatgtaagtgggtggtatatggtagagctataagatggaagtagtttttgagtgcaaaccttgtcaaggtttgtattagcataattctttagacccataacttatattcatcattttctt

SEQ ID NO: 37951 - DNA, 373 bp, Gossypium hirsutum
  Clone ID: LIB3135-052-Q1-K1-F1
tgacgttcaggatccaccgtggacatactcaaacagtcatggaggaggcattgccagcagttcaaatcctacagaaaaacaagacaattctcgtgctcttatggctagaattctcaaaagaatcggcgaaaagaggaagagcacagttacatactcagacttcccaggtttaggcattgacgagcgcgtagcagttggaaaatatagtttcccaaaatctctgaaaagcactgtcgagaatatcacccacatgcatggcgatgtttcggagaacagcacaatgccccaatgcgtggacgagacgatatatattctcttttgtgcgacaattaaggaaatggatgatctacaacttcccgaagttactgagaat

SEQ ID NO: 37952 - DNA, 355 bp, Gossypium hirsutum
  Clone ID: LIB3135-052-Q1-K1-F3
cccacgcgtgcggcttcttcttccctgctccctctccatttttgctaggaattcaacctagtttgtgccaccatggaggatcatcggtgccatgcacctccaccccaccgctggttcacggatcaaaaccaggtatagctgcgaaaatctcagaatcgataggcgtggcggagtgggacgttggtgagaggcgtgcggcgcgaggactgctgatgattggggcttgctagtacctgtgtcaactgatttgggtgttgggttatttatgtactgagcctagagtttggtttaaggaggtaatgggtgtgcttttatatattggattctaaatatttgggtctggaccaggaatgaa

SEQ ID NO: 37953 - DNA, 240 bp, Gossypium hirsutum
  Clone ID: LIB3135-052-Q1-K1-G1
gtcattggcaaacctgtgattgtgggggactacatgaatgcaggggttggggagttcctcccaacaccctggctgagtattctcttaaccaatttggagacatggacttgtacgtcatttgcttaattgatgggagtatgatactcaaggggtatggctgaactgaaggggcttgtcacaacatgatgagcactgtccacatcacccgacaatgcgcgaggtaggttagagctcactggc

SEQ ID NO: 37954 - DNA, 149 bp, Gossypium hirsutum
  Clone ID: LIB3135-052-Q1-K1-G10
cccacgcgtccgctgtagccttttactttttctttccttgatgtttgtggggaacgtgatcttatggtgacagaagtacgaattgcgagagcctgctaacatcttatgtaataagctggatcccgtgttcacaatgcgctttcatagag

SEQ ID NO: 37955 - DNA, 131 bp, Gossypium hirsutum
  Clone ID: LIB3135-052-Q1-K1-G12
ccggccggaattccggccgcccacgcgccgtgccactttatgacgcgcttttccttttttgccgtgctctgagcgaacggtactggggacttgctataggggcggcagccacctggttcgcttgaagccat

SEQ ID NO: 37956 - DNA, 240 bp, Gossypium hirsutum
  Clone ID: LIB3135-052-Q1-K1-G8
cccaaagaacaaaggtgccctgcactaaccatatttatggggctgctctcaaactgcgcggtgcggaccgatacaaaccctgttgaccctcttgttccggagatagctcacatgtataaaactgatcgggccaacagtgaaaccactgttcttagctgtacccagaagttttccctgtgatgacactggtttttgtgaaatacccatcacactttttatgtgttttgaagaaagaagggg

SEQ ID NO: 37957 - DNA, 305 bp, Gossypium hirsutum
  Clone ID: LIB3135-052-Q1-K1-H1
cgcacacgcgcgggttatgtgcttcataaagtagtaacaggggtgaaactccaggatgtaccggaagatggtcctaggactcggatgtgaactgtggtccttcagaactgggttcagaccctggagcttaaacatgttattattagagtgtagatgaagggtatactacctgtggtggcctcacgcactctttctcgtaaatgctaagccctcaggcgtgagaaggataatctctatggggcctccttttactacacaacacggtggacctattttatttggtcctacgaatgggtatatatact

SEQ ID NO: 37958 - DNA, 372 bp, Gossypium hirsutum
  Clone ID: LIB3135-052-Q1-K1-H3
ccaatttacagtggaccctttcgacgactccgatgtctcgtcggacgacagctctgattttgattcacccgaaaaagcaacattcttgtcgaggttcatatgcaaaggactgagaactcaggatcccccgagattgtccataagaattgatgaagatcctaaagcttccacctcaaccagcaagaaacaagggttccatgtaagcattgatccatggaaactaataaatcttagtagggacaaagctcttctagctgctgataaggctagacaaaggcttatgatacaaaagccagcagtggagcttaatgcattgaagccactaccactagaaacaaaacatggcccattaatgaaccctgaaagaatatg

SEQ ID NO: 37959 - DNA, 276 bp, Gossypium hirsutum
  Clone ID: LIB3135-052-Q1-K1-H8
gttacacatcgcgagcgagcgctctagcggatgctatataacatacacgcttatgcgcccgggcatgccacgtataaagtcacctatagtgaaatcaatggacgatgcactgcaacgcgatgtctagcaacaccacggcgaaaacccacttaattcccaaccaaaacatcttgctttacacacttgttttaatagctggcaggacagcaacgagggccttacccatcacttttgccaccagaatggcaaactggacgcgcaatgggacgggccctt

SEQ ID NO: 37960 - DNA, 259 bp, Gossypium hirsutum
  Clone ID: LIB3135-053-Q1-K1-A7
ccccaccgaatatccgctaccactagcccacctctcaatatccacgagaaccacactcggtgccaaaattctaatcttttgcatggtgatttatatattttaaaacaccttaagaccctcttcttattttgtagctaaccttcactatcttcacaaaacatcatagagtcgtctgcaccatttaacgaaagcttgactgtgctaatcgctttgattggcgtactgctttctattcatttttattgattgggtgtatttg

SEQ ID NO: 37961 - DNA, 434 bp, Gossypium hirsutum
  Clone ID: LIB3135-053-Q1-K1-B1
aaccctacggtggccatgatagctcaggctaatatcacaagcagcgataacaattcatcagtgccatttagcaccatatttgcccttgatgatatcttaaagactggtcctgaggataactcagaggtgatcggaaatgctcaggggcttgggatcctcatagccgatacaaatacaacaaacctgctctggtactgggactttggatttatcacgggtaagttcaacggcagctctataagcatgttttcaaggaatccgacaacagtgacggtacgtgagctttcggtggtcggagggagaggaaaatttatgatggccaaagggtttgcacaacttaaggattactcacgtaatgacaccactataattgcggagcttaatgtaactgttattcattactagaggttgaaaaaggggggtgggggctcatg

SEQ ID NO: 37962 - DNA, 354 bp, Gossypium hirsutum
  Clone ID: LIB3135-053-Q1-K1-B11
aaaaaacaatactacaaacaaaaggtttgccttttctaaatggatccaagacttacctacggcttgcgtgcgacatttatagcatggtctatatccgtcacctatcattcaactacactggccgtctgttttacaacatcttatcatgggtaaacccaggcgatacccaacttaaacgccttgcaacacatacccctttcaccagctgccgttatagcaaataggcccgtactgatcgccctttccaacagttgcacagcctgaatgtcaaatggcacgcgctctgttactgcgcattaaactcggcggttttggtggttacgctcatcgtgaccccttcacttttcagctccc

SEQ ID NO: 37963 - DNA, 380 bp, Gossypium hirsutum
  unsure (1)..(380): unsure at all n locations
  Clone ID: LIB3135-053-Q1-K1-B4
cacgcgtccggagatttaaagaaagtcaagcccatttgggtgttctttttgctgggaattatatgtttattcaggtcaatcctacaaccatgaaatactgctttgaaaaatcttatggaggccttgctttaaatggcttgccttcttctaggtgttctctctctaggattgcttgatgtttgaaggtttgaaattgtgtgtgtgttgccttttcttgtattacatcttgactcatacagggtagctgcaacttttcttttaatacaaaatagcctaagggttcaaaagctganaaaaaaaaaaaaaaattaaatcttttaaaaaaaaaatgatactattgggagcttacctaatccttattagcaagcaatatctattat

SEQ ID NO: 37964 - DNA, 446 bp, Gossypium hirsutum
  unsure (1)..(446): unsure at all n locations
  Clone ID: LIB3135-053-Q1-K1-B5
agcaatctcagccgctattctaaacctgatttttcatggtattgagggagtgttgtcttttctaaagagccgatcttctaagcttccattttccatgtattcataaaccagacatccatactcagggcaggcacctatgagcagaaccaggtgtggatgtctcatgcagcttanaacctcaacctacataacaaatttatttaatacaaatgaaaggaaggaagaaggacagataagttctgccactataaacacatgaaggtaagaccatactctttatctcccctctatttggctagagaaattgctgtggacatcatatttggtggttttctaagtggcaaggcttttaaaggcttttataagtcattaccatcttaaattataagactatgaacaagtttaaaagaagctataaaaggaacatttctataatttaaaatgaa

SEQ ID NO: 37965 - DNA, 168 bp, Gossypium hirsutum
  Clone ID: LIB3135-053-Q1-K1-C11
aaaaaaggactgctacttcggcttgtagtgtttatatatatatttatatatataatgggataaggaattattagatataatggctaggaacaacttctataacagtttaacctctatgtacttttggatttttgttcttcaatatccataaccttttggctttcctgc

SEQ ID NO: 37966 - DNA, 310 bp, Gossypium hirsutum
  Clone ID: LIB3135-053-Q1-K1-C12
gcaaagatggacgctaatgaaaagatggcaccggaactctgaaaaggaaagcacaaggggtgggggggggtaatcgacggtgcggagaactatgcctcttcaagctggtgcttggaggagcttgcggagaatgttaaacaaaaaaatgacaaggcggataaagaatatcaaatgtgctacgaaggggatccatccgatttaataaaacaaaaaggaaagttgaagaagccatcgacaaacacgaagaatgatacacggaagataaagacaagattgaaaaggggcgaaaagctatgactgaaatggaaaa

SEQ ID NO: 37967 - DNA, 394 bp, Gossypium hirsutum
  Clone ID: LIB3135-053-Q1-K1-C4
ccacgcgtccgcctttgcgctcgctttgtgtttggtattgatagcgttgttattgacaacaatgtcattggggcaatttggaaatgatccaagacatctgcttttctcagttgtgtggggaagcattagtgttggtattgcatcttttgttagggccaagggcaggattttctgtaatcggcctcgtttgcaattgcatgataaacctgggtattgatacacacattttttattcagctatttttatgtactaatcaacgtacataaagaactttgttttttgggttcagaatgtattatttatttcattctcctttgtttattaatgtgatttcacatagttgtgtttaacaaaaaggcgggtatgccaaaaaaaaaaaaaaaaatatacttt

SEQ ID NO: 37968 - DNA, 308 bp, Gossypium hirsutum
  Clone ID: LIB3135-053-Q1-K1-D1
agctcaactgatttgcaatgggagatgtttcatgcaaaagacccaccattactcacgtcatcttggacatggatggtctcttactcgacacagagaagttctacactgaagtccaggaaaccattcttgctagattcaataaaacttttgattggtctcttaaggcaaaaatgatgggaatgaaagcaatagaagcagctcgagtctttgttgaggagactgggatcagtgattctctttcagctgaggatttccttgtagaaagggagtcgatgctgcagagtttgtttccaactagtgagctcatg

SEQ ID NO: 37969 - DNA, 439 bp, Gossypium hirsutum
  Clone ID: LIB3135-053-Q1-K1-D4
cgagattacgtgtaagaccatatctgggatatggcatcatatgaggcttcgtgtaagaccatgtctgggacattgacatcgatatgtgatttcgtgtaagaccatggctgggctattgccattgatacgagattacatgtaagaccatatctcggatatggcattattacggtactatgtgtgcaagatccccgagtatcctttagtattccaatagttcaacgggaaaagtggatgaaacatggttataagtgatggtacaacgaaagcaaagtattcgtgacagaaatcaacaagtaagtgaaagtggagaatgaaagtacgatcaagttaagcaagacaggtacgtacaggacttatgtgagaattgaatgaaagtgaattggtgagttcataccgtatcatgtatatgaaataagaaagatatgtgtgtaaatac

SEQ ID NO: 37970 - DNA, 442 bp, Gossypium hirsutum
  Clone ID: LIB3135-053-Q1-K1-D6
ccctcccttttgctcaattaagatgctgcttcagtttaccctccctgttttaccctcctcatgggcttgccctttacgtcttctttttcttccttctaacctcaaccttttctgccgatttgctccctctgactatcaaccttttctttctttttctttacaacacaatttacgcttggccttctcaaccttttcttttctttttctctctgtcactctcttgcttgctctcagttggggggtggtcaagttactgcaactgaaaggttcaatgcatgaggatattgggagactatcatcattcatctcgtattgcttttgttgagtttacaatgaatacgggtaacttaaagagattgtggaggaaggcaaaggaatgagaattaattataagtgagttaacataggctgcagcattaatatttttgaggatgtgccatgt

SEQ ID NO: 37971 - DNA, 208 bp, Gossypium hirsutum
  Clone ID: LIB3135-053-Q1-K1-E10
tgggctgttggtgctacgagtgcggtcctggaattggcctcttctgaaagaaaatatttgtcatttcaaaccagcataaaccttgttttcaaaattaacgtgatcttggaatggatttttataatttgccttgcctctacgagcactaaataagcataaccatcttttgaaaaaaaaaaaaaaaaaaaatgttaggatatataaaatt

SEQ ID NO: 37972 - DNA, 288 bp, Gossypium hirsutum
  Clone ID: LIB3135-053-Q1-K1-E11
ggagatagttgttctgattatgacttttgttgttaataagaaaagaacacggtaggggtgttggacaggtttaaacctcggctaatgcaaacagtatacaagaaaggcaagggcagaaaatgggtgttgaggaagaaggaccagatgagaatgtaagggaatggggtgccccctggcacgaagtacacgtgtttgaaaactgaaagggtatttataaacatcttcgaaattttagtatcttgaaagttgtggggaggaactattgttacataatttcatggtttatta

SEQ ID NO: 37973 - DNA, 368 bp, Gossypium hirsutum
  unsure (1)..(368): unsure at all n locations
  Clone ID: LIB3135-053-Q1-K1-E2
aacgtccctgaaagtaatccaagcttatcgattattcgtgggaagacaaatgcaacacatcggcgagaaacacattacgtacaatgctgaagagctacaggattacttgttagacttgtttgagggatcccaaaaatcattgcataatcccaataggagatgattctatgatataataaagtaggtacatacaggttttgtattttctttttcagtttgatcgaataaacaggtggattaaagcaattctgtatgtcctggctaggtttccgatcgaaaagaaaccgattgtaatcccattcttgtgactagatttagatcaatgtcaatttggcttgggtttgcgnnncaaaaaaaaaaacgtggat

SEQ ID NO: 37974 - DNA, 347 bp, Gossypium hirsutum
  Clone ID: LIB3135-053-Q1-K1-E5
gcggccacgcgttcgaccacgcgttcgatttttttacaatgataaaagtaatggccatgcccatattgaaacttctttatttcggtgctgaaaatgaaaatttctgaaagttgggtgaccaaccgtgtagtttactcttttaaatcattggtggtactcaaaatgtgatctccttctacagtttaataacaagtcacgccagattggacttgctggagctttcctcttaagctaaataatcaaaacctacaatttagtatatatttatcggatcggtgaatatccttacagcttgctttcctcttcttgggtggcctttaactgcaagcaagcattgttgtgctatt

SEQ ID NO: 37975 - DNA, 337 bp, Gossypium hirsutum
  Clone ID: LIB3135-053-Q1-K1-E8
ggaacggaaaccgcggggcgacccacgcgaccgggcagaccaacaaaaacgagaaatttttcgcataggagaagcgaggaatcacgggggggcacgggatggggacacaaggccgcgacgagggcagaagaccataactgtcctcataaacaatggaggggacaccagcgaagaagagacgcaagaaggaccggacaacgggaaaaagacaaggaactacactgccggggcggaggcaatacataatggagaaagcaagggctggacaaccaaggaatgtcgtgaggaagagctcactgaagcaagcgagacggcaacaggagcgaagaaggaccgc

SEQ ID NO: 37976 - DNA, 388 bp, Gossypium hirsutum
  Clone ID: LIB3135-053-Q1-K1-E9
cccacgcgtacgcatctctttgcttttctgtttgtatttcactagtagggagctgggaaaaaaatgagttttcgaaaaaaaattggtcgattggctttctgcttgttttttttttagattttgatcgcattatataggacatggagagtcccgattccgtgagagttgccgttaatattcggccgttgattagtgcaaagcttctccatggatgcattgattgcatcaccgtccttcccggcgaacctcaggaagtaccaatatgaacagccaatcaagtcggtcacatgccatctttacaataagcatggagcagaagaagattgctagctgcctaagtggggtaaatgatgataccggtgaagacatcttatgtgcaaagcttcat

SEQ ID NO: 37977 - DNA, 411 bp, Gossypium hirsutum
  unsure (1)..(411): unsure at all n locations
  Clone ID: LIB3135-053-Q1-K1-F4
tccggccgcttccccgtcgaccccgcgtccgggcactctcgttttggtagggaccccgtcttcgttggatcgtgaccgccataaaccccccttcgctcgcgacgcttaatggacttgaaaggaatttgnnnnnngngcggtccctttcccttcctctcctaccccccctcttcttctttcctcctctctccttttctctttttcctcgccttcccctctccttctcttattccttctcttcttccctctctcctcttctcctctcctccctcccctccctctccctcctctcccccctcccctctattactctttttctcccccctccccctcctttctcccccccttttctttctccccctccccccttctctcctcttacttcctctttctccccttcttctccccccc

SEQ ID NO: 37978 - DNA, 410 bp, Gossypium hirsutum
  Clone ID: LIB3135-053-Q1-K1-F6
ctcaaccttcccctcattctctccgacgcccgaaaggatgctctcatcgaaagatggacgggggtcaagaacattaaggatccgtacatgacagatatcacagaatttggcgttgtcgaggataacacgcatttaaaggggagggtgaagttgcaagacttagtgaaaggcaagactcaggtgatctgcgggatctattacaagctgtgtctgtatgcaaaagatgagaacatgttgtaactcatgcaatgctgtattttgagaaacagcgtggttgaaattaaggaaacataccttctttaccctacggaagggttggaatattgtattatatgatcatacatatattcatgtatgttatcaattttctggtagttaactgaggggagagtaaaatgttggtgatacac

SEQ ID NO: 37979 - DNA, 424 bp, Gossypium hirsutum
  Clone ID: LIB3135-053-Q1-K1-F9
attggtgctcttagtttgcttcaacctcagcatctgtgtccctggatcttacactggaactatgaatccacctcaaagacaggttgcgtcagcacgaaatgcaaataatatgccaggaaaatccaagtcagtgctatcacaagagaatgatatggaaattgacccatggacacttttggaagacggagcaggatcaggtccatcttcaagtagcactgcagccattggaggcagtgacaatgctaatcttcgagcttcaagttggctcaagggggctgtaagagtgagacagacagacccgtcgtatattggtgctgtggatgatgatagctgattttaggttcaactatgtttttagatttggtcttaaggaatagcaaggcccctcacaacaggtaaattaaagcgttatttgttgtgcaca

SEQ ID NO: 37980 - DNA, 431 bp, Gossypium hirsutum
  Clone ID: LIB3135-053-Q1-K1-G11
cccacgcgtccgcttttctttcctaaagaatcaaccccacctccacttggtcctggaactgctgttgctgtggtacttattgtggctccctcgcctgttgctgcattatcgaggtttctctccaagtccatgttcatgacttgagataacaccaagctacccagtggcagataaggtgagttagtgtcagagttgcctaatgacatggacatcgggctcaacttttcttccatgtgtttcttgaaagtggcaaacccaaaagaagctcttcttaaaagaacaaaaaattaagagttgggaaactggagagaagaaaccccccacccgccaaaaaaagtttgaaacaaagacgggtttgcttgaaattgcgccagacatagaatgtagagagagacgtagagattttataaacttccttgcttaatgatgga

SEQ ID NO: 37981 - DNA, 426 bp, Gossypium hirsutum
  unsure (1)..(426): unsure at all n locations
  Clone ID: LIB3135-053-Q1-K1-G3
ctcgaatttctttattcaagcttcttgttttttagatcaaaacccccatttttcttttcacttttcatccgttaagtttccagatattctacctgaaaaaattgcagaatgaggagcaaaagacatagccataacaagttcatgcggttcattacggttccttttaaagcgttagtcaaggccagggatctatatgttagaagcttgacaagttgtgcttcaaaagtgagctacgggcatggttcgggcgggtgctcagcgcaatactcanggttgccgaggagctttattagtgcaatgtcggcaacgtgtaatgacaatgaagatcttagagagctcattanggctgcatccgcgacgagcttgggtcataggaaggaaatggagatgctcttgaaacagcagttgagggtgcagatgggatcg

SEQ ID NO: 37982 - DNA, 299 bp, Gossypium hirsutum
  unsure (1)..(299): unsure at all n locations
  Clone ID: LIB3135-053-Q1-K1-G9
aacacgcgcacgaacagaggcacaggcacgacttcaggaagcaaacacgancccgggggcgggggaagcgcgaaagcacagaagacaggaccttgagagaatgggggtgaaagcaccgggggcactgactgagccggaagagggggcaagcagaggcggcacacgagggcaaaagagccgaaacggggcgagcggggattgcggggaaacaccagaggcgaggcaaaaggaggggacaaaaagccgggcgaacgacgcttacaggactacacgaacggaaaaaagaaccggaaggggaa

SEQ ID NO: 37983 - DNA, 435 bp, Gossypium hirsutum
  Clone ID: LIB3135-053-Q1-K1-H7
acggaactggcgagcagacattgagtcgagatatataccggctgggacatcggtttgactttggcagaatgctgtcttgttatttcactacagctggttgttatttcagtactctggtaacagggctcaccggctatgtgttcctttatgggcgcctctatcttgtactcagtggccttgaacaaggattgagtggggaaccagcaattcgtgataataagcctcttcaagtggctcttgcttctcaatcttttggtcaaattggatttttgatggcactacccatgttgatggaaattggcttggaaaggggtttccgaactgcattgagtgaatttatattaatgcaactgcaactggcaccagtatttttcacattttctcttggaacaaaaacccattattatggaaggacattgctttatggaggtgcta

SEQ ID NO: 37984 - DNA, 335 bp, Gossypium hirsutum
  unsure (1)..(335): unsure at all n locations
  Clone ID: LIB3135-053-Q1-K1-H8
gtgtttttgaaatattatgaaaaaaatcaagagagtattaaaataatggttttttgggagactgaaagtaatgattctagattttgattcatattcaaataatagatgattttatctgattacctaatattttattattagttgtttctcatttttattttcattattttaaatggtgtgcgataataagtacttttgtaataagaactatgagagttaaaatactttcagcccatgtatcagagtgagtctttttaaaccatagatttatacatgttatatatatataagttgattgagttagtttaattggcannnaaaaaatcataaattta

SEQ ID NO: 37985 - DNA, 439 bp, Gossypium hirsutum
  unsure (1)..(439): unsure at all n locations
  Clone ID: LIB3135-054-Q1-K1-A3
gaaaaagagctgagtgaaaatcggaaaaaatatgctaagctgaaagaagagcttcttttgactccttcagaacttgcaaggatgaaagaagaagcatttcagtctaataagcataataatgctcataatgatactgctggaccacttatacggcacgaaatttctcatgaagatcaccctttgagccttggtaaggctagtgtctggcatcaatactttgagcatacggaaatcgcagaacacatcgaccgtgatttgcaacgcacacatcctgaaatgaaattcttctcaggagaatcatcattcggcaggaaacacagggaatcaatgaggaatgttcttctcctattttcgaaactcaatcccgccatccgttatgtccaatgcatgaatgacgtcttggcaccattatactatgtatntagcactgatacagatg

SEQ ID NO: 37986 - DNA, 351 bp, Gossypium hirsutum
  Clone ID: LIB3135-054-Q1-K1-A7
ctttttcatcgcctgccctacgtcttctttttttcctgaagctctgtgtgctgcgatcctaagtcaccatgtgcgacgggccagaatgtacctgattcgtcagatgaatggaatcccttttttgtattgcttccgatgcaatgaagcgctcaacgcttattatgcttctctgtgtggcacaaggaaaagacaagtctgaaaataaagacatagatttttggagtgatgaataaacacagcagtgggacatctatcctctctatcttctaacttgcgaatcaccgaccgagaatcactctcaatctccaccgcccataagcctagatttatagaacttattatgttcttttg

SEQ ID NO: 37987 - DNA, 235 bp, Gossypium hirsutum
  Clone ID: LIB3135-054-Q1-K1-A8
cttaaacgaaacggaatatttatgaagggatttctctcgaaaatcgagccgggacccgcaggggaaataggtgcgcttggctctaaagtgatctctgaagaacctatgcataaagtccaagaatctgttttccaagtagctgaaatggtggaacgttcaagaaggaaagctggatcaatggttgatgcacccttaaacgctatgtcatatctgataaaaggggggaaaaactttg

SEQ ID NO: 37988 - DNA, 202 bp, Gossypium hirsutum
  unsure (1)..(202): unsure at all n locations
  Clone ID: LIB3135-054-Q1-K1-B10
gacccacgcgttcgctaatgacccgtttaacctcattcttgacgaaaaagagggccctttcgaggtgtctaggggaggcaccctcaaantccaggagaaagatgggattgattatgcagccgtcacagttcaacttcctggtggggagcgagagcacttcctgttcaccatcaagcaataggttgcatcatgcaaaccagat

SEQ ID NO: 37989 - DNA, 154 bp, Gossypium hirsutum
  unsure (1)..(154): unsure at all n locations
  Clone ID: LIB3135-054-Q1-K1-B11
acccacccattcaaaaagaaaatgaaaagaaaaatttgacaaactttctgagttacctccaagctgtattgggactaatttgaacctagnccatattggacgtgaaaaaaggggggatcctttacaaaataccaaagcggcttttatatatccg

SEQ ID NO: 37990 - DNA, 120 bp, Gossypium hirsutum
  Clone ID: LIB3135-054-Q1-K1-B12
acaaaacacattgtgagaatattattaagataaacgttgtttatagagcggcaggtcggcttagtactttatatttggacggccaccagtcgcttatagtgatttgataattgccgcctc

SEQ ID NO: 37991 - DNA, 164 bp, Gossypium hirsutum
  Clone ID: LIB3135-054-Q1-K1-B5
ctctaacgctatgtaattgtataaaggaattttgaaatggctaaccattcggtggatacggggtacaagttccttctaacaaactcttttcaatccaaatcaaatccaatccctgttcttatattgaaacacatttttccaaagctaactcaactcgcatgtta

SEQ ID NO: 37992 - DNA, 262 bp, Gossypium hirsutum
  Clone ID: LIB3135-054-Q1-K1-B6
acacgcgttcgtccactcgtccgaccaaatttttgttatactttatgcatagaaagaatgcggctattctagggtggatgaggctctttaacatatgacactgagggaatgtgtatgccaaatgaactttgaaagtatttgtagcaaattcgctcgaactgtgcctgacaagttaatactggggggactttggctcatgaattgaggcttattgaaacttatattatttctatgggtggataatatccaatgtgagaatggg

SEQ ID NO: 37993 - DNA, 165 bp, Gossypium hirsutum
  Clone ID: LIB3135-054-Q1-K1-B7
tgatggtcgaaagactatgcttctttctttcaaaggcttcttatctattaactaaacatataatcgcaccatatatgtttggtgttatgtcatgatctcagttgaaaagtcttatgcttgctgtgtataaatatagaaataaatgactaacaactcaacattccc

SEQ ID NO: 37994 - DNA, 253 bp, Gossypium hirsutum
  Clone ID: LIB3135-054-Q1-K1-B8
tggctcttcctctcatgtaacacagtggggcctgtattaatacactctctgtgctggataacaaacgacggaataagtccaagaatttcatctatatttaatttgaggatgcaaattcataatcttgaaattttaattcgatgctaaataacactagatccggagaatctataagttatggactctgactaaaatcccaaagaaccttaccatcttaaaatttatgcgctgctctgcatgaatggctgatttt

SEQ ID NO: 37995 - DNA, 163 bp, Gossypium hirsutum
  Clone ID: LIB3135-054-Q1-K1-B9
cgcaccatgtgcaccatactttctatgacaagatacaaggatgccacttacatgaaggggggtgggggaaagtctgtgccattgtttcactggagatataagcatgaagggaaggctaaaaaggcaaaagaagtaatggaagcagtataccccgataagaatt

SEQ ID NO: 37996 - DNA, 315 bp, Gossypium hirsutum
  Clone ID: LIB3135-054-Q1-K1-C12
cccacgcgtccggcatggtggaacctgcaaagaatgtgggtacatagaaggacaacatccttcttctttgccttcattgattgcatagtgagacaattgggattgtctcaaacgacatttactctcacggccaaggtcgtcacagacgatgtctcgaagatgtaccagcaagagatcatggatttcgggagcacttccaccatgtttactgttatatcaacgttggcaatgctgaatcttttcagcttaattggggtagtagttaaggtgtttatggggggattagagtgtaaggacatggaaaaagttggtatc

SEQ ID NO: 37997 - DNA, 434 bp, Gossypium hirsutum
  Clone ID: LIB3135-054-Q1-K1-C5
aaggaattgggatggctgttgtagaggagctggcaacactgggggcaacagtttacacatgcagcctgaaccaacatcagctgaatgaatgcttgaaagaatggaagatgaagggttttcaagttttcggatccgtatgtgatgcaacgtctccggctcaaagggaagccctcatcaataatgttttctccatgtttaatgcccaacttaacatcctcataaacaatgtggggacaaacgattggaaaccaactgcggaatatacaaatacagaactttcgactttgttgagtaccaatttcgaatcggcttaccacttctcccaactagcttatccccttctcaaagcatcgggacgtggaagcaattgttttgtatcttgtgtcgccggtgtattctcaatcaatgttggatctatctatggatcaactaaa

SEQ ID NO: 37998 - DNA, 443 bp, Gossypium hirsutum
  unsure (1)..(443): unsure at all n locations
  Clone ID: LIB3135-054-Q1-K1-D2
ctccctcaccaacctttctccggttctccgctttctcgccttccctctcgctcctcctgcttccccatgtcggcctcccttgtttttccagggggttttgtctcgggttaaataaatgttggaggttttctcgagttggctaggactcgctcactcggatccggtgtatttcgctcgaggcttaactgattcgtttgttttcttcgtctgatcttaacgttttaaacaagttagatgatctgggatggcgtctttgttgggagcggataccangcactagtcaacgtgtctgtttgctagtggctaacatcttcctgaagagcaagaggtgtggttttgatgggtattggtggcggagctgttcttaccggcacaaatttctaggatttggcgaatttctgggtataagttatgtgttggtaagggttactactgtgttctct

SEQ ID NO: 37999 - DNA, 376 bp, Gossypium hirsutum
  unsure (1)..(376): unsure at all n locations
  Clone ID: LIB3135-054-Q1-K1-D3
cttacaatcaagttgcaaacctggaagcattatattccacactgcctctgctgtggataaagaggtttcatacaacttgaagagtggttggttggaaaaatgggtcattcttcgtggcagcgtctaagctgttggccgactatcaaggtgttgttattaaaatcgagactatgttttgagtctcgacttctatactgatgaagaagctgctgcaagaagatgcctatagttggtgaagtgattgagtattttgattctatgaatctaacgctatgacctaaaatggaaactctttgtaattattttattaaaccacttggacactatcttaacttgcaagtattaggctttctgatgggctacacnacaaaggaaa

SEQ ID NO: 38000 - DNA, 214 bp, Gossypium hirsutum
  Clone ID: LIB3135-054-Q1-K1-D5
ccggggtggaaatacacggtcggcggaagcggtctgtgttgcattcgcaaaaatatgcgaaaacttttttagaaacttaacatgggtgccttttggggagactacgcggataaagggatggcttatgctgatttaaggccaacctggccttgattggatgaatgacacaagccaatccgcatgaacatgtttaatatgccaacccataatgtgt

SEQ ID NO: 38001 - DNA, 187 bp, Gossypium hirsutum
  Clone ID: LIB3135-054-Q1-K1-D6
tcgctcactcaccaacctttttacgggttttctctttatcgccttttctttcgcttctactgcgggcacatgtggggctcccttgtatttacagggggttttttctcagactaaataaatgtacgacgtttacttgagatggctacgacatcctcactatcatcctgggaattttgatctagggtta

SEQ ID NO: 38002 - DNA, 377 bp, Gossypium hirsutum
  Clone ID: LIB3135-054-Q1-K1-D8
cccacgcgtacggacacgcgttcgcccacgcgtacgatgagagcaaggttgggcacatttttgtggttgggaactttggagaactgtttgagatagttctatattttcttgggctggttgacaagttcttctatctctcaggcatatatgacatggagctcactatttgtgatgctgttatggagaactctttgttagtggctattggacatattgagatagatctatcagaagcactcgataaggcacctcgcccttctttttaagccattgatccatacttaagatatggacccattggagagataagacacatctttagggcttctgaaaagcgcacacctcaagggctttccctagctttgctgaagcttact

SEQ ID NO: 38003 - DNA, 323 bp, Gossypium hirsutum
  Clone ID: LIB3135-054-Q1-K1-E10
caaattttatgtaaagcttgaatggatctatttcattctcagaaacctacggaaaccccggtcttgcattatctgaagattttgaaataaaggagattgaggtacgcccggctatctttctctttctccattctacaaccatgtcactgttttggttgcttcatgaattcatatttggcttgtttataatcttatcatatagatgcttcattaacttaatccttatatcacagatgtggggctttgtatatggatcaaaatatgatgaaatacttggtttaagtagaacagaaatgcctggaatttgcccgtgggtaaacacc

SEQ ID NO: 38004 - DNA, 288 bp, Gossypium hirsutum
  Clone ID: LIB3135-054-Q1-K1-E11
accacgcgtccgccactcgtccgtccacgcgttcgatagtccctaaatccccaggattgttcttcaacgaaaacatgtcgcccttgttgatgaagatggctgagaggtggccctggagttactctcatgtcggagttgaactgcctttggatcatataaactcggcatttctaaaaaagactggcgacctcagttgcgcacataacatggaagctcttttgcatatacttgacgggtaccatgcaaaaggtcatacattcgtgctttccaatggaaaggaccctgctt

SEQ ID NO: 38005 - DNA, 296 bp, Gossypium hirsutum
  Clone ID: LIB3135-054-Q1-K1-E12
gcggcggcgccctttcttttttttttttttttttttttttttttttttttttttttttttgttttctggaagatattggcatgttttgctgataaaaaaaagctttaatccatagataatgaaagcctccaattatgaaaattttttgttgccctaacaacacctgaaaaaaaaaacccaacccctttaacccattacacaaatcaaatttaaaattctaaattccctttccccttatttaagcatttgcatattgcccacaccttgatgataataagatggtggctgacaagctt

SEQ ID NO: 38006 - DNA, 393 bp, Gossypium hirsutum
  Clone ID: LIB3135-054-Q1-K1-E2
gaaaaaagcggtcagacaaagagagaaacgggtagacagagagagcaacaatggcaacgttggccactttgggaactacttcactccttcggtttcagaaagcagaccccctaacggcaagcccatctccacatcttctgggttctctctcttctcaactcagtggcatcaaactctcctgcaacctccctgacgtggcacctctcaaatccatatcctcacctttcactccttctctccagcctgttgctcgcagagtatgccctttcactggaaagaaggcaaacaaagctaacaaagtatccttctcgaaccacaagacaaagaaattgcagtttgtcaatctccaatacaagaaagtttggtgggaagctggtaaacgctatgtaaaac

SEQ ID NO: 38007 - DNA, 304 bp, Gossypium hirsutum
  Clone ID: LIB3135-054-Q1-K1-E4
cggacgcgtgggcaaatgtttggggggaggtcgcttagactgctgcaagactatcgatctttgggaaaaatgccgatatagattctttcactaaagctttacatcgaattgaaaagattttgtacagacattataatttggatttatatgaattggaactgttttgaaattaaaaagggtttttacctttcaaaaaaaaaaaaataaaaacgccttggtataaaaaagaaaaagggactagagctgggaaatgggagaattaaaaacttaaagacttaacacggaaaatgaacccaacgggggg

SEQ ID NO: 38008 - DNA, 227 bp, Gossypium hirsutum
  Clone ID: LIB3135-054-Q1-K1-E5
tcggatagaacaggtgatcttacattccctggtttccaatcaaaaggataacatgcgcttagttggcgggtcctttacccctacttgcatcttgaatcataatcctagattcatcgacaactctgctgtgcttaattccacaggcattgatgaaattattagcatttgcttggatgacacataaatgattaatgcgtgggtcaaaacttacccagagaacaaatatg

SEQ ID NO: 38009 - DNA, 438 bp, Gossypium hirsutum
  Clone ID: LIB3135-054-Q1-K1-E6
cccacgcgtccggaaaaatggaagagctgactttcatcccgtggatactgagtctgtcaagggatgtaagttttggtttgcatttacgatctttgatagatatgatgaacctcactatccatcgaatataaatattcgttctaagaacctctgacgctatctgatggtggcagatcaactatctctaaaacttattaaagaaaatgtgaccgctttgaaggatataaatcagggtatgtgggcaggcttatggcgtcttatcccattgaagcatcaacctgctgatgagcctagaatgactgagcaggaacccacaattttgaccatcaggttatttctccacgcacagcacatgctgaagattgatcgtcacatggaaacgatacttgatccactgattattcttgaaacatacttatggagcgatatgcatacttt

SEQ ID NO: 38010 - DNA, 420 bp, Gossypium hirsutum
  Clone ID: LIB3135-054-Q1-K1-F5
acggaccctgatttgaaatttaaaaatgtggtacttacacctcatgttggcgcgggttcacttggttcatatggatcaatggctagggatgttgatgatgttgccttacaactatatgatggataaccactgaaagggatagagctgatgaatgaattgactcagaatcaaacctatcaatgtgagaatcaaaatataaatgacattgcatttaatgttcactacattgaccatgctggggcatacttaatctagacgtttaagcccctgaataagctaaatggaaaacgagagtgcgatatatatatacacatattgctgatatcatcctgttcagcacattgatttagattcagtattttatttgaaacttaatattcccatgattttaaatgaatatttggtttataatggggattt

SEQ ID NO: 38011 - DNA, 360 bp, Gossypium hirsutum
  Clone ID: LIB3135-054-Q1-K1-F6
ccggggtggaactacccggtcgaccgactcttatatacctttgactgaacctttttaatagccttttttttacgaacctaagccaggaaaaacatcgggctatatcacctacaaagaaaaagaaacctgaacccaaaccacccatgtatgaaccttcaaaaaagcctacaatgtacgaacctaaaccaccaaaaccaccggtttatacacctccaaagaaagaaaaaccagaacccaagccaccaatgtatgaaccttccatcaacccaccaatatatgagcccaaaccacctaagctaccagtttatgcaccaccaaaggaagaaaacgcccaataatgagaacagatgaaatggaatt

SEQ ID NO: 38012 - DNA, 353 bp, Gossypium hirsutum
  Clone ID: LIB3135-054-Q1-K1-F7
cgcacattcaaatccaccttaagacagttgggtaaacatttggcatttagtatgttttgaaggtgttgaaaattttgcagctttatgttaaacttataaaacaatcaaaataagtatttcattttgaaaaaaaaaaaaaaaaaaaaaaaaaaaaaaaaaaaaaaaaaaaaaaaaaaaaaaaaaaaaaaaaaaaaataaaaaaaaaaaaataaaaaataaaaggaaaaagaaccatacaagggcaaaactaaaaataaaaaaaaaaagcccctgggtgggctctttttaaacagagataaactttttatctccacccacaaaggtgacaagattttgttgaggaccattaaaaa

SEQ ID NO: 38013 - DNA, 152 bp, Gossypium hirsutum
  Clone ID: LIB3135-054-Q1-K1-F8
gtcacatttaaatacaacttaaacagtggttttacaacacattatggtgtgcagggcgttagatagacatcctgattttgaactaataaaactacccaataaatatttgttttgacactgggacttgactgggaaacaaactattatacttt

SEQ ID NO: 38014 - DNA, 371 bp, Gossypium hirsutum
  Clone ID: LIB3135-054-Q1-K1-G3
gctcgaagcagttaattcaaggataaacgtgaatcctagcttcgaagggtttcactcaaaggatcttggatggcagccaattgatggtgctggaatgatattcggctcacaaacagcaagggaatatgctcaagggttgcaccccgaatggctgcagatgcatgtgggtggaaatttcaaaagggcgacgtaattcgtagaaaatgcttgttggcttacaatgcaacaaagaacagactatgggatgactgatttagaacaaaatacatgtgttgcaagaaatgagtttgataaatgtggactagtgtatctaaatttgtaatatcatatacatcttgtaaaaaatgcacatctaatctcttggtatatgt

SEQ ID NO: 38015 - DNA, 423 bp, Gossypium hirsutum
  Clone ID: LIB3135-054-Q1-K1-G4
gtttaacactctcaatgagtaaaataaccatcatataaaacttaactttacttaaatcggctgggttccatgctttttttctctctttgattcatccatgctcgacttccaatcaagcttgcctgagaatattcaagaagatttagatcaatttgatcatttgcttaattttactcgttagaaaaaaagaaaagaaaagaaaaaggaataatctacacaaatttgtaaaaatctagaactggaaaaaatttgctttgaatataaataattcaatttatgttgagatttaattaaagatatgggtttttatatcgattagttagattcacttttaggttaaaaattaggttttagttaaatggagatttgattaacaatgatttcgattcgattttaagtgaaattcaatgtaggaatcatggg

SEQ ID NO: 38016 - DNA, 307 bp, Gossypium hirsutum
  Clone ID: LIB3135-054-Q1-K1-G5
tcacacttaaataaacccctagacaggtatgtataaatatgaacattaatgtgacatgcgggcgggaaaaattaacagctttctgtttctcaatataaaacaagcaacactcgcctgttagttcttttgattctagaaagaacttatgcataagacctgtgaacaatatttgcccttgaatacagatttattacatgatttatattcaaattactgcataatatctactataactttttacttgtgacctttttaaagatgatgaaaacattatcttttcatatgatattatatgttcgactgattt

SEQ ID NO: 38017 - DNA, 246 bp, Gossypium hirsutum
  Clone ID: LIB3135-054-Q1-K1-G6
cgctctattccatgtacacgtttctgcatcgattaattgattaaccgtagaccatgaagggctaatttcctgtgcttgaatatggttgttctcactaccaagaatactttgatacatcatatattcgtaaacatagagaattgggaaagatatcattatcctgctcggtagaaaaaaagaaaagaaaagaaaaacgatttatctacacaaatttgtgaaaatcttgaactggaaaaaatttgtttt

SEQ ID NO: 38018 - DNA, 189 bp, Gossypium hirsutum
  Clone ID: LIB3135-054-Q1-K1-G7
gcgcgctttcacccaagtacacctatgtgcatttataaatacctcacccaaaaagcgtcatagcggcattatcgggcgtagaataaagccggtctatctcccagcaatattagcacacatactttgaaacttgcactttcccccttcaattttctatgaacattttgttaaatccctctgtcaagatca

SEQ ID NO: 38019 - DNA, 265 bp, Gossypium hirsutum
  Clone ID: LIB3135-054-Q1-K1-G9
gccatgtgacgatttatacttgtctaacccctttcattatcatccaaatgagtgaaggggtttttattactgagaaaggggtagctgtgacagaaactgtggttgtgggattggctgaaagtattgcagtggctcgagtggatgcaggatgtacacatgattgaacgttgcctacataaccacaactgagattatggatcttggtgtatctccgccacttgcagactttgtgggagctgaaagggaattatggggtgagaacggt

SEQ ID NO: 38020 - DNA, 318 bp, Gossypium hirsutum
  unsure (1)..(318): unsure at all n locations
  Clone ID: LIB3135-054-Q1-K1-H2
ggaggtgtgacttgcagaatgaagactttttggctggttttaataatggaccatcatagttttacaaggatgtctgttttttgagtccaattcactggaaaaaaaataatttttgggtacattttgttcttaagataaaattggaaaaaaagttggaaactttagtaattgttttgtactatgtaaagagtactacactattgtctttgtaaactctattcatttacattagccaaaaaactttgcagttgttgatcgnaaaaaaaaaaaaaaaaaaaaaaaaaaaaaaaaaaaaaaaaaaaaaaaaaaaaaaanaaa

SEQ ID NO: 38021 - DNA, 162 bp, Gossypium hirsutum
  Clone ID: LIB3135-054-Q1-K1-H3
accacgcgtgcgttcatgcattctaggtgatccatgaaaggaagaccatataacttaatgaagggctaacagaggtgaaacaccgacttgcgactcatctcttattacgatgatcgccgacgagcacacgtggtgtggttttctaaacacgtggagagataa

SEQ ID NO: 38022 - DNA, 311 bp, Gossypium hirsutum
  Clone ID: LIB3135-054-Q1-K1-H5
gcgcttttaacctttttttttttcttccttaaatttaatcctttaaggctattgggcatttttgagtcgactctgaagcttttagcactggctttaacttctctcttcagatccaccgccgctgcctccgcctctctaatcgaggccggctccgatcggtctgacctatatctctcaccctatgatcgcctcaaagtttccagcctttgttataaacgaaatttcaactcctattgtgttgcctatctttcaactaaagctcattcattacaaaaatgcatctcatggagcatgcaacccatcaaagctac

SEQ ID NO: 38023 - DNA, 216 bp, Gossypium hirsutum
  Clone ID: LIB3135-054-Q1-K1-H6
atgaacactttctggctggctttattaatggaccatcatacggggacaaagatgggcggtttttgagtccaatttactggaaaaaaaaaaagttttggggacaacttgaacttaacataaacttggaactaaaggtggaaactttacgaaatgatttgtactatttaaagagtgctacacttttggcttttggaactctattcatttgccttaacc

SEQ ID NO: 38024 - DNA, 174 bp, Gossypium hirsutum
  Clone ID: LIB3135-054-Q1-K1-H8
ggacgcgtacggtggatcttaacatttactcttgacttttttacgggtagtactctcgggaatataacccccccccccccaaccctttttttttgctttaattcaaaggcacgaagccaactcaaaacccacaaaagccaaagcctaggggcacagaaactacgaaaagaaatg

SEQ ID NO: 38025 - DNA, 391 bp, Gossypium hirsutum
  unsure (1)..(391): unsure at all n locations
  Clone ID: LIB3135-055-Q1-K1-A9
ctgtggtattggtgaagtatttgaaatgcagaacaatggctggagggttgtgccatgccttcatgatctggttttgttgnagctttgagcttgggatatggtagcaacttgtgatgctgcatgttgttgtttgatagttttagtaccgatggtggtcgtcaaggatattctcaagtgttctgtctagaatatcttaaatctttatgtatttagcttcactgtttattttgttgaggcacaatgttccaaatttatcaatgggattgctgctgctttttgaataatggagacacaggtacttcaaatgaactaattgaataattcgactgattatttggtttaaatttgtttaaattaaaacttaaatgtgaaggttgtggatttaattttg

SEQ ID NO: 38026 - DNA, 290 bp, Gossypium hirsutum
  Clone ID: LIB3135-055-Q1-K1-B12
cgctttgctgctgcaacaaaatgtatgccactacccctaaatgctctaaaggttggtatggggaaattgtaaacgacatctcttcctacttgaagaacgtgtgcttcagccctgacaagattacatttgctcccatctctgtttttgatggtgacaacatgatgcataggtctaccatcttggactggtacagaggccctacactgctcgaagctcttgaccacatcaatgagcccaaaaagccttcagacaagccttttcggctcccacttcatgatgtgtacaagatt

SEQ ID NO: 38027 - DNA, 419 bp, Gossypium hirsutum
  unsure (1)..(419): unsure at all n locations
  Clone ID: LIB3135-055-Q1-K1-B2
ggccattgatcctcttcaacttgctcagcttggaaaaaggttagatgagtatgaagaagattacgatgaggaagggtagggctaagtagttagggggcaaggctcttaagaaagttagtgttccacatcagattagaactcaagtagaaaggtcaagaaaaggcaaatgtcgaaatgacctcattggaatatggaagtatatcctatgtacgtctctctctctctctgtctggttatccttgctaacaaaactttaaaatggtagctttccacaccaatgaaacacctgtcttggaacttgcttcttactcaacgaaagaacatggctttttaatgtaataaaattgccctcagaaaaactatgttgaactattgatcccncnnaaaaaannnnnnnaaaaataaattaaataaaataa

SEQ ID NO: 38028 - DNA, 410 bp, Gossypium hirsutum
  Clone ID: LIB3135-055-Q1-K1-B5
gcaaataatggaaaatcttgcaaatcaacttcgagagatacgacagttatcagaacccgggaaggctttgcaacaggcctctttgccacctccatcctctaaggtcaagtcaaagaaaagatttctacaaggtgctcctttatgagcaatgagaagcatttaagagagatgatggtacttttgaatttcgataaacaagatgagctacataatttgattcattggcttcgcttggtgtcagctgatatcttttaaaggcttcaattgcaactttcgacttcacaagttcctcaaagaaatgagcttctggtgatcacactctctgtaactaccacttgggcttacagattacgggttttgagtgcatttgaatggccattcgctgacgttattatatgtagttatatctt

SEQ ID NO: 38029 - DNA, 396 bp, Gossypium hirsutum
  Clone ID: LIB3135-055-Q1-K1-C7
cccggaagacccaggccgacccaggcgtccgatcacgcgtccgggaaaatgatggatactgttttctatgaataaaaccctggtgtattgtaggaggacgcagacgcatcaagggacaagagggaaatcaacgattataaaaatccagggccacaagtaaaccgccaaactgaatacatatttaggcttatttcacactggtctttcatagcattctacccttgttcactttcctgtgaagacaaaacataaagcgcattataaggagtgagcatcatcagaaggttgtactgctgtgctacggtaatacctgactgcattagggctccaactgtcaaggaacgaaagtgctgatcttaaggtgaggcggttaacgcctatgcacttgtaaattgc

SEQ ID NO: 38030 - DNA, 404 bp, Gossypium hirsutum
  Clone ID: LIB3135-055-Q1-K1-C9
cgcaccatgttcactatacttgcttttacttgattcctggttgcgatttacatgtatgggaatgggggatagtccgtaccatagtccattgtgggtgattgcatgatgtgcatgctaataaggctaaggcagtagtgcaagcagctgaccctgattagaatttggtcactctcatagtgatcgaaggagatctaatggaacatgttgagagctttggattcactatttacttttgtggcaaaagcaatggattgaggcgctcgtttgcatctggactttgaaatacaatgaagctccacggtgcggattgagcatcctgagactctgctgcaattcgttcaagatgtttataaagacatttactgccacctgacctaagcaagttaagcattatcacatgatgc

SEQ ID NO: 38031 - DNA, 108 bp, Gossypium hirsutum
  Clone ID: LIB3135-055-Q1-K1-D12
ggctatggttctataaacattgtttcaaatttctttaacattcccatccagggtactagggtagtatagtatgtgactggcttttgtcctagaaacttacgatcatga

SEQ ID NO: 38032 - DNA, 370 bp, Gossypium hirsutum
  Clone ID: LIB3135-055-Q1-K1-E11
agattctacatatatttgcagcagttgcgtatgcagagattctaattcgtgcttgtatttgaggccaaaacgaaactggaattgttttcttgaataccctgatttaattctaaacgtgtttcagtgtaaacacaaaaggggcattcttgtgtgccaaggaagcagcaaacatgctgaacccgcgcagaggaggtcggatcatactgctgtcatcatcaatggctgctgcactgaagccaggattcggtgcatacgcatcatcgaatgcagctatagaggcaatggtgaaaatactagcaaaggaactcaaaggaactggtatcactgcgaattgcgtggcaccaatgccgattgcgacagagatgttctt

SEQ ID NO: 38033 - DNA, 217 bp, Gossypium hirsutum
  Clone ID: LIB3135-055-Q1-K1-E6
gatggtggaggtggtggtggagacttgtacttgaaggctggtttgttggtgacagtgggggttttggggttgctttgagtttgatatccattagattattttatatgtagttgagttgctatagaaatagcaaattcatttttatttattggctagattattctatattcttctgcaaaaaaaaccatacattactggaaactcatgaacatttttt

SEQ ID NO: 38034 - DNA, 368 bp, Gossypium hirsutum
  unsure (1)..(368): unsure at all n locations
  Clone ID: LIB3135-055-Q1-K1-E8
cccannctttctaatccatcaagttcaatagnaagactattgaagatgatggtaataatagagaatcttagaaaagaggacaaatgcaccacaagcagactttagagtgtaagaatggatgataaaaaacgcaaaaaataaagtaaaatatcataataataaaagatacaaaagacttaagaaaaaccaaaaaaaaaatatgactagattgaggcagttcttctttgctatgtgactaacattgagtgatataaaaatgttaatattaaagaaaataattcattattgatctaattaataccatttacgtgaaaaaaactgccttaattataaagtttaaaattataaataatataatttcttcattt

SEQ ID NO: 38035 - DNA, 373 bp, Gossypium hirsutum
  Clone ID: LIB3135-055-Q1-K1-E9
gcgagctttccggattctattatccgtatgggaaatctaaggcctataactggtacaggaggagaattttgaccgcatgggcgccccgtgaagccaacctctataagatccaactcacatgctgctatttgcagctcaatgtagtgtttgctgagcccaacgctaacaaaaatgggcggaaaggaacctcttttactactaaaaatcaatactgctcatacattgtaactctttgatgccttctatacaactctacgtcttttgttttgtagccctaatcgggcggttaattccgtccgaggcttaataccggcgatagaccgatagcgaacaaataccaacaggggaagaatcgacaaggatatcattacat

SEQ ID NO: 38036 - DNA, 315 bp, Gossypium hirsutum
  Clone ID: LIB3135-055-Q1-K1-F1
gagaaagggagctgataagctctttatgatggtgtataacctagcgttagagacataccctggagggtcgaagcacgagccgaatcaccactaattgcttgatggtgtctccactgtgtgtagaacagagtggcacatctaagataggagatttcagacctgaatgagactaccgaaagacgtgccaaaagagtgccagaatcctttgttcataccataatctatgatccaatcttgatacacgtcgtgagagatgtgtcggataacacccatgcaaagcctaaacacacctataatcctatcgtgattaacaag

SEQ ID NO: 38037 - DNA, 454 bp, Gossypium hirsutum
  Clone ID: LIB3135-055-Q1-K1-F3
cccacgcgtccgcccacgcgtccgaacagcttctctgctggagtcacgagcagagcaagcttccctgcagtggtttgaatgctacgacagagaccagaatgaagatctcctggaatcgatgcgctatttcattgaagctgctgaagttcactcttcaattgatgccggcaacaaaacacgcagggcttgtgcccaggcttctcttgtctcgcttcaaatacgcattccggattctaaatggctcaacctatctgaaaccaatgctaggcgagctctagttgagcaatctcgattccaagaggctcttattgttgcagaagcctatggtcttaatcagccgacagaatgggccctagtcctttggaatcagatgctcaatccagaactcacagaagagtttgtggctgaatttgtggctgtgctttcacttcagccatctatgcttagcgaactg

SEQ ID NO: 38038 - DNA, 205 bp, Gossypium hirsutum
  Clone ID: LIB3135-055-Q1-K1-H12
gcctctgcttctttaagcatggcaacaactttctttagcattcccatcaagggtaatagtatagtatagtttgagactggttattgccagagaaacttaggatcatgagactgcaagagaatctgtagatatgatttccatgtaatttaatagttgattgtttgctctccttcaaaatgcaactttctttgccaccattgccgat

SEQ ID NO: 38039 - DNA, 237 bp, Gossypium hirsutum
  Clone ID: LIB3135-055-Q1-K1-H2
acggatgggctaaaacatttgtaggcttatttgtgctcgttccaactaaacattttgcgttgctcatgtcgggcgagggtagcataatcccggcaggtttggaccttcaacccccttccctacgcacaaggcaaagttacaaacatagtcattcaattaccttgtaaaaaggtttacatgtattaacacataacactctttggtatttaaccaatgagggatctatcttaaatatat

SEQ ID NO: 38040 - DNA, 207 bp, Gossypium hirsutum
  unsure (1)..(207): unsure at all n locations
  Clone ID: LIB3135-055-Q1-K1-H9
aagaagactaaacattcttagagatttggcgtgagatccatctatggaatactatagtaggagcgaatttggccttacatgccatacacgccatagggtgggtgttgataccacgtggctagggctgataataccctatcctcttagagatgaaggngggggttttagaggaatcaagcttactaacggaggcatgaggcctgatat

SEQ ID NO: 38041 - DNA, 320 bp, Gossypium hirsutum
  Clone ID: LIB3135-056-Q1-K1-A1
cgcaaaagtaggaatatagttccaggcaactttccaaactgtaattttgatctttgaaggaatatgtagattccataatttcctgtaaaattttttattctcggcctgtaaattataactactaggatccagtgtagtctgttataatagtttgtaggcgctcctaatagagaaaattccagatggttccccccataattggaaatcgtcgtgctctgtccttgccaaagggatctgcttgattttttttaacaatatctgcattgagtaagctggaatagattgaaggactggccttaataaaaacctcctttttttcc

SEQ ID NO: 38042 - DNA, 291 bp, Gossypium hirsutum
  Clone ID: LIB3135-056-Q1-K1-A11
gcagttgaagtagcaacccaaaatttcagctaatcgaaagaagggaagctcgacgatttgaggaattttcttctccaagattcagcttgtaatttatgctgcttacaattgattcttgttttgtttcaattgctatgagtggttaaaatattcaagcttagttagacacttatgaaacctagcacaaggtatttgaagatttattttgtttaaatttggatttggcattcttgagttgcttgttttatcgttcaaggaatttttctaaatcaattagattgatcacctact

SEQ ID NO: 38043 - DNA, 360 bp, Gossypium hirsutum
  Clone ID: LIB3135-056-Q1-K1-A12
aacacgggtaggtgggactcttgtatgaatgtgcaccaatgagctttattgtggaacaagctggtgggaaaggatctgatggacatcaaagaatccttgatatccaacccgttgagatccatcaacgtgtaccactttatattggaagccaagaagaggtggagaaactggagaagtatttggcttgaataagatgcaaatgaaaaaagggtagtatttttgtttatggatataaagaaatacactttatgttgtaattcaaaatgaagacgaacttgtccttgttctgtaaattttatgggaatctttttcgtggcaatggcagcactttaagaaggtcattgtatgaccccttggttt

SEQ ID NO: 38044 - DNA, 392 bp, Gossypium hirsutum
  Clone ID: LIB3135-056-Q1-K1-A6
tcggaaatgaaaaaaaaattgaatcgtccattagcaggtccttcctctccccattttctccatatgcttagcattaataaagctcagggtaaacaacaaaccacatttatcaacaactatacagctcgaaaccctaaaacggacataagagttcatcagacaagatcctactatccagactcagtctcatcgagcagtcattcccctaccccgatctttatcaacaagccactccaccgccttcggtaccttctcaatccatacatcagacaactatactttcttccctccattgccaagccatgcgtcgtcgcattcgcccctcgagcttctagcttcttgatgacagtaaaggcgagcttttcaacacacacatctttaaaacccaacta

SEQ ID NO: 38045 - DNA, 216 bp, Gossypium hirsutum
  Clone ID: LIB3135-056-Q1-K1-A7
caggtgactaaccggttccttcgctgcttgacaaaccgagtagattgtattagctaccaaattacaaccccttagtttgtataaagtagggatgtaatccttagctattcgccacatatgtatttttattttacttggtatttggagtccccgcagttttgtaaaaagtgtagttagataatcaatctgaaaattaggcctcttttgttggcattt

SEQ ID NO: 38046 - DNA, 413 bp, Gossypium hirsutum
  Clone ID: LIB3135-056-Q1-K1-B3
cgtccgcccacgcgttcgcccacgcgtccgaaactgcgtgaagagattcaatcgcagtctgctgctaagcttcctgaggcaccagtgatgcaccctcctactgaatccccaacgtagaggtgccccaacctactctgtccaagcaccctaccaagggtaagaagtcaaaggccaatgacactagctaaccacaactgagagagctaccctagatgaattagttgcggcaagagcggtaatagtaccggcataagaagttggaaaggtccctttgtagcatactttacagaagaatcttactcatcctcaaaagttcggttagtagtttcagaggcatcgagttcaaaatcaaaaggctgattacccggggaaagggactttcaaaggcttatctattatctattcccccattt

SEQ ID NO: 38047 - DNA, 407 bp, Gossypium hirsutum
  Clone ID: LIB3135-056-Q1-K1-B8
taacggcagggagcccgggaaaacaaaaaattaaaaaaaaaaaaaaaaaaaaaaaaagagaagggaaaaaaaaaaaaaaaaagaaaacaaaaaaaaaaaaaaaaaaaaaaaaaaaaaaagggggggcggccgaaaaaaagaaaccaaactaacgcgcgcgggcaaggaatgaaatattttttcgatggagcaaacaaaaaaaaactggcgggccgtttataaacaaggacgggggaaaaaaaacccgggacgaaccaaaaataaacgggaggaaaaacaccccccttaagcaagtggaaaaaaaaaaaaaaagggccgaaacgatctttctaacaaaaagggagcccataatggaaggtaaaagggaccccccctggggcgcaataaaaaaagggcggagggggggg

SEQ ID NO: 38048 - DNA, 311 bp, Gossypium hirsutum
  Clone ID: LIB3135-056-Q1-K1-C1
aagtcaagttcctcactcaaatccttacgccggaaagaaaaagcacttttggatgtaaagacccgctgactcttcactttactactcgcttggtgactaacctaccaaacctacccaatcgtacgcagctccttcgtccctttcctctctttcaacccatctcacatctgcgatatggcttggacccttctttgagtgggagagtgtgttgcaattatcctcgaaagtctccctgccctcgtaaggccaagcgaaaaacgtcaaggctccacaccctgagaaatttttcacgttcctcattcgagctttct

SEQ ID NO: 38049 - DNA, 284 bp, Gossypium hirsutum
  Clone ID: LIB3135-056-Q1-K1-C10
cgcaaacagaagcttcaggtggcgctttctttgtgaggtatatatcacgctcagtgttgggtttcggcttctaaccattgattcccacaggcatcttcttcacctagaaataaagagtagagggaggaagagagaggatatgaagcagggaaagcaagcagcatatgattaaaatggtggagggagagcagtaggctttgtttatgaaatgttaacgttagacgacgttgtattgtagatttgttgtacgtactgattggaaatatagagattgctcttggtgg

SEQ ID NO: 38050 - DNA, 317 bp, Gossypium hirsutum
  Clone ID: LIB3135-056-Q1-K1-C4
aaaaaatgtgtgcgtcggaaagaaccttgagacggccggaaaatcgagttcctacaccggagaccgatttcagatcggcgttcgaggtactcgacgcggatcgcgacgggaagataagcagagacgatttaagaagattttacgccggattttcatacggcttcgaagatgccgactaaatgatcgggacgatgatttcattagcggatttaaacagcgacggattcgtggagtacgacgagttctagcgcgttttatgagggtataataacagaaagaaggtttcaagttacggtgtaatggaagatgttttcaag

SEQ ID NO: 38051 - DNA, 388 bp, Gossypium hirsutum
  Clone ID: LIB3135-056-Q1-K1-D1
gtgcttttgattccttttttgttcttactattttggtgttaatctatgcctttgttgagtttgttgagtaaaaatctcttttttattgatgaaaaatggtcgaacccttacaaaatgtttaaatttggcttttatagccataccacttgattttgtattattttctgtcttttctttctaatcccttgcaggtgcaagtcgttggagaggcggtggagacgtgaccggtggagcggcggagcaggcttttggcagaggggtaggtggccgaaagtcaaggggtggttgctgcgccaaaaagctagggggctagggtttgtgatggctttgtcttttctgaattgggtttagggtttcaattgggtttgggctaaatgtggggtttagt

SEQ ID NO: 38052 - DNA, 343 bp, Gossypium hirsutum
  Clone ID: LIB3135-056-Q1-K1-D10
cccacgcgtccgatagatctcttttccacctatgttaaaggggtatgccgctatatatgctacaccgaagtatgctcctagctaagctactggctttggatctgcctctcgagcacgagggtcgtattcaattcataaggctatcgatcatgaaggtttgcctatggctctgtatctacctctgtctgctggtgcttattttgataagctgcaggatcaacgactggatcagctggaactacaaaaggctatggctatggaacttttttggatacttagcaaggtgctgcatcaaccggcgatactttctatgccgagagcaccaatagatagcttagagaac

SEQ ID NO: 38053 - DNA, 191 bp, Gossypium hirsutum
  Clone ID: LIB3135-056-Q1-K1-D11
cgcgtccgcggacgcgtggggaacaatttaaggttcaaatacaatgtacaaagtttatttaaaaaaggagggaaaataaaaaaaaaagggcggacgaaaataagagaaccaagattaaatacgtgggcatgcgacgaaatagatctatatatagtggccacctaaatttcaaaatcacttgggctttcgaa

SEQ ID NO: 38054 - DNA, 292 bp, Gossypium hirsutum
  Clone ID: LIB3135-056-Q1-K1-D4
gctgtttggccttcagtgtatactgcaatggcttttatggatcaatttgataaagacagtgatgggatgattgagaacgaagggttccctgaccaaacctacgatgcatggcctgttgatggtgtgagtgcatacagtggtgggctatgggtggcagccctccaagctactgcatctattgctcatcaagtaggtgatgatgaagctgctgcctattttcataccaagtatcaaaaggcaaaatctgtatatgcaacattgtggaatgggttctacttcaactacgacaaca

SEQ ID NO: 38055 - DNA, 195 bp, Gossypium hirsutum
  Clone ID: LIB3135-056-Q1-K1-D6
cccacgcgtccggggaactgaaaatgtctattgttccaatgctttttctttaaactaatgtggaacattattcttcgtgatatgagtaatcttccccttttattctcaaagaaaaaaaacaatctcacactctttataaactactactcaaacttgatctcaactatgataactaaaatgtgtttcacatttaat

SEQ ID NO: 38056 - DNA, 144 bp, Gossypium hirsutum
  Clone ID: LIB3135-056-Q1-K1-D9
agctggcagaggtgcaggactaatgctggcgaggcttgtgaaattggaactcgcgcctaacgtgaccttttgcagttacaggtggcatgaatcaacatacataattgggcgtgcggactccatgagaatgcttacttaatatag

SEQ ID NO: 38057 - DNA, 359 bp, Gossypium hirsutum
  Clone ID: LIB3135-056-Q1-K1-E2
cgcgtccggtgccctgatggggagagggctcagcggggacgcctacgagatttagctgttttcgaaagggtacatggagatcctcggaaaacatctccatctttagctgtcaaaaagaaccatatcagtaaagcatgtccaagcatcggatgtgcgccctcttgcagtattagaagatacattaaactaccttttaaacctactggactcgagtgaacatcctttcgaagtggttcatgacttcattttcgataggactcgatcaataaggcaggatcttagcatgcagcatatagtcaatgatagagcaatttgcatgtacgagaaaatgggacgatatttcttgcccaggaacatat

SEQ ID NO: 38058 - DNA, 380 bp, Gossypium hirsutum
  Clone ID: LIB3135-056-Q1-K1-E8
caaggtgttgccgatgagctgattccattgatgcaagaacgattccctgagcttggactccttaaagaagattacattgagatgacttggattgaatctatattgttctggaaccaactttcaaatgaaacatcggagattttactcgataggagcaataggaattcccttgttcctctttcatacaaatcaaaatctgattacgtaaggaaaccaatgccagaaatagcattacaagggctatggtcccgacttctcgaggtcaacgaaacaagcacagcagttgtaaacatcatatcttacggaggaaaaatggacgaaatcccagagacagaaactccattccctcatcggaaaggcaccttatacaagataaacta

SEQ ID NO: 38059 - DNA, 451 bp, Gossypium hirsutum
  Clone ID: LIB3135-056-Q1-K1-E9
gaaagatagatacgctttgaaatatgtttatgcatggcatgcaataacaggatactggggaggagttaaacctggaattactgaaatggaacactatgaaccaaagttagtatatcctgtttcatcaccaggggttcggtcaaatgattattccgatgttttgcagtccattactatcaatggtgttggtttagtgaaaccagagaaagcttttgagttctataatgatcttcattcatatttggcatctgctggtattgatggtgttaaagttgatgttcaaagcattcttgaaactcttggagctggccatggtgggaagagtaaaactcactagaaaataccatcaggcattagaggcttcaatatctagcactttccatgacaatgcaattattgcttgtatgagtcacaacactgatcctttatatagggcaaagagcacagctgt

SEQ ID NO: 38060 - DNA, 378 bp, Gossypium hirsutum
  Clone ID: LIB3135-056-Q1-K1-F10
cccacgcgtccgcacgacccacacagcagggtgagataccagttcctagggctggtcatgcgggtgtgactggtgcggagaactgctttatcgttggagggggagacaacaaaagcggggcatgagaaactgtggtccttaacatgtcaaccctcgcttgctcaggtgtgacatcacttgaagggcgcgttcctcttgctagtgagggtttaagcatggatctgggcttgcttaatggggaagacatacttctatcttgtggaggatttaatggacacttccacagtgacgttcatgttcttagacctagtcacaagtcatcctatgcaatccaagcaaatggatgggtcttttcctgacagagactctgctgggcat

SEQ ID NO: 38061 - DNA, 444 bp, Gossypium hirsutum
  Clone ID: LIB3135-056-Q1-K1-F8
ggaagaagaaaaaaaataaaaaataaatttattaagcctctgctaagctttttcagcccgagctctcaacgccgccgttctccgacaagtcaattctcggggctccgtcaagctccgatttgagcgaggcgaacgcagttttgacggcgaatcctcgaaggtgatcgtgggagcacgtgcgaggaaggcgcgcaagggccggcgacgagggtggctgctgctagcttttctgcttaggcttttcttgatttaatttcgtgttgggctagggttagctctttaggttattgggcttggtaatttgggcctcgcttatttattttgcgctttgggttaaaattcgccctttgggttttataattcggtaaataggggctggggcaaaaaatggggtaattacaaagtattatttgggttaatggaaattaaaaaagaaaaacctta

SEQ ID NO: 38062 - DNA, 210 bp, Gossypium hirsutum
  Clone ID: LIB3135-056-Q1-K1-F9
ttcagaacctgccttagacatcgtgtgttttttatggattcagcgacgtttctaggaacatcctggtgtcaacacagcagtgatgaagctgagtgtccatataacccacccccacagctcgagtgatagggctgaccttcatgagaagcttaacaacaccttgcagtcacggaagcatttaaacatggtaacctcgctgatgcataacat

SEQ ID NO: 38063 - DNA, 364 bp, Gossypium hirsutum
  Clone ID: LIB3135-056-Q1-K1-G1
ggtcgcccacgcgttcgcccacgcgtccgcccacgcgtccgaaaaaacttcaaatcctctcccccttttctctctgccaacccagaatccggcgaggagtagaccggtcgcagtcgtgccgtccgccgtgccggccaccgtgaatcggaaaatggtagtggagcaagtaggtggctgacgtgacagtggcggtggagcagaggcgatggccaaattctgacatggggcggcagcagttgattaggctagggtttttagttccccctttttttgttttgtgtattgggcttgggttcttttaggcttaaggcatttagttgggtattaatttgggccagcaaattggacttgtataattataact

SEQ ID NO: 38064 - DNA, 313 bp, Gossypium hirsutum
  Clone ID: LIB3135-056-Q1-K1-G12
ggacgcgtgggcagctcattgtctctagcttcttcatttgcggtctcattgctccccacaaggcttgttccccatactgctgctattgaagaacctcatattgctcactgttgctgtgccttattttatctcagaaagcctcttcttcatggacttgagcttttatgactatggctagttcgaacagtcctatacctgtgggcgatgggtttaatgagtatgaaagtgcttttaaacgtcaaaaggcttatcacttcaaaagtgggggatgaaatgaccaaagcttggattgcgagaaccaaaaatgaatttg

SEQ ID NO: 38065 - DNA, 386 bp, Gossypium hirsutum
  Clone ID: LIB3135-056-Q1-K1-G4
gcgtccgcctgccgattttctcccagtcacgcatcttttctgccgatttgctccctccatttcttttcttttctttttctctctgccactctttcgattgccttctcaaccaatcgacctttttcttttcttggtctctctgtcactctttcaattgctctcagttggtgggtctccacgttactgcaactgaaagggtgttcttcatatatctctgcccccatcaagtcagtacaggttagtttccccgattgcatgtttctattgctgcttattttctattgctgcttatttccctttgagtcatcatatatcattgaagtaaaagagaagtttatcttcatctgttgtgcatgtatatgattgaaaaatagatttgttatctc

SEQ ID NO: 38066 - DNA, 384 bp, Gossypium hirsutum
  Clone ID: LIB3135-056-Q1-K1-H1
ttgttcctaggagtttacgaccagcaaatgaagagcctcacttcatcatctcatctgatttaaaactgaatcactcaaactaccaacagaagagacacacgcatatacgtacatacatatgcatatttaaaaaatacgtacacactacattttaaatttgagtaagaaatatattgaagcatgtggaggaggttgtggtggcgcgaggctttgaagcagggtgtgtctgcggccgttgggaggagactttcgcctcctccgccgaacccgctgctgttgggtggagtgacattgggaaccaatttagtattccgcggtacaaaaattaaggtttcttcttcatcttgtgaaggccaatgcaaccctctgatttcaaaaaaggca

SEQ ID NO: 38067 - DNA, 414 bp, Gossypium hirsutum
  Clone ID: LIB3135-056-Q1-K1-H2
gcgtccggcctcacttgaagatgaacaaagcaaagtcaggtcctttttctgctcatccttctttttgaggatggtcctcatttcaaaacaaagttgaagatagtaaacatgataagagcacagcttctgttttttgctttgtggttcatccaaattatgccctatctttgtagttttctatcatgttatttattccttactaagaaagtttgggacctcacctagattgagaacaatgccgttgaaggaggaaatagtgatataaaagatcgacgtgtgccgcatatcaaggcattgatttactatttatatcaagtcatgatataaaaacatcatctttctgggatacttacatttattgaacttattatcaagaccggggatttaccatttggtcaattgttattttggaaa

SEQ ID NO: 38068 - DNA, 296 bp, Gossypium hirsutum
  Clone ID: LIB3135-056-Q1-K1-H9
agacggtggaaaaaggactccgtcttcttcaagaaagcgaagaaactgtttgatgttgagattttacatacagatcctcccaaagaagggtctcgaattggagttgttcgtttatgttcttattgggaaaatttaatgtctgattgtcgttgatttggggaatttaccaaaaatttgtcgaccaagtcgatgaaattggtgtgctaaattcgatggtttgctgcttcgttttctatgttaatcggagctgataattgtctaatctaaatttgtttaatatgtcgttgatgatttac

SEQ ID NO: 38069 - DNA, 303 bp, Gossypium hirsutum
  Clone ID: LIB3135-057-Q1-K1-A3
ggaaatttgcattttgaggcctagcttttgcttaaaatttatgcttcaccctaaacggcgggggactggcttaaaaaaggataatcatcctgatcgataggcaaaaagtgtggaatgccggcaagaaatgaatagattcgatggaacataactcctaaagggaggcaagtgccaaatgaggggggggcgctttagggggtcaaagcttaccgccccgggcttgcgacgtcataacctttctataggggaccttaacattaattctctggccggggtttcacaacgtcgagattgggaaaacct

SEQ ID NO: 38070 - DNA, 308 bp, Gossypium hirsutum
  Clone ID: LIB3135-057-Q1-K1-A4
ccggataccaatctttaccgcacgttaaacaaagggagagtgcatgcatctcttaacatggacgtgggagcaccgaatccattgagattgaattcgaaaggctacagtggagtgatataggatgatgcgaattttatcggtggatcgtatgcatgatcgccgggggtgctttacagtgtgaagggctgcaaacttgatcattcttgagggcgagagtttttatattgtgcaattgatatagctgtgaatgagattggtcatctgcatcccgattgcttcacgtctattcagaacctttcattttctta

SEQ ID NO: 38071 - DNA, 419 bp, Gossypium hirsutum
  Clone ID: LIB3135-057-Q1-K1-A8
ataaaaaggggtacattcatagaattccgaagtgggatgctcaacgtatctccaattggacgaaactgcagccaagaagaaagggatgaatttgaaaagtatgacaaggttcacaacatacgcccaaaaatggtttcggtgcttcgagaaaagtttgctcaccttaacttgacattctcaattggaggacaaataagctttgatggttgggacaaaacatactgcttgagataccttgaagaatttcaagagattcatttctttggtgacaaaacttacgagggagggaatgatcatgaaatttatgaatcagagagaacagagggacacacagttaccagccctgatgatacagtggagcagtgcaaagctcttttcatgagcaattgaaacttccctctcgtataccatttaaattt

SEQ ID NO: 38072 - DNA, 230 bp, Gossypium hirsutum
  Clone ID: LIB3135-057-Q1-K1-B10
ttcaagcaagccgagctgatatcaaaatttctggtacttatatagcacttttcggtggtatgctaaaccctgaaacgaattcgttaccttcgtgggggacaaactagtattcgtattattttctgggagaaagtaatgccggtgtaagctgggtaaaactatgattttatggtgttctcgtttcagaagaatagcagaattgggaaaaaagatgatgctttgagctacta

SEQ ID NO: 38073 - DNA, 180 bp, Gossypium hirsutum
  Clone ID: LIB3135-057-Q1-K1-B11
gtcaaggacaaggaaaagataacagaagacggggaacgtgacaacaacttcgagaagacgggctaaacccgggaacgaactcgacgccataataggggacaaaccattgaagacatgaaaaaggaactgaaaagctagaaagaagcaagcatagcaaagcaaagaaaataaggtgggaca

SEQ ID NO: 38074 - DNA, 325 bp, Gossypium hirsutum
  Clone ID: LIB3135-057-Q1-K1-B2
aaaaaagttgaagcctgcaaaaaaaagacccatgttttcttgctcttttctcactctaaatttctctggctttattaaatgataatttagacaacaatggcgcatcatgggttacggtacacttgtttggaaaaatttaagggctttttttccttcgcaacttgcagaggtctctctctcaagtcctcagcatgatctctcatttttatccgttttggctttctcttttcaaccctttcttcccatcctctttatcctctctctctgcaaccttacctctcctcccatttccctcaccatgccaggcaaccaaaaagttatgtgg

SEQ ID NO: 38075 - DNA, 257 bp, Gossypium hirsutum
  Clone ID: LIB3135-057-Q1-K1-B5
atgaaatcaagttcttggtaaaaactatcactttaaagtctggatgtcttcatcgaccggggggtgggctgttatcaacggtcctcccccagcgctccatgcaactgttcagtttctacgctttctgggaatctattcggcattcttccatcgttaagagactgccttaccaggtatctatagcgcgcggtcttgactttggatcccattcagttcacgctatggtacacaatctttgtatacactggggatatcct

SEQ ID NO: 38076 - DNA, 121 bp, Gossypium hirsutum
  Clone ID: LIB3135-057-Q1-K1-C10
gacacacatgcataccgggtccgcacactcttccgtggacaacatatggctgaaggaaaaacgcatccactgctctgttaaacctgatccaccgaaagcttattgcgtcctgcataaatcc

SEQ ID NO: 38077 - DNA, 180 bp, Gossypium hirsutum
  Clone ID: LIB3135-057-Q1-K1-C5
cacaatcgtatggatttatttaaggcgtggatggatcattagacatacagcagttgcctgggctcaggatgttgggaacgatgtagctcctgttctcgaagcgacagctatgaatcgcaagtgttattgacaccgattcgctataaacaaagtttacagagggtgcttggcctgaaaatt

SEQ ID NO: 38078 - DNA, 251 bp, Gossypium hirsutum
  Clone ID: LIB3135-057-Q1-K1-C7
gcgaccacgcgtatcgagaaaagaacaagtcatgggaaactactatttccaacaaactggtgggaggtgccaaaatcactgaggagggagaaccccgaccatagacagcaacgtgatgggataataatgaaactacgaattgaaataaggaactagagggggctaaagagcaaacacaggctggatatgaagacggacgcgcagctaaaaatagctgtggacaacaaaagaaacgagcgaacgaacaaaga

SEQ ID NO: 38079 - DNA, 244 bp, Gossypium hirsutum
  Clone ID: LIB3135-057-Q1-K1-D11
ccgacgcaaaagaacaatcatgaaacggaaggaaaagaaatcgaggaggcaacagctaacacatactctgtgcagaatgagaccaatcaagaggtgaaaagcgtgcaggctgacaagtatgatcatggagaggtgcaaaacgatcatggtgacaacccaaaagatgtcggtatgaaaatacagaagggagcggaggaaacaatggccaaggctcatgcaaaggttgtgagggaccgaaaaaaga

SEQ ID NO: 38080 - DNA, 168 bp, Gossypium hirsutum
  Clone ID: LIB3135-057-Q1-K1-D12
aaagctttgggtagattctttcttttaatatatcagaggtttcagaaagaaaaagagcattggtaagtgaaaatgggatctggcgctggaagttatcttaaggttttttttaaaaaccttgatattcttgctgggccagttattagtcttcagaatcctctttatgcc

SEQ ID NO: 38081 - DNA, 332 bp, Gossypium hirsutum
  Clone ID: LIB3135-057-Q1-K1-D3
atacaagctcgctggaatgtgaaatccagggttgtgtctacgcatcatataacggcgggaacggcgtgctacatggtggctgaggcactcgaacaaatggtatagagacatatatgcggcatagatgtggcaaaattgaaaatctatcaatgcttacccagcgaacagaaccaagagctaacggcattacttgaccactgcggcataacttacttcgtgttgactatggacaccgacatactgatactaaatttggaacatacctgccatcctatgacgtttagactatgagtgatatatgcggtcatcacagagctgatcaaggacttaaa

SEQ ID NO: 38082 - DNA, 220 bp, Gossypium hirsutum
  Clone ID: LIB3135-057-Q1-K1-D4
aaccatcgtaggtggtaaattaacggctggttgatgtactaacgcttcatcaggcggggataggattgctactggtcgcgttactgcccctgttaactaacctaaaacaccgtatccaactgatgggcctaccacttcctcaccaacttatttaccaccggctgatggtactgagaactctggggaggattcagccccatctaaatctgctacagcttgt

SEQ ID NO: 38083 - DNA, 231 bp, Gossypium hirsutum
  Clone ID: LIB3135-057-Q1-K1-D9
ttcacgcgttcgtccacgcgtacgaccacgcgtgggagctgtgtaaggtgagggataagcgaggctatggagcaaaagataagccgggaggagataaggagggacacctggaaggggttacatacagcgacagacgaggggatgggcgttactccatatcaaacggtgaagatgagactgataagctgtgggagatacggaaaatgtcctccgatacctcttgaagtttag

SEQ ID NO: 38084 - DNA, 282 bp, Gossypium hirsutum
  Clone ID: LIB3135-057-Q1-K1-E1
gagagatagtcatggttttcgggaacagagggggccacgatctagcacatgtatgcagcgttcatatgcgaagctaatggggtgcagcattcgcgaaactgcttgacgagattggaggatctctatatgattacgatttcatggaaaacaacaccattgtcaatggcgcccgcatacaaaccaatcctctcggtgggcacacctacgtgaacgccctgcatccatatgataattggctgcaagacatcgatgaataggactagactagcccataaccataga

SEQ ID NO: 38085 - DNA, 270 bp, Gossypium hirsutum
  Clone ID: LIB3135-057-Q1-K1-E11
accaacaatatgccactagcactaatttggatgggaggtggatggcgtctcgctcaatcaagagaagagagttgtagattcgtagaaaaggggaagagcctttactttctatgttattagaaaaggcgcggtagcctatctatagttaggagtcttttcttgctcgctagcgctttatttttaataaggacgcttaggctctactaataaaatatatatgggcttttaattaaggtgcgcaggttttgaaccctatacaaagggccgttt

SEQ ID NO: 38086 - DNA, 179 bp, Gossypium hirsutum
  Clone ID: LIB3135-057-Q1-K1-E2
aaaaaatagtaagggttaaaaagacacagattgtaaaacgaactaacaacaaaaaaacaaagggaataaacaaacgtgggggcggggcacccttctcgtgggttgcctgacgtttttgttggttctcttccggatcccgttttccatgcaaaaaagaccattccgctttgggcccgggt

SEQ ID NO: 38087 - DNA, 338 bp, Gossypium hirsutum
  Clone ID: LIB3135-057-Q1-K1-E4
gcgcgacctaacatgaggcaagctgtgagatatctcgacggagaggctgaattaccagaacttttgaaaccatcgaggatatatgagggagttggcgaagggtttgacgcttttctgcattcgtccatgtcctcaacatttgataatacgagttcgtattcattcacggatcaacatggcaatggtggtactagtattgtttctctttgagaaagtagactacttctatatatatatataacaaaaatgacagatatttcacatgttatagcatcattcttcaacgacaaaattttcagttctcacatacgaaggcattaatgagggatgtagctgaa

SEQ ID NO: 38088 - DNA, 326 bp, Gossypium hirsutum
  Clone ID: LIB3135-057-Q1-K1-E5
ggttgttgaatgcttgattagaagggatgtttatgatggaatgagtgaagaattggcttgcagaaacaccgttgcgtgcataacaggtattgtgccaaagaccatatcaacaaagggtatgctagctgtatacaactcattgatcgaggaaggcaaaaagcgatttgagggcgcttacattgcctcatattatacttgcatggaaatcctatatgagtgttactaaaatattgcgagtggaagcgagattcacagtgatgttttggctgggcgcccgttttattaaaaggagggcctacctgcctttcctatgggtgaaattgatc

SEQ ID NO: 38089 - DNA, 273 bp, Gossypium hirsutum
  Clone ID: LIB3135-057-Q1-K1-E8
gacccacgcgtgcgctggacaggtttgactgaatgggtattgtttctcctcgggacgttgccctactaggagcggtggagatcggtagaactcattgtgtgaatctggagcatcgtttgtacccataggtataccctgctcttaaccccgaccatgtttcacacatactccataattactcttgtcaaatgccagacccgaactcctgtcagtttgtgataaaaaaccgtactactcttatgtatttgtataacaactattactggaacatac

SEQ ID NO: 38090 - DNA, 317 bp, Gossypium hirsutum
  Clone ID: LIB3135-057-Q1-K1-F3
atccgactgtgcaacggatgggagctatccgtttccgcggtgctagagcattcactcgatcgatgggactctgatggtaagggcaaaagattctagacaggccaataacgagagctggtaacgtagccatagcctcgcacgccttgaccagcgttgtacaccactcgaaagctaaagcatgtcattctaccaaacatataccaccatacatcgtgctgtacgaattttatcatgaatactaaccatgggctggtgccgacattacataccatataccgactcacctccttgtggatacaactgccgcttgttacaga

SEQ ID NO: 38091 - DNA, 286 bp, Gossypium hirsutum
  Clone ID: LIB3135-057-Q1-K1-F9
cccacgcgttcggcagaatttacatccagaggtggtgctagtggatccggaaagactagcttggcacataaaatggaaaatattgttggtcgtgaagtagtttccctcgaaagctattttaaaccagagcaagttaaggatttcaaatacgatgactttaactctctcgatttgcctttgctttctaaggagtggaaacattgttttcaaaatcattggaagcaataaactctcgttcccagcatctgttgacaacttcggagcaatcagtatcccatgtaatgcc

SEQ ID NO: 38092 - DNA, 440 bp, Gossypium hirsutum
  unsure (1)..(440): unsure at all n locations
  Clone ID: LIB3135-057-Q1-K1-G1
gctacgcaaacgagcacacattcgctataattatgaggcaggtgccatcgctgataggcgcgcggaatgactttggctgtccttgcgcngacctaacgtgacatgctaaaattatcagactccacggataaactcgtgaacaccactactttccactagaatcaataacctctcttaccaaacccaaaatgattgaaaatgcagccttgcccaccacggtaaccaattaactaatcacgctcttagattgatccatcgttactattgcggaacgcttgaagatcagatataccacatatcatgttatacgttacatgctcatgcgggctctgccgctacctgtgcttcggaaaaaagtacttggcaaggttgtcgtttgcatcgatcgaagctttgaacatcaaaaggcttaagttattgattgaagcccattgaaatta

SEQ ID NO: 38093 - DNA, 145 bp, Gossypium hirsutum
  Clone ID: LIB3135-057-Q1-K1-G9
gcgtaggcggatacttgattgagacacatgcgggggagctgcggcgcactatggactaccatggtctcttagttcacgcatgatattctttcgttcgtggcatctgatctgatctacctgaactgagtgacagagcttaacatgc

SEQ ID NO: 38094 - DNA, 256 bp, Gossypium hirsutum
  Clone ID: LIB3135-057-Q1-K1-H1
actttaaataattgaaataccgcatggaatgctcttaagcataattatgtggagaaaagttgagcatgagagcgggtgcacccacaggcacaagcagcataacatgtcaggaagaaagaaggaaacatgtcgggtggttattactcccggacaaaggacggaacccgcacactgttgctgcaaggtagccggttcctgatcatgatggcttgttgccatgaaagaaaccgagatcgagcaacgaccttatcaaact

SEQ ID NO: 38095 - DNA, 356 bp, Gossypium hirsutum
  Clone ID: LIB3135-057-Q1-K1-H2
cccacgcgtccggctcgtactggtgaacaaatgacaccgaatggctgcctgtgatatactccaaaagtgcaagcatattcctcagttgttactagcctttctagtgaagagacagctgaaggaaccaatataagcattattgagaaggaatgttggattcagaagcaactttcagcttttgtagcggccagtggagatcaacagtcatggagaaaagggaaaccattgagcactgaagttgcagttttgaaagatcatgtccctagtttcgatgtcactcgtgaacctgaggttatagatttattaaccccttctgccagctatagagtcaggccatgcaccaagaaaagaagaat

SEQ ID NO: 38096 - DNA, 356 bp, Gossypium hirsutum
  Clone ID: LIB3135-057-Q1-K1-H8
gtctctatatgtcagcatgagttacatgtgacatgccacatgttactatttggttactatgtcagtcatgtcaatttttaactgtagaaattgatgaaatttttacagaaatgatcagtttgctctttgatttaatgtacagagaataatttgcccattttttagtagagggggcaaaatgcaatatgacaccaaggattagggccttcatgatatttttacgctagaaagattagaagtaaatccactataccagtggatctagttttcgatgtttctaagatgcccttcatgtgtgcctccatacaaagctaagtgtatgttggtttttccatctaagtacttgattaatgttt

SEQ ID NO: 38097 - DNA, 240 bp, Gossypium hirsutum
  Clone ID: LIB3135-057-Q1-K1-H9
cgtggttcaagggctttgcttaatttcccgcatcggatcggtgacaatgagcctgaacctgttagagttaaggctaaacgtggggcaacaaatgattcggtttcgttcaatggttcatttcccaagaaaacgagaagcttggaagctaacaaggctgagttgaccactgtgtttcaattgggtctattgcaggttggggaacaattattggtgaatgaaaaattatcacaacttttaaaa

SEQ ID NO: 38098 - DNA, 445 bp, Gossypium hirsutum
  Clone ID: LIB3135-058-Q1-K1-A6
gtccgaggcattgggagttctttgtcaagcagtacaaaaggaaagaggagtgagagagacagagatggaaagggacttggtagagaggttttacctagaaatggaactaataagattggtcgacccgcatccaatgtgaagggggaaaggaaactaaaaataaagcctaagcagaaaatgactcaactatctgtttctgtgaacggcattcttggtgagatgtcagagcaccccaaaccatcaacctccatatcaaagtcaaatgagataactatcaataataatgccaaagaaaaagatgattttggcctggatgtactggatgacttgcagctaccaggacaagatttgggttcatggttaaacattgatgatgatggattacaagatcatgatttcatgggccttgaaattcccatggatgatctttctgacttgaatatga

SEQ ID NO: 38099 - DNA, 442 bp, Gossypium hirsutum
  Clone ID: LIB3135-058-Q1-K1-A7
cgcgggtgaccacgcgtccggtgagagcatcgatggcctcttcagcatcatcaggaagggctgccacagagacaaagcctttctctgttcttttcgcttgcttaggcaacatctgccggagcccagctgctgaaggtgtctttagagatattgtgaaaaagaaaggccttgactccaagtttaacattgactctgctggcaccattaattaccatgagggaaatttggcagacccaagaatgagggcagcctcaaaaaggcgtgacattgagataacatctatttcaaggccaatccggccatcggactttagagattttgatcttattattgcaatggacaagcgaaatagagaggatatattagaggctttcaataggtggaaatcaagagacaaactccccgctgatgcctataaaaaagttagactgatgtgctctta

SEQ ID NO: 38100 - DNA, 369 bp, Gossypium hirsutum
  unsure (1)..(369): unsure at all n locations
  Clone ID: LIB3135-058-Q1-K1-A8
acgcaaatntngctttgatttgctagtctttatgccattgtatttatgaagaatactatttctcttatcttgtggttaaattgcatagttttcaattcatatatgtccataccttagtgttttatatcggcggcgaaacggattagcgattatgatcagtactcccaagatcattgctttggatacgtcgtatacatcgagatgttctcggtttattgtaattatcccgtgatgcgaagtttggtctagcttcgggaataggtatttgttttacatatttgtattggacattcatgcaaaaggccgttcatgttggactgccgaagtgttcatatttgaatgattggggcaactctctttaagttggtc

SEQ ID NO: 38101 - DNA, 315 bp, Gossypium hirsutum
  unsure (1)..(315): unsure at all n locations
  Clone ID: LIB3135-058-Q1-K1-B1
acgcgtcccgtcaccatctgccaaacgtgatcacaactcggagttggacgatggtttccgcgtatgttcggtttatagagtgagagtgccgtataatatcagaacaaacggaagagtttgtacacggcttaactcgactcgactctataacctatggtaactaagtcattaatgaagaaatatgttaccagttgagcaaagtttaggatatttatgtaattttttttagttgcgttgcttgatttgatttaattacttttttttgggaaggattggaattcaaagaaggtgtggtatggatttgaagattcntta

SEQ ID NO: 38102 - DNA, 396 bp, Gossypium hirsutum
  Clone ID: LIB3135-058-Q1-K1-B3
gccgtacggagacgcgggcgcgcgcgaacggaggctcgcatgagtgcagaggcttggcacatgcgggtgagaggagctgctgcgatgctgaggctacgtgggaaggctagaggcgcgcttgtagggaaacagcgctaggggcttctagggttccttgcctctgatttttgttttgggctgcatggtaattgggcttgattaggttgggtattaagaaattcgggtttgggctattgggtttagaatcaggtttatgttacatctgggctttgtaatactaaacatttaaaaaaggactgctatatatataattttatttttggtttacaaaaaagaaaatgaaaaataaaactgtctaaaaaggttggggaagttgttatttggttatttttaaaa

SEQ ID NO: 38103 - DNA, 436 bp, Gossypium hirsutum
  Clone ID: LIB3135-058-Q1-K1-C1
tcgcccacgcgtccgcccacgcgtccggtttggatctccagtagaagatcttgaacagtgaagttgggcaaaaagcctagagatttcggaagtgatcatggtgactagctttacgatcgttgaacaatcgattgccatcctcgttatccttggtcatgtccctaatgccaaactccagccattttcttttgttggaataataattcttgatccatgagttggaccgtgttttggcttcatatggtggttgctcttggtgacttaagttttccaatcagttgttactttgtttcttgaatttgctagaaattattttgctaggattttattacaaacgtggtttcacgatcagatctgttttatctgctacagcaacaacgatttgaatagaaactcatcccatcaaagttctatttatcttgttggttcaagcaat

SEQ ID NO: 38104 - DNA, 412 bp, Gossypium hirsutum
  unsure (1)..(412): unsure at all n locations
  Clone ID: LIB3135-058-Q1-K1-C11
gtccgcccacgcgtccgattagtgccaaggctcaaaggaaggttgcgagagagatcaagactgctcgagcgttcggtttaatgccatttacaacgatggggacaaagtcattcgttttcggaagatcaatggaagttgataataaagattatgaatacgaggctttcgatgacatgactcccgctatggacgaaaaagatgcttgagccgagatttgagccttgaatagttccatttttatggtatcctcctaccatttctgatgttttggatgaaacagttcactgcatttactatcatattcggtgttttgactatatcagcaaatgatgttttcttctggacttgttaaaagaaaaaaaaccttgtacgttcttagattgatctangcttttatatagaatttatgttt

SEQ ID NO: 38105 - DNA, 323 bp, Gossypium hirsutum
  Clone ID: LIB3135-058-Q1-K1-C6
ggctgattaaaactcggaatgcgcttaggagaaactggacattgattgtgttcacaataatgccgttatggagctgcttataggggtgagaactctattgacagaactcatctctgggctaggtgcacaagattcggctcctatgagtctaggtttgtctgatagtctctctagatacaaacggaacttcagcgccaataagggtgatactatgagtgagcaagctattgcgatgctcgatgatcttgctaaaaagctcaacacgtatgcaatgaggattcatgaatggtatggttggcatttttcagagcttacttagattg

SEQ ID NO: 38106 - DNA, 186 bp, Gossypium hirsutum
  unsure (1)..(186): unsure at all n locations
  Clone ID: LIB3135-058-Q1-K1-D1
ttgcaattaccagactctgggatggcatgatatgaggtacatactacagtacagctcaagcgcgaaaataaactgnatgtatcgcccgcatagatgcccatatgccagagctgaatgctctgtcaactggcgatattgcatttcgtggcatgcatctaaagaaagatcacagggttgacatgcatg

SEQ ID NO: 38107 - DNA, 454 bp, Gossypium hirsutum
  Clone ID: LIB3135-058-Q1-K1-D12
cccacgcgtccgagtgtccacgtcttaacaaccgggtactggccaacatatccacctatgggtgttcggcttcctcacgagttgaacatctatcaggacatctttaaggagttctacttaagcaagtacagtgggaggcggttaatgtggcaaaactcgttaggtcattgtgtgttgaaagccaattttaccaaaggtaaaaaggagctcgcagtttccttatttcagactgtagttctgatgttgttcaacgatgctgagaagcttagctttcaagacattaaggactctactgccatagaggataaggaattgagaaggaccttgcaatcccttgcatgcggtaaagtacgagtcctgcaaaagttgccgaaagggagggaggtggaagatgatgattctttcgttttcaatgaacgattttctgctcctctctatcgtataaaggaaatgc

SEQ ID NO: 38108 - DNA, 428 bp, Gossypium hirsutum
  unsure (1)..(428): unsure at all n locations
  Clone ID: LIB3135-058-Q1-K1-D5
cccacgcgtncgaaaaaaaagaaaactgagctttttattttctctgcaggtccatatgccggcgaggctccggccatcgctccgccgtgtctccgtcgctccggccaccgtgtaatcgcctcaggtataaaaaaatttctctctttttttgtgtgttttaaaatgtattcacttttcttttgtatatattgcctattcacacatatatgggtataaaatacatcgattggccatgaaatatcaacgaaaaagaaagaaaaaaataaaactaaccaccttaggactacggcttctgttcttgagggcttttggtctgtttggatgctttttttatttcttgaaggctaataatgcttttttttttgcttgaatctatgttctttttttgtatttgaaaaatgtccgaatgtacaaaaggtaatggattc

SEQ ID NO: 38109 - DNA, 224 bp, Gossypium hirsutum
  Clone ID: LIB3135-058-Q1-K1-D8
ggctccccaaaaacctctgttggaactctttgttaagcttattattactttaactatccttttgttgtgttggatcattcctcaattgaacagatgttgttgagggtcaaaatactctgtttattgatttggtgttcaaacaatggcactgagtttgctatgggcttgaaattatcatttcccttttgtttcttttaaaaaaaaaaaaaaaaattaattttata

SEQ ID NO: 38110 - DNA, 218 bp, Gossypium hirsutum
  unsure (1)..(218): unsure at all n locations
  Clone ID: LIB3135-058-Q1-K1-E4
cacgcgtacgcccacgcgtccggttccnccatactccccatattgaatgtgtttgcctattggagcgttgttgaatgatagccttcacctatgggatatatgggattctctattttatttcatgataaaaattataagtactgtaacttataataattcaattttgttttatatttttggtccatagatttttaattggtgcattacttggttggaat

SEQ ID NO: 38111 - DNA, 312 bp, Gossypium hirsutum
  Clone ID: LIB3135-058-Q1-K1-E7
ctaccatcaacggtatgatgcttttattaaattttccgatcatacaactcaaatgggccgcttctttagtttacctggtggtgcccgaatggaatgggtcaatactatttgctttctgcaccatttaatatgaatgttcaaactttttgatgttgcaaaactatatggcactatggattatgctgtacatatttattttcctgtaagaaagataaaatcattatagagcataatccatgcacaaattaagcaaaaagcgcataaagctggcataaagagcgtgaaagccccacaattgccccttgagataca

SEQ ID NO: 38112 - DNA, 211 bp, Gossypium hirsutum
  Clone ID: LIB3135-058-Q1-K1-E9
gacatggatgatgtgcatcgctttgatccagttcatggacaatgggcccaaatagagacagggggggagaaaccaacgggccgaagggcattttctataggggggattggcaaatgcatgatcatatacggctgggaagtggatcctcgtgatttatgctaccatcgtgctgagaaaatttctggagaggtatactgtgtggacacagaca

SEQ ID NO: 38113 - DNA, 434 bp, Gossypium hirsutum
  Clone ID: LIB3135-058-Q1-K1-F1
ctaacttttggactcaacgaaactctaagtctctggttagacaacgtaacctggaaccgaaggcttggtgttaagtcctctaactatcaactcatagcttcaggaatagtttcaggtttataaaccttagcttaggaaatgccttagagaaaaatccaacaacctataattccttaagacaggagtcccagacagattagtgattagtattggatggattatcgagttattaattcacccgatggaatcatacgagccaggaaggttcacattgccggaaacgaggcttttctttaccctgcttttcccatgtctcccgaacacgaacccaatcgagatgaaagtttataacccgggaagatcagagggcttcggataggaactcatcagtatgattctttcttttttttaatgactagtctcttcctttcttc

SEQ ID NO: 38114 - DNA, 168 bp, Gossypium hirsutum
  Clone ID: LIB3135-058-Q1-K1-F4
gtctagtcgtgtgtctgcatcatctgttgtaacctgttattcttagattgattgtgtgtgttctatagataccaccatgtggatccgagtcctctgcaaaatgacagactgtactatagaggcttaaaatttgatatgagcctgaaataattcatatttccttgcttc

SEQ ID NO: 38115 - DNA, 435 bp, Gossypium hirsutum
  Clone ID: LIB3135-058-Q1-K1-F5
gccattcgctcaagtcgggtactaagaaaggtctctaaaaagacggtgaaagtgctcatggcgtgactcgggagaaagtacggtatggcgactaaagcggcgctgaatgcgcctcaacagtcgacgcggcgctagtcgtgtccctgaacatttgttttacctctggcatggatacgaccaccgcctatgtgcatgtccgtcaatatgacagtactatttacccatgtgttagtgtgtcactgaaaaacgcagctagaaactacgcgagaaataatgaagaaatcatgaaagagaacaccttatcaaccacctgaaaaaaaattcgtttcttattatacgactaggaatccgcaagagaaataccctggtgcttcctataggccttcttatagccggaaaatacattgccttagccatttccctggcgatctggct

SEQ ID NO: 38116 - DNA, 337 bp, Gossypium hirsutum
  Clone ID: LIB3135-058-Q1-K1-F9
ttcagggtttccttatgggttcaatacatttcacggtggtgttgctcatgggtttccccagctgacgacacgagggcagcagcctgataatgttttgaagaatcttctgttgttgattggggtgtttgtcgtcctcgctttgctttattggtgaaatagttcagcatttaagctgttatccagtgttggatattcagtgtctgtagatataccagcagcactggcgaatgattatgtttgggcttgagaaaaagttgtctatatgaatgatactgtcatttttgtttctttttagcatcagcaacaactcaaaccagtgttaatgttcaccttttca

SEQ ID NO: 38117 - DNA, 427 bp, Gossypium hirsutum
  unsure (1)..(427): unsure at all n locations
  Clone ID: LIB3135-058-Q1-K1-G10
gaaaagggtnggaatagaagactgtttcgagcaaatcatatctttcgagacactgaatcctaatttgtcagaatcgaagtgtgtcgttctcaagccgtcgacggatgccatcaaaattgctcttcacgtcgcacgtgttgattccccacgcaccctatttctagacgacaatgttcagaatatatccgctggaaagactttgggcctctggacttgtttggttgggaagagtggtgagggaaaggaagccgattatgcaatagaagaagtcaagactttgggggatgtgataccagaaatctgggtcaacaaacaggatggtggtgacagaagcagaagtgaatgggagttggatcaattcaatatctctggngacctaattgaaaacgatgtgggcttagctcttacggccccattatgcacatga

SEQ ID NO: 38118 - DNA, 213 bp, Gossypium hirsutum
  unsure (1)..(213): unsure at all n locations
  Clone ID: LIB3135-058-Q1-K1-G11
caactatgaaggcaaaactgataaaacaataatttagattgtgttgtgatggggctgtcatttgtcaacactagcgtggaatttatattgtgttgttaatttgcactagtattaaaataaagtgacatccattaataaagattgctactactatcgtctaatgtgtcatcagtttgacagtttgtagtttgaataaatgatatcgcttgtgng

SEQ ID NO: 38119 - DNA, 404 bp, Gossypium hirsutum
  Clone ID: LIB3135-058-Q1-K1-G2
ggaatccgagttcccaagtcgcgtcatctctcgggtcttgcttggaagctcaagtgcaagaaaatcaaagcaagttgaggggtttggaaacggtttcgaaccgcttgcaagaagaaattgatgaaaaagacaatgaagtctcggttttgaggaagaaattagctgagattcattggggtaacaccaagttgtccaagaaattatctggtaacctcaattcagcttgtgatgttcttttaaccgttagggtatttcattccgttttgcatgatgcttgcagagcaactcataagttcagtaagattttgattggtttgatgataaaagctgggtgggatcttgatttggttgccaattctatttatcctgatattgtttatgctaagatagggctcactagattt

SEQ ID NO: 38120 - DNA, 298 bp, Gossypium hirsutum
  Clone ID: LIB3135-058-Q1-K1-G3
cggacgcgtggggtcacagcctggaaagccctgttttgccttcacggttcgaacagacacaccgggtgattaattaagatcgggacaaagaaaagccatggtgaattcaaaccctgtactaaatttacgttgccatcactaggctggccctctttgcaaaaagaaggaaacaagggaaaggactggtgctccacttggaagggataggtcttttatgaaaggctctgctgctgggggcactacaagcgcattctatgggttcaaccatgtgatgccgatagtgaggaggtatgtaaag

SEQ ID NO: 38121 - DNA, 302 bp, Gossypium hirsutum
  Clone ID: LIB3135-058-Q1-K1-G5
gtccagaaaggaaaggagaaagtggacaaggcgtgactcgagagaaattacggtttggtcacagtcggattgttgaatgagcatccaaagccgattctgagctaatcgtggtggtgaacatttcttttacttatggcatgtataggaacttagtcattgtgcatatttgtaaatatgactctactatttaatgatgtgttagtatttgatgatgaatggttgcttaaatggtccaggatgaagttaattattgttgaaaaaaaacaccttataaaccacctgaaaaaaaattccgtacttat

SEQ ID NO: 38122 - DNA, 449 bp, Gossypium hirsutum
  Clone ID: LIB3135-058-Q1-K1-G8
cccacgcgtccgaaaaaattaaaaagagggaaaaattaaattcacgatttgggtgttataaagtcgatgtcgaggccttggctactagtttttatagtgcttatagtaatgctcacttctcaattcgaatggaagcagcaggttggtgaagaaattgagctaacttccactgtttctctcaaagatcaatccctttccaaacgccaagaatacgtcaaagaaaacatcatactttctcaagaaaggaatattcagaaactgaacgagcaagtgaggaatcttcgtgaacaattgctatggtgtaaggctgaaaccgagattagtaacggctctgcatttgctttgagtgaacatttaagtgagattgagcagcagccaatgttagatgactaacattatggggtcactgccaatagagtcacaatactgcttgctatgtgcaatacata

SEQ ID NO: 38123 - DNA, 224 bp, Gossypium hirsutum
  Clone ID: LIB3135-058-Q1-K1-H12
aattccaaattccaaaatcctttcttttctttcctggtttggcttcctttcccatgaaaaattctcaagagaatccaatcttcatgcaagcagaagttgaagatgaaggagtttggggtaaagggtgtgggtgttttaatctcttctgcctcaaacggcgccgatcatacaaccacatcaatgaatccaacaccttactgcaccagagaggggaacaacacacg

SEQ ID NO: 38124 - DNA, 443 bp, Gossypium hirsutum
  unsure (1)..(443): unsure at all n locations
  Clone ID: LIB3135-058-Q1-K1-H3
tggcaacataagacattgagactgacttaataaaatggggagatgatcactctccaggaggtttcaacacacaagaatgctactttgtgaccatgctaggtcctttggcctaaaatttaaagttgaagaaatgggaatccatgatttggtgaatgagttcatggcaatgaagaaacaaggtggtggtactaaagaatggttggcattcaattgcatggtgggactcccacacataggcaaaaacaagagcaggaagcttgtaaatgagttcctaggcatagctaaacaattattgacaagttgtggtgacaatgcaagaacaacaaaaaggggaattataacgcttcgtgaangagatgcttgtgagaaccttaaagatggtacaggctcaagttttgggcatattttatgcgcattgatgcactaccaagctattaggaatc

SEQ ID NO: 38125 - DNA, 306 bp, Gossypium hirsutum
  Clone ID: LIB3135-058-Q1-K1-H6
cgcgacgtgccataactctttatctttctatcttctactatctgaaaaagcatcggcctttttttatacctatccctattcctatcccaagccaaagtccaaatattcaaatttgatgatacaaattctggatttgtgattcaaagtgtgatgatttgggttgaaagttgttttgggggggtttgagagaagggaaagagattttgccatttttgtggaaatggtgataaataggcataatggtaaatgagatggaactaactatatttcttaccttctgaaagatattcaatgcttttgatgaat

SEQ ID NO: 38126 - DNA, 332 bp, Gossypium hirsutum
  Clone ID: LIB3135-058-Q1-K1-H9
cgaggtattagaattcctaggtcaaaacatagcaatctgtctttgataaaagaccaactttccaaccttccatgttggctaagctcgcaaacaagatgctgaatttggacttgatgatcgaaaaggactcgctatattctatttctacaaatgccgcaactacacctgatgctgctggcgggggtggtggtgccgatgctccacctcctgctgaggaaaagaagaatgaagaaccccaggcagagagtgatgaccatatgggattcagtttggttgattagaactttctttcagagctagatttccgtgattacagatggaatgcattaaag

SEQ ID NO: 38127 - DNA, 368 bp, Gossypium hirsutum
  Clone ID: LIB3135-059-Q1-K1-A12
tcgaccactcgtacggtcccctattgttggaaatttacagctaataaactccaaaaccgggcccgagatatctgctgcgtagccaagctcaagaattattctaaagggaaatcctttgctaacatataatgagaattatactgtggatttgcatttgaagaaagacattggggatttgcaggtggcaagcgatgctcttctgaggattgctggcgtctcaaaacatagcatgtttcttgatatggatacgactgatatagctgcaggtgagcttgggatcaccatcaaaaacaagtacaaacttgcacaaagaatactcttaactctttagatcttttttacttatactatttagagattaatattta

SEQ ID NO: 38128 - DNA, 401 bp, Gossypium hirsutum
  Clone ID: LIB3135-059-Q1-K1-B12
gctttatgtccaaacccattcaccctttgtcattccccatggaaactcctaccacaggagggtcggactctgcagttgcagggctttctgatgatacggccacgccacaaagagatgcccatcgctggagcagtgctagcagcagcaatgatgttgcatatttctgagccatttgaatctgtgatttttggggttctttcatgtggacacactttccatgctgaatgtttggagcagacaacacagaaagctcgcataagtgaccctccttgtcctgtatgtaccaagctcgaagagcaaaattctccagagaaccgagtcttctctaggcttaagaatagtatttcacggcttacatcattttcggaggatggaccatcaaggacttggagctgtgcaca

SEQ ID NO: 38129 - DNA, 327 bp, Gossypium hirsutum
  unsure (1)..(327): unsure at all n locations
  Clone ID: LIB3135-059-Q1-K1-B9
tcattgcccggcacggatgtcgcaaggatggcatgcgtttcagttgagatgcgaggtgtggcttcgaataatgatctatggaggaagaaagttgaagaggagtttggacattggttaggagtaacgaggaactggaaaaagatatatcattcatgttgngagagtaagaaaaaagcgtaaacgggcgattacacggtggccaagctttcctcgtgtcaataagccttcttacttccccggtaggaaagatcctattccacttggaagtgttcatgttgtccatgatgatgattatgaccttcctgctcgtcttcgtgtaccgcccct

SEQ ID NO: 38130 - DNA, 432 bp, Gossypium hirsutum
  Clone ID: LIB3135-059-Q1-K1-C12
cccacgcgtccgcccacgcgtccgcatcggtggacgtgcatgttagcaaagataatgaagggcaagagagagctgttgagaaaaggcctaaacggttggctatggatgtctctccttttggtttgttggaccccatgtcacctatgagatcaatgcgtcaaatgatggacacaatggaccggatattcgaggacgcaattgacattccccggcaccaacagaacacgaggagacgtacgtgcaccttgggacatcaaagatggcgaacacgacatcaaaaagcgattcgacatgccaaggctcggaaaagacgaggttaaggtttccgtagaagacgacatactggtcataaaaggagaacacaaaaaggaagaaacccaagacgattggacaaacaagaagtacagttcttacaatactagtcttcaacta

SEQ ID NO: 38131 - DNA, 399 bp, Gossypium hirsutum
  Clone ID: LIB3135-059-Q1-K1-C9
ctggcagcagatcacaaacaatctttagtattcttggactcctaatctctgatgcgggcgggtgataacatggttgcatgctgttggcttaaagaatgttgtgatgataattaatgttcatagtataatttaattccacgtagtatactttttgctgccctaagatcattacttgttcttctgggatgtatcatctgtttcttttctgaattacagcttgtttccttttgatagtggtacttggttcactaaatacttgctccctcttgctagtctcagctgatggatctgtttttggtttcagtttttttagagaattcgtaatgtatttaatatgatatctgggagatttgcaatctgaacttttctgttctctggcagagtggggagttaagggaa

SEQ ID NO: 38132 - DNA, 354 bp, Gossypium hirsutum
  Clone ID: LIB3135-059-Q1-K1-D10
ataccagtactatttgttcccttgcttactcttcgcttagccgctcaaaaagacgaagaggtcagtctaaactaaaggggttgcgggatatctgatcccaacatcaaatcaaagatgagaaattccttaatgagtatcaacctctttcgccagaaaataaaatgtttgtggaatatcggcgggataacctgtgcttccagacctcgttgaaagcggccattctctatactatctaaatgctaaatgatgaatagctctctagttttgagctgaaaatagcacacgaatctactaaaggttgcagtgaagaaagaagagagctcccgcctatctaaatcctttacgaccagaacg

SEQ ID NO: 38133 - DNA, 463 bp, Gossypium hirsutum
  Clone ID: LIB3135-059-Q1-K1-D11
cccacgcgtccgctcctacccgtcttataaatagaaaggagaaaaaaaatggcgaggaaagcgttcaaagtcgaaaaatgatcgttcgtcttcaacctccgttacttccgctaagaacccatcaacagtctccaatcagtatttctctcttacccctttgttttatagtattttttgcagaataaattatggctttcttagtttgttttgcttgtaaggaatttttggggttaacaatagacacttttgcttggaaaaaaaattgttagtcaaatggcgttaagggtaaaatcaagtgagaaaatgaagaagacagctgaagagagtgttgttagcgagagagaaaagagacccaagtcgaagtcaagacccaaatcgaagctgaagaagaaaacaaaaatcgatgctaaaatgcctaagaaaccccccactgctttcttttacttcttggaggcatttcgta

SEQ ID NO: 38134 - DNA, 140 bp, Gossypium hirsutum
  unsure (1)..(140): unsure at all n locations
  Clone ID: LIB3135-059-Q1-K1-D12
ctccanaatgatggagatgcanggatgatcatcattatatttattcgattttaagttcatgatttgatttgtgtgttttctgaattgggatttggaaataatttactcaaatcaatgcatttattgtaggagtttttctt

SEQ ID NO: 38135 - DNA, 198 bp, Gossypium hirsutum
  unsure (1)..(198): unsure at all n locations
  Clone ID: LIB3135-059-Q1-K1-D9
cngacgcgtgggcggacgcgtggttttattttaggcacaatgcctaaagctcatcgattgggggctctgtgcaaagctcgacccattgtggataaagctttgaaacttttataaataactcttatgttgggattttgtgcccttagtattgtaatgtttagaacttatcggtttaataaaatctcagagttaattatc

SEQ ID NO: 38136 - DNA, 443 bp, Gossypium hirsutum
  unsure (1)..(443): unsure at all n locations
  Clone ID: LIB3135-059-Q1-K1-F9
cccacgcgtccgcccacgcgtccgtccacgcttccgcatcgatccctggtgccccgatgctgctgccttcaaattcccgtggaataccancagaggttaagtcctctggtctcaaatggatttttgccaccagcttcaaaacctggcaggggtaagattacgactgcatctacactcctggatataattaagtatgtggagattgctatatcttgccggaagggtcgaacaggtactgccgctggtgatgtggcttttccaaagggaaaagagaacttggcatccgtacttaaacgctacaagcgccgattgtccaccaaacaagtcagcaccgatgacggaacaggatcacgcaaggttccaacaactccaatgttggcttcttacaactcatagcttncgttccactctctcccaattatgcttgttgagctgttcgattt

SEQ ID NO: 38137 - DNA, 250 bp, Gossypium hirsutum
  Clone ID: LIB3135-059-Q1-K1-G12
gcgattattccctgatctttacaacacatatctttcgaacccacggcatagcatagtggatctgatattgatctacggtgttgagccctgtccctgcttatagccaagcaacaaccgctgaagcccctatccctgcccccatgtgaacatctaaatcgctatcctttattttttcttactttaataaaatgatttcatcacaattcacaattacttgatttccatatgtgaattgcatataaagaacact

SEQ ID NO: 38138 - DNA, 400 bp, Gossypium hirsutum
  Clone ID: LIB3135-059-Q1-K1-G9
aaagctttcgatgtggggaacccttatggttatatataaagcaccatatgctctcagttatcgaaatatggcaattctaggcgtgcaaggcgtctcggcactaccccaccactgtttgcagctctgctatgggttttttgcctttgccatagcagccaacttgttgagagattttagccccaaaaacattgggaaatgggttccacttccaatggcaatggccgtgcctttccttgtcggtgcttattttgctattgatatgtgtgtggggagtttggtcgtgtttgcatggcacaagctaaatggcaagaaggctgatttgatggttcctgctgttgcatccggcttgatctgcggagatggcttgtggcttcttccttcatctattcttgcttttgtt

SEQ ID NO: 38139 - DNA, 133 bp, Gossypium hirsutum
  Clone ID: LIB3135-059-Q1-K1-H10
aaacatttggatttatgaattaggtatttgtaatttgctatgcactgagtgtaatctgctgaaattttatgtgaattattcaaagcttgaatcatcattacctaaatgcatgcaactaagtatgttaattctt

SEQ ID NO: 38140 - DNA, 352 bp, Gossypium hirsutum
  unsure (1)..(352): unsure at all n locations
  Clone ID: LIB3135-059-Q1-K1-H11
cccacgcgtncgatttgatatggtttaagttcgatcagcagttttttggatgcggatagccgggtcaggagtatagaagaagcatagcaggaatttcgagatccattacttattatcatttaagagtcataacagaaattacgagatgcattgtcaagtttgtggtttggttttgtgcgtacttgatcccaacccacctcatgaaaaagttccagatttgaagcttagagatttctattttgtactttatataattgctttttgatttgttgtcttgcatgaagtgatctactacacctacaccttcaatggagagaatatttgcttaaagtataggacacaaataattaaa

SEQ ID NO: 38141 - DNA, 231 bp, Gossypium hirsutum
  Clone ID: LIB3135-060-Q1-K1-A1
acgcgcgaattccagctcgacccacgcgtacgctgtcgcgtggacctacacgtatgcaaccctatgaatccattggttggcttggtacaagtgggaagggaatgtataattttcaaagcctgtaagggattcctgtctagagcaaaaaaaggactcttaacttgttcataaagttttgttaattgtgattttagtatacaaattgatgtgtctctcatatattatatttgg

SEQ ID NO: 38142 - DNA, 362 bp, Gossypium hirsutum
  unsure (1)..(362): unsure at all n locations
  Clone ID: LIB3135-060-Q1-K1-A11
gaccgacgcgtgcggccacgcgtccgggatcatcaacttcaacgtcagtgttttcattacgttctccatttactcgggctaagtctgtcaccactgacccttcaaaggctgtanttgctcttgttgtgttatatgaaaggtggtggcgtagcatcacagggacttatacatgctgcacaatttgcaaccacacaagtcatctgtaaagccacataaacttgatccacgtttccaatacttacatccttttcactgtactatccaggtgaaaccagaatacaaaaaccaccctcttgttaatttaaatattccccttgtaccttgtatttgtttccaccaacaaggattaaaaaacaattatt

SEQ ID NO: 38143 - DNA, 443 bp, Gossypium hirsutum
  Clone ID: LIB3135-060-Q1-K1-A2
atcttggtctcaataatcgattgattcatgtctaccacttcagtaaagagactgcccagaggcagatgcaagtgcaaaattttggtgagccctttttcttggtcattcatgaaggtgaaactctggctgaagttaaattgcggatacaaaagaaattgcaagtttctgatgaagagttctccaagtggaagtttgcatttatgtcattgggtcaaccagagtacctacaagactctgacattgtgttcaaacgttttcagagaagagatgtttatggggcttgggagcaataccttgggttagagcattctgatacctctcctagaaggacttatgttaatcagaaccgtaacacatttgagaaaccagttaaaatatacaactagtagaaagctagttatacattagcatatcagtcgatgtggagatccttcaagtgatgg

SEQ ID NO: 38144 - DNA, 268 bp, Gossypium hirsutum
  Clone ID: LIB3135-060-Q1-K1-A3
aaaaaaaattaactaaacacataaacaaacctataaatccataaaaaaaacttgatacaagagcaaaagaaatatataaatattcagagtttctaaaatattcctacctagatcaaagggccgccccttatttaggtcataaacttatttcacctttcattcaacgtaaacacattttttttgtctctcatataatatatttgctgggccattttttaacaccaaattctcttgtaaaaaccctggctttacccaatttatattcctt

SEQ ID NO: 38145 - DNA, 304 bp, Gossypium hirsutum
  Clone ID: LIB3135-060-Q1-K1-A4
cccactcattctcttactctttttctaacttttatttcaataagcaaactactcactaaaagaaagaatacatttattctccggaccttctcagatattataaaacatctcaaaaggctgcctcttcattaatatccatttttcacttatctttaatataagcacacagtccattatatatctaccaaacattaaaaatctcgcattcatcctattttacagatattctatataataactgttccccaaccattactgtaaatactatcttcatcatcattctctacatgttatcaagcttaac

SEQ ID NO: 38146 - DNA, 301 bp, Gossypium hirsutum
  Clone ID: LIB3135-060-Q1-K1-A7
catacccccttcgggcattactactttcgttatacgcgaagcaactgagcgataagtctgggatcgctgtattctcgcgatggcaaacgatctaacatcttcgcgagacggaccatgaatcaatcttgagaatcgagcatggggcttgaagaccctaccgcattccagccccgggaccttcaataggtcctttctctcttctcttttaccactgagtggtgagtttcctttctaggtaggtacctcttggattaggagtttgctccaacatctgccacacgtgagatcctgatcgtctttc

SEQ ID NO: 38147 - DNA, 369 bp, Gossypium hirsutum
  Clone ID: LIB3135-060-Q1-K1-B1
atcctgttgagttcagatgtctcttttgaatagcagctactcattaaggtgctagatatctgtatggatagtatagaaactttgatgatgcgacttacggacagaactaacatgtggagcctggatgatggatccatggctgacaagctttagggatgcaaatggtaattcttttagctatatgtacagtatagggcaatagtattctctacagtagcttcccgccatcaaggttttcctttttctcttcattttgtatatttgggccttttcatgcactttgttgaatgcaagtttccatcgttgagctctagtactagtgtttttttttctttctaattaattaaatgcggtgaaggctttgatagt

SEQ ID NO: 38148 - DNA, 242 bp, Gossypium hirsutum
  Clone ID: LIB3135-060-Q1-K1-B2
cccacgcgtacgatcggatacaagtgtggagcttacacacttccttgaatggacctcacataggaggcaaatcactatgtaatttaagctttacttgtgtaccaatacaagcttgcagcttgcaatattgaataaaaagaaaaaaggacttggagacagcaaatgaaaattcttttagctatatatacagaataaggcaaatagtattctatacaaaaactatacaccataaaaagatttgg

SEQ ID NO: 38149 - DNA, 351 bp, Gossypium hirsutum
  unsure (1)..(351): unsure at all n locations
  Clone ID: LIB3135-060-Q1-K1-B7
agcaaatatcgttgaattggacgcctcttgaagaaggattttacctgcatcttacgtgaaggacaatacctggcttgatgagcacccttattacggcacccattgacatggttaaaacccgtcttatgttgcagcgagaaagtgccgtatgaagctataaaaatggatttcgctgagcatatcacgtctgaagttggatgcgttggcattcctgagggcttctaccaaatacagaagaatattgctaacaatcagcatgatgttatcttttgcccttacattcctggaggtgctgggngtcatatattatagatttaacctcgttataaatgccatgtgatattgactcct

SEQ ID NO: 38150 - DNA, 254 bp, Gossypium hirsutum
  Clone ID: LIB3135-060-Q1-K1-C1
aaaaaaaaaaaaataatataaacaataacaatacattttcttaaaccaaaccaaagtaaaacgagagagtctaatccattattgcgacagattaagagagctgttatttgtttcctacactcctcgtttcatttgaatggcacatgaaatcaatttttatatcctctgccggtcttttcaataaaaaacaaagggtccatccctttcactgtttaaatttatcatttgtgtgcaactaaaaacaatgatatccc

SEQ ID NO: 38151 - DNA, 246 bp, Gossypium hirsutum
  unsure (1)..(246): unsure at all n locations
  Clone ID: LIB3135-060-Q1-K1-C12
ggcccactcgttctgtcaatcctggtcgtcaaactatcgactattgatttaagattganaagcgtgaagatgattacatgctggttttctgcccaactgtgtgtgatttctgcaaagttatgtgtagggacgtgggtgtttttattgacaatgccggtgtaaggcaactggctctcaattattttccccttaaaaatatgtttaaaaaggcttggaaccttaaaatccatccttatttttaattct

SEQ ID NO: 38152 - DNA, 359 bp, Gossypium hirsutum
  Clone ID: LIB3135-060-Q1-K1-C6
aaaaaacatacaaacacacaaaacagttaatttacaaaatataaacagaatttacttgaggagcgctaatgaatatttcacctccttttccggatcttcttttcgtattatcccaaactcttatatgttcacattaaagaacaataagctttcagggatccttacctgtgaatattggtaacttaaaacaactcgcggccttgagtcttgaatggaatcggctcactggatccataccgagttctatctttgacctgactcaattaactaacacggttcttggaaaaaatgaattctccattcatttcccctcggtgatcaaacagattagcaaccttagttacctgaattcataacaa

SEQ ID NO: 38153 - DNA, 366 bp, Gossypium hirsutum
  Clone ID: LIB3135-060-Q1-K1-C9
aattcggtcgacccacgctcgtctctacattcacatctccaatatatctaactaagaccatggtgaggtgcatacaagggtctttaaacctttttgtgcaggactatcattgtcaattgtctattttcttatcacccttcaattatctttgcaaaactttacttgtcagagttgttaattctagccttcccaactttatttggttggccttgccacctaaatactcaaaaaaccattttaaggcttcctaccctaaaacaaaattccaacccccccattgtttttttttcctaaaaccttttttaaaacctgtttccttaattaaaaccggtaaaatcccttcacccctttaaaaaacttgccctt

SEQ ID NO: 38154 - DNA, 432 bp, Gossypium hirsutum
  Clone ID: LIB3135-060-Q1-K1-D1
ctggggtgcaggttggaaccttctatcattgttgcttgcagtcaaacgttctaaaagaataagtggcatagatgctcttaggcatccttttttatgtggaccaagatggcgtgtggtcccatctatggatattattagatggggtcttgggtcaactgcagtgagaatcacagaggaatatatctatcgcacagctcagcgtgataggcttgcccactttattgaattaatggagatgttgaatccccattcaagaccaaagaactggctagagcttttgcccgggaaatggcgtctgttatactctacaggaaggcacataggcttaactcttcgccaacctcctctccgtgtcctcattggcgatgcatacctaacaattgcaagaccttctaagtcaaacgcacgcctttctgtaacatctgaaattgg

SEQ ID NO: 38155 - DNA, 425 bp, Gossypium hirsutum
  Clone ID: LIB3135-060-Q1-K1-D11
gcggcacgcgtacgagctcatggaatgttgcacatccggccacttgaaacagtgttaaatacggggtagggacttatactgcatcttcaaagaagtttactcagccttgaatatcataaaggtgaccgctgatcgagtagtctttcacataacattcactttaatggtaaagacactaatgaccacgagtatcgcatctgatggaacgataaatcaaaattaggggcttaatgtaagtagtttgaataaactcacctccttttgtttatcaattattatgaaacaaccattaggtattaattagcccgcttttttggttcctattatcccctagaccttaacccaccattaactacctttgtttttcctaaacctgatccgttttgttttggcaccagcctttacagcttctttggaacaccccc

SEQ ID NO: 38156 - DNA, 270 bp, Gossypium hirsutum
  unsure (1)..(270): unsure at all n locations
  Clone ID: LIB3135-060-Q1-K1-E1
atcaagcctaccanaatacactcaaatggttcttattctccacagaacattacctcagctggccagatttcactctacacaacatcatccccttacaacacgaaccatccccccaataatctgcatcattgtattattgattaaccaacctaacagacacaataccatacattatatgttcctaaacatatctagcaaacactatcttatcatcctacagaactcaacaaacttcctcctataacatgattaccctaattaaataaatta

SEQ ID NO: 38157 - DNA, 407 bp, Gossypium hirsutum
  Clone ID: LIB3135-060-Q1-K1-E11
attacaccttatacatatatttaaagtccctcacaaccctcaaaaactctggcttgagcgggaatactcacatcagcactcccccttgacaatcctctaaaccatctgcttgtccccgttgcctacatgttcagaacccaatatagtgcactctctacttactatttatacacgttcaaacaactcctttcatccaatctcacaatctcctgtactgagaaatccttgacagatcatgttgcaataaatgcacatcgtaatgcgtaccttaccgatttgaaacgcaataaactttttaaggtatttgttgatcgtgacatcttatttaccctcacaaacccaactcttacttccaaagaatggtacaaaaaccttgctttatttaaccgaatcctttaccaccccca

SEQ ID NO: 38158 - DNA, 424 bp, Gossypium hirsutum
  Clone ID: LIB3135-060-Q1-K1-E12
accactcatacgattttttcaataaattaacttcaacctctcatttaaacaattaccatcggatacatgaccacctatcatatcaaccctctcaaacctatacattactcccatcctcatctatacatcataacccacgatactatcttaaccaatattccataccatttttttttttcccttcattttcttattccctatacttaccctacttcttcaatatccttctatcttcaactatcgccttcaacggtccatgacccaattgaattcctcactttcaaattatcctttcacaactacctttaaacccaatctgcctcaatcccaattgtaaccccatctcttattccttaaaacacccttcttcttctttctaaaaaaacaacctttccttaaaactcaatttcaatctttatcccat

SEQ ID NO: 38159 - DNA, 300 bp, Gossypium hirsutum
  Clone ID: LIB3135-060-Q1-K1-E4
cccacgcgtgcgcccactcgtccgcccactcgttctcccacacgtacgcccactcctgcgggctagtttcagtatcacttccatggctatcacggctgcttattatacattgtcatggcatatggatcgaggagaacagcctctgtctgaaatgctcgtcacattcgccctatctgttggcaccgccgtaggcatggacttttttgctacatggacacatctagctctgtggcatgcttccttatggcatatgcatgagtctcaccatccaccaagagaagagccattcgaactaaacta

SEQ ID NO: 38160 - DNA, 425 bp, Gossypium hirsutum
  Clone ID: LIB3135-060-Q1-K1-E5
gtccaaactggtgaaattgcaggcttgggaagctatacaaatggagagctaagtccgtcggggagttcaaacagattgaagaatcagattagcttctcatcaagactaccttcatccttgggcatcttgtcacagatttccgaagttgtcgatgatgctaaactcgaaactggatgccaatacggttcttggaacgattctgcaaacttcccagagaacttttctggctcgaaaacgacacaagataacgactccaacttcttttccgccaaccagaacagtgctagtggaagtcgtcttcatgtattgtctcaccatttgagtctgccgaagacatcgaatgaaacgcctgccatggagaagtttctaagctttcaagatccagtcccttgtaagattagagctaagcgtgggtgcgctacaca

SEQ ID NO: 38161 - DNA, 335 bp, Gossypium hirsutum
  Clone ID: LIB3135-060-Q1-K1-E6
aaaaaaaaaaaaaaaaataaaaaaattgaaatactatacaaataaaaaaaaaaaaaaaaaaagaaaatacaaacaaaaaaaaaaaaaaaaaataacttataataaaaaactggcctccccctttaaaatatccaaacttacttccccttccatccaacgtcataactcttctatatggacacctaaactaaattaagtgcccgtctttttacaacgcagagacttgtaaaaccttggcttccccaaactaaatcgccttgaacttcttccccttttaccaaattagctttatagcaaaaaggcctgaaccaatgtctcttccaaaaatttgccca

SEQ ID NO: 38162 - DNA, 265 bp, Gossypium hirsutum
  Clone ID: LIB3135-060-Q1-K1-E7
taaaaaaccacttttacttatggatttttatttctaaccccaatttttactaataagcctagtgatcttatcgatgcatttatcctaaataaatttctcgtttttctttcttttctttcttttaaaaaaaaactaaattccaggcgtatgcaaaatacaaaaatatatattgaataccgaagataaaaacaaaaaagcaccttatgattttatctattcttagtatggctttatcacagcgtgcgttaaataatgacaattacat

SEQ ID NO: 38163 - DNA, 239 bp, Gossypium hirsutum
  Clone ID: LIB3135-060-Q1-K1-E8
aaaaaaaaaaataaaacttatataaatcaaataaaaaaaaaaaatactataaaactaggccagagtatctcatcaatccataccgtcataaccaccttcttatatgcctctcttttcctactattaaaaaaaacctaactccccctcatatgcattataccactaacccttcttaaaacacaccatcactaaaaataaatcaccttacacttttaacaattctgactatggtctctacc

SEQ ID NO: 38164 - DNA, 447 bp, Gossypium hirsutum
  Clone ID: LIB3135-060-Q1-K1-E9
gcggtgtacctaatgcaccagtttatacacctcctaacaaagagaatcctgaccccaaaccaccggcgtagagaccaccatacaaggagatcccaccgtcttatatacctacttaatagccaccatcgtttgaccctaagccaccaaactaacccttttacacgccaccaaataaagagaatcccgaacctaaacaaccaatccttgagtttcccaaaaaaccacctattggtcattttcaagaacaccctcctttgggaaaccctcattaaaaaaacccaaccggttacaattccaaaaaaccaacctttattacttacttaattaattaaataattttccttccattagaacctcttaatacccaaggtccggtttcctggatagtaaggattaaaggcttcctttacctaccagaatgcctattgccgttcctatttgaattcc

SEQ ID NO: 38165 - DNA, 202 bp, Gossypium hirsutum
  Clone ID: LIB3135-060-Q1-K1-F1
cattcaacatggattcatccttctttaaagaggtcaatggacgaaagcccggcactgcattcactgcgacagagattcagttccagggaaaaacccggaagtcatatctcctggcaattaaaactaaccttggccttctctttaatgcaaggcaaaaaaaagtccatctttactttgatggccccacccaattgggaaaatt

SEQ ID NO: 38166 - DNA, 383 bp, Gossypium hirsutum
  Clone ID: LIB3135-060-Q1-K1-F12
ggcgcatgcgtccgaatttaacccatactccccttatggattccctaacatctattgttaaaggggacactgtgaatgcttactactaccacattgttagcccatttacgaacacagctgttggtgcgtaacttacccatagcttttcaagtaatgagaacactctcacgattggtacacaacatgctctttacccgtttaccacaattattgttcaactgaacaactacggcaaaacaagtggtcttatccatcatgagtggctcccaaaatgcctcttcaatatctttggagacatggacaccacatcaatttaaaatactgctaaagtctctcttgccttttcactcaaaccccaaggaaaagcaatatcactgctttaa

SEQ ID NO: 38167 - DNA, 372 bp, Gossypium hirsutum
  Clone ID: LIB3135-060-Q1-K1-F9
gcgcaaaaccccattttatgacatatccgaagctatgaaatcttgattccataatgtttctgctggatgagcgtttatgattgttgatatatgctgcttgatactatatattgcttttgactttttcaagagtcaaaaaataatgactcttaaaaacggcaatctatttttcgtttaaccatccaaattgctactctgtcctaataatcaatgttgaaattttctttttctgtcccttaaacataatcttcctatcgattaaattccttttccttctaattattttctttccccaggtaattatttaaattttttattgatcctttttaattaaaatcgcttccattctaaagcctaatcaaccaaccattt

SEQ ID NO: 38168 - DNA, 403 bp, Gossypium hirsutum
  Clone ID: LIB3135-060-Q1-K1-G11
gggtcgacgacccatgcggcgagcgctcccgtcaagatcgtctatccttattaccgcttgttgaacacaatcagtcacaggacttccggctaacttactccgacctctatacctatgccacccataaaagtactggctgtacaaatactttctgatttcaacctaataccgcatcgatgagctgaatggctaccaaaaacacccggatgcgcctttttgattgccaacaagtttttcttatttcttggcaccaaaaacctacctttcctgccatttttattaacgttttccctttcttttccttgggaaccttttcaacccttcttgtcctttccaagtttccaaacccttcttattgttcattttttcttttctaaaccttactaaaaaactttccaagccc

SEQ ID NO: 38169 - DNA, 431 bp, Gossypium hirsutum
  unsure (1)..(431): unsure at all n locations
  Clone ID: LIB3135-060-Q1-K1-G4
ctcgtcctttgcagattaagcccaatgctgatggctacgcttcaccatcacaagcaatggagttgaatttgaagtcatcatcatcatcatcatcatcagcagcagcagcagcagcaacatcttcgacttcatttagttccttctatcaaagtaaagatcccattcctctactatcacctcttgttttgcctactttgcttcaatcatcttatctccatcaagaagggaatacagcaacataaatctctgtgaaaggtgttaaggcttccttgttataaatacgtgatttatcttgtcttccctgtgtttcacattagattgtcattactatatattctctgatactctttctgtttactaaaactcatgtatttaacagcattttgagaagcattccatctcattgattttaatantttatatcactctac

SEQ ID NO: 38170 - DNA, 373 bp, Gossypium hirsutum
  Clone ID: LIB3135-060-Q1-K1-G7
tcaaagaccacttttacttatggatccgcatttctaaccccaatttctaccaagaaagcaagtgatctcatctatgcatttagcataggtaaatttctcggttttctttcttttctttcttttaaaaaaaaactaaaaaccaggcatatgcaaaagaagaaaaaatatattgaacacggaacagaaaaatttaaaatcaccttctgattttttttattcttagtattgcattttcacagcgtgcgtaaaaaattacggattacatttctgacttttatagccagattttcaaaataaataaaaacttaaaaatcctgttttcctactgtcgcttgctgtgaaatccgttactggctactcctggtgtattcct

SEQ ID NO: 38171 - DNA, 301 bp, Gossypium hirsutum
  unsure (1)..(301): unsure at all n locations
  Clone ID: LIB3135-060-Q1-K1-H10
aattaccgactcgacggacgcgtcctnccacgcgtatttccacgctgttttccacgcttcctgttcaggatatcacccttcacttagccttgctttaacagagatgggtcctcttcatagagctgctaacaaaaattgtagacctctggtggaactccttttgagattcatccctgagaaaagttcaagtaaattaggattggaaaaccagatggcagctggtgggattcatgaaagcttcttgtttacgcctgatgctctaagcccttcaagtttgactcctcttcacattgcagctggt

SEQ ID NO: 38172 - DNA, 298 bp, Gossypium hirsutum
  Clone ID: LIB3135-060-Q1-K1-H2
tgttaacttactaaaccggtcaggtttaagcatgtttaaaattgaagattgtaatgaggagggaggaaagcaatacgaggaaggtcccatggctcgacatcataaatgtttagaacaggaataacactgtgcatctcttgtctccggccgtctaactggtagcgtaagtagaaagaaactaactcttcttctgtaagaaaaaaccgaaaaccagcttggatctgcattaacagtacgacggtcttaggtgcgctttgctataaagtccaatgctgcgctgtgctatgcttaatctttt

SEQ ID NO: 38173 - DNA, 419 bp, Gossypium hirsutum
  Clone ID: LIB3135-060-Q1-K1-H3
tgactatcagagatgaatcagtagacctgtcaagtgcttactctcaagggatacggaattgggtgacccaggtgctacagtcttcaggagtggatatatcacaggcgagcatctctgtgaaaattgatgttggtaaacgagtagctgctggaatgacttctatgccatccagttctaaggagaaagatatccaatatacaagcaatcaagagatggcacaaactggagttcgcagctacacagaggagtctgatcaggcttataagaggcacggaactggaaaaagctagtgtatgattcttggtctatttttctttcaaattttcttcattctgttcctttttcgttcgattagggtgctcatttttgcaatgccatggtccttatatttttaagtcttaagagcaaatgtaaatgtt

SEQ ID NO: 38174 - DNA, 219 bp, Gossypium hirsutum
  unsure (1)..(219): unsure at all n locations
  Clone ID: LIB3135-060-Q1-K1-H4
cccacgcgtncgattgcttttatgctttgtatgagcacattcaattgtgtccaggtcaaggatggaggcatacatgatgatttaccagattttatttatatcgggctttagttacaacacaatgtatgaaatgtatgaagtgactaaagatattagctataatcatctttttatatgtgaaagctgatatacaatatacaaacaatcaaaagatggctc

SEQ ID NO: 38175 - DNA, 208 bp, Gossypium hirsutum
  Clone ID: LIB3135-060-Q1-K1-H5
cccacgcgtccgaggaaactgagtttccttttatcttctgttttgttttgttgttggtggggtgtttatcgttttctagttttacttggtatagatgaaaagacagatgtatgaacaatgtaaaacaaatgcttcagtgttgtacgttaaaataaaaaggatatacatttttgagttggttaatgatgattccctttgcatttgtaag

SEQ ID NO: 38176 - DNA, 371 bp, Gossypium hirsutum
  Clone ID: LIB3135-060-Q1-K1-H6
ctggttgatagtgacagcttggggaagaaagttgctccaccggaaggtagatcgaggatcgacatacgtttgcgaacgaagaatcagaaacctgttgaggaggtcgtggacgtaggagatcagaacttgaatgtggaagacgttgaggagtttgttcccaagacgtggaatctgaggcctaggaagccgatatcaaagcctcggaatcaaaatggaggtgcgccgaagatggtggcttcggctcacgataacaaaactcagaggccagagtcgagtcggtctatgaatgtcaccgagtccaaaccagctgagtagattgcgaagaaacagaacgtctcaatttcgcttactagggaagaaattgatgagga

SEQ ID NO: 38177 - DNA, 290 bp, Gossypium hirsutum
  Clone ID: LIB3135-061-Q1-K1-A4
cttagctgaagcaaacgatggggaagagaaagaaggcaaggttgagaaaaaggtaaatgagaaacagatgaaagacactaagaatactacatcaagattatataaagatcagtgcactgcatttgtatcaaatcttaacattacggcaaaagacgaagatctccatcaattcttcagtgatgttgggggggtcactgcaattcgaattctgcatgacaagttcactggaaaatcaaggggactggcatatgtggattttaaggatgatgtacaccttgctgcagctgtag

SEQ ID NO: 38178 - DNA, 358 bp, Gossypium hirsutum
  Clone ID: LIB3135-061-Q1-K1-A5
aggaatagccagattcacatcctccattcgatatggacgagtgtggtgatagaattctcgacctgctatcacttgcagctgacatagatgtcatgccattcggtgatcttgttaaggggcaagaaaagcatgatgttgctcggtccttttctgcacttctacaattggtgaacaatggagatgttctgttagaactaaccggacttcgtggtgagtctgtttgtcatacgcctgaaaaccctttacatgtccacatccttacatcaagacaagaggagtgtggtaactcaacttggaattcccaaaacgagaggtagatcaccatgacgtacaaaacctacaaaagctgacagaaata

SEQ ID NO: 38179 - DNA, 211 bp, Gossypium hirsutum
  Clone ID: LIB3135-061-Q1-K1-A6
cggaagaccacgcgacccacgcctcctttctatactcgtgggtagtgtgccatattattgtccatgataggaatgcctggggtccttgggagttccatcgatctcgtgaaaacataacgtaagtgggaaggcctggtcctttttacacactgtgaatttcgcgaaactgctgacttggcaagtccaattttgacgttagactcaaaagctt

SEQ ID NO: 38180 - DNA, 391 bp, Gossypium hirsutum
  Clone ID: LIB3135-061-Q1-K1-A7
gaacgaccgacgcgacccacgcataccatactctaagcctcactgcaagctgtgactacctgcgccagacggctagatgcgtggtgtgaggctctgcaaaccattgtgttctttatgggttattccgcatggcactagactgacggacagtggtatcatggaagagcatgagatagcgaaactaacccgttcaacaacgaatcatatcttaaaccatatccaccaatgatggtcgtgttcgaacccgtgctgctgggagatgaaaactcacattacctacctaaatatcacccggctgaccgatttataaaggacggacacccatctatctaccggaaacaccctaagcaaacattaccggcagacgaaagagtagcaccactaaaatacc

SEQ ID NO: 38181 - DNA, 190 bp, Gossypium hirsutum
  Clone ID: LIB3135-061-Q1-K1-A9
atttttgatattttaaaagactttctacttaatactactaaatacttacacctctatttagggtagatactgtatgcatatggggctaagttcgcaaagattcagtactctattgatgtttggtgcttcgtatataggctaactattagaattttactcatgctgtggaacatcatttgctccctgttat

SEQ ID NO: 38182 - DNA, 349 bp, Gossypium hirsutum
  Clone ID: LIB3135-061-Q1-K1-B4
ctacgctagacagtagtatcgaacaacagctttccaagaccaagaagaagcaggcaagtagtattagtagtgcagcagcaaaagcctcgactgataaagtgaacaagggagaggagaaaggcaaccgggaaaggagtgcagtcgcagcagcaggtgaagcaaattcaaagaccgcgaagctgggagttggtttaagagggacagccaacatagctttgatggctaagaaatggaggaggttgtcaatgaaagggagagaaccacaaaatctggaaggccttgagagactggtgaaactggacctccagtgttttccctcgctcggaaaccacctacttggctggtaccc

SEQ ID NO: 38183 - DNA, 323 bp, Gossypium hirsutum
  Clone ID: LIB3135-061-Q1-K1-B5
aggctataccatcaaacttactcacatccgatctgattcttttagcgtctttcactctgttagggatatgtggagctactaaactctgcatgaactttcaataatttttcctgaaactagacttatataactttcttccataaaatattcaaattttttgctttagtcgaagggtgcacgttatttctcaaagtaacccctgattcactgtctgacaaattcaacccttctatactaaagttcaattatctcatcgtacaatactcaaatcatgatctcgaatatttatcttgaaactaaactaatgtgtgtacttatttttt

SEQ ID NO: 38184 - DNA, 338 bp, Gossypium hirsutum
  Clone ID: LIB3135-061-Q1-K1-C1
gtgaaaaacgtcattgattcacatgtacttaatctagataaagtacatgtgaaaaacgtcggtgattcaacaaaattattgttttgcttaaaacttactaagcttacgaaagcttactctgttcgttcatgtttttggtctgtaggttgtggattctgactactagctcggggatcgtcagcacttcatcacactatctaccattacggtagccatgagattggattatcttatggcatgtatagaatagactagtagcgaaagaataatttggttattgtatataagccatgcgaaaatgacatcttttgaatgtttacttatagaagtttacattt

SEQ ID NO: 38185 - DNA, 420 bp, Gossypium hirsutum
  Clone ID: LIB3135-061-Q1-K1-C11
cccacgcgtccgcccacgcgtccgggcgatggtaaaacaggcgtggtgtcactcgatctcagtaggtgagtaaaccagctccagtagtcctcatggttaccagatagagtccattcaagattaacctgtctccaaacttcctgtgcagggccacaccgtgtgcttatatgtagcggagtctcagcttcaatattacagcggggacacataggggaaatagcaagtcttctattgtaaagtatagatgctgtaggaataaaattgtgtattattctccaatttgctatcttatttttgggagtgatttggagagaccaaatttttttgtaaaagtcaatattaccttgggtagagtctgtataatcagaggcatacgttaacatttgatagccactcctgactgtgtaaagtcatgtatgt

SEQ ID NO: 38186 - DNA, 280 bp, Gossypium hirsutum
  Clone ID: LIB3135-061-Q1-K1-C5
gaacgaccacgcgacccacgcaaaaaaccactcattcacattctcctaatatagattatagacatttgaaaaactggagtgctttagcaaccatatggtttcgctcaaaacctactacactatcccaaaccaactctgttccttcatctattaaacccgtcggttgaatataccgactactactcccatatatcataactgctacatcaacctttttcatctttacctttctttaaaacccagatcactcattaaagatatataatagacttcttcccaa

SEQ ID NO: 38187 - DNA, 195 bp, Gossypium hirsutum
  Clone ID: LIB3135-061-Q1-K1-C6
gaacgaccacgcgtccacccaaaccgacggttgtcaacccaccaacatatactcctctgccaccttactatacaatagggtcggggatatctccatcaacacaacctccaaaaccacccctctacccacattccagcaatatttaacccaccaacaccgacgattctgccaactcctattgagaatacacaaaca

SEQ ID NO: 38188 - DNA, 224 bp, Gossypium hirsutum
  Clone ID: LIB3135-061-Q1-K1-C7
tcaatcacgcgtgcgtttcatcactgatacgagagttcaaatcctacctactcaggggtggtcggcctctacaagctcacctaatcagctatcaaaactgtctctcctatataattggtctttgcctacacaaatactctccgatatcttcttaagcgaacaatgtgagcttggactccctacaacccgatcactttaagagttcctatcgccataatgagctc

SEQ ID NO: 38189 - DNA, 245 bp, Gossypium hirsutum
  Clone ID: LIB3135-061-Q1-K1-C9
tccaagccttcacgctaaatcaatttatggtttatacagctttgacaatggaaggaacattgaccggttaacacggtgtttgtacttgaaaaaataaatttcttaaaaaggaactttgaatatatgccttgctaaccattaatcgaattaaaacacttctttatccttaaaaaatcattaattcatgatagcttattcccttccaatgattttttttaaaaacaaagaacactttttatgctttt

SEQ ID NO: 38190 - DNA, 308 bp, Gossypium hirsutum
  Clone ID: LIB3135-061-Q1-K1-D1
aaatttttaatcagttataatataaatagaacaaacaaatgtcaaagtcacataatttaaaggggaagcggctcagaaaaatgaaagcattttatcttacctacgacactccaaaagcacctgttaatgtcgacactccttccaccagctctagtctgtccaaagtggcaaaaggggggctccttctgaaaacccatttttctatctactttactggcgatgagagcgtgcaaaataaatccaatctctataaatcctatatctgccctttctacatggtcactttgaacaacacattgtcgttccta

SEQ ID NO: 38191 - DNA, 293 bp, Gossypium hirsutum
  Clone ID: LIB3135-061-Q1-K1-D10
cggcctgaatcccggtcgacccaccgtccggaaaagaaagaaaacaggaatttatcatagtgagattacatggaaatttgacagggagggattagtgaattttgtgaaccatcctacaggtttctttaccagtttttcaatgatatttacttcaaaaaaaatattattttacttactattttatatctcttttttccttactctttcatcttttattatttttctcaactattttttaccgatttttcttttttattcttttatttctcttatctttctactacttatatact

SEQ ID NO: 38192 - DNA, 162 bp, Gossypium hirsutum
  Clone ID: LIB3135-061-Q1-K1-D12
atcattctaacatatggcccaaatttatagttttcactcccactcccctctcttggtatcagaagtattttttaaacaactctaaagcatcttaattttaaactttccttgtattcttttacattgaaaacattgcaaatatatattatccaattagctcaa

SEQ ID NO: 38193 - DNA, 309 bp, Gossypium hirsutum
  Clone ID: LIB3135-061-Q1-K1-D6
tccacgcgtccgctcgatatcctttcctgttgtaagagcggtctctgataagctgggtgagcctgttgatatacttcatttagatgcccatcctgatatttacgattgttttgaaggaaataagtattcacatgcatcttcttttgctcgaattatggagggtggttatgctaggcggcttttgcaggtcggtatcacatctataacaactgaagggcgcgaacaaggaaaaaaggtcggaatggaacaatacgaaaagcgaacatttttaaaaaaacgtcatttctttgaaaaccttaaactatggga

SEQ ID NO: 38194 - DNA, 259 bp, Gossypium hirsutum
  Clone ID: LIB3135-061-Q1-K1-D7
aaacataaaaacacacattctgatgaataatttacgtcctttcaacgcgtccactggcttgggtatgaggcctttaacgctctctcgctgctaataatgccggaaacattcacgctaacgaaaataaaaatggtgactcaaccatagttgaaggacgacctctctcaacagttacaccacatcatgcttaaaaccgtctaccacttgtttactgtaaccacatttatcattttaaacaaaaaaactaccttagaattaa

SEQ ID NO: 38195 - DNA, 210 bp, Gossypium hirsutum
  Clone ID: LIB3135-061-Q1-K1-D9
gttttcaggctagcatatctttcgatctagcaccagaaatcgaaatgaagaaaatacaaggggcttgatcattatcaacaatactgcaaacaaaaaaaaaaaaaaaaaaaaaaaaaaaaaaaaaaaaaaaaacaagaaagagaactaaaaaaaaaaacaaaaagggtctttgcatgtacaagaaaaaaaagtgactattgctgtgtcctt

SEQ ID NO: 38196 - DNA, 358 bp, Gossypium hirsutum
  Clone ID: LIB3135-061-Q1-K1-E10
aggacttgaatcatataataaatataaaggctcagcaaacagtgaaataaaaagaaagggtcgatacctttttagctcagccataagctctttgagctctctagtccaaatttgatcttgcagagggttagcgggagggatagtatcctcaattctggcctcatcactcttgctctatgattcagcagtactctccaacaaataaaataaagtccctttgatttactaaatctcctgaacctagcatctccacctggagccgatttcccctcaatgcctttcttttttaagttcctttagcaaataagatctgatcagtggattcatagctttttgctttagaatttttttaaaattt

SEQ ID NO: 38197 - DNA, 267 bp, Gossypium hirsutum
  Clone ID: LIB3135-061-Q1-K1-E11
aatcgaccccacccacccacgcgtacattctattagatggcggaaaaataaactagtgtttctagtactagttttatattggtgtcaggggttcacataaaggccacgtggggcttacgttctacaaaattcatctttcttccctcggccttcgacgatctagcgtttatattttttacctaacttaatttaatgccctcttttacaactactttactggaaaaccttgtcgttcccaacttatatgcccttgatcacattcccttt

SEQ ID NO: 38198 - DNA, 329 bp, Gossypium hirsutum
  Clone ID: LIB3135-061-Q1-K1-E2
gcggggtagaaatgattatgattttggtttaccttcagatttaatatcagttgctgcgaagaggaacaggtatcaaagacagaagtcattgatgctgcttgaaatggagagtcagcacgccaaggggttgccatcagttcccctcaacccccattagtagtcaaacagccagctttggaaaggagacattactggttttcgtagttttccactcacacatgaagagggcatatatatatatagattagagggggcgcatgcaaattaaatgcagtgcagttatatagggaataccataaaataaaacacgtgaatgaatttctatactg

SEQ ID NO: 38199 - DNA, 282 bp, Gossypium hirsutum
  Clone ID: LIB3135-061-Q1-K1-E3
gttagactcctgtaatagtttataggcgcttttgattgataactcaccggacagtacaccggtccatagttgaaaatctttgtatactgtctccgctagtggaatctgcatgattttccttgcaacatccatacgaaagttattcataataacagctgctttccaagtcaaaaaaaaaaaaaaaaaaaaaaaaaaaaaaaaaaaataaaaaaaaaaaaaaaaaaaaaaaaaaaaataaaaaaaaaaaaaaaataaaaaaaaatcaaaaaaaatatcataact

SEQ ID NO: 38200 - DNA, 163 bp, Gossypium hirsutum
  Clone ID: LIB3135-061-Q1-K1-E6
gaagaccggggcgaccgcacgcgttcgcactgttgtttatcatcggtgattaacacactccggctcgttcgattaaagacgcgtcgagagcgttgttactgatctcgctttaccagcttaatctggcgagcttgctggctctgggagcgcctccagctttggt

SEQ ID NO: 38201 - DNA, 305 bp, Gossypium hirsutum
  Clone ID: LIB3135-061-Q1-K1-E7
atagccatgtttgtagacaatatctggggaaaatgttttgacatggccacatgtggttaaggatgtggactgctacactatccaactcaatgagttagaatctatatcaacaagatataagttccagtcaatgatgcgagctccactacatggatttgcgttttggtttgatgttgaattcagtgggccagcaaattcttctataatcactccaagtctatccccactcattggcatatcagatgatgatcctgttgatgatatcccaactaaaaaacgcacccatctcaacgaaccacttgtac

SEQ ID NO: 38202 - DNA, 194 bp, Gossypium hirsutum
  Clone ID: LIB3135-061-Q1-K1-F11
aaataccgggccgacccacgcgtacggggaaaggttccatgtgaactgcacttgcactttggttagtctatcctaaaagacgggggagtcccgtttgacagcgcgtacagctcgagcttctaaagggaattggttttaaatatctgaaccgggacgcggcggctgactgcaacgtttgggagttctgagacatc

SEQ ID NO: 38203 - DNA, 283 bp, Gossypium hirsutum
  Clone ID: LIB3135-061-Q1-K1-F2
gcaccgtcccacctccccacctcggcttgttgtttgcatggtaaagatccaatttaccatgtattggcccataaacttttgctaatcacaagcttttaaattggctgatgaaagtgattgcaggcaaatgataactcatgactcagagatgaggggtaatattgatgaagaccgcaaaaaggtacctgttcatggacaatgctttcttgtggaatggtacagtacgtctgaagatgaactctttgataattatcataaaaaatactctgaagagtgtgaacag

SEQ ID NO: 38204 - DNA, 179 bp, Gossypium hirsutum
  Clone ID: LIB3135-061-Q1-K1-F3
ttctgattatatctatggtactgacaagggttatcgatatcataagaaggtcctaaggaaggtgaaagaggggtctaaagttgatggcgctcaaaacagatgctcatactattattctgctcatcacatgctatgctcagcaaaacacattctccctccaacaggccaaaagcatgaac

SEQ ID NO: 38205 - DNA, 426 bp, Gossypium hirsutum
  Clone ID: LIB3135-061-Q1-K1-F4
ctcgaaaaaggtgttccacaattttttcttccattgagcagattggacaagcatcatcggtggtgagtcttcgagtctttaggttactaagcgttgggagataattgttagaaaatctccataaaagtatttttattttactgggaatcgggaggttccataattttgtaaaataagcttttatattagtttggtctgtataataatcctgtagatgaagggtattagtcattagccatttaaaaccactctgaactatgtatttgcccgatttgtacccacgccatatcataacatcctattgagtcccgattaccaatggaatcgacagggttgccttggcttgttccctttttagtaagttctagattgcatcatagttccgcgtaaaagattctttaataattaaatctgctactttggaat

SEQ ID NO: 38206 - DNA, 268 bp, Gossypium hirsutum
  Clone ID: LIB3135-061-Q1-K1-F5
ttggaaccggatacttggtccttcatcagaaaggattgtttatgcattggtacaacacatgggtcatggcataagagaatacttcttggcctctgctgaactaaagttcaactgctttcttctaatgccagttgtggacaaattacctgcacttctccgggaagacctagaatctgcattttccgatgacatggataatgtatttaacatcagcaatctgcgacactctttgggcccacgaaagagaaatacagagattgatctcaaa

SEQ ID NO: 38207 - DNA, 292 bp, Gossypium hirsutum
  Clone ID: LIB3135-061-Q1-K1-F6
cggaacgacccactcgtccgacccctccttcccctactcacactttacagactttcatcactggtttggacactgacatggggacagatgggtacaacgacgaattaacccatgcaacttctacaaacataaacttttgccttaagaacatactttccaactctgaaatatgcaatgatgaatactaaccttgccgatattctatgaattaaaccgaaaccgatactactttaaccattcatgttacaccctaagacggatttacttatacaatgcttacaagctgttatct

SEQ ID NO: 38208 - DNA, 140 bp, Gossypium hirsutum
  unsure (1)..(140): unsure at all n locations
  Clone ID: LIB3135-061-Q1-K1-F7
gaagancacgcgaccccgccatcctacaaaaaacataatctggagtttacattataggttccacatccatataaatgtgaaagagtgtatatattaagatgggtactgctccttttggggtgaccatttttatgtttcca

SEQ ID NO: 38209 - DNA, 244 bp, Gossypium hirsutum
  Clone ID: LIB3135-061-Q1-K1-G2
ggcgacccacgcgtacgaaacatactcaagaatcctaaattggagtttacagttttaataccacatttatatatgggcaaaggagactatatattaggatccatacgtactccttttataaatatcacatatatctctgactcctaacagactagtaaagaacatttgtcaacaagaattaaataccctgtttatatccctctatatctcaatgtcaccccataacccgctcttatgtttttca

SEQ ID NO: 38210 - DNA, 308 bp, Gossypium hirsutum
  unsure (1)..(308): unsure at all n locations
  Clone ID: LIB3135-061-Q1-K1-G3
gttaatatgggttcatttggaaatgaattgggtccttccgttcttccaccattaatggatgcttcttcggctttcaatgccaagaaaaaccctgtttctgaatcggtttacgtgccctgcttctccaatcccgtcgacgttcaacgcattcaactcgacacaatcgatcattttcccgagaatcctctcctcctccctgtttcatcgaatccaacagatattttcccgagattccaagctccaaaccctttcttctcggctcaacccgtcactttcccacccaatcttcacctnccttgctctgtttt

SEQ ID NO: 38211 - DNA, 226 bp, Gossypium hirsutum
  Clone ID: LIB3135-061-Q1-K1-G6
gaaggccggggcgacccacccgttcttaaagattgttttcattttactaacatgttcaccaacaacactttcttttggagaaagggtaccctcttgggaaacctctcaactttcttccttccttccatactcaccaattgaaatatacatttctttcaacaacacagtaagttcctattgctcagaaaaaccctaactgaaaacccttttttctttctacattcac

SEQ ID NO: 38212 - DNA, 140 bp, Gossypium hirsutum
  Clone ID: LIB3135-061-Q1-K1-G8
cataaccttccatatcacatcccttccctccaaccaataaacctttgatacaccagattgctctgacctgtaaccattattcaattgtcacatgctatcatacacagacactctttacgttcactcccttcgttaatttt

SEQ ID NO: 38213 - DNA, 241 bp, Gossypium hirsutum
  Clone ID: LIB3135-061-Q1-K1-H5
cccacgcgttcgaaagaacaagagtggaggcttgatgtacgttcaggacaagagggaagaagacagagacgaaattttcaagctcttgtacgatggagcccatatatatttctgtgggctcaggggaatgatgcccggcatccaataaacattgaagagggttgcggtgcagagaggagagaactgggatgagaagccttcacagctgaagaagaacaaacaattggcctgttaaagtata

SEQ ID NO: 38214 - DNA, 431 bp, Gossypium hirsutum
  Clone ID: LIB3135-062-Q1-K1-A11
atccatcttagcttccaactttggttttatggcttcagcaatgctgctctttggcctgctggtggcatttttccatccctctagtgcccaaataggtgtttgctatggaatgatgggcaacgacttaccatcaaaaccagacgccgcatctcttttcaagcatagaaacataagaagaatgcgactctacgagccaaaccaacctgctctccaagctctcaaaggctctgacattgaggtaatgtttggcctcttcaacgacgatcttccacgtatcgccggcagtcaagccgaagcaaacacctgggtccagaacaacgtcaaaaactactgcgacgttaagatccggtgcatcgctgttgggaatgaagttcaacctttggattccaaggcacgatctttatttcctggcctgcgaaacattcacaatg

SEQ ID NO: 38215 - DNA, 336 bp, Gossypium hirsutum
  Clone ID: LIB3135-062-Q1-K1-A4
ggcgaccacgcgtacggaatctttctctttacacagcgtaatgctgaataacaagctttagcgaaaatgactccaaagcttcttggggccctggtaaacccatctacattgaacatgattgggcatatgtttttaaaaaggatgtatgactatgatgaggcttctgaacaaaattcttggaaactcctttctaaagttacctttctctcatgacaatttcctcgaagtgaatgcacttatatttgacttcattgacaatgtcaaagattacatattacatgctaataacattctgcctatggatcccgattcctatacctaatgctttttataaaa

SEQ ID NO: 38216 - DNA, 257 bp, Gossypium hirsutum
  Clone ID: LIB3135-062-Q1-K1-B1
cgggcgacccacgcgtccggccacgcttaccaacgcctcagttttttttttattcaatttccttaaaaaaaggacatacagaacttctgtgttcttataaactccttctaaaaaacataataataaatcaaaatgacaatctaaaaatacaattcgccatatgctatatgctgaactttgattgtttgcgctcacgtacaatcgtaccggagctgtcctacttgctcagaagtggcctgcgcttaggcacacacctc

SEQ ID NO: 38217 - DNA, 404 bp, Gossypium hirsutum
  Clone ID: LIB3135-062-Q1-K1-B11
gaaggtgatgacgcaaccattgttaacgattggcccaacaatcccatccatgtatttagatgaaagacgtgaaaaggacaaagattacgatctcaatctctttaaactagactctaccagtacatgttggctgaccaccaagccaccatgctcggtcgtttacgtctcatttggaagcatggctaacctaaccatcgaccaaatgaaggaacttgcacggggtttaaagcaaactgggcttcatttcttgtgggtggttcggccttccgagttaccgaaagtcccacactgtttcattgaggaaatgggtgataaagcattgatagttacttggataccacaaaccgaggtacttgcgaatgatgccatatggtgttttttcacgcattgtgggtggaacttca

SEQ ID NO: 38218 - DNA, 294 bp, Gossypium hirsutum
  unsure (1)..(294): unsure at all n locations
  Clone ID: LIB3135-062-Q1-K1-B5
ttacatttccccttttctttcttcagtttttaaaccaaaaactttanttaagaacaatgacttattctacaatcaatcctaccaaacctatttttcataaatcccaatatcaaattcacaacatcagcatcactctcttctccaaaaatgtgaaaaaccttgataaatttttttctgatttcattcaattttccaacgataatatacttatttttaagttgccatttaaaattcccaccaacattcttcacatcacaacaattaaatcttctttatttttaaataacaaacaca

SEQ ID NO: 38219 - DNA, 340 bp, Gossypium hirsutum
  Clone ID: LIB3135-062-Q1-K1-B7
ttaacgttcccatttacttccttcgttttttaaccaaaagttttaattaagaacattggtcttattctacaatgaatcctaccaaaccttttttttattacttctaatatcatattcacactatcatttccactctttcctccaagaatttcaaaaacctttataatttttatgctcatttaattcttattaccaaatataatatacttatgtttaatatgccaattataattcccaccattttttttttcattacatctacaaactcttccttttttcaattaacaaacacattttatttattcgatctcccttttcacaacctagttatttatctttt

SEQ ID NO: 38220 - DNA, 153 bp, Gossypium hirsutum
  Clone ID: LIB3135-062-Q1-K1-C1
gacgtcatacctcttctataacgacacttaaatttagtatcactgaccgtggtgatataacttggggactgtaaaaactctaacattttttaactttattgccttccaataaatgctcctttatgtaaactaaacttttctttaaaaggggga

SEQ ID NO: 38221 - DNA, 395 bp, Gossypium hirsutum
  Clone ID: LIB3135-062-Q1-K1-C8
attttggacatgttgcttctgattctctcgtcaatccgccgcataaaagctcttacatgagcgctaaggagtatggtcatggtctgttcctagacttcactggtcaagaaacacaagatcaaacaccgcctcaccaattcattgataactggcccaaggatcagtctagtcgttctatcgttacttggccaaatgagttaaaacctgactggactcaactctcgatgtctattcctatggtaacatcagagttctcatcaaccttgtcctcaccagtgaaagagaaactcgacctttcatctcttatgttagttcaggagttcgatcacatccaaatgggtttaggagtgaacaatgacatcactgaacaaaccagatagcaacctaactggata

SEQ ID NO: 38222 - DNA, 368 bp, Gossypium hirsutum
  Clone ID: LIB3135-062-Q1-K1-D11
cacacgcttccggacaatacctaaagatgtgtgtgatgccatcctccactcttacacatcggggacagaccgcgtcattactcacaccaacatgtttttaattaactagagaaggggtttattttcaatatgtgctacatattaaaatcgctatctatccaggaaaatctgaatatcatatcctgccggataaatacgctacaaccacttctgttaaataaaaattaccatccactcaaacatcttgacatagcctgtctgcgcacttcactgaaaaatacccagagagctctaccattcatactataaaatgctatctaggtgaacaagccatcgatgatgctataactttcctagcaacacttaat

SEQ ID NO: 38223 - DNA, 342 bp, Gossypium hirsutum
  unsure (1)..(342): unsure at all n locations
  Clone ID: LIB3135-062-Q1-K1-D3
ggtcgacattttcaattagtagtcttacttttaaatcctttttcaaaatccaaactntcgggttgaccgggaccagtaagacggtcccataacacttagaaaattctgatactaacgccagcgtaaaggccaatattctagacatggatggtactcctccatatcagctagaggtgctcttacatagtatgcaacttgatgattgccgcacgttctctgattacaacttgctgaaagaatccacactccacttattgcttcatctccatggatgaatgcatatttttggtaaaactttgactgggaaaaccattacatttgacgtacacagcttagatacca

SEQ ID NO: 38224 - DNA, 299 bp, Gossypium hirsutum
  Clone ID: LIB3135-062-Q1-K1-D4
gcgcccacgcgtccgcgaacccttgggccacgcatgaaaccacaaaggtatcgaggaagttttgggcgaattggggggcgaaatgggatctgaaactggatccaacattcaggtcaatatccactacaacatcaacttcttcataatgattttttccttgttgacttactttcatagacattggaatgttcataagaattatgatatgtattatagtatgatggataagtttaatgtgaagtatgataataagtattttgacgaatatattaacaaacttttaaacatcctttttggca

SEQ ID NO: 38225 - DNA, 201 bp, Gossypium hirsutum
  Clone ID: LIB3135-062-Q1-K1-D5
cacagatacattacacctttgtttttgcaactttacatatgctccggaatactcgactacggaggttattcaaaagtactaaacaaatcatttgtggaacaaatcctagccgcttttcatgcaccttctattatcctttgtatactattcgatccaatcaacactcatatggggctggcattgcatactggagaacatgaa

SEQ ID NO: 38226 - DNA, 283 bp, Gossypium hirsutum
  Clone ID: LIB3135-062-Q1-K1-E2
agggaatgttttttagagggaagagaacggatggagagggtctcgcttccgacaagaacggggatcacgcgcctcctaataaagtctccaaaactttttctgaaggcgactctgacgattccgacgatgtcaacgtgttccacatatccaatactagaacagtttcactgcagaaccggaatggcacgatttggctagatattcctgaattctaagagcaatgataggcaacaacttgctgccaagaaaggtcgatctgtaattattgagcactgcaataatg

SEQ ID NO: 38227 - DNA, 395 bp, Gossypium hirsutum
  unsure (1)..(395): unsure at all n locations
  Clone ID: LIB3135-062-Q1-K1-E3
cgagagatgttttaaacggttgtattgcaattaatcaggttactaaaggcaaaaccgatgctttcaagggtttacggaaacatcttctcgaagagcttgaacaggcatttcctgatgaagttgaatcctacagggagatacgcgcgagtgctgctgctgaatataagcggctcgcacaatcacaaagtattttacaaaatggagatgtaaaagtcaaaactgagctttagatagttgtatttggtgttcttttttccgccctttttcatctatataggtttctgtatgtacgagatttgctcaatacattctgatgtaacgacatttctggcttgtattaaaaatttgacaatttagtgcgcaaanaaaaaaaaaaaattttaaaatatataaaa

SEQ ID NO: 38228 - DNA, 194 bp, Gossypium hirsutum
  Clone ID: LIB3135-062-Q1-K1-E4
acacgcgcgccgaagcacacagattcattgaaccaatagacagaataacatgtgttatgataactacgggtctatatgactatcagcgcttttatgagtaaacatacgggccttattcacaactgaagaactatcttacgcgcttgttttgcacgaatcaccagccactaatctcagtagaacgaagagcatat

SEQ ID NO: 38229 - DNA, 388 bp, Gossypium hirsutum
  Clone ID: LIB3135-062-Q1-K1-E9
cttaggtatgcgactgctatcaatgaaaaagatgcagttaggatggcaaaagtagccttacgctgcaggaattcattccccgcacttagaccaaccatgtctgaagttgtaaacacgcttgaaagtcgcaccctggttcctgaattaatcatggacccaagtatattttctgaagagacttgattcggagcaataaaagaccaacttaatctaatgcaatctcagactaataaaaccaccactattactcagtcattgtattctacttcaacagtattgctaggctcttgctcaacacttgctgaacatcaacgaaattcaaagcaaacttgattgatactttgaaaacttgatggacaaatgaatggctctctcaaaatttttattt

SEQ ID NO: 38230 - DNA, 247 bp, Gossypium hirsutum
  Clone ID: LIB3135-062-Q1-K1-F2
catataaacctccaactagtgaaccaggaaccaacgcttctactacaccatatatgatcggagctacagcaccaccgaccaatagctgccctgcataatgtaataccccagaataacaaccaataatcgatgatgctaatccagcatataaaacagctgataagaaaatcaacgacgctggcaaggctgctactctcacaatatttacttacaacatctgcaactgaagcatcaggattagaatgac

SEQ ID NO: 38231 - DNA, 289 bp, Gossypium hirsutum
  Clone ID: LIB3135-062-Q1-K1-F3
gtcactcatccgcaaggaggttataggggcattcgcacctgtcttgatggatgaaaggaaggatacgttgaggaaggtggtactggaacagttgacaacttctacttgctacaacttgcttttgatgatttactatgcggtgcggtgttgtgggatgaccctgggtgcgtgttaaaactatgatcaagcgtgagtatcacgaagtacagatgactgcatggtcggtctagcctagtgtgggatggataaatcaccgatacatgccgttgcaattacaagtcatttttag

SEQ ID NO: 38232 - DNA, 264 bp, Gossypium hirsutum
  unsure (1)..(264): unsure at all n locations
  Clone ID: LIB3135-062-Q1-K1-F9
caatcanccactacttctctttttttaactcaaatacccaactaatagtataagtttaatttttatcacttattaccataaaaatacctccccanttctcccttccaatctcttcaatacctttactttttaatctcctaaattttttcccacttttttctccaatatcaatcaatatcattaatctttaatcttatcctatctcttaaattataattaaaatcaacttttttttaaatccctaccattccaatatattaatca

SEQ ID NO: 38233 - DNA, 416 bp, Gossypium hirsutum
  Clone ID: LIB3135-062-Q1-K1-G10
atttgtacagacatacttttgctgtgcttacatccaaagtttagagtgaatcagcccagagggctcgggatggtccctttgcaatgacttagtggatactgaagcgatcgttcgatgacaacccagaggtgggcttggtagccaacattctttgaaaaaagcgtaatacctgactggtctagctgcttgtcacctacaatgtatcaggcctcacgtgcttcaccgaaccgaccttaccttaagagctgctctttgctgtgtgaataaatgccttgtatggatgcccaatcattgagaaagaaggactctctcatatgcttaccgtcttggggagataacggctgagatccatggatctgctgacgatgaacctgctacaaacttcgtggctaggcttcgctcttttgacttttaaa

SEQ ID NO: 38234 - DNA, 267 bp, Gossypium hirsutum
  unsure (1)..(267): unsure at all n locations
  Clone ID: LIB3135-062-Q1-K1-G6
cccacgcgtccggcaaagtgaaaatttactacacgctctaacacgatctgtagattaatcgggcatggggactacacaaaagctgtcactttccatgaacgcaatatgccataaatgtaaagcgaacagaataaagagtgcaaccctctatacatgctatgggtggcagggcacaggaatgtaaattactacactgccgagaggactgnccatgatacaacagatgcaccaagatagttctgaatgcaaatgctcacgttatatgat

SEQ ID NO: 38235 - DNA, 250 bp, Gossypium hirsutum
  unsure (1)..(250): unsure at all n locations
  Clone ID: LIB3135-062-Q1-K1-G7
cccacgcgtncggattggccatattgccgtgttcattgaattgcctttaaacgaggtataggggaaactttctcagatgattctgtataataactttgcagggactatgcatcaaggtgcagggacgccttgttatatttgataaccctatagatgatgtcatctattttgcacctttatataccatatccaacatgcccagggtgggcgatagcctctatgtatgatctgttatgataatgacatcaga

SEQ ID NO: 38236 - DNA, 273 bp, Gossypium hirsutum
  Clone ID: LIB3135-062-Q1-K1-H1
gattggtccttacaaatgtcgtcatgaactgtgttgaagctgcacatcctgaacttgtgaaggttgaaccggctgatattggattcttggctgatacctgaatatggaaccgggatgtcaaaccgcgcataccagattgactagttgcatactgcgggtacggctgaaaatggctgtgacgactaaatcagcaagaaagttacatgaatgataagcagattcccttacactctaaccattttattttagctatgagaaagatatagcgttcac

SEQ ID NO: 38237 - DNA, 367 bp, Gossypium hirsutum
  Clone ID: LIB3135-062-Q1-K1-H10
gaattatatatgagagtaggtcggtgtttttatgtgtggaggccttccattccgatttatctttaattgaattaggcgtgctatatcattgccacctggcaactcatgctatcttccttgtaggataggataatgtaaataatttgtaaagaaaagaaatgggtatcaaagataataaataatacagtctcaactttaatcatttatatcagactgcgacaattcccgttatctgaggcaaagggaattgaaattaataagatgataagttggcaagatttgacccactaaaaaaaaaaaaacttgtttgttgggggaccgatagtaacttttttctcaatggacggatcaaaggactaagaccaaa

SEQ ID NO: 38238 - DNA, 421 bp, Gossypium hirsutum
  Clone ID: LIB3135-062-Q1-K1-H3
tgccttcattgagcttcttgactgtggcacttctaactaccctggatcttcaagagactgcggtcttctggctgcgtgtgaagcacatgagactcttcctcaaagtgctgaatttccttcctgtgtttacttcttgtcttactacacctatcaaaatgacattgagatggtgcatactttggctttctgttccggtgttttggattctctggccgttggattgaaagcatcaaaagaattctctaagttatatgcacgcattgcagtactttggcttcacataagcttgaaccagccctctgttgtatattggttcttcttctttttttttttttatctttttcctttgattaatgagaggtgatgaagaattggcattattttctcacgaagataaatttgggtttagaaaattgaatac

SEQ ID NO: 38239 - DNA, 451 bp, Gossypium hirsutum
  Clone ID: LIB3135-062-Q1-K1-H6
cggaagacccacgcctaccgcgactcgtaacgatccaaacaagccaaatacgcctgctacttcctttttctctttcatggagcgcttccgtgggcaatacatgactgatcaccctacaaacaaatcccatgcccctgtccgcaaatctcctttatataaattgaagaactcgactgaagctgaaaattcaccttatgaagccaacgcagtattgcccaccgtcgaatatgaaaagaacatgaacgcctacaatatgagacaggctgagggtcctaaaaactaagatgtttagtctaacaaatcagtgtctgaagtgaatgatgaggatgatgatgataaaagcatcccgcgaccaacaagatgattagtttcaaatgccgtggtggataacataaacaatgaacgctgtgatagtgattgatcaaaaccatatatttatgctttcgatgtt

SEQ ID NO: 38240 - DNA, 150 bp, Gossypium hirsutum
  Clone ID: LIB3146-002-P1-K1-F12
ccctcaaaatgcaggcttcgacgctgaagtcctggacgcacatccatcgatagcgagcgtccacacaacgactgcaacagacgcagggataaaaaaaaaaaaaaaggcgacgcggccgcgaatgccggcagcccgggggaaccactagtc

SEQ ID NO: 38241 - DNA, 171 bp, Gossypium hirsutum
  Clone ID: LIB3146-002-P1-K2-E6
tcgatttgtaattagcaatgcttgtgtgtatataatatacgggtgtgtagtgttagtctgtgtatagaattttcgacgatgggataaacaagtacattttgacaaatttgttaatgcattattttagtttcaaaaaaaaagagaaaaaaaaacattaaaaaaaaccaaaaa

SEQ ID NO: 38242 - DNA, 224 bp, Gossypium hirsutum
  Clone ID: LIB3146-002-P1-K2-H4
aaaactgacaggtcgaaggagggaagtaacactaatctgatgcctgaatttagaaggagccggtctactgctcgcggaaaattgttggttttgccttgaggattctacactatatgggaactagtttcctacccttcgaaatattccttttaaattttgtacagttgttgcattatcagaggaggttattgatcaagatgtctttatactcatgatgatcgaat

SEQ ID NO: 38243 - DNA, 404 bp, Gossypium hirsutum
  Clone ID: LIB3146-003-P1-K1-E7
acgaaaattttaagattgatgtttaatatggtattagagtgaggttttattatattgggctgaagaaaaaaaaaaaaaaaaaaaaaaaaaaaaaaaaaaaaaaaaaaaaaaaaaaaaaaaaaaaaaaaaaaaaaaaaaaataaaaaaaaaaaaaaaaaaaaaaaaaataaaaaaaaaaaagggacaactttttaaagaaacaatattaacgtacgctaccgtgaaaatcataatcttttctataggggtacataaaataaaacaatagaccaaccatttaaaaacggagaaattgaaaaaaccattcatttaacaaattaaaacatttttgaaaaaatgatctttattaaaaaagggttaaaaacaaaaaggtcaaaaccattggccttttcaaaaaattgcaa

SEQ ID NO: 38244 - DNA, 310 bp, Gossypium hirsutum
  Clone ID: LIB3146-006-Q1-K1-G1
ccaacgcgtccgcggacccttggccggccgcctggccggaacccctgtgggagttggaacggttcgtcactaattataagaagaagggcagcaagatcaagcgacaggctttgatggcaaacaatgttgcttctaatgacagcaataggagagatacaactgtggagaagatggatgttgcaatggatatgaagaagccgaagaaaggtgatgccgccgatgaagatgttgacatcggggatgaaatgccaatgagcagttttccacctgtggagatcgagaaagattatgaccgtgccagtagcagttc

SEQ ID NO: 38245 - DNA, 389 bp, Gossypium hirsutum
  unsure (1)..(389): unsure at all n locations
  Clone ID: LIB3146-007-Q1-K1-E12
aaaccaggggcgacccacgcctccgacataatcgcacgaaggtcctggctttccttttgacgcccccnagacacccatcagggacggtttttcataaacaaggggccgataaacaaactttccttatcactatcagttcactcctgtaaccaacaacgcgccaaatcatattgatggcctacatgctgtaaaaaaagccatacttcaaatgcttgtgctcacaatatcttaactttcctttctcggaaatagacctcccttaactcatgatataggacattcttccatctatcatccagttttacgttccttgtcacatattggacaatgtgtatcgtttctctcgttctcccaaatcctcatatccaacaaaaaatttttttgaattt

SEQ ID NO: 38246 - DNA, 305 bp, Gossypium hirsutum
  Clone ID: LIB3146-007-Q1-K1-E4
ggagttggtggaaggcagcctttaaatctacaactcgctactactgttaggatttgctagacttgcttctacattgagtctagactatcaggtacatgtgggggaatatggagtcaactggaatttctttttcacacttgctggtgtatctatccttacatccattttaaatgttcccgcagaatattctggaattcttggttcagtaattttagttgggtaccaaagttggttgactaatgggctaaatgtttatcttctttctaatgaaaggggtacggatgtcataagcagaaacaaggagg

SEQ ID NO: 38247 - DNA, 232 bp, Gossypium hirsutum
  Clone ID: LIB3146-007-Q1-K1-E5
gttttactaaaaattatttcttcacaacaaagcttctaagccgatagtctgctttgacatgacctgatatacactaccatctgattacatccgcgatggaactcttttccgtttgcactcccccaactgttgaataacctacttgctctttgtatctgcaaaaaaagcgtaagacgcaccagcaaaaatttctcaatacaaatgctcatccattacacgatgtgatccccaa

SEQ ID NO: 38248 - DNA, 297 bp, Gossypium hirsutum
  Clone ID: LIB3146-007-Q1-K1-F1
actagcgcgatcccccgggctgcatgaattcggctttatgttccctcaacaattacttccaatacagacaacaaaaatatcaagtttcaacccaaacacaaataaaacatgaaaaagcataacagacagtataccatttcaggtctgtaacacgcttcaaagaatacaagctagcttaacacggaagcaactggtagtaaaagacatcatacgcacactcaatcacaggaacttgttagtactcattatgttcacgctgattacccttaggctgctcattaccaacttgtccataat

SEQ ID NO: 38249 - DNA, 270 bp, Gossypium hirsutum
  Clone ID: LIB3146-007-Q1-K1-F12
aaaagggagcccacgcctcggaaacctcttcatacttcattttattgcggacctgcctcgttaggaagggttttcaactccgtgagtttgaaagctaataaaatggtaaatttgtgctctggcccccaagaatcaaacaaaatgtacctaataataatagggcggacgtttaaggatccaactttcttcgcttctgcaactcataatcttctatagtgcacctaaattaatcactggccgactttacaacgctgactgtaaaaccctgcc

SEQ ID NO: 38250 - DNA, 112 bp, Gossypium hirsutum
  Clone ID: LIB3146-007-Q1-K1-F6
ccacgcgtcccacctcgttttttgatccttatgttggcttgagattggtcctacaagatcacacattgttgtgattactgtcggcctacttaaaggactgctcaactgtctg

SEQ ID NO: 38251 - DNA, 305 bp, Gossypium hirsutum
  Clone ID: LIB3146-007-Q1-K1-H1
cccacgcgtccgcccacgcgtacggtggtttcgagaccatgtataatgggcacacaggcaggcggcttactgctatgatattcttgggacccacgtattaccaacgactaaagcacatggtcgacgataagatccattcacgtggtcggggtcctgttcaaattctaacgaggcaacctgcagagggacgttctcgtgatggtggtctgcgttttggagagatggaacgagattgcatgattgcacatggtgctgcccatttccttaaggaaagattatttgaccaaagtgatgcatacagagtc

SEQ ID NO: 38252 - DNA, 223 bp, Gossypium hirsutum
  Clone ID: LIB3146-007-Q1-K1-H6
ttcctttttaagctattaatgtaatgaccgaatatttaatgggaacagtatttctgtatttgttctttccttttttacattgtaatagttacggtgtaatttcgttgaatgtttgctagaaagagaaagttataatgtcaaaaataaaaaaaaaaaaaaaaaaaaaaaaaaaaaaaaaaaaaaaagaaaaaaaaataaaaaaattggaagattatttaaaagg

SEQ ID NO: 38253 - DNA, 242 bp, Gossypium hirsutum
  unsure (1)..(242): unsure at all n locations
  Clone ID: LIB3146-007-Q1-K1-H7
tatttaggggttatgtatgaattgatgggtggaaaaaaatattaanaatagagtataatagaagagtnggtattgagtgatgttagttatattgaaaaaagagatatgaagattttgttttggagaggggtaaaaaaaaagacatttattatttgaagtgatttttttgtanttgagattagnaagattagggatatatatttaggaaattggagaaatagtgattggaattttttagggga

SEQ ID NO: 38254 - DNA, 356 bp, Gossypium hirsutum
  Clone ID: LIB3146-008-Q1-K1-A1
ggattggagggtataagtttgttgacatcctctaaagagctggttgatcttataaagaacgtagatgtggtttttcattctaaacaagctgtatcaagaaaatcagcactcaatagcttgtatagaattgttccttcaattcgtgaacaattgaaggattgggaggatggattatgtgaaagtgatgctgatggatctttcttgcatgaaaactggaacaaagatctaaaactctttagtgatggggaagatggaggacaacgactacttcagttgtttatattgcgtgcagaagctgagttgcaaggtggtgatattgcacacgcgcacagcctgcagatcatagattcattaaa

SEQ ID NO: 38255 - DNA, 396 bp, Gossypium hirsutum
  Clone ID: LIB3146-008-Q1-K1-A12
ctagttctagatcgcgagggccgcccttttttttttttttttttttttttttttttggataccactcaataaccatatcataagaccatatatataaaatgattataatgttatacatgccatactcaaaatatacaagccattatgccaagatggtatacgaatagtgtgaacgagcctccgaccattcccaattttcgagtttacttgtcaaaactacaaaaaatgaaaaaaagggaatatgcataaatgcttaataagtttacatgcaaatagcaagtaagataaccatataagcaaacataaaacatcatttgcataatcatcaccaagacattcatatcacattttcatttatcattttaccataatggtgtttatatcgattttttaacc

SEQ ID NO: 38256 - DNA, 168 bp, Gossypium hirsutum
  Clone ID: LIB3146-008-Q1-K1-A6
cgcgtccgcttgtattgcttgaaaaagggaaagcaatttgttttaagtgaatcccatgtcacagatgctggggctattatgagagaacagacggtagtgactatataatgattgtaatcattgtctaaacttttatgagattattttttataggattggattgattaa

SEQ ID NO: 38257 - DNA, 404 bp, Gossypium hirsutum
  Clone ID: LIB3146-008-Q1-K1-B10
tatcatagtgctgttttaatagattgtgtattcaccattcactctacaaaagccagggatgcttgtaatggttctagagtggtcccacctacttctgttgtgatggagcctaaagtggccagctctgaatacaaataaaaacctttcttggaatcttcgtattcagcttctcttgatgttagttcttctagggcttatgttgctagagagtcttctgtagtgactgcattttgttcccttgagttcagaccattcaatatctagatcttttcctgatcagattgcaatttccatttgaaagttacatggaatccttctgtttataaatttagaaatcttttttttatttctaatagttgcttgaaaccttcactttattgcatactaaatttgctttgattgtt

SEQ ID NO: 38258 - DNA, 404 bp, Gossypium hirsutum
  Clone ID: LIB3146-008-Q1-K1-C1
cggacgcgtggggtctaccgtaatggactaaattcttttcccggtacatggtgattattccgatattattacgtatatttataaatatacgggaaatcttgccttttgaggccgaagctttgtggttgaacataagcgcgagcaattcggaggtatgaattagtttgttttcgtttttggtgcaacagaataaaagaaacaaggttaagggatgtcaatgttgtgagatggtggtgactgtttttgttttctggcaaagagaaaaatgatgtgctcatgtgtcatgctcagggacattaaagagggggaaaatattatattgttgatcttacatggtattttagtggtggaagtaagctttgaagttaaaatttgtaatagcagttgactcaaaagtcatttta

SEQ ID NO: 38259 - DNA, 301 bp, Gossypium hirsutum
  unsure (1)..(301): unsure at all n locations
  Clone ID: LIB3146-008-Q1-K1-C12
cccacgcgtccgggctaggctaacgctgaattagtacatgtttatatgctgtacagtcgcatattggctacagtaattgctctggcagttttaaatttgccaccgttgttccatttaaatctgccttggaagtagaggctcgttaacgattcatcacattgttgagtctttcctttgttgagaccctctttgcaggtagtctttctattacattttaggttgtacaataattgcatcaaattagtttattgctaccatgtgttggttagtnaaaaaaaaaaaaaataaataaaaaataaaa

SEQ ID NO: 38260 - DNA, 311 bp, Gossypium hirsutum
  Clone ID: LIB3146-008-Q1-K1-C8
aaaaataatatgagagatagagagtttctttttaagcgtgactttacatagtccggggggcacctactaacactatggtagctattaatccactcattttaatcctatgacatgatctatattttatactattcattcttaaaaagaatcgctgcattgtatttttttcattttctaaggtctttagttgtctacagaacctcactctaccatgatggtttactggatgaacatttcaccctacatttattcactttcagatgaattttatactataattttgctgctgtatgtataatattttttttttt

SEQ ID NO: 38261 - DNA, 344 bp, Gossypium hirsutum
  Clone ID: LIB3146-008-Q1-K1-D10
gggtaccttttctttttttatgataagctcctaaaataggattatatttctcctcactcataacttcaaaactcttcttgtatgggaacgtggttggatgaaaattactgttattatgattcaagtcaaagtcacacattagatccaaaaagggaaagattctgctaccacgagttcttgaactatgcctgtagcatgtcttcgtcgattttgttatattttttttctatttccaattcatgacgaggcaaagcttgttatttgtttgacaggaaagtattgcagcagaatttttggacaggcttgtgaaatggggctgatcaattaggaaccatagtcgagat

SEQ ID NO: 38262 - DNA, 402 bp, Gossypium hirsutum
  Clone ID: LIB3146-008-Q1-K1-D7
gaagaagcttaatgaaagactttattcccttcgatctctggttcccaaaatctctaagttggatagagcttcaatccttggagatgcgattgagtttgtgaaggaactggaaaaccaaaagaaagaactccaagatgagcttgaagaacattcagataacgataatggtgctaagaaaacaggaatgaacggagtccacaaaaagttccaatctgagattttcttacaaaatgatcaaatccctgtgtattttaaccctgaacatgacaagggaccaaatggctttcctgttggaggtaatggcagcgtctcaagggcacaaaatcaagaagtggacacttgtgcagacaagacacagcagatggaggtacaagttgaagttgctcaaatcgatggaaacca

SEQ ID NO: 38263 - DNA, 402 bp, Gossypium hirsutum
  Clone ID: LIB3146-008-Q1-K1-D8
gtttgataagtctcgaaaagtaggtggaccaagggccttgcatcctagccagtgctattgcttgggggttgaagacatggagctactatcaggagaagagcttcatacgccaaattcattcctagttatgttaaatgggctgattcttggcaaacatagaaggccacagctatttcaccaatacgctgatccttctcgtagttaatgggccaactgagggtcttgctctgatatatgtaatactttttgacacaatttttggtggttgaaaattataaagattttgcattcttagactatgcaagagttggtagggcattggccttatacgaggttggaaacgaagaagaagcttttgtagagatggaagatgtttcaatatctttaaagggatatccaggt

SEQ ID NO: 38264 - DNA, 401 bp, Gossypium hirsutum
  Clone ID: LIB3146-008-Q1-K1-D9
cccacgcgtccgcccacgcgtccgtgtaggtgcaaactcgacatccgtgcagtgatcggcagaggagagagcagactttgaaacctcgtcgttatctgagccaccaatgctttctgttacatgaagtttgtgacatcaatccgattaattcccggcctgaaatttttttttctgcttgattgtgccggtattagggaggcgggtcacaagatttcaggtaacaaactatggatggatcatcgatcactgtgggttcatttgtattaaattataaacagacagctatagaaagctttatatctagttttagtcttatttgcaaaatgttagctcgagaagttaatgcatgttcttgtctgtcaaggttttctttatttttttgatgatgcctagattaaccc

SEQ ID NO: 38265 - DNA, 264 bp, Gossypium hirsutum
  Clone ID: LIB3146-008-Q1-K1-F11
cccacgcgtccggtggtggtatgcctgtttttggtggtaacaatgagggttaaaaagggattggaggtaagaaaggtggtggtgctggagggaatcctaacggggggaatccatatcaaggtggcggtggttaaaactggtggtaaaaatggcggtggtttaccttatgagctgcagaagaatggtggtatcaaccgtgatggaaacggtggcaaaaagggagctccctactttgtttccgatgggatccctatcatgggatgc

SEQ ID NO: 38266 - DNA, 217 bp, Gossypium hirsutum
  Clone ID: LIB3146-008-Q1-K1-G12
tcgtccacgtttttttttttgtcattgtgtttttgtgccgggtcaaaactcataaatggcggatagcattggtccggagcgtcctgtttatgttattagatcatgttcggctttcatttataaaacacaccttaccttataccccaattgttttgggtattaatataaataaaagtttttttgtaatttgtttaaatatgggcggccgttttagagg

SEQ ID NO: 38267 - DNA, 404 bp, Gossypium hirsutum
  Clone ID: LIB3146-008-Q1-K1-G3
cagagccgttcactcataaacaaggctaaaattgttgctgccaagaaagatataaaagctcttgaggagcttgcaaatgttgaggttgagaagtttatggatctctggaatggtaataaagccttcagggatgattatgagagaagaattctgaaatccctggacactcgactattaagcagggatggtcggataaggaatcctgatgagaagccattagttctaccagagataacagtacatacgggaactgaagcacttccaaaacctggtgcgaaacaaccaaaggaagaagccaaatcctctccccaaccaggtactaaacacctgaaaaagggccagaaagatgctgagaccaaagcaatggagtcaaaatcctcttcagagaatgttgtagcagacaa

SEQ ID NO: 38268 - DNA, 187 bp, Gossypium hirsutum
  Clone ID: LIB3146-008-Q1-K1-G5
agaatgtgatgatgtagtgatgtaggccatcttctattcagcattgcagattgactgtcattttatgcccctgccgtctgggccgtatgtactcacaggtgcggttcagaggctttgttgtatatatagaggataattgtttcagtttaccaattgatcaggtataatatcccaagaaattacatgt

SEQ ID NO: 38269 - DNA, 210 bp, Gossypium hirsutum
  Clone ID: LIB3146-009-Q1-K1-A5
cccacgcgtgcggtcttagtgcgggatcttttttctgcgacctaaaccgctacccgtccagcgagattatctctagcgtcatgaagagcttacctgcataggttatgagtttctatattagaaacccaaggcatggcctcaaaatatgacgactgacttcacacacatcatgtcgacggacgcatatgtcacttacagatgtccttctat

SEQ ID NO: 38270 - DNA, 427 bp, Gossypium hirsutum
  Clone ID: LIB3146-009-Q1-K1-A8
ggagtgcatcatgaaccacctttctagatgttgcggcataggaccaaaataacatccagctgttacattcatacctcaaaggcagggtgtgcaaaaggttttcaatcttttgagcttaggatatgaacgcagttgtacagaggggtaacctttctttggattgagaagaggtgtcatatttttccttctcaaccttatctttatgttactggatttaaaggtcagtaatgattcaggtaactgcttccttgatgttcttatcaaaatgaaacatgttttaaggaatattttgtgctcagcatgtataattatatttgtatccacatcaagagtccagttttcactgctcggggatcatcttctggatatggtagcaaaaaaaataaaatcctcaatccggtggttgcaaggaatttcatggaggaac

SEQ ID NO: 38271 - DNA, 437 bp, Gossypium hirsutum
  Clone ID: LIB3146-009-Q1-K1-B4
cccacgcgtccgcccacgcgtccgaaaaagttctgagagaacaaattgctgacggacagcccaggacacatatgccatggaagaagataattgttgtcgtggagggtatttatagtatggaaggggaactttgtaagcttcctgagattgttgccatatgcaagaagtacaaggcttatgtttatttggatgaggctcacagcattggggctgtgggaaaaactggaagaggcgtatgtgaactcttaggagtggacactgctgatgtggatatcatgatgggaacttttacaaaatctttttggtcttgtggtggttatattgctgggtccaatgaacttatacaatatcttaaggacacatgtcctgcttatctatatgcaacatcaatatcaccttcagctgcacagcaaattatatcttcaataataggttat

SEQ ID NO: 38272 - DNA, 421 bp, Gossypium hirsutum
  Clone ID: LIB3146-009-Q1-K1-B6
cccacgcgtccggtcatttgccggtgagtttgttgaactttgagaacttgcaggagatcaatttagcatacaatggattgacgggtcgggtaccggtggcgtacggacagcgattggggagaccgtggaaaagcttgtttttggatgataacttcttgtcgggtcggattccacggcagttcaatagtagtgcccttaggataagcggtagccttgcgaataattgcttgagttgcccggtgacgatcccgatttgcggcggtgggcagaggccggcttcagcttgcattggtgagattggtaaccactgattaaaacggtgaccaaaggatttgaaataaattgggcaaaaagaacggaaatgtaatttctctttctctatagatttagatcttacaatttgtttacactggcatcattc

SEQ ID NO: 38273 - DNA, 444 bp, Gossypium hirsutum
  Clone ID: LIB3146-009-Q1-K1-C2
cccacgcgtccgcccacgcgtccgcccacgcgtccgggtgacgcaacggttcgggaatctagatttcaagctaaaatttgtggaggtaccttcgtgatccatttacactgtaatttgaatgtcaagcaaaaaaggatggcgtgttagagcttcatgtgaccacaaatcttgggaatcttaaatttgactttcacctggtttattgcagcacaacattcgtttccttcaagaagttatccaaaatagacggtcagatctcttggaatggtgtatcattttcttgttgaccatcgagaatgtaatagcaatatacgagattgtccgcgaatcaagcggcgtttctctgtgatttggctagctgatgaggaagtgaggatatacaaacttgattacaggtacaaaaggtaaaagtagtttattacccagaaaaaaaggaaatttcag

SEQ ID NO: 38274 - DNA, 177 bp, Gossypium hirsutum
  Clone ID: LIB3146-009-Q1-K1-C8
cagcttcttaatccccttacaagacatatgtttatgcggcgggtttaccaatggctgctggtagggctatattcaccaggtgggagacgaaagctgtagctgctgtgaagactaatacgagtacatatattatgccaaaacccgaagcttaattggaggcgaagcctattgttaagc

SEQ ID NO: 38275 - DNA, 388 bp, Gossypium hirsutum
  Clone ID: LIB3146-009-Q1-K1-D3
cccacgcgtccgctccaaaggtgccagatttcaatctttagaggccaaggctgtagatgataatcaaagagctaaaccgaagagcattgtttgcgctgattgtgacggaaatggtgccaaacagtgttctcaatgcaaaggtaccggagtgaattccgttgatcactacaatggacgatttaaagctggtggattgtgttggctttgcagggggaaaagggagattttatgtggagactgcaatggagctggtttcattggtggatttatgagcacatttgatgactgaatgtaaaagaggctcagtctttttgaatcagtttttttcatggatgtttactataataatctgttgtaacttctgttttagttcttagatgaacgatac

SEQ ID NO: 38276 - DNA, 190 bp, Gossypium hirsutum
  Clone ID: LIB3146-009-Q1-K1-D6
cttagtactttagcagttttaaaggactttgttttatggcctaacatcatgcagtggggaaagggatccaatatgttgaggcagggtaggaaatgcaaatggaaagtccatttggatggagctaaagctgagttctttttatcaatatatttgaacttgctggtgtaaggtaccttggttttgctatcta

SEQ ID NO: 38277 - DNA, 279 bp, Gossypium hirsutum
  Clone ID: LIB3146-009-Q1-K1-D7
cccacgcgtcctcccactcgtccgcggactcttttgtggaatttcaaggctaatctatatattgggattggagcagctctcattatatattttgaggttccttcaaatttccaggctcaataatttatatcttgccaaaaaccgaaaataaaacgaaagctaacccaaaggaaaagccatctaaagcttggaggactgcaactttagacttttcctgggaagaaggcggttgtccctattgcttctcccaaaaaggctgctcgcgcctaataaggctcc

SEQ ID NO: 38278 - DNA, 181 bp, Gossypium hirsutum
  Clone ID: LIB3146-009-Q1-K1-E2
atgaaaacgacgatgctgttgaggctattgcttttgttggttgtgcaattgatgaatggagtgatgaaattgcaaggaaactgggacgaggatgatgacgagctacgaaggtgatgatgctattgaggctattgctgaggtagaaggagcaatagatgttgggcgtgttgaacttgaaatg

SEQ ID NO: 38279 - DNA, 428 bp, Gossypium hirsutum
  unsure (1)..(428): unsure at all n locations
  Clone ID: LIB3146-009-Q1-K1-E3
gcaccaaagaaaaccccggtatcttttttcttttttccttattttctttggtgctaagctttgaacataaaatggtagtacatacaagcttgcaaaatctggagctgctggtgtggtgggtgtctttgacagtctccaccactgattccggtatcacgcagtctttaatgcaattttcagacgaggatcctttggctatgtaggtaccaaagcaagtcccgtgcaatatatatatatctttaattcccattctctctgcactaacaaaatatattagatttgtagataattattttgcattgcataagatagagtttatatacactntatgtaggagagacaatgtcatattctcccataatgctttacccatgaatatttcatttgtagtttgtatcatatgagaaatgttaggcacttcattgcat

SEQ ID NO: 38280 - DNA, 397 bp, Gossypium hirsutum
  Clone ID: LIB3146-009-Q1-K1-E4
tgtaatccagtttatatatatgtttaaactagttgagcagaaaatagaaagacataaaaaaggtagcttgattgggaaaaaaaatagggttttgggggttatatgcttgaatgtgcagataatatgactttgaattgatgatttgcatgatctgtatgaaggtactttgttttaacacccccctgagaagtctgaaaggtgtgaatgaatgcagttaaaattggagatttcagtccttggcttttgagttggaatgatgtacgggtgttttattaggtaaaaatccagtggggaacaaattgtgctaataactttttgtaagtaaatattataagctgggtatctgctagttttcttatttaacacataagatgtacgtttattgtggtttcctttt

SEQ ID NO: 38281 - DNA, 178 bp, Gossypium hirsutum
  Clone ID: LIB3146-009-Q1-K1-E6
cccactcgtacatacacacatgctaaaacgcgttgagcagaccttggatagtcataggagagggacctcatgggtagaaaatgacaggcctgtgcccacatatacacttgctattgctcattctacatctgtgatttgcatttgcgcatgaacagaaagatatatcttttcatgaaca

SEQ ID NO: 38282 - DNA, 332 bp, Gossypium hirsutum
  Clone ID: LIB3146-009-Q1-K1-F3
ggaaatctgttggaagtagcacacgtagttcctgccttcaatcaaggggaacttcaccctgtatggcagcagcctaagctgcacgaatattgtcattccaagggaattcacttgtctggatattcaccattgggtagccaagctggagaaaatatcaagagaagagttcaggaaaacccggttcttaaaatggtcgcagagcgattggggaaatctccggcacaagtggctctccggtggggacttcaaaggggccacagggtactgcctcatagcactagtgaggcaaggcttgaagaaaaccctgatgtttttaactggtctattccaaa

SEQ ID NO: 38283 - DNA, 236 bp, Gossypium hirsutum
  Clone ID: LIB3146-009-Q1-K1-F5
cacatgactatgagcaaatgcttttgttgttgctgacagacctacgggtctgtatcctcacttggggtctccacgaaggttgacgataactaactttgtatgacttccttgttaagatgttgccgccacttatatctggagaatgccttactgtattctttaatataacatctagttgttggtgtacaaggcatcaataggcatccgctatgggttcaaccccaattcattaggtg

SEQ ID NO: 38284 - DNA, 435 bp, Gossypium hirsutum
  Clone ID: LIB3146-009-Q1-K1-G1
agaacatcaaaagttgtattaaagctctttgcaatttcaatgctgccaaaggcttcgaaataggaaaggataccactttaccagtaacgtatatacgttccatggaggctcctttggaaaatcttggaggaaagcctccttcagagaggaacattctggccttctttgctggggggatgcacggttatcttcgaccgatcttactacagtattggcagaataaagaatctgatatgaaaatctttggaccaatgcctcgtgatgttgaaggtaaaagaaagtacagggagcatatgaagagtagtaagtattgcatatgtgccaagggttatgaagttcatacaccaagagtggttgagtcgaattactatgaatgcgtgccggttatcatatcaaataactacgtgccaccattctttgaggtgttgaattggg

SEQ ID NO: 38285 - DNA, 283 bp, Gossypium hirsutum
  Clone ID: LIB3146-009-Q1-K1-G3
cttttagcagatgttaccacaaaattatagttcattttcttaaatccaaccgttcaaaccgcaactgaaactacagattggttgaattggtttatgtgatagcacaacacaatttaactttcatagctcattttgcagaggcagattttgttatgctactgcgataaatacatttttccatgtatatagatggatggtgacatacatttcaagtgtaacctatgatgtctgcatcattaaagattcaatatcgatggtgatcatctacgaacacccttttccc

SEQ ID NO: 38286 - DNA, 112 bp, Gossypium hirsutum
  Clone ID: LIB3146-009-Q1-K1-H2
cttgggtaaacgctgaattcttgctagaaaaatgtttggttggcactttggatgatggcgtaggcacccatacattattaaaccgcttgttggtactttgccatgttgtcta

SEQ ID NO: 38287 - DNA, 331 bp, Gossypium hirsutum
  Clone ID: LIB3146-009-Q1-K1-H5
cggacgcgtgggtttaggttgatcttggttgatagcaggatccaccgactcgcccgctattacaagaagacaaagaagctgccaccagtgtggaaatacgagtctaccactgccagcactcttgtggcctagataaatcaaattttgaactgtcctcccgtgcttcaattgatattcttccggatgggctagcaggagttggactttttgtatttacattctattaatgccgtaaaagaactagtccacttaatttgaagttgagatacttaatgtgttaaatcttatgtttagtatattggaataattcattttcatttcattttttcaa

SEQ ID NO: 38288 - DNA, 432 bp, Gossypium hirsutum
  Clone ID: LIB3146-009-Q1-K1-H6
cccacgcgtccgagctgttttcctattagtcatggtccatctgccagacgcctccatgaattgtttctgcgccaattttgtgatgctcacacttgctctggaaaagcaaaacctttccctagaggaggaaagaagcaaacaaatttactctacatggctacatcaatactacttatgatgctgcttcctcttttctatcttctttattatttatatcaaagagacatgaagcaagaaacccaagtgctaagacgagtgtcacaagttggacggaaagcaaaaccttcatagttgtgaggaagatgataaaacgatgaatattgcttcctccgagttttgcccttaacttcattatagcttcgagtcagaaagttgaaaaacaatgtggttgcgtcctttgaatgtcacggacatttcagtggcatgaatgcc

SEQ ID NO: 38289 - DNA, 312 bp, Gossypium hirsutum
  Clone ID: LIB3146-010-Q1-K1-A10
gttaaaagggaaattttaattgtattcccttcaaaattaatggtgcattttggtgtcttttaacccaaaatttttaaatttggcccaatttcattttggcccttcctatacaaaaattttggcttccttttaatcttataacatttttagctagtatactaacaaagcctttaaacagctattagactatattttaattaaataagcctctatctcatgataagtactttgacaaaattctaatagacattaacaactcaaggaaggaagtgaataaagctctagtttgacttatttttggtactagcatct

SEQ ID NO: 38290 - DNA, 333 bp, Gossypium hirsutum
  Clone ID: LIB3146-010-Q1-K1-A7
cggacgcgtgggtggaatatctccattatgattgtgatcccggtatagttcatcgagacatcaagccggaaaacatcctcctcgactccgatatggaaccgcatatctccgattttggaagtgctaagctcctcgacgagtctgtggcttcagaaccgtcgatggtagttgcgggcacggttggacatatagctccagaaaatgcattcagaacaacatggagcaaagaagcggatgtgtatagctatggggtggttttgctcgagctgataaccgggaagagggcattggatccatcatttatgggggagaccgatatcgtggggtgggtca

SEQ ID NO: 38291 - DNA, 335 bp, Gossypium hirsutum
  Clone ID: LIB3146-010-Q1-K1-A8
cccacgcgtccggtaacccttttacagctttttactttgctttatatagccaaaaataatgaaaaatctttcaaaaattccccctttttgtcgtaatttctgctgccgtttgctactcgtgattcctgattttgttgcaagtaagcattggattaaagtacgtgggctatgcgagggcgacgtgcgtgacatataggctgctgtgcgttcgtgcgtggagacgattactgcggtgtcgaggctgggaagaaggctgctgctgaagattgtagggttttcagatttttcagttttgggttgatttgggttttagggtaatcgggctggtgaaattg

SEQ ID NO: 38292 - DNA, 335 bp, Gossypium hirsutum
  Clone ID: LIB3146-010-Q1-K1-B11
ggggggggttcgagggttgatggtgagtgacaagaaaggttgaagggaacccaagttggaggaggtttttttttgtttgtcatattgtcaaaaaacccaaactcccttttgttcttttttcttacatcacagtctgattggagctcttcatttcaatccttttggtttttattttgccctctaagttcattaatcattatatcaccaccaaattgctttcactggctctttttaaactctttttggccattgcagcatcaaacataaagttgcaatggacggttatatctttttaaaacaaaatcttatctaagcattcaaacgaaagaaagtgg

SEQ ID NO: 38293 - DNA, 116 bp, Gossypium hirsutum
  Clone ID: LIB3146-010-Q1-K1-B2
gccacgcgtccgaagcttgtggtaaagatgttctgttggcttaacaaggttcttacaattggcttaagatttgtaaacctcggaaaatataattcattatgatgattttacccggt

SEQ ID NO: 38294 - DNA, 343 bp, Gossypium hirsutum
  Clone ID: LIB3146-010-Q1-K1-B4
cccacgcgtccggaaaaaagttcttcttgcattgcaagcctttactctgcaactccaaggctgcaatttcaatctctcaacaacatccgagttcccaaggcggattggcagattatccgaggaaggacatggcttaacaccatgcaccgaaggaagccttgctccaccattccctgctagcacaaggtacaagcttggaagaacatctgaaacatatgattggtctgatttggagacctgcaacaacgaaagaagtgttcttagtcagtttcaagatgagcatttcaggctcaagaataaaaggtacactcctaatgcaagggaaaggatgtataaatttgga

SEQ ID NO: 38295 - DNA, 227 bp, Gossypium hirsutum
  Clone ID: LIB3146-010-Q1-K1-B7
atggattttcctcatactgaatctctggccataaaatttccacttttgataagtaaactttgttctataaaaaacttttaactgtcacagatttagatttagaccaaattttgttccttcactgctttcaccagttggtgtaatgtgttgtggctcatgtacagaagagttgtgtatcattgtaatctgcagaccaacacgattcaattccaaatggctttatatgg

SEQ ID NO: 38296 - DNA, 325 bp, Gossypium hirsutum
  Clone ID: LIB3146-010-Q1-K1-C3
gcagcattttgcccaaggaaaagtaaaaaaaagaagctccactactatgaattactttttatgtaaattacaggttctttttgcagtgcaaggtagatattagatatgttagtttgctaagcaaaataaatcaaatggctaagcagccctttgtttctttttctgttagtagagtgcatttaatttatctctgcaaggcggagtcagaatttttctttttggtactgaaattaaattatatatttttatattttattattttaatagtctacatctttataatttttaaaaaattaaattaaatttttattattttgtggggagc

SEQ ID NO: 38297 - DNA, 334 bp, Gossypium hirsutum
  Clone ID: LIB3146-010-Q1-K1-D6
ctggaggaagcaatactaagaatttgtcttattcttccacttctggacaatctcctgcccaagcaaagagatctaaacccaattgtcagggcatacatgttccgcgttgccaagttgaagactgtaactttgacctctcctcagcgaaggattaccatcggaaacacagaatttgtgaaagtcattcaaagagtccaaaggtcattgtacgtggtcaggaacgccggttctgccaacagtgtagcaagttccatggcctgtcggagtttgatgaaaagaagagaagttgtcgccggcgcctttctgaccacaatgcaagacgccgcaaaccaca

SEQ ID NO: 38298 - DNA, 328 bp, Gossypium hirsutum
  Clone ID: LIB3146-010-Q1-K1-E5
atctcacttacatatcatgcatataggctgttactgaagattcactgtggtagctcaaccggtttggatgctgaatcacgttcatcatgtaagtccccttttaaaggattgagactctattgggatggcatggaactcggtaccatggtagccatgaccgtcggatatcggatactaacctatgctttcttaaggtgaatgaacttaatgacaataaattagtctagattcttcaacaatcttgactggtgaacatgaactttatcgagccaataagtaggattaaaagaaaatgtccacgttgtaaaaaaaaaaaatccttaataag

SEQ ID NO: 38299 - DNA, 332 bp, Gossypium hirsutum
  Clone ID: LIB3146-010-Q1-K1-E6
gtaccaagttcacttccactgaaaaagaagaaaaaaattaaagtatatgttgaagctttacaaccaagccatgtcagattgtgagttgattcatcccatttttcacgacttgttccatggttaaatagtgttattagtccttggactatgcataaatgttgatttagtcattgtgctttaatttagttaattttagttcctatttcaaattttgaaaatttagcttagactaaacagtaactgttaaattcaatagcagcctccatatgaagtactccttgtttgtgacgacctccatggtgttagtatgctaagaatggttattgtataac

SEQ ID NO: 38300 - DNA, 333 bp, Gossypium hirsutum
  Clone ID: LIB3146-010-Q1-K1-E8
cagaaagccaaagcctcttgctgcatatctcttcagtgatgatgaaaagattaagaggaagtttgtgcaaaatatttacgccggaggaatggctattaatgacaccattctacaagtcacagttcccactctacctttcggaggagtcggggagagtggaatggggtcataccatgggaaattctcttttgatgcttttagccataagaaggcagttttatacagaagttttgcaggggattcgccgactaggtacccaccatacacaccgggaaagaaaaagcaaataaaagccttactcagtggcaagttacttaacattatgcttgcttt

SEQ ID NO: 38301 - DNA, 344 bp, Gossypium hirsutum
  Clone ID: LIB3146-010-Q1-K1-F12
atcacgaacctcggtgttattttagcccaaatgagggtttaaatagatattgcattagtaaattatataacctgaacaaattgtccagatatgttgtagcgaaatctgaacttgctggggctgggacacctgatgcttcctattctttatcagaagttaaactatcttcgaaagttagaggagtatgcttttatgctgtcacggcaattgcagctatttcacttattgggtttatgatagtggcacatccctttgtgctcttgtttgatcgctacagaagaaaagctcagcattttgttgccaaactttgggctgcagcaactgttgctccgttctttaaaatt

SEQ ID NO: 38302 - DNA, 330 bp, Gossypium hirsutum
  Clone ID: LIB3146-010-Q1-K1-F3
aacatatttaaaaccaaaaaagattacctattcttttcttttaacttgctacttttttggtatttctccatgggtaaaaattacaatatattgttatgacctttatagccaatattacactatttatttctgttttgctactattttgtgtctgttcttgcattatttggtctttgtcctttttctttctttttcttgcagatggcgtggaggtcaacgatggagatgggaagcgtacccttgccattttggtgcaacgatggcaatggcatgtcagacctcgggcagcgagcacgctgacaaggcacaaggagcggggccaatggaaac

SEQ ID NO: 38303 - DNA, 340 bp, Gossypium hirsutum
  Clone ID: LIB3146-010-Q1-K1-G12
acatttcaaccaaattttacttgccctaaaatcaatttgtttgggctgattctagcaatcggggaaccaccattccatttggtggccgacaatgcacaagcagcgaccatattatcactgacgagtgctctgctcaaggaaatattgcaactgctgtactgaggaaacgggaaacggctcgtgggcacccatccccttaacaatgttctggcgtttcccagaaatgaatggggttcccggctgctgatttactttgacaacaatatgctatagcgtttgcgagattacaattgctttttaggttcgcgtctatttaattgggaattaaaaaaatggcttt

SEQ ID NO: 38304 - DNA, 327 bp, Gossypium hirsutum
  Clone ID: LIB3146-010-Q1-K1-G2
aaggaatagctttaggagatttcaacggctcaggcccgggcggagcgggccacaacagagaatctgatcctgtgggaaaattcaaatgacgataaaggattacttggctatttgcaaaccaagggaatagaggcggggctgatgatgggtactaaaagatcacaaggggagaagacgagtgcggattcgaactcgatgtcgtaaccggattgccttccaccaaaaacctagatcgaggaggtgcagatactggaattggcgaagatgcttgattttaagaaaagatcatggaaacagggggacttaaaatgagagtttataaatgaa

SEQ ID NO: 38305 - DNA, 340 bp, Gossypium hirsutum
  Clone ID: LIB3146-010-Q1-K1-G3
gagctgtagcaggggtggtaaccgccggagctttctttttagctctatttgccggtgctttaatctgggtttactctaaaaagttcaaacatgagaacaaattaggccaatcttttgcatcggagataatcaaatcgccaaaagaattcacttacaaagagcttaaagccgccacgagatgcttcgatgccaatagaatcatcggccatggtgcttttgggactgtttataaaggtattttgccggaaaatggtgacattgtagccgtcaaaagatgtagtcataacagtcaagggaagaacgagtttttagctgagttattaataatcggaactctaag

SEQ ID NO: 38306 - DNA, 342 bp, Gossypium hirsutum
  unsure (1)..(342): unsure at all n locations
  Clone ID: LIB3146-010-Q1-K1-G4
gcccaatactagagtagatggcaaaggagtcttcattagaccattttgtgttgaatgtctcgaattttgcttcatgacatttaatgtcggaatctggtcatcaagagttaatagaaacatgaccaagatgattgggtttcttcttagaaaacaatggaaacgtaaattgtttttctgttgggaccggaaactgtgtacaattacaaaattcaaaaccctcgagaatgatgagaaaccgcttgttttgaaggaacttataaaattatgggataggtgtttacccgagcttccttggaggaagggtgactatgatgnaatcaacacactattgttggatgattc

SEQ ID NO: 38307 - DNA, 336 bp, Gossypium hirsutum
  Clone ID: LIB3146-010-Q1-K1-G8
cccacacgtttgagttattaaatcagtggcatctctcaggtcccaagcagcagcaatacttgtgctgctgactgtaaaagcaatgcaaacccagacgggtaaggcacaaagctgcagtactgagctcaccaacttgaatgtgtgcgcaccatttgtggtccctggtgccactcagaccaaccctagccctgactgctgtgctgcactccaatcagtgcaacatgactgcctatgcaacactcttagtattgcctctcgactcccttctcagtgcaatctgcctactctgacttgtggtaatcgatgatatgcagattagcgcatgattcttatgca

SEQ ID NO: 38308 - DNA, 330 bp, Gossypium hirsutum
  Clone ID: LIB3146-010-Q1-K1-H1
gcatctccctcgatttctactgcgtccaaacacatggttatccccaacctaactgcatgagcgcatgtacaagcttccgcgacaaaagaggaggcaatccgattctccaccactgacttggagaccaaaacctcccccctatcatttctgaccaccaaccccacggcagatctgaagtgatgatggttaaaagccgcgtcaaaattgatgcgcacggttccgttctctaggggtttccactctaaacaagaaagatgtttgataacccaaagtgcgtagcaaaacgttcgacactagctgctcgatccttctgcaaaaacccagatcatt

SEQ ID NO: 38309 - DNA, 343 bp, Gossypium hirsutum
  Clone ID: LIB3146-010-Q1-K1-H12
cccacgcgtccgatcagagtaaattacaagggtagtatgcttcagggtaagttcccgaaacagattgttccagccgatgagaagccggaaaaagtaaaagcggtggccgaagttccgaacccgaagcctgatcataagcctgcagatgtgccggagaaacaaaacaaggcagttcaagaaggtcatccccagaccaccctggaaaaacaaacaggtgatgattcaaatacagatggggtagccaaggaggctggcaaagtttcagagaaaacaccagacaaacaagaagaaatggaagatcaaaggcatgcatctaatggagctgatcacagacttatggaga
